(19) United States
(12) Patent Application Publication
(10) Pub. No.: US 2022/0205049 A1
(43) Pub. Date: Jun. 30, 2022

(54) METHODS OF DETECTING AND PREDICTING BREAST CANCER

(71) Applicant: Martin Widschwendter, (US)

(72) Inventor: Martin Widschwendter, (US)

(21) Appl. No.: 17/596,594

(22) PCT Filed: Jun. 12, 2020
(86) PCT No.: PCT/GB2020/051421

§ 371 Date: Dec. 14, 2021

(30) Foreign Application Priority Data
Jun. 14, 2019 (GB) 1908591.9

(51) Int. Cl. C12Q 1/6886; C12Q 1/6827; C12Q 1/6837; G01N 33/50; A61K 31/567; C07K 16/28; A61P 35/00

(52) U.S. Cl. CPC C12Q 1/6886; C12Q 1/6827; C12Q 1/6837; G01N 33/5091; C12Q 2600/154; C07K 16/2875; A61P 35/00; C12Q 2600/118; A61K 31/567

(57) ABSTRACT

The present invention relates to assays for predicting the presence or development of breast cancer in an individual, by determining the methylation status of certain CpGs in DNA from the individual, deriving an index value based on the methylation status of the certain CpGs, and predicting the development of breast cancer in the individual based on the breast cancer index value.

### SEQUENCE LISTING

[0001] The instant application contains a Sequence Listing which has been submitted electronically in ASCII format and is hereby incorporated by reference in its entirety. Said ASCII copy, created on Jun. 11, 2020, is named N416449WO_SL.txt and is 21,495,630 bytes in size.

### FIELD OF THE INVENTION

[0002] The present invention relates to assays for predicting the presence or development of breast cancer in an individual, by determining the methylation status of certain CpGs in DNA from the individual, deriving an index value based on the methylation status of the certain CpGs, and predicting the development of breast cancer in the individual based on the breast cancer index value.

[0003] The invention also relates to methods for monitoring the risk of an individual harbouring breast cancer or of breast cancer development.

[0004] The invention also relates to methods of treating breast cancer comprising predicting the presence or development of breast cancer in an individual by the assays described herein, stratification of the individual according to their risk, and administering one or more treatments to the individual based on their risk.

[0005] The invention also relates to methylation-discriminatory arrays comprising probes directed to the CpGs defined herein.

### BACKGROUND TO THE INVENTION

[0006] Breast cancer is by far the most common cancer in females in general, and a leading cause of death in young women¹. To date, the identification of individuals with primary cancer is achieved by assessing evidence directly from the tumour (e.g. imaging or detection of cancer cell products released into the system^{3,4}). Currently available early detection strategies, such as mammography screening, suffer from low performance in young women, over-diagnosis, and decreasing attendance rates, and its benefit on mortality rates has recently been questioned⁵. Developing models which allow for a stratified breast cancer early detection and prevention strategy have proven to be challenging, and the best predictive models combining epidemiological risk factors, single nucleotide polymorphisms (SNPs) and mammographic density have only led to a Receiver Operator Characteristic (ROC) Area Under the Curve (AUC) of 0.68⁶.

[0007] In contrast, cervical cancer screening (i.e. assessing cervical smear samples) has reduced the incidence and mortality from cervical cancer by more than 50%⁷. The fact that clinician- and self-collected samples show similar performance in detecting relevant cervical lesions⁸ is likely to further increase attendance rates.

[0008] Epigenetic (i.e. DNAme) changes have been identified in normal breast tissue adjacent to breast cancers⁹ and could potentially serve as a surrogate for both genetic and non-genetic factors including lifestyle, reproductive and environmental exposures contributing to breast cancer development¹⁰. A number of proof of principle studies, so far exclusively performed in blood, have demonstrated that certain DNAme (DNA methylation) changes are associated with breast cancer predisposition¹¹⁻¹⁶. Sample heterogeneity and the choice of surrogate tissue are deemed to be among the most important factors impeding clinical implementation¹⁷. Thus, there remains an urgent need to identify new methylation-based CpG loci, and sets of loci, which may act as biomarkers or which may contribute to the understanding of methylation patterns or signatures useful in the field of cancer.

### SUMMARY OF THE INVENTION

[0009] The current inventors set out to understand whether DNAme patterns may be associated with the development of breast cancer. The inventors have shown that DNAme signatures of samples derived from breast tissue and, remarkably, from samples derived from an anatomical site other than the breast identify women with breast cancer. The inventors have determined that the DNAme signatures can be characterized according to a breast cancer index value which can be used to stratify individuals according to their risk of harbouring breast cancer or according to their risk of breast cancer development. Moreover, the DNAme signatures were shown to be changeable in response to breast cancer therapies, thus indicating the dynamic nature of the identified predictive DNAme signature, and thus surprisingly indicating that the DNAme signatures of the invention can be used to monitor risk associations with breast cancer.

[0010] Thus the invention provides an assay for predicting the presence or development of breast cancer in an individual, the assay comprising:
[0011] a. providing a sample which has been taken from the individual;
[0012] b. determining in DNA in the sample the methylation status of each CpG in a set of test CpGs selected from the panel of CpGs identified at nucleotide positions 61 to 62 in SEQ ID NOs 1 to 40,753;
[0013] c. deriving a breast cancer index value based on the methylation status of the test CpGs; and
[0014] d. predicting the presence or development of breast cancer in the individual based on the breast cancer index value;
[0015] wherein the assay is characterised as having an area under the curve (AUC) of 0.6 or more as determined by receiver operating characteristics (ROC).

[0016] The assay of the invention may be described above and additionally wherein the sample from the individual is a sample from:
[0017] a. an anatomical site other than the breast, such as a cervical, vaginal, or preferably a cervicovaginal smear; or
[0018] b. the breast.

[0019] In any of the assays described herein, sample may particularly be derived from the cervix, the vagina, the buccal area, blood and/or urine. The sample is preferably a cervical liquid-based cytology sample, and more preferably a cervical smear sample.

[0020] The assay of the invention may be performed above and additionally wherein the DNA from the sample is derived from an organ comprising epithelial cells.

[0021] The assay of the invention may be performed above and additionally wherein the cancer is ductal carcinoma in situ; an invasive ductal carcinoma such as tubular type invasive ductal carcinoma (IDC), medullary type IDC, mucinous type IDC, papillary type IDC, cribriform type IDC; invasive lobular carcinoma, inflammatory breast cancer, lobular carcinoma in situ, male breast cancer, luminal A breast cancer, luminal B breast cancer, triple-negative/basal-like breast cancer, HER2-enriched breast cancer, normal-like breast cancer, Paget's Disease of the nipple, Phyllodes tumours of the breast, or metastatic breast cancer.

[0022] The assay of the invention may be performed above and additionally wherein the step of determining the methylation status of each CpG in the set of test CpGs comprises determining methylation β-values for each one of the test CpGs.

[0023] The assay of the invention may be performed above and additionally wherein the step of deriving the breast cancer index value based on the methylation status of the test CpGs comprises:
[0024] a. providing a methylation β-value data set comprising the methylation (3-values for each test CpG;
[0025] b. estimating an immune cell DNA fraction within the DNA provided from the sample; and
[0026] c. applying an algorithm to the methylation β-value data set that controls for the immune cell DNA fraction within the DNA provided from the sample to obtain the breast cancer index value.

[0027] The assay of the invention may be performed above and additionally wherein the breast cancer index value is termed Women's risk Identification for Breast Cancer Index (WID-BC-Index) and is calculated by an algorithm according to the following formula:

$$WID - BC - Index = {\sum }_{i = 1}^{n} \frac{μ - ( {a}_{i} + {b}_{i} ρ ) {β}_{i}}{σ}$$

[0028] wherein:
[0029] e. ρ∈[0,1] is the immune cell DNA fraction for the sample;
[0030] f. β₁, . . . , βₙ are methylation beta-values (between 0 and 1);
[0031] g. a₁, . . . , aₙ and b₁, bₙ are real valued coefficients;
[0032] h. μ and σ are real valued parameters used to scale the index; and
[0033] i. n refers to the number of CpGs in the set of test CpGs

[0034] The assay of the invention may be performed above and additionally wherein the set of CpGs comprises at least 500 CpGs selected from the CpGs identified at nucleotide positions 61 to 62 in SEQ ID NOs 1 to 40,753, preferably wherein the assay is characterised as having an AUC of at least 0.73.

[0035] The assay of the invention may be performed above and additionally wherein the set of CpGs comprises at least the CpGs identified in SEQ ID NOs 1 to 500 and identified at nucleotide positions 61 to 62.

[0036] The assay of the invention may be performed above and additionally wherein the set of CpGs comprises at least 1000 CpGs selected from the CpGs identified at nucleotide positions 61 to 62 in SEQ ID NOs 1 to 40,753, preferably wherein the assay is characterised as having an AUC of at least 0.77.

[0037] The assay of the invention may be performed above and additionally wherein the set of CpGs comprises at least the CpGs identified in SEQ ID NOs 1 to 1000 and identified at nucleotide positions 61 to 62.

[0038] The assay of the invention may be performed above and additionally wherein the set of CpGs comprises at least 2000 CpGs selected from the CpGs identified at nucleotide positions 61 to 62 in SEQ ID NOs 1 to 40,753, preferably wherein the assay is characterised as having an AUC of at least 0.81.

[0039] The assay of the invention may be performed above and additionally wherein the set of CpGs comprises at least the CpGs identified in SEQ ID NOs 1 to 2000 and identified at nucleotide positions 61 to 62.

[0040] The assay of the invention may be performed above and additionally wherein the set of CpGs comprises at least 10,000 CpGs selected from the CpGs identified at nucleotide positions 61 to 62 in SEQ ID NOs 1 to 40,753, preferably wherein the assay is characterised as having an AUC of at least 0.84.

[0041] The assay of the invention may be performed above and additionally wherein the set of CpGs comprises at least the CpGs identified in SEQ ID NOs 1 to 10,000 and identified at nucleotide positions 61 to 62.

[0042] The assay of the invention may be performed above and additionally wherein the set of CpGs comprises at least the 40,753 CpGs identified in SEQ ID NOs 1 to 40,753 and identified at nucleotide positions 61 to 62, and further wherein the assay is characterised as having an AUC of at least 0.85.

[0043] The assay of the invention may be performed above and additionally wherein the predicting of the presence or development of breast cancer in an individual is based on the WID-BC-Index.

[0044] The assay of the invention may be performed above and additionally wherein when the WID-BC-Index for the individual is about −0.235 or more, the individual is classified as having at least a low risk of harbouring breast cancer or a low risk of breast cancer development.

[0045] The assay of the invention may be performed above and additionally wherein the set of CpGs comprises at least 500 of the CpGs defined by SEQ ID NOs 1 to 40,753 and identified at nucleotide positions 61 to 62, and wherein the sensitivity is at least 58% and the specificity is at least 44%.

[0046] The assay of the invention may be performed above and additionally wherein the set of CpGs comprises at least the CpGs defined by SEQ ID NOs 1 to 500 and identified at nucleotide positions 61 to 62, and wherein the sensitivity is at least 85% and specificity is at least 52%.

[0047] The assay of the invention may be performed above and additionally wherein the set of CpGs comprises at least the CpGs defined by SEQ ID NOs 1 to 1000 and identified at nucleotide positions 61 to 62, and wherein the sensitivity is at least 88% and specificity is at least 49%.

[0048] The assay of the invention may be performed above and wherein the set of CpGs comprises at least the CpGs defined by SEQ ID NOs 1 to 2000 and identified at nucleotide positions 61 to 62, and wherein the sensitivity is at least 94% and specificity is at least 51%.

[0049] The assay of the invention may be performed above and additionally wherein when the WID-BC-Index for the individual is about 0.090 or more, the individual is classified as having at least a moderate risk of harbouring breast cancer or a moderate risk of breast cancer development.

[0050] The assay of the invention may be performed above and additionally wherein the set of CpGs comprises at least 500 of the CpGs defined by SEQ ID NOs 1 to 40,753 and identified at nucleotide positions 61 to 62, and wherein the sensitivity is at least 35% and the specificity is at least 63%.

[0051] The assay of the invention may be performed above and additionally wherein the set of CpGs comprises at least the CpGs defined by SEQ ID NOs 1 to 500 and identified at nucleotide positions 61 to 62, and wherein the sensitivity is at least 63% and specificity is at least 69%.

[0052] The assay of the invention may be performed above and additionally wherein the set of CpGs comprises at least the CpGs defined by SEQ ID NOs 1 to 1000 and identified at nucleotide positions 61 to 62, and wherein the sensitivity is at least 68% and specificity is at least 73%.

[0053] The assay of the invention may be performed above and additionally wherein the set of CpGs comprises at least the CpGs defined by SEQ ID NOs 1 to 2000 and identified at nucleotide positions 61 to 62, and wherein the sensitivity is at least 69% and specificity is at least 78%.

[0054] The assay of the invention may be performed above and additionally wherein when the WID-BC-Index for the individual is about 0.587 or more, the individual is classified as having a high risk of harbouring breast cancer or a high risk of breast cancer development.

[0055] The assay of the invention may be performed above and additionally wherein the set of CpGs comprises at least 500 of the CpGs defined by SEQ ID NOs 1 to 40,753 and identified at nucleotide positions 61 to 62, and wherein the sensitivity is at least 24% and the specificity is at least 84%.

[0056] The assay of the invention may be performed above and additionally wherein the set of CpGs comprises at least the CpGs defined by SEQ ID NOs 1 to 500 and identified at nucleotide positions 61 to 62, and wherein the sensitivity is at least 26% and specificity is at least 93%.

[0057] The assay of the invention may be performed above and additionally wherein the set of CpGs comprises at least the CpGs defined by SEQ ID NOs 1 to 1000 and identified at nucleotide positions 61 to 62, and wherein the sensitivity is at least 29% and specificity is at least 95%.

[0058] The assay of the invention may be performed above and additionally wherein the set of CpGs comprises at least the CpGs defined by SEQ ID NOs 1 to 2000 and identified at nucleotide positions 61 to 62, and wherein the sensitivity is at least 33% and specificity is at least 94%.

[0059] The assay of the invention may be performed above and additionally wherein the step of determining the methylation status of each CpG in the set of test CpGs comprises bisulphite converting the DNA.

[0060] The assay of the invention may be performed above and additionally wherein the step of determining the methylation status of each CpG in the set of test CpGs comprises:
[0061] a. performing a sequencing step to determine the sequence of each CpG;

[0062] b. hybridising DNA to an array comprising probes capable of discriminating between methylated and non-methylated forms of the CpGs and applying a detection system to the array so as to determine the methylation status or β-value of each CpG; or
[0063] c. performing a PCR step using methylation-specific primers, wherein the methylation status of the CpG is determined by the presence or absence of a PCR product.

[0064] The assay of the invention may be performed above and additionally wherein the assay further comprises:
[0065] a. determining in the sample from the individual the proportion of epithelial cells;
[0066] b. determining in the sample from the individual the proportion of fat cells; and/or
[0067] c. determining in the sample from the individual differentiation characteristics of non-fat cells.

[0068] The assay of the invention may be performed above and additionally wherein determining the proportion of epithelial and/or fat cells and/or determining differentiation characteristics of non-fat cells comprises performing a method comprising:
[0069] a. gene expression profiling;
[0070] b. non-coding RNA-profiling;
[0071] c. epigenome profiling;
[0072] d. DNA methylation profiling;
[0073] e. deriving a WID-BC-Index; and/or
[0074] f. immunohistochemistry; and
[0075] arriving at a determination based on the results of the method.

[0076] The invention also provides an array capable of discriminating between methylated and non-methylated forms of CpGs; the array comprising oligonucleotide probes specific for a methylated form of each CpG in a CpG panel and oligonucleotide probes specific for a non-methylated form of each CpG in the panel; wherein the panel consists of at least 500 CpGs selected from the CpGs identified in SEQ ID NOs 1 to 40,753.

[0077] The array of the invention may be as above and additionally provided that the array is not an Infinium MethylationEPIC BeadChip array or an Infinium HumanMethylation450, and/or provided that the number of CpG-specific oligonucleotide probes of the array is 482,000 or less, 480,000 or less, 450,000 or less, 440,000 or less, 430,000 or less, 420,000 or less, 410,000 or less, or 400,000 or less.

[0078] The array of the invention may be as above and additionally wherein the panel comprises any set of CpGs defined in the assays of any one of claims 8 to 16.

[0079] The array of the invention may be as above and additionally further comprising one or more oligonucleotides comprising any set of CpGs defined in the assays the invention, wherein the one or more oligonucleotides are hybridized to corresponding oligonucleotide probes of the array.

[0080] The invention also provides a hybridized array, wherein the array is obtainable by hybridizing to an array of the invention a group of oligonucleotides comprising any set of CpGs defined in the assays of the invention.

[0081] The invention also provides a process for making the hybridized array according to the invention, comprising contacting an array according to the invention with a group of oligonucleotides comprising any set of CpGs defined in the assays of the invention.

[0082] The invention also provides a method of treating breast cancer in an individual comprising:
[0083] a. predicting the presence or development of breast cancer in an individual by performing an assay of the invention;
[0084] b. stratifying the individual according to their risk of harbouring breast cancer or according to their risk of breast cancer development; and
[0085] c. administering one or more treatments to the individual based on their risk stratification.

[0086] The method of the invention may be performed above and additionally wherein the individual is stratified as having a low risk of harbouring breast cancer or a low risk of breast cancer development and the individual is subjected to treatment according to their risk, e.g. intensified screening.

[0087] The method of the invention may be performed above and additionally wherein the intensified screening comprises one or more mammography scans and/or breast MRI scans.

[0088] The method of the invention may be performed above and additionally wherein the individual is stratified as having a moderate risk of harbouring breast cancer or a moderate risk of breast cancer development and the individual is subjected to treatment according to their risk, e.g. intensified screening and/or administration of one or more doses of one or more of Mifeprestone, Aromatase inhibitors, Denosumab, “selective estrogen modulators” (SERMs) and “selective progesterone receptor modulators” (SPRMs).

[0089] The method of the invention may be performed above and additionally wherein the intensified screening comprises one or more mammography scans and/or breast MRI scans.

[0090] The method of the invention may be performed above and additionally wherein the individual is stratified as having a high risk of harbouring breast cancer or a high risk of breast cancer development and the individual is subjected to treatment according to their risk, e.g.:
[0091] a. intensified screening, optionally comprising one or mammography scans and/or breast MRI scans;
[0092] b. administration of one or more of Mifeprestone, Aromatase inhibitors, Denosumab, SERMs and SPRMs; and/or
[0093] c. bilateral mastectomy.

[0094] The invention also provides a method of monitoring the risk of an individual harbouring breast cancer or monitoring the risk of breast cancer development, the method comprising: (a) predicting the presence of breast cancer in an individual or predicting breast cancer development in an individual by performing an assay of the invention at a first time point; (b) predicting the presence of breast cancer in the individual or predicting breast cancer development in the individual by performing the assay of the invention at one or more further time points; and (c) monitoring any change in the individual's risk between time points.

[0095] The method of the invention may be performed above and additionally wherein the further time points are three monthly, six monthly, yearly or two yearly basis following an initial prediction.

[0096] The method of the invention may be performed above and additionally wherein the individual does not harbour breast cancer and harbours one or more genetic mutations that predispose the individual to an increased risk of developing breast cancer.

[0097] The method of the invention may be performed above and additionally wherein the individual harbours one or more mutations in a BRCA gene.

[0098] The method of the invention may be performed above and additionally wherein depending on the risk of the presence of breast cancer in the individual or risk of breast cancer development in the individual, one or more treatments are administered to the individual according to a method of the invention.

[0099] The method of the invention may be performed above and additionally wherein the individual has an increased risk of breast cancer development and wherein one or more treatments are administered to the individual according to a method of the invention a method of prophylaxis.

[0100] The method of the invention may be performed above and additionally wherein the one or more treatments administered to the individual comprises one or more doses of SPRMs.

[0101] The method of the invention may be performed above and additionally wherein the one or more doses of SPRMs comprises one or more doses of Mifepristone.

[0102] The method of the invention may be performed above and additionally wherein the method further comprises:
[0103] a. determining the proportion of epithelial cells in the sample from the individual between any two or more time points and assessing if the proportion changes between time points;
[0104] b. determining the proportion of fat cells in the sample from the individual between any two or more time points and assessing if the proportion changes between time points; and/or
[0105] c. determining differentiation characteristics of non-fat cells in the sample from the individual between any two or more time points and assessing if the proportion changes between time points.

[0106] The method of the invention may be performed above and additionally wherein:
[0107] a. an increase in the breast cancer index value and an increase in the proportion of epithelial cells; and/or
[0108] b. an increase in the breast cancer index value and a decrease in the proportion of fat cells; and/or
[0109] c. an increase in the breast cancer index value and an increase in differentiation of non-fat cells towards fat cells,
   indicates a negative response to the one or more treatments.

[0110] The method of the invention may be performed above and additionally wherein changes are made to the one or more treatments if a negative response is identified.

[0111] The method of the invention may be performed above and additionally wherein:
[0112] a. a decrease in the breast cancer index value and a decrease in the proportion of epithelial cells;
[0113] b. a decrease in the breast cancer index value and an increase in the proportion of fat cells; and/or
[0114] c. a decrease in the breast cancer index value and a decrease in differentiation of non-fat cells towards fat cells,
   indicates a positive response to the one or more treatments.

[0115] The method of the invention may be performed above and additionally wherein changes are made to the one or more treatments if a positive response is identified.

### BRIEF DESCRIPTION OF THE FIGURES

[0116] FIG. 1 shows an identification of differential methylation in cervical smear samples from breast cancer cases and controls.

[0117] A) Distribution of immune cell fraction in the Discovery Set. B) Distribution of eight non-epithelial cell subtypes inferred using HepiDISH (* p<0.05 Wilcoxon rank sum test). C) Example of cell-type specific DNAme. D) Distribution of estimated cell-type specific delta-beta values. E) Top ten tissue-specific patterns enriched in hyper-methylated CpGs. F) Top ten tissue-specific patterns enriched in hypo-methylated CpGs.

[0118] FIG. 2 shows discriminatory performance of the WID-BC-index in cervical smear samples.

[0119] A) Performance (as quantified by the AUC) as a function of the number of input CpGs to ridge and lasso classifiers. B) The WID-BC-index discriminates breast cancer cases from controls independently of immune contamination in the internal validation set. C) Receiver Operator Characteristic (ROC) curve corresponding to the optimal classifier in the internal validation set. D) The discriminatory performance of the WID-BC-index in an independent external validation set. E) ROC curve in the external validation set. F) Performance of sub-classifiers trained on different subsets of the 40,753 CpGs used to define the WID-BC-index. CpGs have been ranked according to the absolute values of the regression coefficients along the x-axis. The retained line refers to classifiers trained on only the top n CpGs. The removed group refers to classifiers trained after removing the top n CpGs. The binned line refers to classifiers trained on bins of 500 CpGs.

[0120] FIG. 3 shows association between WID-BC-index and epidemiological and clinical factors.

[0121] A) Age at time of consent. B) Number of relatives with breast cancer. C) Correlation with polygenic risk score (PRS) based on 303 SNPs on 345 women in the internal validation set. D) Tumour stage. E) Nodal status. F) Hormone receptor status (positive status defined as ER positive or PR positive). G) HER2 status. H) Grade. I) Histology. Panels A) and C) are based on the internal validation set, otherwise the entire discovery set was used. (* p<0.05 Wilcoxon rank sum test).

[0122] FIG. 4 shows performance of the WID-BC-index in matched buccal samples.

[0123] A) The WID-BC-index evaluated in buccal samples (corresponding to the internal validation set) discriminates between cases and controls. B) The corresponding ROC curve. C) Correlation between the WID-BC-index evaluated in matched cervical and buccal samples in the internal validation set.

[0124] FIG. 5 shows association of the WID-BC-index with fat cell content.

[0125] A) The WID-BC-index evaluated in ENCODE primary cells (pc) and in vitro differentiated cells (ivdc). B) The WID-index evaluated in ENCODE tissue samples.

[0126] FIG. 6 shows the WID-BC-index evaluated in breast tissue samples.

[0127] A) The WID-BC-index increases with the proportion of fat cells per sample. B) WID-BC-index after linear adjustment for fat content in breast tissue samples from healthy women, women with BRCA mutation, triple negative breast cancers (TNBC) and matched adjacent normal tissue. C) The proportion of epithelial cells in samples from the mifepristone trial before and after treatment with either mifepristone or placebo in women with BRCA mutation or healthy controls. D) WID-BC-index in samples from the mifepristone trial after linear adjustment for fat content before and after treatment with either mifepristone or placebo in women with BRCA mutation and healthy controls. (* p-value <0.05)

[0128] FIG. 7 shows an experimental design that led to the derivation of the WID-BC-index and the design of the evaluation of the WID-BC-index.

[0129] A) Surrogate samples (cervical and buccal swabs). B) ENCODE samples. C) Breast tissue samples.

[0130] FIG. 8 shows the distribution of immune cell subtypes in the external validation dataset.

[0131] A) Distribution of immune cell fraction in cancer cases and controls. B) Distribution of call subtypes inferred using HEpiDISH in the external validation dataset.

[0132] FIG. 9 shows the performance of alternative linear classifier.

[0133] A) Performance of ridge and lasso classifiers as a function of the number of input CpGs. The classifiers are based on a linear combination of inputs and do not contain any non-linear interaction terms (products of beta-value and IC-fraction). B) The optimal linear index (based on a ridge classifier with 10,000 inputs) performs well in low-IC samples, but the discriminatory signal diminishes for highly contaminated samples

[0134] FIG. 10 shows association between WID-BC-index and technical parameters.

[0135] A, B, C) The WID-BC-index discriminated between cases and controls when restricted to study centres that contributed predominantly cases or controls (based on internal and external validation data). D) Distribution of the WID-BC-index in controls that volunteered from the general population and women that presented at hospitals for benign women-specific conditions (Discovery set). E) The WID-BC-index is independent of the time between sample collection and processing (Discovery set).

[0136] FIG. 11 shows association between the WID-BC-index and additional epidemiological factors in the internal validation set.

[0137] A) Age at first live birth. B) Ethnicity. C) Hormone replacement therapy ever (post-menopausal only). D) Age of last period. E) Age at menarche. F) Menopausal status. G) Oral contraceptive use ever (pre-menopausal only). H) Parity (post-menopausal only).

[0138] FIG. 12 shows association between the WID-BC-index and epidemiological and clinical factors in the external validation dataset.

[0139] A) Age at time of consent. B) Number of relatives with breast cancer. C) Histology. D) Tumour stage. E) Nodal status. F) Hormone receptor status (positive status defined as ER positive or PR positive). G) HER2 status. H) Grade. I) Age at first live birth. J) Ethnicity. K) Hormone replacement therapy. L) Age of last period. M) Age at menarche. N) Menopausal status. 0) Oral contraceptive use. P) Parity.

[0140] FIG. 13 shows analysis of buccal samples.

[0141] A) Distribution of immune cell fraction in the buccal dataset. B) Distribution of immune cell subtypes in the buccal dataset. C) Performance of ridge and lasso classifiers (with non-linear interaction terms) trained on 269 buccal samples from the internal training set and validated on the internal validation set. D) Performance of classifiers trained and validated on the corresponding matched cervical samples.

[0142] FIG. 14 shows analysis of breast tissue samples.

[0143] A) Distribution of cell types in breast tissue samples from healthy women, women with BRCA mutation, and women with triple negative breast cancers (TNBC) and matched adjacent healthy tissue. B) Distribution of cell types in breast tissue samples from the mifepristone trial. C) Distribution of epithelial cells in samples with BRCA mutation from a combined with samples with BRCA mutation before treatment in B and compared to healthy controls from A and B. D) Distribution of epithelial cell fraction in the mifepristone trial groups using both matched and unmatched samples. E) Distribution of WID-BC-index in the mifepristone trial groups using both matched and unmatched samples. (* p-value <0.05, Wilcoxon rank sum test).

[0144] FIG. 15 shows a summary of epidemiological and clinical characteristics (cervical smear data).

[0145] A) Summary of epidemiological characteristics. B) Summary of clinical characteristics.

[0146] FIG. 16 shows GSEA top enriched pathways.

[0147] A) The top twenty enriched gene pathways based on hyper-methylated CpGs located in TSS200 regions. B) The top twenty pathways based on hypo-methylated CpGs. Pathways have been ranked by the normalised enrichment scores (NES). P-values have not been adjusted for multiplicity.

[0148] FIG. 17 shows a summary of WID-BC-index.

[0149] Summary of WID-BC-index. Odds ratios corresponding to each quartile of the WID-BC-index. Quartiles were defined by the controls of the internal validation set. Adjustment was based on a logistic regression model with age, menopausal status, age at menarche, number of first degree relatives with breast cancer, and BMI included as covariates.

[0150] FIG. 18 shows WID-BC-index thresholds applied to a population.

[0151] A) Receiver Operator Characteristic (ROC) curve corresponding to the optimal classifier in the internal validation set, wherein WID-BC-index thresholds capture either 50% of the population in which 94% of all breast cancers arise, 20% of the population in which 78% of all breast cancers arise or 3% of the population in which 34% of all breast cancers arise. B) Association between WID-BC-index with a horizontal lines indicating particular thresholds that mirror those described in the ROC curve of A.

### DETAILED DESCRIPTION OF THE INVENTION

[0152] The present invention is concerned with assays for predicting the development of breast cancer in an individual, by determining the methylation status of certain CpGs in DNA from the individual, deriving an index value based on the methylation status of the certain CpGs, and predicting the development of breast cancer in the individual based on the breast cancer index value.

[0153] “Predicting” in the context of the present invention relates to identifying a possible breast cancer index value that may be an indication of the presence of breast cancer in an individual or a particular risk of breast cancer development.

[0154] “Developing” in the context of the present invention may relate to cancer presently harboured by an individual that—on the basis of the individual's breast cancer index value—may further grow or metastasise within said individual. “Developing” in the context of the present invention may also relate to the absence of cancer in an individual however—on the basis of the individual's breast cancer index value—cancer may be predicted to manifest itself at some point in the future within said individual. Equally, “development” in the context of the present invention may relate to cancer presently harboured by an individual that—on the basis of the individual's breast cancer index value—may further grow or metastasise within said individual. “Development” in the context of the present invention may also relate to the absence of cancer in an individual however—on the basis of the individual's breast cancer index value—cancer may be predicted to manifest itself at some point in the future within said individual.

[0155] The present invention encompasses assays for predicting the presence or development of breast cancer in an individual, the assay comprising:
[0156] j. providing a sample which has been taken from the individual;
[0157] k. determining in DNA in the sample the methylation status of each CpG in a set of test CpGs selected from the panel of CpGs identified at nucleotide positions 61 to 62 in SEQ ID NOs 1 to 40,753;
[0158] l. deriving a breast cancer index value based on the methylation status of the test CpGs; and
[0159] m. predicting the presence or development of breast cancer in the individual based on the breast cancer index value;

[0160] wherein the assay is characterised as having an area under the curve (AUC) of 0.6 or more as determined by receiver operating characteristics (ROC).

[0161] Assays according to the present invention provide a statistically robust pool of CpGs whose methylation status can be determined to provide a reliable prediction of the presence or development of breast cancer in an individual. As exemplified by the data described herein, the pool of CpGs identified by the inventors can be used in an assay of the invention having an AUC of 0.6 or more. Furthermore, subsets of the provided pool of CpGs can be assayed according to the present invention thus enabling stratification of individuals according to their risk of harbouring breast cancer or of breast cancer development with statistically robust sensitivity and specificity, as determined by receiver operating characteristics.

### Identification of CpGs and Assessment Methylation Status

[0162] Methylation of DNA is a recognised form of epigenetic modification which has the capability of altering the expression of genes and other elements such as microRNAs [[1]]. In cancer development and progression, methylation may have the effect of e.g. silencing tumor suppressor genes and/or increasing the expression of oncogenes. Other forms of dysregulation may occur as a result of methylation. Methylation of DNA occurs at discrete loci which are predominately dinucleotides consisting of a CpG motif, but may also occur at CHH motifs (where H is A, C, or T). During methylation, a methyl group is added to the fifth carbon of cytosine bases to create methylcytosine.

[0163] Methylation can occur throughout the genome and is not limited to regions with respect to an expressed sequence such as a gene. Methylation typically, but not always, occurs in a promoter or other regulatory region of an expressed sequence such as enhancer elements. Most typically, the methylation status of CpGs is clustered in CpG islands, for example CpG islands present in the regulatory regions of genes, especially in their promoter regions.

[0164] Typically, an assessment of DNA methylation status involves analysing the presence or absence of methyl groups in DNA, for example methyl groups on the 5 position of one or more cytosine nucleotides. Preferably, the methylation status of one or more cytosine nucleotides present as a CpG dinucleotide (where C stands for Cytosine, G for Guanine and p for the phosphate group linking the two) is assessed.

[0165] A variety of techniques are available for the identification and assessment of CpG methylation status, as will be outlined briefly below. The assays described herein encompass any suitable technique for the determination of CpG methylation status.

[0166] Methyl groups are lost from a starting DNA molecule during conventional in vitro handling steps such as PCR. To avoid this, techniques for the detection of methyl groups commonly involve the preliminary treatment of DNA prior to subsequent processing, in a way that preserves the methylation status information of the original DNA molecule. Such preliminary techniques involve three main categories of processing, i.e. bisulphite modification, restriction enzyme digestion and affinity-based analysis. Products of these techniques can then be coupled with sequencing or array-based platforms for subsequent identification or qualitative assessment of CpG methylation status.

[0167] Techniques involving bisulphite modification of DNA have become the most common assays for detection and assessment of methylation status of CpG dinucleotides. Treatment of DNA with bisulphite, e.g. sodium bisulphite, converts cytosine bases to uracil bases, but has no effect on 5-methylcytosines. Thus, the presence of a cytosine in bisulphite-treated DNA is indicative of the presence of a cytosine base which was previously methylated in the starting DNA molecule. Such cytosine bases can be detected by a variety of techniques. For example, primers specific for unmethylated versus methylated DNA can be generated and used for PCR-based identification of methylated CpG dinucleotides. DNA may be amplified, either before or after bisulphite conversion. A separation/capture step may be performed, e.g. using binding molecules such as complementary oligonucleotide sequences. Standard and next-generation DNA sequencing protocols can also be used.

[0168] In other approaches, methylation-sensitive enzymes can be employed which digest or cut only in the presence of methylated DNA. Analysis of resulting fragments is commonly carried out using mircroarrays.

[0169] Affinity-based techniques exploit binding interactions to capture fragments of methylated DNA for the purposes of enrichment. Binding molecules such as anti-5-methylcytosine antibodies are commonly employed prior to subsequent processing steps such as PCR and sequencing.

[0170] Olkhov-Mitsel and Bapat (2012) [[1]] provide a comprehensive review of techniques available for the identification and assessment of biomarkers involving methylcytosine.

[0171] For the purposes of assessing the methylation status of the CpG-based biomarkers characterised and described herein, any suitable assay can be employed.

[0172] Assays described herein may comprise determining methylation status of CpGs by bisulphite converting the DNA. Preferred assays involve bisulphite treatment of DNA, including amplification of the identified CpG loci for methylation specific PCR and/or sequencing and/or assessment of the methylation status of target loci using methylation-discriminatory microarrays.

[0173] Amplification of CpG loci can be achieved by a variety of approaches. Preferably, CpG loci are amplified using PCR. A variety of PCR-based approaches may be used. For example, methylation-specific primers may be hybridized to DNA containing the CpG sequence of interest. Such primers may be designed to anneal to a sequence derived from either a methylated or non-methylated CpG locus. Following annealing, a PCR reaction is performed and the presence of a subsequent PCR product indicates the presence of an annealed CpG of identifiable sequence. In such assays, DNA is bisulphite converted prior to amplification. Such techniques are commonly referred to as methylation specific PCR (MSP) [[2]].

[0174] In other techniques, PCR primers may anneal to the CpG sequence of interest independently of the methylation status, and further processing steps may be used to determine the status of the CpG. Assays are designed so that the CpG site(s) are located between primer annealing sites. This assay scheme is used in techniques such as bisulphite genomic sequencing [[3]], COBRA [[4]], Ms-SNuPE [[5]]. In such assay, DNA can be bisulphite converted before or after amplification.

[0175] Small-scale PCR approaches may be used. Such approaches commonly involve mass partitioning of samples (e.g. digital PCR). These techniques offer robust accuracy and sensitivity in the context of a highly miniaturised system (pico-liter sized droplets), ideal for the subsequent handling of small quantities of DNA obtainable from the potentially small volume of cellular material present in biological samples, particularly urine samples. A variety of such small-scale PCR techniques are widely available. For example, microdroplet-based PCR instruments are available from a variety of suppliers, including RainDance Technologies, Inc. (Billerica, Mass.; http://raindancetech.com/) and Bio-Rad, Inc. (http://www.bio-rad.com/). Microarray platforms may also be used to carry out small-scale PCR. Such platforms may include microfluidic network-based arrays e.g. available from Fluidigm Corp. (www.fluidigm.com).

[0176] Following amplification of CpG loci, amplified PCR products may be coupled to subsequent analytical platforms in order to determine the methylation status of the CpGs of interest. For example, the PCR products may be directly sequenced to determine the presence or absence of a methylcytosine at the target CpG or analysed by array-based techniques.

[0177] Any suitable sequencing techniques may be employed to determine the sequence of target DNA. In the assays of the present invention the use of high-throughput, so-called “second generation”, “third generation” and “next generation” techniques to sequence bisulphite-treated DNA can be used.

[0178] In second generation techniques, large numbers of DNA molecules are sequenced in parallel. Typically, tens of thousands of molecules are anchored to a given location at high density and sequences are determined in a process dependent upon DNA synthesis. Reactions generally consist of successive reagent delivery and washing steps, e.g. to allow the incorporation of reversible labelled terminator bases, and scanning steps to determine the order of base incorporation. Array-based systems of this type are available commercially e.g. from Illumina, Inc. (San Diego, Calif.; http://www.illumina.com/).

[0179] Third generation techniques are typically defined by the absence of a requirement to halt the sequencing process between detection steps and can therefore be viewed as real-time systems. For example, the base-specific release of hydrogen ions, which occurs during the incorporation process, can be detected in the context of microwell systems (e.g. see the Ion Torrent system available from Life Technologies; http://www.lifetechnologies.com/). Similarly, in pyrosequencing the base-specific release of pyrophosphate (PPi) is detected and analysed. In nanopore technologies, DNA molecules are passed through or positioned next to nanopores, and the identities of individual bases are determined following movement of the DNA molecule relative to the nanopore. Systems of this type are available commercially e.g. from Oxford Nanopore (https://www.nanoporetech.com/). In an alternative assay, a DNA polymerase enzyme is confined in a “zero-mode waveguide” and the identity of incorporated bases are determined with florescence detection of gamma-labeled phosphonucleotides (see e.g. Pacific Biosciences; http://www.pacificbiosciences.com/).

[0180] In other assays in accordance with the invention sequencing steps may be omitted. For example, amplified PCR products may be applied directly to hybridization arrays based on the principle of the annealing of two complementary nucleic acid strands to form a double-stranded molecule. Hybridization arrays may be designed to include probes which are able to hybridize to amplification products of a CpG and allow discrimination between methylated and non-methylated loci. For example, probes may be designed which are able to selectively hybridize to an CpG locus containing thymine, indicating the generation of uracil following bisulphite conversion of an unmethylated cytosine in the starting template DNA. Conversely, probes may be designed which are able to selectively hybridize to a CpG locus containing cytosine, indicating the absence of uracil conversion following bisulphite treatment. This corresponds with a methylated CpG locus in the starting template DNA.

[0181] Following the application of a suitable detection system to the array, computer-based analytical techniques can be used to determine the methylation status of a CpG. Detection systems may include, e.g. the addition of fluorescent molecules following a methylation status-specific probe extension reaction. Such techniques allow CpG status determination without the specific need for the sequencing of CpG amplification products. Such array-based discriminatory probes may be termed methylation-specific probes.

[0182] Any suitable methylation-discriminatory microarrays may be employed to assess the methylation status of the CpGs described herein. A preferred methylation-discriminatory microarray system is provided by Illumina, Inc. (San Diego, Calif.; http://www.illumina.com/). In particular, the Infinium MethylationEPIC BeadChip array and the Infinium HumanMethylation450 BeadChip array systems may be used to assess the methylation status of CpGs for predicting cancer development as described herein. Such a system exploits the chemical modifications made to DNA following bisulphite treatment of the starting DNA molecule. Briefly, the array comprises beads to which are coupled oligonucleotide probes specific for DNA sequences corresponding to the unmethylated form of a CpG, as well as separate beads to which are coupled oligonucleotide probes specific for DNA sequences corresponding to the methylated form of an CpG. Candidate DNA molecules are applied to the array and selectively hybridize, under appropriate conditions, to the oligonucleotide probe corresponding to the relevant epigenetic form. Thus, a DNA molecule derived from a CpG which was methylated in the corresponding genomic DNA will selectively attach to the bead comprising the methylation-specific oligonucleotide probe, but will fail to attach to the bead comprising the non-methylation-specific oligonucleotide probe. Single-base extension of only the hybridized probes incorporates a labeled ddNTP, which is subsequently stained with a fluorescence reagent and imaged. The methylation status of the CpG is determined by calculating the ratio of the fluorescent signal derived from the methylated and unmethylated sites.

[0183] Because the cancer-specific diagnostic CpG biomarkers defined herein were initially identified using the Illumina® Infinium MethylationEPIC Beadchip array and Infinium HumanMethylation450 BeadChip array systems, the same chip systems can be used to interrogate those same CpGs in the assays described herein. Alternative or customised arrays could, however, be employed to interrogate the cancer-specific CpG biomarkers defined herein, provided that they comprise means for interrogating all CpG for a given assay, as defined herein.

[0184] Techniques involving combinations of the above-described assays may also be used. For example, DNA containing CpG sequences of interest may be hybridized to microarrays and then subjected to DNA sequencing to determine the status of the CpG as described above.

[0185] In the assays described above, sequences corresponding to CpG loci may also be subjected to an enrichment process if desired. DNA containing CpG sequences of interest may be captured by binding molecules such as oligonucleotide probes complementary to the CpG target sequence of interest. Sequences corresponding to CpG loci may be captured before or after bisulphite conversion or before or after amplification. Probes may be designed to be complementary to bisulphite converted DNA. Captured DNA may then be subjected to further processing steps to determine the status of the CpG, such as DNA sequencing steps.

[0186] Capture/separation steps may be custom designed. Alternatively a variety of such techniques are available commercially, e.g. the SureSelect target enrichment system available from Agilent Technologies (http://www.agilent.com/home). In this system biotinylated “bait” or “probe” sequences (e.g. RNA) complementary to the DNA containing CpG sequences of interest are hybridized to sample nucleic acids. Streptavidin-coated magnetic beads are then used to capture sequences of interest hybridized to bait sequences. Unbound fractions are discarded. Bait sequences are then removed (e.g. by digestion of RNA) thus providing an enriched pool of CpG target sequences separated from non-CpG sequences. Template DNA may be subjected to bisulphite conversion and target loci amplified by small-scale PCR such as microdroplet PCR using primers which are independent of the methylation status of the CpG. Following amplification, samples may be subjected to a capture step to enrich for PCR products containing the target CpG, e.g. captured and purified using magnetic beads, as described above. Following capture, a standard PCR reaction is carried out to incorporate DNA sequencing barcodes into CpG-containing amplicons. PCR products are again purified and then subjected to DNA sequencing and analysis to determine the presence or absence of a methylcytosine at the target genomic CpG [[6]].

[0187] The CpG biomarker loci defined herein are identified e.g. by Illumina® identifiers (IlmnID). These CpG loci identifiers refer to individual CpG sites used in the commercially available Illumina® Infinium Methylation EPIC BeadChip kit and Illumina® Infinium Human Methylation450 BeadChip kit. The identity of each CpG site represented by each CpG loci identifier is publicly available from the Illumina, Inc. website under reference to the CpG sites used in the Infinium Methylation EPIC BeadChip kit and the Infinium Human Methylation450 BeadChip kit.

[0188] To complement evolving public databases to provide accurate CpG loci identifiers and strand orientation, Illumina® has developed a method to consistently designate CpG loci based on the actual or contextual sequence of each individual CpG locus. To unambiguously refer to CpG loci in any species, Illumina® has developed a consistent and deterministic CpG loci database to ensure uniformity in the reporting of methylation data. The Illumina® method takes advantage of sequences flanking a CpG locus to generate a unique CpG locus cluster ID. This number is based on sequence information only and is unaffected by genome version. Illumina's standardized nomenclature also parallels the TOP/BOT strand nomenclature (which indicates the strand orientation) commonly used for single nucleotide polymorphism (SNP) designation.

[0189] Illumina® Identifiers for the Infinium MethylationEPIC BeadChip and Infinium Human Methylation450 BeadChip system are also available from public repositories such as Gene Expression Omnibus (GEO) (http://www.ncbi.nlm.nih.gov/geo/).

[0190] By assessing the methylation status of a CpG it is meant that a determination is made as to whether a given CpG is methylated or unmethylated. In addition, it is meant that a determination is made as to the degree to which a given CpG site is methylated across a population of CpG loci in a sample.

[0191] In a preferred assay of the invention, CpG methylation status is measured indirectly using a detection system such as fluorescence. In a preferred system, a methylation-discriminatory microarray is used. In a preferred method of calculating the degree of methylation of a given CpG, the Illumina® definition of beta-values is used (see Examples for further details). The Illumina® methylation beta-value of a specific CpG site is calculated from the intensity of the methylated (M) and unmethylated (U) alleles, as the ratio of fluorescent signals β=Max(M,0)/[Max(M,0)+Max(U,0)+100]. On this scale, 0<β<1, β values close to 1 (0) indicate 100% methylation (no methylation).

[0192] The inventors initially sought to examine epigenome-wide DNAme analysis in breast tissue samples and in samples derived from anatomical sites other than the breast who had been diagnosed with breast cancer and in matched controls. This led to the surprising establishment of a WID-BC-index (Women's risk Identification for Breast Cancer index) based on DNAme signatures that are capable of identifying women with breast cancer (see Examples for further details). Surprisingly, the signatures were shown to be changeable in response to breast cancer therapies, thus indicating the dynamic nature of the identified predictive DNAme signature, and thus surprisingly indicating that the DNAme signatures of the invention can be used to monitor breast cancer.

[0193] A CpG as defined herein refers to the CG dinucleotide motif identified in relation to each SEQ ID NO. and Illumina Identifier (Ilmn ID), and chromosome position of the sequence as listed in the sequence listing, wherein the cytosine base of the dinucleotide may (or may not) be modified. Thus by determining the methylation status of a CpG defined by or identified in a given SEQ ID NO., it is meant that a determination is made as to the methylation status of the cytosine of the CG dinucleotide motif identified in square brackets in each sequence shown in sequence listing, accepting that variation in the sequence upstream and downstream of any given CpG may exist due to sequencing errors or variation between individuals.

### Cancer-Related CpG Groups for Analysis

[0194] In any of the assays described herein, in DNA derived from cells in the sample the methylation status of each CpG in a set of test CpGs selected from a panel of CpGs may be determined.

[0195] The assays may involve determining the methylation status of each CpG in a set of test CGs selected from the panel of CpGs identified at nucleotide positions 61 to 62 in SEQ ID NOs 1 to 40,753.

[0196] The assays may involve determining the methylation status of each CpG in a set of test CGs selected from the panel of CpGs identified at nucleotide positions 61 to 62 in SEQ ID NOs 1 to 40,753, wherein the set of CpGs comprises at least one of the CpGs identified in SEQ ID NOs 1 to 40,753.

[0197] The assays may involve determining the methylation status of each CpG in a set of test CGs selected from the panel of CpGs identified at nucleotide positions 61 to 62 in SEQ ID NOs 1 to 40,753, wherein the set of CpGs comprises any number of the CpGs identified in SEQ ID NOs 1 to 40,753.

[0198] The assays may involve determining the methylation status of each CpG in a set of test CGs selected from the panel of CpGs identified at nucleotide positions 61 to 62 in SEQ ID NOs 1 to 40,753, wherein the set of CpGs comprises between 1 and 500 of the CpGs identified in SEQ ID NOs 1 to 40,753.

[0199] The assays may involve determining the methylation status of each CpG in a set of test CGs selected from the panel of CpGs identified at nucleotide positions 61 to 62 in SEQ ID NOs 1 to 40,753, wherein the set of CpGs comprises at least 500 CpGs selected from the CpGs identified in SEQ ID NOs 1 to 40,753.

[0200] The assays may involve determining the methylation status of each CpG in a set of test CGs selected from the panel of CpGs identified at nucleotide positions 61 to 62 in SEQ ID NOs 1 to 40,753, wherein the set of CpGs comprises at least 500 CpGs selected from the CpGs identified in SEQ ID NOs 1 to 40,753 and wherein the set of at least 500 CpGs comprises at least the CpGs identified in SEQ ID NOs 1 to 500 and identified at nucleotide positions 61 to 62.

[0201] The assays may involve determining the methylation status of each CpG in a set of test CGs selected from the panel of CpGs identified at nucleotide positions 61 to 62 in SEQ ID NOs 1 to 40,753, wherein the set of CpGs comprises at least 1000 CpGs selected from the CpGs identified in SEQ ID NOs 1 to 40,753.

[0202] The assays may involve determining the methylation status of each CpG in a set of test CGs selected from the panel of CpGs identified at nucleotide positions 61 to 62 in SEQ ID NOs 1 to 40,753, wherein the set of CpGs comprises at least 1000 CpGs selected from the CpGs identified in SEQ ID NOs 1 to 40,753 and wherein the set of at least 1000 CpGs comprises at least the CpGs identified in SEQ ID NOs 1 to 1000 and identified at nucleotide positions 61 to 62.

[0203] The assays may involve determining the methylation status of each CpG in a set of test CGs selected from the panel of CpGs identified at nucleotide positions 61 to 62 in SEQ ID NOs 1 to 40,753, wherein the set of CpGs comprises at least 2000 CpGs selected from the CpGs identified in SEQ ID NOs 1 to 40,753.

[0204] The assays may involve determining the methylation status of each CpG in a set of test CGs selected from the panel of CpGs identified at nucleotide positions 61 to 62 in SEQ ID NOs 1 to 40,753, wherein the set of CpGs comprises at least 2000 CpGs selected from the CpGs identified in SEQ ID NOs 1 to 40,753 and wherein the set of at least 2000 CpGs comprises at least the CpGs identified in SEQ ID NOs 1 to 2000 and identified at nucleotide positions 61 to 62.

[0205] The assays may involve determining the methylation status of each CpG in a set of test CGs selected from the panel of CpGs identified at nucleotide positions 61 to 62 in SEQ ID NOs 1 to 40,753, wherein the set of CpGs comprises at least 10,000 CpGs selected from the CpGs identified in SEQ ID NOs 1 to 40,753.

[0206] The assays may involve determining the methylation status of each CpG in a set of test CGs selected from the panel of CpGs identified at nucleotide positions 61 to 62 in SEQ ID NOs 1 to 40,753, wherein the set of CpGs comprises at least 10,000 CpGs selected from the CpGs identified in SEQ ID NOs 1 to 40,753 and wherein the set of at least 10,000 CpGs comprises at least the CpGs identified in SEQ ID NOs 1 to 10,000 and identified at nucleotide positions 61 to 62.

[0207] The assays may involve determining the methylation status of each CpG in a set of test CGs selected from the panel of CpGs identified at nucleotide positions 61 to 62 in SEQ ID NOs 1 to 40,753, wherein the set of CpGs comprises at least 40,753 CpGs selected from the CpGs identified at nucleotide positions 61 to 62 in SEQ ID NOs 1 to 40,753.

### Breast Cancer Index

[0208] In view observations described herein (see Examples), the inventors derived an index based on an analysis of the CpG beta value (as defined above) for use assays for predicting the presence or development of breast cancer in an individual. Any of the assays described herein may involve deriving a breast cancer index value based on the methylation of status of the test CpGs in a sample provided from an individual. Any of the methods described herein may involve predicting the presence or development of breast cancer in an individual.

[0209] The breast cancer index value may be derived by any suitable means. Preferably, the breast cancer index value may be derived by assessing the methylation status of the test CpGs in a sample provided from an individual. The methylation status of the CpGs may be determined by any suitable means. Preferably, the step of determining the methylation status of each CpG in the set of test CpGs comprises determining methylation beta-values for each one of the test CpGs. Deriving the breast cancer index value may involve providing a methylation beta-value data set comprising methylation beta-values for each test CpG. Deriving the breast cancer index value may also involve estimating the fraction of contaminating DNA within the DNA provided from a sample. Contaminating DNA may be DNA originating from a particular source organism, tissue or cell type. Preferably the contaminating DNA originates from one or more different cell types to one or more cell types of interest. A cell type of interest may particularly be an epithelial cell or hormone sensing cell. Estimating the fraction of contaminating DNA can be performed by any suitable means and at any suitable stage in the assays described herein after the step of providing a sample which has been take from an individual. The assays described herein involve estimating a contaminating DNA fraction within DNA in the sample by any suitable means. Preferably, the contaminating DNA fraction for the sample is estimated via any suitable bioinformatics analysis tool. A bioinformatics analysis tool that may be used to estimate a contaminating DNA fraction may be EpIDISH.

[0210] The contaminating DNA is preferably from immune cells. Preferably, in any of the assays described herein, the step of deriving the breast cancer index value based on the methylation status of the test CpGs comprises providing a methylation beta-value data set comprising the methylation beta-values for each test CpG and estimating an immune cell DNA fraction within the DNA provided from the sample. The estimated immune cell DNA fraction may be controlled for in any algorithm applied to the methylation beta-value data set to obtain a breast cancer index value in accordance with the present invention.

[0211] It is desirable to estimate the fraction of contaminating DNA from the one or more cell types that are different to the one or more cell types of interest because the breast cancer index value used for predicting the presence or development of breast cancer in an individual may, in some instances, only be reliably derived from determining the methylation status of a set of CpGs from DNA of a particular cell type of interest. Particularly, methylation status beta-values may differ in the one or more cell types of interest within a sample relative to methylation status beta-values in contaminating DNA from different cell types within the same sample. Thus, the derived breast cancer index value may have a decreased predictive power without estimating and controlling for the contaminating DNA fraction within the DNA provided from the sample. Preferably the assay involves estimating an immune cell DNA fraction within the DNA provided from the sample.

[0212] Any of the assays described herein comprising a step of deriving a breast cancer index value based on the methylation status of the test CpGs may further comprise applying an algorithm to the methylation beta-value dataset to obtain the breast cancer index value. Preferably, in any of the assays described herein, the step of deriving the breast cancer index value based on the methylation status of the test CpGs comprises providing a methylation beta-value data set comprising the methylation beta-values for each test CpG, estimating an immune cell DNA fraction within the DNA provided from the sample and applying an algorithm to the methylation beta-value data set to obtain the breast cancer index value.

[0213] In any of the assays described herein, the breast cancer index value may be calculated by any suitable formula. Preferably, the breast cancer index value is termed Women's risk Identification for Breast Cancer Index (WID-BC-index) and is calculated by an algorithm according to the following formula:

$$WID - BC - index = {\sum }_{i = 1}^{n} \frac{μ - ( {a}_{i} + {b}_{i} ρ ) {β}_{i}}{σ}$$

[0214] where n refers to the number of CpGs in the set of test CpGs, ρ∈[0,1] is the immune cell DNA fraction for the sample, β₁, . . . , β₁, are methylation beta-values (between 0 and 1), a₁, . . . , aₙ and b₁, . . . , bₙ are real valued coefficients and μ and σ are real valued parameters used to scale the index.

[0215] In any of the assays described herein, the WID-BC-index algorithm applies real value coefficients (a₁, . . . , aₙ and b₁, . . . , bₙ) inferred by initially training a dataset (this dataset in the exemplary embodiments of the invention described in the examples consisted of 190 breast cancer cases and 508 controls) to fit a ridge classifier using the R package glmnet with a mixing parameter value of alpha=0 (ridge penalty) and binomial response type. Ten-fold cross-validation was used internally by the cv.glmnet function in order to determine the optimal value of the regularisation parameter lambda. For individual v denote beta values from the n CpGs as β₁^{v}, . . . , βₙ^{v} and denote the immune cell fraction as ρⁿ. The following terms were used as inputs to the ridge classifier
[0216] β₁^{v}, ρ^{v}β₁^{v}, . . . , βₙ^{v}, ρ^{v}βₙ^{v}
   The coefficients a₁, . . . , aₙ and b₁, . . . , bₙ are obtained from the fitted ridge model. The coefficients a₁, . . . , aₙ correspond to the terms β₁^{v}, . . . , βₙ^{v} and the coefficients b₁, . . . , bₙ correspond to the terms ρ^{v}β₁^{v}, . . . , ρ^{v}βₙ^{v}. Thus, any suitable a₁, . . . , aₙ and b₁, . . . , bₙ real valued coefficients may be applied to the WID-BC-index in any of the assays described herein. The following quantity was computed for each individual v in the training set:

$${x}_{υ} = {\sum }_{i = 1}^{n} ( {a}_{i} + {b}_{i} {ρ}^{υ} ) {β}_{i}^{υ}$$

[0217] The value of the parameters μ and σ are given by the mean and standard deviation of xᵥ in the training dataset respectively. Thus, any suitable μ and σ real valued parameters may be applied to the WID-BC-index in any of the assays described herein. Any suitable training data set may be applied to the assays described herein in order to infer real value parameters and coefficients that can subsequently be applied to the WID-BC-index formula according to the present invention. Exemplary ways of utilising a training dataset in accordance with the present invention are further described in the ‘Statistical Analyses for Classifier Development’ section of the Materials and Methods section of the Examples.

[0218] Exemplary μ and σ real valued parameters are provided in Table 1 for CpG subsets identified in SEQ ID NOs 1 to 40,753. These real valued parameters may be applied to any of the assays described herein wherein the real parameters correspond to any one of the sets of CpGs identified in SEQ ID NOs 1 to 40,753 and set out in the left hand column of Table 1.

### Bioinformatic Tools and Statistical Metrics for CpG-Based Assays

[0219] Software programs which aid in the in silico analysis of bisulphite converted DNA sequences and in primer design for the purposes of methylation-specific analyses are generally available and have been described previously [[7]] [[8]] [[9]].

[0220] In risk models for predicting cancer, a receiver-operating-characteristic (ROC) curve analysis is often used, in which the area under the curve (AUC) is assessed [[10]]. Each point on the ROC curve shows the effect of a rule for turning a risk/likelihood estimate into a prediction of the presence or development of cancer in an individual. The AUC measures how well the model discriminates between case subjects and control subjects. An ROC curve that corresponds to a random classification of case subjects and control subjects is a straight line with an AUC of 50%. An ROC curve that corresponds to perfect classification has an AUC of 100%.

[0221] In any of the methods described herein, the 95% confidence interval for the ROC AUC may be between 0.60 and 1.

[0222] In any of the methods described herein, the interval may be defined as a range having as an upper limit any number between 0.60 and 1. The upper limit number may be 0.60, 0.61, 0.62, 0.63, 0.64, 0.65, 0.66, 0.67, 0.68, 0.69, 0.70, 0.71, 0.72, 0.73, 0.74, 0.75, 0.76, 0.77, 0.78, 0.79, 0.80, 0.81, 0.82, 0.83, 0.84, 0.85, 0.86, 0.87, 0.88, 0.89, 0.90, 0.91, 0.92, 0.93, 0.94, 0.95, 0.96, 0.97, 0.98, 0.99 or 1.00.

[0223] In any of the methods described herein, the interval may be defined as a range having as a lower limit any number between 0.60 and 1. The lower limit number may be 0.60, 0.61, 0.62, 0.63, 0.64, 0.65, 0.66, 0.67, 0.68, 0.69, 0.70, 0.71, 0.72, 0.73, 0.74, 0.75, 0.76, 0.77, 0.78, 0.79, 0.80, 0.81, 0.82, 0.83, 0.84, 0.85, 0.86, 0.87, 0.88, 0.89, 0.90, 0.91, 0.92, 0.93, 0.94, 0.95, 0.96, 0.97, 0.98, 0.99 or 1.00.

[0224] In any of the methods described herein, the interval range may comprise any of the above lower limit numbers combined with any of the above upper limit numbers as appropriate.

[0225] Preferably, the upper limit number is 1. Thus, the 95% confidence ROC AUC interval may be defined as a range having an upper limit of 1 and as a lower limit any number between 0.60 and 1. The lower limit number may be 0.60, 0.61, 0.62, 0.63, 0.64, 0.65, 0.66, 0.67, 0.68, 0.69, 0.70, 0.71, 0.72, 0.73, 0.74, 0.75, 0.76, 0.77, 0.78, 0.79, 0.80, 0.81, 0.82, 0.83, 0.84, 0.85, 0.86, 0.87, 0.88, 0.89, 0.90, 0.91, 0.92, 0.93, 0.94, 0.95, 0.96, 0.97, 0.98, 0.99 or 1.00.

[0226] The upper limit number may be 0.99. Thus, the 95% confidence ROC AUC interval may be defined as a range having an upper limit of 0.99 and as a lower limit any number between 0.60 and 0.99. The lower limit number may be 0.60, 0.61, 0.62, 0.63, 0.64, 0.65, 0.66, 0.67, 0.68, 0.69, 0.70, 0.71, 0.72, 0.73, 0.74, 0.75, 0.76, 0.77, 0.78, 0.79, 0.80, 0.81, 0.82, 0.83, 0.84, 0.85, 0.86, 0.87, 0.88, 0.89, 0.90, 0.91, 0.92, 0.93, 0.94, 0.95, 0.96, 0.97, 0.98 or 0.99.

[0227] The upper limit number may be 0.98. Thus, the 95% confidence ROC AUC interval may be defined as a range having an upper limit of 0.98 and as a lower limit any number between 0.60 and 0.98. The lower limit number may be 0.60, 0.61, 0.62, 0.63, 0.64, 0.65, 0.66, 0.67, 0.68, 0.69, 0.70, 0.71, 0.72, 0.73, 0.74, 0.75, 0.76, 0.77, 0.78, 0.79, 0.80, 0.81, 0.82, 0.83, 0.84, 0.85, 0.86, 0.87, 0.88, 0.89, 0.90, 0.91, 0.92, 0.93, 0.94, 0.95, 0.96, 0.97 or 0.98.

[0228] The upper limit number may be 0.97. Thus, the 95% confidence ROC AUC interval may be defined as a range having an upper limit of 0.97 and as a lower limit any number between 0.60 and 0.97. The lower limit number may be 0.60, 0.61, 0.62, 0.63, 0.64, 0.65, 0.66, 0.67, 0.68, 0.69, 0.70, 0.71, 0.72, 0.73, 0.74, 0.75, 0.76, 0.77, 0.78, 0.79, 0.80, 0.81, 0.82, 0.83, 0.84, 0.85, 0.86, 0.87, 0.88, 0.89, 0.90, 0.91, 0.92, 0.93, 0.94, 0.95, 0.96 or 0.97.

[0229] The upper limit number may be 0.96. Thus, the 95% confidence ROC AUC interval may be defined as a range having an upper limit of 0.96 and as a lower limit any number between 0.60 and 0.96. The lower limit number may be 0.60, 0.61, 0.62, 0.63, 0.64, 0.65, 0.66, 0.67, 0.68, 0.69, 0.70, 0.71, 0.72, 0.73, 0.74, 0.75, 0.76, 0.77, 0.78, 0.79, 0.80, 0.81, 0.82, 0.83, 0.84, 0.85, 0.86, 0.87, 0.88, 0.89, 0.90, 0.91, 0.92, 0.93, 0.94, 0.95 or 0.96.

[0230] The upper limit number may be 0.95. Thus, the 95% confidence ROC AUC interval may be defined as a range having an upper limit of 0.95 and as a lower limit any number between 0.60 and 0.95. The lower limit number may be 0.60, 0.61, 0.62, 0.63, 0.64, 0.65, 0.66, 0.67, 0.68, 0.69, 0.70, 0.71, 0.72, 0.73, 0.74, 0.75, 0.76, 0.77, 0.78, 0.79, 0.80, 0.81, 0.82, 0.83, 0.84, 0.85, 0.86, 0.87, 0.88, 0.89, 0.90, 0.91, 0.92, 0.93, 0.94 or 0.95.

[0231] The upper limit number may be 0.94. Thus, the 95% confidence ROC AUC interval may be defined as a range having an upper limit of 0.94 and as a lower limit any number between 0.60 and 0.94. The lower limit number may be 0.60, 0.61, 0.62, 0.63, 0.64, 0.65, 0.66, 0.67, 0.68, 0.69, 0.70, 0.71, 0.72, 0.73, 0.74, 0.75, 0.76, 0.77, 0.78, 0.79, 0.80, 0.81, 0.82, 0.83, 0.84, 0.85, 0.86, 0.87, 0.88, 0.89, 0.90, 0.91, 0.92, 0.93 or 0.94.

[0232] The upper limit number may be 0.93. Thus, the 95% confidence ROC AUC interval may be defined as a range having an upper limit of 0.93 and as a lower limit any number between 0.60 and 0.93. The lower limit number may be 0.60, 0.61, 0.62, 0.63, 0.64, 0.65, 0.66, 0.67, 0.68, 0.69, 0.70, 0.71, 0.72, 0.73, 0.74, 0.75, 0.76, 0.77, 0.78, 0.79, 0.80, 0.81, 0.82, 0.83, 0.84, 0.85, 0.86, 0.87, 0.88, 0.89, 0.90, 0.91, 0.92 or 0.93.

[0233] The upper limit number may be 0.92. Thus, the 95% confidence ROC AUC interval may be defined as a range having an upper limit of 0.92 and as a lower limit any number between 0.60 and 0.92. The lower limit number may be 0.60, 0.61, 0.62, 0.63, 0.64, 0.65, 0.66, 0.67, 0.68, 0.69, 0.70, 0.71, 0.72, 0.73, 0.74, 0.75, 0.76, 0.77, 0.78, 0.79, 0.80, 0.81, 0.82, 0.83, 0.84, 0.85, 0.86, 0.87, 0.88, 0.89, 0.90, 0.91 or 0.92.

[0234] The upper limit number may be 0.91. Thus, the 95% confidence ROC AUC interval may be defined as a range having an upper limit of 0.91 and as a lower limit any number between 0.60 and 0.91. The lower limit number may be 0.60, 0.61, 0.62, 0.63, 0.64, 0.65, 0.66, 0.67, 0.68, 0.69, 0.70, 0.71, 0.72, 0.73, 0.74, 0.75, 0.76, 0.77, 0.78, 0.79, 0.80, 0.81, 0.82, 0.83, 0.84, 0.85, 0.86, 0.87, 0.88, 0.89, 0.90 or 0.91.

[0235] The upper limit number may be 0.90. Thus, the 95% confidence ROC AUC interval may be defined as a range having an upper limit of 0.90 and as a lower limit any number between 0.60 and 0.90. The lower limit number may be 0.60, 0.61, 0.62, 0.63, 0.64, 0.65, 0.66, 0.67, 0.68, 0.69, 0.70, 0.71, 0.72, 0.73, 0.74, 0.75, 0.76, 0.77, 0.78, 0.79, 0.80, 0.81, 0.82, 0.83, 0.84, 0.85, 0.86, 0.87, 0.88, 0.89 or 0.90.

[0236] The upper limit number may be 0.89. Thus, the 95% confidence ROC AUC interval may be defined as a range having an upper limit of 0.89 and as a lower limit any number between 0.60 and 0.89. The lower limit number may be 0.60, 0.61, 0.62, 0.63, 0.64, 0.65, 0.66, 0.67, 0.68, 0.69, 0.70, 0.71, 0.72, 0.73, 0.74, 0.75, 0.76, 0.77, 0.78, 0.79, 0.80, 0.81, 0.82, 0.83, 0.84, 0.85, 0.86, 0.87, 0.88 or 0.89.

[0237] The upper limit number may be 0.88. Thus, the 95% confidence ROC AUC interval may be defined as a range having an upper limit of 0.88 and as a lower limit any number between 0.60 and 0.88. The lower limit number may be 0.60, 0.61, 0.62, 0.63, 0.64, 0.65, 0.66, 0.67, 0.68, 0.69, 0.70, 0.71, 0.72, 0.73, 0.74, 0.75, 0.76, 0.77, 0.78, 0.79, 0.80, 0.81, 0.82, 0.83, 0.84, 0.85, 0.86, 0.87 or 0.88.

[0238] The upper limit number may be 0.87. Thus, the 95% confidence ROC AUC interval may be defined as a range having an upper limit of 0.87 and as a lower limit any number between 0.60 and 0.87. The lower limit number may be 0.60, 0.61, 0.62, 0.63, 0.64, 0.65, 0.66, 0.67, 0.68, 0.69, 0.70, 0.71, 0.72, 0.73, 0.74, 0.75, 0.76, 0.77, 0.78, 0.79, 0.80, 0.81, 0.82, 0.83, 0.84, 0.85, 0.86 or 0.87.

[0239] The upper limit number may be 0.86. Thus, the 95% confidence ROC AUC interval may be defined as a range having an upper limit of 0.86 and as a lower limit any number between 0.60 and 0.86. The lower limit number may be 0.60, 0.61, 0.62, 0.63, 0.64, 0.65, 0.66, 0.67, 0.68, 0.69, 0.70, 0.71, 0.72, 0.73, 0.74, 0.75, 0.76, 0.77, 0.78, 0.79, 0.80, 0.81, 0.82, 0.83, 0.84, 0.85 or 0.86.

[0240] The upper limit number may be 0.85. Thus, the 95% confidence ROC AUC interval may be defined as a range having an upper limit of 0.85 and as a lower limit any number between 0.60 and 0.85. The lower limit number may be 0.60, 0.61, 0.62, 0.63, 0.64, 0.65, 0.66, 0.67, 0.68, 0.69, 0.70, 0.71, 0.72, 0.73, 0.74, 0.75, 0.76, 0.77, 0.78, 0.79, 0.80, 0.81, 0.82, 0.83, 0.84 or 0.85.

[0241] The upper limit number may be 0.84. Thus, the 95% confidence ROC AUC interval may be defined as a range having an upper limit of 0.84 and as a lower limit any number between 0.60 and 0.84. The lower limit number may be 0.60, 0.61, 0.62, 0.63, 0.64, 0.65, 0.66, 0.67, 0.68, 0.69, 0.70, 0.71, 0.72, 0.73, 0.74, 0.75, 0.76, 0.77, 0.78, 0.79, 0.80, 0.81, 0.82, 0.83 or 0.84.

[0242] The upper limit number may be 0.83. Thus, the 95% confidence ROC AUC interval may be defined as a range having an upper limit of 0.83 and as a lower limit any number between 0.60 and 0.83. The lower limit number may be 0.60, 0.61, 0.62, 0.63, 0.64, 0.65, 0.66, 0.67, 0.68, 0.69, 0.70, 0.71, 0.72, 0.73, 0.74, 0.75, 0.76, 0.77, 0.78, 0.79, 0.80, 0.81, 0.82 or 0.83.

[0243] The upper limit number may be 0.82. Thus, the 95% confidence ROC AUC interval may be defined as a range having an upper limit of 0.82 and as a lower limit any number between 0.60 and 0.82. The lower limit number may be 0.60, 0.61, 0.62, 0.63, 0.64, 0.65, 0.66, 0.67, 0.68, 0.69, 0.70, 0.71, 0.72, 0.73, 0.74, 0.75, 0.76, 0.77, 0.78, 0.79, 0.80, 0.81 or 0.82.

[0244] The upper limit number may be 0.81. Thus, the 95% confidence ROC AUC interval may be defined as a range having an upper limit of 0.81 and as a lower limit any number between 0.60 and 0.81. The lower limit number may be 0.60, 0.61, 0.62, 0.63, 0.64, 0.65, 0.66, 0.67, 0.68, 0.69, 0.70, 0.71, 0.72, 0.73, 0.74, 0.75, 0.76, 0.77, 0.78, 0.79, 0.80 or 0.81.

[0245] The upper limit number may be 0.80. Thus, the 95% confidence ROC AUC interval may be defined as a range having an upper limit of 0.80 and as a lower limit any number between 0.60 and 0.80. The lower limit number may be 0.60, 0.61, 0.62, 0.63, 0.64, 0.65, 0.66, 0.67, 0.68, 0.69, 0.70, 0.71, 0.72, 0.73, 0.74, 0.75, 0.76, 0.77, 0.78, 0.79 or 0.80.

[0246] The upper limit number may be 0.79. Thus, the 95% confidence ROC AUC interval may be defined as a range having an upper limit of 0.79 and as a lower limit any number between 0.60 and 0.79. The lower limit number may be 0.60, 0.61, 0.62, 0.63, 0.64, 0.65, 0.66, 0.67, 0.68, 0.69, 0.70, 0.71, 0.72, 0.73, 0.74, 0.75, 0.76, 0.77, 0.78 or 0.79.

[0247] The upper limit number may be 0.78. Thus, the 95% confidence ROC AUC interval may be defined as a range having an upper limit of 0.78 and as a lower limit any number between 0.60 and 0.78. The lower limit number may be 0.60, 0.61, 0.62, 0.63, 0.64, 0.65, 0.66, 0.67, 0.68, 0.69, 0.70, 0.71, 0.72, 0.73, 0.74, 0.75, 0.76, 0.77 or 0.78.

[0248] The upper limit number may be 0.77. Thus, the 95% confidence ROC AUC interval may be defined as a range having an upper limit of 0.77 and as a lower limit any number between 0.60 and 0.77. The lower limit number may be 0.60, 0.61, 0.62, 0.63, 0.64, 0.65, 0.66, 0.67, 0.68, 0.69, 0.70, 0.71, 0.72, 0.73, 0.74, 0.75, 0.76 or 0.77.

[0249] The upper limit number may be 0.76. Thus, the 95% confidence ROC AUC interval may be defined as a range having an upper limit of 0.76 and as a lower limit any number between 0.60 and 0.76. The lower limit number may be 0.60, 0.61, 0.62, 0.63, 0.64, 0.65, 0.66, 0.67, 0.68, 0.69, 0.70, 0.71, 0.72, 0.73, 0.74, 0.75 or 0.76.

[0250] The upper limit number may be 0.75. Thus, the 95% confidence ROC AUC interval may be defined as a range having an upper limit of 0.75 and as a lower limit any number between 0.60 and 0.75. The lower limit number may be 0.60, 0.61, 0.62, 0.63, 0.64, 0.65, 0.66, 0.67, 0.68, 0.69, 0.70, 0.71, 0.72, 0.73, 0.74 or 0.75.

[0251] The upper limit number may be 0.74. Thus, the 95% confidence ROC AUC interval may be defined as a range having an upper limit of 0.74 and as a lower limit any number between 0.60 and 0.74. The lower limit number may be 0.60, 0.61, 0.62, 0.63, 0.64, 0.65, 0.66, 0.67, 0.68, 0.69, 0.70, 0.71, 0.72, 0.73 or 0.74.

[0252] The upper limit number may be 0.73. Thus, the 95% confidence ROC AUC interval may be defined as a range having an upper limit of 0.73 and as a lower limit any number between 0.60 and 0.73. The lower limit number may be 0.60, 0.61, 0.62, 0.63, 0.64, 0.65, 0.66, 0.67, 0.68, 0.69, 0.70, 0.71, 0.72 or 0.73.

[0253] The upper limit number may be 0.72. Thus, the 95% confidence ROC AUC interval may be defined as a range having an upper limit of 0.72 and as a lower limit any number between 0.60 and 0.72. The lower limit number may be 0.60, 0.61, 0.62, 0.63, 0.64, 0.65, 0.66, 0.67, 0.68, 0.69, 0.70, 0.71 or 0.72.

[0254] The upper limit number may be 0.71. Thus, the 95% confidence ROC AUC interval may be defined as a range having an upper limit of 0.71 and as a lower limit any number between 0.60 and 0.71. The lower limit number may be 0.60, 0.61, 0.62, 0.63, 0.64, 0.65, 0.66, 0.67, 0.68, 0.69, 0.70 or 0.71.

[0255] The upper limit number may be 0.70. Thus, the 95% confidence ROC AUC interval may be defined as a range having an upper limit of 0.70 and as a lower limit any number between 0.60 and 0.70. The lower limit number may be 0.60, 0.61, 0.62, 0.63, 0.64, 0.65, 0.66, 0.67, 0.68, 0.69 or 0.70.

[0256] The assays may involve determining the methylation status of each CpG in a set of test CGs selected from the panel of CpGs identified at nucleotide positions 61 to 62 in SEQ ID NOs 1 to 40,753, wherein the set of CpGs comprises at least 500 CpGs selected from the CpGs identified in SEQ ID NOs 1 to 40,753, preferably wherein the assay is characterised as having an AUC of at least 0.73.

[0257] The assays may involve determining the methylation status of each CpG in a set of test CGs selected from the panel of CpGs identified at nucleotide positions 61 to 62 in SEQ ID NOs 1 to 40,753, wherein the set of CpGs comprises at least 1000 CpGs selected from the CpGs identified in SEQ ID NOs 1 to 40,753, preferably wherein the assay is characterised as having an AUC of at least 0.77.

[0258] The assays may involve determining the methylation status of each CpG in a set of test CGs selected from the panel of CpGs identified at nucleotide positions 61 to 62 in SEQ ID NOs 1 to 40,753, wherein the set of CpGs comprises at least 2000 CpGs selected from the CpGs identified in SEQ ID NOs 1 to 40,753, preferably wherein the assay is characterised as having an AUC of at least 0.81.

[0259] The assays may involve determining the methylation status of each CpG in a set of test CGs selected from the panel of CpGs identified at nucleotide positions 61 to 62 in SEQ ID NOs 1 to 40,753, wherein the set of CpGs comprises at least 10,000 CpGs selected from the CpGs identified in SEQ ID NOs 1 to 40,753, preferably wherein the assay is characterised as having an AUC of at least 0.84.

[0260] The assays may involve determining the methylation status of each CpG in a set of test CGs selected from the panel of CpGs identified at nucleotide positions 61 to 62 in SEQ ID NOs 1 to 40,753, wherein the set of CpGs comprises at least 40,753 CpGs selected from the CpGs identified at nucleotide positions 61 to 62 in SEQ ID NOs 1 to 40,753, preferably wherein the assay is characterised as having an AUC of at least 0.85.

[0261] In any of the assays described herein, the predicting of the presence or development of breast cancer in an individual is based on the breast cancer index value of an individual. In any of the assays described herein, the predicting of the presence or development of breast cancer in an individual is based on the WID-BC-index value of an individual.

[0262] A breast cancer index value provides a value that indicates a “likelihood” or “risk” of any of the assays of the invention correctly predicting the presence or development of breast cancer in an individual. In the context of the present invention, “likelihood” and “risk” may be used synonymously with each other. In any of the assays described herein, the step of predicting the presence or development of breast cancer in an individual based on a breast cancer index value involves the application of threshold values. Threshold values can provide an indication of an individual's risk of harbouring breast cancer or of breast cancer development. For example, breast cancer index values may indicate at least a low risk, a moderate risk, and/or a high risk of predicting the presence or development of breast cancer.

[0263] Any references herein to sequences, genomic sequences and/or genomic coordinates are derived based upon Homo sapiens (human) genome assembly GRCh37 (hg19). The skilled person would understand variations in the nucleotide sequences of any given sequence, may exist due to sequencing errors and/or variation between individuals.

[0264] The assay of the invention represents a ‘prediction’ because any cancer index value (WID-BC-Index) derived in accordance with the invention is unlikely to be capable of diagnosing every individual as having or not having cancer with 100% specificity and 100% sensitivity. Rather, depending on the cancer index cutpoint threshold applied by the user for positively predicting the presence of cancer in an individual, the false positive and false negative rate will vary. In other words, the inventors have discovered that the assays of the invention can achieve variable levels of sensitivity and specificity for predicting the presence or development of breast cancer, as defined by receiver operating characteristics, depending on the cancer index cutpoint threshold chosen and applied by the user. Such sensitivity and specificity can be seen from the data disclosed herein to be achievable at high proportions, demonstrating accurate and statistically-significant discriminatory capability.

[0265] Similarly, cancer index values which have been pre-determined to correlate with specific breast cancer phenotypes, such as the presence of cancer, have been defined with a high level of statistical accuracy as explained further herein.

[0266] Predicting the ‘development’ of breast cancer in the context of the invention may refer to assessing whether an individual is likely or unlikely to develop breast cancer. Cells sampled from these tissues/anatomical sites can act as a surrogate for breast cells that may transform to cancer. Predicting the development of breast cancer in accordance with the assays of the invention may refer to assessing an increased or decreased likelihood of breast cancer development. Predicting the development of cancer in accordance with the assays of the invention may refer to assessing progression or worsening of a pre-existing cancer lesion in an individual. Predicting of the development of cancer in accordance with the assays of the invention may refer to predicting the likelihood of recurrence of cancer.

[0267] In any of the assays described herein, the step of assessing the presence or development of breast cancer in an individual based on a cancer index value may involve the application of a threshold value. Threshold values can provide a risk-based indication of an individual's breast cancer status, whether that is breast cancer positive, or breast cancer negative. Threshold values can also provide a means for identifying whether the cancer index value is intermediate between a breast cancer positive value and a breast cancer negative value. As explained herein, the breast cancer index value may be dynamic and subject to change depending upon genetic and/or environmental factors. Accordingly, the cancer index value may provide a means for assessing and monitoring cancer development. Breast cancer index values may therefore indicate at least a low risk or a high risk that the individual has a breast cancer positive status or has a status that is indicative of the development of breast cancer. If the cancer index value of an individual is determined by the assays of the invention at two or more time points, an increase or decrease in the individual's cancer index value may indicate an increased or decreased risk of the individual having or developing breast cancer.

[0268] Throughout the disclosure herein the terms “threshold value”, “cutpoint”, and “cutpoint threshold” are to be considered synonymous and interchangeable.

[0269] As explained further herein any assay of the invention is an assay for predicting the presence or development of breast cancer in an individual. The types of breast cancer are set out further herein. As explained further herein, the assays of the invention provide means for assessing whether an individual is at risk of having or developing breast cancer based on specific cutpoint thresholds. Such risk assessments can be provided with a high degree of confidence based on the statistical parameters which characterise the assay. Thus in any of the assays described herein involving cancer index cutpoint thresholds, the cutpoint threshold may be used for risk assessment purposes. Equally, in any of the assays described herein involving cancer index cutpoint thresholds, the cutpoint threshold value may be used to specify whether or not an individual has breast cancer as a pure diagnostic test. Again, such diagnostic tests can be provided with a high degree of confidence based on the statistical parameters which characterise the assay. Accordingly, in any assay described herein which specifies that a cancer index value for the individual is a specific value or more, or is “about” a specific value or more, the individual may be assessed as having cancer. In any assay described herein which specifies that a cancer index value for the individual is less than a specific value, or is less than “about” a specific value, the individual may be assessed as not having cancer. The term “about” is to be understood as providing a range of +/−5% of the value.

[0270] In any of the assays described herein, the predicting of the presence of breast cancer in an individual is preferably based on the WID-BC-index value.

[0271] In any of the assays described herein, wherein the WID-BC-index for the individual is about −0.235 or more, the individual is classified as having at least a low risk of harbouring breast cancer or a low risk of breast cancer development. In any of the assays described herein wherein the set of CpGs may comprise at least 500 of the CpGs defined by SEQ ID NOs 1 to 40,753 and identified at nucleotide positions 61 to 62, the sensitivity of the assay is at least 58% and the specificity of the assay is at least 44%. Wherein the set of CpGs may comprise at least the CpGs defined by SEQ ID NOs 1 to 500 and identified at nucleotide positions 61 to 62, the sensitivity of the assay is at least 85% and the specificity of the assay is at least 52%. Wherein the set of CpGs may comprise at least the CpGs defined by SEQ ID NOs 1 to 1000 and identified at nucleotide positions 61 to 62, the sensitivity of the assay is at least 88% and the specificity of the assay is at least 49%. Wherein the set of CpGs may comprise at least the CpGs defined by SEQ ID NOs 1 to 2000 and identified at nucleotide positions 61 to 62, the sensitivity of the assay is at least 94% and the specificity of the assay is at least 51%.

[0272] In any of the above described assays when a breast cancer index value threshold of −0.235 is being applied, when the WID-BC-index for the individual is about −0.235 or more, the individual may be classified as harbouring breast cancer, wherein when the WID-BC index for the individual is less than about −0.235 the individual may be classified as not harbouring breast cancer, subject to the specified sensitivity and specificity of the assay.

[0273] In any of the assays described herein, wherein the WID-BC-index for the individual is about 0.090 or more, the individual is classified as having at least a moderate risk of harbouring breast cancer or a moderate risk of breast cancer development. In any of the assays described herein wherein the set of CpGs may comprise at least 500 of the CpGs defined by SEQ ID NOs 1 to 40,753 and identified at nucleotide positions 61 to 62, the sensitivity of the assay is at least 35% and the specificity of the assay is at least 63%. Wherein the set of CpGs may comprise at least the CpGs defined by SEQ ID NOs 1 to 500 and identified at nucleotide positions 61 to 62, the sensitivity of the assay is at least 63% and the specificity of the assay is at least 69%. Wherein the set of CpGs may comprise at least the CpGs defined by SEQ ID NOs 1 to 1000 and identified at nucleotide positions 61 to 62, the sensitivity of the assay is at least 68% and the specificity of the assay is at least 73%. Wherein the set of CpGs may comprise at least the CpGs defined by SEQ ID NOs 1 to 2000 and identified at nucleotide positions 61 to 62, the sensitivity of the assay is at least 69% and the specificity of the assay is at least 78%.

[0274] In any of the above described assays when a breast cancer index value threshold of 0.090 is being applied, when the WID-BC-index for the individual is about 0.090 or more, the individual may be classified as harbouring breast cancer, wherein when the WID-BC index for the individual is less than about 0.090 the individual may be classified as not harbouring breast cancer, subject to the specified sensitivity and specificity of the assay.

[0275] In any of the assays described herein, wherein the WID-BC-index for the individual is about 0.587 or more, the individual is classified as having at least a high risk of harbouring breast cancer or a high risk of breast cancer development. In any of the assays described herein wherein the set of CpGs may comprise at least 500 of the CpGs defined by SEQ ID NOs 1 to 40,753 and identified at nucleotide positions 61 to 62, the sensitivity of the assay is at least 24% and the specificity of the assay is at least 84%. Wherein the set of CpGs may comprise at least the CpGs defined by SEQ ID NOs 1 to 500 and identified at nucleotide positions 61 to 62, the sensitivity of the assay is at least 26% and the specificity of the assay is at least 93%. Wherein the set of CpGs may comprise at least the CpGs defined by SEQ ID NOs 1 to 1000 and identified at nucleotide positions 61 to 62, the sensitivity of the assay is at least 29% and the specificity of the assay is at least 95%. Wherein the set of CpGs may comprise at least the CpGs defined by SEQ ID NOs 1 to 2000 and identified at nucleotide positions 61 to 62, the sensitivity of the assay is at least 33% and the specificity of the assay is at least 94%.

[0276] In any of the above described assays when a breast cancer index value threshold of 0.587 is being applied, when the WID-BC-index for the individual is about 0.587 or more, the individual may be classified as harbouring breast cancer, wherein when the WID-BC index for the individual is less than about 0.587 the individual may be classified as not harbouring breast cancer, subject to the specified sensitivity and specificity of the assay.

[0277] Assays according to the present invention provide a statistically robust pool of CpGs whose methylation status can be determined to provide a reliable prediction of the presence or development of breast cancer in an individual. As exemplified by the data described herein, the pool of CpGs identified by the inventors can be used in an assay of the invention having an AUC of 0.6 or more. Furthermore, subsets of the provided pool of CpGs can be assayed according to the present invention thus enabling stratification of individuals according to their risk of harbouring breast cancer or breast cancer development with statistically robust sensitivity and specificity, as determined by receiver operating characteristics.

[0278] WID-BC-index thresholds applied to patient data provided in the exemplary embodiments of the invention in the Examples herein show that low, moderate and high risk thresholds achieve desirable levels of sensitivity and specificity (see FIG. 18). For example, in the exemplary patient cohort, a low risk threshold of −0.235 captures 50% of the cohort in which 94% of all breast cancers arise. For example, in the exemplary patient cohort, a moderate risk threshold of 0.090 captures 20% of the cohort in which 78% of all breast cancers arise. For example, in the exemplary patient cohort, a high risk threshold of 0.090 captures 3% of the cohort in which 34% of all breast cancers arise.

[0279] In any of the assays described herein, the sensitivity and specificity of WID-BC-index threshold values vary depending on the number of CpGs comprised within the set, and specifically what CpGs are comprised within the set. Tables 4, 5 and 6 set out the out the AUC, sensitivity and specificity of the assays described herein depending on the number of CpGs comprised within the set, and specifically what CpGs are comprised within the set.

### Biological Samples

[0280] The assays described herein may be performed on samples of any suitable biological material. Preferably, any of the assays described herein for predicting the presence or development of breast cancer in an individual comprises providing a sample which has been taken from the individual. Preferably the individual is a woman.

[0281] In any of the assays described herein, the assay may or may not encompass the step of obtaining the sample from the individual. In assays which do not encompass the step of obtaining the sample from the individual, a sample which has previously been obtained from the individual is provided. The sample may be provided directly from the individual for analysis or may be derived from stored material, e.g. frozen, preserved, fixed or cryopreserved material.

[0282] In any of the assays described herein, the sample may be self-collected or collected by any suitable medical professional.

[0283] In any of the assays described herein, the sample from the individual may be a sample from an anatomical site other than the breast, such as a cervical, vaginal or preferably a cervicovaginal smear. In any of the assays described herein, the sample from the individual may be a sample from the breast.

[0284] Samples of biological material may include biopsy samples, solid tissue samples, aspirates such as nipple fluid aspirate, samples of biological fluids, blood, serum, plasma, peripheral blood cells, cerebrospinal fluid, urine, fine needle aspirate, saliva, sputum, breast or other hormone dependent tissue, breast milk, bone marrow, skin, samples derived from an organ comprising epithelial cells or other tissue derived from the ectoderm, vaginal fluid etc.

[0285] Samples of biological material are of preferably nipple fluid aspirate, cervical, vaginal, cervicovaginal, buccal or breast tissue origin.

[0286] Tissue scrapes may include biological material from e.g. buccal, oesophageal, bladder, vaginal, urethral or cervical scrapes.

[0287] Biopsy or other samples may be taken from any organ or tissue where a classification or prediction is desired in accordance with the methods described herein. For example, biopsy or other samples may be taken from the skin, buccal cavity, nasal cavity, salivary gland, larynx, pharynx, trachea, lung, oesophagus, stomach, small intestine, large intestine, colon, rectum, kidney, liver, bladder, heart, pancreas, gall bladder, bile duct, spleen, thymus, lymph node, thyroid gland, pituitary gland, bone, brain, breast, ovary, uterus, endometrium, cervix, vagina, vulva, testicle, penis, prostate gland.

[0288] In any of the assays described herein, the sample may particularly be derived from the cervix, the vagina, the buccal area, blood and/or urine. The sample is preferably a cervical liquid-based cytology sample, and more preferably a cervical smear sample.

[0289] Any of the assays described herein, the sample may comprise cells. The sample may comprise genetic material such as DNA and/or RNA.

[0290] Any of the assays described herein may involve providing a biological sample from the patient as the source of patient DNA for methylation analysis.

[0291] Any of the assays described herein may involve obtaining patient DNA from a biological sample which has previously been obtained from the patient.

[0292] Any of the assays described herein may involve obtaining a biological sample from the patient as the source of patient DNA for methylation analysis. The sample may be self-collected or collected by any suitable medical professional. Procedures for obtaining a biological sample from the patient may be non-invasive, such as collecting cells from urine. Alternatively, invasive procedures such as biopsy may be used.

[0293] Methods for sample isolation and for the subsequent extraction and isolation of DNA from such cell or tissue samples in preparation for assessing DNA methylation, are well known to those skilled in the art. In the context of the assays or methods described herein, the entirety of a sample may be used, or alternatively cells may be concentrated or cell types may be fractionated in order to only apply subsets of one or more cell types to the present assays or methods. Any suitable methods of concentration or fractionation may be used.

### Epithelial and Fat Cell Proportion in a Sample and Non-Fat Cell Differentiation Characteristics

[0294] The assays described herein may also comprise determining proportions of cell types within a sample which has been taken from an individual. The proportion of cell types may further enable prediction of the presence or development of breast cancer in an individual.

[0295] Determining the proportion of cells in any of the assays described herein may comprise utilisation of any suitable technique known in the art for determining cell identity and thus proportion of cells in a sample which has been taken from an individual. The determining the proportion of cells may involve genetic or epigenetic analysis. The determining the proportion of epithelial and/or fat cells may comprise determining cellular characteristics by gene expression profiling, non-coding RNA profiling, epigenome profiling, DNA methylation profiling, deriving a WID-BC-Index and/or immunohistochemistry. The determining the proportion of cells may involve comparing any one or more of said cellular characteristics with other specific cell types or reference datasets in order to robustly identify epithelial and/or fat cells in the sample. The determining the proportion of epithelial and/or fat cells may involve DNA methylation analysis, which may comprise comparison with reference DNA methylation profiles for specific cell types. The determining the proportion of cells may involve the use of EpiDISH and/or HEpiDISH.

[0296] Any of the assays described herein may comprise determining in the sample from the individual the proportion of epithelial cells and/or determining in the sample from the individual the proportion of fat cells.

[0297] High levels of epithelial cells within a sample taken from an individual may indicate an increased risk of breast cancer in the individual. Low levels of fat cells within a sample taken from an individual may indicate an increased risk of breast cancer in the individual. High levels of epithelial cells and low levels of fat cells within a sample taken from an individual may indicate an increased risk of breast cancer in the individual.

[0298] The present inventors have shown that increased epithelial cell proportion and decreased fat cell proportion in a sample taken from an individual can associate with at least a moderate risk of harbouring breast cancer or at least a moderate risk of breast cancer development as determined by derivation of a breast cancer index value in the individual. Particularly, the inventors have shown that the proportion of epithelial and fat cells in a sample taken from an individual may change. Fat cells and epithelial cells in the context of the assays disclosed herein may change with or without prior treatment being administered to the individual. In the assays and methods described herein, epithelial and/or fat cell proportion may be monitored for changes, particularly in response to one or more treatments. Fat cell and epithelial cell proportion in samples obtained from an individual, particularly sample of cervical and breast tissue origin, may reflect changes in breast cancer index according to any of the methods described herein. Thus, fat cell and epithelial cell proportion may equally represent an assay for predicting the presence or development of breast cancer in an individual and/or monitoring the risk of an individual harbouring breast cancer or of breast cancer development, in a likewise manner to the assays for determining a breast cancer index value in a sample from an individual described herein.

[0299] The assays described herein may comprise determining in the sample from the individual differentiation characteristics of non-fat cells. In combination with the breast cancer index values described herein, the differentiation of non-fat cells to fat cells may further enable prediction of the presence or development of breast cancer in an individual. “Differentiation characteristics” in the context of the present invention refers to cellular identity, as defined by any one or more cellular characteristics such as the cell's genomic or epigenomic characteristics. Particularly, the determining of differentiation characteristics may comprise comparing the characteristics of non-fat cells in the sample to characteristics of fat cells in order to determine if non-fat cells within the sample are undergoing differentiation to fat cells.

[0300] Determining differentiation characteristics of non-fat cells to fat cells in any of the assays described herein may comprise utilisation of any suitable technique known in the art for determining cell differentiation characteristics. The determining differentiation characteristics of non-fat cells involve genetic or epigenetic analysis. The determining differentiation characteristics of non-fat cells in the sample may comprise determining the non-fat cell characteristics by gene expression profiling, non-coding RNA profiling, epigenome profiling, DNA methylation profiling, deriving a WID-BC-Index and/or immunohistochemistry. The determining differentiation characteristics of the non-fat cells may involve comparing any one or more of said cellular characteristics with characteristics of fat cells or fat cell reference data e.g. publically available ENCODE data. The determining differentiation characteristics of non-fat cells may involve the detection of lipids in the sample by any suitable method. The determining differentiation characteristics of non-fat cells may involve DNA methylation analysis, which may comprise comparison with reference DNA methylation profiles for specific fat cell types. The determining differentiation characteristics of non-fat cells may involve RT-PCR based methods for detection of known genetic markers of fat cells. The determining the proportion of cells may involve the use of EpiDISH and/or HEpiDISH.

[0301] Preferably, in any of the assays described herein, the sample derived from the individual for determining changes in epithelial cell proportion, fat cell proportion and/or differentiation characteristics of non-fat cells is a sample from the breast.

### Types of Cancers

[0302] The methods described herein may be applied to any breast cancer.

[0303] The breast cancer may be a ductal carcinoma in situ or an invasive ductal carcinoma such as tubular type invasive ductal carcinoma (IDC), medullary type IDC, mucinous type IDC, papillary type IDC or cribriform type IDC.

[0304] The breast cancer may be an invasive carcinoma such as a pleomorphic carcinoma, carcinoma with osteoclast giant cells, carcinoma with choriocarcinoma features, carcinoma with melanotic features. The invasive breast carcinoma may be an invasive lobular carcinoma, tubular carcinoma, invasive cribriform carcinoma, medullary carcinoma, mucinous carcinoma and other tumours with abundant mucin such as mucinous carcinoma, cystadenocarcinoma and columna cell mucinous carcinoma, signet ring cell carcinoma. The invasive breast carcinoma may be a neuroendocrine tumour such as solid neuroendocrine carcinoma (carcinoid of the breast), atypical acarcinoid tumour, small cell/oat cell carcinoma, large cell neuroendocrine carcinoma. The invasive breast carcinoma may be an invasive papillary carcinoma, invasive micropapillary carcinoma, apocrine carcinoma, metaplastic carcinomas such as pure epithelial metaplastic carcinomas including squamous cell carcinoma, adenocarcinoma with spindle cell metaplasia, adenosquamous carcinoma, mucoepidermoid carcinoma, mixed epithelial/mesenchymal metaplastic carcinomas, matrix-producing carcinoma, spindle cell carcinoma, carcinosarcoma, squamous cell carcinoma of mammary origin, metaplastic carcinoma with osteoclastic giant cells. The invasive breast carcinoma may be a lipid-rich carcinoma, secretory carcinoma, oncocytic carcinoma, adenoid cystic carcinoma, acinic cell carcinoma, glycogen-rich clear cell carcinoma, sebaceous carcinoma, inflammatory carcinoma, bilateral breast carcinoma.

[0305] The breast cancer may be a mesenchymal breast tumour. The mesenchymal tumour may include sarcoma. The mesenchymal breast tumour may be a hemangioma, angiomatosis, Hemangiopericytoma, Pseudoangiomatous stromal hyperplasia, Myofibroblastoma, Fibromatosis (aggressive), Inflammatory myofibroblastic tumor, Lipoma Angiolipoma, Granular cell tumour, Neurofibroma, Schwannoma, Angiosarcoma, Liposarcoma, Rhabdomyosarcoma, Osteosarcoma, Leiomyoma, Leiomyosarcoma.

[0306] The breast cancer may be a malignant lymphoma such as Non-Hodgkin lymphoma.

[0307] The breast cancer may be a metastatic tumour in which the primary lesion originated in a tissue other than the breast.

[0308] The breast cancer may be a precursor breast cancer lesion. The precursor breast cancer lesion may be a Lobular neoplasia, lobular carcinoma in situ, Intraductal proliferative lesions, Usual ductal hyperplasia, Flat epithelial hyperplasia, Atypical ductal hyperplasia, Ductal carcinoma in situ, Microinvasive carcinoma, Intraductal papillary neoplasms, Central papilloma, Peripheral papilloma, Atypical papilloma, Intraductal papillary carcinoma, Intracystic papillary carcinoma.

[0309] The breast cancer may be a myoepithelial breast cancer lesion. The myoepithelial breast cancer lesion be myoepitheliosis, adenomyoepithelial adenosis, adenomyoepithelioma, malignant myoepithelioma.

[0310] The breast cancer may be a fibroepithelial breast tumour. The fibroepithelial breast tumour may be a fibroadenoma, phyllodes tumour, periductal stromal sarcoma, mammary hamartoma.

[0311] The breast cancer may be Paget's disease of the nipple.

### Methods of Treatment and Diagnosis

[0312] The invention also encompasses the performance of one or more treatment steps following a positive classification of cancer or prediction of cancer development based on any of the methods described herein.

[0313] The invention also encompasses the performance of one or more treatment steps following a negative classification of cancer or prediction of cancer development based on any of the methods described herein. Said treatments may be considered “risk prevention” or “prophylactic” treatments.

[0314] The invention also encompasses the performance of one or more treatment steps following a negative classification or cancer or prediction of cancer development based on any of the methods described herein, in an individual that harbours one or more mutations that predispose the individual to an increased risk of developing breast cancer.

[0315] The invention thus encompasses a method of treating breast cancer in an individual comprising:
[0316] a. predicting the presence or development of breast cancer in an individual comprising any one of the assays described herein;
[0317] b. stratifying the individual according to their risk of harbouring breast cancer or according to their risk of breast cancer development; and
[0318] c. administering one or more treatments to the individual based on their risk stratification.

[0319] The invention thus encompasses a method of treating breast cancer in an individual comprising:
[0320] a. predicting the presence or development of breast cancer in an individual comprising:
   [0321] i. providing a sample which has been taken from the individual;
   [0322] ii. determining in DNA in the sample the methylation status of each CpG in a set of test CpGs selected from the panel of CpGs identified at nucleotide positions 61 to 62 in SEQ ID NOs 1 to 40,753;
   [0323] iii. deriving a breast cancer index value based on the methylation status of the test CpGs; and
   [0324] iv. predicting the presence or development of breast cancer in the individual based on the breast cancer index value;
      [0325] wherein the assay is characterised as having an area under the curve (AUC) of 0.6 or more as determined by receiver operating characteristics (ROC);
[0326] b. stratifying the individual according to their risk of harbouring breast cancer or according to their risk of breast cancer development; and
[0327] c. administering one or more treatments to the individual based on their risk stratification.

[0328] The invention thus encompasses a method of treating breast cancer in an individual comprising:
[0329] a. predicting the presence or development of breast cancer in an individual comprising:
   [0330] i. providing a sample which has been taken from the individual;
   [0331] ii. determining in DNA in the sample the methylation status of each CpG in a set of test CpGs comprises at least 500 CpGs selected from the CpGs identified at nucleotide positions 61 to 62 in SEQ ID NOs 1 to 40,753;
   [0332] iii. deriving a breast cancer index value based on the methylation status of the test CpGs; and
   [0333] iv. predicting the presence or development of breast cancer in the individual based on the breast cancer index value;
      [0334] wherein the assay is characterised as having an area under the curve (AUC) of 0.73 or more as determined by receiver operating characteristics (ROC);
[0335] b. stratifying the individual according to their risk of harbouring breast cancer or according to their risk of breast cancer development; and
[0336] c. administering one or more treatments to the individual based on their risk stratification.

[0337] The invention thus encompasses a method of treating breast cancer in an individual comprising:
[0338] a. predicting the presence or development of breast cancer in an individual comprising:
   [0339] i. providing a sample which has been taken from the individual;
   [0340] ii. determining in DNA in the sample the methylation status of each CpG in a set of test CpGs comprises at least 1000 CpGs selected from the CpGs identified at nucleotide positions 61 to 62 in SEQ ID NOs 1 to 40,753;
   [0341] iii. deriving a breast cancer index value based on the methylation status of the test CpGs; and
   [0342] iv. predicting the presence or development of breast cancer in the individual based on the breast cancer index value;
      [0343] wherein the assay is characterised as having an area under the curve (AUC) of 0.77 or more as determined by receiver operating characteristics (ROC);
[0344] b. stratifying the individual according to their risk of harbouring breast cancer or according to their risk of breast cancer development; and
[0345] c. administering one or more treatments to the individual based on their risk stratification.

[0346] The invention thus encompasses a method of treating breast cancer in an individual comprising:
[0347] a. predicting the presence or development of breast cancer in an individual comprising:
   [0348] i. providing a sample which has been taken from the individual;
   [0349] ii. determining in DNA in the sample the methylation status of each CpG in a set of test CpGs comprises at least 2000 CpGs selected from the CpGs identified at nucleotide positions 61 to 62 in SEQ ID NOs 1 to 40,753;
   [0350] iii. deriving a breast cancer index value based on the methylation status of the test CpGs; and
   [0351] iv. predicting the presence or development of breast cancer in the individual based on the breast cancer index value;
      [0352] wherein the assay is characterised as having an area under the curve (AUC) of 0.81 or more as determined by receiver operating characteristics (ROC);
[0353] b. stratifying the individual according to their risk of harbouring breast cancer or according to their risk of breast cancer development; and
[0354] c. administering one or more treatments to the individual based on their risk stratification.

[0355] In any of the methods of treatment encompassed by the invention, the step of predicting the presence or development of breast cancer in an individual may involve determining in DNA derived from cells in the sample the methylation status of in any set of test CpGs according to the assays of the invention.

[0356] In any of the methods of treatment encompassed by the invention, the step of predicting the presence or development of breast cancer in an individual may involve deriving a WID-BC-index value.

[0357] In any of the methods of treatment encompassed by the invention, the step of predicting the presence or development of breast cancer in an individual may involve the use of any one of the arrays described herein.

[0358] In any of the methods of treatment encompassed by the invention, the step of stratifying the individual may involve applying any one of the thresholds according to any one of the assays of the invention described herein.

[0359] The step of administering one or more treatments may comprise different treatment steps depending on the stratification of an individual on the basis of their risk of harbouring breast cancer or on the basis of risk of breast cancer development. Particularly the amount of an invasiveness of the treatments administered may vary dependent on the stratification of an individual on the basis of their risk of harbouring breast cancer or on the basis of their risk of breast cancer development. The treatments administered to the individual may comprise any treatments considered suitable by a person skilled in the art. For example, wherein the individual is stratified as low risk and the individual is subjected to intensified screening. The intensified screening may comprise one or more mammography scans and/or breast MRI scans.

[0360] Wherein the individual is stratified as moderate risk and the individual is subjected to intensified screening and/or administration of one or more suitable doses of one or more of Mifepristone, Aromatase inhibitors, Denosumab, “selective estrogen modulators” (SERMs) and “selective progesterone receptor modulators” (SPRMs). SERMs may include Anordin, Bazedoxifene, Broparestrol, Clomifene, Cyclofenil, Lasofoxifene, Ormeloxifene, Ospemifene, Raloxifene, Tamoxifen. Preferably, the SERMs include Tamoxifen, Bazedoxifene and Raloxifene. Preferably, the SPRMs include Mifepristone, Ulipristal, Asoprisnil, Proellex, Onapristone, Asoprisnil and Lonaprisan. The intensified screening may comprise one or more mammography scans and/or breast MRI scans. Any of the methods of treatment described herein, wherein the individual is stratified as “moderate” risk, the one or more treatments to the individual may function as ‘preventative’ treatments. Particularly, any one of the treatments described herein may be administered to an individual stratified as at least moderate risk as a measure of preventing manifestation of breast cancer in said individual.

[0361] Wherein the individual is stratified as high risk and the individual is subjected to intensified screening and/or administration of one or more suitable doses of one or more of Mifeprestone, Aromatase inhibitors, Denosumab, SERMS, SPRMs and/or bilateral mastectomy. SERMs may include Anordin, Bazedoxifene, Broparestrol, Clomifene, Cyclofenil, Lasofoxifene, Ormeloxifene, Ospemifene, Raloxifene, Tamoxifen. Preferably, the SERMs include Tamoxifen, Bazedoxifene and Raloxifene. Preferably, the SPRMs include Mifepristone, Ulipristal, Asoprisnil, Proellex, Onapristone, Asoprisnil and Lonaprisan.

[0362] In any one of the methods of treatment described herein, the method may further comprise genetic and/or expression profiling of any panel of genes known in the art as being associated with breast cancer. For example, the methods described herein may further comprise genetic and/or expression profiling of any one or more of the genes comprised within the MammaPrint™ test (Cardoso et al, N Engl J Med, 2016; 375:717-729). For any panel of genes known in the art as being associated with breast cancer, the skilled person would be aware of what genetic and/or expression profiles would be considered to be abnormal. Furthermore, the skilled person would be aware of treatments in the art that are known to be efficacious with respect to specific abnormalities observed in profiling any panel of genes known in the art as being associated with breast cancer. For example, upon observing one or more mutations in one or both of the BRCA1 and BRCA2 genes the skilled person would consider administering platinum-based treatments to the individual.

[0363] Wherein the individual is predicted as not harbouring breast cancer, the individual may be subjected to risk-prevention treatments. Particularly, for example, if the individual has one or more genetic mutations that predispose an individual to an increased risk of developing breast cancer, the individual may be subjected to risk-prevention treatments. Risk-prevention treatments may comprise any suitable treatment. For example, a risk prevention treatment may be administering one or more doses of mifepristone. In any of the methods described herein, the individual may not harbour breast cancer, but may harbour one or more genetic mutations that pre-dispose the individual to breast cancer such as one or more mutations in the BRCA genes. Other mutations may include any mutations in the art that are considered to pre-dispose individuals to breast cancer. In any of the methods of treatment described herein, the individual may not harbour breast cancer but may harbour one or more genetic mutations that pre-dispose the individual to breast cancer, and this individual may be subjected to any of the methods of monitoring described herein. For example, in any of the methods described herein, the individual does not harbour breast cancer and harbours one or more mutations that predispose the individual to an increased risk of developing breast cancer, and wherein one or more treatments administered to the individual comprises one or more doses of mifepristone. In any of the methods described herein, the individual does not harbour breast cancer and harbours one or more mutations in a BRCA gene, and wherein one or more treatments administered to the individual comprises one or more doses of mifepristone

[0364] Other exemplary treatments comprise one or more surgical procedures, one or more chemotherapeutic agents, one or more cytotoxic chemotherapeutic agents one or more radiotherapeutic agents, one or more immunotherapeutic agents, one or more biological therapeutics, one or more anti-hormonal treatments or any combination of the above following a positive diagnosis of cancer.

[0365] Cancer treatments may be administered to an individual harbouring breast cancer or at risk of breast cancer development, in an amount sufficient to prevent, treat, cure, alleviate or partially arrest breast cancer or one or more of its symptoms. Such treatments may result in a decrease in severity, and/or decreased breast cancer index value, of breast cancer symptoms, or an increase in frequency or duration of symptom-free periods. A treatment amount adequate to accomplish this is defined as “therapeutically effective amount”. Effective amounts for a given purpose will depend on the severity of breast cancer and/or the individual's breast cancer index value as well as the weight and general state of the individual. As used herein, the term “individual” includes any human, preferably wherein the human is a woman. As used herein, “treatment” is to be considered synonymous with “therapeutic agent”.

[0366] The following therapeutic agents may be administered to an individual based on their breast cancer risk alone or in combination with any other treatment described herein. The therapeutic agent may be directly attached, for example by chemical conjugation, to an antibody. Methods of conjugating agents or labels to an antibody are known in the art. For example, carbodiimide conjugation (Bauminger & Wilchek (1980) Methods Enzymol. 70, 151-159) may be used to conjugate a variety of agents, including doxorubicin, to antibodies or peptides. The water-soluble carbodiimide, 1-ethyl-3-(3-dimethylaminopropyl) carbodiimide (EDC) is particularly useful for conjugating a functional moiety to a binding moiety. Other methods for conjugating a moiety to antibodies can also be used. For example, sodium periodate oxidation followed by reductive alkylation of appropriate reactants can be used, as can glutaraldehyde cross-linking. However, it is recognised that, regardless of which method of producing a conjugate of the invention is selected, a determination must be made that the antibody maintains its targeting ability and that the functional moiety maintains its relevant function.

[0367] A cytotoxic moiety may be directly and/or indirectly cytotoxic. By “directly cytotoxic” it is meant that the moiety is one which on its own is cytotoxic. By “indirectly cytotoxic” it is meant that the moiety is one which, although is not itself cytotoxic, can induce cytotoxicity, for example by its action on a further molecule or by further action on it. The cytotoxic moiety may be cytotoxic only when intracellular and is preferably not cytotoxic when extracellular.

[0368] Cytotoxic chemotherapeutic agents are well known in the art. Cytotoxic chemotherapeutic agents, such as anticancer agents, include: alkylating agents including nitrogen mustards such as mechlorethamine (HN2), cyclophosphamide, ifosfamide, melphalan (L-sarcolysin) and chlorambucil; ethylenimines and methylmelamines such as hexamethylmelamine, thiotepa; alkyl sulphonates such as busulfan; nitrosoureas such as carmustine (BCNU), lomustine (CCNU), semustine (methyl-CCNU) and streptozocin (streptozotocin); and triazenes such as decarbazine (DTIC; dimethyltriazenoimidazole-carboxamide); Antimetabolites including folic acid analogues such as methotrexate (amethopterin); pyrimidine analogues such as fluorouracil (5-fluorouracil; 5-FU), floxuridine (fluorodeoxyuridine; FUdR) and cytarabine (cytosine arabinoside); and purine analogues and related inhibitors such as mercaptopurine (6-mercaptopurine; 6-MP), thioguanine (6-thioguanine; TG) and pentostatin (2′-deoxycoformycin). Natural Products including vinca alkaloids such as vinblastine (VLB) and vincristine; epipodophyllotoxins such as etoposide and teniposide; antibiotics such as dactinomycin (actinomycin D), daunorubicin (daunomycin; rubidomycin), doxorubicin, bleomycin, plicamycin (mithramycin) and mitomycin (mitomycin C); enzymes such as L-asparaginase; and biological response modifiers such as interferon alphenomes. Miscellaneous agents including platinum coordination complexes such as cisplatin (cis-DDP) and carboplatin; anthracenedione such as mitoxantrone and anthracycline; substituted urea such as hydroxyurea; methyl hydrazine derivative such as procarbazine (N-methylhydrazine, MIH); and adrenocortical suppressant such as mitotane (o,p′-DDD) and aminoglutethimide; taxol and analogues/derivatives; and hormone agonists/antagonists such as flutamide and tamoxifen.

[0369] A cytotoxic chemotherapeutic agent may be a cytotoxic peptide or polypeptide moiety which leads to cell death. Cytotoxic peptide and polypeptide moieties are well known in the art and include, for example, ricin, abrin, Pseudomonas exotoxin, tissue factor and the like. Methods for linking them to targeting moieties such as antibodies are also known in the art. Other ribosome inactivating proteins are described as cytotoxic agents in WO 96/06641. Pseudomonas exotoxin may also be used as the cytotoxic polypeptide. Certain cytokines, such as TNFα and IL-2, may also be useful as cytotoxic agents.

[0370] Certain radioactive atoms may also be cytotoxic if delivered in sufficient doses. Radiotherapeutic agents may comprise a radioactive atom which, in use, delivers a sufficient quantity of radioactivity to the target site so as to be cytotoxic. Suitable radioactive atoms include phosphorus-32, iodine-125, iodine-131, indium-111, rhenium-186, rhenium-188 or yttrium-90, or any other isotope which emits enough energy to destroy neighbouring cells, organelles or nucleic acid. Preferably, the isotopes and density of radioactive atoms in the agents of the invention are such that a dose of more than 4000 cGy (preferably at least 6000, 8000 or 10000 cGy) is delivered to the target site and, preferably, to the cells at the target site and their organelles, particularly the nucleus.

[0371] The radioactive atom may be attached to an antibody, antigen-binding fragment, variant, fusion or derivative thereof in known ways. For example, EDTA or another chelating agent may be attached to the binding moiety and used to attach 111In or 90Y. Tyrosine residues may be directly labelled with 125I or 131I.

[0372] A cytotoxic chemotherapeutic agent may be a suitable indirectly-cytotoxic polypeptide. In a particularly preferred embodiment, the indirectly cytotoxic polypeptide is a polypeptide which has enzymatic activity and can convert a non-toxic and/or relatively non-toxic prodrug into a cytotoxic drug. With antibodies, this type of system is often referred to as ADEPT (Antibody-Directed Enzyme Prodrug Therapy). The system requires that the antibody locates the enzymatic portion to the desired site in the body of the patient and after allowing time for the enzyme to localise at the site, administering a prodrug which is a substrate for the enzyme, the end product of the catalysis being a cytotoxic compound. The object of the approach is to maximise the concentration of drug at the desired site and to minimise the concentration of drug in normal tissues. In a preferred embodiment, the cytotoxic moiety is capable of converting a non-cytotoxic prodrug into a cytotoxic drug.

### Method of Monitoring

[0373] The invention also provides methods of monitoring the risk of the presence or development of breast cancer in an individual.

[0374] “Monitoring” in the context of the present invention may refer to longitudinal assessment of an individual's risk of harbouring breast cancer or risk of breast cancer development. This longitudinal assessment may be carried out according to the assays of the invention described herein. This longitudinal assessment may involve performance of the assays of the invention described herein to predict the presence or development of breast cancer in an individual at more than one time point over the course of an undetermined time window. The time window may be any period of time whilst the individual is still living. The time window may persist for the lifetime of the individual. The time window may persist until the individual's risk of harbouring breast cancer or risk of breast cancer development falls below a certain level. The level may be a particular breast cancer index value e.g. a WID-BC-index value.

[0375] The invention thus encompasses a method of monitoring the risk of an individual harbouring breast cancer or of monitoring the risk of breast cancer development, the method comprising:
[0376] a. predicting the presence or breast cancer in an individual or predicting breast cancer development in an individual by performing any one of the assays described herein at a first time point;
[0377] b. predicting the presence of breast cancer in the individual or predicting breast cancer development in the individual by performing any one of the assays described herein at one or more further time points; and
[0378] c. monitoring any change in the individual's risk between time points.

[0379] The invention also encompasses a method of monitoring the risk of an individual harbouring breast cancer or of monitoring the risk of breast cancer development, the method comprising:
[0380] a. predicting the presence or breast cancer in an individual or predicting breast cancer development in an individual by performing an assay at a first time point, comprising:
   [0381] i. providing a sample which has been taken from the individual;
   [0382] ii. determining in DNA in the sample the methylation status of each CpG in a set of test CpGs selected from the panel of CpGs identified at nucleotide positions 61 to 62 in SEQ ID NOs 1 to 40,753;
   [0383] iii. deriving a breast cancer index value based on the methylation status of the test CpGs; and
   [0384] iv. predicting the presence or development of breast cancer in the individual based on the breast cancer index value;
      [0385] wherein the assay is characterised as having an area under the curve (AUC) of 0.6 or more as determined by receiver operating characteristics (ROC);
[0386] b. predicting the presence of breast cancer in the individual or predicting breast cancer development in the individual by performing any one of the assays described herein at one or more further time points; and
[0387] c. monitoring any change in the individual's risk between time points.

[0388] The invention also encompasses a method of monitoring the risk of an individual harbouring breast cancer or of monitoring the risk of breast cancer development, the method comprising:
[0389] a. predicting the presence or breast cancer in an individual or predicting breast cancer development in an individual by performing an assay at a first time point, comprising:
   [0390] i. providing a sample which has been taken from the individual;
   [0391] ii. determining in DNA in the sample the methylation status of each CpG in a set of test CpGs comprises at least 500 CpGs selected from the CpGs identified at nucleotide positions 61 to 62 in SEQ ID NOs 1 to 40,753;
   [0392] iii. deriving a breast cancer index value based on the methylation status of the test CpGs; and
   [0393] iv. predicting the presence or development of breast cancer in the individual based on the breast cancer index value;
      [0394] wherein the assay is characterised as having an area under the curve (AUC) of 0.73 or more as determined by receiver operating characteristics (ROC);
[0395] b. predicting the presence of breast cancer in the individual or predicting breast cancer development in the individual by performing any one of the assays described herein at one or more further time points; and
[0396] c. monitoring any change in the individual's risk between time points.

[0397] The invention also encompasses a method of monitoring the risk of an individual harbouring breast cancer or of monitoring the risk of breast cancer development, the method comprising:
[0398] a. predicting the presence or breast cancer in an individual or predicting breast cancer development in an individual by performing an assay at a first time point, comprising:
   [0399] i. providing a sample which has been taken from the individual;
   [0400] ii. determining in DNA in the sample the methylation status of each CpG in a set of test CpGs comprises at least 1000 CpGs selected from the CpGs identified at nucleotide positions 61 to 62 in SEQ ID NOs 1 to 40,753;
   [0401] iii. deriving a breast cancer index value based on the methylation status of the test CpGs; and
   [0402] iv. predicting the presence or development of breast cancer in the individual based on the breast cancer index value;
      [0403] wherein the assay is characterised as having an area under the curve (AUC) of 0.77 or more as determined by receiver operating characteristics (ROC);
[0404] b. predicting the presence of breast cancer in the individual or predicting breast cancer development in the individual by performing any one of the assays described herein at one or more further time points; and
[0405] c. monitoring any change in the individual's risk between time points.

[0406] The invention also encompasses a method of monitoring the risk of an individual harbouring breast cancer or of monitoring the risk of breast cancer development, the method comprising:
[0407] a. predicting the presence or breast cancer in an individual or predicting breast cancer development in an individual by performing an assay at a first time point, comprising:
   [0408] i. providing a sample which has been taken from the individual;
   [0409] ii. determining in DNA in the sample the methylation status of each CpG in a set of test CpGs comprises at least 2000 CpGs selected from the CpGs identified at nucleotide positions 61 to 62 in SEQ ID NOs 1 to 40,753;
   [0410] iii. deriving a breast cancer index value based on the methylation status of the test CpGs; and
   [0411] iv. predicting the presence or development of breast cancer in the individual based on the breast cancer index value;
      [0412] wherein the assay is characterised as having an area under the curve (AUC) of 0.81 or more as determined by receiver operating characteristics (ROC);
[0413] b. predicting the presence of breast cancer in the individual or predicting breast cancer development in the individual by performing any one of the assays described herein at one or more further time points; and
[0414] c. monitoring any change in the individual's risk between time points.

[0415] In any of the methods of monitoring encompassed by the invention, the steps of predicting the presence of breast cancer or development of breast cancer in an individual may involve determining in DNA derived in the sample the methylation status of in any set of test CpGs according to the assays of the invention.

[0416] In any of the methods of monitoring described herein, the steps of predicting the presence or development of breast cancer in an individual based on a breast cancer index value may involve the application of threshold values. Threshold values can provide an indication of an individual's risk of harbouring breast cancer or an individual's risk of breast cancer development. For example, breast cancer index values may indicate at least a low risk, a modest risk, and/or a high risk of predicting the presence or development of breast cancer. In any of the methods of monitoring encompassed by the invention, the step of predicting the presence or development of breast cancer in an individual may involve deriving a WID-BC-index value.

[0417] In any of the methods of monitoring described herein, the individual may already harbour breast cancer. The individual may not have breast cancer. The individual may not harbour breast cancer. The individual may not harbour breast cancer but may harbour one or more genetic mutations that predispose the individual to an increased risk of breast cancer development e.g. the individual may harbour one or more mutations in a BRCA gene. Other mutations may include any mutations in the art that are considered to pre-dispose individuals to breast cancer. In any of the methods of monitoring described herein, the individual may not harbour breast cancer but may harbour one or more genetic mutations that pre-dispose the individual to breast cancer, and this individual may be subjected to any of the methods of monitoring described herein in order to determine their risk of harbouring breast cancer or of breast cancer development. For example, in any of the methods described herein, the individual does not harbour breast cancer and harbours one or more mutations that predispose the individual to an increased risk of developing breast cancer, and wherein one or more treatments are administered to the individual in accordance with any of the methods of treatment described herein as a method of prophylaxis. In any of the methods described herein, the individual does not harbour breast cancer and harbours one or more mutations that predispose the individual to an increased risk of developing breast cancer, and wherein one or more treatments are administered to the individual in accordance with any of the methods of treatment described herein as a method of prophylaxis, and wherein the one or more treatments administered to the individual comprises one or more doses of SPRMs e.g. comprising one or more doses of mifepristone.

[0418] In any of the methods of monitoring described herein, depending on the risk of the presence or development of breast cancer in the individual, one or more treatments are administered to the individual according to any one of the methods of treatment encompassed by the invention and described herein. Different treatments may be administered depending on the stratification of an individual on the basis of their risk of harbouring breast cancer or on the basis of their risk of breast cancer development. The method may further comprise administration of one or more treatments according to the methods of treatment described herein.

[0419] The breast cancer index value may change between any two or more time points. Likewise, in the sample taken from the individual, epithelial cell proportion, fat cell proportion and/or differentiation status of non-fat cells may change between any two or more time points. For this reason, longitudinal monitoring of an individual's breast cancer index value could be of particular benefit to the assessment of, for example, breast cancer progression, treatment efficacy, or breast cancer efficacy.

[0420] Any of the methods described herein may comprise:
[0421] a. determining the proportion of epithelial cells in the sample from the individual between any two or more time points and assessing if the proportion changes between time points;
[0422] b. determining the proportion of fat cells in the sample from the individual between any two or more time points and assessing if the proportion changes between time points; and/or
[0423] c. determining differentiation characteristics of non-fat cells in the sample from the individual between any two or more time points and assessing if the proportion changes between time points.

[0424] In any of the methods described herein, wherein
[0425] a. an increase in the breast cancer index value and an increase in the proportion of epithelial cells; and/or
[0426] b. an increase in the breast cancer index value and a decrease in the proportion of fat cells; and/or
[0427] c. an increase in the breast cancer index value and an increase in differentiation of non-fat cells towards fat cells,

[0428] indicates a negative response to the one or more treatments. Changes may be made to the one or more treatments if a negative response is identified.

[0429] In any of the methods described herein, wherein
[0430] a. a decrease in the breast cancer index value and a decrease in the proportion of epithelial cells;
[0431] b. a decrease in the breast cancer index value and an increase in the proportion of fat cells; and/or
[0432] c. a decrease in the breast cancer index value and a decrease in differentiation of non-fat cells towards fat cells,

[0433] indicates a positive response to the one or more treatments. Changes may be made to the one or more treatments if a positive response is identified.

[0434] In any of the methods of monitoring described herein, the one or more further time points may be any suitable time point. Preferably the one or more further time points may of suitable distance apart for sufficiently frequent screening in order to predict any particularly early onset cases of presence or development of breast cancer in an individual. Preferably the one or more further time points may be of suitable distance apart for assessing the efficacy of one or more treatments. Preferably the one or more further time points may be of suitable distance apart for predicting whether an individual remains free of cancer after a successful course of treatment. The one or more further time points may be about monthly, about two monthly, about three monthly, about four monthly, about five monthly, about six monthly, about seven monthly, about eight monthly, about nine monthly, about ten monthly, about eleven monthly, about yearly, about two yearly, or more than two yearly.

[0435] In any of the methods of monitoring described herein, changes may be made to the one or more treatments wherein a positive or negative responses to the one or more treatments are observed. Treatments may be changed in accordance with the methods of treatments described herein. Treatments may particularly be changed if the individual's risk stratification, based on their breast cancer index value, changes.

[0436] In any of the methods of monitoring encompassed by the invention, the step of predicting the presence or development of breast cancer in an individual may involve the use of any one of the arrays described herein.

### Arrays and Kits

[0437] The invention also encompasses arrays capable of discriminating between methylated and non-methylated forms of CpGs as defined herein; the arrays may comprise oligonucleotide probes specific for methylated forms of CpGs as defined herein and oligonucleotide probes specific for non-methylated forms of CpGs as defined herein. In any of the arrays described herein, the array may comprise oligonucleotide probes specific for a methylated form of each CpG in a CpG panel and oligonucleotide probes specific for a non-methylated form of each CpG in the panel; wherein the panel consists of at least 500 CpGs selected from the CpGs identified in SEQ ID NOs 1 to 40,753

[0438] In some embodiments the array is not an Infinium MethylationEPIC BeadChip array or an Illumina Infinium HumanMethylation450 BeadChip array.

[0439] Separately or additionally, in some embodiments the number of CpG-specific oligonucleotide probes of the array is 482,000 or less, 480,000 or less, 450,000 or less, 440,000 or less, 430,000 or less, 420,000 or less, 410,000 or less, or 400,000 or less, 375,000 or less, 350,000 or less, 325,000 or less, 300,000 or less, 275,000 or less, 250,000 or less, 225,000 or less, 200,000 or less, 175,000 or less, 150,000 or less, 125,000 or less, 100,000 or less, 75,000 or less, 50,000 or less, 45,000 or less, 40,000 or less, 35,000 or less, 30,000 or less, 25,000 or less, 20,000 or less, 15,000 or less, 10,000 or less, 5,000 or less, 4,000 or less, 3,000 or less or 2,000 or less.

[0440] The CpG panel may comprise any set of CpGs defined in the assays of the invention described herein.

[0441] The arrays of the invention may comprise one or more oligonucleotides comprising any set of CpGs defined in the assays of the invention, wherein the one or more oligonucleotides are hybridized to corresponding oligonucleotide probes of the array.

[0442] The invention also encompasses a process for making a hybridized array described herein, comprising contacting an array according to the present invention with a group of oligonucleotides comprising any set of CpGs defined in the assays of the invention.

[0443] Any of the arrays as defined herein may be comprised in a kit. The kit may comprise any array as defined herein together with instructions for use.

[0444] The invention further encompasses the use of any of the arrays as defined herein in any of the assays for determining the methylation status of CpGs for the purposes of predicting the presence or development of breast cancer in an individual.

[0445] The invention is illustrated by the following Examples:

### EXAMPLES

[0446] Breast cancer is by far the most common cancer in females in general, and a leading cause of death in young women¹. To date, the identification of individuals with primary cancer is achieved by assessing evidence directly from the tumour (e.g. imaging or detection of cancer cell products released into the system^{3,4}). Currently available early detection strategies, such as mammography screening, suffer from low performance in young women, over-diagnosis, and decreasing attendance rates, and its benefit on mortality rates has recently been questioned⁵. Developing models which allow for a stratified breast cancer early detection and prevention strategy have proven to be challenging, and the best predictive models combining epidemiological risk factors, single nucleotide polymorphisms (SNPs) and mammographic density have only led to a Receiver Operator Characteristic (ROC) Area Under the Curve (AUC) of 0.68⁶.

[0447] In contrast, cervical cancer screening (i.e. assessing cervical smear samples) has reduced the incidence and mortality from cervical cancer by more than 50%⁷. The fact that clinician- and self-collected samples show similar performance in detecting relevant cervical lesions' is likely to further increase attendance rates.

[0448] Epigenetic (i.e. DNAme) changes have been identified in normal breast tissue adjacent to breast cancers' and could potentially serve as a surrogate for both genetic and non-genetic factors including lifestyle, reproductive and environmental exposures contributing to breast cancer development¹⁰ . A number of proof of principle studies, so far exclusively performed in blood, have demonstrated that certain DNAme changes are associated with breast cancer predisposition¹¹⁻¹⁶. Sample heterogeneity and the choice of surrogate tissue are deemed to be among the most important factors impeding clinical implementation¹⁷. Thus, we aimed to assess whether DNAme profiles derived from cervical smear samples (i.e. containing hormone sensitive epithelial cells which are capable of recording breast cancer-predisposing factors at the level of the epigenome¹⁷ and can be self-collected) are able to identify women with primary breast cancer.

[0449] We performed an epigenome-wide DNAme analysis in cervical smear samples from women who had recently been diagnosed with breast cancer, and in matched controls, and established the WID-BC-index (Women's risk IDentification for Breast Cancer index) which we further validated in buccal samples and in an independent set of cervical samples. In addition, we assessed the WID-BC-index in a larger number of different cell types as well as in breast samples, including normal breast samples from clinical trials before and after an intervention.

### Materials and Methods

### Study Design and Epidemiological Data Acquisition:

[0450] The study was conducted as part of a multi-centre study involving several recruitment sites in 5 European countries (i.e. the UK, Czech Republic, Italy, Norway and Germany) (Table 2).

TABLE 2
Overview of breast cancer cases and control cases collected
in different countries (discovery set).

| Country | Breast cancer | Control | Total |
|---|---|---|---|
| Czech | 32 | 206 | 238 |
| Germany | 36 | 2 | 38 |
| Italy | 201 | 53 | 254 |
| Norway | 0 | 132 | 132 |
| UK | 16 | 385 | 401 |
| Total | 365 | 698 | 1,063 |

[0451] Participants were aged >18 years. Prior to taking part, each prospective study volunteer was given a Participant Information Sheet as well as a Consent Form and the rationale for the study was explained. Additional resources, including an explanatory video and further online resources, were also made available. Women diagnosed with breast cancer (case) or a non-malignant benign gynaecological condition (control) were approached during outpatient hospital clinics, while women recruited as healthy volunteers from the general population (control) were approached via outreach campaigns, public engagement, and as part of cervical screening programmes. After signing an informed consent, participants completed an epidemiological questionnaire as well as a feedback form after their participation. The study itself is a sub-study of the FORECEE (4C) Programme, which has ethical approval from the UK Health Research Authority (REC 14/LO/1633) and other contributing centres.

[0452] The epidemiological survey was administered via the Qualtrics application on dedicated iPads. The survey contained questions relating to health habits, relevant risk factors, and also made enquiries as to historical health habits, as well as obtaining a thorough medical and obstetric history. Cervical samples were collected at appropriate clinical venues by trained staff and the cervical smears were carried out by a small group of research midwives or physicians with a view to establishing standard practice. Buccal samples were collected using Copan 4N6FLOQ Swabs, Thermofisher Scientific.

[0453] Biological samples were given an anonymous Participant ID Number which was assigned to the person's name in a securely stored link file. Following sample taking, an email survey was sent to each participant, enabling them to feedback with respect to the recruitment process. Women with a current diagnosis of a primary breast cancer with poor prognosis features (Grade III and/or T2/3 and/or N1/2 and/or HR-ve) and recruited prior to receiving any systemic treatment (chemo- or antihormonal or Herceptin, etc.) or surgery or radiotherapy were eligible as breast cancer cases. Controls were initially matched one-to-one with cases based on menopausal status, age (5 year age ranges where possible), and recruitment centre/country. However, due to an imbalance in recruitment of cases and controls at some centres, a number of cases were matched on age and menopausal status alone. Cancer histological data was collected post-recruitment either by clinicians directly involved in the diagnosis/treatment of the cancer cases or by a nominated data manager with access to the in-house hospital

### Cervical Smear Sample Collection

[0454] Cervical smears were taken at collaborating hospitals and recruitment centres using the ThinPrep system (Hologic Inc., cat #70098-002). Cervical cells were sampled from the cervix using a cervix brush (Rovers Medical Devices, cat #70671-001) which was rotated 5 times through 360 degrees whilst in contact with the cervix to maximise cell sampling. The brush was removed from the vagina and immersed in a ThinPrep vial containing Preserve-cyt fluid and then pushed against the bottom of the vial 10 times to facilitate release of the cells from the brush into the solution. The sample vial was sealed and stored locally at room temperature. Buccal cells were collected using two Copan 4N6FLOQ Buccal Swabs (Copan Medical Diagnostics, cat #4504C) by firmly brushing the swab head 5-6 times against the buccal mucosa of each cheek. The swabs were re-capped and left to dry out at room temperature within the sampling tube which contains a drying desiccant. 2.5 ml of venous whole blood was collected in PAX gene blood DNA tubes (BD Biosciences #761165) and stored locally at 4° C. All samples were shipped to UCL at ambient temperature.

### Breast Tissue Samples

[0455] We have analysed two independent sets of breast tissue samples. The first set contained a total of 56 breast samples from premenopausal women aged 19-54 years (FIG. 7B): normal breast tissue from 14 women who underwent cosmetic breast operations, normal breast tissue from women who underwent prophylactic mastectomies due to a BRCA1 (n=9) or a BRCA2 (n=5) mutation, and 14 women who had breast surgery due to a triple negative breast cancer and who provided both normal adjacent breast tissue as well as cancer tissue samples. All samples were collected fresh from theatre and samples processed within 1 hr of surgical excision. Fresh samples were frozen rapidly in Liquid Nitrogen and stored at −80° C. Ethical approval was obtained from the NRES Committee East of England (reference number 15/EE/0192).

[0456] The second set of samples were obtained from the clinical trial “The Effect of a Progesterone Receptor Modulator on Breast Tissue in Women With BRCA-1 and -2 Mutations—a Placebo Controlled RCT” (ClinicalTrials.gov Identifier: NCT01898312; regional ethical review board at Karolinska Institutet permit 2009/144-31/4). Study subjects were healthy premenopausal women aged 18-43 years with regular menstrual cycles lasting 25-35 days and with no contraindications to mifepristone. The main exclusion criteria were: use of any hormonal or intrauterine contraception and pregnancy or breastfeeding 2 months prior to the study; a history of breast cancer or other malignancies and adnexal abnormality upon transvaginal ultrasound examination. All women were instructed to use barrier contraceptive methods throughout the duration of the study.

[0457] After signing an informed consent, study subjects were randomised into two groups. One group (i.e. 11 BRCA carriers and 9 controls) was treated with 50 mg mifepristone (one quarter of 200 mg Mifegyne®, Exelgyn, Paris, France) every other day for two months (56 days) starting on the first day of the menstrual cycle. As mifepristone is only available in 200 mg tablets in Sweden, a study nurse divided the tablets into 4 parts and instructed the study subjects to take one part every other day. The placebo group (i.e. 4 BRCA carriers and 11 controls) received B-vitamin tablets which are visually identical (one quarter of TrioBe® Recip) to mifepristone. Tablets were dispensed for two weeks at a time.

[0458] Core needle aspiration biopsies were collected at baseline, before treatment, and at the end of treatment during the luteal phase. The biopsies were collected under ultrasound guidance from the upper outer quadrant of one breast using a 14 Gauge needle with an outer diameter of 2.2 mm. The end-of-treatment breast biopsy was taken from the same area.

### Sample Processing and DNA Extraction

[0459] When preparing for sample storage in the laboratory, cervical smear samples were poured into 50 ml Falcon tubes and left to sediment at room temperature for 2 hours. 1 mL wide bore tips were then used to transfer the enriched cellular sediment into a 2 mL vial. The cervical sediments were washed twice with PBS, lysed, and stored temporarily at −20° C. ahead of extraction. The Copan 4N6FLOQ Buccal Swabs were cut and lysed sequentially in the same aliquot of lysis buffer prior to temporary storage at −20° C. ahead of extraction. Whole blood samples were simply held transiently at −20° C. until DNA extraction. DNA was extracted from whole blood, cervical and buccal tissue lysates on a Hamilton Star liquid handling platform using the Nucleo-Mag Blood 200 ul kit (Macherey Nagel, cat #744501.4) with prior modifications for optimal lysis of cervical cell pellets and paired buccal swabs. For breast tissues, DNA was extracted from up to 40 mg of tissue using the Lipid Tissue kit from Macherey Nagel (cat #740471.50), and the manufacturer's instructions were followed. DNA concentration and quality absorbance ratios were measured using Nanodrop-8000, Thermoscientific Inc. Extracted DNA was stored at −80° C. until further analysis.

### DNA Methylation Array Analysis

[0460] Cervical, buccal and breast tissue DNA was normalised to 25 ng/ul and 500 ng total DNA was bisulfite modified using the EZ-96 DNA Methylation-Lightning kit (Zymo Research Corp, cat #D5047) on the Hamilton Star Liquid handling platform. 8 ul of modified DNA was subjected to methylation analysis on the Illumina InfiniumMethylation EPIC BeadChip (Illumina, Calif., USA) at UCL Genomics according to the manufacturer's standard protocol.

### Methylation Analysis

[0461] Methylation microarrays were processed using the R package minfi. Any samples with median methylated and unmethylated intensities <9.5 were removed. The champ.filter function in the R package ChAMP was used to filter non-CpG (2,932), SNP-related (81,531), and multi-hit (49) probes. Any probes with a detection p-value >0.01 in more than 10% of samples were removed. The beta mixture quantile normalisation (BMIQ) algorithm was used to normalise beta values (via the champ.norm function). Since BMIQ does not allow for missing values, the champ.impute function was therefore used to impute any missing values (0.008% of values were missing).

[0462] In the discovery cohort, 144 samples and 2,554 probes were removed during QC (one plate containing 96 samples was removed due to low quality) resulting in a final data matrix with 1,063 samples and 779,773 CpGs. The external validation dataset consisted of 335 samples and 781,570 probes after 17 samples and 2,868 probes were removed during QC. No samples and 2,556 probes were removed from the buccal dataset and the resulting data matrix comprised 404 samples and 780,049 CpGs.

[0463] The fraction of immune cell contamination, and the relative proportions of different immune cell subtypes in each sample, were estimated using the EpiDISH algorithm using the epithelial, fibroblast and immune cell reference dataset. The top 1,000 most variable probes (ranked by standard deviation) were used in a principal component analysis. Statistical tests were performed in order to identify any anomalous associations between plate, sentrix position, date of array processing, date of DNA creation, study centre, immune contamination fraction, age, type (case versus control) and the top ten principal components. In the discovery cohort, one plate (containing 96 samples) was found to have anomalous beta values and was removed from the dataset. Finally, two-thirds of the discovery dataset was randomly selected for use as the training dataset and the remaining third was allocated to the internal validation dataset. This split was carried out once, and the same training and validation sets were used in all subsequent analyses.

[0464] 113 samples were downloaded from the ENCODE database (https://www.encodeproject.org/; see Table 3). The beta mixture quantile normalisation was applied to these samples after using minfi to extract beta values. The WID-BC-index was then computed using the 40,753 required CpGs.

TABLE 3
Overview of the ENCODE samples used.

| | Biosample term | Biosample | |
|---|---|---|---|
| Experiment | name | type | Type |
| ENCSR001NC | thyroid gland | Tissue | epithelial |
| ENCSR002EIR | sigmoid colon | Tissue | epithelial |
| ENCSR002LED | transverse colon | Tissue | epithelial |
| ENCSR039CG | tibial nerve | Tissue | non_epitheli |
| ENCSR050XGE | tibial artery | Tissue | non_epitheli |
| ENCSR061NRX | tibial nerve | Tissue | non_epitheli |
| ENCSR069UIN | gastrocnemius | Tissue | non_epitheli |
| | medialis | | |
| ENCSR079OX | bipolar neuron | in vitro | non_epitheli |
| | | differentiated | |
| ENCSR080HYX | prostate gland | Tissue | epithelial |
| ENCSR090CRZ | transverse colon | Tissue | epithelial |
| ENCSR096DB | stomach | Tissue | epithelial |
| ENCSR097SQ | esophagus squamous | Tissue | epithelial |
| ENCSR113TRL | upper lobe of left | Tissue | epithelial |
| | lung | | |
| ENCSR147FPX | sigmoid colon | Tissue | epithelial |
| ENCSR148KKY | mammary epithelial | primary cell | epithelial |
| | cell | | |
| ENCSR154ELD | esophagus squamous | Tissue | epithelial |
| ENCSR173NTZ | thyroid gland | Tissue | epithelial |
| ENCSR190PQ | heart left ventricle | Tissue | non_epitheli |
| ENCSR190WY | vagina | Tissue | epithelial |
| ENCSR193BIR | gastrocnemius | Tissue | non_epitheli |
| | medialis | | |
| ENCSR200LAH | esophagus squamous | Tissue | epithelial |
| ENCSR201NNA | Peyer's patch | Tissue | non_epitheli |
| ENCSR203HAK | lower leg skin | Tissue | epithelial |
| ENCSR209XGZ | adrenal gland | Tissue | non_epitheli |
| ENCSR215SBD | gastroesophageal | Tissue | non_epitheli |
| | sphincter | | |
| ENCSR244HUE | kidney epithelial | primary cell | epithelial |
| | cell | | |
| ENCSR246VHI | neural progenitor | in vitro | non_epitheli |
| | cell | differentiated | |
| ENCSR248EIV | gastrocnemius | Tissue | non_epitheli |
| | medialis | | |
| ENCSR262IUB | gastroesophageal | Tissue | non_epitheli |
| | sphincter | | |
| ENCSR276YFP | spleen | Tissue | non_epitheli |
| ENCSR280LMY | right atrium | Tissue | non_epitheli |
| | auricular region | | |
| ENCSR301SLO | lower leg skin | Tissue | epithelial |
| ENCSR304AIL | testis | Tissue | epithelial |
| ENCSR306JCS | omental fat pad | Tissue | non_epitheli |
| ENCSR312XVJ | esophagus squamous | Tissue | epithelial |
| ENCSR315CV | subcutaneous | in vitro | non_epitheli |
| | adipose tissue | differentiated | |
| ENCSR329WA | thyroid gland | Tissue | epithelial |
| ENCSR340GP | stomach | Tissue | epithelial |
| ENCSR343SAU | skeletal muscle | primary cell | non_epitheli |
| | myoblast | | |
| ENCSR353IUV | suprapubic skin | Tissue | epithelial |
| ENCSR371REA | adrenal gland | Tissue | non_epitheli |
| ENCSR392LYN | breast epithelium | Tissue | epithelial |
| ENCSR393CCK | breast epithelium | in vitro | epithelial |
| | | differentiated | |
| ENCSR394PUR | vagina | Tissue | epithelial |
| ENCSR399KXO | adrenal gland | Tissue | non_epitheli |
| ENCSR406QEF | thyroid gland | Tissue | epithelial |
| ENCSR415PYP | prostate gland | Tissue | epithelial |
| ENCSR418YFM | subcutaneous | Tissue | non_epitheli |
| | adipose tissue | | |
| ENCSR420WU | smooth muscle cell | in vitro | non_epitheli |
| | | differentiated | |
| ENCSR422EPB | epithelial cell of | primary cell | epithelial |
| | alveolus of lung | | |
| ENCSR425TKT | tibial artery | Tissue | non_epitheli |
| ENCSR426CDE | upper lobe of left | Tissue | epithelial |
| | lung | | |
| ENCSR444YPR | upper lobe of left | Tissue | epithelial |
| | lung | | |
| ENCSR448FCV | suprapubic skin | Tissue | epithelial |
| ENCSR449VM | cardiac muscle cell | Tissue | non_epitheli |
| ENCSR461NFO | lower leg skin | Tissue | epithelial |
| ENCSR467AVQ | Peyer's patch | Tissue | non_epitheli |
| ENCSR468IFF | myotube | in vitro | non_epitheli |
| | | differentiated | |
| ENCSR472PKR | esophagus | Tissue | epithelial |
| | muscularis mucosa | | |
| ENCSR486SM | ascending aorta | Tissue | non_epitheli |
| ENCSR493EGV | upper lobe of left | Tissue | epithelial |
| | lung | | |
| ENCSR511SNB | ovary | Tissue | epithelial |
| ENCSR515ZCU | heart left ventricle | Tissue | non_epitheli |
| ENCSR517JQA | right atrium | Tissue | non_epitheli |
| | auricular region | | |
| ENCSR528NFI | non-pigmented | primary cell | epithelial |
| | ciliary epithelial | | |
| ENCSR551DKY | tibial nerve | Tissue | non_epitheli |
| ENCSR558ACF | transverse colon | Tissue | epithelial |
| ENCSR575WO | suprapubic skin | Tissue | epithelial |
| ENCSR580LHO | transverse colon | Tissue | epithelial |
| ENCSR582BM | coronary artery | Tissue | non_epitheli |
| ENCSR583ILE | mammary epithelial | primary cell | epithelial |
| | cell | | |
| ENCSR584HJL | spleen | Tissue | non_epitheli |
| ENCSR597BUD | body of pancreas | Tissue | epithelial |
| ENCSR598BUX | gastroesophageal | Tissue | non_epitheli |
| | sphincter | | |
| ENCSR604PTS | lower leg skin | Tissue | epithelial |
| ENCSR646XKN | tibial artery | Tissue | non_epitheli |
| ENCSR662NBA | omental fat pad | Tissue | non_epitheli |
| ENCSR675IVH | epithelial cell of | primary cell | epithelial |
| | proximal tubule | | |
| ENCSR688OH | coronary artery | Tissue | non_epitheli |
| ENCSR701SVQ | esophagus | Tissue | epithelial |
| | muscularis mucosa | | |
| ENCSR705PDD | body of pancreas | Tissue | epithelial |
| ENCSR719GFJ | Peyer's patch | Tissue | non_epitheli |
| ENCSR729VBL | tibial nerve | Tissue | non_epitheli |
| ENCSR731SPT | ascending aorta | Tissue | non_epitheli |
| ENCSR733HHJ | subcutaneous | Tissue | non_epitheli |
| | tadipose issue | | |
| ENCSR733WX | omental fat pad | Tissue | non_epitheli |
| ENCSR738XQ | skeletal muscle | primary cell | non_epitheli |
| | myoblast | | |
| ENCSR744AJV | ovary | Tissue | epithelial |
| ENCSR754ANZ | iris pigment | primary cell | epithelial |
| | epithelial cell | | |
| ENCSR756BTI | spleen | Tissue | non_epitheli |
| ENCSR773EP | sigmoid colon | Tissue | epithelial |
| ENCSR792ATG | suprapubic skin | Tissue | epithelial |
| ENCSR803DDS | uterus | Tissue | epithelial |
| ENCSR809OPY | myotube | primary cell | non_epitheli |
| ENCSR822VTU | esophagus | Tissue | epithelial |
| | muscularis mucosa | | |
| ENCSR827WS | sigmoid colon | Tissue | epithelial |
| ENCSR846DD | breast epithelium | Tissue | epithelial |
| ENCSR847BAX | astrocyte | primary cell | non_epitheli |
| ENCSR871SFO | esophagus | Tissue | epithelial |
| | muscularis mucosa | | |
| ENCSR889TZA | uterus | Tissue | epithelial |
| ENCSR899LHQ | retinal pigment | primary cell | epithelial |
| | epithelial cell | | |
| ENCSR899UFG | stomach | Tissue | epithelial |
| ENCSR905RZU | gastroesophageal | Tissue | non_epitheli |
| | sphincter | | |
| ENCSR922EBK | body of pancreas | Tissue | epithelial |
| ENCSR937LYZ | right lobe of liver | Tissue | epithelial |
| ENCSR940ZHS | body of pancreas | Tissue | epithelial |
| ENCSR942OLI | testis | Tissue | epithelial |
| ENCSR955LKF | hepatocyte | primary cell | epithelial |
| ENCSR962JMK | subcutaneous | Tissue | non_epitheli |
| | adipose tissue | | |
| ENCSR963NN | renal cortical | primary cell | epithelial |
| | epithelial cell | | |
| ENCSR976HY | choroid plexus | Tissue | non_epitheli |
| | epithelial cell | | |
| ENCSR991SII | tibial artery | Tissue | non_epitheli |
| ENCSR995PG | omental fat pad | Tissue | non_epitheli |

### Statistical Analyses for Classifier Development

[0465] Contamination by immune cells presented a challenge with respect to the identification of differentially methylated positions (DMPs) as differential methylation that occurred solely in epithelial cells was diminished in samples with high IC and vice versa. In order to overcome this, we linearly regressed the beta values on IC for each CpG site, the linear models being fitted to cases and controls separately. The intercept points at IC=0 were used as estimates of mean beta values in cases and controls in a pure epithelial cell population. The difference between these intercept points provided a delta-beta estimate in epithelial cells. The difference between intercept points at IC=1 provided immune cell delta-beta estimates. Two lists of ranked CpGs were produced according to delta-beta estimates in epithelial and immune cells.

[0466] The R package glmnet was used to train classifiers with a mixing parameter value of alpha=0 (ridge penalty) and alpha=1 (lasso penalty) with binomial response type. Data from the training dataset were used to fit the classifiers. Ten-fold cross-validation was used internally by the cv.glmnet function in order to determine the optimal value of the regularisation parameter lambda. The AUC was used as a metric of classifier performance which was evaluated on the internal validation dataset as a function of n, the number of CpGs used as inputs during training. For individual i, denote beta values from the top n CpGs ranked by epithelial and immune delta-betas as xᵢ₁, . . . , xᵢₙ and yᵢ₁, . . . , yᵢₙ respectively. Denote the IC fraction as ρᵢ. The following terms were used as inputs to the ridge and lasso classifiers:
[0467] xᵢ₁, . . . , xᵢₙ, (1−ρᵢ)xᵢ₁, . . . , (1−ρᵢ)xᵢₙ, yᵢ₁, . . . , yᵢₙ, ρᵢyᵢ₁, . . . , ρᵢyᵢₙ
   Note that the classifier is mathematically equivalent to the index described above. In addition to a classifier with these interaction terms, we also trained a second type of classifier based on xᵢ₁, . . . , xᵢₙ alone.

[0468] The optimal classifier was selected based on the highest AUC obtained in the internal validation dataset. Once the optimal number of inputs was determined, the training and internal validation datasets were combined and the classifier was refitted using the entire discovery dataset with alpha and lambda fixed to their optimal values. This finalised classifier was then applied to the external validation dataset and the corresponding AUC was computed.

### Enrichment Analysis

[0469] The epithelial delta-beta estimates were used to compute the top 1,000 hyper and hypo CpGs. These were used as inputs to the eFORGE 2.0 tool²⁰ (accessed at https://eforge.altiusinstitute.org/). Data from the “Consolidated Roadmap Epigenomics DHS” were used for the analysis. The default options of 1 kb proximity window, 1,000 background repetitions, and strict and marginal significance thresholds of 0.01 and 0.05 were used.

[0470] A gene set enrichment analysis (GSEA)²¹ was carried out by first selecting for each gene TSS200 region the CpG with the largest epithelial delta-beta estimate (both hyper- and hypo-methylated). Genes were then ranked according to the absolute value of these delta-beta estimates. The C2 curated gene set, c2.all.v6.2.symbols.gmt, was downloaded from MSigDB. The fgsea R package was used to perform the enrichment analysis with parameters minSize, maxSize, and nperm set to 15, 500, and 10,000 respectively.

### Analysis of Breast Tissue Samples

[0471] The cell type composition of each sample was estimated using EpIDISH with the epithelial, fibroblast, fat, and immune cell reference dataset. In contrast to cervical samples, fat cells constituted a substantial proportion of each sample. Results from cervical smear data indicated that the index performs independently of epithelial and immune proportions (fibroblasts formed a negligible proportion of cells). A linear adjustment was therefore made for fat content by splitting the samples into normal, BRCA carrier, adjacent, and TNBC groups. We linearly regressed the WID-BC-index on fat in each group and obtained an estimate of what the index values would be if all four groups had the same fat composition. Similarly, samples from the mifepristone trial were split into mifepristone before, mifepristone after, placebo before, and placebo after groups. Within each group we linearly regressed the index on fat proportion in order to obtain estimates of the index after adjustment for fat content.

### SNP Genotyping, QC and Imputation

[0472] In total, 318 breast cancer case subjects and 850 controls from the methylation discovery cohort were taken forward for genotyping using an Illumina 650k Infinium Global Screening Array (GSA). Whole blood DNA was normalised to 75 ng/ul and a total of 300 ng applied to the Infinium Global Screening Array—24 V2 (Illumina, Calif., USA) at UCL Genomics according to the manufacturer's standard protocol.

[0473] One control subject from this cohort failed to genotype. Genotype calling was performed using GenomeStudio, with genetic variants found to be clustering poorly being removed from further analyses. For duplicate genetic variant pairs, the variant within each pair with the lowest calling and clustering score was excluded. Autosomal SNPs were used in subsequent QC and PRS analyses (except for checks for sex mismatches, where the X chromosome was used to infer sex).

[0474] General subject and single nucleotide polymorphism (SNP) quality control (QC) was performed using PLINK version 1.9²⁷. Three breast cancer cases and eight controls with a call rate less than 95% were excluded. One breast cancer case and three controls were further removed due to genetically inferred sex not being female. Genetic variants with a missing genotype rate greater than 5%, minor allele frequency (MAF) less than 1% or a significant departure from Hardy-Weinberg equilibrium (p-value <5×10-6) were excluded.

[0475] KING′, a relatedness inference algorithm, was used to identify duplicate/monozygotic twin or first-degree relative pairs. One control subject pair was identified as being a duplicate/monozygotic twin pair, and nine control pairs were inferred to be first-degree relatives. The subject within each related pair with the lowest call rate was excluded. After performing QC, 314 breast cancer case subjects, 816 controls and 479,105 variants were retained in the SNP discovery sample.

[0476] Non-European subjects were identified by plotting the top two principal components, generated using GCTA version 1.26.0, for the SNP discovery samples and 270 HapMap phase II release 23 samples (CEU, YRI, JPT and CHB individuals) downloaded in PLINK-formatted binary files. Subjects found not to cluster around HapMap European samples were excluded from further analyses. After excluding non-European subjects, 305 breast cancer cases and 754 controls were retained in the SNP discovery sample.

[0477] Using the Michigan Imputation Server²⁹ and 1000 Genomes Phase 3 reference panel, the SNP discovery dataset went through further QC before being phased (Eagle2) and imputed. Variants where strand, allele, genetic position or allele frequencies were not concordant with the 1000 Genomes Phase 3 reference panel were removed before phasing and imputation using Strand Tools.

[0478] After imputation, exclusion of variants with imputation R²<0.5 and removal of variants observed to have 3 or more alleles, 303 of the 313 SNPs used by Mavaddat et al.²² to develop a 313 SNP breast cancer polygenic risk score (PRS) were successfully imputed. We constructed a breast cancer PRS for each subject in the discovery cohort, such that the PRS is equal to:

$$P R {S}_{j} = {\sum }_{i = 1}^{303} \hat{{β}_{ι}} {x}_{i j}$$

where, \hat{β}ₗ is the log odds ratio for the i-th SNP taken from publically available Oncoarray summary association results' (combined Oncoarray, iCOGs and BCAC overall breast cancer beta values) and x₁ⱼ is the number of copies of the effect allele present in each discovery cohort subject. Scores were generated using PLINK version 1.9.

### Statistical Analysis of Buccal Samples

[0479] Matched buccal samples were taken from a subset of 404 women in the discovery dataset. The WID-BC-index derived from the discovery dataset of cervical samples was computed in the buccal samples and the corresponding AUC was obtained. Of the buccal samples, 269 belonged to the training dataset and 135 to the internal validation dataset. A separate classifier was derived using the buccal samples alone and utilising the same protocol as described above. For the purposes of comparison, another classifier was developed using the 269 and 135 cervical samples that had matched buccal samples for training and validation respectively.

### Example 1

### Sample Heterogeneity and Differential Methylation

[0480] For the Discovery Set (FIG. 7), we collected samples from 285 women with primary breast cancers with poor prognosis features (defined by >2 cm cancers and/or lymph-node positive and/or grade 3 and/or hormone-receptor negative) from 14 European centres at the time of diagnosis and before treatment commenced, and 778 women without breast cancer (536 from the general population and 242 from women attending hospital for benign women-specific conditions) (FIG. 15). Epigenome-wide DNAme was analysed using an Illumina Infinium EPIC bead chip array which encompasses over 850,000 CpG sites¹⁸.

[0481] We assessed the level of cell type heterogeneity in each cervical smear sample using HEpiDISH¹⁹, an algorithm that infers the relative proportion of epithelial cells, fibroblasts, and seven subtypes of immune cells in each sample. The distribution of immune cell contamination (IC) was approximately uniform in both samples from cancer cases and controls. There was a significantly greater proportion of epithelial cells in cancers, and correspondingly fewer immune cells across all subtypes in the discovery dataset (FIGS. 1A & 1B, Wilcoxon signed rank tests, p<0.05). This difference was comparatively small however, and absent in the external validation dataset (FIG. 8).

[0482] Identifying CpGs with differential methylation between cases and controls was hampered by contaminating immune cells, since any differential methylation in epithelial cells was greatly diminished in samples with high IC (see example in FIG. 1C). In order to infer which CpGs may contain a potential discriminatory signal, we developed a statistical protocol to estimate the delta-beta (i.e. difference in mean proportion of methylated cells) between cases and controls in a pure epithelial cell sample, and a pure immune cell sample. We linearly regressed beta values on IC fraction in both cases and controls separately. The difference between the two points, where these lines intercept the y-axis at IC=0, gives an estimate of the delta-beta between cases and controls in pure epithelial cells. Conversely, the difference between intercept points at the IC=1 axis gives a delta-beta estimate in immune cells.

[0483] Larger delta-betas were observed in epithelial cells than immune cells (FIG. 1D). The eFORGE tool²⁰ was utilised in order to search for enrichment of cell-type specific CpGs in the top 1,000 hyper- and hypo-methylated epithelial CpGs. The strongest enrichment in (i) hyper-methylated CpGs was for breast epithelial cell-specific CpGs and muscle, fibroblasts and mesenchymal cells (FIG. 1E) and in (ii) hypo-methylated CpGs for a foetal-like program with enrichment for foetal large and small intestine, and stomach (FIG. 1F). These findings suggest that in cervical smear samples from breast cancer cases the epigenome has undergone an epigenetic re-programming which may be reflective of a limited capacity for mammary epithelial cell differentiation and a shift towards mesenchymal and foetal programs. In addition, a gene set enrichment analysis was performed using the Broad Institute's Molecular Signatures Database²¹ (FIG. 16) and breast cancer associated pathways were enriched in hypo-methylated genes.

### Example 2

### Development of Discriminatory Index

[0484] In order to derive a diagnostic methylation signature, termed the WID-BC-index, we used ridge and lasso regression to classify individuals as cases or controls. Classifiers were trained on two thirds of the discovery dataset (508 cancer-free controls, 190 breast cancer cases) and the remaining one third was used as an internal validation set (270 controls, 95 cases) with the intention of evaluating their performance as a function of the number of CpGs used to construct the index. The area under the receiver operator characteristic curve (AUC) was used as a measure of predictive performance.

[0485] The top n CpGs ranked by epithelial delta-beta estimates were combined with the top n ranked by immune delta-betas and used as inputs to the classifiers. In order to control for the confounding influence of IC, we included non-linear interaction terms (products of IC fraction and beta values) as inputs, thus allowing the classifiers to extract a discriminatory signal that potentially varies with IC. This approach (FIGS. 2A and 2B) was compared to a linear classifier based on the top n epithelial CpGs without interaction terms, however the linear classifier offered consistently inferior performance (FIG. 9).

[0486] Predictive performance was evaluated as a function of n using the internal validation dataset (FIG. 2A) and optimal performance of 0.85 (95% CI: 0.80-0.90) was achieved using 54,000 CpGs with ridge regression (FIG. 2B). Since some of the top n CpGs ranked by immune and epithelial delta-beta estimates overlapped, a total of 40,753 unique CpGs were required in order to construct the WID-BC-index. The WID-BC-index was moderately, but significantly associated with IC fraction in the internal validation set (FIG. 2B, linear regression coefficients of −0.47, p=0.003 and −0.22, p=0.02 in cases and controls, respectively). The AUC in the internal validation set equated overall to 0.85 (FIG. 2C), and in samples with an IC fraction ≤0.5 and IC>0.5 was 0.85 and 0.88, respectively.

[0487] Further investigation was carried out as to whether there was any association between the WID-BC-index and various technical parameters including the time between sample collection and processing, date of processing, plate number (samples were processed on 96 sample plates) and sentrix position but no significant associations were found. We examined the performance of the WID-BC-index in samples from different study centres, some of which predominantly contributed cases (or controls) to the discovery dataset, but found no evidence that centre was a confounding variable (FIG. 10).

[0488] A separate independent external validation dataset consisting of 225 controls and 115 cases was used to validate the index performance (FIG. 15). The WID-BC-index was computed for each woman (FIG. 2D) resulting in an AUC of 0.81 (FIG. 2E; 95% CI: 0.75-0.86). The linear dependence on IC fraction was also present, although only in controls (FIG. 2D, linear regression coefficients of −0.03, p=0.8 and −0.27, p=0.04 in cases and controls respectively).

[0489] Ridge regression combines information from all input CpGs in contrast to lasso regression which typically selects a small subset of inputs (an elastic net regression model was also fitted but was found to offer suboptimal performance). Ridge regression offered consistently superior performance suggesting that the discriminatory signal is most robustly extracted by combining a large number of comparatively weak signals from multiple CpG sites. We ranked the 40,754 CpGs used to define the WID-BC-index according to the absolute value of the regression coefficients from the ridge model. In order to assess how important the top CpGs are we trained sub-classifiers on the top n CpGs (FIG. 2F). We observed that AUCs of 0.81 and 0.83 can be achieved with the top 2,000 and 5,000 CpGs respectively indicating that these subsets of CpGs are particularly informative. We also trained sub-classifiers after removing the top n CpGs, and on subsets of 500 CpGs after partitioning the ranked list of CpGs into bins of size 500 (FIG. 2F). In both cases we found that a substantial predictive signal is present in the bottom ranked CpGs. This suggests that the predictive signal is widely distributed among the CpGs used in the WID-BC-index and that there is a high degree of redundancy between them. Interestingly, only 34 CpGs in the training set were significantly associated with case/control status after controlling for age and IC in a linear model and false discovery rate adjustment.

### Example 3

[0490] Association with Epidemiological and Clinical Factors

[0491] We investigated the relationship between the WID-BC-index and various epidemiological and clinical variables. A modest, but statistically significant association was found between the WID-BC-index and age (FIG. 3A, coefficients of 0.005, p=0.02 and 0.007, p=10⁻⁴ in cases and controls respectively). No significant difference in the WID-BC-index was observed between individuals with 0 and >1 first-degree-relatives with breast cancer (FIG. 3B). The Illumina 650k Infinium Global Screening Array was used to genotype matched blood samples from a subset of 144 cases and 351 controls. We computed a recently published polygenic risk score (PRS; 303 of the 313 SNPs described²² were used) for breast cancer prediction. We found a significant correlation of 0.22 (p=4×10⁻⁵) between the PRS and the WID-BC-index (FIG. 3C). The association was strongest in cancer-free control women (correlation 0.11, p=0.07) compared to cancer cases (correlation −0.03, p=0.7). Patients with T2 cancers had a slightly lower WID-BC-index (FIG. 3D, p=0.02). There were no significant differences according to nodal status, hormone receptor status (positive defined as PR or ER positive), HER2 status, grade, or histology (FIGS. 3E, 3F, 3G, 3H, and 3I). No difference was found between control samples from healthy volunteers and women presenting at hospitals for benign women-specific conditions (FIG. 10). We also tested for associations between the WID-BC-index and age at menarche, age at first live birth, hormone replacement therapy use, oral contraceptive pill use, ethnicity, age of last period, and parity (FIG. 11). Similar results were found for the external validation dataset (FIG. 12).

### Example 4

### Performance of Index in Matched Buccal Samples

[0492] DNAme is tissue specific and specific exposures are recorded in certain cell subtypes^{17,23,24}. The majority of cervical epithelial cells are squamous cells and very similar to the epithelial cells found in buccal swabs. In order to assess whether the WID-BC-index (derived from cervical smear samples) can also discriminate breast cancer cases from unaffected controls based on DNAme profiles in buccal samples, we analysed matched buccal samples from a subset of 404 women in the discovery cohort (202 controls and 202 cases). Similar to the cervical smears, a substantial proportion of DNA originates from immune cells (FIG. 13). We found that the discriminatory signal derived using cervical smear samples was also present in these matched buccal samples (FIG. 4A), yielding an AUC of 0.67 (FIG. 4B), although the signal became distorted with a quantitative shift towards more negative values as well as a stronger linear dependence on IC fraction (FIG. 4A). Of the 404 buccal samples, 269 corresponded to the training dataset and 135 to the internal validation dataset. Within the internal validation samples there was a correlation of 0.47 (p<10⁻⁸) between the WID-BC-index computed in matched cervical and buccal samples (FIG. 4C).

[0493] A separate index was developed using the buccal samples alone, and a ridge classifier with interaction terms (as described above) was trained on the 269 buccal samples belonging to the training set and validated on the 135 internal validation samples. Optimal performance of 0.75 was obtained based on 4,000 input CpGs (FIG. 13). A second classifier was developed according to the same protocol, but using the 404 matched cervical samples. We observed higher diagnostic performance for the cervical samples with an AUC of 0.79 based on 6,000 input CpGs (performance that is consistent with FIG. 2A).

### Example 5

### The WID-BC-index is Reflective of a Fat-Cell Differentiation

[0494] In order to assess whether the WID-BC-index is reflective of a cell-specific program we analysed all ENCODE samples (Table 3) for which EPIC array data were available. We ranked and plotted the WID-BC-index in all primary cell samples and in vitro differentiated cell samples (FIG. 5A). The majority of tissue samples contained substantial proportions of fat, as determined by the Epidish algorithm, and have plotted the index against the fat content of the respective sample (FIG. 5B). Surprisingly we find a very strong direct correlation between the WID-BC-index and the fat content of the sample irrespective of whether the sample was taken from an epithelial or non-epithelial organ. These findings strongly indicate that the WID-BC-index is reflective of a fat cell program.

### Example 6

### WID-BC-Index in Breast Tissue

[0495] We, and others, have demonstrated the existence of an epigenetic field defect in the normal breast adjacent to a breast cancer^{9,25}. We therefore wanted to assess whether the WID-BC-index, which was established in cervical smear samples in women with and without a breast cancer, is reflected in normal and cancerous breast tissue. We analysed 14 normal breast samples from healthy women, 14 normal breast samples from women with a BRCA mutation, 14 normal breast samples adjacent to a triple-negative breast cancer, and 14 matched cancer samples. As expected, in contrast to cervical and buccal samples, we found that fat cells constituted a substantial proportion of normal samples and substantially less so for cancerous breast tissue samples (FIG. 14A). As expected, we found in all four sample groups, that the index is substantially higher in fat cells (FIG. 6A) and that this leads to an overall increase in index values in comparison to cervical samples. After linearly adjusting for fat content we observed a distinct trend in which the WID-BC-index increased in tissues that are at increased risk of developing cancer and was highest in the breast cancer (FIG. 6B).

### Example 7

### WID-BC-Index Dynamics Triggered by Cancer Preventive Drug

[0496] We analysed breast tissue samples from 21 BRCA carriers and 23 healthy controls before and after treatment with either mifepristone or placebo for two months. In total, 14 BRCA carriers were treated with mifepristone (11 of which provided matched samples) and 7 were given a placebo (4 matched samples). 11 controls were treated with mifepristone (9 matched) and 12 were given a placebo (11 matched). Overall, BRCA carriers had a significantly greater proportion of epithelial cells in comparison to controls (FIGS. 14B and 14C). After treatment with mifepristone (but not in the placebo group) we observed a statistically significant decrease in epithelial cell proportion in both the matched BRCA and control groups (FIG. 6C and FIG. 14D). After adjustment for fat content we also observed a downward trend in the WID-BC-index in 80% of the mifepristone treated women and only in 60% of the placebo treated controls, although this did not reach statistical significance (FIG. 6D, see FIG. 14E for matched and unmatched samples combined).

### Example 8

### Discussion

[0497] We have identified a cervical smear based DNAme signature (the WID-BC-index) which provides an unprecedented opportunity to identify women with a primary breast cancer with poor prognosis features based on a bio-sample which has no direct (anatomical) link to the diseased organ (i.e. women in the top quartile of the WID-BC-Index have ˜10 fold increased risk for breast cancer independent of any other risk factors; FIG. 17). The fact that the WID-BC-index discovered in a cervical smear sample (i) does not increase with tumour size or surrogates for dissemination (i.e. nodal metastasis), (ii) increases in normal breast samples with increasing tendency towards cancer and is highest in the cancer tissue and (iii) is reflective of a fat cell epigenetic program strongly supports the view that cervical DNAme reflects breast cancer predisposition rather than purely the current presence of an established breast cancer. Our findings described here are consistent with data published more than 30 years ago showing that patients with hereditary breast cancer and their first degree relatives harbour a differentiation defect²⁶.

[0498] Considerable effort in the past has shown that by combining SNPs, mammographic density, and epidemiologic risk factors the AUC that predicts breast cancer can be increased up to 0.68⁶. Studying population-based cervical smear samples from women who develop a breast cancer several years after sample donations will be a prerequisite in order to assess whether the actual risk-predictive nature of the WID-BC-index will continue to outperform current breast cancer predictive algorithms. Whether DNAme profiles assessed in cervical smear samples, and/or in breast samples, can act as surrogates for monitoring breast cancer preventive measures will need to be assessed in prospective clinical trials.

TABLE 1
Table 1 below provides exemplary μ and σ real valued parameters
derived using the data and methods set out in the Examples
herein for CpG subsets identified in SEQ ID NOs 1 to 40,753

| CpG subset | mu | sigma |
|---|---|---|
| 1-500 | 11.88 | 2.65 |
| 1-1000 | 15.42 | 4.32 |
| 1-1500 | 11.43 | 3.94 |
| 1-2000 | 5.23 | 2.49 |
| 1-2500 | 4.91 | 2.6 |
| 1-3000 | 4.13 | 2.67 |
| 1-3500 | 7.96 | 5.02 |
| 1-4000 | 6.83 | 4.36 |
| 1-4500 | 5.19 | 4.02 |
| 1-5000 | 6.39 | 4.84 |
| 1-5500 | 4.49 | 3.42 |
| 1-6000 | 5.11 | 4.13 |
| 1-6500 | 4.23 | 4.01 |
| 1-7000 | 3.98 | 4.49 |
| 1-7500 | 4.21 | 4.44 |
| 1-8000 | 4.15 | 4.92 |
| 1-8500 | 3.63 | 4.48 |
| 1-9000 | 3.2 | 4.88 |
| 1-9500 | 3.37 | 5.45 |
| 1-10000 | 2.74 | 5.46 |
| 1-11000 | 2.2 | 5.41 |
| 1-12000 | 1.75 | 5.43 |
| 1-13000 | 1.7 | 5.14 |
| 1-14000 | 1.66 | 5.47 |
| 1-15000 | 1.77 | 5.33 |
| 1-16000 | 1.87 | 5.58 |
| 1-17000 | 2.2 | 5.59 |
| 1-18000 | 2.34 | 5.6 |
| 1-19000 | 2.58 | 5.53 |
| 1-20000 | 2.56 | 5.46 |
| 1-22000 | 2.67 | 5.63 |
| 1-24000 | 2.77 | 5.65 |
| 1-26000 | 2.69 | 5.57 |
| 1-28000 | 2.89 | 5.66 |
| 1-30000 | 3.09 | 5.59 |
| 1-32000 | 3.13 | 5.67 |
| 1-34000 | 3.12 | 5.59 |
| 1-36000 | 3.1 | 5.52 |
| 1-38000 | 3.15 | 5.67 |
| 1-40753 | 3.03 | 5.52 |

TABLE 4
Table 4 below provides exemplary AUC, sensitivity and specificity derived using the
data and methods set out in the Examples for CpG subsets identified in SEQ ID NOs 1
to 40,753 and set out in the left hand column of Table 4

| CpG | AUC (internal | Sensitivity | Specificity | Sensitivity | Specificity | Sensitivity | Specificity |
|---|---|---|---|---|---|---|---|
| subset | validation) | (q = 0.587) | (q = 0.587) | (q = 0.09) | (q = 0.09) | (q = −0.235) | (q = −0.235) |
| 1-500 | 0.73 | 0.26 | 0.93 | 0.63 | 0.69 | 0.85 | 0.52 |
| 1-1000 | 0.77 | 0.29 | 0.95 | 0.68 | 0.73 | 0.88 | 0.49 |
| 1-1500 | 0.8 | 0.29 | 0.94 | 0.73 | 0.75 | 0.92 | 0.51 |
| 1-2000 | 0.81 | 0.33 | 0.94 | 0.69 | 0.78 | 0.94 | 0.51 |
| 1-2500 | 0.82 | 0.31 | 0.95 | 0.68 | 0.78 | 0.93 | 0.51 |
| 1-3000 | 0.82 | 0.28 | 0.94 | 0.71 | 0.78 | 0.93 | 0.51 |
| 1-3500 | 0.83 | 0.26 | 0.95 | 0.72 | 0.79 | 0.94 | 0.49 |
| 1-4000 | 0.83 | 0.29 | 0.95 | 0.69 | 0.8 | 0.95 | 0.47 |
| 1-4500 | 0.83 | 0.32 | 0.94 | 0.72 | 0.79 | 0.94 | 0.48 |
| 1-5000 | 0.84 | 0.29 | 0.96 | 0.72 | 0.8 | 0.96 | 0.49 |
| 1-5500 | 0.83 | 0.27 | 0.95 | 0.73 | 0.79 | 0.94 | 0.49 |
| 1-6000 | 0.83 | 0.27 | 0.96 | 0.73 | 0.79 | 0.95 | 0.5 |
| 1-6500 | 0.84 | 0.31 | 0.96 | 0.71 | 0.79 | 0.95 | 0.49 |
| 1-7000 | 0.84 | 0.29 | 0.96 | 0.73 | 0.8 | 0.95 | 0.5 |
| 1-7500 | 0.84 | 0.29 | 0.96 | 0.72 | 0.8 | 0.95 | 0.52 |
| 1-8000 | 0.84 | 0.29 | 0.96 | 0.74 | 0.79 | 0.95 | 0.51 |
| 1-8500 | 0.84 | 0.29 | 0.96 | 0.73 | 0.8 | 0.94 | 0.53 |
| 1-9000 | 0.84 | 0.29 | 0.96 | 0.75 | 0.79 | 0.95 | 0.52 |
| 1-9500 | 0.84 | 0.28 | 0.95 | 0.74 | 0.78 | 0.95 | 0.5 |
| 1-10000 | 0.84 | 0.29 | 0.95 | 0.74 | 0.8 | 0.95 | 0.5 |
| 1-11000 | 0.84 | 0.29 | 0.96 | 0.73 | 0.8 | 0.95 | 0.51 |
| 1-12000 | 0.84 | 0.28 | 0.96 | 0.74 | 0.8 | 0.95 | 0.52 |
| 1-13000 | 0.84 | 0.28 | 0.96 | 0.74 | 0.8 | 0.95 | 0.52 |
| 1-14000 | 0.84 | 0.27 | 0.96 | 0.76 | 0.8 | 0.95 | 0.52 |
| 1-15000 | 0.84 | 0.28 | 0.96 | 0.74 | 0.8 | 0.95 | 0.52 |
| 1-16000 | 0.84 | 0.27 | 0.96 | 0.74 | 0.8 | 0.95 | 0.53 |
| 1-17000 | 0.85 | 0.32 | 0.96 | 0.74 | 0.8 | 0.95 | 0.51 |
| 1-18000 | 0.85 | 0.33 | 0.96 | 0.76 | 0.8 | 0.95 | 0.51 |
| 1-19000 | 0.85 | 0.34 | 0.96 | 0.77 | 0.8 | 0.94 | 0.51 |
| 1-20000 | 0.85 | 0.34 | 0.96 | 0.76 | 0.8 | 0.94 | 0.51 |
| 1-22000 | 0.85 | 0.34 | 0.97 | 0.77 | 0.8 | 0.94 | 0.51 |
| 1-24000 | 0.85 | 0.33 | 0.97 | 0.77 | 0.8 | 0.94 | 0.51 |
| 1-26000 | 0.85 | 0.34 | 0.97 | 0.77 | 0.8 | 0.94 | 0.51 |
| 1-28000 | 0.85 | 0.34 | 0.97 | 0.77 | 0.8 | 0.94 | 0.51 |
| 1-30000 | 0.85 | 0.33 | 0.97 | 0.77 | 0.8 | 0.94 | 0.51 |
| 1-32000 | 0.85 | 0.32 | 0.97 | 0.77 | 0.8 | 0.94 | 0.5 |
| 1-34000 | 0.85 | 0.33 | 0.97 | 0.78 | 0.8 | 0.94 | 0.5 |
| 1-36000 | 0.85 | 0.33 | 0.97 | 0.78 | 0.8 | 0.94 | 0.5 |
| 1-38000 | 0.85 | 0.33 | 0.97 | 0.77 | 0.8 | 0.94 | 0.5 |
| 1-40753 | 0.85 | 0.34 | 0.97 | 0.78 | 0.8 | 0.94 | 0.5 |

TABLE 5
Table 5 below provides exemplary AUC, sensitivity and specificity derived using the
data and methods set out in the Examples herein for CpG subsets identified in SEQ ID NOs 1
to 40,753 and set out in the left hand column of Table 5

| CpG | AUC (internal | Sensitivity | Specificity | Sensitivity | Specificity | Sensitivity | Specificity |
|---|---|---|---|---|---|---|---|
| subset | validation) | (q = 0.587) | (q = 0.587) | (q = 0.09) | (q = 0.09) | (q = −0.235) | (q = −0.235) |
| 500-40753 | 0.84 | 0.35 | 0.97 | 0.77 | 0.79 | 0.94 | 0.51 |
| 1000-40753 | 0.84 | 0.34 | 0.96 | 0.79 | 0.78 | 0.92 | 0.51 |
| 1500-40753 | 0.81 | 0.38 | 0.94 | 0.73 | 0.74 | 0.91 | 0.53 |
| 2000-40753 | 0.81 | 0.39 | 0.94 | 0.75 | 0.74 | 0.91 | 0.52 |
| 2500-40753 | 0.8 | 0.41 | 0.92 | 0.72 | 0.74 | 0.91 | 0.54 |
| 3000-40753 | 0.8 | 0.4 | 0.91 | 0.72 | 0.74 | 0.91 | 0.54 |
| 3500-40753 | 0.79 | 0.42 | 0.9 | 0.73 | 0.74 | 0.87 | 0.56 |
| 4000-40753 | 0.78 | 0.41 | 0.9 | 0.69 | 0.74 | 0.86 | 0.56 |
| 4500-40753 | 0.78 | 0.42 | 0.9 | 0.71 | 0.74 | 0.86 | 0.57 |
| 5000-40753 | 0.77 | 0.42 | 0.89 | 0.69 | 0.74 | 0.86 | 0.56 |
| 5500-40753 | 0.76 | 0.36 | 0.89 | 0.66 | 0.74 | 0.8 | 0.57 |
| 6000-40753 | 0.74 | 0.33 | 0.89 | 0.61 | 0.75 | 0.78 | 0.57 |
| 6500-40753 | 0.74 | 0.32 | 0.89 | 0.61 | 0.75 | 0.78 | 0.57 |
| 7000-40753 | 0.74 | 0.32 | 0.89 | 0.6 | 0.75 | 0.78 | 0.57 |
| 7500-40753 | 0.74 | 0.33 | 0.88 | 0.61 | 0.74 | 0.77 | 0.57 |
| 8000-40753 | 0.73 | 0.32 | 0.88 | 0.59 | 0.74 | 0.77 | 0.56 |
| 8500-40753 | 0.73 | 0.32 | 0.86 | 0.6 | 0.74 | 0.78 | 0.56 |
| 9000-40753 | 0.72 | 0.31 | 0.87 | 0.58 | 0.75 | 0.75 | 0.56 |
| 9500-40753 | 0.72 | 0.31 | 0.87 | 0.58 | 0.75 | 0.75 | 0.57 |
| 10000-40753 | 0.72 | 0.29 | 0.86 | 0.58 | 0.74 | 0.76 | 0.57 |
| 11000-40753 | 0.71 | 0.29 | 0.86 | 0.58 | 0.75 | 0.76 | 0.57 |
| 12000-40753 | 0.71 | 0.28 | 0.86 | 0.59 | 0.75 | 0.76 | 0.59 |
| 13000-40753 | 0.71 | 0.29 | 0.86 | 0.59 | 0.74 | 0.75 | 0.59 |
| 14000-40753 | 0.68 | 0.27 | 0.87 | 0.53 | 0.75 | 0.68 | 0.59 |
| 15000-40753 | 0.69 | 0.28 | 0.87 | 0.54 | 0.74 | 0.69 | 0.58 |
| 16000-40753 | 0.68 | 0.26 | 0.87 | 0.53 | 0.75 | 0.65 | 0.6 |
| 17000-40753 | 0.67 | 0.26 | 0.87 | 0.47 | 0.75 | 0.65 | 0.6 |
| 18000-40753 | 0.67 | 0.26 | 0.87 | 0.47 | 0.75 | 0.64 | 0.61 |
| 19000-40753 | 0.66 | 0.25 | 0.88 | 0.43 | 0.75 | 0.63 | 0.61 |
| 20000-40753 | 0.66 | 0.25 | 0.88 | 0.43 | 0.76 | 0.63 | 0.6 |
| 22000-40753 | 0.67 | 0.25 | 0.87 | 0.49 | 0.74 | 0.65 | 0.61 |
| 24000-40753 | 0.67 | 0.25 | 0.86 | 0.49 | 0.74 | 0.67 | 0.61 |
| 26000-40753 | 0.67 | 0.25 | 0.86 | 0.51 | 0.75 | 0.67 | 0.58 |
| 28000-40753 | 0.64 | 0.24 | 0.88 | 0.43 | 0.76 | 0.63 | 0.6 |
| 30000-40753 | 0.63 | 0.25 | 0.88 | 0.39 | 0.76 | 0.63 | 0.6 |
| 32000-40753 | 0.62 | 0.24 | 0.87 | 0.38 | 0.76 | 0.61 | 0.59 |
| 34000-40753 | 0.62 | 0.24 | 0.87 | 0.37 | 0.76 | 0.63 | 0.59 |
| 36000-40753 | 0.61 | 0.24 | 0.87 | 0.37 | 0.77 | 0.6 | 0.6 |
| 38000-40753 | 0.61 | 0.24 | 0.87 | 0.35 | 0.76 | 0.61 | 0.58 |

TABLE 6
Table 6 below provides exemplary AUC, sensitivity and specificity derived using the
data and methods set out in the Examples herein for CpG subsets identified in SEQ ID NOs 1
to 40,753 and set out in the left hand column of Table 6

| CpG | AUC (internal | Sensitivity | Specificity | Sensitivity | Specificity | Sensitivity | Specificity |
|---|---|---|---|---|---|---|---|
| subset | validation) | (q = 0.587) | (q = 0.587) | (q = 0.09) | (q = 0.09) | (q = −0.235) | (q = −0.235) |
| 1-500 | 0.73 | 0.26 | 0.93 | 0.63 | 0.69 | 0.85 | 0.52 |
| 501-1000 | 0.74 | 0.35 | 0.9 | 0.66 | 0.67 | 0.86 | 0.49 |
| 1001-1500 | 0.75 | 0.39 | 0.9 | 0.67 | 0.74 | 0.81 | 0.5 |
| 1501-2000 | 0.72 | 0.34 | 0.91 | 0.58 | 0.72 | 0.79 | 0.51 |
| 2001-2500 | 0.72 | 0.34 | 0.89 | 0.68 | 0.68 | 0.81 | 0.48 |
| 2501-3000 | 0.69 | 0.33 | 0.87 | 0.63 | 0.67 | 0.78 | 0.47 |
| 3001-3500 | 0.73 | 0.46 | 0.89 | 0.65 | 0.66 | 0.79 | 0.48 |
| 3501-4000 | 0.69 | 0.37 | 0.89 | 0.64 | 0.67 | 0.72 | 0.46 |
| 4001-4500 | 0.73 | 0.46 | 0.84 | 0.71 | 0.64 | 0.81 | 0.47 |
| 4501-5000 | 0.7 | 0.39 | 0.89 | 0.62 | 0.66 | 0.76 | 0.44 |
| 5001-5500 | 0.71 | 0.39 | 0.86 | 0.66 | 0.63 | 0.82 | 0.45 |
| 5501-6000 | 0.7 | 0.32 | 0.91 | 0.57 | 0.74 | 0.73 | 0.53 |
| 6001-6500 | 0.76 | 0.47 | 0.88 | 0.71 | 0.71 | 0.84 | 0.5 |
| 6501-7000 | 0.76 | 0.46 | 0.87 | 0.72 | 0.68 | 0.86 | 0.49 |
| 7001-7500 | 0.66 | 0.27 | 0.87 | 0.54 | 0.73 | 0.75 | 0.5 |
| 7501-8000 | 0.76 | 0.48 | 0.87 | 0.76 | 0.69 | 0.85 | 0.49 |
| 8001-8500 | 0.69 | 0.29 | 0.87 | 0.62 | 0.67 | 0.78 | 0.51 |
| 8501-9000 | 0.73 | 0.37 | 0.88 | 0.62 | 0.69 | 0.82 | 0.53 |
| 9001-9500 | 0.72 | 0.38 | 0.84 | 0.64 | 0.69 | 0.78 | 0.54 |
| 9501-10000 | 0.69 | 0.28 | 0.88 | 0.62 | 0.7 | 0.75 | 0.55 |
| 10001-10500 | 0.69 | 0.31 | 0.87 | 0.63 | 0.69 | 0.8 | 0.48 |
| 10501-11000 | 0.71 | 0.33 | 0.92 | 0.59 | 0.72 | 0.75 | 0.56 |
| 11001-11500 | 0.78 | 0.54 | 0.86 | 0.73 | 0.64 | 0.86 | 0.51 |
| 11501-12000 | 0.67 | 0.41 | 0.81 | 0.65 | 0.64 | 0.76 | 0.45 |
| 12001-12500 | 0.72 | 0.39 | 0.87 | 0.6 | 0.7 | 0.74 | 0.54 |
| 12501-13000 | 0.73 | 0.33 | 0.89 | 0.66 | 0.68 | 0.8 | 0.53 |
| 13001-13500 | 0.73 | 0.45 | 0.87 | 0.67 | 0.69 | 0.77 | 0.56 |
| 13501-14000 | 0.74 | 0.45 | 0.87 | 0.64 | 0.69 | 0.75 | 0.55 |
| 14001-14500 | 0.73 | 0.42 | 0.87 | 0.62 | 0.69 | 0.74 | 0.55 |
| 14501-15000 | 0.72 | 0.39 | 0.85 | 0.67 | 0.68 | 0.8 | 0.52 |
| 15001-15500 | 0.71 | 0.39 | 0.86 | 0.62 | 0.67 | 0.75 | 0.52 |
| 15501-16000 | 0.73 | 0.41 | 0.85 | 0.64 | 0.71 | 0.75 | 0.57 |
| 16001-16500 | 0.73 | 0.42 | 0.86 | 0.64 | 0.68 | 0.79 | 0.53 |
| 16501-17000 | 0.72 | 0.32 | 0.88 | 0.62 | 0.7 | 0.74 | 0.56 |
| 17001-17500 | 0.72 | 0.38 | 0.84 | 0.64 | 0.67 | 0.77 | 0.53 |
| 17501-18000 | 0.69 | 0.33 | 0.86 | 0.57 | 0.71 | 0.72 | 0.54 |
| 18001-18500 | 0.72 | 0.35 | 0.86 | 0.66 | 0.71 | 0.77 | 0.56 |
| 18501-19000 | 0.71 | 0.31 | 0.86 | 0.56 | 0.71 | 0.76 | 0.57 |
| 19001-19500 | 0.67 | 0.33 | 0.86 | 0.49 | 0.73 | 0.73 | 0.57 |
| 19501-20000 | 0.69 | 0.31 | 0.86 | 0.54 | 0.73 | 0.74 | 0.54 |
| 20001-20500 | 0.68 | 0.36 | 0.86 | 0.56 | 0.72 | 0.72 | 0.56 |
| 20501-21000 | 0.71 | 0.34 | 0.85 | 0.59 | 0.73 | 0.77 | 0.59 |
| 21001-21500 | 0.65 | 0.29 | 0.88 | 0.54 | 0.72 | 0.66 | 0.54 |
| 21501-22000 | 0.71 | 0.28 | 0.87 | 0.56 | 0.74 | 0.72 | 0.57 |
| 22001-22500 | 0.69 | 0.27 | 0.86 | 0.51 | 0.74 | 0.71 | 0.56 |
| 22501-23000 | 0.69 | 0.33 | 0.87 | 0.54 | 0.74 | 0.72 | 0.57 |
| 23001-23500 | 0.67 | 0.31 | 0.85 | 0.53 | 0.75 | 0.64 | 0.57 |
| 23501-24000 | 0.68 | 0.31 | 0.86 | 0.51 | 0.72 | 0.68 | 0.61 |
| 24001-24500 | 0.69 | 0.36 | 0.86 | 0.49 | 0.72 | 0.69 | 0.57 |
| 24501-25000 | 0.66 | 0.26 | 0.87 | 0.49 | 0.77 | 0.65 | 0.59 |
| 25001-25500 | 0.65 | 0.26 | 0.87 | 0.44 | 0.75 | 0.62 | 0.58 |
| 25501-26000 | 0.64 | 0.25 | 0.86 | 0.45 | 0.78 | 0.63 | 0.56 |
| 26001-26500 | 0.7 | 0.27 | 0.87 | 0.52 | 0.76 | 0.69 | 0.59 |
| 26501-27000 | 0.65 | 0.26 | 0.86 | 0.49 | 0.74 | 0.66 | 0.58 |
| 27001-27500 | 0.68 | 0.29 | 0.87 | 0.49 | 0.72 | 0.67 | 0.59 |
| 27501-28000 | 0.64 | 0.25 | 0.87 | 0.4 | 0.76 | 0.62 | 0.6 |
| 28001-28500 | 0.65 | 0.25 | 0.87 | 0.43 | 0.76 | 0.61 | 0.59 |
| 28501-29000 | 0.67 | 0.26 | 0.86 | 0.43 | 0.76 | 0.65 | 0.61 |
| 29001-29500 | 0.66 | 0.24 | 0.86 | 0.42 | 0.76 | 0.65 | 0.58 |
| 29501-30000 | 0.66 | 0.27 | 0.87 | 0.47 | 0.74 | 0.67 | 0.55 |
| 30001-30500 | 0.64 | 0.25 | 0.87 | 0.44 | 0.74 | 0.65 | 0.58 |
| 30501-31000 | 0.65 | 0.25 | 0.87 | 0.46 | 0.76 | 0.63 | 0.61 |
| 31001-31500 | 0.64 | 0.26 | 0.88 | 0.43 | 0.77 | 0.62 | 0.59 |
| 31501-32000 | 0.68 | 0.27 | 0.87 | 0.47 | 0.76 | 0.68 | 0.56 |
| 32001-32500 | 0.65 | 0.27 | 0.86 | 0.44 | 0.76 | 0.62 | 0.59 |
| 32501-33000 | 0.66 | 0.28 | 0.86 | 0.48 | 0.76 | 0.67 | 0.58 |
| 33001-33500 | 0.63 | 0.25 | 0.88 | 0.42 | 0.76 | 0.65 | 0.56 |
| 33501-34000 | 0.63 | 0.26 | 0.89 | 0.36 | 0.77 | 0.61 | 0.59 |
| 34001-34500 | 0.61 | 0.24 | 0.88 | 0.38 | 0.77 | 0.58 | 0.6 |
| 34501-35000 | 0.61 | 0.26 | 0.88 | 0.41 | 0.76 | 0.59 | 0.57 |
| 35001-35500 | 0.62 | 0.26 | 0.87 | 0.4 | 0.76 | 0.6 | 0.61 |
| 35501-36000 | 0.62 | 0.26 | 0.86 | 0.4 | 0.74 | 0.61 | 0.57 |
| 36001-36500 | 0.6 | 0.24 | 0.86 | 0.38 | 0.77 | 0.61 | 0.57 |
| 36501-37000 | 0.64 | 0.27 | 0.88 | 0.38 | 0.78 | 0.63 | 0.62 |
| 37001-37500 | 0.63 | 0.26 | 0.87 | 0.39 | 0.77 | 0.62 | 0.6 |
| 37501-38000 | 0.6 | 0.24 | 0.87 | 0.39 | 0.79 | 0.6 | 0.61 |
| 38001-38500 | 0.62 | 0.27 | 0.87 | 0.4 | 0.75 | 0.61 | 0.57 |
| 38501-39000 | 0.63 | 0.26 | 0.87 | 0.42 | 0.74 | 0.61 | 0.57 |
| 39001-39500 | 0.61 | 0.25 | 0.87 | 0.35 | 0.76 | 0.63 | 0.59 |
| 39501-40000 | 0.61 | 0.25 | 0.87 | 0.4 | 0.73 | 0.6 | 0.59 |
| 40001-40500 | 0.61 | 0.25 | 0.87 | 0.35 | 0.76 | 0.62 | 0.59 |
| 40501-40753 | 0.6 | 0.24 | 0.87 | 0.37 | 0.77 | 0.61 | 0.6 |

### Clauses of the Invention

[0499] In what follows below an “assay according to the invention” should be taken to mean any assay of the invention defined and described herein, including in the claims, and in particular claims 1 to 7.
[0500] 1. An assay according to the invention, wherein the set of CpGs comprises at least the CpGs defined by SEQ ID NOs 1 to 500 and identified at nucleotide positions 61 to 62, and wherein the AUC is 0.73.
[0501] 2. An assay according to the invention, wherein the set of CpGs comprises at least the CpGs defined by SEQ ID NOs 501 to 1000 and identified at nucleotide positions 61 to 62, and wherein the AUC is 0.74.
[0502] 3. An assay according to the invention, wherein the set of CpGs comprises at least the CpGs defined by SEQ ID NOs 1001 to 1500 and identified at nucleotide positions 61 to 62, and wherein the AUC is 0.75.
[0503] 4. An assay according to the invention, wherein the set of CpGs comprises at least the CpGs defined by SEQ ID NOs 1501 to 2000 and identified at nucleotide positions 61 to 62, and wherein the AUC is 0.72.
[0504] 5. An assay according to the invention, wherein the set of CpGs comprises at least the CpGs defined by SEQ ID NOs 2001 to 2500 and identified at nucleotide positions 61 to 62, and wherein the AUC is 0.72.
[0505] 6. An assay according to the invention, wherein the set of CpGs comprises at least the CpGs defined by SEQ ID NOs 2501 to 3000 and identified at nucleotide positions 61 to 62, and wherein the AUC is 0.69.
[0506] 7. An assay according to the invention, wherein the set of CpGs comprises at least the CpGs defined by SEQ ID NOs 3001 to 3500 and identified at nucleotide positions 61 to 62, and wherein the AUC is 0.73.
[0507] 8. An assay according to the invention, wherein the set of CpGs comprises at least the CpGs defined by SEQ ID NOs 3501 to 4000 and identified at nucleotide positions 61 to 62, and wherein the AUC is 0.69.
[0508] 9. An assay according to the invention, wherein the set of CpGs comprises at least the CpGs defined by SEQ ID NOs 4001 to 4500 and identified at nucleotide positions 61 to 62, and wherein the AUC is 0.73.
[0509] 10. An assay according to the invention, wherein the set of CpGs comprises at least the CpGs defined by SEQ ID NOs 4501 to 5000 and identified at nucleotide positions 61 to 62, and wherein the AUC is 0.7.
[0510] 11. An assay according to the invention, wherein the set of CpGs comprises at least the CpGs defined by SEQ ID NOs 5001 to 5500 and identified at nucleotide positions 61 to 62, and wherein the AUC is 0.71.
[0511] 12. An assay according to the invention, wherein the set of CpGs comprises at least the CpGs defined by SEQ ID NOs 5501 to 6000 and identified at nucleotide positions 61 to 62, and wherein the AUC is 0.7.
[0512] 13. An assay according to the invention, wherein the set of CpGs comprises at least the CpGs defined by SEQ ID NOs 6001 to 6500 and identified at nucleotide positions 61 to 62, and wherein the AUC is 0.76.
[0513] 14. An assay according to the invention, wherein the set of CpGs comprises at least the CpGs defined by SEQ ID NOs 6501 to 7000 and identified at nucleotide positions 61 to 62, and wherein the AUC is 0.76.
[0514] 15. An assay according to the invention, wherein the set of CpGs comprises at least the CpGs defined by SEQ ID NOs 7001 to 7500 and identified at nucleotide positions 61 to 62, and wherein the AUC is 0.66.
[0515] 16. An assay according to the invention, wherein the set of CpGs comprises at least the CpGs defined by SEQ ID NOs 7501 to 8000 and identified at nucleotide positions 61 to 62, and wherein the AUC is 0.76.
[0516] 17. An assay according to the invention, wherein the set of CpGs comprises at least the CpGs defined by SEQ ID NOs 8001 to 8500 and identified at nucleotide positions 61 to 62, and wherein the AUC is 0.69.
[0517] 18. An assay according to the invention, wherein the set of CpGs comprises at least the CpGs defined by SEQ ID NOs 8501 to 9000 and identified at nucleotide positions 61 to 62, and wherein the AUC is 0.73.
[0518] 19. An assay according to the invention, wherein the set of CpGs comprises at least the CpGs defined by SEQ ID NOs 9001 to 9500 and identified at nucleotide positions 61 to 62, and wherein the AUC is 0.72.
[0519] 20. An assay according to the invention, wherein the set of CpGs comprises at least the CpGs defined by SEQ ID NOs 9501 to 10000 and identified at nucleotide positions 61 to 62, and wherein the AUC is 0.69.
[0520] 21. An assay according to the invention, wherein the set of CpGs comprises at least the CpGs defined by SEQ ID NOs 10001 to 10500 and identified at nucleotide positions 61 to 62, and wherein the AUC is 0.69.
[0521] 22. An assay according to the invention, wherein the set of CpGs comprises at least the CpGs defined by SEQ ID NOs 10501 to 11000 and identified at nucleotide positions 61 to 62, and wherein the AUC is 0.71.
[0522] 23. An assay according to the invention, wherein the set of CpGs comprises at least the CpGs defined by SEQ ID NOs 11001 to 11500 and identified at nucleotide positions 61 to 62, and wherein the AUC is 0.78.
[0523] 24. An assay according to the invention, wherein the set of CpGs comprises at least the CpGs defined by SEQ ID NOs 11501 to 12000 and identified at nucleotide positions 61 to 62, and wherein the AUC is 0.67.
[0524] 25. An assay according to the invention, wherein the set of CpGs comprises at least the CpGs defined by SEQ ID NOs 12001 to 12500 and identified at nucleotide positions 61 to 62, and wherein the AUC is 0.72.
[0525] 26. An assay according to the invention, wherein the set of CpGs comprises at least the CpGs defined by SEQ ID NOs 12501 to 13000 and identified at nucleotide positions 61 to 62, and wherein the AUC is 0.73.
[0526] 27. An assay according to the invention, wherein the set of CpGs comprises at least the CpGs defined by SEQ ID NOs 13001 to 13500 and identified at nucleotide positions 61 to 62, and wherein the AUC is 0.73.
[0527] 28. An assay according to the invention, wherein the set of CpGs comprises at least the CpGs defined by SEQ ID NOs 13501 to 14000 and identified at nucleotide positions 61 to 62, and wherein the AUC is 0.74.
[0528] 29. An assay according to the invention, wherein the set of CpGs comprises at least the CpGs defined by SEQ ID NOs 14001 to 14500 and identified at nucleotide positions 61 to 62, and wherein the AUC is 0.73.
[0529] 30. An assay according to the invention, wherein the set of CpGs comprises at least the CpGs defined by SEQ ID NOs 14501 to 15000 and identified at nucleotide positions 61 to 62, and wherein the AUC is 0.72.
[0530] 31. An assay according to the invention, wherein the set of CpGs comprises at least the CpGs defined by SEQ ID NOs 15001 to 15500 and identified at nucleotide positions 61 to 62, and wherein the AUC is 0.71.
[0531] 32. An assay according to the invention, wherein the set of CpGs comprises at least the CpGs defined by SEQ ID NOs 15501 to 16000 and identified at nucleotide positions 61 to 62, and wherein the AUC is 0.73.
[0532] 33. An assay according to the invention, wherein the set of CpGs comprises at least the CpGs defined by SEQ ID NOs 16001 to 16500 and identified at nucleotide positions 61 to 62, and wherein the AUC is 0.73.
[0533] 34. An assay according to the invention, wherein the set of CpGs comprises at least the CpGs defined by SEQ ID NOs 16501 to 17000 and identified at nucleotide positions 61 to 62, and wherein the AUC is 0.72.
[0534] 35. An assay according to the invention, wherein the set of CpGs comprises at least the CpGs defined by SEQ ID NOs 17001 to 17500 and identified at nucleotide positions 61 to 62, and wherein the AUC is 0.72.
[0535] 36. An assay according to the invention, wherein the set of CpGs comprises at least the CpGs defined by SEQ ID NOs 17501 to 18000 and identified at nucleotide positions 61 to 62, and wherein the AUC is 0.69.
[0536] 37. An assay according to the invention, wherein the set of CpGs comprises at least the CpGs defined by SEQ ID NOs 18001 to 18500 and identified at nucleotide positions 61 to 62, and wherein the AUC is 0.72.
[0537] 38. An assay according to the invention, wherein the set of CpGs comprises at least the CpGs defined by SEQ ID NOs 18501 to 19000 and identified at nucleotide positions 61 to 62, and wherein the AUC is 0.71.
[0538] 39. An assay according to the invention, wherein the set of CpGs comprises at least the CpGs defined by SEQ ID NOs 19001 to 19500 and identified at nucleotide positions 61 to 62, and wherein the AUC is 0.67.
[0539] 40. An assay according to the invention, wherein the set of CpGs comprises at least the CpGs defined by SEQ ID NOs 19501 to 20000 and identified at nucleotide positions 61 to 62, and wherein the AUC is 0.69.
[0540] 41. An assay according to the invention, wherein the set of CpGs comprises at least the CpGs defined by SEQ ID NOs 20001 to 20500 and identified at nucleotide positions 61 to 62, and wherein the AUC is 0.68.
[0541] 42. An assay according to the invention, wherein the set of CpGs comprises at least the CpGs defined by SEQ ID NOs 20501 to 21000 and identified at nucleotide positions 61 to 62, and wherein the AUC is 0.71
[0542] 43. An assay according to the invention, wherein the set of CpGs comprises at least the CpGs defined by SEQ ID NOs 21001 to 21500 and identified at nucleotide positions 61 to 62, and wherein the AUC is 0.71.
[0543] 44. An assay according to the invention, wherein the set of CpGs comprises at least the CpGs defined by SEQ ID NOs 21501 to 22000 and identified at nucleotide positions 61 to 62, and wherein the AUC is 0.71.
[0544] 45. An assay according to the invention, wherein the set of CpGs comprises at least the CpGs defined by SEQ ID NOs 22001 to 22500 and identified at nucleotide positions 61 to 62, and wherein the AUC is 0.69.
[0545] 46. An assay according to the invention, wherein the set of CpGs comprises at least the CpGs defined by SEQ ID NOs 22501 to 23000 and identified at nucleotide positions 61 to 62, and wherein the AUC is 0.69.
[0546] 47. An assay according to the invention, wherein the set of CpGs comprises at least the CpGs defined by SEQ ID NOs 23001 to 23500 and identified at nucleotide positions 61 to 62, and wherein the AUC is 0.67.
[0547] 48. An assay according to the invention, wherein the set of CpGs comprises at least the CpGs defined by SEQ ID NOs 23501 to 24000 and identified at nucleotide positions 61 to 62, and wherein the AUC is 0.68.
[0548] 49. An assay according to the invention, wherein the set of CpGs comprises at least the CpGs defined by SEQ ID NOs 24001 to 24500 and identified at nucleotide positions 61 to 62, and wherein the AUC is 0.69.
[0549] 50. An assay according to the invention, wherein the set of CpGs comprises at least the CpGs defined by SEQ ID NOs 24501 to 25000 and identified at nucleotide positions 61 to 62, and wherein the AUC is 0.66.
[0550] 51. An assay according to the invention, wherein the set of CpGs comprises at least the CpGs defined by SEQ ID NOs 25001 to 25500 and identified at nucleotide positions 61 to 62, and wherein the AUC is 0.65.
[0551] 52. An assay according to the invention, wherein the set of CpGs comprises at least the CpGs defined by SEQ ID NOs 25501 to 26000 and identified at nucleotide positions 61 to 62, and wherein the AUC is 0.64.
[0552] 53. An assay according to the invention, wherein the set of CpGs comprises at least the CpGs defined by SEQ ID NOs 26001 to 26500 and identified at nucleotide positions 61 to 62, and wherein the AUC is 0.7.
[0553] 54. An assay according to the invention, wherein the set of CpGs comprises at least the CpGs defined by SEQ ID NOs 26501 to 27000 and identified at nucleotide positions 61 to 62, and wherein the AUC is 0.65.
[0554] 55. An assay according to the invention, wherein the set of CpGs comprises at least the CpGs defined by SEQ ID NOs 27001 to 27500 and identified at nucleotide positions 61 to 62, and wherein the AUC is 0.68.
[0555] 56. An assay according to the invention, wherein the set of CpGs comprises at least the CpGs defined by SEQ ID NOs 27501 to 28000 and identified at nucleotide positions 61 to 62, and wherein the AUC is 0.64.
[0556] 57. An assay according to the invention, wherein the set of CpGs comprises at least the CpGs defined by SEQ ID NOs 28001 to 28500 and identified at nucleotide positions 61 to 62, and wherein the AUC is 0.65.
[0557] 58. An assay according to the invention, wherein the set of CpGs comprises at least the CpGs defined by SEQ ID NOs 28501 to 29000 and identified at nucleotide positions 61 to 62, and wherein the AUC is 0.67.
[0558] 59. An assay according to the invention, wherein the set of CpGs comprises at least the CpGs defined by SEQ ID NOs 29001 to 29500 and identified at nucleotide positions 61 to 62, and wherein the AUC is 0.66.
[0559] 60. An assay according to the invention, wherein the set of CpGs comprises at least the CpGs defined by SEQ ID NOs 29501 to 30000 and identified at nucleotide positions 61 to 62, and wherein the AUC is 0.66.
[0560] 61. An assay according to the invention, wherein the set of CpGs comprises at least the CpGs defined by SEQ ID NOs 30001 to 30500 and identified at nucleotide positions 61 to 62, and wherein the AUC is 0.64.
[0561] 62. An assay according to the invention, wherein the set of CpGs comprises at least the CpGs defined by SEQ ID NOs 30501 to 31000 and identified at nucleotide positions 61 to 62, and wherein the AUC is 0.65.
[0562] 63. An assay according to the invention, wherein the set of CpGs comprises at least the CpGs defined by SEQ ID NOs 31001 to 31500 and identified at nucleotide positions 61 to 62, and wherein the AUC is 0.64.
[0563] 64. An assay according to the invention, wherein the set of CpGs comprises at least the CpGs defined by SEQ ID NOs 31501 to 32000 and identified at nucleotide positions 61 to 62, and wherein the AUC is 0.68.
[0564] 65. An assay according to the invention, wherein the set of CpGs comprises at least the CpGs defined by SEQ ID NOs 32001 to 32500 and identified at nucleotide positions 61 to 62, and wherein the AUC is 0.65.
[0565] 66. An assay according to the invention, wherein the set of CpGs comprises at least the CpGs defined by SEQ ID NOs 32501 to 33000 and identified at nucleotide positions 61 to 62, and wherein the AUC is 0.66.
[0566] 67. An assay according to the invention, wherein the set of CpGs comprises at least the CpGs defined by SEQ ID NOs 33001 to 33500 and identified at nucleotide positions 61 to 62, and wherein the AUC is 0.63.
[0567] 68. An assay according to the invention, wherein the set of CpGs comprises at least the CpGs defined by SEQ ID NOs 33501 to 34000 and identified at nucleotide positions 61 to 62, and wherein the AUC is 0.63.
[0568] 69. An assay according to the invention, wherein the set of CpGs comprises at least the CpGs defined by SEQ ID NOs 34001 to 34500 and identified at nucleotide positions 61 to 62, and wherein the AUC is 0.61.
[0569] 70. An assay according to the invention, wherein the set of CpGs comprises at least the CpGs defined by SEQ ID NOs 34501 to 35000 and identified at nucleotide positions 61 to 62, and wherein the AUC is 0.61.
[0570] 71. An assay according to the invention, wherein the set of CpGs comprises at least the CpGs defined by SEQ ID NOs 35001 to 35500 and identified at nucleotide positions 61 to 62, and wherein the AUC is 0.62.
[0571] 72. An assay according to the invention, wherein the set of CpGs comprises at least the CpGs defined by SEQ ID NOs 35501 to 36000 and identified at nucleotide positions 61 to 62, and wherein the AUC is 0.62.
[0572] 73. An assay according to the invention, wherein the set of CpGs comprises at least the CpGs defined by SEQ ID NOs 36001 to 36500 and identified at nucleotide positions 61 to 62, and wherein the AUC is 0.6.
[0573] 74. An assay according to the invention, wherein the set of CpGs comprises at least the CpGs defined by SEQ ID NOs 36501 to 37000 and identified at nucleotide positions 61 to 62, and wherein the AUC is 0.64.
[0574] 75. An assay according to the invention, wherein the set of CpGs comprises at least the CpGs defined by SEQ ID NOs 37001 to 37500 and identified at nucleotide positions 61 to 62, and wherein the AUC is 0.63.
[0575] 76. An assay according to the invention, wherein the set of CpGs comprises at least the CpGs defined by SEQ ID NOs 37501 to 38000 and identified at nucleotide positions 61 to 62, and wherein the AUC is 0.6.
[0576] 77. An assay according to the invention, wherein the set of CpGs comprises at least the CpGs defined by SEQ ID NOs 38001 to 38500 and identified at nucleotide positions 61 to 62, and wherein the AUC is 0.62.
[0577] 78. An assay according to the invention, wherein the set of CpGs comprises at least the CpGs defined by SEQ ID NOs 38501 to 39000 and identified at nucleotide positions 61 to 62, and wherein the AUC is 0.63.
[0578] 79. An assay according to the invention, wherein the set of CpGs comprises at least the CpGs defined by SEQ ID NOs 39001 to 39500 and identified at nucleotide positions 61 to 62, and wherein the AUC is 0.61.
[0579] 80. An assay according to the invention, wherein the set of CpGs comprises at least the CpGs defined by SEQ ID NOs 39501 to 40000 and identified at nucleotide positions 61 to 62, and wherein the AUC is 0.61.
[0580] 81. An assay according to the invention, wherein the set of CpGs comprises at least the CpGs defined by SEQ ID NOs 40001 to 40500 and identified at nucleotide positions 61 to 62, and wherein the AUC is 0.61.
[0581] 82. An assay according to the invention, wherein the set of CpGs comprises at least the CpGs defined by SEQ ID NOs 40501 to 40753 and identified at nucleotide positions 61 to 62, and wherein the AUC is 0.6.
[0582] 83. An assay according to the invention, wherein the set of CpGs comprises at least the CpGs defined by SEQ ID NOs 500 to 40753 and identified at nucleotide positions 61 to 62, and wherein the AUC is 0.84.
[0583] 84. An assay according to the invention, wherein the set of CpGs comprises at least the CpGs defined by SEQ ID NOs 1000 to 40753 and identified at nucleotide positions 61 to 62, and wherein the AUC is 0.84.
[0584] 85. An assay according to the invention, wherein the set of CpGs comprises at least the CpGs defined by SEQ ID NOs 1500 to 40753 and identified at nucleotide positions 61 to 62, and wherein the AUC is 0.81.
[0585] 86. An assay according to the invention, wherein the set of CpGs comprises at least the CpGs defined by SEQ ID NOs 2000 to 40753 and identified at nucleotide positions 61 to 62, and wherein the AUC is 0.81.
[0586] 87. An assay according to the invention, wherein the set of CpGs comprises at least the CpGs defined by SEQ ID NOs 2500 to 40753 and identified at nucleotide positions 61 to 62, and wherein the AUC is 0.8.
[0587] 88. An assay according to the invention, wherein the set of CpGs comprises at least the CpGs defined by SEQ ID NOs 3000 to 40753 and identified at nucleotide positions 61 to 62, and wherein the AUC is 0.8.
[0588] 89. An assay according to the invention, wherein the set of CpGs comprises at least the CpGs defined by SEQ ID NOs 3500 to 40753 and identified at nucleotide positions 61 to 62, and wherein the AUC is 0.79.
[0589] 90. An assay according to the invention, wherein the set of CpGs comprises at least the CpGs defined by SEQ ID NOs 4000 to 40753 and identified at nucleotide positions 61 to 62, and wherein the AUC is 0.78.
[0590] 91. An assay according to the invention, wherein the set of CpGs comprises at least the CpGs defined by SEQ ID NOs 4500 to 40753 and identified at nucleotide positions 61 to 62, and wherein the AUC is 0.78.
[0591] 92. An assay according to the invention, wherein the set of CpGs comprises at least the CpGs defined by SEQ ID NOs 5000 to 40753 and identified at nucleotide positions 61 to 62, and wherein the AUC is 0.77.
[0592] 93. An assay according to the invention, wherein the set of CpGs comprises at least the CpGs defined by SEQ ID NOs 5500 to 40753 and identified at nucleotide positions 61 to 62, and wherein the AUC is 0.76.
[0593] 94. An assay according to the invention, wherein the set of CpGs comprises at least the CpGs defined by SEQ ID NOs 6000 to 40753 and identified at nucleotide positions 61 to 62, and wherein the AUC is 0.74.
[0594] 95. An assay according to the invention, wherein the set of CpGs comprises at least the CpGs defined by SEQ ID NOs 6500 to 40753 and identified at nucleotide positions 61 to 62, and wherein the AUC is 0.74.
[0595] 96. An assay according to the invention, wherein the set of CpGs comprises at least the CpGs defined by SEQ ID NOs 7000 to 40753 and identified at nucleotide positions 61 to 62, and wherein the AUC is 0.74.
[0596] 97. An assay according to the invention, wherein the set of CpGs comprises at least the CpGs defined by SEQ ID NOs 7500 to 40753 and identified at nucleotide positions 61 to 62, and wherein the AUC is 0.74.
[0597] 98. An assay according to the invention, wherein the set of CpGs comprises at least the CpGs defined by SEQ ID NOs 8000 to 40753 and identified at nucleotide positions 61 to 62, and wherein the AUC is 0.73.
[0598] 99. An assay according to the invention, wherein the set of CpGs comprises at least the CpGs defined by SEQ ID NOs 8500 to 40753 and identified at nucleotide positions 61 to 62, and wherein the AUC is 0.73.
[0599] 100. An assay according to the invention, wherein the set of CpGs comprises at least the CpGs defined by SEQ ID NOs 9000 to 40753 and identified at nucleotide positions 61 to 62, and wherein the AUC is 0.72.
[0600] 101. An assay according to the invention, wherein the set of CpGs comprises at least the CpGs defined by SEQ ID NOs 9500 to 40753 and identified at nucleotide positions 61 to 62, and wherein the AUC is 0.72.
[0601] 102. An assay according to the invention, wherein the set of CpGs comprises at least the CpGs defined by SEQ ID NOs 10000 to 40753 and identified at nucleotide positions 61 to 62, and wherein the AUC is 0.72.
[0602] 103. An assay according to the invention, wherein the set of CpGs comprises at least the CpGs defined by SEQ ID NOs 11000 to 40753 and identified at nucleotide positions 61 to 62, and wherein the AUC is 0.71.
[0603] 104. An assay according to the invention, wherein the set of CpGs comprises at least the CpGs defined by SEQ ID NOs 12000 to 40753 and identified at nucleotide positions 61 to 62, and wherein the AUC is 0.71.
[0604] 105. An assay according to the invention, wherein the set of CpGs comprises at least the CpGs defined by SEQ ID NOs 13000 to 40753 and identified at nucleotide positions 61 to 62, and wherein the AUC is 0.71.
[0605] 106. An assay according to the invention, wherein the set of CpGs comprises at least the CpGs defined by SEQ ID NOs 14000 to 40753 and identified at nucleotide positions 61 to 62, and wherein the AUC is 0.68.
[0606] 107. An assay according to the invention, wherein the set of CpGs comprises at least the CpGs defined by SEQ ID NOs 15000 to 40753 and identified at nucleotide positions 61 to 62, and wherein the AUC is 0.69.
[0607] 108. An assay according to the invention, wherein the set of CpGs comprises at least the CpGs defined by SEQ ID NOs 16000 to 40753 and identified at nucleotide positions 61 to 62, and wherein the AUC is 0.68.
[0608] 109. An assay according to the invention, wherein the set of CpGs comprises at least the CpGs defined by SEQ ID NOs 17000 to 40753 and identified at nucleotide positions 61 to 62, and wherein the AUC is 0.67.
[0609] 110. An assay according to the invention, wherein the set of CpGs comprises at least the CpGs defined by SEQ ID NOs 18000 to 40753 and identified at nucleotide positions 61 to 62, and wherein the AUC is 0.67.
[0610] 111. An assay according to the invention, wherein the set of CpGs comprises at least the CpGs defined by SEQ ID NOs 19000 to 40753 and identified at nucleotide positions 61 to 62, and wherein the AUC is 0.66.
[0611] 112. An assay according to the invention, wherein the set of CpGs comprises at least the CpGs defined by SEQ ID NOs 20000 to 40753 and identified at nucleotide positions 61 to 62, and wherein the AUC is 0.66.
[0612] 113. An assay according to the invention, wherein the set of CpGs comprises at least the CpGs defined by SEQ ID NOs 22000 to 40753 and identified at nucleotide positions 61 to 62, and wherein the AUC is 0.67.
[0613] 114. An assay according to the invention, wherein the set of CpGs comprises at least the CpGs defined by SEQ ID NOs 24000 to 40753 and identified at nucleotide positions 61 to 62, and wherein the AUC is 0.67.
[0614] 115. An assay according to the invention, wherein the set of CpGs comprises at least the CpGs defined by SEQ ID NOs 26000 to 40753 and identified at nucleotide positions 61 to 62, and wherein the AUC is 0.67.
[0615] 116. An assay according to the invention, wherein the set of CpGs comprises at least the CpGs defined by SEQ ID NOs 28000 to 40753 and identified at nucleotide positions 61 to 62, and wherein the AUC is 0.64.
[0616] 117. An assay according to the invention, wherein the set of CpGs comprises at least the CpGs defined by SEQ ID NOs 30000 to 40753 and identified at nucleotide positions 61 to 62, and wherein the AUC is 0.63.
[0617] 118. An assay according to the invention, wherein the set of CpGs comprises at least the CpGs defined by SEQ ID NOs 32000 to 40753 and identified at nucleotide positions 61 to 62, and wherein the AUC is 0.62.
[0618] 119. An assay according to the invention, wherein the set of CpGs comprises at least the CpGs defined by SEQ ID NOs 34000 to 40753 and identified at nucleotide positions 61 to 62, and wherein the AUC is 0.62.
[0619] 120. An assay according to the invention, wherein the set of CpGs comprises at least the CpGs defined by SEQ ID NOs 36000 to 40753 and identified at nucleotide positions 61 to 62, and wherein the AUC is 0.61.
[0620] 121. An assay according to the invention, wherein the set of CpGs comprises at least the CpGs defined by SEQ ID NOs 38000 to 40753 and identified at nucleotide positions 61 to 62, and wherein the AUC is 0.61.
[0621] 122. An assay according to the invention, wherein the set of CpGs comprises at least the CpGs defined by SEQ ID NOs 1 to 500 and identified at nucleotide positions 61 to 62, and wherein the AUC is 0.73.
[0622] 123. An assay according to the invention, wherein the set of CpGs comprises at least the CpGs defined by SEQ ID NOs 1 to 1000 and identified at nucleotide positions 61 to 62, and wherein the AUC is 0.77.
[0623] 124. An assay according to the invention, wherein the set of CpGs comprises at least the CpGs defined by SEQ ID NOs 1 to 1500 and identified at nucleotide positions 61 to 62, and wherein the AUC is 0.80.
[0624] 125. An assay according to the invention, wherein the set of CpGs comprises at least the CpGs defined by SEQ ID NOs 1 to 2000 and identified at nucleotide positions 61 to 62, and wherein the AUC is 0.81.
[0625] 126. An assay according to the invention, wherein the set of CpGs comprises at least the CpGs defined by SEQ ID NOs 1 to 2500 and identified at nucleotide positions 61 to 62, and wherein the AUC is 0.82.
[0626] 127. An assay according to the invention, wherein the set of CpGs comprises at least the CpGs defined by SEQ ID NOs 1 to 3000 and identified at nucleotide positions 61 to 62, and wherein the AUC is 0.82.
[0627] 128. An assay according to the invention, wherein the set of CpGs comprises at least the CpGs defined by SEQ ID NOs 1 to 3500 and identified at nucleotide positions 61 to 62, and wherein the AUC is 0.83.
[0628] 129. An assay according to the invention, wherein the set of CpGs comprises at least the CpGs defined by SEQ ID NOs 1 to 4000 and identified at nucleotide positions 61 to 62, and wherein the AUC is 0.83.
[0629] 130. An assay according to the invention, wherein the set of CpGs comprises at least the CpGs defined by SEQ ID NOs 1 to 4500 and identified at nucleotide positions 61 to 62, and wherein the AUC is 0.83.
[0630] 131. An assay according to the invention, wherein the set of CpGs comprises at least the CpGs defined by SEQ ID NOs 1 to 5000 and identified at nucleotide positions 61 to 62, and wherein the AUC is 0.84.
[0631] 132. An assay according to the invention, wherein the set of CpGs comprises at least the CpGs defined by SEQ ID NOs 1 to 5500 and identified at nucleotide positions 61 to 62, and wherein the AUC is 0.83.
[0632] 133. An assay according to the invention, wherein the set of CpGs comprises at least the CpGs defined by SEQ ID NOs 1 to 6000 and identified at nucleotide positions 61 to 62, and wherein the AUC is 0.83.
[0633] 134. An assay according to the invention, wherein the set of CpGs comprises at least the CpGs defined by SEQ ID NOs 1 to 6500 and identified at nucleotide positions 61 to 62, and wherein the AUC is 0.84.
[0634] 135. An assay according to the invention, wherein the set of CpGs comprises at least the CpGs defined by SEQ ID NOs 1 to 7000 and identified at nucleotide positions 61 to 62, and wherein the AUC is 0.84.
[0635] 136. An assay according to the invention, wherein the set of CpGs comprises at least the CpGs defined by SEQ ID NOs 1 to 7500 and identified at nucleotide positions 61 to 62, and wherein the AUC is 0.84.
[0636] 137. An assay according to the invention, wherein the set of CpGs comprises at least the CpGs defined by SEQ ID NOs 1 to 8000 and identified at nucleotide positions 61 to 62, and wherein the AUC is 0.84.
[0637] 138. An assay according to the invention, wherein the set of CpGs comprises at least the CpGs defined by SEQ ID NOs 1 to 8500 and identified at nucleotide positions 61 to 62, and wherein the AUC is 0.84.
[0638] 139. An assay according to the invention, wherein the set of CpGs comprises at least the CpGs defined by SEQ ID NOs 1 to 9000 and identified at nucleotide positions 61 to 62, and wherein the AUC is 0.84.
[0639] 140. An assay according to the invention, wherein the set of CpGs comprises at least the CpGs defined by SEQ ID NOs 1 to 9500 and identified at nucleotide positions 61 to 62, and wherein the AUC is 0.84.
[0640] 141. An assay according to the invention, wherein the set of CpGs comprises at least the CpGs defined by SEQ ID NOs 1 to 10000 and identified at nucleotide positions 61 to 62, and wherein the AUC is 0.84.
[0641] 142. An assay according to the invention, wherein the set of CpGs comprises at least the CpGs defined by SEQ ID NOs 1 to 11000 and identified at nucleotide positions 61 to 62, and wherein the AUC is 0.84.
[0642] 143. An assay according to the invention, wherein the set of CpGs comprises at least the CpGs defined by SEQ ID NOs 1 to 12000 and identified at nucleotide positions 61 to 62, and wherein the AUC is 0.84.
[0643] 144. An assay according to the invention, wherein the set of CpGs comprises at least the CpGs defined by SEQ ID NOs 1 to 13000 and identified at nucleotide positions 61 to 62, and wherein the AUC is 0.84.
[0644] 145. An assay according to the invention, wherein the set of CpGs comprises at least the CpGs defined by SEQ ID NOs 1 to 14000 and identified at nucleotide positions 61 to 62, and wherein the AUC is 0.84.
[0645] 146. An assay according to the invention, wherein the set of CpGs comprises at least the CpGs defined by SEQ ID NOs 1 to 15000 and identified at nucleotide positions 61 to 62, and wherein the AUC is 0.84.
[0646] 147. An assay according to the invention, wherein the set of CpGs comprises at least the CpGs defined by SEQ ID NOs 1 to 16000 and identified at nucleotide positions 61 to 62, and wherein the AUC is 0.84.
[0647] 148. An assay according to the invention, wherein the set of CpGs comprises at least the CpGs defined by SEQ ID NOs 1 to 17000 and identified at nucleotide positions 61 to 62, and wherein the AUC is 0.85.
[0648] 149. An assay according to the invention, wherein the set of CpGs comprises at least the CpGs defined by SEQ ID NOs 1 to 18000 and identified at nucleotide positions 61 to 62, and wherein the AUC is 0.85.
[0649] 150. An assay according to the invention, wherein the set of CpGs comprises at least the CpGs defined by SEQ ID NOs 1 to 19000 and identified at nucleotide positions 61 to 62, and wherein the AUC is 0.85.
[0650] 151. An assay according to the invention, wherein the set of CpGs comprises at least the CpGs defined by SEQ ID NOs 1 to 20000 and identified at nucleotide positions 61 to 62, and wherein the AUC is 0.85.
[0651] 152. An assay according to the invention, wherein the set of CpGs comprises at least the CpGs defined by SEQ ID NOs 1 to 22000 and identified at nucleotide positions 61 to 62, and wherein the AUC is 0.85.
[0652] 153. An assay according to the invention, wherein the set of CpGs comprises at least the CpGs defined by SEQ ID NOs 1 to 24000 and identified at nucleotide positions 61 to 62, and wherein the AUC is 0.85.
[0653] 154. An assay according to the invention, wherein the set of CpGs comprises at least the CpGs defined by SEQ ID NOs 1 to 26000 and identified at nucleotide positions 61 to 62, and wherein the AUC is 0.85.
[0654] 155. An assay according to the invention, wherein the set of CpGs comprises at least the CpGs defined by SEQ ID NOs 1 to 28000 and identified at nucleotide positions 61 to 62, and wherein the AUC is 0.85.
[0655] 156. An assay according to the invention, wherein the set of CpGs comprises at least the CpGs defined by SEQ ID NOs 1 to 30000 and identified at nucleotide positions 61 to 62, and wherein the AUC is 0.85.
[0656] 157. An assay according to the invention, wherein the set of CpGs comprises at least the CpGs defined by SEQ ID NOs 1 to 32000 and identified at nucleotide positions 61 to 62, and wherein the AUC is 0.85.
[0657] 158. An assay according to the invention, wherein the set of CpGs comprises at least the CpGs defined by SEQ ID NOs 1 to 34000 and identified at nucleotide positions 61 to 62, and wherein the AUC is 0.85.
[0658] 159. An assay according to the invention, wherein the set of CpGs comprises at least the CpGs defined by SEQ ID NOs 1 to 36000 and identified at nucleotide positions 61 to 62, and wherein the AUC is 0.85.
[0659] 160. An assay according to the invention, wherein the set of CpGs comprises at least the CpGs defined by SEQ ID NOs 1 to 38000 and identified at nucleotide positions 61 to 62, and wherein the AUC is 0.85.
[0660] 161. An assay according to the invention, wherein the set of CpGs comprises at least the CpGs defined by SEQ ID NOs 1 to 40753 and identified at nucleotide positions 61 to 62, and wherein the AUC is 0.85.
   In what follows below an “assay according to the invention” should be taken to mean any assay of the invention defined and described herein, including in the claims, and in particular claims 1 to 7, and more particular claim 17.
   In any of the below described assays when a breast cancer index value threshold of −0.235 is being applied, when the WID-BC-index for the individual is about −0.235 or more, the individual may be classified as harbouring breast cancer, wherein when the WID-BC index for the individual is less than about −0.235 the individual may be classified as not harbouring breast cancer, subject to the specified sensitivity and specificity of the assay.
   In any of the below described assays when a breast cancer index value threshold of 0.090 is being applied, when the WID-BC-index for the individual is about 0.090 or more, the individual may be classified as harbouring breast cancer, wherein when the WID-BC index for the individual is less than about 0.090 the individual may be classified as not harbouring breast cancer, subject to the specified sensitivity and specificity of the assay.
   In any of the below described assays when a breast cancer index value threshold of 0.587 is being applied, when the WID-BC-index for the individual is about 0.587 or more, the individual may be classified as harbouring breast cancer, wherein when the WID-BC index for the individual is less than about 0.587 the individual may be classified as not harbouring breast cancer, subject to the specified sensitivity and specificity of the assay.
[0661] 162. An assay according to the invention, wherein the WID-BC-Index for the individual is about −0.235 or more, the individual is classified as having at least a low risk of harbouring breast cancer or a low risk of breast cancer development, wherein the set of CpGs comprises at least the CpGs defined by SEQ ID NOs 1 to 500 and identified at nucleotide positions 61 to 62, and wherein the sensitivity is at least 85% and specificity is at least 52%.
[0662] 163. An assay according to the invention, wherein the WID-BC-Index for the individual is about −0.235 or more, the individual is classified as having at least a low risk of harbouring breast cancer or a low risk of breast cancer development, wherein the set of CpGs comprises at least the CpGs defined by SEQ ID NOs 1 to 1000 and identified at nucleotide positions 61 to 62, and wherein the sensitivity is at least 88% and specificity is at least 49%.
[0663] 164. An assay according to the invention, wherein the WID-BC-Index for the individual is about −0.235 or more, the individual is classified as having at least a low risk of harbouring breast cancer or a low risk of breast cancer development, wherein the set of CpGs comprises at least the CpGs defined by SEQ ID NOs 1 to 1500 and identified at nucleotide positions 61 to 62, and wherein the sensitivity is at least 92% and specificity is at least 51%.
[0664] 165. An assay according to the invention, wherein the WID-BC-Index for the individual is about −0.235 or more, the individual is classified as having at least a low risk of harbouring breast cancer or a low risk of breast cancer development, wherein the set of CpGs comprises at least the CpGs defined by SEQ ID NOs 1 to 2000 and identified at nucleotide positions 61 to 62, and wherein the sensitivity is at least 94% and specificity is at least 51%.
[0665] 166. An assay according to the invention, wherein the WID-BC-Index for the individual is about −0.235 or more, the individual is classified as having at least a low risk of harbouring breast cancer or a low risk of breast cancer development, wherein the set of CpGs comprises at least the CpGs defined by SEQ ID NOs 1 to 2500 and identified at nucleotide positions 61 to 62, and wherein the sensitivity is at least 93% and specificity is at least 51%.
[0666] 167. An assay according to the invention, wherein the WID-BC-Index for the individual is about −0.235 or more, the individual is classified as having at least a low risk of harbouring breast cancer or a low risk of breast cancer development, wherein the set of CpGs comprises at least the CpGs defined by SEQ ID NOs 1 to 3000 and identified at nucleotide positions 61 to 62, and wherein the sensitivity is at least 93% and specificity is at least 51%.
[0667] 168. An assay according to the invention, wherein the WID-BC-Index for the individual is about −0.235 or more, the individual is classified as having at least a low risk of harbouring breast cancer or a low risk of breast cancer development, wherein the set of CpGs comprises at least the CpGs defined by SEQ ID NOs 1 to 3500 and identified at nucleotide positions 61 to 62, and wherein the sensitivity is at least 94% and specificity is at least 49%.
[0668] 169. An assay according to the invention, wherein the WID-BC-Index for the individual is about −0.235 or more, the individual is classified as having at least a low risk of harbouring breast cancer or a low risk of breast cancer development, wherein the set of CpGs comprises at least the CpGs defined by SEQ ID NOs 1 to 4000 and identified at nucleotide positions 61 to 62, and wherein the sensitivity is at least 95% and specificity is at least 47%.
[0669] 170. An assay according to the invention, wherein the WID-BC-Index for the individual is about −0.235 or more, the individual is classified as having at least a low risk of harbouring breast cancer or a low risk of breast cancer development, wherein the set of CpGs comprises at least the CpGs defined by SEQ ID NOs 1 to 4500 and identified at nucleotide positions 61 to 62, and wherein the sensitivity is at least 94% and specificity is at least 48%.
[0670] 171. An assay according to the invention, wherein the WID-BC-Index for the individual is about −0.235 or more, the individual is classified as having at least a low risk of harbouring breast cancer or a low risk of breast cancer development, wherein the set of CpGs comprises at least the CpGs defined by SEQ ID NOs 1 to 5000 and identified at nucleotide positions 61 to 62, and wherein the sensitivity is at least 96% and specificity is at least 49%.
[0671] 172. An assay according to the invention, wherein the WID-BC-Index for the individual is about −0.235 or more, the individual is classified as having at least a low risk of harbouring breast cancer or a low risk of breast cancer development, wherein the set of CpGs comprises at least the CpGs defined by SEQ ID NOs 1 to 5500 and identified at nucleotide positions 61 to 62, and wherein the sensitivity is at least 94% and specificity is at least 49%.
[0672] 173. An assay according to the invention, wherein the WID-BC-Index for the individual is about −0.235 or more, the individual is classified as having at least a low risk of harbouring breast cancer or a low risk of breast cancer development, wherein the set of CpGs comprises at least the CpGs defined by SEQ ID NOs 1 to 6000 and identified at nucleotide positions 61 to 62, and wherein the sensitivity is at least 95% and specificity is at least 50%.
[0673] 174. An assay according to the invention, wherein the WID-BC-Index for the individual is about −0.235 or more, the individual is classified as having at least a low risk of harbouring breast cancer or a low risk of breast cancer development, wherein the set of CpGs comprises at least the CpGs defined by SEQ ID NOs 1 to 6500 and identified at nucleotide positions 61 to 62, and wherein the sensitivity is at least 95% and specificity is at least 49%.
[0674] 175. An assay according to the invention, wherein the WID-BC-Index for the individual is about −0.235 or more, the individual is classified as having at least a low risk of harbouring breast cancer or a low risk of breast cancer development, wherein the set of CpGs comprises at least the CpGs defined by SEQ ID NOs 1 to 7000 and identified at nucleotide positions 61 to 62, and wherein the sensitivity is at least 95% and specificity is at least 50%.
[0675] 176. An assay according to the invention, wherein the WID-BC-Index for the individual is about −0.235 or more, the individual is classified as having at least a low risk of harbouring breast cancer or a low risk of breast cancer development, wherein the set of CpGs comprises at least the CpGs defined by SEQ ID NOs 1 to 7500 and identified at nucleotide positions 61 to 62, and wherein the sensitivity is at least 95% and specificity is at least 52%.
[0676] 177. An assay according to the invention, wherein the WID-BC-Index for the individual is about −0.235 or more, the individual is classified as having at least a low risk of harbouring breast cancer or a low risk of breast cancer development, wherein the set of CpGs comprises at least the CpGs defined by SEQ ID NOs 1 to 8000 and identified at nucleotide positions 61 to 62, and wherein the sensitivity is at least 95% and specificity is at least 51%.
[0677] 178. An assay according to the invention, wherein the WID-BC-Index for the individual is about −0.235 or more, the individual is classified as having at least a low risk of harbouring breast cancer or a low risk of breast cancer development, wherein the set of CpGs comprises at least the CpGs defined by SEQ ID NOs 1 to 8500 and identified at nucleotide positions 61 to 62, and wherein the sensitivity is at least 94% and specificity is at least 53%.
[0678] 179. An assay according to the invention, wherein the WID-BC-Index for the individual is about −0.235 or more, the individual is classified as having at least a low risk of harbouring breast cancer or a low risk of breast cancer development, wherein the set of CpGs comprises at least the CpGs defined by SEQ ID NOs 1 to 9000 and identified at nucleotide positions 61 to 62, and wherein the sensitivity is at least 95% and specificity is at least 52%.
[0679] 180. An assay according to the invention, wherein the WID-BC-Index for the individual is about −0.235 or more, the individual is classified as having at least a low risk of harbouring breast cancer or a low risk of breast cancer development, wherein the set of CpGs comprises at least the CpGs defined by SEQ ID NOs 1 to 9500 and identified at nucleotide positions 61 to 62, and wherein the sensitivity is at least 95% and specificity is at least 50%.
[0680] 181. An assay according to the invention, wherein the WID-BC-Index for the individual is about −0.235 or more, the individual is classified as having at least a low risk of harbouring breast cancer or a low risk of breast cancer development, wherein the set of CpGs comprises at least the CpGs defined by SEQ ID NOs 1 to 10000 and identified at nucleotide positions 61 to 62, and wherein the sensitivity is at least 95% and specificity is at least 50%.
[0681] 182. An assay according to the invention, wherein the WID-BC-Index for the individual is about −0.235 or more, the individual is classified as having at least a low risk of harbouring breast cancer or a low risk of breast cancer development, wherein the set of CpGs comprises at least the CpGs defined by SEQ ID NOs 1 to 11000 and identified at nucleotide positions 61 to 62, and wherein the sensitivity is at least 95% and specificity is at least 51%.
[0682] 183. An assay according to the invention, wherein the WID-BC-Index for the individual is about −0.235 or more, the individual is classified as having at least a low risk of harbouring breast cancer or a low risk of breast cancer development, wherein the set of CpGs comprises at least the CpGs defined by SEQ ID NOs 1 to 12000 and identified at nucleotide positions 61 to 62, and wherein the sensitivity is at least 95% and specificity is at least 52%.
[0683] 184. An assay according to the invention, wherein the WID-BC-Index for the individual is about −0.235 or more, the individual is classified as having at least a low risk of harbouring breast cancer or a low risk of breast cancer development, wherein the set of CpGs comprises at least the CpGs defined by SEQ ID NOs 1 to 13000 and identified at nucleotide positions 61 to 62, and wherein the sensitivity is at least 95% and specificity is at least 52%.
[0684] 185. An assay according to the invention, wherein the WID-BC-Index for the individual is about −0.235 or more, the individual is classified as having at least a low risk of harbouring breast cancer or a low risk of breast cancer development, wherein the set of CpGs comprises at least the CpGs defined by SEQ ID NOs 1 to 14000 and identified at nucleotide positions 61 to 62, and wherein the sensitivity is at least 95% and specificity is at least 52%.
[0685] 186. An assay according to the invention, wherein the WID-BC-Index for the individual is about −0.235 or more, the individual is classified as having at least a low risk of harbouring breast cancer or a low risk of breast cancer development, wherein the set of CpGs comprises at least the CpGs defined by SEQ ID NOs 1 to 15000 and identified at nucleotide positions 61 to 62, and wherein the sensitivity is at least 95% and specificity is at least 52%.
[0686] 187. An assay according to the invention, wherein the WID-BC-Index for the individual is about −0.235 or more, the individual is classified as having at least a low risk of harbouring breast cancer or a low risk of breast cancer development, wherein the set of CpGs comprises at least the CpGs defined by SEQ ID NOs 1 to 16000 and identified at nucleotide positions 61 to 62, and wherein the sensitivity is at least 95% and specificity is at least 53%.
[0687] 188. An assay according to the invention, wherein the WID-BC-Index for the individual is about −0.235 or more, the individual is classified as having at least a low risk of harbouring breast cancer or a low risk of breast cancer development, wherein the set of CpGs comprises at least the CpGs defined by SEQ ID NOs 1 to 17000 and identified at nucleotide positions 61 to 62, and wherein the sensitivity is at least 95% and specificity is at least 51%.
[0688] 189. An assay according to the invention, wherein the WID-BC-Index for the individual is about −0.235 or more, the individual is classified as having at least a low risk of harbouring breast cancer or a low risk of breast cancer development, wherein the set of CpGs comprises at least the CpGs defined by SEQ ID NOs 1 to 18000 and identified at nucleotide positions 61 to 62, and wherein the sensitivity is at least 95% and specificity is at least 51%.
[0689] 190. An assay according to the invention, wherein the WID-BC-Index for the individual is about −0.235 or more, the individual is classified as having at least a low risk of harbouring breast cancer or a low risk of breast cancer development, wherein the set of CpGs comprises at least the CpGs defined by SEQ ID NOs 1 to 19000 and identified at nucleotide positions 61 to 62, and wherein the sensitivity is at least 94% and specificity is at least 51%.
[0690] 191. An assay according to the invention, wherein the WID-BC-Index for the individual is about −0.235 or more, the individual is classified as having at least a low risk of harbouring breast cancer or a low risk of breast cancer development, wherein the set of CpGs comprises at least the CpGs defined by SEQ ID NOs 1 to 20000 and identified at nucleotide positions 61 to 62, and wherein the sensitivity is at least 94% and specificity is at least 51%.
[0691] 192. An assay according to the invention, wherein the WID-BC-Index for the individual is about −0.235 or more, the individual is classified as having at least a low risk of harbouring breast cancer or a low risk of breast cancer development, wherein the set of CpGs comprises at least the CpGs defined by SEQ ID NOs 1 to 22000 and identified at nucleotide positions 61 to 62, and wherein the sensitivity is at least 94% and specificity is at least 51%.
[0692] 193. An assay according to the invention, wherein the WID-BC-Index for the individual is about −0.235 or more, the individual is classified as having at least a low risk of harbouring breast cancer or a low risk of breast cancer development, wherein the set of CpGs comprises at least the CpGs defined by SEQ ID NOs 1 to 24000 and identified at nucleotide positions 61 to 62, and wherein the sensitivity is at least 94% and specificity is at least 51%.
[0693] 194. An assay according to the invention, wherein the WID-BC-Index for the individual is about −0.235 or more, the individual is classified as having at least a low risk of harbouring breast cancer or a low risk of breast cancer development, wherein the set of CpGs comprises at least the CpGs defined by SEQ ID NOs 1 to 26000 and identified at nucleotide positions 61 to 62, and wherein the sensitivity is at least 94% and specificity is at least 51%.
[0694] 195. An assay according to the invention, wherein the WID-BC-Index for the individual is about −0.235 or more, the individual is classified as having at least a low risk of harbouring breast cancer or a low risk of breast cancer development, wherein the set of CpGs comprises at least the CpGs defined by SEQ ID NOs 1 to 28000 and identified at nucleotide positions 61 to 62, and wherein the sensitivity is at least 94% and specificity is at least 51%.
[0695] 196. An assay according to the invention, wherein the WID-BC-Index for the individual is about −0.235 or more, the individual is classified as having at least a low risk of harbouring breast cancer or a low risk of breast cancer development, wherein the set of CpGs comprises at least the CpGs defined by SEQ ID NOs 1 to 30000 and identified at nucleotide positions 61 to 62, and wherein the sensitivity is at least 94% and specificity is at least 51%.
[0696] 197. An assay according to the invention, wherein the WID-BC-Index for the individual is about −0.235 or more, the individual is classified as having at least a low risk of harbouring breast cancer or a low risk of breast cancer development, wherein the set of CpGs comprises at least the CpGs defined by SEQ ID NOs 1 to 32000 and identified at nucleotide positions 61 to 62, and wherein the sensitivity is at least 94% and specificity is at least 50%.
[0697] 198. An assay according to the invention, wherein the WID-BC-Index for the individual is about −0.235 or more, the individual is classified as having at least a low risk of harbouring breast cancer or a low risk of breast cancer development, wherein the set of CpGs comprises at least the CpGs defined by SEQ ID NOs 1 to 34000 and identified at nucleotide positions 61 to 62, and wherein the sensitivity is at least 94% and specificity is at least 50%.
[0698] 199. An assay according to the invention, wherein the WID-BC-Index for the individual is about −0.235 or more, the individual is classified as having at least a low risk of harbouring breast cancer or a low risk of breast cancer development, wherein the set of CpGs comprises at least the CpGs defined by SEQ ID NOs 1 to 36000 and identified at nucleotide positions 61 to 62, and wherein the sensitivity is at least 94% and specificity is at least 50%.
[0699] 200. An assay according to the invention, wherein the WID-BC-Index for the individual is about −0.235 or more, the individual is classified as having at least a low risk of harbouring breast cancer or a low risk of breast cancer development, wherein the set of CpGs comprises at least the CpGs defined by SEQ ID NOs 1 to 38000 and identified at nucleotide positions 61 to 62, and wherein the sensitivity is at least 94% and specificity is at least 50%.
[0700] 201. An assay according to the invention, wherein the WID-BC-Index for the individual is about −0.235 or more, the individual is classified as having at least a low risk of harbouring breast cancer or a low risk of breast cancer development, wherein the set of CpGs comprises at least the CpGs defined by SEQ ID NOs 1 to 40753 and identified at nucleotide positions 61 to 62, and wherein the sensitivity is at least 94% and specificity is at least 50%.
[0701] 202. An assay according to the invention, wherein the WID-BC-Index for the individual is about 0.090 or more, the individual is classified as having at least a moderate risk of harbouring breast cancer or a moderate risk of breast cancer development, wherein the set of CpGs comprises at least the CpGs defined by SEQ ID NOs 1 to 500 and identified at nucleotide positions 61 to 62, and wherein the sensitivity is at least 63% and specificity is at least 69%.
[0702] 203. An assay according to the invention, wherein the WID-BC-Index for the individual is about 0.090 or more, the individual is classified as having at least a moderate risk of harbouring breast cancer or a moderate risk of breast cancer development, wherein the set of CpGs comprises at least the CpGs defined by SEQ ID NOs 1 to 1000 and identified at nucleotide positions 61 to 62, and wherein the sensitivity is at least 68% and specificity is at least 73%.
[0703] 204. An assay according to the invention, wherein the WID-BC-Index for the individual is about 0.090 or more, the individual is classified as having at least a moderate risk of harbouring breast cancer or a moderate risk of breast cancer development, wherein the set of CpGs comprises at least the CpGs defined by SEQ ID NOs 1 to 1500 and identified at nucleotide positions 61 to 62, and wherein the sensitivity is at least 73% and specificity is at least 75%.
[0704] 205. An assay according to the invention, wherein the WID-BC-Index for the individual is about 0.090 or more, the individual is classified as having at least a moderate risk of harbouring breast cancer or a moderate risk of breast cancer development, wherein the set of CpGs comprises at least the CpGs defined by SEQ ID NOs 1 to 2000 and identified at nucleotide positions 61 to 62, and wherein the sensitivity is at least 69% and specificity is at least 78%.
[0705] 206. An assay according to the invention, wherein the WID-BC-Index for the individual is about 0.090 or more, the individual is classified as having at least a moderate risk of harbouring breast cancer or a moderate risk of breast cancer development, wherein the set of CpGs comprises at least the CpGs defined by SEQ ID NOs 1 to 2500 and identified at nucleotide positions 61 to 62, and wherein the sensitivity is at least 68% and specificity is at least 78%.
[0706] 207. An assay according to the invention, wherein the WID-BC-Index for the individual is about 0.090 or more, the individual is classified as having at least a moderate risk of harbouring breast cancer or a moderate risk of breast cancer development, wherein the set of CpGs comprises at least the CpGs defined by SEQ ID NOs 1 to 3000 and identified at nucleotide positions 61 to 62, and wherein the sensitivity is at least 71% and specificity is at least 78%.
[0707] 208. An assay according to the invention, wherein the WID-BC-Index for the individual is about 0.090 or more, the individual is classified as having at least a moderate risk of harbouring breast cancer or a moderate risk of breast cancer development, wherein the set of CpGs comprises at least the CpGs defined by SEQ ID NOs 1 to 3500 and identified at nucleotide positions 61 to 62, and wherein the sensitivity is at least 72% and specificity is at least 79%.
[0708] 209. An assay according to the invention, wherein the WID-BC-Index for the individual is about 0.090 or more, the individual is classified as having at least a moderate risk of harbouring breast cancer or a moderate risk of breast cancer development, wherein the set of CpGs comprises at least the CpGs defined by SEQ ID NOs 1 to 4000 and identified at nucleotide positions 61 to 62, and wherein the sensitivity is at least 69% and specificity is at least 80%.
[0709] 210. An assay according to the invention, wherein the WID-BC-Index for the individual is about 0.090 or more, the individual is classified as having at least a moderate risk of harbouring breast cancer or a moderate risk of breast cancer development, wherein the set of CpGs comprises at least the CpGs defined by SEQ ID NOs 1 to 4500 and identified at nucleotide positions 61 to 62, and wherein the sensitivity is at least 72% and specificity is at least 79%.
[0710] 211. An assay according to the invention, wherein the WID-BC-Index for the individual is about 0.090 or more, the individual is classified as having at least a moderate risk of harbouring breast cancer or a moderate risk of breast cancer development, wherein the set of CpGs comprises at least the CpGs defined by SEQ ID NOs 1 to 5000 and identified at nucleotide positions 61 to 62, and wherein the sensitivity is at least 72% and specificity is at least 80%.
[0711] 212. An assay according to the invention, wherein the WID-BC-Index for the individual is about 0.090 or more, the individual is classified as having at least a moderate risk of harbouring breast cancer or a moderate risk of breast cancer development, wherein the set of CpGs comprises at least the CpGs defined by SEQ ID NOs 1 to 5500 and identified at nucleotide positions 61 to 62, and wherein the sensitivity is at least 73% and specificity is at least 79%.
[0712] 213. An assay according to the invention, wherein the WID-BC-Index for the individual is about 0.090 or more, the individual is classified as having at least a moderate risk of harbouring breast cancer or a moderate risk of breast cancer development, wherein the set of CpGs comprises at least the CpGs defined by SEQ ID NOs 1 to 6000 and identified at nucleotide positions 61 to 62, and wherein the sensitivity is at least 73% and specificity is at least 79%.
[0713] 214. An assay according to the invention, wherein the WID-BC-Index for the individual is about 0.090 or more, the individual is classified as having at least a moderate risk of harbouring breast cancer or a moderate risk of breast cancer development, wherein the set of CpGs comprises at least the CpGs defined by SEQ ID NOs 1 to 6500 and identified at nucleotide positions 61 to 62, and wherein the sensitivity is at least 71% and specificity is at least 79%.
[0714] 215. An assay according to the invention, wherein the WID-BC-Index for the individual is about 0.090 or more, the individual is classified as having at least a moderate risk of harbouring breast cancer or a moderate risk of breast cancer development, wherein the set of CpGs comprises at least the CpGs defined by SEQ ID NOs 1 to 7000 and identified at nucleotide positions 61 to 62, and wherein the sensitivity is at least 73% and specificity is at least 80%.
[0715] 216. An assay according to the invention, wherein the WID-BC-Index for the individual is about 0.090 or more, the individual is classified as having at least a moderate risk of harbouring breast cancer or a moderate risk of breast cancer development, wherein the set of CpGs comprises at least the CpGs defined by SEQ ID NOs 1 to 7500 and identified at nucleotide positions 61 to 62, and wherein the sensitivity is at least 72% and specificity is at least 80%.
[0716] 217. An assay according to the invention, wherein the WID-BC-Index for the individual is about 0.090 or more, the individual is classified as having at least a moderate risk of harbouring breast cancer or a moderate risk of breast cancer development, wherein the set of CpGs comprises at least the CpGs defined by SEQ ID NOs 1 to 8000 and identified at nucleotide positions 61 to 62, and wherein the sensitivity is at least 74% and specificity is at least 79%.
[0717] 218. An assay according to the invention, wherein the WID-BC-Index for the individual is about 0.090 or more, the individual is classified as having at least a moderate risk of harbouring breast cancer or a moderate risk of breast cancer development, wherein the set of CpGs comprises at least the CpGs defined by SEQ ID NOs 1 to 8500 and identified at nucleotide positions 61 to 62, and wherein the sensitivity is at least 73% and specificity is at least 80%.
[0718] 219. An assay according to the invention, wherein the WID-BC-Index for the individual is about 0.090 or more, the individual is classified as having at least a moderate risk of harbouring breast cancer or a moderate risk of breast cancer development, wherein the set of CpGs comprises at least the CpGs defined by SEQ ID NOs 1 to 9000 and identified at nucleotide positions 61 to 62, and wherein the sensitivity is at least 75% and specificity is at least 79%.
[0719] 220. An assay according to the invention, wherein the WID-BC-Index for the individual is about 0.090 or more, the individual is classified as having at least a moderate risk of harbouring breast cancer or a moderate risk of breast cancer development, wherein the set of CpGs comprises at least the CpGs defined by SEQ ID NOs 1 to 9500 and identified at nucleotide positions 61 to 62, and wherein the sensitivity is at least 74% and specificity is at least 78%.
[0720] 221. An assay according to the invention, wherein the WID-BC-Index for the individual is about 0.090 or more, the individual is classified as having at least a moderate risk of harbouring breast cancer or a moderate risk of breast cancer development, wherein the set of CpGs comprises at least the CpGs defined by SEQ ID NOs 1 to 10000 and identified at nucleotide positions 61 to 62, and wherein the sensitivity is at least 74% and specificity is at least 80%.
[0721] 222. An assay according to the invention, wherein the WID-BC-Index for the individual is about 0.090 or more, the individual is classified as having at least a moderate risk of harbouring breast cancer or a moderate risk of breast cancer development, wherein the set of CpGs comprises at least the CpGs defined by SEQ ID NOs 1 to 11000 and identified at nucleotide positions 61 to 62, and wherein the sensitivity is at least 73% and specificity is at least 80%.
[0722] 223. An assay according to the invention, wherein the WID-BC-Index for the individual is about 0.090 or more, the individual is classified as having at least a moderate risk of harbouring breast cancer or a moderate risk of breast cancer development, wherein the set of CpGs comprises at least the CpGs defined by SEQ ID NOs 1 to 12000 and identified at nucleotide positions 61 to 62, and wherein the sensitivity is at least 74% and specificity is at least 80%.
[0723] 224. An assay according to the invention, wherein the WID-BC-Index for the individual is about 0.090 or more, the individual is classified as having at least a moderate risk of harbouring breast cancer or a moderate risk of breast cancer development, wherein the set of CpGs comprises at least the CpGs defined by SEQ ID NOs 1 to 13000 and identified at nucleotide positions 61 to 62, and wherein the sensitivity is at least 74% and specificity is at least 80%.
[0724] 225. An assay according to the invention, wherein the WID-BC-Index for the individual is about 0.090 or more, the individual is classified as having at least a moderate risk of harbouring breast cancer or a moderate risk of breast cancer development, wherein the set of CpGs comprises at least the CpGs defined by SEQ ID NOs 1 to 14000 and identified at nucleotide positions 61 to 62, and wherein the sensitivity is at least 76% and specificity is at least 80%.
[0725] 226. An assay according to the invention, wherein the WID-BC-Index for the individual is about 0.090 or more, the individual is classified as having at least a moderate risk of harbouring breast cancer or a moderate risk of breast cancer development, wherein the set of CpGs comprises at least the CpGs defined by SEQ ID NOs 1 to 15000 and identified at nucleotide positions 61 to 62, and wherein the sensitivity is at least 74% and specificity is at least 80%.
[0726] 227. An assay according to the invention, wherein the WID-BC-Index for the individual is about 0.090 or more, the individual is classified as having at least a moderate risk of harbouring breast cancer or a moderate risk of breast cancer development, wherein the set of CpGs comprises at least the CpGs defined by SEQ ID NOs 1 to 16000 and identified at nucleotide positions 61 to 62, and wherein the sensitivity is at least 74% and specificity is at least 80%.
[0727] 228. An assay according to the invention, wherein the WID-BC-Index for the individual is about 0.090 or more, the individual is classified as having at least a moderate risk of harbouring breast cancer or a moderate risk of breast cancer development, wherein the set of CpGs comprises at least the CpGs defined by SEQ ID NOs 1 to 17000 and identified at nucleotide positions 61 to 62, and wherein the sensitivity is at least 74% and specificity is at least 80%.
[0728] 229. An assay according to the invention, wherein the WID-BC-Index for the individual is about 0.090 or more, the individual is classified as having at least a moderate risk of harbouring breast cancer or a moderate risk of breast cancer development, wherein the set of CpGs comprises at least the CpGs defined by SEQ ID NOs 1 to 18000 and identified at nucleotide positions 61 to 62, and wherein the sensitivity is at least 76% and specificity is at least 80%.
[0729] 230. An assay according to the invention, wherein the WID-BC-Index for the individual is about 0.090 or more, the individual is classified as having at least a moderate risk of harbouring breast cancer or a moderate risk of breast cancer development, wherein the set of CpGs comprises at least the CpGs defined by SEQ ID NOs 1 to 19000 and identified at nucleotide positions 61 to 62, and wherein the sensitivity is at least 77% and specificity is at least 80%.
[0730] 231. An assay according to the invention, wherein the WID-BC-Index for the individual is about 0.090 or more, the individual is classified as having at least a moderate risk of harbouring breast cancer or a moderate risk of breast cancer development, wherein the set of CpGs comprises at least the CpGs defined by SEQ ID NOs 1 to 20000 and identified at nucleotide positions 61 to 62, and wherein the sensitivity is at least 76% and specificity is at least 80%.
[0731] 232. An assay according to the invention, wherein the WID-BC-Index for the individual is about 0.090 or more, the individual is classified as having at least a moderate risk of harbouring breast cancer or a moderate risk of breast cancer development, wherein the set of CpGs comprises at least the CpGs defined by SEQ ID NOs 1 to 22000 and identified at nucleotide positions 61 to 62, and wherein the sensitivity is at least 77% and specificity is at least 80%.
[0732] 233. An assay according to the invention, wherein the WID-BC-Index for the individual is about 0.090 or more, the individual is classified as having at least a moderate risk of harbouring breast cancer or a moderate risk of breast cancer development, wherein the set of CpGs comprises at least the CpGs defined by SEQ ID NOs 1 to 24000 and identified at nucleotide positions 61 to 62, and wherein the sensitivity is at least 77% and specificity is at least 80%.
[0733] 234. An assay according to the invention, wherein the WID-BC-Index for the individual is about 0.090 or more, the individual is classified as having at least a moderate risk of harbouring breast cancer or a moderate risk of breast cancer development, wherein the set of CpGs comprises at least the CpGs defined by SEQ ID NOs 1 to 26000 and identified at nucleotide positions 61 to 62, and wherein the sensitivity is at least 77% and specificity is at least 80%.
[0734] 235. An assay according to the invention, wherein the WID-BC-Index for the individual is about 0.090 or more, the individual is classified as having at least a moderate risk of harbouring breast cancer or a moderate risk of breast cancer development, wherein the set of CpGs comprises at least the CpGs defined by SEQ ID NOs 1 to 28000 and identified at nucleotide positions 61 to 62, and wherein the sensitivity is at least 77% and specificity is at least 80%.
[0735] 236. An assay according to the invention, wherein the WID-BC-Index for the individual is about 0.090 or more, the individual is classified as having at least a moderate risk of harbouring breast cancer or a moderate risk of breast cancer development, wherein the set of CpGs comprises at least the CpGs defined by SEQ ID NOs 1 to 30000 and identified at nucleotide positions 61 to 62, and wherein the sensitivity is at least 77% and specificity is at least 80%.
[0736] 237. An assay according to the invention, wherein the WID-BC-Index for the individual is about 0.090 or more, the individual is classified as having at least a moderate risk of harbouring breast cancer or a moderate risk of breast cancer development, wherein the set of CpGs comprises at least the CpGs defined by SEQ ID NOs 1 to 32000 and identified at nucleotide positions 61 to 62, and wherein the sensitivity is at least 77% and specificity is at least 80%.
[0737] 238. An assay according to the invention, wherein the WID-BC-Index for the individual is about 0.090 or more, the individual is classified as having at least a moderate risk of harbouring breast cancer or a moderate risk of breast cancer development, wherein the set of CpGs comprises at least the CpGs defined by SEQ ID NOs 1 to 34000 and identified at nucleotide positions 61 to 62, and wherein the sensitivity is at least 78% and specificity is at least 80%.
[0738] 239. An assay according to the invention, wherein the WID-BC-Index for the individual is about 0.090 or more, the individual is classified as having at least a moderate risk of harbouring breast cancer or a moderate risk of breast cancer development, wherein the set of CpGs comprises at least the CpGs defined by SEQ ID NOs 1 to 36000 and identified at nucleotide positions 61 to 62, and wherein the sensitivity is at least 78% and specificity is at least 80%.
[0739] 240. An assay according to the invention, wherein the WID-BC-Index for the individual is about 0.090 or more, the individual is classified as having at least a moderate risk of harbouring breast cancer or a moderate risk of breast cancer development, wherein the set of CpGs comprises at least the CpGs defined by SEQ ID NOs 1 to 38000 and identified at nucleotide positions 61 to 62, and wherein the sensitivity is at least 77% and specificity is at least 80%.
[0740] 241. An assay according to the invention, wherein the WID-BC-Index for the individual is about 0.090 or more, the individual is classified as having at least a moderate risk of harbouring breast cancer or a moderate risk of breast cancer development, wherein the set of CpGs comprises at least the CpGs defined by SEQ ID NOs 1 to 40753 and identified at nucleotide positions 61 to 62, and wherein the sensitivity is at least 78% and specificity is at least 80%.
[0741] 242. An assay according to the invention, wherein the WID-BC-Index for the individual is about 0.587 or more, the individual is classified as having at least a high risk of harbouring breast cancer or a high risk of breast cancer development, wherein the set of CpGs comprises at least the CpGs defined by SEQ ID NOs 1 to 500 and identified at nucleotide positions 61 to 62, and wherein the sensitivity is at least 26% and specificity is at least 93%.
[0742] 243. An assay according to the invention, wherein the WID-BC-Index for the individual is about 0.587 or more, the individual is classified as having at least a high risk of harbouring breast cancer or a high risk of breast cancer development, wherein the set of CpGs comprises at least the CpGs defined by SEQ ID NOs 1 to 1000 and identified at nucleotide positions 61 to 62, and wherein the sensitivity is at least 29% and specificity is at least 95%.
[0743] 244. An assay according to the invention, wherein the WID-BC-Index for the individual is about 0.587 or more, the individual is classified as having at least a high risk of harbouring breast cancer or a high risk of breast cancer development, wherein the set of CpGs comprises at least the CpGs defined by SEQ ID NOs 1 to 1500 and identified at nucleotide positions 61 to 62, and wherein the sensitivity is at least 29% and specificity is at least 94%.
[0744] 245. An assay according to the invention, wherein the WID-BC-Index for the individual is about 0.587 or more, the individual is classified as having at least a high risk of harbouring breast cancer or a high risk of breast cancer development, wherein the set of CpGs comprises at least the CpGs defined by SEQ ID NOs 1 to 2000 and identified at nucleotide positions 61 to 62, and wherein the sensitivity is at least 33% and specificity is at least 94%.
[0745] 246. An assay according to the invention, wherein the WID-BC-Index for the individual is about 0.587 or more, the individual is classified as having at least a high risk of harbouring breast cancer or a high risk of breast cancer development, wherein the set of CpGs comprises at least the CpGs defined by SEQ ID NOs 1 to 2500 and identified at nucleotide positions 61 to 62, and wherein the sensitivity is at least 31% and specificity is at least 95%.
[0746] 247. An assay according to the invention, wherein the WID-BC-Index for the individual is about 0.587 or more, the individual is classified as having at least a high risk of harbouring breast cancer or a high risk of breast cancer development, wherein the set of CpGs comprises at least the CpGs defined by SEQ ID NOs 1 to 3000 and identified at nucleotide positions 61 to 62, and wherein the sensitivity is at least 28% and specificity is at least 94%.
[0747] 248. An assay according to the invention, wherein the WID-BC-Index for the individual is about 0.587 or more, the individual is classified as having at least a high risk of harbouring breast cancer or a high risk of breast cancer development, wherein the set of CpGs comprises at least the CpGs defined by SEQ ID NOs 1 to 3500 and identified at nucleotide positions 61 to 62, and wherein the sensitivity is at least 26% and specificity is at least 95%.
[0748] 249. An assay according to the invention, wherein the WID-BC-Index for the individual is about 0.587 or more, the individual is classified as having at least a high risk of harbouring breast cancer or a high risk of breast cancer development, wherein the set of CpGs comprises at least the CpGs defined by SEQ ID NOs 1 to 4000 and identified at nucleotide positions 61 to 62, and wherein the sensitivity is at least 29% and specificity is at least 95%.
[0749] 250. An assay according to the invention, wherein the WID-BC-Index for the individual is about 0.587 or more, the individual is classified as having at least a high risk of harbouring breast cancer or a high risk of breast cancer development, wherein the set of CpGs comprises at least the CpGs defined by SEQ ID NOs 1 to 4500 and identified at nucleotide positions 61 to 62, and wherein the sensitivity is at least 32% and specificity is at least 94%.
[0750] 251. An assay according to the invention, wherein the WID-BC-Index for the individual is about 0.587 or more, the individual is classified as having at least a high risk of harbouring breast cancer or a high risk of breast cancer development, wherein the set of CpGs comprises at least the CpGs defined by SEQ ID NOs 1 to 5000 and identified at nucleotide positions 61 to 62, and wherein the sensitivity is at least 29% and specificity is at least 96%.
[0751] 252. An assay according to the invention, wherein the WID-BC-Index for the individual is about 0.587 or more, the individual is classified as having at least a high risk of harbouring breast cancer or a high risk of breast cancer development, wherein the set of CpGs comprises at least the CpGs defined by SEQ ID NOs 1 to 5500 and identified at nucleotide positions 61 to 62, and wherein the sensitivity is at least 27% and specificity is at least 95%.
[0752] 253. An assay according to the invention, wherein the WID-BC-Index for the individual is about 0.587 or more, the individual is classified as having at least a high risk of harbouring breast cancer or a high risk of breast cancer development, wherein the set of CpGs comprises at least the CpGs defined by SEQ ID NOs 1 to 6000 and identified at nucleotide positions 61 to 62, and wherein the sensitivity is at least 27% and specificity is at least 96%.
[0753] 254. An assay according to the invention, wherein the WID-BC-Index for the individual is about 0.587 or more, the individual is classified as having at least a high risk of harbouring breast cancer or a high risk of breast cancer development, wherein the set of CpGs comprises at least the CpGs defined by SEQ ID NOs 1 to 6500 and identified at nucleotide positions 61 to 62, and wherein the sensitivity is at least 31% and specificity is at least 96%.
[0754] 255. An assay according to the invention, wherein the WID-BC-Index for the individual is about 0.587 or more, the individual is classified as having at least a high risk of harbouring breast cancer or a high risk of breast cancer development, wherein the set of CpGs comprises at least the CpGs defined by SEQ ID NOs 1 to 7000 and identified at nucleotide positions 61 to 62, and wherein the sensitivity is at least 29% and specificity is at least 96%.
[0755] 256. An assay according to the invention, wherein the WID-BC-Index for the individual is about 0.587 or more, the individual is classified as having at least a high risk of harbouring breast cancer or a high risk of breast cancer development, wherein the set of CpGs comprises at least the CpGs defined by SEQ ID NOs 1 to 7500 and identified at nucleotide positions 61 to 62, and wherein the sensitivity is at least 29% and specificity is at least 96%.
[0756] 257. An assay according to the invention, wherein the WID-BC-Index for the individual is about 0.587 or more, the individual is classified as having at least a high risk of harbouring breast cancer or a high risk of breast cancer development, wherein the set of CpGs comprises at least the CpGs defined by SEQ ID NOs 1 to 8000 and identified at nucleotide positions 61 to 62, and wherein the sensitivity is at least 29% and specificity is at least 96%.
[0757] 258. An assay according to the invention, wherein the WID-BC-Index for the individual is about 0.587 or more, the individual is classified as having at least a high risk of harbouring breast cancer or a high risk of breast cancer development, wherein the set of CpGs comprises at least the CpGs defined by SEQ ID NOs 1 to 8500 and identified at nucleotide positions 61 to 62, and wherein the sensitivity is at least 29% and specificity is at least 96%.
[0758] 259. An assay according to the invention, wherein the WID-BC-Index for the individual is about 0.587 or more, the individual is classified as having at least a high risk of harbouring breast cancer or a high risk of breast cancer development, wherein the set of CpGs comprises at least the CpGs defined by SEQ ID NOs 1 to 9000 and identified at nucleotide positions 61 to 62, and wherein the sensitivity is at least 29% and specificity is at least 96%.
[0759] 260. An assay according to the invention, wherein the WID-BC-Index for the individual is about 0.587 or more, the individual is classified as having at least a high risk of harbouring breast cancer or a high risk of breast cancer development, wherein the set of CpGs comprises at least the CpGs defined by SEQ ID NOs 1 to 9500 and identified at nucleotide positions 61 to 62, and wherein the sensitivity is at least 28% and specificity is at least 95%.
[0760] 261. An assay according to the invention, wherein the WID-BC-Index for the individual is about 0.587 or more, the individual is classified as having at least a high risk of harbouring breast cancer or a high risk of breast cancer development, wherein the set of CpGs comprises at least the CpGs defined by SEQ ID NOs 1 to 10000 and identified at nucleotide positions 61 to 62, and wherein the sensitivity is at least 29% and specificity is at least 95%.
[0761] 262. An assay according to the invention, wherein the WID-BC-Index for the individual is about 0.587 or more, the individual is classified as having at least a high risk of harbouring breast cancer or a high risk of breast cancer development, wherein the set of CpGs comprises at least the CpGs defined by SEQ ID NOs 1 to 11000 and identified at nucleotide positions 61 to 62, and wherein the sensitivity is at least 29% and specificity is at least 96%.
[0762] 263. An assay according to the invention, wherein the WID-BC-Index for the individual is about 0.587 or more, the individual is classified as having at least a high risk of harbouring breast cancer or a high risk of breast cancer development, wherein the set of CpGs comprises at least the CpGs defined by SEQ ID NOs 1 to 12000 and identified at nucleotide positions 61 to 62, and wherein the sensitivity is at least 28% and specificity is at least 96%.
[0763] 264. An assay according to the invention, wherein the WID-BC-Index for the individual is about 0.587 or more, the individual is classified as having at least a high risk of harbouring breast cancer or a high risk of breast cancer development, wherein the set of CpGs comprises at least the CpGs defined by SEQ ID NOs 1 to 13000 and identified at nucleotide positions 61 to 62, and wherein the sensitivity is at least 28% and specificity is at least 96%.
[0764] 265. An assay according to the invention, wherein the WID-BC-Index for the individual is about 0.587 or more, the individual is classified as having at least a high risk of harbouring breast cancer or a high risk of breast cancer development, wherein the set of CpGs comprises at least the CpGs defined by SEQ ID NOs 1 to 14000 and identified at nucleotide positions 61 to 62, and wherein the sensitivity is at least 27% and specificity is at least 96%.
[0765] 266. An assay according to the invention, wherein the WID-BC-Index for the individual is about 0.587 or more, the individual is classified as having at least a high risk of harbouring breast cancer or a high risk of breast cancer development, wherein the set of CpGs comprises at least the CpGs defined by SEQ ID NOs 1 to 15000 and identified at nucleotide positions 61 to 62, and wherein the sensitivity is at least 28% and specificity is at least 96%.
[0766] 267. An assay according to the invention, wherein the WID-BC-Index for the individual is about 0.587 or more, the individual is classified as having at least a high risk of harbouring breast cancer or a high risk of breast cancer development, wherein the set of CpGs comprises at least the CpGs defined by SEQ ID NOs 1 to 16000 and identified at nucleotide positions 61 to 62, and wherein the sensitivity is at least 27% and specificity is at least 96%.
[0767] 268. An assay according to the invention, wherein the WID-BC-Index for the individual is about 0.587 or more, the individual is classified as having at least a high risk of harbouring breast cancer or a high risk of breast cancer development, wherein the set of CpGs comprises at least the CpGs defined by SEQ ID NOs 1 to 17000 and identified at nucleotide positions 61 to 62, and wherein the sensitivity is at least 32% and specificity is at least 96%.
[0768] 269. An assay according to the invention, wherein the WID-BC-Index for the individual is about 0.587 or more, the individual is classified as having at least a high risk of harbouring breast cancer or a high risk of breast cancer development, wherein the set of CpGs comprises at least the CpGs defined by SEQ ID NOs 1 to 18000 and identified at nucleotide positions 61 to 62, and wherein the sensitivity is at least 33% and specificity is at least 96%.
[0769] 270. An assay according to the invention, wherein the WID-BC-Index for the individual is about 0.587 or more, the individual is classified as having at least a high risk of harbouring breast cancer or a high risk of breast cancer development, wherein the set of CpGs comprises at least the CpGs defined by SEQ ID NOs 1 to 19000 and identified at nucleotide positions 61 to 62, and wherein the sensitivity is at least 34% and specificity is at least 96%.
[0770] 271. An assay according to the invention, wherein the WID-BC-Index for the individual is about 0.587 or more, the individual is classified as having at least a high risk of harbouring breast cancer or a high risk of breast cancer development, wherein the set of CpGs comprises at least the CpGs defined by SEQ ID NOs 1 to 20000 and identified at nucleotide positions 61 to 62, and wherein the sensitivity is at least 34% and specificity is at least 96%.
[0771] 272. An assay according to the invention, wherein the WID-BC-Index for the individual is about 0.587 or more, the individual is classified as having at least a high risk of harbouring breast cancer or a high risk of breast cancer development, wherein the set of CpGs comprises at least the CpGs defined by SEQ ID NOs 1 to 22000 and identified at nucleotide positions 61 to 62, and wherein the sensitivity is at least 34% and specificity is at least 97%.
[0772] 273. An assay according to the invention, wherein the WID-BC-Index for the individual is about 0.587 or more, the individual is classified as having at least a high risk of harbouring breast cancer or a high risk of breast cancer development, wherein the set of CpGs comprises at least the CpGs defined by SEQ ID NOs 1 to 24000 and identified at nucleotide positions 61 to 62, and wherein the sensitivity is at least 33% and specificity is at least 97%.
[0773] 274. An assay according to the invention, wherein the WID-BC-Index for the individual is about 0.587 or more, the individual is classified as having at least a high risk of harbouring breast cancer or a high risk of breast cancer development, wherein the set of CpGs comprises at least the CpGs defined by SEQ ID NOs 1 to 26000 and identified at nucleotide positions 61 to 62, and wherein the sensitivity is at least 34% and specificity is at least 97%.
[0774] 275. An assay according to the invention, wherein the WID-BC-Index for the individual is about 0.587 or more, the individual is classified as having at least a high risk of harbouring breast cancer or a high risk of breast cancer development, wherein the set of CpGs comprises at least the CpGs defined by SEQ ID NOs 1 to 28000 and identified at nucleotide positions 61 to 62, and wherein the sensitivity is at least 34% and specificity is at least 97%.
[0775] 276. An assay according to the invention, wherein the WID-BC-Index for the individual is about 0.587 or more, the individual is classified as having at least a high risk of harbouring breast cancer or a high risk of breast cancer development, wherein the set of CpGs comprises at least the CpGs defined by SEQ ID NOs 1 to 30000 and identified at nucleotide positions 61 to 62, and wherein the sensitivity is at least 33% and specificity is at least 97%.
[0776] 277. An assay according to the invention, wherein the WID-BC-Index for the individual is about 0.587 or more, the individual is classified as having at least a high risk of harbouring breast cancer or a high risk of breast cancer development, wherein the set of CpGs comprises at least the CpGs defined by SEQ ID NOs 1 to 32000 and identified at nucleotide positions 61 to 62, and wherein the sensitivity is at least 32% and specificity is at least 97%.
[0777] 278. An assay according to the invention, wherein the WID-BC-Index for the individual is about 0.587 or more, the individual is classified as having at least a high risk of harbouring breast cancer or a high risk of breast cancer development, wherein the set of CpGs comprises at least the CpGs defined by SEQ ID NOs 1 to 34000 and identified at nucleotide positions 61 to 62, and wherein the sensitivity is at least 33% and specificity is at least 97%.
[0778] 279. An assay according to the invention, wherein the WID-BC-Index for the individual is about 0.587 or more, the individual is classified as having at least a high risk of harbouring breast cancer or a high risk of breast cancer development, wherein the set of CpGs comprises at least the CpGs defined by SEQ ID NOs 1 to 36000 and identified at nucleotide positions 61 to 62, and wherein the sensitivity is at least 33% and specificity is at least 97%.
[0779] 280. An assay according to the invention, wherein the WID-BC-Index for the individual is about 0.587 or more, the individual is classified as having at least a high risk of harbouring breast cancer or a high risk of breast cancer development, wherein the set of CpGs comprises at least the CpGs defined by SEQ ID NOs 1 to 38000 and identified at nucleotide positions 61 to 62, and wherein the sensitivity is at least 33% and specificity is at least 97%.
[0780] 281. An assay according to the invention, wherein the WID-BC-Index for the individual is about 0.587 or more, the individual is classified as having at least a high risk of harbouring breast cancer or a high risk of breast cancer development, wherein the set of CpGs comprises at least the CpGs defined by SEQ ID NOs 1 to 40753 and identified at nucleotide positions 61 to 62, and wherein the sensitivity is at least 34% and specificity is at least 97%.
[0781] 282. An assay according to the invention, wherein the WID-BC-Index for the individual is about −0.235 or more, the individual is classified as having at least a low risk of harbouring breast cancer or a low risk of breast cancer development, wherein the set of CpGs comprises at least the CpGs defined by SEQ ID NOs 500 to 40753 and identified at nucleotide positions 61 to 62, and wherein the sensitivity is at least 94% and specificity is at least 51%.
[0782] 283. An assay according to the invention, wherein the WID-BC-Index for the individual is about −0.235 or more, the individual is classified as having at least a low risk of harbouring breast cancer or a low risk of breast cancer development, wherein the set of CpGs comprises at least the CpGs defined by SEQ ID NOs 1000 to 40753 and identified at nucleotide positions 61 to 62, and wherein the sensitivity is at least 92% and specificity is at least 51%.
[0783] 284. An assay according to the invention, wherein the WID-BC-Index for the individual is about −0.235 or more, the individual is classified as having at least a low risk of harbouring breast cancer or a low risk of breast cancer development, wherein the set of CpGs comprises at least the CpGs defined by SEQ ID NOs 1500 to 40753 and identified at nucleotide positions 61 to 62, and wherein the sensitivity is at least 91% and specificity is at least 53%.
[0784] 285. An assay according to the invention, wherein the WID-BC-Index for the individual is about −0.235 or more, the individual is classified as having at least a low risk of harbouring breast cancer or a low risk of breast cancer development, wherein the set of CpGs comprises at least the CpGs defined by SEQ ID NOs 2000 to 40753 and identified at nucleotide positions 61 to 62, and wherein the sensitivity is at least 91% and specificity is at least 53%.
[0785] 286. An assay according to the invention, wherein the WID-BC-Index for the individual is about −0.235 or more, the individual is classified as having at least a low risk of harbouring breast cancer or a low risk of breast cancer development, wherein the set of CpGs comprises at least the CpGs defined by SEQ ID NOs 2500 to 40753 and identified at nucleotide positions 61 to 62, and wherein the sensitivity is at least 91% and specificity is at least 54%.
[0786] 287. An assay according to the invention, wherein the WID-BC-Index for the individual is about −0.235 or more, the individual is classified as having at least a low risk of harbouring breast cancer or a low risk of breast cancer development, wherein the set of CpGs comprises at least the CpGs defined by SEQ ID NOs 3000 to 40753 and identified at nucleotide positions 61 to 62, and wherein the sensitivity is at least 91% and specificity is at least 54%.
[0787] 288. An assay according to the invention, wherein the WID-BC-Index for the individual is about −0.235 or more, the individual is classified as having at least a low risk of harbouring breast cancer or a low risk of breast cancer development, wherein the set of CpGs comprises at least the CpGs defined by SEQ ID NOs 3500 to 40753 and identified at nucleotide positions 61 to 62, and wherein the sensitivity is at least 87% and specificity is at least 56%.
[0788] 289. An assay according to the invention, wherein the WID-BC-Index for the individual is about −0.235 or more, the individual is classified as having at least a low risk of harbouring breast cancer or a low risk of breast cancer development, wherein the set of CpGs comprises at least the CpGs defined by SEQ ID NOs 4000 to 40753 and identified at nucleotide positions 61 to 62, and wherein the sensitivity is at least 86% and specificity is at least 56%.
[0789] 290. An assay according to the invention, wherein the WID-BC-Index for the individual is about −0.235 or more, the individual is classified as having at least a low risk of harbouring breast cancer or a low risk of breast cancer development, wherein the set of CpGs comprises at least the CpGs defined by SEQ ID NOs 4500 to 40753 and identified at nucleotide positions 61 to 62, and wherein the sensitivity is at least 86% and specificity is at least 57%.
[0790] 291. An assay according to the invention, wherein the WID-BC-Index for the individual is about −0.235 or more, the individual is classified as having at least a low risk of harbouring breast cancer or a low risk of breast cancer development, wherein the set of CpGs comprises at least the CpGs defined by SEQ ID NOs 5000 to 40753 and identified at nucleotide positions 61 to 62, and wherein the sensitivity is at least 86% and specificity is at least 56%.
[0791] 292. An assay according to the invention, wherein the WID-BC-Index for the individual is about −0.235 or more, the individual is classified as having at least a low risk of harbouring breast cancer or a low risk of breast cancer development, wherein the set of CpGs comprises at least the CpGs defined by SEQ ID NOs 5500 to 40753 and identified at nucleotide positions 61 to 62, and wherein the sensitivity is at least 80% and specificity is at least 57%.
[0792] 293. An assay according to the invention, wherein the WID-BC-Index for the individual is about −0.235 or more, the individual is classified as having at least a low risk of harbouring breast cancer or a low risk of breast cancer development, wherein the set of CpGs comprises at least the CpGs defined by SEQ ID NOs 6000 to 40753 and identified at nucleotide positions 61 to 62, and wherein the sensitivity is at least 78% and specificity is at least 57%.
[0793] 294. An assay according to the invention, wherein the WID-BC-Index for the individual is about −0.235 or more, the individual is classified as having at least a low risk of harbouring breast cancer or a low risk of breast cancer development, wherein the set of CpGs comprises at least the CpGs defined by SEQ ID NOs 6500 to 40753 and identified at nucleotide positions 61 to 62, and wherein the sensitivity is at least 78% and specificity is at least 57%.
[0794] 295. An assay according to the invention, wherein the WID-BC-Index for the individual is about −0.235 or more, the individual is classified as having at least a low risk of harbouring breast cancer or a low risk of breast cancer development, wherein the set of CpGs comprises at least the CpGs defined by SEQ ID NOs 7000 to 40753 and identified at nucleotide positions 61 to 62, and wherein the sensitivity is at least 78% and specificity is at least 57%.
[0795] 296. An assay according to the invention, wherein the WID-BC-Index for the individual is about −0.235 or more, the individual is classified as having at least a low risk of harbouring breast cancer or a low risk of breast cancer development, wherein the set of CpGs comprises at least the CpGs defined by SEQ ID NOs 7500 to 40753 and identified at nucleotide positions 61 to 62, and wherein the sensitivity is at least 77% and specificity is at least 57%.
[0796] 297. An assay according to the invention, wherein the WID-BC-Index for the individual is about −0.235 or more, the individual is classified as having at least a low risk of harbouring breast cancer or a low risk of breast cancer development, wherein the set of CpGs comprises at least the CpGs defined by SEQ ID NOs 8000 to 40753 and identified at nucleotide positions 61 to 62, and wherein the sensitivity is at least 77% and specificity is at least 56%.
[0797] 298. An assay according to the invention, wherein the WID-BC-Index for the individual is about −0.235 or more, the individual is classified as having at least a low risk of harbouring breast cancer or a low risk of breast cancer development, wherein the set of CpGs comprises at least the CpGs defined by SEQ ID NOs 8500 to 40753 and identified at nucleotide positions 61 to 62, and wherein the sensitivity is at least 78% and specificity is at least 56%.
[0798] 299. An assay according to the invention, wherein the WID-BC-Index for the individual is about −0.235 or more, the individual is classified as having at least a low risk of harbouring breast cancer or a low risk of breast cancer development, wherein the set of CpGs comprises at least the CpGs defined by SEQ ID NOs 9000 to 40753 and identified at nucleotide positions 61 to 62, and wherein the sensitivity is at least 75% and specificity is at least 56%.
[0799] 300. An assay according to the invention, wherein the WID-BC-Index for the individual is about −0.235 or more, the individual is classified as having at least a low risk of harbouring breast cancer or a low risk of breast cancer development, wherein the set of CpGs comprises at least the CpGs defined by SEQ ID NOs 9500 to 40753 and identified at nucleotide positions 61 to 62, and wherein the sensitivity is at least 75% and specificity is at least 57%.
[0800] 301. An assay according to the invention, wherein the WID-BC-Index for the individual is about −0.235 or more, the individual is classified as having at least a low risk of harbouring breast cancer or a low risk of breast cancer development, wherein the set of CpGs comprises at least the CpGs defined by SEQ ID NOs 10000 to 40753 and identified at nucleotide positions 61 to 62, and wherein the sensitivity is at least 76% and specificity is at least 57%.
[0801] 302. An assay according to the invention, wherein the WID-BC-Index for the individual is about −0.235 or more, the individual is classified as having at least a low risk of harbouring breast cancer or a low risk of breast cancer development, wherein the set of CpGs comprises at least the CpGs defined by SEQ ID NOs 11000 to 40753 and identified at nucleotide positions 61 to 62, and wherein the sensitivity is at least 76% and specificity is at least 57%.
[0802] 303. An assay according to the invention, wherein the WID-BC-Index for the individual is about −0.235 or more, the individual is classified as having at least a low risk of harbouring breast cancer or a low risk of breast cancer development, wherein the set of CpGs comprises at least the CpGs defined by SEQ ID NOs 12000 to 40753 and identified at nucleotide positions 61 to 62, and wherein the sensitivity is at least 76% and specificity is at least 59%.
[0803] 304. An assay according to the invention, wherein the WID-BC-Index for the individual is about −0.235 or more, the individual is classified as having at least a low risk of harbouring breast cancer or a low risk of breast cancer development, wherein the set of CpGs comprises at least the CpGs defined by SEQ ID NOs 13000 to 40753 and identified at nucleotide positions 61 to 62, and wherein the sensitivity is at least 75% and specificity is at least 59%.
[0804] 305. An assay according to the invention, wherein the WID-BC-Index for the individual is about −0.235 or more, the individual is classified as having at least a low risk of harbouring breast cancer or a low risk of breast cancer development, wherein the set of CpGs comprises at least the CpGs defined by SEQ ID NOs 14000 to 40753 and identified at nucleotide positions 61 to 62, and wherein the sensitivity is at least 68% and specificity is at least 59%.
[0805] 306. An assay according to the invention, wherein the WID-BC-Index for the individual is about −0.235 or more, the individual is classified as having at least a low risk of harbouring breast cancer or a low risk of breast cancer development, wherein the set of CpGs comprises at least the CpGs defined by SEQ ID NOs 15000 to 40753 and identified at nucleotide positions 61 to 62, and wherein the sensitivity is at least 69% and specificity is at least 58%.
[0806] 307. An assay according to the invention, wherein the WID-BC-Index for the individual is about −0.235 or more, the individual is classified as having at least a low risk of harbouring breast cancer or a low risk of breast cancer development, wherein the set of CpGs comprises at least the CpGs defined by SEQ ID NOs 16000 to 40753 and identified at nucleotide positions 61 to 62, and wherein the sensitivity is at least 65% and specificity is at least 60%.
[0807] 308. An assay according to the invention, wherein the WID-BC-Index for the individual is about −0.235 or more, the individual is classified as having at least a low risk of harbouring breast cancer or a low risk of breast cancer development, wherein the set of CpGs comprises at least the CpGs defined by SEQ ID NOs 17000 to 40753 and identified at nucleotide positions 61 to 62, and wherein the sensitivity is at least 65% and specificity is at least 60%.
[0808] 309. An assay according to the invention, wherein the WID-BC-Index for the individual is about −0.235 or more, the individual is classified as having at least a low risk of harbouring breast cancer or a low risk of breast cancer development, wherein the set of CpGs comprises at least the CpGs defined by SEQ ID NOs 18000 to 40753 and identified at nucleotide positions 61 to 62, and wherein the sensitivity is at least 64% and specificity is at least 61%.
[0809] 310. An assay according to the invention, wherein the WID-BC-Index for the individual is about −0.235 or more, the individual is classified as having at least a low risk of harbouring breast cancer or a low risk of breast cancer development, wherein the set of CpGs comprises at least the CpGs defined by SEQ ID NOs 19000 to 40753 and identified at nucleotide positions 61 to 62, and wherein the sensitivity is at least 63% and specificity is at least 61%.
[0810] 311. An assay according to the invention, wherein the WID-BC-Index for the individual is about −0.235 or more, the individual is classified as having at least a low risk of harbouring breast cancer or a low risk of breast cancer development, wherein the set of CpGs comprises at least the CpGs defined by SEQ ID NOs 20000 to 40753 and identified at nucleotide positions 61 to 62, and wherein the sensitivity is at least 63% and specificity is at least 6%.
[0811] 312. An assay according to the invention, wherein the WID-BC-Index for the individual is about −0.235 or more, the individual is classified as having at least a low risk of harbouring breast cancer or a low risk of breast cancer development, wherein the set of CpGs comprises at least the CpGs defined by SEQ ID NOs 22000 to 40753 and identified at nucleotide positions 61 to 62, and wherein the sensitivity is at least 65% and specificity is at least 61%.
[0812] 313. An assay according to the invention, wherein the WID-BC-Index for the individual is about −0.235 or more, the individual is classified as having at least a low risk of harbouring breast cancer or a low risk of breast cancer development, wherein the set of CpGs comprises at least the CpGs defined by SEQ ID NOs 24000 to 40753 and identified at nucleotide positions 61 to 62, and wherein the sensitivity is at least 67% and specificity is at least 61%.
[0813] 314. An assay according to the invention, wherein the WID-BC-Index for the individual is about −0.235 or more, the individual is classified as having at least a low risk of harbouring breast cancer or a low risk of breast cancer development, wherein the set of CpGs comprises at least the CpGs defined by SEQ ID NOs 26000 to 40753 and identified at nucleotide positions 61 to 62, and wherein the sensitivity is at least 67% and specificity is at least 58%.
[0814] 315. An assay according to the invention, wherein the WID-BC-Index for the individual is about −0.235 or more, the individual is classified as having at least a low risk of harbouring breast cancer or a low risk of breast cancer development, wherein the set of CpGs comprises at least the CpGs defined by SEQ ID NOs 28000 to 40753 and identified at nucleotide positions 61 to 62, and wherein the sensitivity is at least 63% and specificity is at least 60%.
[0815] 316. An assay according to the invention, wherein the WID-BC-Index for the individual is about −0.235 or more, the individual is classified as having at least a low risk of harbouring breast cancer or a low risk of breast cancer development, wherein the set of CpGs comprises at least the CpGs defined by SEQ ID NOs 30000 to 40753 and identified at nucleotide positions 61 to 62, and wherein the sensitivity is at least 63% and specificity is at least 60%.
[0816] 317. An assay according to the invention, wherein the WID-BC-Index for the individual is about −0.235 or more, the individual is classified as having at least a low risk of harbouring breast cancer or a low risk of breast cancer development, wherein the set of CpGs comprises at least the CpGs defined by SEQ ID NOs 32000 to 40753 and identified at nucleotide positions 61 to 62, and wherein the sensitivity is at least 61% and specificity is at least 59%.
[0817] 318. An assay according to the invention, wherein the WID-BC-Index for the individual is about −0.235 or more, the individual is classified as having at least a low risk of harbouring breast cancer or a low risk of breast cancer development, wherein the set of CpGs comprises at least the CpGs defined by SEQ ID NOs 34000 to 40753 and identified at nucleotide positions 61 to 62, and wherein the sensitivity is at least 63% and specificity is at least 59%.
[0818] 319. An assay according to the invention, wherein the WID-BC-Index for the individual is about −0.235 or more, the individual is classified as having at least a low risk of harbouring breast cancer or a low risk of breast cancer development, wherein the set of CpGs comprises at least the CpGs defined by SEQ ID NOs 36000 to 40753 and identified at nucleotide positions 61 to 62, and wherein the sensitivity is at least 60% and specificity is at least 60%.
[0819] 320. An assay according to the invention, wherein the WID-BC-Index for the individual is about −0.235 or more, the individual is classified as having at least a low risk of harbouring breast cancer or a low risk of breast cancer development, wherein the set of CpGs comprises at least the CpGs defined by SEQ ID NOs 38000 to 40753 and identified at nucleotide positions 61 to 62, and wherein the sensitivity is at least 61% and specificity is at least 58%.
[0820] 321. An assay according to the invention, wherein the WID-BC-Index for the individual is about 0.090 or more, the individual is classified as having at least a moderate risk of harbouring breast cancer or a moderate risk of breast cancer development, wherein the set of CpGs comprises at least the CpGs defined by SEQ ID NOs 500 to 40753 and identified at nucleotide positions 61 to 62, and wherein the sensitivity is at least 77% and specificity is at least 79%.
[0821] 322. An assay according to the invention, wherein the WID-BC-Index for the individual is about 0.090 or more, the individual is classified as having at least a moderate risk of harbouring breast cancer or a moderate risk of breast cancer development, wherein the set of CpGs comprises at least the CpGs defined by SEQ ID NOs 1000 to 40753 and identified at nucleotide positions 61 to 62, and wherein the sensitivity is at least 79% and specificity is at least 78%.
[0822] 323. An assay according to the invention, wherein the WID-BC-Index for the individual is about 0.090 or more, the individual is classified as having at least a moderate risk of harbouring breast cancer or a moderate risk of breast cancer development, wherein the set of CpGs comprises at least the CpGs defined by SEQ ID NOs 1500 to 40753 and identified at nucleotide positions 61 to 62, and wherein the sensitivity is at least 73% and specificity is at least 74%.
[0823] 324. An assay according to the invention, wherein the WID-BC-Index for the individual is about 0.090 or more, the individual is classified as having at least a moderate risk of harbouring breast cancer or a moderate risk of breast cancer development, wherein the set of CpGs comprises at least the CpGs defined by SEQ ID NOs 2000 to 40753 and identified at nucleotide positions 61 to 62, and wherein the sensitivity is at least 75% and specificity is at least 74%.
[0824] 325. An assay according to the invention, wherein the WID-BC-Index for the individual is about 0.090 or more, the individual is classified as having at least a moderate risk of harbouring breast cancer or a moderate risk of breast cancer development, wherein the set of CpGs comprises at least the CpGs defined by SEQ ID NOs 2500 to 40753 and identified at nucleotide positions 61 to 62, and wherein the sensitivity is at least 72% and specificity is at least 74%.
[0825] 326. An assay according to the invention, wherein the WID-BC-Index for the individual is about 0.090 or more, the individual is classified as having at least a moderate risk of harbouring breast cancer or a moderate risk of breast cancer development, wherein the set of CpGs comprises at least the CpGs defined by SEQ ID NOs 3000 to 40753 and identified at nucleotide positions 61 to 62, and wherein the sensitivity is at least 72% and specificity is at least 74%.
[0826] 327. An assay according to the invention, wherein the WID-BC-Index for the individual is about 0.090 or more, the individual is classified as having at least a moderate risk of harbouring breast cancer or a moderate risk of breast cancer development, wherein the set of CpGs comprises at least the CpGs defined by SEQ ID NOs 3500 to 40753 and identified at nucleotide positions 61 to 62, and wherein the sensitivity is at least 73% and specificity is at least 74%.
[0827] 328. An assay according to the invention, wherein the WID-BC-Index for the individual is about 0.090 or more, the individual is classified as having at least a moderate risk of harbouring breast cancer or a moderate risk of breast cancer development, wherein the set of CpGs comprises at least the CpGs defined by SEQ ID NOs 4000 to 40753 and identified at nucleotide positions 61 to 62, and wherein the sensitivity is at least 69% and specificity is at least 74%.
[0828] 329. An assay according to the invention, wherein the WID-BC-Index for the individual is about 0.090 or more, the individual is classified as having at least a moderate risk of harbouring breast cancer or a moderate risk of breast cancer development, wherein the set of CpGs comprises at least the CpGs defined by SEQ ID NOs 4500 to 40753 and identified at nucleotide positions 61 to 62, and wherein the sensitivity is at least 71% and specificity is at least 74%.
[0829] 330. An assay according to the invention, wherein the WID-BC-Index for the individual is about 0.090 or more, the individual is classified as having at least a moderate risk of harbouring breast cancer or a moderate risk of breast cancer development, wherein the set of CpGs comprises at least the CpGs defined by SEQ ID NOs 5000 to 40753 and identified at nucleotide positions 61 to 62, and wherein the sensitivity is at least 69% and specificity is at least 74%.
[0830] 331. An assay according to the invention, wherein the WID-BC-Index for the individual is about 0.090 or more, the individual is classified as having at least a moderate risk of harbouring breast cancer or a moderate risk of breast cancer development, wherein the set of CpGs comprises at least the CpGs defined by SEQ ID NOs 5500 to 40753 and identified at nucleotide positions 61 to 62, and wherein the sensitivity is at least 66% and specificity is at least 74%.
[0831] 332. An assay according to the invention, wherein the WID-BC-Index for the individual is about 0.090 or more, the individual is classified as having at least a moderate risk of harbouring breast cancer or a moderate risk of breast cancer development, wherein the set of CpGs comprises at least the CpGs defined by SEQ ID NOs 6000 to 40753 and identified at nucleotide positions 61 to 62, and wherein the sensitivity is at least 61% and specificity is at least 75%.
[0832] 333. An assay according to the invention, wherein the WID-BC-Index for the individual is about 0.090 or more, the individual is classified as having at least a moderate risk of harbouring breast cancer or a moderate risk of breast cancer development, wherein the set of CpGs comprises at least the CpGs defined by SEQ ID NOs 6500 to 40753 and identified at nucleotide positions 61 to 62, and wherein the sensitivity is at least 61% and specificity is at least 75%.
[0833] 334. An assay according to the invention, wherein the WID-BC-Index for the individual is about 0.090 or more, the individual is classified as having at least a moderate risk of harbouring breast cancer or a moderate risk of breast cancer development, wherein the set of CpGs comprises at least the CpGs defined by SEQ ID NOs 7000 to 40753 and identified at nucleotide positions 61 to 62, and wherein the sensitivity is at least 60% and specificity is at least 75%.
[0834] 335. An assay according to the invention, wherein the WID-BC-Index for the individual is about 0.090 or more, the individual is classified as having at least a moderate risk of harbouring breast cancer or a moderate risk of breast cancer development, wherein the set of CpGs comprises at least the CpGs defined by SEQ ID NOs 7500 to 40753 and identified at nucleotide positions 61 to 62, and wherein the sensitivity is at least 61% and specificity is at least 74%.
[0835] 336. An assay according to the invention, wherein the WID-BC-Index for the individual is about 0.090 or more, the individual is classified as having at least a moderate risk of harbouring breast cancer or a moderate risk of breast cancer development, wherein the set of CpGs comprises at least the CpGs defined by SEQ ID NOs 8000 to 40753 and identified at nucleotide positions 61 to 62, and wherein the sensitivity is at least 59% and specificity is at least 74%.
[0836] 337. An assay according to the invention, wherein the WID-BC-Index for the individual is about 0.090 or more, the individual is classified as having at least a moderate risk of harbouring breast cancer or a moderate risk of breast cancer development, wherein the set of CpGs comprises at least the CpGs defined by SEQ ID NOs 8500 to 40753 and identified at nucleotide positions 61 to 62, and wherein the sensitivity is at least 60% and specificity is at least 74%.
[0837] 338. An assay according to the invention, wherein the WID-BC-Index for the individual is about 0.090 or more, the individual is classified as having at least a moderate risk of harbouring breast cancer or a moderate risk of breast cancer development, wherein the set of CpGs comprises at least the CpGs defined by SEQ ID NOs 9000 to 40753 and identified at nucleotide positions 61 to 62, and wherein the sensitivity is at least 58% and specificity is at least 75%.
[0838] 339. An assay according to the invention, wherein the WID-BC-Index for the individual is about 0.090 or more, the individual is classified as having at least a moderate risk of harbouring breast cancer or a moderate risk of breast cancer development, wherein the set of CpGs comprises at least the CpGs defined by SEQ ID NOs 9500 to 40753 and identified at nucleotide positions 61 to 62, and wherein the sensitivity is at least 58% and specificity is at least 75%.
[0839] 340. An assay according to the invention, wherein the WID-BC-Index for the individual is about 0.090 or more, the individual is classified as having at least a moderate risk of harbouring breast cancer or a moderate risk of breast cancer development, wherein the set of CpGs comprises at least the CpGs defined by SEQ ID NOs 10000 to 40753 and identified at nucleotide positions 61 to 62, and wherein the sensitivity is at least 58% and specificity is at least 74%.
[0840] 341. An assay according to the invention, wherein the WID-BC-Index for the individual is about 0.090 or more, the individual is classified as having at least a moderate risk of harbouring breast cancer or a moderate risk of breast cancer development, wherein the set of CpGs comprises at least the CpGs defined by SEQ ID NOs 11000 to 40753 and identified at nucleotide positions 61 to 62, and wherein the sensitivity is at least 58% and specificity is at least 75%.
[0841] 342. An assay according to the invention, wherein the WID-BC-Index for the individual is about 0.090 or more, the individual is classified as having at least a moderate risk of harbouring breast cancer or a moderate risk of breast cancer development, wherein the set of CpGs comprises at least the CpGs defined by SEQ ID NOs 12000 to 40753 and identified at nucleotide positions 61 to 62, and wherein the sensitivity is at least 59% and specificity is at least 75%.
[0842] 343. An assay according to the invention, wherein the WID-BC-Index for the individual is about 0.090 or more, the individual is classified as having at least a moderate risk of harbouring breast cancer or a moderate risk of breast cancer development, wherein the set of CpGs comprises at least the CpGs defined by SEQ ID NOs 13000 to 40753 and identified at nucleotide positions 61 to 62, and wherein the sensitivity is at least 59% and specificity is at least 74%.
[0843] 344. An assay according to the invention, wherein the WID-BC-Index for the individual is about 0.090 or more, the individual is classified as having at least a moderate risk of harbouring breast cancer or a moderate risk of breast cancer development, wherein the set of CpGs comprises at least the CpGs defined by SEQ ID NOs 14000 to 40753 and identified at nucleotide positions 61 to 62, and wherein the sensitivity is at least 53% and specificity is at least 75%.
[0844] 345. An assay according to the invention, wherein the WID-BC-Index for the individual is about 0.090 or more, the individual is classified as having at least a moderate risk of harbouring breast cancer or a moderate risk of breast cancer development, wherein the set of CpGs comprises at least the CpGs defined by SEQ ID NOs 15000 to 40753 and identified at nucleotide positions 61 to 62, and wherein the sensitivity is at least 54% and specificity is at least 74%.
[0845] 346. An assay according to the invention, wherein the WID-BC-Index for the individual is about 0.090 or more, the individual is classified as having at least a moderate risk of harbouring breast cancer or a moderate risk of breast cancer development, wherein the set of CpGs comprises at least the CpGs defined by SEQ ID NOs 16000 to 40753 and identified at nucleotide positions 61 to 62, and wherein the sensitivity is at least 53% and specificity is at least 75%.
[0846] 347. An assay according to the invention, wherein the WID-BC-Index for the individual is about 0.090 or more, the individual is classified as having at least a moderate risk of harbouring breast cancer or a moderate risk of breast cancer development, wherein the set of CpGs comprises at least the CpGs defined by SEQ ID NOs 17000 to 40753 and identified at nucleotide positions 61 to 62, and wherein the sensitivity is at least 47% and specificity is at least 75%.
[0847] 348. An assay according to the invention, wherein the WID-BC-Index for the individual is about 0.090 or more, the individual is classified as having at least a moderate risk of harbouring breast cancer or a moderate risk of breast cancer development, wherein the set of CpGs comprises at least the CpGs defined by SEQ ID NOs 18000 to 40753 and identified at nucleotide positions 61 to 62, and wherein the sensitivity is at least 47% and specificity is at least 75%.
[0848] 349. An assay according to the invention, wherein the WID-BC-Index for the individual is about 0.090 or more, the individual is classified as having at least a moderate risk of harbouring breast cancer or a moderate risk of breast cancer development, wherein the set of CpGs comprises at least the CpGs defined by SEQ ID NOs 19000 to 40753 and identified at nucleotide positions 61 to 62, and wherein the sensitivity is at least 43% and specificity is at least 75%.
[0849] 350. An assay according to the invention, wherein the WID-BC-Index for the individual is about 0.090 or more, the individual is classified as having at least a moderate risk of harbouring breast cancer or a moderate risk of breast cancer development, wherein the set of CpGs comprises at least the CpGs defined by SEQ ID NOs 20000 to 40753 and identified at nucleotide positions 61 to 62, and wherein the sensitivity is at least 43% and specificity is at least 76%.
[0850] 351. An assay according to the invention, wherein the WID-BC-Index for the individual is about 0.090 or more, the individual is classified as having at least a moderate risk of harbouring breast cancer or a moderate risk of breast cancer development, wherein the set of CpGs comprises at least the CpGs defined by SEQ ID NOs 22000 to 40753 and identified at nucleotide positions 61 to 62, and wherein the sensitivity is at least 49% and specificity is at least 74%.
[0851] 352. An assay according to the invention, wherein the WID-BC-Index for the individual is about 0.090 or more, the individual is classified as having at least a moderate risk of harbouring breast cancer or a moderate risk of breast cancer development, wherein the set of CpGs comprises at least the CpGs defined by SEQ ID NOs 24000 to 40753 and identified at nucleotide positions 61 to 62, and wherein the sensitivity is at least 51% and specificity is at least 75%.
[0852] 353. An assay according to the invention, wherein the WID-BC-Index for the individual is about 0.090 or more, the individual is classified as having at least a moderate risk of harbouring breast cancer or a moderate risk of breast cancer development, wherein the set of CpGs comprises at least the CpGs defined by SEQ ID NOs 26000 to 40753 and identified at nucleotide positions 61 to 62, and wherein the sensitivity is at least 51% and specificity is at least 75%.
[0853] 354. An assay according to the invention, wherein the WID-BC-Index for the individual is about 0.090 or more, the individual is classified as having at least a moderate risk of harbouring breast cancer or a moderate risk of breast cancer development, wherein the set of CpGs comprises at least the CpGs defined by SEQ ID NOs 28000 to 40753 and identified at nucleotide positions 61 to 62, and wherein the sensitivity is at least 43% and specificity is at least 76%.
[0854] 355. An assay according to the invention, wherein the WID-BC-Index for the individual is about 0.090 or more, the individual is classified as having at least a moderate risk of harbouring breast cancer or a moderate risk of breast cancer development, wherein the set of CpGs comprises at least the CpGs defined by SEQ ID NOs 30000 to 40753 and identified at nucleotide positions 61 to 62, and wherein the sensitivity is at least 39% and specificity is at least 76%.
[0855] 356. An assay according to the invention, wherein the WID-BC-Index for the individual is about 0.090 or more, the individual is classified as having at least a moderate risk of harbouring breast cancer or a moderate risk of breast cancer development, wherein the set of CpGs comprises at least the CpGs defined by SEQ ID NOs 32000 to 40753 and identified at nucleotide positions 61 to 62, and wherein the sensitivity is at least 38% and specificity is at least 76%.
[0856] 357. An assay according to the invention, wherein the WID-BC-Index for the individual is about 0.090 or more, the individual is classified as having at least a moderate risk of harbouring breast cancer or a moderate risk of breast cancer development, wherein the set of CpGs comprises at least the CpGs defined by SEQ ID NOs 34000 to 40753 and identified at nucleotide positions 61 to 62, and wherein the sensitivity is at least 37% and specificity is at least 76%.
[0857] 358. An assay according to the invention, wherein the WID-BC-Index for the individual is about 0.090 or more, the individual is classified as having at least a moderate risk of harbouring breast cancer or a moderate risk of breast cancer development, wherein the set of CpGs comprises at least the CpGs defined by SEQ ID NOs 36000 to 40753 and identified at nucleotide positions 61 to 62, and wherein the sensitivity is at least 37% and specificity is at least 77%.
[0858] 359. An assay according to the invention, wherein the WID-BC-Index for the individual is about 0.090 or more, the individual is classified as having at least a moderate risk of harbouring breast cancer or a moderate risk of breast cancer development, wherein the set of CpGs comprises at least the CpGs defined by SEQ ID NOs 38000 to 40753 and identified at nucleotide positions 61 to 62, and wherein the sensitivity is at least 35% and specificity is at least 76%.
[0859] 360. An assay according to the invention, wherein the WID-BC-Index for the individual is about 0.587 or more, the individual is classified as having at least a high risk of harbouring breast cancer or a high risk of breast cancer development, wherein the set of CpGs comprises at least the CpGs defined by SEQ ID NOs 500 to 40753 and identified at nucleotide positions 61 to 62, and wherein the sensitivity is at least 35% and specificity is at least 97%.
[0860] 361. An assay according to the invention, wherein the WID-BC-Index for the individual is about 0.587 or more, the individual is classified as having at least a high risk of harbouring breast cancer or a high risk of breast cancer development, wherein the set of CpGs comprises at least the CpGs defined by SEQ ID NOs 1000 to 40753 and identified at nucleotide positions 61 to 62, and wherein the sensitivity is at least 34% and specificity is at least 96%.
[0861] 362. An assay according to the invention, wherein the WID-BC-Index for the individual is about 0.587 or more, the individual is classified as having at least a high risk of harbouring breast cancer or a high risk of breast cancer development, wherein the set of CpGs comprises at least the CpGs defined by SEQ ID NOs 1500 to 40753 and identified at nucleotide positions 61 to 62, and wherein the sensitivity is at least 38% and specificity is at least 94%.
[0862] 363. An assay according to the invention, wherein the WID-BC-Index for the individual is about 0.587 or more, the individual is classified as having at least a high risk of harbouring breast cancer or a high risk of breast cancer development, wherein the set of CpGs comprises at least the CpGs defined by SEQ ID NOs 2000 to 40753 and identified at nucleotide positions 61 to 62, and wherein the sensitivity is at least 39% and specificity is at least 94%.
[0863] 364. An assay according to the invention, wherein the WID-BC-Index for the individual is about 0.587 or more, the individual is classified as having at least a high risk of harbouring breast cancer or a high risk of breast cancer development, wherein the set of CpGs comprises at least the CpGs defined by SEQ ID NOs 2500 to 40753 and identified at nucleotide positions 61 to 62, and wherein the sensitivity is at least 41% and specificity is at least 92%.
[0864] 365. An assay according to the invention, wherein the WID-BC-Index for the individual is about 0.587 or more, the individual is classified as having at least a high risk of harbouring breast cancer or a high risk of breast cancer development, wherein the set of CpGs comprises at least the CpGs defined by SEQ ID NOs 3000 to 40753 and identified at nucleotide positions 61 to 62, and wherein the sensitivity is at least 40% and specificity is at least 90%.
[0865] 366. An assay according to the invention, wherein the WID-BC-Index for the individual is about 0.587 or more, the individual is classified as having at least a high risk of harbouring breast cancer or a high risk of breast cancer development, wherein the set of CpGs comprises at least the CpGs defined by SEQ ID NOs 3500 to 40753 and identified at nucleotide positions 61 to 62, and wherein the sensitivity is at least 42% and specificity is at least 90%.
[0866] 367. An assay according to the invention, wherein the WID-BC-Index for the individual is about 0.587 or more, the individual is classified as having at least a high risk of harbouring breast cancer or a high risk of breast cancer development, wherein the set of CpGs comprises at least the CpGs defined by SEQ ID NOs 4000 to 40753 and identified at nucleotide positions 61 to 62, and wherein the sensitivity is at least 41% and specificity is at least 90%.
[0867] 368. An assay according to the invention, wherein the WID-BC-Index for the individual is about 0.587 or more, the individual is classified as having at least a high risk of harbouring breast cancer or a high risk of breast cancer development, wherein the set of CpGs comprises at least the CpGs defined by SEQ ID NOs 4500 to 40753 and identified at nucleotide positions 61 to 62, and wherein the sensitivity is at least 42% and specificity is at least 90%.
[0868] 369. An assay according to the invention, wherein the WID-BC-Index for the individual is about 0.587 or more, the individual is classified as having at least a high risk of harbouring breast cancer or a high risk of breast cancer development, wherein the set of CpGs comprises at least the CpGs defined by SEQ ID NOs 5000 to 40753 and identified at nucleotide positions 61 to 62, and wherein the sensitivity is at least 42% and specificity is at least 89%.
[0869] 370. An assay according to the invention, wherein the WID-BC-Index for the individual is about 0.587 or more, the individual is classified as having at least a high risk of harbouring breast cancer or a high risk of breast cancer development, wherein the set of CpGs comprises at least the CpGs defined by SEQ ID NOs 5500 to 40753 and identified at nucleotide positions 61 to 62, and wherein the sensitivity is at least 36% and specificity is at least 89%.
[0870] 371. An assay according to the invention, wherein the WID-BC-Index for the individual is about 0.587 or more, the individual is classified as having at least a high risk of harbouring breast cancer or a high risk of breast cancer development, wherein the set of CpGs comprises at least the CpGs defined by SEQ ID NOs 6000 to 40753 and identified at nucleotide positions 61 to 62, and wherein the sensitivity is at least 33% and specificity is at least 89%.
[0871] 372. An assay according to the invention, wherein the WID-BC-Index for the individual is about 0.587 or more, the individual is classified as having at least a high risk of harbouring breast cancer or a high risk of breast cancer development, wherein the set of CpGs comprises at least the CpGs defined by SEQ ID NOs 6500 to 40753 and identified at nucleotide positions 61 to 62, and wherein the sensitivity is at least 32% and specificity is at least 89%.
[0872] 373. An assay according to the invention, wherein the WID-BC-Index for the individual is about 0.587 or more, the individual is classified as having at least a high risk of harbouring breast cancer or a high risk of breast cancer development, wherein the set of CpGs comprises at least the CpGs defined by SEQ ID NOs 7000 to 40753 and identified at nucleotide positions 61 to 62, and wherein the sensitivity is at least 32% and specificity is at least 89%.
[0873] 374. An assay according to the invention, wherein the WID-BC-Index for the individual is about 0.587 or more, the individual is classified as having at least a high risk of harbouring breast cancer or a high risk of breast cancer development, wherein the set of CpGs comprises at least the CpGs defined by SEQ ID NOs 7500 to 40753 and identified at nucleotide positions 61 to 62, and wherein the sensitivity is at least 33% and specificity is at least 88%.
[0874] 375. An assay according to the invention, wherein the WID-BC-Index for the individual is about 0.587 or more, the individual is classified as having at least a high risk of harbouring breast cancer or a high risk of breast cancer development, wherein the set of CpGs comprises at least the CpGs defined by SEQ ID NOs 8000 to 40753 and identified at nucleotide positions 61 to 62, and wherein the sensitivity is at least 32% and specificity is at least 88%.
[0875] 376. An assay according to the invention, wherein the WID-BC-Index for the individual is about 0.587 or more, the individual is classified as having at least a high risk of harbouring breast cancer or a high risk of breast cancer development, wherein the set of CpGs comprises at least the CpGs defined by SEQ ID NOs 8500 to 40753 and identified at nucleotide positions 61 to 62, and wherein the sensitivity is at least 32% and specificity is at least 86%.
[0876] 377. An assay according to the invention, wherein the WID-BC-Index for the individual is about 0.587 or more, the individual is classified as having at least a high risk of harbouring breast cancer or a high risk of breast cancer development, wherein the set of CpGs comprises at least the CpGs defined by SEQ ID NOs 9000 to 40753 and identified at nucleotide positions 61 to 62, and wherein the sensitivity is at least 31% and specificity is at least 87%.
[0877] 378. An assay according to the invention, wherein the WID-BC-Index for the individual is about 0.587 or more, the individual is classified as having at least a high risk of harbouring breast cancer or a high risk of breast cancer development, wherein the set of CpGs comprises at least the CpGs defined by SEQ ID NOs 9500 to 40753 and identified at nucleotide positions 61 to 62, and wherein the sensitivity is at least 31% and specificity is at least 87%.
[0878] 379. An assay according to the invention, wherein the WID-BC-Index for the individual is about 0.587 or more, the individual is classified as having at least a high risk of harbouring breast cancer or a high risk of breast cancer development, wherein the set of CpGs comprises at least the CpGs defined by SEQ ID NOs 10000 to 40753 and identified at nucleotide positions 61 to 62, and wherein the sensitivity is at least 29% and specificity is at least 86%.
[0879] 380. An assay according to the invention, wherein the WID-BC-Index for the individual is about 0.587 or more, the individual is classified as having at least a high risk of harbouring breast cancer or a high risk of breast cancer development, wherein the set of CpGs comprises at least the CpGs defined by SEQ ID NOs 11000 to 40753 and identified at nucleotide positions 61 to 62, and wherein the sensitivity is at least 29% and specificity is at least 86%.
[0880] 381. An assay according to the invention, wherein the WID-BC-Index for the individual is about 0.587 or more, the individual is classified as having at least a high risk of harbouring breast cancer or a high risk of breast cancer development, wherein the set of CpGs comprises at least the CpGs defined by SEQ ID NOs 12000 to 40753 and identified at nucleotide positions 61 to 62, and wherein the sensitivity is at least 28% and specificity is at least 86%.
[0881] 382. An assay according to the invention, wherein the WID-BC-Index for the individual is about 0.587 or more, the individual is classified as having at least a high risk of harbouring breast cancer or a high risk of breast cancer development, wherein the set of CpGs comprises at least the CpGs defined by SEQ ID NOs 13000 to 40753 and identified at nucleotide positions 61 to 62, and wherein the sensitivity is at least 29% and specificity is at least 86%.
[0882] 383. An assay according to the invention, wherein the WID-BC-Index for the individual is about 0.587 or more, the individual is classified as having at least a high risk of harbouring breast cancer or a high risk of breast cancer development, wherein the set of CpGs comprises at least the CpGs defined by SEQ ID NOs 14000 to 40753 and identified at nucleotide positions 61 to 62, and wherein the sensitivity is at least 27% and specificity is at least 87%.
[0883] 384. An assay according to the invention, wherein the WID-BC-Index for the individual is about 0.587 or more, the individual is classified as having at least a high risk of harbouring breast cancer or a high risk of breast cancer development, wherein the set of CpGs comprises at least the CpGs defined by SEQ ID NOs 15000 to 40753 and identified at nucleotide positions 61 to 62, and wherein the sensitivity is at least 28% and specificity is at least 87%.
[0884] 385. An assay according to the invention, wherein the WID-BC-Index for the individual is about 0.587 or more, the individual is classified as having at least a high risk of harbouring breast cancer or a high risk of breast cancer development, wherein the set of CpGs comprises at least the CpGs defined by SEQ ID NOs 16000 to 40753 and identified at nucleotide positions 61 to 62, and wherein the sensitivity is at least 26% and specificity is at least 87%.
[0885] 386. An assay according to the invention, wherein the WID-BC-Index for the individual is about 0.587 or more, the individual is classified as having at least a high risk of harbouring breast cancer or a high risk of breast cancer development, wherein the set of CpGs comprises at least the CpGs defined by SEQ ID NOs 17000 to 40753 and identified at nucleotide positions 61 to 62, and wherein the sensitivity is at least 26% and specificity is at least 87%.
[0886] 387. An assay according to the invention, wherein the WID-BC-Index for the individual is about 0.587 or more, the individual is classified as having at least a high risk of harbouring breast cancer or a high risk of breast cancer development, wherein the set of CpGs comprises at least the CpGs defined by SEQ ID NOs 18000 to 40753 and identified at nucleotide positions 61 to 62, and wherein the sensitivity is at least 26% and specificity is at least 87%.
[0887] 388. An assay according to the invention, wherein the WID-BC-Index for the individual is about 0.587 or more, the individual is classified as having at least a high risk of harbouring breast cancer or a high risk of breast cancer development, wherein the set of CpGs comprises at least the CpGs defined by SEQ ID NOs 19000 to 40753 . . . and identified at nucleotide positions 61 to 62, and wherein the sensitivity is at least 25% and specificity is at least 88%.
[0888] 389. An assay according to the invention, wherein the WID-BC-Index for the individual is about 0.587 or more, the individual is classified as having at least a high risk of harbouring breast cancer or a high risk of breast cancer development, wherein the set of CpGs comprises at least the CpGs defined by SEQ ID NOs 20000 to 40753 and identified at nucleotide positions 61 to 62, and wherein the sensitivity is at least 25% and specificity is at least 88%.
[0889] 390. An assay according to the invention, wherein the WID-BC-Index for the individual is about 0.587 or more, the individual is classified as having at least a high risk of harbouring breast cancer or a high risk of breast cancer development, wherein the set of CpGs comprises at least the CpGs defined by SEQ ID NOs 22000 to 40753 and identified at nucleotide positions 61 to 62, and wherein the sensitivity is at least 25% and specificity is at least 87%.
[0890] 391. An assay according to the invention, wherein the WID-BC-Index for the individual is about 0.587 or more, the individual is classified as having at least a high risk of harbouring breast cancer or a high risk of breast cancer development, wherein the set of CpGs comprises at least the CpGs defined by SEQ ID NOs 24000 to 40753 and identified at nucleotide positions 61 to 62, and wherein the sensitivity is at least 25% and specificity is at least 86%.
[0891] 392. An assay according to the invention, wherein the WID-BC-Index for the individual is about 0.587 or more, the individual is classified as having at least a high risk of harbouring breast cancer or a high risk of breast cancer development, wherein the set of CpGs comprises at least the CpGs defined by SEQ ID NOs 26000 to 40753 and identified at nucleotide positions 61 to 62, and wherein the sensitivity is at least 25% and specificity is at least 86%.
[0892] 393. An assay according to the invention, wherein the WID-BC-Index for the individual is about 0.587 or more, the individual is classified as having at least a high risk of harbouring breast cancer or a high risk of breast cancer development, wherein the set of CpGs comprises at least the CpGs defined by SEQ ID NOs 28000 to 40753 and identified at nucleotide positions 61 to 62, and wherein the sensitivity is at least 24% and specificity is at least 88%.
[0893] 394. An assay according to the invention, wherein the WID-BC-Index for the individual is about 0.587 or more, the individual is classified as having at least a high risk of harbouring breast cancer or a high risk of breast cancer development, wherein the set of CpGs comprises at least the CpGs defined by SEQ ID NOs 30000 to 40753 and identified at nucleotide positions 61 to 62, and wherein the sensitivity is at least 25% and specificity is at least 88%.
[0894] 395. An assay according to the invention, wherein the WID-BC-Index for the individual is about 0.587 or more, the individual is classified as having at least a high risk of harbouring breast cancer or a high risk of breast cancer development, wherein the set of CpGs comprises at least the CpGs defined by SEQ ID NOs 32000 to 40753 and identified at nucleotide positions 61 to 62, and wherein the sensitivity is at least 24% and specificity is at least 87%.
[0895] 396. An assay according to the invention, wherein the WID-BC-Index for the individual is about 0.587 or more, the individual is classified as having at least a high risk of harbouring breast cancer or a high risk of breast cancer development, wherein the set of CpGs comprises at least the CpGs defined by SEQ ID NOs 34000 to 40753 and identified at nucleotide positions 61 to 62, and wherein the sensitivity is at least 24% and specificity is at least 87%.
[0896] 397. An assay according to the invention, wherein the WID-BC-Index for the individual is about 0.587 or more, the individual is classified as having at least a high risk of harbouring breast cancer or a high risk of breast cancer development, wherein the set of CpGs comprises at least the CpGs defined by SEQ ID NOs 36000 to 40753 and identified at nucleotide positions 61 to 62, and wherein the sensitivity is at least 24% and specificity is at least 87%.
[0897] 398. An assay according to the invention, wherein the WID-BC-Index for the individual is about 0.587 or more, the individual is classified as having at least a high risk of harbouring breast cancer or a high risk of breast cancer development, wherein the set of CpGs comprises at least the CpGs defined by SEQ ID NOs 38000 to 40752 and identified at nucleotide positions 61 to 62, and wherein the sensitivity is at least 24% and specificity is at least 87%.
[0898] 399. An assay according to the invention, wherein the WID-BC-Index for the individual is about −0.235 or more, the individual is classified as having at least a low risk of harbouring breast cancer or a low risk of breast cancer development, wherein the set of CpGs comprises at least the CpGs defined by SEQ ID NOs 1 to 500 and identified at nucleotide positions 61 to 62, and wherein the sensitivity is at least 85% and specificity is at least 52%.
[0899] 400. An assay according to the invention, wherein the WID-BC-Index for the individual is about −0.235 or more, the individual is classified as having at least a low risk of harbouring breast cancer or a low risk of breast cancer development, wherein the set of CpGs comprises at least the CpGs defined by SEQ ID NOs 501 to 1000 and identified at nucleotide positions 61 to 62, and wherein the sensitivity is at least 86% and specificity is at least 49%.
[0900] 401. An assay according to the invention, wherein the WID-BC-Index for the individual is about −0.235 or more, the individual is classified as having at least a low risk of harbouring breast cancer or a low risk of breast cancer development, wherein the set of CpGs comprises at least the CpGs defined by SEQ ID NOs 1001 to 1500 and identified at nucleotide positions 61 to 62, and wherein the sensitivity is at least 81% and specificity is at least 50%.
[0901] 402. An assay according to the invention, wherein the WID-BC-Index for the individual is about −0.235 or more, the individual is classified as having at least a low risk of harbouring breast cancer or a low risk of breast cancer development, wherein the set of CpGs comprises at least the CpGs defined by SEQ ID NOs 1501 to 2000 and identified at nucleotide positions 61 to 62, and wherein the sensitivity is at least 79% and specificity is at least 51%.
[0902] 403. An assay according to the invention, wherein the WID-BC-Index for the individual is about −0.235 or more, the individual is classified as having at least a low risk of harbouring breast cancer or a low risk of breast cancer development, wherein the set of CpGs comprises at least the CpGs defined by SEQ ID NOs 2001 to 2500 and identified at nucleotide positions 61 to 62, and wherein the sensitivity is at least 81% and specificity is at least 48%.
[0903] 404. An assay according to the invention, wherein the WID-BC-Index for the individual is about −0.235 or more, the individual is classified as having at least a low risk of harbouring breast cancer or a low risk of breast cancer development, wherein the set of CpGs comprises at least the CpGs defined by SEQ ID NOs 2501 to 3000 and identified at nucleotide positions 61 to 62, and wherein the sensitivity is at least 78% and specificity is at least 47%.
[0904] 405. An assay according to the invention, wherein the WID-BC-Index for the individual is about −0.235 or more, the individual is classified as having at least a low risk of harbouring breast cancer or a low risk of breast cancer development, wherein the set of CpGs comprises at least the CpGs defined by SEQ ID NOs 3001 to 3500 and identified at nucleotide positions 61 to 62, and wherein the sensitivity is at least 79% and specificity is at least 48%.
[0905] 406. An assay according to the invention, wherein the WID-BC-Index for the individual is about −0.235 or more, the individual is classified as having at least a low risk of harbouring breast cancer or a low risk of breast cancer development, wherein the set of CpGs comprises at least the CpGs defined by SEQ ID NOs 3501 to 4000 and identified at nucleotide positions 61 to 62, and wherein the sensitivity is at least 72% and specificity is at least 46%.
[0906] 407. An assay according to the invention, wherein the WID-BC-Index for the individual is about −0.235 or more, the individual is classified as having at least a low risk of harbouring breast cancer or a low risk of breast cancer development, wherein the set of CpGs comprises at least the CpGs defined by SEQ ID NOs 4001 to 4500 and identified at nucleotide positions 61 to 62, and wherein the sensitivity is at least 81% and specificity is at least 47%.
[0907] 408. An assay according to the invention, wherein the WID-BC-Index for the individual is about −0.235 or more, the individual is classified as having at least a low risk of harbouring breast cancer or a low risk of breast cancer development, wherein the set of CpGs comprises at least the CpGs defined by SEQ ID NOs 4501 to 5000 and identified at nucleotide positions 61 to 62, and wherein the sensitivity is at least 76% and specificity is at least 44%.
[0908] 409. An assay according to the invention, wherein the WID-BC-Index for the individual is about −0.235 or more, the individual is classified as having at least a low risk of harbouring breast cancer or a low risk of breast cancer development, wherein the set of CpGs comprises at least the CpGs defined by SEQ ID NOs 5001 to 5500 and identified at nucleotide positions 61 to 62, and wherein the sensitivity is at least 82% and specificity is at least 45%.
[0909] 410. An assay according to the invention, wherein the WID-BC-Index for the individual is about −0.235 or more, the individual is classified as having at least a low risk of harbouring breast cancer or a low risk of breast cancer development, wherein the set of CpGs comprises at least the CpGs defined by SEQ ID NOs 5501 to 6000 and identified at nucleotide positions 61 to 62, and wherein the sensitivity is at least 73% and specificity is at least 53%.
[0910] 411. An assay according to the invention, wherein the WID-BC-Index for the individual is about −0.235 or more, the individual is classified as having at least a low risk of harbouring breast cancer or a low risk of breast cancer development, wherein the set of CpGs comprises at least the CpGs defined by SEQ ID NOs 6001 to 6500 and identified at nucleotide positions 61 to 62, and wherein the sensitivity is at least 84% and specificity is at least 50%.
[0911] 412. An assay according to the invention, wherein the WID-BC-Index for the individual is about −0.235 or more, the individual is classified as having at least a low risk of harbouring breast cancer or a low risk of breast cancer development, wherein the set of CpGs comprises at least the CpGs defined by SEQ ID NOs 6501 to 7000 and identified at nucleotide positions 61 to 62, and wherein the sensitivity is at least 86% and specificity is at least 49%.
[0912] 413. An assay according to the invention, wherein the WID-BC-Index for the individual is about −0.235 or more, the individual is classified as having at least a low risk of harbouring breast cancer or a low risk of breast cancer development, wherein the set of CpGs comprises at least the CpGs defined by SEQ ID NOs 7001 to 7500 and identified at nucleotide positions 61 to 62, and wherein the sensitivity is at least 75% and specificity is at least 50%.
[0913] 414. An assay according to the invention, wherein the WID-BC-Index for the individual is about −0.235 or more, the individual is classified as having at least a low risk of harbouring breast cancer or a low risk of breast cancer development, wherein the set of CpGs comprises at least the CpGs defined by SEQ ID NOs 7501 to 8000 and identified at nucleotide positions 61 to 62, and wherein the sensitivity is at least 85% and specificity is at least 49%.
[0914] 415. An assay according to the invention, wherein the WID-BC-Index for the individual is about −0.235 or more, the individual is classified as having at least a low risk of harbouring breast cancer or a low risk of breast cancer development, wherein the set of CpGs comprises at least the CpGs defined by SEQ ID NOs 8001 to 8500 and identified at nucleotide positions 61 to 62, and wherein the sensitivity is at least 78% and specificity is at least 51%.
[0915] 416. An assay according to the invention, wherein the WID-BC-Index for the individual is about −0.235 or more, the individual is classified as having at least a low risk of harbouring breast cancer or a low risk of breast cancer development, wherein the set of CpGs comprises at least the CpGs defined by SEQ ID NOs 8501 to 9000 and identified at nucleotide positions 61 to 62, and wherein the sensitivity is at least 82% and specificity is at least 53%.
[0916] 417. An assay according to the invention, wherein the WID-BC-Index for the individual is about −0.235 or more, the individual is classified as having at least a low risk of harbouring breast cancer or a low risk of breast cancer development, wherein the set of CpGs comprises at least the CpGs defined by SEQ ID NOs 9001 to 9500 and identified at nucleotide positions 61 to 62, and wherein the sensitivity is at least 78% and specificity is at least 54%.
[0917] 418. An assay according to the invention, wherein the WID-BC-Index for the individual is about −0.235 or more, the individual is classified as having at least a low risk of harbouring breast cancer or a low risk of breast cancer development, wherein the set of CpGs comprises at least the CpGs defined by SEQ ID NOs 9501 to 10000 and identified at nucleotide positions 61 to 62, and wherein the sensitivity is at least 75% and specificity is at least 55%.
[0918] 419. An assay according to the invention, wherein the WID-BC-Index for the individual is about −0.235 or more, the individual is classified as having at least a low risk of harbouring breast cancer or a low risk of breast cancer development, wherein the set of CpGs comprises at least the CpGs defined by SEQ ID NOs 10001 to 10500 and identified at nucleotide positions 61 to 62, and wherein the sensitivity is at least 80% and specificity is at least 48%.
[0919] 420. An assay according to the invention, wherein the WID-BC-Index for the individual is about −0.235 or more, the individual is classified as having at least a low risk of harbouring breast cancer or a low risk of breast cancer development, wherein the set of CpGs comprises at least the CpGs defined by SEQ ID NOs 10501 to 11000 and identified at nucleotide positions 61 to 62, and wherein the sensitivity is at least 75% and specificity is at least 56%.
[0920] 421. An assay according to the invention, wherein the WID-BC-Index for the individual is about −0.235 or more, the individual is classified as having at least a low risk of harbouring breast cancer or a low risk of breast cancer development, wherein the set of CpGs comprises at least the CpGs defined by SEQ ID NOs 11001 to 11500 and identified at nucleotide positions 61 to 62, and wherein the sensitivity is at least 86% and specificity is at least 51%.
[0921] 422. An assay according to the invention, wherein the WID-BC-Index for the individual is about −0.235 or more, the individual is classified as having at least a low risk of harbouring breast cancer or a low risk of breast cancer development, wherein the set of CpGs comprises at least the CpGs defined by SEQ ID NOs 11501 to 12000 and identified at nucleotide positions 61 to 62, and wherein the sensitivity is at least 76% and specificity is at least 45%.
[0922] 423. An assay according to the invention, wherein the WID-BC-Index for the individual is about −0.235 or more, the individual is classified as having at least a low risk of harbouring breast cancer or a low risk of breast cancer development, wherein the set of CpGs comprises at least the CpGs defined by SEQ ID NOs 12001 to 12500 and identified at nucleotide positions 61 to 62, and wherein the sensitivity is at least 74% and specificity is at least 54%.
[0923] 424. An assay according to the invention, wherein the WID-BC-Index for the individual is about −0.235 or more, the individual is classified as having at least a low risk of harbouring breast cancer or a low risk of breast cancer development, wherein the set of CpGs comprises at least the CpGs defined by SEQ ID NOs 12501 to 13000 and identified at nucleotide positions 61 to 62, and wherein the sensitivity is at least 80% and specificity is at least 53%.
[0924] 425. An assay according to the invention, wherein the WID-BC-Index for the individual is about −0.235 or more, the individual is classified as having at least a low risk of harbouring breast cancer or a low risk of breast cancer development, wherein the set of CpGs comprises at least the CpGs defined by SEQ ID NOs 13001 to 13500 and identified at nucleotide positions 61 to 62, and wherein the sensitivity is at least 77% and specificity is at least 56%.
[0925] 426. An assay according to the invention, wherein the WID-BC-Index for the individual is about −0.235 or more, the individual is classified as having at least a low risk of harbouring breast cancer or a low risk of breast cancer development, wherein the set of CpGs comprises at least the CpGs defined by SEQ ID NOs 13001 to 13500 and identified at nucleotide positions 61 to 62, and wherein the sensitivity is at least 77% and specificity is at least 56%.
[0926] 427. An assay according to the invention, wherein the WID-BC-Index for the individual is about −0.235 or more, the individual is classified as having at least a low risk of harbouring breast cancer or a low risk of breast cancer development, wherein the set of CpGs comprises at least the CpGs defined by SEQ ID NOs 13501 to 14000 and identified at nucleotide positions 61 to 62, and wherein the sensitivity is at least 75% and specificity is at least 55%.
[0927] 428. An assay according to the invention, wherein the WID-BC-Index for the individual is about −0.235 or more, the individual is classified as having at least a low risk of harbouring breast cancer or a low risk of breast cancer development, wherein the set of CpGs comprises at least the CpGs defined by SEQ ID NOs 14001 to 14500 and identified at nucleotide positions 61 to 62, and wherein the sensitivity is at least 74% and specificity is at least 55%.
[0928] 429. An assay according to the invention, wherein the WID-BC-Index for the individual is about −0.235 or more, the individual is classified as having at least a low risk of harbouring breast cancer or a low risk of breast cancer development, wherein the set of CpGs comprises at least the CpGs defined by SEQ ID NOs 14501 to 15000 and identified at nucleotide positions 61 to 62, and wherein the sensitivity is at least 80% and specificity is at least 52%.
[0929] 430. An assay according to the invention, wherein the WID-BC-Index for the individual is about −0.235 or more, the individual is classified as having at least a low risk of harbouring breast cancer or a low risk of breast cancer development, wherein the set of CpGs comprises at least the CpGs defined by SEQ ID NOs 15001 to 15500 and identified at nucleotide positions 61 to 62, and wherein the sensitivity is at least 75% and specificity is at least 52%.
[0930] 431. An assay according to the invention, wherein the WID-BC-Index for the individual is about −0.235 or more, the individual is classified as having at least a low risk of harbouring breast cancer or a low risk of breast cancer development, wherein the set of CpGs comprises at least the CpGs defined by SEQ ID NOs 15501 to 16000 and identified at nucleotide positions 61 to 62, and wherein the sensitivity is at least 75% and specificity is at least 57%.
[0931] 432. An assay according to the invention, wherein the WID-BC-Index for the individual is about −0.235 or more, the individual is classified as having at least a low risk of harbouring breast cancer or a low risk of breast cancer development, wherein the set of CpGs comprises at least the CpGs defined by SEQ ID NOs 16001 to 16500 and identified at nucleotide positions 61 to 62, and wherein the sensitivity is at least 79% and specificity is at least 53%.
[0932] 433. An assay according to the invention, wherein the WID-BC-Index for the individual is about −0.235 or more, the individual is classified as having at least a low risk of harbouring breast cancer or a low risk of breast cancer development, wherein the set of CpGs comprises at least the CpGs defined by SEQ ID NOs 16501 to 17000 and identified at nucleotide positions 61 to 62, and wherein the sensitivity is at least 74% and specificity is at least 56%.
[0933] 434. An assay according to the invention, wherein the WID-BC-Index for the individual is about −0.235 or more, the individual is classified as having at least a low risk of harbouring breast cancer or a low risk of breast cancer development, wherein the set of CpGs comprises at least the CpGs defined by SEQ ID NOs 17001 to 17500 and identified at nucleotide positions 61 to 62, and wherein the sensitivity is at least 77% and specificity is at least 53%.
[0934] 435. An assay according to the invention, wherein the WID-BC-Index for the individual is about −0.235 or more, the individual is classified as having at least a low risk of harbouring breast cancer or a low risk of breast cancer development, wherein the set of CpGs comprises at least the CpGs defined by SEQ ID NOs 17501 to 18000 and identified at nucleotide positions 61 to 62, and wherein the sensitivity is at least 72% and specificity is at least 54%.
[0935] 436. An assay according to the invention, wherein the WID-BC-Index for the individual is about −0.235 or more, the individual is classified as having at least a low risk of harbouring breast cancer or a low risk of breast cancer development, wherein the set of CpGs comprises at least the CpGs defined by SEQ ID NOs 18001 to 18500 and identified at nucleotide positions 61 to 62, and wherein the sensitivity is at least 77% and specificity is at least 56%.
[0936] 437. An assay according to the invention, wherein the WID-BC-Index for the individual is about −0.235 or more, the individual is classified as having at least a low risk of harbouring breast cancer or a low risk of breast cancer development, wherein the set of CpGs comprises at least the CpGs defined by SEQ ID NOs 18501 to 19000 and identified at nucleotide positions 61 to 62, and wherein the sensitivity is at least 76% and specificity is at least 57%.
[0937] 438. An assay according to the invention, wherein the WID-BC-Index for the individual is about −0.235 or more, the individual is classified as having at least a low risk of harbouring breast cancer or a low risk of breast cancer development, wherein the set of CpGs comprises at least the CpGs defined by SEQ ID NOs 19001 to 19500 and identified at nucleotide positions 61 to 62, and wherein the sensitivity is at least 73% and specificity is at least 57%.
[0938] 439. An assay according to the invention, wherein the WID-BC-Index for the individual is about −0.235 or more, the individual is classified as having at least a low risk of harbouring breast cancer or a low risk of breast cancer development, wherein the set of CpGs comprises at least the CpGs defined by SEQ ID NOs 19501 to 20000 and identified at nucleotide positions 61 to 62, and wherein the sensitivity is at least 74% and specificity is at least 54%.
[0939] 440. An assay according to the invention, wherein the WID-BC-Index for the individual is about −0.235 or more, the individual is classified as having at least a low risk of harbouring breast cancer or a low risk of breast cancer development, wherein the set of CpGs comprises at least the CpGs defined by SEQ ID NOs 20001 to 20500 and identified at nucleotide positions 61 to 62, and wherein the sensitivity is at least 72% and specificity is at least 56%.
[0940] 441. An assay according to the invention, wherein the WID-BC-Index for the individual is about −0.235 or more, the individual is classified as having at least a low risk of harbouring breast cancer or a low risk of breast cancer development, wherein the set of CpGs comprises at least the CpGs defined by SEQ ID NOs 20501 to 21000 and identified at nucleotide positions 61 to 62, and wherein the sensitivity is at least 77% and specificity is at least 59%.
[0941] 442. An assay according to the invention, wherein the WID-BC-Index for the individual is about −0.235 or more, the individual is classified as having at least a low risk of harbouring breast cancer or a low risk of breast cancer development, wherein the set of CpGs comprises at least the CpGs defined by SEQ ID NOs 21001 to 21500 and identified at nucleotide positions 61 to 62, and wherein the sensitivity is at least 66% and specificity is at least 54%.
[0942] 443. An assay according to the invention, wherein the WID-BC-Index for the individual is about −0.235 or more, the individual is classified as having at least a low risk of harbouring breast cancer or a low risk of breast cancer development, wherein the set of CpGs comprises at least the CpGs defined by SEQ ID NOs 21501 to 22000 and identified at nucleotide positions 61 to 62, and wherein the sensitivity is at least 72% and specificity is at least 57%.
[0943] 444. An assay according to the invention, wherein the WID-BC-Index for the individual is about −0.235 or more, the individual is classified as having at least a low risk of harbouring breast cancer or a low risk of breast cancer development, wherein the set of CpGs comprises at least the CpGs defined by SEQ ID NOs 22001 to 22500 and identified at nucleotide positions 61 to 62, and wherein the sensitivity is at least 71% and specificity is at least 56%.
[0944] 445. An assay according to the invention, wherein the WID-BC-Index for the individual is about −0.235 or more, the individual is classified as having at least a low risk of harbouring breast cancer or a low risk of breast cancer development, wherein the set of CpGs comprises at least the CpGs defined by SEQ ID NOs 22501 to 23000 and identified at nucleotide positions 61 to 62, and wherein the sensitivity is at least 72% and specificity is at least 57%.
[0945] 446. An assay according to the invention, wherein the WID-BC-Index for the individual is about −0.235 or more, the individual is classified as having at least a low risk of harbouring breast cancer or a low risk of breast cancer development, wherein the set of CpGs comprises at least the CpGs defined by SEQ ID NOs 23001 to 23500 and identified at nucleotide positions 61 to 62, and wherein the sensitivity is at least 64% and specificity is at least 57%.
[0946] 447. An assay according to the invention, wherein the WID-BC-Index for the individual is about −0.235 or more, the individual is classified as having at least a low risk of harbouring breast cancer or a low risk of breast cancer development, wherein the set of CpGs comprises at least the CpGs defined by SEQ ID NOs 23501 to 24000 and identified at nucleotide positions 61 to 62, and wherein the sensitivity is at least 68% and specificity is at least 61%.
[0947] 448. An assay according to the invention, wherein the WID-BC-Index for the individual is about −0.235 or more, the individual is classified as having at least a low risk of harbouring breast cancer or a low risk of breast cancer development, wherein the set of CpGs comprises at least the CpGs defined by SEQ ID NOs 24001 to 24500 and identified at nucleotide positions 61 to 62, and wherein the sensitivity is at least 69% and specificity is at least 57%.
[0948] 449. An assay according to the invention, wherein the WID-BC-Index for the individual is about −0.235 or more, the individual is classified as having at least a low risk of harbouring breast cancer or a low risk of breast cancer development, wherein the set of CpGs comprises at least the CpGs defined by SEQ ID NOs 24501 to 25000 and identified at nucleotide positions 61 to 62, and wherein the sensitivity is at least 65% and specificity is at least 59%.
[0949] 450. An assay according to the invention, wherein the WID-BC-Index for the individual is about −0.235 or more, the individual is classified as having at least a low risk of harbouring breast cancer or a low risk of breast cancer development, wherein the set of CpGs comprises at least the CpGs defined by SEQ ID NOs 25001 to 25500 and identified at nucleotide positions 61 to 62, and wherein the sensitivity is at least 62% and specificity is at least 58%.
[0950] 451. An assay according to the invention, wherein the WID-BC-Index for the individual is about −0.235 or more, the individual is classified as having at least a low risk of harbouring breast cancer or a low risk of breast cancer development, wherein the set of CpGs comprises at least the CpGs defined by SEQ ID NOs 25501 to 26000 and identified at nucleotide positions 61 to 62, and wherein the sensitivity is at least 63% and specificity is at least 56%.
[0951] 452. An assay according to the invention, wherein the WID-BC-Index for the individual is about −0.235 or more, the individual is classified as having at least a low risk of harbouring breast cancer or a low risk of breast cancer development, wherein the set of CpGs comprises at least the CpGs defined by SEQ ID NOs 26001 to 26500 and identified at nucleotide positions 61 to 62, and wherein the sensitivity is at least 69% and specificity is at least 59%.
[0952] 453. An assay according to the invention, wherein the WID-BC-Index for the individual is about −0.235 or more, the individual is classified as having at least a low risk of harbouring breast cancer or a low risk of breast cancer development, wherein the set of CpGs comprises at least the CpGs defined by SEQ ID NOs 26501 to 27000 and identified at nucleotide positions 61 to 62, and wherein the sensitivity is at least 66% and specificity is at least 58%.
[0953] 454. An assay according to the invention, wherein the WID-BC-Index for the individual is about −0.235 or more, the individual is classified as having at least a low risk of harbouring breast cancer or a low risk of breast cancer development, wherein the set of CpGs comprises at least the CpGs defined by SEQ ID NOs 27001 to 27500 and identified at nucleotide positions 61 to 62, and wherein the sensitivity is at least 67% and specificity is at least 59%.
[0954] 455. An assay according to the invention, wherein the WID-BC-Index for the individual is about −0.235 or more, the individual is classified as having at least a low risk of harbouring breast cancer or a low risk of breast cancer development, wherein the set of CpGs comprises at least the CpGs defined by SEQ ID NOs 27501 to 28000 and identified at nucleotide positions 61 to 62, and wherein the sensitivity is at least 62% and specificity is at least 60%.
[0955] 456. An assay according to the invention, wherein the WID-BC-Index for the individual is about −0.235 or more, the individual is classified as having at least a low risk of harbouring breast cancer or a low risk of breast cancer development, wherein the set of CpGs comprises at least the CpGs defined by SEQ ID NOs 28001 to 28500 and identified at nucleotide positions 61 to 62, and wherein the sensitivity is at least 61% and specificity is at least 59%.
[0956] 457. An assay according to the invention, wherein the WID-BC-Index for the individual is about −0.235 or more, the individual is classified as having at least a low risk of harbouring breast cancer or a low risk of breast cancer development, wherein the set of CpGs comprises at least the CpGs defined by SEQ ID NOs 28501 to 29000 and identified at nucleotide positions 61 to 62, and wherein the sensitivity is at least 65% and specificity is at least 61%.
[0957] 458. An assay according to the invention, wherein the WID-BC-Index for the individual is about −0.235 or more, the individual is classified as having at least a low risk of harbouring breast cancer or a low risk of breast cancer development, wherein the set of CpGs comprises at least the CpGs defined by SEQ ID NOs 29001 to 29500 and identified at nucleotide positions 61 to 62, and wherein the sensitivity is at least 65% and specificity is at least 58%.
[0958] 459. An assay according to the invention, wherein the WID-BC-Index for the individual is about −0.235 or more, the individual is classified as having at least a low risk of harbouring breast cancer or a low risk of breast cancer development, wherein the set of CpGs comprises at least the CpGs defined by SEQ ID NOs 29501 to 30000 and identified at nucleotide positions 61 to 62, and wherein the sensitivity is at least 67% and specificity is at least 55%.
[0959] 460. An assay according to the invention, wherein the WID-BC-Index for the individual is about −0.235 or more, the individual is classified as having at least a low risk of harbouring breast cancer or a low risk of breast cancer development, wherein the set of CpGs comprises at least the CpGs defined by SEQ ID NOs 30001 to 30500 and identified at nucleotide positions 61 to 62, and wherein the sensitivity is at least 65% and specificity is at least %.
[0960] 461. An assay according to the invention, wherein the WID-BC-Index for the individual is about −0.235 or more, the individual is classified as having at least a low risk of harbouring breast cancer or a low risk of breast cancer development, wherein the set of CpGs comprises at least the CpGs defined by SEQ ID NOs 30501 to 31000 and identified at nucleotide positions 61 to 62, and wherein the sensitivity is at least 63% and specificity is at least 61%.
[0961] 462. An assay according to the invention, wherein the WID-BC-Index for the individual is about −0.235 or more, the individual is classified as having at least a low risk of harbouring breast cancer or a low risk of breast cancer development, wherein the set of CpGs comprises at least the CpGs defined by SEQ ID NOs 31001 to 31500 and identified at nucleotide positions 61 to 62, and wherein the sensitivity is at least 62% and specificity is at least 59%.
[0962] 463. An assay according to the invention, wherein the WID-BC-Index for the individual is about −0.235 or more, the individual is classified as having at least a low risk of harbouring breast cancer or a low risk of breast cancer development, wherein the set of CpGs comprises at least the CpGs defined by SEQ ID NOs 31501 to 32000 and identified at nucleotide positions 61 to 62, and wherein the sensitivity is at least 68% and specificity is at least 56%.
[0963] 464. An assay according to the invention, wherein the WID-BC-Index for the individual is about −0.235 or more, the individual is classified as having at least a low risk of harbouring breast cancer or a low risk of breast cancer development, wherein the set of CpGs comprises at least the CpGs defined by SEQ ID NOs 32001 to 32500 and identified at nucleotide positions 61 to 62, and wherein the sensitivity is at least 62% and specificity is at least 59%.
[0964] 465. An assay according to the invention, wherein the WID-BC-Index for the individual is about −0.235 or more, the individual is classified as having at least a low risk of harbouring breast cancer or a low risk of breast cancer development, wherein the set of CpGs comprises at least the CpGs defined by SEQ ID NOs 32501 to 33000 and identified at nucleotide positions 61 to 62, and wherein the sensitivity is at least 67% and specificity is at least 58%.
[0965] 466. An assay according to the invention, wherein the WID-BC-Index for the individual is about −0.235 or more, the individual is classified as having at least a low risk of harbouring breast cancer or a low risk of breast cancer development, wherein the set of CpGs comprises at least the CpGs defined by SEQ ID NOs 33001 to 33500 and identified at nucleotide positions 61 to 62, and wherein the sensitivity is at least 65% and specificity is at least 56%.
[0966] 467. An assay according to the invention, wherein the WID-BC-Index for the individual is about −0.235 or more, the individual is classified as having at least a low risk of harbouring breast cancer or a low risk of breast cancer development, wherein the set of CpGs comprises at least the CpGs defined by SEQ ID NOs 33501 to 34000 and identified at nucleotide positions 61 to 62, and wherein the sensitivity is at least 61% and specificity is at least 59%.
[0967] 468. An assay according to the invention, wherein the WID-BC-Index for the individual is about −0.235 or more, the individual is classified as having at least a low risk of harbouring breast cancer or a low risk of breast cancer development, wherein the set of CpGs comprises at least the CpGs defined by SEQ ID NOs 34001 to 34500 and identified at nucleotide positions 61 to 62, and wherein the sensitivity is at least 58% and specificity is at least 60%.
[0968] 469. An assay according to the invention, wherein the WID-BC-Index for the individual is about −0.235 or more, the individual is classified as having at least a low risk of harbouring breast cancer or a low risk of breast cancer development, wherein the set of CpGs comprises at least the CpGs defined by SEQ ID NOs 34501 to 35000 and identified at nucleotide positions 61 to 62, and wherein the sensitivity is at least 59% and specificity is at least 57%.
[0969] 470. An assay according to the invention, wherein the WID-BC-Index for the individual is about −0.235 or more, the individual is classified as having at least a low risk of harbouring breast cancer or a low risk of breast cancer development, wherein the set of CpGs comprises at least the CpGs defined by SEQ ID NOs 35001 to 35500 and identified at nucleotide positions 61 to 62, and wherein the sensitivity is at least 60% and specificity is at least 61%.
[0970] 471. An assay according to the invention, wherein the WID-BC-Index for the individual is about −0.235 or more, the individual is classified as having at least a low risk of harbouring breast cancer or a low risk of breast cancer development, wherein the set of CpGs comprises at least the CpGs defined by SEQ ID NOs 35501 to 36000 and identified at nucleotide positions 61 to 62, and wherein the sensitivity is at least 61% and specificity is at least 57%.
[0971] 472. An assay according to the invention, wherein the WID-BC-Index for the individual is about −0.235 or more, the individual is classified as having at least a low risk of harbouring breast cancer or a low risk of breast cancer development, wherein the set of CpGs comprises at least the CpGs defined by SEQ ID NOs 36001 to 36500 and identified at nucleotide positions 61 to 62, and wherein the sensitivity is at least 61% and specificity is at least 57%.
[0972] 473. An assay according to the invention, wherein the WID-BC-Index for the individual is about −0.235 or more, the individual is classified as having at least a low risk of harbouring breast cancer or a low risk of breast cancer development, wherein the set of CpGs comprises at least the CpGs defined by SEQ ID NOs 36501 to 37000 and identified at nucleotide positions 61 to 62, and wherein the sensitivity is at least 63% and specificity is at least 62%.
[0973] 474. An assay according to the invention, wherein the WID-BC-Index for the individual is about −0.235 or more, the individual is classified as having at least a low risk of harbouring breast cancer or a low risk of breast cancer development, wherein the set of CpGs comprises at least the CpGs defined by SEQ ID NOs 37001 to 37500 and identified at nucleotide positions 61 to 62, and wherein the sensitivity is at least 62% and specificity is at least 60%.
[0974] 475. An assay according to the invention, wherein the WID-BC-Index for the individual is about −0.235 or more, the individual is classified as having at least a low risk of harbouring breast cancer or a low risk of breast cancer development, wherein the set of CpGs comprises at least the CpGs defined by SEQ ID NOs 37501 to 38000 and identified at nucleotide positions 61 to 62, and wherein the sensitivity is at least 60% and specificity is at least 61%.
[0975] 476. An assay according to the invention, wherein the WID-BC-Index for the individual is about −0.235 or more, the individual is classified as having at least a low risk of harbouring breast cancer or a low risk of breast cancer development, wherein the set of CpGs comprises at least the CpGs defined by SEQ ID NOs 38001 to 38500 and identified at nucleotide positions 61 to 62, and wherein the sensitivity is at least 61% and specificity is at least 57%.
[0976] 477. An assay according to the invention, wherein the WID-BC-Index for the individual is about −0.235 or more, the individual is classified as having at least a low risk of harbouring breast cancer or a low risk of breast cancer development, wherein the set of CpGs comprises at least the CpGs defined by SEQ ID NOs 38501 to 39000 and identified at nucleotide positions 61 to 62, and wherein the sensitivity is at least 61% and specificity is at least 57%.
[0977] 478. An assay according to the invention, wherein the WID-BC-Index for the individual is about −0.235 or more, the individual is classified as having at least a low risk of harbouring breast cancer or a low risk of breast cancer development, wherein the set of CpGs comprises at least the CpGs defined by SEQ ID NOs 39001 to 39500 and identified at nucleotide positions 61 to 62, and wherein the sensitivity is at least 63% and specificity is at least 59%.
[0978] 479. An assay according to the invention, wherein the WID-BC-Index for the individual is about −0.235 or more, the individual is classified as having at least a low risk of harbouring breast cancer or a low risk of breast cancer development, wherein the set of CpGs comprises at least the CpGs defined by SEQ ID NOs 39501 to 40000 and identified at nucleotide positions 61 to 62, and wherein the sensitivity is at least 60% and specificity is at least 59%.
[0979] 480. An assay according to the invention, wherein the WID-BC-Index for the individual is about −0.235 or more, the individual is classified as having at least a low risk of harbouring breast cancer or a low risk of breast cancer development, wherein the set of CpGs comprises at least the CpGs defined by SEQ ID NOs 40001 to 40500 and identified at nucleotide positions 61 to 62, and wherein the sensitivity is at least 62% and specificity is at least 59%.
[0980] 481. An assay according to the invention, wherein the WID-BC-Index for the individual is about −0.235 or more, the individual is classified as having at least a low risk of harbouring breast cancer or a low risk of breast cancer development, wherein the set of CpGs comprises at least the CpGs defined by SEQ ID NOs 40501 to 40753 and identified at nucleotide positions 61 to 62, and wherein the sensitivity is at least 61% and specificity is at least 60%.
[0981] 482. An assay according to the invention, wherein the WID-BC-Index for the individual is about 0.090 or more, the individual is classified as having at least a moderate risk of harbouring breast cancer or a moderate risk of breast cancer development, wherein the set of CpGs comprises at least the CpGs defined by SEQ ID NOs 1 to 500 and identified at nucleotide positions 61 to 62, and wherein the sensitivity is at least 63% and specificity is at least 69%.
[0982] 483. An assay according to the invention, wherein the WID-BC-Index for the individual is about −0.235 or more, the individual is classified as having at least a low risk of harbouring breast cancer or a low risk of breast cancer development, wherein the set of CpGs comprises at least the CpGs defined by SEQ ID NOs 501 to 1000 and identified at nucleotide positions 61 to 62, and wherein the sensitivity is at least 66% and specificity is at least 67%.
[0983] 484. An assay according to the invention, wherein the WID-BC-Index for the individual is about 0.090 or more, the individual is classified as having at least a moderate risk of harbouring breast cancer or a moderate risk of breast cancer development, wherein the set of CpGs comprises at least the CpGs defined by SEQ ID NOs 1001 to 1500 and identified at nucleotide positions 61 to 62, and wherein the sensitivity is at least 67% and specificity is at least 74%.
[0984] 485. An assay according to the invention, wherein the WID-BC-Index for the individual is about 0.090 or more, the individual is classified as having at least a moderate risk of harbouring breast cancer or a moderate risk of breast cancer development, wherein the set of CpGs comprises at least the CpGs defined by SEQ ID NOs 1501 to 2000 and identified at nucleotide positions 61 to 62, and wherein the sensitivity is at least 58% and specificity is at least 72%.
[0985] 486. An assay according to the invention, wherein the WID-BC-Index for the individual is about 0.090 or more, the individual is classified as having at least a moderate risk of harbouring breast cancer or a moderate risk of breast cancer development, wherein the set of CpGs comprises at least the CpGs defined by SEQ ID NOs 2001 to 2500 and identified at nucleotide positions 61 to 62, and wherein the sensitivity is at least 68% and specificity is at least 68%.
[0986] 487. An assay according to the invention, wherein the WID-BC-Index for the individual is about 0.090 or more, the individual is classified as having at least a moderate risk of harbouring breast cancer or a moderate risk of breast cancer development, wherein the set of CpGs comprises at least the CpGs defined by SEQ ID NOs 2501 to 3000 and identified at nucleotide positions 61 to 62, and wherein the sensitivity is at least 63% and specificity is at least 67%.
[0987] 488. An assay according to the invention, wherein the WID-BC-Index for the individual is about 0.090 or more, the individual is classified as having at least a moderate risk of harbouring breast cancer or a moderate risk of breast cancer development, wherein the set of CpGs comprises at least the CpGs defined by SEQ ID NOs 3001 to 3500 and identified at nucleotide positions 61 to 62, and wherein the sensitivity is at least 65% and specificity is at least 66%.
[0988] 489. An assay according to the invention, wherein the WID-BC-Index for the individual is about 0.090 or more, the individual is classified as having at least a moderate risk of harbouring breast cancer or a moderate risk of breast cancer development, wherein the set of CpGs comprises at least the CpGs defined by SEQ ID NOs 3501 to 4000 and identified at nucleotide positions 61 to 62, and wherein the sensitivity is at least 64% and specificity is at least 67%.
[0989] 490. An assay according to the invention, wherein the WID-BC-Index for the individual is about 0.090 or more, the individual is classified as having at least a moderate risk of harbouring breast cancer or a moderate risk of breast cancer development, wherein the set of CpGs comprises at least the CpGs defined by SEQ ID NOs 4001 to 4500 and identified at nucleotide positions 61 to 62, and wherein the sensitivity is at least 71% and specificity is at least 64%.
[0990] 491. An assay according to the invention, wherein the WID-BC-Index for the individual is about 0.090 or more, the individual is classified as having at least a moderate risk of harbouring breast cancer or a moderate risk of breast cancer development, wherein the set of CpGs comprises at least the CpGs defined by SEQ ID NOs 4501 to 5000 and identified at nucleotide positions 61 to 62, and wherein the sensitivity is at least 62% and specificity is at least 66%.
[0991] 492. An assay according to the invention, wherein the WID-BC-Index for the individual is about 0.090 or more, the individual is classified as having at least a moderate risk of harbouring breast cancer or a moderate risk of breast cancer development, wherein the set of CpGs comprises at least the CpGs defined by SEQ ID NOs 5001 to 5500 and identified at nucleotide positions 61 to 62, and wherein the sensitivity is at least 66% and specificity is at least 63%.
[0992] 493. An assay according to the invention, wherein the WID-BC-Index for the individual is about 0.090 or more, the individual is classified as having at least a moderate risk of harbouring breast cancer or a moderate risk of breast cancer development, wherein the set of CpGs comprises at least the CpGs defined by SEQ ID NOs 5501 to 6000 and identified at nucleotide positions 61 to 62, and wherein the sensitivity is at least 57% and specificity is at least 74%.
[0993] 494. An assay according to the invention, wherein the WID-BC-Index for the individual is about 0.090 or more, the individual is classified as having at least a moderate risk of harbouring breast cancer or a moderate risk of breast cancer development, wherein the set of CpGs comprises at least the CpGs defined by SEQ ID NOs 6001 to 6500 and identified at nucleotide positions 61 to 62, and wherein the sensitivity is at least 71% and specificity is at least 71%.
[0994] 495. An assay according to the invention, wherein the WID-BC-Index for the individual is about 0.090 or more, the individual is classified as having at least a moderate risk of harbouring breast cancer or a moderate risk of breast cancer development, wherein the set of CpGs comprises at least the CpGs defined by SEQ ID NOs 6501 to 7000 and identified at nucleotide positions 61 to 62, and wherein the sensitivity is at least 72% and specificity is at least 68%.
[0995] 496. An assay according to the invention, wherein the WID-BC-Index for the individual is about 0.090 or more, the individual is classified as having at least a moderate risk of harbouring breast cancer or a moderate risk of breast cancer development, wherein the set of CpGs comprises at least the CpGs defined by SEQ ID NOs 7001 to 7500 and identified at nucleotide positions 61 to 62, and wherein the sensitivity is at least 54% and specificity is at least 73%.
[0996] 497. An assay according to the invention, wherein the WID-BC-Index for the individual is about 0.090 or more, the individual is classified as having at least a moderate risk of harbouring breast cancer or a moderate risk of breast cancer development, wherein the set of CpGs comprises at least the CpGs defined by SEQ ID NOs 7501 to 8000 and identified at nucleotide positions 61 to 62, and wherein the sensitivity is at least 76% and specificity is at least 69%.
[0997] 498. An assay according to the invention, wherein the WID-BC-Index for the individual is about 0.090 or more, the individual is classified as having at least a moderate risk of harbouring breast cancer or a moderate risk of breast cancer development, wherein the set of CpGs comprises at least the CpGs defined by SEQ ID NOs 8001 to 8500 and identified at nucleotide positions 61 to 62, and wherein the sensitivity is at least 62% and specificity is at least 67%.
[0998] 499. An assay according to the invention, wherein the WID-BC-Index for the individual is about 0.090 or more, the individual is classified as having at least a moderate risk of harbouring breast cancer or a moderate risk of breast cancer development, wherein the set of CpGs comprises at least the CpGs defined by SEQ ID NOs 8501 to 9000 and identified at nucleotide positions 61 to 62, and wherein the sensitivity is at least 62% and specificity is at least 69%.
[0999] 500. An assay according to the invention, wherein the WID-BC-Index for the individual is about 0.090 or more, the individual is classified as having at least a moderate risk of harbouring breast cancer or a moderate risk of breast cancer development, wherein the set of CpGs comprises at least the CpGs defined by SEQ ID NOs 9001 to 9500 and identified at nucleotide positions 61 to 62, and wherein the sensitivity is at least 64% and specificity is at least 69%.
[1000] 501. An assay according to the invention, wherein the WID-BC-Index for the individual is about 0.090 or more, the individual is classified as having at least a moderate risk of harbouring breast cancer or a moderate risk of breast cancer development, wherein the set of CpGs comprises at least the CpGs defined by SEQ ID NOs 9501 to 10000 and identified at nucleotide positions 61 to 62, and wherein the sensitivity is at least 62% and specificity is at least 70%.
[1001] 502. An assay according to the invention, wherein the WID-BC-Index for the individual is about 0.090 or more, the individual is classified as having at least a moderate risk of harbouring breast cancer or a moderate risk of breast cancer development, wherein the set of CpGs comprises at least the CpGs defined by SEQ ID NOs 10001 to 10500 and identified at nucleotide positions 61 to 62, and wherein the sensitivity is at least 63% and specificity is at least 69%.
[1002] 503. An assay according to the invention, wherein the WID-BC-Index for the individual is about 0.090 or more, the individual is classified as having at least a moderate risk of harbouring breast cancer or a moderate risk of breast cancer development, wherein the set of CpGs comprises at least the CpGs defined by SEQ ID NOs 10501 to 11000 and identified at nucleotide positions 61 to 62, and wherein the sensitivity is at least 59% and specificity is at least 72%.
[1003] 504. An assay according to the invention, wherein the WID-BC-Index for the individual is about 0.090 or more, the individual is classified as having at least a moderate risk of harbouring breast cancer or a moderate risk of breast cancer development, wherein the set of CpGs comprises at least the CpGs defined by SEQ ID NOs 110001 to 11500 and identified at nucleotide positions 61 to 62, and wherein the sensitivity is at least 73% and specificity is at least 64%.
[1004] 505. An assay according to the invention, wherein the WID-BC-Index for the individual is about 0.090 or more, the individual is classified as having at least a moderate risk of harbouring breast cancer or a moderate risk of breast cancer development, wherein the set of CpGs comprises at least the CpGs defined by SEQ ID NOs 11501 to 12000 and identified at nucleotide positions 61 to 62, and wherein the sensitivity is at least 65% and specificity is at least 64%.
[1005] 506. An assay according to the invention, wherein the WID-BC-Index for the individual is about 0.090 or more, the individual is classified as having at least a moderate risk of harbouring breast cancer or a moderate risk of breast cancer development, wherein the set of CpGs comprises at least the CpGs defined by SEQ ID NOs 12001 to 12500 and identified at nucleotide positions 61 to 62, and wherein the sensitivity is at least 60% and specificity is at least 70%.
[1006] 507. An assay according to the invention, wherein the WID-BC-Index for the individual is about 0.090 or more, the individual is classified as having at least a moderate risk of harbouring breast cancer or a moderate risk of breast cancer development, wherein the set of CpGs comprises at least the CpGs defined by SEQ ID NOs 12501 to 13000 and identified at nucleotide positions 61 to 62, and wherein the sensitivity is at least 66% and specificity is at least 68%.
[1007] 508. An assay according to the invention, wherein the WID-BC-Index for the individual is about 0.090 or more, the individual is classified as having at least a moderate risk of harbouring breast cancer or a moderate risk of breast cancer development, wherein the set of CpGs comprises at least the CpGs defined by SEQ ID NOs 13001 to 13500 and identified at nucleotide positions 61 to 62, and wherein the sensitivity is at least 67% and specificity is at least 69%.
[1008] 509. An assay according to the invention, wherein the WID-BC-Index for the individual is about 0.090 or more, the individual is classified as having at least a moderate risk of harbouring breast cancer or a moderate risk of breast cancer development, wherein the set of CpGs comprises at least the CpGs defined by SEQ ID NOs 13501 to 14000 and identified at nucleotide positions 61 to 62, and wherein the sensitivity is at least 64% and specificity is at least 69%.
[1009] 510. An assay according to the invention, wherein the WID-BC-Index for the individual is about 0.090 or more, the individual is classified as having at least a moderate risk of harbouring breast cancer or a moderate risk of breast cancer development, wherein the set of CpGs comprises at least the CpGs defined by SEQ ID NOs 14001 to 14500 and identified at nucleotide positions 61 to 62, and wherein the sensitivity is at least 62% and specificity is at least 69%.
[1010] 511. An assay according to the invention, wherein the WID-BC-Index for the individual is about 0.090 or more, the individual is classified as having at least a moderate risk of harbouring breast cancer or a moderate risk of breast cancer development, wherein the set of CpGs comprises at least the CpGs defined by SEQ ID NOs 14501 to 15000 and identified at nucleotide positions 61 to 62, and wherein the sensitivity is at least 67% and specificity is at least 68%.
[1011] 512. An assay according to the invention, wherein the WID-BC-Index for the individual is about 0.090 or more, the individual is classified as having at least a moderate risk of harbouring breast cancer or a moderate risk of breast cancer development, wherein the set of CpGs comprises at least the CpGs defined by SEQ ID NOs 15001 to 15500 and identified at nucleotide positions 61 to 62, and wherein the sensitivity is at least 62% and specificity is at least 67%.
[1012] 513. An assay according to the invention, wherein the WID-BC-Index for the individual is about 0.090 or more, the individual is classified as having at least a moderate risk of harbouring breast cancer or a moderate risk of breast cancer development, wherein the set of CpGs comprises at least the CpGs defined by SEQ ID NOs 15501 to 16000 and identified at nucleotide positions 61 to 62, and wherein the sensitivity is at least 64% and specificity is at least 71%.
[1013] 514. An assay according to the invention, wherein the WID-BC-Index for the individual is about 0.090 or more, the individual is classified as having at least a moderate risk of harbouring breast cancer or a moderate risk of breast cancer development, wherein the set of CpGs comprises at least the CpGs defined by SEQ ID NOs 16001 to 16500 and identified at nucleotide positions 61 to 62, and wherein the sensitivity is at least 64% and specificity is at least 68%.
[1014] 515. An assay according to the invention, wherein the WID-BC-Index for the individual is about 0.090 or more, the individual is classified as having at least a moderate risk of harbouring breast cancer or a moderate risk of breast cancer development, wherein the set of CpGs comprises at least the CpGs defined by SEQ ID NOs 16501 to 17000 and identified at nucleotide positions 61 to 62, and wherein the sensitivity is at least 62% and specificity is at least 70%.
[1015] 516. An assay according to the invention, wherein the WID-BC-Index for the individual is about 0.090 or more, the individual is classified as having at least a moderate risk of harbouring breast cancer or a moderate risk of breast cancer development, wherein the set of CpGs comprises at least the CpGs defined by SEQ ID NOs 17001 to 17500 and identified at nucleotide positions 61 to 62, and wherein the sensitivity is at least 64% and specificity is at least 67%.
[1016] 517. An assay according to the invention, wherein the WID-BC-Index for the individual is about 0.090 or more, the individual is classified as having at least a moderate risk of harbouring breast cancer or a moderate risk of breast cancer development, wherein the set of CpGs comprises at least the CpGs defined by SEQ ID NOs 17501 to 18000 and identified at nucleotide positions 61 to 62, and wherein the sensitivity is at least 57% and specificity is at least 71%.
[1017] 518. An assay according to the invention, wherein the WID-BC-Index for the individual is about 0.090 or more, the individual is classified as having at least a moderate risk of harbouring breast cancer or a moderate risk of breast cancer development, wherein the set of CpGs comprises at least the CpGs defined by SEQ ID NOs 18001 to 18500 and identified at nucleotide positions 61 to 62, and wherein the sensitivity is at least 66% and specificity is at least 71%.
[1018] 519. An assay according to the invention, wherein the WID-BC-Index for the individual is about 0.090 or more, the individual is classified as having at least a moderate risk of harbouring breast cancer or a moderate risk of breast cancer development, wherein the set of CpGs comprises at least the CpGs defined by SEQ ID NOs 18501 to 19000 and identified at nucleotide positions 61 to 62, and wherein the sensitivity is at least 49% and specificity is at least 71%.
[1019] 520. An assay according to the invention, wherein the WID-BC-Index for the individual is about 0.090 or more, the individual is classified as having at least a moderate risk of harbouring breast cancer or a moderate risk of breast cancer development, wherein the set of CpGs comprises at least the CpGs defined by SEQ ID NOs 19001 to 19500 and identified at nucleotide positions 61 to 62, and wherein the sensitivity is at least 49% and specificity is at least 73%.
[1020] 521. An assay according to the invention, wherein the WID-BC-Index for the individual is about 0.090 or more, the individual is classified as having at least a moderate risk of harbouring breast cancer or a moderate risk of breast cancer development, wherein the set of CpGs comprises at least the CpGs defined by SEQ ID NOs 19501 to 20000 and identified at nucleotide positions 61 to 62, and wherein the sensitivity is at least 54% and specificity is at least 73%.
[1021] 522. An assay according to the invention, wherein the WID-BC-Index for the individual is about 0.090 or more, the individual is classified as having at least a moderate risk of harbouring breast cancer or a moderate risk of breast cancer development, wherein the set of CpGs comprises at least the CpGs defined by SEQ ID NOs 20001 to 20500 and identified at nucleotide positions 61 to 62, and wherein the sensitivity is at least 56% and specificity is at least 72%.
[1022] 523. An assay according to the invention, wherein the WID-BC-Index for the individual is about 0.090 or more, the individual is classified as having at least a moderate risk of harbouring breast cancer or a moderate risk of breast cancer development, wherein the set of CpGs comprises at least the CpGs defined by SEQ ID NOs 20501 to 21000 and identified at nucleotide positions 61 to 62, and wherein the sensitivity is at least 59% and specificity is at least 73%.
[1023] 524. An assay according to the invention, wherein the WID-BC-Index for the individual is about 0.090 or more, the individual is classified as having at least a moderate risk of harbouring breast cancer or a moderate risk of breast cancer development, wherein the set of CpGs comprises at least the CpGs defined by SEQ ID NOs 21001 to 21500 and identified at nucleotide positions 61 to 62, and wherein the sensitivity is at least 54% and specificity is at least 72%.
[1024] 525. An assay according to the invention, wherein the WID-BC-Index for the individual is about 0.090 or more, the individual is classified as having at least a moderate risk of harbouring breast cancer or a moderate risk of breast cancer development, wherein the set of CpGs comprises at least the CpGs defined by SEQ ID NOs 21501 to 22000 and identified at nucleotide positions 61 to 62, and wherein the sensitivity is at least 56% and specificity is at least 74%.
[1025] 526. An assay according to the invention, wherein the WID-BC-Index for the individual is about 0.090 or more, the individual is classified as having at least a moderate risk of harbouring breast cancer or a moderate risk of breast cancer development, wherein the set of CpGs comprises at least the CpGs defined by SEQ ID NOs 22001 to 22500 and identified at nucleotide positions 61 to 62, and wherein the sensitivity is at least 51% and specificity is at least 74%.
[1026] 527. An assay according to the invention, wherein the WID-BC-Index for the individual is about 0.090 or more, the individual is classified as having at least a moderate risk of harbouring breast cancer or a moderate risk of breast cancer development, wherein the set of CpGs comprises at least the CpGs defined by SEQ ID NOs 22501 to 23000 and identified at nucleotide positions 61 to 62, and wherein the sensitivity is at least 54% and specificity is at least 74%.
[1027] 528. An assay according to the invention, wherein the WID-BC-Index for the individual is about 0.090 or more, the individual is classified as having at least a moderate risk of harbouring breast cancer or a moderate risk of breast cancer development, wherein the set of CpGs comprises at least the CpGs defined by SEQ ID NOs 23001 to 23500 and identified at nucleotide positions 61 to 62, and wherein the sensitivity is at least 53% and specificity is at least 75%.
[1028] 529. An assay according to the invention, wherein the WID-BC-Index for the individual is about 0.090 or more, the individual is classified as having at least a moderate risk of harbouring breast cancer or a moderate risk of breast cancer development, wherein the set of CpGs comprises at least the CpGs defined by SEQ ID NOs 23501 to 24000 and identified at nucleotide positions 61 to 62, and wherein the sensitivity is at least 51% and specificity is at least 72%.
[1029] 530. An assay according to the invention, wherein the WID-BC-Index for the individual is about 0.090 or more, the individual is classified as having at least a moderate risk of harbouring breast cancer or a moderate risk of breast cancer development, wherein the set of CpGs comprises at least the CpGs defined by SEQ ID NOs 24001 to 24500 and identified at nucleotide positions 61 to 62, and wherein the sensitivity is at least 49% and specificity is at least 72%.
[1030] 531. An assay according to the invention, wherein the WID-BC-Index for the individual is about 0.090 or more, the individual is classified as having at least a moderate risk of harbouring breast cancer or a moderate risk of breast cancer development, wherein the set of CpGs comprises at least the CpGs defined by SEQ ID NOs 24501 to 25000 and identified at nucleotide positions 61 to 62, and wherein the sensitivity is at least 49% and specificity is at least 77%.
[1031] 532. An assay according to the invention, wherein the WID-BC-Index for the individual is about 0.090 or more, the individual is classified as having at least a moderate risk of harbouring breast cancer or a moderate risk of breast cancer development, wherein the set of CpGs comprises at least the CpGs defined by SEQ ID NOs 24501 to 25000 and identified at nucleotide positions 61 to 62, and wherein the sensitivity is at least 49% and specificity is at least 77%.
[1032] 533. An assay according to the invention, wherein the WID-BC-Index for the individual is about 0.090 or more, the individual is classified as having at least a moderate risk of harbouring breast cancer or a moderate risk of breast cancer development, wherein the set of CpGs comprises at least the CpGs defined by SEQ ID NOs 25001 to 25500 and identified at nucleotide positions 61 to 62, and wherein the sensitivity is at least 44% and specificity is at least 75%.
[1033] 534. An assay according to the invention, wherein the WID-BC-Index for the individual is about 0.090 or more, the individual is classified as having at least a moderate risk of harbouring breast cancer or a moderate risk of breast cancer development, wherein the set of CpGs comprises at least the CpGs defined by SEQ ID NOs 25501 to 26000 and identified at nucleotide positions 61 to 62, and wherein the sensitivity is at least 45% and specificity is at least 78%.
[1034] 535. An assay according to the invention, wherein the WID-BC-Index for the individual is about 0.090 or more, the individual is classified as having at least a moderate risk of harbouring breast cancer or a moderate risk of breast cancer development, wherein the set of CpGs comprises at least the CpGs defined by SEQ ID NOs 26001 to 26500 and identified at nucleotide positions 61 to 62, and wherein the sensitivity is at least 52% and specificity is at least 76%.
[1035] 536. An assay according to the invention, wherein the WID-BC-Index for the individual is about 0.090 or more, the individual is classified as having at least a moderate risk of harbouring breast cancer or a moderate risk of breast cancer development, wherein the set of CpGs comprises at least the CpGs defined by SEQ ID NOs 26501 to 27000 and identified at nucleotide positions 61 to 62, and wherein the sensitivity is at least 49% and specificity is at least 74%.
[1036] 537. An assay according to the invention, wherein the WID-BC-Index for the individual is about 0.090 or more, the individual is classified as having at least a moderate risk of harbouring breast cancer or a moderate risk of breast cancer development, wherein the set of CpGs comprises at least the CpGs defined by SEQ ID NOs 27001 to 27500 and identified at nucleotide positions 61 to 62, and wherein the sensitivity is at least 49% and specificity is at least 72%.
[1037] 538. An assay according to the invention, wherein the WID-BC-Index for the individual is about 0.090 or more, the individual is classified as having at least a moderate risk of harbouring breast cancer or a moderate risk of breast cancer development, wherein the set of CpGs comprises at least the CpGs defined by SEQ ID NOs 27501 to 28000 and identified at nucleotide positions 61 to 62, and wherein the sensitivity is at least 40% and specificity is at least 76%.
[1038] 539. An assay according to the invention, wherein the WID-BC-Index for the individual is about 0.090 or more, the individual is classified as having at least a moderate risk of harbouring breast cancer or a moderate risk of breast cancer development, wherein the set of CpGs comprises at least the CpGs defined by SEQ ID NOs 28001 to 28500 and identified at nucleotide positions 61 to 62, and wherein the sensitivity is at least 43% and specificity is at least 76%.
[1039] 540. An assay according to the invention, wherein the WID-BC-Index for the individual is about 0.090 or more, the individual is classified as having at least a moderate risk of harbouring breast cancer or a moderate risk of breast cancer development, wherein the set of CpGs comprises at least the CpGs defined by SEQ ID NOs 28501 to 29000 and identified at nucleotide positions 61 to 62, and wherein the sensitivity is at least 43% and specificity is at least 76%.
[1040] 541. An assay according to the invention, wherein the WID-BC-Index for the individual is about 0.090 or more, the individual is classified as having at least a moderate risk of harbouring breast cancer or a moderate risk of breast cancer development, wherein the set of CpGs comprises at least the CpGs defined by SEQ ID NOs 29001 to 29500 and identified at nucleotide positions 61 to 62, and wherein the sensitivity is at least 42% and specificity is at least 76%.
[1041] 542. An assay according to the invention, wherein the WID-BC-Index for the individual is about 0.090 or more, the individual is classified as having at least a moderate risk of harbouring breast cancer or a moderate risk of breast cancer development, wherein the set of CpGs comprises at least the CpGs defined by SEQ ID NOs 29501 to 30000 and identified at nucleotide positions 61 to 62, and wherein the sensitivity is at least 47% and specificity is at least 74%.
[1042] 543. An assay according to the invention, wherein the WID-BC-Index for the individual is about 0.090 or more, the individual is classified as having at least a moderate risk of harbouring breast cancer or a moderate risk of breast cancer development, wherein the set of CpGs comprises at least the CpGs defined by SEQ ID NOs 30001 to 300500 and identified at nucleotide positions 61 to 62, and wherein the sensitivity is at least 44% and specificity is at least 74%.
[1043] 544. An assay according to the invention, wherein the WID-BC-Index for the individual is about 0.090 or more, the individual is classified as having at least a moderate risk of harbouring breast cancer or a moderate risk of breast cancer development, wherein the set of CpGs comprises at least the CpGs defined by SEQ ID NOs 30501 to 31000 and identified at nucleotide positions 61 to 62, and wherein the sensitivity is at least 46% and specificity is at least 76%.
[1044] 545. An assay according to the invention, wherein the WID-BC-Index for the individual is about 0.090 or more, the individual is classified as having at least a moderate risk of harbouring breast cancer or a moderate risk of breast cancer development, wherein the set of CpGs comprises at least the CpGs defined by SEQ ID NOs 31001 to 31500 and identified at nucleotide positions 61 to 62, and wherein the sensitivity is at least 43% and specificity is at least 77%.
[1045] 546. An assay according to the invention, wherein the WID-BC-Index for the individual is about 0.090 or more, the individual is classified as having at least a moderate risk of harbouring breast cancer or a moderate risk of breast cancer development, wherein the set of CpGs comprises at least the CpGs defined by SEQ ID NOs 31501 to 32000 and identified at nucleotide positions 61 to 62, and wherein the sensitivity is at least 47% and specificity is at least 76%.
[1046] 547. An assay according to the invention, wherein the WID-BC-Index for the individual is about 0.090 or more, the individual is classified as having at least a moderate risk of harbouring breast cancer or a moderate risk of breast cancer development, wherein the set of CpGs comprises at least the CpGs defined by SEQ ID NOs 32001 to 32500 and identified at nucleotide positions 61 to 62, and wherein the sensitivity is at least 44% and specificity is at least 76%.
[1047] 548. An assay according to the invention, wherein the WID-BC-Index for the individual is about 0.090 or more, the individual is classified as having at least a moderate risk of harbouring breast cancer or a moderate risk of breast cancer development, wherein the set of CpGs comprises at least the CpGs defined by SEQ ID NOs 32501 to 33000 and identified at nucleotide positions 61 to 62, and wherein the sensitivity is at least 48% and specificity is at least 76%.
[1048] 549. An assay according to the invention, wherein the WID-BC-Index for the individual is about 0.090 or more, the individual is classified as having at least a moderate risk of harbouring breast cancer or a moderate risk of breast cancer development, wherein the set of CpGs comprises at least the CpGs defined by SEQ ID NOs 33001 to 33500 and identified at nucleotide positions 61 to 62, and wherein the sensitivity is at least 42% and specificity is at least 76%.
[1049] 550. An assay according to the invention, wherein the WID-BC-Index for the individual is about 0.090 or more, the individual is classified as having at least a moderate risk of harbouring breast cancer or a moderate risk of breast cancer development, wherein the set of CpGs comprises at least the CpGs defined by SEQ ID NOs 33501 to 34000 and identified at nucleotide positions 61 to 62, and wherein the sensitivity is at least 36% and specificity is at least 77%.
[1050] 551. An assay according to the invention, wherein the WID-BC-Index for the individual is about 0.090 or more, the individual is classified as having at least a moderate risk of harbouring breast cancer or a moderate risk of breast cancer development, wherein the set of CpGs comprises at least the CpGs defined by SEQ ID NOs 34001 to 34500 and identified at nucleotide positions 61 to 62, and wherein the sensitivity is at least 38% and specificity is at least 77%.
[1051] 552. An assay according to the invention, wherein the WID-BC-Index for the individual is about 0.090 or more, the individual is classified as having at least a moderate risk of harbouring breast cancer or a moderate risk of breast cancer development, wherein the set of CpGs comprises at least the CpGs defined by SEQ ID NOs 34501 to 35000 and identified at nucleotide positions 61 to 62, and wherein the sensitivity is at least 41% and specificity is at least 76%.
[1052] 553. An assay according to the invention, wherein the WID-BC-Index for the individual is about 0.090 or more, the individual is classified as having at least a moderate risk of harbouring breast cancer or a moderate risk of breast cancer development, wherein the set of CpGs comprises at least the CpGs defined by SEQ ID NOs 35001 to 35500 and identified at nucleotide positions 61 to 62, and wherein the sensitivity is at least 40% and specificity is at least 76%.
[1053] 554. An assay according to the invention, wherein the WID-BC-Index for the individual is about 0.090 or more, the individual is classified as having at least a moderate risk of harbouring breast cancer or a moderate risk of breast cancer development, wherein the set of CpGs comprises at least the CpGs defined by SEQ ID NOs 35501 to 36000 and identified at nucleotide positions 61 to 62, and wherein the sensitivity is at least 40% and specificity is at least 74%.
[1054] 555. An assay according to the invention, wherein the WID-BC-Index for the individual is about 0.090 or more, the individual is classified as having at least a moderate risk of harbouring breast cancer or a moderate risk of breast cancer development, wherein the set of CpGs comprises at least the CpGs defined by SEQ ID NOs 36001 to 36500 and identified at nucleotide positions 61 to 62, and wherein the sensitivity is at least 38% and specificity is at least 77%.
[1055] 556. An assay according to the invention, wherein the WID-BC-Index for the individual is about 0.090 or more, the individual is classified as having at least a moderate risk of harbouring breast cancer or a moderate risk of breast cancer development, wherein the set of CpGs comprises at least the CpGs defined by SEQ ID NOs 36501 to 37000 and identified at nucleotide positions 61 to 62, and wherein the sensitivity is at least 38% and specificity is at least 78%.
[1056] 557. An assay according to the invention, wherein the WID-BC-Index for the individual is about 0.090 or more, the individual is classified as having at least a moderate risk of harbouring breast cancer or a moderate risk of breast cancer development, wherein the set of CpGs comprises at least the CpGs defined by SEQ ID NOs 37001 to 37500 and identified at nucleotide positions 61 to 62, and wherein the sensitivity is at least 39% and specificity is at least 77%.
[1057] 558. An assay according to the invention, wherein the WID-BC-Index for the individual is about 0.090 or more, the individual is classified as having at least a moderate risk of harbouring breast cancer or a moderate risk of breast cancer development, wherein the set of CpGs comprises at least the CpGs defined by SEQ ID NOs 37501 to 38000 and identified at nucleotide positions 61 to 62, and wherein the sensitivity is at least 39% and specificity is at least 79%.
[1058] 559. An assay according to the invention, wherein the WID-BC-Index for the individual is about 0.090 or more, the individual is classified as having at least a moderate risk of harbouring breast cancer or a moderate risk of breast cancer development, wherein the set of CpGs comprises at least the CpGs defined by SEQ ID NOs 38001 to 38500 and identified at nucleotide positions 61 to 62, and wherein the sensitivity is at least 40% and specificity is at least 75%.
[1059] 560. An assay according to the invention, wherein the WID-BC-Index for the individual is about 0.090 or more, the individual is classified as having at least a moderate risk of harbouring breast cancer or a moderate risk of breast cancer development, wherein the set of CpGs comprises at least the CpGs defined by SEQ ID NOs 38501 to 39000 and identified at nucleotide positions 61 to 62, and wherein the sensitivity is at least 42% and specificity is at least 74%.
[1060] 561. An assay according to the invention, wherein the WID-BC-Index for the individual is about 0.090 or more, the individual is classified as having at least a moderate risk of harbouring breast cancer or a moderate risk of breast cancer development, wherein the set of CpGs comprises at least the CpGs defined by SEQ ID NOs 39001 to 39500 and identified at nucleotide positions 61 to 62, and wherein the sensitivity is at least 35% and specificity is at least 76%.
[1061] 562. An assay according to the invention, wherein the WID-BC-Index for the individual is about 0.090 or more, the individual is classified as having at least a moderate risk of harbouring breast cancer or a moderate risk of breast cancer development, wherein the set of CpGs comprises at least the CpGs defined by SEQ ID NOs 39501 to 40000 and identified at nucleotide positions 61 to 62, and wherein the sensitivity is at least 40% and specificity is at least 73%.
[1062] 563. An assay according to the invention, wherein the WID-BC-Index for the individual is about 0.090 or more, the individual is classified as having at least a moderate risk of harbouring breast cancer or a moderate risk of breast cancer development, wherein the set of CpGs comprises at least the CpGs defined by SEQ ID NOs 40001 to 40500 and identified at nucleotide positions 61 to 62, and wherein the sensitivity is at least 35% and specificity is at least 76%.
[1063] 564. An assay according to the invention, wherein the WID-BC-Index for the individual is about 0.090 or more, the individual is classified as having at least a moderate risk of harbouring breast cancer or a moderate risk of breast cancer development, wherein the set of CpGs comprises at least the CpGs defined by SEQ ID NOs 40501 to 40753 and identified at nucleotide positions 61 to 62, and wherein the sensitivity is at least 37% and specificity is at least 77%.
[1064] 565. An assay according to the invention, wherein the WID-BC-Index for the individual is about 0.587 or more, the individual is classified as having at least a high risk of harbouring breast cancer or a high risk of breast cancer development, wherein the set of CpGs comprises at least the CpGs defined by SEQ ID NOs 1 to 500 and identified at nucleotide positions 61 to 62, and wherein the sensitivity is at least 26% and specificity is at least 93%.
[1065] 566. An assay according to the invention, wherein the WID-BC-Index for the individual is about 0.587 or more, the individual is classified as having at least a high risk of harbouring breast cancer or a high risk of breast cancer development, wherein the set of CpGs comprises at least the CpGs defined by SEQ ID NOs 501 to 1000 and identified at nucleotide positions 61 to 62, and wherein the sensitivity is at least 35% and specificity is at least 90%.
[1066] 567. An assay according to the invention, wherein the WID-BC-Index for the individual is about 0.587 or more, the individual is classified as having at least a high risk of harbouring breast cancer or a high risk of breast cancer development, wherein the set of CpGs comprises at least the CpGs defined by SEQ ID NOs 1001 to 1500 and identified at nucleotide positions 61 to 62, and wherein the sensitivity is at least 39% and specificity is at least 90%.
[1067] 568. An assay according to the invention, wherein the WID-BC-Index for the individual is about 0.587 or more, the individual is classified as having at least a high risk of harbouring breast cancer or a high risk of breast cancer development, wherein the set of CpGs comprises at least the CpGs defined by SEQ ID NOs 1501 to 2000 and identified at nucleotide positions 61 to 62, and wherein the sensitivity is at least 34% and specificity is at least 91%.
[1068] 569. An assay according to the invention, wherein the WID-BC-Index for the individual is about 0.587 or more, the individual is classified as having at least a high risk of harbouring breast cancer or a high risk of breast cancer development, wherein the set of CpGs comprises at least the CpGs defined by SEQ ID NOs 2001 to 2500 and identified at nucleotide positions 61 to 62, and wherein the sensitivity is at least 34% and specificity is at least 89%.
[1069] 570. An assay according to the invention, wherein the WID-BC-Index for the individual is about 0.587 or more, the individual is classified as having at least a high risk of harbouring breast cancer or a high risk of breast cancer development, wherein the set of CpGs comprises at least the CpGs defined by SEQ ID NOs 2501 to 3000 and identified at nucleotide positions 61 to 62, and wherein the sensitivity is at least 33% and specificity is at least 87%.
[1070] 571. An assay according to the invention, wherein the WID-BC-Index for the individual is about 0.587 or more, the individual is classified as having at least a high risk of harbouring breast cancer or a high risk of breast cancer development, wherein the set of CpGs comprises at least the CpGs defined by SEQ ID NOs 3001 to 3500 and identified at nucleotide positions 61 to 62, and wherein the sensitivity is at least 46% and specificity is at least 89%.
[1071] 572. An assay according to the invention, wherein the WID-BC-Index for the individual is about 0.587 or more, the individual is classified as having at least a high risk of harbouring breast cancer or a high risk of breast cancer development, wherein the set of CpGs comprises at least the CpGs defined by SEQ ID NOs 3501 to 4000 and identified at nucleotide positions 61 to 62, and wherein the sensitivity is at least 37% and specificity is at least 89%.
[1072] 573. An assay according to the invention, wherein the WID-BC-Index for the individual is about 0.587 or more, the individual is classified as having at least a high risk of harbouring breast cancer or a high risk of breast cancer development, wherein the set of CpGs comprises at least the CpGs defined by SEQ ID NOs 4001 to 4500 and identified at nucleotide positions 61 to 62, and wherein the sensitivity is at least 46% and specificity is at least 84%.
[1073] 574. An assay according to the invention, wherein the WID-BC-Index for the individual is about 0.587 or more, the individual is classified as having at least a high risk of harbouring breast cancer or a high risk of breast cancer development, wherein the set of CpGs comprises at least the CpGs defined by SEQ ID NOs 4501 to 5000 and identified at nucleotide positions 61 to 62, and wherein the sensitivity is at least 39% and specificity is at least 89%.
[1074] 575. An assay according to the invention, wherein the WID-BC-Index for the individual is about 0.587 or more, the individual is classified as having at least a high risk of harbouring breast cancer or a high risk of breast cancer development, wherein the set of CpGs comprises at least the CpGs defined by SEQ ID NOs 5001 to 5500 and identified at nucleotide positions 61 to 62, and wherein the sensitivity is at least 39% and specificity is at least 86%.
[1075] 576. An assay according to the invention, wherein the WID-BC-Index for the individual is about 0.587 or more, the individual is classified as having at least a high risk of harbouring breast cancer or a high risk of breast cancer development, wherein the set of CpGs comprises at least the CpGs defined by SEQ ID NOs 5501 to 6000 and identified at nucleotide positions 61 to 62, and wherein the sensitivity is at least 32% and specificity is at least 91%.
[1076] 577. An assay according to the invention, wherein the WID-BC-Index for the individual is about 0.587 or more, the individual is classified as having at least a high risk of harbouring breast cancer or a high risk of breast cancer development, wherein the set of CpGs comprises at least the CpGs defined by SEQ ID NOs 6001 to 6500 and identified at nucleotide positions 61 to 62, and wherein the sensitivity is at least 47% and specificity is at least 88%.
[1077] 578. An assay according to the invention, wherein the WID-BC-Index for the individual is about 0.587 or more, the individual is classified as having at least a high risk of harbouring breast cancer or a high risk of breast cancer development, wherein the set of CpGs comprises at least the CpGs defined by SEQ ID NOs 6501 to 7000 and identified at nucleotide positions 61 to 62, and wherein the sensitivity is at least 46% and specificity is at least 87%.
[1078] 579. An assay according to the invention, wherein the WID-BC-Index for the individual is about 0.587 or more, the individual is classified as having at least a high risk of harbouring breast cancer or a high risk of breast cancer development, wherein the set of CpGs comprises at least the CpGs defined by SEQ ID NOs 7001 to 7500 and identified at nucleotide positions 61 to 62, and wherein the sensitivity is at least 27% and specificity is at least 87%.
[1079] 580. An assay according to the invention, wherein the WID-BC-Index for the individual is about 0.587 or more, the individual is classified as having at least a high risk of harbouring breast cancer or a high risk of breast cancer development, wherein the set of CpGs comprises at least the CpGs defined by SEQ ID NOs 7501 to 8000 and identified at nucleotide positions 61 to 62, and wherein the sensitivity is at least 48% and specificity is at least 87%.
[1080] 581. An assay according to the invention, wherein the WID-BC-Index for the individual is about 0.587 or more, the individual is classified as having at least a high risk of harbouring breast cancer or a high risk of breast cancer development, wherein the set of CpGs comprises at least the CpGs defined by SEQ ID NOs 8001 to 8500 and identified at nucleotide positions 61 to 62, and wherein the sensitivity is at least 29% and specificity is at least 87%.
[1081] 582. An assay according to the invention, wherein the WID-BC-Index for the individual is about 0.587 or more, the individual is classified as having at least a high risk of harbouring breast cancer or a high risk of breast cancer development, wherein the set of CpGs comprises at least the CpGs defined by SEQ ID NOs 8501 to 9000 and identified at nucleotide positions 61 to 62, and wherein the sensitivity is at least 37% and specificity is at least 88%.
[1082] 583. An assay according to the invention, wherein the WID-BC-Index for the individual is about 0.587 or more, the individual is classified as having at least a high risk of harbouring breast cancer or a high risk of breast cancer development, wherein the set of CpGs comprises at least the CpGs defined by SEQ ID NOs 9001 to 9500 and identified at nucleotide positions 61 to 62, and wherein the sensitivity is at least 38% and specificity is at least 84%.
[1083] 584. An assay according to the invention, wherein the WID-BC-Index for the individual is about 0.587 or more, the individual is classified as having at least a high risk of harbouring breast cancer or a high risk of breast cancer development, wherein the set of CpGs comprises at least the CpGs defined by SEQ ID NOs 9501 to 10000 and identified at nucleotide positions 61 to 62, and wherein the sensitivity is at least 28% and specificity is at least 88%.
[1084] 585. An assay according to the invention, wherein the WID-BC-Index for the individual is about 0.587 or more, the individual is classified as having at least a high risk of harbouring breast cancer or a high risk of breast cancer development, wherein the set of CpGs comprises at least the CpGs defined by SEQ ID NOs 10001 to 10500 and identified at nucleotide positions 61 to 62, and wherein the sensitivity is at least 31% and specificity is at least 87%.
[1085] 586. An assay according to the invention, wherein the WID-BC-Index for the individual is about 0.587 or more, the individual is classified as having at least a high risk of harbouring breast cancer or a high risk of breast cancer development, wherein the set of CpGs comprises at least the CpGs defined by SEQ ID NOs 10501 to 11000 and identified at nucleotide positions 61 to 62, and wherein the sensitivity is at least 33% and specificity is at least 92%.
[1086] 587. An assay according to the invention, wherein the WID-BC-Index for the individual is about 0.587 or more, the individual is classified as having at least a high risk of harbouring breast cancer or a high risk of breast cancer development, wherein the set of CpGs comprises at least the CpGs defined by SEQ ID NOs 11001 to 11500 and identified at nucleotide positions 61 to 62, and wherein the sensitivity is at least 54% and specificity is at least 86%.
[1087] 588. An assay according to the invention, wherein the WID-BC-Index for the individual is about 0.587 or more, the individual is classified as having at least a high risk of harbouring breast cancer or a high risk of breast cancer development, wherein the set of CpGs comprises at least the CpGs defined by SEQ ID NOs 11501 to 12000 and identified at nucleotide positions 61 to 62, and wherein the sensitivity is at least 41% and specificity is at least 81%.
[1088] 589. An assay according to the invention, wherein the WID-BC-Index for the individual is about 0.587 or more, the individual is classified as having at least a high risk of harbouring breast cancer or a high risk of breast cancer development, wherein the set of CpGs comprises at least the CpGs defined by SEQ ID NOs 12001 to 12500 and identified at nucleotide positions 61 to 62, and wherein the sensitivity is at least 39% and specificity is at least 87%.
[1089] 590. An assay according to the invention, wherein the WID-BC-Index for the individual is about 0.587 or more, the individual is classified as having at least a high risk of harbouring breast cancer or a high risk of breast cancer development, wherein the set of CpGs comprises at least the CpGs defined by SEQ ID NOs 12501 to 13000 and identified at nucleotide positions 61 to 62, and wherein the sensitivity is at least 33% and specificity is at least 89%.
[1090] 591. An assay according to the invention, wherein the WID-BC-Index for the individual is about 0.587 or more, the individual is classified as having at least a high risk of harbouring breast cancer or a high risk of breast cancer development, wherein the set of CpGs comprises at least the CpGs defined by SEQ ID NOs 13001 to 13500 and identified at nucleotide positions 61 to 62, and wherein the sensitivity is at least 45% and specificity is at least 87%.
[1091] 592. An assay according to the invention, wherein the WID-BC-Index for the individual is about 0.587 or more, the individual is classified as having at least a high risk of harbouring breast cancer or a high risk of breast cancer development, wherein the set of CpGs comprises at least the CpGs defined by SEQ ID NOs 13501 to 14000 and identified at nucleotide positions 61 to 62, and wherein the sensitivity is at least 45% and specificity is at least 87%.
[1092] 593. An assay according to the invention, wherein the WID-BC-Index for the individual is about 0.587 or more, the individual is classified as having at least a high risk of harbouring breast cancer or a high risk of breast cancer development, wherein the set of CpGs comprises at least the CpGs defined by SEQ ID NOs 14001 to 14500 and identified at nucleotide positions 61 to 62, and wherein the sensitivity is at least 42% and specificity is at least 87%.
[1093] 594. An assay according to the invention, wherein the WID-BC-Index for the individual is about 0.587 or more, the individual is classified as having at least a high risk of harbouring breast cancer or a high risk of breast cancer development, wherein the set of CpGs comprises at least the CpGs defined by SEQ ID NOs 14501 to 15000 and identified at nucleotide positions 61 to 62, and wherein the sensitivity is at least 39% and specificity is at least 85%.
[1094] 595. An assay according to the invention, wherein the WID-BC-Index for the individual is about 0.587 or more, the individual is classified as having at least a high risk of harbouring breast cancer or a high risk of breast cancer development, wherein the set of CpGs comprises at least the CpGs defined by SEQ ID NOs 15001 to 15500 and identified at nucleotide positions 61 to 62, and wherein the sensitivity is at least 39% and specificity is at least 86%.
[1095] 596. An assay according to the invention, wherein the WID-BC-Index for the individual is about 0.587 or more, the individual is classified as having at least a high risk of harbouring breast cancer or a high risk of breast cancer development, wherein the set of CpGs comprises at least the CpGs defined by SEQ ID NOs 15501 to 16000 and identified at nucleotide positions 61 to 62, and wherein the sensitivity is at least 41% and specificity is at least 85%.
[1096] 597. An assay according to the invention, wherein the WID-BC-Index for the individual is about 0.587 or more, the individual is classified as having at least a high risk of harbouring breast cancer or a high risk of breast cancer development, wherein the set of CpGs comprises at least the CpGs defined by SEQ ID NOs 16001 to 16500 and identified at nucleotide positions 61 to 62, and wherein the sensitivity is at least 42% and specificity is at least 86%.
[1097] 598. An assay according to the invention, wherein the WID-BC-Index for the individual is about 0.587 or more, the individual is classified as having at least a high risk of harbouring breast cancer or a high risk of breast cancer development, wherein the set of CpGs comprises at least the CpGs defined by SEQ ID NOs 16501 to 17000 and identified at nucleotide positions 61 to 62, and wherein the sensitivity is at least 32% and specificity is at least 88%.
[1098] 599. An assay according to the invention, wherein the WID-BC-Index for the individual is about 0.587 or more, the individual is classified as having at least a high risk of harbouring breast cancer or a high risk of breast cancer development, wherein the set of CpGs comprises at least the CpGs defined by SEQ ID NOs 17001 to 17500 and identified at nucleotide positions 61 to 62, and wherein the sensitivity is at least 38% and specificity is at least 84%.
[1099] 600. An assay according to the invention, wherein the WID-BC-Index for the individual is about 0.587 or more, the individual is classified as having at least a high risk of harbouring breast cancer or a high risk of breast cancer development, wherein the set of CpGs comprises at least the CpGs defined by SEQ ID NOs 17501 to 18000 and identified at nucleotide positions 61 to 62, and wherein the sensitivity is at least 33% and specificity is at least 86%.
[1100] 601. An assay according to the invention, wherein the WID-BC-Index for the individual is about 0.587 or more, the individual is classified as having at least a high risk of harbouring breast cancer or a high risk of breast cancer development, wherein the set of CpGs comprises at least the CpGs defined by SEQ ID NOs 18001 to 18500 and identified at nucleotide positions 61 to 62, and wherein the sensitivity is at least 35% and specificity is at least 86%.
[1101] 602. An assay according to the invention, wherein the WID-BC-Index for the individual is about 0.587 or more, the individual is classified as having at least a high risk of harbouring breast cancer or a high risk of breast cancer development, wherein the set of CpGs comprises at least the CpGs defined by SEQ ID NOs 18501 to 19000 and identified at nucleotide positions 61 to 62, and wherein the sensitivity is at least 31% and specificity is at least 86%.
[1102] 603. An assay according to the invention, wherein the WID-BC-Index for the individual is about 0.587 or more, the individual is classified as having at least a high risk of harbouring breast cancer or a high risk of breast cancer development, wherein the set of CpGs comprises at least the CpGs defined by SEQ ID NOs 19001 to 19500 and identified at nucleotide positions 61 to 62, and wherein the sensitivity is at least 33% and specificity is at least 86%.
[1103] 604. An assay according to the invention, wherein the WID-BC-Index for the individual is about 0.587 or more, the individual is classified as having at least a high risk of harbouring breast cancer or a high risk of breast cancer development, wherein the set of CpGs comprises at least the CpGs defined by SEQ ID NOs 19501 to 20000 and identified at nucleotide positions 61 to 62, and wherein the sensitivity is at least 31% and specificity is at least 86%.
[1104] 605. An assay according to the invention, wherein the WID-BC-Index for the individual is about 0.587 or more, the individual is classified as having at least a high risk of harbouring breast cancer or a high risk of breast cancer development, wherein the set of CpGs comprises at least the CpGs defined by SEQ ID NOs 20001 to 20500 and identified at nucleotide positions 61 to 62, and wherein the sensitivity is at least 36% and specificity is at least 86%.
[1105] 606. An assay according to the invention, wherein the WID-BC-Index for the individual is about 0.587 or more, the individual is classified as having at least a high risk of harbouring breast cancer or a high risk of breast cancer development, wherein the set of CpGs comprises at least the CpGs defined by SEQ ID NOs 20501 to 21000 and identified at nucleotide positions 61 to 62, and wherein the sensitivity is at least 34% and specificity is at least 85%.
[1106] 607. An assay according to the invention, wherein the WID-BC-Index for the individual is about 0.587 or more, the individual is classified as having at least a high risk of harbouring breast cancer or a high risk of breast cancer development, wherein the set of CpGs comprises at least the CpGs defined by SEQ ID NOs 21001 to 21500 and identified at nucleotide positions 61 to 62, and wherein the sensitivity is at least 29% and specificity is at least 88%.
[1107] 608. An assay according to the invention, wherein the WID-BC-Index for the individual is about 0.587 or more, the individual is classified as having at least a high risk of harbouring breast cancer or a high risk of breast cancer development, wherein the set of CpGs comprises at least the CpGs defined by SEQ ID NOs 21501 to 22000 and identified at nucleotide positions 61 to 62, and wherein the sensitivity is at least 28% and specificity is at least 87%.
[1108] 609. An assay according to the invention, wherein the WID-BC-Index for the individual is about 0.587 or more, the individual is classified as having at least a high risk of harbouring breast cancer or a high risk of breast cancer development, wherein the set of CpGs comprises at least the CpGs defined by SEQ ID NOs 22001 to 22500 and identified at nucleotide positions 61 to 62, and wherein the sensitivity is at least 27% and specificity is at least 86%.
[1109] 610. An assay according to the invention, wherein the WID-BC-Index for the individual is about 0.587 or more, the individual is classified as having at least a high risk of harbouring breast cancer or a high risk of breast cancer development, wherein the set of CpGs comprises at least the CpGs defined by SEQ ID NOs 22501 to 23000 and identified at nucleotide positions 61 to 62, and wherein the sensitivity is at least 33% and specificity is at least 87%.
[1110] 611. An assay according to the invention, wherein the WID-BC-Index for the individual is about 0.587 or more, the individual is classified as having at least a high risk of harbouring breast cancer or a high risk of breast cancer development, wherein the set of CpGs comprises at least the CpGs defined by SEQ ID NOs 23001 to 23500 and identified at nucleotide positions 61 to 62, and wherein the sensitivity is at least 31% and specificity is at least 85%.
[1111] 612. An assay according to the invention, wherein the WID-BC-Index for the individual is about 0.587 or more, the individual is classified as having at least a high risk of harbouring breast cancer or a high risk of breast cancer development, wherein the set of CpGs comprises at least the CpGs defined by SEQ ID NOs 23501 to 24000 and identified at nucleotide positions 61 to 62, and wherein the sensitivity is at least 31% and specificity is at least 86%.
[1112] 613. An assay according to the invention, wherein the WID-BC-Index for the individual is about 0.587 or more, the individual is classified as having at least a high risk of harbouring breast cancer or a high risk of breast cancer development, wherein the set of CpGs comprises at least the CpGs defined by SEQ ID NOs 24001 to 24500 and identified at nucleotide positions 61 to 62, and wherein the sensitivity is at least 36% and specificity is at least 86.
[1113] 614. An assay according to the invention, wherein the WID-BC-Index for the individual is about 0.587 or more, the individual is classified as having at least a high risk of harbouring breast cancer or a high risk of breast cancer development, wherein the set of CpGs comprises at least the CpGs defined by SEQ ID NOs 24501 to 25000 and identified at nucleotide positions 61 to 62, and wherein the sensitivity is at least 26% and specificity is at least 87%.
[1114] 615. An assay according to the invention, wherein the WID-BC-Index for the individual is about 0.587 or more, the individual is classified as having at least a high risk of harbouring breast cancer or a high risk of breast cancer development, wherein the set of CpGs comprises at least the CpGs defined by SEQ ID NOs 25001 to 25500 and identified at nucleotide positions 61 to 62, and wherein the sensitivity is at least 26% and specificity is at least 87%.
[1115] 616. An assay according to the invention, wherein the WID-BC-Index for the individual is about 0.587 or more, the individual is classified as having at least a high risk of harbouring breast cancer or a high risk of breast cancer development, wherein the set of CpGs comprises at least the CpGs defined by SEQ ID NOs 25501 to 26000 and identified at nucleotide positions 61 to 62, and wherein the sensitivity is at least 25% and specificity is at least 86%.
[1116] 617. An assay according to the invention, wherein the WID-BC-Index for the individual is about 0.587 or more, the individual is classified as having at least a high risk of harbouring breast cancer or a high risk of breast cancer development, wherein the set of CpGs comprises at least the CpGs defined by SEQ ID NOs 26001 to 26500 and identified at nucleotide positions 61 to 62, and wherein the sensitivity is at least 27% and specificity is at least 87%.
[1117] 618. An assay according to the invention, wherein the WID-BC-Index for the individual is about 0.587 or more, the individual is classified as having at least a high risk of harbouring breast cancer or a high risk of breast cancer development, wherein the set of CpGs comprises at least the CpGs defined by SEQ ID NOs 26501 to 27000 and identified at nucleotide positions 61 to 62, and wherein the sensitivity is at least 26% and specificity is at least 86%.
[1118] 619. An assay according to the invention, wherein the WID-BC-Index for the individual is about 0.587 or more, the individual is classified as having at least a high risk of harbouring breast cancer or a high risk of breast cancer development, wherein the set of CpGs comprises at least the CpGs defined by SEQ ID NOs 27001 to 27500 and identified at nucleotide positions 61 to 62, and wherein the sensitivity is at least 29% and specificity is at least 87%.
[1119] 620. An assay according to the invention, wherein the WID-BC-Index for the individual is about 0.587 or more, the individual is classified as having at least a high risk of harbouring breast cancer or a high risk of breast cancer development, wherein the set of CpGs comprises at least the CpGs defined by SEQ ID NOs 27501 to 28000 and identified at nucleotide positions 61 to 62, and wherein the sensitivity is at least 25% and specificity is at least 87%.
[1120] 621. An assay according to the invention, wherein the WID-BC-Index for the individual is about 0.587 or more, the individual is classified as having at least a high risk of harbouring breast cancer or a high risk of breast cancer development, wherein the set of CpGs comprises at least the CpGs defined by SEQ ID NOs 28001 to 28500 and identified at nucleotide positions 61 to 62, and wherein the sensitivity is at least 25% and specificity is at least 87%.
[1121] 622. An assay according to the invention, wherein the WID-BC-Index for the individual is about 0.587 or more, the individual is classified as having at least a high risk of harbouring breast cancer or a high risk of breast cancer development, wherein the set of CpGs comprises at least the CpGs defined by SEQ ID NOs 28501 to 29000 and identified at nucleotide positions 61 to 62, and wherein the sensitivity is at least 26% and specificity is at least 86%.
[1122] 623. An assay according to the invention, wherein the WID-BC-Index for the individual is about 0.587 or more, the individual is classified as having at least a high risk of harbouring breast cancer or a high risk of breast cancer development, wherein the set of CpGs comprises at least the CpGs defined by SEQ ID NOs 29001 to 29500 and identified at nucleotide positions 61 to 62, and wherein the sensitivity is at least 24% and specificity is at least 86%.
[1123] 624. An assay according to the invention, wherein the WID-BC-Index for the individual is about 0.587 or more, the individual is classified as having at least a high risk of harbouring breast cancer or a high risk of breast cancer development, wherein the set of CpGs comprises at least the CpGs defined by SEQ ID NOs 29501 to 30000 and identified at nucleotide positions 61 to 62, and wherein the sensitivity is at least 27% and specificity is at least 87%.
[1124] 625. An assay according to the invention, wherein the WID-BC-Index for the individual is about 0.587 or more, the individual is classified as having at least a high risk of harbouring breast cancer or a high risk of breast cancer development, wherein the set of CpGs comprises at least the CpGs defined by SEQ ID NOs 30001 to 30500 and identified at nucleotide positions 61 to 62, and wherein the sensitivity is at least 25% and specificity is at least 87%.
[1125] 626. An assay according to the invention, wherein the WID-BC-Index for the individual is about 0.587 or more, the individual is classified as having at least a high risk of harbouring breast cancer or a high risk of breast cancer development, wherein the set of CpGs comprises at least the CpGs defined by SEQ ID NOs 30501 to 31000 and identified at nucleotide positions 61 to 62, and wherein the sensitivity is at least 25% and specificity is at least 87%.
[1126] 627. An assay according to the invention, wherein the WID-BC-Index for the individual is about 0.587 or more, the individual is classified as having at least a high risk of harbouring breast cancer or a high risk of breast cancer development, wherein the set of CpGs comprises at least the CpGs defined by SEQ ID NOs 31001 to 31500 and identified at nucleotide positions 61 to 62, and wherein the sensitivity is at least 26% and specificity is at least 88%.
[1127] 628. An assay according to the invention, wherein the WID-BC-Index for the individual is about 0.587 or more, the individual is classified as having at least a high risk of harbouring breast cancer or a high risk of breast cancer development, wherein the set of CpGs comprises at least the CpGs defined by SEQ ID NOs 31501 to 32000 and identified at nucleotide positions 61 to 62, and wherein the sensitivity is at least 27% and specificity is at least 87%.
[1128] 629. An assay according to the invention, wherein the WID-BC-Index for the individual is about 0.587 or more, the individual is classified as having at least a high risk of harbouring breast cancer or a high risk of breast cancer development, wherein the set of CpGs comprises at least the CpGs defined by SEQ ID NOs 32001 to 32500 and identified at nucleotide positions 61 to 62, and wherein the sensitivity is at least 27% and specificity is at least 86%.
[1129] 630. An assay according to the invention, wherein the WID-BC-Index for the individual is about 0.587 or more, the individual is classified as having at least a high risk of harbouring breast cancer or a high risk of breast cancer development, wherein the set of CpGs comprises at least the CpGs defined by SEQ ID NOs 32501 to 33000 and identified at nucleotide positions 61 to 62, and wherein the sensitivity is at least 28% and specificity is at least 86%.
[1130] 631. An assay according to the invention, wherein the WID-BC-Index for the individual is about 0.587 or more, the individual is classified as having at least a high risk of harbouring breast cancer or a high risk of breast cancer development, wherein the set of CpGs comprises at least the CpGs defined by SEQ ID NOs 33001 to 33500 and identified at nucleotide positions 61 to 62, and wherein the sensitivity is at least 25% and specificity is at least 88%.
[1131] 632. An assay according to the invention, wherein the WID-BC-Index for the individual is about 0.587 or more, the individual is classified as having at least a high risk of harbouring breast cancer or a high risk of breast cancer development, wherein the set of CpGs comprises at least the CpGs defined by SEQ ID NOs 33501 to 34000 and identified at nucleotide positions 61 to 62, and wherein the sensitivity is at least 26% and specificity is at least 89%.
[1132] 633. An assay according to the invention, wherein the WID-BC-Index for the individual is about 0.587 or more, the individual is classified as having at least a high risk of harbouring breast cancer or a high risk of breast cancer development, wherein the set of CpGs comprises at least the CpGs defined by SEQ ID NOs 34001 to 34500 and identified at nucleotide positions 61 to 62, and wherein the sensitivity is at least 24% and specificity is at least 88%.
[1133] 634. An assay according to the invention, wherein the WID-BC-Index for the individual is about 0.587 or more, the individual is classified as having at least a high risk of harbouring breast cancer or a high risk of breast cancer development, wherein the set of CpGs comprises at least the CpGs defined by SEQ ID NOs 34501 to 35000 and identified at nucleotide positions 61 to 62, and wherein the sensitivity is at least 26% and specificity is at least 88%.
[1134] 635. An assay according to the invention, wherein the WID-BC-Index for the individual is about 0.587 or more, the individual is classified as having at least a high risk of harbouring breast cancer or a high risk of breast cancer development, wherein the set of CpGs comprises at least the CpGs defined by SEQ ID NOs 35001 to 35500 and identified at nucleotide positions 61 to 62, and wherein the sensitivity is at least 26% and specificity is at least 87%.
[1135] 636. An assay according to the invention, wherein the WID-BC-Index for the individual is about 0.587 or more, the individual is classified as having at least a high risk of harbouring breast cancer or a high risk of breast cancer development, wherein the set of CpGs comprises at least the CpGs defined by SEQ ID NOs 35501 to 36000 and identified at nucleotide positions 61 to 62, and wherein the sensitivity is at least 26% and specificity is at least 86%.
[1136] 637. An assay according to the invention, wherein the WID-BC-Index for the individual is about 0.587 or more, the individual is classified as having at least a high risk of harbouring breast cancer or a high risk of breast cancer development, wherein the set of CpGs comprises at least the CpGs defined by SEQ ID NOs 36001 to 36500 and identified at nucleotide positions 61 to 62, and wherein the sensitivity is at least 24% and specificity is at least 86%.
[1137] 638. An assay according to the invention, wherein the WID-BC-Index for the individual is about 0.587 or more, the individual is classified as having at least a high risk of harbouring breast cancer or a high risk of breast cancer development, wherein the set of CpGs comprises at least the CpGs defined by SEQ ID NOs 36501 to 37000 and identified at nucleotide positions 61 to 62, and wherein the sensitivity is at least 27% and specificity is at least 88%.
[1138] 639. An assay according to the invention, wherein the WID-BC-Index for the individual is about 0.587 or more, the individual is classified as having at least a high risk of harbouring breast cancer or a high risk of breast cancer development, wherein the set of CpGs comprises at least the CpGs defined by SEQ ID NOs 37001 to 37500 and identified at nucleotide positions 61 to 62, and wherein the sensitivity is at least 26% and specificity is at least 87%.
[1139] 640. An assay according to the invention, wherein the WID-BC-Index for the individual is about 0.587 or more, the individual is classified as having at least a high risk of harbouring breast cancer or a high risk of breast cancer development, wherein the set of CpGs comprises at least the CpGs defined by SEQ ID NOs 37501 to 38000 and identified at nucleotide positions 61 to 62, and wherein the sensitivity is at least 24% and specificity is at least 87%.
[1140] 641. An assay according to the invention, wherein the WID-BC-Index for the individual is about 0.587 or more, the individual is classified as having at least a high risk of harbouring breast cancer or a high risk of breast cancer development, wherein the set of CpGs comprises at least the CpGs defined by SEQ ID NOs 38001 to 38500 and identified at nucleotide positions 61 to 62, and wherein the sensitivity is at least 27% and specificity is at least 87%.
[1141] 642. An assay according to the invention, wherein the WID-BC-Index for the individual is about 0.587 or more, the individual is classified as having at least a high risk of harbouring breast cancer or a high risk of breast cancer development, wherein the set of CpGs comprises at least the CpGs defined by SEQ ID NOs 38501 to 39000 and identified at nucleotide positions 61 to 62, and wherein the sensitivity is at least 26% and specificity is at least 87%.
[1142] 643. An assay according to the invention, wherein the WID-BC-Index for the individual is about 0.587 or more, the individual is classified as having at least a high risk of harbouring breast cancer or a high risk of breast cancer development, wherein the set of CpGs comprises at least the CpGs defined by SEQ ID NOs 39001 to 39500 and identified at nucleotide positions 61 to 62, and wherein the sensitivity is at least 25% and specificity is at least 87%.
[1143] 644. An assay according to the invention, wherein the WID-BC-Index for the individual is about 0.587 or more, the individual is classified as having at least a high risk of harbouring breast cancer or a high risk of breast cancer development, wherein the set of CpGs comprises at least the CpGs defined by SEQ ID NOs 39501 to 40000 and identified at nucleotide positions 61 to 62, and wherein the sensitivity is at least 25% and specificity is at least 87%.
[1144] 645. An assay according to the invention, wherein the WID-BC-Index for the individual is about 0.587 or more, the individual is classified as having at least a high risk of harbouring breast cancer or a high risk of breast cancer development, wherein the set of CpGs comprises at least the CpGs defined by SEQ ID NOs 40001 to 40500 and identified at nucleotide positions 61 to 62, and wherein the sensitivity is at least 25% and specificity is at least 87%.
[1145] 646. An assay according to the invention, wherein the WID-BC-Index for the individual is about 0.587 or more, the individual is classified as having at least a high risk of harbouring breast cancer or a high risk of breast cancer development, wherein the set of CpGs comprises at least the CpGs defined by SEQ ID NOs 40501 to 40753 and identified at nucleotide positions 61 to 62, and wherein the sensitivity is at least 24% and specificity is at least 87%.

### MAIN REFERENCES

[1146] (denoted in main text by superscript numbering)
[1147] 1 Harbeck, N. & Gnant, M. Breast cancer. Lancet 389, 1134-1150, doi:10.1016/S0140-6736(16)31891-8 (2017).
[1148] 2 Warner, E. Clinical practice. Breast-cancer screening. N. Engl. J. Med 365, 1025-1032, doi:10.1056/NEJMcp1101540 [doi] (2011).
[1149] 3 Shen, S. Y. et al. Sensitive tumour detection and classification using plasma cell-free DNA methylomes. Nature 563, 579-583, doi:10.1038/s41586-018-0703-0 (2018).
[1150] 4 Widschwendter, M. et al. Methylation patterns in serum DNA for early identification of disseminated breast cancer. Genome Med 9, 115, doi:10.1186/s13073-017-0499-9 (2017).
[1151] 5 Autier, P. & Boniol, M. Mammography screening: A major issue in medicine. Eur J Cancer 90, 34-62, doi:10.1016/j.ejca.2017.11.002 (2018).
[1152] 6 Gail, M. H. & Pfeiffer, R. M. Breast Cancer Risk Model Requirements for Counseling, Prevention, and Screening. J Natl Cancer Inst 110, 994-1002, doi:10.1093/jnci/djy013 (2018).
[1153] 7 Cohen, P. A., Jhingran, A., Oaknin, A. & Denny, L. Cervical cancer. Lancet 393, 169-182, doi:10.1016/50140-6736(18)32470-X (2019).
[1154] 8 Polman, N. J. et al. Performance of human papillomavirus testing on self-collected versus clinician-collected samples for the detection of cervical intraepithelial neoplasia of grade 2 or worse: a randomised, paired screen-positive, non-inferiority trial. Lancet Oncol 20, 229-238, doi:10.1016/S1470-2045(18)30763-0 (2019).
[1155] 9 Teschendorff, A. E. et al. DNA methylation outliers in normal breast tissue identify field defects that are enriched in cancer. Nat. Commun 7, 10478, doi:ncomms10478 [pii]; 10.1038/ncomms10478 [doi] (2016).
[1156] 10 Lichtenstein, P. et al. Environmental and heritable factors in the causation of cancer—analyses of cohorts of twins from Sweden, Denmark, and Finland. N. Engl. J. Med 343, 78-85 (2000).
[1157] 11 Ambatipudi, S. et al. DNA methylome analysis identifies accelerated epigenetic ageing associated with postmenopausal breast cancer susceptibility. Eur J Cancer 75, 299-307, doi:10.1016/j.ejca.2017.01.014 (2017).
[1158] 12 Anjum, S. et al. A BRCA1-mutation associated DNA methylation signature in blood cells predicts sporadic breast cancer incidence and survival. Genome Med 6, 47, doi:10.1186/gm567 [doi]; gm567 [pii] (2014).
[1159] 13 Severi, G. et al. Epigenome-wide methylation in DNA from peripheral blood as a marker of risk for breast cancer. Breast Cancer Res Treat 148, 665-673, doi:10.1007/s10549-014-3209-y (2014).
[1160] 14 van Veldhoven, K. et al. Epigenome-wide association study reveals decreased average methylation levels years before breast cancer diagnosis. Clin Epigenetics 7, 67, doi:10.1186/s13148-015-0104-2 (2015).
[1161] 15 Xu, Z. et al. Epigenome-wide association study of breast cancer using prospectively collected sister study samples. J Natl. Cancer Inst 105, 694-700, doi:djt045 [pii]; 10.1093/jnci/djt045 [doi] (2013).
[1162] 16 Brennan, K. et al. Intragenic ATM methylation in peripheral blood DNA as a biomarker of breast cancer risk. Cancer Res, doi:0008-5472.CAN-11-3157 [pii]; 10.1158/0008-5472.CAN-11-3157 [doi] (2012).
[1163] 17 Widschwendter, M. et al. Epigenome-based cancer risk prediction: rationale, opportunities and challenges. Nat Rev Clin Oncol, doi:10.1038/nrclinonc.2018.30 (2018).
[1164] 18 Pidsley, R. et al. Critical evaluation of the Illumina MethylationEPIC BeadChip microarray for whole-genome DNA methylation profiling. Genome Biol 17, 208, doi:10.1186/s13059-016-1066-1 (2016).
[1165] 19 Zheng, S. C. et al. A novel cell-type deconvolution algorithm reveals substantial contamination by immune cells in saliva, buccal and cervix. Epigenomics, doi:10.2217/epi-2018-0037 (2018).
[1166] 20 Breeze, C. E. et al. eFORGE: A Tool for Identifying Cell Type-Specific Signal in Epigenomic Data. Cell Rep 17, 2137-2150, doi:10.1016/j.celrep.2016.10.059 (2016).
[1167] 21 Subramanian, A. et al. Gene set enrichment analysis: a knowledge-based approach for interpreting genome-wide expression profiles. Proc. Natl. Acad. Sci. U. S. A 102, 15545-15550 (2005).
[1168] 22 Mavaddat, N. et al. Polygenic Risk Scores for Prediction of Breast Cancer and Breast Cancer Subtypes. Am J Hum Genet 104, 21-34, doi:10.1016/j.ajhg.2018.11.002 (2019).
[1169] 23 Feinberg, A. P., Koldobskiy, M. A. & Gondor, A. Epigenetic modulators, modifiers and mediators in cancer aetiology and progression. Nat Rev Genet 17, 284-299, doi:10.1038/nrg.2016.13 (2016).
[1170] 24 Salhab, A. et al. A comprehensive analysis of 195 DNA methylomes reveals shared and cell-specific features of partially methylated domains. Genome Biol 19, 150, doi:10.1186/s13059-018-1510-5 (2018).
[1171] 25 Rivenbark, A. G. & Coleman, W. B. Field cancerization in mammary carcinogenesis—Implications for prevention and treatment of breast cancer. Exp Mot Pathol 93, 391-398, doi:10.1016/j.yexmp.2012.10.018 (2012).
[1172] 26 Haggie, J. A., Sellwood, R. A., Howell, A., Birch, J. M. & Schor, S. L. Fibroblasts from relatives of patients with hereditary breast cancer show fetal-like behaviour in vitro. Lancet 1, 1455-1457 (1987).
[1173] 27 Purcell, S. et al. PLINK: a tool set for whole-genome association and population-based linkage analyses. Am J Hum Genet 81, 559-575, doi:10.1086/519795 (2007).
[1174] 28 Manichaikul, A. et al. Robust relationship inference in genome-wide association studies. Bioinformatics 26, 2867-2873, doi:10.1093/bioinformatics/btq559 (2010).
[1175] 29 Das, S. et al. Next-generation genotype imputation service and methods. Nat Genet 48, 1284-1287, doi:10.1038/ng.3656 (2016).
[1176] 30 Michailidou, K. et al. Association analysis identifies 65 new breast cancer risk loci. Nature 551, 92-94, doi:10.1038/nature24284 (2017).

### SUPPLEMENTARY REFERENCES

[1177] (denoted in main text by double square brackets [[ ]])
[1178] [[1]]. Olkhov-Mitsel, E and Bapat, B: Strategies for discovery and validation of methylated and hydroxymethylated DNA biomarkers. Cancer Medicine 2012, 1(2): 237-260.
[1179] [[2]]. Herman, J. G., Graff, J. R., Myohanen, S., Nelkin, B. D. & Baylin, S. B.: Methylation-specific PCR: a novel PCR assay for methylation status of CpG islands. Proc. Natl Acad. Sci. USA 1996, 93: 9821-9826.
[1180] [[3]]. Frommer, M. et al.: A genomic sequencing protocol that yields a positive display of 5-methylcytosine residues in individual DNA strands. Proc. Natl Acad. Sci. USA 1992, 89: 1827-1831.
[1181] [[4]]. Xiong, Z. & Laird, P. W.: COBRA: a sensitive and quantitative DNA methylation assay. Nucleic Acids Res. 1997, 25: 2532-2534.
[1182] [[5]]. Gonzalgo, M. L. & Jones, P. A.: Rapid quantitation of methylation differences at specific sites using methylationsensitive single nucleotide primer extension (Ms-SNuPE). Nucleic Acids Res. 1997, 25: 2529-2531.
[1183] [[6]]. Paul D S, Guilhamon P, Karpathakis A, Butcher L M, Thirlwell C, Feber A, Beck S: Assessment of RainDrop BS-seq as a method for large-scale, targeted bisulfite sequencing. Epigenetics 2014, 9.
[1184] [[7]]. Singal, R. & Grimes, S. R.: Microsoft Word macro for analysis of cytosine methylation by the bisulfite deamination reaction. Biotechniques 2001, 30: 116-120.
[1185] [[8]]. Anbazhagan, R., Herman, J. G., Enika, K. & Gabrielson, E.: Spreadsheet-based program for the analysis of DNA methylation. Biotechniques 2001, 30: 110-114.
[1186] [[9]]. Li, L. C. & Dahiya, R.: MethPrimer: designing primers for methylation PCRs. Bioinformatics 2002, 18: 1427-1431.
[1187] [[10]]. Eng, J: Receiver Operating Characteristic Analysis: A Primer. Academic Radiology 2005, 12(7): 909-916.

The application's sequence listing, which the Patent Office published only in electronic form, follows.

SEQUENCE LISTING (40753 sequences)

SEQ ID NO: 1 - DNA, 122 bp, Homo sapiens
  misc_feature (61)..(62): /note="This region represents a CpG dinucleotide"
  misc_feature (61)..(61): /note="Nucleotide may be methylated to form 5-methylcytosine"
gccgcgcagttccgtgcagaggggcggccggcgcgccagctgctcgggctcaagtagcgccgcctggcaatcctgtgcctcaggcgggcccagggtgtccaggggctcccagtcggccagcg

SEQ ID NO: 2 - DNA, 122 bp, Homo sapiens
  misc_feature (61)..(62): /note="This region represents a CpG dinucleotide"
  misc_feature (61)..(61): /note="Nucleotide may be methylated to form 5-methylcytosine"
gggggggagagctgggaatggttcactccattagaagggggcggaggaagtacagcctcacgcccacgagcaggcctgacgtgggggatgacacggaatgattttttttttaatatagacac

SEQ ID NO: 3 - DNA, 122 bp, Homo sapiens
  misc_feature (61)..(62): /note="This region represents a CpG dinucleotide"
  misc_feature (61)..(61): /note="Nucleotide may be methylated to form 5-methylcytosine"
gccatctgctgcatgcttccggctactgtagggggaactactctagttaataggagcttacgaaatagaaagagctgacatcatatttatcaaatggcagtccatgtgtggaaagaaaacac

SEQ ID NO: 4 - DNA, 122 bp, Homo sapiens
  misc_feature (61)..(62): /note="This region represents a CpG dinucleotide"
  misc_feature (61)..(61): /note="Nucleotide may be methylated to form 5-methylcytosine"
ttggttgtaccgtgtgtgtggctgcagcccctgatgcaggctgtctccactagggggcagcgcagcctccctgctgagtctccccagggggcccagaggtgtgcagcccagacagtttggga

SEQ ID NO: 5 - DNA, 122 bp, Homo sapiens
  misc_feature (61)..(62): /note="This region represents a CpG dinucleotide"
  misc_feature (61)..(61): /note="Nucleotide may be methylated to form 5-methylcytosine"
ttacattgttaagcccaaaaaaatgcttaaggtatgacattttgatcatgccatttttcacggctggtgttaagagtagtttgtgaacaaatgcaaacggaaccgtctctaagatttttaat

SEQ ID NO: 6 - DNA, 122 bp, Homo sapiens
  misc_feature (61)..(62): /note="This region represents a CpG dinucleotide"
  misc_feature (61)..(61): /note="Nucleotide may be methylated to form 5-methylcytosine"
ttctttttgataaaagatatacctaaagaggcacctacacataaccctggcaccgtccgccgccccaagaaccttcctgctttaccaatggcctgggagttggcaaacacgctaacaaaaaa

SEQ ID NO: 7 - DNA, 122 bp, Homo sapiens
  misc_feature (61)..(62): /note="This region represents a CpG dinucleotide"
  misc_feature (61)..(61): /note="Nucleotide may be methylated to form 5-methylcytosine"
tggtttacccagcgatacagagaatatctccagaggcagaaactctttgatacacagcaccgtgtggaaaagatgccggatggctcggtggcgctaccggtgctgggagagacgcttccaga

SEQ ID NO: 8 - DNA, 122 bp, Homo sapiens
  misc_feature (61)..(62): /note="This region represents a CpG dinucleotide"
  misc_feature (61)..(61): /note="Nucleotide may be methylated to form 5-methylcytosine"
gtaggtagtgcggatgcgggcgcagaactacgtttcccagcaggcatacagttggtggggcggggtgtgtgtgtgtgttgggaggcgggggtccctctcctttggcttggggctccggagtt

SEQ ID NO: 9 - DNA, 122 bp, Homo sapiens
  misc_feature (61)..(62): /note="This region represents a CpG dinucleotide"
  misc_feature (61)..(61): /note="Nucleotide may be methylated to form 5-methylcytosine"
agcagacgggggagggagaggcttttacgcaatcctccaaggagcctcgggtttcaatgccgggtgggccgggggcggtcggcctgggcttcccccggagcgcccgggagagccagattcca

SEQ ID NO: 10 - DNA, 122 bp, Homo sapiens
  misc_feature (61)..(62): /note="This region represents a CpG dinucleotide"
  misc_feature (61)..(61): /note="Nucleotide may be methylated to form 5-methylcytosine"
gctcggggattacctctctggctggtcccctcctccgtgctctgcgcgcctccaccctagcgcttgtcttggctcctagaaccaggggcctggacgctgctcagggcagaggcgccccctct

SEQ ID NO: 11 - DNA, 122 bp, Homo sapiens
  misc_feature (61)..(62): /note="This region represents a CpG dinucleotide"
  misc_feature (61)..(61): /note="Nucleotide may be methylated to form 5-methylcytosine"
ccgaaggggtcatactaggcgtcatactagggtctctggatagctcccaggcctggacttcgttttccaggatatcacctttactggtcaacccattttgtttcgcgagtgcccagtgagtg

SEQ ID NO: 12 - DNA, 122 bp, Homo sapiens
  misc_feature (61)..(62): /note="This region represents a CpG dinucleotide"
  misc_feature (61)..(61): /note="Nucleotide may be methylated to form 5-methylcytosine"
gcacagtcttttcccagcattccttgtttacttccgggtttattactactgaaggaagaacgtgagtaggttaggatttcggttgagaggcttggggtcttgcgtttcgcccaccatctcct

SEQ ID NO: 13 - DNA, 122 bp, Homo sapiens
  misc_feature (61)..(62): /note="This region represents a CpG dinucleotide"
  misc_feature (61)..(61): /note="Nucleotide may be methylated to form 5-methylcytosine"
acccgggcccgcgcggagctggtggggcgccggcgggccgacgtcagccgagccgagcaccgcctgccccacgcgtggcccccgcccccggcttcgcgccccgccctccccgccctgcggcc

SEQ ID NO: 14 - DNA, 122 bp, Homo sapiens
  misc_feature (61)..(62): /note="This region represents a CpG dinucleotide"
  misc_feature (61)..(61): /note="Nucleotide may be methylated to form 5-methylcytosine"
cctccagcacgaagccttgggtgaagttaatcttcattcatcatttctgtctctcctaatcgatctctcgcccagtgtctctccttgtccctctccctccctttctctctctcgtcctctcc

SEQ ID NO: 15 - DNA, 122 bp, Homo sapiens
  misc_feature (61)..(62): /note="This region represents a CpG dinucleotide"
  misc_feature (61)..(61): /note="Nucleotide may be methylated to form 5-methylcytosine"
gcctccctctttcattcttttcccgtgattccctctactgggactcctgaccctcctagtcgccagatcacaggcccaacgcatccctttccggagggatttaggaagtctcggcgttggtc

SEQ ID NO: 16 - DNA, 122 bp, Homo sapiens
  misc_feature (61)..(62): /note="This region represents a CpG dinucleotide"
  misc_feature (61)..(61): /note="Nucleotide may be methylated to form 5-methylcytosine"
cctttctctttttagggactcctcctcctcatcttttctccctctccccgccctccattccgttcttcccgatacaaactgttgtctcagattccgaccgagggaatgttttcctcctgttt

SEQ ID NO: 17 - DNA, 122 bp, Homo sapiens
  misc_feature (61)..(62): /note="This region represents a CpG dinucleotide"
  misc_feature (61)..(61): /note="Nucleotide may be methylated to form 5-methylcytosine"
tcgctgacgtaggtattctgcctgacagcgcgactaagggaccacacggctctgcctcgccgacgagagagaccagcagccaccgagagtgcaggccccataagtcagccccgctcgaattt

SEQ ID NO: 18 - DNA, 122 bp, Homo sapiens
  misc_feature (61)..(62): /note="This region represents a CpG dinucleotide"
  misc_feature (61)..(61): /note="Nucleotide may be methylated to form 5-methylcytosine"
cctgtcgtgcgttttccttccaaccccatgcacactcattccaacataaagtcgtggaaacgggcgtgcactgggctgttcccgccgaacaccgggcgcgactcaggctgccggaggcttcc

SEQ ID NO: 19 - DNA, 122 bp, Homo sapiens
  misc_feature (61)..(62): /note="This region represents a CpG dinucleotide"
  misc_feature (61)..(61): /note="Nucleotide may be methylated to form 5-methylcytosine"
cctgctccccctcggaggggctgaggctggaggcgggcccggcacgttcccaagcaggggcgggggctgcttttgctcatttctgaggagctctgagaagagacgaagttctgagccaggga

SEQ ID NO: 20 - DNA, 122 bp, Homo sapiens
  misc_feature (61)..(62): /note="This region represents a CpG dinucleotide"
  misc_feature (61)..(61): /note="Nucleotide may be methylated to form 5-methylcytosine"
gtggcagtgtcgctgaagttcatgagtttccaaaatgaaggttccaggtgctcagcggtacggagaattgcatctagagccttaggatttaacctcctgtttaggataggcagcaggaaata

SEQ ID NO: 21 - DNA, 122 bp, Homo sapiens
  misc_feature (61)..(62): /note="This region represents a CpG dinucleotide"
  misc_feature (61)..(61): /note="Nucleotide may be methylated to form 5-methylcytosine"
tgactgttcatctaacaaaagggatcttcgcctctcaaacggagtcagctccaggatcctcgaccacgggcgtggcgtgaaatcgatttacaaacacgcgatttgtatctgcccatctagga

SEQ ID NO: 22 - DNA, 122 bp, Homo sapiens
  misc_feature (61)..(62): /note="This region represents a CpG dinucleotide"
  misc_feature (61)..(61): /note="Nucleotide may be methylated to form 5-methylcytosine"
cggaggccagcccctcccggaggctcgggaggagggttttggggaggagcgccatgcagacgcagccaggactgagaacggcttccgggccttcattcccaccagcatcgccttctctccac

SEQ ID NO: 23 - DNA, 122 bp, Homo sapiens
  misc_feature (61)..(62): /note="This region represents a CpG dinucleotide"
  misc_feature (61)..(61): /note="Nucleotide may be methylated to form 5-methylcytosine"
gcaagtgcagcctgaaatcctgagcatgaaacaggatgcgtgtgtacaccggttgcagagcggcacctgaagctgtgctgacctgccctagcatagatgcccgtgaggcacagctgcaaccg

SEQ ID NO: 24 - DNA, 122 bp, Homo sapiens
  misc_feature (61)..(62): /note="This region represents a CpG dinucleotide"
  misc_feature (61)..(61): /note="Nucleotide may be methylated to form 5-methylcytosine"
cccacttgaaggaatagctagatttctggacccccattttctgaggctttccaggatggacgcatgctatcagctccccctgcaggtctgactctttcctgacagggaattcctggaggtcc

SEQ ID NO: 25 - DNA, 122 bp, Homo sapiens
  misc_feature (61)..(62): /note="This region represents a CpG dinucleotide"
  misc_feature (61)..(61): /note="Nucleotide may be methylated to form 5-methylcytosine"
caattgtgcaactcagaatttcagaacaatgctctccacctcctaatgttgttccccatacgggctgggtagtgggctggggaggcaggagggaagccacatcaagggaggaaactgtctct

SEQ ID NO: 26 - DNA, 122 bp, Homo sapiens
  misc_feature (61)..(62): /note="This region represents a CpG dinucleotide"
  misc_feature (61)..(61): /note="Nucleotide may be methylated to form 5-methylcytosine"
ttaggctgaatcacatgacattgtctcttgcgtaggtcaagtatcggcaatatttaaggacgaaaggttatgacgttcacaacaaactctcaaaataatgaacaagccccttccgccccggc

SEQ ID NO: 27 - DNA, 122 bp, Homo sapiens
  misc_feature (61)..(62): /note="This region represents a CpG dinucleotide"
  misc_feature (61)..(61): /note="Nucleotide may be methylated to form 5-methylcytosine"
tctttccacaacagctgctttccttaaacatcagcaattttaatctcacaaggcaaactacggaagaaaagccaaaagtaaaatcctgcttccctttaaaattcaaacagatgttctgtgta

SEQ ID NO: 28 - DNA, 122 bp, Homo sapiens
  misc_feature (61)..(62): /note="This region represents a CpG dinucleotide"
  misc_feature (61)..(61): /note="Nucleotide may be methylated to form 5-methylcytosine"
ctctttctcttctgataagggcacttattctatcagattagcactctgcccttatgacctcgtaatttaaccttacttagctcctgaaagctctatctccaatacaatcacactaggggtta

SEQ ID NO: 29 - DNA, 122 bp, Homo sapiens
  misc_feature (61)..(62): /note="This region represents a CpG dinucleotide"
  misc_feature (61)..(61): /note="Nucleotide may be methylated to form 5-methylcytosine"
ctggactagagaatttctaagatctcttctggctctaaaatgttcatttctcaccaggcacggtggctcacacctgtaatcccagcactttgggaggccgaggcaggtggatcacctgaggt

SEQ ID NO: 30 - DNA, 122 bp, Homo sapiens
  misc_feature (61)..(62): /note="This region represents a CpG dinucleotide"
  misc_feature (61)..(61): /note="Nucleotide may be methylated to form 5-methylcytosine"
agggaggcggcggatgcggtctgggagggctccaggcgtgagaaggcggcccttgcctggcgcaggggagcagggagcttccagggtgggtgcggggaggaaggaggagtaaggggttagag

SEQ ID NO: 31 - DNA, 122 bp, Homo sapiens
  misc_feature (61)..(62): /note="This region represents a CpG dinucleotide"
  misc_feature (61)..(61): /note="Nucleotide may be methylated to form 5-methylcytosine"
agggtttgagttcactcagtacttgtcagtgccaggagttggacagggtgtttgaagaagcgccctctgctgccgtcttcttctagttgcttttgtagaggctgtggctggggcaaatcaca

SEQ ID NO: 32 - DNA, 122 bp, Homo sapiens
  misc_feature (61)..(62): /note="This region represents a CpG dinucleotide"
  misc_feature (61)..(61): /note="Nucleotide may be methylated to form 5-methylcytosine"
tgaatgacaatcccccacaggtgaccatgtctgcactcaccagccccatcccagagaactcgcctgagatagtagttgctgttttcagcgtttcagatcctgactccggaaacaatgggaag

SEQ ID NO: 33 - DNA, 122 bp, Homo sapiens
  misc_feature (61)..(62): /note="This region represents a CpG dinucleotide"
  misc_feature (61)..(61): /note="Nucleotide may be methylated to form 5-methylcytosine"
acaccgggaagtgggtttctacagcccgggtcatctgggccgcgtgtgatcattagctgtcgcgggctgcccggaggaggatggcctgtcctttctgggcgtctccagatcagcctcagtgt

SEQ ID NO: 34 - DNA, 122 bp, Homo sapiens
  misc_feature (61)..(62): /note="This region represents a CpG dinucleotide"
  misc_feature (61)..(61): /note="Nucleotide may be methylated to form 5-methylcytosine"
aaaaaaaaaaaagagagagagagcaaaaacataagcccagagttactcaccaattgaatccgaccatgtcactccaccacttagaaaacgtatgtggttagtagtccctctattgatcacag

SEQ ID NO: 35 - DNA, 122 bp, Homo sapiens
  misc_feature (61)..(62): /note="This region represents a CpG dinucleotide"
  misc_feature (61)..(61): /note="Nucleotide may be methylated to form 5-methylcytosine"
gagctgccgtggggcgcttagttttgagtccgggtggtgcgcctggctttggggacagcccggggcacgcgggcccgggggtgccggcgggaggggccggcctgggcgtcgcgccaagggat

SEQ ID NO: 36 - DNA, 122 bp, Homo sapiens
  misc_feature (61)..(62): /note="This region represents a CpG dinucleotide"
  misc_feature (61)..(61): /note="Nucleotide may be methylated to form 5-methylcytosine"
tgctggcagtttctaccaagccgctttttctatcttttcttcttttaaaacatgttacatcgcactgctccttcagccatagtcccatgtgtgcgtgtgcgtgtgcgtgcgtgttgactgtg

SEQ ID NO: 37 - DNA, 122 bp, Homo sapiens
  misc_feature (61)..(62): /note="This region represents a CpG dinucleotide"
  misc_feature (61)..(61): /note="Nucleotide may be methylated to form 5-methylcytosine"
gataagcaagtttgacaggaagaagctactcttctccgaattacacagaggtgatgtgttcgtattgcacgtagacgtgtgtataacaggacctccttccccgcgccccgccaccccgacac

SEQ ID NO: 38 - DNA, 122 bp, Homo sapiens
  misc_feature (61)..(62): /note="This region represents a CpG dinucleotide"
  misc_feature (61)..(61): /note="Nucleotide may be methylated to form 5-methylcytosine"
ttcagccttgagaagctttctcagcatgagtagtgttgtggtaaagagcttgaatgctgacgtcagactaattagtttctaatcttggctttgcaacagattagccatgtgatttggtggca

SEQ ID NO: 39 - DNA, 122 bp, Homo sapiens
  misc_feature (61)..(62): /note="This region represents a CpG dinucleotide"
  misc_feature (61)..(61): /note="Nucleotide may be methylated to form 5-methylcytosine"
tccttcctccatctccccgttgtcttcattagtttcctaggagccaagaacacacaaatccgttctttagttacttgtgctacaacctcccttctgactcacttccctccctaatctatcat

SEQ ID NO: 40 - DNA, 122 bp, Homo sapiens
  misc_feature (61)..(62): /note="This region represents a CpG dinucleotide"
  misc_feature (61)..(61): /note="Nucleotide may be methylated to form 5-methylcytosine"
ggagaagggggcggggtggcctgattggctcgcctgcccctgggggcagtagaggggccccgcccagctaggggagccgctccgttccactcccctccctagccctccctccccacggccct

SEQ ID NO: 41 - DNA, 122 bp, Homo sapiens
  misc_feature (61)..(62): /note="This region represents a CpG dinucleotide"
  misc_feature (61)..(61): /note="Nucleotide may be methylated to form 5-methylcytosine"
gcttgcttgctttaggagacaagctattaatactaaagcatatgttagggagttgctcagcgtacttgatatctagtagcaccagccaaactagctaacagcctttccatggagataggcca

SEQ ID NO: 42 - DNA, 122 bp, Homo sapiens
  misc_feature (61)..(62): /note="This region represents a CpG dinucleotide"
  misc_feature (61)..(61): /note="Nucleotide may be methylated to form 5-methylcytosine"
tcaccatgcggattttacaacgtgtgccaggtttgtttatcctgtaacctcaggaagaaacgaccaccaagaaacacagtgggaagtgaggcagatgagaggaggaagccatttcttttgaa

SEQ ID NO: 43 - DNA, 122 bp, Homo sapiens
  misc_feature (61)..(62): /note="This region represents a CpG dinucleotide"
  misc_feature (61)..(61): /note="Nucleotide may be methylated to form 5-methylcytosine"
cctcctccggggaaactggcgctcttcgcccacccaactcccctccacccacctcccccgcgcccccagttcgaagttcccccgacagagcccacccacactcgctcccccaactccactcc

SEQ ID NO: 44 - DNA, 122 bp, Homo sapiens
  misc_feature (61)..(62): /note="This region represents a CpG dinucleotide"
  misc_feature (61)..(61): /note="Nucleotide may be methylated to form 5-methylcytosine"
aagtctttgtctgtgttttcattatttcatcatttacatcagatctttcttttctcttcccgttgacacaccctagttcaggcctcattcaagtcatacccagagtattgtatcagcctcct

SEQ ID NO: 45 - DNA, 122 bp, Homo sapiens
  misc_feature (61)..(62): /note="This region represents a CpG dinucleotide"
  misc_feature (61)..(61): /note="Nucleotide may be methylated to form 5-methylcytosine"
ggttggaaagagacttagagggcatgatctcctttccagcagagtccgctggagttttcacgcgctccggtgccctgaggactgaacgcccacgatttaggtttaatcgatgtccctccctc

SEQ ID NO: 46 - DNA, 122 bp, Homo sapiens
  misc_feature (61)..(62): /note="This region represents a CpG dinucleotide"
  misc_feature (61)..(61): /note="Nucleotide may be methylated to form 5-methylcytosine"
gattttaacttttcttctcttccaaatagggatttcccaggatgtctcaaataggcaggccgtgactaagacctggggcagattagccttgctatagtatgtaaatcgtcattcttccttta

SEQ ID NO: 47 - DNA, 122 bp, Homo sapiens
  misc_feature (61)..(62): /note="This region represents a CpG dinucleotide"
  misc_feature (61)..(61): /note="Nucleotide may be methylated to form 5-methylcytosine"
tttccccccttgcaccagcgccgcctcaaatgtcagggctcgcccactcttctccggtctcgccgacataaccttttgggggctccagaggggaaatttgccgtttctgccggaccgctcta

SEQ ID NO: 48 - DNA, 122 bp, Homo sapiens
  misc_feature (61)..(62): /note="This region represents a CpG dinucleotide"
  misc_feature (61)..(61): /note="Nucleotide may be methylated to form 5-methylcytosine"
agtcaaatctcttgacaaacaggtgacatcagaacttgatgtgcactttcctctctattgcgtttccttgaccacagtgattcttggccaaaaggagtcaagaatgggggcggtgagaaatg

SEQ ID NO: 49 - DNA, 122 bp, Homo sapiens
  misc_feature (61)..(62): /note="This region represents a CpG dinucleotide"
  misc_feature (61)..(61): /note="Nucleotide may be methylated to form 5-methylcytosine"
tctctccaacggtggatctagaagctccggatttacaaacatcccaattgtctttcaagtcgttttccaggtgcaaatccgtcagcccccttctcaaacttcaaaccagaacctcctcttca

SEQ ID NO: 50 - DNA, 122 bp, Homo sapiens
  misc_feature (61)..(62): /note="This region represents a CpG dinucleotide"
  misc_feature (61)..(61): /note="Nucleotide may be methylated to form 5-methylcytosine"
ttcctaccagcagatatctccattccaatctcccctgccactttggctctcttgctgtcacggtttaactgtcctgagaaagttgcactaaccgggcttgaacataaggaacctggcccagt

SEQ ID NO: 51 - DNA, 122 bp, Homo sapiens
  misc_feature (61)..(62): /note="This region represents a CpG dinucleotide"
  misc_feature (61)..(61): /note="Nucleotide may be methylated to form 5-methylcytosine"
gttaaaaacctccaacattccagtttagacacagcccctcccctttctggccatagtgaccgctctctggcaagcactgcccagggaagataaatcagttagccagtggcctaagggttagg

SEQ ID NO: 52 - DNA, 122 bp, Homo sapiens
  misc_feature (61)..(62): /note="This region represents a CpG dinucleotide"
  misc_feature (61)..(61): /note="Nucleotide may be methylated to form 5-methylcytosine"
agttcgattttatgccggatttagcccttattactatttcaagggtgcttcgggctagtgcgggcgggagcattcagggatgccaaggggaagactttcccaagtcaccgtcttcttctctg

SEQ ID NO: 53 - DNA, 122 bp, Homo sapiens
  misc_feature (61)..(62): /note="This region represents a CpG dinucleotide"
  misc_feature (61)..(61): /note="Nucleotide may be methylated to form 5-methylcytosine"
tacttagaggttttgttttgaaggaaagaagggctccagatctgactgctgtcacctattcgaggctggagtttcccagtaaaacctaacccacacatttacgtaagccatctgttgaccca

SEQ ID NO: 54 - DNA, 122 bp, Homo sapiens
  misc_feature (61)..(62): /note="This region represents a CpG dinucleotide"
  misc_feature (61)..(61): /note="Nucleotide may be methylated to form 5-methylcytosine"
caacttcctgtcggtcatatcctgtttggctatgtcttagtcacagtggaaaacaaaagccggggcaacaggatgaaggaggttagaggagctgattagaaaaggaacctgccatgaaatta

SEQ ID NO: 55 - DNA, 122 bp, Homo sapiens
  misc_feature (61)..(62): /note="This region represents a CpG dinucleotide"
  misc_feature (61)..(61): /note="Nucleotide may be methylated to form 5-methylcytosine"
acaatgggaggagggagatggggctagagagctatttccacaccagaccacagatactcacgttccagtcaggtttgcctgagtaggtctataagccttcctcatcaaaactgcaagtaata

SEQ ID NO: 56 - DNA, 122 bp, Homo sapiens
  misc_feature (61)..(62): /note="This region represents a CpG dinucleotide"
  misc_feature (61)..(61): /note="Nucleotide may be methylated to form 5-methylcytosine"
ggaacatgcgagcccagaaaagtctctcctggtcttgggatggaggtcacacgaagcctccgcaaggcaaggacttttggtgagttccgggctccgctgaactcagctctttttcttttcct

SEQ ID NO: 57 - DNA, 122 bp, Homo sapiens
  misc_feature (61)..(62): /note="This region represents a CpG dinucleotide"
  misc_feature (61)..(61): /note="Nucleotide may be methylated to form 5-methylcytosine"
gccacccgccaccggcctggtctgctcacgtcccctggacccgcgggccagccaaggagccgctgcccttggcacctgttctccgtgcctgcaaacagacaaggccctgcacttttctcctc

SEQ ID NO: 58 - DNA, 122 bp, Homo sapiens
  misc_feature (61)..(62): /note="This region represents a CpG dinucleotide"
  misc_feature (61)..(61): /note="Nucleotide may be methylated to form 5-methylcytosine"
ccaacagtcatgcccccagctcagcgccacagctgtgagagctgttcccggggaggggagcgtcggccaggggacatgggtgagacacacaggacctcttcgtgccagcttttcaattcgtc

SEQ ID NO: 59 - DNA, 122 bp, Homo sapiens
  misc_feature (61)..(62): /note="This region represents a CpG dinucleotide"
  misc_feature (61)..(61): /note="Nucleotide may be methylated to form 5-methylcytosine"
agagggtgaccgctaatcctaattctaaccccaacctgaatttatgaggtcctgctggtacgcagagggaggactggagggaccagtcaggttggccagctggcccagtggtatagggagcc

SEQ ID NO: 60 - DNA, 122 bp, Homo sapiens
  misc_feature (61)..(62): /note="This region represents a CpG dinucleotide"
  misc_feature (61)..(61): /note="Nucleotide may be methylated to form 5-methylcytosine"
gagcgccccctggtgacctgagcccagaattgttgtctttagcaccacctatgtcctgagcgcccccttgtggttctgagcaaccattggtggtcctgagcgccccctgttggttctgagta

SEQ ID NO: 61 - DNA, 122 bp, Homo sapiens
  misc_feature (61)..(62): /note="This region represents a CpG dinucleotide"
  misc_feature (61)..(61): /note="Nucleotide may be methylated to form 5-methylcytosine"
cctgccctcaaagaacttctagggaacactgactttgcaggcatgattccgtctgcatcacgcatcagtaaacagctatgtgtactgtagggtattgagacacaatgacgttccctctgctc

SEQ ID NO: 62 - DNA, 122 bp, Homo sapiens
  misc_feature (61)..(62): /note="This region represents a CpG dinucleotide"
  misc_feature (61)..(61): /note="Nucleotide may be methylated to form 5-methylcytosine"
gaaacctacaagggagtgtggtaacccaaggttagaaaagcagaaccactgccactcccacgcctcaaaggaggaaatggttactcaaatccagaactagagagaatgaggagaaaagctgt

SEQ ID NO: 63 - DNA, 122 bp, Homo sapiens
  misc_feature (61)..(62): /note="This region represents a CpG dinucleotide"
  misc_feature (61)..(61): /note="Nucleotide may be methylated to form 5-methylcytosine"
ttttggtaaaccaaaatattgcttggtggcataaagccacagatccattccaaaaaaaaacgaaaaccgaaatgtggttttgctgtctgtcatgcagtctgtttcaactgtcagaaacatac

SEQ ID NO: 64 - DNA, 122 bp, Homo sapiens
  misc_feature (61)..(62): /note="This region represents a CpG dinucleotide"
  misc_feature (61)..(61): /note="Nucleotide may be methylated to form 5-methylcytosine"
tccggggtgctagccgctaggcggctagtgatggatagctgggcttgagccccgccaggccgccgagtccaccctggcgtccgggggctggcaggccggccctccacaaacagcggcctccc

SEQ ID NO: 65 - DNA, 122 bp, Homo sapiens
  misc_feature (61)..(62): /note="This region represents a CpG dinucleotide"
  misc_feature (61)..(61): /note="Nucleotide may be methylated to form 5-methylcytosine"
ctggctgacatggaattaatcagcagccaccttctctactggtctctgttactggaaaaacgtcagtgcctctcaagccactttagggaggatccatggcagagttttaaggatcttccagg

SEQ ID NO: 66 - DNA, 122 bp, Homo sapiens
  misc_feature (61)..(62): /note="This region represents a CpG dinucleotide"
  misc_feature (61)..(61): /note="Nucleotide may be methylated to form 5-methylcytosine"
gttgttgcatcaccagtgactcagaacagactgcctttgtgtgtgaccacaccagcaaaacgatggccatgccatgtctgtctcttcatataactccctttctctttatccatctgaattag

SEQ ID NO: 67 - DNA, 122 bp, Homo sapiens
  misc_feature (61)..(62): /note="This region represents a CpG dinucleotide"
  misc_feature (61)..(61): /note="Nucleotide may be methylated to form 5-methylcytosine"
tgcagacttacccggaggacaggtactgcgggcttctctccacacccccccactccccaccgccaattcagtctacctaaccgtccctgcggtggccaaaaatattaagagcaaagtacttt

SEQ ID NO: 68 - DNA, 122 bp, Homo sapiens
  misc_feature (61)..(62): /note="This region represents a CpG dinucleotide"
  misc_feature (61)..(61): /note="Nucleotide may be methylated to form 5-methylcytosine"
aaggtttccagtgagtctttctgttcaggacattcataacaaaagcctccgagcagagaacgagcccctggggagtgcccacacagtcaaccccaacagcccagtctctgaaccgtagcctc

SEQ ID NO: 69 - DNA, 122 bp, Homo sapiens
  misc_feature (61)..(62): /note="This region represents a CpG dinucleotide"
  misc_feature (61)..(61): /note="Nucleotide may be methylated to form 5-methylcytosine"
agtaaacaaaggctgcagattgatgtaaaaataattcccttgttctgactaatacactcacgcacgcatgcatttccttccagtcaccacagctagctgaccttaggaaactcaagtaatga

SEQ ID NO: 70 - DNA, 122 bp, Homo sapiens
  misc_feature (61)..(62): /note="This region represents a CpG dinucleotide"
  misc_feature (61)..(61): /note="Nucleotide may be methylated to form 5-methylcytosine"
gcaacggcaacgccattctcaagcaagcgcatcaatatatttagttccggcctctttgcacgtcatttccggcaccggcatggccgggtgagctgcaggctaccttatttaagaccgggaat

SEQ ID NO: 71 - DNA, 122 bp, Homo sapiens
  misc_feature (61)..(62): /note="This region represents a CpG dinucleotide"
  misc_feature (61)..(61): /note="Nucleotide may be methylated to form 5-methylcytosine"
tgacaaataaaaagaaggaacaaaacattggtcatacctacaaagaatcagaaaccaaaacggtgtttaatttctcaagaaggggaagtgtaagtaattgtaagtgagtaattgtaaactca

SEQ ID NO: 72 - DNA, 122 bp, Homo sapiens
  misc_feature (61)..(62): /note="This region represents a CpG dinucleotide"
  misc_feature (61)..(61): /note="Nucleotide may be methylated to form 5-methylcytosine"
atatgccgtggggctgaatgtgaccaacacgacagtgcagggaaagctcctttgtccctgcgcggcccagactgggacgctagatggcaggctcaccttctagatggaagcttccggctcct

SEQ ID NO: 73 - DNA, 122 bp, Homo sapiens
  misc_feature (61)..(62): /note="This region represents a CpG dinucleotide"
  misc_feature (61)..(61): /note="Nucleotide may be methylated to form 5-methylcytosine"
tcggattcccgcccagccccaggctggccctgccggactcgccctgcaccccacgcaccacgcacaggcctggtcatagtaagtgctcaatgcaagtgcgtggaactcaactgaggggaaaa

SEQ ID NO: 74 - DNA, 122 bp, Homo sapiens
  misc_feature (61)..(62): /note="This region represents a CpG dinucleotide"
  misc_feature (61)..(61): /note="Nucleotide may be methylated to form 5-methylcytosine"
acacacacacacacacacacacacacacacacacatatgtttataagtgggatgggagaacgggtacggtgataattaaaagaggtaaggtttctcttgagatgaaaatgttctaaaattgt

SEQ ID NO: 75 - DNA, 122 bp, Homo sapiens
  misc_feature (61)..(62): /note="This region represents a CpG dinucleotide"
  misc_feature (61)..(61): /note="Nucleotide may be methylated to form 5-methylcytosine"
aggaagttgctgcggaggaaggactgtgagaacaaggatggatactctgacctatattcacggctggtttgacatctgtgtgctacaaaccaccaaccttctggccgagattggcggagaag

SEQ ID NO: 76 - DNA, 122 bp, Homo sapiens
  misc_feature (61)..(62): /note="This region represents a CpG dinucleotide"
  misc_feature (61)..(61): /note="Nucleotide may be methylated to form 5-methylcytosine"
ggagagcaagtggaggtggcagggccagggcgagacagctgtggttgtggtttcctcccacgtggcccctccttctgaaggttctgagaggcctttgagtgcatttggggtgatttgactca

SEQ ID NO: 77 - DNA, 122 bp, Homo sapiens
  misc_feature (61)..(62): /note="This region represents a CpG dinucleotide"
  misc_feature (61)..(61): /note="Nucleotide may be methylated to form 5-methylcytosine"
gccctgcgcacttggggcgacggggccaggcgcgggggacggctgcgggctgggagggcgcgcggaggagacaccgctgaggggacgccgctgagggcgccacgcggggggcgcggctgagg

SEQ ID NO: 78 - DNA, 122 bp, Homo sapiens
  misc_feature (61)..(62): /note="This region represents a CpG dinucleotide"
  misc_feature (61)..(61): /note="Nucleotide may be methylated to form 5-methylcytosine"
aaagcctttgccgcaaaattcgcagacgaagggcttgtagcccgcgtggatgcggatatgcgtgttgagcgtggagctgcggttgaacgctttgccgcactggttgcatttatgtggctttt

SEQ ID NO: 79 - DNA, 122 bp, Homo sapiens
  misc_feature (61)..(62): /note="This region represents a CpG dinucleotide"
  misc_feature (61)..(61): /note="Nucleotide may be methylated to form 5-methylcytosine"
acagtcatgtgttgctcaaggacaggaataagttctgagtaatgcatcattaggcaacttcgttgtgcaaatgtcatagagtatactcaaatgaacctagatgggatagcctactacacacc

SEQ ID NO: 80 - DNA, 122 bp, Homo sapiens
  misc_feature (61)..(62): /note="This region represents a CpG dinucleotide"
  misc_feature (61)..(61): /note="Nucleotide may be methylated to form 5-methylcytosine"
tgcatacatctgtagagaatttgaaaacaagcagtcaatttagaacttctgcttggtcttcggaagcaaaaagaggaaattcaaaagtaattttacacgtccttccaccagaagctgaaagg

SEQ ID NO: 81 - DNA, 122 bp, Homo sapiens
  misc_feature (61)..(62): /note="This region represents a CpG dinucleotide"
  misc_feature (61)..(61): /note="Nucleotide may be methylated to form 5-methylcytosine"
cacacaccgataaacttcagtgcctggatgagcaagcttcctgtgtgcttcagcttggggcgcatgtgcgcttcttctaggattttctgaaacttggtcaggggctcctggatcatgattgc

SEQ ID NO: 82 - DNA, 122 bp, Homo sapiens
  misc_feature (61)..(62): /note="This region represents a CpG dinucleotide"
  misc_feature (61)..(61): /note="Nucleotide may be methylated to form 5-methylcytosine"
caagcactgttaagaactgggctacaaagactatgaggcctgactcattcttttcaggcacgagcataccaatacaggaaacagaaaagtacaagttgcaggaggtgtatgtaggaaatgcc

SEQ ID NO: 83 - DNA, 122 bp, Homo sapiens
  misc_feature (61)..(62): /note="This region represents a CpG dinucleotide"
  misc_feature (61)..(61): /note="Nucleotide may be methylated to form 5-methylcytosine"
tcttttcctgccccttttcagcttgttcaggctcataaccatccagtgtctgccaagcaacggtctgattgatggtaaacaaccaaatcagaacacgcgtctctgtgcctgaactttcccta

SEQ ID NO: 84 - DNA, 122 bp, Homo sapiens
  misc_feature (61)..(62): /note="This region represents a CpG dinucleotide"
  misc_feature (61)..(61): /note="Nucleotide may be methylated to form 5-methylcytosine"
caggtgaggcccgcaggaggaaaagcactcccctggcgcaacatgactccagcgcatctgcgtctaagccacaccgtgctcctggtagattaaaaattaattctaaaaaaaaaatctctcct

SEQ ID NO: 85 - DNA, 122 bp, Homo sapiens
  misc_feature (61)..(62): /note="This region represents a CpG dinucleotide"
  misc_feature (61)..(61): /note="Nucleotide may be methylated to form 5-methylcytosine"
gggcggaggcccgggctgctcggaaaggggccggggccgggccttccgaaagctcctgggcggccctgccggaaccctgctctccactgcggcctgcagggctgttaccaggagccctgcct

SEQ ID NO: 86 - DNA, 122 bp, Homo sapiens
  misc_feature (61)..(62): /note="This region represents a CpG dinucleotide"
  misc_feature (61)..(61): /note="Nucleotide may be methylated to form 5-methylcytosine"
ctcaggtgatccgcccgcctcggcctcccaaaatgctgggattacaggcgtgagccactccgcctggcctcaagtctttacggtagattatgtttccacaattttctgcaaatgttttccgt

SEQ ID NO: 87 - DNA, 122 bp, Homo sapiens
  misc_feature (61)..(62): /note="This region represents a CpG dinucleotide"
  misc_feature (61)..(61): /note="Nucleotide may be methylated to form 5-methylcytosine"
atgttagattcaccccacagagatagcggcagagctggcagcggacggtctttgcattgccgcctccccagggggcgggaagctggtaaggaagcagcctgggttagctaggggtggggtca

SEQ ID NO: 88 - DNA, 122 bp, Homo sapiens
  misc_feature (61)..(62): /note="This region represents a CpG dinucleotide"
  misc_feature (61)..(61): /note="Nucleotide may be methylated to form 5-methylcytosine"
gttcgaatcatacttactgcaatagtgcatgaagtgcatgagcttagacatgcccttcagcgtcactactaggtaaattttctgctatcccttttacagatgggaaaactgaggcttggcaa

SEQ ID NO: 89 - DNA, 122 bp, Homo sapiens
  misc_feature (61)..(62): /note="This region represents a CpG dinucleotide"
  misc_feature (61)..(61): /note="Nucleotide may be methylated to form 5-methylcytosine"
cagacctcagccagccccaccctgacacttctcccttgcccttttgcctcagatttccaacgcttgctagctttgtctgttttgaatggccgtgctcagtgttcagctacggaaatcctctc

SEQ ID NO: 90 - DNA, 122 bp, Homo sapiens
  misc_feature (61)..(62): /note="This region represents a CpG dinucleotide"
  misc_feature (61)..(61): /note="Nucleotide may be methylated to form 5-methylcytosine"
aagagccttcttcaaactccgcccccgacacgcacaaagccggggaccctcggccagttccggccccgcccattaaaggagacgcacagtcctggaaaagaaaaggcgccgagaccccgcag

SEQ ID NO: 91 - DNA, 122 bp, Homo sapiens
  misc_feature (61)..(62): /note="This region represents a CpG dinucleotide"
  misc_feature (61)..(61): /note="Nucleotide may be methylated to form 5-methylcytosine"
tttctgggctgaatggagtctcagggagggggctaggtgacagcatcgccctttcctctccggctattgcgcaccttctggagcctcgctcagcctgctccctccggcgtaatacgccaatg

SEQ ID NO: 92 - DNA, 122 bp, Homo sapiens
  misc_feature (61)..(62): /note="This region represents a CpG dinucleotide"
  misc_feature (61)..(61): /note="Nucleotide may be methylated to form 5-methylcytosine"
ttgatttgtgtgatgcacagctcaacccttctgttacttgagaaggccctttgatcctaacgtcttggagtgtgaggcaggagaaggctaggtagaaaaaaaaaagagaagcaatttcagaa

SEQ ID NO: 93 - DNA, 122 bp, Homo sapiens
  misc_feature (61)..(62): /note="This region represents a CpG dinucleotide"
  misc_feature (61)..(61): /note="Nucleotide may be methylated to form 5-methylcytosine"
caactgttccgcggcggcagatcttcagttgcggtgcggagctgagcaggtatccgagagcgactgcatcgccgggctctgggagggaaggctctgccctagaactttgctattccaccccc

SEQ ID NO: 94 - DNA, 122 bp, Homo sapiens
  misc_feature (61)..(62): /note="This region represents a CpG dinucleotide"
  misc_feature (61)..(61): /note="Nucleotide may be methylated to form 5-methylcytosine"
catggctctcgggaagctttgacgagcccagagacttgggaaggggcggagtgaggggcgcgggaggctctcttaaagcgagaagagtgtcgggatccacacaggaacacacaggagaaatt

SEQ ID NO: 95 - DNA, 122 bp, Homo sapiens
  misc_feature (61)..(62): /note="This region represents a CpG dinucleotide"
  misc_feature (61)..(61): /note="Nucleotide may be methylated to form 5-methylcytosine"
tgtggtaggttcgtgaaacacacttcattcctggcacagcagagggcagcagtggcaagtcgtgagtctcttcatcttaccacctttcttccacttgtgtccttactgtcaacatgtaattt

SEQ ID NO: 96 - DNA, 122 bp, Homo sapiens
  misc_feature (61)..(62): /note="This region represents a CpG dinucleotide"
  misc_feature (61)..(61): /note="Nucleotide may be methylated to form 5-methylcytosine"
gagtccacgcccgctggcgccagactcccgggagtactcgaggtctgccccaaacctgaacgcaatccactctacacttccacgcatccagtgggtcaagccagaaacaggggaatcatcct

SEQ ID NO: 97 - DNA, 122 bp, Homo sapiens
  misc_feature (61)..(62): /note="This region represents a CpG dinucleotide"
  misc_feature (61)..(61): /note="Nucleotide may be methylated to form 5-methylcytosine"
gtaccagtaaaagttttgcagttcgaaaaccgcagcacactatggaataagcaagcccagcgcaaaaggcttgtgccttcagtccaccttcagtgatgggtggcaattcagtttcagaaatg

SEQ ID NO: 98 - DNA, 122 bp, Homo sapiens
  misc_feature (61)..(62): /note="This region represents a CpG dinucleotide"
  misc_feature (61)..(61): /note="Nucleotide may be methylated to form 5-methylcytosine"
gatatgtactgaggggacgtggggtacactcggatgaggggtctgtggacatattcgtggcgcatgtgggtatcgctggtgtcccgaggtggggagggagaatgcggagcgcgtgcgtgcgg

SEQ ID NO: 99 - DNA, 122 bp, Homo sapiens
  misc_feature (61)..(62): /note="This region represents a CpG dinucleotide"
  misc_feature (61)..(61): /note="Nucleotide may be methylated to form 5-methylcytosine"
tccattctgagggctatgacttataacccagaggtgctgaacagatgcttgtaggaggaacgaatggatgtttaaaaaaaaatgagctgtttcacacgttcatctatgcattctttcaatat

SEQ ID NO: 100 - DNA, 122 bp, Homo sapiens
  misc_feature (61)..(62): /note="This region represents a CpG dinucleotide"
  misc_feature (61)..(61): /note="Nucleotide may be methylated to form 5-methylcytosine"
tccccgcccaccagtgacggggcgtgctcggccccccttcctcatgacagctggtgaccccgctgcccttccggctttgtaatggcagaaacacaaggaccagagagggaagaggagaaggc

SEQ ID NO: 101 - DNA, 122 bp, Homo sapiens
  misc_feature (61)..(62): /note="This region represents a CpG dinucleotide"
  misc_feature (61)..(61): /note="Nucleotide may be methylated to form 5-methylcytosine"
gggtcttctgatttcattctcgaaagggagccctcatttcaagtcctggggtaccctgtgcgcaaactccatctatctggagtggtgagtagatgagaagagaatccctgagattctaggtt

SEQ ID NO: 102 - DNA, 122 bp, Homo sapiens
  misc_feature (61)..(62): /note="This region represents a CpG dinucleotide"
  misc_feature (61)..(61): /note="Nucleotide may be methylated to form 5-methylcytosine"
ttaattaatacaagcaaagtaacaggcgtgataatcatgatgaagcaaaaccactaacaacggcagaaaaataagagaaaaaatatactcactgggaagatgttttattgctaaagtgggtt

SEQ ID NO: 103 - DNA, 122 bp, Homo sapiens
  misc_feature (61)..(62): /note="This region represents a CpG dinucleotide"
  misc_feature (61)..(61): /note="Nucleotide may be methylated to form 5-methylcytosine"
gaccgggcgatctcacacttgctgacatccagtccccttttgggcatgaaacccatgccccgctgcggctctttgctgctgaacgtgttcaggtagtgcacgaaaggcggctcgtcggtaat

SEQ ID NO: 104 - DNA, 122 bp, Homo sapiens
  misc_feature (61)..(62): /note="This region represents a CpG dinucleotide"
  misc_feature (61)..(61): /note="Nucleotide may be methylated to form 5-methylcytosine"
gctgggccatctgtctccacctgggttgtgtgcgagggcgtggagtgttccgagggggaccgggggccgaagggctggagcagggcagggagttctgcacctccagaagttgtagggtgagc

SEQ ID NO: 105 - DNA, 122 bp, Homo sapiens
  misc_feature (61)..(62): /note="This region represents a CpG dinucleotide"
  misc_feature (61)..(61): /note="Nucleotide may be methylated to form 5-methylcytosine"
aagttagtttgctccacgtgacctatgttccactcaagtgctctctgactcaggctcacccgcaggactcgtcatctggcctgatgtgcacgagagggaagactgaccggctccaaaggctg

SEQ ID NO: 106 - DNA, 122 bp, Homo sapiens
  misc_feature (61)..(62): /note="This region represents a CpG dinucleotide"
  misc_feature (61)..(61): /note="Nucleotide may be methylated to form 5-methylcytosine"
ggtgggccacaccttgctcagccgtccgggccctcacctgcccctcctgcccgcagacggcgcctgcttggcctcagaccaagtcccacaggggctgccgtgcctgccgcctccaccccatt

SEQ ID NO: 107 - DNA, 122 bp, Homo sapiens
  misc_feature (61)..(62): /note="This region represents a CpG dinucleotide"
  misc_feature (61)..(61): /note="Nucleotide may be methylated to form 5-methylcytosine"
acctgggagggcgcgtgtgactcgtctcccaggtcgtttgggctggagtaggcggaggaacgcaccgcgagcaccaacgtcccgcccctgtcttggcggtcctcaggtgttttgtggaagcc

SEQ ID NO: 108 - DNA, 122 bp, Homo sapiens
  misc_feature (61)..(62): /note="This region represents a CpG dinucleotide"
  misc_feature (61)..(61): /note="Nucleotide may be methylated to form 5-methylcytosine"
acgcggcgttcggaggcgggcttctgggggtgggcggagcgtgccgcggcaggaagttggcgatgcgcaggcgcgagggctcgcccggcgctcccagggccggccgcggaggcggatggggc

SEQ ID NO: 109 - DNA, 122 bp, Homo sapiens
  misc_feature (61)..(62): /note="This region represents a CpG dinucleotide"
  misc_feature (61)..(61): /note="Nucleotide may be methylated to form 5-methylcytosine"
caactggctccgggacttgtgtccttggtgagcctagcggagtgctgggtgcgtcgcctgcgtgctcctcttttggagaaaggagggagggaacggccttgtgagacgactccaggagcgac

SEQ ID NO: 110 - DNA, 122 bp, Homo sapiens
  misc_feature (61)..(62): /note="This region represents a CpG dinucleotide"
  misc_feature (61)..(61): /note="Nucleotide may be methylated to form 5-methylcytosine"
cacacatacaactactccacatgacaggtgagcaagacttcccaaggacaggctgtgcaacgacaggaggctggcacacagccatgacaaatgacctgtttcttgcccagtcccactgccaa

SEQ ID NO: 111 - DNA, 122 bp, Homo sapiens
  misc_feature (61)..(62): /note="This region represents a CpG dinucleotide"
  misc_feature (61)..(61): /note="Nucleotide may be methylated to form 5-methylcytosine"
acatatgactagaaattgcaaccagacagcaatctgtgaagcaagtgataggagctccaccgtctggtgcctgctgtggatgtctggcacccattggtaccagatttggtgtaagtggggct

SEQ ID NO: 112 - DNA, 122 bp, Homo sapiens
  misc_feature (61)..(62): /note="This region represents a CpG dinucleotide"
  misc_feature (61)..(61): /note="Nucleotide may be methylated to form 5-methylcytosine"
ctacccggttttgaatcccaaatatatactgtgacaacacaaatttcctaacacatacagcgttatcagccaagttccctgcccttcattaattcaccaaatggttgttcagcacgtactga

SEQ ID NO: 113 - DNA, 122 bp, Homo sapiens
  misc_feature (61)..(62): /note="This region represents a CpG dinucleotide"
  misc_feature (61)..(61): /note="Nucleotide may be methylated to form 5-methylcytosine"
ctgcgatgctggggagtcatggagcctgagcctggagagctggcgggggtgtggggaccgcgatgttgggaaggctgagcccggagggcgggagattcaggaccaagacgtgggggagtccg

SEQ ID NO: 114 - DNA, 122 bp, Homo sapiens
  misc_feature (61)..(62): /note="This region represents a CpG dinucleotide"
  misc_feature (61)..(61): /note="Nucleotide may be methylated to form 5-methylcytosine"
agaaagataatccattaatccattttgatcactaattctgttctgagcttttgtgctttccgtaattaaaggtaatttgcttaagtatctgacatctccattacaaaatgctctccagttcc

SEQ ID NO: 115 - DNA, 122 bp, Homo sapiens
  misc_feature (61)..(62): /note="This region represents a CpG dinucleotide"
  misc_feature (61)..(61): /note="Nucleotide may be methylated to form 5-methylcytosine"
tctgcttctctccccatagtatatacgtctgtcctgcgacacggacgcggaaatcctttacgagctgctgacccagcactggcacctgaaaacacccaacctggtcatttctgtgaccgggg

SEQ ID NO: 116 - DNA, 122 bp, Homo sapiens
  misc_feature (61)..(62): /note="This region represents a CpG dinucleotide"
  misc_feature (61)..(61): /note="Nucleotide may be methylated to form 5-methylcytosine"
gaagcccgctgctggggagttgcctcccctttgatgaaaaggaagtgcgaagcgtaggaacgctcttcaggtcaccaccccgtgagtgggaggcttggggagtctgaaggaagagaaagctc

SEQ ID NO: 117 - DNA, 122 bp, Homo sapiens
  misc_feature (61)..(62): /note="This region represents a CpG dinucleotide"
  misc_feature (61)..(61): /note="Nucleotide may be methylated to form 5-methylcytosine"
ttgtttctttaaacacttccattgttaccaaaatgagagcgagccctggaaagtctagggcgtgggaaggttttgtcccctgaggaagcaaagaagacaggcagtggtttgagtgggtgggc

SEQ ID NO: 118 - DNA, 122 bp, Homo sapiens
  misc_feature (61)..(62): /note="This region represents a CpG dinucleotide"
  misc_feature (61)..(61): /note="Nucleotide may be methylated to form 5-methylcytosine"
tcttgatagggcttcaactcacatttgagatcaatagttttgcacagtgattgtcaaccccggctgtacattagaatcacctgggcagttttttaaaactacaagtacctgggcttcacgcc

SEQ ID NO: 119 - DNA, 122 bp, Homo sapiens
  misc_feature (61)..(62): /note="This region represents a CpG dinucleotide"
  misc_feature (61)..(61): /note="Nucleotide may be methylated to form 5-methylcytosine"
tgctaaggtttattgtgtgcatgctaaatttctggcgcttgcctaaccactcagttccttcgtttaagcttcatgataaccatgagataggtactgttgttaccctccttttacagatgaga

SEQ ID NO: 120 - DNA, 122 bp, Homo sapiens
  misc_feature (61)..(62): /note="This region represents a CpG dinucleotide"
  misc_feature (61)..(61): /note="Nucleotide may be methylated to form 5-methylcytosine"
accccggggccggggagggcagggacgaccactgcagcggcggcggctgcaggagctcaacgccgagcacgaggaagggagccccgcgccgcggccgccctcccgtcggcacgcccccgcct

SEQ ID NO: 121 - DNA, 122 bp, Homo sapiens
  misc_feature (61)..(62): /note="This region represents a CpG dinucleotide"
  misc_feature (61)..(61): /note="Nucleotide may be methylated to form 5-methylcytosine"
taggttcttcttcagtttgtccagttcccctgttctttattctctaaattcggagtaacccgccacctccccctgccccggcttttgctgtgcagtaacctgtctaaacatgcctagacatg

SEQ ID NO: 122 - DNA, 122 bp, Homo sapiens
  misc_feature (61)..(62): /note="This region represents a CpG dinucleotide"
  misc_feature (61)..(61): /note="Nucleotide may be methylated to form 5-methylcytosine"
cctcccctcccccgaaataaataacacacacacacacacacacacacacacacacacacacggagtgactggtgtagacaccccagggaggcattccggaaggtttctgaagagtgaagtgc

SEQ ID NO: 123 - DNA, 122 bp, Homo sapiens
  misc_feature (61)..(62): /note="This region represents a CpG dinucleotide"
  misc_feature (61)..(61): /note="Nucleotide may be methylated to form 5-methylcytosine"
cgagactccttctcaaaaacaaaaaaaaaaaaaaaaagaaaagaaaagaaaataggggaacgaaattgagttgaaactggaacaattccctcaaggaaaggggaaccaaaaccaggatgaat

SEQ ID NO: 124 - DNA, 122 bp, Homo sapiens
  misc_feature (61)..(62): /note="This region represents a CpG dinucleotide"
  misc_feature (61)..(61): /note="Nucleotide may be methylated to form 5-methylcytosine"
cctttcaggcagacctgtcaggagagagacagacagttcagggtaattcattcttgccaccgagtctcaagtgacttgtgaaggaatctggcatttctaaaatataaatagcattaactcac

SEQ ID NO: 125 - DNA, 122 bp, Homo sapiens
  misc_feature (61)..(62): /note="This region represents a CpG dinucleotide"
  misc_feature (61)..(61): /note="Nucleotide may be methylated to form 5-methylcytosine"
tacccatcagattggcaaaaatcttagacaatgataacatcaagcctgtgaggacatagacgaacaggcttagatgccagtggcgagaatatcaatcagcaaagcacttttttgggacaatt

SEQ ID NO: 126 - DNA, 122 bp, Homo sapiens
  misc_feature (61)..(62): /note="This region represents a CpG dinucleotide"
  misc_feature (61)..(61): /note="Nucleotide may be methylated to form 5-methylcytosine"
ttaaaagttatctaagataaccccctttcttctgtaagttaaatactaaacggcttaagacgaaattttggaatatagagatgatgatgcagactgcagtgaattatcaaatatgcatctca

SEQ ID NO: 127 - DNA, 122 bp, Homo sapiens
  misc_feature (61)..(62): /note="This region represents a CpG dinucleotide"
  misc_feature (61)..(61): /note="Nucleotide may be methylated to form 5-methylcytosine"
tataaaacacatctgcactactggcaacgggtggctcatgcatctggatcacatcactcacgttctccccaaccacatatcatagcaggaggaatttcctgatgaatcagatgctgcccaaa

SEQ ID NO: 128 - DNA, 122 bp, Homo sapiens
  misc_feature (61)..(62): /note="This region represents a CpG dinucleotide"
  misc_feature (61)..(61): /note="Nucleotide may be methylated to form 5-methylcytosine"
agttttcatggctaaacattttccagaggatccctggtgtgtctacagcacccatctgggcgctggggcttgtattaagagaacaggtacttcatggagctgtgaatactctattcaggctt

SEQ ID NO: 129 - DNA, 122 bp, Homo sapiens
  misc_feature (61)..(62): /note="This region represents a CpG dinucleotide"
  misc_feature (61)..(61): /note="Nucleotide may be methylated to form 5-methylcytosine"
aaatcgagcgcagcgccggtgggctggcacctctgggggatccagtacaccctctgcagtcgctggcccgggtgctaagtcccttattgcccggggccggcagggcctgccggctgctccga

SEQ ID NO: 130 - DNA, 122 bp, Homo sapiens
  misc_feature (61)..(62): /note="This region represents a CpG dinucleotide"
  misc_feature (61)..(61): /note="Nucleotide may be methylated to form 5-methylcytosine"
agttatatcaggcggtcctgccttttcttgccccactccccctggcaagggcgtcttctccggtggcttctgcgcaccctgagccccaaattagcatccccgtttcttgagctaccccaaac

SEQ ID NO: 131 - DNA, 122 bp, Homo sapiens
  misc_feature (61)..(62): /note="This region represents a CpG dinucleotide"
  misc_feature (61)..(61): /note="Nucleotide may be methylated to form 5-methylcytosine"
gagcaagctcctggcaccctgtagtctctccctctccccttcctgtattcggccaacgaccgacatcaggccattctttattaacctttatcaagccaggccggtcagcggccatcctcaat

SEQ ID NO: 132 - DNA, 122 bp, Homo sapiens
  misc_feature (61)..(62): /note="This region represents a CpG dinucleotide"
  misc_feature (61)..(61): /note="Nucleotide may be methylated to form 5-methylcytosine"
ggcggcggccccattagcggagcctccgcctatgattggcttcgcccgggaagctggagacgggcgatgaataattgatgtgtgcggtgcggtagccggacggcggcggcggtggcgggcag

SEQ ID NO: 133 - DNA, 122 bp, Homo sapiens
  misc_feature (61)..(62): /note="This region represents a CpG dinucleotide"
  misc_feature (61)..(61): /note="Nucleotide may be methylated to form 5-methylcytosine"
gtgcaagaatcgcaggtgccgggcacgagcaggggccaaggctcaggcccctcccggctgcgcttgctcccgcccacccctgaacctggaggggcccaggataggggctggggagctggctg

SEQ ID NO: 134 - DNA, 122 bp, Homo sapiens
  misc_feature (61)..(62): /note="This region represents a CpG dinucleotide"
  misc_feature (61)..(61): /note="Nucleotide may be methylated to form 5-methylcytosine"
ctcccttgcccttttgcctcagatttccaacgcttgctagctttgtctgttttgaatggccgtgctcagtgttcagctacggaaatcctctccttccccagctggctcaccaggaaattgtt

SEQ ID NO: 135 - DNA, 122 bp, Homo sapiens
  misc_feature (61)..(62): /note="This region represents a CpG dinucleotide"
  misc_feature (61)..(61): /note="Nucleotide may be methylated to form 5-methylcytosine"
agggtctgtgcccgggagcaactgtgtgtggaggatcacacttcctttcatatgttccagcgacacagaacagcttgctttcaggccgttgcaaaacacaaaccagaaaaagaaaaagagtc

SEQ ID NO: 136 - DNA, 122 bp, Homo sapiens
  misc_feature (61)..(62): /note="This region represents a CpG dinucleotide"
  misc_feature (61)..(61): /note="Nucleotide may be methylated to form 5-methylcytosine"
ccctccccaccgccccctgggaggtgcagaggctccggctgggcgggcgttcgagtggggcgggggcggggcggggcggggcggggccgggcccgacagcactgcgtcctgtaggctgtact

SEQ ID NO: 137 - DNA, 122 bp, Homo sapiens
  misc_feature (61)..(62): /note="This region represents a CpG dinucleotide"
  misc_feature (61)..(61): /note="Nucleotide may be methylated to form 5-methylcytosine"
cgcccgtccccgccccgccccggcccttccgccgccccgccccgggccaccccacctcggcgccatcccgctctacgcttagccccacctcggccccgccccccggtccctccgcaggctcc

SEQ ID NO: 138 - DNA, 122 bp, Homo sapiens
  misc_feature (61)..(62): /note="This region represents a CpG dinucleotide"
  misc_feature (61)..(61): /note="Nucleotide may be methylated to form 5-methylcytosine"
aaccattttcaaagtttccataaaaggaatctcaaaatagattataatgaattcctctgtcgcatattatcatggaacaaagtggcacatttttagaagtgggctactgagaaatgaatcta

SEQ ID NO: 139 - DNA, 122 bp, Homo sapiens
  misc_feature (61)..(62): /note="This region represents a CpG dinucleotide"
  misc_feature (61)..(61): /note="Nucleotide may be methylated to form 5-methylcytosine"
gactcggcctctttcttctgcggccaccagatcgcgggatatcggagacttcgaacaatccgctggagtcctttacagtttaaaaacagaggaccggccgggcgcggtggctcacgcctgta

SEQ ID NO: 140 - DNA, 122 bp, Homo sapiens
  misc_feature (61)..(62): /note="This region represents a CpG dinucleotide"
  misc_feature (61)..(61): /note="Nucleotide may be methylated to form 5-methylcytosine"
attatcttaattttctcgtctttgaacatcactcacgtttgcactacccagtcagtggaacgagtgggtcataattaaggttcagattctagcttccaacgtccaagctggctggagtggca

SEQ ID NO: 141 - DNA, 122 bp, Homo sapiens
  misc_feature (61)..(62): /note="This region represents a CpG dinucleotide"
  misc_feature (61)..(61): /note="Nucleotide may be methylated to form 5-methylcytosine"
gagaggagaggaaggaggcaggaaaaagcaagtcagagctgcagcaacagcaggagagggcgggctggctgtgttcttacaagggagagagaaacccaatacacacacacacacatacacac

SEQ ID NO: 142 - DNA, 122 bp, Homo sapiens
  misc_feature (61)..(62): /note="This region represents a CpG dinucleotide"
  misc_feature (61)..(61): /note="Nucleotide may be methylated to form 5-methylcytosine"
gtaggcgtgcggcggaggcttaacgtggaagacatgggagctgtccatggtaccgtaaggcggactgggcagcccaggcgactggtaggagtaggggtgtacagggaaggaagcgctggccg

SEQ ID NO: 143 - DNA, 122 bp, Homo sapiens
  misc_feature (61)..(62): /note="This region represents a CpG dinucleotide"
  misc_feature (61)..(61): /note="Nucleotide may be methylated to form 5-methylcytosine"
ctgtctggactctctggctctgcatcacctttctcttaaaaaggaagcagaaaaaaataccgacatatgagtcttacagtctttaagatttaagagagattaaatatatttccatgctccta

SEQ ID NO: 144 - DNA, 122 bp, Homo sapiens
  misc_feature (61)..(62): /note="This region represents a CpG dinucleotide"
  misc_feature (61)..(61): /note="Nucleotide may be methylated to form 5-methylcytosine"
tcccttgtgatgagtagagcacacattaataaactgcttgtttttcttttgttaatttgacgtttgttttcaggagagtgtcaactaataacctaaaaagggaaatttaaaaaaaacttgtt

SEQ ID NO: 145 - DNA, 122 bp, Homo sapiens
  misc_feature (61)..(62): /note="This region represents a CpG dinucleotide"
  misc_feature (61)..(61): /note="Nucleotide may be methylated to form 5-methylcytosine"
actttcctaagctgctctaactttcctgccccttccccggccaagcccaactccggatctcgctctccaccggatctcacccgccacacccggacaggcggctggaggaggtcggaccctcc

SEQ ID NO: 146 - DNA, 122 bp, Homo sapiens
  misc_feature (61)..(62): /note="This region represents a CpG dinucleotide"
  misc_feature (61)..(61): /note="Nucleotide may be methylated to form 5-methylcytosine"
cgcgagccctgcccctccggcaagaggcaccatagaaatgtgtgctaacaagcctccctgcggcctgcggggaataggagagagcaggaagctttcagaacaacaagagtggctagaaaagg

SEQ ID NO: 147 - DNA, 122 bp, Homo sapiens
  misc_feature (61)..(62): /note="This region represents a CpG dinucleotide"
  misc_feature (61)..(61): /note="Nucleotide may be methylated to form 5-methylcytosine"
aagcatcgtagacttcgtgcgttctcaacccaacaggaagcgtcacatctcagtgagcttcggctctcacagcccgaaactgcaaggagctcctctgcccggcctctctttactcctcctct

SEQ ID NO: 148 - DNA, 122 bp, Homo sapiens
  misc_feature (61)..(62): /note="This region represents a CpG dinucleotide"
  misc_feature (61)..(61): /note="Nucleotide may be methylated to form 5-methylcytosine"
cggcgggggacgcacccgcctccgaggagctggctccgccgtcccagccccaccatctggcgcttctgactcggatctgttggtgtttacttcctgaaactttgcattcccagggtctgtgc

SEQ ID NO: 149 - DNA, 122 bp, Homo sapiens
  misc_feature (61)..(62): /note="This region represents a CpG dinucleotide"
  misc_feature (61)..(61): /note="Nucleotide may be methylated to form 5-methylcytosine"
atttgatactaaaagacaaagcaacagcttaggctaaggcacctacagggacagtggtgccgatcaaaggaggtgtggcatggggcagggaacagatgcaagtgttgggtttaagaatttag

SEQ ID NO: 150 - DNA, 122 bp, Homo sapiens
  misc_feature (61)..(62): /note="This region represents a CpG dinucleotide"
  misc_feature (61)..(61): /note="Nucleotide may be methylated to form 5-methylcytosine"
tcaccacccttgggccacgccgtctagtccacacctgaggagttggtcaggtagaaggggcggatgaccgtgcggaagccgttgaagtgccctgccgggcaggggaaggaggaggtgctctt

SEQ ID NO: 151 - DNA, 122 bp, Homo sapiens
  misc_feature (61)..(62): /note="This region represents a CpG dinucleotide"
  misc_feature (61)..(61): /note="Nucleotide may be methylated to form 5-methylcytosine"
attgttaggtagaactgcattttaatgactgtgtccctgctgttgcccgaagtgacggggcgacctcccggcacaatgaaatgcttgtgtgaaagagatttttaaaaggaagagagaaattg

SEQ ID NO: 152 - DNA, 122 bp, Homo sapiens
  misc_feature (61)..(62): /note="This region represents a CpG dinucleotide"
  misc_feature (61)..(61): /note="Nucleotide may be methylated to form 5-methylcytosine"
agataaaaaacacacgggttattggactcacaaaattgaggagggaagaatttgccttcacgttgtgaaattaaattgataagaggacactggtttggactgagctcctgcactgggcccag

SEQ ID NO: 153 - DNA, 122 bp, Homo sapiens
  misc_feature (61)..(62): /note="This region represents a CpG dinucleotide"
  misc_feature (61)..(61): /note="Nucleotide may be methylated to form 5-methylcytosine"
tcagttggtacaacagggcaaagggcagccagcgactggggcaaggtactaccgatgaaacgaaagtaagtgcagcgccttgaatggagggggaagggatttggatccccaccgccaaggca

SEQ ID NO: 154 - DNA, 122 bp, Homo sapiens
  misc_feature (61)..(62): /note="This region represents a CpG dinucleotide"
  misc_feature (61)..(61): /note="Nucleotide may be methylated to form 5-methylcytosine"
ctgagtcaggagctgttctcctgggtaatttcagagaatccacctcattgctcacatgcacgtcattgcctttggattgtagcatgctggagggtttaaccagggagttgacaatgagtgtc

SEQ ID NO: 155 - DNA, 122 bp, Homo sapiens
  misc_feature (61)..(62): /note="This region represents a CpG dinucleotide"
  misc_feature (61)..(61): /note="Nucleotide may be methylated to form 5-methylcytosine"
ccttacagtgaggggagaaaaatgtcacttcctggcggacctgacaaccttagaacttttcggggagaagcttggcagggaggggacctggcagctgctcctgggcaggaaccagagggcaa

SEQ ID NO: 156 - DNA, 122 bp, Homo sapiens
  misc_feature (61)..(62): /note="This region represents a CpG dinucleotide"
  misc_feature (61)..(61): /note="Nucleotide may be methylated to form 5-methylcytosine"
tgtgatagtaacctttgtcagaattaaagatcatgcagctaaggaccttgtcacagtagacgtacacatagtagggaccttagatatcattagactaattccatcaacttatagatagaaga

SEQ ID NO: 157 - DNA, 122 bp, Homo sapiens
  misc_feature (61)..(62): /note="This region represents a CpG dinucleotide"
  misc_feature (61)..(61): /note="Nucleotide may be methylated to form 5-methylcytosine"
aacttctaactagtgaacataatctcaagcctcatttcctgttttcctggcaaccaactccgaggatgatttgccaacatgctttatagtaattatggtttgagctttgctgaatcagagag

SEQ ID NO: 158 - DNA, 122 bp, Homo sapiens
  misc_feature (61)..(62): /note="This region represents a CpG dinucleotide"
  misc_feature (61)..(61): /note="Nucleotide may be methylated to form 5-methylcytosine"
atttttaccaggaacggaagccagaagaccagttaaaaggctatcgcatggctggccaggcgtgcacgcctgtaattccagctacgtggaaggctgagaggcaggagaatcgcttgaacccg

SEQ ID NO: 159 - DNA, 122 bp, Homo sapiens
  misc_feature (61)..(62): /note="This region represents a CpG dinucleotide"
  misc_feature (61)..(61): /note="Nucleotide may be methylated to form 5-methylcytosine"
aaagacatgtagctgaaatgccagtgcacatagctaatgtaaacaagttgaggggagcaacggaaacagtgctgtaaactggaaacatgccacgtgagtcatgctggaaggatgtgagggtg

SEQ ID NO: 160 - DNA, 122 bp, Homo sapiens
  misc_feature (61)..(62): /note="This region represents a CpG dinucleotide"
  misc_feature (61)..(61): /note="Nucleotide may be methylated to form 5-methylcytosine"
gaaggtgactcatttagacagatctgcacggggacatttgcaggtcataggggctgtgtgcgaacatgggccctctgcagccaggaagctataacgctgctctccaggcagaagctgctagc

SEQ ID NO: 161 - DNA, 122 bp, Homo sapiens
  misc_feature (61)..(62): /note="This region represents a CpG dinucleotide"
  misc_feature (61)..(61): /note="Nucleotide may be methylated to form 5-methylcytosine"
gtatacaaaatgtggctgtttcctgcatagcagaatgaggttccagcacttcagcagccacggtcctgagtgcttgcccaagaccccttgatttatgattgtgacaggaagttttgcaagga

SEQ ID NO: 162 - DNA, 122 bp, Homo sapiens
  misc_feature (61)..(62): /note="This region represents a CpG dinucleotide"
  misc_feature (61)..(61): /note="Nucleotide may be methylated to form 5-methylcytosine"
ataattccttcctggcccagtcataatttgtttagagatgttgttctacttctttcaaagcgctattcgcactataattaaatgatactcaagcttttaactttgatttatttcatttcttg

SEQ ID NO: 163 - DNA, 122 bp, Homo sapiens
  misc_feature (61)..(62): /note="This region represents a CpG dinucleotide"
  misc_feature (61)..(61): /note="Nucleotide may be methylated to form 5-methylcytosine"
atgctgctgcagtcacggagtgtgaactgcagttccacgaagatgcgctgcccgcggccacggcttatccagccagtctgcagccagttgtcctggttgggctccagcacattgcacacttg

SEQ ID NO: 164 - DNA, 122 bp, Homo sapiens
  misc_feature (61)..(62): /note="This region represents a CpG dinucleotide"
  misc_feature (61)..(61): /note="Nucleotide may be methylated to form 5-methylcytosine"
ccgtgtgtttgtgtctcgagtgccctcatctcaggagcaattttaataacttaacagttgcggtcacattactttgaaaatacaaaaaacgtagaaatcagagtagcaaagaaaattatgga

SEQ ID NO: 165 - DNA, 122 bp, Homo sapiens
  misc_feature (61)..(62): /note="This region represents a CpG dinucleotide"
  misc_feature (61)..(61): /note="Nucleotide may be methylated to form 5-methylcytosine"
cccagtgctgcacccacatgagttactctcggagcctgtaaggcgagatggcgtgaaggacgatgtcgctaacctgcccacgacagagtaggtccccacaccagggaggccacactcctcat

SEQ ID NO: 166 - DNA, 122 bp, Homo sapiens
  misc_feature (61)..(62): /note="This region represents a CpG dinucleotide"
  misc_feature (61)..(61): /note="Nucleotide may be methylated to form 5-methylcytosine"
aagaagggaatatttggagcatgacatcagtaggtgaaaccttggcaaatcctcggaaaacggtgtctgtggcttcctgcactgtcacagcatagacactttgatgtccccgtaagctctcc

SEQ ID NO: 167 - DNA, 122 bp, Homo sapiens
  misc_feature (61)..(62): /note="This region represents a CpG dinucleotide"
  misc_feature (61)..(61): /note="Nucleotide may be methylated to form 5-methylcytosine"
taaaattaaccattttaaagtgaacaacccatggcacttcacaatgttgtataaccaacacgtctatctaatttcaagacattttcgtcattccagaaggaaatcccatatccgttaagcag

SEQ ID NO: 168 - DNA, 122 bp, Homo sapiens
  misc_feature (61)..(62): /note="This region represents a CpG dinucleotide"
  misc_feature (61)..(61): /note="Nucleotide may be methylated to form 5-methylcytosine"
cgccagggggccccccgatgcggataaagggctgtttcttcccagcctctttggaatgcccggctgccttttgaaaggggatccccaggactccggtccagatctggggtttctccctcctt

SEQ ID NO: 169 - DNA, 122 bp, Homo sapiens
  misc_feature (61)..(62): /note="This region represents a CpG dinucleotide"
  misc_feature (61)..(61): /note="Nucleotide may be methylated to form 5-methylcytosine"
aaaacaggaagttaacaaactaaagcaggccttgcagctggtatacgtcttactcaagctcgtcttgtgaccttgtcatgttgcccagaacagagaaactggagttgttgtgaagtaacctt

SEQ ID NO: 170 - DNA, 122 bp, Homo sapiens
  misc_feature (61)..(62): /note="This region represents a CpG dinucleotide"
  misc_feature (61)..(61): /note="Nucleotide may be methylated to form 5-methylcytosine"
ggccaccccatcctcagtctccctcatttttctttacagttagcaccatttacccattcacggagaaccttacagttctcgcaacagggtgatcactcagtaagtactgttgtccctttggt

SEQ ID NO: 171 - DNA, 122 bp, Homo sapiens
  misc_feature (61)..(62): /note="This region represents a CpG dinucleotide"
  misc_feature (61)..(61): /note="Nucleotide may be methylated to form 5-methylcytosine"
ttcttaccagaggaaagagaataactgtctggcagataaatcccagatgtccactctaaccgtccaccttggaacctccaccttcctgtgctcgtcttagaggaattctagaactgtcgttg

SEQ ID NO: 172 - DNA, 122 bp, Homo sapiens
  misc_feature (61)..(62): /note="This region represents a CpG dinucleotide"
  misc_feature (61)..(61): /note="Nucleotide may be methylated to form 5-methylcytosine"
cagccccccaccttgtcactgccaaagtacatcagactcctcccattgaactgcacaaagcgtctctggaagacatagtttctgaggaaggaaggagccaagatcagtgtttgaggttgcat

SEQ ID NO: 173 - DNA, 122 bp, Homo sapiens
  misc_feature (61)..(62): /note="This region represents a CpG dinucleotide"
  misc_feature (61)..(61): /note="Nucleotide may be methylated to form 5-methylcytosine"
catgtgacgctgcgacggggcgtcccgggggtgacactggcatgtgacgctgcgacggggcgtcccggggcagggccctgccaagggacccccaacaaacacgactgaaactcagcctggat

SEQ ID NO: 174 - DNA, 122 bp, Homo sapiens
  misc_feature (61)..(62): /note="This region represents a CpG dinucleotide"
  misc_feature (61)..(61): /note="Nucleotide may be methylated to form 5-methylcytosine"
tgggggatggcttcttgccatgcagttggtgtaaccgtaccaggctatgcagagggcagccgctgtgaacagcagagggaggggagcatagcattggccaacaaggggccagtcatcctggc

SEQ ID NO: 175 - DNA, 122 bp, Homo sapiens
  misc_feature (61)..(62): /note="This region represents a CpG dinucleotide"
  misc_feature (61)..(61): /note="Nucleotide may be methylated to form 5-methylcytosine"
taaatttgattgaatttgaaggtataagggaatttcaaatgaaactttagcctctggtgacgttgccattgatgaatatgatgatagacatcttttcagtagcctttctacctcatgggatt

SEQ ID NO: 176 - DNA, 122 bp, Homo sapiens
  misc_feature (61)..(62): /note="This region represents a CpG dinucleotide"
  misc_feature (61)..(61): /note="Nucleotide may be methylated to form 5-methylcytosine"
ccctcgtggcagtgtcgctgaagttcatgagtttccaaaatgaaggttccaggtgctcagcggtacggagaattgcatctagagccttaggatttaacctcctgtttaggataggcagcagg

SEQ ID NO: 177 - DNA, 122 bp, Homo sapiens
  misc_feature (61)..(62): /note="This region represents a CpG dinucleotide"
  misc_feature (61)..(61): /note="Nucleotide may be methylated to form 5-methylcytosine"
aggcacagccctttaggagcttctgcctcttcttgcctcagaggacttctctacagatcacgagaggaaacacgtggtaagagcaaaccatagtgtgccaagtataactcactccctatgaa

SEQ ID NO: 178 - DNA, 122 bp, Homo sapiens
  misc_feature (61)..(62): /note="This region represents a CpG dinucleotide"
  misc_feature (61)..(61): /note="Nucleotide may be methylated to form 5-methylcytosine"
tccagggagggaactgagaagccgcgagggacaggcccccaacggagatgctgatgaggccggcagccttccagcttccagcgccatcttccttgggagtttgggaaactcagtgcctccag

SEQ ID NO: 179 - DNA, 122 bp, Homo sapiens
  misc_feature (61)..(62): /note="This region represents a CpG dinucleotide"
  misc_feature (61)..(61): /note="Nucleotide may be methylated to form 5-methylcytosine"
gacacacctttcatatatacatgaaattcaaacatcttccccaaggcagactcggaggcacgggcagtcattgtctccaggcggcccaccaggcctttgcaaaatgcctctgtccccttcag

SEQ ID NO: 180 - DNA, 122 bp, Homo sapiens
  misc_feature (61)..(62): /note="This region represents a CpG dinucleotide"
  misc_feature (61)..(61): /note="Nucleotide may be methylated to form 5-methylcytosine"
cagggagggtggacagtggcccaggctgaggggtgccgggcccgcgcggaaccatagcaacgcggagctgcagcctgggcgcggggcagacactaccaagtgaccgggcgtggggaggccca

SEQ ID NO: 181 - DNA, 122 bp, Homo sapiens
  misc_feature (61)..(62): /note="This region represents a CpG dinucleotide"
  misc_feature (61)..(61): /note="Nucleotide may be methylated to form 5-methylcytosine"
caagcctccaccagcagtaagtctgatttgtcggggacagccaatttcctatctgccctgcggaaaaggtgggggggtttgcaaagggagtagcctttggtccttttgttacttaggcatgg

SEQ ID NO: 182 - DNA, 122 bp, Homo sapiens
  misc_feature (61)..(62): /note="This region represents a CpG dinucleotide"
  misc_feature (61)..(61): /note="Nucleotide may be methylated to form 5-methylcytosine"
ccaccaggtggcggtaaggagccatatctggctcaagcagggttaggaactgctccgggccgcgctactagacaatggtgccttacctaatacagactgatgccttgaaacagggttcaccc

SEQ ID NO: 183 - DNA, 122 bp, Homo sapiens
  misc_feature (61)..(62): /note="This region represents a CpG dinucleotide"
  misc_feature (61)..(61): /note="Nucleotide may be methylated to form 5-methylcytosine"
agaggtcagcatcccatgatcgcgctgcactgttgctttatatgattgtgtttgatggcacgattgtttacaacccttgactttcttccctgctttatcattagcattactttagaataatg

SEQ ID NO: 184 - DNA, 122 bp, Homo sapiens
  misc_feature (61)..(62): /note="This region represents a CpG dinucleotide"
  misc_feature (61)..(61): /note="Nucleotide may be methylated to form 5-methylcytosine"
ttggactcggctcttttgtgacctaacagtgcaggggccttgtgctgagctgcacatgctcgctctcgctggtgctccctctctctctctctctctctctgcattatttatagtaaaccata

SEQ ID NO: 185 - DNA, 122 bp, Homo sapiens
  misc_feature (61)..(62): /note="This region represents a CpG dinucleotide"
  misc_feature (61)..(61): /note="Nucleotide may be methylated to form 5-methylcytosine"
ctcccctttcttgcaacgctgagagggcgagtgcgcgctagcagcactttaaaaggaacccgtacgcttccagcgccccggctgccgggccaagaagggagcgacagtgctgccagggagca

SEQ ID NO: 186 - DNA, 122 bp, Homo sapiens
  misc_feature (61)..(62): /note="This region represents a CpG dinucleotide"
  misc_feature (61)..(61): /note="Nucleotide may be methylated to form 5-methylcytosine"
agggaggaggggcggggcggggcgtcaagggaggcgggaccggttactactaattgtgttcggcagcactggtagccaggggaaggcggggctagatacgatagagagagaccttactgaac

SEQ ID NO: 187 - DNA, 122 bp, Homo sapiens
  misc_feature (61)..(62): /note="This region represents a CpG dinucleotide"
  misc_feature (61)..(61): /note="Nucleotide may be methylated to form 5-methylcytosine"
aattatctactttaaaacctagatgacaagcagatggaaaaataattctcttttaatccccggctagctgactcatagccaaaaggatatggtaatatcagttgacaacagagccacccact

SEQ ID NO: 188 - DNA, 122 bp, Homo sapiens
  misc_feature (61)..(62): /note="This region represents a CpG dinucleotide"
  misc_feature (61)..(61): /note="Nucleotide may be methylated to form 5-methylcytosine"
gtcgagaccggacaccaggagggacgggactagctgatagggtgtccagagaccgcggagcgttttgtggtgcgtccttcccagtctgttgcattcaggaattcttccttctcccatgtctt

SEQ ID NO: 189 - DNA, 122 bp, Homo sapiens
  misc_feature (61)..(62): /note="This region represents a CpG dinucleotide"
  misc_feature (61)..(61): /note="Nucleotide may be methylated to form 5-methylcytosine"
acacagagcaaagaacgagcttagtgaaatggagaagcagtagaggtaaataaaaatcctcgagctagaaagctctaagaaccgcttataaattcagttacctcctgaactccggccgatgg

SEQ ID NO: 190 - DNA, 122 bp, Homo sapiens
  misc_feature (61)..(62): /note="This region represents a CpG dinucleotide"
  misc_feature (61)..(61): /note="Nucleotide may be methylated to form 5-methylcytosine"
atctcgggccattacggcgcttagtcgatcattaggtctgtgggtgactgtaggcagagccgggagttgggtgcttggcgcggagggtgaactcgcgggtcttgagctgcaactagaagctg

SEQ ID NO: 191 - DNA, 122 bp, Homo sapiens
  misc_feature (61)..(62): /note="This region represents a CpG dinucleotide"
  misc_feature (61)..(61): /note="Nucleotide may be methylated to form 5-methylcytosine"
cctctcccttttaccttgcttgctacataaaactagttactctggctggacgtggtggcccgtgcctgtaattccagcactttgggaggcctaggagggagaatcacttgaagccaggagtt

SEQ ID NO: 192 - DNA, 122 bp, Homo sapiens
  misc_feature (61)..(62): /note="This region represents a CpG dinucleotide"
  misc_feature (61)..(61): /note="Nucleotide may be methylated to form 5-methylcytosine"
ctgccatggatggcggggacccgcctctaagcggcaccacccatatctggatccgagttacggatgccaatgataatgctcccgtgtttagccaggaggtatacagggttagcctccaagaa

SEQ ID NO: 193 - DNA, 122 bp, Homo sapiens
  misc_feature (61)..(62): /note="This region represents a CpG dinucleotide"
  misc_feature (61)..(61): /note="Nucleotide may be methylated to form 5-methylcytosine"
tggagacctgcataatgaaattcagacagtggtgactaacttcccctcagaacaaggtggcgtgggctggcagggagcatgcttctcccaaggctggggcataaagctgagtgagaggaagc

SEQ ID NO: 194 - DNA, 122 bp, Homo sapiens
  misc_feature (61)..(62): /note="This region represents a CpG dinucleotide"
  misc_feature (61)..(61): /note="Nucleotide may be methylated to form 5-methylcytosine"
taattcaggttcatagcactgtttattaaatgggttaacacaggtaatttgacttgatcacgaagttcactcaaattgcctgtcttagcaattttagtactggctgacttagcatgaaaatc

SEQ ID NO: 195 - DNA, 122 bp, Homo sapiens
  misc_feature (61)..(62): /note="This region represents a CpG dinucleotide"
  misc_feature (61)..(61): /note="Nucleotide may be methylated to form 5-methylcytosine"
caaatacttgatgtatattaggttcagaaaagtaatgcttaactcagtcctttctttcctcgttttttaagataaatgagaatcactcacttacacaacatctttatgaccaggataataag

SEQ ID NO: 196 - DNA, 122 bp, Homo sapiens
  misc_feature (61)..(62): /note="This region represents a CpG dinucleotide"
  misc_feature (61)..(61): /note="Nucleotide may be methylated to form 5-methylcytosine"
acaaaacaaaacaaaaaaaaaaacactccttttccctgttggaagtgagccaaactccaacgtcatggaaacagaaaatttgtctttcttgatagaagcaagtaaaactccaaaaaagagaa

SEQ ID NO: 197 - DNA, 122 bp, Homo sapiens
  misc_feature (61)..(62): /note="This region represents a CpG dinucleotide"
  misc_feature (61)..(61): /note="Nucleotide may be methylated to form 5-methylcytosine"
tcttatttatctccgtgtctgtcattcgcacaagcggctttagagagcgactgagcgtctcgctcaggtgtacaccgctgtgcagagatgccagccctcctggaactgcacccaagaagccc

SEQ ID NO: 198 - DNA, 122 bp, Homo sapiens
  misc_feature (61)..(62): /note="This region represents a CpG dinucleotide"
  misc_feature (61)..(61): /note="Nucleotide may be methylated to form 5-methylcytosine"
cattaaacatctttgctttacaaatttcccagcttcagaaatgtctgtattagcagtgtgcgatcagactaatacagaggggatttcagggactccccatgaatgccccctttctcccttaa

SEQ ID NO: 199 - DNA, 122 bp, Homo sapiens
  misc_feature (61)..(62): /note="This region represents a CpG dinucleotide"
  misc_feature (61)..(61): /note="Nucleotide may be methylated to form 5-methylcytosine"
gtgattcagtcattattttattttcacaacagcctgatgaggtcagtactctcattatgtcgatttctcagaagaggaactgcggctgggagaacgtgactcatctagctgatggagctgag

SEQ ID NO: 200 - DNA, 122 bp, Homo sapiens
  misc_feature (61)..(62): /note="This region represents a CpG dinucleotide"
  misc_feature (61)..(61): /note="Nucleotide may be methylated to form 5-methylcytosine"
ttgttaagtgaaattgccttggaggcacagaggaaaaaaatcagagcagtggtcaaggaacgttgcacagaaaaaaggtagtatctgagcaataatagtagaatgtaggtgataatcatggc

SEQ ID NO: 201 - DNA, 122 bp, Homo sapiens
  misc_feature (61)..(62): /note="This region represents a CpG dinucleotide"
  misc_feature (61)..(61): /note="Nucleotide may be methylated to form 5-methylcytosine"
gacctttcaaaggtgaacgttttacagttcctggcttggcctctgaatgtgggaaaaattcgttcctccgcttcccatcgaattctcgtcgaaaacaactttgtggtcgcgtgcacggtatt

SEQ ID NO: 202 - DNA, 122 bp, Homo sapiens
  misc_feature (61)..(62): /note="This region represents a CpG dinucleotide"
  misc_feature (61)..(61): /note="Nucleotide may be methylated to form 5-methylcytosine"
acctcaggcgatccacccgccttggcctcccaaagtgctgggattacaggagtgagccaccgcgcccggctaaggctgttaataccactttttgtatcagtaagatcatggctggctgtcac

SEQ ID NO: 203 - DNA, 122 bp, Homo sapiens
  misc_feature (61)..(62): /note="This region represents a CpG dinucleotide"
  misc_feature (61)..(61): /note="Nucleotide may be methylated to form 5-methylcytosine"
gctcctgctccggggtgctagccgctaggcggctagtgatggatagctgggcttgagccccgccaggccgccgagtccaccctggcgtccgggggctggcaggccggccctccacaaacagc

SEQ ID NO: 204 - DNA, 122 bp, Homo sapiens
  misc_feature (61)..(62): /note="This region represents a CpG dinucleotide"
  misc_feature (61)..(61): /note="Nucleotide may be methylated to form 5-methylcytosine"
tctagggggtctttcatggtttgggcacaaggattcgtcgccagaatagaactgaaagctcggaaatagacccgagaatacaagtatgccagaaaaaaaattgtcattttaattatctgctg

SEQ ID NO: 205 - DNA, 122 bp, Homo sapiens
  misc_feature (61)..(62): /note="This region represents a CpG dinucleotide"
  misc_feature (61)..(61): /note="Nucleotide may be methylated to form 5-methylcytosine"
ggaatccagatgggcgggggcaagcaggacggggcggggctacgcgggatctgggcggggcggggccggtgaggggtcgggggtgctcctgctattcagccggtgcgcgcggcggcgggagg

SEQ ID NO: 206 - DNA, 122 bp, Homo sapiens
  misc_feature (61)..(62): /note="This region represents a CpG dinucleotide"
  misc_feature (61)..(61): /note="Nucleotide may be methylated to form 5-methylcytosine"
tccagccgaggtcctgtgaagcactttggctactggacgctggggagggcgcagctgggacgatgctaaccccttggccccgccccacggctcggcccaggccccgccccctgttcggcccc

SEQ ID NO: 207 - DNA, 122 bp, Homo sapiens
  misc_feature (61)..(62): /note="This region represents a CpG dinucleotide"
  misc_feature (61)..(61): /note="Nucleotide may be methylated to form 5-methylcytosine"
ctcacagtctggcaatgctcaaagggctgtgcaactcacagatgctgccagcaaagggcacgggacaccctctcccagtttccagcttggttctcaacctctgcccaccccacagggccagc

SEQ ID NO: 208 - DNA, 122 bp, Homo sapiens
  misc_feature (61)..(62): /note="This region represents a CpG dinucleotide"
  misc_feature (61)..(61): /note="Nucleotide may be methylated to form 5-methylcytosine"
acgtaaggaaagcccagtctgagaccccaaccccctccaccccatcccccactcctataccggtcctccattttggtgcctgcaaagctctgggaaagaatcccgggaaacgaaaaatggtg

SEQ ID NO: 209 - DNA, 122 bp, Homo sapiens
  misc_feature (61)..(62): /note="This region represents a CpG dinucleotide"
  misc_feature (61)..(61): /note="Nucleotide may be methylated to form 5-methylcytosine"
acctcaggtgatccgcccatctcggcctcccaaagtgttgagattacaggcgtgagccaccgcgcccggccgctagcgtgttatcttttctaagcatcagtttccttatctgcaacaccagg

SEQ ID NO: 210 - DNA, 122 bp, Homo sapiens
  misc_feature (61)..(62): /note="This region represents a CpG dinucleotide"
  misc_feature (61)..(61): /note="Nucleotide may be methylated to form 5-methylcytosine"
gactgagaattacaaaatttcttgaaaaagcactaggcacaatagttggcgttcaacaaacgctcacacacacatctgccctggaattgggtctacttaaacagaagggggaaaaaaagctt

SEQ ID NO: 211 - DNA, 122 bp, Homo sapiens
  misc_feature (61)..(62): /note="This region represents a CpG dinucleotide"
  misc_feature (61)..(61): /note="Nucleotide may be methylated to form 5-methylcytosine"
ctaatgtgttcttatcatgtgcttcttgaatgagcagttttctcttcgggcatcttggagcgttctgttacagacttcctttgaacaacgggacatgaaataaaacctcgatactttttact

SEQ ID NO: 212 - DNA, 122 bp, Homo sapiens
  misc_feature (61)..(62): /note="This region represents a CpG dinucleotide"
  misc_feature (61)..(61): /note="Nucleotide may be methylated to form 5-methylcytosine"
caagtaagtcccggccagccccgcctccgcccggggcgcagtccgcgtggggagggacagcggggcacagaggctccccagggcctagacacccctgtccccgcctcagggggctgcgtctg

SEQ ID NO: 213 - DNA, 122 bp, Homo sapiens
  misc_feature (61)..(62): /note="This region represents a CpG dinucleotide"
  misc_feature (61)..(61): /note="Nucleotide may be methylated to form 5-methylcytosine"
ctgacacaacccaaccagcctggtgttgcaccacagggctcacacctcagatcaagacaacgggggcccagccacagcccactgacgagggcatgcagggcgtccaggatgcagggcagaga

SEQ ID NO: 214 - DNA, 122 bp, Homo sapiens
  misc_feature (61)..(62): /note="This region represents a CpG dinucleotide"
  misc_feature (61)..(61): /note="Nucleotide may be methylated to form 5-methylcytosine"
ctaattcagttattcattttaccctgagggtggcagcaggagtctcttctatcgcccaagcgttgccaagaggcaacttttaggtcactctgacatgagctaacagatgcagtttctggtta

SEQ ID NO: 215 - DNA, 122 bp, Homo sapiens
  misc_feature (61)..(62): /note="This region represents a CpG dinucleotide"
  misc_feature (61)..(61): /note="Nucleotide may be methylated to form 5-methylcytosine"
gcccataccgcagtaggctcctcgggctgcccctcggtgagtacagttttgatgtcggctcggccgcctgccgccaacccgagatttggtattgccagttgtgggagggcgtcctgctaaaa

SEQ ID NO: 216 - DNA, 122 bp, Homo sapiens
  misc_feature (61)..(62): /note="This region represents a CpG dinucleotide"
  misc_feature (61)..(61): /note="Nucleotide may be methylated to form 5-methylcytosine"
agcattgaggccttctgcaatggccaccggatacccactttattcagacaatgataatatcgttgagctatggtaagatcatttcctttggaacaaaatgaaaagctttcagtgttcacaat

SEQ ID NO: 217 - DNA, 122 bp, Homo sapiens
  misc_feature (61)..(62): /note="This region represents a CpG dinucleotide"
  misc_feature (61)..(61): /note="Nucleotide may be methylated to form 5-methylcytosine"
agcggtggtcgccccacactctgcggagaaagtggtttcgcgcacgcgcgccacgcccatcgaaccctcctaactcactatagacccgaaacggcactcacggggcgacagacctgctagct

SEQ ID NO: 218 - DNA, 122 bp, Homo sapiens
  misc_feature (61)..(62): /note="This region represents a CpG dinucleotide"
  misc_feature (61)..(61): /note="Nucleotide may be methylated to form 5-methylcytosine"
aggcgtcggcgagaggcgggccctggcgctcagcccgaggccgggcgaaggcgggggccgcggccgcttccttggcctccgagtgcctggcgggcctccaggccccagacacacccctctcg

SEQ ID NO: 219 - DNA, 122 bp, Homo sapiens
  misc_feature (61)..(62): /note="This region represents a CpG dinucleotide"
  misc_feature (61)..(61): /note="Nucleotide may be methylated to form 5-methylcytosine"
cagcctttctgctggcagccagacttcttaaggtggtgtgactgtgacttgcttacttttcgagatcaacaacaacaaagcgacaaaatggtgctcctacatattagttgaaagattcagca

SEQ ID NO: 220 - DNA, 122 bp, Homo sapiens
  misc_feature (61)..(62): /note="This region represents a CpG dinucleotide"
  misc_feature (61)..(61): /note="Nucleotide may be methylated to form 5-methylcytosine"
ccgcatgccgcggcctctggtgagctgggtggggatgctcctagtgccccgcctgcgtggcgccccccaggggccacccgccacggcgctcgtggtgtctgacccgcaagggcgcccctagt

SEQ ID NO: 221 - DNA, 122 bp, Homo sapiens
  misc_feature (61)..(62): /note="This region represents a CpG dinucleotide"
  misc_feature (61)..(61): /note="Nucleotide may be methylated to form 5-methylcytosine"
ctggggaagataattcatcatcataaaaacaaacatccattttacacttgcatggcaatgcggatgtccttatttgcataatgatggtgatttgcatatgaggaaaatttgcctgagtgagt

SEQ ID NO: 222 - DNA, 122 bp, Homo sapiens
  misc_feature (61)..(62): /note="This region represents a CpG dinucleotide"
  misc_feature (61)..(61): /note="Nucleotide may be methylated to form 5-methylcytosine"
gatttaaaaaagtaaaagaatagaaaaaaaaaaaaaaaagaacccactgacagcttaaatcgaaagattcagttcagccagccagccagaagtttgggtgtttatcttaacttgcctcacct

SEQ ID NO: 223 - DNA, 122 bp, Homo sapiens
  misc_feature (61)..(62): /note="This region represents a CpG dinucleotide"
  misc_feature (61)..(61): /note="Nucleotide may be methylated to form 5-methylcytosine"
ctgtgctgggggtgggggcggcagacactgcagagcagctagtccggcttacaggttgggcgggagagggctctggaagggaggggaaggggcaaaggcgcccaaactccgagttcaggccg

SEQ ID NO: 224 - DNA, 122 bp, Homo sapiens
  misc_feature (61)..(62): /note="This region represents a CpG dinucleotide"
  misc_feature (61)..(61): /note="Nucleotide may be methylated to form 5-methylcytosine"
gagtggaaggaatgtggctaaaggcaagaaaagctaggttaaacagtcctcgctcagtgacgtgggtatagcaattgtcaggaaaaggtccagtggtttcataggccccacttccaggaata

SEQ ID NO: 225 - DNA, 122 bp, Homo sapiens
  misc_feature (61)..(62): /note="This region represents a CpG dinucleotide"
  misc_feature (61)..(61): /note="Nucleotide may be methylated to form 5-methylcytosine"
gggccaaccggactcagagtaagatccaataaattgatgaccaatcgtaccctcaatctccgcactttacagggtcttccgaggcgtcccaggtgtttgtctcagactgagcttgtggagat

SEQ ID NO: 226 - DNA, 122 bp, Homo sapiens
  misc_feature (61)..(62): /note="This region represents a CpG dinucleotide"
  misc_feature (61)..(61): /note="Nucleotide may be methylated to form 5-methylcytosine"
cacaagttaagggagagtgaggggagagagggtaaggtgaatgaagcttgtcttcttatgcggataaaatttctcaggtaagaaaagttagctctgagcagccctccgcctgatactaatac

SEQ ID NO: 227 - DNA, 122 bp, Homo sapiens
  misc_feature (61)..(62): /note="This region represents a CpG dinucleotide"
  misc_feature (61)..(61): /note="Nucleotide may be methylated to form 5-methylcytosine"
caatttgtaaaagtgctaggtgttataatttggctctaatatttcaaatatattgagtaacgaacaaatgtaacaaagtagatggaaaatatttatgttagagaggctgacttagcactaaa

SEQ ID NO: 228 - DNA, 122 bp, Homo sapiens
  misc_feature (61)..(62): /note="This region represents a CpG dinucleotide"
  misc_feature (61)..(61): /note="Nucleotide may be methylated to form 5-methylcytosine"
ccgagtgggtaatctgactcacaggtctaggaaaagggccattcaggatagtagtattggcgggtattttacaatggagctgcagacatcagcaccagcctcctaaggacaccttgaagacg

SEQ ID NO: 229 - DNA, 122 bp, Homo sapiens
  misc_feature (61)..(62): /note="This region represents a CpG dinucleotide"
  misc_feature (61)..(61): /note="Nucleotide may be methylated to form 5-methylcytosine"
tcccggaccggcggcgtgaaagtcgtgatatcatcgttgaactgtgagcggcagtggcggcggctggggggaacccggatgggaagaagggcgggggaggctgggaggcggggcagaggaaa

SEQ ID NO: 230 - DNA, 122 bp, Homo sapiens
  misc_feature (61)..(62): /note="This region represents a CpG dinucleotide"
  misc_feature (61)..(61): /note="Nucleotide may be methylated to form 5-methylcytosine"
taaaaaaaattgttcaacccatcagttattaaccagctctgcttcccaaattacccaaaacgaataacctcaagcccaccaaacgctgaagggtagtcagtcagagtgagaggcagtgtcgg

SEQ ID NO: 231 - DNA, 122 bp, Homo sapiens
  misc_feature (61)..(62): /note="This region represents a CpG dinucleotide"
  misc_feature (61)..(61): /note="Nucleotide may be methylated to form 5-methylcytosine"
ggattaaaccagaccgtgttgaaccgagcggacgctttggctaaagacccgaaaatgttgcggagccagtctcagctagacctgtgcaaagactctccctatgaattgaagaaaggtatgtc

SEQ ID NO: 232 - DNA, 122 bp, Homo sapiens
  misc_feature (61)..(62): /note="This region represents a CpG dinucleotide"
  misc_feature (61)..(61): /note="Nucleotide may be methylated to form 5-methylcytosine"
ttgcctgctccgtgactttgacaagttaagctctccaagctcccagtttccttatggggtcgtggtaaaactcatgattaataataacaatagcgaagaaagggaaggagtaagaaagagag

SEQ ID NO: 233 - DNA, 122 bp, Homo sapiens
  misc_feature (61)..(62): /note="This region represents a CpG dinucleotide"
  misc_feature (61)..(61): /note="Nucleotide may be methylated to form 5-methylcytosine"
ggagccctcctagtgcctcccacaaagaccgctaacattaatctccaaaaccacgcacctcgtcggggaacaggcggcctgaacagctcacttcctgtatcttgagggatgaggagctggag

SEQ ID NO: 234 - DNA, 122 bp, Homo sapiens
  misc_feature (61)..(62): /note="This region represents a CpG dinucleotide"
  misc_feature (61)..(61): /note="Nucleotide may be methylated to form 5-methylcytosine"
ttcccaggaaaaacatgagtatgacattgacaagcaggaggactacaatcacggcaaaaacgactacagtttgcacatccagggtcatggtgcaatgcagaacactgtagtgttccaggtgg

SEQ ID NO: 235 - DNA, 122 bp, Homo sapiens
  misc_feature (61)..(62): /note="This region represents a CpG dinucleotide"
  misc_feature (61)..(61): /note="Nucleotide may be methylated to form 5-methylcytosine"
cgcagggtcgcaggagcgagaccctaaccaaagtctgcgacctcaggtgcaggaggggtccgcgcgtcccccttcggccgtggcttgcgaggactgcagctgcagggacgagaaggtggcgc

SEQ ID NO: 236 - DNA, 122 bp, Homo sapiens
  misc_feature (61)..(62): /note="This region represents a CpG dinucleotide"
  misc_feature (61)..(61): /note="Nucleotide may be methylated to form 5-methylcytosine"
gatagatttgaattaaacatcttggggctggattgctctgagggatgtgtctttctcatgcgtcacatcattggtgctgtgaaattggataacttgattaagttgatgtctgtctggtttca

SEQ ID NO: 237 - DNA, 122 bp, Homo sapiens
  misc_feature (61)..(62): /note="This region represents a CpG dinucleotide"
  misc_feature (61)..(61): /note="Nucleotide may be methylated to form 5-methylcytosine"
gtgttgcttatctctgctgttatgtaaccctcattactcattaggatgtggtgttcctatcgtgtggcctcaaacatttctcagacaacagaattggatgtaatatttggtagcagagtatt

SEQ ID NO: 238 - DNA, 122 bp, Homo sapiens
  misc_feature (61)..(62): /note="This region represents a CpG dinucleotide"
  misc_feature (61)..(61): /note="Nucleotide may be methylated to form 5-methylcytosine"
gtcagagtgtccagacttgttttcagttggagtgaaactaccctcattacctctgtgactcgagcaggttagacagtgagccaaaagagcctggtggacatactggaaaaagcagaggaaat

SEQ ID NO: 239 - DNA, 122 bp, Homo sapiens
  misc_feature (61)..(62): /note="This region represents a CpG dinucleotide"
  misc_feature (61)..(61): /note="Nucleotide may be methylated to form 5-methylcytosine"
ataatggacatatttcccatgcagccactttctgggttctttgtcatgtgtcaaggtaagcgtttagaaaactcctccgtgggccacggggaggcaattttcacctagtacagaatgcttaa

SEQ ID NO: 240 - DNA, 122 bp, Homo sapiens
  misc_feature (61)..(62): /note="This region represents a CpG dinucleotide"
  misc_feature (61)..(61): /note="Nucleotide may be methylated to form 5-methylcytosine"
ggtaacagagcactgtgagagcccgcagaaagctcctaacccatctgggatgagacctagcgcttccaggacgagccgatgttgagctgagacctcgaaggacaggttagtcattcaccttc

SEQ ID NO: 241 - DNA, 122 bp, Homo sapiens
  misc_feature (61)..(62): /note="This region represents a CpG dinucleotide"
  misc_feature (61)..(61): /note="Nucleotide may be methylated to form 5-methylcytosine"
aaccgtccaccttggaacctccaccttcctgtgctcgtcttagaggaattctagaactgtcgttggaggaacaccgctgttttctagaggtcccacagccgtccttctgttcatgcggagta

SEQ ID NO: 242 - DNA, 122 bp, Homo sapiens
  misc_feature (61)..(62): /note="This region represents a CpG dinucleotide"
  misc_feature (61)..(61): /note="Nucleotide may be methylated to form 5-methylcytosine"
gcgcccaggcgcttggagatctcggagttgtgcatcttggggttctgctgcgccatctggcggcgctgagcggagctccacaccatgaacgcgttcatcggccgcttcaccttctccagggg

SEQ ID NO: 243 - DNA, 122 bp, Homo sapiens
  misc_feature (61)..(62): /note="This region represents a CpG dinucleotide"
  misc_feature (61)..(61): /note="Nucleotide may be methylated to form 5-methylcytosine"
ggaagtggtggggaggctcagggtgtgtcagatccagcctccccacctctgctgagctggcggctggactcaaggcctgccacgtcttcctgctctgcagtgcactagctgtgtgaccttct

SEQ ID NO: 244 - DNA, 122 bp, Homo sapiens
  misc_feature (61)..(62): /note="This region represents a CpG dinucleotide"
  misc_feature (61)..(61): /note="Nucleotide may be methylated to form 5-methylcytosine"
tgcaaaacgaccgactctattgaagacacactgggtggcgcgggaggttcctgccaatgccgggaggaagagcaacccaggacgcctgtgcctgggagggatggaaaggccaggggagggtg

SEQ ID NO: 245 - DNA, 122 bp, Homo sapiens
  misc_feature (61)..(62): /note="This region represents a CpG dinucleotide"
  misc_feature (61)..(61): /note="Nucleotide may be methylated to form 5-methylcytosine"
ctgggagggctcttttaactctgcaagcctcgggtccgtcttgaggctcatgggagattccgtacacctcctaggcatcccaagaagtgttttccccagatatttgtttcttccttaacgct

SEQ ID NO: 246 - DNA, 122 bp, Homo sapiens
  misc_feature (61)..(62): /note="This region represents a CpG dinucleotide"
  misc_feature (61)..(61): /note="Nucleotide may be methylated to form 5-methylcytosine"
cctaaatacttctttccagatcactgcatcattgactcaagcccggggcccagggtcctgcgccagtccatgccgggtcttagacatgcttcacccagcatgaggctatggggctcattggg

SEQ ID NO: 247 - DNA, 122 bp, Homo sapiens
  misc_feature (61)..(62): /note="This region represents a CpG dinucleotide"
  misc_feature (61)..(61): /note="Nucleotide may be methylated to form 5-methylcytosine"
ctccagctccaagctttggggtttccaaaattctgggggcttgtctccctgtcccccccccgccccaagtttccctccgtcgctggcgctgtccggtgccttcggtcgctcgggccgccccc

SEQ ID NO: 248 - DNA, 122 bp, Homo sapiens
  misc_feature (61)..(62): /note="This region represents a CpG dinucleotide"
  misc_feature (61)..(61): /note="Nucleotide may be methylated to form 5-methylcytosine"
gctggggtgtgtgaccatcatcagaactgggtctctgtggaggagaaagcttcctgtttgcgggcagggccgctgcttgcaacaaggccacagggtcctcccagttggaatggagcctgggt

SEQ ID NO: 249 - DNA, 122 bp, Homo sapiens
  misc_feature (61)..(62): /note="This region represents a CpG dinucleotide"
  misc_feature (61)..(61): /note="Nucleotide may be methylated to form 5-methylcytosine"
gtttccattacagtcagttcagatctgggatttagcagaggccattccttcccccttcagcgttgtttgtctcttttcctctacgtagtaacttctcagcctccataaagcaccaggccaca

SEQ ID NO: 250 - DNA, 122 bp, Homo sapiens
  misc_feature (61)..(62): /note="This region represents a CpG dinucleotide"
  misc_feature (61)..(61): /note="Nucleotide may be methylated to form 5-methylcytosine"
agtgtcacctgtgggctgaaaatgcttgcttcacaacttcctcttttgccagctcaatgccgagaccacaaggctccagggaacaacagaagcacattgtggaaaagtccaggtctctgagt

SEQ ID NO: 251 - DNA, 122 bp, Homo sapiens
  misc_feature (61)..(62): /note="This region represents a CpG dinucleotide"
  misc_feature (61)..(61): /note="Nucleotide may be methylated to form 5-methylcytosine"
tccttgcagtcagcagggggcactgaggcacagagggctgagtggctcccctgggtcacacgccaatgagtatgtggcctccagggcttctcagatgctgactggctcatgactcacccagc

SEQ ID NO: 252 - DNA, 122 bp, Homo sapiens
  misc_feature (61)..(62): /note="This region represents a CpG dinucleotide"
  misc_feature (61)..(61): /note="Nucleotide may be methylated to form 5-methylcytosine"
gtgggtggaggctcctctcccttagtcaccctaattgaggaacattctagcaaaagcaaacgcctcagtgtttaactgacaggaggttgtcactccaatctgcaaagggcttgcctgtggaa

SEQ ID NO: 253 - DNA, 122 bp, Homo sapiens
  misc_feature (61)..(62): /note="This region represents a CpG dinucleotide"
  misc_feature (61)..(61): /note="Nucleotide may be methylated to form 5-methylcytosine"
ggggtcggggccaggttctcacaccatccagataatgtatggctgcgacgtggggtcggacgggcgcttcctccgcgggtaccggcaggacgcctacgacggcaaggattacatcgccctga

SEQ ID NO: 254 - DNA, 122 bp, Homo sapiens
  misc_feature (61)..(62): /note="This region represents a CpG dinucleotide"
  misc_feature (61)..(61): /note="Nucleotide may be methylated to form 5-methylcytosine"
gcgcaaggatacaagtgagtatggcctcctaaccttacttatcctgcctcacaacctcaacgatattcatattctggcatttggggctggataattctttggtggtggtggttaggggaggg

SEQ ID NO: 255 - DNA, 122 bp, Homo sapiens
  misc_feature (61)..(62): /note="This region represents a CpG dinucleotide"
  misc_feature (61)..(61): /note="Nucleotide may be methylated to form 5-methylcytosine"
cgtagtcgtgcccagaacgccggcgtggcccagactccattttggaacttcgcaggctggcgtggacgaagtaaacacatttatggaaaaaccccggggttaggaggtttgcggaaagaggg

SEQ ID NO: 256 - DNA, 122 bp, Homo sapiens
  misc_feature (61)..(62): /note="This region represents a CpG dinucleotide"
  misc_feature (61)..(61): /note="Nucleotide may be methylated to form 5-methylcytosine"
atggtgttggcgccctgcgggctcctgctcaacctgaccggcaccctggcgcccggctggcggctggtgaagggcttcctgaaccagccagtggacgtggagttgtaccagggcctgtggga

SEQ ID NO: 257 - DNA, 122 bp, Homo sapiens
  misc_feature (61)..(62): /note="This region represents a CpG dinucleotide"
  misc_feature (61)..(61): /note="Nucleotide may be methylated to form 5-methylcytosine"
ctgtcgggatcatttttcttagcatgacgacctccaggtcagacacaaggtcacaggtggcggtttctgccttcctctggctgaatatatttcattaaatatatattccgcattttctgtat

SEQ ID NO: 258 - DNA, 122 bp, Homo sapiens
  misc_feature (61)..(62): /note="This region represents a CpG dinucleotide"
  misc_feature (61)..(61): /note="Nucleotide may be methylated to form 5-methylcytosine"
cattgaaggcttttgctcacttttccaagttgtttcgtttcgttttgtttctaatgtggacgatcatttaaaatgcctctggtggccgggcgcggtgactgacgcctgtaatcacagcactt

SEQ ID NO: 259 - DNA, 122 bp, Homo sapiens
  misc_feature (61)..(62): /note="This region represents a CpG dinucleotide"
  misc_feature (61)..(61): /note="Nucleotide may be methylated to form 5-methylcytosine"
aaatcagctcaagggtgaactatataaccttctaagttctgtgggctgatcattccacctcgtgcattctaaccccagggctcatacagttaacaaaatagaaagaccaagtagttttaaat

SEQ ID NO: 260 - DNA, 122 bp, Homo sapiens
  misc_feature (61)..(62): /note="This region represents a CpG dinucleotide"
  misc_feature (61)..(61): /note="Nucleotide may be methylated to form 5-methylcytosine"
ctcagctccaaagtcacccttcaatatctgctttgcgtaatgggcggagttccttttaagcgtcattcctttacagtgagtgcagtgttaagttttctcagtagagggcgctagaggaacac

SEQ ID NO: 261 - DNA, 122 bp, Homo sapiens
  misc_feature (61)..(62): /note="This region represents a CpG dinucleotide"
  misc_feature (61)..(61): /note="Nucleotide may be methylated to form 5-methylcytosine"
agtgttcacagcacattcttcgtgacagctgagaacgggaacaagccccagctccgtgaacggaaccacagataaactaaatgtgatcgagccacaccatggagggttcctcggccataaag

SEQ ID NO: 262 - DNA, 122 bp, Homo sapiens
  misc_feature (61)..(62): /note="This region represents a CpG dinucleotide"
  misc_feature (61)..(61): /note="Nucleotide may be methylated to form 5-methylcytosine"
gcataacagccctgacgtcacatcagaccccgtgagccctggtgagcctcccttggagctcgggtgtccaagaactgagtatctgttatgttggtgaacaatgtatgtaccgggttacctgt

SEQ ID NO: 263 - DNA, 122 bp, Homo sapiens
  misc_feature (61)..(62): /note="This region represents a CpG dinucleotide"
  misc_feature (61)..(61): /note="Nucleotide may be methylated to form 5-methylcytosine"
gctgggttggaggcgggtggaggcgggggttcctcacttcagacagctcagcgcggggcccgaggcccagccccatgcccacagctcctccagaccctgggtgagccggaccccggtgagcg

SEQ ID NO: 264 - DNA, 122 bp, Homo sapiens
  misc_feature (61)..(62): /note="This region represents a CpG dinucleotide"
  misc_feature (61)..(61): /note="Nucleotide may be methylated to form 5-methylcytosine"
gatggggcgggtggggctggggcacacgtcggtggccacatgctcctggatacaaatggtcgccttttccccgcaccgccggtgggggggtggtagaggcagcgcctccccgcccgggcacg

SEQ ID NO: 265 - DNA, 122 bp, Homo sapiens
  misc_feature (61)..(62): /note="This region represents a CpG dinucleotide"
  misc_feature (61)..(61): /note="Nucleotide may be methylated to form 5-methylcytosine"
ttcacagccatgctgtcgttggttctttcagtgcaaaagacaacctaggcacatcaatttcgttttcatgcttctcaacataatgaatttgcttcaagaaagtggataatttactcctaaga

SEQ ID NO: 266 - DNA, 122 bp, Homo sapiens
  misc_feature (61)..(62): /note="This region represents a CpG dinucleotide"
  misc_feature (61)..(61): /note="Nucleotide may be methylated to form 5-methylcytosine"
gtgggtggtgtggctgcaggaggaagaagagatttacagtcaagaaaggcaccaacagcccgcccacaggagggatgaggccccactggaaggtgtactgagcaactgcgatgggcctgcct

SEQ ID NO: 267 - DNA, 122 bp, Homo sapiens
  misc_feature (61)..(62): /note="This region represents a CpG dinucleotide"
  misc_feature (61)..(61): /note="Nucleotide may be methylated to form 5-methylcytosine"
accctgtgagtcttcctaatacctacaaaacaggtagaattttcttcttttgtctatgatcgtggtctgaaggatgacttttcagcagcagaagggactggaatggaaggtgtccataattt

SEQ ID NO: 268 - DNA, 122 bp, Homo sapiens
  misc_feature (61)..(62): /note="This region represents a CpG dinucleotide"
  misc_feature (61)..(61): /note="Nucleotide may be methylated to form 5-methylcytosine"
aaaagaactacgccttgccttctccagcaaccacaggtatggcgtcttctcctgtgaacccgcagagcacctcgcctggcggttctagtgcaggccgcggcccagtcttgctcaccctcgca

SEQ ID NO: 269 - DNA, 122 bp, Homo sapiens
  misc_feature (61)..(62): /note="This region represents a CpG dinucleotide"
  misc_feature (61)..(61): /note="Nucleotide may be methylated to form 5-methylcytosine"
gaaaacggcctgtttttctctctccctccataccggttctttcccgcaggaaaagtgatccggtgtttcccatccggaagcattgaagcgtttactatcttaaacaacaaaacaatgtcctt

SEQ ID NO: 270 - DNA, 122 bp, Homo sapiens
  misc_feature (61)..(62): /note="This region represents a CpG dinucleotide"
  misc_feature (61)..(61): /note="Nucleotide may be methylated to form 5-methylcytosine"
tttctggttgctcaatatgagacttgctcaaggccagctctattgtcagtgcctataaaacgaaacaaaacaaaaaacagcaaagcattaagtattctgactttattttgtctagccttgtg

SEQ ID NO: 271 - DNA, 122 bp, Homo sapiens
  misc_feature (61)..(62): /note="This region represents a CpG dinucleotide"
  misc_feature (61)..(61): /note="Nucleotide may be methylated to form 5-methylcytosine"
taggtggagtcctcacgatagtcacacctctcctttgggcctagcagggccagagaaagacggaatcactctacccactcaggttgcccagagagcactttaggttctgactcgcgtggggc

SEQ ID NO: 272 - DNA, 122 bp, Homo sapiens
  misc_feature (61)..(62): /note="This region represents a CpG dinucleotide"
  misc_feature (61)..(61): /note="Nucleotide may be methylated to form 5-methylcytosine"
ctctgctcctcacctgtgatgctggagccctcgccagagcaaccgaacccggatcctctacgctaatagctcccaagccccagctcacctagactctgtccccggttcaaaccctagcccct

SEQ ID NO: 273 - DNA, 122 bp, Homo sapiens
  misc_feature (61)..(62): /note="This region represents a CpG dinucleotide"
  misc_feature (61)..(61): /note="Nucleotide may be methylated to form 5-methylcytosine"
acactgcgactccaagtggtcgttactagttcacaatcaagtagctctcgttcatcttctcgttcatcttcaactctatgattaactgcaaaatgttctgctcattttgactagagtcttga

SEQ ID NO: 274 - DNA, 122 bp, Homo sapiens
  misc_feature (61)..(62): /note="This region represents a CpG dinucleotide"
  misc_feature (61)..(61): /note="Nucleotide may be methylated to form 5-methylcytosine"
tctggggctatctacttagcgcttttgccatttacttcctgagacagactcatgggggatcggggctcaggtgcacctggatgtgaaagccgggaaggcctccctcactcccacacagagcc

SEQ ID NO: 275 - DNA, 122 bp, Homo sapiens
  misc_feature (61)..(62): /note="This region represents a CpG dinucleotide"
  misc_feature (61)..(61): /note="Nucleotide may be methylated to form 5-methylcytosine"
tcctgtcgatcagggtctaaatgtgtggggcggagaaccccagccaatcagtggtgctagcgtgaaaactgcccaatcaggtgcgcagctagagaggaagaggcgggctcttcaatatggca

SEQ ID NO: 276 - DNA, 122 bp, Homo sapiens
  misc_feature (61)..(62): /note="This region represents a CpG dinucleotide"
  misc_feature (61)..(61): /note="Nucleotide may be methylated to form 5-methylcytosine"
gatggattttgtttgaatgaggaacctcagaattaaacgtttgctcccccttagggctttcgtgtgggaagatgtcctattatttaggggtcgcctcttgacttcatcaattccctctcatg

SEQ ID NO: 277 - DNA, 122 bp, Homo sapiens
  misc_feature (61)..(62): /note="This region represents a CpG dinucleotide"
  misc_feature (61)..(61): /note="Nucleotide may be methylated to form 5-methylcytosine"
tttcctagtcctttttaagcgaggctccggatggctgggatgtctttaggttagtagtcccgggaggacgcgaacgccggttcaggcagacacggaagaaagcaagcgggccgcaaagagag

SEQ ID NO: 278 - DNA, 122 bp, Homo sapiens
  misc_feature (61)..(62): /note="This region represents a CpG dinucleotide"
  misc_feature (61)..(61): /note="Nucleotide may be methylated to form 5-methylcytosine"
agtggctcaaagagaagcacttctcggaagcttcccttgctttttgtcagcaatgaaaagcggtgggcagtctagcaacctcttaagaggaaaaggggagtttgcttttaagaggaagacaa

SEQ ID NO: 279 - DNA, 122 bp, Homo sapiens
  misc_feature (61)..(62): /note="This region represents a CpG dinucleotide"
  misc_feature (61)..(61): /note="Nucleotide may be methylated to form 5-methylcytosine"
atctaggcagaaacagtaggaacctactgccaccccccccacccccccccgctaccaccccggccctggctggctcctcacttgcactgatcaagcacctgctgggttagggggttacaaaa

SEQ ID NO: 280 - DNA, 122 bp, Homo sapiens
  misc_feature (61)..(62): /note="This region represents a CpG dinucleotide"
  misc_feature (61)..(61): /note="Nucleotide may be methylated to form 5-methylcytosine"
gcagacgcgggggcggggcacaggatggaatggtggcagtgcgaaaggcgcggcggggggcggtgctgcggtcagcaccgggtgcggggatgcgccacgtgggcctgcagggcctcccggat

SEQ ID NO: 281 - DNA, 122 bp, Homo sapiens
  misc_feature (61)..(62): /note="This region represents a CpG dinucleotide"
  misc_feature (61)..(61): /note="Nucleotide may be methylated to form 5-methylcytosine"
tcagcatttcccacctttccgactgaagctcagtcaattagcagggtctagcagggtccccggcctggtgcctggggtccctctgcctctcagcttcccgggaagtggctaatgagtgctga

SEQ ID NO: 282 - DNA, 122 bp, Homo sapiens
  misc_feature (61)..(62): /note="This region represents a CpG dinucleotide"
  misc_feature (61)..(61): /note="Nucleotide may be methylated to form 5-methylcytosine"
gctgtgttctggaaaggagcatagtaccgtcgttgcggcaggtggtgttgagtgtgtattcgtgtggcccctcccttgtgtgtaagcctcgaaaatggataggtgaaaggagatacgcgcca

SEQ ID NO: 283 - DNA, 122 bp, Homo sapiens
  misc_feature (61)..(62): /note="This region represents a CpG dinucleotide"
  misc_feature (61)..(61): /note="Nucleotide may be methylated to form 5-methylcytosine"
ggcgcggctgggggtgcgaggctgcgcaggcgcggacggcgttggtttgaagaccttcagcgttgccctggcggagcagagacaggccctcggggtggaggtgaggagagctgaggccgcgc

SEQ ID NO: 284 - DNA, 122 bp, Homo sapiens
  misc_feature (61)..(62): /note="This region represents a CpG dinucleotide"
  misc_feature (61)..(61): /note="Nucleotide may be methylated to form 5-methylcytosine"
cttactgatttattaccttcaaggggcttgacaatttgtaatttttctggcataaaacctcgaaggcaactggcactgctgaggtctgtgatctctgactgggtggtgcagagagaggcaag

SEQ ID NO: 285 - DNA, 122 bp, Homo sapiens
  misc_feature (61)..(62): /note="This region represents a CpG dinucleotide"
  misc_feature (61)..(61): /note="Nucleotide may be methylated to form 5-methylcytosine"
gctaggtacctagtagtctcggtaaacaattacaaaaataactgccaatgaccatttccccgctagccatttccagctgctgatctgatccagccctggcttcgttgcctggagcctggatt

SEQ ID NO: 286 - DNA, 122 bp, Homo sapiens
  misc_feature (61)..(62): /note="This region represents a CpG dinucleotide"
  misc_feature (61)..(61): /note="Nucleotide may be methylated to form 5-methylcytosine"
gggcatgcagggcgtccaggatgcagggcagagagagaagcgagggatgagtcacggatgcgccccccgctctgagcccgacggggccctgaatggcttttcctgccctggctcctcccatc

SEQ ID NO: 287 - DNA, 122 bp, Homo sapiens
  misc_feature (61)..(62): /note="This region represents a CpG dinucleotide"
  misc_feature (61)..(61): /note="Nucleotide may be methylated to form 5-methylcytosine"
agaggccccgggtcccgcggcccggggggcggcgcaggatgctgggcatgaagacctggtcgtctctgctccagaacctcagtaagtgcccagctcaccgccccgtggacgggagggtgggg

SEQ ID NO: 288 - DNA, 122 bp, Homo sapiens
  misc_feature (61)..(62): /note="This region represents a CpG dinucleotide"
  misc_feature (61)..(61): /note="Nucleotide may be methylated to form 5-methylcytosine"
aaacaaagcagctgtagttttaaattctgtcatccttcccccatcttttttctgctaacacgtggctttccacaaaagggtcagtgtgatctttgcagatcagagataaggaatatagccac

SEQ ID NO: 289 - DNA, 122 bp, Homo sapiens
  misc_feature (61)..(62): /note="This region represents a CpG dinucleotide"
  misc_feature (61)..(61): /note="Nucleotide may be methylated to form 5-methylcytosine"
gttttgtgtgttgtgcgtgtgtgtggcggtttttcccccgtggtgcattttattttttatcgttgtgctcttttttttcttttttttttttaacccagtgagcgtttttttttttttttttt

SEQ ID NO: 290 - DNA, 122 bp, Homo sapiens
  misc_feature (61)..(62): /note="This region represents a CpG dinucleotide"
  misc_feature (61)..(61): /note="Nucleotide may be methylated to form 5-methylcytosine"
gtcccttgcaggcgctccacccgccctcgggtcaggagccagggctgcgcccacactcaccgcgttccgcacccccagctcggccccatagagcagcagtagcttcatggctttgtagctgc

SEQ ID NO: 291 - DNA, 122 bp, Homo sapiens
  misc_feature (61)..(62): /note="This region represents a CpG dinucleotide"
  misc_feature (61)..(61): /note="Nucleotide may be methylated to form 5-methylcytosine"
ctaagcgttttcctatcgatatctgcaggtaacagatggcacgctctcaaacagggtaatcggaggagggtctaataaaggaactattttcaacagcggagtaggcgttagggactccagta

SEQ ID NO: 292 - DNA, 122 bp, Homo sapiens
  misc_feature (61)..(62): /note="This region represents a CpG dinucleotide"
  misc_feature (61)..(61): /note="Nucleotide may be methylated to form 5-methylcytosine"
atgtgggttcctgcgggaacgatttaagaataggactacttcctgcttctggatatgggccggtgaagggaaaggaaatagctctacgagcggcatcctgcctgcgttagcggcggtggagg

SEQ ID NO: 293 - DNA, 122 bp, Homo sapiens
  misc_feature (61)..(62): /note="This region represents a CpG dinucleotide"
  misc_feature (61)..(61): /note="Nucleotide may be methylated to form 5-methylcytosine"
ctggggacctgcgggaggactacaaggctttctggtggccattcctgtgtatacagagggcggggctcaccagggcaggctgatcagcctggaggacctcaaggtacaaataggaacaaatt

SEQ ID NO: 294 - DNA, 122 bp, Homo sapiens
  misc_feature (61)..(62): /note="This region represents a CpG dinucleotide"
  misc_feature (61)..(61): /note="Nucleotide may be methylated to form 5-methylcytosine"
cctctccttgccatgccatcaggtcaggaatgagcatggggaaggagctggagcatggagcggcttggcctcagtctggcctgatttcatggtccccagctgtaccccgtgttaggtgggtg

SEQ ID NO: 295 - DNA, 122 bp, Homo sapiens
  misc_feature (61)..(62): /note="This region represents a CpG dinucleotide"
  misc_feature (61)..(61): /note="Nucleotide may be methylated to form 5-methylcytosine"
ataaccgcccaggcaggtgcagggctttgctgctggtatttggcctaccctgactaggagcgcctcctctgtggctttagtccagctgcacatctctgctggtgctggcaggggtgctcagc

SEQ ID NO: 296 - DNA, 122 bp, Homo sapiens
  misc_feature (61)..(62): /note="This region represents a CpG dinucleotide"
  misc_feature (61)..(61): /note="Nucleotide may be methylated to form 5-methylcytosine"
gaatgtttttaactcataaactgttatgcaactttttttatagttattactacctgctaacgtgtagatactgtgataactcattttactagaagttatttggcagtatgagtacatgttta

SEQ ID NO: 297 - DNA, 122 bp, Homo sapiens
  misc_feature (61)..(62): /note="This region represents a CpG dinucleotide"
  misc_feature (61)..(61): /note="Nucleotide may be methylated to form 5-methylcytosine"
gcggttagaagcaggggtccgtctccttagcttgagtgtggcccgggacagaaacagttgcgttgcgcatgttgtgagaccccagtgaccaggaaccccggggagaagtctcctccatgagt

SEQ ID NO: 298 - DNA, 122 bp, Homo sapiens
  misc_feature (61)..(62): /note="This region represents a CpG dinucleotide"
  misc_feature (61)..(61): /note="Nucleotide may be methylated to form 5-methylcytosine"
cagaaggagttgggagatgagccttccgcaaactcctgacctgtgggtccgtccgttcaacggccaaaggctggcggaggagggatcccctgcctttctcggaacggaacggagcagagtcg

SEQ ID NO: 299 - DNA, 122 bp, Homo sapiens
  misc_feature (61)..(62): /note="This region represents a CpG dinucleotide"
  misc_feature (61)..(61): /note="Nucleotide may be methylated to form 5-methylcytosine"
gggtgtggcggggaaggcggtaagggcacagtctggagagctcaaagcccccccaaggaccgagccccgccccccaagcgggagggcgagcgagtgatggcggcggctgtggctgtggcgtg

SEQ ID NO: 300 - DNA, 122 bp, Homo sapiens
  misc_feature (61)..(62): /note="This region represents a CpG dinucleotide"
  misc_feature (61)..(61): /note="Nucleotide may be methylated to form 5-methylcytosine"
catacagtaaatcatctgcagcttacaccaatcgtgtgaatattttacacatggggaaagcgaagctcagagaggttgaattacaggccagagcccacacagctggttagttgcagagccag

SEQ ID NO: 301 - DNA, 122 bp, Homo sapiens
  misc_feature (61)..(62): /note="This region represents a CpG dinucleotide"
  misc_feature (61)..(61): /note="Nucleotide may be methylated to form 5-methylcytosine"
tacagaaatgcattctaagctaggcgcctgtatgtcagaatcagttctgcaggtagcttccgtgctccaagtatgacatgtattgtaagggctgcatctgttttaaacccacataagccatg

SEQ ID NO: 302 - DNA, 122 bp, Homo sapiens
  misc_feature (61)..(62): /note="This region represents a CpG dinucleotide"
  misc_feature (61)..(61): /note="Nucleotide may be methylated to form 5-methylcytosine"
ctccatcctgactcttgaacttacccacaataagaataaattctgcctcatctttgcctgcgtcccccattttttccccatctctgaaagcttgacatctcctgttggggaagggccagcct

SEQ ID NO: 303 - DNA, 122 bp, Homo sapiens
  misc_feature (61)..(62): /note="This region represents a CpG dinucleotide"
  misc_feature (61)..(61): /note="Nucleotide may be methylated to form 5-methylcytosine"
cggcctggcggtttctcagctgtgcgcatgcaggatgagggcttggtcagcaggtggagccgtggacgcctttattgaacacaaactcttccttcctgacatcagatcagctgtaaaccttt

SEQ ID NO: 304 - DNA, 122 bp, Homo sapiens
  misc_feature (61)..(62): /note="This region represents a CpG dinucleotide"
  misc_feature (61)..(61): /note="Nucleotide may be methylated to form 5-methylcytosine"
tagccactttagtcttaaacggatactgaggtctgctgaagggagaataattaacacagccgttaatcgagtcccagattaccttcgacagtaatcatttgcgtgcataaagaaaacccttt

SEQ ID NO: 305 - DNA, 122 bp, Homo sapiens
  misc_feature (61)..(62): /note="This region represents a CpG dinucleotide"
  misc_feature (61)..(61): /note="Nucleotide may be methylated to form 5-methylcytosine"
cttcagcctcctcatatgtaaaatacataatgaggattaaatactgagagcatacagaaccgtgctggtccagagcaagtgctcaatcaacattagcaattgttatgttactgtgttgctct

SEQ ID NO: 306 - DNA, 122 bp, Homo sapiens
  misc_feature (61)..(62): /note="This region represents a CpG dinucleotide"
  misc_feature (61)..(61): /note="Nucleotide may be methylated to form 5-methylcytosine"
ggctagagaggggctaggggaaggcccgtgagcacggatgtatgaaaataatcatgttcccggggaataccaagagggtcgggggtgagggtgggaggtcggcaagtacatttttgtatttg

SEQ ID NO: 307 - DNA, 122 bp, Homo sapiens
  misc_feature (61)..(62): /note="This region represents a CpG dinucleotide"
  misc_feature (61)..(61): /note="Nucleotide may be methylated to form 5-methylcytosine"
ggtttcactatgatgcagcactgaaataaacagttgtgtaatagaagattgcatatgctacgacagtcagcataattaaaggcagagaaatatcaaatctctcagaatttgaagttgaggag

SEQ ID NO: 308 - DNA, 122 bp, Homo sapiens
  misc_feature (61)..(62): /note="This region represents a CpG dinucleotide"
  misc_feature (61)..(61): /note="Nucleotide may be methylated to form 5-methylcytosine"
atggttagaatcgggctgatttagcccagtgaagacgttacgtgctagcaaaacggtaggcgcactttatcattactagtaacaaccagcttgtattgaatgtactatatgccaaatgcttt

SEQ ID NO: 309 - DNA, 122 bp, Homo sapiens
  misc_feature (61)..(62): /note="This region represents a CpG dinucleotide"
  misc_feature (61)..(61): /note="Nucleotide may be methylated to form 5-methylcytosine"
ccctccccgcccagccgaccctccccggcaggagcgcgggccgtgcagggtctcgggggtcgaaccgtcctggaggtcacacggccccagagttgcctgtcccaggggtcgcccagtccgga

SEQ ID NO: 310 - DNA, 122 bp, Homo sapiens
  misc_feature (61)..(62): /note="This region represents a CpG dinucleotide"
  misc_feature (61)..(61): /note="Nucleotide may be methylated to form 5-methylcytosine"
ctgtttttgtaaataaagtgttgtcagcaggcagccacatcccttcatttccatattgtccgtggctgctctgctgtacaatggcacagtccagtaatcgcaatggagactatatggcatat

SEQ ID NO: 311 - DNA, 122 bp, Homo sapiens
  misc_feature (61)..(62): /note="This region represents a CpG dinucleotide"
  misc_feature (61)..(61): /note="Nucleotide may be methylated to form 5-methylcytosine"
tctgtaggtcttttcccagatatgtatttttctctctaacttctaactcgctgaagtttccgcccatgtgacttccagcgtgagttaccagaaaccacaagagagagagagagcgtgcaagc

SEQ ID NO: 312 - DNA, 122 bp, Homo sapiens
  misc_feature (61)..(62): /note="This region represents a CpG dinucleotide"
  misc_feature (61)..(61): /note="Nucleotide may be methylated to form 5-methylcytosine"
tgttccagtactcagcgtcaggccgccccagctccgtcaccgcccggaactcccccacgtcgctgtcgaagcgcacggactcctcctggttatagaagtatctgtccaggaaccgcacccgc

SEQ ID NO: 313 - DNA, 122 bp, Homo sapiens
  misc_feature (61)..(62): /note="This region represents a CpG dinucleotide"
  misc_feature (61)..(61): /note="Nucleotide may be methylated to form 5-methylcytosine"
gccgccgccctgacccggcctggagctgtggaaccgcccgcgcgacctccagttcccgcccgcccgtgcctggcgctccagacctgggatcctcccggcggctctgcccagctctgcccgcc

SEQ ID NO: 314 - DNA, 122 bp, Homo sapiens
  misc_feature (61)..(62): /note="This region represents a CpG dinucleotide"
  misc_feature (61)..(61): /note="Nucleotide may be methylated to form 5-methylcytosine"
ccagttactcagaaggctgaagtaggagaattgcttaagcccaggaggttgaagttgcagcgagttgtgatcttgcaactgcactccagactaggtcacagattcagactctgtctcttaaa

SEQ ID NO: 315 - DNA, 122 bp, Homo sapiens
  misc_feature (61)..(62): /note="This region represents a CpG dinucleotide"
  misc_feature (61)..(61): /note="Nucleotide may be methylated to form 5-methylcytosine"
aattaatttatttatttttccattgtgtgtggatataccacattttgttcattcatcagtcgattgacatcttagttgtttctactttgtggctattatgaataatgcctccatgaacattt

SEQ ID NO: 316 - DNA, 122 bp, Homo sapiens
  misc_feature (61)..(62): /note="This region represents a CpG dinucleotide"
  misc_feature (61)..(61): /note="Nucleotide may be methylated to form 5-methylcytosine"
ggcactgtaagagcacgtgttgcctccggggacccgcttgggagggggctagaggggaggcggggtgcagtctaaagaatgtaggcaaaacacacatcatctcaccctgcaagggacagcaa

SEQ ID NO: 317 - DNA, 122 bp, Homo sapiens
  misc_feature (61)..(62): /note="This region represents a CpG dinucleotide"
  misc_feature (61)..(61): /note="Nucleotide may be methylated to form 5-methylcytosine"
tctccccagactccagactctagagggcgacctcctcctgctcctgctcctggagcgcagcgagcgcacagcgtttccgcaggaatcctgagaatggcaaggcccccatacccgcggtggtt

SEQ ID NO: 318 - DNA, 122 bp, Homo sapiens
  misc_feature (61)..(62): /note="This region represents a CpG dinucleotide"
  misc_feature (61)..(61): /note="Nucleotide may be methylated to form 5-methylcytosine"
aactgcatctaaccctgacacacacaggcagccactcggtacgggggaccctgttacacacggcccactgtgggaagcctgaggccatgtgaaggggaccccctgggctctgtctctttgtc

SEQ ID NO: 319 - DNA, 122 bp, Homo sapiens
  misc_feature (61)..(62): /note="This region represents a CpG dinucleotide"
  misc_feature (61)..(61): /note="Nucleotide may be methylated to form 5-methylcytosine"
accaaggaagtgacttcagttgaactctgtacctgttgtgttcacttcctttgcaacatgcgtgactaatggttactccttctcttgaatgcttccagaagagtagcactcaccacctcatg

SEQ ID NO: 320 - DNA, 122 bp, Homo sapiens
  misc_feature (61)..(62): /note="This region represents a CpG dinucleotide"
  misc_feature (61)..(61): /note="Nucleotide may be methylated to form 5-methylcytosine"
gctgaggcagcggcaggcggtgggcaagctgctgggccactggcggagcctgctgcgtcgcgtgccggcaagcccgggcctggcgcacggcctgtattggccccagcacttcctgccgcccc

SEQ ID NO: 321 - DNA, 122 bp, Homo sapiens
  misc_feature (61)..(62): /note="This region represents a CpG dinucleotide"
  misc_feature (61)..(61): /note="Nucleotide may be methylated to form 5-methylcytosine"
gaccccctccctgcctccagcctgttctggagacctccaagcaggagctggaggaggatccgcccagcaccgcagcccgcgccgcctcctcctgggagccccaaagacactctctgctcctc

SEQ ID NO: 322 - DNA, 122 bp, Homo sapiens
  misc_feature (61)..(62): /note="This region represents a CpG dinucleotide"
  misc_feature (61)..(61): /note="Nucleotide may be methylated to form 5-methylcytosine"
gcattagaataggaactccaggggcagggttcagaccagttccatttaccattttatatccgggacctaacatcagacctggttacacagttgttggatgaataaattagtgagccccttct

SEQ ID NO: 323 - DNA, 122 bp, Homo sapiens
  misc_feature (61)..(62): /note="This region represents a CpG dinucleotide"
  misc_feature (61)..(61): /note="Nucleotide may be methylated to form 5-methylcytosine"
accagggcttgttattgtcaatagcacaagaggctaaagatggcgccatttccggtcacgcggcgccgagggaggggcggtgtcaacctcagggagtgggggtgagggaagcgctgcagccg

SEQ ID NO: 324 - DNA, 122 bp, Homo sapiens
  misc_feature (61)..(62): /note="This region represents a CpG dinucleotide"
  misc_feature (61)..(61): /note="Nucleotide may be methylated to form 5-methylcytosine"
gaaactgaataacgaagatcactcaacaatgcctgcccctctctgactgcaccgtcccggcgctcccaccgccgccgccgccgcccaatagagcccctggggcggtccccaccgacggtgca

SEQ ID NO: 325 - DNA, 122 bp, Homo sapiens
  misc_feature (61)..(62): /note="This region represents a CpG dinucleotide"
  misc_feature (61)..(61): /note="Nucleotide may be methylated to form 5-methylcytosine"
ccgtgcgtcatccggaaggctgccataagcctgcgtttcgcagagctgcgctgaggctcccgtgtcgcggccgtccggccggcgcgctgatgtggctgcaaacctgggtatcagatcagccg

SEQ ID NO: 326 - DNA, 122 bp, Homo sapiens
  misc_feature (61)..(62): /note="This region represents a CpG dinucleotide"
  misc_feature (61)..(61): /note="Nucleotide may be methylated to form 5-methylcytosine"
atgtcctctatgatgtcactgtcatcatcattttacagacacactgcgactccaagtggtcgttactagttcacaatcaagtagctctcgttcatcttctcgttcatcttcaactctatgat

SEQ ID NO: 327 - DNA, 122 bp, Homo sapiens
  misc_feature (61)..(62): /note="This region represents a CpG dinucleotide"
  misc_feature (61)..(61): /note="Nucleotide may be methylated to form 5-methylcytosine"
gcacagcgtcggccggggccaggccgagccaggccacccctgttttccgcgccattggcccgcccggcccgccccaaccgacggcgccctcctgacccaggcagcctagcgctggggcccaa

SEQ ID NO: 328 - DNA, 122 bp, Homo sapiens
  misc_feature (61)..(62): /note="This region represents a CpG dinucleotide"
  misc_feature (61)..(61): /note="Nucleotide may be methylated to form 5-methylcytosine"
tcacagcgcgctggcgctacacgcccgctaaaagaaggttgatttctaattggccccggtcggccaatagaaaaaagataatctggagcgttttcattggtccgctaaagataatgacccgc

SEQ ID NO: 329 - DNA, 122 bp, Homo sapiens
  misc_feature (61)..(62): /note="This region represents a CpG dinucleotide"
  misc_feature (61)..(61): /note="Nucleotide may be methylated to form 5-methylcytosine"
gccactgcactccagcctgggcaacagagcgagaccctttttcacaaaaataaaacaaaacgaaaaaagatcaggcctccgacttcctccaaattcctcattgtccagaggagaaaatagcc

SEQ ID NO: 330 - DNA, 122 bp, Homo sapiens
  misc_feature (61)..(62): /note="This region represents a CpG dinucleotide"
  misc_feature (61)..(61): /note="Nucleotide may be methylated to form 5-methylcytosine"
aaagagaacttgtgagccttaagagctgcccggcgccgtcttaccaggcctcgcccggcccggccctggccctcagttccctgccagggttgggacttaagggagatcttatgacctaggaa

SEQ ID NO: 331 - DNA, 122 bp, Homo sapiens
  misc_feature (61)..(62): /note="This region represents a CpG dinucleotide"
  misc_feature (61)..(61): /note="Nucleotide may be methylated to form 5-methylcytosine"
accactttagggtattttcctccactcattgatgacttgaaacaatcccgaattctgtggcgtatatgacatagctcttgacccatgattgttgtgttgaactctttggcatagttgaaatg

SEQ ID NO: 332 - DNA, 122 bp, Homo sapiens
  misc_feature (61)..(62): /note="This region represents a CpG dinucleotide"
  misc_feature (61)..(61): /note="Nucleotide may be methylated to form 5-methylcytosine"
ctgagtgtatagtgacttacccaggccacacagttggataccagagatagtagtcacaatcgctaacatctgccatgtggtccttactgcaaatcttatttaataatgaggtcggtttttgt

SEQ ID NO: 333 - DNA, 122 bp, Homo sapiens
  misc_feature (61)..(62): /note="This region represents a CpG dinucleotide"
  misc_feature (61)..(61): /note="Nucleotide may be methylated to form 5-methylcytosine"
gcgcccacacaggggcctcctggagggtccctgtgggaggctgtatgtggggcagaggttcggatgtggccggatacccactctcccataccgggggccctgcgctggccactccagccaca

SEQ ID NO: 334 - DNA, 122 bp, Homo sapiens
  misc_feature (61)..(62): /note="This region represents a CpG dinucleotide"
  misc_feature (61)..(61): /note="Nucleotide may be methylated to form 5-methylcytosine"
tgcagcccacattttatttctattcctgataacacgtgactaatcttcacactctattttcgtataataaatgttgaacaaatgcttttattaaaacttaagaaaaggctaacactgaagag

SEQ ID NO: 335 - DNA, 122 bp, Homo sapiens
  misc_feature (61)..(62): /note="This region represents a CpG dinucleotide"
  misc_feature (61)..(61): /note="Nucleotide may be methylated to form 5-methylcytosine"
aagcaggcccaccctgtcagccaataagatccaggaaaagcagatgttgttaactgagaccgcacctgctgagaattaaacagccaattacaagcttcccggcgtcctcgcagaccacctct

SEQ ID NO: 336 - DNA, 122 bp, Homo sapiens
  misc_feature (61)..(62): /note="This region represents a CpG dinucleotide"
  misc_feature (61)..(61): /note="Nucleotide may be methylated to form 5-methylcytosine"
agcgttttatgatgcggccgtgggtgctggccttggctggggcttgtggcgactgggtgccgtgacgtgggggtggaccgggtagagcggggtcggcagggggccgagtccgggcgcccccc

SEQ ID NO: 337 - DNA, 122 bp, Homo sapiens
  misc_feature (61)..(62): /note="This region represents a CpG dinucleotide"
  misc_feature (61)..(61): /note="Nucleotide may be methylated to form 5-methylcytosine"
taatgagtatttaatcctttttcacactttcacgtctgaaggtgggcctaacgatattatcgttaagggataaaacctcattattttgactcggacactaatgtgttcttatcatgtgcttc

SEQ ID NO: 338 - DNA, 122 bp, Homo sapiens
  misc_feature (61)..(62): /note="This region represents a CpG dinucleotide"
  misc_feature (61)..(61): /note="Nucleotide may be methylated to form 5-methylcytosine"
aatgagtaacaactatgagcaaaatttctgactcagcttccagtgtcaatgcaatggaaacgatttccttttctgtatttctcaggtagttgcgtggattaaggagatacagccctgaacac

SEQ ID NO: 339 - DNA, 122 bp, Homo sapiens
  misc_feature (61)..(62): /note="This region represents a CpG dinucleotide"
  misc_feature (61)..(61): /note="Nucleotide may be methylated to form 5-methylcytosine"
agaaagcacagccactctactcttattcagttgaaaagaatttccaggaaggtgtttctgcgattgcctcagaaaagtcagttccctttgggaatttcccttagggatcatctgtaactcca

SEQ ID NO: 340 - DNA, 122 bp, Homo sapiens
  misc_feature (61)..(62): /note="This region represents a CpG dinucleotide"
  misc_feature (61)..(61): /note="Nucleotide may be methylated to form 5-methylcytosine"
ctcgcctctctcctggacgccgtcgccctgcctccccgcggggacacagcctccctcccacgtcccgcccggcaccggagccgctcacttgggagcttcttactgtgtggggggagctgggg

SEQ ID NO: 341 - DNA, 122 bp, Homo sapiens
  misc_feature (61)..(62): /note="This region represents a CpG dinucleotide"
  misc_feature (61)..(61): /note="Nucleotide may be methylated to form 5-methylcytosine"
acttagagataaactgagctgaaggtatacagagagaagggttctatcataattgtgccacgacttctggctgactgaattctgtgaaacctacagcacaccctctgatattctccctcacc

SEQ ID NO: 342 - DNA, 122 bp, Homo sapiens
  misc_feature (61)..(62): /note="This region represents a CpG dinucleotide"
  misc_feature (61)..(61): /note="Nucleotide may be methylated to form 5-methylcytosine"
cccccaccctcccagccggcagattatgaagatttagtccccggtgctgggcactgggcacgcgcacctccagagcgtccccatggcgaccgagcggctctagcgccccaaccaattgctgg

SEQ ID NO: 343 - DNA, 122 bp, Homo sapiens
  misc_feature (61)..(62): /note="This region represents a CpG dinucleotide"
  misc_feature (61)..(61): /note="Nucleotide may be methylated to form 5-methylcytosine"
agattactcaactgtaaaacgtgttctgtgggccaactgtgacactgggagtgtggcaatcgtcactcatttgtttattccacaaacatgtattgagcaactacttcctgtcaccagtaagg

SEQ ID NO: 344 - DNA, 122 bp, Homo sapiens
  misc_feature (61)..(62): /note="This region represents a CpG dinucleotide"
  misc_feature (61)..(61): /note="Nucleotide may be methylated to form 5-methylcytosine"
ttaaacaaagaaataaacaaaaaaatcattatgctacacagaaaaatgaaagcaaaaccacggacagcagcttggacaccacgtgtctgaccaaggcagcaccatggacagcagccaacagt

SEQ ID NO: 345 - DNA, 122 bp, Homo sapiens
  misc_feature (61)..(62): /note="This region represents a CpG dinucleotide"
  misc_feature (61)..(61): /note="Nucleotide may be methylated to form 5-methylcytosine"
agtggttgtgcaactggacttactgcttcctcttacatatctgccatcatcaagcgactacgcctgggatagtttacagatgtatgaaaagcaagcagaacagaattgaatcttatcagtgg

SEQ ID NO: 346 - DNA, 122 bp, Homo sapiens
  misc_feature (61)..(62): /note="This region represents a CpG dinucleotide"
  misc_feature (61)..(61): /note="Nucleotide may be methylated to form 5-methylcytosine"
catgatgtcactattgaaaacaaagattctgcatggctctgtgtcaagtcatggtggaggcgaagggaatagaaaggagccttaaacagattacagtgtttctccagtagagggcaatccca

SEQ ID NO: 347 - DNA, 122 bp, Homo sapiens
  misc_feature (61)..(62): /note="This region represents a CpG dinucleotide"
  misc_feature (61)..(61): /note="Nucleotide may be methylated to form 5-methylcytosine"
ttagtgataatgtcagaattttgtttctacagcttcttccccctgtagctacttcacatgcgttgacatagaaatgtgacacatctttctcattagagaaaatgttttcatgcttttagatt

SEQ ID NO: 348 - DNA, 122 bp, Homo sapiens
  misc_feature (61)..(62): /note="This region represents a CpG dinucleotide"
  misc_feature (61)..(61): /note="Nucleotide may be methylated to form 5-methylcytosine"
cagtaaacacgtgttgattgaattgagcaagtgaatgagtgaacggctgcagcggacccccgaactcccccaactcgaaccaccgccgcaggtaattccacctggcccaggttccaccccag

SEQ ID NO: 349 - DNA, 122 bp, Homo sapiens
  misc_feature (61)..(62): /note="This region represents a CpG dinucleotide"
  misc_feature (61)..(61): /note="Nucleotide may be methylated to form 5-methylcytosine"
gatgctgagaagttgtgctgaacccacttttaaaagatgaattggagtaaggggcagaggcggtaaaaggtagtatggcaagctctgtaaactgcagacaggtccgaaaatggggtggggaa

SEQ ID NO: 350 - DNA, 122 bp, Homo sapiens
  misc_feature (61)..(62): /note="This region represents a CpG dinucleotide"
  misc_feature (61)..(61): /note="Nucleotide may be methylated to form 5-methylcytosine"
atgtgttcaggaaggtggaggtggaggtggaggatacaaaatttagccagatgctaataccgatctaatggaggaaaaaacaataacttcaaaggggttgagttagaaattattcttggaac

SEQ ID NO: 351 - DNA, 122 bp, Homo sapiens
  misc_feature (61)..(62): /note="This region represents a CpG dinucleotide"
  misc_feature (61)..(61): /note="Nucleotide may be methylated to form 5-methylcytosine"
ggtcgccgtttcatcagaagccggaggacgggcgccagggggcaacttcctacaggagggcgtcccgttagaatgacagggcttttgcaaaagtctgacacccgtggcacagagcgccccag

SEQ ID NO: 352 - DNA, 122 bp, Homo sapiens
  misc_feature (61)..(62): /note="This region represents a CpG dinucleotide"
  misc_feature (61)..(61): /note="Nucleotide may be methylated to form 5-methylcytosine"
tcaggctggcaacgggatagcaggcacatcctgttggcagctgaggcccagtctgggagccgctggccacagccccatggcaagaagacctttctgctcagccggctcgtcctgcagctgtt

SEQ ID NO: 353 - DNA, 122 bp, Homo sapiens
  misc_feature (61)..(62): /note="This region represents a CpG dinucleotide"
  misc_feature (61)..(61): /note="Nucleotide may be methylated to form 5-methylcytosine"
gggtggctgctccacctcctcccgcggtcactgctcgtggacaccagcagagggcggccacgcaccacgcacagctgggctgtccacgccggagcccccctccaggtgcgagtcaaggggag

SEQ ID NO: 354 - DNA, 122 bp, Homo sapiens
  misc_feature (61)..(62): /note="This region represents a CpG dinucleotide"
  misc_feature (61)..(61): /note="Nucleotide may be methylated to form 5-methylcytosine"
agccctgtgttaatcacttgtcatggtgtactttaatttttacttgcctgtttctctttacggtactttgacttcaaagggtggggctgcaaattagtcatctccttagagtccagccttgt

SEQ ID NO: 355 - DNA, 122 bp, Homo sapiens
  misc_feature (61)..(62): /note="This region represents a CpG dinucleotide"
  misc_feature (61)..(61): /note="Nucleotide may be methylated to form 5-methylcytosine"
ctccaaaatctgactctctctccagccccgatctcagtgtgagccgaacctcagaaaagacgctttttaagggcgacacagggttggctttacagcggggccaagaagactacctgggggta

SEQ ID NO: 356 - DNA, 122 bp, Homo sapiens
  misc_feature (61)..(62): /note="This region represents a CpG dinucleotide"
  misc_feature (61)..(61): /note="Nucleotide may be methylated to form 5-methylcytosine"
aactcagctttggaggagggggcctccccctgagctccccctccagcccgtggctcagcccgggcccacatactcacgccgagatgagcccggtggctctcccccgcaagtctcggtactcc

SEQ ID NO: 357 - DNA, 122 bp, Homo sapiens
  misc_feature (61)..(62): /note="This region represents a CpG dinucleotide"
  misc_feature (61)..(61): /note="Nucleotide may be methylated to form 5-methylcytosine"
aaaggccaaaattccctgactcatgcatgtggcaattctggcttcttaagaaacactcagcgtgttttagaatggtctgggaagtcaaatacaaggggaaagcctgactagtcccactgtgt

SEQ ID NO: 358 - DNA, 122 bp, Homo sapiens
  misc_feature (61)..(62): /note="This region represents a CpG dinucleotide"
  misc_feature (61)..(61): /note="Nucleotide may be methylated to form 5-methylcytosine"
ctgaacccgcgagctggaagccgagaccagctggtcgctgccgggcccgctagtagcccacggagaagccgcccacagccggacaccagagccttgagggccgccatcttcaaaaacctacc

SEQ ID NO: 359 - DNA, 122 bp, Homo sapiens
  misc_feature (61)..(62): /note="This region represents a CpG dinucleotide"
  misc_feature (61)..(61): /note="Nucleotide may be methylated to form 5-methylcytosine"
acacaagacggaggctagcccagcctcaaagaactttccctctagtggagaggaaggggacggcacacaaggaaatgaatatacaacttcagtgggaagtccacgtgaaatggaagagttcc

SEQ ID NO: 360 - DNA, 122 bp, Homo sapiens
  misc_feature (61)..(62): /note="This region represents a CpG dinucleotide"
  misc_feature (61)..(61): /note="Nucleotide may be methylated to form 5-methylcytosine"
aaataaacgtggcgggacgtatgtgtcatggcgctctccatctaaagtctgtgcagcttccggagagtggcgggttgattttctcactttggactggtttttacttcccgacttctgggtaa

SEQ ID NO: 361 - DNA, 122 bp, Homo sapiens
  misc_feature (61)..(62): /note="This region represents a CpG dinucleotide"
  misc_feature (61)..(61): /note="Nucleotide may be methylated to form 5-methylcytosine"
agttctccttttccttcagggagtgttctgtccaaaccatccaccgagagtatctgcaaccggccacacccacatggtctcacagctgagtcacaggcctcagaccactgggagaatcctgg

SEQ ID NO: 362 - DNA, 122 bp, Homo sapiens
  misc_feature (61)..(62): /note="This region represents a CpG dinucleotide"
  misc_feature (61)..(61): /note="Nucleotide may be methylated to form 5-methylcytosine"
ctcttgagtccaggaagcaagggtgggaggagggacgagccagtggcaatgacccagacccggacgacccccattgctgagccagcggagctgcttggtgagtggcctccaggcggcatctc

SEQ ID NO: 363 - DNA, 122 bp, Homo sapiens
  misc_feature (61)..(62): /note="This region represents a CpG dinucleotide"
  misc_feature (61)..(61): /note="Nucleotide may be methylated to form 5-methylcytosine"
ccgcagttactgtctttgttatgtgctctaggtggccttctcagtgctgaactgcagacccgtgtatttttagaaaaggaagaggcttctgtgtgtactgtttatgtacagacacatatcag

SEQ ID NO: 364 - DNA, 122 bp, Homo sapiens
  misc_feature (61)..(62): /note="This region represents a CpG dinucleotide"
  misc_feature (61)..(61): /note="Nucleotide may be methylated to form 5-methylcytosine"
aattactgatgtgcacaaaggacccagggaccacttaaaacaaggggaggactgagtccacgcagggatgaagccacaggcacagtccccacgtgcttgacagtggccccgcaacccacctg

SEQ ID NO: 365 - DNA, 122 bp, Homo sapiens
  misc_feature (61)..(62): /note="This region represents a CpG dinucleotide"
  misc_feature (61)..(61): /note="Nucleotide may be methylated to form 5-methylcytosine"
caggattcgaacctgcgcggggagaccccaatggatttctagtccatcgccttaaccactcggccacgactacgaggcttagggcttcgttttcatccaatgcctttcttacttcccttgac

SEQ ID NO: 366 - DNA, 122 bp, Homo sapiens
  misc_feature (61)..(62): /note="This region represents a CpG dinucleotide"
  misc_feature (61)..(61): /note="Nucleotide may be methylated to form 5-methylcytosine"
gtgctaggggctctgcttctaggaatggtaagtgaacttcccctaccttcccctggagggcgccacacagagatgtctggatttccgccgcacagtgatgccacctggcagtcatgtgacat

SEQ ID NO: 367 - DNA, 122 bp, Homo sapiens
  misc_feature (61)..(62): /note="This region represents a CpG dinucleotide"
  misc_feature (61)..(61): /note="Nucleotide may be methylated to form 5-methylcytosine"
ggctgaggaagtagtcctgccagctgccctgagtctctgcagtgctgctgtcttcctattcggcctgtgctcctgctgaaaccccagccacacagcaggactgcctggccatcatgaaattc

SEQ ID NO: 368 - DNA, 122 bp, Homo sapiens
  misc_feature (61)..(62): /note="This region represents a CpG dinucleotide"
  misc_feature (61)..(61): /note="Nucleotide may be methylated to form 5-methylcytosine"
cggccggagtgtgaacagaagtttgctcatctgacacctggggctgggcagagcccctcccgggggcagctctgggcagcctgtggagagactgatgcaagacaggcaagttcagagaacga

SEQ ID NO: 369 - DNA, 122 bp, Homo sapiens
  misc_feature (61)..(62): /note="This region represents a CpG dinucleotide"
  misc_feature (61)..(61): /note="Nucleotide may be methylated to form 5-methylcytosine"
gtaaatataggctgggtgtttcaatagcaagcgaggtgggagggattagaccgatggacccggaaagggcggaggagggaaggctttagtgtagaaaaccaaccaaaccaaacccaaaccaa

SEQ ID NO: 370 - DNA, 122 bp, Homo sapiens
  misc_feature (61)..(62): /note="This region represents a CpG dinucleotide"
  misc_feature (61)..(61): /note="Nucleotide may be methylated to form 5-methylcytosine"
gaataccagctgaaagtctcttccctcattggggagtgtcttgacttaaatatcattcctcgtggcagcaactcagggtgttgtttttcagtcatttcacatctgtggtgttgtgagacacc

SEQ ID NO: 371 - DNA, 122 bp, Homo sapiens
  misc_feature (61)..(62): /note="This region represents a CpG dinucleotide"
  misc_feature (61)..(61): /note="Nucleotide may be methylated to form 5-methylcytosine"
aggaaggatagagttttttgtgttcctgtttactctgtcatcagcatttgcgttctaacccgcatctcttttgtggcttacattcgtgttttgctgtactaggaagtaaagggaagcacacg

SEQ ID NO: 372 - DNA, 122 bp, Homo sapiens
  misc_feature (61)..(62): /note="This region represents a CpG dinucleotide"
  misc_feature (61)..(61): /note="Nucleotide may be methylated to form 5-methylcytosine"
ccgtccacctgctcctcttgctcccgtttctgcttcttctgaggtttatccatgtggcatcgctaatggtctccctgctagtgggaattttgtgacaatgggaccttgtttattttactgct

SEQ ID NO: 373 - DNA, 122 bp, Homo sapiens
  misc_feature (61)..(62): /note="This region represents a CpG dinucleotide"
  misc_feature (61)..(61): /note="Nucleotide may be methylated to form 5-methylcytosine"
atctacataaattttagtagcttcattaagtgccaatcatcacttaattttagactctgccgaaaactgaatttacaagttcatcctacatcattcattctctccaataatccctcccttca

SEQ ID NO: 374 - DNA, 122 bp, Homo sapiens
  misc_feature (61)..(62): /note="This region represents a CpG dinucleotide"
  misc_feature (61)..(61): /note="Nucleotide may be methylated to form 5-methylcytosine"
tggggagcaggaagtgaaaggctgcagttataaagcgctgcttaaggcggtctctcctggcgcctctgaacttgatcagatgttctatttcctacagagagatggcggccaggctgtgaggc

SEQ ID NO: 375 - DNA, 122 bp, Homo sapiens
  misc_feature (61)..(62): /note="This region represents a CpG dinucleotide"
  misc_feature (61)..(61): /note="Nucleotide may be methylated to form 5-methylcytosine"
gacttggcaatgccaaggtgtttgctgaggctgtggactctccagcccgggagaggtcgccggacctttgaggggcattggaatcctgggctcctcctctgctgggtggagccgcgaaccct

SEQ ID NO: 376 - DNA, 122 bp, Homo sapiens
  misc_feature (61)..(62): /note="This region represents a CpG dinucleotide"
  misc_feature (61)..(61): /note="Nucleotide may be methylated to form 5-methylcytosine"
acctaattcagatcgtatcactcctctgcttgagtcctttttttctttggtagagaacggcgtctcgctacgttgcccaggctgctcttgaactgctggcctcaagcgatccgcctgcctcc

SEQ ID NO: 377 - DNA, 122 bp, Homo sapiens
  misc_feature (61)..(62): /note="This region represents a CpG dinucleotide"
  misc_feature (61)..(61): /note="Nucleotide may be methylated to form 5-methylcytosine"
atccaatcagtggcgctggcgcgggaaccgcccaatcaggggcgcagccggagaggagggcgtggcttccgacattccgcggggtctttacctcttgctcccgccagagtttgggatcggtc

SEQ ID NO: 378 - DNA, 122 bp, Homo sapiens
  misc_feature (61)..(62): /note="This region represents a CpG dinucleotide"
  misc_feature (61)..(61): /note="Nucleotide may be methylated to form 5-methylcytosine"
atactaatatcacatgatctaaaactacacaaaaatttgctctgctcaagttttgcatcacgagtgtctaaagtaaatcaagaaaattaaaacacttaacatgtttaataggaagtatttgt

SEQ ID NO: 379 - DNA, 122 bp, Homo sapiens
  misc_feature (61)..(62): /note="This region represents a CpG dinucleotide"
  misc_feature (61)..(61): /note="Nucleotide may be methylated to form 5-methylcytosine"
ggcacattcaacttgttcttcagggcttggttcaaggccttcctggactgctgccctgatcgccatgcagagttaaccacttcctcatctatgcgcctctaacactgtagctataccaagcg

SEQ ID NO: 380 - DNA, 122 bp, Homo sapiens
  misc_feature (61)..(62): /note="This region represents a CpG dinucleotide"
  misc_feature (61)..(61): /note="Nucleotide may be methylated to form 5-methylcytosine"
gagccgtcagaggaaggacagccctgccgccaccttcatttcagactcggcttccagaaccgcaggaggacacagttctgtggctatgaaccacccgatttgtggtgcttggttatggcagc

SEQ ID NO: 381 - DNA, 122 bp, Homo sapiens
  misc_feature (61)..(62): /note="This region represents a CpG dinucleotide"
  misc_feature (61)..(61): /note="Nucleotide may be methylated to form 5-methylcytosine"
attcttatataacatcctgttgcaaaaaataatagagaccactatttgctgaaagcctaccgtggattaagcattgttcagtgtgcttttcatgtgtcatttagtcttgacagttcaatact

SEQ ID NO: 382 - DNA, 122 bp, Homo sapiens
  misc_feature (61)..(62): /note="This region represents a CpG dinucleotide"
  misc_feature (61)..(61): /note="Nucleotide may be methylated to form 5-methylcytosine"
ccagtgctcagaggctggagagcatttgtggtgtgcgggaaatgacaagcaggccagtggcgttggaggaatgaggtaaaagatgccgtcagagagccccggggtgcagatccttgggagcc

SEQ ID NO: 383 - DNA, 122 bp, Homo sapiens
  misc_feature (61)..(62): /note="This region represents a CpG dinucleotide"
  misc_feature (61)..(61): /note="Nucleotide may be methylated to form 5-methylcytosine"
aaaaggcatgctccatgtcctcacagagcttatggaacaatgaagaagcactgcaaaccacgaaaagggtgcaatgttgagaaatgagaacttcctggtgaaagtacatttaaagcatttga

SEQ ID NO: 384 - DNA, 122 bp, Homo sapiens
  misc_feature (61)..(62): /note="This region represents a CpG dinucleotide"
  misc_feature (61)..(61): /note="Nucleotide may be methylated to form 5-methylcytosine"
ggagcatataatttaaatttatagacaaacacacaagaaaaattaatattttgtctgaaacgtattggaatttatctaaaacctgaatatctgcagagtcgcatggtggcgctgcaggataa

SEQ ID NO: 385 - DNA, 122 bp, Homo sapiens
  misc_feature (61)..(62): /note="This region represents a CpG dinucleotide"
  misc_feature (61)..(61): /note="Nucleotide may be methylated to form 5-methylcytosine"
tacatatgaatctagccctttcccattgctaagcttgggaattaagcactttctttttaccgccctcgtgcttgttatttgattttgcaagtggagagtgggcaaacctgtgttcagcaaca

SEQ ID NO: 386 - DNA, 122 bp, Homo sapiens
  misc_feature (61)..(62): /note="This region represents a CpG dinucleotide"
  misc_feature (61)..(61): /note="Nucleotide may be methylated to form 5-methylcytosine"
aagcaattggtatttattgcacccaagatattgttcacgtttctatttgtgaacaactcccgtaactactcttttactccccatttccttatcattgcacaatttccagctgcatctgtaat

SEQ ID NO: 387 - DNA, 122 bp, Homo sapiens
  misc_feature (61)..(62): /note="This region represents a CpG dinucleotide"
  misc_feature (61)..(61): /note="Nucleotide may be methylated to form 5-methylcytosine"
agcccgagctccattctccactccctggcttcctgcatggactttgcaaccagagcttcacggggtatagtttaatagctgtttctctgtaacatagccacttttctctttccaggtctagt

SEQ ID NO: 388 - DNA, 122 bp, Homo sapiens
  misc_feature (61)..(62): /note="This region represents a CpG dinucleotide"
  misc_feature (61)..(61): /note="Nucleotide may be methylated to form 5-methylcytosine"
tgaggaattggggaggccgctgggttcggggtatgcagagtgtagcggccacgtagctggcgatctcaggcacgtgactgcctggtcctgtggccccgcgctcgaacactttcagcacccag

SEQ ID NO: 389 - DNA, 122 bp, Homo sapiens
  misc_feature (61)..(62): /note="This region represents a CpG dinucleotide"
  misc_feature (61)..(61): /note="Nucleotide may be methylated to form 5-methylcytosine"
gcacccgtctgtgacatagttggtaatttccagaggcagagaagatattactgacaataacgtcaacacgctgtgaccaccgtggatcctaatatccagggggggaccggggggtgatatta

SEQ ID NO: 390 - DNA, 122 bp, Homo sapiens
  misc_feature (61)..(62): /note="This region represents a CpG dinucleotide"
  misc_feature (61)..(61): /note="Nucleotide may be methylated to form 5-methylcytosine"
gtgtgcccgggacttcagcgataagtgtttcggtgttcctgcgtgcggatttgtgctctccggggaggtctgcggcccaggttcgattcctgcgacttgtcctaggcaggcctgtatgtgcg

SEQ ID NO: 391 - DNA, 122 bp, Homo sapiens
  misc_feature (61)..(62): /note="This region represents a CpG dinucleotide"
  misc_feature (61)..(61): /note="Nucleotide may be methylated to form 5-methylcytosine"
aggcctggcgactgataagtccgggcagcaccctaagagttggcacccgcccctctgccccgcaccccagggctttgcttcgcgccctccgcccggaccctggcccttctcttcttcgtctg

SEQ ID NO: 392 - DNA, 122 bp, Homo sapiens
  misc_feature (61)..(62): /note="This region represents a CpG dinucleotide"
  misc_feature (61)..(61): /note="Nucleotide may be methylated to form 5-methylcytosine"
gattttgcctctcaaggaacatgtcaatgtctggagacatttttggttagcacagctagacgttgtggtgctactgacatctagaggacagtggccaggagcgctactaaacatcctacaag

SEQ ID NO: 393 - DNA, 122 bp, Homo sapiens
  misc_feature (61)..(62): /note="This region represents a CpG dinucleotide"
  misc_feature (61)..(61): /note="Nucleotide may be methylated to form 5-methylcytosine"
acacacacacacacacacacacacacacatatgtttataagtgggatgggagaacgggtacggtgataattaaaagaggtaaggtttctcttgagatgaaaatgttctaaaattgtgatggc

SEQ ID NO: 394 - DNA, 122 bp, Homo sapiens
  misc_feature (61)..(62): /note="This region represents a CpG dinucleotide"
  misc_feature (61)..(61): /note="Nucleotide may be methylated to form 5-methylcytosine"
ggaatctagttaccatagtgaccctgttctgctgaaacaaaaacactcaacaggatttaacgaagaattaataaccatcatgattgttcctgattctgacaaagacggtggtggaagagaag

SEQ ID NO: 395 - DNA, 122 bp, Homo sapiens
  misc_feature (61)..(62): /note="This region represents a CpG dinucleotide"
  misc_feature (61)..(61): /note="Nucleotide may be methylated to form 5-methylcytosine"
gtgcatgtagcatccttgggttccggctagggacaaagcccaggaacaagttgtacactgcgctcttggagcccaagctgtgactcttagcaggtatttacattcatttgcagctctcctag

SEQ ID NO: 396 - DNA, 122 bp, Homo sapiens
  misc_feature (61)..(62): /note="This region represents a CpG dinucleotide"
  misc_feature (61)..(61): /note="Nucleotide may be methylated to form 5-methylcytosine"
tgcctcggtcctgttgataagagggaagtctgtgctgggttcctatccacaaagcccttgcggggaatgggtcccacacgccgcttctgcagacccagctcatcctgtttccggtttctatt

SEQ ID NO: 397 - DNA, 122 bp, Homo sapiens
  misc_feature (61)..(62): /note="This region represents a CpG dinucleotide"
  misc_feature (61)..(61): /note="Nucleotide may be methylated to form 5-methylcytosine"
acacacactcagattcccagctcacggggactcaggccccgcccgcggccatgctcacctcgccgctgcactgtgaagctctccacaaccccgtagttgtgtctgcagtaggtgtccaccgc

SEQ ID NO: 398 - DNA, 122 bp, Homo sapiens
  misc_feature (61)..(62): /note="This region represents a CpG dinucleotide"
  misc_feature (61)..(61): /note="Nucleotide may be methylated to form 5-methylcytosine"
aatttttaaccagtgacagtgacagataagattcaaaccaggtttcctctccacctacctcggaggcaggccacacctgccagaagtagcagcaatgtcccagcatagtgagaaaacggcac

SEQ ID NO: 399 - DNA, 122 bp, Homo sapiens
  misc_feature (61)..(62): /note="This region represents a CpG dinucleotide"
  misc_feature (61)..(61): /note="Nucleotide may be methylated to form 5-methylcytosine"
ctggcgcgctgagggcggtgagcgagggcgccaaggcacaggtggggcgggagtcgagcgcggaggctcggggggcgggacgcggggcctgggagcggccagggaccgcggcagcgcctcag

SEQ ID NO: 400 - DNA, 122 bp, Homo sapiens
  misc_feature (61)..(62): /note="This region represents a CpG dinucleotide"
  misc_feature (61)..(61): /note="Nucleotide may be methylated to form 5-methylcytosine"
tctaggtgtctagagcctagtgcttgaggaaaatttaaaaagtcaacctgtttattctcacgcttccgggcaaggctgtaccaattagccaaactccattctggaagcggagcaaagagtcc

SEQ ID NO: 401 - DNA, 122 bp, Homo sapiens
  misc_feature (61)..(62): /note="This region represents a CpG dinucleotide"
  misc_feature (61)..(61): /note="Nucleotide may be methylated to form 5-methylcytosine"
cccaggctggagtgcagtggtgtgatcttggctcactgcaacctctgcctcctgggctcacgccattctccgaaagcgagatttattaaagtggaaagcgctccacaggtgggagtgggccc

SEQ ID NO: 402 - DNA, 122 bp, Homo sapiens
  misc_feature (61)..(62): /note="This region represents a CpG dinucleotide"
  misc_feature (61)..(61): /note="Nucleotide may be methylated to form 5-methylcytosine"
ttctcaggttattgaatagtgtgttgacttccgaaataaatagatatgcagtgtgaagggcgagctgtcactttaggagagctttcctgatctaaattaaaaggcacttctaattgaaaact

SEQ ID NO: 403 - DNA, 122 bp, Homo sapiens
  misc_feature (61)..(62): /note="This region represents a CpG dinucleotide"
  misc_feature (61)..(61): /note="Nucleotide may be methylated to form 5-methylcytosine"
cagaaaacctgcagaacagagatcctttctctagctagtttatgtagtttccatttttaacgccttactactggcagtcagaatcagcaagagctcaagctaagtaaatgtttacttttcaa

SEQ ID NO: 404 - DNA, 122 bp, Homo sapiens
  misc_feature (61)..(62): /note="This region represents a CpG dinucleotide"
  misc_feature (61)..(61): /note="Nucleotide may be methylated to form 5-methylcytosine"
cataaaaaagatggcggccgcagcttctccacagcaacggcaacgccattctcaagcaagcgcatcaatatatttagttccggcctctttgcacgtcatttccggcaccggcatggccgggt

SEQ ID NO: 405 - DNA, 122 bp, Homo sapiens
  misc_feature (61)..(62): /note="This region represents a CpG dinucleotide"
  misc_feature (61)..(61): /note="Nucleotide may be methylated to form 5-methylcytosine"
tcgtttatatgatcaacaggcatcctacgctgtgtgcacacagcatatcaccgggagagacggcacggaaagatggccctgccctcaaggagctgcagtctgcccaggaaggcagacaggta

SEQ ID NO: 406 - DNA, 122 bp, Homo sapiens
  misc_feature (61)..(62): /note="This region represents a CpG dinucleotide"
  misc_feature (61)..(61): /note="Nucleotide may be methylated to form 5-methylcytosine"
tgcattcttaatttccttggtatgaggcaatgaacctcgggtattaccccagacaaacgacgtcgatgccacttcagcaggatataagaacctatgccaggaccatggctgcgaggatggaa

SEQ ID NO: 407 - DNA, 122 bp, Homo sapiens
  misc_feature (61)..(62): /note="This region represents a CpG dinucleotide"
  misc_feature (61)..(61): /note="Nucleotide may be methylated to form 5-methylcytosine"
accctttacctggcattttagccagcaagacccgcttgcattgcagtcgttcacggtgctcgctggcacaattttagaatgttacatgaatactcaggcctgactaaccttcccctccaaaa

SEQ ID NO: 408 - DNA, 122 bp, Homo sapiens
  misc_feature (61)..(62): /note="This region represents a CpG dinucleotide"
  misc_feature (61)..(61): /note="Nucleotide may be methylated to form 5-methylcytosine"
gcagaggctgagacgcacctgagaggggaggaagcttccgctcttctggcctcccggatccgccagggctcctgctgctcccacttccgccacccaggagggccaggccgccgtcttgagtt

SEQ ID NO: 409 - DNA, 122 bp, Homo sapiens
  misc_feature (61)..(62): /note="This region represents a CpG dinucleotide"
  misc_feature (61)..(61): /note="Nucleotide may be methylated to form 5-methylcytosine"
tatctgaaaattttccccctggcttactcgcttgcagctgcccactttgcagaaggatggcgctctgatctctacgctccctgttccttcagggactccatagtattttttttcacgcgtcg

SEQ ID NO: 410 - DNA, 122 bp, Homo sapiens
  misc_feature (61)..(62): /note="This region represents a CpG dinucleotide"
  misc_feature (61)..(61): /note="Nucleotide may be methylated to form 5-methylcytosine"
aaaagtgaactgaaatatactgagacactttttcttcataacattgctgtttaaatctctcgttccatcataaggtaaaagattaagtctgttaccacaacggccaatgtgttaatatctca

SEQ ID NO: 411 - DNA, 122 bp, Homo sapiens
  misc_feature (61)..(62): /note="This region represents a CpG dinucleotide"
  misc_feature (61)..(61): /note="Nucleotide may be methylated to form 5-methylcytosine"
ccctaattcagccacacgtactgctgctaggcccaatgcatacttctgcaattgttttagcggggaggaagtggtaaagagaaagatttatcacattgatacttcatgaaatttggggccca

SEQ ID NO: 412 - DNA, 122 bp, Homo sapiens
  misc_feature (61)..(62): /note="This region represents a CpG dinucleotide"
  misc_feature (61)..(61): /note="Nucleotide may be methylated to form 5-methylcytosine"
acatacccgtccctattacgatcacatcaaactccgaagggagagtatccgccatcttgacgggaaacgtgtcatgtgactattacttgtggaaatgagatcaagttaggcattccctccgt

SEQ ID NO: 413 - DNA, 122 bp, Homo sapiens
  misc_feature (61)..(62): /note="This region represents a CpG dinucleotide"
  misc_feature (61)..(61): /note="Nucleotide may be methylated to form 5-methylcytosine"
tacaggaatgacagtaaatactccaagggtctcataagccaagcttggtttagccttagccgcttgcgtgttgaaacctcttccctctatgttcgccggaccaggatcattttagggcctcc

SEQ ID NO: 414 - DNA, 122 bp, Homo sapiens
  misc_feature (61)..(62): /note="This region represents a CpG dinucleotide"
  misc_feature (61)..(61): /note="Nucleotide may be methylated to form 5-methylcytosine"
gaagggacagtcaagagcagtcagttgcttacttattttgctctggatgagtctgggacacgctgtaactttaacacatttaagaagaaggtgtgtggccttttcagaaggtggcatggtcc

SEQ ID NO: 415 - DNA, 122 bp, Homo sapiens
  misc_feature (61)..(62): /note="This region represents a CpG dinucleotide"
  misc_feature (61)..(61): /note="Nucleotide may be methylated to form 5-methylcytosine"
aaaacacacagatccccaggcctgagagctgcccggggctgcgcgccggataaacgcaggcggcgtgaaccaggcttctcccaggagcgtggaagaaagtcactgattctgcatttgtcaaa

SEQ ID NO: 416 - DNA, 122 bp, Homo sapiens
  misc_feature (61)..(62): /note="This region represents a CpG dinucleotide"
  misc_feature (61)..(61): /note="Nucleotide may be methylated to form 5-methylcytosine"
gtctgcctggggcttagacgggattcgacgtaacagaagatgacgcttgagtgacagattcgtcagcgcccagaggaggaggacaagctggacccctaccctggttggggcttggagccata

SEQ ID NO: 417 - DNA, 122 bp, Homo sapiens
  misc_feature (61)..(62): /note="This region represents a CpG dinucleotide"
  misc_feature (61)..(61): /note="Nucleotide may be methylated to form 5-methylcytosine"
aatgagagggaaagtccatgctgggattgttcatatccaggcagctgttctgcctttgcccgtttgacccttcatttaacaaacattgtcagaggactggcagtgcataggctctggaaagg

SEQ ID NO: 418 - DNA, 122 bp, Homo sapiens
  misc_feature (61)..(62): /note="This region represents a CpG dinucleotide"
  misc_feature (61)..(61): /note="Nucleotide may be methylated to form 5-methylcytosine"
ccatctccagcctggccgctccaggaagtgagcaccgtttatcccccaccccaggcggcccgactcctcccagaaggagttgggagatgagccttccgcaaactcctgacctgtgggtccgt

SEQ ID NO: 419 - DNA, 122 bp, Homo sapiens
  misc_feature (61)..(62): /note="This region represents a CpG dinucleotide"
  misc_feature (61)..(61): /note="Nucleotide may be methylated to form 5-methylcytosine"
gccagctgcaccggggtcacggaggcctgggagcaacggtgtgggtcagtcccttgcaggcgctccacccgccctcgggtcaggagccagggctgcgcccacactcaccgcgttccgcaccc

SEQ ID NO: 420 - DNA, 122 bp, Homo sapiens
  misc_feature (61)..(62): /note="This region represents a CpG dinucleotide"
  misc_feature (61)..(61): /note="Nucleotide may be methylated to form 5-methylcytosine"
ccgagccctgctcgtggagccattggtgctgcggcggggagaagaggccacaggcggggacgccccagacactcccgtggggcccgtgccagggtctcctgctcctcagaaagagcccttgt

SEQ ID NO: 421 - DNA, 122 bp, Homo sapiens
  misc_feature (61)..(62): /note="This region represents a CpG dinucleotide"
  misc_feature (61)..(61): /note="Nucleotide may be methylated to form 5-methylcytosine"
agatggcagcatctctcgccataaaccatcttttgaacagaatttcttagatgcagaagacgtttgagacagaaggatggtctatctgcatcaccccatcatgacacagtggtggaactggg

SEQ ID NO: 422 - DNA, 122 bp, Homo sapiens
  misc_feature (61)..(62): /note="This region represents a CpG dinucleotide"
  misc_feature (61)..(61): /note="Nucleotide may be methylated to form 5-methylcytosine"
ggccacagctaggccgagatatcctgcagggaaactcacactgcagctttgtgtgtgtctcgccgccccgtacctgagcttccagacactatacctccgtagagttccagtggcacagctcc

SEQ ID NO: 423 - DNA, 122 bp, Homo sapiens
  misc_feature (61)..(62): /note="This region represents a CpG dinucleotide"
  misc_feature (61)..(61): /note="Nucleotide may be methylated to form 5-methylcytosine"
ctcacctaatggagctaatgagagcaccttacccactgggttgctaatgaggatggcaggcggtaataattcctgtggaatccctagaacagtgcccggcgcatgcgaagaaccacgtaaat

SEQ ID NO: 424 - DNA, 122 bp, Homo sapiens
  misc_feature (61)..(62): /note="This region represents a CpG dinucleotide"
  misc_feature (61)..(61): /note="Nucleotide may be methylated to form 5-methylcytosine"
ccgcgcctcagccccgcctgccccgctgggagaggtaaatggaccgcacttggtttacgccggttagagtctcagatgctttgttacaggggcacaaactaccctacccctactgtgcgtgg

SEQ ID NO: 425 - DNA, 122 bp, Homo sapiens
  misc_feature (61)..(62): /note="This region represents a CpG dinucleotide"
  misc_feature (61)..(61): /note="Nucleotide may be methylated to form 5-methylcytosine"
cctgctcctccacccctcctgtggaggagaaagtgcttgagaaatagacaccaatgattacgaaacaacagactgaatagtacaggaaatgtcacgctgtgctacaacaggagtataaataa

SEQ ID NO: 426 - DNA, 122 bp, Homo sapiens
  misc_feature (61)..(62): /note="This region represents a CpG dinucleotide"
  misc_feature (61)..(61): /note="Nucleotide may be methylated to form 5-methylcytosine"
ctcggtctagtctagagttcgcaaagcctatcctccctgtagccgggtgccaagcagcctcgagcctgctccccagcccacctgccaacaaaaggcgccctccgactgcaacccagccctcc

SEQ ID NO: 427 - DNA, 122 bp, Homo sapiens
  misc_feature (61)..(62): /note="This region represents a CpG dinucleotide"
  misc_feature (61)..(61): /note="Nucleotide may be methylated to form 5-methylcytosine"
atgtcaaaaggcagcacgtaaattgaataagggaaggaaaatgccgggcggcctcattcacgtccggcatgttccgctattattgaaaggaaattgagaaattagacagtactgcctattag

SEQ ID NO: 428 - DNA, 122 bp, Homo sapiens
  misc_feature (61)..(62): /note="This region represents a CpG dinucleotide"
  misc_feature (61)..(61): /note="Nucleotide may be methylated to form 5-methylcytosine"
gctttccgcagtaatttcccaagctgcactaaatattatcaacaagcacaataactcagccgtgtgctctgcgctctcatttcccttccatgagcagaggcttattataaatcagtaggatt

SEQ ID NO: 429 - DNA, 122 bp, Homo sapiens
  misc_feature (61)..(62): /note="This region represents a CpG dinucleotide"
  misc_feature (61)..(61): /note="Nucleotide may be methylated to form 5-methylcytosine"
cttgctttgcacaggactctgttgacttctgtagtcttgcctgtggaagacaatgagtgacggcagaaagttactagcattcttttatggaagggaagtgggtaattaccatatccagacca

SEQ ID NO: 430 - DNA, 122 bp, Homo sapiens
  misc_feature (61)..(62): /note="This region represents a CpG dinucleotide"
  misc_feature (61)..(61): /note="Nucleotide may be methylated to form 5-methylcytosine"
tgctcatcagggttcgcctggggccactgagaccacgcgccggtgcccgccctcccgctgcggtccgattttctgaaccaaccaggcgcttccgggcgccttgccccagacgggcccaccgc

SEQ ID NO: 431 - DNA, 122 bp, Homo sapiens
  misc_feature (61)..(62): /note="This region represents a CpG dinucleotide"
  misc_feature (61)..(61): /note="Nucleotide may be methylated to form 5-methylcytosine"
cagctgaggccccgcccccccatccctgggagaaccgggctggtcactctggggtcggggcggggcacacctgtgcccggagtctgaggtcactcaccggctgaccctggtggtggtgcggg

SEQ ID NO: 432 - DNA, 122 bp, Homo sapiens
  misc_feature (61)..(62): /note="This region represents a CpG dinucleotide"
  misc_feature (61)..(61): /note="Nucleotide may be methylated to form 5-methylcytosine"
ctcccccatctccagcctggccgctccaggaagtgagcaccgtttatcccccaccccaggcggcccgactcctcccagaaggagttgggagatgagccttccgcaaactcctgacctgtggg

SEQ ID NO: 433 - DNA, 122 bp, Homo sapiens
  misc_feature (61)..(62): /note="This region represents a CpG dinucleotide"
  misc_feature (61)..(61): /note="Nucleotide may be methylated to form 5-methylcytosine"
ctgcatgtgtatttctgctgccttttccggccacagcttggggagcttgtctgtagagggcgtccgaggctccatggatagtgaggtccatcctactgcattttcaacactgctccatagcc

SEQ ID NO: 434 - DNA, 122 bp, Homo sapiens
  misc_feature (61)..(62): /note="This region represents a CpG dinucleotide"
  misc_feature (61)..(61): /note="Nucleotide may be methylated to form 5-methylcytosine"
ggattctagaatttatgtcttgtgtggtaacatttcagccggtgggtggcggggattaggcgtgaagcggttcagcaggcagaggttctcggacgccctccggcgaagccacctgttgatgc

SEQ ID NO: 435 - DNA, 122 bp, Homo sapiens
  misc_feature (61)..(62): /note="This region represents a CpG dinucleotide"
  misc_feature (61)..(61): /note="Nucleotide may be methylated to form 5-methylcytosine"
tgctaagcagtggaggccactaagtaggaggcttgcctaggtagtcagtctttctggggtcgttagccaggtactcccagccatagagacacagccatatagacactgccctgcagagggca

SEQ ID NO: 436 - DNA, 122 bp, Homo sapiens
  misc_feature (61)..(62): /note="This region represents a CpG dinucleotide"
  misc_feature (61)..(61): /note="Nucleotide may be methylated to form 5-methylcytosine"
gcgtctcagcgcctcctgtgtgaagcgggaccgctgcggtacctgccccagggaaggccgcggggagggttacagagcccgtaggcactggcggggatctttatacacccccaaaacacaca

SEQ ID NO: 437 - DNA, 122 bp, Homo sapiens
  misc_feature (61)..(62): /note="This region represents a CpG dinucleotide"
  misc_feature (61)..(61): /note="Nucleotide may be methylated to form 5-methylcytosine"
gatttgccttacaagctaaatgttacatttccactcaacagaaaggtactgctgtgtggccgtaaaaagctggccaaaaccctgtaacctttgcagttagtcatgttatttttggttcatgc

SEQ ID NO: 438 - DNA, 122 bp, Homo sapiens
  misc_feature (61)..(62): /note="This region represents a CpG dinucleotide"
  misc_feature (61)..(61): /note="Nucleotide may be methylated to form 5-methylcytosine"
ttgacctagtaatatgctattcctggcatgggttgtttccttcagtcattccttccttatcgctgactacagtagttccctcttattttcagtttcgctttccacagtttcagctacctgca

SEQ ID NO: 439 - DNA, 122 bp, Homo sapiens
  misc_feature (61)..(62): /note="This region represents a CpG dinucleotide"
  misc_feature (61)..(61): /note="Nucleotide may be methylated to form 5-methylcytosine"
tctcggtgcttaagagttttcctttaacaatctttacctgtgggaatgcagagacccccccgccctgcgagaggccggcagccagggattccccgctccgcgccctcatcaccccccggaaa

SEQ ID NO: 440 - DNA, 122 bp, Homo sapiens
  misc_feature (61)..(62): /note="This region represents a CpG dinucleotide"
  misc_feature (61)..(61): /note="Nucleotide may be methylated to form 5-methylcytosine"
aacatggtgaaaccctgtctctactaaaaatccaaaaaattacccaggcatgctggtgctcgcctgtaatcccagcttctcaggaggctgaggcaggagaatcacttgaacctgggaggcag

SEQ ID NO: 441 - DNA, 122 bp, Homo sapiens
  misc_feature (61)..(62): /note="This region represents a CpG dinucleotide"
  misc_feature (61)..(61): /note="Nucleotide may be methylated to form 5-methylcytosine"
cagcattaggaaatcaggaattgcagccaaaggactcttgtcctctgtgtgaggctgagtcggacttccgtgactcatggttctgttattctgagtgtttgagactattaaggaaattgaat

SEQ ID NO: 442 - DNA, 122 bp, Homo sapiens
  misc_feature (61)..(62): /note="This region represents a CpG dinucleotide"
  misc_feature (61)..(61): /note="Nucleotide may be methylated to form 5-methylcytosine"
cattattttcatcctagaaaattgcaattaatttgtgactggtctctcctccttcaataccgctctactctaatccattatttatataaaagcaggcgttacatagccttagtccaaaatca

SEQ ID NO: 443 - DNA, 122 bp, Homo sapiens
  misc_feature (61)..(62): /note="This region represents a CpG dinucleotide"
  misc_feature (61)..(61): /note="Nucleotide may be methylated to form 5-methylcytosine"
tggctaacactctttacactcttctgccttcccttgagataattaaaatagactgtacaccggccctagtcggtgcccattccccctaactcttcactcaactacgtgtgtagtccgaggga

SEQ ID NO: 444 - DNA, 122 bp, Homo sapiens
  misc_feature (61)..(62): /note="This region represents a CpG dinucleotide"
  misc_feature (61)..(61): /note="Nucleotide may be methylated to form 5-methylcytosine"
taatcctccactgagtcttcccttggggtaactgttgcccaactgcagcatctgaagtgtcggttagcacgttgggatggtgaccacatgcatagtgcgtttactgaagttgtgctcatgct

SEQ ID NO: 445 - DNA, 122 bp, Homo sapiens
  misc_feature (61)..(62): /note="This region represents a CpG dinucleotide"
  misc_feature (61)..(61): /note="Nucleotide may be methylated to form 5-methylcytosine"
tggaagccatcatgggagtactatgtcagagcgtatgtaactagctgtcaggtctttccccgttgcctcagcctttctacacagactggccttcaacttcccctgagtccagaagtagactc

SEQ ID NO: 446 - DNA, 122 bp, Homo sapiens
  misc_feature (61)..(62): /note="This region represents a CpG dinucleotide"
  misc_feature (61)..(61): /note="Nucleotide may be methylated to form 5-methylcytosine"
tgtgtgcagctgggtcatggtccccaccttttgggctgataaacctggctgagggctaggcgtgtatgtttgccatgagtgagtgtttcttgtgtgtgtgtgtgtgtgtgtgtgtgtgtgtg

SEQ ID NO: 447 - DNA, 122 bp, Homo sapiens
  misc_feature (61)..(62): /note="This region represents a CpG dinucleotide"
  misc_feature (61)..(61): /note="Nucleotide may be methylated to form 5-methylcytosine"
aaacttatacttggtgtgccttactctacctggaaaggaactagtgacatataatctgggcgactgacacatttctgggcagggcactgcacacagcatggctgattgtggaggtactgccc

SEQ ID NO: 448 - DNA, 122 bp, Homo sapiens
  misc_feature (61)..(62): /note="This region represents a CpG dinucleotide"
  misc_feature (61)..(61): /note="Nucleotide may be methylated to form 5-methylcytosine"
aatgacctaccttccctgggacactccacgcccatgtgtgcttcatgtgtaggtgaagggcggcacctggcctcagagcaaacaactctcccataaggtgactggccaggtcaagccagctg

SEQ ID NO: 449 - DNA, 122 bp, Homo sapiens
  misc_feature (61)..(62): /note="This region represents a CpG dinucleotide"
  misc_feature (61)..(61): /note="Nucleotide may be methylated to form 5-methylcytosine"
ctcctgtgtgttgtttttcataattcttcgcgaaaggccaggcaagctgcacacatcaagcgaaacgcctgaggggcggccagcgcgagggtttctggccatcgaccctcacctcccgggac

SEQ ID NO: 450 - DNA, 122 bp, Homo sapiens
  misc_feature (61)..(62): /note="This region represents a CpG dinucleotide"
  misc_feature (61)..(61): /note="Nucleotide may be methylated to form 5-methylcytosine"
accaggaggaggcagcatggcctcgtttccacagctgtagcctctgccctcctgcttccacgctccacacacgccagtctttgagtcgcctcccatgccatgatccctcccttggatacgac

SEQ ID NO: 451 - DNA, 122 bp, Homo sapiens
  misc_feature (61)..(62): /note="This region represents a CpG dinucleotide"
  misc_feature (61)..(61): /note="Nucleotide may be methylated to form 5-methylcytosine"
gcttgatacctaatggggtcataaggggaatattgagaatattgacagcaaatatttgagcgtttattgtatgctaggcagcgtggcaagaccttttaacagatcattatgtttagttcttt

SEQ ID NO: 452 - DNA, 122 bp, Homo sapiens
  misc_feature (61)..(62): /note="This region represents a CpG dinucleotide"
  misc_feature (61)..(61): /note="Nucleotide may be methylated to form 5-methylcytosine"
aaaagaagcaaacagataccaagagtcggaaacaggctaaggatcaaaagcagaaacatccgttcaagccaaagtaaactcagggcattccttctatccacccatctattcaaataacacta

SEQ ID NO: 453 - DNA, 122 bp, Homo sapiens
  misc_feature (61)..(62): /note="This region represents a CpG dinucleotide"
  misc_feature (61)..(61): /note="Nucleotide may be methylated to form 5-methylcytosine"
tgcccacctccccgccgcagccaggtaacctccacccgccccggggtagaggacgttcgtcggattctacactccacctcgttatcgcagcctgaagtgcgtgatggagaagaaatttcaga

SEQ ID NO: 454 - DNA, 122 bp, Homo sapiens
  misc_feature (61)..(62): /note="This region represents a CpG dinucleotide"
  misc_feature (61)..(61): /note="Nucleotide may be methylated to form 5-methylcytosine"
cccaaccgccccttgattctctgccccttcaccctttcccacccgcctgtgcccccgccacggaccaggacctccctgtgggggcctgccctggcaacccccgagcgccatagcaacctgag

SEQ ID NO: 455 - DNA, 122 bp, Homo sapiens
  misc_feature (61)..(62): /note="This region represents a CpG dinucleotide"
  misc_feature (61)..(61): /note="Nucleotide may be methylated to form 5-methylcytosine"
attgaagggacggaggcaaggagatgcacaatccgggcagctctcgctcttctcggaaggcgaagggagtttggcggagaagacggggttggtgagccgaggcggggactccggacgtgctc

SEQ ID NO: 456 - DNA, 122 bp, Homo sapiens
  misc_feature (61)..(62): /note="This region represents a CpG dinucleotide"
  misc_feature (61)..(61): /note="Nucleotide may be methylated to form 5-methylcytosine"
gcagagacagagtctcacgcagaggtgtgcccagacaccctgaaccaagttacttaacctcgtccaccaccgtggcacccgtggggtccgtgggcccgtcggtcttccaggagggattctgt

SEQ ID NO: 457 - DNA, 122 bp, Homo sapiens
  misc_feature (61)..(62): /note="This region represents a CpG dinucleotide"
  misc_feature (61)..(61): /note="Nucleotide may be methylated to form 5-methylcytosine"
aggaaatgcatatcctataatagtgggccagagtctcacctcttcatgtgacaaatgacacgtgctcagtctaaataaagctctttactttatgaaatacaacggcaccaaagccttatgca

SEQ ID NO: 458 - DNA, 122 bp, Homo sapiens
  misc_feature (61)..(62): /note="This region represents a CpG dinucleotide"
  misc_feature (61)..(61): /note="Nucleotide may be methylated to form 5-methylcytosine"
ttttccttcctcaaagaatcggaggctcacggccagaggctgttttcttggtaaagaaatcgggagtgttttccttccactattgtccccactcccgcccaccccccgagggattttcatag

SEQ ID NO: 459 - DNA, 122 bp, Homo sapiens
  misc_feature (61)..(62): /note="This region represents a CpG dinucleotide"
  misc_feature (61)..(61): /note="Nucleotide may be methylated to form 5-methylcytosine"
tgggctgggcggccatgttggagtcgggcagggctctcatatccggtcactctccactggcgatgatcgattgcatttgacggacgcgacgctggtcgagagtcgctcgcgttgctcgacgt

SEQ ID NO: 460 - DNA, 122 bp, Homo sapiens
  misc_feature (61)..(62): /note="This region represents a CpG dinucleotide"
  misc_feature (61)..(61): /note="Nucleotide may be methylated to form 5-methylcytosine"
tgagagtagggaagtccagtatagcatccctgaaagtaatgacacagacaatctgctaagcgctgcaaaaatcatttggagtgtgatgtaaattggaaacagctggggtgggggtggtgacc

SEQ ID NO: 461 - DNA, 122 bp, Homo sapiens
  misc_feature (61)..(62): /note="This region represents a CpG dinucleotide"
  misc_feature (61)..(61): /note="Nucleotide may be methylated to form 5-methylcytosine"
aggcactgtgggtgtatcgtttggggatgctaatagctccaagtcccccagtagagctcacgtgcaaagggtgtgactgatgtttcctttcaggtccagtctttttgagtacaatccactct

SEQ ID NO: 462 - DNA, 122 bp, Homo sapiens
  misc_feature (61)..(62): /note="This region represents a CpG dinucleotide"
  misc_feature (61)..(61): /note="Nucleotide may be methylated to form 5-methylcytosine"
gtcttttggttgagctcgtttttctggagctctctttcaggccagatcctggccacatcccggggttgtgacccacgtgccttggtttcttgccaggtcgtttgctaagcccccgaagcagg

SEQ ID NO: 463 - DNA, 122 bp, Homo sapiens
  misc_feature (61)..(62): /note="This region represents a CpG dinucleotide"
  misc_feature (61)..(61): /note="Nucleotide may be methylated to form 5-methylcytosine"
caccgtgcgtgctccggatggcctcgatgaggaagcccgactcctcctggatgcgctcctcgatgcctcgcttgcccaccccgaagtccctcagggtggcgatggcaaagcgcaggagctgc

SEQ ID NO: 464 - DNA, 122 bp, Homo sapiens
  misc_feature (61)..(62): /note="This region represents a CpG dinucleotide"
  misc_feature (61)..(61): /note="Nucleotide may be methylated to form 5-methylcytosine"
aatgattaataataactaacatttcctgagtgcttactgtcttccaggcatcgtgctcagcgtcttaaagacatgatggcaatttaatcctcctatcagttcagtgaagcaggagtcgttat

SEQ ID NO: 465 - DNA, 122 bp, Homo sapiens
  misc_feature (61)..(62): /note="This region represents a CpG dinucleotide"
  misc_feature (61)..(61): /note="Nucleotide may be methylated to form 5-methylcytosine"
tatacccaccatctcccaaatggcagagcaaaataaaagcaaaaccttaccaatatgccacgagttttgaggcagcatcattatgggtctatctcttcctgagtcctgatgtaactcctggg

SEQ ID NO: 466 - DNA, 122 bp, Homo sapiens
  misc_feature (61)..(62): /note="This region represents a CpG dinucleotide"
  misc_feature (61)..(61): /note="Nucleotide may be methylated to form 5-methylcytosine"
cacttgccttgcaggcgccgcgtcctctgacacgggctcggattacaggagggaccggcgcggtggcagcagcccccgggacacacgttccactcagatggacgcacgcacagatgacgagc

SEQ ID NO: 467 - DNA, 122 bp, Homo sapiens
  misc_feature (61)..(62): /note="This region represents a CpG dinucleotide"
  misc_feature (61)..(61): /note="Nucleotide may be methylated to form 5-methylcytosine"
aagacggtgaaggtgattcttgaatgtttgttttctgtgttgcatcatgtttgtacaacacggtaatatatttggaccttgattaaataatgtaagaggggaatttgatcaaaaaataaaat

SEQ ID NO: 468 - DNA, 122 bp, Homo sapiens
  misc_feature (61)..(62): /note="This region represents a CpG dinucleotide"
  misc_feature (61)..(61): /note="Nucleotide may be methylated to form 5-methylcytosine"
tcatgactacctattcccacctcaccctattcctcattccgtcagtgactttcagccacccgcaggcttacaaggttctgcgtcgccctaggcattttcttaatactcatccttttacaaaa

SEQ ID NO: 469 - DNA, 122 bp, Homo sapiens
  misc_feature (61)..(62): /note="This region represents a CpG dinucleotide"
  misc_feature (61)..(61): /note="Nucleotide may be methylated to form 5-methylcytosine"
tctgctccagccctcgggtaggggcgggggtggattctgaaacaagcacaagtgtgagaacgtatccaagcaccaaggcttccgcctgccggaaagaacaatgagcttaattgtgttcgctt

SEQ ID NO: 470 - DNA, 122 bp, Homo sapiens
  misc_feature (61)..(62): /note="This region represents a CpG dinucleotide"
  misc_feature (61)..(61): /note="Nucleotide may be methylated to form 5-methylcytosine"
cctgcagtttcaaaacagatctacattccatagcttcctcatttcaaatggccaatttatcgctaacttcaaaaacgtgctctgtgtcactttttaaaacaaatcagcaagtcacatcttac

SEQ ID NO: 471 - DNA, 122 bp, Homo sapiens
  misc_feature (61)..(62): /note="This region represents a CpG dinucleotide"
  misc_feature (61)..(61): /note="Nucleotide may be methylated to form 5-methylcytosine"
cctcctgcccagcccacagccgcgtcccgagagtgaaggggaagcacaggcagccctttccgccgcccccgctggcatgacatcaccttccccacgccgagaagctgaagtctttctcattt

SEQ ID NO: 472 - DNA, 122 bp, Homo sapiens
  misc_feature (61)..(62): /note="This region represents a CpG dinucleotide"
  misc_feature (61)..(61): /note="Nucleotide may be methylated to form 5-methylcytosine"
taggatatattacctcgggcatctgcattacaaatttacctctcattacagctatgttaacgggaaaaggcagcttctcaacaacatgcaaggcagagtttattagcataaatttgcataat

SEQ ID NO: 473 - DNA, 122 bp, Homo sapiens
  misc_feature (61)..(62): /note="This region represents a CpG dinucleotide"
  misc_feature (61)..(61): /note="Nucleotide may be methylated to form 5-methylcytosine"
atatgatttggaaaatgcttactaatgcttctactggaaactgtttaagcctcgagagtccgctacacagggttattcaatgttcagtgtgcttatgaatcacctgaggactcttgttaaaa

SEQ ID NO: 474 - DNA, 122 bp, Homo sapiens
  misc_feature (61)..(62): /note="This region represents a CpG dinucleotide"
  misc_feature (61)..(61): /note="Nucleotide may be methylated to form 5-methylcytosine"
ccctcttcctgctccccttcttttgcacagggcatgtttcacatatacaagatgttcttacgtgtcatcccactttagagatgaggaaattgagtctcagggaaggcaaacatcaactttgt

SEQ ID NO: 475 - DNA, 122 bp, Homo sapiens
  misc_feature (61)..(62): /note="This region represents a CpG dinucleotide"
  misc_feature (61)..(61): /note="Nucleotide may be methylated to form 5-methylcytosine"
tgtgggacacgtcatgggcagcgccctgacctgagccttcagatgggggagctcggagcccgtccagcctgctgcccagcagacccccacacgcgctgccccccagcccctgcagatggggt

SEQ ID NO: 476 - DNA, 122 bp, Homo sapiens
  misc_feature (61)..(62): /note="This region represents a CpG dinucleotide"
  misc_feature (61)..(61): /note="Nucleotide may be methylated to form 5-methylcytosine"
cagggaaactgaagttctgaggcagtaaaactcaggcagcgccatgcattagctgtagtgcgatctgaaattgcagccgagcagcctccgcgcgctcgcgcacttcaagaacgcattttcct

SEQ ID NO: 477 - DNA, 122 bp, Homo sapiens
  misc_feature (61)..(62): /note="This region represents a CpG dinucleotide"
  misc_feature (61)..(61): /note="Nucleotide may be methylated to form 5-methylcytosine"
ggtggcttggtcaggacctgccattcagcccagtcgggctccggtgctcgccccggacggcgccccaagcgggtcccggccccgctgagcacctccagcagtggcacagcctctggaggggt

SEQ ID NO: 478 - DNA, 122 bp, Homo sapiens
  misc_feature (61)..(62): /note="This region represents a CpG dinucleotide"
  misc_feature (61)..(61): /note="Nucleotide may be methylated to form 5-methylcytosine"
cagattgtgctcgggctggagcccctcagaagttcgccagatccctgcctcaggcttggacgcaccaacaacccggagaaccctcacccacccgcgcagaggtattttgcttggcgacactt

SEQ ID NO: 479 - DNA, 122 bp, Homo sapiens
  misc_feature (61)..(62): /note="This region represents a CpG dinucleotide"
  misc_feature (61)..(61): /note="Nucleotide may be methylated to form 5-methylcytosine"
tgaaacaaagccctgaaccccctcaggctgaaaagacaaaccccgcctgaggccgggtcccgctccccacctggagggacccaattctgggcgccttctggcgacggtccctgctagggacg

SEQ ID NO: 480 - DNA, 122 bp, Homo sapiens
  misc_feature (61)..(62): /note="This region represents a CpG dinucleotide"
  misc_feature (61)..(61): /note="Nucleotide may be methylated to form 5-methylcytosine"
tcagcctgggcgcactggtcatcgtgctggccagcgccctcctgctgctgggtgagtgagcgccccgcctccacctggaccctcggaccctcggaccctcctccccaggccgtcccctgcta

SEQ ID NO: 481 - DNA, 122 bp, Homo sapiens
  misc_feature (61)..(62): /note="This region represents a CpG dinucleotide"
  misc_feature (61)..(61): /note="Nucleotide may be methylated to form 5-methylcytosine"
tgctcgctgctgcggcggcaagaacaggccagcagacggggtctccatgcctggcttgttcgctcattacaccacccaaggaacttgccaaaggccttgaagctgagaggcgcggtggcccg

SEQ ID NO: 482 - DNA, 122 bp, Homo sapiens
  misc_feature (61)..(62): /note="This region represents a CpG dinucleotide"
  misc_feature (61)..(61): /note="Nucleotide may be methylated to form 5-methylcytosine"
catttttgtgaacgtcttttggtgcacaaagtaggtgttcctggggtatatattaggagtcgaactgctgagtcataagtcatgtgtatatgcagctttactagatattgccagaccgtttt

SEQ ID NO: 483 - DNA, 122 bp, Homo sapiens
  misc_feature (61)..(62): /note="This region represents a CpG dinucleotide"
  misc_feature (61)..(61): /note="Nucleotide may be methylated to form 5-methylcytosine"
ccagcacccacagggttcattgcacaatgtccttgtttatacaactccagagctgccctccgtttcccctgaagttgcaaggtttcactaatgcaatagttaggaggaatgagagacaatat

SEQ ID NO: 484 - DNA, 122 bp, Homo sapiens
  misc_feature (61)..(62): /note="This region represents a CpG dinucleotide"
  misc_feature (61)..(61): /note="Nucleotide may be methylated to form 5-methylcytosine"
ttagcacatgactatgggctaggcattccgcttggttatcccgcttcatagacgtgagcccggttactccgacacaccgtggccccaggcagcctccccgtcctcaccaccttttcttctgt

SEQ ID NO: 485 - DNA, 122 bp, Homo sapiens
  misc_feature (61)..(62): /note="This region represents a CpG dinucleotide"
  misc_feature (61)..(61): /note="Nucleotide may be methylated to form 5-methylcytosine"
gtctggccatcatttatttctaccactgttgcctcacctgcttcatcccctgaagagcctcgaggtggtgccagagttcacttttgctgctattcttgcttgtggttatttgcatcctgttg

SEQ ID NO: 486 - DNA, 122 bp, Homo sapiens
  misc_feature (61)..(62): /note="This region represents a CpG dinucleotide"
  misc_feature (61)..(61): /note="Nucleotide may be methylated to form 5-methylcytosine"
caggtcctcattcaaacatccacgtgacaaatcaaaacagctttatcaggcacatggacacgtctgagttactattattctgtttgtaaatcacctcccttcattcctttcctttttctttg

SEQ ID NO: 487 - DNA, 122 bp, Homo sapiens
  misc_feature (61)..(62): /note="This region represents a CpG dinucleotide"
  misc_feature (61)..(61): /note="Nucleotide may be methylated to form 5-methylcytosine"
gagatttttgtgctgaagcaccataaagccgaatatggaagggtggatttgaaacagacacgtttgataattgaaacaagaagcattaaaatcttgtggagcatatttagtgggtaggatgg

SEQ ID NO: 488 - DNA, 122 bp, Homo sapiens
  misc_feature (61)..(62): /note="This region represents a CpG dinucleotide"
  misc_feature (61)..(61): /note="Nucleotide may be methylated to form 5-methylcytosine"
aaggaaaattactgggcttaagatttctaactacatttacttccttgacgaagcttcggccgtgcgtagactggtcagcttccggggtgactagagcagggctgtggtcactttcactggca

SEQ ID NO: 489 - DNA, 122 bp, Homo sapiens
  misc_feature (61)..(62): /note="This region represents a CpG dinucleotide"
  misc_feature (61)..(61): /note="Nucleotide may be methylated to form 5-methylcytosine"
gatgtggtgttgggcaaggtgcctctctgctgatgaggcaatcacactgaaggtgctggccgctgaaggccacctaccaacagcactccttgcatctggggaaacaagtgcttcattgacag

SEQ ID NO: 490 - DNA, 122 bp, Homo sapiens
  misc_feature (61)..(62): /note="This region represents a CpG dinucleotide"
  misc_feature (61)..(61): /note="Nucleotide may be methylated to form 5-methylcytosine"
gccagatgcgcactatacaacactgttgcataacctggcctttcctctgcctgtgacccccgtgtccccaccatgaggtcctggagttggttcaattaattgtagacagcatactataaatt

SEQ ID NO: 491 - DNA, 122 bp, Homo sapiens
  misc_feature (61)..(62): /note="This region represents a CpG dinucleotide"
  misc_feature (61)..(61): /note="Nucleotide may be methylated to form 5-methylcytosine"
gcgcccgggaccctgggttccgggtcctgcgtgccgtgctcgtccagagccgggaatgttcgcctccgggtggggccctgaagccatagcgggggtcgcccccctgtcgcctcctgagggcg

SEQ ID NO: 492 - DNA, 122 bp, Homo sapiens
  misc_feature (61)..(62): /note="This region represents a CpG dinucleotide"
  misc_feature (61)..(61): /note="Nucleotide may be methylated to form 5-methylcytosine"
cagtatgcaatcctctctattagcctctaacatttaagaactatagttgcttttggtatgcgggttttaaaagggctgagtagcctaggacagtgcttgtcaaatttctctggtcaaggatc

SEQ ID NO: 493 - DNA, 122 bp, Homo sapiens
  misc_feature (61)..(62): /note="This region represents a CpG dinucleotide"
  misc_feature (61)..(61): /note="Nucleotide may be methylated to form 5-methylcytosine"
ccaaatttccttctttcctgttcctcaccctgatcacgctggatttattgatggcctaatcgccacaaaccagcaaaggcaggttatgctatagtacaagccactagcccgcctcttagaac

SEQ ID NO: 494 - DNA, 122 bp, Homo sapiens
  misc_feature (61)..(62): /note="This region represents a CpG dinucleotide"
  misc_feature (61)..(61): /note="Nucleotide may be methylated to form 5-methylcytosine"
tctccatgttttcgatctgtcatcctgcaggtctgctgtagcaggtggctccgcttgaagcgagggaggaagtttcctccgatcagtagaggtcggtgtgggcgtgggggctgcctggaatg

SEQ ID NO: 495 - DNA, 122 bp, Homo sapiens
  misc_feature (61)..(62): /note="This region represents a CpG dinucleotide"
  misc_feature (61)..(61): /note="Nucleotide may be methylated to form 5-methylcytosine"
gcacacagaggagacctcttttgggcagggttacattctttacaacacttcctctgtgtacgcttccatttgcatttctaaatctgtacctgctttgaatcagaggaaaaagatgtcagacc

SEQ ID NO: 496 - DNA, 122 bp, Homo sapiens
  misc_feature (61)..(62): /note="This region represents a CpG dinucleotide"
  misc_feature (61)..(61): /note="Nucleotide may be methylated to form 5-methylcytosine"
gcacatttaagctgtagtgttcaagcagctccctaaagtagtggtcagcacacttcagtgcgcatcacaactctaaatgaagatttatcaaacatggctgaaggactacaccctttagactg

SEQ ID NO: 497 - DNA, 122 bp, Homo sapiens
  misc_feature (61)..(62): /note="This region represents a CpG dinucleotide"
  misc_feature (61)..(61): /note="Nucleotide may be methylated to form 5-methylcytosine"
gtgtggcagccgggcggggcggtctcgcctggggccacttggctcttccctgggcaggcacgcaggggccttgtcagaaatagctctgggctcccactttggtagggctcaccctgtgccca

SEQ ID NO: 498 - DNA, 122 bp, Homo sapiens
  misc_feature (61)..(62): /note="This region represents a CpG dinucleotide"
  misc_feature (61)..(61): /note="Nucleotide may be methylated to form 5-methylcytosine"
gcagctggccatgcacaggcagaggctctgggtcagtgcaggaagcagagtcacagccagcgccttggggtggggatgaaaggagatgacctggtggctgcgtgacagccactgtaggactt

SEQ ID NO: 499 - DNA, 122 bp, Homo sapiens
  misc_feature (61)..(62): /note="This region represents a CpG dinucleotide"
  misc_feature (61)..(61): /note="Nucleotide may be methylated to form 5-methylcytosine"
ccagagcacttggcttttttgtttcaaatttcctttcttcaacctcacaccagagtgccccggtcaggctcgacttatccattaggaacagtgtgggcagtgaaggggaccctccaaactgt

SEQ ID NO: 500 - DNA, 122 bp, Homo sapiens
  misc_feature (61)..(62): /note="This region represents a CpG dinucleotide"
  misc_feature (61)..(61): /note="Nucleotide may be methylated to form 5-methylcytosine"
ttttccaagtccagcaaattgtagacgagggaagattggtcactcggcaaacctcatgatcggcaggattgtcccaaaggtcacttgacagcgcacatgatcgatccaggatggcaaaatag

SEQ ID NO: 501 - DNA, 122 bp, Homo sapiens
  misc_feature (61)..(62): /note="This region represents a CpG dinucleotide"
  misc_feature (61)..(61): /note="Nucleotide may be methylated to form 5-methylcytosine"
ggggacgaggctcatggagaagtttcgggcggtgctggacctgcacgtcaagcaccacagcgccttgggctacggcctggtgaccctgctgacggcgggcggggagcgcatcttctccgccg

SEQ ID NO: 502 - DNA, 122 bp, Homo sapiens
  misc_feature (61)..(62): /note="This region represents a CpG dinucleotide"
  misc_feature (61)..(61): /note="Nucleotide may be methylated to form 5-methylcytosine"
tagagaggatcacagacccatctgtccttccttacagaaatgattctcttagggaaagcacgagaaagctatgcaatagggggaggtatgccaaagattttgatcacttcattcacttttat

SEQ ID NO: 503 - DNA, 122 bp, Homo sapiens
  misc_feature (61)..(62): /note="This region represents a CpG dinucleotide"
  misc_feature (61)..(61): /note="Nucleotide may be methylated to form 5-methylcytosine"
tcaataaatatgcatgcaatggctgtctactggtgcttccagacagtgctgggctcctcccgtcccccggggtgacgacatctccacagtgactcatggttcgaggcctctacctcattctg

SEQ ID NO: 504 - DNA, 122 bp, Homo sapiens
  misc_feature (61)..(62): /note="This region represents a CpG dinucleotide"
  misc_feature (61)..(61): /note="Nucleotide may be methylated to form 5-methylcytosine"
taaccatccagtgtctgccaagcaacggtctgattgatggtaaacaaccaaatcagaacacgcgtctctgtgcctgaactttccctatttcatttaacttttaagcatagatggggcttaat

SEQ ID NO: 505 - DNA, 122 bp, Homo sapiens
  misc_feature (61)..(62): /note="This region represents a CpG dinucleotide"
  misc_feature (61)..(61): /note="Nucleotide may be methylated to form 5-methylcytosine"
gtccggccctgaggctaggagcggggcgaaggctgcagaacgaacccaaagccaagcaggcgctccagctggagttgaagggaagtgactcgaggggtgtcacctcgtatgtcacaaactcc

SEQ ID NO: 506 - DNA, 122 bp, Homo sapiens
  misc_feature (61)..(62): /note="This region represents a CpG dinucleotide"
  misc_feature (61)..(61): /note="Nucleotide may be methylated to form 5-methylcytosine"
aaaaaaaaaaccctcaaagtgtctgcaggccaaccacatggcagcatgtgtgaatatggacgttggcttagttagagggcttacttttgccatttattattttagctttgtttcttggtcta

SEQ ID NO: 507 - DNA, 122 bp, Homo sapiens
  misc_feature (61)..(62): /note="This region represents a CpG dinucleotide"
  misc_feature (61)..(61): /note="Nucleotide may be methylated to form 5-methylcytosine"
aagccatgccgtgataggaatgtgttccttagcacccaacactggagttagatgggaatgcgttccttagcacccaacactggagtttgttacgtagtggaagagaaacaaggtttgaatcg

SEQ ID NO: 508 - DNA, 122 bp, Homo sapiens
  misc_feature (61)..(62): /note="This region represents a CpG dinucleotide"
  misc_feature (61)..(61): /note="Nucleotide may be methylated to form 5-methylcytosine"
tcaataaatgcctgattaataaataatcctgttaaatgaataaaaccccagtgtgccaaacggagacatacaaagcaatcatgatcagacttgttatgggagaatgatagatgaataaatct

SEQ ID NO: 509 - DNA, 122 bp, Homo sapiens
  misc_feature (61)..(62): /note="This region represents a CpG dinucleotide"
  misc_feature (61)..(61): /note="Nucleotide may be methylated to form 5-methylcytosine"
ccgtttcatcagaagccggaggacgggcgccagggggcaacttcctacaggagggcgtcccgttagaatgacagggcttttgcaaaagtctgacacccgtggcacagagcgccccagatatg

SEQ ID NO: 510 - DNA, 122 bp, Homo sapiens
  misc_feature (61)..(62): /note="This region represents a CpG dinucleotide"
  misc_feature (61)..(61): /note="Nucleotide may be methylated to form 5-methylcytosine"
ctggcgtcagggaggtgctggggtccatcctgtggatctgggacggtttggcaggaaaaacgagagtgtgttccacgtctaggaaccagagttctactgccatctgggaaagaacctctctc

SEQ ID NO: 511 - DNA, 122 bp, Homo sapiens
  misc_feature (61)..(62): /note="This region represents a CpG dinucleotide"
  misc_feature (61)..(61): /note="Nucleotide may be methylated to form 5-methylcytosine"
ggcgagagaaaataaattatcttatgcaagctgagcctaaacaaatggtggaagttactacgatggataagtgagcattaagttcatctgaaaggagaatttgatacccaaatccaacccat

SEQ ID NO: 512 - DNA, 122 bp, Homo sapiens
  misc_feature (61)..(62): /note="This region represents a CpG dinucleotide"
  misc_feature (61)..(61): /note="Nucleotide may be methylated to form 5-methylcytosine"
gccgcgaggccctgagatgaggctccaaagaccccgacaggccccggcgggtgggaggcgcgcgccccggggcgggcggggctccccctaccggccagacccggggagaggcgcgcggaggc

SEQ ID NO: 513 - DNA, 122 bp, Homo sapiens
  misc_feature (61)..(62): /note="This region represents a CpG dinucleotide"
  misc_feature (61)..(61): /note="Nucleotide may be methylated to form 5-methylcytosine"
cctgcaaaggctgagccttccctgatccttagaagtgggccaggcagacaagcggctgatcgtgggggtcctcctgccacttcctcctgcagagttctgtcctgctccctcagaagctcagg

SEQ ID NO: 514 - DNA, 122 bp, Homo sapiens
  misc_feature (61)..(62): /note="This region represents a CpG dinucleotide"
  misc_feature (61)..(61): /note="Nucleotide may be methylated to form 5-methylcytosine"
aattttcccctcctgtcctcctcctcctggcctcccgttttgattaattctgttctattgcgttcctttccaggggaggcctcagagccacttcaggctccagttcatgaaacagatcctca

SEQ ID NO: 515 - DNA, 122 bp, Homo sapiens
  misc_feature (61)..(62): /note="This region represents a CpG dinucleotide"
  misc_feature (61)..(61): /note="Nucleotide may be methylated to form 5-methylcytosine"
ggacagaagtggctgcagggacaagctctaccatcagggggagtgccgagtgagtggccccggtccaaaagtgcagataaagaaaggatggggtggagcgtttagggggctgaggaggcgag

SEQ ID NO: 516 - DNA, 122 bp, Homo sapiens
  misc_feature (61)..(62): /note="This region represents a CpG dinucleotide"
  misc_feature (61)..(61): /note="Nucleotide may be methylated to form 5-methylcytosine"
accgcagactcccggctgagtaccgcccggctgcaggcactgctgttcggcgacgaccaccgctgcttcacacggatgaccccggccctgctcctgctgccgcggtccgagcccgcgccgct

SEQ ID NO: 517 - DNA, 122 bp, Homo sapiens
  misc_feature (61)..(62): /note="This region represents a CpG dinucleotide"
  misc_feature (61)..(61): /note="Nucleotide may be methylated to form 5-methylcytosine"
gggcccacagcataccgaggctcattaagcaataaagatcgtgactgagaatattgttcacgattaatgacaggctgggggccgaaaacgcacagctgacggccaggaagcccagttggtaa

SEQ ID NO: 518 - DNA, 122 bp, Homo sapiens
  misc_feature (61)..(62): /note="This region represents a CpG dinucleotide"
  misc_feature (61)..(61): /note="Nucleotide may be methylated to form 5-methylcytosine"
cttttcccccagtctctatgggaggagtcttgaggctgagagcactcaccataaaagagtcgctggggttcctcagtcaccccacaaggcagcatgacaccttggctgggggaggctgggct

SEQ ID NO: 519 - DNA, 122 bp, Homo sapiens
  misc_feature (61)..(62): /note="This region represents a CpG dinucleotide"
  misc_feature (61)..(61): /note="Nucleotide may be methylated to form 5-methylcytosine"
ctgtaagtactttgggactacagatctatctaacttctttaagttcccagggctcaaggacgtttggttttgggaggaggcacctttaggatgtacaggaaacctgggcaactcataatagg

SEQ ID NO: 520 - DNA, 122 bp, Homo sapiens
  misc_feature (61)..(62): /note="This region represents a CpG dinucleotide"
  misc_feature (61)..(61): /note="Nucleotide may be methylated to form 5-methylcytosine"
ataataatattttaacaaactgtcttgtaagcattttgtttaatgaaagaagttttgaaacgtaagggaacgatcattgcactgttgaagtcatgagacttttaaatggctttgttccaatt

SEQ ID NO: 521 - DNA, 122 bp, Homo sapiens
  misc_feature (61)..(62): /note="This region represents a CpG dinucleotide"
  misc_feature (61)..(61): /note="Nucleotide may be methylated to form 5-methylcytosine"
tagcctgcaaaatcctctcattgtccttttgcatataatggagttaattcccagagcctgcgctaaactaacacacgatgacaacttcctcagctggacctggggagcttgcagtgtgaggt

SEQ ID NO: 522 - DNA, 122 bp, Homo sapiens
  misc_feature (61)..(62): /note="This region represents a CpG dinucleotide"
  misc_feature (61)..(61): /note="Nucleotide may be methylated to form 5-methylcytosine"
tgggggaggactttttggaaaatctacagtcagaattcaggtgatggatgtaaacgacaacgctcctgaaatcactgtgtcatcaattaccagtccaatcccagaaaacactccagagactg

SEQ ID NO: 523 - DNA, 122 bp, Homo sapiens
  misc_feature (61)..(62): /note="This region represents a CpG dinucleotide"
  misc_feature (61)..(61): /note="Nucleotide may be methylated to form 5-methylcytosine"
ccaggagagcagggctgcgccggctctcgtcctccgcggcaaacgtcccaggcacaggctcgcccaagactccagctccccgccccagagccataaaccgcgctggaaataactaaaaaaaa

SEQ ID NO: 524 - DNA, 122 bp, Homo sapiens
  misc_feature (61)..(62): /note="This region represents a CpG dinucleotide"
  misc_feature (61)..(61): /note="Nucleotide may be methylated to form 5-methylcytosine"
cggctgaggtccaaggtttggagagtttccgggactggccgggtcaccctgcggctcggccgtgtctggcagccccacccttcctggcagccaggccctctgaaattccgccagcaccgggg

SEQ ID NO: 525 - DNA, 122 bp, Homo sapiens
  misc_feature (61)..(62): /note="This region represents a CpG dinucleotide"
  misc_feature (61)..(61): /note="Nucleotide may be methylated to form 5-methylcytosine"
ctacagtgaacggtgtctgaacaactttttgagggaataaggcagaatttctcccttatgcggataacaaaagagctagccatcctgaaaacttgccacatcgtaattttcagagatggtca

SEQ ID NO: 526 - DNA, 122 bp, Homo sapiens
  misc_feature (61)..(62): /note="This region represents a CpG dinucleotide"
  misc_feature (61)..(61): /note="Nucleotide may be methylated to form 5-methylcytosine"
gaacaaagacgcccttgatgggggattcagggaggcccgggctgcttctcagggctcagacggggctgcctgcacgcgccggaccagccgccagccctgagggcttttctgttctcctaggt

SEQ ID NO: 527 - DNA, 122 bp, Homo sapiens
  misc_feature (61)..(62): /note="This region represents a CpG dinucleotide"
  misc_feature (61)..(61): /note="Nucleotide may be methylated to form 5-methylcytosine"
tattccccagtcatgtttcctctttctcctgaacctccacccactgtgtttttccatgcacgaaatagcaccattattcagccagtcacccaagtcagaaagctaaacatcatatgtctctg

SEQ ID NO: 528 - DNA, 122 bp, Homo sapiens
  misc_feature (61)..(62): /note="This region represents a CpG dinucleotide"
  misc_feature (61)..(61): /note="Nucleotide may be methylated to form 5-methylcytosine"
catgggactattgtggacagagaagctccaggcttcctttggttttgatttacggccccacggaactggagcgaggccctgcagcaggcttatctctcggggctcagcctcactggttctgg

SEQ ID NO: 529 - DNA, 122 bp, Homo sapiens
  misc_feature (61)..(62): /note="This region represents a CpG dinucleotide"
  misc_feature (61)..(61): /note="Nucleotide may be methylated to form 5-methylcytosine"
tatgaagtgtagaagcgtgcccttttctcttagtccatttccaccagacacggacagcaccgcgggtcgcggctaagggctctgccatgcacatggaaccctggggcctcctccttctgccc

SEQ ID NO: 530 - DNA, 122 bp, Homo sapiens
  misc_feature (61)..(62): /note="This region represents a CpG dinucleotide"
  misc_feature (61)..(61): /note="Nucleotide may be methylated to form 5-methylcytosine"
taagaggttgttgatgaatttgaggtttttaaggccactaccaaggtaatggaaatgggacgagaatggaagagccattatgtaagagaccagtcacggctgtgtggagaacgaaatcaaga

SEQ ID NO: 531 - DNA, 122 bp, Homo sapiens
  misc_feature (61)..(62): /note="This region represents a CpG dinucleotide"
  misc_feature (61)..(61): /note="Nucleotide may be methylated to form 5-methylcytosine"
cctcgcgctactcaatgacgaggcagcggggcaggtgctgcgagaaatacttgaagagctcgggggtggccccggggcagttggtcagctccagctcctccagctcctgcagctgcaccagg

SEQ ID NO: 532 - DNA, 122 bp, Homo sapiens
  misc_feature (61)..(62): /note="This region represents a CpG dinucleotide"
  misc_feature (61)..(61): /note="Nucleotide may be methylated to form 5-methylcytosine"
tgtcaggttgggggagaggcccaggttcctcacctggcctctgtgaacacttgagggagccgtgctccttgttattgctaggtgtggatgggggttcaggcttcccactaggtctctgctga

SEQ ID NO: 533 - DNA, 122 bp, Homo sapiens
  misc_feature (61)..(62): /note="This region represents a CpG dinucleotide"
  misc_feature (61)..(61): /note="Nucleotide may be methylated to form 5-methylcytosine"
ggctgggagtctatcaggccctcaacatgggctgtggtggcagcagccacctcatagtgtcgtgtacagccatctattaccatgtagggttcaggcattgctggctcagcccggacatcccc

SEQ ID NO: 534 - DNA, 122 bp, Homo sapiens
  misc_feature (61)..(62): /note="This region represents a CpG dinucleotide"
  misc_feature (61)..(61): /note="Nucleotide may be methylated to form 5-methylcytosine"
tgacttccaggttagaaaaaagttacgaggagttagctctactaattgtatctacgttagcgaatggacgaatactatgtcgtgtaagagaagctaaagctagttcctcaaaaggtaactgg

SEQ ID NO: 535 - DNA, 122 bp, Homo sapiens
  misc_feature (61)..(62): /note="This region represents a CpG dinucleotide"
  misc_feature (61)..(61): /note="Nucleotide may be methylated to form 5-methylcytosine"
ctactgcagaggcatctggccctttgatggcttttgggtaacttctgatctacagggcatcgtatcaaaatgcagactgagatttagtgggtagccagtgagcacttgctaggtgccaggca

SEQ ID NO: 536 - DNA, 122 bp, Homo sapiens
  misc_feature (61)..(62): /note="This region represents a CpG dinucleotide"
  misc_feature (61)..(61): /note="Nucleotide may be methylated to form 5-methylcytosine"
ctctaagaggaacctctatgactttgaagtcgagtacctgtgcgattacaagaagatccgcgtgagtctggggtgaccatgctctgggaggggacaggtcacaaggaagttagtgtcctgcc

SEQ ID NO: 537 - DNA, 122 bp, Homo sapiens
  misc_feature (61)..(62): /note="This region represents a CpG dinucleotide"
  misc_feature (61)..(61): /note="Nucleotide may be methylated to form 5-methylcytosine"
gcaggggttctgatggagtcagtacagttaggaaatttcttccttcctggcttatgatgacggcttcaatgatgcaataactagccaaggtcacacaggaaaggagaaagtgagagagggag

SEQ ID NO: 538 - DNA, 122 bp, Homo sapiens
  misc_feature (61)..(62): /note="This region represents a CpG dinucleotide"
  misc_feature (61)..(61): /note="Nucleotide may be methylated to form 5-methylcytosine"
gctaaaagaactgtctttgtttctgatgagaaatctgtggtcatttgatctctatcttttcgtgtatagattgcactttaacaatctcatcaaagaaatatccctctactttgagtcacaaa

SEQ ID NO: 539 - DNA, 122 bp, Homo sapiens
  misc_feature (61)..(62): /note="This region represents a CpG dinucleotide"
  misc_feature (61)..(61): /note="Nucleotide may be methylated to form 5-methylcytosine"
tggctccattcttcccaaaagcttatttctgtctgtgaactttcctacccatgttgaggtcgtattctgtcagtggagaggaggactgagtctcttctcttttggatgcaacttgaaacctg

SEQ ID NO: 540 - DNA, 122 bp, Homo sapiens
  misc_feature (61)..(62): /note="This region represents a CpG dinucleotide"
  misc_feature (61)..(61): /note="Nucleotide may be methylated to form 5-methylcytosine"
tcagtggtattaagtacatttcgcaatgttgtgtgtcatcaccattacccatttccagaacgttttcaacaaccccaaacagaaactctgtacccattaaacaatagctccatattcctccc

SEQ ID NO: 541 - DNA, 122 bp, Homo sapiens
  misc_feature (61)..(62): /note="This region represents a CpG dinucleotide"
  misc_feature (61)..(61): /note="Nucleotide may be methylated to form 5-methylcytosine"
taaaatcttaggaaacccactgtgtttgcatatgaaagccaggttctataatccatgctacgccttctgtctgtctcatttgcttctgaagtctgagggaaagatgggtgttattttgcact

SEQ ID NO: 542 - DNA, 122 bp, Homo sapiens
  misc_feature (61)..(62): /note="This region represents a CpG dinucleotide"
  misc_feature (61)..(61): /note="Nucleotide may be methylated to form 5-methylcytosine"
atgcaggaagacgtctgactctgtggcaagcagctctatgttgcaatctccctgtgaaatcgcctcataagaagagttaaaaggaggaactaaaggaggctgtggagagagacatgtgccct

SEQ ID NO: 543 - DNA, 122 bp, Homo sapiens
  misc_feature (61)..(62): /note="This region represents a CpG dinucleotide"
  misc_feature (61)..(61): /note="Nucleotide may be methylated to form 5-methylcytosine"
gagagccaggcttccttgtcctgcccagggagctgaggatggaggaagtggctcgttgcacgggcactctgttagacttaggacatggaatttgctactaagctgtgcatattggcagagat

SEQ ID NO: 544 - DNA, 122 bp, Homo sapiens
  misc_feature (61)..(62): /note="This region represents a CpG dinucleotide"
  misc_feature (61)..(61): /note="Nucleotide may be methylated to form 5-methylcytosine"
gctagtgctgtgctgactatagtgtttacaatgaatcattgaataaattgttaccatccacggaggctgcctctctggataattagcaatttcaatttaaggaagatactataaagtacact

SEQ ID NO: 545 - DNA, 122 bp, Homo sapiens
  misc_feature (61)..(62): /note="This region represents a CpG dinucleotide"
  misc_feature (61)..(61): /note="Nucleotide may be methylated to form 5-methylcytosine"
taacaatctcatgaggcgggtgctgttactattcccgtaatgtagacgaggaaaccgaggcgtgtgctggagcaggatcacggccgtgctcagagacgggctctggatgccatgctctgact

SEQ ID NO: 546 - DNA, 122 bp, Homo sapiens
  misc_feature (61)..(62): /note="This region represents a CpG dinucleotide"
  misc_feature (61)..(61): /note="Nucleotide may be methylated to form 5-methylcytosine"
ttcacttgcgtgggaagtccagctgtctcaatggggcccaggagacagactgacgagggacgaattcctgtgtttgggactgggcttgaaaagtctcctgtttgtaacactcaacttgtaga

SEQ ID NO: 547 - DNA, 122 bp, Homo sapiens
  misc_feature (61)..(62): /note="This region represents a CpG dinucleotide"
  misc_feature (61)..(61): /note="Nucleotide may be methylated to form 5-methylcytosine"
ggagatgagtaagcagggagtgggtgcatatgcaaacagggtggtcagaaatgctttggccggatgtgtgactgaaggctatgtgcagctgaggaaggctgggccaccacagtagcagagag

SEQ ID NO: 548 - DNA, 122 bp, Homo sapiens
  misc_feature (61)..(62): /note="This region represents a CpG dinucleotide"
  misc_feature (61)..(61): /note="Nucleotide may be methylated to form 5-methylcytosine"
cagcatcatctccttgccatgctccaggtgtctgagcagccacctagtgcagtgacccatcggggcttcccttgtggcctccgcggtccagaacctctcccaggtgtgatggatcctccaag

SEQ ID NO: 549 - DNA, 122 bp, Homo sapiens
  misc_feature (61)..(62): /note="This region represents a CpG dinucleotide"
  misc_feature (61)..(61): /note="Nucleotide may be methylated to form 5-methylcytosine"
actcaagaggtacgtggaagcaggacagcaggatcttgacagatggccctgggggggcggcgcatttgagtcagagacagcatcatgagtaagaggaacccagcctgacgtgggcaactcag

SEQ ID NO: 550 - DNA, 122 bp, Homo sapiens
  misc_feature (61)..(62): /note="This region represents a CpG dinucleotide"
  misc_feature (61)..(61): /note="Nucleotide may be methylated to form 5-methylcytosine"
ggagccgatttggcgaaagttacgtaaacaatggaattgtctcagtttgcgcctttgtttcgtttgacagccctccagggagtcatagtgattgctggagacggtgaactaacactgtgggg

SEQ ID NO: 551 - DNA, 122 bp, Homo sapiens
  misc_feature (61)..(62): /note="This region represents a CpG dinucleotide"
  misc_feature (61)..(61): /note="Nucleotide may be methylated to form 5-methylcytosine"
ttaatcaaaatcaggccaaaggtgcaggcaggacagaggcctgacttaccagaaaataaacgtctggtctattccacttgtagtgccagtttacattgtctggcgagagccaactaccaggg

SEQ ID NO: 552 - DNA, 122 bp, Homo sapiens
  misc_feature (61)..(62): /note="This region represents a CpG dinucleotide"
  misc_feature (61)..(61): /note="Nucleotide may be methylated to form 5-methylcytosine"
aaagtcaacaattatttttcactttgccagagtaagctatactgaaaacaaaacaactttcgatttcatcagttttccactaacctgttgtaacttcaacctcaacaggaagaatgataaac

SEQ ID NO: 553 - DNA, 122 bp, Homo sapiens
  misc_feature (61)..(62): /note="This region represents a CpG dinucleotide"
  misc_feature (61)..(61): /note="Nucleotide may be methylated to form 5-methylcytosine"
ggcggcagccactgcgactcccactgtgcctggctctgtccatattagttcccaggcggccgtcgccgttccagcagcggcagcggcagcggcagcggcggacatgttgtgaggcggcggcg

SEQ ID NO: 554 - DNA, 122 bp, Homo sapiens
  misc_feature (61)..(62): /note="This region represents a CpG dinucleotide"
  misc_feature (61)..(61): /note="Nucleotide may be methylated to form 5-methylcytosine"
tggagggaacaaggcgctgggagaggcccggggaagcggcgggccagactggcgcaggtgcggactgggcgcggggcaggggagggcgctgtggagcggctgtcgccccggggcacagttgc

SEQ ID NO: 555 - DNA, 122 bp, Homo sapiens
  misc_feature (61)..(62): /note="This region represents a CpG dinucleotide"
  misc_feature (61)..(61): /note="Nucleotide may be methylated to form 5-methylcytosine"
gagacccctcttctcccaaagctcaccggggccccgcccctgactccgcccaccagagcccggtcctccagtcccgccccatcccgggccccacccaccagccgggctccgcctacccggaa

SEQ ID NO: 556 - DNA, 122 bp, Homo sapiens
  misc_feature (61)..(62): /note="This region represents a CpG dinucleotide"
  misc_feature (61)..(61): /note="Nucleotide may be methylated to form 5-methylcytosine"
agaagcaccaatccggaaaggctcaaggcggatggaaggaagggaagctgaccgctttcgcgtgccctcccccagcctaacactgggaacctgtgtggggcgccagagtccggaagagaagt

SEQ ID NO: 557 - DNA, 122 bp, Homo sapiens
  misc_feature (61)..(62): /note="This region represents a CpG dinucleotide"
  misc_feature (61)..(61): /note="Nucleotide may be methylated to form 5-methylcytosine"
ggtgggccttgagcctttcaaagacggcggtgtccattaatccttttaatttgcacctagcggcagctgagacaagcctctcaaccggcagccactttaagagctgagtggtctaacccgag

SEQ ID NO: 558 - DNA, 122 bp, Homo sapiens
  misc_feature (61)..(62): /note="This region represents a CpG dinucleotide"
  misc_feature (61)..(61): /note="Nucleotide may be methylated to form 5-methylcytosine"
ctacaccattaccccttggcatcacccttgtgagttacatggctaagtagaaattcagcacggtagagggtgcatgcacgtgggagcttgggcagatgagatgggcttaggttataggggaa

SEQ ID NO: 559 - DNA, 122 bp, Homo sapiens
  misc_feature (61)..(62): /note="This region represents a CpG dinucleotide"
  misc_feature (61)..(61): /note="Nucleotide may be methylated to form 5-methylcytosine"
atgtagaggaggcagctctggaaactgctttagggaatcactgcaaaccattttgtcaggcgtggattcagagtcagcatcccttccccccttcccccgttctccccttccccccttccccc

SEQ ID NO: 560 - DNA, 122 bp, Homo sapiens
  misc_feature (61)..(62): /note="This region represents a CpG dinucleotide"
  misc_feature (61)..(61): /note="Nucleotide may be methylated to form 5-methylcytosine"
tatgaatactactgctgatgctgccagtaagtcacaaaccttacagcaacagattgtcgacgcagagccgtcttattttcgtacattcatcattattttgccacatttgacctttcaaactt

SEQ ID NO: 561 - DNA, 122 bp, Homo sapiens
  misc_feature (61)..(62): /note="This region represents a CpG dinucleotide"
  misc_feature (61)..(61): /note="Nucleotide may be methylated to form 5-methylcytosine"
cttttattttcccaaactgtcaaactgtattaaggaggtaccaaaaggctcctgctgtcccggggcagaggggcgacaggcaggagctcgctcacgtggggcagtcacccgcgccccgggcg

SEQ ID NO: 562 - DNA, 122 bp, Homo sapiens
  misc_feature (61)..(62): /note="This region represents a CpG dinucleotide"
  misc_feature (61)..(61): /note="Nucleotide may be methylated to form 5-methylcytosine"
tggtcacctctcatcctccacccagctctgatgctcactgcaaattgtttgccaacctaacgggtgaaccctcagctgttctgatgagtactcctctgactgctggaaggtgacaggaagga

SEQ ID NO: 563 - DNA, 122 bp, Homo sapiens
  misc_feature (61)..(62): /note="This region represents a CpG dinucleotide"
  misc_feature (61)..(61): /note="Nucleotide may be methylated to form 5-methylcytosine"
cgccactttgttttcctgaatcaccacaagactatttttcctgatgaattaacaattgaacgggcttaagtgcccactatttttgtgaagatgtaaaggagcataagcacgtctttctgttt

SEQ ID NO: 564 - DNA, 122 bp, Homo sapiens
  misc_feature (61)..(62): /note="This region represents a CpG dinucleotide"
  misc_feature (61)..(61): /note="Nucleotide may be methylated to form 5-methylcytosine"
gctgggctcttatctaagataatgctattctaaactaggccccagctctgtaagagtccccgccttccaagataggatttttatatttgaaaatttcagggccttggtctggcaactcttaa

SEQ ID NO: 565 - DNA, 122 bp, Homo sapiens
  misc_feature (61)..(62): /note="This region represents a CpG dinucleotide"
  misc_feature (61)..(61): /note="Nucleotide may be methylated to form 5-methylcytosine"
gtgtctctaccattagactgcctggggtcataagcaagtctcccttattagaatgcctgacgtcatccaggtgtttctatcattagactgtctgggtacagcatgagtctctcccattagaa

SEQ ID NO: 566 - DNA, 122 bp, Homo sapiens
  misc_feature (61)..(62): /note="This region represents a CpG dinucleotide"
  misc_feature (61)..(61): /note="Nucleotide may be methylated to form 5-methylcytosine"
acagcctcagatcctattctaacatcgatccatcctgttacccttttaagaggcggatcccgcagtgtcctttcctccctcccagccacctctacccccagtcggctgggcggagcttcacg

SEQ ID NO: 567 - DNA, 122 bp, Homo sapiens
  misc_feature (61)..(62): /note="This region represents a CpG dinucleotide"
  misc_feature (61)..(61): /note="Nucleotide may be methylated to form 5-methylcytosine"
tttaaaaaataaaattgagatattgagataacggtcccgtctctagctcctgggcaaacccggccaatcccgcatgtctgtggatcgtatcgcttattttcttcatatataccaatatacca

SEQ ID NO: 568 - DNA, 122 bp, Homo sapiens
  misc_feature (61)..(62): /note="This region represents a CpG dinucleotide"
  misc_feature (61)..(61): /note="Nucleotide may be methylated to form 5-methylcytosine"
ttttatttttttctccctttcttttctgtcttctgactctatgtctttttcttaattttccgtttccctatcttttccctgcttcccagtggcatccatgaatgctgttaaattaactgcca

SEQ ID NO: 569 - DNA, 122 bp, Homo sapiens
  misc_feature (61)..(62): /note="This region represents a CpG dinucleotide"
  misc_feature (61)..(61): /note="Nucleotide may be methylated to form 5-methylcytosine"
agagatgggtcagtagccctttaagtatcctttaagtatgcctgtcaagacacctacccccgcattccaagcatacttaccaagagttatgacatctacattctgtaatcatgatgtcccta

SEQ ID NO: 570 - DNA, 122 bp, Homo sapiens
  misc_feature (61)..(62): /note="This region represents a CpG dinucleotide"
  misc_feature (61)..(61): /note="Nucleotide may be methylated to form 5-methylcytosine"
gcagagactggcacagtttggttgggcgtgaccggggcaataagtacggacgtagtggggcgtggatctgccaggtgggggcgtggcctccattgaggggcgtggccctggtatgtggggcg

SEQ ID NO: 571 - DNA, 122 bp, Homo sapiens
  misc_feature (61)..(62): /note="This region represents a CpG dinucleotide"
  misc_feature (61)..(61): /note="Nucleotide may be methylated to form 5-methylcytosine"
catctgacctcagacgacagggaaccagacctgcaagccctttccttcggtgaggccatgcggtatcccaggagtttagggaccgcaaataaaagagggccccatcatgtgtacagagctga

SEQ ID NO: 572 - DNA, 122 bp, Homo sapiens
  misc_feature (61)..(62): /note="This region represents a CpG dinucleotide"
  misc_feature (61)..(61): /note="Nucleotide may be methylated to form 5-methylcytosine"
caggaaacgtgctgtggggacacgaaccatccggtcacagggcggcctcctgagaagacacggacagcgacgccaccatccggggctccctgagcggggtgcgggcgctggaaccttaaccg

SEQ ID NO: 573 - DNA, 122 bp, Homo sapiens
  misc_feature (61)..(62): /note="This region represents a CpG dinucleotide"
  misc_feature (61)..(61): /note="Nucleotide may be methylated to form 5-methylcytosine"
ccccccttcccccttcccccttcccccttcccccttcccctcccccatctccagcctggccgctccaggaagtgagcaccgtttatcccccaccccaggcggcccgactcctcccagaagga

SEQ ID NO: 574 - DNA, 122 bp, Homo sapiens
  misc_feature (61)..(62): /note="This region represents a CpG dinucleotide"
  misc_feature (61)..(61): /note="Nucleotide may be methylated to form 5-methylcytosine"
gcctgtgtgcagatggcagtggaagccagcgcaggacgcttggcagtgtgggttcttgctcggtcttcttcctatctggatgtcctggaaacttcctccatgcagggagcgtgtgtctgtgg

SEQ ID NO: 575 - DNA, 122 bp, Homo sapiens
  misc_feature (61)..(62): /note="This region represents a CpG dinucleotide"
  misc_feature (61)..(61): /note="Nucleotide may be methylated to form 5-methylcytosine"
tgaagagtatatggaaaggggttgcacaagcaatggttgctgttcctgttgctgccactgcggtgagggctgtggctggacgtccctcctggcactttgcctctgtcccctccatccgccgc

SEQ ID NO: 576 - DNA, 122 bp, Homo sapiens
  misc_feature (61)..(62): /note="This region represents a CpG dinucleotide"
  misc_feature (61)..(61): /note="Nucleotide may be methylated to form 5-methylcytosine"
acctattataaataccactgctactaatagctaccatgaatcaatgctagttttataacacgtatggaactatgtcctttacatgagttcactagttgtttgtataaagattaccatatgtt

SEQ ID NO: 577 - DNA, 122 bp, Homo sapiens
  misc_feature (61)..(62): /note="This region represents a CpG dinucleotide"
  misc_feature (61)..(61): /note="Nucleotide may be methylated to form 5-methylcytosine"
agggttgtaagctcctgcccagtcccgtgggcagttctaggatcttacccccagcccctgcgattctgaggggacgtgtcagtcattcagcctccagccagtccctggggatgtctgaggga

SEQ ID NO: 578 - DNA, 122 bp, Homo sapiens
  misc_feature (61)..(62): /note="This region represents a CpG dinucleotide"
  misc_feature (61)..(61): /note="Nucleotide may be methylated to form 5-methylcytosine"
gcaaatactatcagcctgagacggaggtaaggtcaggtggccagtcctgtctgccctctccgatgagcacccaggttagggtagagctctggggacccacaatctctctcagacctttcagc

SEQ ID NO: 579 - DNA, 122 bp, Homo sapiens
  misc_feature (61)..(62): /note="This region represents a CpG dinucleotide"
  misc_feature (61)..(61): /note="Nucleotide may be methylated to form 5-methylcytosine"
cctcctcctccccaggccccgccccttcccccctgagtctttcggcctgggtggaggacgcggctgcttcaagtccttggctctgatccaggccacagattccaggttagtgagcaagttta

SEQ ID NO: 580 - DNA, 122 bp, Homo sapiens
  misc_feature (61)..(62): /note="This region represents a CpG dinucleotide"
  misc_feature (61)..(61): /note="Nucleotide may be methylated to form 5-methylcytosine"
gctgcaattaatctgctccatggctccaatcaaagcaaggattctgtaggatggattctccgccttcctgcaggaaagggggctctagctctctagtgacagcatccttcagagggaccctt

SEQ ID NO: 581 - DNA, 122 bp, Homo sapiens
  misc_feature (61)..(62): /note="This region represents a CpG dinucleotide"
  misc_feature (61)..(61): /note="Nucleotide may be methylated to form 5-methylcytosine"
ctcggaacggaacggagcagagtcgtgcgtggttgagtttagataaaagccgagtgagcgcgctctgttccttaagattagtttaaggtgccttggattgctctgaagagctttgaccacct

SEQ ID NO: 582 - DNA, 122 bp, Homo sapiens
  misc_feature (61)..(62): /note="This region represents a CpG dinucleotide"
  misc_feature (61)..(61): /note="Nucleotide may be methylated to form 5-methylcytosine"
tacttcaggctcagcagccccaggagctggagcctgaggagctgctggggtcctgcccagcgctgaccggcctggcagcgggtcccagtgcgaccggtgaggggagggtgcttgggctcctg

SEQ ID NO: 583 - DNA, 122 bp, Homo sapiens
  misc_feature (61)..(62): /note="This region represents a CpG dinucleotide"
  misc_feature (61)..(61): /note="Nucleotide may be methylated to form 5-methylcytosine"
aaagacagctactcagctaagcgtggtttccgactgaactgcatcctttgtttcagtagacggccggtctcaggctgctacacgtattttgcatttggtcgtttctgccaaatttcctctgc

SEQ ID NO: 584 - DNA, 122 bp, Homo sapiens
  misc_feature (61)..(62): /note="This region represents a CpG dinucleotide"
  misc_feature (61)..(61): /note="Nucleotide may be methylated to form 5-methylcytosine"
tgataaaaacattactagcttctgattattctcttgaaaactctctttctacactaattacgtaatttgagacagaatgaacaagtgactgtatctgggaggcttcctacaattagagaaga

SEQ ID NO: 585 - DNA, 122 bp, Homo sapiens
  misc_feature (61)..(62): /note="This region represents a CpG dinucleotide"
  misc_feature (61)..(61): /note="Nucleotide may be methylated to form 5-methylcytosine"
gggaattccaagtagagggagaagtgtgaaccaggtaagaagccaaatggtggataaagacgcacaatagagaaaaggactggaaatagcaattgaagaccttgaatacccagctaacaaat

SEQ ID NO: 586 - DNA, 122 bp, Homo sapiens
  misc_feature (61)..(62): /note="This region represents a CpG dinucleotide"
  misc_feature (61)..(61): /note="Nucleotide may be methylated to form 5-methylcytosine"
ggctcttccagcagctgaggcaacacaccctcctgtatgggaagtgggtggtgtatcacacgattcatcacagcactttcattgtttcaaaattctgtgaggagtaagaaaaaatataaaag

SEQ ID NO: 587 - DNA, 122 bp, Homo sapiens
  misc_feature (61)..(62): /note="This region represents a CpG dinucleotide"
  misc_feature (61)..(61): /note="Nucleotide may be methylated to form 5-methylcytosine"
ctgttaggttgcgtcagagtcccaatccaaatctcataactaagatcagttttggccaggcgtggtggctcacgcctgtaatcccagcactttgggaggcggaggcgggcggatcacgaggt

SEQ ID NO: 588 - DNA, 122 bp, Homo sapiens
  misc_feature (61)..(62): /note="This region represents a CpG dinucleotide"
  misc_feature (61)..(61): /note="Nucleotide may be methylated to form 5-methylcytosine"
aatgcagcagaaggaaagccggtttcctgttttaaaatccgacactagttctggctctgccgctggctccttctgtgtcctgagtgagcctcaacatcttcatctggaaaatgggtcctgcc

SEQ ID NO: 589 - DNA, 122 bp, Homo sapiens
  misc_feature (61)..(62): /note="This region represents a CpG dinucleotide"
  misc_feature (61)..(61): /note="Nucleotide may be methylated to form 5-methylcytosine"
gtccggcctctgccatgtgctgctgctatgtgtgcatggccactactttggtgtggacctcggtaaccagggacagtcaagagaacccttgtcctgtcatttacctcattttagcaactttg

SEQ ID NO: 590 - DNA, 122 bp, Homo sapiens
  misc_feature (61)..(62): /note="This region represents a CpG dinucleotide"
  misc_feature (61)..(61): /note="Nucleotide may be methylated to form 5-methylcytosine"
gatggaactggatgagctcagactgcagacatccttctttccagtagctccctccaccaccgctgccgccccccgcaacgccgcttccggagtttctgctgccggttcctggggttttgccc

SEQ ID NO: 591 - DNA, 122 bp, Homo sapiens
  misc_feature (61)..(62): /note="This region represents a CpG dinucleotide"
  misc_feature (61)..(61): /note="Nucleotide may be methylated to form 5-methylcytosine"
tttcctgcctctgcggctgcctttttgttccttcctcctccgggagggcagggggccagccgcccaatccaggaaactcgcatcctgatttggtaaacaatgtcccaccctgacttgtccat

SEQ ID NO: 592 - DNA, 122 bp, Homo sapiens
  misc_feature (61)..(62): /note="This region represents a CpG dinucleotide"
  misc_feature (61)..(61): /note="Nucleotide may be methylated to form 5-methylcytosine"
caggcacagcattgaacctgtcatcacacatatcagattctttcagctgtttgtgactggcgtgcccctttctgtggtatccaaactggctgtgcatgagtggtctgcacattaaagcattg

SEQ ID NO: 593 - DNA, 122 bp, Homo sapiens
  misc_feature (61)..(62): /note="This region represents a CpG dinucleotide"
  misc_feature (61)..(61): /note="Nucleotide may be methylated to form 5-methylcytosine"
gcaggtagaagcaccgcttaaggggaacggcgattcgactcgcagtgacttaagggttggcgtggtgcttgttcctgggcgtggggaggacaggaaaccgcggggtctgtgagacgccccgt

SEQ ID NO: 594 - DNA, 122 bp, Homo sapiens
  misc_feature (61)..(62): /note="This region represents a CpG dinucleotide"
  misc_feature (61)..(61): /note="Nucleotide may be methylated to form 5-methylcytosine"
ggacgcggccctgcgtctcctttcctgagatgcgaggttatttccatctttcagcagtctcggcgctttgtcttgttctggaagcaattgctagatagacatttctggccgtgaatactatt

SEQ ID NO: 595 - DNA, 122 bp, Homo sapiens
  misc_feature (61)..(62): /note="This region represents a CpG dinucleotide"
  misc_feature (61)..(61): /note="Nucleotide may be methylated to form 5-methylcytosine"
aaaagagagaaaaatgctgataaatttaaatctatttctgccatctaattttgtacttcccgtttgtttcttctgatctgtttttttctttcacttttgcattctttaggattactatttat

SEQ ID NO: 596 - DNA, 122 bp, Homo sapiens
  misc_feature (61)..(62): /note="This region represents a CpG dinucleotide"
  misc_feature (61)..(61): /note="Nucleotide may be methylated to form 5-methylcytosine"
gtctcaatgaagtgtgtgtgtgtgtgtgtgtgtgtgtgtgtgtgtgtgtgtgtggacacacgtggacaggcagatgatggtgattagagaccacttcactagtcacaagcacttagaatgca

SEQ ID NO: 597 - DNA, 122 bp, Homo sapiens
  misc_feature (61)..(62): /note="This region represents a CpG dinucleotide"
  misc_feature (61)..(61): /note="Nucleotide may be methylated to form 5-methylcytosine"
aggcctcatcacgacaaatcttgattctgacgtgtgaagagagatggttactgccagccacgccagcctcgccagcctcgggctaacctgccccaaccctggaggatcccttctactcaccc

SEQ ID NO: 598 - DNA, 122 bp, Homo sapiens
  misc_feature (61)..(62): /note="This region represents a CpG dinucleotide"
  misc_feature (61)..(61): /note="Nucleotide may be methylated to form 5-methylcytosine"
ccatcacggggcacagagtgggacgcctgccatgccgtcctccctgcaaaccacagccaacgtccaggccccgcctttcactcgaagctcagcccttgttctggccggggaatctggtgcat

SEQ ID NO: 599 - DNA, 122 bp, Homo sapiens
  misc_feature (61)..(62): /note="This region represents a CpG dinucleotide"
  misc_feature (61)..(61): /note="Nucleotide may be methylated to form 5-methylcytosine"
ttggcttgaggggcgggctggtaggtcagcccccttggggcgtcgttggtcctctccaggcgtgtcacattctgcccgcacatggtgccttggtactccccaaaagtcatgccttgattttt

SEQ ID NO: 600 - DNA, 122 bp, Homo sapiens
  misc_feature (61)..(62): /note="This region represents a CpG dinucleotide"
  misc_feature (61)..(61): /note="Nucleotide may be methylated to form 5-methylcytosine"
gcccagtaggcaggtggcaagcttcgtccttctgctacagattctaactttttcttcccccggtctcatatccttagacatctgcccaggctgatgtaactgaggttgagtttattgtcagg

SEQ ID NO: 601 - DNA, 122 bp, Homo sapiens
  misc_feature (61)..(62): /note="This region represents a CpG dinucleotide"
  misc_feature (61)..(61): /note="Nucleotide may be methylated to form 5-methylcytosine"
tcattagctgcagtgcgctggtgctgcctaacagaacgcacactggctgtcactaggaagcgccatacggttgctatcacccaacatggtgaaagggtgatggatttcactgtgaatatgcc

SEQ ID NO: 602 - DNA, 122 bp, Homo sapiens
  misc_feature (61)..(62): /note="This region represents a CpG dinucleotide"
  misc_feature (61)..(61): /note="Nucleotide may be methylated to form 5-methylcytosine"
atgttaatttcacaatttagtacactgcaactacgtatttaatacaaagcagcctttgggcggggcggggcggggcggggcggttaacaaaatgcatctcagcaccagcctagagaaacttt

SEQ ID NO: 603 - DNA, 122 bp, Homo sapiens
  misc_feature (61)..(62): /note="This region represents a CpG dinucleotide"
  misc_feature (61)..(61): /note="Nucleotide may be methylated to form 5-methylcytosine"
gcacgcacgcacacacacacaccggcccaggacctcagcacaaagggcgcgctgacccagcgctaacacacaagacaaattaaagaaaggggcaaatcggaggaggggctaaggcgagggtc

SEQ ID NO: 604 - DNA, 122 bp, Homo sapiens
  misc_feature (61)..(62): /note="This region represents a CpG dinucleotide"
  misc_feature (61)..(61): /note="Nucleotide may be methylated to form 5-methylcytosine"
gacgtgacactcctgttttggtaagaattgacacacagctaccctcatctggtgaacggacgaattggggctaaagctgaatggctgacatgtcaacaacctgaaataaaaacaaaccagcc

SEQ ID NO: 605 - DNA, 122 bp, Homo sapiens
  misc_feature (61)..(62): /note="This region represents a CpG dinucleotide"
  misc_feature (61)..(61): /note="Nucleotide may be methylated to form 5-methylcytosine"
agcagccggtgagtagccatatcaagctccttagggaggctccaccccatcctctggggccgcccttcctcggcgtccacggccccgcgggcagttacctgttctaggtgtttgtgcccccc

SEQ ID NO: 606 - DNA, 122 bp, Homo sapiens
  misc_feature (61)..(62): /note="This region represents a CpG dinucleotide"
  misc_feature (61)..(61): /note="Nucleotide may be methylated to form 5-methylcytosine"
tggttttcttgctcatattttctatgtatgcggtgatttccaactacactctgtggagcccgtggggttctgaacggatgctcccaggatgtgtgggaggggcaggaagagcaagagtggag

SEQ ID NO: 607 - DNA, 122 bp, Homo sapiens
  misc_feature (61)..(62): /note="This region represents a CpG dinucleotide"
  misc_feature (61)..(61): /note="Nucleotide may be methylated to form 5-methylcytosine"
ttggggggacaatggggacgcctccccgaggaatcgcggcccgcccgtgctacctcgtaccgcgtccctagcccagctcagggacttggcgtttcccctgcggtttcgcaaccctggggttt

SEQ ID NO: 608 - DNA, 122 bp, Homo sapiens
  misc_feature (61)..(62): /note="This region represents a CpG dinucleotide"
  misc_feature (61)..(61): /note="Nucleotide may be methylated to form 5-methylcytosine"
aaactaaatgtgatcatcaagctgccaaacataaaaagaaagataaatccacaagaaaaacgacaaagaaggaaagctctcgctgttgcccaggtactgctcatgctcagagaccaaacaga

SEQ ID NO: 609 - DNA, 122 bp, Homo sapiens
  misc_feature (61)..(62): /note="This region represents a CpG dinucleotide"
  misc_feature (61)..(61): /note="Nucleotide may be methylated to form 5-methylcytosine"
ccacttcctccatttaataaatgtttattcagagtctatttttctgccagtgccatgctacgcactaggcaccagggatataaatatgaataggactgacataattcctgctttcaaaaagc

SEQ ID NO: 610 - DNA, 122 bp, Homo sapiens
  misc_feature (61)..(62): /note="This region represents a CpG dinucleotide"
  misc_feature (61)..(61): /note="Nucleotide may be methylated to form 5-methylcytosine"
ccttctttgcctaaatacctctgaaacttgaagaaatggaacccctgatgctggcaggtgcggccccctcctctggatagggtcttaggtaattatcttagcttccccacccaattttccac

SEQ ID NO: 611 - DNA, 122 bp, Homo sapiens
  misc_feature (61)..(62): /note="This region represents a CpG dinucleotide"
  misc_feature (61)..(61): /note="Nucleotide may be methylated to form 5-methylcytosine"
cctgggttcctcaggagaataatcatgtcccccgtgtctgtgggacagataatgggtgatcgacatgcactctgcaccaggagtggttagaagatccgccgagcttccttactgaaagtggc

SEQ ID NO: 612 - DNA, 122 bp, Homo sapiens
  misc_feature (61)..(62): /note="This region represents a CpG dinucleotide"
  misc_feature (61)..(61): /note="Nucleotide may be methylated to form 5-methylcytosine"
ttctgttccagaggctgaattaaacaaaatctacgtgatcgccttggagatgccggggatcgaacccggggcctcatacatgcgaagcatgcgctctaccactgagctacatcccctggcac

SEQ ID NO: 613 - DNA, 122 bp, Homo sapiens
  misc_feature (61)..(62): /note="This region represents a CpG dinucleotide"
  misc_feature (61)..(61): /note="Nucleotide may be methylated to form 5-methylcytosine"
agcgcgggtctcagctctggcctagcgactggacgctcgcgctgccggttgttaaaggaccggcaggcagctcccagtgcatactaacatttttaatgtataagattttattacggttcagt

SEQ ID NO: 614 - DNA, 122 bp, Homo sapiens
  misc_feature (61)..(62): /note="This region represents a CpG dinucleotide"
  misc_feature (61)..(61): /note="Nucleotide may be methylated to form 5-methylcytosine"
agtaatgggtgaggacacaggccaggtccacaatttgtgcacttgagagattaaggcctccgagatcaaattaccacagcaaactgagacagaattattgtagggatgtttggggaggatgc

SEQ ID NO: 615 - DNA, 122 bp, Homo sapiens
  misc_feature (61)..(62): /note="This region represents a CpG dinucleotide"
  misc_feature (61)..(61): /note="Nucleotide may be methylated to form 5-methylcytosine"
ttttaaaaaaaaggtcattttgaagggcagagttgtaggcgaatctatgagtcgtgactgcgtgagggaaggagggagggaactccccctgctgcatcactgccccctcctcctccaacatc

SEQ ID NO: 616 - DNA, 122 bp, Homo sapiens
  misc_feature (61)..(62): /note="This region represents a CpG dinucleotide"
  misc_feature (61)..(61): /note="Nucleotide may be methylated to form 5-methylcytosine"
atggcaggcacatcattctgtttcaaaagaagtgtcgctgggctctgcctcaatgccttccggcaggtggccaggaccagcagaccacttgctcgtcactaggctctgtttgttttctttgt

SEQ ID NO: 617 - DNA, 122 bp, Homo sapiens
  misc_feature (61)..(62): /note="This region represents a CpG dinucleotide"
  misc_feature (61)..(61): /note="Nucleotide may be methylated to form 5-methylcytosine"
gccagcaccgtagccccgccagcagccagggtatcctgagattgcgggagcgccacgcaccgcccacctagctccgtccaccgtccagctcgctccgcccagctcgctccgcccccttcccc

SEQ ID NO: 618 - DNA, 122 bp, Homo sapiens
  misc_feature (61)..(62): /note="This region represents a CpG dinucleotide"
  misc_feature (61)..(61): /note="Nucleotide may be methylated to form 5-methylcytosine"
cttccaccactgcatggtgtagacagaatttctcttccaaggggcaccacatgacaaaaccgtacataataatgaaatgcatttgtagacaaaggactagctaaaataccaactgaaagtgg

SEQ ID NO: 619 - DNA, 122 bp, Homo sapiens
  misc_feature (61)..(62): /note="This region represents a CpG dinucleotide"
  misc_feature (61)..(61): /note="Nucleotide may be methylated to form 5-methylcytosine"
ttatttttaggaaaccaatgtctgtggtcagaagttctttcttatgactaaaccagtcagcgctggcaaaattcacagtggcagcttactcaacctctgaagaatatctaacttcattataa

SEQ ID NO: 620 - DNA, 122 bp, Homo sapiens
  misc_feature (61)..(62): /note="This region represents a CpG dinucleotide"
  misc_feature (61)..(61): /note="Nucleotide may be methylated to form 5-methylcytosine"
ctgtaacagtggaatgaaaggggttcttctgcctgaaaaacaaattatgcactgggcttccgtctagtcaggaggatagggggcaaggcaatgggctgattgaaagaaggatgactttgact

SEQ ID NO: 621 - DNA, 122 bp, Homo sapiens
  misc_feature (61)..(62): /note="This region represents a CpG dinucleotide"
  misc_feature (61)..(61): /note="Nucleotide may be methylated to form 5-methylcytosine"
gcagagtcccacacttatgaatgaatagctgactctaagtcttctaggagagtatttctgcgataaatagctcataccatataatggcaagctttgttttatgaatgctattgcagttagtc

SEQ ID NO: 622 - DNA, 122 bp, Homo sapiens
  misc_feature (61)..(62): /note="This region represents a CpG dinucleotide"
  misc_feature (61)..(61): /note="Nucleotide may be methylated to form 5-methylcytosine"
cgggagattccttgatgttccttgctgttcatgctccatgtttctgttcagtggagcatccgattaccgatgtggaccaggctctgttcggctccctcctcacactttattgctcatgattt

SEQ ID NO: 623 - DNA, 122 bp, Homo sapiens
  misc_feature (61)..(62): /note="This region represents a CpG dinucleotide"
  misc_feature (61)..(61): /note="Nucleotide may be methylated to form 5-methylcytosine"
ctaagatggtttcagaatcaaactacaaatcattttgaaagtttcctgttttgcaaactccggatataagctaaagcgatttttctattcactacctagacatcacctgctcatcaacagat

SEQ ID NO: 624 - DNA, 122 bp, Homo sapiens
  misc_feature (61)..(62): /note="This region represents a CpG dinucleotide"
  misc_feature (61)..(61): /note="Nucleotide may be methylated to form 5-methylcytosine"
tttacagtacatttcctgggatataatggagaatcattgtgagtcattaaaattaagcaacgtgtgtctaagcagcctgcatcaggcttcactacagagtcaggtttcattgttaggttcac

SEQ ID NO: 625 - DNA, 122 bp, Homo sapiens
  misc_feature (61)..(62): /note="This region represents a CpG dinucleotide"
  misc_feature (61)..(61): /note="Nucleotide may be methylated to form 5-methylcytosine"
acgtgaactcggtcacctcctccccctcgctcctccccggcaggctctgaggagccgaggcggtggcagcagcgcgaggaacagaacacgctgcaaactgcttggctacccctttacaagac

SEQ ID NO: 626 - DNA, 122 bp, Homo sapiens
  misc_feature (61)..(62): /note="This region represents a CpG dinucleotide"
  misc_feature (61)..(61): /note="Nucleotide may be methylated to form 5-methylcytosine"
actttccaaaatcacacagaggtggcataaaacttcaaaactttgtcaacctgaattcaacgcccatccttgtcacttatgtaataacatcctgccccctataggcaatggctgtgaaacgg

SEQ ID NO: 627 - DNA, 122 bp, Homo sapiens
  misc_feature (61)..(62): /note="This region represents a CpG dinucleotide"
  misc_feature (61)..(61): /note="Nucleotide may be methylated to form 5-methylcytosine"
gcttgactcaggccttagtgttttgaaacaatgcagtatttaggcatttattttaaaagacgctagtgcaattcagtaaggttctaattgttaggtgatccctaaccttgttttcaggatga

SEQ ID NO: 628 - DNA, 122 bp, Homo sapiens
  misc_feature (61)..(62): /note="This region represents a CpG dinucleotide"
  misc_feature (61)..(61): /note="Nucleotide may be methylated to form 5-methylcytosine"
ggatctgattattgaggtgtggaaggaataaataatcagtccacaaataaacaaactgtccgggattcctagagggaaggagaaatccttgaaggagatccaagtcgctccaggtctgcctg

SEQ ID NO: 629 - DNA, 122 bp, Homo sapiens
  misc_feature (61)..(62): /note="This region represents a CpG dinucleotide"
  misc_feature (61)..(61): /note="Nucleotide may be methylated to form 5-methylcytosine"
gagagatcggattatttgctctaaatcacatgtctcgtaagtggaaaggctggacttggccgggtttatttctaaactgaatctctgcacacttttttcttttggatatacaatttcacatt

SEQ ID NO: 630 - DNA, 122 bp, Homo sapiens
  misc_feature (61)..(62): /note="This region represents a CpG dinucleotide"
  misc_feature (61)..(61): /note="Nucleotide may be methylated to form 5-methylcytosine"
gaggttgggtgagttaatgcagttacatggttggccaatggtggggccagatgaacaattcgcaccccctggcttccagaacaggctggttttaccaccggtgaggctggtcctttcagtgg

SEQ ID NO: 631 - DNA, 122 bp, Homo sapiens
  misc_feature (61)..(62): /note="This region represents a CpG dinucleotide"
  misc_feature (61)..(61): /note="Nucleotide may be methylated to form 5-methylcytosine"
attcagaaggaattcctgttagccaagcctcctggactcctcaagggagtctttaaaaatcgtaagcacacttcttacacctcacatgcctcatacctaaactgtgtctgggttaataaaat

SEQ ID NO: 632 - DNA, 122 bp, Homo sapiens
  misc_feature (61)..(62): /note="This region represents a CpG dinucleotide"
  misc_feature (61)..(61): /note="Nucleotide may be methylated to form 5-methylcytosine"
acgtggggcccactggctcacacctgcttttccaccacccctcgcctgccttggggctcacgtccctccccggaattcccacgccccacaggcagaatctgaggcacacctcagcgccccgc

SEQ ID NO: 633 - DNA, 122 bp, Homo sapiens
  misc_feature (61)..(62): /note="This region represents a CpG dinucleotide"
  misc_feature (61)..(61): /note="Nucleotide may be methylated to form 5-methylcytosine"
actttcatctagtctccggggcaaacccctgggtaacccaaaggccatcagacggattcgcgtgctgggctttccactaccttaggccacgtgtcactatggagcgaagatcaagaaggtcc

SEQ ID NO: 634 - DNA, 122 bp, Homo sapiens
  misc_feature (61)..(62): /note="This region represents a CpG dinucleotide"
  misc_feature (61)..(61): /note="Nucleotide may be methylated to form 5-methylcytosine"
ctttgttttgcctccttgcctggtgctttcagcgagcagcgctgacgtcatctcaggaaccgtgctgcgtctgagggaagaacctgcaataactttaaataactttaaacctgcaaatgctt

SEQ ID NO: 635 - DNA, 122 bp, Homo sapiens
  misc_feature (61)..(62): /note="This region represents a CpG dinucleotide"
  misc_feature (61)..(61): /note="Nucleotide may be methylated to form 5-methylcytosine"
actctgcccaaggagcagctgccatctgagagggggggcattccctgcagggaggacacccgctcccactcagacacaagaggaaatggaacgatcagtgtgaacgggacgtttcagaagct

SEQ ID NO: 636 - DNA, 122 bp, Homo sapiens
  misc_feature (61)..(62): /note="This region represents a CpG dinucleotide"
  misc_feature (61)..(61): /note="Nucleotide may be methylated to form 5-methylcytosine"
cagactgcaactaggaggagggactaatccacgcattggctctgggtctcctaagggtcacgtcactgtgagctcagatttccaattaccattcacacccgcagtgcggcaggagggtgggg

SEQ ID NO: 637 - DNA, 122 bp, Homo sapiens
  misc_feature (61)..(62): /note="This region represents a CpG dinucleotide"
  misc_feature (61)..(61): /note="Nucleotide may be methylated to form 5-methylcytosine"
ttctttccatgcttctacggatgaactgttagtgcaatctctggggcatgtggagccatccgctttgataatcactaatcgagataacaaaaggcacataatcagagttaaagggaactcac

SEQ ID NO: 638 - DNA, 122 bp, Homo sapiens
  misc_feature (61)..(62): /note="This region represents a CpG dinucleotide"
  misc_feature (61)..(61): /note="Nucleotide may be methylated to form 5-methylcytosine"
tcaggtgtggcctgtggtctccagcaagctgtttcccctccttccagacccggctccagacgccccctccgggtcactgccagtggtgctgatctctgactcctcagacctggctatttcct

SEQ ID NO: 639 - DNA, 122 bp, Homo sapiens
  misc_feature (61)..(62): /note="This region represents a CpG dinucleotide"
  misc_feature (61)..(61): /note="Nucleotide may be methylated to form 5-methylcytosine"
tggtcgcaaaagcagccctttcaatcgcaccgaatttcccctggtgtgaaaaggcgccatcgccagcattttgccggggtttatgcctcaatcccgcattccagccacttccacgaattact

SEQ ID NO: 640 - DNA, 122 bp, Homo sapiens
  misc_feature (61)..(62): /note="This region represents a CpG dinucleotide"
  misc_feature (61)..(61): /note="Nucleotide may be methylated to form 5-methylcytosine"
ttgcagatccctggtttctgtgggattatgtaaaacctgtatttctgaaaccccgcctcccgtcttccttccatcttaaagcagggttgaaccttttattaaactgacagccaggaaatgtt

SEQ ID NO: 641 - DNA, 122 bp, Homo sapiens
  misc_feature (61)..(62): /note="This region represents a CpG dinucleotide"
  misc_feature (61)..(61): /note="Nucleotide may be methylated to form 5-methylcytosine"
cctctcctcccggccggtgtatgggaaattgtccccgcagaaagtaaaggctggccaggccgcccccagcacgtagagggaatgagtcaggctccggctccacactggcacgtagtgggcgg

SEQ ID NO: 642 - DNA, 122 bp, Homo sapiens
  misc_feature (61)..(62): /note="This region represents a CpG dinucleotide"
  misc_feature (61)..(61): /note="Nucleotide may be methylated to form 5-methylcytosine"
tatggccttgggaagagcaatgggcccggagtcgccgcatctaaccctgctgtaactggtcgcaagtcacagtttgctcatctataaagtgagcgaaagtaatgtaatctttattgggagta

SEQ ID NO: 643 - DNA, 122 bp, Homo sapiens
  misc_feature (61)..(62): /note="This region represents a CpG dinucleotide"
  misc_feature (61)..(61): /note="Nucleotide may be methylated to form 5-methylcytosine"
aacagtgaagcagcagcaaagggcactggtggtttcccaagtggagacgctcagaggctccgtcctgagatggggaagttgggattagccttcatcaatgctgcaggaggtatgataagcag

SEQ ID NO: 644 - DNA, 122 bp, Homo sapiens
  misc_feature (61)..(62): /note="This region represents a CpG dinucleotide"
  misc_feature (61)..(61): /note="Nucleotide may be methylated to form 5-methylcytosine"
tttggtggttgcaactgggcttttaaataaagacaaaatctaagactttaaaaaaatgaacgttaaacagacgcaagactatgtttgctaatgtaaagtcagaaaagtcgacaaagatcgta

SEQ ID NO: 645 - DNA, 122 bp, Homo sapiens
  misc_feature (61)..(62): /note="This region represents a CpG dinucleotide"
  misc_feature (61)..(61): /note="Nucleotide may be methylated to form 5-methylcytosine"
aacagcgcgagggcgaggcgactttggagctgcctcatgcagcgacctcgccttccgctgcgcctcctcccagaacccaagaagcctggaacctgtggcgtccagccctgaaaggaggagac

SEQ ID NO: 646 - DNA, 122 bp, Homo sapiens
  misc_feature (61)..(62): /note="This region represents a CpG dinucleotide"
  misc_feature (61)..(61): /note="Nucleotide may be methylated to form 5-methylcytosine"
ccttcgtcaccgtgaacgcccagtggggcatcctcagcaagtgcctgacctacagcaaggcggtggccgacccgttcacgtactctctgctccgccggccgttccgccaagtcctggccggc

SEQ ID NO: 647 - DNA, 122 bp, Homo sapiens
  misc_feature (61)..(62): /note="This region represents a CpG dinucleotide"
  misc_feature (61)..(61): /note="Nucleotide may be methylated to form 5-methylcytosine"
tccggcccccgagggatggcagctgtgaggcttggccacggtctcaggccaccaggcccccgggctcgccagcgctttcaccggatggccaccggctgggcagttctcgggagtccacttgg

SEQ ID NO: 648 - DNA, 122 bp, Homo sapiens
  misc_feature (61)..(62): /note="This region represents a CpG dinucleotide"
  misc_feature (61)..(61): /note="Nucleotide may be methylated to form 5-methylcytosine"
ctcaggtgatctgcccgccttggcctcccgaagtgctgggtttacaggtgtgagccaccacgcccagctcaatgctgtgcatttctgcatggagagccactgtgcttggggaagactctttg

SEQ ID NO: 649 - DNA, 122 bp, Homo sapiens
  misc_feature (61)..(62): /note="This region represents a CpG dinucleotide"
  misc_feature (61)..(61): /note="Nucleotide may be methylated to form 5-methylcytosine"
gccaaacgtatctagattaatataaacgtcctgcatgtgacaatttgcccccaccagaagcgattttttaacaagattgagcaatttacctgagaaaaacatttgacagagacagaaactgt

SEQ ID NO: 650 - DNA, 122 bp, Homo sapiens
  misc_feature (61)..(62): /note="This region represents a CpG dinucleotide"
  misc_feature (61)..(61): /note="Nucleotide may be methylated to form 5-methylcytosine"
aacttgtaaatagtagaagcaaatgtgtaaattttaacgtaagcctctagaacttgagatcgtaatcacctgcagggtgtgtgtgtgtgtgtgtgtgtgtgtgtgtgtgtgtgtgtgtgtgt

SEQ ID NO: 651 - DNA, 122 bp, Homo sapiens
  misc_feature (61)..(62): /note="This region represents a CpG dinucleotide"
  misc_feature (61)..(61): /note="Nucleotide may be methylated to form 5-methylcytosine"
cagcagccccggccccgcccctcataccgcggccggaaaccggaagcgcccgccgggcaccgcccaccagccctcgcgaggccccggaggctccgcccacctccgcttcccaccccgccccg

SEQ ID NO: 652 - DNA, 122 bp, Homo sapiens
  misc_feature (61)..(62): /note="This region represents a CpG dinucleotide"
  misc_feature (61)..(61): /note="Nucleotide may be methylated to form 5-methylcytosine"
ggcttacttaacactcttgaacgtcaaaacccacgctcagtacccgcttcaagtggaagtcggtgttgagatacaagcataggaacgaactcaaggctaacagctgttctgtattcagagcc

SEQ ID NO: 653 - DNA, 122 bp, Homo sapiens
  misc_feature (61)..(62): /note="This region represents a CpG dinucleotide"
  misc_feature (61)..(61): /note="Nucleotide may be methylated to form 5-methylcytosine"
cataacaaataaaggtttaatgattcagtttacttaccaggattttcctgaaaatgtcatcgttttatatcagaaacttgaaacaggccatttgaacttttgctgtctcattcctcttctga

SEQ ID NO: 654 - DNA, 122 bp, Homo sapiens
  misc_feature (61)..(62): /note="This region represents a CpG dinucleotide"
  misc_feature (61)..(61): /note="Nucleotide may be methylated to form 5-methylcytosine"
gtatatgcgatttagggataaatctttatggcccaccttaggtttttgtggtgggccatgcgctctgattttgtccagcatgtagttacagagacatctagtggtcaggtctaggagtatgt

SEQ ID NO: 655 - DNA, 122 bp, Homo sapiens
  misc_feature (61)..(62): /note="This region represents a CpG dinucleotide"
  misc_feature (61)..(61): /note="Nucleotide may be methylated to form 5-methylcytosine"
gtccacgagagggctccacggtgccttgacgtgcgctgtcatatgatacctccgctgcctcgaaatagacactctagtgcacgaattaccagaatcaaaattcagcgcatttaaaatgatac

SEQ ID NO: 656 - DNA, 122 bp, Homo sapiens
  misc_feature (61)..(62): /note="This region represents a CpG dinucleotide"
  misc_feature (61)..(61): /note="Nucleotide may be methylated to form 5-methylcytosine"
cactgcgcccctatctacatatgcccgcctcttatagtaacgtcaccacctgcttctgtacgatctgactgaactcccttacggatcggttcgctctagctgccgctcccaaggattcaaaa

SEQ ID NO: 657 - DNA, 122 bp, Homo sapiens
  misc_feature (61)..(62): /note="This region represents a CpG dinucleotide"
  misc_feature (61)..(61): /note="Nucleotide may be methylated to form 5-methylcytosine"
tggtctgtaacggattggcttggccttacccacgaggctttgcggtggctgttggcttggcggtggtcgcttggcttggcgtggcagtgatcgcttggcttggcatttctggcttggcggtc

SEQ ID NO: 658 - DNA, 122 bp, Homo sapiens
  misc_feature (61)..(62): /note="This region represents a CpG dinucleotide"
  misc_feature (61)..(61): /note="Nucleotide may be methylated to form 5-methylcytosine"
caaacaaggctggtagactttttatttgaaaggcaaggatggtgggatgatactagctaccgagagggaaatgacctggaaaactaagaactctagttgggtcatgtattaagatcatgtgt

SEQ ID NO: 659 - DNA, 122 bp, Homo sapiens
  misc_feature (61)..(62): /note="This region represents a CpG dinucleotide"
  misc_feature (61)..(61): /note="Nucleotide may be methylated to form 5-methylcytosine"
tccaaaatatgccaaaacatcccacgtgatcattagggggtgcaagtcagacagcagatacgcaagcaccaggcaaactgttaaggaacaaaatgcaaggtggcatcattaccattcacatc

SEQ ID NO: 660 - DNA, 122 bp, Homo sapiens
  misc_feature (61)..(62): /note="This region represents a CpG dinucleotide"
  misc_feature (61)..(61): /note="Nucleotide may be methylated to form 5-methylcytosine"
aagcgaggaaagtctatgccgccagcgaccggcaggaggcacgtcgggcacgctcgtcaccgtttcctggcacgtgaccaccgccctgccctgtcgctttagggcctgtcgcttccggcggt

SEQ ID NO: 661 - DNA, 122 bp, Homo sapiens
  misc_feature (61)..(62): /note="This region represents a CpG dinucleotide"
  misc_feature (61)..(61): /note="Nucleotide may be methylated to form 5-methylcytosine"
cctaaagcctgagtgtcctcagttccttggtcagtgtttcatacctgcttattactgcttcgttgtgaagattgtttgcccagagcagcagggggggagttgttggtggtgaagccccttgg

SEQ ID NO: 662 - DNA, 122 bp, Homo sapiens
  misc_feature (61)..(62): /note="This region represents a CpG dinucleotide"
  misc_feature (61)..(61): /note="Nucleotide may be methylated to form 5-methylcytosine"
aaattctcatggtgcccccagagccggcctctgccccagccctgctgccagctgccccggcgccctggtgctgtgcggcccatggtgcctgcacccacttgcttgtccagttactttctcct

SEQ ID NO: 663 - DNA, 122 bp, Homo sapiens
  misc_feature (61)..(62): /note="This region represents a CpG dinucleotide"
  misc_feature (61)..(61): /note="Nucleotide may be methylated to form 5-methylcytosine"
acagttgtaaagaatttgattagattttgcagaaaatagaatttatcccaggtgagttgtcgcatgggaaccagcatgggaagaagatggtaggagcaaataggtcaagcactgctttagta

SEQ ID NO: 664 - DNA, 122 bp, Homo sapiens
  misc_feature (61)..(62): /note="This region represents a CpG dinucleotide"
  misc_feature (61)..(61): /note="Nucleotide may be methylated to form 5-methylcytosine"
actggttggaaccctcaccatgcagatgatgttaatgcactggtatagagcaaagcaacacgatgaaagaacctgggtccctgaaagactatgtggattagagccacctcaatgatctcaac

SEQ ID NO: 665 - DNA, 122 bp, Homo sapiens
  misc_feature (61)..(62): /note="This region represents a CpG dinucleotide"
  misc_feature (61)..(61): /note="Nucleotide may be methylated to form 5-methylcytosine"
gggcggagtgggctagctccatttagccccgccccaaggctatgtttatcttcgtttgaccgaattggtttcaccgaaatatggatgatgctggagtggggtgcagggtggctaccttcatt

SEQ ID NO: 666 - DNA, 122 bp, Homo sapiens
  misc_feature (61)..(62): /note="This region represents a CpG dinucleotide"
  misc_feature (61)..(61): /note="Nucleotide may be methylated to form 5-methylcytosine"
ttgctaaatcacagcagatggcttccttttacacccaacgccgtcagtggaatgtaaatgcgtctcctcacaacactgaaaatactgaggctgtgtgtttaatctgtgctgtacaagccgaa

SEQ ID NO: 667 - DNA, 122 bp, Homo sapiens
  misc_feature (61)..(62): /note="This region represents a CpG dinucleotide"
  misc_feature (61)..(61): /note="Nucleotide may be methylated to form 5-methylcytosine"
aaacggcactggtttcatcagccacataggcacagaggtctcattttataaccatgagctcggatgaacaacatctcccctggggaggcattgtgggttctctcccgatgccctgccctgcc

SEQ ID NO: 668 - DNA, 122 bp, Homo sapiens
  misc_feature (61)..(62): /note="This region represents a CpG dinucleotide"
  misc_feature (61)..(61): /note="Nucleotide may be methylated to form 5-methylcytosine"
tttccacactgcaaaaacctagtgcttctgtgtttggttttcccttaaatgcaggcaaaacggacccagtttggttcagtaacagacccgctccactaaggtcatgtggggaagcagaggga

SEQ ID NO: 669 - DNA, 122 bp, Homo sapiens
  misc_feature (61)..(62): /note="This region represents a CpG dinucleotide"
  misc_feature (61)..(61): /note="Nucleotide may be methylated to form 5-methylcytosine"
ctgggcaacatagcaagactccttctcaaaaaataaaaataaaaataaaaatattattaccgtatgagctggcaatcctgcttttgtgtatacacccaaggaattgaaagggggtctggaag

SEQ ID NO: 670 - DNA, 122 bp, Homo sapiens
  misc_feature (61)..(62): /note="This region represents a CpG dinucleotide"
  misc_feature (61)..(61): /note="Nucleotide may be methylated to form 5-methylcytosine"
gtggtcctcagaccaccggcagcagcactaaggaattctttgcaatgcaatttctcagctcgaccggaaacctgcagaaactctgggagtcgttccagtggcccagagacagggttaacaag

SEQ ID NO: 671 - DNA, 122 bp, Homo sapiens
  misc_feature (61)..(62): /note="This region represents a CpG dinucleotide"
  misc_feature (61)..(61): /note="Nucleotide may be methylated to form 5-methylcytosine"
aaaagtaagtagtgctcccagaagggctgtaatttctttagattatctgatagcagactccgtgatgtttaccagcttcaaggagatcagaccattgtgaaattttttttttttttctgtag

SEQ ID NO: 672 - DNA, 122 bp, Homo sapiens
  misc_feature (61)..(62): /note="This region represents a CpG dinucleotide"
  misc_feature (61)..(61): /note="Nucleotide may be methylated to form 5-methylcytosine"
gggagaatgaagagaattttttacaggcactggtggagagaattatgcaacttcccactacgcaaacttttgtaattgtaaattctgctaccttttaaggagaaaataccatcagcctgcaa

SEQ ID NO: 673 - DNA, 122 bp, Homo sapiens
  misc_feature (61)..(62): /note="This region represents a CpG dinucleotide"
  misc_feature (61)..(61): /note="Nucleotide may be methylated to form 5-methylcytosine"
ccagcagcgtgtgatgagcaagccgtgcaggtgattctgatacacgcacctaagaactgccgctctgaagccccagcttggatcgtggactttttaggttctcccatccccgaatccctttc

SEQ ID NO: 674 - DNA, 122 bp, Homo sapiens
  misc_feature (61)..(62): /note="This region represents a CpG dinucleotide"
  misc_feature (61)..(61): /note="Nucleotide may be methylated to form 5-methylcytosine"
tcacaataaataggagtagaccttatgggggaatgagaattccaagccgacaacatcacacgtgccaacacagagaagctagaaacaccagatgtttagggacctcaggatcaggaactggg

SEQ ID NO: 675 - DNA, 122 bp, Homo sapiens
  misc_feature (61)..(62): /note="This region represents a CpG dinucleotide"
  misc_feature (61)..(61): /note="Nucleotide may be methylated to form 5-methylcytosine"
aggggtagagggaggtgcacagtcgggtagtatgtagtgagtgactggcagattccaatacggtattgtcatgttgcatcaaggttcctcattgcagacagaaatctgcctccacacatgaa

SEQ ID NO: 676 - DNA, 122 bp, Homo sapiens
  misc_feature (61)..(62): /note="This region represents a CpG dinucleotide"
  misc_feature (61)..(61): /note="Nucleotide may be methylated to form 5-methylcytosine"
tgaaaccctaaatgaggttaatttcttcattcttttttcattcagtccacctctattcaacgcctacccacatgccattctttgtattgtattgtccttaaatagaaatatttttttaaagt

SEQ ID NO: 677 - DNA, 122 bp, Homo sapiens
  misc_feature (61)..(62): /note="This region represents a CpG dinucleotide"
  misc_feature (61)..(61): /note="Nucleotide may be methylated to form 5-methylcytosine"
tgaagtcccgccctgcgcggggctggttcccgaggccgggttgtccaggtcgcggtctggcgtgagtcctcgtgcccttcccggctcggggattacctctctggctggtcccctcctccgtg

SEQ ID NO: 678 - DNA, 122 bp, Homo sapiens
  misc_feature (61)..(62): /note="This region represents a CpG dinucleotide"
  misc_feature (61)..(61): /note="Nucleotide may be methylated to form 5-methylcytosine"
ccagctccgagccctgctcgtggagccattggtgctgcggcggggagaagaggccacaggcggggacgccccagacactcccgtggggcccgtgccagggtctcctgctcctcagaaagagc

SEQ ID NO: 679 - DNA, 122 bp, Homo sapiens
  misc_feature (61)..(62): /note="This region represents a CpG dinucleotide"
  misc_feature (61)..(61): /note="Nucleotide may be methylated to form 5-methylcytosine"
gcccccagtctgcaatagttctgaaactgtgcagcagttgatgctgtaaaaatgtagatacgaacctctgtgtagtcatcatactgagttgtctgggcatggatccagttatgtctcacttc

SEQ ID NO: 680 - DNA, 122 bp, Homo sapiens
  misc_feature (61)..(62): /note="This region represents a CpG dinucleotide"
  misc_feature (61)..(61): /note="Nucleotide may be methylated to form 5-methylcytosine"
acggcggttcgtccaagccggacgcctgcagcagccacctcctgggcctcacggcggggccggagaaggccagggctggggcggggcagccgtgctcggccccgggccagggtcccccggta

SEQ ID NO: 681 - DNA, 122 bp, Homo sapiens
  misc_feature (61)..(62): /note="This region represents a CpG dinucleotide"
  misc_feature (61)..(61): /note="Nucleotide may be methylated to form 5-methylcytosine"
tgagcacttggtgccacacactgtttgggaacaggaaatctgcaataatgttctccctaccgtcaagtaggaaaacagcaatacggtgaacaataggtgttccatcagttatgtgaccttgg

SEQ ID NO: 682 - DNA, 122 bp, Homo sapiens
  misc_feature (61)..(62): /note="This region represents a CpG dinucleotide"
  misc_feature (61)..(61): /note="Nucleotide may be methylated to form 5-methylcytosine"
gtatgtttgactcctcccatccacccgttactgacttttaaaagtcgtagctgagggttccgtttcttcgtttctttttgaattaaggcataaaattgaacaagacaccttattgctttatt

SEQ ID NO: 683 - DNA, 122 bp, Homo sapiens
  misc_feature (61)..(62): /note="This region represents a CpG dinucleotide"
  misc_feature (61)..(61): /note="Nucleotide may be methylated to form 5-methylcytosine"
cagcgatcggggttcttccgcctcgcgagaaagggactctggtagcggctgtacccgaaacgtcacttcctgcgacacgcaggaaacaaaggctcccagttcacgcgataataagaccaact

SEQ ID NO: 684 - DNA, 122 bp, Homo sapiens
  misc_feature (61)..(62): /note="This region represents a CpG dinucleotide"
  misc_feature (61)..(61): /note="Nucleotide may be methylated to form 5-methylcytosine"
gttacccgggaaatcccgcccactcccccgaccccgccccgcagagggaagactcagcttcgttccaatacaggacgcaatacccgcccgtcaaagactcagccaaccaccgaggcctgtct

SEQ ID NO: 685 - DNA, 122 bp, Homo sapiens
  misc_feature (61)..(62): /note="This region represents a CpG dinucleotide"
  misc_feature (61)..(61): /note="Nucleotide may be methylated to form 5-methylcytosine"
caggttaagcaggtgtgagccagggggcggagtggagcctgtgtgtctgtttggacaaaacgggaggcacattttcaggtttaggaaataccatgtacaaaagcttgaattgatgaacttct

SEQ ID NO: 686 - DNA, 122 bp, Homo sapiens
  misc_feature (61)..(62): /note="This region represents a CpG dinucleotide"
  misc_feature (61)..(61): /note="Nucleotide may be methylated to form 5-methylcytosine"
gcgtaatttcgagagggagggccgagactgcctggggggaagtcccatggctacctggttcgaggcagctctttgatatctcctggagcactcctggtcctagaaccagacagctctcaact

SEQ ID NO: 687 - DNA, 122 bp, Homo sapiens
  misc_feature (61)..(62): /note="This region represents a CpG dinucleotide"
  misc_feature (61)..(61): /note="Nucleotide may be methylated to form 5-methylcytosine"
ttccttgtcaaaacttcctgccttggcgagggcccgagttcccacccccttcctgccccccgcccctcggcgcccctcccggccctgcgatcagcagcgtcccgcctccccgccgctcccgc

SEQ ID NO: 688 - DNA, 122 bp, Homo sapiens
  misc_feature (61)..(62): /note="This region represents a CpG dinucleotide"
  misc_feature (61)..(61): /note="Nucleotide may be methylated to form 5-methylcytosine"
gctgcagcagcactccttccaagggtgttagcggcttcctgctgttgctaaaatctgggccgcttcaccgtcccctgattggtttttccgctatgtaaccaactcccttcgatacatcccct

SEQ ID NO: 689 - DNA, 122 bp, Homo sapiens
  misc_feature (61)..(62): /note="This region represents a CpG dinucleotide"
  misc_feature (61)..(61): /note="Nucleotide may be methylated to form 5-methylcytosine"
cctgccgcagctccgccggtcactcaggcagaacggggtatgcaaatggcctggagaggccgaggccgaacactgcgcccattgtcccgggcgctcaaagcgccgagcagctgcgcagactt

SEQ ID NO: 690 - DNA, 122 bp, Homo sapiens
  misc_feature (61)..(62): /note="This region represents a CpG dinucleotide"
  misc_feature (61)..(61): /note="Nucleotide may be methylated to form 5-methylcytosine"
tcctgaggccagagacatctccacgggaaagtcaaaggcctggaggaagtgcggacctgacgacagatgccccgcacgctggccgggaccgggaagggcggtcaagggtggaaaggggctgg

SEQ ID NO: 691 - DNA, 122 bp, Homo sapiens
  misc_feature (61)..(62): /note="This region represents a CpG dinucleotide"
  misc_feature (61)..(61): /note="Nucleotide may be methylated to form 5-methylcytosine"
gtttttctggtctgaccatcgcaaccctcatgaagtacaaccagcatatgctacaaagtacgcaataactgtttggtatttgatgcagatgagagagcacgagctaaagtaaaatatctaac

SEQ ID NO: 692 - DNA, 122 bp, Homo sapiens
  misc_feature (61)..(62): /note="This region represents a CpG dinucleotide"
  misc_feature (61)..(61): /note="Nucleotide may be methylated to form 5-methylcytosine"
tgtctttgaaccttctccagtgtttcctatgtgaccttgggtaaaacatctaatcatacccgtgaaaagtaggaataaaaaatatttgatgctgattgtgattatgataataggtagttcat

SEQ ID NO: 693 - DNA, 122 bp, Homo sapiens
  misc_feature (61)..(62): /note="This region represents a CpG dinucleotide"
  misc_feature (61)..(61): /note="Nucleotide may be methylated to form 5-methylcytosine"
ccgttgacataccagcaggaaagaacactggagagcttcacttgacagaattattacaaacgcctcttcctggttcagggggaaaaaaaattccaaataggtttgtgatatttttttcccta

SEQ ID NO: 694 - DNA, 122 bp, Homo sapiens
  misc_feature (61)..(62): /note="This region represents a CpG dinucleotide"
  misc_feature (61)..(61): /note="Nucleotide may be methylated to form 5-methylcytosine"
gtaactgaccccggaagcgcagggcccgggagaggctgcaggcggccgcctggggagggccggggatcgagaaaacgcttcaggagctgcttgtaatgactgggcacattcggtggtaattg

SEQ ID NO: 695 - DNA, 122 bp, Homo sapiens
  misc_feature (61)..(62): /note="This region represents a CpG dinucleotide"
  misc_feature (61)..(61): /note="Nucleotide may be methylated to form 5-methylcytosine"
tgtgtgtgtgtttgcgcgcgcgcgtgtgtgttgggttctgttaaatgcttgagcctgagacggggggcggggcgggggggggtgcgggaaagccatttccttgcttaagcccaaagggtttc

SEQ ID NO: 696 - DNA, 122 bp, Homo sapiens
  misc_feature (61)..(62): /note="This region represents a CpG dinucleotide"
  misc_feature (61)..(61): /note="Nucleotide may be methylated to form 5-methylcytosine"
tctcgaggcgttcatgcctggctttaagacgccaagataactctcttgttttggcattgtcgcaatgtccaaatcggtcaaaggagtgggataaggtgaaaggaccaggtcagaaactttag

SEQ ID NO: 697 - DNA, 122 bp, Homo sapiens
  misc_feature (61)..(62): /note="This region represents a CpG dinucleotide"
  misc_feature (61)..(61): /note="Nucleotide may be methylated to form 5-methylcytosine"
cgagcgggggcggcgcgggggagttgccaagtgtcggagcggcgccccgggccccccgagcgcccagccatcccggggcgagcctgggctgcgttaccttgcaggttctgcactcggatgtc

SEQ ID NO: 698 - DNA, 122 bp, Homo sapiens
  misc_feature (61)..(62): /note="This region represents a CpG dinucleotide"
  misc_feature (61)..(61): /note="Nucleotide may be methylated to form 5-methylcytosine"
gacccgtgttggctgctttctgtaacagtcatagttcatggtcagagtcagatttcctctcgtcatgccttccttcccttccttctgctccctcccacagccgccctttgggtctgggctgg

SEQ ID NO: 699 - DNA, 122 bp, Homo sapiens
  misc_feature (61)..(62): /note="This region represents a CpG dinucleotide"
  misc_feature (61)..(61): /note="Nucleotide may be methylated to form 5-methylcytosine"
atttttaagacttaaatcatctgtaagaatgcatgcctgtttactcttggaatataatcacgttatgctgggttgtgattgacagttggaaaacaatcattaaaaatcagcataactgctga

SEQ ID NO: 700 - DNA, 122 bp, Homo sapiens
  misc_feature (61)..(62): /note="This region represents a CpG dinucleotide"
  misc_feature (61)..(61): /note="Nucleotide may be methylated to form 5-methylcytosine"
gggtgctggagtgaggagtcaggcagagttcctgccggggctggtcctgcatcagccccgcggtgtttgtgatgcccgctgcggccgccaggcggcgcacccactttcccaccttgaggcgg

SEQ ID NO: 701 - DNA, 122 bp, Homo sapiens
  misc_feature (61)..(62): /note="This region represents a CpG dinucleotide"
  misc_feature (61)..(61): /note="Nucleotide may be methylated to form 5-methylcytosine"
tgtccaaatgcccctttcacccacgttggtctagtagccatctgctgaccgtatacccggcgcagaagaacaacacctgacctccattaacagtgtctgccacacctcagcaagttcagata

SEQ ID NO: 702 - DNA, 122 bp, Homo sapiens
  misc_feature (61)..(62): /note="This region represents a CpG dinucleotide"
  misc_feature (61)..(61): /note="Nucleotide may be methylated to form 5-methylcytosine"
tcagaccataatttctgccagtcacgtgggtaggagacggtttcccatgattgttttccgcgatgtttcttggcgtccggagaggctgagcaccctgcgtgtgccagtggtcacgtgacctc

SEQ ID NO: 703 - DNA, 122 bp, Homo sapiens
  misc_feature (61)..(62): /note="This region represents a CpG dinucleotide"
  misc_feature (61)..(61): /note="Nucleotide may be methylated to form 5-methylcytosine"
cgtagttccacccctcagccccagtgtttgttatttttcgggttcagcttgcttttgccccgtctccgtcgacgcaatcgccaccagtcaatggggtggtcgttttgagggacaagtggtaa

SEQ ID NO: 704 - DNA, 122 bp, Homo sapiens
  misc_feature (61)..(62): /note="This region represents a CpG dinucleotide"
  misc_feature (61)..(61): /note="Nucleotide may be methylated to form 5-methylcytosine"
agcccgttcctccttagtctgtgggttgtcactcttaacattgctgacattcctttggcacgctgcactttctcccccttagaaatgttcaaaggcaggaagctcccttcccacagactcca

SEQ ID NO: 705 - DNA, 122 bp, Homo sapiens
  misc_feature (61)..(62): /note="This region represents a CpG dinucleotide"
  misc_feature (61)..(61): /note="Nucleotide may be methylated to form 5-methylcytosine"
cgacccggagcgcgggcgcggggctgcgccgtgccaggcggtggagatccccatgtgccgcggcatcggctacaacctgacccgcatgcccaacctgctgggccacacgtcgcagggcgagg

SEQ ID NO: 706 - DNA, 122 bp, Homo sapiens
  misc_feature (61)..(62): /note="This region represents a CpG dinucleotide"
  misc_feature (61)..(61): /note="Nucleotide may be methylated to form 5-methylcytosine"
ccctgacccgttgttttgaggcttttatgtgtataactcatagaactgcacagcttgcctcgaagatgcacaagtgtcctcttacttcactcttttgcaaccttcccacccccaatgaacct

SEQ ID NO: 707 - DNA, 122 bp, Homo sapiens
  misc_feature (61)..(62): /note="This region represents a CpG dinucleotide"
  misc_feature (61)..(61): /note="Nucleotide may be methylated to form 5-methylcytosine"
actctatcaggtgcagatatcagaaaacagccccctggattcccttgttgccactgtttccgctagagattcagacatgggaattaatggtgagatattctactcattttttatggtgatga

SEQ ID NO: 708 - DNA, 122 bp, Homo sapiens
  misc_feature (61)..(62): /note="This region represents a CpG dinucleotide"
  misc_feature (61)..(61): /note="Nucleotide may be methylated to form 5-methylcytosine"
ggctttccgtaaggctctcttttgaccacttctggtgccataaaatgaggtgttccaacacgtcctacatttaaaacaacattaaggaaaaatgtttacataaaatgggattttcacttgaa

SEQ ID NO: 709 - DNA, 122 bp, Homo sapiens
  misc_feature (61)..(62): /note="This region represents a CpG dinucleotide"
  misc_feature (61)..(61): /note="Nucleotide may be methylated to form 5-methylcytosine"
caagacttgccccttaggtaacacagcaagtaagtgacttggggctagaatcctcgttttcgcatcttgagctcgattaccatcctcaacagaccccaatctttacatcatcataccataca

SEQ ID NO: 710 - DNA, 122 bp, Homo sapiens
  misc_feature (61)..(62): /note="This region represents a CpG dinucleotide"
  misc_feature (61)..(61): /note="Nucleotide may be methylated to form 5-methylcytosine"
ggcgccttggggccgagagcgtgtgtgggctgaggtaaagtgcctggtggcccctctgcccgcccgggtagtgcctggtggcccgggcggggggcgggggcggacgcgcgagctcggctgca

SEQ ID NO: 711 - DNA, 122 bp, Homo sapiens
  misc_feature (61)..(62): /note="This region represents a CpG dinucleotide"
  misc_feature (61)..(61): /note="Nucleotide may be methylated to form 5-methylcytosine"
gtctctcacagccaggactgctgcggctggaattcctgacatactgtcatacctctcactcgtcaatctacactctcctcccatctacacagctctggaaattaaaaacaatccaaccatga

SEQ ID NO: 712 - DNA, 122 bp, Homo sapiens
  misc_feature (61)..(62): /note="This region represents a CpG dinucleotide"
  misc_feature (61)..(61): /note="Nucleotide may be methylated to form 5-methylcytosine"
cccctaccttgtgatccttcatctctctgtacatctatctagcctttctctacatttctccggttgcttttctcctcctgctttcttaggtttttttttttttttttcacttctgccatctc

SEQ ID NO: 713 - DNA, 122 bp, Homo sapiens
  misc_feature (61)..(62): /note="This region represents a CpG dinucleotide"
  misc_feature (61)..(61): /note="Nucleotide may be methylated to form 5-methylcytosine"
agaaaggggctgggacatttttggtttccctccctacactctcccctgcccccagctcagcgcctggcatgaagtaggcacaccataaagatgtgttaaggaaaaagcatcaaaggccaggc

SEQ ID NO: 714 - DNA, 122 bp, Homo sapiens
  misc_feature (61)..(62): /note="This region represents a CpG dinucleotide"
  misc_feature (61)..(61): /note="Nucleotide may be methylated to form 5-methylcytosine"
taagtggcttttctactggctgccgctgtagacccacctccttctccagcacataaatatcgctgttaacattaactaaatcacctctgggcagagaaacaaagctctatatgcacagccca

SEQ ID NO: 715 - DNA, 122 bp, Homo sapiens
  misc_feature (61)..(62): /note="This region represents a CpG dinucleotide"
  misc_feature (61)..(61): /note="Nucleotide may be methylated to form 5-methylcytosine"
ttatgcaaaggaaactctgggaagaaatgatgtggtttgggactacacttgtgggtagcacgtgcttagatgtattattatagccagtgctataaggagatgactaagttatttcaccacat

SEQ ID NO: 716 - DNA, 122 bp, Homo sapiens
  misc_feature (61)..(62): /note="This region represents a CpG dinucleotide"
  misc_feature (61)..(61): /note="Nucleotide may be methylated to form 5-methylcytosine"
attttcagtggtgaatgcttttgaatgccttataaaggtacaaagtttatctacagtttacggtattatttaattgtcatacctgtgaaaggaggaatggtgaaaatcccttatttatgcct

SEQ ID NO: 717 - DNA, 122 bp, Homo sapiens
  misc_feature (61)..(62): /note="This region represents a CpG dinucleotide"
  misc_feature (61)..(61): /note="Nucleotide may be methylated to form 5-methylcytosine"
gctcccttgtgttcccgctggacgctggcccggcggccgtggcctatagagcaggcccctcggtgcatgaagccagcacagccctggaaatcccgtgcaacaaaaagcctctgttccaccca

SEQ ID NO: 718 - DNA, 122 bp, Homo sapiens
  misc_feature (61)..(62): /note="This region represents a CpG dinucleotide"
  misc_feature (61)..(61): /note="Nucleotide may be methylated to form 5-methylcytosine"
tccctgtcgaccgcacacaggccgaggttgagtcacccgggcaaagccagttgggatcagcggaaccacagtcaacctgcagacccggaaaaggggaaatcacatgcctgctgtgcgtgctg

SEQ ID NO: 719 - DNA, 122 bp, Homo sapiens
  misc_feature (61)..(62): /note="This region represents a CpG dinucleotide"
  misc_feature (61)..(61): /note="Nucleotide may be methylated to form 5-methylcytosine"
gattacagttgtgagccactgcacccggcctctccttcttttaaacatatgcagactcaccgcagaaactggaaacagattaaaagaaatgctggcttttaaggcgagtttgaaaaacgtaa

SEQ ID NO: 720 - DNA, 122 bp, Homo sapiens
  misc_feature (61)..(62): /note="This region represents a CpG dinucleotide"
  misc_feature (61)..(61): /note="Nucleotide may be methylated to form 5-methylcytosine"
aagccctcttccctttaaaaaaaaaaaaaaaaaggctgcttctcgcagagtggaaagccccggtccccatcccaccaaaaccatttgacaagcaggacaacgaagaggcagaaggatctggg

SEQ ID NO: 721 - DNA, 122 bp, Homo sapiens
  misc_feature (61)..(62): /note="This region represents a CpG dinucleotide"
  misc_feature (61)..(61): /note="Nucleotide may be methylated to form 5-methylcytosine"
gtgcctttgcgaagcggcagcgcatggagaaacagtcgctggtggccagggccagagtcgcgcaccgggtagccagaacaggcaggagcgaggaggctcccggggtgagaacggggcacccc

SEQ ID NO: 722 - DNA, 122 bp, Homo sapiens
  misc_feature (61)..(62): /note="This region represents a CpG dinucleotide"
  misc_feature (61)..(61): /note="Nucleotide may be methylated to form 5-methylcytosine"
tggtggttgttgtagaaggctggcggtcccgggggtggtgtcacttccctgctccttcagcgggaggcggagacctctattagcacactcatttccatcttgcgggtcgttcactcgctagc

SEQ ID NO: 723 - DNA, 122 bp, Homo sapiens
  misc_feature (61)..(62): /note="This region represents a CpG dinucleotide"
  misc_feature (61)..(61): /note="Nucleotide may be methylated to form 5-methylcytosine"
gagggaagtgaagatttatttattcttgccctgtctctatgggtgcaatgaagagcctttcgaaacgccaataagacttcggtacactgagagacactacttgaaaatactcaatttcgatt

SEQ ID NO: 724 - DNA, 122 bp, Homo sapiens
  misc_feature (61)..(62): /note="This region represents a CpG dinucleotide"
  misc_feature (61)..(61): /note="Nucleotide may be methylated to form 5-methylcytosine"
gaagctttctgtgctcccagatcagctccataaaaaagtaagtgttctaaatatcaggcacgtcaatactgacaaccacagcaaatttaacgccaaacgtttttatcattgcagcagatggt

SEQ ID NO: 725 - DNA, 122 bp, Homo sapiens
  misc_feature (61)..(62): /note="This region represents a CpG dinucleotide"
  misc_feature (61)..(61): /note="Nucleotide may be methylated to form 5-methylcytosine"
ggcggcagaggcggaggaggcagcggcggcggaggcgggatttggagtttccctccgcagcggcggcggcggctgcccctcggctccaggagaggccgccacccggggttccggtggcgtta

SEQ ID NO: 726 - DNA, 122 bp, Homo sapiens
  misc_feature (61)..(62): /note="This region represents a CpG dinucleotide"
  misc_feature (61)..(61): /note="Nucleotide may be methylated to form 5-methylcytosine"
gcttagaggaaacatgtacaggacttggcaaagaacctgactccatgtgaatgctcactccgtgtgaaattgttcttattatagtgatttgtggggaagaaataaccaaggagggaaataaa

SEQ ID NO: 727 - DNA, 122 bp, Homo sapiens
  misc_feature (61)..(62): /note="This region represents a CpG dinucleotide"
  misc_feature (61)..(61): /note="Nucleotide may be methylated to form 5-methylcytosine"
gcttgtcatttcctatctggaaccacgaaccctagttccacccctgagtttcctaatgctcgacataagcctctgaagccaatctgcattgtgcattgcagatggtacagaatcctcttgta

SEQ ID NO: 728 - DNA, 122 bp, Homo sapiens
  misc_feature (61)..(62): /note="This region represents a CpG dinucleotide"
  misc_feature (61)..(61): /note="Nucleotide may be methylated to form 5-methylcytosine"
ctgttggaattctactctttgaccaataggtggcaccagtaatttctgtgttaaaccatgcggcaactaaatggcacagtctttagtggaatatattttatgtatatctctattaggattcc

SEQ ID NO: 729 - DNA, 122 bp, Homo sapiens
  misc_feature (61)..(62): /note="This region represents a CpG dinucleotide"
  misc_feature (61)..(61): /note="Nucleotide may be methylated to form 5-methylcytosine"
tacatgtaaaaattaccctttctctcactcttaaagtagatatagatcattcattcaattcgaaagtgaaatttgcatttgttacttaacattggtcacagagaaaacatgatgggaacaaa

SEQ ID NO: 730 - DNA, 122 bp, Homo sapiens
  misc_feature (61)..(62): /note="This region represents a CpG dinucleotide"
  misc_feature (61)..(61): /note="Nucleotide may be methylated to form 5-methylcytosine"
tacacgcagggtcacaaacataccagctcagaaacacaaacacagatgcacaagcacacgcgtaaacaacacgcagaactgcagtcgcacttacaagacttggtcccagggccgggcaccga

SEQ ID NO: 731 - DNA, 122 bp, Homo sapiens
  misc_feature (61)..(62): /note="This region represents a CpG dinucleotide"
  misc_feature (61)..(61): /note="Nucleotide may be methylated to form 5-methylcytosine"
gtgttgtttcttccttcctccttcctgttaggctgatgtaatgtctggagctcagggagccgtcttgggtcatgaggtggcaagctaaggatggtagaacaagacagaagactgggctttca

SEQ ID NO: 732 - DNA, 122 bp, Homo sapiens
  misc_feature (61)..(62): /note="This region represents a CpG dinucleotide"
  misc_feature (61)..(61): /note="Nucleotide may be methylated to form 5-methylcytosine"
caaggcagccgtgtgtgcttgcatgtgaggcggcaaaaacagcgcgctgcagggccggcgcggtggctcacgcctgtaatcccagcactttgggaggcggaggcgggtggatcacgaggtca

SEQ ID NO: 733 - DNA, 122 bp, Homo sapiens
  misc_feature (61)..(62): /note="This region represents a CpG dinucleotide"
  misc_feature (61)..(61): /note="Nucleotide may be methylated to form 5-methylcytosine"
cgattttatgccggatttagcccttattactatttcaagggtgcttcgggctagtgcgggcgggagcattcagggatgccaaggggaagactttcccaagtcaccgtcttcttctctgcccc

SEQ ID NO: 734 - DNA, 122 bp, Homo sapiens
  misc_feature (61)..(62): /note="This region represents a CpG dinucleotide"
  misc_feature (61)..(61): /note="Nucleotide may be methylated to form 5-methylcytosine"
aaaactaatataggcaggatctgcgattctgcatttctaacgggttcccagcttatcctacgttgagtaatgagacactaaataatcattacaaaagtggtgagattaagaaggattttaat

SEQ ID NO: 735 - DNA, 122 bp, Homo sapiens
  misc_feature (61)..(62): /note="This region represents a CpG dinucleotide"
  misc_feature (61)..(61): /note="Nucleotide may be methylated to form 5-methylcytosine"
gctgggcgccggtgaagacgcggcttctgtacctgataatggcacgtcccctctccaccccgccctaggcacaccctagcgcatctgacacccgccagtcgcggtgtctccgtcttgcacac

SEQ ID NO: 736 - DNA, 122 bp, Homo sapiens
  misc_feature (61)..(62): /note="This region represents a CpG dinucleotide"
  misc_feature (61)..(61): /note="Nucleotide may be methylated to form 5-methylcytosine"
gaaagaaaggcgcgcttggaagacatccaagcaggcacgtgagtgttaaagagagaaggtcgagtgtcccgtataaccgtgatcctaggacttttataagcccgtcttttccccatgcgtct

SEQ ID NO: 737 - DNA, 122 bp, Homo sapiens
  misc_feature (61)..(62): /note="This region represents a CpG dinucleotide"
  misc_feature (61)..(61): /note="Nucleotide may be methylated to form 5-methylcytosine"
tctgatttgtttgttttctatctcctgccatgaaaatagaagctcttcaaggacaaggcccgtgttgccttatttaccacttgtacccacatcctgcccagtggctgatgcacagcaggaat

SEQ ID NO: 738 - DNA, 122 bp, Homo sapiens
  misc_feature (61)..(62): /note="This region represents a CpG dinucleotide"
  misc_feature (61)..(61): /note="Nucleotide may be methylated to form 5-methylcytosine"
cagccagtcaagttgagaacagcagcagaaacaggaaagggtatttgccttctctaaaaacgtgagaatgcacgagcctcctggtaaagtctggaggggctggagtaatgtagctgcaggaa

SEQ ID NO: 739 - DNA, 122 bp, Homo sapiens
  misc_feature (61)..(62): /note="This region represents a CpG dinucleotide"
  misc_feature (61)..(61): /note="Nucleotide may be methylated to form 5-methylcytosine"
cagcagtcctcacagctgtgcaggagccattctcttggggtctctagcagacagcgcaggcgtgttgactcacatcaggaagttgcaagagctaccatggctgaaaagcctcatgccccaga

SEQ ID NO: 740 - DNA, 122 bp, Homo sapiens
  misc_feature (61)..(62): /note="This region represents a CpG dinucleotide"
  misc_feature (61)..(61): /note="Nucleotide may be methylated to form 5-methylcytosine"
tcagttcagttgagaatcttctgaagttctggggaaacatgcctcttccccagtgggggtcgaggaggaaagaaaaacctctcaggtccatgtgatgtctcctcactaagggttgggagttt

SEQ ID NO: 741 - DNA, 122 bp, Homo sapiens
  misc_feature (61)..(62): /note="This region represents a CpG dinucleotide"
  misc_feature (61)..(61): /note="Nucleotide may be methylated to form 5-methylcytosine"
ccctcctagggctgcaaccaggacacaaggaggaagcccaggtgagcatgtatcacactccggcacatagcagagccgaatgaatgacagttctcacagtgagccagtgttgctcttaaaaa

SEQ ID NO: 742 - DNA, 122 bp, Homo sapiens
  misc_feature (61)..(62): /note="This region represents a CpG dinucleotide"
  misc_feature (61)..(61): /note="Nucleotide may be methylated to form 5-methylcytosine"
gctgctgggccactggcggagcctgctgcgtcgcgtgccggcaagcccgggcctggcgcacggcctgtattggccccagcacttcctgccgcccctggacggcggcgcacccccgcactacg

SEQ ID NO: 743 - DNA, 122 bp, Homo sapiens
  misc_feature (61)..(62): /note="This region represents a CpG dinucleotide"
  misc_feature (61)..(61): /note="Nucleotide may be methylated to form 5-methylcytosine"
ccactggtgagctgcaggcacagcaagtgaactattttgccgaagctccagagacatgaccgtgggcctgcgctacctggactgattggaacagcattgctgctggtcatgctcagaagcca

SEQ ID NO: 744 - DNA, 122 bp, Homo sapiens
  misc_feature (61)..(62): /note="This region represents a CpG dinucleotide"
  misc_feature (61)..(61): /note="Nucleotide may be methylated to form 5-methylcytosine"
gcagctaacggctctgctcagaatttctcccgacagaggccggagtgttcaagagcttggcgatacagaaatttctgctggtgttggggcgggtgcgggaactgaagacgggcgagtgcgag

SEQ ID NO: 745 - DNA, 122 bp, Homo sapiens
  misc_feature (61)..(62): /note="This region represents a CpG dinucleotide"
  misc_feature (61)..(61): /note="Nucleotide may be methylated to form 5-methylcytosine"
ttaagtgcaggaactagatgacataatctgctatgcagtttccagctgttaagttctaaacgctaagccagagagagacaggtttagcatcagtaataacatatgagaatagtcccccaggc

SEQ ID NO: 746 - DNA, 122 bp, Homo sapiens
  misc_feature (61)..(62): /note="This region represents a CpG dinucleotide"
  misc_feature (61)..(61): /note="Nucleotide may be methylated to form 5-methylcytosine"
gagccccaggctttgtcatggtacagacgcactcacaatacctgttgtgaggaccaaggacgtaacacatcaagcccagccctgtgggcactttctgcaacaatcagactgatcacgggctg

SEQ ID NO: 747 - DNA, 122 bp, Homo sapiens
  misc_feature (61)..(62): /note="This region represents a CpG dinucleotide"
  misc_feature (61)..(61): /note="Nucleotide may be methylated to form 5-methylcytosine"
tcacgtcacactaagagggtttggagaagttcaagggaggaatcctgcaaagaagaggggcgactttttccgtgtctccggacagctaatcgttttagtgacaggatgagagagcccttcgt

SEQ ID NO: 748 - DNA, 122 bp, Homo sapiens
  misc_feature (61)..(62): /note="This region represents a CpG dinucleotide"
  misc_feature (61)..(61): /note="Nucleotide may be methylated to form 5-methylcytosine"
gtgggggaggtggcctcggcactgagtgttttaggcacctcagggcacaatattctaacacgaagtagataaagagatttcagcagcacctcaggctggggtgaagtgtgccctcctggccc

SEQ ID NO: 749 - DNA, 122 bp, Homo sapiens
  misc_feature (61)..(62): /note="This region represents a CpG dinucleotide"
  misc_feature (61)..(61): /note="Nucleotide may be methylated to form 5-methylcytosine"
ggagctagacccaatagagaaagttaacagaacatgtctctgtccagccctccaggcacgcgggcttgcagaatgcttctccagggcgaaggcgctgcaagctgaaggcagtgcaccttgcg

SEQ ID NO: 750 - DNA, 122 bp, Homo sapiens
  misc_feature (61)..(62): /note="This region represents a CpG dinucleotide"
  misc_feature (61)..(61): /note="Nucleotide may be methylated to form 5-methylcytosine"
gagagaagaaaacaaaatctctcgtctgagcatgactcttggcggtggtgctttcgccagcgcgtctgcagcggttcccagagaaagcccgccaggcagggacagactgacagaccgacgga

SEQ ID NO: 751 - DNA, 122 bp, Homo sapiens
  misc_feature (61)..(62): /note="This region represents a CpG dinucleotide"
  misc_feature (61)..(61): /note="Nucleotide may be methylated to form 5-methylcytosine"
cgtgtaaacccttcaccgggtttttatgattcgggaaacggatttcatccgtggcctgggcgggggtggggtggggagggaagtcaatgtcgtttcctcaaatagttctccctttcatcctc

SEQ ID NO: 752 - DNA, 122 bp, Homo sapiens
  misc_feature (61)..(62): /note="This region represents a CpG dinucleotide"
  misc_feature (61)..(61): /note="Nucleotide may be methylated to form 5-methylcytosine"
tatatttattatactcgtggctgtggccaaaattactatgaaggctgccagagtacttcccgtttttcaccccctcgcttcttagaaaggcttatgttttcatctaaaatgctgtttatttg

SEQ ID NO: 753 - DNA, 122 bp, Homo sapiens
  misc_feature (61)..(62): /note="This region represents a CpG dinucleotide"
  misc_feature (61)..(61): /note="Nucleotide may be methylated to form 5-methylcytosine"
aaaggcaccttaattccattccattggattccttatatcccgaaagtaaatgctttcatacgtttttaatcaaatttgataaattttgatgaaaattctctcgataaattttgatacaaatt

SEQ ID NO: 754 - DNA, 122 bp, Homo sapiens
  misc_feature (61)..(62): /note="This region represents a CpG dinucleotide"
  misc_feature (61)..(61): /note="Nucleotide may be methylated to form 5-methylcytosine"
caggtgtagatgaatacgcccaactgggaactgcaagccggctctctggcagcgggaaaccgcctttgtcttggcctttccggagtccttcccagccttaccgccagtcatttcgaattctg

SEQ ID NO: 755 - DNA, 122 bp, Homo sapiens
  misc_feature (61)..(62): /note="This region represents a CpG dinucleotide"
  misc_feature (61)..(61): /note="Nucleotide may be methylated to form 5-methylcytosine"
ggagactgaggcaggagaatcgcttgaacccggcaggcagaagttgcaatgagccgagatcgcgcaaatgcactccagcccaggcgatggtgagagactccgtttcaaaaaaaaaaaaaaaa

SEQ ID NO: 756 - DNA, 122 bp, Homo sapiens
  misc_feature (61)..(62): /note="This region represents a CpG dinucleotide"
  misc_feature (61)..(61): /note="Nucleotide may be methylated to form 5-methylcytosine"
tatttacatactcaaataactacgtgtaaacccttcaccgggtttttatgattcgggaaacggatttcatccgtggcctgggcgggggtggggtggggagggaagtcaatgtcgtttcctca

SEQ ID NO: 757 - DNA, 122 bp, Homo sapiens
  misc_feature (61)..(62): /note="This region represents a CpG dinucleotide"
  misc_feature (61)..(61): /note="Nucleotide may be methylated to form 5-methylcytosine"
gaggggaccctgaaagtgggtagccatctgtgaagttgagtccagggtttctatgaacttcgaatgggattgctccataggtgctcttggaaaaaacaccattcaactggttaaaaagcatc

SEQ ID NO: 758 - DNA, 122 bp, Homo sapiens
  misc_feature (61)..(62): /note="This region represents a CpG dinucleotide"
  misc_feature (61)..(61): /note="Nucleotide may be methylated to form 5-methylcytosine"
tgacctattgatgtgtgcttggccacattattagaatggccaatggaatttgagacatcgcgatgcactctgaggtcttgaaagtttgaaaggcttaacttagctctgagggcttctgtgat

SEQ ID NO: 759 - DNA, 122 bp, Homo sapiens
  misc_feature (61)..(62): /note="This region represents a CpG dinucleotide"
  misc_feature (61)..(61): /note="Nucleotide may be methylated to form 5-methylcytosine"
gctgaattctgtatcattcaaccacaacataagctctgggcaaactgaatttcaaggctgcgaacagggccactctactgtctaagttagtgtaggaagagtaaggttgaagttgaagttga

SEQ ID NO: 760 - DNA, 122 bp, Homo sapiens
  misc_feature (61)..(62): /note="This region represents a CpG dinucleotide"
  misc_feature (61)..(61): /note="Nucleotide may be methylated to form 5-methylcytosine"
aacatgagtgggggaggggagcaggccgacatcctgccggccaactacgtggtcaaggatcgctggaaggtggtgagtgagtgacccggcgggacagagggagggtagcggggagggaggcg

SEQ ID NO: 761 - DNA, 122 bp, Homo sapiens
  misc_feature (61)..(62): /note="This region represents a CpG dinucleotide"
  misc_feature (61)..(61): /note="Nucleotide may be methylated to form 5-methylcytosine"
ggagcagaatgaatacaagttgagaaaacggagtggttctaggtgaagtggactcctgaacgacttttctaaaaagatgttgtgctgaagagtatactcagtgtggtcagaaatgtcaggag

SEQ ID NO: 762 - DNA, 122 bp, Homo sapiens
  misc_feature (61)..(62): /note="This region represents a CpG dinucleotide"
  misc_feature (61)..(61): /note="Nucleotide may be methylated to form 5-methylcytosine"
tctgtttaaactgaaaaaaaaaaaaaaacaaaaatgcactgccccctttcaaagttagtccgggaattgagtttagaatcctttaaaggaaaagagggatatcatgtactgaacttgtctgg

SEQ ID NO: 763 - DNA, 122 bp, Homo sapiens
  misc_feature (61)..(62): /note="This region represents a CpG dinucleotide"
  misc_feature (61)..(61): /note="Nucleotide may be methylated to form 5-methylcytosine"
aagagaggcagtgctttaaggcagccatttccaatagaaagaaaaaaaatgtgagccatgcgtgtcatttaaatttttctagtagctgcttaaaggaaaaggaaacaggctggacatggtgg

SEQ ID NO: 764 - DNA, 122 bp, Homo sapiens
  misc_feature (61)..(62): /note="This region represents a CpG dinucleotide"
  misc_feature (61)..(61): /note="Nucleotide may be methylated to form 5-methylcytosine"
caggcgctttggcaagctctgcccagaaggcctggaggtcattagtgcgccagggggtcccggggcacccagcggagcaggtggtgggaaatgtggtggctggcttaactggtcaaggaggc

SEQ ID NO: 765 - DNA, 122 bp, Homo sapiens
  misc_feature (61)..(62): /note="This region represents a CpG dinucleotide"
  misc_feature (61)..(61): /note="Nucleotide may be methylated to form 5-methylcytosine"
gcagctgtccgggtgggggcgcccttctgagggcccgtgctgctgctgattgtaaagaagcgcctgacaatgcagacacggctgagtgcatcctgtgtaaccggcgcatgcgcgcccagagg

SEQ ID NO: 766 - DNA, 122 bp, Homo sapiens
  misc_feature (61)..(62): /note="This region represents a CpG dinucleotide"
  misc_feature (61)..(61): /note="Nucleotide may be methylated to form 5-methylcytosine"
tcttctgcagtgggggcttggctggtgagtggagactctgcgtgactctgggggcgtggccgagaatgggtgtagctctgtactagggcgtggtcatgcgtaggggtttgggtgaggcgtta

SEQ ID NO: 767 - DNA, 122 bp, Homo sapiens
  misc_feature (61)..(62): /note="This region represents a CpG dinucleotide"
  misc_feature (61)..(61): /note="Nucleotide may be methylated to form 5-methylcytosine"
acagtctgtctttccttctccagttttcaatgagtcccagcccccagccccgcctcttggcgtataataaacaggagtgcaggggggagtactatcgtctgccctcattctttgatatcttt

SEQ ID NO: 768 - DNA, 122 bp, Homo sapiens
  misc_feature (61)..(62): /note="This region represents a CpG dinucleotide"
  misc_feature (61)..(61): /note="Nucleotide may be methylated to form 5-methylcytosine"
ggtcctttgggccccacccccacccaccccaccggcgggtcttgggctccgaacccagggcgccccgcgcaccgagccgttgcgtttgaaacccacagaaagaattcccccgctcgacgacg

SEQ ID NO: 769 - DNA, 122 bp, Homo sapiens
  misc_feature (61)..(62): /note="This region represents a CpG dinucleotide"
  misc_feature (61)..(61): /note="Nucleotide may be methylated to form 5-methylcytosine"
ccagctagccctgggcaaactagtccatcttttggataaaataaacacctgcctcagaatcgcttgaacccgggaggcggaggttgcagtgagccaagattgcgccattgcactccagcctg

SEQ ID NO: 770 - DNA, 122 bp, Homo sapiens
  misc_feature (61)..(62): /note="This region represents a CpG dinucleotide"
  misc_feature (61)..(61): /note="Nucleotide may be methylated to form 5-methylcytosine"
ttgcgtctcatgctgactcagtatgcaaatactctctgggagacttctccatcctcagaccgctccagacaccaaatgcctgggcctttgaccgccttgctaagagggtcaaccaagccagc

SEQ ID NO: 771 - DNA, 122 bp, Homo sapiens
  misc_feature (61)..(62): /note="This region represents a CpG dinucleotide"
  misc_feature (61)..(61): /note="Nucleotide may be methylated to form 5-methylcytosine"
ttcttggaaaggttcattaatgaaaacccccaagcctgaccacctagggaaaaggctcaccgttcccatgtgtggctgataagggccaggagattccacagttcaggtagttcccccgcctc

SEQ ID NO: 772 - DNA, 122 bp, Homo sapiens
  misc_feature (61)..(62): /note="This region represents a CpG dinucleotide"
  misc_feature (61)..(61): /note="Nucleotide may be methylated to form 5-methylcytosine"
tacaatttcttcacccaaaaagtatttccacttatcaagagatggcatttcctccagggacgtaagcatcctgtgtgaggcgagagtgactcagagggagggcctggagaacagctcccagc

SEQ ID NO: 773 - DNA, 122 bp, Homo sapiens
  misc_feature (61)..(62): /note="This region represents a CpG dinucleotide"
  misc_feature (61)..(61): /note="Nucleotide may be methylated to form 5-methylcytosine"
gcctcctgcaggtttgtgcttactttccctgatgaaatgatggcgtctcctgtttcctcacgcttgcagtgttcacgttgtttccatcgccttgagagatgctccacactggttacatcact

SEQ ID NO: 774 - DNA, 122 bp, Homo sapiens
  misc_feature (61)..(62): /note="This region represents a CpG dinucleotide"
  misc_feature (61)..(61): /note="Nucleotide may be methylated to form 5-methylcytosine"
cccagctgagccccgcggctccaccgcgcagaaggtgcgccggaggccctgccagtttcccgccctgcagggtactgagaaatcaacgatttgtaaaaagaacttccccatggaaaaaaatc

SEQ ID NO: 775 - DNA, 122 bp, Homo sapiens
  misc_feature (61)..(62): /note="This region represents a CpG dinucleotide"
  misc_feature (61)..(61): /note="Nucleotide may be methylated to form 5-methylcytosine"
acatggcacagtttcactttcactctacccagctcttactgccagacatcctttagaacacgctcacaaacactagctggaactgggctggcattaatagcaagccagttatcagtgctgac

SEQ ID NO: 776 - DNA, 122 bp, Homo sapiens
  misc_feature (61)..(62): /note="This region represents a CpG dinucleotide"
  misc_feature (61)..(61): /note="Nucleotide may be methylated to form 5-methylcytosine"
gctcaagtcctttatataagatggtgcagtgtttacatataacatacatacacatcctcccgtatactttacattacctctagattacttataatccctaatacaatgtaagtgccatgtaa

SEQ ID NO: 777 - DNA, 122 bp, Homo sapiens
  misc_feature (61)..(62): /note="This region represents a CpG dinucleotide"
  misc_feature (61)..(61): /note="Nucleotide may be methylated to form 5-methylcytosine"
gttagggactcctgataggaaaattcctaacagagctttgtccagctgacactggacctccgcctggggtcctaagttggagcccggcggaaatatgccccgtgggggaaccaaccgtggca

SEQ ID NO: 778 - DNA, 122 bp, Homo sapiens
  misc_feature (61)..(62): /note="This region represents a CpG dinucleotide"
  misc_feature (61)..(61): /note="Nucleotide may be methylated to form 5-methylcytosine"
ggcaacacctcacccctggtcctactatctctggtcaaagaaatgtgcgcggtcatctagcgtcagcaaatcatcttgtatctacagatctgcctcagctcctttgctcagtaagaacttgt

SEQ ID NO: 779 - DNA, 122 bp, Homo sapiens
  misc_feature (61)..(62): /note="This region represents a CpG dinucleotide"
  misc_feature (61)..(61): /note="Nucleotide may be methylated to form 5-methylcytosine"
gtttggcccgggcagtgggaggagagccaggggaagatcatcttccttctggctccccatcgtgggagagttaacacttgacactcgttctccaagcccaggtgtgctgcgattcttcaggt

SEQ ID NO: 780 - DNA, 122 bp, Homo sapiens
  misc_feature (61)..(62): /note="This region represents a CpG dinucleotide"
  misc_feature (61)..(61): /note="Nucleotide may be methylated to form 5-methylcytosine"
tgctgcagtcctcgcctgtgtacccgggccagcacacgcagcggccgtccacgcagcgcccgccctcgccacagtcccaggggcagctccgcgtaccacagtcctcgccagtgtagccgggg

SEQ ID NO: 781 - DNA, 122 bp, Homo sapiens
  misc_feature (61)..(62): /note="This region represents a CpG dinucleotide"
  misc_feature (61)..(61): /note="Nucleotide may be methylated to form 5-methylcytosine"
acacacactcttctcggaggaactatttgtcattcaccatggagccagccccacctacaacgctgaggaacatatttacatatttcaactccattgctggctgaagcactccagaaagtgat

SEQ ID NO: 782 - DNA, 122 bp, Homo sapiens
  misc_feature (61)..(62): /note="This region represents a CpG dinucleotide"
  misc_feature (61)..(61): /note="Nucleotide may be methylated to form 5-methylcytosine"
cgcactggcatgatccctcctgatcgtgcctttcgttgacagatcctggaagacggtggccgctagtctgagatgctgctgagcagagaagctgcagacagagcctgtcctccctggccccc

SEQ ID NO: 783 - DNA, 122 bp, Homo sapiens
  misc_feature (61)..(62): /note="This region represents a CpG dinucleotide"
  misc_feature (61)..(61): /note="Nucleotide may be methylated to form 5-methylcytosine"
gctccgggtccccgcggcgtcggagaggcttctgcctagcgcctctctgctgcgcgaggtcgtcccggccttacaaaaggagctcctcgctggtgagctcaagaccccaggcgggctctccc

SEQ ID NO: 784 - DNA, 122 bp, Homo sapiens
  misc_feature (61)..(62): /note="This region represents a CpG dinucleotide"
  misc_feature (61)..(61): /note="Nucleotide may be methylated to form 5-methylcytosine"
gaaaataagcctccgagccagccaggagtcgaacctagaatcttctgatccgtagtcagacgcgttatccattgcgccactggcccgtcgttgtgggtctctcgattatctattcttcatta

SEQ ID NO: 785 - DNA, 122 bp, Homo sapiens
  misc_feature (61)..(62): /note="This region represents a CpG dinucleotide"
  misc_feature (61)..(61): /note="Nucleotide may be methylated to form 5-methylcytosine"
cgcttgaaagattttttaagtcttgaaggaaagcagacttaaaatttatacacacacacacgaaggtgctgtggtttattctaccaagggaaattgattttcacttcatctggaagtgcaaa

SEQ ID NO: 786 - DNA, 122 bp, Homo sapiens
  misc_feature (61)..(62): /note="This region represents a CpG dinucleotide"
  misc_feature (61)..(61): /note="Nucleotide may be methylated to form 5-methylcytosine"
agagcagctgacacgctgtcctctggcgacctgtcgctggagaggttgggactctggatgcgtgcggggctctggcctaccggtgacccggctagccggccgtgctcctgcttgagccgcct

SEQ ID NO: 787 - DNA, 122 bp, Homo sapiens
  misc_feature (61)..(62): /note="This region represents a CpG dinucleotide"
  misc_feature (61)..(61): /note="Nucleotide may be methylated to form 5-methylcytosine"
cccacccctgcttaccagccttgccccgccccgccccctcctcccacctccttcgcagcccggccccctgaagtcgcgccctgtgcctggccccagcctgcgtcccctcattccccagtgct

SEQ ID NO: 788 - DNA, 122 bp, Homo sapiens
  misc_feature (61)..(62): /note="This region represents a CpG dinucleotide"
  misc_feature (61)..(61): /note="Nucleotide may be methylated to form 5-methylcytosine"
tgggtgagcgccaggtctccccaccccaaggatagcgcgcacagggcgatctgctgctcgcgaggtagagagtggcttacttggggagaaaacattgaatctgtaaattaccttgggcagta

SEQ ID NO: 789 - DNA, 122 bp, Homo sapiens
  misc_feature (61)..(62): /note="This region represents a CpG dinucleotide"
  misc_feature (61)..(61): /note="Nucleotide may be methylated to form 5-methylcytosine"
ttgccatataaaatgtaaaacaccctcacttgcggacgacgacctgcctcgtcgcgcacacgccctgcagccgccccgcagaaatgcttcttccgttacccacagtctttccccagatgaga

SEQ ID NO: 790 - DNA, 122 bp, Homo sapiens
  misc_feature (61)..(62): /note="This region represents a CpG dinucleotide"
  misc_feature (61)..(61): /note="Nucleotide may be methylated to form 5-methylcytosine"
gagaaagaacgacaaaactgacagtgcggttgcttcctatgactaatcacaaccaatgcacgttatgaaggctgtccctctaggtccttcagtggtacttgttttacttgtttagcaaagag

SEQ ID NO: 791 - DNA, 122 bp, Homo sapiens
  misc_feature (61)..(62): /note="This region represents a CpG dinucleotide"
  misc_feature (61)..(61): /note="Nucleotide may be methylated to form 5-methylcytosine"
ctgttgggaggaaggctgctgcgtgcagccggaaagtcctgcgtccctccgctcttaccgcggcaggaaccacagcctccccgaacctcagggtttgtatggatttcgcccaggggaaagcg

SEQ ID NO: 792 - DNA, 122 bp, Homo sapiens
  misc_feature (61)..(62): /note="This region represents a CpG dinucleotide"
  misc_feature (61)..(61): /note="Nucleotide may be methylated to form 5-methylcytosine"
agtaaaggaccggtctgaaacctacaagaacaggtgtcgggggctgcaggctgcgggctgcgggaggaggtgggcgggtggggagaagcacccccttcagagttggggcttggggagtgggg

SEQ ID NO: 793 - DNA, 122 bp, Homo sapiens
  misc_feature (61)..(62): /note="This region represents a CpG dinucleotide"
  misc_feature (61)..(61): /note="Nucleotide may be methylated to form 5-methylcytosine"
aggagttgtgagaatgccctgcctcgctgggaactgatgggggcttttctggccatgggacgtgcaccatggggcttgggcgatggccccagcggctgcaagaggggtgtgtctctgtgtgt

SEQ ID NO: 794 - DNA, 122 bp, Homo sapiens
  misc_feature (61)..(62): /note="This region represents a CpG dinucleotide"
  misc_feature (61)..(61): /note="Nucleotide may be methylated to form 5-methylcytosine"
actgaatgacaataataaatgtaggctcttatttaattatgctgcggtttattaactatccgataataaggaaaacccctagtttattatagatctgtggggtgtgtgaatatgtgtgtgtg

SEQ ID NO: 795 - DNA, 122 bp, Homo sapiens
  misc_feature (61)..(62): /note="This region represents a CpG dinucleotide"
  misc_feature (61)..(61): /note="Nucleotide may be methylated to form 5-methylcytosine"
cagatggcaaatgtttagtaccaaaagttcagaagacacccaaaccaaccataattcccacgaccagagaaaagtttttaaatgtttattaaagtctactgggggtaaaactcctccccttc

SEQ ID NO: 796 - DNA, 122 bp, Homo sapiens
  misc_feature (61)..(62): /note="This region represents a CpG dinucleotide"
  misc_feature (61)..(61): /note="Nucleotide may be methylated to form 5-methylcytosine"
ccgcttcccgccctcgagccccgcccatttccaggagccttgagcccagagtctccgtcccgccctcaggccccacccacagcctcgggcctccgagccacacgttccccaaccccgccttc

SEQ ID NO: 797 - DNA, 122 bp, Homo sapiens
  misc_feature (61)..(62): /note="This region represents a CpG dinucleotide"
  misc_feature (61)..(61): /note="Nucleotide may be methylated to form 5-methylcytosine"
gccattcccaacagagctgaggacgagggtggtggtccacgcccacgtgcatgcctaggacggccacatggcacctgctgtgccaggcccctgaccctggcacttggcacatgggtacctgg

SEQ ID NO: 798 - DNA, 122 bp, Homo sapiens
  misc_feature (61)..(62): /note="This region represents a CpG dinucleotide"
  misc_feature (61)..(61): /note="Nucleotide may be methylated to form 5-methylcytosine"
agctgtaccaaagtgttccccagcctaacttgaccaataaattccataaatgtctctaagcgttttctcatactcaaggtaagacttcaaaatgtggggcaggtcaaacttcacatgctcag

SEQ ID NO: 799 - DNA, 122 bp, Homo sapiens
  misc_feature (61)..(62): /note="This region represents a CpG dinucleotide"
  misc_feature (61)..(61): /note="Nucleotide may be methylated to form 5-methylcytosine"
agtttctagccaagttagcttccacaacttctgatgtctcatttctcagcttagcaggatcgccatcttctgcttggattcttattgcatcatggtcaggaaatggtcctaagcagaggatc

SEQ ID NO: 800 - DNA, 122 bp, Homo sapiens
  misc_feature (61)..(62): /note="This region represents a CpG dinucleotide"
  misc_feature (61)..(61): /note="Nucleotide may be methylated to form 5-methylcytosine"
aaggtagtaagaccgtatagtcagcaaccacatccttagtaataagtgttagtataatcccgtatgtatgaaagactattgtgtaaaaaggacaaaaaattagcatacaacacaaacaccag

SEQ ID NO: 801 - DNA, 122 bp, Homo sapiens
  misc_feature (61)..(62): /note="This region represents a CpG dinucleotide"
  misc_feature (61)..(61): /note="Nucleotide may be methylated to form 5-methylcytosine"
gaaaaatactgagcagttaatctacaaacctgtttcagtctagctgaccactagatggcccgttactcaagataataatcagaacaagacatgctgacctgtacgtagctaactcttgcaca

SEQ ID NO: 802 - DNA, 122 bp, Homo sapiens
  misc_feature (61)..(62): /note="This region represents a CpG dinucleotide"
  misc_feature (61)..(61): /note="Nucleotide may be methylated to form 5-methylcytosine"
atgggaagtggacaggaaacatgaggtcatgacctgcaggcatctttactgcagctctgccggcctggagggggagagggggaggaagaagtatgcgctgcacatttctgaggctactgcat

SEQ ID NO: 803 - DNA, 122 bp, Homo sapiens
  misc_feature (61)..(62): /note="This region represents a CpG dinucleotide"
  misc_feature (61)..(61): /note="Nucleotide may be methylated to form 5-methylcytosine"
ttgctgttgatcgggagcgctgccgcaggtgtcccattttcattaaaatgcacatcagagcgcctactggagctggtaacaaagacaacattgaaaccgggtgtccgccttccgcggccaag

SEQ ID NO: 804 - DNA, 122 bp, Homo sapiens
  misc_feature (61)..(62): /note="This region represents a CpG dinucleotide"
  misc_feature (61)..(61): /note="Nucleotide may be methylated to form 5-methylcytosine"
ctcaaggcaaagagcccctgccctctttggtctttggattacccatcccctcaggcactgcgtccgcgcataatggacagtcaccagatggtgaatgctggaaacgcatcggtgtttttgaa

SEQ ID NO: 805 - DNA, 122 bp, Homo sapiens
  misc_feature (61)..(62): /note="This region represents a CpG dinucleotide"
  misc_feature (61)..(61): /note="Nucleotide may be methylated to form 5-methylcytosine"
ctttgtctgaattttctactctctgattcctatcagaagaaacaaattaagttttatggccgtagggagtatctacagagagttctaactaaatggagagaggttaaatggtctacacactt

SEQ ID NO: 806 - DNA, 122 bp, Homo sapiens
  misc_feature (61)..(62): /note="This region represents a CpG dinucleotide"
  misc_feature (61)..(61): /note="Nucleotide may be methylated to form 5-methylcytosine"
ccttgtgtgggggctggcttcctccaggacgaccatccagagacagtcagggggatgcaacgtggctttttttttaacctatccttggaagtcacacagtgtcacttttgctgtactttatt

SEQ ID NO: 807 - DNA, 122 bp, Homo sapiens
  misc_feature (61)..(62): /note="This region represents a CpG dinucleotide"
  misc_feature (61)..(61): /note="Nucleotide may be methylated to form 5-methylcytosine"
ctttgcgttccctgtgcgccggaagtgatcccctgcgtggctgggctgctcgggttagatcgtcaggtgagggaggaagggatagccagcgcgaaggaagtgctggagtcgtgtgttttggc

SEQ ID NO: 808 - DNA, 122 bp, Homo sapiens
  misc_feature (61)..(62): /note="This region represents a CpG dinucleotide"
  misc_feature (61)..(61): /note="Nucleotide may be methylated to form 5-methylcytosine"
gcggatgcctcacaagcttacgactccagacaggctcacccaactgcctcctccacccaacgctgcagcccactcaaggtccacgtagtccaagctgcattccttcctcgcactcccttgcc

SEQ ID NO: 809 - DNA, 122 bp, Homo sapiens
  misc_feature (61)..(62): /note="This region represents a CpG dinucleotide"
  misc_feature (61)..(61): /note="Nucleotide may be methylated to form 5-methylcytosine"
tgggggtgccatgttaaccactgtaggctgtcctgcagagctgcctgggctgttttaggacgttgaggttccagagcagcaggaggttcccagaagacaagctgggctccagcaccaggacc

SEQ ID NO: 810 - DNA, 122 bp, Homo sapiens
  misc_feature (61)..(62): /note="This region represents a CpG dinucleotide"
  misc_feature (61)..(61): /note="Nucleotide may be methylated to form 5-methylcytosine"
tctctccatgcgctgccgcttcacaaaggcgcatctctaggtcggtggtcaggttctgcccggacgctgcaactggctccgggacttgtgtccttggtgagcctagcggagtgctgggtgcg

SEQ ID NO: 811 - DNA, 122 bp, Homo sapiens
  misc_feature (61)..(62): /note="This region represents a CpG dinucleotide"
  misc_feature (61)..(61): /note="Nucleotide may be methylated to form 5-methylcytosine"
aggaagtgcatgagttcaccagatgaaagaacttttgtagccaaggtgtgacattagacccgggacacaataaacagtgaatttaggtgcaggaagtgagactaggaggtggccagggacct

SEQ ID NO: 812 - DNA, 122 bp, Homo sapiens
  misc_feature (61)..(62): /note="This region represents a CpG dinucleotide"
  misc_feature (61)..(61): /note="Nucleotide may be methylated to form 5-methylcytosine"
gtctggatctagcagttctgtttctggggccaacccccttgccggccccaattccctgcccgcagtatcctgctgcccgcctgctgcctgctcactgccagcccccgggtgccccctcccgc

SEQ ID NO: 813 - DNA, 122 bp, Homo sapiens
  misc_feature (61)..(62): /note="This region represents a CpG dinucleotide"
  misc_feature (61)..(61): /note="Nucleotide may be methylated to form 5-methylcytosine"
tgggccctgccgctgcgcccacggccctcgtgggaggcccctccctaccccggccgccctcgggcccccacggtctactaccccatggggaccggcatgtcaagcccctgcgtgggcgcctg

SEQ ID NO: 814 - DNA, 122 bp, Homo sapiens
  misc_feature (61)..(62): /note="This region represents a CpG dinucleotide"
  misc_feature (61)..(61): /note="Nucleotide may be methylated to form 5-methylcytosine"
ctaatgaaggctatgtttatgttggccttatcatagctatccaaccggatgccagatatccggttgctggccaagtagaaacttctatctttttttatcttatctagttaatctaggtactg

SEQ ID NO: 815 - DNA, 122 bp, Homo sapiens
  misc_feature (61)..(62): /note="This region represents a CpG dinucleotide"
  misc_feature (61)..(61): /note="Nucleotide may be methylated to form 5-methylcytosine"
cgggtcgctaccgccatgatccgcacgtagtggtcaaggctgaggttgtatgaatgtggacgttataaccctggctccctctccctccctatgctgggctcccctcgatccccaggcggtgg

SEQ ID NO: 816 - DNA, 122 bp, Homo sapiens
  misc_feature (61)..(62): /note="This region represents a CpG dinucleotide"
  misc_feature (61)..(61): /note="Nucleotide may be methylated to form 5-methylcytosine"
aatcccttcctttctcaagagaatccctgaacaaaaacgaaagtttctgtaaggtgtcaccgctcttcaaaggtgtcaggaccctgtcttctctaaaggttttactgtgttaaaaagcagct

SEQ ID NO: 817 - DNA, 122 bp, Homo sapiens
  misc_feature (61)..(62): /note="This region represents a CpG dinucleotide"
  misc_feature (61)..(61): /note="Nucleotide may be methylated to form 5-methylcytosine"
agtttaacaatccagcgacggctgctctcagcaggggttcccagtgccagctgtgccacacgccaggcagcggaaaagcaaattagccctggaggtcttcgctcagtggcgggtgcgaggaa

SEQ ID NO: 818 - DNA, 122 bp, Homo sapiens
  misc_feature (61)..(62): /note="This region represents a CpG dinucleotide"
  misc_feature (61)..(61): /note="Nucleotide may be methylated to form 5-methylcytosine"
ctgtaccggactctcctggtgacagttttagtggctgcatatgtttgcagaagaaggaagcgtggtaacttggcaaacagctccaaacgctcctggcttgctgccacaggattgtccttgag

SEQ ID NO: 819 - DNA, 122 bp, Homo sapiens
  misc_feature (61)..(62): /note="This region represents a CpG dinucleotide"
  misc_feature (61)..(61): /note="Nucleotide may be methylated to form 5-methylcytosine"
gaccaactgggcatcaagcggtgcaaaagcaaatccctctcaaagctgggagagtcacaccgtgggctactcctgcatgcagctgggtacatatctcctgggtcctatgacctgcctaaaaa

SEQ ID NO: 820 - DNA, 122 bp, Homo sapiens
  misc_feature (61)..(62): /note="This region represents a CpG dinucleotide"
  misc_feature (61)..(61): /note="Nucleotide may be methylated to form 5-methylcytosine"
ccgcggcgtcccctgccggccgggcggcgatttgcaggtccagccggcgccggtttcgcgcggcggctcaacgtccacggagccccaggaatacccacccgctgcccagatcggcagccgct

SEQ ID NO: 821 - DNA, 122 bp, Homo sapiens
  misc_feature (61)..(62): /note="This region represents a CpG dinucleotide"
  misc_feature (61)..(61): /note="Nucleotide may be methylated to form 5-methylcytosine"
tcctcacggctgctctctgggaaggacgctgcctcgccacttcctcccagccacctgcagcgcctcctgcaacactcaggaatcctagagatccttaagccttcacagggcgcaggccccat

SEQ ID NO: 822 - DNA, 122 bp, Homo sapiens
  misc_feature (61)..(62): /note="This region represents a CpG dinucleotide"
  misc_feature (61)..(61): /note="Nucleotide may be methylated to form 5-methylcytosine"
aggttcctcactgcggggcgctgcggccatggcccgggtttagttcgcggagctgcggggcgggactgggaatgccgcactttcccatgcccggtgggtggaattcacagaattcttcctgt

SEQ ID NO: 823 - DNA, 122 bp, Homo sapiens
  misc_feature (61)..(62): /note="This region represents a CpG dinucleotide"
  misc_feature (61)..(61): /note="Nucleotide may be methylated to form 5-methylcytosine"
caatccaattattattattatagaagtctgttttcaccagaaagtttgtgaactgacaaccgtaaaatctgtggtaaattcacaggcttcatcaatgacactatgaaatattgaccctcagc

SEQ ID NO: 824 - DNA, 122 bp, Homo sapiens
  misc_feature (61)..(62): /note="This region represents a CpG dinucleotide"
  misc_feature (61)..(61): /note="Nucleotide may be methylated to form 5-methylcytosine"
aatgtggagccaacaattgtccaaaacacaaagtacttccttaagaacaggtctctggctcgggcctttgcttcatgagaactgcacccaactccacacctgtttaaaaatgaagcccaccc

SEQ ID NO: 825 - DNA, 122 bp, Homo sapiens
  misc_feature (61)..(62): /note="This region represents a CpG dinucleotide"
  misc_feature (61)..(61): /note="Nucleotide may be methylated to form 5-methylcytosine"
ctttattggagtctcaacacaaaaacctcggcgatacaagggtcacggcatctggcccgtcgccttaactgcatcaaccgggtttacgaaacagcctgatttccagccccacccatcgcaac

SEQ ID NO: 826 - DNA, 122 bp, Homo sapiens
  misc_feature (61)..(62): /note="This region represents a CpG dinucleotide"
  misc_feature (61)..(61): /note="Nucleotide may be methylated to form 5-methylcytosine"
ggccatccaagaggggtgggactaacgacccctggagatggggcgagagtggtgtcgaggcgtgggtggggatgggggtggatccagaacccaggaggcggggccgaggaggtgccgggccc

SEQ ID NO: 827 - DNA, 122 bp, Homo sapiens
  misc_feature (61)..(62): /note="This region represents a CpG dinucleotide"
  misc_feature (61)..(61): /note="Nucleotide may be methylated to form 5-methylcytosine"
tctggcctaagcatgcagactctggaaatttatcccacagcacgtgcatagttttcgatgcgtcatttacccaatgaggctgaacctggaattggacttctacctgcccgtcctttccaggt

SEQ ID NO: 828 - DNA, 122 bp, Homo sapiens
  misc_feature (61)..(62): /note="This region represents a CpG dinucleotide"
  misc_feature (61)..(61): /note="Nucleotide may be methylated to form 5-methylcytosine"
ttagattaagacaattaaatcaccctagatctacctagtggctagggtaagttaacacaacgtttgcaactgagccttaacatattccctcttcctgaccatgcctcctccctcaactttca

SEQ ID NO: 829 - DNA, 122 bp, Homo sapiens
  misc_feature (61)..(62): /note="This region represents a CpG dinucleotide"
  misc_feature (61)..(61): /note="Nucleotide may be methylated to form 5-methylcytosine"
ccacttggagccccgggtcctcgcgcgctcacagcggcgacgtactggctcataaccatccgtgcatacaaccatctggagacgaacacacacacgcacacgcgcgcgcacacacacacaca

SEQ ID NO: 830 - DNA, 122 bp, Homo sapiens
  misc_feature (61)..(62): /note="This region represents a CpG dinucleotide"
  misc_feature (61)..(61): /note="Nucleotide may be methylated to form 5-methylcytosine"
aggtgagttaaagagcactagtaaatactcgcagtcatgcattgcttaacaacagggatacgttctgagaaatgagtcataggcagtttcactgttttgcgaaagaatattatgggtatact

SEQ ID NO: 831 - DNA, 122 bp, Homo sapiens
  misc_feature (61)..(62): /note="This region represents a CpG dinucleotide"
  misc_feature (61)..(61): /note="Nucleotide may be methylated to form 5-methylcytosine"
aatgttgctaccatttgagagagtgtggcttgattcggtaggataaaaactcttagtattcgcctaacattacgggccactgaattaacctgcaccgggtctcccagttctaccgagagtgg

SEQ ID NO: 832 - DNA, 122 bp, Homo sapiens
  misc_feature (61)..(62): /note="This region represents a CpG dinucleotide"
  misc_feature (61)..(61): /note="Nucleotide may be methylated to form 5-methylcytosine"
aaggacagaaaagcgaggaaagtctatgccgccagcgaccggcaggaggcacgtcgggcacgctcgtcaccgtttcctggcacgtgaccaccgccctgccctgtcgctttagggcctgtcgc

SEQ ID NO: 833 - DNA, 122 bp, Homo sapiens
  misc_feature (61)..(62): /note="This region represents a CpG dinucleotide"
  misc_feature (61)..(61): /note="Nucleotide may be methylated to form 5-methylcytosine"
ccctcctcccccgcaatttatctgacaccgtctttcggttttgctttaaaaattcactctcgcggccgggcgcggtggctcacgcctgtaatcccagcacgttgggaggccgaggcgggcgc

SEQ ID NO: 834 - DNA, 122 bp, Homo sapiens
  misc_feature (61)..(62): /note="This region represents a CpG dinucleotide"
  misc_feature (61)..(61): /note="Nucleotide may be methylated to form 5-methylcytosine"
ctctatgcttaacttttgaattagaaacggtgttttaatttttcgaatatgactcctttacgtgtctgtgtctgtttccatgtcttcctactgtcttagtaggaagctcacgactcatttgc

SEQ ID NO: 835 - DNA, 122 bp, Homo sapiens
  misc_feature (61)..(62): /note="This region represents a CpG dinucleotide"
  misc_feature (61)..(61): /note="Nucleotide may be methylated to form 5-methylcytosine"
actccttcctctggtgtggtgtttcccagttttgcccggtgagaatcacctgcggctggccgtgcgcagtggctcacgcctgtaatcccagcactttgggaggccgaggcgggtgaatcacg

SEQ ID NO: 836 - DNA, 122 bp, Homo sapiens
  misc_feature (61)..(62): /note="This region represents a CpG dinucleotide"
  misc_feature (61)..(61): /note="Nucleotide may be methylated to form 5-methylcytosine"
gcgggaagtgggagaggcgggtggcgcccgagcgcagtagcaggggcgtagggcgcagggcgcaggagcgcgggaccaccggcgccggagcgcggcagggagcgctcgcgggggcgcacagc

SEQ ID NO: 837 - DNA, 122 bp, Homo sapiens
  misc_feature (61)..(62): /note="This region represents a CpG dinucleotide"
  misc_feature (61)..(61): /note="Nucleotide may be methylated to form 5-methylcytosine"
ttgggcctggacctaacccaagaaaatcatgcccatggctaaggttgagtaacactatggcgtgtctgtggtttcatgtaaaacagatcgcatactgatgaaatcttggaaatcaaattata

SEQ ID NO: 838 - DNA, 122 bp, Homo sapiens
  misc_feature (61)..(62): /note="This region represents a CpG dinucleotide"
  misc_feature (61)..(61): /note="Nucleotide may be methylated to form 5-methylcytosine"
ccctggaccccttctccttcctctccgaagccctccctggaaggagccccgcatgctgaccgcagctgccgctagggggcagagccgtctacaccaaaagccacaccgctccagcgtgcgcg

SEQ ID NO: 839 - DNA, 122 bp, Homo sapiens
  misc_feature (61)..(62): /note="This region represents a CpG dinucleotide"
  misc_feature (61)..(61): /note="Nucleotide may be methylated to form 5-methylcytosine"
ctgggtttgggagtgactcggtgcaaggtagtgactgcactgcccagaggttagaaagagcgatgctctccaaggcttcccatgcgcgtaattgtgttggaagagctagcgtgttcatgctg

SEQ ID NO: 840 - DNA, 122 bp, Homo sapiens
  misc_feature (61)..(62): /note="This region represents a CpG dinucleotide"
  misc_feature (61)..(61): /note="Nucleotide may be methylated to form 5-methylcytosine"
ttggcatctgagggtacaaaggcctggggggggcgctggtgcacatcaaaatggccaaagcgatttgaggagggagccttaaggagggtttgtaccttctgtgctgcatgctcttcaaggac

SEQ ID NO: 841 - DNA, 122 bp, Homo sapiens
  misc_feature (61)..(62): /note="This region represents a CpG dinucleotide"
  misc_feature (61)..(61): /note="Nucleotide may be methylated to form 5-methylcytosine"
taccaaatatagcaattttggtaactgccaaaagaagcaaagtatttaggaaaatcccaccgaatattagtagcctttgtcactcagtcagtgatttcctgagtgaaacaactgtttgcttt

SEQ ID NO: 842 - DNA, 122 bp, Homo sapiens
  misc_feature (61)..(62): /note="This region represents a CpG dinucleotide"
  misc_feature (61)..(61): /note="Nucleotide may be methylated to form 5-methylcytosine"
aatgagcctagggagaaaaatccaggcttgctgaactaataaatcagtgggagaggtgagcgcttgctctagtgaggcatttatgattggctgcctttcattgagccacacggcgagctcat

SEQ ID NO: 843 - DNA, 122 bp, Homo sapiens
  misc_feature (61)..(62): /note="This region represents a CpG dinucleotide"
  misc_feature (61)..(61): /note="Nucleotide may be methylated to form 5-methylcytosine"
cccctcagaagacttgacaccccaccctggtgccctttctctgtactttcatatgctcagcggctgtctttgcacttgcttcaggattgtacctaacattctgtactgtaatgcattttctt

SEQ ID NO: 844 - DNA, 122 bp, Homo sapiens
  misc_feature (61)..(62): /note="This region represents a CpG dinucleotide"
  misc_feature (61)..(61): /note="Nucleotide may be methylated to form 5-methylcytosine"
ttctttgcttcttcctcattccaccctatgccttacaaaatgctgaatatcctttgtgagcgtttgaaaatctagcaatttttttcatgaactcctatgaattctactcagtatctacttgt

SEQ ID NO: 845 - DNA, 122 bp, Homo sapiens
  misc_feature (61)..(62): /note="This region represents a CpG dinucleotide"
  misc_feature (61)..(61): /note="Nucleotide may be methylated to form 5-methylcytosine"
gaggaaataggctcagagaggttaagtaactatattacacctaacagtatgccccactaacgaatgaggaaataggctcagagaagttaagtaacttgacgtcagttatccagctactaagt

SEQ ID NO: 846 - DNA, 122 bp, Homo sapiens
  misc_feature (61)..(62): /note="This region represents a CpG dinucleotide"
  misc_feature (61)..(61): /note="Nucleotide may be methylated to form 5-methylcytosine"
gtgctggaagaaaagtactaataaataccaaagcacaaaccacttaaatagtgcacaattcgatgtgaagtagaagattcaaaatgactcagtgattattaatctaatgctctaaaatacga

SEQ ID NO: 847 - DNA, 122 bp, Homo sapiens
  misc_feature (61)..(62): /note="This region represents a CpG dinucleotide"
  misc_feature (61)..(61): /note="Nucleotide may be methylated to form 5-methylcytosine"
tacactccagcttacaccttcactgactcttcgtcagtcccagaattcacactcttcttacgcacatccccagagccccgcgtgtacactttagctccgcgcacagctccagaatactgcgt

SEQ ID NO: 848 - DNA, 122 bp, Homo sapiens
  misc_feature (61)..(62): /note="This region represents a CpG dinucleotide"
  misc_feature (61)..(61): /note="Nucleotide may be methylated to form 5-methylcytosine"
cacacactcctcctttttgtctcagatgttatcttacgaaaccttcccagaccccctcgccggcactctcatgtgttttacaacgcctatcatgccatccttgtattcgctttatcagtttt

SEQ ID NO: 849 - DNA, 122 bp, Homo sapiens
  misc_feature (61)..(62): /note="This region represents a CpG dinucleotide"
  misc_feature (61)..(61): /note="Nucleotide may be methylated to form 5-methylcytosine"
agccaagtttcccacagctggagaggaaagtcaaaggtatgcaaggaaggaaagctagaacgaaccttgtgggactgtattaaagtcagaaacctcaatgtgaacttaggtttagcttgaca

SEQ ID NO: 850 - DNA, 122 bp, Homo sapiens
  misc_feature (61)..(62): /note="This region represents a CpG dinucleotide"
  misc_feature (61)..(61): /note="Nucleotide may be methylated to form 5-methylcytosine"
taaaggataaatattctagtgtcttttttactttgtgtgtgcttgtggcaggattgctgacgggcaccaccctttctgcagagagtaaacatcgccttgctaaggaaactttttgtctgatt

SEQ ID NO: 851 - DNA, 122 bp, Homo sapiens
  misc_feature (61)..(62): /note="This region represents a CpG dinucleotide"
  misc_feature (61)..(61): /note="Nucleotide may be methylated to form 5-methylcytosine"
gattgtatctatttacttaccaaggtccaggcacctagggctgtgctgggtgccccgaggcgctgtcatagccgtggctttgaagagcacctgactggtccacatctgtcccaggaggcaga

SEQ ID NO: 852 - DNA, 122 bp, Homo sapiens
  misc_feature (61)..(62): /note="This region represents a CpG dinucleotide"
  misc_feature (61)..(61): /note="Nucleotide may be methylated to form 5-methylcytosine"
actgtttaagacatataaattaatgtctattgcacaggcttggctgggtgactcacattgcggcttctatttctggtgggggagactcagatacatttgtcatgactccagtaagtggtaaa

SEQ ID NO: 853 - DNA, 122 bp, Homo sapiens
  misc_feature (61)..(62): /note="This region represents a CpG dinucleotide"
  misc_feature (61)..(61): /note="Nucleotide may be methylated to form 5-methylcytosine"
ggcgtctttctcagcttggttccagcaagtgtgtggcactgagaggttggatagagcctgcgtcctcaagaagtgtattaccaaggggggccataaggtgtccacatgactaaatcagcata

SEQ ID NO: 854 - DNA, 122 bp, Homo sapiens
  misc_feature (61)..(62): /note="This region represents a CpG dinucleotide"
  misc_feature (61)..(61): /note="Nucleotide may be methylated to form 5-methylcytosine"
gcacatttgatgtttctaaattgcctttcctctcatccccagacttaagtaaatccatgtcggggaggcagaaacttgaagcacaactaacagaaaataatatcgtgaaagaggtgagggac

SEQ ID NO: 855 - DNA, 122 bp, Homo sapiens
  misc_feature (61)..(62): /note="This region represents a CpG dinucleotide"
  misc_feature (61)..(61): /note="Nucleotide may be methylated to form 5-methylcytosine"
gaactccatcataccggatgccaccgtttaaggatcctttgaaacttcttaagaattcaacgagatttttaacctgaaactgaagaatctggtactgtaagtgtaaagaagcttattttgga

SEQ ID NO: 856 - DNA, 122 bp, Homo sapiens
  misc_feature (61)..(62): /note="This region represents a CpG dinucleotide"
  misc_feature (61)..(61): /note="Nucleotide may be methylated to form 5-methylcytosine"
agactcctgtggctcattcgtcaccggccctgacaaatgcctgccgcccccttcccctcccgccccaccaagcaatcataccattagccacggctcagcggtggcgggaaggacccggcctg

SEQ ID NO: 857 - DNA, 122 bp, Homo sapiens
  misc_feature (61)..(62): /note="This region represents a CpG dinucleotide"
  misc_feature (61)..(61): /note="Nucleotide may be methylated to form 5-methylcytosine"
gggagccggggctaggacggtgtgtggggtccgaacggaactcccaggctgtagcgaaagcgtgacagggccggaccctgaagctgaatgaccgctaagtggccctcacgcctcggaaaccg

SEQ ID NO: 858 - DNA, 122 bp, Homo sapiens
  misc_feature (61)..(62): /note="This region represents a CpG dinucleotide"
  misc_feature (61)..(61): /note="Nucleotide may be methylated to form 5-methylcytosine"
ggaggcggggcaggcctccgttctccaattggccttatccaccgagctctccccttgtgccgggctctgtgccaagcacatcacacgctgtatcctgcggccaggttgctgtggtccagggt

SEQ ID NO: 859 - DNA, 122 bp, Homo sapiens
  misc_feature (61)..(62): /note="This region represents a CpG dinucleotide"
  misc_feature (61)..(61): /note="Nucleotide may be methylated to form 5-methylcytosine"
acagcctgtcaccttccgtgtcgtagggcgaagaagcagttgatgggggccacacctccacggtgattttgttcctctccagccacagacccttgctttcccctaggagcgtgaccacacgt

SEQ ID NO: 860 - DNA, 122 bp, Homo sapiens
  misc_feature (61)..(62): /note="This region represents a CpG dinucleotide"
  misc_feature (61)..(61): /note="Nucleotide may be methylated to form 5-methylcytosine"
ttagactctgtgagagtattagggtaacagagtcagaagctgatatgtcacttccccaaacgttaattgaagcacaccagcttgagtaaccatctgccttcctttcaaggaaggaagcagat

SEQ ID NO: 861 - DNA, 122 bp, Homo sapiens
  misc_feature (61)..(62): /note="This region represents a CpG dinucleotide"
  misc_feature (61)..(61): /note="Nucleotide may be methylated to form 5-methylcytosine"
ccctgcaggccccaacgcttcatcgcagcgcccactttttccacctgacccggcgaacaccgggcgggccgctggagtttatcagctccaggacaaatctgcctctgaccaccacgtttgct

SEQ ID NO: 862 - DNA, 122 bp, Homo sapiens
  misc_feature (61)..(62): /note="This region represents a CpG dinucleotide"
  misc_feature (61)..(61): /note="Nucleotide may be methylated to form 5-methylcytosine"
gagtagataaatgcatacgtgtctttaaaaagtctaattagtgggaaattgcaggccaggcgcacacagggttgaggcaaatatgtgtgattatacatgcagcttaactaaataacccataa

SEQ ID NO: 863 - DNA, 122 bp, Homo sapiens
  misc_feature (61)..(62): /note="This region represents a CpG dinucleotide"
  misc_feature (61)..(61): /note="Nucleotide may be methylated to form 5-methylcytosine"
ccctttctcctcctcgtcgcccgaaaacgtggaggattccggcctggactctccgtcccacgcggcacctggcccctccccagattcctgggtcccccgcccaggcaccccgcagagcccgc

SEQ ID NO: 864 - DNA, 122 bp, Homo sapiens
  misc_feature (61)..(62): /note="This region represents a CpG dinucleotide"
  misc_feature (61)..(61): /note="Nucleotide may be methylated to form 5-methylcytosine"
acagatctgcaggagaccttttttagaacagcgtccgctttctaacgaaactcctgcctccgtctaaggcggcactctaacgctcgtttcagagatagcaccacgttggaaggaagaataaa

SEQ ID NO: 865 - DNA, 122 bp, Homo sapiens
  misc_feature (61)..(62): /note="This region represents a CpG dinucleotide"
  misc_feature (61)..(61): /note="Nucleotide may be methylated to form 5-methylcytosine"
gcctttgccagaaagcttctagttacaactactggcagggaccttatgcttcagaggtctcgaaaatattcctcctgacctcagtgtccagccccagcacagatttagcttcttggatgttc

SEQ ID NO: 866 - DNA, 122 bp, Homo sapiens
  misc_feature (61)..(62): /note="This region represents a CpG dinucleotide"
  misc_feature (61)..(61): /note="Nucleotide may be methylated to form 5-methylcytosine"
gaaactcggctgggggtgggggctcagaagccgccccagaaagcactgaaagccacagcacgtacacccactccagggatctgccagcaccctgtggggcccagactacaggctgatggcgg

SEQ ID NO: 867 - DNA, 122 bp, Homo sapiens
  misc_feature (61)..(62): /note="This region represents a CpG dinucleotide"
  misc_feature (61)..(61): /note="Nucleotide may be methylated to form 5-methylcytosine"
gagctcccttgcagtcccctccatgttccccggcgccactactccccttcctaaggccgccgcttaccccggggtctatggaagtaatggaaggacccctcaacctggtgagtgtcccacag

SEQ ID NO: 868 - DNA, 122 bp, Homo sapiens
  misc_feature (61)..(62): /note="This region represents a CpG dinucleotide"
  misc_feature (61)..(61): /note="Nucleotide may be methylated to form 5-methylcytosine"
cttctcgacctttgccccggctaagggctgccctgaaccaggaaaaggggcacagggtcgcgagaccccactgagaagtcctctgtccacatagccaggggaacatgttccccaagacctgt

SEQ ID NO: 869 - DNA, 122 bp, Homo sapiens
  misc_feature (61)..(62): /note="This region represents a CpG dinucleotide"
  misc_feature (61)..(61): /note="Nucleotide may be methylated to form 5-methylcytosine"
gctgtggctggcacccagtaggtgctcaataaatgacctccttctgtaaaggggaagccgcgccccagggtggggaggtggctgcttcacacctcccaggcgccaatctcacttctctcgaa

SEQ ID NO: 870 - DNA, 122 bp, Homo sapiens
  misc_feature (61)..(62): /note="This region represents a CpG dinucleotide"
  misc_feature (61)..(61): /note="Nucleotide may be methylated to form 5-methylcytosine"
aagcagcaaacttggccctgtcaaatttagttttcatgtgcttgactctctcactggtagcgccaagggtgaagaggatgttatttcacatataacttaacactttacttgctctgtttccc

SEQ ID NO: 871 - DNA, 122 bp, Homo sapiens
  misc_feature (61)..(62): /note="This region represents a CpG dinucleotide"
  misc_feature (61)..(61): /note="Nucleotide may be methylated to form 5-methylcytosine"
ggtgctgagcaaactcaccagtgcactgtaggatgttttaaaatttcaagagaaacacagcgacatctgctggactctgtgcaaactactagtttgaggcaattcagtctcattagattgtc

SEQ ID NO: 872 - DNA, 122 bp, Homo sapiens
  misc_feature (61)..(62): /note="This region represents a CpG dinucleotide"
  misc_feature (61)..(61): /note="Nucleotide may be methylated to form 5-methylcytosine"
gctgcgccaccccttaccacttccactccccctcgcttaccccacctttgttctctccagcgaactgtgactgtctaaatggaggaacatgtgtgtccaacaagtacttctccaacattcac

SEQ ID NO: 873 - DNA, 122 bp, Homo sapiens
  misc_feature (61)..(62): /note="This region represents a CpG dinucleotide"
  misc_feature (61)..(61): /note="Nucleotide may be methylated to form 5-methylcytosine"
gatgattgagccaaagcaagagaaactcatttctttgtaaaactgcacttgacgttgtaacggttttgaacaaaggataggcacactttcagaacactttatctgttgagagtcacggcatg

SEQ ID NO: 874 - DNA, 122 bp, Homo sapiens
  misc_feature (61)..(62): /note="This region represents a CpG dinucleotide"
  misc_feature (61)..(61): /note="Nucleotide may be methylated to form 5-methylcytosine"
gccgagaccagctggtcgctgccgggcccgctagtagcccacggagaagccgcccacagccggacaccagagccttgagggccgccatcttcaaaaacctaccctgacctctcgtccatttc

SEQ ID NO: 875 - DNA, 122 bp, Homo sapiens
  misc_feature (61)..(62): /note="This region represents a CpG dinucleotide"
  misc_feature (61)..(61): /note="Nucleotide may be methylated to form 5-methylcytosine"
gaggcaggagaatcacttgaacccaggaggcagagtttgcagtgagctgagatggtaccacggctcaccagcctgggctacagagcgagactctgtctaaaaaaaaaagtgctcgctttggc

SEQ ID NO: 876 - DNA, 122 bp, Homo sapiens
  misc_feature (61)..(62): /note="This region represents a CpG dinucleotide"
  misc_feature (61)..(61): /note="Nucleotide may be methylated to form 5-methylcytosine"
tgactgacttttataaaccagatctatgagttgagaatgggaacactgttaggcccagcacgcattgtgtctcacgcttgtaatcccagcactctgggaggccgagaagggtggatcacatt

SEQ ID NO: 877 - DNA, 122 bp, Homo sapiens
  misc_feature (61)..(62): /note="This region represents a CpG dinucleotide"
  misc_feature (61)..(61): /note="Nucleotide may be methylated to form 5-methylcytosine"
ggcatttacaatccttatctcacaaccaacaacacattctgcctcaagttagattagtttcgtttttgaaagagggtcaatgatatttaaaaggaggtaggggaaagatcaaatagttttgt

SEQ ID NO: 878 - DNA, 122 bp, Homo sapiens
  misc_feature (61)..(62): /note="This region represents a CpG dinucleotide"
  misc_feature (61)..(61): /note="Nucleotide may be methylated to form 5-methylcytosine"
agaaagcacgcctgcaaatcgggaaagcaagccgcctcccggagatgggtggctggggaccggcaggacggcagagggagtagagcccatctgggcagacgctgctgcaggcctgggtggac

SEQ ID NO: 879 - DNA, 122 bp, Homo sapiens
  misc_feature (61)..(62): /note="This region represents a CpG dinucleotide"
  misc_feature (61)..(61): /note="Nucleotide may be methylated to form 5-methylcytosine"
cctggcacacaatgaacacccaacaaacacttggtttaagcaatgaattattatcttgcacgagatttcatgagtctctttagttttgctttcttaacttacttaatgcttattaagatgac

SEQ ID NO: 880 - DNA, 122 bp, Homo sapiens
  misc_feature (61)..(62): /note="This region represents a CpG dinucleotide"
  misc_feature (61)..(61): /note="Nucleotide may be methylated to form 5-methylcytosine"
gtcttgagctttagagaagaagtaagtgttcttgtccccattctataaactgggataccacggaccaaagaagacagatgtcttgccccaggtcatatggcaaagtcagcagcagaaacgtg

SEQ ID NO: 881 - DNA, 122 bp, Homo sapiens
  misc_feature (61)..(62): /note="This region represents a CpG dinucleotide"
  misc_feature (61)..(61): /note="Nucleotide may be methylated to form 5-methylcytosine"
ttccgtctaccaggaacggcaggaatgctatgcgttcaatgggactcagcgcgttgtggacgggctcatctacaaccgggaggaatacgtgcattttgacagcgcagtgggggagttcctag

SEQ ID NO: 882 - DNA, 122 bp, Homo sapiens
  misc_feature (61)..(62): /note="This region represents a CpG dinucleotide"
  misc_feature (61)..(61): /note="Nucleotide may be methylated to form 5-methylcytosine"
ctatgtgcacaaacttttcttctggtctgtttgcaagcactcacatacttagagagtgaccgccctggatattaagggaaaattgaactatatataaaataacttcttatacttcttaaccc

SEQ ID NO: 883 - DNA, 122 bp, Homo sapiens
  misc_feature (61)..(62): /note="This region represents a CpG dinucleotide"
  misc_feature (61)..(61): /note="Nucleotide may be methylated to form 5-methylcytosine"
ttgggacagcagtagcaaattgcttcttcgaagtcattgagcatggtgaatcacatcttacgccatctgttgacaacatggaattctgcaggctggaaacttttgagtaaaccctaagaagt

SEQ ID NO: 884 - DNA, 122 bp, Homo sapiens
  misc_feature (61)..(62): /note="This region represents a CpG dinucleotide"
  misc_feature (61)..(61): /note="Nucleotide may be methylated to form 5-methylcytosine"
gcgccgtgaggatgcccacagtatattatgtattcagacacggactccagtaggccccagcgcgcgagcgcgcacacactggcactcacactggcgcgcacacacatgcaacttcaggttcc

SEQ ID NO: 885 - DNA, 122 bp, Homo sapiens
  misc_feature (61)..(62): /note="This region represents a CpG dinucleotide"
  misc_feature (61)..(61): /note="Nucleotide may be methylated to form 5-methylcytosine"
gcacccggggccccgcggtctccacgctggcggcgccagagcggccctggtgccctcccgcggccgcgcctgccgagaaaagcttctctgcctgggagccatcacgccccgccccaggaaac

SEQ ID NO: 886 - DNA, 122 bp, Homo sapiens
  misc_feature (61)..(62): /note="This region represents a CpG dinucleotide"
  misc_feature (61)..(61): /note="Nucleotide may be methylated to form 5-methylcytosine"
gtcacgccatgcaggaaatggctgtgggccctgtgtctaacagacaggcccctgtgggtccgcccaaagctgcacaccctcgggcccctggggacatgcgctctgccactctagatgtgtgt

SEQ ID NO: 887 - DNA, 122 bp, Homo sapiens
  misc_feature (61)..(62): /note="This region represents a CpG dinucleotide"
  misc_feature (61)..(61): /note="Nucleotide may be methylated to form 5-methylcytosine"
cgaactcctgacctcaggcgacccgcctgcctcggccttccaaagtagtgggattacaggcgtgagccaccgcctggcccaggttttttaaatgatgaaatgtcagatacaaaagaaagagt

SEQ ID NO: 888 - DNA, 122 bp, Homo sapiens
  misc_feature (61)..(62): /note="This region represents a CpG dinucleotide"
  misc_feature (61)..(61): /note="Nucleotide may be methylated to form 5-methylcytosine"
actgttgcatgtactgtgataactgattacaagaactggagttattctgtcatactcaatcgagttaaatcaagagatcaggagaggaaaaaagcagcacacagggcacaagggcctgccca

SEQ ID NO: 889 - DNA, 122 bp, Homo sapiens
  misc_feature (61)..(62): /note="This region represents a CpG dinucleotide"
  misc_feature (61)..(61): /note="Nucleotide may be methylated to form 5-methylcytosine"
tctctcctggccggtagggcttccactgtaaagtcggctgccagacgtgttggagctcaccggtatgttacttgtttcttttctctttcttcctttagaacttttcttatctttgacttttg

SEQ ID NO: 890 - DNA, 122 bp, Homo sapiens
  misc_feature (61)..(62): /note="This region represents a CpG dinucleotide"
  misc_feature (61)..(61): /note="Nucleotide may be methylated to form 5-methylcytosine"
gtctggaaaccggccggaaggccacaggcagagaggcctgctcaacagttggatctctatcgcctagcacagaacttcccctttcctcattggcaattaaaaaaacaacaacaaaaaactgc

SEQ ID NO: 891 - DNA, 122 bp, Homo sapiens
  misc_feature (61)..(62): /note="This region represents a CpG dinucleotide"
  misc_feature (61)..(61): /note="Nucleotide may be methylated to form 5-methylcytosine"
actgagcagacataagtctttgaggattaatttcatgctgagggttaaatttcactttcacgataggctaaccattgcctgaggctgcacagataatgaacctgccaagggattagcaagga

SEQ ID NO: 892 - DNA, 122 bp, Homo sapiens
  misc_feature (61)..(62): /note="This region represents a CpG dinucleotide"
  misc_feature (61)..(61): /note="Nucleotide may be methylated to form 5-methylcytosine"
tttgggtttgcctgtatgagaaagtgggattgggccagaaggatatgggcaaagaagggccgccatactgagaggccaagctgctctgtgagatgggaggcaaaggacaacatcccctgtga

SEQ ID NO: 893 - DNA, 122 bp, Homo sapiens
  misc_feature (61)..(62): /note="This region represents a CpG dinucleotide"
  misc_feature (61)..(61): /note="Nucleotide may be methylated to form 5-methylcytosine"
atcacttacgatttttaaatgcaatggtattttcctctattaagttggccaagacttaaacgactgataatatcaagcactgacaaagagaaagcactgagttttgcagggaacgtaaaatg

SEQ ID NO: 894 - DNA, 122 bp, Homo sapiens
  misc_feature (61)..(62): /note="This region represents a CpG dinucleotide"
  misc_feature (61)..(61): /note="Nucleotide may be methylated to form 5-methylcytosine"
gaactgagaaggactagcccatcaacaacattttatggggtggactcttctcagccccatcgtggacagaggtgttgctttcatgcttcaaaggacggctcaggacacacttagctgttgga

SEQ ID NO: 895 - DNA, 122 bp, Homo sapiens
  misc_feature (61)..(62): /note="This region represents a CpG dinucleotide"
  misc_feature (61)..(61): /note="Nucleotide may be methylated to form 5-methylcytosine"
gcaggctgtgttattaagtgcgtgtgtgtgggtgtgccttcctgagctgagccctattatcgcaaggtggcttgctctggccctgaacagtcttatttttggttcgtttggttgggtgttga

SEQ ID NO: 896 - DNA, 122 bp, Homo sapiens
  misc_feature (61)..(62): /note="This region represents a CpG dinucleotide"
  misc_feature (61)..(61): /note="Nucleotide may be methylated to form 5-methylcytosine"
ctggccttctagctctctatttatctccaaagtgtccggttttctttctcctgctagatgcggattccttgagggcagagtcacatctgacgcccctttcccatggggcacagcacgcatgc

SEQ ID NO: 897 - DNA, 122 bp, Homo sapiens
  misc_feature (61)..(62): /note="This region represents a CpG dinucleotide"
  misc_feature (61)..(61): /note="Nucleotide may be methylated to form 5-methylcytosine"
agcaactctctggtatgagaccccctcaggaagaactggaggctctgatggttaaaaatacgtttgcaagtgtgaagtgatttgtacaggacacacataaacagagtcaaggcaggagacga

SEQ ID NO: 898 - DNA, 122 bp, Homo sapiens
  misc_feature (61)..(62): /note="This region represents a CpG dinucleotide"
  misc_feature (61)..(61): /note="Nucleotide may be methylated to form 5-methylcytosine"
agaggttgagagtgcgtttgacttttggttttgccaaacgcgaggttttccgtttccttccggggcaagttgaacctgtccagcccccgtaggctgtgggtcaaaagtgccggtcaaaatgg

SEQ ID NO: 899 - DNA, 122 bp, Homo sapiens
  misc_feature (61)..(62): /note="This region represents a CpG dinucleotide"
  misc_feature (61)..(61): /note="Nucleotide may be methylated to form 5-methylcytosine"
agatcactccattgcattccagcctgagtgacagagcaagactctgtttaaaaaagacaacgaaaaccgaaaaacaaagaacaggtggagtctactgacttgcatgagtcaggtaattcatt

SEQ ID NO: 900 - DNA, 122 bp, Homo sapiens
  misc_feature (61)..(62): /note="This region represents a CpG dinucleotide"
  misc_feature (61)..(61): /note="Nucleotide may be methylated to form 5-methylcytosine"
gctcatctctgtcccaggcactcagctctttttgtggccagagcttttagttttaaaaagcgagagagagagagaggctctactgggcttactatcagagaggaactggggctccctgcttt

SEQ ID NO: 901 - DNA, 122 bp, Homo sapiens
  misc_feature (61)..(62): /note="This region represents a CpG dinucleotide"
  misc_feature (61)..(61): /note="Nucleotide may be methylated to form 5-methylcytosine"
tgattcataataatgaatcacaaattcatgatgatgttaatttatttgctgaaacagtaacgtcttttatgttattcttggtggaagctgatgcccaggtgcctcccacctctggccacaag

SEQ ID NO: 902 - DNA, 122 bp, Homo sapiens
  misc_feature (61)..(62): /note="This region represents a CpG dinucleotide"
  misc_feature (61)..(61): /note="Nucleotide may be methylated to form 5-methylcytosine"
tgtatttttcgttttccagattcattcatttaacaaatatcagttgagcactttccatgccgtagggcctgtacaaggcacatagcattctagacatctgaagcatcaaaactaatcatttt

SEQ ID NO: 903 - DNA, 122 bp, Homo sapiens
  misc_feature (61)..(62): /note="This region represents a CpG dinucleotide"
  misc_feature (61)..(61): /note="Nucleotide may be methylated to form 5-methylcytosine"
ggacaacctgtccagcagcacgggcgaggccccgtcccgggcagtcggacatcatggggacggccccaggccctggctgcgtggccagaagaaaagcctgggcaagaaaagggaggagtcgc

SEQ ID NO: 904 - DNA, 122 bp, Homo sapiens
  misc_feature (61)..(62): /note="This region represents a CpG dinucleotide"
  misc_feature (61)..(61): /note="Nucleotide may be methylated to form 5-methylcytosine"
gtccctggcactgtggagcttagaggctaatgaggtggcaggtgcttacactttagaaaccgttgtgaggaatagctagtggtagttaaatgatacagtgatagttaacagagaggaaagct

SEQ ID NO: 905 - DNA, 122 bp, Homo sapiens
  misc_feature (61)..(62): /note="This region represents a CpG dinucleotide"
  misc_feature (61)..(61): /note="Nucleotide may be methylated to form 5-methylcytosine"
agctggcgtgcgccaagcagccactaggagccacttcatgccaatgctccacttcctgcacgccacagtcacgttcagctgcaaaagtagttatgctttgggtttttttggttttttttttt

SEQ ID NO: 906 - DNA, 122 bp, Homo sapiens
  misc_feature (61)..(62): /note="This region represents a CpG dinucleotide"
  misc_feature (61)..(61): /note="Nucleotide may be methylated to form 5-methylcytosine"
cagcgtggctgggtgttatgtgctgctgctcctgctagaacctcagaagtgtgagcagtgcgtcaagatgagggaccaggcttctaagctatagcccagctaagccccccagtgccaatccc

SEQ ID NO: 907 - DNA, 122 bp, Homo sapiens
  misc_feature (61)..(62): /note="This region represents a CpG dinucleotide"
  misc_feature (61)..(61): /note="Nucleotide may be methylated to form 5-methylcytosine"
cggtcagtgtttgcagggccatctggccatcagagctccactttctagacaaagtggttgcggcctgtgttctccataaagctgcctcgcgtggcaggaaacaacaataattatccttcctc

SEQ ID NO: 908 - DNA, 122 bp, Homo sapiens
  misc_feature (61)..(62): /note="This region represents a CpG dinucleotide"
  misc_feature (61)..(61): /note="Nucleotide may be methylated to form 5-methylcytosine"
ctcgcccctcgctctgctaccatttccttccgtttctgcttcgcttggcgatgcaaaacgcgcgaggctcacggcagagggccgaggccacgggactctcagggccgggcccgcccctcggc

SEQ ID NO: 909 - DNA, 122 bp, Homo sapiens
  misc_feature (61)..(62): /note="This region represents a CpG dinucleotide"
  misc_feature (61)..(61): /note="Nucleotide may be methylated to form 5-methylcytosine"
gctggaaacagagacagggaaagggataggggaagaatgtacaacattttgattttgtatcgactgatttttaattgcagcaacagaaaatggacatggcacagcaggggtattgaatacac

SEQ ID NO: 910 - DNA, 122 bp, Homo sapiens
  misc_feature (61)..(62): /note="This region represents a CpG dinucleotide"
  misc_feature (61)..(61): /note="Nucleotide may be methylated to form 5-methylcytosine"
ttaatcatggcattcttaaggaatcactgcaattaaccaggtagaccaatttagttggaccgtggtctgtttttttagtatgtaaaaacatgggttcaggggattaaaacaactcaacattc

SEQ ID NO: 911 - DNA, 122 bp, Homo sapiens
  misc_feature (61)..(62): /note="This region represents a CpG dinucleotide"
  misc_feature (61)..(61): /note="Nucleotide may be methylated to form 5-methylcytosine"
tctgctctccgaccatggacctggtcccagcctctactggctgtgttgcaatgtagtgatcgtgaataagaggtgcagtcaggaagagtcatcttcgctagtgcacaaacaaaagtgtctgt

SEQ ID NO: 912 - DNA, 122 bp, Homo sapiens
  misc_feature (61)..(62): /note="This region represents a CpG dinucleotide"
  misc_feature (61)..(61): /note="Nucleotide may be methylated to form 5-methylcytosine"
gctaaaacaaaaggaaacaaaaaacgtcatctttttaaggaaggaacaagggtcagaatacgctctgtctctgatgtttcaaaatgattttgtttgcagccaggagaatgggttagaagaat

SEQ ID NO: 913 - DNA, 122 bp, Homo sapiens
  misc_feature (61)..(62): /note="This region represents a CpG dinucleotide"
  misc_feature (61)..(61): /note="Nucleotide may be methylated to form 5-methylcytosine"
actttagctgtttcgttctgtgtttgcacattagatcaaagaaatcggctggacagatgtcgggggctggaccggccaaggaggctccattcttgggacaaaacggtaacttccaaatctca

SEQ ID NO: 914 - DNA, 122 bp, Homo sapiens
  misc_feature (61)..(62): /note="This region represents a CpG dinucleotide"
  misc_feature (61)..(61): /note="Nucleotide may be methylated to form 5-methylcytosine"
cgtcatccggaaggctgccataagcctgcgtttcgcagagctgcgctgaggctcccgtgtcgcggccgtccggccggcgcgctgatgtggctgcaaacctgggtatcagatcagccgccgtg

SEQ ID NO: 915 - DNA, 122 bp, Homo sapiens
  misc_feature (61)..(62): /note="This region represents a CpG dinucleotide"
  misc_feature (61)..(61): /note="Nucleotide may be methylated to form 5-methylcytosine"
agtcggcagtggggcacaaaaaggatttcaaagggctctgaaaaccgaaagcccctaacccggatacgaggggcctcgagagaaaggtttgtcctcccctgcagcccaggcgcgggccaggg

SEQ ID NO: 916 - DNA, 122 bp, Homo sapiens
  misc_feature (61)..(62): /note="This region represents a CpG dinucleotide"
  misc_feature (61)..(61): /note="Nucleotide may be methylated to form 5-methylcytosine"
gacctagacctactgtatcagaatctctgtgctggtcctgagaatgtgcattctcaacagcgcctcacattccccaccccaattcttctgcagctaacgtttgagagcgctggtctggtgcc

SEQ ID NO: 917 - DNA, 122 bp, Homo sapiens
  misc_feature (61)..(62): /note="This region represents a CpG dinucleotide"
  misc_feature (61)..(61): /note="Nucleotide may be methylated to form 5-methylcytosine"
gtctgttgcctgtattcccagcactgcctagcgtcttgttcacagtaggaagataatgagcgattgctgaatggatacgttaaatacttcttcctaaaccttatgcttttttaagttcttcc

SEQ ID NO: 918 - DNA, 122 bp, Homo sapiens
  misc_feature (61)..(62): /note="This region represents a CpG dinucleotide"
  misc_feature (61)..(61): /note="Nucleotide may be methylated to form 5-methylcytosine"
tggggtcatcttatgctgggcaccgcctctccaattatctgcaaaaagtgatagcagtcgcgcttttctttaggaggcgatgtgatgtgtaatggtggaaaagacgttcaatgaaaaggcac

SEQ ID NO: 919 - DNA, 122 bp, Homo sapiens
  misc_feature (61)..(62): /note="This region represents a CpG dinucleotide"
  misc_feature (61)..(61): /note="Nucleotide may be methylated to form 5-methylcytosine"
acgcccggcttactgacaattttacctgccacattgcccttccttagatttcccaagtaccgtctttgttctcatcaataagctaccagcactgctgaggaacaggtaggcttgagcaggac

SEQ ID NO: 920 - DNA, 122 bp, Homo sapiens
  misc_feature (61)..(62): /note="This region represents a CpG dinucleotide"
  misc_feature (61)..(61): /note="Nucleotide may be methylated to form 5-methylcytosine"
tacgccccgcagaagaagttcggccctgtggtggccccaaagcccaaagtgaatcccttccggcccggggacagcgagcctcccccggcacccggggcccagcgcgcacagatgggccgggt

SEQ ID NO: 921 - DNA, 122 bp, Homo sapiens
  misc_feature (61)..(62): /note="This region represents a CpG dinucleotide"
  misc_feature (61)..(61): /note="Nucleotide may be methylated to form 5-methylcytosine"
tggctgtgacacgcgggccagctgttgtgagaggtggagcgcggcgggcgttttccaggacggaggctgagggcaggttgacgggcctgtggagaatgtgtgctgcttcctgcaggcgacca

SEQ ID NO: 922 - DNA, 122 bp, Homo sapiens
  misc_feature (61)..(62): /note="This region represents a CpG dinucleotide"
  misc_feature (61)..(61): /note="Nucleotide may be methylated to form 5-methylcytosine"
gacttctgcaacacagacgcacaccacattcacagaaaatgaagatgcaggaaagaaccacggggagacagtgctcacccagagaacatgtgcaaggaaaagcattctcctaggcccagaca

SEQ ID NO: 923 - DNA, 122 bp, Homo sapiens
  misc_feature (61)..(62): /note="This region represents a CpG dinucleotide"
  misc_feature (61)..(61): /note="Nucleotide may be methylated to form 5-methylcytosine"
tcctccatcctcacccgccaaactgtgcgttgttccgctggttgatggcctgctggcctgcggcgtctgtcagtgtgtgctgttaggccgctgcattcctctcgatgtccagccgttgtgtc

SEQ ID NO: 924 - DNA, 122 bp, Homo sapiens
  misc_feature (61)..(62): /note="This region represents a CpG dinucleotide"
  misc_feature (61)..(61): /note="Nucleotide may be methylated to form 5-methylcytosine"
attagaaattcattgctgcaaggattcactgtgactgacaagagcttgctgcaaccttcacgagtgtgccatggtaaaaaggttgtgagccactgcaaactatagcatcttctttcttttgt

SEQ ID NO: 925 - DNA, 122 bp, Homo sapiens
  misc_feature (61)..(62): /note="This region represents a CpG dinucleotide"
  misc_feature (61)..(61): /note="Nucleotide may be methylated to form 5-methylcytosine"
gctgagagtcaaacagctgagtcaggccccaaagttcacatgacatcatagaatagctgtcgatgagctttggatttgacgatgagtttcccagcagcctgggggagaaggaaagtggaaca

SEQ ID NO: 926 - DNA, 122 bp, Homo sapiens
  misc_feature (61)..(62): /note="This region represents a CpG dinucleotide"
  misc_feature (61)..(61): /note="Nucleotide may be methylated to form 5-methylcytosine"
atgattcagttccttgtgcaatgatttgtttattgtctatttcctctattagactgtaaacgtcattaagagaggagcaatgctgatgcttcctaagagggtgcccaacatacagtagatgc

SEQ ID NO: 927 - DNA, 122 bp, Homo sapiens
  misc_feature (61)..(62): /note="This region represents a CpG dinucleotide"
  misc_feature (61)..(61): /note="Nucleotide may be methylated to form 5-methylcytosine"
gtcccctccctttccaggttggccaggttttcccccacaaggaaatcagcagccatctcccggagacagtccaggcccattcagccaccgctggaggccagcagttttcaaactttattttc

SEQ ID NO: 928 - DNA, 122 bp, Homo sapiens
  misc_feature (61)..(62): /note="This region represents a CpG dinucleotide"
  misc_feature (61)..(61): /note="Nucleotide may be methylated to form 5-methylcytosine"
ggtactgagccttgaaaatgaaaataaaagcaaggcgagggcaagaccaaccaatcacagcgcagatacaagagcccagcagccgagaaattcccaggggcccctgcactcacctctcggtg

SEQ ID NO: 929 - DNA, 122 bp, Homo sapiens
  misc_feature (61)..(62): /note="This region represents a CpG dinucleotide"
  misc_feature (61)..(61): /note="Nucleotide may be methylated to form 5-methylcytosine"
gggaaagatcttacacaacacatgtatgtgaaattattcaacatctctttaagcaacaggcgaagtaagtcacttcctcttacacctacattgactgtgtgctcaccactcccacttatact

SEQ ID NO: 930 - DNA, 122 bp, Homo sapiens
  misc_feature (61)..(62): /note="This region represents a CpG dinucleotide"
  misc_feature (61)..(61): /note="Nucleotide may be methylated to form 5-methylcytosine"
catccgcctcgtgttccagtgcggccacggcgcatgcgccccctgcggctccgcgctcagcgcctgccccatctgccgccagcccatccgcgaccgcatccagatcttcgtgtgagccgcgc

SEQ ID NO: 931 - DNA, 122 bp, Homo sapiens
  misc_feature (61)..(62): /note="This region represents a CpG dinucleotide"
  misc_feature (61)..(61): /note="Nucleotide may be methylated to form 5-methylcytosine"
gaagcaggcaccccagacatcaaaaaaaaaaaaaaagtgcccttaaaaaaccaggataaacgtttaccaaaaacacgagggcttctgtctttataaggtgatccttgcactcccttccctgc

SEQ ID NO: 932 - DNA, 122 bp, Homo sapiens
  misc_feature (61)..(62): /note="This region represents a CpG dinucleotide"
  misc_feature (61)..(61): /note="Nucleotide may be methylated to form 5-methylcytosine"
tgtcgaaaatcccttaggaagtttctccttaggagagggaaagaagttctaaaacttgaacgtctagctacgggtggattcaggttttgtaatttgaggaatcctctttaagaaaaggaata

SEQ ID NO: 933 - DNA, 122 bp, Homo sapiens
  misc_feature (61)..(62): /note="This region represents a CpG dinucleotide"
  misc_feature (61)..(61): /note="Nucleotide may be methylated to form 5-methylcytosine"
ctggcaggtatttcctgcatgcctgcattccagtgctataacctgctcaaggacacagagcgctccttacttagctctgtagcctcagcacctagcgcaatcctttatacacagtaggcatc

SEQ ID NO: 934 - DNA, 122 bp, Homo sapiens
  misc_feature (61)..(62): /note="This region represents a CpG dinucleotide"
  misc_feature (61)..(61): /note="Nucleotide may be methylated to form 5-methylcytosine"
gctctggtcatttgaatattacataccactcatgtacctgccaccagtcagaaaaatagccgtcattttgtgaaaccagtgtgtgtgtgtgtgtgtgtgtgtgtgtgtgtgtgtgtgtttta

SEQ ID NO: 935 - DNA, 122 bp, Homo sapiens
  misc_feature (61)..(62): /note="This region represents a CpG dinucleotide"
  misc_feature (61)..(61): /note="Nucleotide may be methylated to form 5-methylcytosine"
ctcaagcgatcctcccatctcagcctcccaaagtgctgagattacaggtgtgagccaccacgcccagtctagagagttttcataccacaaagttgaaggtgaacctgtagaacccataaact

SEQ ID NO: 936 - DNA, 122 bp, Homo sapiens
  misc_feature (61)..(62): /note="This region represents a CpG dinucleotide"
  misc_feature (61)..(61): /note="Nucleotide may be methylated to form 5-methylcytosine"
aagttctggaggaagtggcacagtggcaccagttgcttaagagatccactggaggccagacgcagtgactcacacctgtaatgccagcactttttaaggccgaggtgggcagatcacctgag

SEQ ID NO: 937 - DNA, 122 bp, Homo sapiens
  misc_feature (61)..(62): /note="This region represents a CpG dinucleotide"
  misc_feature (61)..(61): /note="Nucleotide may be methylated to form 5-methylcytosine"
tacctcatttgagtgtgttatttcctggattctggtaaccatactgctattctctatctccgtcagttcaattgttttgatttttagattgttttgatttttttaagattttttagattttt

SEQ ID NO: 938 - DNA, 122 bp, Homo sapiens
  misc_feature (61)..(62): /note="This region represents a CpG dinucleotide"
  misc_feature (61)..(61): /note="Nucleotide may be methylated to form 5-methylcytosine"
atgcaggtgagaaatgattggggccaatagcaacagtggcacttctcctgaggcatctatcgtacattgccttgttatttgtgtacatattttaaaatttcctgaaatgtcttacctctctt

SEQ ID NO: 939 - DNA, 122 bp, Homo sapiens
  misc_feature (61)..(62): /note="This region represents a CpG dinucleotide"
  misc_feature (61)..(61): /note="Nucleotide may be methylated to form 5-methylcytosine"
gtgattgcagagggccttatttaataaatcacctactcccgggattcgagaataaacaaacgctatgagcagtgtgaagctgccatcacccctcctgctctgcatttgctttctcacctttg

SEQ ID NO: 940 - DNA, 122 bp, Homo sapiens
  misc_feature (61)..(62): /note="This region represents a CpG dinucleotide"
  misc_feature (61)..(61): /note="Nucleotide may be methylated to form 5-methylcytosine"
gattaaatgaagcacttaaatgcctaattgatgcagatggctccaagaatttaacatttacgaaatattcactatattttttaggttaagggtacaaaaccattgtgagtacactaaggaat

SEQ ID NO: 941 - DNA, 122 bp, Homo sapiens
  misc_feature (61)..(62): /note="This region represents a CpG dinucleotide"
  misc_feature (61)..(61): /note="Nucleotide may be methylated to form 5-methylcytosine"
acgtggctgaacttgcacaactgtctaatcctgtgtttccacaccacttgtgacagtgagcgttgcttgacaggggtttatgcaaggacaacgtgtgtgcgcctacgccgtgtgcacgtgtg

SEQ ID NO: 942 - DNA, 122 bp, Homo sapiens
  misc_feature (61)..(62): /note="This region represents a CpG dinucleotide"
  misc_feature (61)..(61): /note="Nucleotide may be methylated to form 5-methylcytosine"
ttttacctaactggctggaggcccgccagaggccacaagaaccctccagccctaagtctgcgaagttgctgatgtcacgtcctttcccaaactgagaccaatcagtgaggaagccttggagt

SEQ ID NO: 943 - DNA, 122 bp, Homo sapiens
  misc_feature (61)..(62): /note="This region represents a CpG dinucleotide"
  misc_feature (61)..(61): /note="Nucleotide may be methylated to form 5-methylcytosine"
ccgttcccggcagctcagcacttagggccagagagcggcagaggcccagaacccaaagcccggcagcgcaggcccagtagcccgcagctcccagaatactacacccggctctaggccccgct

SEQ ID NO: 944 - DNA, 122 bp, Homo sapiens
  misc_feature (61)..(62): /note="This region represents a CpG dinucleotide"
  misc_feature (61)..(61): /note="Nucleotide may be methylated to form 5-methylcytosine"
tacataagctggggttaagctattgccttaattttagccccacccatgtacactctgtgacgctgcctgggattctacaaatcacatttatcttttgccactaagctccctgttaggatctg

SEQ ID NO: 945 - DNA, 122 bp, Homo sapiens
  misc_feature (61)..(62): /note="This region represents a CpG dinucleotide"
  misc_feature (61)..(61): /note="Nucleotide may be methylated to form 5-methylcytosine"
atcctggtttcataagaagtcagagggaaggaaatattcatcactgttgaaatcaccatgcgttgcacaaggcttcttgagaaagagatgtacagtatataagagctgattgatggaaggtt

SEQ ID NO: 946 - DNA, 122 bp, Homo sapiens
  misc_feature (61)..(62): /note="This region represents a CpG dinucleotide"
  misc_feature (61)..(61): /note="Nucleotide may be methylated to form 5-methylcytosine"
tggaagggtgggtggcactgttttggtaattgtctcttttctgcatttcactctccacatcggaaatacactccccatataccatgaacaaccaaaagggaaattctgaaacctgttcacat

SEQ ID NO: 947 - DNA, 122 bp, Homo sapiens
  misc_feature (61)..(62): /note="This region represents a CpG dinucleotide"
  misc_feature (61)..(61): /note="Nucleotide may be methylated to form 5-methylcytosine"
tctggttggacagttaccttcactgagcatacacttaaatatagctcctacattcaccatcgtctacatgcataaactgagaagggaagcattattaccatgttatctagatatgaacttga

SEQ ID NO: 948 - DNA, 122 bp, Homo sapiens
  misc_feature (61)..(62): /note="This region represents a CpG dinucleotide"
  misc_feature (61)..(61): /note="Nucleotide may be methylated to form 5-methylcytosine"
ttactactatggcactttggggccattattaagtataataaggattaaacacagcaccaccgagatggctattaagtgactcatgaatagggagtgtagacactggacaaggagaagattta

SEQ ID NO: 949 - DNA, 122 bp, Homo sapiens
  misc_feature (61)..(62): /note="This region represents a CpG dinucleotide"
  misc_feature (61)..(61): /note="Nucleotide may be methylated to form 5-methylcytosine"
tcctccaccctacaaatcctttgctttctgaaatgggtggctgtgcttgctcatccttcacgttatgctgacccctagaggcagtacagtgcagctcttcagtgctgagcccaggaccttga

SEQ ID NO: 950 - DNA, 122 bp, Homo sapiens
  misc_feature (61)..(62): /note="This region represents a CpG dinucleotide"
  misc_feature (61)..(61): /note="Nucleotide may be methylated to form 5-methylcytosine"
acgaaaaggggctttcttccgttgaatgagcgtttggtggggagcccgggaggtcagtggcgggaccgttattggcatttatttctctccgtgtactgagtttttcttcagaagaacattct

SEQ ID NO: 951 - DNA, 122 bp, Homo sapiens
  misc_feature (61)..(62): /note="This region represents a CpG dinucleotide"
  misc_feature (61)..(61): /note="Nucleotide may be methylated to form 5-methylcytosine"
gttttataagtctccattgaagaagggaatatggacaaaattattcattttcaattacaacgtcaccaaacgtatgtctagttatttaggattattttaatcagtactctttgtaagctatc

SEQ ID NO: 952 - DNA, 122 bp, Homo sapiens
  misc_feature (61)..(62): /note="This region represents a CpG dinucleotide"
  misc_feature (61)..(61): /note="Nucleotide may be methylated to form 5-methylcytosine"
aaaggatggatttgttgtcccaggcccagggtcttactggcatttggtgctgggacagagcgggcaggatgcacaatgtcccgcaccaaacaggctacataatgagtcatctccaaaaaatg

SEQ ID NO: 953 - DNA, 122 bp, Homo sapiens
  misc_feature (61)..(62): /note="This region represents a CpG dinucleotide"
  misc_feature (61)..(61): /note="Nucleotide may be methylated to form 5-methylcytosine"
accaatatttaaacatcagtactagttgtcctgggagaaagggaaaggagttttatgttgcgtgagaggcccatcctgtgtaattggagcagggcacacttgcttcctgttgagttaactca

SEQ ID NO: 954 - DNA, 122 bp, Homo sapiens
  misc_feature (61)..(62): /note="This region represents a CpG dinucleotide"
  misc_feature (61)..(61): /note="Nucleotide may be methylated to form 5-methylcytosine"
aggctgggcagaggggacagtcatctttgtggaggggtggggcatcccaagtcagcttctcgcgggcctggctgtcggagggcacggccgaacccttgcccctcttggcgtacgtgctgctc

SEQ ID NO: 955 - DNA, 122 bp, Homo sapiens
  misc_feature (61)..(62): /note="This region represents a CpG dinucleotide"
  misc_feature (61)..(61): /note="Nucleotide may be methylated to form 5-methylcytosine"
tgaacttgttcgtctgtctcccatagcagaaacaaggacaaagacttctgttttattctgcgggaggccccagtacctagaactgtgcccagtacatagaagatgctcatgaataagtaaac

SEQ ID NO: 956 - DNA, 122 bp, Homo sapiens
  misc_feature (61)..(62): /note="This region represents a CpG dinucleotide"
  misc_feature (61)..(61): /note="Nucleotide may be methylated to form 5-methylcytosine"
acataattgtgctactacagaaaggtgacacccacctccttcagcctttgtaaaatttcacgagtgcctcacattgacaaaacctaaacttacgaggggatcacatgggaatctgagaaatg

SEQ ID NO: 957 - DNA, 122 bp, Homo sapiens
  misc_feature (61)..(62): /note="This region represents a CpG dinucleotide"
  misc_feature (61)..(61): /note="Nucleotide may be methylated to form 5-methylcytosine"
gctatattcccagaattgtgttaacttcctgagttcaagtcaaggctctatgatttacttcgtgatttctggtaaattacttaatcccacctgtaacattgtgaaaccaatacttcctactt

SEQ ID NO: 958 - DNA, 122 bp, Homo sapiens
  misc_feature (61)..(62): /note="This region represents a CpG dinucleotide"
  misc_feature (61)..(61): /note="Nucleotide may be methylated to form 5-methylcytosine"
aattttttttaatttttaaaaatttgttgaaaaaccatcagccctgttaagttgctcacacgtgctgttgcagccccagctcacccggtagtaaatcctgctgacacagggtcccccacagc

SEQ ID NO: 959 - DNA, 122 bp, Homo sapiens
  misc_feature (61)..(62): /note="This region represents a CpG dinucleotide"
  misc_feature (61)..(61): /note="Nucleotide may be methylated to form 5-methylcytosine"
cctgagaggaagcacatctgctgtcgggcgtaaccacagtgaaaacgctgcacacgggcacgaaaggacagagagtgtctgtacagcacggtccaaaacacaaaacactggccatggtccaa

SEQ ID NO: 960 - DNA, 122 bp, Homo sapiens
  misc_feature (61)..(62): /note="This region represents a CpG dinucleotide"
  misc_feature (61)..(61): /note="Nucleotide may be methylated to form 5-methylcytosine"
aaaattggtttaatgatcaaatgtaagagtaaatgagttccggcacatgtggtccacatccgggtttttagcagaacataggtattatgatgtctgtcacagttcactctaaatctcagctg

SEQ ID NO: 961 - DNA, 122 bp, Homo sapiens
  misc_feature (61)..(62): /note="This region represents a CpG dinucleotide"
  misc_feature (61)..(61): /note="Nucleotide may be methylated to form 5-methylcytosine"
tccatcaaggccacacttttggcaggtggccctcttcataaagttaccctctcaatttttcgtaagcactccctcccctctaccccttgaagcctaggagtgtaatggctcccagatgtcat

SEQ ID NO: 962 - DNA, 122 bp, Homo sapiens
  misc_feature (61)..(62): /note="This region represents a CpG dinucleotide"
  misc_feature (61)..(61): /note="Nucleotide may be methylated to form 5-methylcytosine"
agaatgaatgtgcatattcagcacactaagcactctaagagccgagagagcttcctgaaacgcgtgaaggaaaatgatcagaaaaagagggaagccaaagagaaaggtacctggattcaact

SEQ ID NO: 963 - DNA, 122 bp, Homo sapiens
  misc_feature (61)..(62): /note="This region represents a CpG dinucleotide"
  misc_feature (61)..(61): /note="Nucleotide may be methylated to form 5-methylcytosine"
ttcccgcccctgccctgcccttcagggaagccgggagtggcggctgggcagtggccttcccgcgtgcccacatccaggcggagtggagcggcgctcacgggcagggccaggcgtccagtggt

SEQ ID NO: 964 - DNA, 122 bp, Homo sapiens
  misc_feature (61)..(62): /note="This region represents a CpG dinucleotide"
  misc_feature (61)..(61): /note="Nucleotide may be methylated to form 5-methylcytosine"
gtcgactttcatgcatgagttagagagaagaaaccagaagggggcagctgaggacggtcacgtagagcagcatcagcccaggttgcgtcattcattagtttgcgttcaaaatgagtagggaa

SEQ ID NO: 965 - DNA, 122 bp, Homo sapiens
  misc_feature (61)..(62): /note="This region represents a CpG dinucleotide"
  misc_feature (61)..(61): /note="Nucleotide may be methylated to form 5-methylcytosine"
ggaattgagaggggagctagggaagtctgtccacagcccagctgggttagagctgagacacgaccagctcctatctttatcttttttaaaaaattcaagatcaatacaggtttatcatttct

SEQ ID NO: 966 - DNA, 122 bp, Homo sapiens
  misc_feature (61)..(62): /note="This region represents a CpG dinucleotide"
  misc_feature (61)..(61): /note="Nucleotide may be methylated to form 5-methylcytosine"
ataaactgttataacacaactaagtgattcgctgtcatatttaataaacattaagctatgcgggtttttttttctttttttttaactgcctgatggggagcatacaccactgagaggattgc

SEQ ID NO: 967 - DNA, 122 bp, Homo sapiens
  misc_feature (61)..(62): /note="This region represents a CpG dinucleotide"
  misc_feature (61)..(61): /note="Nucleotide may be methylated to form 5-methylcytosine"
gtcagggctgcaggcggctgtgacactccggaggcctcgacagaggggtcccaggcgcagcgtacccgggctcctcttgcctcagcggagcgtcccacggcagtcccggacccgcgcctctc

SEQ ID NO: 968 - DNA, 122 bp, Homo sapiens
  misc_feature (61)..(62): /note="This region represents a CpG dinucleotide"
  misc_feature (61)..(61): /note="Nucleotide may be methylated to form 5-methylcytosine"
tttttcctacaactgtatatatataaaaatatatttaaacatatatttatatatcatatccgtaatgtaaataaatgtctagcatgtttttcaagactcattaatgcagttgcctctttcct

SEQ ID NO: 969 - DNA, 122 bp, Homo sapiens
  misc_feature (61)..(62): /note="This region represents a CpG dinucleotide"
  misc_feature (61)..(61): /note="Nucleotide may be methylated to form 5-methylcytosine"
ctctccccactagaaggcaggtctcaggagggcaaggacccggcctgtccagcttccagccgtagccccagggccgggtgtgcagtagatactcaacaagccttctttcctcccaccagcct

SEQ ID NO: 970 - DNA, 122 bp, Homo sapiens
  misc_feature (61)..(62): /note="This region represents a CpG dinucleotide"
  misc_feature (61)..(61): /note="Nucleotide may be methylated to form 5-methylcytosine"
gcagactcgaagcttcacacctttattgtgtccgggggcgtccggggcctcaggggtgttcgtagcccgtgggcagagggttcacgtggctattgtggaacagagtgtggttgccgtccccc

SEQ ID NO: 971 - DNA, 122 bp, Homo sapiens
  misc_feature (61)..(62): /note="This region represents a CpG dinucleotide"
  misc_feature (61)..(61): /note="Nucleotide may be methylated to form 5-methylcytosine"
cggcgcgcccggggcccgggagcgcggggaggggtgaaagggcggggccggcttgcgtggcgcctgcgttctgcgtgtccgcagagcccggagagtccctgataatctaagactcatagcca

SEQ ID NO: 972 - DNA, 122 bp, Homo sapiens
  misc_feature (61)..(62): /note="This region represents a CpG dinucleotide"
  misc_feature (61)..(61): /note="Nucleotide may be methylated to form 5-methylcytosine"
agcaaaggaatcttctctccagtcctgcctgtcacttactccggctcacgctgaagcgttcgcgtttacggttccaaaaccaagactgaaaggcagtcttcacatatttattgtttataccc

SEQ ID NO: 973 - DNA, 122 bp, Homo sapiens
  misc_feature (61)..(62): /note="This region represents a CpG dinucleotide"
  misc_feature (61)..(61): /note="Nucleotide may be methylated to form 5-methylcytosine"
ggggttgggcaggcagatccttcagcccgagtggtgtggcaagctggagggagggggaggcgtggcaccaactctggggaagtttcatgacagcgaagctcaatcatcacagctgaacaccc

SEQ ID NO: 974 - DNA, 122 bp, Homo sapiens
  misc_feature (61)..(62): /note="This region represents a CpG dinucleotide"
  misc_feature (61)..(61): /note="Nucleotide may be methylated to form 5-methylcytosine"
ttcctgcttcctggaggctaagttccactaggcattacggtcacactggactggagaggacgagagacacagagagagggaaagatcttaccgtggagttcagaacaatgagcatgacagcc

SEQ ID NO: 975 - DNA, 122 bp, Homo sapiens
  misc_feature (61)..(62): /note="This region represents a CpG dinucleotide"
  misc_feature (61)..(61): /note="Nucleotide may be methylated to form 5-methylcytosine"
gatttcagaaatgtcttatgaaagaaatgagaatgtttccctgtgcgagataaaactgaacggttaacgttaaggtgctataaactagacaaagctggaaaggcacatcatgtaactagaaa

SEQ ID NO: 976 - DNA, 122 bp, Homo sapiens
  misc_feature (61)..(62): /note="This region represents a CpG dinucleotide"
  misc_feature (61)..(61): /note="Nucleotide may be methylated to form 5-methylcytosine"
ggatttttaggaaccgtattagcaagttcctcagttcctcaccatgtgaacctctcttcacgacttagtaactggcttcctctagagtgactaatccaagagacagcaaggattgacagcca

SEQ ID NO: 977 - DNA, 122 bp, Homo sapiens
  misc_feature (61)..(62): /note="This region represents a CpG dinucleotide"
  misc_feature (61)..(61): /note="Nucleotide may be methylated to form 5-methylcytosine"
ctcggagatgaaataggatgaaagcctagctgtttggggcgggaggcgagattgggggcgcggtgctggggtcttcgatgttttaccagtatttctaggtgaagcagcatattggaagtcat

SEQ ID NO: 978 - DNA, 122 bp, Homo sapiens
  misc_feature (61)..(62): /note="This region represents a CpG dinucleotide"
  misc_feature (61)..(61): /note="Nucleotide may be methylated to form 5-methylcytosine"
tcctgaagtgctaggattacaggcgtgagccatggtgcccggcctgttgatgagattctacgtgaaatatattgggcgttacctaagcactcagtcagtggtagttcttatagttgttgctt

SEQ ID NO: 979 - DNA, 122 bp, Homo sapiens
  misc_feature (61)..(62): /note="This region represents a CpG dinucleotide"
  misc_feature (61)..(61): /note="Nucleotide may be methylated to form 5-methylcytosine"
caagatccatcagatctgcccctacttttaaacaggtaacacaaatgcagaacttttcaacggggtaaaggagcaacaaatatgccttaaatagccaaaggtttcatccagcagaggttaac

SEQ ID NO: 980 - DNA, 122 bp, Homo sapiens
  misc_feature (61)..(62): /note="This region represents a CpG dinucleotide"
  misc_feature (61)..(61): /note="Nucleotide may be methylated to form 5-methylcytosine"
gacaggtggatatagcagggaagaggggatttaacaggggaagctagggggcagcagagacggggggaagaaagaggcagaactatatgaaaattggagacaaatattgggcagaaagaaga

SEQ ID NO: 981 - DNA, 122 bp, Homo sapiens
  misc_feature (61)..(62): /note="This region represents a CpG dinucleotide"
  misc_feature (61)..(61): /note="Nucleotide may be methylated to form 5-methylcytosine"
ctgcaaacacatttgagaaatgctgacctaagcaagcccccaccactaccagtgaggaaacggaggctcagccaagggtgtcattccaaaccacataaccaggctctcagaacagaactcta

SEQ ID NO: 982 - DNA, 122 bp, Homo sapiens
  misc_feature (61)..(62): /note="This region represents a CpG dinucleotide"
  misc_feature (61)..(61): /note="Nucleotide may be methylated to form 5-methylcytosine"
ccagtgcatgtcaccgagcttgcctggccatgactcatgcaggaaaggctgcacaggtgacgccaggtgtggacatggcagaaggaacggaagatgaggttaggcttggcttccttgcaatc

SEQ ID NO: 983 - DNA, 122 bp, Homo sapiens
  misc_feature (61)..(62): /note="This region represents a CpG dinucleotide"
  misc_feature (61)..(61): /note="Nucleotide may be methylated to form 5-methylcytosine"
tctttaactggcatccctgaagataaagtaaaacatgtcaacatctgttcccattcacaccgattttaatttaccaaaagagctttgctattttcagagcagactccagagcacaatgacag

SEQ ID NO: 984 - DNA, 122 bp, Homo sapiens
  misc_feature (61)..(62): /note="This region represents a CpG dinucleotide"
  misc_feature (61)..(61): /note="Nucleotide may be methylated to form 5-methylcytosine"
tctgtgggacagataatgggtgatcgacatgcactctgcaccaggagtggttagaagatccgccgagcttccttactgaaagtggctgctgcgggcaagttctgtttccgccgagcactctt

SEQ ID NO: 985 - DNA, 122 bp, Homo sapiens
  misc_feature (61)..(62): /note="This region represents a CpG dinucleotide"
  misc_feature (61)..(61): /note="Nucleotide may be methylated to form 5-methylcytosine"
taaaaggccacacactgagaatgccagtccccagggacttagggtgaatttctccaaagacgtgtgtgtgtgtgtgtgtgtgtgtgtgtgtgtgtgtgtgtacatgttctccccagggtact

SEQ ID NO: 986 - DNA, 122 bp, Homo sapiens
  misc_feature (61)..(62): /note="This region represents a CpG dinucleotide"
  misc_feature (61)..(61): /note="Nucleotide may be methylated to form 5-methylcytosine"
actgagtctccttaggtaaatcacagaattctctgactcatctagaagtgatgataatgacggttacttgatagagttgttcataaggatctaatgaatgcggaataaatgcatatctctgg

SEQ ID NO: 987 - DNA, 122 bp, Homo sapiens
  misc_feature (61)..(62): /note="This region represents a CpG dinucleotide"
  misc_feature (61)..(61): /note="Nucleotide may be methylated to form 5-methylcytosine"
tccataggtttcaccagacactataagcagttcatggcacaaaaggctctaagacccctgcgttagatcatggtcttcacgagcctggtcaaaactgggcacgctggctttccaaccgagag

SEQ ID NO: 988 - DNA, 122 bp, Homo sapiens
  misc_feature (61)..(62): /note="This region represents a CpG dinucleotide"
  misc_feature (61)..(61): /note="Nucleotide may be methylated to form 5-methylcytosine"
tccctggctgggtgagacacaagttcctgtttatgcaccagatcagggttagcatacaatcgttttcaacagcttggtcacagcatgtgcctcctgtccccatgtgactgtgctaagtctgc

SEQ ID NO: 989 - DNA, 122 bp, Homo sapiens
  misc_feature (61)..(62): /note="This region represents a CpG dinucleotide"
  misc_feature (61)..(61): /note="Nucleotide may be methylated to form 5-methylcytosine"
cagaagaaatttcctgacttgaatcggttataatcgctatctaaatctacagggcctccgcgatgcatattatgcaccttgagatctatagaaaatggtcttagaaaaagaaaaaaatgatg

SEQ ID NO: 990 - DNA, 122 bp, Homo sapiens
  misc_feature (61)..(62): /note="This region represents a CpG dinucleotide"
  misc_feature (61)..(61): /note="Nucleotide may be methylated to form 5-methylcytosine"
aggaagtaagggaagtcggggtacaggaagggggagggattttctaaattgtttggtcaccgccaaagtcaagtcttcaccctatgaaatggaagatctcacattgagtaggcggagggagg

SEQ ID NO: 991 - DNA, 122 bp, Homo sapiens
  misc_feature (61)..(62): /note="This region represents a CpG dinucleotide"
  misc_feature (61)..(61): /note="Nucleotide may be methylated to form 5-methylcytosine"
acagtgtctgtctctcaatatgtcctctggaacatccttttcagagtcatagattgtttccggaaagaggcaacttcagttaagaggaagttaaaaaagaaaaaaaaagcttaacaacttta

SEQ ID NO: 992 - DNA, 122 bp, Homo sapiens
  misc_feature (61)..(62): /note="This region represents a CpG dinucleotide"
  misc_feature (61)..(61): /note="Nucleotide may be methylated to form 5-methylcytosine"
gtaaacaaaagctgaattcatactcagggcttgctgagtttgaaccccgtgctctgcctgcgctatgccctgattctcagccttgctcaccacttcccgcccctcggccctttcctccgctt

SEQ ID NO: 993 - DNA, 122 bp, Homo sapiens
  misc_feature (61)..(62): /note="This region represents a CpG dinucleotide"
  misc_feature (61)..(61): /note="Nucleotide may be methylated to form 5-methylcytosine"
gtggcacagagaacacaaatgtcatgccacatgcacagagaagccaagagaatggagtcacggtgccccgttttctgtaagcaagaagggagaaaccaatgttggctaaatcaaaaagagtc

SEQ ID NO: 994 - DNA, 122 bp, Homo sapiens
  misc_feature (61)..(62): /note="This region represents a CpG dinucleotide"
  misc_feature (61)..(61): /note="Nucleotide may be methylated to form 5-methylcytosine"
aacattaagggctgagtaaaatttcctgcccagacttggacagtacttgaaacttgtatacgaaaagaacagatataaagaggggagaaagaatttgggctgaaattcaatctatcacactt

SEQ ID NO: 995 - DNA, 122 bp, Homo sapiens
  misc_feature (61)..(62): /note="This region represents a CpG dinucleotide"
  misc_feature (61)..(61): /note="Nucleotide may be methylated to form 5-methylcytosine"
gcttgaggccccctcaaagggggaagggaggaggccgaggtttgaaccggctccatcaaacggacttactgtcaaggtgagcctcaggccaggcagggccctggagacccccccgggaggca

SEQ ID NO: 996 - DNA, 122 bp, Homo sapiens
  misc_feature (61)..(62): /note="This region represents a CpG dinucleotide"
  misc_feature (61)..(61): /note="Nucleotide may be methylated to form 5-methylcytosine"
tgttgctcatcttgctacatcacatcagttggaagagaaaatctgtcgaattatacatgtcgagttctagaattttgtgaatgtaagcacacagtctttgagatgtaagaactttatgacat

SEQ ID NO: 997 - DNA, 122 bp, Homo sapiens
  misc_feature (61)..(62): /note="This region represents a CpG dinucleotide"
  misc_feature (61)..(61): /note="Nucleotide may be methylated to form 5-methylcytosine"
actgcccagatgtcaactcttctttgtccttgtcacctttatttaaaatagtttgtcttacggagcaaagttgatctgttttgattcttctttgtgcagtgtggcaacctacgcaaatttta

SEQ ID NO: 998 - DNA, 122 bp, Homo sapiens
  misc_feature (61)..(62): /note="This region represents a CpG dinucleotide"
  misc_feature (61)..(61): /note="Nucleotide may be methylated to form 5-methylcytosine"
aagcacggcactgttctagcagagtcagtttcacttgagttttcttcctcctttttataacgacatttaagaaaggaagtgcatgttaactgatttagttaacattggtctttgtattactg

SEQ ID NO: 999 - DNA, 122 bp, Homo sapiens
  misc_feature (61)..(62): /note="This region represents a CpG dinucleotide"
  misc_feature (61)..(61): /note="Nucleotide may be methylated to form 5-methylcytosine"
gcgggaaaatgagcaagaacagggtgggtacagaattcagtgagagcttactggccccaacgtaaggcaggaagatcaagcagggggagtgagctgacccatgaatgatgaggttgaaaaga

SEQ ID NO: 1000 - DNA, 122 bp, Homo sapiens
  misc_feature (61)..(62): /note="This region represents a CpG dinucleotide"
  misc_feature (61)..(61): /note="Nucleotide may be methylated to form 5-methylcytosine"
tgctttcttttgttaagccaagacttgagagaaacctggcagccgtctctaagtctggcacgatttcacctcagacgcactcggttggtttggatgttgagggagaccgcacatgagagagg

SEQ ID NO: 1001 - DNA, 122 bp, Homo sapiens
  misc_feature (61)..(62): /note="This region represents a CpG dinucleotide"
  misc_feature (61)..(61): /note="Nucleotide may be methylated to form 5-methylcytosine"
gtgcctgttattcatacaatattacattatttcaggattgttggaggtttgcaaagtagacgacacaatatttgttccatgaggttcttaagtttaggtgaacatctgaagcccagatctgt

SEQ ID NO: 1002 - DNA, 122 bp, Homo sapiens
  misc_feature (61)..(62): /note="This region represents a CpG dinucleotide"
  misc_feature (61)..(61): /note="Nucleotide may be methylated to form 5-methylcytosine"
gacaaggtcaggtcagaggtgaaagaggcaggggactgcaggtggaatgaaagcaggaaccgttcagaccctttcacctatgaggatactgggtctctgaaaggtgaacggagaggcttgca

SEQ ID NO: 1003 - DNA, 122 bp, Homo sapiens
  misc_feature (61)..(62): /note="This region represents a CpG dinucleotide"
  misc_feature (61)..(61): /note="Nucleotide may be methylated to form 5-methylcytosine"
ggcgctggtcacctttgtcaggtgcctctcatcttaacttccttctagttttggagtgttcgtctcagaagtcttgaaactaggggtgctttttagcccaaggctatgggtccggttggtgg

SEQ ID NO: 1004 - DNA, 122 bp, Homo sapiens
  misc_feature (61)..(62): /note="This region represents a CpG dinucleotide"
  misc_feature (61)..(61): /note="Nucleotide may be methylated to form 5-methylcytosine"
gttctcatttatttcccaacgtgtctctttcctggatgagtcaggtttcctttctgaagacgccgagctcaataaattaagcagactgagaggtgacttcagtgcttgtcctcatcatgcag

SEQ ID NO: 1005 - DNA, 122 bp, Homo sapiens
  misc_feature (61)..(62): /note="This region represents a CpG dinucleotide"
  misc_feature (61)..(61): /note="Nucleotide may be methylated to form 5-methylcytosine"
agccaccttctcttatctctgctctgcaacaatgagtcttgacgtcattggctcagcaaacgtttctcaaaggctagatatgaggctggaacttctaggcagttccttacagcagcctgctt

SEQ ID NO: 1006 - DNA, 122 bp, Homo sapiens
  misc_feature (61)..(62): /note="This region represents a CpG dinucleotide"
  misc_feature (61)..(61): /note="Nucleotide may be methylated to form 5-methylcytosine"
ttgtccgcaatttccattgcaacattattcacaatgaccaaaaggtggaatcaaaccaagcgtccatgagcagacaaatggataaacagatgtgatgcgttcactcaatattcagccctaaa

SEQ ID NO: 1007 - DNA, 122 bp, Homo sapiens
  misc_feature (61)..(62): /note="This region represents a CpG dinucleotide"
  misc_feature (61)..(61): /note="Nucleotide may be methylated to form 5-methylcytosine"
tcggggcatggctggctcagttctgcagttctgctgcctggcatggatgcgtcacaatagcgaggtcaccttcttgccttgggtaatttccctcagaggcaaaacagatccatttttaacag

SEQ ID NO: 1008 - DNA, 122 bp, Homo sapiens
  misc_feature (61)..(62): /note="This region represents a CpG dinucleotide"
  misc_feature (61)..(61): /note="Nucleotide may be methylated to form 5-methylcytosine"
ctcgcttgcccaccccgaagtccctcagggtggcgatggcaaagcgcaggagctgcttggcgcgctccccgttgctgaacgccacgcctggggaggtcaaggcgggggtggagagaggtcag

SEQ ID NO: 1009 - DNA, 122 bp, Homo sapiens
  misc_feature (61)..(62): /note="This region represents a CpG dinucleotide"
  misc_feature (61)..(61): /note="Nucleotide may be methylated to form 5-methylcytosine"
ctataaaccagattttactccaaagcccaatgttcttaaacattacatgaacattttcggcgttttttggtttttatcctttcatagtagtatactatcttaccaacccctcgggaattttt

SEQ ID NO: 1010 - DNA, 122 bp, Homo sapiens
  misc_feature (61)..(62): /note="This region represents a CpG dinucleotide"
  misc_feature (61)..(61): /note="Nucleotide may be methylated to form 5-methylcytosine"
tgaacttctgacctcaggtgatccacccaccttggcctcccaaagtgcggggattacaggcgtgagccaacacgtgcagccatttctgaattctgaaggatcatggctctgtcaacaaacac

SEQ ID NO: 1011 - DNA, 122 bp, Homo sapiens
  misc_feature (61)..(62): /note="This region represents a CpG dinucleotide"
  misc_feature (61)..(61): /note="Nucleotide may be methylated to form 5-methylcytosine"
cacactcagattcccagctcacggggactcaggccccgcccgcggccatgctcacctcgccgctgcactgtgaagctctccacaaccccgtagttgtgtctgcagtaggtgtccaccgcggc

SEQ ID NO: 1012 - DNA, 122 bp, Homo sapiens
  misc_feature (61)..(62): /note="This region represents a CpG dinucleotide"
  misc_feature (61)..(61): /note="Nucleotide may be methylated to form 5-methylcytosine"
tattcatttctgtctttttaagcttccctgctcccgagaattttcaggcttgtaagactgcgtgcagttcattaatattctccatcctggcatcccagatagacataagaagttgactgaca

SEQ ID NO: 1013 - DNA, 122 bp, Homo sapiens
  misc_feature (61)..(62): /note="This region represents a CpG dinucleotide"
  misc_feature (61)..(61): /note="Nucleotide may be methylated to form 5-methylcytosine"
gccaggcctaaaattaaaatttcttgcatccctgagagtctggaagactgtttgcatgtccgagactgtttcctctctggagcaatcagagaggggacatccaaactaatagtccctggatg

SEQ ID NO: 1014 - DNA, 122 bp, Homo sapiens
  misc_feature (61)..(62): /note="This region represents a CpG dinucleotide"
  misc_feature (61)..(61): /note="Nucleotide may be methylated to form 5-methylcytosine"
cttatggactctgtgccacaacttgtcaagtgtctgaatgaaaagaagaaaaaagaaacacgtattcaaacttactgtttaaagttctttgttcagagccattagcatatttaataggattt

SEQ ID NO: 1015 - DNA, 122 bp, Homo sapiens
  misc_feature (61)..(62): /note="This region represents a CpG dinucleotide"
  misc_feature (61)..(61): /note="Nucleotide may be methylated to form 5-methylcytosine"
aaaagagtgagtttgcaaaattctatcaccagacagcctgctttcagatgatgtggacttcgtaacccaaggcttccttcctcctcctctgccggcaggctgattcctgcttaccaccctgt

SEQ ID NO: 1016 - DNA, 122 bp, Homo sapiens
  misc_feature (61)..(62): /note="This region represents a CpG dinucleotide"
  misc_feature (61)..(61): /note="Nucleotide may be methylated to form 5-methylcytosine"
gtgaaggagcagcttacttggtgaaatcctcacttaatttcttctggtgctgtggagccccgttgtgtgattgtgtttgacagtttttgttctcacagccttttgagcattttaaagattga

SEQ ID NO: 1017 - DNA, 122 bp, Homo sapiens
  misc_feature (61)..(62): /note="This region represents a CpG dinucleotide"
  misc_feature (61)..(61): /note="Nucleotide may be methylated to form 5-methylcytosine"
gtaagaagcataaataggatttgaattcacatctggctgatactggaatctgagtttaatcgtcatgccacactgctgtcattgagctcctttctttcaagtcggttagagataaccttgga

SEQ ID NO: 1018 - DNA, 122 bp, Homo sapiens
  misc_feature (61)..(62): /note="This region represents a CpG dinucleotide"
  misc_feature (61)..(61): /note="Nucleotide may be methylated to form 5-methylcytosine"
gttctaagcccatgtggttgttgacagcattcagttccttgcagaatgtgaaactgtggacgtaagtttcttgctagctgttgactgacggcctccctcagttccttgccatgtgacttcct

SEQ ID NO: 1019 - DNA, 122 bp, Homo sapiens
  misc_feature (61)..(62): /note="This region represents a CpG dinucleotide"
  misc_feature (61)..(61): /note="Nucleotide may be methylated to form 5-methylcytosine"
agtgggccgcgagagtggcagccccttccctggatttattttcctagtggctggacatcacgtcccgagttcctgacgggtttggacaaaggggacttctggagcaggcgcctcctgcccac

SEQ ID NO: 1020 - DNA, 122 bp, Homo sapiens
  misc_feature (61)..(62): /note="This region represents a CpG dinucleotide"
  misc_feature (61)..(61): /note="Nucleotide may be methylated to form 5-methylcytosine"
ccagttaaaaaacctggagcctggactaggcgttcctgggttaaaaggtttcggtctgtgcggggagtcatgtcgagtctgctcagtcccaggccagcattacctccctgcaggccagcgca

SEQ ID NO: 1021 - DNA, 122 bp, Homo sapiens
  misc_feature (61)..(62): /note="This region represents a CpG dinucleotide"
  misc_feature (61)..(61): /note="Nucleotide may be methylated to form 5-methylcytosine"
tagcctcaagtgtgggggaaagaggacctctcaggggaggctgaagaggggcagggtctccggattctttgccatgactgtggaagactttccagggccctggctcctctgatcgcagcgaa

SEQ ID NO: 1022 - DNA, 122 bp, Homo sapiens
  misc_feature (61)..(62): /note="This region represents a CpG dinucleotide"
  misc_feature (61)..(61): /note="Nucleotide may be methylated to form 5-methylcytosine"
ttatgttcagggacatagtaattacatgaacatctgggagcccgccagtcaatttaagaacgttgtgctgtgggtttaacgtaacctttgcacacccctgcctggagcacccttcccccagc

SEQ ID NO: 1023 - DNA, 122 bp, Homo sapiens
  misc_feature (61)..(62): /note="This region represents a CpG dinucleotide"
  misc_feature (61)..(61): /note="Nucleotide may be methylated to form 5-methylcytosine"
aatccatttaaccactttcttttgtaaattgcccagtgtctggtaagtctttatcagcagcgtgaaaattgactaatacaagtatgcattgagcaactagtatgttccaggcattgagccag

SEQ ID NO: 1024 - DNA, 122 bp, Homo sapiens
  misc_feature (61)..(62): /note="This region represents a CpG dinucleotide"
  misc_feature (61)..(61): /note="Nucleotide may be methylated to form 5-methylcytosine"
ggtcaggcgccgactgcgttcccgagtcacctgtgcgctggcctgcgtgctactggccttcgtgctctgctggctgcccagccaagcgttcacactctgaggggtgctgatcaaactgaacg

SEQ ID NO: 1025 - DNA, 122 bp, Homo sapiens
  misc_feature (61)..(62): /note="This region represents a CpG dinucleotide"
  misc_feature (61)..(61): /note="Nucleotide may be methylated to form 5-methylcytosine"
aaatgtggcatagcgtggccacatcaatggggtggtgaacagctttgaggtaaaggctttcgagtttgagactgctttcagaggactgtaggtaaacgtcggaaaactcatttaagatacta

SEQ ID NO: 1026 - DNA, 122 bp, Homo sapiens
  misc_feature (61)..(62): /note="This region represents a CpG dinucleotide"
  misc_feature (61)..(61): /note="Nucleotide may be methylated to form 5-methylcytosine"
cccctacaccgcccactcccgggcatccccattggctgcgtgcttctccggctctcaattcgctgtacgtcatccgtgcatggctgcccattggccctctgcaatacttgtcttcatctcac

SEQ ID NO: 1027 - DNA, 122 bp, Homo sapiens
  misc_feature (61)..(62): /note="This region represents a CpG dinucleotide"
  misc_feature (61)..(61): /note="Nucleotide may be methylated to form 5-methylcytosine"
tttgagggactgggaggactgtcccggctaaagctggcgcgggaaactggggctgcgcggcgggagggccctgctgctggggaaggaatctaatatatccgttcccctgaggaagggtgcca

SEQ ID NO: 1028 - DNA, 122 bp, Homo sapiens
  misc_feature (61)..(62): /note="This region represents a CpG dinucleotide"
  misc_feature (61)..(61): /note="Nucleotide may be methylated to form 5-methylcytosine"
attttgaaaatctatgtgccacactaacacatcaacagtaatgcatctctaaaagacaaacgttaaaaaagaaaaacgcagtgttaagctgatcacaagactcctattcagacacatggcag

SEQ ID NO: 1029 - DNA, 122 bp, Homo sapiens
  misc_feature (61)..(62): /note="This region represents a CpG dinucleotide"
  misc_feature (61)..(61): /note="Nucleotide may be methylated to form 5-methylcytosine"
ccctacctgtccaccaaaatcaaatcaaaggcctttttcctcaaggaagtttccacattacgcaacagccaaccatgtcaagagctgatttgcaggctgagctcagtcacattagggacttc

SEQ ID NO: 1030 - DNA, 122 bp, Homo sapiens
  misc_feature (61)..(62): /note="This region represents a CpG dinucleotide"
  misc_feature (61)..(61): /note="Nucleotide may be methylated to form 5-methylcytosine"
caggaagggcgtgatgcagagcaaagagcaaaacccgctggctcctttttcatcaacttccgaaagatcctaaatcgttttggctgccaagtcagtagcaaataacttaatttgagggagac

SEQ ID NO: 1031 - DNA, 122 bp, Homo sapiens
  misc_feature (61)..(62): /note="This region represents a CpG dinucleotide"
  misc_feature (61)..(61): /note="Nucleotide may be methylated to form 5-methylcytosine"
acctaacacatagggttgttgggagtgttcaatgagatgatgcatggaaagcaattgacacggtgcctggaaacgtagtaagtgctaaaaaatgttacatgagagtattatcattacggctc

SEQ ID NO: 1032 - DNA, 122 bp, Homo sapiens
  misc_feature (61)..(62): /note="This region represents a CpG dinucleotide"
  misc_feature (61)..(61): /note="Nucleotide may be methylated to form 5-methylcytosine"
agtgaatttgtctttgagtgcaaggtggaggtgggtggggcagaagggaagtggagttggcgagtgatgaaactagagacagctcagagctagatcacccaaggccttgaaggacgagctta

SEQ ID NO: 1033 - DNA, 122 bp, Homo sapiens
  misc_feature (61)..(62): /note="This region represents a CpG dinucleotide"
  misc_feature (61)..(61): /note="Nucleotide may be methylated to form 5-methylcytosine"
agaagacatggatctgcttcacccttcttaatggacatggattattctctctgggcttttcgagtgctgtgacgttttctgtcattaaccaagacattttccaccactaggtcctggatgga

SEQ ID NO: 1034 - DNA, 122 bp, Homo sapiens
  misc_feature (61)..(62): /note="This region represents a CpG dinucleotide"
  misc_feature (61)..(61): /note="Nucleotide may be methylated to form 5-methylcytosine"
ccatggcatgtgtgctgtgattttctctacatggtactccagtttgcaggaaaatgaaagcgtcccagtttcaagattaatcactggcttttggagagaggccctcaccgccctccctgctc

SEQ ID NO: 1035 - DNA, 122 bp, Homo sapiens
  misc_feature (61)..(62): /note="This region represents a CpG dinucleotide"
  misc_feature (61)..(61): /note="Nucleotide may be methylated to form 5-methylcytosine"
ggatggctagggatgctgggcttagatgtggctggctccagttctggtcgtggctgtcctcgtgacccatccagtatcatgcaaggtaacctttaaatagtttgcatttccagcttttcaac

SEQ ID NO: 1036 - DNA, 122 bp, Homo sapiens
  misc_feature (61)..(62): /note="This region represents a CpG dinucleotide"
  misc_feature (61)..(61): /note="Nucleotide may be methylated to form 5-methylcytosine"
caccttcctcccttctgctgatgagatttatgactgcaaggtggagcactggggcctggacgagcctcttctgaaacactggggtaaggatgagttccaccacttcatgggtttctaataat

SEQ ID NO: 1037 - DNA, 122 bp, Homo sapiens
  misc_feature (61)..(62): /note="This region represents a CpG dinucleotide"
  misc_feature (61)..(61): /note="Nucleotide may be methylated to form 5-methylcytosine"
tccccctaggaagccaggaagacgagtcatgataatcagaggagtcagtcctttctgagacgtagcctgcagaacactgctgttcctgacctcagtgaagaacagccagttttccaactttt

SEQ ID NO: 1038 - DNA, 122 bp, Homo sapiens
  misc_feature (61)..(62): /note="This region represents a CpG dinucleotide"
  misc_feature (61)..(61): /note="Nucleotide may be methylated to form 5-methylcytosine"
tgccttcaagtgttcatcaaattcttcccttgatacacagataagcaggcacatggaagacgccaggcattgagtctgcagcccctgtctctgcacagaccatgataagtagtggggggggg

SEQ ID NO: 1039 - DNA, 122 bp, Homo sapiens
  misc_feature (61)..(62): /note="This region represents a CpG dinucleotide"
  misc_feature (61)..(61): /note="Nucleotide may be methylated to form 5-methylcytosine"
tttctctgcttgatatagaaacccacttcctcatggttggagagaaatctgatagagaatcggaagtgggaatgaaaaaatcctgctgaggtgcaaaataaatactagggcaatttagacaa

SEQ ID NO: 1040 - DNA, 122 bp, Homo sapiens
  misc_feature (61)..(62): /note="This region represents a CpG dinucleotide"
  misc_feature (61)..(61): /note="Nucleotide may be methylated to form 5-methylcytosine"
ggaacaaaccctaaagagtccctaaaatgagaaagactcacaccacatcacctgagcccccggacagacctgaaaaggagcttttcaaggcttcctgggtgccaataatacaagacttaatt

SEQ ID NO: 1041 - DNA, 122 bp, Homo sapiens
  misc_feature (61)..(62): /note="This region represents a CpG dinucleotide"
  misc_feature (61)..(61): /note="Nucleotide may be methylated to form 5-methylcytosine"
aaaggagggagggaaggaagggatagtgtaactgcactgcaactgaaagaaaccagagaacggaaactcatggtgacctggtgactgcttgagcatttattgcttaacagctacttgtgcga

SEQ ID NO: 1042 - DNA, 122 bp, Homo sapiens
  misc_feature (61)..(62): /note="This region represents a CpG dinucleotide"
  misc_feature (61)..(61): /note="Nucleotide may be methylated to form 5-methylcytosine"
tgcattgtaggttattgagcagtcattatccctagtcctcaccagcagatgtcagtagcacgtcccctgacttgtgacaaccaaatatgtctccagtaaatgtctggagaaggcaaaatcag

SEQ ID NO: 1043 - DNA, 122 bp, Homo sapiens
  misc_feature (61)..(62): /note="This region represents a CpG dinucleotide"
  misc_feature (61)..(61): /note="Nucleotide may be methylated to form 5-methylcytosine"
cctgagtgtttaggttgtgccaggcacttaactcgcttaatcctttcaacagctttgagtcgtagatcttattatccccattttacagattagagagtctagcctcagaggttaagaaacat

SEQ ID NO: 1044 - DNA, 122 bp, Homo sapiens
  misc_feature (61)..(62): /note="This region represents a CpG dinucleotide"
  misc_feature (61)..(61): /note="Nucleotide may be methylated to form 5-methylcytosine"
tacccactttgtccttcccgttcatgtgtccggccacctgatacgagaggggcacttagccgttgaggaggcggagtctgccgcccgccggctgcccggtgccctcagggatggcctcgatc

SEQ ID NO: 1045 - DNA, 122 bp, Homo sapiens
  misc_feature (61)..(62): /note="This region represents a CpG dinucleotide"
  misc_feature (61)..(61): /note="Nucleotide may be methylated to form 5-methylcytosine"
gctccaggcggtgcttgttcctcagcctcttctccttcctgatcgtggcaggcgccaccacgctcttctgcctgctgcactttggagtgatcggcccccagagggaagaggtgagtgcctgg

SEQ ID NO: 1046 - DNA, 122 bp, Homo sapiens
  misc_feature (61)..(62): /note="This region represents a CpG dinucleotide"
  misc_feature (61)..(61): /note="Nucleotide may be methylated to form 5-methylcytosine"
aattcatagccccattctcttgatctgagttgcttctgggggatgagcgtggcaccacagcgtctcaggtgctatataggggacttcccaagagttgcccgtatcggttgtaaggtgctgtc

SEQ ID NO: 1047 - DNA, 122 bp, Homo sapiens
  misc_feature (61)..(62): /note="This region represents a CpG dinucleotide"
  misc_feature (61)..(61): /note="Nucleotide may be methylated to form 5-methylcytosine"
ctttttctccatgaggccaaggcttgtcttccaatgagcagctccttacaataactaagccggcttctgcttgtaccttcccagacacctccactggcaaaacctttccattgagcaatctt

SEQ ID NO: 1048 - DNA, 122 bp, Homo sapiens
  misc_feature (61)..(62): /note="This region represents a CpG dinucleotide"
  misc_feature (61)..(61): /note="Nucleotide may be methylated to form 5-methylcytosine"
tccctggagggttctgcgctatagtcttgcttgtggttctgactgtgcttttcttcatcccgtccacctatctagctgcttcctctaggctttccggtaatactgtgagttctttctcggcc

SEQ ID NO: 1049 - DNA, 122 bp, Homo sapiens
  misc_feature (61)..(62): /note="This region represents a CpG dinucleotide"
  misc_feature (61)..(61): /note="Nucleotide may be methylated to form 5-methylcytosine"
ccctttgtgccatttaattcctgcgattcccattcccctgtcaccgagacctcggggccgcgtggttttggtgtaatttaagtgagtggaatattcagtgcagacatcatcaccatcgtctg

SEQ ID NO: 1050 - DNA, 122 bp, Homo sapiens
  misc_feature (61)..(62): /note="This region represents a CpG dinucleotide"
  misc_feature (61)..(61): /note="Nucleotide may be methylated to form 5-methylcytosine"
ccagatcgaagagggaaactagaatactgtcgactcctccccacatccgagaaaaaggtacgaccaatgcctagcagtttctagggaacacagctcaggaaatactgtagttctttaatgta

SEQ ID NO: 1051 - DNA, 122 bp, Homo sapiens
  misc_feature (61)..(62): /note="This region represents a CpG dinucleotide"
  misc_feature (61)..(61): /note="Nucleotide may be methylated to form 5-methylcytosine"
tagccttgagaacagaggagcaaacagatacacagtgtctttcacacgctctgagataaacgttgccctcaccatgaattaggcaggacaaagttctcagagcaaagagggacagcaggggc

SEQ ID NO: 1052 - DNA, 122 bp, Homo sapiens
  misc_feature (61)..(62): /note="This region represents a CpG dinucleotide"
  misc_feature (61)..(61): /note="Nucleotide may be methylated to form 5-methylcytosine"
tggcttgaggaaaggacagaaagtaacctcagggttcatctctgctccctagtcgggtgccgtgcctcacgcctgcaatcccagcactttgggaggccgaggaaggcaaatcacttgagtcc

SEQ ID NO: 1053 - DNA, 122 bp, Homo sapiens
  misc_feature (61)..(62): /note="This region represents a CpG dinucleotide"
  misc_feature (61)..(61): /note="Nucleotide may be methylated to form 5-methylcytosine"
ggagagaaaaagaaagaattagtttagtgtagcgaatggtagctatttgcagctcacccacgtgtgctccgaaggtcaaaaccctacatcagcaatttgtagcaagctcttgagctcctcta

SEQ ID NO: 1054 - DNA, 122 bp, Homo sapiens
  misc_feature (61)..(62): /note="This region represents a CpG dinucleotide"
  misc_feature (61)..(61): /note="Nucleotide may be methylated to form 5-methylcytosine"
aatagatcaaaatatccttaaacgtacctgcctagattaaacatacctcagggttgtgcacgtgttctgcaaaaatcactgacaccatagtctaactcacagatgtctaactcagcacaatt

SEQ ID NO: 1055 - DNA, 122 bp, Homo sapiens
  misc_feature (61)..(62): /note="This region represents a CpG dinucleotide"
  misc_feature (61)..(61): /note="Nucleotide may be methylated to form 5-methylcytosine"
tctcagcctccagtctgacatgttccactatggccttgggaagagcaatgggcccggagtcgccgcatctaaccctgctgtaactggtcgcaagtcacagtttgctcatctataaagtgagc

SEQ ID NO: 1056 - DNA, 122 bp, Homo sapiens
  misc_feature (61)..(62): /note="This region represents a CpG dinucleotide"
  misc_feature (61)..(61): /note="Nucleotide may be methylated to form 5-methylcytosine"
ccaggacccctgtgtctttccaagttgggggcactggccagggaaggatcctggttcttccggtgtctgggatgatgaggctggtcctcaggcagtgggaggctggaggagggggaatgtgt

SEQ ID NO: 1057 - DNA, 122 bp, Homo sapiens
  misc_feature (61)..(62): /note="This region represents a CpG dinucleotide"
  misc_feature (61)..(61): /note="Nucleotide may be methylated to form 5-methylcytosine"
gtgtgtcaaaatattcattcctatcacatgcagtaaaactgtattccagagccattaatacgccctgggggactgaggggatttgcagcctaagatttcagacttaaagcccgctaaggccc

SEQ ID NO: 1058 - DNA, 122 bp, Homo sapiens
  misc_feature (61)..(62): /note="This region represents a CpG dinucleotide"
  misc_feature (61)..(61): /note="Nucleotide may be methylated to form 5-methylcytosine"
tcagcgaagggtttcaggtagtaatggaactcctcccgtgcttccagaagctgctgcagccggcggggtttgagcgccggagttccgggcggcagtagtgtggaccccgcccctccaggtct

SEQ ID NO: 1059 - DNA, 122 bp, Homo sapiens
  misc_feature (61)..(62): /note="This region represents a CpG dinucleotide"
  misc_feature (61)..(61): /note="Nucleotide may be methylated to form 5-methylcytosine"
ccaactttgccgccagtccccttgccctgtgcgcctcctccgcgtggctgttcctgaatacgctggtgtctgttcgcatcttttagaatacgctggtgtcggtgcgcacagcgcttctctta

SEQ ID NO: 1060 - DNA, 122 bp, Homo sapiens
  misc_feature (61)..(62): /note="This region represents a CpG dinucleotide"
  misc_feature (61)..(61): /note="Nucleotide may be methylated to form 5-methylcytosine"
ccacttttgcctcatcacgcaggcgctggtaggcggcatcactgggcgggtcagaaaccacgcgcatgcgcagacaccctcaggcgactggcgggtcgcggcttccaagctctaaatggaga

SEQ ID NO: 1061 - DNA, 122 bp, Homo sapiens
  misc_feature (61)..(62): /note="This region represents a CpG dinucleotide"
  misc_feature (61)..(61): /note="Nucleotide may be methylated to form 5-methylcytosine"
tactgtagtgtcaattcttcaactttctcgccaaggtaaatcacctggtgatgattgcttcgtctccaattccaaacagaaaaaatgagaatccatcatcgtgtaactccacaattgaacct

SEQ ID NO: 1062 - DNA, 122 bp, Homo sapiens
  misc_feature (61)..(62): /note="This region represents a CpG dinucleotide"
  misc_feature (61)..(61): /note="Nucleotide may be methylated to form 5-methylcytosine"
acagtgtgagattgaatcttggctcttactagttatgtggacttgagtgcattacctaaccgtttattgcctcatagggttggtgagagaattaagtaaaacacatagccttaaggctgtgc

SEQ ID NO: 1063 - DNA, 122 bp, Homo sapiens
  misc_feature (61)..(62): /note="This region represents a CpG dinucleotide"
  misc_feature (61)..(61): /note="Nucleotide may be methylated to form 5-methylcytosine"
ttagaggcctcagagaatgtcaaaggttggcgctggctgccttgggcgctcgggagaacccgagaggggaagcggtccccggaaagagttcaggacacggggcctggaggatggggatggca

SEQ ID NO: 1064 - DNA, 122 bp, Homo sapiens
  misc_feature (61)..(62): /note="This region represents a CpG dinucleotide"
  misc_feature (61)..(61): /note="Nucleotide may be methylated to form 5-methylcytosine"
ccaggtgctgtgttaggtagattccaccagagaggaagagaggagcaatggaaagggatgcgtgtgtgcacttgtgtggcatgattaaatatggattgtgtaatatatatgatgaagcaaac

SEQ ID NO: 1065 - DNA, 122 bp, Homo sapiens
  misc_feature (61)..(62): /note="This region represents a CpG dinucleotide"
  misc_feature (61)..(61): /note="Nucleotide may be methylated to form 5-methylcytosine"
cagcctggccaacatggtgtaaccttgtctccactaaaaatccacaaattagctgggcatcgtggcgcacgcctgtaatcccagctatttgggaggccgaggcaggagaatcgcttgaacct

SEQ ID NO: 1066 - DNA, 122 bp, Homo sapiens
  misc_feature (61)..(62): /note="This region represents a CpG dinucleotide"
  misc_feature (61)..(61): /note="Nucleotide may be methylated to form 5-methylcytosine"
gaaccaataggaagagcggacagcgatctctaacgcgcaagcgcatatccttctaggtagcgggcagtagccgcttcagggagggacgaagagacccagcaacccacagagttgagaaattt

SEQ ID NO: 1067 - DNA, 122 bp, Homo sapiens
  misc_feature (61)..(62): /note="This region represents a CpG dinucleotide"
  misc_feature (61)..(61): /note="Nucleotide may be methylated to form 5-methylcytosine"
ctccgaggggcggggctggtgcaactccaaaatggctgccgcggggagcggcgattagaacgggttccagtcgcttgggggcgttggggggctggagggcaagaggttacgcgccccagctc

SEQ ID NO: 1068 - DNA, 122 bp, Homo sapiens
  misc_feature (61)..(62): /note="This region represents a CpG dinucleotide"
  misc_feature (61)..(61): /note="Nucleotide may be methylated to form 5-methylcytosine"
ttatggaattcagcagtgacctagccgcatgatcccgcagtgagggcttaacacgttccacggcctgaactcgctctgaatggactccagattcccaatgatgcatgcagcccctcagggtc

SEQ ID NO: 1069 - DNA, 122 bp, Homo sapiens
  misc_feature (61)..(62): /note="This region represents a CpG dinucleotide"
  misc_feature (61)..(61): /note="Nucleotide may be methylated to form 5-methylcytosine"
cacataagattccccactctgttaaaaaaaaatgtgtttatacttggtcccctctgaaggcggacgacacccatacttttgtcccagcccaatttgctggctgggatttttctcatccttta

SEQ ID NO: 1070 - DNA, 122 bp, Homo sapiens
  misc_feature (61)..(62): /note="This region represents a CpG dinucleotide"
  misc_feature (61)..(61): /note="Nucleotide may be methylated to form 5-methylcytosine"
cgatgcagtaatgcatttggcagctgaactgtgtactgggaaaagaaaaatatcctggagcgggtttaagtttcgcagataagaaaaatggctttatttagtgaattggaacaatacaagac

SEQ ID NO: 1071 - DNA, 122 bp, Homo sapiens
  misc_feature (61)..(62): /note="This region represents a CpG dinucleotide"
  misc_feature (61)..(61): /note="Nucleotide may be methylated to form 5-methylcytosine"
cattgtgattttgtaacggctccattgtctggggtatataccctggttctttgtcatggccgagaaaattcacgacacagacacacgtgaggagtgggtttgggagtggaaagtttaataga

SEQ ID NO: 1072 - DNA, 122 bp, Homo sapiens
  misc_feature (61)..(62): /note="This region represents a CpG dinucleotide"
  misc_feature (61)..(61): /note="Nucleotide may be methylated to form 5-methylcytosine"
gagatccgtggagataaactcagagcgcagcctgcgcattccagcaggcctgactaactacggaaacatcccggcgggcggcgcacagcacacaacatctcattaaacaatagcccccgccc

SEQ ID NO: 1073 - DNA, 122 bp, Homo sapiens
  misc_feature (61)..(62): /note="This region represents a CpG dinucleotide"
  misc_feature (61)..(61): /note="Nucleotide may be methylated to form 5-methylcytosine"
caggggactctttgttgcgaccttccttcagaatggggctgacctcatgcatgactttctcgctatcagctccacggggctcagcttcagagggacgagtagggccattgttgacattgttg

SEQ ID NO: 1074 - DNA, 122 bp, Homo sapiens
  misc_feature (61)..(62): /note="This region represents a CpG dinucleotide"
  misc_feature (61)..(61): /note="Nucleotide may be methylated to form 5-methylcytosine"
tgggcccaagttctcattacttaatctcgccacgacttcccccgctgctccccctccccacgtcgccggcccctacgtcatctcccacaacagcccatcctgaggcgcgcccccacctcctt

SEQ ID NO: 1075 - DNA, 122 bp, Homo sapiens
  misc_feature (61)..(62): /note="This region represents a CpG dinucleotide"
  misc_feature (61)..(61): /note="Nucleotide may be methylated to form 5-methylcytosine"
catgtctgtcagctgccagactccctggatctctgtctattgattgatctgtaaatttcccgcactgtgcatccatcagccgtccaccccctccactcctcctgcatgcacatatgcctgcc

SEQ ID NO: 1076 - DNA, 122 bp, Homo sapiens
  misc_feature (61)..(62): /note="This region represents a CpG dinucleotide"
  misc_feature (61)..(61): /note="Nucleotide may be methylated to form 5-methylcytosine"
atgtttttctttcttcttctaatttggatttcatgtcacacaggcttgctgcagccttctcgtcactgtccaggttaggttcccttccattcattctctttcactcacctcttaccctacct

SEQ ID NO: 1077 - DNA, 122 bp, Homo sapiens
  misc_feature (61)..(62): /note="This region represents a CpG dinucleotide"
  misc_feature (61)..(61): /note="Nucleotide may be methylated to form 5-methylcytosine"
tgcaacacagacgggaacagggcacagccctgtgctggagacttcctacttgggtgctatcgtttggaaatctgtcctcccaaatctcatgctgaaatgtaatccccagtgttggaggtggg

SEQ ID NO: 1078 - DNA, 122 bp, Homo sapiens
  misc_feature (61)..(62): /note="This region represents a CpG dinucleotide"
  misc_feature (61)..(61): /note="Nucleotide may be methylated to form 5-methylcytosine"
atcagaatacaaatacaactttgtttttcattgtatgtcagcgtggtgcatgtatgtagacgaacacatggtgccttggtcagcaagatcagaatcgcaagagcctttgaagaaacacatgc

SEQ ID NO: 1079 - DNA, 122 bp, Homo sapiens
  misc_feature (61)..(62): /note="This region represents a CpG dinucleotide"
  misc_feature (61)..(61): /note="Nucleotide may be methylated to form 5-methylcytosine"
gttttcataacctacctcagttacaataaatatttaaaatgcacattaacatcctcgggccgcacaatcggcctctgtggccccggcccgtgcagatttaattaggccccggcttcccctgc

SEQ ID NO: 1080 - DNA, 122 bp, Homo sapiens
  misc_feature (61)..(62): /note="This region represents a CpG dinucleotide"
  misc_feature (61)..(61): /note="Nucleotide may be methylated to form 5-methylcytosine"
cagtcaccagtagagtaaccatttcctttgtccattgattgactaacctggataacccaacgtggcagcctcaacatctgtataaatggaaccactgctgtggaccacggtggaaataagaa

SEQ ID NO: 1081 - DNA, 122 bp, Homo sapiens
  misc_feature (61)..(62): /note="This region represents a CpG dinucleotide"
  misc_feature (61)..(61): /note="Nucleotide may be methylated to form 5-methylcytosine"
tgtcccagagatctacactctggaaatgatgcctagaatcatgctggtccagagaggacccgacttccaccaatgctgggcctggatgtacagcgtgcaccacaagcttcagcactggctgt

SEQ ID NO: 1082 - DNA, 122 bp, Homo sapiens
  misc_feature (61)..(62): /note="This region represents a CpG dinucleotide"
  misc_feature (61)..(61): /note="Nucleotide may be methylated to form 5-methylcytosine"
ccataattaccccatattcctctaaattgtccacaccatgatggacagatccccccttcccgccacaattttccctaaagttgtggacctctgatgacctcgaaactgatctaacatagtaa

SEQ ID NO: 1083 - DNA, 122 bp, Homo sapiens
  misc_feature (61)..(62): /note="This region represents a CpG dinucleotide"
  misc_feature (61)..(61): /note="Nucleotide may be methylated to form 5-methylcytosine"
tttagattcatcctctggcgccatcatgtgctctctaggacatggtagtatgcaatggtacgtttctttaagtcaagaagtattctcgacacaacaatttggaacattgcggggtgctccaa

SEQ ID NO: 1084 - DNA, 122 bp, Homo sapiens
  misc_feature (61)..(62): /note="This region represents a CpG dinucleotide"
  misc_feature (61)..(61): /note="Nucleotide may be methylated to form 5-methylcytosine"
tgactggcctagtttgtggtgaaacccatcgtgccttctgctgcaatctgttggagggaacggttgtctgagaatccatgtgggtgtatctatcactttgtaaagaggaactccagctctgg

SEQ ID NO: 1085 - DNA, 122 bp, Homo sapiens
  misc_feature (61)..(62): /note="This region represents a CpG dinucleotide"
  misc_feature (61)..(61): /note="Nucleotide may be methylated to form 5-methylcytosine"
ctcacagaagaggctgaggcgtcctggccgaataatgctttattctggaaaagatctgtacgaatctgcaaagcagtgaaaatgtgtggacggcttctgtttcttcagccgcaagggaggcc

SEQ ID NO: 1086 - DNA, 122 bp, Homo sapiens
  misc_feature (61)..(62): /note="This region represents a CpG dinucleotide"
  misc_feature (61)..(61): /note="Nucleotide may be methylated to form 5-methylcytosine"
ccagtaagtttagtcttgtgaagtccgaacgtttgaataatttactcgctgcaggcaaaccgcctacaactaaatccatcaggcccccgtatccgaatcttccttcacgcgagaagccggcc

SEQ ID NO: 1087 - DNA, 122 bp, Homo sapiens
  misc_feature (61)..(62): /note="This region represents a CpG dinucleotide"
  misc_feature (61)..(61): /note="Nucleotide may be methylated to form 5-methylcytosine"
gacagcggaaagccagagctccctggaggatctggctgagaggcagaaaatggccctcagcgctctcggaacggtccttccagaagaactgatgaaatagctactacgccaggcacgtggca

SEQ ID NO: 1088 - DNA, 122 bp, Homo sapiens
  misc_feature (61)..(62): /note="This region represents a CpG dinucleotide"
  misc_feature (61)..(61): /note="Nucleotide may be methylated to form 5-methylcytosine"
ttattttgctcccctcggcgggtggcagcttgattgtagtcatccagtgaactgaaaatgcgattttaagtatatttttattgccgtgaatcaggacctaacctagtaaaacactggacact

SEQ ID NO: 1089 - DNA, 122 bp, Homo sapiens
  misc_feature (61)..(62): /note="This region represents a CpG dinucleotide"
  misc_feature (61)..(61): /note="Nucleotide may be methylated to form 5-methylcytosine"
tcgctcccagctatttgagccaatggagaagttcctgatgcccacacctgctggtctcaccgctagggcctgggcatcacaggcagggggaatggggaggggacggtagcgtcagcctacac

SEQ ID NO: 1090 - DNA, 122 bp, Homo sapiens
  misc_feature (61)..(62): /note="This region represents a CpG dinucleotide"
  misc_feature (61)..(61): /note="Nucleotide may be methylated to form 5-methylcytosine"
agaaatcagaagtgactgggaacctttgtgaggcagggttcttgttcctggaagaatacacgacggggttgccaggatattgcagagaatgtaggaggaggggaatggaagagaaaaatccc

SEQ ID NO: 1091 - DNA, 122 bp, Homo sapiens
  misc_feature (61)..(62): /note="This region represents a CpG dinucleotide"
  misc_feature (61)..(61): /note="Nucleotide may be methylated to form 5-methylcytosine"
ataaaacagataaggagaaggctgtatctaggctgaatggctggccaatgttttcctctccgtcagtataaataaaatggatggaagaaaacacccctggatactatcaaatatgcctttca

SEQ ID NO: 1092 - DNA, 122 bp, Homo sapiens
  misc_feature (61)..(62): /note="This region represents a CpG dinucleotide"
  misc_feature (61)..(61): /note="Nucleotide may be methylated to form 5-methylcytosine"
cccgcgggagcagcgagcaggagggatggagggatgggctccccgctgacctggttcatccgctcatccccaggaagcagctgacgctgccgtctctacgcttgtacgaggagcactgcaaa

SEQ ID NO: 1093 - DNA, 122 bp, Homo sapiens
  misc_feature (61)..(62): /note="This region represents a CpG dinucleotide"
  misc_feature (61)..(61): /note="Nucleotide may be methylated to form 5-methylcytosine"
aaactcttcattgcacttaaataaaatccagatttctggccatgcctagaagatcctgtgcgacccagcccattaacctcagcaacttcatctgtgcctctttgcctctcactcatcaggct

SEQ ID NO: 1094 - DNA, 122 bp, Homo sapiens
  misc_feature (61)..(62): /note="This region represents a CpG dinucleotide"
  misc_feature (61)..(61): /note="Nucleotide may be methylated to form 5-methylcytosine"
ggacaagcaggtttcactgtagtagtcactgcagtgcatgcctggaaagcccatctagggcgtatacaccaaactgctagcaaaatagggctggattggaattagaagcttgattttttttt

SEQ ID NO: 1095 - DNA, 122 bp, Homo sapiens
  misc_feature (61)..(62): /note="This region represents a CpG dinucleotide"
  misc_feature (61)..(61): /note="Nucleotide may be methylated to form 5-methylcytosine"
cgcacagcaggtgggggcccgccctgcccacagcgtgaaaacaggagccccggccagccacggctgggcagggccagaagcgcctcctccaggatcctccccgcgctggcccgccccacagg

SEQ ID NO: 1096 - DNA, 122 bp, Homo sapiens
  misc_feature (61)..(62): /note="This region represents a CpG dinucleotide"
  misc_feature (61)..(61): /note="Nucleotide may be methylated to form 5-methylcytosine"
ctggggtcatgagatggctcaggcagtactataaacatacactttcaacacacaatgcctcgtgcacacagatttcctgtatgaataccaactccacacagggcattgtattgtggactgac

SEQ ID NO: 1097 - DNA, 122 bp, Homo sapiens
  misc_feature (61)..(62): /note="This region represents a CpG dinucleotide"
  misc_feature (61)..(61): /note="Nucleotide may be methylated to form 5-methylcytosine"
tcctatccttcaagtactatttgggaaacacacacacacacacacacacacacacacacacgctacacaccaactaggtgaccagtagagaaaaaaagagtagaacagaaaaagagctcttt

SEQ ID NO: 1098 - DNA, 122 bp, Homo sapiens
  misc_feature (61)..(62): /note="This region represents a CpG dinucleotide"
  misc_feature (61)..(61): /note="Nucleotide may be methylated to form 5-methylcytosine"
tgaaaggggatccccaggactccggtccagatctggggtttctccctccttgctgttgatcgggagcgctgccgcaggtgtcccattttcattaaaatgcacatcagagcgcctactggagc

SEQ ID NO: 1099 - DNA, 122 bp, Homo sapiens
  misc_feature (61)..(62): /note="This region represents a CpG dinucleotide"
  misc_feature (61)..(61): /note="Nucleotide may be methylated to form 5-methylcytosine"
ggtgccccccaggccaggcagcagtctcagtagcagcatcgaaaacttggagtcggaggccgtgttcgaggccaagttcaagcgcagccgcgagtcgcccctgtcgctggggctgcggctgc

SEQ ID NO: 1100 - DNA, 122 bp, Homo sapiens
  misc_feature (61)..(62): /note="This region represents a CpG dinucleotide"
  misc_feature (61)..(61): /note="Nucleotide may be methylated to form 5-methylcytosine"
cgtggtattcattccacagccccagagcaagttcccctgggggccgtcctgtgactcccccggccacaccgcacctcacccggagtccccagcccgccccacccagcctcaggtcacgcctt

SEQ ID NO: 1101 - DNA, 122 bp, Homo sapiens
  misc_feature (61)..(62): /note="This region represents a CpG dinucleotide"
  misc_feature (61)..(61): /note="Nucleotide may be methylated to form 5-methylcytosine"
tggagtgctggtgcacctatctcaaaacgctgtctcaaaactccaacagggagcacctaacggtactgggtgcaacattgctagcacggagcaaacagcagtccagtaacctggaacaacag

SEQ ID NO: 1102 - DNA, 122 bp, Homo sapiens
  misc_feature (61)..(62): /note="This region represents a CpG dinucleotide"
  misc_feature (61)..(61): /note="Nucleotide may be methylated to form 5-methylcytosine"
gaaaatatgcagataacatgaatcttagatctagatacttttctcctaaagaaaattgcccgggttgaagtcattttttggcctttccattctccctgggtggtccttaaagtgtctgtaaa

SEQ ID NO: 1103 - DNA, 122 bp, Homo sapiens
  misc_feature (61)..(62): /note="This region represents a CpG dinucleotide"
  misc_feature (61)..(61): /note="Nucleotide may be methylated to form 5-methylcytosine"
aaataactcagccctccccccgcgttcctttcatgaatgtgtgtgtagatgctgccatagcgggtgcacaggagccaggaatcatcactgccttatcccaggccttgctcattttctcacat

SEQ ID NO: 1104 - DNA, 122 bp, Homo sapiens
  misc_feature (61)..(62): /note="This region represents a CpG dinucleotide"
  misc_feature (61)..(61): /note="Nucleotide may be methylated to form 5-methylcytosine"
tacaaatagatccttgtttaaatcctcagcaagaacagccttgtgtaaagctttatccaccgtgtttcccttccctctcctcccccataaaataaaggaagaaaaacttcattgcagtcact

SEQ ID NO: 1105 - DNA, 122 bp, Homo sapiens
  misc_feature (61)..(62): /note="This region represents a CpG dinucleotide"
  misc_feature (61)..(61): /note="Nucleotide may be methylated to form 5-methylcytosine"
tcctttcaatagaaccatattatgttgggctttgttgtatttcctgctttggcccaataacggggctttagtgacccttgcttgttttgaagaaagatgacagatttcctgcagctctttct

SEQ ID NO: 1106 - DNA, 122 bp, Homo sapiens
  misc_feature (61)..(62): /note="This region represents a CpG dinucleotide"
  misc_feature (61)..(61): /note="Nucleotide may be methylated to form 5-methylcytosine"
cactgcactccagcctgggtgacagagtgagactccgtgtaaaaaaaaaaaaaagaaaaacggaaaaacaaatactataatggtatcccccaagccagacaggcgggtcttgcagacggagg

SEQ ID NO: 1107 - DNA, 122 bp, Homo sapiens
  misc_feature (61)..(62): /note="This region represents a CpG dinucleotide"
  misc_feature (61)..(61): /note="Nucleotide may be methylated to form 5-methylcytosine"
ttgggacctgagattctcggaagccaagccttgtcctggtttctgaaacacccccaaccgcgtcccgacactgaccagccgccggaacagcctctgcagttgcgccgcgtcctcccggagcc

SEQ ID NO: 1108 - DNA, 122 bp, Homo sapiens
  misc_feature (61)..(62): /note="This region represents a CpG dinucleotide"
  misc_feature (61)..(61): /note="Nucleotide may be methylated to form 5-methylcytosine"
ctatgtacaataaatagcattcccacggtgaccacaagtcttggaatcagttccaggtgtcgtcgtggccgttgacaccgctgccttctgacggtaaatgtattgtagaattcatgttgttc

SEQ ID NO: 1109 - DNA, 122 bp, Homo sapiens
  misc_feature (61)..(62): /note="This region represents a CpG dinucleotide"
  misc_feature (61)..(61): /note="Nucleotide may be methylated to form 5-methylcytosine"
tgtcagacagtaatttggatgggggatcacatcctaagtttagaaactagaattcaaatgcgttgtgtttggaatatatccgatttttgcattactcctcatagttacaatgagacagaaca

SEQ ID NO: 1110 - DNA, 122 bp, Homo sapiens
  misc_feature (61)..(62): /note="This region represents a CpG dinucleotide"
  misc_feature (61)..(61): /note="Nucleotide may be methylated to form 5-methylcytosine"
actgtttacccatctgacatcactgtttgccagctattagcattatttaattagctccttcgacaaaccaagtcaatgtcaggagctgtttctgtgacttaaaacacaacctacaccagccc

SEQ ID NO: 1111 - DNA, 122 bp, Homo sapiens
  misc_feature (61)..(62): /note="This region represents a CpG dinucleotide"
  misc_feature (61)..(61): /note="Nucleotide may be methylated to form 5-methylcytosine"
gaaaaaaaaaaaaaaaaaaaccctttcagaacagtttgtgctcctgttcagcccaggagacgtcgttcctgcttttacgcggcgccatgtccttcttggcgtacacttggcaaaacagaatg

SEQ ID NO: 1112 - DNA, 122 bp, Homo sapiens
  misc_feature (61)..(62): /note="This region represents a CpG dinucleotide"
  misc_feature (61)..(61): /note="Nucleotide may be methylated to form 5-methylcytosine"
tgtgaggagacagttgtgtagggacaactgaggtggtgggataagaataagaaagtgcttcgaggactctgctgacagccatcttgaaccactgccacacttgtaaaggtgtttgtttccta

SEQ ID NO: 1113 - DNA, 122 bp, Homo sapiens
  misc_feature (61)..(62): /note="This region represents a CpG dinucleotide"
  misc_feature (61)..(61): /note="Nucleotide may be methylated to form 5-methylcytosine"
atgaagatcaagcaatttctttagctgagttttagaagaaacgtgacacacaattggaaacgttcaggcatcaaggcaggaagcaacagtgcatgatacgagttcaagatgatgaaaactct

SEQ ID NO: 1114 - DNA, 122 bp, Homo sapiens
  misc_feature (61)..(62): /note="This region represents a CpG dinucleotide"
  misc_feature (61)..(61): /note="Nucleotide may be methylated to form 5-methylcytosine"
tatttaatgagatacctgcattcactcaccccctctcccgcaaccaccccttcagcaagtcgcgctccacccaattaggaggggctttaggctgggcctaaaaagttgggccaagaccccac

SEQ ID NO: 1115 - DNA, 122 bp, Homo sapiens
  misc_feature (61)..(62): /note="This region represents a CpG dinucleotide"
  misc_feature (61)..(61): /note="Nucleotide may be methylated to form 5-methylcytosine"
actccgccaccctctcgttagctgcggcctgtggaatacgtgcacgtgctcacacagtcccgtctcacaagccccctgaggcccctcccgaggccttgctccctggaccttgggttcccact

SEQ ID NO: 1116 - DNA, 122 bp, Homo sapiens
  misc_feature (61)..(62): /note="This region represents a CpG dinucleotide"
  misc_feature (61)..(61): /note="Nucleotide may be methylated to form 5-methylcytosine"
acccagcaggaatgccagcgctgggtgccctgcaagcaatactgcctggaggtgcagacccggtgcccctttatactccccgacaatgaggaaatggtgtacggagggctccctggctttat

SEQ ID NO: 1117 - DNA, 122 bp, Homo sapiens
  misc_feature (61)..(62): /note="This region represents a CpG dinucleotide"
  misc_feature (61)..(61): /note="Nucleotide may be methylated to form 5-methylcytosine"
cacctctggggcaggctggggtcccagcccagaatagtcagcaacggtgagcccaggagccgcgtccctgggcagggctgaccgcgtggctggggcagccttggagggcactccgctgggcc

SEQ ID NO: 1118 - DNA, 122 bp, Homo sapiens
  misc_feature (61)..(62): /note="This region represents a CpG dinucleotide"
  misc_feature (61)..(61): /note="Nucleotide may be methylated to form 5-methylcytosine"
caggtgcccaccaccttgcatacagagagttactgtggggcttgccctacaaaatgtccacgacaggaaaagagcttgcagcacactcaacattaatcattaggtcagcatgctctcgacct

SEQ ID NO: 1119 - DNA, 122 bp, Homo sapiens
  misc_feature (61)..(62): /note="This region represents a CpG dinucleotide"
  misc_feature (61)..(61): /note="Nucleotide may be methylated to form 5-methylcytosine"
agggcccgtgaaaagaccagtactgacataaccccatgcaggatgtacagacacggagcccggcacgggacagcccccgagcttacttaaatgaaagagcatcaacacaatgttatagaaaa

SEQ ID NO: 1120 - DNA, 122 bp, Homo sapiens
  misc_feature (61)..(62): /note="This region represents a CpG dinucleotide"
  misc_feature (61)..(61): /note="Nucleotide may be methylated to form 5-methylcytosine"
agacttcttaaggtggtgtgactgtgacttgcttacttttcgagatcaacaacaacaaagcgacaaaatggtgctcctacatattagttgaaagattcagcatgtgaaggggatcgaagtgt

SEQ ID NO: 1121 - DNA, 122 bp, Homo sapiens
  misc_feature (61)..(62): /note="This region represents a CpG dinucleotide"
  misc_feature (61)..(61): /note="Nucleotide may be methylated to form 5-methylcytosine"
accaacgttgtatcttggttctgtcttaacacattggtgcactgcagtgaatctctcctccgccagcctcaggtcgtggggtgctcaggactcctggctgctgcatacacagcctcacgtgg

SEQ ID NO: 1122 - DNA, 122 bp, Homo sapiens
  misc_feature (61)..(62): /note="This region represents a CpG dinucleotide"
  misc_feature (61)..(61): /note="Nucleotide may be methylated to form 5-methylcytosine"
tttacttcctgagacagactcatgggggatcggggctcaggtgcacctggatgtgaaagccgggaaggcctccctcactcccacacagagcccgtggattcgtctgctctctgggtgctggg

SEQ ID NO: 1123 - DNA, 122 bp, Homo sapiens
  misc_feature (61)..(62): /note="This region represents a CpG dinucleotide"
  misc_feature (61)..(61): /note="Nucleotide may be methylated to form 5-methylcytosine"
tgatctcatcccagccttgaagcgggtattgttcacccattttatggatgaggctcagagcggggacttgcccaggtcacatgagtcactggctgagcatctcagacatcgggctgcctgac

SEQ ID NO: 1124 - DNA, 122 bp, Homo sapiens
  misc_feature (61)..(62): /note="This region represents a CpG dinucleotide"
  misc_feature (61)..(61): /note="Nucleotide may be methylated to form 5-methylcytosine"
cctagcgagcttttaaatcttccagggcccaaaccacattgtgaaccaattaaatcaggacgtctggggctagaagccagtcatcagtatctttttttaagctcccaaagtgattccaatgt

SEQ ID NO: 1125 - DNA, 122 bp, Homo sapiens
  misc_feature (61)..(62): /note="This region represents a CpG dinucleotide"
  misc_feature (61)..(61): /note="Nucleotide may be methylated to form 5-methylcytosine"
ccgttcataggaatttgcctgcacacatgtaaaattttctagaaggatatgcacaagcaacgggtaacagtgtttgtctctagggagaaaaaaatgaggagaactggtcactgggataggaa

SEQ ID NO: 1126 - DNA, 122 bp, Homo sapiens
  misc_feature (61)..(62): /note="This region represents a CpG dinucleotide"
  misc_feature (61)..(61): /note="Nucleotide may be methylated to form 5-methylcytosine"
atgatgccagagagagattactgtgaacaaagcaacaggatgtgaaataactggtgttttcgaaacaatgagacaaatttagggtggccggcatgaggcaaccaagagtggaatgggtgtgg

SEQ ID NO: 1127 - DNA, 122 bp, Homo sapiens
  misc_feature (61)..(62): /note="This region represents a CpG dinucleotide"
  misc_feature (61)..(61): /note="Nucleotide may be methylated to form 5-methylcytosine"
tcccagctttgtttacatatttgtggtgcacaaaaatagaaatggactaaacaaaattcccgattttcccaaactgtggtggattgcagaaaccaagacttcgcagggctcggttctgaaat

SEQ ID NO: 1128 - DNA, 122 bp, Homo sapiens
  misc_feature (61)..(62): /note="This region represents a CpG dinucleotide"
  misc_feature (61)..(61): /note="Nucleotide may be methylated to form 5-methylcytosine"
ggggccacagtggtgtgagcaggaagaggctggcaggtgggaagggaagtgggagaaagtcgtgcagaaaatgccttccgaacgctgatgcacagggtttaaactgctgggattttactcaa

SEQ ID NO: 1129 - DNA, 122 bp, Homo sapiens
  misc_feature (61)..(62): /note="This region represents a CpG dinucleotide"
  misc_feature (61)..(61): /note="Nucleotide may be methylated to form 5-methylcytosine"
ccagaagactcattttgaccccggcctgtcgtcatcgagagcaaggccacggcagtcacccgctgcccttgtgcgcaatcgctgctcagtggacgctgcctccgtggccttgttctgaccca

SEQ ID NO: 1130 - DNA, 122 bp, Homo sapiens
  misc_feature (61)..(62): /note="This region represents a CpG dinucleotide"
  misc_feature (61)..(61): /note="Nucleotide may be methylated to form 5-methylcytosine"
gctggggtaaagactactggggtgtcttctaagacgccgattttgagggagattcaccatcgggcaggtggcagggggttctgttggggcagccgggtggcttcctttttggggtgggggag

SEQ ID NO: 1131 - DNA, 122 bp, Homo sapiens
  misc_feature (61)..(62): /note="This region represents a CpG dinucleotide"
  misc_feature (61)..(61): /note="Nucleotide may be methylated to form 5-methylcytosine"
aacagctttgaattttatgtcagttgatgttaagatccaacaggaagtttaccctgataacgttaagatgaacagtttgaaagcagcttcctgctggaagttgaaatagagatgattcagat

SEQ ID NO: 1132 - DNA, 122 bp, Homo sapiens
  misc_feature (61)..(62): /note="This region represents a CpG dinucleotide"
  misc_feature (61)..(61): /note="Nucleotide may be methylated to form 5-methylcytosine"
ccaagatctgagtcatgctaggtaaaagccactgtcattttaaaatcatttctcctccctcggtcctacgtgatgtatttgctattagactgaaggatactgtgttcatattgttgatctca

SEQ ID NO: 1133 - DNA, 122 bp, Homo sapiens
  misc_feature (61)..(62): /note="This region represents a CpG dinucleotide"
  misc_feature (61)..(61): /note="Nucleotide may be methylated to form 5-methylcytosine"
ctccaggcgggaggccactttcagccactctcagacaaaatccctgggggaaggcccccccggctgctctctcccaggactgattacaagcaaacagctggaggcaaacatctgctcctctc

SEQ ID NO: 1134 - DNA, 122 bp, Homo sapiens
  misc_feature (61)..(62): /note="This region represents a CpG dinucleotide"
  misc_feature (61)..(61): /note="Nucleotide may be methylated to form 5-methylcytosine"
actttattcttcagactgtcagtttttagaatagtgctaaggttttgcttttaaatgaaacggaagacagatattttggccacggaagacttgcacattactcagagcaaatattaccagca

SEQ ID NO: 1135 - DNA, 122 bp, Homo sapiens
  misc_feature (61)..(62): /note="This region represents a CpG dinucleotide"
  misc_feature (61)..(61): /note="Nucleotide may be methylated to form 5-methylcytosine"
aattccaaggtgccagcatctggtgaaggccttcttactgggtcgaaatgtggcagaaggcgtcgtatggcagaagggcaaggggagggtgagagagggcaagagagagggctgaactcatc

SEQ ID NO: 1136 - DNA, 122 bp, Homo sapiens
  misc_feature (61)..(62): /note="This region represents a CpG dinucleotide"
  misc_feature (61)..(61): /note="Nucleotide may be methylated to form 5-methylcytosine"
gcttttgtgcagaattgaagaatgtttactatgttttccttcctgtctctctggaaatgacgcaaagaataacaacaacaaaaaagaactccttgtcccgtgcaaaacacccgcccctcccc

SEQ ID NO: 1137 - DNA, 122 bp, Homo sapiens
  misc_feature (61)..(62): /note="This region represents a CpG dinucleotide"
  misc_feature (61)..(61): /note="Nucleotide may be methylated to form 5-methylcytosine"
gttgagaagtatcttaatgagttaacacatacctcctgtataatccaactgttccatatccgggaagagaaataaaagcctatgtccataaaagacctgaataattgtagcagctttattca

SEQ ID NO: 1138 - DNA, 122 bp, Homo sapiens
  misc_feature (61)..(62): /note="This region represents a CpG dinucleotide"
  misc_feature (61)..(61): /note="Nucleotide may be methylated to form 5-methylcytosine"
agcccctgtctgggtagcactgggtgacagcgcccctggtggtcaggtcttggtattccccgtgcatgttgtgggtgcccctcccagagtcatagcgcagtcagatgccaagttcttcaccc

SEQ ID NO: 1139 - DNA, 122 bp, Homo sapiens
  misc_feature (61)..(62): /note="This region represents a CpG dinucleotide"
  misc_feature (61)..(61): /note="Nucleotide may be methylated to form 5-methylcytosine"
ggcgggactgggagttttcctgggcgacgtcttctgcatctcgcttgcttcctggccttgcggcagggggcgcgcgtggcaccagtgtgagcctccacccccctctgcctgctccagggtcc

SEQ ID NO: 1140 - DNA, 122 bp, Homo sapiens
  misc_feature (61)..(62): /note="This region represents a CpG dinucleotide"
  misc_feature (61)..(61): /note="Nucleotide may be methylated to form 5-methylcytosine"
agcatttatctcacttttgttttccctctgggaactgcttgatttatttgccaccactcacgcaatactacccactctatataaatagagggagtgttttatagagtgtgtttattttctcc

SEQ ID NO: 1141 - DNA, 122 bp, Homo sapiens
  misc_feature (61)..(62): /note="This region represents a CpG dinucleotide"
  misc_feature (61)..(61): /note="Nucleotide may be methylated to form 5-methylcytosine"
aagatgggtggcttaaactttcaagcatcctggggaaagacttgggttaaatgcgcacgccgtttcccgcagcccttcacatctccagggctgaaccctgaatctgtctcctaatggaagtg

SEQ ID NO: 1142 - DNA, 122 bp, Homo sapiens
  misc_feature (61)..(62): /note="This region represents a CpG dinucleotide"
  misc_feature (61)..(61): /note="Nucleotide may be methylated to form 5-methylcytosine"
cagcggccccggcccagagcgctccacactcggagctagccagctgggacagagcaacagcgcagcgcgggcagccacagcctgcaccggccccgcggggacctgctgtgtgtgggtgtgaa

SEQ ID NO: 1143 - DNA, 122 bp, Homo sapiens
  misc_feature (61)..(62): /note="This region represents a CpG dinucleotide"
  misc_feature (61)..(61): /note="Nucleotide may be methylated to form 5-methylcytosine"
cctctcttgtttcctgcacctgaagtatactgggtcactactcagttcagggaataaacacggtatcttctgtgaagatgtccctcaaccaggttcaccccctaggggtagtcacttctttg

SEQ ID NO: 1144 - DNA, 122 bp, Homo sapiens
  misc_feature (61)..(62): /note="This region represents a CpG dinucleotide"
  misc_feature (61)..(61): /note="Nucleotide may be methylated to form 5-methylcytosine"
gacttcgaagtggtttgcaatccgaaagtgagaccttgagtcctcagatggccggcaacgcgccgaggtcacgctccccagaaacacccctctcccctcccctaccccagctccccctgggg

SEQ ID NO: 1145 - DNA, 122 bp, Homo sapiens
  misc_feature (61)..(62): /note="This region represents a CpG dinucleotide"
  misc_feature (61)..(61): /note="Nucleotide may be methylated to form 5-methylcytosine"
tatatttgttcaacctaagccatgtccttcgagaagcagattagcacagtgaatcatggacgttagttttcctgttaccagactggtctggctaagctacatctttcaggaaaacctgctgt

SEQ ID NO: 1146 - DNA, 122 bp, Homo sapiens
  misc_feature (61)..(62): /note="This region represents a CpG dinucleotide"
  misc_feature (61)..(61): /note="Nucleotide may be methylated to form 5-methylcytosine"
gttctgccttgtattccctttgtctgcactaagctgcaactttgaatgcacatggggtggcgaggaaggaagaagagtaagaaaacaggaaaaacgaagtaggatagagagagcagcctctt

SEQ ID NO: 1147 - DNA, 122 bp, Homo sapiens
  misc_feature (61)..(62): /note="This region represents a CpG dinucleotide"
  misc_feature (61)..(61): /note="Nucleotide may be methylated to form 5-methylcytosine"
ttcccagcccttctcgtattcctcccaaatattccgggaggtggtcctagggggctgactcgtgtgcttcccaagttcatcttctgtggcaccgggtgttctccctggctttagtgcacagc

SEQ ID NO: 1148 - DNA, 122 bp, Homo sapiens
  misc_feature (61)..(62): /note="This region represents a CpG dinucleotide"
  misc_feature (61)..(61): /note="Nucleotide may be methylated to form 5-methylcytosine"
gttttgactctggagctgcattcttcattcttatcctacacttgcttgtgaattctttttcgtccttccagaatccctgaagctgtacagctatactttaccggttacgtctagactataaa

SEQ ID NO: 1149 - DNA, 122 bp, Homo sapiens
  misc_feature (61)..(62): /note="This region represents a CpG dinucleotide"
  misc_feature (61)..(61): /note="Nucleotide may be methylated to form 5-methylcytosine"
cttggatgttagaactcagtgttctccagacttcggattctggaacttgcaccagcaatccgtcaggttctcaggcctctgacctcatactgagagttactctgtaagctcccttggttctg

SEQ ID NO: 1150 - DNA, 122 bp, Homo sapiens
  misc_feature (61)..(62): /note="This region represents a CpG dinucleotide"
  misc_feature (61)..(61): /note="Nucleotide may be methylated to form 5-methylcytosine"
acagttttgtaatattaattacatcctcattgttttgcaatgattaccactatccatctacggaagtctttccatcttgcaaaactggaactacgacccattaaacaataactctccatttc

SEQ ID NO: 1151 - DNA, 122 bp, Homo sapiens
  misc_feature (61)..(62): /note="This region represents a CpG dinucleotide"
  misc_feature (61)..(61): /note="Nucleotide may be methylated to form 5-methylcytosine"
aagaaaacttggctgaacaaaatcagtcccagtctatcactctgctctaaggagtctttgcgattaaaggcttgatgttttttctttaaaaagaaaagaaaaaagctgccagcaataattag

SEQ ID NO: 1152 - DNA, 122 bp, Homo sapiens
  misc_feature (61)..(62): /note="This region represents a CpG dinucleotide"
  misc_feature (61)..(61): /note="Nucleotide may be methylated to form 5-methylcytosine"
ctgttcggagccgcagaaaacatgacagctgtaatcaattagggtggttcctgcctcaagcgccggctgcctcggattccaacggctttcctggcggctgtgagcgcctcgggatgcagacc

SEQ ID NO: 1153 - DNA, 122 bp, Homo sapiens
  misc_feature (61)..(62): /note="This region represents a CpG dinucleotide"
  misc_feature (61)..(61): /note="Nucleotide may be methylated to form 5-methylcytosine"
tcccattttgctccttccaactgtaaagagagaagacagagaataggtgcctagtccagtcggggaggggaaatcaaacaagctgaagtaaattgccatgggaaaggacagtcaagctttgg

SEQ ID NO: 1154 - DNA, 122 bp, Homo sapiens
  misc_feature (61)..(62): /note="This region represents a CpG dinucleotide"
  misc_feature (61)..(61): /note="Nucleotide may be methylated to form 5-methylcytosine"
ataaaatactggacacataaacccagtacgtgatataaatattatttttaagtaaatgtgcgtgtgaggggatggtttgaaaatcatttcatctcagggaagtctttttcgtggatcaaaac

SEQ ID NO: 1155 - DNA, 122 bp, Homo sapiens
  misc_feature (61)..(62): /note="This region represents a CpG dinucleotide"
  misc_feature (61)..(61): /note="Nucleotide may be methylated to form 5-methylcytosine"
actcgagagacactccttcagttatttaataaccacacactctgctctgtgccgggccctcggcttggagatggatttatggagctaaattaattattcatttatgtattccagaaaattta

SEQ ID NO: 1156 - DNA, 122 bp, Homo sapiens
  misc_feature (61)..(62): /note="This region represents a CpG dinucleotide"
  misc_feature (61)..(61): /note="Nucleotide may be methylated to form 5-methylcytosine"
gcgtactcaagataatcctggcttttgcttggtttttaatcagcgtttttgccaggccaccgtttcaagatactaaacgcaaactgtgagagaagtaattagacgctgaatggtttgggcaa

SEQ ID NO: 1157 - DNA, 122 bp, Homo sapiens
  misc_feature (61)..(62): /note="This region represents a CpG dinucleotide"
  misc_feature (61)..(61): /note="Nucleotide may be methylated to form 5-methylcytosine"
ctaccctcctgctacaggacagaaaaaaacacggtggttttatttccatttcttatcacacggtgtccactgcctgagctgcacagggaggcattttgtcatttcactgtaggggtctcctg

SEQ ID NO: 1158 - DNA, 122 bp, Homo sapiens
  misc_feature (61)..(62): /note="This region represents a CpG dinucleotide"
  misc_feature (61)..(61): /note="Nucleotide may be methylated to form 5-methylcytosine"
ctgctatgaaggttaaataagacaacaccctagaatgatgcatagagtagccttaacaaacggttgctgctactaaatgggtactctgtttgcagggaatatcctcaggagagaagtctcac

SEQ ID NO: 1159 - DNA, 122 bp, Homo sapiens
  misc_feature (61)..(62): /note="This region represents a CpG dinucleotide"
  misc_feature (61)..(61): /note="Nucleotide may be methylated to form 5-methylcytosine"
ctggccattgacgcagaggtggccatctgtgcaccaaaagtgtatgctccccagctgagtcgttgctggaaaacagcagcccagccagggactatgtttcctggcccccttgcctctgtgtg

SEQ ID NO: 1160 - DNA, 122 bp, Homo sapiens
  misc_feature (61)..(62): /note="This region represents a CpG dinucleotide"
  misc_feature (61)..(61): /note="Nucleotide may be methylated to form 5-methylcytosine"
gtttcacctaatgaagtcttctcagtgctttagacctcagtgagatctctggatgcatatcgctaacgcctttttatgctcaatcacatgccacagtcaacatgcaatactcaagacagaaa

SEQ ID NO: 1161 - DNA, 122 bp, Homo sapiens
  misc_feature (61)..(62): /note="This region represents a CpG dinucleotide"
  misc_feature (61)..(61): /note="Nucleotide may be methylated to form 5-methylcytosine"
caggccccttcagggattcccatgaggacagaagggactaggcattcaggcctttaataccgtataggtttttaaagggtagtgggtccactatatcatctcaaaatgattctccaactatg

SEQ ID NO: 1162 - DNA, 122 bp, Homo sapiens
  misc_feature (61)..(62): /note="This region represents a CpG dinucleotide"
  misc_feature (61)..(61): /note="Nucleotide may be methylated to form 5-methylcytosine"
cttcagcagcagcactgggaaacaagaaggaaggcaatggattgggtctccagcaccgtgcgtggggatgactctttcaggactcaaacacacgctattgtggcattcaggaagaggatttc

SEQ ID NO: 1163 - DNA, 122 bp, Homo sapiens
  misc_feature (61)..(62): /note="This region represents a CpG dinucleotide"
  misc_feature (61)..(61): /note="Nucleotide may be methylated to form 5-methylcytosine"
atggttcaatgtctttttctagatccatcaactccaacaagaagaaacaagcctggccctcgtagtaaaaagatgaccagagtcaaaatctgaaaccaattttgagcttggctctgtcattt

SEQ ID NO: 1164 - DNA, 122 bp, Homo sapiens
  misc_feature (61)..(62): /note="This region represents a CpG dinucleotide"
  misc_feature (61)..(61): /note="Nucleotide may be methylated to form 5-methylcytosine"
ataatttatgaaggatttttattcttgatttggtaccttatgcatagactgtaaaactaacggagatctgctcagcttacatgttgcaacaggtgttccctgctgccccagttgatgttctg

SEQ ID NO: 1165 - DNA, 122 bp, Homo sapiens
  misc_feature (61)..(62): /note="This region represents a CpG dinucleotide"
  misc_feature (61)..(61): /note="Nucleotide may be methylated to form 5-methylcytosine"
attagtagccggctgagaaagttgctggaagttgtgcaactgctgcttaactttgaactgcgggattgttgtggctgctgcacctctggagacctgcccagcttcagcctcgaagaaggcgt

SEQ ID NO: 1166 - DNA, 122 bp, Homo sapiens
  misc_feature (61)..(62): /note="This region represents a CpG dinucleotide"
  misc_feature (61)..(61): /note="Nucleotide may be methylated to form 5-methylcytosine"
gtcaggttgtaggttaattccccaactcaaacttccccgatcaaacattgtcaggccaggcgactgttttggtttatggatgataaagtatagggccaaggtaggccaagagtagaagacag

SEQ ID NO: 1167 - DNA, 122 bp, Homo sapiens
  misc_feature (61)..(62): /note="This region represents a CpG dinucleotide"
  misc_feature (61)..(61): /note="Nucleotide may be methylated to form 5-methylcytosine"
tcctccttttaaatcaactggggatctagggagtcagccctcagctttggcccacgaattcgtcttatcctgagctttagggatcttgtatgatcagagtgggcatttctttgagttgaggt

SEQ ID NO: 1168 - DNA, 122 bp, Homo sapiens
  misc_feature (61)..(62): /note="This region represents a CpG dinucleotide"
  misc_feature (61)..(61): /note="Nucleotide may be methylated to form 5-methylcytosine"
taggccagcttcactattacttttcctccttttacgaccaccaagaccagtgttcagatccgatgggaaagggatcaggaggattaagctgatcaactttaccttaaagcacagctccagaa

SEQ ID NO: 1169 - DNA, 122 bp, Homo sapiens
  misc_feature (61)..(62): /note="This region represents a CpG dinucleotide"
  misc_feature (61)..(61): /note="Nucleotide may be methylated to form 5-methylcytosine"
tgagggagggcatgtcaaatgtgtgtcatggccgagacacctccaaaaagccactgctgccgcctgagcagagcatgctgaaggctgtggtttactgacttcatcacaagccctagaggaaa

SEQ ID NO: 1170 - DNA, 122 bp, Homo sapiens
  misc_feature (61)..(62): /note="This region represents a CpG dinucleotide"
  misc_feature (61)..(61): /note="Nucleotide may be methylated to form 5-methylcytosine"
ataatcaaatgattggacaaccacccccacgtcagcaatgacacttcgccgcagtaaaggcgggtgctagcaacctgcttcttcactgttaaggtctacagcaaaccaatcctcttcctccg

SEQ ID NO: 1171 - DNA, 122 bp, Homo sapiens
  misc_feature (61)..(62): /note="This region represents a CpG dinucleotide"
  misc_feature (61)..(61): /note="Nucleotide may be methylated to form 5-methylcytosine"
ggcttagtgtctctctccccctgccagaatgtaagttccatgagtccatggatgtttgtccgatttgttcacggatgttttttcagcaccagaatggagcctggcacactgtaggcactcag

SEQ ID NO: 1172 - DNA, 122 bp, Homo sapiens
  misc_feature (61)..(62): /note="This region represents a CpG dinucleotide"
  misc_feature (61)..(61): /note="Nucleotide may be methylated to form 5-methylcytosine"
cggccccccgcaagcagggatggggcggcgagagcgtgacctggggcgtctccgagactccgccccacgggggtatcctgaggctcatatgggaagtggacagtgcccctccagagaaacgg

SEQ ID NO: 1173 - DNA, 122 bp, Homo sapiens
  misc_feature (61)..(62): /note="This region represents a CpG dinucleotide"
  misc_feature (61)..(61): /note="Nucleotide may be methylated to form 5-methylcytosine"
aatgaatttgctcaaggggagagggaagtcactgtagctagaaggataattaccagccaacggtgtttagtcagcagactttgatgaatttagatgagaaagtagatgaggtatgtgaatgt

SEQ ID NO: 1174 - DNA, 122 bp, Homo sapiens
  misc_feature (61)..(62): /note="This region represents a CpG dinucleotide"
  misc_feature (61)..(61): /note="Nucleotide may be methylated to form 5-methylcytosine"
tatcagaatggggaagaaaggggggaaaaacggagagacaccaagaaagaacgaaatctacgcggacccttgggtctccaaaagggaagcagtcctgcattaagtttaaagaaggagcgcgg

SEQ ID NO: 1175 - DNA, 122 bp, Homo sapiens
  misc_feature (61)..(62): /note="This region represents a CpG dinucleotide"
  misc_feature (61)..(61): /note="Nucleotide may be methylated to form 5-methylcytosine"
tttacatagctacaatgacatgatcacatagttaacagcacacagtgtaatctcataccccgaatcacatttccttgactgtcctcttttagcagctggtttgcttcagattgcaaagaagt

SEQ ID NO: 1176 - DNA, 122 bp, Homo sapiens
  misc_feature (61)..(62): /note="This region represents a CpG dinucleotide"
  misc_feature (61)..(61): /note="Nucleotide may be methylated to form 5-methylcytosine"
agatgaagttactactatatttcaccaccctgcaggtaactgaaactcaattaccgctgccgctcactcggttccatccccctgagtttagatagctctggtgcctctcagaactcccctgt

SEQ ID NO: 1177 - DNA, 122 bp, Homo sapiens
  misc_feature (61)..(62): /note="This region represents a CpG dinucleotide"
  misc_feature (61)..(61): /note="Nucleotide may be methylated to form 5-methylcytosine"
taaatacactctatgatcttcagacagtggcaaaactgcctaacaagacatttctcagaacgtatccccatcattgcacaatgcatgactgtatataatttgctcctgtcttcccaagaacc

SEQ ID NO: 1178 - DNA, 122 bp, Homo sapiens
  misc_feature (61)..(62): /note="This region represents a CpG dinucleotide"
  misc_feature (61)..(61): /note="Nucleotide may be methylated to form 5-methylcytosine"
ccggctacgcgccgccccctcctctagcaggaaagcgggccgctgggacccctggctctccgaaaacagcctcgtcacctttcgctacccctggcttaatctaggtgagctgatgatagcat

SEQ ID NO: 1179 - DNA, 122 bp, Homo sapiens
  misc_feature (61)..(62): /note="This region represents a CpG dinucleotide"
  misc_feature (61)..(61): /note="Nucleotide may be methylated to form 5-methylcytosine"
gcaggatgggggtagattcctattaccttgctgccctcaagtacataaggaggtcacagtcgttaactccaggcatccagaccagttcctcatgttgggtcactgtatcaccatctggagaa

SEQ ID NO: 1180 - DNA, 122 bp, Homo sapiens
  misc_feature (61)..(62): /note="This region represents a CpG dinucleotide"
  misc_feature (61)..(61): /note="Nucleotide may be methylated to form 5-methylcytosine"
tagtctttgatacagaagccacaaggcacatcatctcatttcatctaatgacctggaaggcgtggctgtcacctccatggtgagtaaataacccactgccgaaggtgaagtgttgcccgggg

SEQ ID NO: 1181 - DNA, 122 bp, Homo sapiens
  misc_feature (61)..(62): /note="This region represents a CpG dinucleotide"
  misc_feature (61)..(61): /note="Nucleotide may be methylated to form 5-methylcytosine"
cttatccaaaaatatcacctttataatacagagctctgctctggctctctatacaaagaacgcccagaataaatatgatgataacaggaaaacaaagaccaaacattttgaaggcataatgt

SEQ ID NO: 1182 - DNA, 122 bp, Homo sapiens
  misc_feature (61)..(62): /note="This region represents a CpG dinucleotide"
  misc_feature (61)..(61): /note="Nucleotide may be methylated to form 5-methylcytosine"
gggaacgtggagatcacatagggagaagcccaggttagctccctggagcatgagaggccacgtggagagaaagatgcagccatcccagctgctgtctgttttaaatgttggctgtattatta

SEQ ID NO: 1183 - DNA, 122 bp, Homo sapiens
  misc_feature (61)..(62): /note="This region represents a CpG dinucleotide"
  misc_feature (61)..(61): /note="Nucleotide may be methylated to form 5-methylcytosine"
acaaccaatcaggatgcagaggaagggcgggcgttgcccgggcaaattcaaactgacaaccgctgcaacttggcactgttccaaatcactaaccgacgggggaccgacgagtattttaattg

SEQ ID NO: 1184 - DNA, 122 bp, Homo sapiens
  misc_feature (61)..(62): /note="This region represents a CpG dinucleotide"
  misc_feature (61)..(61): /note="Nucleotide may be methylated to form 5-methylcytosine"
tgtggcaacctcaaggtcatcattatgagcagcgcgatgaaaacaaaactttagctggtccgatcctctcataattcccgttactttactgaaagttttagtgctttaactaaaaaaaatta

SEQ ID NO: 1185 - DNA, 122 bp, Homo sapiens
  misc_feature (61)..(62): /note="This region represents a CpG dinucleotide"
  misc_feature (61)..(61): /note="Nucleotide may be methylated to form 5-methylcytosine"
acttcctgtgttggtttcctgtgaagtcagaaaatatttcccaatctgcttgacggtaaacgaatatgctgacattctggtttttcatatgtgagaggtagggaagcctaacattaagtagc

SEQ ID NO: 1186 - DNA, 122 bp, Homo sapiens
  misc_feature (61)..(62): /note="This region represents a CpG dinucleotide"
  misc_feature (61)..(61): /note="Nucleotide may be methylated to form 5-methylcytosine"
atcgagcaatccagaccacaggaaagtaccttgccccttctaagccctagatctaacatgcggagcagccaggagactgtgagaaggaactgcttgaggaagtatcccaggcattccttcag

SEQ ID NO: 1187 - DNA, 122 bp, Homo sapiens
  misc_feature (61)..(62): /note="This region represents a CpG dinucleotide"
  misc_feature (61)..(61): /note="Nucleotide may be methylated to form 5-methylcytosine"
aagaaacatactctttaagggagtctttgctgggtgaagtgattttgattgagtcatttacgtcatgaggcattgtctcatgtttaaatgaatgacttggactagtagatttccaacccctt

SEQ ID NO: 1188 - DNA, 122 bp, Homo sapiens
  misc_feature (61)..(62): /note="This region represents a CpG dinucleotide"
  misc_feature (61)..(61): /note="Nucleotide may be methylated to form 5-methylcytosine"
gcagtatttgactttgtgtctgttatttcacttaaagataactgcctctagttccattcacgttgctgcaaaggacatgatttcattcttttacatggctgagtagtcttcgtgtgtgtgtg

SEQ ID NO: 1189 - DNA, 122 bp, Homo sapiens
  misc_feature (61)..(62): /note="This region represents a CpG dinucleotide"
  misc_feature (61)..(61): /note="Nucleotide may be methylated to form 5-methylcytosine"
gaaccaactgccgggagattctgattggctcagccgcgtgcccacgtgaccgaccaaaaccggccaccagggtctcccaactgcctgtcaaacgcacagccctgttgggcccccggagagga

SEQ ID NO: 1190 - DNA, 122 bp, Homo sapiens
  misc_feature (61)..(62): /note="This region represents a CpG dinucleotide"
  misc_feature (61)..(61): /note="Nucleotide may be methylated to form 5-methylcytosine"
atttctgtaccaacaaccttgcaatggcttccttttgttcttagaataataaaatccaagcgcccattatttggccttggtttaccttttcagccttcctttccacttactcttgagacatt

SEQ ID NO: 1191 - DNA, 122 bp, Homo sapiens
  misc_feature (61)..(62): /note="This region represents a CpG dinucleotide"
  misc_feature (61)..(61): /note="Nucleotide may be methylated to form 5-methylcytosine"
atgcctggtgagtggcggacctgcctagagaggcttctggtgtgctccttcctgccgctccgtgaccgtgacagcctctgcagtggtgtggaaatcagcacattctctttcttactccgaag

SEQ ID NO: 1192 - DNA, 122 bp, Homo sapiens
  misc_feature (61)..(62): /note="This region represents a CpG dinucleotide"
  misc_feature (61)..(61): /note="Nucleotide may be methylated to form 5-methylcytosine"
gaaaacaaaaaaattaggggtattgattttgtagctgcgctaagtaacctttgctttttgcgtcccttggtctcagtcctagccatttcctatccaccctgtggctaatttgtcctttctgt

SEQ ID NO: 1193 - DNA, 122 bp, Homo sapiens
  misc_feature (61)..(62): /note="This region represents a CpG dinucleotide"
  misc_feature (61)..(61): /note="Nucleotide may be methylated to form 5-methylcytosine"
gggttccttccactgtaaatctggggtcttggattaggtgacctgcagctgccctttgcccgactccagcagctcctccgactcggcctccccgagagcagcccttcccgagtgtccctgat

SEQ ID NO: 1194 - DNA, 122 bp, Homo sapiens
  misc_feature (61)..(62): /note="This region represents a CpG dinucleotide"
  misc_feature (61)..(61): /note="Nucleotide may be methylated to form 5-methylcytosine"
cttgggcagggtccttcctagctggctcaagcctgacatctatagagtcgcctcggctcacgggttctctgacattatgctgccagactaccaagtgcagcctgattgactggtggacgggg

SEQ ID NO: 1195 - DNA, 122 bp, Homo sapiens
  misc_feature (61)..(62): /note="This region represents a CpG dinucleotide"
  misc_feature (61)..(61): /note="Nucleotide may be methylated to form 5-methylcytosine"
ccacccaccagctccagacactagccccagacagtgtgcacgcacacgcacacacacacacgcgtactgcgaatggcatctcagcattgtaggagccctgaatctccaagtcttagaattgt

SEQ ID NO: 1196 - DNA, 122 bp, Homo sapiens
  misc_feature (61)..(62): /note="This region represents a CpG dinucleotide"
  misc_feature (61)..(61): /note="Nucleotide may be methylated to form 5-methylcytosine"
actgttgacagtccttctttcagcacttaagaaatgttgtgtcacttattgtggcctctgcggtttcagatgagaaatatgctattatttgagtttgtatttccctgtggtaaatgtgtcgt

SEQ ID NO: 1197 - DNA, 122 bp, Homo sapiens
  misc_feature (61)..(62): /note="This region represents a CpG dinucleotide"
  misc_feature (61)..(61): /note="Nucleotide may be methylated to form 5-methylcytosine"
actcagggcggatgtctgaggggtctgcgttgggctttctggtcgcttctctgcgaagcgcgcttgttcctgaggcggtgcctgcctgtgtcgtcgtccctgtttgttcttcttcaaacctc

SEQ ID NO: 1198 - DNA, 122 bp, Homo sapiens
  misc_feature (61)..(62): /note="This region represents a CpG dinucleotide"
  misc_feature (61)..(61): /note="Nucleotide may be methylated to form 5-methylcytosine"
tttgcacattgcttcctggctgtcttcccaccaccgtggagtctcacacgagattaattacgctcaagcgccttaaatctgtaaatcgctatgcccactcggaccgtttctgtcccaagcct

SEQ ID NO: 1199 - DNA, 122 bp, Homo sapiens
  misc_feature (61)..(62): /note="This region represents a CpG dinucleotide"
  misc_feature (61)..(61): /note="Nucleotide may be methylated to form 5-methylcytosine"
agttactctagccacccaatccaatgccacttatccttaaaaaagttgcttctatattaacgtttctgagaaagtactgcgacatctggtggatggaaaccagtattacaatccatgagaat

SEQ ID NO: 1200 - DNA, 122 bp, Homo sapiens
  misc_feature (61)..(62): /note="This region represents a CpG dinucleotide"
  misc_feature (61)..(61): /note="Nucleotide may be methylated to form 5-methylcytosine"
aatagaatgcagattgcagttgctagaatataaacaggaaataagaagataaagacaactcgtggaataccttttcatagagcttaggtaaactgtaggaattattctccttgtactctaat

SEQ ID NO: 1201 - DNA, 122 bp, Homo sapiens
  misc_feature (61)..(62): /note="This region represents a CpG dinucleotide"
  misc_feature (61)..(61): /note="Nucleotide may be methylated to form 5-methylcytosine"
aagtgaccaccagccacacccacagaagcggccttgagctgcccagttctttttctttggcggggggagagggggcggataagatcattaacataataatgcgtgagctgagtttttgcata

SEQ ID NO: 1202 - DNA, 122 bp, Homo sapiens
  misc_feature (61)..(62): /note="This region represents a CpG dinucleotide"
  misc_feature (61)..(61): /note="Nucleotide may be methylated to form 5-methylcytosine"
ggaatcagatgatggccatttcctaaggaatgatagatgctttagtgtactttcagataacgcattctttggagttcacaaagtggtgaaatgtcaacttaagaaattgtttaagtaaatat

SEQ ID NO: 1203 - DNA, 122 bp, Homo sapiens
  misc_feature (61)..(62): /note="This region represents a CpG dinucleotide"
  misc_feature (61)..(61): /note="Nucleotide may be methylated to form 5-methylcytosine"
gtgggaatgtggctcctagttgatgttcagtactaatcattcattcagcaaacagcctaccgcccactgtgtgtcatggcctgtgatttgtcttttttctttttgggggcttctgggtcata

SEQ ID NO: 1204 - DNA, 122 bp, Homo sapiens
  misc_feature (61)..(62): /note="This region represents a CpG dinucleotide"
  misc_feature (61)..(61): /note="Nucleotide may be methylated to form 5-methylcytosine"
tggtctcccttgaattatgtgctagttcctgaaccaatcactgtcagcaggggaatggaacgctctggttttgtaagtctgagccttactgtataacccatgggccaggggtggatcctgct

SEQ ID NO: 1205 - DNA, 122 bp, Homo sapiens
  misc_feature (61)..(62): /note="This region represents a CpG dinucleotide"
  misc_feature (61)..(61): /note="Nucleotide may be methylated to form 5-methylcytosine"
gggaaaggatggggagacaaggatggggaagtgggccttataacaggattgtggcctttgcgcactcaccaaatgtttgaccctgtgagtgcctcagttgctactgttggaagaatgggcaa

SEQ ID NO: 1206 - DNA, 122 bp, Homo sapiens
  misc_feature (61)..(62): /note="This region represents a CpG dinucleotide"
  misc_feature (61)..(61): /note="Nucleotide may be methylated to form 5-methylcytosine"
gctggcaagctttccatctgaagtttcatgtggtcatgacatgaaaatagaaagaacatacgggatgaaccttttgggactctggagaaatgactaaagcagaaaccaataatgtaagacac

SEQ ID NO: 1207 - DNA, 122 bp, Homo sapiens
  misc_feature (61)..(62): /note="This region represents a CpG dinucleotide"
  misc_feature (61)..(61): /note="Nucleotide may be methylated to form 5-methylcytosine"
agagggctgaggccaaagttggaagcccttccttcatatcctgtcaaccctgcccactctcgtcctgtgagtcctggtttcgtgccctttgtatgcacagagaaattttcatgtggttatag

SEQ ID NO: 1208 - DNA, 122 bp, Homo sapiens
  misc_feature (61)..(62): /note="This region represents a CpG dinucleotide"
  misc_feature (61)..(61): /note="Nucleotide may be methylated to form 5-methylcytosine"
cagggagaagccaaccctccaccagcccaggagagaggcctcaggggaaaccaaccctgacgaccccttgatctcagactcacagccccaaagactgtgaggagaccagtctctgttgttca

SEQ ID NO: 1209 - DNA, 122 bp, Homo sapiens
  misc_feature (61)..(62): /note="This region represents a CpG dinucleotide"
  misc_feature (61)..(61): /note="Nucleotide may be methylated to form 5-methylcytosine"
aaaaaataatattaataaaaagaataaaatccggcgctgcgcggtgacatcagtctctgtcgttaatgcctcgcgccggctaccgtcctgcgcagtctctttctgaggacccccccccccac

SEQ ID NO: 1210 - DNA, 122 bp, Homo sapiens
  misc_feature (61)..(62): /note="This region represents a CpG dinucleotide"
  misc_feature (61)..(61): /note="Nucleotide may be methylated to form 5-methylcytosine"
aaactaaaatgaaaactattgttggtggcatctttgggctgactcaatatatttttgttacggcttaaaactggtatctgtgtgtatatgcttgtactgtaagagctcctgggtgtcagaaa

SEQ ID NO: 1211 - DNA, 122 bp, Homo sapiens
  misc_feature (61)..(62): /note="This region represents a CpG dinucleotide"
  misc_feature (61)..(61): /note="Nucleotide may be methylated to form 5-methylcytosine"
attcccgtggctctttgataataatggttggagtcctgaacccgaccctttgtatcggaccgtgtttgtcatctccagtgctttatgaaggccttgaaagcaaggttcagccgtctgtattg

SEQ ID NO: 1212 - DNA, 122 bp, Homo sapiens
  misc_feature (61)..(62): /note="This region represents a CpG dinucleotide"
  misc_feature (61)..(61): /note="Nucleotide may be methylated to form 5-methylcytosine"
gtaagtactcaccagtacttacaaaggcagtactataacaccttcaagatggggaaaccacggttttaaacagaaacacatattttccctcaacatggatgctttatcatatctctaacata

SEQ ID NO: 1213 - DNA, 122 bp, Homo sapiens
  misc_feature (61)..(62): /note="This region represents a CpG dinucleotide"
  misc_feature (61)..(61): /note="Nucleotide may be methylated to form 5-methylcytosine"
tccccaacggtctcctccctaacaggctgtaaaataacatgaagcatggccccaaagggccgtgaatgacccctggagcaaaggactccaaaaggctctgcagagcttttggcacatctgaa

SEQ ID NO: 1214 - DNA, 122 bp, Homo sapiens
  misc_feature (61)..(62): /note="This region represents a CpG dinucleotide"
  misc_feature (61)..(61): /note="Nucleotide may be methylated to form 5-methylcytosine"
gggaagaggttgtctccctctctttaggctgcagaaggaaaaagaacctgaagagaaggacgtgctcaaggcaatcctattgtggaggatgggcttgctacagcaacacggcacccaaccag

SEQ ID NO: 1215 - DNA, 122 bp, Homo sapiens
  misc_feature (61)..(62): /note="This region represents a CpG dinucleotide"
  misc_feature (61)..(61): /note="Nucleotide may be methylated to form 5-methylcytosine"
tactcttgcaggagaaagaaggatgtcgctgtacgccccgaaagagaggcatcatttttacgcccagtttggattaatgattgattgagtcgcagaaatgcttgtgatgctgatagaggcca

SEQ ID NO: 1216 - DNA, 122 bp, Homo sapiens
  misc_feature (61)..(62): /note="This region represents a CpG dinucleotide"
  misc_feature (61)..(61): /note="Nucleotide may be methylated to form 5-methylcytosine"
tccaagaacattatgactctcagttccatttagtcttgtgcttaaggctaattgcattcacgatttgctcctgatctaccattcgttaatttaatttttattgtttcttagcacactctcca

SEQ ID NO: 1217 - DNA, 122 bp, Homo sapiens
  misc_feature (61)..(62): /note="This region represents a CpG dinucleotide"
  misc_feature (61)..(61): /note="Nucleotide may be methylated to form 5-methylcytosine"
ttaagctgagacttgaaagatgatggagtagttgaccaggcggtcagaggaacttggaagcgctatgattcgggatcccacagagagagattcaagggcaccttggcagatatggtttacag

SEQ ID NO: 1218 - DNA, 122 bp, Homo sapiens
  misc_feature (61)..(62): /note="This region represents a CpG dinucleotide"
  misc_feature (61)..(61): /note="Nucleotide may be methylated to form 5-methylcytosine"
actcgctaaacaaatgttagccatcaaacctgccactgcctgatgttcctaacggccccgcgtgttaggcaaggggtatcattgttcccatggtgcacttgggaatgcgaaggggagccact

SEQ ID NO: 1219 - DNA, 122 bp, Homo sapiens
  misc_feature (61)..(62): /note="This region represents a CpG dinucleotide"
  misc_feature (61)..(61): /note="Nucleotide may be methylated to form 5-methylcytosine"
ttttaagcgtttacagggccctaaattcagacattttctatttgctataagaacatctcacgtgttagttactctgaagttcactggggcagaatgccatacatctgatttataataacgtt

SEQ ID NO: 1220 - DNA, 122 bp, Homo sapiens
  misc_feature (61)..(62): /note="This region represents a CpG dinucleotide"
  misc_feature (61)..(61): /note="Nucleotide may be methylated to form 5-methylcytosine"
gttctgcgttagagaagaagcagaggctgcagggaaggcgtggtttatgtatttacaatgcgagaggacatgtggaagttcccttgttatgtcgcctcacaaggaataaaagcaacaggatg

SEQ ID NO: 1221 - DNA, 122 bp, Homo sapiens
  misc_feature (61)..(62): /note="This region represents a CpG dinucleotide"
  misc_feature (61)..(61): /note="Nucleotide may be methylated to form 5-methylcytosine"
aaaaaggaagcaaagggatagttacaactccttctactcttctcccccagaaaaacctttcgaggcctcaccaatagatggcttgctttctcctccaatcaccagcagacagaggggccctg

SEQ ID NO: 1222 - DNA, 122 bp, Homo sapiens
  misc_feature (61)..(62): /note="This region represents a CpG dinucleotide"
  misc_feature (61)..(61): /note="Nucleotide may be methylated to form 5-methylcytosine"
ctcagatgattcgcccgcctcggcctcccaaagtgctgggattacaggcgtgagccaccgcgcctggccagtgatttttaaatatttcaccacaaagaaatggcaaatgtttcaggtgagga

SEQ ID NO: 1223 - DNA, 122 bp, Homo sapiens
  misc_feature (61)..(62): /note="This region represents a CpG dinucleotide"
  misc_feature (61)..(61): /note="Nucleotide may be methylated to form 5-methylcytosine"
gcttccaggaatgaagccgtgggccgcagtggcgagtgttacagctagattagagaaacccgcggacccaaagagggtgcggtggcaagatttattagagcaaaagcgaaagtaaaatgaaa

SEQ ID NO: 1224 - DNA, 122 bp, Homo sapiens
  misc_feature (61)..(62): /note="This region represents a CpG dinucleotide"
  misc_feature (61)..(61): /note="Nucleotide may be methylated to form 5-methylcytosine"
ttcttcacgaagcgctcactcgcaccctttctctctctctctctctctctctaacacgcacgcacactcccagttgttcacactcgggtcctctccagcccgacgttctcctggcacccacc

SEQ ID NO: 1225 - DNA, 122 bp, Homo sapiens
  misc_feature (61)..(62): /note="This region represents a CpG dinucleotide"
  misc_feature (61)..(61): /note="Nucleotide may be methylated to form 5-methylcytosine"
ccttaaactcacgtgacgaagatcacggagcagtttagtccaaatccgggggtaacgcttcggggttctgtcggcccctgtaagcttctctcctcttctcactgaagctcttccgggaaaaa

SEQ ID NO: 1226 - DNA, 122 bp, Homo sapiens
  misc_feature (61)..(62): /note="This region represents a CpG dinucleotide"
  misc_feature (61)..(61): /note="Nucleotide may be methylated to form 5-methylcytosine"
caattaccttaatcatcctcctcagggtaacaacaaggaagtgcttaggctgcctcggtgcgcggaggcagagtgagcagtgagttctggggagacaaacagccccggattcaaataccagg

SEQ ID NO: 1227 - DNA, 122 bp, Homo sapiens
  misc_feature (61)..(62): /note="This region represents a CpG dinucleotide"
  misc_feature (61)..(61): /note="Nucleotide may be methylated to form 5-methylcytosine"
tgccttatgactctgaccctttcatgtcatttctgtggctgtgagcgcagtggagggcagcgcccctcggccccgtttcggtcttcccctggcccctcccttccagccgctccgttctctct

SEQ ID NO: 1228 - DNA, 122 bp, Homo sapiens
  misc_feature (61)..(62): /note="This region represents a CpG dinucleotide"
  misc_feature (61)..(61): /note="Nucleotide may be methylated to form 5-methylcytosine"
cttggctaattgtctttggtgacaaataccacagatggtgttatatcccaagtgtatgaacgtaagagtgtcacacactatttcagtgtctaaaataaaaagaaatgaccattttatcagca

SEQ ID NO: 1229 - DNA, 122 bp, Homo sapiens
  misc_feature (61)..(62): /note="This region represents a CpG dinucleotide"
  misc_feature (61)..(61): /note="Nucleotide may be methylated to form 5-methylcytosine"
tggcaccaagatatggttgtgaaataggaagtctccagaaaataatgaaaaattataaaccgtgcccatagacaatagtcagcaaaaacagattgtggaaagacaggaagacagagcttatc

SEQ ID NO: 1230 - DNA, 122 bp, Homo sapiens
  misc_feature (61)..(62): /note="This region represents a CpG dinucleotide"
  misc_feature (61)..(61): /note="Nucleotide may be methylated to form 5-methylcytosine"
aatagccccagcacagcagtgttctgggtgtccagttcccacatttcccgagcagcctgacgcatgccaggtcctatgcaccagggatattaaagtgactcaaggaggcaggaagccattat

SEQ ID NO: 1231 - DNA, 122 bp, Homo sapiens
  misc_feature (61)..(62): /note="This region represents a CpG dinucleotide"
  misc_feature (61)..(61): /note="Nucleotide may be methylated to form 5-methylcytosine"
aaccacctgttccatcttatcttttgatcactggtttctttctaatcgtattcttgataacgattcaattgacttgcctgggattttagatacataggtgtaatggagctgaattgttgggt

SEQ ID NO: 1232 - DNA, 122 bp, Homo sapiens
  misc_feature (61)..(62): /note="This region represents a CpG dinucleotide"
  misc_feature (61)..(61): /note="Nucleotide may be methylated to form 5-methylcytosine"
ctgctttctgcacttccgggtgtatgacctaatctttctagaagctgacccaagaggctccgcaatgtgagccacaaaaagtcatcagcattccctacctgcctctctgcagtctgcagcat

SEQ ID NO: 1233 - DNA, 122 bp, Homo sapiens
  misc_feature (61)..(62): /note="This region represents a CpG dinucleotide"
  misc_feature (61)..(61): /note="Nucleotide may be methylated to form 5-methylcytosine"
ggctgtgaatgcttccagttggtcctgaaagggcctttgaggtgagtaggttcaccaaagcggcaacatatgtgtcccagtgggcattctactcctcagtaagtgacttgacattctttatg

SEQ ID NO: 1234 - DNA, 122 bp, Homo sapiens
  misc_feature (61)..(62): /note="This region represents a CpG dinucleotide"
  misc_feature (61)..(61): /note="Nucleotide may be methylated to form 5-methylcytosine"
aagtagaagaaagggaggggaaactggggagtggagaggctcccaaaagagactgagacacgaataatagcgactcctgaatagtcaacaatttgaatgggtggaggggcaggaaaagggtc

SEQ ID NO: 1235 - DNA, 122 bp, Homo sapiens
  misc_feature (61)..(62): /note="This region represents a CpG dinucleotide"
  misc_feature (61)..(61): /note="Nucleotide may be methylated to form 5-methylcytosine"
tcccgtcagtgaggccaggcccccaggtgccactggagtcagaggagggcagctggcgtgcgccaagcagccactaggagccacttcatgccaatgctccacttcctgcacgccacagtcac

SEQ ID NO: 1236 - DNA, 122 bp, Homo sapiens
  misc_feature (61)..(62): /note="This region represents a CpG dinucleotide"
  misc_feature (61)..(61): /note="Nucleotide may be methylated to form 5-methylcytosine"
ttttcaataaattcctgctttcgttcttttgctgcttcattctttctttgctttgttgggcgttttgtccaattctttgttcaaaatgccaagaacctggacaagttgcagttatgaccctc

SEQ ID NO: 1237 - DNA, 122 bp, Homo sapiens
  misc_feature (61)..(62): /note="This region represents a CpG dinucleotide"
  misc_feature (61)..(61): /note="Nucleotide may be methylated to form 5-methylcytosine"
agccttgaaatctcagcactcaacatctcttatccactaaagcacacactgttgtttacacgtggaagactgactatgcagccagtctagtaagcaagcaagcaagcaagcaagcagggtcc

SEQ ID NO: 1238 - DNA, 122 bp, Homo sapiens
  misc_feature (61)..(62): /note="This region represents a CpG dinucleotide"
  misc_feature (61)..(61): /note="Nucleotide may be methylated to form 5-methylcytosine"
agggtgaatgagtgtgggaggtgtcattccctggtccgtgtgtaagagtgtgaccgcgcacgccttcgtgtgtgtcccgggtgtgtggggtcggggcggtgacgaggtgagggggacgccgg

SEQ ID NO: 1239 - DNA, 122 bp, Homo sapiens
  misc_feature (61)..(62): /note="This region represents a CpG dinucleotide"
  misc_feature (61)..(61): /note="Nucleotide may be methylated to form 5-methylcytosine"
ggagatgttcctgccaggcatgctgcctacttaagatgttctgacattttcaggaagttacgtaacacagtatgaaatagtcaaacgttgctttttagctgataaatcctccagcaacgtat

SEQ ID NO: 1240 - DNA, 122 bp, Homo sapiens
  misc_feature (61)..(62): /note="This region represents a CpG dinucleotide"
  misc_feature (61)..(61): /note="Nucleotide may be methylated to form 5-methylcytosine"
tattacttgcgcattttatggatgagaaaacaaaaccttagaggtgttaagtaacacagccgtgatctcccagttagcaagtggcagagccaagattccaacccaagccattcactccaaag

SEQ ID NO: 1241 - DNA, 122 bp, Homo sapiens
  misc_feature (61)..(62): /note="This region represents a CpG dinucleotide"
  misc_feature (61)..(61): /note="Nucleotide may be methylated to form 5-methylcytosine"
gttttatgattaaatatcctccatgcaacattaggaaagtcaggagtcctaaataagtcacgtggtttggcactttaacagctgtgatctcatatgcgcttcacagtaaccctatgcaatgg

SEQ ID NO: 1242 - DNA, 122 bp, Homo sapiens
  misc_feature (61)..(62): /note="This region represents a CpG dinucleotide"
  misc_feature (61)..(61): /note="Nucleotide may be methylated to form 5-methylcytosine"
ttcaactgtgtgatcagaatcagttatgccttctctccagaggtgctgcaaaaccagttacgttaagtctgtgctaattttcacactgtttgtaactagccagtgactcaagtacagcctga

SEQ ID NO: 1243 - DNA, 122 bp, Homo sapiens
  misc_feature (61)..(62): /note="This region represents a CpG dinucleotide"
  misc_feature (61)..(61): /note="Nucleotide may be methylated to form 5-methylcytosine"
ataacggaaatgggactggtatttgcattttgactcacactccagtgttcttttcacttgcgtgctgataatagggaagtgacgctatagaagctgaatcatcaaggtaggaaattacagca

SEQ ID NO: 1244 - DNA, 122 bp, Homo sapiens
  misc_feature (61)..(62): /note="This region represents a CpG dinucleotide"
  misc_feature (61)..(61): /note="Nucleotide may be methylated to form 5-methylcytosine"
gtctgttgagcacgtgtttatcatggtttttaatcacagcttcatctttccagactgcagcgtccctcctgactgtaatttcttctcatggtttggtacctctttcagtcgcccctccctta

SEQ ID NO: 1245 - DNA, 122 bp, Homo sapiens
  misc_feature (61)..(62): /note="This region represents a CpG dinucleotide"
  misc_feature (61)..(61): /note="Nucleotide may be methylated to form 5-methylcytosine"
cgcccacatcgctcccacccctgcccggcccctcccgaccagcaaacctctcctgccccgcggctgtgtttttaattatttttacatataaatgtgctgcacgcctcatctgcctcgaattt

SEQ ID NO: 1246 - DNA, 122 bp, Homo sapiens
  misc_feature (61)..(62): /note="This region represents a CpG dinucleotide"
  misc_feature (61)..(61): /note="Nucleotide may be methylated to form 5-methylcytosine"
ggtgatcactcagtaagtactgttgtccctttggtctgtttctggcagcgattagctgtgcgcattctttgagaggagcgacggagggaacagaagagggtactagtgaagaactaaggtgc

SEQ ID NO: 1247 - DNA, 122 bp, Homo sapiens
  misc_feature (61)..(62): /note="This region represents a CpG dinucleotide"
  misc_feature (61)..(61): /note="Nucleotide may be methylated to form 5-methylcytosine"
ttctccttcttctgtggttccaaagcactctacacttaaccaatgcttattacgctttatcgtaatggtacttgtactaactgtttttctaggttgtaactcttagagcaaggacccattct

SEQ ID NO: 1248 - DNA, 122 bp, Homo sapiens
  misc_feature (61)..(62): /note="This region represents a CpG dinucleotide"
  misc_feature (61)..(61): /note="Nucleotide may be methylated to form 5-methylcytosine"
agacgtccagccaggggaggagctgacagtgtggtattctaactccttggctcagtggttcgacatccccaccacagcgactccgactcacgacgagaaaggtacccattccaaaagcgtgg

SEQ ID NO: 1249 - DNA, 122 bp, Homo sapiens
  misc_feature (61)..(62): /note="This region represents a CpG dinucleotide"
  misc_feature (61)..(61): /note="Nucleotide may be methylated to form 5-methylcytosine"
ccccgcccctccccgccccgccctcaacctagtgagggctggaggctgcgcagacctcgacgggccctacatgacgtcacaaaggggccagaccaagtggggcagcaccctgcgaccctgcg

SEQ ID NO: 1250 - DNA, 122 bp, Homo sapiens
  misc_feature (61)..(62): /note="This region represents a CpG dinucleotide"
  misc_feature (61)..(61): /note="Nucleotide may be methylated to form 5-methylcytosine"
ctctgcaaaccccctttttcagcaccagctccagcacagtctgcgaaaacttttttcaagcgatgcagctttaaataggaagaatgctgcctccacttcttttcctgccccttttcagcttg

SEQ ID NO: 1251 - DNA, 122 bp, Homo sapiens
  misc_feature (61)..(62): /note="This region represents a CpG dinucleotide"
  misc_feature (61)..(61): /note="Nucleotide may be methylated to form 5-methylcytosine"
tccagcgcgcggggcttggacatcttcttgcctgcagcccggccaaggcccatggcagcgcgccccgcaccctcgccgccgccgccgcggcccggccaccaccgctgccgctgccgctgctg

SEQ ID NO: 1252 - DNA, 122 bp, Homo sapiens
  misc_feature (61)..(62): /note="This region represents a CpG dinucleotide"
  misc_feature (61)..(61): /note="Nucleotide may be methylated to form 5-methylcytosine"
ggataagatctgtgttcctgacctgagctgataaactaaaccaagacctggtgactaggacggggattggggatacttgccttaacctgtttagttaaatctgcatagagcagaggaacaat

SEQ ID NO: 1253 - DNA, 122 bp, Homo sapiens
  misc_feature (61)..(62): /note="This region represents a CpG dinucleotide"
  misc_feature (61)..(61): /note="Nucleotide may be methylated to form 5-methylcytosine"
tgacaataattttttaccaggtacaatgtgcttttaggaggatttcttccttttctcccccgtttttatgttcagtctgacctggttgatgactgtgactcagatgatagacggactacttg

SEQ ID NO: 1254 - DNA, 122 bp, Homo sapiens
  misc_feature (61)..(62): /note="This region represents a CpG dinucleotide"
  misc_feature (61)..(61): /note="Nucleotide may be methylated to form 5-methylcytosine"
tgacattgagcagaatacagacaaattgtcaggcagttgggtgggatgaaaaagatgggacgacagccaacactatcaaaaggacctgagttcatgaatatctgggctagctcagtgaagct

SEQ ID NO: 1255 - DNA, 122 bp, Homo sapiens
  misc_feature (61)..(62): /note="This region represents a CpG dinucleotide"
  misc_feature (61)..(61): /note="Nucleotide may be methylated to form 5-methylcytosine"
tttggattttgggggaaaatgggaagctgtggaagctatagaaggggtctaagagggaagcgacataatcacattgcattgtacaaaggcctctctggctacagagggcgcagcagcttaga

SEQ ID NO: 1256 - DNA, 122 bp, Homo sapiens
  misc_feature (61)..(62): /note="This region represents a CpG dinucleotide"
  misc_feature (61)..(61): /note="Nucleotide may be methylated to form 5-methylcytosine"
caggcccgagttgatgggcacctcgggctcatcaccgtgaagtcccctgcggccgaagggcggtggatttttagggtctctcccgcccacccctaatgccagtccccaccactgcgtactct

SEQ ID NO: 1257 - DNA, 122 bp, Homo sapiens
  misc_feature (61)..(62): /note="This region represents a CpG dinucleotide"
  misc_feature (61)..(61): /note="Nucleotide may be methylated to form 5-methylcytosine"
caacccactggaaccgcagggcacagggcgcatcactgggagtgctgtggaaaccaaaaacgtggtttctgcccactgatgcaactcagtcaagttggagagatgagacattcacccaggga

SEQ ID NO: 1258 - DNA, 122 bp, Homo sapiens
  misc_feature (61)..(62): /note="This region represents a CpG dinucleotide"
  misc_feature (61)..(61): /note="Nucleotide may be methylated to form 5-methylcytosine"
cggcggcggccttggatggaccgtagtctcggggactgcggggccggaggaggtcgtgggcgcgcggtggcggcgcaggcggccgggctagcaggtcccgcgggcccctgtccccgcagccg

SEQ ID NO: 1259 - DNA, 122 bp, Homo sapiens
  misc_feature (61)..(62): /note="This region represents a CpG dinucleotide"
  misc_feature (61)..(61): /note="Nucleotide may be methylated to form 5-methylcytosine"
ggcgccgggtgggccgtttgctgaccggatcgcggctacccgccagcgtgtccgcggcgccgccgccagcatgggctgtgccccgagcatccacatttccgagcgcctggtggccgaggacg

SEQ ID NO: 1260 - DNA, 122 bp, Homo sapiens
  misc_feature (61)..(62): /note="This region represents a CpG dinucleotide"
  misc_feature (61)..(61): /note="Nucleotide may be methylated to form 5-methylcytosine"
ggctctctttcctcctcctttctgaggcttgagggagaggaaagtccttcctgcctggggcgcccagagctgtcactttggctctggttcagtgaaacctggccattgacaggacagatggc

SEQ ID NO: 1261 - DNA, 122 bp, Homo sapiens
  misc_feature (61)..(62): /note="This region represents a CpG dinucleotide"
  misc_feature (61)..(61): /note="Nucleotide may be methylated to form 5-methylcytosine"
gacagccctactttgaaatcttggctctgtccttgccacagcttgacgagagtactgggacgtgtccttgacagggcatctggggcccctgggaggaagcagctgagtcatgtggggagcac

SEQ ID NO: 1262 - DNA, 122 bp, Homo sapiens
  misc_feature (61)..(62): /note="This region represents a CpG dinucleotide"
  misc_feature (61)..(61): /note="Nucleotide may be methylated to form 5-methylcytosine"
ctcccacctcaggcaccggtgcaacgtttctgcagccaggccgcctgtcaccccactgtgcgcgccccagcggccccggcccagagcgctccacactcggagctagccagctgggacagagc

SEQ ID NO: 1263 - DNA, 122 bp, Homo sapiens
  misc_feature (61)..(62): /note="This region represents a CpG dinucleotide"
  misc_feature (61)..(61): /note="Nucleotide may be methylated to form 5-methylcytosine"
gcctctcccctccaggatcagcggcccagagatagggacatgtcattgtttccgaggacgcgttgtttgaggtcaccttaaggccagatcggtgtttcattgacgattctgttggttttatt

SEQ ID NO: 1264 - DNA, 122 bp, Homo sapiens
  misc_feature (61)..(62): /note="This region represents a CpG dinucleotide"
  misc_feature (61)..(61): /note="Nucleotide may be methylated to form 5-methylcytosine"
aaagggataaagggagcaaaggattcaggctgcaggactggctgtgccacttcccggctgcgtgaccgtgagcaagttacttcacctcccagagcctcagaggcccccatctgctacggttg

SEQ ID NO: 1265 - DNA, 122 bp, Homo sapiens
  misc_feature (61)..(62): /note="This region represents a CpG dinucleotide"
  misc_feature (61)..(61): /note="Nucleotide may be methylated to form 5-methylcytosine"
aaagtcgagtgctctcatgccaggaagctgatacagttcatgaaacctcagtcattctttcgtattactcctgtcttctctttggaaaacaatctcatgaatttggtcttgacgctgactta

SEQ ID NO: 1266 - DNA, 122 bp, Homo sapiens
  misc_feature (61)..(62): /note="This region represents a CpG dinucleotide"
  misc_feature (61)..(61): /note="Nucleotide may be methylated to form 5-methylcytosine"
agtttcttatgtatttttccagagacttttcttgtttatttaagcaagcaacgccgcccccgcccgccgccccccgcccccccgccacacacacagagagagagagagagagagagagagag

SEQ ID NO: 1267 - DNA, 122 bp, Homo sapiens
  misc_feature (61)..(62): /note="This region represents a CpG dinucleotide"
  misc_feature (61)..(61): /note="Nucleotide may be methylated to form 5-methylcytosine"
acgactagaggctttgcgaggctgaggctgggcttcgggaggggattgccctgagaggtccgggaggacttgctgtggaattcaagcgaccgtgggccttgagggaaccggggggcaagaca

SEQ ID NO: 1268 - DNA, 122 bp, Homo sapiens
  misc_feature (61)..(62): /note="This region represents a CpG dinucleotide"
  misc_feature (61)..(61): /note="Nucleotide may be methylated to form 5-methylcytosine"
agaatatttgaagcaaaaatgaccacaaacttccaaaacctggaaaaattaacacatcaacgctcagacaactctaacttggataaactccaagaaatgcaaacttagacaaatcatagttg

SEQ ID NO: 1269 - DNA, 122 bp, Homo sapiens
  misc_feature (61)..(62): /note="This region represents a CpG dinucleotide"
  misc_feature (61)..(61): /note="Nucleotide may be methylated to form 5-methylcytosine"
gaagaatggctggtttctggaaagtcaaaccaaaccagcattaagtgatggcacatgcggcgtgcatgcccaggccacttctgagtggcaggaaaggatagagaggaagtgtaaaccacagc

SEQ ID NO: 1270 - DNA, 122 bp, Homo sapiens
  misc_feature (61)..(62): /note="This region represents a CpG dinucleotide"
  misc_feature (61)..(61): /note="Nucleotide may be methylated to form 5-methylcytosine"
agtgggtggtgaagatcagaggaaccacactggataatgactggagccgagtgatgggcacgtggggctgatttaagccaatctccacttcggggtatatttgaaattttccataacaaaag

SEQ ID NO: 1271 - DNA, 122 bp, Homo sapiens
  misc_feature (61)..(62): /note="This region represents a CpG dinucleotide"
  misc_feature (61)..(61): /note="Nucleotide may be methylated to form 5-methylcytosine"
aaataggctgtttgttgagtaagacttggccatgacctttgccatgggatagcctctccccgtgacatttatgaggaccagatcccctctgggagtttaccagccacaccggaagcatacca

SEQ ID NO: 1272 - DNA, 122 bp, Homo sapiens
  misc_feature (61)..(62): /note="This region represents a CpG dinucleotide"
  misc_feature (61)..(61): /note="Nucleotide may be methylated to form 5-methylcytosine"
atcttctaatagttaattaggatccctagctgcaagccttccttgctactgggttaggagcgctttcccccattgacccaggagcttcttcagggagtaggggatggaacgtttgtctcctc

SEQ ID NO: 1273 - DNA, 122 bp, Homo sapiens
  misc_feature (61)..(62): /note="This region represents a CpG dinucleotide"
  misc_feature (61)..(61): /note="Nucleotide may be methylated to form 5-methylcytosine"
ctcacccttcgtggatgggtaaactgagggggtcagcatcagagatagaggggtaccacacgaggccacaaggacataaaacaatgctggagaatgtacaatagatacacaagtcctgatcc

SEQ ID NO: 1274 - DNA, 122 bp, Homo sapiens
  misc_feature (61)..(62): /note="This region represents a CpG dinucleotide"
  misc_feature (61)..(61): /note="Nucleotide may be methylated to form 5-methylcytosine"
tgccgaaaactgggggaacaaccagtccaaagcatggcagagcagaacatcaggcagcatcgaaggctgctgccaagccaaagaccatgccgaaggaaagggccatctgcccactgtgccaa

SEQ ID NO: 1275 - DNA, 122 bp, Homo sapiens
  misc_feature (61)..(62): /note="This region represents a CpG dinucleotide"
  misc_feature (61)..(61): /note="Nucleotide may be methylated to form 5-methylcytosine"
ctgcgcagaggccccggacccgggtcgcctcctggtgcgccgtctaagctgcctgtggtgcgccgagagcttgctctaccactgcctgtcggacgccgagggcgacttctcggacccgtgcg

SEQ ID NO: 1276 - DNA, 122 bp, Homo sapiens
  misc_feature (61)..(62): /note="This region represents a CpG dinucleotide"
  misc_feature (61)..(61): /note="Nucleotide may be methylated to form 5-methylcytosine"
cataagaatggtggaagaggaagatgagcagagaaaaagcctttgactgtggtggttctgcgtgttagggacctggagccttggaggaaatctgaagaataccagaatcttttttgaaacac

SEQ ID NO: 1277 - DNA, 122 bp, Homo sapiens
  misc_feature (61)..(62): /note="This region represents a CpG dinucleotide"
  misc_feature (61)..(61): /note="Nucleotide may be methylated to form 5-methylcytosine"
agacccaggagggcctcactggtaagctcttcggccttggcgcgtcactgctaacccaggcgagcaccctcatgtctgtgcagcccgaggctgacacccagggccagcctgcccccagcaag

SEQ ID NO: 1278 - DNA, 122 bp, Homo sapiens
  misc_feature (61)..(62): /note="This region represents a CpG dinucleotide"
  misc_feature (61)..(61): /note="Nucleotide may be methylated to form 5-methylcytosine"
tgaatcatcctaactaatttaatttttctgagccagattccttttaactcacctgctcggcgctagcctgtggagtttggagtctccccttttcaaaccattcgtcacacacttctgccaga

SEQ ID NO: 1279 - DNA, 122 bp, Homo sapiens
  misc_feature (61)..(62): /note="This region represents a CpG dinucleotide"
  misc_feature (61)..(61): /note="Nucleotide may be methylated to form 5-methylcytosine"
tacatgctcattagtgcgtgtaagtacatgcttttcaccccagaacactcatgatctttacgtcatctttctgcctcagctgctctttcatctggatcatggaatgttgcagggttaacaca

SEQ ID NO: 1280 - DNA, 122 bp, Homo sapiens
  misc_feature (61)..(62): /note="This region represents a CpG dinucleotide"
  misc_feature (61)..(61): /note="Nucleotide may be methylated to form 5-methylcytosine"
agagaagtgagttgaaatataccttttaaaaacagcaacttggcctggcccggtggctcacgcctgtaatcccagcactttgggaggctgaggcaggcggatcacgaggtcaggagattgag

SEQ ID NO: 1281 - DNA, 122 bp, Homo sapiens
  misc_feature (61)..(62): /note="This region represents a CpG dinucleotide"
  misc_feature (61)..(61): /note="Nucleotide may be methylated to form 5-methylcytosine"
taagtatgcagttttatgacattaactacatgtgcattgttatgcaaccatctaggatgacgttctaacctcatttcaagcttagccgcattcactatctttccaggactagggtagttttc

SEQ ID NO: 1282 - DNA, 122 bp, Homo sapiens
  misc_feature (61)..(62): /note="This region represents a CpG dinucleotide"
  misc_feature (61)..(61): /note="Nucleotide may be methylated to form 5-methylcytosine"
cggaatgtctcaggcgggctctgaaacctggagcttttctgtggcagaagaaatgcagagcgggagttttgtaggcaatctggcaaaggacctggggctgaaggtgagagaactgtcctcac

SEQ ID NO: 1283 - DNA, 122 bp, Homo sapiens
  misc_feature (61)..(62): /note="This region represents a CpG dinucleotide"
  misc_feature (61)..(61): /note="Nucleotide may be methylated to form 5-methylcytosine"
aaatgccttggccacaaggagaaaacattcgctggctgtggcttgagccaactgggtcagcgccagcctgtgcagatgtctttgtggacagagaagaagtccctctgggagaaggcagccca

SEQ ID NO: 1284 - DNA, 122 bp, Homo sapiens
  misc_feature (61)..(62): /note="This region represents a CpG dinucleotide"
  misc_feature (61)..(61): /note="Nucleotide may be methylated to form 5-methylcytosine"
tcaagagtggctaagcagagcctcagtcttttgtgacgtagccacaggagtcataactgtcgtttctgcaatatcctgttgattacacaggataggtcagccctattcattgtgggaggtga

SEQ ID NO: 1285 - DNA, 122 bp, Homo sapiens
  misc_feature (61)..(62): /note="This region represents a CpG dinucleotide"
  misc_feature (61)..(61): /note="Nucleotide may be methylated to form 5-methylcytosine"
atagaaccagacgatctccttgtggacacgcaggaaaacgtctgcagtggttacctcacacgcccctccttgggggacaggcagggaaagaaaggtcatggagcccacagtggctcatttac

SEQ ID NO: 1286 - DNA, 122 bp, Homo sapiens
  misc_feature (61)..(62): /note="This region represents a CpG dinucleotide"
  misc_feature (61)..(61): /note="Nucleotide may be methylated to form 5-methylcytosine"
cttcctcctagtagacctcagatgataaaaatatccatagacacagtgaagtcagtggcacgcctggctctctcagacaaaactccatgtgatcacatataggcagcctcagtgaggctgat

SEQ ID NO: 1287 - DNA, 122 bp, Homo sapiens
  misc_feature (61)..(62): /note="This region represents a CpG dinucleotide"
  misc_feature (61)..(61): /note="Nucleotide may be methylated to form 5-methylcytosine"
aataaacgagaaatgaaagtgtgctctgctgtctctctggggtcacaggccagtcacctgcgcatcctgtaccagtcaggttatctggccaaacaaggagagggagccgtgctacacatcag

SEQ ID NO: 1288 - DNA, 122 bp, Homo sapiens
  misc_feature (61)..(62): /note="This region represents a CpG dinucleotide"
  misc_feature (61)..(61): /note="Nucleotide may be methylated to form 5-methylcytosine"
cgcgaggacgcagactgcagagctctacggggaatgggagttttctctcgttcactatggcgtccccggcgacccgaatggaggctgctgcgttgcaagaactgggctaagactattttttt

SEQ ID NO: 1289 - DNA, 122 bp, Homo sapiens
  misc_feature (61)..(62): /note="This region represents a CpG dinucleotide"
  misc_feature (61)..(61): /note="Nucleotide may be methylated to form 5-methylcytosine"
ccacaggcaggcaagtctgagcttgttctctgggaattcgaggccctgcaggtcggagggcggggtggcgaggaaatggggccccaaatatatattttaaattgattgcttttcagatttca

SEQ ID NO: 1290 - DNA, 122 bp, Homo sapiens
  misc_feature (61)..(62): /note="This region represents a CpG dinucleotide"
  misc_feature (61)..(61): /note="Nucleotide may be methylated to form 5-methylcytosine"
caggcgtcggggcctcgtcgcccaagagcgaacaggggccgcgcccgagacactagcatccgaatttgaatcagcttttacactttttagggacgtgtcactcttgccgttcctcaagtgct

SEQ ID NO: 1291 - DNA, 122 bp, Homo sapiens
  misc_feature (61)..(62): /note="This region represents a CpG dinucleotide"
  misc_feature (61)..(61): /note="Nucleotide may be methylated to form 5-methylcytosine"
tggtatttgctctctttcttgaatcagcaaaagaaatcgctgtaaagttaatgtaatttacgggaagttcccgtgccacactgcatgcttttgtgtgtcacaagacttaagcttcctgctac

SEQ ID NO: 1292 - DNA, 122 bp, Homo sapiens
  misc_feature (61)..(62): /note="This region represents a CpG dinucleotide"
  misc_feature (61)..(61): /note="Nucleotide may be methylated to form 5-methylcytosine"
attgttgctatgggactggggagtggaggtatgggggaggtggtggactcgccatggaggcggggtgttggtctccagtacctatctggagatggccctccagagtcctcctccttgcttgc

SEQ ID NO: 1293 - DNA, 122 bp, Homo sapiens
  misc_feature (61)..(62): /note="This region represents a CpG dinucleotide"
  misc_feature (61)..(61): /note="Nucleotide may be methylated to form 5-methylcytosine"
aagcgggcggaaaaaaattatggggcgtgcagtgtcacgtgactgctcggatttttgtcacgttgtctgtggatcctttcttatttctgtgttgaattccagcctgggtatttggaacctat

SEQ ID NO: 1294 - DNA, 122 bp, Homo sapiens
  misc_feature (61)..(62): /note="This region represents a CpG dinucleotide"
  misc_feature (61)..(61): /note="Nucleotide may be methylated to form 5-methylcytosine"
tgttgaaaggaggcctgggttgtcctgtgggtgactgttggtggaatctttcgcggaaagcgttttggaagaatggcgcgacgagcgagcagaggggaaggtggtgaccctgagcgctcggc

SEQ ID NO: 1295 - DNA, 122 bp, Homo sapiens
  misc_feature (61)..(62): /note="This region represents a CpG dinucleotide"
  misc_feature (61)..(61): /note="Nucleotide may be methylated to form 5-methylcytosine"
attagactcatttctaattaaattcaaaccagagatatgctagaagtgaagccgtccgcacggttgtgtcaggtttatcatcaaccatggaagtaactagtaactagatgagtcacttttcc

SEQ ID NO: 1296 - DNA, 122 bp, Homo sapiens
  misc_feature (61)..(62): /note="This region represents a CpG dinucleotide"
  misc_feature (61)..(61): /note="Nucleotide may be methylated to form 5-methylcytosine"
tgtttagtcattgtgtgttcttaggctcctcttggctgtactagtttcttagaatttcctcgtttttgattgtctggacatgatgatcttgacagttttgaggaaaagtggtcaggtatttt

SEQ ID NO: 1297 - DNA, 122 bp, Homo sapiens
  misc_feature (61)..(62): /note="This region represents a CpG dinucleotide"
  misc_feature (61)..(61): /note="Nucleotide may be methylated to form 5-methylcytosine"
ggagacgaaagggcttggccacctgtggcagccatgataaaacctagggaaaacggagctcgaagtagcttattttatttattttttatttatttatttatttattaaggagtcttgctctg

SEQ ID NO: 1298 - DNA, 122 bp, Homo sapiens
  misc_feature (61)..(62): /note="This region represents a CpG dinucleotide"
  misc_feature (61)..(61): /note="Nucleotide may be methylated to form 5-methylcytosine"
tgaggaaggagcccgtgcctcttcatgtcatgcttatgactcagggcaccaacacttcaacgtctcaaactaaaatgtccttaacatttcaaaattccagcatttccattttcttcagtaaa

SEQ ID NO: 1299 - DNA, 122 bp, Homo sapiens
  misc_feature (61)..(62): /note="This region represents a CpG dinucleotide"
  misc_feature (61)..(61): /note="Nucleotide may be methylated to form 5-methylcytosine"
aactttcagctcagctggttccagagtttcacaacccagctctgtcttgcttacatctgacgtgctacttcactggtgtgacctccagtgtgcttagtggataatgacactgcataatcccc

SEQ ID NO: 1300 - DNA, 122 bp, Homo sapiens
  misc_feature (61)..(62): /note="This region represents a CpG dinucleotide"
  misc_feature (61)..(61): /note="Nucleotide may be methylated to form 5-methylcytosine"
taatggacccattggttcaatttgtgcattaactccaaacatgcagcagtcaccaccttccggacttttttggaataacaaacactggtgaattctgggggcttactgactcctctacatgt

SEQ ID NO: 1301 - DNA, 122 bp, Homo sapiens
  misc_feature (61)..(62): /note="This region represents a CpG dinucleotide"
  misc_feature (61)..(61): /note="Nucleotide may be methylated to form 5-methylcytosine"
ttttgaaatgagcgataagggaaggtattgcaagaacagatgagaaaagaatacgattaacgcctttataaaagttgggcagtggagtagtaactaattttaagaggttaagtaaggagacg

SEQ ID NO: 1302 - DNA, 122 bp, Homo sapiens
  misc_feature (61)..(62): /note="This region represents a CpG dinucleotide"
  misc_feature (61)..(61): /note="Nucleotide may be methylated to form 5-methylcytosine"
agggctaagggtccccccgttctgtggccgcctccagcacatccacccagagtccctgggcgtgaacacagccgctggggacgatcaccgcctgcccagcgtgcagccctggggctgcgtcc

SEQ ID NO: 1303 - DNA, 122 bp, Homo sapiens
  misc_feature (61)..(62): /note="This region represents a CpG dinucleotide"
  misc_feature (61)..(61): /note="Nucleotide may be methylated to form 5-methylcytosine"
ctgctgaggaaggtaagttactggaatccctgaactctcataaatgaccaccccccaccccgccctgtcccactccctcctccctgcctctttagattctttgagcaaatatcccttcccaa

SEQ ID NO: 1304 - DNA, 122 bp, Homo sapiens
  misc_feature (61)..(62): /note="This region represents a CpG dinucleotide"
  misc_feature (61)..(61): /note="Nucleotide may be methylated to form 5-methylcytosine"
tcatctccccatacccatcgagaaccctattctcctgtggcagactttaatgaatgtaaccgcagattatgtgttttctttctttggtgaacttagaggatgcataggccaggtgccaagtg

SEQ ID NO: 1305 - DNA, 122 bp, Homo sapiens
  misc_feature (61)..(62): /note="This region represents a CpG dinucleotide"
  misc_feature (61)..(61): /note="Nucleotide may be methylated to form 5-methylcytosine"
ctgtctcataggatcttcttcctgtcacaggctgtagcaaggtgctgctgaggccacggacgtcggaggaggtgtcccacatcctcaggtgaggtggtggctcccggctcccccagccttcc

SEQ ID NO: 1306 - DNA, 122 bp, Homo sapiens
  misc_feature (61)..(62): /note="This region represents a CpG dinucleotide"
  misc_feature (61)..(61): /note="Nucleotide may be methylated to form 5-methylcytosine"
taaaaaacacacacacacaaaatccaagaaatcacagtcttgagatacagtatcaaaaaccgtacctccaaatggtaactcaaggcaacaaaaaaattgaggggtaaaaaactaaattgcac

SEQ ID NO: 1307 - DNA, 122 bp, Homo sapiens
  misc_feature (61)..(62): /note="This region represents a CpG dinucleotide"
  misc_feature (61)..(61): /note="Nucleotide may be methylated to form 5-methylcytosine"
tcttattggcaaggtccactggttacaattgatgagccaatactgaggcccatgaccaggcgttactgaggcccgtgaccaggcaatactgagacccgtgaccagtcagtacggaggcccgt

SEQ ID NO: 1308 - DNA, 122 bp, Homo sapiens
  misc_feature (61)..(62): /note="This region represents a CpG dinucleotide"
  misc_feature (61)..(61): /note="Nucleotide may be methylated to form 5-methylcytosine"
acaaggatgtacttgttgtagggttgcttataattagtaaaaaaaaaaaaaaaaactggacgcaacctaaacacaaatgagggaggtactggcttctgcctcagggcttctgcacatgctct

SEQ ID NO: 1309 - DNA, 122 bp, Homo sapiens
  misc_feature (61)..(62): /note="This region represents a CpG dinucleotide"
  misc_feature (61)..(61): /note="Nucleotide may be methylated to form 5-methylcytosine"
taatccccgctttccatcctctagtcagcttcttcccagccagccacaagcgaacaggctcgcaagcagcggatgaaacaggaagtctgacagcttgagtctgcagtgggacccctagtgtt

SEQ ID NO: 1310 - DNA, 122 bp, Homo sapiens
  misc_feature (61)..(62): /note="This region represents a CpG dinucleotide"
  misc_feature (61)..(61): /note="Nucleotide may be methylated to form 5-methylcytosine"
acatgaacctctgcagcgtgggcagatgctgctgcaaccctggccatgtcctcctagggacggtatttcccccatgactgtagcaagggtcccgggagtgccctgaccacacagatatgagt

SEQ ID NO: 1311 - DNA, 122 bp, Homo sapiens
  misc_feature (61)..(62): /note="This region represents a CpG dinucleotide"
  misc_feature (61)..(61): /note="Nucleotide may be methylated to form 5-methylcytosine"
caaaccactgttcatgaaatctgtgggtgcaaacaaattgagctgtcaggctgcaggacgcgagcaaacactggccaggcaaatggcatttcctccctccagcacatttctgctgctgaccc

SEQ ID NO: 1312 - DNA, 122 bp, Homo sapiens
  misc_feature (61)..(62): /note="This region represents a CpG dinucleotide"
  misc_feature (61)..(61): /note="Nucleotide may be methylated to form 5-methylcytosine"
cttcagcacacttgttgcaggcacaaaacataaatactcaaattagtctccaaacaataacgccacctatctatttactgaagcagcatttctcctcatgtattaatagcctggtactttca

SEQ ID NO: 1313 - DNA, 122 bp, Homo sapiens
  misc_feature (61)..(62): /note="This region represents a CpG dinucleotide"
  misc_feature (61)..(61): /note="Nucleotide may be methylated to form 5-methylcytosine"
ccttttcgcgctcctactccgagctcaaggagcagcagcagcgcgcggccagccccgagccggccctgcaggaggacagcacgcactcggccacagccaccgaggacagctcgcagggcccc

SEQ ID NO: 1314 - DNA, 122 bp, Homo sapiens
  misc_feature (61)..(62): /note="This region represents a CpG dinucleotide"
  misc_feature (61)..(61): /note="Nucleotide may be methylated to form 5-methylcytosine"
atgggccagatagtgcctgagctcacgcccctaggaagtggtgaggggccaggatgtccacgctgatgactccagatcacactgcctgctcaatacaccagaaaggggaagtgcctcaccca

SEQ ID NO: 1315 - DNA, 122 bp, Homo sapiens
  misc_feature (61)..(62): /note="This region represents a CpG dinucleotide"
  misc_feature (61)..(61): /note="Nucleotide may be methylated to form 5-methylcytosine"
cttaccttttgagtcctagtcacactaaaaatccctttcattaaagtggtggcaactcctcgtcaataagggaagggaactgacatttgtgcacctgcaatatgttttgcatgtttcctcat

SEQ ID NO: 1316 - DNA, 122 bp, Homo sapiens
  misc_feature (61)..(62): /note="This region represents a CpG dinucleotide"
  misc_feature (61)..(61): /note="Nucleotide may be methylated to form 5-methylcytosine"
aaaggggatttctgcgcacggcacctggttttccgagctgtgctcacttttcctgagagccgaggtgggcaatgtatccgacctgctcccaggccccaaaagatgctagtgtgcccatgcac

SEQ ID NO: 1317 - DNA, 122 bp, Homo sapiens
  misc_feature (61)..(62): /note="This region represents a CpG dinucleotide"
  misc_feature (61)..(61): /note="Nucleotide may be methylated to form 5-methylcytosine"
ccttgggaaaattacctaacctctatctgcaaaatggaggtaagagtacctactttaaaacgttgttgtgacatttaataagtcactcagtaggataagccattattaggaatgcatatttt

SEQ ID NO: 1318 - DNA, 122 bp, Homo sapiens
  misc_feature (61)..(62): /note="This region represents a CpG dinucleotide"
  misc_feature (61)..(61): /note="Nucleotide may be methylated to form 5-methylcytosine"
gctcgtaggagggtttgcttgaatgatacttgtgagtgaagggagcaacagatgaaaggtcgtgtcctgtcatggtcctgcaggaaggcagaaccacttcaagtccttaacgcagagagcat

SEQ ID NO: 1319 - DNA, 122 bp, Homo sapiens
  misc_feature (61)..(62): /note="This region represents a CpG dinucleotide"
  misc_feature (61)..(61): /note="Nucleotide may be methylated to form 5-methylcytosine"
gaacaggagatggttcaggttctccggaggctggcatactctcaagacttgtgtccagttcgttattggtgttttctttacactgctcttttgaggcactgctatctcccaccacatctact

SEQ ID NO: 1320 - DNA, 122 bp, Homo sapiens
  misc_feature (61)..(62): /note="This region represents a CpG dinucleotide"
  misc_feature (61)..(61): /note="Nucleotide may be methylated to form 5-methylcytosine"
gcctggtggtggtggaggacctgcactctggcgcccagcagcactggtccggccactctgcggagatctccacgctggccctcagccacagtgcccaggtgcccgcctgcatcgccctcctc

SEQ ID NO: 1321 - DNA, 122 bp, Homo sapiens
  misc_feature (61)..(62): /note="This region represents a CpG dinucleotide"
  misc_feature (61)..(61): /note="Nucleotide may be methylated to form 5-methylcytosine"
gagaggcggcgttgcaggtccttggaatggccgcggccgtggggagcactgggcggactgcgcgccccgaagggcgcacgtggggcgcagcccttttctgccgccagtacatcggagggcag

SEQ ID NO: 1322 - DNA, 122 bp, Homo sapiens
  misc_feature (61)..(62): /note="This region represents a CpG dinucleotide"
  misc_feature (61)..(61): /note="Nucleotide may be methylated to form 5-methylcytosine"
acatggaggtctctgagggagacgtgccagcctctgccacttggacacagccaaggcatccggcacggtggtgaccctgcatccctcccaccatagcaaggggcacccacacccctccagag

SEQ ID NO: 1323 - DNA, 122 bp, Homo sapiens
  misc_feature (61)..(62): /note="This region represents a CpG dinucleotide"
  misc_feature (61)..(61): /note="Nucleotide may be methylated to form 5-methylcytosine"
agccctcgctccacggctcgcggcagttccttgaagcccacccaggtggggagcccctggcgcagcccaactctctgcagtctcggggaagctgaggcagagagggaagccccgccccgggt

SEQ ID NO: 1324 - DNA, 122 bp, Homo sapiens
  misc_feature (61)..(62): /note="This region represents a CpG dinucleotide"
  misc_feature (61)..(61): /note="Nucleotide may be methylated to form 5-methylcytosine"
ggttctgggaaggataaaaagagggaagtgggtattttcttgtttactaagggaggaatccgactttgagagcaactcagcgcctgcccaatgcagaggtaatactgaaaaagaggtttatg

SEQ ID NO: 1325 - DNA, 122 bp, Homo sapiens
  misc_feature (61)..(62): /note="This region represents a CpG dinucleotide"
  misc_feature (61)..(61): /note="Nucleotide may be methylated to form 5-methylcytosine"
cccagccaattgtatggacagtcttttgcctggcgtgggggccaagtggacaataccacacggaggacggtgctgaaaatttcaaaggagaaccgtctgaggcggctttggcatttctcctt

SEQ ID NO: 1326 - DNA, 122 bp, Homo sapiens
  misc_feature (61)..(62): /note="This region represents a CpG dinucleotide"
  misc_feature (61)..(61): /note="Nucleotide may be methylated to form 5-methylcytosine"
tgtgtgctcttcacaagcaaaagcaaagcaaaaggacattctgtccgattatttaaacagcgtgattagatgcagcactacgtgaaattaaatagacacagaatatacatatcagtaagtct

SEQ ID NO: 1327 - DNA, 122 bp, Homo sapiens
  misc_feature (61)..(62): /note="This region represents a CpG dinucleotide"
  misc_feature (61)..(61): /note="Nucleotide may be methylated to form 5-methylcytosine"
tggctccccgctgcaagacagacagatctggtgctctctctctttctttgggtgcaagcacgcctgcacagtgtcaccagggcaattataccttttaaagacaacagtggcaaagagccaag

SEQ ID NO: 1328 - DNA, 122 bp, Homo sapiens
  misc_feature (61)..(62): /note="This region represents a CpG dinucleotide"
  misc_feature (61)..(61): /note="Nucleotide may be methylated to form 5-methylcytosine"
ctcttctcttccttccctctattccttcttctctgtcatagtgaacatgcttttctactgcgtagggcttgacatatgtgttattatggctgtcaaaaggaagccagacccagaagctgctg

SEQ ID NO: 1329 - DNA, 122 bp, Homo sapiens
  misc_feature (61)..(62): /note="This region represents a CpG dinucleotide"
  misc_feature (61)..(61): /note="Nucleotide may be methylated to form 5-methylcytosine"
ccggaccgcacccttcagccgctgccctgacccggccagcagctgcgaaacccgtccacgcgaaattgagttcttggctgggcccgtgcctcgtgctccggacctgggatcctcgaggcatc

SEQ ID NO: 1330 - DNA, 122 bp, Homo sapiens
  misc_feature (61)..(62): /note="This region represents a CpG dinucleotide"
  misc_feature (61)..(61): /note="Nucleotide may be methylated to form 5-methylcytosine"
ttcattttctttttcagcaaaaaacatatcttcctacttcacattttttcttgactgtcacgctagcattctgtagattgagaaatctatgtaaatacaccataatttctagaagcacgttt

SEQ ID NO: 1331 - DNA, 122 bp, Homo sapiens
  misc_feature (61)..(62): /note="This region represents a CpG dinucleotide"
  misc_feature (61)..(61): /note="Nucleotide may be methylated to form 5-methylcytosine"
tggagcccccagaactgaccacaactgagtcaccacgggcagtgtggttctgggcttgatcgcctgaacccccactgttgtggcgcagcgtgaggtctggagacccacagcaggagtcagat

SEQ ID NO: 1332 - DNA, 122 bp, Homo sapiens
  misc_feature (61)..(62): /note="This region represents a CpG dinucleotide"
  misc_feature (61)..(61): /note="Nucleotide may be methylated to form 5-methylcytosine"
ctgctattcagtggtcagtcgccgctggagcgaagacatatctgggtgagaacagaagaccgggattaacagaagactgtgatgagctgggggaggggagtgggtagtgacggtgctgagtg

SEQ ID NO: 1333 - DNA, 122 bp, Homo sapiens
  misc_feature (61)..(62): /note="This region represents a CpG dinucleotide"
  misc_feature (61)..(61): /note="Nucleotide may be methylated to form 5-methylcytosine"
gtttcccatcccccatcgctgtccatctcttctcaccctgagcttcttaagtattttcagcggctgtcaatcaggtgtgctgctgacaggcacagtgtttaaaaagagctcttgctcccctg

SEQ ID NO: 1334 - DNA, 122 bp, Homo sapiens
  misc_feature (61)..(62): /note="This region represents a CpG dinucleotide"
  misc_feature (61)..(61): /note="Nucleotide may be methylated to form 5-methylcytosine"
gccggcagggctgctgccccaaacccgcggttcacttgcctggctactgagggccaaggccgcggtcagccaactccccagggtgtttctatgcctgcctgcaggtgcctggtaactttttc

SEQ ID NO: 1335 - DNA, 122 bp, Homo sapiens
  misc_feature (61)..(62): /note="This region represents a CpG dinucleotide"
  misc_feature (61)..(61): /note="Nucleotide may be methylated to form 5-methylcytosine"
agtggtgagcattagtgcccacaggagaactaagcatgtatgtggattaattaacagattcgttaagggtacctagtttaaatgtatctatttgtaaattagccaagagggattcaaggtga

SEQ ID NO: 1336 - DNA, 122 bp, Homo sapiens
  misc_feature (61)..(62): /note="This region represents a CpG dinucleotide"
  misc_feature (61)..(61): /note="Nucleotide may be methylated to form 5-methylcytosine"
gggtgttgcaatagctcattcataaatacaggcaccccagttattggctcatcacaggcacgtgttattggaaacagaatatgcaactttgacctccaaataatgagttgttgccaactcaa

SEQ ID NO: 1337 - DNA, 122 bp, Homo sapiens
  misc_feature (61)..(62): /note="This region represents a CpG dinucleotide"
  misc_feature (61)..(61): /note="Nucleotide may be methylated to form 5-methylcytosine"
agttgagagatttaaagacaagaccatcgggacaacttttactaatctttgtgaaaaagacgcagtatgacttcaagaagcagcctcatggttaagagaaaggggttctggacctgggctgc

SEQ ID NO: 1338 - DNA, 122 bp, Homo sapiens
  misc_feature (61)..(62): /note="This region represents a CpG dinucleotide"
  misc_feature (61)..(61): /note="Nucleotide may be methylated to form 5-methylcytosine"
ccggttaaaaaccacaagtattcctcagcttctctttcaatgtcaatgaggtgtgcatgacgtcatcttgcatataaaatattcctcccattttaaaacattaaactatctttctgtgttaa

SEQ ID NO: 1339 - DNA, 122 bp, Homo sapiens
  misc_feature (61)..(62): /note="This region represents a CpG dinucleotide"
  misc_feature (61)..(61): /note="Nucleotide may be methylated to form 5-methylcytosine"
gccgctgcactgtgaagctctccacaaccccgtagttgtgtctgcagtaggtgtccaccgcggcccgcgcctgctccaggatgtccttctggctgttccagtactcagcgtcaggccgcccc

SEQ ID NO: 1340 - DNA, 122 bp, Homo sapiens
  misc_feature (61)..(62): /note="This region represents a CpG dinucleotide"
  misc_feature (61)..(61): /note="Nucleotide may be methylated to form 5-methylcytosine"
ctaattagggggcagtaagagtgccaggcatgagtaactgacaatcatggtcatatgatacgaaggctcaatcatgttcatgactatacaaaggctcattttgttcttacagagctccacaa

SEQ ID NO: 1341 - DNA, 122 bp, Homo sapiens
  misc_feature (61)..(62): /note="This region represents a CpG dinucleotide"
  misc_feature (61)..(61): /note="Nucleotide may be methylated to form 5-methylcytosine"
ccatgtgctcagcccctcagatagtggacgatcctggcaggtagggatgtttctgtgtgacgccccctgcaaggaatgctattccctgactgtcaagagagtagctggcagtattgtcatgt

SEQ ID NO: 1342 - DNA, 122 bp, Homo sapiens
  misc_feature (61)..(62): /note="This region represents a CpG dinucleotide"
  misc_feature (61)..(61): /note="Nucleotide may be methylated to form 5-methylcytosine"
gctccgggacccccacttggggtcctgcgcccccctccccgcccccagccgcggccgccgcgcctcgggaaccaggttcggccgcttggccccgcccctgccgtgcccattggccgccgctg

SEQ ID NO: 1343 - DNA, 122 bp, Homo sapiens
  misc_feature (61)..(62): /note="This region represents a CpG dinucleotide"
  misc_feature (61)..(61): /note="Nucleotide may be methylated to form 5-methylcytosine"
tctctgccctcagccagtagggagctcagcatcgccagcatcaaggtgacagttgctacccgaaggtctccggggatccgcaaagccttcttccaagacataactgagacgaagggaaaagc

SEQ ID NO: 1344 - DNA, 122 bp, Homo sapiens
  misc_feature (61)..(62): /note="This region represents a CpG dinucleotide"
  misc_feature (61)..(61): /note="Nucleotide may be methylated to form 5-methylcytosine"
ggccccatattttgtctgctctacagatcccacccgcgggccacaccctcccttcactcccgtctctgggtcccacccataataacccgtaatgacagatcctccgtgtccccacctctttg

SEQ ID NO: 1345 - DNA, 122 bp, Homo sapiens
  misc_feature (61)..(62): /note="This region represents a CpG dinucleotide"
  misc_feature (61)..(61): /note="Nucleotide may be methylated to form 5-methylcytosine"
ggaactatttcaggcatataggatacagcaatggcttgctcaatttattgagacttgtttcgtggctcagcatatagtctgtcttggtgaatgctccacattcccaccaacagacttataaa

SEQ ID NO: 1346 - DNA, 122 bp, Homo sapiens
  misc_feature (61)..(62): /note="This region represents a CpG dinucleotide"
  misc_feature (61)..(61): /note="Nucleotide may be methylated to form 5-methylcytosine"
acctccccctctgacctccgccactgacctccgcagctgacatcccccgctgacctcccccgctgacctccgccactgacctctgccactgaactccactgctgacctcccccactggcctc

SEQ ID NO: 1347 - DNA, 122 bp, Homo sapiens
  misc_feature (61)..(62): /note="This region represents a CpG dinucleotide"
  misc_feature (61)..(61): /note="Nucleotide may be methylated to form 5-methylcytosine"
aaggagttagattcggaacccctacaagagaaaattaaggtctgaatttggggatggggtcgcagagggcagaggatgaagaaataaatacagaagacattagaaaggactctggtttgtgg

SEQ ID NO: 1348 - DNA, 122 bp, Homo sapiens
  misc_feature (61)..(62): /note="This region represents a CpG dinucleotide"
  misc_feature (61)..(61): /note="Nucleotide may be methylated to form 5-methylcytosine"
caccaacagaaaggggtccattatggaatgttctcttgcatcttcaaattcttcctccttcgtctctcttaccctctgcctacaaaggcttcaagaaagagatgcaagacaatactgaggga

SEQ ID NO: 1349 - DNA, 122 bp, Homo sapiens
  misc_feature (61)..(62): /note="This region represents a CpG dinucleotide"
  misc_feature (61)..(61): /note="Nucleotide may be methylated to form 5-methylcytosine"
gattagtacacagatatcaaaagtggaagtagaccctgagtccttagctaaggactagaacgatcgtggcagaaacgtgcacaggaaatcatgtggcctctgtctcaccagcgggtgttcca

SEQ ID NO: 1350 - DNA, 122 bp, Homo sapiens
  misc_feature (61)..(62): /note="This region represents a CpG dinucleotide"
  misc_feature (61)..(61): /note="Nucleotide may be methylated to form 5-methylcytosine"
taagccaacaaatacataagtggaaacgacctccacccccttaagagcaaacagatacagcgctttcctgccccactgcaggtggtaatgtaaattaggacatccttctggaaaggaatttg

SEQ ID NO: 1351 - DNA, 122 bp, Homo sapiens
  misc_feature (61)..(62): /note="This region represents a CpG dinucleotide"
  misc_feature (61)..(61): /note="Nucleotide may be methylated to form 5-methylcytosine"
tttgcattccaattacttaaactgagatgttcttgatcagttgaacatactgtgagtagacgatctctttctcagagaaacaagatggagagatcttcagagaatggccccactgaagctca

SEQ ID NO: 1352 - DNA, 122 bp, Homo sapiens
  misc_feature (61)..(62): /note="This region represents a CpG dinucleotide"
  misc_feature (61)..(61): /note="Nucleotide may be methylated to form 5-methylcytosine"
gatattttttgagcgtctcccatgggtacagtgctgtgtaggcgctacacacagagccggcgtcagcagtccctgtcctcaggaggcagccgctcaaccacagacagcttgcgcacatcagc

SEQ ID NO: 1353 - DNA, 122 bp, Homo sapiens
  misc_feature (61)..(62): /note="This region represents a CpG dinucleotide"
  misc_feature (61)..(61): /note="Nucleotide may be methylated to form 5-methylcytosine"
cacgggatacttgtgtagaggcatcgcgagcctggcgggaggtgggggctcgcagtcagtcgcagcctggccaggcccccggcactcaccccctaccccggcccccgactctcacccgctac

SEQ ID NO: 1354 - DNA, 122 bp, Homo sapiens
  misc_feature (61)..(62): /note="This region represents a CpG dinucleotide"
  misc_feature (61)..(61): /note="Nucleotide may be methylated to form 5-methylcytosine"
ttttcctgaaagtctgttttttcatccttccttccttttcatcatctcccgttttcaaaacggctcttaaaccatgcgcaatgcgttaacgttaagtcgtcatttccatctactcaatgaca

SEQ ID NO: 1355 - DNA, 122 bp, Homo sapiens
  misc_feature (61)..(62): /note="This region represents a CpG dinucleotide"
  misc_feature (61)..(61): /note="Nucleotide may be methylated to form 5-methylcytosine"
agacacagccgggaaactggctgtggtggggaagcttctggtgctatggcttggctacatcgcaggctgtgtgaggaggaggacaggagaagcctggggaggcagcgggggctcagggtgga

SEQ ID NO: 1356 - DNA, 122 bp, Homo sapiens
  misc_feature (61)..(62): /note="This region represents a CpG dinucleotide"
  misc_feature (61)..(61): /note="Nucleotide may be methylated to form 5-methylcytosine"
cccgcccctccctacctaattaaggaccctaatcagcttggggagattaagggctctggccggctgtacccacgcccccgccctggcctgggctggcaaggaagacctgtgggcgggcgtca

SEQ ID NO: 1357 - DNA, 122 bp, Homo sapiens
  misc_feature (61)..(62): /note="This region represents a CpG dinucleotide"
  misc_feature (61)..(61): /note="Nucleotide may be methylated to form 5-methylcytosine"
cccccagcgaagtgtctgcaagcagaacctgagaggggccggctgccccgagagtcctcgcgcttgggcagtgggaagtccaggggtttgtcgttctggtgacttcccccacctggctcagc

SEQ ID NO: 1358 - DNA, 122 bp, Homo sapiens
  misc_feature (61)..(62): /note="This region represents a CpG dinucleotide"
  misc_feature (61)..(61): /note="Nucleotide may be methylated to form 5-methylcytosine"
gaaaaacatagtatataaaaggtttgggcgtcgatcagcgagggagcagcaaatggccggcggttggcgcctcgcggggggcgggcggcgcagagtagggggcggtggccagggccgaggcg

SEQ ID NO: 1359 - DNA, 122 bp, Homo sapiens
  misc_feature (61)..(62): /note="This region represents a CpG dinucleotide"
  misc_feature (61)..(61): /note="Nucleotide may be methylated to form 5-methylcytosine"
aagaaacaagaagtaacatatgcttgttgcagaacacttagaaaatgcagaggccacacgcggtggctcacacctgtaatcccagcactttgggaggccaaggcgggcggatcgtgaggtca

SEQ ID NO: 1360 - DNA, 122 bp, Homo sapiens
  misc_feature (61)..(62): /note="This region represents a CpG dinucleotide"
  misc_feature (61)..(61): /note="Nucleotide may be methylated to form 5-methylcytosine"
acagggttgtgagccaacagcaaccacatacacctttgcagtaatcagaaccagcgttctcgatgctgaaagcaaaatcaagtaaacaaggttgtgttgtggacttccttgacccagacttt

SEQ ID NO: 1361 - DNA, 122 bp, Homo sapiens
  misc_feature (61)..(62): /note="This region represents a CpG dinucleotide"
  misc_feature (61)..(61): /note="Nucleotide may be methylated to form 5-methylcytosine"
tctggccgttctgttggagcgcctctgactgacttcccccatgtgtccgtgtggccacaccgtgctactttcagaggcagtgggcttttcgctaagggataaaaagaagtaaaaccttgcct

SEQ ID NO: 1362 - DNA, 122 bp, Homo sapiens
  misc_feature (61)..(62): /note="This region represents a CpG dinucleotide"
  misc_feature (61)..(61): /note="Nucleotide may be methylated to form 5-methylcytosine"
atgctcctttccccacagccctcagggaaggggcccagcagccaagaagtttcccaacatcgctgccaccttcaccatacctgttcctggcccaagtggaggccccagtgggaaatgtgtgt

SEQ ID NO: 1363 - DNA, 122 bp, Homo sapiens
  misc_feature (61)..(62): /note="This region represents a CpG dinucleotide"
  misc_feature (61)..(61): /note="Nucleotide may be methylated to form 5-methylcytosine"
ctctcctttaaaaacacagatcaatagtatttttgcacccccttgaggttaatcaaggcccggtgacttgctttggtcaatgaaagtggatggaaacaacttatgtaacttactgcaggaag

SEQ ID NO: 1364 - DNA, 122 bp, Homo sapiens
  misc_feature (61)..(62): /note="This region represents a CpG dinucleotide"
  misc_feature (61)..(61): /note="Nucleotide may be methylated to form 5-methylcytosine"
ggcggacgtcgtgctggggctggtctaaggcgccctcaccgtgcttgctctcgctgccgacgctatttttccaccagctgtaggagaagcccgaagaccactggtcccccgggtagcccaag

SEQ ID NO: 1365 - DNA, 122 bp, Homo sapiens
  misc_feature (61)..(62): /note="This region represents a CpG dinucleotide"
  misc_feature (61)..(61): /note="Nucleotide may be methylated to form 5-methylcytosine"
tgcatgcaatgtgcacaacagtcctcacacagcgcgtacgggcgtgcacgcgtccttacacgctgctgtacacagtgcacacacagaaggcgtgcgtacgcacacagttcttcatacgatgc

SEQ ID NO: 1366 - DNA, 122 bp, Homo sapiens
  misc_feature (61)..(62): /note="This region represents a CpG dinucleotide"
  misc_feature (61)..(61): /note="Nucleotide may be methylated to form 5-methylcytosine"
cagcactcagcacccggatgcgctgctcttgcagacacagacccgtggctactgccgatgcgcagccttctggataaatcctatgcactggatgacttgctctccaggagccatgatttgct

SEQ ID NO: 1367 - DNA, 122 bp, Homo sapiens
  misc_feature (61)..(62): /note="This region represents a CpG dinucleotide"
  misc_feature (61)..(61): /note="Nucleotide may be methylated to form 5-methylcytosine"
aaattgagataggagcggaggcggagcgcggccgtgcagggaggggcagggcggtgtaggcggcttcatttaccaagctttgctggccattgtttccatgccaaacccttgccaaggggatt

SEQ ID NO: 1368 - DNA, 122 bp, Homo sapiens
  misc_feature (61)..(62): /note="This region represents a CpG dinucleotide"
  misc_feature (61)..(61): /note="Nucleotide may be methylated to form 5-methylcytosine"
gacaccctcaagggaggagtgcaggcactcaaagatttgagtcacaggcaatgtggttcacgtactatatgaataagcacaatgaaggtatggagtactctgtaatcaaggggaggggtttt

SEQ ID NO: 1369 - DNA, 122 bp, Homo sapiens
  misc_feature (61)..(62): /note="This region represents a CpG dinucleotide"
  misc_feature (61)..(61): /note="Nucleotide may be methylated to form 5-methylcytosine"
tcaccaaactgcccaatgccttaaccagagacattcaaactgcaaaccaggatgagaagtcgatggttccgcactgtagacaggttttcccaagataattgaacaaggggagactcttaccc

SEQ ID NO: 1370 - DNA, 122 bp, Homo sapiens
  misc_feature (61)..(62): /note="This region represents a CpG dinucleotide"
  misc_feature (61)..(61): /note="Nucleotide may be methylated to form 5-methylcytosine"
tgaagtcattgaatgtatacatccaacaagagtcccaagccctgggctagtgctgtaattcgtatagcagcccacacattcttgcccttgtgtaataccacgaatgaacacccatagtcacc

SEQ ID NO: 1371 - DNA, 122 bp, Homo sapiens
  misc_feature (61)..(62): /note="This region represents a CpG dinucleotide"
  misc_feature (61)..(61): /note="Nucleotide may be methylated to form 5-methylcytosine"
aagccatagggcttacagtaggctgtcttcaaacaagcaaggaagtaataggctttctaccgcaactcagatctaggtttcaggactcattctagggacagctgcaactgccaagtagacta

SEQ ID NO: 1372 - DNA, 122 bp, Homo sapiens
  misc_feature (61)..(62): /note="This region represents a CpG dinucleotide"
  misc_feature (61)..(61): /note="Nucleotide may be methylated to form 5-methylcytosine"
caacttcctacaggagggcgtcccgttagaatgacagggcttttgcaaaagtctgacacccgtggcacagagcgccccagatatggagggtttcacaggtaggtatacttcagaagaaattt

SEQ ID NO: 1373 - DNA, 122 bp, Homo sapiens
  misc_feature (61)..(62): /note="This region represents a CpG dinucleotide"
  misc_feature (61)..(61): /note="Nucleotide may be methylated to form 5-methylcytosine"
acccgggcgcgagccccgcgtgcaggcgccgggcctgggcccctgtggccgtcccgccagcggccgtcttctgtccctgcatttagagaagggggatggcaaagggacccgccagcggatcc

SEQ ID NO: 1374 - DNA, 122 bp, Homo sapiens
  misc_feature (61)..(62): /note="This region represents a CpG dinucleotide"
  misc_feature (61)..(61): /note="Nucleotide may be methylated to form 5-methylcytosine"
accacaggtgggtggggatgaaactctagtcagttggcagccttactcatttgcagctcccgtgaatgaggtggtgaaacctggggtgaaactcagggtggagaaacatttttggatttcat

SEQ ID NO: 1375 - DNA, 122 bp, Homo sapiens
  misc_feature (61)..(62): /note="This region represents a CpG dinucleotide"
  misc_feature (61)..(61): /note="Nucleotide may be methylated to form 5-methylcytosine"
agtttcaggggtatcctggggtgatgaaatccttcttcagtcccccctcccccgaggagtcggttgggttggggagggagggtttcagctcctgtactccagcgttccgaggcccacgtctt

SEQ ID NO: 1376 - DNA, 122 bp, Homo sapiens
  misc_feature (61)..(62): /note="This region represents a CpG dinucleotide"
  misc_feature (61)..(61): /note="Nucleotide may be methylated to form 5-methylcytosine"
aaaaccatctgcacccattgctccaaggagatggctcagctcaagcctggtgaagttccacgcacagtgcagctgcacagtggcatcagtggatgctatcatcatcatgaaatccaaactga

SEQ ID NO: 1377 - DNA, 122 bp, Homo sapiens
  misc_feature (61)..(62): /note="This region represents a CpG dinucleotide"
  misc_feature (61)..(61): /note="Nucleotide may be methylated to form 5-methylcytosine"
gtccaattgcagcccaaacttgacgtgtaacatttatacttagaaaatgtgtcattctcacgtcctttatacagatttgtccatcagtacattggattttcttaaacaactaccatttgatt

SEQ ID NO: 1378 - DNA, 122 bp, Homo sapiens
  misc_feature (61)..(62): /note="This region represents a CpG dinucleotide"
  misc_feature (61)..(61): /note="Nucleotide may be methylated to form 5-methylcytosine"
cctttcccgggccagaggctgggcggatctgccccagggaagaccccacatctgctgcggcggctgcagtccggctccttgaggctggtttcctgtcccctccttcccactacgtccccttc

SEQ ID NO: 1379 - DNA, 122 bp, Homo sapiens
  misc_feature (61)..(62): /note="This region represents a CpG dinucleotide"
  misc_feature (61)..(61): /note="Nucleotide may be methylated to form 5-methylcytosine"
aaaagatggtggtaaggatttcttaattttctagatcttcttgggaagaaattcatgaatcgtgaaggcactcaaagtgagtcagatcgccatctggtgactatttacagaaatagcagaca

SEQ ID NO: 1380 - DNA, 122 bp, Homo sapiens
  misc_feature (61)..(62): /note="This region represents a CpG dinucleotide"
  misc_feature (61)..(61): /note="Nucleotide may be methylated to form 5-methylcytosine"
acacagctttgagttttagttaaggttctgagtcacagaaatgacatcggttgagggtagcggggagaaaatattaggaacttgcacacgtgtattttgtcagcaaatttgagttcagtagc

SEQ ID NO: 1381 - DNA, 122 bp, Homo sapiens
  misc_feature (61)..(62): /note="This region represents a CpG dinucleotide"
  misc_feature (61)..(61): /note="Nucleotide may be methylated to form 5-methylcytosine"
aactactgatatcagttgctctgaaggaccccactgactcagctgagcagaggaacaccacgagcagctgactcaccaaagaaggtgatttccacattgtgatgatttcatcacccttgccc

SEQ ID NO: 1382 - DNA, 122 bp, Homo sapiens
  misc_feature (61)..(62): /note="This region represents a CpG dinucleotide"
  misc_feature (61)..(61): /note="Nucleotide may be methylated to form 5-methylcytosine"
tttcttaatccagtctatcattgttggacattttctttttgatagtcgaattcccttcaacgtctagcacagtgccttgcacatttacccactcaaaaaaaatttcgtaaggaattaataaa

SEQ ID NO: 1383 - DNA, 122 bp, Homo sapiens
  misc_feature (61)..(62): /note="This region represents a CpG dinucleotide"
  misc_feature (61)..(61): /note="Nucleotide may be methylated to form 5-methylcytosine"
ttggcaaggccccagaaccaactgagtttctgggatcgagtctcaggcactctttgttctcgtttaagcttggttgatgcataccaggccctggtaccacgcccatggcctgatgctggccc

SEQ ID NO: 1384 - DNA, 122 bp, Homo sapiens
  misc_feature (61)..(62): /note="This region represents a CpG dinucleotide"
  misc_feature (61)..(61): /note="Nucleotide may be methylated to form 5-methylcytosine"
gcgtggcgctgcgcgggagggacccgcagacggcagagggtccgcggggagcgggcggggcgttgagagcgcgcacacagacacccaaaaaacacacaaacaagcggcccctgtgccgcggc

SEQ ID NO: 1385 - DNA, 122 bp, Homo sapiens
  misc_feature (61)..(62): /note="This region represents a CpG dinucleotide"
  misc_feature (61)..(61): /note="Nucleotide may be methylated to form 5-methylcytosine"
gttaaatgtgcttttccaagaatagccaagataaatccgaaaaagaaaaacaagcagggacgacttgccctaccagagttcagaacttgtcatgaaactgcagtaatcaagacaatgtgtca

SEQ ID NO: 1386 - DNA, 122 bp, Homo sapiens
  misc_feature (61)..(62): /note="This region represents a CpG dinucleotide"
  misc_feature (61)..(61): /note="Nucleotide may be methylated to form 5-methylcytosine"
tgattgtgataatcccagcatttatggagagtctgttatatgccagggatgctaataacacgctttagttgcattatttcatttcttccttaccacaaacccgtgaggtactatttttatcc

SEQ ID NO: 1387 - DNA, 122 bp, Homo sapiens
  misc_feature (61)..(62): /note="This region represents a CpG dinucleotide"
  misc_feature (61)..(61): /note="Nucleotide may be methylated to form 5-methylcytosine"
cataactggaatgtatattaacttgttagaatcattgatttaaaactgttctattctttacgcaagggaaaaataatgctggatttctcagtttcaagtacagaagatccaactcaataagg

SEQ ID NO: 1388 - DNA, 122 bp, Homo sapiens
  misc_feature (61)..(62): /note="This region represents a CpG dinucleotide"
  misc_feature (61)..(61): /note="Nucleotide may be methylated to form 5-methylcytosine"
gggttttctgttacactcctccgagtgcagagaggcagctcccttgtgaagctatccacacggtcttccgcctctcgcttgcctgtctcctgtctctccagggaggtgctggctgctgttgg

SEQ ID NO: 1389 - DNA, 122 bp, Homo sapiens
  misc_feature (61)..(62): /note="This region represents a CpG dinucleotide"
  misc_feature (61)..(61): /note="Nucleotide may be methylated to form 5-methylcytosine"
ctttgctaacatttacatgtgatcactttgaaatactccttgagttttgctgaggaataacgctgattacaatggcgaatgaacaataatttaaagcatattaatgactttgttaatccaaa

SEQ ID NO: 1390 - DNA, 122 bp, Homo sapiens
  misc_feature (61)..(62): /note="This region represents a CpG dinucleotide"
  misc_feature (61)..(61): /note="Nucleotide may be methylated to form 5-methylcytosine"
ttatcagagatgcctgcggagtagcaggtctgatgagatcagtctgtccccaggccaaaccgtgaccagatttcctttgaacataatctcttagagcagtgtttctctatctggtttaaaag

SEQ ID NO: 1391 - DNA, 122 bp, Homo sapiens
  misc_feature (61)..(62): /note="This region represents a CpG dinucleotide"
  misc_feature (61)..(61): /note="Nucleotide may be methylated to form 5-methylcytosine"
aacagcagagcatcaacccaagtgtaaggcctaagtgtggggcccgtgtgactgcacaggcgcacggccctgcagccatccctgcttgcagaatcaggtgtaagccaccctctgagatcatc

SEQ ID NO: 1392 - DNA, 122 bp, Homo sapiens
  misc_feature (61)..(62): /note="This region represents a CpG dinucleotide"
  misc_feature (61)..(61): /note="Nucleotide may be methylated to form 5-methylcytosine"
gcctgagggctgcggggcgggaccgagcagggcggggcgcttaggtggcctcgggggaggcggggcttggaggctccgcccctcaggccccgcctcctccccggctagtctttggccgccgc

SEQ ID NO: 1393 - DNA, 122 bp, Homo sapiens
  misc_feature (61)..(62): /note="This region represents a CpG dinucleotide"
  misc_feature (61)..(61): /note="Nucleotide may be methylated to form 5-methylcytosine"
acatttgtggaatactttaaattctaactgccaccactagatgaggctttcagtacttttcgcccagccttcactatggtaacatttcctgactattctagcctcttccctgtgccagtcca

SEQ ID NO: 1394 - DNA, 122 bp, Homo sapiens
  misc_feature (61)..(62): /note="This region represents a CpG dinucleotide"
  misc_feature (61)..(61): /note="Nucleotide may be methylated to form 5-methylcytosine"
ctgaaactttactttgcctgttgtatgggacacacacaggactaagagacacatgtaaaacgcatgtggtcttggcacggggaaaggaccatatgttttttaaaaacagtctccagcagctc

SEQ ID NO: 1395 - DNA, 122 bp, Homo sapiens
  misc_feature (61)..(62): /note="This region represents a CpG dinucleotide"
  misc_feature (61)..(61): /note="Nucleotide may be methylated to form 5-methylcytosine"
tctccctttcatccaccggcccccagcctcctcctgccctggctacctctccaggctccccgacaccattgtccggcccccgcggcgtccctgtccccgcagcacacagaggcccctttgtc

SEQ ID NO: 1396 - DNA, 122 bp, Homo sapiens
  misc_feature (61)..(62): /note="This region represents a CpG dinucleotide"
  misc_feature (61)..(61): /note="Nucleotide may be methylated to form 5-methylcytosine"
tttgacaatccgtcagctgagtgctccaacaagaggccagaggagggttcatggcagtgacgctctccctggctcggcagccagagccatctcctgagaggaattccaacctttcttcacaa

SEQ ID NO: 1397 - DNA, 122 bp, Homo sapiens
  misc_feature (61)..(62): /note="This region represents a CpG dinucleotide"
  misc_feature (61)..(61): /note="Nucleotide may be methylated to form 5-methylcytosine"
tgtccctgcgcgtgacacaaatttggccccgagggagctccgtgtgctcagcctcagagccgtaggcgagagcgcctgtctgcatgagtgagcatatgggtgtttttgagtctgtgggtgtc

SEQ ID NO: 1398 - DNA, 122 bp, Homo sapiens
  misc_feature (61)..(62): /note="This region represents a CpG dinucleotide"
  misc_feature (61)..(61): /note="Nucleotide may be methylated to form 5-methylcytosine"
acagaaaagcgaggaaagtctatgccgccagcgaccggcaggaggcacgtcgggcacgctcgtcaccgtttcctggcacgtgaccaccgccctgccctgtcgctttagggcctgtcgcttcc

SEQ ID NO: 1399 - DNA, 122 bp, Homo sapiens
  misc_feature (61)..(62): /note="This region represents a CpG dinucleotide"
  misc_feature (61)..(61): /note="Nucleotide may be methylated to form 5-methylcytosine"
ctgtctgaactgggcagggggcagcagactgacagcttcagctgccaacagaggcagcagcggggctctggacagagcgctggatttagagtcaaagacttggacttgcagctcccattcag

SEQ ID NO: 1400 - DNA, 122 bp, Homo sapiens
  misc_feature (61)..(62): /note="This region represents a CpG dinucleotide"
  misc_feature (61)..(61): /note="Nucleotide may be methylated to form 5-methylcytosine"
acgcaagctcaggccgcagctaccaagggaacctgcctaagcgggcggcacagaagggagcgccggggacgctctggttttcagatcccctttcggaaggtgagattgtttttcataacagg

SEQ ID NO: 1401 - DNA, 122 bp, Homo sapiens
  misc_feature (61)..(62): /note="This region represents a CpG dinucleotide"
  misc_feature (61)..(61): /note="Nucleotide may be methylated to form 5-methylcytosine"
atgatcatcatcagcactagggccaaaggacagttcctagcaatgttcacgcactgcactcggggggcaggaaccctgctatgactttctttatttagcatgaagagcactcagacaactct

SEQ ID NO: 1402 - DNA, 122 bp, Homo sapiens
  misc_feature (61)..(62): /note="This region represents a CpG dinucleotide"
  misc_feature (61)..(61): /note="Nucleotide may be methylated to form 5-methylcytosine"
cagggcagtgatccatcacagatggttttttgtttctcattgcccagcaggtccatgggacggtatggggcagaaggaccaatcatagctccaagttgtatgtcagaagggcaagaacaaat

SEQ ID NO: 1403 - DNA, 122 bp, Homo sapiens
  misc_feature (61)..(62): /note="This region represents a CpG dinucleotide"
  misc_feature (61)..(61): /note="Nucleotide may be methylated to form 5-methylcytosine"
tttcctaaaggtgacagatctcggtgaacagtcaagctttactgagtgcaagacagtccacgcgcctataagattaaggtacagtgctaaggacggggatcttaattacctgtctttccaca

SEQ ID NO: 1404 - DNA, 122 bp, Homo sapiens
  misc_feature (61)..(62): /note="This region represents a CpG dinucleotide"
  misc_feature (61)..(61): /note="Nucleotide may be methylated to form 5-methylcytosine"
gtagtgggactggatatagagaaggagatgctggtagaagccaataccagcaaccaggtgcgtcctgtaggcacattccaaagtgctccggctgtggatgtgctacagattgcgaaagggaa

SEQ ID NO: 1405 - DNA, 122 bp, Homo sapiens
  misc_feature (61)..(62): /note="This region represents a CpG dinucleotide"
  misc_feature (61)..(61): /note="Nucleotide may be methylated to form 5-methylcytosine"
cactttcctgaacccccacatttcttgttgatgccttacatcattagctaacattgggggcgtatcttgctcacccgactgtaagctcttcaccgctctgtattttctctcagcaatagaat

SEQ ID NO: 1406 - DNA, 122 bp, Homo sapiens
  misc_feature (61)..(62): /note="This region represents a CpG dinucleotide"
  misc_feature (61)..(61): /note="Nucleotide may be methylated to form 5-methylcytosine"
ctgatttctgtacgtcatttcccctttttcatctataaatattcttttaccaagtggctgcgctggagtctctgtgactctgctgtgattctggggttgcccaattcatgaatcattaattg

SEQ ID NO: 1407 - DNA, 122 bp, Homo sapiens
  misc_feature (61)..(62): /note="This region represents a CpG dinucleotide"
  misc_feature (61)..(61): /note="Nucleotide may be methylated to form 5-methylcytosine"
ttaaccagaccagagatgccagtgctcatcttgtcttgtgagtaattttcactaccaaaacgaaatctataggggagagatttgccaaagaaattagggcttcagtaattaggaaaccacaa

SEQ ID NO: 1408 - DNA, 122 bp, Homo sapiens
  misc_feature (61)..(62): /note="This region represents a CpG dinucleotide"
  misc_feature (61)..(61): /note="Nucleotide may be methylated to form 5-methylcytosine"
tttcttataatgagcaagctggagattcaggagagctgatgggtgcagttctagtccagacgccagcaggcttgaaatccagaaagagccaatgtttcagtgcaagtctgaaggcaggaaga

SEQ ID NO: 1409 - DNA, 122 bp, Homo sapiens
  misc_feature (61)..(62): /note="This region represents a CpG dinucleotide"
  misc_feature (61)..(61): /note="Nucleotide may be methylated to form 5-methylcytosine"
attgggaagccccaggttggttctgacttcatgcatgactggatccagtggctcaacacacgttaccagggcctggttccctccccagctcttggctctgttgactgccctgtaacatccct

SEQ ID NO: 1410 - DNA, 122 bp, Homo sapiens
  misc_feature (61)..(62): /note="This region represents a CpG dinucleotide"
  misc_feature (61)..(61): /note="Nucleotide may be methylated to form 5-methylcytosine"
gggcgggcgggcgggcaggggcgagcggagcgggagggagcggactgcggcaggatctgtcgaggaaaaatcttgcggccggcgattccccgccttttaagcgcagcctcgcactcccccca

SEQ ID NO: 1411 - DNA, 122 bp, Homo sapiens
  misc_feature (61)..(62): /note="This region represents a CpG dinucleotide"
  misc_feature (61)..(61): /note="Nucleotide may be methylated to form 5-methylcytosine"
ttttctgtctaccttgttttttcagttttcactggggaattctgagatagcgtgttctttcgtggagtatttatatcctgtcttgaaatgctgaatgcatagcatctacttgtttctacatg

SEQ ID NO: 1412 - DNA, 122 bp, Homo sapiens
  misc_feature (61)..(62): /note="This region represents a CpG dinucleotide"
  misc_feature (61)..(61): /note="Nucleotide may be methylated to form 5-methylcytosine"
tcttactattttatacaggtttcagtcaaatgtttctacaccctgctgggcgtgggaggccgtgactcaccaagagagaggatattcggtttgcatatccagggtgttgcaggatgatagag

SEQ ID NO: 1413 - DNA, 122 bp, Homo sapiens
  misc_feature (61)..(62): /note="This region represents a CpG dinucleotide"
  misc_feature (61)..(61): /note="Nucleotide may be methylated to form 5-methylcytosine"
cccaggctatataaggaattacacgtacatttcggaccgaggggctcgctttggttcctgcgttatttttaaaacgacttttaagagaggggcaataaatgcgtctataatgggaccgctgc

SEQ ID NO: 1414 - DNA, 122 bp, Homo sapiens
  misc_feature (61)..(62): /note="This region represents a CpG dinucleotide"
  misc_feature (61)..(61): /note="Nucleotide may be methylated to form 5-methylcytosine"
ctatgcgccctccgcgggttgcggctcagtgctccccaaggacccagtgcgaagaagcctcggaccccacagctgccgtccgcgacccctaactccactctgcagcgaataaattaacatct

SEQ ID NO: 1415 - DNA, 122 bp, Homo sapiens
  misc_feature (61)..(62): /note="This region represents a CpG dinucleotide"
  misc_feature (61)..(61): /note="Nucleotide may be methylated to form 5-methylcytosine"
attggctttattctcaggttctcttaattaacttagccaatgatttttcctacttaagtgcgcaagaaaaatgaaacaaaggggtagaacacaaaaattcctgtgaattttcaaaagccaaa

SEQ ID NO: 1416 - DNA, 122 bp, Homo sapiens
  misc_feature (61)..(62): /note="This region represents a CpG dinucleotide"
  misc_feature (61)..(61): /note="Nucleotide may be methylated to form 5-methylcytosine"
attaatcactgccaccaggacaaatggattcaagcagcaaacatttatttaaataacctacggcaggatggaggagaatagcagaagataaaaagcactagaaaaattttataggtttttca

SEQ ID NO: 1417 - DNA, 122 bp, Homo sapiens
  misc_feature (61)..(62): /note="This region represents a CpG dinucleotide"
  misc_feature (61)..(61): /note="Nucleotide may be methylated to form 5-methylcytosine"
acaataactcttgttagtatgaacatcccttaaatattctctgtgaatccataaatcaaacgcaccaagatgtactagtaagaggataaaagttttagacagtagtctgtagaatttttttc

SEQ ID NO: 1418 - DNA, 122 bp, Homo sapiens
  misc_feature (61)..(62): /note="This region represents a CpG dinucleotide"
  misc_feature (61)..(61): /note="Nucleotide may be methylated to form 5-methylcytosine"
aacggtctaccttcaaaagcatcctcttgacaattccactaggaccaacaccaataccaccgagccctcgttgctgcctcttcagcgcagaatagcccaccaagtccacgtttccctagtcc

SEQ ID NO: 1419 - DNA, 122 bp, Homo sapiens
  misc_feature (61)..(62): /note="This region represents a CpG dinucleotide"
  misc_feature (61)..(61): /note="Nucleotide may be methylated to form 5-methylcytosine"
ggtgccatgtcaatgcaaaacacagttacttttgcaccaacctaaagttacaacaccatacggcaacaaatggccctgcagccaggaagtaagacagtgctgaagaactggtacaaattaag

SEQ ID NO: 1420 - DNA, 122 bp, Homo sapiens
  misc_feature (61)..(62): /note="This region represents a CpG dinucleotide"
  misc_feature (61)..(61): /note="Nucleotide may be methylated to form 5-methylcytosine"
cagcaggccccaaatagccccagcacagcagtgttctgggtgtccagttcccacatttcccgagcagcctgacgcatgccaggtcctatgcaccagggatattaaagtgactcaaggaggca

SEQ ID NO: 1421 - DNA, 122 bp, Homo sapiens
  misc_feature (61)..(62): /note="This region represents a CpG dinucleotide"
  misc_feature (61)..(61): /note="Nucleotide may be methylated to form 5-methylcytosine"
atgtaatcctcccacctcagcctcccgagtagctgggactggaggcgggagccaccatgtcgggctaattggtttttctgtagagatcgggcctccctaggttgcccaggcttacttaacac

SEQ ID NO: 1422 - DNA, 122 bp, Homo sapiens
  misc_feature (61)..(62): /note="This region represents a CpG dinucleotide"
  misc_feature (61)..(61): /note="Nucleotide may be methylated to form 5-methylcytosine"
gtccaggtggctggacatcagggtgtggcgctcaagagagggttctggagtggtcgacaccgaagtggagaggaagcagtgaggtgttctaacaacggtgaggaattggggaggccgctggg

SEQ ID NO: 1423 - DNA, 122 bp, Homo sapiens
  misc_feature (61)..(62): /note="This region represents a CpG dinucleotide"
  misc_feature (61)..(61): /note="Nucleotide may be methylated to form 5-methylcytosine"
agaagctccggatttacaaacatcccaattgtctttcaagtcgttttccaggtgcaaatccgtcagcccccttctcaaacttcaaaccagaacctcctcttcacgctcttcctgaggcttaa

SEQ ID NO: 1424 - DNA, 122 bp, Homo sapiens
  misc_feature (61)..(62): /note="This region represents a CpG dinucleotide"
  misc_feature (61)..(61): /note="Nucleotide may be methylated to form 5-methylcytosine"
aagtatctagtcttccctactcggtcacctgggaagctgtgatgttaactgccaaagacccgtgtgacaaaaaaaaaaagaaaagaaaagaaaaatactgaaactaaaggacaagaagaggc

SEQ ID NO: 1425 - DNA, 122 bp, Homo sapiens
  misc_feature (61)..(62): /note="This region represents a CpG dinucleotide"
  misc_feature (61)..(61): /note="Nucleotide may be methylated to form 5-methylcytosine"
aaatattttacactttgtgagtcacaagatctctgttgcaactactcaatggttacagcacgaaagcagccatcggcagcacataaagagaggagtgtgcatatattacaataaaacttcca

SEQ ID NO: 1426 - DNA, 122 bp, Homo sapiens
  misc_feature (61)..(62): /note="This region represents a CpG dinucleotide"
  misc_feature (61)..(61): /note="Nucleotide may be methylated to form 5-methylcytosine"
ctggtccatttaatccctgctgggctcattcctcggccatgattggtttaggcatggccacgtgacccaattccagccaatgagacacaagaggaggttggtggggatgtctggaaaagaat

SEQ ID NO: 1427 - DNA, 122 bp, Homo sapiens
  misc_feature (61)..(62): /note="This region represents a CpG dinucleotide"
  misc_feature (61)..(61): /note="Nucleotide may be methylated to form 5-methylcytosine"
catcctctcataacccctccatgctaggcgaaagggaaacacaggtgtcaggcctcaaaacgcctggctagtttgtcagagacagctgcagccaaggtgctaaataagccctggttatcagg

SEQ ID NO: 1428 - DNA, 122 bp, Homo sapiens
  misc_feature (61)..(62): /note="This region represents a CpG dinucleotide"
  misc_feature (61)..(61): /note="Nucleotide may be methylated to form 5-methylcytosine"
cgacagcccacaggggccctggtttctcccactctcagtcctcaatgcctggcaaactggcgaactcagaatgttaagaaatgtgagctactgaaatacagaacttgagaaatgatcccagg

SEQ ID NO: 1429 - DNA, 122 bp, Homo sapiens
  misc_feature (61)..(62): /note="This region represents a CpG dinucleotide"
  misc_feature (61)..(61): /note="Nucleotide may be methylated to form 5-methylcytosine"
gagtcattgcagggcaacctgtctgtgacattagacaactgttagggagccgatttattacggacagagcactgtgtccaggtctggggaggccaggtcatggagaacctggagtggtccct

SEQ ID NO: 1430 - DNA, 122 bp, Homo sapiens
  misc_feature (61)..(62): /note="This region represents a CpG dinucleotide"
  misc_feature (61)..(61): /note="Nucleotide may be methylated to form 5-methylcytosine"
aaatcctgagcgaattctttgctgccaggacagtccataggctcttactcttagaaattacgtaagcatgagcagtcaacgctgaaaagcagagaatgtggttttctggcggactccagagg

SEQ ID NO: 1431 - DNA, 122 bp, Homo sapiens
  misc_feature (61)..(62): /note="This region represents a CpG dinucleotide"
  misc_feature (61)..(61): /note="Nucleotide may be methylated to form 5-methylcytosine"
cttatctcctaggaccatagactttatcagacatgatgtcaccattcacgcaggcattgccgcaccactgcctgggaaaagacactgcatataaatcttcccacagtgcctttagggggcga

SEQ ID NO: 1432 - DNA, 122 bp, Homo sapiens
  misc_feature (61)..(62): /note="This region represents a CpG dinucleotide"
  misc_feature (61)..(61): /note="Nucleotide may be methylated to form 5-methylcytosine"
atggtctcgatctcctgacctcgtgattcgcccccatcggcctcccaaagtgctggctcacgcctttacatgcccggtatgagggccttctacttagaagtccttgagctagatagatactt

SEQ ID NO: 1433 - DNA, 122 bp, Homo sapiens
  misc_feature (61)..(62): /note="This region represents a CpG dinucleotide"
  misc_feature (61)..(61): /note="Nucleotide may be methylated to form 5-methylcytosine"
tttcttctggcagcactcccagaaactaaggtaaagtctccgttattcctgagggggatccggatggcttatcatgtccatcacactccacaatgctatataataccataaaactttgcaaa

SEQ ID NO: 1434 - DNA, 122 bp, Homo sapiens
  misc_feature (61)..(62): /note="This region represents a CpG dinucleotide"
  misc_feature (61)..(61): /note="Nucleotide may be methylated to form 5-methylcytosine"
gaaccagggcttgttattgtcaatagcacaagaggctaaagatggcgccatttccggtcacgcggcgccgagggaggggcggtgtcaacctcagggagtgggggtgagggaagcgctgcagc

SEQ ID NO: 1435 - DNA, 122 bp, Homo sapiens
  misc_feature (61)..(62): /note="This region represents a CpG dinucleotide"
  misc_feature (61)..(61): /note="Nucleotide may be methylated to form 5-methylcytosine"
ttcagtgtgaagtgcctcctcatgtctcaagatctgtcctcattgcagcttagcaggatacgtttgtctttgttttgaaattggataaaagaaggaagttagagcaattcatgcatggcaat

SEQ ID NO: 1436 - DNA, 122 bp, Homo sapiens
  misc_feature (61)..(62): /note="This region represents a CpG dinucleotide"
  misc_feature (61)..(61): /note="Nucleotide may be methylated to form 5-methylcytosine"
gtggagctggggtgacgagaggggtcggggcggctgggcgtgcgaaggcggccgggcagccgccgcaggggctggggaggaccagggaggagggtaggacatcacggagttgctccagctct

SEQ ID NO: 1437 - DNA, 122 bp, Homo sapiens
  misc_feature (61)..(62): /note="This region represents a CpG dinucleotide"
  misc_feature (61)..(61): /note="Nucleotide may be methylated to form 5-methylcytosine"
gtgccttctgttagccatggctgcttggatggccaaaggccactgtgggtttttcagcagcgcttttagcagaattccttcacactgcccccaccccacttgcagatgatggaaggcttgct

SEQ ID NO: 1438 - DNA, 122 bp, Homo sapiens
  misc_feature (61)..(62): /note="This region represents a CpG dinucleotide"
  misc_feature (61)..(61): /note="Nucleotide may be methylated to form 5-methylcytosine"
gctgctgcactgatttcaaacagcccaggctgaggaggtagcttcatggtgttttcctaacgaaatctagtaagtggtacatggatgacagaaatctctgtgttggcaactggaaactccag

SEQ ID NO: 1439 - DNA, 122 bp, Homo sapiens
  misc_feature (61)..(62): /note="This region represents a CpG dinucleotide"
  misc_feature (61)..(61): /note="Nucleotide may be methylated to form 5-methylcytosine"
tcatcagcaggatccaaacactggccctaccctccccagtgaggtattgtggggaaatcccgggaggaggggagtccatgtgagaccccggtggccactgccctgctgccctcttcctctgg

SEQ ID NO: 1440 - DNA, 122 bp, Homo sapiens
  misc_feature (61)..(62): /note="This region represents a CpG dinucleotide"
  misc_feature (61)..(61): /note="Nucleotide may be methylated to form 5-methylcytosine"
gagggagggaagctacatcctgaggaggctgtctgagtgaatctgtagtggaagtacacacgaactccatgcctcgctgtcccagtacccaaagcacagtctggctgccaaggattacctcc

SEQ ID NO: 1441 - DNA, 122 bp, Homo sapiens
  misc_feature (61)..(62): /note="This region represents a CpG dinucleotide"
  misc_feature (61)..(61): /note="Nucleotide may be methylated to form 5-methylcytosine"
tgccgagtgaatcaagacagaaaattaccctagtgtgcagaaccttgttgaagaggtaaccgttgctagctttcaaggtgtttctgaaaaggaagctatcaccctccccaccaccctgcaaa

SEQ ID NO: 1442 - DNA, 122 bp, Homo sapiens
  misc_feature (61)..(62): /note="This region represents a CpG dinucleotide"
  misc_feature (61)..(61): /note="Nucleotide may be methylated to form 5-methylcytosine"
agcttcactctggactgtaaaaggtggcattcttcaccagggaattcctcacccagagcacgctggggccaaattgacttaaagcttaaggctacccagtgagtcgatgctggcaccaggac

SEQ ID NO: 1443 - DNA, 122 bp, Homo sapiens
  misc_feature (61)..(62): /note="This region represents a CpG dinucleotide"
  misc_feature (61)..(61): /note="Nucleotide may be methylated to form 5-methylcytosine"
gccacagttttaccacaaacacatttttctgctgtgataaagactgcacccctgcatcaacggaaaagcagtgtggctgcgtggcaagtgtgtgcctttgtgctcgataaggctgagttgaa

SEQ ID NO: 1444 - DNA, 122 bp, Homo sapiens
  misc_feature (61)..(62): /note="This region represents a CpG dinucleotide"
  misc_feature (61)..(61): /note="Nucleotide may be methylated to form 5-methylcytosine"
gtaggtaaataacgaatacacagacatgcagatagacagagtatcatgtggttataatggcgatggagacatgagtcaggatggggaacgggagagattgtgtgtgaagaggcgccatattt

SEQ ID NO: 1445 - DNA, 122 bp, Homo sapiens
  misc_feature (61)..(62): /note="This region represents a CpG dinucleotide"
  misc_feature (61)..(61): /note="Nucleotide may be methylated to form 5-methylcytosine"
agctgtaaccccttccacactcctgattaccacactccaccctcccattctctgaactggcgccaccctaagacatcttgaaatccaccactagggatgccaccctcaaccccccttctcga

SEQ ID NO: 1446 - DNA, 122 bp, Homo sapiens
  misc_feature (61)..(62): /note="This region represents a CpG dinucleotide"
  misc_feature (61)..(61): /note="Nucleotide may be methylated to form 5-methylcytosine"
ggtagcagccttgctgctggcttctcccagctccgtgttcggtcccggtggggtcacaggcgctgcggctctgtctgtcgcagcccaggtgagccaggagggggacgccgacctccaacccc

SEQ ID NO: 1447 - DNA, 122 bp, Homo sapiens
  misc_feature (61)..(62): /note="This region represents a CpG dinucleotide"
  misc_feature (61)..(61): /note="Nucleotide may be methylated to form 5-methylcytosine"
cagacacagcctcatggggtgtttaatcttgatccaaaagtcactatcgtacctgtggtccgaatgcatgtataacagtcacagttccaactttcacttcccttcagatgtgagattcagaa

SEQ ID NO: 1448 - DNA, 122 bp, Homo sapiens
  misc_feature (61)..(62): /note="This region represents a CpG dinucleotide"
  misc_feature (61)..(61): /note="Nucleotide may be methylated to form 5-methylcytosine"
aactgaaaggatgtagggcagagcctttcttggaacaaatcccagagcaaatcaatgagccgtgactttttgaggaattactaaatggtcatacacacccgagttctaacaccagccctaac

SEQ ID NO: 1449 - DNA, 122 bp, Homo sapiens
  misc_feature (61)..(62): /note="This region represents a CpG dinucleotide"
  misc_feature (61)..(61): /note="Nucleotide may be methylated to form 5-methylcytosine"
attaaggacaaggaatctaagtgaatgggcagtaggggacatgaaacatggcagggtcaccggagcaagccaaaacacttttgaagagccagtgagtcaaacctgtggaaacctatgccaga

SEQ ID NO: 1450 - DNA, 122 bp, Homo sapiens
  misc_feature (61)..(62): /note="This region represents a CpG dinucleotide"
  misc_feature (61)..(61): /note="Nucleotide may be methylated to form 5-methylcytosine"
cttacaaaggacaaatctgtacaaatcagtttagataatctgttaaaaaaaaaaaaaacacgctcagcacaaaatcttgatctgttatttagggagagaagagggcaactgtctacttctat

SEQ ID NO: 1451 - DNA, 122 bp, Homo sapiens
  misc_feature (61)..(62): /note="This region represents a CpG dinucleotide"
  misc_feature (61)..(61): /note="Nucleotide may be methylated to form 5-methylcytosine"
gcccagcgagcccagcactcagcggaacctgtagaagcgtcgggggttgccccgcttctgcgaaccgccctgggatgcgaggttcagcgtcactatctcatcctgggaaaggatgagatccg

SEQ ID NO: 1452 - DNA, 122 bp, Homo sapiens
  misc_feature (61)..(62): /note="This region represents a CpG dinucleotide"
  misc_feature (61)..(61): /note="Nucleotide may be methylated to form 5-methylcytosine"
agcaatgctcaaaataaaaataacaggaaatgagaattgaggaatattcacataagggaacgatatattgcagttaagatgagtaaactagagctcaatgtattaacagaatgttgagtgaa

SEQ ID NO: 1453 - DNA, 122 bp, Homo sapiens
  misc_feature (61)..(62): /note="This region represents a CpG dinucleotide"
  misc_feature (61)..(61): /note="Nucleotide may be methylated to form 5-methylcytosine"
cgtggcctaatggataaggcgtctgacttcggatcagaagattgcaggttcgagtcctgccgcggtcgaagggaggttatgattaacttttagtttattcctccctcaggaacgaagtattg

SEQ ID NO: 1454 - DNA, 122 bp, Homo sapiens
  misc_feature (61)..(62): /note="This region represents a CpG dinucleotide"
  misc_feature (61)..(61): /note="Nucleotide may be methylated to form 5-methylcytosine"
tggttcacgcagccaccaaaggcgtaggcccagaacagcagccagcgccaggccagcccgcgcaccagccagcaggccagcatctgcaccagcaccagcaccagcaccgcccacttgaggcg

SEQ ID NO: 1455 - DNA, 122 bp, Homo sapiens
  misc_feature (61)..(62): /note="This region represents a CpG dinucleotide"
  misc_feature (61)..(61): /note="Nucleotide may be methylated to form 5-methylcytosine"
gcacagtttgtagcctaggagcaataggctactccatacagccaggtgtgtggtggactgcgtcgtctagctttgtgtaagtcccctctgtgatgttcacagcacgatgaaatcgcctaatg

SEQ ID NO: 1456 - DNA, 122 bp, Homo sapiens
  misc_feature (61)..(62): /note="This region represents a CpG dinucleotide"
  misc_feature (61)..(61): /note="Nucleotide may be methylated to form 5-methylcytosine"
tttcttctgcccttaaaaccacctggaaaccttcccggagcagccggttgaatggggttacgccagagacacaggtattgatttacgcagagagtacgtcgagggaagaagcttggagactc

SEQ ID NO: 1457 - DNA, 122 bp, Homo sapiens
  misc_feature (61)..(62): /note="This region represents a CpG dinucleotide"
  misc_feature (61)..(61): /note="Nucleotide may be methylated to form 5-methylcytosine"
catcttccgatcctgtgtcccgcactgggacacagagcagggattgtggtgagggtggctcgtgggtcctctcgcggagagcagggtctggcacttaccagcgcgcacgactaggacttgtt

SEQ ID NO: 1458 - DNA, 122 bp, Homo sapiens
  misc_feature (61)..(62): /note="This region represents a CpG dinucleotide"
  misc_feature (61)..(61): /note="Nucleotide may be methylated to form 5-methylcytosine"
ttttctttcctgtatgtcttagccccccaactacttctggagagcagaaatattacggaacgtttctgttgagtctatcctagagccctagagacagtgctggacccacaacaggaagtcaa

SEQ ID NO: 1459 - DNA, 122 bp, Homo sapiens
  misc_feature (61)..(62): /note="This region represents a CpG dinucleotide"
  misc_feature (61)..(61): /note="Nucleotide may be methylated to form 5-methylcytosine"
tcactcccttacctggggctacagaactaggaagcaacagaagagaatttgaacctatgtcggtctagctccaaaaactgtgctcttaactattgtgccacactgttaccttaaaatacctt

SEQ ID NO: 1460 - DNA, 122 bp, Homo sapiens
  misc_feature (61)..(62): /note="This region represents a CpG dinucleotide"
  misc_feature (61)..(61): /note="Nucleotide may be methylated to form 5-methylcytosine"
ttccctccagcctggcctagggacgactcttcttcagtgccgccttctccaccgagtcctcgcatattaagattccagaaggttctgatctcctggtgcttcagtgtaaacgagtgtgtttg

SEQ ID NO: 1461 - DNA, 122 bp, Homo sapiens
  misc_feature (61)..(62): /note="This region represents a CpG dinucleotide"
  misc_feature (61)..(61): /note="Nucleotide may be methylated to form 5-methylcytosine"
caagtcgaagcgcctgtgagaggcgcggggagagtcgccgggcagggagtttggcagcagcgtctggcgttcaggaaaggggatgaggccacaggctgacgccggaagccacgggcctgtgg

SEQ ID NO: 1462 - DNA, 122 bp, Homo sapiens
  misc_feature (61)..(62): /note="This region represents a CpG dinucleotide"
  misc_feature (61)..(61): /note="Nucleotide may be methylated to form 5-methylcytosine"
aatgaggaacagccattcccctccagcagggcctcggcaggtgggcccggcaggtgctcccgtgactctgcctccgcctccagccctggtctctgggatgcgaagatggatggaaagaccat

SEQ ID NO: 1463 - DNA, 122 bp, Homo sapiens
  misc_feature (61)..(62): /note="This region represents a CpG dinucleotide"
  misc_feature (61)..(61): /note="Nucleotide may be methylated to form 5-methylcytosine"
tggtgctttggagacagaggacatgggatagtgactcagattgggagggaacatgccccccgggacagatttctatgttgctggttatgatgaaatactttccactgaccacaagctatata

SEQ ID NO: 1464 - DNA, 122 bp, Homo sapiens
  misc_feature (61)..(62): /note="This region represents a CpG dinucleotide"
  misc_feature (61)..(61): /note="Nucleotide may be methylated to form 5-methylcytosine"
gccgcgggcggggaggggcgggcagcgggggcctctgccaggcgtccagactccccaaagcgcggagctgcgcgctggctcggccccggccccgccccggcgccaaaggaagaagacagaga

SEQ ID NO: 1465 - DNA, 122 bp, Homo sapiens
  misc_feature (61)..(62): /note="This region represents a CpG dinucleotide"
  misc_feature (61)..(61): /note="Nucleotide may be methylated to form 5-methylcytosine"
actataatttgccacgtcattccatttctcttgttactaaaatggattctctgctgaggccgtgacttccaactccaaaaaaaaaaaaaaaagatcatccacagccactattcctcacaatt

SEQ ID NO: 1466 - DNA, 122 bp, Homo sapiens
  misc_feature (61)..(62): /note="This region represents a CpG dinucleotide"
  misc_feature (61)..(61): /note="Nucleotide may be methylated to form 5-methylcytosine"
ggcgggcggatcacccgaggtcaggatttcaagaccagcctggccaacatggggaaaccccgtctgtactaaaagtgcacaaattagtcaggcgttgtgacacatgcctgtaataccagcta

SEQ ID NO: 1467 - DNA, 122 bp, Homo sapiens
  misc_feature (61)..(62): /note="This region represents a CpG dinucleotide"
  misc_feature (61)..(61): /note="Nucleotide may be methylated to form 5-methylcytosine"
atggggaaggatttgatcggacatttctccaaagaagatgcacaaatggccactcggccacgcaaaggcactcaacactgttagctgtcaggggaacgcagatgaaaacctcaatgagctac

SEQ ID NO: 1468 - DNA, 122 bp, Homo sapiens
  misc_feature (61)..(62): /note="This region represents a CpG dinucleotide"
  misc_feature (61)..(61): /note="Nucleotide may be methylated to form 5-methylcytosine"
ttaaggaagcaaggtattgcaaatctgaccagctgagatttgtgctgggccccaaaccaacggaggcccctctgccttcagacccctcccttctgtgggccccacccctccgcataacagct

SEQ ID NO: 1469 - DNA, 122 bp, Homo sapiens
  misc_feature (61)..(62): /note="This region represents a CpG dinucleotide"
  misc_feature (61)..(61): /note="Nucleotide may be methylated to form 5-methylcytosine"
gataaatagccaatatgagtcaagaggaaggatgtgaactaaacggacagtatacagtaccgtattctgtagcttgctgctttcagctgtgttcctatattttgaattcatctaccaccact

SEQ ID NO: 1470 - DNA, 122 bp, Homo sapiens
  misc_feature (61)..(62): /note="This region represents a CpG dinucleotide"
  misc_feature (61)..(61): /note="Nucleotide may be methylated to form 5-methylcytosine"
attaatcagggagctacttagagggttttgtaatgcttcctggaccagcttcatatttcacgtgttgtctggaaggtggacccacataaattggattcatttttcaaagcaagaaagaaata

SEQ ID NO: 1471 - DNA, 122 bp, Homo sapiens
  misc_feature (61)..(62): /note="This region represents a CpG dinucleotide"
  misc_feature (61)..(61): /note="Nucleotide may be methylated to form 5-methylcytosine"
tttgggaacaggaaatctgcaataatgttctccctaccgtcaagtaggaaaacagcaatacggtgaacaataggtgttccatcagttatgtgaccttgggcaattatgtgaccttgggcaac

SEQ ID NO: 1472 - DNA, 122 bp, Homo sapiens
  misc_feature (61)..(62): /note="This region represents a CpG dinucleotide"
  misc_feature (61)..(61): /note="Nucleotide may be methylated to form 5-methylcytosine"
gtggaggacgccccctgtggtgcctggtgaaccttagtcttagagatcggttcatccccgcggtttcccaccgagagggtccaccagtgagacaggagggaagctccacctcgggtcggccg

SEQ ID NO: 1473 - DNA, 122 bp, Homo sapiens
  misc_feature (61)..(62): /note="This region represents a CpG dinucleotide"
  misc_feature (61)..(61): /note="Nucleotide may be methylated to form 5-methylcytosine"
ctgctcctcccgcactatcgattttcaattgacctccgcctcccactttacacttcagagcgctcagcggcctccacacctcctgagcaaggaggaaagccagctgggcgcggggcccctgc

SEQ ID NO: 1474 - DNA, 122 bp, Homo sapiens
  misc_feature (61)..(62): /note="This region represents a CpG dinucleotide"
  misc_feature (61)..(61): /note="Nucleotide may be methylated to form 5-methylcytosine"
ttatagacagaccagtcaaaacatacatcttactggtcctgggagtcagtgtaaaaaatccgtgtgtggcttttgaatgagggggaagtggtgtgtgtgtatgtgtgtgatgtcttcaaaac

SEQ ID NO: 1475 - DNA, 122 bp, Homo sapiens
  misc_feature (61)..(62): /note="This region represents a CpG dinucleotide"
  misc_feature (61)..(61): /note="Nucleotide may be methylated to form 5-methylcytosine"
cggcggctctgggagaagtgacctgaggagtctgcagatcccagcccgggacggaggcgccgcgagaggagctactaagccctccaagccgccctttccctcttgcctccccagcccagttc

SEQ ID NO: 1476 - DNA, 122 bp, Homo sapiens
  misc_feature (61)..(62): /note="This region represents a CpG dinucleotide"
  misc_feature (61)..(61): /note="Nucleotide may be methylated to form 5-methylcytosine"
tacggaaagaagtttccccactgagttaatctgcagtggctggaggtgaccttctggagacggcgattaatcacgggccgtggcgggcgccgcgccacgccgggccctttgggggaatacta

SEQ ID NO: 1477 - DNA, 122 bp, Homo sapiens
  misc_feature (61)..(62): /note="This region represents a CpG dinucleotide"
  misc_feature (61)..(61): /note="Nucleotide may be methylated to form 5-methylcytosine"
gccccagccctggcagcgcctccagctccctggtcatacccttagtgccagagtaggcagcgcctctcggaagtgaggaagcccaccctgctgagtgacccacagcctcaggcctcagcagc

SEQ ID NO: 1478 - DNA, 122 bp, Homo sapiens
  misc_feature (61)..(62): /note="This region represents a CpG dinucleotide"
  misc_feature (61)..(61): /note="Nucleotide may be methylated to form 5-methylcytosine"
agtaaaatgtgctcagaatatacagttaacgattgagcacaacactcaaacctgccaggacgtggttttcccctctactttgctgggtaaccaaaagctatcagacattcatagctggttta

SEQ ID NO: 1479 - DNA, 122 bp, Homo sapiens
  misc_feature (61)..(62): /note="This region represents a CpG dinucleotide"
  misc_feature (61)..(61): /note="Nucleotide may be methylated to form 5-methylcytosine"
ccttgctatattctttgtagttactcatgaaggaatgtctgttacttactccaaactccacgctcctaaattccagacacccaagagcaaaaatagaatcgaagaagatgaagcaaaacaag

SEQ ID NO: 1480 - DNA, 122 bp, Homo sapiens
  misc_feature (61)..(62): /note="This region represents a CpG dinucleotide"
  misc_feature (61)..(61): /note="Nucleotide may be methylated to form 5-methylcytosine"
actcataaaatagcaaaaaccacaaaacacaactaaattgcaacaggctgtacttactgacggactttagaaaggaaagctcattgtgtgctttaagaaaagctttcaggagtttgagaaag

SEQ ID NO: 1481 - DNA, 122 bp, Homo sapiens
  misc_feature (61)..(62): /note="This region represents a CpG dinucleotide"
  misc_feature (61)..(61): /note="Nucleotide may be methylated to form 5-methylcytosine"
agaactactgagtcaagtgcaaactcccagccaggcagagagcagctgactctgtagaaccgtcccttcccgtctccctccacaccttgcctcctccaggcccaaccccattccaccagcac

SEQ ID NO: 1482 - DNA, 122 bp, Homo sapiens
  misc_feature (61)..(62): /note="This region represents a CpG dinucleotide"
  misc_feature (61)..(61): /note="Nucleotide may be methylated to form 5-methylcytosine"
gcataagtcaaaggcaatataaccaaatgttaaaatgcaccatctagcaatagcaaatcacgggattactaaccacactgcctgaatgaggcctggaactgtttacaggcccaggaaaaagc

SEQ ID NO: 1483 - DNA, 122 bp, Homo sapiens
  misc_feature (61)..(62): /note="This region represents a CpG dinucleotide"
  misc_feature (61)..(61): /note="Nucleotide may be methylated to form 5-methylcytosine"
atccccaagctacagggctcaaagagcttccagagagtgaacacgtacaggctctgagatcgtggtgtccagggagaccacggaagctccatgccctgccccacatgccttccccatgagtg

SEQ ID NO: 1484 - DNA, 122 bp, Homo sapiens
  misc_feature (61)..(62): /note="This region represents a CpG dinucleotide"
  misc_feature (61)..(61): /note="Nucleotide may be methylated to form 5-methylcytosine"
gatatgtctgttttcagtttcttttcctttttgcactaacaagttattttccccacatgacgtttaatctaccttacaaaacatttttaacattttagttcaaaatttgcttcagaaaatgg

SEQ ID NO: 1485 - DNA, 122 bp, Homo sapiens
  misc_feature (61)..(62): /note="This region represents a CpG dinucleotide"
  misc_feature (61)..(61): /note="Nucleotide may be methylated to form 5-methylcytosine"
taagataaaatcaacagagaccaaaactcctttcacagtgttatagtgaatcattaaacacgaaacgagcctctgaccttgccctgttggcatttctactggccagagaaatacaacttaaa

SEQ ID NO: 1486 - DNA, 122 bp, Homo sapiens
  misc_feature (61)..(62): /note="This region represents a CpG dinucleotide"
  misc_feature (61)..(61): /note="Nucleotide may be methylated to form 5-methylcytosine"
ttacttaatatagtcacttcctgattattcctttctttcttttgtggtttctcaacctttcggtgtcactgattaagattccttataccagaagtatatagctgacaggacaaagggcccca

SEQ ID NO: 1487 - DNA, 122 bp, Homo sapiens
  misc_feature (61)..(62): /note="This region represents a CpG dinucleotide"
  misc_feature (61)..(61): /note="Nucleotide may be methylated to form 5-methylcytosine"
tcacatccacagtggggtggagctgtatggcacaagatttcatcatgttactcagaatggcgagcaattattcaggaggttataggatatgcaacttccgcaattactcctgcagattgtat

SEQ ID NO: 1488 - DNA, 122 bp, Homo sapiens
  misc_feature (61)..(62): /note="This region represents a CpG dinucleotide"
  misc_feature (61)..(61): /note="Nucleotide may be methylated to form 5-methylcytosine"
tgtctgggcggtcctagccaccagtcattcattagcatacaaaaagacattcatcactcccggggattccaaaagtcttagaagctcttgtttcagaaacagggaaaaggaccaaatataat

SEQ ID NO: 1489 - DNA, 122 bp, Homo sapiens
  misc_feature (61)..(62): /note="This region represents a CpG dinucleotide"
  misc_feature (61)..(61): /note="Nucleotide may be methylated to form 5-methylcytosine"
ctacaaatgcctggaaggggttgcaaagaacaatgcaggatgctctctatcaatctattgcgttcctcattagtcatgatcactgcctccacaatgccccagatccctttgtggcattcaag

SEQ ID NO: 1490 - DNA, 122 bp, Homo sapiens
  misc_feature (61)..(62): /note="This region represents a CpG dinucleotide"
  misc_feature (61)..(61): /note="Nucleotide may be methylated to form 5-methylcytosine"
atgaaaacaaccgtttggagatgacaatcaatgtttacatttatgatttccttttcattccgccatgtcccacatagtggtgggtcagtgtcaatttactattattattatttgtcatgcct

SEQ ID NO: 1491 - DNA, 122 bp, Homo sapiens
  misc_feature (61)..(62): /note="This region represents a CpG dinucleotide"
  misc_feature (61)..(61): /note="Nucleotide may be methylated to form 5-methylcytosine"
ggtttagcagtatgtagatcttttaaaaggtagatgtaattcttaatgacaacagatatacgtgaaaaagcgaatcataggctgccatcgtcatagggcttatgctataaaatgctacttct

SEQ ID NO: 1492 - DNA, 122 bp, Homo sapiens
  misc_feature (61)..(62): /note="This region represents a CpG dinucleotide"
  misc_feature (61)..(61): /note="Nucleotide may be methylated to form 5-methylcytosine"
catgcccggccactaatacgacattcttttaaaagaatgagccaagccctccctgcctcccgcttccccaaagttcaaatattttctttctgtacttcagtgaagataactttggaagccac

SEQ ID NO: 1493 - DNA, 122 bp, Homo sapiens
  misc_feature (61)..(62): /note="This region represents a CpG dinucleotide"
  misc_feature (61)..(61): /note="Nucleotide may be methylated to form 5-methylcytosine"
tttattgcttgtacaacatctcctctttggctttggatacaggacatgccacatgactttcgtcacttctggaaaccacagccatgctggcaggatgacctggtgagccctggtcccctatc

SEQ ID NO: 1494 - DNA, 122 bp, Homo sapiens
  misc_feature (61)..(62): /note="This region represents a CpG dinucleotide"
  misc_feature (61)..(61): /note="Nucleotide may be methylated to form 5-methylcytosine"
ctggcgcccccaactgcctggccaaggtgactgctacacacgtggggtcgcagaatccctcgagtcacaacgtcttcaacgtcttgtcagtcccgtgatcgcactaaacgtatttaaagccc

SEQ ID NO: 1495 - DNA, 122 bp, Homo sapiens
  misc_feature (61)..(62): /note="This region represents a CpG dinucleotide"
  misc_feature (61)..(61): /note="Nucleotide may be methylated to form 5-methylcytosine"
aggaaaacaaagtcaaacggaaaagctaatgttgcttcccatctgtttgaaggcatgaggcggaagagagacaggttctgtgcagaggcactgtcggaccctggggaaggaaacctgtaggc

SEQ ID NO: 1496 - DNA, 122 bp, Homo sapiens
  misc_feature (61)..(62): /note="This region represents a CpG dinucleotide"
  misc_feature (61)..(61): /note="Nucleotide may be methylated to form 5-methylcytosine"
agggcggaaggggaaaaggctttctcagaagttctgaggtaggatgtgggactttggaggcggggactcagacaccacgccagattgagaactagctaaaacagggcagagggtggaagcag

SEQ ID NO: 1497 - DNA, 122 bp, Homo sapiens
  misc_feature (61)..(62): /note="This region represents a CpG dinucleotide"
  misc_feature (61)..(61): /note="Nucleotide may be methylated to form 5-methylcytosine"
gggaggttctctggcctcgtcaggcgtgtgctcagaggtggtaaccccacagagcttccacgtggaaacgaggctctgctggagaatttttgtaaacagaaaaaacaccatggtcaaacgga

SEQ ID NO: 1498 - DNA, 122 bp, Homo sapiens
  misc_feature (61)..(62): /note="This region represents a CpG dinucleotide"
  misc_feature (61)..(61): /note="Nucleotide may be methylated to form 5-methylcytosine"
ggctgcagggaccccatcagctggatgactgcactgactgcttgtaagacggttagcatgcgccatctaccagattttttgtttattacaagcaccagcaaattccatggagaaattgtggg

SEQ ID NO: 1499 - DNA, 122 bp, Homo sapiens
  misc_feature (61)..(62): /note="This region represents a CpG dinucleotide"
  misc_feature (61)..(61): /note="Nucleotide may be methylated to form 5-methylcytosine"
tgctcactgcagtgccagacagacaataaacaattacatgcagtggattaagtgtcaaaacggaggtagtacaggatactgtgtgcttagagaggaggaaatgactcattccagtatttaag

SEQ ID NO: 1500 - DNA, 122 bp, Homo sapiens
  misc_feature (61)..(62): /note="This region represents a CpG dinucleotide"
  misc_feature (61)..(61): /note="Nucleotide may be methylated to form 5-methylcytosine"
cgttcgcagccaaagccactagcctagatctcgcacagccaggcccgccataacgcatcccgggagcaaggggtaagaccctccctgggactgcggctacctcgccttccttctagtctccg

SEQ ID NO: 1501 - DNA, 122 bp, Homo sapiens
  misc_feature (61)..(62): /note="This region represents a CpG dinucleotide"
  misc_feature (61)..(61): /note="Nucleotide may be methylated to form 5-methylcytosine"
tcactctcgcctcattcagtgctgtgtatggttgcaacttctgtcactcaaggcctgaggcgggagacttacagctctatccaattagagcgctggattgacaactgccgaatgaggcgcgc

SEQ ID NO: 1502 - DNA, 122 bp, Homo sapiens
  misc_feature (61)..(62): /note="This region represents a CpG dinucleotide"
  misc_feature (61)..(61): /note="Nucleotide may be methylated to form 5-methylcytosine"
atcaccatcttactgaatcaccccacacttctcccttgttgccatgagtaataaactaaacgtatttgacaacaggtgtgggggttttctggttttttttgtttgttgttttgttttgtttt

SEQ ID NO: 1503 - DNA, 122 bp, Homo sapiens
  misc_feature (61)..(62): /note="This region represents a CpG dinucleotide"
  misc_feature (61)..(61): /note="Nucleotide may be methylated to form 5-methylcytosine"
aggagccccgagagatcatgcactgggtctgatggggtttcttcgtctggggaaaggaaccggaggccactgtgatgtgtcagctaactgggaaaggattaacactctggagaaaccatgat

SEQ ID NO: 1504 - DNA, 122 bp, Homo sapiens
  misc_feature (61)..(62): /note="This region represents a CpG dinucleotide"
  misc_feature (61)..(61): /note="Nucleotide may be methylated to form 5-methylcytosine"
ctacactcagaaggtgaaacaggaaaatttttttctccgcacccacattccaatcattcacggaataggatcgactccataatgactgtgatgctggaaaaaatttactaaatatgtactta

SEQ ID NO: 1505 - DNA, 122 bp, Homo sapiens
  misc_feature (61)..(62): /note="This region represents a CpG dinucleotide"
  misc_feature (61)..(61): /note="Nucleotide may be methylated to form 5-methylcytosine"
tctgctacgtactcaccctgtaatgtcgcgggaaatgcataaaagtgaaaagaactcctacgccaaagttccaggtgtggaaaagttattctgagcaaggagctagtcaacagaaaggatgt

SEQ ID NO: 1506 - DNA, 122 bp, Homo sapiens
  misc_feature (61)..(62): /note="This region represents a CpG dinucleotide"
  misc_feature (61)..(61): /note="Nucleotide may be methylated to form 5-methylcytosine"
ctgaccgcacaaagactcccgtggccccggcagcagctcggccttctctacatctaaccacgtttactaaatttctacggcacgcagcgcaccgcaccaggagctgggagcggctcgcggta

SEQ ID NO: 1507 - DNA, 122 bp, Homo sapiens
  misc_feature (61)..(62): /note="This region represents a CpG dinucleotide"
  misc_feature (61)..(61): /note="Nucleotide may be methylated to form 5-methylcytosine"
atagatgcagttggggctcagaccaaagcctcgtatccagttaggagcaggatcagaattcgaacccaaagccagctgactccttgttctggtcaacacggttggtgctctcccgtgcagga

SEQ ID NO: 1508 - DNA, 122 bp, Homo sapiens
  misc_feature (61)..(62): /note="This region represents a CpG dinucleotide"
  misc_feature (61)..(61): /note="Nucleotide may be methylated to form 5-methylcytosine"
tgggttcagtgacccccagggaaagctgagtcatgtccaggaaagcaatgtcatcccacccgaaccagagtggcctgtgttgtgaaatctagcagaaaggtcatcaccacaggttccaagat

SEQ ID NO: 1509 - DNA, 122 bp, Homo sapiens
  misc_feature (61)..(62): /note="This region represents a CpG dinucleotide"
  misc_feature (61)..(61): /note="Nucleotide may be methylated to form 5-methylcytosine"
tgaccacgaatactctgccaactgcctcctgagtgaccgagacagctcagtctagagtctcgactacccggggtgacccaatagtcccgactccccgagacagggacccggagacgtgggct

SEQ ID NO: 1510 - DNA, 122 bp, Homo sapiens
  misc_feature (61)..(62): /note="This region represents a CpG dinucleotide"
  misc_feature (61)..(61): /note="Nucleotide may be methylated to form 5-methylcytosine"
taaagaatgcccaggtaggaagctgggggcccatggcccacttctgacccctcttttcctcgcttcctcccacaagggtacaggcccaatcctctctcactttggtcttggttgaaacgcag

SEQ ID NO: 1511 - DNA, 122 bp, Homo sapiens
  misc_feature (61)..(62): /note="This region represents a CpG dinucleotide"
  misc_feature (61)..(61): /note="Nucleotide may be methylated to form 5-methylcytosine"
ctggtggcactccgtgttccttcacaagtctttgtccagcgggacaaggtttacaagaagcgccaagctcttcgccaaccaagttcctccagagaaactgagaagcgcgtttgtgttccagc

SEQ ID NO: 1512 - DNA, 122 bp, Homo sapiens
  misc_feature (61)..(62): /note="This region represents a CpG dinucleotide"
  misc_feature (61)..(61): /note="Nucleotide may be methylated to form 5-methylcytosine"
cggtgattggcttggtcttgcagggagcggctgccagcaggccggctggaggcggctttgcgctgccccagcctgggagccctcaggatgtgtgtggggtggagcctgctagggatcccagt

SEQ ID NO: 1513 - DNA, 122 bp, Homo sapiens
  misc_feature (61)..(62): /note="This region represents a CpG dinucleotide"
  misc_feature (61)..(61): /note="Nucleotide may be methylated to form 5-methylcytosine"
ctgtaaaggagcgtgtcacaacctctgttccttcttcacatctagtggtatcctgaggtgcggcaccactgtcccaacactcccatcatcctagtgggaactaaacttgatcttagggatga

SEQ ID NO: 1514 - DNA, 122 bp, Homo sapiens
  misc_feature (61)..(62): /note="This region represents a CpG dinucleotide"
  misc_feature (61)..(61): /note="Nucleotide may be methylated to form 5-methylcytosine"
tgtcatgaaaaacaaagaaggcgactcctcctacacagcagagttgttcagaaagtaccacgctgcactggcaataatcaattttaatgattaaggctaatgtgttttgcataaaagacaag

SEQ ID NO: 1515 - DNA, 122 bp, Homo sapiens
  misc_feature (61)..(62): /note="This region represents a CpG dinucleotide"
  misc_feature (61)..(61): /note="Nucleotide may be methylated to form 5-methylcytosine"
gttcttttggttctcccggactctctgtatctctggggtgtccaaaacagtctcataatacgacatggacttctcagcatcttccttgtactttttctgggaatagattccaagaaataagg

SEQ ID NO: 1516 - DNA, 122 bp, Homo sapiens
  misc_feature (61)..(62): /note="This region represents a CpG dinucleotide"
  misc_feature (61)..(61): /note="Nucleotide may be methylated to form 5-methylcytosine"
tgcacagaggaggccacctcataacactcctcacacgtaaagtttgacttgcactttctacgttcatggtttgaaaagattgcagtaagcattttgtaaaatgtaaattacattcttcaatt

SEQ ID NO: 1517 - DNA, 122 bp, Homo sapiens
  misc_feature (61)..(62): /note="This region represents a CpG dinucleotide"
  misc_feature (61)..(61): /note="Nucleotide may be methylated to form 5-methylcytosine"
ctcaagtgaaataattcattagctctcatgtgattgttttgccaactgaagtaagcttcacgaagcagtataatgcaatcctactaacaaggttactgggtgccaggcatgctctaggagct

SEQ ID NO: 1518 - DNA, 122 bp, Homo sapiens
  misc_feature (61)..(62): /note="This region represents a CpG dinucleotide"
  misc_feature (61)..(61): /note="Nucleotide may be methylated to form 5-methylcytosine"
ttttcccattgggcttcagggtgtactgtggctctgagccccaggcaggaccaaggaggacgccaaggtagctgtcaatgccagcagtaatgaatcactgggaatcagataacaaggctatt

SEQ ID NO: 1519 - DNA, 122 bp, Homo sapiens
  misc_feature (61)..(62): /note="This region represents a CpG dinucleotide"
  misc_feature (61)..(61): /note="Nucleotide may be methylated to form 5-methylcytosine"
agagcatcttggtctaacttgtctgcacaaaagggcatcattttctaattctcccaaggacgctgtttatgccagcagagaccctgggtgaagcctacatagggtgggctgggctccctgcc

SEQ ID NO: 1520 - DNA, 122 bp, Homo sapiens
  misc_feature (61)..(62): /note="This region represents a CpG dinucleotide"
  misc_feature (61)..(61): /note="Nucleotide may be methylated to form 5-methylcytosine"
tgctctgcatgtggaactcaagaactgcggagctttctgatgcctggcagggttttgtcccggtcagtggttgagtgagccacacctccctcccctgaccaggcaaacttagacaagaaaag

SEQ ID NO: 1521 - DNA, 122 bp, Homo sapiens
  misc_feature (61)..(62): /note="This region represents a CpG dinucleotide"
  misc_feature (61)..(61): /note="Nucleotide may be methylated to form 5-methylcytosine"
gaaccttttggcggccagctggaagcctgtgcacccgtcttcaaataaaggcttttaattcgcagactagaacgtttaggattacaaagaaaactggttcctttcaaatctggttatgtttg

SEQ ID NO: 1522 - DNA, 122 bp, Homo sapiens
  misc_feature (61)..(62): /note="This region represents a CpG dinucleotide"
  misc_feature (61)..(61): /note="Nucleotide may be methylated to form 5-methylcytosine"
tcaggtcacaatattcattacctcaaccatcttggatacttggccagtcttatcaaaccacgaatagcccagttttcagagtttgctctagaatccctgtcctggtttattctaagacaagt

SEQ ID NO: 1523 - DNA, 122 bp, Homo sapiens
  misc_feature (61)..(62): /note="This region represents a CpG dinucleotide"
  misc_feature (61)..(61): /note="Nucleotide may be methylated to form 5-methylcytosine"
aggggcttacctatggctccccttctcctcctccctggctccagagtctgcaggaaaaagcgtagccaagtagccaagagttggaggcaaacttcccttgcaagaaagccccaaccctccta

SEQ ID NO: 1524 - DNA, 122 bp, Homo sapiens
  misc_feature (61)..(62): /note="This region represents a CpG dinucleotide"
  misc_feature (61)..(61): /note="Nucleotide may be methylated to form 5-methylcytosine"
atattctagaaacagcaggaaagcagacgacaagccctttggttttgtctggacaccttccggagaggtgcctctagcaggtgggggtgtggattccagtgaactgaaattactgtatattt

SEQ ID NO: 1525 - DNA, 122 bp, Homo sapiens
  misc_feature (61)..(62): /note="This region represents a CpG dinucleotide"
  misc_feature (61)..(61): /note="Nucleotide may be methylated to form 5-methylcytosine"
cggcaacaatgggcagaagctgagcaggggccgccccaggcgtgaggcctgccggggtgacgacatctgtcacccgtgctcactgcctctgccttgggtcccgccccgtccccccttcccat

SEQ ID NO: 1526 - DNA, 122 bp, Homo sapiens
  misc_feature (61)..(62): /note="This region represents a CpG dinucleotide"
  misc_feature (61)..(61): /note="Nucleotide may be methylated to form 5-methylcytosine"
atttgcaagaaatccaagaaagccctggtgagtggttgcttttcctatgttgcaaccatccgcgaagtgaatgctgctctgtgtctctattgttgttttgatggtgttcgagatgatgagga

SEQ ID NO: 1527 - DNA, 122 bp, Homo sapiens
  misc_feature (61)..(62): /note="This region represents a CpG dinucleotide"
  misc_feature (61)..(61): /note="Nucleotide may be methylated to form 5-methylcytosine"
ctccggtctgtgcacgtgtcccccgctggagtgagtgttggctgagctcgggtctgtgtgcgcgcccccggctggagtgagtgtttgctgagctcgggtctgtgcacgtgtccccggctgga

SEQ ID NO: 1528 - DNA, 122 bp, Homo sapiens
  misc_feature (61)..(62): /note="This region represents a CpG dinucleotide"
  misc_feature (61)..(61): /note="Nucleotide may be methylated to form 5-methylcytosine"
tctcctagtgtgccaggcagtgtcaggcagtaaaaatgtaagcatatacactcttgccctcggaaagcctttacactgtgtaggatagaaacaagtaaatatacatcatacactgtcaaata

SEQ ID NO: 1529 - DNA, 122 bp, Homo sapiens
  misc_feature (61)..(62): /note="This region represents a CpG dinucleotide"
  misc_feature (61)..(61): /note="Nucleotide may be methylated to form 5-methylcytosine"
attgttaaaaaccataaaagaggtccttagtacataaattgtcaattcctggccattcctcggaggtactggcattctggaggcatctacacaatttcataacaattgtattgtccatgtaa

SEQ ID NO: 1530 - DNA, 122 bp, Homo sapiens
  misc_feature (61)..(62): /note="This region represents a CpG dinucleotide"
  misc_feature (61)..(61): /note="Nucleotide may be methylated to form 5-methylcytosine"
gggaagtgccagggttgagaggctgcagcagcggggctgagtggcagagacaccagcaggcgtgggggtttaccaagtgcagggtgtcttaacaggaagagaaactccctccaaagcagacc

SEQ ID NO: 1531 - DNA, 122 bp, Homo sapiens
  misc_feature (61)..(62): /note="This region represents a CpG dinucleotide"
  misc_feature (61)..(61): /note="Nucleotide may be methylated to form 5-methylcytosine"
tgattggctcactgccccacccacccggggcttcggggcattccattggcctgagtaaaacgccagttaaataactacgcaaaagacgtactcacgggtaccctccccagagctccacccgg

SEQ ID NO: 1532 - DNA, 122 bp, Homo sapiens
  misc_feature (61)..(62): /note="This region represents a CpG dinucleotide"
  misc_feature (61)..(61): /note="Nucleotide may be methylated to form 5-methylcytosine"
gccgcaggggctgcacgtctgtatcagatcaaccgaatggtttcccaagtgccccagcagcgtctagggtagagatagtgctttctgcgcaaacagccgttggagagtggcggtgcactacc

SEQ ID NO: 1533 - DNA, 122 bp, Homo sapiens
  misc_feature (61)..(62): /note="This region represents a CpG dinucleotide"
  misc_feature (61)..(61): /note="Nucleotide may be methylated to form 5-methylcytosine"
ccataagctggggttctaggatgtccattcttagttgagtctcatttcctgtcatatcgacgtcaaaggcccaagaccttcctcctccccttgagcaaacaagccacgccctgcaccaaagt

SEQ ID NO: 1534 - DNA, 122 bp, Homo sapiens
  misc_feature (61)..(62): /note="This region represents a CpG dinucleotide"
  misc_feature (61)..(61): /note="Nucleotide may be methylated to form 5-methylcytosine"
ctataccttcctggttcctgaggattgagtgtcccctgcgcgcttaaagctggagccagacgtatgcagctttttcccgctgtccccaggcaccgagtactccagataaactcattggcagc

SEQ ID NO: 1535 - DNA, 122 bp, Homo sapiens
  misc_feature (61)..(62): /note="This region represents a CpG dinucleotide"
  misc_feature (61)..(61): /note="Nucleotide may be methylated to form 5-methylcytosine"
tcctgattggctaaccatggtactggggtgagaaagctgagactagtggtgttgctagagcgaggttgtcttgacttagaagagctgattgtgaaattttcagaaattttgcttgctgatta

SEQ ID NO: 1536 - DNA, 122 bp, Homo sapiens
  misc_feature (61)..(62): /note="This region represents a CpG dinucleotide"
  misc_feature (61)..(61): /note="Nucleotide may be methylated to form 5-methylcytosine"
ccttgggtttttgttttctgagaaaatctctgcctccatcagcctactccaggaagtctacgatatgcaagagatgactgtgaaccctggggaaataaacatttgaggaagctaaacattgt

SEQ ID NO: 1537 - DNA, 122 bp, Homo sapiens
  misc_feature (61)..(62): /note="This region represents a CpG dinucleotide"
  misc_feature (61)..(61): /note="Nucleotide may be methylated to form 5-methylcytosine"
aatgattattgtgtcatctaatacttgaagattttaacaaagcaagtgtttcttctgtggcgatccctggtggcctccagaccttccattcatgtggcttctgactcagctcagccctggtg

SEQ ID NO: 1538 - DNA, 122 bp, Homo sapiens
  misc_feature (61)..(62): /note="This region represents a CpG dinucleotide"
  misc_feature (61)..(61): /note="Nucleotide may be methylated to form 5-methylcytosine"
tactgtcgattaccttactgggtaagggcaaaaacccctattgtgaaagacttgtggctgcgtagccaacggccattctttttgaaacagtcatttctgtttttgaaactattttttttaaa

SEQ ID NO: 1539 - DNA, 122 bp, Homo sapiens
  misc_feature (61)..(62): /note="This region represents a CpG dinucleotide"
  misc_feature (61)..(61): /note="Nucleotide may be methylated to form 5-methylcytosine"
tatagtaaaaacacagataaaatattttttaaatgatacacctgtatagggcgcttaccacgaatgcagcttgcaggacaggaagatactctgggtacaacagtgagtcagtagtgagtgaa

SEQ ID NO: 1540 - DNA, 122 bp, Homo sapiens
  misc_feature (61)..(62): /note="This region represents a CpG dinucleotide"
  misc_feature (61)..(61): /note="Nucleotide may be methylated to form 5-methylcytosine"
agagagagagagagagagagagagagaggatgtcgaccttacatggctcctagctctccgcgctctagccgaatgcctggttcctagtgggtgcttgatacgtgggaaatgtagggggaggg

SEQ ID NO: 1541 - DNA, 122 bp, Homo sapiens
  misc_feature (61)..(62): /note="This region represents a CpG dinucleotide"
  misc_feature (61)..(61): /note="Nucleotide may be methylated to form 5-methylcytosine"
ggatttaaagtgtcagaaaactttttattgagcacctactgtatgaggcatcattctctccgtggggaagatcataatgaacaaggccaacaccctgtccttatggaactatgcattaagag

SEQ ID NO: 1542 - DNA, 122 bp, Homo sapiens
  misc_feature (61)..(62): /note="This region represents a CpG dinucleotide"
  misc_feature (61)..(61): /note="Nucleotide may be methylated to form 5-methylcytosine"
caagacgcaatgtttccagctttccataggttccctcgtgccccacccctcagaagtaaacgttattctaactcctatcactaccggtaagttttgtagggaattattttggaggaagtgga

SEQ ID NO: 1543 - DNA, 122 bp, Homo sapiens
  misc_feature (61)..(62): /note="This region represents a CpG dinucleotide"
  misc_feature (61)..(61): /note="Nucleotide may be methylated to form 5-methylcytosine"
gaaaatcagctggtgagtcaatgggactttgttaggatagtcacagggcgcagctggcgccggcttaagggaagagctggatccccccttgataacatgctgtttatctggcttcctgtttc

SEQ ID NO: 1544 - DNA, 122 bp, Homo sapiens
  misc_feature (61)..(62): /note="This region represents a CpG dinucleotide"
  misc_feature (61)..(61): /note="Nucleotide may be methylated to form 5-methylcytosine"
ggaaaacaaaaaacgaacgacaatcagatgctccgtgtctcccaaactgcacacgctttacggagaaggagagttgcaccggggcttgtcaatggcagagccttcctgaaagtcaggttctc

SEQ ID NO: 1545 - DNA, 122 bp, Homo sapiens
  misc_feature (61)..(62): /note="This region represents a CpG dinucleotide"
  misc_feature (61)..(61): /note="Nucleotide may be methylated to form 5-methylcytosine"
aggagaaaagggaagggaggatggcaaaaatcacgctctagaagatccaggcaacgtcgtcgtgaagaataaagggaatcaaaatgggcactggaacgctgctaagggcttgctttgttaac

SEQ ID NO: 1546 - DNA, 122 bp, Homo sapiens
  misc_feature (61)..(62): /note="This region represents a CpG dinucleotide"
  misc_feature (61)..(61): /note="Nucleotide may be methylated to form 5-methylcytosine"
gccacgcgcgaggcatgttctcagtgtgtgtcttgtgtcatttctgtgatgcttgcacatcgtcagggggtacctaccactggaacctcctcttttaacaaatgaggaaactgaggcacaca

SEQ ID NO: 1547 - DNA, 122 bp, Homo sapiens
  misc_feature (61)..(62): /note="This region represents a CpG dinucleotide"
  misc_feature (61)..(61): /note="Nucleotide may be methylated to form 5-methylcytosine"
agcagcatccatggcctgtcttttggcttaacacttatctcctttggctttgacagcggacggaatagacctcagcagcggcgtggtgaggacttagctgggacctggaatcgtatcctcct

SEQ ID NO: 1548 - DNA, 122 bp, Homo sapiens
  misc_feature (61)..(62): /note="This region represents a CpG dinucleotide"
  misc_feature (61)..(61): /note="Nucleotide may be methylated to form 5-methylcytosine"
ttttagctgttcttgcttggtaatctgaggaggaaatgatttcccttcctggctacctttcgttttaactgtctttcgggtacaaagtccagtcattaattgacgtcaaaccacagaaaggc

SEQ ID NO: 1549 - DNA, 122 bp, Homo sapiens
  misc_feature (61)..(62): /note="This region represents a CpG dinucleotide"
  misc_feature (61)..(61): /note="Nucleotide may be methylated to form 5-methylcytosine"
tctcccagtgtaattaccatctcaagcattttctgttcgtcccctgtaggtacaccacatcgtgccaacaacccatggcccagcaggaatatacagtagcctttgccagggtccaccagggc

SEQ ID NO: 1550 - DNA, 122 bp, Homo sapiens
  misc_feature (61)..(62): /note="This region represents a CpG dinucleotide"
  misc_feature (61)..(61): /note="Nucleotide may be methylated to form 5-methylcytosine"
caccagaaacaggagaacttacagatatgttgccttttttggtgtatgtggaacatagtacgagaaactctcatgggaactctgaggaaggaaacataccatgtctgtcactaaccagggaa

SEQ ID NO: 1551 - DNA, 122 bp, Homo sapiens
  misc_feature (61)..(62): /note="This region represents a CpG dinucleotide"
  misc_feature (61)..(61): /note="Nucleotide may be methylated to form 5-methylcytosine"
acagcctcagacggtgtgagcagctgggggacccctcagatgtggctccctctgtccctccggcctgtgctggcctgcccctgcccccaggcctgtaagctgggcaggctgtggggcaggaa

SEQ ID NO: 1552 - DNA, 122 bp, Homo sapiens
  misc_feature (61)..(62): /note="This region represents a CpG dinucleotide"
  misc_feature (61)..(61): /note="Nucleotide may be methylated to form 5-methylcytosine"
gacaaagaggcgggccgcgcacgctctcacgcttcggcagctcagatacctgttacctggcgttaattgcatttacagcgggagagagagcttgggctctcaccaggtaccaattgcacgtg

SEQ ID NO: 1553 - DNA, 122 bp, Homo sapiens
  misc_feature (61)..(62): /note="This region represents a CpG dinucleotide"
  misc_feature (61)..(61): /note="Nucleotide may be methylated to form 5-methylcytosine"
gtgggcatagtgaagctcagaccacatcgcaggcaaacccagaccaggacctgggctccacggaccctccagagaaccaggcattgccatttgccaggtttactgttgggtgaaaactaccc

SEQ ID NO: 1554 - DNA, 122 bp, Homo sapiens
  misc_feature (61)..(62): /note="This region represents a CpG dinucleotide"
  misc_feature (61)..(61): /note="Nucleotide may be methylated to form 5-methylcytosine"
aatttattaaaatggacagtgaaagaaaacagccaatttagttgtgaactggagaagggacgtgaggcatctgttgtctgcaatcttgtatgttgtggttgaccacaaaggcttggcatcag

SEQ ID NO: 1555 - DNA, 122 bp, Homo sapiens
  misc_feature (61)..(62): /note="This region represents a CpG dinucleotide"
  misc_feature (61)..(61): /note="Nucleotide may be methylated to form 5-methylcytosine"
agcataaacggtctaagacaatacctaaaaatgtgtgcatgatgtataaaatctctaggacgcgcttagatgaataacgccacactgctcctatattctaggaattacagtcacatgagtca

SEQ ID NO: 1556 - DNA, 122 bp, Homo sapiens
  misc_feature (61)..(62): /note="This region represents a CpG dinucleotide"
  misc_feature (61)..(61): /note="Nucleotide may be methylated to form 5-methylcytosine"
aataatctcagttattgtccaattcttgcaaactgtaacagttggaaagtttgaataattcgttcatgttagcagttgacatataaagacttttatttggcaggcaacagaatatagggttg

SEQ ID NO: 1557 - DNA, 122 bp, Homo sapiens
  misc_feature (61)..(62): /note="This region represents a CpG dinucleotide"
  misc_feature (61)..(61): /note="Nucleotide may be methylated to form 5-methylcytosine"
atgcataagcaccaaggctggctagaacttacaaattcattataattatttaaagactcacgaaagtcaaaggaaatatgaagttctgggcttcatttataggatttagctcaattagtgag

SEQ ID NO: 1558 - DNA, 122 bp, Homo sapiens
  misc_feature (61)..(62): /note="This region represents a CpG dinucleotide"
  misc_feature (61)..(61): /note="Nucleotide may be methylated to form 5-methylcytosine"
aactgttatcacccttgacatgctaatcacgtgatgcaactgtgtttagtgatcagtccacgtttctgaatgttaaatagattgacaagacatcaaaacccctatgacccttatcttttgac

SEQ ID NO: 1559 - DNA, 122 bp, Homo sapiens
  misc_feature (61)..(62): /note="This region represents a CpG dinucleotide"
  misc_feature (61)..(61): /note="Nucleotide may be methylated to form 5-methylcytosine"
gggcaaatgagctggaccagacctgacggggcagtccttgtacttcagagcctgcccctgcggtgggtgggggggcagggaaggacaagagggaagagggcaggtgcaaactcctcatagtt

SEQ ID NO: 1560 - DNA, 122 bp, Homo sapiens
  misc_feature (61)..(62): /note="This region represents a CpG dinucleotide"
  misc_feature (61)..(61): /note="Nucleotide may be methylated to form 5-methylcytosine"
cacaggaacgcttctcatcagtggaagaaggacaagaaaggtcgtgcaagtttcaaattacgtggagctggggctacagccattactttcggacaggtgcaattcaaagcgtgatcctccga

SEQ ID NO: 1561 - DNA, 122 bp, Homo sapiens
  misc_feature (61)..(62): /note="This region represents a CpG dinucleotide"
  misc_feature (61)..(61): /note="Nucleotide may be methylated to form 5-methylcytosine"
tacaatgtgcaaaaaggctgatacagagtatctaatgagatcagcaaaccggtcaagcaccgtctccttcaaagctcctccccacaggatggtcgtaccacgtagctgaaagcagacatagc

SEQ ID NO: 1562 - DNA, 122 bp, Homo sapiens
  misc_feature (61)..(62): /note="This region represents a CpG dinucleotide"
  misc_feature (61)..(61): /note="Nucleotide may be methylated to form 5-methylcytosine"
agtcctcgcctgtgtacccgggccagcacacgcagcggccgtccacgcagcgcccgccctcgccacagtcccaggggcagctccgcgtaccacagtcctcgccagtgtagccggggtcacac

SEQ ID NO: 1563 - DNA, 122 bp, Homo sapiens
  misc_feature (61)..(62): /note="This region represents a CpG dinucleotide"
  misc_feature (61)..(61): /note="Nucleotide may be methylated to form 5-methylcytosine"
gtcgggggattaggagtaggggtggtttccggttcgacggtcgccatcttagatcgatctcggtcttaaactcttgagctcaagggatcccccttccttggcctcccacagtgctgggatta

SEQ ID NO: 1564 - DNA, 122 bp, Homo sapiens
  misc_feature (61)..(62): /note="This region represents a CpG dinucleotide"
  misc_feature (61)..(61): /note="Nucleotide may be methylated to form 5-methylcytosine"
ccagccttcttagcttgaaggcaagaggccagcatactaatgatttgaatagacacaagtcgtcttccagtaatccgaaggcattaattaatccaacaaaagccgggagcctgctctgtgcc

SEQ ID NO: 1565 - DNA, 122 bp, Homo sapiens
  misc_feature (61)..(62): /note="This region represents a CpG dinucleotide"
  misc_feature (61)..(61): /note="Nucleotide may be methylated to form 5-methylcytosine"
gtgcccgtggaggattaattggttagccatgcccacttagccctcgtttaatttattttgcggaaatgagagggaaggagatggcttgagtgaacgtcaggctgtccttggagaatctgggg

SEQ ID NO: 1566 - DNA, 122 bp, Homo sapiens
  misc_feature (61)..(62): /note="This region represents a CpG dinucleotide"
  misc_feature (61)..(61): /note="Nucleotide may be methylated to form 5-methylcytosine"
tgggtgcctcaagctgtgtgttgcctgtggggcatgtctgaacctcaagtgggcctgagtcgtgagagaaaggctttctcatcgatactgtgtggtctgtactgttttgcagaatttctttt

SEQ ID NO: 1567 - DNA, 122 bp, Homo sapiens
  misc_feature (61)..(62): /note="This region represents a CpG dinucleotide"
  misc_feature (61)..(61): /note="Nucleotide may be methylated to form 5-methylcytosine"
tcgcccctgagagcgaggagacgcccctgacggccgcgcagctcttcagcgaagccgtggcgcctgccatcgaaaaggacttcaaggacggtaccttcgaccctgacaacctggaaaagtac

SEQ ID NO: 1568 - DNA, 122 bp, Homo sapiens
  misc_feature (61)..(62): /note="This region represents a CpG dinucleotide"
  misc_feature (61)..(61): /note="Nucleotide may be methylated to form 5-methylcytosine"
ttctgggggacagtgccacacctctgggggacagtgtcacttatacctctggggggacagcgtgacacctccaggggacaatgtcacacctccgggggacagtgcttcttatgtccccactc

SEQ ID NO: 1569 - DNA, 122 bp, Homo sapiens
  misc_feature (61)..(62): /note="This region represents a CpG dinucleotide"
  misc_feature (61)..(61): /note="Nucleotide may be methylated to form 5-methylcytosine"
atgtggacatacaaccaccttatactcctctaacaataatgcctgtcctctgagttttttcgttacttggtgatttagttactaatgtcctatgaatcatatgtcagcaatgcatttatttc

SEQ ID NO: 1570 - DNA, 122 bp, Homo sapiens
  misc_feature (61)..(62): /note="This region represents a CpG dinucleotide"
  misc_feature (61)..(61): /note="Nucleotide may be methylated to form 5-methylcytosine"
agggcggggcgcgggggtgtcacgagcaagcgggggcggggcggcgcagggggcggggcgcgcggcctcgcggagcccgcccctccctcccagcgcgaaatctgaaacaatctcggagacgg

SEQ ID NO: 1571 - DNA, 122 bp, Homo sapiens
  misc_feature (61)..(62): /note="This region represents a CpG dinucleotide"
  misc_feature (61)..(61): /note="Nucleotide may be methylated to form 5-methylcytosine"
caggcagatttgcgtaaatacctttcgtcccaggacatgggatttacactgtgtgtttctcgtcaccttcaggaaaaccactgtccctttttttctttgccagataagagtcaggctttcct

SEQ ID NO: 1572 - DNA, 122 bp, Homo sapiens
  misc_feature (61)..(62): /note="This region represents a CpG dinucleotide"
  misc_feature (61)..(61): /note="Nucleotide may be methylated to form 5-methylcytosine"
ttcgggacggcagcggccataacggactcggctgggagcctgcgctgttgctaggctctacgccatgaggtcagacgccgcggccctcggcacatacgtcccagcgtggtgacgtcgaagcc

SEQ ID NO: 1573 - DNA, 122 bp, Homo sapiens
  misc_feature (61)..(62): /note="This region represents a CpG dinucleotide"
  misc_feature (61)..(61): /note="Nucleotide may be methylated to form 5-methylcytosine"
gcatagtctgccaacattgtctgctgggggtacagagagagcctccctctccctgtgtctcgagttcagcacctattccaccttagtaagcctgtgaggctttccaggcatctctcccaagc

SEQ ID NO: 1574 - DNA, 122 bp, Homo sapiens
  misc_feature (61)..(62): /note="This region represents a CpG dinucleotide"
  misc_feature (61)..(61): /note="Nucleotide may be methylated to form 5-methylcytosine"
caggggctgccgtgcctgccgcctccaccccattcccccaacaaggcagcgaggccttcccggaaaataagcctgggctcttcacacccctgctggaggcaaggcccgccctgcactctgga

SEQ ID NO: 1575 - DNA, 122 bp, Homo sapiens
  misc_feature (61)..(62): /note="This region represents a CpG dinucleotide"
  misc_feature (61)..(61): /note="Nucleotide may be methylated to form 5-methylcytosine"
gacagctcggggtcagtcgacggagcacaccgggcgcccgaatccgccgggtcccactcacgcccgccggccgccggtaggttggccctcccgcttccagcctccgccaccccatccctcgc

SEQ ID NO: 1576 - DNA, 122 bp, Homo sapiens
  misc_feature (61)..(62): /note="This region represents a CpG dinucleotide"
  misc_feature (61)..(61): /note="Nucleotide may be methylated to form 5-methylcytosine"
ccaactgccacttcctcttatgccaggcttcttcccaggaacaatggactcacacctgcacgctgccctgatatgtcattgcgacagaactgaagacacatgttgctaatgacataaatccc

SEQ ID NO: 1577 - DNA, 122 bp, Homo sapiens
  misc_feature (61)..(62): /note="This region represents a CpG dinucleotide"
  misc_feature (61)..(61): /note="Nucleotide may be methylated to form 5-methylcytosine"
tccggaggagaaggagactgcaaggataggcccaggtcggtgcgagggacggtggtggggcgggggtcggaacgtaaggaaagcccagtctgagaccccaaccccctccaccccatccccca

SEQ ID NO: 1578 - DNA, 122 bp, Homo sapiens
  misc_feature (61)..(62): /note="This region represents a CpG dinucleotide"
  misc_feature (61)..(61): /note="Nucleotide may be methylated to form 5-methylcytosine"
cacaccgggagggctgctgctggctctggcagaaggcccaaattccttggtgcacagacacggctgcggatgtgtggacatgtccgtggggctacgtgagggtccccgtgacgtggcagcgg

SEQ ID NO: 1579 - DNA, 122 bp, Homo sapiens
  misc_feature (61)..(62): /note="This region represents a CpG dinucleotide"
  misc_feature (61)..(61): /note="Nucleotide may be methylated to form 5-methylcytosine"
tggccttttttgcttttgttgtggtagtatgtacgacaatcctttctccttcctcttcctcgcactttctggggacagtagtgatgaagaagatgaagaagaagatgatgatgatggtgatg

SEQ ID NO: 1580 - DNA, 122 bp, Homo sapiens
  misc_feature (61)..(62): /note="This region represents a CpG dinucleotide"
  misc_feature (61)..(61): /note="Nucleotide may be methylated to form 5-methylcytosine"
tgcagggggcagccttgactgccagcctctctcagacctccctctcctgcggccccaaagcgcgggctacacacctgcgtacctgagcaacccacacatctgtgcaccccacacacctgcgc

SEQ ID NO: 1581 - DNA, 122 bp, Homo sapiens
  misc_feature (61)..(62): /note="This region represents a CpG dinucleotide"
  misc_feature (61)..(61): /note="Nucleotide may be methylated to form 5-methylcytosine"
ggggcagcagactgacagcttcagctgccaacagaggcagcagcggggctctggacagagcgctggatttagagtcaaagacttggacttgcagctcccattcagcaacttacaacctatgt

SEQ ID NO: 1582 - DNA, 122 bp, Homo sapiens
  misc_feature (61)..(62): /note="This region represents a CpG dinucleotide"
  misc_feature (61)..(61): /note="Nucleotide may be methylated to form 5-methylcytosine"
aggagactatttccaaaatggcttcattctccagtagggaatcctagagctaacctgtgacgtgccatttattcaaatagagagaagagagacccccaacccttagtgcttccttcagaaca

SEQ ID NO: 1583 - DNA, 122 bp, Homo sapiens
  misc_feature (61)..(62): /note="This region represents a CpG dinucleotide"
  misc_feature (61)..(61): /note="Nucleotide may be methylated to form 5-methylcytosine"
actggtaaagggcttttaaaaaatacctagtacagaatgtccagaagaatatttaaggaacgagtcatagtagataactctaggaaacagcactaggcagctggacaacagagagagaggaa

SEQ ID NO: 1584 - DNA, 122 bp, Homo sapiens
  misc_feature (61)..(62): /note="This region represents a CpG dinucleotide"
  misc_feature (61)..(61): /note="Nucleotide may be methylated to form 5-methylcytosine"
ggacaaagcatctgacggtttggaggatgtttctgtagtcctaggaatccacagtgaattcgagtctagactcagtcatttttcagggtcaggggaggagggagaagtagcaaatcagatat

SEQ ID NO: 1585 - DNA, 122 bp, Homo sapiens
  misc_feature (61)..(62): /note="This region represents a CpG dinucleotide"
  misc_feature (61)..(61): /note="Nucleotide may be methylated to form 5-methylcytosine"
ttgaagatattttacccaagtcccctccctttcaccccaccctaattttccccattctctcggtgacccgtaactgatcaaaagtccccccgcaccgcgctacgctctcgcgattcctctta

SEQ ID NO: 1586 - DNA, 122 bp, Homo sapiens
  misc_feature (61)..(62): /note="This region represents a CpG dinucleotide"
  misc_feature (61)..(61): /note="Nucleotide may be methylated to form 5-methylcytosine"
atttgtttttctctgatttgtagttacttcactatctcaagataaaagaatattttacctcggtgagagaggactcaagtttttttgacaatgtcatttgtgatacagccaagggctttata

SEQ ID NO: 1587 - DNA, 122 bp, Homo sapiens
  misc_feature (61)..(62): /note="This region represents a CpG dinucleotide"
  misc_feature (61)..(61): /note="Nucleotide may be methylated to form 5-methylcytosine"
ccagcagctattcggaagtgtggagaaggatgagaaggaagcctggtcccagagcagacacgctgcccagatcaatttagaaagaagtcaagactgtcagcttgggctagtatttcactgac

SEQ ID NO: 1588 - DNA, 122 bp, Homo sapiens
  misc_feature (61)..(62): /note="This region represents a CpG dinucleotide"
  misc_feature (61)..(61): /note="Nucleotide may be methylated to form 5-methylcytosine"
actgccttcactggagttacagtctagctaggaagacatgcatactgaagtaattaaagtcgggtgagtgtgaacaaaagggaagttagcaaaaacaactatggagttacaaagcaaggaca

SEQ ID NO: 1589 - DNA, 122 bp, Homo sapiens
  misc_feature (61)..(62): /note="This region represents a CpG dinucleotide"
  misc_feature (61)..(61): /note="Nucleotide may be methylated to form 5-methylcytosine"
ggctgctaggtgtgttgggctccaggagggccgtcagaaggagggctttttggcaccccccggggtcacagagtgtgcgcccagggcgtggggccggccagcggacgggcgggggcgtactg

SEQ ID NO: 1590 - DNA, 122 bp, Homo sapiens
  misc_feature (61)..(62): /note="This region represents a CpG dinucleotide"
  misc_feature (61)..(61): /note="Nucleotide may be methylated to form 5-methylcytosine"
agtattaggagtgttcttaaggatgttaaaaataaaactgtcagaaccctcatatattgacgatgggaatataaactggctcagccactttagtaaacagtctggcagtttttaaaaaagtt

SEQ ID NO: 1591 - DNA, 122 bp, Homo sapiens
  misc_feature (61)..(62): /note="This region represents a CpG dinucleotide"
  misc_feature (61)..(61): /note="Nucleotide may be methylated to form 5-methylcytosine"
ctccctcaatcgtgaacccagtaaaccagcctgcaccccacacagcccaaggtcttgccccgcgcccaggtcccagcacctagcgacccgccttcagcacttggaatgggctggagttggga

SEQ ID NO: 1592 - DNA, 122 bp, Homo sapiens
  misc_feature (61)..(62): /note="This region represents a CpG dinucleotide"
  misc_feature (61)..(61): /note="Nucleotide may be methylated to form 5-methylcytosine"
gccacatcctgcttgcagatctgctgctgggttaacacaacatcatctgccagttggtgtcgtttatttgacatcttggggttttagtactctgaaggacacccactgcccttaacagaaaa

SEQ ID NO: 1593 - DNA, 122 bp, Homo sapiens
  misc_feature (61)..(62): /note="This region represents a CpG dinucleotide"
  misc_feature (61)..(61): /note="Nucleotide may be methylated to form 5-methylcytosine"
gaaaactacatacagatccttagcccattgccttcatctcccttccttttggtcagagctcgtgaactgattttgaggtcagggatggacaaaagtcttgcagcaggaaaaagggaagcagc

SEQ ID NO: 1594 - DNA, 122 bp, Homo sapiens
  misc_feature (61)..(62): /note="This region represents a CpG dinucleotide"
  misc_feature (61)..(61): /note="Nucleotide may be methylated to form 5-methylcytosine"
ccgcaccttccctcccgctccctctggccgccgggcctcagccagcgctgctccctgacccgcctgtgccctcgccagggcccctcgccgccgcctcctgccgcctcccgatatggccaaac

SEQ ID NO: 1595 - DNA, 122 bp, Homo sapiens
  misc_feature (61)..(62): /note="This region represents a CpG dinucleotide"
  misc_feature (61)..(61): /note="Nucleotide may be methylated to form 5-methylcytosine"
cacaaatgcttactgaacaccttctacaattagtcattgcacctcatggagtgacagggacgtgaggaatccatagccctggggtctgggggccaggtgtacatgtgtgtgtgatgttaatg

SEQ ID NO: 1596 - DNA, 122 bp, Homo sapiens
  misc_feature (61)..(62): /note="This region represents a CpG dinucleotide"
  misc_feature (61)..(61): /note="Nucleotide may be methylated to form 5-methylcytosine"
tcaaaaagagattcaagcatagctggactggcactttttcttcccactatcaaataagaacgcctccagtttgtgagagctaactggaaaaaatgcattcttttgtgattaaaataatagca

SEQ ID NO: 1597 - DNA, 122 bp, Homo sapiens
  misc_feature (61)..(62): /note="This region represents a CpG dinucleotide"
  misc_feature (61)..(61): /note="Nucleotide may be methylated to form 5-methylcytosine"
ttattacttaacccaaatctactatggaaaataatactcataataaaaagaaaacaaaagcgtttgcataatagtcatgataagaaaaattaataggtgtctccattgaactctgcctgcac

SEQ ID NO: 1598 - DNA, 122 bp, Homo sapiens
  misc_feature (61)..(62): /note="This region represents a CpG dinucleotide"
  misc_feature (61)..(61): /note="Nucleotide may be methylated to form 5-methylcytosine"
gatgaaacattatctgcctggctttccagagaggtgatttccccagcctccacttaccaacgtgtcaaacacattccgactggaagcattcatggctggaaaaagcaaggaagtggtgctgg

SEQ ID NO: 1599 - DNA, 122 bp, Homo sapiens
  misc_feature (61)..(62): /note="This region represents a CpG dinucleotide"
  misc_feature (61)..(61): /note="Nucleotide may be methylated to form 5-methylcytosine"
ccttgttaccgtggcccatgggtctctgtgcccctttgtctcctgtggtcttggtcgtcccgtgccctccaggctcgcgttggacgacgccattcgacacaagccgctgaacatgtcatccc

SEQ ID NO: 1600 - DNA, 122 bp, Homo sapiens
  misc_feature (61)..(62): /note="This region represents a CpG dinucleotide"
  misc_feature (61)..(61): /note="Nucleotide may be methylated to form 5-methylcytosine"
ttatacctcttggacactccttccgaaggattgggtctcaagggcagtggggtgtgactacggtagacagggctgattaattttcatccaaaactctttggcggattcccctgctctccgct

SEQ ID NO: 1601 - DNA, 122 bp, Homo sapiens
  misc_feature (61)..(62): /note="This region represents a CpG dinucleotide"
  misc_feature (61)..(61): /note="Nucleotide may be methylated to form 5-methylcytosine"
cctggtggctgcacattgtctcatgccttagaccacttccttgccttggtcagtagatggcgtgtggtgaccctaagttggaaccaggatttttgggacctccctattgagggacctcatgg

SEQ ID NO: 1602 - DNA, 122 bp, Homo sapiens
  misc_feature (61)..(62): /note="This region represents a CpG dinucleotide"
  misc_feature (61)..(61): /note="Nucleotide may be methylated to form 5-methylcytosine"
gagaaagggagcctccctccactccgcacgcaacactcctcgtttatctcctttcctctccgtttgctccaggtgatcacaggttggaaagcttattatcttttgcaactacaggctactgg

SEQ ID NO: 1603 - DNA, 122 bp, Homo sapiens
  misc_feature (61)..(62): /note="This region represents a CpG dinucleotide"
  misc_feature (61)..(61): /note="Nucleotide may be methylated to form 5-methylcytosine"
cgctccacgtttgttgatatcagcattcagactctggaatcttgaatgaacctcttcaaccgtgttgaaatggaaagtctaaaataaagaaaatcttctttctacaaccatttattttgaaa

SEQ ID NO: 1604 - DNA, 122 bp, Homo sapiens
  misc_feature (61)..(62): /note="This region represents a CpG dinucleotide"
  misc_feature (61)..(61): /note="Nucleotide may be methylated to form 5-methylcytosine"
aagccagggactggggttcaaaacttctgggtactgagtacctagtctgggtgtgaccaccgtgtctgggtgtgaccaccaccacctttccattccacaatgccaccctcctacctatgcca

SEQ ID NO: 1605 - DNA, 122 bp, Homo sapiens
  misc_feature (61)..(62): /note="This region represents a CpG dinucleotide"
  misc_feature (61)..(61): /note="Nucleotide may be methylated to form 5-methylcytosine"
cctccttgccttgtcctccagcctccagccatgcaatggatgcaggtatctggagagagacgagggaagcctggaggtacctactgagcaagctatgcccgtgccctcccacacctcctagt

SEQ ID NO: 1606 - DNA, 122 bp, Homo sapiens
  misc_feature (61)..(62): /note="This region represents a CpG dinucleotide"
  misc_feature (61)..(61): /note="Nucleotide may be methylated to form 5-methylcytosine"
aaaccttttccacaaagggccacagaataaatattttcagctctgggggccattcaagcccgggggtgactactcaggtctgccattggagcagaaaacagagacgagaggtaagcaagtgg

SEQ ID NO: 1607 - DNA, 122 bp, Homo sapiens
  misc_feature (61)..(62): /note="This region represents a CpG dinucleotide"
  misc_feature (61)..(61): /note="Nucleotide may be methylated to form 5-methylcytosine"
gtctcgaccctcagccgcagccccagtcccatctcagctcacgcctaagccccgccgattcgccccaccccgtattcatcctgcagaccagtcctgagcacccagccaaagctcctgcggcc

SEQ ID NO: 1608 - DNA, 122 bp, Homo sapiens
  misc_feature (61)..(62): /note="This region represents a CpG dinucleotide"
  misc_feature (61)..(61): /note="Nucleotide may be methylated to form 5-methylcytosine"
taggcctggtctaaatgctccttctgtgggcattggctgagtctgcccaatgtagctttccgctgtgacagcacagcactgggttccaatacacagttttacaattgctgcactctccctcc

SEQ ID NO: 1609 - DNA, 122 bp, Homo sapiens
  misc_feature (61)..(62): /note="This region represents a CpG dinucleotide"
  misc_feature (61)..(61): /note="Nucleotide may be methylated to form 5-methylcytosine"
ggctgatggcctgagataagagacatggtggtgctccgtatactgtaaatagaagtgacacgtgagagatttaatgattattaaacaggaatctaagcagagaggcagagataaaccatgca

SEQ ID NO: 1610 - DNA, 122 bp, Homo sapiens
  misc_feature (61)..(62): /note="This region represents a CpG dinucleotide"
  misc_feature (61)..(61): /note="Nucleotide may be methylated to form 5-methylcytosine"
tgtttattttttttccccttctcccagcaaaatacacaggtatctgactatgtagagacacgaagccacctatcctgaccaaacttggcagtggtcaggggataggaggaagtgtagtgcca

SEQ ID NO: 1611 - DNA, 122 bp, Homo sapiens
  misc_feature (61)..(62): /note="This region represents a CpG dinucleotide"
  misc_feature (61)..(61): /note="Nucleotide may be methylated to form 5-methylcytosine"
ttcattggtttaagtttctttccttgcaagattaaaagtaaccagtggtctgaaacgggacggtggagaaatgacagcagatgatgatcgctgttatttcctgaaagggagtgtgggaacta

SEQ ID NO: 1612 - DNA, 122 bp, Homo sapiens
  misc_feature (61)..(62): /note="This region represents a CpG dinucleotide"
  misc_feature (61)..(61): /note="Nucleotide may be methylated to form 5-methylcytosine"
gcgggagacttacagctctatccaattagagcgctggattgacaactgccgaatgaggcgcgcagcagagaggagggtgcggcatccgggatctggcgcggcttttgcttgtagctccagcc

SEQ ID NO: 1613 - DNA, 122 bp, Homo sapiens
  misc_feature (61)..(62): /note="This region represents a CpG dinucleotide"
  misc_feature (61)..(61): /note="Nucleotide may be methylated to form 5-methylcytosine"
cctgactccctgcttcaattacttgggaaagtaaatcacctcagtgttgtttcttggctccgagggtcttgttttatcagcagccgggatgcaacagatgggtcatctcatcctcatgggaa

SEQ ID NO: 1614 - DNA, 122 bp, Homo sapiens
  misc_feature (61)..(62): /note="This region represents a CpG dinucleotide"
  misc_feature (61)..(61): /note="Nucleotide may be methylated to form 5-methylcytosine"
agagacggagccttcctgtggttcgcgcacttccttcctgaagcctcatatttcccattccgttgatacttggccacctcaacctgcaacgtgcagtttccagtgtcatcttcatccaaatg

SEQ ID NO: 1615 - DNA, 122 bp, Homo sapiens
  misc_feature (61)..(62): /note="This region represents a CpG dinucleotide"
  misc_feature (61)..(61): /note="Nucleotide may be methylated to form 5-methylcytosine"
tccatatccttcctctctgatgcactcatcctcttggttgttttgttttgttttttaacacgtcaggatgattcaagtgactagggattaaaccagtctggacagccatactcctttatcaa

SEQ ID NO: 1616 - DNA, 122 bp, Homo sapiens
  misc_feature (61)..(62): /note="This region represents a CpG dinucleotide"
  misc_feature (61)..(61): /note="Nucleotide may be methylated to form 5-methylcytosine"
cagaaggagggggaagggcagggtctaccaggggaaaccaaggcacagcagcatttcccgcgatgaagtgtgtgttttgacctcacagaccagcgtttgaaagcccctggagtggatgactg

SEQ ID NO: 1617 - DNA, 122 bp, Homo sapiens
  misc_feature (61)..(62): /note="This region represents a CpG dinucleotide"
  misc_feature (61)..(61): /note="Nucleotide may be methylated to form 5-methylcytosine"
cttaacctctccctctctcccctcccagccacccttcccaccctctaataaccaactctgcgttctaattctgtgagttcaattgtatttttgctttcacatatgagtgagaacatctggca

SEQ ID NO: 1618 - DNA, 122 bp, Homo sapiens
  misc_feature (61)..(62): /note="This region represents a CpG dinucleotide"
  misc_feature (61)..(61): /note="Nucleotide may be methylated to form 5-methylcytosine"
tctatgaagtcattcttccccatttaaacacataagagtctgccttacatcagaatgagacgtaactatcccctgttagtgtggttttaaatcttgaatctaacagctaatgaaagaaaaaa

SEQ ID NO: 1619 - DNA, 122 bp, Homo sapiens
  misc_feature (61)..(62): /note="This region represents a CpG dinucleotide"
  misc_feature (61)..(61): /note="Nucleotide may be methylated to form 5-methylcytosine"
acacgggcaagttaacagtgtggagtctgcgggctgtgctggtttcctctgtgtctccagcgcccagccgaatgcctgactcgctccagttctcagaaagtgtttactaagtgaaccgcact

SEQ ID NO: 1620 - DNA, 122 bp, Homo sapiens
  misc_feature (61)..(62): /note="This region represents a CpG dinucleotide"
  misc_feature (61)..(61): /note="Nucleotide may be methylated to form 5-methylcytosine"
actctgcctggcacctgcagtcctctgacgacggggatttctacgcccctcccagctccccgcctctctccggactccctgcagaggttgctggagccaaattcaggcccctgccccctcgc

SEQ ID NO: 1621 - DNA, 122 bp, Homo sapiens
  misc_feature (61)..(62): /note="This region represents a CpG dinucleotide"
  misc_feature (61)..(61): /note="Nucleotide may be methylated to form 5-methylcytosine"
caggctaactccaaagaataaagaatagactgaccaaggtagtggtggaagcaggtagaccggttaggttaagattaggtaggaaatgattgtggttagagctgtaatgttagggcttgtga

SEQ ID NO: 1622 - DNA, 122 bp, Homo sapiens
  misc_feature (61)..(62): /note="This region represents a CpG dinucleotide"
  misc_feature (61)..(61): /note="Nucleotide may be methylated to form 5-methylcytosine"
gcctttgcggagcagacggcgctggagcccggccagggaagaccaagtctgggacttcagcgccagcctcgccaccctgcttcccacaaccagatgtctcctgcgaagtagccccctctaat

SEQ ID NO: 1623 - DNA, 122 bp, Homo sapiens
  misc_feature (61)..(62): /note="This region represents a CpG dinucleotide"
  misc_feature (61)..(61): /note="Nucleotide may be methylated to form 5-methylcytosine"
cagcagcggagccgagaatggcgaggccagcgggcgaccaggcctccggccaagggcacgcgaccccccgcgcttcccgagtgctcccctgaagcctggtacgcgtgggcaccggcgcacgg

SEQ ID NO: 1624 - DNA, 122 bp, Homo sapiens
  misc_feature (61)..(62): /note="This region represents a CpG dinucleotide"
  misc_feature (61)..(61): /note="Nucleotide may be methylated to form 5-methylcytosine"
ccccaatgctactgagcctgggcacgcgcctcccgggagagtcaccctgggcgacagccccgcccacctggctttgatcaatccggacgcggcacctgctgtaccacagccaatcggagcca

SEQ ID NO: 1625 - DNA, 122 bp, Homo sapiens
  misc_feature (61)..(62): /note="This region represents a CpG dinucleotide"
  misc_feature (61)..(61): /note="Nucleotide may be methylated to form 5-methylcytosine"
ctagttagagaggcaggcataaaggaaaaattatttcccagtgagataatagtttaggtacggttgtatagaatcaggagtgaagaatcaggaactatgtacaaggttaagaattaggaaca

SEQ ID NO: 1626 - DNA, 122 bp, Homo sapiens
  misc_feature (61)..(62): /note="This region represents a CpG dinucleotide"
  misc_feature (61)..(61): /note="Nucleotide may be methylated to form 5-methylcytosine"
caggtctagtgaggatagaatgagacatagggcctcaaatccagcctaggtcatcatgagcgacttttctgggctctagcttccttatctgtgaagtgaggtggttgggctacatggacagc

SEQ ID NO: 1627 - DNA, 122 bp, Homo sapiens
  misc_feature (61)..(62): /note="This region represents a CpG dinucleotide"
  misc_feature (61)..(61): /note="Nucleotide may be methylated to form 5-methylcytosine"
aacctgggaataatacccggggaaacctctggcaattctgtagtgactgctctgtttccccgggatgtcaaccctgacaatggtaggcagaagtccagcatcctatagacagcactgtcttt

SEQ ID NO: 1628 - DNA, 122 bp, Homo sapiens
  misc_feature (61)..(62): /note="This region represents a CpG dinucleotide"
  misc_feature (61)..(61): /note="Nucleotide may be methylated to form 5-methylcytosine"
ggaattcaaggctgcagagagctattattgtaccattgcactttaacctgggtgacagagcgagacctcaactctgaaatagtaaaataggccaggcatggtggctcatccctgtacttttg

SEQ ID NO: 1629 - DNA, 122 bp, Homo sapiens
  misc_feature (61)..(62): /note="This region represents a CpG dinucleotide"
  misc_feature (61)..(61): /note="Nucleotide may be methylated to form 5-methylcytosine"
ctggagctttgtcctggggctttcccgtgggggtgtggcttggctgattcaagaagaacacgtgcaaagcggggcttattcacaggagtctggtgttggccgttaggtttgatcgtggtcag

SEQ ID NO: 1630 - DNA, 122 bp, Homo sapiens
  misc_feature (61)..(62): /note="This region represents a CpG dinucleotide"
  misc_feature (61)..(61): /note="Nucleotide may be methylated to form 5-methylcytosine"
ccccatgcccgggagtcccgccgcttccgccgcactcctcgtcctagtttcgctctctctcgaattcatcgcatcacgtttcgacccatagatattctagcccaagagctgaggaggcggag

SEQ ID NO: 1631 - DNA, 122 bp, Homo sapiens
  misc_feature (61)..(62): /note="This region represents a CpG dinucleotide"
  misc_feature (61)..(61): /note="Nucleotide may be methylated to form 5-methylcytosine"
cctattatctctctgaattcccttatttgtctgctaccgttagaggtatatggtaatagacgttagtgtctgcccacaaaaaatatgacttgcttctctacctggtcactttaacagataca

SEQ ID NO: 1632 - DNA, 122 bp, Homo sapiens
  misc_feature (61)..(62): /note="This region represents a CpG dinucleotide"
  misc_feature (61)..(61): /note="Nucleotide may be methylated to form 5-methylcytosine"
gggcggagccggccaggcggcgcgagcgggaactacggccttggccttcttcagttctagcgtcaacccggtgctctacgtcttcaccgctggagatctgctgccccgggcaggtccccgtt

SEQ ID NO: 1633 - DNA, 122 bp, Homo sapiens
  misc_feature (61)..(62): /note="This region represents a CpG dinucleotide"
  misc_feature (61)..(61): /note="Nucleotide may be methylated to form 5-methylcytosine"
ttcttgggtcacttaacatttgcagtgaagtcattcctggagcccttacctagggctccccgcccctcccccaccttgtgctcatcctgcttattcaaaggctcttaattttgatgagtttc

SEQ ID NO: 1634 - DNA, 122 bp, Homo sapiens
  misc_feature (61)..(62): /note="This region represents a CpG dinucleotide"
  misc_feature (61)..(61): /note="Nucleotide may be methylated to form 5-methylcytosine"
agctggtcacgtgccccggcgggcgggggagggggcatgtcggggagccggggccgggggcggtcagccccactctaccaacattgatagaaagaaaagaggaggtcttcaaggaaaattag

SEQ ID NO: 1635 - DNA, 122 bp, Homo sapiens
  misc_feature (61)..(62): /note="This region represents a CpG dinucleotide"
  misc_feature (61)..(61): /note="Nucleotide may be methylated to form 5-methylcytosine"
cgagaggagggcaacagagccagcatcttgccagggccccggaggaggggttccccgctacgcctgtgccggaggagttccagtcaccgagcgaggggcgcaagggtgggtgcatcctgcgc

SEQ ID NO: 1636 - DNA, 122 bp, Homo sapiens
  misc_feature (61)..(62): /note="This region represents a CpG dinucleotide"
  misc_feature (61)..(61): /note="Nucleotide may be methylated to form 5-methylcytosine"
ctctgatctgtggccagggctcatgcaccaatcaaactcataacctgggtttaatcagcacgatgccgcaccacttgggtaaccagccaccctggtgagtaatcagattatatgatggggta

SEQ ID NO: 1637 - DNA, 122 bp, Homo sapiens
  misc_feature (61)..(62): /note="This region represents a CpG dinucleotide"
  misc_feature (61)..(61): /note="Nucleotide may be methylated to form 5-methylcytosine"
aggttcctcagcccttcacattctgagttcagaacaccatgctgaggcacagtcatgagacgtgggagaggaacacccagcagacatttctagaagaaaagggttattctgtctcctaagcc

SEQ ID NO: 1638 - DNA, 122 bp, Homo sapiens
  misc_feature (61)..(62): /note="This region represents a CpG dinucleotide"
  misc_feature (61)..(61): /note="Nucleotide may be methylated to form 5-methylcytosine"
gagctctgcctgtttgtctgtgtgacactccagtggaaggaagccaagagcctataatagcgatcctggggaaaatttcagcagctggggccatgtaatttaaaacctctgaaaagtgtgct

SEQ ID NO: 1639 - DNA, 122 bp, Homo sapiens
  misc_feature (61)..(62): /note="This region represents a CpG dinucleotide"
  misc_feature (61)..(61): /note="Nucleotide may be methylated to form 5-methylcytosine"
cactgggtgagaacatggaagtcagagcaagtaacagtgctgctttttgtggggggggggcgacctggaacattccacctggctttttcgatgacttgtgcttttagtcatgcctacttcta

SEQ ID NO: 1640 - DNA, 122 bp, Homo sapiens
  misc_feature (61)..(62): /note="This region represents a CpG dinucleotide"
  misc_feature (61)..(61): /note="Nucleotide may be methylated to form 5-methylcytosine"
cgggttaaagggcagcccagcctcagggctgacagtttgctccccaggcaccaccactcccgcctcccaccttaaccttgcatgagtttaccttgagatgagattgacagctccctcagcag

SEQ ID NO: 1641 - DNA, 122 bp, Homo sapiens
  misc_feature (61)..(62): /note="This region represents a CpG dinucleotide"
  misc_feature (61)..(61): /note="Nucleotide may be methylated to form 5-methylcytosine"
gagaaaataactaactttctggaaaacacatttggcttaactgccaaaataaaggctttgcggagaaatgaaaagcctataatcaggatttaggtgtgcaataaaacacagctgacaccaga

SEQ ID NO: 1642 - DNA, 122 bp, Homo sapiens
  misc_feature (61)..(62): /note="This region represents a CpG dinucleotide"
  misc_feature (61)..(61): /note="Nucleotide may be methylated to form 5-methylcytosine"
ccctccctacatcaggctgagatcacttgcaaactttatcctgagcacctggagagcttgcgacatggtccttacagcaggaagaatttaaaagaagataactttgggggaatgcttgttgt

SEQ ID NO: 1643 - DNA, 122 bp, Homo sapiens
  misc_feature (61)..(62): /note="This region represents a CpG dinucleotide"
  misc_feature (61)..(61): /note="Nucleotide may be methylated to form 5-methylcytosine"
gttttcctgcaacttctcactcgagagcagttgctgtatctgcctctgcggtagatcagacgctgatggctcttatcttcctcatgactccaaaccacacagttcggttcctggtatctgct

SEQ ID NO: 1644 - DNA, 122 bp, Homo sapiens
  misc_feature (61)..(62): /note="This region represents a CpG dinucleotide"
  misc_feature (61)..(61): /note="Nucleotide may be methylated to form 5-methylcytosine"
gactctgcagtcttcagggctggtgcccttcaccgatgcagcttcacagcttttccatttcgggtcaccgttacattgtggtcctttccccggccctggactggccaccactggacagcagg

SEQ ID NO: 1645 - DNA, 122 bp, Homo sapiens
  misc_feature (61)..(62): /note="This region represents a CpG dinucleotide"
  misc_feature (61)..(61): /note="Nucleotide may be methylated to form 5-methylcytosine"
aatgccctaaaagacatcgaaagtcctgcggggggatttccagaagcacttctaggtgttcgacgtaaaaaccacccagggcgaagaagaatcaaggctttttccatacacttcttagaaag

SEQ ID NO: 1646 - DNA, 122 bp, Homo sapiens
  misc_feature (61)..(62): /note="This region represents a CpG dinucleotide"
  misc_feature (61)..(61): /note="Nucleotide may be methylated to form 5-methylcytosine"
accaaaaaaaatagaaacatcactcgaatgaacattataataaacatgcacaccaaaaaacgaattacatgtatcactctgtattgctatgagtgggacttgtttctaggtttttaccaaaa

SEQ ID NO: 1647 - DNA, 122 bp, Homo sapiens
  misc_feature (61)..(62): /note="This region represents a CpG dinucleotide"
  misc_feature (61)..(61): /note="Nucleotide may be methylated to form 5-methylcytosine"
cctggtgatcaagcggcagtgtcaggggctgaggctggggcaggctgctctctctgtctccgccagaggcactgttgtgtcacaactaccagagcagtccctctgaagccccaaagccagac

SEQ ID NO: 1648 - DNA, 122 bp, Homo sapiens
  misc_feature (61)..(62): /note="This region represents a CpG dinucleotide"
  misc_feature (61)..(61): /note="Nucleotide may be methylated to form 5-methylcytosine"
ttaatagagtgtcagttatccagaactggatcattgaagccccagtcttatcacaaatgacgtttatttgccagtgtcagacttcttcctgtaagccaaattagaatgagttcagttctgtc

SEQ ID NO: 1649 - DNA, 122 bp, Homo sapiens
  misc_feature (61)..(62): /note="This region represents a CpG dinucleotide"
  misc_feature (61)..(61): /note="Nucleotide may be methylated to form 5-methylcytosine"
aagatttccatatttcctcagggtgcttccctggctttctgagctcagcgacttgtagttcgttaagcaacctgatctgcttttgatctcttctggctgtcagcagcttttcttgatgtagt

SEQ ID NO: 1650 - DNA, 122 bp, Homo sapiens
  misc_feature (61)..(62): /note="This region represents a CpG dinucleotide"
  misc_feature (61)..(61): /note="Nucleotide may be methylated to form 5-methylcytosine"
agggatattcaaggcactggggaaagaatgagctagagatgtagacttgaataacacagccgtttacaaccttccagctttgtgtctagaactcaggatgaacatgtgtatggtaatatatg

SEQ ID NO: 1651 - DNA, 122 bp, Homo sapiens
  misc_feature (61)..(62): /note="This region represents a CpG dinucleotide"
  misc_feature (61)..(61): /note="Nucleotide may be methylated to form 5-methylcytosine"
cagagaaaaagtgctgcagtcagcagttctcttaagacagggaaactgacacacagacagcgcaggcttggccagggccatgttgccaacaggcactaatggaaactcagctaccgcctgct

SEQ ID NO: 1652 - DNA, 122 bp, Homo sapiens
  misc_feature (61)..(62): /note="This region represents a CpG dinucleotide"
  misc_feature (61)..(61): /note="Nucleotide may be methylated to form 5-methylcytosine"
gtttgtgaacacagagaaacactaagagatcaaccgctcaggaacagagagaaggaaaaccgcagaaacagaactagctagacatgcaagacagagaggtgagggggcacaggcacagccca

SEQ ID NO: 1653 - DNA, 122 bp, Homo sapiens
  misc_feature (61)..(62): /note="This region represents a CpG dinucleotide"
  misc_feature (61)..(61): /note="Nucleotide may be methylated to form 5-methylcytosine"
agtatttattgagtggacatcaccacctaggcatgactttgctttggatggcttccagaacgttctgtgtttggtttgtgaacctctaatgagctgaatccagttcatttaatattgctcgt

SEQ ID NO: 1654 - DNA, 122 bp, Homo sapiens
  misc_feature (61)..(62): /note="This region represents a CpG dinucleotide"
  misc_feature (61)..(61): /note="Nucleotide may be methylated to form 5-methylcytosine"
gcgctggagcaactggggcgaagttgaactgggacatccttggagatgatttttgaaaaacgagcaagccatgcctggaaatgagggagagtgggaaagacactggattgagagtcagaaga

SEQ ID NO: 1655 - DNA, 122 bp, Homo sapiens
  misc_feature (61)..(62): /note="This region represents a CpG dinucleotide"
  misc_feature (61)..(61): /note="Nucleotide may be methylated to form 5-methylcytosine"
cgccctagagggtgtggtgtttctgtggggctggctgatcccaggtcagtggctgcattccgccccggccatgtgacccctagtctctttcgtccagttgggccgattctgcaggcaaagcc

SEQ ID NO: 1656 - DNA, 122 bp, Homo sapiens
  misc_feature (61)..(62): /note="This region represents a CpG dinucleotide"
  misc_feature (61)..(61): /note="Nucleotide may be methylated to form 5-methylcytosine"
ggagaatggaaattcagttgaatatatggatagaagccaaattctgggaggtgaggccaacgtgagaaaagtaaagattaaaactagcccacgtcctcctcaagttttaagtagcagttcca

SEQ ID NO: 1657 - DNA, 122 bp, Homo sapiens
  misc_feature (61)..(62): /note="This region represents a CpG dinucleotide"
  misc_feature (61)..(61): /note="Nucleotide may be methylated to form 5-methylcytosine"
gcttctgaaaggcctttaggcggaacatcagtgctcattttactatctatattcaggctgcgttttgacaccatgatatttttgggaaagtggggaacatggtgtaatctgggatcatctgt

SEQ ID NO: 1658 - DNA, 122 bp, Homo sapiens
  misc_feature (61)..(62): /note="This region represents a CpG dinucleotide"
  misc_feature (61)..(61): /note="Nucleotide may be methylated to form 5-methylcytosine"
tgggcatttggaggaaaagcctgcctggggatctacacactcacatgaaaactgtgcaaacgagtcacaggctgggacacctttagaaagagtggttaaagttgattttttattatttattg

SEQ ID NO: 1659 - DNA, 122 bp, Homo sapiens
  misc_feature (61)..(62): /note="This region represents a CpG dinucleotide"
  misc_feature (61)..(61): /note="Nucleotide may be methylated to form 5-methylcytosine"
tggtcagtgttcgattgacaggtaaatattcagttttactaaaatcaataaggtgtccatcgagcctttagaattttacagtaaaagcaagtgtactattatacgtgactggttggctctga

SEQ ID NO: 1660 - DNA, 122 bp, Homo sapiens
  misc_feature (61)..(62): /note="This region represents a CpG dinucleotide"
  misc_feature (61)..(61): /note="Nucleotide may be methylated to form 5-methylcytosine"
agcgagaaaggggagccggcgcagctcgctgccctgttccagaactcagaatttgagaggcgagagttcggtaagccgtgcgaccagacgaccgaggacgcgcgcagagaaacccccgccgt

SEQ ID NO: 1661 - DNA, 122 bp, Homo sapiens
  misc_feature (61)..(62): /note="This region represents a CpG dinucleotide"
  misc_feature (61)..(61): /note="Nucleotide may be methylated to form 5-methylcytosine"
gcatgtggccatctgaatcatttcctttcgcaatgtgttactcagtttcagggcctgccacgtgggggtgtttccattcctttctgcagctggacttggtggacgtggggaacgtggcagtt

SEQ ID NO: 1662 - DNA, 122 bp, Homo sapiens
  misc_feature (61)..(62): /note="This region represents a CpG dinucleotide"
  misc_feature (61)..(61): /note="Nucleotide may be methylated to form 5-methylcytosine"
gaaacggtctctaaatctgccctgttcaacacgtagcctctcatggccaggggctactcacgaaggactgtgcagccttgagtgtcacaatcctgtcattctggatgaaatgggtgtcgtgt

SEQ ID NO: 1663 - DNA, 122 bp, Homo sapiens
  misc_feature (61)..(62): /note="This region represents a CpG dinucleotide"
  misc_feature (61)..(61): /note="Nucleotide may be methylated to form 5-methylcytosine"
agatggagattgaggctcctcccaaggggacaacttatcctgttaagagacactgggggacgatattgagatgggttatgaaagatcaattcctatgaaagatcaattcccctgagagctct

SEQ ID NO: 1664 - DNA, 122 bp, Homo sapiens
  misc_feature (61)..(62): /note="This region represents a CpG dinucleotide"
  misc_feature (61)..(61): /note="Nucleotide may be methylated to form 5-methylcytosine"
gctgaagctacaggggttagtttagtcgcagtttgttggccgtgttgccctcgcctgctgcgcttggggaggagccgatgtcaccgcatcgctgagcacagcccatccttgcaccggccttg

SEQ ID NO: 1665 - DNA, 122 bp, Homo sapiens
  misc_feature (61)..(62): /note="This region represents a CpG dinucleotide"
  misc_feature (61)..(61): /note="Nucleotide may be methylated to form 5-methylcytosine"
ttgagatctgcgtgaagcctgagggttcggggatcattatctgagaaaaaccgggcagttcggtgtagacaatttttatatttttggctttttttgaggtgtaacaaacacaactcgggatc

SEQ ID NO: 1666 - DNA, 122 bp, Homo sapiens
  misc_feature (61)..(62): /note="This region represents a CpG dinucleotide"
  misc_feature (61)..(61): /note="Nucleotide may be methylated to form 5-methylcytosine"
agggacccggagacgtgggctttgtcagtttaacagattctgcctccgggaaccaactgccgggagattctgattggctcagccgcgtgcccacgtgaccgaccaaaaccggccaccagggt

SEQ ID NO: 1667 - DNA, 122 bp, Homo sapiens
  misc_feature (61)..(62): /note="This region represents a CpG dinucleotide"
  misc_feature (61)..(61): /note="Nucleotide may be methylated to form 5-methylcytosine"
ataaagcttacagcatcttaagatgagttgtttggatttcactgataaaaactttgtctccgtttatcttatgtaacattctttccacttaaaaactaactcccattttacggctgacgaaa

SEQ ID NO: 1668 - DNA, 122 bp, Homo sapiens
  misc_feature (61)..(62): /note="This region represents a CpG dinucleotide"
  misc_feature (61)..(61): /note="Nucleotide may be methylated to form 5-methylcytosine"
tcatccctcaaggcatctctctgattcatgccactcatcttagaagcctgaataagggaacgtgaatgaatcactgctatgggaaattaaagataatggagccagtaaaaccctagtggcat

SEQ ID NO: 1669 - DNA, 122 bp, Homo sapiens
  misc_feature (61)..(62): /note="This region represents a CpG dinucleotide"
  misc_feature (61)..(61): /note="Nucleotide may be methylated to form 5-methylcytosine"
ccccaacaaggtcagacatctgctactgcatggtccaaggcctccaccatagatcaccaccgttgtgagcctaaactgccaagggcaccaactccagggagactgttgggaagccagccttc

SEQ ID NO: 1670 - DNA, 122 bp, Homo sapiens
  misc_feature (61)..(62): /note="This region represents a CpG dinucleotide"
  misc_feature (61)..(61): /note="Nucleotide may be methylated to form 5-methylcytosine"
aaagctggaggttagcacctcctacagacaggatataacctattcttctgaaggctgattcgtacttttcataatcatttactctccctaggttgcctacatactccccttccctctctctt

SEQ ID NO: 1671 - DNA, 122 bp, Homo sapiens
  misc_feature (61)..(62): /note="This region represents a CpG dinucleotide"
  misc_feature (61)..(61): /note="Nucleotide may be methylated to form 5-methylcytosine"
ccctttatgaaaggccgggtgcgtgggaggagctgtcccacaggaatgacaaccaagatacgtgaggaaaacacagacagttgttgaaatgcattagacagacgtcgtgaaggtgaaaaata

SEQ ID NO: 1672 - DNA, 122 bp, Homo sapiens
  misc_feature (61)..(62): /note="This region represents a CpG dinucleotide"
  misc_feature (61)..(61): /note="Nucleotide may be methylated to form 5-methylcytosine"
atcacaccccaggacctgctgtgctggcgttgtgtttctgccggagtcacctctgtgagtcgcgggagagccagtcaccttcgtatgtgtgcacacgcatgcacggtcacagaggaacgtgc

SEQ ID NO: 1673 - DNA, 122 bp, Homo sapiens
  misc_feature (61)..(62): /note="This region represents a CpG dinucleotide"
  misc_feature (61)..(61): /note="Nucleotide may be methylated to form 5-methylcytosine"
aggggcccagggatcttcctgatctcacctcctacccaggcccacgtggcggttagctgccggcttgtgcccagctcctaggcaggtcaaatattctaagctgcgactcagaagagttaatt

SEQ ID NO: 1674 - DNA, 122 bp, Homo sapiens
  misc_feature (61)..(62): /note="This region represents a CpG dinucleotide"
  misc_feature (61)..(61): /note="Nucleotide may be methylated to form 5-methylcytosine"
ctcggtcccctccactgcactgggtctccccactgcactgggccccctcttcactgcacccggccactccaccgcacccggtaccccggccctctatggcacccagttctctctcctcggca

SEQ ID NO: 1675 - DNA, 122 bp, Homo sapiens
  misc_feature (61)..(62): /note="This region represents a CpG dinucleotide"
  misc_feature (61)..(61): /note="Nucleotide may be methylated to form 5-methylcytosine"
atgctcccagctgaataaagcccttccttctacaacttggtgtctgaggggttttgtctgcggcttgtcctgctacaatagctcaagaaagcaaagttgggctgggcacagtggctcatgcc

SEQ ID NO: 1676 - DNA, 122 bp, Homo sapiens
  misc_feature (61)..(62): /note="This region represents a CpG dinucleotide"
  misc_feature (61)..(61): /note="Nucleotide may be methylated to form 5-methylcytosine"
ctctttgggggaggccacggagcccgacccgctccgggcgcgcaggcagccctcggccgacgggagtaagccctggtggtggtcctacttcacatcgctgagcacccacaggccacgctggc

SEQ ID NO: 1677 - DNA, 122 bp, Homo sapiens
  misc_feature (61)..(62): /note="This region represents a CpG dinucleotide"
  misc_feature (61)..(61): /note="Nucleotide may be methylated to form 5-methylcytosine"
cgcgggagggacccgcagacggcagagggtccgcggggagcgggcggggcgttgagagcgcgcacacagacacccaaaaaacacacaaacaagcggcccctgtgccgcggcggaacgcgctg

SEQ ID NO: 1678 - DNA, 122 bp, Homo sapiens
  misc_feature (61)..(62): /note="This region represents a CpG dinucleotide"
  misc_feature (61)..(61): /note="Nucleotide may be methylated to form 5-methylcytosine"
cgccgcctcctccgccgcgcttagcttcctccctcctggacgcacttgcccttgcctggccgctcccggcagccccacaccccggtctctgttgaccaccgagctgtgggtgggtgcatctg

SEQ ID NO: 1679 - DNA, 122 bp, Homo sapiens
  misc_feature (61)..(62): /note="This region represents a CpG dinucleotide"
  misc_feature (61)..(61): /note="Nucleotide may be methylated to form 5-methylcytosine"
aatgttctgtctaccacagccaggtttgacagaacagcttgaaactgggaagtttcatcccgcttgcataacagagtggtttgaaaattgcactgtggccaagtagctgtccaaaatgtgaa

SEQ ID NO: 1680 - DNA, 122 bp, Homo sapiens
  misc_feature (61)..(62): /note="This region represents a CpG dinucleotide"
  misc_feature (61)..(61): /note="Nucleotide may be methylated to form 5-methylcytosine"
ccttggctatgggctttgcagtctccctttagcggatcaaaggtgtgtgggaaagaatgacggctggatccgcctccacaggtccttacacagacgcacacatcacagccagacccaaagca

SEQ ID NO: 1681 - DNA, 122 bp, Homo sapiens
  misc_feature (61)..(62): /note="This region represents a CpG dinucleotide"
  misc_feature (61)..(61): /note="Nucleotide may be methylated to form 5-methylcytosine"
ccgttttttttttctgacttccagatgtgcaatatgatagttaattgctaacagaggctacggtatccgtttgcttcctccctgctaggagtagcgagaatattccatcatcacggtttgca

SEQ ID NO: 1682 - DNA, 122 bp, Homo sapiens
  misc_feature (61)..(62): /note="This region represents a CpG dinucleotide"
  misc_feature (61)..(61): /note="Nucleotide may be methylated to form 5-methylcytosine"
ccgacccgaggcgtcagagatgggcggtcgttaggcgcagtggcggcccccggatgtttgcgatgggacggcgggctcggaacgtgtggacgtgggctttggaggtgcgagccccattgggc

SEQ ID NO: 1683 - DNA, 122 bp, Homo sapiens
  misc_feature (61)..(62): /note="This region represents a CpG dinucleotide"
  misc_feature (61)..(61): /note="Nucleotide may be methylated to form 5-methylcytosine"
ttctatggaaagaatgggacagctacccagtgaagaatgtggctgagtgtgggagaggaccgaatatataatttgcagcaatgtctcgggaaagctgagaggacccagatcttgtgtgtctg

SEQ ID NO: 1684 - DNA, 122 bp, Homo sapiens
  misc_feature (61)..(62): /note="This region represents a CpG dinucleotide"
  misc_feature (61)..(61): /note="Nucleotide may be methylated to form 5-methylcytosine"
gctggccaaggcacgctggagctggggctggggctggggctggggctggagctggcaggccgaggttcccaccccacaggcaccggagatgagttggtaagaaaagggcaccctctggctgc

SEQ ID NO: 1685 - DNA, 122 bp, Homo sapiens
  misc_feature (61)..(62): /note="This region represents a CpG dinucleotide"
  misc_feature (61)..(61): /note="Nucleotide may be methylated to form 5-methylcytosine"
cactgggtaggactgaaaggcagggactaaggtgacagctgactctgccggggcggagtgcgtgtcctcccaccgtgctggcgctgaactgactgtccgctgccaagggaagtgacagccgc

SEQ ID NO: 1686 - DNA, 122 bp, Homo sapiens
  misc_feature (61)..(62): /note="This region represents a CpG dinucleotide"
  misc_feature (61)..(61): /note="Nucleotide may be methylated to form 5-methylcytosine"
aaaaagggacccgagtctcgcttgtcccgcgccggggtggcaagttagtgaagaaacccacgagagtgagatcccaatctacgactgcccctcccaggtcctcaatcccgggagcctgctcc

SEQ ID NO: 1687 - DNA, 122 bp, Homo sapiens
  misc_feature (61)..(62): /note="This region represents a CpG dinucleotide"
  misc_feature (61)..(61): /note="Nucleotide may be methylated to form 5-methylcytosine"
actggaagcagccatcctcccccatctcctccatcctccaaggatgctccaaggagtaatcgaggttccacctctccgtggacgctctctccagacaccccatgggcacctcctccccaggc

SEQ ID NO: 1688 - DNA, 122 bp, Homo sapiens
  misc_feature (61)..(62): /note="This region represents a CpG dinucleotide"
  misc_feature (61)..(61): /note="Nucleotide may be methylated to form 5-methylcytosine"
atagtatgttgcaaatacatatgttgaaaatgcattaaggaatttataggttgtgaaatccgtattgagcgattagcacaattatggagagtcccttgcaggtaactgcatcacaatatgaa

SEQ ID NO: 1689 - DNA, 122 bp, Homo sapiens
  misc_feature (61)..(62): /note="This region represents a CpG dinucleotide"
  misc_feature (61)..(61): /note="Nucleotide may be methylated to form 5-methylcytosine"
ttccattttgcagctctaggggttgaatgaaccattaggttccctcggacaaatgacctccgctaatttcctatttcgttgttttctcacccctacaccccaccgttccgtgggtccctcct

SEQ ID NO: 1690 - DNA, 122 bp, Homo sapiens
  misc_feature (61)..(62): /note="This region represents a CpG dinucleotide"
  misc_feature (61)..(61): /note="Nucleotide may be methylated to form 5-methylcytosine"
cgcccctggcaaagctgactaaggcgcctgaagtgacgtcattgcctgcatcacaacaggcgtcgtccggctgatagcttatcgcaggctctgaggggcgggacccaactgattgtcaaagg

SEQ ID NO: 1691 - DNA, 122 bp, Homo sapiens
  misc_feature (61)..(62): /note="This region represents a CpG dinucleotide"
  misc_feature (61)..(61): /note="Nucleotide may be methylated to form 5-methylcytosine"
gcaagtgactgcctcattattaaataagagaagagcagcttgagacggctgtttgctgagcgatgtgtggagcaggcccatttgctttcatgtatcagacatgcctgctctaccccacccct

SEQ ID NO: 1692 - DNA, 122 bp, Homo sapiens
  misc_feature (61)..(62): /note="This region represents a CpG dinucleotide"
  misc_feature (61)..(61): /note="Nucleotide may be methylated to form 5-methylcytosine"
gagctctggggatgcatctttagctttttgctgctaagttccctccatgactccaggtggcgctattggacaaaagtcaagatggcttgctctttgcacagttcaagtccactacgagagaa

SEQ ID NO: 1693 - DNA, 122 bp, Homo sapiens
  misc_feature (61)..(62): /note="This region represents a CpG dinucleotide"
  misc_feature (61)..(61): /note="Nucleotide may be methylated to form 5-methylcytosine"
cccccatatgaggtgaccacagaaccacagattggactcattcattctgcgcagcaggagcgcttgctaccattcacgcactttcaacctccagaatgccccgacccacggcccccaaccac

SEQ ID NO: 1694 - DNA, 122 bp, Homo sapiens
  misc_feature (61)..(62): /note="This region represents a CpG dinucleotide"
  misc_feature (61)..(61): /note="Nucleotide may be methylated to form 5-methylcytosine"
gccatctgggaataattaagacgaacgggaaattcttgctctgtgccaaaccgagcccaacgctgagagtaaggtgggtgtgtaataagcacttactggatcacactgaataagaggattca

SEQ ID NO: 1695 - DNA, 122 bp, Homo sapiens
  misc_feature (61)..(62): /note="This region represents a CpG dinucleotide"
  misc_feature (61)..(61): /note="Nucleotide may be methylated to form 5-methylcytosine"
cgagagattttaaggcttagcagctatttccttatatcaattttctacatcagtttttggcgtgagaaggcagacagcagagaaacctaataacatgagattgactcatagctgaatgttga

SEQ ID NO: 1696 - DNA, 122 bp, Homo sapiens
  misc_feature (61)..(62): /note="This region represents a CpG dinucleotide"
  misc_feature (61)..(61): /note="Nucleotide may be methylated to form 5-methylcytosine"
gaggctgaaataagttattgcagtttgaagagcaaatggaaatgtggaagagaaggcaggcggaagctgactgcagctagagaagcatgtggtgaatgcattttctaggttttgaacacgag

SEQ ID NO: 1697 - DNA, 122 bp, Homo sapiens
  misc_feature (61)..(62): /note="This region represents a CpG dinucleotide"
  misc_feature (61)..(61): /note="Nucleotide may be methylated to form 5-methylcytosine"
ttttacaagatggtactggctgctttgtagacactggactgggaggggcaagggtggaagcggaaatgccagtcagaaaaaatgacagcagactggattagagaggttacagtggacgcaga

SEQ ID NO: 1698 - DNA, 122 bp, Homo sapiens
  misc_feature (61)..(62): /note="This region represents a CpG dinucleotide"
  misc_feature (61)..(61): /note="Nucleotide may be methylated to form 5-methylcytosine"
tcccctcccaagcggttaagaggcgggcttgggcgccctctagcggtgatctgtggtaaccgttccctactcagcggcagcgccttgagttgaaaatgcatttataatgacggagggatgct

SEQ ID NO: 1699 - DNA, 122 bp, Homo sapiens
  misc_feature (61)..(62): /note="This region represents a CpG dinucleotide"
  misc_feature (61)..(61): /note="Nucleotide may be methylated to form 5-methylcytosine"
ttcatccctgggcagccacgggctctgctgggctccatgtccagagcctgtccctgcagacggagcccccgagtgatggcccggattattgaccaccaggaacacctcagagggcagagccc

SEQ ID NO: 1700 - DNA, 122 bp, Homo sapiens
  misc_feature (61)..(62): /note="This region represents a CpG dinucleotide"
  misc_feature (61)..(61): /note="Nucleotide may be methylated to form 5-methylcytosine"
tggtgctgagcgctcttaccaatgagaactcctctgggctgtgtttcacaggcacttcagcgttgagaggacctgggagagaggagcagggtcaccaaatggtggatacacctttctctgtc

SEQ ID NO: 1701 - DNA, 122 bp, Homo sapiens
  misc_feature (61)..(62): /note="This region represents a CpG dinucleotide"
  misc_feature (61)..(61): /note="Nucleotide may be methylated to form 5-methylcytosine"
tgaccaagtgggctggaaccccgaaaaccctcaggtgactgaggctgggttaacaagagccgaagggcaggaagtcccatactcagtactgctcagtcctggcaggttcccacaaaacatgc

SEQ ID NO: 1702 - DNA, 122 bp, Homo sapiens
  misc_feature (61)..(62): /note="This region represents a CpG dinucleotide"
  misc_feature (61)..(61): /note="Nucleotide may be methylated to form 5-methylcytosine"
cagaactgtacagcagctgccgaaagagttttgatgcctcagacctgtcatcttattttgcgtgtgtaataattacaggaacgaggatgtggacatgtactatcaattagtgttaagtaaaa

SEQ ID NO: 1703 - DNA, 122 bp, Homo sapiens
  misc_feature (61)..(62): /note="This region represents a CpG dinucleotide"
  misc_feature (61)..(61): /note="Nucleotide may be methylated to form 5-methylcytosine"
gtttacacaaagatgaatcacctaaagacacatttctcagaacatatccccatcattaaacgatgaataactgcatttgaaggcgacagaaataaccaaagaaagatttacttttaattata

SEQ ID NO: 1704 - DNA, 122 bp, Homo sapiens
  misc_feature (61)..(62): /note="This region represents a CpG dinucleotide"
  misc_feature (61)..(61): /note="Nucleotide may be methylated to form 5-methylcytosine"
ccgggacgcacgcagtcttcagcctgctcctttaagcctctggagagactcggctctgagcgggtccgcccgacacccgccccctccccccactcctgagaactctttactttttgtttgga

SEQ ID NO: 1705 - DNA, 122 bp, Homo sapiens
  misc_feature (61)..(62): /note="This region represents a CpG dinucleotide"
  misc_feature (61)..(61): /note="Nucleotide may be methylated to form 5-methylcytosine"
gcatgcaggatagaccctgggagccaacctttaaattccttgaaagaaagcaagcaagcacgccaggctgcaaaaggaaagggcaaaacagccctatggcccttgacaaaccagcagggaga

SEQ ID NO: 1706 - DNA, 122 bp, Homo sapiens
  misc_feature (61)..(62): /note="This region represents a CpG dinucleotide"
  misc_feature (61)..(61): /note="Nucleotide may be methylated to form 5-methylcytosine"
cacggacctatcaacattctgacagttttctggtcttgacacattatccttttaatatagcgctggattcaatttattaatattttaagtatttttatgctcacaggggaagtcgatctgaa

SEQ ID NO: 1707 - DNA, 122 bp, Homo sapiens
  misc_feature (61)..(62): /note="This region represents a CpG dinucleotide"
  misc_feature (61)..(61): /note="Nucleotide may be methylated to form 5-methylcytosine"
tgaatttaatgacaattatttatgctctacttcctaaacaatgatatatgcctctacctgcgattttcaggaaaaaatgcagatgtctcaggaatctctgagttggacaagataagcttttc

SEQ ID NO: 1708 - DNA, 122 bp, Homo sapiens
  misc_feature (61)..(62): /note="This region represents a CpG dinucleotide"
  misc_feature (61)..(61): /note="Nucleotide may be methylated to form 5-methylcytosine"
taggcaaaggtacattttccacgaggcatatgtgactgttgaaagtaggggttttgaactcgacctccctaggtcctagtcacagtagtcctccctgattaactccgagcttccactcctcc

SEQ ID NO: 1709 - DNA, 122 bp, Homo sapiens
  misc_feature (61)..(62): /note="This region represents a CpG dinucleotide"
  misc_feature (61)..(61): /note="Nucleotide may be methylated to form 5-methylcytosine"
tcaaaaaacaaacacaaaaaacctgcctcaaagtaccaggaggccagagcctgtcactctcgcctcattcagtgctgtgtatggttgcaacttctgtcactcaaggcctgaggcgggagact

SEQ ID NO: 1710 - DNA, 122 bp, Homo sapiens
  misc_feature (61)..(62): /note="This region represents a CpG dinucleotide"
  misc_feature (61)..(61): /note="Nucleotide may be methylated to form 5-methylcytosine"
accccggagttcggcccagtcccgtcgccccctctgggaccttaaccccttcctcccccgcgacaccaagggccttggccttgccaccctaagggagaagggtgaggagtcccagctctcct

SEQ ID NO: 1711 - DNA, 122 bp, Homo sapiens
  misc_feature (61)..(62): /note="This region represents a CpG dinucleotide"
  misc_feature (61)..(61): /note="Nucleotide may be methylated to form 5-methylcytosine"
ccctccaaccaaccttacaaaactccagcctccaaaactccgcccttcgcgattcttccccgcccctcggcgtccagacagatagacagacgacctgccccgccccctgcgccaccgactga

SEQ ID NO: 1712 - DNA, 122 bp, Homo sapiens
  misc_feature (61)..(62): /note="This region represents a CpG dinucleotide"
  misc_feature (61)..(61): /note="Nucleotide may be methylated to form 5-methylcytosine"
ttggtcatttacctctgtttattttccctttccagacatcaggtattgtctgcattccagcgcccacacaaaagtaatatctccccaattaaggctacagtgtctctgattgttgctaaggt

SEQ ID NO: 1713 - DNA, 122 bp, Homo sapiens
  misc_feature (61)..(62): /note="This region represents a CpG dinucleotide"
  misc_feature (61)..(61): /note="Nucleotide may be methylated to form 5-methylcytosine"
gtgggtcctacggctgcctcatgtcgggctgtctcgttttcactcaactgggtgtggttacgacatggaagtgatgaccagaagctcccaccagagtgaggggtccaccctcttgatcccct

SEQ ID NO: 1714 - DNA, 122 bp, Homo sapiens
  misc_feature (61)..(62): /note="This region represents a CpG dinucleotide"
  misc_feature (61)..(61): /note="Nucleotide may be methylated to form 5-methylcytosine"
catagccatagctcactagggcaaataaatctgcttttcagatgttgctgttaaagccaacgatgacaaaaatgcaagccagtatgtaaagtgagaagaatttagaaggcttccttaacctc

SEQ ID NO: 1715 - DNA, 122 bp, Homo sapiens
  misc_feature (61)..(62): /note="This region represents a CpG dinucleotide"
  misc_feature (61)..(61): /note="Nucleotide may be methylated to form 5-methylcytosine"
gacaatgaggcactgaaaatgttcgcttttcaaacaattctagaggaaatttagctctcgcgacttctctgtaaaagctgcctgtaagtgttttgctgaaaggctagaacagctttgtttct

SEQ ID NO: 1716 - DNA, 122 bp, Homo sapiens
  misc_feature (61)..(62): /note="This region represents a CpG dinucleotide"
  misc_feature (61)..(61): /note="Nucleotide may be methylated to form 5-methylcytosine"
ggttgtcctgctaactaggtctgccagtcgatgaactcctgagatacctctctgaaaagtcgtttgtgaaacctataggtagactgccaaaaagcagcctaatgaattgaattgtttaattt

SEQ ID NO: 1717 - DNA, 122 bp, Homo sapiens
  misc_feature (61)..(62): /note="This region represents a CpG dinucleotide"
  misc_feature (61)..(61): /note="Nucleotide may be methylated to form 5-methylcytosine"
ggctagaggcatcttatttcaggcatcagagggtgtgaagcattctgacaagagaatctacgtataggaaatgattcattaaccaggacaggtgagcagatgttactgaacagtgagttaat

SEQ ID NO: 1718 - DNA, 122 bp, Homo sapiens
  misc_feature (61)..(62): /note="This region represents a CpG dinucleotide"
  misc_feature (61)..(61): /note="Nucleotide may be methylated to form 5-methylcytosine"
agaaaaatagggcagagaccagaacagcatgctagtaaagccttctctcttaataagctgcgctgatttggtgaacttcactggggctcctggggtcaaagttgtgtaggggttaaggatat

SEQ ID NO: 1719 - DNA, 122 bp, Homo sapiens
  misc_feature (61)..(62): /note="This region represents a CpG dinucleotide"
  misc_feature (61)..(61): /note="Nucleotide may be methylated to form 5-methylcytosine"
gctgcgtgccccggcgcgcacccctcccactcccatccactcggagccacgtcccctgcccggctccggccggctcccaccgtccccggccaccgtcttcgcccctgcccggcccccgcccc

SEQ ID NO: 1720 - DNA, 122 bp, Homo sapiens
  misc_feature (61)..(62): /note="This region represents a CpG dinucleotide"
  misc_feature (61)..(61): /note="Nucleotide may be methylated to form 5-methylcytosine"
ctaaagactaatgatgtcgaggatcttttcatgtgcttatttgccattgtatagcctcttcgataaaatatctcctcatatctcttgcctattttctaattagattatttggttttttttta

SEQ ID NO: 1721 - DNA, 122 bp, Homo sapiens
  misc_feature (61)..(62): /note="This region represents a CpG dinucleotide"
  misc_feature (61)..(61): /note="Nucleotide may be methylated to form 5-methylcytosine"
ccctcccccccccttcctctctctctccctctctctctttcctccctccccacagctagccgagggaaagaacggagggcagtaaaaagattcagatgtttcggaaagttgaccagatctcc

SEQ ID NO: 1722 - DNA, 122 bp, Homo sapiens
  misc_feature (61)..(62): /note="This region represents a CpG dinucleotide"
  misc_feature (61)..(61): /note="Nucleotide may be methylated to form 5-methylcytosine"
ctgtgagacttctgaggttgactaggaaaagaacttagtcatccataaatcagtaaaagtcgtggtaacatctagaaagggctaacatcagtgatgtgaagtcgtcagcctgtggttctgag

SEQ ID NO: 1723 - DNA, 122 bp, Homo sapiens
  misc_feature (61)..(62): /note="This region represents a CpG dinucleotide"
  misc_feature (61)..(61): /note="Nucleotide may be methylated to form 5-methylcytosine"
atgagagagggagaaggaggaaaagagagctggagagcaaacctaccgctcggcggccgccgcagagagcaggcccagggcttctcagccgggggatctggctccacctacaggaatcagaa

SEQ ID NO: 1724 - DNA, 122 bp, Homo sapiens
  misc_feature (61)..(62): /note="This region represents a CpG dinucleotide"
  misc_feature (61)..(61): /note="Nucleotide may be methylated to form 5-methylcytosine"
attgagaaacagatcctggtgctgaagagctggggacaggagcctggtgatgggcagcctcggttccagggcaggccctgccaccaacgcactgtgtgaccttaagcagctgtgctcttccc

SEQ ID NO: 1725 - DNA, 122 bp, Homo sapiens
  misc_feature (61)..(62): /note="This region represents a CpG dinucleotide"
  misc_feature (61)..(61): /note="Nucleotide may be methylated to form 5-methylcytosine"
ggcgggtaacctggggcaagttctcagctctgcgcactgcctgcctagtgctgttaatggcggcagggtggctgggtgaggccggtgactgctggctttctcacacttcctgacaatctgca

SEQ ID NO: 1726 - DNA, 122 bp, Homo sapiens
  misc_feature (61)..(62): /note="This region represents a CpG dinucleotide"
  misc_feature (61)..(61): /note="Nucleotide may be methylated to form 5-methylcytosine"
atagagttgtccaggttcttggcctgttgaacaaaaaattgaacgaaatgcacggagtaacgaaagaaagaagcaaggaaaaacaaagcaacagaagggaggaaggaaaacgtagatttata

SEQ ID NO: 1727 - DNA, 122 bp, Homo sapiens
  misc_feature (61)..(62): /note="This region represents a CpG dinucleotide"
  misc_feature (61)..(61): /note="Nucleotide may be methylated to form 5-methylcytosine"
acacagggtggtgctgggtataaagggctgctccaagactggattgtgagtcagacctgccggactcaaattcatactatgtaatacataacccctgggacaaataattccctttcgttgtg

SEQ ID NO: 1728 - DNA, 122 bp, Homo sapiens
  misc_feature (61)..(62): /note="This region represents a CpG dinucleotide"
  misc_feature (61)..(61): /note="Nucleotide may be methylated to form 5-methylcytosine"
tggggtttctctttagccactcctaccattatgggacctgcaagtccaggcttgtactggcgaatctcatgttacaatcactattcaagaaggtggttagaaaagagcagagggtatggttt

SEQ ID NO: 1729 - DNA, 122 bp, Homo sapiens
  misc_feature (61)..(62): /note="This region represents a CpG dinucleotide"
  misc_feature (61)..(61): /note="Nucleotide may be methylated to form 5-methylcytosine"
ctctcctcctccgtgtgagtgtctggccctgccttcctgtgtgcggcatcgtcctgaggtcggtgggaattgctgcagtggatccgggctccccatgcgacctgggtggcctcagaggctgg

SEQ ID NO: 1730 - DNA, 122 bp, Homo sapiens
  misc_feature (61)..(62): /note="This region represents a CpG dinucleotide"
  misc_feature (61)..(61): /note="Nucleotide may be methylated to form 5-methylcytosine"
tttatcttcacattccatcatcacggtggacattgtccaagggctgtagcaaccaagtaccgcaaacaaggtggcttgaaacaaccgaagcatactgcctcacagttctagaggctagaaat

SEQ ID NO: 1731 - DNA, 122 bp, Homo sapiens
  misc_feature (61)..(62): /note="This region represents a CpG dinucleotide"
  misc_feature (61)..(61): /note="Nucleotide may be methylated to form 5-methylcytosine"
tgtttgccttattgtcacttgatggtggctacactgtaagccctgtagtcacataccattcgtgatgaagaaacaggaagaaggaagaagaagcaccagaagtcatctgcattttcttctcc

SEQ ID NO: 1732 - DNA, 122 bp, Homo sapiens
  misc_feature (61)..(62): /note="This region represents a CpG dinucleotide"
  misc_feature (61)..(61): /note="Nucleotide may be methylated to form 5-methylcytosine"
ttcacagcagaaggcgccattggtccgcttcctctcgcagcaattaattacacagagcggcgtgttttgacgcggaccacagcaaacgcgtcaggtcacgggcatttacgcgtatctgagag

SEQ ID NO: 1733 - DNA, 122 bp, Homo sapiens
  misc_feature (61)..(62): /note="This region represents a CpG dinucleotide"
  misc_feature (61)..(61): /note="Nucleotide may be methylated to form 5-methylcytosine"
aacgcgacaagtggaggagagcgggcttttagcgccagaagcttccatgatgcccaggtccgcgggcagggcgagggcacgggccggggaagcaagcgttgccgcgccgctaccgtcggggg

SEQ ID NO: 1734 - DNA, 122 bp, Homo sapiens
  misc_feature (61)..(62): /note="This region represents a CpG dinucleotide"
  misc_feature (61)..(61): /note="Nucleotide may be methylated to form 5-methylcytosine"
attgttgacatgaatgcgccctctaggtttctgccttagtttcagtaatggcagtgatcccggcatcccatttgcagccctctcaagcgatgctgccatactcatttattccttcattatca

SEQ ID NO: 1735 - DNA, 122 bp, Homo sapiens
  misc_feature (61)..(62): /note="This region represents a CpG dinucleotide"
  misc_feature (61)..(61): /note="Nucleotide may be methylated to form 5-methylcytosine"
ctccctcaaggcaataggttattcttacagcacaactcatctgttcctgcgttcagcacacggttactaggcacctgctatgcacccagcactgccctagagcctgggacatagcagtgaac

SEQ ID NO: 1736 - DNA, 122 bp, Homo sapiens
  misc_feature (61)..(62): /note="This region represents a CpG dinucleotide"
  misc_feature (61)..(61): /note="Nucleotide may be methylated to form 5-methylcytosine"
gggggtgcttgtgactgtctttgtgactccagctctccctgtgaggtcaggacagattctcgagaggagagacctcacccctctgataccaagaatgctcatgacagcctacacttctctgt

SEQ ID NO: 1737 - DNA, 122 bp, Homo sapiens
  misc_feature (61)..(62): /note="This region represents a CpG dinucleotide"
  misc_feature (61)..(61): /note="Nucleotide may be methylated to form 5-methylcytosine"
agttatccttttgcctcagccttctgaataggtgggactacaaatgaggcatcataccagcgtgtgtgtgtgtgtgtgtgtgcgcgcgtatgtgtgagatatgaagtcttactatgttgtga

SEQ ID NO: 1738 - DNA, 122 bp, Homo sapiens
  misc_feature (61)..(62): /note="This region represents a CpG dinucleotide"
  misc_feature (61)..(61): /note="Nucleotide may be methylated to form 5-methylcytosine"
ataataatctcttgagccctttccattccaaatttcaaatctcaaaggtctccagcaaggcgttattcccaaaacagagctttgccatggtaaactagcatgttccagcagggtggtttttg

SEQ ID NO: 1739 - DNA, 122 bp, Homo sapiens
  misc_feature (61)..(62): /note="This region represents a CpG dinucleotide"
  misc_feature (61)..(61): /note="Nucleotide may be methylated to form 5-methylcytosine"
atacagccatctcctcccatgaatggcagtggtagctcccggtgtggctctgggtcagggcgccaagggggaaggcagcccggacctgctctgaggccgggcgagtggcgatccacccggtc

SEQ ID NO: 1740 - DNA, 122 bp, Homo sapiens
  misc_feature (61)..(62): /note="This region represents a CpG dinucleotide"
  misc_feature (61)..(61): /note="Nucleotide may be methylated to form 5-methylcytosine"
tgcgggtcgttcactcgctagcttacaggtcctctttcttcctgtagaagtcgttggcttcgtaagagcagggtctatgggaagcctcctcagcgtgggttcttggaagaggtggaggttcg

SEQ ID NO: 1741 - DNA, 122 bp, Homo sapiens
  misc_feature (61)..(62): /note="This region represents a CpG dinucleotide"
  misc_feature (61)..(61): /note="Nucleotide may be methylated to form 5-methylcytosine"
aagtgagtactttcccacctggggagagcctaccaatgggcagtactcctgaggaagccacggggagccttgcaggatgttttgctggaagggaggagccagagaagatcattttacctgtc

SEQ ID NO: 1742 - DNA, 122 bp, Homo sapiens
  misc_feature (61)..(62): /note="This region represents a CpG dinucleotide"
  misc_feature (61)..(61): /note="Nucleotide may be methylated to form 5-methylcytosine"
ggctttcccgccagcgtctacctgtagagagtgagacgaagatggagacaattaactggacgaagcaggcaaaatccccgataattgaggccgggtgccacggggtgactttccctttctgg

SEQ ID NO: 1743 - DNA, 122 bp, Homo sapiens
  misc_feature (61)..(62): /note="This region represents a CpG dinucleotide"
  misc_feature (61)..(61): /note="Nucleotide may be methylated to form 5-methylcytosine"
atacagagaaaaccagtgagtgacctgatttttatgaacaaagacatagagtcattcttccgtgagggtgagggcagagtcggtcaccttgttactgatgtgaagtctaggagaaagctccc

SEQ ID NO: 1744 - DNA, 122 bp, Homo sapiens
  misc_feature (61)..(62): /note="This region represents a CpG dinucleotide"
  misc_feature (61)..(61): /note="Nucleotide may be methylated to form 5-methylcytosine"
aaaccacagcttgtgagataatgtggctatgaggcaatgatctgaaatctggaagaaaatcgatcttaaatctttatattgatccaaatatttgaaagtggtaggaaggaatatgcttgcta

SEQ ID NO: 1745 - DNA, 122 bp, Homo sapiens
  misc_feature (61)..(62): /note="This region represents a CpG dinucleotide"
  misc_feature (61)..(61): /note="Nucleotide may be methylated to form 5-methylcytosine"
ccgtggatgtgcagctgccttgcgccttagtgtgtcatctgtaaaatgaggtaatagcaacgtatgtctcatgggttactactgtcagagtcaaatgaggtaattgtaggtaacgccctttg

SEQ ID NO: 1746 - DNA, 122 bp, Homo sapiens
  misc_feature (61)..(62): /note="This region represents a CpG dinucleotide"
  misc_feature (61)..(61): /note="Nucleotide may be methylated to form 5-methylcytosine"
aagccatcctgctatgacaaaactttcactctatcctatatttctaactacttcctaatacgtaggcatggaggtgtctcttcctaatatagcacatggaacgtaatatgctcaacatcttt

SEQ ID NO: 1747 - DNA, 122 bp, Homo sapiens
  misc_feature (61)..(62): /note="This region represents a CpG dinucleotide"
  misc_feature (61)..(61): /note="Nucleotide may be methylated to form 5-methylcytosine"
atgagccactgcatccgactttttttttttttttttttttaaagacagctctcattctgtcgccctggccggaatgcaatgatgcaatgatagctcactgcagccttgaactcctgggctca

SEQ ID NO: 1748 - DNA, 122 bp, Homo sapiens
  misc_feature (61)..(62): /note="This region represents a CpG dinucleotide"
  misc_feature (61)..(61): /note="Nucleotide may be methylated to form 5-methylcytosine"
taagacccctagaggctttcagtcctgccacagcatgaagttggctcatatcagagccagcgagccagctggaaagaaaggacatgggtcaaggcaagcccagtctagctctgtggaggcca

SEQ ID NO: 1749 - DNA, 122 bp, Homo sapiens
  misc_feature (61)..(62): /note="This region represents a CpG dinucleotide"
  misc_feature (61)..(61): /note="Nucleotide may be methylated to form 5-methylcytosine"
agcctgttttagtgcttcattgaaggccatggactatgatgggcagtagatggcagtacacgattacaaatcttgggaaactccctctttttccaactccaagcccaaattctgtctttgag

SEQ ID NO: 1750 - DNA, 122 bp, Homo sapiens
  misc_feature (61)..(62): /note="This region represents a CpG dinucleotide"
  misc_feature (61)..(61): /note="Nucleotide may be methylated to form 5-methylcytosine"
tcgccgcccgcgccgggtccgcgcagcacgaagaagcgcttgtggccatgcttctgcttgcgcaggtagccgcacttgcgcacgctgtggttgttgttgttgttgttgttgttgaggttggg

SEQ ID NO: 1751 - DNA, 122 bp, Homo sapiens
  misc_feature (61)..(62): /note="This region represents a CpG dinucleotide"
  misc_feature (61)..(61): /note="Nucleotide may be methylated to form 5-methylcytosine"
tccttagagcgtttcccaaagtgtattctgcggaactagcacctactgtgttctcaacaccgtgccacctatagaaggtaggatttgaaaaagcttttgacttacaggaaggggtgggcttg

SEQ ID NO: 1752 - DNA, 122 bp, Homo sapiens
  misc_feature (61)..(62): /note="This region represents a CpG dinucleotide"
  misc_feature (61)..(61): /note="Nucleotide may be methylated to form 5-methylcytosine"
tgaatcagtactcctcaggccacaggaaaaatggacaagaaggttccgtgaggcaggcttcgttataaacacctccctccgccatccatattctagcaactcttattagcagtgggcttcct

SEQ ID NO: 1753 - DNA, 122 bp, Homo sapiens
  misc_feature (61)..(62): /note="This region represents a CpG dinucleotide"
  misc_feature (61)..(61): /note="Nucleotide may be methylated to form 5-methylcytosine"
atccttgcgagacggggtggggcgaatcctcccgggtgggcatcgtggggtgggggtgggcgttccgcgaggggcatcctcccgggcggacgttgggggattctcgggggagggaggggcgc

SEQ ID NO: 1754 - DNA, 122 bp, Homo sapiens
  misc_feature (61)..(62): /note="This region represents a CpG dinucleotide"
  misc_feature (61)..(61): /note="Nucleotide may be methylated to form 5-methylcytosine"
tccactcgcaagaaagcggaggagggcccattactctgtctccagggactcccagaatcccgtacgccccgacataaggaaagtcatccagggaacacacacgtcgctcccgcctagagagt

SEQ ID NO: 1755 - DNA, 122 bp, Homo sapiens
  misc_feature (61)..(62): /note="This region represents a CpG dinucleotide"
  misc_feature (61)..(61): /note="Nucleotide may be methylated to form 5-methylcytosine"
gggaaccccgtgtcaagccctccccaggccagtgatgagcccaaaagctcctctggaaaacgttgatctttgcacggcgcccatgcaggcttccaggccaccagggcatgggcaggactcag

SEQ ID NO: 1756 - DNA, 122 bp, Homo sapiens
  misc_feature (61)..(62): /note="This region represents a CpG dinucleotide"
  misc_feature (61)..(61): /note="Nucleotide may be methylated to form 5-methylcytosine"
agcagccaaatatatggtcctgattgagacatatgggaatttttttttttaaatgacacacggagcactgcttcttatggtggtgctgttcccccagctgaaccctgccaggtaccagcccc

SEQ ID NO: 1757 - DNA, 122 bp, Homo sapiens
  misc_feature (61)..(62): /note="This region represents a CpG dinucleotide"
  misc_feature (61)..(61): /note="Nucleotide may be methylated to form 5-methylcytosine"
tccgcgagtctggaggagttagctgtggggagcctggctttgcacaggtgtggggcagggcgtggggcgctgggctcccgcgtggctgggacaccatttgtgtgtcggcaagcagcagcagt

SEQ ID NO: 1758 - DNA, 122 bp, Homo sapiens
  misc_feature (61)..(62): /note="This region represents a CpG dinucleotide"
  misc_feature (61)..(61): /note="Nucleotide may be methylated to form 5-methylcytosine"
ttacagcaagtaaacatttaaaataatgttactcagatccttaccccagctcattgtcttcgttgtttaaggtattcaaatattgtcacaattcataatagtttttagtaccttacttggta

SEQ ID NO: 1759 - DNA, 122 bp, Homo sapiens
  misc_feature (61)..(62): /note="This region represents a CpG dinucleotide"
  misc_feature (61)..(61): /note="Nucleotide may be methylated to form 5-methylcytosine"
ctggctttgcaacctcgtctgtagtggtggagtgagtgcaggtccagaaacaaaccagaccggccttgaaattctgccctaacttcagagctgtaatcctaggcaggttacttttaatactt

SEQ ID NO: 1760 - DNA, 122 bp, Homo sapiens
  misc_feature (61)..(62): /note="This region represents a CpG dinucleotide"
  misc_feature (61)..(61): /note="Nucleotide may be methylated to form 5-methylcytosine"
tttgtgtgtgtggtccccatgtgcatgtgtggtgtgtctgatgtgtgtggtttgtgtgtgcggtttaagtgtgtgtgtagtgtgtgatttgtatgtggtttacatgtgcgtgtatggtgcat

SEQ ID NO: 1761 - DNA, 122 bp, Homo sapiens
  misc_feature (61)..(62): /note="This region represents a CpG dinucleotide"
  misc_feature (61)..(61): /note="Nucleotide may be methylated to form 5-methylcytosine"
gtacatttttattatccttataccagttataacttcattcatggtcctgatcctggcatccgtgaaagttgcagttttactcctaaggggaaccagacacgggagatgagcctgagcgatca

SEQ ID NO: 1762 - DNA, 122 bp, Homo sapiens
  misc_feature (61)..(62): /note="This region represents a CpG dinucleotide"
  misc_feature (61)..(61): /note="Nucleotide may be methylated to form 5-methylcytosine"
gccaaagcccttaaagccccaaaaggccagaactgcaccagagattgggaaactgcagaacgtctgtgtgtgtctgcagaggggtttctcttcttagcacattcagtgaaagtcttcaaagg

SEQ ID NO: 1763 - DNA, 122 bp, Homo sapiens
  misc_feature (61)..(62): /note="This region represents a CpG dinucleotide"
  misc_feature (61)..(61): /note="Nucleotide may be methylated to form 5-methylcytosine"
tacaggaataattatgcatacatgtgcagtatattgccccagcataccactaccagtgtacgtttttggtaattatgtatttgtaggagatgtgacattgcttgttaagccacatgtgatat

SEQ ID NO: 1764 - DNA, 122 bp, Homo sapiens
  misc_feature (61)..(62): /note="This region represents a CpG dinucleotide"
  misc_feature (61)..(61): /note="Nucleotide may be methylated to form 5-methylcytosine"
actgtgagtcagctaacatcccagaacgaggtccttcgaaatagcttccgagatcaagtgcgacatttgcaggaagaacacagaaagacagtggagacattacagcagcagctctccaagat

SEQ ID NO: 1765 - DNA, 122 bp, Homo sapiens
  misc_feature (61)..(62): /note="This region represents a CpG dinucleotide"
  misc_feature (61)..(61): /note="Nucleotide may be methylated to form 5-methylcytosine"
tagtctgcaaaagccatgacgtggcactgaaatgaagccctgtgtagggttttactcagacgttagagaactggctgcccctgagtgctgtgctaactagggaaagaaaaaaaaccctgacc

SEQ ID NO: 1766 - DNA, 122 bp, Homo sapiens
  misc_feature (61)..(62): /note="This region represents a CpG dinucleotide"
  misc_feature (61)..(61): /note="Nucleotide may be methylated to form 5-methylcytosine"
aagtttccgcccatgtgacttccagcgtgagttaccagaaaccacaagagagagagagagcgtgcaagccccaaagcgagcgacatgtccctttggggagcagtccctctgcaccccagagt

SEQ ID NO: 1767 - DNA, 122 bp, Homo sapiens
  misc_feature (61)..(62): /note="This region represents a CpG dinucleotide"
  misc_feature (61)..(61): /note="Nucleotide may be methylated to form 5-methylcytosine"
tatggtgaactcatataatgggacccaaataggaagtgaaaattgcataatctagaactacgtgtatccatgtgaacacatttcaagattatcctgctgggtgaaaaaagcaagttgcacaa

SEQ ID NO: 1768 - DNA, 122 bp, Homo sapiens
  misc_feature (61)..(62): /note="This region represents a CpG dinucleotide"
  misc_feature (61)..(61): /note="Nucleotide may be methylated to form 5-methylcytosine"
ctcaaaatttaacaactgttttttgcaacctctaatgagccagctctaaactatgtagcacgcccaggaagtataattcacattaagacatagtatagagttctctaagtgacattagttat

SEQ ID NO: 1769 - DNA, 122 bp, Homo sapiens
  misc_feature (61)..(62): /note="This region represents a CpG dinucleotide"
  misc_feature (61)..(61): /note="Nucleotide may be methylated to form 5-methylcytosine"
cttgaaggtacaattggtcttgcaaacttgcagggagtcatttggaagtgttgacttaggcgcctgtaagacatctggtaataatgaagatggagcttttaatgctttgggattttatgaat

SEQ ID NO: 1770 - DNA, 122 bp, Homo sapiens
  misc_feature (61)..(62): /note="This region represents a CpG dinucleotide"
  misc_feature (61)..(61): /note="Nucleotide may be methylated to form 5-methylcytosine"
ctttcgccagcacccttttagctctcaccactgctgtttcccaagttgtcacagctgaagcgcactgattggaagttgctttgtactgactgagttctgccctggctgaaccatctaataat

SEQ ID NO: 1771 - DNA, 122 bp, Homo sapiens
  misc_feature (61)..(62): /note="This region represents a CpG dinucleotide"
  misc_feature (61)..(61): /note="Nucleotide may be methylated to form 5-methylcytosine"
caaggcgagtatgtttaccctgctgggcacccttccgctccgcggggaccactgcgggatcgcgctctctaaaactcctctcaactgccccgcagtgcgcggcggccttttccgccaggttt

SEQ ID NO: 1772 - DNA, 122 bp, Homo sapiens
  misc_feature (61)..(62): /note="This region represents a CpG dinucleotide"
  misc_feature (61)..(61): /note="Nucleotide may be methylated to form 5-methylcytosine"
gtgtgtggagaggtgattagggggtttgggccaccagatctacaccttcctccatccattcgcctccagcagccccagccccaggtctgggaatgcaggggatgggattcccagatcctctg

SEQ ID NO: 1773 - DNA, 122 bp, Homo sapiens
  misc_feature (61)..(62): /note="This region represents a CpG dinucleotide"
  misc_feature (61)..(61): /note="Nucleotide may be methylated to form 5-methylcytosine"
actctgccttcaggcccacctcagccctccccgactccgccttcagcccgacctcgactccgccctcaggcccacctcagcacaccgccccgactccgcccacaggcccacctcagcccgcc

SEQ ID NO: 1774 - DNA, 122 bp, Homo sapiens
  misc_feature (61)..(62): /note="This region represents a CpG dinucleotide"
  misc_feature (61)..(61): /note="Nucleotide may be methylated to form 5-methylcytosine"
ggaggcagccacaccaaggaaccaggcagtgaagagcagggtcgtttcctaactgggagacgtggcatcactgcaagcagaggttgtcgtgactcatcaggatgaatccacagagcagtaaa

SEQ ID NO: 1775 - DNA, 122 bp, Homo sapiens
  misc_feature (61)..(62): /note="This region represents a CpG dinucleotide"
  misc_feature (61)..(61): /note="Nucleotide may be methylated to form 5-methylcytosine"
gaaataagaattctaacttgctgaagaaccatgtaggagagtccatattttccttgctatcgtacaaaaaggagagctacctctcatttcctttctttttcaaatatcaaggaacatataga

SEQ ID NO: 1776 - DNA, 122 bp, Homo sapiens
  misc_feature (61)..(62): /note="This region represents a CpG dinucleotide"
  misc_feature (61)..(61): /note="Nucleotide may be methylated to form 5-methylcytosine"
tctgataggccccagtgtctgttagaaccaacttttcacttcttgagtatctctattgtccgtttatgttctttggcttatctttattgtttccttccttttgctttctctgaatgtaatgt

SEQ ID NO: 1777 - DNA, 122 bp, Homo sapiens
  misc_feature (61)..(62): /note="This region represents a CpG dinucleotide"
  misc_feature (61)..(61): /note="Nucleotide may be methylated to form 5-methylcytosine"
ctgaagcacagggcacagagctgcctagctagagactgcatttcccagcctcccttgcaacgaggtgtggccatgtgactaggttctagcgaatgaaatgtgactggatgtgataggtgtgt

SEQ ID NO: 1778 - DNA, 122 bp, Homo sapiens
  misc_feature (61)..(62): /note="This region represents a CpG dinucleotide"
  misc_feature (61)..(61): /note="Nucleotide may be methylated to form 5-methylcytosine"
tcaggagggcggcacagctgctgcaggtgagaagtgctggggacggtcgagatcactggacgccctcagaaatggtactgcggctggagaaatcattaacgaggaaagaaataacccaattt

SEQ ID NO: 1779 - DNA, 122 bp, Homo sapiens
  misc_feature (61)..(62): /note="This region represents a CpG dinucleotide"
  misc_feature (61)..(61): /note="Nucleotide may be methylated to form 5-methylcytosine"
ttctaatttatttttcccagtagatactaacttttcctctatctttttccacattttacacggaggctagcatctcaccattgtcacaatgactgccagttcccaggcctcaacctggaatc

SEQ ID NO: 1780 - DNA, 122 bp, Homo sapiens
  misc_feature (61)..(62): /note="This region represents a CpG dinucleotide"
  misc_feature (61)..(61): /note="Nucleotide may be methylated to form 5-methylcytosine"
gccccggcccagagcgctccacactcggagctagccagctgggacagagcaacagcgcagcgcgggcagccacagcctgcaccggccccgcggggacctgctgtgtgtgggtgtgaaggtgg

SEQ ID NO: 1781 - DNA, 122 bp, Homo sapiens
  misc_feature (61)..(62): /note="This region represents a CpG dinucleotide"
  misc_feature (61)..(61): /note="Nucleotide may be methylated to form 5-methylcytosine"
acctcagctgatccacccgccttggcctcccaaagtgctgggattacaggcgtgagccaccgagcctggccaaaccatcacttttcatgagcagggatgcacccactggcactcctgcacct

SEQ ID NO: 1782 - DNA, 122 bp, Homo sapiens
  misc_feature (61)..(62): /note="This region represents a CpG dinucleotide"
  misc_feature (61)..(61): /note="Nucleotide may be methylated to form 5-methylcytosine"
taacttctctgccagattttggtttccacagataatgaagtcagtttatcagggccagtgcgcctcctccaccagtttggagggtaatctacacagaagaaaagatgcctgaggttcttatt

SEQ ID NO: 1783 - DNA, 122 bp, Homo sapiens
  misc_feature (61)..(62): /note="This region represents a CpG dinucleotide"
  misc_feature (61)..(61): /note="Nucleotide may be methylated to form 5-methylcytosine"
ccaaaaacaaagcctcggtagacgagctatttgccgagatcgtgcggcagatgaactacgcggcgcagcccaacggcgatgagggctgctgctcggcctgcgtgatcctctgaggcggccac

SEQ ID NO: 1784 - DNA, 122 bp, Homo sapiens
  misc_feature (61)..(62): /note="This region represents a CpG dinucleotide"
  misc_feature (61)..(61): /note="Nucleotide may be methylated to form 5-methylcytosine"
aaggaatataagcatagtcaaagttagactcccagtcttggaatcttagaattacagggtcgcaggatcgcaggatcgcattctttagatttatggaatcacgttaggacaacggtcgtcca

SEQ ID NO: 1785 - DNA, 122 bp, Homo sapiens
  misc_feature (61)..(62): /note="This region represents a CpG dinucleotide"
  misc_feature (61)..(61): /note="Nucleotide may be methylated to form 5-methylcytosine"
aaaacgggggccccaactgctgtcgctgtccctggtgctgactaaaccctaaagcctctgcgttgcggccttggggccattggtggtgccgagttattcttttattttctttctgttctttt

SEQ ID NO: 1786 - DNA, 122 bp, Homo sapiens
  misc_feature (61)..(62): /note="This region represents a CpG dinucleotide"
  misc_feature (61)..(61): /note="Nucleotide may be methylated to form 5-methylcytosine"
aaccgagtggcccaaatatctggaggctgaagataaattgacaaagaggcgggccgcgcacgctctcacgcttcggcagctcagatacctgttacctggcgttaattgcatttacagcggga

SEQ ID NO: 1787 - DNA, 122 bp, Homo sapiens
  misc_feature (61)..(62): /note="This region represents a CpG dinucleotide"
  misc_feature (61)..(61): /note="Nucleotide may be methylated to form 5-methylcytosine"
ccggccaggcggcgcgagcgggaactacggccttggccttcttcagttctagcgtcaacccggtgctctacgtcttcaccgctggagatctgctgccccgggcaggtccccgtttcctcacg

SEQ ID NO: 1788 - DNA, 122 bp, Homo sapiens
  misc_feature (61)..(62): /note="This region represents a CpG dinucleotide"
  misc_feature (61)..(61): /note="Nucleotide may be methylated to form 5-methylcytosine"
gaataagtagcacctggggcacctgagatcattaaagggagccaaggaattttccattcccgcagccccaaagcctttggtgatgtctaactcctccaggggccccactctcagttttcaga

SEQ ID NO: 1789 - DNA, 122 bp, Homo sapiens
  misc_feature (61)..(62): /note="This region represents a CpG dinucleotide"
  misc_feature (61)..(61): /note="Nucleotide may be methylated to form 5-methylcytosine"
gcgcccgggacctcaaagctggactccccggggactgagtccaaccgtggctgcaggggccgcggcctggcggagggtccgcgtgggtgtctacgaggatcccccccgttccatctcctctt

SEQ ID NO: 1790 - DNA, 122 bp, Homo sapiens
  misc_feature (61)..(62): /note="This region represents a CpG dinucleotide"
  misc_feature (61)..(61): /note="Nucleotide may be methylated to form 5-methylcytosine"
aagtgagcctcagttgtatgcaggttgagcatcccaaatccaaagtccaaaatctgagcacgaaaatgacactcaaaggaaatgctcattggaggatttcggattttcagattagggatgct

SEQ ID NO: 1791 - DNA, 122 bp, Homo sapiens
  misc_feature (61)..(62): /note="This region represents a CpG dinucleotide"
  misc_feature (61)..(61): /note="Nucleotide may be methylated to form 5-methylcytosine"
atgcatatttttgttggcactgcatcaaaattgacatcaccggaaataatgtatgtgtgtcgttgttaactgtacaaacaggtatcatttcctttttaggttcagaaattctctctgtaggc

SEQ ID NO: 1792 - DNA, 122 bp, Homo sapiens
  misc_feature (61)..(62): /note="This region represents a CpG dinucleotide"
  misc_feature (61)..(61): /note="Nucleotide may be methylated to form 5-methylcytosine"
catggcttaggcaagacaaagatgcaagagtcacaggacagcacaggtggggcagggttccggttcaggcctcaccgtcaggagctcccttgctggcctctcattcttctcctccagttctt

SEQ ID NO: 1793 - DNA, 122 bp, Homo sapiens
  misc_feature (61)..(62): /note="This region represents a CpG dinucleotide"
  misc_feature (61)..(61): /note="Nucleotide may be methylated to form 5-methylcytosine"
gcctcttggtataggcggcttcccggaagcactccatgcacaccgccgtcagcttcaccacgctctcggccagcggcaccaggttcaggatggccccaaatggctgcgctcccatggaaaga

SEQ ID NO: 1794 - DNA, 122 bp, Homo sapiens
  misc_feature (61)..(62): /note="This region represents a CpG dinucleotide"
  misc_feature (61)..(61): /note="Nucleotide may be methylated to form 5-methylcytosine"
cacatatttacagccaactggtttttgacaaagggcaaagaatgtgcaatggggaaagggcgccctcttcagtaaatgatgctaggaagactggataaccgtatgcagaaaaattaaactgg

SEQ ID NO: 1795 - DNA, 122 bp, Homo sapiens
  misc_feature (61)..(62): /note="This region represents a CpG dinucleotide"
  misc_feature (61)..(61): /note="Nucleotide may be methylated to form 5-methylcytosine"
acttgagcaatatattagatcagaagcatcctttctctttccctatctgcttcttagaatcgttttcaaacaaatagaataatagtaaatgaagtctgaaaatatcagaaaataaaatccaa

SEQ ID NO: 1796 - DNA, 122 bp, Homo sapiens
  misc_feature (61)..(62): /note="This region represents a CpG dinucleotide"
  misc_feature (61)..(61): /note="Nucleotide may be methylated to form 5-methylcytosine"
acaatgaaatcacttactttgaaaagatgtaatgtttccttactggttagcaactgaaaccgaaagtcaggtatcttgccatcacaagggaagcattcataaaactcaggttccttatgtgt

SEQ ID NO: 1797 - DNA, 122 bp, Homo sapiens
  misc_feature (61)..(62): /note="This region represents a CpG dinucleotide"
  misc_feature (61)..(61): /note="Nucleotide may be methylated to form 5-methylcytosine"
tttggtcaggatatattttgtctatccagttctctgtgtctactgtttttgtcactctgtcgtggaaggaaattaagttgatttgacaggatttatttttcacagtgccaaggagattttac

SEQ ID NO: 1798 - DNA, 122 bp, Homo sapiens
  misc_feature (61)..(62): /note="This region represents a CpG dinucleotide"
  misc_feature (61)..(61): /note="Nucleotide may be methylated to form 5-methylcytosine"
gcctatctcaggttatggttggggcatgctctgggcttcctagaatcaggaagtcaaatacgtagcaaatgttcaataatcatgttaaattgaagtcagcatggccttggaactcaagtgtt

SEQ ID NO: 1799 - DNA, 122 bp, Homo sapiens
  misc_feature (61)..(62): /note="This region represents a CpG dinucleotide"
  misc_feature (61)..(61): /note="Nucleotide may be methylated to form 5-methylcytosine"
aacccttaccgaaacaattgttcagatgagcaacgccaagtttaaagaaaggaagtaaaccgtctcaagaactgtcaatctgtttgtgttcgataggctgagatttgaaaggtttgattctg

SEQ ID NO: 1800 - DNA, 122 bp, Homo sapiens
  misc_feature (61)..(62): /note="This region represents a CpG dinucleotide"
  misc_feature (61)..(61): /note="Nucleotide may be methylated to form 5-methylcytosine"
cctgtctgcttgaggtaccgtgcccgctctttgccttggcagactccatctccagggtggcgtcttattaatgttcccagtgttgctgactcaggcatcacaggccagggccttcagtgaca

SEQ ID NO: 1801 - DNA, 122 bp, Homo sapiens
  misc_feature (61)..(62): /note="This region represents a CpG dinucleotide"
  misc_feature (61)..(61): /note="Nucleotide may be methylated to form 5-methylcytosine"
ccagagactttaagcgacattaccatggtcacatgttttcacatgaatgtaaaccccaaacgctgcttattttcagacttgaattttaaatttccatacaaaggcttcaagtggttctcacc

SEQ ID NO: 1802 - DNA, 122 bp, Homo sapiens
  misc_feature (61)..(62): /note="This region represents a CpG dinucleotide"
  misc_feature (61)..(61): /note="Nucleotide may be methylated to form 5-methylcytosine"
gaagcctggggtgtgccaaggtccctcgggcctaagtggagttctgtggccaggatgatccggaatgatcaggactcgctgacgcagctgctgcagctggggctggtggtgctggtgagtgc

SEQ ID NO: 1803 - DNA, 122 bp, Homo sapiens
  misc_feature (61)..(62): /note="This region represents a CpG dinucleotide"
  misc_feature (61)..(61): /note="Nucleotide may be methylated to form 5-methylcytosine"
ggcgggtaggaggtccgctttaggggagcagacaaaggagccactactccctaagcctcacgcctgggcgcaagggttgtgtccacagcaatatgtgtgttggcgcgcgcggagcggggtag

SEQ ID NO: 1804 - DNA, 122 bp, Homo sapiens
  misc_feature (61)..(62): /note="This region represents a CpG dinucleotide"
  misc_feature (61)..(61): /note="Nucleotide may be methylated to form 5-methylcytosine"
taatggaatctttccatgttatcaagcaatgacaggatgggaacagatactagccaagtccgaaccttaactttcctcttggttttgactgtgaaggctgtggtggagtgagactgtgggtt

SEQ ID NO: 1805 - DNA, 122 bp, Homo sapiens
  misc_feature (61)..(62): /note="This region represents a CpG dinucleotide"
  misc_feature (61)..(61): /note="Nucleotide may be methylated to form 5-methylcytosine"
tctcctagatacaaagatgggaagaggtggcattaggaaaatgccatgtacagagatttacggatttgtgtgtgtattgattactgtgtctaatgggtaaagcattttagacagccatttga

SEQ ID NO: 1806 - DNA, 122 bp, Homo sapiens
  misc_feature (61)..(62): /note="This region represents a CpG dinucleotide"
  misc_feature (61)..(61): /note="Nucleotide may be methylated to form 5-methylcytosine"
ctggaaaccatctaggtttaaattgctgacagataagctaaccacgtctcccagcctttccgcacgactgtgcttccatgaaacccgttaacttctcgaatggctttgatcaaggcactctg

SEQ ID NO: 1807 - DNA, 122 bp, Homo sapiens
  misc_feature (61)..(62): /note="This region represents a CpG dinucleotide"
  misc_feature (61)..(61): /note="Nucleotide may be methylated to form 5-methylcytosine"
ctttggcactgcacactgaccacctgtttgtgggacagcaatcacacagtcacctccttgcgtacacgaagaaggtgaacacagccagtttaagggaccacctatacgttgtgggataaaat

SEQ ID NO: 1808 - DNA, 122 bp, Homo sapiens
  misc_feature (61)..(62): /note="This region represents a CpG dinucleotide"
  misc_feature (61)..(61): /note="Nucleotide may be methylated to form 5-methylcytosine"
actgagattggttgacattgcaagctcagttttcattcaagcagacacagcatccgacaccgcctatggaccagagtttgattacataatactcgcaggttaccaaattatttacacaactt

SEQ ID NO: 1809 - DNA, 122 bp, Homo sapiens
  misc_feature (61)..(62): /note="This region represents a CpG dinucleotide"
  misc_feature (61)..(61): /note="Nucleotide may be methylated to form 5-methylcytosine"
gtcctaatctaactagggaaagaaaacacacactatacaactgaaaccttattacatagacgttaggagtgctgtgtttggaattgcacctaggttaaactcacagctcagccactgtggat

SEQ ID NO: 1810 - DNA, 122 bp, Homo sapiens
  misc_feature (61)..(62): /note="This region represents a CpG dinucleotide"
  misc_feature (61)..(61): /note="Nucleotide may be methylated to form 5-methylcytosine"
agcgcgcgcgggcggggcgggggcgggggcggggcgctcctctgggcaccgcccccggcccgccccccgcgctcgcagtcccgctcgcacactggctcccacccgccgcccgcccaggcact

SEQ ID NO: 1811 - DNA, 122 bp, Homo sapiens
  misc_feature (61)..(62): /note="This region represents a CpG dinucleotide"
  misc_feature (61)..(61): /note="Nucleotide may be methylated to form 5-methylcytosine"
tattttcaacttcacaaataatgaggtgagattctgaaacagaagttccctaatctcactcgcaggcacgcgatgggggtgtggctcatttctttggtgctccgctgcgcatacccctaggg

SEQ ID NO: 1812 - DNA, 122 bp, Homo sapiens
  misc_feature (61)..(62): /note="This region represents a CpG dinucleotide"
  misc_feature (61)..(61): /note="Nucleotide may be methylated to form 5-methylcytosine"
ctcctagatgcacacctaacagaaatgcatgcacaaggcactcaaagacacatacaagaacgtcctcagcaacattagttacaatagcaaaacaaccgaaaacttcctgaatgcatatcaac

SEQ ID NO: 1813 - DNA, 122 bp, Homo sapiens
  misc_feature (61)..(62): /note="This region represents a CpG dinucleotide"
  misc_feature (61)..(61): /note="Nucleotide may be methylated to form 5-methylcytosine"
caaaaaacaaaaacggggggaaaacatcataagctctaaagtcacattatcttcctgatccgattagtaagaggcagcttgttaaatgaaccttttagttaactccgaatcaaattctttgt

SEQ ID NO: 1814 - DNA, 122 bp, Homo sapiens
  misc_feature (61)..(62): /note="This region represents a CpG dinucleotide"
  misc_feature (61)..(61): /note="Nucleotide may be methylated to form 5-methylcytosine"
cttctgcaccgtgtgcttaggaacactgagtgtttgagacactgcacccccgtccacctccgaggagcagggcacaggcaggaagggctggggacatccccccagggccttccgagccaccc

SEQ ID NO: 1815 - DNA, 122 bp, Homo sapiens
  misc_feature (61)..(62): /note="This region represents a CpG dinucleotide"
  misc_feature (61)..(61): /note="Nucleotide may be methylated to form 5-methylcytosine"
gaaaaccgcgaaagtcgtttttttaaaacagcttaaataacagtaacaagaggaacaagacgcctggcacacacatgccatttcagaggcaagaagttcaagaaactggggaaagatgtgat

SEQ ID NO: 1816 - DNA, 122 bp, Homo sapiens
  misc_feature (61)..(62): /note="This region represents a CpG dinucleotide"
  misc_feature (61)..(61): /note="Nucleotide may be methylated to form 5-methylcytosine"
acgaaagaggggcgtggttcgaagccgtacagtggccggtaaagctcaagaaacatggaacgaaaaggacgcgaagaatcggcagggagaagcggacaggatgtcccgaaaggctcatataa

SEQ ID NO: 1817 - DNA, 122 bp, Homo sapiens
  misc_feature (61)..(62): /note="This region represents a CpG dinucleotide"
  misc_feature (61)..(61): /note="Nucleotide may be methylated to form 5-methylcytosine"
cctcgccagcgctcctgcactctggtctctgcagagccacatggaaacgccgcagacacccggacaaaagccgcccccaaccacccgccagggcccactgtgttctgtctgtcacttgcttt

SEQ ID NO: 1818 - DNA, 122 bp, Homo sapiens
  misc_feature (61)..(62): /note="This region represents a CpG dinucleotide"
  misc_feature (61)..(61): /note="Nucleotide may be methylated to form 5-methylcytosine"
ctggggggaagagtctgtggttgggtgttcagaagcagagagtgctctcccaaagctaaacgatgccgccaactactgtgaaacttaacttcccctctcccggaattctcatggaagacaag

SEQ ID NO: 1819 - DNA, 122 bp, Homo sapiens
  misc_feature (61)..(62): /note="This region represents a CpG dinucleotide"
  misc_feature (61)..(61): /note="Nucleotide may be methylated to form 5-methylcytosine"
aagaaagttacatattgattgctgttgctcgcggcatgttcgtaccagcgcgggcagaaacgggctcacgagcgccctcgaattcacacacactcaccgaaatacacatctcagcccgtgga

SEQ ID NO: 1820 - DNA, 122 bp, Homo sapiens
  misc_feature (61)..(62): /note="This region represents a CpG dinucleotide"
  misc_feature (61)..(61): /note="Nucleotide may be methylated to form 5-methylcytosine"
gcggcggggagagggggcggggaacgggccgggcctggcgctcctgacaggaggagccgccgccgccgcccgccgctgcagccgcgccggggcgggctgagggaggagcggagccgaggggt

SEQ ID NO: 1821 - DNA, 122 bp, Homo sapiens
  misc_feature (61)..(62): /note="This region represents a CpG dinucleotide"
  misc_feature (61)..(61): /note="Nucleotide may be methylated to form 5-methylcytosine"
gtttggagcttgtgaacagctacaacgtggatacagcaaattttaaacagctatgccaaacgatgggaagttgcattgagttttatagtacgtatgaaagaagaaagataaaaatgagttta

SEQ ID NO: 1822 - DNA, 122 bp, Homo sapiens
  misc_feature (61)..(62): /note="This region represents a CpG dinucleotide"
  misc_feature (61)..(61): /note="Nucleotide may be methylated to form 5-methylcytosine"
atcttgtccaccgtgtgtcttcttctgcacgagactttgaggctgtcagagcgctttttgcgtggttgctcccgcaagtttccttctctggagcttcccgcaggtgggcagctagctgcagc

SEQ ID NO: 1823 - DNA, 122 bp, Homo sapiens
  misc_feature (61)..(62): /note="This region represents a CpG dinucleotide"
  misc_feature (61)..(61): /note="Nucleotide may be methylated to form 5-methylcytosine"
tctttgagtgtggcaaccaagtctttgtcatctttctgtttctcccctaccccagcacctcgctgagtgcctggaatgtgagaaaaactccattaatgtgtgtggaattaattatcaaatta

SEQ ID NO: 1824 - DNA, 122 bp, Homo sapiens
  misc_feature (61)..(62): /note="This region represents a CpG dinucleotide"
  misc_feature (61)..(61): /note="Nucleotide may be methylated to form 5-methylcytosine"
gtgcagtaggagagtcagtgagagggtgagagagacggggagacggaaacctcttaaccacggctcacacggcgtctttggtgaggtggtttaggtttacatctcttttttctctctttctt

SEQ ID NO: 1825 - DNA, 122 bp, Homo sapiens
  misc_feature (61)..(62): /note="This region represents a CpG dinucleotide"
  misc_feature (61)..(61): /note="Nucleotide may be methylated to form 5-methylcytosine"
gatgcaagagtggatctatggggtggctcccacctgggtctctgatatgagttgagccttcgtcctgttccagtttctggaaggaactgttcactctgcagcccctgccacggggatcctta

SEQ ID NO: 1826 - DNA, 122 bp, Homo sapiens
  misc_feature (61)..(62): /note="This region represents a CpG dinucleotide"
  misc_feature (61)..(61): /note="Nucleotide may be methylated to form 5-methylcytosine"
attttcataatttatatgagctcttcgtgtaacaaaaataccaagctgctacgggaatgccggcaccgtggctgaaaaacagcacacgtggttagcgctgccggctggccttacccagggga

SEQ ID NO: 1827 - DNA, 122 bp, Homo sapiens
  misc_feature (61)..(62): /note="This region represents a CpG dinucleotide"
  misc_feature (61)..(61): /note="Nucleotide may be methylated to form 5-methylcytosine"
gttgaagaaatgccattgcccaaggcactggttacaaagcggaagagcccagatcccagccgcaaacacgtgcttctttggctcccaaaccaaagttggctccagctaagtgctgcatgact

SEQ ID NO: 1828 - DNA, 122 bp, Homo sapiens
  misc_feature (61)..(62): /note="This region represents a CpG dinucleotide"
  misc_feature (61)..(61): /note="Nucleotide may be methylated to form 5-methylcytosine"
cctgtcccgtctgccaaccaaggtgcaaggtagctgtccatggtcctggacctgtaagaccgtatttttttttttttttttttttaaaccacttcattgaaggatgatgggcaagtaaaaag

SEQ ID NO: 1829 - DNA, 122 bp, Homo sapiens
  misc_feature (61)..(62): /note="This region represents a CpG dinucleotide"
  misc_feature (61)..(61): /note="Nucleotide may be methylated to form 5-methylcytosine"
ctccgtgtgtgggggtggggagcgggacgtccttagctcctggtgttgcggggagcaggacgtccttagctgcggatgtgggggagagcgggacgtccttagctctgggtgtggcggggtgg

SEQ ID NO: 1830 - DNA, 122 bp, Homo sapiens
  misc_feature (61)..(62): /note="This region represents a CpG dinucleotide"
  misc_feature (61)..(61): /note="Nucleotide may be methylated to form 5-methylcytosine"
aaaagatccgcaccagatagatcatcagtaccttgttgtgagtctgcagaacctacttttcgagttgatctatgtcttaatcaagattcttggtgtttctcaaccagctatgaatttaccca

SEQ ID NO: 1831 - DNA, 122 bp, Homo sapiens
  misc_feature (61)..(62): /note="This region represents a CpG dinucleotide"
  misc_feature (61)..(61): /note="Nucleotide may be methylated to form 5-methylcytosine"
ggaatacagagcccaaatcccctttctctgcaacctgcttttatgctaaaggtgcgtgcgcgcacgcacacacacacacattgcctacatgcacgcagcacactgtagctccctggagccat

SEQ ID NO: 1832 - DNA, 122 bp, Homo sapiens
  misc_feature (61)..(62): /note="This region represents a CpG dinucleotide"
  misc_feature (61)..(61): /note="Nucleotide may be methylated to form 5-methylcytosine"
atgtccattgaagaggtggagaggatcctggacgagacgcaggaggccgtggagtaccagcgggtaggtggcaccctgaccggcctgcccccaactgtgagaacccacaaggccaccctcga

SEQ ID NO: 1833 - DNA, 122 bp, Homo sapiens
  misc_feature (61)..(62): /note="This region represents a CpG dinucleotide"
  misc_feature (61)..(61): /note="Nucleotide may be methylated to form 5-methylcytosine"
aaaccggaggtaaaaagttcagaaaagaaaaaaacagcagagaagataaaagagaaagaacggcaacagaagaaaagcaagaagaaattaaaaagaggttaaaagaacctgaagaacctaaa

SEQ ID NO: 1834 - DNA, 122 bp, Homo sapiens
  misc_feature (61)..(62): /note="This region represents a CpG dinucleotide"
  misc_feature (61)..(61): /note="Nucleotide may be methylated to form 5-methylcytosine"
ctatattagggctttgttgctgacaacagtgaaaacttgtttgtgtcaggaagtgaggtacggagatatgacctggaaggtacagacaaaaccaaagtggcagtttttgcattacttttctg

SEQ ID NO: 1835 - DNA, 122 bp, Homo sapiens
  misc_feature (61)..(62): /note="This region represents a CpG dinucleotide"
  misc_feature (61)..(61): /note="Nucleotide may be methylated to form 5-methylcytosine"
cagacagacggacaggctgaccccggcccgggggagcaggcgcagcggctgcgcaggtcccgccaccgccttctggccccaggcggcccctcagggcacgagctcttaggcgggcggaggcg

SEQ ID NO: 1836 - DNA, 122 bp, Homo sapiens
  misc_feature (61)..(62): /note="This region represents a CpG dinucleotide"
  misc_feature (61)..(61): /note="Nucleotide may be methylated to form 5-methylcytosine"
ctgcatcagtgcacaggacaaggcgcactgaattaaggacaacttcaggacacatgacagcgcccatggcttaggatactggggtttgtgggtggccagtgtctctcaggtccatggtcccc

SEQ ID NO: 1837 - DNA, 122 bp, Homo sapiens
  misc_feature (61)..(62): /note="This region represents a CpG dinucleotide"
  misc_feature (61)..(61): /note="Nucleotide may be methylated to form 5-methylcytosine"
tttttgttactggcttatcactcttagccaatgttcatctatgttgcaagaatttccttccgttttagggctgaataatattgctttgtatgtatatatcacattttgtttatccattcacc

SEQ ID NO: 1838 - DNA, 122 bp, Homo sapiens
  misc_feature (61)..(62): /note="This region represents a CpG dinucleotide"
  misc_feature (61)..(61): /note="Nucleotide may be methylated to form 5-methylcytosine"
ttttcttttttttctaaagctaccatcatttctaagctgatactttagaagcctcttaaccgacctgcttgcttccgctccagattttcatccacagagcagccaaaagtatctcttacata

SEQ ID NO: 1839 - DNA, 122 bp, Homo sapiens
  misc_feature (61)..(62): /note="This region represents a CpG dinucleotide"
  misc_feature (61)..(61): /note="Nucleotide may be methylated to form 5-methylcytosine"
ggttgggtgcatattttcagtatatgctgcagcagctctttattaaagtataaatcattacgaagtcttcatttcctatggggcgataacactgctgctttgtggatgactacctgtcacgc

SEQ ID NO: 1840 - DNA, 122 bp, Homo sapiens
  misc_feature (61)..(62): /note="This region represents a CpG dinucleotide"
  misc_feature (61)..(61): /note="Nucleotide may be methylated to form 5-methylcytosine"
tttatgttaccctaagaaacacatcatatctatttatagctctctaattctggcagtcaacggggtgcagcacagttgtcctaatggttttagcaaccaggaaagatcctggcctagtctac

SEQ ID NO: 1841 - DNA, 122 bp, Homo sapiens
  misc_feature (61)..(62): /note="This region represents a CpG dinucleotide"
  misc_feature (61)..(61): /note="Nucleotide may be methylated to form 5-methylcytosine"
tgaaggcgccttcagggtgggggagccagtccagcctgagccagggccctagggaagttgcgggagggggcagggtgtggtccccagatctttatcagactaataagctccttcctcctgcc

SEQ ID NO: 1842 - DNA, 122 bp, Homo sapiens
  misc_feature (61)..(62): /note="This region represents a CpG dinucleotide"
  misc_feature (61)..(61): /note="Nucleotide may be methylated to form 5-methylcytosine"
gctggggcatgtagttctccgtaggcgggaggcgcacggtgctgtcgggaaagttggtctcggaaaactacagccgccctcagcgcgccttccgcccgcatttcttcgcagtgcattctggg

SEQ ID NO: 1843 - DNA, 122 bp, Homo sapiens
  misc_feature (61)..(62): /note="This region represents a CpG dinucleotide"
  misc_feature (61)..(61): /note="Nucleotide may be methylated to form 5-methylcytosine"
gaatagccagactatacagctaatttcctttcttgactcataacggaagaagattgaaggcgcatatgttgggaaagagaagatttagtgtaagtagcagcatgacaaaaagcctgagtcat

SEQ ID NO: 1844 - DNA, 122 bp, Homo sapiens
  misc_feature (61)..(62): /note="This region represents a CpG dinucleotide"
  misc_feature (61)..(61): /note="Nucleotide may be methylated to form 5-methylcytosine"
ggagcgcagccagttattcatggcacaccgggacagactctcgatccaggttctgcaaaacgagcaccaccaagcccttaatgcagggtccccagccccggggccaggcaccaggaaggctg

SEQ ID NO: 1845 - DNA, 122 bp, Homo sapiens
  misc_feature (61)..(62): /note="This region represents a CpG dinucleotide"
  misc_feature (61)..(61): /note="Nucleotide may be methylated to form 5-methylcytosine"
cttggcttccaggtcccctcgggttattgaggacgattgaggtcatgcctccgagagcaccgcgccctgggcgcaggaggagctgttgctcagtgttgtctgtgttgtaaggtggactttgt

SEQ ID NO: 1846 - DNA, 122 bp, Homo sapiens
  misc_feature (61)..(62): /note="This region represents a CpG dinucleotide"
  misc_feature (61)..(61): /note="Nucleotide may be methylated to form 5-methylcytosine"
caaaaaagattgaggctatgagactgctgtcctcctctgccaccctttgcagaaggcctgcgaggcatcattgctgtaggcatcattctcagtatgagatgtggttactggagctctgcctt

SEQ ID NO: 1847 - DNA, 122 bp, Homo sapiens
  misc_feature (61)..(62): /note="This region represents a CpG dinucleotide"
  misc_feature (61)..(61): /note="Nucleotide may be methylated to form 5-methylcytosine"
caactgcattaaagttctcataaagtttacatcatgtagctttgcattacaaacccttctcggtttctcttgggttctgtattgcatcactaaatctcacttcattcttcctctttctactt

SEQ ID NO: 1848 - DNA, 122 bp, Homo sapiens
  misc_feature (61)..(62): /note="This region represents a CpG dinucleotide"
  misc_feature (61)..(61): /note="Nucleotide may be methylated to form 5-methylcytosine"
catgggtccccctccccgagccatgaagagctgcctgcggccatcttggccctcgcaccccgtctctgtcaccccaggcccctgtaacttgcttaacgcttcctgaggggtggtttgggttt

SEQ ID NO: 1849 - DNA, 122 bp, Homo sapiens
  misc_feature (61)..(62): /note="This region represents a CpG dinucleotide"
  misc_feature (61)..(61): /note="Nucleotide may be methylated to form 5-methylcytosine"
atagctgtatagggcatttcccaggcatggagcttgcaggactggcagctgctctgggtgcgtcagtgagtggtgagtaaccatgacgctgtacacttaggcaacactaggtttataaagaa

SEQ ID NO: 1850 - DNA, 122 bp, Homo sapiens
  misc_feature (61)..(62): /note="This region represents a CpG dinucleotide"
  misc_feature (61)..(61): /note="Nucleotide may be methylated to form 5-methylcytosine"
cattttcacctgcattataactctatcagcattattagctttcatcaaatttcttcatatcgtttttggtgcatttctgtgatttgcaagtgggccaactttgtctttacctattaagtagt

SEQ ID NO: 1851 - DNA, 122 bp, Homo sapiens
  misc_feature (61)..(62): /note="This region represents a CpG dinucleotide"
  misc_feature (61)..(61): /note="Nucleotide may be methylated to form 5-methylcytosine"
ttagcgtgcattaaaaacgtggtgtattttttggtgttcctgcagcgattgagccgttgccgaacgtggtggagctgtggcaggcagaagaaggggaactcctgctgcccactcaggtgagg

SEQ ID NO: 1852 - DNA, 122 bp, Homo sapiens
  misc_feature (61)..(62): /note="This region represents a CpG dinucleotide"
  misc_feature (61)..(61): /note="Nucleotide may be methylated to form 5-methylcytosine"
aaatggatgaaaaattcaccaaggtgttactggtccctggcaaaatttctactcagttgccgtatatccataatgcaagtttaataccatgtaatgccccccaatgcaattcatcttcaata

SEQ ID NO: 1853 - DNA, 122 bp, Homo sapiens
  misc_feature (61)..(62): /note="This region represents a CpG dinucleotide"
  misc_feature (61)..(61): /note="Nucleotide may be methylated to form 5-methylcytosine"
atatctctgactaacatttgggctagtcatgaagagaagaaaaggaagtgacaaagaagacgctctggaataaaccctaggaagtatgtgcctggctgggtgatctagtaaaacagcctggg

SEQ ID NO: 1854 - DNA, 122 bp, Homo sapiens
  misc_feature (61)..(62): /note="This region represents a CpG dinucleotide"
  misc_feature (61)..(61): /note="Nucleotide may be methylated to form 5-methylcytosine"
aatgactgatgccatgggcaaatcctatttctgtaaataactgaattttcttctggactgcgcatgaggggagaaagatgtctgcagtttcggtttcctggaaaatgaaacctatctcattt

SEQ ID NO: 1855 - DNA, 122 bp, Homo sapiens
  misc_feature (61)..(62): /note="This region represents a CpG dinucleotide"
  misc_feature (61)..(61): /note="Nucleotide may be methylated to form 5-methylcytosine"
cggagctgctgtggtcgcaaatagccttgtgcccctgggaacctgtgagatgcaatatgtcgtcagtctccctcaatcttggcctgagtccaagagaaaggcagctgctctgaggttcgaga

SEQ ID NO: 1856 - DNA, 122 bp, Homo sapiens
  misc_feature (61)..(62): /note="This region represents a CpG dinucleotide"
  misc_feature (61)..(61): /note="Nucleotide may be methylated to form 5-methylcytosine"
acaatctcacggtatcctgacaattactgttagtcatttcttacagtgctgcacaagacacgtctgtcattgttttgccagaggactgtgtgagataagatgctgagcattcccccacaagg

SEQ ID NO: 1857 - DNA, 122 bp, Homo sapiens
  misc_feature (61)..(62): /note="This region represents a CpG dinucleotide"
  misc_feature (61)..(61): /note="Nucleotide may be methylated to form 5-methylcytosine"
caagcaacagttataagtcaagagaaagacgaatgctagccaaggctagaggtagctaaccgccctgttgtgggtttggcgccgcctggcagagtcaaaccactgcagccctcactccaata

SEQ ID NO: 1858 - DNA, 122 bp, Homo sapiens
  misc_feature (61)..(62): /note="This region represents a CpG dinucleotide"
  misc_feature (61)..(61): /note="Nucleotide may be methylated to form 5-methylcytosine"
tcataaaccagaaatgtgtatgatacagattgagcattattgtctctgagaaaatgaacccgagagagatcagcatacaatgtgtcaattccccaggcattcagcagaaaatgaatatgtat

SEQ ID NO: 1859 - DNA, 122 bp, Homo sapiens
  misc_feature (61)..(62): /note="This region represents a CpG dinucleotide"
  misc_feature (61)..(61): /note="Nucleotide may be methylated to form 5-methylcytosine"
ctctacctgttgtacattcgtatgagataggtattaatataacctacacttcgtaggtgacgaaacagtctcagagagtgaaagggacttgaccaaagtcacagagccagtgagtgacaggg

SEQ ID NO: 1860 - DNA, 122 bp, Homo sapiens
  misc_feature (61)..(62): /note="This region represents a CpG dinucleotide"
  misc_feature (61)..(61): /note="Nucleotide may be methylated to form 5-methylcytosine"
ggatatgaactacaaactgaaatatgagagacttgaagaacagtcaaggattcctgcaatcgtatgggttgggaaaggtgctttagtaatccaacccccaaagttagcaaatacgaagctac

SEQ ID NO: 1861 - DNA, 122 bp, Homo sapiens
  misc_feature (61)..(62): /note="This region represents a CpG dinucleotide"
  misc_feature (61)..(61): /note="Nucleotide may be methylated to form 5-methylcytosine"
ccctgtctcagctttgtttcaatagaacctaccctaagataatctacaagcaatcttacccgtaattttcaaaaatagtttaaatcttttggtaaatggagaagtactcctaaattaatttc

SEQ ID NO: 1862 - DNA, 122 bp, Homo sapiens
  misc_feature (61)..(62): /note="This region represents a CpG dinucleotide"
  misc_feature (61)..(61): /note="Nucleotide may be methylated to form 5-methylcytosine"
ctggaaaccggatcaaggtggactcacagaccacttagaattgttaagtccctgagttcacggtcttaagagtttcttccaggcccctgctccacactctcaagttcatcttgcaaaagtcg

SEQ ID NO: 1863 - DNA, 122 bp, Homo sapiens
  misc_feature (61)..(62): /note="This region represents a CpG dinucleotide"
  misc_feature (61)..(61): /note="Nucleotide may be methylated to form 5-methylcytosine"
aagtgcgagcctgatggagttcaggacaaatgctggacgtggttgcatagtatttcctaacggaggggtagcacgctttattaccattcctcctagggattcgggtaattttgtttcctctc

SEQ ID NO: 1864 - DNA, 122 bp, Homo sapiens
  misc_feature (61)..(62): /note="This region represents a CpG dinucleotide"
  misc_feature (61)..(61): /note="Nucleotide may be methylated to form 5-methylcytosine"
ctgctaatgtgactaacgcgatgccgatgaacatctcggcgttttttggtgcaggataagcgggtgtagactctgtctgtttagtcccagattctcctcctttaatgaactaccgtggaaat

SEQ ID NO: 1865 - DNA, 122 bp, Homo sapiens
  misc_feature (61)..(62): /note="This region represents a CpG dinucleotide"
  misc_feature (61)..(61): /note="Nucleotide may be methylated to form 5-methylcytosine"
ctgcctccaggagatacagtcttctgttctttttgtcatagttgtttatttttcatgaatcgctgtttttgagcatagggcacttacctctttctgtgtccccagccctaccacagtgccag

SEQ ID NO: 1866 - DNA, 122 bp, Homo sapiens
  misc_feature (61)..(62): /note="This region represents a CpG dinucleotide"
  misc_feature (61)..(61): /note="Nucleotide may be methylated to form 5-methylcytosine"
attttttttaacttatcagtgatatctgatgttatcagtatactaaaagtggacatagaacgttaaagaaggaaccaaagaggcaaagatacctggagttattagggacctattttgagatt

SEQ ID NO: 1867 - DNA, 122 bp, Homo sapiens
  misc_feature (61)..(62): /note="This region represents a CpG dinucleotide"
  misc_feature (61)..(61): /note="Nucleotide may be methylated to form 5-methylcytosine"
gcgcgctggctcgggatcccgggcggactcccggcgagacaccgcagcgccacctagtgccgggatgagcaggtgcttttcggccgagccagtttccgtgcagaacacctgagcctgggatc

SEQ ID NO: 1868 - DNA, 122 bp, Homo sapiens
  misc_feature (61)..(62): /note="This region represents a CpG dinucleotide"
  misc_feature (61)..(61): /note="Nucleotide may be methylated to form 5-methylcytosine"
gtgtctcgagtcggaagcgctcggagcgaggggcggggtgggagagctggcgcgcgcacgcgtaaagtctttgcagcctcgctacggggcggagtcttgcctgtcagcaggggcagagtagc

SEQ ID NO: 1869 - DNA, 122 bp, Homo sapiens
  misc_feature (61)..(62): /note="This region represents a CpG dinucleotide"
  misc_feature (61)..(61): /note="Nucleotide may be methylated to form 5-methylcytosine"
ggggggctgcgggggccggaggtgctgcagagggggcctccggggcagcggtgctgggaacggggtcgcgggggcacgaggggactaagtgcccggggtgggtagggtgtggggggactcag

SEQ ID NO: 1870 - DNA, 122 bp, Homo sapiens
  misc_feature (61)..(62): /note="This region represents a CpG dinucleotide"
  misc_feature (61)..(61): /note="Nucleotide may be methylated to form 5-methylcytosine"
gaaagacacagtctggtgcagagctgccaggagccacatgtggtgagtgagcaccagaaacgtggccaatctgaagtgagatatgctgtaagtggaaaatgcacactgaatttcaaagatct

SEQ ID NO: 1871 - DNA, 122 bp, Homo sapiens
  misc_feature (61)..(62): /note="This region represents a CpG dinucleotide"
  misc_feature (61)..(61): /note="Nucleotide may be methylated to form 5-methylcytosine"
cggtggggccggtcccgggtgctcgggccaatggcgcttcgcccgctccccgccccggcccgccccggcctcctcgcccggcacacagcgcctgccagcccctgccctctccccttccctcc

SEQ ID NO: 1872 - DNA, 122 bp, Homo sapiens
  misc_feature (61)..(62): /note="This region represents a CpG dinucleotide"
  misc_feature (61)..(61): /note="Nucleotide may be methylated to form 5-methylcytosine"
atttgagtacatgtgaatcatggatttggtattcaactttttccctggatgctttggaatcgtgtcttccatgctccactgggttcaatttaaaataggagaggctttctcttctgaaagat

SEQ ID NO: 1873 - DNA, 122 bp, Homo sapiens
  misc_feature (61)..(62): /note="This region represents a CpG dinucleotide"
  misc_feature (61)..(61): /note="Nucleotide may be methylated to form 5-methylcytosine"
aatgagtttagtgctttggataaactaaaaccccaatgaacaaaaacctcccataactggcgtgtgatgcatgagggcagtgctggtgaagtggggaggacaccagagcctgatcacacagg

SEQ ID NO: 1874 - DNA, 122 bp, Homo sapiens
  misc_feature (61)..(62): /note="This region represents a CpG dinucleotide"
  misc_feature (61)..(61): /note="Nucleotide may be methylated to form 5-methylcytosine"
agatgggctgatgcataaagggaacttcagcacaccagcccacactcagtaaagatttaccgtgcttcactgtctccgtttcagtcttcatcatgtggcatgctacttacattactcttgtc

SEQ ID NO: 1875 - DNA, 122 bp, Homo sapiens
  misc_feature (61)..(62): /note="This region represents a CpG dinucleotide"
  misc_feature (61)..(61): /note="Nucleotide may be methylated to form 5-methylcytosine"
gctattgaagggttgcccaggtatctgtatagaaaaccaacctaacctggtcaaagtaaacgagtacaactggatgtttgtagtcattacacaggaaaccaccatgctaatctatctatgaa

SEQ ID NO: 1876 - DNA, 122 bp, Homo sapiens
  misc_feature (61)..(62): /note="This region represents a CpG dinucleotide"
  misc_feature (61)..(61): /note="Nucleotide may be methylated to form 5-methylcytosine"
actcagacttgaagctcaggagtaacctgcctgagcaaagcaaagaactaaaggctcccacgttagtgtccctcagagtttaggacccagaactgaatcatgacctggtttctagtttcctt

SEQ ID NO: 1877 - DNA, 122 bp, Homo sapiens
  misc_feature (61)..(62): /note="This region represents a CpG dinucleotide"
  misc_feature (61)..(61): /note="Nucleotide may be methylated to form 5-methylcytosine"
agaggcccaggagccagtctgccaaagtgatctcagagatgacatcattgtccaccattgcgttagtccctaaggcgactcagacagaaacaaagggaaggagagaagccaggcagacggag

SEQ ID NO: 1878 - DNA, 122 bp, Homo sapiens
  misc_feature (61)..(62): /note="This region represents a CpG dinucleotide"
  misc_feature (61)..(61): /note="Nucleotide may be methylated to form 5-methylcytosine"
cgttttcatatgcccggcattaaggctttgaagttcttaaaaccccttctagggtgaaaccgttagggaatttcaacgacgtactagaattattgaacaaatgcaatgggaggatcttgcct

SEQ ID NO: 1879 - DNA, 122 bp, Homo sapiens
  misc_feature (61)..(62): /note="This region represents a CpG dinucleotide"
  misc_feature (61)..(61): /note="Nucleotide may be methylated to form 5-methylcytosine"
atgggatctcatagttttataaccatctggcatttccccggcttgctcctctctctctctcgcttgctgccatgtaagacgtgcctgcttctccttctgccatgattgtaagtttcctgagg

SEQ ID NO: 1880 - DNA, 122 bp, Homo sapiens
  misc_feature (61)..(62): /note="This region represents a CpG dinucleotide"
  misc_feature (61)..(61): /note="Nucleotide may be methylated to form 5-methylcytosine"
tgcaaatgctcggtttgaaacaaatgctaattagtagattgtcaagacaagggttttgaacgtttgagcaatatcattttgttgcatgacacaataagtgtgttctgagggctgggtgtggt

SEQ ID NO: 1881 - DNA, 122 bp, Homo sapiens
  misc_feature (61)..(62): /note="This region represents a CpG dinucleotide"
  misc_feature (61)..(61): /note="Nucleotide may be methylated to form 5-methylcytosine"
agcttctgttgccgggccctggcctgttagcgaagcacgtgtgcatcccagcacagcccacgtcagcacgctaatacacagtgtccaccccagaacacacgtcagcaccccaatacagtgtg

SEQ ID NO: 1882 - DNA, 122 bp, Homo sapiens
  misc_feature (61)..(62): /note="This region represents a CpG dinucleotide"
  misc_feature (61)..(61): /note="Nucleotide may be methylated to form 5-methylcytosine"
aattttaaaattaacaaacttcttcacttctaaggtagcacaaactgagctttcatcaaacgtaacccttaccgaaacaattgttcagatgagcaacgccaagtttaaagaaaggaagtaaa

SEQ ID NO: 1883 - DNA, 122 bp, Homo sapiens
  misc_feature (61)..(62): /note="This region represents a CpG dinucleotide"
  misc_feature (61)..(61): /note="Nucleotide may be methylated to form 5-methylcytosine"
gtacaatagttaagagtgatgatgtcctttcagtgcttctgtttaccggtttttctgtggcgtgacaggcatcagaagtgctgcagcagctggtcctaggtagttggtcttagttttactct

SEQ ID NO: 1884 - DNA, 122 bp, Homo sapiens
  misc_feature (61)..(62): /note="This region represents a CpG dinucleotide"
  misc_feature (61)..(61): /note="Nucleotide may be methylated to form 5-methylcytosine"
gctctaaactaacaagtttaataagtcagcttcctaattcaaagaacaatagagtcagtacgtcggaaaggagaaaaagagtacttgctatatgtaagccatgaacagaagtaagaaataga

SEQ ID NO: 1885 - DNA, 122 bp, Homo sapiens
  misc_feature (61)..(62): /note="This region represents a CpG dinucleotide"
  misc_feature (61)..(61): /note="Nucleotide may be methylated to form 5-methylcytosine"
tctatgacgttttaaaatacttattaccatttaagacatgagaaaaattaagtttagaaacggctagatagctcacgctagaaaggaaggactccaaattttaaccaagggcagatgtgcat

SEQ ID NO: 1886 - DNA, 122 bp, Homo sapiens
  misc_feature (61)..(62): /note="This region represents a CpG dinucleotide"
  misc_feature (61)..(61): /note="Nucleotide may be methylated to form 5-methylcytosine"
gaggcagccaggggtcaggggctcccagtcactcagttgtgaaacgtgcagtgtgtgccacgttaagtcttcttagctcctttgccaagcagcccgaacatttcagaggtgcaagagggcag

SEQ ID NO: 1887 - DNA, 122 bp, Homo sapiens
  misc_feature (61)..(62): /note="This region represents a CpG dinucleotide"
  misc_feature (61)..(61): /note="Nucleotide may be methylated to form 5-methylcytosine"
accccaaggagctctctcgccctctctctaccatgtgaggatacaacaaggaatcagcagcgtgcaacctggaggaggcctttcagcagaacccagccatgctggcacccagatctcagacc

SEQ ID NO: 1888 - DNA, 122 bp, Homo sapiens
  misc_feature (61)..(62): /note="This region represents a CpG dinucleotide"
  misc_feature (61)..(61): /note="Nucleotide may be methylated to form 5-methylcytosine"
cagcttctacttcatattctaagtccctgaatgggattacagctgaaccacagcttacttcgctaaaaccttgacatcctgcctagaccttcctaaaggccagactgcgtctctagaaacct

SEQ ID NO: 1889 - DNA, 122 bp, Homo sapiens
  misc_feature (61)..(62): /note="This region represents a CpG dinucleotide"
  misc_feature (61)..(61): /note="Nucleotide may be methylated to form 5-methylcytosine"
ttcccagagggagcggtgccctggaggccacaggcctcctcatgtgtgtctgcgtccgctcgagcttactgagacactaaatctgttggtttctgctgtgccacctacccaccctgttggtg

SEQ ID NO: 1890 - DNA, 122 bp, Homo sapiens
  misc_feature (61)..(62): /note="This region represents a CpG dinucleotide"
  misc_feature (61)..(61): /note="Nucleotide may be methylated to form 5-methylcytosine"
ctcaaagttcaacaaaatgtggatgcgtcattttatttacacttcaatggccagaacttacgaaatggcctcatccagttgcaagaagtttgggaaatgtagccttccatatttacaggaat

SEQ ID NO: 1891 - DNA, 122 bp, Homo sapiens
  misc_feature (61)..(62): /note="This region represents a CpG dinucleotide"
  misc_feature (61)..(61): /note="Nucleotide may be methylated to form 5-methylcytosine"
gaggtaccccagcgcatcttgcggatcatgtgccgtctggaggagctgggccttgccgggcgctgcctcaccctgacaccgcgccctgccacagaggctgagctgctcacctgtcacaggtc

SEQ ID NO: 1892 - DNA, 122 bp, Homo sapiens
  misc_feature (61)..(62): /note="This region represents a CpG dinucleotide"
  misc_feature (61)..(61): /note="Nucleotide may be methylated to form 5-methylcytosine"
actagatgatggctggattctgtcagtctcaggtctaattaggagtcagcgatttggacgcgacaagcaatgttctcagtgagcttctcactcatggtcttgcagagctgagagcaataaag

SEQ ID NO: 1893 - DNA, 122 bp, Homo sapiens
  misc_feature (61)..(62): /note="This region represents a CpG dinucleotide"
  misc_feature (61)..(61): /note="Nucleotide may be methylated to form 5-methylcytosine"
tttctaaggaatcaaaactctcatctctaagaggtgtggcatcaatactgcctcccttgacgcagcccaagaaagcctttctcactctgaaaccaaggctgtgacccacaggcactgtgttt

SEQ ID NO: 1894 - DNA, 122 bp, Homo sapiens
  misc_feature (61)..(62): /note="This region represents a CpG dinucleotide"
  misc_feature (61)..(61): /note="Nucleotide may be methylated to form 5-methylcytosine"
ttggaagccccccgagggtgcgcgcgcgtgggtatgagtgcgtgcgtgtgcctgggtgtgcgtgtgtgtaagtgtgcacgtgtgtgtgtgagagtgcgcgcggggaaggaggcacagagaca

SEQ ID NO: 1895 - DNA, 122 bp, Homo sapiens
  misc_feature (61)..(62): /note="This region represents a CpG dinucleotide"
  misc_feature (61)..(61): /note="Nucleotide may be methylated to form 5-methylcytosine"
cacgccattggctcacaagctggccctaccacaccaccaggaggaatatatattgggcaacgactaatagcaatagaaaaactcatgcttctttctcctggcatgacttcatgtatatgaca

SEQ ID NO: 1896 - DNA, 122 bp, Homo sapiens
  misc_feature (61)..(62): /note="This region represents a CpG dinucleotide"
  misc_feature (61)..(61): /note="Nucleotide may be methylated to form 5-methylcytosine"
cctcagcaggggctgtccctggcctgctgaaacagttcagctgaccaggaagtgtgtgtgcgtggtgtcttttgtacagtctcagcccctgggtctgacactctgatggtcttttagggtgc

SEQ ID NO: 1897 - DNA, 122 bp, Homo sapiens
  misc_feature (61)..(62): /note="This region represents a CpG dinucleotide"
  misc_feature (61)..(61): /note="Nucleotide may be methylated to form 5-methylcytosine"
gatttcttaaattcttctattctcctaactcaaggcacttctgaatgggtgtttgcgagacgttgtttgaaaaaccacttatcgtgatggatttttgttcttctattttttgctctcttaca

SEQ ID NO: 1898 - DNA, 122 bp, Homo sapiens
  misc_feature (61)..(62): /note="This region represents a CpG dinucleotide"
  misc_feature (61)..(61): /note="Nucleotide may be methylated to form 5-methylcytosine"
ttgcaaatgaagggcatttaacatcttaaaccaccagtggctcaaaggcagcatgaagcccgtgggtaacaaagatgcatttgttgtcccagctgtcctggtacctgcattggcctatacag

SEQ ID NO: 1899 - DNA, 122 bp, Homo sapiens
  misc_feature (61)..(62): /note="This region represents a CpG dinucleotide"
  misc_feature (61)..(61): /note="Nucleotide may be methylated to form 5-methylcytosine"
acctttaataatctatgaacctggctgaattttctcaaaaaacctgctgcatctacaccccgcaggaacagcctgttaagcagtttgggctaccagctctcagcctccaagacagccgccca

SEQ ID NO: 1900 - DNA, 122 bp, Homo sapiens
  misc_feature (61)..(62): /note="This region represents a CpG dinucleotide"
  misc_feature (61)..(61): /note="Nucleotide may be methylated to form 5-methylcytosine"
gcctctgcaggcggttttcaaggcagccgtgtgtgcttgcatgtgaggcggcaaaaacagcgcgctgcagggccggcgcggtggctcacgcctgtaatcccagcactttgggaggcggaggc

SEQ ID NO: 1901 - DNA, 122 bp, Homo sapiens
  misc_feature (61)..(62): /note="This region represents a CpG dinucleotide"
  misc_feature (61)..(61): /note="Nucleotide may be methylated to form 5-methylcytosine"
ggatagcctggggtaagttctcagctttgcttgcccactgccaggaaacaaacttggtgccgttagcaggcacacggtggaagtgagactggcccttcagattgtgtgggagctgggtgagg

SEQ ID NO: 1902 - DNA, 122 bp, Homo sapiens
  misc_feature (61)..(62): /note="This region represents a CpG dinucleotide"
  misc_feature (61)..(61): /note="Nucleotide may be methylated to form 5-methylcytosine"
attgaatcatggggtggagtgctcatgaatgggttcgcgccatccactggcgctactgaacgggttagctggtactcatgaatgggttagcgccatccactggtgctatctcccagtctcag

SEQ ID NO: 1903 - DNA, 122 bp, Homo sapiens
  misc_feature (61)..(62): /note="This region represents a CpG dinucleotide"
  misc_feature (61)..(61): /note="Nucleotide may be methylated to form 5-methylcytosine"
caagccccaacattccaaagatatgaattagacagtctgtcatgcttatttctttggtaacgttgatcttttttaaagatcttaatacttccatgcaaataaagaatgtgacatgttttcaa

SEQ ID NO: 1904 - DNA, 122 bp, Homo sapiens
  misc_feature (61)..(62): /note="This region represents a CpG dinucleotide"
  misc_feature (61)..(61): /note="Nucleotide may be methylated to form 5-methylcytosine"
ctccctaattctaataaattgccttattttacagactctaaaggacttggactggcctaccgagtcaactgcaaaagatttgtgatgattatttcttttaagaagcatttgaagtgtattcc

SEQ ID NO: 1905 - DNA, 122 bp, Homo sapiens
  misc_feature (61)..(62): /note="This region represents a CpG dinucleotide"
  misc_feature (61)..(61): /note="Nucleotide may be methylated to form 5-methylcytosine"
aaaaagaaaaaaaaaatttaaatgtgcataccctgtgacccagcaactttcaatatttaccgtagagaggccaggtgcagtggctcatgcctgtaatcccagcactttgggaggccgaggtg

SEQ ID NO: 1906 - DNA, 122 bp, Homo sapiens
  misc_feature (61)..(62): /note="This region represents a CpG dinucleotide"
  misc_feature (61)..(61): /note="Nucleotide may be methylated to form 5-methylcytosine"
tcgcccacgctgcctgggaggcgcgcttctgccgccttcttgccgcgctcgctctagcctcgcccactcctgcggccttacagggccgaacctcaccctgccctgcggaaggcaggcctaca

SEQ ID NO: 1907 - DNA, 122 bp, Homo sapiens
  misc_feature (61)..(62): /note="This region represents a CpG dinucleotide"
  misc_feature (61)..(61): /note="Nucleotide may be methylated to form 5-methylcytosine"
gtgggccaggcagaccagaggagcaaacaaacttacttgccatctgctaggctgaggcctcggaagactggctgagagggaggttgaggccgcccagtctggtcttcatacaggaagcggac

SEQ ID NO: 1908 - DNA, 122 bp, Homo sapiens
  misc_feature (61)..(62): /note="This region represents a CpG dinucleotide"
  misc_feature (61)..(61): /note="Nucleotide may be methylated to form 5-methylcytosine"
tctagtgtttgttttctttgccaatactttacacatttccataaacaaatactcttttttcgtctctaataaaatccacatacctggtctcaaattactaaatcaaactgctcagtatgttt

SEQ ID NO: 1909 - DNA, 122 bp, Homo sapiens
  misc_feature (61)..(62): /note="This region represents a CpG dinucleotide"
  misc_feature (61)..(61): /note="Nucleotide may be methylated to form 5-methylcytosine"
acacaaagcctgtttggtggtctcttcacacagatgtgcatgaaatttggtgtggtgactcggatcgggggacctgcctcaggaaatcaatcccctgtcctcctgctctttgctccgtgaga

SEQ ID NO: 1910 - DNA, 122 bp, Homo sapiens
  misc_feature (61)..(62): /note="This region represents a CpG dinucleotide"
  misc_feature (61)..(61): /note="Nucleotide may be methylated to form 5-methylcytosine"
agctaagactcccagaacgtgggaaggaaaacgaggcccagcagaagagcaggagggcggcgctttccggtcgggccccggatttaactgtcttcacctacagaggccccaccccacccccc

SEQ ID NO: 1911 - DNA, 122 bp, Homo sapiens
  misc_feature (61)..(62): /note="This region represents a CpG dinucleotide"
  misc_feature (61)..(61): /note="Nucleotide may be methylated to form 5-methylcytosine"
cctgatcagggaacctgggttctataactgcttctactactgatttgtcctgtgacttcgcgcaccaaatttaggcttgtaaattaaactcccagatttctgttttccattttgcagctcta

SEQ ID NO: 1912 - DNA, 122 bp, Homo sapiens
  misc_feature (61)..(62): /note="This region represents a CpG dinucleotide"
  misc_feature (61)..(61): /note="Nucleotide may be methylated to form 5-methylcytosine"
ttcccacatgacgtgcgccaccgacacgcagaacgtcaaatttgtcttcgacgctgtcaccgacatcatcatcaaggagaacctcaaagactgtggcctcttctgaggtaggtcgctgccct

SEQ ID NO: 1913 - DNA, 122 bp, Homo sapiens
  misc_feature (61)..(62): /note="This region represents a CpG dinucleotide"
  misc_feature (61)..(61): /note="Nucleotide may be methylated to form 5-methylcytosine"
gtgaagtttttctgagacagttgttctggtgggctgcacagcaggtcttaggtagacaaccgagggggtaatgacagtaactccttgcacaagctcagtgctgttcactcgatagagcctgt

SEQ ID NO: 1914 - DNA, 122 bp, Homo sapiens
  misc_feature (61)..(62): /note="This region represents a CpG dinucleotide"
  misc_feature (61)..(61): /note="Nucleotide may be methylated to form 5-methylcytosine"
tgcctgtgtagacccagttgtgcacggtgtgccattttgcattctgatttcttaacaaagcgtgctgtcccccagccgccggcgtctccgcaggtggggtgctgtatttcctgtctgtgggt

SEQ ID NO: 1915 - DNA, 122 bp, Homo sapiens
  misc_feature (61)..(62): /note="This region represents a CpG dinucleotide"
  misc_feature (61)..(61): /note="Nucleotide may be methylated to form 5-methylcytosine"
tgcagaaacacaattttggaagaaagagagggagtgcttttgagtcatttttagtttctgcggcagcaggatttccaactggtataaagatagtcaggaatgaacagaaacagtgaagggcc

SEQ ID NO: 1916 - DNA, 122 bp, Homo sapiens
  misc_feature (61)..(62): /note="This region represents a CpG dinucleotide"
  misc_feature (61)..(61): /note="Nucleotide may be methylated to form 5-methylcytosine"
tcttctgggattgagtttggtaatccaccccttggagctaaacacagtagtatccttagtcgttgggatggtgggagagggagaagaggaaggatgaaggaaagggctctttgctagtatct

SEQ ID NO: 1917 - DNA, 122 bp, Homo sapiens
  misc_feature (61)..(62): /note="This region represents a CpG dinucleotide"
  misc_feature (61)..(61): /note="Nucleotide may be methylated to form 5-methylcytosine"
cccggcctggcacaccgtcccggaggcccatcccggccgctcctccaggtggggcttcaccgccccccgccccgcccccgagaccagcttctagaggcgccgcccggtttcccctcgcccct

SEQ ID NO: 1918 - DNA, 122 bp, Homo sapiens
  misc_feature (61)..(62): /note="This region represents a CpG dinucleotide"
  misc_feature (61)..(61): /note="Nucleotide may be methylated to form 5-methylcytosine"
ggactcaggttatgcgtttttggccagaattccacatgatcaggaggcacatgatgtcggcgtgcccagcaggggtgacggtgacgcccatggcctggccgaggtggtagccttttgctgct

SEQ ID NO: 1919 - DNA, 122 bp, Homo sapiens
  misc_feature (61)..(62): /note="This region represents a CpG dinucleotide"
  misc_feature (61)..(61): /note="Nucleotide may be methylated to form 5-methylcytosine"
cctgagctaggagatgcaggggcggggagtggggcacagcgctgccagcagaggctgagacgcacctgagaggggaggaagcttccgctcttctggcctcccggatccgccagggctcctgc

SEQ ID NO: 1920 - DNA, 122 bp, Homo sapiens
  misc_feature (61)..(62): /note="This region represents a CpG dinucleotide"
  misc_feature (61)..(61): /note="Nucleotide may be methylated to form 5-methylcytosine"
aaccgcccgggctgggggtgctgctgcgcggtgagacttccgcgggcggcgggcggagagcgggatttgactgcgaaagccaagggggcggggaaggggaagccccggccctcgggggcgcg

SEQ ID NO: 1921 - DNA, 122 bp, Homo sapiens
  misc_feature (61)..(62): /note="This region represents a CpG dinucleotide"
  misc_feature (61)..(61): /note="Nucleotide may be methylated to form 5-methylcytosine"
gttgataatctttgcttcaaacaatagaactagcttttaaaatcatgttgaaacacatgccgctctaagcagtgatttcaataaggactaaaacataaggcacatgagtttaaaatttgaaa

SEQ ID NO: 1922 - DNA, 122 bp, Homo sapiens
  misc_feature (61)..(62): /note="This region represents a CpG dinucleotide"
  misc_feature (61)..(61): /note="Nucleotide may be methylated to form 5-methylcytosine"
gaagtgtgctgcttgcagctctggaggtcagaagtccaagagcaaggtgccagcagattccgtgtctggtgaggccgcttcctgtttcatagacggtgccttctaactgagtcttcacagtg

SEQ ID NO: 1923 - DNA, 122 bp, Homo sapiens
  misc_feature (61)..(62): /note="This region represents a CpG dinucleotide"
  misc_feature (61)..(61): /note="Nucleotide may be methylated to form 5-methylcytosine"
attgcataagaactagatgcaagtggctttgtcacctgttcgctgcagggaagtcacacccgtccaaagggccaccagcatccacctggatctcatgaaccaaaggccagtgctcattgccc

SEQ ID NO: 1924 - DNA, 122 bp, Homo sapiens
  misc_feature (61)..(62): /note="This region represents a CpG dinucleotide"
  misc_feature (61)..(61): /note="Nucleotide may be methylated to form 5-methylcytosine"
caagcgtgaaaagactattctgtttgcaaaggcatttttcccatcctgcctggcttgtcacgttctgtgactggactcatgcacccagctggcagctgcaccagccagaccctgaggtaact

SEQ ID NO: 1925 - DNA, 122 bp, Homo sapiens
  misc_feature (61)..(62): /note="This region represents a CpG dinucleotide"
  misc_feature (61)..(61): /note="Nucleotide may be methylated to form 5-methylcytosine"
tgaatgagtgtagaggtcatcttagtcccctggggctcacaagtggtactagagaggcagcgtctaggatgacagcattaataactgcaatcattaatgaaccacttcctcactacgggcca

SEQ ID NO: 1926 - DNA, 122 bp, Homo sapiens
  misc_feature (61)..(62): /note="This region represents a CpG dinucleotide"
  misc_feature (61)..(61): /note="Nucleotide may be methylated to form 5-methylcytosine"
ccctagagactgttggctgagatcatagcagatagccaatcagtgttttccatctggctccgttacctgttgaattaatcttgccatctgcttattgtgaaagccaaaaagctaagtgttta

SEQ ID NO: 1927 - DNA, 122 bp, Homo sapiens
  misc_feature (61)..(62): /note="This region represents a CpG dinucleotide"
  misc_feature (61)..(61): /note="Nucleotide may be methylated to form 5-methylcytosine"
ttcccaagcctctttttggccagcatggtttggaggtgacctgaagattttactcagcaacgtggttttaggactgctgagagcagagacaacggctacccttactgcggcacgttcagtga

SEQ ID NO: 1928 - DNA, 122 bp, Homo sapiens
  misc_feature (61)..(62): /note="This region represents a CpG dinucleotide"
  misc_feature (61)..(61): /note="Nucleotide may be methylated to form 5-methylcytosine"
gacgcccgcgactggggactcggaacctgggccaggctgggacgaggccgcgcgggagggcgcgctgggcggacgctggggccgcggagcccaaccgcccttgtcctggacgccccttggcg

SEQ ID NO: 1929 - DNA, 122 bp, Homo sapiens
  misc_feature (61)..(62): /note="This region represents a CpG dinucleotide"
  misc_feature (61)..(61): /note="Nucleotide may be methylated to form 5-methylcytosine"
agggaggtgtaaggtaaatagttcttatcctcagataacctcacatttaatgctgtctcacgttatcttcagcagtacttttttgagatggacagaagtgttctctcttatagataaggaga

SEQ ID NO: 1930 - DNA, 122 bp, Homo sapiens
  misc_feature (61)..(62): /note="This region represents a CpG dinucleotide"
  misc_feature (61)..(61): /note="Nucleotide may be methylated to form 5-methylcytosine"
ttgaatcccagcctcaaatgcctatggaccttctgttctaactgttattataactgtagccgttattatagtggctaaagttctaacttctgttctaactgtgctcctggttccatgacaaa

SEQ ID NO: 1931 - DNA, 122 bp, Homo sapiens
  misc_feature (61)..(62): /note="This region represents a CpG dinucleotide"
  misc_feature (61)..(61): /note="Nucleotide may be methylated to form 5-methylcytosine"
tttgagactgagttcctcagggttgagagcactgctcattcaattttgtaatcccttccccgaggatgcattcaataatgttttgctgaactctttaatgaataaatgaaagcatgctgggg

SEQ ID NO: 1932 - DNA, 122 bp, Homo sapiens
  misc_feature (61)..(62): /note="This region represents a CpG dinucleotide"
  misc_feature (61)..(61): /note="Nucleotide may be methylated to form 5-methylcytosine"
tccaccttttaggagacagaaaactggctgttgtatccaaattaccgtttttctagcccgcggtttctgaacagtttcgtggatcttaagtctgagtttcagttaggctttcctccccactg

SEQ ID NO: 1933 - DNA, 122 bp, Homo sapiens
  misc_feature (61)..(62): /note="This region represents a CpG dinucleotide"
  misc_feature (61)..(61): /note="Nucleotide may be methylated to form 5-methylcytosine"
aattagaatattacaacagacaagtctgaagttacctaaatgaaataaatgagctactttcggggtaggatagtgggggaaccactgtccttaaatggatgtccttaagggagaaaatatct

SEQ ID NO: 1934 - DNA, 122 bp, Homo sapiens
  misc_feature (61)..(62): /note="This region represents a CpG dinucleotide"
  misc_feature (61)..(61): /note="Nucleotide may be methylated to form 5-methylcytosine"
tagagatcaataactctgtaacagaaatgcagaatgcctttgatgggcttattagtagaccggacatggctatggaaagaatctctgagcttcaagatatctcaacaaaagctgccaaaact

SEQ ID NO: 1935 - DNA, 122 bp, Homo sapiens
  misc_feature (61)..(62): /note="This region represents a CpG dinucleotide"
  misc_feature (61)..(61): /note="Nucleotide may be methylated to form 5-methylcytosine"
cacccattgcctactggtttatccgtttttctgagctgcagaagagctgggatgattcagcgtcttggggtggggtggagaggagacccaggacaggcagctattgggagcttaatggtaga

SEQ ID NO: 1936 - DNA, 122 bp, Homo sapiens
  misc_feature (61)..(62): /note="This region represents a CpG dinucleotide"
  misc_feature (61)..(61): /note="Nucleotide may be methylated to form 5-methylcytosine"
gttcacaatgagcctcaccccaccccggccccgcatcaccagttcctcttggtggcaccacgtgaccatacacactcttttggccacacaggagcctgtggggtcactgtctgtcctctgct

SEQ ID NO: 1937 - DNA, 122 bp, Homo sapiens
  misc_feature (61)..(62): /note="This region represents a CpG dinucleotide"
  misc_feature (61)..(61): /note="Nucleotide may be methylated to form 5-methylcytosine"
ggaagggaaagcaatgggaactcgtgtgaagaaatggattatataaacagagcttaccatcgcctgcgccccattatcctataatttaccctgcatgggagcatagaaatatattaaactag

SEQ ID NO: 1938 - DNA, 122 bp, Homo sapiens
  misc_feature (61)..(62): /note="This region represents a CpG dinucleotide"
  misc_feature (61)..(61): /note="Nucleotide may be methylated to form 5-methylcytosine"
gagaagcgccggcctcggggctgtctacagcggcccgggagaggctgtggtggccccgagcgcgagtgtgtaggtgacaggacagcggccaggcccgcccctcccctcggtgagtacccgga

SEQ ID NO: 1939 - DNA, 122 bp, Homo sapiens
  misc_feature (61)..(62): /note="This region represents a CpG dinucleotide"
  misc_feature (61)..(61): /note="Nucleotide may be methylated to form 5-methylcytosine"
gccgcggcgccgggaggctgggggcggagggcggcgcgggaggagcggcccgagccgcagcgctacggcggcccggcggggcctccagcgttcgcctgcagggcggcgtggggcgtggcggg

SEQ ID NO: 1940 - DNA, 122 bp, Homo sapiens
  misc_feature (61)..(62): /note="This region represents a CpG dinucleotide"
  misc_feature (61)..(61): /note="Nucleotide may be methylated to form 5-methylcytosine"
agaaaggtagattagggccacgagctgggtgtgggcacatgatgcaggtaagtctgctgccgctgctgttgactttgttatatcccaggaattatgatcaactctctggaaaaaacatgtat

SEQ ID NO: 1941 - DNA, 122 bp, Homo sapiens
  misc_feature (61)..(62): /note="This region represents a CpG dinucleotide"
  misc_feature (61)..(61): /note="Nucleotide may be methylated to form 5-methylcytosine"
aaggggtggggtcctgctgccttctccaagtggtttcagctctggatcctttgggggcaacggagcccacccgcctggagctccattactgatgctgcaagtttttgactcagtttccccat

SEQ ID NO: 1942 - DNA, 122 bp, Homo sapiens
  misc_feature (61)..(62): /note="This region represents a CpG dinucleotide"
  misc_feature (61)..(61): /note="Nucleotide may be methylated to form 5-methylcytosine"
gagaggagcggggacacgggcggggccgccgtagctccggatgggaccagcgcccgggcccgttagtccaagcaggagctccgggagaatccttcacagggagatttacccctgccttcccc

SEQ ID NO: 1943 - DNA, 122 bp, Homo sapiens
  misc_feature (61)..(62): /note="This region represents a CpG dinucleotide"
  misc_feature (61)..(61): /note="Nucleotide may be methylated to form 5-methylcytosine"
tttagtaagcctgcatcctcttttggtctcacgttggttataatctcatctttgagctctcgtctcgtggaactgatgttttaatgaggttattcctccgtgtggagcagtggtgaggaaca

SEQ ID NO: 1944 - DNA, 122 bp, Homo sapiens
  misc_feature (61)..(62): /note="This region represents a CpG dinucleotide"
  misc_feature (61)..(61): /note="Nucleotide may be methylated to form 5-methylcytosine"
gttttgatgctgtcctaagacccatttaaaataaggcatctttctggtgggtaacaaattcgtagtctatcaagctgggatcccactaacattggccaaactgctgcagacatgaagacttc

SEQ ID NO: 1945 - DNA, 122 bp, Homo sapiens
  misc_feature (61)..(62): /note="This region represents a CpG dinucleotide"
  misc_feature (61)..(61): /note="Nucleotide may be methylated to form 5-methylcytosine"
aatgacccttgcatttctgggataaatcacatatggtcatgatgtataatgcttttaatacgctgttcagtgtgatttgccagtattttcttgaggacttttgtatctgtattcgtaaggga

SEQ ID NO: 1946 - DNA, 122 bp, Homo sapiens
  misc_feature (61)..(62): /note="This region represents a CpG dinucleotide"
  misc_feature (61)..(61): /note="Nucleotide may be methylated to form 5-methylcytosine"
agcacagcctccaggaggcaggcttgggcatttctttatagcatcctaagatgattttaacgagcagttcaagttgagaagcactggcttagaatctgagagagagagaaatacatatgaaa

SEQ ID NO: 1947 - DNA, 122 bp, Homo sapiens
  misc_feature (61)..(62): /note="This region represents a CpG dinucleotide"
  misc_feature (61)..(61): /note="Nucleotide may be methylated to form 5-methylcytosine"
tggagacctaagtctggctcctcctcctctgctgtaagagttgtaatgggaaacctctgccgggaagggctggaagtggggggtgagggctgcataaggacactcctcactatggacaaggg

SEQ ID NO: 1948 - DNA, 122 bp, Homo sapiens
  misc_feature (61)..(62): /note="This region represents a CpG dinucleotide"
  misc_feature (61)..(61): /note="Nucleotide may be methylated to form 5-methylcytosine"
cacctccaaatccctgcccctcctattgcttaatgcctctctatctcctcctatcccctccggactattttgtgtggtgtgggttttctcgtggggccacacctttctagagtggtggttga

SEQ ID NO: 1949 - DNA, 122 bp, Homo sapiens
  misc_feature (61)..(62): /note="This region represents a CpG dinucleotide"
  misc_feature (61)..(61): /note="Nucleotide may be methylated to form 5-methylcytosine"
gacctcgccctcctccctggccggccttcccacccggaggggctcctcagccacgcactgcgtccagcaaaaccactaagtcagggaggccagggcgggcagcccattcatcgtcctcaccg

SEQ ID NO: 1950 - DNA, 122 bp, Homo sapiens
  misc_feature (61)..(62): /note="This region represents a CpG dinucleotide"
  misc_feature (61)..(61): /note="Nucleotide may be methylated to form 5-methylcytosine"
agtctgctagtgacactgtgagtcagggctgtggccttcccaggtgcttctgtttttccccgttaggttagacaggatagctacagggtgctggagttgcgtatttccattcccctaggtca

SEQ ID NO: 1951 - DNA, 122 bp, Homo sapiens
  misc_feature (61)..(62): /note="This region represents a CpG dinucleotide"
  misc_feature (61)..(61): /note="Nucleotide may be methylated to form 5-methylcytosine"
tatcaagttggcaatgagtagcatagaccaaatgtcaactttctgatctgatttcccaaacgtacaccctcaaaaccacaaggtaaataaataatgccttgagtcagcaaaaggggacaaaa

SEQ ID NO: 1952 - DNA, 122 bp, Homo sapiens
  misc_feature (61)..(62): /note="This region represents a CpG dinucleotide"
  misc_feature (61)..(61): /note="Nucleotide may be methylated to form 5-methylcytosine"
tggaacacgccgtaaaacactgcacaaaatgcttactgctcccaggtttagtttcctcaccggaaaatggagctaacactcccttcactgaattctccttaaggctgaagaatagataagtg

SEQ ID NO: 1953 - DNA, 122 bp, Homo sapiens
  misc_feature (61)..(62): /note="This region represents a CpG dinucleotide"
  misc_feature (61)..(61): /note="Nucleotide may be methylated to form 5-methylcytosine"
ggggaatagggaaatggaagttgttgtgtaatgagtacagagctacagtcattaagtcagcgtaacatccatttgcaacatgaaaagagttctggagatgagtgtttgcacaacagtgtgaa

SEQ ID NO: 1954 - DNA, 122 bp, Homo sapiens
  misc_feature (61)..(62): /note="This region represents a CpG dinucleotide"
  misc_feature (61)..(61): /note="Nucleotide may be methylated to form 5-methylcytosine"
gcggtccccgcgcattagaggtgaatcagacacttgaacatctgtccacttcatggaagacgtttcatctcagaatacacgtactaataaacaacagttggagacaattgtctctgacattc

SEQ ID NO: 1955 - DNA, 122 bp, Homo sapiens
  misc_feature (61)..(62): /note="This region represents a CpG dinucleotide"
  misc_feature (61)..(61): /note="Nucleotide may be methylated to form 5-methylcytosine"
attccatttatatgaaatatccagaacaggcaaatccattggttgctgcctggggcaaggcgagtgggaaatggggagcaattgcttaatggatttgagatttcctcttggggtgatgaaat

SEQ ID NO: 1956 - DNA, 122 bp, Homo sapiens
  misc_feature (61)..(62): /note="This region represents a CpG dinucleotide"
  misc_feature (61)..(61): /note="Nucleotide may be methylated to form 5-methylcytosine"
tacccagaatccttgggcaagctagatggctgccaaagtttacttagcgagatgtgcctgcgtgacttgagtagagacctgcttctgagaaagtcagaagtgcattccaaagtcaggagcgt

SEQ ID NO: 1957 - DNA, 122 bp, Homo sapiens
  misc_feature (61)..(62): /note="This region represents a CpG dinucleotide"
  misc_feature (61)..(61): /note="Nucleotide may be methylated to form 5-methylcytosine"
ttatactgcccgggaacgaggctgaaggacccggatggaaacggagcttagaatttgaaacgcaaagggaggggggaagtagttcccagtctccccattggctggctcctctgtcattcacc

SEQ ID NO: 1958 - DNA, 122 bp, Homo sapiens
  misc_feature (61)..(62): /note="This region represents a CpG dinucleotide"
  misc_feature (61)..(61): /note="Nucleotide may be methylated to form 5-methylcytosine"
aatgttgttgagcatggttttggagtttttcctccttgtgaaattttgcactgtcagtgtcgatgctgttattagcattcatgctcacaagataaaggcactgctgaagagttatgtgtttc

SEQ ID NO: 1959 - DNA, 122 bp, Homo sapiens
  misc_feature (61)..(62): /note="This region represents a CpG dinucleotide"
  misc_feature (61)..(61): /note="Nucleotide may be methylated to form 5-methylcytosine"
ggccagctccaggcacactgcatggcgcttcctcaactcagaaggccccggagggtctgacgcaaaggaggaccactgcagccagtgtctgccagggcaccaagatcaaaggcagcctcacc

SEQ ID NO: 1960 - DNA, 122 bp, Homo sapiens
  misc_feature (61)..(62): /note="This region represents a CpG dinucleotide"
  misc_feature (61)..(61): /note="Nucleotide may be methylated to form 5-methylcytosine"
tcaagggtgtggaaattcagtttgggaggattaaaaagttctggagatggacggtggtgacggatgcacagcagtgtgaacggaggcgatgccactgaaccatacaattacaaacggttaaa

SEQ ID NO: 1961 - DNA, 122 bp, Homo sapiens
  misc_feature (61)..(62): /note="This region represents a CpG dinucleotide"
  misc_feature (61)..(61): /note="Nucleotide may be methylated to form 5-methylcytosine"
tcttcctaatgttgtgaataggaattcattccagctatgcttgttggcacacctcaagcacggtccagggctcaggaacatatcggtcttatgcagctcttggatgcttaccacaaaaggag

SEQ ID NO: 1962 - DNA, 122 bp, Homo sapiens
  misc_feature (61)..(62): /note="This region represents a CpG dinucleotide"
  misc_feature (61)..(61): /note="Nucleotide may be methylated to form 5-methylcytosine"
aagtcagaaatgcatttaataccccaataaacccatcataaagtcaaaaaactgttaagtcgaggtatggtaacttggggattatttgtacttgttagatcatcaaattcagagtcactatc

SEQ ID NO: 1963 - DNA, 122 bp, Homo sapiens
  misc_feature (61)..(62): /note="This region represents a CpG dinucleotide"
  misc_feature (61)..(61): /note="Nucleotide may be methylated to form 5-methylcytosine"
tcctttcacttctgcttaagcgccacctaagccactgcttttgtctccctccggttcccacgctccgagatcgtatcacccacagaaaaacaataactaaaaagcggtctccatccctgaag

SEQ ID NO: 1964 - DNA, 122 bp, Homo sapiens
  misc_feature (61)..(62): /note="This region represents a CpG dinucleotide"
  misc_feature (61)..(61): /note="Nucleotide may be methylated to form 5-methylcytosine"
tctaggaagctgcactaatgcagatgttgcgttctcagcctgctcatagagtgtgttaaacgtgagaggtggggagtgtggcaggcaggctgaggacagaacagaggatctgaatagcatgc

SEQ ID NO: 1965 - DNA, 122 bp, Homo sapiens
  misc_feature (61)..(62): /note="This region represents a CpG dinucleotide"
  misc_feature (61)..(61): /note="Nucleotide may be methylated to form 5-methylcytosine"
ggcatttgttccaaaacacagctggataaaccgagaaccttcggagtggttgcaccgaaacggggtcacccagcacctcagcgtcctgggctctagcaagcctcacagaagcaaccggcagt

SEQ ID NO: 1966 - DNA, 122 bp, Homo sapiens
  misc_feature (61)..(62): /note="This region represents a CpG dinucleotide"
  misc_feature (61)..(61): /note="Nucleotide may be methylated to form 5-methylcytosine"
ttattttggattgtcgtgtgcccaaataaaaagtgtatcgcaatgtgagaaggagagggccgctattgggagaactagttccctctgctaagtgacctttctagttgctttcatggctccaa

SEQ ID NO: 1967 - DNA, 122 bp, Homo sapiens
  misc_feature (61)..(62): /note="This region represents a CpG dinucleotide"
  misc_feature (61)..(61): /note="Nucleotide may be methylated to form 5-methylcytosine"
cgcatctgtctggagtggtgagtacctggaccctcccatccctgcaggctgctggtggaccggttctcaggccggttctgggcctggctggaacgggaggagttcctggtccccaagaatgt

SEQ ID NO: 1968 - DNA, 122 bp, Homo sapiens
  misc_feature (61)..(62): /note="This region represents a CpG dinucleotide"
  misc_feature (61)..(61): /note="Nucleotide may be methylated to form 5-methylcytosine"
gttacatacaataaaatatgcccttttgaatgtgtagtcctatgagttttgacaagcactcgtggttatgtaatgatcactactaccatgatcaagatatagaatatttttatcacctctca

SEQ ID NO: 1969 - DNA, 122 bp, Homo sapiens
  misc_feature (61)..(62): /note="This region represents a CpG dinucleotide"
  misc_feature (61)..(61): /note="Nucleotide may be methylated to form 5-methylcytosine"
cataccagaatatttataaaatccaatttttgctgagcccttactacatggcaatcactacgttctgtgccccacatgtcttgtttcagttaatcatcacaaccaccccacaaggcagagac

SEQ ID NO: 1970 - DNA, 122 bp, Homo sapiens
  misc_feature (61)..(62): /note="This region represents a CpG dinucleotide"
  misc_feature (61)..(61): /note="Nucleotide may be methylated to form 5-methylcytosine"
cgaaggttccgaccttcggggacttgctggaaggctgacacgttgcccttggcaggggcccggtttcttcctgtgccaacagtaagagagtaagatcatgttggtttcagatcttgattctt

SEQ ID NO: 1971 - DNA, 122 bp, Homo sapiens
  misc_feature (61)..(62): /note="This region represents a CpG dinucleotide"
  misc_feature (61)..(61): /note="Nucleotide may be methylated to form 5-methylcytosine"
ccctctgaatgcagagatttgtactgggccaaccgaggggcagggcaagctcagtgcacccgggctgtgtgggtgccacgacctctaccaatggagggcaaccctgggcacctgtgtatttc

SEQ ID NO: 1972 - DNA, 122 bp, Homo sapiens
  misc_feature (61)..(62): /note="This region represents a CpG dinucleotide"
  misc_feature (61)..(61): /note="Nucleotide may be methylated to form 5-methylcytosine"
gcttgctgcacagcctgcgtggtcctcgggaacactaagctcatggtgtacaaaagtgagcgcacctgccctccgtccccagctgccgctcccccagaggccccgtctccggtggggccgtc

SEQ ID NO: 1973 - DNA, 122 bp, Homo sapiens
  misc_feature (61)..(62): /note="This region represents a CpG dinucleotide"
  misc_feature (61)..(61): /note="Nucleotide may be methylated to form 5-methylcytosine"
ttactattgttaccgtggggtcgctcctgttcctgtaaatgctgaaagctactctggattcgtagcccaaagcgaacttccttctacacacactcactctggttccaccacagctgtgctgg

SEQ ID NO: 1974 - DNA, 122 bp, Homo sapiens
  misc_feature (61)..(62): /note="This region represents a CpG dinucleotide"
  misc_feature (61)..(61): /note="Nucleotide may be methylated to form 5-methylcytosine"
tcttcagaccgatttgcctgaaaagttggtgacattccccacctttggaaataacctgaacgcctcattgttttcaaaaggattcatttgcccctccttgctccccacagtgcccttgggga

SEQ ID NO: 1975 - DNA, 122 bp, Homo sapiens
  misc_feature (61)..(62): /note="This region represents a CpG dinucleotide"
  misc_feature (61)..(61): /note="Nucleotide may be methylated to form 5-methylcytosine"
agggctgcagagtaagaggatgtggaagggcaggaaccgggggcagggtgccactttaaacgatgtggtcaagcacggcctcacggaggtgacatttcagggatgacctagcaagttgggaa

SEQ ID NO: 1976 - DNA, 122 bp, Homo sapiens
  misc_feature (61)..(62): /note="This region represents a CpG dinucleotide"
  misc_feature (61)..(61): /note="Nucleotide may be methylated to form 5-methylcytosine"
agtcactcacatctaccatccccgctatgccatttctagcctggtctggtttttagggggcggcttccagcctggcgagcgtctatcaccagctctgtccagcaagccagaccccctcaaag

SEQ ID NO: 1977 - DNA, 122 bp, Homo sapiens
  misc_feature (61)..(62): /note="This region represents a CpG dinucleotide"
  misc_feature (61)..(61): /note="Nucleotide may be methylated to form 5-methylcytosine"
gctgctgattgtaaagaagcgcctgacaatgcagacacggctgagtgcatcctgtgtaaccggcgcatgcgcgcccagaggcgccccacacgctcttcaaggttagagcgggaatgcagagg

SEQ ID NO: 1978 - DNA, 122 bp, Homo sapiens
  misc_feature (61)..(62): /note="This region represents a CpG dinucleotide"
  misc_feature (61)..(61): /note="Nucleotide may be methylated to form 5-methylcytosine"
tccacttcgtcagggcctcagctctttcctggtgattcctgtgggctgatgtacccatcacggggcacagagtgggacgcctgccatgccgtcctccctgcaaaccacagccaacgtccagg

SEQ ID NO: 1979 - DNA, 122 bp, Homo sapiens
  misc_feature (61)..(62): /note="This region represents a CpG dinucleotide"
  misc_feature (61)..(61): /note="Nucleotide may be methylated to form 5-methylcytosine"
gccagtctcaaatgtatcatgatatgggtgacaatgacacaataatgacatggtcaccttcgtctaaggccctgctctctcctctccctgcctggcacactgaccggctgactcatggtgtt

SEQ ID NO: 1980 - DNA, 122 bp, Homo sapiens
  misc_feature (61)..(62): /note="This region represents a CpG dinucleotide"
  misc_feature (61)..(61): /note="Nucleotide may be methylated to form 5-methylcytosine"
cattagcctaaatacttctgtcttagtcagctcagactgtgcaacttttataaacaacatcgattcattgcttacagttctggaggttgggaagtccaaggtcaaggcactggcagattcgg

SEQ ID NO: 1981 - DNA, 122 bp, Homo sapiens
  misc_feature (61)..(62): /note="This region represents a CpG dinucleotide"
  misc_feature (61)..(61): /note="Nucleotide may be methylated to form 5-methylcytosine"
taaagattctactttctgctgactgctccgtgtgtaggtccgtcactttcaaagtttaggcgttttcaatcatctttaattttttgctggatcctcttgggtcttccttgcatgtgcaagga

SEQ ID NO: 1982 - DNA, 122 bp, Homo sapiens
  misc_feature (61)..(62): /note="This region represents a CpG dinucleotide"
  misc_feature (61)..(61): /note="Nucleotide may be methylated to form 5-methylcytosine"
accttttgcggcaggagaatgggggtgttgataaagctgacggcacgtcgcttccggccccgccctcagcagacagcggagctctcactccacccggcactgcgaccactttaacagacctg

SEQ ID NO: 1983 - DNA, 122 bp, Homo sapiens
  misc_feature (61)..(62): /note="This region represents a CpG dinucleotide"
  misc_feature (61)..(61): /note="Nucleotide may be methylated to form 5-methylcytosine"
cgtcgccaacaagcggtgctaccaggagaaacgcctgcttttgaagaaaacagccaggaacgcgactgaaagacacttgctcccaggaagaattggcatttgttccaaaacacagctggata

SEQ ID NO: 1984 - DNA, 122 bp, Homo sapiens
  misc_feature (61)..(62): /note="This region represents a CpG dinucleotide"
  misc_feature (61)..(61): /note="Nucleotide may be methylated to form 5-methylcytosine"
gtaaacacagttgttaaatctactgtgtccttaatttttccactaatggttttcttttttcgaagtttataatgttcccaacctgattaaaacacttcatggcaacctttcttggattgtac

SEQ ID NO: 1985 - DNA, 122 bp, Homo sapiens
  misc_feature (61)..(62): /note="This region represents a CpG dinucleotide"
  misc_feature (61)..(61): /note="Nucleotide may be methylated to form 5-methylcytosine"
ctggagactcagctgaaagctgtgagcccccaacactttctgcaccaggggacatctggacgtatttcacagagccactatagttatatagaaagatatatgtttctttattaacactttaa

SEQ ID NO: 1986 - DNA, 122 bp, Homo sapiens
  misc_feature (61)..(62): /note="This region represents a CpG dinucleotide"
  misc_feature (61)..(61): /note="Nucleotide may be methylated to form 5-methylcytosine"
gtcactgattctgcatttgtcaaagatctttcattctgtggggccaggtgaggtgttaaacgtgacggcccccagagccttccctccccacagacccccggcaggggtggagggggctcagg

SEQ ID NO: 1987 - DNA, 122 bp, Homo sapiens
  misc_feature (61)..(62): /note="This region represents a CpG dinucleotide"
  misc_feature (61)..(61): /note="Nucleotide may be methylated to form 5-methylcytosine"
cgtcccttccaccttccctggttcattggcttggagccatgagcgcggccagtggctccgcggctcccggagggacgctgggggtttgccctgggagtagggtgcaggaggttccacggacg

SEQ ID NO: 1988 - DNA, 122 bp, Homo sapiens
  misc_feature (61)..(62): /note="This region represents a CpG dinucleotide"
  misc_feature (61)..(61): /note="Nucleotide may be methylated to form 5-methylcytosine"
tgttttcttcattccttataactccttcccctaatattatatgtaacttgagctgttcctcggaaccaaaagagcctgacgaaaacactctaaatggccccagattgttttttttttttttt

SEQ ID NO: 1989 - DNA, 122 bp, Homo sapiens
  misc_feature (61)..(62): /note="This region represents a CpG dinucleotide"
  misc_feature (61)..(61): /note="Nucleotide may be methylated to form 5-methylcytosine"
actatttagcatctgcatctttaaaaaaaagggtccctggctgattaactgtaatatgatcgtagaaacaagaaatatggtgaattgattgacatagtgatgaaaaactgtaatcagcaaat

SEQ ID NO: 1990 - DNA, 122 bp, Homo sapiens
  misc_feature (61)..(62): /note="This region represents a CpG dinucleotide"
  misc_feature (61)..(61): /note="Nucleotide may be methylated to form 5-methylcytosine"
gtaagaggaggaaaacaattgagaacataacgattgtgacttcgtcagccgttcccccgacgcctctggaaactggccatttcgtttttgagtaagggcaagaagtgtcctgctcaagccac

SEQ ID NO: 1991 - DNA, 122 bp, Homo sapiens
  misc_feature (61)..(62): /note="This region represents a CpG dinucleotide"
  misc_feature (61)..(61): /note="Nucleotide may be methylated to form 5-methylcytosine"
aaaccagatctatgagttgagaatgggaacactgttaggcccagcacgcattgtgtctcacgcttgtaatcccagcactctgggaggccgagaagggtggatcacattaagtcaggagtttg

SEQ ID NO: 1992 - DNA, 122 bp, Homo sapiens
  misc_feature (61)..(62): /note="This region represents a CpG dinucleotide"
  misc_feature (61)..(61): /note="Nucleotide may be methylated to form 5-methylcytosine"
actgagctggtcgaaaataatctgcacccagtgagcacagcaaattagcacaccctcaatcgttggcatcaggggacatttaagctccacttgcctgtgacacggcagtgtgctgagccccg

SEQ ID NO: 1993 - DNA, 122 bp, Homo sapiens
  misc_feature (61)..(62): /note="This region represents a CpG dinucleotide"
  misc_feature (61)..(61): /note="Nucleotide may be methylated to form 5-methylcytosine"
ccttgtctgtttaacttagttcagtgaaatttttgcttggacagtttggagaaaagaaaacggtaatttccctcagcagtgtttataaaatgcttttgggaaattatcattattgaacattt

SEQ ID NO: 1994 - DNA, 122 bp, Homo sapiens
  misc_feature (61)..(62): /note="This region represents a CpG dinucleotide"
  misc_feature (61)..(61): /note="Nucleotide may be methylated to form 5-methylcytosine"
aatccagcacttctgctgcacggcagcgtgacagttgacggcagggggcgctcatgcggtcgttggagtgagagttcgctgcctactttttggtagctcttcgcttctaattgagagaatga

SEQ ID NO: 1995 - DNA, 122 bp, Homo sapiens
  misc_feature (61)..(62): /note="This region represents a CpG dinucleotide"
  misc_feature (61)..(61): /note="Nucleotide may be methylated to form 5-methylcytosine"
gcaccgacccatacatagcttaatggtttatgtcagtgtgttactatagctatttgctggcgataagcatcgtaaggaaatgaaaggcttttggttgcaattctcctgtggttctgtccagt

SEQ ID NO: 1996 - DNA, 122 bp, Homo sapiens
  misc_feature (61)..(62): /note="This region represents a CpG dinucleotide"
  misc_feature (61)..(61): /note="Nucleotide may be methylated to form 5-methylcytosine"
tttgggttgtttccagtttgcaactattacaagttacacttctcagagcattcctttaggcggcttttggtagacatgggcactcatatctctagggtgtataccctggagtggaatggctg

SEQ ID NO: 1997 - DNA, 122 bp, Homo sapiens
  misc_feature (61)..(62): /note="This region represents a CpG dinucleotide"
  misc_feature (61)..(61): /note="Nucleotide may be methylated to form 5-methylcytosine"
ttgcacaggaatcatcacagcagtaaaaactctccaaagaggaataagagaagtctaattcgggtcagatcttcagagacaggtaagataagcctgcaatacaaggtttcctggaggcctaa

SEQ ID NO: 1998 - DNA, 122 bp, Homo sapiens
  misc_feature (61)..(62): /note="This region represents a CpG dinucleotide"
  misc_feature (61)..(61): /note="Nucleotide may be methylated to form 5-methylcytosine"
ggtcttatgctcactagttcctaagcctgggtgttgtagtcagcataataacttgcttaacgttttattcttcaggacttctagccacagaagagtgagctatactagcaatcaaactttga

SEQ ID NO: 1999 - DNA, 122 bp, Homo sapiens
  misc_feature (61)..(62): /note="This region represents a CpG dinucleotide"
  misc_feature (61)..(61): /note="Nucleotide may be methylated to form 5-methylcytosine"
tacagtttgggcaaaaggaataccaccaggcaaattgttttcaaatctatctaatttcttcgagacttttcctgtttgtttttctaaaatcaccttctctccttccatggcaacaggacaag

SEQ ID NO: 2000 - DNA, 122 bp, Homo sapiens
  misc_feature (61)..(62): /note="This region represents a CpG dinucleotide"
  misc_feature (61)..(61): /note="Nucleotide may be methylated to form 5-methylcytosine"
tacagtgttactcatgatctcattgagtaatgataatgccatccatgacaatgtcaaaaacgtgttttttttggatgggtgtggtggctcatgcctgtaatcccagcactttgaggagccga

SEQ ID NO: 2001 - DNA, 122 bp, Homo sapiens
  misc_feature (61)..(62): /note="This region represents a CpG dinucleotide"
  misc_feature (61)..(61): /note="Nucleotide may be methylated to form 5-methylcytosine"
gtcagtttaacagattctgcctccgggaaccaactgccgggagattctgattggctcagccgcgtgcccacgtgaccgaccaaaaccggccaccagggtctcccaactgcctgtcaaacgca

SEQ ID NO: 2002 - DNA, 122 bp, Homo sapiens
  misc_feature (61)..(62): /note="This region represents a CpG dinucleotide"
  misc_feature (61)..(61): /note="Nucleotide may be methylated to form 5-methylcytosine"
tggctccggggctgggtctgaggctccgttctcaaccaggaagcacagggctgggctgctcgctgttggtttcggtaacttcttctcccaggaagggccctgctccaggggcttgcagtggc

SEQ ID NO: 2003 - DNA, 122 bp, Homo sapiens
  misc_feature (61)..(62): /note="This region represents a CpG dinucleotide"
  misc_feature (61)..(61): /note="Nucleotide may be methylated to form 5-methylcytosine"
aaaccaccagctcatctggctggaatctcatttgtaatgagcatttgccaaagctggctacgttttttggtttctcatctgcctggccctcctgatttattgatgtgtttgactttctccat

SEQ ID NO: 2004 - DNA, 122 bp, Homo sapiens
  misc_feature (61)..(62): /note="This region represents a CpG dinucleotide"
  misc_feature (61)..(61): /note="Nucleotide may be methylated to form 5-methylcytosine"
acctaccatttctaatactagcaatacatatatgatcctcccacgatatattttcttcttcgtgaaaaaaaagcaaggtgctgaactgtaaaaatattaatatattggcatttgtcttattt

SEQ ID NO: 2005 - DNA, 122 bp, Homo sapiens
  misc_feature (61)..(62): /note="This region represents a CpG dinucleotide"
  misc_feature (61)..(61): /note="Nucleotide may be methylated to form 5-methylcytosine"
cgcggtcggaagccaccatgcccaagaacggatggctgctgattacacccgcttgcccgccgaatccttacccgctcccgcttcggtgatggccgcaaaagggaagagaactacacgctgct

SEQ ID NO: 2006 - DNA, 122 bp, Homo sapiens
  misc_feature (61)..(62): /note="This region represents a CpG dinucleotide"
  misc_feature (61)..(61): /note="Nucleotide may be methylated to form 5-methylcytosine"
aggccagtggtgatagcagaaattataacttctgggcctagggcttctgccccagatgaccgcaaacccattgtatactgcaaaagaaaactacttgccttagtatgtgggttcctcaagta

SEQ ID NO: 2007 - DNA, 122 bp, Homo sapiens
  misc_feature (61)..(62): /note="This region represents a CpG dinucleotide"
  misc_feature (61)..(61): /note="Nucleotide may be methylated to form 5-methylcytosine"
atgaattatatttacttatatgccaagaccagctcagtttgggagactctaacccagtggcgctagaggaattaaagacacatacacagaaatatagaggtgtgaagtgggaaatcaggggt

SEQ ID NO: 2008 - DNA, 122 bp, Homo sapiens
  misc_feature (61)..(62): /note="This region represents a CpG dinucleotide"
  misc_feature (61)..(61): /note="Nucleotide may be methylated to form 5-methylcytosine"
aaaaagcttctgtgcatgtatgtgtgggggtgggaggaagaacagaaaagggaacagtgccgccctagcaaatcaaaagtttaagatgcatggactgagatgacatcattggcggattatca

SEQ ID NO: 2009 - DNA, 122 bp, Homo sapiens
  misc_feature (61)..(62): /note="This region represents a CpG dinucleotide"
  misc_feature (61)..(61): /note="Nucleotide may be methylated to form 5-methylcytosine"
tagcctataaggtaggtatgattaatgtccccatcttgcagatgaggaaggtgaggcacacgggaattaagtatcctgccccaagtcacttagtgagtggcagagtgagtattcaacacaga

SEQ ID NO: 2010 - DNA, 122 bp, Homo sapiens
  misc_feature (61)..(62): /note="This region represents a CpG dinucleotide"
  misc_feature (61)..(61): /note="Nucleotide may be methylated to form 5-methylcytosine"
tgacaacgggactcccactgaagccctcacaggagcctcattcaccctaaataagaatgacgatgttgccaaagataggtcacaactaagatatcaacctcaaagcctaccccaaaggaggg

SEQ ID NO: 2011 - DNA, 122 bp, Homo sapiens
  misc_feature (61)..(62): /note="This region represents a CpG dinucleotide"
  misc_feature (61)..(61): /note="Nucleotide may be methylated to form 5-methylcytosine"
gggcaatcagtgtagctagcattaagggctctggccaggcctcccttccccaaactgccacggtctccaaccatgtcttgacctcccagagtttgttagggaagatgggaccttatgggatc

SEQ ID NO: 2012 - DNA, 122 bp, Homo sapiens
  misc_feature (61)..(62): /note="This region represents a CpG dinucleotide"
  misc_feature (61)..(61): /note="Nucleotide may be methylated to form 5-methylcytosine"
atatgcccatgaaggctggagatgtgctggtctaaatcttggtccacggaaagttccatacgaccctggctaacagaggggtgtggtctgcatggtctgcagtcacacatgactgggctcag

SEQ ID NO: 2013 - DNA, 122 bp, Homo sapiens
  misc_feature (61)..(62): /note="This region represents a CpG dinucleotide"
  misc_feature (61)..(61): /note="Nucleotide may be methylated to form 5-methylcytosine"
cacctcccctaatgcagtgcttgctgtgatcccgcccctgggggaatccctgtccttagacgcagccaactcacctctcttcttgtaacaatagcaacagcaatgctatccagctttttttt

SEQ ID NO: 2014 - DNA, 122 bp, Homo sapiens
  misc_feature (61)..(62): /note="This region represents a CpG dinucleotide"
  misc_feature (61)..(61): /note="Nucleotide may be methylated to form 5-methylcytosine"
taatcagctgcttcagccaaggagatgagagatcagcctcaaatccgtctccttgactaacgaaaattaggagtttacatagcaggtacaaaatgtaaccatgtatgggaagacaggaaata

SEQ ID NO: 2015 - DNA, 122 bp, Homo sapiens
  misc_feature (61)..(62): /note="This region represents a CpG dinucleotide"
  misc_feature (61)..(61): /note="Nucleotide may be methylated to form 5-methylcytosine"
aggagaaggaggaaggtttttgtttcttctccagcagctggatttagaaaagaagacaggcgtgaaatgtgtgggtagatctgtttcaacaatggcaagaactaccaattgtgtaatccagt

SEQ ID NO: 2016 - DNA, 122 bp, Homo sapiens
  misc_feature (61)..(62): /note="This region represents a CpG dinucleotide"
  misc_feature (61)..(61): /note="Nucleotide may be methylated to form 5-methylcytosine"
agctggcagcccatacaactatgcagaaggtgaaagagagaaggcgggaccatgaacacgcgttttaattactgcatgtttgtttctgacagagagaggtcagtgtttgcctccatttgcag

SEQ ID NO: 2017 - DNA, 122 bp, Homo sapiens
  misc_feature (61)..(62): /note="This region represents a CpG dinucleotide"
  misc_feature (61)..(61): /note="Nucleotide may be methylated to form 5-methylcytosine"
gactaatatatgaatcataattaaaattgaacttcagttacgctaacaagtccactgaaacgtagctggagtaactaactgcagcaaaacttggttcaatgtagaaatctaaaacttaaagc

SEQ ID NO: 2018 - DNA, 122 bp, Homo sapiens
  misc_feature (61)..(62): /note="This region represents a CpG dinucleotide"
  misc_feature (61)..(61): /note="Nucleotide may be methylated to form 5-methylcytosine"
attcaggggcatgcaatctagtaggttaggggacaggacagacacaccatgataggtgatcgagaccttttaagagcagtgtgatgaaattgctatgggaactgggaggaaacattttctag

SEQ ID NO: 2019 - DNA, 122 bp, Homo sapiens
  misc_feature (61)..(62): /note="This region represents a CpG dinucleotide"
  misc_feature (61)..(61): /note="Nucleotide may be methylated to form 5-methylcytosine"
gtgcttctgtcccaggcatcctccttaatcctttgacatgagcagccctagaggttgcctcgtgttgtcaccatccttagtcatttaatcaacatatttttatggaaagtctctatgtgctg

SEQ ID NO: 2020 - DNA, 122 bp, Homo sapiens
  misc_feature (61)..(62): /note="This region represents a CpG dinucleotide"
  misc_feature (61)..(61): /note="Nucleotide may be methylated to form 5-methylcytosine"
atgaatgactgttaggaaagattcctgaaggaattcactaggtggcactctttcttctttcgcagtgtcttcataataagcggcagaatatttggaattattgatgaatttttgagtttcct

SEQ ID NO: 2021 - DNA, 122 bp, Homo sapiens
  misc_feature (61)..(62): /note="This region represents a CpG dinucleotide"
  misc_feature (61)..(61): /note="Nucleotide may be methylated to form 5-methylcytosine"
aaaaattgtggtaaagtatacataacataaaatttaccattttaaccatttttaagtatacggttcagtggcactgagtccgttcacattgttaagcaactgccaccaccatccatccacag

SEQ ID NO: 2022 - DNA, 122 bp, Homo sapiens
  misc_feature (61)..(62): /note="This region represents a CpG dinucleotide"
  misc_feature (61)..(61): /note="Nucleotide may be methylated to form 5-methylcytosine"
tggcctcgtctccattttacatgaactgttgcataaataaacacagagtacctgaaacaacggaggtgatcattctgcctaccgagtgttggccaggccaagcttggagtgttgctcttatt

SEQ ID NO: 2023 - DNA, 122 bp, Homo sapiens
  misc_feature (61)..(62): /note="This region represents a CpG dinucleotide"
  misc_feature (61)..(61): /note="Nucleotide may be methylated to form 5-methylcytosine"
aaaacaggagggtggtatgtgtgtctagcattctgccttttcagggggcttcctgagggacgagtttttgcctcatctgattcagagtcctaatgggaaaccaacataccttgtttgcttag

SEQ ID NO: 2024 - DNA, 122 bp, Homo sapiens
  misc_feature (61)..(62): /note="This region represents a CpG dinucleotide"
  misc_feature (61)..(61): /note="Nucleotide may be methylated to form 5-methylcytosine"
gccagagctctccttccttttgcatttcatcaattgaatttctgtttgtcttcttgtacacgataagaaactgaaaaggggctaggtagaagtcagctcagcaccctgccagaagtaagggc

SEQ ID NO: 2025 - DNA, 122 bp, Homo sapiens
  misc_feature (61)..(62): /note="This region represents a CpG dinucleotide"
  misc_feature (61)..(61): /note="Nucleotide may be methylated to form 5-methylcytosine"
cagtccccatctggtccaggtgacactcaccattcatctgggagggtgacagcgagtagtcgcggtcggtgtgccgcctgtctggcttcaagttgcggctctgtcggccggaaccctccagc

SEQ ID NO: 2026 - DNA, 122 bp, Homo sapiens
  misc_feature (61)..(62): /note="This region represents a CpG dinucleotide"
  misc_feature (61)..(61): /note="Nucleotide may be methylated to form 5-methylcytosine"
gtgtgcttttatcccttttaaagatgagcgattgaggatccaagagcttaacacaagttacgcagcgagaagtagaggtaaggttctaatcaagttctatagttctgttctctctgctccaa

SEQ ID NO: 2027 - DNA, 122 bp, Homo sapiens
  misc_feature (61)..(62): /note="This region represents a CpG dinucleotide"
  misc_feature (61)..(61): /note="Nucleotide may be methylated to form 5-methylcytosine"
tgaggaaactgctacctaagagatgctggatgactgaccaggatagtacggcccataaaacgtgggacttggatttgaacccggcactgtcctctcagagtggaactcatgacccccaccag

SEQ ID NO: 2028 - DNA, 122 bp, Homo sapiens
  misc_feature (61)..(62): /note="This region represents a CpG dinucleotide"
  misc_feature (61)..(61): /note="Nucleotide may be methylated to form 5-methylcytosine"
tgggactctggactgggagcgagggctgagactaaagtcgccacatcaggctgcttgttccgttcactcagcaaatatttatagctaatctaaccagtttcagatatcgttcaagaggtggg

SEQ ID NO: 2029 - DNA, 122 bp, Homo sapiens
  misc_feature (61)..(62): /note="This region represents a CpG dinucleotide"
  misc_feature (61)..(61): /note="Nucleotide may be methylated to form 5-methylcytosine"
ttacaagtgaatcatcttcatttccaccttatggtgttttcgtaaggattaaatgcaatacggtgtcttaagtgctcagcacagtgccccacacttggtaggaagtgctcagagatgacggc

SEQ ID NO: 2030 - DNA, 122 bp, Homo sapiens
  misc_feature (61)..(62): /note="This region represents a CpG dinucleotide"
  misc_feature (61)..(61): /note="Nucleotide may be methylated to form 5-methylcytosine"
cagaggtcctcacggcctgcggcccggggagacctgagactcctaagctgagcacgtcagcgtctctacctccaccgcagacagaaagaccgggcggacccaagactgcaagctcaagccct

SEQ ID NO: 2031 - DNA, 122 bp, Homo sapiens
  misc_feature (61)..(62): /note="This region represents a CpG dinucleotide"
  misc_feature (61)..(61): /note="Nucleotide may be methylated to form 5-methylcytosine"
tcccggtccccgccgaataagttgtgatcactgcagaaaaggtgtcccattgctcggggccgcaggcgtcagagagcccagggcaagtttcaggggctaccggggtccctggctaccccgcg

SEQ ID NO: 2032 - DNA, 122 bp, Homo sapiens
  misc_feature (61)..(62): /note="This region represents a CpG dinucleotide"
  misc_feature (61)..(61): /note="Nucleotide may be methylated to form 5-methylcytosine"
gtattatgctacctttgggggaactccctgaacccctgaagattaggtctggtgaacactcgaaggattcaggaaaatacctggattactcatgccattccctcagaaaagagattttgttt

SEQ ID NO: 2033 - DNA, 122 bp, Homo sapiens
  misc_feature (61)..(62): /note="This region represents a CpG dinucleotide"
  misc_feature (61)..(61): /note="Nucleotide may be methylated to form 5-methylcytosine"
taggtctttcgtatcccctccggcctctcggggctgtgcgttcggaaacagcgaaaggaacggcctcaggaatctggcctcagccggagcactggtgaacacaggctcccgtcgcgccaagg

SEQ ID NO: 2034 - DNA, 122 bp, Homo sapiens
  misc_feature (61)..(62): /note="This region represents a CpG dinucleotide"
  misc_feature (61)..(61): /note="Nucleotide may be methylated to form 5-methylcytosine"
ccagctgcaggtggaccctgagatgggcccaagctcccccgacgtgaaaggcagctgctccgtcctgggcagcaccttcctcaggaagaggcctggctcctgctgccacccccacccccacc

SEQ ID NO: 2035 - DNA, 122 bp, Homo sapiens
  misc_feature (61)..(62): /note="This region represents a CpG dinucleotide"
  misc_feature (61)..(61): /note="Nucleotide may be methylated to form 5-methylcytosine"
agcctttaaaagagaatggaaatggagagattgtaatgtgttcattggtgacttttgacacggatgctaacctgtaagatgtgcagatatatcatgtgcaaactgttaagatgctgtcaaca

SEQ ID NO: 2036 - DNA, 122 bp, Homo sapiens
  misc_feature (61)..(62): /note="This region represents a CpG dinucleotide"
  misc_feature (61)..(61): /note="Nucleotide may be methylated to form 5-methylcytosine"
ggtattttcaaattaggcaccttctaaatttgactcatacattatggaaatctgatgacacgaggggtggataggcttgctttgattttatgaaatattaatcatagctgtgattaatgatt

SEQ ID NO: 2037 - DNA, 122 bp, Homo sapiens
  misc_feature (61)..(62): /note="This region represents a CpG dinucleotide"
  misc_feature (61)..(61): /note="Nucleotide may be methylated to form 5-methylcytosine"
attatacttagttttgaaaataaatagaccagagatatatgcacaagaagtgtgtgtgcacgctgcagctgtttcaggtgaaggaaggctgggttctgggtctttgcactgagagcagtcag

SEQ ID NO: 2038 - DNA, 122 bp, Homo sapiens
  misc_feature (61)..(62): /note="This region represents a CpG dinucleotide"
  misc_feature (61)..(61): /note="Nucleotide may be methylated to form 5-methylcytosine"
gaaagccattccctggagtcaccagaattatctggtaccaaatcaaaccaaaacatggcacgtcccttgaatgaacccttcagtggctgctatcacctccaaagcaaagcccaagtgcctta

SEQ ID NO: 2039 - DNA, 122 bp, Homo sapiens
  misc_feature (61)..(62): /note="This region represents a CpG dinucleotide"
  misc_feature (61)..(61): /note="Nucleotide may be methylated to form 5-methylcytosine"
gcagtcggggatgaagcggtcgggtgatgctcccaagtccgcagtcggggatgaagcggtcgggtgacacacctagctcagccctcccaggccacctgcagctcccagcctgtgctgtgcag

SEQ ID NO: 2040 - DNA, 122 bp, Homo sapiens
  misc_feature (61)..(62): /note="This region represents a CpG dinucleotide"
  misc_feature (61)..(61): /note="Nucleotide may be methylated to form 5-methylcytosine"
tcatcttgcattgcttgaagccagattcacttcctgacttcctaattctatgagccagttcgttagttgggttttccttatttagttggggttcctttacttgtagtcataagaatcttaaa

SEQ ID NO: 2041 - DNA, 122 bp, Homo sapiens
  misc_feature (61)..(62): /note="This region represents a CpG dinucleotide"
  misc_feature (61)..(61): /note="Nucleotide may be methylated to form 5-methylcytosine"
ggaggtgggaccaaggccgaatttagggacccccagcatgagctgcgggtgggtcaaggccgcgaggttggagggcacggggacacagcatagcgaggaaggaacggtagggaccgtggtga

SEQ ID NO: 2042 - DNA, 122 bp, Homo sapiens
  misc_feature (61)..(62): /note="This region represents a CpG dinucleotide"
  misc_feature (61)..(61): /note="Nucleotide may be methylated to form 5-methylcytosine"
ttgctctgctgtgaggtcagtttcatgtgcttaagcaactttgcttcaggtcacaccctacgggacacccacggcagcctgccgcctactaatcatagagcccttcgtgttccttttttgtc

SEQ ID NO: 2043 - DNA, 122 bp, Homo sapiens
  misc_feature (61)..(62): /note="This region represents a CpG dinucleotide"
  misc_feature (61)..(61): /note="Nucleotide may be methylated to form 5-methylcytosine"
agtctgtgacaagggtttacgcttggatagggtgggcttgatcacccggcagaaatgagacgagtgatcccagccttcccaaccaatctttccagtgacctgggtttacgcttcaccacaga

SEQ ID NO: 2044 - DNA, 122 bp, Homo sapiens
  misc_feature (61)..(62): /note="This region represents a CpG dinucleotide"
  misc_feature (61)..(61): /note="Nucleotide may be methylated to form 5-methylcytosine"
ccacttccagaattgtgcaacaggtgacctccaggataactatggcttatcttacagcaacgtagttcatctaggatagaaaattgtacctttatccctggtaccttctgactacagatgac

SEQ ID NO: 2045 - DNA, 122 bp, Homo sapiens
  misc_feature (61)..(62): /note="This region represents a CpG dinucleotide"
  misc_feature (61)..(61): /note="Nucleotide may be methylated to form 5-methylcytosine"
gggttaaactctatacaaaaccattgctaaaaacaccacagttgctcaattggctaactacgcgatttaagcaagaaagtagctgaatcatgctacttggttatcttacattagcagaaact

SEQ ID NO: 2046 - DNA, 122 bp, Homo sapiens
  misc_feature (61)..(62): /note="This region represents a CpG dinucleotide"
  misc_feature (61)..(61): /note="Nucleotide may be methylated to form 5-methylcytosine"
aaaaaccaccttttaaagctgtaaaaacacagtcaattaaactagtagagttttatttcacgtaatgctgagaatgaaagagagccttctttggaccacggtaatctttaatatacaggaat

SEQ ID NO: 2047 - DNA, 122 bp, Homo sapiens
  misc_feature (61)..(62): /note="This region represents a CpG dinucleotide"
  misc_feature (61)..(61): /note="Nucleotide may be methylated to form 5-methylcytosine"
agttccccaaggccatcagctatttcttagcagggcatttgaggcctctgcacccagcttcgttcatcctttaaggtaggtctcacatggcatgaactctggatgtagctgccaactcagct

SEQ ID NO: 2048 - DNA, 122 bp, Homo sapiens
  misc_feature (61)..(62): /note="This region represents a CpG dinucleotide"
  misc_feature (61)..(61): /note="Nucleotide may be methylated to form 5-methylcytosine"
gctcctgtgtccccatttgtatcagagtgggtgactcaagtgtccaccttcagccaagagcgtggccagggctggggcacgccacatgacctcacttgtgtgtctaccagctaaggcacctc

SEQ ID NO: 2049 - DNA, 122 bp, Homo sapiens
  misc_feature (61)..(62): /note="This region represents a CpG dinucleotide"
  misc_feature (61)..(61): /note="Nucleotide may be methylated to form 5-methylcytosine"
gtggaggttgcagtgagctgagatcttgccattgcacaccagcctgggtgatggaggctccgtctggaggaaaaaaaaaaaaaaaaaacaaaaaaggcggggctgaggtgagaagaatattg

SEQ ID NO: 2050 - DNA, 122 bp, Homo sapiens
  misc_feature (61)..(62): /note="This region represents a CpG dinucleotide"
  misc_feature (61)..(61): /note="Nucleotide may be methylated to form 5-methylcytosine"
agttagggcctgcttcctcatagatgaaggcttctcactgtagggtgagagataagagaacggcccgtcggtggagcagtcagagcacacagaacatttgttgattaagtttactgtcttct

SEQ ID NO: 2051 - DNA, 122 bp, Homo sapiens
  misc_feature (61)..(62): /note="This region represents a CpG dinucleotide"
  misc_feature (61)..(61): /note="Nucleotide may be methylated to form 5-methylcytosine"
agaagtatttgtttattctgaactcttcctcttttctctgtttatcttcatataaacagacgagaataattctcacaaggcagataacttaactggcaaatgactttggtgtagtcattata

SEQ ID NO: 2052 - DNA, 122 bp, Homo sapiens
  misc_feature (61)..(62): /note="This region represents a CpG dinucleotide"
  misc_feature (61)..(61): /note="Nucleotide may be methylated to form 5-methylcytosine"
tcatacatagctgtcctttttctctcattgagggctctgtttattgtcaccccctgctaccgccttctctgacctgcctagctaaaacagcccctcccatatgcagtcactctacatcacag

SEQ ID NO: 2053 - DNA, 122 bp, Homo sapiens
  misc_feature (61)..(62): /note="This region represents a CpG dinucleotide"
  misc_feature (61)..(61): /note="Nucleotide may be methylated to form 5-methylcytosine"
agttcctagcctgggcctaggactggctgaccccgtgtgtggggccagggctcccgaacacgggtccaccggctgcacgagagtttccggggggccctacccttccgattcggcaggtttag

SEQ ID NO: 2054 - DNA, 122 bp, Homo sapiens
  misc_feature (61)..(62): /note="This region represents a CpG dinucleotide"
  misc_feature (61)..(61): /note="Nucleotide may be methylated to form 5-methylcytosine"
tcccccttccccaacctaccctggctggctccctccattcctccctccaggagcagatgacgggagcgcccagccaccatagcctgttactgggctaattgcagttgcctgggaggagggca

SEQ ID NO: 2055 - DNA, 122 bp, Homo sapiens
  misc_feature (61)..(62): /note="This region represents a CpG dinucleotide"
  misc_feature (61)..(61): /note="Nucleotide may be methylated to form 5-methylcytosine"
ttatcataaattaatcgattggcactctggtttagcctcaggctctctgagcctgattaacgtgagcctgaccccaagagacagtcacccaggctgctgacgatttcagcttttgagccagc

SEQ ID NO: 2056 - DNA, 122 bp, Homo sapiens
  misc_feature (61)..(62): /note="This region represents a CpG dinucleotide"
  misc_feature (61)..(61): /note="Nucleotide may be methylated to form 5-methylcytosine"
gtccctttaggcttttctctcccgccaatcctcactctgccctacgggagggttcttggccgcttcagctcggtttgctgcttaccaaccccgcggcccaaggggagcacggctccctggcc

SEQ ID NO: 2057 - DNA, 122 bp, Homo sapiens
  misc_feature (61)..(62): /note="This region represents a CpG dinucleotide"
  misc_feature (61)..(61): /note="Nucleotide may be methylated to form 5-methylcytosine"
caactaatcctcacccttggctatgtttgaacaccactagattatgcaagcatatcccatcgctcttgtctccatgcttttgtttatatcattttcctagcctgggcaactcttctttctcc

SEQ ID NO: 2058 - DNA, 122 bp, Homo sapiens
  misc_feature (61)..(62): /note="This region represents a CpG dinucleotide"
  misc_feature (61)..(61): /note="Nucleotide may be methylated to form 5-methylcytosine"
gatgaatgtgggagacttggataccccttgacaatactgaagcaaaattgttaggagacacggagagcggagtgaaattgaaggcggtttgctctgtgaacaaaggagactttcattccagc

SEQ ID NO: 2059 - DNA, 122 bp, Homo sapiens
  misc_feature (61)..(62): /note="This region represents a CpG dinucleotide"
  misc_feature (61)..(61): /note="Nucleotide may be methylated to form 5-methylcytosine"
cactaggtgagcgtttgctgtaactctctcctccccacccctccctgctcattgcagatacgagatcctgacacccaatgccatccccaagggcttcatggatgggaagcaggcctgtgaaa

SEQ ID NO: 2060 - DNA, 122 bp, Homo sapiens
  misc_feature (61)..(62): /note="This region represents a CpG dinucleotide"
  misc_feature (61)..(61): /note="Nucleotide may be methylated to form 5-methylcytosine"
agaggctgaaggctcccagcgccctaccccgcccgaggggcggagcctgagccaaggccacgtgatgatgacagacggcactctggctttcctggagctgtctctatggtattcttcccagc

SEQ ID NO: 2061 - DNA, 122 bp, Homo sapiens
  misc_feature (61)..(62): /note="This region represents a CpG dinucleotide"
  misc_feature (61)..(61): /note="Nucleotide may be methylated to form 5-methylcytosine"
caaaagctagacctagtgaggtctagcccagggcatacaaagcacgcccacacattcaaacgcccttcagtccagtcacaggcccatgctctgggaagagctctcaggatagtaacggctct

SEQ ID NO: 2062 - DNA, 122 bp, Homo sapiens
  misc_feature (61)..(62): /note="This region represents a CpG dinucleotide"
  misc_feature (61)..(61): /note="Nucleotide may be methylated to form 5-methylcytosine"
cacagagcccagcagctggaccagggtgaccatgatgccactggggctgggacacctgcacgagactcttcaggaataagcccctatttccccacctaaaaatggaagtggggccgggcaca

SEQ ID NO: 2063 - DNA, 122 bp, Homo sapiens
  misc_feature (61)..(62): /note="This region represents a CpG dinucleotide"
  misc_feature (61)..(61): /note="Nucleotide may be methylated to form 5-methylcytosine"
taataattttaatgtgcttcataagctctcatggactttcacgtatcaattagtaaaagacgtaactaagtgatctggctttcagtctcctagttctctacagtgtaccctcagttttccac

SEQ ID NO: 2064 - DNA, 122 bp, Homo sapiens
  misc_feature (61)..(62): /note="This region represents a CpG dinucleotide"
  misc_feature (61)..(61): /note="Nucleotide may be methylated to form 5-methylcytosine"
tcctagctctgccctctatggtcctaaggcaaggatcacaaaccccaatgcttttaggggcgctacaggtaacataaatggcagggtacagatgggtaaactgaagagccattcataaatta

SEQ ID NO: 2065 - DNA, 122 bp, Homo sapiens
  misc_feature (61)..(62): /note="This region represents a CpG dinucleotide"
  misc_feature (61)..(61): /note="Nucleotide may be methylated to form 5-methylcytosine"
gcttgtggatgatccttttattgccctgattaaaatccacacagtaagaaattttttaaacggaggttgatgatggaagcttcctcaataagtatccttcagtcaagaaatgattgagcttt

SEQ ID NO: 2066 - DNA, 122 bp, Homo sapiens
  misc_feature (61)..(62): /note="This region represents a CpG dinucleotide"
  misc_feature (61)..(61): /note="Nucleotide may be methylated to form 5-methylcytosine"
gataaattgtttattggaagactttcccaaactaaatacaaagacaagattcctctttctcgctgtaccaaagataaatcatgcctttgtctacggttgtggttttatatttacctgtaggt

SEQ ID NO: 2067 - DNA, 122 bp, Homo sapiens
  misc_feature (61)..(62): /note="This region represents a CpG dinucleotide"
  misc_feature (61)..(61): /note="Nucleotide may be methylated to form 5-methylcytosine"
gctccctccctccgtctgtccctcccgggccggtcccctcctcccctggctcttctctcccggagctttgtcctcaacaattactctcgcaaaaggtgggtgggggtgggggggtgggcatc

SEQ ID NO: 2068 - DNA, 122 bp, Homo sapiens
  misc_feature (61)..(62): /note="This region represents a CpG dinucleotide"
  misc_feature (61)..(61): /note="Nucleotide may be methylated to form 5-methylcytosine"
tggcggtttcctgtccgggctggcggggccgccagtcggcgtggggtgcggcaaggggagcggggcgctgggtcagccgagggccgggcctcgggggcgcagccggactggacggcggctcc

SEQ ID NO: 2069 - DNA, 122 bp, Homo sapiens
  misc_feature (61)..(62): /note="This region represents a CpG dinucleotide"
  misc_feature (61)..(61): /note="Nucleotide may be methylated to form 5-methylcytosine"
ccctcaatcgtgaacccagtaaaccagcctgcaccccacacagcccaaggtcttgccccgcgcccaggtcccagcacctagcgacccgccttcagcacttggaatgggctggagttgggaaa

SEQ ID NO: 2070 - DNA, 122 bp, Homo sapiens
  misc_feature (61)..(62): /note="This region represents a CpG dinucleotide"
  misc_feature (61)..(61): /note="Nucleotide may be methylated to form 5-methylcytosine"
tagaaacataggatttggatgcttggttatgaccagtatgcagaacaacaaaggcaaggacgtgaaggctggggtggagagacccagagcacgtggaaaggccacatgcagtatggtattta

SEQ ID NO: 2071 - DNA, 122 bp, Homo sapiens
  misc_feature (61)..(62): /note="This region represents a CpG dinucleotide"
  misc_feature (61)..(61): /note="Nucleotide may be methylated to form 5-methylcytosine"
ttcagacattccagattctcaaagctgtgcaatgccccttgtcaaatgattcactccaaacgcctctggaactcatgcacatgtgtggagcgccttcccacacctggtaacctggggttact

SEQ ID NO: 2072 - DNA, 122 bp, Homo sapiens
  misc_feature (61)..(62): /note="This region represents a CpG dinucleotide"
  misc_feature (61)..(61): /note="Nucleotide may be methylated to form 5-methylcytosine"
ctgagccacagtctcctcgttgtaagtaggggctgtcattctttctccaccagagccagacgtgtaggggagataccagttctctaacaactggggctaaaagttgagaatgcagaagacat

SEQ ID NO: 2073 - DNA, 122 bp, Homo sapiens
  misc_feature (61)..(62): /note="This region represents a CpG dinucleotide"
  misc_feature (61)..(61): /note="Nucleotide may be methylated to form 5-methylcytosine"
cactgtaaggaacaggtcaacgacaacttgggcaataggaactgaagagggaagctcagtcgctcctggaggagagccacagtccctaaggcaagttccctaactgtctgtgaaaagtagta

SEQ ID NO: 2074 - DNA, 122 bp, Homo sapiens
  misc_feature (61)..(62): /note="This region represents a CpG dinucleotide"
  misc_feature (61)..(61): /note="Nucleotide may be methylated to form 5-methylcytosine"
cttggtagaagggtgctaaatcatccttgctaaatacttgacggaaaccatcagtcatctcgtttggctctcatcaatctctttgttcatatgcacaggctcttaatctctgttttcccttt

SEQ ID NO: 2075 - DNA, 122 bp, Homo sapiens
  misc_feature (61)..(62): /note="This region represents a CpG dinucleotide"
  misc_feature (61)..(61): /note="Nucleotide may be methylated to form 5-methylcytosine"
gtcactacatgtatcattaaaggtcctaaaaggaattgttaggcggcaggctttgtgttacgtgttacatggagtgagggtagatgtgaagatttaaaacgattgatggatttaaggaagtg

SEQ ID NO: 2076 - DNA, 122 bp, Homo sapiens
  misc_feature (61)..(62): /note="This region represents a CpG dinucleotide"
  misc_feature (61)..(61): /note="Nucleotide may be methylated to form 5-methylcytosine"
gggttcttaagatgaccacggttcctgttttcccacagccctctgtcaagtcttcaccgacgggcagacagcacagttcacatttcagtcacggcactggcttgcccctcttgcttggcaga

SEQ ID NO: 2077 - DNA, 122 bp, Homo sapiens
  misc_feature (61)..(62): /note="This region represents a CpG dinucleotide"
  misc_feature (61)..(61): /note="Nucleotide may be methylated to form 5-methylcytosine"
gaaataaaacatacacactgctttctagagcttaaaattatgtctctttaaattaacacccgtctctccagcagagggagcaaataagtttttgtattttcatttctaccaaaagaacttct

SEQ ID NO: 2078 - DNA, 122 bp, Homo sapiens
  misc_feature (61)..(62): /note="This region represents a CpG dinucleotide"
  misc_feature (61)..(61): /note="Nucleotide may be methylated to form 5-methylcytosine"
cggggctgtcttcccgcggagcgtgctgggggcgggtcgcgccgggccgggccgctagtgcgcatgggcgggcgtcctcggctctaactgccgccactttccacacgctgggagggccgtta

SEQ ID NO: 2079 - DNA, 122 bp, Homo sapiens
  misc_feature (61)..(62): /note="This region represents a CpG dinucleotide"
  misc_feature (61)..(61): /note="Nucleotide may be methylated to form 5-methylcytosine"
atctcccaactctgatgctccttcccttggtttctgggctcccttgaactcccctagctccgtgctcacggccatctcagggtctcccctgcttgcagctgcacttggtacagcctgtgcca

SEQ ID NO: 2080 - DNA, 122 bp, Homo sapiens
  misc_feature (61)..(62): /note="This region represents a CpG dinucleotide"
  misc_feature (61)..(61): /note="Nucleotide may be methylated to form 5-methylcytosine"
acctgggaaagtgggaatgggacgcggaggtggtggctgagggcggggtccgggcaggcccgcgccgaggagggggcgtccgcgccgagccaggaatggcgccccccgatgtccacaccacg

SEQ ID NO: 2081 - DNA, 122 bp, Homo sapiens
  misc_feature (61)..(62): /note="This region represents a CpG dinucleotide"
  misc_feature (61)..(61): /note="Nucleotide may be methylated to form 5-methylcytosine"
ttgctgatgtgtgaggacgcgtggatttcctttccttgctttgcctggcgaggctgccctcgcatcccgacgtgtttaacacaggacaccagcttctccaccgggaggaagccttgcgttct

SEQ ID NO: 2082 - DNA, 122 bp, Homo sapiens
  misc_feature (61)..(62): /note="This region represents a CpG dinucleotide"
  misc_feature (61)..(61): /note="Nucleotide may be methylated to form 5-methylcytosine"
aatttcccaagggccaatttacccgaccgattaccacttgccaatgcaaaaccaaataaacgtacatatgtttattgggaagaaaaccaaagctttggagaggacagggacaatgtctttgg

SEQ ID NO: 2083 - DNA, 122 bp, Homo sapiens
  misc_feature (61)..(62): /note="This region represents a CpG dinucleotide"
  misc_feature (61)..(61): /note="Nucleotide may be methylated to form 5-methylcytosine"
gaggtgtccctagacccccgccaaggttggtgcttgtacctgccctggagagcctggtcacgggcttgccagacccagccatacccagctctgccgcccccagccagggtggtggcagagtg

SEQ ID NO: 2084 - DNA, 122 bp, Homo sapiens
  misc_feature (61)..(62): /note="This region represents a CpG dinucleotide"
  misc_feature (61)..(61): /note="Nucleotide may be methylated to form 5-methylcytosine"
aagatcatgcctgaaggtgagtaacaggcgggctgggcatggccgaggcccagccgagcgcgggcttcttcctggcaccccagggccgggccgggtggagaggggcgaggccgaggctggtg

SEQ ID NO: 2085 - DNA, 122 bp, Homo sapiens
  misc_feature (61)..(62): /note="This region represents a CpG dinucleotide"
  misc_feature (61)..(61): /note="Nucleotide may be methylated to form 5-methylcytosine"
tccaaatgcccggtggccacacatgattaatggctaccacactggtcagtgcagaatggacgtaaacatcgctgcacaaagttctaatggacagcgctgtctagaccatggcctggagccac

SEQ ID NO: 2086 - DNA, 122 bp, Homo sapiens
  misc_feature (61)..(62): /note="This region represents a CpG dinucleotide"
  misc_feature (61)..(61): /note="Nucleotide may be methylated to form 5-methylcytosine"
cctcaagaacgtgtacgcgcaggggcgtttccttgtccgttaataacacaagctacaggccgagcgtggtggctcacacctgtaatcccagcactttgggaggccgagacgggtggatcacg

SEQ ID NO: 2087 - DNA, 122 bp, Homo sapiens
  misc_feature (61)..(62): /note="This region represents a CpG dinucleotide"
  misc_feature (61)..(61): /note="Nucleotide may be methylated to form 5-methylcytosine"
ttgatcacatagcatatgccatacatttaggtggtagaaaattagtggaggataaacacacgtagatactgtgctcatggaactctcagcccactggggagaaagccattcatcagatgtct

SEQ ID NO: 2088 - DNA, 122 bp, Homo sapiens
  misc_feature (61)..(62): /note="This region represents a CpG dinucleotide"
  misc_feature (61)..(61): /note="Nucleotide may be methylated to form 5-methylcytosine"
ttgagaatgagtggcatctattggggtctgacagtaatggatctcatgggacaacttcatcgcatgaatagagaagagattctggcatttattaagtcttgccaacatgaatgtggtggaat

SEQ ID NO: 2089 - DNA, 122 bp, Homo sapiens
  misc_feature (61)..(62): /note="This region represents a CpG dinucleotide"
  misc_feature (61)..(61): /note="Nucleotide may be methylated to form 5-methylcytosine"
ctgggctacagagccgagccccacaccatcagacgccagggacagctcccacgtgccccgcggcctctggcacacggccagacgcccgccaggctgagcccccaccaggccctacctggcga

SEQ ID NO: 2090 - DNA, 122 bp, Homo sapiens
  misc_feature (61)..(62): /note="This region represents a CpG dinucleotide"
  misc_feature (61)..(61): /note="Nucleotide may be methylated to form 5-methylcytosine"
gattagtcacttgtttcagagggagaggagagctcatcaaatactgatggcaagatggtgcgatgaaggtctagaactgtattatagtatgctaatgtttgattaagacaaagtgtgtgcat

SEQ ID NO: 2091 - DNA, 122 bp, Homo sapiens
  misc_feature (61)..(62): /note="This region represents a CpG dinucleotide"
  misc_feature (61)..(61): /note="Nucleotide may be methylated to form 5-methylcytosine"
ctcgagttagtggggcggggacttggatatgggtatggaatttggccccagggctcgaatcggatgtatgcgactgatcgggttggggcaggttataggacgaggactggtttgcaaggatg

SEQ ID NO: 2092 - DNA, 122 bp, Homo sapiens
  misc_feature (61)..(62): /note="This region represents a CpG dinucleotide"
  misc_feature (61)..(61): /note="Nucleotide may be methylated to form 5-methylcytosine"
ataagtcggtccgtcggaaagcatactcagaggagcgtcctttggggccagagtaacttacggcctggtaagaaagacacagtgaaaccacttataatttgggaaatctcccctcactgcca

SEQ ID NO: 2093 - DNA, 122 bp, Homo sapiens
  misc_feature (61)..(62): /note="This region represents a CpG dinucleotide"
  misc_feature (61)..(61): /note="Nucleotide may be methylated to form 5-methylcytosine"
agggggagaagcttggataatcattagaaaaaccctgttcacctataaaacctattctgccgcctcgaagcaaacactggagaaaggctgatttgagtatttaggctttataaattgcactt

SEQ ID NO: 2094 - DNA, 122 bp, Homo sapiens
  misc_feature (61)..(62): /note="This region represents a CpG dinucleotide"
  misc_feature (61)..(61): /note="Nucleotide may be methylated to form 5-methylcytosine"
ctggtctgttcttgctcattcagaaactggttggagtaaaaagattccccttttcaagatcgccaaaagtggaactgatcgctttcgaagggactccttcaggaagaaggagaaaaattcga

SEQ ID NO: 2095 - DNA, 122 bp, Homo sapiens
  misc_feature (61)..(62): /note="This region represents a CpG dinucleotide"
  misc_feature (61)..(61): /note="Nucleotide may be methylated to form 5-methylcytosine"
ctctatgggtttctgagaatgagataatttttcggttatccggatcctgagcggaggcagcgagcggtgcctgttttggcgttattggatttgggagagttcggcagtaccactgccgtgag

SEQ ID NO: 2096 - DNA, 122 bp, Homo sapiens
  misc_feature (61)..(62): /note="This region represents a CpG dinucleotide"
  misc_feature (61)..(61): /note="Nucleotide may be methylated to form 5-methylcytosine"
tctagtctgcctccttctctaggctgccaggctgctcacctcagtctaaccattgcctgccgtgtttaaaaagttgaccagccaggagcttggcaggacccacagaaacagttcagtttgca

SEQ ID NO: 2097 - DNA, 122 bp, Homo sapiens
  misc_feature (61)..(62): /note="This region represents a CpG dinucleotide"
  misc_feature (61)..(61): /note="Nucleotide may be methylated to form 5-methylcytosine"
agcatttggtaatcccctcaccccatacttggctgtaaaatctgtgaagtagcctccttccggaagtcaggttttctagtaatgccctaattggttaagtatgtattatggtgtatttaata

SEQ ID NO: 2098 - DNA, 122 bp, Homo sapiens
  misc_feature (61)..(62): /note="This region represents a CpG dinucleotide"
  misc_feature (61)..(61): /note="Nucleotide may be methylated to form 5-methylcytosine"
cagccagccagtcaatggctgtgtccagagcttcccgcctcgggctcagcgtaggtggagcggacgcctccactttcatttctgattttagtcttctgcgtctcctctcttgtttatttgtt

SEQ ID NO: 2099 - DNA, 122 bp, Homo sapiens
  misc_feature (61)..(62): /note="This region represents a CpG dinucleotide"
  misc_feature (61)..(61): /note="Nucleotide may be methylated to form 5-methylcytosine"
actaatgagcagttaaagggaggaaaaaaaacctgatttcttccatttcctaaggacacacgaacatggcaatcttgcactagagacacaggacccaagaaaatgtttgagatgtggaaaaa

SEQ ID NO: 2100 - DNA, 122 bp, Homo sapiens
  misc_feature (61)..(62): /note="This region represents a CpG dinucleotide"
  misc_feature (61)..(61): /note="Nucleotide may be methylated to form 5-methylcytosine"
gcagtaattgtcaagctcaccaaaagtgcgacaaaatcacggaattacccttggtagaaacgcggaattactccaaaaccctaccctcatcctctacctggaccagagagaaaaacaactac

SEQ ID NO: 2101 - DNA, 122 bp, Homo sapiens
  misc_feature (61)..(62): /note="This region represents a CpG dinucleotide"
  misc_feature (61)..(61): /note="Nucleotide may be methylated to form 5-methylcytosine"
acctggaaaattgggtcactcccacccgaatgctgcgcttttccgacgggcttaaaaaaacggcgcagcacgaccttatatcccgcacctggctccgacggtcctacacccacggagtctcg

SEQ ID NO: 2102 - DNA, 122 bp, Homo sapiens
  misc_feature (61)..(62): /note="This region represents a CpG dinucleotide"
  misc_feature (61)..(61): /note="Nucleotide may be methylated to form 5-methylcytosine"
ctcgccgcacggtgaggaccctggccccgccctaacctctaagaatcattttcttggccacgcacctctgcgtgcctcgctcctcctgcagactccgcccctagaatgaccctgcctctgca

SEQ ID NO: 2103 - DNA, 122 bp, Homo sapiens
  misc_feature (61)..(62): /note="This region represents a CpG dinucleotide"
  misc_feature (61)..(61): /note="Nucleotide may be methylated to form 5-methylcytosine"
ggccagggcagacctattttttctatgtcctggttttcactttgctgccattcacagggacgatcaggaactcgggtaccattcacagccagaggagccacagcccgcagctgtcaatcact

SEQ ID NO: 2104 - DNA, 122 bp, Homo sapiens
  misc_feature (61)..(62): /note="This region represents a CpG dinucleotide"
  misc_feature (61)..(61): /note="Nucleotide may be methylated to form 5-methylcytosine"
ggacaggtgagcctcaaaattggggatcaacctgagagggttgttggcttcacccaggaacgaactcaagggtgagccagtggtgacagaaagcagtgtttatggagccagtgctgctcctt

SEQ ID NO: 2105 - DNA, 122 bp, Homo sapiens
  misc_feature (61)..(62): /note="This region represents a CpG dinucleotide"
  misc_feature (61)..(61): /note="Nucleotide may be methylated to form 5-methylcytosine"
tgggaagtgccccagcaggccccgtggttgtctggctttgttgactgtctgaatgcaacacgttgacaatgggttagctgctttggttttagggttattctccttatgcctcatgcaaatga

SEQ ID NO: 2106 - DNA, 122 bp, Homo sapiens
  misc_feature (61)..(62): /note="This region represents a CpG dinucleotide"
  misc_feature (61)..(61): /note="Nucleotide may be methylated to form 5-methylcytosine"
ctattccatgtcttccagcatgatatctgtgaatgcaggaaatgcgctcattacgatagccgttgtaatatgttaataatactaaccaaatgagtctgtagtctgtatttttaggtgttggt

SEQ ID NO: 2107 - DNA, 122 bp, Homo sapiens
  misc_feature (61)..(62): /note="This region represents a CpG dinucleotide"
  misc_feature (61)..(61): /note="Nucleotide may be methylated to form 5-methylcytosine"
cccagagggaggagtctgatccaagtttgagtcccgttccactgcagcttttgctagttgcgtgaatttgggcccgttccttaactcaaagactgggttttctcagatgtaaggtaggcatt

SEQ ID NO: 2108 - DNA, 122 bp, Homo sapiens
  misc_feature (61)..(62): /note="This region represents a CpG dinucleotide"
  misc_feature (61)..(61): /note="Nucleotide may be methylated to form 5-methylcytosine"
tactcaaaaaatattactcagcacctaccacagggcaggctctgctagacagcgggaaatcgtggcaatgagacagactagatcccaaccttaacaagcttacagacaagtgcagggagaaa

SEQ ID NO: 2109 - DNA, 122 bp, Homo sapiens
  misc_feature (61)..(62): /note="This region represents a CpG dinucleotide"
  misc_feature (61)..(61): /note="Nucleotide may be methylated to form 5-methylcytosine"
ccggcgcggatcttgtgcgacaggctggagactttggcgcgcagctgggtcgtgggtctccggaacggccccagcagcctccactcgcggaaggcgctgggtggctttcgacggctggcgac

SEQ ID NO: 2110 - DNA, 122 bp, Homo sapiens
  misc_feature (61)..(62): /note="This region represents a CpG dinucleotide"
  misc_feature (61)..(61): /note="Nucleotide may be methylated to form 5-methylcytosine"
gtatccagtgaagataatgtgaccacagtgcagtgggattgaatactgataaggatgtggcgggccatgcttaaagtttggtgtctcattcaaatgactggctgagagatgaaaagaaaaca

SEQ ID NO: 2111 - DNA, 122 bp, Homo sapiens
  misc_feature (61)..(62): /note="This region represents a CpG dinucleotide"
  misc_feature (61)..(61): /note="Nucleotide may be methylated to form 5-methylcytosine"
aagctctaagttcccactgggaattttacaaacatcctaaaaagcaatgaaggaaaaagtcgatttgaagggcgggacttaagtcagttgtgtttttcttacgacgcccacactgcaatgac

SEQ ID NO: 2112 - DNA, 122 bp, Homo sapiens
  misc_feature (61)..(62): /note="This region represents a CpG dinucleotide"
  misc_feature (61)..(61): /note="Nucleotide may be methylated to form 5-methylcytosine"
ccgagctgccgccatccccggacccctcgccgccctcgacggcgccggcctccagctcgtcggccgcgcgccccttgccccgccgctcctccagacccacctccaccgagcgagggcgcacc

SEQ ID NO: 2113 - DNA, 122 bp, Homo sapiens
  misc_feature (61)..(62): /note="This region represents a CpG dinucleotide"
  misc_feature (61)..(61): /note="Nucleotide may be methylated to form 5-methylcytosine"
tcttataacttaacttctcaaattaaactcatcatttctcctctgtgttcccttgctcaacgatatttatgcccaaatcctattctgaaatctgggagtcatactagaatccaaattcccct

SEQ ID NO: 2114 - DNA, 122 bp, Homo sapiens
  misc_feature (61)..(62): /note="This region represents a CpG dinucleotide"
  misc_feature (61)..(61): /note="Nucleotide may be methylated to form 5-methylcytosine"
gttaggcgcggcggcttgccctgtgtctctgagcccgggacatccatttgtagtggcttccgaccccggtagcggtgctggagatggcagagctcgggatagccatctcagatgaagcaggg

SEQ ID NO: 2115 - DNA, 122 bp, Homo sapiens
  misc_feature (61)..(62): /note="This region represents a CpG dinucleotide"
  misc_feature (61)..(61): /note="Nucleotide may be methylated to form 5-methylcytosine"
ggccctagcacataattagtggctagtattgttgcttttttgaatgatttatgagtcagtcggtctttgggtagtcatgaagaatatgacttctatacagaggaaatatttgccaggcccaa

SEQ ID NO: 2116 - DNA, 122 bp, Homo sapiens
  misc_feature (61)..(62): /note="This region represents a CpG dinucleotide"
  misc_feature (61)..(61): /note="Nucleotide may be methylated to form 5-methylcytosine"
aaaataatctgtttttaagtgtttctgagaaatgaagacctccagggcagagagagacggcggatcaggaaatagctatgcaaatcacatgcctaagaaattactaaaaccttgatcaggag

SEQ ID NO: 2117 - DNA, 122 bp, Homo sapiens
  misc_feature (61)..(62): /note="This region represents a CpG dinucleotide"
  misc_feature (61)..(61): /note="Nucleotide may be methylated to form 5-methylcytosine"
actttggggtaacggttccagcacagcacatccctttctcctcttttcactcatcgtcaccgctacctgaaaaccctggccgggtgctggggcttgaggagcagttcccacttcccagtctt

SEQ ID NO: 2118 - DNA, 122 bp, Homo sapiens
  misc_feature (61)..(62): /note="This region represents a CpG dinucleotide"
  misc_feature (61)..(61): /note="Nucleotide may be methylated to form 5-methylcytosine"
cttacttaaaggttcatgggaagcactcaatgaatggtagtgttaatactctgttaggaacggggcagggaaggtgcaggcacctcacttcacagagaggtgcagaccaaagagaaacaggc

SEQ ID NO: 2119 - DNA, 122 bp, Homo sapiens
  misc_feature (61)..(62): /note="This region represents a CpG dinucleotide"
  misc_feature (61)..(61): /note="Nucleotide may be methylated to form 5-methylcytosine"
ccaacatggtgaaacccccatctctaataaaaatacaacaattagccagacacggtcatgcgtgcctgtaatctcagctactcaggaggctgaggcaggggaatctcttgaatccggggggc

SEQ ID NO: 2120 - DNA, 122 bp, Homo sapiens
  misc_feature (61)..(62): /note="This region represents a CpG dinucleotide"
  misc_feature (61)..(61): /note="Nucleotide may be methylated to form 5-methylcytosine"
atatccggcccttgcgatcagggcttgaggaacccgcgccatgaagtgcgtgtttgttaccgtagggaccaccagctttgacgacctcattgcgtgtgtgtcggcgcccgacagtctgcaag

SEQ ID NO: 2121 - DNA, 122 bp, Homo sapiens
  misc_feature (61)..(62): /note="This region represents a CpG dinucleotide"
  misc_feature (61)..(61): /note="Nucleotide may be methylated to form 5-methylcytosine"
cagacgtggccactctttgaccagatggatcaagacaaaaacaagactccttcgtaatcacgtgggaatgctgaaaaaacgtaaacattgtccaaaccacaaaaatgaccaaacatccccta

SEQ ID NO: 2122 - DNA, 122 bp, Homo sapiens
  misc_feature (61)..(62): /note="This region represents a CpG dinucleotide"
  misc_feature (61)..(61): /note="Nucleotide may be methylated to form 5-methylcytosine"
agaaagggaaagacgaaaaaggaaacagctgattaacatacacaaatattgcataacagacgaggaataaatcatgtgtaactgcagtcatcatttctatgactggttgttaacagatcatc

SEQ ID NO: 2123 - DNA, 122 bp, Homo sapiens
  misc_feature (61)..(62): /note="This region represents a CpG dinucleotide"
  misc_feature (61)..(61): /note="Nucleotide may be methylated to form 5-methylcytosine"
gagaaaagtgtcttctttcagcaatatggtaaacaccgccttcaaaggctttgttcatgccgcctcatctgtgaagcctgcccagaccccccaggtggagtttagtttctcagtgctcccag

SEQ ID NO: 2124 - DNA, 122 bp, Homo sapiens
  misc_feature (61)..(62): /note="This region represents a CpG dinucleotide"
  misc_feature (61)..(61): /note="Nucleotide may be methylated to form 5-methylcytosine"
gttgttatatgttcctgttttaaccgctggtttgaatgtcccacaatttgtttaaccatacgccattgaaggaaatgtggatcgtttccaggttaaggctgttagcagtacagctcttataa

SEQ ID NO: 2125 - DNA, 122 bp, Homo sapiens
  misc_feature (61)..(62): /note="This region represents a CpG dinucleotide"
  misc_feature (61)..(61): /note="Nucleotide may be methylated to form 5-methylcytosine"
ccttcatcagctagtgagcatgaaagttccagctacttcctttgccttctctgacaccaacgcagtgggggttttggaccatttgtcacagccacaggagggtggaagtctgagcttctcat

SEQ ID NO: 2126 - DNA, 122 bp, Homo sapiens
  misc_feature (61)..(62): /note="This region represents a CpG dinucleotide"
  misc_feature (61)..(61): /note="Nucleotide may be methylated to form 5-methylcytosine"
ccacttgttcctgaagctggatccacccatgaactgttcagctgcaggagttaataagcacgcctctttggcttggctcagcttcatctgggtttctgtcatttgcagatgaaagcatcctg

SEQ ID NO: 2127 - DNA, 122 bp, Homo sapiens
  misc_feature (61)..(62): /note="This region represents a CpG dinucleotide"
  misc_feature (61)..(61): /note="Nucleotide may be methylated to form 5-methylcytosine"
atatgtctgtccagaacttggtgcctccttagaggatttataaccattagcaagctttctcgcgagtctttagttcaaattttcaccatttttcttgtctgaagaaagtttgaggggaaatt

SEQ ID NO: 2128 - DNA, 122 bp, Homo sapiens
  misc_feature (61)..(62): /note="This region represents a CpG dinucleotide"
  misc_feature (61)..(61): /note="Nucleotide may be methylated to form 5-methylcytosine"
gctcagccctctaacacgtctcttctcttttgacctcctcagccaaaacagagtggagtacgagaaaagggtccgagcacaagccaagaagtttgcgccctcataagcagcgaccttgtggc

SEQ ID NO: 2129 - DNA, 122 bp, Homo sapiens
  misc_feature (61)..(62): /note="This region represents a CpG dinucleotide"
  misc_feature (61)..(61): /note="Nucleotide may be methylated to form 5-methylcytosine"
cgcatgtctatcttctgagtcacggcggcagtctggaccagctgctcgctattgctaggccggagcacagctgtcctcccaggagctcccttgtcctccgccggcttcaggatccctgtatc

SEQ ID NO: 2130 - DNA, 122 bp, Homo sapiens
  misc_feature (61)..(62): /note="This region represents a CpG dinucleotide"
  misc_feature (61)..(61): /note="Nucleotide may be methylated to form 5-methylcytosine"
gagcccaattaaaaaaacatgaacccatctgaccctcatgtgaaaacccagggctgtcaccgtccactccttgatttgagagaccagcacaattattctggagatcattaagattctggggg

SEQ ID NO: 2131 - DNA, 122 bp, Homo sapiens
  misc_feature (61)..(62): /note="This region represents a CpG dinucleotide"
  misc_feature (61)..(61): /note="Nucleotide may be methylated to form 5-methylcytosine"
atagacacttctcaaaagaagacatacatacagtgaacaaacatatgaaaaaatgctcaacgtcactaatcatcagggaaatgccaatcgaaaccacaatgagataccatctcacactggtc

SEQ ID NO: 2132 - DNA, 122 bp, Homo sapiens
  misc_feature (61)..(62): /note="This region represents a CpG dinucleotide"
  misc_feature (61)..(61): /note="Nucleotide may be methylated to form 5-methylcytosine"
gtgagagagacacagactgctgtggtatacaaaacacaccaagatgacatgaggtagaaacgagcatcagacaggagttccttctgtgtgctgggttctctaactgcccctcccaggatggg

SEQ ID NO: 2133 - DNA, 122 bp, Homo sapiens
  misc_feature (61)..(62): /note="This region represents a CpG dinucleotide"
  misc_feature (61)..(61): /note="Nucleotide may be methylated to form 5-methylcytosine"
ctcgtggagtactcagatacagccggtatagtgaaggctaatagcatcagcacactttcgcgcattaatcttggagtaattaaaaataaaaacagtgagctatggggttttgttaaacaagg

SEQ ID NO: 2134 - DNA, 122 bp, Homo sapiens
  misc_feature (61)..(62): /note="This region represents a CpG dinucleotide"
  misc_feature (61)..(61): /note="Nucleotide may be methylated to form 5-methylcytosine"
gcaagtgcgccctcaaggccgtggcgagccggggcgcaggacacggcaaggcccctgagccgcccacgcaggtttcccgacgttctcgcagaaaaggtaaagcggcaccccgcccccagttc

SEQ ID NO: 2135 - DNA, 122 bp, Homo sapiens
  misc_feature (61)..(62): /note="This region represents a CpG dinucleotide"
  misc_feature (61)..(61): /note="Nucleotide may be methylated to form 5-methylcytosine"
agtcatccctcagtatccaggagaaattggttccaggacccccacggataccaaaacccacggatactcacaccccagatattaaatggtgtagtggttgcatgtaatgcacacatatcctc

SEQ ID NO: 2136 - DNA, 122 bp, Homo sapiens
  misc_feature (61)..(62): /note="This region represents a CpG dinucleotide"
  misc_feature (61)..(61): /note="Nucleotide may be methylated to form 5-methylcytosine"
ggggcagtttgtctatctggccccctgtggattagcattctttattggtttaggattagacgtcattcaggttgaacggagttccctgaggtgggtgggtgcgtgtttatgtgttgagggga

SEQ ID NO: 2137 - DNA, 122 bp, Homo sapiens
  misc_feature (61)..(62): /note="This region represents a CpG dinucleotide"
  misc_feature (61)..(61): /note="Nucleotide may be methylated to form 5-methylcytosine"
agctctgagggcggctgctgcctgagccaccacaggtgctgcaggtcccaccgatgccggcgccagagctccaactcctgtgacagaggcagtggtcagcaagatggtgcctccgactgtgg

SEQ ID NO: 2138 - DNA, 122 bp, Homo sapiens
  misc_feature (61)..(62): /note="This region represents a CpG dinucleotide"
  misc_feature (61)..(61): /note="Nucleotide may be methylated to form 5-methylcytosine"
acacatgcctcttgaactgatcttatcagcggatggggagcttcacaggaagctgccggtcgctgctgccgtccacagagggggaaatcctgttttgaaccaggtagcaccagggccgtttg

SEQ ID NO: 2139 - DNA, 122 bp, Homo sapiens
  misc_feature (61)..(62): /note="This region represents a CpG dinucleotide"
  misc_feature (61)..(61): /note="Nucleotide may be methylated to form 5-methylcytosine"
tctgtgtggagaggggcccctccaggctcatgctggcgggagcggcaactcctctgcccacgcctctggaaacccgatcgctccctgtctgttaggaagagggactcactggcaggtgatta

SEQ ID NO: 2140 - DNA, 122 bp, Homo sapiens
  misc_feature (61)..(62): /note="This region represents a CpG dinucleotide"
  misc_feature (61)..(61): /note="Nucleotide may be methylated to form 5-methylcytosine"
catcaggccacaaagcaactaggcaactgctgactattgttctccaaacttctaaagtcccgaagaacaaaaaagcaagtgcccagtactcagcttttcaaaaccattaaaatacaaacttc

SEQ ID NO: 2141 - DNA, 122 bp, Homo sapiens
  misc_feature (61)..(62): /note="This region represents a CpG dinucleotide"
  misc_feature (61)..(61): /note="Nucleotide may be methylated to form 5-methylcytosine"
atagactgggaatttacctattattttaaaacagcctttacataaaaccaccattcaggccgggtgtggtggctcatgcctgtaatcccagcactttaggaggctgaggcgggcagatcacc

SEQ ID NO: 2142 - DNA, 122 bp, Homo sapiens
  misc_feature (61)..(62): /note="This region represents a CpG dinucleotide"
  misc_feature (61)..(61): /note="Nucleotide may be methylated to form 5-methylcytosine"
gcccgaccccctcctcaggccgggtgagcggcctcgcgggtcaccagactcccagaacgacggctgcaggccccagagtccacgagggtgggtacaaatcccctgggcacaaacagcccggg

SEQ ID NO: 2143 - DNA, 122 bp, Homo sapiens
  misc_feature (61)..(62): /note="This region represents a CpG dinucleotide"
  misc_feature (61)..(61): /note="Nucleotide may be methylated to form 5-methylcytosine"
gaaagcgccgactgcaatacgattttggtttattttccatatgcagatttcctaattctacgaaggcaatttgagtacatcacaaagccagaaaaggtgtggggtacattctaaataaagaa

SEQ ID NO: 2144 - DNA, 122 bp, Homo sapiens
  misc_feature (61)..(62): /note="This region represents a CpG dinucleotide"
  misc_feature (61)..(61): /note="Nucleotide may be methylated to form 5-methylcytosine"
tagaaaataaaaactaaactgccacatttcaaaagttctccaaaggtgagtccccaaatgcgactccaaatcacattgattcaacattccatcttttgtgtttcagggataataccaatata

SEQ ID NO: 2145 - DNA, 122 bp, Homo sapiens
  misc_feature (61)..(62): /note="This region represents a CpG dinucleotide"
  misc_feature (61)..(61): /note="Nucleotide may be methylated to form 5-methylcytosine"
accagcaagttatacaaacaatgcaagacaaatccaactagaaatcggaagctgccatttcgtatacacaaaatacaagtgaaacagtgaagtaaacatatttttagagggaggtgctgcta

SEQ ID NO: 2146 - DNA, 122 bp, Homo sapiens
  misc_feature (61)..(62): /note="This region represents a CpG dinucleotide"
  misc_feature (61)..(61): /note="Nucleotide may be methylated to form 5-methylcytosine"
gcagggttacatttttagaagcttcaaggtaaatgtacatctcagctttctctagtaagtcgcaggactgtgaagagaaggtagggaaaccaagaataaaagttgtggctgggtcttttgaa

SEQ ID NO: 2147 - DNA, 122 bp, Homo sapiens
  misc_feature (61)..(62): /note="This region represents a CpG dinucleotide"
  misc_feature (61)..(61): /note="Nucleotide may be methylated to form 5-methylcytosine"
aaagaaaccacgttctctgtcctcagccagaagttcagtaatccaaggccagagagtggacggcagaggcactgtccctggggaccttggttataagttatccagacacagggaccagagcc

SEQ ID NO: 2148 - DNA, 122 bp, Homo sapiens
  misc_feature (61)..(62): /note="This region represents a CpG dinucleotide"
  misc_feature (61)..(61): /note="Nucleotide may be methylated to form 5-methylcytosine"
gtggcccaggcatgaccgtgcagaatttctcgctctttagtcatcagggggactgagagacgtaccaaagtatgatgaaaataaaggcaggcagtggaaataaaatgtagcagaaaaaacct

SEQ ID NO: 2149 - DNA, 122 bp, Homo sapiens
  misc_feature (61)..(62): /note="This region represents a CpG dinucleotide"
  misc_feature (61)..(61): /note="Nucleotide may be methylated to form 5-methylcytosine"
tttgtgggcctggtgtcagcagtggggaacagtcttcctgccactttccattcatgtctacgtgactccaacctaaaatagatttttgggggagcccttgattgtaaccttcaacaaaggaa

SEQ ID NO: 2150 - DNA, 122 bp, Homo sapiens
  misc_feature (61)..(62): /note="This region represents a CpG dinucleotide"
  misc_feature (61)..(61): /note="Nucleotide may be methylated to form 5-methylcytosine"
cgcccagccctccccctgggcggggacccgcccgccgtcagcctaggttgaggcgccctgcgtgtgtctataactttgtgctgctgccgcggccgccctgctcgtggaagggaggaggagga

SEQ ID NO: 2151 - DNA, 122 bp, Homo sapiens
  misc_feature (61)..(62): /note="This region represents a CpG dinucleotide"
  misc_feature (61)..(61): /note="Nucleotide may be methylated to form 5-methylcytosine"
agctcgctagccggggcgcgggctgcctccttgttctggtgtgatccgaatgtaacggagcggactttgggatccagaaccccggactgaggttgtgcttggcttgaggggcgggctggtag

SEQ ID NO: 2152 - DNA, 122 bp, Homo sapiens
  misc_feature (61)..(62): /note="This region represents a CpG dinucleotide"
  misc_feature (61)..(61): /note="Nucleotide may be methylated to form 5-methylcytosine"
aaatatatgtttttcccaccgggtcccattttgactcccccaataccctccagttcatcccggagtgctgcagatatctatacatttcctggatgtctcaggaggtgaaaaaaaaaaaaaaa

SEQ ID NO: 2153 - DNA, 122 bp, Homo sapiens
  misc_feature (61)..(62): /note="This region represents a CpG dinucleotide"
  misc_feature (61)..(61): /note="Nucleotide may be methylated to form 5-methylcytosine"
atcagtcatatccagaagatcctctttcagttaagacactatcattggtgatgatatgaacgtttccttaccattgccattcacatggactggaaaacaattgaggtgtaacagtctctgtg

SEQ ID NO: 2154 - DNA, 122 bp, Homo sapiens
  misc_feature (61)..(62): /note="This region represents a CpG dinucleotide"
  misc_feature (61)..(61): /note="Nucleotide may be methylated to form 5-methylcytosine"
agagctcggcagggcgatgcccaagacggggtagtggacggggacgaattggttcagagacgggtagcagatggggcagaaggacgagtaggtgggctggaacaggagcgtagtctgcgggt

SEQ ID NO: 2155 - DNA, 122 bp, Homo sapiens
  misc_feature (61)..(62): /note="This region represents a CpG dinucleotide"
  misc_feature (61)..(61): /note="Nucleotide may be methylated to form 5-methylcytosine"
tcctttaaggcggagggatctacaggagggcggctgtactgtgcttcgccttatatagggcgacttggggcacgcagtagctctctcgagtcactccggcgcagtgttgggactgtctgggt

SEQ ID NO: 2156 - DNA, 122 bp, Homo sapiens
  misc_feature (61)..(62): /note="This region represents a CpG dinucleotide"
  misc_feature (61)..(61): /note="Nucleotide may be methylated to form 5-methylcytosine"
attgtagaaggtcctcttccattttccgattttcatagatgatcttccattaaaaaaagacgctggcatgtttctgctgtagaaaaaaggaagcaaagggatagttacaactccttctactc

SEQ ID NO: 2157 - DNA, 122 bp, Homo sapiens
  misc_feature (61)..(62): /note="This region represents a CpG dinucleotide"
  misc_feature (61)..(61): /note="Nucleotide may be methylated to form 5-methylcytosine"
ttcagtgtgcttttcatgtgtcatttagtcttgacagttcaatactcggtaggcatttcccgttttccagatgaggacattgaaactgaaaaagattaaataactaaacaagtcacagagct

SEQ ID NO: 2158 - DNA, 122 bp, Homo sapiens
  misc_feature (61)..(62): /note="This region represents a CpG dinucleotide"
  misc_feature (61)..(61): /note="Nucleotide may be methylated to form 5-methylcytosine"
ttcctcagcaaagctggtgcttatctgagcagcgggcgatttttctgaagtgacctccgccgagcgggagatttatggtggcgtttgctttcattatgtgtggaggctgcctcgtgagctcg

SEQ ID NO: 2159 - DNA, 122 bp, Homo sapiens
  misc_feature (61)..(62): /note="This region represents a CpG dinucleotide"
  misc_feature (61)..(61): /note="Nucleotide may be methylated to form 5-methylcytosine"
aagccagctcactttatgtcctccaaactcaccctaacttctcgtttgggtctcatcccgcggggctgctgggaaataagctccgccaccacagtggttcctccgccctgtgggagtggggg

SEQ ID NO: 2160 - DNA, 122 bp, Homo sapiens
  misc_feature (61)..(62): /note="This region represents a CpG dinucleotide"
  misc_feature (61)..(61): /note="Nucleotide may be methylated to form 5-methylcytosine"
cactaagtttacacaagaaactggtactatttgaatctaattaatccaaccaaaatttaccgagtgcttcctatatgagtatatgtctaggttgtctattttctaatttctccttttcagtt

SEQ ID NO: 2161 - DNA, 122 bp, Homo sapiens
  misc_feature (61)..(62): /note="This region represents a CpG dinucleotide"
  misc_feature (61)..(61): /note="Nucleotide may be methylated to form 5-methylcytosine"
aggatgttgagcctttgtcaacctgttttgctgagtcatcgttgctttgtcagcctatttcgtgggtcatcactggttgagtgatcaagacttaaacattgtttgtcattgctttaactagg

SEQ ID NO: 2162 - DNA, 122 bp, Homo sapiens
  misc_feature (61)..(62): /note="This region represents a CpG dinucleotide"
  misc_feature (61)..(61): /note="Nucleotide may be methylated to form 5-methylcytosine"
ttattttgtagacagtgtccttcatttggggttctctagcacttcctcatgagatgtgtacggtgcacttttgacagaaataccacagatgtgttctcagtgcattttattaggaggccctt

SEQ ID NO: 2163 - DNA, 122 bp, Homo sapiens
  misc_feature (61)..(62): /note="This region represents a CpG dinucleotide"
  misc_feature (61)..(61): /note="Nucleotide may be methylated to form 5-methylcytosine"
tcttggcctccaagtatagggcaggacccatctgaaatgagagcctatgacctacttccacgtgaagttagagaattcctttatggccagctctcacagaaaaacagagcagagtgagctac

SEQ ID NO: 2164 - DNA, 122 bp, Homo sapiens
  misc_feature (61)..(62): /note="This region represents a CpG dinucleotide"
  misc_feature (61)..(61): /note="Nucleotide may be methylated to form 5-methylcytosine"
tagtagtaaatgattttcaaagtaaccagttcaaagggtattttggcccttaaatttacacgtgctttttagtgttggcaagcatgatttattcaaaggtcaatggaggaattattggatct

SEQ ID NO: 2165 - DNA, 122 bp, Homo sapiens
  misc_feature (61)..(62): /note="This region represents a CpG dinucleotide"
  misc_feature (61)..(61): /note="Nucleotide may be methylated to form 5-methylcytosine"
tggctgcgctggtaataaggacagaaacgccgccagccatgggggctgccctcaggagagcgggacgggcaggagggcaccacaggtggctcagtcctgggcctgaagctagttgctgtggg

SEQ ID NO: 2166 - DNA, 122 bp, Homo sapiens
  misc_feature (61)..(62): /note="This region represents a CpG dinucleotide"
  misc_feature (61)..(61): /note="Nucleotide may be methylated to form 5-methylcytosine"
gggaggtgggggagagaaccgcagaatgcacgttaagcctgggctccctgcgggtccctgcgcccctctccaacctcgtcaccgccctcctccggcaccgctgcaggccagcggctcctcgg

SEQ ID NO: 2167 - DNA, 122 bp, Homo sapiens
  misc_feature (61)..(62): /note="This region represents a CpG dinucleotide"
  misc_feature (61)..(61): /note="Nucleotide may be methylated to form 5-methylcytosine"
ggtttcgacatgttggtcaggctgctctcaaacacttgggctcaagtgatctctccacctcggcctcccaagtagctgggactacagacgcgcaccacaaaaattatgcccagctaattttt

SEQ ID NO: 2168 - DNA, 122 bp, Homo sapiens
  misc_feature (61)..(62): /note="This region represents a CpG dinucleotide"
  misc_feature (61)..(61): /note="Nucleotide may be methylated to form 5-methylcytosine"
cctttggggtgaatcatgcttccagactgctctcttttgacttagcagttagtttgtcagcgtatagcctggatcacacggaaggctggaataagagaattttaccaggaccactctttgat

SEQ ID NO: 2169 - DNA, 122 bp, Homo sapiens
  misc_feature (61)..(62): /note="This region represents a CpG dinucleotide"
  misc_feature (61)..(61): /note="Nucleotide may be methylated to form 5-methylcytosine"
ccactggaatttaaccacttagtagtttcatttaacctgcttagtgggcctctgagtgagcgcaaaagttaaagtccttgctgggaagttatttccagttgaggaaggaaaagatggtatca

SEQ ID NO: 2170 - DNA, 122 bp, Homo sapiens
  misc_feature (61)..(62): /note="This region represents a CpG dinucleotide"
  misc_feature (61)..(61): /note="Nucleotide may be methylated to form 5-methylcytosine"
agggacggcggggtccagcaggcaggctccggccgtgcagggtgtggactgtcccgggggcgctgggggcttctgagggtgtctctgtccgccctgccctcagccgcactctgttcagaagg

SEQ ID NO: 2171 - DNA, 122 bp, Homo sapiens
  misc_feature (61)..(62): /note="This region represents a CpG dinucleotide"
  misc_feature (61)..(61): /note="Nucleotide may be methylated to form 5-methylcytosine"
tgagtgatcataggcaaagtacacatggcctcagagccccaggctttgtcatggtacagacgcactcacaatacctgttgtgaggaccaaggacgtaacacatcaagcccagccctgtgggc

SEQ ID NO: 2172 - DNA, 122 bp, Homo sapiens
  misc_feature (61)..(62): /note="This region represents a CpG dinucleotide"
  misc_feature (61)..(61): /note="Nucleotide may be methylated to form 5-methylcytosine"
ggatctgtgtaccgtgtgccattgtgtgatcggtccgctgtgggggtggggatctgagtgcggcgtgtcagtgtgcagtggagtgtgcagtctaagcttgcggctgtctccaggcagaagag

SEQ ID NO: 2173 - DNA, 122 bp, Homo sapiens
  misc_feature (61)..(62): /note="This region represents a CpG dinucleotide"
  misc_feature (61)..(61): /note="Nucleotide may be methylated to form 5-methylcytosine"
ctgtccacccaccgcgcgtccccgtgcccccacccacggtcatgtcgcgcgccccgcaggcggctgcactgcacgcgcaactacatccacatgcacctgttcctgtccttcatgctgcgcgc

SEQ ID NO: 2174 - DNA, 122 bp, Homo sapiens
  misc_feature (61)..(62): /note="This region represents a CpG dinucleotide"
  misc_feature (61)..(61): /note="Nucleotide may be methylated to form 5-methylcytosine"
agtcagctgtcactgttgtttacgtagctccactcctgaatgaaaatggacccactcaatcgaaggccactcactgctttctcatctcccagggcgcccttacatgcctctggcacctgcca

SEQ ID NO: 2175 - DNA, 122 bp, Homo sapiens
  misc_feature (61)..(62): /note="This region represents a CpG dinucleotide"
  misc_feature (61)..(61): /note="Nucleotide may be methylated to form 5-methylcytosine"
ctccgcgcaggtaggtccccaggcgctcaccggtgctgcgtctccaacccgtggcgcgcgcggttggcatcctccaggtggcgctgcagctcctcctgccgctcccggtcggccgcctcctg

SEQ ID NO: 2176 - DNA, 122 bp, Homo sapiens
  misc_feature (61)..(62): /note="This region represents a CpG dinucleotide"
  misc_feature (61)..(61): /note="Nucleotide may be methylated to form 5-methylcytosine"
caggccatatctgtttctgctcattatggcatctaagtatctacctatcacagtggaggacgtgtagtagacactcagtaaatgaatgaatacatgagggaataagcaatgaagatcattac

SEQ ID NO: 2177 - DNA, 122 bp, Homo sapiens
  misc_feature (61)..(62): /note="This region represents a CpG dinucleotide"
  misc_feature (61)..(61): /note="Nucleotide may be methylated to form 5-methylcytosine"
gggctgagtgagacctcgttgccaaaaaaaaaaaaaacaaaaaaacctggggagagagagcgaaagctactcaaggggccacaaatgtaattatgccaaaattcaaatgatgattagtcagt

SEQ ID NO: 2178 - DNA, 122 bp, Homo sapiens
  misc_feature (61)..(62): /note="This region represents a CpG dinucleotide"
  misc_feature (61)..(61): /note="Nucleotide may be methylated to form 5-methylcytosine"
ctgaagtgcgtgcggacagaacccatcttttgctattggaggaactaaggttctcaggatcgtggtgcttgtccaccctgccggtcacgaggagcacagcggaccatgtgacccgcaacagc

SEQ ID NO: 2179 - DNA, 122 bp, Homo sapiens
  misc_feature (61)..(62): /note="This region represents a CpG dinucleotide"
  misc_feature (61)..(61): /note="Nucleotide may be methylated to form 5-methylcytosine"
aactatataaatctggcttcctgatgtaatctatttctagtaatgtatatttggccctgacgtgtaattcctgtcatgggccacatcaacctgtgaaagacaaaaaccagattcctgacaag

SEQ ID NO: 2180 - DNA, 122 bp, Homo sapiens
  misc_feature (61)..(62): /note="This region represents a CpG dinucleotide"
  misc_feature (61)..(61): /note="Nucleotide may be methylated to form 5-methylcytosine"
agtacagttcatgaattactccactgagaggaatagcgatgagaaacacaaatacttactcgggattaatgaattttacagtacactataatactttataaaaagaggaaataaaattatga

SEQ ID NO: 2181 - DNA, 122 bp, Homo sapiens
  misc_feature (61)..(62): /note="This region represents a CpG dinucleotide"
  misc_feature (61)..(61): /note="Nucleotide may be methylated to form 5-methylcytosine"
gagctaggggcgggacagagccctggggaagagcccagccagaccatggggttggagcaccgaggacctactacgggttcaggttcccggcccagggttaaagtggacggagctctaagctg

SEQ ID NO: 2182 - DNA, 122 bp, Homo sapiens
  misc_feature (61)..(62): /note="This region represents a CpG dinucleotide"
  misc_feature (61)..(61): /note="Nucleotide may be methylated to form 5-methylcytosine"
ctcctgatcagggaacctgggttctataactgcttctactactgatttgtcctgtgacttcgcgcaccaaatttaggcttgtaaattaaactcccagatttctgttttccattttgcagctc

SEQ ID NO: 2183 - DNA, 122 bp, Homo sapiens
  misc_feature (61)..(62): /note="This region represents a CpG dinucleotide"
  misc_feature (61)..(61): /note="Nucleotide may be methylated to form 5-methylcytosine"
agcctctttgcccaaattagttttggtgtggatggtatggggcagcgcaaaaaacactcacgctggcctctgcctgctaatgtgaacaggggaacccagcaggaaacagagcaacctgatct

SEQ ID NO: 2184 - DNA, 122 bp, Homo sapiens
  misc_feature (61)..(62): /note="This region represents a CpG dinucleotide"
  misc_feature (61)..(61): /note="Nucleotide may be methylated to form 5-methylcytosine"
tacaggaacagggactgcaaggctggaagtccggtggggaccgtggctgtgtgagtgtgacgagtgggagtgggggtggggttgagacacaactctgtgataagaggcttcagctcccactt

SEQ ID NO: 2185 - DNA, 122 bp, Homo sapiens
  misc_feature (61)..(62): /note="This region represents a CpG dinucleotide"
  misc_feature (61)..(61): /note="Nucleotide may be methylated to form 5-methylcytosine"
ggctctattccaataaaactttatttacaaggtcaggctgtgcctctatttgtgcttccacggctatagtttgtcagcccctgttgtaagacatcagtcattgaggttttttgtttgttcgt

SEQ ID NO: 2186 - DNA, 122 bp, Homo sapiens
  misc_feature (61)..(62): /note="This region represents a CpG dinucleotide"
  misc_feature (61)..(61): /note="Nucleotide may be methylated to form 5-methylcytosine"
tatccaaaaagaagtctggtggataaagaccccctccagggtcaccgcagcagggaaatacgagagaaattctttgagcagtttccagcgttgagtgggaggtgttgtggctggcacccttt

SEQ ID NO: 2187 - DNA, 122 bp, Homo sapiens
  misc_feature (61)..(62): /note="This region represents a CpG dinucleotide"
  misc_feature (61)..(61): /note="Nucleotide may be methylated to form 5-methylcytosine"
ttgcctaactctcaaaatctcatctaacactctatttaagctgaatgctgctgctgtcttcgtagtactatttagcttaaaaattagagaaactgtattcgggtttaacatttttaaacaaa

SEQ ID NO: 2188 - DNA, 122 bp, Homo sapiens
  misc_feature (61)..(62): /note="This region represents a CpG dinucleotide"
  misc_feature (61)..(61): /note="Nucleotide may be methylated to form 5-methylcytosine"
tatctggcttctctttgcctctcagtaaacaccaactaggaaaaggagtgcatgagatgacgtccatacagcccctggcggtgggctggcagcctggcacattctccgtgaatgagaatgtg

SEQ ID NO: 2189 - DNA, 122 bp, Homo sapiens
  misc_feature (61)..(62): /note="This region represents a CpG dinucleotide"
  misc_feature (61)..(61): /note="Nucleotide may be methylated to form 5-methylcytosine"
ctcactaaatagtagtattacggtttacaggggatgtggagagtgtgccaggtttgaaaacgtcagagatccagaaacccaacctcaagctgtgcagagagcctgggactagcccaatggtg

SEQ ID NO: 2190 - DNA, 122 bp, Homo sapiens
  misc_feature (61)..(62): /note="This region represents a CpG dinucleotide"
  misc_feature (61)..(61): /note="Nucleotide may be methylated to form 5-methylcytosine"
aggaggccgtgtcactcaaggtcaacttccatgagtcgactgagctccaggccacaccctcggacacagcagccagacccaggctccgcccggacaaggtctgactcagcccacgggacagg

SEQ ID NO: 2191 - DNA, 122 bp, Homo sapiens
  misc_feature (61)..(62): /note="This region represents a CpG dinucleotide"
  misc_feature (61)..(61): /note="Nucleotide may be methylated to form 5-methylcytosine"
ctgaggtcagtctctcccaagaaggcctctccagagagccgggtgctgggccatctccctcggacagcgactgttttatcgtctccatcgatggtccgtaaagacactcagtcaaaaggctg

SEQ ID NO: 2192 - DNA, 122 bp, Homo sapiens
  misc_feature (61)..(62): /note="This region represents a CpG dinucleotide"
  misc_feature (61)..(61): /note="Nucleotide may be methylated to form 5-methylcytosine"
aatgggggccgagaacctgcgcctctacccagttcccaggcgatacggccgctgctgatccggaagctcactttgtgaaccactgacgcagcacatggtgaggacgctgtatgtgaacactc

SEQ ID NO: 2193 - DNA, 122 bp, Homo sapiens
  misc_feature (61)..(62): /note="This region represents a CpG dinucleotide"
  misc_feature (61)..(61): /note="Nucleotide may be methylated to form 5-methylcytosine"
ctgatgatgattcagcatcagtttggtcaccattatcgaagcgttttgaatgtgtagctgcgacctaaataacttcccagaggtaaatgcatcctgtaggtttacaacaagcagtattatta

SEQ ID NO: 2194 - DNA, 122 bp, Homo sapiens
  misc_feature (61)..(62): /note="This region represents a CpG dinucleotide"
  misc_feature (61)..(61): /note="Nucleotide may be methylated to form 5-methylcytosine"
gtttttgtttggattgtgttctgggtctggaatgtcctcccttaccacagctggaactaccgcagggtgactggcatggagccatggtagagaaggcagtgatgtaagtgaggttagatcct

SEQ ID NO: 2195 - DNA, 122 bp, Homo sapiens
  misc_feature (61)..(62): /note="This region represents a CpG dinucleotide"
  misc_feature (61)..(61): /note="Nucleotide may be methylated to form 5-methylcytosine"
agaactgagccgggattccagggcggagccttcctcccactccgccatcgcggccttgcacgcgatctgctccggtgcactgtgcttctgatactggtgaccaccagatagatcttgggctg

SEQ ID NO: 2196 - DNA, 122 bp, Homo sapiens
  misc_feature (61)..(62): /note="This region represents a CpG dinucleotide"
  misc_feature (61)..(61): /note="Nucleotide may be methylated to form 5-methylcytosine"
taggtgcctgccactgggtatcacctgtggctgggcttctcagcaatgctaagacacagacgccatcgtcatccttgcagtcagcagggggcactgaggcacagagggctgagtggctcccc

SEQ ID NO: 2197 - DNA, 122 bp, Homo sapiens
  misc_feature (61)..(62): /note="This region represents a CpG dinucleotide"
  misc_feature (61)..(61): /note="Nucleotide may be methylated to form 5-methylcytosine"
ctaaacattttccttgccttgagtgcctataaatgacacagtttttaagttgccacacaacgttattatataaaaatcaagcatcagaggttttgctttaatagttttttgtttgtttgttt

SEQ ID NO: 2198 - DNA, 122 bp, Homo sapiens
  misc_feature (61)..(62): /note="This region represents a CpG dinucleotide"
  misc_feature (61)..(61): /note="Nucleotide may be methylated to form 5-methylcytosine"
cccctatcttctcttccatcaaatacaaaggcggcagggcctggggctgggccgttccaccggcaggtcaggaccgccaggccagcctttctgtccactgggccgaagggtgtggcccggtt

SEQ ID NO: 2199 - DNA, 122 bp, Homo sapiens
  misc_feature (61)..(62): /note="This region represents a CpG dinucleotide"
  misc_feature (61)..(61): /note="Nucleotide may be methylated to form 5-methylcytosine"
ttcttacttaggtgggtgacctcagacaattttcttagtgacattaaacctttctacactcgtctgaaaaaaggagagactgacagttccctgcaggcttcccgtagagctaaatggcatca

SEQ ID NO: 2200 - DNA, 122 bp, Homo sapiens
  misc_feature (61)..(62): /note="This region represents a CpG dinucleotide"
  misc_feature (61)..(61): /note="Nucleotide may be methylated to form 5-methylcytosine"
tggaaaaggttagctataataattcaaacagcattgccgtaaaaacatcctttccaaatacgttggagaaaaagcaaacaagtttcttttgtgaccacagggggaagcatcagcatggcgtt

SEQ ID NO: 2201 - DNA, 122 bp, Homo sapiens
  misc_feature (61)..(62): /note="This region represents a CpG dinucleotide"
  misc_feature (61)..(61): /note="Nucleotide may be methylated to form 5-methylcytosine"
ggctcgaactcaggaccttcagattatgagactgacgcgctgcccgctgcgctaagagggcgacgaagtataatgccgcgccagcttccacaggaatttcctaatttctttccccaggtggg

SEQ ID NO: 2202 - DNA, 122 bp, Homo sapiens
  misc_feature (61)..(62): /note="This region represents a CpG dinucleotide"
  misc_feature (61)..(61): /note="Nucleotide may be methylated to form 5-methylcytosine"
cttatgtggtgcattctctctggtatgccttaacatgttgttacgaactgaattgtgccccgcccctccaagttcttatgttgaagtcctaaccaccccacttacctcagaatgtgactgta

SEQ ID NO: 2203 - DNA, 122 bp, Homo sapiens
  misc_feature (61)..(62): /note="This region represents a CpG dinucleotide"
  misc_feature (61)..(61): /note="Nucleotide may be methylated to form 5-methylcytosine"
ttcacctttgcaactgcatttggattctatattgtctgcatcaggcatggagacgcccaccggctgctgtgagaggaataaaaggagtactgacaaacgtcatcatacaaaaaaggtttcaa

SEQ ID NO: 2204 - DNA, 122 bp, Homo sapiens
  misc_feature (61)..(62): /note="This region represents a CpG dinucleotide"
  misc_feature (61)..(61): /note="Nucleotide may be methylated to form 5-methylcytosine"
agtctcacccactggactacaacttgaggtcagtgcttgtgtcttcctcgtctcttcatacgcaacacccatcaagatgctcagcatgtagtaaatgataagtaaactaagtgaaagaatag

SEQ ID NO: 2205 - DNA, 122 bp, Homo sapiens
  misc_feature (61)..(62): /note="This region represents a CpG dinucleotide"
  misc_feature (61)..(61): /note="Nucleotide may be methylated to form 5-methylcytosine"
ctccagacgtttccagtgagtggatcagtagcagtggacctggggcagctcagcaacagccgctgctgcttgtcctgtcttgggtttcaggttccggggtggcaggccagagcaggaagagg

SEQ ID NO: 2206 - DNA, 122 bp, Homo sapiens
  misc_feature (61)..(62): /note="This region represents a CpG dinucleotide"
  misc_feature (61)..(61): /note="Nucleotide may be methylated to form 5-methylcytosine"
gtgtccagggctggtgctctgacagctggagattccccagataaaggcttgctgctgggccgcacaaaccagctgaggtcaaagcactgaggaagctgctctgtggcagtgccctcggcggg

SEQ ID NO: 2207 - DNA, 122 bp, Homo sapiens
  misc_feature (61)..(62): /note="This region represents a CpG dinucleotide"
  misc_feature (61)..(61): /note="Nucleotide may be methylated to form 5-methylcytosine"
aactttttatataacacagacccttgctactcaaatgtgtggtggttcttgaatcagcaccgtctgcatcacctggaagcttgttagaaatgcagaatttaaggcttaatcccggacctact

SEQ ID NO: 2208 - DNA, 122 bp, Homo sapiens
  misc_feature (61)..(62): /note="This region represents a CpG dinucleotide"
  misc_feature (61)..(61): /note="Nucleotide may be methylated to form 5-methylcytosine"
ccagcgcgtcccccccgcacccccggcccctcctccgcgccaactgtgtaaatcagccgccgcagtcctctcgccgcgcatcgcaggcaaaatcccggcttaggaagcaaggaagcaagtga

SEQ ID NO: 2209 - DNA, 122 bp, Homo sapiens
  misc_feature (61)..(62): /note="This region represents a CpG dinucleotide"
  misc_feature (61)..(61): /note="Nucleotide may be methylated to form 5-methylcytosine"
actgcagctgcagaggtcctcagatctggtttcccttccttgagaggcccagttcctattcgtttcctgtctctgctactgactacctccgcccaccctcaacctcaccggctcccacttta

SEQ ID NO: 2210 - DNA, 122 bp, Homo sapiens
  misc_feature (61)..(62): /note="This region represents a CpG dinucleotide"
  misc_feature (61)..(61): /note="Nucleotide may be methylated to form 5-methylcytosine"
gtggcaactgcagcacaaacaggctgtgtgagccacatcccaaaacactcaccctaggtacgtgaaataaactctaattgcatcaggactaccaaccttacctcaatctgtttaggcctgtg

SEQ ID NO: 2211 - DNA, 122 bp, Homo sapiens
  misc_feature (61)..(62): /note="This region represents a CpG dinucleotide"
  misc_feature (61)..(61): /note="Nucleotide may be methylated to form 5-methylcytosine"
cagttagcattggtccatgcctatcaacggaaaattgtgcagtctctgggataaacagctcgactttgtcaagggaaccgtgtatttttactagaagtcagattcacgtccggcctccaggc

SEQ ID NO: 2212 - DNA, 122 bp, Homo sapiens
  misc_feature (61)..(62): /note="This region represents a CpG dinucleotide"
  misc_feature (61)..(61): /note="Nucleotide may be methylated to form 5-methylcytosine"
ttcaagaaacaaggtcaaagggacaacagatataactgtcacaataaacaattctgttgacgtggaaatgcacatgacttggttgaaacaaagctcctcagtggccagtgacatccaggttt

SEQ ID NO: 2213 - DNA, 122 bp, Homo sapiens
  misc_feature (61)..(62): /note="This region represents a CpG dinucleotide"
  misc_feature (61)..(61): /note="Nucleotide may be methylated to form 5-methylcytosine"
acaggggctaggagatataatctagctgtgggcctgggagaagggaaatgatgtggtaagcgactggccacactctgctgcacgtggccaaatccacagtgtgcccatgatggtggggtgtg

SEQ ID NO: 2214 - DNA, 122 bp, Homo sapiens
  misc_feature (61)..(62): /note="This region represents a CpG dinucleotide"
  misc_feature (61)..(61): /note="Nucleotide may be methylated to form 5-methylcytosine"
ccatccaaggagacaatttacagttgagttaatctgggtacattagcgagacatggattccggacgacagaccaatttatgttgtttccctgtccccccttagtgctgctctgtgtgagcaa

SEQ ID NO: 2215 - DNA, 122 bp, Homo sapiens
  misc_feature (61)..(62): /note="This region represents a CpG dinucleotide"
  misc_feature (61)..(61): /note="Nucleotide may be methylated to form 5-methylcytosine"
tttattttttattttttttttgaaagaatgtcttggaatgcgcaagtctccctttagagccgtcttttgcagggagcgggaagtgacaagagctcagatctccctcccgatctccctcccca

SEQ ID NO: 2216 - DNA, 122 bp, Homo sapiens
  misc_feature (61)..(62): /note="This region represents a CpG dinucleotide"
  misc_feature (61)..(61): /note="Nucleotide may be methylated to form 5-methylcytosine"
ctgcagcctgaggtcctcagctggtcacaggaggggagagctttatgcaggagtggctaccggggtgtggtcagctggaaggatgagaatagactttcaaaccactccccctccttcacctt

SEQ ID NO: 2217 - DNA, 122 bp, Homo sapiens
  misc_feature (61)..(62): /note="This region represents a CpG dinucleotide"
  misc_feature (61)..(61): /note="Nucleotide may be methylated to form 5-methylcytosine"
cagtgtgaccttgggccagttacttaatctctctgagcctcagtgttcccatctgcaaaacggagataataataacagcatgttccacacagaatttggggaggagtaaatgagctcatgtg

SEQ ID NO: 2218 - DNA, 122 bp, Homo sapiens
  misc_feature (61)..(62): /note="This region represents a CpG dinucleotide"
  misc_feature (61)..(61): /note="Nucleotide may be methylated to form 5-methylcytosine"
aggagatttaggtggtgtatcagtgcgagctcggtggcgaacaatgggctccctgttgctcgttgaagcagaatggagacttggcgggattagcggcctctgaggtctccgagggctggagg

SEQ ID NO: 2219 - DNA, 122 bp, Homo sapiens
  misc_feature (61)..(62): /note="This region represents a CpG dinucleotide"
  misc_feature (61)..(61): /note="Nucleotide may be methylated to form 5-methylcytosine"
tggcactagtaagttttgtcaggagagggcgctggagcccacgttaaggtcagctctgtgcggccttgtagggggggcaaggttaaaaaattcaattataacttttgaaaataggatgtctg

SEQ ID NO: 2220 - DNA, 122 bp, Homo sapiens
  misc_feature (61)..(62): /note="This region represents a CpG dinucleotide"
  misc_feature (61)..(61): /note="Nucleotide may be methylated to form 5-methylcytosine"
atagcacactgagaagacaaaaacaagaagccttcaaaaaatgtacttaaccttaagccacgtggagggctggcaacccaactgagttgaacatggtataattaaacatgtagaatattaaa

SEQ ID NO: 2221 - DNA, 122 bp, Homo sapiens
  misc_feature (61)..(62): /note="This region represents a CpG dinucleotide"
  misc_feature (61)..(61): /note="Nucleotide may be methylated to form 5-methylcytosine"
cacctgttcgcatgtatatgtgagcacgtgcacacaggtgaagcagtgaccacacaaacacgtgcacacacacatgcacccaccgacttgcacccacccatggggacacatgggccacgtgt

SEQ ID NO: 2222 - DNA, 122 bp, Homo sapiens
  misc_feature (61)..(62): /note="This region represents a CpG dinucleotide"
  misc_feature (61)..(61): /note="Nucleotide may be methylated to form 5-methylcytosine"
attttgaaatcaaatgactgtgtgagcttggggaagttagttaatatctctgatcttcagcgtcatgtgtaaaatgtgggcgatcataccagctgtatagcattataatgaagattaaatga

SEQ ID NO: 2223 - DNA, 122 bp, Homo sapiens
  misc_feature (61)..(62): /note="This region represents a CpG dinucleotide"
  misc_feature (61)..(61): /note="Nucleotide may be methylated to form 5-methylcytosine"
ctctcgctataatatagtcaggctatccccacccttcccctaaagggctctaagaaaggtcgctaattacttccacattgcaaagtacaatggtcatttttcaattcttattttgactcatc

SEQ ID NO: 2224 - DNA, 122 bp, Homo sapiens
  misc_feature (61)..(62): /note="This region represents a CpG dinucleotide"
  misc_feature (61)..(61): /note="Nucleotide may be methylated to form 5-methylcytosine"
gagaactcctgcacctgggtcagggtctcagccacggacaaggggcgtggctctgcagagcgaagcagcagctccacccgttcgcagggagggagggggcggaggtggcctcactgcctgag

SEQ ID NO: 2225 - DNA, 122 bp, Homo sapiens
  misc_feature (61)..(62): /note="This region represents a CpG dinucleotide"
  misc_feature (61)..(61): /note="Nucleotide may be methylated to form 5-methylcytosine"
ctggcactcacttagccaaaaatctttctagaagggtggcaggccttcctgccccactcccggaacaggccggctgctttcagggccagaagagccagccctttggaggaggaggcttgtga

SEQ ID NO: 2226 - DNA, 122 bp, Homo sapiens
  misc_feature (61)..(62): /note="This region represents a CpG dinucleotide"
  misc_feature (61)..(61): /note="Nucleotide may be methylated to form 5-methylcytosine"
attacatgagttctggaaaaggacctcagaaatggtatcatttaacaatctccacttgaacgcttatgttactcactatattaaaaattatggtgcttgtttcaggagcacacagactaaaa

SEQ ID NO: 2227 - DNA, 122 bp, Homo sapiens
  misc_feature (61)..(62): /note="This region represents a CpG dinucleotide"
  misc_feature (61)..(61): /note="Nucleotide may be methylated to form 5-methylcytosine"
ctggggccagggtcaaggctcattccgtggccttgagcacagcctggtgtgtggctgggtcgagtccagcagaagtctcggggttttccagcctccatccgagtccggctttgatgcctttc

SEQ ID NO: 2228 - DNA, 122 bp, Homo sapiens
  misc_feature (61)..(62): /note="This region represents a CpG dinucleotide"
  misc_feature (61)..(61): /note="Nucleotide may be methylated to form 5-methylcytosine"
cctaattgattaccaccccatgatgaatgacactgggagccagagtgtgctaagcaccttcgtagagtggtacccaatgagctggagagattttcccttcctcgagacaatggttactcctg

SEQ ID NO: 2229 - DNA, 122 bp, Homo sapiens
  misc_feature (61)..(62): /note="This region represents a CpG dinucleotide"
  misc_feature (61)..(61): /note="Nucleotide may be methylated to form 5-methylcytosine"
ctacattcagaatttcctcctccattgttgttgaaagtgagatctcaagggaaaaatcagcgctgagacctaggagcaagtaggtcagtagatggcactcctcgccaactcagatactgggc

SEQ ID NO: 2230 - DNA, 122 bp, Homo sapiens
  misc_feature (61)..(62): /note="This region represents a CpG dinucleotide"
  misc_feature (61)..(61): /note="Nucleotide may be methylated to form 5-methylcytosine"
cttgctggttgccaggctcttatctcagccagtccagactccagcccaacccaggaaggacgcaaaccagaggagaagagaggaggaggaggagttagaggtggcccctctgattagggcag

SEQ ID NO: 2231 - DNA, 122 bp, Homo sapiens
  misc_feature (61)..(62): /note="This region represents a CpG dinucleotide"
  misc_feature (61)..(61): /note="Nucleotide may be methylated to form 5-methylcytosine"
attagtaaagcccttctcctgggagagggacttaccatcaggcctgagaaagaagtcaggcgtgcttggaatgcaattgcaaaagaggttacaagagcctgtgagaatgccgaaatcaagtg

SEQ ID NO: 2232 - DNA, 122 bp, Homo sapiens
  misc_feature (61)..(62): /note="This region represents a CpG dinucleotide"
  misc_feature (61)..(61): /note="Nucleotide may be methylated to form 5-methylcytosine"
ctgcatggatgcctgccagtgaggcagtgacagccctgggaggctggtcaccgagatgcccgcccctgctccctctggtggtggccgtgtacaccatatgcccctcaagccaggaaggcaag

SEQ ID NO: 2233 - DNA, 122 bp, Homo sapiens
  misc_feature (61)..(62): /note="This region represents a CpG dinucleotide"
  misc_feature (61)..(61): /note="Nucleotide may be methylated to form 5-methylcytosine"
agatggcgtggggatttaggggagtgggaccttgaggcttcttcagttcagatgtcaaaacgccattatttgggggtatgtttctgcgcctccaacactgtttaacagggaggcttgtttca

SEQ ID NO: 2234 - DNA, 122 bp, Homo sapiens
  misc_feature (61)..(62): /note="This region represents a CpG dinucleotide"
  misc_feature (61)..(61): /note="Nucleotide may be methylated to form 5-methylcytosine"
gctcagtgcacagaagcattctgcttacccagctgggactgctgactgcaccatcgagcacgcaggttgcactgttctcagcagctacactggattatatgccgcctttcttactgactgat

SEQ ID NO: 2235 - DNA, 122 bp, Homo sapiens
  misc_feature (61)..(62): /note="This region represents a CpG dinucleotide"
  misc_feature (61)..(61): /note="Nucleotide may be methylated to form 5-methylcytosine"
catgtagaaagagtgtcatggaatttcctttacggaaatgaaagtgctccgtatttctatcgctgtgcttttcataatggcaaatgattctgctgatggaatggctttctgagtgtataggt

SEQ ID NO: 2236 - DNA, 122 bp, Homo sapiens
  misc_feature (61)..(62): /note="This region represents a CpG dinucleotide"
  misc_feature (61)..(61): /note="Nucleotide may be methylated to form 5-methylcytosine"
ccaagtttgacatttaaatcaggtacattatgcacattttcccctccctgctgaggggcacgtgcaggaagaacagacagatcttgttgctccctgataaggtcagagaagcttagctagat

SEQ ID NO: 2237 - DNA, 122 bp, Homo sapiens
  misc_feature (61)..(62): /note="This region represents a CpG dinucleotide"
  misc_feature (61)..(61): /note="Nucleotide may be methylated to form 5-methylcytosine"
ctcggctgaggagctcagccacttcaccctgggctgatctccagacctgtctctcaccagcgtttagcctgagccctgatctgtgtggtcagcagcattcccagtgcccttgcagggtgtct

SEQ ID NO: 2238 - DNA, 122 bp, Homo sapiens
  misc_feature (61)..(62): /note="This region represents a CpG dinucleotide"
  misc_feature (61)..(61): /note="Nucleotide may be methylated to form 5-methylcytosine"
caaacagaacttgcctaaaagtaaacttctgatgctgtcactaaaatctcttccatgtcccgtgcacccatttcagtggatggcactgtcgctcttccagtcactcaagtaagaagccttga

SEQ ID NO: 2239 - DNA, 122 bp, Homo sapiens
  misc_feature (61)..(62): /note="This region represents a CpG dinucleotide"
  misc_feature (61)..(61): /note="Nucleotide may be methylated to form 5-methylcytosine"
tagcagctgcagcagaacagctagtagtcagattccagaagccaaatgttccttataaggcggcaggatgtggtggagagagtctagaactagcaggcagctgacccagcttgttctgcttc

SEQ ID NO: 2240 - DNA, 122 bp, Homo sapiens
  misc_feature (61)..(62): /note="This region represents a CpG dinucleotide"
  misc_feature (61)..(61): /note="Nucleotide may be methylated to form 5-methylcytosine"
gagatttagattcagagaagcatgagtcacctcaccccagattctgcaggttcagataagcgatagtatcttgagcatcaaagtaagcaatgaaagggcttgaccagcttttagttgatccc

SEQ ID NO: 2241 - DNA, 122 bp, Homo sapiens
  misc_feature (61)..(62): /note="This region represents a CpG dinucleotide"
  misc_feature (61)..(61): /note="Nucleotide may be methylated to form 5-methylcytosine"
gcgccccctcttgaattcaggcctagcacatcacctccgcccctcgcaccctgcagtctgcgctccatacagcacgtgagcgggtgctcagcaatgttccctggctgaaagaaccgcataga

SEQ ID NO: 2242 - DNA, 122 bp, Homo sapiens
  misc_feature (61)..(62): /note="This region represents a CpG dinucleotide"
  misc_feature (61)..(61): /note="Nucleotide may be methylated to form 5-methylcytosine"
tggggggctttcagcaaacagttcggcctccctaccagctttctggggttgtcaggaatgcgtgtatggtgcatgtgaaacgcttagtacagtgcccggcacagaggaagtgctccattaat

SEQ ID NO: 2243 - DNA, 122 bp, Homo sapiens
  misc_feature (61)..(62): /note="This region represents a CpG dinucleotide"
  misc_feature (61)..(61): /note="Nucleotide may be methylated to form 5-methylcytosine"
gttcggcccctccccaggcccctccccgcccccccccccccccggcccggcctcaggccccgccctctctgcgcacaggcttctttgcctacacgtgcggccgcctggtggtggtggaggac

SEQ ID NO: 2244 - DNA, 122 bp, Homo sapiens
  misc_feature (61)..(62): /note="This region represents a CpG dinucleotide"
  misc_feature (61)..(61): /note="Nucleotide may be methylated to form 5-methylcytosine"
gagactacgactcccagcagctccgcgttccccctttcctcaaaagaaaaagatctacctcgaggtagttccctacagacacgccctatccctattagttatgctgcgctgtgtggccctgg

SEQ ID NO: 2245 - DNA, 122 bp, Homo sapiens
  misc_feature (61)..(62): /note="This region represents a CpG dinucleotide"
  misc_feature (61)..(61): /note="Nucleotide may be methylated to form 5-methylcytosine"
agtccaaagtcagagcagggaagttcactccatctagagttgaaggatggtaaaaccacacggaaaagggagtggacaggaggggtacagaaccaggctaatgagacaatctgccaaccaca

SEQ ID NO: 2246 - DNA, 122 bp, Homo sapiens
  misc_feature (61)..(62): /note="This region represents a CpG dinucleotide"
  misc_feature (61)..(61): /note="Nucleotide may be methylated to form 5-methylcytosine"
ggaggctgtggcagatcctagctggggcgcacagcttagtgataacttgttgattctctgcgctgttcataagtagggcttgcgtttggtttgtggactgtggccaaatccgccaggtgaca

SEQ ID NO: 2247 - DNA, 122 bp, Homo sapiens
  misc_feature (61)..(62): /note="This region represents a CpG dinucleotide"
  misc_feature (61)..(61): /note="Nucleotide may be methylated to form 5-methylcytosine"
cataaggtcagtaaactccctatttgattaatctgccctaggtcatgactctattacatacgaccagatacaaacctaactcttacatattctctatctcagttttcccctgaatgtgtctc

SEQ ID NO: 2248 - DNA, 122 bp, Homo sapiens
  misc_feature (61)..(62): /note="This region represents a CpG dinucleotide"
  misc_feature (61)..(61): /note="Nucleotide may be methylated to form 5-methylcytosine"
ctcctgcccgggaaatcctgagggccacaggcattggtgctagaggcgagagcctgctgccgtcttgtatctgcctcccctttcggtttgcacatcaaaggatcctgactattgatcatcac

SEQ ID NO: 2249 - DNA, 122 bp, Homo sapiens
  misc_feature (61)..(62): /note="This region represents a CpG dinucleotide"
  misc_feature (61)..(61): /note="Nucleotide may be methylated to form 5-methylcytosine"
ccccttgggggcgtcaagcccctctgagatcctgacggtttgtgggaggagcctacaaagcgctcggccccgcccactcctggtaccctcccacccaggctcaacccgcatccgaggccgtc

SEQ ID NO: 2250 - DNA, 122 bp, Homo sapiens
  misc_feature (61)..(62): /note="This region represents a CpG dinucleotide"
  misc_feature (61)..(61): /note="Nucleotide may be methylated to form 5-methylcytosine"
tgcgatacaatttcttattattcaagccagtttctgtcactgtttcctattacacagagccgaaaacaccctaaagataaacatactcagttaaatgactccagctctgtgttgacactttg

SEQ ID NO: 2251 - DNA, 122 bp, Homo sapiens
  misc_feature (61)..(62): /note="This region represents a CpG dinucleotide"
  misc_feature (61)..(61): /note="Nucleotide may be methylated to form 5-methylcytosine"
tacctagtacacgcacagcattttgaaggttccccttggtgatttcattacaatcttcatcgctcttggcctggctgtccccctttcttgtaaattattcttgagttaatagctgttctttg

SEQ ID NO: 2252 - DNA, 122 bp, Homo sapiens
  misc_feature (61)..(62): /note="This region represents a CpG dinucleotide"
  misc_feature (61)..(61): /note="Nucleotide may be methylated to form 5-methylcytosine"
cgggaattcaacttgcaggtgcaaatcagcccagtaccaagcagttggtggcacacccaacgccagcctcccagggcttccatccagcaggtttcaaggcccaaggctgggtgtccccagga

SEQ ID NO: 2253 - DNA, 122 bp, Homo sapiens
  misc_feature (61)..(62): /note="This region represents a CpG dinucleotide"
  misc_feature (61)..(61): /note="Nucleotide may be methylated to form 5-methylcytosine"
gcagagacagcagcagctctcttgggctgggagccctcggaaggcagtgctgagcaggcccgttcttcggaagttagttgttgatccggttttgattatgctatgatttccatctgagctct

SEQ ID NO: 2254 - DNA, 122 bp, Homo sapiens
  misc_feature (61)..(62): /note="This region represents a CpG dinucleotide"
  misc_feature (61)..(61): /note="Nucleotide may be methylated to form 5-methylcytosine"
aagactggaaagttttcagactctattaaataggtgaaaatggaaaactgccactgagtgcggttagctccactagaatcttacagggacttacaatggtatctaaacaaattctttactat

SEQ ID NO: 2255 - DNA, 122 bp, Homo sapiens
  misc_feature (61)..(62): /note="This region represents a CpG dinucleotide"
  misc_feature (61)..(61): /note="Nucleotide may be methylated to form 5-methylcytosine"
tttcctagaaatgcatctactgtgtaaatcaaggcaaaattcgtttgattgaaactttgccgagagttgtttgccatttcagacagccacaacaccagtgacactaccactcctgtatctga

SEQ ID NO: 2256 - DNA, 122 bp, Homo sapiens
  misc_feature (61)..(62): /note="This region represents a CpG dinucleotide"
  misc_feature (61)..(61): /note="Nucleotide may be methylated to form 5-methylcytosine"
gttttcagatgggtaaatggagttgtctctttaaagtgccccggtcagttcaccacacgtcgggcagctgctgctttccaggctgccccgcgattcccaggctagaaggattgacaaggcga

SEQ ID NO: 2257 - DNA, 122 bp, Homo sapiens
  misc_feature (61)..(62): /note="This region represents a CpG dinucleotide"
  misc_feature (61)..(61): /note="Nucleotide may be methylated to form 5-methylcytosine"
gtccaaggccgactataccctcagctccattagcccccgaggcctccctgacaggcggggcggacaatcccagtgcagatgctctgtatcgatcgcatgctatcggttctttcaaggaacgt

SEQ ID NO: 2258 - DNA, 122 bp, Homo sapiens
  misc_feature (61)..(62): /note="This region represents a CpG dinucleotide"
  misc_feature (61)..(61): /note="Nucleotide may be methylated to form 5-methylcytosine"
acccccattaaagttcttcagccttcttagtagaaagctctgtgaagtttgattcacccacggaagttacttcatggagtggaagcatttgagaaatcagatcttggctttcttcttgtgga

SEQ ID NO: 2259 - DNA, 122 bp, Homo sapiens
  misc_feature (61)..(62): /note="This region represents a CpG dinucleotide"
  misc_feature (61)..(61): /note="Nucleotide may be methylated to form 5-methylcytosine"
tgaattaagtataaacacaacaagttacaaatatagtactgagaggtccttgtatggccccgcctccctcaggcagtatcttacataactatagttcatgattacaactggaaagttgccat

SEQ ID NO: 2260 - DNA, 122 bp, Homo sapiens
  misc_feature (61)..(62): /note="This region represents a CpG dinucleotide"
  misc_feature (61)..(61): /note="Nucleotide may be methylated to form 5-methylcytosine"
gcaagaatttgcagaattaagtactgatcagtcattcattcatataatactgactcaacacgtattatgtgtcatgcactgttctaagtgctgggatatagcagtaggcaaaatagaccatg

SEQ ID NO: 2261 - DNA, 122 bp, Homo sapiens
  misc_feature (61)..(62): /note="This region represents a CpG dinucleotide"
  misc_feature (61)..(61): /note="Nucleotide may be methylated to form 5-methylcytosine"
gcacacaggggcccagtttgcaggcgaaggccagtctgctcttgggcctgagtccactctcggggaaacactggccccaggtgcagagctgggagtgctgggagaaggcagcacagcccagg

SEQ ID NO: 2262 - DNA, 122 bp, Homo sapiens
  misc_feature (61)..(62): /note="This region represents a CpG dinucleotide"
  misc_feature (61)..(61): /note="Nucleotide may be methylated to form 5-methylcytosine"
aacaagtagaaagatggatttttcctgttttcagatgagtttctttgagtcctatcttttcgctgtagtattgttccctctgctggtgacctggcgaatagtagcaggcacagttgtttctg

SEQ ID NO: 2263 - DNA, 122 bp, Homo sapiens
  misc_feature (61)..(62): /note="This region represents a CpG dinucleotide"
  misc_feature (61)..(61): /note="Nucleotide may be methylated to form 5-methylcytosine"
gtttttctcatttcccttcctggttagtcctgcagctggggagctcagccttctgtagaccgggaggcccctcccagggagccgaggccgggtgggctgggcagctttggaagcaccgcggc

SEQ ID NO: 2264 - DNA, 122 bp, Homo sapiens
  misc_feature (61)..(62): /note="This region represents a CpG dinucleotide"
  misc_feature (61)..(61): /note="Nucleotide may be methylated to form 5-methylcytosine"
aaacactgatttctaggatatgctggtcaataaaaatagcctaagcgactccctttcacccgccccatctgccacaggcttgcctattgcctctgagtgacagaatcaggctaggtggagtg

SEQ ID NO: 2265 - DNA, 122 bp, Homo sapiens
  misc_feature (61)..(62): /note="This region represents a CpG dinucleotide"
  misc_feature (61)..(61): /note="Nucleotide may be methylated to form 5-methylcytosine"
gttgaataccactgaacttatggaacatttaaaattgcacagtatttagaaaatactaatcgaatgaatcaccacctcatgtgttgttttgataggaagtgtatcacgtctcaataatttcc

SEQ ID NO: 2266 - DNA, 122 bp, Homo sapiens
  misc_feature (61)..(62): /note="This region represents a CpG dinucleotide"
  misc_feature (61)..(61): /note="Nucleotide may be methylated to form 5-methylcytosine"
taaatggagtaacacataaggcacataagactctcagggacgtagtaaaatgcactatcacgtaacacgcaatgtcaattgaaaccctatccaatttaatgcagatatgtcagtgctgtcca

SEQ ID NO: 2267 - DNA, 122 bp, Homo sapiens
  misc_feature (61)..(62): /note="This region represents a CpG dinucleotide"
  misc_feature (61)..(61): /note="Nucleotide may be methylated to form 5-methylcytosine"
ataagcagccaccagtgatgaaagtgcttcaggaaggagggatggatccgctgtggattgcgtagtagttgagtcatgagagaactgattggcatgacttcaagagggaaaatgggagggga

SEQ ID NO: 2268 - DNA, 122 bp, Homo sapiens
  misc_feature (61)..(62): /note="This region represents a CpG dinucleotide"
  misc_feature (61)..(61): /note="Nucleotide may be methylated to form 5-methylcytosine"
caaagcctttgtgtcttcctcttctgctgtggacagataccatggggcaccaggaaaggacggggagcacacagccccggggaggcgcactctaaggagggccaaagccattctgcggggtg

SEQ ID NO: 2269 - DNA, 122 bp, Homo sapiens
  misc_feature (61)..(62): /note="This region represents a CpG dinucleotide"
  misc_feature (61)..(61): /note="Nucleotide may be methylated to form 5-methylcytosine"
aggccgacgcagcacggggactctgaggactctgagatcgagtctccagtttgtcagctgcgtttgggggtctggagcaagatgttatttttgatgtttgcaaccagaaaacagaggagctg

SEQ ID NO: 2270 - DNA, 122 bp, Homo sapiens
  misc_feature (61)..(62): /note="This region represents a CpG dinucleotide"
  misc_feature (61)..(61): /note="Nucleotide may be methylated to form 5-methylcytosine"
tgatactatcttcttcaaagtattttgttagctcctgttacagcaattccttcacagtaacgtaattatttgtttacacatctgccttccttatgagaccatgggctctgaagagcaggaat

SEQ ID NO: 2271 - DNA, 122 bp, Homo sapiens
  misc_feature (61)..(62): /note="This region represents a CpG dinucleotide"
  misc_feature (61)..(61): /note="Nucleotide may be methylated to form 5-methylcytosine"
accctcgagccgatgaaacgcaccacgaccttggcttcccgaggcggcctcccctcaccccgacacgggagctgacattgtgcattccattcagagctccctttgttcaggccacatagaaa

SEQ ID NO: 2272 - DNA, 122 bp, Homo sapiens
  misc_feature (61)..(62): /note="This region represents a CpG dinucleotide"
  misc_feature (61)..(61): /note="Nucleotide may be methylated to form 5-methylcytosine"
tgatttctatcaccataaattagtgttacgggatccctggggtgtccattttctttctggcgacctctgtggccagtggcatgtttgcacaagttcttgtcctgtgtccaggaagaatgagg

SEQ ID NO: 2273 - DNA, 122 bp, Homo sapiens
  misc_feature (61)..(62): /note="This region represents a CpG dinucleotide"
  misc_feature (61)..(61): /note="Nucleotide may be methylated to form 5-methylcytosine"
aggtgatggagaataaggagcctctaaagcacatgtcagggacccgtgagctgcaaaacccgcaggaccttaggattccttcacattcttgtttggagcatgttgtcaggaatgcacataga

SEQ ID NO: 2274 - DNA, 122 bp, Homo sapiens
  misc_feature (61)..(62): /note="This region represents a CpG dinucleotide"
  misc_feature (61)..(61): /note="Nucleotide may be methylated to form 5-methylcytosine"
tgccctgcccacagaactctgctatggctgactgtgacagacgctggcctgggggcctgccgtgagcatgcctgggtgagggcagcacgcgatcgacaccttgaagtggacatggatgtggt

SEQ ID NO: 2275 - DNA, 122 bp, Homo sapiens
  misc_feature (61)..(62): /note="This region represents a CpG dinucleotide"
  misc_feature (61)..(61): /note="Nucleotide may be methylated to form 5-methylcytosine"
tccttgtgcataacaatgattagtcttatttttctcttagtacctcaataacaaataggccgtattgtttatattatacatttttttctttaaacttctgctgtttatacccacatgctgat

SEQ ID NO: 2276 - DNA, 122 bp, Homo sapiens
  misc_feature (61)..(62): /note="This region represents a CpG dinucleotide"
  misc_feature (61)..(61): /note="Nucleotide may be methylated to form 5-methylcytosine"
tcttgaattaggaaagcaagggattcaagctctaactcaaaaatgtatcccattgtcttccgtccctgaatgcatatggggagggttaagaaagcaaagctggtctataccaaactttccag

SEQ ID NO: 2277 - DNA, 122 bp, Homo sapiens
  misc_feature (61)..(62): /note="This region represents a CpG dinucleotide"
  misc_feature (61)..(61): /note="Nucleotide may be methylated to form 5-methylcytosine"
tcccggtccccggccacatggcgagcggggcgacaccgaagcagcccacggagctcgaggcgacgctgctgagcctggttccccaaagcggccgcgccactccccgcttccccgcccggctc

SEQ ID NO: 2278 - DNA, 122 bp, Homo sapiens
  misc_feature (61)..(62): /note="This region represents a CpG dinucleotide"
  misc_feature (61)..(61): /note="Nucleotide may be methylated to form 5-methylcytosine"
ttttctatcattctatccacatcagcccagggatgcaggggaggtcccagcaagtggccacgccagctgctgcccttctcccctggccattgacacatctggttcacctcagcatccctagg

SEQ ID NO: 2279 - DNA, 122 bp, Homo sapiens
  misc_feature (61)..(62): /note="This region represents a CpG dinucleotide"
  misc_feature (61)..(61): /note="Nucleotide may be methylated to form 5-methylcytosine"
ccaccaccaccacacacacacacagtaaaggcaaagtctctttggcccctgaaataattccgcctgatctcaggaaaggtaacatcctcctccccaccccacccccgagttaggctccatct

SEQ ID NO: 2280 - DNA, 122 bp, Homo sapiens
  misc_feature (61)..(62): /note="This region represents a CpG dinucleotide"
  misc_feature (61)..(61): /note="Nucleotide may be methylated to form 5-methylcytosine"
tgcctgcctcccgctgcgctggagttagatgctgtttattgtggggcttcccaattgtgtcgagtcagcggaaagtcctttccaaagttaccagaggtgttgtgccaatctccagaataata

SEQ ID NO: 2281 - DNA, 122 bp, Homo sapiens
  misc_feature (61)..(62): /note="This region represents a CpG dinucleotide"
  misc_feature (61)..(61): /note="Nucleotide may be methylated to form 5-methylcytosine"
ttgttgcctgcagtaattttacggtccagaagtgccttgctgtagcattgctggtaggcacggcagtgcggctcagctgcctgagacagggtcatgggcctttgcccagctcgtctccaccc

SEQ ID NO: 2282 - DNA, 122 bp, Homo sapiens
  misc_feature (61)..(62): /note="This region represents a CpG dinucleotide"
  misc_feature (61)..(61): /note="Nucleotide may be methylated to form 5-methylcytosine"
tctagaactcctgagctcaagtgatctgcccgccttggcctcttgtgctgggattacaggcgtgagtcactgttcctagcagggctttctttaaatctgtaaattcctgttggtttcttgaa

SEQ ID NO: 2283 - DNA, 122 bp, Homo sapiens
  misc_feature (61)..(62): /note="This region represents a CpG dinucleotide"
  misc_feature (61)..(61): /note="Nucleotide may be methylated to form 5-methylcytosine"
cactcagcgtggtgaagtaaggggaggccgagggctgcagtgaccctgccaggcttgtcacgagccattggctgctctacatgaagcagttcagaaactacaggtgaacatggaaggatacg

SEQ ID NO: 2284 - DNA, 122 bp, Homo sapiens
  misc_feature (61)..(62): /note="This region represents a CpG dinucleotide"
  misc_feature (61)..(61): /note="Nucleotide may be methylated to form 5-methylcytosine"
aaccatggccagaggaggtagacagtagggggcagtgcagtgtagggcaagaagctcctgcgctggggctcgttggctgcattttgaatttcaattgtagcatctgttggtggagtggcctc

SEQ ID NO: 2285 - DNA, 122 bp, Homo sapiens
  misc_feature (61)..(62): /note="This region represents a CpG dinucleotide"
  misc_feature (61)..(61): /note="Nucleotide may be methylated to form 5-methylcytosine"
agacagttctgttagtctctctctgacaataccccaaaacacctctaacctccgtgtgtgcggatctgctgtaatcttggccctcactttgtaataacagcaaacattatggccggggtcag

SEQ ID NO: 2286 - DNA, 122 bp, Homo sapiens
  misc_feature (61)..(62): /note="This region represents a CpG dinucleotide"
  misc_feature (61)..(61): /note="Nucleotide may be methylated to form 5-methylcytosine"
gccttgggaatagctgaaaagttagcattaaaacaacagctgcaggtgaagctatttcgccggctgcatcaccgcagccaccccctcttctgtcgggcaccgtgggagggtgggggcgggga

SEQ ID NO: 2287 - DNA, 122 bp, Homo sapiens
  misc_feature (61)..(62): /note="This region represents a CpG dinucleotide"
  misc_feature (61)..(61): /note="Nucleotide may be methylated to form 5-methylcytosine"
cttttcataagctcagagcccatctggctctggctccatcccaggacatttcccctaaagcgtgtgtaaagtgaattttccttattaggaacggaactgccctgtaggggtggatgttgtgt

SEQ ID NO: 2288 - DNA, 122 bp, Homo sapiens
  misc_feature (61)..(62): /note="This region represents a CpG dinucleotide"
  misc_feature (61)..(61): /note="Nucleotide may be methylated to form 5-methylcytosine"
cgtttctccatcccgaagttcttcttggtttttatcctaagtactgatgtcaggatgactcggcagctttgacgagccatctggccctttaggcaggaagccagttggccttcctcctccca

SEQ ID NO: 2289 - DNA, 122 bp, Homo sapiens
  misc_feature (61)..(62): /note="This region represents a CpG dinucleotide"
  misc_feature (61)..(61): /note="Nucleotide may be methylated to form 5-methylcytosine"
caagaaccaccgcctgtactcccagtcctaaggctgcagaaacggatggcacgtaagatacgggtgcaagttgtacctactcaggtttgttgtgagaatcaaatatgaacagcgatgaaaca

SEQ ID NO: 2290 - DNA, 122 bp, Homo sapiens
  misc_feature (61)..(62): /note="This region represents a CpG dinucleotide"
  misc_feature (61)..(61): /note="Nucleotide may be methylated to form 5-methylcytosine"
gaccctgcctgtgctttgttacttcctgaagccgatactacccttgattcttcctcaagccgccttggtcctgttggggaaccaaaagtcttgatcatggaaatgataacctatatgttttt

SEQ ID NO: 2291 - DNA, 122 bp, Homo sapiens
  misc_feature (61)..(62): /note="This region represents a CpG dinucleotide"
  misc_feature (61)..(61): /note="Nucleotide may be methylated to form 5-methylcytosine"
gtgattacttgcacgtatttgttcattcaccatcatgtggcacataaatgtagttaatttcgtggtaaaccagccactttgatttgtccacttactagctatgttacttggaaaaattcacc

SEQ ID NO: 2292 - DNA, 122 bp, Homo sapiens
  misc_feature (61)..(62): /note="This region represents a CpG dinucleotide"
  misc_feature (61)..(61): /note="Nucleotide may be methylated to form 5-methylcytosine"
tagtgggtttgtattagtcagaaaacaataggtgataccatggtaaccataaaatctcagcggcttaccatgtggacagtttatctgtcactcatagaagtcagatgctggtgcggcagcag

SEQ ID NO: 2293 - DNA, 122 bp, Homo sapiens
  misc_feature (61)..(62): /note="This region represents a CpG dinucleotide"
  misc_feature (61)..(61): /note="Nucleotide may be methylated to form 5-methylcytosine"
ccagcccccatcccaccgacctaaacagtcaggcttgagagactggaagggtttcacttccgcctggctgcaggaaccacaagttccagactaggtcgtaattggaataatcacagtcaaaa

SEQ ID NO: 2294 - DNA, 122 bp, Homo sapiens
  misc_feature (61)..(62): /note="This region represents a CpG dinucleotide"
  misc_feature (61)..(61): /note="Nucleotide may be methylated to form 5-methylcytosine"
agccaccagtaggtaacaggagctgtgtaccttatcagacacccctcctgggaatctattcgaaggaaatagttcaaaagaagaacaaagagatatatgcaaagatgctttaagcactagtc

SEQ ID NO: 2295 - DNA, 122 bp, Homo sapiens
  misc_feature (61)..(62): /note="This region represents a CpG dinucleotide"
  misc_feature (61)..(61): /note="Nucleotide may be methylated to form 5-methylcytosine"
agctctttggatgagctgaggctttagccatcctttgataataaatttttatttctaaggcgctaggcatagacctagaggcattttactgtggtaggtttttatctcttttaaaataaata

SEQ ID NO: 2296 - DNA, 122 bp, Homo sapiens
  misc_feature (61)..(62): /note="This region represents a CpG dinucleotide"
  misc_feature (61)..(61): /note="Nucleotide may be methylated to form 5-methylcytosine"
acctctgaccttgcctctcccacccagcatcaggcagaggcccccccccagtgctaactgcgccctcaagtggcctggggagaaaagttgtgttgtgagcggaaaattgccactcttatggg

SEQ ID NO: 2297 - DNA, 122 bp, Homo sapiens
  misc_feature (61)..(62): /note="This region represents a CpG dinucleotide"
  misc_feature (61)..(61): /note="Nucleotide may be methylated to form 5-methylcytosine"
ctgccagcaggtgataaagctcaggtgaggccaggctgctggcttgtaagctcaggctaacgcctcagtaggagagcattctgcaaaacgtttaaaatggctcagaattccaaatctttgat

SEQ ID NO: 2298 - DNA, 122 bp, Homo sapiens
  misc_feature (61)..(62): /note="This region represents a CpG dinucleotide"
  misc_feature (61)..(61): /note="Nucleotide may be methylated to form 5-methylcytosine"
gatgagtgagaaagagaattaacatagaaataaagagtttactacttacaaaggtatatacgccaaaggaaaagaaacacaggagttaagttgtcctggtcctagttataaaggcgcaaact

SEQ ID NO: 2299 - DNA, 122 bp, Homo sapiens
  misc_feature (61)..(62): /note="This region represents a CpG dinucleotide"
  misc_feature (61)..(61): /note="Nucleotide may be methylated to form 5-methylcytosine"
atcatcgactcgctgccaccggaacacgcgctcccgaaaaactgcaccccgactagccctcggctactccaggtgacaaacggacaaaaacaaatcctaaagcctcgcgggaaaaagacctg

SEQ ID NO: 2300 - DNA, 122 bp, Homo sapiens
  misc_feature (61)..(62): /note="This region represents a CpG dinucleotide"
  misc_feature (61)..(61): /note="Nucleotide may be methylated to form 5-methylcytosine"
tcttaaagtttggtggcaaatgataaacccttatcattttgtgaacacagctgccaaactcgattgattaacaggcttttgtttattctgggctggcaaatacacacacgttttaccttaag

SEQ ID NO: 2301 - DNA, 122 bp, Homo sapiens
  misc_feature (61)..(62): /note="This region represents a CpG dinucleotide"
  misc_feature (61)..(61): /note="Nucleotide may be methylated to form 5-methylcytosine"
ggggttccagtgaagtggagtctgagtcatgttgctgatagggaagtcagcttctggacgcgaggtgctggggggaggggtgctggtaatggacgctagggccctggagtacccagggagga

SEQ ID NO: 2302 - DNA, 122 bp, Homo sapiens
  misc_feature (61)..(62): /note="This region represents a CpG dinucleotide"
  misc_feature (61)..(61): /note="Nucleotide may be methylated to form 5-methylcytosine"
attgaggctggacttgggaggggtttaccccctcaatatcacaaaacccccaagtcccagcggagccggagcaggaagtggagaaaggcctggggccatcatgcgcagctgcaggctggcag

SEQ ID NO: 2303 - DNA, 122 bp, Homo sapiens
  misc_feature (61)..(62): /note="This region represents a CpG dinucleotide"
  misc_feature (61)..(61): /note="Nucleotide may be methylated to form 5-methylcytosine"
aggattttagcactggaaggaatctaaaaatacctaatctaactaccttgaaaagatcaacgagggatcttgtctgagataccagatgatcatccacgactatccatgagatccaggtttcc

SEQ ID NO: 2304 - DNA, 122 bp, Homo sapiens
  misc_feature (61)..(62): /note="This region represents a CpG dinucleotide"
  misc_feature (61)..(61): /note="Nucleotide may be methylated to form 5-methylcytosine"
tgtgttgcactgaggttaaccacacctacaataaatctaaaatctaggtaaactcctcatcgtcttaattcaatctccttcatgaaagacctagtgggaagaaactctttttactattgtta

SEQ ID NO: 2305 - DNA, 122 bp, Homo sapiens
  misc_feature (61)..(62): /note="This region represents a CpG dinucleotide"
  misc_feature (61)..(61): /note="Nucleotide may be methylated to form 5-methylcytosine"
aagaggaaacggccccctggccttggccccaggcttcaggatgaatgaggcctctcccagcgacctgaaggtcaccccagggcatgtcccaagaccttgtacagacaaggcttctgattact

SEQ ID NO: 2306 - DNA, 122 bp, Homo sapiens
  misc_feature (61)..(62): /note="This region represents a CpG dinucleotide"
  misc_feature (61)..(61): /note="Nucleotide may be methylated to form 5-methylcytosine"
ggagcatgtaacttcaaggtttaaaaacgaggtggagaggatgggttttgatatgaacaacgcctggaggatttccaacatcaatgagaagtacaagtgagttatatgggtccctgtggact

SEQ ID NO: 2307 - DNA, 122 bp, Homo sapiens
  misc_feature (61)..(62): /note="This region represents a CpG dinucleotide"
  misc_feature (61)..(61): /note="Nucleotide may be methylated to form 5-methylcytosine"
gctagacccatggaaagctgtatggagattccacttctccggggtttggtagtgattgggcggggatacctgagagggtgccaggaaagggtccagcagtcaaagagaaggggccaaggagt

SEQ ID NO: 2308 - DNA, 122 bp, Homo sapiens
  misc_feature (61)..(62): /note="This region represents a CpG dinucleotide"
  misc_feature (61)..(61): /note="Nucleotide may be methylated to form 5-methylcytosine"
gtgggaggcagggaaggggcgcataggcgtagcaagagatgtcagccctgcctgatttcacggtggtgattactgagtgatttctggattagcctttcacacttgagggttcactgagcact

SEQ ID NO: 2309 - DNA, 122 bp, Homo sapiens
  misc_feature (61)..(62): /note="This region represents a CpG dinucleotide"
  misc_feature (61)..(61): /note="Nucleotide may be methylated to form 5-methylcytosine"
gcgggaaaggtgtgaagcccgctgctggggagttgcctcccctttgatgaaaaggaagtgcgaagcgtaggaacgctcttcaggtcaccaccccgtgagtgggaggcttggggagtctgaag

SEQ ID NO: 2310 - DNA, 122 bp, Homo sapiens
  misc_feature (61)..(62): /note="This region represents a CpG dinucleotide"
  misc_feature (61)..(61): /note="Nucleotide may be methylated to form 5-methylcytosine"
tccttggctagatgggtatgtccttgatgacaagaatgacgtgtgatggctctttcctcccgttggcctgttgagtatcttgccccttgctccccccaccccaccacagtaacaaacaataa

SEQ ID NO: 2311 - DNA, 122 bp, Homo sapiens
  misc_feature (61)..(62): /note="This region represents a CpG dinucleotide"
  misc_feature (61)..(61): /note="Nucleotide may be methylated to form 5-methylcytosine"
cactcctcccttcttctccactcttttctggtattcatgaaaccttggaactgggagagccgtgcagatcattcgccctgatttccagaggagacctgggactgcccaggccacagccagat

SEQ ID NO: 2312 - DNA, 122 bp, Homo sapiens
  misc_feature (61)..(62): /note="This region represents a CpG dinucleotide"
  misc_feature (61)..(61): /note="Nucleotide may be methylated to form 5-methylcytosine"
ctattgttatttaatcaaacactattctagatgttgctgtgaccacgtattttgtagatgcggttgactttgagtaatgatgacccttaataatgtgggtatgactcgttcaatcagttaga

SEQ ID NO: 2313 - DNA, 122 bp, Homo sapiens
  misc_feature (61)..(62): /note="This region represents a CpG dinucleotide"
  misc_feature (61)..(61): /note="Nucleotide may be methylated to form 5-methylcytosine"
cttccagaaggcttcttgatggagttgtggcaagctcatgggggaaatgcttcaccccaacgtaacccagaccaaatatgccattgcacaggaagtgggtgctgagtccaagtgtgtccata

SEQ ID NO: 2314 - DNA, 122 bp, Homo sapiens
  misc_feature (61)..(62): /note="This region represents a CpG dinucleotide"
  misc_feature (61)..(61): /note="Nucleotide may be methylated to form 5-methylcytosine"
gaaccagggaagcctgactgtatcacgccctggatggggaacttggggatgagcaagacccggaaggagcgagatccgggagggagactcagcccagacaggaggcgttagcaggcgctctg

SEQ ID NO: 2315 - DNA, 122 bp, Homo sapiens
  misc_feature (61)..(62): /note="This region represents a CpG dinucleotide"
  misc_feature (61)..(61): /note="Nucleotide may be methylated to form 5-methylcytosine"
tgtgcggagtgggcgggaaaacgcgaaggaggacaggaggtcaggccggaaggtatacttcggcatttgacagttgacgacaccagcaacaacattgaaatcctattaaattgcgcgtggga

SEQ ID NO: 2316 - DNA, 122 bp, Homo sapiens
  misc_feature (61)..(62): /note="This region represents a CpG dinucleotide"
  misc_feature (61)..(61): /note="Nucleotide may be methylated to form 5-methylcytosine"
tgtgttattccacactgtttaaaaaaaaaaaaaaaatgagctccagctcctggatgcacacgacacagatgcatctcacagacatcatgctgagtgaaagaaggcagacacgaaatacatgc

SEQ ID NO: 2317 - DNA, 122 bp, Homo sapiens
  misc_feature (61)..(62): /note="This region represents a CpG dinucleotide"
  misc_feature (61)..(61): /note="Nucleotide may be methylated to form 5-methylcytosine"
caggaagttgtgtggatgagtcaaggttgaatggagagccctaggcagtgttgtcccgcccgccctgactcacctgtcccccaaatcccctgatgccctcactgaagggtcaggtgcctgct

SEQ ID NO: 2318 - DNA, 122 bp, Homo sapiens
  misc_feature (61)..(62): /note="This region represents a CpG dinucleotide"
  misc_feature (61)..(61): /note="Nucleotide may be methylated to form 5-methylcytosine"
acataaaggcggtaagccctgtgttcgaaggcatgagtgtggcatacgtctgtgaaggtgcgtgggagcatgtctgtgaactagcatctacctgcactgagccactcaggcaggaatccctg

SEQ ID NO: 2319 - DNA, 122 bp, Homo sapiens
  misc_feature (61)..(62): /note="This region represents a CpG dinucleotide"
  misc_feature (61)..(61): /note="Nucleotide may be methylated to form 5-methylcytosine"
ggcaaggtgaaatctggcaggcagtagcttcctttggaggggttctcatgttaggagtgacgtgcaagccaacagcagagggtgggggatatctcagcaattgcctgtgtctcccaatgctg

SEQ ID NO: 2320 - DNA, 122 bp, Homo sapiens
  misc_feature (61)..(62): /note="This region represents a CpG dinucleotide"
  misc_feature (61)..(61): /note="Nucleotide may be methylated to form 5-methylcytosine"
agcccctccaccactgcacagtgacatttacctcttagtctcctgtgtcactggatgaggcgtccttgctgctgggcttacccttccacctctgcccttgttccctttccttcctgtctcct

SEQ ID NO: 2321 - DNA, 122 bp, Homo sapiens
  misc_feature (61)..(62): /note="This region represents a CpG dinucleotide"
  misc_feature (61)..(61): /note="Nucleotide may be methylated to form 5-methylcytosine"
gatgcccatgagacttcctgggccccagtcttccaggtcacgcagggtcactgcgcttcacgtggccctgcagcaccaagaatatgcagggccttgcaatccagatggagaattgtgcaaac

SEQ ID NO: 2322 - DNA, 122 bp, Homo sapiens
  misc_feature (61)..(62): /note="This region represents a CpG dinucleotide"
  misc_feature (61)..(61): /note="Nucleotide may be methylated to form 5-methylcytosine"
aacttttgttttgttttttgagatagggtctagctctgtcaccactaggtgccaacacagcgacctcccaggctcaagcgatcccatccgcctgcctcagccagcctcccgagtagctggga

SEQ ID NO: 2323 - DNA, 122 bp, Homo sapiens
  misc_feature (61)..(62): /note="This region represents a CpG dinucleotide"
  misc_feature (61)..(61): /note="Nucleotide may be methylated to form 5-methylcytosine"
cactcctgtcatctgaattgtgttgctagggctgatttgctgtcggggcccatcagtctccgccaggaggacactagaaggaggctgtcagccagcaggagcggaaagaaaccaatcctcat

SEQ ID NO: 2324 - DNA, 122 bp, Homo sapiens
  misc_feature (61)..(62): /note="This region represents a CpG dinucleotide"
  misc_feature (61)..(61): /note="Nucleotide may be methylated to form 5-methylcytosine"
aagagggcttatctaacatgctggtagactttaccctgaatgacaagatctctatgcaggcgtatggagccaaggagaggtgggctgtcacgggaggctgggggcagagggcagtctagaag

SEQ ID NO: 2325 - DNA, 122 bp, Homo sapiens
  misc_feature (61)..(62): /note="This region represents a CpG dinucleotide"
  misc_feature (61)..(61): /note="Nucleotide may be methylated to form 5-methylcytosine"
cgagttccaggaggtcttgcagtgactgaatggtggtcactgcagcatatctgcacagtccgtgtcggtgtgagggtcagtggggcctgctgaacaggctgcatgtaactgtcccacgggaa

SEQ ID NO: 2326 - DNA, 122 bp, Homo sapiens
  misc_feature (61)..(62): /note="This region represents a CpG dinucleotide"
  misc_feature (61)..(61): /note="Nucleotide may be methylated to form 5-methylcytosine"
ctgaaatgtgtcttgtgcatagtggctctcatagtggctctcaacatgtttatcagaacacgtggagctgaaatgtgtcttgtgcatagtggctctcaacacgtttatgtaatccaggaaat

SEQ ID NO: 2327 - DNA, 122 bp, Homo sapiens
  misc_feature (61)..(62): /note="This region represents a CpG dinucleotide"
  misc_feature (61)..(61): /note="Nucleotide may be methylated to form 5-methylcytosine"
acgttgattctgaagaatattctgtaataaattaaactggttgtttcctctggcagtttccgttttcattcccacaatgttattcattgtgggattgtgattcgtcagcatgtgctaactgg

SEQ ID NO: 2328 - DNA, 122 bp, Homo sapiens
  misc_feature (61)..(62): /note="This region represents a CpG dinucleotide"
  misc_feature (61)..(61): /note="Nucleotide may be methylated to form 5-methylcytosine"
tccagaatggcaccaagccattcacgagggatccacccccatccaacacctcccattaggcgccacctccaacactgaggatcaagtttcagcatgaggtttgaaggggacaaatattcaaa

SEQ ID NO: 2329 - DNA, 122 bp, Homo sapiens
  misc_feature (61)..(62): /note="This region represents a CpG dinucleotide"
  misc_feature (61)..(61): /note="Nucleotide may be methylated to form 5-methylcytosine"
caatgtccagctcatcagcttcttcctattcacccagtctttcttcttctcttacttgcccgagtagaagaaagatgaatgaagctccttgcatgctggaactgtgttttatctacgttttt

SEQ ID NO: 2330 - DNA, 122 bp, Homo sapiens
  misc_feature (61)..(62): /note="This region represents a CpG dinucleotide"
  misc_feature (61)..(61): /note="Nucleotide may be methylated to form 5-methylcytosine"
gctcttagaacaccagcccgcctctctggtcccccttacccccaagcccagcacactccgcggcctagctctggggtccttaaatatcggtctcccgtaggttgctgtagtcggccaattcg

SEQ ID NO: 2331 - DNA, 122 bp, Homo sapiens
  misc_feature (61)..(62): /note="This region represents a CpG dinucleotide"
  misc_feature (61)..(61): /note="Nucleotide may be methylated to form 5-methylcytosine"
tgcagacacagcccagagacaagcttcaaaaggacagctctgcctgggccctcagagacgcgcagctgcgtcagcgtggactctgggtggtgccggattgtggataatttgagggaatgcac

SEQ ID NO: 2332 - DNA, 122 bp, Homo sapiens
  misc_feature (61)..(62): /note="This region represents a CpG dinucleotide"
  misc_feature (61)..(61): /note="Nucleotide may be methylated to form 5-methylcytosine"
acaaaatggtcaatggttcagcacaaaccaaacatgagcagacacatttctaaatccaaccgtcatgctgcttacacaatctgttgatccattgaacaaatatatgttgaaagattaagcgg

SEQ ID NO: 2333 - DNA, 122 bp, Homo sapiens
  misc_feature (61)..(62): /note="This region represents a CpG dinucleotide"
  misc_feature (61)..(61): /note="Nucleotide may be methylated to form 5-methylcytosine"
cccaagcctttgtggggtctgagtcgtggcgagtgcggcaggtgagggtgcgcagacccacgaccccgcctctgcgctgccgccccccttcctcctggcggggccgtgagtctggaaaccat

SEQ ID NO: 2334 - DNA, 122 bp, Homo sapiens
  misc_feature (61)..(62): /note="This region represents a CpG dinucleotide"
  misc_feature (61)..(61): /note="Nucleotide may be methylated to form 5-methylcytosine"
cgatcaggccccccgctgcaggcgctggtcagtaagcccggacagctctaggcttgggggcggacgagccccgagcctggccccgtgcactgggaggtccgctccgggcagtgggaggtcct

SEQ ID NO: 2335 - DNA, 122 bp, Homo sapiens
  misc_feature (61)..(62): /note="This region represents a CpG dinucleotide"
  misc_feature (61)..(61): /note="Nucleotide may be methylated to form 5-methylcytosine"
ggtctggcctatcaaggaccccttgaaggtgcctctcacccccagcaccaaagtggcccacgtcctgaggcagttcacagagcacctcagccctggttccaagggtcaagaagacagtgagg

SEQ ID NO: 2336 - DNA, 122 bp, Homo sapiens
  misc_feature (61)..(62): /note="This region represents a CpG dinucleotide"
  misc_feature (61)..(61): /note="Nucleotide may be methylated to form 5-methylcytosine"
actagttggcttaatttcctataatgcatcacgctccctacttcattcttactgcacagtcgggtctcctggtaccagccacactgaaggtattagtacctcccaggaaaggcagtataatt

SEQ ID NO: 2337 - DNA, 122 bp, Homo sapiens
  misc_feature (61)..(62): /note="This region represents a CpG dinucleotide"
  misc_feature (61)..(61): /note="Nucleotide may be methylated to form 5-methylcytosine"
gttctctgtgaactgaagactagatctgcagccccagctgcggcaggagacaaatgcccccgccaacacccggaagccgcccttgtcctctccagctgcagcctgattgcccggttttcggc

SEQ ID NO: 2338 - DNA, 122 bp, Homo sapiens
  misc_feature (61)..(62): /note="This region represents a CpG dinucleotide"
  misc_feature (61)..(61): /note="Nucleotide may be methylated to form 5-methylcytosine"
gaattctatttcccactaattaaacaaactgctacaaaatgtttaaaagggtaaggtcaacgtctgacagggttgaaagccacatatggtgacttacagagacctgaaccaggagaacacag

SEQ ID NO: 2339 - DNA, 122 bp, Homo sapiens
  misc_feature (61)..(62): /note="This region represents a CpG dinucleotide"
  misc_feature (61)..(61): /note="Nucleotide may be methylated to form 5-methylcytosine"
gggttgagaagacattgaccagaccaaaaggagaattgaaagtacttcccctgaacttcacgactagttggtctggctagatcaccttattgtgaaactccagatgacaagccctttccatt

SEQ ID NO: 2340 - DNA, 122 bp, Homo sapiens
  misc_feature (61)..(62): /note="This region represents a CpG dinucleotide"
  misc_feature (61)..(61): /note="Nucleotide may be methylated to form 5-methylcytosine"
agggcttctaggaaaccaagtctacatgactctacaagggagggattgcagtgaaagctgcgagaaagacccgtgcgctctgtaactaggcgagtcagcatcacagcccaatggaatatact

SEQ ID NO: 2341 - DNA, 122 bp, Homo sapiens
  misc_feature (61)..(62): /note="This region represents a CpG dinucleotide"
  misc_feature (61)..(61): /note="Nucleotide may be methylated to form 5-methylcytosine"
atgggcctgcctggccagagtattggctccggtgaccatctgggcttcccagggagaagccgcataaggggaagtagctgaagaacaaaaacaggagtgaggagggaagagggagcaggagg

SEQ ID NO: 2342 - DNA, 122 bp, Homo sapiens
  misc_feature (61)..(62): /note="This region represents a CpG dinucleotide"
  misc_feature (61)..(61): /note="Nucleotide may be methylated to form 5-methylcytosine"
tgggtggagccaggcgccggcgtcttccagttctcctccaagcacaaggaactcctggcgcgccgctggggccagcagaaggggaaccgcaagcgcatgacctaccagaagctggcgcgcgc

SEQ ID NO: 2343 - DNA, 122 bp, Homo sapiens
  misc_feature (61)..(62): /note="This region represents a CpG dinucleotide"
  misc_feature (61)..(61): /note="Nucleotide may be methylated to form 5-methylcytosine"
actcaagaccctggaaccttcaatctttttgccagcatatctttcatgcagttgatgggtcggaggaacaaagtgtctgtaaagttgcaggagcttttttttttttttccccctcttcttct

SEQ ID NO: 2344 - DNA, 122 bp, Homo sapiens
  misc_feature (61)..(62): /note="This region represents a CpG dinucleotide"
  misc_feature (61)..(61): /note="Nucleotide may be methylated to form 5-methylcytosine"
ttaagtgtttattatgtgccaggtactttacattgaccttatttaacccttatgtggtgacgcagacaggacttattaggttaactgaggttcgtggccatccagtgacataatggcagagc

SEQ ID NO: 2345 - DNA, 122 bp, Homo sapiens
  misc_feature (61)..(62): /note="This region represents a CpG dinucleotide"
  misc_feature (61)..(61): /note="Nucleotide may be methylated to form 5-methylcytosine"
cagctcacgcccccccacacccccacctagccttcccaggttcccaacctccccccgggacgtgcacctgcctttccttgggggctacaaccacaagcccctggagagcacggctgcacaga

SEQ ID NO: 2346 - DNA, 122 bp, Homo sapiens
  misc_feature (61)..(62): /note="This region represents a CpG dinucleotide"
  misc_feature (61)..(61): /note="Nucleotide may be methylated to form 5-methylcytosine"
gccagctccaaatgtttttctccctgtcttcagcttacattctcctacttcttatatcaacgtcgtatcaagcattgagaaatgcttccatttgagccagtctggctgcttgctactcagga

SEQ ID NO: 2347 - DNA, 122 bp, Homo sapiens
  misc_feature (61)..(62): /note="This region represents a CpG dinucleotide"
  misc_feature (61)..(61): /note="Nucleotide may be methylated to form 5-methylcytosine"
tctctcctgcgtggggaccagcgctgagccatacaggctccctcagggtggggtctcttgcgcgcccctcgccttcccacggcgggcatctggccctggctgcctcctgcgtgcccctcgcc

SEQ ID NO: 2348 - DNA, 122 bp, Homo sapiens
  misc_feature (61)..(62): /note="This region represents a CpG dinucleotide"
  misc_feature (61)..(61): /note="Nucleotide may be methylated to form 5-methylcytosine"
gcatagggagtcaggattgtctcctagagtcaaagccttcagagccaaattcctcccatgcgtgtgcttcctgtggcccacagtgtttttcagtttcatttttgaatcagatgccaacattt

SEQ ID NO: 2349 - DNA, 122 bp, Homo sapiens
  misc_feature (61)..(62): /note="This region represents a CpG dinucleotide"
  misc_feature (61)..(61): /note="Nucleotide may be methylated to form 5-methylcytosine"
accctgcgtcctgtgtctagttgtgccattacaaacaataccgaaaacagcatccttccacgtgtaccttggcatagttttgtgagcatacttgtaggttcacttcctaacagaaattgctg

SEQ ID NO: 2350 - DNA, 122 bp, Homo sapiens
  misc_feature (61)..(62): /note="This region represents a CpG dinucleotide"
  misc_feature (61)..(61): /note="Nucleotide may be methylated to form 5-methylcytosine"
ttaacccacaacaccagggattttacctaattcctgcctatcctgccttttctctggctccgtgctggactggccacttcctcttgcctcatacccacctggctaatctgactgcttatcct

SEQ ID NO: 2351 - DNA, 122 bp, Homo sapiens
  misc_feature (61)..(62): /note="This region represents a CpG dinucleotide"
  misc_feature (61)..(61): /note="Nucleotide may be methylated to form 5-methylcytosine"
gcactcctcaccccttgggcggtcaatggaaccgggtgctgccaaacatggggcggcgcacgtcacggaggcccggctgcccgggagcccgccgcagtggcggggggcggggcttgggcatg

SEQ ID NO: 2352 - DNA, 122 bp, Homo sapiens
  misc_feature (61)..(62): /note="This region represents a CpG dinucleotide"
  misc_feature (61)..(61): /note="Nucleotide may be methylated to form 5-methylcytosine"
gctcctgcaggccatctggatgtatatgtgtaggtcacaggggttacaatggctgagcttcggcttagaggcctgacatggacaactttggaaaaactaggtctttactatgaagtatttca

SEQ ID NO: 2353 - DNA, 122 bp, Homo sapiens
  misc_feature (61)..(62): /note="This region represents a CpG dinucleotide"
  misc_feature (61)..(61): /note="Nucleotide may be methylated to form 5-methylcytosine"
tcttataggatgtccttaatcagaaccacattactcagctagaggaagtccttgtgcagacgctggcaagacactatggcaaaagagtttcacaacatgaaaggtcagattgagaataaaag

SEQ ID NO: 2354 - DNA, 122 bp, Homo sapiens
  misc_feature (61)..(62): /note="This region represents a CpG dinucleotide"
  misc_feature (61)..(61): /note="Nucleotide may be methylated to form 5-methylcytosine"
caactcatttgccggcgtatacctcgcgctcgctgggaagcatttgcacaggctgcaaagcgcagcgattagagacccgcttccaaataaaatcaccgtggagagactacattttcttttca

SEQ ID NO: 2355 - DNA, 122 bp, Homo sapiens
  misc_feature (61)..(62): /note="This region represents a CpG dinucleotide"
  misc_feature (61)..(61): /note="Nucleotide may be methylated to form 5-methylcytosine"
tgcaggcccagcagcaggctctgatgtcatgctggggagcaagtgttgcagcccagctttcgtcctcccgaggaagcaaacactggctccctctccagggcctaggggaaggttcacaaaga

SEQ ID NO: 2356 - DNA, 122 bp, Homo sapiens
  misc_feature (61)..(62): /note="This region represents a CpG dinucleotide"
  misc_feature (61)..(61): /note="Nucleotide may be methylated to form 5-methylcytosine"
aaacatgttcatagctccctctcatgaccattgaatactatacaagcctccttttattctcgctgttgtattcaactaacagctcactggctaagttttaattgcttccaatgaggtcagca

SEQ ID NO: 2357 - DNA, 122 bp, Homo sapiens
  misc_feature (61)..(62): /note="This region represents a CpG dinucleotide"
  misc_feature (61)..(61): /note="Nucleotide may be methylated to form 5-methylcytosine"
tggggcctttttctgaccaggaagttcaggcatgtgacctggagacaagcaaatgtaccacgtgatgtgaagtgaactctcagccagccttgggcttccttagcctggggactgcatcctcc

SEQ ID NO: 2358 - DNA, 122 bp, Homo sapiens
  misc_feature (61)..(62): /note="This region represents a CpG dinucleotide"
  misc_feature (61)..(61): /note="Nucleotide may be methylated to form 5-methylcytosine"
tttagagacatgaccttagagaataaagaaacactggctgattaaaggggatggctcaaacgtagagctgaagaaggccatgtgtcccaacatttgtactcacaggccttagaagggaaagg

SEQ ID NO: 2359 - DNA, 122 bp, Homo sapiens
  misc_feature (61)..(62): /note="This region represents a CpG dinucleotide"
  misc_feature (61)..(61): /note="Nucleotide may be methylated to form 5-methylcytosine"
tggtggataaagaaagcttcagatacgatatctttgtataaaattaaatgtacatgcacacggacacaaatgagttatacataaaattggggaaacctgaaaaagatcaactgcttatatca

SEQ ID NO: 2360 - DNA, 122 bp, Homo sapiens
  misc_feature (61)..(62): /note="This region represents a CpG dinucleotide"
  misc_feature (61)..(61): /note="Nucleotide may be methylated to form 5-methylcytosine"
aaacatttgggaattgatggcagccttgtttctccaccaggctgaagaaactaggacctgcgggggctgagactggagtgaaacagatgtgaagagaaaagtcctgggtccaggtggtcctg

SEQ ID NO: 2361 - DNA, 122 bp, Homo sapiens
  misc_feature (61)..(62): /note="This region represents a CpG dinucleotide"
  misc_feature (61)..(61): /note="Nucleotide may be methylated to form 5-methylcytosine"
aggtaaaagtgccccgtttttggtcggtttcagcggccgcgcctttccagccccgcctcgcgtggctgcggcagcagacactttcagcagacgctcactgcgatcaacaagtgcgcggccgc

SEQ ID NO: 2362 - DNA, 122 bp, Homo sapiens
  misc_feature (61)..(62): /note="This region represents a CpG dinucleotide"
  misc_feature (61)..(61): /note="Nucleotide may be methylated to form 5-methylcytosine"
cgagcgtggggcccctgcttacccgacgcgcttggcagcctccctctaccctaaatcacacgtttggcttaacgaagaggccgtttaaatcactttcccagacaaaactattataatctgct

SEQ ID NO: 2363 - DNA, 122 bp, Homo sapiens
  misc_feature (61)..(62): /note="This region represents a CpG dinucleotide"
  misc_feature (61)..(61): /note="Nucleotide may be methylated to form 5-methylcytosine"
gcttgactactttagactgtaaaagctaaatttggctttcccagcctctctagaggctaacggtaatggtgtgactcaattctggccaataagacacaggaagcagtctgctggagcgggga

SEQ ID NO: 2364 - DNA, 122 bp, Homo sapiens
  misc_feature (61)..(62): /note="This region represents a CpG dinucleotide"
  misc_feature (61)..(61): /note="Nucleotide may be methylated to form 5-methylcytosine"
tcctggactcacacagaaactcaaagctatggaatgatggcaaatttaaaatatgacaagcgggagtcacaggtacactgcaaaagtgaaacttagaagctttgtgagtcctgttgtaacgc

SEQ ID NO: 2365 - DNA, 122 bp, Homo sapiens
  misc_feature (61)..(62): /note="This region represents a CpG dinucleotide"
  misc_feature (61)..(61): /note="Nucleotide may be methylated to form 5-methylcytosine"
aggtcaccagggcctcaacaagagctgtgtcatcagggctgggatactagcaggggcaaacgaggcactggcttcaggacaacatgtgagggggtgctcaaaaagtcagtcatcaagataga

SEQ ID NO: 2366 - DNA, 122 bp, Homo sapiens
  misc_feature (61)..(62): /note="This region represents a CpG dinucleotide"
  misc_feature (61)..(61): /note="Nucleotide may be methylated to form 5-methylcytosine"
ttttgatgagttcagttgttttgggggatggaaaggcgttttctggttaggaatgatgaacgggttggtttgctacttaggtaagtaagaagaaggggaactaatgagtaattgttgcacaa

SEQ ID NO: 2367 - DNA, 122 bp, Homo sapiens
  misc_feature (61)..(62): /note="This region represents a CpG dinucleotide"
  misc_feature (61)..(61): /note="Nucleotide may be methylated to form 5-methylcytosine"
tgggaggtgaaggctgggacccagaacagcagagactctgtcgatgatgtggaaagaccgcggctgcagtttgggcaggctgagccagggttgggtcttgcatgttgagaggctggcctgcg

SEQ ID NO: 2368 - DNA, 122 bp, Homo sapiens
  misc_feature (61)..(62): /note="This region represents a CpG dinucleotide"
  misc_feature (61)..(61): /note="Nucleotide may be methylated to form 5-methylcytosine"
tctcccacagcagccccggccccgcccctcataccgcggccggaaaccggaagcgcccgccgggcaccgcccaccagccctcgcgaggccccggaggctccgcccacctccgcttcccaccc

SEQ ID NO: 2369 - DNA, 122 bp, Homo sapiens
  misc_feature (61)..(62): /note="This region represents a CpG dinucleotide"
  misc_feature (61)..(61): /note="Nucleotide may be methylated to form 5-methylcytosine"
tattcagactacttcttggaagggccccaaatgccttgcctaagaacaatggacaaaagtcgcagtctcctaattccattagtcagaaaacattgtggtttcagaagtttttgcttataggg

SEQ ID NO: 2370 - DNA, 122 bp, Homo sapiens
  misc_feature (61)..(62): /note="This region represents a CpG dinucleotide"
  misc_feature (61)..(61): /note="Nucleotide may be methylated to form 5-methylcytosine"
aagattcaggctgcttgattacaaacaactaccagttaaagaccagtgcacagctctctgcggtaattatgcagggcaagttgggtctgtgtttactgaagtcttaggaaacaagaagcagt

SEQ ID NO: 2371 - DNA, 122 bp, Homo sapiens
  misc_feature (61)..(62): /note="This region represents a CpG dinucleotide"
  misc_feature (61)..(61): /note="Nucleotide may be methylated to form 5-methylcytosine"
gaggccaaagtggacagatcacctgaagtcaggagttcgagaccagcctgaccaacatggcgaaaccctgtctactaaaaatgcaaaaataattagccaggagtggtggcaggtgcctgtaa

SEQ ID NO: 2372 - DNA, 122 bp, Homo sapiens
  misc_feature (61)..(62): /note="This region represents a CpG dinucleotide"
  misc_feature (61)..(61): /note="Nucleotide may be methylated to form 5-methylcytosine"
aaattaacaaaatgtcgttggtgccaaagaataagccactttgtagtgacacacatgttacggtgtcaattggtatggagttttttgatgactcatatgatgaagaaagagccatgattcaa

SEQ ID NO: 2373 - DNA, 122 bp, Homo sapiens
  misc_feature (61)..(62): /note="This region represents a CpG dinucleotide"
  misc_feature (61)..(61): /note="Nucleotide may be methylated to form 5-methylcytosine"
agagcatcccttgtgtggcactgcctgtggtgacgacaatggtggcagtggctgggaaggcggccgcggtggtgtgggtgggggtggctccagtgctggccatgatcctggctctggctcct

SEQ ID NO: 2374 - DNA, 122 bp, Homo sapiens
  misc_feature (61)..(62): /note="This region represents a CpG dinucleotide"
  misc_feature (61)..(61): /note="Nucleotide may be methylated to form 5-methylcytosine"
acaagacataagactttaagtcaagaataaaggtaatgtgagtcttttttcttgcattggcgctacccacagggtgcatcatgacatattgctaagttctgcattcaggttatgtggctctc

SEQ ID NO: 2375 - DNA, 122 bp, Homo sapiens
  misc_feature (61)..(62): /note="This region represents a CpG dinucleotide"
  misc_feature (61)..(61): /note="Nucleotide may be methylated to form 5-methylcytosine"
accttttttcttcataaattagccagtctcaggtagcagtttgaaaatggattaatacaccgtgaaactagctttgttcagtgatatgtgttactctgtgaggaaactttaaggtctgtcgt

SEQ ID NO: 2376 - DNA, 122 bp, Homo sapiens
  misc_feature (61)..(62): /note="This region represents a CpG dinucleotide"
  misc_feature (61)..(61): /note="Nucleotide may be methylated to form 5-methylcytosine"
gtggggaccatcccttcagccacttgaaaacataaccaaagccagagacagtgagtcccccgtgggagaattattcagggagaacatgactggacttctgggttcttggcttccttttcccc

SEQ ID NO: 2377 - DNA, 122 bp, Homo sapiens
  misc_feature (61)..(62): /note="This region represents a CpG dinucleotide"
  misc_feature (61)..(61): /note="Nucleotide may be methylated to form 5-methylcytosine"
gaggcctgtaaataacttagattcttcaggtgctcagcgtttgaattcctggatcacctgcggcaggctcacctgaagtagacattagaggtggggctgttctgcaccaggaacaaagctac

SEQ ID NO: 2378 - DNA, 122 bp, Homo sapiens
  misc_feature (61)..(62): /note="This region represents a CpG dinucleotide"
  misc_feature (61)..(61): /note="Nucleotide may be methylated to form 5-methylcytosine"
gctgacacggacgccccaggcccgtggacttccctctcccactctctttcctcctgggaccgcacccggggcttgtgggcagatttacaaaatgagggaaaggaatgttattgctgacccag

SEQ ID NO: 2379 - DNA, 122 bp, Homo sapiens
  misc_feature (61)..(62): /note="This region represents a CpG dinucleotide"
  misc_feature (61)..(61): /note="Nucleotide may be methylated to form 5-methylcytosine"
gcactttagatgaagtagcctttatcgtccatttaatagaggttgcctcctattaccaagcgtggcagagaaaagagtttccacaattaggtcttgactttctgtccctctttttgaagagt

SEQ ID NO: 2380 - DNA, 122 bp, Homo sapiens
  misc_feature (61)..(62): /note="This region represents a CpG dinucleotide"
  misc_feature (61)..(61): /note="Nucleotide may be methylated to form 5-methylcytosine"
gaggctgcagctgtaaatgcgacgtcttctggggcgcctggtatccgtaggagtcaaagccgccgatgaagtcaactgcggaagaggggcggcgcatgttagggatcggcggcgggggcgag

SEQ ID NO: 2381 - DNA, 122 bp, Homo sapiens
  misc_feature (61)..(62): /note="This region represents a CpG dinucleotide"
  misc_feature (61)..(61): /note="Nucleotide may be methylated to form 5-methylcytosine"
ttcagggtggaaactcagagcctgtggtccagacagtgggcgtggcgtggctgggtgtctcgccttcctctctctgtctctctccaaccttctccccatctctgtccctccatttgtctctg

SEQ ID NO: 2382 - DNA, 122 bp, Homo sapiens
  misc_feature (61)..(62): /note="This region represents a CpG dinucleotide"
  misc_feature (61)..(61): /note="Nucleotide may be methylated to form 5-methylcytosine"
ataaatgctttagaacttctgaggatgggcttacttccaaaagatgagcaagaaaacactcgtggaaaatataggtatttcaaaatgcaaagagaaaaaggaactatagagtcagaaagaaa

SEQ ID NO: 2383 - DNA, 122 bp, Homo sapiens
  misc_feature (61)..(62): /note="This region represents a CpG dinucleotide"
  misc_feature (61)..(61): /note="Nucleotide may be methylated to form 5-methylcytosine"
ctatccagaggaagtacaggcaaaaggaaagaggaagggtgaagcctggctcactctacccgcctgactcatggcttccggtgccataacccagacgacttgtttctgtgatttctcaatct

SEQ ID NO: 2384 - DNA, 122 bp, Homo sapiens
  misc_feature (61)..(62): /note="This region represents a CpG dinucleotide"
  misc_feature (61)..(61): /note="Nucleotide may be methylated to form 5-methylcytosine"
tgatgaaggtggacgattgaattctatggcatgtaaatgctttgcgtaatcacagggcaacggggaggatgttcctgagaaatgagattgtttataattatggttacttttgacacaccctc

SEQ ID NO: 2385 - DNA, 122 bp, Homo sapiens
  misc_feature (61)..(62): /note="This region represents a CpG dinucleotide"
  misc_feature (61)..(61): /note="Nucleotide may be methylated to form 5-methylcytosine"
gcttttccatatccttagcatttcacacactgtatgttcttatcatattctacaaaaacacggcaacttcactatgatttagcaaaacacaggctttgtactcttccttctcaaggattact

SEQ ID NO: 2386 - DNA, 122 bp, Homo sapiens
  misc_feature (61)..(62): /note="This region represents a CpG dinucleotide"
  misc_feature (61)..(61): /note="Nucleotide may be methylated to form 5-methylcytosine"
caagtgcagttcagctcatttatgggggtagctataaataaaggaggagaggcatgtgagcgatgttgtaaaagaagaattgacctcactaatgattcatttgggcgataagaggaagtagt

SEQ ID NO: 2387 - DNA, 122 bp, Homo sapiens
  misc_feature (61)..(62): /note="This region represents a CpG dinucleotide"
  misc_feature (61)..(61): /note="Nucleotide may be methylated to form 5-methylcytosine"
caacaccgaaacaaaggcctttaattggtttcagagttttaagaaaacttgttaagcaaccggactttgagagcaagcagaaatgggtgtgaatcaagacatcccaaatgggtgaccttgtg

SEQ ID NO: 2388 - DNA, 122 bp, Homo sapiens
  misc_feature (61)..(62): /note="This region represents a CpG dinucleotide"
  misc_feature (61)..(61): /note="Nucleotide may be methylated to form 5-methylcytosine"
tggcaaatgcaccaattctcattagaggctcccaaggtgccccaggaaaaccagggattccgaatccaaaacaactgcactctggttggctggcagatgggcacctcttctgtgttgtttcc

SEQ ID NO: 2389 - DNA, 122 bp, Homo sapiens
  misc_feature (61)..(62): /note="This region represents a CpG dinucleotide"
  misc_feature (61)..(61): /note="Nucleotide may be methylated to form 5-methylcytosine"
cacatcagtcagatgtcaaaaggcagcacgtaaattgaataagggaaggaaaatgccgggcggcctcattcacgtccggcatgttccgctattattgaaaggaaattgagaaattagacagt

SEQ ID NO: 2390 - DNA, 122 bp, Homo sapiens
  misc_feature (61)..(62): /note="This region represents a CpG dinucleotide"
  misc_feature (61)..(61): /note="Nucleotide may be methylated to form 5-methylcytosine"
ccggcactgcttcctctttctgcttctctgtttcctgatgacatcaacataaataggaaacgtgggaggctcactctgcctagaggctccagaagaagactggtctctcccaccacacagag

SEQ ID NO: 2391 - DNA, 122 bp, Homo sapiens
  misc_feature (61)..(62): /note="This region represents a CpG dinucleotide"
  misc_feature (61)..(61): /note="Nucleotide may be methylated to form 5-methylcytosine"
tgtgcatccctggggatccctaagacccatttagggagtccatgtggctaagactactttcgtaatgacacaaagatgttatctggctttttcactctcattctttcacaagtatacagtgg

SEQ ID NO: 2392 - DNA, 122 bp, Homo sapiens
  misc_feature (61)..(62): /note="This region represents a CpG dinucleotide"
  misc_feature (61)..(61): /note="Nucleotide may be methylated to form 5-methylcytosine"
cttccctcagtcctgaggaatgttcttgctggggaccagaatccttcccctgtagggcagcgacagggatgcagcctgtgtccccctttctacacagctggcaggcaacatggaacctttat

SEQ ID NO: 2393 - DNA, 122 bp, Homo sapiens
  misc_feature (61)..(62): /note="This region represents a CpG dinucleotide"
  misc_feature (61)..(61): /note="Nucleotide may be methylated to form 5-methylcytosine"
aaacagaagcttcgctggatttggtgcaagagagagtaggaagacaggaagagggcatgccgaacagagatcatttatttcaggaggtacctacattgaaggaggctcacaagctggggcaa

SEQ ID NO: 2394 - DNA, 122 bp, Homo sapiens
  misc_feature (61)..(62): /note="This region represents a CpG dinucleotide"
  misc_feature (61)..(61): /note="Nucleotide may be methylated to form 5-methylcytosine"
agagtttaactggtatatgaccttctagggacattcgactgataagggaagaacgcctcacgtgagcatgtgtacaactcctgcatgcgtacaaacacactgcgcatgctcccctcccaggc

SEQ ID NO: 2395 - DNA, 122 bp, Homo sapiens
  misc_feature (61)..(62): /note="This region represents a CpG dinucleotide"
  misc_feature (61)..(61): /note="Nucleotide may be methylated to form 5-methylcytosine"
ctggcctgaggcggatactgacgccctgagggcatggaatagggcggcttgtgcaggtcccgccgtctcgggccttgcaaaaagggcggcctctccaacgcccctaccggaacctccccgga

SEQ ID NO: 2396 - DNA, 122 bp, Homo sapiens
  misc_feature (61)..(62): /note="This region represents a CpG dinucleotide"
  misc_feature (61)..(61): /note="Nucleotide may be methylated to form 5-methylcytosine"
agcataaccccttgccattgtgaatcacatttccctgttgaagaaaattgcaaccaggcacggtggctcatgcctgtaatcccagcactttgggcggccgaggcgggcagatcacttggggt

SEQ ID NO: 2397 - DNA, 122 bp, Homo sapiens
  misc_feature (61)..(62): /note="This region represents a CpG dinucleotide"
  misc_feature (61)..(61): /note="Nucleotide may be methylated to form 5-methylcytosine"
gatgccagctgtacatttctcttcacaggtgagtacattccttggcgctttaagtgatcacgtgccttccgaatgccaggtgcggcgcccgctctgcgctgctcgctgcaactgctcccacc

SEQ ID NO: 2398 - DNA, 122 bp, Homo sapiens
  misc_feature (61)..(62): /note="This region represents a CpG dinucleotide"
  misc_feature (61)..(61): /note="Nucleotide may be methylated to form 5-methylcytosine"
tttccttccctgctctcccttttcttcctctagtttttagccagacgccaattctccaggcgctgcagcatgtccaagcgagctgtgacgaagcccacaagatgaagtgaggctcctgccac

SEQ ID NO: 2399 - DNA, 122 bp, Homo sapiens
  misc_feature (61)..(62): /note="This region represents a CpG dinucleotide"
  misc_feature (61)..(61): /note="Nucleotide may be methylated to form 5-methylcytosine"
ctgccatggggccagtgtgcagactcagggctctgattcaaggaatctgaaacaaaccctcgtactacccagaactcaggaagtctaattcttagcctgaaaaatgacctgaagttacatat

SEQ ID NO: 2400 - DNA, 122 bp, Homo sapiens
  misc_feature (61)..(62): /note="This region represents a CpG dinucleotide"
  misc_feature (61)..(61): /note="Nucleotide may be methylated to form 5-methylcytosine"
gtaatgggaagggaaaatttaacaggacccggggacttttccgtgtgcccgccctttccccgtaaaagaagaaaagcctcatgtgtggcttgaaataggccaaggagggctgaatgcgaccc

SEQ ID NO: 2401 - DNA, 122 bp, Homo sapiens
  misc_feature (61)..(62): /note="This region represents a CpG dinucleotide"
  misc_feature (61)..(61): /note="Nucleotide may be methylated to form 5-methylcytosine"
ttttttccaactccacatgcctgtctagacttcaagctttattacgaataaagagaaaatcggctggatggcataaaaaatatttcaggcagattaacacatgatttacctcttcttgaaca

SEQ ID NO: 2402 - DNA, 122 bp, Homo sapiens
  misc_feature (61)..(62): /note="This region represents a CpG dinucleotide"
  misc_feature (61)..(61): /note="Nucleotide may be methylated to form 5-methylcytosine"
tcacagggcggcctgaccaggcaggcaggaaagctgacaccctggggagggctggcaggccggtgccctgacggcagggggcagttgggccttcaggctcctcttcccctgacacaaagcag

SEQ ID NO: 2403 - DNA, 122 bp, Homo sapiens
  misc_feature (61)..(62): /note="This region represents a CpG dinucleotide"
  misc_feature (61)..(61): /note="Nucleotide may be methylated to form 5-methylcytosine"
aaaaagaatgttatgctctgttgatgcttttggtgactatgacacaggggccctgtcttccgcagaccctgcagggccaggctggcatagacccagctgagcaaccgtcgcctgagagcttt

SEQ ID NO: 2404 - DNA, 122 bp, Homo sapiens
  misc_feature (61)..(62): /note="This region represents a CpG dinucleotide"
  misc_feature (61)..(61): /note="Nucleotide may be methylated to form 5-methylcytosine"
cagggagatctgcagtgaaacaagctgccagagactatcatcaagagctgctgctgcagacgttcaagctaagaatcagaggggaaaggaggagtggggaaaggtaagaaaagcaggaaaac

SEQ ID NO: 2405 - DNA, 122 bp, Homo sapiens
  misc_feature (61)..(62): /note="This region represents a CpG dinucleotide"
  misc_feature (61)..(61): /note="Nucleotide may be methylated to form 5-methylcytosine"
gttcgtgtggtgtgacatctgcctcggtgtttctgttttccttgcacaacacaggtgattcgacctcccctttcaagcattcctgccgccttgggctggaccccgtgggcggaggcactctt

SEQ ID NO: 2406 - DNA, 122 bp, Homo sapiens
  misc_feature (61)..(62): /note="This region represents a CpG dinucleotide"
  misc_feature (61)..(61): /note="Nucleotide may be methylated to form 5-methylcytosine"
ctctctgatttatgtttcctctttaaattctgattcgggtattttgatgatctgctcaaacggctcttggctcaagtcattcagctgggcccaggtttgatagcaaatatgcttgcagaaaa

SEQ ID NO: 2407 - DNA, 122 bp, Homo sapiens
  misc_feature (61)..(62): /note="This region represents a CpG dinucleotide"
  misc_feature (61)..(61): /note="Nucleotide may be methylated to form 5-methylcytosine"
tattccggggaggtgttgggcaccaacatttttaaagccccgtgggtggttccctgggatcgcccagaccgaaaggccccgaacgtccagatcgcagggaatggggtcggaggggcggcgct

SEQ ID NO: 2408 - DNA, 122 bp, Homo sapiens
  misc_feature (61)..(62): /note="This region represents a CpG dinucleotide"
  misc_feature (61)..(61): /note="Nucleotide may be methylated to form 5-methylcytosine"
tccagttgtaggtaccatccttgttttctgtaagggttgaggccgtttctgtcctggacacgtttccattctccaaccaggtcagctgtagtctctgggggtagaacttcctcacctggcag

SEQ ID NO: 2409 - DNA, 122 bp, Homo sapiens
  misc_feature (61)..(62): /note="This region represents a CpG dinucleotide"
  misc_feature (61)..(61): /note="Nucleotide may be methylated to form 5-methylcytosine"
gacacaaggtgacctcttgtatgtgctgcctagtctgccggagttatctaagcaatctgtcgacctttaaggtttcagctgtctctgtagggtaattgtctgatttcgagattttgggggtt

SEQ ID NO: 2410 - DNA, 122 bp, Homo sapiens
  misc_feature (61)..(62): /note="This region represents a CpG dinucleotide"
  misc_feature (61)..(61): /note="Nucleotide may be methylated to form 5-methylcytosine"
cagttcgttctaggcactgagaatattgcagggacaggacagacagagtctctgatttcacgaaccttacagtcagttggaagtcaggctggaaaacaaataaacacactaatcacatgaca

SEQ ID NO: 2411 - DNA, 122 bp, Homo sapiens
  misc_feature (61)..(62): /note="This region represents a CpG dinucleotide"
  misc_feature (61)..(61): /note="Nucleotide may be methylated to form 5-methylcytosine"
ataacgtgtgaaaaactgcggtttcttcatgtggctagaggatcatgtgtgaagagtgcacgagttagggaaggatcagatcttgaaagccttcagtgtctaacaagtttctggacattatc

SEQ ID NO: 2412 - DNA, 122 bp, Homo sapiens
  misc_feature (61)..(62): /note="This region represents a CpG dinucleotide"
  misc_feature (61)..(61): /note="Nucleotide may be methylated to form 5-methylcytosine"
tgatctggtctaggataaatagtcatccctcttacctgtccatctacttaacaaaactggcgggttacgtgcagtgttatttttaatgattcatactaaaacttgatgtgtgagagcaatat

SEQ ID NO: 2413 - DNA, 122 bp, Homo sapiens
  misc_feature (61)..(62): /note="This region represents a CpG dinucleotide"
  misc_feature (61)..(61): /note="Nucleotide may be methylated to form 5-methylcytosine"
agggcagcccagcctgtgagtaacactcactctggatttccctggccagagtcctctctgcggaggaacttgggaccagttctttagggagttttgggtgacatcatccctccttactcaag

SEQ ID NO: 2414 - DNA, 122 bp, Homo sapiens
  misc_feature (61)..(62): /note="This region represents a CpG dinucleotide"
  misc_feature (61)..(61): /note="Nucleotide may be methylated to form 5-methylcytosine"
catccaccaaactcagcccaaatcccacttcctaaatgaagtctttcaagacttcctacccgccccaggtccccgcacgtactgcatgccccgaactcgtagaacattccctatcctgttat

SEQ ID NO: 2415 - DNA, 122 bp, Homo sapiens
  misc_feature (61)..(62): /note="This region represents a CpG dinucleotide"
  misc_feature (61)..(61): /note="Nucleotide may be methylated to form 5-methylcytosine"
cgccggcgagggccgccaggccctgggggagggagggcttcgtgggggagtcgcctccagcgcccacagggactgcagggctcgtgtctaggcccaatcacaaggatcctgcgtgtctgagt

SEQ ID NO: 2416 - DNA, 122 bp, Homo sapiens
  misc_feature (61)..(62): /note="This region represents a CpG dinucleotide"
  misc_feature (61)..(61): /note="Nucleotide may be methylated to form 5-methylcytosine"
aagagagcggggaaacgggtgagcagaaagcctggggaacggagcccagcggcgccaagtcgccccggcgtccacctgcgcccaccagagagcgccgggcccccgcgagcggaacctcgaac

SEQ ID NO: 2417 - DNA, 122 bp, Homo sapiens
  misc_feature (61)..(62): /note="This region represents a CpG dinucleotide"
  misc_feature (61)..(61): /note="Nucleotide may be methylated to form 5-methylcytosine"
atgccattcatatctttcccttgaaatggaagtgcagccagaaacacttcctacttagagcgtctaagaaacagcctggagaattgaagctgttcttcctgctattgtgtgtagtagaggag

SEQ ID NO: 2418 - DNA, 122 bp, Homo sapiens
  misc_feature (61)..(62): /note="This region represents a CpG dinucleotide"
  misc_feature (61)..(61): /note="Nucleotide may be methylated to form 5-methylcytosine"
cagggcgatcgtgaacggcggtccctctgagcaggtgcacaggctgggcagttgctgcagcggagaactcattggaattcaggggctagaaccgaggggcatccggccctccctgttgcttg

SEQ ID NO: 2419 - DNA, 122 bp, Homo sapiens
  misc_feature (61)..(62): /note="This region represents a CpG dinucleotide"
  misc_feature (61)..(61): /note="Nucleotide may be methylated to form 5-methylcytosine"
ttctttgagacttctcagtgattgtttgttttcggccagggtgaatgatttatcccccctcgatcaccaccggattattaccaaagggttggagaaaaaatcctttttcagcatgaagccaa

SEQ ID NO: 2420 - DNA, 122 bp, Homo sapiens
  misc_feature (61)..(62): /note="This region represents a CpG dinucleotide"
  misc_feature (61)..(61): /note="Nucleotide may be methylated to form 5-methylcytosine"
gggttaattgggctgagtgtggccacaaagcagaaagacttgctgtgctttctgaacttacgtaagttacaaacactattaaaatgtcacaaacaaataagagaatgaggactgtacttagg

SEQ ID NO: 2421 - DNA, 122 bp, Homo sapiens
  misc_feature (61)..(62): /note="This region represents a CpG dinucleotide"
  misc_feature (61)..(61): /note="Nucleotide may be methylated to form 5-methylcytosine"
tgatttggagcctagagacagggactgtgtcccatgtgccaaagccagaatcggggctcccgaacatgcctcggtgtcctctggaggaaagggaaggtgatggtgctccattcactgctggg

SEQ ID NO: 2422 - DNA, 122 bp, Homo sapiens
  misc_feature (61)..(62): /note="This region represents a CpG dinucleotide"
  misc_feature (61)..(61): /note="Nucleotide may be methylated to form 5-methylcytosine"
ggaaagaactgtgagtacctaagaaaaagaagaatacacgttagctctctttactgaggtcggaaccttccgagacccgccacatttcagcccgacaaacccgagatcacgttcacttcctg

SEQ ID NO: 2423 - DNA, 122 bp, Homo sapiens
  misc_feature (61)..(62): /note="This region represents a CpG dinucleotide"
  misc_feature (61)..(61): /note="Nucleotide may be methylated to form 5-methylcytosine"
aacacacacacacacacaaacacacacacacacacacacacacaggcaggacaagaggcacgattccatggagtatgaccagggtggcagcatccacagtgacatctggcaaatggccctgt

SEQ ID NO: 2424 - DNA, 122 bp, Homo sapiens
  misc_feature (61)..(62): /note="This region represents a CpG dinucleotide"
  misc_feature (61)..(61): /note="Nucleotide may be methylated to form 5-methylcytosine"
agactgtccccgttccccggatgggggctgcgctcagttccagctggggcctgagtggggcgctgtcacgaggcacccggtccctctgccccacgtgtattccccatcgtcatttaacactg

SEQ ID NO: 2425 - DNA, 122 bp, Homo sapiens
  misc_feature (61)..(62): /note="This region represents a CpG dinucleotide"
  misc_feature (61)..(61): /note="Nucleotide may be methylated to form 5-methylcytosine"
gttatttctggacctgcagctcactcataccaacagcgttaatactcattcatacctcagcgttaaagctgagagcatgcacatggcaagcctgggctgacacctaagtactgttctctttt

SEQ ID NO: 2426 - DNA, 122 bp, Homo sapiens
  misc_feature (61)..(62): /note="This region represents a CpG dinucleotide"
  misc_feature (61)..(61): /note="Nucleotide may be methylated to form 5-methylcytosine"
ccctgcgatgggggtcgtcataccccggagtcgagagggtggtgatatgactcctcgtatcgcggagtgcgcccgcccccctgcaatgtggatcgtcatatccagggtgggagattggggtg

SEQ ID NO: 2427 - DNA, 122 bp, Homo sapiens
  misc_feature (61)..(62): /note="This region represents a CpG dinucleotide"
  misc_feature (61)..(61): /note="Nucleotide may be methylated to form 5-methylcytosine"
agacaatagtggctatgaatcaagcatgagctcaggtgggtgatcacctaatgcgcctaacgtggtgtggttatataatgtgcctcatgtagcatggttacataatgtgtggagttgtgtgc

SEQ ID NO: 2428 - DNA, 122 bp, Homo sapiens
  misc_feature (61)..(62): /note="This region represents a CpG dinucleotide"
  misc_feature (61)..(61): /note="Nucleotide may be methylated to form 5-methylcytosine"
atgaatactggacttggagctacagcaagtcctggaccgtgactcttatggggggaaattcggatttttggttttactaagccgtgtgtggggaggtgtccggcgtcctcctcctgggacgg

SEQ ID NO: 2429 - DNA, 122 bp, Homo sapiens
  misc_feature (61)..(62): /note="This region represents a CpG dinucleotide"
  misc_feature (61)..(61): /note="Nucleotide may be methylated to form 5-methylcytosine"
aatgaggaaactgaggcacaagagaggttacctaaattcctgagggttgcatgactaatacgtggtgaagccagggttcaaacgccagcatctcacagtgttactgttataagacagttgcc

SEQ ID NO: 2430 - DNA, 122 bp, Homo sapiens
  misc_feature (61)..(62): /note="This region represents a CpG dinucleotide"
  misc_feature (61)..(61): /note="Nucleotide may be methylated to form 5-methylcytosine"
gctgcatgtagcaaactctccacaaacatgaaataatacccatggccaaattgagccaatcgacgagaataggaagtcaataagcacagctgagtattatttattttttagtgtcattcaaa

SEQ ID NO: 2431 - DNA, 122 bp, Homo sapiens
  misc_feature (61)..(62): /note="This region represents a CpG dinucleotide"
  misc_feature (61)..(61): /note="Nucleotide may be methylated to form 5-methylcytosine"
atacatgcgaagcatgcgctctaccactgagctacatcccctggcacaagtcggttgtaacggagaattcctgtcatgttaaaaacgcgaagcattttatattacctcgtgctcgaccaggg

SEQ ID NO: 2432 - DNA, 122 bp, Homo sapiens
  misc_feature (61)..(62): /note="This region represents a CpG dinucleotide"
  misc_feature (61)..(61): /note="Nucleotide may be methylated to form 5-methylcytosine"
tccgtatcatttggtttttgttttgttgattagttccttcctttctggcactacaagatgcgccaggaccatcttgtatagacctggttctttgatctgggcactaggtgtgcttgttgcta

SEQ ID NO: 2433 - DNA, 122 bp, Homo sapiens
  misc_feature (61)..(62): /note="This region represents a CpG dinucleotide"
  misc_feature (61)..(61): /note="Nucleotide may be methylated to form 5-methylcytosine"
tggttataaattgggctatattttctgtgaatgtctggtcccaacatctgtattattcttcgctaaagaagtcactaaatatcagcatgaaaagtgggatgaagaggcccaagatgctgcag

SEQ ID NO: 2434 - DNA, 122 bp, Homo sapiens
  misc_feature (61)..(62): /note="This region represents a CpG dinucleotide"
  misc_feature (61)..(61): /note="Nucleotide may be methylated to form 5-methylcytosine"
gtgactcatgccacggtgatacccggagaccttcggggacccagaaacattaaggtgcaccgatatctcaattatccggataactctagacctagagtcaccatggaaacctagaaccctga

SEQ ID NO: 2435 - DNA, 122 bp, Homo sapiens
  misc_feature (61)..(62): /note="This region represents a CpG dinucleotide"
  misc_feature (61)..(61): /note="Nucleotide may be methylated to form 5-methylcytosine"
tacttccttcctaaataagcaataaggtcaacaagggctgggtaaaaagcctcacaaatacgaaagctgtcatgtttgtgagcccagaatttcagttctgagtgatgattggctatggaaaa

SEQ ID NO: 2436 - DNA, 122 bp, Homo sapiens
  misc_feature (61)..(62): /note="This region represents a CpG dinucleotide"
  misc_feature (61)..(61): /note="Nucleotide may be methylated to form 5-methylcytosine"
tatttaactccacgtttctcctcagggctcttatcctctagacaataacggaatagagcacgatttctgtgacagagaagggaagtccctttggccagaacaaggttgtgggcatggaatga

SEQ ID NO: 2437 - DNA, 122 bp, Homo sapiens
  misc_feature (61)..(62): /note="This region represents a CpG dinucleotide"
  misc_feature (61)..(61): /note="Nucleotide may be methylated to form 5-methylcytosine"
agtgacagtgctatgccatctaagcttgtgtaagtacaccctgtgatgttcacacaatgacgaaatcaccattgttaagtaaatgggtttgggagaaggttcaaacagcttccacctgcccc

SEQ ID NO: 2438 - DNA, 122 bp, Homo sapiens
  misc_feature (61)..(62): /note="This region represents a CpG dinucleotide"
  misc_feature (61)..(61): /note="Nucleotide may be methylated to form 5-methylcytosine"
tttcacagcttctcaccagggccggggctagggtgagtcatgtgaggcacccagggtacacgactgaaggaggctctcactcccatgcactggccctgcacttgcaccaccctggaagctaa

SEQ ID NO: 2439 - DNA, 122 bp, Homo sapiens
  misc_feature (61)..(62): /note="This region represents a CpG dinucleotide"
  misc_feature (61)..(61): /note="Nucleotide may be methylated to form 5-methylcytosine"
tgcagcataacatatggcttcctgaacttgcaagtatggcttaatgttctctgttgaaatcgtgtctgtttaaacagtctcttggaaaagtgagccatattcaataaaatcattaatttcat

SEQ ID NO: 2440 - DNA, 122 bp, Homo sapiens
  misc_feature (61)..(62): /note="This region represents a CpG dinucleotide"
  misc_feature (61)..(61): /note="Nucleotide may be methylated to form 5-methylcytosine"
gaaccgcggcgggtgggatgccgcgcctgcgcacggggtcaagcggggccatagtggaggcgcctcgcctgcacaaagcgcacctgcggacggtggcgctgtggggatagggaggtcccgcg

SEQ ID NO: 2441 - DNA, 122 bp, Homo sapiens
  misc_feature (61)..(62): /note="This region represents a CpG dinucleotide"
  misc_feature (61)..(61): /note="Nucleotide may be methylated to form 5-methylcytosine"
ggaacacagtgagcacataaaaagtgtttagctattattgtatgtcatttccccagccctcgtaggcatcttagtatgggacccccaatttaaaccaatcttctcagccctggttgctgatt

SEQ ID NO: 2442 - DNA, 122 bp, Homo sapiens
  misc_feature (61)..(62): /note="This region represents a CpG dinucleotide"
  misc_feature (61)..(61): /note="Nucleotide may be methylated to form 5-methylcytosine"
atgaagaagtcttctgatgaagcgagaccccggaagtgcagcttcaggcaaaatcctgagcgaattctttgctgccaggacagtccataggctcttactcttagaaattacgtaagcatgag

SEQ ID NO: 2443 - DNA, 122 bp, Homo sapiens
  misc_feature (61)..(62): /note="This region represents a CpG dinucleotide"
  misc_feature (61)..(61): /note="Nucleotide may be methylated to form 5-methylcytosine"
cctcctagatttccaggaggttaagcacagatcccttctcgctggcaccccgcagagtcccgcttctgctcacctagcgcgtttacagagtgttttcaccatactttgtctcatctaagctc

SEQ ID NO: 2444 - DNA, 122 bp, Homo sapiens
  misc_feature (61)..(62): /note="This region represents a CpG dinucleotide"
  misc_feature (61)..(61): /note="Nucleotide may be methylated to form 5-methylcytosine"
tgaggcggggcgcctgccaccattcgtgattttccgtgactcaccctctcaacagtgtcccgtcagcccccgctttctggaattaagatgattttccatgggcattatagtcagaggaggtt

SEQ ID NO: 2445 - DNA, 122 bp, Homo sapiens
  misc_feature (61)..(62): /note="This region represents a CpG dinucleotide"
  misc_feature (61)..(61): /note="Nucleotide may be methylated to form 5-methylcytosine"
ccctcccccgcctctccgcgcactccgcgtcccggcctccagttcccctttcccttgaaccgctcacttcacagcccttcgcccccgggaagaagaaacatttcccgaagcgcactcctcag

SEQ ID NO: 2446 - DNA, 122 bp, Homo sapiens
  misc_feature (61)..(62): /note="This region represents a CpG dinucleotide"
  misc_feature (61)..(61): /note="Nucleotide may be methylated to form 5-methylcytosine"
ctgactcttttttgtccctgttctacacagggtatcccaggaggcgttggttcaccaggacgtgatggctcaccaggccagagggtaaggtcttgcccaaggttggtttttagcaaagtagt

SEQ ID NO: 2447 - DNA, 122 bp, Homo sapiens
  misc_feature (61)..(62): /note="This region represents a CpG dinucleotide"
  misc_feature (61)..(61): /note="Nucleotide may be methylated to form 5-methylcytosine"
gcctcccccgccccctcccggctgtgggctcctgcgcagccccagcctcccccacgagcgcggctgcctgctcctcggcgcccagtcccgtcgaccgcccaaggactgaggagtgcgcgcgc

SEQ ID NO: 2448 - DNA, 122 bp, Homo sapiens
  misc_feature (61)..(62): /note="This region represents a CpG dinucleotide"
  misc_feature (61)..(61): /note="Nucleotide may be methylated to form 5-methylcytosine"
acagcaactttctgatgcctgagacagcatgtgaaatgttctctctgtactgcctgttcccgtgacagttttttcatcaaagttgtacaacctccagagaaaacttgtccttttgatgggga

SEQ ID NO: 2449 - DNA, 122 bp, Homo sapiens
  misc_feature (61)..(62): /note="This region represents a CpG dinucleotide"
  misc_feature (61)..(61): /note="Nucleotide may be methylated to form 5-methylcytosine"
ctgtcagagcaacctaactaggggctctgttcccagcagcagaacttatggaatgtgaggcgtgggcggatgtggcagtcatacttcctgccctagaggatggcagtctatcacaagagaat

SEQ ID NO: 2450 - DNA, 122 bp, Homo sapiens
  misc_feature (61)..(62): /note="This region represents a CpG dinucleotide"
  misc_feature (61)..(61): /note="Nucleotide may be methylated to form 5-methylcytosine"
cactccagcctgggcgacaagcgagactccgcctcaaaaaaaacaaaacaaaacaaaaaacgatctttgaggaacctcccctgtgtccccgcccaccgcagctcctggagactcctcccgtg

SEQ ID NO: 2451 - DNA, 122 bp, Homo sapiens
  misc_feature (61)..(62): /note="This region represents a CpG dinucleotide"
  misc_feature (61)..(61): /note="Nucleotide may be methylated to form 5-methylcytosine"
tcctccttcaatctcactcttgttccaggggggacctgaattgcctcactgttgggaagacgagggaattttctgtgaggaaaatcattagagaatatagtccaagcagtcactggcaattt

SEQ ID NO: 2452 - DNA, 122 bp, Homo sapiens
  misc_feature (61)..(62): /note="This region represents a CpG dinucleotide"
  misc_feature (61)..(61): /note="Nucleotide may be methylated to form 5-methylcytosine"
gaaagtctgttgagctctagctggcgtgagagcaagtgggcgccactcccattccatgcgcgctgtgtccgagcctgccaggctgctggagtccgggagcaaccttgggagaggacatgaaa

SEQ ID NO: 2453 - DNA, 122 bp, Homo sapiens
  misc_feature (61)..(62): /note="This region represents a CpG dinucleotide"
  misc_feature (61)..(61): /note="Nucleotide may be methylated to form 5-methylcytosine"
acgagacggggtgcagcgtccgtttgggaaggcggaagaagcctgtgaggtccaagagggcggatggagaaagttccccagcaggaactccccgctagggaagctttagaatttgcccggga

SEQ ID NO: 2454 - DNA, 122 bp, Homo sapiens
  misc_feature (61)..(62): /note="This region represents a CpG dinucleotide"
  misc_feature (61)..(61): /note="Nucleotide may be methylated to form 5-methylcytosine"
atcgcaagtcagcaacaaagcatggaaatgcacaaaactcatactgaaaggagagagacacgtgtccagaagggagaagaatgatctcaggcaatgaaaacaaaccagggcaaaggtaagct

SEQ ID NO: 2455 - DNA, 122 bp, Homo sapiens
  misc_feature (61)..(62): /note="This region represents a CpG dinucleotide"
  misc_feature (61)..(61): /note="Nucleotide may be methylated to form 5-methylcytosine"
cgcgggtgctggaggcacagcggcttccacgcagacgcccgcagcaccacagcctgtgcacggcgcatccacgccctgttacaaatgttccattcaacgccttctagcacattcacagatcg

SEQ ID NO: 2456 - DNA, 122 bp, Homo sapiens
  misc_feature (61)..(62): /note="This region represents a CpG dinucleotide"
  misc_feature (61)..(61): /note="Nucleotide may be methylated to form 5-methylcytosine"
ctaggcggccgtggctctgagggacatttcctggcagcagccctacccgatggacttctacgctggcagctccttggggccctggacggtgaaccacggccaggaccgccgtccccacgccc

SEQ ID NO: 2457 - DNA, 122 bp, Homo sapiens
  misc_feature (61)..(62): /note="This region represents a CpG dinucleotide"
  misc_feature (61)..(61): /note="Nucleotide may be methylated to form 5-methylcytosine"
gagttttctgtgggagtaagtagccctgcctgcagcaaaggcagcctattgcagatgaagcgtgtcagcagggctcagcgtctgaagggactggggtatgcgacaagactatggctcaacac

SEQ ID NO: 2458 - DNA, 122 bp, Homo sapiens
  misc_feature (61)..(62): /note="This region represents a CpG dinucleotide"
  misc_feature (61)..(61): /note="Nucleotide may be methylated to form 5-methylcytosine"
cttgcttggtaaaactacctctaataatttaggaatatatttgccttctgtgaaagccatcgcaaagtataaaaatagtgtaagtacaggtatttaggctcacaaaatatcgttatgactga

SEQ ID NO: 2459 - DNA, 122 bp, Homo sapiens
  misc_feature (61)..(62): /note="This region represents a CpG dinucleotide"
  misc_feature (61)..(61): /note="Nucleotide may be methylated to form 5-methylcytosine"
ctgcctccgggaaccaactgccgggagattctgattggctcagccgcgtgcccacgtgaccgaccaaaaccggccaccagggtctcccaactgcctgtcaaacgcacagccctgttgggccc

SEQ ID NO: 2460 - DNA, 122 bp, Homo sapiens
  misc_feature (61)..(62): /note="This region represents a CpG dinucleotide"
  misc_feature (61)..(61): /note="Nucleotide may be methylated to form 5-methylcytosine"
acagaccataggagtatattaactgcaggatgccttgaaaaagaaagaaaaaagactgagcgactgatcttgtggaaatgatttaaggtgacacttgcagtacttttttttaagggatcaag

SEQ ID NO: 2461 - DNA, 122 bp, Homo sapiens
  misc_feature (61)..(62): /note="This region represents a CpG dinucleotide"
  misc_feature (61)..(61): /note="Nucleotide may be methylated to form 5-methylcytosine"
cagtgtcaccctccttcctgctgtgctgatttcagcgagggcctccgggccagactgccccgtgcgccccctgttgactaacctgggaatcgcccgccgcctgccttgagccttgtgatgtg

SEQ ID NO: 2462 - DNA, 122 bp, Homo sapiens
  misc_feature (61)..(62): /note="This region represents a CpG dinucleotide"
  misc_feature (61)..(61): /note="Nucleotide may be methylated to form 5-methylcytosine"
ccatgagacactggaagagtctacaagaacacagtgatttatggtgggggctttgcaccacgtattattgctgtatctccacagagggtaaaaactaggtcagccacacaggcagtcagctg

SEQ ID NO: 2463 - DNA, 122 bp, Homo sapiens
  misc_feature (61)..(62): /note="This region represents a CpG dinucleotide"
  misc_feature (61)..(61): /note="Nucleotide may be methylated to form 5-methylcytosine"
tcccattcactaggtctgcttgtctaatgacagccctctaaattttgcactcaacatggacgtcatttttcacttcaggtcgtatttaatagcagtttggaaagatgaaactatatcgtcaa

SEQ ID NO: 2464 - DNA, 122 bp, Homo sapiens
  misc_feature (61)..(62): /note="This region represents a CpG dinucleotide"
  misc_feature (61)..(61): /note="Nucleotide may be methylated to form 5-methylcytosine"
gctgcggggcgcccgctggggctccgggcggcacggggcgcgggtgggccggctggtgagcgccatcgtgcttgccttcggcttgctctgggccccctaccacgcagtcaaccttctgcagg

SEQ ID NO: 2465 - DNA, 122 bp, Homo sapiens
  misc_feature (61)..(62): /note="This region represents a CpG dinucleotide"
  misc_feature (61)..(61): /note="Nucleotide may be methylated to form 5-methylcytosine"
atctttttggaacctccccgcagtgaatcacttttcaaacttgcttcacagaacattcaacgctgacaaacctcccatggaaggggaagtaatagagtgtaagaaccacagggtccatggca

SEQ ID NO: 2466 - DNA, 122 bp, Homo sapiens
  misc_feature (61)..(62): /note="This region represents a CpG dinucleotide"
  misc_feature (61)..(61): /note="Nucleotide may be methylated to form 5-methylcytosine"
caatagtttacattttaaaggtgttacacccattttgttttgagatgtgtcaacaaaacccgtgtttcttttctttctataagtttaaaatgtccccaaatcaattaacaatagaggaaagt

SEQ ID NO: 2467 - DNA, 122 bp, Homo sapiens
  misc_feature (61)..(62): /note="This region represents a CpG dinucleotide"
  misc_feature (61)..(61): /note="Nucleotide may be methylated to form 5-methylcytosine"
cttttttccccccacctccctaaactaaatcacttgcgcggttcttgccttttaacggagcgataacgtgaggacatctgaaattccgactttattttcctccagcacacctggcccctgcc

SEQ ID NO: 2468 - DNA, 122 bp, Homo sapiens
  misc_feature (61)..(62): /note="This region represents a CpG dinucleotide"
  misc_feature (61)..(61): /note="Nucleotide may be methylated to form 5-methylcytosine"
aggactcaatgtttcatatgaagcccttggtgatgaggacatagcatctgccctggaaatcgttattccaacataatattattttctagaatgccctggaaggacagaatatttaaaaatat

SEQ ID NO: 2469 - DNA, 122 bp, Homo sapiens
  misc_feature (61)..(62): /note="This region represents a CpG dinucleotide"
  misc_feature (61)..(61): /note="Nucleotide may be methylated to form 5-methylcytosine"
tcctcgtctgtagaatgagagcattagaccactagataaagcctaatggctcttgtagcccgttaggaatttattgataatcacttcctgaccatcatgctatccactcacattctaaatga

SEQ ID NO: 2470 - DNA, 122 bp, Homo sapiens
  misc_feature (61)..(62): /note="This region represents a CpG dinucleotide"
  misc_feature (61)..(61): /note="Nucleotide may be methylated to form 5-methylcytosine"
tgcctgtttccttcatcatagtatcaattcctcttcaaacaacataaggccatgggaccacggggcttatgcagaaagaaaagaaagccatgaggaccaaaatatttgatttggatgtctcc

SEQ ID NO: 2471 - DNA, 122 bp, Homo sapiens
  misc_feature (61)..(62): /note="This region represents a CpG dinucleotide"
  misc_feature (61)..(61): /note="Nucleotide may be methylated to form 5-methylcytosine"
gggccctgccaaagcttctcaaatttttcaattcaacagttgttatttaaagagggggtacggatggagggggaaaaaaactccagaaagcaaaaatccaaaagaggagtggctaataacag

SEQ ID NO: 2472 - DNA, 122 bp, Homo sapiens
  misc_feature (61)..(62): /note="This region represents a CpG dinucleotide"
  misc_feature (61)..(61): /note="Nucleotide may be methylated to form 5-methylcytosine"
cctcccttattggctgcagtatgccggcagccccgccctgtgtgcggtgtctaaggattccgtccccaagcaaggacaacatattatcttccccgcccttctcttttctacagtatctgtta

SEQ ID NO: 2473 - DNA, 122 bp, Homo sapiens
  misc_feature (61)..(62): /note="This region represents a CpG dinucleotide"
  misc_feature (61)..(61): /note="Nucleotide may be methylated to form 5-methylcytosine"
aatctgcttcctacactcacttcccaaatacctctggaggcatccaatacttcattcaaacgcactcaaggcgaagcgctcaaaccgtcactgaacatttctctggcaggttgccagtactt

SEQ ID NO: 2474 - DNA, 122 bp, Homo sapiens
  misc_feature (61)..(62): /note="This region represents a CpG dinucleotide"
  misc_feature (61)..(61): /note="Nucleotide may be methylated to form 5-methylcytosine"
tactcctttagtccatgtagctttcactctgccttgctatgtggcttagagacaggcaatcgttagcccatcattgtatggcttgaccctaaagtgggcttttacaaaattccctctatatt

SEQ ID NO: 2475 - DNA, 122 bp, Homo sapiens
  misc_feature (61)..(62): /note="This region represents a CpG dinucleotide"
  misc_feature (61)..(61): /note="Nucleotide may be methylated to form 5-methylcytosine"
gttttttgttttttgttttaattaaaaaaaaaaaaaaactcttgagtaaaggaaggaatacgatccatctgatctttctgagacttccaggctctgtcaacaactatttggaaataaattct

SEQ ID NO: 2476 - DNA, 122 bp, Homo sapiens
  misc_feature (61)..(62): /note="This region represents a CpG dinucleotide"
  misc_feature (61)..(61): /note="Nucleotide may be methylated to form 5-methylcytosine"
ttatcacccatgccctcctaaaagggtgtctcaaagcatatctttctgtagagcagaattcggaactgagaagacgagggctcaaattgaatctcacaggatttgcgtgcaagagaaaccca

SEQ ID NO: 2477 - DNA, 122 bp, Homo sapiens
  misc_feature (61)..(62): /note="This region represents a CpG dinucleotide"
  misc_feature (61)..(61): /note="Nucleotide may be methylated to form 5-methylcytosine"
tcctggcgcctccttgtgctgcttcatgcaactgtttccttcaggttgctctccccaaagcgcctgggattgcagcagcagaggtgcttgatggactgtgcctgtctctacctgccttcctc

SEQ ID NO: 2478 - DNA, 122 bp, Homo sapiens
  misc_feature (61)..(62): /note="This region represents a CpG dinucleotide"
  misc_feature (61)..(61): /note="Nucleotide may be methylated to form 5-methylcytosine"
gtttcaggtggtgggaacagatgtgtctctccaccagtcagttcacttctattttcagtccgtaagttatttggctcaggttacaaattccagagaagggggtgtacctcacaagcttagtt

SEQ ID NO: 2479 - DNA, 122 bp, Homo sapiens
  misc_feature (61)..(62): /note="This region represents a CpG dinucleotide"
  misc_feature (61)..(61): /note="Nucleotide may be methylated to form 5-methylcytosine"
cttcactcccgagccagcgagaccacgaacccaccagaaggaagaaactccgaacacatccgaacatcagaaggaacagactctggacgcgcggccgttaagaactgtaacactcaccggac

SEQ ID NO: 2480 - DNA, 122 bp, Homo sapiens
  misc_feature (61)..(62): /note="This region represents a CpG dinucleotide"
  misc_feature (61)..(61): /note="Nucleotide may be methylated to form 5-methylcytosine"
tgactacaaaataacatctacctcctgatagcaaaagaactgaggaagctctttccactacggctgtattgcactggtgagtccgggcccatggatgagaaattgatgcgaggatcaataca

SEQ ID NO: 2481 - DNA, 122 bp, Homo sapiens
  misc_feature (61)..(62): /note="This region represents a CpG dinucleotide"
  misc_feature (61)..(61): /note="Nucleotide may be methylated to form 5-methylcytosine"
aacaaatttcctgaaccccatcaggtccgctgcctgcatgtagaaagaggagagtaaaaccgatgcacactggactcacccaaaggcggaaaaggacaaggaacccaaaaaggaagatccag

SEQ ID NO: 2482 - DNA, 122 bp, Homo sapiens
  misc_feature (61)..(62): /note="This region represents a CpG dinucleotide"
  misc_feature (61)..(61): /note="Nucleotide may be methylated to form 5-methylcytosine"
acacagcatccctttaaatgaccctggagaccgtgatttgccattgccagacaggatggacgggaacagataggcaactgtgtgcgatcacaggacataatggaatgaaatgtcagatcagg

SEQ ID NO: 2483 - DNA, 122 bp, Homo sapiens
  misc_feature (61)..(62): /note="This region represents a CpG dinucleotide"
  misc_feature (61)..(61): /note="Nucleotide may be methylated to form 5-methylcytosine"
cgagaagggcggactgagggcagaccaggcaggagaccaggagcatggacattcctggcacggagaacataaagtgatgagagctacagaggagtcagaagtgatacccaatgagagagaaa

SEQ ID NO: 2484 - DNA, 122 bp, Homo sapiens
  misc_feature (61)..(62): /note="This region represents a CpG dinucleotide"
  misc_feature (61)..(61): /note="Nucleotide may be methylated to form 5-methylcytosine"
tcccttcccaaactgtgtggctgctctaaatgtagcagccaccaaggataggtggagctacgtctggattacaaagaatggcttagacaagtcacgacccacataaaaaatgttaggagcag

SEQ ID NO: 2485 - DNA, 122 bp, Homo sapiens
  misc_feature (61)..(62): /note="This region represents a CpG dinucleotide"
  misc_feature (61)..(61): /note="Nucleotide may be methylated to form 5-methylcytosine"
taaacacaatgcctgggatatcttagctcaacaaaggtgaattccttgccactcctgcctcgtacatttttgttcctttaatttcagagttggaagaaatgaattatcctttcaacacctct

SEQ ID NO: 2486 - DNA, 122 bp, Homo sapiens
  misc_feature (61)..(62): /note="This region represents a CpG dinucleotide"
  misc_feature (61)..(61): /note="Nucleotide may be methylated to form 5-methylcytosine"
ccaccactcaagtctttccacccaacaagactccggtgactgacccaggaagtgcaggcgcgttcatgtcactcccagccccgcccaggctgtacctcattctgcaggttccagaccccgtc

SEQ ID NO: 2487 - DNA, 122 bp, Homo sapiens
  misc_feature (61)..(62): /note="This region represents a CpG dinucleotide"
  misc_feature (61)..(61): /note="Nucleotide may be methylated to form 5-methylcytosine"
gaattttagatttcaccctgtatgtgtccctagcgtgttttaataaaataaattgcttcacgttatattggtatgtggatttccagatacacttctcaccatttaattcaaatgctccccac

SEQ ID NO: 2488 - DNA, 122 bp, Homo sapiens
  misc_feature (61)..(62): /note="This region represents a CpG dinucleotide"
  misc_feature (61)..(61): /note="Nucleotide may be methylated to form 5-methylcytosine"
cagagccagtcattaaatggcagcgtttacaccaggggagtgggcagacactacacatcacgtctgtttccccccagagccagtcattaaatattttccagtgtatccatgagtcacagggc

SEQ ID NO: 2489 - DNA, 122 bp, Homo sapiens
  misc_feature (61)..(62): /note="This region represents a CpG dinucleotide"
  misc_feature (61)..(61): /note="Nucleotide may be methylated to form 5-methylcytosine"
tggcagtggtgggcacctatgctgctggcgccacagctttttatatcttggtgaaaacaacgccttgcgttttcacttgtagattctccggctacattccacaagaacaaattctggtcaca

SEQ ID NO: 2490 - DNA, 122 bp, Homo sapiens
  misc_feature (61)..(62): /note="This region represents a CpG dinucleotide"
  misc_feature (61)..(61): /note="Nucleotide may be methylated to form 5-methylcytosine"
aggctgccgcacatgtggttttgaaaccaacctttccccttggccccagcagtgcgttggcgtgtccctggggctggtcccagtgcccgcctggaaatgcccttggtttgggcccctgcctg

SEQ ID NO: 2491 - DNA, 122 bp, Homo sapiens
  misc_feature (61)..(62): /note="This region represents a CpG dinucleotide"
  misc_feature (61)..(61): /note="Nucleotide may be methylated to form 5-methylcytosine"
acacactggcccagaattgccagaagctgatggcagtgatgcaacaagagctgaaggagccgcagacctggctactgctccaaaccaacaatatgacacagcagcttagcaatcatgtgtgg

SEQ ID NO: 2492 - DNA, 122 bp, Homo sapiens
  misc_feature (61)..(62): /note="This region represents a CpG dinucleotide"
  misc_feature (61)..(61): /note="Nucleotide may be methylated to form 5-methylcytosine"
agccggggacactgagacacagccagagagactggtcactttgaacccgctggcaccacacgcaagacttttagaggcttttgtatcccctgaaagctctcttcccgtgagtgttgcatggt

SEQ ID NO: 2493 - DNA, 122 bp, Homo sapiens
  misc_feature (61)..(62): /note="This region represents a CpG dinucleotide"
  misc_feature (61)..(61): /note="Nucleotide may be methylated to form 5-methylcytosine"
caaatacatatccccataaagaatatgacagaaacaaatccactgagaaggaagtgcttacgcaataaataagtttgcaactctacatctgctcaaatgagggccctagttagaaagaggaa

SEQ ID NO: 2494 - DNA, 122 bp, Homo sapiens
  misc_feature (61)..(62): /note="This region represents a CpG dinucleotide"
  misc_feature (61)..(61): /note="Nucleotide may be methylated to form 5-methylcytosine"
tacccttcttccttgtgatgcctataaactgaggcatgtctagagtggggtatattagaacgcatcaaagaggtcctggaattgccaacagcttgtgcagaggtcatcagaatgaaattttt

SEQ ID NO: 2495 - DNA, 122 bp, Homo sapiens
  misc_feature (61)..(62): /note="This region represents a CpG dinucleotide"
  misc_feature (61)..(61): /note="Nucleotide may be methylated to form 5-methylcytosine"
ggaccaggtccaagctgcccggcagctggggcaggcaggcctgacttgcaggggtctggacggctcagagggaagctggtaaaagcagggtaagcccaggtcccacctctgccccttcagag

SEQ ID NO: 2496 - DNA, 122 bp, Homo sapiens
  misc_feature (61)..(62): /note="This region represents a CpG dinucleotide"
  misc_feature (61)..(61): /note="Nucleotide may be methylated to form 5-methylcytosine"
cactgcggtgggcatttgccccgcacgtggtgggtgaccattgggcgggtgggcaccccccgaggcctcagagcagcagacgcccctccctgagcctggttgggcctgcaccacaagcagca

SEQ ID NO: 2497 - DNA, 122 bp, Homo sapiens
  misc_feature (61)..(62): /note="This region represents a CpG dinucleotide"
  misc_feature (61)..(61): /note="Nucleotide may be methylated to form 5-methylcytosine"
cttcaacaggctctgcatcacagaatggatgaaggccacatggaagcctccctgtccagtcgggggctgggtggtaaggaggagcaggattaggtttagaagaatgggatgaggccaacagc

SEQ ID NO: 2498 - DNA, 122 bp, Homo sapiens
  misc_feature (61)..(62): /note="This region represents a CpG dinucleotide"
  misc_feature (61)..(61): /note="Nucleotide may be methylated to form 5-methylcytosine"
tctattcggcttgccccagcgcgctgccccacgtccccgaggccccggcccaggcccagccggcgagtcccggcctgctccactctgcacaaaacgaaacccaaatgcccaaaaagctcagg

SEQ ID NO: 2499 - DNA, 122 bp, Homo sapiens
  misc_feature (61)..(62): /note="This region represents a CpG dinucleotide"
  misc_feature (61)..(61): /note="Nucleotide may be methylated to form 5-methylcytosine"
acacagggtccccagcctgatgtgtgtgcctgcattcatgcctgtcactctgctcagctgcgtgcagacagcttatatgaaggaggactgtgtacatgtggtcagagaagaaaaaaatgctt

SEQ ID NO: 2500 - DNA, 122 bp, Homo sapiens
  misc_feature (61)..(62): /note="This region represents a CpG dinucleotide"
  misc_feature (61)..(61): /note="Nucleotide may be methylated to form 5-methylcytosine"
tgctgtgctggctgggggagcggggcttcctgccctgaccagcttccagcctgccatgcacgcagggtcggcgaaggcccaagagggctgcatgggcaggaaaaggatcctcttctcatagt

SEQ ID NO: 2501 - DNA, 122 bp, Homo sapiens
  misc_feature (61)..(62): /note="This region represents a CpG dinucleotide"
  misc_feature (61)..(61): /note="Nucleotide may be methylated to form 5-methylcytosine"
tcccatccctccctgctttaaaatttcggaagagattgggattcaagtcacaggatgggacgtagggtgcgtatgcacctcgattatctgaattccattaagctctggaggcttcctggttc

SEQ ID NO: 2502 - DNA, 122 bp, Homo sapiens
  misc_feature (61)..(62): /note="This region represents a CpG dinucleotide"
  misc_feature (61)..(61): /note="Nucleotide may be methylated to form 5-methylcytosine"
gttgcaacttctgtcactcaaggcctgaggcgggagacttacagctctatccaattagagcgctggattgacaactgccgaatgaggcgcgcagcagagaggagggtgcggcatccgggatc

SEQ ID NO: 2503 - DNA, 122 bp, Homo sapiens
  misc_feature (61)..(62): /note="This region represents a CpG dinucleotide"
  misc_feature (61)..(61): /note="Nucleotide may be methylated to form 5-methylcytosine"
ctttattattctacaagcaacaatatgctcaaagcttcatattctcaaagcttccaaacacgagtaaaatggctagaacatgactttttaggtcctgcaggaactgttcagatagaggagag

SEQ ID NO: 2504 - DNA, 122 bp, Homo sapiens
  misc_feature (61)..(62): /note="This region represents a CpG dinucleotide"
  misc_feature (61)..(61): /note="Nucleotide may be methylated to form 5-methylcytosine"
aggtggaatgaaccacccaggtcaagaaacagaacaaagccaagccccagaggcagactgcgatgactccctaagcggataaaacacaagggagggtgagggaattggagatctgccacgct

SEQ ID NO: 2505 - DNA, 122 bp, Homo sapiens
  misc_feature (61)..(62): /note="This region represents a CpG dinucleotide"
  misc_feature (61)..(61): /note="Nucleotide may be methylated to form 5-methylcytosine"
tcagcgcattcaatgcaacgtcaggtaaataccatttaccacaaaagaactttgctcctacgagccatacttttggattagaataatctgttgggtaggggaccttttgactctcacgtggt

SEQ ID NO: 2506 - DNA, 122 bp, Homo sapiens
  misc_feature (61)..(62): /note="This region represents a CpG dinucleotide"
  misc_feature (61)..(61): /note="Nucleotide may be methylated to form 5-methylcytosine"
gaacccaactcttggcttctctgctgcgcggggcaggcaccgggctctcctaggtgtgcgcgcgtgtgtgcattttatccgcccccccttatctcgctcccctccccccacacccccgcccc

SEQ ID NO: 2507 - DNA, 122 bp, Homo sapiens
  misc_feature (61)..(62): /note="This region represents a CpG dinucleotide"
  misc_feature (61)..(61): /note="Nucleotide may be methylated to form 5-methylcytosine"
tctaatcaagtctttagacctaactttacatttataggaaatgtaaataacaagtaacaccgtgagtaaataatcaggtgaacccagaatgtcagacattcaacaaaggcctgggctcttca

SEQ ID NO: 2508 - DNA, 122 bp, Homo sapiens
  misc_feature (61)..(62): /note="This region represents a CpG dinucleotide"
  misc_feature (61)..(61): /note="Nucleotide may be methylated to form 5-methylcytosine"
tcctgcagggccggcagcgcagctgtgctgcttccagccttgtttgttttaagctcttggcgcccctggaggggtccgtgccagtcggccctggtcctgactctacctagcaggggacttct

SEQ ID NO: 2509 - DNA, 122 bp, Homo sapiens
  misc_feature (61)..(62): /note="This region represents a CpG dinucleotide"
  misc_feature (61)..(61): /note="Nucleotide may be methylated to form 5-methylcytosine"
cagtaagaggccgggcacggtgactcacacctgtaatcctagcactttgggaggctgaggcgggtggatcaggcagtcaggagttcaacaccagcctggccaagatgatgaaaccccatttc

SEQ ID NO: 2510 - DNA, 122 bp, Homo sapiens
  misc_feature (61)..(62): /note="This region represents a CpG dinucleotide"
  misc_feature (61)..(61): /note="Nucleotide may be methylated to form 5-methylcytosine"
gtggatacaggaagtgctcagcaacgattacgccccgagggccaatcacagggctgcggccgagagagaagccttattagagctttctcaacctgcagccctcatctccgccggcgagtagg

SEQ ID NO: 2511 - DNA, 122 bp, Homo sapiens
  misc_feature (61)..(62): /note="This region represents a CpG dinucleotide"
  misc_feature (61)..(61): /note="Nucleotide may be methylated to form 5-methylcytosine"
gctgcagagaggaaggagatcctgactggcaccaagtgcatctgggtgaaggccgcccggcggcgctcgcgggccctgggaaccgaggggcgacacctgctggcacccgcgacagagcgcag

SEQ ID NO: 2512 - DNA, 122 bp, Homo sapiens
  misc_feature (61)..(62): /note="This region represents a CpG dinucleotide"
  misc_feature (61)..(61): /note="Nucleotide may be methylated to form 5-methylcytosine"
caaggcccagggcttcctacagtcctcttatcttgagacatgctggagccaagggactgacgtcagatggtcccagtggtgaagagagttgtgtttacattctcacttgctggtatcaatcg

SEQ ID NO: 2513 - DNA, 122 bp, Homo sapiens
  misc_feature (61)..(62): /note="This region represents a CpG dinucleotide"
  misc_feature (61)..(61): /note="Nucleotide may be methylated to form 5-methylcytosine"
ttcaagtgttttcttcctggtaaacaaagttctgtggctggctttggagattttaggacgcggttgcttagtaatattggggaaaacacgaagtccccacctcagccccattttgtgcctcc

SEQ ID NO: 2514 - DNA, 122 bp, Homo sapiens
  misc_feature (61)..(62): /note="This region represents a CpG dinucleotide"
  misc_feature (61)..(61): /note="Nucleotide may be methylated to form 5-methylcytosine"
cattcattgttgtgcaaccaacaccactatccatcctagattcatttttaaaacaagagtcgcagctgaaattttcctttcattaactcagctttagcaacatactgaactttatgcaccac

SEQ ID NO: 2515 - DNA, 122 bp, Homo sapiens
  misc_feature (61)..(62): /note="This region represents a CpG dinucleotide"
  misc_feature (61)..(61): /note="Nucleotide may be methylated to form 5-methylcytosine"
ctggtagttttcagacctccctatgattgcttgcactttctttctacgtttgtgttgagccgtattttttacctttaccatctgtttgttgttgctatatagaaatgcaattgcttttggta

SEQ ID NO: 2516 - DNA, 122 bp, Homo sapiens
  misc_feature (61)..(62): /note="This region represents a CpG dinucleotide"
  misc_feature (61)..(61): /note="Nucleotide may be methylated to form 5-methylcytosine"
gggtggtgggaggatgggggttctgtgttcaaaagcactagagttagaaaagaatgaaaacgaaaggagcttgggcttcccatgggtttggacaagagacaaaccacaaagaaaacagcttc

SEQ ID NO: 2517 - DNA, 122 bp, Homo sapiens
  misc_feature (61)..(62): /note="This region represents a CpG dinucleotide"
  misc_feature (61)..(61): /note="Nucleotide may be methylated to form 5-methylcytosine"
tgagccatgttgactgaagacagataacctggcagatgtgttgactccaacaaaacaaggcgaatgttctcaggttttgggtattgtgtctctctgaggtgataaccacagagcgagtttct

SEQ ID NO: 2518 - DNA, 122 bp, Homo sapiens
  misc_feature (61)..(62): /note="This region represents a CpG dinucleotide"
  misc_feature (61)..(61): /note="Nucleotide may be methylated to form 5-methylcytosine"
tctgaggttcctcatttccggttgaagaaagtacagaatataaaaatgtggctatctctccgttcctatcttaaggtagaatgggagtgataaaagtagctttaacatgctggccctttctg

SEQ ID NO: 2519 - DNA, 122 bp, Homo sapiens
  misc_feature (61)..(62): /note="This region represents a CpG dinucleotide"
  misc_feature (61)..(61): /note="Nucleotide may be methylated to form 5-methylcytosine"
tggatgtgtaaagaatgatatatatattaaataggtcaatcagactatgacagctatgtacgaccatttgtatgtgtatctatgtcagaaagaatctttattaaaatattttgatcaaacat

SEQ ID NO: 2520 - DNA, 122 bp, Homo sapiens
  misc_feature (61)..(62): /note="This region represents a CpG dinucleotide"
  misc_feature (61)..(61): /note="Nucleotide may be methylated to form 5-methylcytosine"
aaggcaggagactgtctctccctttctctttcagaatagccctgaaaatcagtgcaacctcggacatccatggttaaaagtcagaccctgttttggaaatggctgggaagggcggctttctg

SEQ ID NO: 2521 - DNA, 122 bp, Homo sapiens
  misc_feature (61)..(62): /note="This region represents a CpG dinucleotide"
  misc_feature (61)..(61): /note="Nucleotide may be methylated to form 5-methylcytosine"
agcgacagtgagactctgtatcaaaaaaaaaaaaagattaacaactaatttttctcactacgagtcacctggaacacaggaccaagggactgaagaagtcataaaatgccagaaaaagaagt

SEQ ID NO: 2522 - DNA, 122 bp, Homo sapiens
  misc_feature (61)..(62): /note="This region represents a CpG dinucleotide"
  misc_feature (61)..(61): /note="Nucleotide may be methylated to form 5-methylcytosine"
gtgaacacaaggctggactgctcgccctgcagggctggctgagctctcccccactgctcacgtcactagactccgcctcccggattttataacaactgacacattgtagcctacaggagagc

SEQ ID NO: 2523 - DNA, 122 bp, Homo sapiens
  misc_feature (61)..(62): /note="This region represents a CpG dinucleotide"
  misc_feature (61)..(61): /note="Nucleotide may be methylated to form 5-methylcytosine"
ccccatccccacctctccgggtcccgccccctgggcgactgttggggtagtgagtgacagcggaggacggggggaggcagggacccagccctcacgtgcccctccttcccttgtctgcagcc

SEQ ID NO: 2524 - DNA, 122 bp, Homo sapiens
  misc_feature (61)..(62): /note="This region represents a CpG dinucleotide"
  misc_feature (61)..(61): /note="Nucleotide may be methylated to form 5-methylcytosine"
cccatcagcccctgcactgggcctcatggaccctggccaccctggttcgagccgcaggtgcgcctcgggcccgctaggggtaccccaaggcagacagaaggcccatgagggaaaggtgagac

SEQ ID NO: 2525 - DNA, 122 bp, Homo sapiens
  misc_feature (61)..(62): /note="This region represents a CpG dinucleotide"
  misc_feature (61)..(61): /note="Nucleotide may be methylated to form 5-methylcytosine"
cccggggctggcttcatgacttgtcctcctgctcccagcccagtgcccctgcactctgcccggcagcccacagggaccagagaagcaatggcagagccagtgggcagaaggagcagacagaa

SEQ ID NO: 2526 - DNA, 122 bp, Homo sapiens
  misc_feature (61)..(62): /note="This region represents a CpG dinucleotide"
  misc_feature (61)..(61): /note="Nucleotide may be methylated to form 5-methylcytosine"
ccacttttaattatatgctaattaagaggtggattattcagaacattctggaaaaggggccgagagcgtccagaaccatatatggtaacttccaggccattgctatggcccattgccatggc

SEQ ID NO: 2527 - DNA, 122 bp, Homo sapiens
  misc_feature (61)..(62): /note="This region represents a CpG dinucleotide"
  misc_feature (61)..(61): /note="Nucleotide may be methylated to form 5-methylcytosine"
gggttgtttgcactgtgtccctcttgtaaacaatgtcgggatggacaagtttgtgctgggcgtttccttgtccctttggctggttacctcaggcagactggcccataccagcccttccccgc

SEQ ID NO: 2528 - DNA, 122 bp, Homo sapiens
  misc_feature (61)..(62): /note="This region represents a CpG dinucleotide"
  misc_feature (61)..(61): /note="Nucleotide may be methylated to form 5-methylcytosine"
ttacttaaagaaagagtcttgcagcataggctgtgagcccaaactatgagctattcaaagcgcagactgtgagctacatattcaaacatgacagagttacgttttaaaaaaacaaaggcaga

SEQ ID NO: 2529 - DNA, 122 bp, Homo sapiens
  misc_feature (61)..(62): /note="This region represents a CpG dinucleotide"
  misc_feature (61)..(61): /note="Nucleotide may be methylated to form 5-methylcytosine"
agaaacagttttcagataaagaatttgctcaggggaacataggtggcgggagaaaaaaaacgagggtttacaatttcggagctgtcacacttaataaccttgctgaagtattgatagaggaa

SEQ ID NO: 2530 - DNA, 122 bp, Homo sapiens
  misc_feature (61)..(62): /note="This region represents a CpG dinucleotide"
  misc_feature (61)..(61): /note="Nucleotide may be methylated to form 5-methylcytosine"
ctcctagtgagcccctccattattacaactctagtagttttacgcagagaaaagtacgatcgtatataatttaggatggttagacttttttttttaactttatgatgggtttacaggggtag

SEQ ID NO: 2531 - DNA, 122 bp, Homo sapiens
  misc_feature (61)..(62): /note="This region represents a CpG dinucleotide"
  misc_feature (61)..(61): /note="Nucleotide may be methylated to form 5-methylcytosine"
tgaaaccttccaacaataataaagaaacttcaaaatacctctgtctacactgtggagtgacgtgaggataggtgggagagaaacaggactgaaaaggggaaggatcaaggacttctctgtgt

SEQ ID NO: 2532 - DNA, 122 bp, Homo sapiens
  misc_feature (61)..(62): /note="This region represents a CpG dinucleotide"
  misc_feature (61)..(61): /note="Nucleotide may be methylated to form 5-methylcytosine"
tgtctgtggcttccctctacaatagcagcgttggatagttgctacagagacctcatcccccgctctccactgcaagcctaacatttttattatctagccctttaaggaagaatttgtggact

SEQ ID NO: 2533 - DNA, 122 bp, Homo sapiens
  misc_feature (61)..(62): /note="This region represents a CpG dinucleotide"
  misc_feature (61)..(61): /note="Nucleotide may be methylated to form 5-methylcytosine"
ctggcacaggtaagcagcagagtgtttttttttgtttttttgttttttttttccagacagcgtctcattctgtcatgtagctggagtgaaatggcatgatcaaggctcactgcagccttgac

SEQ ID NO: 2534 - DNA, 122 bp, Homo sapiens
  misc_feature (61)..(62): /note="This region represents a CpG dinucleotide"
  misc_feature (61)..(61): /note="Nucleotide may be methylated to form 5-methylcytosine"
gccctaaggtctgaagttccagccttcaaacaggatgtgggcagaggcctccccttgcttcggtaataaagtagatggatggctgatagggagggcccagcagtccctgacggggaaatagt

SEQ ID NO: 2535 - DNA, 122 bp, Homo sapiens
  misc_feature (61)..(62): /note="This region represents a CpG dinucleotide"
  misc_feature (61)..(61): /note="Nucleotide may be methylated to form 5-methylcytosine"
caatgctaattggttacacactgaaagattcaaatcattattataatccataaacaataacggaatactgtgaacaaagaacaattggagaaaaagaaagagagctttcagacctgaaaaag

SEQ ID NO: 2536 - DNA, 122 bp, Homo sapiens
  misc_feature (61)..(62): /note="This region represents a CpG dinucleotide"
  misc_feature (61)..(61): /note="Nucleotide may be methylated to form 5-methylcytosine"
aaagacctgtgctccctctgctggctctctatagcaatattgaagcagaaaggaaccatacgtagtattggcatcttcagcaaacacaagtcagtttgggtattccgagaagaaccactcat

SEQ ID NO: 2537 - DNA, 122 bp, Homo sapiens
  misc_feature (61)..(62): /note="This region represents a CpG dinucleotide"
  misc_feature (61)..(61): /note="Nucleotide may be methylated to form 5-methylcytosine"
gaagccgaccaccaacccgtaattccccccttcattccagagtgggaaagcccagattcccgtcggttctttatgctgcagcagtggcttctcacccagtcagatacgttgcaaaaaaactg

SEQ ID NO: 2538 - DNA, 122 bp, Homo sapiens
  misc_feature (61)..(62): /note="This region represents a CpG dinucleotide"
  misc_feature (61)..(61): /note="Nucleotide may be methylated to form 5-methylcytosine"
ttgcagaagtctcactcaaaagagttcaaaatgagagttccaaacctaataaagataacacgtttgccctctggtggacattcattttgagttagaattttctctgctaagactagagattt

SEQ ID NO: 2539 - DNA, 122 bp, Homo sapiens
  misc_feature (61)..(62): /note="This region represents a CpG dinucleotide"
  misc_feature (61)..(61): /note="Nucleotide may be methylated to form 5-methylcytosine"
gcatataatcaagaaataactataagtgtaatcagtgggcagccaagccgctgccctgtccgtggagtagccattcttattcctttactttcttaataaacttgctttcactttactctgtg

SEQ ID NO: 2540 - DNA, 122 bp, Homo sapiens
  misc_feature (61)..(62): /note="This region represents a CpG dinucleotide"
  misc_feature (61)..(61): /note="Nucleotide may be methylated to form 5-methylcytosine"
acatggccatagaggacaatgaataagaaatagatccccaaattaaggggccagttgccacggagaacaacaaacaagaggattcttcccagacagaaaagttctaatcaaacaattttcct

SEQ ID NO: 2541 - DNA, 122 bp, Homo sapiens
  misc_feature (61)..(62): /note="This region represents a CpG dinucleotide"
  misc_feature (61)..(61): /note="Nucleotide may be methylated to form 5-methylcytosine"
atgtgatttaaaatcttttcctctgagctttccagtgactgctactcacagcaatttggccgcacataactgcatgaaaggctgggaagtgcagtcttttagctgagttcatgaccacacaa

SEQ ID NO: 2542 - DNA, 122 bp, Homo sapiens
  misc_feature (61)..(62): /note="This region represents a CpG dinucleotide"
  misc_feature (61)..(61): /note="Nucleotide may be methylated to form 5-methylcytosine"
cctgggaagctccaacagcagtggcttgggcaagtcctcagagcttagctcaggctccctcgttcctcttgtttgcttggagacaggctgtcaagtgtaatttcattcaaattactcttccg

SEQ ID NO: 2543 - DNA, 122 bp, Homo sapiens
  misc_feature (61)..(62): /note="This region represents a CpG dinucleotide"
  misc_feature (61)..(61): /note="Nucleotide may be methylated to form 5-methylcytosine"
acagcgaagcagaggcagaaggcagacaaaaggggctgggttggtccccgcctgtgtgaacgaaaaaatatgtcagattggaaaattgcggtaaaaaccaggcagagcacgtacgttgcccc

SEQ ID NO: 2544 - DNA, 122 bp, Homo sapiens
  misc_feature (61)..(62): /note="This region represents a CpG dinucleotide"
  misc_feature (61)..(61): /note="Nucleotide may be methylated to form 5-methylcytosine"
attttgtaaacagttacctgcacaaggatctgataagtcaaatgtccttcctctatcttacggtgaagggcacaagcttcaggacatggtccctttttgtgtcacatgcctgaatttgaaca

SEQ ID NO: 2545 - DNA, 122 bp, Homo sapiens
  misc_feature (61)..(62): /note="This region represents a CpG dinucleotide"
  misc_feature (61)..(61): /note="Nucleotide may be methylated to form 5-methylcytosine"
aaaaatgcgctgaagctgtggctgatggaaaggtccaacgactacttcgtgctgcagcggcgtcggggctacggggaggaaggcggaggggggctcacaggtaagctgtggccaccctacct

SEQ ID NO: 2546 - DNA, 122 bp, Homo sapiens
  misc_feature (61)..(62): /note="This region represents a CpG dinucleotide"
  misc_feature (61)..(61): /note="Nucleotide may be methylated to form 5-methylcytosine"
cctcagggagaaacacaagggtatttctgtctggggcggcaggacctcatgtggtctccacgtggcaggatcctagaatcacggggtggcagtacatattttcccctatggctttaagaaaa

SEQ ID NO: 2547 - DNA, 122 bp, Homo sapiens
  misc_feature (61)..(62): /note="This region represents a CpG dinucleotide"
  misc_feature (61)..(61): /note="Nucleotide may be methylated to form 5-methylcytosine"
ctggaaggggcggcaagagtcagagacagacagtcaagcatcttggctctgctaccacttcgtgatggggaggccaagttatgcgatgcattccagctcaatcaatttctggagatgggccc

SEQ ID NO: 2548 - DNA, 122 bp, Homo sapiens
  misc_feature (61)..(62): /note="This region represents a CpG dinucleotide"
  misc_feature (61)..(61): /note="Nucleotide may be methylated to form 5-methylcytosine"
aggatgacttcctctctacatttaattatgtgactcacttccagtctcagaagcctaatccgttccagggagagcttgacgagaataaagcagtcatcaggaagaaacacttcttcaatata

SEQ ID NO: 2549 - DNA, 122 bp, Homo sapiens
  misc_feature (61)..(62): /note="This region represents a CpG dinucleotide"
  misc_feature (61)..(61): /note="Nucleotide may be methylated to form 5-methylcytosine"
agcccagcttgcagccaagagcggcccagcggcgccaccggacttgagaaagtttgtgcgcgcccctccgcgccacggccacgcgcagaagagactcggagccggccccaggtctggcccgg

SEQ ID NO: 2550 - DNA, 122 bp, Homo sapiens
  misc_feature (61)..(62): /note="This region represents a CpG dinucleotide"
  misc_feature (61)..(61): /note="Nucleotide may be methylated to form 5-methylcytosine"
cacatattttacaaagtctttcggtaatacagacagagccaaagcagggctcagcacacacgtgaaattgttagtcatgtatccagacccagctgacagtaaggattgtcatcatttcacat

SEQ ID NO: 2551 - DNA, 122 bp, Homo sapiens
  misc_feature (61)..(62): /note="This region represents a CpG dinucleotide"
  misc_feature (61)..(61): /note="Nucleotide may be methylated to form 5-methylcytosine"
aaacaaacacagtaagtcacattgttggtgcggtccttccagacccaccgcagtgtcttgcgtcgtggggtcgtgagtctctgaacctggttcttctcagagttgacattttggacgtgggg

SEQ ID NO: 2552 - DNA, 122 bp, Homo sapiens
  misc_feature (61)..(62): /note="This region represents a CpG dinucleotide"
  misc_feature (61)..(61): /note="Nucleotide may be methylated to form 5-methylcytosine"
tgcctaacaaatctttaaagcaagactttaaagaatggaaagaatgaatgaagcaaggtacgcagctgagcaggcttaggggatttgaataatctctgcaagctctggcctatctgagtggc

SEQ ID NO: 2553 - DNA, 122 bp, Homo sapiens
  misc_feature (61)..(62): /note="This region represents a CpG dinucleotide"
  misc_feature (61)..(61): /note="Nucleotide may be methylated to form 5-methylcytosine"
atgagtcagtgaacaggattcattagttgcctttccatagccttccctgactaatctaaccgcatactaatcattgcttcttgtttctctgaccctaccaactcaactctaagttccttgag

SEQ ID NO: 2554 - DNA, 122 bp, Homo sapiens
  misc_feature (61)..(62): /note="This region represents a CpG dinucleotide"
  misc_feature (61)..(61): /note="Nucleotide may be methylated to form 5-methylcytosine"
gaaacaggaactgctttgtgcattaaaacagactcataggctcttagcagctgcatcagtcgtttctaggactcctcatgagagggctctttgagcccagtggctgattatggtcccaacag

SEQ ID NO: 2555 - DNA, 122 bp, Homo sapiens
  misc_feature (61)..(62): /note="This region represents a CpG dinucleotide"
  misc_feature (61)..(61): /note="Nucleotide may be methylated to form 5-methylcytosine"
tttggtttttatttttttgctgtcccttgcggagcagggctaccccatacgcggtgtgcgcggagtagcctatgttgctgtttggtagcttagtagatcttactacactgaaccacttgggt

SEQ ID NO: 2556 - DNA, 122 bp, Homo sapiens
  misc_feature (61)..(62): /note="This region represents a CpG dinucleotide"
  misc_feature (61)..(61): /note="Nucleotide may be methylated to form 5-methylcytosine"
cgtcagggctgcctttgctgacgctgatgaccgacgggctgccgtactcgctgccaggggcgctcagcgacgccttcagcacgaacttgcccatcagcccgccacctggcggctgcggctgc

SEQ ID NO: 2557 - DNA, 122 bp, Homo sapiens
  misc_feature (61)..(62): /note="This region represents a CpG dinucleotide"
  misc_feature (61)..(61): /note="Nucleotide may be methylated to form 5-methylcytosine"
aaaagctagagagatgctggaatgtaggcaaagcaagcatgaataaacattgaaaacactcgtttagcagaaacaagaaagtccatgctgtaagagtaagaaccatactctaggagtaaaga

SEQ ID NO: 2558 - DNA, 122 bp, Homo sapiens
  misc_feature (61)..(62): /note="This region represents a CpG dinucleotide"
  misc_feature (61)..(61): /note="Nucleotide may be methylated to form 5-methylcytosine"
actactcgggagcagagggggcgtggctagaccttagggggcgtggtttaacgccgggagcgaaggagacagaattctttggcaggggcgaccttagaatcctggggaggagcgagaatgga

SEQ ID NO: 2559 - DNA, 122 bp, Homo sapiens
  misc_feature (61)..(62): /note="This region represents a CpG dinucleotide"
  misc_feature (61)..(61): /note="Nucleotide may be methylated to form 5-methylcytosine"
aatacttagctcagagactgatctggatgaggctggggaaggagaccaccagagcttaaacgaagccactaaaagcagtaagagaaacaactgtgaagcctgtgagaaaagcagggtgtgtt

SEQ ID NO: 2560 - DNA, 122 bp, Homo sapiens
  misc_feature (61)..(62): /note="This region represents a CpG dinucleotide"
  misc_feature (61)..(61): /note="Nucleotide may be methylated to form 5-methylcytosine"
aaatttctagtatctgttgaaaattactcacacattcctttccctgtagaaaaaaactaccgctagaattttgtctttcctatttttgttctttcattacattatcttgacgttatagattt

SEQ ID NO: 2561 - DNA, 122 bp, Homo sapiens
  misc_feature (61)..(62): /note="This region represents a CpG dinucleotide"
  misc_feature (61)..(61): /note="Nucleotide may be methylated to form 5-methylcytosine"
tgcaatgtcctgttattgttttaatctgcatttctctggttatcaaccatttgcatctcccgttgtttgttagtttggggttttctgttgtatttttttcagctttctgttgggttttgttc

SEQ ID NO: 2562 - DNA, 122 bp, Homo sapiens
  misc_feature (61)..(62): /note="This region represents a CpG dinucleotide"
  misc_feature (61)..(61): /note="Nucleotide may be methylated to form 5-methylcytosine"
tttcacattagtcttcaggacttgagaattaagtcagtcctgaaggcagccacatgcttccgtacagattttccagtcagtataagttgatgactaatatctaggcagttttgtcacactga

SEQ ID NO: 2563 - DNA, 122 bp, Homo sapiens
  misc_feature (61)..(62): /note="This region represents a CpG dinucleotide"
  misc_feature (61)..(61): /note="Nucleotide may be methylated to form 5-methylcytosine"
gagtgcttctctccatccttgcactaactttcctaatctttaattgtgccaattcaacttcgttgtgttattcttggcttctcgcctcatgagggaccagaagtttgtaagcacatagagga

SEQ ID NO: 2564 - DNA, 122 bp, Homo sapiens
  misc_feature (61)..(62): /note="This region represents a CpG dinucleotide"
  misc_feature (61)..(61): /note="Nucleotide may be methylated to form 5-methylcytosine"
agcatcttctgtgtgtcgggcactggctggaggctgctgctggtggcttctgctgtcacacggcactcagagtctgagagagagacagatatacaacagaaacagatgccaagtaggaatgg

SEQ ID NO: 2565 - DNA, 122 bp, Homo sapiens
  misc_feature (61)..(62): /note="This region represents a CpG dinucleotide"
  misc_feature (61)..(61): /note="Nucleotide may be methylated to form 5-methylcytosine"
gccaggggctccccagcctgtgtagattctgctgtaagtgactcttctctgaaagactggcgcgaggcggctgcttctgactcctgtttcagtttaccctctgtgtgaaatctgtaactatc

SEQ ID NO: 2566 - DNA, 122 bp, Homo sapiens
  misc_feature (61)..(62): /note="This region represents a CpG dinucleotide"
  misc_feature (61)..(61): /note="Nucleotide may be methylated to form 5-methylcytosine"
ccccttttctctttgtgacaccttcccagacacccttaaaaaactgcactcccttttctacgccctgtgaaacaaccactgctaatcgttaataaggaccaggtccgtgaccaaggccctgc

SEQ ID NO: 2567 - DNA, 122 bp, Homo sapiens
  misc_feature (61)..(62): /note="This region represents a CpG dinucleotide"
  misc_feature (61)..(61): /note="Nucleotide may be methylated to form 5-methylcytosine"
aatttattgagttttgattatagaataaataggagaacatggcttgtgaatatgctcaagcggttttagtagtttatcaccatgaccagtagatggtattgttggcccaagatagtttggtt

SEQ ID NO: 2568 - DNA, 122 bp, Homo sapiens
  misc_feature (61)..(62): /note="This region represents a CpG dinucleotide"
  misc_feature (61)..(61): /note="Nucleotide may be methylated to form 5-methylcytosine"
accacagccccgccggggctggaagtgggagcggcgctgccaccctggggtcagggtgaccgctgagcctgacactcctgacggcccggccgcccctgagcacccggggaacatcggggagc

SEQ ID NO: 2569 - DNA, 122 bp, Homo sapiens
  misc_feature (61)..(62): /note="This region represents a CpG dinucleotide"
  misc_feature (61)..(61): /note="Nucleotide may be methylated to form 5-methylcytosine"
tgatgtgtaataacagttatgtctatttgggcacaacagacactgtgtaggagtcttccccgcttcatttcctaacccttatcttgacgagcacactcatggaagagtcatggaaggcggga

SEQ ID NO: 2570 - DNA, 122 bp, Homo sapiens
  misc_feature (61)..(62): /note="This region represents a CpG dinucleotide"
  misc_feature (61)..(61): /note="Nucleotide may be methylated to form 5-methylcytosine"
tcctgggtgacaggctattcttcctgtgtcaattacttgcttgagggatctgctgttctccgtctctttctggatttataaaatgctctcatgagccatcagggtaaatgccagtggtaaag

SEQ ID NO: 2571 - DNA, 122 bp, Homo sapiens
  misc_feature (61)..(62): /note="This region represents a CpG dinucleotide"
  misc_feature (61)..(61): /note="Nucleotide may be methylated to form 5-methylcytosine"
attcttaacacatgcatagatttgcccctctggtcacaaagagccccttggggcaaatcgcgttgttagcagttgacggagtgcagaaactgctgactccagagatttccatttctaaagga

SEQ ID NO: 2572 - DNA, 122 bp, Homo sapiens
  misc_feature (61)..(62): /note="This region represents a CpG dinucleotide"
  misc_feature (61)..(61): /note="Nucleotide may be methylated to form 5-methylcytosine"
ctaccgccacctgtggagggaccgcgtatgccagctgtgccacccgtcgccggtccacgccgccgcccacctgagcctggagactctgaccgctttcgtgcttcctttcgggctgatgctcg

SEQ ID NO: 2573 - DNA, 122 bp, Homo sapiens
  misc_feature (61)..(62): /note="This region represents a CpG dinucleotide"
  misc_feature (61)..(61): /note="Nucleotide may be methylated to form 5-methylcytosine"
aaatgtagcttcatcccctgcccttcattgaatgactgaattacagtcagcaccacataacgatgtttcggtcaactatggactccatatgtgatgagacagtgatcccatagattatagtg

SEQ ID NO: 2574 - DNA, 122 bp, Homo sapiens
  misc_feature (61)..(62): /note="This region represents a CpG dinucleotide"
  misc_feature (61)..(61): /note="Nucleotide may be methylated to form 5-methylcytosine"
gccttcggtgcctgagggacttgatattttctcattatgaagactttcccatctagtgaacgctgcaaataaaactgctcagaatcggtctgaactgcctgtttccgtggtagcaggcctct

SEQ ID NO: 2575 - DNA, 122 bp, Homo sapiens
  misc_feature (61)..(62): /note="This region represents a CpG dinucleotide"
  misc_feature (61)..(61): /note="Nucleotide may be methylated to form 5-methylcytosine"
tctcttctcagtctaaatttacatgccctttgctcgcctacgcttttctagaccccaaatcggacctaatccttctcaagtctccccttactgtgcccattcctaagagccttagggcccac

SEQ ID NO: 2576 - DNA, 122 bp, Homo sapiens
  misc_feature (61)..(62): /note="This region represents a CpG dinucleotide"
  misc_feature (61)..(61): /note="Nucleotide may be methylated to form 5-methylcytosine"
gttcctgggaggactaggttttggaatttcccctaaacatatatcctctcagggccgaatcggacctttggcgtttcctgttctgtactgggaaccagaagctttctgaattatctcatagg

SEQ ID NO: 2577 - DNA, 122 bp, Homo sapiens
  misc_feature (61)..(62): /note="This region represents a CpG dinucleotide"
  misc_feature (61)..(61): /note="Nucleotide may be methylated to form 5-methylcytosine"
gcaagggcctcattttttcttactgcccccatccggttcggggaggtggcgggaccttggcggcgcccggagccggcgtggcgctcatcgagggacgcccggcccaagtggtaagttgaaaa

SEQ ID NO: 2578 - DNA, 122 bp, Homo sapiens
  misc_feature (61)..(62): /note="This region represents a CpG dinucleotide"
  misc_feature (61)..(61): /note="Nucleotide may be methylated to form 5-methylcytosine"
agtagtaaagcatcatttcttttcctgttctcctatatttaaaccagctctaaatctactcgtaggccagagattcaactcaggttcatgaaacagcgctgccctagcaaaaatctactaaa

SEQ ID NO: 2579 - DNA, 122 bp, Homo sapiens
  misc_feature (61)..(62): /note="This region represents a CpG dinucleotide"
  misc_feature (61)..(61): /note="Nucleotide may be methylated to form 5-methylcytosine"
ctctctgaaaatactagccaatgtttactgagtactgtgaggagatgggagagtcccacacgtgcacatgtgttgtttcttactcacaggtcattttatgattacccctacttacgtatggg

SEQ ID NO: 2580 - DNA, 122 bp, Homo sapiens
  misc_feature (61)..(62): /note="This region represents a CpG dinucleotide"
  misc_feature (61)..(61): /note="Nucleotide may be methylated to form 5-methylcytosine"
ccagcatgagctacatgaaagagaccaccgccaaggagtgactcaaacaagaagccagggcgccccgtggccacatcctcactgcagaggcatctgtgagagcagagcctggggctgctccc

SEQ ID NO: 2581 - DNA, 122 bp, Homo sapiens
  misc_feature (61)..(62): /note="This region represents a CpG dinucleotide"
  misc_feature (61)..(61): /note="Nucleotide may be methylated to form 5-methylcytosine"
gccttaggagcagagcggaagtctcgcgagagtgactgctgcaggcagtggcggcgcgggcgcgcgcagagacggcctcgggcgcgcgcgcgcgcgcgcgcgctccccgcccccagccccgg

SEQ ID NO: 2582 - DNA, 122 bp, Homo sapiens
  misc_feature (61)..(62): /note="This region represents a CpG dinucleotide"
  misc_feature (61)..(61): /note="Nucleotide may be methylated to form 5-methylcytosine"
gccggatgcggaggagtgcaactcggatttgaaggtcaccgagcgcgttaatgaaatccccggaagtgtgtctgccaacaatccttttattttggctttacctgctgttcgcctgatgcctg

SEQ ID NO: 2583 - DNA, 122 bp, Homo sapiens
  misc_feature (61)..(62): /note="This region represents a CpG dinucleotide"
  misc_feature (61)..(61): /note="Nucleotide may be methylated to form 5-methylcytosine"
gggccacaatatggaagtgaaaaaccaggggcagtttcctgagcagggaatgatgtcattcgatctataattcagtctggttaatctacttatgcaacaccaattgaaggacacacttagat

SEQ ID NO: 2584 - DNA, 122 bp, Homo sapiens
  misc_feature (61)..(62): /note="This region represents a CpG dinucleotide"
  misc_feature (61)..(61): /note="Nucleotide may be methylated to form 5-methylcytosine"
accatctactgaagagactgccctttctccagtgtatgttcttggcacctttgtcaaaaacgagttcactgtaagtgtataaatttgcttctgggttatctgttctgttcagttggtctatg

SEQ ID NO: 2585 - DNA, 122 bp, Homo sapiens
  misc_feature (61)..(62): /note="This region represents a CpG dinucleotide"
  misc_feature (61)..(61): /note="Nucleotide may be methylated to form 5-methylcytosine"
ccttcgctgggccccagggagtgtccacagcaccaaggctgctatggatgcatcgccaagcgcggtggggacctggcttgtgtctttgtgtattttgatcagaactttccctgtagcttcct

SEQ ID NO: 2586 - DNA, 122 bp, Homo sapiens
  misc_feature (61)..(62): /note="This region represents a CpG dinucleotide"
  misc_feature (61)..(61): /note="Nucleotide may be methylated to form 5-methylcytosine"
agccacagcacctggttgctgcccctaaggctcaatgggcaagtaacagatcactccgatcgcagaggcttcggaaatgccttccaccgtggtaccaaggatggtttgctctcaggagagga

SEQ ID NO: 2587 - DNA, 122 bp, Homo sapiens
  misc_feature (61)..(62): /note="This region represents a CpG dinucleotide"
  misc_feature (61)..(61): /note="Nucleotide may be methylated to form 5-methylcytosine"
gtttggaaaatagtgacatgtcagtacaaagggaatactgctctacaataagaaggaacacgccacagatacatagcatggatgaatgtcaaaaacattgtgagagaaaaatgcctgaacag

SEQ ID NO: 2588 - DNA, 122 bp, Homo sapiens
  misc_feature (61)..(62): /note="This region represents a CpG dinucleotide"
  misc_feature (61)..(61): /note="Nucleotide may be methylated to form 5-methylcytosine"
gcagaggaccagctcttgctccacaacagcttgcctccccttcctctttctacccttccacgtgaccctcacggttctctccaccagaaaagaggctaccattgttagttgccagtctggca

SEQ ID NO: 2589 - DNA, 122 bp, Homo sapiens
  misc_feature (61)..(62): /note="This region represents a CpG dinucleotide"
  misc_feature (61)..(61): /note="Nucleotide may be methylated to form 5-methylcytosine"
ttgatgggattaaactccttgcttgctgctctgctgacatcagtaattgccttgcttcttcgtttccaatttcctgtttctttaaaacaatccatgtattccttttactgtttgtttccttg

SEQ ID NO: 2590 - DNA, 122 bp, Homo sapiens
  misc_feature (61)..(62): /note="This region represents a CpG dinucleotide"
  misc_feature (61)..(61): /note="Nucleotide may be methylated to form 5-methylcytosine"
aggcggctgcattgataagtcggtggttgaagttgtgcatcccgactctaagtaccagaacgtttggcagtagcacccagaacaggtttgagacaactgcactccagtgtggacgtgccttt

SEQ ID NO: 2591 - DNA, 122 bp, Homo sapiens
  misc_feature (61)..(62): /note="This region represents a CpG dinucleotide"
  misc_feature (61)..(61): /note="Nucleotide may be methylated to form 5-methylcytosine"
ttgttcaactagctaaattcctagactctgacaaagttaatggacttctcagatatatatcgttgtttcttattatttggaactcagtaaataccaaagcatgtttgcatttagatttttcc

SEQ ID NO: 2592 - DNA, 122 bp, Homo sapiens
  misc_feature (61)..(62): /note="This region represents a CpG dinucleotide"
  misc_feature (61)..(61): /note="Nucleotide may be methylated to form 5-methylcytosine"
ccttttctccccgcggcattggggcgacgcagggcccccggcttagtgaccttggggcggcgctcacctccaaaggccagggtggtgggctgggcagaactcactgcctctttgccccagtt

SEQ ID NO: 2593 - DNA, 122 bp, Homo sapiens
  misc_feature (61)..(62): /note="This region represents a CpG dinucleotide"
  misc_feature (61)..(61): /note="Nucleotide may be methylated to form 5-methylcytosine"
cggcgcgcgccgggctgtagctctgcgacgacagcgagcggttctgctgcgggtacgtggcgcacggccgcagcgcccccacggccggcgcgcacgcctcgtcccgcgcgcccgacgcctgc

SEQ ID NO: 2594 - DNA, 122 bp, Homo sapiens
  misc_feature (61)..(62): /note="This region represents a CpG dinucleotide"
  misc_feature (61)..(61): /note="Nucleotide may be methylated to form 5-methylcytosine"
aaacattagtcattcttagtcattttaatccaatttcattttcataaatatgttggaaggcgggggccagtatgactcactagcccaaacacctccaaggacagatctgactatcagctggg

SEQ ID NO: 2595 - DNA, 122 bp, Homo sapiens
  misc_feature (61)..(62): /note="This region represents a CpG dinucleotide"
  misc_feature (61)..(61): /note="Nucleotide may be methylated to form 5-methylcytosine"
taaggagatgattccctatctgcttcacattttaagtaattagtatgtaaacctctcctacgttaggctgtggtttcaagtttgcaaccattcaagtttgcaatagtttattttctcttgtt

SEQ ID NO: 2596 - DNA, 122 bp, Homo sapiens
  misc_feature (61)..(62): /note="This region represents a CpG dinucleotide"
  misc_feature (61)..(61): /note="Nucleotide may be methylated to form 5-methylcytosine"
caataggctattccatatagccttaggtgtgtagcaggcttatgaaagtacactctatgacgttggcacaatgaaaaaaatcacccagcaatgaacttctcagaacatatccccattgttag

SEQ ID NO: 2597 - DNA, 122 bp, Homo sapiens
  misc_feature (61)..(62): /note="This region represents a CpG dinucleotide"
  misc_feature (61)..(61): /note="Nucleotide may be methylated to form 5-methylcytosine"
cggggaactgtttttgatgggtggggtccccggctgtggttggtagtgtgggggcgtggccgagggtgtggcctgagggagtgagctaaccgggggcgtggcctgatatggggcggggggaa

SEQ ID NO: 2598 - DNA, 122 bp, Homo sapiens
  misc_feature (61)..(62): /note="This region represents a CpG dinucleotide"
  misc_feature (61)..(61): /note="Nucleotide may be methylated to form 5-methylcytosine"
agcactttggggtattcaaaaataaatcacaactgaaaaattagagcctctcatccaagacgtcacaaaccaatggaattttaaaatgtagactgattgttgctacaggaaaggagttttga

SEQ ID NO: 2599 - DNA, 122 bp, Homo sapiens
  misc_feature (61)..(62): /note="This region represents a CpG dinucleotide"
  misc_feature (61)..(61): /note="Nucleotide may be methylated to form 5-methylcytosine"
ctacaaatcacatttatcttttgccactaagctccctgttaggatctgccaatcagaggacgctaggggcggactggaaggctgagtggggaagaaggaagacacttcctgtttgcttcctg

SEQ ID NO: 2600 - DNA, 122 bp, Homo sapiens
  misc_feature (61)..(62): /note="This region represents a CpG dinucleotide"
  misc_feature (61)..(61): /note="Nucleotide may be methylated to form 5-methylcytosine"
tcctaaaatattttcatgagtttgtgctgggtaggcctaagggaaacatgctcagtaaatcgaaaaatctcggattacacataaaccaccggccccggcaggttagacttggtggacacggg

SEQ ID NO: 2601 - DNA, 122 bp, Homo sapiens
  misc_feature (61)..(62): /note="This region represents a CpG dinucleotide"
  misc_feature (61)..(61): /note="Nucleotide may be methylated to form 5-methylcytosine"
gccgggtggcaaggaggatgtcggtctgggtgtgccaggcaaatgaggaagagacttggacggaagcctgggccacaaacaaacaaggcagacaaaaggggacacatgagaacaggcttgcc

SEQ ID NO: 2602 - DNA, 122 bp, Homo sapiens
  misc_feature (61)..(62): /note="This region represents a CpG dinucleotide"
  misc_feature (61)..(61): /note="Nucleotide may be methylated to form 5-methylcytosine"
aaaccccacccgcggcacaggactgcttcccaggcttcccccacagcaaacgtcaaactccgcccctgggcaatctggagccaccgagcgtcaccacccacccagctcggccccctccaggt

SEQ ID NO: 2603 - DNA, 122 bp, Homo sapiens
  misc_feature (61)..(62): /note="This region represents a CpG dinucleotide"
  misc_feature (61)..(61): /note="Nucleotide may be methylated to form 5-methylcytosine"
aaattactcacaggaaccctctcccgaattttgctaatcctgtggttttctgatatttaacgtaatattcctcctacctatggtgctcattagtgaaagtatagaaatgcttctcttggtta

SEQ ID NO: 2604 - DNA, 122 bp, Homo sapiens
  misc_feature (61)..(62): /note="This region represents a CpG dinucleotide"
  misc_feature (61)..(61): /note="Nucleotide may be methylated to form 5-methylcytosine"
gctttatgtaccccctcacctgctggtaaacatttgggtgatttccggtctttccagctacggaaagtgctgctgagaattgctaagaacattctcgtatgcattgcccaaagcatgtgtac

SEQ ID NO: 2605 - DNA, 122 bp, Homo sapiens
  misc_feature (61)..(62): /note="This region represents a CpG dinucleotide"
  misc_feature (61)..(61): /note="Nucleotide may be methylated to form 5-methylcytosine"
actaggagtcaggctgggctgggcggtcctgtggggggctacagccaactgttgggcccacgtaggccttgcttcacctggaaagagaatccaggcaggaggtcatctcagggatgggctgg

SEQ ID NO: 2606 - DNA, 122 bp, Homo sapiens
  misc_feature (61)..(62): /note="This region represents a CpG dinucleotide"
  misc_feature (61)..(61): /note="Nucleotide may be methylated to form 5-methylcytosine"
gtcatatgaagttatagcgcatgtgctgattcctctcttcacagctgtaaaaagaaagcacgcttcaaaaagcaggcttgctagggctctgaagactttaattctgtaatgggtccagctcc

SEQ ID NO: 2607 - DNA, 122 bp, Homo sapiens
  misc_feature (61)..(62): /note="This region represents a CpG dinucleotide"
  misc_feature (61)..(61): /note="Nucleotide may be methylated to form 5-methylcytosine"
accccaaggtgtgacagagtaaggcctgtgcagctgcagcgtggcgctgagcaggaaggacgcgtggagatgccggctgtggcgaccgcgtgatttgaaggcacctgtgacttctgctcctg

SEQ ID NO: 2608 - DNA, 122 bp, Homo sapiens
  misc_feature (61)..(62): /note="This region represents a CpG dinucleotide"
  misc_feature (61)..(61): /note="Nucleotide may be methylated to form 5-methylcytosine"
ctcattttccacacttcagccttcagcagtagtgaaacatgagtcactgttaagttctcacgatgaaattctcactattagttcagcactattaagtgactcatgttcgacacttcagtggt

SEQ ID NO: 2609 - DNA, 122 bp, Homo sapiens
  misc_feature (61)..(62): /note="This region represents a CpG dinucleotide"
  misc_feature (61)..(61): /note="Nucleotide may be methylated to form 5-methylcytosine"
aaaaaaacatacacaactacacatactgacttctggagtagacgctcggtgacttctttccggtgtgataacttttttgggttgtgcgatgggaaggtatcgagtatctgtagctactgctc

SEQ ID NO: 2610 - DNA, 122 bp, Homo sapiens
  misc_feature (61)..(62): /note="This region represents a CpG dinucleotide"
  misc_feature (61)..(61): /note="Nucleotide may be methylated to form 5-methylcytosine"
ctgagatggaagcaattgtcgcaggggtcaggcacgactttgccttgatgacggcaagggcgcaaccgggagaggagaggagagctgttccctcatgggcgaggggaggaaggatgagggcg

SEQ ID NO: 2611 - DNA, 122 bp, Homo sapiens
  misc_feature (61)..(62): /note="This region represents a CpG dinucleotide"
  misc_feature (61)..(61): /note="Nucleotide may be methylated to form 5-methylcytosine"
cctttcttccaagaaggtggtctttgtttagcatgggctcacctctccgtgccaacttctcgatctttgtcctttagccagctcctctcagccttatacttatcccacctctttcagaggca

SEQ ID NO: 2612 - DNA, 122 bp, Homo sapiens
  misc_feature (61)..(62): /note="This region represents a CpG dinucleotide"
  misc_feature (61)..(61): /note="Nucleotide may be methylated to form 5-methylcytosine"
ttacaaaccctcacagccccccaaatcctagatgccaaacacaactgctgtggacaacaacgatcagaaccatggacagcagttcaggcatttgtagctgctgtgggcccaccccctgccca

SEQ ID NO: 2613 - DNA, 122 bp, Homo sapiens
  misc_feature (61)..(62): /note="This region represents a CpG dinucleotide"
  misc_feature (61)..(61): /note="Nucleotide may be methylated to form 5-methylcytosine"
cagagttgcatgtgattcactactgatcagtgctctgattgtcatgagtcaccacaaggccgtagctgctcatgcagcctggctgtgaggaggacctagattgaggaatttagctacagaaa

SEQ ID NO: 2614 - DNA, 122 bp, Homo sapiens
  misc_feature (61)..(62): /note="This region represents a CpG dinucleotide"
  misc_feature (61)..(61): /note="Nucleotide may be methylated to form 5-methylcytosine"
gcagcccagcagggcctacaaggaatgtgtgaacggatgcacgtaaagtgcttagcaaagcgtggtaaacaagagcccttgttgtcattcttgctttaagcctagtcccagtgatgtctgta

SEQ ID NO: 2615 - DNA, 122 bp, Homo sapiens
  misc_feature (61)..(62): /note="This region represents a CpG dinucleotide"
  misc_feature (61)..(61): /note="Nucleotide may be methylated to form 5-methylcytosine"
tttttccacccccgaaagataaccactgtggttcactgtgcattttatcagtagctccctcgtgggtgagatttacaatagaagagcagacatcttggtacttaggtttttctcacagtttc

SEQ ID NO: 2616 - DNA, 122 bp, Homo sapiens
  misc_feature (61)..(62): /note="This region represents a CpG dinucleotide"
  misc_feature (61)..(61): /note="Nucleotide may be methylated to form 5-methylcytosine"
cgatggttagcattttctaagtgaagcatatctgagcctattccaggcctgactgacacccgctgagttcgtaattgtagcttgagcacaggtccttagcagataatgtcctaccggttctt

SEQ ID NO: 2617 - DNA, 122 bp, Homo sapiens
  misc_feature (61)..(62): /note="This region represents a CpG dinucleotide"
  misc_feature (61)..(61): /note="Nucleotide may be methylated to form 5-methylcytosine"
cctcctttggtgctcttgggaactttgctacaggtatcatgtgagtaagtccaggtgactcggagatgagtgatacttggccctgttacctgcactgtccctgctgagagccagctgactgc

SEQ ID NO: 2618 - DNA, 122 bp, Homo sapiens
  misc_feature (61)..(62): /note="This region represents a CpG dinucleotide"
  misc_feature (61)..(61): /note="Nucleotide may be methylated to form 5-methylcytosine"
tactggggagactgaggcaggagaatcgcttgaacccggcaggcagaagttgcaatgagccgagatcgcgcaaatgcactccagcccaggcgatggtgagagactccgtttcaaaaaaaaaa

SEQ ID NO: 2619 - DNA, 122 bp, Homo sapiens
  misc_feature (61)..(62): /note="This region represents a CpG dinucleotide"
  misc_feature (61)..(61): /note="Nucleotide may be methylated to form 5-methylcytosine"
ctgttttgttatgtgtattttgctgggatggaaaatgttaatttggtttcccatgcagcccgtcaggcagcatcttgcaaataaagaatcttgtcttacagggtgattttctcttgtaaaat

SEQ ID NO: 2620 - DNA, 122 bp, Homo sapiens
  misc_feature (61)..(62): /note="This region represents a CpG dinucleotide"
  misc_feature (61)..(61): /note="Nucleotide may be methylated to form 5-methylcytosine"
aaatcatgtgcatttatatgtactagttgcaatgtaaaatgtatttcttactgaggaccacggggaaaaaaagtttggaaaaattactgagaactttacttaagaacaatttgtatactcta

SEQ ID NO: 2621 - DNA, 122 bp, Homo sapiens
  misc_feature (61)..(62): /note="This region represents a CpG dinucleotide"
  misc_feature (61)..(61): /note="Nucleotide may be methylated to form 5-methylcytosine"
caggtccagtgacaaacatacacaatttctagagttaccgcggctggcaagagtagaactcgctttgctaattcaggaacggaagttggagatttttgttgattgttttaaagtggctcgaa

SEQ ID NO: 2622 - DNA, 122 bp, Homo sapiens
  misc_feature (61)..(62): /note="This region represents a CpG dinucleotide"
  misc_feature (61)..(61): /note="Nucleotide may be methylated to form 5-methylcytosine"
tgctctgtagaatgggaatcatgcgtgtctgtttcctgctctgtagaatcagaatcacggcgtgtctgtttgctgctcttcagaatgggaatcacccatgtccgtttcctgctctgtagaat

SEQ ID NO: 2623 - DNA, 122 bp, Homo sapiens
  misc_feature (61)..(62): /note="This region represents a CpG dinucleotide"
  misc_feature (61)..(61): /note="Nucleotide may be methylated to form 5-methylcytosine"
ttgaaactgccatgttcttttcaattttggtagctcccctgcatttaatttagtcataagcgtctgtattaatgggtgtgttcaatatgaaggcatcctgtgaagacaataaattatattat

SEQ ID NO: 2624 - DNA, 122 bp, Homo sapiens
  misc_feature (61)..(62): /note="This region represents a CpG dinucleotide"
  misc_feature (61)..(61): /note="Nucleotide may be methylated to form 5-methylcytosine"
tcataggtgaaatgacacatagcctatgactagaaatcctacttcctggtgagcacagaacgatgtgggtaagaggatttctcagtaatgtttgtaacagtgaaaatgttggaaacaacaaa

SEQ ID NO: 2625 - DNA, 122 bp, Homo sapiens
  misc_feature (61)..(62): /note="This region represents a CpG dinucleotide"
  misc_feature (61)..(61): /note="Nucleotide may be methylated to form 5-methylcytosine"
gggctataaagaaaagttctttcctgagctttgaatccccactgtcaggcttcaatggagcgcaaaaattcctaaatttggtgagaaatggcaacattaccagggaatgaacagaccaggcc

SEQ ID NO: 2626 - DNA, 122 bp, Homo sapiens
  misc_feature (61)..(62): /note="This region represents a CpG dinucleotide"
  misc_feature (61)..(61): /note="Nucleotide may be methylated to form 5-methylcytosine"
aggcgggagacttacagctctatccaattagagcgctggattgacaactgccgaatgaggcgcgcagcagagaggagggtgcggcatccgggatctggcgcggcttttgcttgtagctccag

SEQ ID NO: 2627 - DNA, 122 bp, Homo sapiens
  misc_feature (61)..(62): /note="This region represents a CpG dinucleotide"
  misc_feature (61)..(61): /note="Nucleotide may be methylated to form 5-methylcytosine"
gtggaaaccaacctgccctaatcctattgcacccattttcccatcagctcactaaagagtcgtgtggaaagttggtagctttatcctcagaggccctcctggatcctctctggacctttccc

SEQ ID NO: 2628 - DNA, 122 bp, Homo sapiens
  misc_feature (61)..(62): /note="This region represents a CpG dinucleotide"
  misc_feature (61)..(61): /note="Nucleotide may be methylated to form 5-methylcytosine"
gggcggagccgcccagcgctgaatccaaatcgtatctaagctattttctagctctgacatcgtatacatcactgcatacgtgaatagcatgccaaatactgtataaaccaatactggttttt

SEQ ID NO: 2629 - DNA, 122 bp, Homo sapiens
  misc_feature (61)..(62): /note="This region represents a CpG dinucleotide"
  misc_feature (61)..(61): /note="Nucleotide may be methylated to form 5-methylcytosine"
taaaacaaagcaacaaactgcaagatgaaatcccccaaaatttgaaattatagactaatccgaaagcactaagaacaattaagtatgcaacaagaatacaaagacttgaaaaagaataacac

SEQ ID NO: 2630 - DNA, 122 bp, Homo sapiens
  misc_feature (61)..(62): /note="This region represents a CpG dinucleotide"
  misc_feature (61)..(61): /note="Nucleotide may be methylated to form 5-methylcytosine"
caggaaatcagatgaataaataaataaatgcagtgacgagctttgtggtgactcaacagacgtcagcataggggctggtaaaggcacaaaggaaagagtagtcaaaattcttttaacttcag

SEQ ID NO: 2631 - DNA, 122 bp, Homo sapiens
  misc_feature (61)..(62): /note="This region represents a CpG dinucleotide"
  misc_feature (61)..(61): /note="Nucleotide may be methylated to form 5-methylcytosine"
atcacctcccaccagcccccacctcttacattggagattacaatttgacatgagatttggcgggggatacatatctaaactatactacacggcatgtgttcaccgggctattccatccacac

SEQ ID NO: 2632 - DNA, 122 bp, Homo sapiens
  misc_feature (61)..(62): /note="This region represents a CpG dinucleotide"
  misc_feature (61)..(61): /note="Nucleotide may be methylated to form 5-methylcytosine"
tctctgatatgatcctccatggtagagttgtcagacttaacaaataaatatagacatccacggggaggaagttagtactaaaaaatcattcatttttaaatctgaaattcaaatcggatctc

SEQ ID NO: 2633 - DNA, 122 bp, Homo sapiens
  misc_feature (61)..(62): /note="This region represents a CpG dinucleotide"
  misc_feature (61)..(61): /note="Nucleotide may be methylated to form 5-methylcytosine"
atgttcttgtaatatacaaggattaaaaaaaaatcctaccaagagagcagtaataggctccggcttttctggtctgggagcaaatataatgagcctccatgaaaatattgaatcgcttcccg

SEQ ID NO: 2634 - DNA, 122 bp, Homo sapiens
  misc_feature (61)..(62): /note="This region represents a CpG dinucleotide"
  misc_feature (61)..(61): /note="Nucleotide may be methylated to form 5-methylcytosine"
gtgctttgttatttatgtttcagagagattttgtagccttcagctctcaagaatgtgtcacgctgtgctgtttatacattgaagatattaatgggcgtagatgtcatttttcattttaatgt

SEQ ID NO: 2635 - DNA, 122 bp, Homo sapiens
  misc_feature (61)..(62): /note="This region represents a CpG dinucleotide"
  misc_feature (61)..(61): /note="Nucleotide may be methylated to form 5-methylcytosine"
ttcaagtggtaatctgtggttacgccacagaaaccggtttctactgcagagcagtaagaacgtgagaagcgttcgtggacttcagttcattaacactgaaaaatgaatttgtggtgccacct

SEQ ID NO: 2636 - DNA, 122 bp, Homo sapiens
  misc_feature (61)..(62): /note="This region represents a CpG dinucleotide"
  misc_feature (61)..(61): /note="Nucleotide may be methylated to form 5-methylcytosine"
ctcgatctcctgacctcgtgatccacccgcctcggcctcccaaaatgctgggattacaggcgtgaaacaccgcgcccggccacaagtgatgatatttaaagtcaactgttgaatagaaagta

SEQ ID NO: 2637 - DNA, 122 bp, Homo sapiens
  misc_feature (61)..(62): /note="This region represents a CpG dinucleotide"
  misc_feature (61)..(61): /note="Nucleotide may be methylated to form 5-methylcytosine"
cacgtgtggttcggcctcgccaagctgggctgcgtggtggcctttctcaacaccaacattcgctccaactccctcctgaattgcatccgcgcctgtgggcccagagccctagtggtgggcgc

SEQ ID NO: 2638 - DNA, 122 bp, Homo sapiens
  misc_feature (61)..(62): /note="This region represents a CpG dinucleotide"
  misc_feature (61)..(61): /note="Nucleotide may be methylated to form 5-methylcytosine"
caggagctcccggagcccccgatgctgcatggcccaaatgaaaatgccttgcagtcacgacgactccgtgtctgtcagaagcctgaggctggttccattctccttcccacacctcatcaacg

SEQ ID NO: 2639 - DNA, 122 bp, Homo sapiens
  misc_feature (61)..(62): /note="This region represents a CpG dinucleotide"
  misc_feature (61)..(61): /note="Nucleotide may be methylated to form 5-methylcytosine"
acagtctaccttctgctctttggaatgcacttccactttcgtaccctcttggacagttttcgctatccttcaaagctcacctcaagtgtcaccttttcaggaattctctaggctgggtcaag

SEQ ID NO: 2640 - DNA, 122 bp, Homo sapiens
  misc_feature (61)..(62): /note="This region represents a CpG dinucleotide"
  misc_feature (61)..(61): /note="Nucleotide may be methylated to form 5-methylcytosine"
caagcacttccgcattggatggcaggtcaaaggtcacattcttagagccactcttagagtcgtagttcatcgagaaggcagcgaagctggccattacgcaggctgtcccgttgccctttttc

SEQ ID NO: 2641 - DNA, 122 bp, Homo sapiens
  misc_feature (61)..(62): /note="This region represents a CpG dinucleotide"
  misc_feature (61)..(61): /note="Nucleotide may be methylated to form 5-methylcytosine"
tacaagttttctatcagagtttcaaccactccgtgtagagccacctttgttttgtcctaacgctaaatggtaaaaaactaaccctatcccctgttctttcattcaagtttcgagtctccttt

SEQ ID NO: 2642 - DNA, 122 bp, Homo sapiens
  misc_feature (61)..(62): /note="This region represents a CpG dinucleotide"
  misc_feature (61)..(61): /note="Nucleotide may be methylated to form 5-methylcytosine"
tcttcctcagatttacataataggactcattgcagaccggaaatttcagcatttcaacaccgttctggaggcttacatccaacagcatttcagtgcgaccttggcttacaagtaagtaattg

SEQ ID NO: 2643 - DNA, 122 bp, Homo sapiens
  misc_feature (61)..(62): /note="This region represents a CpG dinucleotide"
  misc_feature (61)..(61): /note="Nucleotide may be methylated to form 5-methylcytosine"
catggggagataccgtaacgggcatagaaaaacaatcacaatagcttcagtggatccccacgtgacctggccaaattggctggagagggaacaagtctttcaggtcaagctcaggctttgaa

SEQ ID NO: 2644 - DNA, 122 bp, Homo sapiens
  misc_feature (61)..(62): /note="This region represents a CpG dinucleotide"
  misc_feature (61)..(61): /note="Nucleotide may be methylated to form 5-methylcytosine"
ggtgatccgccctcctgggcctcccaaagtgctgggattacaggcatgagccaccgcgcccggccacatcgttatgtctcattgtaaatccgtttctgtagaaaatccttccacatgggtta

SEQ ID NO: 2645 - DNA, 122 bp, Homo sapiens
  misc_feature (61)..(62): /note="This region represents a CpG dinucleotide"
  misc_feature (61)..(61): /note="Nucleotide may be methylated to form 5-methylcytosine"
aaggaaggaaggaaggaaagaaaaaaaaaataaataaaaatgaaagataaagcatagggacgtctctgagacaaagagctgagtggaagaatcaagttaggactcagcagcgcaggatggcg

SEQ ID NO: 2646 - DNA, 122 bp, Homo sapiens
  misc_feature (61)..(62): /note="This region represents a CpG dinucleotide"
  misc_feature (61)..(61): /note="Nucleotide may be methylated to form 5-methylcytosine"
gtgcccagctctgttggcaataaaaccttgtttctggtttcactgcaagacgttatttaacgctagtggcaccagaggttccaacaagaacacatgagaggccttatccagttacgaaagag

SEQ ID NO: 2647 - DNA, 122 bp, Homo sapiens
  misc_feature (61)..(62): /note="This region represents a CpG dinucleotide"
  misc_feature (61)..(61): /note="Nucleotide may be methylated to form 5-methylcytosine"
ttttcctttcaggctctaaattgctgacttaaatgtcatcattagagagagttgtctcctcggtagaagtacaaattttgttccagagtcaaatatgaagacttgatcagtggcctggcgcg

SEQ ID NO: 2648 - DNA, 122 bp, Homo sapiens
  misc_feature (61)..(62): /note="This region represents a CpG dinucleotide"
  misc_feature (61)..(61): /note="Nucleotide may be methylated to form 5-methylcytosine"
tgccgcgcctgcgcacggggtcaagcggggccatagtggaggcgcctcgcctgcacaaagcgcacctgcggacggtggcgctgtggggatagggaggtcccgcgctccctgaccgatgtagg

SEQ ID NO: 2649 - DNA, 122 bp, Homo sapiens
  misc_feature (61)..(62): /note="This region represents a CpG dinucleotide"
  misc_feature (61)..(61): /note="Nucleotide may be methylated to form 5-methylcytosine"
tgagagtttctgttttcatgccagatgttgaatttatttaccaagtcagatcattcaccccgtgagacctacattatggagagtggcaaaagagaaggtgtagtttgctattaagttccata

SEQ ID NO: 2650 - DNA, 122 bp, Homo sapiens
  misc_feature (61)..(62): /note="This region represents a CpG dinucleotide"
  misc_feature (61)..(61): /note="Nucleotide may be methylated to form 5-methylcytosine"
gacacagtccaactccatcctcaccaggtcactggctggaacccctgggggccaccattgcgggaatcagcctttgaaacgatggccaacagcagctaataataaaccagtaatttgggata

SEQ ID NO: 2651 - DNA, 122 bp, Homo sapiens
  misc_feature (61)..(62): /note="This region represents a CpG dinucleotide"
  misc_feature (61)..(61): /note="Nucleotide may be methylated to form 5-methylcytosine"
ttcccataagcagagcccttgaaggtgctggcacagattccacgatctgaggcctcctgacggcctctggagcccccttctgccgcttcccacgtagggctgccgcgtgtggtccgaaaatc

SEQ ID NO: 2652 - DNA, 122 bp, Homo sapiens
  misc_feature (61)..(62): /note="This region represents a CpG dinucleotide"
  misc_feature (61)..(61): /note="Nucleotide may be methylated to form 5-methylcytosine"
aaacttcatactgttttttttttattattatactttaagttttagggtacatgtgcacaacgtgcaggtttgttacatactgtaatgttaaagggaagaaaagttagaagactaatgaacag

SEQ ID NO: 2653 - DNA, 122 bp, Homo sapiens
  misc_feature (61)..(62): /note="This region represents a CpG dinucleotide"
  misc_feature (61)..(61): /note="Nucleotide may be methylated to form 5-methylcytosine"
ttcacaccacttcctacttattaatgtggctggttcccatgtaccagattctactgagcacgttcacaatagtatctcattcagttgctccatcaccaccgatgatgtcggtgttactagtt

SEQ ID NO: 2654 - DNA, 122 bp, Homo sapiens
  misc_feature (61)..(62): /note="This region represents a CpG dinucleotide"
  misc_feature (61)..(61): /note="Nucleotide may be methylated to form 5-methylcytosine"
cccacttccccttccattagaagtgagcaaatacatgggcatttgagctgagaaagacgacggaaggaatgaatggaatggagaatttctagtccagtttgcaaactgaaagttactactta

SEQ ID NO: 2655 - DNA, 122 bp, Homo sapiens
  misc_feature (61)..(62): /note="This region represents a CpG dinucleotide"
  misc_feature (61)..(61): /note="Nucleotide may be methylated to form 5-methylcytosine"
agtctgcaccggttagcttcaggcccatcatctcttacttgattggctgatgaaatgcaacgtcattgctcctgtatatctcaggcatttgacggcttaaggctttgttttattttttaaaa

SEQ ID NO: 2656 - DNA, 122 bp, Homo sapiens
  misc_feature (61)..(62): /note="This region represents a CpG dinucleotide"
  misc_feature (61)..(61): /note="Nucleotide may be methylated to form 5-methylcytosine"
atgatgataatgatcccacttggtggagtctgaccctccctgcagctggtgtcctttctgcgcagggatgaggtcactggggaagggggaggaggcggagctggggtggatgagagaaggga

SEQ ID NO: 2657 - DNA, 122 bp, Homo sapiens
  misc_feature (61)..(62): /note="This region represents a CpG dinucleotide"
  misc_feature (61)..(61): /note="Nucleotide may be methylated to form 5-methylcytosine"
ggtcacgcgagggccggccatgctttcggaagacgttcctctgtgtcattggaggagcagcgttggctgatctggtcagggattgcactcatgcctgtcataaacatcagaagagggtttac

SEQ ID NO: 2658 - DNA, 122 bp, Homo sapiens
  misc_feature (61)..(62): /note="This region represents a CpG dinucleotide"
  misc_feature (61)..(61): /note="Nucleotide may be methylated to form 5-methylcytosine"
agtggtaatggccagggcagggccagttcagggcggttcctcctttcaacatggcccaagcgggtgtatgtagggatgggaaaatacgtaattggcaaaagaacatactgcaaggggaaact

SEQ ID NO: 2659 - DNA, 122 bp, Homo sapiens
  misc_feature (61)..(62): /note="This region represents a CpG dinucleotide"
  misc_feature (61)..(61): /note="Nucleotide may be methylated to form 5-methylcytosine"
gccggctagagatgctgcatactaagagcctcctgtgagcagccatgtacacagtgaacacgatggctaaggccccatccagccgccctcaaagagcacatagtccactaaggaataagcat

SEQ ID NO: 2660 - DNA, 122 bp, Homo sapiens
  misc_feature (61)..(62): /note="This region represents a CpG dinucleotide"
  misc_feature (61)..(61): /note="Nucleotide may be methylated to form 5-methylcytosine"
cttgataggaaagcttgctctgcccggggttgaggggtacgggtctgagggcaacagaatcgacagcctcaagtgggcaaagggtggccaaacaggagtggcctccgacgtcactgtggcgc

SEQ ID NO: 2661 - DNA, 122 bp, Homo sapiens
  misc_feature (61)..(62): /note="This region represents a CpG dinucleotide"
  misc_feature (61)..(61): /note="Nucleotide may be methylated to form 5-methylcytosine"
gggacgcagtgagcgccgaatttgcctggggcaggggaaatgcgctctggcccatgtctgcgcactcgtagttccacccctcagccccagtgtttgttatttttcgggttcagcttgctttt

SEQ ID NO: 2662 - DNA, 122 bp, Homo sapiens
  misc_feature (61)..(62): /note="This region represents a CpG dinucleotide"
  misc_feature (61)..(61): /note="Nucleotide may be methylated to form 5-methylcytosine"
ttctaaaagacctatcactgaccctaaaagccatcagaccagcaggaaaaaaaaaaaaatcgaacaatgcaaccaaacacaagccaaagctttgaggtctggccagcttgtaggatagagat

SEQ ID NO: 2663 - DNA, 122 bp, Homo sapiens
  misc_feature (61)..(62): /note="This region represents a CpG dinucleotide"
  misc_feature (61)..(61): /note="Nucleotide may be methylated to form 5-methylcytosine"
tgtctctacccaccttcgttcctcgaggctcctcccatgttcccgcccacctcaggtccccgaggctccacccatgtcaccgcccacctcagctacttgagaacccccgtcccttgggtccc

SEQ ID NO: 2664 - DNA, 122 bp, Homo sapiens
  misc_feature (61)..(62): /note="This region represents a CpG dinucleotide"
  misc_feature (61)..(61): /note="Nucleotide may be methylated to form 5-methylcytosine"
ggcgtcccaggaaggagctggggctgagtgggacgcggtgcccaagggcggggctgtggtcgagggcggaggtggcctcctcttggggtgtgcctgccacctagtggtgaacttggagcagt

SEQ ID NO: 2665 - DNA, 122 bp, Homo sapiens
  misc_feature (61)..(62): /note="This region represents a CpG dinucleotide"
  misc_feature (61)..(61): /note="Nucleotide may be methylated to form 5-methylcytosine"
caaccacctgtggccctggagcagctggcaggcagagtcatgccagaccaaatagggcctcgctcatggaacaggccagagcagggctgggtggggaaggtgacttggcagttgagtttgaa

SEQ ID NO: 2666 - DNA, 122 bp, Homo sapiens
  misc_feature (61)..(62): /note="This region represents a CpG dinucleotide"
  misc_feature (61)..(61): /note="Nucleotide may be methylated to form 5-methylcytosine"
ttgggaggtgaccacattaaaatgataggaattcactgtgggtgacagcataaagccaatcgtggcttcctcactcttcgtggtgagccagaagttgttaaagactgggccaagaagattcc

SEQ ID NO: 2667 - DNA, 122 bp, Homo sapiens
  misc_feature (61)..(62): /note="This region represents a CpG dinucleotide"
  misc_feature (61)..(61): /note="Nucleotide may be methylated to form 5-methylcytosine"
ggccctgtgggccctggtcacagtttcaggagaggggaatggttccaataaacaaggcagcgaccatgtgatggccaggttctgtgtcaggctgagtcaccatttgagcagaatgaaggctc

SEQ ID NO: 2668 - DNA, 122 bp, Homo sapiens
  misc_feature (61)..(62): /note="This region represents a CpG dinucleotide"
  misc_feature (61)..(61): /note="Nucleotide may be methylated to form 5-methylcytosine"
tgcttgatgaaggtgctcttcccgctctcgcccgtgaggagcagcagcagcttgagctggcgccgggcgtcgcgcttgtcccccgcagctgcttctggatctcggcgttgatccgcttggac

SEQ ID NO: 2669 - DNA, 122 bp, Homo sapiens
  misc_feature (61)..(62): /note="This region represents a CpG dinucleotide"
  misc_feature (61)..(61): /note="Nucleotide may be methylated to form 5-methylcytosine"
taagttttttctaaagggcaatattctattctttatacagtacttaagttcacattcatacgattttatcgggtgggtctacgttatttcagtggaatttaagagcaacattatcaagactc

SEQ ID NO: 2670 - DNA, 122 bp, Homo sapiens
  misc_feature (61)..(62): /note="This region represents a CpG dinucleotide"
  misc_feature (61)..(61): /note="Nucleotide may be methylated to form 5-methylcytosine"
aaggagatttaaaaggagaaaagaaaaaaggcatcattctgaataattattcctcaaagccgtccctgtggcgtgctgataacctatcgggtcacatgtggcagtttactttaaaggcaaag

SEQ ID NO: 2671 - DNA, 122 bp, Homo sapiens
  misc_feature (61)..(62): /note="This region represents a CpG dinucleotide"
  misc_feature (61)..(61): /note="Nucleotide may be methylated to form 5-methylcytosine"
gagagttaaactgactggccttcagtgctagccatattgcactttctttcctgattagcacgggtgccaggctgttccttcaaattaagacaatatgcttatagtgatgagccgtattggcc

SEQ ID NO: 2672 - DNA, 122 bp, Homo sapiens
  misc_feature (61)..(62): /note="This region represents a CpG dinucleotide"
  misc_feature (61)..(61): /note="Nucleotide may be methylated to form 5-methylcytosine"
tgtctgggatctccatctgtaaaatggatctaggaacggtagttctcgactgaattaacccgacagcatctgtggaagtcgttggccctgtgccggggccagatcgcgcaactaggagcggg

SEQ ID NO: 2673 - DNA, 122 bp, Homo sapiens
  misc_feature (61)..(62): /note="This region represents a CpG dinucleotide"
  misc_feature (61)..(61): /note="Nucleotide may be methylated to form 5-methylcytosine"
ataggataatatggcaaaagcgagtgtgtttggcagactataaataaagctctacagaaacgtaaggtattatattttaatcagcttaaggtaaggccctgcgggcttctagactttggttt

SEQ ID NO: 2674 - DNA, 122 bp, Homo sapiens
  misc_feature (61)..(62): /note="This region represents a CpG dinucleotide"
  misc_feature (61)..(61): /note="Nucleotide may be methylated to form 5-methylcytosine"
agtaagtacttttgaaggaaggaaggaaggaaggaacaaatgaatgaatgatttgtcaaacgttgactggatgattgaaccagtgatctcaaatgcatttggctgatgggatgtagcagccg

SEQ ID NO: 2675 - DNA, 122 bp, Homo sapiens
  misc_feature (61)..(62): /note="This region represents a CpG dinucleotide"
  misc_feature (61)..(61): /note="Nucleotide may be methylated to form 5-methylcytosine"
caaactcatatttggagtatgaatcagttctggcaagaatgaactgcatgccccacaccccgtgtggaagggatccaaagtaatcaatctgctaaagtgtctggtctccttgagaaatggtg

SEQ ID NO: 2676 - DNA, 122 bp, Homo sapiens
  misc_feature (61)..(62): /note="This region represents a CpG dinucleotide"
  misc_feature (61)..(61): /note="Nucleotide may be methylated to form 5-methylcytosine"
ggctgcagtaggttcttactgataagtgccatctactggctgtaggtcaaaccaaacagccgtatgtaaaagctgctgatagaaatgcatagggctatagaagcaaagccaaaagatcctac

SEQ ID NO: 2677 - DNA, 122 bp, Homo sapiens
  misc_feature (61)..(62): /note="This region represents a CpG dinucleotide"
  misc_feature (61)..(61): /note="Nucleotide may be methylated to form 5-methylcytosine"
ttaatttgattcagcaaatgttcactgagctcctgccctgagagatacatgaagacatagcgcctcctccctcccctcaccatgggagacagacaggtacacaatgacaacatacctttaaa

SEQ ID NO: 2678 - DNA, 122 bp, Homo sapiens
  misc_feature (61)..(62): /note="This region represents a CpG dinucleotide"
  misc_feature (61)..(61): /note="Nucleotide may be methylated to form 5-methylcytosine"
tggccaaaataagtcatatggccaaaccctgagtcagcatgggaggggactccccaagggcgtggatacgagcagatgtgaacaaaccgggaattattacttctacaatccaccacacgaag

SEQ ID NO: 2679 - DNA, 122 bp, Homo sapiens
  misc_feature (61)..(62): /note="This region represents a CpG dinucleotide"
  misc_feature (61)..(61): /note="Nucleotide may be methylated to form 5-methylcytosine"
tcttttgccaagactctactctccttttactctgtccctgtctcatagctgtatgttaagcgacttcctgtagactgttctcagtgttatttactgtagcttcctgccaggcaggagggagg

SEQ ID NO: 2680 - DNA, 122 bp, Homo sapiens
  misc_feature (61)..(62): /note="This region represents a CpG dinucleotide"
  misc_feature (61)..(61): /note="Nucleotide may be methylated to form 5-methylcytosine"
gccccctccgcaataaacgtcactgctccgccccccccagctgattcattggctgctattcgtttctaacgttcaccaatggtagataacatccgccccatccgctggtcccattggttcag

SEQ ID NO: 2681 - DNA, 122 bp, Homo sapiens
  misc_feature (61)..(62): /note="This region represents a CpG dinucleotide"
  misc_feature (61)..(61): /note="Nucleotide may be methylated to form 5-methylcytosine"
gagcaaatccagagccatggtctttccaaggtcctgtgctgcctctggcatttacaaggacggccctgctgcaagaatgggcccaagcccatatcccacatgcttggcattcccttgcacag

SEQ ID NO: 2682 - DNA, 122 bp, Homo sapiens
  misc_feature (61)..(62): /note="This region represents a CpG dinucleotide"
  misc_feature (61)..(61): /note="Nucleotide may be methylated to form 5-methylcytosine"
ttttactctccatgtggccatcatggacgaggacgaagagggacttgatttttcctttaacgagaagaatgtttaagctctgaatttttaaccaatttttatgctcgttactctgctgtagg

SEQ ID NO: 2683 - DNA, 122 bp, Homo sapiens
  misc_feature (61)..(62): /note="This region represents a CpG dinucleotide"
  misc_feature (61)..(61): /note="Nucleotide may be methylated to form 5-methylcytosine"
gtgtgtacacacgcgtgtggagggcctgccttgttcgtgagcaccagccacgccacgtgacgacaggcatcattactaccgcatcgaccgccaggtgctccttccctgagtcaggagccatg

SEQ ID NO: 2684 - DNA, 122 bp, Homo sapiens
  misc_feature (61)..(62): /note="This region represents a CpG dinucleotide"
  misc_feature (61)..(61): /note="Nucleotide may be methylated to form 5-methylcytosine"
accagcatatgctacaaagtacgcaataactgtttggtatttgatgcagatgagagagcacgagctaaagtaaaatatctaacaggtgaaaaaggtgtgaggattgaactcaataaaccttc

SEQ ID NO: 2685 - DNA, 122 bp, Homo sapiens
  misc_feature (61)..(62): /note="This region represents a CpG dinucleotide"
  misc_feature (61)..(61): /note="Nucleotide may be methylated to form 5-methylcytosine"
acaacaacaaaattgcgtaacaatgcatttctcagaacatatccctgtcatgaagtgactcgtgactatatttcttatttctcgcctgtgtcaaagagtgtcaccatgcaggttgccaacag

SEQ ID NO: 2686 - DNA, 122 bp, Homo sapiens
  misc_feature (61)..(62): /note="This region represents a CpG dinucleotide"
  misc_feature (61)..(61): /note="Nucleotide may be methylated to form 5-methylcytosine"
ggatgctgcctctgcctccacggctgcctccaccaactcacagctcatgatacaggttctcgtctcccccacggaacacaaggctgacgtctcaacacggagccaagaaccaaatgacacgg

SEQ ID NO: 2687 - DNA, 122 bp, Homo sapiens
  misc_feature (61)..(62): /note="This region represents a CpG dinucleotide"
  misc_feature (61)..(61): /note="Nucleotide may be methylated to form 5-methylcytosine"
agcatgagatactagtacaggtggacaggtcagggtttgcttactcttcactgaactctacgtagtaggtacaactgccttggatcaaaaacaatttttagagaccctgatagaggattaat

SEQ ID NO: 2688 - DNA, 122 bp, Homo sapiens
  misc_feature (61)..(62): /note="This region represents a CpG dinucleotide"
  misc_feature (61)..(61): /note="Nucleotide may be methylated to form 5-methylcytosine"
atgtatgaagagcctctggcaggtcagtgggtgcgtgcaccgtgcaccagtgaagcagggcgaggcattgcctcactcgggaagcgcaaggggtcagggagttccctttcctagtcaaagaa

SEQ ID NO: 2689 - DNA, 122 bp, Homo sapiens
  misc_feature (61)..(62): /note="This region represents a CpG dinucleotide"
  misc_feature (61)..(61): /note="Nucleotide may be methylated to form 5-methylcytosine"
acttcccgagttaatgagtagaaacagaacatattgcaacgtataattgtcacgattatgcgggctgttcatttagcgttttcgtgtgcacatgcattcagctgccacatctgcagtgcacg

SEQ ID NO: 2690 - DNA, 122 bp, Homo sapiens
  misc_feature (61)..(62): /note="This region represents a CpG dinucleotide"
  misc_feature (61)..(61): /note="Nucleotide may be methylated to form 5-methylcytosine"
tcttatgcaaatgaggtgattaataaaatagtgtgtaggactggtggcgattctagatgacgtcatatacacgtttgtccaatccaaagaagcatgtttcataacagcgattccattggttg

SEQ ID NO: 2691 - DNA, 122 bp, Homo sapiens
  misc_feature (61)..(62): /note="This region represents a CpG dinucleotide"
  misc_feature (61)..(61): /note="Nucleotide may be methylated to form 5-methylcytosine"
ggtcgggcgggggccccggcaggcgcgcccagtccgcgcccttcgtcccagcgccggccgcgcagctccgcctgggtggacaagttctctccgagtcccgtgcactcggcgcgccggagcgc

SEQ ID NO: 2692 - DNA, 122 bp, Homo sapiens
  misc_feature (61)..(62): /note="This region represents a CpG dinucleotide"
  misc_feature (61)..(61): /note="Nucleotide may be methylated to form 5-methylcytosine"
cctttttcatcttttgtgtcttactctgatctataacccatgctaagccaaaataatccacgtggatggtaatttacctcaaaattgatgcactaattggagataatcccttctccacactc

SEQ ID NO: 2693 - DNA, 122 bp, Homo sapiens
  misc_feature (61)..(62): /note="This region represents a CpG dinucleotide"
  misc_feature (61)..(61): /note="Nucleotide may be methylated to form 5-methylcytosine"
aaactgagaaacatgaagtcactgagctctacagatatgaatagtggcatccactgaacccgctcataagggcaagatttcaacctctaagagagggctaagtcgctggctatacagtaccc

SEQ ID NO: 2694 - DNA, 122 bp, Homo sapiens
  misc_feature (61)..(62): /note="This region represents a CpG dinucleotide"
  misc_feature (61)..(61): /note="Nucleotide may be methylated to form 5-methylcytosine"
cagggatgcgggcgtgggagcctgaggtcccagctactcaggaagcagcggcgggaggatcgctcagcctgggggtccaggacagcctgcgcgacaatgtaacattccctcccgcagtctct

SEQ ID NO: 2695 - DNA, 122 bp, Homo sapiens
  misc_feature (61)..(62): /note="This region represents a CpG dinucleotide"
  misc_feature (61)..(61): /note="Nucleotide may be methylated to form 5-methylcytosine"
ttagttacaaagaatttcagaaactcctatttaagaaaacaaaacaaaacaaaaaaaaaacgaaggaaaacttaattgaattaagatctgcaaaagaacttcgaatgcgtgtctttccttat

SEQ ID NO: 2696 - DNA, 122 bp, Homo sapiens
  misc_feature (61)..(62): /note="This region represents a CpG dinucleotide"
  misc_feature (61)..(61): /note="Nucleotide may be methylated to form 5-methylcytosine"
gctaatagcaaagccccttggaatccattcatttacccactgattagtgaacacctcccacgtgttcagtaagtgccaggcatgcagcagtgaacagagcaaaccaaatcccgcttgtcaga

SEQ ID NO: 2697 - DNA, 122 bp, Homo sapiens
  misc_feature (61)..(62): /note="This region represents a CpG dinucleotide"
  misc_feature (61)..(61): /note="Nucleotide may be methylated to form 5-methylcytosine"
aatgtggaagcagaaagaccacatgactgacagtttaaagtatagtcatgtgtcacttaacggtgaggatatgttccgagaaatgcctccttaggcaattctgttgtgtgcacatcacagag

SEQ ID NO: 2698 - DNA, 122 bp, Homo sapiens
  misc_feature (61)..(62): /note="This region represents a CpG dinucleotide"
  misc_feature (61)..(61): /note="Nucleotide may be methylated to form 5-methylcytosine"
ctctcctcagacatttgttgcaaagcgtgagcataatccgttctctccctaaaacctgttcgtgtgaaagcttctcagacttgcaaagaatgcgcttttgttcccggaaacagatttgcttc

SEQ ID NO: 2699 - DNA, 122 bp, Homo sapiens
  misc_feature (61)..(62): /note="This region represents a CpG dinucleotide"
  misc_feature (61)..(61): /note="Nucleotide may be methylated to form 5-methylcytosine"
agctcaggcaatccacccacctcagcctctcaaagtgctgggattacaggcgtgagtcaccgtgcccggccagattctgcatttctaacaagccccaggtcataccaatgctgctggtccac

SEQ ID NO: 2700 - DNA, 122 bp, Homo sapiens
  misc_feature (61)..(62): /note="This region represents a CpG dinucleotide"
  misc_feature (61)..(61): /note="Nucleotide may be methylated to form 5-methylcytosine"
caaggtcatacaaaacttttagaggcagtcagtctgctaagaaggctccagcaagagaaacgggatcttctgtttcaacaatcattacttaagaaaaaattaagaaaatgaaataagttttg

SEQ ID NO: 2701 - DNA, 122 bp, Homo sapiens
  misc_feature (61)..(62): /note="This region represents a CpG dinucleotide"
  misc_feature (61)..(61): /note="Nucleotide may be methylated to form 5-methylcytosine"
ggagtgaagcgtagagagagaagctttaatgtggataggaaagtctgaagtgagatataccgtccagttactctgggactcgttgagatcctgcaacaggagacagggagcctgagtaactg

SEQ ID NO: 2702 - DNA, 122 bp, Homo sapiens
  misc_feature (61)..(62): /note="This region represents a CpG dinucleotide"
  misc_feature (61)..(61): /note="Nucleotide may be methylated to form 5-methylcytosine"
ggaggtggccttattttcctcgcccgtctgagcagggtcaggagggtctcggggcaggcccggggggtggtgaacaggaacaccctccagtgccgggggtttctggtccccgggctcagtgc

SEQ ID NO: 2703 - DNA, 122 bp, Homo sapiens
  misc_feature (61)..(62): /note="This region represents a CpG dinucleotide"
  misc_feature (61)..(61): /note="Nucleotide may be methylated to form 5-methylcytosine"
cgtggagctcccagcgaatcggttgaaaactctgaaattctctgctcgctctctgtaaaacgtgcattcacacgcacacccagaatgatgggtgctccgatatctgatcgctgggctccaca

SEQ ID NO: 2704 - DNA, 122 bp, Homo sapiens
  misc_feature (61)..(62): /note="This region represents a CpG dinucleotide"
  misc_feature (61)..(61): /note="Nucleotide may be methylated to form 5-methylcytosine"
ccccacttcccgagcctctacccgccaaattatcttttaaaactccgatcccgaaatgctcgatttgagtaataatttttgagtaataattttttgagtaataatttgatatgagactgatt

SEQ ID NO: 2705 - DNA, 122 bp, Homo sapiens
  misc_feature (61)..(62): /note="This region represents a CpG dinucleotide"
  misc_feature (61)..(61): /note="Nucleotide may be methylated to form 5-methylcytosine"
ggttcgtgctcctatgagaatctaatgctactgctgatctgacaagaggcggagttcaggcggtagtgggagccatagggaacaactgtaaatacagatgacgcttcactcctgtgcagccc

SEQ ID NO: 2706 - DNA, 122 bp, Homo sapiens
  misc_feature (61)..(62): /note="This region represents a CpG dinucleotide"
  misc_feature (61)..(61): /note="Nucleotide may be methylated to form 5-methylcytosine"
ttgaaccagtacttataccagcagcccatagttactagggccttcagactcaaactgcaacgtacatcattggctcctctggttttcagtctttcagcttggactggaactgcacccggtct

SEQ ID NO: 2707 - DNA, 122 bp, Homo sapiens
  misc_feature (61)..(62): /note="This region represents a CpG dinucleotide"
  misc_feature (61)..(61): /note="Nucleotide may be methylated to form 5-methylcytosine"
tggctcagccacatgtgggacgccaaagtcctggaggtgccccatgcgtgtgatggctcccggaggttatcacggacaggacacgactggattggcagggaacctccgacagaagcagaacg

SEQ ID NO: 2708 - DNA, 122 bp, Homo sapiens
  misc_feature (61)..(62): /note="This region represents a CpG dinucleotide"
  misc_feature (61)..(61): /note="Nucleotide may be methylated to form 5-methylcytosine"
atcatttacaggaaaaaccagaagttgcagctgcatgctatatgactcaggtcacatggccgcattgctctcaaggctcaacataatttaaagttccgccagctttaggtttgaattattta

SEQ ID NO: 2709 - DNA, 122 bp, Homo sapiens
  misc_feature (61)..(62): /note="This region represents a CpG dinucleotide"
  misc_feature (61)..(61): /note="Nucleotide may be methylated to form 5-methylcytosine"
tctctcaggcttgctgccaaaagccttttgtgttttgttttgtatcattatgaagtcatgcgtttaatcacattcgagtgtttcagtgcttcgcagatgtccttgatgctcatattgttccc

SEQ ID NO: 2710 - DNA, 122 bp, Homo sapiens
  misc_feature (61)..(62): /note="This region represents a CpG dinucleotide"
  misc_feature (61)..(61): /note="Nucleotide may be methylated to form 5-methylcytosine"
agcggcacgggctgcctaacagactgtcccattttctttcgggtttggaaggggccacgacggagcttaggactccataagaatgggcaaaaacaaggagcttatgcccctgaacccagaca

SEQ ID NO: 2711 - DNA, 122 bp, Homo sapiens
  misc_feature (61)..(62): /note="This region represents a CpG dinucleotide"
  misc_feature (61)..(61): /note="Nucleotide may be methylated to form 5-methylcytosine"
ggtgactttgctatcattgcaggaagtgtgatgggtgctttgtgtattttgtgataagaacgacttgttaagctttgagtgaaagccagagcctcagacaccgttccactgagaaaacttga

SEQ ID NO: 2712 - DNA, 122 bp, Homo sapiens
  misc_feature (61)..(62): /note="This region represents a CpG dinucleotide"
  misc_feature (61)..(61): /note="Nucleotide may be methylated to form 5-methylcytosine"
ggcctgggggaaggggtgtgagacccgcccttccccatgggctgggcatctaagaagggacgtatcagaagggggctttggagggggcagtctacagagggagcaccaagtcacagaagtgt

SEQ ID NO: 2713 - DNA, 122 bp, Homo sapiens
  misc_feature (61)..(62): /note="This region represents a CpG dinucleotide"
  misc_feature (61)..(61): /note="Nucleotide may be methylated to form 5-methylcytosine"
cacggccgggactccgtccgactgcacacactgtgtttaacaagctttataaggagccatcgggctttattatggctctgcctgactccaacaaaaactgagcctggaggcccggggacacg

SEQ ID NO: 2714 - DNA, 122 bp, Homo sapiens
  misc_feature (61)..(62): /note="This region represents a CpG dinucleotide"
  misc_feature (61)..(61): /note="Nucleotide may be methylated to form 5-methylcytosine"
gcccttcagcagtcattttcacctccagggcatctctaaaccatgagttgaacaacaaggcgagtgagtaaggtacactttcagtcagaaatacagctttggctagatggaaaaaaaaagag

SEQ ID NO: 2715 - DNA, 122 bp, Homo sapiens
  misc_feature (61)..(62): /note="This region represents a CpG dinucleotide"
  misc_feature (61)..(61): /note="Nucleotide may be methylated to form 5-methylcytosine"
agtcatcctaaaaagtttctacaggtggggagaaagctgagcttttaactcagagtcacacggtcaaatgcatgttcatgaaacaaatttttggtgatgatatgtaggaggaaacaagacag

SEQ ID NO: 2716 - DNA, 122 bp, Homo sapiens
  misc_feature (61)..(62): /note="This region represents a CpG dinucleotide"
  misc_feature (61)..(61): /note="Nucleotide may be methylated to form 5-methylcytosine"
cttaaactggaccaagaaatcctctgcggagaatcacggcgggtcagtcaggccccagcacggccctagccccagcccccagccggaccgcacccttcagccgctgccctgacccggccagc

SEQ ID NO: 2717 - DNA, 122 bp, Homo sapiens
  misc_feature (61)..(62): /note="This region represents a CpG dinucleotide"
  misc_feature (61)..(61): /note="Nucleotide may be methylated to form 5-methylcytosine"
ctcatgtcctgcggatccttcgcccccgacgcgccccccaacacacaaacccccagaatccgcccccagcctacagcgcgacgtcagcccgccccagccgacttggaggtctcgggtctgag

SEQ ID NO: 2718 - DNA, 122 bp, Homo sapiens
  misc_feature (61)..(62): /note="This region represents a CpG dinucleotide"
  misc_feature (61)..(61): /note="Nucleotide may be methylated to form 5-methylcytosine"
ggcccaattcccactcccccaaacacacacaagtacacactgactaaggcacagctagggcgggggcgggcagaaggccccttgggaggacgtggcgccacagctgcaatgggtgtgggggt

SEQ ID NO: 2719 - DNA, 122 bp, Homo sapiens
  misc_feature (61)..(62): /note="This region represents a CpG dinucleotide"
  misc_feature (61)..(61): /note="Nucleotide may be methylated to form 5-methylcytosine"
ccatagttgagcagaggaaaaaaactgctcagggtagggaaaggaatttgcagactgccacggcaggttaatttagactaatttggaccccaatcatgagagtaacacatgtcctctggaat

SEQ ID NO: 2720 - DNA, 122 bp, Homo sapiens
  misc_feature (61)..(62): /note="This region represents a CpG dinucleotide"
  misc_feature (61)..(61): /note="Nucleotide may be methylated to form 5-methylcytosine"
tgaacagaagccagagagctactagccagagaggattttaattgtgcttcatcaattcctcgaattgcttctctttttgttagacatctgttccctctctagccaaggcctgggactcctgc

SEQ ID NO: 2721 - DNA, 122 bp, Homo sapiens
  misc_feature (61)..(62): /note="This region represents a CpG dinucleotide"
  misc_feature (61)..(61): /note="Nucleotide may be methylated to form 5-methylcytosine"
caaaaattcaccaattccggaaacactgcgaggcagcagcgtgtcttacacagacggaaccgccgttcccctgccatgttcaggcgggtcggcaggctttgttcgttattctgagtggcagt

SEQ ID NO: 2722 - DNA, 122 bp, Homo sapiens
  misc_feature (61)..(62): /note="This region represents a CpG dinucleotide"
  misc_feature (61)..(61): /note="Nucleotide may be methylated to form 5-methylcytosine"
tctgagtcctaacactgaaatgatactccagtacattgagaaggaagaaagcaatgttaccgatgcttaaatgccacggcatcctgcccacaagaggctcttgggcatagcttacatttctc

SEQ ID NO: 2723 - DNA, 122 bp, Homo sapiens
  misc_feature (61)..(62): /note="This region represents a CpG dinucleotide"
  misc_feature (61)..(61): /note="Nucleotide may be methylated to form 5-methylcytosine"
ttttatcgaatgttagtatactctacacgctgtcctgcaccttgctttttttactctatgcgtcttgcagatcattttatataatacatagagaggtgactcattctttttaaaggttacat

SEQ ID NO: 2724 - DNA, 122 bp, Homo sapiens
  misc_feature (61)..(62): /note="This region represents a CpG dinucleotide"
  misc_feature (61)..(61): /note="Nucleotide may be methylated to form 5-methylcytosine"
aaaagattaaataagatgtccaagttcacgcatcacataaaggcgcaaaacctggatctgcgttccaagggtctgaaatccaaaggggcttggggatttcacgaggtctgaatctaaaactg

SEQ ID NO: 2725 - DNA, 122 bp, Homo sapiens
  misc_feature (61)..(62): /note="This region represents a CpG dinucleotide"
  misc_feature (61)..(61): /note="Nucleotide may be methylated to form 5-methylcytosine"
acactgtttcagagtaccactgactgctcaagcccacctctgattcttactgctgaaatgcgtatgtgtctacttttatcagattttgcacaagtcacttttcctactaagatatccttcct

SEQ ID NO: 2726 - DNA, 122 bp, Homo sapiens
  misc_feature (61)..(62): /note="This region represents a CpG dinucleotide"
  misc_feature (61)..(61): /note="Nucleotide may be methylated to form 5-methylcytosine"
cagctctgaggagagatgtgtaagcagctgtacctcctgtggagctacctcttcctctagcggtctgtgggactcagccagcttcacaagattcaggaaatgaggagggcggggtgataaaa

SEQ ID NO: 2727 - DNA, 122 bp, Homo sapiens
  misc_feature (61)..(62): /note="This region represents a CpG dinucleotide"
  misc_feature (61)..(61): /note="Nucleotide may be methylated to form 5-methylcytosine"
ctcatgctccctcagggtccacagctgtgtactaagtgctggtgctggcacagtgatgcacgtccttctcacatcaaactcggacagggctagggtgtggcctcagaacagcccacttctcc

SEQ ID NO: 2728 - DNA, 122 bp, Homo sapiens
  misc_feature (61)..(62): /note="This region represents a CpG dinucleotide"
  misc_feature (61)..(61): /note="Nucleotide may be methylated to form 5-methylcytosine"
tttagcactactctctctcctagaacgagagccccttgaagtccaaagctaggtcttaatcgtctttttatgctctggatatgtagtgcctgtgtaaggtgttgtagggcctccataagtat

SEQ ID NO: 2729 - DNA, 122 bp, Homo sapiens
  misc_feature (61)..(62): /note="This region represents a CpG dinucleotide"
  misc_feature (61)..(61): /note="Nucleotide may be methylated to form 5-methylcytosine"
taggtctggggtggtgtctaagaatgtgcttttctaacgagttcccaggtgaggctgatgcggccaacctggggcctacactttgagaaccactggtatgattgtagcatatgaaggaggca

SEQ ID NO: 2730 - DNA, 122 bp, Homo sapiens
  misc_feature (61)..(62): /note="This region represents a CpG dinucleotide"
  misc_feature (61)..(61): /note="Nucleotide may be methylated to form 5-methylcytosine"
aagataagaggccagtggctgggtgtcgtattacaaagctgagaggaagaagcgaagaaacgaagagctctctcaagaaagatcagagaaagctgtgattatgcaatatgcccactgcagac

SEQ ID NO: 2731 - DNA, 122 bp, Homo sapiens
  misc_feature (61)..(62): /note="This region represents a CpG dinucleotide"
  misc_feature (61)..(61): /note="Nucleotide may be methylated to form 5-methylcytosine"
tcatccacggctaaattaacagccccagttgtggcacaaaggaagctttgaaggctgcaccggcttggtcctccagttgccaactggaggtaggtttaatgtaacatattcttgctgcttaa

SEQ ID NO: 2732 - DNA, 122 bp, Homo sapiens
  misc_feature (61)..(62): /note="This region represents a CpG dinucleotide"
  misc_feature (61)..(61): /note="Nucleotide may be methylated to form 5-methylcytosine"
caagtcacaggcactacgaatttgaatttcctgactctcacttggtttagtggatgattacggcgtcagcatgtgcatttgaaacaggtccccaaagaggaagcacattcaggtcacttgaa

SEQ ID NO: 2733 - DNA, 122 bp, Homo sapiens
  misc_feature (61)..(62): /note="This region represents a CpG dinucleotide"
  misc_feature (61)..(61): /note="Nucleotide may be methylated to form 5-methylcytosine"
ccctctgcagcagcctctgggtttaaaatgaccagcggagcaatcttcctgcttgccaatcgccactcccatgccctggataccaatgtcaagtggagcgtgcacggaggccatggccaaag

SEQ ID NO: 2734 - DNA, 122 bp, Homo sapiens
  misc_feature (61)..(62): /note="This region represents a CpG dinucleotide"
  misc_feature (61)..(61): /note="Nucleotide may be methylated to form 5-methylcytosine"
ccatactcctgagtgcccaggtgaagctggggcggttctgtgcctctgtgtctctgtgctcgcggtatctgtttatctccctgtgagtttctgggtttgtgcacctcggaagttggcagtca

SEQ ID NO: 2735 - DNA, 122 bp, Homo sapiens
  misc_feature (61)..(62): /note="This region represents a CpG dinucleotide"
  misc_feature (61)..(61): /note="Nucleotide may be methylated to form 5-methylcytosine"
tacgacaaggaactgccattagagccttaggcgaattcaccaactgttcccacttctcaccggtgtcaccttcccaccgttcccactcctcactggcgttaccttccctccgttcccacttc

SEQ ID NO: 2736 - DNA, 122 bp, Homo sapiens
  misc_feature (61)..(62): /note="This region represents a CpG dinucleotide"
  misc_feature (61)..(61): /note="Nucleotide may be methylated to form 5-methylcytosine"
tagcagtggtgagttagggaaggagcagaataaaagatattctacctagcaatggggacccgctgtagtagtaagaaactaagtaccttaagggactggggagttttcttaaacctctctgg

SEQ ID NO: 2737 - DNA, 122 bp, Homo sapiens
  misc_feature (61)..(62): /note="This region represents a CpG dinucleotide"
  misc_feature (61)..(61): /note="Nucleotide may be methylated to form 5-methylcytosine"
gctgtttggggcttcccttgctctctggcgtgtttctcttaccagatgatgcctgcaccacgtgataacacagcaaggagaccctcgccggatatggcccaatcttggacttcccagcctcc

SEQ ID NO: 2738 - DNA, 122 bp, Homo sapiens
  misc_feature (61)..(62): /note="This region represents a CpG dinucleotide"
  misc_feature (61)..(61): /note="Nucleotide may be methylated to form 5-methylcytosine"
aatcaaagtcacaatgagacaacgcacacccacgaggatgtctggaatccaaatgcaaagcgagtgttggctgttgggagagacgcgggacctgcacacactgctgggggcaggtgaagcgg

SEQ ID NO: 2739 - DNA, 122 bp, Homo sapiens
  misc_feature (61)..(62): /note="This region represents a CpG dinucleotide"
  misc_feature (61)..(61): /note="Nucleotide may be methylated to form 5-methylcytosine"
ggttttggtgtttcctttctggtattaggttttccagagagaggctgttagcctgtctctcgcccactccaccactgtgaatcctggctactggggctagttccttgctaggaaaaaaaaac

SEQ ID NO: 2740 - DNA, 122 bp, Homo sapiens
  misc_feature (61)..(62): /note="This region represents a CpG dinucleotide"
  misc_feature (61)..(61): /note="Nucleotide may be methylated to form 5-methylcytosine"
ctgggattgctcctgtttctgaaagggttaactcatccaagttagagaatgatccatcttcgacaagacaaacaattatatttgttgatccccaaaggcaaccaacaatgcacctaaaaatg

SEQ ID NO: 2741 - DNA, 122 bp, Homo sapiens
  misc_feature (61)..(62): /note="This region represents a CpG dinucleotide"
  misc_feature (61)..(61): /note="Nucleotide may be methylated to form 5-methylcytosine"
gggggaaaatggccaggtcagaaagcccctggcttcaagtttcttttgtgctgtaaactacggaaagagtgtgtcctcctttcttcctggttccttaactggcttctttttggctaactgaa

SEQ ID NO: 2742 - DNA, 122 bp, Homo sapiens
  misc_feature (61)..(62): /note="This region represents a CpG dinucleotide"
  misc_feature (61)..(61): /note="Nucleotide may be methylated to form 5-methylcytosine"
ccaaggagttttacattttaaaataatcaagcgtgcctactgcttgccaggccctgctctcgccttcactcgcattattcaattaatcgacacaggcctgtgcagtgcgtcttaatgacaag

SEQ ID NO: 2743 - DNA, 122 bp, Homo sapiens
  misc_feature (61)..(62): /note="This region represents a CpG dinucleotide"
  misc_feature (61)..(61): /note="Nucleotide may be methylated to form 5-methylcytosine"
ccctcatgcttcctgggatcaactcccaagttacctgcttgtacccaagtctgtctcaggcgctgctttggatggagcccagactcagaatgttacctcacttgcctgcacctcagttttct

SEQ ID NO: 2744 - DNA, 122 bp, Homo sapiens
  misc_feature (61)..(62): /note="This region represents a CpG dinucleotide"
  misc_feature (61)..(61): /note="Nucleotide may be methylated to form 5-methylcytosine"
tcccagaaagctttgaagataatcatatgtctacccctcccttttgactgatgatcttgacgtgatatacgcttatgtcagtgaggaaatagggaggctcttgcaatgagccaagagttgct

SEQ ID NO: 2745 - DNA, 122 bp, Homo sapiens
  misc_feature (61)..(62): /note="This region represents a CpG dinucleotide"
  misc_feature (61)..(61): /note="Nucleotide may be methylated to form 5-methylcytosine"
tcagccataagatggcggctgcgctgactgcgggatcccgggcgtcctgtcttttccctgcgcagtgactgggccctgacctggagtcctctcagggcagctctggaccctcagcggcgcgt

SEQ ID NO: 2746 - DNA, 122 bp, Homo sapiens
  misc_feature (61)..(62): /note="This region represents a CpG dinucleotide"
  misc_feature (61)..(61): /note="Nucleotide may be methylated to form 5-methylcytosine"
tgaaacaaagctttgaatggctcacccacttcagtcttaagcacttttcatcactaataacgaggagcctaacatccctaagcctcaggcttttgcttttatttccttatagttgttttatc

SEQ ID NO: 2747 - DNA, 122 bp, Homo sapiens
  misc_feature (61)..(62): /note="This region represents a CpG dinucleotide"
  misc_feature (61)..(61): /note="Nucleotide may be methylated to form 5-methylcytosine"
tggcttcagatggggctttgaaagctgtaattttaaagacaattaaattgctcaatgcaacgagctatgcaatacctccttaaattgctcaatacattggaagatttgggaaccactgggta

SEQ ID NO: 2748 - DNA, 122 bp, Homo sapiens
  misc_feature (61)..(62): /note="This region represents a CpG dinucleotide"
  misc_feature (61)..(61): /note="Nucleotide may be methylated to form 5-methylcytosine"
ataaaaatccttacaatccctttagttcacattcacaggccgagcatagtgattcaccttcgcccttccttcagctggggcctgttgcaggtgagaggctgtgatccaggaaaggtgggagg

SEQ ID NO: 2749 - DNA, 122 bp, Homo sapiens
  misc_feature (61)..(62): /note="This region represents a CpG dinucleotide"
  misc_feature (61)..(61): /note="Nucleotide may be methylated to form 5-methylcytosine"
atttccctatcttacaattctgcaaggtcggtactttaattcccatttcacaaatgaggacgctgaagcttaggggagtgaagtaatttgcccaagttcacaaaaccagtcaaattggaagt

SEQ ID NO: 2750 - DNA, 122 bp, Homo sapiens
  misc_feature (61)..(62): /note="This region represents a CpG dinucleotide"
  misc_feature (61)..(61): /note="Nucleotide may be methylated to form 5-methylcytosine"
cccggggttattttgcaaacccaactgtttcaaagtgaccaccagccacacccacagaagcggccttgagctgcccagttctttttctttggcggggggagagggggcggataagatcatta

SEQ ID NO: 2751 - DNA, 122 bp, Homo sapiens
  misc_feature (61)..(62): /note="This region represents a CpG dinucleotide"
  misc_feature (61)..(61): /note="Nucleotide may be methylated to form 5-methylcytosine"
gccaccatgcccggctaatttttataattttagtagagatggggtttcactgtgttggcccgactggtctcagactcctgacctcaagcaatcctgcctgcctcggcctcccaaagtgttca

SEQ ID NO: 2752 - DNA, 122 bp, Homo sapiens
  misc_feature (61)..(62): /note="This region represents a CpG dinucleotide"
  misc_feature (61)..(61): /note="Nucleotide may be methylated to form 5-methylcytosine"
tttgtggcttcgagtcccagcttcatcatccctaaaatgggtataattccattacttccccgggtcacttgagaaaataacagaatcagcgatgctgagcgcccctcccagtacttggaacc

SEQ ID NO: 2753 - DNA, 122 bp, Homo sapiens
  misc_feature (61)..(62): /note="This region represents a CpG dinucleotide"
  misc_feature (61)..(61): /note="Nucleotide may be methylated to form 5-methylcytosine"
gaactaatacagtctcctggatttgcaaggagaatttgtgttgtctcaataatctccctacgtgttatgccttcagggtctgaaagtgaaatgatcacaaactgtaagggcctatgaactag

SEQ ID NO: 2754 - DNA, 122 bp, Homo sapiens
  misc_feature (61)..(62): /note="This region represents a CpG dinucleotide"
  misc_feature (61)..(61): /note="Nucleotide may be methylated to form 5-methylcytosine"
ctcatcgagccgtagccggctcctcagtacagtgacttgcacacaagctccaaggagccgcgcttatctcctctggccagcctggcgttgcaccgtttgtccgcctgctggggcctggtctg

SEQ ID NO: 2755 - DNA, 122 bp, Homo sapiens
  misc_feature (61)..(62): /note="This region represents a CpG dinucleotide"
  misc_feature (61)..(61): /note="Nucleotide may be methylated to form 5-methylcytosine"
tggttgatctctcagtatttcataatgctctcctaaagctcagttctacagtagggaactcgagctgaggcaatgctctgtgaatacacttctaacttttgtagacctttgcttcctccaaa

SEQ ID NO: 2756 - DNA, 122 bp, Homo sapiens
  misc_feature (61)..(62): /note="This region represents a CpG dinucleotide"
  misc_feature (61)..(61): /note="Nucleotide may be methylated to form 5-methylcytosine"
agattccaacctctccaggctgtgccacttactagctgtgtggctacagttatgtggctgcgtgagcctcaagttcctcatgtataaaacggaggtaaaaacagtcactgcctctggggttg

SEQ ID NO: 2757 - DNA, 122 bp, Homo sapiens
  misc_feature (61)..(62): /note="This region represents a CpG dinucleotide"
  misc_feature (61)..(61): /note="Nucleotide may be methylated to form 5-methylcytosine"
acttcaaagcccaagttttctcctttgtgttgtctcctgagtcattttcctgtatagccccgctgaataagcattttccaaattatattttgtattgtgcaaaacttcacttccttttttat

SEQ ID NO: 2758 - DNA, 122 bp, Homo sapiens
  misc_feature (61)..(62): /note="This region represents a CpG dinucleotide"
  misc_feature (61)..(61): /note="Nucleotide may be methylated to form 5-methylcytosine"
ctcaggaatttggattctaaattggccgctctagtttgaagctttttaagggctaacacacggtacttaactttcacaggtagactttcaacaaagtctgtatctaaaacataaccgataag

SEQ ID NO: 2759 - DNA, 122 bp, Homo sapiens
  misc_feature (61)..(62): /note="This region represents a CpG dinucleotide"
  misc_feature (61)..(61): /note="Nucleotide may be methylated to form 5-methylcytosine"
tacctcccaggcccaagtgatggtctcacctcagcctcctgagtagctgggactaaggtgcgtgcatgccaccactcctggctacccaggctgatctggaactcttgagctcaagcaatcca

SEQ ID NO: 2760 - DNA, 122 bp, Homo sapiens
  misc_feature (61)..(62): /note="This region represents a CpG dinucleotide"
  misc_feature (61)..(61): /note="Nucleotide may be methylated to form 5-methylcytosine"
gaaatcctaaccctcaaaatgacggtattaagaggcagagccgttgggaggttgttaggtcgtaaaaagccctcatgaatgggattagtgtccccataaaacaggccccaagagacccctca

SEQ ID NO: 2761 - DNA, 122 bp, Homo sapiens
  misc_feature (61)..(62): /note="This region represents a CpG dinucleotide"
  misc_feature (61)..(61): /note="Nucleotide may be methylated to form 5-methylcytosine"
tcttcaaattgtctttgatgcttttagtacaccttgcacttttttcttgctatctagacacgaagtactgagaaacagaaactggtataaataggtcttcagtgatgtggtattaaggtgtt

SEQ ID NO: 2762 - DNA, 122 bp, Homo sapiens
  misc_feature (61)..(62): /note="This region represents a CpG dinucleotide"
  misc_feature (61)..(61): /note="Nucleotide may be methylated to form 5-methylcytosine"
ctccggtgatccacctgcattggcctcccaaagtgctgggattacaggcgtgagccactgcgcctgaccggttacttaactttctcaaggtcccacagctagtaagtgaggaagctctggca

SEQ ID NO: 2763 - DNA, 122 bp, Homo sapiens
  misc_feature (61)..(62): /note="This region represents a CpG dinucleotide"
  misc_feature (61)..(61): /note="Nucleotide may be methylated to form 5-methylcytosine"
cattgatgattcctttctttatattgagtgaaggaaaccagaaacaactctatgagtcaacgtatgtgaaactgccggaaaaggcaaaactaagctatactgacaggaagatctgtggttgc

SEQ ID NO: 2764 - DNA, 122 bp, Homo sapiens
  misc_feature (61)..(62): /note="This region represents a CpG dinucleotide"
  misc_feature (61)..(61): /note="Nucleotide may be methylated to form 5-methylcytosine"
ccaggtggtggcggtggcggcccgcgatctgagccgtgcgaaggagtttgcacagaaacacgacatccccaaggcctacggctcctatgaggagctggccaaggacccgagcgtgggtgagt

SEQ ID NO: 2765 - DNA, 122 bp, Homo sapiens
  misc_feature (61)..(62): /note="This region represents a CpG dinucleotide"
  misc_feature (61)..(61): /note="Nucleotide may be methylated to form 5-methylcytosine"
aaaccttcctcatagctgatgctgtcacagtcaaataatgaccttcctttccaagttgcacgggttctcaacttttgagaagttttctgtaatcttcctgtgttcctgtaccccaaaacaca

SEQ ID NO: 2766 - DNA, 122 bp, Homo sapiens
  misc_feature (61)..(62): /note="This region represents a CpG dinucleotide"
  misc_feature (61)..(61): /note="Nucleotide may be methylated to form 5-methylcytosine"
tctatgttaattgttacaccccataaatgtgccgttgtttcctaatcattcgttgaagaccgagacctttttgctgaggacaggccccctgactggagtcccacactatctttctctcaaag

SEQ ID NO: 2767 - DNA, 122 bp, Homo sapiens
  misc_feature (61)..(62): /note="This region represents a CpG dinucleotide"
  misc_feature (61)..(61): /note="Nucleotide may be methylated to form 5-methylcytosine"
aacccggagatctgcaagcacaggaaggcaccaccacccttgatacgaggcagtggaggacgaaaagctaccaggaggagtagtccatccagtgatggctggaacctcagaaatccactcct

SEQ ID NO: 2768 - DNA, 122 bp, Homo sapiens
  misc_feature (61)..(62): /note="This region represents a CpG dinucleotide"
  misc_feature (61)..(61): /note="Nucleotide may be methylated to form 5-methylcytosine"
cctcactctccttgattatacttctacacaatgacttgattatattaggttggtgaaaaacgaattgcggttttgccactaaaagtaatggcaaattagaagtaatggcaatgccattaaaa

SEQ ID NO: 2769 - DNA, 122 bp, Homo sapiens
  misc_feature (61)..(62): /note="This region represents a CpG dinucleotide"
  misc_feature (61)..(61): /note="Nucleotide may be methylated to form 5-methylcytosine"
agggtccctgcagccggagtgggggtcctcggccggtgctggagtctgggtgctggatggcgcagccggcagcagcgcagagatggagagatgaaggcagcggcggggggggggggcggggg

SEQ ID NO: 2770 - DNA, 122 bp, Homo sapiens
  misc_feature (61)..(62): /note="This region represents a CpG dinucleotide"
  misc_feature (61)..(61): /note="Nucleotide may be methylated to form 5-methylcytosine"
agtggatacacatttaagcattatgatcattttgtgagcctttttcaaaactgcgctcaacgtccttgattttttccccttgtcatcagagcaccacagagaaagcctgcatcctggacacg

SEQ ID NO: 2771 - DNA, 122 bp, Homo sapiens
  misc_feature (61)..(62): /note="This region represents a CpG dinucleotide"
  misc_feature (61)..(61): /note="Nucleotide may be methylated to form 5-methylcytosine"
agacctaacaatggtcatatctttccatcctactcccaccttccttctctcttattatgacgttctggagaataagaccagtgtctttgaatgccccctagtgtggggcatgatgcctggca

SEQ ID NO: 2772 - DNA, 122 bp, Homo sapiens
  misc_feature (61)..(62): /note="This region represents a CpG dinucleotide"
  misc_feature (61)..(61): /note="Nucleotide may be methylated to form 5-methylcytosine"
catcgatcccacgtgcagctggcggccggtgcccatcaagtcggacttacacatcaaggacgaccctgatggcatcccctccaagcggttcaagaccatgagtcccagccagatgatcatgc

SEQ ID NO: 2773 - DNA, 122 bp, Homo sapiens
  misc_feature (61)..(62): /note="This region represents a CpG dinucleotide"
  misc_feature (61)..(61): /note="Nucleotide may be methylated to form 5-methylcytosine"
ccagctgtgggatatcaccatggtaacaggaatatacaatcaaagcaggtttccatgctacgatggcagcattactcatttaaagaatgtaatatgctgaagacaggaagaaacaatttcac

SEQ ID NO: 2774 - DNA, 122 bp, Homo sapiens
  misc_feature (61)..(62): /note="This region represents a CpG dinucleotide"
  misc_feature (61)..(61): /note="Nucleotide may be methylated to form 5-methylcytosine"
gcaattgactgcatgagtctggagtttaggggaagttcgggctgtaaataaagacttggacggataggcagttgtgtgctggtaatgtttaccaactgactctgtgaggggtggggttggta

SEQ ID NO: 2775 - DNA, 122 bp, Homo sapiens
  misc_feature (61)..(62): /note="This region represents a CpG dinucleotide"
  misc_feature (61)..(61): /note="Nucleotide may be methylated to form 5-methylcytosine"
ctaaagcaacatttcccagggtcccctgccacaacctctccctgggagctgggaattgagcgcagccagctggactctggttagtgggtttcataacgtgtttctgttttgcatagcgtaaa

SEQ ID NO: 2776 - DNA, 122 bp, Homo sapiens
  misc_feature (61)..(62): /note="This region represents a CpG dinucleotide"
  misc_feature (61)..(61): /note="Nucleotide may be methylated to form 5-methylcytosine"
aagctacaacgcatttgctgtttgctttctacactgctattattaacaatgcctgaccatcgtgagtggtcagtaatgctcaaagaatgcatgcctgctttcctatggtaatagttacagtt

SEQ ID NO: 2777 - DNA, 122 bp, Homo sapiens
  misc_feature (61)..(62): /note="This region represents a CpG dinucleotide"
  misc_feature (61)..(61): /note="Nucleotide may be methylated to form 5-methylcytosine"
gatgagctaaaaaaagaacaaaattgcaaaacaaatctcataatgttttaagaaagtttacgaatctgtgcttgactgcattcaaagctgtcatgctctgctggttgacaagcttggattaa

SEQ ID NO: 2778 - DNA, 122 bp, Homo sapiens
  misc_feature (61)..(62): /note="This region represents a CpG dinucleotide"
  misc_feature (61)..(61): /note="Nucleotide may be methylated to form 5-methylcytosine"
acgatcagaactgctatcatttcaagcccttccaagttcatggtcagctaggtcatggtccgaccacagccactgagaagtgctcctctgcctggctttctttgtaaagccattaaactaca

SEQ ID NO: 2779 - DNA, 122 bp, Homo sapiens
  misc_feature (61)..(62): /note="This region represents a CpG dinucleotide"
  misc_feature (61)..(61): /note="Nucleotide may be methylated to form 5-methylcytosine"
taaggtccaggcatgggaccctcgcccccgaatgccgtccttccccaccgggggggggggcgggaacataaaatggacccaagtcactgtcccttaaggagcggaccgcctgagccctggag

SEQ ID NO: 2780 - DNA, 122 bp, Homo sapiens
  misc_feature (61)..(62): /note="This region represents a CpG dinucleotide"
  misc_feature (61)..(61): /note="Nucleotide may be methylated to form 5-methylcytosine"
atgggagatgacacatattcctcttcttttttatctgtttattggtaaaacagtgcataccgagcttggctcagaacattctttattctgtacataactgattatatccttcagtgtttcca

SEQ ID NO: 2781 - DNA, 122 bp, Homo sapiens
  misc_feature (61)..(62): /note="This region represents a CpG dinucleotide"
  misc_feature (61)..(61): /note="Nucleotide may be methylated to form 5-methylcytosine"
gtttgcagaggaacatcttattataccaccgtttgttgatctggaagctgtttatctacccgtaaagaaggtgtttatttattgatgtgctaaatttggaatcctcagagctacaggtagtc

SEQ ID NO: 2782 - DNA, 122 bp, Homo sapiens
  misc_feature (61)..(62): /note="This region represents a CpG dinucleotide"
  misc_feature (61)..(61): /note="Nucleotide may be methylated to form 5-methylcytosine"
cacatctggaagcctctttctctaggtctggctgcctcctaggcagcattagggacgagtcgctctgccccatgccttactcctttctcacattctcacattctcacattctgtttctcctg

SEQ ID NO: 2783 - DNA, 122 bp, Homo sapiens
  misc_feature (61)..(62): /note="This region represents a CpG dinucleotide"
  misc_feature (61)..(61): /note="Nucleotide may be methylated to form 5-methylcytosine"
ttgttttgggaaactgaatctcctaacgcgatggactcgctctttatctccagcattgcccgctgccttggtgtctgctttgtttattacacagtgatgctaactttcttttatttagtgtt

SEQ ID NO: 2784 - DNA, 122 bp, Homo sapiens
  misc_feature (61)..(62): /note="This region represents a CpG dinucleotide"
  misc_feature (61)..(61): /note="Nucleotide may be methylated to form 5-methylcytosine"
atgtgacaagatttccttcctttttaagaccaaataacattccactgtatacacatatcacgtgtttatccatttatctgtcaatggacatttgggttgcttccacctcattgctaatgtga

SEQ ID NO: 2785 - DNA, 122 bp, Homo sapiens
  misc_feature (61)..(62): /note="This region represents a CpG dinucleotide"
  misc_feature (61)..(61): /note="Nucleotide may be methylated to form 5-methylcytosine"
gtatctgtgtccgcttgctttactcaatagccgacgtaaactgaggtggacgtcagtgtccgcgtccgcttgctttactcaatagccgacgtaaactgaggtggacgttggcgtccgcgtct

SEQ ID NO: 2786 - DNA, 122 bp, Homo sapiens
  misc_feature (61)..(62): /note="This region represents a CpG dinucleotide"
  misc_feature (61)..(61): /note="Nucleotide may be methylated to form 5-methylcytosine"
gagggctctgagcgtgctacccggcacctgtgataagtattcaatgacagtattagctctcgttggtattcataaagtagtaactggcctctggttcatacatcagttttctttgagcttag

SEQ ID NO: 2787 - DNA, 122 bp, Homo sapiens
  misc_feature (61)..(62): /note="This region represents a CpG dinucleotide"
  misc_feature (61)..(61): /note="Nucleotide may be methylated to form 5-methylcytosine"
gactttctccaaccttcttttagaaaaggagttacccaaatgaagttgtaatgaagaaaacgggacaaagcaaataataatgagtctacagctgaggtaatttatcatgagggttatcatga

SEQ ID NO: 2788 - DNA, 122 bp, Homo sapiens
  misc_feature (61)..(62): /note="This region represents a CpG dinucleotide"
  misc_feature (61)..(61): /note="Nucleotide may be methylated to form 5-methylcytosine"
ccacagcagcttaactaatttacattcccaccaggactgtcttaagtgtttccttttctccgcagccttgccaacatctgtaattttttgactttttaatgatattctttatgactggtgca

SEQ ID NO: 2789 - DNA, 122 bp, Homo sapiens
  misc_feature (61)..(62): /note="This region represents a CpG dinucleotide"
  misc_feature (61)..(61): /note="Nucleotide may be methylated to form 5-methylcytosine"
ccgagcccgcccgcagcgcctggggcctggggagtgggtggtagggtaggactggtgtcacgaagacgccccgagggcaggaggccctaaccactcccttggcagtggatgtggggagtggg

SEQ ID NO: 2790 - DNA, 122 bp, Homo sapiens
  misc_feature (61)..(62): /note="This region represents a CpG dinucleotide"
  misc_feature (61)..(61): /note="Nucleotide may be methylated to form 5-methylcytosine"
gggctcctggagggcaaagctgggggtggtggggtcctgcagagcggggccgagcccgcccgcagcgcctggggcctggggagtgggtggtagggtaggactggtgtcacgaagacgccccg

SEQ ID NO: 2791 - DNA, 122 bp, Homo sapiens
  misc_feature (61)..(62): /note="This region represents a CpG dinucleotide"
  misc_feature (61)..(61): /note="Nucleotide may be methylated to form 5-methylcytosine"
ctcatcttaaaaatataactgtgtcagtcactaattcattacctctcagcttcaaattgacgtctgtctcctttgctgctttcccggcaggctgatgtttggctttgccaatagggggcgat

SEQ ID NO: 2792 - DNA, 122 bp, Homo sapiens
  misc_feature (61)..(62): /note="This region represents a CpG dinucleotide"
  misc_feature (61)..(61): /note="Nucleotide may be methylated to form 5-methylcytosine"
gctggagcagaagttgctggtgcgccgagctgccttgcggtttaggcccagaggttcacgcgagcgagcgcgctgtggtgagcgcgataaccggcgagccgcgaggcgattcggagaatttc

SEQ ID NO: 2793 - DNA, 122 bp, Homo sapiens
  misc_feature (61)..(62): /note="This region represents a CpG dinucleotide"
  misc_feature (61)..(61): /note="Nucleotide may be methylated to form 5-methylcytosine"
gcacacactgcagggcagcctaccctgccactcaggcgcagaaagtgtgccctgcaaagacgccagagcaccctgggggctaccagttctcctcgaggaagatcctgaacaagagccttcca

SEQ ID NO: 2794 - DNA, 122 bp, Homo sapiens
  misc_feature (61)..(62): /note="This region represents a CpG dinucleotide"
  misc_feature (61)..(61): /note="Nucleotide may be methylated to form 5-methylcytosine"
gtcaaaacacaaaatgaatgttcacaatcatgtaacttcagatgaaagatgaaagcttcacgcagacatgtttatttttgatcatttagaggcaagagagcagaaatgatgaggcaattagg

SEQ ID NO: 2795 - DNA, 122 bp, Homo sapiens
  misc_feature (61)..(62): /note="This region represents a CpG dinucleotide"
  misc_feature (61)..(61): /note="Nucleotide may be methylated to form 5-methylcytosine"
gttttgttttatggagattggctagactggcaggtgacaaggcaagaggtgggctggccacgagagccagctgagcagtgcgagttggtgtgattcagccatttgtcaccaccatattctgc

SEQ ID NO: 2796 - DNA, 122 bp, Homo sapiens
  misc_feature (61)..(62): /note="This region represents a CpG dinucleotide"
  misc_feature (61)..(61): /note="Nucleotide may be methylated to form 5-methylcytosine"
cccatgggtgtaacttttcccttgtttgcctgacacttatctttaatgtgtttcggcttgcgtaatacaccgtctcacaaagggacagaaattaataggtgcatattttactaaaacacata

SEQ ID NO: 2797 - DNA, 122 bp, Homo sapiens
  misc_feature (61)..(62): /note="This region represents a CpG dinucleotide"
  misc_feature (61)..(61): /note="Nucleotide may be methylated to form 5-methylcytosine"
attggtctgaacccaaactctcatggactcatatctaaattctgatatgcttttcaataacgattcctcttgatgtattactccatctttacatgaaatcttattgctaatggactctagga

SEQ ID NO: 2798 - DNA, 122 bp, Homo sapiens
  misc_feature (61)..(62): /note="This region represents a CpG dinucleotide"
  misc_feature (61)..(61): /note="Nucleotide may be methylated to form 5-methylcytosine"
tgtggcctgacctggatccctgtgactaggtgatgctctcgagtttgccagcaacagaaccgtctctgcgtccaacatctcctaagcgggacagtagcgtgggctgtggcatgctaggaaga

SEQ ID NO: 2799 - DNA, 122 bp, Homo sapiens
  misc_feature (61)..(62): /note="This region represents a CpG dinucleotide"
  misc_feature (61)..(61): /note="Nucleotide may be methylated to form 5-methylcytosine"
aaaaaaaaaaaaaagacaaaaaaaaagtgctagagaaccagatttaaagcagaagcagtccggaaatcacatgcaaaactgctcccagggagaaacgcaagcccaggcacagagccccgctt

SEQ ID NO: 2800 - DNA, 122 bp, Homo sapiens
  misc_feature (61)..(62): /note="This region represents a CpG dinucleotide"
  misc_feature (61)..(61): /note="Nucleotide may be methylated to form 5-methylcytosine"
tggcccagcatccctttcccacccttgtccatacatcgcggtgcccccttcacagagaagcgttgcatgagttccttcagttctgttccaatatcccctgcgcagccatgcagacaggcttc

SEQ ID NO: 2801 - DNA, 122 bp, Homo sapiens
  misc_feature (61)..(62): /note="This region represents a CpG dinucleotide"
  misc_feature (61)..(61): /note="Nucleotide may be methylated to form 5-methylcytosine"
cagggcgcgtcaactggctctgctgcgcgaagtggagatgaactggtacctaaagctctgcgacctgtccagcgagcacaccaccgtctgcaccacaggcatgccgcacaggtaagctgccc

SEQ ID NO: 2802 - DNA, 122 bp, Homo sapiens
  misc_feature (61)..(62): /note="This region represents a CpG dinucleotide"
  misc_feature (61)..(61): /note="Nucleotide may be methylated to form 5-methylcytosine"
cctctttcctcaaatatggatgcctccaaggaacataattccagctccaagaggtcctgacgtggggcctggaggaccccagtacctgccggcagcatcatctccttgccatgctccaggtg

SEQ ID NO: 2803 - DNA, 122 bp, Homo sapiens
  misc_feature (61)..(62): /note="This region represents a CpG dinucleotide"
  misc_feature (61)..(61): /note="Nucleotide may be methylated to form 5-methylcytosine"
acttctcagattagataactagggttctcaggctttatctactctccccacagtaaaatacgcggattttttaaaaagttcctgagaaacttgatcaccttaaaaatgtaacacaaaactgt

SEQ ID NO: 2804 - DNA, 122 bp, Homo sapiens
  misc_feature (61)..(62): /note="This region represents a CpG dinucleotide"
  misc_feature (61)..(61): /note="Nucleotide may be methylated to form 5-methylcytosine"
cgctaaggaagcaatgagggccagtccccaggccaggctgctgctgggtacccatggctgcgtgtgagcgaggcaggaccccacctcctccccgtctgcagtccatcctgaccctacagtcc

SEQ ID NO: 2805 - DNA, 122 bp, Homo sapiens
  misc_feature (61)..(62): /note="This region represents a CpG dinucleotide"
  misc_feature (61)..(61): /note="Nucleotide may be methylated to form 5-methylcytosine"
gaactcagggcggatgtctgaggggtctgcgttgggctttctggtcgcttctctgcgaagcgcgcttgttcctgaggcggtgcctgcctgtgtcgtcgtccctgtttgttcttcttcaaacc

SEQ ID NO: 2806 - DNA, 122 bp, Homo sapiens
  misc_feature (61)..(62): /note="This region represents a CpG dinucleotide"
  misc_feature (61)..(61): /note="Nucleotide may be methylated to form 5-methylcytosine"
ccacccagccagacagcagcatctgcaggtgcggtgccctggacctgccccagggtgagccggaggcggggccagggaggggagggaggtcgccccgcccaccccagctccttcctccctct

SEQ ID NO: 2807 - DNA, 122 bp, Homo sapiens
  misc_feature (61)..(62): /note="This region represents a CpG dinucleotide"
  misc_feature (61)..(61): /note="Nucleotide may be methylated to form 5-methylcytosine"
cctcagcgggcacagccgagaggcggttggcctgcaggtccagcagccgcagcttgggggcgtccctgagcgccgcccaggggaaggcggccaggcggttcccgggcagccgcagctcccgc

SEQ ID NO: 2808 - DNA, 122 bp, Homo sapiens
  misc_feature (61)..(62): /note="This region represents a CpG dinucleotide"
  misc_feature (61)..(61): /note="Nucleotide may be methylated to form 5-methylcytosine"
atgaatacgcaaggggcaggaagcatctgaaatcagagctaacttgggaggcacagaacacggggtgcctggaaggggaacagatgtgttgtggggcacagggcaggctgggaggggaacaa

SEQ ID NO: 2809 - DNA, 122 bp, Homo sapiens
  misc_feature (61)..(62): /note="This region represents a CpG dinucleotide"
  misc_feature (61)..(61): /note="Nucleotide may be methylated to form 5-methylcytosine"
taggtagcttaaaatcagacatgctatgagtatttacaccagagaaataggccaacactacgaggcaggatttgtgggtattgtttttcagaaaacttggtttttcagcacaacactgctct

SEQ ID NO: 2810 - DNA, 122 bp, Homo sapiens
  misc_feature (61)..(62): /note="This region represents a CpG dinucleotide"
  misc_feature (61)..(61): /note="Nucleotide may be methylated to form 5-methylcytosine"
tttttatcacagtggtacacatctgtcaatgaatccactctcctgactttttgtccaatgcgttaaaaacaatagatgacaccatatcaaattcctagtttctgattacttcagccttgctt

SEQ ID NO: 2811 - DNA, 122 bp, Homo sapiens
  misc_feature (61)..(62): /note="This region represents a CpG dinucleotide"
  misc_feature (61)..(61): /note="Nucleotide may be methylated to form 5-methylcytosine"
aaagcctcatcttcccttctatacaccaattttgcaaatactcagttgcaacagactgaacgtttttgtccctcaaaattctggtgttgaaatcctagcccccaagatgattgtattaggag

SEQ ID NO: 2812 - DNA, 122 bp, Homo sapiens
  misc_feature (61)..(62): /note="This region represents a CpG dinucleotide"
  misc_feature (61)..(61): /note="Nucleotide may be methylated to form 5-methylcytosine"
actgaagaattcaaattcacaagatgtgaattgcctcattcatatctacaaggtttgaatcgtggttaagacttagaccgggtgtctgattatgaacaggctgtaagtgagagtgggtgttc

SEQ ID NO: 2813 - DNA, 122 bp, Homo sapiens
  misc_feature (61)..(62): /note="This region represents a CpG dinucleotide"
  misc_feature (61)..(61): /note="Nucleotide may be methylated to form 5-methylcytosine"
aatctgctgagtgatgtaagaagctcctatttcactgctctaagaaattatgggcagctccgtgacaggttaaaagtttacttgttgctgctgctgttattttaaatataggcaacacttta

SEQ ID NO: 2814 - DNA, 122 bp, Homo sapiens
  misc_feature (61)..(62): /note="This region represents a CpG dinucleotide"
  misc_feature (61)..(61): /note="Nucleotide may be methylated to form 5-methylcytosine"
gctttactatattttcttagagtaaagctataagcttatgctttgaacatgtaatgcattcgggtttaaaagaaaaaagagcaaacgttattgaaacccaaaccagaatgatttcacaagaa

SEQ ID NO: 2815 - DNA, 122 bp, Homo sapiens
  misc_feature (61)..(62): /note="This region represents a CpG dinucleotide"
  misc_feature (61)..(61): /note="Nucleotide may be methylated to form 5-methylcytosine"
gaggcccactttttccagacacggcgctgtgatgactggtaggagccacgaggatggctgcgtggggagccttggtcctgtcacttcctctctgcatctgtggacaagttgttcccctctag

SEQ ID NO: 2816 - DNA, 122 bp, Homo sapiens
  misc_feature (61)..(62): /note="This region represents a CpG dinucleotide"
  misc_feature (61)..(61): /note="Nucleotide may be methylated to form 5-methylcytosine"
tggcacaccgtcccggaggcccatcccggccgctcctccaggtggggcttcaccgccccccgccccgcccccgagaccagcttctagaggcgccgcccggtttcccctcgcccctgcctctc

SEQ ID NO: 2817 - DNA, 122 bp, Homo sapiens
  misc_feature (61)..(62): /note="This region represents a CpG dinucleotide"
  misc_feature (61)..(61): /note="Nucleotide may be methylated to form 5-methylcytosine"
actgtgcaattatttgcacatgtgccattttgtctactggacagggatctctttggggaacgtgttctagtcacctcagagttctggcttggaggagacactcactgaatgaagaaatcaat

SEQ ID NO: 2818 - DNA, 122 bp, Homo sapiens
  misc_feature (61)..(62): /note="This region represents a CpG dinucleotide"
  misc_feature (61)..(61): /note="Nucleotide may be methylated to form 5-methylcytosine"
tctgttgttctttctgtgcgttgactctctctaggtatcctaattgtatcctgaggaaatcgtatttttttctgttacctcatcggtgttccttgttcctgaggaggcatgagtagagggtg

SEQ ID NO: 2819 - DNA, 122 bp, Homo sapiens
  misc_feature (61)..(62): /note="This region represents a CpG dinucleotide"
  misc_feature (61)..(61): /note="Nucleotide may be methylated to form 5-methylcytosine"
atgatctttcccttcaagtgatttcctctccttcccatttgataacaactctgtggggcacgttttgtgaactgcttcgatctaatttaaaaagataacgttgcattttataattttatgta

SEQ ID NO: 2820 - DNA, 122 bp, Homo sapiens
  misc_feature (61)..(62): /note="This region represents a CpG dinucleotide"
  misc_feature (61)..(61): /note="Nucleotide may be methylated to form 5-methylcytosine"
cagagaagcagcttggattcgatgggactgtagtttctggaatccgactgcaaagctgaccgctggtagagcccagcttctaacttaggaaaggcactagctctctacaaagccgccactcc

SEQ ID NO: 2821 - DNA, 122 bp, Homo sapiens
  misc_feature (61)..(62): /note="This region represents a CpG dinucleotide"
  misc_feature (61)..(61): /note="Nucleotide may be methylated to form 5-methylcytosine"
ctgccgaagagcagggagccccagagtaggacaatagctattgtcgttggggagtgttttcgaggttgggagcgttgggcggatgtaaggctggactttctttaaagcaaacggtgcctctg

SEQ ID NO: 2822 - DNA, 122 bp, Homo sapiens
  misc_feature (61)..(62): /note="This region represents a CpG dinucleotide"
  misc_feature (61)..(61): /note="Nucleotide may be methylated to form 5-methylcytosine"
ataaggaaacccaagtcattacttggcttattattacaggttatcaacaacttagtaaaacgtgcatgaaatctgtaaggtacagagcctaattcgtcagtagctttggcagctagatgtgc

SEQ ID NO: 2823 - DNA, 122 bp, Homo sapiens
  misc_feature (61)..(62): /note="This region represents a CpG dinucleotide"
  misc_feature (61)..(61): /note="Nucleotide may be methylated to form 5-methylcytosine"
gtgtgcaggtggcacgccatggtcatcccccacgtttctaccgtaacttccgccgggtaacgtcttctagcaggtatgagggagacaactacaaacgccagaggctcagccgaaggcgtcgt

SEQ ID NO: 2824 - DNA, 122 bp, Homo sapiens
  misc_feature (61)..(62): /note="This region represents a CpG dinucleotide"
  misc_feature (61)..(61): /note="Nucleotide may be methylated to form 5-methylcytosine"
aagtccagacggggtgactgggtccccctcccacactagcctccttccccaccccctccccgcaaagatcacggactagcccgcctcgcccacccccgcggctcactgacgctcgcccttcc

SEQ ID NO: 2825 - DNA, 122 bp, Homo sapiens
  misc_feature (61)..(62): /note="This region represents a CpG dinucleotide"
  misc_feature (61)..(61): /note="Nucleotide may be methylated to form 5-methylcytosine"
catgacttcagtcatgagcaatacatatctgcacccgcatttgcaatgtgccccacccagcggctctagggctcgcagagcgctcttcccttttagacgtgtgaaaatgcctgagtcccagc

SEQ ID NO: 2826 - DNA, 122 bp, Homo sapiens
  misc_feature (61)..(62): /note="This region represents a CpG dinucleotide"
  misc_feature (61)..(61): /note="Nucleotide may be methylated to form 5-methylcytosine"
catcctggactctttccagggttttgtgcaaggcctcgggagggccgggtctggcatcttcgtgcccagctcgttctttgccatgcttggctcgcctgccatggccggtatctactgtgacc

SEQ ID NO: 2827 - DNA, 122 bp, Homo sapiens
  misc_feature (61)..(62): /note="This region represents a CpG dinucleotide"
  misc_feature (61)..(61): /note="Nucleotide may be methylated to form 5-methylcytosine"
acttcggcaagagcagtgttttgtggtcctttgacgattgtagccacatcctctcttccccggctctataatagccctaaaacccagcagccttgcaatcttggcagccacgaaaaccagca

SEQ ID NO: 2828 - DNA, 122 bp, Homo sapiens
  misc_feature (61)..(62): /note="This region represents a CpG dinucleotide"
  misc_feature (61)..(61): /note="Nucleotide may be methylated to form 5-methylcytosine"
agggcgctgctcgggcatggcggaggagcggccgggggcctggttcggcttcggtttctgcggcttcgggcaggagctgggctccggacgcgggcgccaggtgcacagccccagtccgctgc

SEQ ID NO: 2829 - DNA, 122 bp, Homo sapiens
  misc_feature (61)..(62): /note="This region represents a CpG dinucleotide"
  misc_feature (61)..(61): /note="Nucleotide may be methylated to form 5-methylcytosine"
tgatgaagaaaggatttcccaagacaacagctatgtgccaagtgcagagggcaaacagaacggactttaaaagggcagaagattcaggagattgtttcaaggttaaattgatagaacaccta

SEQ ID NO: 2830 - DNA, 122 bp, Homo sapiens
  misc_feature (61)..(62): /note="This region represents a CpG dinucleotide"
  misc_feature (61)..(61): /note="Nucleotide may be methylated to form 5-methylcytosine"
ttagtcactgtgtttctgcttacagtatgtgaaatactctcaccagaacaaaggtcccagcgtcaataagtcaaaccgcagactctgacagctgagtgaatagcagaggccagagtccactt

SEQ ID NO: 2831 - DNA, 122 bp, Homo sapiens
  misc_feature (61)..(62): /note="This region represents a CpG dinucleotide"
  misc_feature (61)..(61): /note="Nucleotide may be methylated to form 5-methylcytosine"
gggagctggtgcacagtatacaatgggtcctcatctttaggaatacaaacaaaaagaacacgtacagaatgtttacatgagcataggctatgtctggaaagacatacacaaggagccagtag

SEQ ID NO: 2832 - DNA, 122 bp, Homo sapiens
  misc_feature (61)..(62): /note="This region represents a CpG dinucleotide"
  misc_feature (61)..(61): /note="Nucleotide may be methylated to form 5-methylcytosine"
gtgctactgcaggtatgagggaagtgaagccctgagcgctgctccggaggatttggcatgcgagtgagtgggaaagaaagaaagctccttcaatgactgccgtggaaaaagtgccccggatt

SEQ ID NO: 2833 - DNA, 122 bp, Homo sapiens
  misc_feature (61)..(62): /note="This region represents a CpG dinucleotide"
  misc_feature (61)..(61): /note="Nucleotide may be methylated to form 5-methylcytosine"
gcctcagcaaaacggaactgccaagcactggtatcagggacttgggatggcctgaaccatcgcagccctgagtcatatgacacagcagttttcttcagccctgcccgtgaggtaggagactg

SEQ ID NO: 2834 - DNA, 122 bp, Homo sapiens
  misc_feature (61)..(62): /note="This region represents a CpG dinucleotide"
  misc_feature (61)..(61): /note="Nucleotide may be methylated to form 5-methylcytosine"
aggaggagcaggggccagggaagacggggcgggcaagagcggcatgtggcatttctcaagcgggagaccaagttcaaagggagcacagcactcccagtgaaaccacccctataaacttcata

SEQ ID NO: 2835 - DNA, 122 bp, Homo sapiens
  misc_feature (61)..(62): /note="This region represents a CpG dinucleotide"
  misc_feature (61)..(61): /note="Nucleotide may be methylated to form 5-methylcytosine"
aatccagctgggagggaagacaacctcttgggagactcttgcttctccagggacgggagccgcagggctgcggggcacacggggctgtcactctattcccgattaagtctcacttcccaaat

SEQ ID NO: 2836 - DNA, 122 bp, Homo sapiens
  misc_feature (61)..(62): /note="This region represents a CpG dinucleotide"
  misc_feature (61)..(61): /note="Nucleotide may be methylated to form 5-methylcytosine"
actgaagaaccctggcatgcaccaacatttaaacggagatttgctggtttccaattttaacggggaagactgttaatcacaaaacatcaagtagagacttgaaaaagttaatattgattctt

SEQ ID NO: 2837 - DNA, 122 bp, Homo sapiens
  misc_feature (61)..(62): /note="This region represents a CpG dinucleotide"
  misc_feature (61)..(61): /note="Nucleotide may be methylated to form 5-methylcytosine"
gaataatggagttcagtgttactcaaggggcagtcacctgcacagtcattaccggaatgacgtgtttcatcagatgtttcaaatcccgattcttggggcctgctctaaacctgcctaccaag

SEQ ID NO: 2838 - DNA, 122 bp, Homo sapiens
  misc_feature (61)..(62): /note="This region represents a CpG dinucleotide"
  misc_feature (61)..(61): /note="Nucleotide may be methylated to form 5-methylcytosine"
ttaaatgatgtatttatgtattacttcagtaaattaattttaataagaaaaatcaatgtacgaggagagactggtgtaactatgctgagagagaaagacatgttactaagaaatgaacagaa

SEQ ID NO: 2839 - DNA, 122 bp, Homo sapiens
  misc_feature (61)..(62): /note="This region represents a CpG dinucleotide"
  misc_feature (61)..(61): /note="Nucleotide may be methylated to form 5-methylcytosine"
ctattcgatgtgacttcttttcttaacgtgtaagcaagttgccccaaccatggagggggtcgcggtggtgacggcgggcagcgtaagcgctgccaaagccgagggagctgcagccttgccgc

SEQ ID NO: 2840 - DNA, 122 bp, Homo sapiens
  misc_feature (61)..(62): /note="This region represents a CpG dinucleotide"
  misc_feature (61)..(61): /note="Nucleotide may be methylated to form 5-methylcytosine"
ctgcggcattccctcgctcctcctgtttattcagttgtgcagatattggcagagtcaggccgccccggactcatggtgacccagcgtctggtctggtagttatgaaatctcacatggtttat

SEQ ID NO: 2841 - DNA, 122 bp, Homo sapiens
  misc_feature (61)..(62): /note="This region represents a CpG dinucleotide"
  misc_feature (61)..(61): /note="Nucleotide may be methylated to form 5-methylcytosine"
gactacctaaaagttgtctgagggaggctgtgcactgggtgatcttgtgaggcaggtggacgtctattctgccaagatcttgtgggcccagtttgagaatgggttttaagttttagtccttt

SEQ ID NO: 2842 - DNA, 122 bp, Homo sapiens
  misc_feature (61)..(62): /note="This region represents a CpG dinucleotide"
  misc_feature (61)..(61): /note="Nucleotide may be methylated to form 5-methylcytosine"
aacaaacacaagcgtgagccacaccagagccctccagctgactgcctagcagcagttacacggtctcccatcaggaccctgtgaccagaactaccaggcagctttcatggaactgaagttgg

SEQ ID NO: 2843 - DNA, 122 bp, Homo sapiens
  misc_feature (61)..(62): /note="This region represents a CpG dinucleotide"
  misc_feature (61)..(61): /note="Nucleotide may be methylated to form 5-methylcytosine"
gaaaggtgggagaggaagggtctaaggaggagggcgtttcccgggagaacgcccagagctcggctcacctggcgatcctaattacaggggagtttcacccccacattcttgggcgctttctt

SEQ ID NO: 2844 - DNA, 122 bp, Homo sapiens
  misc_feature (61)..(62): /note="This region represents a CpG dinucleotide"
  misc_feature (61)..(61): /note="Nucleotide may be methylated to form 5-methylcytosine"
actgttatcattttaggagccttgaggtaatggagcactactgggtagtacagataaaagcgtggaaatggcagatacttggagctgcataagtgaactgcgatggaacagaagacctcatt

SEQ ID NO: 2845 - DNA, 122 bp, Homo sapiens
  misc_feature (61)..(62): /note="This region represents a CpG dinucleotide"
  misc_feature (61)..(61): /note="Nucleotide may be methylated to form 5-methylcytosine"
gggactactgacttgggttcctttgtggcggccttgctatccaggctcagattgcaggcacggcttccatgatgcaaccacagtgtgagtgtttagtttttagcactcactacaaccacatg

SEQ ID NO: 2846 - DNA, 122 bp, Homo sapiens
  misc_feature (61)..(62): /note="This region represents a CpG dinucleotide"
  misc_feature (61)..(61): /note="Nucleotide may be methylated to form 5-methylcytosine"
ccaggggcagagcctgcacgtgtcagagccaggcctgggatgcaccttctctgggcagaccgacccaaaagaaagcccacaagggctgaagccacacacagcccgccccagggctgcctgga

SEQ ID NO: 2847 - DNA, 122 bp, Homo sapiens
  misc_feature (61)..(62): /note="This region represents a CpG dinucleotide"
  misc_feature (61)..(61): /note="Nucleotide may be methylated to form 5-methylcytosine"
cttctcctgctcattcatttgtcagtcacagtaactaaggattattatttgctgaatgtacgtgacaccagcaatttgcaaagtctgttggcaagaaaatcaggttagcatgacagagtgag

SEQ ID NO: 2848 - DNA, 122 bp, Homo sapiens
  misc_feature (61)..(62): /note="This region represents a CpG dinucleotide"
  misc_feature (61)..(61): /note="Nucleotide may be methylated to form 5-methylcytosine"
tgggttttttgttttgttttgtattgctgctcttagaattatttccttcatgttaactttcggtagcctgatgactataagcttggtgaaggcagttttgcaatacatttcccaggagttct

SEQ ID NO: 2849 - DNA, 122 bp, Homo sapiens
  misc_feature (61)..(62): /note="This region represents a CpG dinucleotide"
  misc_feature (61)..(61): /note="Nucleotide may be methylated to form 5-methylcytosine"
caatgagtaattggtatgcaggcagacagaggttaattaagaggcaacgtggtcaggcaacgtgcacagaccaagtgcacaatcttggatatgtagttttacttcccttgcctttggtttta

SEQ ID NO: 2850 - DNA, 122 bp, Homo sapiens
  misc_feature (61)..(62): /note="This region represents a CpG dinucleotide"
  misc_feature (61)..(61): /note="Nucleotide may be methylated to form 5-methylcytosine"
gatgacccaggagtgattaggtggttaggtgagattgggtaataaatgaaggagtcaccacggaatctgaatagcattaagaagccaatgcaggtgagacagttgctcattctgaagcaggg

SEQ ID NO: 2851 - DNA, 122 bp, Homo sapiens
  misc_feature (61)..(62): /note="This region represents a CpG dinucleotide"
  misc_feature (61)..(61): /note="Nucleotide may be methylated to form 5-methylcytosine"
tgcacttgatctccttttaaaggggaaattacatttcttgttaagactgaaagaggctgccgaactttggaggaaattactatgttgttctcaggacagctggaagaatttctgaaagagaa

SEQ ID NO: 2852 - DNA, 122 bp, Homo sapiens
  misc_feature (61)..(62): /note="This region represents a CpG dinucleotide"
  misc_feature (61)..(61): /note="Nucleotide may be methylated to form 5-methylcytosine"
tttctatgagtgttaaatgagaaaaatgctacttgccctgcacagctcagaaaactgttgcgcactcttgtggtaggctggtaatgtttaaccatcagctctctgggggaaaaaaacggccg

SEQ ID NO: 2853 - DNA, 122 bp, Homo sapiens
  misc_feature (61)..(62): /note="This region represents a CpG dinucleotide"
  misc_feature (61)..(61): /note="Nucleotide may be methylated to form 5-methylcytosine"
ggcaggggcaggggctgcaggcggccctacagagccggtaaaggtgaaggcggtgctctgcggtgggaacgggaagcttccccaatcagactgcatcctgagggacaggagcggacacacga

SEQ ID NO: 2854 - DNA, 122 bp, Homo sapiens
  misc_feature (61)..(62): /note="This region represents a CpG dinucleotide"
  misc_feature (61)..(61): /note="Nucleotide may be methylated to form 5-methylcytosine"
ctttttctcttattggacaacttgaatcgtcatttgccgttccgattggtcatccgtgatcgtccggatttttccaattggcgaagctgccaggggaattttttttttttttttttcccagg

SEQ ID NO: 2855 - DNA, 122 bp, Homo sapiens
  misc_feature (61)..(62): /note="This region represents a CpG dinucleotide"
  misc_feature (61)..(61): /note="Nucleotide may be methylated to form 5-methylcytosine"
ctgtcccaccagagctttgggctgctgggaagaatggggaagaaagggccccagagggagcgaccttggggctgtatgaatgggggaaagagagtgagacttaagcagaccccaaggaattg

SEQ ID NO: 2856 - DNA, 122 bp, Homo sapiens
  misc_feature (61)..(62): /note="This region represents a CpG dinucleotide"
  misc_feature (61)..(61): /note="Nucleotide may be methylated to form 5-methylcytosine"
gtgtttcaataaaaaggattatatctgtcttgaccattgccacagcattgatgaaaatcacgtactccatccaggacaaatcccacagtcgcctcactttccttctctcaacattttatatc

SEQ ID NO: 2857 - DNA, 122 bp, Homo sapiens
  misc_feature (61)..(62): /note="This region represents a CpG dinucleotide"
  misc_feature (61)..(61): /note="Nucleotide may be methylated to form 5-methylcytosine"
ttgtgctcttaaccactgtgtggcgctaccagaccttacaggatggtcaagcaatattgacggagtgtttgctgcaggtgctgtgctaagtgctgaatacattacatgttgagcagatgaat

SEQ ID NO: 2858 - DNA, 122 bp, Homo sapiens
  misc_feature (61)..(62): /note="This region represents a CpG dinucleotide"
  misc_feature (61)..(61): /note="Nucleotide may be methylated to form 5-methylcytosine"
tgagcaggtgagagggcagacagcttgcccaagacagtgtgtggtctcccgaaaaattaacgagctctgctgaatcccaacagtcaatgggtggattttagatatgtctcactccctggacg

SEQ ID NO: 2859 - DNA, 122 bp, Homo sapiens
  misc_feature (61)..(62): /note="This region represents a CpG dinucleotide"
  misc_feature (61)..(61): /note="Nucleotide may be methylated to form 5-methylcytosine"
acctctgcagtctgctgccgcctactgagagcaagccattggcaacaaaggaaaaagccacgaggcccagccagggacaccaaccttgactcctgccactaggtttcacctcccaaacccag

SEQ ID NO: 2860 - DNA, 122 bp, Homo sapiens
  misc_feature (61)..(62): /note="This region represents a CpG dinucleotide"
  misc_feature (61)..(61): /note="Nucleotide may be methylated to form 5-methylcytosine"
tgcagggccactcctggtggagaaccctcgtgactactccactgaattaagtgtcaccatcgccgtgggggcctccctcctgttccttaacgttctggccttcgctgccctctactaccgta

SEQ ID NO: 2861 - DNA, 122 bp, Homo sapiens
  misc_feature (61)..(62): /note="This region represents a CpG dinucleotide"
  misc_feature (61)..(61): /note="Nucleotide may be methylated to form 5-methylcytosine"
ccagtttcatcagctatttatcatcactaccttcttccttctttctaactctgattagatcgtcctgatttgacaaattaatcatcctaaggttaggattagattccatgtctcattactat

SEQ ID NO: 2862 - DNA, 122 bp, Homo sapiens
  misc_feature (61)..(62): /note="This region represents a CpG dinucleotide"
  misc_feature (61)..(61): /note="Nucleotide may be methylated to form 5-methylcytosine"
ccctgaatggcttttcctgccctggctcctcccatcatattttaaatgccgtcttcctcccgctccaaggaaaccttctcttgacgtcaggtactctccagccacggacctatcaacattct

SEQ ID NO: 2863 - DNA, 122 bp, Homo sapiens
  misc_feature (61)..(62): /note="This region represents a CpG dinucleotide"
  misc_feature (61)..(61): /note="Nucleotide may be methylated to form 5-methylcytosine"
gaatgacaatgggagagtggctttgccctgggatcaccaactaaagcctcaacactgaggcgatgaagttatgacaaaaagcacagctttggctgggcttatgataaaactcaactagaata

SEQ ID NO: 2864 - DNA, 122 bp, Homo sapiens
  misc_feature (61)..(62): /note="This region represents a CpG dinucleotide"
  misc_feature (61)..(61): /note="Nucleotide may be methylated to form 5-methylcytosine"
caagagagtttcttttccttgaaagcaaacaacccctgaccagaagaatgtcacagatgacgagaggtgcctcatcacagaatcaggaacagtcagaatctcagtgggaagctatgcagctt

SEQ ID NO: 2865 - DNA, 122 bp, Homo sapiens
  misc_feature (61)..(62): /note="This region represents a CpG dinucleotide"
  misc_feature (61)..(61): /note="Nucleotide may be methylated to form 5-methylcytosine"
cccaattaaaggtcaacatggctgctcaaaaatatttatttaaaaaggcagtcagctcagcgggctcccaagtgtgattacactaccacttcatagaattcaattaaacccgggacggggca

SEQ ID NO: 2866 - DNA, 122 bp, Homo sapiens
  misc_feature (61)..(62): /note="This region represents a CpG dinucleotide"
  misc_feature (61)..(61): /note="Nucleotide may be methylated to form 5-methylcytosine"
ggggccaaggccagagctggacaccacgactgccacgtaagaggaatcccaagcatactgcgatcaagggaagggaagaaaatccactcccagaagcagctttttactgtgactctcatcgt

SEQ ID NO: 2867 - DNA, 122 bp, Homo sapiens
  misc_feature (61)..(62): /note="This region represents a CpG dinucleotide"
  misc_feature (61)..(61): /note="Nucleotide may be methylated to form 5-methylcytosine"
cctcaaccaaaatgtcaaatgaacaccgtccttaaataagaacatgaatttgacctttaccggatgtctttattctttaacattctttaaagatacacacttggaaaagttagtacttatga

SEQ ID NO: 2868 - DNA, 122 bp, Homo sapiens
  misc_feature (61)..(62): /note="This region represents a CpG dinucleotide"
  misc_feature (61)..(61): /note="Nucleotide may be methylated to form 5-methylcytosine"
gtgtgtgttagacagaaagaaggaagagggcagggagagaaaaccaccgcattcaagcatcgccgcctctaggtgtaaggttcattccaggactgcctggagttggtgactttgcattcctg

SEQ ID NO: 2869 - DNA, 122 bp, Homo sapiens
  misc_feature (61)..(62): /note="This region represents a CpG dinucleotide"
  misc_feature (61)..(61): /note="Nucleotide may be methylated to form 5-methylcytosine"
gaggaattggcctcatcagatcggttggtgatttcccgcagcagtgcccagcagcctgagcgctcaacctgagaagatgaacagtgagtcattcagatatgatgaaagagcacaggaaaaag

SEQ ID NO: 2870 - DNA, 122 bp, Homo sapiens
  misc_feature (61)..(62): /note="This region represents a CpG dinucleotide"
  misc_feature (61)..(61): /note="Nucleotide may be methylated to form 5-methylcytosine"
gggggaaggtgtgtgggaatgaattccaaccctgccagaccgcagagggaagagcctgtccgaggctggcctgggcatctgatgtggacatgccaccagctcacccacccactgcaggcggc

SEQ ID NO: 2871 - DNA, 122 bp, Homo sapiens
  misc_feature (61)..(62): /note="This region represents a CpG dinucleotide"
  misc_feature (61)..(61): /note="Nucleotide may be methylated to form 5-methylcytosine"
ccagggctttcctggacacattgcaatcctaacctcagggtaaaagccatgtccctgttccgccacagcatggcaaaatcaattccagttggattaaaaagttacatgtttttaaaaaaatg

SEQ ID NO: 2872 - DNA, 122 bp, Homo sapiens
  misc_feature (61)..(62): /note="This region represents a CpG dinucleotide"
  misc_feature (61)..(61): /note="Nucleotide may be methylated to form 5-methylcytosine"
gagccggagcggacaggcggaagggtcagctactgcagatagaggcggctggctcgggggcgggggtggagggggtcttcctccttccggttcttgggaagatcctgcaatctgaaagaggc

SEQ ID NO: 2873 - DNA, 122 bp, Homo sapiens
  misc_feature (61)..(62): /note="This region represents a CpG dinucleotide"
  misc_feature (61)..(61): /note="Nucleotide may be methylated to form 5-methylcytosine"
caatgagtgtcatttttaaccagtttgaacattttactacttcctaacatcagaagcacccgggctagagagcccgcttcttgtcctcaataaagtgattaagctgaatgggtgttggggag

SEQ ID NO: 2874 - DNA, 122 bp, Homo sapiens
  misc_feature (61)..(62): /note="This region represents a CpG dinucleotide"
  misc_feature (61)..(61): /note="Nucleotide may be methylated to form 5-methylcytosine"
ttaagtgaaaaaagtaacaaagtggagtttcatttcctgcaaatgacttttactacatcacggttagatgactgaaggagttacatccccgtaaactacccagacaaaaataactcactgta

SEQ ID NO: 2875 - DNA, 122 bp, Homo sapiens
  misc_feature (61)..(62): /note="This region represents a CpG dinucleotide"
  misc_feature (61)..(61): /note="Nucleotide may be methylated to form 5-methylcytosine"
agtccatctcactatcacccgcaatgtgaaggcaaaattcagagatcacacatgttcctgcgtcctacagaccagcaaacattattccttgcacgtcgccacagagaggcaacattttttaa

SEQ ID NO: 2876 - DNA, 122 bp, Homo sapiens
  misc_feature (61)..(62): /note="This region represents a CpG dinucleotide"
  misc_feature (61)..(61): /note="Nucleotide may be methylated to form 5-methylcytosine"
acgtgttgattgactgcacggaagcttcacaaggagaggattttgcatctgtttcgttcacggtgttgtcactgtcatcatcagctgtataatggatgctggcacagagtaggtgctcagta

SEQ ID NO: 2877 - DNA, 122 bp, Homo sapiens
  misc_feature (61)..(62): /note="This region represents a CpG dinucleotide"
  misc_feature (61)..(61): /note="Nucleotide may be methylated to form 5-methylcytosine"
gagcgaagcgagaaagagcaaactcgggcgaagtttctttgctgcggtgtcgctcctaatcggaggagacagggagagagttaaaatgcaggaaccaatcgcttgaatggtgatgtaatgca

SEQ ID NO: 2878 - DNA, 122 bp, Homo sapiens
  misc_feature (61)..(62): /note="This region represents a CpG dinucleotide"
  misc_feature (61)..(61): /note="Nucleotide may be methylated to form 5-methylcytosine"
tatatttgaggcaatcaaaaaacttgttctactttcacttttttccctcccttttcttgtcgtttattttcagttgtgttatttctactttgtcaaacaatataaattttttgtactgttca

SEQ ID NO: 2879 - DNA, 122 bp, Homo sapiens
  misc_feature (61)..(62): /note="This region represents a CpG dinucleotide"
  misc_feature (61)..(61): /note="Nucleotide may be methylated to form 5-methylcytosine"
ccaggttcccacttgtctttattgctcttggggccaatcaccgacccggccaccaggtggcgcctgtttatcatcttccgcacctgcgccctgggctcactcgctggggctgccggaggacg

SEQ ID NO: 2880 - DNA, 122 bp, Homo sapiens
  misc_feature (61)..(62): /note="This region represents a CpG dinucleotide"
  misc_feature (61)..(61): /note="Nucleotide may be methylated to form 5-methylcytosine"
acagatttctaagggatgtgtgactcagactggtgcttaagtgctgccttagtggacactcgacaccagcagaatgtttctgactctcaggcatttcagctgatctgcatgtgaacttcagc

SEQ ID NO: 2881 - DNA, 122 bp, Homo sapiens
  misc_feature (61)..(62): /note="This region represents a CpG dinucleotide"
  misc_feature (61)..(61): /note="Nucleotide may be methylated to form 5-methylcytosine"
ccccggcacgcgctctactcctgtaacggaaaggtcgcggcttgtgtgcctgcgggcagccgtgccgagaatgaaccccagcacccccagctacccaacggcctcgctctacgtgggggacc

SEQ ID NO: 2882 - DNA, 122 bp, Homo sapiens
  misc_feature (61)..(62): /note="This region represents a CpG dinucleotide"
  misc_feature (61)..(61): /note="Nucleotide may be methylated to form 5-methylcytosine"
attaccctcattgtgcttccccattctcagagagtaaaaccacagggcagttctggctgacgggtttgcacctatctggtgtctgctccactgtttctgtcatgttgagtcacagggcattc

SEQ ID NO: 2883 - DNA, 122 bp, Homo sapiens
  misc_feature (61)..(62): /note="This region represents a CpG dinucleotide"
  misc_feature (61)..(61): /note="Nucleotide may be methylated to form 5-methylcytosine"
agcatcggtgcacaagtgcatgagctgagcaacacatacccagcacagccagagggtcagcggcccccgcggacggcttggttcctgtttagccgttgagttggaggaaacattcctcggcg

SEQ ID NO: 2884 - DNA, 122 bp, Homo sapiens
  misc_feature (61)..(62): /note="This region represents a CpG dinucleotide"
  misc_feature (61)..(61): /note="Nucleotide may be methylated to form 5-methylcytosine"
agaataatctattatttggagcctgccaagaggtactgtaatgggtaattctgacgtcagcgcaccaaaactatcctgattccaaatatgtatgcacctcaaggtcatcaaacatttgccaa

SEQ ID NO: 2885 - DNA, 122 bp, Homo sapiens
  misc_feature (61)..(62): /note="This region represents a CpG dinucleotide"
  misc_feature (61)..(61): /note="Nucleotide may be methylated to form 5-methylcytosine"
gacaatacccattcagatgaacagaggctcagctgggttaatcatcagttctgggccaggcgcggtggctcacgcctataatcccagcaccttgggaggctgaggcaggcagatcacgaggt

SEQ ID NO: 2886 - DNA, 122 bp, Homo sapiens
  misc_feature (61)..(62): /note="This region represents a CpG dinucleotide"
  misc_feature (61)..(61): /note="Nucleotide may be methylated to form 5-methylcytosine"
gaactaagtatttttgtgcatgtgttattgagagcattacaggaatctgtagggtaagtgcgtaggaatagaattgctgggttgaatgacacatgcatctgaaatattgatagatagtgcag

SEQ ID NO: 2887 - DNA, 122 bp, Homo sapiens
  misc_feature (61)..(62): /note="This region represents a CpG dinucleotide"
  misc_feature (61)..(61): /note="Nucleotide may be methylated to form 5-methylcytosine"
agtggcacttgcacgccgcggaccgcagggatccccaagccctgcacccagattcttccccgccacggagagacaatcatgacaattatcattacaatgattatgaaaactggcatgaaaac

SEQ ID NO: 2888 - DNA, 122 bp, Homo sapiens
  misc_feature (61)..(62): /note="This region represents a CpG dinucleotide"
  misc_feature (61)..(61): /note="Nucleotide may be methylated to form 5-methylcytosine"
ttacacacattgactcattcaatccttacaataaccctcttaaggtatatgctactatgacgcccatggcaatgatgaagcaactctggcattaaaaggtgaaatgacttactcaagattgc

SEQ ID NO: 2889 - DNA, 122 bp, Homo sapiens
  misc_feature (61)..(62): /note="This region represents a CpG dinucleotide"
  misc_feature (61)..(61): /note="Nucleotide may be methylated to form 5-methylcytosine"
acagccatatccatttgtctgaatgggaccagtaactgttatattgcacccaccttgctacgttactatacatcttttgaaaaccaaagttcttagctgggcgtggtgactcatgcctgtaa

SEQ ID NO: 2890 - DNA, 122 bp, Homo sapiens
  misc_feature (61)..(62): /note="This region represents a CpG dinucleotide"
  misc_feature (61)..(61): /note="Nucleotide may be methylated to form 5-methylcytosine"
gccctttgctttacgactggatgcttgatcatttttctcggcctttgatcttcttgaaatcgcaattgtatctgatgcctcagactatataaactaatggatgagttaagtcccagacaaga

SEQ ID NO: 2891 - DNA, 122 bp, Homo sapiens
  misc_feature (61)..(62): /note="This region represents a CpG dinucleotide"
  misc_feature (61)..(61): /note="Nucleotide may be methylated to form 5-methylcytosine"
gggtgggcaagtagtgtttcgtggcttaacgtaaggggcaaaagggttgtgggggctttacgcagctggtaacccagaggaggcaaatggcaccatcaccgccattcccttccaggcagtcg

SEQ ID NO: 2892 - DNA, 122 bp, Homo sapiens
  misc_feature (61)..(62): /note="This region represents a CpG dinucleotide"
  misc_feature (61)..(61): /note="Nucleotide may be methylated to form 5-methylcytosine"
taatcatagaagaaatttcacatgagtagcacgactgctgagcaggtaggtgaccaagcccgggacagcttgaagatttaacatctctttgacaaacaggcaatctctcttatcaggggaga

SEQ ID NO: 2893 - DNA, 122 bp, Homo sapiens
  misc_feature (61)..(62): /note="This region represents a CpG dinucleotide"
  misc_feature (61)..(61): /note="Nucleotide may be methylated to form 5-methylcytosine"
tggaagcactactggctttcaagctttcacaattctctgaaggattctgcaacaccacagcgtgagtaatgaggacatgtcataagtactatgtacaacttgtaatgaaggttgtagatcaa

SEQ ID NO: 2894 - DNA, 122 bp, Homo sapiens
  misc_feature (61)..(62): /note="This region represents a CpG dinucleotide"
  misc_feature (61)..(61): /note="Nucleotide may be methylated to form 5-methylcytosine"
agtgggaataggacacacaaggtgatgccaagcctggcacaacagctgagtaccttgactcgtcccaaatcccagagtaaatgtagggcacctgaggcagctgccaagggacagatgtcctt

SEQ ID NO: 2895 - DNA, 122 bp, Homo sapiens
  misc_feature (61)..(62): /note="This region represents a CpG dinucleotide"
  misc_feature (61)..(61): /note="Nucleotide may be methylated to form 5-methylcytosine"
caatgccctaatctagagaattacatagttctaagcacagcaaatctcctacaaacagatcgggattcaaatatttcattctacagtcttgggatcctcaatgcaagggacaggctgtaagc

SEQ ID NO: 2896 - DNA, 122 bp, Homo sapiens
  misc_feature (61)..(62): /note="This region represents a CpG dinucleotide"
  misc_feature (61)..(61): /note="Nucleotide may be methylated to form 5-methylcytosine"
ggaatgtctttaaaaatgatgtcaaggaatgcatatatcttacgcttttcagcatctattcgatctatgacccctgctgagttgataaggaagaggcatgtcacagtcgtagaaaaaaagaa

SEQ ID NO: 2897 - DNA, 122 bp, Homo sapiens
  misc_feature (61)..(62): /note="This region represents a CpG dinucleotide"
  misc_feature (61)..(61): /note="Nucleotide may be methylated to form 5-methylcytosine"
aggagcaagaacccaattaagcagctcagctgcacaggcctgagtgtagcgtggcagacccggggcgccctagcacgccccctttgactctgcctggctgagcttcctttaagctctctgtc

SEQ ID NO: 2898 - DNA, 122 bp, Homo sapiens
  misc_feature (61)..(62): /note="This region represents a CpG dinucleotide"
  misc_feature (61)..(61): /note="Nucleotide may be methylated to form 5-methylcytosine"
aagctctcaaggcaggactatcacgagatgcatgtttgtacttaaatcactgaaagcctccgcttggaccggctctccggaagcccagcaacataaaacctgggatggggaagactgaagtg

SEQ ID NO: 2899 - DNA, 122 bp, Homo sapiens
  misc_feature (61)..(62): /note="This region represents a CpG dinucleotide"
  misc_feature (61)..(61): /note="Nucleotide may be methylated to form 5-methylcytosine"
tcagctttatcccatctaacaggatgagccgtttttaaattgttggtgtcttgacatgcccggtatttctttggaaacagaaagtgttacttggggggaaataaagggacaagccctttgat

SEQ ID NO: 2900 - DNA, 122 bp, Homo sapiens
  misc_feature (61)..(62): /note="This region represents a CpG dinucleotide"
  misc_feature (61)..(61): /note="Nucleotide may be methylated to form 5-methylcytosine"
gtgggattttatagtgtcgaccctcttcaaaaaccacgcagcatttgcctaataagctgacgctctcttgacagctcgattgcgtgctgcctctgctcctgcataaatcatagggccctgcc

SEQ ID NO: 2901 - DNA, 122 bp, Homo sapiens
  misc_feature (61)..(62): /note="This region represents a CpG dinucleotide"
  misc_feature (61)..(61): /note="Nucleotide may be methylated to form 5-methylcytosine"
gagatgttaataacacacaacagaggatcgacttctgggcatgttgttttcataatcattcgtcaagctctcatgcttagccttgttttagacactgtaccagaattagagggaaaaaacat

SEQ ID NO: 2902 - DNA, 122 bp, Homo sapiens
  misc_feature (61)..(62): /note="This region represents a CpG dinucleotide"
  misc_feature (61)..(61): /note="Nucleotide may be methylated to form 5-methylcytosine"
acaatctttgcggcaccagggtgggactatttccccacttccatgttgaaactgacagaacgaattgtgtcttagagactctcaaacactaatgtcccctttgactatctaagctgttgagc

SEQ ID NO: 2903 - DNA, 122 bp, Homo sapiens
  misc_feature (61)..(62): /note="This region represents a CpG dinucleotide"
  misc_feature (61)..(61): /note="Nucleotide may be methylated to form 5-methylcytosine"
ataaaccaggattggaggcggtgcgtgtcccaggagagagggccagcgcggtgcgcgcctcgccaggcatgctgggaggagtagtctcctagccacttccggccgttggtcacaggttgccg

SEQ ID NO: 2904 - DNA, 122 bp, Homo sapiens
  misc_feature (61)..(62): /note="This region represents a CpG dinucleotide"
  misc_feature (61)..(61): /note="Nucleotide may be methylated to form 5-methylcytosine"
gtgaggggctactgaactatggttacctttggggaaaaaaaggccaagcccaagcagctgcgtagttctcttggactatgtactgcctctactggtagggcactgttgagccatactgcatg

SEQ ID NO: 2905 - DNA, 122 bp, Homo sapiens
  misc_feature (61)..(62): /note="This region represents a CpG dinucleotide"
  misc_feature (61)..(61): /note="Nucleotide may be methylated to form 5-methylcytosine"
ttgaagatgaaagtacaccccataggttgggagcgcccgaggataggggctcaagagtgccgttagagaatgttctggggtttaaatgccagctagaggtttccattggttacttggcttat

SEQ ID NO: 2906 - DNA, 122 bp, Homo sapiens
  misc_feature (61)..(62): /note="This region represents a CpG dinucleotide"
  misc_feature (61)..(61): /note="Nucleotide may be methylated to form 5-methylcytosine"
tggcagactaaaaaaacattattagatttccaatgaaaacttttgctgtagtggttctaacgtgacacagccctacaaaaataaagatgaatcacggcccatttcgaaggagaggtctgact

SEQ ID NO: 2907 - DNA, 122 bp, Homo sapiens
  misc_feature (61)..(62): /note="This region represents a CpG dinucleotide"
  misc_feature (61)..(61): /note="Nucleotide may be methylated to form 5-methylcytosine"
ataaaagccaagttcaactgaaaggtgggagaggaagggtctaaggaggagggcgtttcccgggagaacgcccagagctcggctcacctggcgatcctaattacaggggagtttcaccccca

SEQ ID NO: 2908 - DNA, 122 bp, Homo sapiens
  misc_feature (61)..(62): /note="This region represents a CpG dinucleotide"
  misc_feature (61)..(61): /note="Nucleotide may be methylated to form 5-methylcytosine"
actggaggaaggcacagaaagagaaagggcttggaagtagaaagagacattacttacctgcggtggagaccccaagaagatacagccactgctacagaagaaacagatgcacaggccaatga

SEQ ID NO: 2909 - DNA, 122 bp, Homo sapiens
  misc_feature (61)..(62): /note="This region represents a CpG dinucleotide"
  misc_feature (61)..(61): /note="Nucleotide may be methylated to form 5-methylcytosine"
gtatcccagtgaactgaatgagctgctcccagacagttagaatcgcagccggggcccaggcggctgactgcacagtgaggagccaggccggacaggccccaggcgcccccgcccagccctgg

SEQ ID NO: 2910 - DNA, 122 bp, Homo sapiens
  misc_feature (61)..(62): /note="This region represents a CpG dinucleotide"
  misc_feature (61)..(61): /note="Nucleotide may be methylated to form 5-methylcytosine"
catttgctttctcttgagctgtttattttgccagcaggcagggtcacctgtccaattgcccgctaatgaactgtacagtcttaactgccaacccactcccgcccgagaggagagggaaagga

SEQ ID NO: 2911 - DNA, 122 bp, Homo sapiens
  misc_feature (61)..(62): /note="This region represents a CpG dinucleotide"
  misc_feature (61)..(61): /note="Nucleotide may be methylated to form 5-methylcytosine"
ccaggggcattaaaaaaaggtgtatgtttaaaatgtacattttaaaatataaaatggattcgtgtcagggtgcatcaaggtatgcaacgggaaacccaccacaattctaaagtggggaagtt

SEQ ID NO: 2912 - DNA, 122 bp, Homo sapiens
  misc_feature (61)..(62): /note="This region represents a CpG dinucleotide"
  misc_feature (61)..(61): /note="Nucleotide may be methylated to form 5-methylcytosine"
ctcatgtctgtaatcccagcactttgggaggccaaggaggctggatcccttgagcctagacgttcaaggccaaggccagcctggataacatagggagaccttgtcaaaaaaaaaaaaaatac

SEQ ID NO: 2913 - DNA, 122 bp, Homo sapiens
  misc_feature (61)..(62): /note="This region represents a CpG dinucleotide"
  misc_feature (61)..(61): /note="Nucleotide may be methylated to form 5-methylcytosine"
cctgcacacggtcagtgttcattcctcgagattggcgtggaggctgaggctcaagagccacgcctgctcccgcctagcgggtgtctgcggaggcgcggttgacagaggatcacgttgctata

SEQ ID NO: 2914 - DNA, 122 bp, Homo sapiens
  misc_feature (61)..(62): /note="This region represents a CpG dinucleotide"
  misc_feature (61)..(61): /note="Nucleotide may be methylated to form 5-methylcytosine"
ttaacacacagaagtgtaaagatcctttatactttaataaaaagctaacagtcaggctagcgggtaacagggcctgttgcaatgtttgtattcaatacataaggtgaatatactttcacagt

SEQ ID NO: 2915 - DNA, 122 bp, Homo sapiens
  misc_feature (61)..(62): /note="This region represents a CpG dinucleotide"
  misc_feature (61)..(61): /note="Nucleotide may be methylated to form 5-methylcytosine"
catttgttgtgaacgattctgagtactccatgagtcaatggctcctgatacaaacggaagcgctgatgttgcctcccacccactcagcagggggatggccggggggcctccatcctcgcatg

SEQ ID NO: 2916 - DNA, 122 bp, Homo sapiens
  misc_feature (61)..(62): /note="This region represents a CpG dinucleotide"
  misc_feature (61)..(61): /note="Nucleotide may be methylated to form 5-methylcytosine"
tcaccattgtcaaattccagaacgttttcatcatctttgaaacaaattatactggccagacgcagtggctcacgcctctaatcccaacactttgggagaccggggtaggtggatcacttgag

SEQ ID NO: 2917 - DNA, 122 bp, Homo sapiens
  misc_feature (61)..(62): /note="This region represents a CpG dinucleotide"
  misc_feature (61)..(61): /note="Nucleotide may be methylated to form 5-methylcytosine"
agtagaggcaaccaggatgcagtccaaagattgggatatcccactcgcttttcctggagccggatgcagtcttcccgacttccggtggagatccgggggtggggggggggcgggaggggggc

SEQ ID NO: 2918 - DNA, 122 bp, Homo sapiens
  misc_feature (61)..(62): /note="This region represents a CpG dinucleotide"
  misc_feature (61)..(61): /note="Nucleotide may be methylated to form 5-methylcytosine"
cctgtatcattccaattttactactggtgttgcccaagcaagtggggggttgacattcttcgtggggtggggtagatgataagataaatgggctgtggtgaatgccatggatgatgtaatca

SEQ ID NO: 2919 - DNA, 122 bp, Homo sapiens
  misc_feature (61)..(62): /note="This region represents a CpG dinucleotide"
  misc_feature (61)..(61): /note="Nucleotide may be methylated to form 5-methylcytosine"
tataaaatactatgcattgttctaggcgttactcagaactaagtttgatgcagcataccacgactgaacttaatgcttctttaaagttgagaatgttctaactcatgaattcacaattttaa

SEQ ID NO: 2920 - DNA, 122 bp, Homo sapiens
  misc_feature (61)..(62): /note="This region represents a CpG dinucleotide"
  misc_feature (61)..(61): /note="Nucleotide may be methylated to form 5-methylcytosine"
gagaccgttgttctcatggaatgctggcacttcctctgcaaggcacagcgagaatctggacgtgcagagggatgtgcagattaaaactgatagaaaagtttcaaattaggagcacaaaaaat

SEQ ID NO: 2921 - DNA, 122 bp, Homo sapiens
  misc_feature (61)..(62): /note="This region represents a CpG dinucleotide"
  misc_feature (61)..(61): /note="Nucleotide may be methylated to form 5-methylcytosine"
tgcttcctgattctacataccctacgatggcttgaccccatgaatgatttacttgtcatacgtattctggaaaaggcagaatatccataaaggaactggaatctgactaataaggtaattta

SEQ ID NO: 2922 - DNA, 122 bp, Homo sapiens
  misc_feature (61)..(62): /note="This region represents a CpG dinucleotide"
  misc_feature (61)..(61): /note="Nucleotide may be methylated to form 5-methylcytosine"
tgcacagctcccctctgcttatcagatcatgattccagaatgttcttcatggctggccttcgctgtctgactgtccccgcctctcactgctcccaggtttggcttgctgaaaagggaacctg

SEQ ID NO: 2923 - DNA, 122 bp, Homo sapiens
  misc_feature (61)..(62): /note="This region represents a CpG dinucleotide"
  misc_feature (61)..(61): /note="Nucleotide may be methylated to form 5-methylcytosine"
gcaggacgagccgcagacaaaacccctgacaacgggttaaagacggaagtggcgagactccgtctcaaaaaaaaaaaaaaaaaaggaagtggcttcattccgcgggaacttcggcagacttg

SEQ ID NO: 2924 - DNA, 122 bp, Homo sapiens
  misc_feature (61)..(62): /note="This region represents a CpG dinucleotide"
  misc_feature (61)..(61): /note="Nucleotide may be methylated to form 5-methylcytosine"
gcgggacgttctcttcggtgcccgcttcccctgcctgggtgtggatggggcagcagtgggcgccactgtgcaacccccagccccagccccggccccgtcctcatcaacacatcatccagtca

SEQ ID NO: 2925 - DNA, 122 bp, Homo sapiens
  misc_feature (61)..(62): /note="This region represents a CpG dinucleotide"
  misc_feature (61)..(61): /note="Nucleotide may be methylated to form 5-methylcytosine"
ctaccagagctggagtctcatctgaaggctcaactgaggaaagatctactttcaacctcacgtagttgttggtaggatttagttaattgtggaccattgggtgaaattctttttcttgtggg

SEQ ID NO: 2926 - DNA, 122 bp, Homo sapiens
  misc_feature (61)..(62): /note="This region represents a CpG dinucleotide"
  misc_feature (61)..(61): /note="Nucleotide may be methylated to form 5-methylcytosine"
gcacttcctttcctttatcagcttatcctgctgcttcctcatagtactcacatgtctcatcgttttctgcctaagtatactctctgtgaaatcatcatattctatcttgcactctttctctg

SEQ ID NO: 2927 - DNA, 122 bp, Homo sapiens
  misc_feature (61)..(62): /note="This region represents a CpG dinucleotide"
  misc_feature (61)..(61): /note="Nucleotide may be methylated to form 5-methylcytosine"
gcagatcttggcaagaagtgctagaatttacagggtttgatgcagagtccagagtgaggacgggaagctatgactaaaactctgcccaaggcactaagaaaggcttgactaagaaggaattc

SEQ ID NO: 2928 - DNA, 122 bp, Homo sapiens
  misc_feature (61)..(62): /note="This region represents a CpG dinucleotide"
  misc_feature (61)..(61): /note="Nucleotide may be methylated to form 5-methylcytosine"
atgagaggcccatgggcatccaagtgaagacctgtggctggccagcacaggtctgagctccgtgtcgaaggacccttccaggtctatgtcacctcatctacgacctgctgcaatgcctgact

SEQ ID NO: 2929 - DNA, 122 bp, Homo sapiens
  misc_feature (61)..(62): /note="This region represents a CpG dinucleotide"
  misc_feature (61)..(61): /note="Nucleotide may be methylated to form 5-methylcytosine"
ggtccacagtcaggatgtctccatcccacactgcccagctgggtggcggagtttgtggatcggatattccttcctcatggtatgtggtatttgcccagttcccctccccaaccacaccctgc

SEQ ID NO: 2930 - DNA, 122 bp, Homo sapiens
  misc_feature (61)..(62): /note="This region represents a CpG dinucleotide"
  misc_feature (61)..(61): /note="Nucleotide may be methylated to form 5-methylcytosine"
gcagggggcgaggacacttcccgagacgcgcttcccctgctgtaggcaggtggggtgacgcgagatgccaggcgcgggactgtgagcctgtccaacccagccagagaaaacgttcagcatct

SEQ ID NO: 2931 - DNA, 122 bp, Homo sapiens
  misc_feature (61)..(62): /note="This region represents a CpG dinucleotide"
  misc_feature (61)..(61): /note="Nucleotide may be methylated to form 5-methylcytosine"
tctatcttagatgttttataatgcaggagtcaacatcagtcactgaatggcaggggatatcgcttctgaacaagatatggaccacatttacaggaccagggagggaaaggtgccatattcat

SEQ ID NO: 2932 - DNA, 122 bp, Homo sapiens
  misc_feature (61)..(62): /note="This region represents a CpG dinucleotide"
  misc_feature (61)..(61): /note="Nucleotide may be methylated to form 5-methylcytosine"
gacatattgcaacatacatgaaacctctgtgatctatttatggtcacagaaagtaggtaacgttctgagataaagagcttggaggcaaggtgatgtggccagtcacagtaaaaaataagtaa

SEQ ID NO: 2933 - DNA, 122 bp, Homo sapiens
  misc_feature (61)..(62): /note="This region represents a CpG dinucleotide"
  misc_feature (61)..(61): /note="Nucleotide may be methylated to form 5-methylcytosine"
gccaatgttacttgatgattcaatttctcagcaatatctggcacatggttcccaggtcatcggtgagaagaagcagcctcaaccgggtcatggagcctctcagctagaagccctcttagctg

SEQ ID NO: 2934 - DNA, 122 bp, Homo sapiens
  misc_feature (61)..(62): /note="This region represents a CpG dinucleotide"
  misc_feature (61)..(61): /note="Nucleotide may be methylated to form 5-methylcytosine"
aatataaaactaaaatatgaactgttgacatttcctccactcctcctcccccattttctacggaaatatcatttataggctgctggaagccagcttttagtcacagtgttttcaatagtagg

SEQ ID NO: 2935 - DNA, 122 bp, Homo sapiens
  misc_feature (61)..(62): /note="This region represents a CpG dinucleotide"
  misc_feature (61)..(61): /note="Nucleotide may be methylated to form 5-methylcytosine"
gcctcagcggagcgtcccacggcagtcccggacccgcgcctctcccgcccggctcctgcacgcccagcgagcctgcagcctgggatcctccgctcctgcatcccggctcgggatgggtcccg

SEQ ID NO: 2936 - DNA, 122 bp, Homo sapiens
  misc_feature (61)..(62): /note="This region represents a CpG dinucleotide"
  misc_feature (61)..(61): /note="Nucleotide may be methylated to form 5-methylcytosine"
atcaaactactttccgtatcagtttttccacatcaaagtttagacaagattggacatgttcgtggtggtatggctgtagtcaggtactggtggctgtaccagtttacatcccaccagcaatg

SEQ ID NO: 2937 - DNA, 122 bp, Homo sapiens
  misc_feature (61)..(62): /note="This region represents a CpG dinucleotide"
  misc_feature (61)..(61): /note="Nucleotide may be methylated to form 5-methylcytosine"
gaatggtcttttgtttatatatatatatatatatatatatatatatatatatttttaaatcggagtcttgtcacccaggctggtatgcaatgacgtgatctcggctcactgtaaccttcacc

SEQ ID NO: 2938 - DNA, 122 bp, Homo sapiens
  misc_feature (61)..(62): /note="This region represents a CpG dinucleotide"
  misc_feature (61)..(61): /note="Nucleotide may be methylated to form 5-methylcytosine"
ttcagagtccgattctggatcctgatagatctgcatttctcaaagcagacaagttgctctcgccagccttggagaagcttcctgcatgatgggcacgtcacctagaaacaacataaactgca

SEQ ID NO: 2939 - DNA, 122 bp, Homo sapiens
  misc_feature (61)..(62): /note="This region represents a CpG dinucleotide"
  misc_feature (61)..(61): /note="Nucleotide may be methylated to form 5-methylcytosine"
tttgataataatagatactgtttacccagtgcttgatgccaggcattgctacaaacactgcgtacacattattctatttaatcttcataacccagtgaggtaggtactgtcattactgtcct

SEQ ID NO: 2940 - DNA, 122 bp, Homo sapiens
  misc_feature (61)..(62): /note="This region represents a CpG dinucleotide"
  misc_feature (61)..(61): /note="Nucleotide may be methylated to form 5-methylcytosine"
caccaccaccctcggcgtgggatgccggcccgcgaggaacctcggggacacacaaatggccgcacctgaatctggctgccattgtgactctgccgcgcacgcgcagctccatcccctttgag

SEQ ID NO: 2941 - DNA, 122 bp, Homo sapiens
  misc_feature (61)..(62): /note="This region represents a CpG dinucleotide"
  misc_feature (61)..(61): /note="Nucleotide may be methylated to form 5-methylcytosine"
agaattttttttttttgtaaatgaattccatgcttttccttcctttcccttccctgccttcgtgaaagggaagctaagtctttctcctaccccagattccttgaaggctgtctgagttctct

SEQ ID NO: 2942 - DNA, 122 bp, Homo sapiens
  misc_feature (61)..(62): /note="This region represents a CpG dinucleotide"
  misc_feature (61)..(61): /note="Nucleotide may be methylated to form 5-methylcytosine"
aagcgctttctattcagtcctcaaatgcaaagcagacccttgctaataatggtaataatccgaatgggtttaactgcagcattgtaagaaaaggcaggcagtactcttagactacaggggtg

SEQ ID NO: 2943 - DNA, 122 bp, Homo sapiens
  misc_feature (61)..(62): /note="This region represents a CpG dinucleotide"
  misc_feature (61)..(61): /note="Nucleotide may be methylated to form 5-methylcytosine"
caaaggggtataaatgagcactatagcttagtttgatactttttctgctcctcctccatccgtggctcatagctcaaaacaccaatctagttgatttggttacacagctgacagtggcaatt

SEQ ID NO: 2944 - DNA, 122 bp, Homo sapiens
  misc_feature (61)..(62): /note="This region represents a CpG dinucleotide"
  misc_feature (61)..(61): /note="Nucleotide may be methylated to form 5-methylcytosine"
gtccccatgggcgcaaacactgaggccttagctagcagagagcacaggcttcagagcggccgctcccagattcctgcactgcccccctctgcagcttcacaaacctccgcttccgcttccgc

SEQ ID NO: 2945 - DNA, 122 bp, Homo sapiens
  misc_feature (61)..(62): /note="This region represents a CpG dinucleotide"
  misc_feature (61)..(61): /note="Nucleotide may be methylated to form 5-methylcytosine"
ctgccttcccgggcgcatatgcgagcgcagcacccggcgctgccgagccacctcccccgccgcccgctagcaagtttggcggctccaagccaggcgcgcctcaggatccaggctcatttgct

SEQ ID NO: 2946 - DNA, 122 bp, Homo sapiens
  misc_feature (61)..(62): /note="This region represents a CpG dinucleotide"
  misc_feature (61)..(61): /note="Nucleotide may be methylated to form 5-methylcytosine"
caaacactgtgttttgtttttgtttttttcctccagtgaaagggcaaatgaattaggcaacgcattcttcaagacgcgagttcagttaacttttaatccttgttcggtttaggacacttcta

SEQ ID NO: 2947 - DNA, 122 bp, Homo sapiens
  misc_feature (61)..(62): /note="This region represents a CpG dinucleotide"
  misc_feature (61)..(61): /note="Nucleotide may be methylated to form 5-methylcytosine"
aaaaatgttttgtaccaaaatatacttcttgaacatattttgagatggttattcagagggcgtgtagacaggaatagccctgaaaagctgccttttgtggagatttgcatctgtagagaaaa

SEQ ID NO: 2948 - DNA, 122 bp, Homo sapiens
  misc_feature (61)..(62): /note="This region represents a CpG dinucleotide"
  misc_feature (61)..(61): /note="Nucleotide may be methylated to form 5-methylcytosine"
gttccacaggtgagtctgatatgcatagttctgagaacaaccgttataagtacacacgaccgtgccttttccatctactattcattgcctgatggggggcaagtgctgggatgcagagcatc

SEQ ID NO: 2949 - DNA, 122 bp, Homo sapiens
  misc_feature (61)..(62): /note="This region represents a CpG dinucleotide"
  misc_feature (61)..(61): /note="Nucleotide may be methylated to form 5-methylcytosine"
aacttatgttgtgtcagaggcaccatttactcactgaatattatttaatacctcctaccacgtgccaagtactaagctaagcaatatccaatacagcagtgaacaaacagtctctgtttatg

SEQ ID NO: 2950 - DNA, 122 bp, Homo sapiens
  misc_feature (61)..(62): /note="This region represents a CpG dinucleotide"
  misc_feature (61)..(61): /note="Nucleotide may be methylated to form 5-methylcytosine"
cagtttaacagattctgcctccgggaaccaactgccgggagattctgattggctcagccgcgtgcccacgtgaccgaccaaaaccggccaccagggtctcccaactgcctgtcaaacgcaca

SEQ ID NO: 2951 - DNA, 122 bp, Homo sapiens
  misc_feature (61)..(62): /note="This region represents a CpG dinucleotide"
  misc_feature (61)..(61): /note="Nucleotide may be methylated to form 5-methylcytosine"
cttagttattatgcactggtccccaagagcaatttctgcgctgctgttgcaaaaattcatcgtaatgaaataaacgtaaaaggggaaaatgtgttatgaagtgttggagggtgctttgctca

SEQ ID NO: 2952 - DNA, 122 bp, Homo sapiens
  misc_feature (61)..(62): /note="This region represents a CpG dinucleotide"
  misc_feature (61)..(61): /note="Nucleotide may be methylated to form 5-methylcytosine"
ctgagatttttaaaaaactctcagcagcacacgaggctgttcacagtaatacttaataaacgtctgttgaatgagtgaatgaaatgtggcctcagcaagccaccctagtgtctggctgggtt

SEQ ID NO: 2953 - DNA, 122 bp, Homo sapiens
  misc_feature (61)..(62): /note="This region represents a CpG dinucleotide"
  misc_feature (61)..(61): /note="Nucleotide may be methylated to form 5-methylcytosine"
ggatctctgtcacccactctgtgtgtgtatgctagccctgatgggcttccccctcagagccggcatgctctctctctcactccctctctcctcattcatccatccatgcatccatccaccca

SEQ ID NO: 2954 - DNA, 122 bp, Homo sapiens
  misc_feature (61)..(62): /note="This region represents a CpG dinucleotide"
  misc_feature (61)..(61): /note="Nucleotide may be methylated to form 5-methylcytosine"
tgtctgacgctaaggtgcattttttaggtacatttttcatacagtaaaatgtatagatcacgtgtccagcttgatgtcacgcatgggtatgcacgacctgtgtaaacaccacccaggacatt

SEQ ID NO: 2955 - DNA, 122 bp, Homo sapiens
  misc_feature (61)..(62): /note="This region represents a CpG dinucleotide"
  misc_feature (61)..(61): /note="Nucleotide may be methylated to form 5-methylcytosine"
gtcaaacggcgaaggggcactgagcgttttttctttctcccgtccttggcggcagcagctcggttccggctacggggctgagcccgtctctcagacgaggaaactggggtccgagaggtgag

SEQ ID NO: 2956 - DNA, 122 bp, Homo sapiens
  misc_feature (61)..(62): /note="This region represents a CpG dinucleotide"
  misc_feature (61)..(61): /note="Nucleotide may be methylated to form 5-methylcytosine"
caagctctgcccagaaggcctggaggtcattagtgcgccagggggtcccggggcacccagcggagcaggtggtgggaaatgtggtggctggcttaactggtcaaggaggcagggtcgcaccg

SEQ ID NO: 2957 - DNA, 122 bp, Homo sapiens
  misc_feature (61)..(62): /note="This region represents a CpG dinucleotide"
  misc_feature (61)..(61): /note="Nucleotide may be methylated to form 5-methylcytosine"
gggcggggaaagagggggaggtttgctactttccataaaactaaaaggtcccttcgagggcggtattcttataagtgtgtgttctcagtttgccgaacctactgtgttttccaagggcttct

SEQ ID NO: 2958 - DNA, 122 bp, Homo sapiens
  misc_feature (61)..(62): /note="This region represents a CpG dinucleotide"
  misc_feature (61)..(61): /note="Nucleotide may be methylated to form 5-methylcytosine"
catttttataagcttgctttttgttactgtcataatccactcagctcttataaatgccttcgcctgccttccaaatgccatggcttttgcagtgatatttgcacctgtggtgttacgctggc

SEQ ID NO: 2959 - DNA, 122 bp, Homo sapiens
  misc_feature (61)..(62): /note="This region represents a CpG dinucleotide"
  misc_feature (61)..(61): /note="Nucleotide may be methylated to form 5-methylcytosine"
tgatcagtattaaaatctcacaaagtagttttcatcttcaatgcagtttcagcattccaacgaggtatgtaatattgtctgtaatttctaggaaggagaggagtaatttcaagtcagagaca

SEQ ID NO: 2960 - DNA, 122 bp, Homo sapiens
  misc_feature (61)..(62): /note="This region represents a CpG dinucleotide"
  misc_feature (61)..(61): /note="Nucleotide may be methylated to form 5-methylcytosine"
ctcagacactggatgactcaaagcctagtttaccactgatttccaagatgatgtcagcaacgcagtctgctccattcaacctggcaatcggctctgtgcaggcgatgccccacctgcccctg

SEQ ID NO: 2961 - DNA, 122 bp, Homo sapiens
  misc_feature (61)..(62): /note="This region represents a CpG dinucleotide"
  misc_feature (61)..(61): /note="Nucleotide may be methylated to form 5-methylcytosine"
cagcagatggtgtttcctggattctgtcccagtgtgtaaaatatgtatgaatgaggaggacgcctggaaggaaataaataaaaccgaaaacacatttgttggggtgatgaaatgatgcatga

SEQ ID NO: 2962 - DNA, 122 bp, Homo sapiens
  misc_feature (61)..(62): /note="This region represents a CpG dinucleotide"
  misc_feature (61)..(61): /note="Nucleotide may be methylated to form 5-methylcytosine"
attggaccttcagtttagtaatgaccagagctaaagataggcctggcacacctgggcacccgtctatatctttatattctgtttatgtggcctgtttgctagtggatgagagtagactatga

SEQ ID NO: 2963 - DNA, 122 bp, Homo sapiens
  misc_feature (61)..(62): /note="This region represents a CpG dinucleotide"
  misc_feature (61)..(61): /note="Nucleotide may be methylated to form 5-methylcytosine"
gtccagcactagtgatcttgtcctatttccacctgcagctttttgaatctaagtacacatcgcatttcaaaactcccacgttaaagaaaggcatcagttcaagttactttctcattttctgt

SEQ ID NO: 2964 - DNA, 122 bp, Homo sapiens
  misc_feature (61)..(62): /note="This region represents a CpG dinucleotide"
  misc_feature (61)..(61): /note="Nucleotide may be methylated to form 5-methylcytosine"
actccgggcgcggttctggaagcagtctcggggcaaggggctgctgcacggcccccaggacgaccttcgagacaatgtcctcaactacgatgagcaaggaggcggggaggaggaccaggtga

SEQ ID NO: 2965 - DNA, 122 bp, Homo sapiens
  misc_feature (61)..(62): /note="This region represents a CpG dinucleotide"
  misc_feature (61)..(61): /note="Nucleotide may be methylated to form 5-methylcytosine"
cccagcgccaaccccgccgagcccgacggcgccgccgagccgcccgtggtcaagcggccgcgcaagaagatgaagtggatccccaccagcaacccgcttccgcagcccttcaaggagccgct

SEQ ID NO: 2966 - DNA, 122 bp, Homo sapiens
  misc_feature (61)..(62): /note="This region represents a CpG dinucleotide"
  misc_feature (61)..(61): /note="Nucleotide may be methylated to form 5-methylcytosine"
tcatgaggactccagctggcttaggaagctcagcaagggtgatggcagcatcgcctgggccgtgcgtggtgccgctatgaaggaagcaatagctgaatcagaaatatctgttatggtgcatt

SEQ ID NO: 2967 - DNA, 122 bp, Homo sapiens
  misc_feature (61)..(62): /note="This region represents a CpG dinucleotide"
  misc_feature (61)..(61): /note="Nucleotide may be methylated to form 5-methylcytosine"
acaagccagggacgcccagggtcccctggtccccaggcatgcgttatggggaggcactttcgcccatgggggggacctctgccatttagtttgtgttttcctttcacaccacagctgcctcg

SEQ ID NO: 2968 - DNA, 122 bp, Homo sapiens
  misc_feature (61)..(62): /note="This region represents a CpG dinucleotide"
  misc_feature (61)..(61): /note="Nucleotide may be methylated to form 5-methylcytosine"
agaaaacactgctgctggccgtgtttcctgtgagttttgagggtgacctgagttgagttgcgtgtaggcagctcaggttgactgagacaggaatgcgctcgatttcctgcccgttaaaacac

SEQ ID NO: 2969 - DNA, 122 bp, Homo sapiens
  misc_feature (61)..(62): /note="This region represents a CpG dinucleotide"
  misc_feature (61)..(61): /note="Nucleotide may be methylated to form 5-methylcytosine"
ggggcccggcctgcgagcctcagggagcgtgagcggatccgagggtgtaatgtgtgtactcgagtgtgcgtgcctgtgtgtggctaaagatagtgtgtgagcgcctggacagatggttaccc

SEQ ID NO: 2970 - DNA, 122 bp, Homo sapiens
  misc_feature (61)..(62): /note="This region represents a CpG dinucleotide"
  misc_feature (61)..(61): /note="Nucleotide may be methylated to form 5-methylcytosine"
cgggagcacttaaaacaatacctattatgttgtaagtgctcagctaatatttgttgaacacgtgaatgaatgaaagattcctggcacaaagtgctaatcttcaataaatattgtttgaactg

SEQ ID NO: 2971 - DNA, 122 bp, Homo sapiens
  misc_feature (61)..(62): /note="This region represents a CpG dinucleotide"
  misc_feature (61)..(61): /note="Nucleotide may be methylated to form 5-methylcytosine"
gagccgccgccgccgccgccgccccctttcctccctcctccctcagtgcgtccctcccaccgaggcccgcctcgtatttcctagatccggtctgagcgagagcttggcaagcaagctctggc

SEQ ID NO: 2972 - DNA, 122 bp, Homo sapiens
  misc_feature (61)..(62): /note="This region represents a CpG dinucleotide"
  misc_feature (61)..(61): /note="Nucleotide may be methylated to form 5-methylcytosine"
atggaattattcagagtctggtgttggctgatgggaatgcgtcatgataggaatctctcacgtgtatcactataagctgactgctttctagagcatagtgaagtcatcagctgagagatgag

SEQ ID NO: 2973 - DNA, 122 bp, Homo sapiens
  misc_feature (61)..(62): /note="This region represents a CpG dinucleotide"
  misc_feature (61)..(61): /note="Nucleotide may be methylated to form 5-methylcytosine"
ctgcccatagagagtccaaacgcatgaattcctgctggtatcagcttcggaggcagaggtcgcgagctgagcttgggacaacccttcaagcctgctagcaattacctgctctcagccacttt

SEQ ID NO: 2974 - DNA, 122 bp, Homo sapiens
  misc_feature (61)..(62): /note="This region represents a CpG dinucleotide"
  misc_feature (61)..(61): /note="Nucleotide may be methylated to form 5-methylcytosine"
atatgtgttgtgtttgtgtacagaattggcttcagcaaccaaccacttcctcattctcatcgcaccctctagtccatagaaggagagagaaagagagagagaaagaaaaagagagagggtta

SEQ ID NO: 2975 - DNA, 122 bp, Homo sapiens
  misc_feature (61)..(62): /note="This region represents a CpG dinucleotide"
  misc_feature (61)..(61): /note="Nucleotide may be methylated to form 5-methylcytosine"
gggaacgcgcaagaagccggcatgctgggaagttactcatagctcctggggtcaccctcccgccccatgcccatccggatgagatgttttcgtgagttgcgtaactcacagccacccggtaa

SEQ ID NO: 2976 - DNA, 122 bp, Homo sapiens
  misc_feature (61)..(62): /note="This region represents a CpG dinucleotide"
  misc_feature (61)..(61): /note="Nucleotide may be methylated to form 5-methylcytosine"
gccaccgcgcccggccaatgtcttcattttctaattggggaatccgttgagggcgcagctcggccttaaaaacctgtacttgcgattctaagaccagcgcgggttttccgtgccccaccttg

SEQ ID NO: 2977 - DNA, 122 bp, Homo sapiens
  misc_feature (61)..(62): /note="This region represents a CpG dinucleotide"
  misc_feature (61)..(61): /note="Nucleotide may be methylated to form 5-methylcytosine"
cttccaccctgagctcctgactctgagccaattacgcaggacgtgagttctcaacgctggcgacacactgaagccacctggagagcttggacaggctccaacaccagggtcgtccagtgtgg

SEQ ID NO: 2978 - DNA, 122 bp, Homo sapiens
  misc_feature (61)..(62): /note="This region represents a CpG dinucleotide"
  misc_feature (61)..(61): /note="Nucleotide may be methylated to form 5-methylcytosine"
cacaattaaagctgtgttggttaggttgctttcaaagaagttttttttttttttttcctccgaagcctcctgaatctctcacatgctagttgagctttaatagggtggggagtaatggagaa

SEQ ID NO: 2979 - DNA, 122 bp, Homo sapiens
  misc_feature (61)..(62): /note="This region represents a CpG dinucleotide"
  misc_feature (61)..(61): /note="Nucleotide may be methylated to form 5-methylcytosine"
gaggagagcgccctgtgagtgcctgacaaatggaggtatttctttccaggttttacaacccgatgtattttcagggaggaccttcctaggtacctccacttctcagtctctcaactcagcag

SEQ ID NO: 2980 - DNA, 122 bp, Homo sapiens
  misc_feature (61)..(62): /note="This region represents a CpG dinucleotide"
  misc_feature (61)..(61): /note="Nucleotide may be methylated to form 5-methylcytosine"
gtagagcccagaggaccactgtgctgtgtccacagatctgcagtctgggcagggcgtggccgggaggggcctctctgccccggtgggggtggggccgctgtaaacagggctggccctggctc

SEQ ID NO: 2981 - DNA, 122 bp, Homo sapiens
  misc_feature (61)..(62): /note="This region represents a CpG dinucleotide"
  misc_feature (61)..(61): /note="Nucleotide may be methylated to form 5-methylcytosine"
gttctcatgtcccatgaatcgcttctgcctcagcattttcagagtgaagaacaataaggacgggtaccttccctcatactccagaccttttagtgaccctaggctgtgttctcagtcatccg

SEQ ID NO: 2982 - DNA, 122 bp, Homo sapiens
  misc_feature (61)..(62): /note="This region represents a CpG dinucleotide"
  misc_feature (61)..(61): /note="Nucleotide may be methylated to form 5-methylcytosine"
ttgtccgcgcgtgctgtggtctacccagtgtctgtctccggccacagttcgtttctcggtcggtttagtgtccgtgtagccacccaaccgtgtggccgaccattcgcgctttcatttgtcct

SEQ ID NO: 2983 - DNA, 122 bp, Homo sapiens
  misc_feature (61)..(62): /note="This region represents a CpG dinucleotide"
  misc_feature (61)..(61): /note="Nucleotide may be methylated to form 5-methylcytosine"
ctagaaagttagaaggaagctctgagctcccgaatgtggtaaccccaaccccagtatcatcgtggtctcaagtttctatctgtctgggttctgcccttctggcttagtgctcagatggcccc

SEQ ID NO: 2984 - DNA, 122 bp, Homo sapiens
  misc_feature (61)..(62): /note="This region represents a CpG dinucleotide"
  misc_feature (61)..(61): /note="Nucleotide may be methylated to form 5-methylcytosine"
cgtgtccagaaagccagtgctgggcctttagctctagtccatcagggtaatgccaaaccccggcccagcccagtccctaagactgacagccatggagggcagggccaggcctcccagggccc

SEQ ID NO: 2985 - DNA, 122 bp, Homo sapiens
  misc_feature (61)..(62): /note="This region represents a CpG dinucleotide"
  misc_feature (61)..(61): /note="Nucleotide may be methylated to form 5-methylcytosine"
cacgcacagaggccctggggcaggacctgcctggtgtgtaggagaaacagcgacgaggcccgtgcagctggagcagcgtgagcaaggagaagaggagccgggaggaagccgatgcggcgggt

SEQ ID NO: 2986 - DNA, 122 bp, Homo sapiens
  misc_feature (61)..(62): /note="This region represents a CpG dinucleotide"
  misc_feature (61)..(61): /note="Nucleotide may be methylated to form 5-methylcytosine"
cttgagaatgttgaatagacttcttacaaaagttatcagaggccagtctgataaatcagacgagaaattaggaacatctgagttattttctaagatgggttaatgaagagatgaggatttgc

SEQ ID NO: 2987 - DNA, 122 bp, Homo sapiens
  misc_feature (61)..(62): /note="This region represents a CpG dinucleotide"
  misc_feature (61)..(61): /note="Nucleotide may be methylated to form 5-methylcytosine"
attgaagatcccatattgctactttaggacttttactgtgcccctggagccagcagaggccgctgtcaggcgggggctgctggattgaactgacatcactgctttgtttcgggtcaggagaa

SEQ ID NO: 2988 - DNA, 122 bp, Homo sapiens
  misc_feature (61)..(62): /note="This region represents a CpG dinucleotide"
  misc_feature (61)..(61): /note="Nucleotide may be methylated to form 5-methylcytosine"
agcagacaggtcctgggcggggctggttatttctgcagtactgggaggttagaaagcctacgggccgctctgtgcttgagacctatagtcataggtttcaggaaacttctcaggtcaccaaa

SEQ ID NO: 2989 - DNA, 122 bp, Homo sapiens
  misc_feature (61)..(62): /note="This region represents a CpG dinucleotide"
  misc_feature (61)..(61): /note="Nucleotide may be methylated to form 5-methylcytosine"
ttgctgggattacagtcaggagccactgtgcctggcctgaatatcagtaagtatttttttcgaagaataaattctgctatatattctgtttatgctggtaacgatttgtttatgcagcttgt

SEQ ID NO: 2990 - DNA, 122 bp, Homo sapiens
  misc_feature (61)..(62): /note="This region represents a CpG dinucleotide"
  misc_feature (61)..(61): /note="Nucleotide may be methylated to form 5-methylcytosine"
cagcccgggagccgggggcgtggggaggctgcgctttgctggcttccaggaagacgcacacgctgtgtgtggccagagaccggggcacctctttgttggcggccccattgacttaggggcga

SEQ ID NO: 2991 - DNA, 122 bp, Homo sapiens
  misc_feature (61)..(62): /note="This region represents a CpG dinucleotide"
  misc_feature (61)..(61): /note="Nucleotide may be methylated to form 5-methylcytosine"
agcacagctcttatgtgcaaagcccctgtaggtgctggagggattcactgatggccttggcggaggtggcagtgggcatgtgcacttggctctgacacagccactcatgcaacaccctgtgc

SEQ ID NO: 2992 - DNA, 122 bp, Homo sapiens
  misc_feature (61)..(62): /note="This region represents a CpG dinucleotide"
  misc_feature (61)..(61): /note="Nucleotide may be methylated to form 5-methylcytosine"
tccaaagggttggcaaaaaagataaactctgaggcagccctgctgggttctaatccacatcgtgtgagactaagaaataattacacatcctttatgtcttcctttgtcatctcctgtaaaat

SEQ ID NO: 2993 - DNA, 122 bp, Homo sapiens
  misc_feature (61)..(62): /note="This region represents a CpG dinucleotide"
  misc_feature (61)..(61): /note="Nucleotide may be methylated to form 5-methylcytosine"
agtcccagccgcccctcgcgggggtgggggaccgccccgtgggccgggcatcccctcaggcgctgccaccccgcctagcctgaggggaggaacccgccgggcctcatctagcggcccagcca

SEQ ID NO: 2994 - DNA, 122 bp, Homo sapiens
  misc_feature (61)..(62): /note="This region represents a CpG dinucleotide"
  misc_feature (61)..(61): /note="Nucleotide may be methylated to form 5-methylcytosine"
acgggcaggtgccaccgccccagggggctaatctgatccatctctgcgagggaaggtgctcgctcgtagctcccaggcgcggtctccagggcgctggggcacgtgtaggggtggggagaagc

SEQ ID NO: 2995 - DNA, 122 bp, Homo sapiens
  misc_feature (61)..(62): /note="This region represents a CpG dinucleotide"
  misc_feature (61)..(61): /note="Nucleotide may be methylated to form 5-methylcytosine"
ttccttcaatctatctcatgtggtcatttattcatttgacaaaaatttattaaatacgtacggtgtgacaagcactggggtaacaagggcaaataacacttccagttccaaatctcatagaa

SEQ ID NO: 2996 - DNA, 122 bp, Homo sapiens
  misc_feature (61)..(62): /note="This region represents a CpG dinucleotide"
  misc_feature (61)..(61): /note="Nucleotide may be methylated to form 5-methylcytosine"
ggggactgatgccggtgaattacaggaagaaagaggaaaggggtggattgatgtgaagatcggaggaggaagctcacacatttgatatggtatttctttgggtcattgagcagaagcggaac

SEQ ID NO: 2997 - DNA, 122 bp, Homo sapiens
  misc_feature (61)..(62): /note="This region represents a CpG dinucleotide"
  misc_feature (61)..(61): /note="Nucleotide may be methylated to form 5-methylcytosine"
tgtgagaaatgcaattttgcctggagtatttcaacaggcaccctcagctgatgtgtttgccgttggcctggctgacactttcttagaaacacactgcagtttgctgcaggttgaattgcctt

SEQ ID NO: 2998 - DNA, 122 bp, Homo sapiens
  misc_feature (61)..(62): /note="This region represents a CpG dinucleotide"
  misc_feature (61)..(61): /note="Nucleotide may be methylated to form 5-methylcytosine"
atttttaacatagttccaccttcttccactaagaaggtattctgaaatcaaatgtgtacacgcaacatgactatagggattattttagagccactttatgtatacatgtatatttttaagta

SEQ ID NO: 2999 - DNA, 122 bp, Homo sapiens
  misc_feature (61)..(62): /note="This region represents a CpG dinucleotide"
  misc_feature (61)..(61): /note="Nucleotide may be methylated to form 5-methylcytosine"
tagctatgacacatggcttggaaattaacctttaaccaaacatcttataagtaacgccagcgcagcttcccttgtgaatgtaaagagatccagggctcttggagagggacaagtgagagcca

SEQ ID NO: 3000 - DNA, 122 bp, Homo sapiens
  misc_feature (61)..(62): /note="This region represents a CpG dinucleotide"
  misc_feature (61)..(61): /note="Nucleotide may be methylated to form 5-methylcytosine"
cataatacttggtcattttacttaatccttctggtcttttactcaaagggcatcatagcacgtttcttccaggattgttatgatgtttgaatgagaagatatatgtaaatatgcttaacatg

SEQ ID NO: 3001 - DNA, 122 bp, Homo sapiens
  misc_feature (61)..(62): /note="This region represents a CpG dinucleotide"
  misc_feature (61)..(61): /note="Nucleotide may be methylated to form 5-methylcytosine"
ttgattatggtaattgttttgctcaggttgtacgggtatggccaattttgtttgaaagctcgctctttctctgcgctttcctgtcgagttcccttcaggttctggtttcctccgacggtggc

SEQ ID NO: 3002 - DNA, 122 bp, Homo sapiens
  misc_feature (61)..(62): /note="This region represents a CpG dinucleotide"
  misc_feature (61)..(61): /note="Nucleotide may be methylated to form 5-methylcytosine"
ttttggcagcaagcggtaagggcggattccagttctggttccgggtcctctactggggagcggatgtgtgtcaattgccctcctagcctggcctggtgtagtgtgcaggagccatgtggggt

SEQ ID NO: 3003 - DNA, 122 bp, Homo sapiens
  misc_feature (61)..(62): /note="This region represents a CpG dinucleotide"
  misc_feature (61)..(61): /note="Nucleotide may be methylated to form 5-methylcytosine"
tatgagggatgagtagaatctgcagaattgcaaacctgttcatttcatgtgataaatgtgcgaggagagggtgaacaaatgagtgatgcttcaaatttcaaatccagaagaccataaacctg

SEQ ID NO: 3004 - DNA, 122 bp, Homo sapiens
  misc_feature (61)..(62): /note="This region represents a CpG dinucleotide"
  misc_feature (61)..(61): /note="Nucleotide may be methylated to form 5-methylcytosine"
gctcactggagccagaggactttggctcccaggctgtttactgcagctgagactttgtcccgtaagtgttcttaggaaatgacaatggacagaaaattgtcattgtttttgctgaaaaaaaa

SEQ ID NO: 3005 - DNA, 122 bp, Homo sapiens
  misc_feature (61)..(62): /note="This region represents a CpG dinucleotide"
  misc_feature (61)..(61): /note="Nucleotide may be methylated to form 5-methylcytosine"
cctcgtgacttccttctctagcccctttccctagggactcctggaaaatgtacttgtactcgtaactgaggaattagggagaggacggagatgcttgaaaagcacttgctaattaataaaga

SEQ ID NO: 3006 - DNA, 122 bp, Homo sapiens
  misc_feature (61)..(62): /note="This region represents a CpG dinucleotide"
  misc_feature (61)..(61): /note="Nucleotide may be methylated to form 5-methylcytosine"
aagtcctgtgattaaaaagtaacttttgcaaagaaaacagtcactcaataatttatccttcgtattatgccattcctttgcttctgttgttcttatctttccaaaccttactcttccataaa

SEQ ID NO: 3007 - DNA, 122 bp, Homo sapiens
  misc_feature (61)..(62): /note="This region represents a CpG dinucleotide"
  misc_feature (61)..(61): /note="Nucleotide may be methylated to form 5-methylcytosine"
accccagcatttctgggtttgatttgctatatgggagagtatctctgtgtcttttgtccacgttattatttgttatgaaaaattatgagcatgttccctaagactaggttttctagcatggt

SEQ ID NO: 3008 - DNA, 122 bp, Homo sapiens
  misc_feature (61)..(62): /note="This region represents a CpG dinucleotide"
  misc_feature (61)..(61): /note="Nucleotide may be methylated to form 5-methylcytosine"
gactaaaagattgtccctaaaatctgatagtgctatttaataatccagaccaggctgaaacgaggactaaggaaaaggcaatgcaaatagagatatatgtacttacttacatttttttgctt

SEQ ID NO: 3009 - DNA, 122 bp, Homo sapiens
  misc_feature (61)..(62): /note="This region represents a CpG dinucleotide"
  misc_feature (61)..(61): /note="Nucleotide may be methylated to form 5-methylcytosine"
ttctccaaagacgatgcaatgtttataaaactcaggatgagcttgactcacgataacagacggagcgatcaggggaggcaatgttagctgttatgggctaatttatatcccccaccaaccac

SEQ ID NO: 3010 - DNA, 122 bp, Homo sapiens
  misc_feature (61)..(62): /note="This region represents a CpG dinucleotide"
  misc_feature (61)..(61): /note="Nucleotide may be methylated to form 5-methylcytosine"
agtcattagatgagtacattagattgagtcaatttcctcccagatcctcagcaaaactctcgagccagttccttactacttgggggatggcttgcctgactgagcgcagctttggtgcccct

SEQ ID NO: 3011 - DNA, 122 bp, Homo sapiens
  misc_feature (61)..(62): /note="This region represents a CpG dinucleotide"
  misc_feature (61)..(61): /note="Nucleotide may be methylated to form 5-methylcytosine"
tattggtgatttattgcagttgcctgcgccgttttactaattaactctccaaaatttgtacgtattgtatggatttatttttcctgatggtctcaagaaagtaccacttctcagtgtgatca

SEQ ID NO: 3012 - DNA, 122 bp, Homo sapiens
  misc_feature (61)..(62): /note="This region represents a CpG dinucleotide"
  misc_feature (61)..(61): /note="Nucleotide may be methylated to form 5-methylcytosine"
ctttgcccatcctgccctaggtccgagtggagttcccccacaaggagacactgtgcagtgcgtcaaagccaggagcaccatcccaccaggtagtggtcgtgccccccacctcctccaagata

SEQ ID NO: 3013 - DNA, 122 bp, Homo sapiens
  misc_feature (61)..(62): /note="This region represents a CpG dinucleotide"
  misc_feature (61)..(61): /note="Nucleotide may be methylated to form 5-methylcytosine"
caatttatttattcactgagtcattcagacttttctgtggtagtaaaataaactgaaaatcgagaagaattttgccaggcgaatgagaaacacccttgattttttttgcagttgtataagtg

SEQ ID NO: 3014 - DNA, 122 bp, Homo sapiens
  misc_feature (61)..(62): /note="This region represents a CpG dinucleotide"
  misc_feature (61)..(61): /note="Nucleotide may be methylated to form 5-methylcytosine"
ctgagcaggccacagtgtggaagaggctccagaaaacccagccctgccgctgcacacgtgcgtggccagcagataaagtcttccttgttattgtgggcagcgtagctgcacctgcggtgagg

SEQ ID NO: 3015 - DNA, 122 bp, Homo sapiens
  misc_feature (61)..(62): /note="This region represents a CpG dinucleotide"
  misc_feature (61)..(61): /note="Nucleotide may be methylated to form 5-methylcytosine"
attttaaactcgagaggttaagtgacctggccaaagtcacacagccaccactagttaactcgtatacattgattctcctgtggggctgggcagatgaggaatcttttgttctcttccctgtt

SEQ ID NO: 3016 - DNA, 122 bp, Homo sapiens
  misc_feature (61)..(62): /note="This region represents a CpG dinucleotide"
  misc_feature (61)..(61): /note="Nucleotide may be methylated to form 5-methylcytosine"
agttcacctggagaccgcagaaaagctggacagacccctggttcgcatgtaccagagacacgtgggcacccaactcccggaggctgcgcgcctcgcacaggtaaaccccctcccccgtaccc

SEQ ID NO: 3017 - DNA, 122 bp, Homo sapiens
  misc_feature (61)..(62): /note="This region represents a CpG dinucleotide"
  misc_feature (61)..(61): /note="Nucleotide may be methylated to form 5-methylcytosine"
ccagatgcattttcccattaaatgatggctacatgaaaaaggaagctccaaaaccaaatccggggcattaccaggtgtttctcaacaagaacaaataagtgctgtttgcatttttaatcatt

SEQ ID NO: 3018 - DNA, 122 bp, Homo sapiens
  misc_feature (61)..(62): /note="This region represents a CpG dinucleotide"
  misc_feature (61)..(61): /note="Nucleotide may be methylated to form 5-methylcytosine"
aacattaatgggggtctcgcgttagtatttgaagagtcatccgcttctgaaaagtgttgacgcaaaaccacgacgtctaggcaggaagtggccaattgaaccagggcacgagctctcatttc

SEQ ID NO: 3019 - DNA, 122 bp, Homo sapiens
  misc_feature (61)..(62): /note="This region represents a CpG dinucleotide"
  misc_feature (61)..(61): /note="Nucleotide may be methylated to form 5-methylcytosine"
gttatggttatttgtaggtatatgaacccagtatgtgtattagatactaatatgcatattcgatactaaagtacaaagccttactaattctaagccagctacgttctgtgatctattgtcct

SEQ ID NO: 3020 - DNA, 122 bp, Homo sapiens
  misc_feature (61)..(62): /note="This region represents a CpG dinucleotide"
  misc_feature (61)..(61): /note="Nucleotide may be methylated to form 5-methylcytosine"
gtgtatacttcctgtctgatcctagtcctgagattccagaagacacaaaaacccagttcccgcagggctggagacgaaggcagaggggctgactggctacccagctccatctctgagtgctg

SEQ ID NO: 3021 - DNA, 122 bp, Homo sapiens
  misc_feature (61)..(62): /note="This region represents a CpG dinucleotide"
  misc_feature (61)..(61): /note="Nucleotide may be methylated to form 5-methylcytosine"
gttgttttgcagccacccggaggtggcctgtcctatttgcgcttgcattctctctcccctcggatgggcatcgctggagagtggaaaacatctgctacatactcagtgtctctgccacttcc

SEQ ID NO: 3022 - DNA, 122 bp, Homo sapiens
  misc_feature (61)..(62): /note="This region represents a CpG dinucleotide"
  misc_feature (61)..(61): /note="Nucleotide may be methylated to form 5-methylcytosine"
tggagacacatatacaagaaaaattcctctttccatccagggaccagatggcagagaactcgcagaagccatgggttagggggctttgctaagtaagatgtttactggagtacatttctctc

SEQ ID NO: 3023 - DNA, 122 bp, Homo sapiens
  misc_feature (61)..(62): /note="This region represents a CpG dinucleotide"
  misc_feature (61)..(61): /note="Nucleotide may be methylated to form 5-methylcytosine"
agaagtagtagttagtgaagtgggagaggaaccaaaacctaacagcgtcttgggaagccacgaacaggaagaaaacttcacacaaactgtgcaaagcaatgataacaatcttattgtttaat

SEQ ID NO: 3024 - DNA, 122 bp, Homo sapiens
  misc_feature (61)..(62): /note="This region represents a CpG dinucleotide"
  misc_feature (61)..(61): /note="Nucleotide may be methylated to form 5-methylcytosine"
gacttagtctggtgcttaggtgtacggaagtgtgcaacctagcacctagaacctttcctgcgttaatgtcgtcattcatcacccaccactgcttacataattccattagaagctatgattca

SEQ ID NO: 3025 - DNA, 122 bp, Homo sapiens
  misc_feature (61)..(62): /note="This region represents a CpG dinucleotide"
  misc_feature (61)..(61): /note="Nucleotide may be methylated to form 5-methylcytosine"
tcgccctgcagatcaggtccagcggactgcaggtccagcagctgccactgcagggtggcccgggccctctgctaggtctcccagctgcttccatccaccaggcatcttctcaagacacattt

SEQ ID NO: 3026 - DNA, 122 bp, Homo sapiens
  misc_feature (61)..(62): /note="This region represents a CpG dinucleotide"
  misc_feature (61)..(61): /note="Nucleotide may be methylated to form 5-methylcytosine"
gctttagtacttatagtgctcatgctactgtcagctactcacaatagactgtgagggcctcgtggacctacatggcctagtgcaaagtaattgcgtaatctgtattacaaaggcagtatgag

SEQ ID NO: 3027 - DNA, 122 bp, Homo sapiens
  misc_feature (61)..(62): /note="This region represents a CpG dinucleotide"
  misc_feature (61)..(61): /note="Nucleotide may be methylated to form 5-methylcytosine"
cctccctttgaccccacccctacccagctcccaaactgccagtttctatcggggcctggtcgcaactcgtattgctccgcccccacgcccaggccccgcccttattggccacgcccctccct

SEQ ID NO: 3028 - DNA, 122 bp, Homo sapiens
  misc_feature (61)..(62): /note="This region represents a CpG dinucleotide"
  misc_feature (61)..(61): /note="Nucleotide may be methylated to form 5-methylcytosine"
ctgggctgtgccagagcagggggatggaatggaggttttggccctgggcccaaccagagacggcagggctgaagcccgatgccacgctagacaggtgactcaaatcttaggcctctgttttc

SEQ ID NO: 3029 - DNA, 122 bp, Homo sapiens
  misc_feature (61)..(62): /note="This region represents a CpG dinucleotide"
  misc_feature (61)..(61): /note="Nucleotide may be methylated to form 5-methylcytosine"
ttatgattgcaccactgcacctcagtctgggtgacagagaccctgatgcaatcaatcaatcgattataaatcaatcaataataaataaataattgcttactcaattaccgggtgcccccaaa

SEQ ID NO: 3030 - DNA, 122 bp, Homo sapiens
  misc_feature (61)..(62): /note="This region represents a CpG dinucleotide"
  misc_feature (61)..(61): /note="Nucleotide may be methylated to form 5-methylcytosine"
aatgtctcaacctttcccactgctgccatcctacttgagataaggccaggaaccagccagcgtctggggcagtggttctgtgggggaatgcgaccttagtccactttacttgtcctttaact

SEQ ID NO: 3031 - DNA, 122 bp, Homo sapiens
  misc_feature (61)..(62): /note="This region represents a CpG dinucleotide"
  misc_feature (61)..(61): /note="Nucleotide may be methylated to form 5-methylcytosine"
cccatacacatctacctcattccttttaacagttgtatagaactctcttgtatgaatggacgatggttcagttaattccagtgctgggaattcatatatattaactgattttaatctcagat

SEQ ID NO: 3032 - DNA, 122 bp, Homo sapiens
  misc_feature (61)..(62): /note="This region represents a CpG dinucleotide"
  misc_feature (61)..(61): /note="Nucleotide may be methylated to form 5-methylcytosine"
tggaccgggaggagcggcctgagctcagcttaacactcactgcactggacggtggggctccgcccaggtccgggaccaccacaattcgcattgtcgtcttggataataatgacaacgccccc

SEQ ID NO: 3033 - DNA, 122 bp, Homo sapiens
  misc_feature (61)..(62): /note="This region represents a CpG dinucleotide"
  misc_feature (61)..(61): /note="Nucleotide may be methylated to form 5-methylcytosine"
tttagccagaaaccaaacttgcccattcactgtgtaagcacactgtcaaagcactaagcacgcactagaaatgcacaactggatcttaagcacaggaagaggaaatggcttaaactagggag

SEQ ID NO: 3034 - DNA, 122 bp, Homo sapiens
  misc_feature (61)..(62): /note="This region represents a CpG dinucleotide"
  misc_feature (61)..(61): /note="Nucleotide may be methylated to form 5-methylcytosine"
gaatccaacagcctcgcccggaactgtggctgcaaggggatctgtaaaacacagtattgccgcatttgtattttaggttctaaaatacaggaaaataaacaaaaggaggtgagaatggaagc

SEQ ID NO: 3035 - DNA, 122 bp, Homo sapiens
  misc_feature (61)..(62): /note="This region represents a CpG dinucleotide"
  misc_feature (61)..(61): /note="Nucleotide may be methylated to form 5-methylcytosine"
cttttagttgtcatgtctccttttgctctgcttggctgtgactctttttcagactttcctcgtatttggatgaccttgacagttctgaaaattgctgagtatgtattttgtaccagggtaca

SEQ ID NO: 3036 - DNA, 122 bp, Homo sapiens
  misc_feature (61)..(62): /note="This region represents a CpG dinucleotide"
  misc_feature (61)..(61): /note="Nucleotide may be methylated to form 5-methylcytosine"
tgaagtatttcaagaagattgctcagtggggtttgatacaagaactgcccagtagctgggcgacattcagagctctctctctgaggtatataagaagagccctgggagctcctcactgagcc

SEQ ID NO: 3037 - DNA, 122 bp, Homo sapiens
  misc_feature (61)..(62): /note="This region represents a CpG dinucleotide"
  misc_feature (61)..(61): /note="Nucleotide may be methylated to form 5-methylcytosine"
tcccgccccgagaacggagcgcgcggaaccggcgcaggcctccgaggcttccagccgagacggcacccaggtttcccgagcagggtctgaggctccaaggacatcccggcggcgagaaggcg

SEQ ID NO: 3038 - DNA, 122 bp, Homo sapiens
  misc_feature (61)..(62): /note="This region represents a CpG dinucleotide"
  misc_feature (61)..(61): /note="Nucleotide may be methylated to form 5-methylcytosine"
tgatcttcaggaaaagagcataatatgctacatttttgtacaccaaaggggaggtaggtacgaatatgcatacatattgcttttttctagaagccgcctaggagtgaaaccaaaattcttca

SEQ ID NO: 3039 - DNA, 122 bp, Homo sapiens
  misc_feature (61)..(62): /note="This region represents a CpG dinucleotide"
  misc_feature (61)..(61): /note="Nucleotide may be methylated to form 5-methylcytosine"
ctcatgactcaaattacccaagtctgacccaagcgaaggtgcccctggagttctggaaaacgcaggaggcctccgcgggctgggtgcgccccgagcactgccatcccttttcttgtaattac

SEQ ID NO: 3040 - DNA, 122 bp, Homo sapiens
  misc_feature (61)..(62): /note="This region represents a CpG dinucleotide"
  misc_feature (61)..(61): /note="Nucleotide may be methylated to form 5-methylcytosine"
ggctagtccttgagcttattggctgatagcacagtgggcggggtacatagcacgaccccccggagccccgcccatattaatttgcataacggccccggcgcgtgcaagggagaagcgggttt

SEQ ID NO: 3041 - DNA, 122 bp, Homo sapiens
  misc_feature (61)..(62): /note="This region represents a CpG dinucleotide"
  misc_feature (61)..(61): /note="Nucleotide may be methylated to form 5-methylcytosine"
aatgattccttaagatccatggccaaaacaaattgccgcaattaacacgtgccactgccacgatctatgggctgaaacgtggctggaacgacgcagaagcagaaaccacagagagcgtgcgc

SEQ ID NO: 3042 - DNA, 122 bp, Homo sapiens
  misc_feature (61)..(62): /note="This region represents a CpG dinucleotide"
  misc_feature (61)..(61): /note="Nucleotide may be methylated to form 5-methylcytosine"
caggatcaccggagcttgtttaaagtcagtctacactgctgaatttcccatcatccccctcgggagcagccctgggcaaatggctgcactgacagctgtgactcaggcactggttcccagag

SEQ ID NO: 3043 - DNA, 122 bp, Homo sapiens
  misc_feature (61)..(62): /note="This region represents a CpG dinucleotide"
  misc_feature (61)..(61): /note="Nucleotide may be methylated to form 5-methylcytosine"
gatcataagctctagtcttgcttttgcctttctctctctttgatcactatctgtggtagacgccagctgtgacattttgagtttactcaagcagccctatacagagatccatgtgacaataa

SEQ ID NO: 3044 - DNA, 122 bp, Homo sapiens
  misc_feature (61)..(62): /note="This region represents a CpG dinucleotide"
  misc_feature (61)..(61): /note="Nucleotide may be methylated to form 5-methylcytosine"
gcctctgctcacccgccctgctcattacacactaattataataggttagcggctaaaagacgctcctgctagtgccatggcagtttacagatgccacggcaacatcaggaagttacgctata

SEQ ID NO: 3045 - DNA, 122 bp, Homo sapiens
  misc_feature (61)..(62): /note="This region represents a CpG dinucleotide"
  misc_feature (61)..(61): /note="Nucleotide may be methylated to form 5-methylcytosine"
aatcattaggagcaaatatagtactaatgttgtatttttcttttcaagaattatcttcctcgtgaaatgcttagaattcactttagagtcatggggaatgatgaagggatactagaatgtgg

SEQ ID NO: 3046 - DNA, 122 bp, Homo sapiens
  misc_feature (61)..(62): /note="This region represents a CpG dinucleotide"
  misc_feature (61)..(61): /note="Nucleotide may be methylated to form 5-methylcytosine"
tcactattgtgttacatatcgttgcgtgacacggtacattgcctaagtgcccatcgtgggcgttggtttgggtgatgtgggggcactaaggaagcccccaccatgcgctgctaccaccctca

SEQ ID NO: 3047 - DNA, 122 bp, Homo sapiens
  misc_feature (61)..(62): /note="This region represents a CpG dinucleotide"
  misc_feature (61)..(61): /note="Nucleotide may be methylated to form 5-methylcytosine"
gacacgcccacaggcgaggccgcagctttcactttccccatgaagaggacagcttcttcacgtctccagtttggacctcctggactctctggctcggctttgacgtcttcctctcctcacca

SEQ ID NO: 3048 - DNA, 122 bp, Homo sapiens
  misc_feature (61)..(62): /note="This region represents a CpG dinucleotide"
  misc_feature (61)..(61): /note="Nucleotide may be methylated to form 5-methylcytosine"
tgacctcttgatccgcccgcctcagcctcccaaagtgctgggattacaggcgtgagccaccgcgcccggcctacatcaatgtttatccagtttttgtttgtttgttttgacggagttttgct

SEQ ID NO: 3049 - DNA, 122 bp, Homo sapiens
  misc_feature (61)..(62): /note="This region represents a CpG dinucleotide"
  misc_feature (61)..(61): /note="Nucleotide may be methylated to form 5-methylcytosine"
tcagcctgggcttagggccagtgactggggactctgccctgaagcaaggcagcctgaccccggtgtcactcctgtccccagaactggtagggaggttggccttcctcccctcctgctgcact

SEQ ID NO: 3050 - DNA, 122 bp, Homo sapiens
  misc_feature (61)..(62): /note="This region represents a CpG dinucleotide"
  misc_feature (61)..(61): /note="Nucleotide may be methylated to form 5-methylcytosine"
cgggctcacagaagagacggtgattgtgatctgctactaggaaaaagttctgggatagttcgggctcccaaaaggcagcttcctgggaagctcgtaggttttagcaccccaatccataggtt

SEQ ID NO: 3051 - DNA, 122 bp, Homo sapiens
  misc_feature (61)..(62): /note="This region represents a CpG dinucleotide"
  misc_feature (61)..(61): /note="Nucleotide may be methylated to form 5-methylcytosine"
ctccagcttgaaagggttttatttagaaagctacgaattggtttttggaagtgtgtcattcgcttcttccctggtgactagatgtatcacgtagtaagaagtaagaatgcaggaaacagaaa

SEQ ID NO: 3052 - DNA, 122 bp, Homo sapiens
  misc_feature (61)..(62): /note="This region represents a CpG dinucleotide"
  misc_feature (61)..(61): /note="Nucleotide may be methylated to form 5-methylcytosine"
ggaacctcctgttcctcgtccaggagaggaaacgcacacccgggccggacgcacagaagccgcaccctggctggggccacaagcctgacagctaccgacaagcccccacccacaggagcacg

SEQ ID NO: 3053 - DNA, 122 bp, Homo sapiens
  misc_feature (61)..(62): /note="This region represents a CpG dinucleotide"
  misc_feature (61)..(61): /note="Nucleotide may be methylated to form 5-methylcytosine"
ctcctttctcagcctccagtctgacatgttccactatggccttgggaagagcaatgggcccggagtcgccgcatctaaccctgctgtaactggtcgcaagtcacagtttgctcatctataaa

SEQ ID NO: 3054 - DNA, 122 bp, Homo sapiens
  misc_feature (61)..(62): /note="This region represents a CpG dinucleotide"
  misc_feature (61)..(61): /note="Nucleotide may be methylated to form 5-methylcytosine"
agcttcatgctgggaaaagatccagcttggccagggaagtggaagtgtgcgtaagaaggacgatgtgtgtcactgatgccctaggatatctgggggtagcagataccctgcaacatctctgg

SEQ ID NO: 3055 - DNA, 122 bp, Homo sapiens
  misc_feature (61)..(62): /note="This region represents a CpG dinucleotide"
  misc_feature (61)..(61): /note="Nucleotide may be methylated to form 5-methylcytosine"
ttttatctgggaggatcttgactttgatactgaagagctgatgcaaaatcttaaacaggccgatgaaaaagagcttgtcaaatagataaaggagctttcttctttctatattcatcagtaaa

SEQ ID NO: 3056 - DNA, 122 bp, Homo sapiens
  misc_feature (61)..(62): /note="This region represents a CpG dinucleotide"
  misc_feature (61)..(61): /note="Nucleotide may be methylated to form 5-methylcytosine"
cttcgataaacacaactggaggggcagctaagccacggcagtccccggcaggtttggccacgccagaactcggtatatgtttatctacatggacttcggaacagtgaattagcagcgggcat

SEQ ID NO: 3057 - DNA, 122 bp, Homo sapiens
  misc_feature (61)..(62): /note="This region represents a CpG dinucleotide"
  misc_feature (61)..(61): /note="Nucleotide may be methylated to form 5-methylcytosine"
ttctaagcttctagaatgtagttgtcataccttgactagctgtcatcaactccctccccacggaatagtagctctgcatacctgctgagatcctgccataaatggtcaggccaccagcaatt

SEQ ID NO: 3058 - DNA, 122 bp, Homo sapiens
  misc_feature (61)..(62): /note="This region represents a CpG dinucleotide"
  misc_feature (61)..(61): /note="Nucleotide may be methylated to form 5-methylcytosine"
aggagttgggcgacggagggggcggggagagcttcgtgggtggccacggccagcagcacccgggtgcccctcagagaggaaggtacctgcagcctctgctcatgtgtggggccagcccccac

SEQ ID NO: 3059 - DNA, 122 bp, Homo sapiens
  misc_feature (61)..(62): /note="This region represents a CpG dinucleotide"
  misc_feature (61)..(61): /note="Nucleotide may be methylated to form 5-methylcytosine"
ttccaatatcccctgcgcagccatgcagacaggcttccttctttccccttcttgcgcgagcgacacggctctacacgtcctcttatacctcgctacttacgcacggcggcctctttctcctg

SEQ ID NO: 3060 - DNA, 122 bp, Homo sapiens
  misc_feature (61)..(62): /note="This region represents a CpG dinucleotide"
  misc_feature (61)..(61): /note="Nucleotide may be methylated to form 5-methylcytosine"
aatcctgtttatgaaaatattaataattcattttaattgtcactggagcatatatacttacgtgtttatttctgatgactagtaagcatggaatttctcaatctttatgcagtttttcctct

SEQ ID NO: 3061 - DNA, 122 bp, Homo sapiens
  misc_feature (61)..(62): /note="This region represents a CpG dinucleotide"
  misc_feature (61)..(61): /note="Nucleotide may be methylated to form 5-methylcytosine"
gataaacttcagtgcctggatgagcaagcttcctgtgtgcttcagcttggggcgcatgtgcgcttcttctaggattttctgaaacttggtcaggggctcctggatcatgattgcagattgag

SEQ ID NO: 3062 - DNA, 122 bp, Homo sapiens
  misc_feature (61)..(62): /note="This region represents a CpG dinucleotide"
  misc_feature (61)..(61): /note="Nucleotide may be methylated to form 5-methylcytosine"
caggtggatttacatctaatatgttacaatcctgatgtaaatccccaggaggaagcctggcgttagccacccttactctgcacagtgctatccttgctgttgctttcatctctggcaggagt

SEQ ID NO: 3063 - DNA, 122 bp, Homo sapiens
  misc_feature (61)..(62): /note="This region represents a CpG dinucleotide"
  misc_feature (61)..(61): /note="Nucleotide may be methylated to form 5-methylcytosine"
gcttgcaatgacatgactccagagcaaatggctacaaatgtgaactgttccagccctgagcgacacacaagaagttatgattacatggaaggaggggatataagagtgagaagactcttctg

SEQ ID NO: 3064 - DNA, 122 bp, Homo sapiens
  misc_feature (61)..(62): /note="This region represents a CpG dinucleotide"
  misc_feature (61)..(61): /note="Nucleotide may be methylated to form 5-methylcytosine"
gactgtattcccacttcctttaggaacactgaattattcagttcagagttcagtgcctggcgattgcatgtgctcactgaacattgctgaggttgagtaatatgctgactcggagataaata

SEQ ID NO: 3065 - DNA, 122 bp, Homo sapiens
  misc_feature (61)..(62): /note="This region represents a CpG dinucleotide"
  misc_feature (61)..(61): /note="Nucleotide may be methylated to form 5-methylcytosine"
gcctttcagcagttccggcaggttgaatgtgaaagctaacatagccccttgcaaggctctcgtgactactaacagggaaaatacagaagtgagtctgctactgagtgggttctcagtctgta

SEQ ID NO: 3066 - DNA, 122 bp, Homo sapiens
  misc_feature (61)..(62): /note="This region represents a CpG dinucleotide"
  misc_feature (61)..(61): /note="Nucleotide may be methylated to form 5-methylcytosine"
ttctttctgattggtttactggcatattattattctctatcttactataaaactaatattcgagtcataatgctgttaacttgtttgtaatctcattaacataactgctttgggctataatg

SEQ ID NO: 3067 - DNA, 122 bp, Homo sapiens
  misc_feature (61)..(62): /note="This region represents a CpG dinucleotide"
  misc_feature (61)..(61): /note="Nucleotide may be methylated to form 5-methylcytosine"
gttagaacacttctaatctttgttagaacacttactttgttagaacacttacctcagcctcgttacttagtctctctgatgctcagttttcttaatagtaatccaggtggaatcatgggaac

SEQ ID NO: 3068 - DNA, 122 bp, Homo sapiens
  misc_feature (61)..(62): /note="This region represents a CpG dinucleotide"
  misc_feature (61)..(61): /note="Nucleotide may be methylated to form 5-methylcytosine"
catgaaagcccttagtcacaccctcactcttcttttggattttgttcccagagcactgaacgtaaatataaagctcctcccagattccatatttaactgttcatgcaaacagaatcaccctc

SEQ ID NO: 3069 - DNA, 122 bp, Homo sapiens
  misc_feature (61)..(62): /note="This region represents a CpG dinucleotide"
  misc_feature (61)..(61): /note="Nucleotide may be methylated to form 5-methylcytosine"
acaatgatttctgctattatttcaataactctacattatataggataacttagttatgaacgtggcaggaaaatatgaggtataaagtttgccaatcttgtcataggcttatgataacaaca

SEQ ID NO: 3070 - DNA, 122 bp, Homo sapiens
  misc_feature (61)..(62): /note="This region represents a CpG dinucleotide"
  misc_feature (61)..(61): /note="Nucleotide may be methylated to form 5-methylcytosine"
agtgagagtcagtccagaaatgaatccagtagttcaagttagggacatttgggatgaacacggggaattccccaaccacagggctttttgtatgtaagcagcaagttatggtcagcagttct

SEQ ID NO: 3071 - DNA, 122 bp, Homo sapiens
  misc_feature (61)..(62): /note="This region represents a CpG dinucleotide"
  misc_feature (61)..(61): /note="Nucleotide may be methylated to form 5-methylcytosine"
ggccccttatatacctgctcggattccccggggttggggcttggtccgcccctcgcaacccggaggacccgtgattgacaggttcgcagtgatgcgccctggccaatcattaccgagccccc

SEQ ID NO: 3072 - DNA, 122 bp, Homo sapiens
  misc_feature (61)..(62): /note="This region represents a CpG dinucleotide"
  misc_feature (61)..(61): /note="Nucleotide may be methylated to form 5-methylcytosine"
tcaaagggatctgcccacctcagactcccaaagtgttgggattacaggcatgagccaccgcgcccagccctagtgctatgatttgatatacgcttgcaaacattattggctcacccacacct

SEQ ID NO: 3073 - DNA, 122 bp, Homo sapiens
  misc_feature (61)..(62): /note="This region represents a CpG dinucleotide"
  misc_feature (61)..(61): /note="Nucleotide may be methylated to form 5-methylcytosine"
atagcacatccttctgaaagttgagcaaacagcaatcttaatgggcaattcaacccactccgtgttaaccactatgcagaccagcgtgtaagtcaatcaataaatatccatgagcggcttct

SEQ ID NO: 3074 - DNA, 122 bp, Homo sapiens
  misc_feature (61)..(62): /note="This region represents a CpG dinucleotide"
  misc_feature (61)..(61): /note="Nucleotide may be methylated to form 5-methylcytosine"
caagcaccgagacggaataaacatcacccagtttccttttccctccctcttgagaaggaacggtgatgtcttgagagtcagaaagaaaacagtgaccaaatatacatgatttactgaaaaat

SEQ ID NO: 3075 - DNA, 122 bp, Homo sapiens
  misc_feature (61)..(62): /note="This region represents a CpG dinucleotide"
  misc_feature (61)..(61): /note="Nucleotide may be methylated to form 5-methylcytosine"
ccacctccgacccactggatcgacagctctgggggcggggcccacaatctgtttttatttcggggcacagcaaatgttgagaaccactgtcgcaggcgggcaaaagcggcactccccatgtg

SEQ ID NO: 3076 - DNA, 122 bp, Homo sapiens
  misc_feature (61)..(62): /note="This region represents a CpG dinucleotide"
  misc_feature (61)..(61): /note="Nucleotide may be methylated to form 5-methylcytosine"
acaccaggacagaccagtcttgaggtttggccatgcctggccactagcagtctttataaccgcttcaaggggcagagttccaagtcgatttaatcagaaagacttgcagatgtttcctttca

SEQ ID NO: 3077 - DNA, 122 bp, Homo sapiens
  misc_feature (61)..(62): /note="This region represents a CpG dinucleotide"
  misc_feature (61)..(61): /note="Nucleotide may be methylated to form 5-methylcytosine"
agacccttggcgatctgagaaagaaagactgagtccggatgtcaagaggcctgggcctcacgagggagtttgtctgcttatttgaacacctcagagttgaagatcttgttactgctatttct

SEQ ID NO: 3078 - DNA, 122 bp, Homo sapiens
  misc_feature (61)..(62): /note="This region represents a CpG dinucleotide"
  misc_feature (61)..(61): /note="Nucleotide may be methylated to form 5-methylcytosine"
gaggaaggaggctgccagcttcctgggtgcacaaggccgtggccagcttccgggctcagtcgtggacaaaggcctcctgggacagagaagtggcctctaagcaaaggcggtggtgtgacgct

SEQ ID NO: 3079 - DNA, 122 bp, Homo sapiens
  misc_feature (61)..(62): /note="This region represents a CpG dinucleotide"
  misc_feature (61)..(61): /note="Nucleotide may be methylated to form 5-methylcytosine"
tttacatgtaaatatatgtttacctacaaatatatctttaataagtaatacggtgtctgtcgcacatatattatatcgtgtatgtaatgtataagtatttatttcgtttgcttggggttttg

SEQ ID NO: 3080 - DNA, 122 bp, Homo sapiens
  misc_feature (61)..(62): /note="This region represents a CpG dinucleotide"
  misc_feature (61)..(61): /note="Nucleotide may be methylated to form 5-methylcytosine"
tgccgcactttcctcagttgcgaagggcacggccgctggggacacaacctaatgaacaaccggagctcttcagagatgcctttagcaactcagctccttaaaaataataaattcctcttagg

SEQ ID NO: 3081 - DNA, 122 bp, Homo sapiens
  misc_feature (61)..(62): /note="This region represents a CpG dinucleotide"
  misc_feature (61)..(61): /note="Nucleotide may be methylated to form 5-methylcytosine"
caaactcctggactcaagccatcctcctgccttggcaccccaaagtgctgggattataggcgtgagccactgagccgagcacatatctactatattttgaatacttaaagcaggcaggcaaa

SEQ ID NO: 3082 - DNA, 122 bp, Homo sapiens
  misc_feature (61)..(62): /note="This region represents a CpG dinucleotide"
  misc_feature (61)..(61): /note="Nucleotide may be methylated to form 5-methylcytosine"
gggaaggcttcctgaattacccaggtacaattagtccctctcccttctgcgagattgtaccgttttgctcatttttcttctattctgattgacacatatttattggacacctactatgtgct

SEQ ID NO: 3083 - DNA, 122 bp, Homo sapiens
  misc_feature (61)..(62): /note="This region represents a CpG dinucleotide"
  misc_feature (61)..(61): /note="Nucleotide may be methylated to form 5-methylcytosine"
cgtggcctccccgaagaagaaccgatgcactggggctcctggcgtctgcggggtccataacgcctccctagggaggagagggaggagctaggagatgcagggagtgcagaaaccttggagaa

SEQ ID NO: 3084 - DNA, 122 bp, Homo sapiens
  misc_feature (61)..(62): /note="This region represents a CpG dinucleotide"
  misc_feature (61)..(61): /note="Nucleotide may be methylated to form 5-methylcytosine"
tttaataatatatttacttatcccaacatataggggatgttatcatttcaacatgtaactcgtttttaaattattaaggagatgctttatttttttcataccaagtctttgaaaactggtct

SEQ ID NO: 3085 - DNA, 122 bp, Homo sapiens
  misc_feature (61)..(62): /note="This region represents a CpG dinucleotide"
  misc_feature (61)..(61): /note="Nucleotide may be methylated to form 5-methylcytosine"
caaggtcaaagctctggcccggccgctcatcagcttccagggctctgccctcggagtccacgctctgaagcggggtcgcgtcaggcatcgcatccccagcagctcaccgatcgcagttccca

SEQ ID NO: 3086 - DNA, 122 bp, Homo sapiens
  misc_feature (61)..(62): /note="This region represents a CpG dinucleotide"
  misc_feature (61)..(61): /note="Nucleotide may be methylated to form 5-methylcytosine"
atagcattgagacttgtgtagatgcttctcagaacatgaaatcaaattggaaatctgtaacgcagcttccgtaagcatgtgtgggcaaaaaagcaataatcctactcctcaaaatagaaagt

SEQ ID NO: 3087 - DNA, 122 bp, Homo sapiens
  misc_feature (61)..(62): /note="This region represents a CpG dinucleotide"
  misc_feature (61)..(61): /note="Nucleotide may be methylated to form 5-methylcytosine"
tgtgctggtgattttgagtctgcgaattccgggcgtggggaactgccgggagttcaggtacgagatgtgctgcatggccttatccaattccccgaggtcttctccctccaaggtcaatacca

SEQ ID NO: 3088 - DNA, 122 bp, Homo sapiens
  misc_feature (61)..(62): /note="This region represents a CpG dinucleotide"
  misc_feature (61)..(61): /note="Nucleotide may be methylated to form 5-methylcytosine"
tgtgtgctgagtcatatggaggtgggggcaggggatgacgctggctccttgccagacacacgtactgcccaggttgatgaacgagcctccaaaggcactacaacaggattataatttcacta

SEQ ID NO: 3089 - DNA, 122 bp, Homo sapiens
  misc_feature (61)..(62): /note="This region represents a CpG dinucleotide"
  misc_feature (61)..(61): /note="Nucleotide may be methylated to form 5-methylcytosine"
acatcgacccggccgatgcaagccctgaccaagagatcagcttctcctactatgtgagaccgggaaacggggacgggtgagagtatgctgggaaggaaagagaatgagaagagtcagccaga

SEQ ID NO: 3090 - DNA, 122 bp, Homo sapiens
  misc_feature (61)..(62): /note="This region represents a CpG dinucleotide"
  misc_feature (61)..(61): /note="Nucleotide may be methylated to form 5-methylcytosine"
taatgagggttctgagggttgagccctggtatgaaggtgctggccacagccatggggagccgggcatttccttttgtttgcctttgagccaaggctctggtctgtgtgtaccgtgtccaggg

SEQ ID NO: 3091 - DNA, 122 bp, Homo sapiens
  misc_feature (61)..(62): /note="This region represents a CpG dinucleotide"
  misc_feature (61)..(61): /note="Nucleotide may be methylated to form 5-methylcytosine"
cagaaaaggaaacacttatccatgacatgcttggctaagttattacctaacaccagagcacgtcactgccctgccttggcctggaagaaggtaaaccctcactacccgtgttttgtgatgac

SEQ ID NO: 3092 - DNA, 122 bp, Homo sapiens
  misc_feature (61)..(62): /note="This region represents a CpG dinucleotide"
  misc_feature (61)..(61): /note="Nucleotide may be methylated to form 5-methylcytosine"
taggtttgacaagtcagttagcctcctaaggatttcttccatgcttacccatttcatttgcgtcatccaaatttaaggtacatgcaaatacgctcataaatacacacataaacacatgtaga

SEQ ID NO: 3093 - DNA, 122 bp, Homo sapiens
  misc_feature (61)..(62): /note="This region represents a CpG dinucleotide"
  misc_feature (61)..(61): /note="Nucleotide may be methylated to form 5-methylcytosine"
atctctgccgtcatcttctcatggtgctttccctgtgggtgtgtctttgtccaacttctgcgttttcataaggacactggtcaaactaggtcagggccaaccctaatgacttcatcttagct

SEQ ID NO: 3094 - DNA, 122 bp, Homo sapiens
  misc_feature (61)..(62): /note="This region represents a CpG dinucleotide"
  misc_feature (61)..(61): /note="Nucleotide may be methylated to form 5-methylcytosine"
tatcgcataaagccctgatcaatcatcagcttatctggcctgtttcctttctggttggttcgttagctccagtcatgctgatcttctttctgtgcctggaacattctgaatcattcccaact

SEQ ID NO: 3095 - DNA, 122 bp, Homo sapiens
  misc_feature (61)..(62): /note="This region represents a CpG dinucleotide"
  misc_feature (61)..(61): /note="Nucleotide may be methylated to form 5-methylcytosine"
agggaggagcgagagagggtggggctgaggaggaggctgtgtgagaaaaggggcggggcgcgcccaaagtctggcggaagagcgttaccctggcaaccctcccgcggaggccgagagaggcc

SEQ ID NO: 3096 - DNA, 122 bp, Homo sapiens
  misc_feature (61)..(62): /note="This region represents a CpG dinucleotide"
  misc_feature (61)..(61): /note="Nucleotide may be methylated to form 5-methylcytosine"
ttcctgcacatgcccgcctaagttcctgcctcggggaggtaacagcataactgtccgactcgtcgctcccaaagagatggctggaacaattagttccgctttcccagctagtcgaatcactg

SEQ ID NO: 3097 - DNA, 122 bp, Homo sapiens
  misc_feature (61)..(62): /note="This region represents a CpG dinucleotide"
  misc_feature (61)..(61): /note="Nucleotide may be methylated to form 5-methylcytosine"
ccttttgtctcaatttctcaacttaccttgtacttggatttttgatgaagccagtgtttacgaaattaggacacagacatgttgttttgactccagttatttgtaaggcagccagttcatct

SEQ ID NO: 3098 - DNA, 122 bp, Homo sapiens
  misc_feature (61)..(62): /note="This region represents a CpG dinucleotide"
  misc_feature (61)..(61): /note="Nucleotide may be methylated to form 5-methylcytosine"
agaatggagaaatgaccgcctaatgagcgcaggctttccttttggggtggtgtatgcatacgtccagactcttcaaaatgtgtgtattaaacaatgtacaatttatgcataccaattttcat

SEQ ID NO: 3099 - DNA, 122 bp, Homo sapiens
  misc_feature (61)..(62): /note="This region represents a CpG dinucleotide"
  misc_feature (61)..(61): /note="Nucleotide may be methylated to form 5-methylcytosine"
aaggccctgagagggaagtcacccacctcccaggtggcggaccccccgcccgcccagggtcgactaggacttgggactaccccctccgcccatcccacggcagctgcaggcgcaggaagaaa

SEQ ID NO: 3100 - DNA, 122 bp, Homo sapiens
  misc_feature (61)..(62): /note="This region represents a CpG dinucleotide"
  misc_feature (61)..(61): /note="Nucleotide may be methylated to form 5-methylcytosine"
aatctaatgctgctgctgatctgactggaggcagagctcaggtgataatgttcactcactcgctgctcacttcctgctatgcagcctggtttcctaacaggccatgaactgcccaggggttg

SEQ ID NO: 3101 - DNA, 122 bp, Homo sapiens
  misc_feature (61)..(62): /note="This region represents a CpG dinucleotide"
  misc_feature (61)..(61): /note="Nucleotide may be methylated to form 5-methylcytosine"
ggacatgcctaaacatgcctcgggcccgacatatggagctgcctgaacattacacagagacgtcactccagaaaagggaacccacaaagaacctcacaggcattgaaacctggagcagcctc

SEQ ID NO: 3102 - DNA, 122 bp, Homo sapiens
  misc_feature (61)..(62): /note="This region represents a CpG dinucleotide"
  misc_feature (61)..(61): /note="Nucleotide may be methylated to form 5-methylcytosine"
caaatgggaaatagggcaggcccgtgtccttccatcccccattattagtgaattggggtccgtgggagagctgggtgggatttcatgaacaggatttaattcgatcctctaccctccaagct

SEQ ID NO: 3103 - DNA, 122 bp, Homo sapiens
  misc_feature (61)..(62): /note="This region represents a CpG dinucleotide"
  misc_feature (61)..(61): /note="Nucleotide may be methylated to form 5-methylcytosine"
tactaataaccaactaatgtatagtcgagcagaaaaaaaaattgaatatacactagaggccgctagtgataaataagtgaattttgcatgaagtggaaaaaaaatgctgctagttctacaaa

SEQ ID NO: 3104 - DNA, 122 bp, Homo sapiens
  misc_feature (61)..(62): /note="This region represents a CpG dinucleotide"
  misc_feature (61)..(61): /note="Nucleotide may be methylated to form 5-methylcytosine"
ccttgcccccaaacctgtactgtcccggaggaggttgggaggtggaggcccagcatcccgcgcagatgacaccatcaaccgccagagtcccagacaccggttttcctagaagcccctcaccc

SEQ ID NO: 3105 - DNA, 122 bp, Homo sapiens
  misc_feature (61)..(62): /note="This region represents a CpG dinucleotide"
  misc_feature (61)..(61): /note="Nucleotide may be methylated to form 5-methylcytosine"
aatacagaacatcccaagacactcaaataatgcctttgctctgttcctttagtttccagccgacaggggcttccctccccttctctgttcccagaaagcagttcaaacaagtgtaggttttc

SEQ ID NO: 3106 - DNA, 122 bp, Homo sapiens
  misc_feature (61)..(62): /note="This region represents a CpG dinucleotide"
  misc_feature (61)..(61): /note="Nucleotide may be methylated to form 5-methylcytosine"
tttaccttttcatcccaccttctgttccctcattttctccctccttccacacccaagagtcgctgcccctgatctagagtgttggctgtcatgtgagaagttagttctgaaatcttccaggg

SEQ ID NO: 3107 - DNA, 122 bp, Homo sapiens
  misc_feature (61)..(62): /note="This region represents a CpG dinucleotide"
  misc_feature (61)..(61): /note="Nucleotide may be methylated to form 5-methylcytosine"
ggtgggcggggggtgcccgggcgggcgggtggggggtccctgggcggagcatggagtggccgttgggctcatgtgtaagaaagctgctcttaacatatttaggacaaagaacaggctgccct

SEQ ID NO: 3108 - DNA, 122 bp, Homo sapiens
  misc_feature (61)..(62): /note="This region represents a CpG dinucleotide"
  misc_feature (61)..(61): /note="Nucleotide may be methylated to form 5-methylcytosine"
gggtcaaaaggcgccgcgcgttcaagggtggggcgtgagacaaaaatgaagcgaaggcggcgaggcgttggatctctcgaaactcactaatagtcccatctgtctcgccttcaactgaagac

SEQ ID NO: 3109 - DNA, 122 bp, Homo sapiens
  misc_feature (61)..(62): /note="This region represents a CpG dinucleotide"
  misc_feature (61)..(61): /note="Nucleotide may be methylated to form 5-methylcytosine"
gactctgaagaattcaatctaatgatacagtcaagaactatgcaaagtacacttacaaagcgttataaaacacaatgtcatacccataaataaaaatgataaaaatctatctctgataaatt

SEQ ID NO: 3110 - DNA, 122 bp, Homo sapiens
  misc_feature (61)..(62): /note="This region represents a CpG dinucleotide"
  misc_feature (61)..(61): /note="Nucleotide may be methylated to form 5-methylcytosine"
ctgccacctcccggaggccagctctgttgtgtgtgcatgcccattgagatgcccgggtgccgccacacccctagcctgcgcctgcctgttcttcctcctgtcagagggccctgttcttgctc

SEQ ID NO: 3111 - DNA, 122 bp, Homo sapiens
  misc_feature (61)..(62): /note="This region represents a CpG dinucleotide"
  misc_feature (61)..(61): /note="Nucleotide may be methylated to form 5-methylcytosine"
tatgtaggtagtttatcctttgaagaacccagtggcttgtctcacagcccaagacagattcgagttctcaaaaactatccagcccaaaagaatacagaggaaaaagcttttcccactttctt

SEQ ID NO: 3112 - DNA, 122 bp, Homo sapiens
  misc_feature (61)..(62): /note="This region represents a CpG dinucleotide"
  misc_feature (61)..(61): /note="Nucleotide may be methylated to form 5-methylcytosine"
attgacacagattctcttgcgtaacaccagttgcatgtcagcagggtggctgagctggaccgtcacgcgcacgatcaggaacaaccgctcgtccacgggcgtgcccctgctgagctgagggc

SEQ ID NO: 3113 - DNA, 122 bp, Homo sapiens
  misc_feature (61)..(62): /note="This region represents a CpG dinucleotide"
  misc_feature (61)..(61): /note="Nucleotide may be methylated to form 5-methylcytosine"
gcccagccagccccttacaaaactactcccagtggaaagtttttggcaatgggacggggccgcctgccatcctctgaacatggtttgagtgtggttagctgccaaccatgagacattttaca

SEQ ID NO: 3114 - DNA, 122 bp, Homo sapiens
  misc_feature (61)..(62): /note="This region represents a CpG dinucleotide"
  misc_feature (61)..(61): /note="Nucleotide may be methylated to form 5-methylcytosine"
ctgaggggcctttcttccgcgagccggctttcctccatcgcttcccacaggctttgcccgcgaccgaacagggcgagcaggcattttccttcacgtaggcctgaaaagccacgtcacccgca

SEQ ID NO: 3115 - DNA, 122 bp, Homo sapiens
  misc_feature (61)..(62): /note="This region represents a CpG dinucleotide"
  misc_feature (61)..(61): /note="Nucleotide may be methylated to form 5-methylcytosine"
ctactgcatcaccccatgggggtccctgcagtaccagcttccaggagcatgtcagagtcacgagggattgcttactcagggtttgtaaactgatctgcatggtttgcttaataagcaaaact

SEQ ID NO: 3116 - DNA, 122 bp, Homo sapiens
  misc_feature (61)..(62): /note="This region represents a CpG dinucleotide"
  misc_feature (61)..(61): /note="Nucleotide may be methylated to form 5-methylcytosine"
ctgactcaagaaggatgaggtggcccatcccagtgggaacacttaaggaagtcaacgcaacggaaatcgatttgaaataaacgtttagtaagcttttctgaatctgtttgccagaccctgtt

SEQ ID NO: 3117 - DNA, 122 bp, Homo sapiens
  misc_feature (61)..(62): /note="This region represents a CpG dinucleotide"
  misc_feature (61)..(61): /note="Nucleotide may be methylated to form 5-methylcytosine"
gacttacccatggtcttgagccagtctctcccgctctgggcttcagtgctgcccaggtgacggtgttgaccatctatgatgacactgtcaggacacaatgctgagttggtaatctggaggtt

SEQ ID NO: 3118 - DNA, 122 bp, Homo sapiens
  misc_feature (61)..(62): /note="This region represents a CpG dinucleotide"
  misc_feature (61)..(61): /note="Nucleotide may be methylated to form 5-methylcytosine"
aaggccttgaaagcaaggttcagccgtctgtattggtcatcttcccattgccagtgcctacgaagggcttgacccattcattgttagacgctcagtaagtgtgtattgaggcagccctctgt

SEQ ID NO: 3119 - DNA, 122 bp, Homo sapiens
  misc_feature (61)..(62): /note="This region represents a CpG dinucleotide"
  misc_feature (61)..(61): /note="Nucleotide may be methylated to form 5-methylcytosine"
agtacacacccaggaaatttgtcatccaccctgagagtaacaaccttattatcattgaaacggaccacaatgcctacactgaggccacgaaagctcagagaaagcagcagatggcagaggta

SEQ ID NO: 3120 - DNA, 122 bp, Homo sapiens
  misc_feature (61)..(62): /note="This region represents a CpG dinucleotide"
  misc_feature (61)..(61): /note="Nucleotide may be methylated to form 5-methylcytosine"
tccctctcccacgcgctcacgcagaaaatccagcccagccccagctccccagtaaccccccgcgccccttcagggagcgggatcccaaatacagtgagaaggactcgcagcagcgggagcgc

SEQ ID NO: 3121 - DNA, 122 bp, Homo sapiens
  misc_feature (61)..(62): /note="This region represents a CpG dinucleotide"
  misc_feature (61)..(61): /note="Nucleotide may be methylated to form 5-methylcytosine"
tctcttctccatgagacagccaatatctgatcaaggccctgggaatgggaatccatagctcgccacccacgtctgccccctgcctagccacgctgcgctcagggaccattccgacaggagag

SEQ ID NO: 3122 - DNA, 122 bp, Homo sapiens
  misc_feature (61)..(62): /note="This region represents a CpG dinucleotide"
  misc_feature (61)..(61): /note="Nucleotide may be methylated to form 5-methylcytosine"
cacaggatgtgttcaatcaccaaaggtatttattgaatgccagctatgaatcatgtactgcgtaggcttggggacattggggatagataaatatcagtaaggtttaaaagcctaaataggct

SEQ ID NO: 3123 - DNA, 122 bp, Homo sapiens
  misc_feature (61)..(62): /note="This region represents a CpG dinucleotide"
  misc_feature (61)..(61): /note="Nucleotide may be methylated to form 5-methylcytosine"
gggaccctctcccatgggggcgacgggagacgtcctgccggtagaccttggccagggggtcgcgctccccgcccgcacccctcccggagccccggcggggacgtgcggggacgcgcccgggc

SEQ ID NO: 3124 - DNA, 122 bp, Homo sapiens
  misc_feature (61)..(62): /note="This region represents a CpG dinucleotide"
  misc_feature (61)..(61): /note="Nucleotide may be methylated to form 5-methylcytosine"
tagaccaacaaatgcggctttgtctattgatcatgatgaatagggaaagatcagtatttacgaagtctgatcaatttacagaagactcaaaaccagaaactatagtttttattcattactgc

SEQ ID NO: 3125 - DNA, 122 bp, Homo sapiens
  misc_feature (61)..(62): /note="This region represents a CpG dinucleotide"
  misc_feature (61)..(61): /note="Nucleotide may be methylated to form 5-methylcytosine"
ttgcaggaaaaaaaataagcgcctctggctctttaagtttggcctccccctcaaaacccccgcaacggtcccaaaccccttccagggactgggactacggaccctggtccgaccttctcgcg

SEQ ID NO: 3126 - DNA, 122 bp, Homo sapiens
  misc_feature (61)..(62): /note="This region represents a CpG dinucleotide"
  misc_feature (61)..(61): /note="Nucleotide may be methylated to form 5-methylcytosine"
ccctctcaaggctgacacatgttccttcccacccctcaggtctgaagctcatgggagccccggtgaagctgacagtgtctcaggggcagccggtgaagctcaactgcagtgtggaggggatg

SEQ ID NO: 3127 - DNA, 122 bp, Homo sapiens
  misc_feature (61)..(62): /note="This region represents a CpG dinucleotide"
  misc_feature (61)..(61): /note="Nucleotide may be methylated to form 5-methylcytosine"
aatgctaaaaaccagccaccttttgtcctgttactggtttcattttctccatgggaatcacggactcacaggaagccttttctaaaattctgtgctgggtaattcagaaccaacagaggctc

SEQ ID NO: 3128 - DNA, 122 bp, Homo sapiens
  misc_feature (61)..(62): /note="This region represents a CpG dinucleotide"
  misc_feature (61)..(61): /note="Nucleotide may be methylated to form 5-methylcytosine"
tgctcccctcctgcagggcttgttcccagcaggtgcatcctctagctgggcctggagacccggcgccacgtggcacagcggtgactctacagcgccctcgtgtgcggctctaggtgctccca

SEQ ID NO: 3129 - DNA, 122 bp, Homo sapiens
  misc_feature (61)..(62): /note="This region represents a CpG dinucleotide"
  misc_feature (61)..(61): /note="Nucleotide may be methylated to form 5-methylcytosine"
aggtaaaataaaatctcccagagaaaacaaagccgggaagggagccccctttctgtgaaacgcatgccatcttctccatttgtcagtttgatgctgtaacgtacatggggttttgcaagagc

SEQ ID NO: 3130 - DNA, 122 bp, Homo sapiens
  misc_feature (61)..(62): /note="This region represents a CpG dinucleotide"
  misc_feature (61)..(61): /note="Nucleotide may be methylated to form 5-methylcytosine"
gtggcaccagcccctcagctcctaactttctatacaatctccttttcagggaatgtgtagcgggctgttttatattctgtgacccccctaagtctgagatctctcctgaaggactaactgag

SEQ ID NO: 3131 - DNA, 122 bp, Homo sapiens
  misc_feature (61)..(62): /note="This region represents a CpG dinucleotide"
  misc_feature (61)..(61): /note="Nucleotide may be methylated to form 5-methylcytosine"
gcattatggcaggaagtcagatcttttgctctaaagcctaatactcctattctgtactctcggtaggtaaatacttttcaagccttagattcattttcaatcaagtcgctctgcttagtcaa

SEQ ID NO: 3132 - DNA, 122 bp, Homo sapiens
  misc_feature (61)..(62): /note="This region represents a CpG dinucleotide"
  misc_feature (61)..(61): /note="Nucleotide may be methylated to form 5-methylcytosine"
ctcttcgtggaactccagttattcaccttttatggtgcttaaaaagtcacttacactctacgtttgtttttaagttttgtctctccatgtttcattttggatagcttctattacattgtcta

SEQ ID NO: 3133 - DNA, 122 bp, Homo sapiens
  misc_feature (61)..(62): /note="This region represents a CpG dinucleotide"
  misc_feature (61)..(61): /note="Nucleotide may be methylated to form 5-methylcytosine"
aacaggattttaaatgcaggtgaccttcttgggtcatttctgagagtgaaataaacattgcgagattactgtttattgccattctgctacccctcagctcagcctgggggtggaagcaaggg

SEQ ID NO: 3134 - DNA, 122 bp, Homo sapiens
  misc_feature (61)..(62): /note="This region represents a CpG dinucleotide"
  misc_feature (61)..(61): /note="Nucleotide may be methylated to form 5-methylcytosine"
gaagaaggaagactcccccccaccccaccaaaaaaaagccatcacacaactggctaatggcgtcatcgcattccacctggctgagatcaaagcagaaaaagaagggtgggaagtgggcttgg

SEQ ID NO: 3135 - DNA, 122 bp, Homo sapiens
  misc_feature (61)..(62): /note="This region represents a CpG dinucleotide"
  misc_feature (61)..(61): /note="Nucleotide may be methylated to form 5-methylcytosine"
agactggctatctccaggccagcagggaggaccccgctgtgtggtcacggctcacactgccgggccctgtgaacacacccgttcccgacagggcctggatccagggcagagtgcaaagctgg

SEQ ID NO: 3136 - DNA, 122 bp, Homo sapiens
  misc_feature (61)..(62): /note="This region represents a CpG dinucleotide"
  misc_feature (61)..(61): /note="Nucleotide may be methylated to form 5-methylcytosine"
atggagggctgctgtggaggaaggagcctagaacttgctagaccttcatacacaccttcccgggagcctggcctccctgcagagcagtctctgacacagaaaaggaaggaattagcataatc

SEQ ID NO: 3137 - DNA, 122 bp, Homo sapiens
  misc_feature (61)..(62): /note="This region represents a CpG dinucleotide"
  misc_feature (61)..(61): /note="Nucleotide may be methylated to form 5-methylcytosine"
gctgagctaggggttagccaaccgggctggggtatcttactggtgatgacagcatggcctcgtcaccttcctgagggagggagtggcaggaaaccccagtcttacctcttttagcaatagca

SEQ ID NO: 3138 - DNA, 122 bp, Homo sapiens
  misc_feature (61)..(62): /note="This region represents a CpG dinucleotide"
  misc_feature (61)..(61): /note="Nucleotide may be methylated to form 5-methylcytosine"
gcccttgctccgcccccttaaaaccattttttttgctactagccacgcctccttctgcatcgcaccgctttctccatagaccccgcccactaggggagcaccacgcatcctttcctgccagt

SEQ ID NO: 3139 - DNA, 122 bp, Homo sapiens
  misc_feature (61)..(62): /note="This region represents a CpG dinucleotide"
  misc_feature (61)..(61): /note="Nucleotide may be methylated to form 5-methylcytosine"
cttcctgactcagggcactgaaatcaccacgttgcttttgggttgcccaaaacactgtgtcgccaagaaaagcctttcaaagcccctttcgggaagggatttttttcgaacttgaaacaaga

SEQ ID NO: 3140 - DNA, 122 bp, Homo sapiens
  misc_feature (61)..(62): /note="This region represents a CpG dinucleotide"
  misc_feature (61)..(61): /note="Nucleotide may be methylated to form 5-methylcytosine"
atatatgagctacagaaaaagtaaacaaatatgggctgtacacccaccaccttcacttctcggaagaataagagaagagagagaacacaaaaagactcgtattctgacttgggggaaacaaa

SEQ ID NO: 3141 - DNA, 122 bp, Homo sapiens
  misc_feature (61)..(62): /note="This region represents a CpG dinucleotide"
  misc_feature (61)..(61): /note="Nucleotide may be methylated to form 5-methylcytosine"
ttgatcttgttcgtgtatcttaagtggggcttttcaaaagcgcttttgttgctttttgttcgctgggggaaggcagggtaggtgagaaaacggaaccatctggagtcccagggctggggact

SEQ ID NO: 3142 - DNA, 122 bp, Homo sapiens
  misc_feature (61)..(62): /note="This region represents a CpG dinucleotide"
  misc_feature (61)..(61): /note="Nucleotide may be methylated to form 5-methylcytosine"
ctctgccctcctccagagggcctagagccagcctaggccctaggctggagtcagcctgcacgctcagcccgccaggaacaacaggccctcagacatcactgtggcagaggttccaaggtggg

SEQ ID NO: 3143 - DNA, 122 bp, Homo sapiens
  misc_feature (61)..(62): /note="This region represents a CpG dinucleotide"
  misc_feature (61)..(61): /note="Nucleotide may be methylated to form 5-methylcytosine"
tgtattataaagtatttgccatggtgacaaagctgggagaaacatcccattagccacagacgggctacagactgttctgattatccatgtccaaaactcagtctggctacagctttgtgtta

SEQ ID NO: 3144 - DNA, 122 bp, Homo sapiens
  misc_feature (61)..(62): /note="This region represents a CpG dinucleotide"
  misc_feature (61)..(61): /note="Nucleotide may be methylated to form 5-methylcytosine"
gaatcagcccctcaggtcactctgactctaccgcagcctggtgtcaaagccagcccttcacggaacagccaggagggcatcacagctgacctctggccaagctgagaaagagagcaagagag

SEQ ID NO: 3145 - DNA, 122 bp, Homo sapiens
  misc_feature (61)..(62): /note="This region represents a CpG dinucleotide"
  misc_feature (61)..(61): /note="Nucleotide may be methylated to form 5-methylcytosine"
cttaatcactgttactgctctcccaagcagcacattctttcagcttggattttgacaatacgttctttgtcagaggaatgctgcaaagagggtgaaaggggctgctattgccagaacagttc

SEQ ID NO: 3146 - DNA, 122 bp, Homo sapiens
  misc_feature (61)..(62): /note="This region represents a CpG dinucleotide"
  misc_feature (61)..(61): /note="Nucleotide may be methylated to form 5-methylcytosine"
ttgctccaggggagccccagagttggtggctggctaacccaaggccccagcggcagcctccgcccggccagctcgccatggcacggggtccacagaccctggtgcaggtgtgggtgggcggc

SEQ ID NO: 3147 - DNA, 122 bp, Homo sapiens
  misc_feature (61)..(62): /note="This region represents a CpG dinucleotide"
  misc_feature (61)..(61): /note="Nucleotide may be methylated to form 5-methylcytosine"
gggaggagggagcggtgcagtctgtggcagactttggcacagctgctcaggactgttatacgagtgtcagagggcacaaactggttagcacttggttcaggtatttttaattcagatatttg

SEQ ID NO: 3148 - DNA, 122 bp, Homo sapiens
  misc_feature (61)..(62): /note="This region represents a CpG dinucleotide"
  misc_feature (61)..(61): /note="Nucleotide may be methylated to form 5-methylcytosine"
caattcccttcacatctttttcttgttccctttcctcatcacccgttcatccccgggtcccgcccctccaggatggcgaaggcgagagccaacccaggatcttggaggcccgtgagcaagcg

SEQ ID NO: 3149 - DNA, 122 bp, Homo sapiens
  misc_feature (61)..(62): /note="This region represents a CpG dinucleotide"
  misc_feature (61)..(61): /note="Nucleotide may be methylated to form 5-methylcytosine"
cacatctggagtggttttctgggaaatcttgtgtggtgtgcatgtctttacacacctgcccggaaaaaagatgaatcaggcctcaaggaattcctctccctctcagcattcagagagaactg

SEQ ID NO: 3150 - DNA, 122 bp, Homo sapiens
  misc_feature (61)..(62): /note="This region represents a CpG dinucleotide"
  misc_feature (61)..(61): /note="Nucleotide may be methylated to form 5-methylcytosine"
ctaaagagcccacatcctgtctgaggagagagtcactactctctccagcatgtgctaccacgtgacattgtgatcccagtgcagtggtgtgctggtaaatgtttaacaactggctcattaaa

SEQ ID NO: 3151 - DNA, 122 bp, Homo sapiens
  misc_feature (61)..(62): /note="This region represents a CpG dinucleotide"
  misc_feature (61)..(61): /note="Nucleotide may be methylated to form 5-methylcytosine"
ggcctcagtttgcaaatctttgaaatgaagccaaacctacatttctcacagttcactaaacgagcaagcatgtaaatgcccagcacagcgagtcacacatggtagggcccccgtacatggac

SEQ ID NO: 3152 - DNA, 122 bp, Homo sapiens
  misc_feature (61)..(62): /note="This region represents a CpG dinucleotide"
  misc_feature (61)..(61): /note="Nucleotide may be methylated to form 5-methylcytosine"
tgaaatggttacatctttaagtgggactttcccagctgcacttctgatcccagggcctgacgatttgtactgtcccccaacacaccttccccatcttccttagctgagtgaagtgttaaaaa

SEQ ID NO: 3153 - DNA, 122 bp, Homo sapiens
  misc_feature (61)..(62): /note="This region represents a CpG dinucleotide"
  misc_feature (61)..(61): /note="Nucleotide may be methylated to form 5-methylcytosine"
tgtttttaacacagagacacagtgggcagtagtgtttatatttgtttttctatttttaagcgttctatttttacggttaggcttctgtccaagcccagggtctaggtggaagcccctttgga

SEQ ID NO: 3154 - DNA, 122 bp, Homo sapiens
  misc_feature (61)..(62): /note="This region represents a CpG dinucleotide"
  misc_feature (61)..(61): /note="Nucleotide may be methylated to form 5-methylcytosine"
ggctctagggagaaatgcacagtttgacatcgttcatgaagagcctctccacggctcctgcgcctgagacagctggcctgacctccaaatcatccatccacccctgctgtcatctgttttca

SEQ ID NO: 3155 - DNA, 122 bp, Homo sapiens
  misc_feature (61)..(62): /note="This region represents a CpG dinucleotide"
  misc_feature (61)..(61): /note="Nucleotide may be methylated to form 5-methylcytosine"
aatttgaaagttaaatttttgtcaggttctttatgttgctgactgaaaacatctaatttgcgtattgaaatctaagtagcatgtcttcaggaaacagaagtacttagaatgctgaattagcc

SEQ ID NO: 3156 - DNA, 122 bp, Homo sapiens
  misc_feature (61)..(62): /note="This region represents a CpG dinucleotide"
  misc_feature (61)..(61): /note="Nucleotide may be methylated to form 5-methylcytosine"
gcagcacctgaaatgatctgtcttaggtatgtgtgtgcttgttcattgttttgtcttctccgtgaaaatctaagctcctagaaactttgtgagggaggcaatgggtctgttttgtttacctc

SEQ ID NO: 3157 - DNA, 122 bp, Homo sapiens
  misc_feature (61)..(62): /note="This region represents a CpG dinucleotide"
  misc_feature (61)..(61): /note="Nucleotide may be methylated to form 5-methylcytosine"
ggaattacagggttgtgagccaacagcaaccacatacacctttgcagtaatcagaaccagcgttctcgatgctgaaagcaaaatcaagtaaacaaggttgtgttgtggacttccttgaccca

SEQ ID NO: 3158 - DNA, 122 bp, Homo sapiens
  misc_feature (61)..(62): /note="This region represents a CpG dinucleotide"
  misc_feature (61)..(61): /note="Nucleotide may be methylated to form 5-methylcytosine"
cctcagtgtggagtcaaactctgccatttactgtgtgacttacttgtgtgcccttagacacgtcactcaagtgaatctctgtttccttgtacataaaatgggaataatgatgctcctcttgc

SEQ ID NO: 3159 - DNA, 122 bp, Homo sapiens
  misc_feature (61)..(62): /note="This region represents a CpG dinucleotide"
  misc_feature (61)..(61): /note="Nucleotide may be methylated to form 5-methylcytosine"
aagtagtcaaaatcatagaaacagaaaggaaaatagtgattctcagggattgagagtagacggaattggggagttattgtgtaatgggtatagagttgcaatttggcaagatgaaaaagttc

SEQ ID NO: 3160 - DNA, 122 bp, Homo sapiens
  misc_feature (61)..(62): /note="This region represents a CpG dinucleotide"
  misc_feature (61)..(61): /note="Nucleotide may be methylated to form 5-methylcytosine"
ccaaagtgttcagattacagctgtgagccaccacaccctgcctatttaaggatttaattccgatctggagtaggtctagggtggcagaaggaacctatcacaacaacagcaataacataata

SEQ ID NO: 3161 - DNA, 122 bp, Homo sapiens
  misc_feature (61)..(62): /note="This region represents a CpG dinucleotide"
  misc_feature (61)..(61): /note="Nucleotide may be methylated to form 5-methylcytosine"
actaattccctctcatagaattttactgaataagcagagaatgggagctggattggcaaacgtacaaagaccacatggtcttatagccagaaaaaaagaccagttcttagagaggaataata

SEQ ID NO: 3162 - DNA, 122 bp, Homo sapiens
  misc_feature (61)..(62): /note="This region represents a CpG dinucleotide"
  misc_feature (61)..(61): /note="Nucleotide may be methylated to form 5-methylcytosine"
gcctccacctctctggcctgtttcctcacctgggatttagtatgattggcaaggcctccacgcatgggtggccaaggggcatgttgaaatccactgtgcactctggcatgagctgaaaccag

SEQ ID NO: 3163 - DNA, 122 bp, Homo sapiens
  misc_feature (61)..(62): /note="This region represents a CpG dinucleotide"
  misc_feature (61)..(61): /note="Nucleotide may be methylated to form 5-methylcytosine"
ggtggataaagaacctgcctagaatattagcagcagaagtataattagaagctacctcttcgattaaaacaaacattcacaaatagacacttgggattttagtcaccactatttcaaagtag

SEQ ID NO: 3164 - DNA, 122 bp, Homo sapiens
  misc_feature (61)..(62): /note="This region represents a CpG dinucleotide"
  misc_feature (61)..(61): /note="Nucleotide may be methylated to form 5-methylcytosine"
atactaagtgagcacatgctgtgggaaatatggcaccgatagacttgctcaatgcagggtcgccgctaaccttcgatttgttaaaaagcaaacaagcaaaaaaaaaccccacaattatttgt

SEQ ID NO: 3165 - DNA, 122 bp, Homo sapiens
  misc_feature (61)..(62): /note="This region represents a CpG dinucleotide"
  misc_feature (61)..(61): /note="Nucleotide may be methylated to form 5-methylcytosine"
tctgtaacaagatgatgcaatctcccaaggttattgggaagattagagatatggggtacacgaaacttgtgtacctggtgcaaagaaatgcttggtgcaaaacagctatgcaattaataggt

SEQ ID NO: 3166 - DNA, 122 bp, Homo sapiens
  misc_feature (61)..(62): /note="This region represents a CpG dinucleotide"
  misc_feature (61)..(61): /note="Nucleotide may be methylated to form 5-methylcytosine"
gaaagcacctaagctttcttacaagcccctaagtgatgcttacaatgataatgaagtgcacggactcactttgagtagcaaggccagtccctagcttccagaaagttccatacttaaatcat

SEQ ID NO: 3167 - DNA, 122 bp, Homo sapiens
  misc_feature (61)..(62): /note="This region represents a CpG dinucleotide"
  misc_feature (61)..(61): /note="Nucleotide may be methylated to form 5-methylcytosine"
ttttcaaggcaagcgtcacgctttccatacggagattaataatgaagttcctcttatgtacgacagactcaataccagatgaagtcaccatcttgaaatgtgactcctccagcaagcctatg

SEQ ID NO: 3168 - DNA, 122 bp, Homo sapiens
  misc_feature (61)..(62): /note="This region represents a CpG dinucleotide"
  misc_feature (61)..(61): /note="Nucleotide may be methylated to form 5-methylcytosine"
ccagcctcctgtccttcccattccaggtgctccgggtgctagcaaagctggggtgggcggcgccgggcaaggtctgaagactgcgaggacccagctgccaggcgcattgtgaagtggcccga

SEQ ID NO: 3169 - DNA, 122 bp, Homo sapiens
  misc_feature (61)..(62): /note="This region represents a CpG dinucleotide"
  misc_feature (61)..(61): /note="Nucleotide may be methylated to form 5-methylcytosine"
acccggcgtccagtgcttctttatggtaagccatgccatctccttcctcctccatggggccgcccctgtgattaatcggggttgggaaatgtacctgggggagggggaagccctggggctgt

SEQ ID NO: 3170 - DNA, 122 bp, Homo sapiens
  misc_feature (61)..(62): /note="This region represents a CpG dinucleotide"
  misc_feature (61)..(61): /note="Nucleotide may be methylated to form 5-methylcytosine"
atatataataaacatttgttattactgtgtatatttatataatgaatatcagactcactacgtgctcagcagcatcctgatgtgttcacaggaattgcatagttgagataccctatgaacca

SEQ ID NO: 3171 - DNA, 122 bp, Homo sapiens
  misc_feature (61)..(62): /note="This region represents a CpG dinucleotide"
  misc_feature (61)..(61): /note="Nucleotide may be methylated to form 5-methylcytosine"
gaggggctctgccttcagtctggttcctgcgtaggtgcccgccagcctcagtgctggcaccgctgcacggtcacggatgtggcaatgcacccacagaatcaacaagccccggcacccacaac

SEQ ID NO: 3172 - DNA, 122 bp, Homo sapiens
  misc_feature (61)..(62): /note="This region represents a CpG dinucleotide"
  misc_feature (61)..(61): /note="Nucleotide may be methylated to form 5-methylcytosine"
taaggtcagtggcctgcggggacgcagtgagcgccgaatttgcctggggcaggggaaatgcgctctggcccatgtctgcgcactcgtagttccacccctcagccccagtgtttgttattttt

SEQ ID NO: 3173 - DNA, 122 bp, Homo sapiens
  misc_feature (61)..(62): /note="This region represents a CpG dinucleotide"
  misc_feature (61)..(61): /note="Nucleotide may be methylated to form 5-methylcytosine"
tctcggttactcagccccggttgcctcccttctgcccagcagttagttcctcaggactcacggcttccaggctcccctcgcctgtgagccggacccaagctcctctttggggctgaggagga

SEQ ID NO: 3174 - DNA, 122 bp, Homo sapiens
  misc_feature (61)..(62): /note="This region represents a CpG dinucleotide"
  misc_feature (61)..(61): /note="Nucleotide may be methylated to form 5-methylcytosine"
agtcaagtgggttgacagatatgtcaaaaatactttatgaaaagagggaggtagctcatgcgagttggcaaccttttgtgtattgtttcctgttcaagcaggctgcctccctttgacatctt

SEQ ID NO: 3175 - DNA, 122 bp, Homo sapiens
  misc_feature (61)..(62): /note="This region represents a CpG dinucleotide"
  misc_feature (61)..(61): /note="Nucleotide may be methylated to form 5-methylcytosine"
ttgctttgtttttttaatccctggtacccataaaatcacaactgatatttgaaatgatgacgtaatgatattaaaaaatgaactatacttaacatgcttcctatgcttagtcaagtctaata

SEQ ID NO: 3176 - DNA, 122 bp, Homo sapiens
  misc_feature (61)..(62): /note="This region represents a CpG dinucleotide"
  misc_feature (61)..(61): /note="Nucleotide may be methylated to form 5-methylcytosine"
agctgaagactcagtgatcttgctaagcagtgtccaacacaagccctcttctattggagtcgttggatgtaaaatattttcttaagtcataatctatattgacagttaaatgggatattcaa

SEQ ID NO: 3177 - DNA, 122 bp, Homo sapiens
  misc_feature (61)..(62): /note="This region represents a CpG dinucleotide"
  misc_feature (61)..(61): /note="Nucleotide may be methylated to form 5-methylcytosine"
gcttccggctgctgggcgtcactgacttgctgtggcttcctggcctggctcagcattggccgtccggctcctgcagcagtgacatctccactctggacccatgagcccatcagctcttggtg

SEQ ID NO: 3178 - DNA, 122 bp, Homo sapiens
  misc_feature (61)..(62): /note="This region represents a CpG dinucleotide"
  misc_feature (61)..(61): /note="Nucleotide may be methylated to form 5-methylcytosine"
caatagggtaatcagctgttattgtgagtctgagagtctctgtcgaaacagagagtgagccgcatcagggagggagggagaaatggatgaggtgatgcaaaagtgctcccatttcccaaccc

SEQ ID NO: 3179 - DNA, 122 bp, Homo sapiens
  misc_feature (61)..(62): /note="This region represents a CpG dinucleotide"
  misc_feature (61)..(61): /note="Nucleotide may be methylated to form 5-methylcytosine"
aggtgactgtgtttggctggtttaggctctgtgtgggagctgcggtttagagcactgaggcgacctattagtgaggaaggttgtggggaggactctgaggctgtccgggtccatctgccccc

SEQ ID NO: 3180 - DNA, 122 bp, Homo sapiens
  misc_feature (61)..(62): /note="This region represents a CpG dinucleotide"
  misc_feature (61)..(61): /note="Nucleotide may be methylated to form 5-methylcytosine"
aaccatcaccacaatccagttttagaacatttccactgccccagacaagcactgattgcacgatgcccatttgcagtcattcctcctcccacaccccgaccaccactgatctgctttccatg

SEQ ID NO: 3181 - DNA, 122 bp, Homo sapiens
  misc_feature (61)..(62): /note="This region represents a CpG dinucleotide"
  misc_feature (61)..(61): /note="Nucleotide may be methylated to form 5-methylcytosine"
cctctgcgggttcccagggggaggcgctcgagggtgaagtacaaacccatccccaggctgcgaaagaaaagtctacgagctggcctctgtgggagggtcagggcccagggtataaacataga

SEQ ID NO: 3182 - DNA, 122 bp, Homo sapiens
  misc_feature (61)..(62): /note="This region represents a CpG dinucleotide"
  misc_feature (61)..(61): /note="Nucleotide may be methylated to form 5-methylcytosine"
tcttaaagtcccgtccggcggcggcacctgcgcgggcaggcgggaggtgggggagagaaccgcagaatgcacgttaagcctgggctccctgcgggtccctgcgcccctctccaacctcgtca

SEQ ID NO: 3183 - DNA, 122 bp, Homo sapiens
  misc_feature (61)..(62): /note="This region represents a CpG dinucleotide"
  misc_feature (61)..(61): /note="Nucleotide may be methylated to form 5-methylcytosine"
agaccctcccaatgcccttccatcccaaccccagctgcatctgcctatggatccccagctcgcctgggctctgtagcttctctcagtagaaaggattcttccatggctggggtgagcgggct

SEQ ID NO: 3184 - DNA, 122 bp, Homo sapiens
  misc_feature (61)..(62): /note="This region represents a CpG dinucleotide"
  misc_feature (61)..(61): /note="Nucleotide may be methylated to form 5-methylcytosine"
ccttgggtgcagattacatctaaataacatatacagcaaatcacactgccagtgctgaagcgtttcaaagtaaattcagacataaacaaagtaaacagagaacataacttacctatctcttc

SEQ ID NO: 3185 - DNA, 122 bp, Homo sapiens
  misc_feature (61)..(62): /note="This region represents a CpG dinucleotide"
  misc_feature (61)..(61): /note="Nucleotide may be methylated to form 5-methylcytosine"
ccctccaaagggtcccatgagtgaaaggatcagggtttgaaatgcaccaccccaagagggcgccagctccagctggtaactccacggatcacgtggttcaaccccttgcctctcctccctcc

SEQ ID NO: 3186 - DNA, 122 bp, Homo sapiens
  misc_feature (61)..(62): /note="This region represents a CpG dinucleotide"
  misc_feature (61)..(61): /note="Nucleotide may be methylated to form 5-methylcytosine"
ctctcaacttgatctctttaaagctgctgggtcagcctccctggcacctcctctttcacacgcaagagcaagaaatggctttttggtttttttgggttttttttgagacagagtcttgccct

SEQ ID NO: 3187 - DNA, 122 bp, Homo sapiens
  misc_feature (61)..(62): /note="This region represents a CpG dinucleotide"
  misc_feature (61)..(61): /note="Nucleotide may be methylated to form 5-methylcytosine"
tccctaggtcgccgctgtcgccaccgccgccaccggccgcgaactccccctttcccgtcacgtcacacaatatcggatcgtccattcgctgccgccgcccgccactcaagaaatcccgtgga

SEQ ID NO: 3188 - DNA, 122 bp, Homo sapiens
  misc_feature (61)..(62): /note="This region represents a CpG dinucleotide"
  misc_feature (61)..(61): /note="Nucleotide may be methylated to form 5-methylcytosine"
acgtcacattcatctaagtgagggggcctggtttgttccaaattttcatgaccatcggagcgggtctgacggtgagaccagacattttgcttgtatttctggttcagctccagctagggctg

SEQ ID NO: 3189 - DNA, 122 bp, Homo sapiens
  misc_feature (61)..(62): /note="This region represents a CpG dinucleotide"
  misc_feature (61)..(61): /note="Nucleotide may be methylated to form 5-methylcytosine"
tgaccattggactggtgacctgaggctcattgacactcccaataaaagcaggcttagaggcgtgatgtggcaagaagcccggctggactaggtcgaagagggaatgcagagaatgtacacct

SEQ ID NO: 3190 - DNA, 122 bp, Homo sapiens
  misc_feature (61)..(62): /note="This region represents a CpG dinucleotide"
  misc_feature (61)..(61): /note="Nucleotide may be methylated to form 5-methylcytosine"
ctataattttttttcttatttccatataggcctgagaggttaaaatagaaagttaaataacgtgagtgacataccaaatgacccagcaagtgtttgactgagataagttttaacacttctgc

SEQ ID NO: 3191 - DNA, 122 bp, Homo sapiens
  misc_feature (61)..(62): /note="This region represents a CpG dinucleotide"
  misc_feature (61)..(61): /note="Nucleotide may be methylated to form 5-methylcytosine"
cacagacacatagaaatcacttcctggcttaacacatacttggctgaattccttggtccacgtatcaccctgaatctgaaacatcctttctgcaccagccattgacccaggaactgaaacag

SEQ ID NO: 3192 - DNA, 122 bp, Homo sapiens
  misc_feature (61)..(62): /note="This region represents a CpG dinucleotide"
  misc_feature (61)..(61): /note="Nucleotide may be methylated to form 5-methylcytosine"
acctattttaatatagcgaactaataccaagggctggtgacaaagggaactttaccttgacgccgattattcttacaggcttagagttggggtatgaaccaccaagaaagcgagcctagaag

SEQ ID NO: 3193 - DNA, 122 bp, Homo sapiens
  misc_feature (61)..(62): /note="This region represents a CpG dinucleotide"
  misc_feature (61)..(61): /note="Nucleotide may be methylated to form 5-methylcytosine"
tgggggccccatcttcccttctttgttgccatgtgtacagtaaagaaccaggcaacatggcgatggccacctgtctgcataataaaaggttagggtggggcaccagcttttatacatgctat

SEQ ID NO: 3194 - DNA, 122 bp, Homo sapiens
  misc_feature (61)..(62): /note="This region represents a CpG dinucleotide"
  misc_feature (61)..(61): /note="Nucleotide may be methylated to form 5-methylcytosine"
cctgctccatagcaaagagggagaaaaggagggtgcagcgagggagagggggagcagagccgtgactctgcagccggcctctgtgggtgagcagccggcctccagctgccctttccggttcc

SEQ ID NO: 3195 - DNA, 122 bp, Homo sapiens
  misc_feature (61)..(62): /note="This region represents a CpG dinucleotide"
  misc_feature (61)..(61): /note="Nucleotide may be methylated to form 5-methylcytosine"
cagaccaaactaaaaaatgctgatttaggaaacacacccttttcctgatgaggaaagttgcgtttttgtccaatatcttaaatcttaaggagcttttaaggttttggcaccttttttccctc

SEQ ID NO: 3196 - DNA, 122 bp, Homo sapiens
  misc_feature (61)..(62): /note="This region represents a CpG dinucleotide"
  misc_feature (61)..(61): /note="Nucleotide may be methylated to form 5-methylcytosine"
actcatctctcatcttgcacaagtttggcttttgagggacttggataactccatgagggccgtgacatatgcaatacatgcctcataaccagggcttgccacactgcgattgcagcaggaca

SEQ ID NO: 3197 - DNA, 122 bp, Homo sapiens
  misc_feature (61)..(62): /note="This region represents a CpG dinucleotide"
  misc_feature (61)..(61): /note="Nucleotide may be methylated to form 5-methylcytosine"
ggtatggaagggtgctttcacctgtttgggctacatggccattctggtacacatcagccacgtgtcagcatgggcagagagaagtagaaattgctgaggtcagggagggaacctggcctcat

SEQ ID NO: 3198 - DNA, 122 bp, Homo sapiens
  misc_feature (61)..(62): /note="This region represents a CpG dinucleotide"
  misc_feature (61)..(61): /note="Nucleotide may be methylated to form 5-methylcytosine"
aactcattagcaagtgccagatatggtcctcaaccccgtctggtgtggtttgctagagggcgctgatgatatttctggtgtgtttgatgctatgaagagagttgtcattaggaactcctgcc

SEQ ID NO: 3199 - DNA, 122 bp, Homo sapiens
  misc_feature (61)..(62): /note="This region represents a CpG dinucleotide"
  misc_feature (61)..(61): /note="Nucleotide may be methylated to form 5-methylcytosine"
ttgctcttgagtgtctggctgtatgtcaacaagtggcctctctgttccttggtttccaggcgctggccatgtggtctgtccaggaaggagagtgtaaatgtgataatattgcctgctacaca

SEQ ID NO: 3200 - DNA, 122 bp, Homo sapiens
  misc_feature (61)..(62): /note="This region represents a CpG dinucleotide"
  misc_feature (61)..(61): /note="Nucleotide may be methylated to form 5-methylcytosine"
ggatgctgtctggctagtgatccatgagtcaacctcacctaacttttcactaaaaaccaacgtcaattcacacacaaaattagatcataacacataagaacttcaaaaatgaagactgacaa

SEQ ID NO: 3201 - DNA, 122 bp, Homo sapiens
  misc_feature (61)..(62): /note="This region represents a CpG dinucleotide"
  misc_feature (61)..(61): /note="Nucleotide may be methylated to form 5-methylcytosine"
agtatatgaccccgctctggttcagtattcttatccccaccccaaataaagagaatcacacgaccttattgtgataataaatagcaactgtagtcagagggagagaggcccagggaggaaca

SEQ ID NO: 3202 - DNA, 122 bp, Homo sapiens
  misc_feature (61)..(62): /note="This region represents a CpG dinucleotide"
  misc_feature (61)..(61): /note="Nucleotide may be methylated to form 5-methylcytosine"
aagagctgagtgatgacaaagtgaagtagcaaggctcgtgctgctagggctgatggttaacgacctcagtttcctcatctgtaaactagtgagaaaaatactatctgcctcatgggtagtta

SEQ ID NO: 3203 - DNA, 122 bp, Homo sapiens
  misc_feature (61)..(62): /note="This region represents a CpG dinucleotide"
  misc_feature (61)..(61): /note="Nucleotide may be methylated to form 5-methylcytosine"
aacaattctgtgtgatgggggattctcatcttcaatttatagatgaggaaataagctcaacggctcatccaaggttatataggcagaggggcagagccagtcaaacacaggttgtctaatgc

SEQ ID NO: 3204 - DNA, 122 bp, Homo sapiens
  misc_feature (61)..(62): /note="This region represents a CpG dinucleotide"
  misc_feature (61)..(61): /note="Nucleotide may be methylated to form 5-methylcytosine"
taaagaacacaactcggtaacagccgagtgcaagagatgcgcagcacggggggtgaagggcgggagtgctgtcctcacagcacctctgtgtgcccacctgcctggaagctctccgaaccctg

SEQ ID NO: 3205 - DNA, 122 bp, Homo sapiens
  misc_feature (61)..(62): /note="This region represents a CpG dinucleotide"
  misc_feature (61)..(61): /note="Nucleotide may be methylated to form 5-methylcytosine"
gttgtggcctcaaacagtgaatttacatccatgagaatcaatttcctcatctgccaagtacggatcctaactcaagttcctctaagccttaaaactgttcttccacaatattaatttcttca

SEQ ID NO: 3206 - DNA, 122 bp, Homo sapiens
  misc_feature (61)..(62): /note="This region represents a CpG dinucleotide"
  misc_feature (61)..(61): /note="Nucleotide may be methylated to form 5-methylcytosine"
gcatctgttcttccaaactttatttctgtgtacacaaaaatattagttgagtatttattacgtgccaagaactcttcaaaagtattccagttgcaggcattaataagataggcagatttcct

SEQ ID NO: 3207 - DNA, 122 bp, Homo sapiens
  misc_feature (61)..(62): /note="This region represents a CpG dinucleotide"
  misc_feature (61)..(61): /note="Nucleotide may be methylated to form 5-methylcytosine"
aggaacgacaggctcaaaatatgaagacttaatccagacacctctgtgtctctgaacttgcgttgtttcttctttggaggtgaagtacacatcgttttactccgggcagaggacttgtgctc

SEQ ID NO: 3208 - DNA, 122 bp, Homo sapiens
  misc_feature (61)..(62): /note="This region represents a CpG dinucleotide"
  misc_feature (61)..(61): /note="Nucleotide may be methylated to form 5-methylcytosine"
ttcactttacagacttgtgctttctttctttcttgcaggagatccaagaaccatctctctcgggactgcatcaggaaccctttcatgtaacaataatggtagaagcacctgggatttgggaa

SEQ ID NO: 3209 - DNA, 122 bp, Homo sapiens
  misc_feature (61)..(62): /note="This region represents a CpG dinucleotide"
  misc_feature (61)..(61): /note="Nucleotide may be methylated to form 5-methylcytosine"
ccccaggctacagagtaaaagtctgatggtaggatgtgaggtgagggaccttccttgacccggcacccacatgaggcaggactgagaacaccctgaggactgcccgggtggctggggtgctg

SEQ ID NO: 3210 - DNA, 122 bp, Homo sapiens
  misc_feature (61)..(62): /note="This region represents a CpG dinucleotide"
  misc_feature (61)..(61): /note="Nucleotide may be methylated to form 5-methylcytosine"
caagatccataggtggtgctgagccatctctttcagggtctaaccttctgtggaaaagcacggcactgttctagcagagtcagtttcacttgagttttcttcctcctttttataacgacatt

SEQ ID NO: 3211 - DNA, 122 bp, Homo sapiens
  misc_feature (61)..(62): /note="This region represents a CpG dinucleotide"
  misc_feature (61)..(61): /note="Nucleotide may be methylated to form 5-methylcytosine"
tgtcacgtggggtatcaggtggctctgccagaaactcccttggcacacagagcactgggtcggccctcgggtgtggctgtttgggcaggacagccctctgtatgtagccttgagcaggtagg

SEQ ID NO: 3212 - DNA, 122 bp, Homo sapiens
  misc_feature (61)..(62): /note="This region represents a CpG dinucleotide"
  misc_feature (61)..(61): /note="Nucleotide may be methylated to form 5-methylcytosine"
tttgtaggagtctcacaggatcattcatgaagcggggagaacgggtgctgctattaagcacgttctctggttttctgtcgccatgtgcgctgtggttgtatatgctagtacatacactgcat

SEQ ID NO: 3213 - DNA, 122 bp, Homo sapiens
  misc_feature (61)..(62): /note="This region represents a CpG dinucleotide"
  misc_feature (61)..(61): /note="Nucleotide may be methylated to form 5-methylcytosine"
ttggcaccctcccttctcaaaggcgtttgaaagagtgaagtctaaagcactagatgagatcgaatttttggaatagaaagaaaactttagtagtatctgctttagtattctcatgttacaga

SEQ ID NO: 3214 - DNA, 122 bp, Homo sapiens
  misc_feature (61)..(62): /note="This region represents a CpG dinucleotide"
  misc_feature (61)..(61): /note="Nucleotide may be methylated to form 5-methylcytosine"
gtggctattgtggaacagagtgtggttgccgtccccccaggggtagggctgtggagagagcgggggagggagcgcgcgtgagcgccgtgagtccggagtccgcgccccgcgcgacccccccc

SEQ ID NO: 3215 - DNA, 122 bp, Homo sapiens
  misc_feature (61)..(62): /note="This region represents a CpG dinucleotide"
  misc_feature (61)..(61): /note="Nucleotide may be methylated to form 5-methylcytosine"
aaaaaataaaaataaaaataaaaaataaacagctggcacagtggggacccgggtaccgcacgtgcctttctgggagttgtagttcctagcacgtgtctctaaaatacgttaaacatggcacc

SEQ ID NO: 3216 - DNA, 122 bp, Homo sapiens
  misc_feature (61)..(62): /note="This region represents a CpG dinucleotide"
  misc_feature (61)..(61): /note="Nucleotide may be methylated to form 5-methylcytosine"
caaaaaactcttggcaattgtgcaactgaattgccagtgtctttctctcttagacaagaacgacttctcattcatgtgacagtcatgaataagaagggaatacactctggtacacttaactc

SEQ ID NO: 3217 - DNA, 122 bp, Homo sapiens
  misc_feature (61)..(62): /note="This region represents a CpG dinucleotide"
  misc_feature (61)..(61): /note="Nucleotide may be methylated to form 5-methylcytosine"
tacaagtagcatcttccaatcactgcttgaacacatttattgctacagaatgcatttcctcgtggggtaccacagtttcattgccagaacaggcagaaatgccctccttattgactcccatt

SEQ ID NO: 3218 - DNA, 122 bp, Homo sapiens
  misc_feature (61)..(62): /note="This region represents a CpG dinucleotide"
  misc_feature (61)..(61): /note="Nucleotide may be methylated to form 5-methylcytosine"
tggggtttcgccatgttggccaggctggtctcaaactcctggcctcaaatctgcccacctcggcaaaagtggtgttttaatacaagaattctgcatgttcaaggtggggaaaaggcttataa

SEQ ID NO: 3219 - DNA, 122 bp, Homo sapiens
  misc_feature (61)..(62): /note="This region represents a CpG dinucleotide"
  misc_feature (61)..(61): /note="Nucleotide may be methylated to form 5-methylcytosine"
gagcttaatattctccttgcaacatcacagtcacagtgctggttgagtagttacttgcctcgaaggactggtaagcctttgacaaggattggttacttgggaagttttcttgcttacctgta

SEQ ID NO: 3220 - DNA, 122 bp, Homo sapiens
  misc_feature (61)..(62): /note="This region represents a CpG dinucleotide"
  misc_feature (61)..(61): /note="Nucleotide may be methylated to form 5-methylcytosine"
ccaaggattccttccgtgcagggttacctgggcaagcctgggggttgcagtcctggtactcggcagcatcgcccacgcagggcaggcccccgttgcggggctccgggttagtgcacgttctc

SEQ ID NO: 3221 - DNA, 122 bp, Homo sapiens
  misc_feature (61)..(62): /note="This region represents a CpG dinucleotide"
  misc_feature (61)..(61): /note="Nucleotide may be methylated to form 5-methylcytosine"
tggaattctagacggtgtttaaccttgagagcagtttgtttttcccttgagaaaggctgacgagtacacagatcaatggtttacaagggaaatcacctgataaaggggagagttcttacccc

SEQ ID NO: 3222 - DNA, 122 bp, Homo sapiens
  misc_feature (61)..(62): /note="This region represents a CpG dinucleotide"
  misc_feature (61)..(61): /note="Nucleotide may be methylated to form 5-methylcytosine"
gtaggggctgtacggtgcaggttcctcccctggttcctcataggcagagtactatagggtcgcagtcttcctggacgttccctattggttgttgggcaggggctgtaggtattttctttagg

SEQ ID NO: 3223 - DNA, 122 bp, Homo sapiens
  misc_feature (61)..(62): /note="This region represents a CpG dinucleotide"
  misc_feature (61)..(61): /note="Nucleotide may be methylated to form 5-methylcytosine"
tcacatgattttggtagtgtgacgaaaacctctttgtgggttattttgcaaggttttatgcgaaggtagaataaccagcccacagaaccttcgtaaggacagctgttgcaaagggtcgacac

SEQ ID NO: 3224 - DNA, 122 bp, Homo sapiens
  misc_feature (61)..(62): /note="This region represents a CpG dinucleotide"
  misc_feature (61)..(61): /note="Nucleotide may be methylated to form 5-methylcytosine"
attctaagaaatcagggtctcagccatcatcacccccaattctaagaaatcccagtgttccgggcacggccctttctttccgcaggctctgtgctgtcataagcagaagtaactgtctattt

SEQ ID NO: 3225 - DNA, 122 bp, Homo sapiens
  misc_feature (61)..(62): /note="This region represents a CpG dinucleotide"
  misc_feature (61)..(61): /note="Nucleotide may be methylated to form 5-methylcytosine"
ctcttggcccagaagcccagctggaccctgaggccacaaactgccccctactggagaaatcgctgcaggatttctcctccatcaaatcgctgtgtcagagccagttgggggcttttaaaaga

SEQ ID NO: 3226 - DNA, 122 bp, Homo sapiens
  misc_feature (61)..(62): /note="This region represents a CpG dinucleotide"
  misc_feature (61)..(61): /note="Nucleotide may be methylated to form 5-methylcytosine"
cgtgaggtcctcgggcgccgcagggagggcggcatccaagtctttccgcgcgtgcgcgagcgtccgctgtcactcaggtagaacagtctcaaatcgcaccgttagtaccggccccctttgcc

SEQ ID NO: 3227 - DNA, 122 bp, Homo sapiens
  misc_feature (61)..(62): /note="This region represents a CpG dinucleotide"
  misc_feature (61)..(61): /note="Nucleotide may be methylated to form 5-methylcytosine"
ggcacagagggatcagatgactggccaaaatcacacaacttagattcacctgtttccagacgcaagcacttaactgccacacggtcctgactatgttgagagctgcggacaccagtatgaac

SEQ ID NO: 3228 - DNA, 122 bp, Homo sapiens
  misc_feature (61)..(62): /note="This region represents a CpG dinucleotide"
  misc_feature (61)..(61): /note="Nucleotide may be methylated to form 5-methylcytosine"
tggtggcttcctggattatgggagttatgcattcaatgagtcaggtcatatttgccctcacgttaccattctgtggtccctatgaggtagacagctttttctgtgaccttcctgtggtgttc

SEQ ID NO: 3229 - DNA, 122 bp, Homo sapiens
  misc_feature (61)..(62): /note="This region represents a CpG dinucleotide"
  misc_feature (61)..(61): /note="Nucleotide may be methylated to form 5-methylcytosine"
agcttccaagtcattcttgatccatttgtctccctcagtcctcactggcagtcaatatcccgagtcctatcaaaatagctcttaaaacttctgcctcttctccactccctcagccaccaccc

SEQ ID NO: 3230 - DNA, 122 bp, Homo sapiens
  misc_feature (61)..(62): /note="This region represents a CpG dinucleotide"
  misc_feature (61)..(61): /note="Nucleotide may be methylated to form 5-methylcytosine"
agtggcaacaaggccggataagttacatttgtctaaatccagcagctgttggtagtttaacgattgtggaatctccagaggcaagggttgcatttagtgtttgctgaaaccactgttaatta

SEQ ID NO: 3231 - DNA, 122 bp, Homo sapiens
  misc_feature (61)..(62): /note="This region represents a CpG dinucleotide"
  misc_feature (61)..(61): /note="Nucleotide may be methylated to form 5-methylcytosine"
accggggggcagggcgggtgtctgcagcgtcctcgggaggtctcaggccccttgggcagacgctgcgcgtgcccagagggagggatggcaggcttcagccacttctcccagccgccctaccg

SEQ ID NO: 3232 - DNA, 122 bp, Homo sapiens
  misc_feature (61)..(62): /note="This region represents a CpG dinucleotide"
  misc_feature (61)..(61): /note="Nucleotide may be methylated to form 5-methylcytosine"
gccctgtcatcatcctgtgaagatgaatgtccacggtgcagggctgttgatgtagaaagacgtggagtgttgaaatgatgtacactgagtttgtgatttccccaggcactgcactctaatgt

SEQ ID NO: 3233 - DNA, 122 bp, Homo sapiens
  misc_feature (61)..(62): /note="This region represents a CpG dinucleotide"
  misc_feature (61)..(61): /note="Nucleotide may be methylated to form 5-methylcytosine"
atgaagggagatggactgggtccatgccgaaggtttctccctggtttctcagcccccgggcgaagactcagggagacattgagacacaccctgcacaggagggggagggggagggggagggc

SEQ ID NO: 3234 - DNA, 122 bp, Homo sapiens
  misc_feature (61)..(62): /note="This region represents a CpG dinucleotide"
  misc_feature (61)..(61): /note="Nucleotide may be methylated to form 5-methylcytosine"
tcatgcccctcggataacaaataaccagcattctctctctcctgggtgctttggtgggaacggaacggtgtcacccctcaccgagtggctagaccaggaggagggggaggctggcggagagt

SEQ ID NO: 3235 - DNA, 122 bp, Homo sapiens
  misc_feature (61)..(62): /note="This region represents a CpG dinucleotide"
  misc_feature (61)..(61): /note="Nucleotide may be methylated to form 5-methylcytosine"
gtgtgtgtgtgtgtggtgtgtacgtgcgcctgtgtggtccagcctcgaggtgtgtgtgttcggggggagcacagttgggtgttgaaggagagcgcccctcaccccccacttcccagctgcct

SEQ ID NO: 3236 - DNA, 122 bp, Homo sapiens
  misc_feature (61)..(62): /note="This region represents a CpG dinucleotide"
  misc_feature (61)..(61): /note="Nucleotide may be methylated to form 5-methylcytosine"
cgttgttggttttctcgttgtttggctcctgaaagtaacgataaataattgcatttagtgcgatcggtgtcaggcgcggccaccacgctcggtccccctccgcgaccgaggctctcggcctc

SEQ ID NO: 3237 - DNA, 122 bp, Homo sapiens
  misc_feature (61)..(62): /note="This region represents a CpG dinucleotide"
  misc_feature (61)..(61): /note="Nucleotide may be methylated to form 5-methylcytosine"
aacacagtcagctgaacagagggtctcaaagacaaatgttattcttcctagttcagaacccgtggctccagtcatagatgttggtggtctatttgacagattaaaatggcaatatttatact

SEQ ID NO: 3238 - DNA, 122 bp, Homo sapiens
  misc_feature (61)..(62): /note="This region represents a CpG dinucleotide"
  misc_feature (61)..(61): /note="Nucleotide may be methylated to form 5-methylcytosine"
atgtgtcttgtggcaattacaggtgtcttcaagcattgcctcagggacatgccaagggaacggaaaccagtcccagtaccctgctctgggagatgtggtcacagggttcggggtgttgagta

SEQ ID NO: 3239 - DNA, 122 bp, Homo sapiens
  misc_feature (61)..(62): /note="This region represents a CpG dinucleotide"
  misc_feature (61)..(61): /note="Nucleotide may be methylated to form 5-methylcytosine"
cgctgccttcacacattgtctgctgccgatcttgtcaatgacccttgttaacgcctctcccgacaggtggacggcatccagacgcggagggaagtttcctcctggggagcagcgcacgtgct

SEQ ID NO: 3240 - DNA, 122 bp, Homo sapiens
  misc_feature (61)..(62): /note="This region represents a CpG dinucleotide"
  misc_feature (61)..(61): /note="Nucleotide may be methylated to form 5-methylcytosine"
gccatggtccggaggggatagcggccgcagcgtggagggcttcgaaaacgggggtgggggcgcccaagagctcagtgcccagccccgggatcgcctcctcccctcaggacccgcgagccctc

SEQ ID NO: 3241 - DNA, 122 bp, Homo sapiens
  misc_feature (61)..(62): /note="This region represents a CpG dinucleotide"
  misc_feature (61)..(61): /note="Nucleotide may be methylated to form 5-methylcytosine"
gtcccaggttatgctgagtcccagcagggaaccaccacagctctgaatcagcctgttagccgctgtccattgctcttcatctgctctttatctgaaaatcttcagaagctttccttcaaatg

SEQ ID NO: 3242 - DNA, 122 bp, Homo sapiens
  misc_feature (61)..(62): /note="This region represents a CpG dinucleotide"
  misc_feature (61)..(61): /note="Nucleotide may be methylated to form 5-methylcytosine"
agagctagagggaaatgagcaatgcagcccagctggagtaccagcattaatcccatgattcgtagcccgtattttcagacagatcaattacttatggctgtaaccaatctctcatcgttttc

SEQ ID NO: 3243 - DNA, 122 bp, Homo sapiens
  misc_feature (61)..(62): /note="This region represents a CpG dinucleotide"
  misc_feature (61)..(61): /note="Nucleotide may be methylated to form 5-methylcytosine"
ggacttggctctgggatgtggattgggctcagttctggaccacatgtttcttatcctccacgtgcatgttcttctcatgggggaaggaaggagaacaagagacaaagccacgcatacaggca

SEQ ID NO: 3244 - DNA, 122 bp, Homo sapiens
  misc_feature (61)..(62): /note="This region represents a CpG dinucleotide"
  misc_feature (61)..(61): /note="Nucleotide may be methylated to form 5-methylcytosine"
ctcagcctgctgagctgcgcgtgagctgctgctgtaacgctctaacgttagagcagctaacggctctgctcagaatttctcccgacagaggccggagtgttcaagagcttggcgatacagaa

SEQ ID NO: 3245 - DNA, 122 bp, Homo sapiens
  misc_feature (61)..(62): /note="This region represents a CpG dinucleotide"
  misc_feature (61)..(61): /note="Nucleotide may be methylated to form 5-methylcytosine"
gaggacgccgcagtgcgcactagccctccatggaagacaggcgcagaggacgccggagtgcgcactagcccttcatggaagacgggagcagaggatgcgtggagtgcgcaccagccctccat

SEQ ID NO: 3246 - DNA, 122 bp, Homo sapiens
  misc_feature (61)..(62): /note="This region represents a CpG dinucleotide"
  misc_feature (61)..(61): /note="Nucleotide may be methylated to form 5-methylcytosine"
ggctgtgagcctcacaatggcatttgataaacattctgtgctgtctgacatctcattccccgccttcacccaagccaggcccctcctatcccaggagcagtgagagcaccccgctggaattg

SEQ ID NO: 3247 - DNA, 122 bp, Homo sapiens
  misc_feature (61)..(62): /note="This region represents a CpG dinucleotide"
  misc_feature (61)..(61): /note="Nucleotide may be methylated to form 5-methylcytosine"
tacatataactgaactcccgtaggattgggtgaagtctcttgagagcagctcactgtgggcgtgcggcaagagatcaacatttatctcagctgcttatatgtggtctaagtggatttggtag

SEQ ID NO: 3248 - DNA, 122 bp, Homo sapiens
  misc_feature (61)..(62): /note="This region represents a CpG dinucleotide"
  misc_feature (61)..(61): /note="Nucleotide may be methylated to form 5-methylcytosine"
cttttctttctttctatttaatccatttccaggttcctattattttgccaaaaagggggccggagttgctcgccggcggaggagtgggagacgatggcccttacctgctctctttctctctc

SEQ ID NO: 3249 - DNA, 122 bp, Homo sapiens
  misc_feature (61)..(62): /note="This region represents a CpG dinucleotide"
  misc_feature (61)..(61): /note="Nucleotide may be methylated to form 5-methylcytosine"
gcagagtgcagaactgggagccaccaggacattgtgtttctccaaagagcggtgcaggcccgggcagcgacctcttgctgttcagcaaaaagcaaacattcaaagcagtccctgcgggctca

SEQ ID NO: 3250 - DNA, 122 bp, Homo sapiens
  misc_feature (61)..(62): /note="This region represents a CpG dinucleotide"
  misc_feature (61)..(61): /note="Nucleotide may be methylated to form 5-methylcytosine"
agaacattagcctctataaccctattataattctaggaaaactcgtcagtgtatgacctacggtttcatatgtgttgaccttggtaaatacaggaagggggttagtcataagtcagtgtgtt

SEQ ID NO: 3251 - DNA, 122 bp, Homo sapiens
  misc_feature (61)..(62): /note="This region represents a CpG dinucleotide"
  misc_feature (61)..(61): /note="Nucleotide may be methylated to form 5-methylcytosine"
aggcacctgccacgccccagagctggcccttctgcagagcaacactgagctgcacagggtcgaatgttcagagagaagctccttggatctgccatttctaactatatgagtgagaagaaaga

SEQ ID NO: 3252 - DNA, 122 bp, Homo sapiens
  misc_feature (61)..(62): /note="This region represents a CpG dinucleotide"
  misc_feature (61)..(61): /note="Nucleotide may be methylated to form 5-methylcytosine"
tgttcctccatcttcagcagcagcaatgtggaatctctctgatcgatctttctgtagcttcgtctcctctgaccacagcagggaatgctttgccatgctttaagacccatgtgattaggcgg

SEQ ID NO: 3253 - DNA, 122 bp, Homo sapiens
  misc_feature (61)..(62): /note="This region represents a CpG dinucleotide"
  misc_feature (61)..(61): /note="Nucleotide may be methylated to form 5-methylcytosine"
cctgagctttaaaatgttattcggccgcttcatcacttgtccccgactttgcagcgactccgatggtagcctgagtctccattgcttggagcagccacagtggacactggacgggatattct

SEQ ID NO: 3254 - DNA, 122 bp, Homo sapiens
  misc_feature (61)..(62): /note="This region represents a CpG dinucleotide"
  misc_feature (61)..(61): /note="Nucleotide may be methylated to form 5-methylcytosine"
cggctgttgttgtgttgttggcagggcagagggtctaggatgccagcctgctccgggctgcgctgtgcgcctagcccagggcggggggatgcggggcgacacccgcctcccggtgcatccag

SEQ ID NO: 3255 - DNA, 122 bp, Homo sapiens
  misc_feature (61)..(62): /note="This region represents a CpG dinucleotide"
  misc_feature (61)..(61): /note="Nucleotide may be methylated to form 5-methylcytosine"
ttcctcgagtgagagaactcacctctcagtgatttgacctcggagatgctggccaagcttcgctaagcaggaaatcatttcttggctggtgtgcttttgaaacttaaccgaggaaactgaat

SEQ ID NO: 3256 - DNA, 122 bp, Homo sapiens
  misc_feature (61)..(62): /note="This region represents a CpG dinucleotide"
  misc_feature (61)..(61): /note="Nucleotide may be methylated to form 5-methylcytosine"
agaacaaaaatgcatatctatccccctcccgttccctctgcctcccctcccaaaagaacgcgtctgcggggacagatggccctgtgtcagcgtccctgtgtgatattgatgtgaacagcgag

SEQ ID NO: 3257 - DNA, 122 bp, Homo sapiens
  misc_feature (61)..(62): /note="This region represents a CpG dinucleotide"
  misc_feature (61)..(61): /note="Nucleotide may be methylated to form 5-methylcytosine"
tgcggacttgtacaaagtaagaaactccgtacacaaaacagaggggagcacggagggcggcgggacaaagagggtggtcggcaaaggctgtattttccatagatgtaatcacagtttgaatc

SEQ ID NO: 3258 - DNA, 122 bp, Homo sapiens
  misc_feature (61)..(62): /note="This region represents a CpG dinucleotide"
  misc_feature (61)..(61): /note="Nucleotide may be methylated to form 5-methylcytosine"
tgcccagaagggtttcctattgtgacacctcatttccttcttaggatcatgggattttgtcgtttgcctcttctgtggatgagtgaatctcatcccaagagcctgttttcgatgtatggggt

SEQ ID NO: 3259 - DNA, 122 bp, Homo sapiens
  misc_feature (61)..(62): /note="This region represents a CpG dinucleotide"
  misc_feature (61)..(61): /note="Nucleotide may be methylated to form 5-methylcytosine"
ccttaacaaaggctagaatgtgggactgatcaaacattagagaaagccccattgccctcacgggccacctgcctggcacacacctgtgtgcacttcccacatatttatggtgtttatcccag

SEQ ID NO: 3260 - DNA, 122 bp, Homo sapiens
  misc_feature (61)..(62): /note="This region represents a CpG dinucleotide"
  misc_feature (61)..(61): /note="Nucleotide may be methylated to form 5-methylcytosine"
ggattgaggagggacatggaccttcaggactaaccctctatggattggccctcccagaagcgtttgggctggtagacccaccccttcctacctgctgagtgatgtcatttcctgccaggatg

SEQ ID NO: 3261 - DNA, 122 bp, Homo sapiens
  misc_feature (61)..(62): /note="This region represents a CpG dinucleotide"
  misc_feature (61)..(61): /note="Nucleotide may be methylated to form 5-methylcytosine"
tcagaagctccggggaggggcgccccgcattttgagctctcggggtgctgccgatggagccgttcgaggagagcagagccaagtgcctgaggcttctcacccggtcccacccccctccacac

SEQ ID NO: 3262 - DNA, 122 bp, Homo sapiens
  misc_feature (61)..(62): /note="This region represents a CpG dinucleotide"
  misc_feature (61)..(61): /note="Nucleotide may be methylated to form 5-methylcytosine"
cagctagttttggactgacctagagtcctttctcttttgcagactggcatcgtgctgaatcggccggttttgagaggggaagatggggacaaagccgctccacctcccatgtcggcacaggt

SEQ ID NO: 3263 - DNA, 122 bp, Homo sapiens
  misc_feature (61)..(62): /note="This region represents a CpG dinucleotide"
  misc_feature (61)..(61): /note="Nucleotide may be methylated to form 5-methylcytosine"
gcacaaggctttccaagcagaaccttgctgattgtgtgtgtgtgtgtgtgtgtgtgtgcacgtgtgcttgcagatgcttagaatcacaggcttttatgatctgggtttcttaaaccttatct

SEQ ID NO: 3264 - DNA, 122 bp, Homo sapiens
  misc_feature (61)..(62): /note="This region represents a CpG dinucleotide"
  misc_feature (61)..(61): /note="Nucleotide may be methylated to form 5-methylcytosine"
gcgctctggccccgacacgctcggcatagatgcctttgcggagcagacggcgctggagcccggccagggaagaccaagtctgggacttcagcgccagcctcgccaccctgcttcccacaacc

SEQ ID NO: 3265 - DNA, 122 bp, Homo sapiens
  misc_feature (61)..(62): /note="This region represents a CpG dinucleotide"
  misc_feature (61)..(61): /note="Nucleotide may be methylated to form 5-methylcytosine"
gttgttaacatgcagttgccttggatgcagtagctttggcttgagaccagcaacatcacacgtgaacctctcctttgtcaacacaccaaagctttttgaagtgaccgtcatgatcctgatgg

SEQ ID NO: 3266 - DNA, 122 bp, Homo sapiens
  misc_feature (61)..(62): /note="This region represents a CpG dinucleotide"
  misc_feature (61)..(61): /note="Nucleotide may be methylated to form 5-methylcytosine"
tatcagtcttgagccaatcaggactgcaacttttacttttcaggcaatgctctacacagccgacccagtcaatgcagactggcattacccacattttcctattgctcaactacagaatgagg

SEQ ID NO: 3267 - DNA, 122 bp, Homo sapiens
  misc_feature (61)..(62): /note="This region represents a CpG dinucleotide"
  misc_feature (61)..(61): /note="Nucleotide may be methylated to form 5-methylcytosine"
tcgccaacaagcggtgctaccaggagaaacgcctgcttttgaagaaaacagccaggaacgcgactgaaagacacttgctcccaggaagaattggcatttgttccaaaacacagctggataaa

SEQ ID NO: 3268 - DNA, 122 bp, Homo sapiens
  misc_feature (61)..(62): /note="This region represents a CpG dinucleotide"
  misc_feature (61)..(61): /note="Nucleotide may be methylated to form 5-methylcytosine"
gtgagtggagggagaaactgctgattcgggggccttcagacatggccgatttcacagcagcgaaaataggtcactaatgacacgtggcaatgagccaataaactgtggccaggagctccgaa

SEQ ID NO: 3269 - DNA, 122 bp, Homo sapiens
  misc_feature (61)..(62): /note="This region represents a CpG dinucleotide"
  misc_feature (61)..(61): /note="Nucleotide may be methylated to form 5-methylcytosine"
gggttacaagtgagcaaggcaaatgacattatgtgaatacagtttaaacgataacacacacgggtaacccagtgcaggaaataatacaactttccctcccttgttttcatttgcattttact

SEQ ID NO: 3270 - DNA, 122 bp, Homo sapiens
  misc_feature (61)..(62): /note="This region represents a CpG dinucleotide"
  misc_feature (61)..(61): /note="Nucleotide may be methylated to form 5-methylcytosine"
tgcagagggtgcggtccgggggtcagtgctcacctgggagggggcagtcgggggccagtgcgcacctggggagggggcagtctgggggtcagtgcgcacctgcggaggtgtgggggccgccg

SEQ ID NO: 3271 - DNA, 122 bp, Homo sapiens
  misc_feature (61)..(62): /note="This region represents a CpG dinucleotide"
  misc_feature (61)..(61): /note="Nucleotide may be methylated to form 5-methylcytosine"
tggatattcctgttctgtagataaggaaatggtgacttaagtaacttggtcaaggtcacacggctagttaggtgttaccgcagggattctgattttgctccatcaggatccaaagcccatga

SEQ ID NO: 3272 - DNA, 122 bp, Homo sapiens
  misc_feature (61)..(62): /note="This region represents a CpG dinucleotide"
  misc_feature (61)..(61): /note="Nucleotide may be methylated to form 5-methylcytosine"
aaaaaaaaatgattaccaagactaaatgcctcagaaagtttccaaaatcctttatttcctcgtacctgtcaatcctagacttccactttttttttcttttcttagacaagtattttcaactt

SEQ ID NO: 3273 - DNA, 122 bp, Homo sapiens
  misc_feature (61)..(62): /note="This region represents a CpG dinucleotide"
  misc_feature (61)..(61): /note="Nucleotide may be methylated to form 5-methylcytosine"
ccgcccccatgagtcgtggatcgtaatatccacgggggatgggcgggtgatattactccccgcatcgctggtcgcccgcgcccctgcgatgtggctcggaatatctaggcggagagtggggt

SEQ ID NO: 3274 - DNA, 122 bp, Homo sapiens
  misc_feature (61)..(62): /note="This region represents a CpG dinucleotide"
  misc_feature (61)..(61): /note="Nucleotide may be methylated to form 5-methylcytosine"
aggctcttccctgggaaaaccattctggggtaatgttctgctccttccctcctcagtcaccgcaggacctgggaggggaagctgagaaacacaaggcatgtgaggggaagtcagagaggaca

SEQ ID NO: 3275 - DNA, 122 bp, Homo sapiens
  misc_feature (61)..(62): /note="This region represents a CpG dinucleotide"
  misc_feature (61)..(61): /note="Nucleotide may be methylated to form 5-methylcytosine"
tcagaacaactccagatggtacagcaagcaggtggcagcagtgggcagcagagccccagacgtctggcccctcaataggggacctccagaggcctctgggccaccagctgtctcctttctgg

SEQ ID NO: 3276 - DNA, 122 bp, Homo sapiens
  misc_feature (61)..(62): /note="This region represents a CpG dinucleotide"
  misc_feature (61)..(61): /note="Nucleotide may be methylated to form 5-methylcytosine"
taaaaatcattatttcattccatcttttcatcattgttaacactaaaccatttggagtcacgttggcaactggatttcatcttgagacttgtcattgaggaatcattttgttgtgtagcaat

SEQ ID NO: 3277 - DNA, 122 bp, Homo sapiens
  misc_feature (61)..(62): /note="This region represents a CpG dinucleotide"
  misc_feature (61)..(61): /note="Nucleotide may be methylated to form 5-methylcytosine"
tgggggtggaatctgttagaactctccaagctccatggggctcgaacttcagtgccaaagcgggatgggtttgtggcttcagctctctgggacacagctgccagcctctccttgtccagctg

SEQ ID NO: 3278 - DNA, 122 bp, Homo sapiens
  misc_feature (61)..(62): /note="This region represents a CpG dinucleotide"
  misc_feature (61)..(61): /note="Nucleotide may be methylated to form 5-methylcytosine"
caccagctccccctccctgccctcctctgccaaaggaaggccctgctatttcaacacaagcggcttgcaggaggagcctgttaagaggacggctggtccactgaaaaagcggcagcagcttc

SEQ ID NO: 3279 - DNA, 122 bp, Homo sapiens
  misc_feature (61)..(62): /note="This region represents a CpG dinucleotide"
  misc_feature (61)..(61): /note="Nucleotide may be methylated to form 5-methylcytosine"
aggaggcggcggcggaggaggcggcggcggaggaggcggcggcggcggaggcggcggcggcggaggaggactgacaatagcaacaataactggctgaaagccagctttgtaatatcctcaaa

SEQ ID NO: 3280 - DNA, 122 bp, Homo sapiens
  misc_feature (61)..(62): /note="This region represents a CpG dinucleotide"
  misc_feature (61)..(61): /note="Nucleotide may be methylated to form 5-methylcytosine"
cctgcgctgaaggcgttggggctcctgcagttctggggcagccacaggcgcccagggtttcgtgccgatcagcccaggacggtcttcccggtgcagtttctgatgcggggagggcagtgctg

SEQ ID NO: 3281 - DNA, 122 bp, Homo sapiens
  misc_feature (61)..(62): /note="This region represents a CpG dinucleotide"
  misc_feature (61)..(61): /note="Nucleotide may be methylated to form 5-methylcytosine"
ggctgggggacaaggaccttccctccctctcagatttggggctcaccagggctgagatggcgtctcccctcagactctgggctccctggggtaggggcagggtcccgccctcagaatcagct

SEQ ID NO: 3282 - DNA, 122 bp, Homo sapiens
  misc_feature (61)..(62): /note="This region represents a CpG dinucleotide"
  misc_feature (61)..(61): /note="Nucleotide may be methylated to form 5-methylcytosine"
ggcataggttctaaggggatggttgagaccctcctgttggaagcagatgcttctgtccatcgtccatttgtcccacaaggattgtcccagctgtcctgtgctctgtgctgggaaatgccatg

SEQ ID NO: 3283 - DNA, 122 bp, Homo sapiens
  misc_feature (61)..(62): /note="This region represents a CpG dinucleotide"
  misc_feature (61)..(61): /note="Nucleotide may be methylated to form 5-methylcytosine"
tggccgaacagtttcctccttcgggcccttcgtggtcaccgggcccctgcctggagcctccgcctcaggaacccatgtggctgactccggccctgtggccttgccactctctctccatcccc

SEQ ID NO: 3284 - DNA, 122 bp, Homo sapiens
  misc_feature (61)..(62): /note="This region represents a CpG dinucleotide"
  misc_feature (61)..(61): /note="Nucleotide may be methylated to form 5-methylcytosine"
aacatgcttgttaattgacataccctatgacatcatgtggaacggctttccagtgctaaccgtatgaaaatctcactaatctgccagcctcccaccctcaggcagggtaaccctagagccac

SEQ ID NO: 3285 - DNA, 122 bp, Homo sapiens
  misc_feature (61)..(62): /note="This region represents a CpG dinucleotide"
  misc_feature (61)..(61): /note="Nucleotide may be methylated to form 5-methylcytosine"
attacttccccacccccactcctcccgacttgcttctctcaggtccaggcctgtccttgacgtcagaaggcatgggctggtctccaggaagcccgtccaagctcagaacttagagacaaagc

SEQ ID NO: 3286 - DNA, 122 bp, Homo sapiens
  misc_feature (61)..(62): /note="This region represents a CpG dinucleotide"
  misc_feature (61)..(61): /note="Nucleotide may be methylated to form 5-methylcytosine"
atctcccggcgaggcctccgtggctgcattgccggcaatgactaggtgttttatgctgaacgttgaagatattttccactggagatttaacacggaacatcaagaaccattgaaatcactca

SEQ ID NO: 3287 - DNA, 122 bp, Homo sapiens
  misc_feature (61)..(62): /note="This region represents a CpG dinucleotide"
  misc_feature (61)..(61): /note="Nucleotide may be methylated to form 5-methylcytosine"
gaattataccttatgtgttttttttaatcttaaaagagtttttcctaccaacccacaatacgttgggtattgcacaatggattcaacagaaaagcaactgaggattccacaggtcaatacaa

SEQ ID NO: 3288 - DNA, 122 bp, Homo sapiens
  misc_feature (61)..(62): /note="This region represents a CpG dinucleotide"
  misc_feature (61)..(61): /note="Nucleotide may be methylated to form 5-methylcytosine"
ctaaacagaaattattttccttgattagccatggcacattcgcccttcttaggtggacagcgtgttttgatacgaaggtgatgggttacaggtgctgggtttctccacatgggcagtttctc

SEQ ID NO: 3289 - DNA, 122 bp, Homo sapiens
  misc_feature (61)..(62): /note="This region represents a CpG dinucleotide"
  misc_feature (61)..(61): /note="Nucleotide may be methylated to form 5-methylcytosine"
acttttccaaatgacaatggggcatggagcttgagagtggaaatgaggccctagggatagcgtgcttaggaaaacactcccagcctgatgtaattctgggggtacaatggcattttcatcat

SEQ ID NO: 3290 - DNA, 122 bp, Homo sapiens
  misc_feature (61)..(62): /note="This region represents a CpG dinucleotide"
  misc_feature (61)..(61): /note="Nucleotide may be methylated to form 5-methylcytosine"
cattagcaaggggttaaggaccttaaggacggagcccaggcagcaccgggaagccagctccgctcagaagaagggtggcgaccacgggagagctagaaagggaggaccatgggaaacagggc

SEQ ID NO: 3291 - DNA, 122 bp, Homo sapiens
  misc_feature (61)..(62): /note="This region represents a CpG dinucleotide"
  misc_feature (61)..(61): /note="Nucleotide may be methylated to form 5-methylcytosine"
agtttaccttctgcttaacaaaattgtttccactccccgtgtggtataaagacagagccccgtcagtccacacttagtcgtgtgactggtttgcagccctctgctcatttcctggcttgcct

SEQ ID NO: 3292 - DNA, 122 bp, Homo sapiens
  misc_feature (61)..(62): /note="This region represents a CpG dinucleotide"
  misc_feature (61)..(61): /note="Nucleotide may be methylated to form 5-methylcytosine"
aggagcagagctataaacagaattcagaattctcctcctcctctggggctatctacttagcgcttttgccatttacttcctgagacagactcatgggggatcggggctcaggtgcacctgga

SEQ ID NO: 3293 - DNA, 122 bp, Homo sapiens
  misc_feature (61)..(62): /note="This region represents a CpG dinucleotide"
  misc_feature (61)..(61): /note="Nucleotide may be methylated to form 5-methylcytosine"
ttcttagcatgcaagtcagattagagtgaaagcaaaagcacatgacacaaaactgtggttcgctaatagattgtaggcttcctgtagcttaaattatacacaccacagtaaactgttaccca

SEQ ID NO: 3294 - DNA, 122 bp, Homo sapiens
  misc_feature (61)..(62): /note="This region represents a CpG dinucleotide"
  misc_feature (61)..(61): /note="Nucleotide may be methylated to form 5-methylcytosine"
gtggctgcccattgttgcatcataaaaccacgtgtcttcttgacctcttgactcaggagccgtgtaccagattcattccaaaccaagatacagaaaacctgagagaaaggaaatgaatttaa

SEQ ID NO: 3295 - DNA, 122 bp, Homo sapiens
  misc_feature (61)..(62): /note="This region represents a CpG dinucleotide"
  misc_feature (61)..(61): /note="Nucleotide may be methylated to form 5-methylcytosine"
ggaggtatgaccatggcccttcatgtggggcctgggacatgtgagttgaatagctcacctcgtatattagttctttctatttatgacaagtagcactgccctaatatgccaggctatgcagg

SEQ ID NO: 3296 - DNA, 122 bp, Homo sapiens
  misc_feature (61)..(62): /note="This region represents a CpG dinucleotide"
  misc_feature (61)..(61): /note="Nucleotide may be methylated to form 5-methylcytosine"
attattaattgcctaacatttggtcttctcatttgcctggggatcagagagaatccaggtcgtcaaggcaggaggaagctgttggctaatagctgcagagatttcactctctaagccttcta

SEQ ID NO: 3297 - DNA, 122 bp, Homo sapiens
  misc_feature (61)..(62): /note="This region represents a CpG dinucleotide"
  misc_feature (61)..(61): /note="Nucleotide may be methylated to form 5-methylcytosine"
tccggatcctcaggtcagcggaggagcggttcaggccttcctcttgctcgatggactgctcgatgcctgggggcacaggtggctgctaagtcataaccaggccccttcaaccccgtccccta

SEQ ID NO: 3298 - DNA, 122 bp, Homo sapiens
  misc_feature (61)..(62): /note="This region represents a CpG dinucleotide"
  misc_feature (61)..(61): /note="Nucleotide may be methylated to form 5-methylcytosine"
gaggaagggagaagagatggcagggagggcgtgggcggcacctgtggtcgagttggcctgcgtttcggatccgagggcgacgcagacggagctcagaaccagacccagccagagaaggcctc

SEQ ID NO: 3299 - DNA, 122 bp, Homo sapiens
  misc_feature (61)..(62): /note="This region represents a CpG dinucleotide"
  misc_feature (61)..(61): /note="Nucleotide may be methylated to form 5-methylcytosine"
aagggcatgactatgacgctggattctccctgctagtgatgcatgagcacctgtggtgaacgagatggaaatgatgaagaagcccatgatcccacctgctgattgtcataggacaatttgag

SEQ ID NO: 3300 - DNA, 122 bp, Homo sapiens
  misc_feature (61)..(62): /note="This region represents a CpG dinucleotide"
  misc_feature (61)..(61): /note="Nucleotide may be methylated to form 5-methylcytosine"
ctctggcccatgtctgcgcactcgtagttccacccctcagccccagtgtttgttatttttcgggttcagcttgcttttgccccgtctccgtcgacgcaatcgccaccagtcaatggggtggt

SEQ ID NO: 3301 - DNA, 122 bp, Homo sapiens
  misc_feature (61)..(62): /note="This region represents a CpG dinucleotide"
  misc_feature (61)..(61): /note="Nucleotide may be methylated to form 5-methylcytosine"
taactccagtgagaattttcttctctgccccttacttgaacttcctggtctgggcagcctcgtctgcatctcataattctgttcttgaaaaatatatcctaaaaaggtccccagctacaggt

SEQ ID NO: 3302 - DNA, 122 bp, Homo sapiens
  misc_feature (61)..(62): /note="This region represents a CpG dinucleotide"
  misc_feature (61)..(61): /note="Nucleotide may be methylated to form 5-methylcytosine"
atacataaaaacataagactctgaataagattcagcctttaaaaacaaagcttgtgtttacgtggatgaacccggaagacgttcagtgaaataagccaggcacagaaaaacaaatacttcct

SEQ ID NO: 3303 - DNA, 122 bp, Homo sapiens
  misc_feature (61)..(62): /note="This region represents a CpG dinucleotide"
  misc_feature (61)..(61): /note="Nucleotide may be methylated to form 5-methylcytosine"
ggccaacctgtttggcctggaaagagtaagggacttgcctaagatcatatggcttattcacggcacaccaaaagtagatgtgaggctgtcagctcattactgctgctacttcagtctaggtg

SEQ ID NO: 3304 - DNA, 122 bp, Homo sapiens
  misc_feature (61)..(62): /note="This region represents a CpG dinucleotide"
  misc_feature (61)..(61): /note="Nucleotide may be methylated to form 5-methylcytosine"
tattcaatatcgttttgctttcttgtgtagactgagggtgtaaacctcgtttctgacagtcgcctataggacttttcagcaggctgtgggcctagaggtgggggatgtggaatcaagctaaa

SEQ ID NO: 3305 - DNA, 122 bp, Homo sapiens
  misc_feature (61)..(62): /note="This region represents a CpG dinucleotide"
  misc_feature (61)..(61): /note="Nucleotide may be methylated to form 5-methylcytosine"
ctctgaatagctatgtaataatgtgggtctgcgttcacaaggaaaagttttaaaggacaacggagaggtcaacaacacggttctacctctgccagtcacttagcacctctgaggctcattat

SEQ ID NO: 3306 - DNA, 122 bp, Homo sapiens
  misc_feature (61)..(62): /note="This region represents a CpG dinucleotide"
  misc_feature (61)..(61): /note="Nucleotide may be methylated to form 5-methylcytosine"
cagtagtacaattaactgacaattagataattccacagcctctgttaactgggtgttactcgggtattctttgagattccttctctctccatgttactggtgacccttgggaatggaaaacc

SEQ ID NO: 3307 - DNA, 122 bp, Homo sapiens
  misc_feature (61)..(62): /note="This region represents a CpG dinucleotide"
  misc_feature (61)..(61): /note="Nucleotide may be methylated to form 5-methylcytosine"
agttccagagtctgaaatcaaatgggtatccctgggccaaaatccaggggtgcgcggggccgctcttcctggaggctccaggggaggagcctcctgtccccttccagcctctagtggtaccc

SEQ ID NO: 3308 - DNA, 122 bp, Homo sapiens
  misc_feature (61)..(62): /note="This region represents a CpG dinucleotide"
  misc_feature (61)..(61): /note="Nucleotide may be methylated to form 5-methylcytosine"
gtttttagtctatattttttatatatttcagattccagattcttattcagcactgtgtcacgataaaaaacaaaatacactaaggaagaaaaggaaacactgagggtttattgcattatacc

SEQ ID NO: 3309 - DNA, 122 bp, Homo sapiens
  misc_feature (61)..(62): /note="This region represents a CpG dinucleotide"
  misc_feature (61)..(61): /note="Nucleotide may be methylated to form 5-methylcytosine"
gtctaacacatataatccaatttgctttgtaaaaagcctgcccctgcgtgcctgggctagcgcaactgtgtccgggttctgtgatgaactaaactcaagtgaccagggagatggaatgggat

SEQ ID NO: 3310 - DNA, 122 bp, Homo sapiens
  misc_feature (61)..(62): /note="This region represents a CpG dinucleotide"
  misc_feature (61)..(61): /note="Nucleotide may be methylated to form 5-methylcytosine"
tgcaaaataagtatcagaacaagaacgtactttgtttgatgcttatattgcataatacaacgagccttatctccataagtgtttgttgaataaataaaataatgaaacagagtaagtcacaa

SEQ ID NO: 3311 - DNA, 122 bp, Homo sapiens
  misc_feature (61)..(62): /note="This region represents a CpG dinucleotide"
  misc_feature (61)..(61): /note="Nucleotide may be methylated to form 5-methylcytosine"
ttgtggtgagcagaggcagctgtgcaaacaacctgctgttccggatgtgactgtggtggccgtggggtgcagagtccagggctcatggcgttggtcatgcaaattgtggttcctgggcctta

SEQ ID NO: 3312 - DNA, 122 bp, Homo sapiens
  misc_feature (61)..(62): /note="This region represents a CpG dinucleotide"
  misc_feature (61)..(61): /note="Nucleotide may be methylated to form 5-methylcytosine"
gcccagcttagggttttcaggaaatttggaagctgccgcagtagttggagtctaaggactcgtgacaatcttcgggtgcccttcgagagaaaaggggaggtaagcggggtagaagtacctct

SEQ ID NO: 3313 - DNA, 122 bp, Homo sapiens
  misc_feature (61)..(62): /note="This region represents a CpG dinucleotide"
  misc_feature (61)..(61): /note="Nucleotide may be methylated to form 5-methylcytosine"
gattctaatgaccatttccctgacgaagcaaccaggcttgagatagtatatggtgacactcgttaagtgattccctgtgagtgagggataaacctgtgaatggaataaggtccacgggcccc

SEQ ID NO: 3314 - DNA, 122 bp, Homo sapiens
  misc_feature (61)..(62): /note="This region represents a CpG dinucleotide"
  misc_feature (61)..(61): /note="Nucleotide may be methylated to form 5-methylcytosine"
cctctctgaggagtgggtgccccgcccctccgtgggccgcctggtttctcttattggcagcgtctgtagtcccctggctctgtcacccgcagctattctaggcctctggttcctttcacttt

SEQ ID NO: 3315 - DNA, 122 bp, Homo sapiens
  misc_feature (61)..(62): /note="This region represents a CpG dinucleotide"
  misc_feature (61)..(61): /note="Nucleotide may be methylated to form 5-methylcytosine"
atgcggagcagcgcctgttctggaattttctgtggctgctcagctctctcccagggagcgcgggtcttgagccacagcagagggcatcagcctcagcaagcccagacccgcccggaggctcc

SEQ ID NO: 3316 - DNA, 122 bp, Homo sapiens
  misc_feature (61)..(62): /note="This region represents a CpG dinucleotide"
  misc_feature (61)..(61): /note="Nucleotide may be methylated to form 5-methylcytosine"
taaatgttgcatgtgacattatacttcctcactgcaccttctttgactcgcctccctaaccggtcagaggcatgtgataagatcaatttgctgcttgcttcacatgggggtaaccctgtgtc

SEQ ID NO: 3317 - DNA, 122 bp, Homo sapiens
  misc_feature (61)..(62): /note="This region represents a CpG dinucleotide"
  misc_feature (61)..(61): /note="Nucleotide may be methylated to form 5-methylcytosine"
gtgcgacctagtatttgcctgaatggagcaggcaagagtggtggggtgaggagattccatcgtggctgctcatgcattagtcattgcttcaccttagggagagacccagaaccctaatgttt

SEQ ID NO: 3318 - DNA, 122 bp, Homo sapiens
  misc_feature (61)..(62): /note="This region represents a CpG dinucleotide"
  misc_feature (61)..(61): /note="Nucleotide may be methylated to form 5-methylcytosine"
caggctggacaagtgaggctggcactgcgatgtgatcaaagacacaggagtaatgctcggcggcttcggtccaaggacctgtgatgagcaccttgaccccaccctgcagacagaagtcagag

SEQ ID NO: 3319 - DNA, 122 bp, Homo sapiens
  misc_feature (61)..(62): /note="This region represents a CpG dinucleotide"
  misc_feature (61)..(61): /note="Nucleotide may be methylated to form 5-methylcytosine"
tccccacctcacgccggcggggccaccctttcactccgcctccatctgctctgtggtccgcgctcgctcctgaagttaggcgtatacaccaccttccaactgggacagaagatatcagtctc

SEQ ID NO: 3320 - DNA, 122 bp, Homo sapiens
  misc_feature (61)..(62): /note="This region represents a CpG dinucleotide"
  misc_feature (61)..(61): /note="Nucleotide may be methylated to form 5-methylcytosine"
ggtaactagattgtggcaactggctctggtatcctgaacttgaactgcctgatagatgaacgggcacacctggttactcaaggcagtgtctcttggggattgctgtggttacagagcagttt

SEQ ID NO: 3321 - DNA, 122 bp, Homo sapiens
  misc_feature (61)..(62): /note="This region represents a CpG dinucleotide"
  misc_feature (61)..(61): /note="Nucleotide may be methylated to form 5-methylcytosine"
ccgatgacagaactaaggctcagaaatgtgaaataatgtgcccaagattacccagctgtacgcagtggaggtgagattggcatccaaaaccttccctctcaagctctatgccactccctttg

SEQ ID NO: 3322 - DNA, 122 bp, Homo sapiens
  misc_feature (61)..(62): /note="This region represents a CpG dinucleotide"
  misc_feature (61)..(61): /note="Nucleotide may be methylated to form 5-methylcytosine"
gttaactgtataatgaaatgcaaacacatggatttttcctatttcctaaatgtacaacttcgttaatatttcataatcaggaggattaactatgggagagagatgtgtaattttaaacatca

SEQ ID NO: 3323 - DNA, 122 bp, Homo sapiens
  misc_feature (61)..(62): /note="This region represents a CpG dinucleotide"
  misc_feature (61)..(61): /note="Nucleotide may be methylated to form 5-methylcytosine"
gctggtgagacaaatatgagactctgcttccctctggtgtcattctgtgggaaatacactcgttccaaagcatgactgcgggcagccaacatttatgggccgcatgggatgtgcagtgctct

SEQ ID NO: 3324 - DNA, 122 bp, Homo sapiens
  misc_feature (61)..(62): /note="This region represents a CpG dinucleotide"
  misc_feature (61)..(61): /note="Nucleotide may be methylated to form 5-methylcytosine"
aatggggaggatctccgtagcaccaacccacaggggtgttgcaggggtatgcagacgggccggagtgggaggggccctggaagctgtgagcaagggcaaggactaggggctgctgccaccta

SEQ ID NO: 3325 - DNA, 122 bp, Homo sapiens
  misc_feature (61)..(62): /note="This region represents a CpG dinucleotide"
  misc_feature (61)..(61): /note="Nucleotide may be methylated to form 5-methylcytosine"
aaaggtcaaatagctagtaagtaatagaggtagaggactgtaaactaggaattttgattccgctatattttaggaatatagtatcgctcaacagcaagtaatttttaagacatagaaaggaa

SEQ ID NO: 3326 - DNA, 122 bp, Homo sapiens
  misc_feature (61)..(62): /note="This region represents a CpG dinucleotide"
  misc_feature (61)..(61): /note="Nucleotide may be methylated to form 5-methylcytosine"
acctgggccaggctgggacgaggccgcgcgggagggcgcgctgggcggacgctggggccgcggagcccaaccgcccttgtcctggacgccccttggcggtccgcactggcgggtgccctctc

SEQ ID NO: 3327 - DNA, 122 bp, Homo sapiens
  misc_feature (61)..(62): /note="This region represents a CpG dinucleotide"
  misc_feature (61)..(61): /note="Nucleotide may be methylated to form 5-methylcytosine"
ttacaaattactaaatcaggaaacttgtaccagaagagaaatgcacaggtaatcttaacacgaaaaaaattggtgaaggaacataaaatggaaaatggcacagaaatagtaacaagctcagc

SEQ ID NO: 3328 - DNA, 122 bp, Homo sapiens
  misc_feature (61)..(62): /note="This region represents a CpG dinucleotide"
  misc_feature (61)..(61): /note="Nucleotide may be methylated to form 5-methylcytosine"
ttttaagtggtttacgacacacaggaaagaagtcatacttataatttcaaaatcaggcaacgctgcaattcaaattgtatgggaaaaggttttatctaaaagcagagctcacagggctaaga

SEQ ID NO: 3329 - DNA, 122 bp, Homo sapiens
  misc_feature (61)..(62): /note="This region represents a CpG dinucleotide"
  misc_feature (61)..(61): /note="Nucleotide may be methylated to form 5-methylcytosine"
cctctttgaacttgtgccaggccctgggctgggctctgggcctggggcagcgaatgaatgcgaccaggctccggcccctggaccttgaaggagactcagcctgggtgaggtggatgatgact

SEQ ID NO: 3330 - DNA, 122 bp, Homo sapiens
  misc_feature (61)..(62): /note="This region represents a CpG dinucleotide"
  misc_feature (61)..(61): /note="Nucleotide may be methylated to form 5-methylcytosine"
accctagaaaaacagtattgtaagtaatcacttaaatcacttcctgttctctcctccatgcgcaccaccctcattcccctagcaagcactgtattagtccattctcacactgctatgaactg

SEQ ID NO: 3331 - DNA, 122 bp, Homo sapiens
  misc_feature (61)..(62): /note="This region represents a CpG dinucleotide"
  misc_feature (61)..(61): /note="Nucleotide may be methylated to form 5-methylcytosine"
ctgtgcaacctggaggtctgagggcagctgcagctttcatcagctccagcatcccattgacgtctgtgttgggtgactcagtattgagcagatcctgactgatataacatcattcttctaaa

SEQ ID NO: 3332 - DNA, 122 bp, Homo sapiens
  misc_feature (61)..(62): /note="This region represents a CpG dinucleotide"
  misc_feature (61)..(61): /note="Nucleotide may be methylated to form 5-methylcytosine"
tgcacaacaatggccacacatcgagattgaaatgaagggataaaaacattcctataaattcgaaggcaagttttgctgactagaaaaacaagccaataatttgaaatggtgtgcccgaatgg

SEQ ID NO: 3333 - DNA, 122 bp, Homo sapiens
  misc_feature (61)..(62): /note="This region represents a CpG dinucleotide"
  misc_feature (61)..(61): /note="Nucleotide may be methylated to form 5-methylcytosine"
tcctctttcttcatctctttcagacacttataaatgtgcttcctctccctatgtaaatttcgtccaaatggcacaacgcaggcttgtcatgaggccattaataactcaccttttcacaggct

SEQ ID NO: 3334 - DNA, 122 bp, Homo sapiens
  misc_feature (61)..(62): /note="This region represents a CpG dinucleotide"
  misc_feature (61)..(61): /note="Nucleotide may be methylated to form 5-methylcytosine"
acagcagtgcgcagacttaggttctcctgcttgagtttctggttgctgtgttgcagaaagcgaatgtagtcgatggccttgcgcaagacagcagatttattcagctgcacggtgtgggaggg

SEQ ID NO: 3335 - DNA, 122 bp, Homo sapiens
  misc_feature (61)..(62): /note="This region represents a CpG dinucleotide"
  misc_feature (61)..(61): /note="Nucleotide may be methylated to form 5-methylcytosine"
gggaggtcattgtaattgtcaggaaattcatatcagattaaggccagttttgcctccccacgtctgtcagctgacatgtcttctgccctgtgaggaatgcagaatgcatctgctcccccttc

SEQ ID NO: 3336 - DNA, 122 bp, Homo sapiens
  misc_feature (61)..(62): /note="This region represents a CpG dinucleotide"
  misc_feature (61)..(61): /note="Nucleotide may be methylated to form 5-methylcytosine"
ccacctgcacccagcccctgaccttcccagcggggagcttcaatgaccactcgcttcccacggaaccagggggcactgggccgcatgccacagaacaatccccttggggctgctcgtcatat

SEQ ID NO: 3337 - DNA, 122 bp, Homo sapiens
  misc_feature (61)..(62): /note="This region represents a CpG dinucleotide"
  misc_feature (61)..(61): /note="Nucleotide may be methylated to form 5-methylcytosine"
aaccagggcacatgtgctcagcattgccttccaaagttctttctcaaccttgtaagttctcgttctgagggcatataaagtatgtttatgcaatcccttgtgaaaatagatgaggcaatatg

SEQ ID NO: 3338 - DNA, 122 bp, Homo sapiens
  misc_feature (61)..(62): /note="This region represents a CpG dinucleotide"
  misc_feature (61)..(61): /note="Nucleotide may be methylated to form 5-methylcytosine"
cctcggggaaccactatttcttgatttactagctcttgatggtatctactgccttccctccgcgaatatgagagtttcgctcttataattctccagaacttcccctcccctcctctcccctc

SEQ ID NO: 3339 - DNA, 122 bp, Homo sapiens
  misc_feature (61)..(62): /note="This region represents a CpG dinucleotide"
  misc_feature (61)..(61): /note="Nucleotide may be methylated to form 5-methylcytosine"
acttagtaagctgccatctgatcatgcagtcaagataaggcttactcatctgctcctagacgacttttggatttctgtgaatgaagagtatcctgctagtcacaggaaagcaataaacattc

SEQ ID NO: 3340 - DNA, 122 bp, Homo sapiens
  misc_feature (61)..(62): /note="This region represents a CpG dinucleotide"
  misc_feature (61)..(61): /note="Nucleotide may be methylated to form 5-methylcytosine"
ttttaattctgttctctagcacttgttacagtgattcatatcctggatacgcatgtgaatcgcctgtggactgtttaaaaatgtagactctgactagacagacctaatcagaatctctgtgt

SEQ ID NO: 3341 - DNA, 122 bp, Homo sapiens
  misc_feature (61)..(62): /note="This region represents a CpG dinucleotide"
  misc_feature (61)..(61): /note="Nucleotide may be methylated to form 5-methylcytosine"
agagagctgctggccctgagacaggcttgcctgcctccacctagtccccaccaagtatggcgctggccttgggacacccaggcaaaggaacatgaacttggccttcatcatgcaccctccca

SEQ ID NO: 3342 - DNA, 122 bp, Homo sapiens
  misc_feature (61)..(62): /note="This region represents a CpG dinucleotide"
  misc_feature (61)..(61): /note="Nucleotide may be methylated to form 5-methylcytosine"
gatgcagtccaaagattgggatatcccactcgcttttcctggagccggatgcagtcttcccgacttccggtggagatccgggggtggggggggggcgggaggggggcccccgcggttttatg

SEQ ID NO: 3343 - DNA, 122 bp, Homo sapiens
  misc_feature (61)..(62): /note="This region represents a CpG dinucleotide"
  misc_feature (61)..(61): /note="Nucleotide may be methylated to form 5-methylcytosine"
atgtattttatctggtgactcgacatttgagggatctcgaaatcctctttttgaaatattcgtttatagaataactgggtgaacactatcaaagctatgttaggtctctcaagccaaacttt

SEQ ID NO: 3344 - DNA, 122 bp, Homo sapiens
  misc_feature (61)..(62): /note="This region represents a CpG dinucleotide"
  misc_feature (61)..(61): /note="Nucleotide may be methylated to form 5-methylcytosine"
acacaccagttaatgacatcaagggggaagttaggaaagatgaaaaattggagaccaagacggtcataacatggttctaatttgtggttaagaaattcatgaaggaataggtcaatgtgtac

SEQ ID NO: 3345 - DNA, 122 bp, Homo sapiens
  misc_feature (61)..(62): /note="This region represents a CpG dinucleotide"
  misc_feature (61)..(61): /note="Nucleotide may be methylated to form 5-methylcytosine"
ttctcagatattttgcacttcctcttcaaactctgaagtacacaggcagtggtcatgcggcgtgatctaagttaaaaaggcgtggcacctgtttaccgggatccacccttgtggactgagag

SEQ ID NO: 3346 - DNA, 122 bp, Homo sapiens
  misc_feature (61)..(62): /note="This region represents a CpG dinucleotide"
  misc_feature (61)..(61): /note="Nucleotide may be methylated to form 5-methylcytosine"
aaaaacaggggaggaaagtttctgaccagctgatgtgaaagcaaagttggccagaggtcacgtgagggaagtctgctaggatgcctgtctcagtctgtgtagttttgctatgaagaaatatc

SEQ ID NO: 3347 - DNA, 122 bp, Homo sapiens
  misc_feature (61)..(62): /note="This region represents a CpG dinucleotide"
  misc_feature (61)..(61): /note="Nucleotide may be methylated to form 5-methylcytosine"
tgccttgatagaaattatcagaactcaattcattaggcaattgttaatttcattcaaatccgaaggtcagtggcacaatagggcttggcataggttcctatgcttctttcacgtggctcaga

SEQ ID NO: 3348 - DNA, 122 bp, Homo sapiens
  misc_feature (61)..(62): /note="This region represents a CpG dinucleotide"
  misc_feature (61)..(61): /note="Nucleotide may be methylated to form 5-methylcytosine"
tgcaaccaaatgtatcagtgataactgtggtttcagctacattgaagagtagccaaaaatcgaactgaccaaacttcagatctctcttggccttacttgaactcattcaatatatctgtgac

SEQ ID NO: 3349 - DNA, 122 bp, Homo sapiens
  misc_feature (61)..(62): /note="This region represents a CpG dinucleotide"
  misc_feature (61)..(61): /note="Nucleotide may be methylated to form 5-methylcytosine"
cacccagaaccccttctcaggtccagttgctgctccctattaggggtaaatgtgtttatgcgcatcatttccatcatttctttgggggaaaattggattctttcctcctcctcgctactcgc

SEQ ID NO: 3350 - DNA, 122 bp, Homo sapiens
  misc_feature (61)..(62): /note="This region represents a CpG dinucleotide"
  misc_feature (61)..(61): /note="Nucleotide may be methylated to form 5-methylcytosine"
gagtctgaggggacaaggtcagaggggtgatgggggcacgttatgtggggcccactgagacgggctgaggatgaggactttggtcttattactaagtgagaaaagaaccatgagagggttaa

SEQ ID NO: 3351 - DNA, 122 bp, Homo sapiens
  misc_feature (61)..(62): /note="This region represents a CpG dinucleotide"
  misc_feature (61)..(61): /note="Nucleotide may be methylated to form 5-methylcytosine"
atattgcaatggttgcataaccctgagccacactggctgcctgtactagctgtctgcctacgtcggccttaaaattctttctactctttttaaatcaaataaatgttagaatgggtttcctt

SEQ ID NO: 3352 - DNA, 122 bp, Homo sapiens
  misc_feature (61)..(62): /note="This region represents a CpG dinucleotide"
  misc_feature (61)..(61): /note="Nucleotide may be methylated to form 5-methylcytosine"
tgtttgtgttggttgcctcttgcatctaatgagggcttctctgatgacataaaacaagatcgtcttgtgtttctgaaagtgtgtctggaggaacagtagttgtgtagggtatgagaagctgc

SEQ ID NO: 3353 - DNA, 122 bp, Homo sapiens
  misc_feature (61)..(62): /note="This region represents a CpG dinucleotide"
  misc_feature (61)..(61): /note="Nucleotide may be methylated to form 5-methylcytosine"
aggggatggcggaggctggctcctgacccaggctgctggcagggagtgtcctggaggctgcgcgctcagccggcacgtccccctcattccgccagccctgcccaccttcctcgcctgcagct

SEQ ID NO: 3354 - DNA, 122 bp, Homo sapiens
  misc_feature (61)..(62): /note="This region represents a CpG dinucleotide"
  misc_feature (61)..(61): /note="Nucleotide may be methylated to form 5-methylcytosine"
aaatgatctggtgccacttccgctgctccattagtagctcccaagttgcttcttcatcatcgtgtcttctcagcaggccagaggatgacaggaatgacaagcctagaattcacatgtcaaca

SEQ ID NO: 3355 - DNA, 122 bp, Homo sapiens
  misc_feature (61)..(62): /note="This region represents a CpG dinucleotide"
  misc_feature (61)..(61): /note="Nucleotide may be methylated to form 5-methylcytosine"
agggttagggtgggggaacctcagccaggtgaccaaggtcaacatgggcagtgaaggtcgcgctgatggtgtcccccatgtgatgtggtgggaggaagccccgcccccattctcttcctccc

SEQ ID NO: 3356 - DNA, 122 bp, Homo sapiens
  misc_feature (61)..(62): /note="This region represents a CpG dinucleotide"
  misc_feature (61)..(61): /note="Nucleotide may be methylated to form 5-methylcytosine"
ctttttggtttttaaatacctgaatgactccctcatcgtttgtggggcaatggccatggtcgtggttctgggaacatgcttggcctcctagtggctgaagctgtcttttgttctgtgtgaaa

SEQ ID NO: 3357 - DNA, 122 bp, Homo sapiens
  misc_feature (61)..(62): /note="This region represents a CpG dinucleotide"
  misc_feature (61)..(61): /note="Nucleotide may be methylated to form 5-methylcytosine"
tcctgaccgactggttccttggcgagagcaacagcagtgagtcaggagcaggagcagaagcgggcagaccacagctcggcaccactttcgacggtgtcttcctcaaagagctctaacttttt

SEQ ID NO: 3358 - DNA, 122 bp, Homo sapiens
  misc_feature (61)..(62): /note="This region represents a CpG dinucleotide"
  misc_feature (61)..(61): /note="Nucleotide may be methylated to form 5-methylcytosine"
aaagaaactgaaggatagatacctaatagtcagccaggaccaccctaaaaggtattcttccgacataattacacttaatgtagtgactgtcaatattttccatataacctttgaaatttctt

SEQ ID NO: 3359 - DNA, 122 bp, Homo sapiens
  misc_feature (61)..(62): /note="This region represents a CpG dinucleotide"
  misc_feature (61)..(61): /note="Nucleotide may be methylated to form 5-methylcytosine"
tggtacagtggccatactatcatttgctctttcttactagtcatccttgtcttagcatcccgagtttgtgtcatgatccagggtagttgcttgagtcccaactatcacgtctgacttcccag

SEQ ID NO: 3360 - DNA, 122 bp, Homo sapiens
  misc_feature (61)..(62): /note="This region represents a CpG dinucleotide"
  misc_feature (61)..(61): /note="Nucleotide may be methylated to form 5-methylcytosine"
ctcttttatctcagaccacaaaattggaagttctacgtgaccagatttacatccatataacgtctctgggcataaactgtgaactgtgacagatctgggtttcaatctagcttccaccacct

SEQ ID NO: 3361 - DNA, 122 bp, Homo sapiens
  misc_feature (61)..(62): /note="This region represents a CpG dinucleotide"
  misc_feature (61)..(61): /note="Nucleotide may be methylated to form 5-methylcytosine"
tttaaccatggacttttctggacttttgtctcctcatctgtaaaacaagtgattcaagaccgtgaactggaagatgtgattgggtgccgggtgtctgttcttaagagactctagaatttctg

SEQ ID NO: 3362 - DNA, 122 bp, Homo sapiens
  misc_feature (61)..(62): /note="This region represents a CpG dinucleotide"
  misc_feature (61)..(61): /note="Nucleotide may be methylated to form 5-methylcytosine"
gatgtttctcgggttctctctcttcctctcttgcctttcctcctttctttgagcttgtttcgctctgagagtacaggcttggcacccacttacccaagaactgattagttcctaaaagaagc

SEQ ID NO: 3363 - DNA, 122 bp, Homo sapiens
  misc_feature (61)..(62): /note="This region represents a CpG dinucleotide"
  misc_feature (61)..(61): /note="Nucleotide may be methylated to form 5-methylcytosine"
gtgacaaaccccactcctggctctgattgtgtaaactgatacaatacccagagtgcgactcgtttcaagctttgcgtttgccatggatttggaaattacccaaatctattgctgaaattagt

SEQ ID NO: 3364 - DNA, 122 bp, Homo sapiens
  misc_feature (61)..(62): /note="This region represents a CpG dinucleotide"
  misc_feature (61)..(61): /note="Nucleotide may be methylated to form 5-methylcytosine"
gaactggcttccctggcaaccagccccacatcctgtggtttctaggggtttttcaaaaatcgccttattaacataagctcagatgtgttgaaagggcttgctgtaaatcacagaagactctt

SEQ ID NO: 3365 - DNA, 122 bp, Homo sapiens
  misc_feature (61)..(62): /note="This region represents a CpG dinucleotide"
  misc_feature (61)..(61): /note="Nucleotide may be methylated to form 5-methylcytosine"
cacaagcagcagtctgtgaaccgggaattctcccacagtcctcctaactcatctgccagccggcactcaggaacctttaccatgttcatggtattctggccagaaatgttgacagaatcttg

SEQ ID NO: 3366 - DNA, 122 bp, Homo sapiens
  misc_feature (61)..(62): /note="This region represents a CpG dinucleotide"
  misc_feature (61)..(61): /note="Nucleotide may be methylated to form 5-methylcytosine"
cgctttatttttctttcaaatctttttctcctaatcttttaaaataaggaaaggtgcctccgtgttgggtattataattgtattcaagtttttgcaactccattcaaaaaagtacgtatttt

SEQ ID NO: 3367 - DNA, 122 bp, Homo sapiens
  misc_feature (61)..(62): /note="This region represents a CpG dinucleotide"
  misc_feature (61)..(61): /note="Nucleotide may be methylated to form 5-methylcytosine"
ggggggagaaagaaatgcctcagtataaaacagtattaaactgaaacatctgaccacatccggttttctctcctcttcctcaccctcacattattttgacaacaggcagaatttctcagatt

SEQ ID NO: 3368 - DNA, 122 bp, Homo sapiens
  misc_feature (61)..(62): /note="This region represents a CpG dinucleotide"
  misc_feature (61)..(61): /note="Nucleotide may be methylated to form 5-methylcytosine"
gggcgggacctgggcgacggaagtgcgtagccgcgcggcattctggggccggaagtggggcgccagctgcgggctggtgtcatggcaggtgggcggcgccgcaggaggcgcctggcggagct

SEQ ID NO: 3369 - DNA, 122 bp, Homo sapiens
  misc_feature (61)..(62): /note="This region represents a CpG dinucleotide"
  misc_feature (61)..(61): /note="Nucleotide may be methylated to form 5-methylcytosine"
ttggtcttcttattctactctctttggttgatctctgtcacattcctttagttcaagcaccgtctctacattgatgactcccttaggtatttcctcttgcccaagcaccaaaccagtcctac

SEQ ID NO: 3370 - DNA, 122 bp, Homo sapiens
  misc_feature (61)..(62): /note="This region represents a CpG dinucleotide"
  misc_feature (61)..(61): /note="Nucleotide may be methylated to form 5-methylcytosine"
agagggtagcctcggatccatcaataatttagttttactctatcaacatcagtggagagacgagtacctctaaggatcctgtcaggacagtcctgcattttgctcaaatgctgtctagagat

SEQ ID NO: 3371 - DNA, 122 bp, Homo sapiens
  misc_feature (61)..(62): /note="This region represents a CpG dinucleotide"
  misc_feature (61)..(61): /note="Nucleotide may be methylated to form 5-methylcytosine"
cccaggagaaaccacacatcctggggctcaaaccactgggccgtgtgactcgtgcgcttgcgcggcagggagcagcgggactaggaaatctcctctgagaggacagtcaatcagaaggcgct

SEQ ID NO: 3372 - DNA, 122 bp, Homo sapiens
  misc_feature (61)..(62): /note="This region represents a CpG dinucleotide"
  misc_feature (61)..(61): /note="Nucleotide may be methylated to form 5-methylcytosine"
tggaagcacttttctctcagtacccacagcaaacattactaattaatcatgaggttggcacgtgaattgagatttatttaccatcctcgtaacaagattcatacagcctgggagtgacatct

SEQ ID NO: 3373 - DNA, 122 bp, Homo sapiens
  misc_feature (61)..(62): /note="This region represents a CpG dinucleotide"
  misc_feature (61)..(61): /note="Nucleotide may be methylated to form 5-methylcytosine"
gaggcatgatggagaacagccagtccttgggcttcgtgataagaaaggtctttttaatgacggaaagcaaaataccacagcaattacccggggtcaggtatggaaagtactcatgagactcc

SEQ ID NO: 3374 - DNA, 122 bp, Homo sapiens
  misc_feature (61)..(62): /note="This region represents a CpG dinucleotide"
  misc_feature (61)..(61): /note="Nucleotide may be methylated to form 5-methylcytosine"
aataaatcggggaacttgcttttctccccaagaccccagatggggcctacccatcgttctcgtgtaacaaaacgtgtaaaaaaaaaaaaagaaaaagaaaaaacaaaacaaaaaaactaagt

SEQ ID NO: 3375 - DNA, 122 bp, Homo sapiens
  misc_feature (61)..(62): /note="This region represents a CpG dinucleotide"
  misc_feature (61)..(61): /note="Nucleotide may be methylated to form 5-methylcytosine"
agatggtttcagtcactatgtaaatgagccacatggtttttacatttggaaagttcccttcgggttgatacaaaaaagcagggcctgaatgacagtcattcctcttaggaatggagtccaag

SEQ ID NO: 3376 - DNA, 122 bp, Homo sapiens
  misc_feature (61)..(62): /note="This region represents a CpG dinucleotide"
  misc_feature (61)..(61): /note="Nucleotide may be methylated to form 5-methylcytosine"
ctcaagtgatccacccgccttggcctcccaaattgctgggattacaggcgtgaaccacagcgcccggcctaagccctagctgttcattgccacaatgagaggaagtacaggaaggtgttgag

SEQ ID NO: 3377 - DNA, 122 bp, Homo sapiens
  misc_feature (61)..(62): /note="This region represents a CpG dinucleotide"
  misc_feature (61)..(61): /note="Nucleotide may be methylated to form 5-methylcytosine"
tgcgagaacagtcgggagggaccagaagggacgatctcccctgtctctctttcacaaccccggcagcaaacatctctaagagtctgattaggtcacccggagcatgtggtatcttgggcatt

SEQ ID NO: 3378 - DNA, 122 bp, Homo sapiens
  misc_feature (61)..(62): /note="This region represents a CpG dinucleotide"
  misc_feature (61)..(61): /note="Nucleotide may be methylated to form 5-methylcytosine"
tgaggaaacagtcttgcctcatgttggaggatgtgaaacaacagtctgattactaggagtcgttatgaataggtgaattatgtgctaaataatcatcagagtaattcagcatttattaattc

SEQ ID NO: 3379 - DNA, 122 bp, Homo sapiens
  misc_feature (61)..(62): /note="This region represents a CpG dinucleotide"
  misc_feature (61)..(61): /note="Nucleotide may be methylated to form 5-methylcytosine"
gctctgtgtcgggacggaaacaatggggtcatttggtggactcagaaaaggaactctaaacggagggaggaaagtagcagagcctcagtgagagcagctgcccctccatcccgtcagcacct

SEQ ID NO: 3380 - DNA, 122 bp, Homo sapiens
  misc_feature (61)..(62): /note="This region represents a CpG dinucleotide"
  misc_feature (61)..(61): /note="Nucleotide may be methylated to form 5-methylcytosine"
ttagttcctcagcaattttatgtgctatgacaactgttatcacccttgacatgctaatcacgtgatgcaactgtgtttagtgatcagtccacgtttctgaatgttaaatagattgacaagac

SEQ ID NO: 3381 - DNA, 122 bp, Homo sapiens
  misc_feature (61)..(62): /note="This region represents a CpG dinucleotide"
  misc_feature (61)..(61): /note="Nucleotide may be methylated to form 5-methylcytosine"
taagcatggaggtgccgtaaagcgaggtacgcctgcacatgagtgccgtaaagcaaggtacgcccgcatcacaggagtgccgtaaagcgaggtatgcctgcaccgcaggaggctatttactt

SEQ ID NO: 3382 - DNA, 122 bp, Homo sapiens
  misc_feature (61)..(62): /note="This region represents a CpG dinucleotide"
  misc_feature (61)..(61): /note="Nucleotide may be methylated to form 5-methylcytosine"
gaattaatctgcggctcaccccaagtcccaagccttctaaagagaaattgaaaccttaaccgaccagcagctctactgtacttgcaaacggtcttggtatttccttcagggcagagcagtaa

SEQ ID NO: 3383 - DNA, 122 bp, Homo sapiens
  misc_feature (61)..(62): /note="This region represents a CpG dinucleotide"
  misc_feature (61)..(61): /note="Nucleotide may be methylated to form 5-methylcytosine"
cattgtagattttacactgctgattcatagagcttactcagctgattttcaccctgtcatcgttaagtggactatctggactttcatgcaagatgctgtgattttgaaaccaggtgggggga

SEQ ID NO: 3384 - DNA, 122 bp, Homo sapiens
  misc_feature (61)..(62): /note="This region represents a CpG dinucleotide"
  misc_feature (61)..(61): /note="Nucleotide may be methylated to form 5-methylcytosine"
cccagctgcttggaaccaggtcatctggggagtgtgtgggaatcccgctggcctggcccacgtgttcctgccaggggattccattatggtattgataacagtattattagccaatggtgacc

SEQ ID NO: 3385 - DNA, 122 bp, Homo sapiens
  misc_feature (61)..(62): /note="This region represents a CpG dinucleotide"
  misc_feature (61)..(61): /note="Nucleotide may be methylated to form 5-methylcytosine"
aaaactcttaactgcagtaagaactcagtcaacacttaggtcttgcatctctccagagggcgtactgtgtgttggggagtggtaaagaggatggatgctctgtggctgtgggaactctgcag

SEQ ID NO: 3386 - DNA, 122 bp, Homo sapiens
  misc_feature (61)..(62): /note="This region represents a CpG dinucleotide"
  misc_feature (61)..(61): /note="Nucleotide may be methylated to form 5-methylcytosine"
tgtgaagccttaaaattatgactgtggggtggtgttgatatccaacatacaggacacccccgggccccaatgccgtgtgcacgcaaatattaatacaaatattaattttacttcttggatac

SEQ ID NO: 3387 - DNA, 122 bp, Homo sapiens
  misc_feature (61)..(62): /note="This region represents a CpG dinucleotide"
  misc_feature (61)..(61): /note="Nucleotide may be methylated to form 5-methylcytosine"
catgtatttttttaattgaagtattgctttgttcaagacctatgtttaccactcccatggcgatcctgtacacaaagacaagtcaggaagacatgaaacgaacggagatacttatgttgctt

SEQ ID NO: 3388 - DNA, 122 bp, Homo sapiens
  misc_feature (61)..(62): /note="This region represents a CpG dinucleotide"
  misc_feature (61)..(61): /note="Nucleotide may be methylated to form 5-methylcytosine"
aacctctgttttacataaggataaggcaggtttaggaccagattaacctaaccaaggaagcgtaggagtccttagatccataatttggttggtttaacattgggtcagtacctgctggcttc

SEQ ID NO: 3389 - DNA, 122 bp, Homo sapiens
  misc_feature (61)..(62): /note="This region represents a CpG dinucleotide"
  misc_feature (61)..(61): /note="Nucleotide may be methylated to form 5-methylcytosine"
gggggaggggggcattccaggcgggcacagaagtgggctggtcaaaggcaggtttcaggacggcgactggccaggccggctggaaaggagggtaatatgaccagcttgtctcctgcctgtgg

SEQ ID NO: 3390 - DNA, 122 bp, Homo sapiens
  misc_feature (61)..(62): /note="This region represents a CpG dinucleotide"
  misc_feature (61)..(61): /note="Nucleotide may be methylated to form 5-methylcytosine"
taacactctcccagaagatggcgatatggatgctgacacaccactcagtaattggcaatgcgggtgggctttggtctccatacaagatagacacaaagctcctcaaatgcaggggttctttc

SEQ ID NO: 3391 - DNA, 122 bp, Homo sapiens
  misc_feature (61)..(62): /note="This region represents a CpG dinucleotide"
  misc_feature (61)..(61): /note="Nucleotide may be methylated to form 5-methylcytosine"
cagagacaaactttatgtgtttaaaaagctcaataaaggcaaagtggctgggtcattgggcgtaagaggaagagtggcagatgactggagcaagacagatgggtttgattacattggatctc

SEQ ID NO: 3392 - DNA, 122 bp, Homo sapiens
  misc_feature (61)..(62): /note="This region represents a CpG dinucleotide"
  misc_feature (61)..(61): /note="Nucleotide may be methylated to form 5-methylcytosine"
ttccggacgcagatgagggacgggcggatgattccttccggacacacctctcaatgtgcacgtgctgctcctgccaggcggatgacatcaggaatgctcatcaacttgagggcgaagaaatg

SEQ ID NO: 3393 - DNA, 122 bp, Homo sapiens
  misc_feature (61)..(62): /note="This region represents a CpG dinucleotide"
  misc_feature (61)..(61): /note="Nucleotide may be methylated to form 5-methylcytosine"
cacatttatttgacatgttgtatgtgtaaccactgggaagtatacagttgtaaagaaaatcggatatagacttgtcctcaaggaacttttagtctagcatcattgatgatcacaaaaacaaa

SEQ ID NO: 3394 - DNA, 122 bp, Homo sapiens
  misc_feature (61)..(62): /note="This region represents a CpG dinucleotide"
  misc_feature (61)..(61): /note="Nucleotide may be methylated to form 5-methylcytosine"
ggaaagagaaaccatctgtgaagcagccagacactgtggggatgaattacacctggcaaacgtcaactactctcgaggggctacagctgttccccaacaagaccccaattgggactacaata

SEQ ID NO: 3395 - DNA, 122 bp, Homo sapiens
  misc_feature (61)..(62): /note="This region represents a CpG dinucleotide"
  misc_feature (61)..(61): /note="Nucleotide may be methylated to form 5-methylcytosine"
tatcaaaaaatattggggtttagtcatagagggcattttttgaggcatagtggttaagaacgcagactttagagtcaactgcttagtcacctcctggatctatcacatactgtgcagccttg

SEQ ID NO: 3396 - DNA, 122 bp, Homo sapiens
  misc_feature (61)..(62): /note="This region represents a CpG dinucleotide"
  misc_feature (61)..(61): /note="Nucleotide may be methylated to form 5-methylcytosine"
aggtcatcctaggagtagagtttaaggaatccatataccttgaaggggaagaaaaacaaacgttgaacaaagtattgaggatactcactgaggttatgaaaattactgctcacctaaacctc

SEQ ID NO: 3397 - DNA, 122 bp, Homo sapiens
  misc_feature (61)..(62): /note="This region represents a CpG dinucleotide"
  misc_feature (61)..(61): /note="Nucleotide may be methylated to form 5-methylcytosine"
ctaggtcctgactgccaattagctgtacagacactggtgactcacaagtggctaggagctcgtgaaatcccctgcagtgaattgaactaatatttattaggcatcagctctacatggaggaa

SEQ ID NO: 3398 - DNA, 122 bp, Homo sapiens
  misc_feature (61)..(62): /note="This region represents a CpG dinucleotide"
  misc_feature (61)..(61): /note="Nucleotide may be methylated to form 5-methylcytosine"
cctgccatgtcatcctgttcctcttctgacacaggcaagagcagtaatgttccagttgggcgttgacttcttccaggactgggtcaacattcaggaattatgaaactagttgcctcatttcc

SEQ ID NO: 3399 - DNA, 122 bp, Homo sapiens
  misc_feature (61)..(62): /note="This region represents a CpG dinucleotide"
  misc_feature (61)..(61): /note="Nucleotide may be methylated to form 5-methylcytosine"
gtctggtgaggactcacttcctggttcataggtagccatctcctctgtgtcctcaaaagacgggaggagtaaatgagctttctgggatccattttacaagggccctacttcttcatgaccta

SEQ ID NO: 3400 - DNA, 122 bp, Homo sapiens
  misc_feature (61)..(62): /note="This region represents a CpG dinucleotide"
  misc_feature (61)..(61): /note="Nucleotide may be methylated to form 5-methylcytosine"
caagaaagtcaagaaacagagagtaatagactcatggaactgatgatctaatggatacctcggataagagaggcctctaggttgctgaccttggcaattgagtgaatgacagtgacctcaga

SEQ ID NO: 3401 - DNA, 122 bp, Homo sapiens
  misc_feature (61)..(62): /note="This region represents a CpG dinucleotide"
  misc_feature (61)..(61): /note="Nucleotide may be methylated to form 5-methylcytosine"
cccaaaggtgaccacagtagaggcaaccaggatgcagtccaaagattgggatatcccactcgcttttcctggagccggatgcagtcttcccgacttccggtggagatccgggggtggggggg

SEQ ID NO: 3402 - DNA, 122 bp, Homo sapiens
  misc_feature (61)..(62): /note="This region represents a CpG dinucleotide"
  misc_feature (61)..(61): /note="Nucleotide may be methylated to form 5-methylcytosine"
tatctgtgaggctgttgtgaagactgaaatgagttaatctttgtgaggcacatacaacagcgcctgacatagagaagttgctcaaaagcattaagaattacaatgatggcatctggctcgag

SEQ ID NO: 3403 - DNA, 122 bp, Homo sapiens
  misc_feature (61)..(62): /note="This region represents a CpG dinucleotide"
  misc_feature (61)..(61): /note="Nucleotide may be methylated to form 5-methylcytosine"
caagattatgtcaattggttagagccagccgggaatttcgtgcgggtgctgaaggagctgcgggagccggagaagaatgaaactgcgtggagtcagcctggctgccggcttgttcttactgg

SEQ ID NO: 3404 - DNA, 122 bp, Homo sapiens
  misc_feature (61)..(62): /note="This region represents a CpG dinucleotide"
  misc_feature (61)..(61): /note="Nucleotide may be methylated to form 5-methylcytosine"
tctaacctctgttttttctacttaactgagggcagagattgtgtctgacttgttccctgccgtcctcctagtacctacctcagtgcttggagaatgcatgaatgtatgcgtgccccagtcct

SEQ ID NO: 3405 - DNA, 122 bp, Homo sapiens
  misc_feature (61)..(62): /note="This region represents a CpG dinucleotide"
  misc_feature (61)..(61): /note="Nucleotide may be methylated to form 5-methylcytosine"
ggtgagatgagagtaagatacagaactcaaggacaaaatccctgccctgcctagtcttaccgagaagtctagaggaatccacatctaaactaagcaagagcactatttaattaagcatttct

SEQ ID NO: 3406 - DNA, 122 bp, Homo sapiens
  misc_feature (61)..(62): /note="This region represents a CpG dinucleotide"
  misc_feature (61)..(61): /note="Nucleotide may be methylated to form 5-methylcytosine"
ttgtggacacggcattcatacatgccccagcttatttcaataaggcagatattaagaaaacgtggcctgtaaaggcaatgtatctgtcacttatttgaagctcctttggagaaacttgaaaa

SEQ ID NO: 3407 - DNA, 122 bp, Homo sapiens
  misc_feature (61)..(62): /note="This region represents a CpG dinucleotide"
  misc_feature (61)..(61): /note="Nucleotide may be methylated to form 5-methylcytosine"
atgccagtctcctgtggctctgtcccctccaccttcctcccgtggccccatccaggaaatcggcccacaagagaggccgacgctgcttctgaccagagctaccgagcgcctctctggagaca

SEQ ID NO: 3408 - DNA, 122 bp, Homo sapiens
  misc_feature (61)..(62): /note="This region represents a CpG dinucleotide"
  misc_feature (61)..(61): /note="Nucleotide may be methylated to form 5-methylcytosine"
gaactttacagatttaacagattgttggacagaaaagaactcttgccttgaaattcctaacgcaggagtggcatataactggtatgtatgccaccataccctgccccggccacatgcccata

SEQ ID NO: 3409 - DNA, 122 bp, Homo sapiens
  misc_feature (61)..(62): /note="This region represents a CpG dinucleotide"
  misc_feature (61)..(61): /note="Nucleotide may be methylated to form 5-methylcytosine"
gacataaccttagaaaacacaaaggcagcaggaattgccacctcttgtgtagttaatcaacgattaatatgaagacatttcattattgtgaactatttgattgatgaacataaatctgaggg

SEQ ID NO: 3410 - DNA, 122 bp, Homo sapiens
  misc_feature (61)..(62): /note="This region represents a CpG dinucleotide"
  misc_feature (61)..(61): /note="Nucleotide may be methylated to form 5-methylcytosine"
tgtctaaagggtccccacagtcccttctatctctattagtttataattctaaaacacaagcgagagtctggtcctccaccattggtattagagaaccactgagaaagttcctcaaaatgttc

SEQ ID NO: 3411 - DNA, 122 bp, Homo sapiens
  misc_feature (61)..(62): /note="This region represents a CpG dinucleotide"
  misc_feature (61)..(61): /note="Nucleotide may be methylated to form 5-methylcytosine"
ctccttggagccagcttgaacctttttctcacagatgctttgtgcttcctgtcccctaaccgccttactcacccttccccatgctcaacttttggaaagtccccttggcctcacttgtttga

SEQ ID NO: 3412 - DNA, 122 bp, Homo sapiens
  misc_feature (61)..(62): /note="This region represents a CpG dinucleotide"
  misc_feature (61)..(61): /note="Nucleotide may be methylated to form 5-methylcytosine"
aacagaactattcttgcggcactggggtttggtgagactctctctgactcagagaaatgacgcaggatggccactctgtccttggggccccaagcctagaatctgagtctctgactccctgc

SEQ ID NO: 3413 - DNA, 122 bp, Homo sapiens
  misc_feature (61)..(62): /note="This region represents a CpG dinucleotide"
  misc_feature (61)..(61): /note="Nucleotide may be methylated to form 5-methylcytosine"
aggtcctcggcccgcgcgcgccgctcgggagcccgcgaggctgcggtgtgctccagcgggcgcatttcccaggccccgccacatcgtgtgtgttagtggctgggaaggacacgaggacagag

SEQ ID NO: 3414 - DNA, 122 bp, Homo sapiens
  misc_feature (61)..(62): /note="This region represents a CpG dinucleotide"
  misc_feature (61)..(61): /note="Nucleotide may be methylated to form 5-methylcytosine"
gcaggcggaccgctgctctcgctcaagttctggcgtggggctgcgctggagcaactggggcgaagttgaactgggacatccttggagatgatttttgaaaaacgagcaagccatgcctggaa

SEQ ID NO: 3415 - DNA, 122 bp, Homo sapiens
  misc_feature (61)..(62): /note="This region represents a CpG dinucleotide"
  misc_feature (61)..(61): /note="Nucleotide may be methylated to form 5-methylcytosine"
tttaccgtgatggatcgtttggctcaagggctgatagtggtaggggcgtgtgtatggaggcgggggataccggatggtatgagatccagctgctcctggatgaagcaaaatattctgtggat

SEQ ID NO: 3416 - DNA, 122 bp, Homo sapiens
  misc_feature (61)..(62): /note="This region represents a CpG dinucleotide"
  misc_feature (61)..(61): /note="Nucleotide may be methylated to form 5-methylcytosine"
ccaccatcctcatcccctgtaactcctgatcctaggagagacctctccagttcccccaagcgagaaacagattttcccaaggggagtgcctggaagactttatgtttatacttagtaacttc

SEQ ID NO: 3417 - DNA, 122 bp, Homo sapiens
  misc_feature (61)..(62): /note="This region represents a CpG dinucleotide"
  misc_feature (61)..(61): /note="Nucleotide may be methylated to form 5-methylcytosine"
tttgtgaaatcatctggcatattatacttcattgctaaaagcaactagtaaatgctaaaacgctctgaataaaccagatatgagatatgagaaggaaataggagagaacctcaaaatttaat

SEQ ID NO: 3418 - DNA, 122 bp, Homo sapiens
  misc_feature (61)..(62): /note="This region represents a CpG dinucleotide"
  misc_feature (61)..(61): /note="Nucleotide may be methylated to form 5-methylcytosine"
cctacttgcttcttgcaaaaaaaaaattcacttcttttaagaaatagtggtgatagttaacgggaggttttttaaatgtctttatttgccaaaataaaaagtagatagcctatttcaatccc

SEQ ID NO: 3419 - DNA, 122 bp, Homo sapiens
  misc_feature (61)..(62): /note="This region represents a CpG dinucleotide"
  misc_feature (61)..(61): /note="Nucleotide may be methylated to form 5-methylcytosine"
cattatccgtcttttacacatgaggaaattgagggctggagggttcaaataacttcctaacggttacacagctgtggaatcaagattcagactcacaaagctgatgccagagtccattcttc

SEQ ID NO: 3420 - DNA, 122 bp, Homo sapiens
  misc_feature (61)..(62): /note="This region represents a CpG dinucleotide"
  misc_feature (61)..(61): /note="Nucleotide may be methylated to form 5-methylcytosine"
aaggaggtctggattcaccaccaccaccacccccatccacaccatggccccttctctccacgtaactttgacgcacaaacattaaccctgaggctcccggagatggctgccagggctcacgc

SEQ ID NO: 3421 - DNA, 122 bp, Homo sapiens
  misc_feature (61)..(62): /note="This region represents a CpG dinucleotide"
  misc_feature (61)..(61): /note="Nucleotide may be methylated to form 5-methylcytosine"
cagacaggagccaaggccccattgaagctccaggatgacgatggccctcaggggaacagacgcaaaaccaggcacgggcctgccttccagctggaatctacctgtcaggcccagaacttctg

SEQ ID NO: 3422 - DNA, 122 bp, Homo sapiens
  misc_feature (61)..(62): /note="This region represents a CpG dinucleotide"
  misc_feature (61)..(61): /note="Nucleotide may be methylated to form 5-methylcytosine"
tggaccccgcccccggcccccgcaccacccagcccgcaactctgcagctttcttcgcccacgccgcacagcctccaaaccagcggattccgcccacgttgccagcctaggccccccaccacc

SEQ ID NO: 3423 - DNA, 122 bp, Homo sapiens
  misc_feature (61)..(62): /note="This region represents a CpG dinucleotide"
  misc_feature (61)..(61): /note="Nucleotide may be methylated to form 5-methylcytosine"
ttgttagcgtggtgatggagcaggagctgctgagcaggccgccccggctctcttcctcagcgtctaggcttttagaattgttctatgtcctttcagccaacacaaaggcaggcgttcaaagc

SEQ ID NO: 3424 - DNA, 122 bp, Homo sapiens
  misc_feature (61)..(62): /note="This region represents a CpG dinucleotide"
  misc_feature (61)..(61): /note="Nucleotide may be methylated to form 5-methylcytosine"
gaggcaaaggcctcattgttctttggggcctgcctgccccgcccccagctgtaggacactcgtggcagatcccgggtgaccgaagacagcccatttccaggagtggggccttcggagcggag

SEQ ID NO: 3425 - DNA, 122 bp, Homo sapiens
  misc_feature (61)..(62): /note="This region represents a CpG dinucleotide"
  misc_feature (61)..(61): /note="Nucleotide may be methylated to form 5-methylcytosine"
tatcagattgagaagggcttgtccttgtagcttcacagcctggctgaagttccacacagacgtgaaagatcggaagtagtatagatggcagaaggcaaacactagtgtgcccagattaaatt

SEQ ID NO: 3426 - DNA, 122 bp, Homo sapiens
  misc_feature (61)..(62): /note="This region represents a CpG dinucleotide"
  misc_feature (61)..(61): /note="Nucleotide may be methylated to form 5-methylcytosine"
cattcaacctcagcatctacgtattgagcagaggccctgcgccaagcactgaggagtcagcggtgaccacctcttggcttctgttcccaagggtgacagtgtcctggggtcacacgggctca

SEQ ID NO: 3427 - DNA, 122 bp, Homo sapiens
  misc_feature (61)..(62): /note="This region represents a CpG dinucleotide"
  misc_feature (61)..(61): /note="Nucleotide may be methylated to form 5-methylcytosine"
aggccttggggcagggatgacagaggcatttgttattaaggaggatcttcaacacataggcgcagtgactcagcactgcagcccagcccacgcagttccactgttaggagcctttggcacag

SEQ ID NO: 3428 - DNA, 122 bp, Homo sapiens
  misc_feature (61)..(62): /note="This region represents a CpG dinucleotide"
  misc_feature (61)..(61): /note="Nucleotide may be methylated to form 5-methylcytosine"
ggtagatgtaattcttaatgacaacagatatacgtgaaaaagcgaatcataggctgccatcgtcatagggcttatgctataaaatgctacttctaaaccagaggatttgctgaaagatgctg

SEQ ID NO: 3429 - DNA, 122 bp, Homo sapiens
  misc_feature (61)..(62): /note="This region represents a CpG dinucleotide"
  misc_feature (61)..(61): /note="Nucleotide may be methylated to form 5-methylcytosine"
gagtcagcctctgccctgaccccaagcctgctgggcaggtctacgccaagtccaaccaggcgtggaaggagagaccccacagcactatgtctgggcctctacatgatctcgtggctcctgca

SEQ ID NO: 3430 - DNA, 122 bp, Homo sapiens
  misc_feature (61)..(62): /note="This region represents a CpG dinucleotide"
  misc_feature (61)..(61): /note="Nucleotide may be methylated to form 5-methylcytosine"
taagtgatgaatgggcacgtatcatatgcagcatgggtaagctagacatagcatgattcacgtcctgaggggagacagagcatatttcatcatactactcagaatggcatgcaatttaagac

SEQ ID NO: 3431 - DNA, 122 bp, Homo sapiens
  misc_feature (61)..(62): /note="This region represents a CpG dinucleotide"
  misc_feature (61)..(61): /note="Nucleotide may be methylated to form 5-methylcytosine"
aggtactccaaaccaagaggaaaagcatccttgtggcatgtgggtggattaggcccaaggcgcaggtgagctctgctgcagaaggaacctacacaccaagtcccaaatgcccaagtgctgac

SEQ ID NO: 3432 - DNA, 122 bp, Homo sapiens
  misc_feature (61)..(62): /note="This region represents a CpG dinucleotide"
  misc_feature (61)..(61): /note="Nucleotide may be methylated to form 5-methylcytosine"
acagagagtgataccccaggaaagcttcctaacacagagcaagcatgctacctaagtccacgtcccaaaatgactcatgtgtgcatgctgaatcaccatacaaagaaaatgtaggttctgtg

SEQ ID NO: 3433 - DNA, 122 bp, Homo sapiens
  misc_feature (61)..(62): /note="This region represents a CpG dinucleotide"
  misc_feature (61)..(61): /note="Nucleotide may be methylated to form 5-methylcytosine"
ccaattttctacaaactaacatttgaatttacagttgtaaaatgtgcaaatctgtaataacgagtcaggattcaattcaccttagatggactggttaggcaatgcctaacatgaaaacaaat

SEQ ID NO: 3434 - DNA, 122 bp, Homo sapiens
  misc_feature (61)..(62): /note="This region represents a CpG dinucleotide"
  misc_feature (61)..(61): /note="Nucleotide may be methylated to form 5-methylcytosine"
cactgagagttgaacagggaggcgaagacaactttgttttttcccgggagagccctcgctcggaagtgcctcctccctccttctgcggcttgcgccccaagaccttcatccgccgccggggc

SEQ ID NO: 3435 - DNA, 122 bp, Homo sapiens
  misc_feature (61)..(62): /note="This region represents a CpG dinucleotide"
  misc_feature (61)..(61): /note="Nucleotide may be methylated to form 5-methylcytosine"
gaagctcttaggctgctgtgcaacttccatttatcttctcaaacttcctggaacattggccgctgatgtaccttatctatctattgatggcccagaagtcatataaacactgtctatcaatg

SEQ ID NO: 3436 - DNA, 122 bp, Homo sapiens
  misc_feature (61)..(62): /note="This region represents a CpG dinucleotide"
  misc_feature (61)..(61): /note="Nucleotide may be methylated to form 5-methylcytosine"
attataggccctgctgggcagccagcatgcctgatctctgtttatttccattctagctaacgaatggaaaacatgaacaatgtcatagaaatgtggatggcatcagcataccagcttactgt

SEQ ID NO: 3437 - DNA, 122 bp, Homo sapiens
  misc_feature (61)..(62): /note="This region represents a CpG dinucleotide"
  misc_feature (61)..(61): /note="Nucleotide may be methylated to form 5-methylcytosine"
gcggaggcggaggctcccacccagggtcggggccgggggtgtgagctaaagagctgacctcgcgctgctctggactcggcacaaagagccggggacaagggcacgacgagatcctgatcccc

SEQ ID NO: 3438 - DNA, 122 bp, Homo sapiens
  misc_feature (61)..(62): /note="This region represents a CpG dinucleotide"
  misc_feature (61)..(61): /note="Nucleotide may be methylated to form 5-methylcytosine"
cttggtgaagtgagttgtcaaggagctaaatatacacattagtatgagaagagagcaacacgcaatctgatttcagagctggtgcacttaaccatcatgctatctactgcttccccttgtgg

SEQ ID NO: 3439 - DNA, 122 bp, Homo sapiens
  misc_feature (61)..(62): /note="This region represents a CpG dinucleotide"
  misc_feature (61)..(61): /note="Nucleotide may be methylated to form 5-methylcytosine"
agcgaatttttatcagttcactgggggcccggctggccaaggagcttcggctgcctgctgcgaagcctaagccgcaacagctgcataaactggctgtgccccagcctgacctattttggaga

SEQ ID NO: 3440 - DNA, 122 bp, Homo sapiens
  misc_feature (61)..(62): /note="This region represents a CpG dinucleotide"
  misc_feature (61)..(61): /note="Nucleotide may be methylated to form 5-methylcytosine"
acagtatgggggaaaccacatccatgattcagttagctccacctgtccccactcttgacacgtaaagattattataattcaaggtgagatatgggtgggatcacagccaaaccatatcagat

SEQ ID NO: 3441 - DNA, 122 bp, Homo sapiens
  misc_feature (61)..(62): /note="This region represents a CpG dinucleotide"
  misc_feature (61)..(61): /note="Nucleotide may be methylated to form 5-methylcytosine"
taatttagggattcctctttgtggtttgccctcagtgtatgcatcacccactgttgaacacggtagcctacagcaatgtctcagaggttttagaacatcattcagaaccatgactggtgatt

SEQ ID NO: 3442 - DNA, 122 bp, Homo sapiens
  misc_feature (61)..(62): /note="This region represents a CpG dinucleotide"
  misc_feature (61)..(61): /note="Nucleotide may be methylated to form 5-methylcytosine"
ttcttaattttttttaaagcactaaaactttcagtaaagtaacgggaattatgagaggatcggaccagctaaagttttgtttgtcgcgctgctcatattgatgaccttgaggttgccacacc

SEQ ID NO: 3443 - DNA, 122 bp, Homo sapiens
  misc_feature (61)..(62): /note="This region represents a CpG dinucleotide"
  misc_feature (61)..(61): /note="Nucleotide may be methylated to form 5-methylcytosine"
gaaacgaaatcttcatgccaaaactaacacttgtcagttggacctctctatagtctgtaacgtattttatttcctctccctttagtgaagttcatctgacatttttctcaagttagtcctct

SEQ ID NO: 3444 - DNA, 122 bp, Homo sapiens
  misc_feature (61)..(62): /note="This region represents a CpG dinucleotide"
  misc_feature (61)..(61): /note="Nucleotide may be methylated to form 5-methylcytosine"
agccgctatcttggatccactctgctatgaagaacagcatgctaggcaggccagaaggagcgatcacagagacaagccatatttgttaagagatggaatttaagaggacaggaatgaaggga

SEQ ID NO: 3445 - DNA, 122 bp, Homo sapiens
  misc_feature (61)..(62): /note="This region represents a CpG dinucleotide"
  misc_feature (61)..(61): /note="Nucleotide may be methylated to form 5-methylcytosine"
agggcttagattccagattgacactgggctctctaaagcctgctcctcaatctactgatccggtccagcttaagatccagtagaaagaaaacatagcctgcccggaccgtaacctttttgtt

SEQ ID NO: 3446 - DNA, 122 bp, Homo sapiens
  misc_feature (61)..(62): /note="This region represents a CpG dinucleotide"
  misc_feature (61)..(61): /note="Nucleotide may be methylated to form 5-methylcytosine"
ttccctccccgacgcgcggctgctggcctgcaggaagaactgctggcggtgggccagcctcgctgcgcatgcccacccagaacgccaggcagacaaaggggggcggacgagagtctggggat

SEQ ID NO: 3447 - DNA, 122 bp, Homo sapiens
  misc_feature (61)..(62): /note="This region represents a CpG dinucleotide"
  misc_feature (61)..(61): /note="Nucleotide may be methylated to form 5-methylcytosine"
cacaggctcacccaggctttcacttcatgggccgactgcactgcctgtgtttcctaaagacggggacagtggggcagtcaattgttgaaatgctaatgactccaaaacttttcataacctcc

SEQ ID NO: 3448 - DNA, 122 bp, Homo sapiens
  misc_feature (61)..(62): /note="This region represents a CpG dinucleotide"
  misc_feature (61)..(61): /note="Nucleotide may be methylated to form 5-methylcytosine"
acggtgattactcacaggtgcggttccactactgatcagaacgggagttttgaactgctccgtttttgacctgagtcagttcacccctccttaagcaacctggtggccccttgctcccagtg

SEQ ID NO: 3449 - DNA, 122 bp, Homo sapiens
  misc_feature (61)..(62): /note="This region represents a CpG dinucleotide"
  misc_feature (61)..(61): /note="Nucleotide may be methylated to form 5-methylcytosine"
ctcaggtacttcgtctccccatcactaccccaaccatccatccctctaatacccccacctcgaccacaaagtggctccatcagccggccacagccctaaagcctgaggccacactgcagagg

SEQ ID NO: 3450 - DNA, 122 bp, Homo sapiens
  misc_feature (61)..(62): /note="This region represents a CpG dinucleotide"
  misc_feature (61)..(61): /note="Nucleotide may be methylated to form 5-methylcytosine"
tacacacaaatacacacacacacacacacacacacacacacacacacacacacacctgcacgcacacaagctgcatgagatatactcaaagactcctcattggttttctgaaatttaaattt

SEQ ID NO: 3451 - DNA, 122 bp, Homo sapiens
  misc_feature (61)..(62): /note="This region represents a CpG dinucleotide"
  misc_feature (61)..(61): /note="Nucleotide may be methylated to form 5-methylcytosine"
tggatacatgtctttggagcagatttccatccatttttactccagtcctatggtggctaccggtattgttcttgtcgcctgctattcttaagtctgcagtttgcctgtgactcaccccagga

SEQ ID NO: 3452 - DNA, 122 bp, Homo sapiens
  misc_feature (61)..(62): /note="This region represents a CpG dinucleotide"
  misc_feature (61)..(61): /note="Nucleotide may be methylated to form 5-methylcytosine"
cccgtgagccagtggcctgccgtctcccagcactctgctattccaaggcctctgctctgacggttcgaaaagggatggtccctgtttctgatgccaattgcacggttttgtcttaacctttc

SEQ ID NO: 3453 - DNA, 122 bp, Homo sapiens
  misc_feature (61)..(62): /note="This region represents a CpG dinucleotide"
  misc_feature (61)..(61): /note="Nucleotide may be methylated to form 5-methylcytosine"
atacccctatgcaatgcccttcagggggtggtttttggaatagttcgttgagcatcacctcggctatttgtttaaaatgcagatcctgtgctcctccatcaacctactgaatcaggacctca

SEQ ID NO: 3454 - DNA, 122 bp, Homo sapiens
  misc_feature (61)..(62): /note="This region represents a CpG dinucleotide"
  misc_feature (61)..(61): /note="Nucleotide may be methylated to form 5-methylcytosine"
cttgccttatttcaatgtggaatccagccttcattgtcttatcagtttgcagacagttcacgtgaaacactggaaatagttttcacaacataaacagaaattttatttgaaatgactgacag

SEQ ID NO: 3455 - DNA, 122 bp, Homo sapiens
  misc_feature (61)..(62): /note="This region represents a CpG dinucleotide"
  misc_feature (61)..(61): /note="Nucleotide may be methylated to form 5-methylcytosine"
ataatctttgtccattcttgttggcttttgctgggtagtgtttggttgaagttggtcccccgtcttaaggaaatgacagggctttaccacacacacatgtgttcattgtatttataactata

SEQ ID NO: 3456 - DNA, 122 bp, Homo sapiens
  misc_feature (61)..(62): /note="This region represents a CpG dinucleotide"
  misc_feature (61)..(61): /note="Nucleotide may be methylated to form 5-methylcytosine"
agggttaacaattactgagtagagtccagggatgcgtttaacctcctacaacacacaggacggcctccaacaacaaagaattactcagcaatggtaccaggtttgagaaaccctggtctagc

SEQ ID NO: 3457 - DNA, 122 bp, Homo sapiens
  misc_feature (61)..(62): /note="This region represents a CpG dinucleotide"
  misc_feature (61)..(61): /note="Nucleotide may be methylated to form 5-methylcytosine"
gtggtcattgcactctagcacacatgactgctttaagttaataattaaactttagcacatcgagagggaattaggaggtgtcagcaatggtgatgaatctcaccccaactcatgttacccag

SEQ ID NO: 3458 - DNA, 122 bp, Homo sapiens
  misc_feature (61)..(62): /note="This region represents a CpG dinucleotide"
  misc_feature (61)..(61): /note="Nucleotide may be methylated to form 5-methylcytosine"
aatatgttttcacctcttccgtgcgattggatgactcgaccgcccctcctcaacctgaaccgtttaatatattattggtctattcaaatgactaaccgtcattggtcgttcccagccctggc

SEQ ID NO: 3459 - DNA, 122 bp, Homo sapiens
  misc_feature (61)..(62): /note="This region represents a CpG dinucleotide"
  misc_feature (61)..(61): /note="Nucleotide may be methylated to form 5-methylcytosine"
tatgtcctgttatgtaaaggcatcgtgtgagcatattctcacgctcttttagttttgtaacgaaggcagtgatgacgcactcaccttggtaaactgccaagtgcacttatatttttgctttt

SEQ ID NO: 3460 - DNA, 122 bp, Homo sapiens
  misc_feature (61)..(62): /note="This region represents a CpG dinucleotide"
  misc_feature (61)..(61): /note="Nucleotide may be methylated to form 5-methylcytosine"
gaaaagaaagtatgataaagcgtgtctgtaatacttttatttttactctggtggtagtggcgagctgagaagtttctacatacatggagtccagtaaacatctattgaacaaacaccatcaa

SEQ ID NO: 3461 - DNA, 122 bp, Homo sapiens
  misc_feature (61)..(62): /note="This region represents a CpG dinucleotide"
  misc_feature (61)..(61): /note="Nucleotide may be methylated to form 5-methylcytosine"
ttgaaacatgtcccttcaagtggtaaattagctgctgccctgggctagttgagtgcctgccgccaacgcaagaccagcaagcacagccaggaacgtccagaattagttcactaccacatgct

SEQ ID NO: 3462 - DNA, 122 bp, Homo sapiens
  misc_feature (61)..(62): /note="This region represents a CpG dinucleotide"
  misc_feature (61)..(61): /note="Nucleotide may be methylated to form 5-methylcytosine"
gttgaaaacaaaaggaacccacaaaaacagagctggaccagctggtgcagcaggagctcccggagcccccgatgctgcatggcccaaatgaaaatgccttgcagtcacgacgactccgtgtc

SEQ ID NO: 3463 - DNA, 122 bp, Homo sapiens
  misc_feature (61)..(62): /note="This region represents a CpG dinucleotide"
  misc_feature (61)..(61): /note="Nucleotide may be methylated to form 5-methylcytosine"
agtaaaacggcaaaacagattttattcagaaaaactactgcagtaagaggagagagacctcggtacagaactgctccactgcgaatacaaagaaaagtaggaattgatggcgggggagccgg

SEQ ID NO: 3464 - DNA, 122 bp, Homo sapiens
  misc_feature (61)..(62): /note="This region represents a CpG dinucleotide"
  misc_feature (61)..(61): /note="Nucleotide may be methylated to form 5-methylcytosine"
tcccggaccgtggggccaggtacagctcactaggctcgccgaaaagccaacagtaggcaacggggtacgaagagcttgccccagggttcgcggagattcctcctgccttcccacgatgtcag

SEQ ID NO: 3465 - DNA, 122 bp, Homo sapiens
  misc_feature (61)..(62): /note="This region represents a CpG dinucleotide"
  misc_feature (61)..(61): /note="Nucleotide may be methylated to form 5-methylcytosine"
ctgtgcataactctggttaaaagcctttggaatcagcccctcaggtcactctgactctaccgcagcctggtgtcaaagccagcccttcacggaacagccaggagggcatcacagctgacctc

SEQ ID NO: 3466 - DNA, 122 bp, Homo sapiens
  misc_feature (61)..(62): /note="This region represents a CpG dinucleotide"
  misc_feature (61)..(61): /note="Nucleotide may be methylated to form 5-methylcytosine"
cgcctgctgaatgtgctctgcacagggtgatgtaacatgtggggtcagcccctgcgtcaacgaccaaatacacaagtgtaacgagatggggggaacaagacagactccacatggccagcctg

SEQ ID NO: 3467 - DNA, 122 bp, Homo sapiens
  misc_feature (61)..(62): /note="This region represents a CpG dinucleotide"
  misc_feature (61)..(61): /note="Nucleotide may be methylated to form 5-methylcytosine"
tccgtcttttagttgcttctcttccttttttctctctggtttctcatcactccaaccagccgcaaccatgcccaggaagaaggcggcggtggcggcctgggaggagctgagctcgggcaacg

SEQ ID NO: 3468 - DNA, 122 bp, Homo sapiens
  misc_feature (61)..(62): /note="This region represents a CpG dinucleotide"
  misc_feature (61)..(61): /note="Nucleotide may be methylated to form 5-methylcytosine"
tccccgtcacctactgcctctgactccccctgagtaaatgcaatgggaaaagcagggagacgtgctctcgactctccccagagcagaccctgcaggcggaagccacctgaatctcacttgct

SEQ ID NO: 3469 - DNA, 122 bp, Homo sapiens
  misc_feature (61)..(62): /note="This region represents a CpG dinucleotide"
  misc_feature (61)..(61): /note="Nucleotide may be methylated to form 5-methylcytosine"
agcacctaccgcctgcctgtggcttgcttgctccccccactgcctggctccctactgccacgtccctgctaggcacaagggcccctatgggacctgcccgggaagggtcagggcctctggga

SEQ ID NO: 3470 - DNA, 122 bp, Homo sapiens
  misc_feature (61)..(62): /note="This region represents a CpG dinucleotide"
  misc_feature (61)..(61): /note="Nucleotide may be methylated to form 5-methylcytosine"
tggcacctcacttgtgtgtggccagcttctgccttggctctgagcagcgagcgtgtcagacgctgtgctcacggcgcccctccacgtgggtgtgtggcgtccttcctcttcgcgtgggatgg

SEQ ID NO: 3471 - DNA, 122 bp, Homo sapiens
  misc_feature (61)..(62): /note="This region represents a CpG dinucleotide"
  misc_feature (61)..(61): /note="Nucleotide may be methylated to form 5-methylcytosine"
ataaatctttatgtaatcttagtttgggttgttgcatcactcctggaatataaaatattacggactgtggaatttatgaggcctgacatgttatgagttctcaaagatggttcagcagcagt

SEQ ID NO: 3472 - DNA, 122 bp, Homo sapiens
  misc_feature (61)..(62): /note="This region represents a CpG dinucleotide"
  misc_feature (61)..(61): /note="Nucleotide may be methylated to form 5-methylcytosine"
atccagggttccctccagaccagacagccaggaatgtgaacctgcatgctaagtgaattacgaactctttgaagtggtaaagaaaaaaactggccttcctcacctctttgaaaccaaagcct

SEQ ID NO: 3473 - DNA, 122 bp, Homo sapiens
  misc_feature (61)..(62): /note="This region represents a CpG dinucleotide"
  misc_feature (61)..(61): /note="Nucleotide may be methylated to form 5-methylcytosine"
cctcagataggctctcactgggaataacggactctgcagatggaattaaggtaaggctctcgagataagcgtgcctgattagagtgagccctaaatccaatgactcccgtccttaagagaca

SEQ ID NO: 3474 - DNA, 122 bp, Homo sapiens
  misc_feature (61)..(62): /note="This region represents a CpG dinucleotide"
  misc_feature (61)..(61): /note="Nucleotide may be methylated to form 5-methylcytosine"
gtgaacccctccctccaggggagtcttatataccatgtcttatacctctttgagtctccacgacctaccacaaggcttagcccagagcaggtgctagcaaatgttgactgaactaatgagtg

SEQ ID NO: 3475 - DNA, 122 bp, Homo sapiens
  misc_feature (61)..(62): /note="This region represents a CpG dinucleotide"
  misc_feature (61)..(61): /note="Nucleotide may be methylated to form 5-methylcytosine"
aaagagataaacaaacaaaaaaattacatcctcatacagttgcaaacaggagtcccaggtcgctctagcggtagttctatgcttatttcctgctattgctgttgctattgctattgttgaag

SEQ ID NO: 3476 - DNA, 122 bp, Homo sapiens
  misc_feature (61)..(62): /note="This region represents a CpG dinucleotide"
  misc_feature (61)..(61): /note="Nucleotide may be methylated to form 5-methylcytosine"
tttgtttctttctctttttttttctcttctctctagtttatttccctcgatttcaatctacgatgcttctactggatggtaactttcaactctcataattttaatttcccagagcttttctg

SEQ ID NO: 3477 - DNA, 122 bp, Homo sapiens
  misc_feature (61)..(62): /note="This region represents a CpG dinucleotide"
  misc_feature (61)..(61): /note="Nucleotide may be methylated to form 5-methylcytosine"
gactcaagctgatttccctaccaaccctctgcctctcttgctctttcatttttattgcctcggtaaaattggtggctgaaagaacagaacagaacacaatgtactggcttctgcagcccacg

SEQ ID NO: 3478 - DNA, 122 bp, Homo sapiens
  misc_feature (61)..(62): /note="This region represents a CpG dinucleotide"
  misc_feature (61)..(61): /note="Nucleotide may be methylated to form 5-methylcytosine"
tcttttttatacttaagcaccaggcccatgtaatgatgcacgaattcatttactcctactcgtgccaggccctttcctgggggctggagacaaagggccgacgtggacgctgcgtcatggta

SEQ ID NO: 3479 - DNA, 122 bp, Homo sapiens
  misc_feature (61)..(62): /note="This region represents a CpG dinucleotide"
  misc_feature (61)..(61): /note="Nucleotide may be methylated to form 5-methylcytosine"
ggagggcagcctgagccgcttcccgcccccgcggggaccgtcgccagcccgcatctctagcgagaggaggttccacagcgcgcccggcagccccgccaccgtcagcacctgcgcctcgggcg

SEQ ID NO: 3480 - DNA, 122 bp, Homo sapiens
  misc_feature (61)..(62): /note="This region represents a CpG dinucleotide"
  misc_feature (61)..(61): /note="Nucleotide may be methylated to form 5-methylcytosine"
cacatgtattgccacctgaatttctttttcggtgaagtgcctgttcatgacctatgcaggcgtgaggtcttgcctgtggtttgatcctacactgataaatttcacatatttcatatattgtt

SEQ ID NO: 3481 - DNA, 122 bp, Homo sapiens
  misc_feature (61)..(62): /note="This region represents a CpG dinucleotide"
  misc_feature (61)..(61): /note="Nucleotide may be methylated to form 5-methylcytosine"
ggacacggggctttgggaagcccgtttgacagagggcaggagccattcaggaaatgggtccgggacacgtggctttgtagtcactggctggctgggtgtggtaaagccgcacatacgtgaca

SEQ ID NO: 3482 - DNA, 122 bp, Homo sapiens
  misc_feature (61)..(62): /note="This region represents a CpG dinucleotide"
  misc_feature (61)..(61): /note="Nucleotide may be methylated to form 5-methylcytosine"
ccacctcagtgcggctagggggcaggatgtgtcaaggaagtttagtcaagtatggaaatgcgacacaaaggtcaggaaaagataaagtgctgtgccaaataatatcgtagcaaaaacctttc

SEQ ID NO: 3483 - DNA, 122 bp, Homo sapiens
  misc_feature (61)..(62): /note="This region represents a CpG dinucleotide"
  misc_feature (61)..(61): /note="Nucleotide may be methylated to form 5-methylcytosine"
ttagcgtttgttccattcagccattatcatgatccaggttttttctacttaaaataatgccgtgaaggatgcacccctaccttaatatacatatattcaaatgtatttgaaatagatgaaat

SEQ ID NO: 3484 - DNA, 122 bp, Homo sapiens
  misc_feature (61)..(62): /note="This region represents a CpG dinucleotide"
  misc_feature (61)..(61): /note="Nucleotide may be methylated to form 5-methylcytosine"
ctggagtgttttcaccccaacaagtggaaatgaacggaatgcaccactctgcctgcagtacggcgcttgcataaggtgcctgccctcatcagagttatacatcatcacttagaggcaagaac

SEQ ID NO: 3485 - DNA, 122 bp, Homo sapiens
  misc_feature (61)..(62): /note="This region represents a CpG dinucleotide"
  misc_feature (61)..(61): /note="Nucleotide may be methylated to form 5-methylcytosine"
gaactgcacggcactgagcgcatctaattaaagtgatggtttcattagatagcaacacagcgagaccccgtttctacaaaaaataaaaataaaaaataaaagattagctgggcgtggttgct

SEQ ID NO: 3486 - DNA, 122 bp, Homo sapiens
  misc_feature (61)..(62): /note="This region represents a CpG dinucleotide"
  misc_feature (61)..(61): /note="Nucleotide may be methylated to form 5-methylcytosine"
ctgaatttatagtaaaaagaaaaacattgtttgggttcctccagtagcagagacagaatacgaatgcaagtagtctattctgtgttgagtgatcacagaaagttcatgtgggagagtagggg

SEQ ID NO: 3487 - DNA, 122 bp, Homo sapiens
  misc_feature (61)..(62): /note="This region represents a CpG dinucleotide"
  misc_feature (61)..(61): /note="Nucleotide may be methylated to form 5-methylcytosine"
aagagaggaaaggctgaaggacataatccatagcaaagttctggcccagaagaaagcaaccgagagtgatcagccctaagcacagttgcttttatttgaggtgcagccttttgcatgtagca

SEQ ID NO: 3488 - DNA, 122 bp, Homo sapiens
  misc_feature (61)..(62): /note="This region represents a CpG dinucleotide"
  misc_feature (61)..(61): /note="Nucleotide may be methylated to form 5-methylcytosine"
tttttatttatctttcacagatttggagtcaagacacaaacgggttatttaacttatccacgggtatcattagtaaatgatagagtcagaaagcaaacataggcactttgagtttaaagcct

SEQ ID NO: 3489 - DNA, 122 bp, Homo sapiens
  misc_feature (61)..(62): /note="This region represents a CpG dinucleotide"
  misc_feature (61)..(61): /note="Nucleotide may be methylated to form 5-methylcytosine"
gataggaagaataagtttaatagatctattgtacaacacggtgacctcagctaataactacgtactatattcctgaaattgctgagcaagtaaattctcaccacaaaaaatgatataagtat

SEQ ID NO: 3490 - DNA, 122 bp, Homo sapiens
  misc_feature (61)..(62): /note="This region represents a CpG dinucleotide"
  misc_feature (61)..(61): /note="Nucleotide may be methylated to form 5-methylcytosine"
agccgtccaggataggtgtctcccggatgctcagggtgccactggagttgtggccctgcacgcgggcattgcgcaggctctcccgtccgtgcccgccgatcagcacagaaggaatgtagtga

SEQ ID NO: 3491 - DNA, 122 bp, Homo sapiens
  misc_feature (61)..(62): /note="This region represents a CpG dinucleotide"
  misc_feature (61)..(61): /note="Nucleotide may be methylated to form 5-methylcytosine"
acaaaagtatcgtttatatgatcaacaggcatcctacgctgtgtgcacacagcatatcaccgggagagacggcacggaaagatggccctgccctcaaggagctgcagtctgcccaggaaggc

SEQ ID NO: 3492 - DNA, 122 bp, Homo sapiens
  misc_feature (61)..(62): /note="This region represents a CpG dinucleotide"
  misc_feature (61)..(61): /note="Nucleotide may be methylated to form 5-methylcytosine"
agagcgagactccatctaaaaaaaaaaaaaaacaaaaggcttttttttccccctaaatgtcgtccacatttttggcaagtattgatctctagtagtcagtgtcaggatctgaagaaaacagt

SEQ ID NO: 3493 - DNA, 122 bp, Homo sapiens
  misc_feature (61)..(62): /note="This region represents a CpG dinucleotide"
  misc_feature (61)..(61): /note="Nucleotide may be methylated to form 5-methylcytosine"
cgggctcgtcggacggagaaggccgtaggggagtggagcggcgcccccccccacaccctccgcccttgctcttcgtctgcgaggaagcccggcagtcgcccatccattcaagcagtgcgggc

SEQ ID NO: 3494 - DNA, 122 bp, Homo sapiens
  misc_feature (61)..(62): /note="This region represents a CpG dinucleotide"
  misc_feature (61)..(61): /note="Nucleotide may be methylated to form 5-methylcytosine"
tggggcgacacctgctctgatgctgcagacattctgtttgatgcggagaggccagccattcggctgtgattttgtagtctctggggagatattttttcatcactgttggtggagtgggagga

SEQ ID NO: 3495 - DNA, 122 bp, Homo sapiens
  misc_feature (61)..(62): /note="This region represents a CpG dinucleotide"
  misc_feature (61)..(61): /note="Nucleotide may be methylated to form 5-methylcytosine"
tcggataattacccctaaatggccacggcagccccttgtgtttcctggagattagaaccccgcagtcatcaatggcagggccgagtgagccgccaatcacctccgctcactccctgagagcc

SEQ ID NO: 3496 - DNA, 122 bp, Homo sapiens
  misc_feature (61)..(62): /note="This region represents a CpG dinucleotide"
  misc_feature (61)..(61): /note="Nucleotide may be methylated to form 5-methylcytosine"
gtttttgctttttgtaagtggttgtggttttcctgttcagcctgctgcgactggaccgtccgtctacataagtaccccctaataaaaacctgtcgtgtttgctggccctgggtctcttcttc

SEQ ID NO: 3497 - DNA, 122 bp, Homo sapiens
  misc_feature (61)..(62): /note="This region represents a CpG dinucleotide"
  misc_feature (61)..(61): /note="Nucleotide may be methylated to form 5-methylcytosine"
gtgcattataaaaagtacagtaatgcattggcttcaacttgcatatttcccaaacatgggcgtttgcaagaaaagcaaacactttttgataacatatactgaaggatcttaaaataagatca

SEQ ID NO: 3498 - DNA, 122 bp, Homo sapiens
  misc_feature (61)..(62): /note="This region represents a CpG dinucleotide"
  misc_feature (61)..(61): /note="Nucleotide may be methylated to form 5-methylcytosine"
tcgtgattacaggcgtgagcccagccaacaatggatgtttttgactctaggtctcttgcacgcaacatctcaagctttccagcagtggtagtgttaccagtggtggaattcacacaaatctg

SEQ ID NO: 3499 - DNA, 122 bp, Homo sapiens
  misc_feature (61)..(62): /note="This region represents a CpG dinucleotide"
  misc_feature (61)..(61): /note="Nucleotide may be methylated to form 5-methylcytosine"
catccctgatcatgcttggtatacagatggctccagcaagggaaacccctgtacttggaccgctgttgctatatgaccacaaactgatacaatctggcttgatataagtacccatcacagta

SEQ ID NO: 3500 - DNA, 122 bp, Homo sapiens
  misc_feature (61)..(62): /note="This region represents a CpG dinucleotide"
  misc_feature (61)..(61): /note="Nucleotide may be methylated to form 5-methylcytosine"
cttcagctttgcagaaatggttccacaattctgtgatgggacgtcagtgctaagacatcacgtctgccttgaccctgacagtgttttttgctgcatgatttcatcctcacactcctgtttgt

SEQ ID NO: 3501 - DNA, 122 bp, Homo sapiens
  misc_feature (61)..(62): /note="This region represents a CpG dinucleotide"
  misc_feature (61)..(61): /note="Nucleotide may be methylated to form 5-methylcytosine"
ctcccccaggaggaagctccccctctgcctcaggcgtttgtccattgatttggacacaaacgcatggttcaccttcctgtggaaaaatccggccctcggactttatctggagggtgcagtgg

SEQ ID NO: 3502 - DNA, 122 bp, Homo sapiens
  misc_feature (61)..(62): /note="This region represents a CpG dinucleotide"
  misc_feature (61)..(61): /note="Nucleotide may be methylated to form 5-methylcytosine"
gcactccaagtcccactggcctgggttcgaatcccagctctaccacctctgctgtctgtacgatgggggattttgaatcctgttctgcatagtactctgagtcaggccctgtgctgagcact

SEQ ID NO: 3503 - DNA, 122 bp, Homo sapiens
  misc_feature (61)..(62): /note="This region represents a CpG dinucleotide"
  misc_feature (61)..(61): /note="Nucleotide may be methylated to form 5-methylcytosine"
gggatgcttctctttgtgcttgctcttggagcagatggtgcctcccctgtaccccacacacgcccactgctcctctccaggtgagtctctgaattctgttttccagttcatgtacatccttg

SEQ ID NO: 3504 - DNA, 122 bp, Homo sapiens
  misc_feature (61)..(62): /note="This region represents a CpG dinucleotide"
  misc_feature (61)..(61): /note="Nucleotide may be methylated to form 5-methylcytosine"
gatcttgcagttccatcccccatcaacattcatgggtgaaggctgcatgtgtgtgtgacacgataggtaagaattagctgctttccaaattaagacagagtgagtttcacttctgaataata

SEQ ID NO: 3505 - DNA, 122 bp, Homo sapiens
  misc_feature (61)..(62): /note="This region represents a CpG dinucleotide"
  misc_feature (61)..(61): /note="Nucleotide may be methylated to form 5-methylcytosine"
atctactactgcacaacaaaccactccaaaatagtggcttaaaaccatagcagtcacttacgttgcttactaatctgggcattgactgggctcagccaggcagttctcactaggggtcgcta

SEQ ID NO: 3506 - DNA, 122 bp, Homo sapiens
  misc_feature (61)..(62): /note="This region represents a CpG dinucleotide"
  misc_feature (61)..(61): /note="Nucleotide may be methylated to form 5-methylcytosine"
aaggttaaacctaggaacacggaagccaatgtgcccccagagaacggaagaggcggtctgcgagttcagaaggcaggcagctcatgcttgaaggtgatagccttctgcctacaagagaaatc

SEQ ID NO: 3507 - DNA, 122 bp, Homo sapiens
  misc_feature (61)..(62): /note="This region represents a CpG dinucleotide"
  misc_feature (61)..(61): /note="Nucleotide may be methylated to form 5-methylcytosine"
ccggtagtacctatgccagggacaaagtgcactttaatagtcaatacacaggttgcttaccgggttcttgttttttttgtcaatagtcttctttcatttcaagttcccaaagtcttgggaac

SEQ ID NO: 3508 - DNA, 122 bp, Homo sapiens
  misc_feature (61)..(62): /note="This region represents a CpG dinucleotide"
  misc_feature (61)..(61): /note="Nucleotide may be methylated to form 5-methylcytosine"
agtacaaacaactcaagctcaacatgtgcatactgaactccatttccttttcccaaacttcgacatttacagccatcccctttcagctgatagcaagtttatccttccagctactcaaacca

SEQ ID NO: 3509 - DNA, 122 bp, Homo sapiens
  misc_feature (61)..(62): /note="This region represents a CpG dinucleotide"
  misc_feature (61)..(61): /note="Nucleotide may be methylated to form 5-methylcytosine"
gaggccaaccaaccccatcactaaaatctggactctgtgctgattgttgtggactttttgcgtgttcatcctccctgcagacaactgaagattcattctctccagagggtagaagagaagat

SEQ ID NO: 3510 - DNA, 122 bp, Homo sapiens
  misc_feature (61)..(62): /note="This region represents a CpG dinucleotide"
  misc_feature (61)..(61): /note="Nucleotide may be methylated to form 5-methylcytosine"
tgtactgttcagtagtgggacttcaggggccagaaaagaagggcaaggcaggacatgtagcgaaatcgtcacgagtcgcttaactacagggataggtctgacagatgccccgatttccttct

SEQ ID NO: 3511 - DNA, 122 bp, Homo sapiens
  misc_feature (61)..(62): /note="This region represents a CpG dinucleotide"
  misc_feature (61)..(61): /note="Nucleotide may be methylated to form 5-methylcytosine"
caagttatgtaatctctctgtacctcaaagaacttaactactctgtacaaatgagtttctcgatgtatattatgaaggtgagagcacttacatgtcataggattgttatgaagattgcatta

SEQ ID NO: 3512 - DNA, 122 bp, Homo sapiens
  misc_feature (61)..(62): /note="This region represents a CpG dinucleotide"
  misc_feature (61)..(61): /note="Nucleotide may be methylated to form 5-methylcytosine"
atgtctaaaatgaacaatcttatttgagccaaagttctccagagtagcctctataattcacggtcctctgtcaagttatgccaggaagtagtgcaagtatcttagaggcaaaccacaagagg

SEQ ID NO: 3513 - DNA, 122 bp, Homo sapiens
  misc_feature (61)..(62): /note="This region represents a CpG dinucleotide"
  misc_feature (61)..(61): /note="Nucleotide may be methylated to form 5-methylcytosine"
cacttcgaatacagactacacacttctgggtctgtcttgtaccacattgtctggcataggcgctcactgtatatttgttgaatgttaaagttctgtgcaccaaaaccgtgcactttgcatcg

SEQ ID NO: 3514 - DNA, 122 bp, Homo sapiens
  misc_feature (61)..(62): /note="This region represents a CpG dinucleotide"
  misc_feature (61)..(61): /note="Nucleotide may be methylated to form 5-methylcytosine"
gagccaacagaacacctggaacatgataagtgcttttaaatatgttaaagaaaacaattgcgagagaagagagaacacagacgacatgagacgtcctacaaaaggaggccccttagctatta

SEQ ID NO: 3515 - DNA, 122 bp, Homo sapiens
  misc_feature (61)..(62): /note="This region represents a CpG dinucleotide"
  misc_feature (61)..(61): /note="Nucleotide may be methylated to form 5-methylcytosine"
caaacagcattctattccagaggacagcatgaaaggaatagtattattttcctgggtaaacgtcccatgaaattgactttagcaaccaccagaggagtaagatggcatgcctttcatccccc

SEQ ID NO: 3516 - DNA, 122 bp, Homo sapiens
  misc_feature (61)..(62): /note="This region represents a CpG dinucleotide"
  misc_feature (61)..(61): /note="Nucleotide may be methylated to form 5-methylcytosine"
ataatgtggacgaacaagtgaaacactttttcaacttaaatgaaaaaacaggagaaatcacgacaaaggatgatttggattttgagattgcaagtagttacactctgagtatcgaagcaaaa

SEQ ID NO: 3517 - DNA, 122 bp, Homo sapiens
  misc_feature (61)..(62): /note="This region represents a CpG dinucleotide"
  misc_feature (61)..(61): /note="Nucleotide may be methylated to form 5-methylcytosine"
ctccaggagttgtcaaggcagcagaaaggagtcacccagccaaaggaggagatggctcagcggggctgcaccaaggggccaagaggccctacccgtgtctaaaccctcctctcactccccta

SEQ ID NO: 3518 - DNA, 122 bp, Homo sapiens
  misc_feature (61)..(62): /note="This region represents a CpG dinucleotide"
  misc_feature (61)..(61): /note="Nucleotide may be methylated to form 5-methylcytosine"
attcagcacagccttcccccattctatttggatctactggcttagtaccagatatggaagcgtatgaaaaagtaaaggagaataaataatcctgtgtagttttcttggagcaaaaatgtttc

SEQ ID NO: 3519 - DNA, 122 bp, Homo sapiens
  misc_feature (61)..(62): /note="This region represents a CpG dinucleotide"
  misc_feature (61)..(61): /note="Nucleotide may be methylated to form 5-methylcytosine"
aacttgtggcaacagtagacttcagagaccagactggcggcttgaagaaagctattttctcgtaccaaatacattccatttcctaagtaagttactcaaccaactaaaactccaggtttctc

SEQ ID NO: 3520 - DNA, 122 bp, Homo sapiens
  misc_feature (61)..(62): /note="This region represents a CpG dinucleotide"
  misc_feature (61)..(61): /note="Nucleotide may be methylated to form 5-methylcytosine"
tgctgggctttccactaccttaggccacgtgtcactatggagcgaagatcaagaaggtcccggaaggagagaagctgcggggtccagggagactttttggtggttggtcggagaggcttcag

SEQ ID NO: 3521 - DNA, 122 bp, Homo sapiens
  misc_feature (61)..(62): /note="This region represents a CpG dinucleotide"
  misc_feature (61)..(61): /note="Nucleotide may be methylated to form 5-methylcytosine"
gcaacaaacgaaagtgaaagcaactgagccaactaaaagagtcctctcggatctagtgcccgtgattcatgctctgacccatttccatttcagattccaaaccctaggttacactcaaggct

SEQ ID NO: 3522 - DNA, 122 bp, Homo sapiens
  misc_feature (61)..(62): /note="This region represents a CpG dinucleotide"
  misc_feature (61)..(61): /note="Nucleotide may be methylated to form 5-methylcytosine"
ggtccctctcttcctcatctcactcttcatctttctatccaattcctctggtcactaaagcgttagcagcctgcctccttaaaggcacagagataaacactgcaattatatagagaggatac

SEQ ID NO: 3523 - DNA, 122 bp, Homo sapiens
  misc_feature (61)..(62): /note="This region represents a CpG dinucleotide"
  misc_feature (61)..(61): /note="Nucleotide may be methylated to form 5-methylcytosine"
ccgaacctcggaatgcgaggcccggcggaaacaggccggtgctaactccgtgagtcaggacgaaggcgccggggaaggctggccctaaacagtggctggtgtttttggaaggaggagaaaca

SEQ ID NO: 3524 - DNA, 122 bp, Homo sapiens
  misc_feature (61)..(62): /note="This region represents a CpG dinucleotide"
  misc_feature (61)..(61): /note="Nucleotide may be methylated to form 5-methylcytosine"
gcgaggtctcacccgccccacgcccctcccgcagaatccagaaggtgtccaagatcacgccgcccgtgctcatcttccaggacacgaaatacgaggtgatggacttctcgcacgggctggcg

SEQ ID NO: 3525 - DNA, 122 bp, Homo sapiens
  misc_feature (61)..(62): /note="This region represents a CpG dinucleotide"
  misc_feature (61)..(61): /note="Nucleotide may be methylated to form 5-methylcytosine"
agcgtgtggttagcgtgtgctcagcgtgtggttaccgtgtgcacagcacgagcttgaactcgctttgtcagaactcggttctttgtggtctgcagaaaccttttctgagcagcagctttagt

SEQ ID NO: 3526 - DNA, 122 bp, Homo sapiens
  misc_feature (61)..(62): /note="This region represents a CpG dinucleotide"
  misc_feature (61)..(61): /note="Nucleotide may be methylated to form 5-methylcytosine"
tccctcatttttctttacagttagcaccatttacccattcacggagaaccttacagttctcgcaacagggtgatcactcagtaagtactgttgtccctttggtctgtttctggcagcgatta

SEQ ID NO: 3527 - DNA, 122 bp, Homo sapiens
  misc_feature (61)..(62): /note="This region represents a CpG dinucleotide"
  misc_feature (61)..(61): /note="Nucleotide may be methylated to form 5-methylcytosine"
acttcatgaaagaccctgaaccctgaggaggaagaaagatagaagataagagttaattggcgctaggctttgttgtaggaagtttgtaagttttaaaatagcaagtagattcacgtagacct

SEQ ID NO: 3528 - DNA, 122 bp, Homo sapiens
  misc_feature (61)..(62): /note="This region represents a CpG dinucleotide"
  misc_feature (61)..(61): /note="Nucleotide may be methylated to form 5-methylcytosine"
gaagacaaccagctgacttttccaacggaactccacagttggtaccacaaatttgcattccggtcgtttctacgaaagaccacctgacgtaattttaggctcatgcttttctgtggaaggac

SEQ ID NO: 3529 - DNA, 122 bp, Homo sapiens
  misc_feature (61)..(62): /note="This region represents a CpG dinucleotide"
  misc_feature (61)..(61): /note="Nucleotide may be methylated to form 5-methylcytosine"
tcaagtagcaaacttgagcccaagtcttctgattttaattcccatgctctttttaaggcacgctacccacacataccaacagggagatgcgacctgggcagtaggctgtgagatgtgatgcc

SEQ ID NO: 3530 - DNA, 122 bp, Homo sapiens
  misc_feature (61)..(62): /note="This region represents a CpG dinucleotide"
  misc_feature (61)..(61): /note="Nucleotide may be methylated to form 5-methylcytosine"
agggccctgaggtgggaggggccgggcggcctcaggctcagcgaggggctgaggggccaacgtggccggagtggagtgggcgaggggagggagcgctggccaggagagacaaccacgagcca

SEQ ID NO: 3531 - DNA, 122 bp, Homo sapiens
  misc_feature (61)..(62): /note="This region represents a CpG dinucleotide"
  misc_feature (61)..(61): /note="Nucleotide may be methylated to form 5-methylcytosine"
cggtccctgctagggacgctgcgctctccgagtgcgagttttcgccaaactgataaagcacgcagaaccgcaatccccaaactaacactgaacccggacccgcgatccccaaactgacaagg

SEQ ID NO: 3532 - DNA, 122 bp, Homo sapiens
  misc_feature (61)..(62): /note="This region represents a CpG dinucleotide"
  misc_feature (61)..(61): /note="Nucleotide may be methylated to form 5-methylcytosine"
actccagctcctctgcctacaggctgtggcccagggcaggttgcttcatcgctcttagtccgagtctcctcatttgtgaaataggggtaataatagtatctatctatctctcagcgttgtgg

SEQ ID NO: 3533 - DNA, 122 bp, Homo sapiens
  misc_feature (61)..(62): /note="This region represents a CpG dinucleotide"
  misc_feature (61)..(61): /note="Nucleotide may be methylated to form 5-methylcytosine"
tggagaaggtagaggagcgagactatgccaaacaatgcaaaataaataggagattttactcgtcacccagttgtatggtagtgaaaacctaaatgaattgcagtcagccaaaaattgctttt

SEQ ID NO: 3534 - DNA, 122 bp, Homo sapiens
  misc_feature (61)..(62): /note="This region represents a CpG dinucleotide"
  misc_feature (61)..(61): /note="Nucleotide may be methylated to form 5-methylcytosine"
gggtggggtgtaggtgacaagcaatcgagagtaggtgatgcatgcatttcctaactggcacgcaatcacattgcattccaagactacattacttatagggttctgttttacagatgcatggc

SEQ ID NO: 3535 - DNA, 122 bp, Homo sapiens
  misc_feature (61)..(62): /note="This region represents a CpG dinucleotide"
  misc_feature (61)..(61): /note="Nucleotide may be methylated to form 5-methylcytosine"
tctctattacagatgagacaacaggctcagaaagtttaaagaactcattgaaagtcaccccgatggtaaatggtagatttggattcaacaatgtatgctggcatcagaccagataaacttac

SEQ ID NO: 3536 - DNA, 122 bp, Homo sapiens
  misc_feature (61)..(62): /note="This region represents a CpG dinucleotide"
  misc_feature (61)..(61): /note="Nucleotide may be methylated to form 5-methylcytosine"
tttgccactgcggcttgttgtcaagaaatggaacttcagaaaacccccagatatacactgcgttaggtaaggatttcattctaatcgagtccaatgtgaccctggctttccctcccgtagtt

SEQ ID NO: 3537 - DNA, 122 bp, Homo sapiens
  misc_feature (61)..(62): /note="This region represents a CpG dinucleotide"
  misc_feature (61)..(61): /note="Nucleotide may be methylated to form 5-methylcytosine"
gggctcgtcctggccccgcccacctctgggtcggaactatggtggttctgtgagggggggcgtcctgcactttcgcgccgtatccctccgccccccttcccgacaccctcgcggagagcggt

SEQ ID NO: 3538 - DNA, 122 bp, Homo sapiens
  misc_feature (61)..(62): /note="This region represents a CpG dinucleotide"
  misc_feature (61)..(61): /note="Nucleotide may be methylated to form 5-methylcytosine"
atagcaacgtatgtctcatgggttactactgtcagagtcaaatgaggtaattgtaggtaacgccctttgcacagtgtcaggcacaccatgagagctggaaaagcgttggcttttaacattcc

SEQ ID NO: 3539 - DNA, 122 bp, Homo sapiens
  misc_feature (61)..(62): /note="This region represents a CpG dinucleotide"
  misc_feature (61)..(61): /note="Nucleotide may be methylated to form 5-methylcytosine"
agaaggcttccaggagggagtgatggcacaatctgggaagttgggatggctggttctggccgcagggcctctgcactggctgctcctgggaacaccctccacctgcatccccgagccacgtc

SEQ ID NO: 3540 - DNA, 122 bp, Homo sapiens
  misc_feature (61)..(62): /note="This region represents a CpG dinucleotide"
  misc_feature (61)..(61): /note="Nucleotide may be methylated to form 5-methylcytosine"
ccaaaattgtttatttgacgtactgctcaacagtgaaaatccttttgctagaaagtagcacgtgtataataaacagaatgtaaccagcaaaataaagtgacagtagattctatcagcttttc

SEQ ID NO: 3541 - DNA, 122 bp, Homo sapiens
  misc_feature (61)..(62): /note="This region represents a CpG dinucleotide"
  misc_feature (61)..(61): /note="Nucleotide may be methylated to form 5-methylcytosine"
gacttattgaatcttttcacagttcagaattaaactttctccactgctaactgcagacagcgtagaatgaaagttgagtcttaactgacagtcctctccttagatcaatctttgcaaaagcc

SEQ ID NO: 3542 - DNA, 122 bp, Homo sapiens
  misc_feature (61)..(62): /note="This region represents a CpG dinucleotide"
  misc_feature (61)..(61): /note="Nucleotide may be methylated to form 5-methylcytosine"
caagcctaaagaagattggcagcttctgcttctttcctcttggaacatactaccttagaacgaactaccagcttttgaggaagtccaagcagccacataaagaggcccacatgaaagagaat

SEQ ID NO: 3543 - DNA, 122 bp, Homo sapiens
  misc_feature (61)..(62): /note="This region represents a CpG dinucleotide"
  misc_feature (61)..(61): /note="Nucleotide may be methylated to form 5-methylcytosine"
gtgtggacttgccactacaaatcttgagggtaaactgcttatctccccacctctctgccccgtttatctgaggcgataacgatctctaaacacgaggtatcgaatggagcccaatgaatttc

SEQ ID NO: 3544 - DNA, 122 bp, Homo sapiens
  misc_feature (61)..(62): /note="This region represents a CpG dinucleotide"
  misc_feature (61)..(61): /note="Nucleotide may be methylated to form 5-methylcytosine"
taaacaattaaatctggatatctatgacagggtcggggagggagagattattacttcagacgaccccaaatcctcatgggttaaaagaaacagcaaacccctgaccagaactggcgagaatg

SEQ ID NO: 3545 - DNA, 122 bp, Homo sapiens
  misc_feature (61)..(62): /note="This region represents a CpG dinucleotide"
  misc_feature (61)..(61): /note="Nucleotide may be methylated to form 5-methylcytosine"
caaaacttttcacaaaaattttgtgctatcacacaagggcacgaactgtcacaaggctgccgtggatgatcacagggttgatagttgtaaacatggttagaggagccgtctgagtaaagata

SEQ ID NO: 3546 - DNA, 122 bp, Homo sapiens
  misc_feature (61)..(62): /note="This region represents a CpG dinucleotide"
  misc_feature (61)..(61): /note="Nucleotide may be methylated to form 5-methylcytosine"
atctgatagtggttacgggctattatgcaagatcatgaatccttttcttttttttcatctcgtcagccagtacagaatgaaggatcatgaatcttaaaactgatttcctgagaagtaataag

SEQ ID NO: 3547 - DNA, 122 bp, Homo sapiens
  misc_feature (61)..(62): /note="This region represents a CpG dinucleotide"
  misc_feature (61)..(61): /note="Nucleotide may be methylated to form 5-methylcytosine"
aggaaattaatttaaacctatttaataaaacgaatggttttgtaagttggtgtaagggtgcgtcagcgtaagtagtagagagtagaaatctataagttcctgatggtcaaaatggtcaagtt

SEQ ID NO: 3548 - DNA, 122 bp, Homo sapiens
  misc_feature (61)..(62): /note="This region represents a CpG dinucleotide"
  misc_feature (61)..(61): /note="Nucleotide may be methylated to form 5-methylcytosine"
gggcagggggagctgcgaggagccttttttttttttttttttcctgcgcagagccccttgcgtgacacacagtaggcgctcaatacatgtttattttcagttgagtgttgcttcagctttta

SEQ ID NO: 3549 - DNA, 122 bp, Homo sapiens
  misc_feature (61)..(62): /note="This region represents a CpG dinucleotide"
  misc_feature (61)..(61): /note="Nucleotide may be methylated to form 5-methylcytosine"
gcccggaagtggaggaggaacgcggtggggcggggcggggccccagatcaccgcgggaggcggagccgcaggcctggggtggggctgggagtgtgggcgtgggaaggggtcggtgggagggg

SEQ ID NO: 3550 - DNA, 122 bp, Homo sapiens
  misc_feature (61)..(62): /note="This region represents a CpG dinucleotide"
  misc_feature (61)..(61): /note="Nucleotide may be methylated to form 5-methylcytosine"
gaaaagtgtattcagatggtttccaaggcacagaggagagtcattcctaaagttatacaacgctgggtcactgtatcctctattaaacaatgtttctcattttctgaattatttttatcacc

SEQ ID NO: 3551 - DNA, 122 bp, Homo sapiens
  misc_feature (61)..(62): /note="This region represents a CpG dinucleotide"
  misc_feature (61)..(61): /note="Nucleotide may be methylated to form 5-methylcytosine"
aggagctagaagtctcagataagtggttgcaagggtgaatactggagtctaacacatctgcgtctaaacttgtctccgactttcaccaattgagtggcccggggcaagatacctaaacttct

SEQ ID NO: 3552 - DNA, 122 bp, Homo sapiens
  misc_feature (61)..(62): /note="This region represents a CpG dinucleotide"
  misc_feature (61)..(61): /note="Nucleotide may be methylated to form 5-methylcytosine"
gagtcctctcaggagaaatgaaagcgctgtctctttaggtgcccactccttacccaccagcggagcaatgttttccaggctggccaggctccagaagctcactaaggaagttggcttggggc

SEQ ID NO: 3553 - DNA, 122 bp, Homo sapiens
  misc_feature (61)..(62): /note="This region represents a CpG dinucleotide"
  misc_feature (61)..(61): /note="Nucleotide may be methylated to form 5-methylcytosine"
agagtttcaggagctctgtaccaggaaccaggggcaaagaacagtatattttttatgtcacgctgaggcacagagaggttaacttgtccaagatcaaatagtatgtgacagagctgagattg

SEQ ID NO: 3554 - DNA, 122 bp, Homo sapiens
  misc_feature (61)..(62): /note="This region represents a CpG dinucleotide"
  misc_feature (61)..(61): /note="Nucleotide may be methylated to form 5-methylcytosine"
tctggacattttacacctggtgcctattagcactccggacccgtcctcttctctcctctgcgatggctccctaatctgatgggttgatctacgaatgcagtgactttgagcatttttttacc

SEQ ID NO: 3555 - DNA, 122 bp, Homo sapiens
  misc_feature (61)..(62): /note="This region represents a CpG dinucleotide"
  misc_feature (61)..(61): /note="Nucleotide may be methylated to form 5-methylcytosine"
ccaggggactgatataaatcagccttcccagtgtcagtgtgtaacaacttcctgcgagggcgggaaaaaggaagtgtcctctcatgttggctctgcaattcataacctgtaagactcaagat

SEQ ID NO: 3556 - DNA, 122 bp, Homo sapiens
  misc_feature (61)..(62): /note="This region represents a CpG dinucleotide"
  misc_feature (61)..(61): /note="Nucleotide may be methylated to form 5-methylcytosine"
ctaattttttggcttttaataagatccttttaatattttcaatatacctgtgaaggtgttcgtgtctgaaacacttcatttgtgcagtaattgcagttttagagtaagatggttcaaaataa

SEQ ID NO: 3557 - DNA, 122 bp, Homo sapiens
  misc_feature (61)..(62): /note="This region represents a CpG dinucleotide"
  misc_feature (61)..(61): /note="Nucleotide may be methylated to form 5-methylcytosine"
ttgcctgggttttattcctagctccccccagttattattgggtaggtcagtgtctcaaaccgtcagcttcctcattgtaaaacatgacaataatagcacctacttatgagggttgttttggg

SEQ ID NO: 3558 - DNA, 122 bp, Homo sapiens
  misc_feature (61)..(62): /note="This region represents a CpG dinucleotide"
  misc_feature (61)..(61): /note="Nucleotide may be methylated to form 5-methylcytosine"
ccccagcccacactacctgtggtggtgatgaaggcgtaggacttggaggtctgccccgcccgcaccccgtggacctccacgtggtaggtggtgccgggcctgaggtcgggcaggctgacggt

SEQ ID NO: 3559 - DNA, 122 bp, Homo sapiens
  misc_feature (61)..(62): /note="This region represents a CpG dinucleotide"
  misc_feature (61)..(61): /note="Nucleotide may be methylated to form 5-methylcytosine"
catgcctctgtgcacccaccaggtccttaataaataatctgttaactgccatttttagaacgctgtattctaaatctcatttcctcagcaggaagcccatgcccttaggggttaggatctgt

SEQ ID NO: 3560 - DNA, 122 bp, Homo sapiens
  misc_feature (61)..(62): /note="This region represents a CpG dinucleotide"
  misc_feature (61)..(61): /note="Nucleotide may be methylated to form 5-methylcytosine"
ttctctcagcttccagctcaggaggcggagtgggaggagcgggcctggcggccgtgggggcggggctgctccactaacggttactggtcgctgctgccgccgcgctcctcccccggctgcgg

SEQ ID NO: 3561 - DNA, 122 bp, Homo sapiens
  misc_feature (61)..(62): /note="This region represents a CpG dinucleotide"
  misc_feature (61)..(61): /note="Nucleotide may be methylated to form 5-methylcytosine"
tagagacgggcgggcctcattctgtcaggttgtaggttaattccccaactcaaacttccccgatcaaacattgtcaggccaggcgactgttttggtttatggatgataaagtatagggccaa

SEQ ID NO: 3562 - DNA, 122 bp, Homo sapiens
  misc_feature (61)..(62): /note="This region represents a CpG dinucleotide"
  misc_feature (61)..(61): /note="Nucleotide may be methylated to form 5-methylcytosine"
ccattcgtcatggcaacacgaggccgctaatgagccctcattgcatattcatgtttgtggcgtttcttccctcccaccctgaactagtgcctgcagatatctccacctcaagctgacgctca

SEQ ID NO: 3563 - DNA, 122 bp, Homo sapiens
  misc_feature (61)..(62): /note="This region represents a CpG dinucleotide"
  misc_feature (61)..(61): /note="Nucleotide may be methylated to form 5-methylcytosine"
tcaggtcagctgtcggccaccaggccagggtttgccactggcaagttggattttgtgttacgtgcctaaccaggagttgtcaccgcttgaggcttaacctggttctgggcggctcggtgtgt

SEQ ID NO: 3564 - DNA, 122 bp, Homo sapiens
  misc_feature (61)..(62): /note="This region represents a CpG dinucleotide"
  misc_feature (61)..(61): /note="Nucleotide may be methylated to form 5-methylcytosine"
gtgggagagcttgagggggagggaatactcacatcaggaacatgggatcctcaggctccacgtccctcatgaagcggaacatcctgatctcagctccagggggctccacactggaaagatat

SEQ ID NO: 3565 - DNA, 122 bp, Homo sapiens
  misc_feature (61)..(62): /note="This region represents a CpG dinucleotide"
  misc_feature (61)..(61): /note="Nucleotide may be methylated to form 5-methylcytosine"
atgccaagataattcccacccacagacatactcacgattcatcttttcacgcaactttcacggagcatttactacgtgttctaggcctgtactcgatactaagaggagaaagacaaaacaag

SEQ ID NO: 3566 - DNA, 122 bp, Homo sapiens
  misc_feature (61)..(62): /note="This region represents a CpG dinucleotide"
  misc_feature (61)..(61): /note="Nucleotide may be methylated to form 5-methylcytosine"
cggtgggctgtgctacccccaggtcgactcctccttgtccctggcactgctgcgtctccccggcaccagcagaagtttccaggcagcagcgcgggtcctgacctggctgctcagtgctgccc

SEQ ID NO: 3567 - DNA, 122 bp, Homo sapiens
  misc_feature (61)..(62): /note="This region represents a CpG dinucleotide"
  misc_feature (61)..(61): /note="Nucleotide may be methylated to form 5-methylcytosine"
ctcaactcaggccattaacatggtaataccatcctgtttgcatctcctttgtctgtccagcgtttgtctgggatcctggcctctggatgctggaaatacttaggccccaaaggagagggagc

SEQ ID NO: 3568 - DNA, 122 bp, Homo sapiens
  misc_feature (61)..(62): /note="This region represents a CpG dinucleotide"
  misc_feature (61)..(61): /note="Nucleotide may be methylated to form 5-methylcytosine"
acacccaaggaattgaaagggggtctggaagagacatgtgcacatctgtgttcctagcaacggaactcaccatagccaaaagctggaagcagccgtggtgttcaccaaggcgtcatggctgc

SEQ ID NO: 3569 - DNA, 122 bp, Homo sapiens
  misc_feature (61)..(62): /note="This region represents a CpG dinucleotide"
  misc_feature (61)..(61): /note="Nucleotide may be methylated to form 5-methylcytosine"
gtgtgtactagcagcgttttcacagtgaaaactgcacagaccctctcccagggctccccgcgagcccactgatccacaccggagcccagggccagccatttctgtatggcttttgactggct

SEQ ID NO: 3570 - DNA, 122 bp, Homo sapiens
  misc_feature (61)..(62): /note="This region represents a CpG dinucleotide"
  misc_feature (61)..(61): /note="Nucleotide may be methylated to form 5-methylcytosine"
gccccaggctgtctgactctagagcccaccccctcagcttcagcaggctgcctccctccccgccacctgctagggaagcagctgactcatggcttttgattcattcagttctcttctgcatt

SEQ ID NO: 3571 - DNA, 122 bp, Homo sapiens
  misc_feature (61)..(62): /note="This region represents a CpG dinucleotide"
  misc_feature (61)..(61): /note="Nucleotide may be methylated to form 5-methylcytosine"
gctgagaaatgcattgttagatgatttcatcatcttgcaaaagtgtattatgaaagagaacggcaatgatttttcctattcacactggccactagttgcatgagagcgggccctctaattag

SEQ ID NO: 3572 - DNA, 122 bp, Homo sapiens
  misc_feature (61)..(62): /note="This region represents a CpG dinucleotide"
  misc_feature (61)..(61): /note="Nucleotide may be methylated to form 5-methylcytosine"
cggccaggaaagggcagaggaatggcctctcccatccaaagctggcttgttttatctccacgagcattcgctccagatgcttctaaatgtgcagtgagtttttgatccagactgaaccctgg

SEQ ID NO: 3573 - DNA, 122 bp, Homo sapiens
  misc_feature (61)..(62): /note="This region represents a CpG dinucleotide"
  misc_feature (61)..(61): /note="Nucleotide may be methylated to form 5-methylcytosine"
ttggtaaatagaagctgcctcagtgatacttcagtcattccccaccatgactaatagcatcgttgcacctggtttcatttctgggtccttgcacatctttacctctctgtgttactcacagc

SEQ ID NO: 3574 - DNA, 122 bp, Homo sapiens
  misc_feature (61)..(62): /note="This region represents a CpG dinucleotide"
  misc_feature (61)..(61): /note="Nucleotide may be methylated to form 5-methylcytosine"
gttatcaggaactaccgcactcagcaggggacaggtataaggaaatcccttctgcaatgacgtgaaggcatctaagatgcaaagaagctggtctggaacacccacttccacaacacagcacc

SEQ ID NO: 3575 - DNA, 122 bp, Homo sapiens
  misc_feature (61)..(62): /note="This region represents a CpG dinucleotide"
  misc_feature (61)..(61): /note="Nucleotide may be methylated to form 5-methylcytosine"
agccaggcaatgtaaaagcaacacaaactcaggattcccaagtgttataattcaaccatacgaatttgtcctacattgaaatcatgcacacacatacctgtacacacagaaatttattttca

SEQ ID NO: 3576 - DNA, 122 bp, Homo sapiens
  misc_feature (61)..(62): /note="This region represents a CpG dinucleotide"
  misc_feature (61)..(61): /note="Nucleotide may be methylated to form 5-methylcytosine"
gagcatttccttttcagagattttctgactctgtgtgtatgttttcagtttttctttctgcgttctgcttaaggcagcattgtcacccctgtggatccccacgactgtgaaacaagacagaa

SEQ ID NO: 3577 - DNA, 122 bp, Homo sapiens
  misc_feature (61)..(62): /note="This region represents a CpG dinucleotide"
  misc_feature (61)..(61): /note="Nucleotide may be methylated to form 5-methylcytosine"
gctgatttcttgtttcagcaacatcccgggcataaaacagcattttttgttatttactcacgtaaataatcagttgctggaggctgttctggaaagcaggacacatacagcacacataggaa

SEQ ID NO: 3578 - DNA, 122 bp, Homo sapiens
  misc_feature (61)..(62): /note="This region represents a CpG dinucleotide"
  misc_feature (61)..(61): /note="Nucleotide may be methylated to form 5-methylcytosine"
atcgtggctgtgtcacttcctggctgattttggacaagtcacttgttctctctggaccttcgtttcctccctcataggattgttgcaaggattagctaggatatagctataaagcacttaga

SEQ ID NO: 3579 - DNA, 122 bp, Homo sapiens
  misc_feature (61)..(62): /note="This region represents a CpG dinucleotide"
  misc_feature (61)..(61): /note="Nucleotide may be methylated to form 5-methylcytosine"
tccagcgtgagttaccagaaaccacaagagagagagagagcgtgcaagccccaaagcgagcgacatgtccctttggggagcagtccctctgcaccccagagtgaggaggacgcaggggtcag

SEQ ID NO: 3580 - DNA, 122 bp, Homo sapiens
  misc_feature (61)..(62): /note="This region represents a CpG dinucleotide"
  misc_feature (61)..(61): /note="Nucleotide may be methylated to form 5-methylcytosine"
tttagatgatccaggtctcagatttttggagattttgctcccctgccaactttcctctttcgctttttaggacttgagtcttaaacaaacaactaagtaaaaaagaaatatatttctatttg

SEQ ID NO: 3581 - DNA, 122 bp, Homo sapiens
  misc_feature (61)..(62): /note="This region represents a CpG dinucleotide"
  misc_feature (61)..(61): /note="Nucleotide may be methylated to form 5-methylcytosine"
tgggccgcagtggcgagtgttacagctagattagagaaacccgcggacccaaagagggtgcggtggcaagatttattagagcaaaagcgaaagtaaaatgaaagcaaaagtaaagcttccac

SEQ ID NO: 3582 - DNA, 122 bp, Homo sapiens
  misc_feature (61)..(62): /note="This region represents a CpG dinucleotide"
  misc_feature (61)..(61): /note="Nucleotide may be methylated to form 5-methylcytosine"
tgaacttgccttacatccttattgggccatctgaggttcacacaagataacagctatacacgggccttgaaaaatgttaaggacacacactttggggatggggttggcttcatgatcatatt

SEQ ID NO: 3583 - DNA, 122 bp, Homo sapiens
  misc_feature (61)..(62): /note="This region represents a CpG dinucleotide"
  misc_feature (61)..(61): /note="Nucleotide may be methylated to form 5-methylcytosine"
tgcttgaggcagaaaaggaagtctctaaaacaacccaaatggttccccagggagctttcccgtgagtgtacactttaaaggtcaggcacataaagttaaatgagcaatagataactaaaaat

SEQ ID NO: 3584 - DNA, 122 bp, Homo sapiens
  misc_feature (61)..(62): /note="This region represents a CpG dinucleotide"
  misc_feature (61)..(61): /note="Nucleotide may be methylated to form 5-methylcytosine"
tccctgtgagattcatgtcatttgtccatatcaagttttctccatcctggtcactggcaccgctgtattagtgtgctattgctacataacagatcaccacaaagtgagtggcttaaagcaac

SEQ ID NO: 3585 - DNA, 122 bp, Homo sapiens
  misc_feature (61)..(62): /note="This region represents a CpG dinucleotide"
  misc_feature (61)..(61): /note="Nucleotide may be methylated to form 5-methylcytosine"
ggcttggtgccactgagcagacccaggagggcctcactggtaagctcttcggccttggcgcgtcactgctaacccaggcgagcaccctcatgtctgtgcagcccgaggctgacacccagggc

SEQ ID NO: 3586 - DNA, 122 bp, Homo sapiens
  misc_feature (61)..(62): /note="This region represents a CpG dinucleotide"
  misc_feature (61)..(61): /note="Nucleotide may be methylated to form 5-methylcytosine"
ctaaaacaacctatagccagttacatgtggtcagaatctgtacccctcccttgcccagcacgatcaatttggcagttatgaaaataaagggaccctgggatccaagttctttactgagcata

SEQ ID NO: 3587 - DNA, 122 bp, Homo sapiens
  misc_feature (61)..(62): /note="This region represents a CpG dinucleotide"
  misc_feature (61)..(61): /note="Nucleotide may be methylated to form 5-methylcytosine"
gactcagcgcgttgtggacgggctcatctacaaccgggaggaatacgtgcattttgacagcgcagtgggggagttcctagcagtgatggagctggggcggcccataggcgagtacttcaata

SEQ ID NO: 3588 - DNA, 122 bp, Homo sapiens
  misc_feature (61)..(62): /note="This region represents a CpG dinucleotide"
  misc_feature (61)..(61): /note="Nucleotide may be methylated to form 5-methylcytosine"
accctaaaaacaaggaagtaggcagtccagtcctgacctgctcggagttgaagcagtcggcgttggaagagcctgaacacccggcctaccacttgtccttccatctctgggccttcaggaca

SEQ ID NO: 3589 - DNA, 122 bp, Homo sapiens
  misc_feature (61)..(62): /note="This region represents a CpG dinucleotide"
  misc_feature (61)..(61): /note="Nucleotide may be methylated to form 5-methylcytosine"
gcataaaatgacctgctgtgacagtcctgaggcaatatcataagaacaaactcacatgaacgtctgatatctagttatatgtggatttgggacttttaaaactttcgaatatgaaagataca

SEQ ID NO: 3590 - DNA, 122 bp, Homo sapiens
  misc_feature (61)..(62): /note="This region represents a CpG dinucleotide"
  misc_feature (61)..(61): /note="Nucleotide may be methylated to form 5-methylcytosine"
agctctgtcgtctgcggagggcttaagtgttaacagcttagtggaccctctgtctttacacgtgaggcggctgccctctaccagcgagggcgaagggtcggtgtgacagcattttgtatcca

SEQ ID NO: 3591 - DNA, 122 bp, Homo sapiens
  misc_feature (61)..(62): /note="This region represents a CpG dinucleotide"
  misc_feature (61)..(61): /note="Nucleotide may be methylated to form 5-methylcytosine"
ggaattcagagctagagtcgctttacaattcggttccattgtcgagacggagagattccacgaccatgacagaaagtgagactatttaggatttgccaaataggatgttttctgaaccaatc

SEQ ID NO: 3592 - DNA, 122 bp, Homo sapiens
  misc_feature (61)..(62): /note="This region represents a CpG dinucleotide"
  misc_feature (61)..(61): /note="Nucleotide may be methylated to form 5-methylcytosine"
ggacttagtgcaatgcctggcatgagggcagcctcaattacatgatcattatcactggggcgtgacttctgtcccccacccgctgagtgtctgtgagtgtctgagcgttggggcaggaagtg

SEQ ID NO: 3593 - DNA, 122 bp, Homo sapiens
  misc_feature (61)..(62): /note="This region represents a CpG dinucleotide"
  misc_feature (61)..(61): /note="Nucleotide may be methylated to form 5-methylcytosine"
ccactagactctgcaggtccccatgggaagcgccctgccctccacgcccacctacgaggtcgcgacccccctaccccgaaccgccctctgcagacaacgaggctcggaggaggcaagcagcg

SEQ ID NO: 3594 - DNA, 122 bp, Homo sapiens
  misc_feature (61)..(62): /note="This region represents a CpG dinucleotide"
  misc_feature (61)..(61): /note="Nucleotide may be methylated to form 5-methylcytosine"
gggcgaaggaagcacatttattcacagtggagacaggcctcttgcattgtcaattttacccgtgtgagaattgttgttcctgttggtgactgggtcactgataaaagattaaatcagattgg

SEQ ID NO: 3595 - DNA, 122 bp, Homo sapiens
  misc_feature (61)..(62): /note="This region represents a CpG dinucleotide"
  misc_feature (61)..(61): /note="Nucleotide may be methylated to form 5-methylcytosine"
ctggactgagagagcaaagagaaaatgagtcatggatattgtgttaaatatataagcgttcgctggctttctttgaaatgttttctcatctaaacttgggagctgctggctttgtatttact

SEQ ID NO: 3596 - DNA, 122 bp, Homo sapiens
  misc_feature (61)..(62): /note="This region represents a CpG dinucleotide"
  misc_feature (61)..(61): /note="Nucleotide may be methylated to form 5-methylcytosine"
caatgactactgagcaactacggatctggctgctgccaccacagatgagtttgcagagaacgtgattttggaaaaaaacctacttaaatggtacataattttataaaaattagaagggtgtt

SEQ ID NO: 3597 - DNA, 122 bp, Homo sapiens
  misc_feature (61)..(62): /note="This region represents a CpG dinucleotide"
  misc_feature (61)..(61): /note="Nucleotide may be methylated to form 5-methylcytosine"
tttcttcttcccagcttatattagagtaactcagcaccaattgattagattccccagcctcgctttgtagccagaatggcctatcctccctgccccatgatgtttttgctgcaaaacgaggt

SEQ ID NO: 3598 - DNA, 122 bp, Homo sapiens
  misc_feature (61)..(62): /note="This region represents a CpG dinucleotide"
  misc_feature (61)..(61): /note="Nucleotide may be methylated to form 5-methylcytosine"
acgtatgaaaaaggaaatgaagagtactagtgtgtgagagtgtatgtgtgtccacacatgcgcatgcatgctcgctaatgttagtgctcagcagtcaggaaatatgtctctaatgaaatgat

SEQ ID NO: 3599 - DNA, 122 bp, Homo sapiens
  misc_feature (61)..(62): /note="This region represents a CpG dinucleotide"
  misc_feature (61)..(61): /note="Nucleotide may be methylated to form 5-methylcytosine"
taggggcagggagccggcccagcttcaaaggcagaggctggctctccacacaccctgaggcgctattgagcaaagacagcaactgtgttcctatctggggccccagccctctgtctgccctt

SEQ ID NO: 3600 - DNA, 122 bp, Homo sapiens
  misc_feature (61)..(62): /note="This region represents a CpG dinucleotide"
  misc_feature (61)..(61): /note="Nucleotide may be methylated to form 5-methylcytosine"
acttgcatgcatcgtgtatctttcacataacatttccccatttgcttatgtcacagggttcgctaactacaggcgagaaagaaaacattcccaatgagtgcagacacacgtgccctctattg

SEQ ID NO: 3601 - DNA, 122 bp, Homo sapiens
  misc_feature (61)..(62): /note="This region represents a CpG dinucleotide"
  misc_feature (61)..(61): /note="Nucleotide may be methylated to form 5-methylcytosine"
tccatttgggaaaccatgtagccaaggctgttggggcgaaccaaggtggtgggagtccgacgggccagcagggggcgcacttgcaggtcacctgaagtccttatttacgggataaggtggag

SEQ ID NO: 3602 - DNA, 122 bp, Homo sapiens
  misc_feature (61)..(62): /note="This region represents a CpG dinucleotide"
  misc_feature (61)..(61): /note="Nucleotide may be methylated to form 5-methylcytosine"
cctttatctcactgtctctatctctagcaaggaaacctgtttcctgactctgcagaatttcgctttccccctttttccttaaaagcagagttacaaaaaaaaaaaacaaaaaaaaaatcaaa

SEQ ID NO: 3603 - DNA, 122 bp, Homo sapiens
  misc_feature (61)..(62): /note="This region represents a CpG dinucleotide"
  misc_feature (61)..(61): /note="Nucleotide may be methylated to form 5-methylcytosine"
aggcacagggactgcggtgtttgggccaacctgggctggacctggcgtcgtgtctttggacggactcagggaacatattgattagggaatggaggaccgggaggagggagacactaagccag

SEQ ID NO: 3604 - DNA, 122 bp, Homo sapiens
  misc_feature (61)..(62): /note="This region represents a CpG dinucleotide"
  misc_feature (61)..(61): /note="Nucleotide may be methylated to form 5-methylcytosine"
gccagggaggagcccacttggagcactgcccacccttcccacaaaacggcagctgccctccgtggtgacagctcatgtgctgtgcatgccctgaccatcacctctggtgtctcccctcactt

SEQ ID NO: 3605 - DNA, 122 bp, Homo sapiens
  misc_feature (61)..(62): /note="This region represents a CpG dinucleotide"
  misc_feature (61)..(61): /note="Nucleotide may be methylated to form 5-methylcytosine"
ctaccttgtgcctgtgctggcacagctctgggctactgagatgactcagtcatggggaggcggtgccacatagacatttaataaagttctgtgcagtaaggaacgtgcaaaataacacctct

SEQ ID NO: 3606 - DNA, 122 bp, Homo sapiens
  misc_feature (61)..(62): /note="This region represents a CpG dinucleotide"
  misc_feature (61)..(61): /note="Nucleotide may be methylated to form 5-methylcytosine"
aggggaacaccgacaataataactactgagctcctaccacgtaggcagcattatgctaagcgctttgcatgcacgatttcgcaaatcctcaccaggacccccgcagacagctattaccccta

SEQ ID NO: 3607 - DNA, 122 bp, Homo sapiens
  misc_feature (61)..(62): /note="This region represents a CpG dinucleotide"
  misc_feature (61)..(61): /note="Nucleotide may be methylated to form 5-methylcytosine"
cgtctactcagcttggtgtctgctttacccaaaccagattagatggcctgtttgactcttcgtttgcaggttgagtctgaagtaccttatgtgtgagacaggctttaaagtttaatcttttg

SEQ ID NO: 3608 - DNA, 122 bp, Homo sapiens
  misc_feature (61)..(62): /note="This region represents a CpG dinucleotide"
  misc_feature (61)..(61): /note="Nucleotide may be methylated to form 5-methylcytosine"
aatgtagtagaaacaggcttcccagtctatcatgtgtcattgaaacgcaaaacacaatagcgtttgtcttgttacaaaccaggaggctgtaaatctattatttattttttattaaaggtgca

SEQ ID NO: 3609 - DNA, 122 bp, Homo sapiens
  misc_feature (61)..(62): /note="This region represents a CpG dinucleotide"
  misc_feature (61)..(61): /note="Nucleotide may be methylated to form 5-methylcytosine"
ctacacatatgcataaacatgcgcatgtctccctacctcttgcctcatccactttttccacgcttcctcaataggttgcccaagaaaagaattacatcagtgctgagaggaaaatatttgtg

SEQ ID NO: 3610 - DNA, 122 bp, Homo sapiens
  misc_feature (61)..(62): /note="This region represents a CpG dinucleotide"
  misc_feature (61)..(61): /note="Nucleotide may be methylated to form 5-methylcytosine"
tgtatgagggattgcacaaatatttccccacatccaacatctcgcaaggagatggactcacgtgcatgttcaagttcagtctccaagttgagaagaaagctttctggtagcaatgctgcaca

SEQ ID NO: 3611 - DNA, 122 bp, Homo sapiens
  misc_feature (61)..(62): /note="This region represents a CpG dinucleotide"
  misc_feature (61)..(61): /note="Nucleotide may be methylated to form 5-methylcytosine"
aaattattgttaggaaatgggtctaataaaatatcttaatatttaaggatattgtatacgcggggggtatgctttattgacaatttcattttccaattagtaattttgttgtaatatatctg

SEQ ID NO: 3612 - DNA, 122 bp, Homo sapiens
  misc_feature (61)..(62): /note="This region represents a CpG dinucleotide"
  misc_feature (61)..(61): /note="Nucleotide may be methylated to form 5-methylcytosine"
atggtaaaacagggagattccaaactagcttttaagccttttgcagtcaccagctctcttcggtcctttacctgctcaggaagttgtttcttacttcagatgagtaagacatttttaggaaa

SEQ ID NO: 3613 - DNA, 122 bp, Homo sapiens
  misc_feature (61)..(62): /note="This region represents a CpG dinucleotide"
  misc_feature (61)..(61): /note="Nucleotide may be methylated to form 5-methylcytosine"
acaatggtcacaatttactaagcataactgtctcctgcaaggatgacgaaatccatatagcgcaaggatttgaagcccaagaagaggactttgacctatggatttctcaggaggtttcgtta

SEQ ID NO: 3614 - DNA, 122 bp, Homo sapiens
  misc_feature (61)..(62): /note="This region represents a CpG dinucleotide"
  misc_feature (61)..(61): /note="Nucleotide may be methylated to form 5-methylcytosine"
agataaatatctcgaaatagctgaagagtgctcatgtggaagacagaattggcctttccccgtgctctcctgagggacagaggtttggcttttgccccatgctcctgagtgggtagaagcta

SEQ ID NO: 3615 - DNA, 122 bp, Homo sapiens
  misc_feature (61)..(62): /note="This region represents a CpG dinucleotide"
  misc_feature (61)..(61): /note="Nucleotide may be methylated to form 5-methylcytosine"
tctgagatgtgttttgtagggaaagaaacctatcttaggaatgatgtccggtcacttgtacgagtccccaggacaatcaagctgacttacttgtcaagtcttaaacatcacctcttcgggga

SEQ ID NO: 3616 - DNA, 122 bp, Homo sapiens
  misc_feature (61)..(62): /note="This region represents a CpG dinucleotide"
  misc_feature (61)..(61): /note="Nucleotide may be methylated to form 5-methylcytosine"
gatttggcaactctgctgttcttagctgggcttgcatacatgactgagggtgtccactgacggctggcagattgaggctagctgcagctgaagtgattggcatgactcatctctgctctgca

SEQ ID NO: 3617 - DNA, 122 bp, Homo sapiens
  misc_feature (61)..(62): /note="This region represents a CpG dinucleotide"
  misc_feature (61)..(61): /note="Nucleotide may be methylated to form 5-methylcytosine"
ttactgggaataatcaagagttgattgtagtaaattatagtagtagaatacttaatgatacgtccccagaaatgcagtcaaaaagtagttgtgtacatggaataactacttctacatttttc

SEQ ID NO: 3618 - DNA, 122 bp, Homo sapiens
  misc_feature (61)..(62): /note="This region represents a CpG dinucleotide"
  misc_feature (61)..(61): /note="Nucleotide may be methylated to form 5-methylcytosine"
aaggagcttagagtaatcttagctaacctgttttgtagttttgccaagggccagccctagcgggtaggttaagcaagatgccagcattgtgggttgattggccttcttttggtgctttttta

SEQ ID NO: 3619 - DNA, 122 bp, Homo sapiens
  misc_feature (61)..(62): /note="This region represents a CpG dinucleotide"
  misc_feature (61)..(61): /note="Nucleotide may be methylated to form 5-methylcytosine"
ttttcatctgagtgactgagtttcttcctgctgactgtttggagttcccctgtgagctggcgtaaggtacttcttcctgtggctcagagtaagactctgagagccttggggactgccctctg

SEQ ID NO: 3620 - DNA, 122 bp, Homo sapiens
  misc_feature (61)..(62): /note="This region represents a CpG dinucleotide"
  misc_feature (61)..(61): /note="Nucleotide may be methylated to form 5-methylcytosine"
cctgggctgtttaatacacttggcactcgtgctgcctaccagctgcctggatgttttgagcgtttctaataatagctctccttctacttcagttcttcttagttctctagctctaggaaatc

SEQ ID NO: 3621 - DNA, 122 bp, Homo sapiens
  misc_feature (61)..(62): /note="This region represents a CpG dinucleotide"
  misc_feature (61)..(61): /note="Nucleotide may be methylated to form 5-methylcytosine"
tgttctgcaatcagggccaggacactgcagtcagcagccctcacaggtccaactgcagaccgctgtcaagcaaccccatgaccatatatgaaatcccaattacctgtacttatccatcgcta

SEQ ID NO: 3622 - DNA, 122 bp, Homo sapiens
  misc_feature (61)..(62): /note="This region represents a CpG dinucleotide"
  misc_feature (61)..(61): /note="Nucleotide may be methylated to form 5-methylcytosine"
tatctgtaactggttgtgatcaattagttgtaaacactgttgcacttgaccagccccagccgtggtttttatgcagaggagtcataggaccagattggtattttagtaatgctcgtgccagg

SEQ ID NO: 3623 - DNA, 122 bp, Homo sapiens
  misc_feature (61)..(62): /note="This region represents a CpG dinucleotide"
  misc_feature (61)..(61): /note="Nucleotide may be methylated to form 5-methylcytosine"
ttaacacagaaccacactgctctgttgacatttgcttgtatcctttgatggtgcttttaacgcttcatttaagtgtcaaactaggtgacaagcattaagcccagatagactatttagtctca

SEQ ID NO: 3624 - DNA, 122 bp, Homo sapiens
  misc_feature (61)..(62): /note="This region represents a CpG dinucleotide"
  misc_feature (61)..(61): /note="Nucleotide may be methylated to form 5-methylcytosine"
tgaagaaagcagagttgggatgattcttaaatttgtaacacaaatgactgcatgactggtcgttctgtcaaatgaggcagtgaaatctagatggagttcaggaaaggggcaaaagacaagtt

SEQ ID NO: 3625 - DNA, 122 bp, Homo sapiens
  misc_feature (61)..(62): /note="This region represents a CpG dinucleotide"
  misc_feature (61)..(61): /note="Nucleotide may be methylated to form 5-methylcytosine"
cgggtgctccactgcgccattcccctcaatccagggatttaacttcagcgaggctgggagcgctccgaggctggcctgtccagtccaggcaaatcttgggcaattattttactctgtgtcat

SEQ ID NO: 3626 - DNA, 122 bp, Homo sapiens
  misc_feature (61)..(62): /note="This region represents a CpG dinucleotide"
  misc_feature (61)..(61): /note="Nucleotide may be methylated to form 5-methylcytosine"
gtcagcgccggggctggggacttgtaggacagagtccgaagctgcacaacgcagcagggacgcggcccatgtaggagcctcggcccggaccgacccaactccccgtctttccagcgcgctct

SEQ ID NO: 3627 - DNA, 122 bp, Homo sapiens
  misc_feature (61)..(62): /note="This region represents a CpG dinucleotide"
  misc_feature (61)..(61): /note="Nucleotide may be methylated to form 5-methylcytosine"
gtcccagggattttccggcttaatttaggagggctgagaagagagggacgtggccggctccggaagaacctcgacagggtcttcgaggctttggaacagggtctcaagctttagaaatgtcc

SEQ ID NO: 3628 - DNA, 122 bp, Homo sapiens
  misc_feature (61)..(62): /note="This region represents a CpG dinucleotide"
  misc_feature (61)..(61): /note="Nucleotide may be methylated to form 5-methylcytosine"
gaaacaggaacctaatgacttaaaaagtcagtttagcctctcctacctcattacagaaaccgaaaggtaacctaagggtttctgtaaagaaacactaagtttccatgttcacaaagaaggaa

SEQ ID NO: 3629 - DNA, 122 bp, Homo sapiens
  misc_feature (61)..(62): /note="This region represents a CpG dinucleotide"
  misc_feature (61)..(61): /note="Nucleotide may be methylated to form 5-methylcytosine"
aggtccaaactggaaagccactcagatggccaccaataaataaactgtggtatattcatacgacagaaaataaacagcaaagaaaatgagcctcggccgggcacatggcttatgcctgtaat

SEQ ID NO: 3630 - DNA, 122 bp, Homo sapiens
  misc_feature (61)..(62): /note="This region represents a CpG dinucleotide"
  misc_feature (61)..(61): /note="Nucleotide may be methylated to form 5-methylcytosine"
aggacaagggcctctcttggggacagtggcctcttttcatgggaaagccccaggaagtgacgtgacctcttcaggctccatgcctgagcctgagtcactggctccgaggaagagtctcacag

SEQ ID NO: 3631 - DNA, 122 bp, Homo sapiens
  misc_feature (61)..(62): /note="This region represents a CpG dinucleotide"
  misc_feature (61)..(61): /note="Nucleotide may be methylated to form 5-methylcytosine"
ccttatctcaaaaaaaaaaagagtccaagctttagagaaggaaataaggctatttttaaacgggtatatattattaaattgagaccctggctatattaggtcaccctgcattcatataattt

SEQ ID NO: 3632 - DNA, 122 bp, Homo sapiens
  misc_feature (61)..(62): /note="This region represents a CpG dinucleotide"
  misc_feature (61)..(61): /note="Nucleotide may be methylated to form 5-methylcytosine"
ctcatatctatttatactcacttctgcttacttgttgcttagtttctgacctcactggctcgtcttgaactttgtttatgcctgtttctgaaaaaagaaaaagtcctgatgactgattccct

SEQ ID NO: 3633 - DNA, 122 bp, Homo sapiens
  misc_feature (61)..(62): /note="This region represents a CpG dinucleotide"
  misc_feature (61)..(61): /note="Nucleotide may be methylated to form 5-methylcytosine"
aactcgcatcaaggtttaaaataaaacccaaggccaaaagcaccaaaagaaaggttcagacggcttgtttggggatttcataagaggaagaaaaaccaaggccacagaactaagccttgaac

SEQ ID NO: 3634 - DNA, 122 bp, Homo sapiens
  misc_feature (61)..(62): /note="This region represents a CpG dinucleotide"
  misc_feature (61)..(61): /note="Nucleotide may be methylated to form 5-methylcytosine"
aggggaactcaaacatgaagacaaacccacataatactaaaaacagacagatggaaagaacgtggtttcttaatgatatcattgaagtactgaattaaccaaacctagtattaacctacctt

SEQ ID NO: 3635 - DNA, 122 bp, Homo sapiens
  misc_feature (61)..(62): /note="This region represents a CpG dinucleotide"
  misc_feature (61)..(61): /note="Nucleotide may be methylated to form 5-methylcytosine"
tagaactgaagagagtcaaggcatacttacaatctccatttgaatcttgtttttcttgctcgaatatcaatcttgatttcgcaacaccccatagcagctctgtggaggccttttttgtctgt

SEQ ID NO: 3636 - DNA, 122 bp, Homo sapiens
  misc_feature (61)..(62): /note="This region represents a CpG dinucleotide"
  misc_feature (61)..(61): /note="Nucleotide may be methylated to form 5-methylcytosine"
gaaacttaaattcagagaaattaagaatgatggagcagagcagggattgaaatttagacccgaaggcactgtcttcagcaattttattcagaaatgtggctcctttaactagatggctgtct

SEQ ID NO: 3637 - DNA, 122 bp, Homo sapiens
  misc_feature (61)..(62): /note="This region represents a CpG dinucleotide"
  misc_feature (61)..(61): /note="Nucleotide may be methylated to form 5-methylcytosine"
gcagcttggtaaattgttctcaggtggctcctttgtgcctcttctgtggccacaggaagccgtgactgggctttcctgctattccaggaagaggagaagacaggtgcagcgaactgagcacc

SEQ ID NO: 3638 - DNA, 122 bp, Homo sapiens
  misc_feature (61)..(62): /note="This region represents a CpG dinucleotide"
  misc_feature (61)..(61): /note="Nucleotide may be methylated to form 5-methylcytosine"
acagcttagtttccagccagatccatgggactgtgggtgaattccttccttcttcaacaacgttgatgctgatttcatgctgtttgtgcaacttaggcagtaaaaagtttcctttccccctt

SEQ ID NO: 3639 - DNA, 122 bp, Homo sapiens
  misc_feature (61)..(62): /note="This region represents a CpG dinucleotide"
  misc_feature (61)..(61): /note="Nucleotide may be methylated to form 5-methylcytosine"
attttaaaagactttgtccttctaagcagagcgactgtattcactgactccttttgcaggcgtgtgtctagcgggcttcgtttcaggagtgtgatgttgacacaataaaagtttctgtataa

SEQ ID NO: 3640 - DNA, 122 bp, Homo sapiens
  misc_feature (61)..(62): /note="This region represents a CpG dinucleotide"
  misc_feature (61)..(61): /note="Nucleotide may be methylated to form 5-methylcytosine"
ttgagacagagttttgctcttgttgcccaggctggagtgcaatggtgcaatctcggctcacggcaacctccgcctctcatgttcaagctattatcctgactcagctgggattacaggcaccc

SEQ ID NO: 3641 - DNA, 122 bp, Homo sapiens
  misc_feature (61)..(62): /note="This region represents a CpG dinucleotide"
  misc_feature (61)..(61): /note="Nucleotide may be methylated to form 5-methylcytosine"
ctctaaggtttactattctgttgcccagcaagtcctcttataggtatgcagcctactgtccgtgttgtttatggattcataaatttacagtgaatgtataaaacacagacttagtggacagg

SEQ ID NO: 3642 - DNA, 122 bp, Homo sapiens
  misc_feature (61)..(62): /note="This region represents a CpG dinucleotide"
  misc_feature (61)..(61): /note="Nucleotide may be methylated to form 5-methylcytosine"
gattcgattccttttcaggagaatgaaggaatctgcaaggggttgttgttacacaacttacgtgagattgtggtaaagtgccagcaatgagcctggagtagtccacttctcttcctctcctc

SEQ ID NO: 3643 - DNA, 122 bp, Homo sapiens
  misc_feature (61)..(62): /note="This region represents a CpG dinucleotide"
  misc_feature (61)..(61): /note="Nucleotide may be methylated to form 5-methylcytosine"
tggcacatacagtgtggaaacactggacaaaggatgattcacatcccaggcaggtaagagcgggacagcgcaagacttcatcatgtgactcaggatgttacacaatttaaaacttacaaatt

SEQ ID NO: 3644 - DNA, 122 bp, Homo sapiens
  misc_feature (61)..(62): /note="This region represents a CpG dinucleotide"
  misc_feature (61)..(61): /note="Nucleotide may be methylated to form 5-methylcytosine"
ggcagaattatgcctcacacggaggtgagcccctgaccaagactccaaagtcccacctcccgtcacccagctggggtgcacccagctgggacatcggttgctttcagtgagagagtcaaatg

SEQ ID NO: 3645 - DNA, 122 bp, Homo sapiens
  misc_feature (61)..(62): /note="This region represents a CpG dinucleotide"
  misc_feature (61)..(61): /note="Nucleotide may be methylated to form 5-methylcytosine"
gtgtgagggagggggaaccggagctcaggagagggatctggccacaaagatgggtgggggcggtgcacagaggattctaaagacacagagtggcacagagggcagagagcctgtggagatga

SEQ ID NO: 3646 - DNA, 122 bp, Homo sapiens
  misc_feature (61)..(62): /note="This region represents a CpG dinucleotide"
  misc_feature (61)..(61): /note="Nucleotide may be methylated to form 5-methylcytosine"
gaccctcccccatccacacatcaggttctgaaacctgaccctgccaggcaactaaagccgcgaaccccacagtgccctgagctggcctcaccctacccacgatcccaagagggtactagccg

SEQ ID NO: 3647 - DNA, 122 bp, Homo sapiens
  misc_feature (61)..(62): /note="This region represents a CpG dinucleotide"
  misc_feature (61)..(61): /note="Nucleotide may be methylated to form 5-methylcytosine"
atttattatatactttatatggccccacagaaatcatctttgactaatatattactagagcgacatatgactatattacaagctaaaagaaaaaaacaacacagggtcaataaactatctgg

SEQ ID NO: 3648 - DNA, 122 bp, Homo sapiens
  misc_feature (61)..(62): /note="This region represents a CpG dinucleotide"
  misc_feature (61)..(61): /note="Nucleotide may be methylated to form 5-methylcytosine"
accctgagctcaactcaggtcacagacacttatcaaacttggtgttgtccttcctggctgcgcctccctgggaaggaggggcccccgcagcagcagagcccacgtgatgtggggaaatcagt

SEQ ID NO: 3649 - DNA, 122 bp, Homo sapiens
  misc_feature (61)..(62): /note="This region represents a CpG dinucleotide"
  misc_feature (61)..(61): /note="Nucleotide may be methylated to form 5-methylcytosine"
gagccgccccgcctgggaggccgctctggcgcccggctggtgccgggcaggaggcccttgcggacccagcggcctcctcgtcggcaacgcccaccccgcggttcagccacggagcggatgcc

SEQ ID NO: 3650 - DNA, 122 bp, Homo sapiens
  misc_feature (61)..(62): /note="This region represents a CpG dinucleotide"
  misc_feature (61)..(61): /note="Nucleotide may be methylated to form 5-methylcytosine"
tgctgctgctgctgttgctgctgctgttgctgctgctgctgctgctcaagctgcttcttccgtttggcttctagaaccgggttctcatattgtgtcttcctgttgatgtggctggggaagat

SEQ ID NO: 3651 - DNA, 122 bp, Homo sapiens
  misc_feature (61)..(62): /note="This region represents a CpG dinucleotide"
  misc_feature (61)..(61): /note="Nucleotide may be methylated to form 5-methylcytosine"
aaactggacaaagtatgagtcaactattttcaggtattgggcaacagcaaatagaggactcgtatccctgagaaaaggaacattttcctgtggtagtacagggagatggagcccaggcagag

SEQ ID NO: 3652 - DNA, 122 bp, Homo sapiens
  misc_feature (61)..(62): /note="This region represents a CpG dinucleotide"
  misc_feature (61)..(61): /note="Nucleotide may be methylated to form 5-methylcytosine"
ctcaaactacaaccacaacaacaacagaaaaaaaaaaaagaaaaaaacttaaaagccacacgtgcctgatagccactgcattggaatgtacagatagaatttgatgtctttctaaactttgg

SEQ ID NO: 3653 - DNA, 122 bp, Homo sapiens
  misc_feature (61)..(62): /note="This region represents a CpG dinucleotide"
  misc_feature (61)..(61): /note="Nucleotide may be methylated to form 5-methylcytosine"
ctgtgacttccacagaaacttgacagttttcaagttatttttttcctctgtgtttagatgcggttatagttgtgctgtcaggccttatctcttctgtcatctagccagctcccaactaggtt

SEQ ID NO: 3654 - DNA, 122 bp, Homo sapiens
  misc_feature (61)..(62): /note="This region represents a CpG dinucleotide"
  misc_feature (61)..(61): /note="Nucleotide may be methylated to form 5-methylcytosine"
gcatgagatttgtccatgttgataatcttgtgaaggccttacctgcaatggatatctgaacgtggaagcagaattcctctctgctagttgtgtagccactactctgcagtgtaacctgggtt

SEQ ID NO: 3655 - DNA, 122 bp, Homo sapiens
  misc_feature (61)..(62): /note="This region represents a CpG dinucleotide"
  misc_feature (61)..(61): /note="Nucleotide may be methylated to form 5-methylcytosine"
gctcagacacgtcctcttttccccacccggattttcagttcccctgaggaaccacctctccgtctccgagtgcccagtctggttcactgagccatttgtgcccagaaggacctgtagtgctg

SEQ ID NO: 3656 - DNA, 122 bp, Homo sapiens
  misc_feature (61)..(62): /note="This region represents a CpG dinucleotide"
  misc_feature (61)..(61): /note="Nucleotide may be methylated to form 5-methylcytosine"
gcagcgtcgtgccgcgcagtggccgcagcgccaagccccccgcccgcgccccgccggccccgccccctccgcgcacgcccccgccagccgcccaagcacgcagtggcccagcgcggccgcgg

SEQ ID NO: 3657 - DNA, 122 bp, Homo sapiens
  misc_feature (61)..(62): /note="This region represents a CpG dinucleotide"
  misc_feature (61)..(61): /note="Nucleotide may be methylated to form 5-methylcytosine"
aagaactcatgatttacattgtcttactatgaaataccatccctcactcttgacagacgacgtagctgatctgagcagcgccctggcacccgcaggcctacccccctgcctgaggtgtgatg

SEQ ID NO: 3658 - DNA, 122 bp, Homo sapiens
  misc_feature (61)..(62): /note="This region represents a CpG dinucleotide"
  misc_feature (61)..(61): /note="Nucleotide may be methylated to form 5-methylcytosine"
caattttcagataatttcccctctaaactggctacctataggtgcactactacatctaaacgcatcataaaattatgcttaaaatctcaccctgcatagaattccttgcgaatgtaaagact

SEQ ID NO: 3659 - DNA, 122 bp, Homo sapiens
  misc_feature (61)..(62): /note="This region represents a CpG dinucleotide"
  misc_feature (61)..(61): /note="Nucleotide may be methylated to form 5-methylcytosine"
ttcaagtacccggggtgcgggcctgggctccgggaacccgcacattgcgggcgggagaggcgcagggtgcctgggacgccgccccgctcgcctctctcctggacgccgtcgccctgcctccc

SEQ ID NO: 3660 - DNA, 122 bp, Homo sapiens
  misc_feature (61)..(62): /note="This region represents a CpG dinucleotide"
  misc_feature (61)..(61): /note="Nucleotide may be methylated to form 5-methylcytosine"
atcaacagatgctggcaaggatgtggagaaaggggaacactagtacactgctggtcagaacgtagactaatacagccactataggaaacagtacagagggtcctcaaaaaactaaaaagaga

SEQ ID NO: 3661 - DNA, 122 bp, Homo sapiens
  misc_feature (61)..(62): /note="This region represents a CpG dinucleotide"
  misc_feature (61)..(61): /note="Nucleotide may be methylated to form 5-methylcytosine"
gaagcaggcaggcccgcaggcccatgcccttcttttacagataaggagacagagctgggacgggtggaggagtgttcaaggacattcttggctagaaacttactatctaaaatagtaaagag

SEQ ID NO: 3662 - DNA, 122 bp, Homo sapiens
  misc_feature (61)..(62): /note="This region represents a CpG dinucleotide"
  misc_feature (61)..(61): /note="Nucleotide may be methylated to form 5-methylcytosine"
atgtggcatttctccagaagcctctcatagaaagtgtagaaaccaaaatgaagactctgacgaatgagaagtaaagaaacaagcaccccatagtaaatggagtaacagagatcagactgtgt

SEQ ID NO: 3663 - DNA, 122 bp, Homo sapiens
  misc_feature (61)..(62): /note="This region represents a CpG dinucleotide"
  misc_feature (61)..(61): /note="Nucleotide may be methylated to form 5-methylcytosine"
tcccaggcacatgttgtgcaactgagccatggggctagggtagaaagccgtagtgagatacggtcccgcgtctcaaagagtcagcattcaaggggcgtgtgtgtataatacaaggcggagaa

SEQ ID NO: 3664 - DNA, 122 bp, Homo sapiens
  misc_feature (61)..(62): /note="This region represents a CpG dinucleotide"
  misc_feature (61)..(61): /note="Nucleotide may be methylated to form 5-methylcytosine"
acagaacattcctgaggggttaccttacatcctagcagccacaggagtcggcacatcaaccggtcctgctccagaatggccagtaattcaagacccggccacagacgagacacaggtggttc

SEQ ID NO: 3665 - DNA, 122 bp, Homo sapiens
  misc_feature (61)..(62): /note="This region represents a CpG dinucleotide"
  misc_feature (61)..(61): /note="Nucleotide may be methylated to form 5-methylcytosine"
tgagctgctctaccaagagctgcagggcgctcgcgctagccccggaggacatggcggcggcgctgggctcctaggggctgcagcaatcttgattctttaggagaatgacaagtcgttcactg

SEQ ID NO: 3666 - DNA, 122 bp, Homo sapiens
  misc_feature (61)..(62): /note="This region represents a CpG dinucleotide"
  misc_feature (61)..(61): /note="Nucleotide may be methylated to form 5-methylcytosine"
ctccacgtggtaggtggtgccgggcctgaggtcgggcaggctgacggtgcgcgtggtgcccggcacagtcagctcaccgccggggccctctgcaggcggctgaggccgccagcgcagcacca

SEQ ID NO: 3667 - DNA, 122 bp, Homo sapiens
  misc_feature (61)..(62): /note="This region represents a CpG dinucleotide"
  misc_feature (61)..(61): /note="Nucleotide may be methylated to form 5-methylcytosine"
tcattgctctggcaatcaggcttaattagacctctgatccatggcttagtcatagtcaagcgtgtactgcaggtcactattatgagagctttaagcaaagtttaaaacttacagccacaaaa

SEQ ID NO: 3668 - DNA, 122 bp, Homo sapiens
  misc_feature (61)..(62): /note="This region represents a CpG dinucleotide"
  misc_feature (61)..(61): /note="Nucleotide may be methylated to form 5-methylcytosine"
ttgccaacccctgcgatatagtattatgtgcctatgccacaatctatttatccactgtaccgttgatgagcaactgtgttgattttagtttggggctatcatggagttgccagatttagcaa

SEQ ID NO: 3669 - DNA, 122 bp, Homo sapiens
  misc_feature (61)..(62): /note="This region represents a CpG dinucleotide"
  misc_feature (61)..(61): /note="Nucleotide may be methylated to form 5-methylcytosine"
tgaccatatacagtctttcattaagttagtctttgtcatatattgcttattttacttccacggtggagcactggctgaagacaagaagcataagaaccctgatgatgaaatacaggaacttc

SEQ ID NO: 3670 - DNA, 122 bp, Homo sapiens
  misc_feature (61)..(62): /note="This region represents a CpG dinucleotide"
  misc_feature (61)..(61): /note="Nucleotide may be methylated to form 5-methylcytosine"
ttctttaacaggtttctataatccaggaacttgttactaattatgaagcctctcttaaaacgtgtgacttttttagcccatatggtaagtttaaattagattgaattggaatttgattactc

SEQ ID NO: 3671 - DNA, 122 bp, Homo sapiens
  misc_feature (61)..(62): /note="This region represents a CpG dinucleotide"
  misc_feature (61)..(61): /note="Nucleotide may be methylated to form 5-methylcytosine"
tgtaattccattctgctatctccaagcattcagtaaaatgttgtgaaatgcctgacaggtcgtttgtgtatttaaggcaatatggtatgaagggtgaagcaacagccctgaggcagggagaa

SEQ ID NO: 3672 - DNA, 122 bp, Homo sapiens
  misc_feature (61)..(62): /note="This region represents a CpG dinucleotide"
  misc_feature (61)..(61): /note="Nucleotide may be methylated to form 5-methylcytosine"
gctttggtagtttttccacattgctctcaaattttcatatattttgcttatttactggcccgtgtgtgacagtagtcacacaaatagtacctattattgtctaacttggggatgccatgggg

SEQ ID NO: 3673 - DNA, 122 bp, Homo sapiens
  misc_feature (61)..(62): /note="This region represents a CpG dinucleotide"
  misc_feature (61)..(61): /note="Nucleotide may be methylated to form 5-methylcytosine"
ctcctcaataatgcagtcactgtagagagaattccggggacagcgaccattattgtagcccgtcatcatcaccgcggccgctcctccgccggggacgttcatcatcatagccaattaatcac

SEQ ID NO: 3674 - DNA, 122 bp, Homo sapiens
  misc_feature (61)..(62): /note="This region represents a CpG dinucleotide"
  misc_feature (61)..(61): /note="Nucleotide may be methylated to form 5-methylcytosine"
ctaagatttgtcaaatgttgtaagcaggaagtcagaccaaaagacaaccacagaaaaccacgtggtttgctctgaaattccatgacaacatgggttggtcactgatagagcaggcttcccca

SEQ ID NO: 3675 - DNA, 122 bp, Homo sapiens
  misc_feature (61)..(62): /note="This region represents a CpG dinucleotide"
  misc_feature (61)..(61): /note="Nucleotide may be methylated to form 5-methylcytosine"
ccttgtactcaccaagtcttttagaagcacctgaaataaagcagtttgaaaccagctgggcgcttcaggatgagattagatgttttcagatgtctcctccaacaaaaaacaaacaacgtctg

SEQ ID NO: 3676 - DNA, 122 bp, Homo sapiens
  misc_feature (61)..(62): /note="This region represents a CpG dinucleotide"
  misc_feature (61)..(61): /note="Nucleotide may be methylated to form 5-methylcytosine"
ccaatacctaggctccaaccaagtacagtgaaactggaatgtacagagtggacaatggaacgaaggagaacaagaccaaaggacattttatttttatctgtatcagtgggtcaaagtccttt

SEQ ID NO: 3677 - DNA, 122 bp, Homo sapiens
  misc_feature (61)..(62): /note="This region represents a CpG dinucleotide"
  misc_feature (61)..(61): /note="Nucleotide may be methylated to form 5-methylcytosine"
ccagaaaccaaaaaaccccagtatgagtagaacacagagaatgagaaggatatgatgcaacgtgagactggagaaacaggtatggacccaaccattcaaggccttatagattatagatttca

SEQ ID NO: 3678 - DNA, 122 bp, Homo sapiens
  misc_feature (61)..(62): /note="This region represents a CpG dinucleotide"
  misc_feature (61)..(61): /note="Nucleotide may be methylated to form 5-methylcytosine"
aaaggccacagagcaaagtttcagatccaggcagccctgctccagggctccaaatcaccacggagcaacaggtgaggttagtggttttgtaacagcccatattttctcaatctctttttgaa

SEQ ID NO: 3679 - DNA, 122 bp, Homo sapiens
  misc_feature (61)..(62): /note="This region represents a CpG dinucleotide"
  misc_feature (61)..(61): /note="Nucleotide may be methylated to form 5-methylcytosine"
cggaggttatcacggacaggacacgactggattggcagggaacctccgacagaagcagaacgctgccttccatctctaaaaccaaaaaaaggctctttcaagtaattttcaatccctggatc

SEQ ID NO: 3680 - DNA, 122 bp, Homo sapiens
  misc_feature (61)..(62): /note="This region represents a CpG dinucleotide"
  misc_feature (61)..(61): /note="Nucleotide may be methylated to form 5-methylcytosine"
ccctcccaaggcacgtggcatcaatcttgtgtcggtggcaggcagccctcatgtgccagacgccaaatgctcgctgactcgcagatgagccatccccagggcctcctccctgcatgacagga

SEQ ID NO: 3681 - DNA, 122 bp, Homo sapiens
  misc_feature (61)..(62): /note="This region represents a CpG dinucleotide"
  misc_feature (61)..(61): /note="Nucleotide may be methylated to form 5-methylcytosine"
gagaggtgtggggattggggccggtctctcggtgccctcctcccgccgccgggaattctgcgtgtccacgtaccttctgtgtgttgggggaggggttcctatgtgtatataatccatttgcc

SEQ ID NO: 3682 - DNA, 122 bp, Homo sapiens
  misc_feature (61)..(62): /note="This region represents a CpG dinucleotide"
  misc_feature (61)..(61): /note="Nucleotide may be methylated to form 5-methylcytosine"
agcccgcggggtcgtgaccttcaccggactacctgctaaggaccgagctccccggacccccgagtccgccccacggctcccccttgcactggcgcagggctctcccagccccttccagatcc

SEQ ID NO: 3683 - DNA, 122 bp, Homo sapiens
  misc_feature (61)..(62): /note="This region represents a CpG dinucleotide"
  misc_feature (61)..(61): /note="Nucleotide may be methylated to form 5-methylcytosine"
agaacaggaagtctcaacggaaaatgaggtcagcctggtggctgagaggaaaagggtcagcgagcacagccttctgcccccgtgggtccccacagcggccagcccagggccctgcatgcagc

SEQ ID NO: 3684 - DNA, 122 bp, Homo sapiens
  misc_feature (61)..(62): /note="This region represents a CpG dinucleotide"
  misc_feature (61)..(61): /note="Nucleotide may be methylated to form 5-methylcytosine"
ttctatttgtgacaatatgcattgataatttctctcctcacactgctgcactctcacctccgttcccagattagctcctggaactcgagatatttttgtggctagagattgctttcttaatg

SEQ ID NO: 3685 - DNA, 122 bp, Homo sapiens
  misc_feature (61)..(62): /note="This region represents a CpG dinucleotide"
  misc_feature (61)..(61): /note="Nucleotide may be methylated to form 5-methylcytosine"
aaaaaaagggagaaatgtctaatcatctccggaattgaatggatgaatcatcctttgtttcgccagttccctctagatggacatttaggttctctctttctttctttttttgttttaaatag

SEQ ID NO: 3686 - DNA, 122 bp, Homo sapiens
  misc_feature (61)..(62): /note="This region represents a CpG dinucleotide"
  misc_feature (61)..(61): /note="Nucleotide may be methylated to form 5-methylcytosine"
agttgtctgttgcagatatctacactgctgcatgctaagtgtgtcatcctgggattcaaacgtgagtaatagaaaacctgactaagcagcgacttgaactgaataggaggctcgctctcctc

SEQ ID NO: 3687 - DNA, 122 bp, Homo sapiens
  misc_feature (61)..(62): /note="This region represents a CpG dinucleotide"
  misc_feature (61)..(61): /note="Nucleotide may be methylated to form 5-methylcytosine"
gctctcaggaaagcaagagagtggctgtggctggtcagaggcaaaaggaggagatgttggcgccattcactctcgccagcaggaaactgggactagcccatggccccagggaaaattcttaa

SEQ ID NO: 3688 - DNA, 122 bp, Homo sapiens
  misc_feature (61)..(62): /note="This region represents a CpG dinucleotide"
  misc_feature (61)..(61): /note="Nucleotide may be methylated to form 5-methylcytosine"
aacaatgtgaggtagaaatatggctaggctgtgaaagatctctatctttccataatcttacgtttcagacctttgataaaattagtatccccaaaacatccttccagttcatttccaaccat

SEQ ID NO: 3689 - DNA, 122 bp, Homo sapiens
  misc_feature (61)..(62): /note="This region represents a CpG dinucleotide"
  misc_feature (61)..(61): /note="Nucleotide may be methylated to form 5-methylcytosine"
ttctgctacctcagctttcacaagtcatttttattcttttttgccagctcagctgaccatcgtgaatgttattctgtactgaatcatcagtatagaatggttgcaattcaattagctgtcag

SEQ ID NO: 3690 - DNA, 122 bp, Homo sapiens
  misc_feature (61)..(62): /note="This region represents a CpG dinucleotide"
  misc_feature (61)..(61): /note="Nucleotide may be methylated to form 5-methylcytosine"
ctcgtgagcgccgacctccgctaggcgttatcagggactgtgctcgtgagcgcggacctccgctaggcgatatcagggactgtgctcatgagggcggactttcaccagccacgcttccgagg

SEQ ID NO: 3691 - DNA, 122 bp, Homo sapiens
  misc_feature (61)..(62): /note="This region represents a CpG dinucleotide"
  misc_feature (61)..(61): /note="Nucleotide may be methylated to form 5-methylcytosine"
tgcagtgttttgtagcctcaagatcagtgagggaatcttcgggcccccagcatgcaggaccgaagcccccgagacagctgtccctcagtcccaaggtccccatttggaagcagccacaggag

SEQ ID NO: 3692 - DNA, 122 bp, Homo sapiens
  misc_feature (61)..(62): /note="This region represents a CpG dinucleotide"
  misc_feature (61)..(61): /note="Nucleotide may be methylated to form 5-methylcytosine"
ttctcctgcctcagtctcccccagtagctggctagacaggattagaggtgtgtgccatcacgcccagctaatttttttgtatttttagtagagacggggtttcaccatgctggccaggctgg

SEQ ID NO: 3693 - DNA, 122 bp, Homo sapiens
  misc_feature (61)..(62): /note="This region represents a CpG dinucleotide"
  misc_feature (61)..(61): /note="Nucleotide may be methylated to form 5-methylcytosine"
gtaagcctgagaaaggggctgcttcggtctccagccacaactctgtgaagccaagccacgcgctgtcttccagagagggaatagaagtttccatcctgtgcacccagtggttgagcaagaag

SEQ ID NO: 3694 - DNA, 122 bp, Homo sapiens
  misc_feature (61)..(62): /note="This region represents a CpG dinucleotide"
  misc_feature (61)..(61): /note="Nucleotide may be methylated to form 5-methylcytosine"
gacccaccgctgctgctccctgctttccaccttgaaagccacaggcctgcgcctgggcagcggcctcccaggtgcacgctccagggcctccagcgcctcctttaatcagattcaggtagccg

SEQ ID NO: 3695 - DNA, 122 bp, Homo sapiens
  misc_feature (61)..(62): /note="This region represents a CpG dinucleotide"
  misc_feature (61)..(61): /note="Nucleotide may be methylated to form 5-methylcytosine"
ataatttctctctgcctcctataacatatttcccccctctgaaatggaatccctaactgccgttagggggaattgggtgatgacttcttctggctacttcctgctggagaggggcattgtgt

SEQ ID NO: 3696 - DNA, 122 bp, Homo sapiens
  misc_feature (61)..(62): /note="This region represents a CpG dinucleotide"
  misc_feature (61)..(61): /note="Nucleotide may be methylated to form 5-methylcytosine"
tcagggctgccagcattcattccatggtgtggaagcagtgggaagagccaggggtgggagcgctgaatgaccggcctttgtgttccaattagatacagtcagcttgagttgttagagagaga

SEQ ID NO: 3697 - DNA, 122 bp, Homo sapiens
  misc_feature (61)..(62): /note="This region represents a CpG dinucleotide"
  misc_feature (61)..(61): /note="Nucleotide may be methylated to form 5-methylcytosine"
ttgcgttagtccctaaggcgactcagacagaaacaaagggaaggagagaagccaggcagacggaggagagcagagaagttcttggtgcaccctgaggaggaaagaaagcccttttcctgggg

SEQ ID NO: 3698 - DNA, 122 bp, Homo sapiens
  misc_feature (61)..(62): /note="This region represents a CpG dinucleotide"
  misc_feature (61)..(61): /note="Nucleotide may be methylated to form 5-methylcytosine"
cataaggattttaaagtgggcaaccgcctcatccctcagggaaggaaagagccccccagacgagctgagggctctgtctgcaagaccatctgtggcacagaggatctaggggacagttgggt

SEQ ID NO: 3699 - DNA, 122 bp, Homo sapiens
  misc_feature (61)..(62): /note="This region represents a CpG dinucleotide"
  misc_feature (61)..(61): /note="Nucleotide may be methylated to form 5-methylcytosine"
gggagagaggggagctcagaggagcgcacagccgggcgggggccgaggctcgaggggcggcgccgagagaaacggggcgcggacccggagcgcggcggcggcgggggaggcgcggagggcgc

SEQ ID NO: 3700 - DNA, 122 bp, Homo sapiens
  misc_feature (61)..(62): /note="This region represents a CpG dinucleotide"
  misc_feature (61)..(61): /note="Nucleotide may be methylated to form 5-methylcytosine"
actcagtcaggcagaaaaagaattcatgtatcttgctagtttttgtgcatgaactgttcacgtggtaccattaagttgccttgcggatctcaagagttttgtaactgaaacagcaaaggtct

SEQ ID NO: 3701 - DNA, 122 bp, Homo sapiens
  misc_feature (61)..(62): /note="This region represents a CpG dinucleotide"
  misc_feature (61)..(61): /note="Nucleotide may be methylated to form 5-methylcytosine"
atggaggtcaaaagacttcgatgtacctaggcagataagtgcaagcaagcactgagcccacgtggtctccctccccacacaaccactaagcaatgccaatgtcaggggaggaagaagaaacc

SEQ ID NO: 3702 - DNA, 122 bp, Homo sapiens
  misc_feature (61)..(62): /note="This region represents a CpG dinucleotide"
  misc_feature (61)..(61): /note="Nucleotide may be methylated to form 5-methylcytosine"
atctgagggccccaagcacagtggttgacacataataagcacttaatccttgttgaatctcgaatttgaatatgattcctggagaggaaagagaggcttcttagagaaggcagcctctaagc

SEQ ID NO: 3703 - DNA, 122 bp, Homo sapiens
  misc_feature (61)..(62): /note="This region represents a CpG dinucleotide"
  misc_feature (61)..(61): /note="Nucleotide may be methylated to form 5-methylcytosine"
gcaactcattccccagttctgttctccagcatttcattgtcagccacggccagggtaccccgccgcctctcacttccatcacacagccagccccaggcagactgtttttaaaaacataagcc

SEQ ID NO: 3704 - DNA, 122 bp, Homo sapiens
  misc_feature (61)..(62): /note="This region represents a CpG dinucleotide"
  misc_feature (61)..(61): /note="Nucleotide may be methylated to form 5-methylcytosine"
actgttaccttaatcactacattattaacccccactgtatgagtcaaagtcaaggtaagtcgcctttctctttccacaaatccgaaatgagtcactgatgagcaaaagtctgtaatttaatt

SEQ ID NO: 3705 - DNA, 122 bp, Homo sapiens
  misc_feature (61)..(62): /note="This region represents a CpG dinucleotide"
  misc_feature (61)..(61): /note="Nucleotide may be methylated to form 5-methylcytosine"
tgggaccccactgtgctgttccctctgacatgtcagctgtggcaggtccaggttcattaccgatttccctgggctctctggaaatcgggccctgcttatttgcctgcatcccagctgcccga

SEQ ID NO: 3706 - DNA, 122 bp, Homo sapiens
  misc_feature (61)..(62): /note="This region represents a CpG dinucleotide"
  misc_feature (61)..(61): /note="Nucleotide may be methylated to form 5-methylcytosine"
cgtctgcctcctgaccattcctcctgaccacggtgtgtttcccatgtggctcctgcagggcgtgcctcttgtctctaagacctgtacttacaatatatatttttttctttgagcctcttctg

SEQ ID NO: 3707 - DNA, 122 bp, Homo sapiens
  misc_feature (61)..(62): /note="This region represents a CpG dinucleotide"
  misc_feature (61)..(61): /note="Nucleotide may be methylated to form 5-methylcytosine"
ctctccatcgagcagcagatgagcagggtctgtgtgaacacacatcccagagtcggagcacgcaggccagagggcgctgagcaagcatctcagagacagctcagagacaggccccaccccca

SEQ ID NO: 3708 - DNA, 122 bp, Homo sapiens
  misc_feature (61)..(62): /note="This region represents a CpG dinucleotide"
  misc_feature (61)..(61): /note="Nucleotide may be methylated to form 5-methylcytosine"
gtagttgtgggtcacaggcaccccagccagaacacccacagtgggtagatgtgtggggaccggatgtgggtcctctcctgagagacgtgcagatggggagaggctgggcagttctcagcaca

SEQ ID NO: 3709 - DNA, 122 bp, Homo sapiens
  misc_feature (61)..(62): /note="This region represents a CpG dinucleotide"
  misc_feature (61)..(61): /note="Nucleotide may be methylated to form 5-methylcytosine"
atgtgcactactcacaacagccagaaggtgggaacaacccagatgtccaatgtctgtccgcggaagaatagcaaacagtattcaactgtaaaatggaatgagacattgatacatgttacaac

SEQ ID NO: 3710 - DNA, 122 bp, Homo sapiens
  misc_feature (61)..(62): /note="This region represents a CpG dinucleotide"
  misc_feature (61)..(61): /note="Nucleotide may be methylated to form 5-methylcytosine"
ttagcacttctgtgcactgagggagaggtggagcatccaatttgccttacacacatgggacggtagggggcgacagaatcagaggcaggagtttagaaatggcagtaaatcctggagatttt

SEQ ID NO: 3711 - DNA, 122 bp, Homo sapiens
  misc_feature (61)..(62): /note="This region represents a CpG dinucleotide"
  misc_feature (61)..(61): /note="Nucleotide may be methylated to form 5-methylcytosine"
cggcatgccaggcaggccagggtcgctcgggggcgggcaggttgggtttttgctcaagcacgtggggtgagccgccctcccgggcctctcccctcccacttcggggagctgctgagggttgc

SEQ ID NO: 3712 - DNA, 122 bp, Homo sapiens
  misc_feature (61)..(62): /note="This region represents a CpG dinucleotide"
  misc_feature (61)..(61): /note="Nucleotide may be methylated to form 5-methylcytosine"
agtatagttggtcctaaataactaaaaatgcagaaatactaaattattgtcaaataatagcgtggctttatgcaggtggttattcaagagtacactcacatgacacatgacagttcagtaga

SEQ ID NO: 3713 - DNA, 122 bp, Homo sapiens
  misc_feature (61)..(62): /note="This region represents a CpG dinucleotide"
  misc_feature (61)..(61): /note="Nucleotide may be methylated to form 5-methylcytosine"
ttgtgccctcacatggcagaaagcaaagggcaaaaaagggatgaactccttctgtcaaaccgtttcataagagcactcagtcccattcatgtaggtagagcccttatggccccgcctcttaa

SEQ ID NO: 3714 - DNA, 122 bp, Homo sapiens
  misc_feature (61)..(62): /note="This region represents a CpG dinucleotide"
  misc_feature (61)..(61): /note="Nucleotide may be methylated to form 5-methylcytosine"
gtttcctgttatgaaaatctcctctgctgggtgcagtggctcatgccatgactgagatcacgccattgcacttcagcctgggcgacagggcgagactccatcccaaaaaaaaaaaagaaaat

SEQ ID NO: 3715 - DNA, 122 bp, Homo sapiens
  misc_feature (61)..(62): /note="This region represents a CpG dinucleotide"
  misc_feature (61)..(61): /note="Nucleotide may be methylated to form 5-methylcytosine"
ttttcatttcagtttcaaattcaaattcatactgtaaagtggtgatgaacacatcccatccgcaggtacttaacctccatacaaataagaactacctctcatatgggcaaaaagatcaaaat

SEQ ID NO: 3716 - DNA, 122 bp, Homo sapiens
  misc_feature (61)..(62): /note="This region represents a CpG dinucleotide"
  misc_feature (61)..(61): /note="Nucleotide may be methylated to form 5-methylcytosine"
gcgctgggtttcacagatgcagactgaagtccaggctctgctgcagattaacggggtggccgccagcaagtcaagtgacttgctcttctgtgcactgcatgtacttgggttcctctcacagg

SEQ ID NO: 3717 - DNA, 122 bp, Homo sapiens
  misc_feature (61)..(62): /note="This region represents a CpG dinucleotide"
  misc_feature (61)..(61): /note="Nucleotide may be methylated to form 5-methylcytosine"
ccacatgtctgggacagtgccaccagcaccacggtcaccagccactaacagctaccactgcgcccaggctctcctgaataatggttcactggctctgagggcttgtttcatttcctccagat

SEQ ID NO: 3718 - DNA, 122 bp, Homo sapiens
  misc_feature (61)..(62): /note="This region represents a CpG dinucleotide"
  misc_feature (61)..(61): /note="Nucleotide may be methylated to form 5-methylcytosine"
attgtgttttcttccctctttagatggctctttgtggctctcctgattgtctgtatctgacggctgaggcacataatctaaaatgtgtgctcagataaatggtgaaaacagaacatctgaaa

SEQ ID NO: 3719 - DNA, 122 bp, Homo sapiens
  misc_feature (61)..(62): /note="This region represents a CpG dinucleotide"
  misc_feature (61)..(61): /note="Nucleotide may be methylated to form 5-methylcytosine"
atgaaatgcaaggaaaggagaaaaacattatgacataagtattaagaaagatgctgtttacgggaactctgaaagactggaattcagagccgctaccaattaagaaagttaatgatgacttg

SEQ ID NO: 3720 - DNA, 122 bp, Homo sapiens
  misc_feature (61)..(62): /note="This region represents a CpG dinucleotide"
  misc_feature (61)..(61): /note="Nucleotide may be methylated to form 5-methylcytosine"
ttaaagagacaactgggtctcctattttctattttccatttccaaaaacaataaataaaacgaagagtagtgtgcaaagtattagtagtctcagtgttcagacatggccaagttttaggggt

SEQ ID NO: 3721 - DNA, 122 bp, Homo sapiens
  misc_feature (61)..(62): /note="This region represents a CpG dinucleotide"
  misc_feature (61)..(61): /note="Nucleotide may be methylated to form 5-methylcytosine"
tctaacaactacatgtgcattcatctacccttgggtgacagccatatagtaattcaactgcgcaacttccggtgacaaatgaaacaccacatacttacacactgaagctgaagcaagcagaa

SEQ ID NO: 3722 - DNA, 122 bp, Homo sapiens
  misc_feature (61)..(62): /note="This region represents a CpG dinucleotide"
  misc_feature (61)..(61): /note="Nucleotide may be methylated to form 5-methylcytosine"
ccccaaagcaaccttcctgaatacataggtgccgggcatgaaactctacaaaagcaaccacgttcctgccactgtaaatgcatcttggtggccctagggtggcggtgaaccactgaaacaaa

SEQ ID NO: 3723 - DNA, 122 bp, Homo sapiens
  misc_feature (61)..(62): /note="This region represents a CpG dinucleotide"
  misc_feature (61)..(61): /note="Nucleotide may be methylated to form 5-methylcytosine"
agcccgggcaactgagtgagaccttgtctcaaaaaaaaaaaaaaaaaaaaaaattttaaacggaaggaagaagcagttcctgagttgtttactgagaatttatgttaaaataacataaactg

SEQ ID NO: 3724 - DNA, 122 bp, Homo sapiens
  misc_feature (61)..(62): /note="This region represents a CpG dinucleotide"
  misc_feature (61)..(61): /note="Nucleotide may be methylated to form 5-methylcytosine"
ggtgaggaaacttgggaagtttaaggaatcaacccaaggtcacagagttaagatgtggcacgttagggtctttactcgagggtctctgatagtgtgcttctaagtctactgccgggagtgat

SEQ ID NO: 3725 - DNA, 122 bp, Homo sapiens
  misc_feature (61)..(62): /note="This region represents a CpG dinucleotide"
  misc_feature (61)..(61): /note="Nucleotide may be methylated to form 5-methylcytosine"
tactgtgaggacccagagggacataagtgcagacagtgctgactctcccaggagtttactcgtgagtaggggtggcagagaagccatgtgtgtaaaaatgcaaggtagaaagggctttgtct

SEQ ID NO: 3726 - DNA, 122 bp, Homo sapiens
  misc_feature (61)..(62): /note="This region represents a CpG dinucleotide"
  misc_feature (61)..(61): /note="Nucleotide may be methylated to form 5-methylcytosine"
tctaaagctaacatgaagtccgcctcatccggcgccctcgtctcccgatccaattcacggcgggcaaaccaggcctggttcctaatgctcagcgaagggtttcaggtagtaatggaactcct

SEQ ID NO: 3727 - DNA, 122 bp, Homo sapiens
  misc_feature (61)..(62): /note="This region represents a CpG dinucleotide"
  misc_feature (61)..(61): /note="Nucleotide may be methylated to form 5-methylcytosine"
gctccttgcccaatgccaagtgctggggatttctgtcagcaagccctgtggctccagtgacggtatttctaaagccaaacttagttacctagaattagcgccatgttggaaacactgtcgca

SEQ ID NO: 3728 - DNA, 122 bp, Homo sapiens
  misc_feature (61)..(62): /note="This region represents a CpG dinucleotide"
  misc_feature (61)..(61): /note="Nucleotide may be methylated to form 5-methylcytosine"
gcgggtttctatgggactttgcaaagcccagggaatccgggaggcagcctggcagctgcgcgggcgggcggacaatggcaaggaggagacgccaggcccgcgccgtttccctccgtgcagcc

SEQ ID NO: 3729 - DNA, 122 bp, Homo sapiens
  misc_feature (61)..(62): /note="This region represents a CpG dinucleotide"
  misc_feature (61)..(61): /note="Nucleotide may be methylated to form 5-methylcytosine"
cgtccccagttactctggttgggttgtttacccctccactggcttgcttcctgcccttcccggggggtcctcaccaacccccaagagctcagcacacacaatcacccactccgggtatttca

SEQ ID NO: 3730 - DNA, 122 bp, Homo sapiens
  misc_feature (61)..(62): /note="This region represents a CpG dinucleotide"
  misc_feature (61)..(61): /note="Nucleotide may be methylated to form 5-methylcytosine"
tgcttgtgaccgtgacaggctacttcagctgtggggcgggggggggggggggggggggtacggtgattaccagtaacacctgagacagagccctggacccaggcgtgttcaataaatagctg

SEQ ID NO: 3731 - DNA, 122 bp, Homo sapiens
  misc_feature (61)..(62): /note="This region represents a CpG dinucleotide"
  misc_feature (61)..(61): /note="Nucleotide may be methylated to form 5-methylcytosine"
ccatgggtctctgtgcccctttgtctcctgtggtcttggtcgtcccgtgccctccaggctcgcgttggacgacgccattcgacacaagccgctgaacatgtcatcccgtttttcacccaggg

SEQ ID NO: 3732 - DNA, 122 bp, Homo sapiens
  misc_feature (61)..(62): /note="This region represents a CpG dinucleotide"
  misc_feature (61)..(61): /note="Nucleotide may be methylated to form 5-methylcytosine"
cattagactaatatccatctgtgggatcaaaggggagagcaaacatatttagcttttgtacgcagcttgttctttgtgatgagaacacagtgtgtcacataaaaatccaccaccacatgctt

SEQ ID NO: 3733 - DNA, 122 bp, Homo sapiens
  misc_feature (61)..(62): /note="This region represents a CpG dinucleotide"
  misc_feature (61)..(61): /note="Nucleotide may be methylated to form 5-methylcytosine"
atgccttgggcacacaggaaacttacaaataccatttccctttgcaatcaggcagggccacgtgactagttctggcctgtgagctatgacgagaaggatgcatatcattcctaggtcaaagc

SEQ ID NO: 3734 - DNA, 122 bp, Homo sapiens
  misc_feature (61)..(62): /note="This region represents a CpG dinucleotide"
  misc_feature (61)..(61): /note="Nucleotide may be methylated to form 5-methylcytosine"
gagtaaccaaagatgggctgggatgggacggcgaggaataaattgctccccacccagctgcggtgcgacgcccccagcgtcccaggggagccggtgcgtcagctcacggctggccaaggcgg

SEQ ID NO: 3735 - DNA, 122 bp, Homo sapiens
  misc_feature (61)..(62): /note="This region represents a CpG dinucleotide"
  misc_feature (61)..(61): /note="Nucleotide may be methylated to form 5-methylcytosine"
cacacacacacacacacacacacacgcagacaaagattccccccttccagatccacactgcgtgcctcctgccagccccatcccatcatcctgtgacagtgcttctttgtggaatagaacaa

SEQ ID NO: 3736 - DNA, 122 bp, Homo sapiens
  misc_feature (61)..(62): /note="This region represents a CpG dinucleotide"
  misc_feature (61)..(61): /note="Nucleotide may be methylated to form 5-methylcytosine"
ttgctgaaaagatgtccatgtccctcatggatgtggtgagggtgatgctgcaccctccaccgtgtgccagacaagggtctgcagacagagggaacgtgcatggggaacccacgtgtggcgcc

SEQ ID NO: 3737 - DNA, 122 bp, Homo sapiens
  misc_feature (61)..(62): /note="This region represents a CpG dinucleotide"
  misc_feature (61)..(61): /note="Nucleotide may be methylated to form 5-methylcytosine"
cttggcctcccaaagtgctgggattacaggtgctagccaccacacctggcctatggcattcgtttaacatgctgagtaatggtagcatcaagtacacaatataatggaatttggtttgaggt

SEQ ID NO: 3738 - DNA, 122 bp, Homo sapiens
  misc_feature (61)..(62): /note="This region represents a CpG dinucleotide"
  misc_feature (61)..(61): /note="Nucleotide may be methylated to form 5-methylcytosine"
ttgaacagaaacgaggacactggggaggcccttccaatgcaggccagacttttaggggctcgacagaacacagctggagaaacatccacaccacacgcggtttcacctgccacacggcagcc

SEQ ID NO: 3739 - DNA, 122 bp, Homo sapiens
  misc_feature (61)..(62): /note="This region represents a CpG dinucleotide"
  misc_feature (61)..(61): /note="Nucleotide may be methylated to form 5-methylcytosine"
ttgataaaaatgtacagaatagatatatcctttttgtcattgctcacataaaagacaacacgtgatgtaactgcaatgccaacaaatcaggtgacaagaacaataagagtcttgacctaaaa

SEQ ID NO: 3740 - DNA, 122 bp, Homo sapiens
  misc_feature (61)..(62): /note="This region represents a CpG dinucleotide"
  misc_feature (61)..(61): /note="Nucleotide may be methylated to form 5-methylcytosine"
gttattggcaggattaaatgaggtgatattagtaatgcaatagtcaccaccatgcccccacgaaaactaacattcattgagaccttattgtgttgggcattgtgctcaggacttcaaatggg

SEQ ID NO: 3741 - DNA, 122 bp, Homo sapiens
  misc_feature (61)..(62): /note="This region represents a CpG dinucleotide"
  misc_feature (61)..(61): /note="Nucleotide may be methylated to form 5-methylcytosine"
agcactgaggcctgacctctcgatccttcagcacttcagaggttaattttgttgggggatcggatttctttcctggcctggggaatggtgatccctgctagctagtcctttagttacagagt

SEQ ID NO: 3742 - DNA, 122 bp, Homo sapiens
  misc_feature (61)..(62): /note="This region represents a CpG dinucleotide"
  misc_feature (61)..(61): /note="Nucleotide may be methylated to form 5-methylcytosine"
cctgccacggtgctggaagtgcagcgggcacagaaagtcgcgcagtggaaatgcgggctgcgggcgtggatggggccgccgggtctggggacgagctaagacctggcagcagggggtggccg

SEQ ID NO: 3743 - DNA, 122 bp, Homo sapiens
  misc_feature (61)..(62): /note="This region represents a CpG dinucleotide"
  misc_feature (61)..(61): /note="Nucleotide may be methylated to form 5-methylcytosine"
acgttagacatatcgttaaatccattgtctgggactatttgcaccaaaaaatgctcaccccgaatatctgagtttttgataaattccagttgttcagcaagttctttcacagtgttgtctag

SEQ ID NO: 3744 - DNA, 122 bp, Homo sapiens
  misc_feature (61)..(62): /note="This region represents a CpG dinucleotide"
  misc_feature (61)..(61): /note="Nucleotide may be methylated to form 5-methylcytosine"
cttctttcttcctaacattttcatgtgagatccagaaaggacacattgtctctggccattcgaagaaagaaagaaagaaaaaaaaaaaaggtatttagagacagagagagaaaaaggctgaa

SEQ ID NO: 3745 - DNA, 122 bp, Homo sapiens
  misc_feature (61)..(62): /note="This region represents a CpG dinucleotide"
  misc_feature (61)..(61): /note="Nucleotide may be methylated to form 5-methylcytosine"
gtgggagagtctgaagctggtctgagtgttgggagtgtctgactggtagattaatctagacggcaactctgtttagagaaaaattgggagtttaggtttagttagagaatccagcaatagaa

SEQ ID NO: 3746 - DNA, 122 bp, Homo sapiens
  misc_feature (61)..(62): /note="This region represents a CpG dinucleotide"
  misc_feature (61)..(61): /note="Nucleotide may be methylated to form 5-methylcytosine"
gtactagggagctcatatctcgcccctgggtgtctcatcggtggttaggcatctctagggcgccaagtcctcccagtggatggggctgggccaggcgggttaagggggagaggtctctgact

SEQ ID NO: 3747 - DNA, 122 bp, Homo sapiens
  misc_feature (61)..(62): /note="This region represents a CpG dinucleotide"
  misc_feature (61)..(61): /note="Nucleotide may be methylated to form 5-methylcytosine"
ggggacaggaaatttcccttgaagaagccttggcagagtaagcacactctttctcttcaacgttatgtttatgtgccagggggctactgcagatttagggacaaacaactcacccacccacc

SEQ ID NO: 3748 - DNA, 122 bp, Homo sapiens
  misc_feature (61)..(62): /note="This region represents a CpG dinucleotide"
  misc_feature (61)..(61): /note="Nucleotide may be methylated to form 5-methylcytosine"
aactctagcatgcgaccatcttcgacagacttttcattctggctagaatagcatggcctacgtagttctctgtgttgaaatttggcagggtagctcgctagtgaccaaatagtcattttaac

SEQ ID NO: 3749 - DNA, 122 bp, Homo sapiens
  misc_feature (61)..(62): /note="This region represents a CpG dinucleotide"
  misc_feature (61)..(61): /note="Nucleotide may be methylated to form 5-methylcytosine"
aggccaacagacaagccagttggccttgagctcaggcttgctaataatagcatcatccagcgcatctcagagctgtgggggactgcaggatgacatcacccagatggaagccggagggatgg

SEQ ID NO: 3750 - DNA, 122 bp, Homo sapiens
  misc_feature (61)..(62): /note="This region represents a CpG dinucleotide"
  misc_feature (61)..(61): /note="Nucleotide may be methylated to form 5-methylcytosine"
ttgtttccttggctgttaggtctgcctgtttcctcaggctaattatgaaatcatctgctccgccaggaagaagcacacagctgaagagcatcatcctgtgttccagcattactgtggagcat

SEQ ID NO: 3751 - DNA, 122 bp, Homo sapiens
  misc_feature (61)..(62): /note="This region represents a CpG dinucleotide"
  misc_feature (61)..(61): /note="Nucleotide may be methylated to form 5-methylcytosine"
cactcacggtcattcgtcctcagtcacttgaccctctaggccccaccttccaagcccacacgccctaagagtctcccatggcagaacgggtaggggaagggatgcagagagggaagaaaagc

SEQ ID NO: 3752 - DNA, 122 bp, Homo sapiens
  misc_feature (61)..(62): /note="This region represents a CpG dinucleotide"
  misc_feature (61)..(61): /note="Nucleotide may be methylated to form 5-methylcytosine"
gtcttgacacccagctctggccaggaaaagagtggacttcttcaaactcttgtgaacaggcggtgtctctgcgggttggaagggtaagagtccctgagatttaagggaaaggattcacttct

SEQ ID NO: 3753 - DNA, 122 bp, Homo sapiens
  misc_feature (61)..(62): /note="This region represents a CpG dinucleotide"
  misc_feature (61)..(61): /note="Nucleotide may be methylated to form 5-methylcytosine"
tctcttattttattcaatgccaagatttcccaagatgaaggagatggtggatcctcagcacgaatatggtaatgtggctggtgccactacaaaccctgtaaacagtgtaactgtggaggctg

SEQ ID NO: 3754 - DNA, 122 bp, Homo sapiens
  misc_feature (61)..(62): /note="This region represents a CpG dinucleotide"
  misc_feature (61)..(61): /note="Nucleotide may be methylated to form 5-methylcytosine"
ggacaagctggcgctgtgccacctggaactgacacggaagttacaggatctcatcaaggacgttctccgctacggcgaggaacagctcaagacccacaagaaggtgtgtgtcgtgggcgccg

SEQ ID NO: 3755 - DNA, 122 bp, Homo sapiens
  misc_feature (61)..(62): /note="This region represents a CpG dinucleotide"
  misc_feature (61)..(61): /note="Nucleotide may be methylated to form 5-methylcytosine"
ttttctctctctgcacatggatgaacagtgagattctgaatactcccttgctgaaccaagcgatggcaggtcctgctggacccacctggggaagggagacagctgtgcgacagctttcagag

SEQ ID NO: 3756 - DNA, 122 bp, Homo sapiens
  misc_feature (61)..(62): /note="This region represents a CpG dinucleotide"
  misc_feature (61)..(61): /note="Nucleotide may be methylated to form 5-methylcytosine"
tccagtccatggagttttcattattcattattcgccgggcccgggcagcacagcagcgcccgtgtctgtctaatccctacctgataatgtgtttctgataagcatgacggagcccagtgctc

SEQ ID NO: 3757 - DNA, 122 bp, Homo sapiens
  misc_feature (61)..(62): /note="This region represents a CpG dinucleotide"
  misc_feature (61)..(61): /note="Nucleotide may be methylated to form 5-methylcytosine"
attgtatctgcagacggattcctaactgcgtaatgggcgctactggtttgcaccccaaggcgaaggcgctgaaaatgctcctgtcaccttagatctcagtgatgaacgacaggaggaggagt

SEQ ID NO: 3758 - DNA, 122 bp, Homo sapiens
  misc_feature (61)..(62): /note="This region represents a CpG dinucleotide"
  misc_feature (61)..(61): /note="Nucleotide may be methylated to form 5-methylcytosine"
ttccgcaggatcaagggcgaagtgacactgctgtcacggctgcaccatgagaacattgtgcgctactacaacgcctggatcgagcggcacgagcggccggcgggaccggggacgccgccccc

SEQ ID NO: 3759 - DNA, 122 bp, Homo sapiens
  misc_feature (61)..(62): /note="This region represents a CpG dinucleotide"
  misc_feature (61)..(61): /note="Nucleotide may be methylated to form 5-methylcytosine"
atcagcctcctgttgcccagcacctgttgctggtcccaaacgagatagggctgcagcttacgtcatgttagcaggatgccctgaaatccctgcctgtagaggtagctaccacttaaccagag

SEQ ID NO: 3760 - DNA, 122 bp, Homo sapiens
  misc_feature (61)..(62): /note="This region represents a CpG dinucleotide"
  misc_feature (61)..(61): /note="Nucleotide may be methylated to form 5-methylcytosine"
ccccgccccttccgaactggtggagcaggagctcccagggtgcagctgcagccaccttgccgcggctgtggacattttctgtgctctcagaggcccagcaaagtcccctgcccactgcaggc

SEQ ID NO: 3761 - DNA, 122 bp, Homo sapiens
  misc_feature (61)..(62): /note="This region represents a CpG dinucleotide"
  misc_feature (61)..(61): /note="Nucleotide may be methylated to form 5-methylcytosine"
cccacacggtcagatcactaaacaaatcccagagggcccagccctggctgtccggctttccgggaccagagctctgttgggaactgctgctgcttggacaggtgtgttcccggaaagccctg

SEQ ID NO: 3762 - DNA, 122 bp, Homo sapiens
  misc_feature (61)..(62): /note="This region represents a CpG dinucleotide"
  misc_feature (61)..(61): /note="Nucleotide may be methylated to form 5-methylcytosine"
aggttggccatgacagcaacacaattgtaaagcttgctgtaatcagcaccatgcccatagcgtttttaccttccaaggcaacagtgcagaccgagggaggatccaaccttgttcacgcctct

SEQ ID NO: 3763 - DNA, 122 bp, Homo sapiens
  misc_feature (61)..(62): /note="This region represents a CpG dinucleotide"
  misc_feature (61)..(61): /note="Nucleotide may be methylated to form 5-methylcytosine"
tttgactccagagagcatactctttctcacgtatcacataatagccttagagtctgccctcgtatatggaaaacactctaatgtagtagctaaaagcaggagctctagctaaaagcaagacc

SEQ ID NO: 3764 - DNA, 122 bp, Homo sapiens
  misc_feature (61)..(62): /note="This region represents a CpG dinucleotide"
  misc_feature (61)..(61): /note="Nucleotide may be methylated to form 5-methylcytosine"
tttttttatttccaggagagcaaataaagtaatgccttacctttagttccagaactattacgttgatattgctgattaagtccctgggtcttaagtgaaagtttttgctttgagctaaattt

SEQ ID NO: 3765 - DNA, 122 bp, Homo sapiens
  misc_feature (61)..(62): /note="This region represents a CpG dinucleotide"
  misc_feature (61)..(61): /note="Nucleotide may be methylated to form 5-methylcytosine"
ctctgtggggtggagtcagggctctgtggggtgtactcagggctctctggggtgaagtcacggctctgttgggtggagtcagggctctgggtggagtcagagctttgtgggtggagtcgggg

SEQ ID NO: 3766 - DNA, 122 bp, Homo sapiens
  misc_feature (61)..(62): /note="This region represents a CpG dinucleotide"
  misc_feature (61)..(61): /note="Nucleotide may be methylated to form 5-methylcytosine"
acacccagccaataggtgattattttaaaactcttacaacattgcatgccactaactacccgcatctcattctctaagacagagattgggaaactatggcctgcaggcaaaatccagcctgc

SEQ ID NO: 3767 - DNA, 122 bp, Homo sapiens
  misc_feature (61)..(62): /note="This region represents a CpG dinucleotide"
  misc_feature (61)..(61): /note="Nucleotide may be methylated to form 5-methylcytosine"
ctccatcataatcataggtcctgtttactctcaaggagaggggattatacagggtgtaggcgccagcaggtggaaatcttgggtttcatcttagaattctgcctgccattgtaattgatatt

SEQ ID NO: 3768 - DNA, 122 bp, Homo sapiens
  misc_feature (61)..(62): /note="This region represents a CpG dinucleotide"
  misc_feature (61)..(61): /note="Nucleotide may be methylated to form 5-methylcytosine"
tcctccaggcccacagtttcttaaaggtctattcatcaacatgttaataatagattcttacgggagtaatgatatataataatgacagtaataagacctctttgtacttacaccctgtgttg

SEQ ID NO: 3769 - DNA, 122 bp, Homo sapiens
  misc_feature (61)..(62): /note="This region represents a CpG dinucleotide"
  misc_feature (61)..(61): /note="Nucleotide may be methylated to form 5-methylcytosine"
gccatgtcctgcggcctccggagccgccgcctccagccctcggcgccgccacctgggagccggctgcgcagggcgccagcgaaaatcgcatttctgcttagaagccacccagttcacggtgt

SEQ ID NO: 3770 - DNA, 122 bp, Homo sapiens
  misc_feature (61)..(62): /note="This region represents a CpG dinucleotide"
  misc_feature (61)..(61): /note="Nucleotide may be methylated to form 5-methylcytosine"
cgagccgtggccgctgctggacgacagggagccggggctggtggcggcgggcggcgagtgcgccacgggcatggacatggagcggctgtgttgcagcgcgccccctgccggcagcagcgcca

SEQ ID NO: 3771 - DNA, 122 bp, Homo sapiens
  misc_feature (61)..(62): /note="This region represents a CpG dinucleotide"
  misc_feature (61)..(61): /note="Nucleotide may be methylated to form 5-methylcytosine"
aaaaacaaacaaacaaaaaaacactggcgcttgggtccgtcgctgcctcggtgtccctgtcgggcttcccagcagcggcctagtggaaaagtaaaagatgtctgaatatattcgggtaaccg

SEQ ID NO: 3772 - DNA, 122 bp, Homo sapiens
  misc_feature (61)..(62): /note="This region represents a CpG dinucleotide"
  misc_feature (61)..(61): /note="Nucleotide may be methylated to form 5-methylcytosine"
aatgccatcactcccagtcattggagatcgtgggtgcccctgagggttacagatcaaggacgtgatatgttgaaagcacaggttttaggatgattagtagggttgaaaggtatgcatttctg

SEQ ID NO: 3773 - DNA, 122 bp, Homo sapiens
  misc_feature (61)..(62): /note="This region represents a CpG dinucleotide"
  misc_feature (61)..(61): /note="Nucleotide may be methylated to form 5-methylcytosine"
gggcctccctaactgtccccctcagggcaagcccttcctccccacttccagaaagctgctcgttccctggccatcccacacctctgacctcgtgccacttccggggcctgttggctttaaca

SEQ ID NO: 3774 - DNA, 122 bp, Homo sapiens
  misc_feature (61)..(62): /note="This region represents a CpG dinucleotide"
  misc_feature (61)..(61): /note="Nucleotide may be methylated to form 5-methylcytosine"
ggccagcgggtggcctgagtgccagaggccgctggtccccactggccaggaacaaagtgccgctgggcgcccctggcgggaggccagacaccatggcctcgtggccctgctccctcccagct

SEQ ID NO: 3775 - DNA, 122 bp, Homo sapiens
  misc_feature (61)..(62): /note="This region represents a CpG dinucleotide"
  misc_feature (61)..(61): /note="Nucleotide may be methylated to form 5-methylcytosine"
cctgtcttaaaaaaagaaaagaaaaaaagaaagaaagaaagaaggaaatgactccgtggacgaggagacgtgggctctagccagagcaccaatagtgattttcagaatattgaacggctgct

SEQ ID NO: 3776 - DNA, 122 bp, Homo sapiens
  misc_feature (61)..(62): /note="This region represents a CpG dinucleotide"
  misc_feature (61)..(61): /note="Nucleotide may be methylated to form 5-methylcytosine"
aacaccagggggccccctccgccccacgctccctggtggccgcgtcattcctcctcaagccgagtgaggagggcagggaaagtcaccccggctgctgcccccatctcgtcccacgagaagga

SEQ ID NO: 3777 - DNA, 122 bp, Homo sapiens
  misc_feature (61)..(62): /note="This region represents a CpG dinucleotide"
  misc_feature (61)..(61): /note="Nucleotide may be methylated to form 5-methylcytosine"
actgtgaagtgttacacaatcttctcttttaggcaagcctggccattgtgacacccagtgcgacaggcaggggttgtaagttgcatcatagcaccttggagcacttgctcaaggtaccaagt

SEQ ID NO: 3778 - DNA, 122 bp, Homo sapiens
  misc_feature (61)..(62): /note="This region represents a CpG dinucleotide"
  misc_feature (61)..(61): /note="Nucleotide may be methylated to form 5-methylcytosine"
cttaagagatagacaaatataaatagaaacctaattctaacatgatttctatagagaagacgagaaagagacagagtgaacagacctgaggtgctacatgcatgaatacttgctactggttt

SEQ ID NO: 3779 - DNA, 122 bp, Homo sapiens
  misc_feature (61)..(62): /note="This region represents a CpG dinucleotide"
  misc_feature (61)..(61): /note="Nucleotide may be methylated to form 5-methylcytosine"
gctgaatgggacaaggagcactggataagcagaaaggcagagccgaagatcacaggcagacgctgagcttgagtgagagagaactgtgctgccactcactacagcagaaagcacagcaggcc

SEQ ID NO: 3780 - DNA, 122 bp, Homo sapiens
  misc_feature (61)..(62): /note="This region represents a CpG dinucleotide"
  misc_feature (61)..(61): /note="Nucleotide may be methylated to form 5-methylcytosine"
aggactataatcttctctgatggctcttcttattttccagtcatcaaagccatctgcatacgaattggaggtgctgaggtttaaactttctgatcgttgtgatggtgatgctgatgtcagtc

SEQ ID NO: 3781 - DNA, 122 bp, Homo sapiens
  misc_feature (61)..(62): /note="This region represents a CpG dinucleotide"
  misc_feature (61)..(61): /note="Nucleotide may be methylated to form 5-methylcytosine"
gtctggaaaactgtagcgtgttcttaagcgactagaatgccctctttagctgggggtgttcggcctccttttttggaggtgggttgtgatgtcaaaacactgggttgtggtataggaagtgg

SEQ ID NO: 3782 - DNA, 122 bp, Homo sapiens
  misc_feature (61)..(62): /note="This region represents a CpG dinucleotide"
  misc_feature (61)..(61): /note="Nucleotide may be methylated to form 5-methylcytosine"
gcgctatccaggtgacgctggcacagccttcaaagagcagcagaagtaatttgctcccagcgttctttgccacacagagtggcaggattagatgttgacttacctctgccacttccttggtg

SEQ ID NO: 3783 - DNA, 122 bp, Homo sapiens
  misc_feature (61)..(62): /note="This region represents a CpG dinucleotide"
  misc_feature (61)..(61): /note="Nucleotide may be methylated to form 5-methylcytosine"
agcttctctccccgctcctcctccacaccctagctcatctctggctcactccctgtcccccgtctcccccggggctcccacagacatgatgcaaccaggccggagccaagccagctcagagg

SEQ ID NO: 3784 - DNA, 122 bp, Homo sapiens
  misc_feature (61)..(62): /note="This region represents a CpG dinucleotide"
  misc_feature (61)..(61): /note="Nucleotide may be methylated to form 5-methylcytosine"
cctcacgtctgagctgtttcctgagtcacacaatgtcctggacaccctagtaatggggggcggaggaagagtggaggaacactaggggggatgaaggaggggccttctgtccctgacaaccc

SEQ ID NO: 3785 - DNA, 122 bp, Homo sapiens
  misc_feature (61)..(62): /note="This region represents a CpG dinucleotide"
  misc_feature (61)..(61): /note="Nucleotide may be methylated to form 5-methylcytosine"
gactcagagggagggcctggagaacagctcccagcagcccacacatggtgactgcgtgagcggcctgtggccaccacaatagttaccacaaattgggtggcaaaagacaagagaaatgtatt

SEQ ID NO: 3786 - DNA, 122 bp, Homo sapiens
  misc_feature (61)..(62): /note="This region represents a CpG dinucleotide"
  misc_feature (61)..(61): /note="Nucleotide may be methylated to form 5-methylcytosine"
ttatttcaaatcagttctcagagacgttgtaggtggctggcttgggccgcggaggagcttcgccaatcagaagcaagggggtgggtcctgggagccagaaaggctgcctccgcgaggattag

SEQ ID NO: 3787 - DNA, 122 bp, Homo sapiens
  misc_feature (61)..(62): /note="This region represents a CpG dinucleotide"
  misc_feature (61)..(61): /note="Nucleotide may be methylated to form 5-methylcytosine"
tagtaactatcataatgtctaccagtatttattaagcacatattctgtgctgggtgtcgccgtttatatatgctctttcattttgtcctcaccacaactttatgaggcaggtcttgttagct

SEQ ID NO: 3788 - DNA, 122 bp, Homo sapiens
  misc_feature (61)..(62): /note="This region represents a CpG dinucleotide"
  misc_feature (61)..(61): /note="Nucleotide may be methylated to form 5-methylcytosine"
aatgattgaattggaatggcccttgagggagcccaacctttctgttttacagatgaggatcggagagggtgaccagaagtcattcagatgaatcagtcccagagctgggacaagaatcaagg

SEQ ID NO: 3789 - DNA, 122 bp, Homo sapiens
  misc_feature (61)..(62): /note="This region represents a CpG dinucleotide"
  misc_feature (61)..(61): /note="Nucleotide may be methylated to form 5-methylcytosine"
agtgcctggcatatggcaggtgccaacaaatactgctacccccagaagttctgagagagacggaggccttgaatggtacccttaatggggcccacaatctagggactttttattccacaaca

SEQ ID NO: 3790 - DNA, 122 bp, Homo sapiens
  misc_feature (61)..(62): /note="This region represents a CpG dinucleotide"
  misc_feature (61)..(61): /note="Nucleotide may be methylated to form 5-methylcytosine"
gtagggtggagagtgtgcaccacagagactagtcaccaagagtccctgcagttaagtctgcgtatcctgtgctggtgaagggtggatgggctttatgcaaatctctgcttggctgcagaatc

SEQ ID NO: 3791 - DNA, 122 bp, Homo sapiens
  misc_feature (61)..(62): /note="This region represents a CpG dinucleotide"
  misc_feature (61)..(61): /note="Nucleotide may be methylated to form 5-methylcytosine"
ctccacctgggcccgcagctcggatagctgctgctggttcagcctgcgagggtggggggccgcttagtgcctgtgcccacttttggccccctctgtccctgctccgcgcaggtaggtcccca

SEQ ID NO: 3792 - DNA, 122 bp, Homo sapiens
  misc_feature (61)..(62): /note="This region represents a CpG dinucleotide"
  misc_feature (61)..(61): /note="Nucleotide may be methylated to form 5-methylcytosine"
cagggccagtgtgtgtcctctgtccccatgaaccactctgtctcaggaaaatgaattccacgtgggatgagtggtgtgttggtgattttccacgagggttgagtggcgtgttggtgattttc

SEQ ID NO: 3793 - DNA, 122 bp, Homo sapiens
  misc_feature (61)..(62): /note="This region represents a CpG dinucleotide"
  misc_feature (61)..(61): /note="Nucleotide may be methylated to form 5-methylcytosine"
caccagcagcatccatggcctgtcttttggcttaacacttatctcctttggctttgacagcggacggaatagacctcagcagcggcgtggtgaggacttagctgggacctggaatcgtatcc

SEQ ID NO: 3794 - DNA, 122 bp, Homo sapiens
  misc_feature (61)..(62): /note="This region represents a CpG dinucleotide"
  misc_feature (61)..(61): /note="Nucleotide may be methylated to form 5-methylcytosine"
catatataaagacaatctttaaaaattttttttaattaaaaaatatatattagccagacacggttgcacaaacttgtagtcccagctattaaggaagctgaggtcggaggatttgctcgagc

SEQ ID NO: 3795 - DNA, 122 bp, Homo sapiens
  misc_feature (61)..(62): /note="This region represents a CpG dinucleotide"
  misc_feature (61)..(61): /note="Nucleotide may be methylated to form 5-methylcytosine"
gccaaattgaacataacaataatgggaaaacagattttgctcaatcagacccagctcagtcggaacctaggtttattgtggatctgatataattctagcacaaaacaaggaaacctagcatt

SEQ ID NO: 3796 - DNA, 122 bp, Homo sapiens
  misc_feature (61)..(62): /note="This region represents a CpG dinucleotide"
  misc_feature (61)..(61): /note="Nucleotide may be methylated to form 5-methylcytosine"
agtggaccgaccagggtggcagcgttttcattagcaatgataattagtccagcttaatcacgtgggcatttgagcttttgatcccatgctaatttgtggacctgcataaggagataaactaa

SEQ ID NO: 3797 - DNA, 122 bp, Homo sapiens
  misc_feature (61)..(62): /note="This region represents a CpG dinucleotide"
  misc_feature (61)..(61): /note="Nucleotide may be methylated to form 5-methylcytosine"
tttcatctggaagagtttcctaacaccaaaaatactgaaaacaaacaaacaaaccacatacgttacttaagtcacacagatttggcctctaatcaaaaaagagagggggaaatattaacata

SEQ ID NO: 3798 - DNA, 122 bp, Homo sapiens
  misc_feature (61)..(62): /note="This region represents a CpG dinucleotide"
  misc_feature (61)..(61): /note="Nucleotide may be methylated to form 5-methylcytosine"
cccatctgccctaagaacaaagagcttgtaaaccaataaattgggtggaggccgagagctcggggccgtcagcaagcctccagctccggtcccctggacccgccttttagactcttattctg

SEQ ID NO: 3799 - DNA, 122 bp, Homo sapiens
  misc_feature (61)..(62): /note="This region represents a CpG dinucleotide"
  misc_feature (61)..(61): /note="Nucleotide may be methylated to form 5-methylcytosine"
ttaaccgactgctctctgaagacttcttgatttggtatttggagacagacatcaccctgacgtacattaggaggcctgtgatcttaggcttgttccagctgtgattcacttcacgtctgatt

SEQ ID NO: 3800 - DNA, 122 bp, Homo sapiens
  misc_feature (61)..(62): /note="This region represents a CpG dinucleotide"
  misc_feature (61)..(61): /note="Nucleotide may be methylated to form 5-methylcytosine"
ctccttctctgtgccgagcctcttggtataggcggcttcccggaagcactccatgcacaccgccgtcagcttcaccacgctctcggccagcggcaccaggttcaggatggccccaaatggct

SEQ ID NO: 3801 - DNA, 122 bp, Homo sapiens
  misc_feature (61)..(62): /note="This region represents a CpG dinucleotide"
  misc_feature (61)..(61): /note="Nucleotide may be methylated to form 5-methylcytosine"
aactgcgtgaaaatcattgctaaagctgattcaatagctaatgtcaacaatgttgacatacgctgttaactagtatgagaagctgatgcataaaaatgagtttacaagtttactttggcaat

SEQ ID NO: 3802 - DNA, 122 bp, Homo sapiens
  misc_feature (61)..(62): /note="This region represents a CpG dinucleotide"
  misc_feature (61)..(61): /note="Nucleotide may be methylated to form 5-methylcytosine"
aactctgttctggtgagtggctctcagctcacctgcttgtcgcagctctttcctcttgtccgtttctgagcctgcatggtccctaaaagcttagtcttttcaccacgtctctctggatagca

SEQ ID NO: 3803 - DNA, 122 bp, Homo sapiens
  misc_feature (61)..(62): /note="This region represents a CpG dinucleotide"
  misc_feature (61)..(61): /note="Nucleotide may be methylated to form 5-methylcytosine"
tagccgctccagtgtgtggcagtctcggtgcctgcaaagtaaatcctgtccactggctggcgtagaacccttggaacaaaaccaaagaggcaaaagtggtcagtctcagagagtcagagaaa

SEQ ID NO: 3804 - DNA, 122 bp, Homo sapiens
  misc_feature (61)..(62): /note="This region represents a CpG dinucleotide"
  misc_feature (61)..(61): /note="Nucleotide may be methylated to form 5-methylcytosine"
tttaatactgatgccttcccttgaacccagctgtccgctaccactactctcctgcctccacgaggcacctgtgcagaagttatctatcctaggaggcagagcccatgcagctgacaggctct

SEQ ID NO: 3805 - DNA, 122 bp, Homo sapiens
  misc_feature (61)..(62): /note="This region represents a CpG dinucleotide"
  misc_feature (61)..(61): /note="Nucleotide may be methylated to form 5-methylcytosine"
caaggggcaggtggaatgcatggggcacttaagctagcccccttctctgctgggagactccgtgtgcagtgctaaaccttggagattctcaggtttgttttgttaagggaggcagtattccc

SEQ ID NO: 3806 - DNA, 122 bp, Homo sapiens
  misc_feature (61)..(62): /note="This region represents a CpG dinucleotide"
  misc_feature (61)..(61): /note="Nucleotide may be methylated to form 5-methylcytosine"
taaagcagagctcagggctggggctccatattgcagccagggctgttctctcagggagtgcgtggagtgggcacagctacttgtcccctgtggtgtctgggtgccaggaggacaggagagca

SEQ ID NO: 3807 - DNA, 122 bp, Homo sapiens
  misc_feature (61)..(62): /note="This region represents a CpG dinucleotide"
  misc_feature (61)..(61): /note="Nucleotide may be methylated to form 5-methylcytosine"
ttctatacgtgtcccccacccctccagatggtgaccccagaggaagacgtgcattgggtccgctggccccaggccagtgtctctcagccatgtgctcaacacctggtgagctgaagctcagg

SEQ ID NO: 3808 - DNA, 122 bp, Homo sapiens
  misc_feature (61)..(62): /note="This region represents a CpG dinucleotide"
  misc_feature (61)..(61): /note="Nucleotide may be methylated to form 5-methylcytosine"
accccctttcctaccccggcctgtgcttagacatggggaaagctgcctgagaccctggggcgccccccgtgtatctccggaaggaggaaaaggtcactgcactttcacaagcttttatttta

SEQ ID NO: 3809 - DNA, 122 bp, Homo sapiens
  misc_feature (61)..(62): /note="This region represents a CpG dinucleotide"
  misc_feature (61)..(61): /note="Nucleotide may be methylated to form 5-methylcytosine"
ctgcttagaagttaccaactggctgttggttaggcctagcaaattatgtagacttcttttcggctaagaatcatagcaagtttattccctcagggtaggaaggtcatattttttctttaggc

SEQ ID NO: 3810 - DNA, 122 bp, Homo sapiens
  misc_feature (61)..(62): /note="This region represents a CpG dinucleotide"
  misc_feature (61)..(61): /note="Nucleotide may be methylated to form 5-methylcytosine"
ggtccagctggtacaatgggcaccgcccagagcccggcctgggaggcggagactttgagacgtttgaaaacctgaggcagagagggtaccaggtatgccctgtgctggctgacatcgagtgc

SEQ ID NO: 3811 - DNA, 122 bp, Homo sapiens
  misc_feature (61)..(62): /note="This region represents a CpG dinucleotide"
  misc_feature (61)..(61): /note="Nucleotide may be methylated to form 5-methylcytosine"
tccacatgacttgactgtgcatcccatgtacctgtgataatacagacttgttgaccacagcggtttattaatgccaagaaggaaaaagtcaccatcatttgtttataatgattgtcataatg

SEQ ID NO: 3812 - DNA, 122 bp, Homo sapiens
  misc_feature (61)..(62): /note="This region represents a CpG dinucleotide"
  misc_feature (61)..(61): /note="Nucleotide may be methylated to form 5-methylcytosine"
aagctccagttgtccctccatctacacagggacatcggttccaggacaccccgggtttaccgaaatccacgcgtccgcaggacccgcgcccaccctgtggagctgcatgtaggaaatgtcgg

SEQ ID NO: 3813 - DNA, 122 bp, Homo sapiens
  misc_feature (61)..(62): /note="This region represents a CpG dinucleotide"
  misc_feature (61)..(61): /note="Nucleotide may be methylated to form 5-methylcytosine"
actcaacaaagagaggccctgaagaattaagtgggctctctgctgcctctggcttcatgtcgcctgtatttaaatcatgatccctttcatcatgttgttccaacaagcatattttccagaga

SEQ ID NO: 3814 - DNA, 122 bp, Homo sapiens
  misc_feature (61)..(62): /note="This region represents a CpG dinucleotide"
  misc_feature (61)..(61): /note="Nucleotide may be methylated to form 5-methylcytosine"
ttgagagaaacttcttcaaagttgcatagcttatagggcaaagttggaatgagaagacagcgttcttgactgccactccagggctccttgccctggcactgtggtttttaacatgcctctgc

SEQ ID NO: 3815 - DNA, 122 bp, Homo sapiens
  misc_feature (61)..(62): /note="This region represents a CpG dinucleotide"
  misc_feature (61)..(61): /note="Nucleotide may be methylated to form 5-methylcytosine"
ctggtactctcagagaaaaatctatgcacttccccagggcctacagctcacagcaggtggcgggggggcctcctgatctcatcacccaccacttcctggctgctccctagcctctgccttcc

SEQ ID NO: 3816 - DNA, 122 bp, Homo sapiens
  misc_feature (61)..(62): /note="This region represents a CpG dinucleotide"
  misc_feature (61)..(61): /note="Nucleotide may be methylated to form 5-methylcytosine"
tcctcgtggctcctccgacagggtgggcactgtggcggtcgtaaggggcagggatgagcgcgctcagggagaccccgcggttaccgcagcctttcagggaggagggaggcggcggatgcggt

SEQ ID NO: 3817 - DNA, 122 bp, Homo sapiens
  misc_feature (61)..(62): /note="This region represents a CpG dinucleotide"
  misc_feature (61)..(61): /note="Nucleotide may be methylated to form 5-methylcytosine"
agccacctcagggcagggtcctcccctcagtctgctccaggccccagaaaggcctcccagcgctgagaccgcccccacccacggtgcacgctggtgctctccttcagaccagatggcccttc

SEQ ID NO: 3818 - DNA, 122 bp, Homo sapiens
  misc_feature (61)..(62): /note="This region represents a CpG dinucleotide"
  misc_feature (61)..(61): /note="Nucleotide may be methylated to form 5-methylcytosine"
gcaaccagatggactggctggggcagtgattaaaatgacttatctactcttccccccacccgccagggaggcccctgcctcttggttctcaggcacattgagcctggaagggcctcctgcag

SEQ ID NO: 3819 - DNA, 122 bp, Homo sapiens
  misc_feature (61)..(62): /note="This region represents a CpG dinucleotide"
  misc_feature (61)..(61): /note="Nucleotide may be methylated to form 5-methylcytosine"
gagtctggagttgcttggagctctcagaagctcccggagcctccttcctcaattccaacgcggtaaccaagattcctgctgagcttaggtcacagtgtgactgcaggaggaccagccgcgat

SEQ ID NO: 3820 - DNA, 122 bp, Homo sapiens
  misc_feature (61)..(62): /note="This region represents a CpG dinucleotide"
  misc_feature (61)..(61): /note="Nucleotide may be methylated to form 5-methylcytosine"
tcagtaatattgttttttaaataagacttcagatttaggggtggaggaggaacaccggatcgcactgtgggagaaacgctggcctgatgatttattataaataaataatgtgccctactgct

SEQ ID NO: 3821 - DNA, 122 bp, Homo sapiens
  misc_feature (61)..(62): /note="This region represents a CpG dinucleotide"
  misc_feature (61)..(61): /note="Nucleotide may be methylated to form 5-methylcytosine"
agacagcacagctggttaatgtcagtaaagctagcatccacatgttcacatcctatctcacgttctttctacaaccccaagagggcttacttcacttaaattgaagtcaaatcccagctatt

SEQ ID NO: 3822 - DNA, 122 bp, Homo sapiens
  misc_feature (61)..(62): /note="This region represents a CpG dinucleotide"
  misc_feature (61)..(61): /note="Nucleotide may be methylated to form 5-methylcytosine"
tccacccatatctccacctctatttctccagcaacctgtgtttacttcccagcttcctcacgtactcatctgtacttgtttcagcaagttccaaatttgggtttacatattggaaattttat

SEQ ID NO: 3823 - DNA, 122 bp, Homo sapiens
  misc_feature (61)..(62): /note="This region represents a CpG dinucleotide"
  misc_feature (61)..(61): /note="Nucleotide may be methylated to form 5-methylcytosine"
gggccccagatcaccgcgggaggcggagccgcaggcctggggtggggctgggagtgtgggcgtgggaaggggtcggtgggaggggctccgcgcgggatggggcatctggcgcccactcacca

SEQ ID NO: 3824 - DNA, 122 bp, Homo sapiens
  misc_feature (61)..(62): /note="This region represents a CpG dinucleotide"
  misc_feature (61)..(61): /note="Nucleotide may be methylated to form 5-methylcytosine"
ccgttgattaatgggtcagagagctatgtaagactgtgatctcctattgtccctgtttcacggaacaaatgtgggggatgctacaaagattcaacactaggtagacatctaatgaagctggg

SEQ ID NO: 3825 - DNA, 122 bp, Homo sapiens
  misc_feature (61)..(62): /note="This region represents a CpG dinucleotide"
  misc_feature (61)..(61): /note="Nucleotide may be methylated to form 5-methylcytosine"
aactaccctgaggcctttggtgtgtaaatagtctcccaactctgttctttgtacaaaagacgactgaactttaattcttcatatttggtatacatgggggccatgtgtaaatttggcattaa

SEQ ID NO: 3826 - DNA, 122 bp, Homo sapiens
  misc_feature (61)..(62): /note="This region represents a CpG dinucleotide"
  misc_feature (61)..(61): /note="Nucleotide may be methylated to form 5-methylcytosine"
tacggggcagtaagagcccaatgctagtcaatgcctcatctgtgatttcccacaagagttcgtctcaggcagcttaccaagagggctaactataggcctaataacagcagccaggatctact

SEQ ID NO: 3827 - DNA, 122 bp, Homo sapiens
  misc_feature (61)..(62): /note="This region represents a CpG dinucleotide"
  misc_feature (61)..(61): /note="Nucleotide may be methylated to form 5-methylcytosine"
gtgaactaccacctaccaagtagatgactacataggaatggatgtgtgggcaagtggagccgtctgtgtgtgtgtgtgtgtgtgtgtgtgtgtgtgtgtgtgtgtgtattgaagacaagggc

SEQ ID NO: 3828 - DNA, 122 bp, Homo sapiens
  misc_feature (61)..(62): /note="This region represents a CpG dinucleotide"
  misc_feature (61)..(61): /note="Nucleotide may be methylated to form 5-methylcytosine"
cctaaatttatcttaaatgcagtataacaaatttggaatttatctgcaacttacttgaagcgaggaagagctgatgtgataaattacgctaacaagtaaaatctgtgagttgagagatttaa

SEQ ID NO: 3829 - DNA, 122 bp, Homo sapiens
  misc_feature (61)..(62): /note="This region represents a CpG dinucleotide"
  misc_feature (61)..(61): /note="Nucleotide may be methylated to form 5-methylcytosine"
ttgtataatcccctttcctttgagtgtcagtagaacataatcactcttgtgattatgctacgttaaatggcaaaagggagattatctgcgattacctaatcacatgaatctttaaaagcaga

SEQ ID NO: 3830 - DNA, 122 bp, Homo sapiens
  misc_feature (61)..(62): /note="This region represents a CpG dinucleotide"
  misc_feature (61)..(61): /note="Nucleotide may be methylated to form 5-methylcytosine"
gaaatcatgtttaatgtgtgattctgtacagatgggtgtgtaggaaatatgaccggcatacgcactgacgttgacccatacaagtctaggcatctgttaagtgtttggccctgtccaggaag

SEQ ID NO: 3831 - DNA, 122 bp, Homo sapiens
  misc_feature (61)..(62): /note="This region represents a CpG dinucleotide"
  misc_feature (61)..(61): /note="Nucleotide may be methylated to form 5-methylcytosine"
ccacagggcctccagtgtgtactagctggctctttgtaagaaaagtctgccccacccctgcgctactaggaagaatagatgaggagttgtggctaactgttaactgcctaagtacaaatgca

SEQ ID NO: 3832 - DNA, 122 bp, Homo sapiens
  misc_feature (61)..(62): /note="This region represents a CpG dinucleotide"
  misc_feature (61)..(61): /note="Nucleotide may be methylated to form 5-methylcytosine"
aagaagggcggaatcgggaggccactttgtgtcattgcgcgtctagatgtttccgaattgcgtgtgtgtgtgtgactgtgcaatatggttgtgtatgcttgcaatgccgttgtgcctatgag

SEQ ID NO: 3833 - DNA, 122 bp, Homo sapiens
  misc_feature (61)..(62): /note="This region represents a CpG dinucleotide"
  misc_feature (61)..(61): /note="Nucleotide may be methylated to form 5-methylcytosine"
gaacaagagaggagctagcttttctgcacccttgttcgtttcaaatcataaaatcatcgtcgtctcactttcaaccttctgtttcccttcccttattaccttcctttggcatttgcccgcaa

SEQ ID NO: 3834 - DNA, 122 bp, Homo sapiens
  misc_feature (61)..(62): /note="This region represents a CpG dinucleotide"
  misc_feature (61)..(61): /note="Nucleotide may be methylated to form 5-methylcytosine"
ataaggccactggggacagtcactacgttttcaggaaccgctcagcccctctgagtgccccgcagatggacctggcggcgttcctggctacggctgactgggctcccggagcgaggagcgcc

SEQ ID NO: 3835 - DNA, 122 bp, Homo sapiens
  misc_feature (61)..(62): /note="This region represents a CpG dinucleotide"
  misc_feature (61)..(61): /note="Nucleotide may be methylated to form 5-methylcytosine"
tcatgaacagatcagaaaacactgaaaaggcaaagtaacaccctattggacaataaaacacgctccaattacaacagtttggtgctgaggaaagaagagacacaacaggagattgaccagaa

SEQ ID NO: 3836 - DNA, 122 bp, Homo sapiens
  misc_feature (61)..(62): /note="This region represents a CpG dinucleotide"
  misc_feature (61)..(61): /note="Nucleotide may be methylated to form 5-methylcytosine"
gtaaaagaattccgagtttgtgttattttattgaacaaacctattcagcacttggggaatcgcaggcagcattgcagactcgctggctcctggctgtgatctcacacccaaactgcaataat

SEQ ID NO: 3837 - DNA, 122 bp, Homo sapiens
  misc_feature (61)..(62): /note="This region represents a CpG dinucleotide"
  misc_feature (61)..(61): /note="Nucleotide may be methylated to form 5-methylcytosine"
gtggctgcagcgccctgttatggacatcatgtgcgtgcagaatggatgtctgtcaggttccggggcagcccgcagtctgaggcagccagcctggattggagggagtggcaatactacctgcc

SEQ ID NO: 3838 - DNA, 122 bp, Homo sapiens
  misc_feature (61)..(62): /note="This region represents a CpG dinucleotide"
  misc_feature (61)..(61): /note="Nucleotide may be methylated to form 5-methylcytosine"
gaggcccccggacgcctcagtcccccggcggcgccggaggagcggccggccgcggacacgcgctccattgtgtcgggctactccaccctgtccaccatggaccgcagcgtgtgctcgggcgc

SEQ ID NO: 3839 - DNA, 122 bp, Homo sapiens
  misc_feature (61)..(62): /note="This region represents a CpG dinucleotide"
  misc_feature (61)..(61): /note="Nucleotide may be methylated to form 5-methylcytosine"
tctgtatcttttaatgtgtaaccaaaaccacaggcccaaagcaaaaactacaaacaggaacggagagtttcatgaccatagacatgggcatttgcttccaagagcaatggccctgcatgctt

SEQ ID NO: 3840 - DNA, 122 bp, Homo sapiens
  misc_feature (61)..(62): /note="This region represents a CpG dinucleotide"
  misc_feature (61)..(61): /note="Nucleotide may be methylated to form 5-methylcytosine"
ctctggagtgtgaggcaagggcgtgcaacgtgtcagtcatgagctgtgggcactcacaggcgtgcaggaggtgcaggaagacttaggaagtcctcctgaggtcccgtctccagctgaccaaa

SEQ ID NO: 3841 - DNA, 122 bp, Homo sapiens
  misc_feature (61)..(62): /note="This region represents a CpG dinucleotide"
  misc_feature (61)..(61): /note="Nucleotide may be methylated to form 5-methylcytosine"
aaaattgtttgcttaagatatgtcaatagatacctgcagatgtgaaggcttaccaggacacgcaggccatttagagaagagcttcagtatggtttacatttcagcctcagtatttataaaca

SEQ ID NO: 3842 - DNA, 122 bp, Homo sapiens
  misc_feature (61)..(62): /note="This region represents a CpG dinucleotide"
  misc_feature (61)..(61): /note="Nucleotide may be methylated to form 5-methylcytosine"
cactagatggcgccttaagcacatgcttgccttggttctaaataagcaactagagcgctgcgtttactgactggggaaaggtcccaaaggggaatacccgagtagtgcaggaagcctggcta

SEQ ID NO: 3843 - DNA, 122 bp, Homo sapiens
  misc_feature (61)..(62): /note="This region represents a CpG dinucleotide"
  misc_feature (61)..(61): /note="Nucleotide may be methylated to form 5-methylcytosine"
cctgtgtctctgagcacatattgcaataattctctgactagctgctcaaggccttggcttcgtggctttttactccgtttaaaggtcttgatcaggccacttccgtttttaatgtttgagaa

SEQ ID NO: 3844 - DNA, 122 bp, Homo sapiens
  misc_feature (61)..(62): /note="This region represents a CpG dinucleotide"
  misc_feature (61)..(61): /note="Nucleotide may be methylated to form 5-methylcytosine"
aagggcggagcctgtgcagtgagcgtttggccacctggtcgcacaccgagtgctcgtcagcgcgcatggcctgagcgttctgccctgacactcgctggcctctgggcgcttctgtctttgac

SEQ ID NO: 3845 - DNA, 122 bp, Homo sapiens
  misc_feature (61)..(62): /note="This region represents a CpG dinucleotide"
  misc_feature (61)..(61): /note="Nucleotide may be methylated to form 5-methylcytosine"
tgcattttggactgcttgtttggaaggcagcaaagaagagttttcatgggctttggagttcgacatccctggcctgcagtctcagtgcctccacttacaagttgtgaagcctgacacaagtt

SEQ ID NO: 3846 - DNA, 122 bp, Homo sapiens
  misc_feature (61)..(62): /note="This region represents a CpG dinucleotide"
  misc_feature (61)..(61): /note="Nucleotide may be methylated to form 5-methylcytosine"
ccaagcatgaccacatgactcaagactggcttgtttgtgggctggactgagtcaatgaaacgctcagtgagaggaactgagtcacagaggtcaggggtggtagctattcaacaagaagatct

SEQ ID NO: 3847 - DNA, 122 bp, Homo sapiens
  misc_feature (61)..(62): /note="This region represents a CpG dinucleotide"
  misc_feature (61)..(61): /note="Nucleotide may be methylated to form 5-methylcytosine"
gattatggttctggggttaacatcacttagcagggcaggcaggaaggaagaagagctaagcgcagagttgaggggaagaaagataagctcaaattttctggcatctcacttttactacaaaa

SEQ ID NO: 3848 - DNA, 122 bp, Homo sapiens
  misc_feature (61)..(62): /note="This region represents a CpG dinucleotide"
  misc_feature (61)..(61): /note="Nucleotide may be methylated to form 5-methylcytosine"
ggcacagacatctgaccacttcatcagcctcaaaacagaatttgccacctgcttaatttacgcatgagttggcaaaaattattttctccatttagtgctgtctgacaacaccatgactagat

SEQ ID NO: 3849 - DNA, 122 bp, Homo sapiens
  misc_feature (61)..(62): /note="This region represents a CpG dinucleotide"
  misc_feature (61)..(61): /note="Nucleotide may be methylated to form 5-methylcytosine"
aatgtgtccattttctgattatctttcatactccaatgttcagggcacttgatcacacaccgtcccacagggtattatactggcctaatacatttatgacatcctggtcagacctggtaaga

SEQ ID NO: 3850 - DNA, 122 bp, Homo sapiens
  misc_feature (61)..(62): /note="This region represents a CpG dinucleotide"
  misc_feature (61)..(61): /note="Nucleotide may be methylated to form 5-methylcytosine"
cccgcacccttcatgacgtgctgccagagaagccacggagtcgtgctaagtgaccacttccgtgtgaagaaggacactccccggtgccttctggatggatgtcccatgggctccagaatcaa

SEQ ID NO: 3851 - DNA, 122 bp, Homo sapiens
  misc_feature (61)..(62): /note="This region represents a CpG dinucleotide"
  misc_feature (61)..(61): /note="Nucleotide may be methylated to form 5-methylcytosine"
cctcccgggctgggtacgccccggctgacttccctccttggcccctccctctcctcactccgctggtccaagcagtctcctggagtccctcaacttaatctcggccgattctcagacctcct

SEQ ID NO: 3852 - DNA, 122 bp, Homo sapiens
  misc_feature (61)..(62): /note="This region represents a CpG dinucleotide"
  misc_feature (61)..(61): /note="Nucleotide may be methylated to form 5-methylcytosine"
ctcctgccaccagaactcactagttcctcatagaagatccatatctccttgaaatcataacgtttggatcttattgaataataagaaaactatttccttcctaaatgtgagctacattaaaa

SEQ ID NO: 3853 - DNA, 122 bp, Homo sapiens
  misc_feature (61)..(62): /note="This region represents a CpG dinucleotide"
  misc_feature (61)..(61): /note="Nucleotide may be methylated to form 5-methylcytosine"
ccttaagcaacttacgttacgcaataaggcatatacaaaaccagttgcagtgtatagtgacgatgatgtacaatatcagaggtgggataaattactttagtaaagataagcaatgcttgagt

SEQ ID NO: 3854 - DNA, 122 bp, Homo sapiens
  misc_feature (61)..(62): /note="This region represents a CpG dinucleotide"
  misc_feature (61)..(61): /note="Nucleotide may be methylated to form 5-methylcytosine"
cacttgcccgcctcccgccagcggtgggtggctgcgtctgaaggctgtcgtcggttacagcgggaatgggcgggccaacatggtctggaggccggacacaggtgggggccaagagcctaccc

SEQ ID NO: 3855 - DNA, 122 bp, Homo sapiens
  misc_feature (61)..(62): /note="This region represents a CpG dinucleotide"
  misc_feature (61)..(61): /note="Nucleotide may be methylated to form 5-methylcytosine"
ccccctgttggccgcatgccgcggcctctggtgagctgggtggggatgctcctagtgccccgcctgcgtggcgccccccaggggccacccgccacggcgctcgtggtgtctgacccgcaagg

SEQ ID NO: 3856 - DNA, 122 bp, Homo sapiens
  misc_feature (61)..(62): /note="This region represents a CpG dinucleotide"
  misc_feature (61)..(61): /note="Nucleotide may be methylated to form 5-methylcytosine"
ccgcggctgagacaggctgctgcaccaggcggccctggaccgccgcttccgcccctaagccgccctcccagcccaggtgacaggtcgccctacccagggagcatcgccctcctccgccgggg

SEQ ID NO: 3857 - DNA, 122 bp, Homo sapiens
  misc_feature (61)..(62): /note="This region represents a CpG dinucleotide"
  misc_feature (61)..(61): /note="Nucleotide may be methylated to form 5-methylcytosine"
ctttaggtccttggtaagtgattttaaagtgtgtgttgcaaggtgaggaactggttgggacggggcagccttaatggcataataatttgggatacttgagtacaactaggtggagatcctgc

SEQ ID NO: 3858 - DNA, 122 bp, Homo sapiens
  misc_feature (61)..(62): /note="This region represents a CpG dinucleotide"
  misc_feature (61)..(61): /note="Nucleotide may be methylated to form 5-methylcytosine"
aaggtgagaagaggttccagtctggggcggctaggactggggtgatggttctggaggcggcgagggaaggtgtgaggcgaggagacctctcgaatcgcgcccgccccgcccagggccggatt

SEQ ID NO: 3859 - DNA, 122 bp, Homo sapiens
  misc_feature (61)..(62): /note="This region represents a CpG dinucleotide"
  misc_feature (61)..(61): /note="Nucleotide may be methylated to form 5-methylcytosine"
gaggaggtgtgcctgtcagggacaaccagcccaggggagatctgagtggcatcgctggggcgccccatggagttaaccccatggagcttacctgggcagttcagcagcagccacgaatccat

SEQ ID NO: 3860 - DNA, 122 bp, Homo sapiens
  misc_feature (61)..(62): /note="This region represents a CpG dinucleotide"
  misc_feature (61)..(61): /note="Nucleotide may be methylated to form 5-methylcytosine"
ccatatctgttctcacaggagagccataagaggcctgcataagtgcctctgattgtcagacgcatgtaatgaggctcaaaaataataaccagctggagcaatgaatgcaggactgttagtta

SEQ ID NO: 3861 - DNA, 122 bp, Homo sapiens
  misc_feature (61)..(62): /note="This region represents a CpG dinucleotide"
  misc_feature (61)..(61): /note="Nucleotide may be methylated to form 5-methylcytosine"
gctccttctgccgcccggccaggatcaggtggtggttgtggttcaggacgtagaccacggcgttctgcacaatccacgcctcctggatctcctgtccgatctctgcggagcgcagccagtta

SEQ ID NO: 3862 - DNA, 122 bp, Homo sapiens
  misc_feature (61)..(62): /note="This region represents a CpG dinucleotide"
  misc_feature (61)..(61): /note="Nucleotide may be methylated to form 5-methylcytosine"
ggccaagcggaggtgtgggcagcagatgccctgtgcatgctgactcacacaagcagcttccgggccccaggatctgccagggtctctgctggctttcctcaggatggcagggcagcaggaca

SEQ ID NO: 3863 - DNA, 122 bp, Homo sapiens
  misc_feature (61)..(62): /note="This region represents a CpG dinucleotide"
  misc_feature (61)..(61): /note="Nucleotide may be methylated to form 5-methylcytosine"
agacaaagaactgtctttggttgagagggtgtttctgtccacttgctgtgccatgcaggacgtgagacgggatagggagatttcatgtgtgtcataggctgatgtggttctgccattgtaag

SEQ ID NO: 3864 - DNA, 122 bp, Homo sapiens
  misc_feature (61)..(62): /note="This region represents a CpG dinucleotide"
  misc_feature (61)..(61): /note="Nucleotide may be methylated to form 5-methylcytosine"
ctcaggtgttttaaatgcctcacagtagttctctgaataggaaacagcacgcaatgcactcgtgagacttgctggacagaaaacatcctccgtcattgcaaccaaggcagccgagtagatgc

SEQ ID NO: 3865 - DNA, 122 bp, Homo sapiens
  misc_feature (61)..(62): /note="This region represents a CpG dinucleotide"
  misc_feature (61)..(61): /note="Nucleotide may be methylated to form 5-methylcytosine"
caaagtctttcatcacacaataagagcaaaggcctgatatgctaatttgattgaatacaacggaatggtatgaatctgtttcaaagtacaaatgatgattcagaactgatcacatagtgatg

SEQ ID NO: 3866 - DNA, 122 bp, Homo sapiens
  misc_feature (61)..(62): /note="This region represents a CpG dinucleotide"
  misc_feature (61)..(61): /note="Nucleotide may be methylated to form 5-methylcytosine"
tctcattatgtatatgcaaatattccaaaatccaatttttaaaaaatcccaaatctgaaacgcttctggtcccaagcattttggttcagggatactcaagtgtacttattgctacttatttg

SEQ ID NO: 3867 - DNA, 122 bp, Homo sapiens
  misc_feature (61)..(62): /note="This region represents a CpG dinucleotide"
  misc_feature (61)..(61): /note="Nucleotide may be methylated to form 5-methylcytosine"
ttgtctgagcttttgctgtctattttcttctctagcaacgtggacttgatcattcagcctcgtgcttttcatttctttgcagctgacttgcactactcgcgtccccttgtgctagccccatt

SEQ ID NO: 3868 - DNA, 122 bp, Homo sapiens
  misc_feature (61)..(62): /note="This region represents a CpG dinucleotide"
  misc_feature (61)..(61): /note="Nucleotide may be methylated to form 5-methylcytosine"
ccaagatagcactacaccgtcagcctctacagaagaccttgggtctgaaaattaaaacttcgggggaatctcaagcagcttctccaaagagtcttgcaaggggcctccctgcactaactgga

SEQ ID NO: 3869 - DNA, 122 bp, Homo sapiens
  misc_feature (61)..(62): /note="This region represents a CpG dinucleotide"
  misc_feature (61)..(61): /note="Nucleotide may be methylated to form 5-methylcytosine"
actctcagcttagttcttcaggtggttttgtaatcactgggcacttcccttccccatccacggacaggtctcccacagtgtgcagcactgagtgatctgtgaatgaattaaatcgatatccc

SEQ ID NO: 3870 - DNA, 122 bp, Homo sapiens
  misc_feature (61)..(62): /note="This region represents a CpG dinucleotide"
  misc_feature (61)..(61): /note="Nucleotide may be methylated to form 5-methylcytosine"
cctgctggaggaaagcagaaagggaactggggtataaccaagcttgtccaatccgaggcccgtgggtcacatgctgctgagggaggatgactttgaatgaggcccaacacaagttcgtaaag

SEQ ID NO: 3871 - DNA, 122 bp, Homo sapiens
  misc_feature (61)..(62): /note="This region represents a CpG dinucleotide"
  misc_feature (61)..(61): /note="Nucleotide may be methylated to form 5-methylcytosine"
gtggagaaccactgtctccagatgcagacactagagttgggatcagatggcctagctctacgtcttgtcaggcttgctaagtctcattttcttcatctgtaaaatgggagtgataaatacca

SEQ ID NO: 3872 - DNA, 122 bp, Homo sapiens
  misc_feature (61)..(62): /note="This region represents a CpG dinucleotide"
  misc_feature (61)..(61): /note="Nucleotide may be methylated to form 5-methylcytosine"
tttaaaattactatgagaccctcttcagtggaattctttattgagggtagttaaagaaaacggacatttctatcgtttgaaaactgtgacttgtcttgaaaaatgagagaattggagaacat

SEQ ID NO: 3873 - DNA, 122 bp, Homo sapiens
  misc_feature (61)..(62): /note="This region represents a CpG dinucleotide"
  misc_feature (61)..(61): /note="Nucleotide may be methylated to form 5-methylcytosine"
tggtactgacagtaggtactgctaccaaccaattttggattgcagcattaaacatcctggcgcatttttaagtgtatctgagtgggctggagccctcgtctgggccaggaaaaaaaaaaaag

SEQ ID NO: 3874 - DNA, 122 bp, Homo sapiens
  misc_feature (61)..(62): /note="This region represents a CpG dinucleotide"
  misc_feature (61)..(61): /note="Nucleotide may be methylated to form 5-methylcytosine"
tcttcagtttgaaaaggtcccagaactcccctggaatcctcccacttccttccaacagcacggagcctgaggacccagcctaaccctgagtcatacttgggaccaaatgaggaatggggaga

SEQ ID NO: 3875 - DNA, 122 bp, Homo sapiens
  misc_feature (61)..(62): /note="This region represents a CpG dinucleotide"
  misc_feature (61)..(61): /note="Nucleotide may be methylated to form 5-methylcytosine"
atgccaggagaaacattttcatacagacccttatgccacgccttctatttcagagtcccacgctcagaccagtgtgcaccacgtaacaagtactgtcagagaaaacaagctgatttcactaa

SEQ ID NO: 3876 - DNA, 122 bp, Homo sapiens
  misc_feature (61)..(62): /note="This region represents a CpG dinucleotide"
  misc_feature (61)..(61): /note="Nucleotide may be methylated to form 5-methylcytosine"
tgagaatgattctgactgtgagctcagcaataaaaatgctgggaacaattgtgattcttgcgcaacatgcagttaatactggccattcgtggactagtcaagttgtttctttcacggacaag

SEQ ID NO: 3877 - DNA, 122 bp, Homo sapiens
  misc_feature (61)..(62): /note="This region represents a CpG dinucleotide"
  misc_feature (61)..(61): /note="Nucleotide may be methylated to form 5-methylcytosine"
cggggatacgaagaattcaaccagggctggacaagtcagagtgggccaaggtaagagttacggctgctactgtgcccacgttggaacagatagattagttcatctgctagttgtgtggcaag

SEQ ID NO: 3878 - DNA, 122 bp, Homo sapiens
  misc_feature (61)..(62): /note="This region represents a CpG dinucleotide"
  misc_feature (61)..(61): /note="Nucleotide may be methylated to form 5-methylcytosine"
aaaaaaaaaaaaaaaaacagagagagagagaaagaaagaaaaaacactgttcccaagctgcgggctcaggacaatgtctgatgcctggcctagccctcatcaatggccttcacaatccctgc

SEQ ID NO: 3879 - DNA, 122 bp, Homo sapiens
  misc_feature (61)..(62): /note="This region represents a CpG dinucleotide"
  misc_feature (61)..(61): /note="Nucleotide may be methylated to form 5-methylcytosine"
agacatccttcttgcgcaagcgcagttgtaccatgaatgcggtcgtcctgctgcagaccacgcccaccaagggcggggccacatccactgcagctgagctcagagccttctgtggggtctgc

SEQ ID NO: 3880 - DNA, 122 bp, Homo sapiens
  misc_feature (61)..(62): /note="This region represents a CpG dinucleotide"
  misc_feature (61)..(61): /note="Nucleotide may be methylated to form 5-methylcytosine"
tgagagcgcaacatcagaagttgcccagtcctgctggttttgccaactcagacttgcctgcgcagcctccgttgatggccccactcctgttgtcagatcacagagcactctgggatctctac

SEQ ID NO: 3881 - DNA, 122 bp, Homo sapiens
  misc_feature (61)..(62): /note="This region represents a CpG dinucleotide"
  misc_feature (61)..(61): /note="Nucleotide may be methylated to form 5-methylcytosine"
cagtctctgttctcagcaagtttgcaccaaagcgtctgagtctatttactcacaatttgccgatgttttgacatttccttgctgatttgcctcatgaatgagtgcctggtgatactttcctg

SEQ ID NO: 3882 - DNA, 122 bp, Homo sapiens
  misc_feature (61)..(62): /note="This region represents a CpG dinucleotide"
  misc_feature (61)..(61): /note="Nucleotide may be methylated to form 5-methylcytosine"
aggcatatagccttttggcactttacctgtgttccccaaattgcttttctcttttaaggacgttactattgatcatgtccctcatccctagtaaaaggagtgaaaggaaaatcattgataca

SEQ ID NO: 3883 - DNA, 122 bp, Homo sapiens
  misc_feature (61)..(62): /note="This region represents a CpG dinucleotide"
  misc_feature (61)..(61): /note="Nucleotide may be methylated to form 5-methylcytosine"
agggggaggggaaagaaccagggctgagctgtggagtgaaggggagccatttctctccaccgactgcaacctccgtgctcacagctcacggttcaccagaatccaggggcttggtcggccta

SEQ ID NO: 3884 - DNA, 122 bp, Homo sapiens
  misc_feature (61)..(62): /note="This region represents a CpG dinucleotide"
  misc_feature (61)..(61): /note="Nucleotide may be methylated to form 5-methylcytosine"
tggacaggccgctgcaggttttccatgtggaggtggcagtgaaggacatcaatgacaatccgcccaggttctccagacaagaacaaagattattcattttagagtcaagaatgccagattcg

SEQ ID NO: 3885 - DNA, 122 bp, Homo sapiens
  misc_feature (61)..(62): /note="This region represents a CpG dinucleotide"
  misc_feature (61)..(61): /note="Nucleotide may be methylated to form 5-methylcytosine"
ccaattagaacagatagacgcaacatgggccactgatctaaatctctgaggggtggcccacgtgtgtatgtgtgggcatgtgagtgtgtgtgtgtgtgtgtgtgtgtgtgtgtgtgtgtatt

SEQ ID NO: 3886 - DNA, 122 bp, Homo sapiens
  misc_feature (61)..(62): /note="This region represents a CpG dinucleotide"
  misc_feature (61)..(61): /note="Nucleotide may be methylated to form 5-methylcytosine"
gggctaatccttgcctttgtgggagagcctgggaccagagggtctgccaccagtcacagccgcctgctacgatgctggccccgtggctctgccaccaccccaggaccctgtaggcctcctga

SEQ ID NO: 3887 - DNA, 122 bp, Homo sapiens
  misc_feature (61)..(62): /note="This region represents a CpG dinucleotide"
  misc_feature (61)..(61): /note="Nucleotide may be methylated to form 5-methylcytosine"
tgaaagagaaaaaggtagctttgggttctccgggtggatgagacagcgaagagctgtccgcgacctgatggtgctgaaggcaggggagggagaccggggttcaggtgcacccccagaccagg

SEQ ID NO: 3888 - DNA, 122 bp, Homo sapiens
  misc_feature (61)..(62): /note="This region represents a CpG dinucleotide"
  misc_feature (61)..(61): /note="Nucleotide may be methylated to form 5-methylcytosine"
gacagagtttgacttcatagcctttgaaatataactgcttgaatatacttgctattttaccgcagtttggctctgtctctctctctctctttgtgtgtgtgtgtatgtgtgaaagagaaaga

SEQ ID NO: 3889 - DNA, 122 bp, Homo sapiens
  misc_feature (61)..(62): /note="This region represents a CpG dinucleotide"
  misc_feature (61)..(61): /note="Nucleotide may be methylated to form 5-methylcytosine"
gaaatggctctgtcattttctagatgacagctcctattttccactggcttctggcacatgcgctatcatccgtctatgtcaagaagacacttgcttatctggttgctagaaatgcttttgtt

SEQ ID NO: 3890 - DNA, 122 bp, Homo sapiens
  misc_feature (61)..(62): /note="This region represents a CpG dinucleotide"
  misc_feature (61)..(61): /note="Nucleotide may be methylated to form 5-methylcytosine"
agcagggtgttgttatccctggcttgttttcttattagtttatgtggggaatgaagtaaacggaatgtgctagacatacatcctgtaatgaggctattagccatttatgggcacctcctttg

SEQ ID NO: 3891 - DNA, 122 bp, Homo sapiens
  misc_feature (61)..(62): /note="This region represents a CpG dinucleotide"
  misc_feature (61)..(61): /note="Nucleotide may be methylated to form 5-methylcytosine"
ctcctttcttctctttcacaccctcacctttggctaggccactcgatgttgcaagaaacacgtccatcagcaattgcctcagtagaaaactccctctgctcccctcctgcatccacatagca

SEQ ID NO: 3892 - DNA, 122 bp, Homo sapiens
  misc_feature (61)..(62): /note="This region represents a CpG dinucleotide"
  misc_feature (61)..(61): /note="Nucleotide may be methylated to form 5-methylcytosine"
ggatctatcctgcaactcggagaacccttttcaaaagaagctacccaatcccaaaccttccgcttttttccaaagagagggaggagataaatagactcaattaatccgtcgactttttctcc

SEQ ID NO: 3893 - DNA, 122 bp, Homo sapiens
  misc_feature (61)..(62): /note="This region represents a CpG dinucleotide"
  misc_feature (61)..(61): /note="Nucleotide may be methylated to form 5-methylcytosine"
tccaactgctgctgagggctcccgggacagctacaaggcaccacaatgacctagaggcttcggaaagttgcacaacaggatatgaggccattcctgggagtcactgagtttgggttctgttt

SEQ ID NO: 3894 - DNA, 122 bp, Homo sapiens
  misc_feature (61)..(62): /note="This region represents a CpG dinucleotide"
  misc_feature (61)..(61): /note="Nucleotide may be methylated to form 5-methylcytosine"
ccctaacccttgactaacttcctgtatgtatgtagtcagtttactccctcagtttctactcgctcagaaactgagtggactacatacgggaaattagtcgagacaaggaagatggaacagag

SEQ ID NO: 3895 - DNA, 122 bp, Homo sapiens
  misc_feature (61)..(62): /note="This region represents a CpG dinucleotide"
  misc_feature (61)..(61): /note="Nucleotide may be methylated to form 5-methylcytosine"
aacacattggctcggaaatgtacagtcataggcaatttataaaactgacaaaaattattccgctaatgccaggaataacggaggatattcagaaagaaaaacaggaatattttcttgtgtaa

SEQ ID NO: 3896 - DNA, 122 bp, Homo sapiens
  misc_feature (61)..(62): /note="This region represents a CpG dinucleotide"
  misc_feature (61)..(61): /note="Nucleotide may be methylated to form 5-methylcytosine"
acagggctggaagcggagggtcggtgccgccagtagggtggacggagtcatatcactaaacgcacactacaccagtgtcctctggtgccaccggcatggggactggggactgtgtctcaagg

SEQ ID NO: 3897 - DNA, 122 bp, Homo sapiens
  misc_feature (61)..(62): /note="This region represents a CpG dinucleotide"
  misc_feature (61)..(61): /note="Nucleotide may be methylated to form 5-methylcytosine"
tttccccatagacataatccagccgttagttattcaaagcagcagatgggagaaggaatccgtggaaatgtggatttattagctctcacaatgaaagaccacactggttatgctaaggatta

SEQ ID NO: 3898 - DNA, 122 bp, Homo sapiens
  misc_feature (61)..(62): /note="This region represents a CpG dinucleotide"
  misc_feature (61)..(61): /note="Nucleotide may be methylated to form 5-methylcytosine"
tattgcattcaaatgcaccacaagcatctttaatagcaacacttcctagggactgtgctacgagggtttgacagactctcaaataccatgtcctctatagggacaggaagagaggtctggta

SEQ ID NO: 3899 - DNA, 122 bp, Homo sapiens
  misc_feature (61)..(62): /note="This region represents a CpG dinucleotide"
  misc_feature (61)..(61): /note="Nucleotide may be methylated to form 5-methylcytosine"
tctttcaagttgttgtgcttgagccactctgtcattagctgtgggcgttccgagtgccagcgcacagtgttgagcagagcgggtaggagcgccctggcttcagggagggcccccgccccctg

SEQ ID NO: 3900 - DNA, 122 bp, Homo sapiens
  misc_feature (61)..(62): /note="This region represents a CpG dinucleotide"
  misc_feature (61)..(61): /note="Nucleotide may be methylated to form 5-methylcytosine"
tacaacatgtactctgaaatctgtttcttcctggtttccctcctaagtttgagtccttggcgccccacagtatctaatgcccacatgaatggccttcgtatcaagtgataatatttgaaact

SEQ ID NO: 3901 - DNA, 122 bp, Homo sapiens
  misc_feature (61)..(62): /note="This region represents a CpG dinucleotide"
  misc_feature (61)..(61): /note="Nucleotide may be methylated to form 5-methylcytosine"
agagatcctccggcctcagcttcccaagttgctgggattattggcgtgaggcactgcacccggcccaatctaaaaatttcatacaccaacccacaacctgatgtcccatgtccctctgtcct

SEQ ID NO: 3902 - DNA, 122 bp, Homo sapiens
  misc_feature (61)..(62): /note="This region represents a CpG dinucleotide"
  misc_feature (61)..(61): /note="Nucleotide may be methylated to form 5-methylcytosine"
tcatggccaaccttgagtaacagcaggtcttctgtgggagaagttgctggagtccaaccccggaagtagcaagtgcctctcccacagctgagggccagaacaccacgttctcttgtgctctg

SEQ ID NO: 3903 - DNA, 122 bp, Homo sapiens
  misc_feature (61)..(62): /note="This region represents a CpG dinucleotide"
  misc_feature (61)..(61): /note="Nucleotide may be methylated to form 5-methylcytosine"
ggggcccccgcagcagcagagcccacgtgatgtggggaaatcagtcagagcgcctgattccgagggagaaaccagctcagctcacacacgaacctatgaaaattctttattgttaatttctt

SEQ ID NO: 3904 - DNA, 122 bp, Homo sapiens
  misc_feature (61)..(62): /note="This region represents a CpG dinucleotide"
  misc_feature (61)..(61): /note="Nucleotide may be methylated to form 5-methylcytosine"
catgtggtagccaaaacactaatgcagactcaactgcattaagagacaaagtgtacaggacgagggagtgcacagcaccacccctgccctggacaggccatagttagaatagagggcttggc

SEQ ID NO: 3905 - DNA, 122 bp, Homo sapiens
  misc_feature (61)..(62): /note="This region represents a CpG dinucleotide"
  misc_feature (61)..(61): /note="Nucleotide may be methylated to form 5-methylcytosine"
acactgaagtttccggttccaatgtctttgttgctttttctaattttttggctgagagctcgtgtgctttcctcctcccaggggttctgctgagcaggcctggttggaagagatcccaggcg

SEQ ID NO: 3906 - DNA, 122 bp, Homo sapiens
  misc_feature (61)..(62): /note="This region represents a CpG dinucleotide"
  misc_feature (61)..(61): /note="Nucleotide may be methylated to form 5-methylcytosine"
catgagaagggttatatgccactaatggttagacattggaaccagagtccaacccttgaacgtggtgcatttggggatttgtcattactgtggtacacctggaacgtagtgtttgtagaggt

SEQ ID NO: 3907 - DNA, 122 bp, Homo sapiens
  misc_feature (61)..(62): /note="This region represents a CpG dinucleotide"
  misc_feature (61)..(61): /note="Nucleotide may be methylated to form 5-methylcytosine"
tggttagaaaatcagttcgaacttcttgagttttgtgttttaaactcttctcaactgttccgatgattgatggatggcccagaggcgacctctttatctccagcaacatatttggctgttgg

SEQ ID NO: 3908 - DNA, 122 bp, Homo sapiens
  misc_feature (61)..(62): /note="This region represents a CpG dinucleotide"
  misc_feature (61)..(61): /note="Nucleotide may be methylated to form 5-methylcytosine"
agggcttgttattgtcaatagcacaagaggctaaagatggcgccatttccggtcacgcggcgccgagggaggggcggtgtcaacctcagggagtgggggtgagggaagcgctgcagccgccc

SEQ ID NO: 3909 - DNA, 122 bp, Homo sapiens
  misc_feature (61)..(62): /note="This region represents a CpG dinucleotide"
  misc_feature (61)..(61): /note="Nucleotide may be methylated to form 5-methylcytosine"
ttattcttgccagagactctagttctattctcagaactgtgcacagagttagcccctagacgcgctgctgctgtctttagcatcatgtgctagttgggagtctgctgagaagcagatgccaa

SEQ ID NO: 3910 - DNA, 122 bp, Homo sapiens
  misc_feature (61)..(62): /note="This region represents a CpG dinucleotide"
  misc_feature (61)..(61): /note="Nucleotide may be methylated to form 5-methylcytosine"
taatgtattcaaggtcatactattatctaggtccagaacatgctggaacacagggatccccgaagtttttatctaacacgacatcactatgcccgccagattcttctcaattacatatccat

SEQ ID NO: 3911 - DNA, 122 bp, Homo sapiens
  misc_feature (61)..(62): /note="This region represents a CpG dinucleotide"
  misc_feature (61)..(61): /note="Nucleotide may be methylated to form 5-methylcytosine"
cgagggaggagcccgcatcactcagcctcctctcagaaggccccacctgttaacatcacacggggcttaggtttcactgtacgtatttgagaggcacctacattcagactatagcacaggcc

SEQ ID NO: 3912 - DNA, 122 bp, Homo sapiens
  misc_feature (61)..(62): /note="This region represents a CpG dinucleotide"
  misc_feature (61)..(61): /note="Nucleotide may be methylated to form 5-methylcytosine"
cacttgcaaaattcagaaatactttgtgcaaatgcccccacagcagatcttgatgtatctcgacttgttgcaacaccatgtttaagaactgtggttctcagtctgacacagaacaaagactc

SEQ ID NO: 3913 - DNA, 122 bp, Homo sapiens
  misc_feature (61)..(62): /note="This region represents a CpG dinucleotide"
  misc_feature (61)..(61): /note="Nucleotide may be methylated to form 5-methylcytosine"
tctttaaaaactaaccactcccagcatggcccacagagcagcagcagcagcagcatctcccgggagtgtgtgaaaaatgcagcatctcagacctcaccccagacctcctgagtcagagtctg

SEQ ID NO: 3914 - DNA, 122 bp, Homo sapiens
  misc_feature (61)..(62): /note="This region represents a CpG dinucleotide"
  misc_feature (61)..(61): /note="Nucleotide may be methylated to form 5-methylcytosine"
gatgggaacaggtggacagagagagacagagtaaagcagagacaaagataccagaaatatcgagagaggaaacagtgactaagggaactctagagcagaactacttgcttaaagtaagtccc

SEQ ID NO: 3915 - DNA, 122 bp, Homo sapiens
  misc_feature (61)..(62): /note="This region represents a CpG dinucleotide"
  misc_feature (61)..(61): /note="Nucleotide may be methylated to form 5-methylcytosine"
gcgtagacccagaggtgcttccctctagcgcacagtgctgctggccccgctgtgggcccccggcctcaacccagagagcttctccaaatcagtggctgtggccccaccgtctcccgagcgcc

SEQ ID NO: 3916 - DNA, 122 bp, Homo sapiens
  misc_feature (61)..(62): /note="This region represents a CpG dinucleotide"
  misc_feature (61)..(61): /note="Nucleotide may be methylated to form 5-methylcytosine"
aaatgttgccaaattcttcaaataactgtttggggggtggggggagatgaaagagagtcgcgttttgtttacagttaaagacatccaatatcttaaaaaggagttttcctttagaaacacac

SEQ ID NO: 3917 - DNA, 122 bp, Homo sapiens
  misc_feature (61)..(62): /note="This region represents a CpG dinucleotide"
  misc_feature (61)..(61): /note="Nucleotide may be methylated to form 5-methylcytosine"
gtgcagggcttttcccatctcacccctcaggatctgggcctctgcccccacctcccatcccgacagaccactgtctccaagagcagagctttaacttcagaattttagtgtatgtacaaaag

SEQ ID NO: 3918 - DNA, 122 bp, Homo sapiens
  misc_feature (61)..(62): /note="This region represents a CpG dinucleotide"
  misc_feature (61)..(61): /note="Nucleotide may be methylated to form 5-methylcytosine"
tgcattgtgggcattggtaagagaactcattggagttttttgggggaagggtgctggggacgatggcagagagagatatatgatcaggtttagcacagaatataggcaaacgcacccttcaa

SEQ ID NO: 3919 - DNA, 122 bp, Homo sapiens
  misc_feature (61)..(62): /note="This region represents a CpG dinucleotide"
  misc_feature (61)..(61): /note="Nucleotide may be methylated to form 5-methylcytosine"
gtctagtcctgaatgtggctctttcctgtgaggtcctcctgcctgtgtggttccacgtatcgtacagatgaggaaactgagactaggggtctcctccctgggccccagggcaccctggggct

SEQ ID NO: 3920 - DNA, 122 bp, Homo sapiens
  misc_feature (61)..(62): /note="This region represents a CpG dinucleotide"
  misc_feature (61)..(61): /note="Nucleotide may be methylated to form 5-methylcytosine"
ccccattctgaccccatcacctcccaacgctgacccccataatgtcagtctgatttctgtcgccctggtatactgaccctaattattgtctgcgctgacccagtcaccccgtagggacccca

SEQ ID NO: 3921 - DNA, 122 bp, Homo sapiens
  misc_feature (61)..(62): /note="This region represents a CpG dinucleotide"
  misc_feature (61)..(61): /note="Nucleotide may be methylated to form 5-methylcytosine"
gttatttagtgtacatcaagtgtgagaatgctgcccccatgcttccaaatacagccatcacgtggaatgctttctctctccaaatgtaagagaacttttctatggggaatatagggaaaaag

SEQ ID NO: 3922 - DNA, 122 bp, Homo sapiens
  misc_feature (61)..(62): /note="This region represents a CpG dinucleotide"
  misc_feature (61)..(61): /note="Nucleotide may be methylated to form 5-methylcytosine"
tcagggcctgtccatgttctccctatgttcaccccttaaccttgcaggtggttgggggggcgagagagatagaaagactgtgtctgtctgtgtgtgtgtgtgtgtgtgtgtgtgtgtgtgtg

SEQ ID NO: 3923 - DNA, 122 bp, Homo sapiens
  misc_feature (61)..(62): /note="This region represents a CpG dinucleotide"
  misc_feature (61)..(61): /note="Nucleotide may be methylated to form 5-methylcytosine"
atatcctgaatcagggagatcctcaggggaggcatgagtgagctggcatcagacttcctacgttctgaatcaagaagtattcctagaataaacaagttggtcatgtccaaagagatctgaat

SEQ ID NO: 3924 - DNA, 122 bp, Homo sapiens
  misc_feature (61)..(62): /note="This region represents a CpG dinucleotide"
  misc_feature (61)..(61): /note="Nucleotide may be methylated to form 5-methylcytosine"
gggtgatggagcctcagcctcaaaggggacagcttcacacagttcacatttcaaatgtgtcgctcacattccaacatccctttacagtttacagagcacattcacgttctctcatttaatcc

SEQ ID NO: 3925 - DNA, 122 bp, Homo sapiens
  misc_feature (61)..(62): /note="This region represents a CpG dinucleotide"
  misc_feature (61)..(61): /note="Nucleotide may be methylated to form 5-methylcytosine"
gtgagtccagggttaatgtaccctaatagtccaggaaggtccagagctagtcaatgatttcgtttatctgttttgtgaaattaaggctttttttcctaaattataccattttcctgttagca

SEQ ID NO: 3926 - DNA, 122 bp, Homo sapiens
  misc_feature (61)..(62): /note="This region represents a CpG dinucleotide"
  misc_feature (61)..(61): /note="Nucleotide may be methylated to form 5-methylcytosine"
tttctccaccagcctccgacagaaaccctgcagagcttccattctgcgttcagccaccatcgcctcccacccagtggtttctaaacaatctctgagcaagattttggttttatcagcctatt

SEQ ID NO: 3927 - DNA, 122 bp, Homo sapiens
  misc_feature (61)..(62): /note="This region represents a CpG dinucleotide"
  misc_feature (61)..(61): /note="Nucleotide may be methylated to form 5-methylcytosine"
actgagtgtggacggtcattgctctgctgcggcttcccggggagcacggctcacggcccacgtcaccatgcacctcgtgtgcactcggacaggccgcagccaccagcctctcccctgttgtc

SEQ ID NO: 3928 - DNA, 122 bp, Homo sapiens
  misc_feature (61)..(62): /note="This region represents a CpG dinucleotide"
  misc_feature (61)..(61): /note="Nucleotide may be methylated to form 5-methylcytosine"
gaggttcaacagctctctggggaggaactaagtgcaggggaagttgtggttattttttaccgagtcctgagaagtggcctagggattctgactgtgatccattcctgaactggcagggcttc

SEQ ID NO: 3929 - DNA, 122 bp, Homo sapiens
  misc_feature (61)..(62): /note="This region represents a CpG dinucleotide"
  misc_feature (61)..(61): /note="Nucleotide may be methylated to form 5-methylcytosine"
tgaagatgaaatgtggaggtggcaagacctgcggagtccccgaacccttggccctctctccgcacgcctgcgtttctgctcctgtgtgcttgtctgtctgtgacacaggccgcggccgcatg

SEQ ID NO: 3930 - DNA, 122 bp, Homo sapiens
  misc_feature (61)..(62): /note="This region represents a CpG dinucleotide"
  misc_feature (61)..(61): /note="Nucleotide may be methylated to form 5-methylcytosine"
ctatcttagcagtgtttgtgcaggtctgtcttggtgctgacttttcatcttcttcatgtccgtaaaacttccccaagagaggggatttacggcagcctttacttctcaggagtttctgcttt

SEQ ID NO: 3931 - DNA, 122 bp, Homo sapiens
  misc_feature (61)..(62): /note="This region represents a CpG dinucleotide"
  misc_feature (61)..(61): /note="Nucleotide may be methylated to form 5-methylcytosine"
gagaggggccctccgagttctgctgtcacctgggggcgcctcacttcattcagccagtggcggggctccctgggtcggcacagagtcaggggagggggctgggggacctcctggtgggaaaa

SEQ ID NO: 3932 - DNA, 122 bp, Homo sapiens
  misc_feature (61)..(62): /note="This region represents a CpG dinucleotide"
  misc_feature (61)..(61): /note="Nucleotide may be methylated to form 5-methylcytosine"
tcctctccacgtatgctcttcacaggtctctccagcagggtagtcagatatcttacatagcggcttagggctcccaaaagcaaacattccaagaggaagcagaagctgccagtccttttaaa

SEQ ID NO: 3933 - DNA, 122 bp, Homo sapiens
  misc_feature (61)..(62): /note="This region represents a CpG dinucleotide"
  misc_feature (61)..(61): /note="Nucleotide may be methylated to form 5-methylcytosine"
cccagcatgaaaaccaacagaatcctagggtgccagagggcagagatgccaggacagccacgcctggaaacagccggttccatctgtgagcacagggctccttaaagcaccctcccccacaa

SEQ ID NO: 3934 - DNA, 122 bp, Homo sapiens
  misc_feature (61)..(62): /note="This region represents a CpG dinucleotide"
  misc_feature (61)..(61): /note="Nucleotide may be methylated to form 5-methylcytosine"
aagcaaatccattaagatcttcctgcaaaaaaaaaatgtgttattgagaaagccctggtgcgataggaaggaggggaacctgcactagctctgggacatttgtggcatcagttcccctctct

SEQ ID NO: 3935 - DNA, 122 bp, Homo sapiens
  misc_feature (61)..(62): /note="This region represents a CpG dinucleotide"
  misc_feature (61)..(61): /note="Nucleotide may be methylated to form 5-methylcytosine"
tcactatgcagttgacatcgaggccagcctctctggagtttaagaattagctaattcttccgttggaggagagggaagtctgcaatacccactaaaattgcagctgacttcctctttggctt

SEQ ID NO: 3936 - DNA, 122 bp, Homo sapiens
  misc_feature (61)..(62): /note="This region represents a CpG dinucleotide"
  misc_feature (61)..(61): /note="Nucleotide may be methylated to form 5-methylcytosine"
gggggccgctcctcggggccgtctgcctgcaggaaggagtccacggacttgctgctgaggcggaagggcatcaggcggcagaaggtgccgggagagtagggaatctgcgtgcgggccctctg

SEQ ID NO: 3937 - DNA, 122 bp, Homo sapiens
  misc_feature (61)..(62): /note="This region represents a CpG dinucleotide"
  misc_feature (61)..(61): /note="Nucleotide may be methylated to form 5-methylcytosine"
ttgtgcaagccaaggagttacttccgtggggagaaagctgcagtgctgattggaaacatgcgttattgctggtttaaatttggcttatttgcaacagacagagattgggagagataggagaa

SEQ ID NO: 3938 - DNA, 122 bp, Homo sapiens
  misc_feature (61)..(62): /note="This region represents a CpG dinucleotide"
  misc_feature (61)..(61): /note="Nucleotide may be methylated to form 5-methylcytosine"
tcacagttccacatgactggggaggcctcacaatcactgtggaaaggggaagcaagataccgcttacacggcagcaggcaagaaagagcttgtgcaagggaactcccatttataaaatcatc

SEQ ID NO: 3939 - DNA, 122 bp, Homo sapiens
  misc_feature (61)..(62): /note="This region represents a CpG dinucleotide"
  misc_feature (61)..(61): /note="Nucleotide may be methylated to form 5-methylcytosine"
atattaccctttttagcttgataaagatcaaagtcacgtaccaaatagtctcttggaaaccgtacatacaactcctggtcttctctggcagtaaaagtctgaaagctgtttttgaattctgc

SEQ ID NO: 3940 - DNA, 122 bp, Homo sapiens
  misc_feature (61)..(62): /note="This region represents a CpG dinucleotide"
  misc_feature (61)..(61): /note="Nucleotide may be methylated to form 5-methylcytosine"
ctctgccctctgtgtcatgctgcagtaaagtatgggtcaacatccccaaaatgtgtgactcgcccaaattaagtggtgtcatactctgatccttcttccactgaacatcacattcttcatga

SEQ ID NO: 3941 - DNA, 122 bp, Homo sapiens
  misc_feature (61)..(62): /note="This region represents a CpG dinucleotide"
  misc_feature (61)..(61): /note="Nucleotide may be methylated to form 5-methylcytosine"
aaatccctgctttactgatcactaacactgtgatgtgggtatttcagtttactaagtctccgtttttgtctgtgaaatggagattgttgctttcacaaactgaatatctatgatgggccagg

SEQ ID NO: 3942 - DNA, 122 bp, Homo sapiens
  misc_feature (61)..(62): /note="This region represents a CpG dinucleotide"
  misc_feature (61)..(61): /note="Nucleotide may be methylated to form 5-methylcytosine"
ctcctgatgtcaggtgatccacctggctcagcctcccaaagtgctaggattataggcatgcgtggccaacttcgttcttttgtatgtagatctttattaccatttgttgaaaagtctattct

SEQ ID NO: 3943 - DNA, 122 bp, Homo sapiens
  misc_feature (61)..(62): /note="This region represents a CpG dinucleotide"
  misc_feature (61)..(61): /note="Nucleotide may be methylated to form 5-methylcytosine"
ctctctttcttgccccactaatccacataacaatatgttgtccatattgctttgcagcatcgtgaaagtgctgactcatgtttcacaccagtaccaactcactctaacactcacaatctttc

SEQ ID NO: 3944 - DNA, 122 bp, Homo sapiens
  misc_feature (61)..(62): /note="This region represents a CpG dinucleotide"
  misc_feature (61)..(61): /note="Nucleotide may be methylated to form 5-methylcytosine"
aaatgtgcattaaaacctctgagattacatctcctataggtacatatggcccaatgggcacgcacttcctgcatgccatagagacaggccaccagcagaggaggccgcaggctcggacagag

SEQ ID NO: 3945 - DNA, 122 bp, Homo sapiens
  misc_feature (61)..(62): /note="This region represents a CpG dinucleotide"
  misc_feature (61)..(61): /note="Nucleotide may be methylated to form 5-methylcytosine"
gtggaaggaaggggagattgagagagaaagaatggtttaagaagcagctggtgaaactagcgctggacagatcacacatgggcttaaaaaaggtcttattagggagttttaaaggcatcccc

SEQ ID NO: 3946 - DNA, 122 bp, Homo sapiens
  misc_feature (61)..(62): /note="This region represents a CpG dinucleotide"
  misc_feature (61)..(61): /note="Nucleotide may be methylated to form 5-methylcytosine"
tggcacatgtagctgcaggagaggctgggaaagcaagtttctggcaaagttgaatgggatcgccataacttgtttaggtaaattatgatttatgcccacactgtgaacacagttgccctgcc

SEQ ID NO: 3947 - DNA, 122 bp, Homo sapiens
  misc_feature (61)..(62): /note="This region represents a CpG dinucleotide"
  misc_feature (61)..(61): /note="Nucleotide may be methylated to form 5-methylcytosine"
ccgctggagttagaggtggcgtgagctcttgcgtctcctgatctagagaggactgcaaggcgccccagggcccatgggtccccagactgctctccagcgccacacccaggcctgcggctctc

SEQ ID NO: 3948 - DNA, 122 bp, Homo sapiens
  misc_feature (61)..(62): /note="This region represents a CpG dinucleotide"
  misc_feature (61)..(61): /note="Nucleotide may be methylated to form 5-methylcytosine"
aaaatgcacaatttttttgagacagggtctcactctgtcaccaggctgctactgcaggctcgacatcctaggctcagtgatcctcccactacagtcccctactgagctgggactacaggtgc

SEQ ID NO: 3949 - DNA, 122 bp, Homo sapiens
  misc_feature (61)..(62): /note="This region represents a CpG dinucleotide"
  misc_feature (61)..(61): /note="Nucleotide may be methylated to form 5-methylcytosine"
atatcctgagaagcccctcagtcctgggcaaatcaggaggttggtcactctaatcaaagacgtttttaaaaaggaaaagaaagatgagtctacaggaagaggaaatgggaaaaataaggtat

SEQ ID NO: 3950 - DNA, 122 bp, Homo sapiens
  misc_feature (61)..(62): /note="This region represents a CpG dinucleotide"
  misc_feature (61)..(61): /note="Nucleotide may be methylated to form 5-methylcytosine"
gcacaaacagtgggcaacagcaggtgtctgcccccaaaacttctcagctagcattctccacgtaagcaccaattccacagttactaactgtaacgcgtgcagggaagaaaaggcccgtaggg

SEQ ID NO: 3951 - DNA, 122 bp, Homo sapiens
  misc_feature (61)..(62): /note="This region represents a CpG dinucleotide"
  misc_feature (61)..(61): /note="Nucleotide may be methylated to form 5-methylcytosine"
cccttcccctcctccccttcccttccccagtcttcccctcccactctttcaagcccccagcgtgctgtgcagttattagtttaggttcatttagaatcggcttagcaaccccacacccctgg

SEQ ID NO: 3952 - DNA, 122 bp, Homo sapiens
  misc_feature (61)..(62): /note="This region represents a CpG dinucleotide"
  misc_feature (61)..(61): /note="Nucleotide may be methylated to form 5-methylcytosine"
atgagccaccgtgcctggccataatttgctattgagcactaacttcaacttggagtttcccgtttgtgttgtcaataacagtttttcacaaaaactttttttgaacttcatgttttctcaaa

SEQ ID NO: 3953 - DNA, 122 bp, Homo sapiens
  misc_feature (61)..(62): /note="This region represents a CpG dinucleotide"
  misc_feature (61)..(61): /note="Nucleotide may be methylated to form 5-methylcytosine"
ggtttcatttggcttcctttttctgagtctctatacctgttcagtgtacttagcttctagcgttctggtgcaactacctggcactcatttcttgctttctccttttgactgtctcttaaaca

SEQ ID NO: 3954 - DNA, 122 bp, Homo sapiens
  misc_feature (61)..(62): /note="This region represents a CpG dinucleotide"
  misc_feature (61)..(61): /note="Nucleotide may be methylated to form 5-methylcytosine"
cgcggccccgcgcccttacctggagcggcctgcagcaggcacaggagcagggggccccagcgctcgggccccgccatggccttcctgccgcggcgtccccgcccgggcccaggtccccgcct

SEQ ID NO: 3955 - DNA, 122 bp, Homo sapiens
  misc_feature (61)..(62): /note="This region represents a CpG dinucleotide"
  misc_feature (61)..(61): /note="Nucleotide may be methylated to form 5-methylcytosine"
aacagcagcagagtcatcaatgcgtgtaaactgcctgcacctggagctgcccggagaggacgctgcaaagctttagagcaaggcctccagcctaatccggatgggtgggtggaaaccaagca

SEQ ID NO: 3956 - DNA, 122 bp, Homo sapiens
  misc_feature (61)..(62): /note="This region represents a CpG dinucleotide"
  misc_feature (61)..(61): /note="Nucleotide may be methylated to form 5-methylcytosine"
aatgcaggccagacttttaggggctcgacagaacacagctggagaaacatccacaccacacgcggtttcacctgccacacggcagcccgggtgcccggatcactgtgtgtggagactcaggc

SEQ ID NO: 3957 - DNA, 122 bp, Homo sapiens
  misc_feature (61)..(62): /note="This region represents a CpG dinucleotide"
  misc_feature (61)..(61): /note="Nucleotide may be methylated to form 5-methylcytosine"
gccggctgaggagagaccctcggagccttcaacgcagccaggcggcaagtgggggcagggcgtgggcgcggacacaccccccgcagtgcccccggcgcccggcagggggcgccgccccgccg

SEQ ID NO: 3958 - DNA, 122 bp, Homo sapiens
  misc_feature (61)..(62): /note="This region represents a CpG dinucleotide"
  misc_feature (61)..(61): /note="Nucleotide may be methylated to form 5-methylcytosine"
agatgcctcaccttacaggaaggagaaatcttcataaaaaatgaataatatatataacaacgaagaggataaaggtcctattgagatgaacaaatcagggaagtacaataggaactagagca

SEQ ID NO: 3959 - DNA, 122 bp, Homo sapiens
  misc_feature (61)..(62): /note="This region represents a CpG dinucleotide"
  misc_feature (61)..(61): /note="Nucleotide may be methylated to form 5-methylcytosine"
aagggtgggcgtgtgcgcgcgttctccaaacgccacccccacggggcctcacagccgccccggcctggcaaccgtcacccattttacgaacgaggacatcaaggtaggtcgctcatccagcc

SEQ ID NO: 3960 - DNA, 122 bp, Homo sapiens
  misc_feature (61)..(62): /note="This region represents a CpG dinucleotide"
  misc_feature (61)..(61): /note="Nucleotide may be methylated to form 5-methylcytosine"
aagaggatgatgcttggaagctgccttctcttgtttgcatatgttttacagtgtcctaaccgctttggagagcgataacttgagttaaagcacctgtctgtgcctggcctccagcagatctt

SEQ ID NO: 3961 - DNA, 122 bp, Homo sapiens
  misc_feature (61)..(62): /note="This region represents a CpG dinucleotide"
  misc_feature (61)..(61): /note="Nucleotide may be methylated to form 5-methylcytosine"
ttcttgccaaaaatgtataacctcagtctaatcatgagaaaacaacagacaaacccaaagcgaggacattctactgactaactggccagtactcttcaaaagtgtcaaggttggccgggtgt

SEQ ID NO: 3962 - DNA, 122 bp, Homo sapiens
  misc_feature (61)..(62): /note="This region represents a CpG dinucleotide"
  misc_feature (61)..(61): /note="Nucleotide may be methylated to form 5-methylcytosine"
cactcctgggccgcagccccggcggcaggcggagaggagtgctcggctggcctctgcctccgggagccaggccccctgcacagctgccctggagctccccagggcccagctcatggacagcc

SEQ ID NO: 3963 - DNA, 122 bp, Homo sapiens
  misc_feature (61)..(62): /note="This region represents a CpG dinucleotide"
  misc_feature (61)..(61): /note="Nucleotide may be methylated to form 5-methylcytosine"
gaagatcctagttccttccttcccgagtgatacccatgaactgccagtagaggctgctatcgttccatgtgtaaggaatgaactggttcaaggcgcgtcctacccagtcattttctttacct

SEQ ID NO: 3964 - DNA, 122 bp, Homo sapiens
  misc_feature (61)..(62): /note="This region represents a CpG dinucleotide"
  misc_feature (61)..(61): /note="Nucleotide may be methylated to form 5-methylcytosine"
aggactttaagatgatttccctcatgatattttcaatagcagtttatgatttgaggtagacgttcttgttatcactacaaccattcttttttgttgctgtttcctgaaagaaggttgtggca

SEQ ID NO: 3965 - DNA, 122 bp, Homo sapiens
  misc_feature (61)..(62): /note="This region represents a CpG dinucleotide"
  misc_feature (61)..(61): /note="Nucleotide may be methylated to form 5-methylcytosine"
attatcacatatcatgagaaaaaattttaaatggtagctaatgtacacacaaatagaacacgttgacaaagcagcttttaaaaagcagctttgaaataagtacaagatggctatttccccac

SEQ ID NO: 3966 - DNA, 122 bp, Homo sapiens
  misc_feature (61)..(62): /note="This region represents a CpG dinucleotide"
  misc_feature (61)..(61): /note="Nucleotide may be methylated to form 5-methylcytosine"
tccttcaggaggtccataaagccactctggatccaaaataatggggtcacatcttgagagcgacctgccctgccctgctctgcccccaaccttcttggcccatgccatgactcactcacctg

SEQ ID NO: 3967 - DNA, 122 bp, Homo sapiens
  misc_feature (61)..(62): /note="This region represents a CpG dinucleotide"
  misc_feature (61)..(61): /note="Nucleotide may be methylated to form 5-methylcytosine"
tattttgtttaacgtggtcagcaaaagcttcactggtaaagtgacatccaagcagtgagccgtgtggttatcaagggaagagggtatagtatgaggatgggggggagggcttaacaaatctg

SEQ ID NO: 3968 - DNA, 122 bp, Homo sapiens
  misc_feature (61)..(62): /note="This region represents a CpG dinucleotide"
  misc_feature (61)..(61): /note="Nucleotide may be methylated to form 5-methylcytosine"
atttactaccactcctgcctgtaggctgacagctgtttgtgggcagggacacatcctcagcgccagctcaaagccagccctatgccctcagggatcttagtgggactgaagcccttggtggc

SEQ ID NO: 3969 - DNA, 122 bp, Homo sapiens
  misc_feature (61)..(62): /note="This region represents a CpG dinucleotide"
  misc_feature (61)..(61): /note="Nucleotide may be methylated to form 5-methylcytosine"
cgtcacttccactttagtctctgttagaaatgactcattaaggccaggtgtgggggctcacgcctgtaatcccagcactttgggaggccgaggcgagcggatcacgaggtcaggagatcaag

SEQ ID NO: 3970 - DNA, 122 bp, Homo sapiens
  misc_feature (61)..(62): /note="This region represents a CpG dinucleotide"
  misc_feature (61)..(61): /note="Nucleotide may be methylated to form 5-methylcytosine"
tatgaggtcctcactttgcccaagcatgatcttttacaacagcacacagaagtcttaaaacgccagcacaatatctctatgcagttgaggtatattgaaagtgtgctcctactgagtgctca

SEQ ID NO: 3971 - DNA, 122 bp, Homo sapiens
  misc_feature (61)..(62): /note="This region represents a CpG dinucleotide"
  misc_feature (61)..(61): /note="Nucleotide may be methylated to form 5-methylcytosine"
ctggatgcctttccccggagaagggggggtgtgcggagtcggggtggaagagaccttgctcgcagagctatatcaagtgatgtccagaggctgggagccccggcggcctctgtcccttgcct

SEQ ID NO: 3972 - DNA, 122 bp, Homo sapiens
  misc_feature (61)..(62): /note="This region represents a CpG dinucleotide"
  misc_feature (61)..(61): /note="Nucleotide may be methylated to form 5-methylcytosine"
gcagggaggcttgaaatgggaggttgaggcgcccgtggtgtggcaggaaaacagaaacggcgtggcagaggtcctaccctacaggcaaaagtgcctgtccacagcgcatgcgcgggggccag

SEQ ID NO: 3973 - DNA, 122 bp, Homo sapiens
  misc_feature (61)..(62): /note="This region represents a CpG dinucleotide"
  misc_feature (61)..(61): /note="Nucleotide may be methylated to form 5-methylcytosine"
tcccagaggtctagaacccaggccagtcactcaccactgatttatggaatggaccatatacgtatttatcaaccaagttcccaaacttagggtgcccaatgtccctcaccttgaagttagca

SEQ ID NO: 3974 - DNA, 122 bp, Homo sapiens
  misc_feature (61)..(62): /note="This region represents a CpG dinucleotide"
  misc_feature (61)..(61): /note="Nucleotide may be methylated to form 5-methylcytosine"
agggagagggcaggattatctcacactgacacacacacagcctttagactgagctatttgcgtggcttatttaaaagcagcaaaacaatgttctgtctctctcttcatttttctaccggaaa

SEQ ID NO: 3975 - DNA, 122 bp, Homo sapiens
  misc_feature (61)..(62): /note="This region represents a CpG dinucleotide"
  misc_feature (61)..(61): /note="Nucleotide may be methylated to form 5-methylcytosine"
acttacagccatggcaaaaggtgaagaggaagcaaggcagcagaaaggagaagtgccaagcgaagtggggaagagcgccttatgaaaccatcagatctcaccagaactccttcactatcaca

SEQ ID NO: 3976 - DNA, 122 bp, Homo sapiens
  misc_feature (61)..(62): /note="This region represents a CpG dinucleotide"
  misc_feature (61)..(61): /note="Nucleotide may be methylated to form 5-methylcytosine"
agggctgtgaaaggtgtttggaatgcagacgccctgcttttaccattggactttgagagacgagggcagattatcagcctaggacgaattacagtccatgagtgtttatgcaccatcttgtt

SEQ ID NO: 3977 - DNA, 122 bp, Homo sapiens
  misc_feature (61)..(62): /note="This region represents a CpG dinucleotide"
  misc_feature (61)..(61): /note="Nucleotide may be methylated to form 5-methylcytosine"
tttaatacacaggttgacagtgatgacttcaccgtaccagtgtctgttggtcacaaaccacgtgtatactctgcagcaaggatgggctggcagtgaaaacctcatgtgtcattttgctttca

SEQ ID NO: 3978 - DNA, 122 bp, Homo sapiens
  misc_feature (61)..(62): /note="This region represents a CpG dinucleotide"
  misc_feature (61)..(61): /note="Nucleotide may be methylated to form 5-methylcytosine"
gtgaaactccgtctcaaaaaacaaaaaaaaaaatgcttccccacacccacccccaacgaacgaacaaacacacttaggaaatagggaagaaggttatgttttgggacaactttctatacact

SEQ ID NO: 3979 - DNA, 122 bp, Homo sapiens
  misc_feature (61)..(62): /note="This region represents a CpG dinucleotide"
  misc_feature (61)..(61): /note="Nucleotide may be methylated to form 5-methylcytosine"
caaagggacaaagccacatgtcaggaaagtggccaggcagttgccctgagggctgagcatcgtatctggagcccttcagggacctgcactattcagttggtcagccctcctcacagcggttc

SEQ ID NO: 3980 - DNA, 122 bp, Homo sapiens
  misc_feature (61)..(62): /note="This region represents a CpG dinucleotide"
  misc_feature (61)..(61): /note="Nucleotide may be methylated to form 5-methylcytosine"
aacttctcttttcactcgaagaaaaacaaggacagtgattgcaatgacactggatgtttgcgctgtttgataagtgatgactaacacgtctactacttttaacaatttttgctttcctctcc

SEQ ID NO: 3981 - DNA, 122 bp, Homo sapiens
  misc_feature (61)..(62): /note="This region represents a CpG dinucleotide"
  misc_feature (61)..(61): /note="Nucleotide may be methylated to form 5-methylcytosine"
ttcacttccttccttgcattctctcttcagtgaagaaaaaactccactgaaactgatcatcgttgggatcaccaatggtcagcatgctgccaggtccaaaagccactcctcactattgttga

SEQ ID NO: 3982 - DNA, 122 bp, Homo sapiens
  misc_feature (61)..(62): /note="This region represents a CpG dinucleotide"
  misc_feature (61)..(61): /note="Nucleotide may be methylated to form 5-methylcytosine"
aaggactcgggaatggttttccatcgctcttggttgctctgctgcccctggagccccagccgccactgcttccccaccccaggggaccactatgttcccaagaatgttggggtgtggagaaa

SEQ ID NO: 3983 - DNA, 122 bp, Homo sapiens
  misc_feature (61)..(62): /note="This region represents a CpG dinucleotide"
  misc_feature (61)..(61): /note="Nucleotide may be methylated to form 5-methylcytosine"
cgtggtgcccagctgaaggccagcgcgcttcaggaacacgcagtgctggacagcgcaccgcgcgcttcggaaagcctgagccgtctcggtaaataactttacctggatcacagaggttgtga

SEQ ID NO: 3984 - DNA, 122 bp, Homo sapiens
  misc_feature (61)..(62): /note="This region represents a CpG dinucleotide"
  misc_feature (61)..(61): /note="Nucleotide may be methylated to form 5-methylcytosine"
ctctctggagtctcttttataaaggtactaatcccattcatgagggctctgccctaccaacggccccacctacaaatgccatcacagggggattgtatgcattttgggggggatacactgag

SEQ ID NO: 3985 - DNA, 122 bp, Homo sapiens
  misc_feature (61)..(62): /note="This region represents a CpG dinucleotide"
  misc_feature (61)..(61): /note="Nucleotide may be methylated to form 5-methylcytosine"
agcacttcagatcaggacttttaaatgtttctagatgctgtggcgattaatgaattacaacgtcaggtaaagaaattacacttaaaggctggacacggtggctcatacttataatcccagta

SEQ ID NO: 3986 - DNA, 122 bp, Homo sapiens
  misc_feature (61)..(62): /note="This region represents a CpG dinucleotide"
  misc_feature (61)..(61): /note="Nucleotide may be methylated to form 5-methylcytosine"
taaaagacagacgcgtggcttgcaatgctatttaatactttcttttccttccattttcaacgtagaagtgatgcttgaaaccacagcagccattttggggccacgaggcaataagcacaagg

SEQ ID NO: 3987 - DNA, 122 bp, Homo sapiens
  misc_feature (61)..(62): /note="This region represents a CpG dinucleotide"
  misc_feature (61)..(61): /note="Nucleotide may be methylated to form 5-methylcytosine"
tcttctctgtggtctctgggcctgggcatcactgtgggggtctgttttccgctgggtccccgcacagcccgcgtctctgccttgtgctgggcatgtgtttgcagcttggcggctgttggaca

SEQ ID NO: 3988 - DNA, 122 bp, Homo sapiens
  misc_feature (61)..(62): /note="This region represents a CpG dinucleotide"
  misc_feature (61)..(61): /note="Nucleotide may be methylated to form 5-methylcytosine"
cccatgcgcgctccagcgtcctgaccaggggaacgttttccttagggacccggaggcgagcgctggagggagggatggttgctaacgcaactctctgcagggcagacccaccagcacccgca

SEQ ID NO: 3989 - DNA, 122 bp, Homo sapiens
  misc_feature (61)..(62): /note="This region represents a CpG dinucleotide"
  misc_feature (61)..(61): /note="Nucleotide may be methylated to form 5-methylcytosine"
cacacagggagtgatggtgcaggccagtgacccgagcttgactcaagacccatgtgtgaacgctggaacctgctgatagcaaaagaggaaagcaagcacgtttgccattgtcccctgcttcc

SEQ ID NO: 3990 - DNA, 122 bp, Homo sapiens
  misc_feature (61)..(62): /note="This region represents a CpG dinucleotide"
  misc_feature (61)..(61): /note="Nucleotide may be methylated to form 5-methylcytosine"
tctccttgctcctcaagtgcagaggcctgggccagcccctgggccactctgtctgctgttcgctttggacgtctgcagcttgctcccccaggtttttctctagataccctgttttgtgtggc

SEQ ID NO: 3991 - DNA, 122 bp, Homo sapiens
  misc_feature (61)..(62): /note="This region represents a CpG dinucleotide"
  misc_feature (61)..(61): /note="Nucleotide may be methylated to form 5-methylcytosine"
tcgttcattttcaaagctgtttcaaagtgactctgataagcaaattgctggcagccctggcgggtgattattcctgcattaatcagggggaaattatgccagttactgattaactaattaca

SEQ ID NO: 3992 - DNA, 122 bp, Homo sapiens
  misc_feature (61)..(62): /note="This region represents a CpG dinucleotide"
  misc_feature (61)..(61): /note="Nucleotide may be methylated to form 5-methylcytosine"
caacgtcgacatcaacatcattagcaaaacatgattcaggtgttcggctgggcagaccctcgcacatggcaatctaaatgaataagcacacttccttctcatttttgagaatgtagctgaga

SEQ ID NO: 3993 - DNA, 122 bp, Homo sapiens
  misc_feature (61)..(62): /note="This region represents a CpG dinucleotide"
  misc_feature (61)..(61): /note="Nucleotide may be methylated to form 5-methylcytosine"
cctctgcacatgtctgcctttctcaaacatgcccatgtttcatctgtacctcccaggtggcgttggcatggaaggaaggactgtgtctgtgagggatgatcatcctctcatgtgatccttgg

SEQ ID NO: 3994 - DNA, 122 bp, Homo sapiens
  misc_feature (61)..(62): /note="This region represents a CpG dinucleotide"
  misc_feature (61)..(61): /note="Nucleotide may be methylated to form 5-methylcytosine"
agaggagggattttgctatgccccagggtgtttatgaccaaagcacatatttgcttccttcgtcactgctgtgaggttatcatgtgcaactgggttaaacaaataaaaaatacattcctatc

SEQ ID NO: 3995 - DNA, 122 bp, Homo sapiens
  misc_feature (61)..(62): /note="This region represents a CpG dinucleotide"
  misc_feature (61)..(61): /note="Nucleotide may be methylated to form 5-methylcytosine"
cccacggtgacagaagggaggagggactctcctcatcacggcccaccccgccaccccccccgcccccgcctttaggagttcaggtgcagctgacccacactaactccaaaatagttatccaa

SEQ ID NO: 3996 - DNA, 122 bp, Homo sapiens
  misc_feature (61)..(62): /note="This region represents a CpG dinucleotide"
  misc_feature (61)..(61): /note="Nucleotide may be methylated to form 5-methylcytosine"
cttctttttttaaaaatgtaactgtagcttatacatggactctcagctggtcagggtttgcgtaggaagatagtatgacagttacttcttcttctaaattaagcagctgaaaattatataaa

SEQ ID NO: 3997 - DNA, 122 bp, Homo sapiens
  misc_feature (61)..(62): /note="This region represents a CpG dinucleotide"
  misc_feature (61)..(61): /note="Nucleotide may be methylated to form 5-methylcytosine"
gggtgactctggaggacccctcaactgccccacagaggatggtggctggcaggtccatggcgtgaccagctttgtttctgcctttggctgcaacacccgcaggaagcccacggtgttcactc

SEQ ID NO: 3998 - DNA, 122 bp, Homo sapiens
  misc_feature (61)..(62): /note="This region represents a CpG dinucleotide"
  misc_feature (61)..(61): /note="Nucleotide may be methylated to form 5-methylcytosine"
attttttcaactaatcaagaaaaagggaagtctgaaatgcaagtagaacacccaccctttcgaacgttttatcttccgttccaccgtcttctgactcgggagagagctctttagccatttgt

SEQ ID NO: 3999 - DNA, 122 bp, Homo sapiens
  misc_feature (61)..(62): /note="This region represents a CpG dinucleotide"
  misc_feature (61)..(61): /note="Nucleotide may be methylated to form 5-methylcytosine"
tgtcggggcagggcttccagatgatcattcggcttttttgtgtcttccaagatgatgatccggggaggagggatgtgaaagggggtcagtcgccaggcgagctgaggacccagttctgcgcc

SEQ ID NO: 4000 - DNA, 122 bp, Homo sapiens
  misc_feature (61)..(62): /note="This region represents a CpG dinucleotide"
  misc_feature (61)..(61): /note="Nucleotide may be methylated to form 5-methylcytosine"
cccaggcatccgcacaggcgtgaccctctgcccaccaggcaccctgcccacacagcgcgccgcaggaagccctccgcattggtgtccaagctcgagcaccaggtggaggaacccgtggccat

SEQ ID NO: 4001 - DNA, 122 bp, Homo sapiens
  misc_feature (61)..(62): /note="This region represents a CpG dinucleotide"
  misc_feature (61)..(61): /note="Nucleotide may be methylated to form 5-methylcytosine"
cctgcctcccagtccttgggctcagccaagcctcttcatctctttacagagacaagggagcgcctgccctgtgccaggcactgcagcaggaaggactacgtcagcaacatagcacacacgca

SEQ ID NO: 4002 - DNA, 122 bp, Homo sapiens
  misc_feature (61)..(62): /note="This region represents a CpG dinucleotide"
  misc_feature (61)..(61): /note="Nucleotide may be methylated to form 5-methylcytosine"
acctgaatctggctgccattgtgactctgccgcgcacgcgcagctccatcccctttgaggcgcgcatgtgctcgccaagggggcgcttctgtcaggcctctgagcccaagccaagccatcgc

SEQ ID NO: 4003 - DNA, 122 bp, Homo sapiens
  misc_feature (61)..(62): /note="This region represents a CpG dinucleotide"
  misc_feature (61)..(61): /note="Nucleotide may be methylated to form 5-methylcytosine"
acggctgtcccgcaggccctccgggttagagaccgtcgggggcgtgtcttgagctggggacgcgactcctcggcgggggtgcacctgagaggccgggaccagcgaggccgcgccccggtggc

SEQ ID NO: 4004 - DNA, 122 bp, Homo sapiens
  misc_feature (61)..(62): /note="This region represents a CpG dinucleotide"
  misc_feature (61)..(61): /note="Nucleotide may be methylated to form 5-methylcytosine"
gctgggtggcagaggagataaacagccatgtgcaactctccacactatatttaacagctgcggcggagaaggcagggaggcagccacggtggcggctctgggggcagctcttgtcttcgggg

SEQ ID NO: 4005 - DNA, 122 bp, Homo sapiens
  misc_feature (61)..(62): /note="This region represents a CpG dinucleotide"
  misc_feature (61)..(61): /note="Nucleotide may be methylated to form 5-methylcytosine"
caaaggcaggatcaggaccctggatcagaatggggtccacgcgtgagtctctgtaattaacgctctggtgtctcaaattacgagaaaatatataaaacatgtaattgcttctgtattttgga

SEQ ID NO: 4006 - DNA, 122 bp, Homo sapiens
  misc_feature (61)..(62): /note="This region represents a CpG dinucleotide"
  misc_feature (61)..(61): /note="Nucleotide may be methylated to form 5-methylcytosine"
caacacacaattaagagaaaagcagagaataagggactgtatattaatgaatatcttcttcgcaggaaatcatgctgtttatttaagtgttaatattaatcctcatgggagataagactgcc

SEQ ID NO: 4007 - DNA, 122 bp, Homo sapiens
  misc_feature (61)..(62): /note="This region represents a CpG dinucleotide"
  misc_feature (61)..(61): /note="Nucleotide may be methylated to form 5-methylcytosine"
gcctgcgcccttgagttggcggtgaggctcacgggtaactcggtgggtgtctgtgtggttcgtgcacgatggcctgcaggcccctgagtctcagtgagcgtgggcctgcggcctccgtgggg

SEQ ID NO: 4008 - DNA, 122 bp, Homo sapiens
  misc_feature (61)..(62): /note="This region represents a CpG dinucleotide"
  misc_feature (61)..(61): /note="Nucleotide may be methylated to form 5-methylcytosine"
atcaaaaggtctgaatatcattcacacagaaaactctgactaatcgtgtgactaatgcatcgcctcaaccatcacatcagaagtcaggaatagaaataggattatccagaaaagatcatgtg

SEQ ID NO: 4009 - DNA, 122 bp, Homo sapiens
  misc_feature (61)..(62): /note="This region represents a CpG dinucleotide"
  misc_feature (61)..(61): /note="Nucleotide may be methylated to form 5-methylcytosine"
acccccgctcctctcccccaggaggctccttgatttatggtagctttggacttgcttccccgtctgactgtccttgacttctagaatggaagaagctgagctggtgaagggaagactccagg

SEQ ID NO: 4010 - DNA, 122 bp, Homo sapiens
  misc_feature (61)..(62): /note="This region represents a CpG dinucleotide"
  misc_feature (61)..(61): /note="Nucleotide may be methylated to form 5-methylcytosine"
aatggctcagatctccgcggagatggagctggaaaagcggagccctcgctccacggctcgcggcagttccttgaagcccacccaggtggggagcccctggcgcagcccaactctctgcagtc

SEQ ID NO: 4011 - DNA, 122 bp, Homo sapiens
  misc_feature (61)..(62): /note="This region represents a CpG dinucleotide"
  misc_feature (61)..(61): /note="Nucleotide may be methylated to form 5-methylcytosine"
actactataccacactaagcccatcagagccatagtttcctcttccataaaaaggtataacgacatccaacacactagggagaagtgagaaaacagatctgttctgcaattttagccaatct

SEQ ID NO: 4012 - DNA, 122 bp, Homo sapiens
  misc_feature (61)..(62): /note="This region represents a CpG dinucleotide"
  misc_feature (61)..(61): /note="Nucleotide may be methylated to form 5-methylcytosine"
ccccagaaaggaagaggagggtagtgagcaaacatatcttgcttgttactattgctctcacgttgtgtttcagatggtggaacaacatgtaaaactctacccagtaggtaaacactagacag

SEQ ID NO: 4013 - DNA, 122 bp, Homo sapiens
  misc_feature (61)..(62): /note="This region represents a CpG dinucleotide"
  misc_feature (61)..(61): /note="Nucleotide may be methylated to form 5-methylcytosine"
gagccaagggaggaagtggtgagtgaccaggtctcagagattaaggggaggacatggggacggtggagagatcaccaggctgagaatgtcccataaaggttttggacttgacaccatagaca

SEQ ID NO: 4014 - DNA, 122 bp, Homo sapiens
  misc_feature (61)..(62): /note="This region represents a CpG dinucleotide"
  misc_feature (61)..(61): /note="Nucleotide may be methylated to form 5-methylcytosine"
tcactctgatgcatagaaacttcatcatagttcaaggaagtgaatcattagaaaaacttccggataagttagactaaatatgagactcacttgagctcattgagctcattgaatgagctcat

SEQ ID NO: 4015 - DNA, 122 bp, Homo sapiens
  misc_feature (61)..(62): /note="This region represents a CpG dinucleotide"
  misc_feature (61)..(61): /note="Nucleotide may be methylated to form 5-methylcytosine"
cccagcagcggccgtgggcgtcacagcaggagcctgctcacagggccgtcgcttcctctccgctgccccatgctgctggccccagcacttggtttggtggctcggccagcgggtggcctgag

SEQ ID NO: 4016 - DNA, 122 bp, Homo sapiens
  misc_feature (61)..(62): /note="This region represents a CpG dinucleotide"
  misc_feature (61)..(61): /note="Nucleotide may be methylated to form 5-methylcytosine"
ctggcattaattatctcattcttccatcatcaagaaagaatcaattcatatcatcgttagcgtgagaccacttcagagaaagcaggatgttgctgtaattaatcgttcaagctctggattcc

SEQ ID NO: 4017 - DNA, 122 bp, Homo sapiens
  misc_feature (61)..(62): /note="This region represents a CpG dinucleotide"
  misc_feature (61)..(61): /note="Nucleotide may be methylated to form 5-methylcytosine"
ttctacaaaaccatagactcttcctcttgaaagtaagttcacctgtcaagcagctctactcgcacacgcatgacggtgaaaagtgccttaattgggttttcaagaagatagatgggaagtca

SEQ ID NO: 4018 - DNA, 122 bp, Homo sapiens
  misc_feature (61)..(62): /note="This region represents a CpG dinucleotide"
  misc_feature (61)..(61): /note="Nucleotide may be methylated to form 5-methylcytosine"
caccttatacttcctgctctgacattaactagtggtctgacagtgggtaagtcaaaagtccgggagtctggatttcaatttcttaattgaaagtgagagcattctattgcgtactttccaag

SEQ ID NO: 4019 - DNA, 122 bp, Homo sapiens
  misc_feature (61)..(62): /note="This region represents a CpG dinucleotide"
  misc_feature (61)..(61): /note="Nucleotide may be methylated to form 5-methylcytosine"
gagagaaagaaaaaattagccccacacaccaggctgcctttggcatcaattgtcttatatcgcctacactgagcatttcctgtatggcagtcattctggttctattatttcatttaatcctc

SEQ ID NO: 4020 - DNA, 122 bp, Homo sapiens
  misc_feature (61)..(62): /note="This region represents a CpG dinucleotide"
  misc_feature (61)..(61): /note="Nucleotide may be methylated to form 5-methylcytosine"
tgatggtgcggtatttgtcctgctccgggcaagtcacccccacgtcctggtaggcgcagccgcttgacttggacaacacattcagctgggcgggcgtcagcacatctgccgggggaaagaac

SEQ ID NO: 4021 - DNA, 122 bp, Homo sapiens
  misc_feature (61)..(62): /note="This region represents a CpG dinucleotide"
  misc_feature (61)..(61): /note="Nucleotide may be methylated to form 5-methylcytosine"
gacattgtgtcttgacctcactgttgatggaccttgtgagttctccagtcttcagagactcgctgccatctactggttattgttaccagttctgctcctctagtcttggagttgggtcccga

SEQ ID NO: 4022 - DNA, 122 bp, Homo sapiens
  misc_feature (61)..(62): /note="This region represents a CpG dinucleotide"
  misc_feature (61)..(61): /note="Nucleotide may be methylated to form 5-methylcytosine"
actccagcctgggcgacagaacaagaatcagtttcaaaaaaaaaaaaaaattcaagatggcgccagcagagcattaaaaccagctctgggacttctaggacaggatcatgatgctggctctg

SEQ ID NO: 4023 - DNA, 122 bp, Homo sapiens
  misc_feature (61)..(62): /note="This region represents a CpG dinucleotide"
  misc_feature (61)..(61): /note="Nucleotide may be methylated to form 5-methylcytosine"
ctcaaaagtcaagtgagtgagctgagattccatgaactgggcctctcttccgggagtgctcgtaaactagatttcagctttccttctgaggtgagcagtccagggaggataataagcctgct

SEQ ID NO: 4024 - DNA, 122 bp, Homo sapiens
  misc_feature (61)..(62): /note="This region represents a CpG dinucleotide"
  misc_feature (61)..(61): /note="Nucleotide may be methylated to form 5-methylcytosine"
tctctctgacatgtaaacatatgtctttctagacaggcaggtctccctatacctgccttacgtgggaagcacgtccgcaggagaggtgccacccagtgcctccagcactgatcaggcctttc

SEQ ID NO: 4025 - DNA, 122 bp, Homo sapiens
  misc_feature (61)..(62): /note="This region represents a CpG dinucleotide"
  misc_feature (61)..(61): /note="Nucleotide may be methylated to form 5-methylcytosine"
aaaagtcgggggtatgagcccacttcagacacatcatggaaggtgtgagtcctacaaacccgtaaaggacatcttccaccctccagctgagagcctccagggagtcttagaaccagcctctg

SEQ ID NO: 4026 - DNA, 122 bp, Homo sapiens
  misc_feature (61)..(62): /note="This region represents a CpG dinucleotide"
  misc_feature (61)..(61): /note="Nucleotide may be methylated to form 5-methylcytosine"
gggacatgaaatctccttgtcgtaggcggacttaaagtgtccttcgaggaagctcctgtccggagccaccacccagccagacagcagcatctgcaggtgcggtgccctggacctgccccagg

SEQ ID NO: 4027 - DNA, 122 bp, Homo sapiens
  misc_feature (61)..(62): /note="This region represents a CpG dinucleotide"
  misc_feature (61)..(61): /note="Nucleotide may be methylated to form 5-methylcytosine"
tccggcctccaatcaataaactttcacttctccaaccttacgcaatgcccttctcacccccgtcaagtcctgtaatactgccccagcttctgtgagtacatgttggctaggtcctgcaactt

SEQ ID NO: 4028 - DNA, 122 bp, Homo sapiens
  misc_feature (61)..(62): /note="This region represents a CpG dinucleotide"
  misc_feature (61)..(61): /note="Nucleotide may be methylated to form 5-methylcytosine"
gaatgtgaaattgctttgtaaacataacgggccacacctgatatatatttacatttttcccgctactcacagccagtcacagtcgtctcactatgttctaatgccatcctagccatggtgca

SEQ ID NO: 4029 - DNA, 122 bp, Homo sapiens
  misc_feature (61)..(62): /note="This region represents a CpG dinucleotide"
  misc_feature (61)..(61): /note="Nucleotide may be methylated to form 5-methylcytosine"
ggcagaatttgcagcctgattattcgtagaaataatttttcaaatcttgcctttccggtacggttcacaaggtggcaatttccatgtcactgaacatgaagcctgggtcttaaatatagcca

SEQ ID NO: 4030 - DNA, 122 bp, Homo sapiens
  misc_feature (61)..(62): /note="This region represents a CpG dinucleotide"
  misc_feature (61)..(61): /note="Nucleotide may be methylated to form 5-methylcytosine"
ttaaaggtcatcctgcggaatgtaaggcataaaatcttcaaaacacatcagggacatgaacgaaagggaaagactgagcaactgaaaaatgaggcagctaagcaacttatatccttgatggc

SEQ ID NO: 4031 - DNA, 122 bp, Homo sapiens
  misc_feature (61)..(62): /note="This region represents a CpG dinucleotide"
  misc_feature (61)..(61): /note="Nucleotide may be methylated to form 5-methylcytosine"
atgaagaggaggaagttcactcggcagaggaccagtgaaggctctgcactctgggaagaacgaggtcgtggctcagccccacctcgggcttacctgggcaggtgacttcggctgcccgcctg

SEQ ID NO: 4032 - DNA, 122 bp, Homo sapiens
  misc_feature (61)..(62): /note="This region represents a CpG dinucleotide"
  misc_feature (61)..(61): /note="Nucleotide may be methylated to form 5-methylcytosine"
attctaaggaatttcttatctgacagagcatcagaaccagaggcttggtcccacaggccacggaccaatggcctgcagccgtgacaacactcctgtcatattggagtccaaaacttgaattc

SEQ ID NO: 4033 - DNA, 122 bp, Homo sapiens
  misc_feature (61)..(62): /note="This region represents a CpG dinucleotide"
  misc_feature (61)..(61): /note="Nucleotide may be methylated to form 5-methylcytosine"
tcttttccattttgtagagcacctgtttttaaggggcctcccacaggagcatcacagcctcggccgttgctcctgtttctttagtgagctggctgcacattttgtgtcctattacgtcacat

SEQ ID NO: 4034 - DNA, 122 bp, Homo sapiens
  misc_feature (61)..(62): /note="This region represents a CpG dinucleotide"
  misc_feature (61)..(61): /note="Nucleotide may be methylated to form 5-methylcytosine"
tctaggtccgaggctagccccctgttgagaactgatttaagacttgaggtgtgcctcggtcgatcggaagcttgctcttggctgaaagctgaagctaagtctggtccttgataaaggagagg

SEQ ID NO: 4035 - DNA, 122 bp, Homo sapiens
  misc_feature (61)..(62): /note="This region represents a CpG dinucleotide"
  misc_feature (61)..(61): /note="Nucleotide may be methylated to form 5-methylcytosine"
tgcaaggctggagaatccagccaagagaagagccaggtagccttatccctccagcctaaccggtcacctagtcccaccagaaaccgccatcccaactgtagaaagcccaaaaagagggccag

SEQ ID NO: 4036 - DNA, 122 bp, Homo sapiens
  misc_feature (61)..(62): /note="This region represents a CpG dinucleotide"
  misc_feature (61)..(61): /note="Nucleotide may be methylated to form 5-methylcytosine"
attagctcaaaactccacaagagctatgatgcgtgctccgttcttgaaggacccaagagacgctccatcttaccctctgagccttccttgttatgtttcatgtgggtggaatatatgaccag

SEQ ID NO: 4037 - DNA, 122 bp, Homo sapiens
  misc_feature (61)..(62): /note="This region represents a CpG dinucleotide"
  misc_feature (61)..(61): /note="Nucleotide may be methylated to form 5-methylcytosine"
gaatgtgatgagcctcatgagtcctatgagccccacgctccctatgcgccccacaagccccgggactcctatgcaccttacgaactccatgggccccatgcagcccccaaactcctcaaggc

SEQ ID NO: 4038 - DNA, 122 bp, Homo sapiens
  misc_feature (61)..(62): /note="This region represents a CpG dinucleotide"
  misc_feature (61)..(61): /note="Nucleotide may be methylated to form 5-methylcytosine"
ctctgtgaccttggggatgttccttaacctctctgggcttactcctgctttgtaccacagcgagtttaagctatgtttgctgctagttcaggcagtccatgatgacatgatttttaggagga

SEQ ID NO: 4039 - DNA, 122 bp, Homo sapiens
  misc_feature (61)..(62): /note="This region represents a CpG dinucleotide"
  misc_feature (61)..(61): /note="Nucleotide may be methylated to form 5-methylcytosine"
tccaaaacccaggttgcaccataccatctcaaacagagtgatggtgcaaggacaggcatacgaggtcagtctggccaatcaggatccccctaggagttttgcagtgaggaacacttttagat

SEQ ID NO: 4040 - DNA, 122 bp, Homo sapiens
  misc_feature (61)..(62): /note="This region represents a CpG dinucleotide"
  misc_feature (61)..(61): /note="Nucleotide may be methylated to form 5-methylcytosine"
tgggcagtagagcggaggcaagccatgcagaggcaggagcagatgagaccctagatgccacgagaagctaaacatgtggggaaaataaagagcagattaactcaggaaaattatatggggag

SEQ ID NO: 4041 - DNA, 122 bp, Homo sapiens
  misc_feature (61)..(62): /note="This region represents a CpG dinucleotide"
  misc_feature (61)..(61): /note="Nucleotide may be methylated to form 5-methylcytosine"
ggtcccaggggccctctgacatccgagaggcccgggctggggacccgctggccgggggagcgtctcctggaagtcccgtcccccaccgacctgcatggtttctgcgctcgggacttgcaggc

SEQ ID NO: 4042 - DNA, 122 bp, Homo sapiens
  misc_feature (61)..(62): /note="This region represents a CpG dinucleotide"
  misc_feature (61)..(61): /note="Nucleotide may be methylated to form 5-methylcytosine"
gcctcaaaattttatattctgacatatttaaactttttacaaaatcacccaagagaaaaacgtttggcctatcaggggagaagatcttctataaactacggacttaatgtgtaagcaactca

SEQ ID NO: 4043 - DNA, 122 bp, Homo sapiens
  misc_feature (61)..(62): /note="This region represents a CpG dinucleotide"
  misc_feature (61)..(61): /note="Nucleotide may be methylated to form 5-methylcytosine"
cctccataccatcctgaacgccaagacccagacgggcctctctgacagcccagcccggcccggcgcaggccacagtcacccccacagcctcccggccaccttcgagttgcccagtgctcact

SEQ ID NO: 4044 - DNA, 122 bp, Homo sapiens
  misc_feature (61)..(62): /note="This region represents a CpG dinucleotide"
  misc_feature (61)..(61): /note="Nucleotide may be methylated to form 5-methylcytosine"
agcgagactccatctcaaaaaaaaaaaaaaaaaaaaattagaacatatgatttttataagcgagccccctgatgcttggcccccaaaaaatcaaccacttctggacagttctgtaattcaca

SEQ ID NO: 4045 - DNA, 122 bp, Homo sapiens
  misc_feature (61)..(62): /note="This region represents a CpG dinucleotide"
  misc_feature (61)..(61): /note="Nucleotide may be methylated to form 5-methylcytosine"
gaaaatgagacaactgatccttctagctatttgacaggtcttgctcaaggtcaaagaatacgtgacttgcagtccaatgttatttctaaatgtaagctcttcagctggttaagctaaactgc

SEQ ID NO: 4046 - DNA, 122 bp, Homo sapiens
  misc_feature (61)..(62): /note="This region represents a CpG dinucleotide"
  misc_feature (61)..(61): /note="Nucleotide may be methylated to form 5-methylcytosine"
ttgaacatttccatagtgcacccgacacgtcgggcccggtcatagcccggcgcagcccctcgctcactcaggaacatctgctacagcatttaccacgttaatagattagctttgagaatcgg

SEQ ID NO: 4047 - DNA, 122 bp, Homo sapiens
  misc_feature (61)..(62): /note="This region represents a CpG dinucleotide"
  misc_feature (61)..(61): /note="Nucleotide may be methylated to form 5-methylcytosine"
ctcaccaggtcactggctggaacccctgggggccaccattgcgggaatcagcctttgaaacgatggccaacagcagctaataataaaccagtaatttgggatagacgagtagcaagagggca

SEQ ID NO: 4048 - DNA, 122 bp, Homo sapiens
  misc_feature (61)..(62): /note="This region represents a CpG dinucleotide"
  misc_feature (61)..(61): /note="Nucleotide may be methylated to form 5-methylcytosine"
caatccatcttaagcaaatacacaaacacatacacacacacacacacacacacacacacacgtatatatacaagatattagcgtacttcacagaattgaaggaagaattttaagcctcaggg

SEQ ID NO: 4049 - DNA, 122 bp, Homo sapiens
  misc_feature (61)..(62): /note="This region represents a CpG dinucleotide"
  misc_feature (61)..(61): /note="Nucleotide may be methylated to form 5-methylcytosine"
actgaggcggcaacgtgtatgtgaccttgcccacgtttcttcctgtgagcaacacttaatcgctagcattaagcccatttcatggaggttaactaagcagactgtgagcttaaatgatttcc

SEQ ID NO: 4050 - DNA, 122 bp, Homo sapiens
  misc_feature (61)..(62): /note="This region represents a CpG dinucleotide"
  misc_feature (61)..(61): /note="Nucleotide may be methylated to form 5-methylcytosine"
ggcacggcagatggtgatgccccttgcttctggatggacacaggtagacactatgtggtccgtggatgtctcacgacagagctcaacagaaaagccccaggctggaggcgaggcactaagca

SEQ ID NO: 4051 - DNA, 122 bp, Homo sapiens
  misc_feature (61)..(62): /note="This region represents a CpG dinucleotide"
  misc_feature (61)..(61): /note="Nucleotide may be methylated to form 5-methylcytosine"
gtcccgcccacctcagctcttcgatgccggtgaacagcttctgcaattcctgctcgctcacgtaggggccctcgccagcccgaggccccattccccagcctgcggggaccaggccgtgtggc

SEQ ID NO: 4052 - DNA, 122 bp, Homo sapiens
  misc_feature (61)..(62): /note="This region represents a CpG dinucleotide"
  misc_feature (61)..(61): /note="Nucleotide may be methylated to form 5-methylcytosine"
gccacagagcggcagccagaggcatgtgggcagtgcagcctccacaccaggcagagggcccggccagcatggctccaccctgggaagctgcctgccactgggatcagatgggagcaccaggg

SEQ ID NO: 4053 - DNA, 122 bp, Homo sapiens
  misc_feature (61)..(62): /note="This region represents a CpG dinucleotide"
  misc_feature (61)..(61): /note="Nucleotide may be methylated to form 5-methylcytosine"
ggagtgcaaatagctagatttcaaagagaatgagaaagctgaatacacacactccagagacgtcctcagagcccacagtcaacaggagacgtgctgggaaagtgagctctcttacctgcctc

SEQ ID NO: 4054 - DNA, 122 bp, Homo sapiens
  misc_feature (61)..(62): /note="This region represents a CpG dinucleotide"
  misc_feature (61)..(61): /note="Nucleotide may be methylated to form 5-methylcytosine"
ggataagatccagaatttcctggattatcaggcagagtcttgttctcttccctttctttccgtcaaacaaatgaagtctctctctctgtgctgagctgcctggaggtgggggaaggatgaca

SEQ ID NO: 4055 - DNA, 122 bp, Homo sapiens
  misc_feature (61)..(62): /note="This region represents a CpG dinucleotide"
  misc_feature (61)..(61): /note="Nucleotide may be methylated to form 5-methylcytosine"
attgttctgttcttatttctcttcttgttttacattcttgggtgatatcctcatcccatacgacctcaagaaggatctctgtggtgatggttaatcaagaataagcaagatgcttgattcta

SEQ ID NO: 4056 - DNA, 122 bp, Homo sapiens
  misc_feature (61)..(62): /note="This region represents a CpG dinucleotide"
  misc_feature (61)..(61): /note="Nucleotide may be methylated to form 5-methylcytosine"
ttcccctttctggctcggttgtcacatccttcagggacattccagcttctgatcacttttcgctttgcctcagcacagtcgcactatgcggccagtcacggcaccactgcactactgcacca

SEQ ID NO: 4057 - DNA, 122 bp, Homo sapiens
  misc_feature (61)..(62): /note="This region represents a CpG dinucleotide"
  misc_feature (61)..(61): /note="Nucleotide may be methylated to form 5-methylcytosine"
ggggaacccgcaggggttgggggcaggtttgtctgtcccagagccccaggctggtgatgacgcctcctggggataaacctcatctctctgttgtttaccccatgtgcggtgactttgtcatt

SEQ ID NO: 4058 - DNA, 122 bp, Homo sapiens
  misc_feature (61)..(62): /note="This region represents a CpG dinucleotide"
  misc_feature (61)..(61): /note="Nucleotide may be methylated to form 5-methylcytosine"
atgcacttttccacctttccaatttcctgtgtctctcacaatgggcttcttaagcttaaacgtatatcctgttagctttgaatttgaagggtgcaccttcagttttgggcatagctaaggac

SEQ ID NO: 4059 - DNA, 122 bp, Homo sapiens
  misc_feature (61)..(62): /note="This region represents a CpG dinucleotide"
  misc_feature (61)..(61): /note="Nucleotide may be methylated to form 5-methylcytosine"
tggtaccacaactctctctgcacaccaccaccaagctcacgtgtgcatcataaaaagccacggactctaatgccagtcacaatttcagaagtgtcacgatgaagcagggcactttctatttg

SEQ ID NO: 4060 - DNA, 122 bp, Homo sapiens
  misc_feature (61)..(62): /note="This region represents a CpG dinucleotide"
  misc_feature (61)..(61): /note="Nucleotide may be methylated to form 5-methylcytosine"
ccccccactgggatgccagccaccaggagtctaatcctgatgctgtgtggcctgggcacacgttttccccattctgggcctgtttcctcagctgaaaaatcgcatcctagacccatttgctt

SEQ ID NO: 4061 - DNA, 122 bp, Homo sapiens
  misc_feature (61)..(62): /note="This region represents a CpG dinucleotide"
  misc_feature (61)..(61): /note="Nucleotide may be methylated to form 5-methylcytosine"
ctacatatgcatgtctaattccatcatttgttttattaccacagaatcttgagaaacacacgaactatttttccccaatctataaaaagggctttggatttgcaatatcaagtgcaaggaga

SEQ ID NO: 4062 - DNA, 122 bp, Homo sapiens
  misc_feature (61)..(62): /note="This region represents a CpG dinucleotide"
  misc_feature (61)..(61): /note="Nucleotide may be methylated to form 5-methylcytosine"
gcacgctggaaacgcctcccaggcttataggagaggccgggcccagggcaacgctggaaacgcctcccagtcttacaggagagggcggggcctagggcaacgctggaaacgcctcccaggct

SEQ ID NO: 4063 - DNA, 122 bp, Homo sapiens
  misc_feature (61)..(62): /note="This region represents a CpG dinucleotide"
  misc_feature (61)..(61): /note="Nucleotide may be methylated to form 5-methylcytosine"
gaggtaaaaattatcaacattaataggagtttggaggaaggtgattctgaccctcataaacgactttcaggggctcaagacatcaagacaacagtggaggaagtaattgcagatgtagtgga

SEQ ID NO: 4064 - DNA, 122 bp, Homo sapiens
  misc_feature (61)..(62): /note="This region represents a CpG dinucleotide"
  misc_feature (61)..(61): /note="Nucleotide may be methylated to form 5-methylcytosine"
agagattaatgagcaattaatttcccagaccagctaagcctgggaacttctgggagctaacggattttacctgaaggtgaagtccagcccacgtccgtgggccaccacatcagaccctccca

SEQ ID NO: 4065 - DNA, 122 bp, Homo sapiens
  misc_feature (61)..(62): /note="This region represents a CpG dinucleotide"
  misc_feature (61)..(61): /note="Nucleotide may be methylated to form 5-methylcytosine"
gtgaagatttagggaggtgtgtggggtcttccgggaagctcctatacctgatcagttttccgcaaaaggggcggaaccacgtgactctggaagtagctgcgggcgtggtagtcctgctgcgc

SEQ ID NO: 4066 - DNA, 122 bp, Homo sapiens
  misc_feature (61)..(62): /note="This region represents a CpG dinucleotide"
  misc_feature (61)..(61): /note="Nucleotide may be methylated to form 5-methylcytosine"
gtgagaccctgtctcaaaaaaaaaaaaaaaaaaaaacggaacaaaggaattgattatgatcgaatgtttcccaagaaagagaaattagccttaatgggatcatagccaaaccacaaaacata

SEQ ID NO: 4067 - DNA, 122 bp, Homo sapiens
  misc_feature (61)..(62): /note="This region represents a CpG dinucleotide"
  misc_feature (61)..(61): /note="Nucleotide may be methylated to form 5-methylcytosine"
tcaaagaatcttttagccaggagccctctgctgaagaacagtgtacaatctcagctgggacgcacatgttgcttctggaaacagatgaacacagtctgatcagagtctttcatgggtcagcg

SEQ ID NO: 4068 - DNA, 122 bp, Homo sapiens
  misc_feature (61)..(62): /note="This region represents a CpG dinucleotide"
  misc_feature (61)..(61): /note="Nucleotide may be methylated to form 5-methylcytosine"
tagagttagcctttgattggtcagcttgactggcgacctttcccctctgcgacagtttcccgaggtacctagtgtctgagcggcacagacgagatctcgatcgaaggcgagatggcggacgt

SEQ ID NO: 4069 - DNA, 122 bp, Homo sapiens
  misc_feature (61)..(62): /note="This region represents a CpG dinucleotide"
  misc_feature (61)..(61): /note="Nucleotide may be methylated to form 5-methylcytosine"
tttaagatttaaagactgccctgctaggattcagacttgtaggccgggcgcagtggcttacgtctgtaatcctaaaactctgggaggctgagacgggcggatcacctgaggtcgggagtttg

SEQ ID NO: 4070 - DNA, 122 bp, Homo sapiens
  misc_feature (61)..(62): /note="This region represents a CpG dinucleotide"
  misc_feature (61)..(61): /note="Nucleotide may be methylated to form 5-methylcytosine"
aaaacattttgatttcctttagccacttgcagggtcttgcgccatccttttgtctgggtgcgtagctgtccagcagctctagcactacctggaagttgaggcatggtcatgcagaactaagg

SEQ ID NO: 4071 - DNA, 122 bp, Homo sapiens
  misc_feature (61)..(62): /note="This region represents a CpG dinucleotide"
  misc_feature (61)..(61): /note="Nucleotide may be methylated to form 5-methylcytosine"
tcatctgtgttggttcttgctgggcttcttcactcttccccactggtctttctctaccctcgtttgtaaatcctgctttgctagacacagcaaaagtctcccggagtcaagggcattagctc

SEQ ID NO: 4072 - DNA, 122 bp, Homo sapiens
  misc_feature (61)..(62): /note="This region represents a CpG dinucleotide"
  misc_feature (61)..(61): /note="Nucleotide may be methylated to form 5-methylcytosine"
aaaagtggttatgtggttactctctatataagggcaatcaggtccttaaggttgagttcacgcccacagcttggggtctggcagaagtacaatactctgacagtgtcttcctgaatgactca

SEQ ID NO: 4073 - DNA, 122 bp, Homo sapiens
  misc_feature (61)..(62): /note="This region represents a CpG dinucleotide"
  misc_feature (61)..(61): /note="Nucleotide may be methylated to form 5-methylcytosine"
tcctcggaggaacgcaaactcccctgcgtggaggaagtggtggagaagtaactgagcctgcgcttgagaccttctccacgcagcaggaagatcccaccgacccttcctggcctaatccttta

SEQ ID NO: 4074 - DNA, 122 bp, Homo sapiens
  misc_feature (61)..(62): /note="This region represents a CpG dinucleotide"
  misc_feature (61)..(61): /note="Nucleotide may be methylated to form 5-methylcytosine"
atatatgaaatcccaattacctgtacttatccatcgctagttcacttcgctgcagtccttcgtaaaccaaagagcaggtagaacgagttcaccctgaacacagcatccctttaaatgaccct

SEQ ID NO: 4075 - DNA, 122 bp, Homo sapiens
  misc_feature (61)..(62): /note="This region represents a CpG dinucleotide"
  misc_feature (61)..(61): /note="Nucleotide may be methylated to form 5-methylcytosine"
tttgggaccttgcaacctgggttggaggaagcctctcacgtaattccgatgtgtgctaaacgtcgcgaaccactggaataatacctatatgtaggtttgtgttaacgtgccatcaattatgt

SEQ ID NO: 4076 - DNA, 122 bp, Homo sapiens
  misc_feature (61)..(62): /note="This region represents a CpG dinucleotide"
  misc_feature (61)..(61): /note="Nucleotide may be methylated to form 5-methylcytosine"
atagcacgtttatttacgcctatgagcacacactcgagcaaggacctgaaaaacctgcagcgtgggcaggaggtaaaccactgaaagtatgccgaggttacgtctctcctggttattcaggt

SEQ ID NO: 4077 - DNA, 122 bp, Homo sapiens
  misc_feature (61)..(62): /note="This region represents a CpG dinucleotide"
  misc_feature (61)..(61): /note="Nucleotide may be methylated to form 5-methylcytosine"
gaaccgctctagttctttttctgcaaggataaaaatgagcttgaggatgaagctaatctacggagcaagcctgagccaagtgaattacagataaatgagctaaagcctgatgatgttgtaaa

SEQ ID NO: 4078 - DNA, 122 bp, Homo sapiens
  misc_feature (61)..(62): /note="This region represents a CpG dinucleotide"
  misc_feature (61)..(61): /note="Nucleotide may be methylated to form 5-methylcytosine"
ttagctaccagtgtgtttctggtgggaaagtaatgcaagatgagttcagggaaggagtaacgagttgacctaagaaggaaacggaggcaaaattaatatagagatttcctttggaccaaggt

SEQ ID NO: 4079 - DNA, 122 bp, Homo sapiens
  misc_feature (61)..(62): /note="This region represents a CpG dinucleotide"
  misc_feature (61)..(61): /note="Nucleotide may be methylated to form 5-methylcytosine"
gaaaccaaatggcccctgtgtgataaacacaaagccacccgcggctctgtgtggcagaagcgaaaagagcactggatgaccgtggagagatctgggctgcgttcccggcacagccacggctt

SEQ ID NO: 4080 - DNA, 122 bp, Homo sapiens
  misc_feature (61)..(62): /note="This region represents a CpG dinucleotide"
  misc_feature (61)..(61): /note="Nucleotide may be methylated to form 5-methylcytosine"
caaggaaatgagtaagtgagataatgttgtaacttctggccctctgacattgcactgccccgatgtcacagttggaaactgtacctgcccccatccttgtctggggtgtgtttggtctgggg

SEQ ID NO: 4081 - DNA, 122 bp, Homo sapiens
  misc_feature (61)..(62): /note="This region represents a CpG dinucleotide"
  misc_feature (61)..(61): /note="Nucleotide may be methylated to form 5-methylcytosine"
attatgagtcttgtgcaatagttatttccatcctaatgtgagaaccatccatttttgcagcgtcgggtcattggagaccaccgtattatgagtatttcacacattagaaattggcaaacagc

SEQ ID NO: 4082 - DNA, 122 bp, Homo sapiens
  misc_feature (61)..(62): /note="This region represents a CpG dinucleotide"
  misc_feature (61)..(61): /note="Nucleotide may be methylated to form 5-methylcytosine"
gcaaaggaaagccacctccaatggagtcattatgacaattatcattccggactgggccagcgggaacaccctgagcccgacctagctgcacagccccggagctcagacgttagcagggggat

SEQ ID NO: 4083 - DNA, 122 bp, Homo sapiens
  misc_feature (61)..(62): /note="This region represents a CpG dinucleotide"
  misc_feature (61)..(61): /note="Nucleotide may be methylated to form 5-methylcytosine"
gaaaaggaagtccggattcccacagcctgggcctcagctggctgcagtcagtcaatagctcgcaaagcaagggggaggagaaggaagagaaattgtagtcgagggcggggtctgggggccgg

SEQ ID NO: 4084 - DNA, 122 bp, Homo sapiens
  misc_feature (61)..(62): /note="This region represents a CpG dinucleotide"
  misc_feature (61)..(61): /note="Nucleotide may be methylated to form 5-methylcytosine"
acatatacggtcattgtctctgctgcttcccactgcagctttatataataaaacaagccgcgtcaaataggctaggctgtaatattaggtaaaatctaatttcagtttggttatcacatagc

SEQ ID NO: 4085 - DNA, 122 bp, Homo sapiens
  misc_feature (61)..(62): /note="This region represents a CpG dinucleotide"
  misc_feature (61)..(61): /note="Nucleotide may be methylated to form 5-methylcytosine"
agcttgactgaagtgtttgtggttaaaggactttgctcaggatcctgtccttactggttgcgtttaagtatcccttccaccccaaagactatacctctcttgtcctcctctcagagagaaag

SEQ ID NO: 4086 - DNA, 122 bp, Homo sapiens
  misc_feature (61)..(62): /note="This region represents a CpG dinucleotide"
  misc_feature (61)..(61): /note="Nucleotide may be methylated to form 5-methylcytosine"
gtgcccatatgtgctgtttgaaagaaggaagagagagggaaagaaagcaacactgaaacacgattcaaaaagtgatagaaagatttacctttatgattgggaaagccacaaagacatgagta

SEQ ID NO: 4087 - DNA, 122 bp, Homo sapiens
  misc_feature (61)..(62): /note="This region represents a CpG dinucleotide"
  misc_feature (61)..(61): /note="Nucleotide may be methylated to form 5-methylcytosine"
tatcatcgggcaaacctggaaaatgtgctaacatttctccagaggcgaacccataccactcgctaatacatatgaaagattttgtccctaatatttttactatctgaaaatgtgaatgggtt

SEQ ID NO: 4088 - DNA, 122 bp, Homo sapiens
  misc_feature (61)..(62): /note="This region represents a CpG dinucleotide"
  misc_feature (61)..(61): /note="Nucleotide may be methylated to form 5-methylcytosine"
acatttatcttttgccactaagctccctgttaggatctgccaatcagaggacgctaggggcggactggaaggctgagtggggaagaaggaagacacttcctgtttgcttcctgttctgttta

SEQ ID NO: 4089 - DNA, 122 bp, Homo sapiens
  misc_feature (61)..(62): /note="This region represents a CpG dinucleotide"
  misc_feature (61)..(61): /note="Nucleotide may be methylated to form 5-methylcytosine"
ctgtttcagggatattggtttctcatgttcagtggagaaaatccccagtaatttttagaccggattgcagaggaaagcaagactagttctttgaaacttcattgaccccaatacatacctgt

SEQ ID NO: 4090 - DNA, 122 bp, Homo sapiens
  misc_feature (61)..(62): /note="This region represents a CpG dinucleotide"
  misc_feature (61)..(61): /note="Nucleotide may be methylated to form 5-methylcytosine"
tgggcccagatctgccgtttatgagctctgcaaccttgggcaagttgcttaatcatgctgcgcttcagtttcctcacttagaaagtagagataacaatagtcattttttcattaggctgtcg

SEQ ID NO: 4091 - DNA, 122 bp, Homo sapiens
  misc_feature (61)..(62): /note="This region represents a CpG dinucleotide"
  misc_feature (61)..(61): /note="Nucleotide may be methylated to form 5-methylcytosine"
caaagatgttactttcggggtgtggttctttcaaacaagccaagcccttagatccttcttcgcctactcttgcaaaggaagagatgtgacttaggagactctgcagtgagctaaagctttca

SEQ ID NO: 4092 - DNA, 122 bp, Homo sapiens
  misc_feature (61)..(62): /note="This region represents a CpG dinucleotide"
  misc_feature (61)..(61): /note="Nucleotide may be methylated to form 5-methylcytosine"
tttaactttttttccttttcagatccaacttagaaataatgtttcattcaagataaggctcgtggcttaggagattgtgacctggcttgcatcattctaagacttctatcgtctgttttcaa

SEQ ID NO: 4093 - DNA, 122 bp, Homo sapiens
  misc_feature (61)..(62): /note="This region represents a CpG dinucleotide"
  misc_feature (61)..(61): /note="Nucleotide may be methylated to form 5-methylcytosine"
tgcaacagagatctaaaatatttaccatctgttcctttacagaaaaagcttgctaacattcgatttataatatgagtaacatacactttagtactatatttgaccaagaaactataacaaag

SEQ ID NO: 4094 - DNA, 122 bp, Homo sapiens
  misc_feature (61)..(62): /note="This region represents a CpG dinucleotide"
  misc_feature (61)..(61): /note="Nucleotide may be methylated to form 5-methylcytosine"
tctgagaaatgcaggctgggcatcaaggaagaagctggaactgggctgggtgaggaacagcgaggaggagcttctcatggggatccctatggaattgtcacaagcttaggctggcctatgtg

SEQ ID NO: 4095 - DNA, 122 bp, Homo sapiens
  misc_feature (61)..(62): /note="This region represents a CpG dinucleotide"
  misc_feature (61)..(61): /note="Nucleotide may be methylated to form 5-methylcytosine"
cccttctagaaaaaaagccacttaattttaaagcatataaacacttttgcccactagaaacgtcagcccgggcatttctcatgcattgtgctatcttgcagatctccagtacttccatcacc

SEQ ID NO: 4096 - DNA, 122 bp, Homo sapiens
  misc_feature (61)..(62): /note="This region represents a CpG dinucleotide"
  misc_feature (61)..(61): /note="Nucleotide may be methylated to form 5-methylcytosine"
aaacaggcctggttttgtaactgcccaaagggttcaccctgccctctgcctagacagagccgattcatcaggacaggggatttgcaacagagaaagagtaattcatgcagagccagctgtat

SEQ ID NO: 4097 - DNA, 122 bp, Homo sapiens
  misc_feature (61)..(62): /note="This region represents a CpG dinucleotide"
  misc_feature (61)..(61): /note="Nucleotide may be methylated to form 5-methylcytosine"
gctgggtaagtctcctcccttcctggaaaggatagcgccccgctgagcagtgggatccgccgccaagccccggcctcacagttggccaggtagtgggtcacatcctcaatgcgttcttggct

SEQ ID NO: 4098 - DNA, 122 bp, Homo sapiens
  misc_feature (61)..(62): /note="This region represents a CpG dinucleotide"
  misc_feature (61)..(61): /note="Nucleotide may be methylated to form 5-methylcytosine"
aaagagatcttcctgcaaattgagccctatttgtaattaatcccctaatcatgataaccccgaatctctgtttcagttcaccagatctatcatggccacagatttgatttgtataaatttgg

SEQ ID NO: 4099 - DNA, 122 bp, Homo sapiens
  misc_feature (61)..(62): /note="This region represents a CpG dinucleotide"
  misc_feature (61)..(61): /note="Nucleotide may be methylated to form 5-methylcytosine"
catcttagcaacatactgacttcctaacaatccttcccttccaaggcgatttggcccaaccggtcagctcacttgcaagagagattctagacttcgtagcaaatgagttaccgaagttttga

SEQ ID NO: 4100 - DNA, 122 bp, Homo sapiens
  misc_feature (61)..(62): /note="This region represents a CpG dinucleotide"
  misc_feature (61)..(61): /note="Nucleotide may be methylated to form 5-methylcytosine"
gaaataaagtgttgggaaggatgactgggagagaattactatagggttttcctgtgcctccggctgggaaagccccttaggcttagctttctgtgccatcacaacctttttcttcctccagt

SEQ ID NO: 4101 - DNA, 122 bp, Homo sapiens
  misc_feature (61)..(62): /note="This region represents a CpG dinucleotide"
  misc_feature (61)..(61): /note="Nucleotide may be methylated to form 5-methylcytosine"
cgtctaaaagatctcatgggcttgggctctgtaggagttggcagtagtaacaccatcacccgatcatctgctggtggccaaaaggaaagcccttatcaaaaaggtatttaggagcctggagt

SEQ ID NO: 4102 - DNA, 122 bp, Homo sapiens
  misc_feature (61)..(62): /note="This region represents a CpG dinucleotide"
  misc_feature (61)..(61): /note="Nucleotide may be methylated to form 5-methylcytosine"
agagactcggtttcaaaaaaaaaaaaaaatctattctcttaataaatgtcaaagtcataacgacaaagcaagactggaggaactacttcagattaaagcaaactaaagagagacacaactaa

SEQ ID NO: 4103 - DNA, 122 bp, Homo sapiens
  misc_feature (61)..(62): /note="This region represents a CpG dinucleotide"
  misc_feature (61)..(61): /note="Nucleotide may be methylated to form 5-methylcytosine"
ccagttttacggtccctctggccagtacacccatgaatttgatggagatgagcagttctacgtggacctggagaggaaggagactgcctggcggtggcctgagttcagcaaatttggaggtt

SEQ ID NO: 4104 - DNA, 122 bp, Homo sapiens
  misc_feature (61)..(62): /note="This region represents a CpG dinucleotide"
  misc_feature (61)..(61): /note="Nucleotide may be methylated to form 5-methylcytosine"
tcccattcctcttagtacgtcagtgacggtagatattgagaccacccgatggaagaagagcgcgtaggatgtgttctgtgacctacatgcctatgtccaagataacaaaggtcagtacaaat

SEQ ID NO: 4105 - DNA, 122 bp, Homo sapiens
  misc_feature (61)..(62): /note="This region represents a CpG dinucleotide"
  misc_feature (61)..(61): /note="Nucleotide may be methylated to form 5-methylcytosine"
ctagatccaacaacaagatataccttctgaaagaagtacacagtaataccgagaacaggtcgtatttcaaggtgatgaaatacacagagagaacatccaatatggttacactgagtctgact

SEQ ID NO: 4106 - DNA, 122 bp, Homo sapiens
  misc_feature (61)..(62): /note="This region represents a CpG dinucleotide"
  misc_feature (61)..(61): /note="Nucleotide may be methylated to form 5-methylcytosine"
ctaccatttgaatcaccactgctcatgtaacttcctgtgttgatgcaacatttgcaaacacggtgcaagcagagatttgcaaagaacttgcaaagatttgtttttctcttgatgctcctgga

SEQ ID NO: 4107 - DNA, 122 bp, Homo sapiens
  misc_feature (61)..(62): /note="This region represents a CpG dinucleotide"
  misc_feature (61)..(61): /note="Nucleotide may be methylated to form 5-methylcytosine"
gccggatgtttgagtttggtttttgtgatcgagcggagctgggaggggccgcccgggagccgccgccttatcgggctgtccccgcgctgtctcccgctgccccggcctcccaggctggcggc

SEQ ID NO: 4108 - DNA, 122 bp, Homo sapiens
  misc_feature (61)..(62): /note="This region represents a CpG dinucleotide"
  misc_feature (61)..(61): /note="Nucleotide may be methylated to form 5-methylcytosine"
ttgatgaattctacttcctgggccttccaaatttatgactaccaaggcttagaaacagttcggttcctcagcctcagctgagagatggagagattacaataaacctcatgcttcactttatc

SEQ ID NO: 4109 - DNA, 122 bp, Homo sapiens
  misc_feature (61)..(62): /note="This region represents a CpG dinucleotide"
  misc_feature (61)..(61): /note="Nucleotide may be methylated to form 5-methylcytosine"
cccctgaagcctggtacgcgtgggcaccggcgcacggcggtgccccggaaacgcagccatcgcctcagggcagccactcaccgatgcggtaatgccccaacggggcgtttcattggccagct

SEQ ID NO: 4110 - DNA, 122 bp, Homo sapiens
  misc_feature (61)..(62): /note="This region represents a CpG dinucleotide"
  misc_feature (61)..(61): /note="Nucleotide may be methylated to form 5-methylcytosine"
ttaatgtagcagtttgacaaatactttaacatttgccaaacccaacttcctcaatacttgcgggtaaggagaaacagaggcactcattcactactggtaggagtgaggagtggtactcttga

SEQ ID NO: 4111 - DNA, 122 bp, Homo sapiens
  misc_feature (61)..(62): /note="This region represents a CpG dinucleotide"
  misc_feature (61)..(61): /note="Nucleotide may be methylated to form 5-methylcytosine"
caccggacctgcacactcaggagcaggtgagccagggacaagcaggagccccgccccttccgaactggtggagcaggagctcccagggtgcagctgcagccaccttgccgcggctgtggaca

SEQ ID NO: 4112 - DNA, 122 bp, Homo sapiens
  misc_feature (61)..(62): /note="This region represents a CpG dinucleotide"
  misc_feature (61)..(61): /note="Nucleotide may be methylated to form 5-methylcytosine"
tgtgttcaatcactgctctttccttcccattgctcctgacattggcagacttggtgtgtgcggggtgtgtgtgtgtggtgtgtctgtgtgtgtgtgtgtgtgtgtgtgtgtgtgagagagag

SEQ ID NO: 4113 - DNA, 122 bp, Homo sapiens
  misc_feature (61)..(62): /note="This region represents a CpG dinucleotide"
  misc_feature (61)..(61): /note="Nucleotide may be methylated to form 5-methylcytosine"
gcagtctgtgtgggcacgatatatttggcagctaccactctactgactcatttgggctctcgttaggcaaagtcctcattctcatttagcacgcgctgctggtttacaccatagttcccatc

SEQ ID NO: 4114 - DNA, 122 bp, Homo sapiens
  misc_feature (61)..(62): /note="This region represents a CpG dinucleotide"
  misc_feature (61)..(61): /note="Nucleotide may be methylated to form 5-methylcytosine"
gggatcttcaaactctaggcctgaaagttcggtccctattgaaccaaacagaaagcttcacgagttggtgtgtgaataattgtgcaatacagacactcacacacagaaatactgccaaattg

SEQ ID NO: 4115 - DNA, 122 bp, Homo sapiens
  misc_feature (61)..(62): /note="This region represents a CpG dinucleotide"
  misc_feature (61)..(61): /note="Nucleotide may be methylated to form 5-methylcytosine"
ttgggaagccttacaaagaaggcactagcatgtgacttaggttctgccatctccatgtcccgctctggaccttgagacagtcatgtaagggcacagtgaacttgagaaatttttcacagcac

SEQ ID NO: 4116 - DNA, 122 bp, Homo sapiens
  misc_feature (61)..(62): /note="This region represents a CpG dinucleotide"
  misc_feature (61)..(61): /note="Nucleotide may be methylated to form 5-methylcytosine"
cgcgaggcctgctgggctgacgtgacgtgaggctgggctgcggggcgccggaggcggaggcgggggcggggcgccgggaccgactagggcggggcgcggggtcggggggcggggcgcggggt

SEQ ID NO: 4117 - DNA, 122 bp, Homo sapiens
  misc_feature (61)..(62): /note="This region represents a CpG dinucleotide"
  misc_feature (61)..(61): /note="Nucleotide may be methylated to form 5-methylcytosine"
tttatgtatattttcccacagatacacacatacacacaagatatacttgaacaacacccgcggggattctgattaatctggggcttgggaaaatgcatttcaaatatgcgactgaggtggtt

SEQ ID NO: 4118 - DNA, 122 bp, Homo sapiens
  misc_feature (61)..(62): /note="This region represents a CpG dinucleotide"
  misc_feature (61)..(61): /note="Nucleotide may be methylated to form 5-methylcytosine"
ctaaaaagacaagttttactttacaatgcaggataatgagcagccttcactactcattctcgacgttaacagaggaagatgccgctgcgcggcaggagcgcctcaccaggacaaagcggggt

SEQ ID NO: 4119 - DNA, 122 bp, Homo sapiens
  misc_feature (61)..(62): /note="This region represents a CpG dinucleotide"
  misc_feature (61)..(61): /note="Nucleotide may be methylated to form 5-methylcytosine"
gagtcctcacagcgcggcggactgcggcgtggtaggaactacaccacccagaatactgtgcgccgagcgtgccggggccttagaccaatcattgcccaggaaaggggcacctccgtaagtgc

SEQ ID NO: 4120 - DNA, 122 bp, Homo sapiens
  misc_feature (61)..(62): /note="This region represents a CpG dinucleotide"
  misc_feature (61)..(61): /note="Nucleotide may be methylated to form 5-methylcytosine"
tccaaatataaaattctaaggcctcaaatcaaaacttttgacaagtgcatacatacagaacgtgaattgcaatcacctaaagatttcaaagaatttccattttgatgacataatgttgacac

SEQ ID NO: 4121 - DNA, 122 bp, Homo sapiens
  misc_feature (61)..(62): /note="This region represents a CpG dinucleotide"
  misc_feature (61)..(61): /note="Nucleotide may be methylated to form 5-methylcytosine"
catcataaaatccttgcctggtcctatgtttagaatggtattgcctaggttgtctgccagcgtttttatagccttaggttttacatgtaagtttttgatccatcttgagttgatttttgtat

SEQ ID NO: 4122 - DNA, 122 bp, Homo sapiens
  misc_feature (61)..(62): /note="This region represents a CpG dinucleotide"
  misc_feature (61)..(61): /note="Nucleotide may be methylated to form 5-methylcytosine"
atgcttttgagagtcatccatgtcgctttatcagtagttcatctcttttccttgctatgtcgcataccacaatgtgtttatctgtgcaccagacaagttgtttccagtatgtggcaattgtg

SEQ ID NO: 4123 - DNA, 122 bp, Homo sapiens
  misc_feature (61)..(62): /note="This region represents a CpG dinucleotide"
  misc_feature (61)..(61): /note="Nucleotide may be methylated to form 5-methylcytosine"
gaatcagcaccataggaaagcgggggtggtggtggggaaccattatgagaaagtacagcccgaaaataaacttagccttgtgcaaagatgttacataataaaggacatcaccccatgaccta

SEQ ID NO: 4124 - DNA, 122 bp, Homo sapiens
  misc_feature (61)..(62): /note="This region represents a CpG dinucleotide"
  misc_feature (61)..(61): /note="Nucleotide may be methylated to form 5-methylcytosine"
gatgaagataaagtgaaatacaagctttcctaagaaaatcctgtatcacaggtcaaaacacgcataaggcatgcaagtactgagacgaagcagagtagacacacccaatacctgaaaaatgt

SEQ ID NO: 4125 - DNA, 122 bp, Homo sapiens
  misc_feature (61)..(62): /note="This region represents a CpG dinucleotide"
  misc_feature (61)..(61): /note="Nucleotide may be methylated to form 5-methylcytosine"
tcagtttatctgttttgataaactagcaatcttaccattttgcccagctccctatgcttgcgtataggattttgcctagggaggtggcatcattctctattcagaggcgttccaaatataat

SEQ ID NO: 4126 - DNA, 122 bp, Homo sapiens
  misc_feature (61)..(62): /note="This region represents a CpG dinucleotide"
  misc_feature (61)..(61): /note="Nucleotide may be methylated to form 5-methylcytosine"
agagaacctgccatactcacacttgcccactccagctgggaaggcaagggatggggcacacgtccagtaggggagaatatagcagcaaggcaaaaccacaaagtgcaaatgtccatttcatt

SEQ ID NO: 4127 - DNA, 122 bp, Homo sapiens
  misc_feature (61)..(62): /note="This region represents a CpG dinucleotide"
  misc_feature (61)..(61): /note="Nucleotide may be methylated to form 5-methylcytosine"
caaggcctgacccttttctctgggcctccaggagaggctgaggagggggctggagtccggcgctcactagggctgctaagggccaggagttcgggaacaggaggcccctggcctggtggtct

SEQ ID NO: 4128 - DNA, 122 bp, Homo sapiens
  misc_feature (61)..(62): /note="This region represents a CpG dinucleotide"
  misc_feature (61)..(61): /note="Nucleotide may be methylated to form 5-methylcytosine"
ggaaaatgagctgccaagggccctgcacatccggcctctgctacaccaggagtttggggccggaagctccccagtgccccattggtcctgggccgcatgaagtgattcagagctacagggtc

SEQ ID NO: 4129 - DNA, 122 bp, Homo sapiens
  misc_feature (61)..(62): /note="This region represents a CpG dinucleotide"
  misc_feature (61)..(61): /note="Nucleotide may be methylated to form 5-methylcytosine"
atgtaaggttttcagagggagtagtcacaaaagctttcagaggaagtactggttttcttgcgtctttctgcagttaacatttcatttcctcctctaaggtggatcctgttttagtgaataat

SEQ ID NO: 4130 - DNA, 122 bp, Homo sapiens
  misc_feature (61)..(62): /note="This region represents a CpG dinucleotide"
  misc_feature (61)..(61): /note="Nucleotide may be methylated to form 5-methylcytosine"
agttctgaaggctagaagttcgagatgaaggtgttggcagcgccggttccttctgagagccgtgaggttgaatctgttcctccctgtctcacttctggtggtgtgctggcaatctttgacac

SEQ ID NO: 4131 - DNA, 122 bp, Homo sapiens
  misc_feature (61)..(62): /note="This region represents a CpG dinucleotide"
  misc_feature (61)..(61): /note="Nucleotide may be methylated to form 5-methylcytosine"
tcctgttgaatagggaacaaaacaggcctaaagactgaaaggaaaagctgctgtggggagcggtctctccagatggaagttttctggcagattgtgatttgtgactcagaatgagcccagat

SEQ ID NO: 4132 - DNA, 122 bp, Homo sapiens
  misc_feature (61)..(62): /note="This region represents a CpG dinucleotide"
  misc_feature (61)..(61): /note="Nucleotide may be methylated to form 5-methylcytosine"
gaaagaatgaatgctagatagtgttacaaagttgctttaggtcttagagacctcttggcacgatttcaagtgtattatttctgtgtaatacattgtgaaggttgtgtttcaggagacaaact

SEQ ID NO: 4133 - DNA, 122 bp, Homo sapiens
  misc_feature (61)..(62): /note="This region represents a CpG dinucleotide"
  misc_feature (61)..(61): /note="Nucleotide may be methylated to form 5-methylcytosine"
cagagaagcaaatttgtattaaggcacttaaggcatcttgccaccactgggtctgggaggcgctgctcagtctgccgacagcatcttctggaattactggtgtggtggaactcaaaaatttt

SEQ ID NO: 4134 - DNA, 122 bp, Homo sapiens
  misc_feature (61)..(62): /note="This region represents a CpG dinucleotide"
  misc_feature (61)..(61): /note="Nucleotide may be methylated to form 5-methylcytosine"
aaccaaccccctaacttcctcttctcacccttaaatcatctttagttaattgagcatttacgatgttccggggctgtgtccagtacttttcatgtgttgaagtctcaaaacaatattgagag

SEQ ID NO: 4135 - DNA, 122 bp, Homo sapiens
  misc_feature (61)..(62): /note="This region represents a CpG dinucleotide"
  misc_feature (61)..(61): /note="Nucleotide may be methylated to form 5-methylcytosine"
ctaattacctaggcttgggtctggaatgcagacatttatagactcatagtcacaagtacacgcaaacaattagtatttcacagtgtgctccaaatctttcagtccagcagtaccttctaagg

SEQ ID NO: 4136 - DNA, 122 bp, Homo sapiens
  misc_feature (61)..(62): /note="This region represents a CpG dinucleotide"
  misc_feature (61)..(61): /note="Nucleotide may be methylated to form 5-methylcytosine"
ctgagtcgacctgcagtacagcgttattagtctttttatttgcttattgcatcttgggagcgcgtgggtgggtgaagggagcgaggataggaagtctatggagatttacaccagtttttttt

SEQ ID NO: 4137 - DNA, 122 bp, Homo sapiens
  misc_feature (61)..(62): /note="This region represents a CpG dinucleotide"
  misc_feature (61)..(61): /note="Nucleotide may be methylated to form 5-methylcytosine"
tctggtgagacttctgaactccttctcagcattgtgattttaaatgcaaaaaataggatgcgtaggattgcaacggaagccagttatattgaaaagctgctactggaatatttaagcaaatg

SEQ ID NO: 4138 - DNA, 122 bp, Homo sapiens
  misc_feature (61)..(62): /note="This region represents a CpG dinucleotide"
  misc_feature (61)..(61): /note="Nucleotide may be methylated to form 5-methylcytosine"
caccttcccctctgcttggccggcgccattcttccaaaccactctccgccaaagattccacggacagtcacctacaagacaacccagccgtcctttcagcagcggatcccgccccgcagcca

SEQ ID NO: 4139 - DNA, 122 bp, Homo sapiens
  misc_feature (61)..(62): /note="This region represents a CpG dinucleotide"
  misc_feature (61)..(61): /note="Nucleotide may be methylated to form 5-methylcytosine"
caagttcaactgaaaggtgggagaggaagggtctaaggaggagggcgtttcccgggagaacgcccagagctcggctcacctggcgatcctaattacaggggagtttcacccccacattcttg

SEQ ID NO: 4140 - DNA, 122 bp, Homo sapiens
  misc_feature (61)..(62): /note="This region represents a CpG dinucleotide"
  misc_feature (61)..(61): /note="Nucleotide may be methylated to form 5-methylcytosine"
gaaaccagagtatcttcaaagaggcggggccaaggccagagctggacaccacgactgccacgtaagaggaatcccaagcatactgcgatcaagggaagggaagaaaatccactcccagaagc

SEQ ID NO: 4141 - DNA, 122 bp, Homo sapiens
  misc_feature (61)..(62): /note="This region represents a CpG dinucleotide"
  misc_feature (61)..(61): /note="Nucleotide may be methylated to form 5-methylcytosine"
tagagagttgttaatgacacttacgccttttgagcttttctccgtccatgcaagtagtaccgtgtttgtttgtttggagatggagtctcattctgtcgcgaggctggagtgcagtggcgcag

SEQ ID NO: 4142 - DNA, 122 bp, Homo sapiens
  misc_feature (61)..(62): /note="This region represents a CpG dinucleotide"
  misc_feature (61)..(61): /note="Nucleotide may be methylated to form 5-methylcytosine"
gaaggagggtgcagagggaaggagttagttttagaactactaaaagttttaaatgtcaatcgtaagtctttactggaaaaacgaactattctcttgtaacttgaataagcttctctgctgtg

SEQ ID NO: 4143 - DNA, 122 bp, Homo sapiens
  misc_feature (61)..(62): /note="This region represents a CpG dinucleotide"
  misc_feature (61)..(61): /note="Nucleotide may be methylated to form 5-methylcytosine"
gaactctgtggtaagagttatgatgacatcaggggacaggtttgcgcaaggcacactggacggaacatagagtaagatgatccagtggtgtctagaatgtggataatacccaatgtattttt

SEQ ID NO: 4144 - DNA, 122 bp, Homo sapiens
  misc_feature (61)..(62): /note="This region represents a CpG dinucleotide"
  misc_feature (61)..(61): /note="Nucleotide may be methylated to form 5-methylcytosine"
tctgcagcagtagcaatgtgtgctgaatcagttcttaacagatggggttttttagatatacggtagactaagaaaggaagtgaaatgtttctcttgagataaaaaagaaatttaactcttca

SEQ ID NO: 4145 - DNA, 122 bp, Homo sapiens
  misc_feature (61)..(62): /note="This region represents a CpG dinucleotide"
  misc_feature (61)..(61): /note="Nucleotide may be methylated to form 5-methylcytosine"
ccagacctcttttatctttgagataataccgtgtgacgacaaaggctgggtattgttatccgaatctctcacacagcaacactgaggagacattgactcatttcttttacgttgctttttaa

SEQ ID NO: 4146 - DNA, 122 bp, Homo sapiens
  misc_feature (61)..(62): /note="This region represents a CpG dinucleotide"
  misc_feature (61)..(61): /note="Nucleotide may be methylated to form 5-methylcytosine"
tccttgcccattcagctgaagccacatggtctattctttgttccttgaatacactacacacgccattgcctggggcctttgtgcttgctcttccaggaaggctcttcacacagctatccaca

SEQ ID NO: 4147 - DNA, 122 bp, Homo sapiens
  misc_feature (61)..(62): /note="This region represents a CpG dinucleotide"
  misc_feature (61)..(61): /note="Nucleotide may be methylated to form 5-methylcytosine"
atccagctttaggatgtgctggcggctgcaacaaacatgcactctgatcaatgagctctgcgctcattcactccacacgtgtttactgagcgtctactgtgtctaagaccctgagctctgca

SEQ ID NO: 4148 - DNA, 122 bp, Homo sapiens
  misc_feature (61)..(62): /note="This region represents a CpG dinucleotide"
  misc_feature (61)..(61): /note="Nucleotide may be methylated to form 5-methylcytosine"
aagagaagttcgaatatataaaaaaatacacacctacgcagattgatgcaggccaggacacgcatataagctcacacatagacacccacatgctcagaaaagaagagggagtaaaccaaccg

SEQ ID NO: 4149 - DNA, 122 bp, Homo sapiens
  misc_feature (61)..(62): /note="This region represents a CpG dinucleotide"
  misc_feature (61)..(61): /note="Nucleotide may be methylated to form 5-methylcytosine"
agttgagagataaagcatgagtttggtctgtgaccttgattacaacatgttgtgatgtgacgatatggctttgccttgactgacatttgtttggccactgccatgggtactgtttcaagtca

SEQ ID NO: 4150 - DNA, 122 bp, Homo sapiens
  misc_feature (61)..(62): /note="This region represents a CpG dinucleotide"
  misc_feature (61)..(61): /note="Nucleotide may be methylated to form 5-methylcytosine"
ctgatagactggataaactaattacatatgataatctatttccagagtcaccatggttggcgagccttatccattctgtcctcttcaacaggcataaccagcccaaagactggaaaatcttt

SEQ ID NO: 4151 - DNA, 122 bp, Homo sapiens
  misc_feature (61)..(62): /note="This region represents a CpG dinucleotide"
  misc_feature (61)..(61): /note="Nucleotide may be methylated to form 5-methylcytosine"
taatacagtaatactccacaaagcatgaaaacacagtcacgaagttaggcattaccaaaacgtccagcaggtaagtcttcatcattgaaggtgaaagcactacaaaacacttaacgactcgc

SEQ ID NO: 4152 - DNA, 122 bp, Homo sapiens
  misc_feature (61)..(62): /note="This region represents a CpG dinucleotide"
  misc_feature (61)..(61): /note="Nucleotide may be methylated to form 5-methylcytosine"
tcatggataagccggataagcctggacttcccaagtgatgtcacagtgagacttgagcttcgataaccaagaacttcaagaccaaaccatcatttcaagagattatcgagaaaatgaatgtg

SEQ ID NO: 4153 - DNA, 122 bp, Homo sapiens
  misc_feature (61)..(62): /note="This region represents a CpG dinucleotide"
  misc_feature (61)..(61): /note="Nucleotide may be methylated to form 5-methylcytosine"
gcctgcgttcttgccggtccatgtttggattagcatgtgagtttaaacatagtgctgatgcggcgattcttctagaagcacatccttctctgagctgaattgcttcatcacacacttccttc

SEQ ID NO: 4154 - DNA, 122 bp, Homo sapiens
  misc_feature (61)..(62): /note="This region represents a CpG dinucleotide"
  misc_feature (61)..(61): /note="Nucleotide may be methylated to form 5-methylcytosine"
aaagtttaaaagttattccacatttgacacttcaaagacttaaaagagcaactgtaacagcggctaaaccaactcaggaccttggagaggtttctaacgttcataaaaggcacaccaccccc

SEQ ID NO: 4155 - DNA, 122 bp, Homo sapiens
  misc_feature (61)..(62): /note="This region represents a CpG dinucleotide"
  misc_feature (61)..(61): /note="Nucleotide may be methylated to form 5-methylcytosine"
tttttttttaaagaatcggtgacttatcttcacactggccttagtcctccatgcccaacacgatgtccctaggaaagtctctggaattgagcacagggttgaccttcaccgtctagagtgaa

SEQ ID NO: 4156 - DNA, 122 bp, Homo sapiens
  misc_feature (61)..(62): /note="This region represents a CpG dinucleotide"
  misc_feature (61)..(61): /note="Nucleotide may be methylated to form 5-methylcytosine"
atgacatcaactgttatagaacccaagattggccttttgagatttttttcagactgttaacgtttctcatgaccagctgactcgggccagacctgcaactcatgagtcaatcagtcctgtag

SEQ ID NO: 4157 - DNA, 122 bp, Homo sapiens
  misc_feature (61)..(62): /note="This region represents a CpG dinucleotide"
  misc_feature (61)..(61): /note="Nucleotide may be methylated to form 5-methylcytosine"
caggtgccagggccctcggattcaggcctctctcctcactggggtcagcaagcgttgccgcggtacatggctggaaggacaagtgccacgttggtgcatgtggacacattcgtggtgggagg

SEQ ID NO: 4158 - DNA, 122 bp, Homo sapiens
  misc_feature (61)..(62): /note="This region represents a CpG dinucleotide"
  misc_feature (61)..(61): /note="Nucleotide may be methylated to form 5-methylcytosine"
taaatcctcttactgagggtaagattggctctagatctgggtgagccccagcagtatccccgtgcaggctctgactggctcatgagaactaattgcttgtgtctcttgctaattctgcattc

SEQ ID NO: 4159 - DNA, 122 bp, Homo sapiens
  misc_feature (61)..(62): /note="This region represents a CpG dinucleotide"
  misc_feature (61)..(61): /note="Nucleotide may be methylated to form 5-methylcytosine"
gttaaaaatagccaaggattaggcaaaccctgaggacacaaaagaacagcatctccttcccggctttcgctttgctgtccctccttctgaaatacacacgctcatgcgcgtgttaatttagc

SEQ ID NO: 4160 - DNA, 122 bp, Homo sapiens
  misc_feature (61)..(62): /note="This region represents a CpG dinucleotide"
  misc_feature (61)..(61): /note="Nucleotide may be methylated to form 5-methylcytosine"
tctacatcaccacggcccacttggctctttttgttttctaatttatagaggcaattgaaacgaagtcaggactaatttttttaaaaagatgatgagctggtcctacactggaaaggctggcc

SEQ ID NO: 4161 - DNA, 122 bp, Homo sapiens
  misc_feature (61)..(62): /note="This region represents a CpG dinucleotide"
  misc_feature (61)..(61): /note="Nucleotide may be methylated to form 5-methylcytosine"
accacatcttccgcccagcatgcttagttttttcatgagctgtgatcggttcagccaatgcgtgtactcccaggctctcagactgagccagccgcccgtcctggagccggcactgggcccgc

SEQ ID NO: 4162 - DNA, 122 bp, Homo sapiens
  misc_feature (61)..(62): /note="This region represents a CpG dinucleotide"
  misc_feature (61)..(61): /note="Nucleotide may be methylated to form 5-methylcytosine"
agcaaagcctgaaagggctctgccaggcacaccaggcacatctccacgtgaggccggccgcgcactcacctggcaggtgagcctgaccagcacaatcagatctggctgagcaacttaaacgg

SEQ ID NO: 4163 - DNA, 122 bp, Homo sapiens
  misc_feature (61)..(62): /note="This region represents a CpG dinucleotide"
  misc_feature (61)..(61): /note="Nucleotide may be methylated to form 5-methylcytosine"
ttccttaactggagctacacagaaggagttgagtgatggtagatatcaggccctggtctgcggcttggaagtttcctgtgaataagaaaaacatcatcgcttcttgagtcacaaggatgata

SEQ ID NO: 4164 - DNA, 122 bp, Homo sapiens
  misc_feature (61)..(62): /note="This region represents a CpG dinucleotide"
  misc_feature (61)..(61): /note="Nucleotide may be methylated to form 5-methylcytosine"
agtcctggggatcttccgatttcctgtgacagggcaacaaattgccgatgtgagtacaaacgggtaggcaggcagcttaaagatgagaatgctggggcgagggcattatgtcacagttcatg

SEQ ID NO: 4165 - DNA, 122 bp, Homo sapiens
  misc_feature (61)..(62): /note="This region represents a CpG dinucleotide"
  misc_feature (61)..(61): /note="Nucleotide may be methylated to form 5-methylcytosine"
ggtttacaatgctcctaattttcagacatggtgttgagagccggggtcacagacataatacgaaaaggaagagaagttgtgtatttagattgtgctgctaacaatgttgactcacatatttt

SEQ ID NO: 4166 - DNA, 122 bp, Homo sapiens
  misc_feature (61)..(62): /note="This region represents a CpG dinucleotide"
  misc_feature (61)..(61): /note="Nucleotide may be methylated to form 5-methylcytosine"
gtgaggcctcactcaggctcacagcccctgatggagcactcagcttggcggctgcctgcccgaggtctccagaaaaggcagccagctcctagttgaagtcctcccactttacttccccttcc

SEQ ID NO: 4167 - DNA, 122 bp, Homo sapiens
  misc_feature (61)..(62): /note="This region represents a CpG dinucleotide"
  misc_feature (61)..(61): /note="Nucleotide may be methylated to form 5-methylcytosine"
tgaagggaaatggtcaaacttacaagaggatcctgtagctgaaaaacaaagataaatcaacgtgtacagcctgctgaaagaggagctagttttcgtactactttcctgaaaggaaatatcag

SEQ ID NO: 4168 - DNA, 122 bp, Homo sapiens
  misc_feature (61)..(62): /note="This region represents a CpG dinucleotide"
  misc_feature (61)..(61): /note="Nucleotide may be methylated to form 5-methylcytosine"
agcattagggttcttcactgcttgccaggattcaccgcttaaaaccccaaaaacccagcccgcagcccccatagctggctctgcagccgagatgcacgcggtttcctaggcaaccgacactt

SEQ ID NO: 4169 - DNA, 122 bp, Homo sapiens
  misc_feature (61)..(62): /note="This region represents a CpG dinucleotide"
  misc_feature (61)..(61): /note="Nucleotide may be methylated to form 5-methylcytosine"
gcttgcaccctgcacgtgctgccctctgactgcagggtgccggcagcctcctccgacctccgaagagtggtcattgatttgtccttcaggcctcatccactgccgcgacccccaccccgagt

SEQ ID NO: 4170 - DNA, 122 bp, Homo sapiens
  misc_feature (61)..(62): /note="This region represents a CpG dinucleotide"
  misc_feature (61)..(61): /note="Nucleotide may be methylated to form 5-methylcytosine"
tggagcctcagggctgggtagggaagctggcgaggccgagccccgccttgggcttctgggcgccctgacttcgctcccggaaccctcgggcctgggaggcgggaggaagtcttactgagtgc

SEQ ID NO: 4171 - DNA, 122 bp, Homo sapiens
  misc_feature (61)..(62): /note="This region represents a CpG dinucleotide"
  misc_feature (61)..(61): /note="Nucleotide may be methylated to form 5-methylcytosine"
tctgtgggttccacatccatggattcaaccaaccacaggatcaaaaatattcaaaaaatacggtgtctgtactgaacacgtaaactttttttgtgtcattattccctaaccaatacagtgta

SEQ ID NO: 4172 - DNA, 122 bp, Homo sapiens
  misc_feature (61)..(62): /note="This region represents a CpG dinucleotide"
  misc_feature (61)..(61): /note="Nucleotide may be methylated to form 5-methylcytosine"
cgtgaacactcaggcctggctttgtattccagattgatatcaaatctaaaccaacagattcgttagtgtccaacatgccaaggaagatgagtaggcttggccaaagaacagtagctcatgtt

SEQ ID NO: 4173 - DNA, 122 bp, Homo sapiens
  misc_feature (61)..(62): /note="This region represents a CpG dinucleotide"
  misc_feature (61)..(61): /note="Nucleotide may be methylated to form 5-methylcytosine"
atgttctagtccaactcaacagttaaggactatcagagagattctttaaaataaaggcttcgaaatgcatggcggagttagcaggtggtatgcatttgttgaatagacaaatttatctatcc

SEQ ID NO: 4174 - DNA, 122 bp, Homo sapiens
  misc_feature (61)..(62): /note="This region represents a CpG dinucleotide"
  misc_feature (61)..(61): /note="Nucleotide may be methylated to form 5-methylcytosine"
ttataggtgtgaaaacagtgagagagggaaatcaactccatgacggtggggcacagaaagcgtgaaccatgattcagagccttacagtcaactgtcatgtgtatgtgtcatactcaaggcaa

SEQ ID NO: 4175 - DNA, 122 bp, Homo sapiens
  misc_feature (61)..(62): /note="This region represents a CpG dinucleotide"
  misc_feature (61)..(61): /note="Nucleotide may be methylated to form 5-methylcytosine"
gagacgagctagtaatggagggtgggccgtggggtgaggaaggtgcccaaatttgccgagcggtaaccttaccaaggactgggaagcagggttttcacctactgacccccgtccctcctcgg

SEQ ID NO: 4176 - DNA, 122 bp, Homo sapiens
  misc_feature (61)..(62): /note="This region represents a CpG dinucleotide"
  misc_feature (61)..(61): /note="Nucleotide may be methylated to form 5-methylcytosine"
atgtaaaacccctacccccacttgctaggtgcttcagtctccttggccaccaccctgctgcgtcagccctggctggaacgtctccagtcatggagagctcattacctccggaagcagccttc

SEQ ID NO: 4177 - DNA, 122 bp, Homo sapiens
  misc_feature (61)..(62): /note="This region represents a CpG dinucleotide"
  misc_feature (61)..(61): /note="Nucleotide may be methylated to form 5-methylcytosine"
tatcctcccaattgctataaccacaatccttggagtcttctttgatgccttttattcaaacgctttatccaagctacctgagaatcctgacagctctaactttaaaatattccagaatctga

SEQ ID NO: 4178 - DNA, 122 bp, Homo sapiens
  misc_feature (61)..(62): /note="This region represents a CpG dinucleotide"
  misc_feature (61)..(61): /note="Nucleotide may be methylated to form 5-methylcytosine"
taaaaatactttttgatgatggagggagtggaaattgagcaacaccaactgagtgaaatacggaaatgataccaaatggcaccgaagcagcagagcaggcagcccacctggcctttgatccc

SEQ ID NO: 4179 - DNA, 122 bp, Homo sapiens
  misc_feature (61)..(62): /note="This region represents a CpG dinucleotide"
  misc_feature (61)..(61): /note="Nucleotide may be methylated to form 5-methylcytosine"
tgggcaaagtgactcacgcctataattccaacactttggggagccaaggcaagaggatcacggcagccaggggttcaagaccagcctggacaacatagtgagacacccccttccctacaaac

SEQ ID NO: 4180 - DNA, 122 bp, Homo sapiens
  misc_feature (61)..(62): /note="This region represents a CpG dinucleotide"
  misc_feature (61)..(61): /note="Nucleotide may be methylated to form 5-methylcytosine"
ctacagtgttgagtgcttttttactgggagaaaaatcctagcagaacctgctactctgggcgcattaggtagttttatgcaactatagtattaagagttttattggaagaaaaaacactgtc

SEQ ID NO: 4181 - DNA, 122 bp, Homo sapiens
  misc_feature (61)..(62): /note="This region represents a CpG dinucleotide"
  misc_feature (61)..(61): /note="Nucleotide may be methylated to form 5-methylcytosine"
cctgggcccagcagagggtgcccggcatggtgctagacacagcctgagaaagagacccgccgccttcttcccagaaagtctgttgagctctagctggcgtgagagcaagtgggcgccactcc

SEQ ID NO: 4182 - DNA, 122 bp, Homo sapiens
  misc_feature (61)..(62): /note="This region represents a CpG dinucleotide"
  misc_feature (61)..(61): /note="Nucleotide may be methylated to form 5-methylcytosine"
ttcaaatcaaagaactcgtctgcgggagtgtctggattttgtgagttttgtgcctgtggccgagtggaagcggagaggagtgagagcgctgggcgacgcggccagccaaggcgaggccggtc

SEQ ID NO: 4183 - DNA, 122 bp, Homo sapiens
  misc_feature (61)..(62): /note="This region represents a CpG dinucleotide"
  misc_feature (61)..(61): /note="Nucleotide may be methylated to form 5-methylcytosine"
tggggctttaggtcagggaagagctgaaagaaagcccctttcccttcccctgaagattgtcggaggcagcttaccactgcagcaggaactgaaacctttagctttagggctccagttatcac

SEQ ID NO: 4184 - DNA, 122 bp, Homo sapiens
  misc_feature (61)..(62): /note="This region represents a CpG dinucleotide"
  misc_feature (61)..(61): /note="Nucleotide may be methylated to form 5-methylcytosine"
actcttgctcgatggtaaacataacacgcgctgcttgcagaacatgtggaaacactgaaacgcttaaaggagagaacatggtcccggtacccggccttcaagggagctgctggcgcctgttc

SEQ ID NO: 4185 - DNA, 122 bp, Homo sapiens
  misc_feature (61)..(62): /note="This region represents a CpG dinucleotide"
  misc_feature (61)..(61): /note="Nucleotide may be methylated to form 5-methylcytosine"
gaatattacaccacatccttatcacagctagggggttttggtaacaaaagccaaaaatcccggtatctactggatttaggtggccagaaatgcaatcatttgaagaacagatgcagaacagg

SEQ ID NO: 4186 - DNA, 122 bp, Homo sapiens
  misc_feature (61)..(62): /note="This region represents a CpG dinucleotide"
  misc_feature (61)..(61): /note="Nucleotide may be methylated to form 5-methylcytosine"
ttgaatcactgacagacttcaagttaagggagttttcgtggctgaggttagtaagtcacacgcacagctctccaaaggcatgtatggggaacgccagccttggctaaaagactgattcaagt

SEQ ID NO: 4187 - DNA, 122 bp, Homo sapiens
  misc_feature (61)..(62): /note="This region represents a CpG dinucleotide"
  misc_feature (61)..(61): /note="Nucleotide may be methylated to form 5-methylcytosine"
ctggaaatgcaggaccctcactgtggggcaagcatatgaacaaggacattccctggcctccgcatcctcgcggccatcttcggcctctccaccctccttgctacattcctggaggacagtcg

SEQ ID NO: 4188 - DNA, 122 bp, Homo sapiens
  misc_feature (61)..(62): /note="This region represents a CpG dinucleotide"
  misc_feature (61)..(61): /note="Nucleotide may be methylated to form 5-methylcytosine"
cacagagtattttcagatgtctctaggctcagcgcatgcgcggcgtgcagggaggtgtttcgggggcggaggttctggttctgcggagagggatgttgaagacagcgcgcccagcgatggca

SEQ ID NO: 4189 - DNA, 122 bp, Homo sapiens
  misc_feature (61)..(62): /note="This region represents a CpG dinucleotide"
  misc_feature (61)..(61): /note="Nucleotide may be methylated to form 5-methylcytosine"
tgtgaaacacctctccagctgaataagggtgtggctgtgcagctcaatgcagcgaaggtacgtgtcatcaagtcctgtaagcacaagaagtgagaagagaaactgtcagccaccagtccttg

SEQ ID NO: 4190 - DNA, 122 bp, Homo sapiens
  misc_feature (61)..(62): /note="This region represents a CpG dinucleotide"
  misc_feature (61)..(61): /note="Nucleotide may be methylated to form 5-methylcytosine"
aagtcctagattcattccttcctttctctctttttctctcccttttaaagagggaccagacgttgttttatttcttggttatcaggacagaaaaattttgaacatgtacgtatatctttcgc

SEQ ID NO: 4191 - DNA, 122 bp, Homo sapiens
  misc_feature (61)..(62): /note="This region represents a CpG dinucleotide"
  misc_feature (61)..(61): /note="Nucleotide may be methylated to form 5-methylcytosine"
ttattttccagactttctttaatgaagaaatattaactaagaagaaacacggtcagttgacgaacatgaaagacaatgaacactgagttagaaatggtgcaataaacataaaaccacatatt

SEQ ID NO: 4192 - DNA, 122 bp, Homo sapiens
  misc_feature (61)..(62): /note="This region represents a CpG dinucleotide"
  misc_feature (61)..(61): /note="Nucleotide may be methylated to form 5-methylcytosine"
aagttggcaaggtattagagtataaggacttggtggtgtatacagagttggtagattttacgtacagatgaccccagcttcaaaaaagatgatcgtactttaaatgtggcaaagaaacagtg

SEQ ID NO: 4193 - DNA, 122 bp, Homo sapiens
  misc_feature (61)..(62): /note="This region represents a CpG dinucleotide"
  misc_feature (61)..(61): /note="Nucleotide may be methylated to form 5-methylcytosine"
ctggccccacctgactgctggcccggcactggcacggtcactcctgtgtagctctgctgccgcccctcccttccccctgggcttgtctctaccctagaagtaatgtcaagcatgaggcttcc

SEQ ID NO: 4194 - DNA, 122 bp, Homo sapiens
  misc_feature (61)..(62): /note="This region represents a CpG dinucleotide"
  misc_feature (61)..(61): /note="Nucleotide may be methylated to form 5-methylcytosine"
ttttaaatgttctcctctcattgattcctctaatcaaggtgcttctttagatagcttacacgttgaattattcatgcatctgtgctttaccaactccatgatactgaagagtctttgggcag

SEQ ID NO: 4195 - DNA, 122 bp, Homo sapiens
  misc_feature (61)..(62): /note="This region represents a CpG dinucleotide"
  misc_feature (61)..(61): /note="Nucleotide may be methylated to form 5-methylcytosine"
taagtttggcctaaaggtttctctgtacatcatgaactataacgtaaatggaatagtatacggactctagtctactcttgtgccagtcactgagtttggccaatcgaagatggccaatgatt

SEQ ID NO: 4196 - DNA, 122 bp, Homo sapiens
  misc_feature (61)..(62): /note="This region represents a CpG dinucleotide"
  misc_feature (61)..(61): /note="Nucleotide may be methylated to form 5-methylcytosine"
ggaaggaaggaaggaaacttcactttccaaaaacaaccactgggagtccgctttgtgcagcgataggtaagcttctgtgcaggaacgggcgctgctgcaccccctaccacccacgcagcctc

SEQ ID NO: 4197 - DNA, 122 bp, Homo sapiens
  misc_feature (61)..(62): /note="This region represents a CpG dinucleotide"
  misc_feature (61)..(61): /note="Nucleotide may be methylated to form 5-methylcytosine"
agtgaataataatcacatttgattgtcaaagctcatggaatggtacacctaagatttgtacgtttctttttctttcttttctttttttttgagaaggagtttcgctcttattgcccaggctg

SEQ ID NO: 4198 - DNA, 122 bp, Homo sapiens
  misc_feature (61)..(62): /note="This region represents a CpG dinucleotide"
  misc_feature (61)..(61): /note="Nucleotide may be methylated to form 5-methylcytosine"
aggctagaaggtgaacttggggtaatgaaccagtcctaatgaggatgtaaccaaagggaacggtagaacagtgaaatgaaaggaagttggatccctgtatgacctgccagatcagagcagct

SEQ ID NO: 4199 - DNA, 122 bp, Homo sapiens
  misc_feature (61)..(62): /note="This region represents a CpG dinucleotide"
  misc_feature (61)..(61): /note="Nucleotide may be methylated to form 5-methylcytosine"
cagtgccagcagaaaactactacacattgaatcctgacagctgaatacgtccttggaacacgtttacaatcctttatgtagaaatgtatcctttaaagaataaggaaggtgcgtgcattcta

SEQ ID NO: 4200 - DNA, 122 bp, Homo sapiens
  misc_feature (61)..(62): /note="This region represents a CpG dinucleotide"
  misc_feature (61)..(61): /note="Nucleotide may be methylated to form 5-methylcytosine"
atctggaagagctcagggtcattgccgttggcctgaagcaggagcggcaggacatcgaagcggcctctaggcggtttccagccctgctgtatgcatatctgcaagcagacccggccaggtaa

SEQ ID NO: 4201 - DNA, 122 bp, Homo sapiens
  misc_feature (61)..(62): /note="This region represents a CpG dinucleotide"
  misc_feature (61)..(61): /note="Nucleotide may be methylated to form 5-methylcytosine"
catgacccttgtaaaagtgttgttaaagagagaaaaacaaaggaaaaagccctaaggaggcggacttcatgattaggaccacccaaggagagtctctaacaaaagaaaattgagttccataa

SEQ ID NO: 4202 - DNA, 122 bp, Homo sapiens
  misc_feature (61)..(62): /note="This region represents a CpG dinucleotide"
  misc_feature (61)..(61): /note="Nucleotide may be methylated to form 5-methylcytosine"
tctcgtcctccctgagcccccaaaattcaccatcgtatgtatgtcttcaaactgactaaccggtaagcccaacttttcagctgaaaaacagtgacagatggtctgtaaacactgaacttctt

SEQ ID NO: 4203 - DNA, 122 bp, Homo sapiens
  misc_feature (61)..(62): /note="This region represents a CpG dinucleotide"
  misc_feature (61)..(61): /note="Nucleotide may be methylated to form 5-methylcytosine"
tctgtctggaccccttgatggtaaaccatcccgtgtgaggtctgctctttactgtgtggacgaggccagggctgttatttgacatccgtggccacagcccacagtctaacgtcggccagctc

SEQ ID NO: 4204 - DNA, 122 bp, Homo sapiens
  misc_feature (61)..(62): /note="This region represents a CpG dinucleotide"
  misc_feature (61)..(61): /note="Nucleotide may be methylated to form 5-methylcytosine"
ctcgagcagtctctggaacacgctgcggggctcccgggcctgagccaggtctgttctccacgcaggtgttccgcgcgccccgttcagccatgtcgtccggcatccatgtagcgctggtgact

SEQ ID NO: 4205 - DNA, 122 bp, Homo sapiens
  misc_feature (61)..(62): /note="This region represents a CpG dinucleotide"
  misc_feature (61)..(61): /note="Nucleotide may be methylated to form 5-methylcytosine"
cagccagaagaggatctagttagacttctgtgaaagaaagtctatgtgccattccagtgccgtactcatgcctgccatggagcaagacggtggaagacacttaaaccttcagtgctttaact

SEQ ID NO: 4206 - DNA, 122 bp, Homo sapiens
  misc_feature (61)..(62): /note="This region represents a CpG dinucleotide"
  misc_feature (61)..(61): /note="Nucleotide may be methylated to form 5-methylcytosine"
gagttccaggaactttccatgaatagtgtgagaagaatgtgaagttccttaatgctgccacgaggggatctagtatgaaaactagtccagcatctgcaggaagacagagctacaagaatcag

SEQ ID NO: 4207 - DNA, 122 bp, Homo sapiens
  misc_feature (61)..(62): /note="This region represents a CpG dinucleotide"
  misc_feature (61)..(61): /note="Nucleotide may be methylated to form 5-methylcytosine"
tgtgaaatttgacattgttccaatttaaatgctttactccagcaagtgcaagactgcgggcgcttcggtgcggggcttgccacggccaggccgttctgagactcgccagctctccaggcttc

SEQ ID NO: 4208 - DNA, 122 bp, Homo sapiens
  misc_feature (61)..(62): /note="This region represents a CpG dinucleotide"
  misc_feature (61)..(61): /note="Nucleotide may be methylated to form 5-methylcytosine"
acaaactgtccattgtatgcctgtcctagagggcctttgctttctggaacttttaaaagtcgattcaaggactgatgcaaggacaaggcttacctattcctaacagacctaactgtgaaaga

SEQ ID NO: 4209 - DNA, 122 bp, Homo sapiens
  misc_feature (61)..(62): /note="This region represents a CpG dinucleotide"
  misc_feature (61)..(61): /note="Nucleotide may be methylated to form 5-methylcytosine"
ctcacctcctaccttgcagcctccccctgagcacttcacccttaggctgtgaggtacacacgtactcaggaagctccatccaggcagacagcatgcacccctgaatggctagtgcagctctg

SEQ ID NO: 4210 - DNA, 122 bp, Homo sapiens
  misc_feature (61)..(62): /note="This region represents a CpG dinucleotide"
  misc_feature (61)..(61): /note="Nucleotide may be methylated to form 5-methylcytosine"
gccaagtagagaaccctcaccagggtcctgggacccgtccacccctacacctagctagcccggagcctctcagctccgcgtccccacatcctccggatgcccagcggttgctgagataccgc

SEQ ID NO: 4211 - DNA, 122 bp, Homo sapiens
  misc_feature (61)..(62): /note="This region represents a CpG dinucleotide"
  misc_feature (61)..(61): /note="Nucleotide may be methylated to form 5-methylcytosine"
cctggttcacaggcttccacatcacaagttgtgttatttctgcttctcttcaacaagtgccgttgcatacacccaatccaggcccctccaaatcacttttctcctagatttctgccccaggc

SEQ ID NO: 4212 - DNA, 122 bp, Homo sapiens
  misc_feature (61)..(62): /note="This region represents a CpG dinucleotide"
  misc_feature (61)..(61): /note="Nucleotide may be methylated to form 5-methylcytosine"
cgttttccaagacaggacagtgttatggagcatggactcaagccttgggccatctacatccgttctttctccaccaagatgagttaggcgaccttggccacgtgacccccacctttctgagc

SEQ ID NO: 4213 - DNA, 122 bp, Homo sapiens
  misc_feature (61)..(62): /note="This region represents a CpG dinucleotide"
  misc_feature (61)..(61): /note="Nucleotide may be methylated to form 5-methylcytosine"
gctgggcttataattgatcctcaggtctgtcttgtcattctggagctttgtaccaaaagccgctgtagcattccaaatacaaccccatgttaaaattactcagcaccctcaagaaaggctga

SEQ ID NO: 4214 - DNA, 122 bp, Homo sapiens
  misc_feature (61)..(62): /note="This region represents a CpG dinucleotide"
  misc_feature (61)..(61): /note="Nucleotide may be methylated to form 5-methylcytosine"
cgcgatgcccgagcaggtcagggacgcggctgactcctggaggcctgcagaggcaggcaccggagggcgtgggccggggctggggaggagagccagaaatctcagagcagggcaggttctgt

SEQ ID NO: 4215 - DNA, 122 bp, Homo sapiens
  misc_feature (61)..(62): /note="This region represents a CpG dinucleotide"
  misc_feature (61)..(61): /note="Nucleotide may be methylated to form 5-methylcytosine"
ctctgcggctggagaatccagttctaagctggttcacttatgcagctggcaagtggtagtcgctctaggcaggaaatctcacttcctcaatatgtaaacctcttcacaggtttattggagtg

SEQ ID NO: 4216 - DNA, 122 bp, Homo sapiens
  misc_feature (61)..(62): /note="This region represents a CpG dinucleotide"
  misc_feature (61)..(61): /note="Nucleotide may be methylated to form 5-methylcytosine"
atatgtttagatacagaaataccattatgttacaattgcctccagtaatgagtacagtaacgagctatacaggtttgtagcctagagatgacaggccatactccacagcctaggagtgcagc

SEQ ID NO: 4217 - DNA, 122 bp, Homo sapiens
  misc_feature (61)..(62): /note="This region represents a CpG dinucleotide"
  misc_feature (61)..(61): /note="Nucleotide may be methylated to form 5-methylcytosine"
ttccaaacatgtcaggcttctggtttatggatcagcagttggagctgtctgtctctctcacgttttcaatgctgtcttctttgttttctggttgaatttcgccttcatcctccttgtgttga

SEQ ID NO: 4218 - DNA, 122 bp, Homo sapiens
  misc_feature (61)..(62): /note="This region represents a CpG dinucleotide"
  misc_feature (61)..(61): /note="Nucleotide may be methylated to form 5-methylcytosine"
caaaccacatgaccacatgactgaaatctgacagggcataggtgtcttattacacagtgacgcattagttgagccattgctaggtttcttctgagctcagagtggcccattttctgagggaa

SEQ ID NO: 4219 - DNA, 122 bp, Homo sapiens
  misc_feature (61)..(62): /note="This region represents a CpG dinucleotide"
  misc_feature (61)..(61): /note="Nucleotide may be methylated to form 5-methylcytosine"
ctcaagtgatccacccgcctcagcctcccaaagtgctgggatgacaggtgtgagtcaccacgccctgccctttagcaaatatgtcttgagggccacatgcacagatgtgcctgactgccagc

SEQ ID NO: 4220 - DNA, 122 bp, Homo sapiens
  misc_feature (61)..(62): /note="This region represents a CpG dinucleotide"
  misc_feature (61)..(61): /note="Nucleotide may be methylated to form 5-methylcytosine"
tcaaagccctgtgtttttgcctccaacagccctcatgcctagaccatcccttgtgctgaacgtgcacctaattcaacaccctagtcttcagacccgtgcaattttcactccctgtaaggaag

SEQ ID NO: 4221 - DNA, 122 bp, Homo sapiens
  misc_feature (61)..(62): /note="This region represents a CpG dinucleotide"
  misc_feature (61)..(61): /note="Nucleotide may be methylated to form 5-methylcytosine"
tgtattgagttcagtctaaatatatagacactgattccccacccacaaatatgtaaaatgcgacaactaacagatagtttaaagtgggaagaaaaaaggacaggttaaaaagaatgacaacc

SEQ ID NO: 4222 - DNA, 122 bp, Homo sapiens
  misc_feature (61)..(62): /note="This region represents a CpG dinucleotide"
  misc_feature (61)..(61): /note="Nucleotide may be methylated to form 5-methylcytosine"
tgaccctgagggatgggggcgctgcacatggtggggtcagagggtaaggaagtggggttccgctgctggtgggagcacagagatcactgctggacactcaagcgtccatggggatgagcccc

SEQ ID NO: 4223 - DNA, 122 bp, Homo sapiens
  misc_feature (61)..(62): /note="This region represents a CpG dinucleotide"
  misc_feature (61)..(61): /note="Nucleotide may be methylated to form 5-methylcytosine"
catggttaacccgaacatcctgacttagctcacctccaagggaggggcatgctccctcagcggcaagaccaggaacggggtggacagctacataatgggacagatttactcagtaagaggga

SEQ ID NO: 4224 - DNA, 122 bp, Homo sapiens
  misc_feature (61)..(62): /note="This region represents a CpG dinucleotide"
  misc_feature (61)..(61): /note="Nucleotide may be methylated to form 5-methylcytosine"
gcaacttattagtaagtttctctcttaaaacgtttccggctgggtgcagtggctcacactcgtaataccagcactttgggaggctgaggcgggcagatcacctgaggtcaggagtttgagac

SEQ ID NO: 4225 - DNA, 122 bp, Homo sapiens
  misc_feature (61)..(62): /note="This region represents a CpG dinucleotide"
  misc_feature (61)..(61): /note="Nucleotide may be methylated to form 5-methylcytosine"
cgtaactgtcttgggccatgctttcttatacatgatcttattcactgcttgcaacaatctcgctggttggactgcattctcttcattacttatagaagggaaattgaggcaagtgggtaagt

SEQ ID NO: 4226 - DNA, 122 bp, Homo sapiens
  misc_feature (61)..(62): /note="This region represents a CpG dinucleotide"
  misc_feature (61)..(61): /note="Nucleotide may be methylated to form 5-methylcytosine"
agggctcttctctacccttgatacactcaacaccacccacagcaaactccagacacagaacgtagtaaacccaggggaccaacagatgcaaatggctgtctttcccagtaagtgtgagcttc

SEQ ID NO: 4227 - DNA, 122 bp, Homo sapiens
  misc_feature (61)..(62): /note="This region represents a CpG dinucleotide"
  misc_feature (61)..(61): /note="Nucleotide may be methylated to form 5-methylcytosine"
tgtacatctgctttggcaatagggaaacggatgatgcaaatttgagtagataaatgcatacgtgtctttaaaaagtctaattagtgggaaattgcaggccaggcgcacacagggttgaggca

SEQ ID NO: 4228 - DNA, 122 bp, Homo sapiens
  misc_feature (61)..(62): /note="This region represents a CpG dinucleotide"
  misc_feature (61)..(61): /note="Nucleotide may be methylated to form 5-methylcytosine"
cttgagatagacagggctgggctgaggctacagtcaatagggagccatctcatggagactcgggcaggaagccatgactgtggttaattcaatggtgggttccttttacatgtaagcgaaac

SEQ ID NO: 4229 - DNA, 122 bp, Homo sapiens
  misc_feature (61)..(62): /note="This region represents a CpG dinucleotide"
  misc_feature (61)..(61): /note="Nucleotide may be methylated to form 5-methylcytosine"
gtctctccttctctgttaaatggctttattgagatataattcataaataaaaaaactgcacgtttgatatgtgcagtttgatgtgtttggatctatgtatacattggcaatactatcaccac

SEQ ID NO: 4230 - DNA, 122 bp, Homo sapiens
  misc_feature (61)..(62): /note="This region represents a CpG dinucleotide"
  misc_feature (61)..(61): /note="Nucleotide may be methylated to form 5-methylcytosine"
aacgttgttctatggtgtgtgcgtgtttttaatgttaaaatcagtggttagattaaaaaacgttatcagatttgaaagtggtgaggagtacaaagattaaccctgcacattccacatttgaa

SEQ ID NO: 4231 - DNA, 122 bp, Homo sapiens
  misc_feature (61)..(62): /note="This region represents a CpG dinucleotide"
  misc_feature (61)..(61): /note="Nucleotide may be methylated to form 5-methylcytosine"
attaacttcctgatgaaagacttctcctaacacagtgtaaagttcaccagtcaagaactacggaaaaccgacatagattgagaggtattaagacaaggctgatatctaaaagtttttttctt

SEQ ID NO: 4232 - DNA, 122 bp, Homo sapiens
  misc_feature (61)..(62): /note="This region represents a CpG dinucleotide"
  misc_feature (61)..(61): /note="Nucleotide may be methylated to form 5-methylcytosine"
tttcctgtacatgttattttgatcctcaccacaaccttgggaatttgacagcattgtgtgcgctactgaaagttgttctggttttttcttccttcttttaagaaatgaggaattttatgctg

SEQ ID NO: 4233 - DNA, 122 bp, Homo sapiens
  misc_feature (61)..(62): /note="This region represents a CpG dinucleotide"
  misc_feature (61)..(61): /note="Nucleotide may be methylated to form 5-methylcytosine"
aatacctagaaatataagtgacaatgtttttatagagcttattagattctatatacataacgttagaataatatggcatcattatggtctgtttcagtgaccaagtattttcagcagtatct

SEQ ID NO: 4234 - DNA, 122 bp, Homo sapiens
  misc_feature (61)..(62): /note="This region represents a CpG dinucleotide"
  misc_feature (61)..(61): /note="Nucleotide may be methylated to form 5-methylcytosine"
catgtgataacatcaagaagtttcccaataatatgaattaaagaccacgtactctgccaacgcaattgtgttcatctatcagacaatgtcagggaaaaactataatgaagctcacaaatatt

SEQ ID NO: 4235 - DNA, 122 bp, Homo sapiens
  misc_feature (61)..(62): /note="This region represents a CpG dinucleotide"
  misc_feature (61)..(61): /note="Nucleotide may be methylated to form 5-methylcytosine"
aatagctttatcctctgtcagaacacaaacaaacaaactttgagaggggaggaaggaaaccgtctagctcagggctcacttaggagagggatgagattagaaagttcaacacactgcttgtg

SEQ ID NO: 4236 - DNA, 122 bp, Homo sapiens
  misc_feature (61)..(62): /note="This region represents a CpG dinucleotide"
  misc_feature (61)..(61): /note="Nucleotide may be methylated to form 5-methylcytosine"
cagatcctggggaggggccacgacacaggactagcaggaggcacaggtctgagtgaggaccgccgcctccaaagccaatccttgcctttttgtttccagattgggaggcttgtctgggatga

SEQ ID NO: 4237 - DNA, 122 bp, Homo sapiens
  misc_feature (61)..(62): /note="This region represents a CpG dinucleotide"
  misc_feature (61)..(61): /note="Nucleotide may be methylated to form 5-methylcytosine"
tcaccggcaacccagcatcccacactctggatgggggtcaggagtggaggcgacaggaggcgaggaggcgagtgggcggcacagacaaggagggagcccacccctgctctagacagagttta

SEQ ID NO: 4238 - DNA, 122 bp, Homo sapiens
  misc_feature (61)..(62): /note="This region represents a CpG dinucleotide"
  misc_feature (61)..(61): /note="Nucleotide may be methylated to form 5-methylcytosine"
gcgaagagagtgaaattctgtctcaaaacaaacaaacaaacacacacacgcccttaagaacgcaatgaggataacatgttggcccttgtatttgagaaggcaacctggcttgactctgagct

SEQ ID NO: 4239 - DNA, 122 bp, Homo sapiens
  misc_feature (61)..(62): /note="This region represents a CpG dinucleotide"
  misc_feature (61)..(61): /note="Nucleotide may be methylated to form 5-methylcytosine"
gtgtggttggaagggcgcttggcaaagaataaatatacttgccttctaaactcaatcattcgacaccttagggaaaatatcttctctattgtgaaatgtggagtttgtatatacgacttcaa

SEQ ID NO: 4240 - DNA, 122 bp, Homo sapiens
  misc_feature (61)..(62): /note="This region represents a CpG dinucleotide"
  misc_feature (61)..(61): /note="Nucleotide may be methylated to form 5-methylcytosine"
aagtcggtggacctcagaacatgtgctgaattcgtgccatatgtctgcggaccacccacccgccttgaggagacccctctcgcaagctgcccgctcggccaagcggctgggctccgtcgtca

SEQ ID NO: 4241 - DNA, 122 bp, Homo sapiens
  misc_feature (61)..(62): /note="This region represents a CpG dinucleotide"
  misc_feature (61)..(61): /note="Nucleotide may be methylated to form 5-methylcytosine"
aacaaattaatcatgccacaagaaacacagtgttgacacagacccacagggagaaaccaacggtgtgtgaactccacacagagaatagctttgcatgctcggttgcagagcatgaatttggc

SEQ ID NO: 4242 - DNA, 122 bp, Homo sapiens
  misc_feature (61)..(62): /note="This region represents a CpG dinucleotide"
  misc_feature (61)..(61): /note="Nucleotide may be methylated to form 5-methylcytosine"
gttgtaatttctccttgaaaagaactgagtttatggtctttacttcacatcccagctgttcgagaattgctaaatccatagggagttgcgtgagttatgtaattggcatgaattatttgagt

SEQ ID NO: 4243 - DNA, 122 bp, Homo sapiens
  misc_feature (61)..(62): /note="This region represents a CpG dinucleotide"
  misc_feature (61)..(61): /note="Nucleotide may be methylated to form 5-methylcytosine"
ttttgaattttaatctgagatactttttcactctgtaaggctaattgctctttctcctaccgtgctggaatttcagaggatttttgaaatatgtgtgtttgaaattggtttcctgattttta

SEQ ID NO: 4244 - DNA, 122 bp, Homo sapiens
  misc_feature (61)..(62): /note="This region represents a CpG dinucleotide"
  misc_feature (61)..(61): /note="Nucleotide may be methylated to form 5-methylcytosine"
ttgagaaatgactttgttttagagaaaacttttgtttccagaggcacaggctacacagcacggagtggaatagaaatacggcgattatccagttcatttacttgcagtacacagccagacaa

SEQ ID NO: 4245 - DNA, 122 bp, Homo sapiens
  misc_feature (61)..(62): /note="This region represents a CpG dinucleotide"
  misc_feature (61)..(61): /note="Nucleotide may be methylated to form 5-methylcytosine"
ggggctggtgcaactccaaaatggctgccgcggggagcggcgattagaacgggttccagtcgcttgggggcgttggggggctggagggcaagaggttacgcgccccagctcccaccttgggt

SEQ ID NO: 4246 - DNA, 122 bp, Homo sapiens
  misc_feature (61)..(62): /note="This region represents a CpG dinucleotide"
  misc_feature (61)..(61): /note="Nucleotide may be methylated to form 5-methylcytosine"
ggcctctgtaattgcatgagccaatttcttaaactctttctttctctcctccacccccaacgtgtgtgtgtatgaatgaaataggaaggaaacaatgaaatagaacctcctattggttctgt

SEQ ID NO: 4247 - DNA, 122 bp, Homo sapiens
  misc_feature (61)..(62): /note="This region represents a CpG dinucleotide"
  misc_feature (61)..(61): /note="Nucleotide may be methylated to form 5-methylcytosine"
ctggccaaggtgcagaggccgggccgtgtgcctgggcggggagggccgcggcgcccgcctcgtccagcaacccccccctgcgcgccacgtgcagagatctgcctgctcacccggggccgccg

SEQ ID NO: 4248 - DNA, 122 bp, Homo sapiens
  misc_feature (61)..(62): /note="This region represents a CpG dinucleotide"
  misc_feature (61)..(61): /note="Nucleotide may be methylated to form 5-methylcytosine"
gcctcaccacagagacttgattctgtccaaaataaagacacctgagatgtggtggcctcacgtcttcccagtgtggagctgtggtggcgtctgaagtgaccgctttgcacttggcattttga

SEQ ID NO: 4249 - DNA, 122 bp, Homo sapiens
  misc_feature (61)..(62): /note="This region represents a CpG dinucleotide"
  misc_feature (61)..(61): /note="Nucleotide may be methylated to form 5-methylcytosine"
ccctgcacctaccagaaatcagctggatgagtcacagtgagattttccacccctgctcaccgccttgcacataggatgggctctgtctgagcctatactttgcctgttggcttgaattggat

SEQ ID NO: 4250 - DNA, 122 bp, Homo sapiens
  misc_feature (61)..(62): /note="This region represents a CpG dinucleotide"
  misc_feature (61)..(61): /note="Nucleotide may be methylated to form 5-methylcytosine"
ttctttctggggtgatgaaaatgtactagtactgattgtggccgcgctagcacaaaaatccgtttcattggccagacgctatggcccagggaaaaaaagaaggactagggggaatggggagt

SEQ ID NO: 4251 - DNA, 122 bp, Homo sapiens
  misc_feature (61)..(62): /note="This region represents a CpG dinucleotide"
  misc_feature (61)..(61): /note="Nucleotide may be methylated to form 5-methylcytosine"
tccctctggccctgaagccctgggcttgatatgacctcaaggcacccagacctgtcctcacgcgggccgtcctcccgtctcccaggaagtggcagtgagatttagtggttgacaggatgctg

SEQ ID NO: 4252 - DNA, 122 bp, Homo sapiens
  misc_feature (61)..(62): /note="This region represents a CpG dinucleotide"
  misc_feature (61)..(61): /note="Nucleotide may be methylated to form 5-methylcytosine"
tgtgttatataatagatctgccactgcttcagagcctctgtgagggcagagataaggtctcgttcttttttaatcctggcacctggcactaggtgtggcatttagtgggtacttaatactat

SEQ ID NO: 4253 - DNA, 122 bp, Homo sapiens
  misc_feature (61)..(62): /note="This region represents a CpG dinucleotide"
  misc_feature (61)..(61): /note="Nucleotide may be methylated to form 5-methylcytosine"
ggccccctcggcccaggagctacgcgagctcggattgtgtttccccggcgaggacagggacgcgcgcgggcggggagcaggggcccggtggctccgacgccggaggcttgcggcccagggcc

SEQ ID NO: 4254 - DNA, 122 bp, Homo sapiens
  misc_feature (61)..(62): /note="This region represents a CpG dinucleotide"
  misc_feature (61)..(61): /note="Nucleotide may be methylated to form 5-methylcytosine"
gaggtgcgcctggtgccgcagcgcggcggccggcacggcggtgatgttggtgtgggtgaccgacagcgaggtcaggttcaggccccgcaggctgcccgccgccacctcctccagcagcggcc

SEQ ID NO: 4255 - DNA, 122 bp, Homo sapiens
  misc_feature (61)..(62): /note="This region represents a CpG dinucleotide"
  misc_feature (61)..(61): /note="Nucleotide may be methylated to form 5-methylcytosine"
taggcaggtgtgtgaattgtacaaaaccagacatgctattcagaggccttttgcaaaatacgttgcgcttcttagagcccaagcacaaaggaattgaggaaaccaaggcttcaagtccccag

SEQ ID NO: 4256 - DNA, 122 bp, Homo sapiens
  misc_feature (61)..(62): /note="This region represents a CpG dinucleotide"
  misc_feature (61)..(61): /note="Nucleotide may be methylated to form 5-methylcytosine"
aatcattgtagtgagccttattgcaccctttccagactcattaaagatgttttaaactcacgtttttctcaacttttataaagttactcttcagaaaagatacttagagcccttaaaatttg

SEQ ID NO: 4257 - DNA, 122 bp, Homo sapiens
  misc_feature (61)..(62): /note="This region represents a CpG dinucleotide"
  misc_feature (61)..(61): /note="Nucleotide may be methylated to form 5-methylcytosine"
tatttgtttcccgagtctattgatctccctgaattctacagaaatgcattctaagctaggcgcctgtatgtcagaatcagttctgcaggtagcttccgtgctccaagtatgacatgtattgt

SEQ ID NO: 4258 - DNA, 122 bp, Homo sapiens
  misc_feature (61)..(62): /note="This region represents a CpG dinucleotide"
  misc_feature (61)..(61): /note="Nucleotide may be methylated to form 5-methylcytosine"
gcccctctgtttttcagcaaacacccctggaggatgagctgcaattgggcaagcacagaacgtttgatcttcttagaaaggctctctattgtttgcttcaaaaatgacccaaggctgccagt

SEQ ID NO: 4259 - DNA, 122 bp, Homo sapiens
  misc_feature (61)..(62): /note="This region represents a CpG dinucleotide"
  misc_feature (61)..(61): /note="Nucleotide may be methylated to form 5-methylcytosine"
ctgttatttccccgtgtgcagctaaaactataatcactctgttctccgacaggatgtttgcgttcaagccaaaactgcctcctctatccaacttgctgcagttcggttcagcacagggcaat

SEQ ID NO: 4260 - DNA, 122 bp, Homo sapiens
  misc_feature (61)..(62): /note="This region represents a CpG dinucleotide"
  misc_feature (61)..(61): /note="Nucleotide may be methylated to form 5-methylcytosine"
taactttaatcctttaaattgtccaaaaagtacagttgtgaatagaaagcaatatttatacgtatacaatgtcaatatgggctgtatgtaataaagcatacttgggcgaaatattggtgttt

SEQ ID NO: 4261 - DNA, 122 bp, Homo sapiens
  misc_feature (61)..(62): /note="This region represents a CpG dinucleotide"
  misc_feature (61)..(61): /note="Nucleotide may be methylated to form 5-methylcytosine"
gaactcccggtccccattgtggggaagacagcccgtccactggaggcagggcagcggctgcgacagccactctgggggcctaagttcagggtcctgcagacacctgcgcctagaggtggctg

SEQ ID NO: 4262 - DNA, 122 bp, Homo sapiens
  misc_feature (61)..(62): /note="This region represents a CpG dinucleotide"
  misc_feature (61)..(61): /note="Nucleotide may be methylated to form 5-methylcytosine"
ggaaggtgaatgtgttgttggagcccaagcctggtggctgcagcagaggccagcaggggccgtctttatctaagagaaatgggtcttcattataggatttaagggagaaaaaagataagatt

SEQ ID NO: 4263 - DNA, 122 bp, Homo sapiens
  misc_feature (61)..(62): /note="This region represents a CpG dinucleotide"
  misc_feature (61)..(61): /note="Nucleotide may be methylated to form 5-methylcytosine"
ttctaattgagcctttttgcatagttaccagttacccgtatctgacttcaagtctttagccgtatacctacatggttccatagttatcaatgtttatttacaatttaatattcttctttagc

SEQ ID NO: 4264 - DNA, 122 bp, Homo sapiens
  misc_feature (61)..(62): /note="This region represents a CpG dinucleotide"
  misc_feature (61)..(61): /note="Nucleotide may be methylated to form 5-methylcytosine"
tgtgcccaggacagtcaactcaggcgctggactctcattctggttggattttatgacagccgtattcgccataagaattctagagccagaccttgttacttcacaattgcctcacgttgcag

SEQ ID NO: 4265 - DNA, 122 bp, Homo sapiens
  misc_feature (61)..(62): /note="This region represents a CpG dinucleotide"
  misc_feature (61)..(61): /note="Nucleotide may be methylated to form 5-methylcytosine"
tgaatacctcctaccttcccttggtgccaattccttgtaatcagctggtttcctaggtaacgactcaaccaccaatacactcttcagatgacaaaccaaaaaaaaaaaaagaaaaaaaatta

SEQ ID NO: 4266 - DNA, 122 bp, Homo sapiens
  misc_feature (61)..(62): /note="This region represents a CpG dinucleotide"
  misc_feature (61)..(61): /note="Nucleotide may be methylated to form 5-methylcytosine"
tctactaatatttcaatgttcatgtgtctttgactttccccacaagtaaactccaagtttcgtagaaacagaaagtacatcatacactttctatcttagaaacagaaagtacatcatacact

SEQ ID NO: 4267 - DNA, 122 bp, Homo sapiens
  misc_feature (61)..(62): /note="This region represents a CpG dinucleotide"
  misc_feature (61)..(61): /note="Nucleotide may be methylated to form 5-methylcytosine"
gggcagtgactggaatggttggaatgtggccttggtttgccattgggtgttttgttcctccgagcattggctggactctctggtgatttctggtcttgaaggacttcctgttttaaatgtct

SEQ ID NO: 4268 - DNA, 122 bp, Homo sapiens
  misc_feature (61)..(62): /note="This region represents a CpG dinucleotide"
  misc_feature (61)..(61): /note="Nucleotide may be methylated to form 5-methylcytosine"
ccactacacactcccagaatttctaaaatgaaaaaaagacaaaccaaatattggcaaagacgtagagtaaccagaactcgcatcactcctaatgggggtatatattagtataaacactttgg

SEQ ID NO: 4269 - DNA, 122 bp, Homo sapiens
  misc_feature (61)..(62): /note="This region represents a CpG dinucleotide"
  misc_feature (61)..(61): /note="Nucleotide may be methylated to form 5-methylcytosine"
cttctggtgacgagctggcaatctttgtggttcggcttcacaaagtgttccccctatgtgcgtgtctgtgtcccaatttcctcttttagtaaagattttggttctattggattaggagtcca

SEQ ID NO: 4270 - DNA, 122 bp, Homo sapiens
  misc_feature (61)..(62): /note="This region represents a CpG dinucleotide"
  misc_feature (61)..(61): /note="Nucleotide may be methylated to form 5-methylcytosine"
actccagtgggggtgtgcaggcatgcccttctgctgccaataaataactcatggtggctgcgtaaacccagaggcaaagtactagtgagtgtagacatgcaatttgacttgttgctatctgg

SEQ ID NO: 4271 - DNA, 122 bp, Homo sapiens
  misc_feature (61)..(62): /note="This region represents a CpG dinucleotide"
  misc_feature (61)..(61): /note="Nucleotide may be methylated to form 5-methylcytosine"
gggcatttttctctcccctgattggctaggctctgataaaaccccagacaatggtgaagtcgtttctctgagtgcaggccttgttaaggataacagaaggcagccaggcacagtggctcaag

SEQ ID NO: 4272 - DNA, 122 bp, Homo sapiens
  misc_feature (61)..(62): /note="This region represents a CpG dinucleotide"
  misc_feature (61)..(61): /note="Nucleotide may be methylated to form 5-methylcytosine"
tccctattctcagcaaaaccaggcagaaagcatcgcaggtaaggaagctgttcactcctacgcatactactgggaatgtatggaccaactggggaagaatttcaggtcaaaattagggaaac

SEQ ID NO: 4273 - DNA, 122 bp, Homo sapiens
  misc_feature (61)..(62): /note="This region represents a CpG dinucleotide"
  misc_feature (61)..(61): /note="Nucleotide may be methylated to form 5-methylcytosine"
aaccaaggcttctcctccccaagccgacaccccacacttcctacatgtggtggctgcccacgggctggaagacagtgcctctcccatgacccctcagtgcatcaccccacccatctgagcaa

SEQ ID NO: 4274 - DNA, 122 bp, Homo sapiens
  misc_feature (61)..(62): /note="This region represents a CpG dinucleotide"
  misc_feature (61)..(61): /note="Nucleotide may be methylated to form 5-methylcytosine"
ctcacatgaagtagaaaatgtgcctggatatcctcctcctttctttgttaatcttcaagacgttggccaggcttcccttcatccatcatttctccctaaagagtctagctctcagtgattgc

SEQ ID NO: 4275 - DNA, 122 bp, Homo sapiens
  misc_feature (61)..(62): /note="This region represents a CpG dinucleotide"
  misc_feature (61)..(61): /note="Nucleotide may be methylated to form 5-methylcytosine"
tacggggccatttgagatgaagtcagaccagtttcacagcatgctgggagatgtagtttccggaggtttgagcaacggaagagccggggctaaacactaaaataaccgcgatttttagtttc

SEQ ID NO: 4276 - DNA, 122 bp, Homo sapiens
  misc_feature (61)..(62): /note="This region represents a CpG dinucleotide"
  misc_feature (61)..(61): /note="Nucleotide may be methylated to form 5-methylcytosine"
ggcggagacccgcgagcgctcaccctcggcgcgggactaagggaacccacctgagcctcacgccgccaacgcctctgcttccgccctgcgccgggcacttccgcccgcacccaccaggcgcc

SEQ ID NO: 4277 - DNA, 122 bp, Homo sapiens
  misc_feature (61)..(62): /note="This region represents a CpG dinucleotide"
  misc_feature (61)..(61): /note="Nucleotide may be methylated to form 5-methylcytosine"
cagcagaaatttagttcctgagttccaagaatcttgcggtctgggagggaagggcacagacgcctctccaggcagcacgtcgcccacaccctctctggccgttcccatcctgccctctgaaa

SEQ ID NO: 4278 - DNA, 122 bp, Homo sapiens
  misc_feature (61)..(62): /note="This region represents a CpG dinucleotide"
  misc_feature (61)..(61): /note="Nucleotide may be methylated to form 5-methylcytosine"
aagaaacccctcacacccactctggtacaccttggtgtttgccattattagaacagcaaacgaaatactattgattcagagggtttgtggtttaccgacctagtgcagttaagttcctcttc

SEQ ID NO: 4279 - DNA, 122 bp, Homo sapiens
  misc_feature (61)..(62): /note="This region represents a CpG dinucleotide"
  misc_feature (61)..(61): /note="Nucleotide may be methylated to form 5-methylcytosine"
tcagtaatgcacttttcttttatgatgtcactggccataattagcacatgacatgcttaccgtgttctaaaacagcataataattggagcatttttacttcaaaatggatcagagtggtcaa

SEQ ID NO: 4280 - DNA, 122 bp, Homo sapiens
  misc_feature (61)..(62): /note="This region represents a CpG dinucleotide"
  misc_feature (61)..(61): /note="Nucleotide may be methylated to form 5-methylcytosine"
tttgcatttcatattttaatttgcatccccttcataaacaattcaaggactttaaaattccggaaactagtgtttattattcatttatatttatttattttaattatttatttccaatttgt

SEQ ID NO: 4281 - DNA, 122 bp, Homo sapiens
  misc_feature (61)..(62): /note="This region represents a CpG dinucleotide"
  misc_feature (61)..(61): /note="Nucleotide may be methylated to form 5-methylcytosine"
tcccttcacagcacacagcgccccagtccccactgagctgtcaccagtctcctgaaaacccggcacggatcccgcacgggagcattctcacccaagcccagagactcccctcccacccttta

SEQ ID NO: 4282 - DNA, 122 bp, Homo sapiens
  misc_feature (61)..(62): /note="This region represents a CpG dinucleotide"
  misc_feature (61)..(61): /note="Nucleotide may be methylated to form 5-methylcytosine"
gtcaggaaggcgcggggctacaggagcatggagtgtctcaggattccatgggtgtgggggcgaatttctagggaaaggtcaaccatatctaatgatgcaaaggcacggaggctggggaaagg

SEQ ID NO: 4283 - DNA, 122 bp, Homo sapiens
  misc_feature (61)..(62): /note="This region represents a CpG dinucleotide"
  misc_feature (61)..(61): /note="Nucleotide may be methylated to form 5-methylcytosine"
ttgctatggtgcatggtgggcatggctgaaccaagtccccttattctttgaacatctttgcgtattattcctgctcccccagccgtctccaggccccagtctcctctggagggatttcccag

SEQ ID NO: 4284 - DNA, 122 bp, Homo sapiens
  misc_feature (61)..(62): /note="This region represents a CpG dinucleotide"
  misc_feature (61)..(61): /note="Nucleotide may be methylated to form 5-methylcytosine"
atgcggccgccgggctattgggaggtgggtggtcgcggccgcagcgccaagtcgggctggcgggctcagtgctcgctgggggcagggcggcgaactggaggaagagggtggacgttggtgag

SEQ ID NO: 4285 - DNA, 122 bp, Homo sapiens
  misc_feature (61)..(62): /note="This region represents a CpG dinucleotide"
  misc_feature (61)..(61): /note="Nucleotide may be methylated to form 5-methylcytosine"
catgtttctcaattccccggtgcaggcttttgcttcaatatacctttctggtgttttacacgcatattccaactttgatggcctctttgcttttatggataatgatagatttatttcatgaa

SEQ ID NO: 4286 - DNA, 122 bp, Homo sapiens
  misc_feature (61)..(62): /note="This region represents a CpG dinucleotide"
  misc_feature (61)..(61): /note="Nucleotide may be methylated to form 5-methylcytosine"
ttttgaatctttttttttggtaggtggcccaggcaaatagtgtcatcgattggcctatgtcgttatggtgggaggattgactgctgctggggctgggctcgccagtcttggggacagtgtca

SEQ ID NO: 4287 - DNA, 122 bp, Homo sapiens
  misc_feature (61)..(62): /note="This region represents a CpG dinucleotide"
  misc_feature (61)..(61): /note="Nucleotide may be methylated to form 5-methylcytosine"
tgttggccatcattcattcattcatccactcactcattcagtcaatcattatttattgagcgtcaaccgtgcgccagcaggcactgtgctagtacatggagagcagaaaggcacgggagctt

SEQ ID NO: 4288 - DNA, 122 bp, Homo sapiens
  misc_feature (61)..(62): /note="This region represents a CpG dinucleotide"
  misc_feature (61)..(61): /note="Nucleotide may be methylated to form 5-methylcytosine"
ggtacatagtaggtgtttatatttatggagtacaagagatgttttgatacaggcatgaaacgtgaaataagcacatcatagagaataggggatccatccactgaagcatttttccattgagt

SEQ ID NO: 4289 - DNA, 122 bp, Homo sapiens
  misc_feature (61)..(62): /note="This region represents a CpG dinucleotide"
  misc_feature (61)..(61): /note="Nucleotide may be methylated to form 5-methylcytosine"
gctctttgagccgctgtccaggtctgcaggtcctcgttcagggacatgaaatctccttgtcgtaggcggacttaaagtgtccttcgaggaagctcctgtccggagccaccacccagccagac

SEQ ID NO: 4290 - DNA, 122 bp, Homo sapiens
  misc_feature (61)..(62): /note="This region represents a CpG dinucleotide"
  misc_feature (61)..(61): /note="Nucleotide may be methylated to form 5-methylcytosine"
ttgcacaagcaaatgaaaattgttactgctcaaagcatttttgaaattcttttgagattacgtgtacgtagtttccatggcatgtaagaaaatcttggtcgggcacagtggcttaagcctgt

SEQ ID NO: 4291 - DNA, 122 bp, Homo sapiens
  misc_feature (61)..(62): /note="This region represents a CpG dinucleotide"
  misc_feature (61)..(61): /note="Nucleotide may be methylated to form 5-methylcytosine"
ctgggattacaggcatgagccactgtgctcagccatattaaaactcttgtgtaataaattcgcagatatggaaatccttcattttccacaaaaaaaccccatcctgtgtagataccaggtga

SEQ ID NO: 4292 - DNA, 122 bp, Homo sapiens
  misc_feature (61)..(62): /note="This region represents a CpG dinucleotide"
  misc_feature (61)..(61): /note="Nucleotide may be methylated to form 5-methylcytosine"
cagcccactgaatgcttcctgagggccaggcctgagcccaggctttactcatatgcaccccgccccattaggagtgtcaagctgatgagtatggcctaagaggcctcattccagagggatct

SEQ ID NO: 4293 - DNA, 122 bp, Homo sapiens
  misc_feature (61)..(62): /note="This region represents a CpG dinucleotide"
  misc_feature (61)..(61): /note="Nucleotide may be methylated to form 5-methylcytosine"
cccacaaggcatattcaaggactgagtccccatctggagcttgaggtccttgttcaagctcgtgtagttgtaggagaattcactccctagaagttacagggcggaggcctttggctcctaga

SEQ ID NO: 4294 - DNA, 122 bp, Homo sapiens
  misc_feature (61)..(62): /note="This region represents a CpG dinucleotide"
  misc_feature (61)..(61): /note="Nucleotide may be methylated to form 5-methylcytosine"
gcctgtcccttgacgccctgcatcctcctccctgactcgcagccccatcggacgctctcccgggaccgccgcaggaccagtttccatagactgcggactggggtcttcctccagcagttact

SEQ ID NO: 4295 - DNA, 122 bp, Homo sapiens
  misc_feature (61)..(62): /note="This region represents a CpG dinucleotide"
  misc_feature (61)..(61): /note="Nucleotide may be methylated to form 5-methylcytosine"
gttgcatcttgtgtaattctagtacaatatcaaaaccagtcctctttttgttccaaagttcgcaggcccttctttgtcactccactactatattataatctggttttctgtttatattgtat

SEQ ID NO: 4296 - DNA, 122 bp, Homo sapiens
  misc_feature (61)..(62): /note="This region represents a CpG dinucleotide"
  misc_feature (61)..(61): /note="Nucleotide may be methylated to form 5-methylcytosine"
cccaggactgtaatggccccagagaagccaccgagacacgatggaacaggaggatggtggcggctcacctagtgtttcacagcttgtgttccgggagcactgcccactgtccctgtccagag

SEQ ID NO: 4297 - DNA, 122 bp, Homo sapiens
  misc_feature (61)..(62): /note="This region represents a CpG dinucleotide"
  misc_feature (61)..(61): /note="Nucleotide may be methylated to form 5-methylcytosine"
atgactcagccttgggagtcacacagcattggttacaaacaataaacaaatccagattcacgggcagaggagttagactccacccttaaagtgggaattgcaagattctagaacaacatatg

SEQ ID NO: 4298 - DNA, 122 bp, Homo sapiens
  misc_feature (61)..(62): /note="This region represents a CpG dinucleotide"
  misc_feature (61)..(61): /note="Nucleotide may be methylated to form 5-methylcytosine"
atagtatataaaaggtttgggcgtcgatcagcgagggagcagcaaatggccggcggttggcgcctcgcggggggcgggcggcgcagagtagggggcggtggccagggccgaggcgtcgcagc

SEQ ID NO: 4299 - DNA, 122 bp, Homo sapiens
  misc_feature (61)..(62): /note="This region represents a CpG dinucleotide"
  misc_feature (61)..(61): /note="Nucleotide may be methylated to form 5-methylcytosine"
gatttctggagcagcctggtttgaggagtgcatgtggatccctatgggcttggagagcaccgccggggaatttaaaaatgccccattcctgaccctcccacactgggccagggaggtgagca

SEQ ID NO: 4300 - DNA, 122 bp, Homo sapiens
  misc_feature (61)..(62): /note="This region represents a CpG dinucleotide"
  misc_feature (61)..(61): /note="Nucleotide may be methylated to form 5-methylcytosine"
gatggggaagagtggccattccatagagtatgtagagtggcgatgcagaaaagggtgaaacgtcgttggcgaattgtagctatcctagtttagccagagaaataggatatgggtagagaagt

SEQ ID NO: 4301 - DNA, 122 bp, Homo sapiens
  misc_feature (61)..(62): /note="This region represents a CpG dinucleotide"
  misc_feature (61)..(61): /note="Nucleotide may be methylated to form 5-methylcytosine"
aagaaaactccacgaagaggaaaaactgaaaagggaggagagtgtcaaaaagaaggatggcgaggaaaaaggcaaacaggaagcacaagacaagctgggtcggcttttccatcaacaccaag

SEQ ID NO: 4302 - DNA, 122 bp, Homo sapiens
  misc_feature (61)..(62): /note="This region represents a CpG dinucleotide"
  misc_feature (61)..(61): /note="Nucleotide may be methylated to form 5-methylcytosine"
agtcctgacacttcctgttcctctcagctcctccttggaggaagtggtgggttgcaccaccgtggcccttcacccctgcccctctccgctctacagcagctctgatgtcagagagcggcccc

SEQ ID NO: 4303 - DNA, 122 bp, Homo sapiens
  misc_feature (61)..(62): /note="This region represents a CpG dinucleotide"
  misc_feature (61)..(61): /note="Nucleotide may be methylated to form 5-methylcytosine"
gagtcccggcggctcggcgcggtcttggtctgggtcggtggggttgggccgggagacccgcggccggcggggtccaggctgggggaggccgccgctgccaccaggtccccgaggtagggtag

SEQ ID NO: 4304 - DNA, 122 bp, Homo sapiens
  misc_feature (61)..(62): /note="This region represents a CpG dinucleotide"
  misc_feature (61)..(61): /note="Nucleotide may be methylated to form 5-methylcytosine"
ttccatctggaattttatttgatgattagtctagcatcgtaatggtgtccttcgtgttgacgtgaaaacccagtcttccttcagttcatttcccgtttattagggatgcaaaactccagcca

SEQ ID NO: 4305 - DNA, 122 bp, Homo sapiens
  misc_feature (61)..(62): /note="This region represents a CpG dinucleotide"
  misc_feature (61)..(61): /note="Nucleotide may be methylated to form 5-methylcytosine"
tgggaaaaggctaaacgtccagtcggggccatgctgagtttgaggaccctgcaggaaattcgggtggaaaagtccagctgcatctggagagcggagagtgttttggagccggagaggaagtt

SEQ ID NO: 4306 - DNA, 122 bp, Homo sapiens
  misc_feature (61)..(62): /note="This region represents a CpG dinucleotide"
  misc_feature (61)..(61): /note="Nucleotide may be methylated to form 5-methylcytosine"
agtcagtttgccttgtgtgtgtttgatttttcagaatgtgtaagtacagtaagtcctcaccgtcattgatgggctcttggaaactgctactgtaagcataacaacacacaaccaaaccaatt

SEQ ID NO: 4307 - DNA, 122 bp, Homo sapiens
  misc_feature (61)..(62): /note="This region represents a CpG dinucleotide"
  misc_feature (61)..(61): /note="Nucleotide may be methylated to form 5-methylcytosine"
ttcatatcaacgcgagtagagttagctagctatgtttgtaaacaatattccgatatgcttcgttaaagtaagccgatattaaacatttatataaatccatcctcacagggtcaatctggaga

SEQ ID NO: 4308 - DNA, 122 bp, Homo sapiens
  misc_feature (61)..(62): /note="This region represents a CpG dinucleotide"
  misc_feature (61)..(61): /note="Nucleotide may be methylated to form 5-methylcytosine"
catgaccccatcctcctggacacagtggattggaacagagatgaaagagacaggaagagacggagacacacatagaggcagagagaggaaaaaagggcaaagccagcaggtagtcagacaaa

SEQ ID NO: 4309 - DNA, 122 bp, Homo sapiens
  misc_feature (61)..(62): /note="This region represents a CpG dinucleotide"
  misc_feature (61)..(61): /note="Nucleotide may be methylated to form 5-methylcytosine"
tgctttttacctacctatctatctgcattaagctagcataaactccaacttaaagctgaacgccttcagagaaaccacatccctgccccctgcataagagaatgctgaataactaatgattc

SEQ ID NO: 4310 - DNA, 122 bp, Homo sapiens
  misc_feature (61)..(62): /note="This region represents a CpG dinucleotide"
  misc_feature (61)..(61): /note="Nucleotide may be methylated to form 5-methylcytosine"
cttataatatttggggtttacttaagttagggcaaagtaagacaatgttctgcaaatactcgtgtgactggaattaactacagcccatcctagagagagaatacaaaaaacagaccaggaaa

SEQ ID NO: 4311 - DNA, 122 bp, Homo sapiens
  misc_feature (61)..(62): /note="This region represents a CpG dinucleotide"
  misc_feature (61)..(61): /note="Nucleotide may be methylated to form 5-methylcytosine"
gatctccacaccagtccctacccttaatgcattaaggttttcttttcctgacagcaattacgttaattctttgaaaacaaatatccatcaatcaattcattacatcctttccactcaccgct

SEQ ID NO: 4312 - DNA, 122 bp, Homo sapiens
  misc_feature (61)..(62): /note="This region represents a CpG dinucleotide"
  misc_feature (61)..(61): /note="Nucleotide may be methylated to form 5-methylcytosine"
tgaaattactgagctaaaagggaccgaaagatcctaatggaaccaccgatgggaaaactgcggcccaggaggaaacacaccaagcaaaattgcaccgtatccaggtggccagtctccagact

SEQ ID NO: 4313 - DNA, 122 bp, Homo sapiens
  misc_feature (61)..(62): /note="This region represents a CpG dinucleotide"
  misc_feature (61)..(61): /note="Nucleotide may be methylated to form 5-methylcytosine"
ctgcgcggagagcccgaccccgcggccaagccggccgcccgccagaacgaaaaaacggcccgatgagatgctgcttcccaaaggccaccaaggggccagggccctcagccaggacagaaagg

SEQ ID NO: 4314 - DNA, 122 bp, Homo sapiens
  misc_feature (61)..(62): /note="This region represents a CpG dinucleotide"
  misc_feature (61)..(61): /note="Nucleotide may be methylated to form 5-methylcytosine"
cttcatttgtggctagtattgcaccccttcagtgtggcaatgtggttctgtcaccagaaacgctgactggcaacttctgtatggttgcaaaaccgggactggattcactgagactgattcct

SEQ ID NO: 4315 - DNA, 122 bp, Homo sapiens
  misc_feature (61)..(62): /note="This region represents a CpG dinucleotide"
  misc_feature (61)..(61): /note="Nucleotide may be methylated to form 5-methylcytosine"
gatgtttataacatttgtcaagccttcattataaaaagtagtctaacaaagcaatgatgtcgtctaccttcctgtttatgcatgaatatgtattatgtttgcattttaacagtggcagccca

SEQ ID NO: 4316 - DNA, 122 bp, Homo sapiens
  misc_feature (61)..(62): /note="This region represents a CpG dinucleotide"
  misc_feature (61)..(61): /note="Nucleotide may be methylated to form 5-methylcytosine"
ggggtccccctcatctcccactcactccctccattcagcccccactggccccatccttcccgaactcaccagccacactccaaccttagggcttttgctatagttgtttcttctagaacagg

SEQ ID NO: 4317 - DNA, 122 bp, Homo sapiens
  misc_feature (61)..(62): /note="This region represents a CpG dinucleotide"
  misc_feature (61)..(61): /note="Nucleotide may be methylated to form 5-methylcytosine"
ggagtaagtatttctcctgaattattcaccagcttccaggagatggaaccatcactgtggcgtcttgttacaggagtgctgtggcctctcctctggtggagcaccggaagtggaaggcacgc

SEQ ID NO: 4318 - DNA, 122 bp, Homo sapiens
  misc_feature (61)..(62): /note="This region represents a CpG dinucleotide"
  misc_feature (61)..(61): /note="Nucleotide may be methylated to form 5-methylcytosine"
gaacctcacctcataatacactccatggccatggtgagtcagaacaccactgcagcttggcgctagtgagcttaatgatacaggtccatatcactacttttgtaaaataagaagtacatttc

SEQ ID NO: 4319 - DNA, 122 bp, Homo sapiens
  misc_feature (61)..(62): /note="This region represents a CpG dinucleotide"
  misc_feature (61)..(61): /note="Nucleotide may be methylated to form 5-methylcytosine"
agcctgtttgccctgttcacaatgaatcaaaccctagctatggtcacaacccataatggccggcagcccaggattggaaaaatgaggaaaagaagagcgagaaaaagagaggctggcaggca

SEQ ID NO: 4320 - DNA, 122 bp, Homo sapiens
  misc_feature (61)..(62): /note="This region represents a CpG dinucleotide"
  misc_feature (61)..(61): /note="Nucleotide may be methylated to form 5-methylcytosine"
gaagatgttaagatttgggcttcagttatttatgcaagtctttaactcttattatcttttcgcaagaaaatattgttgccacctgctggcagtcatgtattagtggaatggttttctactcc

SEQ ID NO: 4321 - DNA, 122 bp, Homo sapiens
  misc_feature (61)..(62): /note="This region represents a CpG dinucleotide"
  misc_feature (61)..(61): /note="Nucleotide may be methylated to form 5-methylcytosine"
ctccagcatggtcccccctcctaccagatgatgacaaggcctcagggagtagtagagggacgagatgaaagaaacctggcctcttgaatgactaagtgaaggagagttgccccagcaaccta

SEQ ID NO: 4322 - DNA, 122 bp, Homo sapiens
  misc_feature (61)..(62): /note="This region represents a CpG dinucleotide"
  misc_feature (61)..(61): /note="Nucleotide may be methylated to form 5-methylcytosine"
tgactcatttaaccttaattacttccttagaggccccatctccaaatacagccacacaggcggttagggctttagcataggaattgcagagacacagacattcagtccatagcaaccctcct

SEQ ID NO: 4323 - DNA, 122 bp, Homo sapiens
  misc_feature (61)..(62): /note="This region represents a CpG dinucleotide"
  misc_feature (61)..(61): /note="Nucleotide may be methylated to form 5-methylcytosine"
gttaagaaggactctgtgatcattcccttcctacacactcaaaaatcccgttttgcaacacggtttacactaattatgtaaacaggactacaggagtaggaaatagttagaataaacatact

SEQ ID NO: 4324 - DNA, 122 bp, Homo sapiens
  misc_feature (61)..(62): /note="This region represents a CpG dinucleotide"
  misc_feature (61)..(61): /note="Nucleotide may be methylated to form 5-methylcytosine"
attaagagcctgatagactaagtacacacattttgtgtctaaatataaggaaaacccatacggaactgaaacagcttgtggttaaacctcaccataatgtggtcttcaacttcccattttgt

SEQ ID NO: 4325 - DNA, 122 bp, Homo sapiens
  misc_feature (61)..(62): /note="This region represents a CpG dinucleotide"
  misc_feature (61)..(61): /note="Nucleotide may be methylated to form 5-methylcytosine"
atgggtctggttgccctagaataagaggcagagctcatgcgagcgctcaccttctggctgcgatggaaacattgcccactgcgtacagctctagtgactccttgatgtgtaagcatgtgtga

SEQ ID NO: 4326 - DNA, 122 bp, Homo sapiens
  misc_feature (61)..(62): /note="This region represents a CpG dinucleotide"
  misc_feature (61)..(61): /note="Nucleotide may be methylated to form 5-methylcytosine"
gaactgttgcataaataaacacagagtacctgaaacaacggaggtgatcattctgcctaccgagtgttggccaggccaagcttggagtgttgctcttattcttagggagtttatttttaagt

SEQ ID NO: 4327 - DNA, 122 bp, Homo sapiens
  misc_feature (61)..(62): /note="This region represents a CpG dinucleotide"
  misc_feature (61)..(61): /note="Nucleotide may be methylated to form 5-methylcytosine"
ctgccccgccccccagcagtggagatccagcatgcaagagctgcagtggccctcaggggtcgtcgactccatccagctcccaacataacaggagaggggagggcaggccacagctccccaca

SEQ ID NO: 4328 - DNA, 122 bp, Homo sapiens
  misc_feature (61)..(62): /note="This region represents a CpG dinucleotide"
  misc_feature (61)..(61): /note="Nucleotide may be methylated to form 5-methylcytosine"
taagaaccagtatgttacagataatggcagtagctcacagtcacggggcatctcactacacgacaggctgcctcctgagaagctgatggatgttaacttgtgtaattttcacccatcctagt

SEQ ID NO: 4329 - DNA, 122 bp, Homo sapiens
  misc_feature (61)..(62): /note="This region represents a CpG dinucleotide"
  misc_feature (61)..(61): /note="Nucleotide may be methylated to form 5-methylcytosine"
tgaagataattggattctaattgttcctcatctactaataagttgtataacctcaggcaacgtacttaactttgctgtaaataacaagtcagactagatgacctccaaagtcatgccatgct

SEQ ID NO: 4330 - DNA, 122 bp, Homo sapiens
  misc_feature (61)..(62): /note="This region represents a CpG dinucleotide"
  misc_feature (61)..(61): /note="Nucleotide may be methylated to form 5-methylcytosine"
ggggctcaccggcccggggcgggcggggcgggcgccgctgacccctcgctggcttcagggcggccccgctccctctgctggccatggcccccccgcccgcgtgccggtccccgatgtcaccg

SEQ ID NO: 4331 - DNA, 122 bp, Homo sapiens
  misc_feature (61)..(62): /note="This region represents a CpG dinucleotide"
  misc_feature (61)..(61): /note="Nucleotide may be methylated to form 5-methylcytosine"
aaattgggttcagtaactactttcaccatatatgaaaggcagattttgtacagattaagacgacgtgtccttagcagttcgagtctgaccctagagtcaatattgttagatgataaatacac

SEQ ID NO: 4332 - DNA, 122 bp, Homo sapiens
  misc_feature (61)..(62): /note="This region represents a CpG dinucleotide"
  misc_feature (61)..(61): /note="Nucleotide may be methylated to form 5-methylcytosine"
acaccagtgctgtttcctcaccacagaggttcctgaggtcacagtgttttccaagtctcccgtgacactgggtcagcccaacaccctcatttgtcttgtggacaacatctttcctcctgtgg

SEQ ID NO: 4333 - DNA, 122 bp, Homo sapiens
  misc_feature (61)..(62): /note="This region represents a CpG dinucleotide"
  misc_feature (61)..(61): /note="Nucleotide may be methylated to form 5-methylcytosine"
atcctccaaactagactctctttcttcctacatacaaattggccggttcttttgtaagctcgttattgtcttattagcaccctgacaaatgcagtcaacaataaccaaaatcaacttcaaat

SEQ ID NO: 4334 - DNA, 122 bp, Homo sapiens
  misc_feature (61)..(62): /note="This region represents a CpG dinucleotide"
  misc_feature (61)..(61): /note="Nucleotide may be methylated to form 5-methylcytosine"
ccctgtcactaagcaacacagaagtgtactctttttcccccttaaagtaatatcatgacacgatggttactgaattagtctgctcaggctatagtaacaaaatgccatggactggatgactc

SEQ ID NO: 4335 - DNA, 122 bp, Homo sapiens
  misc_feature (61)..(62): /note="This region represents a CpG dinucleotide"
  misc_feature (61)..(61): /note="Nucleotide may be methylated to form 5-methylcytosine"
tttctttttcaattaaagctggtgctgctggagttgctggtctttgatgctgagggattacgtttctgatagttaccgaaaggataataacaaaacttttattgtgctctaatttagacatt

SEQ ID NO: 4336 - DNA, 122 bp, Homo sapiens
  misc_feature (61)..(62): /note="This region represents a CpG dinucleotide"
  misc_feature (61)..(61): /note="Nucleotide may be methylated to form 5-methylcytosine"
gagtgctgaggtagttagttgacaccaccagttcattcagttcactaccttttcaatgttcgttagttctttcctgttctcacttcccttctggacatttaactaccagtgtctttgagcac

SEQ ID NO: 4337 - DNA, 122 bp, Homo sapiens
  misc_feature (61)..(62): /note="This region represents a CpG dinucleotide"
  misc_feature (61)..(61): /note="Nucleotide may be methylated to form 5-methylcytosine"
tgagaatgaggaactgtccctgttttgttttcttttacccagtcaagtgtgtctcagctacgagtttgagcatatctgcttacagggaagcttgttgagtgtgtcagatatttttgggcctc

SEQ ID NO: 4338 - DNA, 122 bp, Homo sapiens
  misc_feature (61)..(62): /note="This region represents a CpG dinucleotide"
  misc_feature (61)..(61): /note="Nucleotide may be methylated to form 5-methylcytosine"
gtcttaaaggtcacccagtgtccttgcctatctgggcctgtctctgttcaagtggcaaggcggaccatcccctttatcactgacttgcagcttgcctgggttttgtaaaaagcttgtcattg

SEQ ID NO: 4339 - DNA, 122 bp, Homo sapiens
  misc_feature (61)..(62): /note="This region represents a CpG dinucleotide"
  misc_feature (61)..(61): /note="Nucleotide may be methylated to form 5-methylcytosine"
gttccctctgcctcccctcccaaaagaacgcgtctgcggggacagatggccctgtgtcagcgtccctgtgtgatattgatgtgaacagcgagggaaggcgacgtgtctcatggctgtaaaaa

SEQ ID NO: 4340 - DNA, 122 bp, Homo sapiens
  misc_feature (61)..(62): /note="This region represents a CpG dinucleotide"
  misc_feature (61)..(61): /note="Nucleotide may be methylated to form 5-methylcytosine"
agctcctcatacgcccctctgagataattaagtattattatccctattggcaggtggagacggtaagacagagtgtttaagtgacttagttgtaactgctgggattgtttgcgggagaaacc

SEQ ID NO: 4341 - DNA, 122 bp, Homo sapiens
  misc_feature (61)..(62): /note="This region represents a CpG dinucleotide"
  misc_feature (61)..(61): /note="Nucleotide may be methylated to form 5-methylcytosine"
gggattacaggcgtgagtcacggcacccagcctgtattttcatcatatcattaacaatatcgtattaacaatagttcaagggtgtcagtcttgaagaatgtgctcaaggaagcacattcctt

SEQ ID NO: 4342 - DNA, 122 bp, Homo sapiens
  misc_feature (61)..(62): /note="This region represents a CpG dinucleotide"
  misc_feature (61)..(61): /note="Nucleotide may be methylated to form 5-methylcytosine"
ccaactgtgagctcctaatgtccagcaagtgacctggctcagtacatattgatgaataaacgaatgaacacatagaaggtgggaacggtgaatgattaaaatcattagctgtggcccaagag

SEQ ID NO: 4343 - DNA, 122 bp, Homo sapiens
  misc_feature (61)..(62): /note="This region represents a CpG dinucleotide"
  misc_feature (61)..(61): /note="Nucleotide may be methylated to form 5-methylcytosine"
gagtgatttacccttcttgttgcccctgaaccttgctggagaaactggttctttctatttcgtggagggaatggctcttttcttgaagattcacttcccttctcctggcctcagtctcatca

SEQ ID NO: 4344 - DNA, 122 bp, Homo sapiens
  misc_feature (61)..(62): /note="This region represents a CpG dinucleotide"
  misc_feature (61)..(61): /note="Nucleotide may be methylated to form 5-methylcytosine"
gcagttttaggtgagcctctgggaatctcatgaaactgagcttccagtgtggctcatagtcgtttgtaatctatacaaatctatagtatctttcattgagtatcattaaagaatgaggtatt

SEQ ID NO: 4345 - DNA, 122 bp, Homo sapiens
  misc_feature (61)..(62): /note="This region represents a CpG dinucleotide"
  misc_feature (61)..(61): /note="Nucleotide may be methylated to form 5-methylcytosine"
ttcacaacagcctgatgaggtcagtactctcattatgtcgatttctcagaagaggaactgcggctgggagaacgtgactcatctagctgatggagctgaggttcaagtgcaggtatctggcc

SEQ ID NO: 4346 - DNA, 122 bp, Homo sapiens
  misc_feature (61)..(62): /note="This region represents a CpG dinucleotide"
  misc_feature (61)..(61): /note="Nucleotide may be methylated to form 5-methylcytosine"
tagcaaattctaagttggggataggtgaggcttcttgggtagacaccctgtctgtgttcccggccaagacttgatgattctgatagatgtactggaaatgctggagaaagactcaggcaaga

SEQ ID NO: 4347 - DNA, 122 bp, Homo sapiens
  misc_feature (61)..(62): /note="This region represents a CpG dinucleotide"
  misc_feature (61)..(61): /note="Nucleotide may be methylated to form 5-methylcytosine"
ctttgtggtttgctgtctcatagcatgggggtagtggttcagggctccaagtgcgagtgtcggagtgaaaaggtgatgtcaccttttataactgagccttgggatcacactgtctcatttcc

SEQ ID NO: 4348 - DNA, 122 bp, Homo sapiens
  misc_feature (61)..(62): /note="This region represents a CpG dinucleotide"
  misc_feature (61)..(61): /note="Nucleotide may be methylated to form 5-methylcytosine"
gcatcccaggttcaagtgatcctcccatatcaactttcctagtagttgggtccacaggtgcgcgccaccacgcccagccaatttttgtgtttttctttttggttggttggctgttttgtaca

SEQ ID NO: 4349 - DNA, 122 bp, Homo sapiens
  misc_feature (61)..(62): /note="This region represents a CpG dinucleotide"
  misc_feature (61)..(61): /note="Nucleotide may be methylated to form 5-methylcytosine"
cccatgggcttgggaatggctgggggcaaggtgctcttgcctcttcctctagggaacaaccggtgggacctgaacctcggaaagcgggcgtccaggcttgagggtgcgaggaccacccagta

SEQ ID NO: 4350 - DNA, 122 bp, Homo sapiens
  misc_feature (61)..(62): /note="This region represents a CpG dinucleotide"
  misc_feature (61)..(61): /note="Nucleotide may be methylated to form 5-methylcytosine"
gccgcggttaccacggcgacgcgcgcgcacgcgcacacacgccctcagggatgtggggcgcggcagccgcccctgcccagctcccctgctcagctcccctgctcagctccccggttgcgctc

SEQ ID NO: 4351 - DNA, 122 bp, Homo sapiens
  misc_feature (61)..(62): /note="This region represents a CpG dinucleotide"
  misc_feature (61)..(61): /note="Nucleotide may be methylated to form 5-methylcytosine"
ggctgtcaccctttcttcactcagcccagcaactgatcacatcttctgtcactcagggcacgagaaggtggggttttaaaagttatccaatcagcgacgctgggttgggaaccgtccaatca

SEQ ID NO: 4352 - DNA, 122 bp, Homo sapiens
  misc_feature (61)..(62): /note="This region represents a CpG dinucleotide"
  misc_feature (61)..(61): /note="Nucleotide may be methylated to form 5-methylcytosine"
tttgcctggttagtaattacttccttttgaaaactctgatgtcatctgtcagaaaacctccgtggtccttcctctgagcccaggcccctggccctcagctctgggcatgtctctacttttta

SEQ ID NO: 4353 - DNA, 122 bp, Homo sapiens
  misc_feature (61)..(62): /note="This region represents a CpG dinucleotide"
  misc_feature (61)..(61): /note="Nucleotide may be methylated to form 5-methylcytosine"
atttaaagactgatttctggtaaccgcctttagcagattattaattataacaataacaatcgtaactcttatttgctgagccctcactgtgtcaggtagtcattattcagacaaatgttaaa

SEQ ID NO: 4354 - DNA, 122 bp, Homo sapiens
  misc_feature (61)..(62): /note="This region represents a CpG dinucleotide"
  misc_feature (61)..(61): /note="Nucleotide may be methylated to form 5-methylcytosine"
ggagctgctggggctcccctagggggtgggcggcgggcgggtcagcagagcgcattggaacgccagcctagacctctggcctggccccgcctcccctaactcaccaggccgcagcgtgaccc

SEQ ID NO: 4355 - DNA, 122 bp, Homo sapiens
  misc_feature (61)..(62): /note="This region represents a CpG dinucleotide"
  misc_feature (61)..(61): /note="Nucleotide may be methylated to form 5-methylcytosine"
cccacctggctttgccatcggcttcttgttttccgaggattctgctggtaaccttgttgccgagctcctcagcgcccccaccacctggtccagccctaattttaccagctctttactgacac

SEQ ID NO: 4356 - DNA, 122 bp, Homo sapiens
  misc_feature (61)..(62): /note="This region represents a CpG dinucleotide"
  misc_feature (61)..(61): /note="Nucleotide may be methylated to form 5-methylcytosine"
aataccggagacacagggacaaacgcaatggtggctgcccagggaactggatggggggggcggtatgccacaggataccttgatgccagcctcactcaagggcccaggcctgggggcccatc

SEQ ID NO: 4357 - DNA, 122 bp, Homo sapiens
  misc_feature (61)..(62): /note="This region represents a CpG dinucleotide"
  misc_feature (61)..(61): /note="Nucleotide may be methylated to form 5-methylcytosine"
gacaaagtacaagctaattaacctctaagagcctctgattctcttctttctctggaacagcgataagcctgtcaaccttgcaaaagtactgtgaccattcaatgtgaagcactcataagtgc

SEQ ID NO: 4358 - DNA, 122 bp, Homo sapiens
  misc_feature (61)..(62): /note="This region represents a CpG dinucleotide"
  misc_feature (61)..(61): /note="Nucleotide may be methylated to form 5-methylcytosine"
acagcatgtggaataaattttgcctgatgacaggctttcagctattttgccaccactgggcgcggacgctgcgcttagcagagcctgtttgccagcggcgggctccctgagaccccggcaac

SEQ ID NO: 4359 - DNA, 122 bp, Homo sapiens
  misc_feature (61)..(62): /note="This region represents a CpG dinucleotide"
  misc_feature (61)..(61): /note="Nucleotide may be methylated to form 5-methylcytosine"
agtgagatggtatctcactgtggttaggattcacatttccctgatgactagtaatgtttccgtgtaatttcttgaatgatcattcagtaacaataagtgtaggttgagtttgtagaatcagg

SEQ ID NO: 4360 - DNA, 122 bp, Homo sapiens
  misc_feature (61)..(62): /note="This region represents a CpG dinucleotide"
  misc_feature (61)..(61): /note="Nucleotide may be methylated to form 5-methylcytosine"
ctgccccgagctttcagagaacacaccccgttctggcaagtgtggtgcatcaggaatgtgcgtaggggttgctgctgacttctgctgcctttcagcctgcttgaatacaggaataagtacaa

SEQ ID NO: 4361 - DNA, 122 bp, Homo sapiens
  misc_feature (61)..(62): /note="This region represents a CpG dinucleotide"
  misc_feature (61)..(61): /note="Nucleotide may be methylated to form 5-methylcytosine"
gtgctaatgattaacgccccgtccgtgctggccggtttctcaaatgcctcctgacgattgcgcacagccggacatcatttgtactgagagacaaaaggaaatcactgaggctttctgaggtg

SEQ ID NO: 4362 - DNA, 122 bp, Homo sapiens
  misc_feature (61)..(62): /note="This region represents a CpG dinucleotide"
  misc_feature (61)..(61): /note="Nucleotide may be methylated to form 5-methylcytosine"
tacttttatattttgtactcttagattgccacaagactgaggctcaatacttctgaattccgtgttcaggcctcagacttttctcagaggcccttacagcaactagcattcttctgacacaa

SEQ ID NO: 4363 - DNA, 122 bp, Homo sapiens
  misc_feature (61)..(62): /note="This region represents a CpG dinucleotide"
  misc_feature (61)..(61): /note="Nucleotide may be methylated to form 5-methylcytosine"
aagagttgaagcaaataatcagcttaccaaaagcttaaaaggagaagctgtggaaagatacgtccacaggatgatttgaaaagcacagacataatgctgggaaactagaagtacaagttcat

SEQ ID NO: 4364 - DNA, 122 bp, Homo sapiens
  misc_feature (61)..(62): /note="This region represents a CpG dinucleotide"
  misc_feature (61)..(61): /note="Nucleotide may be methylated to form 5-methylcytosine"
agctgaccaaggccagggccactgcgggagcaccgcgcgtccacgtgcacccagcatgcccggtcaccctttattacgtaagagtcccaggatggagttgtacctgctgccggcccctcttc

SEQ ID NO: 4365 - DNA, 122 bp, Homo sapiens
  misc_feature (61)..(62): /note="This region represents a CpG dinucleotide"
  misc_feature (61)..(61): /note="Nucleotide may be methylated to form 5-methylcytosine"
ctgtacttgtgtgactctatcactgtgaacccttggtccgacccagtgtggaaatatttgcgttaagtgtcatgcagtgtaaaaggaaatgttctacttaacagcacttgcctatgaggtat

SEQ ID NO: 4366 - DNA, 122 bp, Homo sapiens
  misc_feature (61)..(62): /note="This region represents a CpG dinucleotide"
  misc_feature (61)..(61): /note="Nucleotide may be methylated to form 5-methylcytosine"
gaaaagacttgttgccagagcagtcagaatacacaaaacattggagttagctgttttacacgggggtggttagtggcaccccaaaacaactaaaatagtaatcatagatcactggaacagat

SEQ ID NO: 4367 - DNA, 122 bp, Homo sapiens
  misc_feature (61)..(62): /note="This region represents a CpG dinucleotide"
  misc_feature (61)..(61): /note="Nucleotide may be methylated to form 5-methylcytosine"
gatggccagtcacttgtgacctactttcagagctggcagttctgacttctagaacaaactcggaacaagcccatctacagctggttgactgagtttcctttgggctcctggcaccagaaaga

SEQ ID NO: 4368 - DNA, 122 bp, Homo sapiens
  misc_feature (61)..(62): /note="This region represents a CpG dinucleotide"
  misc_feature (61)..(61): /note="Nucleotide may be methylated to form 5-methylcytosine"
tctttacatattataactatggaattacatgtaaaagacaggtagaaaagacaagactggcgatcaggaagctctgattctttctgtggccttgagcaagtctctgaacctgtacaggccat

SEQ ID NO: 4369 - DNA, 122 bp, Homo sapiens
  misc_feature (61)..(62): /note="This region represents a CpG dinucleotide"
  misc_feature (61)..(61): /note="Nucleotide may be methylated to form 5-methylcytosine"
tgctggtaccatcctccagctcaaatatttgacttggaacaactgaatgttgtttagacacgctaaagattgtaaagaaaagacatacaaaagtactttgttagataaaaagcagcaagtag

SEQ ID NO: 4370 - DNA, 122 bp, Homo sapiens
  misc_feature (61)..(62): /note="This region represents a CpG dinucleotide"
  misc_feature (61)..(61): /note="Nucleotide may be methylated to form 5-methylcytosine"
gaacactcaatctaaaaagcaggtaaaaatcatgtttttaaagcaatggattattctagccgtaatgtatgtgaatttgctagcctgccttatcatgtgtaaaaaatcactgttcatggtga

SEQ ID NO: 4371 - DNA, 122 bp, Homo sapiens
  misc_feature (61)..(62): /note="This region represents a CpG dinucleotide"
  misc_feature (61)..(61): /note="Nucleotide may be methylated to form 5-methylcytosine"
ttcgagatgcccaaagtcacatagctaatcagacaagtcagacttcataccaaggtcttacgattcttcatgactaagcaactgtaacactgtctcttcactgtctcttagagaaatcaaag

SEQ ID NO: 4372 - DNA, 122 bp, Homo sapiens
  misc_feature (61)..(62): /note="This region represents a CpG dinucleotide"
  misc_feature (61)..(61): /note="Nucleotide may be methylated to form 5-methylcytosine"
ggaccagctaaagttttgtttgtcgcgctgctcatattgatgaccttgaggttgccacaccggctgctgcgggctgcagagggaacaaagcccagcgccctcggggacaggggtgagccgag

SEQ ID NO: 4373 - DNA, 122 bp, Homo sapiens
  misc_feature (61)..(62): /note="This region represents a CpG dinucleotide"
  misc_feature (61)..(61): /note="Nucleotide may be methylated to form 5-methylcytosine"
gcggtttccacttccgcccctctcaaagaccctcttcatggttctggtgaacggacagagcggctggagcccgtgtggccacctggcgtggacctctcttggccgccgtccccggccccccg

SEQ ID NO: 4374 - DNA, 122 bp, Homo sapiens
  misc_feature (61)..(62): /note="This region represents a CpG dinucleotide"
  misc_feature (61)..(61): /note="Nucleotide may be methylated to form 5-methylcytosine"
cgggggctgcagggaaccctgtgcagcaggaagccccgctggcctgggagcacatgaaggcggcttcagccgggcgtccggccgggctccaggtcgggtgcagaggcggaagctgtgctctt

SEQ ID NO: 4375 - DNA, 122 bp, Homo sapiens
  misc_feature (61)..(62): /note="This region represents a CpG dinucleotide"
  misc_feature (61)..(61): /note="Nucleotide may be methylated to form 5-methylcytosine"
tattgggaaatgtagtcttgagggggcactgcatgacgtgtggttttcatcttccgcaggcgtggcggtgtttactggcgccttgatctatgccattcacgccgaggagatcctggagaagc

SEQ ID NO: 4376 - DNA, 122 bp, Homo sapiens
  misc_feature (61)..(62): /note="This region represents a CpG dinucleotide"
  misc_feature (61)..(61): /note="Nucleotide may be methylated to form 5-methylcytosine"
gcccgcctgcatcgccctcctcctctcccagggccaccgtgcccggcagaacccagctcccggaccggtgcgggttctcaccaccaaagacggagcagacggccaccccagcctccactcca

SEQ ID NO: 4377 - DNA, 122 bp, Homo sapiens
  misc_feature (61)..(62): /note="This region represents a CpG dinucleotide"
  misc_feature (61)..(61): /note="Nucleotide may be methylated to form 5-methylcytosine"
actccactcggaaggagggaagggggtgccagagaatagaacttcttggccctaataggacgggagaagccaaggaaaagagcaaattttattgagtaatctgtgataggattatgccagac

SEQ ID NO: 4378 - DNA, 122 bp, Homo sapiens
  misc_feature (61)..(62): /note="This region represents a CpG dinucleotide"
  misc_feature (61)..(61): /note="Nucleotide may be methylated to form 5-methylcytosine"
agacgttttgactgtctttacttctagctgtatggtgctttgtctgttttcagataagctcgtaattatagtctcctcttaagaaaggatctgttatcagtcatttatactttagtaacaat

SEQ ID NO: 4379 - DNA, 122 bp, Homo sapiens
  misc_feature (61)..(62): /note="This region represents a CpG dinucleotide"
  misc_feature (61)..(61): /note="Nucleotide may be methylated to form 5-methylcytosine"
ccaagctcagccatgagcaccacccctgattgtaacccacacatttgcatcaagactaaacgtggcccaccatttctttttgtttactgactctttggcctgactgcttcttccttatagcc

SEQ ID NO: 4380 - DNA, 122 bp, Homo sapiens
  misc_feature (61)..(62): /note="This region represents a CpG dinucleotide"
  misc_feature (61)..(61): /note="Nucleotide may be methylated to form 5-methylcytosine"
ctggggagagattgcccctgctggcataaggagaggctggtcaattctcagagacagcaacgggcccagccaggagtatgcctgtgacatgcaaactaaccaatccagagtcacaactcctc

SEQ ID NO: 4381 - DNA, 122 bp, Homo sapiens
  misc_feature (61)..(62): /note="This region represents a CpG dinucleotide"
  misc_feature (61)..(61): /note="Nucleotide may be methylated to form 5-methylcytosine"
acgtaactgaggacgcccccaacccatggccacggcccctcgggccgtcacacagggctgcggctcatggggccctgctagagcaggcgtctgtcctcagtcagtgcgaccgacttgaaacc

SEQ ID NO: 4382 - DNA, 122 bp, Homo sapiens
  misc_feature (61)..(62): /note="This region represents a CpG dinucleotide"
  misc_feature (61)..(61): /note="Nucleotide may be methylated to form 5-methylcytosine"
tagtttagaaacactaaacatttaattcaccgcaccgggggccagacaggtaatggagaacgccttaagtatgttaggaagggaagttatctacagtcgcagccgctattcagatctatttc

SEQ ID NO: 4383 - DNA, 122 bp, Homo sapiens
  misc_feature (61)..(62): /note="This region represents a CpG dinucleotide"
  misc_feature (61)..(61): /note="Nucleotide may be methylated to form 5-methylcytosine"
cgggctgcagaggtctcctaagcccaccctggacccccgagagctccctggccggagcagcgcagtgccacaacctcactcactccctgacaacccaggccaggggccctgcaacaaataca

SEQ ID NO: 4384 - DNA, 122 bp, Homo sapiens
  misc_feature (61)..(62): /note="This region represents a CpG dinucleotide"
  misc_feature (61)..(61): /note="Nucleotide may be methylated to form 5-methylcytosine"
gcacagaagtcaggaaaagtaaagggaaattcaaagaagctagtgtaattcaggtctagacgctgcttcatgctaatgagatctgtcagctgatcactacatgttatctacaaaatggcagc

SEQ ID NO: 4385 - DNA, 122 bp, Homo sapiens
  misc_feature (61)..(62): /note="This region represents a CpG dinucleotide"
  misc_feature (61)..(61): /note="Nucleotide may be methylated to form 5-methylcytosine"
cccagttaaccagtaacagcaggttggcaggtttagggttaaggtaggggaaaatacagacggtttaaaaccagtgtggcatatgcagatgttgggctcttttatcaaccttatcctgcccc

SEQ ID NO: 4386 - DNA, 122 bp, Homo sapiens
  misc_feature (61)..(62): /note="This region represents a CpG dinucleotide"
  misc_feature (61)..(61): /note="Nucleotide may be methylated to form 5-methylcytosine"
tcaaagggaatgtttggaggcactgtcctagttcacccgcagcatttcagatggcattagcgtcactaggaaaacagacttgaaaccaggttcaagaagaataataatttgcattttgcttt

SEQ ID NO: 4387 - DNA, 122 bp, Homo sapiens
  misc_feature (61)..(62): /note="This region represents a CpG dinucleotide"
  misc_feature (61)..(61): /note="Nucleotide may be methylated to form 5-methylcytosine"
tcgttttcccagcggaattttaactattctaaggatgtccttacagccagttccccactccgctactcagagtgtgtcagactttaccctgtccattcaactccagaaaaaccgggaggtct

SEQ ID NO: 4388 - DNA, 122 bp, Homo sapiens
  misc_feature (61)..(62): /note="This region represents a CpG dinucleotide"
  misc_feature (61)..(61): /note="Nucleotide may be methylated to form 5-methylcytosine"
tctaaatcaaggtcagcaagctttttatatacaagatcaaatagtaaatagttaaaacttcgtggacccagaggcaaaatggagcaactgatattgctaaaagattaataacctttttttac

SEQ ID NO: 4389 - DNA, 122 bp, Homo sapiens
  misc_feature (61)..(62): /note="This region represents a CpG dinucleotide"
  misc_feature (61)..(61): /note="Nucleotide may be methylated to form 5-methylcytosine"
ttgcaaaacctctctaagctcatttcttcatccacaaaatggtaaaactaatcttttctgcgtagggttgttgtaagaattacatgagaggtgtgaaaacagtctagaacagtggcagtgtg

SEQ ID NO: 4390 - DNA, 122 bp, Homo sapiens
  misc_feature (61)..(62): /note="This region represents a CpG dinucleotide"
  misc_feature (61)..(61): /note="Nucleotide may be methylated to form 5-methylcytosine"
atatttgaagataacaggccagttattttttggacgatctctcaatttgagtttgtctgacgtttcttcatgagtagatgcaactttggcagaaacacaacaggaataattctttgttctca

SEQ ID NO: 4391 - DNA, 122 bp, Homo sapiens
  misc_feature (61)..(62): /note="This region represents a CpG dinucleotide"
  misc_feature (61)..(61): /note="Nucleotide may be methylated to form 5-methylcytosine"
aagtcagaagtaagtctaatagactctttgttaagttatttttttgttctcagaaaatcacgtttatttaagtatcagttatctaaaatgggtcaaatagtaaacattacattggaaccata

SEQ ID NO: 4392 - DNA, 122 bp, Homo sapiens
  misc_feature (61)..(62): /note="This region represents a CpG dinucleotide"
  misc_feature (61)..(61): /note="Nucleotide may be methylated to form 5-methylcytosine"
aaactctacaattagctaacactctgttgttgtatattactcttgtctctctccctcactcgcacacatacatgcacacacatggtaaacttctccaggccaaagcttaggtcttttatcat

SEQ ID NO: 4393 - DNA, 122 bp, Homo sapiens
  misc_feature (61)..(62): /note="This region represents a CpG dinucleotide"
  misc_feature (61)..(61): /note="Nucleotide may be methylated to form 5-methylcytosine"
tgccattgtctttctcactagctcccagtgcagcacaggaacctaacaatagtgttttcacgccgtgagccctgctaactggcaaagccggctcgttgtctctggtttaaaggaagagtggg

SEQ ID NO: 4394 - DNA, 122 bp, Homo sapiens
  misc_feature (61)..(62): /note="This region represents a CpG dinucleotide"
  misc_feature (61)..(61): /note="Nucleotide may be methylated to form 5-methylcytosine"
ttgccctttcaacccactgaacacataaacatgctttctccttaactgaacttatggccacgatgaacttgaactctgagattcacagaggagagtttgttttaacagctgcttttacaatg

SEQ ID NO: 4395 - DNA, 122 bp, Homo sapiens
  misc_feature (61)..(62): /note="This region represents a CpG dinucleotide"
  misc_feature (61)..(61): /note="Nucleotide may be methylated to form 5-methylcytosine"
gtgacgtatctatataacccatagacacttcctggcaataccttgtgaaacttgccttttcgtgtatagtagtttcctaacttcttgttctagattaagcttcagtgaaaagtgattaatat

SEQ ID NO: 4396 - DNA, 122 bp, Homo sapiens
  misc_feature (61)..(62): /note="This region represents a CpG dinucleotide"
  misc_feature (61)..(61): /note="Nucleotide may be methylated to form 5-methylcytosine"
gcacaggtcccaggctgggcagagtgggaccctgtggctcaggaggcaggatgggcttgccggagaccccaccccctccccggggctggagctgaagcacagttgggctttgtgcagagtca

SEQ ID NO: 4397 - DNA, 122 bp, Homo sapiens
  misc_feature (61)..(62): /note="This region represents a CpG dinucleotide"
  misc_feature (61)..(61): /note="Nucleotide may be methylated to form 5-methylcytosine"
cctgtcatggtaatctggtagaccatttctatcacgaacaactctcatggctgaggcccccggttgtgtgtgttgtgtgcgtgtgtatttggagaaagaccattcactgaaaggaacggggc

SEQ ID NO: 4398 - DNA, 122 bp, Homo sapiens
  misc_feature (61)..(62): /note="This region represents a CpG dinucleotide"
  misc_feature (61)..(61): /note="Nucleotide may be methylated to form 5-methylcytosine"
cacgtccaagtccgcatctccagatgcagacgcggggttgggcacaggctgcagtgagcgcgcgggccaccagggggacacgcctgcgccttggcccgagctcgcggcagctgcggtcagcc

SEQ ID NO: 4399 - DNA, 122 bp, Homo sapiens
  misc_feature (61)..(62): /note="This region represents a CpG dinucleotide"
  misc_feature (61)..(61): /note="Nucleotide may be methylated to form 5-methylcytosine"
ttttgttttgtttgtcctaccagagctccaaataaaaacacagatatatggtttgacatacggaatgggatagctaaaactgtgactgcctaagacaagctgaaacctaaggtgccgaacca

SEQ ID NO: 4400 - DNA, 122 bp, Homo sapiens
  misc_feature (61)..(62): /note="This region represents a CpG dinucleotide"
  misc_feature (61)..(61): /note="Nucleotide may be methylated to form 5-methylcytosine"
acttcagttcctgaaacatagtacaggataagtgtacaagaattgatttaagtcagttcacgaactgacttaagaaagctggcagaagagtcaggactaaaatcgagtctttaagttatggg

SEQ ID NO: 4401 - DNA, 122 bp, Homo sapiens
  misc_feature (61)..(62): /note="This region represents a CpG dinucleotide"
  misc_feature (61)..(61): /note="Nucleotide may be methylated to form 5-methylcytosine"
ttggtcatccccatgccaagttcacatcccatctggtggcatggagcctggtttgctgatcggcaagttcacagcatgagcctgtgctccccagagagaaatacaaaaccataattgtcccc

SEQ ID NO: 4402 - DNA, 122 bp, Homo sapiens
  misc_feature (61)..(62): /note="This region represents a CpG dinucleotide"
  misc_feature (61)..(61): /note="Nucleotide may be methylated to form 5-methylcytosine"
aaacaaaagggaatgtctgcctcaagaaatgatcacatcaggaccgggcatggtggctcacgcctgtaatcccagcactttgggagtccaaggtgggcagatcacgaggtcaggagttcaag

SEQ ID NO: 4403 - DNA, 122 bp, Homo sapiens
  misc_feature (61)..(62): /note="This region represents a CpG dinucleotide"
  misc_feature (61)..(61): /note="Nucleotide may be methylated to form 5-methylcytosine"
ttcctattctagcagcagcaacaggctcctatttagtgactctgtatcataatgaatccacgttacatcaagtttactgtctttctgtgtctttgtataattttaaatagatctccctgctt

SEQ ID NO: 4404 - DNA, 122 bp, Homo sapiens
  misc_feature (61)..(62): /note="This region represents a CpG dinucleotide"
  misc_feature (61)..(61): /note="Nucleotide may be methylated to form 5-methylcytosine"
ctctgtccacctccttgaaatgcttggtttcagtgataccgagatctcatgttcttcccacgtagtgactgccatgctggagcagcctggcaatagtggtccttcaatgtcatcctcggaag

SEQ ID NO: 4405 - DNA, 122 bp, Homo sapiens
  misc_feature (61)..(62): /note="This region represents a CpG dinucleotide"
  misc_feature (61)..(61): /note="Nucleotide may be methylated to form 5-methylcytosine"
gcactgagttgatgatttcatggctattatctcacataatcctattggattgggtaagtacgatgaggaaactgaaattcaaagaagttaagcaaattgcttgagggccctcagatggtgaa

SEQ ID NO: 4406 - DNA, 122 bp, Homo sapiens
  misc_feature (61)..(62): /note="This region represents a CpG dinucleotide"
  misc_feature (61)..(61): /note="Nucleotide may be methylated to form 5-methylcytosine"
gtgaggtggagagggttgagctgggtagaagtggcctttgcaggtagtcaggggactcaccgttattctggctggcagctcatggcaagtttctctcctgggccgcagggggtcacaatgga

SEQ ID NO: 4407 - DNA, 122 bp, Homo sapiens
  misc_feature (61)..(62): /note="This region represents a CpG dinucleotide"
  misc_feature (61)..(61): /note="Nucleotide may be methylated to form 5-methylcytosine"
cacctcggggagacctcactacaaagtaagggagagtgtgtagggaggcaggaggagaaacgagaaaggccatagagaaacttagcagggaagggagagcatgatattaaacggcatggggt

SEQ ID NO: 4408 - DNA, 122 bp, Homo sapiens
  misc_feature (61)..(62): /note="This region represents a CpG dinucleotide"
  misc_feature (61)..(61): /note="Nucleotide may be methylated to form 5-methylcytosine"
aagttgcaaggcaaactcatgaagcattccgtatgttctttgagcagtggcactgtggctcgaaccaatgtccagcttccacactctctgcttggaagaggattacccttatttggaagtct

SEQ ID NO: 4409 - DNA, 122 bp, Homo sapiens
  misc_feature (61)..(62): /note="This region represents a CpG dinucleotide"
  misc_feature (61)..(61): /note="Nucleotide may be methylated to form 5-methylcytosine"
gtgttttctgagcgctctgggttttggctgtggactggaatcatggcacagggggagtcacggcacggggggagtcacggcacgggggggagtcacggcacggggggggggtcacggcacag

SEQ ID NO: 4410 - DNA, 122 bp, Homo sapiens
  misc_feature (61)..(62): /note="This region represents a CpG dinucleotide"
  misc_feature (61)..(61): /note="Nucleotide may be methylated to form 5-methylcytosine"
tgcccattaccatgatgtaatccagtttacagcagagctttgaatgagaactcagcgccccgggcactgtgggaggaacccgggctggtggagggctctggtgtctcgccgccatttatcct

SEQ ID NO: 4411 - DNA, 122 bp, Homo sapiens
  misc_feature (61)..(62): /note="This region represents a CpG dinucleotide"
  misc_feature (61)..(61): /note="Nucleotide may be methylated to form 5-methylcytosine"
ttcgcaatttatcacgcgcatatgtatgtgtatgcataaacagatataattttgtttgctcgcttatttggttcgtcgcctcactagattccggactgtgggctccaggaatgcagacagtg

SEQ ID NO: 4412 - DNA, 122 bp, Homo sapiens
  misc_feature (61)..(62): /note="This region represents a CpG dinucleotide"
  misc_feature (61)..(61): /note="Nucleotide may be methylated to form 5-methylcytosine"
gcagcgtcaggccaagcttggccacttacatgtctggcatgacagtggcctcagagtactcgtctgagaagaagagctatcacctgagcgctctggagaacttagccggagctttcaggcag

SEQ ID NO: 4413 - DNA, 122 bp, Homo sapiens
  misc_feature (61)..(62): /note="This region represents a CpG dinucleotide"
  misc_feature (61)..(61): /note="Nucleotide may be methylated to form 5-methylcytosine"
ggggaatttcttcttccaaccattgttagtccagttcccagctaagaatctcctcttctccgagtggctgacctcagggattagcactcccttgaccagagatgatgtctacccacaggggt

SEQ ID NO: 4414 - DNA, 122 bp, Homo sapiens
  misc_feature (61)..(62): /note="This region represents a CpG dinucleotide"
  misc_feature (61)..(61): /note="Nucleotide may be methylated to form 5-methylcytosine"
acattttattataatttctttatatgacatcttcccaaatagtcacttaactgtgggctccgctaggtcaggaatcctatcttattcatttgtaactcgaatgctaccccattgcctgtgca

SEQ ID NO: 4415 - DNA, 122 bp, Homo sapiens
  misc_feature (61)..(62): /note="This region represents a CpG dinucleotide"
  misc_feature (61)..(61): /note="Nucleotide may be methylated to form 5-methylcytosine"
gacacccaagtgctagggatacagccttaaataaaacagacaaagtcactgtcctcctgacgtttacaaatagggcggggagacagaagaaaacacacaaccacactgccatgtaaatatac

SEQ ID NO: 4416 - DNA, 122 bp, Homo sapiens
  misc_feature (61)..(62): /note="This region represents a CpG dinucleotide"
  misc_feature (61)..(61): /note="Nucleotide may be methylated to form 5-methylcytosine"
ggagatgggtctgacagtggtggccatgctgcaggcagaggaccagggtgactctccccacgcctaccctctgcagagtatgcatttcagactagaaggaggatgaggacacctttttcgcc

SEQ ID NO: 4417 - DNA, 122 bp, Homo sapiens
  misc_feature (61)..(62): /note="This region represents a CpG dinucleotide"
  misc_feature (61)..(61): /note="Nucleotide may be methylated to form 5-methylcytosine"
ccttgatttccagcacaaaacttcagtctctgcctcttgtttacatggccatcttctctgcgtgtctgtgtcttcagacagtgtcctctctgtgtgttattttctcttctaagggcagctgt

SEQ ID NO: 4418 - DNA, 122 bp, Homo sapiens
  misc_feature (61)..(62): /note="This region represents a CpG dinucleotide"
  misc_feature (61)..(61): /note="Nucleotide may be methylated to form 5-methylcytosine"
aatattgaattaaggcaagatattacttttaccttctctttctcattagtggactgaatacgttttgtggatacttggtttatggcagttactaggacccaacttagaaaagaaagtcacca

SEQ ID NO: 4419 - DNA, 122 bp, Homo sapiens
  misc_feature (61)..(62): /note="This region represents a CpG dinucleotide"
  misc_feature (61)..(61): /note="Nucleotide may be methylated to form 5-methylcytosine"
aatgatgcgaacacatggacacctggcggggaataacatacactgcaacatgtcagagggcgtgtgtgggaagggacagcatccagaagaatagctaagggatgctgggcttaatacctaga

SEQ ID NO: 4420 - DNA, 122 bp, Homo sapiens
  misc_feature (61)..(62): /note="This region represents a CpG dinucleotide"
  misc_feature (61)..(61): /note="Nucleotide may be methylated to form 5-methylcytosine"
cgccccactgatcaaaatgtctcctttatgatttttggttaagttgaacatttccataatcgtcattattagtgcaaattacacgcctaatcggtccttaaatagattttaattaaataagc

SEQ ID NO: 4421 - DNA, 122 bp, Homo sapiens
  misc_feature (61)..(62): /note="This region represents a CpG dinucleotide"
  misc_feature (61)..(61): /note="Nucleotide may be methylated to form 5-methylcytosine"
ctcaggattgtgttaatacctggaacatgcacaaagatacatacatacctggacagattccgtgttaagcttctatcactttttcttcctcatctaatagcagaaagtgctgattatgtcat

SEQ ID NO: 4422 - DNA, 122 bp, Homo sapiens
  misc_feature (61)..(62): /note="This region represents a CpG dinucleotide"
  misc_feature (61)..(61): /note="Nucleotide may be methylated to form 5-methylcytosine"
tgggatccaggttttctgagcctcgtgttcctttctaagcaggcttctggggcttgttatcgtttttgttgaaggaattggcaggagagagcttgggtccacagtatattcatctgtaaaat

SEQ ID NO: 4423 - DNA, 122 bp, Homo sapiens
  misc_feature (61)..(62): /note="This region represents a CpG dinucleotide"
  misc_feature (61)..(61): /note="Nucleotide may be methylated to form 5-methylcytosine"
cctgaaaaagcacattgtgtgactttaactaggtcgcttgcttttccaggcctctatcatcgcacatctgcagcatactagggttttactggatgatcttcgaagtccttttaattctaaaa

SEQ ID NO: 4424 - DNA, 122 bp, Homo sapiens
  misc_feature (61)..(62): /note="This region represents a CpG dinucleotide"
  misc_feature (61)..(61): /note="Nucleotide may be methylated to form 5-methylcytosine"
gctggggaggaagctcatggtgggcataagagacattcagaagtgttaaatagaatggtacgtttaggaaacttcaggtcgtcaggctttactagagaatatgattctgaagaagacatgaa

SEQ ID NO: 4425 - DNA, 122 bp, Homo sapiens
  misc_feature (61)..(62): /note="This region represents a CpG dinucleotide"
  misc_feature (61)..(61): /note="Nucleotide may be methylated to form 5-methylcytosine"
tactcggtttctggttcattgtaatttcatgtacattcacttgagtattactttagcatacgtgtgagcttggctagtgtgatactgtaggcaaatattgtaattctcaaggggaagtttca

SEQ ID NO: 4426 - DNA, 122 bp, Homo sapiens
  misc_feature (61)..(62): /note="This region represents a CpG dinucleotide"
  misc_feature (61)..(61): /note="Nucleotide may be methylated to form 5-methylcytosine"
gaactcctgacctcaagtgatccaccagcctcggcctccccaaagtgctgggattacaggcgtgagccgccacgctgagcctcctgaagatttaaggaaaaaaaaaatcgttctagaaatac

SEQ ID NO: 4427 - DNA, 122 bp, Homo sapiens
  misc_feature (61)..(62): /note="This region represents a CpG dinucleotide"
  misc_feature (61)..(61): /note="Nucleotide may be methylated to form 5-methylcytosine"
ccatcagactcacacccctgagctaacctgcacccaggccttcctggcagtacagactcacgctcaggacagtgtttcatgcctgtctttctaaggagtttctgtaggatttcaacatgtga

SEQ ID NO: 4428 - DNA, 122 bp, Homo sapiens
  misc_feature (61)..(62): /note="This region represents a CpG dinucleotide"
  misc_feature (61)..(61): /note="Nucleotide may be methylated to form 5-methylcytosine"
gagctgggcttggtgtttatgtctgatccagacaactgggggtttatgacgatttactgacgcaagagctccccgaagcagcatgccagaaattaatcaagggaggaggaattctttttaag

SEQ ID NO: 4429 - DNA, 122 bp, Homo sapiens
  misc_feature (61)..(62): /note="This region represents a CpG dinucleotide"
  misc_feature (61)..(61): /note="Nucleotide may be methylated to form 5-methylcytosine"
tcaccccatcatgcgtcctgagcgtaagagcgatgtgtaaacctgccttgaattgtgtcccgctcttcgcaggggggccgtctgaaggagcctctccagaagctcaaggaagccattggcag

SEQ ID NO: 4430 - DNA, 122 bp, Homo sapiens
  misc_feature (61)..(62): /note="This region represents a CpG dinucleotide"
  misc_feature (61)..(61): /note="Nucleotide may be methylated to form 5-methylcytosine"
ttactgcgtgtgctctcctgggaatgatggtcttggttatcactcagaaacactagcaaacggggaagtgaggatctttaagaaaagctgattctcacaattcctctggggaggtttgtacc

SEQ ID NO: 4431 - DNA, 122 bp, Homo sapiens
  misc_feature (61)..(62): /note="This region represents a CpG dinucleotide"
  misc_feature (61)..(61): /note="Nucleotide may be methylated to form 5-methylcytosine"
gagatagagtgatggcagtgaggagggtactacttaggtgggtggaaaaggcaactcaggcgatctcctctaaagaggagaaggagccaactctagaaagaacacggtggagagagctatag

SEQ ID NO: 4432 - DNA, 122 bp, Homo sapiens
  misc_feature (61)..(62): /note="This region represents a CpG dinucleotide"
  misc_feature (61)..(61): /note="Nucleotide may be methylated to form 5-methylcytosine"
acctgtcctgcagattcactagtacttgacagcatggtgcagtctcattcctcatgccttcgcattgtggcccgccacgctcctgagaaggacacacctccatagcatggagaggaaacaga

SEQ ID NO: 4433 - DNA, 122 bp, Homo sapiens
  misc_feature (61)..(62): /note="This region represents a CpG dinucleotide"
  misc_feature (61)..(61): /note="Nucleotide may be methylated to form 5-methylcytosine"
caaagcaacgggaactaggtttaccatctccaagacacaacccctattttgctagactggcgacaaatatcaaagtgctcagccggggccactgtcaagctaaagaacatcaaagcagacag

SEQ ID NO: 4434 - DNA, 122 bp, Homo sapiens
  misc_feature (61)..(62): /note="This region represents a CpG dinucleotide"
  misc_feature (61)..(61): /note="Nucleotide may be methylated to form 5-methylcytosine"
cccacctgagcctcacgccgccaacgcctctgcttccgccctgcgccgggcacttccgcccgcacccaccaggcgccggccccaggccccgcacttccgccccacgccggcagcactgccgc

SEQ ID NO: 4435 - DNA, 122 bp, Homo sapiens
  misc_feature (61)..(62): /note="This region represents a CpG dinucleotide"
  misc_feature (61)..(61): /note="Nucleotide may be methylated to form 5-methylcytosine"
caatctggaaagtgggactttgtatgtaaaaactagagtggagaccaaaataaaacttcacggttcatgggtattgtgacaatgtggaagtggccacatcataatgaatcactatctgccag

SEQ ID NO: 4436 - DNA, 122 bp, Homo sapiens
  misc_feature (61)..(62): /note="This region represents a CpG dinucleotide"
  misc_feature (61)..(61): /note="Nucleotide may be methylated to form 5-methylcytosine"
catccactgatatgaaacatactatggtactgagggagaactcacctgtcacacacagaacgtcagcttcatgaatgacatagtgagattgtttcttgttcacactgaggccagcttgaccc

SEQ ID NO: 4437 - DNA, 122 bp, Homo sapiens
  misc_feature (61)..(62): /note="This region represents a CpG dinucleotide"
  misc_feature (61)..(61): /note="Nucleotide may be methylated to form 5-methylcytosine"
acagagaaaagtatcaagtattcagaagtctaggaaacaccaccgagggcctctcctaagcgtctctcaggaggcaagctctatccaaacaggcggtggctgggaacagctgtcaccaggat

SEQ ID NO: 4438 - DNA, 122 bp, Homo sapiens
  misc_feature (61)..(62): /note="This region represents a CpG dinucleotide"
  misc_feature (61)..(61): /note="Nucleotide may be methylated to form 5-methylcytosine"
ccagggacccctgccctccccaaactggagcaccaggcgcgggacaaaggagggggcgcccggcatccctggcctgtctgagtaggtcgactactgcccccagcctctctctggggcggggc

SEQ ID NO: 4439 - DNA, 122 bp, Homo sapiens
  misc_feature (61)..(62): /note="This region represents a CpG dinucleotide"
  misc_feature (61)..(61): /note="Nucleotide may be methylated to form 5-methylcytosine"
tatggtcactctggctatggtcatgagaaaggaataaaggaggagagatgaaggtagtgacgtcattaggaggctgttgcaagaatctaggcaagagatggtggcagcttggactagggtgc

SEQ ID NO: 4440 - DNA, 122 bp, Homo sapiens
  misc_feature (61)..(62): /note="This region represents a CpG dinucleotide"
  misc_feature (61)..(61): /note="Nucleotide may be methylated to form 5-methylcytosine"
tgcggcttaggaaaaaccttttccttgttcattgaggaatgagactgtgttaggctgtcacgagcctcctttgccacaacaaaaactctgttccatcagtgctttcatatgctgccgtaatt

SEQ ID NO: 4441 - DNA, 122 bp, Homo sapiens
  misc_feature (61)..(62): /note="This region represents a CpG dinucleotide"
  misc_feature (61)..(61): /note="Nucleotide may be methylated to form 5-methylcytosine"
cttgctcgccctctggtggagcttcctgtaaccctaaaatgacgaaaactgggcagtcaccgttttactcgcgtcatctcccaaaatacaaataacttgctctctaatggttcaaaacactt

SEQ ID NO: 4442 - DNA, 122 bp, Homo sapiens
  misc_feature (61)..(62): /note="This region represents a CpG dinucleotide"
  misc_feature (61)..(61): /note="Nucleotide may be methylated to form 5-methylcytosine"
gtaattgccgtttacaaattcaaactttccaagaaaaccaagttggtgtctgatatgacacgttaaatgaagcaaatggctgtgaaacttatgttgagctgacagttcatacaaattcatga

SEQ ID NO: 4443 - DNA, 122 bp, Homo sapiens
  misc_feature (61)..(62): /note="This region represents a CpG dinucleotide"
  misc_feature (61)..(61): /note="Nucleotide may be methylated to form 5-methylcytosine"
ttttcccttctcctttccaagttgtaatcccccaactggcctccaagtcatgaccccactcgccatggcactgactcagccagcctctgggccaccacctgggaagatttcgacaccctggc

SEQ ID NO: 4444 - DNA, 122 bp, Homo sapiens
  misc_feature (61)..(62): /note="This region represents a CpG dinucleotide"
  misc_feature (61)..(61): /note="Nucleotide may be methylated to form 5-methylcytosine"
tgagacagggtcttgctgagatgcccaggctgggattacagccatgagccactgtacccgcgcctgacctgttgtacaggtttctgagttaagatagcaaaggtatctgaagcgtttctttc

SEQ ID NO: 4445 - DNA, 122 bp, Homo sapiens
  misc_feature (61)..(62): /note="This region represents a CpG dinucleotide"
  misc_feature (61)..(61): /note="Nucleotide may be methylated to form 5-methylcytosine"
gccctaacccacaggaatgtagccaggggctcaggttttattgttcaagcaaggtggcaacggttaactacttcagtgtgagttcttagaaaattctatgggttggaatgctagcaaaatca

SEQ ID NO: 4446 - DNA, 122 bp, Homo sapiens
  misc_feature (61)..(62): /note="This region represents a CpG dinucleotide"
  misc_feature (61)..(61): /note="Nucleotide may be methylated to form 5-methylcytosine"
acaggaggaagggggaggctggagccagccaagcgagccagccgtccccccaccaaggcacgcaaggaggccattcatcttcactgcctctgccgaaaatatacgtctacgggagagccagg

SEQ ID NO: 4447 - DNA, 122 bp, Homo sapiens
  misc_feature (61)..(62): /note="This region represents a CpG dinucleotide"
  misc_feature (61)..(61): /note="Nucleotide may be methylated to form 5-methylcytosine"
ctttcatacaactcctgggaaagacggttaccgaaacagagcgctaaatcattggctttgcgagctgcacctggtcaatgtcactgtctcctatgaatccacttaccattcagagctcgttt

SEQ ID NO: 4448 - DNA, 122 bp, Homo sapiens
  misc_feature (61)..(62): /note="This region represents a CpG dinucleotide"
  misc_feature (61)..(61): /note="Nucleotide may be methylated to form 5-methylcytosine"
aggaagcagtttttagaagttctgttgcaacctgtagtgactctgtggtgactcagtaggcgggttgaatttctgttgagatggtaagaaagagggaggattttgtttatttatttatttat

SEQ ID NO: 4449 - DNA, 122 bp, Homo sapiens
  misc_feature (61)..(62): /note="This region represents a CpG dinucleotide"
  misc_feature (61)..(61): /note="Nucleotide may be methylated to form 5-methylcytosine"
tccagtttcatgaataattgataagctctttccaacttgtcagaagcaacttagccgtctcgccttgcggcctggaacccctggcaatttccggagcaccggcaagagacttttgcacagtt

SEQ ID NO: 4450 - DNA, 122 bp, Homo sapiens
  misc_feature (61)..(62): /note="This region represents a CpG dinucleotide"
  misc_feature (61)..(61): /note="Nucleotide may be methylated to form 5-methylcytosine"
aacagttgggatggaggctgtgattgatgaaggaatgcctaaaagttaccacagactgtacggcaaggcagctacatgcatcagtgaaggactagtagttcctgctacaacttcagcagtac

SEQ ID NO: 4451 - DNA, 122 bp, Homo sapiens
  misc_feature (61)..(62): /note="This region represents a CpG dinucleotide"
  misc_feature (61)..(61): /note="Nucleotide may be methylated to form 5-methylcytosine"
attttttatgatgcagaattgtacagcatgtgcaacgcgatgcggatgtgttaacatcaccgtgagaaacttaacttttgaatatccttgttttgggaggtacacattttacaacttcagca

SEQ ID NO: 4452 - DNA, 122 bp, Homo sapiens
  misc_feature (61)..(62): /note="This region represents a CpG dinucleotide"
  misc_feature (61)..(61): /note="Nucleotide may be methylated to form 5-methylcytosine"
ctgttctttctcctcagcccacttcctcaatgctgctctgagttggtgacttctggccctcgtccagtcttttgtcctctcgctgtcctggttgagtccacgcattgaggttttaggtttgt

SEQ ID NO: 4453 - DNA, 122 bp, Homo sapiens
  misc_feature (61)..(62): /note="This region represents a CpG dinucleotide"
  misc_feature (61)..(61): /note="Nucleotide may be methylated to form 5-methylcytosine"
cccatttatctgtgcatgtggccgacaacgacctgatggccgtgctgagcacctgggcagcgaggacaggcctttcatgtaccagcctcacctgggaaccagcaggcagtactgtgcccgtc

SEQ ID NO: 4454 - DNA, 122 bp, Homo sapiens
  misc_feature (61)..(62): /note="This region represents a CpG dinucleotide"
  misc_feature (61)..(61): /note="Nucleotide may be methylated to form 5-methylcytosine"
agttttcacttttctgggataaaagcccaagagtgcagtttctaggtcacacaatgaacacgtgcttattagtgttgtaagaagctgccacactctcatgcagagtagctggaccattttac

SEQ ID NO: 4455 - DNA, 122 bp, Homo sapiens
  misc_feature (61)..(62): /note="This region represents a CpG dinucleotide"
  misc_feature (61)..(61): /note="Nucleotide may be methylated to form 5-methylcytosine"
aattattagctaggtgttgacagcaagtgtcaggatgtatcaatattgcctgaacccagtcgtgattcaggaactacaacactgacctttaccccagacacagtgagtctaaaggcagttgt

SEQ ID NO: 4456 - DNA, 122 bp, Homo sapiens
  misc_feature (61)..(62): /note="This region represents a CpG dinucleotide"
  misc_feature (61)..(61): /note="Nucleotide may be methylated to form 5-methylcytosine"
tctgagctgtcctttcgctggccccgctgtccgcaggggcttcctacctgtgtgagaggtcgtagcgggagacagcaacagagagtaggcggctgggccacgtccttcacagggcgtcatgt

SEQ ID NO: 4457 - DNA, 122 bp, Homo sapiens
  misc_feature (61)..(62): /note="This region represents a CpG dinucleotide"
  misc_feature (61)..(61): /note="Nucleotide may be methylated to form 5-methylcytosine"
aaagaggatgactaaacctccaagtcatattttactctttaaggattgagatgtgcattgcgatgaactaacttttaagtggtttacgacacacaggaaagaagtcatacttataatttcaa

SEQ ID NO: 4458 - DNA, 122 bp, Homo sapiens
  misc_feature (61)..(62): /note="This region represents a CpG dinucleotide"
  misc_feature (61)..(61): /note="Nucleotide may be methylated to form 5-methylcytosine"
cccacttttcccgcgacctttttcggacccgattttggatcgagttgaggggggcgcgggcgttttcggggggcggggggcgcggcggagaatggccgcggggagggctccccggagcctcc

SEQ ID NO: 4459 - DNA, 122 bp, Homo sapiens
  misc_feature (61)..(62): /note="This region represents a CpG dinucleotide"
  misc_feature (61)..(61): /note="Nucleotide may be methylated to form 5-methylcytosine"
tggccagcatgtgacggccatttcaggtggtaaagcaggagcagatttgctttttgtgcccgaaaccccttctgacaataacagcagcttccctgttcccctgcacctccctgtcagccgag

SEQ ID NO: 4460 - DNA, 122 bp, Homo sapiens
  misc_feature (61)..(62): /note="This region represents a CpG dinucleotide"
  misc_feature (61)..(61): /note="Nucleotide may be methylated to form 5-methylcytosine"
gaaacatgtactatcccattggcatcaatgtcaaatgtaacttcaatctgaggaactccacgaggggctggtggaattccaatctaaaataaataatatccagagtaaggtcctcttacaga

SEQ ID NO: 4461 - DNA, 122 bp, Homo sapiens
  misc_feature (61)..(62): /note="This region represents a CpG dinucleotide"
  misc_feature (61)..(61): /note="Nucleotide may be methylated to form 5-methylcytosine"
ccttaagggaaaggtcatgcactgtttaccatagtatatgcagtgcctagcacagggcatcgtaagcacttagctaaactgaataaatagttaagtactaacaatattagggcttaggacat

SEQ ID NO: 4462 - DNA, 122 bp, Homo sapiens
  misc_feature (61)..(62): /note="This region represents a CpG dinucleotide"
  misc_feature (61)..(61): /note="Nucleotide may be methylated to form 5-methylcytosine"
gtgaggagtgacctttgttacttgacaaaagtatcgtttatatgatcaacaggcatcctacgctgtgtgcacacagcatatcaccgggagagacggcacggaaagatggccctgccctcaag

SEQ ID NO: 4463 - DNA, 122 bp, Homo sapiens
  misc_feature (61)..(62): /note="This region represents a CpG dinucleotide"
  misc_feature (61)..(61): /note="Nucleotide may be methylated to form 5-methylcytosine"
cgaccccctagtaataacaaattcactgttgaccctggacagatggtgttcaaaaagctacgtgcagggggccagtacacttaggtcgcagggaaactcccacgtattaagcaccgactgtg

SEQ ID NO: 4464 - DNA, 122 bp, Homo sapiens
  misc_feature (61)..(62): /note="This region represents a CpG dinucleotide"
  misc_feature (61)..(61): /note="Nucleotide may be methylated to form 5-methylcytosine"
ttttaagtgtttttttaggagattttctgcagcactctgagtgtctcttcccaaacacttcggttactgtttattcacctgctgagatctggtctcttattcactctcattgccttaagaaa

SEQ ID NO: 4465 - DNA, 122 bp, Homo sapiens
  misc_feature (61)..(62): /note="This region represents a CpG dinucleotide"
  misc_feature (61)..(61): /note="Nucleotide may be methylated to form 5-methylcytosine"
caatgtctgccttctgagctgtgggcgattcccattgttgtgaggtttcctccaactggacgttaagttactgagaacaggaatcagggatgcgattggtgcgtgtcttctgtggctacctg

SEQ ID NO: 4466 - DNA, 122 bp, Homo sapiens
  misc_feature (61)..(62): /note="This region represents a CpG dinucleotide"
  misc_feature (61)..(61): /note="Nucleotide may be methylated to form 5-methylcytosine"
gagggtttttccccagggtgttgttggcccctgcccccacttctgttccataattaaccacgcccctcctacccactgtgcccctcttcctgctgtgtggaggccctgaatcattattttaa

SEQ ID NO: 4467 - DNA, 122 bp, Homo sapiens
  misc_feature (61)..(62): /note="This region represents a CpG dinucleotide"
  misc_feature (61)..(61): /note="Nucleotide may be methylated to form 5-methylcytosine"
cttataatgtatttaaggatctcttaaggaacgaacatttcctttttcttgaaagcctatcggaatttcagctgagatgattttctgccagaaattctagataactctgcagctaaatccaa

SEQ ID NO: 4468 - DNA, 122 bp, Homo sapiens
  misc_feature (61)..(62): /note="This region represents a CpG dinucleotide"
  misc_feature (61)..(61): /note="Nucleotide may be methylated to form 5-methylcytosine"
gcctaggcttgtcttgtgtaatacagttcagtattacccaggccctggaaccgaaatctgcgtatgaacagctctcttaggacatattcaaatattttcatcctctttgctgagaatttaag

SEQ ID NO: 4469 - DNA, 122 bp, Homo sapiens
  misc_feature (61)..(62): /note="This region represents a CpG dinucleotide"
  misc_feature (61)..(61): /note="Nucleotide may be methylated to form 5-methylcytosine"
ataactttccagaaaccagttcagccaagagattggatccaaagacaagctgcaaggtgtcggtaagtgagatgctaagagtggagtttagtgagtacagaccacgatttcctaacacctag

SEQ ID NO: 4470 - DNA, 122 bp, Homo sapiens
  misc_feature (61)..(62): /note="This region represents a CpG dinucleotide"
  misc_feature (61)..(61): /note="Nucleotide may be methylated to form 5-methylcytosine"
tagagatgtctgtgtcacgtacccaagagctgaagtcagacttcagaaaatgctccttgacgctctactcttctgagtaacagaactgtggggaagggaatcctagctccctctgtagtgaa

SEQ ID NO: 4471 - DNA, 122 bp, Homo sapiens
  misc_feature (61)..(62): /note="This region represents a CpG dinucleotide"
  misc_feature (61)..(61): /note="Nucleotide may be methylated to form 5-methylcytosine"
atgacagcctgagccacacacctatcgactgagacttagaagtaagagccaaagcctacccggaacctcccagtctcacaccaccttttccaattcagcttttcccagatttctccattggg

SEQ ID NO: 4472 - DNA, 122 bp, Homo sapiens
  misc_feature (61)..(62): /note="This region represents a CpG dinucleotide"
  misc_feature (61)..(61): /note="Nucleotide may be methylated to form 5-methylcytosine"
ccagcatggttgggttctgtgtccctcttcctgacttgtagacagctgcctttttgttcacgtggccttgtttgtttgtttgtttggtgcatgcatgtggagagagatctttctcttcctct

SEQ ID NO: 4473 - DNA, 122 bp, Homo sapiens
  misc_feature (61)..(62): /note="This region represents a CpG dinucleotide"
  misc_feature (61)..(61): /note="Nucleotide may be methylated to form 5-methylcytosine"
aggataatggtgaagggcactcccaggacaacagctgttcaggaaacacggcaatcaacccgtccagatgggaacagaaggagggatggctccaggagcagatatctccaaggagaagatga

SEQ ID NO: 4474 - DNA, 122 bp, Homo sapiens
  misc_feature (61)..(62): /note="This region represents a CpG dinucleotide"
  misc_feature (61)..(61): /note="Nucleotide may be methylated to form 5-methylcytosine"
ctgaacatccaactgccttggtgaggggagaggaagaaattttacaggctttttattggccggttatttttctgtgtgtcccatacaggcccccaccatgaagggtttcacagccactctct

SEQ ID NO: 4475 - DNA, 122 bp, Homo sapiens
  misc_feature (61)..(62): /note="This region represents a CpG dinucleotide"
  misc_feature (61)..(61): /note="Nucleotide may be methylated to form 5-methylcytosine"
actcaagtggttctgattttaagtgactgtgtcatccctgtggccagtctctggcgggggcggtaggggacaaacactttcaactttgaaatatttcagttgaagaagttaattcactttgt

SEQ ID NO: 4476 - DNA, 122 bp, Homo sapiens
  misc_feature (61)..(62): /note="This region represents a CpG dinucleotide"
  misc_feature (61)..(61): /note="Nucleotide may be methylated to form 5-methylcytosine"
attctcatttatgtacacaccacttatatcaggttcttctggagaatatattctgtttgacggaagaggaaggaagagaggataaattatgtttattggagaactacctaacccagactttg

SEQ ID NO: 4477 - DNA, 122 bp, Homo sapiens
  misc_feature (61)..(62): /note="This region represents a CpG dinucleotide"
  misc_feature (61)..(61): /note="Nucleotide may be methylated to form 5-methylcytosine"
ctgttaggtagtagtattcccatttcacaaatgaatacattgatatttagaaaggttgcccgcagttttatttgctagtagagttgggatttgaatcatggtctgactgggttgcaaagcta

SEQ ID NO: 4478 - DNA, 122 bp, Homo sapiens
  misc_feature (61)..(62): /note="This region represents a CpG dinucleotide"
  misc_feature (61)..(61): /note="Nucleotide may be methylated to form 5-methylcytosine"
ttccaatgtaaattaatcaaatgtagatgttatatattctataaatatatattttattaacgtttacccctagagagatagagattctaaattgtacaatatttataaaagaaaaagagaca

SEQ ID NO: 4479 - DNA, 122 bp, Homo sapiens
  misc_feature (61)..(62): /note="This region represents a CpG dinucleotide"
  misc_feature (61)..(61): /note="Nucleotide may be methylated to form 5-methylcytosine"
tcccaggaaaggcgggctggggtcaactgcttgaaaatttagtaaccctgctcctaatcccgtgcactgctatatcctagtgtgcggcgggacacttgagagttttgaaagaaccctcaaac

SEQ ID NO: 4480 - DNA, 122 bp, Homo sapiens
  misc_feature (61)..(62): /note="This region represents a CpG dinucleotide"
  misc_feature (61)..(61): /note="Nucleotide may be methylated to form 5-methylcytosine"
gggcttctgggcagtgagaatgactcaaacctgagcaatgcttctgggcctctgatttcacggtgtctctgagttgcaacagcaagcagaccttggagatgccaccttcacagacatggtgg

SEQ ID NO: 4481 - DNA, 122 bp, Homo sapiens
  misc_feature (61)..(62): /note="This region represents a CpG dinucleotide"
  misc_feature (61)..(61): /note="Nucleotide may be methylated to form 5-methylcytosine"
aaaaataccaaaaaaaaaaagttagccagacgttgtggcgggtgcagagtctgagggaggcgaattgcttcaacctacctggaaggtggaggttgcagtgcactgcagcctgggcgacagag

SEQ ID NO: 4482 - DNA, 122 bp, Homo sapiens
  misc_feature (61)..(62): /note="This region represents a CpG dinucleotide"
  misc_feature (61)..(61): /note="Nucleotide may be methylated to form 5-methylcytosine"
tgtcagcacgtaaactgagctattttaaggtcaaggccagggtgcagcccaacagaattgcgaaagcaaaatgtgtttgcttctgcagttggctttttaaatacatttttctttattaattg

SEQ ID NO: 4483 - DNA, 122 bp, Homo sapiens
  misc_feature (61)..(62): /note="This region represents a CpG dinucleotide"
  misc_feature (61)..(61): /note="Nucleotide may be methylated to form 5-methylcytosine"
gaggaagttgacagttcaacttcaaacatgggtgacgcaggccccacactgcctgctccccgtcccacccctccctgagcacgccaccccgccctctccctctctgagagcgagatacccgg

SEQ ID NO: 4484 - DNA, 122 bp, Homo sapiens
  misc_feature (61)..(62): /note="This region represents a CpG dinucleotide"
  misc_feature (61)..(61): /note="Nucleotide may be methylated to form 5-methylcytosine"
aaggcttatcaggatccatatcgcagcttgtaaagtcaccacaatcaccacgccaacagacggaacgcctggaagtaaacagaacttctagaacagtagaacatcaaagggtgtcagggaca

SEQ ID NO: 4485 - DNA, 122 bp, Homo sapiens
  misc_feature (61)..(62): /note="This region represents a CpG dinucleotide"
  misc_feature (61)..(61): /note="Nucleotide may be methylated to form 5-methylcytosine"
cttctgtcagattctgttcccccatcaccgcccctatcataccttgctatgattttgttacggacctgtcttgttggttagtaagctcccagaggacaataaccagaacacagagactacag

SEQ ID NO: 4486 - DNA, 122 bp, Homo sapiens
  misc_feature (61)..(62): /note="This region represents a CpG dinucleotide"
  misc_feature (61)..(61): /note="Nucleotide may be methylated to form 5-methylcytosine"
gtaagaacgcagaagcacccttgggcccatgggccatcttccctattagcacctcctcctcgctacccctcttcaatggcagagacgacgagtgaaaatttgggacttttattgtaaatgga

SEQ ID NO: 4487 - DNA, 122 bp, Homo sapiens
  misc_feature (61)..(62): /note="This region represents a CpG dinucleotide"
  misc_feature (61)..(61): /note="Nucleotide may be methylated to form 5-methylcytosine"
tgccagatactatcctaaacaccccacatcctcttctttaatccttgcaactacccttggcgggaggtaatattagtatcaccactttacaggtaaggaaactgagacacagaggggttgcc

SEQ ID NO: 4488 - DNA, 122 bp, Homo sapiens
  misc_feature (61)..(62): /note="This region represents a CpG dinucleotide"
  misc_feature (61)..(61): /note="Nucleotide may be methylated to form 5-methylcytosine"
tactcacagactcagcaaacacaccctccggagccatgaccgcaaatatcctgctgagagcgcctttgaagttcagagaaatgctgggcacagttcctcaggccaagataggggcagctggg

SEQ ID NO: 4489 - DNA, 122 bp, Homo sapiens
  misc_feature (61)..(62): /note="This region represents a CpG dinucleotide"
  misc_feature (61)..(61): /note="Nucleotide may be methylated to form 5-methylcytosine"
ccatggttccagccggaaaaagaggaagttggcgcatgcgtactgtccacttaaagacttcgcgagagaagccccacgactcataggtgtcttagaataagccggaaaagaatccagaacta

SEQ ID NO: 4490 - DNA, 122 bp, Homo sapiens
  misc_feature (61)..(62): /note="This region represents a CpG dinucleotide"
  misc_feature (61)..(61): /note="Nucleotide may be methylated to form 5-methylcytosine"
atgtagctatgagagcatgaaaccgtgcgctcacgccgcacacgagttgggtaaatggagcgcctcattttccagatgtgttacagaaactgtgctggaggatgtgactggccagtgagaca

SEQ ID NO: 4491 - DNA, 122 bp, Homo sapiens
  misc_feature (61)..(62): /note="This region represents a CpG dinucleotide"
  misc_feature (61)..(61): /note="Nucleotide may be methylated to form 5-methylcytosine"
agaagtgaaaacagtccacacaaagacccgacaacatatattcataacagcattaaattacgttcaaagcagcactgtttcctaaagccaaaagctggaaacaatccaaatgtttgtcaaca

SEQ ID NO: 4492 - DNA, 122 bp, Homo sapiens
  misc_feature (61)..(62): /note="This region represents a CpG dinucleotide"
  misc_feature (61)..(61): /note="Nucleotide may be methylated to form 5-methylcytosine"
ttaccatctataatttatatagagtttacagtttagaaaacaatttgaaatacattatctcgtttgatttgctcctttcaataggcttgtgagagagatgaaacaaacattataatcctcaa

SEQ ID NO: 4493 - DNA, 122 bp, Homo sapiens
  misc_feature (61)..(62): /note="This region represents a CpG dinucleotide"
  misc_feature (61)..(61): /note="Nucleotide may be methylated to form 5-methylcytosine"
actacattgaacagttgcaactttgaggtgaataaagcctgtactgactcctggttgtaacgtacctggttgcaaagtacacagtgtgctactttgtattgaggagatatcctggactcaca

SEQ ID NO: 4494 - DNA, 122 bp, Homo sapiens
  misc_feature (61)..(62): /note="This region represents a CpG dinucleotide"
  misc_feature (61)..(61): /note="Nucleotide may be methylated to form 5-methylcytosine"
agctaatgcacaccatgtgaatactgtttcgaaaagttacctggagaacttacccacacacgttccctcatctgaaaactggtagccctccacacactcgcagcggaaggttcctgggtgat

SEQ ID NO: 4495 - DNA, 122 bp, Homo sapiens
  misc_feature (61)..(62): /note="This region represents a CpG dinucleotide"
  misc_feature (61)..(61): /note="Nucleotide may be methylated to form 5-methylcytosine"
ttaaaaaaaaaaaaagaaaattggaaatgactgcagccaggtgtgtgtgattgggccccgcgacctttttcttaggcaaacagggctttgtggatgcagaaagacttctttggttgtgtagt

SEQ ID NO: 4496 - DNA, 122 bp, Homo sapiens
  misc_feature (61)..(62): /note="This region represents a CpG dinucleotide"
  misc_feature (61)..(61): /note="Nucleotide may be methylated to form 5-methylcytosine"
gtcaacgctcaatacaagggacattaggattggcagtagctcagagatctctctgctcaccgtgatcttcaagtttgaaaattgcatctcaaatctaagacccagagggctcacccagagtc

SEQ ID NO: 4497 - DNA, 122 bp, Homo sapiens
  misc_feature (61)..(62): /note="This region represents a CpG dinucleotide"
  misc_feature (61)..(61): /note="Nucleotide may be methylated to form 5-methylcytosine"
tatattgtctccatcgcaattttctgtgccatgtttcttctttttggaggaagtatgctacgaatctaatgtaacaagacttgaataatgaaagacagatagctcattctgaagggaacaca

SEQ ID NO: 4498 - DNA, 122 bp, Homo sapiens
  misc_feature (61)..(62): /note="This region represents a CpG dinucleotide"
  misc_feature (61)..(61): /note="Nucleotide may be methylated to form 5-methylcytosine"
ctcccctgaaggctgggctcgcgtgggcggccgcgggtggtggccctcccggttcctgcccgaggaccagttgtaaatgttactgcttcctactaataaatgctgacctgatcaaatggagc

SEQ ID NO: 4499 - DNA, 122 bp, Homo sapiens
  misc_feature (61)..(62): /note="This region represents a CpG dinucleotide"
  misc_feature (61)..(61): /note="Nucleotide may be methylated to form 5-methylcytosine"
gccaaagtaaacgaacctgaatctgctctgctggaacatggataatgtggggcggcctgtcgccatggtgatgcaccgcgttgctctcctgttcataaatggcatcacgttctggctgagga

SEQ ID NO: 4500 - DNA, 122 bp, Homo sapiens
  misc_feature (61)..(62): /note="This region represents a CpG dinucleotide"
  misc_feature (61)..(61): /note="Nucleotide may be methylated to form 5-methylcytosine"
tataggttaaatagatttctgtgggccggcctaggaatcgctgtttaagacttctgacatcgtgattattaagatttcagaaaaaggctttagctttctgttgtgtttactttatttgattt

SEQ ID NO: 4501 - DNA, 122 bp, Homo sapiens
  misc_feature (61)..(62): /note="This region represents a CpG dinucleotide"
  misc_feature (61)..(61): /note="Nucleotide may be methylated to form 5-methylcytosine"
ctgtcttttgtttacgttttttttctgaagtcaggcatttagtaatatgggctgataaaacggaagacaaaagatcagtgcacagcaaaatcgttcaggacctaaaattactcatcctctct

SEQ ID NO: 4502 - DNA, 122 bp, Homo sapiens
  misc_feature (61)..(62): /note="This region represents a CpG dinucleotide"
  misc_feature (61)..(61): /note="Nucleotide may be methylated to form 5-methylcytosine"
aggtaaagacaagtaagtaaacagttgctgtacagcaggatgaagtgtttattagagccacgtccaaggtgccatgggcaaatagagaaaagcaaacaactcaagaaagcaggtgagtgtat

SEQ ID NO: 4503 - DNA, 122 bp, Homo sapiens
  misc_feature (61)..(62): /note="This region represents a CpG dinucleotide"
  misc_feature (61)..(61): /note="Nucleotide may be methylated to form 5-methylcytosine"
attatacagtcataggagaaagatatgggacatttctataatctatattctaatttgattcgattattgagtcgtaagtattaattattgccaccatccaactcattgagtcttatggttca

SEQ ID NO: 4504 - DNA, 122 bp, Homo sapiens
  misc_feature (61)..(62): /note="This region represents a CpG dinucleotide"
  misc_feature (61)..(61): /note="Nucleotide may be methylated to form 5-methylcytosine"
tggactgatgttgtagttcaagacaggcctctgactcagctttttggttctgttcagacccgtaagtgagtagatgaggcccaccacattaggaagggtcatttccttttctcagtctaata

SEQ ID NO: 4505 - DNA, 122 bp, Homo sapiens
  misc_feature (61)..(62): /note="This region represents a CpG dinucleotide"
  misc_feature (61)..(61): /note="Nucleotide may be methylated to form 5-methylcytosine"
ggtgtgtgcagctgtgccagccgtactcgaggtgtgtgcagggtgtgtgtgaacacagtgcgtgcatgggtgcgtgtctgcaggggtgtgtgtgcgtggtgacaactctgtgtgaggggttt

SEQ ID NO: 4506 - DNA, 122 bp, Homo sapiens
  misc_feature (61)..(62): /note="This region represents a CpG dinucleotide"
  misc_feature (61)..(61): /note="Nucleotide may be methylated to form 5-methylcytosine"
tcgagagtacaaatccagatatgactttcatcatccaactaataaaccagtacatgattccgtcttgttcctaatttgggtatagacagaggactatctatgttgacatgaaaaaaaaatgc

SEQ ID NO: 4507 - DNA, 122 bp, Homo sapiens
  misc_feature (61)..(62): /note="This region represents a CpG dinucleotide"
  misc_feature (61)..(61): /note="Nucleotide may be methylated to form 5-methylcytosine"
ctcctgctgtctcaagccatcctcccacctcagcctcccaagtagctgagactatagacacgtgccaccacagctggccaccttagccattttgaagtgcacagttcggtggcattaagcac

SEQ ID NO: 4508 - DNA, 122 bp, Homo sapiens
  misc_feature (61)..(62): /note="This region represents a CpG dinucleotide"
  misc_feature (61)..(61): /note="Nucleotide may be methylated to form 5-methylcytosine"
cctcggccaagctcccgggaaagtacttaaaaaggccactagcaagcgcgcgatgaacggcgcaaacacctacgggacggctcgagatcgcaggctggcgagggccatcgcagctgccaccc

SEQ ID NO: 4509 - DNA, 122 bp, Homo sapiens
  misc_feature (61)..(62): /note="This region represents a CpG dinucleotide"
  misc_feature (61)..(61): /note="Nucleotide may be methylated to form 5-methylcytosine"
agccctgacatcattgcagttccctttttccagaaatgcagtgcccttgaatactttccccgcccattgaaggcaaacagggttttttctggcattctgcacacctgttttgctgccctgcc

SEQ ID NO: 4510 - DNA, 122 bp, Homo sapiens
  misc_feature (61)..(62): /note="This region represents a CpG dinucleotide"
  misc_feature (61)..(61): /note="Nucleotide may be methylated to form 5-methylcytosine"
acagaccaacatatgtaataaagttacacataactaagtatttacactaagtaatacatacgctttcacacacactcacccagattactcatacccacaccagtacaagtaaaacagaaaat

SEQ ID NO: 4511 - DNA, 122 bp, Homo sapiens
  misc_feature (61)..(62): /note="This region represents a CpG dinucleotide"
  misc_feature (61)..(61): /note="Nucleotide may be methylated to form 5-methylcytosine"
cactttacattatatgatgtcatttactcttcacaacctgccaggaaatggaaatgattacgtaatatactccagtttgcaaatgaaggaatcttcctgcggaacgtatgtgaagcgcatat

SEQ ID NO: 4512 - DNA, 122 bp, Homo sapiens
  misc_feature (61)..(62): /note="This region represents a CpG dinucleotide"
  misc_feature (61)..(61): /note="Nucleotide may be methylated to form 5-methylcytosine"
taagttactattgcacaatttagagttagactgtcagtgctttgggatgtggatggtaatcgttacaagagattttgctaaaagtaagctttgaaataaataggttctgcttcagataccta

SEQ ID NO: 4513 - DNA, 122 bp, Homo sapiens
  misc_feature (61)..(62): /note="This region represents a CpG dinucleotide"
  misc_feature (61)..(61): /note="Nucleotide may be methylated to form 5-methylcytosine"
tacaatattcggttaattgtggacgggctcaagctgtgctcatccctgcgaaggctgccgcggctgcacggtgctcacaggagcaggctcgtttctccgggacccgccagctccacagcctg

SEQ ID NO: 4514 - DNA, 122 bp, Homo sapiens
  misc_feature (61)..(62): /note="This region represents a CpG dinucleotide"
  misc_feature (61)..(61): /note="Nucleotide may be methylated to form 5-methylcytosine"
tttcctggctctgggtccttctccctttttcttatagacacacctctctatagggtgtgtcgtgttggcattggtaacagggcagagcttcagcactcagaagctgcctgagaaatggggag

SEQ ID NO: 4515 - DNA, 122 bp, Homo sapiens
  misc_feature (61)..(62): /note="This region represents a CpG dinucleotide"
  misc_feature (61)..(61): /note="Nucleotide may be methylated to form 5-methylcytosine"
tgtttgctcagctgctcagccctggaccttgtcatactggttgaatggacggacaggtaacgtaaacaagtaaggaagacaagacaaggaagttaagagttcgaggtaatgagacatttgag

SEQ ID NO: 4516 - DNA, 122 bp, Homo sapiens
  misc_feature (61)..(62): /note="This region represents a CpG dinucleotide"
  misc_feature (61)..(61): /note="Nucleotide may be methylated to form 5-methylcytosine"
atgttcgtttggttattactacaaatccccacgtttatttcttttcaagagaaagttgttcgaaatgtgaacgttttccatctttacctgactggccaggagtaatcttataaaaatttgaa

SEQ ID NO: 4517 - DNA, 122 bp, Homo sapiens
  misc_feature (61)..(62): /note="This region represents a CpG dinucleotide"
  misc_feature (61)..(61): /note="Nucleotide may be methylated to form 5-methylcytosine"
tgcacctggccctagaaggaagatttaacagtaaaatatacttaaatgctgggctacctccgcagactagctcagcctctttgggtctcaaatcagcctggccgggaggctgagtggaggtt

SEQ ID NO: 4518 - DNA, 122 bp, Homo sapiens
  misc_feature (61)..(62): /note="This region represents a CpG dinucleotide"
  misc_feature (61)..(61): /note="Nucleotide may be methylated to form 5-methylcytosine"
agagataataggtagaaagtcacacatacctgtgtacatttgttaggatatgtccctgctcgttgagaggagagagtttttttgatagttatggggtcttaaatccatttcaggattgagta

SEQ ID NO: 4519 - DNA, 122 bp, Homo sapiens
  misc_feature (61)..(62): /note="This region represents a CpG dinucleotide"
  misc_feature (61)..(61): /note="Nucleotide may be methylated to form 5-methylcytosine"
accctttcagttctggtactgggcagtgggctctctccactcgctgcctaggcccttcgacgctcccacccagaaatgatgacatggctagtgaggctgacagtcttgctgtaattgggaga

SEQ ID NO: 4520 - DNA, 122 bp, Homo sapiens
  misc_feature (61)..(62): /note="This region represents a CpG dinucleotide"
  misc_feature (61)..(61): /note="Nucleotide may be methylated to form 5-methylcytosine"
aagagaagagttagcccaggaagtcatccccatccatgtcacccatcaaggcctaagtgacgaacggttacagagactgacctaacctcacctcagtagatataggcaggctccttaagccc

SEQ ID NO: 4521 - DNA, 122 bp, Homo sapiens
  misc_feature (61)..(62): /note="This region represents a CpG dinucleotide"
  misc_feature (61)..(61): /note="Nucleotide may be methylated to form 5-methylcytosine"
gcctcacagctctggggcggcattccaaatcagggtgtgggtgggccgtgctcccgctggcggctctacctgggccccttctgcctctccactccgggcggtggccagcagtccgtggcatt

SEQ ID NO: 4522 - DNA, 122 bp, Homo sapiens
  misc_feature (61)..(62): /note="This region represents a CpG dinucleotide"
  misc_feature (61)..(61): /note="Nucleotide may be methylated to form 5-methylcytosine"
aaaaatgcaggtagctaagaggaaacatctttgacacgtgatgaagatatttgggaaaatcgatgcagaaaaaaattatgtcagacttgtcacaaagagagtgaaaaatgtatttatattgc

SEQ ID NO: 4523 - DNA, 122 bp, Homo sapiens
  misc_feature (61)..(62): /note="This region represents a CpG dinucleotide"
  misc_feature (61)..(61): /note="Nucleotide may be methylated to form 5-methylcytosine"
agcttgagcctaggatggatgaaatctgtaatccacttgaaaatgtgcactgtcagaatacgattaggcaagattgatgaatattctacttacttacttggaaaccaattctctacctttgt

SEQ ID NO: 4524 - DNA, 122 bp, Homo sapiens
  misc_feature (61)..(62): /note="This region represents a CpG dinucleotide"
  misc_feature (61)..(61): /note="Nucleotide may be methylated to form 5-methylcytosine"
gcccaactcttggcggagcgcggctcccggctccggctcctgtgcagccgcaggccccggcgctgcccagtagacagactaagcaggactctcttaatgtcccttaagtcttttggttcttg

SEQ ID NO: 4525 - DNA, 122 bp, Homo sapiens
  misc_feature (61)..(62): /note="This region represents a CpG dinucleotide"
  misc_feature (61)..(61): /note="Nucleotide may be methylated to form 5-methylcytosine"
tgggtgatgagggcacaaccccagtgcactgaagtacagaagtctccacacttgaaaaaacgagtctccacaaatgtgacttgctcagttcccggcagcaccaggactgggcccagggtccc

SEQ ID NO: 4526 - DNA, 122 bp, Homo sapiens
  misc_feature (61)..(62): /note="This region represents a CpG dinucleotide"
  misc_feature (61)..(61): /note="Nucleotide may be methylated to form 5-methylcytosine"
acagctcccctgtgagttcagacttctcaaggacgcttgcatagccaacattgttgagaacgagtaaccccttatcacagcacacgtctgtcgtgccatgaagcaatttcccatccctgtgg

SEQ ID NO: 4527 - DNA, 122 bp, Homo sapiens
  misc_feature (61)..(62): /note="This region represents a CpG dinucleotide"
  misc_feature (61)..(61): /note="Nucleotide may be methylated to form 5-methylcytosine"
ggaggactccagacagctggccttcttatgccagcccgcttctgtgggagaggccctctgcgtaggtgactgggcagggaagaggctaagacactgaaagattgaattcctcacccaaatgg

SEQ ID NO: 4528 - DNA, 122 bp, Homo sapiens
  misc_feature (61)..(62): /note="This region represents a CpG dinucleotide"
  misc_feature (61)..(61): /note="Nucleotide may be methylated to form 5-methylcytosine"
gcgacgtcttctggggcgcctggtatccgtaggagtcaaagccgccgatgaagtcaactgcggaagaggggcggcgcatgttagggatcggcggcgggggcgaggagagggagactgggtcc

SEQ ID NO: 4529 - DNA, 122 bp, Homo sapiens
  misc_feature (61)..(62): /note="This region represents a CpG dinucleotide"
  misc_feature (61)..(61): /note="Nucleotide may be methylated to form 5-methylcytosine"
cgctggggccaccggcctctcacacaggcggccttcgcccaggtgcagccgtagggactgcggctcgtcagcctgacgccatcaagctgcgccccagccagccagtcaatggctgtgtccag

SEQ ID NO: 4530 - DNA, 122 bp, Homo sapiens
  misc_feature (61)..(62): /note="This region represents a CpG dinucleotide"
  misc_feature (61)..(61): /note="Nucleotide may be methylated to form 5-methylcytosine"
ctaggctgtggggctggaagctgggatgaggctgttgtttcaagttcagggcccctcccccgagctattgaagcaagccaggcagtgactctgagggagtacccgcaaggcctctgcaaagg

SEQ ID NO: 4531 - DNA, 122 bp, Homo sapiens
  misc_feature (61)..(62): /note="This region represents a CpG dinucleotide"
  misc_feature (61)..(61): /note="Nucleotide may be methylated to form 5-methylcytosine"
cacgatgccttttacggagcaagctccgcagtccaggggcaggtcctcacggcctaaacacggctgccttatcctgagtagttttactgacaatagagcttcaactgaagaatgaattcctg

SEQ ID NO: 4532 - DNA, 122 bp, Homo sapiens
  misc_feature (61)..(62): /note="This region represents a CpG dinucleotide"
  misc_feature (61)..(61): /note="Nucleotide may be methylated to form 5-methylcytosine"
gagttcctcttgaggacaagaggatgttgcacatgaccctactttgagctctggcctgcccgtggaggacacagcaggtactcaggcaccacacgggtggaacagagctcaaagtagggtca

SEQ ID NO: 4533 - DNA, 122 bp, Homo sapiens
  misc_feature (61)..(62): /note="This region represents a CpG dinucleotide"
  misc_feature (61)..(61): /note="Nucleotide may be methylated to form 5-methylcytosine"
tccagcgttggtggggcatccatctctggtgacgttcacaagtttgtttgtttttaaaatcgtttttggaaaaatatttttttttcctcataagcacatttcaagaagtttggaaaatagag

SEQ ID NO: 4534 - DNA, 122 bp, Homo sapiens
  misc_feature (61)..(62): /note="This region represents a CpG dinucleotide"
  misc_feature (61)..(61): /note="Nucleotide may be methylated to form 5-methylcytosine"
tgtacgcggctgcatacccactgcacgatgtaagtaaccttgacacacgatttatctctgcgtcatttgactccccaaatcccgccgggccacacccccccgggagctgcaattatcctgtg

SEQ ID NO: 4535 - DNA, 122 bp, Homo sapiens
  misc_feature (61)..(62): /note="This region represents a CpG dinucleotide"
  misc_feature (61)..(61): /note="Nucleotide may be methylated to form 5-methylcytosine"
tctccaccacccctgtatgcacagagaagaggccatgtcaggacacagcaagaaggcagccgtctacaagccaggaagtgagccctcaccagaaaccaacgatggcacctttatcttgtcat

SEQ ID NO: 4536 - DNA, 122 bp, Homo sapiens
  misc_feature (61)..(62): /note="This region represents a CpG dinucleotide"
  misc_feature (61)..(61): /note="Nucleotide may be methylated to form 5-methylcytosine"
tgggatttgaataaataagctatcactaagcttgagctcctatgcaaatttccattccctcgcccccaccaccattgctgtattcatggatatatcgggtctaagggtgacttatctaagga

SEQ ID NO: 4537 - DNA, 122 bp, Homo sapiens
  misc_feature (61)..(62): /note="This region represents a CpG dinucleotide"
  misc_feature (61)..(61): /note="Nucleotide may be methylated to form 5-methylcytosine"
gcatggtatgttccaataaagctttataagaacaggggccctgggcccacagttccccaacgtaagattctaagagcccaaggttaagtaagctctagtccaccacactgcatgaggccaaa

SEQ ID NO: 4538 - DNA, 122 bp, Homo sapiens
  misc_feature (61)..(62): /note="This region represents a CpG dinucleotide"
  misc_feature (61)..(61): /note="Nucleotide may be methylated to form 5-methylcytosine"
gtgatattgggcaccttttcatatgctcattggcagtttccttctttcttcacctgtttacgtgtctgtccagtcacataaaagggggtggagaaaaggtggtgaagcggtgttgtttgtct

SEQ ID NO: 4539 - DNA, 122 bp, Homo sapiens
  misc_feature (61)..(62): /note="This region represents a CpG dinucleotide"
  misc_feature (61)..(61): /note="Nucleotide may be methylated to form 5-methylcytosine"
tctccccatgtgatagcctgagatatggcctcatgggaagggaaagacctgacagcccgacgccagtaaaggggctgtgctgaggattagtaaaagaggaaggcctctttgcagttgagata

SEQ ID NO: 4540 - DNA, 122 bp, Homo sapiens
  misc_feature (61)..(62): /note="This region represents a CpG dinucleotide"
  misc_feature (61)..(61): /note="Nucleotide may be methylated to form 5-methylcytosine"
tgcaagaagctcttgattatcttcatggtggactggctcattttcattccgggctgacctcgttgatatgttctctaccacttctccttgctgagaagtagttggcgtctattcaaagtaca

SEQ ID NO: 4541 - DNA, 122 bp, Homo sapiens
  misc_feature (61)..(62): /note="This region represents a CpG dinucleotide"
  misc_feature (61)..(61): /note="Nucleotide may be methylated to form 5-methylcytosine"
aactaatttttaagcaaatacagatcatttcaagtcaagccagttatcttttccagggcacgcattacttcctggtgagaagcagcacaagaacagaagcagttctgttattgtggactgaa

SEQ ID NO: 4542 - DNA, 122 bp, Homo sapiens
  misc_feature (61)..(62): /note="This region represents a CpG dinucleotide"
  misc_feature (61)..(61): /note="Nucleotide may be methylated to form 5-methylcytosine"
ccctacaccgcctgcgacctggcgccccccgccggcaccaccgacgccgcgcacccggggcggtccgtggtccccgcgttgcttcctctgctggccgggaccctgctgctgctggagacggc

SEQ ID NO: 4543 - DNA, 122 bp, Homo sapiens
  misc_feature (61)..(62): /note="This region represents a CpG dinucleotide"
  misc_feature (61)..(61): /note="Nucleotide may be methylated to form 5-methylcytosine"
tggattgggctgtgcagagaaagcccagggagaagaaacagcctcctgttcccaccaccacgacagcagagagctgggcccccatgactgcaagctgggaattcccttagcccccaccccaa

SEQ ID NO: 4544 - DNA, 122 bp, Homo sapiens
  misc_feature (61)..(62): /note="This region represents a CpG dinucleotide"
  misc_feature (61)..(61): /note="Nucleotide may be methylated to form 5-methylcytosine"
ctggagagagcttgctgggtctgaagcggggcagccctgctcagctctgtccattgttgccgtgtgagaatgctggccctgtgttgccaaatcttctgattttgtttccaagagaaaccaga

SEQ ID NO: 4545 - DNA, 122 bp, Homo sapiens
  misc_feature (61)..(62): /note="This region represents a CpG dinucleotide"
  misc_feature (61)..(61): /note="Nucleotide may be methylated to form 5-methylcytosine"
ttaattcatctctgaatacccatagcttaattccctctgtgcagacagaaacctcccccgcgagaagaaagattgctcagcctcatcagcttggaaaaggctgccacaggcactcgtgctgc

SEQ ID NO: 4546 - DNA, 122 bp, Homo sapiens
  misc_feature (61)..(62): /note="This region represents a CpG dinucleotide"
  misc_feature (61)..(61): /note="Nucleotide may be methylated to form 5-methylcytosine"
cccatcattgatgtcatcagtctggataattttgcctaccttgcagcatctgctgaccttcgtggaggtgagttctgctcccgggggtggggctgtagacatgaaaggaggtaggtgaggct

SEQ ID NO: 4547 - DNA, 122 bp, Homo sapiens
  misc_feature (61)..(62): /note="This region represents a CpG dinucleotide"
  misc_feature (61)..(61): /note="Nucleotide may be methylated to form 5-methylcytosine"
gaaaattggagaagtaaagatcaaacctgcttcctttaatagcacaacccacaggttgtccgtgttgcttctgctcacacctcattagccagtatttagtcacataaccaagagagactgga

SEQ ID NO: 4548 - DNA, 122 bp, Homo sapiens
  misc_feature (61)..(62): /note="This region represents a CpG dinucleotide"
  misc_feature (61)..(61): /note="Nucleotide may be methylated to form 5-methylcytosine"
gctccattgtcatgccttaatcacctcctaaagaccccacttccttatactatcactgtacgttaggtttcaacatatgagttttaggaggactcaaacatccagactgaagcacctcatac

SEQ ID NO: 4549 - DNA, 122 bp, Homo sapiens
  misc_feature (61)..(62): /note="This region represents a CpG dinucleotide"
  misc_feature (61)..(61): /note="Nucleotide may be methylated to form 5-methylcytosine"
taagatagtgatgactccgagcccctccagctcccctgttctcctcaaccctggtctgagcgcctgctttgtgcgagtcattcaggcttcatcaaggcactatgttaatgttaggtccttct

SEQ ID NO: 4550 - DNA, 122 bp, Homo sapiens
  misc_feature (61)..(62): /note="This region represents a CpG dinucleotide"
  misc_feature (61)..(61): /note="Nucleotide may be methylated to form 5-methylcytosine"
agtgaaccacctgccctttccttccagggttcggtagcagggagggccaagggtcccccacgtccatgacaggtcagcgttcctcctggatcccatcacatgggtacatgcagggagagcat

SEQ ID NO: 4551 - DNA, 122 bp, Homo sapiens
  misc_feature (61)..(62): /note="This region represents a CpG dinucleotide"
  misc_feature (61)..(61): /note="Nucleotide may be methylated to form 5-methylcytosine"
tgctaggattacaggcgtgagccaccacgcccggcccaaaaaacccatatgtttagcatacgctaaaaacaccaactgaaccttctggagaaagtgggtcctgtggtgagctgaccacaggg

SEQ ID NO: 4552 - DNA, 122 bp, Homo sapiens
  misc_feature (61)..(62): /note="This region represents a CpG dinucleotide"
  misc_feature (61)..(61): /note="Nucleotide may be methylated to form 5-methylcytosine"
ggccgccatccagtggtcctgtggactcctctgtgtgcctctagatggcagcacagagatcggagtttgactcttagaggcaggtccacttccaaggaaagaactttccttttttttttttt

SEQ ID NO: 4553 - DNA, 122 bp, Homo sapiens
  misc_feature (61)..(62): /note="This region represents a CpG dinucleotide"
  misc_feature (61)..(61): /note="Nucleotide may be methylated to form 5-methylcytosine"
ccttttgcatggcaccattacagcttggtaactaccagccagctttgctattcttgtgggcgttggcacctctcatcacttcctccccacccatctttcaaatgtctgaagtgttgcgttgg

SEQ ID NO: 4554 - DNA, 122 bp, Homo sapiens
  misc_feature (61)..(62): /note="This region represents a CpG dinucleotide"
  misc_feature (61)..(61): /note="Nucleotide may be methylated to form 5-methylcytosine"
caggatgtcctaataatttccagggtcagtcatttcctttcccatgtattttcccctcttcgtggttctgttatgcatccctggtttcccttaattcctcagaaacatatcctagctactga

SEQ ID NO: 4555 - DNA, 122 bp, Homo sapiens
  misc_feature (61)..(62): /note="This region represents a CpG dinucleotide"
  misc_feature (61)..(61): /note="Nucleotide may be methylated to form 5-methylcytosine"
ttccacggctcacctcctgcccgcacccgggccccacctctgcctccaaatcacccaccccgccagccccccttgcaggtcacaacccgtcccaggtgacaccccgcccccagcctcgcccc

SEQ ID NO: 4556 - DNA, 122 bp, Homo sapiens
  misc_feature (61)..(62): /note="This region represents a CpG dinucleotide"
  misc_feature (61)..(61): /note="Nucleotide may be methylated to form 5-methylcytosine"
ccttcccaatcccatcttgcttcacaagcggaatagcttttccacttcaatcaaataaaccgtgtattattttttgttttgttcacttcctcctgtttccctgtctcgggtgtatgaccaca

SEQ ID NO: 4557 - DNA, 122 bp, Homo sapiens
  misc_feature (61)..(62): /note="This region represents a CpG dinucleotide"
  misc_feature (61)..(61): /note="Nucleotide may be methylated to form 5-methylcytosine"
tttgccactggtacagtattatcttttttctttttttttcctgattcagatcccaaaccccgctttgtaggtgcaggaaacaggagacccagaagtgtaattccttctagtgacccgcctaa

SEQ ID NO: 4558 - DNA, 122 bp, Homo sapiens
  misc_feature (61)..(62): /note="This region represents a CpG dinucleotide"
  misc_feature (61)..(61): /note="Nucleotide may be methylated to form 5-methylcytosine"
ggtctaaaacctgctctaactgtccatgtacggaaactggcctgggtgccttggcttacacgttaccttgtgtcatacctttgaaacaagggacctgtccaggcttccttctgatggccaac

SEQ ID NO: 4559 - DNA, 122 bp, Homo sapiens
  misc_feature (61)..(62): /note="This region represents a CpG dinucleotide"
  misc_feature (61)..(61): /note="Nucleotide may be methylated to form 5-methylcytosine"
cagcccctaggctgtggaataactctttagtagaattatgtagaaaggaatccaaacattcgatttcagagtgtgcgcttctgtgcccagtgtggcagcaattcactcagagagttgctgtg

SEQ ID NO: 4560 - DNA, 122 bp, Homo sapiens
  misc_feature (61)..(62): /note="This region represents a CpG dinucleotide"
  misc_feature (61)..(61): /note="Nucleotide may be methylated to form 5-methylcytosine"
tacttttttagtagattccttgatcagtgcctgcaggagtgacagtttttattccagcagcgccagcatgtacatgccaccacctagcgcagacatggggacctatggaatgcaaacctgtg

SEQ ID NO: 4561 - DNA, 122 bp, Homo sapiens
  misc_feature (61)..(62): /note="This region represents a CpG dinucleotide"
  misc_feature (61)..(61): /note="Nucleotide may be methylated to form 5-methylcytosine"
gaacaaataccactaggaaagaactttctgaagaaaccttagtggcctccaaattggcaacggaaagaaaccaaaagttagtggaggtgaagtcactgacataacaatggaggccagtttca

SEQ ID NO: 4562 - DNA, 122 bp, Homo sapiens
  misc_feature (61)..(62): /note="This region represents a CpG dinucleotide"
  misc_feature (61)..(61): /note="Nucleotide may be methylated to form 5-methylcytosine"
attaaactagatgacttctaacttcctttccagctctaaaacactatacaaacaataagacgtctatagtgaaatggcattcaaaataccaactgtgataatctaatttctttccaattata

SEQ ID NO: 4563 - DNA, 122 bp, Homo sapiens
  misc_feature (61)..(62): /note="This region represents a CpG dinucleotide"
  misc_feature (61)..(61): /note="Nucleotide may be methylated to form 5-methylcytosine"
accaagccaggaaggtttgcagatgagccaccacagaatagtgactgcaatttctgcctccgctggtacaggcaactttcgaaaaatggttttttaggctgggagtggtggctcatgcctgt

SEQ ID NO: 4564 - DNA, 122 bp, Homo sapiens
  misc_feature (61)..(62): /note="This region represents a CpG dinucleotide"
  misc_feature (61)..(61): /note="Nucleotide may be methylated to form 5-methylcytosine"
ggcaatctgcccgcctcggcctcccatagtgctgggattacaggcatgagccaccgcacccggtccagatttattaagcaatagtggtgcatttcatgcacaggtatcagctagtctagtaa

SEQ ID NO: 4565 - DNA, 122 bp, Homo sapiens
  misc_feature (61)..(62): /note="This region represents a CpG dinucleotide"
  misc_feature (61)..(61): /note="Nucleotide may be methylated to form 5-methylcytosine"
ctcagcctcctgggtgctgggatccggggctctggggcctctggtgtgacctgagggtgccgaggagacaagggctcaggctgaggacagcaggtggcttccactgggcctctgtgctctga

SEQ ID NO: 4566 - DNA, 122 bp, Homo sapiens
  misc_feature (61)..(62): /note="This region represents a CpG dinucleotide"
  misc_feature (61)..(61): /note="Nucleotide may be methylated to form 5-methylcytosine"
tgtcacaggagattaaaacagttgagagccttactgacaatcctctacagagatggtgggcgtgcctgggctctggcctatgttaggccctgataatcataggcagcatagcagaaacatta

SEQ ID NO: 4567 - DNA, 122 bp, Homo sapiens
  misc_feature (61)..(62): /note="This region represents a CpG dinucleotide"
  misc_feature (61)..(61): /note="Nucleotide may be methylated to form 5-methylcytosine"
tccctcccgtcctccctctttcctcgagctcctgggtggttcaggccgcagcgctcggcgcgggcaccttcagccacttctgcgcctgcgccgtctgctgcagaacatccagtcctggcccc

SEQ ID NO: 4568 - DNA, 122 bp, Homo sapiens
  misc_feature (61)..(62): /note="This region represents a CpG dinucleotide"
  misc_feature (61)..(61): /note="Nucleotide may be methylated to form 5-methylcytosine"
ggtagagagaagggcaatgcacatcctgacaatatgagaaatgacaatttgcagatacagcggaaaataggagccctttccattgcaaagttggcaaggtattagagtataaggacttggtg

SEQ ID NO: 4569 - DNA, 122 bp, Homo sapiens
  misc_feature (61)..(62): /note="This region represents a CpG dinucleotide"
  misc_feature (61)..(61): /note="Nucleotide may be methylated to form 5-methylcytosine"
agctccccaggtttttgtgtggacataagtttttatttccctgggataaacacctgagggcgctactgctgggtcataggcatgctgggttttataattagctgccctctgttttctaggct

SEQ ID NO: 4570 - DNA, 122 bp, Homo sapiens
  misc_feature (61)..(62): /note="This region represents a CpG dinucleotide"
  misc_feature (61)..(61): /note="Nucleotide may be methylated to form 5-methylcytosine"
agcacggacaggtctgcgactggggcccccagggcttctcacgttcctcacaatgcaagacgccagtcccatggctgccgtccggcgctgcctgggatcggggcaggcaggctggacatttg

SEQ ID NO: 4571 - DNA, 122 bp, Homo sapiens
  misc_feature (61)..(62): /note="This region represents a CpG dinucleotide"
  misc_feature (61)..(61): /note="Nucleotide may be methylated to form 5-methylcytosine"
ttaattttcctaaagcctgcctttgaccaagacagtttgctgcttaaacttggaccaaaacgccaccactgtccccatggccttggccgatggggtgaaatagtcatgcctggggcagccat

SEQ ID NO: 4572 - DNA, 122 bp, Homo sapiens
  misc_feature (61)..(62): /note="This region represents a CpG dinucleotide"
  misc_feature (61)..(61): /note="Nucleotide may be methylated to form 5-methylcytosine"
aaaggcagtggagcaagagtaaatgtttctgggttttgtttccttctttagctttccttccgggaatgttcttctagcttcttatctaaagtgaaatacaaggtgcaaagagtcaggaaata

SEQ ID NO: 4573 - DNA, 122 bp, Homo sapiens
  misc_feature (61)..(62): /note="This region represents a CpG dinucleotide"
  misc_feature (61)..(61): /note="Nucleotide may be methylated to form 5-methylcytosine"
agaccagggaaaatgatcacaaaaccagattctgaaaagtaccactctctggctttgagacgaagagcaaagctgttgagcaacagtatggggtaatgactttgaaacacctggagtggttg

SEQ ID NO: 4574 - DNA, 122 bp, Homo sapiens
  misc_feature (61)..(62): /note="This region represents a CpG dinucleotide"
  misc_feature (61)..(61): /note="Nucleotide may be methylated to form 5-methylcytosine"
aaaagaaaaaaactagatagacaagacctgggccttaaagtctttctgtttcacagagcacgctgagtaatataaaactggatgatagataactaaatctctttttgtgccctattcaaaat

SEQ ID NO: 4575 - DNA, 122 bp, Homo sapiens
  misc_feature (61)..(62): /note="This region represents a CpG dinucleotide"
  misc_feature (61)..(61): /note="Nucleotide may be methylated to form 5-methylcytosine"
taaattatgccatgaggaaacacaagcaatgtggatgagctggccatctttgtttgtaaacgaggaacacaggctgagaatgcccagccacacatgccatcagcagtggcaccagtgagaga

SEQ ID NO: 4576 - DNA, 122 bp, Homo sapiens
  misc_feature (61)..(62): /note="This region represents a CpG dinucleotide"
  misc_feature (61)..(61): /note="Nucleotide may be methylated to form 5-methylcytosine"
gagttctcagtcaggtcctcagagtgagccaggtatgagggtggctcagtaaacaggacccgaataaggcaaatgtccaggtctcactttctcattgctgaaggggtgtgcgcaaagggcag

SEQ ID NO: 4577 - DNA, 122 bp, Homo sapiens
  misc_feature (61)..(62): /note="This region represents a CpG dinucleotide"
  misc_feature (61)..(61): /note="Nucleotide may be methylated to form 5-methylcytosine"
tgcaagagccggcaggaaattcccctcctcctgaaccacagagtatttctgggtgggcatcgattgtctatgggccatggcgtaagacccccaccccccgaccccccggcaacaaaagtatc

SEQ ID NO: 4578 - DNA, 122 bp, Homo sapiens
  misc_feature (61)..(62): /note="This region represents a CpG dinucleotide"
  misc_feature (61)..(61): /note="Nucleotide may be methylated to form 5-methylcytosine"
gccgccgccgctctgaattattgatgcagccggcgctgcagccggagcgggcggagagcgcgcgccgggcacaaaggcgcggacctcggcctggccccgcccccgccgcctcccggcccgcc

SEQ ID NO: 4579 - DNA, 122 bp, Homo sapiens
  misc_feature (61)..(62): /note="This region represents a CpG dinucleotide"
  misc_feature (61)..(61): /note="Nucleotide may be methylated to form 5-methylcytosine"
aagaaaaaaatcaaaggttgcctgtaatgcatatggcagctcaaaatttgctttcaacaacgaaattctgtaagtccttttctgttcatataaccaaaagaataatcaacattttataaaaa

SEQ ID NO: 4580 - DNA, 122 bp, Homo sapiens
  misc_feature (61)..(62): /note="This region represents a CpG dinucleotide"
  misc_feature (61)..(61): /note="Nucleotide may be methylated to form 5-methylcytosine"
cgaccagctaggattccctgcaacaatggataggcaatgagtatcagactgtacctggcccgtgttcaacagcgccactgtgtggcagtgaaaagcaagtgcagggtagaccaatgagacct

SEQ ID NO: 4581 - DNA, 122 bp, Homo sapiens
  misc_feature (61)..(62): /note="This region represents a CpG dinucleotide"
  misc_feature (61)..(61): /note="Nucleotide may be methylated to form 5-methylcytosine"
ctgcttccgccctgcgccgggcacttccgcccgcacccaccaggcgccggccccaggccccgcacttccgccccacgccggcagcactgccgctgggcgttctatctcaggtggtgtcccgt

SEQ ID NO: 4582 - DNA, 122 bp, Homo sapiens
  misc_feature (61)..(62): /note="This region represents a CpG dinucleotide"
  misc_feature (61)..(61): /note="Nucleotide may be methylated to form 5-methylcytosine"
ttggctgtttttctggaactgtcaggctcactccgttctgccaaacacccgagtctgggtcgctgtcctccatctgtctgtggttctttccagtcaaaatggccatgaacagcagctgattc

SEQ ID NO: 4583 - DNA, 122 bp, Homo sapiens
  misc_feature (61)..(62): /note="This region represents a CpG dinucleotide"
  misc_feature (61)..(61): /note="Nucleotide may be methylated to form 5-methylcytosine"
caagaaagtgtattttgttggtctcctgttcctgaggtcaggcattgccatcaggctctccgggaccatggtgggtgaagggtgtgaatctctctgtgccaggcttccacgggcattaaaca

SEQ ID NO: 4584 - DNA, 122 bp, Homo sapiens
  misc_feature (61)..(62): /note="This region represents a CpG dinucleotide"
  misc_feature (61)..(61): /note="Nucleotide may be methylated to form 5-methylcytosine"
tgaatgtagaactccattctcatccctaccgcaccccctagtggaaaaacagactaagtgcgttttacaaaaagctgctatagaaaatagaaaattttggtacatttatttcaactatggtt

SEQ ID NO: 4585 - DNA, 122 bp, Homo sapiens
  misc_feature (61)..(62): /note="This region represents a CpG dinucleotide"
  misc_feature (61)..(61): /note="Nucleotide may be methylated to form 5-methylcytosine"
ctgaacaaggggaagtttgcgcaatcactaacacatcatactgtatctgaattaacacctcgggccaagtggaaagatgaatcaaaaaatttaaaaagaaagccacctggtgttctaaggta

SEQ ID NO: 4586 - DNA, 122 bp, Homo sapiens
  misc_feature (61)..(62): /note="This region represents a CpG dinucleotide"
  misc_feature (61)..(61): /note="Nucleotide may be methylated to form 5-methylcytosine"
cattaaagagaaagggtacgttgaaagtgggattgcatagatttcccatgaccactgccacgctttgaagggaaactgctcagctgagcactgcttcctggaatgagcaaggccatctgccc

SEQ ID NO: 4587 - DNA, 122 bp, Homo sapiens
  misc_feature (61)..(62): /note="This region represents a CpG dinucleotide"
  misc_feature (61)..(61): /note="Nucleotide may be methylated to form 5-methylcytosine"
ttcccctcttttaatggggcttttaattagcaatggggctaatctcctaggatccaatcccgtgacaggcattttcctgcatgattatgtagcaagtcataaagaagaactgctacactcat

SEQ ID NO: 4588 - DNA, 122 bp, Homo sapiens
  misc_feature (61)..(62): /note="This region represents a CpG dinucleotide"
  misc_feature (61)..(61): /note="Nucleotide may be methylated to form 5-methylcytosine"
gggaggagagagaaaataaatatattttggcacagcaataggaagattctcagaggtgcccgtgaggatagatggccatttctggaggcactgcctctattcccagtgctggctgagttctg

SEQ ID NO: 4589 - DNA, 122 bp, Homo sapiens
  misc_feature (61)..(62): /note="This region represents a CpG dinucleotide"
  misc_feature (61)..(61): /note="Nucleotide may be methylated to form 5-methylcytosine"
gcctgttctcccgtttgctctccctgtctgcctctgccgctctctaccttggtagcttaccgaaaacagccaccgtagggcgtttttatatttgtgaaaactacttccaaggagataattga

SEQ ID NO: 4590 - DNA, 122 bp, Homo sapiens
  misc_feature (61)..(62): /note="This region represents a CpG dinucleotide"
  misc_feature (61)..(61): /note="Nucleotide may be methylated to form 5-methylcytosine"
aggtggggcctgctggcaccggggtccctccaccctgctgaaagggtctcctggctgcatcgcagctaacatcccttccttcctgtcgggcagccagagcagctgagttccagataaaaact

SEQ ID NO: 4591 - DNA, 122 bp, Homo sapiens
  misc_feature (61)..(62): /note="This region represents a CpG dinucleotide"
  misc_feature (61)..(61): /note="Nucleotide may be methylated to form 5-methylcytosine"
tgttgttgaaaacttcttcaggtccccagtccacagtgatctctttttcctttaaatcctcggagcacttgtggtctgaacagtgccactagtttggaaatgaatcatatgctgcctgcaac

SEQ ID NO: 4592 - DNA, 122 bp, Homo sapiens
  misc_feature (61)..(62): /note="This region represents a CpG dinucleotide"
  misc_feature (61)..(61): /note="Nucleotide may be methylated to form 5-methylcytosine"
ggaggcaggggaagggcacctaagtatcagaattactgcccacacccgctattccctgaacgcacacccacactggaactgccaccgtgatgagccacctgtttcagaggaagtgggtcaaa

SEQ ID NO: 4593 - DNA, 122 bp, Homo sapiens
  misc_feature (61)..(62): /note="This region represents a CpG dinucleotide"
  misc_feature (61)..(61): /note="Nucleotide may be methylated to form 5-methylcytosine"
ttggttttcccatctgtgatgtaaacaaatgaaaacctgtttttgaagattcatcaatgacgttgaggaagctaattatctggggaacctttggggatgaatacttttcacatttacttgtc

SEQ ID NO: 4594 - DNA, 122 bp, Homo sapiens
  misc_feature (61)..(62): /note="This region represents a CpG dinucleotide"
  misc_feature (61)..(61): /note="Nucleotide may be methylated to form 5-methylcytosine"
tttttttattagggtctacaatctgtatttccttttcccctgccactcccattcctatgacgcattactgcagtcacgctgggatctcgaatagtttcccattaggtgaacgcactctaaaa

SEQ ID NO: 4595 - DNA, 122 bp, Homo sapiens
  misc_feature (61)..(62): /note="This region represents a CpG dinucleotide"
  misc_feature (61)..(61): /note="Nucleotide may be methylated to form 5-methylcytosine"
cagggcctggccgcgccccgctccctccccgccgatccgcctgccctttgtccccgtgaccgccaccccttaacacccagatattctaattcagtacatctgagtgaggtccaggattctat

SEQ ID NO: 4596 - DNA, 122 bp, Homo sapiens
  misc_feature (61)..(62): /note="This region represents a CpG dinucleotide"
  misc_feature (61)..(61): /note="Nucleotide may be methylated to form 5-methylcytosine"
ctcctaccgtcagcagggtggccctggtggtggcggagtcctccaggtgcagcttcctcccgccgagcacgcccttcaggtgcttccggacctcctggttgagcacgcagtggaaaaggagg

SEQ ID NO: 4597 - DNA, 122 bp, Homo sapiens
  misc_feature (61)..(62): /note="This region represents a CpG dinucleotide"
  misc_feature (61)..(61): /note="Nucleotide may be methylated to form 5-methylcytosine"
ctttttctctttgaaatgatgtgactctggaaggttttcttctttatttctgggaagaatcgcttaaagtttctcatttaagtaaagaactgctcgtttttagtttgcagagcttttaacta

SEQ ID NO: 4598 - DNA, 122 bp, Homo sapiens
  misc_feature (61)..(62): /note="This region represents a CpG dinucleotide"
  misc_feature (61)..(61): /note="Nucleotide may be methylated to form 5-methylcytosine"
aaaaaagaaagtctctttttacaacttttttgaggtataacttacatatcagaaaatcaccggttttaaatatacatttcaatgacttttagtaaatttcccaagttgtgcaaccatcatca

SEQ ID NO: 4599 - DNA, 122 bp, Homo sapiens
  misc_feature (61)..(62): /note="This region represents a CpG dinucleotide"
  misc_feature (61)..(61): /note="Nucleotide may be methylated to form 5-methylcytosine"
cgctaattctccggggtggaggcacttgcacaaccatgtgatgaattcttcagcagcgcccggaagctcggaggacatgagaggtggcaccaaggctgtggcagctgctcagccggtctcac

SEQ ID NO: 4600 - DNA, 122 bp, Homo sapiens
  misc_feature (61)..(62): /note="This region represents a CpG dinucleotide"
  misc_feature (61)..(61): /note="Nucleotide may be methylated to form 5-methylcytosine"
tcaatgacaagtcacagctgcatagacgcagccccatctatgtgctgactcaggaggtaacgcagtgcttcctctctttgattaccaggggtcttgacttctgtactaaagtaagagagaaa

SEQ ID NO: 4601 - DNA, 122 bp, Homo sapiens
  misc_feature (61)..(62): /note="This region represents a CpG dinucleotide"
  misc_feature (61)..(61): /note="Nucleotide may be methylated to form 5-methylcytosine"
gtagagagaggctcagttacagctctttgaagattaaggtaagaagaacacaggttttggcgtcagactagcaagagtgccagacgactctagaccacctatgagctgtgccctatatttgt

SEQ ID NO: 4602 - DNA, 122 bp, Homo sapiens
  misc_feature (61)..(62): /note="This region represents a CpG dinucleotide"
  misc_feature (61)..(61): /note="Nucleotide may be methylated to form 5-methylcytosine"
tctgttttgtaatgccatccagaaaaaatgaacagatagtgaggctttgtgaggaacctacgatggatatgtggctgcagccttctttggagggtttaagctgcactgaaggaggctgacct

SEQ ID NO: 4603 - DNA, 122 bp, Homo sapiens
  misc_feature (61)..(62): /note="This region represents a CpG dinucleotide"
  misc_feature (61)..(61): /note="Nucleotide may be methylated to form 5-methylcytosine"
atgccgggagatttatggaaaccccctctgatagctcaatctaattgcagctccctccagcgtgccaaatgctgctaatggacagccgctcctgccgctctgatgttgctagacctcctcag

SEQ ID NO: 4604 - DNA, 122 bp, Homo sapiens
  misc_feature (61)..(62): /note="This region represents a CpG dinucleotide"
  misc_feature (61)..(61): /note="Nucleotide may be methylated to form 5-methylcytosine"
ttggaagggatgaaaaacattacatccatgtagagtactattttgctctaatgtgataaacgaaagtgaagcagtttgcgttgttataactttatctgaaggttgaagattttaataacatg

SEQ ID NO: 4605 - DNA, 122 bp, Homo sapiens
  misc_feature (61)..(62): /note="This region represents a CpG dinucleotide"
  misc_feature (61)..(61): /note="Nucleotide may be methylated to form 5-methylcytosine"
ccaccccacccagatggctcctttcaagtttgtcagtgtcctccgtgttgtgaaacctagcgaaccattcagtactgatcttaaccgcccaccccaccccccttttttttttttgagacaag

SEQ ID NO: 4606 - DNA, 122 bp, Homo sapiens
  misc_feature (61)..(62): /note="This region represents a CpG dinucleotide"
  misc_feature (61)..(61): /note="Nucleotide may be methylated to form 5-methylcytosine"
agtgactcaaatgatgtagagccaagcagccccagaagcctacctgccaagagccagagtcggtggtgaggattgtggggatgggaagggaagtggcttgagacacagagcaaataggtggg

SEQ ID NO: 4607 - DNA, 122 bp, Homo sapiens
  misc_feature (61)..(62): /note="This region represents a CpG dinucleotide"
  misc_feature (61)..(61): /note="Nucleotide may be methylated to form 5-methylcytosine"
tcctcctgccgattagggggcgacaggggggcggtgggggggggggcagttttcaggagccgaatgagctgagccagtgttgagcattattccaggaattttaaacactcgttaaaggcttt

SEQ ID NO: 4608 - DNA, 122 bp, Homo sapiens
  misc_feature (61)..(62): /note="This region represents a CpG dinucleotide"
  misc_feature (61)..(61): /note="Nucleotide may be methylated to form 5-methylcytosine"
ggctattaggataagattcaaaatcctggaaggaccttgttagacttttttatgcctcctcggcatgataaatgatgggttttgtcatgttttctctgctgcagtcatgtttatcttctttc

SEQ ID NO: 4609 - DNA, 122 bp, Homo sapiens
  misc_feature (61)..(62): /note="This region represents a CpG dinucleotide"
  misc_feature (61)..(61): /note="Nucleotide may be methylated to form 5-methylcytosine"
atgtggcctggctttgttgttttcagtatgtcacatccacagttttgttttcaatggaaacgtgttaacactgagttgaaagttagggacctgggttttaagtcatggctctgacactaact

SEQ ID NO: 4610 - DNA, 122 bp, Homo sapiens
  misc_feature (61)..(62): /note="This region represents a CpG dinucleotide"
  misc_feature (61)..(61): /note="Nucleotide may be methylated to form 5-methylcytosine"
tgcaagtttgtttaagcatattgcaaaattaaacagttctcctccactccctcacagatacgagtcaccttatcacagtcttcagtgagttttgtaatctgcatttagagcagtggtgagct

SEQ ID NO: 4611 - DNA, 122 bp, Homo sapiens
  misc_feature (61)..(62): /note="This region represents a CpG dinucleotide"
  misc_feature (61)..(61): /note="Nucleotide may be methylated to form 5-methylcytosine"
ctttgttattcctctagtcagacaaatgctcgtttggtttaatctgacttaacaaattaacgagatgaggaagaaaattccaggccttgggacattcactgaagcccaaccaggcaccaaga

SEQ ID NO: 4612 - DNA, 122 bp, Homo sapiens
  misc_feature (61)..(62): /note="This region represents a CpG dinucleotide"
  misc_feature (61)..(61): /note="Nucleotide may be methylated to form 5-methylcytosine"
gaaccgggcagcacctggtgtcagcggctaattgtgttttaaggtggcgtgttagaccagcgcgcgaagggcaacccgagccaccgcacttgccttgcaggcgccgcgtcctctgacacggg

SEQ ID NO: 4613 - DNA, 122 bp, Homo sapiens
  misc_feature (61)..(62): /note="This region represents a CpG dinucleotide"
  misc_feature (61)..(61): /note="Nucleotide may be methylated to form 5-methylcytosine"
ctggaatttctgggctcaagtgatcctgtttgagcccaggattacagctgagattacaggcggtcaccaccacagttggcctcattccagttttaaagatgaggaaactaattcagagaggt

SEQ ID NO: 4614 - DNA, 122 bp, Homo sapiens
  misc_feature (61)..(62): /note="This region represents a CpG dinucleotide"
  misc_feature (61)..(61): /note="Nucleotide may be methylated to form 5-methylcytosine"
ggctcccggtttaattaaattccgtataacgactatccaaatgggcagcacgcggcacagcgaacccccgccagcctgcgcgtcagctcagaggcggagacccgcgagcgctcaccctcggc

SEQ ID NO: 4615 - DNA, 122 bp, Homo sapiens
  misc_feature (61)..(62): /note="This region represents a CpG dinucleotide"
  misc_feature (61)..(61): /note="Nucleotide may be methylated to form 5-methylcytosine"
gtggcagtgagccaatagcctctggtatgcagaaggctttgtgtcagtgatgcatattcacgagtagctgacctgagagagcaatctggctctctgagcaaggtcacttctgagctgctgtc

SEQ ID NO: 4616 - DNA, 122 bp, Homo sapiens
  misc_feature (61)..(62): /note="This region represents a CpG dinucleotide"
  misc_feature (61)..(61): /note="Nucleotide may be methylated to form 5-methylcytosine"
aaatccaagttgcagtgtaagttgagccaggggaggtggccacagttggctcccttaggccgcccacctcgtggggtcaccaaggggttacttcggggcagaaaggtgcggctgtgggtcgc

SEQ ID NO: 4617 - DNA, 122 bp, Homo sapiens
  misc_feature (61)..(62): /note="This region represents a CpG dinucleotide"
  misc_feature (61)..(61): /note="Nucleotide may be methylated to form 5-methylcytosine"
ttcttaacaagcctgctggattttagaactggaagggacctctacctatcacttaacagacgagaaaactgagaccaggagagggaaaacagagtgcctgaaatcacacagctaattagtgg

SEQ ID NO: 4618 - DNA, 122 bp, Homo sapiens
  misc_feature (61)..(62): /note="This region represents a CpG dinucleotide"
  misc_feature (61)..(61): /note="Nucleotide may be methylated to form 5-methylcytosine"
agccccatgggatatagcctaaggccaaaacaaataaaaacaacaacaacaaacaaagaacgaaagacaactggtttcagtaatcatattgtttgcagcagtgtgttgttatctgagctgct

SEQ ID NO: 4619 - DNA, 122 bp, Homo sapiens
  misc_feature (61)..(62): /note="This region represents a CpG dinucleotide"
  misc_feature (61)..(61): /note="Nucleotide may be methylated to form 5-methylcytosine"
caatggtttccaggagcaggaggtgaagagagggaactgactacatggcactgaaaggaacgttttgtagtaatggatatatcttgatggtggttacatgactaagtctgtcaaaattcata

SEQ ID NO: 4620 - DNA, 122 bp, Homo sapiens
  misc_feature (61)..(62): /note="This region represents a CpG dinucleotide"
  misc_feature (61)..(61): /note="Nucleotide may be methylated to form 5-methylcytosine"
gggcttgatataaattatcttctataatccccaaaacaatcctattcttcccccttggtacggatgaagaaattgtgccttcaccacagaaatagcagagctggaatttgttccaggaagtc

SEQ ID NO: 4621 - DNA, 122 bp, Homo sapiens
  misc_feature (61)..(62): /note="This region represents a CpG dinucleotide"
  misc_feature (61)..(61): /note="Nucleotide may be methylated to form 5-methylcytosine"
tttaccaattcaccaaaagtgtgctaataggctcacctctcactcttgttaagttaatatcgcaagtcagcaacaaagcatggaaatgcacaaaactcatactgaaaggagagagacacgtg

SEQ ID NO: 4622 - DNA, 122 bp, Homo sapiens
  misc_feature (61)..(62): /note="This region represents a CpG dinucleotide"
  misc_feature (61)..(61): /note="Nucleotide may be methylated to form 5-methylcytosine"
acgacatagcacgttggtaagacattctcattaaacacccagtgaaccaaaccaagataccgaagagcaagttatcagggaagacaaaacttccaccttctggtgtctgtgggaacaagtcc

SEQ ID NO: 4623 - DNA, 122 bp, Homo sapiens
  misc_feature (61)..(62): /note="This region represents a CpG dinucleotide"
  misc_feature (61)..(61): /note="Nucleotide may be methylated to form 5-methylcytosine"
taatgacagagaggaagcacagctgtgtgccttggctctcttgtgggaccaagtgaatttcgtcaagggatctgtagcatctattgtgagggtggaggagctgattcatttaatgacacatg

SEQ ID NO: 4624 - DNA, 122 bp, Homo sapiens
  misc_feature (61)..(62): /note="This region represents a CpG dinucleotide"
  misc_feature (61)..(61): /note="Nucleotide may be methylated to form 5-methylcytosine"
attttggttgaactttgctttcagaactagaactacctgctatccaagacttgttaaccacgttttcatgggcaaattacaaaaccctttcaaccccagtttcctcttctataaactagtgg

SEQ ID NO: 4625 - DNA, 122 bp, Homo sapiens
  misc_feature (61)..(62): /note="This region represents a CpG dinucleotide"
  misc_feature (61)..(61): /note="Nucleotide may be methylated to form 5-methylcytosine"
agagtaaagacagtgtgcttctatttatgtaaaattcaaaatcagaacaaaactaactcacggagttagaagtcagaatagggttttcttcggggggaaatggtgactggaaaggggcaagg

SEQ ID NO: 4626 - DNA, 122 bp, Homo sapiens
  misc_feature (61)..(62): /note="This region represents a CpG dinucleotide"
  misc_feature (61)..(61): /note="Nucleotide may be methylated to form 5-methylcytosine"
cctccccacgctgggcggggcacagctccaggccgggccgactcaggctgcgccagggtccgctagcctctgggatgcatggggacccctgggacgagggagcactctcctgagcaggaaat

SEQ ID NO: 4627 - DNA, 122 bp, Homo sapiens
  misc_feature (61)..(62): /note="This region represents a CpG dinucleotide"
  misc_feature (61)..(61): /note="Nucleotide may be methylated to form 5-methylcytosine"
ggacaggggccggggcagggatgcttaaaacctgaggaccacactgttcagtgacacggccgactgctgtcccctctccatgggatggccgccccctcattgctctcttccttcaggtgtct

SEQ ID NO: 4628 - DNA, 122 bp, Homo sapiens
  misc_feature (61)..(62): /note="This region represents a CpG dinucleotide"
  misc_feature (61)..(61): /note="Nucleotide may be methylated to form 5-methylcytosine"
gagaagatgctcacttcatctatggttaccccaagaaggggcacggccactcttacaccacggctgaagagtaagttcaaaaccagacccagcagggcttccagtttgccgtttgctgacac

SEQ ID NO: 4629 - DNA, 122 bp, Homo sapiens
  misc_feature (61)..(62): /note="This region represents a CpG dinucleotide"
  misc_feature (61)..(61): /note="Nucleotide may be methylated to form 5-methylcytosine"
gtgtacccggaggagccctgaagaggtcctctgtggcctcaaggctaaggcagcagagaacgtgggacaggcaaacagcaggggagccacaagctgtgccctgcagaccgctcctcttactg

SEQ ID NO: 4630 - DNA, 122 bp, Homo sapiens
  misc_feature (61)..(62): /note="This region represents a CpG dinucleotide"
  misc_feature (61)..(61): /note="Nucleotide may be methylated to form 5-methylcytosine"
atctctgctgccatctccactccagccgagcctcctcccaccaccacgatgaaccgtgagcgctggacctggagaagaggacatgtgaaacagggacatatgaaacacacctacacatccac

SEQ ID NO: 4631 - DNA, 122 bp, Homo sapiens
  misc_feature (61)..(62): /note="This region represents a CpG dinucleotide"
  misc_feature (61)..(61): /note="Nucleotide may be methylated to form 5-methylcytosine"
cctcgccggcccgcccgccgctgctcttcttccaggcacaatcgaagaggaggcagtgagcgagtcaaggccacagagtggatggaatcaaggttcacccccaaagctcacctcctttgcaa

SEQ ID NO: 4632 - DNA, 122 bp, Homo sapiens
  misc_feature (61)..(62): /note="This region represents a CpG dinucleotide"
  misc_feature (61)..(61): /note="Nucleotide may be methylated to form 5-methylcytosine"
cagggttcctaacctgtggtaagtaaagaatgtcactttctgacaagctcaggagccccacgttattttgggacctcgggaaaagaggaagtcacctaatttatataggtatctgcaggcac

SEQ ID NO: 4633 - DNA, 122 bp, Homo sapiens
  misc_feature (61)..(62): /note="This region represents a CpG dinucleotide"
  misc_feature (61)..(61): /note="Nucleotide may be methylated to form 5-methylcytosine"
aaggtagtcacctggtttcaaaagttccagtttctgcttaaagggagcaaaggacagagacgtctcactcagagcgtggcagttatgctgctccggaaagggaggctggtcccgcagttgag

SEQ ID NO: 4634 - DNA, 122 bp, Homo sapiens
  misc_feature (61)..(62): /note="This region represents a CpG dinucleotide"
  misc_feature (61)..(61): /note="Nucleotide may be methylated to form 5-methylcytosine"
gccctctcccgggcctccagaatggcgcctttcgggttgtggcgggccgaggggcggggtcgcagcaaggccccgcctgtcccctctccggagctcttatactctgagccctgctcggttta

SEQ ID NO: 4635 - DNA, 122 bp, Homo sapiens
  misc_feature (61)..(62): /note="This region represents a CpG dinucleotide"
  misc_feature (61)..(61): /note="Nucleotide may be methylated to form 5-methylcytosine"
tactaaatagtcgcaccccagcagcctctctcgcacaccggggccctgcatgtcagatggcgtggtctgcagggggagctctgtgccttagtggctcttggcaggacactgagggcctgcct

SEQ ID NO: 4636 - DNA, 122 bp, Homo sapiens
  misc_feature (61)..(62): /note="This region represents a CpG dinucleotide"
  misc_feature (61)..(61): /note="Nucleotide may be methylated to form 5-methylcytosine"
ggccttcgcccaggtgcagccgtagggactgcggctcgtcagcctgacgccatcaagctgcgccccagccagccagtcaatggctgtgtccagagcttcccgcctcgggctcagcgtaggtg

SEQ ID NO: 4637 - DNA, 122 bp, Homo sapiens
  misc_feature (61)..(62): /note="This region represents a CpG dinucleotide"
  misc_feature (61)..(61): /note="Nucleotide may be methylated to form 5-methylcytosine"
tagatcctttcatatccaaaccactatcaaactgagttcttccaagactaacattaggaacgttagagttaacccaagacactgcttcacagtgccatgcagacctagccgagtctgataac

SEQ ID NO: 4638 - DNA, 122 bp, Homo sapiens
  misc_feature (61)..(62): /note="This region represents a CpG dinucleotide"
  misc_feature (61)..(61): /note="Nucleotide may be methylated to form 5-methylcytosine"
gtgtccttcctcaccttcctcagtgagattagtcggacttggccaaaccaaaaccagtaacgctgatgagaacagggaactcccagccttagttctattttgtccacccttgattccttctc

SEQ ID NO: 4639 - DNA, 122 bp, Homo sapiens
  misc_feature (61)..(62): /note="This region represents a CpG dinucleotide"
  misc_feature (61)..(61): /note="Nucleotide may be methylated to form 5-methylcytosine"
tggtaaagactctgaaaatcattcccattcacatcacaggggcctaaagatggcctgggtcgtcagtgcggctttttctatacttccactccccatacattttctttcttttggcgacttgc

SEQ ID NO: 4640 - DNA, 122 bp, Homo sapiens
  misc_feature (61)..(62): /note="This region represents a CpG dinucleotide"
  misc_feature (61)..(61): /note="Nucleotide may be methylated to form 5-methylcytosine"
cagccatttcgataaaaaatagatataagaaataggacagaaaatgtcagatcgtatgtgcgttctagaccgctgattcgtcgatttgtaaaacaagagaaggataagatggtttccagatg

SEQ ID NO: 4641 - DNA, 122 bp, Homo sapiens
  misc_feature (61)..(62): /note="This region represents a CpG dinucleotide"
  misc_feature (61)..(61): /note="Nucleotide may be methylated to form 5-methylcytosine"
actctgatgctccttcccttggtttctgggctcccttgaactcccctagctccgtgctcacggccatctcagggtctcccctgcttgcagctgcacttggtacagcctgtgccagcccctga

SEQ ID NO: 4642 - DNA, 122 bp, Homo sapiens
  misc_feature (61)..(62): /note="This region represents a CpG dinucleotide"
  misc_feature (61)..(61): /note="Nucleotide may be methylated to form 5-methylcytosine"
gccatttctaaaaccagtcttcttagagactacaagcattcttcttctttaatagccaaacgcagatgacattgaggccttagggagtggtgagccacaaggtggaagcagcctgagttcct

SEQ ID NO: 4643 - DNA, 122 bp, Homo sapiens
  misc_feature (61)..(62): /note="This region represents a CpG dinucleotide"
  misc_feature (61)..(61): /note="Nucleotide may be methylated to form 5-methylcytosine"
ttacaatggcttacacacaagcctagtaagttgtcaggggctgtcagctgggcaatcagtcggggctattgctggggcctcccatcttgtccatacaggcttttccatggtactgcctttac

SEQ ID NO: 4644 - DNA, 122 bp, Homo sapiens
  misc_feature (61)..(62): /note="This region represents a CpG dinucleotide"
  misc_feature (61)..(61): /note="Nucleotide may be methylated to form 5-methylcytosine"
tcttttgcatttagatcaactgtgggcattatgtattctgctcctggcaagcctgagcgtcgtcttggttctcatttgtggtgttttattcttggttagaatggatgattgagtgattgcca

SEQ ID NO: 4645 - DNA, 122 bp, Homo sapiens
  misc_feature (61)..(62): /note="This region represents a CpG dinucleotide"
  misc_feature (61)..(61): /note="Nucleotide may be methylated to form 5-methylcytosine"
gctcttcctgctgcgccagtgcctgcgctcgctgggcggctatgtgctgtcgctcgtgcacgatgtgcgcttccaccactttcccatcgagcgccagctcaacggcacctacgccattgccg

SEQ ID NO: 4646 - DNA, 122 bp, Homo sapiens
  misc_feature (61)..(62): /note="This region represents a CpG dinucleotide"
  misc_feature (61)..(61): /note="Nucleotide may be methylated to form 5-methylcytosine"
gacgcccccgtcacgacgcgcccccttcgtcacgtccccctcacgacctccccctcacgacgccttcctcacgacgtgccctcctcacgacgtccccgtcacgacgccctccacacgacgcg

SEQ ID NO: 4647 - DNA, 122 bp, Homo sapiens
  misc_feature (61)..(62): /note="This region represents a CpG dinucleotide"
  misc_feature (61)..(61): /note="Nucleotide may be methylated to form 5-methylcytosine"
ccgtgtaactgcctcatctgtgttccatgaaaccatcagtaaaatctacaagtctgccaacgctttcctggttggatttcctgttctttatcagatatgccaaatcactacattgaatcaga

SEQ ID NO: 4648 - DNA, 122 bp, Homo sapiens
  misc_feature (61)..(62): /note="This region represents a CpG dinucleotide"
  misc_feature (61)..(61): /note="Nucleotide may be methylated to form 5-methylcytosine"
acgctcccaacccctcccctcccagcggaacaagcgcaccgcgttatcagcccggggatccgtgactgtggcagctgtggctggaggggacttctgagtccaatccctgcaaccagggaccc

SEQ ID NO: 4649 - DNA, 122 bp, Homo sapiens
  misc_feature (61)..(62): /note="This region represents a CpG dinucleotide"
  misc_feature (61)..(61): /note="Nucleotide may be methylated to form 5-methylcytosine"
actacagcccacttgcttctgtttcttagagacagaactgacctaaagatgccccctttgcgatgacttctgggatagagcagcactctaactaggcccccgctgcctcatggggaccttag

SEQ ID NO: 4650 - DNA, 122 bp, Homo sapiens
  misc_feature (61)..(62): /note="This region represents a CpG dinucleotide"
  misc_feature (61)..(61): /note="Nucleotide may be methylated to form 5-methylcytosine"
tcccgagaagcctcttggctgcccaggttgtctgttctctgtagtgggcactgtgtcaggcgtggcacacccatcagctcctatattcaccagcaactgtgtgaagtgggtgcccgttgtac

SEQ ID NO: 4651 - DNA, 122 bp, Homo sapiens
  misc_feature (61)..(62): /note="This region represents a CpG dinucleotide"
  misc_feature (61)..(61): /note="Nucleotide may be methylated to form 5-methylcytosine"
cagctgactttttatgattccttttcccagaactcagccttggcttaacaggaaactcaacgtaggtttctcagtcctagttcaattgggtgaggtcccctgagaaccggcatattctcttg

SEQ ID NO: 4652 - DNA, 122 bp, Homo sapiens
  misc_feature (61)..(62): /note="This region represents a CpG dinucleotide"
  misc_feature (61)..(61): /note="Nucleotide may be methylated to form 5-methylcytosine"
atagtaatgtcattacggtgccaccacctgggaccccatgatgggaccctgtgactttgccgtggactcagacctcagccttgctctgtgtagaggaagctggcctttccttctctactgct

SEQ ID NO: 4653 - DNA, 122 bp, Homo sapiens
  misc_feature (61)..(62): /note="This region represents a CpG dinucleotide"
  misc_feature (61)..(61): /note="Nucleotide may be methylated to form 5-methylcytosine"
ggaatttgtatattgctggtgggaatgtaatacggttcagccactgtgggaaacagttggcggttcctcaaatgactcaacacagcatcaccacaggacccagcaattccactcctaggtgt

SEQ ID NO: 4654 - DNA, 122 bp, Homo sapiens
  misc_feature (61)..(62): /note="This region represents a CpG dinucleotide"
  misc_feature (61)..(61): /note="Nucleotide may be methylated to form 5-methylcytosine"
gtcccatgggctccagaatcaagccagcttagccaggctgtgttgggtgactcagcggagcgcttgccatggagtcccttgctgtggccaccatggtctcgtgctgtgcctgccatcacctc

SEQ ID NO: 4655 - DNA, 122 bp, Homo sapiens
  misc_feature (61)..(62): /note="This region represents a CpG dinucleotide"
  misc_feature (61)..(61): /note="Nucleotide may be methylated to form 5-methylcytosine"
aggaaagctgtgggataaaagctgtattagattccagcccttctcctgcaaggagacaatcgccccaacaccataagcagcccattagagagagcacccgctatgtaccgggtcccaagaca

SEQ ID NO: 4656 - DNA, 122 bp, Homo sapiens
  misc_feature (61)..(62): /note="This region represents a CpG dinucleotide"
  misc_feature (61)..(61): /note="Nucleotide may be methylated to form 5-methylcytosine"
cacctctgtctccacaaatggcttgtttatctcactatttgctcacgtagctatttggcacgaggttcacagaccttgcctcctgacagtcagggtaccagccccacctaacatgggagggt

SEQ ID NO: 4657 - DNA, 122 bp, Homo sapiens
  misc_feature (61)..(62): /note="This region represents a CpG dinucleotide"
  misc_feature (61)..(61): /note="Nucleotide may be methylated to form 5-methylcytosine"
ttttcctgagaagtttaggaagagtactcgggtactcccaccactcggagtacccgagcccggcaagaggagctctcacttctagctctgcactgaggattgtaaatggccccggggagggg

SEQ ID NO: 4658 - DNA, 122 bp, Homo sapiens
  misc_feature (61)..(62): /note="This region represents a CpG dinucleotide"
  misc_feature (61)..(61): /note="Nucleotide may be methylated to form 5-methylcytosine"
cctgtcacacttctttaccatgtgcaaatagcctgggttatgaatctgtgctgcccagcccgcctctcactccacttctgttgagtgagtgagtacattcagatgtcgtgttggactgttcc

SEQ ID NO: 4659 - DNA, 122 bp, Homo sapiens
  misc_feature (61)..(62): /note="This region represents a CpG dinucleotide"
  misc_feature (61)..(61): /note="Nucleotide may be methylated to form 5-methylcytosine"
agtgctctcaagtcaaagcacccaaacccaagcctttaaaagttctttgtcattatgaaacgaagctgcccaggaaaagcactggtatgtgtcactggatgcgctcacagaagatccttgga

SEQ ID NO: 4660 - DNA, 122 bp, Homo sapiens
  misc_feature (61)..(62): /note="This region represents a CpG dinucleotide"
  misc_feature (61)..(61): /note="Nucleotide may be methylated to form 5-methylcytosine"
ttagtctcgtgtgacagtggctttaaagcatgtccacaaattctttgacttccccttttgcgaggtggagctcacttcccactgctgagtgtgggagctggctgcttctgatgaagagtggc

SEQ ID NO: 4661 - DNA, 122 bp, Homo sapiens
  misc_feature (61)..(62): /note="This region represents a CpG dinucleotide"
  misc_feature (61)..(61): /note="Nucleotide may be methylated to form 5-methylcytosine"
gtctcagtgcctttcaaacaaagggataagaatgagttgttaggctgctgtgtgcatagtcgcatagtcttatcataagacaaagtttaggaactgaaggttgtcgtttagcattcaactca

SEQ ID NO: 4662 - DNA, 122 bp, Homo sapiens
  misc_feature (61)..(62): /note="This region represents a CpG dinucleotide"
  misc_feature (61)..(61): /note="Nucleotide may be methylated to form 5-methylcytosine"
ggttctgggagagaagtgacggggtacgggtggtgtcctgccggtgtcaaagacgacttccggctcacctctgactcggtttcccccacagatggcttttccctgccgcaggtccctgactg

SEQ ID NO: 4663 - DNA, 122 bp, Homo sapiens
  misc_feature (61)..(62): /note="This region represents a CpG dinucleotide"
  misc_feature (61)..(61): /note="Nucleotide may be methylated to form 5-methylcytosine"
ctacctccgcgcgggcacttgattgtaacagaaagtagttccggcccatgttgtttcggccgaggagccgtcgccgccatttcaagaccgtactaggtagatggtcaattagagttcccagg

SEQ ID NO: 4664 - DNA, 122 bp, Homo sapiens
  misc_feature (61)..(62): /note="This region represents a CpG dinucleotide"
  misc_feature (61)..(61): /note="Nucleotide may be methylated to form 5-methylcytosine"
agggggttcaattcaagtaaagtggctgagagctcgaggatggctcagccacatgtgggacgccaaagtcctggaggtgccccatgcgtgtgatggctcccggaggttatcacggacaggac

SEQ ID NO: 4665 - DNA, 122 bp, Homo sapiens
  misc_feature (61)..(62): /note="This region represents a CpG dinucleotide"
  misc_feature (61)..(61): /note="Nucleotide may be methylated to form 5-methylcytosine"
ttctactttcctacttagccaagaagaggctccagacagccttgtgatcctgaagaaggacgtgataagtcatattgagtcatattctgcaggatgccaggaaggaacttgtctggttttct

SEQ ID NO: 4666 - DNA, 122 bp, Homo sapiens
  misc_feature (61)..(62): /note="This region represents a CpG dinucleotide"
  misc_feature (61)..(61): /note="Nucleotide may be methylated to form 5-methylcytosine"
gaggaggacgagggagtcataattacaattttcagccaggagaggatgatgctcgggtcccggagcctgtatcccaatggctgcgtgatttcccagacgcaccctcacaaattatttctaaa

SEQ ID NO: 4667 - DNA, 122 bp, Homo sapiens
  misc_feature (61)..(62): /note="This region represents a CpG dinucleotide"
  misc_feature (61)..(61): /note="Nucleotide may be methylated to form 5-methylcytosine"
agagaggtactagaatccttcagtagatgcctagatactgctgttctcttttgtaacagtcgctaagatacataaaattcagtgataaagtttagtggcacggttgattgtttttatttcag

SEQ ID NO: 4668 - DNA, 122 bp, Homo sapiens
  misc_feature (61)..(62): /note="This region represents a CpG dinucleotide"
  misc_feature (61)..(61): /note="Nucleotide may be methylated to form 5-methylcytosine"
ctgatctgagaaagggaaattttgtgctgggaagagttacgcgggaggaggaaggaaaggcgccaggaatgcctggaaggtatatgatgtctgaccttatgatctcttgcaacaatttctac

SEQ ID NO: 4669 - DNA, 122 bp, Homo sapiens
  misc_feature (61)..(62): /note="This region represents a CpG dinucleotide"
  misc_feature (61)..(61): /note="Nucleotide may be methylated to form 5-methylcytosine"
tctcccacaatttcactgcaacctattcttccttgtggtgcagtgatcttgcaataataacgatgtcactatttacattgtggtgccgtcttaaactgcaattaattcacagttccaggcta

SEQ ID NO: 4670 - DNA, 122 bp, Homo sapiens
  misc_feature (61)..(62): /note="This region represents a CpG dinucleotide"
  misc_feature (61)..(61): /note="Nucleotide may be methylated to form 5-methylcytosine"
caggaggtaaggagcaaaggcttaataacccaaacaagatgcacatgcaccttataatcccgtctacatgcagggaggaaggtaaagcagtaaactaggttactgtgttctgtgtatcaccc

SEQ ID NO: 4671 - DNA, 122 bp, Homo sapiens
  misc_feature (61)..(62): /note="This region represents a CpG dinucleotide"
  misc_feature (61)..(61): /note="Nucleotide may be methylated to form 5-methylcytosine"
cagtagcagcagccacatgcagacgggtggaaaacatgcccttcccttgtgcttcagccgcggtgatggcagcccacaacaaaggcacctgcaggccgtgaagtctgtctgggcatgtgaaa

SEQ ID NO: 4672 - DNA, 122 bp, Homo sapiens
  misc_feature (61)..(62): /note="This region represents a CpG dinucleotide"
  misc_feature (61)..(61): /note="Nucleotide may be methylated to form 5-methylcytosine"
gcaggatgtgggtgaatataaatctatatcgtggtgactcaaaatggcccattaagaactcgttggtcttggtcatatcagatgaggaagcattgagcatcttttggcctgtgtcatacaaa

SEQ ID NO: 4673 - DNA, 122 bp, Homo sapiens
  misc_feature (61)..(62): /note="This region represents a CpG dinucleotide"
  misc_feature (61)..(61): /note="Nucleotide may be methylated to form 5-methylcytosine"
caagctgccggctctggccctattggaggggtctcagtaacggagggcaggtgccagtctcgcgccctagttcgttcctctgctacaacgccaagttcgaggccacagtgccttctggaaga

SEQ ID NO: 4674 - DNA, 122 bp, Homo sapiens
  misc_feature (61)..(62): /note="This region represents a CpG dinucleotide"
  misc_feature (61)..(61): /note="Nucleotide may be methylated to form 5-methylcytosine"
tgggatttgctgaggtcagcaggtggcaccccaattaaatggcactcttgagccatcatccggaaggaatcatggtttctgcttggacttgaacttttctttaggttctccttcctggaggc

SEQ ID NO: 4675 - DNA, 122 bp, Homo sapiens
  misc_feature (61)..(62): /note="This region represents a CpG dinucleotide"
  misc_feature (61)..(61): /note="Nucleotide may be methylated to form 5-methylcytosine"
atattcacagagttgtgcaactatctgttgtgcaaccacaatctaattttagaatactttcgtcaccccacaaagaaaccttgtatccattagcggtcatttcccatgtaccccactccttt

SEQ ID NO: 4676 - DNA, 122 bp, Homo sapiens
  misc_feature (61)..(62): /note="This region represents a CpG dinucleotide"
  misc_feature (61)..(61): /note="Nucleotide may be methylated to form 5-methylcytosine"
gacagtttggcctccacaatgctggctcccagactcttctacactgggatttatggccaacgttttttaaatgaagagatttcatttggctttctggctcttcttgaaaaatcagagccgac

SEQ ID NO: 4677 - DNA, 122 bp, Homo sapiens
  misc_feature (61)..(62): /note="This region represents a CpG dinucleotide"
  misc_feature (61)..(61): /note="Nucleotide may be methylated to form 5-methylcytosine"
agttttgtgggcgcctcttccctcactgaggggctcttcttctctgcagggcatggctcacgccgcgttgtcaggctgcaagccactgcgagagctgctctgatccccaagcatgctctggc

SEQ ID NO: 4678 - DNA, 122 bp, Homo sapiens
  misc_feature (61)..(62): /note="This region represents a CpG dinucleotide"
  misc_feature (61)..(61): /note="Nucleotide may be methylated to form 5-methylcytosine"
cgttcaggcagaagttataccactgttggctgtgagttcagtgttaatgagtcaacaaaacgacacatgcagaaaaaggaagaggaaatttgccaatctgaacatgagttcactcaagtaag

SEQ ID NO: 4679 - DNA, 122 bp, Homo sapiens
  misc_feature (61)..(62): /note="This region represents a CpG dinucleotide"
  misc_feature (61)..(61): /note="Nucleotide may be methylated to form 5-methylcytosine"
ctgagaaacactgggaaccaaagacagtgatgctcaacaacagcgagactcagccaatggcgctggatctgcttttcaaaacctccatgaactgagttgcacatgactcacaagccacgtgc

SEQ ID NO: 4680 - DNA, 122 bp, Homo sapiens
  misc_feature (61)..(62): /note="This region represents a CpG dinucleotide"
  misc_feature (61)..(61): /note="Nucleotide may be methylated to form 5-methylcytosine"
atgggactgtcatcaccacggtgtttatcttaatctactttgttttcttacagatttcatcgtcacacaacatgtggtgatacattgttttgttttttgtttttttttttttggcttaccag

SEQ ID NO: 4681 - DNA, 122 bp, Homo sapiens
  misc_feature (61)..(62): /note="This region represents a CpG dinucleotide"
  misc_feature (61)..(61): /note="Nucleotide may be methylated to form 5-methylcytosine"
agaaataacatggtaaactttattaagattaggccactagggaaggactgtttgagataacggcatttaaactgataattaaaggagaagtagaaattagcaggtgaagaatgaaagactag

SEQ ID NO: 4682 - DNA, 122 bp, Homo sapiens
  misc_feature (61)..(62): /note="This region represents a CpG dinucleotide"
  misc_feature (61)..(61): /note="Nucleotide may be methylated to form 5-methylcytosine"
ctctactttgagcgttctgtttaatcacctccctccctgcagtgcctgtgagataaatagcgtcttattccttattattacatatttaaaatagccatatgaacttagtctatgactttgag

SEQ ID NO: 4683 - DNA, 122 bp, Homo sapiens
  misc_feature (61)..(62): /note="This region represents a CpG dinucleotide"
  misc_feature (61)..(61): /note="Nucleotide may be methylated to form 5-methylcytosine"
aaactgacaccatcttttctttctatttcatcgtgtagggagtagagtgttttgcacagacgccacaatatcagtttgtctagcaaacagaagagtatgtccagaagtggtgagaggctgca

SEQ ID NO: 4684 - DNA, 122 bp, Homo sapiens
  misc_feature (61)..(62): /note="This region represents a CpG dinucleotide"
  misc_feature (61)..(61): /note="Nucleotide may be methylated to form 5-methylcytosine"
ttcagaggaactgaattcaacagtcacatcttttcactacacatttactaagcctcttttcgaagccacgccaggttagataccatcccaattactaaggcatagtttatgctaatagagga

SEQ ID NO: 4685 - DNA, 122 bp, Homo sapiens
  misc_feature (61)..(62): /note="This region represents a CpG dinucleotide"
  misc_feature (61)..(61): /note="Nucleotide may be methylated to form 5-methylcytosine"
cctttggcaaataatcagcacccaattaattctgaatttcccattgtttgctccagctgtcgagctccttgcacgagcaaagaatgattgttcaatgttttccttgtaatgaactgtgagag

SEQ ID NO: 4686 - DNA, 122 bp, Homo sapiens
  misc_feature (61)..(62): /note="This region represents a CpG dinucleotide"
  misc_feature (61)..(61): /note="Nucleotide may be methylated to form 5-methylcytosine"
tggcccggctgcaggcatttgtttggaaggtgattccaggcagtcctgggaacggacacacggaaggagacgagctagtaatggagggtgggccgtggggtgaggaaggtgcccaaatttgc

SEQ ID NO: 4687 - DNA, 122 bp, Homo sapiens
  misc_feature (61)..(62): /note="This region represents a CpG dinucleotide"
  misc_feature (61)..(61): /note="Nucleotide may be methylated to form 5-methylcytosine"
aatttttctgccaattatttacatagtctgctgtttgtactgtggaatgcaaagcaactccggctactgcagcagtagctgtgacagcaatcaatcccataatgattttaaagtggcaacga

SEQ ID NO: 4688 - DNA, 122 bp, Homo sapiens
  misc_feature (61)..(62): /note="This region represents a CpG dinucleotide"
  misc_feature (61)..(61): /note="Nucleotide may be methylated to form 5-methylcytosine"
tctcatcttcatatctgaaagacagtgtactttttgtctccctaagccctgtgtctaggtcgtttgggaaacgccttggagagtcaagaataaatttgcaggtcaaacaatggatgactgga

SEQ ID NO: 4689 - DNA, 122 bp, Homo sapiens
  misc_feature (61)..(62): /note="This region represents a CpG dinucleotide"
  misc_feature (61)..(61): /note="Nucleotide may be methylated to form 5-methylcytosine"
cgccctcgtctcccgatccaattcacggcgggcaaaccaggcctggttcctaatgctcagcgaagggtttcaggtagtaatggaactcctcccgtgcttccagaagctgctgcagccggcgg

SEQ ID NO: 4690 - DNA, 122 bp, Homo sapiens
  misc_feature (61)..(62): /note="This region represents a CpG dinucleotide"
  misc_feature (61)..(61): /note="Nucleotide may be methylated to form 5-methylcytosine"
ctaaggatgtcattttgtgaccatgtatcctataaagagccatgaagcttgactacctcgcgcagataacccattgccaaacttttccttaccttcaaccgcctttccccacacctcagacc

SEQ ID NO: 4691 - DNA, 122 bp, Homo sapiens
  misc_feature (61)..(62): /note="This region represents a CpG dinucleotide"
  misc_feature (61)..(61): /note="Nucleotide may be methylated to form 5-methylcytosine"
ctcatcttacccacagggacagacagacataatgatcaattgagccctcatatgtaaaatcgctgtccaaatgtgaaggcttaataatggtgccataatatgaggtgatcctttctttcctc

SEQ ID NO: 4692 - DNA, 122 bp, Homo sapiens
  misc_feature (61)..(62): /note="This region represents a CpG dinucleotide"
  misc_feature (61)..(61): /note="Nucleotide may be methylated to form 5-methylcytosine"
aatgtgtggatccatcattgacctgttttgtttccagtgtggggctatcacacataaagccgctgtgagcactcatgtgcaagtctctttgtggacatctgctttcacttctcttgggtaaa

SEQ ID NO: 4693 - DNA, 122 bp, Homo sapiens
  misc_feature (61)..(62): /note="This region represents a CpG dinucleotide"
  misc_feature (61)..(61): /note="Nucleotide may be methylated to form 5-methylcytosine"
tgattggtctggcatttccggtattaaaatgataaaataaatggcattttctgagttttgcgtctgcccgcgggagcccccattcctcaggccgtggcccctgcactctccaggcaaggcgg

SEQ ID NO: 4694 - DNA, 122 bp, Homo sapiens
  misc_feature (61)..(62): /note="This region represents a CpG dinucleotide"
  misc_feature (61)..(61): /note="Nucleotide may be methylated to form 5-methylcytosine"
gtaatttccattctattatattacaattattaagtttataccatttatagtggttagtgccgtgcagatggagcaatgactaagacatcattcctgttctttaatgactcatagatcagagc

SEQ ID NO: 4695 - DNA, 122 bp, Homo sapiens
  misc_feature (61)..(62): /note="This region represents a CpG dinucleotide"
  misc_feature (61)..(61): /note="Nucleotide may be methylated to form 5-methylcytosine"
ttacatcacaaatgacatttttagtgctaattggtggtgtggagaagaccagatggctcccgggtgtcagcatagttgggccatagcgaatcctgcctgcctgcactgtggatctggctata

SEQ ID NO: 4696 - DNA, 122 bp, Homo sapiens
  misc_feature (61)..(62): /note="This region represents a CpG dinucleotide"
  misc_feature (61)..(61): /note="Nucleotide may be methylated to form 5-methylcytosine"
atcagattacaggcctcggctcatggtgtgtcccagcagtgcccagctcaccctcaacagcgactcagttccatggctctcaggttagagcccacaccctgtggtcgggacccatttggaag

SEQ ID NO: 4697 - DNA, 122 bp, Homo sapiens
  misc_feature (61)..(62): /note="This region represents a CpG dinucleotide"
  misc_feature (61)..(61): /note="Nucleotide may be methylated to form 5-methylcytosine"
gagagcctcccaggttcccccactcatagcttgtctccccggtctccaacaccaagctaccgctccacccctgacttcccatctggtgagtgagtctcctggtctaaacagcagaggggagg

SEQ ID NO: 4698 - DNA, 122 bp, Homo sapiens
  misc_feature (61)..(62): /note="This region represents a CpG dinucleotide"
  misc_feature (61)..(61): /note="Nucleotide may be methylated to form 5-methylcytosine"
agcctggctaaacagcaataagccgtgaagaggattctggatgttgtagtccgggagctccgagaattttgtcacactctccgtaaccctctctcactcgctcgctccgtttttttttttgt

SEQ ID NO: 4699 - DNA, 122 bp, Homo sapiens
  misc_feature (61)..(62): /note="This region represents a CpG dinucleotide"
  misc_feature (61)..(61): /note="Nucleotide may be methylated to form 5-methylcytosine"
gggattataggcgtgagccaccgtgaccagcctaatgcagggtttatggaggcttcattacgtatagatgattaaatcattggccactggtgactgagctcgatctccagcctctctccctt

SEQ ID NO: 4700 - DNA, 122 bp, Homo sapiens
  misc_feature (61)..(62): /note="This region represents a CpG dinucleotide"
  misc_feature (61)..(61): /note="Nucleotide may be methylated to form 5-methylcytosine"
cggagcccaaaatatcagtgctcagaaagatttggacctaactggcatgcaatgcaagcccggagcttagttcattcactcctttgtccattgtggaattatctaatgacaagagggatgtg

SEQ ID NO: 4701 - DNA, 122 bp, Homo sapiens
  misc_feature (61)..(62): /note="This region represents a CpG dinucleotide"
  misc_feature (61)..(61): /note="Nucleotide may be methylated to form 5-methylcytosine"
tctacatgtcacatgagaataaaataatgcctatctcacagggttctggagaatattaagcgagataccttaaacttaatgactagcacaaagaaggtgaccactaaaatagagttcttact

SEQ ID NO: 4702 - DNA, 122 bp, Homo sapiens
  misc_feature (61)..(62): /note="This region represents a CpG dinucleotide"
  misc_feature (61)..(61): /note="Nucleotide may be methylated to form 5-methylcytosine"
acacacaaactaactcaatctctgctttaagtttctattgtccaatttttctgatttatacgagaattattttcagctttagaaaatcctggtctttggtcattagaagtttattattatgg

SEQ ID NO: 4703 - DNA, 122 bp, Homo sapiens
  misc_feature (61)..(62): /note="This region represents a CpG dinucleotide"
  misc_feature (61)..(61): /note="Nucleotide may be methylated to form 5-methylcytosine"
cgctgggcagctctgcaccggcatcgccgcatctctccccattgtgccgggaccacgggacggtagtcaagggaaaatcctgactcagggtgtggggttcatgaatgagaagagctttgggc

SEQ ID NO: 4704 - DNA, 122 bp, Homo sapiens
  misc_feature (61)..(62): /note="This region represents a CpG dinucleotide"
  misc_feature (61)..(61): /note="Nucleotide may be methylated to form 5-methylcytosine"
ggtttcccatccctgaacagattgcacaatgtggggaggatcagagggcagggatctagacgtcaggccaactgagagctgacagggaagagagagctagctagtatagacatagacatgag

SEQ ID NO: 4705 - DNA, 122 bp, Homo sapiens
  misc_feature (61)..(62): /note="This region represents a CpG dinucleotide"
  misc_feature (61)..(61): /note="Nucleotide may be methylated to form 5-methylcytosine"
ggaaccttctaaaagtacagattctggagctccaagtcagacctagaaaatcagtatctccgggggtggggagaagagaaaaggaatcttgtatttttaaaaagcaacaaaaaacagcctca

SEQ ID NO: 4706 - DNA, 122 bp, Homo sapiens
  misc_feature (61)..(62): /note="This region represents a CpG dinucleotide"
  misc_feature (61)..(61): /note="Nucleotide may be methylated to form 5-methylcytosine"
gataatcttttgtagatccctttgtcacttgtaaataccttctcttttactgccataagtcgtttacatgtcagttaaaaaaggtatcctattttagcatctgaataacatttactcttcat

SEQ ID NO: 4707 - DNA, 122 bp, Homo sapiens
  misc_feature (61)..(62): /note="This region represents a CpG dinucleotide"
  misc_feature (61)..(61): /note="Nucleotide may be methylated to form 5-methylcytosine"
tgaaataacttcttgtctggaagtcccaactaattgataggaagtcacaaacaggccactcgtgcaatcagggttatttgtcatggaaaagccacaggggaaaggtgatggcaaggaggctg

SEQ ID NO: 4708 - DNA, 122 bp, Homo sapiens
  misc_feature (61)..(62): /note="This region represents a CpG dinucleotide"
  misc_feature (61)..(61): /note="Nucleotide may be methylated to form 5-methylcytosine"
gtctgttgaattacaactagtgcagttccttatgtcaataaattcactgaacgctcgatgcggaagccatatttctgaacgagagaagaccaaaatttgtcatttaattaattaagggatta

SEQ ID NO: 4709 - DNA, 122 bp, Homo sapiens
  misc_feature (61)..(62): /note="This region represents a CpG dinucleotide"
  misc_feature (61)..(61): /note="Nucleotide may be methylated to form 5-methylcytosine"
ggagagcggttcggctcaacccccttctccagggccagttccaccaggctgcaggggccgcgctctgggcttgcagctgtaggggaagcacagttcgcttactttgtatttttcttgggagc

SEQ ID NO: 4710 - DNA, 122 bp, Homo sapiens
  misc_feature (61)..(62): /note="This region represents a CpG dinucleotide"
  misc_feature (61)..(61): /note="Nucleotide may be methylated to form 5-methylcytosine"
aatttgccgagcggtaaccttaccaaggactgggaagcagggttttcacctactgacccccgtccctcctcggttgagggtcgcccttggggtgttcaatccctagcgtttagaggtgggag

SEQ ID NO: 4711 - DNA, 122 bp, Homo sapiens
  misc_feature (61)..(62): /note="This region represents a CpG dinucleotide"
  misc_feature (61)..(61): /note="Nucleotide may be methylated to form 5-methylcytosine"
ctcctgacctcaagtgatccatctgccttggcctcccaaagtgctgggattacaggcatgcgccactgcgcttggccatatgtttatgttttgtagagacagagatttgccatgttgcccag

SEQ ID NO: 4712 - DNA, 122 bp, Homo sapiens
  misc_feature (61)..(62): /note="This region represents a CpG dinucleotide"
  misc_feature (61)..(61): /note="Nucleotide may be methylated to form 5-methylcytosine"
catctcctctctccccaaccatgcctctcctgccccattctgcgtgtgtcactccagccccgccctctgaccaggtcgccccgtctcgccccacccaggccacagcacagatggagggccgt

SEQ ID NO: 4713 - DNA, 122 bp, Homo sapiens
  misc_feature (61)..(62): /note="This region represents a CpG dinucleotide"
  misc_feature (61)..(61): /note="Nucleotide may be methylated to form 5-methylcytosine"
tcatccatttttcttctccaggataccagagatgctgttatatacatgaaaacagtcaatcgaccctgggactggcattgtagatgcctgcagctgcagcatcagcaacagggagcactgcg

SEQ ID NO: 4714 - DNA, 122 bp, Homo sapiens
  misc_feature (61)..(62): /note="This region represents a CpG dinucleotide"
  misc_feature (61)..(61): /note="Nucleotide may be methylated to form 5-methylcytosine"
atggtattccaaaacctacagaagtcatgggcttaccacagtttccaatttggtagcaaacgagactctttgaactgtgagcataagggtttgtttttgttgttgttttgtttttgagacag

SEQ ID NO: 4715 - DNA, 122 bp, Homo sapiens
  misc_feature (61)..(62): /note="This region represents a CpG dinucleotide"
  misc_feature (61)..(61): /note="Nucleotide may be methylated to form 5-methylcytosine"
gaaggggaggtcgcgtgacttgtgggatctgtgggcaaagaaactgtgaggctggactttcgcccagggcagacaggaagcctgcttctgaatcctcgagttagcatacgcatcagccattc

SEQ ID NO: 4716 - DNA, 122 bp, Homo sapiens
  misc_feature (61)..(62): /note="This region represents a CpG dinucleotide"
  misc_feature (61)..(61): /note="Nucleotide may be methylated to form 5-methylcytosine"
tttttcctggcttgttattttgtacatttcttattcttcctgttttagatggccctgattcgtctcttctagggactcttgaagatggggacccaagtggttatgagattcaataactcctt

SEQ ID NO: 4717 - DNA, 122 bp, Homo sapiens
  misc_feature (61)..(62): /note="This region represents a CpG dinucleotide"
  misc_feature (61)..(61): /note="Nucleotide may be methylated to form 5-methylcytosine"
aagccagccaattaaggaactggctctgggggtaaaggtgcctacatcttcatcctcagccgaggagttattaatggaggctgtgctacaaaagaaaaagaccgtgtggcaagatgggaagg

SEQ ID NO: 4718 - DNA, 122 bp, Homo sapiens
  misc_feature (61)..(62): /note="This region represents a CpG dinucleotide"
  misc_feature (61)..(61): /note="Nucleotide may be methylated to form 5-methylcytosine"
ctttgacctacttctcacttggtgttctctgtccagtttcactctcgtgtttagagtcagcgcctccatctccactcacagcacctgcttgctgcacagcctgcgtggtcctcgggaacact

SEQ ID NO: 4719 - DNA, 122 bp, Homo sapiens
  misc_feature (61)..(62): /note="This region represents a CpG dinucleotide"
  misc_feature (61)..(61): /note="Nucleotide may be methylated to form 5-methylcytosine"
ccgcccctccaccaggcacatgtgtcggtgtgtgtctgtgtctgcgtgtctgcgtgtctgcggctggcagcccttcctctccagggcgtgactagacatcctgcctctcctgtctcagccac

SEQ ID NO: 4720 - DNA, 122 bp, Homo sapiens
  misc_feature (61)..(62): /note="This region represents a CpG dinucleotide"
  misc_feature (61)..(61): /note="Nucleotide may be methylated to form 5-methylcytosine"
caaaaaaaaaaaaaaaccacctgtcgggctgtggttgggtgtatgacgtgtcttggtccacgtcagttcctggggaatctctgcttccctttctgtgctcccctttcccatgggcccccgcc

SEQ ID NO: 4721 - DNA, 122 bp, Homo sapiens
  misc_feature (61)..(62): /note="This region represents a CpG dinucleotide"
  misc_feature (61)..(61): /note="Nucleotide may be methylated to form 5-methylcytosine"
gtgtaagagattttccatttttaaacaaaccatagaaaaaatcttctacactcattgtaccgtcaggatcaagattatggaatacttcctcgagcatctagaaaagagtcatcacatatttt

SEQ ID NO: 4722 - DNA, 122 bp, Homo sapiens
  misc_feature (61)..(62): /note="This region represents a CpG dinucleotide"
  misc_feature (61)..(61): /note="Nucleotide may be methylated to form 5-methylcytosine"
gtcttttcagccctgtgcactgtaacaccctgccacaccatattgcaacatcctgtggaacggcagcatattctgagaacctcaggccagaatctggtttgctgctgtcagagcttggctat

SEQ ID NO: 4723 - DNA, 122 bp, Homo sapiens
  misc_feature (61)..(62): /note="This region represents a CpG dinucleotide"
  misc_feature (61)..(61): /note="Nucleotide may be methylated to form 5-methylcytosine"
cacacagagatatagacatagatacatatgtacacacatatatctaaccttctacctagtcgtgaattcaatagaatattaagagccagagaaaatattttaaaagtatctttaatgacatg

SEQ ID NO: 4724 - DNA, 122 bp, Homo sapiens
  misc_feature (61)..(62): /note="This region represents a CpG dinucleotide"
  misc_feature (61)..(61): /note="Nucleotide may be methylated to form 5-methylcytosine"
tgtaagccaacttcggcgcagcagtggagggtcctggcttggcgtgggggatgctggacccgcggtcgaggatttggggatataggggaagagggaggaggtggatgctgagccttgtatgc

SEQ ID NO: 4725 - DNA, 122 bp, Homo sapiens
  misc_feature (61)..(62): /note="This region represents a CpG dinucleotide"
  misc_feature (61)..(61): /note="Nucleotide may be methylated to form 5-methylcytosine"
atactagaacagtctttaaaaatgtgttttgattcaacaaattggtttaaatttcacaaacgttatgcttgaccccaaagatccataccttgcaaattcattttcaggtactccaatcaaag

SEQ ID NO: 4726 - DNA, 122 bp, Homo sapiens
  misc_feature (61)..(62): /note="This region represents a CpG dinucleotide"
  misc_feature (61)..(61): /note="Nucleotide may be methylated to form 5-methylcytosine"
agaggtgattgtgtcatgagggctccacccttatgaatgggatcagcaccctgataaaagcgcttaagtttgaagggaaagggctctttcttgcccttccacgttccaccatgtgagggcac

SEQ ID NO: 4727 - DNA, 122 bp, Homo sapiens
  misc_feature (61)..(62): /note="This region represents a CpG dinucleotide"
  misc_feature (61)..(61): /note="Nucleotide may be methylated to form 5-methylcytosine"
aactccacactgctgaaactgctttctacctgctagtccttgtcttacttgacttttcctcgacggaccttttttcccttggctttgtgagaccatgggaatccttttttctctgcaaacat

SEQ ID NO: 4728 - DNA, 122 bp, Homo sapiens
  misc_feature (61)..(62): /note="This region represents a CpG dinucleotide"
  misc_feature (61)..(61): /note="Nucleotide may be methylated to form 5-methylcytosine"
gaggagaagcgcagagtcagccgcagacgggagggcgatggcctaacccggacgccagcgcggtttgctcagccctagggccgggcgctttcccgctccctgaccgcctcctgttcctccgc

SEQ ID NO: 4729 - DNA, 122 bp, Homo sapiens
  misc_feature (61)..(62): /note="This region represents a CpG dinucleotide"
  misc_feature (61)..(61): /note="Nucleotide may be methylated to form 5-methylcytosine"
ctccaggtgtctgagcagccacctagtgcagtgacccatcggggcttcccttgtggcctccgcggtccagaacctctcccaggtgtgatggatcctccaagccgctctttgagccgctgtcc

SEQ ID NO: 4730 - DNA, 122 bp, Homo sapiens
  misc_feature (61)..(62): /note="This region represents a CpG dinucleotide"
  misc_feature (61)..(61): /note="Nucleotide may be methylated to form 5-methylcytosine"
aaccacaaggggctcatccaagagcaaagacatgcctgaaagcagaaaatccaaaatagccgctgacagtctatgtatgtcaccagtctcacccctgagaatcaagagccctcaaacattct

SEQ ID NO: 4731 - DNA, 122 bp, Homo sapiens
  misc_feature (61)..(62): /note="This region represents a CpG dinucleotide"
  misc_feature (61)..(61): /note="Nucleotide may be methylated to form 5-methylcytosine"
ctcttatgtgtagtctctatctccccctcttctagcacttgtcacagtgtgttgtaactgcgtggttgcttggattttccccctgtcctggaaacacagcctagggtgcttactgccaagct

SEQ ID NO: 4732 - DNA, 122 bp, Homo sapiens
  misc_feature (61)..(62): /note="This region represents a CpG dinucleotide"
  misc_feature (61)..(61): /note="Nucleotide may be methylated to form 5-methylcytosine"
gagtgtagcaagggaaggagatcagctacagaagagattagagaagtcaacagggtttagcgatgcaacatcccttaggctatgaaaagagatcaatgtttgtagcaggattttattttgag

SEQ ID NO: 4733 - DNA, 122 bp, Homo sapiens
  misc_feature (61)..(62): /note="This region represents a CpG dinucleotide"
  misc_feature (61)..(61): /note="Nucleotide may be methylated to form 5-methylcytosine"
aacctcaaatgtgattccttttcttgttctttctggaagtttttagtatcttctcttcatcgttagttctgaaactgtacatgacgtgtcttgtgactacactttcactggactcaggatag

SEQ ID NO: 4734 - DNA, 122 bp, Homo sapiens
  misc_feature (61)..(62): /note="This region represents a CpG dinucleotide"
  misc_feature (61)..(61): /note="Nucleotide may be methylated to form 5-methylcytosine"
acaggcagcttttaaagccttaaagcgaactctacaactgatagctcctctgcatgatatcgtggcctaccttgtcagttttgctaagcttggcaattgtccagcatgttttgaatttcctc

SEQ ID NO: 4735 - DNA, 122 bp, Homo sapiens
  misc_feature (61)..(62): /note="This region represents a CpG dinucleotide"
  misc_feature (61)..(61): /note="Nucleotide may be methylated to form 5-methylcytosine"
ttcaagtgaagttaccattgaaaatcaaacaatacctgtccagtgttgtaaattaaatatcgtgtagtttgatatcatatacctgcctttccatatcagcctttcattaattataagtacaa

SEQ ID NO: 4736 - DNA, 122 bp, Homo sapiens
  misc_feature (61)..(62): /note="This region represents a CpG dinucleotide"
  misc_feature (61)..(61): /note="Nucleotide may be methylated to form 5-methylcytosine"
agacatctccaagggaaggtcaagggcctggaggatgtgcggacctgacgacagatgccccgcacgctggccgggaccgggaagggcggtcaagtgtggaaagggtctggcggctgccaggc

SEQ ID NO: 4737 - DNA, 122 bp, Homo sapiens
  misc_feature (61)..(62): /note="This region represents a CpG dinucleotide"
  misc_feature (61)..(61): /note="Nucleotide may be methylated to form 5-methylcytosine"
gttgaatttctcaataagtgcaagggataccaggtaaccagaataaagctactttgtaaccgttacctctaacattacaatagctaaatgttgatagcaaaaaaggagaaataggaatgaaa

SEQ ID NO: 4738 - DNA, 122 bp, Homo sapiens
  misc_feature (61)..(62): /note="This region represents a CpG dinucleotide"
  misc_feature (61)..(61): /note="Nucleotide may be methylated to form 5-methylcytosine"
catcaaacaccaagtggaattctgagggagggattctttcatattgaaatataaaataaacgttttgtccttagggtttcattagatggtacaagatctgtaaggtaatgagctcatccatt

SEQ ID NO: 4739 - DNA, 122 bp, Homo sapiens
  misc_feature (61)..(62): /note="This region represents a CpG dinucleotide"
  misc_feature (61)..(61): /note="Nucleotide may be methylated to form 5-methylcytosine"
aggcggagggaagggagacagcagagggtagaggctgactgtccgaaacctcccatgacccgtgacccgtgacccaagaagtgcggctccggcgtcgcggggattcactcacaagcagccca

SEQ ID NO: 4740 - DNA, 122 bp, Homo sapiens
  misc_feature (61)..(62): /note="This region represents a CpG dinucleotide"
  misc_feature (61)..(61): /note="Nucleotide may be methylated to form 5-methylcytosine"
aagggttcactcaaaaatttgtgtatgatataggttcattatgctttgggatctaaaccccgaagaagacagaagcatgaccatctgtcatgactcatctaaagcatagatcacagaatggc

SEQ ID NO: 4741 - DNA, 122 bp, Homo sapiens
  misc_feature (61)..(62): /note="This region represents a CpG dinucleotide"
  misc_feature (61)..(61): /note="Nucleotide may be methylated to form 5-methylcytosine"
tctgtatgtgtccctaaatacagcaatgaggcacagtgagcactgagactgaagtttcctcgtctcctagtgcagccccattactggatgagtgctggcacactgtaggcactcaatagata

SEQ ID NO: 4742 - DNA, 122 bp, Homo sapiens
  misc_feature (61)..(62): /note="This region represents a CpG dinucleotide"
  misc_feature (61)..(61): /note="Nucleotide may be methylated to form 5-methylcytosine"
atgttaactataacgtaataccaaagaattcagtttacttttctcgcatgcaagctgtttcgaaatctgagatattgagataaacagatccttaatagttataaggtgtacacatcttgtac

SEQ ID NO: 4743 - DNA, 122 bp, Homo sapiens
  misc_feature (61)..(62): /note="This region represents a CpG dinucleotide"
  misc_feature (61)..(61): /note="Nucleotide may be methylated to form 5-methylcytosine"
agctatggtttccatggtagagtagaagcatccaccatgtgtgacattcagcagatggggcgctgtgggtggcttggagcactctggttgtaactgaggcaggcacagtgtttaggaagcct

SEQ ID NO: 4744 - DNA, 122 bp, Homo sapiens
  misc_feature (61)..(62): /note="This region represents a CpG dinucleotide"
  misc_feature (61)..(61): /note="Nucleotide may be methylated to form 5-methylcytosine"
gatttctcattgttccacaagagcctgtacagaacagaacaagaattctttagtctctctcgtgcagcattaataatgcctcttatctcttatgacattgacctataaataaatgggagtta

SEQ ID NO: 4745 - DNA, 122 bp, Homo sapiens
  misc_feature (61)..(62): /note="This region represents a CpG dinucleotide"
  misc_feature (61)..(61): /note="Nucleotide may be methylated to form 5-methylcytosine"
tcactaggtgccttcctggaggcctttctgctgccagcagtcttgggtttgggagctgcccgtagaatacaatggagttcctgaagatgatgtggcagtcatcgaaattccactccagccag

SEQ ID NO: 4746 - DNA, 122 bp, Homo sapiens
  misc_feature (61)..(62): /note="This region represents a CpG dinucleotide"
  misc_feature (61)..(61): /note="Nucleotide may be methylated to form 5-methylcytosine"
tacttatgttgtgctacaattgcctacagtattcagtatagcaacatgccatacaggttccgcaagttactgcagagcaataggctccagcacgtggcctaggtgtgtagtaggcataccat

SEQ ID NO: 4747 - DNA, 122 bp, Homo sapiens
  misc_feature (61)..(62): /note="This region represents a CpG dinucleotide"
  misc_feature (61)..(61): /note="Nucleotide may be methylated to form 5-methylcytosine"
atgtggggagagagagagagagagagagaatgaatcagcccccacacatatagaagctgacgagtcccaaggtctccagttagcaggctagagacccaggaagaactgatgttttagttcaa

SEQ ID NO: 4748 - DNA, 122 bp, Homo sapiens
  misc_feature (61)..(62): /note="This region represents a CpG dinucleotide"
  misc_feature (61)..(61): /note="Nucleotide may be methylated to form 5-methylcytosine"
aaccacccacagggaaaaggaagagaaaccacttcccacagctggggctttcctcatttccgaagctacagaagaatgatcatagtactcagaggaagcactgctggcctggaggtcatttg

SEQ ID NO: 4749 - DNA, 122 bp, Homo sapiens
  misc_feature (61)..(62): /note="This region represents a CpG dinucleotide"
  misc_feature (61)..(61): /note="Nucleotide may be methylated to form 5-methylcytosine"
tagcctcattttccacatgagaagggtttagtaagggtttagtaagagaagggtttagtacgttgctcaaggcctcagaggcaggaaatactggaaccaagattcttaccaggcagtctaaa

SEQ ID NO: 4750 - DNA, 122 bp, Homo sapiens
  misc_feature (61)..(62): /note="This region represents a CpG dinucleotide"
  misc_feature (61)..(61): /note="Nucleotide may be methylated to form 5-methylcytosine"
gaaaactacaattttagttagatttactatgccatctttactcatttgttcactcccattcgttcatttttcaagttaatgggtgctggaaacctgagtcatccttgacatgtccctttcat

SEQ ID NO: 4751 - DNA, 122 bp, Homo sapiens
  misc_feature (61)..(62): /note="This region represents a CpG dinucleotide"
  misc_feature (61)..(61): /note="Nucleotide may be methylated to form 5-methylcytosine"
agactatctcctttgtagcagagtgaacttgagtcacaacccgaagtcatcctggtgaagcggcttcatttgtctggggtaatacccgaggttagttgtctcatgccaaggaaatcgaggat

SEQ ID NO: 4752 - DNA, 122 bp, Homo sapiens
  misc_feature (61)..(62): /note="This region represents a CpG dinucleotide"
  misc_feature (61)..(61): /note="Nucleotide may be methylated to form 5-methylcytosine"
cagcaggtggcctctcaatggctgaaacttccaaggtatctgcagtcagtctgctaacaccgtttttctcccctgctgctgcagcaagacagagaatgggtttgtaacaggggacaagataa

SEQ ID NO: 4753 - DNA, 122 bp, Homo sapiens
  misc_feature (61)..(62): /note="This region represents a CpG dinucleotide"
  misc_feature (61)..(61): /note="Nucleotide may be methylated to form 5-methylcytosine"
gaacttgacctccttccctgatgagtatgcagaatctccccagctataaaatagcatggccgtccctaccccaccccccatgcacctccggacttggagacattggaaggtttacttcagca

SEQ ID NO: 4754 - DNA, 122 bp, Homo sapiens
  misc_feature (61)..(62): /note="This region represents a CpG dinucleotide"
  misc_feature (61)..(61): /note="Nucleotide may be methylated to form 5-methylcytosine"
ggatcattcataccttgaaccctagcctacctgagtaccaaaactataattcccctgccacgtagcgtgatcacttgggaaggccaaagtcttaaaagatagagaaaaacatgcattttaat

SEQ ID NO: 4755 - DNA, 122 bp, Homo sapiens
  misc_feature (61)..(62): /note="This region represents a CpG dinucleotide"
  misc_feature (61)..(61): /note="Nucleotide may be methylated to form 5-methylcytosine"
aacaaaaacatcccctgactcccctaccctcaaaccaaaaacaaacaagacaaactctagcggaattgagaatatctgatatgtctgttgatctcaaggatagtgaatagttcacaagcaat

SEQ ID NO: 4756 - DNA, 122 bp, Homo sapiens
  misc_feature (61)..(62): /note="This region represents a CpG dinucleotide"
  misc_feature (61)..(61): /note="Nucleotide may be methylated to form 5-methylcytosine"
aattcattgtatggaaaaattagaaatctggtattatgaaatacccgaactgaaaaggctcgacaacaataaacttcccagaagggtaacaccagctcccagcgtgcgccaggtcctctccg

SEQ ID NO: 4757 - DNA, 122 bp, Homo sapiens
  misc_feature (61)..(62): /note="This region represents a CpG dinucleotide"
  misc_feature (61)..(61): /note="Nucleotide may be methylated to form 5-methylcytosine"
tattttgaatgtctggtgcacaggaaggaaccgataaaaatagaattacaatgcccttaccgccaaagtagcaaaggagctgattaagattgatgtctgaataaatatacaatagcaggccc

SEQ ID NO: 4758 - DNA, 122 bp, Homo sapiens
  misc_feature (61)..(62): /note="This region represents a CpG dinucleotide"
  misc_feature (61)..(61): /note="Nucleotide may be methylated to form 5-methylcytosine"
agacctcattttcaattctctgcacttgtcttttataaacacaggaaggtgggatgaagacggcattattgacaattattttttgagcatgtatgtgggcagggcactgaccacatcatcaa

SEQ ID NO: 4759 - DNA, 122 bp, Homo sapiens
  misc_feature (61)..(62): /note="This region represents a CpG dinucleotide"
  misc_feature (61)..(61): /note="Nucleotide may be methylated to form 5-methylcytosine"
gagctgctgctgtaacgctctaacgttagagcagctaacggctctgctcagaatttctcccgacagaggccggagtgttcaagagcttggcgatacagaaatttctgctggtgttggggcgg

SEQ ID NO: 4760 - DNA, 122 bp, Homo sapiens
  misc_feature (61)..(62): /note="This region represents a CpG dinucleotide"
  misc_feature (61)..(61): /note="Nucleotide may be methylated to form 5-methylcytosine"
acaaacaaaatcaactcaccaagaccatggcattgtagtaacaaaagtgtttaattgacacgaggctggtcactccccataggaaatggggttattactcactcagatcaatctccctgaag

SEQ ID NO: 4761 - DNA, 122 bp, Homo sapiens
  misc_feature (61)..(62): /note="This region represents a CpG dinucleotide"
  misc_feature (61)..(61): /note="Nucleotide may be methylated to form 5-methylcytosine"
agagctgaaaacagcacagaaggctgtctcttcccttttccccacacccctacctgtgtccgagcattgagcagctgctggaagctctcaacctctttgctgtcatctgcagcccgctccta

SEQ ID NO: 4762 - DNA, 122 bp, Homo sapiens
  misc_feature (61)..(62): /note="This region represents a CpG dinucleotide"
  misc_feature (61)..(61): /note="Nucleotide may be methylated to form 5-methylcytosine"
gcatgaaagggagacacgggcaaggacataagctcatttccttctggggcttgaggagttcgtcaacaacattttagtgattcagtaatgagttgctggttccctagaggcgaaacaggtct

SEQ ID NO: 4763 - DNA, 122 bp, Homo sapiens
  misc_feature (61)..(62): /note="This region represents a CpG dinucleotide"
  misc_feature (61)..(61): /note="Nucleotide may be methylated to form 5-methylcytosine"
attgctcttatctgatccaagttcagattttttttacatttgctaatgcacttgaataatcgggagagaaaatctgcctgtaattttaataggaaactgtctatattgactatacttttata

SEQ ID NO: 4764 - DNA, 122 bp, Homo sapiens
  misc_feature (61)..(62): /note="This region represents a CpG dinucleotide"
  misc_feature (61)..(61): /note="Nucleotide may be methylated to form 5-methylcytosine"
ggagaacatccctccgtgtagaccccagctcttccctccccctctcctctggggcttcagcgggtccggagctcatgaataaagctaatattggaactagtcgtatactagttggagagggg

SEQ ID NO: 4765 - DNA, 122 bp, Homo sapiens
  misc_feature (61)..(62): /note="This region represents a CpG dinucleotide"
  misc_feature (61)..(61): /note="Nucleotide may be methylated to form 5-methylcytosine"
aggaactaaacatgcaaggcttctgctttctctcgtctctctcttaccccttagagaagccgctggctgaactaaaaataagtcacttaaactaagttgttaaagagtcatcgtactcaatt

SEQ ID NO: 4766 - DNA, 122 bp, Homo sapiens
  misc_feature (61)..(62): /note="This region represents a CpG dinucleotide"
  misc_feature (61)..(61): /note="Nucleotide may be methylated to form 5-methylcytosine"
tatgtcataaggaaataatcagacaagtgttcaaagatgtatttacaagaatgttcatctcgttgtttataataacaaatattggaatgaaccaaatgcctaggagaaatgattaagcaaaa

SEQ ID NO: 4767 - DNA, 122 bp, Homo sapiens
  misc_feature (61)..(62): /note="This region represents a CpG dinucleotide"
  misc_feature (61)..(61): /note="Nucleotide may be methylated to form 5-methylcytosine"
atatgatagtattatgatatatgtagcatatagaatgtctgaaccgaggccaaacttagacgaaagaatgctttggcaggcctaacgtttggcacacattccaacatgattgtaaaatattt

SEQ ID NO: 4768 - DNA, 122 bp, Homo sapiens
  misc_feature (61)..(62): /note="This region represents a CpG dinucleotide"
  misc_feature (61)..(61): /note="Nucleotide may be methylated to form 5-methylcytosine"
ctgaaaggagccctggctatactatttcaagtcactacaatacagttgtaatttgtgcttcggccttattggcgtgcttttacattcccctattcataaaacagtgataatcaccagagcaa

SEQ ID NO: 4769 - DNA, 122 bp, Homo sapiens
  misc_feature (61)..(62): /note="This region represents a CpG dinucleotide"
  misc_feature (61)..(61): /note="Nucleotide may be methylated to form 5-methylcytosine"
tgtttgtgtcttcaacatctggtacagtgcctggcacagtgtttctcaaatgactagatccgttaatgagcatgctattacactgaaatttagtagtgacaaatttatctaattgtacatcc

SEQ ID NO: 4770 - DNA, 122 bp, Homo sapiens
  misc_feature (61)..(62): /note="This region represents a CpG dinucleotide"
  misc_feature (61)..(61): /note="Nucleotide may be methylated to form 5-methylcytosine"
aagtaggaaaaaagtgcatgtgacgcccagaggactctccacagtgtatattcccaaatacgtaatgtctagtttcctacttttagaatagtatggttttaagcagaaaaaaaaaaaagaaa

SEQ ID NO: 4771 - DNA, 122 bp, Homo sapiens
  misc_feature (61)..(62): /note="This region represents a CpG dinucleotide"
  misc_feature (61)..(61): /note="Nucleotide may be methylated to form 5-methylcytosine"
agaaaggcaacttagaacatctcagaaatcaaagaaccttcagctactctagacagatgccggacatgtgagtagaaggaaagagcaaacagtgtcttgcttttcttagcagctgaaatgca

SEQ ID NO: 4772 - DNA, 122 bp, Homo sapiens
  misc_feature (61)..(62): /note="This region represents a CpG dinucleotide"
  misc_feature (61)..(61): /note="Nucleotide may be methylated to form 5-methylcytosine"
gcgacgccagttgtacttgtcattgcaattgcaaaatttaattaaatgttatgaaaactacgcgtctgaaaaggaagagctgctgttctgttaaaactaggctgaaacactttggaaccatt

SEQ ID NO: 4773 - DNA, 122 bp, Homo sapiens
  misc_feature (61)..(62): /note="This region represents a CpG dinucleotide"
  misc_feature (61)..(61): /note="Nucleotide may be methylated to form 5-methylcytosine"
cacagctgaaagccagcagagccaaggacctgagtggctttcttggaactgatagcttcgcgctagacaaaagtgaatgagaatatgaaccaggtataaaaagcacgagccgggtgcagtgg

SEQ ID NO: 4774 - DNA, 122 bp, Homo sapiens
  misc_feature (61)..(62): /note="This region represents a CpG dinucleotide"
  misc_feature (61)..(61): /note="Nucleotide may be methylated to form 5-methylcytosine"
gcaagtcatcaatggggtatggagattttccaggtgggtgtggttgaaggcagggaagaacgagtttaggagcacattacaagaggaaggtaactgttaagtccaggctgagcaggaatgta

SEQ ID NO: 4775 - DNA, 122 bp, Homo sapiens
  misc_feature (61)..(62): /note="This region represents a CpG dinucleotide"
  misc_feature (61)..(61): /note="Nucleotide may be methylated to form 5-methylcytosine"
tctacttaccatgcttgatttgtatttaccaaagagagctagaaatcctgagactagctgcgaagatccaaccagcttgttgcttttatgaccttggcttttactgttgaattacaaaaggt

SEQ ID NO: 4776 - DNA, 122 bp, Homo sapiens
  misc_feature (61)..(62): /note="This region represents a CpG dinucleotide"
  misc_feature (61)..(61): /note="Nucleotide may be methylated to form 5-methylcytosine"
ggagtgcccccgtgggattgtcgcgcaccgtgggtgcacgccaggaatgccatgatccaacgacccctgtgcagaggctgctggaaaggcactttcttcattgggaggacacaggccctgtt

SEQ ID NO: 4777 - DNA, 122 bp, Homo sapiens
  misc_feature (61)..(62): /note="This region represents a CpG dinucleotide"
  misc_feature (61)..(61): /note="Nucleotide may be methylated to form 5-methylcytosine"
aacaacggtcccaactgatgcaaatggcccaatgcaaacacgttgacaatctcccgttagcgacagtaacagacgctaagcgcccaatgcgaacaaaactcccgcttcgaaaactacacctc

SEQ ID NO: 4778 - DNA, 122 bp, Homo sapiens
  misc_feature (61)..(62): /note="This region represents a CpG dinucleotide"
  misc_feature (61)..(61): /note="Nucleotide may be methylated to form 5-methylcytosine"
caataaaggaaaaacatgaaatcaagctttgtgtacatatatattaatgagactaaagaacggtgatgtgcacaagtcagacccatctctagaacttggcaaatatggaaactggaaaatga

SEQ ID NO: 4779 - DNA, 122 bp, Homo sapiens
  misc_feature (61)..(62): /note="This region represents a CpG dinucleotide"
  misc_feature (61)..(61): /note="Nucleotide may be methylated to form 5-methylcytosine"
caataggcatccttaggcattcttgcaatggttttctcaaacgtaatgcagtttttatgacgacgacatcatcaatacagcacccagcaagcagtgaggaggctgcactgctatagttggca

SEQ ID NO: 4780 - DNA, 122 bp, Homo sapiens
  misc_feature (61)..(62): /note="This region represents a CpG dinucleotide"
  misc_feature (61)..(61): /note="Nucleotide may be methylated to form 5-methylcytosine"
tcagacataaagtctagacgtccccagaggttaatcttgggaacattgtgctgtttccgacgcttctgttaaccgccgtgttttcccctgtttttgttgcagagctctcgcacatgagaagt

SEQ ID NO: 4781 - DNA, 122 bp, Homo sapiens
  misc_feature (61)..(62): /note="This region represents a CpG dinucleotide"
  misc_feature (61)..(61): /note="Nucleotide may be methylated to form 5-methylcytosine"
ctgcagattttgtttctcccccaaatcagccactgctggagctgtcccttcagcaccactcgccatcaacctcccgccgccatccgaagcacagggctcaggaaagagtgggtgggtgggtc

SEQ ID NO: 4782 - DNA, 122 bp, Homo sapiens
  misc_feature (61)..(62): /note="This region represents a CpG dinucleotide"
  misc_feature (61)..(61): /note="Nucleotide may be methylated to form 5-methylcytosine"
atagataagggctcattcagtacttgcacaagaagagcccatatcttcaaatatgggtgacgtaaatttacttcagaaacagaaatgagctcatttatttggagagatgtgaacagaatgtg

SEQ ID NO: 4783 - DNA, 122 bp, Homo sapiens
  misc_feature (61)..(62): /note="This region represents a CpG dinucleotide"
  misc_feature (61)..(61): /note="Nucleotide may be methylated to form 5-methylcytosine"
gaaagggaaagaaaataaacagtttaaaaatgcctagggaagtcccggtgcggtggcccacgcctgtaatcccagcacttagggaggccgaggcaggcggatcacgaggtcaggagatcaag

SEQ ID NO: 4784 - DNA, 122 bp, Homo sapiens
  misc_feature (61)..(62): /note="This region represents a CpG dinucleotide"
  misc_feature (61)..(61): /note="Nucleotide may be methylated to form 5-methylcytosine"
acagtcatgcactgcataacaacatttcagccagtgacagattgcatatgtgacagggcccgtaagatataatggagctgaaaaattcctattgcccccgaaaaccttccagcaggacaaga

SEQ ID NO: 4785 - DNA, 122 bp, Homo sapiens
  misc_feature (61)..(62): /note="This region represents a CpG dinucleotide"
  misc_feature (61)..(61): /note="Nucleotide may be methylated to form 5-methylcytosine"
ctcaccattagtcaccagagttagatactaagtagaagcagtacgtccataaagtcattgcggaaatgtatacttaaatgacctgagaggggcattgggttttttcccatttatacaataaa

SEQ ID NO: 4786 - DNA, 122 bp, Homo sapiens
  misc_feature (61)..(62): /note="This region represents a CpG dinucleotide"
  misc_feature (61)..(61): /note="Nucleotide may be methylated to form 5-methylcytosine"
ccttcatgtttagaaaaatctttcaactgcaaggaacagcctcactcatttaggcaagcacgtatagcaagagatgaaaacagcattttttgctagtaacagaaatcaagtaaaaacgaatt

SEQ ID NO: 4787 - DNA, 122 bp, Homo sapiens
  misc_feature (61)..(62): /note="This region represents a CpG dinucleotide"
  misc_feature (61)..(61): /note="Nucleotide may be methylated to form 5-methylcytosine"
caactaggaaaccaattcctggaaatgtccaggatgacattagtctgttattgcttcttacgtgggaatgaaaatctgcacagatgtctaaggaattacagagaaaaaaaactggaacaaat

SEQ ID NO: 4788 - DNA, 122 bp, Homo sapiens
  misc_feature (61)..(62): /note="This region represents a CpG dinucleotide"
  misc_feature (61)..(61): /note="Nucleotide may be methylated to form 5-methylcytosine"
caaccttgcaaacaagtgcacaaaagtaaatcttaatttcctaaccattttactcttcctcgtagtgacagcttgggagttaaagtaatgaaataaccctatccttctcaactggcaaattt

SEQ ID NO: 4789 - DNA, 122 bp, Homo sapiens
  misc_feature (61)..(62): /note="This region represents a CpG dinucleotide"
  misc_feature (61)..(61): /note="Nucleotide may be methylated to form 5-methylcytosine"
ctagccactgtagtctgcagatcaaagctctggcgaaaatccatgcctttgttcaagacacgtgagtgttgcccacttttcagaaaccacctatttcaagggaagatcttgcttttcctccc

SEQ ID NO: 4790 - DNA, 122 bp, Homo sapiens
  misc_feature (61)..(62): /note="This region represents a CpG dinucleotide"
  misc_feature (61)..(61): /note="Nucleotide may be methylated to form 5-methylcytosine"
atctagcttgagagtctgaggcaatttcctgatgatacatctcagtgggcctaaaggaaacgaaacacctacaccattgctcaatgctggaaaattctccacagtggccgacccctttagga

SEQ ID NO: 4791 - DNA, 122 bp, Homo sapiens
  misc_feature (61)..(62): /note="This region represents a CpG dinucleotide"
  misc_feature (61)..(61): /note="Nucleotide may be methylated to form 5-methylcytosine"
ctgttttgtgcctccttttttgcttgccaccactcttcagagaggagcagcagctgtggccgctcctcgtgttcccatagcaaccaatgcttacctcccgctcacactggttcctaattgcc

SEQ ID NO: 4792 - DNA, 122 bp, Homo sapiens
  misc_feature (61)..(62): /note="This region represents a CpG dinucleotide"
  misc_feature (61)..(61): /note="Nucleotide may be methylated to form 5-methylcytosine"
atcggaaggaaacgaaacctcgcctcaggcatgcgggctctgacgggcaggatggcggcacggagggctgctgtatccagtgaagtcagcagttcagatgaaacagataactcccttaaaag

SEQ ID NO: 4793 - DNA, 122 bp, Homo sapiens
  misc_feature (61)..(62): /note="This region represents a CpG dinucleotide"
  misc_feature (61)..(61): /note="Nucleotide may be methylated to form 5-methylcytosine"
acgaacaggagaaagacaagctctcaccttcaaaacttggtactgggagcagtgtctttacgccagcactggcggggaggagtgcccaggaatctacaaagacaaatcaagttaaacgacga

SEQ ID NO: 4794 - DNA, 122 bp, Homo sapiens
  misc_feature (61)..(62): /note="This region represents a CpG dinucleotide"
  misc_feature (61)..(61): /note="Nucleotide may be methylated to form 5-methylcytosine"
cagaaaaaaaaattttaagtattaaatatcatacaattcagcaatttaaagtatacaattcgatggcttttagtgtatcacagagttgtgcaaccatcatcacagtcagttaagaacatttc

SEQ ID NO: 4795 - DNA, 122 bp, Homo sapiens
  misc_feature (61)..(62): /note="This region represents a CpG dinucleotide"
  misc_feature (61)..(61): /note="Nucleotide may be methylated to form 5-methylcytosine"
tgccggttatttctcctccttagagatgaaatggtaaagttaggatgactcagcgtgcagcgtctagcgtgattcctggccaggcacagatagatactcagttcatgctgttttctccttat

SEQ ID NO: 4796 - DNA, 122 bp, Homo sapiens
  misc_feature (61)..(62): /note="This region represents a CpG dinucleotide"
  misc_feature (61)..(61): /note="Nucleotide may be methylated to form 5-methylcytosine"
agggcctatatgtgttgaacacaagatacttacctgtgactgtttctaatcccactatggcgtctccaaatgactcatgtgctagcttctcacattttgaataagtgtgcactgaatgtcat

SEQ ID NO: 4797 - DNA, 122 bp, Homo sapiens
  misc_feature (61)..(62): /note="This region represents a CpG dinucleotide"
  misc_feature (61)..(61): /note="Nucleotide may be methylated to form 5-methylcytosine"
gcactattcttcttccctaactagagcttcttatgtctgtccggtcttcatcaatagatccgtaggaagcacccgccagacactgtgtcccgcccctgccttcaagctgctctagcagagat

SEQ ID NO: 4798 - DNA, 122 bp, Homo sapiens
  misc_feature (61)..(62): /note="This region represents a CpG dinucleotide"
  misc_feature (61)..(61): /note="Nucleotide may be methylated to form 5-methylcytosine"
cctgtcttgatatatcagctgtgtctaggcagcgggcaaggtgaacccattgggcagttacgcagctgctggatgaacaaataaatgtgtggaaaatgaagaaaaaccgagagtcaaagctt

SEQ ID NO: 4799 - DNA, 122 bp, Homo sapiens
  misc_feature (61)..(62): /note="This region represents a CpG dinucleotide"
  misc_feature (61)..(61): /note="Nucleotide may be methylated to form 5-methylcytosine"
cccgttgtccagtgggaaagaaaaaagaaatgagcagcccctgatgttcagaagcctcaccggtaggccatgttctcctactaaacataagcggtctcacagaataccttcaacaaagtttc

SEQ ID NO: 4800 - DNA, 122 bp, Homo sapiens
  misc_feature (61)..(62): /note="This region represents a CpG dinucleotide"
  misc_feature (61)..(61): /note="Nucleotide may be methylated to form 5-methylcytosine"
acaaggcctcttgaggcctagacttggaacaggcactccatcaattacgccacatgctttcgcccaaagcaagtctcaaggtcaagccagttttcccccgatttagcagtagggaaatagaa

SEQ ID NO: 4801 - DNA, 122 bp, Homo sapiens
  misc_feature (61)..(62): /note="This region represents a CpG dinucleotide"
  misc_feature (61)..(61): /note="Nucleotide may be methylated to form 5-methylcytosine"
gctagatgggcttgcttaccttttcctgttgtttcatcatttccaaaacaagtgaagaaacgttgcatcttggctaggaactatctgtcgatatggctttgctgctgatggggtgtgctggg

SEQ ID NO: 4802 - DNA, 122 bp, Homo sapiens
  misc_feature (61)..(62): /note="This region represents a CpG dinucleotide"
  misc_feature (61)..(61): /note="Nucleotide may be methylated to form 5-methylcytosine"
tccagcctgggcgacggagcaagaccctgaccaaaaaaaaaaaaaaaaagtatctcgtgacggtgtttagaggaagttatgcgtgtgataaaactgcataaaccacacacacactcacacac

SEQ ID NO: 4803 - DNA, 122 bp, Homo sapiens
  misc_feature (61)..(62): /note="This region represents a CpG dinucleotide"
  misc_feature (61)..(61): /note="Nucleotide may be methylated to form 5-methylcytosine"
accttttctgtgtttaggtatgtttagatatacacatacttaccattgtgttaccattgccgacagcattcagtacagtgacatgctataggtttgtagcttgctagcaatagcctaggtgt

SEQ ID NO: 4804 - DNA, 122 bp, Homo sapiens
  misc_feature (61)..(62): /note="This region represents a CpG dinucleotide"
  misc_feature (61)..(61): /note="Nucleotide may be methylated to form 5-methylcytosine"
agagtgagaccctgtctctgaaaatacataaaataggccgggcgctttgggaggccgaggcgaacagatcacctgaggtgaggagttcaagaccagcctgaccaacatagtgaaaccctgtc

SEQ ID NO: 4805 - DNA, 122 bp, Homo sapiens
  misc_feature (61)..(62): /note="This region represents a CpG dinucleotide"
  misc_feature (61)..(61): /note="Nucleotide may be methylated to form 5-methylcytosine"
aaaaaaaaaaaagcatctaccaagccttcctgacagcttggttcttgttttactgaataccgtatgagaggattggatgcttatctggtatggcctgccataaaattcaaaaaaagaagaga

SEQ ID NO: 4806 - DNA, 122 bp, Homo sapiens
  misc_feature (61)..(62): /note="This region represents a CpG dinucleotide"
  misc_feature (61)..(61): /note="Nucleotide may be methylated to form 5-methylcytosine"
tgaatatttgaccaggttaatgtgaagaacagagataaacccttacattaacccctcgctcggagcacctagggctgcagattaaaatcccatgggcctgccagtcaaaggcaaggccccaa

SEQ ID NO: 4807 - DNA, 122 bp, Homo sapiens
  misc_feature (61)..(62): /note="This region represents a CpG dinucleotide"
  misc_feature (61)..(61): /note="Nucleotide may be methylated to form 5-methylcytosine"
gcatgcacccgcagctgctggagctgctcaaccagctggacgagcgcaggcgtaggtgcccgcgccacggggcctcggctcaggggcagccaggtgttgtgagcgccatcctgggccagggc

SEQ ID NO: 4808 - DNA, 122 bp, Homo sapiens
  misc_feature (61)..(62): /note="This region represents a CpG dinucleotide"
  misc_feature (61)..(61): /note="Nucleotide may be methylated to form 5-methylcytosine"
catagtcaacctggggttctaatccaaccatgatttgacaaaaatcaaactatgaactaacgtttgattactatcccattcagcaaagtcactcaaagcattaacaaatgagtgtagttcta

SEQ ID NO: 4809 - DNA, 122 bp, Homo sapiens
  misc_feature (61)..(62): /note="This region represents a CpG dinucleotide"
  misc_feature (61)..(61): /note="Nucleotide may be methylated to form 5-methylcytosine"
tggtgagtcagccggcagccccaaggatctccttccatgggctgtcactctctgcatagacgtcatgtatgtgattcgtgagcataaagtcatgaccctgtgttgctgcttttcatatttct

SEQ ID NO: 4810 - DNA, 122 bp, Homo sapiens
  misc_feature (61)..(62): /note="This region represents a CpG dinucleotide"
  misc_feature (61)..(61): /note="Nucleotide may be methylated to form 5-methylcytosine"
cttctagagcagtgcttcgctaactttagcatcagagtcaattgaaggcttattcaaacacgggagcctgagctccatactcagcagttctgattcaacagacataaggttgggcctgaaat

SEQ ID NO: 4811 - DNA, 122 bp, Homo sapiens
  misc_feature (61)..(62): /note="This region represents a CpG dinucleotide"
  misc_feature (61)..(61): /note="Nucleotide may be methylated to form 5-methylcytosine"
ctctcatacaggagctttttcattaccgaatcccagacaccccattcaattattaaagaacgccctgttatatttattacagaggtggctgatattgctgccaattgtcgaatttcggtttc

SEQ ID NO: 4812 - DNA, 122 bp, Homo sapiens
  misc_feature (61)..(62): /note="This region represents a CpG dinucleotide"
  misc_feature (61)..(61): /note="Nucleotide may be methylated to form 5-methylcytosine"
cgatctcctgacctcaggtcatccacctgcctcagcctcccaaagtgctgggattacaggcgtgagccaccccacccggccaagaggtgttaaaatctaaatcagactatgtcatgcctcag

SEQ ID NO: 4813 - DNA, 122 bp, Homo sapiens
  misc_feature (61)..(62): /note="This region represents a CpG dinucleotide"
  misc_feature (61)..(61): /note="Nucleotide may be methylated to form 5-methylcytosine"
ttttgttgtctgctgacttccttctcaggcaagttttccccatgtggtggcagaggcagccgccagcaacaacagggaaagagcccctccttcctaattggcctgggaacagtttcaagttc

SEQ ID NO: 4814 - DNA, 122 bp, Homo sapiens
  misc_feature (61)..(62): /note="This region represents a CpG dinucleotide"
  misc_feature (61)..(61): /note="Nucleotide may be methylated to form 5-methylcytosine"
aaagacctctccttctctcgccggaaatatccctctttcgggaagcgctcccctgccttccggaaaggaagagccctgatcgcgcccctgcactcaagcctctgggtgatagagcgaggaga

SEQ ID NO: 4815 - DNA, 122 bp, Homo sapiens
  misc_feature (61)..(62): /note="This region represents a CpG dinucleotide"
  misc_feature (61)..(61): /note="Nucleotide may be methylated to form 5-methylcytosine"
atatactacggtggcttcaatcgtcccaggtgtgtggtttttttctgcagaagagttcatcggcctgagttagtccaggagaaggtggatggttggactaatctatagttggaagcttataa

SEQ ID NO: 4816 - DNA, 122 bp, Homo sapiens
  misc_feature (61)..(62): /note="This region represents a CpG dinucleotide"
  misc_feature (61)..(61): /note="Nucleotide may be methylated to form 5-methylcytosine"
aggtggccactgttagatgtaagtctctttgccaggtagccaaggccctatgtaatgaaacgtactgtcccactagacttcctctccacttcactctcttgttccagcaggacagcctccca

SEQ ID NO: 4817 - DNA, 122 bp, Homo sapiens
  misc_feature (61)..(62): /note="This region represents a CpG dinucleotide"
  misc_feature (61)..(61): /note="Nucleotide may be methylated to form 5-methylcytosine"
ggcttcgggaggggattgccctgagaggtccgggaggacttgctgtggaattcaagcgaccgtgggccttgagggaaccggggggcaagacacccacccagcattcgcggaatatttcctcg

SEQ ID NO: 4818 - DNA, 122 bp, Homo sapiens
  misc_feature (61)..(62): /note="This region represents a CpG dinucleotide"
  misc_feature (61)..(61): /note="Nucleotide may be methylated to form 5-methylcytosine"
gactgcatctaagctcctccttttctgtgggtgatggtggctgtcaggcccctgaacctacgtcatccctccctctgatttgactgtacctttgctaggcctggtcaagggctagggactcc

SEQ ID NO: 4819 - DNA, 122 bp, Homo sapiens
  misc_feature (61)..(62): /note="This region represents a CpG dinucleotide"
  misc_feature (61)..(61): /note="Nucleotide may be methylated to form 5-methylcytosine"
cgttaactacataatacttctcttcttgtcagttacctgtattttatctcacaggtgttccggcttataaaattgtttatttcagatcagattctcacctgtagtaactggcgttgatgtgg

SEQ ID NO: 4820 - DNA, 122 bp, Homo sapiens
  misc_feature (61)..(62): /note="This region represents a CpG dinucleotide"
  misc_feature (61)..(61): /note="Nucleotide may be methylated to form 5-methylcytosine"
ctggctgattttcaactacacacaaagcatgaatcccggtgacacaacacaatgtaaatacgaacaaccttgacaaagctaaaggtacaaaaaataggaaggaagtgcaggagacctgatgg

SEQ ID NO: 4821 - DNA, 122 bp, Homo sapiens
  misc_feature (61)..(62): /note="This region represents a CpG dinucleotide"
  misc_feature (61)..(61): /note="Nucleotide may be methylated to form 5-methylcytosine"
catttcattaaataagtgttctgctttggccttcttccagctggcatgatactagactggcgtgaagcagggaagtggaatcatcttaaatttagcatcatgaaaatctgttcctcgtgaac

SEQ ID NO: 4822 - DNA, 122 bp, Homo sapiens
  misc_feature (61)..(62): /note="This region represents a CpG dinucleotide"
  misc_feature (61)..(61): /note="Nucleotide may be methylated to form 5-methylcytosine"
aacttctctcattcttaacctactcattaggtagctccctcagaggcctggagcacagcccgggcgtttcggaagagcttgatggttacctttcattccccgtttcccaattgtgtttttct

SEQ ID NO: 4823 - DNA, 122 bp, Homo sapiens
  misc_feature (61)..(62): /note="This region represents a CpG dinucleotide"
  misc_feature (61)..(61): /note="Nucleotide may be methylated to form 5-methylcytosine"
gatgggaaacaaaataatcagaaaaacataattatccctagccataccatacttgctagacgctagaaagtatacatatatgtaatctctgtatacatagagaaagcaaaaagcatgtgcac

SEQ ID NO: 4824 - DNA, 122 bp, Homo sapiens
  misc_feature (61)..(62): /note="This region represents a CpG dinucleotide"
  misc_feature (61)..(61): /note="Nucleotide may be methylated to form 5-methylcytosine"
tgggaagagtttcccaaacccatgtgctgtcatatccatccttgagagcccttcccatgacgtgacagataacaagggcctcagaagtcacctgcagaggccttaggaactggtaacacttg

SEQ ID NO: 4825 - DNA, 122 bp, Homo sapiens
  misc_feature (61)..(62): /note="This region represents a CpG dinucleotide"
  misc_feature (61)..(61): /note="Nucleotide may be methylated to form 5-methylcytosine"
gcaagtgaaggaaggggtttgcgaggacaggctgtagggagaggaaagcgtgggcacaggcgggctcagtctccacttggtcttgcctaagtagggggggtagggcttgcacacgaaataat

SEQ ID NO: 4826 - DNA, 122 bp, Homo sapiens
  misc_feature (61)..(62): /note="This region represents a CpG dinucleotide"
  misc_feature (61)..(61): /note="Nucleotide may be methylated to form 5-methylcytosine"
gcggcccgcaggggcagatgggactcggccactttcggcacgctgggctgaaagtgggcgcgtctgcgactgggagggggtcggagagaagccacaaagcccgggctgcagaggcggttctg

SEQ ID NO: 4827 - DNA, 122 bp, Homo sapiens
  misc_feature (61)..(62): /note="This region represents a CpG dinucleotide"
  misc_feature (61)..(61): /note="Nucleotide may be methylated to form 5-methylcytosine"
ttctgattgcagaaccaagtttatcatgcctcacctcaaagacaccagcattgctgtatgcggtggtgtgcacctatagaaccagccactcaggaagctgagggggaaggatagcttgagcc

SEQ ID NO: 4828 - DNA, 122 bp, Homo sapiens
  misc_feature (61)..(62): /note="This region represents a CpG dinucleotide"
  misc_feature (61)..(61): /note="Nucleotide may be methylated to form 5-methylcytosine"
cccctccccgccgggtcggcagctagctgggccgaccaggtgcacagaaggcgtggcttgcggtcagcccccaccgcaggagctcagcactttcagccaaaagtcccattttgctccttcca

SEQ ID NO: 4829 - DNA, 122 bp, Homo sapiens
  misc_feature (61)..(62): /note="This region represents a CpG dinucleotide"
  misc_feature (61)..(61): /note="Nucleotide may be methylated to form 5-methylcytosine"
aaagactggtttgccaagcggtttgaggaactgcaaaaggagacgtttaccacagaagagcgaaaacatctgtcgaaactaatgctggaatctcaggtaaaaaggagcatctaggccgggca

SEQ ID NO: 4830 - DNA, 122 bp, Homo sapiens
  misc_feature (61)..(62): /note="This region represents a CpG dinucleotide"
  misc_feature (61)..(61): /note="Nucleotide may be methylated to form 5-methylcytosine"
acacgggactcgggaaccgctatctccaaagggcagctttctttgagggaggctgttagacgtgactccttgtttctaaaaatggacaaataccagcctgggcaacatgacaaaaacccatt

SEQ ID NO: 4831 - DNA, 122 bp, Homo sapiens
  misc_feature (61)..(62): /note="This region represents a CpG dinucleotide"
  misc_feature (61)..(61): /note="Nucleotide may be methylated to form 5-methylcytosine"
agaatagaatacagggcatagagactgcctcagcgtggattgggtttctgttcctgagcccgctcatgactcatacttgggagattaagcaatgtggagtgtagctgttggcagcaatatgc

SEQ ID NO: 4832 - DNA, 122 bp, Homo sapiens
  misc_feature (61)..(62): /note="This region represents a CpG dinucleotide"
  misc_feature (61)..(61): /note="Nucleotide may be methylated to form 5-methylcytosine"
caggccctgtgagatgaaccaggtacttcagttggaaatgcaggaatcacccgtcttctgcgtcgatcacgctgggagctgcagtggttctttagttttaatggtcactcttaatctgtatg

SEQ ID NO: 4833 - DNA, 122 bp, Homo sapiens
  misc_feature (61)..(62): /note="This region represents a CpG dinucleotide"
  misc_feature (61)..(61): /note="Nucleotide may be methylated to form 5-methylcytosine"
gtggaggctgggcaggaatgcttgggacgttgcctgtttgtgcccctgtgtgtgtgcgcccgtgtgcgaggaagtggctttctggaggcgtcgtgcacccatgagggtgtatatgtggcggg

SEQ ID NO: 4834 - DNA, 122 bp, Homo sapiens
  misc_feature (61)..(62): /note="This region represents a CpG dinucleotide"
  misc_feature (61)..(61): /note="Nucleotide may be methylated to form 5-methylcytosine"
ctccaggctgctgtacgatgtgttcaactgagtcaggctggactggggggggtggcactgcgttgggggacagctctctatctaaagagtcaagtgtttggagctggcagggtcctcctgga

SEQ ID NO: 4835 - DNA, 122 bp, Homo sapiens
  misc_feature (61)..(62): /note="This region represents a CpG dinucleotide"
  misc_feature (61)..(61): /note="Nucleotide may be methylated to form 5-methylcytosine"
gttcactagtggatggttgtccctaggggaagtaaattttggagcacttttatgaaagcacgcagaaaccaggggtggggcagaaacagaaactagagatctgtgtctatctgagtggagcc

SEQ ID NO: 4836 - DNA, 122 bp, Homo sapiens
  misc_feature (61)..(62): /note="This region represents a CpG dinucleotide"
  misc_feature (61)..(61): /note="Nucleotide may be methylated to form 5-methylcytosine"
ggcctggagaccaggtggttcagactccataaactctgcccattctccagtgaggtggaccgaggcaacccctcaagtcctgtccctccccatagtgacggctctgtagccgctgctggcca

SEQ ID NO: 4837 - DNA, 122 bp, Homo sapiens
  misc_feature (61)..(62): /note="This region represents a CpG dinucleotide"
  misc_feature (61)..(61): /note="Nucleotide may be methylated to form 5-methylcytosine"
tgtgttttgccacttactagctgcgggaccttgaacaggttatgtaaattctaaaccatacgtttcctgagggttgttaggaggattaaatgcatatataaagtgtttagcagaatatgtgg

SEQ ID NO: 4838 - DNA, 122 bp, Homo sapiens
  misc_feature (61)..(62): /note="This region represents a CpG dinucleotide"
  misc_feature (61)..(61): /note="Nucleotide may be methylated to form 5-methylcytosine"
tttagagccaggcaggccaactctagaactggcctttgtaatcatgcctgtggtcactaccgtccgtcctttcccaccactgtcttcatcagtgtgtcgatgagtcatcgccacatgtccat

SEQ ID NO: 4839 - DNA, 122 bp, Homo sapiens
  misc_feature (61)..(62): /note="This region represents a CpG dinucleotide"
  misc_feature (61)..(61): /note="Nucleotide may be methylated to form 5-methylcytosine"
aagagatttgacaggcaaaatatcctgtaattggcaataggtagtcctcatgcttccccccgccccttctcccttttgaagcaacttcatctctctgaacaagcttaagaagttccctagat

SEQ ID NO: 4840 - DNA, 122 bp, Homo sapiens
  misc_feature (61)..(62): /note="This region represents a CpG dinucleotide"
  misc_feature (61)..(61): /note="Nucleotide may be methylated to form 5-methylcytosine"
cctatgcttttatgagcataaaccaaagtaacattactgggagatacacagaaagaatcacgttttcctgagaaatctcttaagaaattacatcagttctctggacacatggaggagagggg

SEQ ID NO: 4841 - DNA, 122 bp, Homo sapiens
  misc_feature (61)..(62): /note="This region represents a CpG dinucleotide"
  misc_feature (61)..(61): /note="Nucleotide may be methylated to form 5-methylcytosine"
atgcagaaactgtccagggcaatgatgaatttcaagtttcttcctttgaaggacagggcccggctaatgtgacacatccttcctgaaaatgatgtgtttctaggtttctggcttaagggtat

SEQ ID NO: 4842 - DNA, 122 bp, Homo sapiens
  misc_feature (61)..(62): /note="This region represents a CpG dinucleotide"
  misc_feature (61)..(61): /note="Nucleotide may be methylated to form 5-methylcytosine"
ttcttgcttatttaattctaaagatgtaccattaactaaaacccttcaatttcacagctccgtagacatttggtagggattatacaggtccaaaaggaaagtaaacaccagagtagctatta

SEQ ID NO: 4843 - DNA, 122 bp, Homo sapiens
  misc_feature (61)..(62): /note="This region represents a CpG dinucleotide"
  misc_feature (61)..(61): /note="Nucleotide may be methylated to form 5-methylcytosine"
agttttctcccccgacatctgttgagtctgcatgtgggcaatgtttcttgctagcttcttcgtgtattcactctctctggttccctttcatcataaaaccctgctgttgcccaagttttggc

SEQ ID NO: 4844 - DNA, 122 bp, Homo sapiens
  misc_feature (61)..(62): /note="This region represents a CpG dinucleotide"
  misc_feature (61)..(61): /note="Nucleotide may be methylated to form 5-methylcytosine"
acagtttatgagtcacatgtctgggaatatgacctgattcccaggccagttggccaggtgcgtggaagggagtaaataaaagcaggttgaagcaataatgcctctgacttttgttgggctgg

SEQ ID NO: 4845 - DNA, 122 bp, Homo sapiens
  misc_feature (61)..(62): /note="This region represents a CpG dinucleotide"
  misc_feature (61)..(61): /note="Nucleotide may be methylated to form 5-methylcytosine"
ggatttataatttttgttatgattggggacttttcagctattgtttcttcaaaaattggccggacacagtggttcacaacttcaggaggccaagtcgggaggtgttgagtgaggcctgaaat

SEQ ID NO: 4846 - DNA, 122 bp, Homo sapiens
  misc_feature (61)..(62): /note="This region represents a CpG dinucleotide"
  misc_feature (61)..(61): /note="Nucleotide may be methylated to form 5-methylcytosine"
tgaccacaggatcaccacagaaaagatgcctgtcttcctgtttcctaaggcaggagcacacgtgagcagtccatctaaaacctgaggcaaatcattaaaagtggaaaaggattggatgaaca

SEQ ID NO: 4847 - DNA, 122 bp, Homo sapiens
  misc_feature (61)..(62): /note="This region represents a CpG dinucleotide"
  misc_feature (61)..(61): /note="Nucleotide may be methylated to form 5-methylcytosine"
gcagttctataatgatcacttgacagtggaagaaacaacttagttaagtaacttgctcaacgtcacaaagcttgcaagtggtataattaggtttaaacaggaagtctgagccctgagtcctc

SEQ ID NO: 4848 - DNA, 122 bp, Homo sapiens
  misc_feature (61)..(62): /note="This region represents a CpG dinucleotide"
  misc_feature (61)..(61): /note="Nucleotide may be methylated to form 5-methylcytosine"
cacagcagagagggcaggcagagctcattcaatgagcacacgttagaattcttggccaggcgcagtggctcacgcctgtaatccccaactctttgggaggccgaggcaggcagatcaggagg

SEQ ID NO: 4849 - DNA, 122 bp, Homo sapiens
  misc_feature (61)..(62): /note="This region represents a CpG dinucleotide"
  misc_feature (61)..(61): /note="Nucleotide may be methylated to form 5-methylcytosine"
tagaggagaactgcagtggagggacagtggtagggggcagggagaagggtaggttgtgaacgagaagttcttaggcagagcaaataaataggagcacaaagatttaactcagagcaagatgt

SEQ ID NO: 4850 - DNA, 122 bp, Homo sapiens
  misc_feature (61)..(62): /note="This region represents a CpG dinucleotide"
  misc_feature (61)..(61): /note="Nucleotide may be methylated to form 5-methylcytosine"
cagcattgctttaaataattgtttggttaaaagttgtggtttccattctcaaccgaaatgcgtctccatgcagttttccttgggtccaaagcttaaggccttgggaagggggccaagaaaaa

SEQ ID NO: 4851 - DNA, 122 bp, Homo sapiens
  misc_feature (61)..(62): /note="This region represents a CpG dinucleotide"
  misc_feature (61)..(61): /note="Nucleotide may be methylated to form 5-methylcytosine"
ggaggctggagctgcagatgcagtgaagtcacaggttccgtgatgtcacaggtgggcaggcgcactggtctgtaacggattggcttggccttacccacgaggctttgcggtggctgttggct

SEQ ID NO: 4852 - DNA, 122 bp, Homo sapiens
  misc_feature (61)..(62): /note="This region represents a CpG dinucleotide"
  misc_feature (61)..(61): /note="Nucleotide may be methylated to form 5-methylcytosine"
aggactgtggtggcagccggtgtgctggttgtcagctgatgtccctgtctgtgatttttccgtgtgaatgcagccttgactgggcatgtagatcagaggtgacaagtcctgggcacctctgc

SEQ ID NO: 4853 - DNA, 122 bp, Homo sapiens
  misc_feature (61)..(62): /note="This region represents a CpG dinucleotide"
  misc_feature (61)..(61): /note="Nucleotide may be methylated to form 5-methylcytosine"
ccgtcggtccctctgcgccccggcccggcctcctgcaccgccaccgccgcagctcccccacggacggaagtgagtttactgaaattttcaagccacagaaagaacaaaagaagtaatatcca

SEQ ID NO: 4854 - DNA, 122 bp, Homo sapiens
  misc_feature (61)..(62): /note="This region represents a CpG dinucleotide"
  misc_feature (61)..(61): /note="Nucleotide may be methylated to form 5-methylcytosine"
gtcgctttccaggtcctcgcaggttacccgcgaggaggcccctggcagctcatagccctgcgagaagtccacctccgggcccagcgggaggctctgcagctctccaggctgcagcggggagg

SEQ ID NO: 4855 - DNA, 122 bp, Homo sapiens
  misc_feature (61)..(62): /note="This region represents a CpG dinucleotide"
  misc_feature (61)..(61): /note="Nucleotide may be methylated to form 5-methylcytosine"
agcttcagcagttgcttggaactttggttctggcagcagcagcaacatcattaccgctagcggcagttttgtgccgaggcacctacacacctcccgtcctctctgccagatcgcgggcctgt

SEQ ID NO: 4856 - DNA, 122 bp, Homo sapiens
  misc_feature (61)..(62): /note="This region represents a CpG dinucleotide"
  misc_feature (61)..(61): /note="Nucleotide may be methylated to form 5-methylcytosine"
tatgcttttgcacatggtttttccctttgcctggactgttcttcctcatcttgatcacctcggccgccatctcagccaccagaagacttcctgcaagacttggttcagacatcacagttcag

SEQ ID NO: 4857 - DNA, 122 bp, Homo sapiens
  misc_feature (61)..(62): /note="This region represents a CpG dinucleotide"
  misc_feature (61)..(61): /note="Nucleotide may be methylated to form 5-methylcytosine"
agtgtgggggatctctggagtctcttcctcctcttttaagaacgccagtcataaaagattcgggcctcacccacactcttttaaccttaattacgtttgtaaaggcattatccccaaataca

SEQ ID NO: 4858 - DNA, 122 bp, Homo sapiens
  misc_feature (61)..(62): /note="This region represents a CpG dinucleotide"
  misc_feature (61)..(61): /note="Nucleotide may be methylated to form 5-methylcytosine"
aggggagtgagtgagaggatgcaccacagccttggttcacgcctgaagaaactgaggccacgagaggggaagtgaccagctcagtgccacaccaccagcagatccaagtggctgtgagtcag

SEQ ID NO: 4859 - DNA, 122 bp, Homo sapiens
  misc_feature (61)..(62): /note="This region represents a CpG dinucleotide"
  misc_feature (61)..(61): /note="Nucleotide may be methylated to form 5-methylcytosine"
tatagggcagcctttcaaacctcacccccgtccagcttgtttccactttgataggaagcacggcaggtaagaatgaatcctacgaaggcgacaactgcaatccaagtcctggtgttgctact

SEQ ID NO: 4860 - DNA, 122 bp, Homo sapiens
  misc_feature (61)..(62): /note="This region represents a CpG dinucleotide"
  misc_feature (61)..(61): /note="Nucleotide may be methylated to form 5-methylcytosine"
ataatttactaaggtcacagagctagtaaataacaaagctttattcagacctagctgtatcggatgccttttttaaaatcttcactacctgtttgctctttctgcttcaccctcatcttggt

SEQ ID NO: 4861 - DNA, 122 bp, Homo sapiens
  misc_feature (61)..(62): /note="This region represents a CpG dinucleotide"
  misc_feature (61)..(61): /note="Nucleotide may be methylated to form 5-methylcytosine"
agtctttcctttcctgcgtgtatgtgggtactaaagagaagggcaacacaaacccaaacacgtggcctgtctggaagcaggcagcgtataaattgcaaaataagaaagcctgggtcctttgt

SEQ ID NO: 4862 - DNA, 122 bp, Homo sapiens
  misc_feature (61)..(62): /note="This region represents a CpG dinucleotide"
  misc_feature (61)..(61): /note="Nucleotide may be methylated to form 5-methylcytosine"
ggctgcttcagcaggagtttgagcaggtgacctttccagttcagctatgctgtatgcctgcgtcagagattcagggttctccaaggcctctttgaatatctggaggctggaaacaggtttga

SEQ ID NO: 4863 - DNA, 122 bp, Homo sapiens
  misc_feature (61)..(62): /note="This region represents a CpG dinucleotide"
  misc_feature (61)..(61): /note="Nucleotide may be methylated to form 5-methylcytosine"
ctcctccacctccaggcacagccatctcctggatcttgtaaatgttgcagaacatctcatcgtggctgatgaggtcctggtgaataatcataattgcggctgaagggagaggcagcggggct

SEQ ID NO: 4864 - DNA, 122 bp, Homo sapiens
  misc_feature (61)..(62): /note="This region represents a CpG dinucleotide"
  misc_feature (61)..(61): /note="Nucleotide may be methylated to form 5-methylcytosine"
tacacacaatgtccacagtggcactattcctaagcaccaagacgatgggaacaacccacacgtccatcagcagatgaacggatgaagaatgtggtctacataaacaatggaacatgactgag

SEQ ID NO: 4865 - DNA, 122 bp, Homo sapiens
  misc_feature (61)..(62): /note="This region represents a CpG dinucleotide"
  misc_feature (61)..(61): /note="Nucleotide may be methylated to form 5-methylcytosine"
tgagctgcagctggggccagagcagctccaaccggcctgctgcaattagagacgtaccggcgggcaggaggcactgggattttctttcttgtgacatacgtggttgtagttttcattttgat

SEQ ID NO: 4866 - DNA, 122 bp, Homo sapiens
  misc_feature (61)..(62): /note="This region represents a CpG dinucleotide"
  misc_feature (61)..(61): /note="Nucleotide may be methylated to form 5-methylcytosine"
ccatggctcaatctgattagatcatggcttataccatgtatctacttcttaattctgttccggttctttggtctgagcatttaggttgcgcctgtggttgcatgcttggttcttctgggcac

SEQ ID NO: 4867 - DNA, 122 bp, Homo sapiens
  misc_feature (61)..(62): /note="This region represents a CpG dinucleotide"
  misc_feature (61)..(61): /note="Nucleotide may be methylated to form 5-methylcytosine"
gggaaccttgctctaaaacctaagcagccacatgaaaatgatttagcttcctgaagattgcgcaagagtcaacagcacagctagacaatattgttttaattcttcatgttgcagaattatct

SEQ ID NO: 4868 - DNA, 122 bp, Homo sapiens
  misc_feature (61)..(62): /note="This region represents a CpG dinucleotide"
  misc_feature (61)..(61): /note="Nucleotide may be methylated to form 5-methylcytosine"
cgggaaaggtagcacctgagcctcccgggctgcgccgacacctggacacctgtctccccgcgggtgccacctactgctccaggggactccagtccccaggttccgccccacggggactgggg

SEQ ID NO: 4869 - DNA, 122 bp, Homo sapiens
  misc_feature (61)..(62): /note="This region represents a CpG dinucleotide"
  misc_feature (61)..(61): /note="Nucleotide may be methylated to form 5-methylcytosine"
gccgctcagcagcccagctgatttcatcacagccataactctctagaatagctgccgttacgcaacagctcctagcgcaaaactggtacgactgtgtctactgcaatgtattcatcagtttc

SEQ ID NO: 4870 - DNA, 122 bp, Homo sapiens
  misc_feature (61)..(62): /note="This region represents a CpG dinucleotide"
  misc_feature (61)..(61): /note="Nucleotide may be methylated to form 5-methylcytosine"
ccaacctagcgcgcttcgtgtggcgcgagttaccaggcgacgccgcgtcgccaggcatgccgggacttgtagtccatttataagagggttgcgcttgcgctgtagccgcccagcgacctgtg

SEQ ID NO: 4871 - DNA, 122 bp, Homo sapiens
  misc_feature (61)..(62): /note="This region represents a CpG dinucleotide"
  misc_feature (61)..(61): /note="Nucleotide may be methylated to form 5-methylcytosine"
agtatgggaatactgtgaccaaagtgaagatttaaaaagatggttctatcattgatagaacgttatcattgagaccaagcctggtgcttagggagaggagaaaatcattttaaacttgtact

SEQ ID NO: 4872 - DNA, 122 bp, Homo sapiens
  misc_feature (61)..(62): /note="This region represents a CpG dinucleotide"
  misc_feature (61)..(61): /note="Nucleotide may be methylated to form 5-methylcytosine"
tgaagagaagcactcatcccttcgtcagaagacacacacacacacacacacacacacatacgcacactccatgtaggcttagtaagcccagccagtcagtgcccagtcagccgtcccccttc

SEQ ID NO: 4873 - DNA, 122 bp, Homo sapiens
  misc_feature (61)..(62): /note="This region represents a CpG dinucleotide"
  misc_feature (61)..(61): /note="Nucleotide may be methylated to form 5-methylcytosine"
taaaaacgctgctgccattgtctacctattcaggcctctagcattttacgtgggttccaccgattagtgtttgaataggggaacgattagaaagacagctgccattgtatgcccattcggga

SEQ ID NO: 4874 - DNA, 122 bp, Homo sapiens
  misc_feature (61)..(62): /note="This region represents a CpG dinucleotide"
  misc_feature (61)..(61): /note="Nucleotide may be methylated to form 5-methylcytosine"
aaaccagcgtgagcgactcaggttgagctgcatagttctgccgaagatctcgatatatgacggggcccgttctattgcttgagtcccaatctggatccgcatgcctgtcatcaccatagtgc

SEQ ID NO: 4875 - DNA, 122 bp, Homo sapiens
  misc_feature (61)..(62): /note="This region represents a CpG dinucleotide"
  misc_feature (61)..(61): /note="Nucleotide may be methylated to form 5-methylcytosine"
aaattttgcaattttggggagctctggtgacagcatcccaggaagagcaatgtcctcccacgagagctgcaatcagaggcactagagtagaaatcctgtaacagtaaggaatttttccactg

SEQ ID NO: 4876 - DNA, 122 bp, Homo sapiens
  misc_feature (61)..(62): /note="This region represents a CpG dinucleotide"
  misc_feature (61)..(61): /note="Nucleotide may be methylated to form 5-methylcytosine"
gtatgcctttcggggatgaatggcagcacactgtggtctagtcttctccctgaggaggctcgagatatcacatgtttggagctgatgccaggaagcttggctgaaaccatctgccttgtgac

SEQ ID NO: 4877 - DNA, 122 bp, Homo sapiens
  misc_feature (61)..(62): /note="This region represents a CpG dinucleotide"
  misc_feature (61)..(61): /note="Nucleotide may be methylated to form 5-methylcytosine"
taatttcctcaaaaaatactgtcccagtgctagaaaaccctgtcagaaagttttaacttacgtctattctgagtcacttttaccaacatctaattgcattttatggtggttgttttcaattc

SEQ ID NO: 4878 - DNA, 122 bp, Homo sapiens
  misc_feature (61)..(62): /note="This region represents a CpG dinucleotide"
  misc_feature (61)..(61): /note="Nucleotide may be methylated to form 5-methylcytosine"
cgtatttacgcaaagtgctgttatctgttgacccacattgttttgaaaaatgtcccccaccgcagctggccctaaggaaagaagctgtggtgctttctggttcctgggcacagggccaggcc

SEQ ID NO: 4879 - DNA, 122 bp, Homo sapiens
  misc_feature (61)..(62): /note="This region represents a CpG dinucleotide"
  misc_feature (61)..(61): /note="Nucleotide may be methylated to form 5-methylcytosine"
cctagggaggggaaccaatctacacacacacatacacacacgcacgcccgcgcacacacacgcatgcatacatggacatgcgagcctcccaggctgcacttctccctgcctgtggggcccta

SEQ ID NO: 4880 - DNA, 122 bp, Homo sapiens
  misc_feature (61)..(62): /note="This region represents a CpG dinucleotide"
  misc_feature (61)..(61): /note="Nucleotide may be methylated to form 5-methylcytosine"
agttaacaacctggacagacaggcccatcatgtgtgttatgacctatctggtttcctactcgcatggttagaaggctcattttattgctttgaactctggaattaatcctgcttaaaggaga

SEQ ID NO: 4881 - DNA, 122 bp, Homo sapiens
  misc_feature (61)..(62): /note="This region represents a CpG dinucleotide"
  misc_feature (61)..(61): /note="Nucleotide may be methylated to form 5-methylcytosine"
cctggctacagagcacgagattccctctcaaacaaaagaaaagaaaaaaacagaaacaaacggaagcagaaggaagtaaataataaagatcagagcagaaataaagactagaaaagatcaat

SEQ ID NO: 4882 - DNA, 122 bp, Homo sapiens
  misc_feature (61)..(62): /note="This region represents a CpG dinucleotide"
  misc_feature (61)..(61): /note="Nucleotide may be methylated to form 5-methylcytosine"
ccaccaattaccagtgggatctggtataaataccccagttccctgaccccttgggcggaacgactctgagacgtcggttctacactggcttccagagttcccagcatgattaaccacggaga

SEQ ID NO: 4883 - DNA, 122 bp, Homo sapiens
  misc_feature (61)..(62): /note="This region represents a CpG dinucleotide"
  misc_feature (61)..(61): /note="Nucleotide may be methylated to form 5-methylcytosine"
caagagctccatttttattaaacttccttaaacattcaaaatagccagtgtgctctatgacgcttccttttgtttgtttgtttgagatagtgtcttgctgtgttgcccaggctgggatgtag

SEQ ID NO: 4884 - DNA, 122 bp, Homo sapiens
  misc_feature (61)..(62): /note="This region represents a CpG dinucleotide"
  misc_feature (61)..(61): /note="Nucleotide may be methylated to form 5-methylcytosine"
catatcttaatattataatctgcatctgcagaatgacgagttcagaatagtttcattcttcgtgggcggtttattagttgtttggcttggtgtgttgaaaccaagtgtgacttgagatcttt

SEQ ID NO: 4885 - DNA, 122 bp, Homo sapiens
  misc_feature (61)..(62): /note="This region represents a CpG dinucleotide"
  misc_feature (61)..(61): /note="Nucleotide may be methylated to form 5-methylcytosine"
taggaagcagtgctgacagttactaaagtgtagttggaggcctttacaagtttaataaaacgcaggggaaaggggaagaaaaagaatggggtttgccctggaaaggagattccagggtcagg

SEQ ID NO: 4886 - DNA, 122 bp, Homo sapiens
  misc_feature (61)..(62): /note="This region represents a CpG dinucleotide"
  misc_feature (61)..(61): /note="Nucleotide may be methylated to form 5-methylcytosine"
acatcaacaaattgtatagctgaggaaacagatgaattcctacacatatagaacctaccacgactgagtcatgaagaaatagaacatctgaacagaccagcaatgactaaggagactgaatc

SEQ ID NO: 4887 - DNA, 122 bp, Homo sapiens
  misc_feature (61)..(62): /note="This region represents a CpG dinucleotide"
  misc_feature (61)..(61): /note="Nucleotide may be methylated to form 5-methylcytosine"
ttaaaatgtctgatttcgtacatgctagatatagcaaagaatctgctggaagctggacttcggtagatatgactagtttgcaccttaaggatttagattgcatattctcaactgaggagcac

SEQ ID NO: 4888 - DNA, 122 bp, Homo sapiens
  misc_feature (61)..(62): /note="This region represents a CpG dinucleotide"
  misc_feature (61)..(61): /note="Nucleotide may be methylated to form 5-methylcytosine"
aaggtctctggaaagctccaatttgaggctgcaactcatgctagcgtactgtagcaaggccgtgtcttcagtcacagataattattctttgtgtttaaaatagttcctgctgtgtgaataaa

SEQ ID NO: 4889 - DNA, 122 bp, Homo sapiens
  misc_feature (61)..(62): /note="This region represents a CpG dinucleotide"
  misc_feature (61)..(61): /note="Nucleotide may be methylated to form 5-methylcytosine"
tcacagggtcaggagcaggtcgagaaaagagggaggaggcgagagccaggagacatcagccggcaggtgcccttagaggtttatggctcctttgtgcaagacagcttccccgggaccctcta

SEQ ID NO: 4890 - DNA, 122 bp, Homo sapiens
  misc_feature (61)..(62): /note="This region represents a CpG dinucleotide"
  misc_feature (61)..(61): /note="Nucleotide may be methylated to form 5-methylcytosine"
aggtggcaagcagggggttacacccacagccccgtccactgacaccttcagactcaagagcgagtgccaccgccctaaacggaaagacactcatcacggcagcatctttcaagtgaacagaa

SEQ ID NO: 4891 - DNA, 122 bp, Homo sapiens
  misc_feature (61)..(62): /note="This region represents a CpG dinucleotide"
  misc_feature (61)..(61): /note="Nucleotide may be methylated to form 5-methylcytosine"
gggttggggcctgaggcaaggtgagaattagcccccagactgggcatctgccccctggtgcgggcccccatttttttttatcccgatcccttcaccctggattctgaatccccttccacccc

SEQ ID NO: 4892 - DNA, 122 bp, Homo sapiens
  misc_feature (61)..(62): /note="This region represents a CpG dinucleotide"
  misc_feature (61)..(61): /note="Nucleotide may be methylated to form 5-methylcytosine"
cagctagttctgctcccacaagccattaagttattcatgatttctcagtgtagcaagggacgcatggatgaaggaaatccacagaggacatttgtttaactcaggaaatactcgttgactga

SEQ ID NO: 4893 - DNA, 122 bp, Homo sapiens
  misc_feature (61)..(62): /note="This region represents a CpG dinucleotide"
  misc_feature (61)..(61): /note="Nucleotide may be methylated to form 5-methylcytosine"
gtcccaggagagatcaaaggccagggctggtgagttcagggaagaggaattgaggatggccggtcccaccactatgtaatgagaaggctgaaatttatgtggagacctggagcatgggtagg

SEQ ID NO: 4894 - DNA, 122 bp, Homo sapiens
  misc_feature (61)..(62): /note="This region represents a CpG dinucleotide"
  misc_feature (61)..(61): /note="Nucleotide may be methylated to form 5-methylcytosine"
tcatttttatggttgtttacaaaagcatcagtcagcatcagatgggaaatttagaaaactcgtctttcacccaggtcagtggagaaggtccgctcctacatcttggccacaaactcagatat

SEQ ID NO: 4895 - DNA, 122 bp, Homo sapiens
  misc_feature (61)..(62): /note="This region represents a CpG dinucleotide"
  misc_feature (61)..(61): /note="Nucleotide may be methylated to form 5-methylcytosine"
tggcaggaagcttcctcacattttcagtttaaatgcattcctcctgatctttccaaaagacggaggcagaacagctggttgccatactccgcataaagtcctttgggtaaattgaaggtaaa

SEQ ID NO: 4896 - DNA, 122 bp, Homo sapiens
  misc_feature (61)..(62): /note="This region represents a CpG dinucleotide"
  misc_feature (61)..(61): /note="Nucleotide may be methylated to form 5-methylcytosine"
taccttatttcaggccctgacaaagcaaagaccacttagattccaggaagagagaaaaaccgtgtcaacagtgataaatctggagacagaggcaccatgtgacttcctggtatattgatcct

SEQ ID NO: 4897 - DNA, 122 bp, Homo sapiens
  misc_feature (61)..(62): /note="This region represents a CpG dinucleotide"
  misc_feature (61)..(61): /note="Nucleotide may be methylated to form 5-methylcytosine"
gtggaggctttgcaggctatatgatccctgtcacaactattcaactctgctactgtaaagcgaaaacaacataaacaggaagtaagcacacaggcagcagtgtgccgatcaaaccgcaccca

SEQ ID NO: 4898 - DNA, 122 bp, Homo sapiens
  misc_feature (61)..(62): /note="This region represents a CpG dinucleotide"
  misc_feature (61)..(61): /note="Nucleotide may be methylated to form 5-methylcytosine"
agcaggtccccaaagtagaaactttgtcagatcccaaagaatgtcagccccagtgactcacgtgtgtttctcccaaaaacacaatcgcaggcctttgggatcagctcagccatctctgagac

SEQ ID NO: 4899 - DNA, 122 bp, Homo sapiens
  misc_feature (61)..(62): /note="This region represents a CpG dinucleotide"
  misc_feature (61)..(61): /note="Nucleotide may be methylated to form 5-methylcytosine"
taattagggtctgccttagaagatcttcaagctgccttattttcatgtgcattattcagacgtctgagaagttcctggtgcaatgtgtcttgtgaaatatattaggcattcagtgcagctgt

SEQ ID NO: 4900 - DNA, 122 bp, Homo sapiens
  misc_feature (61)..(62): /note="This region represents a CpG dinucleotide"
  misc_feature (61)..(61): /note="Nucleotide may be methylated to form 5-methylcytosine"
tggcctcatctccctcaggctccatgcaaacgttcaatttcactcctgtattatgtggagcgcttttgctctctgaaacctattcaataactggccttgtttgcctcttcaaagatgcttta

SEQ ID NO: 4901 - DNA, 122 bp, Homo sapiens
  misc_feature (61)..(62): /note="This region represents a CpG dinucleotide"
  misc_feature (61)..(61): /note="Nucleotide may be methylated to form 5-methylcytosine"
ggctacttctaggaaggctaacacatgactcaaacagcagtcattaatacattaacatagcgagacactgagggattgaatgggacacagagcccatgcatggaagagtagattctgaagcc

SEQ ID NO: 4902 - DNA, 122 bp, Homo sapiens
  misc_feature (61)..(62): /note="This region represents a CpG dinucleotide"
  misc_feature (61)..(61): /note="Nucleotide may be methylated to form 5-methylcytosine"
ttttttaaagtatctgttgaacactggtaaattttgttccccgcctctctggtaatcgctcgacctgttctttccagcaggtatttctcctgcagaacctgctggctggcccccgcccttat

SEQ ID NO: 4903 - DNA, 122 bp, Homo sapiens
  misc_feature (61)..(62): /note="This region represents a CpG dinucleotide"
  misc_feature (61)..(61): /note="Nucleotide may be methylated to form 5-methylcytosine"
ttgataaatattgtaatcattcctgcaaggcaggtctctaagaggcacctatgtccattccgttggaaggagacatttggccatgacactgcactttgagcttgtcctgtttagcacagcca

SEQ ID NO: 4904 - DNA, 122 bp, Homo sapiens
  misc_feature (61)..(62): /note="This region represents a CpG dinucleotide"
  misc_feature (61)..(61): /note="Nucleotide may be methylated to form 5-methylcytosine"
acaattcaacagcacacaataagctttgttccttccatccaactaccgacatgcttctaccgttgcatcaacagaaaggctccagccgtcgtagtaggtaatttctcttcagtcaataggca

SEQ ID NO: 4905 - DNA, 122 bp, Homo sapiens
  misc_feature (61)..(62): /note="This region represents a CpG dinucleotide"
  misc_feature (61)..(61): /note="Nucleotide may be methylated to form 5-methylcytosine"
taaatgccataaaaaagatctgaagagtcttgtttgcagtatgttaatgtaggcggctgacgtggttgtttatgattcagcatattacctcatggtgttgaaagtgctctcagaaaccacca

SEQ ID NO: 4906 - DNA, 122 bp, Homo sapiens
  misc_feature (61)..(62): /note="This region represents a CpG dinucleotide"
  misc_feature (61)..(61): /note="Nucleotide may be methylated to form 5-methylcytosine"
atttccaaggagctctattttgatactttgacctagcatccttgtttaacaccaatgaaacgaaaagctacaagttctttcttctgtgacgccttattactgcattcagatattaaaggtac

SEQ ID NO: 4907 - DNA, 122 bp, Homo sapiens
  misc_feature (61)..(62): /note="This region represents a CpG dinucleotide"
  misc_feature (61)..(61): /note="Nucleotide may be methylated to form 5-methylcytosine"
gtagtggtgatctggcacgttgtaattgagactgaggaggtgaatgacttacatggaggtcgatggagctgaagagggtctctaggaaatgtcatagtcaagaggtttgtatgcagaatgtg

SEQ ID NO: 4908 - DNA, 122 bp, Homo sapiens
  misc_feature (61)..(62): /note="This region represents a CpG dinucleotide"
  misc_feature (61)..(61): /note="Nucleotide may be methylated to form 5-methylcytosine"
acaacatttctacagggctggttcttcttgtggtcaaattctcacccaagtggtttccatcgtctattggactcctctttaattctcttcctcctaacagtcacctaggcaaaggggcatct

SEQ ID NO: 4909 - DNA, 122 bp, Homo sapiens
  misc_feature (61)..(62): /note="This region represents a CpG dinucleotide"
  misc_feature (61)..(61): /note="Nucleotide may be methylated to form 5-methylcytosine"
catcatgaccatgagacacaactggacaccaggtaggccttggggctacgcatgggcaggcggggtagggtgaggtctatgaacagaatggagcaatgggctaacccggagccttcactcca

SEQ ID NO: 4910 - DNA, 122 bp, Homo sapiens
  misc_feature (61)..(62): /note="This region represents a CpG dinucleotide"
  misc_feature (61)..(61): /note="Nucleotide may be methylated to form 5-methylcytosine"
tttgctgactttactctgtatcctttcactgtaataagagataatggtgagtataacagccgcttctgagacctatgagttattctagtgaatcatggagcctgagctggatcttggagaca

SEQ ID NO: 4911 - DNA, 122 bp, Homo sapiens
  misc_feature (61)..(62): /note="This region represents a CpG dinucleotide"
  misc_feature (61)..(61): /note="Nucleotide may be methylated to form 5-methylcytosine"
cttcccaaatgctggctccttctggatactatgaatcctggtttctgttccagcagcttgcgctgctttgttgagattgccaactcaagaaagtcattgtgtgagtaaggcttgaagacaca

SEQ ID NO: 4912 - DNA, 122 bp, Homo sapiens
  misc_feature (61)..(62): /note="This region represents a CpG dinucleotide"
  misc_feature (61)..(61): /note="Nucleotide may be methylated to form 5-methylcytosine"
ctctccaaagtttctctctccttccatcactgctggtctcatatcagtccagctcacccccgccttcctccaggaaaggactcctgacctcattaggctcgcgccccctcccgctgacctcc

SEQ ID NO: 4913 - DNA, 122 bp, Homo sapiens
  misc_feature (61)..(62): /note="This region represents a CpG dinucleotide"
  misc_feature (61)..(61): /note="Nucleotide may be methylated to form 5-methylcytosine"
tcaattaacatttattgagtacttgctaagactcaggcactgtgttggattccaagcatgcgattcagctcatggatatatggagagagcagaatgaaaacatttttactgtcacacaaaag

SEQ ID NO: 4914 - DNA, 122 bp, Homo sapiens
  misc_feature (61)..(62): /note="This region represents a CpG dinucleotide"
  misc_feature (61)..(61): /note="Nucleotide may be methylated to form 5-methylcytosine"
ggtgaggtgggtgggggtggtgcgacggcccagcggctgcctgggattggtgggggccggcgtgagtgacagacaggggggcgagctgcgcgaccagcggtttgtttttcggagcgttcctg

SEQ ID NO: 4915 - DNA, 122 bp, Homo sapiens
  misc_feature (61)..(62): /note="This region represents a CpG dinucleotide"
  misc_feature (61)..(61): /note="Nucleotide may be methylated to form 5-methylcytosine"
cacctcagaaaacaaatctaggatcagtgggtggacaccactggaaagtgggtttcaattcgatggtaggaatttcttcagagtcagggatattagtgctcaaagtcacacaacaagctgaa

SEQ ID NO: 4916 - DNA, 122 bp, Homo sapiens
  misc_feature (61)..(62): /note="This region represents a CpG dinucleotide"
  misc_feature (61)..(61): /note="Nucleotide may be methylated to form 5-methylcytosine"
actgggattaatttactcagagatctggagtagcaataacttgtgtctttccaaaacccccgcagtcaattaatgagatcaatttaaagtggcagtattgaaagggaaaacccaaacactta

SEQ ID NO: 4917 - DNA, 122 bp, Homo sapiens
  misc_feature (61)..(62): /note="This region represents a CpG dinucleotide"
  misc_feature (61)..(61): /note="Nucleotide may be methylated to form 5-methylcytosine"
ctcagttttctagaagcagaaaagacaaagccacaaattaaaactatgaaccacatcttccgcccagcatgcttagttttttcatgagctgtgatcggttcagccaatgcgtgtactcccag

SEQ ID NO: 4918 - DNA, 122 bp, Homo sapiens
  misc_feature (61)..(62): /note="This region represents a CpG dinucleotide"
  misc_feature (61)..(61): /note="Nucleotide may be methylated to form 5-methylcytosine"
agggaattggactcagtcggggggcagcaatggaagtcagcaattgcttagggcggaatgcgatttccggggaggaggcgcgggtatgtagacagagggggttgggacacaccaggagggga

SEQ ID NO: 4919 - DNA, 122 bp, Homo sapiens
  misc_feature (61)..(62): /note="This region represents a CpG dinucleotide"
  misc_feature (61)..(61): /note="Nucleotide may be methylated to form 5-methylcytosine"
ttttgataagatatgacagctagttgctcttcaggcagtttggctggaatcagtggtttccggtaaacagtgacttgcctttcttgattgcagttgaggttttcagttttcttagtagttca

SEQ ID NO: 4920 - DNA, 122 bp, Homo sapiens
  misc_feature (61)..(62): /note="This region represents a CpG dinucleotide"
  misc_feature (61)..(61): /note="Nucleotide may be methylated to form 5-methylcytosine"
aggatccttagcaaagagaactaccttggagataaaagcatgctttcagagccagaaagacgttgagattggaagcataaaaacgcctagtgagctactcagctgttgtttgggttcacatt

SEQ ID NO: 4921 - DNA, 122 bp, Homo sapiens
  misc_feature (61)..(62): /note="This region represents a CpG dinucleotide"
  misc_feature (61)..(61): /note="Nucleotide may be methylated to form 5-methylcytosine"
agggagccgggcctagggtctgttcctgggaaggatctgttccgtggggcccgctggagccgcgttttcaatatgcaaagtgccggtgctgtgcagacctcggtggtggtggttttgcatgc

SEQ ID NO: 4922 - DNA, 122 bp, Homo sapiens
  misc_feature (61)..(62): /note="This region represents a CpG dinucleotide"
  misc_feature (61)..(61): /note="Nucleotide may be methylated to form 5-methylcytosine"
cccctccaagccagagagcccagatagccctcagtggggctggtgagagtcacagttctccgcacgtggccaggaagttgagcaagagtaacccaaccacataaggtatggtgcaaacctgg

SEQ ID NO: 4923 - DNA, 122 bp, Homo sapiens
  misc_feature (61)..(62): /note="This region represents a CpG dinucleotide"
  misc_feature (61)..(61): /note="Nucleotide may be methylated to form 5-methylcytosine"
gggtgaagtcagaggatgatgtgttcgtcattgatatggcccacgagcgtcccagggcaacgggaagacacaaggaccaggaaggaggcaagagaacacggtcaagatgggaaaggtctgca

SEQ ID NO: 4924 - DNA, 122 bp, Homo sapiens
  misc_feature (61)..(62): /note="This region represents a CpG dinucleotide"
  misc_feature (61)..(61): /note="Nucleotide may be methylated to form 5-methylcytosine"
gtatgagttttatgaaaacatttgtaacccaatcacagctatctttcccctgaaacaacacgtgctttagactgaattggttatagttctaggtatgagaaagaaatatcaaaatgttatac

SEQ ID NO: 4925 - DNA, 122 bp, Homo sapiens
  misc_feature (61)..(62): /note="This region represents a CpG dinucleotide"
  misc_feature (61)..(61): /note="Nucleotide may be methylated to form 5-methylcytosine"
tttgaattacctgtaaatcttgatcaaactcagatgactgtccaactcatccagaaactacgtttgtctaatagaacaggaagcaggtggtggtggtgggtggtgggggggcattgatgaga

SEQ ID NO: 4926 - DNA, 122 bp, Homo sapiens
  misc_feature (61)..(62): /note="This region represents a CpG dinucleotide"
  misc_feature (61)..(61): /note="Nucleotide may be methylated to form 5-methylcytosine"
gaagaggggggccaggcttctttaaacaatcttcctagcatttgtagctgctgtagtatacgtggtacgatagttcccccaccgtaatccacagttttgctttctgtggtttcagttacctg

SEQ ID NO: 4927 - DNA, 122 bp, Homo sapiens
  misc_feature (61)..(62): /note="This region represents a CpG dinucleotide"
  misc_feature (61)..(61): /note="Nucleotide may be methylated to form 5-methylcytosine"
cagaggaagatcccacatgtgtagaatacagacccatggcccctgggagagtgaaggacacgcagatgattggcagcggccacttctcacacaagcaacccctctctgttttactgatgaga

SEQ ID NO: 4928 - DNA, 122 bp, Homo sapiens
  misc_feature (61)..(62): /note="This region represents a CpG dinucleotide"
  misc_feature (61)..(61): /note="Nucleotide may be methylated to form 5-methylcytosine"
actaatgtgagattatttacaatgtttatttgtgctgcttatgttttatagcagaaataacgatgtgttggattacaaggtgatgcttcagtatcaccttgtgaggttacataatgtactgt

SEQ ID NO: 4929 - DNA, 122 bp, Homo sapiens
  misc_feature (61)..(62): /note="This region represents a CpG dinucleotide"
  misc_feature (61)..(61): /note="Nucleotide may be methylated to form 5-methylcytosine"
gcatttcagcatccacctttattttctaagtcactagttttttacaaactcagatattctcgtaagaaaagatgttgctatagaatggaatatagtagtgagacctatgagatgtactacta

SEQ ID NO: 4930 - DNA, 122 bp, Homo sapiens
  misc_feature (61)..(62): /note="This region represents a CpG dinucleotide"
  misc_feature (61)..(61): /note="Nucleotide may be methylated to form 5-methylcytosine"
ttttatttctaattgtttccctccccatgaaatcgtattagttcagatatattgtgtatccgttgatgtgctgtagtcctttagagagccataaaaggttataatagctaagattttttttc

SEQ ID NO: 4931 - DNA, 122 bp, Homo sapiens
  misc_feature (61)..(62): /note="This region represents a CpG dinucleotide"
  misc_feature (61)..(61): /note="Nucleotide may be methylated to form 5-methylcytosine"
tgtgatgtttgcacagtgatgaaatcacctaaccatgcatttctcagaactagaccaggtcgttaactgacacacggccgtaatatagggagttcctctgtccctggccattgattccattc

SEQ ID NO: 4932 - DNA, 122 bp, Homo sapiens
  misc_feature (61)..(62): /note="This region represents a CpG dinucleotide"
  misc_feature (61)..(61): /note="Nucleotide may be methylated to form 5-methylcytosine"
ctttttcctggacccagagctagactacatttctaagcctgtcttgcagttaggtatgggcgtgtgacttcattctaaccaatgaactgtgagtgatagctccaggcaaggcccacaaaact

SEQ ID NO: 4933 - DNA, 122 bp, Homo sapiens
  misc_feature (61)..(62): /note="This region represents a CpG dinucleotide"
  misc_feature (61)..(61): /note="Nucleotide may be methylated to form 5-methylcytosine"
taaattgggtggcggtggtggcatgtcctgttagctgtggagtcttttcctcttatcttgcgcctccggttgtgccttaatgacacttttgacattgtgtatcacaaccaactggcaaaaac

SEQ ID NO: 4934 - DNA, 122 bp, Homo sapiens
  misc_feature (61)..(62): /note="This region represents a CpG dinucleotide"
  misc_feature (61)..(61): /note="Nucleotide may be methylated to form 5-methylcytosine"
cagggtgacccacatttttgttgctgttgttgttctttcaagaggattgagcaaggcagtcgactgacaacttgaaacccagcccagctcactggcctcatgggggtagaccagcctgcttt

SEQ ID NO: 4935 - DNA, 122 bp, Homo sapiens
  misc_feature (61)..(62): /note="This region represents a CpG dinucleotide"
  misc_feature (61)..(61): /note="Nucleotide may be methylated to form 5-methylcytosine"
cctcctgggttcaagcgattctcctcctgtaattattccagttacttgggaggttgaggccggagaattgcttgaaccagggaggcagaggttgcagtgagccgagatcgtgccactgagac

SEQ ID NO: 4936 - DNA, 122 bp, Homo sapiens
  misc_feature (61)..(62): /note="This region represents a CpG dinucleotide"
  misc_feature (61)..(61): /note="Nucleotide may be methylated to form 5-methylcytosine"
ttaagccaccaacttgtgggaactggttatagcagccacaggaaagcccctgctggacatcgttatgatcccttttgccccagccctgaatattccagactggtccagaacctcagccccaa

SEQ ID NO: 4937 - DNA, 122 bp, Homo sapiens
  misc_feature (61)..(62): /note="This region represents a CpG dinucleotide"
  misc_feature (61)..(61): /note="Nucleotide may be methylated to form 5-methylcytosine"
aaagcaatcccaggcccaccgcgcccgcccacgctggcttcccccagacacccccggctgcgattcccctaccagacttggcagttccccagggtgttcgcattagcgccaaggggaaacat

SEQ ID NO: 4938 - DNA, 122 bp, Homo sapiens
  misc_feature (61)..(62): /note="This region represents a CpG dinucleotide"
  misc_feature (61)..(61): /note="Nucleotide may be methylated to form 5-methylcytosine"
tatgcgagaaggtttgaatagcagtgtcttccctggtgcatggcaggtccttggtacctccgccaactctcttctctacacacctgccagcatcccttcctcatcctgtgttcaatgtggct

SEQ ID NO: 4939 - DNA, 122 bp, Homo sapiens
  misc_feature (61)..(62): /note="This region represents a CpG dinucleotide"
  misc_feature (61)..(61): /note="Nucleotide may be methylated to form 5-methylcytosine"
atccaagcatctccccctgggtctctgactaagcctgactaaactaatttactctgagtgcgaggcacactattcacatcaaaagaatgtacttaagtagatatagtgcaaccttcccctgt

SEQ ID NO: 4940 - DNA, 122 bp, Homo sapiens
  misc_feature (61)..(62): /note="This region represents a CpG dinucleotide"
  misc_feature (61)..(61): /note="Nucleotide may be methylated to form 5-methylcytosine"
acgccaccgtgggcctggagtcccctcaccctcgacctgggctcgcccccaccctggacccgggtcaggtggtaccaagcactatgggcactgtctcctcgcaggggatggtggacaccgca

SEQ ID NO: 4941 - DNA, 122 bp, Homo sapiens
  misc_feature (61)..(62): /note="This region represents a CpG dinucleotide"
  misc_feature (61)..(61): /note="Nucleotide may be methylated to form 5-methylcytosine"
atgcatgtaagtctaaattttaaaaagatcttatacatctatatccttatttaagtcttacgacttttttgggtaatgaatctcatcgtttgacaacagatgaagattacgcttttcatttt

SEQ ID NO: 4942 - DNA, 122 bp, Homo sapiens
  misc_feature (61)..(62): /note="This region represents a CpG dinucleotide"
  misc_feature (61)..(61): /note="Nucleotide may be methylated to form 5-methylcytosine"
ccctcagcacctgggtgagctacccacccttggtctcccctccagtgggcctcacaccagcgcccatccctgtctaggcacagaccatgtgggagggatgcccagacattccggccagcatc

SEQ ID NO: 4943 - DNA, 122 bp, Homo sapiens
  misc_feature (61)..(62): /note="This region represents a CpG dinucleotide"
  misc_feature (61)..(61): /note="Nucleotide may be methylated to form 5-methylcytosine"
gccctgggctgggctgggctgagcagcagggaggctgagcagcctgtagagggcagcacacgcgcggcttcccagccagccgccctggaggacgtggaggggaggcagccacagtcctggag

SEQ ID NO: 4944 - DNA, 122 bp, Homo sapiens
  misc_feature (61)..(62): /note="This region represents a CpG dinucleotide"
  misc_feature (61)..(61): /note="Nucleotide may be methylated to form 5-methylcytosine"
gaccaaacagttccgataagcaaacaaaatctctcagacaattatgttcttgtttaaggccgtttgccttggaattcccaaaaggattctggaggattgcaaatttgctggggatgaagaaa

SEQ ID NO: 4945 - DNA, 122 bp, Homo sapiens
  misc_feature (61)..(62): /note="This region represents a CpG dinucleotide"
  misc_feature (61)..(61): /note="Nucleotide may be methylated to form 5-methylcytosine"
taagaattaaatttttgaaaaaaatttcacacatacaatgtgatatcttcatgccaaatccgcgcctttttccaactttggcatttaaaatcactgagtacctactccatttttggctttcc

SEQ ID NO: 4946 - DNA, 122 bp, Homo sapiens
  misc_feature (61)..(62): /note="This region represents a CpG dinucleotide"
  misc_feature (61)..(61): /note="Nucleotide may be methylated to form 5-methylcytosine"
cctgcctcggcctaccaaaatgctgcgattacaggcgtgagccaccgttcccggcctatacgttgtttattttggaaaaattaaaaattaagttttttttcattaaagatatgttatttccg

SEQ ID NO: 4947 - DNA, 122 bp, Homo sapiens
  misc_feature (61)..(62): /note="This region represents a CpG dinucleotide"
  misc_feature (61)..(61): /note="Nucleotide may be methylated to form 5-methylcytosine"
cgcggcgcttttgatgcaggcggtccacggtaaagttagagaaatgctgccctgctgctgcgctgcagattgaactctggggaagaagaaatgagcacgaccgggagcggtccatctaaacc

SEQ ID NO: 4948 - DNA, 122 bp, Homo sapiens
  misc_feature (61)..(62): /note="This region represents a CpG dinucleotide"
  misc_feature (61)..(61): /note="Nucleotide may be methylated to form 5-methylcytosine"
aaggaccctttaaaataattctcttcctggtggtggtaaccactgtttcaactagtatgacgtaagacaataactatgacatcactgggttgctcctaggatcaggaatggggcgtggccca

SEQ ID NO: 4949 - DNA, 122 bp, Homo sapiens
  misc_feature (61)..(62): /note="This region represents a CpG dinucleotide"
  misc_feature (61)..(61): /note="Nucleotide may be methylated to form 5-methylcytosine"
gagagagcctgtctatctgtggatgaagtcacttcttagaaggaaatacagccaagatgacgaagatgatgtagacatcatcttgcattgcttgaagccagattcacttcctgacttcctaa

SEQ ID NO: 4950 - DNA, 122 bp, Homo sapiens
  misc_feature (61)..(62): /note="This region represents a CpG dinucleotide"
  misc_feature (61)..(61): /note="Nucleotide may be methylated to form 5-methylcytosine"
gctagacacaaaagggcacactctatgtaattgcacttacatgacatccaagaacagacacgctaaactatggtaatagaaaccactggaggaagtaagaaagttgtgactggaaaggagaa

SEQ ID NO: 4951 - DNA, 122 bp, Homo sapiens
  misc_feature (61)..(62): /note="This region represents a CpG dinucleotide"
  misc_feature (61)..(61): /note="Nucleotide may be methylated to form 5-methylcytosine"
aggcgaaggcatgctggagaaaggaaaaagataagagtaacccacaagcttacaaaactgcgccctatctacatggtaattaaaaactgtacgttttgatggcagatttctggatgacagca

SEQ ID NO: 4952 - DNA, 122 bp, Homo sapiens
  misc_feature (61)..(62): /note="This region represents a CpG dinucleotide"
  misc_feature (61)..(61): /note="Nucleotide may be methylated to form 5-methylcytosine"
agattttttgttagtttgtttctcttttgcaaaggaataaatcaaggactggaccgggtgcgtgcctgctctgctgcggtttaggatggggcttgaggttctccttccaggatcagctgatg

SEQ ID NO: 4953 - DNA, 122 bp, Homo sapiens
  misc_feature (61)..(62): /note="This region represents a CpG dinucleotide"
  misc_feature (61)..(61): /note="Nucleotide may be methylated to form 5-methylcytosine"
tcttcttagattatgtaacatgatccaggcaggacatgtggctcttggtgcccagtgaaccgtgccatgttggtttttaaacatccttgctgaggtagctttcagggccttgtgtgtatgac

SEQ ID NO: 4954 - DNA, 122 bp, Homo sapiens
  misc_feature (61)..(62): /note="This region represents a CpG dinucleotide"
  misc_feature (61)..(61): /note="Nucleotide may be methylated to form 5-methylcytosine"
ccaatcgtgttttcccgaattaaaaagcttttgctggctgtacatcttcacagaatataccgaatgaaattataggttctgaccctgctgaccttccagcctttactttcaccacttgcctc

SEQ ID NO: 4955 - DNA, 122 bp, Homo sapiens
  misc_feature (61)..(62): /note="This region represents a CpG dinucleotide"
  misc_feature (61)..(61): /note="Nucleotide may be methylated to form 5-methylcytosine"
aagctgtcgcgggagcaggcaccttgtggtcagctctgggacccgcatttgcagtgagtgcgtggagccccaggcaaggcctgggaaaggttgcaggtgaagagagggcaccctgtcgtcct

SEQ ID NO: 4956 - DNA, 122 bp, Homo sapiens
  misc_feature (61)..(62): /note="This region represents a CpG dinucleotide"
  misc_feature (61)..(61): /note="Nucleotide may be methylated to form 5-methylcytosine"
ttgttctgggggagcatttatctctagcagccagcagggggtggcatcaggtaccaaaggcgtgagcctggcccaagggagtgggagcagagggctttgcagatttgggagaggtcaaggtc

SEQ ID NO: 4957 - DNA, 122 bp, Homo sapiens
  misc_feature (61)..(62): /note="This region represents a CpG dinucleotide"
  misc_feature (61)..(61): /note="Nucleotide may be methylated to form 5-methylcytosine"
gaagtggttgggatacattttggagatgaagctgactgaatttggtaatggattggatgacgaatggaaagaaacgagtcaggatgactcactggttattgggctgagcatccgagtgagtg

SEQ ID NO: 4958 - DNA, 122 bp, Homo sapiens
  misc_feature (61)..(62): /note="This region represents a CpG dinucleotide"
  misc_feature (61)..(61): /note="Nucleotide may be methylated to form 5-methylcytosine"
ttcagttatacccaccctgtgggtgtcatggaacctgctagtaattaggactgcccctgccgggcatgtaaaatttagattttacaaggaaatatcattctgctgctttcttggttaattaa

SEQ ID NO: 4959 - DNA, 122 bp, Homo sapiens
  misc_feature (61)..(62): /note="This region represents a CpG dinucleotide"
  misc_feature (61)..(61): /note="Nucleotide may be methylated to form 5-methylcytosine"
ctgctcctccccatgtccctggttctcaccagaaacctcagcagtgctcttaggaagtcccgctttggggacccacttttctggggacacaccatggcactgtcaggtggagagtctgggct

SEQ ID NO: 4960 - DNA, 122 bp, Homo sapiens
  misc_feature (61)..(62): /note="This region represents a CpG dinucleotide"
  misc_feature (61)..(61): /note="Nucleotide may be methylated to form 5-methylcytosine"
aagtcttccaactcaaggaatagttttctcatgatagaattgcagacatcagatccctaacgggttggaagattgggagatgagaaacagggtggttccgtgaaatggcatcctttggtaaa

SEQ ID NO: 4961 - DNA, 122 bp, Homo sapiens
  misc_feature (61)..(62): /note="This region represents a CpG dinucleotide"
  misc_feature (61)..(61): /note="Nucleotide may be methylated to form 5-methylcytosine"
tgatgcctggatatattccgatgaacatttttcagtgatattgggatcctttaggacattcgaagtacataggatatttctgcttccagcattccttaaaagagtcagaaagccataaaata

SEQ ID NO: 4962 - DNA, 122 bp, Homo sapiens
  misc_feature (61)..(62): /note="This region represents a CpG dinucleotide"
  misc_feature (61)..(61): /note="Nucleotide may be methylated to form 5-methylcytosine"
ctaattctctttggcactagccaaaactaaagtgaatgtgcttgaacgtgctcttcaaaacgaaaggcagaaggggtcaagccatccgggattcagagctaggtaatccacaagaggaaacc

SEQ ID NO: 4963 - DNA, 122 bp, Homo sapiens
  misc_feature (61)..(62): /note="This region represents a CpG dinucleotide"
  misc_feature (61)..(61): /note="Nucleotide may be methylated to form 5-methylcytosine"
gcacgtgcttcagttgcaactggtggttgctaacctgtctctgggtggtgatgttggctacgaacagtggtggcagcgtctgttcactgcagatctgttgctttgctgaatggtggggggtg

SEQ ID NO: 4964 - DNA, 122 bp, Homo sapiens
  misc_feature (61)..(62): /note="This region represents a CpG dinucleotide"
  misc_feature (61)..(61): /note="Nucleotide may be methylated to form 5-methylcytosine"
gttccacatgactggggaggcatcacaatcatggtggaagacgaaggaacagcaaagttacgtcttacacagtgacagataagagagcttctgcaggagaatggctctttataaaaccatca

SEQ ID NO: 4965 - DNA, 122 bp, Homo sapiens
  misc_feature (61)..(62): /note="This region represents a CpG dinucleotide"
  misc_feature (61)..(61): /note="Nucleotide may be methylated to form 5-methylcytosine"
ataagcaaatctttccacttcttcagccttccatccccattcccaccccatcagaagtcacgaaggaaaagaacactttttcgggggataaaaaaggaagcagtttgctaattgagtgtact

SEQ ID NO: 4966 - DNA, 122 bp, Homo sapiens
  misc_feature (61)..(62): /note="This region represents a CpG dinucleotide"
  misc_feature (61)..(61): /note="Nucleotide may be methylated to form 5-methylcytosine"
tgtggtatttatgctctctttgtctgcctgtttctaaggaaatgcatgtgtgccctgagccgtgatgatcctcccatccgtgttgtgagcacaggcatttgtgtctggtctgtcctccctgt

SEQ ID NO: 4967 - DNA, 122 bp, Homo sapiens
  misc_feature (61)..(62): /note="This region represents a CpG dinucleotide"
  misc_feature (61)..(61): /note="Nucleotide may be methylated to form 5-methylcytosine"
agcaggcccagcacaaagcccccgactccactcagcatcttgctctgtgcagattcagaccgtgctcctgagagaggaagccaggtttagtgatgtttattccaaattgaacctttttactt

SEQ ID NO: 4968 - DNA, 122 bp, Homo sapiens
  misc_feature (61)..(62): /note="This region represents a CpG dinucleotide"
  misc_feature (61)..(61): /note="Nucleotide may be methylated to form 5-methylcytosine"
cacagagtagatctcgtgtcctcaatgatagcagcacccattctccaagagctgtgtgttcgtcctgattcacagaaatctctccccttccaattgttcccgtattagtaagaggaaataca

SEQ ID NO: 4969 - DNA, 122 bp, Homo sapiens
  misc_feature (61)..(62): /note="This region represents a CpG dinucleotide"
  misc_feature (61)..(61): /note="Nucleotide may be methylated to form 5-methylcytosine"
ctattcacattgtacaattgttacacaatctacaaaaagtacaaaagcctagccattttccgatgccaggtcagagccaagttgcaaaaaaggaagacagcacagtaagttacaagaagagc

SEQ ID NO: 4970 - DNA, 122 bp, Homo sapiens
  misc_feature (61)..(62): /note="This region represents a CpG dinucleotide"
  misc_feature (61)..(61): /note="Nucleotide may be methylated to form 5-methylcytosine"
aacatgttaagggtcaaatgtctcagttcctgaattttgatggtgcaatacaaagcagaccgcttggtttgaaggcagctttgatcctgttataagatgatcaaaggctcaaaagatttttc

SEQ ID NO: 4971 - DNA, 122 bp, Homo sapiens
  misc_feature (61)..(62): /note="This region represents a CpG dinucleotide"
  misc_feature (61)..(61): /note="Nucleotide may be methylated to form 5-methylcytosine"
tagaacagtcttctttcccagagaacagagacgggaatctccaagttcctgcctattccacgtctaagtaataaaaccaaattagagcatgcctgccactagacttacaatgccagtccttc

SEQ ID NO: 4972 - DNA, 122 bp, Homo sapiens
  misc_feature (61)..(62): /note="This region represents a CpG dinucleotide"
  misc_feature (61)..(61): /note="Nucleotide may be methylated to form 5-methylcytosine"
gaggccaagcttgtttgctttgtggtcatctgttctcagccaagagaggcctaagcagggcgtggggagcagctgcaagtcaccttgggtgactgatgttatctaggcctaacggtttcctc

SEQ ID NO: 4973 - DNA, 122 bp, Homo sapiens
  misc_feature (61)..(62): /note="This region represents a CpG dinucleotide"
  misc_feature (61)..(61): /note="Nucleotide may be methylated to form 5-methylcytosine"
ggtttatctatgttgtaacatgtatcagacgtcattactttctgtggctaaataatattccgttgtctgtgtataccacattttatgtattcatttatccactagtggacacttgaatcatt

SEQ ID NO: 4974 - DNA, 122 bp, Homo sapiens
  misc_feature (61)..(62): /note="This region represents a CpG dinucleotide"
  misc_feature (61)..(61): /note="Nucleotide may be methylated to form 5-methylcytosine"
ctgaactagtaaagtgactctcaatggatggcgttgagccatctgtggctccctatttcccgtagaaatgaatgtgacatcccaaacattgttgcaaagcaacaaactccacctcttcttac

SEQ ID NO: 4975 - DNA, 122 bp, Homo sapiens
  misc_feature (61)..(62): /note="This region represents a CpG dinucleotide"
  misc_feature (61)..(61): /note="Nucleotide may be methylated to form 5-methylcytosine"
tgaccatgactcattgtcatctcaacttcccaggttcaagtggattctggagtgcagtggcgtgaccatgactcattgtcacctcaacttcccaggttcaagtggattctcccacctcagcc

SEQ ID NO: 4976 - DNA, 122 bp, Homo sapiens
  misc_feature (61)..(62): /note="This region represents a CpG dinucleotide"
  misc_feature (61)..(61): /note="Nucleotide may be methylated to form 5-methylcytosine"
gttctagtgtcttcttggctgggagggcagcatggataggaaggactctcagttgctccacggaaccccagaagggctagggattcggaaacatctgatctgagtacatggaagatcggctt

SEQ ID NO: 4977 - DNA, 122 bp, Homo sapiens
  misc_feature (61)..(62): /note="This region represents a CpG dinucleotide"
  misc_feature (61)..(61): /note="Nucleotide may be methylated to form 5-methylcytosine"
ctgtctgtaacagttaaatatagtacattcatcaaaagaaacactgcagctttaaaataacgaacaaaggaaatctttatgtcctgagatgaaaagatatgtatcagctgcccactgtgtta

SEQ ID NO: 4978 - DNA, 122 bp, Homo sapiens
  misc_feature (61)..(62): /note="This region represents a CpG dinucleotide"
  misc_feature (61)..(61): /note="Nucleotide may be methylated to form 5-methylcytosine"
tcttaaagtgactcttctaacaaagttgcattcctttgtttccccttgttttctgtcaaacgtttatgtcctctccatgccatttccaccctcaccatgcacccccacccaccccacaagtt

SEQ ID NO: 4979 - DNA, 122 bp, Homo sapiens
  misc_feature (61)..(62): /note="This region represents a CpG dinucleotide"
  misc_feature (61)..(61): /note="Nucleotide may be methylated to form 5-methylcytosine"
tccggagcgttccacattctccttgcaatgctggaagcacgggtgtctcccatcccgacacgcctcattctgtctgcagctcacagggcccggcttctgcagctcacagggtccggcttctg

SEQ ID NO: 4980 - DNA, 122 bp, Homo sapiens
  misc_feature (61)..(62): /note="This region represents a CpG dinucleotide"
  misc_feature (61)..(61): /note="Nucleotide may be methylated to form 5-methylcytosine"
tgtctataaaatgggggaagtacctcacccttcacagagctgtcagggaactggtgataacgtgcacacactgtgccaagcaggtgctcagaagtattgctcacgcagatggatgcttctgt

SEQ ID NO: 4981 - DNA, 122 bp, Homo sapiens
  misc_feature (61)..(62): /note="This region represents a CpG dinucleotide"
  misc_feature (61)..(61): /note="Nucleotide may be methylated to form 5-methylcytosine"
aggttggctgtggttcagctgtgtcactaggctgaacttactcaataagccacataacttcgagtcaggttccagtccattgtatgtgttattttcaaaatctaggctaaaggaggaacagt

SEQ ID NO: 4982 - DNA, 122 bp, Homo sapiens
  misc_feature (61)..(62): /note="This region represents a CpG dinucleotide"
  misc_feature (61)..(61): /note="Nucleotide may be methylated to form 5-methylcytosine"
atttctacctttaaaaataatttttctttaggatgtcctacagcaggggtcagcaaactacggctagtagatcaaatctgagaagctgcctatttttgtaagcaaagttttattggaacaca

SEQ ID NO: 4983 - DNA, 122 bp, Homo sapiens
  misc_feature (61)..(62): /note="This region represents a CpG dinucleotide"
  misc_feature (61)..(61): /note="Nucleotide may be methylated to form 5-methylcytosine"
aatttcacagtaaatttgatctgtttctcatggggcaagactttaattctgctgattattcgatatgggaaagcactctgtcactataatatctgctatgtgatccatgtataacagaatga

SEQ ID NO: 4984 - DNA, 122 bp, Homo sapiens
  misc_feature (61)..(62): /note="This region represents a CpG dinucleotide"
  misc_feature (61)..(61): /note="Nucleotide may be methylated to form 5-methylcytosine"
tgtagcagtgcattgagagtcagggcctctggcacctccatggggctcagggtctgaagacgtgatccaaacctgacaacttggtggcaggttctgtgagcattcatgatgttgtgaaaagg

SEQ ID NO: 4985 - DNA, 122 bp, Homo sapiens
  misc_feature (61)..(62): /note="This region represents a CpG dinucleotide"
  misc_feature (61)..(61): /note="Nucleotide may be methylated to form 5-methylcytosine"
agcggggagcagggaggaagtgggtgacaggaaggaatcagagctgccagttccagctcacgcttgtagtggctccggaaagcctcatccttgggcttcttgggatagagatttttgagctg

SEQ ID NO: 4986 - DNA, 122 bp, Homo sapiens
  misc_feature (61)..(62): /note="This region represents a CpG dinucleotide"
  misc_feature (61)..(61): /note="Nucleotide may be methylated to form 5-methylcytosine"
catctatgtagagatgattttgtcctagcaatccctttgccagcagtttagtcattgcctcgtatgttaatgtttttaggtttgttcttttttttttttttttttttttttgagacagagtc

SEQ ID NO: 4987 - DNA, 122 bp, Homo sapiens
  misc_feature (61)..(62): /note="This region represents a CpG dinucleotide"
  misc_feature (61)..(61): /note="Nucleotide may be methylated to form 5-methylcytosine"
tgcagtgtatgctccattgggtgcggatgcaggagctctccaagctggcctggcactcagcgatatgttcactttacctggtggttgagtggattctgccgttaccagctgcaagctgcctg

SEQ ID NO: 4988 - DNA, 122 bp, Homo sapiens
  misc_feature (61)..(62): /note="This region represents a CpG dinucleotide"
  misc_feature (61)..(61): /note="Nucleotide may be methylated to form 5-methylcytosine"
caatcctcctctttcggaaaacaaaactaggaagtatggaaagaaagaggccattaaccacgaaaagaaaagcccaaaggaggccctgagggcatcccctagtcctcctcacctcagtaaag

SEQ ID NO: 4989 - DNA, 122 bp, Homo sapiens
  misc_feature (61)..(62): /note="This region represents a CpG dinucleotide"
  misc_feature (61)..(61): /note="Nucleotide may be methylated to form 5-methylcytosine"
acgtgaacagcattgtgctaggccccaaggcaatgaacaggatagcaggacagcccttcacgcctcagtgatctctgttgtgagtcagtgtgagcatacccagtggcctctcttacccatgg

SEQ ID NO: 4990 - DNA, 122 bp, Homo sapiens
  misc_feature (61)..(62): /note="This region represents a CpG dinucleotide"
  misc_feature (61)..(61): /note="Nucleotide may be methylated to form 5-methylcytosine"
ctttcagctctgacaattctctgcctcatcttctttgtgcttgcttaaggagtgggaaggcgctaggtggccaggcagtccccacttctgtctcgtggtgtccattttgatggcctgcaccc

SEQ ID NO: 4991 - DNA, 122 bp, Homo sapiens
  misc_feature (61)..(62): /note="This region represents a CpG dinucleotide"
  misc_feature (61)..(61): /note="Nucleotide may be methylated to form 5-methylcytosine"
gcttccttcctggctgggaggtggggcatgctgggtaatcagagagaatgcttctagagacgaggccaagctggtcttaaacaactgaggccttgtggaaggagtgaatgtgatggtgatcc

SEQ ID NO: 4992 - DNA, 122 bp, Homo sapiens
  misc_feature (61)..(62): /note="This region represents a CpG dinucleotide"
  misc_feature (61)..(61): /note="Nucleotide may be methylated to form 5-methylcytosine"
gctattttaagtcctgaatgtcaaaactcttctgggacattgatctcaaactgcttattccgtgaagtgaaaccaggctttctgccaccaatgtggcgtccctttttgcaattttagaaaaa

SEQ ID NO: 4993 - DNA, 122 bp, Homo sapiens
  misc_feature (61)..(62): /note="This region represents a CpG dinucleotide"
  misc_feature (61)..(61): /note="Nucleotide may be methylated to form 5-methylcytosine"
aggtggacctgatggccagagctactagcggggaccaggggtaacatgggtccccctccccgagccatgaagagctgcctgcggccatcttggccctcgcaccccgtctctgtcaccccagg

SEQ ID NO: 4994 - DNA, 122 bp, Homo sapiens
  misc_feature (61)..(62): /note="This region represents a CpG dinucleotide"
  misc_feature (61)..(61): /note="Nucleotide may be methylated to form 5-methylcytosine"
acctagtctgtcttctcacttacattctagataactttgagcaagttgtttaagcctcttcgtgcttcagtgtcccttatctgtaaaatggggattgtggctgttctaaggattaagtgagt

SEQ ID NO: 4995 - DNA, 122 bp, Homo sapiens
  misc_feature (61)..(62): /note="This region represents a CpG dinucleotide"
  misc_feature (61)..(61): /note="Nucleotide may be methylated to form 5-methylcytosine"
cacaggctctcgtctgcggggttcttgcagaagggtgggcgtgtgcgcgcgttctccaaacgccacccccacggggcctcacagccgccccggcctggcaaccgtcacccattttacgaacg

SEQ ID NO: 4996 - DNA, 122 bp, Homo sapiens
  misc_feature (61)..(62): /note="This region represents a CpG dinucleotide"
  misc_feature (61)..(61): /note="Nucleotide may be methylated to form 5-methylcytosine"
aaaatcctcccctcacacatccttctagcttcaattttatcttcttatcttcttaaaagtcgcaattttcaaagaagttatctgcaattggcatctccctttcttcacttctccttttctct

SEQ ID NO: 4997 - DNA, 122 bp, Homo sapiens
  misc_feature (61)..(62): /note="This region represents a CpG dinucleotide"
  misc_feature (61)..(61): /note="Nucleotide may be methylated to form 5-methylcytosine"
cgctgaacgtgccatgctccattgccccgtgagtaactccatgctcttgccggtttcacacggcctctcagagctggagcctttgttcaggagccctgggcagctttcaggaagctcttggg

SEQ ID NO: 4998 - DNA, 122 bp, Homo sapiens
  misc_feature (61)..(62): /note="This region represents a CpG dinucleotide"
  misc_feature (61)..(61): /note="Nucleotide may be methylated to form 5-methylcytosine"
ttcaacttatgttataattctgcaacatgtgcacatacattgtgtttctgatttccaacacgtttctcactgcagctacaaaaacagagatattattttagggctgctctgaaatcactttg

SEQ ID NO: 4999 - DNA, 122 bp, Homo sapiens
  misc_feature (61)..(62): /note="This region represents a CpG dinucleotide"
  misc_feature (61)..(61): /note="Nucleotide may be methylated to form 5-methylcytosine"
ccataaaggggtggtgggatggaggtctcaagattcctcactgtctagaaggaatacagacgggcattacctgcctcagggccaagctggcccatgccacacaggcaagacctgcacaagat

SEQ ID NO: 5000 - DNA, 122 bp, Homo sapiens
  misc_feature (61)..(62): /note="This region represents a CpG dinucleotide"
  misc_feature (61)..(61): /note="Nucleotide may be methylated to form 5-methylcytosine"
gaacttcaaggtctacactagatactttccaaggctgcttcctctgttggtcagatcagacgctgctttgttagctgtggttgctacagaagctctgtttcagttccagagctctgtgctga

SEQ ID NO: 5001 - DNA, 122 bp, Homo sapiens
  misc_feature (61)..(62): /note="This region represents a CpG dinucleotide"
  misc_feature (61)..(61): /note="Nucleotide may be methylated to form 5-methylcytosine"
cacacagcgacatgtgcacacacaggaacacagaggcccacttacatataaatgcagatgcgtgcctgcatcaacgagcgggagcacattgggcaaatgcacgtgtacatgccctacgtgaa

SEQ ID NO: 5002 - DNA, 122 bp, Homo sapiens
  misc_feature (61)..(62): /note="This region represents a CpG dinucleotide"
  misc_feature (61)..(61): /note="Nucleotide may be methylated to form 5-methylcytosine"
ttttttgtttcaccattttataccagctcctaagacagtgtatgatctacagcaaatactcgtaaatatttattaaatgcattcagaataaacaggaagaaggggtatcaacaggaaagtga

SEQ ID NO: 5003 - DNA, 122 bp, Homo sapiens
  misc_feature (61)..(62): /note="This region represents a CpG dinucleotide"
  misc_feature (61)..(61): /note="Nucleotide may be methylated to form 5-methylcytosine"
gggtttagtgagacaaggagggtatgattgagtgtgaggcaaaacgtgggtcagacccagcgccgagttggatctcactggtcttagctgaattggccacttcctgtttgtcaggatcctgt

SEQ ID NO: 5004 - DNA, 122 bp, Homo sapiens
  misc_feature (61)..(62): /note="This region represents a CpG dinucleotide"
  misc_feature (61)..(61): /note="Nucleotide may be methylated to form 5-methylcytosine"
ccctctttctgggtttacactgaagatatattattacaaaacaaatgatgaaatatgagacgtgttcaactggttgtttgggcaacatgacatccactggctagtgtggcccatctgcgaag

SEQ ID NO: 5005 - DNA, 122 bp, Homo sapiens
  misc_feature (61)..(62): /note="This region represents a CpG dinucleotide"
  misc_feature (61)..(61): /note="Nucleotide may be methylated to form 5-methylcytosine"
ggaggctgaggcacaagaatcgctttaactcagaaggtggagattgcagtgagctaagatcgtgccatggagccaagatctccagcctgggtgacagaacgagactccttctcaaaaaaaaa

SEQ ID NO: 5006 - DNA, 122 bp, Homo sapiens
  misc_feature (61)..(62): /note="This region represents a CpG dinucleotide"
  misc_feature (61)..(61): /note="Nucleotide may be methylated to form 5-methylcytosine"
ttcattagcaaaagtgaaaatctttggcaactattatcaaactgacaatcaatctcaattcgtgactttttaaagctttaaagattcttattagttatttgcataaatacaatataaatact

SEQ ID NO: 5007 - DNA, 122 bp, Homo sapiens
  misc_feature (61)..(62): /note="This region represents a CpG dinucleotide"
  misc_feature (61)..(61): /note="Nucleotide may be methylated to form 5-methylcytosine"
gccatgataacttgaaccataaattaagctgatttaaaagaactcagcagaagaacattccgaaactggttatagaaccaaagaagagactgagatgttttacttttaaaggaagttatttt

SEQ ID NO: 5008 - DNA, 122 bp, Homo sapiens
  misc_feature (61)..(62): /note="This region represents a CpG dinucleotide"
  misc_feature (61)..(61): /note="Nucleotide may be methylated to form 5-methylcytosine"
caatgaaggaaaaagtcgatttgaagggcgggacttaagtcagttgtgtttttcttacgacgcccacactgcaatgactcagaccactaatctctgaaggagaagctctcatgattctccct

SEQ ID NO: 5009 - DNA, 122 bp, Homo sapiens
  misc_feature (61)..(62): /note="This region represents a CpG dinucleotide"
  misc_feature (61)..(61): /note="Nucleotide may be methylated to form 5-methylcytosine"
ggaagagcgaggcgggccttgcgctttttaatccggaacgggaagcactggggaagggaccgaggttaacttcgacctccgctggggcagatacgtaaaccttctcaaacctccgagttcac

SEQ ID NO: 5010 - DNA, 122 bp, Homo sapiens
  misc_feature (61)..(62): /note="This region represents a CpG dinucleotide"
  misc_feature (61)..(61): /note="Nucleotide may be methylated to form 5-methylcytosine"
ctgggactacaggtgcatgccaccacgccaagctaatatttaaaaaatttttttagataccgggtcttgctttgttgcccaggctggtcttcaacttctgggctcaagcaatcctcccacct

SEQ ID NO: 5011 - DNA, 122 bp, Homo sapiens
  misc_feature (61)..(62): /note="This region represents a CpG dinucleotide"
  misc_feature (61)..(61): /note="Nucleotide may be methylated to form 5-methylcytosine"
cccagagtgagcatcaacaccgtgatcacggttatcacgtgggaggtctgcccaggatcccggcagtgaggctgccctggaggcaggcttgctccgccacaggcgcgcaggcaacagcagcg

SEQ ID NO: 5012 - DNA, 122 bp, Homo sapiens
  misc_feature (61)..(62): /note="This region represents a CpG dinucleotide"
  misc_feature (61)..(61): /note="Nucleotide may be methylated to form 5-methylcytosine"
cgtggggattatggggattacagttcaagaggagacttgggtggggacacaaagcctaaccgtatcactgatgttcacggttaaccccttcgttgagcaaagaaaatacagatatcaataga

SEQ ID NO: 5013 - DNA, 122 bp, Homo sapiens
  misc_feature (61)..(62): /note="This region represents a CpG dinucleotide"
  misc_feature (61)..(61): /note="Nucleotide may be methylated to form 5-methylcytosine"
cgaattcctggcttcaagccatccttccacctcagcttccctaagtgctgggattgcaggcgtgagccactgtgcccagctggtggcgataagtgagcactgaatattaacttagccccatg

SEQ ID NO: 5014 - DNA, 122 bp, Homo sapiens
  misc_feature (61)..(62): /note="This region represents a CpG dinucleotide"
  misc_feature (61)..(61): /note="Nucleotide may be methylated to form 5-methylcytosine"
cccagctccatgatcgtgacggtgtcctgggtgcgggacaggaacacgtagccgaagttccgggctgcggtgaccagcgccccctcgtcgggggaggccgcctggtacaacagctggtctgg

SEQ ID NO: 5015 - DNA, 122 bp, Homo sapiens
  misc_feature (61)..(62): /note="This region represents a CpG dinucleotide"
  misc_feature (61)..(61): /note="Nucleotide may be methylated to form 5-methylcytosine"
ggcagtgctgggccagggctggctcacacaggcccacggatggctctcttcccaactccacgtccagtgacagcctgccggtcactgaaattggccacaataggagtatttacaccacagaa

SEQ ID NO: 5016 - DNA, 122 bp, Homo sapiens
  misc_feature (61)..(62): /note="This region represents a CpG dinucleotide"
  misc_feature (61)..(61): /note="Nucleotide may be methylated to form 5-methylcytosine"
aactgaaaacctcctattacctggttaacatgatagctgtggtaatatcacagcgcagcacgttactcacttgtttgtggtgacattggtgtaaacaaacctacagtgctgccagtcataca

SEQ ID NO: 5017 - DNA, 122 bp, Homo sapiens
  misc_feature (61)..(62): /note="This region represents a CpG dinucleotide"
  misc_feature (61)..(61): /note="Nucleotide may be methylated to form 5-methylcytosine"
tgaaccagatctgacttcaagcctgagttcctaacaaagataggaagaacaaggcaaccccggatgatacagtagccagacacttgctagtaaaggccagaacactgactcactaagctctg

SEQ ID NO: 5018 - DNA, 122 bp, Homo sapiens
  misc_feature (61)..(62): /note="This region represents a CpG dinucleotide"
  misc_feature (61)..(61): /note="Nucleotide may be methylated to form 5-methylcytosine"
cttttacctgaatggtagtttcaatctttaggcggtctttacttttcagtttcctccacacgttccgatacctgccatcttctcatggagcacattcacatgtcacaatcagtgtttccgca

SEQ ID NO: 5019 - DNA, 122 bp, Homo sapiens
  misc_feature (61)..(62): /note="This region represents a CpG dinucleotide"
  misc_feature (61)..(61): /note="Nucleotide may be methylated to form 5-methylcytosine"
tgcagggatttcaaaacacttaacaaaaattgctctaagtaggccgggcacagtggctgacgcatgtaatcccagtactttaggaggccggggtgggcggatcacctgaggtcaggagttcg

SEQ ID NO: 5020 - DNA, 122 bp, Homo sapiens
  misc_feature (61)..(62): /note="This region represents a CpG dinucleotide"
  misc_feature (61)..(61): /note="Nucleotide may be methylated to form 5-methylcytosine"
aaattaccaccagcaaagcgctcagaaacagtgcctggcctccagggctggcttcatgggcgtgtgacctatgtggttatgtggcaccctgtgctttgtttaatgctctgtggtcgccatct

SEQ ID NO: 5021 - DNA, 122 bp, Homo sapiens
  misc_feature (61)..(62): /note="This region represents a CpG dinucleotide"
  misc_feature (61)..(61): /note="Nucleotide may be methylated to form 5-methylcytosine"
ctctggggacggcctctgctctggctgaggatttctgtcccagagcggtacaggaatctgcgtagtgttttagtttggagaaaacaggaagttacactcatcacatcttttgcccagatgat

SEQ ID NO: 5022 - DNA, 122 bp, Homo sapiens
  misc_feature (61)..(62): /note="This region represents a CpG dinucleotide"
  misc_feature (61)..(61): /note="Nucleotide may be methylated to form 5-methylcytosine"
ctaatggagtcaaataccaagaagaaattctttttagactatttccaaacccttatcatacgtgtctcagcagcattagaaaggacccagtagtatcgtttggttaagtatcaaccatgttc

SEQ ID NO: 5023 - DNA, 122 bp, Homo sapiens
  misc_feature (61)..(62): /note="This region represents a CpG dinucleotide"
  misc_feature (61)..(61): /note="Nucleotide may be methylated to form 5-methylcytosine"
tttagttcttggtaattctacccaagtctgaaaggaaatcaagatgactgtccacattgacgcaaatcacaggacatggaggcaatgtcaggcatttaatgttgtaaaagttgcaaaccaga

SEQ ID NO: 5024 - DNA, 122 bp, Homo sapiens
  misc_feature (61)..(62): /note="This region represents a CpG dinucleotide"
  misc_feature (61)..(61): /note="Nucleotide may be methylated to form 5-methylcytosine"
tgtcctccagcagcactcccagcagctgagaaaataaatccttcattcctgaagggggatcggggtgatatagcacaatgtttacataaggctgtcattggctaagacagcccaatactttg

SEQ ID NO: 5025 - DNA, 122 bp, Homo sapiens
  misc_feature (61)..(62): /note="This region represents a CpG dinucleotide"
  misc_feature (61)..(61): /note="Nucleotide may be methylated to form 5-methylcytosine"
tcgtcacgagatgcacccagcccagcctcttgcaggcggtagaaagtcaataaatattcacgagagggaatgtgaacacaggcagaccgaaagtaaacacaacactcagcgcctgctgtttt

SEQ ID NO: 5026 - DNA, 122 bp, Homo sapiens
  misc_feature (61)..(62): /note="This region represents a CpG dinucleotide"
  misc_feature (61)..(61): /note="Nucleotide may be methylated to form 5-methylcytosine"
tcacctccccaggggtgtagaaagacctgggcctgtatatatgtctatacccatggcttccggagaaatcaacactagatctaagatgagctgaataataagaaaattaccccctccacaac

SEQ ID NO: 5027 - DNA, 122 bp, Homo sapiens
  misc_feature (61)..(62): /note="This region represents a CpG dinucleotide"
  misc_feature (61)..(61): /note="Nucleotide may be methylated to form 5-methylcytosine"
caaccaagagttgactgaagtgtgcatagaatatatttaactgaataactaagacctgaacgtaatccaaggactgcatgttgagaaatcactgcccctagggtgtgtccttgctaacatgt

SEQ ID NO: 5028 - DNA, 122 bp, Homo sapiens
  misc_feature (61)..(62): /note="This region represents a CpG dinucleotide"
  misc_feature (61)..(61): /note="Nucleotide may be methylated to form 5-methylcytosine"
catgatggccaaggtcgtccctgatggcgtccagttggtcctgaaggaggcggatgcgctcgtccaggttgcgctgctgggccaggacggcggccttgcccgccagcagggcgcaatagacg

SEQ ID NO: 5029 - DNA, 122 bp, Homo sapiens
  misc_feature (61)..(62): /note="This region represents a CpG dinucleotide"
  misc_feature (61)..(61): /note="Nucleotide may be methylated to form 5-methylcytosine"
gcagctcaacaaacaaggctagggaatgcgcccccaacagaggtccactgtctgccccgacgcccgccttccagggagagcattccagtagctgacctaaccttctgggcattggcagaact

SEQ ID NO: 5030 - DNA, 122 bp, Homo sapiens
  misc_feature (61)..(62): /note="This region represents a CpG dinucleotide"
  misc_feature (61)..(61): /note="Nucleotide may be methylated to form 5-methylcytosine"
ataaaaggtgcgaggcagcaagcagaacattcacatgggtactctgggggttcctgcccacgcttaggtctctgatgcactcaagcctcatgattcatccatggctgtgtaccttgacacca

SEQ ID NO: 5031 - DNA, 122 bp, Homo sapiens
  misc_feature (61)..(62): /note="This region represents a CpG dinucleotide"
  misc_feature (61)..(61): /note="Nucleotide may be methylated to form 5-methylcytosine"
aagttttaaagttagttttttcacttcctgcaggtgaaaggaatcatttaattgatttaacgacaacaggtgaatgaagtaaactgatgtttcttttgaagtttagctacttcctttctgcc

SEQ ID NO: 5032 - DNA, 122 bp, Homo sapiens
  misc_feature (61)..(62): /note="This region represents a CpG dinucleotide"
  misc_feature (61)..(61): /note="Nucleotide may be methylated to form 5-methylcytosine"
tgggtcaaatctatttgctgctcatgtctccaagtatcttcaattagttagcctttgaaccggtccacacatgttcagtaagttcataagatatgaagcaatgctttagcatttgacagatt

SEQ ID NO: 5033 - DNA, 122 bp, Homo sapiens
  misc_feature (61)..(62): /note="This region represents a CpG dinucleotide"
  misc_feature (61)..(61): /note="Nucleotide may be methylated to form 5-methylcytosine"
cccataataaaaccttgtgccttgtttgttggctttgggtctcttcttcaggttcttgaacgtggtgtcatccctactgaaatcaatagggatctagcatgacagaggaacatgtgatgaaa

SEQ ID NO: 5034 - DNA, 122 bp, Homo sapiens
  misc_feature (61)..(62): /note="This region represents a CpG dinucleotide"
  misc_feature (61)..(61): /note="Nucleotide may be methylated to form 5-methylcytosine"
tacaggaattattcagctccattataatcttacaggattactgtcctatatgcagtttgtcgtttactgcaatatcattatacagcacatgactatattgtctatggtaactgggctttatg

SEQ ID NO: 5035 - DNA, 122 bp, Homo sapiens
  misc_feature (61)..(62): /note="This region represents a CpG dinucleotide"
  misc_feature (61)..(61): /note="Nucleotide may be methylated to form 5-methylcytosine"
gagccactgtgcccagctagttgcttacttcttaagtgacctaatggtgacttcagtgctcgagggcacttcctaggctatttggtggccctcagtaataaagagattgtataatcttgtat

SEQ ID NO: 5036 - DNA, 122 bp, Homo sapiens
  misc_feature (61)..(62): /note="This region represents a CpG dinucleotide"
  misc_feature (61)..(61): /note="Nucleotide may be methylated to form 5-methylcytosine"
aagtgtccatctagactttgggtgccgtagaatgactcagagtctgaatcaacatgaaatcgagaaaacgtcctttgcaagggtttcagggaacacctgaaatcctgaagaactgtttgtat

SEQ ID NO: 5037 - DNA, 122 bp, Homo sapiens
  misc_feature (61)..(62): /note="This region represents a CpG dinucleotide"
  misc_feature (61)..(61): /note="Nucleotide may be methylated to form 5-methylcytosine"
attcccccactttatagtcaaggaactgaggcctggagacaccaggccttcctgtcgccacggccacaagctgagccatcttggagccgactccaacccctgtagagcccagggagcgcccc

SEQ ID NO: 5038 - DNA, 122 bp, Homo sapiens
  misc_feature (61)..(62): /note="This region represents a CpG dinucleotide"
  misc_feature (61)..(61): /note="Nucleotide may be methylated to form 5-methylcytosine"
aaagttttcctcttcctgtgatccccacgatggtgaattcagcaacataaatagctcctgcgcacacgccaggcagggatggcgaagaacacacaagaaccctcactgcctccaccaaaagg

SEQ ID NO: 5039 - DNA, 122 bp, Homo sapiens
  misc_feature (61)..(62): /note="This region represents a CpG dinucleotide"
  misc_feature (61)..(61): /note="Nucleotide may be methylated to form 5-methylcytosine"
ttggatctgaaccaaatcttttgagatcccaactaccctgaagaacactgaagacatttacggggcatattaaatggtatcttaaatactagttgtatacctcataatgtctaaggcagcta

SEQ ID NO: 5040 - DNA, 122 bp, Homo sapiens
  misc_feature (61)..(62): /note="This region represents a CpG dinucleotide"
  misc_feature (61)..(61): /note="Nucleotide may be methylated to form 5-methylcytosine"
tctcctaagctccattcatggcaagtgccctacacagtaataccatttttcatctttttccgtctgtctcccaagctggagtgcagtgatgcaatcatagcttactctcaactttcaattcc

SEQ ID NO: 5041 - DNA, 122 bp, Homo sapiens
  misc_feature (61)..(62): /note="This region represents a CpG dinucleotide"
  misc_feature (61)..(61): /note="Nucleotide may be methylated to form 5-methylcytosine"
ctcctaatatcttcctagacttatgctttccttggaattccagcaatagaactgcatactcgtaccctaatcaagaaccttttatgtactaggtgctctactagacatgagataaaaagata

SEQ ID NO: 5042 - DNA, 122 bp, Homo sapiens
  misc_feature (61)..(62): /note="This region represents a CpG dinucleotide"
  misc_feature (61)..(61): /note="Nucleotide may be methylated to form 5-methylcytosine"
cagagcctggcgcgggcactgcccggacccacttggcctctcttgagtcgccgcgatctccgtctcctcccgggcgtctctgctgccccctagagagggggccactcgcagtggagaactgg

SEQ ID NO: 5043 - DNA, 122 bp, Homo sapiens
  misc_feature (61)..(62): /note="This region represents a CpG dinucleotide"
  misc_feature (61)..(61): /note="Nucleotide may be methylated to form 5-methylcytosine"
atctcctttacttgaagtaaactgaacatagatatcaactacatatacaaaatactttcacgagaatacttagattagtatttcagtaagtagtcgggtaccatagcctagccaattgacac

SEQ ID NO: 5044 - DNA, 122 bp, Homo sapiens
  misc_feature (61)..(62): /note="This region represents a CpG dinucleotide"
  misc_feature (61)..(61): /note="Nucleotide may be methylated to form 5-methylcytosine"
attttccgcttcaggacttctttcaccaggcccttgtctgggccctgtttgactttttctcgtccgattaagtacaagcactttggggtaaggagcaggtctcgctttacaccctgtaagga

SEQ ID NO: 5045 - DNA, 122 bp, Homo sapiens
  misc_feature (61)..(62): /note="This region represents a CpG dinucleotide"
  misc_feature (61)..(61): /note="Nucleotide may be methylated to form 5-methylcytosine"
tccgcttcaggacttctttcaccaggcccttgtctgggccctgtttgactttttctcgtccgattaagtacaagcactttggggtaaggagcaggtctcgctttacaccctgtaaggagagg

SEQ ID NO: 5046 - DNA, 122 bp, Homo sapiens
  misc_feature (61)..(62): /note="This region represents a CpG dinucleotide"
  misc_feature (61)..(61): /note="Nucleotide may be methylated to form 5-methylcytosine"
gcttccttggatctcctttgcccatgtttagttctttttttcctcagtgagccacagagtcgcccagtgcctgtctggctctcacttgccccagggctgtctctatggtgctcagtacactg

SEQ ID NO: 5047 - DNA, 122 bp, Homo sapiens
  misc_feature (61)..(62): /note="This region represents a CpG dinucleotide"
  misc_feature (61)..(61): /note="Nucleotide may be methylated to form 5-methylcytosine"
ggacaggagagcgggctcagagatgttaaggagcctgcctgaggccacacagctgggaagcggcaggctggggtctgaaccagggctggggcagtgcagagacacacgaggaggaaaataga

SEQ ID NO: 5048 - DNA, 122 bp, Homo sapiens
  misc_feature (61)..(62): /note="This region represents a CpG dinucleotide"
  misc_feature (61)..(61): /note="Nucleotide may be methylated to form 5-methylcytosine"
ctcttttttataatgttgtacttctgatttctagggaatgattagcaaactcacccctgacgctatgtcccttggacattatccttgtatacacaaaaagtgcaattaacgagtgggtagaa

SEQ ID NO: 5049 - DNA, 122 bp, Homo sapiens
  misc_feature (61)..(62): /note="This region represents a CpG dinucleotide"
  misc_feature (61)..(61): /note="Nucleotide may be methylated to form 5-methylcytosine"
cgggttcactgaaatgtttaaatacactcctgactgcaaacacatccactcaccaagtagcgctaacaatctccccttctccgcctctaggcaaagcatcctgaaactaaattggcaatcct

SEQ ID NO: 5050 - DNA, 122 bp, Homo sapiens
  misc_feature (61)..(62): /note="This region represents a CpG dinucleotide"
  misc_feature (61)..(61): /note="Nucleotide may be methylated to form 5-methylcytosine"
aaaaaacactatttacaacatgttccttctatgctgctggtttcctagccacaaaacatccgtctccaagggtaagacagtcactgaaacctaaagatatgcatgcttacagtgcaattcta

SEQ ID NO: 5051 - DNA, 122 bp, Homo sapiens
  misc_feature (61)..(62): /note="This region represents a CpG dinucleotide"
  misc_feature (61)..(61): /note="Nucleotide may be methylated to form 5-methylcytosine"
gataaaatgtatccagtatatttctaatgagtaagtatggaaaattactgtactctgagacggtttaggccaagtctgtgttatggctatctttatatagatagtgcatgtttgaagattgg

SEQ ID NO: 5052 - DNA, 122 bp, Homo sapiens
  misc_feature (61)..(62): /note="This region represents a CpG dinucleotide"
  misc_feature (61)..(61): /note="Nucleotide may be methylated to form 5-methylcytosine"
tttgctggaaatcagaagtcattaagtatctttgtggttgaaaatgtttggtgtctcaggcggttctacttattgctaaagaggtctaccttgagcttatagtaaatttgtcagttagttga

SEQ ID NO: 5053 - DNA, 122 bp, Homo sapiens
  misc_feature (61)..(62): /note="This region represents a CpG dinucleotide"
  misc_feature (61)..(61): /note="Nucleotide may be methylated to form 5-methylcytosine"
gcgactcgcccctctctggctggccgagtgtctggcgccaacctcgctggaggaggctgtcgggggcgggccagccagcggggctgccctcctcgcagtgacgtcccagggggcggaggggc

SEQ ID NO: 5054 - DNA, 122 bp, Homo sapiens
  misc_feature (61)..(62): /note="This region represents a CpG dinucleotide"
  misc_feature (61)..(61): /note="Nucleotide may be methylated to form 5-methylcytosine"
ggttctggggattacaacatggacatcattgcatgtcattatactgcctattatatctggcgactcacacataaataaacaaatgtctggaatacaaaccttatatgttttttctctcatgg

SEQ ID NO: 5055 - DNA, 122 bp, Homo sapiens
  misc_feature (61)..(62): /note="This region represents a CpG dinucleotide"
  misc_feature (61)..(61): /note="Nucleotide may be methylated to form 5-methylcytosine"
cacaaaaataatactaataatacattcataataaaagggacagggaaactttaggaatgacggacatgtctatggtgttgatgcggtggtgttttcacaaatatatacttatctccaaactc

SEQ ID NO: 5056 - DNA, 122 bp, Homo sapiens
  misc_feature (61)..(62): /note="This region represents a CpG dinucleotide"
  misc_feature (61)..(61): /note="Nucleotide may be methylated to form 5-methylcytosine"
ttcccgtttcccggtggtgtggtgggagttccttcttgctggatttctgagcttgccattcgcgccaatagtttcgtgtgttctgggctttctttacatgcctatatttgtctttggagggg

SEQ ID NO: 5057 - DNA, 122 bp, Homo sapiens
  misc_feature (61)..(62): /note="This region represents a CpG dinucleotide"
  misc_feature (61)..(61): /note="Nucleotide may be methylated to form 5-methylcytosine"
gcatcatatcccctagggcatggtgtctctactgctgattctcaccttgctggaattatgcgtaaccatctctaccatagccatgtggtgcaatgcaaactgctgtaattcaagagaggtga

SEQ ID NO: 5058 - DNA, 122 bp, Homo sapiens
  misc_feature (61)..(62): /note="This region represents a CpG dinucleotide"
  misc_feature (61)..(61): /note="Nucleotide may be methylated to form 5-methylcytosine"
ttgctattcactctcattctcttgtgtctgcattccttgactactgatggattcagtcagcgtcacccaggaaggtgtgtagagggatccatgaagcaaaggccaaggaagaaattcaagtt

SEQ ID NO: 5059 - DNA, 122 bp, Homo sapiens
  misc_feature (61)..(62): /note="This region represents a CpG dinucleotide"
  misc_feature (61)..(61): /note="Nucleotide may be methylated to form 5-methylcytosine"
tggctgagttccacgtctcagtcagagctgtgtcaaaatgaaacagcaggcctgggtcagcggcccaagccagacactaaacgaatttagcagaagctgcagctctgatgcagaggggagta

SEQ ID NO: 5060 - DNA, 122 bp, Homo sapiens
  misc_feature (61)..(62): /note="This region represents a CpG dinucleotide"
  misc_feature (61)..(61): /note="Nucleotide may be methylated to form 5-methylcytosine"
ttcaggtgagatatcatcatctctactttatagatgaagactctaagagattaaatcacacgcctaatggaaggactaatccacacagacccagaggcctcatgtgggtctccagactcaca

SEQ ID NO: 5061 - DNA, 122 bp, Homo sapiens
  misc_feature (61)..(62): /note="This region represents a CpG dinucleotide"
  misc_feature (61)..(61): /note="Nucleotide may be methylated to form 5-methylcytosine"
agattccataaagtcggggtgcttgagggcgtagggccgagaccgtcgcgggtactgaggcgcctccgtcgtctctcccactcgccgcccgctttccaagacatatgtcccgcttgcagccc

SEQ ID NO: 5062 - DNA, 122 bp, Homo sapiens
  misc_feature (61)..(62): /note="This region represents a CpG dinucleotide"
  misc_feature (61)..(61): /note="Nucleotide may be methylated to form 5-methylcytosine"
tctggccccatttcctgggagcctgaccccgccctaggattcctggagtgggtgtgcccacgcttccggcccagacgtgggtggagggatcccaccctgccaggcctcccgcctgtgcggct

SEQ ID NO: 5063 - DNA, 122 bp, Homo sapiens
  misc_feature (61)..(62): /note="This region represents a CpG dinucleotide"
  misc_feature (61)..(61): /note="Nucleotide may be methylated to form 5-methylcytosine"
gctcagcgagcctccccttcttgatgtgggggacacacaggccagctgaagttttaggcccgagaggcagcagtgtgtgcggtaggagaaaggataccaccccgcaggtagggagtggccta

SEQ ID NO: 5064 - DNA, 122 bp, Homo sapiens
  misc_feature (61)..(62): /note="This region represents a CpG dinucleotide"
  misc_feature (61)..(61): /note="Nucleotide may be methylated to form 5-methylcytosine"
tagattaaaaacacatggaaggacttgtaggtaaataatgatttcagttattacgtagtgcgaaatgattctatcaggaaactgtgggatgagtaatgtgactctgctgtaagattttcagt

SEQ ID NO: 5065 - DNA, 122 bp, Homo sapiens
  misc_feature (61)..(62): /note="This region represents a CpG dinucleotide"
  misc_feature (61)..(61): /note="Nucleotide may be methylated to form 5-methylcytosine"
ctataacagctgtgtggttcctgcaggtggagtttggccttgcccaggtccttggaggcacgacttctgtgtctggtggaactgtgcagcatggctcagacccacaagctgtgtgatggctt

SEQ ID NO: 5066 - DNA, 122 bp, Homo sapiens
  misc_feature (61)..(62): /note="This region represents a CpG dinucleotide"
  misc_feature (61)..(61): /note="Nucleotide may be methylated to form 5-methylcytosine"
ttttaagacacagaaagaaaaatagcaagagtcacattcttaatttttccccttcttccccggctatagccaagcaggttggctgactcagtgagaagaaagccctgaatttattccttcta

SEQ ID NO: 5067 - DNA, 122 bp, Homo sapiens
  misc_feature (61)..(62): /note="This region represents a CpG dinucleotide"
  misc_feature (61)..(61): /note="Nucleotide may be methylated to form 5-methylcytosine"
gcggcttggattgtcctgtgccaactgtcacaccacaactaccaccttatggcgcagaaacgccgagggtgaacccgtgtgcaatgcttgtggactctacatgaaactccatggggtatgcc

SEQ ID NO: 5068 - DNA, 122 bp, Homo sapiens
  misc_feature (61)..(62): /note="This region represents a CpG dinucleotide"
  misc_feature (61)..(61): /note="Nucleotide may be methylated to form 5-methylcytosine"
cgaccccatgcaaggctgtgtggataagccgctgtgaaaccgcctggtacaacgtgatgacgagcagagatacattttgcatccccgactcattatttcgctgtcaaaatgttccatttcct

SEQ ID NO: 5069 - DNA, 122 bp, Homo sapiens
  misc_feature (61)..(62): /note="This region represents a CpG dinucleotide"
  misc_feature (61)..(61): /note="Nucleotide may be methylated to form 5-methylcytosine"
aggctgtagtgagccatgattgtgtcactgcacttcagcttgggcaacagagcaagacatcgtcctaaaaaaaaaaaaaaaaaaaaaaagcaaaagcaattctgtgggttttagtatattcc

SEQ ID NO: 5070 - DNA, 122 bp, Homo sapiens
  misc_feature (61)..(62): /note="This region represents a CpG dinucleotide"
  misc_feature (61)..(61): /note="Nucleotide may be methylated to form 5-methylcytosine"
gtctgaaatgcatttcgaggagaacaagtaaaacctgccctcttagagttcaaagtttcccggagacagctgaggccgatagcttattgtttaggtaagaacaacagaacagagaggcagag

SEQ ID NO: 5071 - DNA, 122 bp, Homo sapiens
  misc_feature (61)..(62): /note="This region represents a CpG dinucleotide"
  misc_feature (61)..(61): /note="Nucleotide may be methylated to form 5-methylcytosine"
accattcaacagggttaaaatccttagaccacagaggatttggtggacaagtcagagacgcgttccgcagagctgaagcctttcttcaagaagcctacaagaaaggaactatggagaaccaa

SEQ ID NO: 5072 - DNA, 122 bp, Homo sapiens
  misc_feature (61)..(62): /note="This region represents a CpG dinucleotide"
  misc_feature (61)..(61): /note="Nucleotide may be methylated to form 5-methylcytosine"
ctgccccgaacactttcctctgtccagctcttcccgtgccccggggctggggaaagcgtccggcagccccgccgctccctggccccgtcccaggagccaccccaccgtagggctccagccag

SEQ ID NO: 5073 - DNA, 122 bp, Homo sapiens
  misc_feature (61)..(62): /note="This region represents a CpG dinucleotide"
  misc_feature (61)..(61): /note="Nucleotide may be methylated to form 5-methylcytosine"
tcatctccccagattgtctcccaatttcttcgtctgtaaaatggggctggcagcagtgcccgcccgcaggcctgtgccgggaccaagctgcgtgtgctgtgtgtcctgtgtctggcagataa

SEQ ID NO: 5074 - DNA, 122 bp, Homo sapiens
  misc_feature (61)..(62): /note="This region represents a CpG dinucleotide"
  misc_feature (61)..(61): /note="Nucleotide may be methylated to form 5-methylcytosine"
tgtaacgctctaacgttagagcagctaacggctctgctcagaatttctcccgacagaggccggagtgttcaagagcttggcgatacagaaatttctgctggtgttggggcgggtgcgggaac

SEQ ID NO: 5075 - DNA, 122 bp, Homo sapiens
  misc_feature (61)..(62): /note="This region represents a CpG dinucleotide"
  misc_feature (61)..(61): /note="Nucleotide may be methylated to form 5-methylcytosine"
ttccacttgtcattttgggatttgtgaatatgcagcatcgtctttttaccattgctaatgcgaagagctgcctccctctcaattactgttgtgcaaatatcagtttatagattgtccttgta

SEQ ID NO: 5076 - DNA, 122 bp, Homo sapiens
  misc_feature (61)..(62): /note="This region represents a CpG dinucleotide"
  misc_feature (61)..(61): /note="Nucleotide may be methylated to form 5-methylcytosine"
atggtattttctaaattaacttgagctctgcatttgtctacaggcctacgaggttcaatccgtaggcttggtacctgaggaggtggcaggcacaagtggaagtttccgcttggctaggtgcc

SEQ ID NO: 5077 - DNA, 122 bp, Homo sapiens
  misc_feature (61)..(62): /note="This region represents a CpG dinucleotide"
  misc_feature (61)..(61): /note="Nucleotide may be methylated to form 5-methylcytosine"
gctgtcaggtgaggtttccccaggggaccctccagagggctgtttatgtgcaaatctacacgtccctttctctactggggaagaacagagataaggagcggacgtgctcaaagggtgagtca

SEQ ID NO: 5078 - DNA, 122 bp, Homo sapiens
  misc_feature (61)..(62): /note="This region represents a CpG dinucleotide"
  misc_feature (61)..(61): /note="Nucleotide may be methylated to form 5-methylcytosine"
gagctctgcccagttctgtgaaaatttggtggtccgataactgggcctggaagcccataacgctagccccctgcctgagtagcctaaggagccacctagtgacacaaactgacttcagtcca

SEQ ID NO: 5079 - DNA, 122 bp, Homo sapiens
  misc_feature (61)..(62): /note="This region represents a CpG dinucleotide"
  misc_feature (61)..(61): /note="Nucleotide may be methylated to form 5-methylcytosine"
ctgcgcctggcttcgtgtcattgctcatctgtgatggtgccgctgactctgccttgcacacgtacaagtgcatcacattgagaaagggctctcggaccactggttgtgatggctttgccctg

SEQ ID NO: 5080 - DNA, 122 bp, Homo sapiens
  misc_feature (61)..(62): /note="This region represents a CpG dinucleotide"
  misc_feature (61)..(61): /note="Nucleotide may be methylated to form 5-methylcytosine"
cttctttttatctcttttccatgaaatcacactggcagacttcttgtacaaatgtcatgccgtgtcgtttctcatccagcaccacatcccctgtggctagcaggttgaagcaagcttcctga

SEQ ID NO: 5081 - DNA, 122 bp, Homo sapiens
  misc_feature (61)..(62): /note="This region represents a CpG dinucleotide"
  misc_feature (61)..(61): /note="Nucleotide may be methylated to form 5-methylcytosine"
cagactgtagcctgccaaatacccaggatcttccatcaatcacaggctggagatatacctcgagtcccaccagagccagggacttttagttattgcacaggcggaatatcaactaactcttc

SEQ ID NO: 5082 - DNA, 122 bp, Homo sapiens
  misc_feature (61)..(62): /note="This region represents a CpG dinucleotide"
  misc_feature (61)..(61): /note="Nucleotide may be methylated to form 5-methylcytosine"
ccgaaaaagctctgggtggtattttgcctgcaaccaaagcttgacgtcaaaatttgcacacgtgttgtaggatcatttactctgtgtctccagcccctactcttttcttggtgttcctgagt

SEQ ID NO: 5083 - DNA, 122 bp, Homo sapiens
  misc_feature (61)..(62): /note="This region represents a CpG dinucleotide"
  misc_feature (61)..(61): /note="Nucleotide may be methylated to form 5-methylcytosine"
tctgtgaagggtgtgcacagagagcttcggtagcctgcgaagcagccattttcacttccacggagcaggtattttattgcattatttcgagctcaaggactccagaattagatccccaaaat

SEQ ID NO: 5084 - DNA, 122 bp, Homo sapiens
  misc_feature (61)..(62): /note="This region represents a CpG dinucleotide"
  misc_feature (61)..(61): /note="Nucleotide may be methylated to form 5-methylcytosine"
gagccgtgcgagacagacttcccatctgggaagggctgcctacgggtaattgggtttgctcgagttgcctctataattaataagtgatttgacttggagattggaaatagtcatgaaaggaa

SEQ ID NO: 5085 - DNA, 122 bp, Homo sapiens
  misc_feature (61)..(62): /note="This region represents a CpG dinucleotide"
  misc_feature (61)..(61): /note="Nucleotide may be methylated to form 5-methylcytosine"
ataactaaaacaataacgctggatggaggcagggttttgttcggttttgtttgctattgtcgggccctcaaatagcatttcctgtggtcagtgatgcttcgggggttgccaggttgtggcac

SEQ ID NO: 5086 - DNA, 122 bp, Homo sapiens
  misc_feature (61)..(62): /note="This region represents a CpG dinucleotide"
  misc_feature (61)..(61): /note="Nucleotide may be methylated to form 5-methylcytosine"
gcccctgctccatttgctttctttagcgtctcctagaacaaacactggtccaggtgcaaacgctcaattcacaaggaatgcagagaacacagaaatgactccaggctgggctgctggtaatc

SEQ ID NO: 5087 - DNA, 122 bp, Homo sapiens
  misc_feature (61)..(62): /note="This region represents a CpG dinucleotide"
  misc_feature (61)..(61): /note="Nucleotide may be methylated to form 5-methylcytosine"
attctattgttgcaaacacactgcacttagatcctcctaaggccatttcttaatagataacgacaagtgacccagagcattttgggagacaaatgtttttccctcccagcaccggtttaatt

SEQ ID NO: 5088 - DNA, 122 bp, Homo sapiens
  misc_feature (61)..(62): /note="This region represents a CpG dinucleotide"
  misc_feature (61)..(61): /note="Nucleotide may be methylated to form 5-methylcytosine"
ctaggatttgaaccacgagagagcccatcctctacaccactgccccctcctgcctctggacgtaggatacactaggatgtgctgcaacctgcataattagaccttcattttaatttaaaaca

SEQ ID NO: 5089 - DNA, 122 bp, Homo sapiens
  misc_feature (61)..(62): /note="This region represents a CpG dinucleotide"
  misc_feature (61)..(61): /note="Nucleotide may be methylated to form 5-methylcytosine"
tcagctccaaccctcacttccacgttctcacccgcaatcgcagcgaaggcaggaagttcccggagctggtgctagacaaaccgttggaccgcgaggagcagccccaactcaggctaacgctg

SEQ ID NO: 5090 - DNA, 122 bp, Homo sapiens
  misc_feature (61)..(62): /note="This region represents a CpG dinucleotide"
  misc_feature (61)..(61): /note="Nucleotide may be methylated to form 5-methylcytosine"
tttcactgcttaagcagcagttttacataactgccaaactgttattcaaggtggctggaccgttttacagcccccgttgtatgcgtcccagttgcctcccccagcagcatgtggtgtggttg

SEQ ID NO: 5091 - DNA, 122 bp, Homo sapiens
  misc_feature (61)..(62): /note="This region represents a CpG dinucleotide"
  misc_feature (61)..(61): /note="Nucleotide may be methylated to form 5-methylcytosine"
ccgactgtaagctcttcaccgctctgtattttctctcagcaatagaatgggagtgactggcgtaactttaaattttctggtaacctgttttttaaaaaataaaaacaaaaacatggaattgt

SEQ ID NO: 5092 - DNA, 122 bp, Homo sapiens
  misc_feature (61)..(62): /note="This region represents a CpG dinucleotide"
  misc_feature (61)..(61): /note="Nucleotide may be methylated to form 5-methylcytosine"
cagaatggagtgctgtttagtgtgacctgttaccagcatgggctttctaatttgcaaggccgcgggcaaaacggacatgcagaaccttttgatcaaaaattttgaagaatttcagggtggtg

SEQ ID NO: 5093 - DNA, 122 bp, Homo sapiens
  misc_feature (61)..(62): /note="This region represents a CpG dinucleotide"
  misc_feature (61)..(61): /note="Nucleotide may be methylated to form 5-methylcytosine"
aacccaatcttacgtcaaaagagcatatttttttcattgctgtgtgtcacatgctagacccggagcatttccttgttgcccctgggcttaggagaagtccttgctaaatgcaagatgtagaa

SEQ ID NO: 5094 - DNA, 122 bp, Homo sapiens
  misc_feature (61)..(62): /note="This region represents a CpG dinucleotide"
  misc_feature (61)..(61): /note="Nucleotide may be methylated to form 5-methylcytosine"
taaggagcattggtccacaggaatgtgatttctctgcccgcttcctaggaattgagaaaacgatcagttttttgaagcatataactgccaaaaaatacaatagtctggcaatcttttcttct

SEQ ID NO: 5095 - DNA, 122 bp, Homo sapiens
  misc_feature (61)..(62): /note="This region represents a CpG dinucleotide"
  misc_feature (61)..(61): /note="Nucleotide may be methylated to form 5-methylcytosine"
tccagggccctagaggaagcctgtaaacctcctggtctgacagacatctgacacactttgcgtgggtctctttctccacagagaagttggaataagatcaagacttaattcgcaggcccagc

SEQ ID NO: 5096 - DNA, 122 bp, Homo sapiens
  misc_feature (61)..(62): /note="This region represents a CpG dinucleotide"
  misc_feature (61)..(61): /note="Nucleotide may be methylated to form 5-methylcytosine"
atggtgggggatcatgacctgaaggattctttccttcccatgagctgcagggctggttgccgtccttgcaactgtgtcttatttgcctgtgccgttatatcttggtgacccctccacgtgta

SEQ ID NO: 5097 - DNA, 122 bp, Homo sapiens
  misc_feature (61)..(62): /note="This region represents a CpG dinucleotide"
  misc_feature (61)..(61): /note="Nucleotide may be methylated to form 5-methylcytosine"
aaacctcattttatagctgcttaaaaaccctgagaatagttgtacatggatctcagcaaacgtacaaaagaacacgcgttatcaaggcagagatctgcacacttgctagggaagacaagggt

SEQ ID NO: 5098 - DNA, 122 bp, Homo sapiens
  misc_feature (61)..(62): /note="This region represents a CpG dinucleotide"
  misc_feature (61)..(61): /note="Nucleotide may be methylated to form 5-methylcytosine"
tgtcctaataaagcagacacagcctcatggggtgtttaatcttgatccaaaagtcactatcgtacctgtggtccgaatgcatgtataacagtcacagttccaactttcacttcccttcagat

SEQ ID NO: 5099 - DNA, 122 bp, Homo sapiens
  misc_feature (61)..(62): /note="This region represents a CpG dinucleotide"
  misc_feature (61)..(61): /note="Nucleotide may be methylated to form 5-methylcytosine"
acaaagcttatgtatattcttcattgtttctgacaccctaaaaatgaatactgccaaaaacgtactaagttctaaggacagattggagcaaacaatcgttagcatgcttcggactcaactct

SEQ ID NO: 5100 - DNA, 122 bp, Homo sapiens
  misc_feature (61)..(62): /note="This region represents a CpG dinucleotide"
  misc_feature (61)..(61): /note="Nucleotide may be methylated to form 5-methylcytosine"
ccactttctgtcagagctctggcttgactgtggagttcagaggtttcctaacatagtacacgtcaggactgactcacgatgaagcactccttaaaaaattagaagtgtgtcctcatgttttg

SEQ ID NO: 5101 - DNA, 122 bp, Homo sapiens
  misc_feature (61)..(62): /note="This region represents a CpG dinucleotide"
  misc_feature (61)..(61): /note="Nucleotide may be methylated to form 5-methylcytosine"
aatgctgggacgacagctccatgtttgggtcacggttgaactgggtcttgcagtcttcagcgggtaggcagaaagctgggggaatggtggcttcctgttcatttgcaccacaacagtcaggc

SEQ ID NO: 5102 - DNA, 122 bp, Homo sapiens
  misc_feature (61)..(62): /note="This region represents a CpG dinucleotide"
  misc_feature (61)..(61): /note="Nucleotide may be methylated to form 5-methylcytosine"
acagtgacagaagttcttactggactcagggtaacctcataattatcaaaactctctaaacgttgagctgaatataccacattgctgtctgcaagcctcagagcagggtcataccataagaa

SEQ ID NO: 5103 - DNA, 122 bp, Homo sapiens
  misc_feature (61)..(62): /note="This region represents a CpG dinucleotide"
  misc_feature (61)..(61): /note="Nucleotide may be methylated to form 5-methylcytosine"
tttttttactattttcattttcttctccttagcgttgccgtccactctctgccagtgatgcggaaatgaaaaacctcgtgggctcagcccgggagaaagggccagggaagttgggtggttct

SEQ ID NO: 5104 - DNA, 122 bp, Homo sapiens
  misc_feature (61)..(62): /note="This region represents a CpG dinucleotide"
  misc_feature (61)..(61): /note="Nucleotide may be methylated to form 5-methylcytosine"
ggcaatatttaggaaagaaagtgttgcaggtaaaggagggagatgctgcagagagaacagcgagtatgtgaggtacccccaaagcagcaagtgacaaaaaagaaggctgaataagtccatcc

SEQ ID NO: 5105 - DNA, 122 bp, Homo sapiens
  misc_feature (61)..(62): /note="This region represents a CpG dinucleotide"
  misc_feature (61)..(61): /note="Nucleotide may be methylated to form 5-methylcytosine"
aaaagtcagttgcaggcatcattaccctttacccctaaatacttcggcatgtctcttcaacgtaactgcatggcatatcacacccaggaatttaggtctatgcactgatgctatctaaatac

SEQ ID NO: 5106 - DNA, 122 bp, Homo sapiens
  misc_feature (61)..(62): /note="This region represents a CpG dinucleotide"
  misc_feature (61)..(61): /note="Nucleotide may be methylated to form 5-methylcytosine"
aaactaaaggttgatgagctgatttcatctgctatatttcatttcaaagcagccatggaacgagactctatgtttgcatttgcctacacagacctggccaacatgtacgctgaaggaggcca

SEQ ID NO: 5107 - DNA, 122 bp, Homo sapiens
  misc_feature (61)..(62): /note="This region represents a CpG dinucleotide"
  misc_feature (61)..(61): /note="Nucleotide may be methylated to form 5-methylcytosine"
tgtgggctgaatcatggctggggggggcagcaggagtgaggttggccggtcgagatagaacgatgggtgtgatgcatgcaaaaaacctgaaaagatgtctctaaactccagtctttggttct

SEQ ID NO: 5108 - DNA, 122 bp, Homo sapiens
  misc_feature (61)..(62): /note="This region represents a CpG dinucleotide"
  misc_feature (61)..(61): /note="Nucleotide may be methylated to form 5-methylcytosine"
gccttccatctctggcccaccgctaaatttccaccttgtacaaaagcgctagctgcagggcgagggctgggggcgcggcgcagagcgctctcccacgcgccggggatcaggtgcggaaggct

SEQ ID NO: 5109 - DNA, 122 bp, Homo sapiens
  misc_feature (61)..(62): /note="This region represents a CpG dinucleotide"
  misc_feature (61)..(61): /note="Nucleotide may be methylated to form 5-methylcytosine"
agagtttacaaccctctagcacaaaggtgcatctcaactcatgtgcctgtcagaagtgcacgccctgccaacgggaggcagaaatctcacctatgctccagggcaggtgggaagggcggctg

SEQ ID NO: 5110 - DNA, 122 bp, Homo sapiens
  misc_feature (61)..(62): /note="This region represents a CpG dinucleotide"
  misc_feature (61)..(61): /note="Nucleotide may be methylated to form 5-methylcytosine"
aacccccacattgtatataataatctcttacaatcttgttcatagtgccacctatggtcacgaccaattagagctggtaaggcagctgtactgtttgcttcagccaatgagggtaaatgtac

SEQ ID NO: 5111 - DNA, 122 bp, Homo sapiens
  misc_feature (61)..(62): /note="This region represents a CpG dinucleotide"
  misc_feature (61)..(61): /note="Nucleotide may be methylated to form 5-methylcytosine"
agcctctttgcttagaattgcacaattttccagtaatgtatgaaacagctggcagccttgcgcaggaaaactggatagaggtgagtccctgagggagtatgtttgtcctgggtaaaagcaag

SEQ ID NO: 5112 - DNA, 122 bp, Homo sapiens
  misc_feature (61)..(62): /note="This region represents a CpG dinucleotide"
  misc_feature (61)..(61): /note="Nucleotide may be methylated to form 5-methylcytosine"
tgacacgtggactcggccaaattcccaccactaggccgggaaacacgctcatactcactgcgtaaatcccaccgtcgtgggccttgcttccgcccagcgcgcacaccttctccccagtcttc

SEQ ID NO: 5113 - DNA, 122 bp, Homo sapiens
  misc_feature (61)..(62): /note="This region represents a CpG dinucleotide"
  misc_feature (61)..(61): /note="Nucleotide may be methylated to form 5-methylcytosine"
gccccacccccaggactgctgtcaccaggcatgtgtatccacaaaaagatgcttgcccagcgcccctgtgcgtcccatgcctgagcaagaagctgcacttcctcgggcctcccagctctgga

SEQ ID NO: 5114 - DNA, 122 bp, Homo sapiens
  misc_feature (61)..(62): /note="This region represents a CpG dinucleotide"
  misc_feature (61)..(61): /note="Nucleotide may be methylated to form 5-methylcytosine"
gagttgcctctccttgagccagggaggaccccgtccggtgctggcagttctcttcttccacgcctcctgggcctggcccctcatccagggccgagccggggcgttttgctagcagatttctc

SEQ ID NO: 5115 - DNA, 122 bp, Homo sapiens
  misc_feature (61)..(62): /note="This region represents a CpG dinucleotide"
  misc_feature (61)..(61): /note="Nucleotide may be methylated to form 5-methylcytosine"
agtgtttggccagcaaacttggtgagtaaatggactagaactaatcctgtagctaaacagcgagggctttagaaaaggaaacacctcacttgcctaatagctcccagggaggggtgagatat

SEQ ID NO: 5116 - DNA, 122 bp, Homo sapiens
  misc_feature (61)..(62): /note="This region represents a CpG dinucleotide"
  misc_feature (61)..(61): /note="Nucleotide may be methylated to form 5-methylcytosine"
accaaggagtgagttatttattatttatttatttatttattattttgccctcctgctcctcgggaggcttctgtcctgagctcgccttagctaatcctgcgttaccgttcggcaggtgtgcg

SEQ ID NO: 5117 - DNA, 122 bp, Homo sapiens
  misc_feature (61)..(62): /note="This region represents a CpG dinucleotide"
  misc_feature (61)..(61): /note="Nucleotide may be methylated to form 5-methylcytosine"
tttttttaaattaaaagatgtctaggctgatcacattctcctagcctgcttaacagattccgtctttctgtacaaatcagatacttgaatttttaacctcatactaagttatggatttaagc

SEQ ID NO: 5118 - DNA, 122 bp, Homo sapiens
  misc_feature (61)..(62): /note="This region represents a CpG dinucleotide"
  misc_feature (61)..(61): /note="Nucleotide may be methylated to form 5-methylcytosine"
gtcgattttaaacatgttcctctggtgatgctgttattctctccagtttgagaaccaccacgtcagaggcgtcttcctgtctgaaccattctttcctgctgctctcaggaaggcagaaaggt

SEQ ID NO: 5119 - DNA, 122 bp, Homo sapiens
  misc_feature (61)..(62): /note="This region represents a CpG dinucleotide"
  misc_feature (61)..(61): /note="Nucleotide may be methylated to form 5-methylcytosine"
caaatctgcaagcactccttgcagataaaacagctcagactgggagaggccaagagaacacggaggtcctgaagccccctgtgcttgagtcaggagcccagaggctggtgccacagctccaa

SEQ ID NO: 5120 - DNA, 122 bp, Homo sapiens
  misc_feature (61)..(62): /note="This region represents a CpG dinucleotide"
  misc_feature (61)..(61): /note="Nucleotide may be methylated to form 5-methylcytosine"
cactcgctgatcagcctaagactcttagcagggatggcatgctaacaagggcaaccctagcgctgcccgggatgttttcagcaccacggccagcggcaaagaggcacaagtttaatttcact

SEQ ID NO: 5121 - DNA, 122 bp, Homo sapiens
  misc_feature (61)..(62): /note="This region represents a CpG dinucleotide"
  misc_feature (61)..(61): /note="Nucleotide may be methylated to form 5-methylcytosine"
ttgtaccccctttcttaatagctccagtagcactcaacacactgctagtctaagcaggcacgtcctgtagcatgcactttggggcccacctaaacatattctgcctacactagcttcttcat

SEQ ID NO: 5122 - DNA, 122 bp, Homo sapiens
  misc_feature (61)..(62): /note="This region represents a CpG dinucleotide"
  misc_feature (61)..(61): /note="Nucleotide may be methylated to form 5-methylcytosine"
ctttttctttgtattgatggcactgatattcttccagcatttctagacagaaacctggggcgcattcaggcctcttcctcttctctatgtaacccacagacacactgttcgttggccccttc

SEQ ID NO: 5123 - DNA, 122 bp, Homo sapiens
  misc_feature (61)..(62): /note="This region represents a CpG dinucleotide"
  misc_feature (61)..(61): /note="Nucleotide may be methylated to form 5-methylcytosine"
ccatttcatagcagaggaaattgagacccagagagatgaagtcacttgcctagggtcacacggctagtcactagtcagccacaaagcaaaggccagcgttgccaaacacaccgcctgctgag

SEQ ID NO: 5124 - DNA, 122 bp, Homo sapiens
  misc_feature (61)..(62): /note="This region represents a CpG dinucleotide"
  misc_feature (61)..(61): /note="Nucleotide may be methylated to form 5-methylcytosine"
attatgtgtattaagactgaatttcactctagaatttgaactggtcctcagaaaacacatcgtgaagttgtacttgttgtctggtatttatagccctgatttctctgagggtatagaaatat

SEQ ID NO: 5125 - DNA, 122 bp, Homo sapiens
  misc_feature (61)..(62): /note="This region represents a CpG dinucleotide"
  misc_feature (61)..(61): /note="Nucleotide may be methylated to form 5-methylcytosine"
tcttgtgtaataaaaacacctaaaaataaacacagaaacaaacataaaccagtattagatcgttccattgcaaggaagtaaatacttaatcaagatagtaactgcttcttaaaatggcaggt

SEQ ID NO: 5126 - DNA, 122 bp, Homo sapiens
  misc_feature (61)..(62): /note="This region represents a CpG dinucleotide"
  misc_feature (61)..(61): /note="Nucleotide may be methylated to form 5-methylcytosine"
ttaaggaatttacttgcacttcagttacctaatattaaccatcaatatgcaaatatcatacgtcagaaccctagtggagctatgattcacaacctttcttctattccaacatagctgagaaa

SEQ ID NO: 5127 - DNA, 122 bp, Homo sapiens
  misc_feature (61)..(62): /note="This region represents a CpG dinucleotide"
  misc_feature (61)..(61): /note="Nucleotide may be methylated to form 5-methylcytosine"
tctgtaaaatgtgctcacagacagcacctacaacataggtagggtgtgttgcaaagattgcgagttaagcttttgtttgttttgtcgagatggagtctcactccgtcgcccaggctggcgtg

SEQ ID NO: 5128 - DNA, 122 bp, Homo sapiens
  misc_feature (61)..(62): /note="This region represents a CpG dinucleotide"
  misc_feature (61)..(61): /note="Nucleotide may be methylated to form 5-methylcytosine"
cctaaagaagttgtttccgtgccctggggcacgggcatccagggacaacatattacaaggcggtctgttggggtgtggaagacactagaacctttatctgtatttaacccatccatttctaa

SEQ ID NO: 5129 - DNA, 122 bp, Homo sapiens
  misc_feature (61)..(62): /note="This region represents a CpG dinucleotide"
  misc_feature (61)..(61): /note="Nucleotide may be methylated to form 5-methylcytosine"
acacctagggacagccatatgctgtgtccatgcacctagggatggccacacctgtgcccacgcacctagggacagccacactctgcatccaggcacctagggacagccacactctgtgtcca

SEQ ID NO: 5130 - DNA, 122 bp, Homo sapiens
  misc_feature (61)..(62): /note="This region represents a CpG dinucleotide"
  misc_feature (61)..(61): /note="Nucleotide may be methylated to form 5-methylcytosine"
aagaaaaccacaaaaatggttttcagattaagttctcagaagcttccctgtatggctgcacgggctagaatggagaaacaggccctcaaaatgcagcactggacttcacattattttttttt

SEQ ID NO: 5131 - DNA, 122 bp, Homo sapiens
  misc_feature (61)..(62): /note="This region represents a CpG dinucleotide"
  misc_feature (61)..(61): /note="Nucleotide may be methylated to form 5-methylcytosine"
gaaaagaacatgggcttcgggtggagtcagatttggaagtgaatcctgatgattatttggcgtggcattcttcatgctcacaggtcccacttggctacttcacaatggaatgaagccatcat

SEQ ID NO: 5132 - DNA, 122 bp, Homo sapiens
  misc_feature (61)..(62): /note="This region represents a CpG dinucleotide"
  misc_feature (61)..(61): /note="Nucleotide may be methylated to form 5-methylcytosine"
gtgatgcatctttagatttttttcccccaccaggtggtttttgacactctctgagaggaccggagtggaagatgggtgggttaggggaagggagaagcattaggaggggattaaaatcgatc

SEQ ID NO: 5133 - DNA, 122 bp, Homo sapiens
  misc_feature (61)..(62): /note="This region represents a CpG dinucleotide"
  misc_feature (61)..(61): /note="Nucleotide may be methylated to form 5-methylcytosine"
atacactgaaaccagctcaggcagaacaaaggaacaaagacaaatttcccaggttgcagccggcagtcagaagccagaagccaccaaatagctccctgggttgcttttatgcactcaacctg

SEQ ID NO: 5134 - DNA, 122 bp, Homo sapiens
  misc_feature (61)..(62): /note="This region represents a CpG dinucleotide"
  misc_feature (61)..(61): /note="Nucleotide may be methylated to form 5-methylcytosine"
ttgttctggagctgtagaagtcctgagtgttccacttcatctgcttcctctttctaggttcgaagcatactgtgggcataggtccatcatctacatgacatgccttactcaacctaaggagc

SEQ ID NO: 5135 - DNA, 122 bp, Homo sapiens
  misc_feature (61)..(62): /note="This region represents a CpG dinucleotide"
  misc_feature (61)..(61): /note="Nucleotide may be methylated to form 5-methylcytosine"
cacagattctcttgcgtaacaccagttgcatgtcagcagggtggctgagctggaccgtcacgcgcacgatcaggaacaaccgctcgtccacgggcgtgcccctgctgagctgagggcagcca

SEQ ID NO: 5136 - DNA, 122 bp, Homo sapiens
  misc_feature (61)..(62): /note="This region represents a CpG dinucleotide"
  misc_feature (61)..(61): /note="Nucleotide may be methylated to form 5-methylcytosine"
agaataatattcagaatattaaggaaatcatttcttggaagaatttttcaaaggcaaatacgaataaaaaactattgttgaggtagtcatggtggctcgtgcctgtaatcccagcactttgg

SEQ ID NO: 5137 - DNA, 122 bp, Homo sapiens
  misc_feature (61)..(62): /note="This region represents a CpG dinucleotide"
  misc_feature (61)..(61): /note="Nucleotide may be methylated to form 5-methylcytosine"
tcctggtctgagtctgagtgttttcatcaatcaagtgggtctaagactcctcctgcatagcgcagctgtagggattaagcaggataatattgagaaattccctgggactgcttgactgtagt

SEQ ID NO: 5138 - DNA, 122 bp, Homo sapiens
  misc_feature (61)..(62): /note="This region represents a CpG dinucleotide"
  misc_feature (61)..(61): /note="Nucleotide may be methylated to form 5-methylcytosine"
aaaacagggccaaaaactgttaacagctgtcattcagtttagaacccattctccacctcacgctgctgtctctcaagtatactaattgataattatttctgcagcatgttgggccaggtctg

SEQ ID NO: 5139 - DNA, 122 bp, Homo sapiens
  misc_feature (61)..(62): /note="This region represents a CpG dinucleotide"
  misc_feature (61)..(61): /note="Nucleotide may be methylated to form 5-methylcytosine"
ccccgggtgtccgtgggaagctccaaagccgggccgcgggacggctaccctgggctgtgacgcagtccaggatcttcgccaaggcacctgctggaggcccctcctgggtcccacgaccccga

SEQ ID NO: 5140 - DNA, 122 bp, Homo sapiens
  misc_feature (61)..(62): /note="This region represents a CpG dinucleotide"
  misc_feature (61)..(61): /note="Nucleotide may be methylated to form 5-methylcytosine"
tataccaaaaaaaaaaaaaggaagaggaaaaaaaacctgagcccaaagcctagccctaaacgtcacctccggtccccattcccggcttgcaccgggcagcagccaacaccacggggaagtgg

SEQ ID NO: 5141 - DNA, 122 bp, Homo sapiens
  misc_feature (61)..(62): /note="This region represents a CpG dinucleotide"
  misc_feature (61)..(61): /note="Nucleotide may be methylated to form 5-methylcytosine"
ggttctatataataaaaattgatggtaaactggaaagattttgttttgttttttattccacggttagattgatgaatggattattatcttttatgtccagagcaagactaggaagaaaaaag

SEQ ID NO: 5142 - DNA, 122 bp, Homo sapiens
  misc_feature (61)..(62): /note="This region represents a CpG dinucleotide"
  misc_feature (61)..(61): /note="Nucleotide may be methylated to form 5-methylcytosine"
ttaaacttgagtgtaagttttattcattgttgactggtgatattgattttatcttgggttcgtcctaaggaggctgggtatgtccactcagctccccagttttacccagtacctgctgctgg

SEQ ID NO: 5143 - DNA, 122 bp, Homo sapiens
  misc_feature (61)..(62): /note="This region represents a CpG dinucleotide"
  misc_feature (61)..(61): /note="Nucleotide may be methylated to form 5-methylcytosine"
tatataatctaaaccagcaactcttggtggtgttagactttataatattttccagtcaaacgtgtaaaagtgtatcagtgttgtcttggtttatatttcttctgaacatgtcatgtttattg

SEQ ID NO: 5144 - DNA, 122 bp, Homo sapiens
  misc_feature (61)..(62): /note="This region represents a CpG dinucleotide"
  misc_feature (61)..(61): /note="Nucleotide may be methylated to form 5-methylcytosine"
acaaagaggtcaagggcgccctgaaaagggggctcagatggagggctgcaccccaagaggcgtgagggcaaatctggctcactggcattttcatgataacagttacagaaaaaaaaaccttg

SEQ ID NO: 5145 - DNA, 122 bp, Homo sapiens
  misc_feature (61)..(62): /note="This region represents a CpG dinucleotide"
  misc_feature (61)..(61): /note="Nucleotide may be methylated to form 5-methylcytosine"
tgtgtccaacatttcaaacatctggaaaagtatcatctatacgcagtgtaatgtttacagcgaattctgccactgctcgctgattttaaacacattaccctgtgtctcagttttttatttgt

SEQ ID NO: 5146 - DNA, 122 bp, Homo sapiens
  misc_feature (61)..(62): /note="This region represents a CpG dinucleotide"
  misc_feature (61)..(61): /note="Nucleotide may be methylated to form 5-methylcytosine"
aagtagtgtatcagctcattgaatgtattaatgtgtgacttagttctcccttttttgtcacgatgtttaaaattttttttgttgttctccaaaagctatctttttccagatatgctatggta

SEQ ID NO: 5147 - DNA, 122 bp, Homo sapiens
  misc_feature (61)..(62): /note="This region represents a CpG dinucleotide"
  misc_feature (61)..(61): /note="Nucleotide may be methylated to form 5-methylcytosine"
atacaaggaaaaaagccattctatgttcttcttctgtgctctcataatgtgtaaccatgccgtttgtttaaataattccagaaactggccttaggagattcgaaatcaaaccaagtttgcag

SEQ ID NO: 5148 - DNA, 122 bp, Homo sapiens
  misc_feature (61)..(62): /note="This region represents a CpG dinucleotide"
  misc_feature (61)..(61): /note="Nucleotide may be methylated to form 5-methylcytosine"
taaacaccttgacattttcaggactttctgccacctgggatttagatcaaaactgcagtgcgtgtcagaccatctcagaacaaggaatgtttgtctcagacattattatgccctatctcttg

SEQ ID NO: 5149 - DNA, 122 bp, Homo sapiens
  misc_feature (61)..(62): /note="This region represents a CpG dinucleotide"
  misc_feature (61)..(61): /note="Nucleotide may be methylated to form 5-methylcytosine"
tgaaagcgagcaaatagatttgactgaggaacagaaggatgactcagaatggttaagcagcgatgtgatttgcatcgatgatggccccattgctgaagtgcatataaatgaagatgctcagg

SEQ ID NO: 5150 - DNA, 122 bp, Homo sapiens
  misc_feature (61)..(62): /note="This region represents a CpG dinucleotide"
  misc_feature (61)..(61): /note="Nucleotide may be methylated to form 5-methylcytosine"
tgacaagaccttcacagactaaattcagtggtgtcaccttctgaacaaagtggccacatgcgctgtggttttcccttgtttattttgtcttgttttgttttacacagccagtatcactagcc

SEQ ID NO: 5151 - DNA, 122 bp, Homo sapiens
  misc_feature (61)..(62): /note="This region represents a CpG dinucleotide"
  misc_feature (61)..(61): /note="Nucleotide may be methylated to form 5-methylcytosine"
atctatcacataactgctaaaaacatcaacaactcttttgtgtattaatgatgattgctacgttcactgaatgttgaggaggtgccagtatcaagctgagcattttaattgtaatatttcgt

SEQ ID NO: 5152 - DNA, 122 bp, Homo sapiens
  misc_feature (61)..(62): /note="This region represents a CpG dinucleotide"
  misc_feature (61)..(61): /note="Nucleotide may be methylated to form 5-methylcytosine"
gtcagctttgtgcttccacttatgtttcctattggggccccttcctgtgccctttgtcctcgtctcactgacaggttgccttggagatggggcagaggggtgggattatcatggcccgatcc

SEQ ID NO: 5153 - DNA, 122 bp, Homo sapiens
  misc_feature (61)..(62): /note="This region represents a CpG dinucleotide"
  misc_feature (61)..(61): /note="Nucleotide may be methylated to form 5-methylcytosine"
acccctgtccacatgagccagccagggttgagctagtgcttgccacacccaaaaagacaccgacatttggattgctggctcctcactatattttgaacaattctgccatagatcaagggacc

SEQ ID NO: 5154 - DNA, 122 bp, Homo sapiens
  misc_feature (61)..(62): /note="This region represents a CpG dinucleotide"
  misc_feature (61)..(61): /note="Nucleotide may be methylated to form 5-methylcytosine"
aggggcctgggagctggctgtcccccgccctgggctccctgacgaaatcgtccttttctgcggcggatgacaggttgtgggaacaacagcttgaattacggaaagaagtttccccactgagt

SEQ ID NO: 5155 - DNA, 122 bp, Homo sapiens
  misc_feature (61)..(62): /note="This region represents a CpG dinucleotide"
  misc_feature (61)..(61): /note="Nucleotide may be methylated to form 5-methylcytosine"
aatttcaagtattttttatatattgtgaaattgcctctccctgggcctgtgaccaattatcgctctagtgtgacagttgtgggccatcaggaaattgcctctccctggctccagctgccaat

SEQ ID NO: 5156 - DNA, 122 bp, Homo sapiens
  misc_feature (61)..(62): /note="This region represents a CpG dinucleotide"
  misc_feature (61)..(61): /note="Nucleotide may be methylated to form 5-methylcytosine"
gttaggttgtactgtaaacacccgacagaaaccacaaaggggaatgcacaactcactatgcgccaggtaagggctttgcatctgtctcatttaatcctcccccaagctctgtgaggtaggta

SEQ ID NO: 5157 - DNA, 122 bp, Homo sapiens
  misc_feature (61)..(62): /note="This region represents a CpG dinucleotide"
  misc_feature (61)..(61): /note="Nucleotide may be methylated to form 5-methylcytosine"
tcctaggagtagaggggaagatgcggctgtcggctgcgtggggtgccctgagagggccagcgtgatgctggggtgccttggcgtacatgggaggtgtcatcctattggcagggctgggccag

SEQ ID NO: 5158 - DNA, 122 bp, Homo sapiens
  misc_feature (61)..(62): /note="This region represents a CpG dinucleotide"
  misc_feature (61)..(61): /note="Nucleotide may be methylated to form 5-methylcytosine"
cattttctaactcaacattctatgagtgcaagaacacttattagcgccacctacctgaaacgttatcattttaacactggccagatttttaaaatattgccatgtaatatgtgggtaatagg

SEQ ID NO: 5159 - DNA, 122 bp, Homo sapiens
  misc_feature (61)..(62): /note="This region represents a CpG dinucleotide"
  misc_feature (61)..(61): /note="Nucleotide may be methylated to form 5-methylcytosine"
ggatgtgagcaaaaacccaccagtaccacttccaggtgcacatcaaacctcccaccatggcgtcctccaagcccattcatcttgatgggcacagcagtcttggaagacatttgccgagccac

SEQ ID NO: 5160 - DNA, 122 bp, Homo sapiens
  misc_feature (61)..(62): /note="This region represents a CpG dinucleotide"
  misc_feature (61)..(61): /note="Nucleotide may be methylated to form 5-methylcytosine"
atattataggcttgtctccatggcaactactgaacactgccattgtcgtgtgaaagcagccgcagacaatacacaaacaagtgagcccggctgtgttccagttcaactttatttatggacac

SEQ ID NO: 5161 - DNA, 122 bp, Homo sapiens
  misc_feature (61)..(62): /note="This region represents a CpG dinucleotide"
  misc_feature (61)..(61): /note="Nucleotide may be methylated to form 5-methylcytosine"
cgccaccagtcaatggggtggtcgttttgagggacaagtggtaagagccaatcttcttggcgaaaacgcggagaaacgggactagttactgtctttgtccgccatgttagattcaccccaca

SEQ ID NO: 5162 - DNA, 122 bp, Homo sapiens
  misc_feature (61)..(62): /note="This region represents a CpG dinucleotide"
  misc_feature (61)..(61): /note="Nucleotide may be methylated to form 5-methylcytosine"
caccacattcaccttggtacccactgctgcttacatggctcctgctccgtgggaacgtcccgcagatgttttcctaaccaaggtgctttcccgttgcagatcgtggcaggttgatcggcggc

SEQ ID NO: 5163 - DNA, 122 bp, Homo sapiens
  misc_feature (61)..(62): /note="This region represents a CpG dinucleotide"
  misc_feature (61)..(61): /note="Nucleotide may be methylated to form 5-methylcytosine"
aggcctgtaatccgagctacttggaaggctgagtcatgaggaccgcttgaacccaggatgcggaggttgcagtgagtcaagattgcatcactgcacaccagcctgggtgacagagcaagact

SEQ ID NO: 5164 - DNA, 122 bp, Homo sapiens
  misc_feature (61)..(62): /note="This region represents a CpG dinucleotide"
  misc_feature (61)..(61): /note="Nucleotide may be methylated to form 5-methylcytosine"
cgttctccttccgcaaggaacgtcttggggcttctcgaacatctctcagcatttactgtacgcccccctcccctcgcttttgctgataaaatggttggtgttgtgtttaaagtgtttataaa

SEQ ID NO: 5165 - DNA, 122 bp, Homo sapiens
  misc_feature (61)..(62): /note="This region represents a CpG dinucleotide"
  misc_feature (61)..(61): /note="Nucleotide may be methylated to form 5-methylcytosine"
ctttgtaactgtgaaatactctccaggatttaaaaggctgtggagctccagataaagaatcgtttatctttcttctgaaggtaagcactggggttagaaatgcttgcatcatcctctgtcac

SEQ ID NO: 5166 - DNA, 122 bp, Homo sapiens
  misc_feature (61)..(62): /note="This region represents a CpG dinucleotide"
  misc_feature (61)..(61): /note="Nucleotide may be methylated to form 5-methylcytosine"
ttgactcaggaggtaaaaatgtcaacaggccacaacctccagggctcctggaattggagacgaagccagttctgagcttatgcaaccataggacagtgagagagggccatggactcgattta

SEQ ID NO: 5167 - DNA, 122 bp, Homo sapiens
  misc_feature (61)..(62): /note="This region represents a CpG dinucleotide"
  misc_feature (61)..(61): /note="Nucleotide may be methylated to form 5-methylcytosine"
cacctcttcagcaatgtcctttcagttttcctgccagacccatttaagttttttattgtccgtctgggtgatatcatctaactcatggttttagtctctgttgttgactgtagatttctgga

SEQ ID NO: 5168 - DNA, 122 bp, Homo sapiens
  misc_feature (61)..(62): /note="This region represents a CpG dinucleotide"
  misc_feature (61)..(61): /note="Nucleotide may be methylated to form 5-methylcytosine"
tgggatctcttgtgaaacgagctttccttcccaaatctgggcttccctccaccccctccccgcccccgacaaaacccgtaacgtacccctgccagctagcatcgttttcttttgaagtttgc

SEQ ID NO: 5169 - DNA, 122 bp, Homo sapiens
  misc_feature (61)..(62): /note="This region represents a CpG dinucleotide"
  misc_feature (61)..(61): /note="Nucleotide may be methylated to form 5-methylcytosine"
agatctgtgtgctacactgaaaactgaacaaggcacgtcgtaagtcagtcacacagaaggcgcagctcagggcgataccaactagaaaagtaacttttttgttgactctgatgcctctagtg

SEQ ID NO: 5170 - DNA, 122 bp, Homo sapiens
  misc_feature (61)..(62): /note="This region represents a CpG dinucleotide"
  misc_feature (61)..(61): /note="Nucleotide may be methylated to form 5-methylcytosine"
cttatcaggacatatacctaccccacccctgcccagtgcctgttattattcctagtacaccgcaggagtaatgtatataaaattgctctactgaattgcctggataaactcagcctttaagc

SEQ ID NO: 5171 - DNA, 122 bp, Homo sapiens
  misc_feature (61)..(62): /note="This region represents a CpG dinucleotide"
  misc_feature (61)..(61): /note="Nucleotide may be methylated to form 5-methylcytosine"
tcccttccctgacattccactttatttacaattgtaccaaaaagaattgagttggttgcacgatagaattaccttaagggaagtgggagcattcagtttacaaagtatattttgtactgttt

SEQ ID NO: 5172 - DNA, 122 bp, Homo sapiens
  misc_feature (61)..(62): /note="This region represents a CpG dinucleotide"
  misc_feature (61)..(61): /note="Nucleotide may be methylated to form 5-methylcytosine"
ttcccataccaatacaagattagtatgcttttgtcaatcattaaacttcctgtggccaggcgcagtggctcatgcctgtaatcccaacactttgggaggccaaggtgggtggatcactggag

SEQ ID NO: 5173 - DNA, 122 bp, Homo sapiens
  misc_feature (61)..(62): /note="This region represents a CpG dinucleotide"
  misc_feature (61)..(61): /note="Nucleotide may be methylated to form 5-methylcytosine"
gagtatctagagggcgtggtgcgggcacgccagggctggggtgctgctgctgcactcacgcggctgggctttctggcgggaagcagttacgggggccccttgcctggactcagcgacctgtc

SEQ ID NO: 5174 - DNA, 122 bp, Homo sapiens
  misc_feature (61)..(62): /note="This region represents a CpG dinucleotide"
  misc_feature (61)..(61): /note="Nucleotide may be methylated to form 5-methylcytosine"
tccggtggatacaggaagtgctcagcaacgattacgccccgagggccaatcacagggctgcggccgagagagaagccttattagagctttctcaacctgcagccctcatctccgccggcgag

SEQ ID NO: 5175 - DNA, 122 bp, Homo sapiens
  misc_feature (61)..(62): /note="This region represents a CpG dinucleotide"
  misc_feature (61)..(61): /note="Nucleotide may be methylated to form 5-methylcytosine"
aatagctttaaaaccactaaaggtaaacattcttaaatacccttgaagttaagtagatgccggaattgctgagatggctgccaagccaatgttggagaatttatttttttgtacagattata

SEQ ID NO: 5176 - DNA, 122 bp, Homo sapiens
  misc_feature (61)..(62): /note="This region represents a CpG dinucleotide"
  misc_feature (61)..(61): /note="Nucleotide may be methylated to form 5-methylcytosine"
cacgatttagctcaccattttgcagggtggcagcttgggctgggcatgggtgagctcactcgtgtgtctgaggttagctgtggtcacctaggctgctctgcttctaggggttggctaattgt

SEQ ID NO: 5177 - DNA, 122 bp, Homo sapiens
  misc_feature (61)..(62): /note="This region represents a CpG dinucleotide"
  misc_feature (61)..(61): /note="Nucleotide may be methylated to form 5-methylcytosine"
aacaggcaccagtataccctcctcctgctgtgcatcttcccctgaccacagcttcctgcccgtgcccagtacgcagatgctgtgccagcttcccccatgcccaccggcaggggctctgctgc

SEQ ID NO: 5178 - DNA, 122 bp, Homo sapiens
  misc_feature (61)..(62): /note="This region represents a CpG dinucleotide"
  misc_feature (61)..(61): /note="Nucleotide may be methylated to form 5-methylcytosine"
gcaataaagatcgtgactgagaatattgttcacgattaatgacaggctgggggccgaaaacgcacagctgacggccaggaagcccagttggtaagaaccctgccaagcatcccccacaaggc

SEQ ID NO: 5179 - DNA, 122 bp, Homo sapiens
  misc_feature (61)..(62): /note="This region represents a CpG dinucleotide"
  misc_feature (61)..(61): /note="Nucleotide may be methylated to form 5-methylcytosine"
ggtggtacaggctctcaagctgtcctggggctctggaggcagagaggaggttggatgggacggaaagaacccaccagagcggagccaagagcaaaggccatcatcacgctaagggcaaggcc

SEQ ID NO: 5180 - DNA, 122 bp, Homo sapiens
  misc_feature (61)..(62): /note="This region represents a CpG dinucleotide"
  misc_feature (61)..(61): /note="Nucleotide may be methylated to form 5-methylcytosine"
ggcgagggagagtcctgggctgcccctgagccccggggccacgggaagaacttgcagcgacgtcatccctgccccggacacagtcccgggcccagggaggacctggaacattcccttcctcc

SEQ ID NO: 5181 - DNA, 122 bp, Homo sapiens
  misc_feature (61)..(62): /note="This region represents a CpG dinucleotide"
  misc_feature (61)..(61): /note="Nucleotide may be methylated to form 5-methylcytosine"
ccactctcctaggaacctctgccccttatagaatattcatgcagcccttttttgtaatctcggtctgagtttcaaaagattccctagcaggaagaccatttaacagatagaccattttacaa

SEQ ID NO: 5182 - DNA, 122 bp, Homo sapiens
  misc_feature (61)..(62): /note="This region represents a CpG dinucleotide"
  misc_feature (61)..(61): /note="Nucleotide may be methylated to form 5-methylcytosine"
ggaatcaaaggaatcctgatttctgacttgacagggtagaaggaggtgtgtgtgtgtgtgcgtgtgtgtgtgtatgtttatgtagggacagtgacacccaagagaggctaggaataggtttg

SEQ ID NO: 5183 - DNA, 122 bp, Homo sapiens
  misc_feature (61)..(62): /note="This region represents a CpG dinucleotide"
  misc_feature (61)..(61): /note="Nucleotide may be methylated to form 5-methylcytosine"
tgatccttacaagaaatatcctggtgcgaaaaacgaccaaaaccacatagccagcctccacgctgttcagagaaagctggcttagcaatgttgtatggtttttggatgcgctgcgttactca

SEQ ID NO: 5184 - DNA, 122 bp, Homo sapiens
  misc_feature (61)..(62): /note="This region represents a CpG dinucleotide"
  misc_feature (61)..(61): /note="Nucleotide may be methylated to form 5-methylcytosine"
ggctttcggaccagagcagccctggcagggttgagtccagccctggcggggttgagttaccgaaacaccctggaggcagctaaatttcctcagctgtcctggagaggctcaccccagcccca

SEQ ID NO: 5185 - DNA, 122 bp, Homo sapiens
  misc_feature (61)..(62): /note="This region represents a CpG dinucleotide"
  misc_feature (61)..(61): /note="Nucleotide may be methylated to form 5-methylcytosine"
caacttctgtcatcacagcttgagatatgatgactaatttcagctcgaggaacctggtggcgagcattgaagggacaagtagccaatttgcttgcaacatcaggatgattctgtggaaccaa

SEQ ID NO: 5186 - DNA, 122 bp, Homo sapiens
  misc_feature (61)..(62): /note="This region represents a CpG dinucleotide"
  misc_feature (61)..(61): /note="Nucleotide may be methylated to form 5-methylcytosine"
aaatccttaccaagaaccactttaccagttattttctcatcactcaatgattctgagttacgttcatttgtattttgctatgtgaatagtactaaaatgtttttaccctgcctactttgcta

SEQ ID NO: 5187 - DNA, 122 bp, Homo sapiens
  misc_feature (61)..(62): /note="This region represents a CpG dinucleotide"
  misc_feature (61)..(61): /note="Nucleotide may be methylated to form 5-methylcytosine"
tgatgaacatttagcttgattccatatcctggatattgcaaaataatactgcaatgaacacgggagtgcagatatctcttcgacatactcatttcataccctttgggtatatatctagtagt

SEQ ID NO: 5188 - DNA, 122 bp, Homo sapiens
  misc_feature (61)..(62): /note="This region represents a CpG dinucleotide"
  misc_feature (61)..(61): /note="Nucleotide may be methylated to form 5-methylcytosine"
cgtgaacttacggccaccccacttccctgcccacttccccatcagcttcaccttgggtcgcggcacatctgttctccagaacatgttccctgccaggaatctgcagggagctcttaagactt

SEQ ID NO: 5189 - DNA, 122 bp, Homo sapiens
  misc_feature (61)..(62): /note="This region represents a CpG dinucleotide"
  misc_feature (61)..(61): /note="Nucleotide may be methylated to form 5-methylcytosine"
tggcctgtgccggcctctccagcctcatgggtccccagcacggctcctccaccccacacacgagaactccaggctccactcacaccagggaatacgcgaggtggcgagtcacagggttgctg

SEQ ID NO: 5190 - DNA, 122 bp, Homo sapiens
  misc_feature (61)..(62): /note="This region represents a CpG dinucleotide"
  misc_feature (61)..(61): /note="Nucleotide may be methylated to form 5-methylcytosine"
caatctaggatatgcagcctatgatgcatcataggtatacccctggggtaggaacttcttcgtctcatgtaaagatgactatgtaagcagccttgaaaaaaggtgcataggtcactgaaact

SEQ ID NO: 5191 - DNA, 122 bp, Homo sapiens
  misc_feature (61)..(62): /note="This region represents a CpG dinucleotide"
  misc_feature (61)..(61): /note="Nucleotide may be methylated to form 5-methylcytosine"
aagagttcacaagtgtgtgagtgagtgtatgagtgtgttgatggcagggaagtagaaaagcgtggctgtaggaaatttggctgctttcgttttaagctggccacccaaatcagttaaaatgt

SEQ ID NO: 5192 - DNA, 122 bp, Homo sapiens
  misc_feature (61)..(62): /note="This region represents a CpG dinucleotide"
  misc_feature (61)..(61): /note="Nucleotide may be methylated to form 5-methylcytosine"
ggggtcgcagcaaggccccgcctgtcccctctccggagctcttatactctgagccctgctcggtttaggcctgtctgcggaatccgcaccaaccagcaccatgcccatgatactggggtact

SEQ ID NO: 5193 - DNA, 122 bp, Homo sapiens
  misc_feature (61)..(62): /note="This region represents a CpG dinucleotide"
  misc_feature (61)..(61): /note="Nucleotide may be methylated to form 5-methylcytosine"
ttcaggtgaagaaaatgggcgctctgactcaccatgatctggcatataaagagagtacaacgcagagtgtaccagagtccaggtggtcaaaatggtaacattagtaaaatgaccctgctcaa

SEQ ID NO: 5194 - DNA, 122 bp, Homo sapiens
  misc_feature (61)..(62): /note="This region represents a CpG dinucleotide"
  misc_feature (61)..(61): /note="Nucleotide may be methylated to form 5-methylcytosine"
tgtcaatgaagaaatcatctgatgccagggactttgaagtctttctccaagaggtagatacgatgatctctgttttgctggaaagaaagctgatacccagaaagagcctgtaatctcaggtc

SEQ ID NO: 5195 - DNA, 122 bp, Homo sapiens
  misc_feature (61)..(62): /note="This region represents a CpG dinucleotide"
  misc_feature (61)..(61): /note="Nucleotide may be methylated to form 5-methylcytosine"
gacccagccccggtggcctgtccggtgaccctggacgccagtcctccggtcctggaggggcgccgaggcccttcccgccccactgctccgccctacgtcctggactcccaggtcgccgggtg

SEQ ID NO: 5196 - DNA, 122 bp, Homo sapiens
  misc_feature (61)..(62): /note="This region represents a CpG dinucleotide"
  misc_feature (61)..(61): /note="Nucleotide may be methylated to form 5-methylcytosine"
gcagcttgttctctgccctctacaaggatctgggatttatttagcctgtttccctggcagcgctggttacagtggcagcatctgcttccccaggaggctgagtgagtcacagccacctacgc

SEQ ID NO: 5197 - DNA, 122 bp, Homo sapiens
  misc_feature (61)..(62): /note="This region represents a CpG dinucleotide"
  misc_feature (61)..(61): /note="Nucleotide may be methylated to form 5-methylcytosine"
aacgtagttttatgttcactgcattgaatcatcaagtcattatcttctctttgccataaacggacagcctacctttttgtcagcatgctatttcatttatttcacagagaaacccagtttca

SEQ ID NO: 5198 - DNA, 122 bp, Homo sapiens
  misc_feature (61)..(62): /note="This region represents a CpG dinucleotide"
  misc_feature (61)..(61): /note="Nucleotide may be methylated to form 5-methylcytosine"
tgacctgtgtgagaaggtctgagaattttatgtacatccttcgagtggctggtttcagagcgggagatgcattcactgactcagcactcacatgggtgagtcagcagacaccggcctggggg

SEQ ID NO: 5199 - DNA, 122 bp, Homo sapiens
  misc_feature (61)..(62): /note="This region represents a CpG dinucleotide"
  misc_feature (61)..(61): /note="Nucleotide may be methylated to form 5-methylcytosine"
catctcaaaaaaaagggattcttattcacaaatagcatgtatgccacacaattcaattgccgatagttttcatttgtatatatatttgtattacagattaaacttcagattaaatttattct

SEQ ID NO: 5200 - DNA, 122 bp, Homo sapiens
  misc_feature (61)..(62): /note="This region represents a CpG dinucleotide"
  misc_feature (61)..(61): /note="Nucleotide may be methylated to form 5-methylcytosine"
taaaggggaaactagaaaaggaacctgatgagtcaccatagggccaatagcgcagagaggcgggggtgcccctggtggtcagacttggttacacaccctgcaactctagagattgaccctta

SEQ ID NO: 5201 - DNA, 122 bp, Homo sapiens
  misc_feature (61)..(62): /note="This region represents a CpG dinucleotide"
  misc_feature (61)..(61): /note="Nucleotide may be methylated to form 5-methylcytosine"
atagaccgacccccgcctgacgcctcccagacccccccacctgacgcccctcaggccccccgcctgacgtcccagacacccccacgaccggatcccccagacccccaatctgacgccccact

SEQ ID NO: 5202 - DNA, 122 bp, Homo sapiens
  misc_feature (61)..(62): /note="This region represents a CpG dinucleotide"
  misc_feature (61)..(61): /note="Nucleotide may be methylated to form 5-methylcytosine"
ttttttcctctgtcagtcttatttattggctggttattaatcctcatccttgttgacttacggtaataggatggttgttgcagcactagatactgtgtacacatacgaggctagaaaaatgg

SEQ ID NO: 5203 - DNA, 122 bp, Homo sapiens
  misc_feature (61)..(62): /note="This region represents a CpG dinucleotide"
  misc_feature (61)..(61): /note="Nucleotide may be methylated to form 5-methylcytosine"
aagcaccaaactaggcagctggataatgggagagtcggctggttgtgagcatgctcgcgccgggaacagatccaccctctgttattcctctgaataaatataaatcacgatcagaaacccaa

SEQ ID NO: 5204 - DNA, 122 bp, Homo sapiens
  misc_feature (61)..(62): /note="This region represents a CpG dinucleotide"
  misc_feature (61)..(61): /note="Nucleotide may be methylated to form 5-methylcytosine"
atatacatattttcctcattagtgggatggagtaacgctgagctgggcaaaagaaaggtccgaatttgcctggtaatattgccacaacttgaaagtggatgattttcctcctaaagcctcct

SEQ ID NO: 5205 - DNA, 122 bp, Homo sapiens
  misc_feature (61)..(62): /note="This region represents a CpG dinucleotide"
  misc_feature (61)..(61): /note="Nucleotide may be methylated to form 5-methylcytosine"
ttgcccccacacacagcaggcacatccggagcccccgcctgcccgcgtaaccccagctcccgtcacctcccactcgagcctgttacggatgctttctggaggaggtttgctggggctgccaa

SEQ ID NO: 5206 - DNA, 122 bp, Homo sapiens
  misc_feature (61)..(62): /note="This region represents a CpG dinucleotide"
  misc_feature (61)..(61): /note="Nucleotide may be methylated to form 5-methylcytosine"
ttttatgcaatcagtcttgtgacacagcatttacagtgaaatctttatcaagcccattaacgatgtaatatggataagtgagagagagcaatcaatacacagggagaaatatataccaccta

SEQ ID NO: 5207 - DNA, 122 bp, Homo sapiens
  misc_feature (61)..(62): /note="This region represents a CpG dinucleotide"
  misc_feature (61)..(61): /note="Nucleotide may be methylated to form 5-methylcytosine"
taaattaggcctgctttattattgtctaataattaagcctccctttacttatcccaccctcgttttaaaaactaaaaacgtgtggtagctgtattagttagaacattttcaagtaacaggaa

SEQ ID NO: 5208 - DNA, 122 bp, Homo sapiens
  misc_feature (61)..(62): /note="This region represents a CpG dinucleotide"
  misc_feature (61)..(61): /note="Nucleotide may be methylated to form 5-methylcytosine"
cgcagatcccaggggatccttggcgtttctggttcatgcccacggtgtgtctcaggcccacggggggcagcctaaagcggcacgaaagcttgaaaggggaggtcgaagcacctgtgtgatga

SEQ ID NO: 5209 - DNA, 122 bp, Homo sapiens
  misc_feature (61)..(62): /note="This region represents a CpG dinucleotide"
  misc_feature (61)..(61): /note="Nucleotide may be methylated to form 5-methylcytosine"
ctttgggaagcagcagtgggtgaatcaccaggtcaaagcctttctttaaggtgtccacgccgcccctaatcctgctcgaagcagccctgagaaacatcgcccattatctctccataccaccc

SEQ ID NO: 5210 - DNA, 122 bp, Homo sapiens
  misc_feature (61)..(62): /note="This region represents a CpG dinucleotide"
  misc_feature (61)..(61): /note="Nucleotide may be methylated to form 5-methylcytosine"
gttatgacctaaatttcactgctatctacttcaaaattattttcagaaagcaaacattttcggttaatttacttcttcccacccccaactactaccattccccttaagcctgcaaatggtag

SEQ ID NO: 5211 - DNA, 122 bp, Homo sapiens
  misc_feature (61)..(62): /note="This region represents a CpG dinucleotide"
  misc_feature (61)..(61): /note="Nucleotide may be methylated to form 5-methylcytosine"
cccacatataccctgaaatatactctgtggtccagaaacggaactctaaaacaacagcaacgaacttgacaggcgcttcccgggaagttcgaattccccacactctgtccccaccagccatg

SEQ ID NO: 5212 - DNA, 122 bp, Homo sapiens
  misc_feature (61)..(62): /note="This region represents a CpG dinucleotide"
  misc_feature (61)..(61): /note="Nucleotide may be methylated to form 5-methylcytosine"
agggcctgggcaggagctgcagctgtttccgtgagattgaacagcttcctgtgcagggtccgctgctggacctggatgaggccaagggacatgggtacccacaggcgggccccagcaggggc

SEQ ID NO: 5213 - DNA, 122 bp, Homo sapiens
  misc_feature (61)..(62): /note="This region represents a CpG dinucleotide"
  misc_feature (61)..(61): /note="Nucleotide may be methylated to form 5-methylcytosine"
acacaagcaccattagctgtcctgtagcataggatataaaatgtcggggagtgggggtggcgtgagagttcaccaggtcagcctgctgctctgactctgagtcctatatagcattctctgtt

SEQ ID NO: 5214 - DNA, 122 bp, Homo sapiens
  misc_feature (61)..(62): /note="This region represents a CpG dinucleotide"
  misc_feature (61)..(61): /note="Nucleotide may be methylated to form 5-methylcytosine"
cccacacggtggctccccctcacacagcagctcccccgctacacggcggctcccccgacacggtggctccccacacgtaagcagcagctccccccacacacggccctccccacacacacaca

SEQ ID NO: 5215 - DNA, 122 bp, Homo sapiens
  misc_feature (61)..(62): /note="This region represents a CpG dinucleotide"
  misc_feature (61)..(61): /note="Nucleotide may be methylated to form 5-methylcytosine"
cattttattgctgggtagttggggtagatcgccgacacattctgccgacaagtcagactgcggttctgacctgaaggcctcggtgaacataagcaagggcacctgggcgcggggagagccgt

SEQ ID NO: 5216 - DNA, 122 bp, Homo sapiens
  misc_feature (61)..(62): /note="This region represents a CpG dinucleotide"
  misc_feature (61)..(61): /note="Nucleotide may be methylated to form 5-methylcytosine"
ggtctaagacttacctaacaccatcccatactcttctccctggtgctctcttacaacacacgaacataaaaggatgtgaatgtatgacttatagaacatgtaagtagatgtatgattaccta

SEQ ID NO: 5217 - DNA, 122 bp, Homo sapiens
  misc_feature (61)..(62): /note="This region represents a CpG dinucleotide"
  misc_feature (61)..(61): /note="Nucleotide may be methylated to form 5-methylcytosine"
taacctgtattcattagcaaaaggtagctccaggggaccattattctccagagcagaatacgtccagagcaggcttcagccaccagagagagccctcagacagttgaaaataggtcaggatg

SEQ ID NO: 5218 - DNA, 122 bp, Homo sapiens
  misc_feature (61)..(62): /note="This region represents a CpG dinucleotide"
  misc_feature (61)..(61): /note="Nucleotide may be methylated to form 5-methylcytosine"
accgcttgtaaaagtgaaacagtacaaacctaagtcttcagattttgtctcaggaagcaacgcaactcttgtgcgagcaatccatgagcaggaagtggtgaaatactttaaaggtttattga

SEQ ID NO: 5219 - DNA, 122 bp, Homo sapiens
  misc_feature (61)..(62): /note="This region represents a CpG dinucleotide"
  misc_feature (61)..(61): /note="Nucleotide may be methylated to form 5-methylcytosine"
ctttccctgtctggaggcacgatggcctcccaggtgttcagataactaatttactgactccgttagcagtgtgtagcttctgtacagtaagtaatcatgtggtagaaattatgaatagtgta

SEQ ID NO: 5220 - DNA, 122 bp, Homo sapiens
  misc_feature (61)..(62): /note="This region represents a CpG dinucleotide"
  misc_feature (61)..(61): /note="Nucleotide may be methylated to form 5-methylcytosine"
gggtcagtgcatcaatccccatgtctgcttacaactctgcctaggatccctgcattaacccggccctcaggcattctgcctggtggcttgactttagacactccccttccattcctcaccag

SEQ ID NO: 5221 - DNA, 122 bp, Homo sapiens
  misc_feature (61)..(62): /note="This region represents a CpG dinucleotide"
  misc_feature (61)..(61): /note="Nucleotide may be methylated to form 5-methylcytosine"
caagtccacagagtaaagtgaaagcaagtttattaagaaagtgaaggaataaatgaatggcgactccataagcagaacagccccaatggctgctggttagctgtcatctatgattatctttt

SEQ ID NO: 5222 - DNA, 122 bp, Homo sapiens
  misc_feature (61)..(62): /note="This region represents a CpG dinucleotide"
  misc_feature (61)..(61): /note="Nucleotide may be methylated to form 5-methylcytosine"
gcccactcctttaggatgcctgtgtgtgctctcccgaaggctcagcacacatgcgcctaccgctgtcgtttcctgcctggggagggtgttgacacaggagagccagggcatcatgcagctgt

SEQ ID NO: 5223 - DNA, 122 bp, Homo sapiens
  misc_feature (61)..(62): /note="This region represents a CpG dinucleotide"
  misc_feature (61)..(61): /note="Nucleotide may be methylated to form 5-methylcytosine"
tgtaaatctccctcttagctcttctgctattgagccttcactgctccaccttcagctctccgtctatgcaggcacactgtcacccactggtcatgtgaatgaaacctccaattacaccagga

SEQ ID NO: 5224 - DNA, 122 bp, Homo sapiens
  misc_feature (61)..(62): /note="This region represents a CpG dinucleotide"
  misc_feature (61)..(61): /note="Nucleotide may be methylated to form 5-methylcytosine"
actcccggaggttccttttgcaataaccactttagtagctccctagagatgtctgtgtcacgtacccaagagctgaagtcagacttcagaaaatgctccttgacgctctactcttctgagta

SEQ ID NO: 5225 - DNA, 122 bp, Homo sapiens
  misc_feature (61)..(62): /note="This region represents a CpG dinucleotide"
  misc_feature (61)..(61): /note="Nucleotide may be methylated to form 5-methylcytosine"
tgtaggtcataagacccaccattccagagagggtcctgccccacacccagaaggaaggggcgcggctcagagaggccagtaagaatccaggctcatctgcctgcccatgctttgtggaactt

SEQ ID NO: 5226 - DNA, 122 bp, Homo sapiens
  misc_feature (61)..(62): /note="This region represents a CpG dinucleotide"
  misc_feature (61)..(61): /note="Nucleotide may be methylated to form 5-methylcytosine"
tagcagcatcgaaaacttggagtcggaggccgtgttcgaggccaagttcaagcgcagccgcgagtcgcccctgtcgctggggctgcggctgctgagccgttcgcgctcggaggagcgcggcc

SEQ ID NO: 5227 - DNA, 122 bp, Homo sapiens
  misc_feature (61)..(62): /note="This region represents a CpG dinucleotide"
  misc_feature (61)..(61): /note="Nucleotide may be methylated to form 5-methylcytosine"
tccttagttcagtggtcctcaaagcttactattagtaaaaccacttggactgctctttaacgtgtagatttctagacactgctcagagattgtgacttagatagaatgagctagggttgagg

SEQ ID NO: 5228 - DNA, 122 bp, Homo sapiens
  misc_feature (61)..(62): /note="This region represents a CpG dinucleotide"
  misc_feature (61)..(61): /note="Nucleotide may be methylated to form 5-methylcytosine"
tgaggcttcagagacttgcctgatgcctggcctcgctcagaccccgggcacctgggaggtcgtgcctccttgaaatggccactcgccaggctgctttgcaccgcaccgggcacaggctgcgg

SEQ ID NO: 5229 - DNA, 122 bp, Homo sapiens
  misc_feature (61)..(62): /note="This region represents a CpG dinucleotide"
  misc_feature (61)..(61): /note="Nucleotide may be methylated to form 5-methylcytosine"
tatttactgtgaaaattaagcggctccaattccatttcgatgtgtaggctataggtgttacggcaagagctgcctggtacatctgaaggccgctacgcccaccttcagtgccagtttcctta

SEQ ID NO: 5230 - DNA, 122 bp, Homo sapiens
  misc_feature (61)..(62): /note="This region represents a CpG dinucleotide"
  misc_feature (61)..(61): /note="Nucleotide may be methylated to form 5-methylcytosine"
gtcacaatctcaagggagaaagacctcaaaaatttgtggatgctcatgtctggaaaagggcgactgtggttcataccaaactgagaagaaagagattcatgagcccagcctgccccacggca

SEQ ID NO: 5231 - DNA, 122 bp, Homo sapiens
  misc_feature (61)..(62): /note="This region represents a CpG dinucleotide"
  misc_feature (61)..(61): /note="Nucleotide may be methylated to form 5-methylcytosine"
accaaccttatcaacacagacatgcattgggcacccctgactatgttgctatgttgaccacgtgtcacaggccagtatctagaaagcgatgtctctctgcctgtcatctccaccggcatgga

SEQ ID NO: 5232 - DNA, 122 bp, Homo sapiens
  misc_feature (61)..(62): /note="This region represents a CpG dinucleotide"
  misc_feature (61)..(61): /note="Nucleotide may be methylated to form 5-methylcytosine"
tgtacgcatgtacgtgtatacgtctatacattattttatagacagtcatgtggtgcttaacgatggggatgtatactgagaaacatgtcattacgcaatttcatcattgtgcaaacatccta

SEQ ID NO: 5233 - DNA, 122 bp, Homo sapiens
  misc_feature (61)..(62): /note="This region represents a CpG dinucleotide"
  misc_feature (61)..(61): /note="Nucleotide may be methylated to form 5-methylcytosine"
acacagccatggggttgttagcgccgagattaatgacctcttctattgagctacaatccacgtgatagtacactcatttgtggtttacagttttgtgctcaataaacccagaaccagacttc

SEQ ID NO: 5234 - DNA, 122 bp, Homo sapiens
  misc_feature (61)..(62): /note="This region represents a CpG dinucleotide"
  misc_feature (61)..(61): /note="Nucleotide may be methylated to form 5-methylcytosine"
tcaggctgaggagtctggccccggtctctgtgcttttagcagctcagcccagctgcttctcggccacccttgcgacatcatcttccatctcacactgccaagggcaggaatgccagacttat

SEQ ID NO: 5235 - DNA, 122 bp, Homo sapiens
  misc_feature (61)..(62): /note="This region represents a CpG dinucleotide"
  misc_feature (61)..(61): /note="Nucleotide may be methylated to form 5-methylcytosine"
gcttcagccctatctcaaagctgcaactctgcctcctggcatggctaatcctgctgggcacggccttcctcaggctgcagcaggcaggccaactttctcctctccctggacctgggtaagat

SEQ ID NO: 5236 - DNA, 122 bp, Homo sapiens
  misc_feature (61)..(62): /note="This region represents a CpG dinucleotide"
  misc_feature (61)..(61): /note="Nucleotide may be methylated to form 5-methylcytosine"
tcctgtatataatcctagttctctctcctttattgaactccgaataaatcacaaaatccccgtgccacaatttcctcttctaagacagagataatattttcacctgcccatcaagtgggata

SEQ ID NO: 5237 - DNA, 122 bp, Homo sapiens
  misc_feature (61)..(62): /note="This region represents a CpG dinucleotide"
  misc_feature (61)..(61): /note="Nucleotide may be methylated to form 5-methylcytosine"
cctcggggtgagggaggccactctataaggagaccatgtgtgtggaagcaccttgggaaacgctgcgcgcaggccgggacccagggcagtcggccttccttatccatggattcaatgaactg

SEQ ID NO: 5238 - DNA, 122 bp, Homo sapiens
  misc_feature (61)..(62): /note="This region represents a CpG dinucleotide"
  misc_feature (61)..(61): /note="Nucleotide may be methylated to form 5-methylcytosine"
ggctccacccctgggtaacgctgcagaggacgtggtcaggaaagggcaggtttccctcctcgccaaggaaggtggtagagaggtgttcagactcgccttccctccctgggcccagcagcggc

SEQ ID NO: 5239 - DNA, 122 bp, Homo sapiens
  misc_feature (61)..(62): /note="This region represents a CpG dinucleotide"
  misc_feature (61)..(61): /note="Nucleotide may be methylated to form 5-methylcytosine"
tcctaatgataatggcccccaagcctgtgctatcacctgtcttagaattttgccaggtatcggccttaatgtttgacacaggaatcatcttaggattaaatttcagatttttcatctgcagt

SEQ ID NO: 5240 - DNA, 122 bp, Homo sapiens
  misc_feature (61)..(62): /note="This region represents a CpG dinucleotide"
  misc_feature (61)..(61): /note="Nucleotide may be methylated to form 5-methylcytosine"
cagaactctcctggctgctgcctaccctgacctagacaaccaaacccacggattctcagacggaggaatagctcaggcttcggagtccacagaccaccatcacccaggcacctgaatacact

SEQ ID NO: 5241 - DNA, 122 bp, Homo sapiens
  misc_feature (61)..(62): /note="This region represents a CpG dinucleotide"
  misc_feature (61)..(61): /note="Nucleotide may be methylated to form 5-methylcytosine"
agaagtaagtgcagcaggcatctatctgaacagggcccagcatatagcagtttcccaccacgcttgttattgtggaaggtacacagaaatggtcggatttctctgctgtgacgtccttccat

SEQ ID NO: 5242 - DNA, 122 bp, Homo sapiens
  misc_feature (61)..(62): /note="This region represents a CpG dinucleotide"
  misc_feature (61)..(61): /note="Nucleotide may be methylated to form 5-methylcytosine"
cccaacgtctgggctgtgcgttgtaacgcagttggcggggccttcagcttgggatgagggcgaaggggctcgggatgggtgggaaagcaaggaccgggcaacaggtggggaggtggcggact

SEQ ID NO: 5243 - DNA, 122 bp, Homo sapiens
  misc_feature (61)..(62): /note="This region represents a CpG dinucleotide"
  misc_feature (61)..(61): /note="Nucleotide may be methylated to form 5-methylcytosine"
cattggaagcaggggtctcagaaggaaggcgcagatgggaaaggcttttctgggcggtggcgtttcaatgcaaggagggcgcttgaatcactgacagacttcaagttaagggagttttcgtg

SEQ ID NO: 5244 - DNA, 122 bp, Homo sapiens
  misc_feature (61)..(62): /note="This region represents a CpG dinucleotide"
  misc_feature (61)..(61): /note="Nucleotide may be methylated to form 5-methylcytosine"
agcaaatcaagacctttgtttatttccacatacctgtacacacatgggtatgtgcatacacgcacacacagagcttcaaggagccagctttaagaaaatgcctgcctaaaacacccccactt

SEQ ID NO: 5245 - DNA, 122 bp, Homo sapiens
  misc_feature (61)..(62): /note="This region represents a CpG dinucleotide"
  misc_feature (61)..(61): /note="Nucleotide may be methylated to form 5-methylcytosine"
aaggagtggacttagcagctgagtcaaacggggaggagggagttggtgttctggtactcccgagctcctaagctcctaagctatgcagaattacagttctttggtaacagaaaaaacaaagt

SEQ ID NO: 5246 - DNA, 122 bp, Homo sapiens
  misc_feature (61)..(62): /note="This region represents a CpG dinucleotide"
  misc_feature (61)..(61): /note="Nucleotide may be methylated to form 5-methylcytosine"
gtctcctgattataacaaaccactcgacctcaggctaaccaggccctgcaactgggcaatcgagctggcccttctaggagcaggccttgagcctggctgcccttctcaaggcaggttgactc

SEQ ID NO: 5247 - DNA, 122 bp, Homo sapiens
  misc_feature (61)..(62): /note="This region represents a CpG dinucleotide"
  misc_feature (61)..(61): /note="Nucleotide may be methylated to form 5-methylcytosine"
tgtaaattgaaacttcctttaatacttaactgtgagttaaacatagttctggagctccatcgaaagggtcttagtcagccaggcacagtggcttacacctgtaatcccagcattctgggaag

SEQ ID NO: 5248 - DNA, 122 bp, Homo sapiens
  misc_feature (61)..(62): /note="This region represents a CpG dinucleotide"
  misc_feature (61)..(61): /note="Nucleotide may be methylated to form 5-methylcytosine"
tggacacaagaaggacttacgccctgagcacaggtgccaatggtgacaagactggcaagacgtgagggcatgaatggttcattcaggcagctgctgcagatgtggtcacctggtgccatctg

SEQ ID NO: 5249 - DNA, 122 bp, Homo sapiens
  misc_feature (61)..(62): /note="This region represents a CpG dinucleotide"
  misc_feature (61)..(61): /note="Nucleotide may be methylated to form 5-methylcytosine"
ccctagtattttattatacaaatgcggcctccacctggtggcggccatgatacctgtacacgtgctttaacctggaggctgccttgacacctgtaaacgtagaagggaaagagggtgagaat

SEQ ID NO: 5250 - DNA, 122 bp, Homo sapiens
  misc_feature (61)..(62): /note="This region represents a CpG dinucleotide"
  misc_feature (61)..(61): /note="Nucleotide may be methylated to form 5-methylcytosine"
tctgtgtatgaaacagattctagctcttgtccctgtttcatgatgttgcagtgaaggaaacgaaacagacaaagggcacagactggagaaaaggattttaaaaggatgacttttaaaatgtg

SEQ ID NO: 5251 - DNA, 122 bp, Homo sapiens
  misc_feature (61)..(62): /note="This region represents a CpG dinucleotide"
  misc_feature (61)..(61): /note="Nucleotide may be methylated to form 5-methylcytosine"
tggtttaacctaaacatgccctgggcctttgcacattgcaacaccctgagttttctcattcgtctttggcaagtttttactgctatgatagagatgatgggaactactggggagtaagagga

SEQ ID NO: 5252 - DNA, 122 bp, Homo sapiens
  misc_feature (61)..(62): /note="This region represents a CpG dinucleotide"
  misc_feature (61)..(61): /note="Nucleotide may be methylated to form 5-methylcytosine"
tttacagggtacacaatgttttctagcttaattagcctcttaccttcatccaggaactaacgccagatgcctctgtcctcatggcagtcacctggccatgaccagaatcccagtttgagtgt

SEQ ID NO: 5253 - DNA, 122 bp, Homo sapiens
  misc_feature (61)..(62): /note="This region represents a CpG dinucleotide"
  misc_feature (61)..(61): /note="Nucleotide may be methylated to form 5-methylcytosine"
tagtctttgttgccttgaaattaagcaagggtctcttaagagggcaataaaagcactaatcgtaaaaggatataaataataagttaaacaatattaaaattaaggacctcttcattaaaaca

SEQ ID NO: 5254 - DNA, 122 bp, Homo sapiens
  misc_feature (61)..(62): /note="This region represents a CpG dinucleotide"
  misc_feature (61)..(61): /note="Nucleotide may be methylated to form 5-methylcytosine"
cctggtagttggatctgacagccaggaagagtaaggaccagcgaacaggtctagggagttcggtgggtgcaatacctgcccctctaacacaggacattaaggacacccaggggccacctagg

SEQ ID NO: 5255 - DNA, 122 bp, Homo sapiens
  misc_feature (61)..(62): /note="This region represents a CpG dinucleotide"
  misc_feature (61)..(61): /note="Nucleotide may be methylated to form 5-methylcytosine"
catgcagcaacatcttggcttgaggcgtctggggtacagccggcagcaagagtgggcaggcgccgtgggcgtcctcaccactgcatgttcagagcccacatgcccacagaccaggctggtga

SEQ ID NO: 5256 - DNA, 122 bp, Homo sapiens
  misc_feature (61)..(62): /note="This region represents a CpG dinucleotide"
  misc_feature (61)..(61): /note="Nucleotide may be methylated to form 5-methylcytosine"
aaacactacttagcaagaaatatgcacaacacaaccacaaggggctataacaagacatcacgcttagggctgagattagactcctttcactaaaattgatgagtcatttgtcacaatacaga

SEQ ID NO: 5257 - DNA, 122 bp, Homo sapiens
  misc_feature (61)..(62): /note="This region represents a CpG dinucleotide"
  misc_feature (61)..(61): /note="Nucleotide may be methylated to form 5-methylcytosine"
accaatggaaactccaccaacatcataacagtttacaattacaattacagttacaaatgccgtggcattgtcctgaaactaccctatatgatctaaacgggagaggatccctcaattctggg

SEQ ID NO: 5258 - DNA, 122 bp, Homo sapiens
  misc_feature (61)..(62): /note="This region represents a CpG dinucleotide"
  misc_feature (61)..(61): /note="Nucleotide may be methylated to form 5-methylcytosine"
acaagctccaccttttgcagaaaaacaaaacagagagtgtttttcttcccatttacgatgcggatgtctctgttcctgagtttaaaacaatcataaagacagaaaagcaaatccctgtagta

SEQ ID NO: 5259 - DNA, 122 bp, Homo sapiens
  misc_feature (61)..(62): /note="This region represents a CpG dinucleotide"
  misc_feature (61)..(61): /note="Nucleotide may be methylated to form 5-methylcytosine"
cctttaaaaatatgtctccccatctggttagtaattacctttgacctgccacccttgatacgtgatcactgcatgcttcaccatgctttctactgtgtagttcacagtaattctgggaaaat

SEQ ID NO: 5260 - DNA, 122 bp, Homo sapiens
  misc_feature (61)..(62): /note="This region represents a CpG dinucleotide"
  misc_feature (61)..(61): /note="Nucleotide may be methylated to form 5-methylcytosine"
cacctattcttctgttcacatgacttgggatttccagttctgaaagcattgatcagctcccgctccgtacccgatgctgcacgtggctctagggctgaatgtgatgtgggtcgtggccagct

SEQ ID NO: 5261 - DNA, 122 bp, Homo sapiens
  misc_feature (61)..(62): /note="This region represents a CpG dinucleotide"
  misc_feature (61)..(61): /note="Nucleotide may be methylated to form 5-methylcytosine"
gagagggaacaagctcctggccgggcctaatgggttccaggtgtgctctgtgccctgcagcggctgaaccggcagcagtggtggtggctgtgactgtgcctggctggctgagaagacccagc

SEQ ID NO: 5262 - DNA, 122 bp, Homo sapiens
  misc_feature (61)..(62): /note="This region represents a CpG dinucleotide"
  misc_feature (61)..(61): /note="Nucleotide may be methylated to form 5-methylcytosine"
actttccacaacccctgcccactcaatgatgaggcaagaaggcatgcttcctccaagactcgggactggggtggaaagcaagactttgccttgaaagctcagaagctatagtctgaacccag

SEQ ID NO: 5263 - DNA, 122 bp, Homo sapiens
  misc_feature (61)..(62): /note="This region represents a CpG dinucleotide"
  misc_feature (61)..(61): /note="Nucleotide may be methylated to form 5-methylcytosine"
tggcctcctctcctgcgtggattcattctacggcgcactggtgtattggattaaatctcacgtccgcgtagtgttgacgaggaaacacactctgatgtgtttatagcaaggacgtaggtggg

SEQ ID NO: 5264 - DNA, 122 bp, Homo sapiens
  misc_feature (61)..(62): /note="This region represents a CpG dinucleotide"
  misc_feature (61)..(61): /note="Nucleotide may be methylated to form 5-methylcytosine"
tagtgagttcctctcttagattctctttcttctggatgtaccctccatgtttttgtcatacgtttaatctctttatcctgttattttttctggaggagtttctctactctacctctttgcta

SEQ ID NO: 5265 - DNA, 122 bp, Homo sapiens
  misc_feature (61)..(62): /note="This region represents a CpG dinucleotide"
  misc_feature (61)..(61): /note="Nucleotide may be methylated to form 5-methylcytosine"
cagagggggcagtgacaggcgggtgggtgtggcaggaccccacaatgtctctttctgtggcgtctccttcttcgcctgccccttcctatgggccatccttccagctcacctgcggcccaccc

SEQ ID NO: 5266 - DNA, 122 bp, Homo sapiens
  misc_feature (61)..(62): /note="This region represents a CpG dinucleotide"
  misc_feature (61)..(61): /note="Nucleotide may be methylated to form 5-methylcytosine"
ctacgttctaaaaataaaaagaacacagacattttaaggagcaattcagtatcaattgttcgtagtgtattattatttgaaagctattgtattagactgcttaggctgccataacagactac

SEQ ID NO: 5267 - DNA, 122 bp, Homo sapiens
  misc_feature (61)..(62): /note="This region represents a CpG dinucleotide"
  misc_feature (61)..(61): /note="Nucleotide may be methylated to form 5-methylcytosine"
ttgtgacttagtaaagtgtctcataaggacctttaggtggcgctttttaacaacctgctacgctgtcttcagtgctgacagagagatggtgagaaggctgaaagcctattgacttgacagat

SEQ ID NO: 5268 - DNA, 122 bp, Homo sapiens
  misc_feature (61)..(62): /note="This region represents a CpG dinucleotide"
  misc_feature (61)..(61): /note="Nucleotide may be methylated to form 5-methylcytosine"
ataagaaaggtgtatagattgaggttagagggagaggaatagctagtgtgagggacaaaacgcagttttgaatagtattgagtacttacatgtcagttgctgcactgagcacctgccgtgtg

SEQ ID NO: 5269 - DNA, 122 bp, Homo sapiens
  misc_feature (61)..(62): /note="This region represents a CpG dinucleotide"
  misc_feature (61)..(61): /note="Nucleotide may be methylated to form 5-methylcytosine"
tgaagtgtcccagaattccttgcctccttcccggaaccagtagtcatgaacagagttattcgtgtagtagggtggagataggagaatgagcaaggcatgagggtgcacagacactcctgtac

SEQ ID NO: 5270 - DNA, 122 bp, Homo sapiens
  misc_feature (61)..(62): /note="This region represents a CpG dinucleotide"
  misc_feature (61)..(61): /note="Nucleotide may be methylated to form 5-methylcytosine"
cctttgaacactcctcatttcagaagctttgcttctgttgcaaccaaacatgacacttagcgtgctgagcaggaaggacaaggaaagagtaattcgcagactgttattacaggcccctccag

SEQ ID NO: 5271 - DNA, 122 bp, Homo sapiens
  misc_feature (61)..(62): /note="This region represents a CpG dinucleotide"
  misc_feature (61)..(61): /note="Nucleotide may be methylated to form 5-methylcytosine"
ggtgatctgcccgcctcggcttcccaaagtgctgggattacaggcatgagccaccgcgcccggcctggcctgtatttttttaaatagtcagtgtcaacagagaagcggacaccttgtgttgt

SEQ ID NO: 5272 - DNA, 122 bp, Homo sapiens
  misc_feature (61)..(62): /note="This region represents a CpG dinucleotide"
  misc_feature (61)..(61): /note="Nucleotide may be methylated to form 5-methylcytosine"
actgtctgtctctccctcctctggccatgtaaaactgcctgcttcccctttgcaatctgccgtgattgtaagtttcctaaggcatacccagccatgcttcctgtagagcctgtggaactgtg

SEQ ID NO: 5273 - DNA, 122 bp, Homo sapiens
  misc_feature (61)..(62): /note="This region represents a CpG dinucleotide"
  misc_feature (61)..(61): /note="Nucleotide may be methylated to form 5-methylcytosine"
gacgggacccggctgagagccccgactgtgaagaggaggctcacggcgcctacctgggaccgaccctgactgtgaggaggagactcacgggacctacttgggaccggatcctgaccgtgagg

SEQ ID NO: 5274 - DNA, 122 bp, Homo sapiens
  misc_feature (61)..(62): /note="This region represents a CpG dinucleotide"
  misc_feature (61)..(61): /note="Nucleotide may be methylated to form 5-methylcytosine"
acacccgagaggctgcaggtcggcgcgagaggctgtttgcatctcggcccgggcgtaggtcgcctagcgacctaacgccgagggctcggggaagggatcccagacagagccaaaatggaagg

SEQ ID NO: 5275 - DNA, 122 bp, Homo sapiens
  misc_feature (61)..(62): /note="This region represents a CpG dinucleotide"
  misc_feature (61)..(61): /note="Nucleotide may be methylated to form 5-methylcytosine"
cctaacagtatgccccactaacgaatgaggaaataggctcagagaagttaagtaacttgacgtcagttatccagctactaagtaaagaggcaggctctatgcaagactgattctttaaccac

SEQ ID NO: 5276 - DNA, 122 bp, Homo sapiens
  misc_feature (61)..(62): /note="This region represents a CpG dinucleotide"
  misc_feature (61)..(61): /note="Nucleotide may be methylated to form 5-methylcytosine"
ccctaggagaagtacacgtaactactagagtgtgtaatagacagaactgacctgtcagggcggccaggctttcctaaggaagtgtgattaagccgagcaggaggaaactaggcagtggttgt

SEQ ID NO: 5277 - DNA, 122 bp, Homo sapiens
  misc_feature (61)..(62): /note="This region represents a CpG dinucleotide"
  misc_feature (61)..(61): /note="Nucleotide may be methylated to form 5-methylcytosine"
cccctcaggttccagcttcgttaaagctggtatttagagaaatgggaaacacattgataacgattcctaaccagtttcagtgttcacgaccggtgcgcatgcagtctctggtggaaacggac

SEQ ID NO: 5278 - DNA, 122 bp, Homo sapiens
  misc_feature (61)..(62): /note="This region represents a CpG dinucleotide"
  misc_feature (61)..(61): /note="Nucleotide may be methylated to form 5-methylcytosine"
ataaacgaaagctgtccttgacaaattggaacaatgaccactctatctcttatggacatacgtgactgggtgagttccctctcttcttcccacctctgagctgtcttccctgcccttgtatc

SEQ ID NO: 5279 - DNA, 122 bp, Homo sapiens
  misc_feature (61)..(62): /note="This region represents a CpG dinucleotide"
  misc_feature (61)..(61): /note="Nucleotide may be methylated to form 5-methylcytosine"
tagattctacatgagtgagatcatatgatatttgcctcccaaagtgctgggattacagatcggagccaccatgccatgccctaaaatacatatggcttcctgtgtttgccattgctccaggg

SEQ ID NO: 5280 - DNA, 122 bp, Homo sapiens
  misc_feature (61)..(62): /note="This region represents a CpG dinucleotide"
  misc_feature (61)..(61): /note="Nucleotide may be methylated to form 5-methylcytosine"
ggccctgcaagctatcttctcgacaaatggtttcactctgcctaacatccccctcttcctcgtcgcatcctaacacccaaacctgcaacaagtcctgcggaatctgtcccagcccggcctct

SEQ ID NO: 5281 - DNA, 122 bp, Homo sapiens
  misc_feature (61)..(62): /note="This region represents a CpG dinucleotide"
  misc_feature (61)..(61): /note="Nucleotide may be methylated to form 5-methylcytosine"
tgcgatagtttgctgagaatggtggtttccagcttcatccacgtccctaccttcacagcacgtctacactgatgttgtggccaggcaacttggcactatagcctagccacgtcgacacacag

SEQ ID NO: 5282 - DNA, 122 bp, Homo sapiens
  misc_feature (61)..(62): /note="This region represents a CpG dinucleotide"
  misc_feature (61)..(61): /note="Nucleotide may be methylated to form 5-methylcytosine"
ttgtggcatttcccaggcagaggtggcccgggaggtttccgaagcggtcccttcccgagccggcgaggccctggatgtgcgactacattttcttaaacacatatacaggcggcttgctgttt

SEQ ID NO: 5283 - DNA, 122 bp, Homo sapiens
  misc_feature (61)..(62): /note="This region represents a CpG dinucleotide"
  misc_feature (61)..(61): /note="Nucleotide may be methylated to form 5-methylcytosine"
ctgtgaagcaacctagtattcattgtaataataatatccacagaagttaccatgtgtccacgtgggtgcactttgccatatttgattgatgatgatgatgatagtgatgatgctggattata

SEQ ID NO: 5284 - DNA, 122 bp, Homo sapiens
  misc_feature (61)..(62): /note="This region represents a CpG dinucleotide"
  misc_feature (61)..(61): /note="Nucleotide may be methylated to form 5-methylcytosine"
aaatgatatttatttgggaatagggcgttggcgaatatgcgtgccatagtaaacgatttgcgcattcaggaaagtaatggtttttaaagaaaaaatgaagaggaagataatggtttggaaat

SEQ ID NO: 5285 - DNA, 122 bp, Homo sapiens
  misc_feature (61)..(62): /note="This region represents a CpG dinucleotide"
  misc_feature (61)..(61): /note="Nucleotide may be methylated to form 5-methylcytosine"
cagatttctattgaaacctcccaacttcagagccaggatgagaaagactggtttgccaagcggtttgaggaactgcaaaaggagacgtttaccacagaagagcgaaaacatctgtcgaaact

SEQ ID NO: 5286 - DNA, 122 bp, Homo sapiens
  misc_feature (61)..(62): /note="This region represents a CpG dinucleotide"
  misc_feature (61)..(61): /note="Nucleotide may be methylated to form 5-methylcytosine"
cccaggaggtgtgttttggttttttgtttttaaagaaaataaatatcttagtatcatttgcgcaagagaacaaagaagctatgtgggttttcttaaaagcaccaaagaaggttcatatcagg

SEQ ID NO: 5287 - DNA, 122 bp, Homo sapiens
  misc_feature (61)..(62): /note="This region represents a CpG dinucleotide"
  misc_feature (61)..(61): /note="Nucleotide may be methylated to form 5-methylcytosine"
atgagaactgtccagtccagttaggagtgaaggtcacggatctagtgcagaccatagaggcggaaagcagaaaaacctcccacgcgtgcacagatgcacacgcctcccacccggacacaccc

SEQ ID NO: 5288 - DNA, 122 bp, Homo sapiens
  misc_feature (61)..(62): /note="This region represents a CpG dinucleotide"
  misc_feature (61)..(61): /note="Nucleotide may be methylated to form 5-methylcytosine"
ggtttatgtgattagccctatttcttcagggcagctccatttcattagttcccaattactcgttaaacaaccttgacaatgagttacacatgcttagtcatttccatggaactctcatttat

SEQ ID NO: 5289 - DNA, 122 bp, Homo sapiens
  misc_feature (61)..(62): /note="This region represents a CpG dinucleotide"
  misc_feature (61)..(61): /note="Nucleotide may be methylated to form 5-methylcytosine"
aaaaccccaggagtttaatcagcactgggtccaaagcaatgagcaatgagtgtgacctgccgccacccctcagcaagcaagaccaaggccacacaacagcaaccagtgacccaagcaagaga

SEQ ID NO: 5290 - DNA, 122 bp, Homo sapiens
  misc_feature (61)..(62): /note="This region represents a CpG dinucleotide"
  misc_feature (61)..(61): /note="Nucleotide may be methylated to form 5-methylcytosine"
aaaacaatatgcattccaagaggaagttagaagctagacacatgtgaatcaaatacatcacggtaagttcaactgaaaataggcaagaaaataaggaagtggaacaaataacatttttagag

SEQ ID NO: 5291 - DNA, 122 bp, Homo sapiens
  misc_feature (61)..(62): /note="This region represents a CpG dinucleotide"
  misc_feature (61)..(61): /note="Nucleotide may be methylated to form 5-methylcytosine"
gaaagtcccaggagagagaaactgtcgttcaagtcatcacatagcaaactgcccctaacacgtgctgcacacacattaggtggtgactcagttttggtgtttgacttgagtcttaaaacata

SEQ ID NO: 5292 - DNA, 122 bp, Homo sapiens
  misc_feature (61)..(62): /note="This region represents a CpG dinucleotide"
  misc_feature (61)..(61): /note="Nucleotide may be methylated to form 5-methylcytosine"
acaaaacttaaagttattttaactcatttggtggcaaagactgacctaaatgaaatgctacgagtgtaattactatcctaatttaatccatttcctatgaatatttgtatgtgttgccacaa

SEQ ID NO: 5293 - DNA, 122 bp, Homo sapiens
  misc_feature (61)..(62): /note="This region represents a CpG dinucleotide"
  misc_feature (61)..(61): /note="Nucleotide may be methylated to form 5-methylcytosine"
atgtttctcaccagccgcgctgcgtactgaggtctggcgggcggggagttgcagccacagcgtgtccgcaggttcgagcccagggctaaagtaccagcgtggaaacttacctgggaccacaa

SEQ ID NO: 5294 - DNA, 122 bp, Homo sapiens
  misc_feature (61)..(62): /note="This region represents a CpG dinucleotide"
  misc_feature (61)..(61): /note="Nucleotide may be methylated to form 5-methylcytosine"
aatttggttcaacagataaaatttaactctcacgtgactccaattactcatcttctattccgtttaaatgagaaaatgctattctaataatggaattttttttttcagtctgtggttaggga

SEQ ID NO: 5295 - DNA, 122 bp, Homo sapiens
  misc_feature (61)..(62): /note="This region represents a CpG dinucleotide"
  misc_feature (61)..(61): /note="Nucleotide may be methylated to form 5-methylcytosine"
cacctggacttcagcaagggcctcctccccagcccatcctgcccatggccacacaggctgcgttcaaagtgagcttcctaataggcattctggactatgctgcttgtcagattcgtctttca

SEQ ID NO: 5296 - DNA, 122 bp, Homo sapiens
  misc_feature (61)..(62): /note="This region represents a CpG dinucleotide"
  misc_feature (61)..(61): /note="Nucleotide may be methylated to form 5-methylcytosine"
gcacagcctcttagctcagttccgtaacttaggacaaaatgagcctcacatgccactcaacgccacttttccagattctttccagcaacccaacagccacccgtttcctcactctcccaata

SEQ ID NO: 5297 - DNA, 122 bp, Homo sapiens
  misc_feature (61)..(62): /note="This region represents a CpG dinucleotide"
  misc_feature (61)..(61): /note="Nucleotide may be methylated to form 5-methylcytosine"
aggaaagcacaagagccagtgtaacaccaaaaccactcctactcgtattcaaaaactgtgcgatttgagagtgatgtaatttcaaagaagtcacttcatcttaagaggtacaagaggccagg

SEQ ID NO: 5298 - DNA, 122 bp, Homo sapiens
  misc_feature (61)..(62): /note="This region represents a CpG dinucleotide"
  misc_feature (61)..(61): /note="Nucleotide may be methylated to form 5-methylcytosine"
aggcacttgtcctccacaatggctgccatgagtgttggttgccgatggttacagccaagtcgttccttggccttagaggaggaagctctcttgcccgagggcatgcactcccctactgcagg

SEQ ID NO: 5299 - DNA, 122 bp, Homo sapiens
  misc_feature (61)..(62): /note="This region represents a CpG dinucleotide"
  misc_feature (61)..(61): /note="Nucleotide may be methylated to form 5-methylcytosine"
caccttgcccatgtgcagagagtaccaaacacagcacgtggcttttgctcagaaccagaccgccacctggatttcccttcctcacacccatttcccctcagggctcagccaggttgttggct

SEQ ID NO: 5300 - DNA, 122 bp, Homo sapiens
  misc_feature (61)..(62): /note="This region represents a CpG dinucleotide"
  misc_feature (61)..(61): /note="Nucleotide may be methylated to form 5-methylcytosine"
gcgacccgtctgtgattgtgaacccataaaagtggctggtgggaggccgggcagaggcagcggcgggctcggaggggccctgaaggacatgccccgtgaaagtggagggcccaggcggccac

SEQ ID NO: 5301 - DNA, 122 bp, Homo sapiens
  misc_feature (61)..(62): /note="This region represents a CpG dinucleotide"
  misc_feature (61)..(61): /note="Nucleotide may be methylated to form 5-methylcytosine"
acaaaatcctgattgtgaatcctgcaaaccagcagcaacttatagaaggcagcagccacacggaggaaacaggaaagaaggacaggggattatttttttaaatctgatgcaacttgcattgt

SEQ ID NO: 5302 - DNA, 122 bp, Homo sapiens
  misc_feature (61)..(62): /note="This region represents a CpG dinucleotide"
  misc_feature (61)..(61): /note="Nucleotide may be methylated to form 5-methylcytosine"
gcatgggatcacatgtcaccagcttcccttagcacagtaacccaatcgttaagtttctttcgttgttaattcaaattgtaaaccctcaggcgtgcacattgttctctaaagagatggcttaa

SEQ ID NO: 5303 - DNA, 122 bp, Homo sapiens
  misc_feature (61)..(62): /note="This region represents a CpG dinucleotide"
  misc_feature (61)..(61): /note="Nucleotide may be methylated to form 5-methylcytosine"
agggagatcaggtgatgctcaacagagctgtgcagcagaggtggacacacacagcaagcacgcagttgactcaatcatagtcactgcttgggagggccataggtgctgtccacatcagctct

SEQ ID NO: 5304 - DNA, 122 bp, Homo sapiens
  misc_feature (61)..(62): /note="This region represents a CpG dinucleotide"
  misc_feature (61)..(61): /note="Nucleotide may be methylated to form 5-methylcytosine"
ccccgcggggacctgctgtgtgtgggtgtgaaggtggtgtggggcaagctgtgggaaccccgtgtcaagccctccccaggccagtgatgagcccaaaagctcctctggaaaacgttgatctt

SEQ ID NO: 5305 - DNA, 122 bp, Homo sapiens
  misc_feature (61)..(62): /note="This region represents a CpG dinucleotide"
  misc_feature (61)..(61): /note="Nucleotide may be methylated to form 5-methylcytosine"
tgtgagatccaagaaccgtctcttggggtctggatcaggacctctttccagtaacaccaacgccaccgagtgccagcccaataaatgaaagtcaacccttacaaatacacataattgtgaaa

SEQ ID NO: 5306 - DNA, 122 bp, Homo sapiens
  misc_feature (61)..(62): /note="This region represents a CpG dinucleotide"
  misc_feature (61)..(61): /note="Nucleotide may be methylated to form 5-methylcytosine"
cccgaagctgttcgtgtagttgttcacatagcgatggtcaccacctaggaagcagagggtcgggtcagcagaggagccaggtgggaaggaggagccagccactggggacttttggggctcag

SEQ ID NO: 5307 - DNA, 122 bp, Homo sapiens
  misc_feature (61)..(62): /note="This region represents a CpG dinucleotide"
  misc_feature (61)..(61): /note="Nucleotide may be methylated to form 5-methylcytosine"
acctggatctcggcaagaggagaagtacttctagaagaaagcagaacactagaaggtaagcgccatggctgggaatatgccagtgcctttggccaaactgctcagaaccactcccaggccat

SEQ ID NO: 5308 - DNA, 122 bp, Homo sapiens
  misc_feature (61)..(62): /note="This region represents a CpG dinucleotide"
  misc_feature (61)..(61): /note="Nucleotide may be methylated to form 5-methylcytosine"
ggtcatgcaaacttgttaacagatatttcttcgggataacttgagaaccttcacagtagacgatgctagtgctgtgctgactatagtgtttacaatgaatcattgaataaattgttaccatc

SEQ ID NO: 5309 - DNA, 122 bp, Homo sapiens
  misc_feature (61)..(62): /note="This region represents a CpG dinucleotide"
  misc_feature (61)..(61): /note="Nucleotide may be methylated to form 5-methylcytosine"
ggcggtctccctccatccggcacaggcgcggcggtctccctccatccggcacaggcgtggcggtcttccccatccggcacaggtgtgaaatttaaaggcttggacggagtttcctttttcct

SEQ ID NO: 5310 - DNA, 122 bp, Homo sapiens
  misc_feature (61)..(62): /note="This region represents a CpG dinucleotide"
  misc_feature (61)..(61): /note="Nucleotide may be methylated to form 5-methylcytosine"
ctagttataacgaccaaaaatgtctgcaagacattgccaaatggcccctggggaacaaatcgcttctgagtgagaaccactgctttcggctttctgaaattcttaaaatagtttgagagcta

SEQ ID NO: 5311 - DNA, 122 bp, Homo sapiens
  misc_feature (61)..(62): /note="This region represents a CpG dinucleotide"
  misc_feature (61)..(61): /note="Nucleotide may be methylated to form 5-methylcytosine"
caatttaggacagagccttatcctctgttacaaaacatgtttagagtcagactacaacaacgaggcatagtgtctgcacagcattattttaatgcaagaaaacaaagctgccaactataagg

SEQ ID NO: 5312 - DNA, 122 bp, Homo sapiens
  misc_feature (61)..(62): /note="This region represents a CpG dinucleotide"
  misc_feature (61)..(61): /note="Nucleotide may be methylated to form 5-methylcytosine"
aagtttaaacacatttttgctttcccaaggcattttctacttccttagcacacttctttccgagggacatttccctaaaattaaggactgtaaacctacaagttaaacttttttgtaaggag

SEQ ID NO: 5313 - DNA, 122 bp, Homo sapiens
  misc_feature (61)..(62): /note="This region represents a CpG dinucleotide"
  misc_feature (61)..(61): /note="Nucleotide may be methylated to form 5-methylcytosine"
taaactaaggggtaactgaagtcctctgctctgtgtgaaggccaggggtgggggatgcggcggaggagaagtcggggtggagaggctgtggacaaaaaggatgagagggctagaggtggggg

SEQ ID NO: 5314 - DNA, 122 bp, Homo sapiens
  misc_feature (61)..(62): /note="This region represents a CpG dinucleotide"
  misc_feature (61)..(61): /note="Nucleotide may be methylated to form 5-methylcytosine"
attcatgatctttctcccaaggatccatgggtgtaagacctcattgcaacacaaactatgcgtctggaaaataattaatttgtgtcctcaaaatttattaattgtagtaaccatgctggtat

SEQ ID NO: 5315 - DNA, 122 bp, Homo sapiens
  misc_feature (61)..(62): /note="This region represents a CpG dinucleotide"
  misc_feature (61)..(61): /note="Nucleotide may be methylated to form 5-methylcytosine"
attctctgtttatttaggtttgtaatatctttacaaatgatttgcagtttttttcttcctcgtgtttcataactcttttaaaaacaattcctgggtattttatttttgttgttaatataaat

SEQ ID NO: 5316 - DNA, 122 bp, Homo sapiens
  misc_feature (61)..(62): /note="This region represents a CpG dinucleotide"
  misc_feature (61)..(61): /note="Nucleotide may be methylated to form 5-methylcytosine"
gcctttgtaaataaagttttattggaacacagccacacccattcatctgtgtcacatctacggctgctttgtcactacaacagcaaagttgagtagttgcagcacagactttgcgtggccca

SEQ ID NO: 5317 - DNA, 122 bp, Homo sapiens
  misc_feature (61)..(62): /note="This region represents a CpG dinucleotide"
  misc_feature (61)..(61): /note="Nucleotide may be methylated to form 5-methylcytosine"
tgggctgggctgggctgagcagcagggaggctgagcagcctgtagagggcagcacacgcgcggcttcccagccagccgccctggaggacgtggaggggaggcagccacagtcctggagaggc

SEQ ID NO: 5318 - DNA, 122 bp, Homo sapiens
  misc_feature (61)..(62): /note="This region represents a CpG dinucleotide"
  misc_feature (61)..(61): /note="Nucleotide may be methylated to form 5-methylcytosine"
gcctccagctccaaattgccaacaacaagtgtggctactatacgtcaaggactctgaagccgtgagagagggggaagaacaacagtagagaggatgcccagctggtaagaatcgagtgttta

SEQ ID NO: 5319 - DNA, 122 bp, Homo sapiens
  misc_feature (61)..(62): /note="This region represents a CpG dinucleotide"
  misc_feature (61)..(61): /note="Nucleotide may be methylated to form 5-methylcytosine"
gcgctgtgggaatcctgcttgggtaaatgtcaccgctttatataaagaactttgctctatcgtagctccagaatctgctcagattgccacaccttaacatatgatctgattattaggaagta

SEQ ID NO: 5320 - DNA, 122 bp, Homo sapiens
  misc_feature (61)..(62): /note="This region represents a CpG dinucleotide"
  misc_feature (61)..(61): /note="Nucleotide may be methylated to form 5-methylcytosine"
cgcttctgttatcttttaaaagacctgatcagactggagtacggaagtactctgagctctcggatttttttttaagttaacaggtcataaataagttcaaaagttttctgcagaaccctgaa

SEQ ID NO: 5321 - DNA, 122 bp, Homo sapiens
  misc_feature (61)..(62): /note="This region represents a CpG dinucleotide"
  misc_feature (61)..(61): /note="Nucleotide may be methylated to form 5-methylcytosine"
gggcctcccaaagtgctgggattacaggcatgagctaccgcgcccggcccccaccctccccgttacatttttaacaggagaaaagagggaccggggaccccacaaatacacctctttgcatc

SEQ ID NO: 5322 - DNA, 122 bp, Homo sapiens
  misc_feature (61)..(62): /note="This region represents a CpG dinucleotide"
  misc_feature (61)..(61): /note="Nucleotide may be methylated to form 5-methylcytosine"
ttgctcagaggagcatggacacccagcttctctccttctcagagactgcttttgaggaatcgcctatgcagctctgggtcccctggagttagtccaggcagtgggaagtcaggaaggagatt

SEQ ID NO: 5323 - DNA, 122 bp, Homo sapiens
  misc_feature (61)..(62): /note="This region represents a CpG dinucleotide"
  misc_feature (61)..(61): /note="Nucleotide may be methylated to form 5-methylcytosine"
ccatgtactgagcccaaacctgtctgtctgcttgccatttccagtctttcactccacttccgcccccacaaaacatacagaccgagagacatacgagagactctggtcacttttttctggat

SEQ ID NO: 5324 - DNA, 122 bp, Homo sapiens
  misc_feature (61)..(62): /note="This region represents a CpG dinucleotide"
  misc_feature (61)..(61): /note="Nucleotide may be methylated to form 5-methylcytosine"
gtatttcttcatggcccagaaaaactcctatgtaacttcccttagagaaatgaaactgaacgggaagcagaagtagttactggatgatgttggacctgggaattctgaatgagtcagttcaa

SEQ ID NO: 5325 - DNA, 122 bp, Homo sapiens
  misc_feature (61)..(62): /note="This region represents a CpG dinucleotide"
  misc_feature (61)..(61): /note="Nucleotide may be methylated to form 5-methylcytosine"
agtctgagctctggcggcgcgccccgacccggaggcggcgttgggagcacgtggctggcccggatgcccaacaaatcttaaatgtgtttgaggcgtgcctgggctctcaggggttcagcaaa

SEQ ID NO: 5326 - DNA, 122 bp, Homo sapiens
  misc_feature (61)..(62): /note="This region represents a CpG dinucleotide"
  misc_feature (61)..(61): /note="Nucleotide may be methylated to form 5-methylcytosine"
cttatccagctgcctacggagcttcccatctgggctttcagttgctacattctctaaagccgtatctgacccacaccttactaacactatgtgcttctacagcattcacccagtgttacagc

SEQ ID NO: 5327 - DNA, 122 bp, Homo sapiens
  misc_feature (61)..(62): /note="This region represents a CpG dinucleotide"
  misc_feature (61)..(61): /note="Nucleotide may be methylated to form 5-methylcytosine"
attgtgtttattttaccacaactttaaagaatgaaaaaaaagttgcttgatgagcagatacgtgtacaaatagacagaggtgtccttgaggatatttcattaagtttgataaattgcccttc

SEQ ID NO: 5328 - DNA, 122 bp, Homo sapiens
  misc_feature (61)..(62): /note="This region represents a CpG dinucleotide"
  misc_feature (61)..(61): /note="Nucleotide may be methylated to form 5-methylcytosine"
tcgctttggtcgggaatgcgggtcgactggagaggcccgagcaagccccccagctccacccgcccctaaagggtgggcttgggcagtcacatcaggagcctcaacattcacatccggaaaat

SEQ ID NO: 5329 - DNA, 122 bp, Homo sapiens
  misc_feature (61)..(62): /note="This region represents a CpG dinucleotide"
  misc_feature (61)..(61): /note="Nucleotide may be methylated to form 5-methylcytosine"
gagttgggagggaaagaggttgggcactctgttgccattgaatttcccctctgctttcttcgcccccatggggggcagccatggaacggggggcagagtccaggcgggaggatctttctcgc

SEQ ID NO: 5330 - DNA, 122 bp, Homo sapiens
  misc_feature (61)..(62): /note="This region represents a CpG dinucleotide"
  misc_feature (61)..(61): /note="Nucleotide may be methylated to form 5-methylcytosine"
ggctgagtaggtggggcttagttaacactgccctggagctcattgagcatttcctgggttcggcaggcaggaagcaccagcgtgttctggatgaaaatagttcctgcctgctggctctccac

SEQ ID NO: 5331 - DNA, 122 bp, Homo sapiens
  misc_feature (61)..(62): /note="This region represents a CpG dinucleotide"
  misc_feature (61)..(61): /note="Nucleotide may be methylated to form 5-methylcytosine"
tgctgaaagccccgggctgtttcagaacccggtcagggtaaccgtcaggcctgcggtcaccgcgctgcaatcccaggaggccttgcgtcagcggccattatatcaataaggaagtacaatca

SEQ ID NO: 5332 - DNA, 122 bp, Homo sapiens
  misc_feature (61)..(62): /note="This region represents a CpG dinucleotide"
  misc_feature (61)..(61): /note="Nucleotide may be methylated to form 5-methylcytosine"
tgcacacacaggaacacagaggcccacttacatataaatgcagatgcgtgcctgcatcaacgagcgggagcacattgggcaaatgcacgtgtacatgccctacgtgaacacaaacccgtgga

SEQ ID NO: 5333 - DNA, 122 bp, Homo sapiens
  misc_feature (61)..(62): /note="This region represents a CpG dinucleotide"
  misc_feature (61)..(61): /note="Nucleotide may be methylated to form 5-methylcytosine"
ttctgctaggccaatgagcagcaccccctgacacaaacggaggttggaggacaggccaatcgctcccagctatttgagccaatggagaagttcctgatgcccacacctgctggtctcaccgc

SEQ ID NO: 5334 - DNA, 122 bp, Homo sapiens
  misc_feature (61)..(62): /note="This region represents a CpG dinucleotide"
  misc_feature (61)..(61): /note="Nucleotide may be methylated to form 5-methylcytosine"
gcagctagctggtggcagccctggcagatcccggcacacagtcaggctccacgccttacccgagccagttgtgcctctagattacgcctcgcttaaagtccagcgaccaagatagaaaaaca

SEQ ID NO: 5335 - DNA, 122 bp, Homo sapiens
  misc_feature (61)..(62): /note="This region represents a CpG dinucleotide"
  misc_feature (61)..(61): /note="Nucleotide may be methylated to form 5-methylcytosine"
gcagaactgtgtccgaaactggtggcctctatggcttataagaatgaagccgcagacactcgccctgtgtgtttcagctgttacaatatcccgtccagagtttctttcagtgggtttctgat

SEQ ID NO: 5336 - DNA, 122 bp, Homo sapiens
  misc_feature (61)..(62): /note="This region represents a CpG dinucleotide"
  misc_feature (61)..(61): /note="Nucleotide may be methylated to form 5-methylcytosine"
ctatgtggaaggacactcttaagatgtttgcacaataacaaaattgcctaacagtgcaatcgtcttttttatttttatttatttattatagagatggagtctcactattttgcctaggctgg

SEQ ID NO: 5337 - DNA, 122 bp, Homo sapiens
  misc_feature (61)..(62): /note="This region represents a CpG dinucleotide"
  misc_feature (61)..(61): /note="Nucleotide may be methylated to form 5-methylcytosine"
agagggaaggaattgggaacccagcaggttggtgtccttggatatgtgccccgcagaagtcgggcagcagttcctggttcgtgtggttacgctagagagaaactgacctggttcatctggtt

SEQ ID NO: 5338 - DNA, 122 bp, Homo sapiens
  misc_feature (61)..(62): /note="This region represents a CpG dinucleotide"
  misc_feature (61)..(61): /note="Nucleotide may be methylated to form 5-methylcytosine"
aatcttaagaagcacggactgagattactttaggaagtatttgcagcagcttccaaccaacgctatttacttgaaaacccttgtgattgggagtgaattggtgtcaatgaagaaaggcgttg

SEQ ID NO: 5339 - DNA, 122 bp, Homo sapiens
  misc_feature (61)..(62): /note="This region represents a CpG dinucleotide"
  misc_feature (61)..(61): /note="Nucleotide may be methylated to form 5-methylcytosine"
gcaaagcgtgatgaccgtggggaccagagctcggactggtaccggccggaaaggccccgacgaacttaccgtacagggcagcctcccatagtcctgccctcggaaccatagcaaccgcgcag

SEQ ID NO: 5340 - DNA, 122 bp, Homo sapiens
  misc_feature (61)..(62): /note="This region represents a CpG dinucleotide"
  misc_feature (61)..(61): /note="Nucleotide may be methylated to form 5-methylcytosine"
ggctaacaaaagcccccagtgaacaaagtccccagtgaaatgcggtgcaaatctctatgtcgctactgatgcagctgtagggtgggggactggaggtttgctcggcatcctcccatttttga

SEQ ID NO: 5341 - DNA, 122 bp, Homo sapiens
  misc_feature (61)..(62): /note="This region represents a CpG dinucleotide"
  misc_feature (61)..(61): /note="Nucleotide may be methylated to form 5-methylcytosine"
cccacaggagcctcttcagctttcctccagctgtggcacaggacatgtgttcggttcactcgatcacattattaagtaacataggtattatttaaaaggagaagagtgagggcggagtccta

SEQ ID NO: 5342 - DNA, 122 bp, Homo sapiens
  misc_feature (61)..(62): /note="This region represents a CpG dinucleotide"
  misc_feature (61)..(61): /note="Nucleotide may be methylated to form 5-methylcytosine"
caggggccaatgccaatcacatctgaagttgaacagtatccataccttctgttgacacaacgatctggaggacacagtccaaaggcaaggtacagcaatcatcacagtaatggcagccacta

SEQ ID NO: 5343 - DNA, 122 bp, Homo sapiens
  misc_feature (61)..(62): /note="This region represents a CpG dinucleotide"
  misc_feature (61)..(61): /note="Nucleotide may be methylated to form 5-methylcytosine"
gttctataagctcccatggagcaatgatttcaataaacacaatttcataagcatcccacacgttctcaagtttaggccaattttgctcttactcaactccatatgactttaaaaatgcagga

SEQ ID NO: 5344 - DNA, 122 bp, Homo sapiens
  misc_feature (61)..(62): /note="This region represents a CpG dinucleotide"
  misc_feature (61)..(61): /note="Nucleotide may be methylated to form 5-methylcytosine"
tggagaaactgagtcacaggaggattggttaaggtcactccatgagtcagtaactttgctcggaatgaaaacccagaaggctgactcactgcattctaggtggtgagcgctcagccacagtc

SEQ ID NO: 5345 - DNA, 122 bp, Homo sapiens
  misc_feature (61)..(62): /note="This region represents a CpG dinucleotide"
  misc_feature (61)..(61): /note="Nucleotide may be methylated to form 5-methylcytosine"
gggaacaacaaattcagctgctacattactagtacatagcaattagtgctatgataagatcgttaagtaggcctggaatgcagtatctttaaaaaaaacttctccttgttttgaagaaagga

SEQ ID NO: 5346 - DNA, 122 bp, Homo sapiens
  misc_feature (61)..(62): /note="This region represents a CpG dinucleotide"
  misc_feature (61)..(61): /note="Nucleotide may be methylated to form 5-methylcytosine"
cttcctcaggctacctggttggagcgtgccatctgtttcctgctttaccctgattgacaacgggctaacagccaagtcaagtcaacctgagtcctctcaaaacccttctttttgcactcccc

SEQ ID NO: 5347 - DNA, 122 bp, Homo sapiens
  misc_feature (61)..(62): /note="This region represents a CpG dinucleotide"
  misc_feature (61)..(61): /note="Nucleotide may be methylated to form 5-methylcytosine"
cgctggcatcactgtcaggacttatctcaggcaacaggctttcctggtcattcttttctccgcgtctggcatcggagcctttcctcagaagcttccagggtatgattggggttctgaaggct

SEQ ID NO: 5348 - DNA, 122 bp, Homo sapiens
  misc_feature (61)..(62): /note="This region represents a CpG dinucleotide"
  misc_feature (61)..(61): /note="Nucleotide may be methylated to form 5-methylcytosine"
tcgaggcatccgtgactatccacaaaccaaccggagaaacctcagcttcctccgcacccccgaggagcctgcggatttaaaatgaagcccgcaaacctcacagaaggtgtcaggcaaagacg

SEQ ID NO: 5349 - DNA, 122 bp, Homo sapiens
  misc_feature (61)..(62): /note="This region represents a CpG dinucleotide"
  misc_feature (61)..(61): /note="Nucleotide may be methylated to form 5-methylcytosine"
atttagctaccaactgaccaaattatagccttcaggtttgaggtaaaaaagcttacaatccgaaataaattttgagaggctctattttcagtcatcaacaggcaaaaataatctcctaaagc

SEQ ID NO: 5350 - DNA, 122 bp, Homo sapiens
  misc_feature (61)..(62): /note="This region represents a CpG dinucleotide"
  misc_feature (61)..(61): /note="Nucleotide may be methylated to form 5-methylcytosine"
ctgttcagaactctgggctccccctaccctctaaactacccttcaaaaaaaaaaaattctcgatttgtcacaggaaccttcgcgaatttctctagctggtcctgaaataatcagtctggact

SEQ ID NO: 5351 - DNA, 122 bp, Homo sapiens
  misc_feature (61)..(62): /note="This region represents a CpG dinucleotide"
  misc_feature (61)..(61): /note="Nucleotide may be methylated to form 5-methylcytosine"
tgtgtgtgtctgtctttctaaatctttcttgacattattgcctcaaaggcactgagacagcgtgtgttaaaacccaaggacacagattgtaattctagtcttattgctgtaggaatcagttt

SEQ ID NO: 5352 - DNA, 122 bp, Homo sapiens
  misc_feature (61)..(62): /note="This region represents a CpG dinucleotide"
  misc_feature (61)..(61): /note="Nucleotide may be methylated to form 5-methylcytosine"
ccctccccaggccagtgatgagcccaaaagctcctctggaaaacgttgatctttgcacggcgcccatgcaggcttccaggccaccagggcatgggcaggactcagcccgccatgggcgcctg

SEQ ID NO: 5353 - DNA, 122 bp, Homo sapiens
  misc_feature (61)..(62): /note="This region represents a CpG dinucleotide"
  misc_feature (61)..(61): /note="Nucleotide may be methylated to form 5-methylcytosine"
cacagagagagctcagttagagggctgtggcaaactgtcttagtccttaaatgagttgtacgaggaagtgatgtctaaaactctgatagccatcttataagtaaaaagaagaagcagtataa

SEQ ID NO: 5354 - DNA, 122 bp, Homo sapiens
  misc_feature (61)..(62): /note="This region represents a CpG dinucleotide"
  misc_feature (61)..(61): /note="Nucleotide may be methylated to form 5-methylcytosine"
agtagggatggggtaaatgacacactaagctaataacatccaaaccagcttgtgaaacatcgtgcaagttatatctggttcataccaaagagtcgctactcagtccaggcctctatcatgcc

SEQ ID NO: 5355 - DNA, 122 bp, Homo sapiens
  misc_feature (61)..(62): /note="This region represents a CpG dinucleotide"
  misc_feature (61)..(61): /note="Nucleotide may be methylated to form 5-methylcytosine"
cgcggagcggccctgctctcttgcctcaagcacagaagcaaatcaccaggctctgcctgccgtcgtgcggtgacatcgggggtcacctccccgaaggcgcaggtctggtgggcgagcagagc

SEQ ID NO: 5356 - DNA, 122 bp, Homo sapiens
  misc_feature (61)..(62): /note="This region represents a CpG dinucleotide"
  misc_feature (61)..(61): /note="Nucleotide may be methylated to form 5-methylcytosine"
tagggagcctagcaggagattggagggagggaggaaatgggggttggggtagttatttcccggctcctccctgctggctgactaaaggtctcagtctccatggccagccttctccacgaggc

SEQ ID NO: 5357 - DNA, 122 bp, Homo sapiens
  misc_feature (61)..(62): /note="This region represents a CpG dinucleotide"
  misc_feature (61)..(61): /note="Nucleotide may be methylated to form 5-methylcytosine"
ggagggcatgcacctgacatagagaaatttacacccttggcgtaatcctggaggtaacggcgcttccagagtcacatagtccctaaagtgacactagagggcgcagtatggacatagctgtg

SEQ ID NO: 5358 - DNA, 122 bp, Homo sapiens
  misc_feature (61)..(62): /note="This region represents a CpG dinucleotide"
  misc_feature (61)..(61): /note="Nucleotide may be methylated to form 5-methylcytosine"
aaaaaaaaaaaaaaaaaaaaaaaaaaaagcttgccccaacatcggtatattccaaattcgcgcgtgcttccgaaggctcatattctcggccctttcagacgctcttaaaatttttctcctag

SEQ ID NO: 5359 - DNA, 122 bp, Homo sapiens
  misc_feature (61)..(62): /note="This region represents a CpG dinucleotide"
  misc_feature (61)..(61): /note="Nucleotide may be methylated to form 5-methylcytosine"
cccttaccagcctgggcaaggctggcacctgtggacagtgaatgggggctgggatggcagcggggaggttccatcgtagcccaaacatctgcaattcagagttggatattggggctgactgt

SEQ ID NO: 5360 - DNA, 122 bp, Homo sapiens
  misc_feature (61)..(62): /note="This region represents a CpG dinucleotide"
  misc_feature (61)..(61): /note="Nucleotide may be methylated to form 5-methylcytosine"
aattttctcaacagcatctgctttcttatcagagttctttctgaaacataaacttgacctcgtcatttccctacttgtatgatcaccatgggttgctcctgccttaagagtacactcctgcc

SEQ ID NO: 5361 - DNA, 122 bp, Homo sapiens
  misc_feature (61)..(62): /note="This region represents a CpG dinucleotide"
  misc_feature (61)..(61): /note="Nucleotide may be methylated to form 5-methylcytosine"
tgtgataccatgtgagacgggcgtattaatatgtattccataaactgcgcagctctgcaccgctctgttttgctctgaccgcagtaccagcctcaggcaccacaacacaatttggaaacaat

SEQ ID NO: 5362 - DNA, 122 bp, Homo sapiens
  misc_feature (61)..(62): /note="This region represents a CpG dinucleotide"
  misc_feature (61)..(61): /note="Nucleotide may be methylated to form 5-methylcytosine"
tgataaaaacagttacttcagctagtgccaaattctaggagtagctttggtctcccataacggccaccaaatattaattgcaaataaataacctaagtaaaagcagtgtgtttgttctgcat

SEQ ID NO: 5363 - DNA, 122 bp, Homo sapiens
  misc_feature (61)..(62): /note="This region represents a CpG dinucleotide"
  misc_feature (61)..(61): /note="Nucleotide may be methylated to form 5-methylcytosine"
ttgtgaccttttctccacttgagtcctcctaagaaaagcacaagagggccacaatttgatcgtcttggcctggattcagctgcaggagtgttcttatgcattctgacctcagcatgttggct

SEQ ID NO: 5364 - DNA, 122 bp, Homo sapiens
  misc_feature (61)..(62): /note="This region represents a CpG dinucleotide"
  misc_feature (61)..(61): /note="Nucleotide may be methylated to form 5-methylcytosine"
aggggccttccatccttgggttgtaggtcttccagctacaaccctgggctaatcttaggtcgttggccttgtgtcacaagtctcagttcttaggccttccatgtgtcctgtcccaggtctta

SEQ ID NO: 5365 - DNA, 122 bp, Homo sapiens
  misc_feature (61)..(62): /note="This region represents a CpG dinucleotide"
  misc_feature (61)..(61): /note="Nucleotide may be methylated to form 5-methylcytosine"
acccttttgtaggtaaccaccaggagcatggacatctctgggctcaggctgggcatcaggcgtcctgacagttcctttggtgatcctggggtgcagccggggtagggaacccagtgtctggc

SEQ ID NO: 5366 - DNA, 122 bp, Homo sapiens
  misc_feature (61)..(62): /note="This region represents a CpG dinucleotide"
  misc_feature (61)..(61): /note="Nucleotide may be methylated to form 5-methylcytosine"
aattgccaacaaagaaggcagagcttccctgtagtgcctggacagagcaagtgttcttagcgtgactcaaagggagataaagtgactatgactcagtaaacctgtaagaagcacaactacat

SEQ ID NO: 5367 - DNA, 122 bp, Homo sapiens
  misc_feature (61)..(62): /note="This region represents a CpG dinucleotide"
  misc_feature (61)..(61): /note="Nucleotide may be methylated to form 5-methylcytosine"
aaaaaaaaaaaaaaaaaaaaaaaaaaaatactgcctcctattggaggtgggtgcattaaccgagctctcgaagccctgtctgctctgggcttacaatctacatggagaaccaaatgcgctcc

SEQ ID NO: 5368 - DNA, 122 bp, Homo sapiens
  misc_feature (61)..(62): /note="This region represents a CpG dinucleotide"
  misc_feature (61)..(61): /note="Nucleotide may be methylated to form 5-methylcytosine"
gctgtctgtcatgcttgccatttttatgaaacactttattgcaggtcagctattattgcacgtgctacttcaagtcactggctcaggctggtgtcatgtgtggtttgctgcaaacggcagcc

SEQ ID NO: 5369 - DNA, 122 bp, Homo sapiens
  misc_feature (61)..(62): /note="This region represents a CpG dinucleotide"
  misc_feature (61)..(61): /note="Nucleotide may be methylated to form 5-methylcytosine"
atccatgccctgtacacacctggcaaacacttccagctctaaccactctcccacctgccccggtttcccaggcttaagcaggaggagtccccatcatccagcccaagcctcgcctttgacca

SEQ ID NO: 5370 - DNA, 122 bp, Homo sapiens
  misc_feature (61)..(62): /note="This region represents a CpG dinucleotide"
  misc_feature (61)..(61): /note="Nucleotide may be methylated to form 5-methylcytosine"
ctcagtgggcagagcctctgttttgttctcagctctttctcctctccacaggactcagcacgagtactgttggtctgactggtcccactcgatttgccctgaattgcattagctgggaacag

SEQ ID NO: 5371 - DNA, 122 bp, Homo sapiens
  misc_feature (61)..(62): /note="This region represents a CpG dinucleotide"
  misc_feature (61)..(61): /note="Nucleotide may be methylated to form 5-methylcytosine"
tctcctcttgaattttagtcctgcatgtgccaaatcacacaataaaatacacacataaaacgcaacagatgtccataaaatattcatttgttaaacaaatactttccatgcatgcaaagaga

SEQ ID NO: 5372 - DNA, 122 bp, Homo sapiens
  misc_feature (61)..(62): /note="This region represents a CpG dinucleotide"
  misc_feature (61)..(61): /note="Nucleotide may be methylated to form 5-methylcytosine"
ggcttttcccggcccgcgggcctgggcgctccgggggagggagctccaagggcagggtggcgggggagccgcagctcctccacgttatggaagaaaggggaatgctagccccctgcgcctcc

SEQ ID NO: 5373 - DNA, 122 bp, Homo sapiens
  misc_feature (61)..(62): /note="This region represents a CpG dinucleotide"
  misc_feature (61)..(61): /note="Nucleotide may be methylated to form 5-methylcytosine"
ggaggtgtgggtgcttggcagctgctagatgagattcatttcagagacgggatggagagacggccctgctgtgtgattgaagtcacagtgtgcttcttcctactgactgcaagcaatagctt

SEQ ID NO: 5374 - DNA, 122 bp, Homo sapiens
  misc_feature (61)..(62): /note="This region represents a CpG dinucleotide"
  misc_feature (61)..(61): /note="Nucleotide may be methylated to form 5-methylcytosine"
cagtactttagaatgccaggcaagaggaacacttgaggctgagtttgagactagcctggacgacatagggagaccccatctctaaaatatatatatatctcttttatttagcctagggccag

SEQ ID NO: 5375 - DNA, 122 bp, Homo sapiens
  misc_feature (61)..(62): /note="This region represents a CpG dinucleotide"
  misc_feature (61)..(61): /note="Nucleotide may be methylated to form 5-methylcytosine"
gaccatgtgtgggacaccttgagagactcccaccagccccctggagctggagtctgaagccgctatctgcggaggcccaccctgcccagtagatggaacaggggctgagcccatcatgtcac

SEQ ID NO: 5376 - DNA, 122 bp, Homo sapiens
  misc_feature (61)..(62): /note="This region represents a CpG dinucleotide"
  misc_feature (61)..(61): /note="Nucleotide may be methylated to form 5-methylcytosine"
tatttacacattgttagtgagcttaactggatcaacagttcaaagggcaatggtgagaagcgctggcttcctgtggccaggcaacagaaccacctggcatccttggctttagtactacaggt

SEQ ID NO: 5377 - DNA, 122 bp, Homo sapiens
  misc_feature (61)..(62): /note="This region represents a CpG dinucleotide"
  misc_feature (61)..(61): /note="Nucleotide may be methylated to form 5-methylcytosine"
ggggatgcgggccggcatgtgcaccactgcacccacatggcagctccagagcggagcacacgcaccctggggcccggccactccacacaggcacgcacccagcagaaaccaccccctgccaa

SEQ ID NO: 5378 - DNA, 122 bp, Homo sapiens
  misc_feature (61)..(62): /note="This region represents a CpG dinucleotide"
  misc_feature (61)..(61): /note="Nucleotide may be methylated to form 5-methylcytosine"
attttaagagagaaaatgtgtcctattagctataaataaaatcactctcctaactctctccggagagaatgagaaagaaaagctggagtcataaaagagtgttctttccctgtgactgtgga

SEQ ID NO: 5379 - DNA, 122 bp, Homo sapiens
  misc_feature (61)..(62): /note="This region represents a CpG dinucleotide"
  misc_feature (61)..(61): /note="Nucleotide may be methylated to form 5-methylcytosine"
tgcaggggggaggagcttggtctcatgttcggggtggaacttgggattctatctgggaggcgagaaaccagctagcgggactctctctcgctttgctgagagtccctgtttccctttttttc

SEQ ID NO: 5380 - DNA, 122 bp, Homo sapiens
  misc_feature (61)..(62): /note="This region represents a CpG dinucleotide"
  misc_feature (61)..(61): /note="Nucleotide may be methylated to form 5-methylcytosine"
taaagaaagagaaaaaccgcaaatcactatacatgatcaacatttgccattctactagcacgttgctacagctgcttccagctttgctggggtaaaacactgacacctgttattcagcgagg

SEQ ID NO: 5381 - DNA, 122 bp, Homo sapiens
  misc_feature (61)..(62): /note="This region represents a CpG dinucleotide"
  misc_feature (61)..(61): /note="Nucleotide may be methylated to form 5-methylcytosine"
gagcttgagtaagaagtcttgggtgtagggatacagggtgggaatacaggtcaaaggaaccggttcagttgtttcagttagtcaccgaggaagtgatgccacagcactgtatttttaggaaa

SEQ ID NO: 5382 - DNA, 122 bp, Homo sapiens
  misc_feature (61)..(62): /note="This region represents a CpG dinucleotide"
  misc_feature (61)..(61): /note="Nucleotide may be methylated to form 5-methylcytosine"
agaggttgctatgggaaggtcgcttgctccagggggccctggaacagttgctaagtttaacgccctggcccaggatccacctgtcctgctgcagaccagccctgctcattcctccctctggc

SEQ ID NO: 5383 - DNA, 122 bp, Homo sapiens
  misc_feature (61)..(62): /note="This region represents a CpG dinucleotide"
  misc_feature (61)..(61): /note="Nucleotide may be methylated to form 5-methylcytosine"
aggaggttgggtgacttttacaagttgttacacagctcagcaccactcatcctggtgtgacgctgatcctggtgtgcgatggctcaaagggagacatgttgggacgtgttatgtggcaccaa

SEQ ID NO: 5384 - DNA, 122 bp, Homo sapiens
  misc_feature (61)..(62): /note="This region represents a CpG dinucleotide"
  misc_feature (61)..(61): /note="Nucleotide may be methylated to form 5-methylcytosine"
atgtagttattgatttacaccttgtaaatttctcagtacacgatgtacaagtggccactccgtactgtctgttcttgtttattcagaccaatagtaagagtaatcatgagaatatgccaggc

SEQ ID NO: 5385 - DNA, 122 bp, Homo sapiens
  misc_feature (61)..(62): /note="This region represents a CpG dinucleotide"
  misc_feature (61)..(61): /note="Nucleotide may be methylated to form 5-methylcytosine"
ggccgggtgggcgccggcgggcagagcgccccctagggccatcccctcggggttcttgggcggaggctgaccgccggcttctcggcttcaccccccaggcccatctggcccgcggcggccgc

SEQ ID NO: 5386 - DNA, 122 bp, Homo sapiens
  misc_feature (61)..(62): /note="This region represents a CpG dinucleotide"
  misc_feature (61)..(61): /note="Nucleotide may be methylated to form 5-methylcytosine"
ctctattaattaaaacaaaaacaaaaacaaaaatgacagacatatgatctccgaaacaaacgaatcatgcaggtcaaccaggatgtggggagaactcaaaaaggtatataaacaataacaca

SEQ ID NO: 5387 - DNA, 122 bp, Homo sapiens
  misc_feature (61)..(62): /note="This region represents a CpG dinucleotide"
  misc_feature (61)..(61): /note="Nucleotide may be methylated to form 5-methylcytosine"
tgacaagagaaatgggcaagagacagagatttaattgaataaaaactccaggctgtgacacgggtgggaagacacaaacgagtaattaacaacataatattttaaatgacagtgcaattaat

SEQ ID NO: 5388 - DNA, 122 bp, Homo sapiens
  misc_feature (61)..(62): /note="This region represents a CpG dinucleotide"
  misc_feature (61)..(61): /note="Nucleotide may be methylated to form 5-methylcytosine"
tttggtttatcctggggtcaaacccagattctccctacaaggattacattagatagagatcgtcaaaaccagaaatgatcaacctgaaacacttcctggtcagcttttgctaaaagaagata

SEQ ID NO: 5389 - DNA, 122 bp, Homo sapiens
  misc_feature (61)..(62): /note="This region represents a CpG dinucleotide"
  misc_feature (61)..(61): /note="Nucleotide may be methylated to form 5-methylcytosine"
cctctcatttatcacatttcatctgactaaaaccaagagaattaaggtgacaattgaagacgtcaccaggggtattttggttttggtttgaatgctgtagactgaattgtctcccccaaaaa

SEQ ID NO: 5390 - DNA, 122 bp, Homo sapiens
  misc_feature (61)..(62): /note="This region represents a CpG dinucleotide"
  misc_feature (61)..(61): /note="Nucleotide may be methylated to form 5-methylcytosine"
ttttcttccttaagttcaggatagtgatataaaatcagctggctggctgcagcttcccctcgggtctgcaaggtggaacacttatcaaggctcaataaggtaccatcacaacaaactgcaat

SEQ ID NO: 5391 - DNA, 122 bp, Homo sapiens
  misc_feature (61)..(62): /note="This region represents a CpG dinucleotide"
  misc_feature (61)..(61): /note="Nucleotide may be methylated to form 5-methylcytosine"
ttgggtgttctgttatctgttatctgttctgtcactgttctgttatctgactatcactcacgtgcaagctccaagggagacttgaatgaaagttcttaaaaacagaagtaaagcacagtagg

SEQ ID NO: 5392 - DNA, 122 bp, Homo sapiens
  misc_feature (61)..(62): /note="This region represents a CpG dinucleotide"
  misc_feature (61)..(61): /note="Nucleotide may be methylated to form 5-methylcytosine"
ctgagaaccactgctttccctgcattgctgggtagtgagtgattaaagtgccattgcaggcgtgggtgccgagatagcagggcaccggacatgtctaagccagccatcaggaatgcacttcc

SEQ ID NO: 5393 - DNA, 122 bp, Homo sapiens
  misc_feature (61)..(62): /note="This region represents a CpG dinucleotide"
  misc_feature (61)..(61): /note="Nucleotide may be methylated to form 5-methylcytosine"
ctccaggaagaagcatttcatgactcatatttttaacatgactaatgttacctagaaccacgtatcctccttctgttgaaaagtaagttcctgtttccatggggccttcaaagcaaggggtc

SEQ ID NO: 5394 - DNA, 122 bp, Homo sapiens
  misc_feature (61)..(62): /note="This region represents a CpG dinucleotide"
  misc_feature (61)..(61): /note="Nucleotide may be methylated to form 5-methylcytosine"
atatcgctgtgagccgcagtgacacacattcatttccgctggaggcagccctagggagtccggcggccctgcagctgtatttcatctctttgaactgtatggcctcccctataattcaggaa

SEQ ID NO: 5395 - DNA, 122 bp, Homo sapiens
  misc_feature (61)..(62): /note="This region represents a CpG dinucleotide"
  misc_feature (61)..(61): /note="Nucleotide may be methylated to form 5-methylcytosine"
ctctctacttctagagcaatggttttaaacttggggcgattttgccccccagggaacattcgaccatgtctggagacatttttggttttcccaacgaggaggttgctactggcgtctcatga

SEQ ID NO: 5396 - DNA, 122 bp, Homo sapiens
  misc_feature (61)..(62): /note="This region represents a CpG dinucleotide"
  misc_feature (61)..(61): /note="Nucleotide may be methylated to form 5-methylcytosine"
ctaacattgttctaacattgttcattccttctaacattcccttccgctttgaggttgatacgaagatctatgatttaacgtttgtcaaatactctaggcttctcagatgaaagacaacatta

SEQ ID NO: 5397 - DNA, 122 bp, Homo sapiens
  misc_feature (61)..(62): /note="This region represents a CpG dinucleotide"
  misc_feature (61)..(61): /note="Nucleotide may be methylated to form 5-methylcytosine"
cagattatttggaatcacttggtgttgcaatgtcatgattaacttcaaacaagatgtgtgcgaaggagacacactctgccatgtaaacagtggttttctccaattcatttctttcctatttg

SEQ ID NO: 5398 - DNA, 122 bp, Homo sapiens
  misc_feature (61)..(62): /note="This region represents a CpG dinucleotide"
  misc_feature (61)..(61): /note="Nucleotide may be methylated to form 5-methylcytosine"
agatgatcccagaaagcaccattaggggattgagggaatgagacagagaagagaagcctgcggaaacaggaagtattatccagcaagttactactgtggacaactggagcacaatcccatca

SEQ ID NO: 5399 - DNA, 122 bp, Homo sapiens
  misc_feature (61)..(62): /note="This region represents a CpG dinucleotide"
  misc_feature (61)..(61): /note="Nucleotide may be methylated to form 5-methylcytosine"
tgctgggattacaggcatgagccaccgcgcccggctcattccaacttttaaaaaaagatacgtgacagttttgagcaaaattaatgacagtgtatttggggaattatgacatatattaaagt

SEQ ID NO: 5400 - DNA, 122 bp, Homo sapiens
  misc_feature (61)..(62): /note="This region represents a CpG dinucleotide"
  misc_feature (61)..(61): /note="Nucleotide may be methylated to form 5-methylcytosine"
gttttgttttagcttgctaagtacagaattggaggatacgatgggataaacaactgaatacgtgacaacagtttgttgactcagacagaaagccatcagatggcaagggttgaccgttgaag

SEQ ID NO: 5401 - DNA, 122 bp, Homo sapiens
  misc_feature (61)..(62): /note="This region represents a CpG dinucleotide"
  misc_feature (61)..(61): /note="Nucleotide may be methylated to form 5-methylcytosine"
cctgggcacatatctgttgactctggattctgccaaaaagagtctgccattccagcaatgcgtttacaatgatcaaaccttgctggaaggaaacgttcataaattgagaaactgcctgaatt

SEQ ID NO: 5402 - DNA, 122 bp, Homo sapiens
  misc_feature (61)..(62): /note="This region represents a CpG dinucleotide"
  misc_feature (61)..(61): /note="Nucleotide may be methylated to form 5-methylcytosine"
aggcagggagcggaaccgtcttcaggaaatttcgggagttccggggtcaggtccactccccggctgttgttgtgttgttggcagggcagagggtctaggatgccagcctgctccgggctgcg

SEQ ID NO: 5403 - DNA, 122 bp, Homo sapiens
  misc_feature (61)..(62): /note="This region represents a CpG dinucleotide"
  misc_feature (61)..(61): /note="Nucleotide may be methylated to form 5-methylcytosine"
ctacacactgtattttctttaagtcattcttcctactaacttattcatctcacaacatcacgagatcatttctattactgtacttatttcgcagatgaggggcctgatgtaccaagaggtta

SEQ ID NO: 5404 - DNA, 122 bp, Homo sapiens
  misc_feature (61)..(62): /note="This region represents a CpG dinucleotide"
  misc_feature (61)..(61): /note="Nucleotide may be methylated to form 5-methylcytosine"
agcagcggctccttcctgtggcttgcagctgaaccctgtgctgtgcccagtgaggcctcccgggatacgtgctaggaatattagccattcttcatatccactgctatgctgtggctttggtt

SEQ ID NO: 5405 - DNA, 122 bp, Homo sapiens
  misc_feature (61)..(62): /note="This region represents a CpG dinucleotide"
  misc_feature (61)..(61): /note="Nucleotide may be methylated to form 5-methylcytosine"
ttctaagctgtgggaagccaccaggggattttatgcggaggagtgacttccctctggctgcgtgtgggaaataggctgtggggactgaaggaagtgggaggccggggaggaggcacctgcag

SEQ ID NO: 5406 - DNA, 122 bp, Homo sapiens
  misc_feature (61)..(62): /note="This region represents a CpG dinucleotide"
  misc_feature (61)..(61): /note="Nucleotide may be methylated to form 5-methylcytosine"
tgttaaagcatgggttctcaactaagggtgactttgtttcttaagggacatttggcaatgcgtggaggcattttgtgtgtcacaactagggagaattactgacatctagtgggtagaggtca

SEQ ID NO: 5407 - DNA, 122 bp, Homo sapiens
  misc_feature (61)..(62): /note="This region represents a CpG dinucleotide"
  misc_feature (61)..(61): /note="Nucleotide may be methylated to form 5-methylcytosine"
tattgcaacccagccagttgtgcatgtgcttgggtgagtgttgacatgccagtcccctgtcgccttggccccctctggacattgggcaccaatgagcatgggagggaagctgagggtaagct

SEQ ID NO: 5408 - DNA, 122 bp, Homo sapiens
  misc_feature (61)..(62): /note="This region represents a CpG dinucleotide"
  misc_feature (61)..(61): /note="Nucleotide may be methylated to form 5-methylcytosine"
atccaggatggactgtaattcagggtaggacttttatggcttcctcatagcctcagaacacgttggtaggcacatcaataaatttacttttttttttttttttttgctgggggtagggtgga

SEQ ID NO: 5409 - DNA, 122 bp, Homo sapiens
  misc_feature (61)..(62): /note="This region represents a CpG dinucleotide"
  misc_feature (61)..(61): /note="Nucleotide may be methylated to form 5-methylcytosine"
gccggccacgcggctgcgcttcaccaagtgcttcagtttcgccagcgtggaggccgagaacgcgtacctgtgccagcgcgcgcgcttcttcgcagagaacgagggcctagacgactacatgg

SEQ ID NO: 5410 - DNA, 122 bp, Homo sapiens
  misc_feature (61)..(62): /note="This region represents a CpG dinucleotide"
  misc_feature (61)..(61): /note="Nucleotide may be methylated to form 5-methylcytosine"
tcaagaaagttgttttgagatccctaagaccaaaagacttagtgaaagttgttttgagatcgagtgtgctgcttgcgaaaatagctcctcaaggtgtcactcttgagtcagttcttctcaca

SEQ ID NO: 5411 - DNA, 122 bp, Homo sapiens
  misc_feature (61)..(62): /note="This region represents a CpG dinucleotide"
  misc_feature (61)..(61): /note="Nucleotide may be methylated to form 5-methylcytosine"
ttaccctgtgcctttgtttacccatttctggcctcctagatgttgtcttcttcctcctttcgctgtgttgaaactccatccttcaagattcagctccaccctcaccttccctgtgaagcctc

SEQ ID NO: 5412 - DNA, 122 bp, Homo sapiens
  misc_feature (61)..(62): /note="This region represents a CpG dinucleotide"
  misc_feature (61)..(61): /note="Nucleotide may be methylated to form 5-methylcytosine"
ctgtgcccacctgcggagggggtggcagggggtcagtgcgcaactgcagagggtgcggtccgggggtcagtgctcacctgggagggggcagtcgggggccagtgcgcacctggggagggggc

SEQ ID NO: 5413 - DNA, 122 bp, Homo sapiens
  misc_feature (61)..(62): /note="This region represents a CpG dinucleotide"
  misc_feature (61)..(61): /note="Nucleotide may be methylated to form 5-methylcytosine"
cacccgccctctgaatttgtctcctcccctaggatctgtcgctgacctgagttctgcccccgccctctgagttctctccccaccgttggagttgtgtccccttctcctaggatctgtccctg

SEQ ID NO: 5414 - DNA, 122 bp, Homo sapiens
  misc_feature (61)..(62): /note="This region represents a CpG dinucleotide"
  misc_feature (61)..(61): /note="Nucleotide may be methylated to form 5-methylcytosine"
tgaggagtgaggaggcagaaaggaccgagaacaaggggacccggttccatttctggaccccgtccgcaggctgctcgcccgacttggggtcgctctgccccggacgatcaggacagctgcgt

SEQ ID NO: 5415 - DNA, 122 bp, Homo sapiens
  misc_feature (61)..(62): /note="This region represents a CpG dinucleotide"
  misc_feature (61)..(61): /note="Nucleotide may be methylated to form 5-methylcytosine"
gaacgctgctgtcatcactgcacgtggacacatcatcaacctctcagcgtgacgtgccctcgtgctttcaggtaaaacactacagagaaacttcctgttggcaggtggaccccgcactccct

SEQ ID NO: 5416 - DNA, 122 bp, Homo sapiens
  misc_feature (61)..(62): /note="This region represents a CpG dinucleotide"
  misc_feature (61)..(61): /note="Nucleotide may be methylated to form 5-methylcytosine"
gtctcagtccttcttggtcaagagctgcagcaagaggttggttcatttctgttgccccaacgagcctagaaaagcccccagcacttggcaggtgctcagtcaatgcttgcagcgttgagtta

SEQ ID NO: 5417 - DNA, 122 bp, Homo sapiens
  misc_feature (61)..(62): /note="This region represents a CpG dinucleotide"
  misc_feature (61)..(61): /note="Nucleotide may be methylated to form 5-methylcytosine"
agtcccgggcccagggaggacctggaacattcccttcctccccccccccccccccgcccccgcccatcagcccagcctgcaaggaggcgccaccggacctgcacactcaggagcaggtgagc

SEQ ID NO: 5418 - DNA, 122 bp, Homo sapiens
  misc_feature (61)..(62): /note="This region represents a CpG dinucleotide"
  misc_feature (61)..(61): /note="Nucleotide may be methylated to form 5-methylcytosine"
catggaaagaaatccttccttcagaggatgtgtccactgaaaacctgtctgagtctgatacggaagaggcaaacctagaggaaaggaaaagagaagataactatcaggatcccttgactggc

SEQ ID NO: 5419 - DNA, 122 bp, Homo sapiens
  misc_feature (61)..(62): /note="This region represents a CpG dinucleotide"
  misc_feature (61)..(61): /note="Nucleotide may be methylated to form 5-methylcytosine"
cactttgggctcttctctttcttcatttcctaattagtcaccaatattgatccagatcctcgtccctacagattgtacattctcaggtaggactaataaccttttatattccccaaagtagc

SEQ ID NO: 5420 - DNA, 122 bp, Homo sapiens
  misc_feature (61)..(62): /note="This region represents a CpG dinucleotide"
  misc_feature (61)..(61): /note="Nucleotide may be methylated to form 5-methylcytosine"
ccgtggggtcttctgcaaggggctgactcgcaagctgctgtcttcttcgatctggcctggcggctgcgcatcaacttcccctacctctacatggtggcttccatgatgctcaacgtccgcct

SEQ ID NO: 5421 - DNA, 122 bp, Homo sapiens
  misc_feature (61)..(62): /note="This region represents a CpG dinucleotide"
  misc_feature (61)..(61): /note="Nucleotide may be methylated to form 5-methylcytosine"
gggcctacctgtgcgtctgcccagagagcttcttcggctaccactgcgagacaggtagggcggcaggcctgcctgctccccgccctctgcccgcctgctccccgccctctgcccgcctgctg

SEQ ID NO: 5422 - DNA, 122 bp, Homo sapiens
  misc_feature (61)..(62): /note="This region represents a CpG dinucleotide"
  misc_feature (61)..(61): /note="Nucleotide may be methylated to form 5-methylcytosine"
tctgtatcacacacacacacacacacacacacacacacacaaaatccttggctgctagagcgtgcattctagtgcggaagagacaagacaataaacttgggctgtcagctggaactaagcgt

SEQ ID NO: 5423 - DNA, 122 bp, Homo sapiens
  misc_feature (61)..(62): /note="This region represents a CpG dinucleotide"
  misc_feature (61)..(61): /note="Nucleotide may be methylated to form 5-methylcytosine"
aggaggggcaatagctaaacaaatacctgcattagtcaaggagcactcagaaacagggctcgacctgctgggagaggattttgctaaggaaagcctgtactcacagaagaaggaagcaaaac

SEQ ID NO: 5424 - DNA, 122 bp, Homo sapiens
  misc_feature (61)..(62): /note="This region represents a CpG dinucleotide"
  misc_feature (61)..(61): /note="Nucleotide may be methylated to form 5-methylcytosine"
cattagttttaaacagcatgccattctgagtagtgtgatgaaatctctcttgccgtcctgcgtatgtcatgaatcatctctttgctcggtgtctccacactgagtctgctacatgcccttta

SEQ ID NO: 5425 - DNA, 122 bp, Homo sapiens
  misc_feature (61)..(62): /note="This region represents a CpG dinucleotide"
  misc_feature (61)..(61): /note="Nucleotide may be methylated to form 5-methylcytosine"
ctcataaacagtgtttttctccttttctggtgcccttgttttcacagaaacacagctgcacggcactgacagagaactcgcagagtaaaaaggaacccacaataaacgagctgctttgcgcc

SEQ ID NO: 5426 - DNA, 122 bp, Homo sapiens
  misc_feature (61)..(62): /note="This region represents a CpG dinucleotide"
  misc_feature (61)..(61): /note="Nucleotide may be methylated to form 5-methylcytosine"
atttgttcctagtaactacgttttggaaagcagctgtggactctcaaggacaggcaggaacgaagacctccttagggtccgagtgtcgcttcccacagttagattacccatgaatttccttg

SEQ ID NO: 5427 - DNA, 122 bp, Homo sapiens
  misc_feature (61)..(62): /note="This region represents a CpG dinucleotide"
  misc_feature (61)..(61): /note="Nucleotide may be methylated to form 5-methylcytosine"
agtaatcatttttgtgactctgcttcatttccttgctctaagttgagacattttttcccccgtagctgttttcttctgagtatgaaagatgacagcattgaaggcatttatgacactctaaa

SEQ ID NO: 5428 - DNA, 122 bp, Homo sapiens
  misc_feature (61)..(62): /note="This region represents a CpG dinucleotide"
  misc_feature (61)..(61): /note="Nucleotide may be methylated to form 5-methylcytosine"
agctggattctgtcaccttggagctcttgtgtcactgacctagctgatgatttatcctctcgccagagtcagagaacttttgttgctcatgattagtttgccctgagacaaagggaaattac

SEQ ID NO: 5429 - DNA, 122 bp, Homo sapiens
  misc_feature (61)..(62): /note="This region represents a CpG dinucleotide"
  misc_feature (61)..(61): /note="Nucleotide may be methylated to form 5-methylcytosine"
ccgccaatatttgtatttttagtagagatggggatgtcaccatgttgaccaggctggtctcgaactcatgacctgaatgatccacctgccacggcctttcagagtgttgggattacaggcat

SEQ ID NO: 5430 - DNA, 122 bp, Homo sapiens
  misc_feature (61)..(62): /note="This region represents a CpG dinucleotide"
  misc_feature (61)..(61): /note="Nucleotide may be methylated to form 5-methylcytosine"
aggagggagaaagcaaacagatgtgggggttttgatgaactcaagaaggtgggtagtgtacgagccattaaataataggtaaaataggagtaagtagcagctagaacaggtgtttctggaag

SEQ ID NO: 5431 - DNA, 122 bp, Homo sapiens
  misc_feature (61)..(62): /note="This region represents a CpG dinucleotide"
  misc_feature (61)..(61): /note="Nucleotide may be methylated to form 5-methylcytosine"
ccgggttcaattcccggccaatgcagcaggtacttcttcatttcattatggccttttacccgtcttttacgctgcaaaattatactgcataacctaatagtgcatttaggggcttggccacc

SEQ ID NO: 5432 - DNA, 122 bp, Homo sapiens
  misc_feature (61)..(62): /note="This region represents a CpG dinucleotide"
  misc_feature (61)..(61): /note="Nucleotide may be methylated to form 5-methylcytosine"
taaacctgcacattcaacaggttgttgctgatcacttaaaatagcagagtcccaagtcctcgtgagtcatggaccatgtcatgtagggagtgagacatttgttcagcattattgtgaaatat

SEQ ID NO: 5433 - DNA, 122 bp, Homo sapiens
  misc_feature (61)..(62): /note="This region represents a CpG dinucleotide"
  misc_feature (61)..(61): /note="Nucleotide may be methylated to form 5-methylcytosine"
ccacctcacagatcaggcaagcattgacatactctcaagggaaggtacttttaagtaccacgagtctctgccaatgtctccatgccactgatcctgttggggtagagaagacaaatcaatca

SEQ ID NO: 5434 - DNA, 122 bp, Homo sapiens
  misc_feature (61)..(62): /note="This region represents a CpG dinucleotide"
  misc_feature (61)..(61): /note="Nucleotide may be methylated to form 5-methylcytosine"
agctgtcaggaagcacaagctgtgaggagatcctggaggcaaggccacacccatctccaacgccactgcctaggaagtggtcagcctgggctcaaacacagcaactgggagccatctggcag

SEQ ID NO: 5435 - DNA, 122 bp, Homo sapiens
  misc_feature (61)..(62): /note="This region represents a CpG dinucleotide"
  misc_feature (61)..(61): /note="Nucleotide may be methylated to form 5-methylcytosine"
aatctgcattttaagatgatcaccatgtgagtcatatgcccattgggagttgggattggccgaagattctcagtgagaccaggaagttcctgcccctcttgctctggatagtctaacttctc

SEQ ID NO: 5436 - DNA, 122 bp, Homo sapiens
  misc_feature (61)..(62): /note="This region represents a CpG dinucleotide"
  misc_feature (61)..(61): /note="Nucleotide may be methylated to form 5-methylcytosine"
tttatctgagattagttgaatccacgggtatgaaacttacgaatatgaacaacgaacaaccgtgatgcaaatgagaaaatgagacaacagtcctcatggcatttttgttaaacaagccgtgc

SEQ ID NO: 5437 - DNA, 122 bp, Homo sapiens
  misc_feature (61)..(62): /note="This region represents a CpG dinucleotide"
  misc_feature (61)..(61): /note="Nucleotide may be methylated to form 5-methylcytosine"
gcattgggtaattactatttattagcattacatacaatttagaccagtttcaggaaacaccgtataaattctttcccttgaatctgaccttaaccacaaagtctaatgatctaaccagagca

SEQ ID NO: 5438 - DNA, 122 bp, Homo sapiens
  misc_feature (61)..(62): /note="This region represents a CpG dinucleotide"
  misc_feature (61)..(61): /note="Nucleotide may be methylated to form 5-methylcytosine"
gcgcgcgcggttggcatcctccaggtggcgctgcagctcctcctgccgctcccggtcggccgcctcctgcctgcacagccgcttgttctccagctgaagccgcaggagcgtctccctgcaga

SEQ ID NO: 5439 - DNA, 122 bp, Homo sapiens
  misc_feature (61)..(62): /note="This region represents a CpG dinucleotide"
  misc_feature (61)..(61): /note="Nucleotide may be methylated to form 5-methylcytosine"
ggaagtggttaggtgtggagctaatatttactctttttccgcccgtaattttctttcttccgttctccttccgcaaggaacgtcttggggcttctcgaacatctctcagcatttactgtacg

SEQ ID NO: 5440 - DNA, 122 bp, Homo sapiens
  misc_feature (61)..(62): /note="This region represents a CpG dinucleotide"
  misc_feature (61)..(61): /note="Nucleotide may be methylated to form 5-methylcytosine"
aggcttcaagagagagaaataaaatttacctgattacgttgtctgatgttaacagcactacgtggggatccaggatttcacttggataccatgcagcatgctttagagtcagagaggtggaa

SEQ ID NO: 5441 - DNA, 122 bp, Homo sapiens
  misc_feature (61)..(62): /note="This region represents a CpG dinucleotide"
  misc_feature (61)..(61): /note="Nucleotide may be methylated to form 5-methylcytosine"
ccttctcccgtctttttctactctaaggtgctcttccaagctactttcctcctcagctatcgttcccctggatttccagtaagagagggtgaaatcatgcctgcttatcttctttctctttt

SEQ ID NO: 5442 - DNA, 122 bp, Homo sapiens
  misc_feature (61)..(62): /note="This region represents a CpG dinucleotide"
  misc_feature (61)..(61): /note="Nucleotide may be methylated to form 5-methylcytosine"
agagatctctactcactaccatgatagaatttcatatatcctatttcttcatttctttctcgttttctcctgacctttttcttgttcttcattcttattttgctcctccttttttcccctta

SEQ ID NO: 5443 - DNA, 122 bp, Homo sapiens
  misc_feature (61)..(62): /note="This region represents a CpG dinucleotide"
  misc_feature (61)..(61): /note="Nucleotide may be methylated to form 5-methylcytosine"
gaaaggtggatgcctggattcagggaaacctgcagctgaagaaaaatgctttgcttgccgcggctgttgagaacaatgataagaaaaacaccctctgttgtaagcactgtgtaggcttgggc

SEQ ID NO: 5444 - DNA, 122 bp, Homo sapiens
  misc_feature (61)..(62): /note="This region represents a CpG dinucleotide"
  misc_feature (61)..(61): /note="Nucleotide may be methylated to form 5-methylcytosine"
ggaaagagtccccaggccgtggggacgagagcaacaggcagggggcgaggcttacattgtcgttctgaaaggagtggaggaagttccctcctagctcgccgtcatctcgaggggtgcctgga

SEQ ID NO: 5445 - DNA, 122 bp, Homo sapiens
  misc_feature (61)..(62): /note="This region represents a CpG dinucleotide"
  misc_feature (61)..(61): /note="Nucleotide may be methylated to form 5-methylcytosine"
atgatagtgacatgggacatcagcttcatagctttatcttgtcatctttgtgtgacaatgcgattgagcagagacagagaaggcaaaagtatgaaactggtattattcatctgttagacttg

SEQ ID NO: 5446 - DNA, 122 bp, Homo sapiens
  misc_feature (61)..(62): /note="This region represents a CpG dinucleotide"
  misc_feature (61)..(61): /note="Nucleotide may be methylated to form 5-methylcytosine"
acaatgtacagtccctaccatcagcataatgtgctgtggataaatgcattggaactatttcggttgcaagtaaagcagtgtgtaaatgattggccttttaaataaggaaatgcaactgcttt

SEQ ID NO: 5447 - DNA, 122 bp, Homo sapiens
  misc_feature (61)..(62): /note="This region represents a CpG dinucleotide"
  misc_feature (61)..(61): /note="Nucleotide may be methylated to form 5-methylcytosine"
ccttcactgacctcaatcgttgatttcggctgcacttcctatccctgggggagctttcaacgctccgccgtccaggccgccgggccccgcagcccgcgccccgctctctagggctgggcccc

SEQ ID NO: 5448 - DNA, 122 bp, Homo sapiens
  misc_feature (61)..(62): /note="This region represents a CpG dinucleotide"
  misc_feature (61)..(61): /note="Nucleotide may be methylated to form 5-methylcytosine"
ttaaaatgaaatcatcctggattatctgggtgggcccaatataatcataagggtcctttacgtgtggaagagggaggcagtgttcagattcaaagatctgaagatgttacactgctgccttt

SEQ ID NO: 5449 - DNA, 122 bp, Homo sapiens
  misc_feature (61)..(62): /note="This region represents a CpG dinucleotide"
  misc_feature (61)..(61): /note="Nucleotide may be methylated to form 5-methylcytosine"
ccactacactcaatagaatagggattaagcaggactctgtaggctggtcagcaactttcacggcagcctaatgctaaagttctgccttacaagggtgttctggactgcacagtaaatggctg

SEQ ID NO: 5450 - DNA, 122 bp, Homo sapiens
  misc_feature (61)..(62): /note="This region represents a CpG dinucleotide"
  misc_feature (61)..(61): /note="Nucleotide may be methylated to form 5-methylcytosine"
ggcacttcacacccagctgcaaggtgctgtacttgtcccacagctctaggaaaaagagaacgatatggagcaacagttcacatccaacagggcagtctgctcgcctctgttccagtggaggg

SEQ ID NO: 5451 - DNA, 122 bp, Homo sapiens
  misc_feature (61)..(62): /note="This region represents a CpG dinucleotide"
  misc_feature (61)..(61): /note="Nucleotide may be methylated to form 5-methylcytosine"
cccaccacacacctggtcttctgtccccggccccaattttcctctttgcctggtcctgaccgcagccccaacctgctgtgacccctcatcagggcgagtgtttcctggatgtcagctgtttc

SEQ ID NO: 5452 - DNA, 122 bp, Homo sapiens
  misc_feature (61)..(62): /note="This region represents a CpG dinucleotide"
  misc_feature (61)..(61): /note="Nucleotide may be methylated to form 5-methylcytosine"
gaagtattttaagtggataatgagtagtctcttctctcaatgaatacgttcaaataacatcgactgcctgtaatatgcaaagttcctagtcaaggctgccttaggaattcctgccccttaac

SEQ ID NO: 5453 - DNA, 122 bp, Homo sapiens
  misc_feature (61)..(62): /note="This region represents a CpG dinucleotide"
  misc_feature (61)..(61): /note="Nucleotide may be methylated to form 5-methylcytosine"
ccgcctggggagaccgggctctggaggcttttggcttcccgctttcttcaggctttctctcgctcgttggcgcaattcccaaccgctccctgactctggctccctcatttctgcccggacct

SEQ ID NO: 5454 - DNA, 122 bp, Homo sapiens
  misc_feature (61)..(62): /note="This region represents a CpG dinucleotide"
  misc_feature (61)..(61): /note="Nucleotide may be methylated to form 5-methylcytosine"
tggtcacattaaaagggactgtagttgcagtctaagacaggaaactgttgcatggcatttcggtacaaaactcactacagaggccctgggagccttgaagggaaaaaccccagattagtcat

SEQ ID NO: 5455 - DNA, 122 bp, Homo sapiens
  misc_feature (61)..(62): /note="This region represents a CpG dinucleotide"
  misc_feature (61)..(61): /note="Nucleotide may be methylated to form 5-methylcytosine"
tatgatgggaagaattgagtcctgtctagaggtttccttgacatgcacttcccaccttttcgaggctgagatacctggttcttagataggctatcttcattcaggaaacaaacgtgactccc

SEQ ID NO: 5456 - DNA, 122 bp, Homo sapiens
  misc_feature (61)..(62): /note="This region represents a CpG dinucleotide"
  misc_feature (61)..(61): /note="Nucleotide may be methylated to form 5-methylcytosine"
aggctgaggtgggaggatcgctttagctcaggaggtcgaggctgcagcgacctctgatggcgccaccgctctccagcccgggagagagctcaacaacaacaacaacaaacaaacaaacaaaa

SEQ ID NO: 5457 - DNA, 122 bp, Homo sapiens
  misc_feature (61)..(62): /note="This region represents a CpG dinucleotide"
  misc_feature (61)..(61): /note="Nucleotide may be methylated to form 5-methylcytosine"
cttgcagccacagccagcagctgtgaagaccggggccagaggaagctgaagtgtggtgagcgggttgctatggcagttatcagcactttcaaatatcacagggtggaaattgcttcgctcag

SEQ ID NO: 5458 - DNA, 122 bp, Homo sapiens
  misc_feature (61)..(62): /note="This region represents a CpG dinucleotide"
  misc_feature (61)..(61): /note="Nucleotide may be methylated to form 5-methylcytosine"
caatcacctaaaagatgtgactctcctcacttgcctggactctgctcagaatagagatttcgacacatcagtgggttcaacacctaggtgatgcggctcttccttcttttctgggctcttcc

SEQ ID NO: 5459 - DNA, 122 bp, Homo sapiens
  misc_feature (61)..(62): /note="This region represents a CpG dinucleotide"
  misc_feature (61)..(61): /note="Nucleotide may be methylated to form 5-methylcytosine"
atcaatttcatggttgtcagcaatgcctaatccatcttccatagtctggaaccactcaggcggcagactcccttgaggtgggagtgctccttgtactcacttgtgttcctgccatcctcggg

SEQ ID NO: 5460 - DNA, 122 bp, Homo sapiens
  misc_feature (61)..(62): /note="This region represents a CpG dinucleotide"
  misc_feature (61)..(61): /note="Nucleotide may be methylated to form 5-methylcytosine"
ttcagcaaaaaaatcctccaaatgattcaaacaggactgtatactcttcctctctctccacgggtgtatatgtgtgtatacatatagatattatactagcaatttagaaaatttcctgagcc

SEQ ID NO: 5461 - DNA, 122 bp, Homo sapiens
  misc_feature (61)..(62): /note="This region represents a CpG dinucleotide"
  misc_feature (61)..(61): /note="Nucleotide may be methylated to form 5-methylcytosine"
ctccagggtttatgtgttaaatttcagctatgtcgtgtactcacagcttagtgcttcagacggttatggggaactaggaattcttaaaggggtaggacaggatgtccttttctatcgctcaa

SEQ ID NO: 5462 - DNA, 122 bp, Homo sapiens
  misc_feature (61)..(62): /note="This region represents a CpG dinucleotide"
  misc_feature (61)..(61): /note="Nucleotide may be methylated to form 5-methylcytosine"
gatcatatccaccccaacccccttcagactggttcctgagttgccatttcgggggctgggcgccaggccagtcaggaacaatggccaatggaacttgagctgccaactgcaacaccagcacc

SEQ ID NO: 5463 - DNA, 122 bp, Homo sapiens
  misc_feature (61)..(62): /note="This region represents a CpG dinucleotide"
  misc_feature (61)..(61): /note="Nucleotide may be methylated to form 5-methylcytosine"
acccccgaggcccccaagacctgtccttgaccccagtgagcaggttgagtctaggagctgcgtgggccctgctctcttggtgacccctgctctgccccacttactgttgtggggtgggctca

SEQ ID NO: 5464 - DNA, 122 bp, Homo sapiens
  misc_feature (61)..(62): /note="This region represents a CpG dinucleotide"
  misc_feature (61)..(61): /note="Nucleotide may be methylated to form 5-methylcytosine"
aggccaacacctggaagatttttgttccacaaaatgtaaaatgcctcatccaggcagcatcgccatcagctggaggcttgttaaaaatacacagtctcaggccccatgtagacctgctgagt

SEQ ID NO: 5465 - DNA, 122 bp, Homo sapiens
  misc_feature (61)..(62): /note="This region represents a CpG dinucleotide"
  misc_feature (61)..(61): /note="Nucleotide may be methylated to form 5-methylcytosine"
attttattccaagctaaagtggaatttcaagataatcacttctgctctggtcttaccttacgtgccccactgcaatttcaggtctcgagtcagagaacagactatttcctcttccccttaat

SEQ ID NO: 5466 - DNA, 122 bp, Homo sapiens
  misc_feature (61)..(62): /note="This region represents a CpG dinucleotide"
  misc_feature (61)..(61): /note="Nucleotide may be methylated to form 5-methylcytosine"
ggcaagctagtgtatgcagaagaggattttgcacaagaatgttcattaaaacattactgacgttgaaaattgcgaaacaacctaaatgtacagcaatcaggaaattactaaattaactaagg

SEQ ID NO: 5467 - DNA, 122 bp, Homo sapiens
  misc_feature (61)..(62): /note="This region represents a CpG dinucleotide"
  misc_feature (61)..(61): /note="Nucleotide may be methylated to form 5-methylcytosine"
tgtctctccatcttcaacaatatttacggctttatttgttccttaaaagaagaagtaactcgactatagagttatgttctgctttgcttggcacaaaataaatgtaacctggaggctccaag

SEQ ID NO: 5468 - DNA, 122 bp, Homo sapiens
  misc_feature (61)..(62): /note="This region represents a CpG dinucleotide"
  misc_feature (61)..(61): /note="Nucleotide may be methylated to form 5-methylcytosine"
tttttggcagttcaagttttcctacattgtcatagtatgtaacattctgtcatcctcattcgcacctttatttttcctattcctagccttatttttgtttgttttagatctggagttaaaaa

SEQ ID NO: 5469 - DNA, 122 bp, Homo sapiens
  misc_feature (61)..(62): /note="This region represents a CpG dinucleotide"
  misc_feature (61)..(61): /note="Nucleotide may be methylated to form 5-methylcytosine"
ggaaacccgtcaccccctcgccgggggaaaaaggagggactgagcatgagccccggactccgagtgggattctcccaggatcctcccgcggccctgaacatccaggagacccgggagactgg

SEQ ID NO: 5470 - DNA, 122 bp, Homo sapiens
  misc_feature (61)..(62): /note="This region represents a CpG dinucleotide"
  misc_feature (61)..(61): /note="Nucleotide may be methylated to form 5-methylcytosine"
aattggcaagactttggtgtgtacaagaattaaaattctggaagttaaaaaccacctgtacggctaagtggctttccaaatgcttgtaacaagtgtaaactcatcagaaaactatgaaaaca

SEQ ID NO: 5471 - DNA, 122 bp, Homo sapiens
  misc_feature (61)..(62): /note="This region represents a CpG dinucleotide"
  misc_feature (61)..(61): /note="Nucleotide may be methylated to form 5-methylcytosine"
cttatgtgatgtccttaaactaaatgtttctcgaaacccctggctctagtttttcagtcacggcctctttctagcttcagtgccccaccctaccattcaatcaaaagccgccatcccgttct

SEQ ID NO: 5472 - DNA, 122 bp, Homo sapiens
  misc_feature (61)..(62): /note="This region represents a CpG dinucleotide"
  misc_feature (61)..(61): /note="Nucleotide may be methylated to form 5-methylcytosine"
cactttttcttttttattctctcaagccccagcatcatgcagtcctcagttgggtgcttacgtgctcttctcttccttgcagcagtcctcaaggcagggcagattcctctttaaggtgctcg

SEQ ID NO: 5473 - DNA, 122 bp, Homo sapiens
  misc_feature (61)..(62): /note="This region represents a CpG dinucleotide"
  misc_feature (61)..(61): /note="Nucleotide may be methylated to form 5-methylcytosine"
gcaagcaagtcccctgaccctggccagctctgggcagggcagcttccctggggagtggggcgtgtctttacttctcactgggcctcaagggcaggggctggggcttgggcaggtcctcctcc

SEQ ID NO: 5474 - DNA, 122 bp, Homo sapiens
  misc_feature (61)..(62): /note="This region represents a CpG dinucleotide"
  misc_feature (61)..(61): /note="Nucleotide may be methylated to form 5-methylcytosine"
tgtccgtgtggctgttggggttgttgctgaggtacattttgtccatggccttgagggcctcggtgagatagttctgcagggccgtgaccgcggcacacaccgcggggctgccgaagccgtgg

SEQ ID NO: 5475 - DNA, 122 bp, Homo sapiens
  misc_feature (61)..(62): /note="This region represents a CpG dinucleotide"
  misc_feature (61)..(61): /note="Nucleotide may be methylated to form 5-methylcytosine"
ttgcctgagtcactaagttccttaaaagataaatgactctattccctgccttttcttacacgtaaggtaatatctgatggggttagtgatgatgcctctgtaatctataaccagctgtactc

SEQ ID NO: 5476 - DNA, 122 bp, Homo sapiens
  misc_feature (61)..(62): /note="This region represents a CpG dinucleotide"
  misc_feature (61)..(61): /note="Nucleotide may be methylated to form 5-methylcytosine"
acaagtttgctgcctggatgaatcttctctgattccccacccctgcagggagttgattgccgcaaccccatctgccctcttgcacaaggggcttctgtgacagtgttctccctgctcctaat

SEQ ID NO: 5477 - DNA, 122 bp, Homo sapiens
  misc_feature (61)..(62): /note="This region represents a CpG dinucleotide"
  misc_feature (61)..(61): /note="Nucleotide may be methylated to form 5-methylcytosine"
aatgcccaggggtcctggaacggggaccaggatgcagggccactcctggtggagaaccctcgtgactactccactgaattaagtgtcaccatcgccgtgggggcctccctcctgttccttaa

SEQ ID NO: 5478 - DNA, 122 bp, Homo sapiens
  misc_feature (61)..(62): /note="This region represents a CpG dinucleotide"
  misc_feature (61)..(61): /note="Nucleotide may be methylated to form 5-methylcytosine"
agcaggctcctgaggtgagggcgagtgtgtgggaaatctggcgagcgtgccacgtgcatgcgtgagtgtggatatgtggggagcatgcgtgcgcgtgaatatgcggggagcagccgcacctt

SEQ ID NO: 5479 - DNA, 122 bp, Homo sapiens
  misc_feature (61)..(62): /note="This region represents a CpG dinucleotide"
  misc_feature (61)..(61): /note="Nucleotide may be methylated to form 5-methylcytosine"
cattggataggactctgactttagtggtgatgatgagaggggctggcagggaccaaggggcgctatttaattatcaaagacaagatgggtgtggctattgtaaaggttatcagagctgaagt

SEQ ID NO: 5480 - DNA, 122 bp, Homo sapiens
  misc_feature (61)..(62): /note="This region represents a CpG dinucleotide"
  misc_feature (61)..(61): /note="Nucleotide may be methylated to form 5-methylcytosine"
caccagtccccactctgacgagaagaccgcccagctccaggcaccgtagcgccccagtgacgtaggcgaacacccgcgcctctgacgtcgccaaaggcccaccgctatggtgtcggcgaagg

SEQ ID NO: 5481 - DNA, 122 bp, Homo sapiens
  misc_feature (61)..(62): /note="This region represents a CpG dinucleotide"
  misc_feature (61)..(61): /note="Nucleotide may be methylated to form 5-methylcytosine"
aggaattttactgtatcagtggttctcaaccagaggctcttttgccctctagtgaaaccccgtctctactaaaaatacaaaaattagccgggcgtggtggcacatgcctgttaatcccagct

SEQ ID NO: 5482 - DNA, 122 bp, Homo sapiens
  misc_feature (61)..(62): /note="This region represents a CpG dinucleotide"
  misc_feature (61)..(61): /note="Nucleotide may be methylated to form 5-methylcytosine"
tgcaccttgtcaagctggtccccagtgtgtgtgacttcagcctgcactagaccatttgaccgacctaatcattttgttcgtaagagcttcaagaacatctaattgagcattcccagcctttg

SEQ ID NO: 5483 - DNA, 122 bp, Homo sapiens
  misc_feature (61)..(62): /note="This region represents a CpG dinucleotide"
  misc_feature (61)..(61): /note="Nucleotide may be methylated to form 5-methylcytosine"
aaaaaccgatgaacatgaggaggaagctgggaggggcatggggcgggcttaaggaactggcggtggggctggggcgggcaagagccgcttcctaaccagacatcatcagctttagagctacc

SEQ ID NO: 5484 - DNA, 122 bp, Homo sapiens
  misc_feature (61)..(62): /note="This region represents a CpG dinucleotide"
  misc_feature (61)..(61): /note="Nucleotide may be methylated to form 5-methylcytosine"
ctagtttgttttcctctactagactgtttccatgtcctcatcaccttgtatggtggttggcgtatacctagagtttatatgttattgaatgaatgagggtgagaaacacaaaagaatagacc

SEQ ID NO: 5485 - DNA, 122 bp, Homo sapiens
  misc_feature (61)..(62): /note="This region represents a CpG dinucleotide"
  misc_feature (61)..(61): /note="Nucleotide may be methylated to form 5-methylcytosine"
tcaaagtataaacaaatctttaaaatacaatttctagttgcttaaaatatatttagtctacgtatcttaagagattacaaacacaacaaaatattattaaaatgaccaaagttgatacaaat

SEQ ID NO: 5486 - DNA, 122 bp, Homo sapiens
  misc_feature (61)..(62): /note="This region represents a CpG dinucleotide"
  misc_feature (61)..(61): /note="Nucleotide may be methylated to form 5-methylcytosine"
gctagaagagctggggggttgcgttttttgccaagagcacccctaacagttaagaaagtgcgaagggagtcattgcgaaggcagccaaagaccgaagcggcgccctgcaagttcttcccaag

SEQ ID NO: 5487 - DNA, 122 bp, Homo sapiens
  misc_feature (61)..(62): /note="This region represents a CpG dinucleotide"
  misc_feature (61)..(61): /note="Nucleotide may be methylated to form 5-methylcytosine"
ggttatgcaaacaacagtccacctaatatttttggcaatgataatgaagttatggaacaacgaagaccgaagaggcatacactgatgcatataaagctccagagttgggaaaatatacaagc

SEQ ID NO: 5488 - DNA, 122 bp, Homo sapiens
  misc_feature (61)..(62): /note="This region represents a CpG dinucleotide"
  misc_feature (61)..(61): /note="Nucleotide may be methylated to form 5-methylcytosine"
ttgattatcaacatagtgaaggggagggtttcaaagagcaagaaggggttgttagtcacacggagagagaagaaaggagattagcagggtgactttcaccctgcaacagtcacgctggagta

SEQ ID NO: 5489 - DNA, 122 bp, Homo sapiens
  misc_feature (61)..(62): /note="This region represents a CpG dinucleotide"
  misc_feature (61)..(61): /note="Nucleotide may be methylated to form 5-methylcytosine"
acctgatggtatacaggctgttctgcggcaaccaggttgggcaaatttctgctgacaggacgattcgtagattgattcagagttcactgaacttccagggctggcccagtgtcctcactgtg

SEQ ID NO: 5490 - DNA, 122 bp, Homo sapiens
  misc_feature (61)..(62): /note="This region represents a CpG dinucleotide"
  misc_feature (61)..(61): /note="Nucleotide may be methylated to form 5-methylcytosine"
cgtttgaagtccaaactctagttggaattgtgggaccttggaaggttagtctcagggattcgattccttttcaggagaatgaaggaatctgcaaggggttgttgttacacaacttacgtgag

SEQ ID NO: 5491 - DNA, 122 bp, Homo sapiens
  misc_feature (61)..(62): /note="This region represents a CpG dinucleotide"
  misc_feature (61)..(61): /note="Nucleotide may be methylated to form 5-methylcytosine"
ctggttctgggccttcccagacaaaagccagagacccggagcctctttctgagaaggaaccgggcgtccccaagatttcctctagccgagtcccctgggtcccccgaggaccgggacagctc

SEQ ID NO: 5492 - DNA, 122 bp, Homo sapiens
  misc_feature (61)..(62): /note="This region represents a CpG dinucleotide"
  misc_feature (61)..(61): /note="Nucleotide may be methylated to form 5-methylcytosine"
ccgtttcctctcagtccgtctgtattatggactagatgatctccagggttccttctaactcggaccctctgggatgccgggcatcatcactgtggggtgcttcccaggtaggacagctgctc

SEQ ID NO: 5493 - DNA, 122 bp, Homo sapiens
  misc_feature (61)..(62): /note="This region represents a CpG dinucleotide"
  misc_feature (61)..(61): /note="Nucleotide may be methylated to form 5-methylcytosine"
cggtactcacacacaggagaagtaggaatgcggtactcacacacgggagaagtaggaatgcggtactcacacacgggagaagtaagaatgcggtactcacacacatgagaagtaagaatgcg

SEQ ID NO: 5494 - DNA, 122 bp, Homo sapiens
  misc_feature (61)..(62): /note="This region represents a CpG dinucleotide"
  misc_feature (61)..(61): /note="Nucleotide may be methylated to form 5-methylcytosine"
tgctgagctcatgcaaaggcaaatatgtctctgtttaaaggaacttggactaaccgactacgaggctggcagctcagttacccaggcaaagccagaaggtcagtgtcgcgcctggctgagga

SEQ ID NO: 5495 - DNA, 122 bp, Homo sapiens
  misc_feature (61)..(62): /note="This region represents a CpG dinucleotide"
  misc_feature (61)..(61): /note="Nucleotide may be methylated to form 5-methylcytosine"
gtctgtgactcagctctggccaacgtgacccaagcagaaatcgtgcaataacttctgggacgacattttcttatgaccttttctcctgccaggcgatcatgaagaccgtccctggcgcttca

SEQ ID NO: 5496 - DNA, 122 bp, Homo sapiens
  misc_feature (61)..(62): /note="This region represents a CpG dinucleotide"
  misc_feature (61)..(61): /note="Nucleotide may be methylated to form 5-methylcytosine"
gaactgcaccactaggacggacgacacaccgacgtaatgaccatagtaagaccccatgtacgtggctaatgaggcagtgacccgacgtggctcggaagccctgctggggagatcccgccccg

SEQ ID NO: 5497 - DNA, 122 bp, Homo sapiens
  misc_feature (61)..(62): /note="This region represents a CpG dinucleotide"
  misc_feature (61)..(61): /note="Nucleotide may be methylated to form 5-methylcytosine"
gaggaagccgtagctgcctgggtgctctggaaagttcgctgcacccatcctgtcaaggttcgtccaagcttccaagaacaaagaaaagattattgtattgcattgctctatcagtacttaca

SEQ ID NO: 5498 - DNA, 122 bp, Homo sapiens
  misc_feature (61)..(62): /note="This region represents a CpG dinucleotide"
  misc_feature (61)..(61): /note="Nucleotide may be methylated to form 5-methylcytosine"
tacacagagcggcgtgttttgacgcggaccacagcaaacgcgtcaggtcacgggcatttacgcgtatctgagagcaacgtctttatcatcagcacggtgcgttccctgcaaaggtaatgaat

SEQ ID NO: 5499 - DNA, 122 bp, Homo sapiens
  misc_feature (61)..(62): /note="This region represents a CpG dinucleotide"
  misc_feature (61)..(61): /note="Nucleotide may be methylated to form 5-methylcytosine"
agtttttcaacataaagattaacttaaaagctttacagttttttataaagacacctcctacgaaggtaaatggctgtattttcatgtgaccccaatgagaagtaaaatccaccagggggcgc

SEQ ID NO: 5500 - DNA, 122 bp, Homo sapiens
  misc_feature (61)..(62): /note="This region represents a CpG dinucleotide"
  misc_feature (61)..(61): /note="Nucleotide may be methylated to form 5-methylcytosine"
tctgtaattcgaatgtttgtttcctccaaaactcatgctgaaatttaattgccattgtaacgaattaggaggtggaacctttaataggtgattaggtcatgacagtttcaccctcgtgggtg

SEQ ID NO: 5501 - DNA, 122 bp, Homo sapiens
  misc_feature (61)..(62): /note="This region represents a CpG dinucleotide"
  misc_feature (61)..(61): /note="Nucleotide may be methylated to form 5-methylcytosine"
aaaatcagatcacaagcaacttgcaaacatgacttactctgacatttttggcaatggctccgaatgtgaagtggtttgtcactgagagggcactgtggagggagccggtgaatcaccccgtg

SEQ ID NO: 5502 - DNA, 122 bp, Homo sapiens
  misc_feature (61)..(62): /note="This region represents a CpG dinucleotide"
  misc_feature (61)..(61): /note="Nucleotide may be methylated to form 5-methylcytosine"
aaatacttctcagtctggtgaaaacactcagcagtgtgtttaaatgactcagccacccagcggcagtgctcagagggccagtgaagttactcactgaaactagagtaatgcttatcagtcta

SEQ ID NO: 5503 - DNA, 122 bp, Homo sapiens
  misc_feature (61)..(62): /note="This region represents a CpG dinucleotide"
  misc_feature (61)..(61): /note="Nucleotide may be methylated to form 5-methylcytosine"
tccttcctggaacccatgggctgcaatatgtgtgagctcagctgaagtaaacaccttccacgtactgagaacagggctggctcctggcgatctaacatcttacagtctacaggggcccctga

SEQ ID NO: 5504 - DNA, 122 bp, Homo sapiens
  misc_feature (61)..(62): /note="This region represents a CpG dinucleotide"
  misc_feature (61)..(61): /note="Nucleotide may be methylated to form 5-methylcytosine"
tccccaaactgacaagggacccggaacagcgacccccaaaccgacacgggactcgggaaccgctatctccaaagggcagctttctttgagggaggctgttagacgtgactccttgtttctaa

SEQ ID NO: 5505 - DNA, 122 bp, Homo sapiens
  misc_feature (61)..(62): /note="This region represents a CpG dinucleotide"
  misc_feature (61)..(61): /note="Nucleotide may be methylated to form 5-methylcytosine"
aaaacctcaaaggattgctcttatgatcagatgagtcaatatacactaaggctcctggaacggtacctggtagttagtggcaaaaccaactatgataatgatgaagtgattcatggaactct

SEQ ID NO: 5506 - DNA, 122 bp, Homo sapiens
  misc_feature (61)..(62): /note="This region represents a CpG dinucleotide"
  misc_feature (61)..(61): /note="Nucleotide may be methylated to form 5-methylcytosine"
tcatttgtaaggttttaggtgagccactcttacatcatccaggtttgccttagctggttacgtaagaggccacatggtgaacataatccaagctttaaatacttcaaactgtaagaataaat

SEQ ID NO: 5507 - DNA, 122 bp, Homo sapiens
  misc_feature (61)..(62): /note="This region represents a CpG dinucleotide"
  misc_feature (61)..(61): /note="Nucleotide may be methylated to form 5-methylcytosine"
tagtctgtgtgtccaggaagtaaagggaacaggttttgatgaacacatagcagcctgcaacgtacaaatagcttaaaaatttataggcacagaggcttacaacaaaaaattgaaaaataaac

SEQ ID NO: 5508 - DNA, 122 bp, Homo sapiens
  misc_feature (61)..(62): /note="This region represents a CpG dinucleotide"
  misc_feature (61)..(61): /note="Nucleotide may be methylated to form 5-methylcytosine"
gggcgtgaagaaacgtgtaggatgaggaaagagaacttgtgagccttaagagctgcccggcgccgtcttaccaggcctcgcccggcccggccctggccctcagttccctgccagggttggga

SEQ ID NO: 5509 - DNA, 122 bp, Homo sapiens
  misc_feature (61)..(62): /note="This region represents a CpG dinucleotide"
  misc_feature (61)..(61): /note="Nucleotide may be methylated to form 5-methylcytosine"
cgcactcgctctgcgcccgggtctcggcgcgcgcggaaacccaggccgcgggctcccctccgccccgccggcccgcgtgcagcattaaatattcatagggatgctactttcttaaaggagaa

SEQ ID NO: 5510 - DNA, 122 bp, Homo sapiens
  misc_feature (61)..(62): /note="This region represents a CpG dinucleotide"
  misc_feature (61)..(61): /note="Nucleotide may be methylated to form 5-methylcytosine"
gaaactacaaaatgagcacgaaatgatgtttttattcttagaacagaaagtccccacacccgcggccctggtgactgatgaggatgaggttctgcggggcctctctggccgcccagctctgc

SEQ ID NO: 5511 - DNA, 122 bp, Homo sapiens
  misc_feature (61)..(62): /note="This region represents a CpG dinucleotide"
  misc_feature (61)..(61): /note="Nucleotide may be methylated to form 5-methylcytosine"
atggtgtgaacttgacttatactgcttgtgaaacctgagtcatgtgctgaaatcctgccccgccaccgctttcctcccttaactggatccttagccttggactccaaggctacagctctgtc

SEQ ID NO: 5512 - DNA, 122 bp, Homo sapiens
  misc_feature (61)..(62): /note="This region represents a CpG dinucleotide"
  misc_feature (61)..(61): /note="Nucleotide may be methylated to form 5-methylcytosine"
atatttacttaataaaactttactatgtttcaggttctgctgtgtggcaactcgtggcttcgtttttgaagctccctatttctggaacccattgtattgttggtgcaactattggtttctcc

SEQ ID NO: 5513 - DNA, 122 bp, Homo sapiens
  misc_feature (61)..(62): /note="This region represents a CpG dinucleotide"
  misc_feature (61)..(61): /note="Nucleotide may be methylated to form 5-methylcytosine"
ccaaggaattatatgcttttcctcatctctttagttaagaaattctaaagtaaagccgggcgtagtgtctcacatctgtaatcccagcactttgggaggctgaggtgggtggatcaccttga

SEQ ID NO: 5514 - DNA, 122 bp, Homo sapiens
  misc_feature (61)..(62): /note="This region represents a CpG dinucleotide"
  misc_feature (61)..(61): /note="Nucleotide may be methylated to form 5-methylcytosine"
ctcatgcattctgcgggtcaggaaatgtggggtatgacttcgcaatatcctgcttcaaggcgtctcacaaagctgcaagccaggtgtctaccagagctggagtctcatctgaaggctcaact

SEQ ID NO: 5515 - DNA, 122 bp, Homo sapiens
  misc_feature (61)..(62): /note="This region represents a CpG dinucleotide"
  misc_feature (61)..(61): /note="Nucleotide may be methylated to form 5-methylcytosine"
tacgtgcaatgttctgtttgttaatctcatttccccatgagttcatctctgtgtttctggcgcttagcagcagagagcctgacacatacttggtacttcttattttgcaggaatgagagaac

SEQ ID NO: 5516 - DNA, 122 bp, Homo sapiens
  misc_feature (61)..(62): /note="This region represents a CpG dinucleotide"
  misc_feature (61)..(61): /note="Nucleotide may be methylated to form 5-methylcytosine"
aacacatgaaggtaaagaaagtgttcaataatagcaaaggtaatacttttctataaggaccgttggttttgattagcgccttttctgtaagtttaaatcattatccacatattttaagtact

SEQ ID NO: 5517 - DNA, 122 bp, Homo sapiens
  misc_feature (61)..(62): /note="This region represents a CpG dinucleotide"
  misc_feature (61)..(61): /note="Nucleotide may be methylated to form 5-methylcytosine"
gttacctccgtacagtgctgctcttactttttggtgccaccaagtggccaagtttaatggcgcagtgatacatcccccagagggaaccccaatttttatagcataagctctgtttcagacag

SEQ ID NO: 5518 - DNA, 122 bp, Homo sapiens
  misc_feature (61)..(62): /note="This region represents a CpG dinucleotide"
  misc_feature (61)..(61): /note="Nucleotide may be methylated to form 5-methylcytosine"
tatctgagctgcttgtcagtttgttcgtctgtccctaggtctgtctgctatcagctatgccgctgcccgttgcgctgcagacccgcttggccaagagaggcatcctcaaacatctggagcct

SEQ ID NO: 5519 - DNA, 122 bp, Homo sapiens
  misc_feature (61)..(62): /note="This region represents a CpG dinucleotide"
  misc_feature (61)..(61): /note="Nucleotide may be methylated to form 5-methylcytosine"
tccatcattatgactagaagttgaaatgtatttaacagccctacatgataagatcagatacgcctgtttagtgagagcctgttttatgacaaccctttgcaaacagttagcctcaagatgga

SEQ ID NO: 5520 - DNA, 122 bp, Homo sapiens
  misc_feature (61)..(62): /note="This region represents a CpG dinucleotide"
  misc_feature (61)..(61): /note="Nucleotide may be methylated to form 5-methylcytosine"
aaaaaaataaagagcaactctgcatcctgaatgtcatgcctgagatgagcttgctgaaagcgcagcagagacagcagccctctgctggcccaggcttctcctccatcccttctcgctccctc

SEQ ID NO: 5521 - DNA, 122 bp, Homo sapiens
  misc_feature (61)..(62): /note="This region represents a CpG dinucleotide"
  misc_feature (61)..(61): /note="Nucleotide may be methylated to form 5-methylcytosine"
tagagaggacattgcttaactattgttgtctgtgtctacaggcacttggactagaggaaacgggcttgaagagaaatgggagcattccctttggtcacaaggaagacatttaaccatgaact

SEQ ID NO: 5522 - DNA, 122 bp, Homo sapiens
  misc_feature (61)..(62): /note="This region represents a CpG dinucleotide"
  misc_feature (61)..(61): /note="Nucleotide may be methylated to form 5-methylcytosine"
accactcccccacacttccaaaattaaacagtgttttcttagcatcttgaatatctcctgcggtgtatattaacatcttgatgagacagatttccaggcaacaaaataatttctaaaatgga

SEQ ID NO: 5523 - DNA, 122 bp, Homo sapiens
  misc_feature (61)..(62): /note="This region represents a CpG dinucleotide"
  misc_feature (61)..(61): /note="Nucleotide may be methylated to form 5-methylcytosine"
ccttgccttgtggtacaatgtgtgcccaggccccagcagcaaactaattacacataagggcgggtttgggagggcagcctggggggagtcggcttcctcctccctttcccatttcctctctc

SEQ ID NO: 5524 - DNA, 122 bp, Homo sapiens
  misc_feature (61)..(62): /note="This region represents a CpG dinucleotide"
  misc_feature (61)..(61): /note="Nucleotide may be methylated to form 5-methylcytosine"
ggaaatgtgataagattcctttgactgacaaaatgagagaaaacatttgatatagtttctcgcaacactgtaaatgtgagtcaaattgatgtggaaaataacagaacttcacgaactaaaaa

SEQ ID NO: 5525 - DNA, 122 bp, Homo sapiens
  misc_feature (61)..(62): /note="This region represents a CpG dinucleotide"
  misc_feature (61)..(61): /note="Nucleotide may be methylated to form 5-methylcytosine"
aggactgcatatttgtaatggtttcctagtggcatctgaagaaagataaatctcttttggcgaggactgagattctgatttgatggcagccagagcagtctaccaaagtcactaaagcatta

SEQ ID NO: 5526 - DNA, 122 bp, Homo sapiens
  misc_feature (61)..(62): /note="This region represents a CpG dinucleotide"
  misc_feature (61)..(61): /note="Nucleotide may be methylated to form 5-methylcytosine"
attcttaaaaggctgtctctgtttggttgttaagccatggtgctcagtgtcaatggatgccggggccatagagattcagaggagaacaaactcttcagggatgaggtagtcagggaagctgc

SEQ ID NO: 5527 - DNA, 122 bp, Homo sapiens
  misc_feature (61)..(62): /note="This region represents a CpG dinucleotide"
  misc_feature (61)..(61): /note="Nucleotide may be methylated to form 5-methylcytosine"
gaactgaaagcgggagcgaggataaggaggcgttgctgcctcactttttgctccgcccctcgaggggcagtgacctaaggactgcgagggagaacacaatagtttcactttttaatcccttt

SEQ ID NO: 5528 - DNA, 122 bp, Homo sapiens
  misc_feature (61)..(62): /note="This region represents a CpG dinucleotide"
  misc_feature (61)..(61): /note="Nucleotide may be methylated to form 5-methylcytosine"
catagggcatcagtaccagtgcccttactgtacagatggggaaaatgaggctcagacaggcgaagtaagtagcttaagttcacacagagaggaaatggcagggattcaaagcctaggagtcc

SEQ ID NO: 5529 - DNA, 122 bp, Homo sapiens
  misc_feature (61)..(62): /note="This region represents a CpG dinucleotide"
  misc_feature (61)..(61): /note="Nucleotide may be methylated to form 5-methylcytosine"
caggcttcaaggtcagagttgaggagttgccacagagactaaagtatttactctttagcccgtgacagaataagttcatgacccctgaactagaggctgttgatctcgtttacagtgaaaga

SEQ ID NO: 5530 - DNA, 122 bp, Homo sapiens
  misc_feature (61)..(62): /note="This region represents a CpG dinucleotide"
  misc_feature (61)..(61): /note="Nucleotide may be methylated to form 5-methylcytosine"
gtggttaccttacaattcagaatgaactttgaacaaatccctgaagacaacgaggctggccgtggatgtgcagctgccttgcgccttagtgtgtcatctgtaaaatgaggtaatagcaacgt

SEQ ID NO: 5531 - DNA, 122 bp, Homo sapiens
  misc_feature (61)..(62): /note="This region represents a CpG dinucleotide"
  misc_feature (61)..(61): /note="Nucleotide may be methylated to form 5-methylcytosine"
aacacatctgcagtggctttatcaatagttaccccaccatggaaataacccagtgtccatcgtagtgaatgggtcaaccagctggagtctatgtggacactgggacattggaatcccactca

SEQ ID NO: 5532 - DNA, 122 bp, Homo sapiens
  misc_feature (61)..(62): /note="This region represents a CpG dinucleotide"
  misc_feature (61)..(61): /note="Nucleotide may be methylated to form 5-methylcytosine"
agttgcatcctgttatagacaatggtaagtgatgcaagctttttcagaattcagcttctacgatcttataagagacaccctgtcaaagctgtagctaaactaagggaatgactgccatgccc

SEQ ID NO: 5533 - DNA, 122 bp, Homo sapiens
  misc_feature (61)..(62): /note="This region represents a CpG dinucleotide"
  misc_feature (61)..(61): /note="Nucleotide may be methylated to form 5-methylcytosine"
atcacaccactgcaatccagtgttagcaccacaaagcatctaaaagagccagtttgtggtcgtgaaaatattgccttattattttaccctgtcccttaataaccatgcctcaggctcattcc

SEQ ID NO: 5534 - DNA, 122 bp, Homo sapiens
  misc_feature (61)..(62): /note="This region represents a CpG dinucleotide"
  misc_feature (61)..(61): /note="Nucleotide may be methylated to form 5-methylcytosine"
aaggtcaccagaacaagagctgaaaattcgtatgcatgaccgcctatctaccacgaccgacgccacgccgagtcgattggcaacacagacgagccggtcgaggtccggtcgagattggtagg

SEQ ID NO: 5535 - DNA, 122 bp, Homo sapiens
  misc_feature (61)..(62): /note="This region represents a CpG dinucleotide"
  misc_feature (61)..(61): /note="Nucleotide may be methylated to form 5-methylcytosine"
tgagtgcctcatgtttcctaagggctctgcctatccacgcgtgttggacgtgtgcctgtacgttaagtgcaggaagtgccagcctcagtgtgaacgaggttaggccccagcctggcattctc

SEQ ID NO: 5536 - DNA, 122 bp, Homo sapiens
  misc_feature (61)..(62): /note="This region represents a CpG dinucleotide"
  misc_feature (61)..(61): /note="Nucleotide may be methylated to form 5-methylcytosine"
acattttcgtgtaagcctcatcaactgcagcaaataatgattccttcctgttctgggaaacgcctcataagcaagtagatgttgaatcatagtgacatggtttctgtaaacacagaccatgc

SEQ ID NO: 5537 - DNA, 122 bp, Homo sapiens
  misc_feature (61)..(62): /note="This region represents a CpG dinucleotide"
  misc_feature (61)..(61): /note="Nucleotide may be methylated to form 5-methylcytosine"
cctggctgagaggcccctccaccctggctcccacccaccccccagccctgggcctccacacgcccagccccatggtcctggagagtcccccgctccagccctggaccctccagcgcctgcag

SEQ ID NO: 5538 - DNA, 122 bp, Homo sapiens
  misc_feature (61)..(62): /note="This region represents a CpG dinucleotide"
  misc_feature (61)..(61): /note="Nucleotide may be methylated to form 5-methylcytosine"
taacgtcatgtctggaactcaagctactgaattatatattctttaatacatatagacctacgtcaatgagtttaaactgcaaggaaagggttaaatttcttcctcaagtgtggtcaaaatct

SEQ ID NO: 5539 - DNA, 122 bp, Homo sapiens
  misc_feature (61)..(62): /note="This region represents a CpG dinucleotide"
  misc_feature (61)..(61): /note="Nucleotide may be methylated to form 5-methylcytosine"
tgaacttgaagatgaggccccttctgtctttgatgtgtcatcattctctgaaccaccactcgggcagcatcctctggggagcagccacccactcttgggagctctcaggcacttcccagagc

SEQ ID NO: 5540 - DNA, 122 bp, Homo sapiens
  misc_feature (61)..(62): /note="This region represents a CpG dinucleotide"
  misc_feature (61)..(61): /note="Nucleotide may be methylated to form 5-methylcytosine"
gtcattgtacatctcagctttctcatgtgaagcttgcataagtgtggtgcctcggctgggcgtggtggctcacgcctgtaatcccagcactttggaacgccaaagcaggtggatcactggag

SEQ ID NO: 5541 - DNA, 122 bp, Homo sapiens
  misc_feature (61)..(62): /note="This region represents a CpG dinucleotide"
  misc_feature (61)..(61): /note="Nucleotide may be methylated to form 5-methylcytosine"
caaactggaagttcaatctagaggtttgattgtatccacattaagtctttttggcaagaacgcttcataagtgttgttgatgacttcacattgcattacaccaggaagtgatcagtctttaa

SEQ ID NO: 5542 - DNA, 122 bp, Homo sapiens
  misc_feature (61)..(62): /note="This region represents a CpG dinucleotide"
  misc_feature (61)..(61): /note="Nucleotide may be methylated to form 5-methylcytosine"
ggttgtcttcatgcttgctgtttgttttaatgcctctggattttctgctttcctgttcctcgtacaaacctacacttctcccttccccacatgcacactgggccttaaactaaaacaaagag

SEQ ID NO: 5543 - DNA, 122 bp, Homo sapiens
  misc_feature (61)..(62): /note="This region represents a CpG dinucleotide"
  misc_feature (61)..(61): /note="Nucleotide may be methylated to form 5-methylcytosine"
aaaagactgaaaaaagatagaggaagccacacatattcagaaggaagaggaagacaatggcgttgccttttgtttgggaaccaaatgatcacttagccagtggcagagctgggactagaatc

SEQ ID NO: 5544 - DNA, 122 bp, Homo sapiens
  misc_feature (61)..(62): /note="This region represents a CpG dinucleotide"
  misc_feature (61)..(61): /note="Nucleotide may be methylated to form 5-methylcytosine"
gcctgccccccacattctaaaacagtcatcaccaagtgaagctgccagaaagttagctctcgtaactaaaagtagctaataaaatgtagtatgactttttattccgtacttatcccttttaa

SEQ ID NO: 5545 - DNA, 122 bp, Homo sapiens
  misc_feature (61)..(62): /note="This region represents a CpG dinucleotide"
  misc_feature (61)..(61): /note="Nucleotide may be methylated to form 5-methylcytosine"
gagccaaaaacccacagccgcttgactcacggatatactatgatgtcaagctgcagtcaccggtggtcacaatgggcagcctaagtcatcaggaagaggctattgtgcactgcttgggaggg

SEQ ID NO: 5546 - DNA, 122 bp, Homo sapiens
  misc_feature (61)..(62): /note="This region represents a CpG dinucleotide"
  misc_feature (61)..(61): /note="Nucleotide may be methylated to form 5-methylcytosine"
ctgtgaagaggaggaaaggtaacggccttgcctttcagttccgtacagatattgccaggacggaatacctttccaatgctgatgagcgtcttcgctggcaggccagctccttgcctgctgat

SEQ ID NO: 5547 - DNA, 122 bp, Homo sapiens
  misc_feature (61)..(62): /note="This region represents a CpG dinucleotide"
  misc_feature (61)..(61): /note="Nucleotide may be methylated to form 5-methylcytosine"
ttctgacctattctgacttgaggtgaatgaagtgagtctggaaaagctccttgtcagcagcgtttttgtgtgttatgaatctggacttgaaagaattgcacagaggtgattcacatgatttt

SEQ ID NO: 5548 - DNA, 122 bp, Homo sapiens
  misc_feature (61)..(62): /note="This region represents a CpG dinucleotide"
  misc_feature (61)..(61): /note="Nucleotide may be methylated to form 5-methylcytosine"
ttcggccatcttggctcctccctcgcatttttcatttttcaattcaacagcattgtttgtcgtctttctccctccctgcacgctgaggtcttagttcagggtcttgcacttagtaggtgttc

SEQ ID NO: 5549 - DNA, 122 bp, Homo sapiens
  misc_feature (61)..(62): /note="This region represents a CpG dinucleotide"
  misc_feature (61)..(61): /note="Nucleotide may be methylated to form 5-methylcytosine"
ctatctggcattaacgtgcactctgtcaccataagacttaacggtggcagatggcagttgcgttagcaaacattcagttctctctctttgattcttcccttaggattgaggaaggcctggcc

SEQ ID NO: 5550 - DNA, 122 bp, Homo sapiens
  misc_feature (61)..(62): /note="This region represents a CpG dinucleotide"
  misc_feature (61)..(61): /note="Nucleotide may be methylated to form 5-methylcytosine"
gttttgtgtttgagctgtgtgctaacagtcagtgtcaatgtctgccttctgagctgtgggcgattcccattgttgtgaggtttcctccaactggacgttaagttactgagaacaggaatcag

SEQ ID NO: 5551 - DNA, 122 bp, Homo sapiens
  misc_feature (61)..(62): /note="This region represents a CpG dinucleotide"
  misc_feature (61)..(61): /note="Nucleotide may be methylated to form 5-methylcytosine"
aggaagaaataagtaaataaaatattaacttgccattgagttcctttgctagaattcacacgaaattaaatgaatctacagtttcttttccttcttcccaaataaatatttttgaagttggc

SEQ ID NO: 5552 - DNA, 122 bp, Homo sapiens
  misc_feature (61)..(62): /note="This region represents a CpG dinucleotide"
  misc_feature (61)..(61): /note="Nucleotide may be methylated to form 5-methylcytosine"
gccacagtcattcacccctgtgcagcagctggccaagaccagcagacacagggcacgcgccgcaccactttatcttctgggattttcttaagcgggacccatggcaataatgcctttcctca

SEQ ID NO: 5553 - DNA, 122 bp, Homo sapiens
  misc_feature (61)..(62): /note="This region represents a CpG dinucleotide"
  misc_feature (61)..(61): /note="Nucleotide may be methylated to form 5-methylcytosine"
gaaaattcaatatccaaatgacagacagtggaaattagctgtgattttccctgctctgtgcgaagagctggcatttcctcatttatccattcatccaacaaatatttattgagcaactaata

SEQ ID NO: 5554 - DNA, 122 bp, Homo sapiens
  misc_feature (61)..(62): /note="This region represents a CpG dinucleotide"
  misc_feature (61)..(61): /note="Nucleotide may be methylated to form 5-methylcytosine"
cacatacatgaatcctctcccacccatccgccccccaccctacacccacgcacccacacacgtgcacgaactctcccaaactgacattgcccccagccctcctgggcacaagaatacatata

SEQ ID NO: 5555 - DNA, 122 bp, Homo sapiens
  misc_feature (61)..(62): /note="This region represents a CpG dinucleotide"
  misc_feature (61)..(61): /note="Nucleotide may be methylated to form 5-methylcytosine"
cactgggccatctctacctaggagtgctatagcctgactttacattatctgtgagggttacggaaaatgatgtgaatttactagcatggtgcctgccacttggcaagttctgatatatagtc

SEQ ID NO: 5556 - DNA, 122 bp, Homo sapiens
  misc_feature (61)..(62): /note="This region represents a CpG dinucleotide"
  misc_feature (61)..(61): /note="Nucleotide may be methylated to form 5-methylcytosine"
caccccaccatgcatgcttactgtagacctaatcactaattagcccaagggttgactgagcgtgctggtgagagtaacaggaggcaggtggatggggaggtgtgatgctgcgcgcatagtag

SEQ ID NO: 5557 - DNA, 122 bp, Homo sapiens
  misc_feature (61)..(62): /note="This region represents a CpG dinucleotide"
  misc_feature (61)..(61): /note="Nucleotide may be methylated to form 5-methylcytosine"
gctgcaaagaccttggagctgtgggcccaaaactgcttcttctcactatcctgagggatacgcccctttcagagagggcaactgactgtgtggtgtttatggaaggagttggggggagggca

SEQ ID NO: 5558 - DNA, 122 bp, Homo sapiens
  misc_feature (61)..(62): /note="This region represents a CpG dinucleotide"
  misc_feature (61)..(61): /note="Nucleotide may be methylated to form 5-methylcytosine"
cactgtttctgttttccatgtgtacccttgcagaatgtttttaagcaacaggcacatgcacgcacacacatatcttgttaaatgaaaacagcaacacactctacatgctgttctgtaacctg

SEQ ID NO: 5559 - DNA, 122 bp, Homo sapiens
  misc_feature (61)..(62): /note="This region represents a CpG dinucleotide"
  misc_feature (61)..(61): /note="Nucleotide may be methylated to form 5-methylcytosine"
gtgtatcccttcttacaacatgtagtgcggttctgctaagcactctctccccagcatctacgtttccagacaagattgtgcttgttgtagactggcactcccagggaaccatcaagtgagcg

SEQ ID NO: 5560 - DNA, 122 bp, Homo sapiens
  misc_feature (61)..(62): /note="This region represents a CpG dinucleotide"
  misc_feature (61)..(61): /note="Nucleotide may be methylated to form 5-methylcytosine"
tcccggagtcagccgctgtgtccttttgtgaaagaagtacagcccgtcacccagggagggcgcgccttatggcgggttctaacacgcagttgcaatggaaccaactcagtcaatggtgatcg

SEQ ID NO: 5561 - DNA, 122 bp, Homo sapiens
  misc_feature (61)..(62): /note="This region represents a CpG dinucleotide"
  misc_feature (61)..(61): /note="Nucleotide may be methylated to form 5-methylcytosine"
gcggagcagaaccgcgctgcctcagaagctgccgggctgtgtgtttctgcgggagtgttgcgagtgttggctgcccgagtgtgtatgcggctgtctgtgtgtgcgcgtgtgtgtgtttctgt

SEQ ID NO: 5562 - DNA, 122 bp, Homo sapiens
  misc_feature (61)..(62): /note="This region represents a CpG dinucleotide"
  misc_feature (61)..(61): /note="Nucleotide may be methylated to form 5-methylcytosine"
aagtgccccgtaaatgccagtgattgttatttctattttctacctttgcatcctccctttcgtccccctcatccttgaaatgagaaggtggattaggtcatcacagctcggttccctgctcc

SEQ ID NO: 5563 - DNA, 122 bp, Homo sapiens
  misc_feature (61)..(62): /note="This region represents a CpG dinucleotide"
  misc_feature (61)..(61): /note="Nucleotide may be methylated to form 5-methylcytosine"
tgtggagtcccctttggcccttgttctgccccgatttgggggctgggggctgggggctgacgtttctccctctcaaagttcaggttgaattgccctaacgtgctgattactgcaccgaggat

SEQ ID NO: 5564 - DNA, 122 bp, Homo sapiens
  misc_feature (61)..(62): /note="This region represents a CpG dinucleotide"
  misc_feature (61)..(61): /note="Nucleotide may be methylated to form 5-methylcytosine"
gcagctgtttacattaattatcttgtggatggagtccctcactgagctgatatgctgttacgttagtgctttcaggttttgggttgaatcacttaggtatgcctacacacttgctttgagaa

SEQ ID NO: 5565 - DNA, 122 bp, Homo sapiens
  misc_feature (61)..(62): /note="This region represents a CpG dinucleotide"
  misc_feature (61)..(61): /note="Nucleotide may be methylated to form 5-methylcytosine"
cccagcgtgggatgacattttgttttttctcatttcattacttttcttccctatccctctcgttaagaactggcattaaatgctctgtggggtttgatcagaaatacacagagaatttagac

SEQ ID NO: 5566 - DNA, 122 bp, Homo sapiens
  misc_feature (61)..(62): /note="This region represents a CpG dinucleotide"
  misc_feature (61)..(61): /note="Nucleotide may be methylated to form 5-methylcytosine"
atcttgcttctacaagcagacattttgggaagattattcgtggaaaagggtgcaaaagggcgactcgtagctggggcttgggcaatgattttcattgcaaggataaacatgttctcagggga

SEQ ID NO: 5567 - DNA, 122 bp, Homo sapiens
  misc_feature (61)..(62): /note="This region represents a CpG dinucleotide"
  misc_feature (61)..(61): /note="Nucleotide may be methylated to form 5-methylcytosine"
gtgtcaaaattaaaccctttcttctgacagaagacctaatacttgaactcagattacagtcgtgtgttgcttaacaacaggcatacattctgagaaatgcatcatcaggcaattttgtcatt

SEQ ID NO: 5568 - DNA, 122 bp, Homo sapiens
  misc_feature (61)..(62): /note="This region represents a CpG dinucleotide"
  misc_feature (61)..(61): /note="Nucleotide may be methylated to form 5-methylcytosine"
tgcgggcgccttctcccctgtagaaatggtgacctcaaggcttctaggtcgcatctttcccgagggcaggtacacttcgaagggcctgcactccttctgccccggggcgccccccgccagcc

SEQ ID NO: 5569 - DNA, 122 bp, Homo sapiens
  misc_feature (61)..(62): /note="This region represents a CpG dinucleotide"
  misc_feature (61)..(61): /note="Nucleotide may be methylated to form 5-methylcytosine"
cttgttaagtgggggatgtatgtgctctgttgaaatatcagctgttgtagttgccaaagacgttcctgagccaccagaagccttttctcttcagtccaaccatgtgttcaccttgccccaaa

SEQ ID NO: 5570 - DNA, 122 bp, Homo sapiens
  misc_feature (61)..(62): /note="This region represents a CpG dinucleotide"
  misc_feature (61)..(61): /note="Nucleotide may be methylated to form 5-methylcytosine"
cacttccacatgcatacaggtgggcacactagtgtgcctccaagcagttagcttcagagccggaagaagatgtggggttgtatacccagtctaacctgccttcaggttctgcccagcagcca

SEQ ID NO: 5571 - DNA, 122 bp, Homo sapiens
  misc_feature (61)..(62): /note="This region represents a CpG dinucleotide"
  misc_feature (61)..(61): /note="Nucleotide may be methylated to form 5-methylcytosine"
ggatgatggtcctggggactcgggctgcgtggaagggtcggcaggtgggctctgtggagacgtggtcagatgaggtttcgggttgagtatgctctcggtggatgaatcacctctgccacacg

SEQ ID NO: 5572 - DNA, 122 bp, Homo sapiens
  misc_feature (61)..(62): /note="This region represents a CpG dinucleotide"
  misc_feature (61)..(61): /note="Nucleotide may be methylated to form 5-methylcytosine"
caacttgttcatttctttcttcaattattggtctaactgtatcagaacctcttctgtcaacgtccataattgagaagcgacagcaaagacagtgtttattgtggaaggagagactctagaac

SEQ ID NO: 5573 - DNA, 122 bp, Homo sapiens
  misc_feature (61)..(62): /note="This region represents a CpG dinucleotide"
  misc_feature (61)..(61): /note="Nucleotide may be methylated to form 5-methylcytosine"
cattttatagataagctgtcaatgttgttatcttatatcaaaagtgcctaatgttataggcgctgtgctaattttttctgtgactgcagtatctcactttattttggccacaacctgatgtc

SEQ ID NO: 5574 - DNA, 122 bp, Homo sapiens
  misc_feature (61)..(62): /note="This region represents a CpG dinucleotide"
  misc_feature (61)..(61): /note="Nucleotide may be methylated to form 5-methylcytosine"
tatctgctattatagtctcttcctcaatccagctgttgtttatttgcacctctgtaacaacgacaagtttggacagaggttgtctgtccaaagaaccagcttttggctttgttgattcttcc

SEQ ID NO: 5575 - DNA, 122 bp, Homo sapiens
  misc_feature (61)..(62): /note="This region represents a CpG dinucleotide"
  misc_feature (61)..(61): /note="Nucleotide may be methylated to form 5-methylcytosine"
ccgccgcaggcatcaccctctgacttgtcatgccatccgccccctccctcactgtatctacgctttattacctgccttggctcgtacaatgtcagctttgcaaggggttcttccaaggtctt

SEQ ID NO: 5576 - DNA, 122 bp, Homo sapiens
  misc_feature (61)..(62): /note="This region represents a CpG dinucleotide"
  misc_feature (61)..(61): /note="Nucleotide may be methylated to form 5-methylcytosine"
ggcggaggccagcgccagtgtcctgtggtgaccacagcagcctgctggcatctttgcccccgccgtgccacgtcatctgggctcactgtgcgttttctggctcaggcctgaggcagccacgt

SEQ ID NO: 5577 - DNA, 122 bp, Homo sapiens
  misc_feature (61)..(62): /note="This region represents a CpG dinucleotide"
  misc_feature (61)..(61): /note="Nucleotide may be methylated to form 5-methylcytosine"
ttctcctccctttttgcacccctatactagagaccaggctttatgccccttctgtgaatgcgaaaacactgccttcaacaattaggagtaaaatgtcctccaaagccaaattttagttctga

SEQ ID NO: 5578 - DNA, 122 bp, Homo sapiens
  misc_feature (61)..(62): /note="This region represents a CpG dinucleotide"
  misc_feature (61)..(61): /note="Nucleotide may be methylated to form 5-methylcytosine"
attcacatcccccaattcctgatcatgtttgtctacgtctggcgatacctgaccagaagacgtccttatcttctatcctctccctttcctttgagggagaagtcattttggtaaaatttgat

SEQ ID NO: 5579 - DNA, 122 bp, Homo sapiens
  misc_feature (61)..(62): /note="This region represents a CpG dinucleotide"
  misc_feature (61)..(61): /note="Nucleotide may be methylated to form 5-methylcytosine"
gaatggagatggtctccacctcccacaggctggcggtatactcgggcgagggctatggggcggctcttccctgaggccccaggcctggaccccgtcgcgctgtctggcagcgtgtgctgcat

SEQ ID NO: 5580 - DNA, 122 bp, Homo sapiens
  misc_feature (61)..(62): /note="This region represents a CpG dinucleotide"
  misc_feature (61)..(61): /note="Nucleotide may be methylated to form 5-methylcytosine"
ctgtgggctgtgaatccaactcgtcctgggagcagggcgctctcgccttctgttcctctccgagctcagtgcacagaagcattctgcttacccagctgggactgctgactgcaccatcgagc

SEQ ID NO: 5581 - DNA, 122 bp, Homo sapiens
  misc_feature (61)..(62): /note="This region represents a CpG dinucleotide"
  misc_feature (61)..(61): /note="Nucleotide may be methylated to form 5-methylcytosine"
cacctgttccccgtgaggtcccacttcaaacaaaccttcaaagccccttcccctttagggcgcccccgccaacagtccaaaatccagcccccatccacctcgatgaccctgaaatttgcaat

SEQ ID NO: 5582 - DNA, 122 bp, Homo sapiens
  misc_feature (61)..(62): /note="This region represents a CpG dinucleotide"
  misc_feature (61)..(61): /note="Nucleotide may be methylated to form 5-methylcytosine"
ccagctaaagtctgtaacaagagatgaacaaacatcgagtcatcctagctgggctggtttcgccagagacaaggtgatgagatgctttaagcctgatatgattacaggcttataacttctga

SEQ ID NO: 5583 - DNA, 122 bp, Homo sapiens
  misc_feature (61)..(62): /note="This region represents a CpG dinucleotide"
  misc_feature (61)..(61): /note="Nucleotide may be methylated to form 5-methylcytosine"
gaggaagtaaataattggagacaataatataatctaccacaagtctagtctagaggtaagcggcatggtctagaatagaaatataaattggagaatcatcagtgtacaggttgcagttgaag

SEQ ID NO: 5584 - DNA, 122 bp, Homo sapiens
  misc_feature (61)..(62): /note="This region represents a CpG dinucleotide"
  misc_feature (61)..(61): /note="Nucleotide may be methylated to form 5-methylcytosine"
cctaaaggcatttaccctttaagtcccctgggatgctggttactgtcactgatggaggaacggtgaccctgacctgccactgagactctacattatctggattgagaagacaacttttgctg

SEQ ID NO: 5585 - DNA, 122 bp, Homo sapiens
  misc_feature (61)..(62): /note="This region represents a CpG dinucleotide"
  misc_feature (61)..(61): /note="Nucleotide may be methylated to form 5-methylcytosine"
gggtctagttaattggtcatccacctgtgactccttactcaatgatttgatttggctctacgtccccacccaaatctcaccttgaattgtaataatccccacgtattgtgggagggacctgc

SEQ ID NO: 5586 - DNA, 122 bp, Homo sapiens
  misc_feature (61)..(62): /note="This region represents a CpG dinucleotide"
  misc_feature (61)..(61): /note="Nucleotide may be methylated to form 5-methylcytosine"
gtagcaggaggatatgaatgctgtgtgagtcattaatagcccagccatgctgagctcatacgaagtgccatgcagtatggtgagcagtttacccgatcctgatagtcctggaaacaatacta

SEQ ID NO: 5587 - DNA, 122 bp, Homo sapiens
  misc_feature (61)..(62): /note="This region represents a CpG dinucleotide"
  misc_feature (61)..(61): /note="Nucleotide may be methylated to form 5-methylcytosine"
gatgggtttaataaaaagtagagctcctgcatggcacacaccgagaggactagttggcagcgtgcagggcacctgtggctgctcctcactaaccactgtgtgtttgtctttttcagtttatt

SEQ ID NO: 5588 - DNA, 122 bp, Homo sapiens
  misc_feature (61)..(62): /note="This region represents a CpG dinucleotide"
  misc_feature (61)..(61): /note="Nucleotide may be methylated to form 5-methylcytosine"
agcaaagaattctatatagatgtatacatatacacccctctccctggtcaagaatggcctcgctgaatccctgttccaaatgccgtgacaagtctcattagctggagctcattgtgtgcagc

SEQ ID NO: 5589 - DNA, 122 bp, Homo sapiens
  misc_feature (61)..(62): /note="This region represents a CpG dinucleotide"
  misc_feature (61)..(61): /note="Nucleotide may be methylated to form 5-methylcytosine"
ccacaggtagagcaggtggcagaatacacctggcccctgccccatgaggccttccagaaacgcagaccataagcgggaaaggcactgcgcgtctcgggagggctgcaggggcgctcaccatc

SEQ ID NO: 5590 - DNA, 122 bp, Homo sapiens
  misc_feature (61)..(62): /note="This region represents a CpG dinucleotide"
  misc_feature (61)..(61): /note="Nucleotide may be methylated to form 5-methylcytosine"
gtctgattttctcctcctctttgtgtacccgacggtgttgctgtgagctcaggaccatcccggcggctgtggatgggatcatcgtgtgtgtatggccacagccctccgcctcgctcgctcgg

SEQ ID NO: 5591 - DNA, 122 bp, Homo sapiens
  misc_feature (61)..(62): /note="This region represents a CpG dinucleotide"
  misc_feature (61)..(61): /note="Nucleotide may be methylated to form 5-methylcytosine"
aaatataaaccatcttaaataaacaagagcatgtattagataatgaaagtgaagtgtctacgggtacattagcttcaggaatagctcaatccagctgttcaaatcaagaatctgtttcttta

SEQ ID NO: 5592 - DNA, 122 bp, Homo sapiens
  misc_feature (61)..(62): /note="This region represents a CpG dinucleotide"
  misc_feature (61)..(61): /note="Nucleotide may be methylated to form 5-methylcytosine"
agagtgagtgggcagtcaaaaagccacaaagaaggtcctgcaacatccgtctcttaaattcgttttctgtgatctctgctcactttttatgccaccatctacctatctacacttgatctcta

SEQ ID NO: 5593 - DNA, 122 bp, Homo sapiens
  misc_feature (61)..(62): /note="This region represents a CpG dinucleotide"
  misc_feature (61)..(61): /note="Nucleotide may be methylated to form 5-methylcytosine"
cagcactgccgctgggcgttctatctcaggtggtgtcccgtctacgctctcaagggtggccgcgcctgaacctttactcgtgaagagtgacacacaaaccaaggccaaactaaaaaacaaaa

SEQ ID NO: 5594 - DNA, 122 bp, Homo sapiens
  misc_feature (61)..(62): /note="This region represents a CpG dinucleotide"
  misc_feature (61)..(61): /note="Nucleotide may be methylated to form 5-methylcytosine"
tacccacactaaataccaactgctcttcctcagctgtagtccccaacatcagacttggcacgtggtggacactaacacacaggcactcaatgaatgagtgaaggaaataaaagtcaccccgt

SEQ ID NO: 5595 - DNA, 122 bp, Homo sapiens
  misc_feature (61)..(62): /note="This region represents a CpG dinucleotide"
  misc_feature (61)..(61): /note="Nucleotide may be methylated to form 5-methylcytosine"
taaagagggtggaaagaactctaatactgaaacctagtcataggtcaaggctgcagaattcgccccatttccattttgctgattcatatcagtcagatatgactatgccacttgattttgtc

SEQ ID NO: 5596 - DNA, 122 bp, Homo sapiens
  misc_feature (61)..(62): /note="This region represents a CpG dinucleotide"
  misc_feature (61)..(61): /note="Nucleotide may be methylated to form 5-methylcytosine"
ctccaaagacccatcctcccaggcagccttccaggctgatcactgtgcctccaactccgtcgttcctgttccgatccccatcacgggctgagggtgaccgtgtttgtttatgaccgccccct

SEQ ID NO: 5597 - DNA, 122 bp, Homo sapiens
  misc_feature (61)..(62): /note="This region represents a CpG dinucleotide"
  misc_feature (61)..(61): /note="Nucleotide may be methylated to form 5-methylcytosine"
tgggccatgatggagtcatagtcctggttgcttggccactgtgtctggacaaagagctgccgcagcaagtgccgctgctgggcagtctttttgcagctcactttgcctgggagctgctctgc

SEQ ID NO: 5598 - DNA, 122 bp, Homo sapiens
  misc_feature (61)..(62): /note="This region represents a CpG dinucleotide"
  misc_feature (61)..(61): /note="Nucleotide may be methylated to form 5-methylcytosine"
aaggtttatatgttctctgtttctgatcaaggttgatcctgagatcaggagtttgggctgcgactgctgggaactagcctgagtcatacactgggccaacattccagtgttatcttcagtta

SEQ ID NO: 5599 - DNA, 122 bp, Homo sapiens
  misc_feature (61)..(62): /note="This region represents a CpG dinucleotide"
  misc_feature (61)..(61): /note="Nucleotide may be methylated to form 5-methylcytosine"
gtgtttctgtttcctgtaacatgtgcttttcttccaaacttaatctgacttggccaacaccggtacagttggagattcagcactgaaatagagtaacctctttctccccctatccaaactcc

SEQ ID NO: 5600 - DNA, 122 bp, Homo sapiens
  misc_feature (61)..(62): /note="This region represents a CpG dinucleotide"
  misc_feature (61)..(61): /note="Nucleotide may be methylated to form 5-methylcytosine"
tgcactgtgttattattagaagtcacaattctattgatactgatgagtcattcgtatcggcggaaaccaagaacttccatcaacatcatgttacacacagtcactgtggcttttctttatta

SEQ ID NO: 5601 - DNA, 122 bp, Homo sapiens
  misc_feature (61)..(62): /note="This region represents a CpG dinucleotide"
  misc_feature (61)..(61): /note="Nucleotide may be methylated to form 5-methylcytosine"
gatgctgtgcttttgctgatgtttggttcaacccagctgtgcactcacatgcagtccctccgtgagctcatagctttggttctgtctcagtgaggccctcctacagccttcctgacacagac

SEQ ID NO: 5602 - DNA, 122 bp, Homo sapiens
  misc_feature (61)..(62): /note="This region represents a CpG dinucleotide"
  misc_feature (61)..(61): /note="Nucleotide may be methylated to form 5-methylcytosine"
aaactcctaagtgccaagctgtactgcttctcccaaagcaaacagcctaaggagtatgtccgccccagggccctccattgcttagctgagtatgggactcagctgcagttaggagcctcacc

SEQ ID NO: 5603 - DNA, 122 bp, Homo sapiens
  misc_feature (61)..(62): /note="This region represents a CpG dinucleotide"
  misc_feature (61)..(61): /note="Nucleotide may be methylated to form 5-methylcytosine"
tcgcagctccctgaatattcctgtgctcccccacatttccagtccctttacagttaaagccgtgtgacttgtttgagccaatagagtggaagtggaagagaagtatgtcactgcgagactga

SEQ ID NO: 5604 - DNA, 122 bp, Homo sapiens
  misc_feature (61)..(62): /note="This region represents a CpG dinucleotide"
  misc_feature (61)..(61): /note="Nucleotide may be methylated to form 5-methylcytosine"
caagtagttccgcaaaactttgagccccgttcccattttcttttggcctagaattgtgaacgtattgttgatttcggcctttttttccccccgtcgcgagaatgtcttgttttgcctttagt

SEQ ID NO: 5605 - DNA, 122 bp, Homo sapiens
  misc_feature (61)..(62): /note="This region represents a CpG dinucleotide"
  misc_feature (61)..(61): /note="Nucleotide may be methylated to form 5-methylcytosine"
ctctcccacccctcactcttctggctcctctgagtttaaattagtcatttccccagcacccgccatgccctcctgggccactgagtcggcacacgccgtctctctgcctgccatgtctctgg

SEQ ID NO: 5606 - DNA, 122 bp, Homo sapiens
  misc_feature (61)..(62): /note="This region represents a CpG dinucleotide"
  misc_feature (61)..(61): /note="Nucleotide may be methylated to form 5-methylcytosine"
agggcaatttgcaaaggcccgcctagaccggctttccattggtggaagcgggaacacctccgctctccataggctcacggctgcgcccatcgcggctgctgctagagctccggtcacccact

SEQ ID NO: 5607 - DNA, 122 bp, Homo sapiens
  misc_feature (61)..(62): /note="This region represents a CpG dinucleotide"
  misc_feature (61)..(61): /note="Nucleotide may be methylated to form 5-methylcytosine"
tccctgaagccccgtgtgcgtggtggtggccagcctgagggatttgggtcgggcagctcacgacgaccctgaggctttgtcatgctgcagtctctgctgtcaagagacacagaggaagaaat

SEQ ID NO: 5608 - DNA, 122 bp, Homo sapiens
  misc_feature (61)..(62): /note="This region represents a CpG dinucleotide"
  misc_feature (61)..(61): /note="Nucleotide may be methylated to form 5-methylcytosine"
cgcagcgtggagggcttcgaaaacgggggtgggggcgcccaagagctcagtgcccagccccgggatcgcctcctcccctcaggacccgcgagccctcggtgccgaggacgctcgagtggggc

SEQ ID NO: 5609 - DNA, 122 bp, Homo sapiens
  misc_feature (61)..(62): /note="This region represents a CpG dinucleotide"
  misc_feature (61)..(61): /note="Nucleotide may be methylated to form 5-methylcytosine"
gcctttggcatttatgtttaaaacgacaccacctgctaagtaacaaacactcttcttaatcgcggtggcaaaaacgtatccgtcccgtgtgtgtttgtttttacccttccgctacactctta

SEQ ID NO: 5610 - DNA, 122 bp, Homo sapiens
  misc_feature (61)..(62): /note="This region represents a CpG dinucleotide"
  misc_feature (61)..(61): /note="Nucleotide may be methylated to form 5-methylcytosine"
ccagaatgttccaacatagatatggaggctccgaggcagagtgatctggtaaattgaacacgacctcagtcttagatcccagatgtaaggataagtctcaaccagtctccccagccttactg

SEQ ID NO: 5611 - DNA, 122 bp, Homo sapiens
  misc_feature (61)..(62): /note="This region represents a CpG dinucleotide"
  misc_feature (61)..(61): /note="Nucleotide may be methylated to form 5-methylcytosine"
gtagtgactggcctccctgtagaattgtatgcgcaagtggtctctgattaaagctgcccacgtgtcatatttggtaagtgtcgatatctgcttttgactgtgctttgccatactcagatcca

SEQ ID NO: 5612 - DNA, 122 bp, Homo sapiens
  misc_feature (61)..(62): /note="This region represents a CpG dinucleotide"
  misc_feature (61)..(61): /note="Nucleotide may be methylated to form 5-methylcytosine"
aattttttcaaaaagacacctctgaaccccgcaaacacaatggaaacggctgggagatcccgccttgcgccgggggggccatttggcccgtgacattgtgtttatttgtatttttagcaaga

SEQ ID NO: 5613 - DNA, 122 bp, Homo sapiens
  misc_feature (61)..(62): /note="This region represents a CpG dinucleotide"
  misc_feature (61)..(61): /note="Nucleotide may be methylated to form 5-methylcytosine"
ccaagtggaaactgagttaccccgtgaagaagacgagttctatttatggtcagaatgccacgctcaagggccagtgaaggcctgtgggcttttctgaatatttctctaaggtcttctaggga

SEQ ID NO: 5614 - DNA, 122 bp, Homo sapiens
  misc_feature (61)..(62): /note="This region represents a CpG dinucleotide"
  misc_feature (61)..(61): /note="Nucleotide may be methylated to form 5-methylcytosine"
aattaataaataaataaaacggacattccctcacacgtgccaagagtgaacacaccagctcggagcaccccagagacatcagagacagagcacatctctgacctccagctccaccccatcca

SEQ ID NO: 5615 - DNA, 122 bp, Homo sapiens
  misc_feature (61)..(62): /note="This region represents a CpG dinucleotide"
  misc_feature (61)..(61): /note="Nucleotide may be methylated to form 5-methylcytosine"
gagtgaggccagcaggggtgggtctccaagtgcttcctttgacagctgctctggatgggacgtggcttggggtgggtgagaacccttggctgagtttggattttcctgcagggtttcattgg

SEQ ID NO: 5616 - DNA, 122 bp, Homo sapiens
  misc_feature (61)..(62): /note="This region represents a CpG dinucleotide"
  misc_feature (61)..(61): /note="Nucleotide may be methylated to form 5-methylcytosine"
tcaggtgatctttgctctccttgctattattattcatttcataatttgtgctctgaacaacgaaaggaagtaaatgacattgtcctaatttaagtggtacagacactgaagcacagaaatgt

SEQ ID NO: 5617 - DNA, 122 bp, Homo sapiens
  misc_feature (61)..(62): /note="This region represents a CpG dinucleotide"
  misc_feature (61)..(61): /note="Nucleotide may be methylated to form 5-methylcytosine"
ataatcagataaagactgttcacagtagaaaccagtctaaaatttatgttcttaccattacgaagccatggggtccaaacaggcactcttagcacaagagtagaaaggaaaaagtattttca

SEQ ID NO: 5618 - DNA, 122 bp, Homo sapiens
  misc_feature (61)..(62): /note="This region represents a CpG dinucleotide"
  misc_feature (61)..(61): /note="Nucleotide may be methylated to form 5-methylcytosine"
ttaaaattgcaacaataaatgtatatatttatacctgacagaatttgaatatataaagcacgtaagaaaattgtgctgccagttgcatctagaacgctcacctattcttgaaagaaaatatt

SEQ ID NO: 5619 - DNA, 122 bp, Homo sapiens
  misc_feature (61)..(62): /note="This region represents a CpG dinucleotide"
  misc_feature (61)..(61): /note="Nucleotide may be methylated to form 5-methylcytosine"
tttatctacacacataggccccagatttagcccagtttgctgatccctggctgtatatgacgtgagaatttggatcagtgaatttattatttctacctaaataagttggggaactaaatgtt

SEQ ID NO: 5620 - DNA, 122 bp, Homo sapiens
  misc_feature (61)..(62): /note="This region represents a CpG dinucleotide"
  misc_feature (61)..(61): /note="Nucleotide may be methylated to form 5-methylcytosine"
tcttgggaaatctagacattgactcatcacaaaacaatgacctcggacctttaacttacacgtatacaaaaattaactcaaaatggatccaaaatctaacataaaagtgaaaaccctaaaac

SEQ ID NO: 5621 - DNA, 122 bp, Homo sapiens
  misc_feature (61)..(62): /note="This region represents a CpG dinucleotide"
  misc_feature (61)..(61): /note="Nucleotide may be methylated to form 5-methylcytosine"
attttatgcctacaacaaatcagattattcttacccaacaaaagcaaacaaaaaatttaacgtgttgttttttgacagaaaacttctgagaggttcagcaaattgagagtaaatgagtgtac

SEQ ID NO: 5622 - DNA, 122 bp, Homo sapiens
  misc_feature (61)..(62): /note="This region represents a CpG dinucleotide"
  misc_feature (61)..(61): /note="Nucleotide may be methylated to form 5-methylcytosine"
gggaggaaagcaaaccaggggagcagctgctgggccccagggctgggcctacagagctgacgcaggtgcaactaggcaaagaacattccagttcctccaaggccccgctaggatcattccat

SEQ ID NO: 5623 - DNA, 122 bp, Homo sapiens
  misc_feature (61)..(62): /note="This region represents a CpG dinucleotide"
  misc_feature (61)..(61): /note="Nucleotide may be methylated to form 5-methylcytosine"
attatttaaatgagcaatgtactactacacatacattgtgcaattgcatcatatcctttgcgcaatctattctgcagagtcttcagcaaccagggcgtttgtgtcctgtagacaggctagga

SEQ ID NO: 5624 - DNA, 122 bp, Homo sapiens
  misc_feature (61)..(62): /note="This region represents a CpG dinucleotide"
  misc_feature (61)..(61): /note="Nucleotide may be methylated to form 5-methylcytosine"
aaaaacaagctattgggtaattgctgttttgagacaggtgtcatgtttacccaatgacaacgactcctaataagtacctttcaattgtcccctcagtcttctaatgaaagtatgtgtatgta

SEQ ID NO: 5625 - DNA, 122 bp, Homo sapiens
  misc_feature (61)..(62): /note="This region represents a CpG dinucleotide"
  misc_feature (61)..(61): /note="Nucleotide may be methylated to form 5-methylcytosine"
attattccctttgttactgtacatttccaagatagattatttgattagcaaaaatgcctgcgcaatgcattcaggttattgccaggtatggacactactagaatgacagtgagtaagagaga

SEQ ID NO: 5626 - DNA, 122 bp, Homo sapiens
  misc_feature (61)..(62): /note="This region represents a CpG dinucleotide"
  misc_feature (61)..(61): /note="Nucleotide may be methylated to form 5-methylcytosine"
atcttgtaactccctcttaatttacaatctgtttgctgtttcagatgtttggaaagaaaacgccttagtcagcagccctagaaagcctcattttcagtaaaatctggacacttcttttccac

SEQ ID NO: 5627 - DNA, 122 bp, Homo sapiens
  misc_feature (61)..(62): /note="This region represents a CpG dinucleotide"
  misc_feature (61)..(61): /note="Nucleotide may be methylated to form 5-methylcytosine"
gccttcttttgttggtggtcacctccttctctagcttcctgctctgtgcacactcataggcgcaaccagatacttgggaacacagatgccctcaagtgcagatttgccaggtacagccttgc

SEQ ID NO: 5628 - DNA, 122 bp, Homo sapiens
  misc_feature (61)..(62): /note="This region represents a CpG dinucleotide"
  misc_feature (61)..(61): /note="Nucleotide may be methylated to form 5-methylcytosine"
gatttattcatttctctttgattctctaagttagcttgcaataagctcgttggatcagtacggtaagctcattggatctcagtaatttatggttgtttgtaaggcagtaagcaggtaatata

SEQ ID NO: 5629 - DNA, 122 bp, Homo sapiens
  misc_feature (61)..(62): /note="This region represents a CpG dinucleotide"
  misc_feature (61)..(61): /note="Nucleotide may be methylated to form 5-methylcytosine"
gaaaggcggctgctaactgcccactctgatgctagcagtttgctttattttttacaagcacgtgagtgagaactttcccaaacctactcttctgtttctcagaacctactgtttcatttaaa

SEQ ID NO: 5630 - DNA, 122 bp, Homo sapiens
  misc_feature (61)..(62): /note="This region represents a CpG dinucleotide"
  misc_feature (61)..(61): /note="Nucleotide may be methylated to form 5-methylcytosine"
tcaggaggcacatgatgtcggcgtgcccagcaggggtgacggtgacgcccatggcctggccgaggtggtagccttttgctgctgtaaagcgactcgtgttccctttgtaattaataagtaat

SEQ ID NO: 5631 - DNA, 122 bp, Homo sapiens
  misc_feature (61)..(62): /note="This region represents a CpG dinucleotide"
  misc_feature (61)..(61): /note="Nucleotide may be methylated to form 5-methylcytosine"
tataagagaaaggtagagggctacttgagactcagacccacatggaataagaccatttgacgatggaggcatggagcttgaagtcacttagcccctaggcaaagaacacctgaagtcaccag

SEQ ID NO: 5632 - DNA, 122 bp, Homo sapiens
  misc_feature (61)..(62): /note="This region represents a CpG dinucleotide"
  misc_feature (61)..(61): /note="Nucleotide may be methylated to form 5-methylcytosine"
aaaaataacggctttcaagagcaatagtaaattctttttttttttaatggagttgtctatcggggttactgataattgtcaactgaacccttttgaaacacaggtttaaataaaccttttca

SEQ ID NO: 5633 - DNA, 122 bp, Homo sapiens
  misc_feature (61)..(62): /note="This region represents a CpG dinucleotide"
  misc_feature (61)..(61): /note="Nucleotide may be methylated to form 5-methylcytosine"
gctaccaggatagagagatgaccaaactctagaccgggaacaagtcgaacaagtcagtgacggagaagagctagccactatctctaggtcagagcaaagttctgggttcaatagaagtgcaa

SEQ ID NO: 5634 - DNA, 122 bp, Homo sapiens
  misc_feature (61)..(62): /note="This region represents a CpG dinucleotide"
  misc_feature (61)..(61): /note="Nucleotide may be methylated to form 5-methylcytosine"
caaatcaaggtgaggaaaggtctaaaatttaggagtactcctaaccccagtaatcatattcggcacttgccaaccacaacctccccacaccactcccgctttgcctctgtggttcactgatg

SEQ ID NO: 5635 - DNA, 122 bp, Homo sapiens
  misc_feature (61)..(62): /note="This region represents a CpG dinucleotide"
  misc_feature (61)..(61): /note="Nucleotide may be methylated to form 5-methylcytosine"
ttcctttaccagagtagccatgatgcactgattagcgaggcttggtttgtctgcaaattgcgtttactaagatacgtagtttgagaaccaaaagcagggaagaatgcagtgctacaccatta

SEQ ID NO: 5636 - DNA, 122 bp, Homo sapiens
  misc_feature (61)..(62): /note="This region represents a CpG dinucleotide"
  misc_feature (61)..(61): /note="Nucleotide may be methylated to form 5-methylcytosine"
gatgtgagatggacttgataacgcttaataatgttgtatgttgtatacatttgtgactgacgactgactttttaagactactgtttgcgagatattttgagatttttttccattaaagaaaa

SEQ ID NO: 5637 - DNA, 122 bp, Homo sapiens
  misc_feature (61)..(62): /note="This region represents a CpG dinucleotide"
  misc_feature (61)..(61): /note="Nucleotide may be methylated to form 5-methylcytosine"
gtcatgtgttccatcagtcatgtcgttcatcatcccaagcatgtccacgaagccacccgacgtttccagcatccccaagggggagacagccccagcctgcaccctgcagctgtgatgccatc

SEQ ID NO: 5638 - DNA, 122 bp, Homo sapiens
  misc_feature (61)..(62): /note="This region represents a CpG dinucleotide"
  misc_feature (61)..(61): /note="Nucleotide may be methylated to form 5-methylcytosine"
ctggttgcctgggctgggcattttgtcaattgctccatcactaccagtgggtttgctgggcgtggggccatggaagcaagttttttctttctttcctactggtcatgggagtttagtcattt

SEQ ID NO: 5639 - DNA, 122 bp, Homo sapiens
  misc_feature (61)..(62): /note="This region represents a CpG dinucleotide"
  misc_feature (61)..(61): /note="Nucleotide may be methylated to form 5-methylcytosine"
agttaaattaaaagcactttccaaacaaacctaggaaagtattaaagttagggactcccacgaaatgttactccttaattgtggcttggataatagcaggaagaactgcagacaggaacaca

SEQ ID NO: 5640 - DNA, 122 bp, Homo sapiens
  misc_feature (61)..(62): /note="This region represents a CpG dinucleotide"
  misc_feature (61)..(61): /note="Nucleotide may be methylated to form 5-methylcytosine"
gactcggacgtcccagggctgcgttaactgccaggtgctttacaaacggggtgactttgacgtttagccccacggttagaacagaaaacccgtctgccatgagaatcgagagagtctgaggc

SEQ ID NO: 5641 - DNA, 122 bp, Homo sapiens
  misc_feature (61)..(62): /note="This region represents a CpG dinucleotide"
  misc_feature (61)..(61): /note="Nucleotide may be methylated to form 5-methylcytosine"
cgtttgatactacttatcttagttttaatatccagatttatttagtgtttgtttttcctacgagaaagactcacatggagcgcctaaagttgggcagtttcccaccatacctacacagagac

SEQ ID NO: 5642 - DNA, 122 bp, Homo sapiens
  misc_feature (61)..(62): /note="This region represents a CpG dinucleotide"
  misc_feature (61)..(61): /note="Nucleotide may be methylated to form 5-methylcytosine"
aaagacggacctctcctgaggaggaagaaggaattccacctccagatggtcctcgggctccgccacagcatcagctttcctcggggcctccagccacctgggctcctctatcagattccggg

SEQ ID NO: 5643 - DNA, 122 bp, Homo sapiens
  misc_feature (61)..(62): /note="This region represents a CpG dinucleotide"
  misc_feature (61)..(61): /note="Nucleotide may be methylated to form 5-methylcytosine"
gggagtggatggaacacgggatgtgtccctccctccagcttgccacagcttgctcctgagcgactcctatatatggaaaagcgaaagtgcctgaaaaatcatgtgagaaaattggaggagtc

SEQ ID NO: 5644 - DNA, 122 bp, Homo sapiens
  misc_feature (61)..(62): /note="This region represents a CpG dinucleotide"
  misc_feature (61)..(61): /note="Nucleotide may be methylated to form 5-methylcytosine"
gcaatgtagcagttcaaataactcctcctttggaggaagggcaaggaagcagaagagaaccgctgaaggattcagcaatagcactaggtagcagtctcatgtaaccaagtttaacccacagt

SEQ ID NO: 5645 - DNA, 122 bp, Homo sapiens
  misc_feature (61)..(62): /note="This region represents a CpG dinucleotide"
  misc_feature (61)..(61): /note="Nucleotide may be methylated to form 5-methylcytosine"
tctgctctgggggccctccacagcccagctccaggaaggtgactgcttcctggtttgagacgtattattaaactgtaatcatactgtgcatggagtcagccaaagcagtggctattaatagg

SEQ ID NO: 5646 - DNA, 122 bp, Homo sapiens
  misc_feature (61)..(62): /note="This region represents a CpG dinucleotide"
  misc_feature (61)..(61): /note="Nucleotide may be methylated to form 5-methylcytosine"
cctgaaacttctttcgttctggcttatcagttgtttcagggcgatgtattactcagccaccgcctgtgaagtgaaccagaacaatttgaggttaattcacctctcccaacaatcataaaagt

SEQ ID NO: 5647 - DNA, 122 bp, Homo sapiens
  misc_feature (61)..(62): /note="This region represents a CpG dinucleotide"
  misc_feature (61)..(61): /note="Nucleotide may be methylated to form 5-methylcytosine"
aaggttcatgcatatggactgcatctcatgcatgtacttaaaattatgggatggaggcaacgcacaagcacacaagggccaaagtaactaagcagtctatcaatcaaaaggcagatgctggc

SEQ ID NO: 5648 - DNA, 122 bp, Homo sapiens
  misc_feature (61)..(62): /note="This region represents a CpG dinucleotide"
  misc_feature (61)..(61): /note="Nucleotide may be methylated to form 5-methylcytosine"
ctacttctacctgttaatagtgatatctaaaaatatctttttaatttgcaaagccatgtacgtctgccacatgtgattaccaagaaggagccggtttcctgcctgaaggttttggtggttaa

SEQ ID NO: 5649 - DNA, 122 bp, Homo sapiens
  misc_feature (61)..(62): /note="This region represents a CpG dinucleotide"
  misc_feature (61)..(61): /note="Nucleotide may be methylated to form 5-methylcytosine"
ctcctgactcccagtcaggaaacagcataaccaagtatcctccattaggacagattgtatcgtgacagaggaaacacattactcttcaactttatcaccagggtaataaagacaggcaataa

SEQ ID NO: 5650 - DNA, 122 bp, Homo sapiens
  misc_feature (61)..(62): /note="This region represents a CpG dinucleotide"
  misc_feature (61)..(61): /note="Nucleotide may be methylated to form 5-methylcytosine"
cagacaaatatgtgaggtgggtagcgcagtatattacttggctttgcagcaggaacaactcgcaaatctcagtggcttacaatgacaaagtttatttatcattcaggttttatgtaagctgt

SEQ ID NO: 5651 - DNA, 122 bp, Homo sapiens
  misc_feature (61)..(62): /note="This region represents a CpG dinucleotide"
  misc_feature (61)..(61): /note="Nucleotide may be methylated to form 5-methylcytosine"
acacctgccttcatcccaccacattcttcttcattgacctccaagggctctacagctgcacgtgttggataaatgccagttccccagcttgtaacccaaggagtcatgagtcagagccaccc

SEQ ID NO: 5652 - DNA, 122 bp, Homo sapiens
  misc_feature (61)..(62): /note="This region represents a CpG dinucleotide"
  misc_feature (61)..(61): /note="Nucleotide may be methylated to form 5-methylcytosine"
caatcttgtcttaagctattaataaaaaacatgtgcactatcatatcacagttgggagggcggggtggggattgttacattttgttacattttgttagctgtatttcaacatactggtttcc

SEQ ID NO: 5653 - DNA, 122 bp, Homo sapiens
  misc_feature (61)..(62): /note="This region represents a CpG dinucleotide"
  misc_feature (61)..(61): /note="Nucleotide may be methylated to form 5-methylcytosine"
ctcgatctcctgacctcgtgatccgcccatctcggcctcccaaagtgcagggattacaggcgtgagccaccaagcccggccagcccgtgtagattctattgccagacccaactattgtttct

SEQ ID NO: 5654 - DNA, 122 bp, Homo sapiens
  misc_feature (61)..(62): /note="This region represents a CpG dinucleotide"
  misc_feature (61)..(61): /note="Nucleotide may be methylated to form 5-methylcytosine"
gcgagcccagcactcagcggaacctgtagaagcgtcgggggttgccccgcttctgcgaaccgccctgggatgcgaggttcagcgtcactatctcatcctgggaaaggatgagatccgggtgg

SEQ ID NO: 5655 - DNA, 122 bp, Homo sapiens
  misc_feature (61)..(62): /note="This region represents a CpG dinucleotide"
  misc_feature (61)..(61): /note="Nucleotide may be methylated to form 5-methylcytosine"
ttacctttgtcagaacattccccaacataaagagatgatttaaagcctgattgacagccacgaatatggcaaatatcaataacaggggtttaactgttctttaggttttttttttttttact

SEQ ID NO: 5656 - DNA, 122 bp, Homo sapiens
  misc_feature (61)..(62): /note="This region represents a CpG dinucleotide"
  misc_feature (61)..(61): /note="Nucleotide may be methylated to form 5-methylcytosine"
tgttgcaactcccctgtctggataattcagctctgtctgagcagtggttcaaggagaacccgctgggtggttagaatcagcttcactttcaaagggcctacaatgtcctcattaatttcttc

SEQ ID NO: 5657 - DNA, 122 bp, Homo sapiens
  misc_feature (61)..(62): /note="This region represents a CpG dinucleotide"
  misc_feature (61)..(61): /note="Nucleotide may be methylated to form 5-methylcytosine"
aagacagggtggactcttcttaggaattttttttaaaacatcaaatcctagagtcataaacggcttgtttctaaatcacattactggtatcttggaacagcaagggtggtgaaaatatagca

SEQ ID NO: 5658 - DNA, 122 bp, Homo sapiens
  misc_feature (61)..(62): /note="This region represents a CpG dinucleotide"
  misc_feature (61)..(61): /note="Nucleotide may be methylated to form 5-methylcytosine"
ccaggaaagggaggaaagccctgtccctgcctgagcctgtgaacccagcgaagaggcagtcgggctgattttacatgcacctctgcacttagagggatcagggcgttctcgcatgaaatccc

SEQ ID NO: 5659 - DNA, 122 bp, Homo sapiens
  misc_feature (61)..(62): /note="This region represents a CpG dinucleotide"
  misc_feature (61)..(61): /note="Nucleotide may be methylated to form 5-methylcytosine"
cacttgaaccagagaggcggaggctgcagtgagctgctatcacaccattgcaatccagcccgggtgacagagtgtgactctgcctcaaaaaaaaataaaaataaaaaacatgctattattct

SEQ ID NO: 5660 - DNA, 122 bp, Homo sapiens
  misc_feature (61)..(62): /note="This region represents a CpG dinucleotide"
  misc_feature (61)..(61): /note="Nucleotide may be methylated to form 5-methylcytosine"
cgtgaattgtcttggacgcagcagcagcgttgggcgttgaattcactttgccgggcacctcgcgggtctgatgtcccacgtgtggtaagggagacacagctcctgggaagttcagtgcctct

SEQ ID NO: 5661 - DNA, 122 bp, Homo sapiens
  misc_feature (61)..(62): /note="This region represents a CpG dinucleotide"
  misc_feature (61)..(61): /note="Nucleotide may be methylated to form 5-methylcytosine"
gacaggtgtgagtcaccatgcccagacacattcatattttagtttctaaagatcagtgaacgtttcaaatatcaagatcccttttaagtcaaataatatcctcaacaatcacatgataataa

SEQ ID NO: 5662 - DNA, 122 bp, Homo sapiens
  misc_feature (61)..(62): /note="This region represents a CpG dinucleotide"
  misc_feature (61)..(61): /note="Nucleotide may be methylated to form 5-methylcytosine"
tattataagctactgctcactgtgagctctgtgctgtgctgggtagttctctcctgttatcgcatttgcttaattgcacaactaatgtttactcagtgtttggtacttcttctaaatgcagc

SEQ ID NO: 5663 - DNA, 122 bp, Homo sapiens
  misc_feature (61)..(62): /note="This region represents a CpG dinucleotide"
  misc_feature (61)..(61): /note="Nucleotide may be methylated to form 5-methylcytosine"
aacttgattcttacctttctgtttcttcctataaagtaaatgggcttaaaattcagctcccgtagggaattttccaaaaagagctttgtgggggacggaaaaaggcttcttggtggtcacag

SEQ ID NO: 5664 - DNA, 122 bp, Homo sapiens
  misc_feature (61)..(62): /note="This region represents a CpG dinucleotide"
  misc_feature (61)..(61): /note="Nucleotide may be methylated to form 5-methylcytosine"
gactaagacttcttaccttcctttcattgttttttacctaagctctaggcagtctccagacgcagaaatggtgtatgaagcagttttgctatttggaataaaagtgctttgttacgtaaggc

SEQ ID NO: 5665 - DNA, 122 bp, Homo sapiens
  misc_feature (61)..(62): /note="This region represents a CpG dinucleotide"
  misc_feature (61)..(61): /note="Nucleotide may be methylated to form 5-methylcytosine"
ttaaaagaagtcaattatccctcttatgactgattcataatttagccataaggagctggacgttacttcattctgacaatgagccatgatccctttgttaggccaagtttagacaaggaatc

SEQ ID NO: 5666 - DNA, 122 bp, Homo sapiens
  misc_feature (61)..(62): /note="This region represents a CpG dinucleotide"
  misc_feature (61)..(61): /note="Nucleotide may be methylated to form 5-methylcytosine"
gcggtcatattgttcctcataaactgaatattgacctttatctcacccctgtttttgattcgttttccttgtttggattctaatctaaaccaccttaaagagaagaaaaaaaaattggctgt

SEQ ID NO: 5667 - DNA, 122 bp, Homo sapiens
  misc_feature (61)..(62): /note="This region represents a CpG dinucleotide"
  misc_feature (61)..(61): /note="Nucleotide may be methylated to form 5-methylcytosine"
tatttagatcctctgtgctctagggagaaggcagtgtctcagctccagccgtggcttactcgctgtaagacctgggccagatgatgtaatctctgcatgtctcagtggctcatcaaaaaaaa

SEQ ID NO: 5668 - DNA, 122 bp, Homo sapiens
  misc_feature (61)..(62): /note="This region represents a CpG dinucleotide"
  misc_feature (61)..(61): /note="Nucleotide may be methylated to form 5-methylcytosine"
tctttttctgtgtgaatacttccattgtttaagtgttcgttccagtcctcaccatgaggtcggctcttttgtccccaagtggacatttaaaatgcaagtcccggccaggggtggtggctcat

SEQ ID NO: 5669 - DNA, 122 bp, Homo sapiens
  misc_feature (61)..(62): /note="This region represents a CpG dinucleotide"
  misc_feature (61)..(61): /note="Nucleotide may be methylated to form 5-methylcytosine"
tgttgtcactatttagtacgtttatccaatagtgttaagatgagcgtgtctacccaaattcggtgcagagctcttaggcaatgtaaataaactactttgaagattcatgtgttcatatgaag

SEQ ID NO: 5670 - DNA, 122 bp, Homo sapiens
  misc_feature (61)..(62): /note="This region represents a CpG dinucleotide"
  misc_feature (61)..(61): /note="Nucleotide may be methylated to form 5-methylcytosine"
ggaaaaaaaaaccagctctcttcctaggagcaggcttgatgggactggctttctcctctgcgcagtttgatttttaaggtggaatgctaagaatctttgtgaaggtagtattaactcatgct

SEQ ID NO: 5671 - DNA, 122 bp, Homo sapiens
  misc_feature (61)..(62): /note="This region represents a CpG dinucleotide"
  misc_feature (61)..(61): /note="Nucleotide may be methylated to form 5-methylcytosine"
ccacccgtccctttggtagcggcagtcacgtgacagactccggggtaaggcagatgcccacgtgatcctggcctgcagttgggtggctgcggtgagatacctgggttcctgaagggcgggtg

SEQ ID NO: 5672 - DNA, 122 bp, Homo sapiens
  misc_feature (61)..(62): /note="This region represents a CpG dinucleotide"
  misc_feature (61)..(61): /note="Nucleotide may be methylated to form 5-methylcytosine"
aggcagagacggggtctcggggcagttctgaggatgctgggtgcacagcgggggcctcgccggcaggaatcacttatgctctctcctgggccaagctttgtggatgcccagcctggggccgc

SEQ ID NO: 5673 - DNA, 122 bp, Homo sapiens
  misc_feature (61)..(62): /note="This region represents a CpG dinucleotide"
  misc_feature (61)..(61): /note="Nucleotide may be methylated to form 5-methylcytosine"
tcaggggacagggtaggggtggggactatgggacagggctcagtgctggacccaggagggcgccttgcgcaaggttttctgatgcaactggctgagtgcttcagcattccacccccaccccc

SEQ ID NO: 5674 - DNA, 122 bp, Homo sapiens
  misc_feature (61)..(62): /note="This region represents a CpG dinucleotide"
  misc_feature (61)..(61): /note="Nucleotide may be methylated to form 5-methylcytosine"
tcggtgccacagcctaggcttagcgaaaccacgaggataaaaataggcccttctgttctccgcaccgtgagctttgtgactgatccgaggcggcgagcgggggcactgcactgctgtggcgg

SEQ ID NO: 5675 - DNA, 122 bp, Homo sapiens
  misc_feature (61)..(62): /note="This region represents a CpG dinucleotide"
  misc_feature (61)..(61): /note="Nucleotide may be methylated to form 5-methylcytosine"
ttgtctctctgctcccgcccccaaaggcgctacccattggccgctgggttcctctgttctcgctctaattggcctcgttaccgaaaagctccaaccaatgacctctccgtgtctgtctccct

SEQ ID NO: 5676 - DNA, 122 bp, Homo sapiens
  misc_feature (61)..(62): /note="This region represents a CpG dinucleotide"
  misc_feature (61)..(61): /note="Nucleotide may be methylated to form 5-methylcytosine"
acaggaaaccccacaaacccacaaactgcatgtgtgctgtgattcattctattgatgatacgatatgaatagacttcgctgaagaacttcttgatttggaaaaggtagtgcagcacataccg

SEQ ID NO: 5677 - DNA, 122 bp, Homo sapiens
  misc_feature (61)..(62): /note="This region represents a CpG dinucleotide"
  misc_feature (61)..(61): /note="Nucleotide may be methylated to form 5-methylcytosine"
agggtggaggccgcaggacctgtggtgagtggtgagaggtaccccccgccctggcacacacggtcttggagctgtccctcagcacaccacaccaggttggcctgctgacttgctgtgactcc

SEQ ID NO: 5678 - DNA, 122 bp, Homo sapiens
  misc_feature (61)..(62): /note="This region represents a CpG dinucleotide"
  misc_feature (61)..(61): /note="Nucleotide may be methylated to form 5-methylcytosine"
acttcactcctcagatccatgtggacttgcagggctggagccctgtctcagtgtccaagacgtgtgtcttgtgcctgggaactgaggactgcttgttctctgcttcctgcttcagctggatg

SEQ ID NO: 5679 - DNA, 122 bp, Homo sapiens
  misc_feature (61)..(62): /note="This region represents a CpG dinucleotide"
  misc_feature (61)..(61): /note="Nucleotide may be methylated to form 5-methylcytosine"
aatgctttcagtgctttggcagataatttacaggcctgccttaaccttcattctaaagttcgtctttcacagatattgaagatccatcagcgatgagacattaggaccatttgtgccttttc

SEQ ID NO: 5680 - DNA, 122 bp, Homo sapiens
  misc_feature (61)..(62): /note="This region represents a CpG dinucleotide"
  misc_feature (61)..(61): /note="Nucleotide may be methylated to form 5-methylcytosine"
gttatcctggccttgactcattactgttccggagacctaaacgcaccctgagccaccagacgtgggtgttaacacctgaggtcaaccccctgacgcttccggctgctctggaggaagctggt

SEQ ID NO: 5681 - DNA, 122 bp, Homo sapiens
  misc_feature (61)..(62): /note="This region represents a CpG dinucleotide"
  misc_feature (61)..(61): /note="Nucleotide may be methylated to form 5-methylcytosine"
gccttctgttggaatctatttggattgtgtgtaaaacaaagccccatcatttttaggcctcgaagatgaaaggcttccttccaagaaaagcagcaatcaagtgaataggtgctcgtagatac

SEQ ID NO: 5682 - DNA, 122 bp, Homo sapiens
  misc_feature (61)..(62): /note="This region represents a CpG dinucleotide"
  misc_feature (61)..(61): /note="Nucleotide may be methylated to form 5-methylcytosine"
gtcagctcagcgggctcccaagtgtgattacactaccacttcatagaattcaattaaacccgggacggggcatcggcgaatcactggaggagtatgaagttgagatgttttctgctttctcg

SEQ ID NO: 5683 - DNA, 122 bp, Homo sapiens
  misc_feature (61)..(62): /note="This region represents a CpG dinucleotide"
  misc_feature (61)..(61): /note="Nucleotide may be methylated to form 5-methylcytosine"
tgccagtgtccccaactccacccagtgaagtagggctggtattactaaccctggagtcagcgctagcaaacaagggctcagaggtcaagggctggaagccaggtctccagactcccaggcca

SEQ ID NO: 5684 - DNA, 122 bp, Homo sapiens
  misc_feature (61)..(62): /note="This region represents a CpG dinucleotide"
  misc_feature (61)..(61): /note="Nucleotide may be methylated to form 5-methylcytosine"
tgctctctgcctgcaggcatttctgagtgtcttggcctcctgaggctggggaagggaggacgtgaactctctgttgaatgtgggaggatgccgggatagcttgaaaaggacgacaacgccac

SEQ ID NO: 5685 - DNA, 122 bp, Homo sapiens
  misc_feature (61)..(62): /note="This region represents a CpG dinucleotide"
  misc_feature (61)..(61): /note="Nucleotide may be methylated to form 5-methylcytosine"
acccaggttgtagaacactgatgtatgatgggaagccattgagtgctcagccccataatacgacctgactcagagtatcatgggattactgtggctgtcatgttgtagatggtgtagaaagg

SEQ ID NO: 5686 - DNA, 122 bp, Homo sapiens
  misc_feature (61)..(62): /note="This region represents a CpG dinucleotide"
  misc_feature (61)..(61): /note="Nucleotide may be methylated to form 5-methylcytosine"
gcctagttaggcttccagtgaccccctaatttgcctggaaataatgcagagaccacctaccgtgtgcaaagcagtgtgacatttagaacaaaggtggcagaatctcaatgttcaaaagaaca

SEQ ID NO: 5687 - DNA, 122 bp, Homo sapiens
  misc_feature (61)..(62): /note="This region represents a CpG dinucleotide"
  misc_feature (61)..(61): /note="Nucleotide may be methylated to form 5-methylcytosine"
atttgcagtttcctttttcttttcctgttcctgtgtacatgctcttctgctctgagttcacgtctctgtgtttttggtggcatagggagggttaggcaaacatgctttctttgtgaagcctt

SEQ ID NO: 5688 - DNA, 122 bp, Homo sapiens
  misc_feature (61)..(62): /note="This region represents a CpG dinucleotide"
  misc_feature (61)..(61): /note="Nucleotide may be methylated to form 5-methylcytosine"
ctagactgtgccagctattaaggtattgtctctcagctccaaatctaccctgttatgctccgctttgtgatgctggggcctggactccactaaaccccatttcacatttgccagctggatcc

SEQ ID NO: 5689 - DNA, 122 bp, Homo sapiens
  misc_feature (61)..(62): /note="This region represents a CpG dinucleotide"
  misc_feature (61)..(61): /note="Nucleotide may be methylated to form 5-methylcytosine"
cagcaggcgccgcttctgtgtccaccgagtcagctgggatccatgcagctggtggcttgtcggtggcaggccaaggcctgagtcatgtccccgtcacagccttcagtggagggctgacccac

SEQ ID NO: 5690 - DNA, 122 bp, Homo sapiens
  misc_feature (61)..(62): /note="This region represents a CpG dinucleotide"
  misc_feature (61)..(61): /note="Nucleotide may be methylated to form 5-methylcytosine"
tcttgattggctctgaaatcctccccattttcaaaagggatgcagtcaagcaggccaaagcgctccatgttagctaacaaatgtttgcaaatcataataatgtaggaagagaaccataaact

SEQ ID NO: 5691 - DNA, 122 bp, Homo sapiens
  misc_feature (61)..(62): /note="This region represents a CpG dinucleotide"
  misc_feature (61)..(61): /note="Nucleotide may be methylated to form 5-methylcytosine"
cttcccacccctgccagataagtaatccaatatagtcagggaggcattgttttagaataacgtggggagggttcagaagaccacatatctaaaacagtttctacatactgtgggctaaaaga

SEQ ID NO: 5692 - DNA, 122 bp, Homo sapiens
  misc_feature (61)..(62): /note="This region represents a CpG dinucleotide"
  misc_feature (61)..(61): /note="Nucleotide may be methylated to form 5-methylcytosine"
cttatttaccaaaacaggctgtgggctgggtttggcctgcaggtcatactttgctgacctcggttccaggaacctagtcatggaaaaagaagaagaaagaaccctaacaaaaggagaaaata

SEQ ID NO: 5693 - DNA, 122 bp, Homo sapiens
  misc_feature (61)..(62): /note="This region represents a CpG dinucleotide"
  misc_feature (61)..(61): /note="Nucleotide may be methylated to form 5-methylcytosine"
tccacaagctacccagtggctagagctctagtggctttcccataccttgctaggtctcttcgtaattggctggactcacctctgtatctttattaattcactggctggactccaacctcata

SEQ ID NO: 5694 - DNA, 122 bp, Homo sapiens
  misc_feature (61)..(62): /note="This region represents a CpG dinucleotide"
  misc_feature (61)..(61): /note="Nucleotide may be methylated to form 5-methylcytosine"
tatgctggcggggggtgctcttcatgcatgtgcgtgaatggccagggtgggcagagctgccggatgggttgggggtcaggaggggccctcctgaagccaaagtttatctttggaggtttccg

SEQ ID NO: 5695 - DNA, 122 bp, Homo sapiens
  misc_feature (61)..(62): /note="This region represents a CpG dinucleotide"
  misc_feature (61)..(61): /note="Nucleotide may be methylated to form 5-methylcytosine"
cagctgattggctgacacaggctgcatgactagtgcaggtccagtagcaattgccaggggcgtgccttgggcagatgagcttaagcgaggtcactaaattaatcatcagaaaggggtggtac

SEQ ID NO: 5696 - DNA, 122 bp, Homo sapiens
  misc_feature (61)..(62): /note="This region represents a CpG dinucleotide"
  misc_feature (61)..(61): /note="Nucleotide may be methylated to form 5-methylcytosine"
gtacttacctaatacacctcacatgacgtggttacgtaatgtgtgggggttgtacacctgcgctccaaatgtgctaagtcatgctgtgctggaagtcccagcctactcttgactaaagcaca

SEQ ID NO: 5697 - DNA, 122 bp, Homo sapiens
  misc_feature (61)..(62): /note="This region represents a CpG dinucleotide"
  misc_feature (61)..(61): /note="Nucleotide may be methylated to form 5-methylcytosine"
ctgggaaggaggggcccccgcagcagcagagcccacgtgatgtggggaaatcagtcagagcgcctgattccgagggagaaaccagctcagctcacacacgaacctatgaaaattctttattg

SEQ ID NO: 5698 - DNA, 122 bp, Homo sapiens
  misc_feature (61)..(62): /note="This region represents a CpG dinucleotide"
  misc_feature (61)..(61): /note="Nucleotide may be methylated to form 5-methylcytosine"
cacattggtattgtcagactcacaaattggactttggaattaatgaagtaaagtgaatgacggtctctttctgacattgggatggtatagagtgtgttacatctaacgtggaggggagatgg

SEQ ID NO: 5699 - DNA, 122 bp, Homo sapiens
  misc_feature (61)..(62): /note="This region represents a CpG dinucleotide"
  misc_feature (61)..(61): /note="Nucleotide may be methylated to form 5-methylcytosine"
aagtagagtcttagtccctgagggtggatcacgtgggctcccacacatctcctcctgctgcgagctgttcgtgctctgtcagcccctctgccagaggaaggtgtatcatacagtggtctgtg

SEQ ID NO: 5700 - DNA, 122 bp, Homo sapiens
  misc_feature (61)..(62): /note="This region represents a CpG dinucleotide"
  misc_feature (61)..(61): /note="Nucleotide may be methylated to form 5-methylcytosine"
ggttaaagctgtttttgatctccttatccaactcacatccattttcattattatcatccacgtaaagcaccttcactggtcccttttcaccaatttggtaagaaacctcaaatgggtcgatc

SEQ ID NO: 5701 - DNA, 122 bp, Homo sapiens
  misc_feature (61)..(62): /note="This region represents a CpG dinucleotide"
  misc_feature (61)..(61): /note="Nucleotide may be methylated to form 5-methylcytosine"
gagcacctgctcccggatgcctgaggtaggcgtcctccccgaagcacccctctcctcaatcgaggctgctgagcgcctgcaaggcctggctggaagccagctcgacctccagccttggaacc

SEQ ID NO: 5702 - DNA, 122 bp, Homo sapiens
  misc_feature (61)..(62): /note="This region represents a CpG dinucleotide"
  misc_feature (61)..(61): /note="Nucleotide may be methylated to form 5-methylcytosine"
cacagagtaagtctttctctatctgccaactttccgtagagcttcaccatgtgctcagaccgagatcaggggtgcaagctgaaagaaatctgaggcattgcacaccttcatgtaaaataagg

SEQ ID NO: 5703 - DNA, 122 bp, Homo sapiens
  misc_feature (61)..(62): /note="This region represents a CpG dinucleotide"
  misc_feature (61)..(61): /note="Nucleotide may be methylated to form 5-methylcytosine"
gttcccaccctcagcctagagtcaaggccagactagatcagcctaagcccagccacgccacgggtgcagcagtgaagagcaaatgccaactgtccatgacagtgactttcaaaggggcgtgt

SEQ ID NO: 5704 - DNA, 122 bp, Homo sapiens
  misc_feature (61)..(62): /note="This region represents a CpG dinucleotide"
  misc_feature (61)..(61): /note="Nucleotide may be methylated to form 5-methylcytosine"
gatcctctcgcctcggcctccctcccaaagtgttgggatcaccggcctgagccccctgcccggcctcgctctacgttttttaggcgcattctgaacgtgaagtgtatacactgaattctcac

SEQ ID NO: 5705 - DNA, 122 bp, Homo sapiens
  misc_feature (61)..(62): /note="This region represents a CpG dinucleotide"
  misc_feature (61)..(61): /note="Nucleotide may be methylated to form 5-methylcytosine"
aaagaggctcaaatgagcaggcttaatacaagtgctatatttcttcaagctttgattccacgttgattcttatacctgaagtcatcaatgagatccccaagttccatgaagtgtatgaccaa

SEQ ID NO: 5706 - DNA, 122 bp, Homo sapiens
  misc_feature (61)..(62): /note="This region represents a CpG dinucleotide"
  misc_feature (61)..(61): /note="Nucleotide may be methylated to form 5-methylcytosine"
aaataccagggtaaacacaatttgtgtgtgttgctcaaacgttgcataattctacaccctcgttatagagagattaagctcatttgaaggttgaggtcagtccctggtctgctaattaccca

SEQ ID NO: 5707 - DNA, 122 bp, Homo sapiens
  misc_feature (61)..(62): /note="This region represents a CpG dinucleotide"
  misc_feature (61)..(61): /note="Nucleotide may be methylated to form 5-methylcytosine"
gggagagggtaattagaggcccaggtgctggagttgccacctacctgcccctgcctgtctcgtgtcctggtgtggggctggccagctttgcctatcgtgccctgtattctaacactaatcct

SEQ ID NO: 5708 - DNA, 122 bp, Homo sapiens
  misc_feature (61)..(62): /note="This region represents a CpG dinucleotide"
  misc_feature (61)..(61): /note="Nucleotide may be methylated to form 5-methylcytosine"
ccaccccgcctcttttgcccccagaaaataaatctttccccagaccaacaatccacttcccggcctcacagcaacgggctcccggctcccgcacgtgactgccaactctttacgagatgagg

SEQ ID NO: 5709 - DNA, 122 bp, Homo sapiens
  misc_feature (61)..(62): /note="This region represents a CpG dinucleotide"
  misc_feature (61)..(61): /note="Nucleotide may be methylated to form 5-methylcytosine"
cacacttaggaaacacaaaagatcaagccttaccagttttgacatccagagacgggaggccgggctgtgcacttgctaacatgctgtgtcagcgagaagtcaaatgatgtacgtggaactgg

SEQ ID NO: 5710 - DNA, 122 bp, Homo sapiens
  misc_feature (61)..(62): /note="This region represents a CpG dinucleotide"
  misc_feature (61)..(61): /note="Nucleotide may be methylated to form 5-methylcytosine"
gacgatgacagtgtacatcaaagaaggccatgaaatacctttagaagccatgaggaatcacgagcaagccagaattaggagaaagcaaagtcaatagcaagagcagaaggaaggtaacataa

SEQ ID NO: 5711 - DNA, 122 bp, Homo sapiens
  misc_feature (61)..(62): /note="This region represents a CpG dinucleotide"
  misc_feature (61)..(61): /note="Nucleotide may be methylated to form 5-methylcytosine"
agaagctttaaaataaatcagcccttaaaaattcactttccggctgggtgcggtggctcacgcctgtaatcccagcactttgggaggccaaagcgggcggatcacttgagatcaggagttcg

SEQ ID NO: 5712 - DNA, 122 bp, Homo sapiens
  misc_feature (61)..(62): /note="This region represents a CpG dinucleotide"
  misc_feature (61)..(61): /note="Nucleotide may be methylated to form 5-methylcytosine"
tagcaagacttcgtttctacaaataatttttaaaaattagctgggtgtactgacaggcggcggtggtcccaggtacttgggagactgaggcacaaggactgcttgagcccagaaggtcaagg

SEQ ID NO: 5713 - DNA, 122 bp, Homo sapiens
  misc_feature (61)..(62): /note="This region represents a CpG dinucleotide"
  misc_feature (61)..(61): /note="Nucleotide may be methylated to form 5-methylcytosine"
aaaataaaaaaacccaaaaaaacaaataaatacagaataagaatcctacagatggaaaagcgttgaacagaaacatgccatgaaccactcagcaggagggggatcctactgaacagagaggc

SEQ ID NO: 5714 - DNA, 122 bp, Homo sapiens
  misc_feature (61)..(62): /note="This region represents a CpG dinucleotide"
  misc_feature (61)..(61): /note="Nucleotide may be methylated to form 5-methylcytosine"
caaggtgtgggcaaaagaacattattgcaatggtggtaatatgaggaaatgatgatatcacgttagaagtccaggagcaagtatgaatgttccccgaacagagaaactgtctgccttcaaat

SEQ ID NO: 5715 - DNA, 122 bp, Homo sapiens
  misc_feature (61)..(62): /note="This region represents a CpG dinucleotide"
  misc_feature (61)..(61): /note="Nucleotide may be methylated to form 5-methylcytosine"
atttttttttcttatataactctgccctaaaacatgctacccccctcctttccttagtaccgtaataactttctctaaaagaggaagcaacacttttgggttatctgtttttaaaagactcc

SEQ ID NO: 5716 - DNA, 122 bp, Homo sapiens
  misc_feature (61)..(62): /note="This region represents a CpG dinucleotide"
  misc_feature (61)..(61): /note="Nucleotide may be methylated to form 5-methylcytosine"
cagactcagtggcccacccaggggcatgagtaatgctgggagctgcaggctggcttcccacgctccctcctgggcctggcccccaggcctggctgactccatggggggcctggcagtatcac

SEQ ID NO: 5717 - DNA, 122 bp, Homo sapiens
  misc_feature (61)..(62): /note="This region represents a CpG dinucleotide"
  misc_feature (61)..(61): /note="Nucleotide may be methylated to form 5-methylcytosine"
tccttgccccatggtgctgggcgcccccagaagagcatgctggggtgagtacccctgcttcgccccctgccccgcgtcctgtccctgctcatctcttagggtattgactgggctctgcctct

SEQ ID NO: 5718 - DNA, 122 bp, Homo sapiens
  misc_feature (61)..(62): /note="This region represents a CpG dinucleotide"
  misc_feature (61)..(61): /note="Nucleotide may be methylated to form 5-methylcytosine"
gaactggaggatcagcttccctggtgagtcactcatatagctgtcaagttgtttagctctcggcaggaaacctcagttccctgcaggtgggctctgctaggcctagggctgctcaagtgtcc

SEQ ID NO: 5719 - DNA, 122 bp, Homo sapiens
  misc_feature (61)..(62): /note="This region represents a CpG dinucleotide"
  misc_feature (61)..(61): /note="Nucleotide may be methylated to form 5-methylcytosine"
ccactttccccccagtaacctccagggccaaagctcagctcctcttcctaagagcagactcgacagccagagtccttcctgccacctcaccaggggcactggccagcctcacctcagctggg

SEQ ID NO: 5720 - DNA, 122 bp, Homo sapiens
  misc_feature (61)..(62): /note="This region represents a CpG dinucleotide"
  misc_feature (61)..(61): /note="Nucleotide may be methylated to form 5-methylcytosine"
ccaatggcttactgcatgaatttggtctgttgagagcacagggccaggtgggagcctgcacgtacagattataaccttgactgaaacccaagtagggaaggtgataaatgcaattgccatta

SEQ ID NO: 5721 - DNA, 122 bp, Homo sapiens
  misc_feature (61)..(62): /note="This region represents a CpG dinucleotide"
  misc_feature (61)..(61): /note="Nucleotide may be methylated to form 5-methylcytosine"
ctggctaatttttgtatttttagtagagacggggttttaccatgttggccaggctggtctcgaactccaggcctcaggcaaactgcccgcctcggcttcccacagtgctgggattacaggca

SEQ ID NO: 5722 - DNA, 122 bp, Homo sapiens
  misc_feature (61)..(62): /note="This region represents a CpG dinucleotide"
  misc_feature (61)..(61): /note="Nucleotide may be methylated to form 5-methylcytosine"
tccctctgtgtatttattgaagagaaccgcttggtttcaggaagctgggcgcgggatatccgaagtgtggaggaaacagacaagtcagggtacagaggtgggggttgggcaggggcgcaggg

SEQ ID NO: 5723 - DNA, 122 bp, Homo sapiens
  misc_feature (61)..(62): /note="This region represents a CpG dinucleotide"
  misc_feature (61)..(61): /note="Nucleotide may be methylated to form 5-methylcytosine"
caaatttggcagctgaaatgcaagtctgaattatgtcatcttcctggtcatcagtgtcaccgtcctgtctgacagttcccttgcgggctccttttaccggtttattcagatcagagtcattt

SEQ ID NO: 5724 - DNA, 122 bp, Homo sapiens
  misc_feature (61)..(62): /note="This region represents a CpG dinucleotide"
  misc_feature (61)..(61): /note="Nucleotide may be methylated to form 5-methylcytosine"
aaaaaaagaaagaaagaaagaaaaagaaaaaaaaaaaaaagcccgctactaagacggagccggctctggaatagataccattagaaccacagtgtttctggaataaagatatctaatttcct

SEQ ID NO: 5725 - DNA, 122 bp, Homo sapiens
  misc_feature (61)..(62): /note="This region represents a CpG dinucleotide"
  misc_feature (61)..(61): /note="Nucleotide may be methylated to form 5-methylcytosine"
ctgaaagccccgggctgtttcagaacccggtcagggtaaccgtcaggcctgcggtcaccgcgctgcaatcccaggaggccttgcgtcagcggccattatatcaataaggaagtacaatcacc

SEQ ID NO: 5726 - DNA, 122 bp, Homo sapiens
  misc_feature (61)..(62): /note="This region represents a CpG dinucleotide"
  misc_feature (61)..(61): /note="Nucleotide may be methylated to form 5-methylcytosine"
gttttaaggcagaatgcaacatataatggaaatgaacctgacaatggtgacagatgtcaacgagatagttgcaaggcaggtttaaagtttaaaggtttgggaggctgaagcaggtggatcac

SEQ ID NO: 5727 - DNA, 122 bp, Homo sapiens
  misc_feature (61)..(62): /note="This region represents a CpG dinucleotide"
  misc_feature (61)..(61): /note="Nucleotide may be methylated to form 5-methylcytosine"
tctgttgagtaaagaaacactactatttccgttttacagatgacaaaactaaaagaccagcgacaataagtgatttgtcaaagtcccattgacacagggagctgtgctggtttgaagcccac

SEQ ID NO: 5728 - DNA, 122 bp, Homo sapiens
  misc_feature (61)..(62): /note="This region represents a CpG dinucleotide"
  misc_feature (61)..(61): /note="Nucleotide may be methylated to form 5-methylcytosine"
gggtggcagatgctgggtaagaactctgtacccagttcagaggtctgactgcagctccaacgaagtctccagctagccgtgtggcctcaacaagtcactgggccacctcaatcctgtttcct

SEQ ID NO: 5729 - DNA, 122 bp, Homo sapiens
  misc_feature (61)..(62): /note="This region represents a CpG dinucleotide"
  misc_feature (61)..(61): /note="Nucleotide may be methylated to form 5-methylcytosine"
tggttagataaccttgggttcaaagacagacatttcctgttgtcacagtctttacataaacgctcataccatacttacgattagttgtttatgtgggttaaattaaccatggaatcactcct

SEQ ID NO: 5730 - DNA, 122 bp, Homo sapiens
  misc_feature (61)..(62): /note="This region represents a CpG dinucleotide"
  misc_feature (61)..(61): /note="Nucleotide may be methylated to form 5-methylcytosine"
tctagaaatgagaatattagtaaaaggctacatatacctcttttttttgagacggagtctcgctctgttgccaggctagagtgaagtgaggtgatctcagctcactgctgtctcctccccgc

SEQ ID NO: 5731 - DNA, 122 bp, Homo sapiens
  misc_feature (61)..(62): /note="This region represents a CpG dinucleotide"
  misc_feature (61)..(61): /note="Nucleotide may be methylated to form 5-methylcytosine"
tttttcacaccttaaaaacaaggaagaagagaaatgaaaataaaatagtgagcaacacctcggtgaaagtagaggtgtttgtacagttcagctgctgccttattcaaaaacaggaagaaaaa

SEQ ID NO: 5732 - DNA, 122 bp, Homo sapiens
  misc_feature (61)..(62): /note="This region represents a CpG dinucleotide"
  misc_feature (61)..(61): /note="Nucleotide may be methylated to form 5-methylcytosine"
cgacggattcctctaagccagcagtgaaaacgaaccttgaactgtgagctgactgtaggccgccgatgtttgcttccacatttcaaggtatcctggttgttgcggcttgaaacatgttcaaa

SEQ ID NO: 5733 - DNA, 122 bp, Homo sapiens
  misc_feature (61)..(62): /note="This region represents a CpG dinucleotide"
  misc_feature (61)..(61): /note="Nucleotide may be methylated to form 5-methylcytosine"
agcaggaatgcagtgtctgaaaaatacctcaaacaccaatcttaggttctacaatagtgacgttatccataggagcaactggggaggctcggaatcccgtggcctctggctgcatgactcct

SEQ ID NO: 5734 - DNA, 122 bp, Homo sapiens
  misc_feature (61)..(62): /note="This region represents a CpG dinucleotide"
  misc_feature (61)..(61): /note="Nucleotide may be methylated to form 5-methylcytosine"
tgccaggtgctgagagcagatgaggggcatcagagggtgggcgcccgagccgaggggtgtcgggcgcatccgctgcccagcggaagcggcggcctgagtggagtcaccgtgcaatgggtggg

SEQ ID NO: 5735 - DNA, 122 bp, Homo sapiens
  misc_feature (61)..(62): /note="This region represents a CpG dinucleotide"
  misc_feature (61)..(61): /note="Nucleotide may be methylated to form 5-methylcytosine"
ctcctactgattggtcagcagacatgagagagaagacacaaggttcccatgagaccttcacggccagcccctaacagctgcctcagctggagagggttgtttcactctaatttgcagatgat

SEQ ID NO: 5736 - DNA, 122 bp, Homo sapiens
  misc_feature (61)..(62): /note="This region represents a CpG dinucleotide"
  misc_feature (61)..(61): /note="Nucleotide may be methylated to form 5-methylcytosine"
aagaagctctccctggaattggccgctggttgtccagatctttctctaggagggccagtgcgtccaggacgcagcgtgggtcaggggcccgggcatgggagacaggcttcaggactgcgggg

SEQ ID NO: 5737 - DNA, 122 bp, Homo sapiens
  misc_feature (61)..(62): /note="This region represents a CpG dinucleotide"
  misc_feature (61)..(61): /note="Nucleotide may be methylated to form 5-methylcytosine"
cgctcctccctccaaggacgactccccgtgtccttctcctgacctggctgctcacggccacgcagcagacacagacactgtacaccctcaaggactcccggcccattcacatgcatgtctgt

SEQ ID NO: 5738 - DNA, 122 bp, Homo sapiens
  misc_feature (61)..(62): /note="This region represents a CpG dinucleotide"
  misc_feature (61)..(61): /note="Nucleotide may be methylated to form 5-methylcytosine"
aataaagtgaagagagtccctgggggacccctgctggcaggagagcccagggcgagtgctcgcacactgtcctctaagatggaaagtgctcgaatcacttaagacttgttaactctttcgac

SEQ ID NO: 5739 - DNA, 122 bp, Homo sapiens
  misc_feature (61)..(62): /note="This region represents a CpG dinucleotide"
  misc_feature (61)..(61): /note="Nucleotide may be methylated to form 5-methylcytosine"
actgtttcttggctaattctgttctccctgcctggtgatccaggacagaatcactgacagcgtggggccaatgtgaagaattccaggctaggggagaaggaggtctgctttgaagtctagcc

SEQ ID NO: 5740 - DNA, 122 bp, Homo sapiens
  misc_feature (61)..(62): /note="This region represents a CpG dinucleotide"
  misc_feature (61)..(61): /note="Nucleotide may be methylated to form 5-methylcytosine"
ttctgagctgcactccactctggaagttcttcctatccgacctctaccccactcccactccgtcaccgcagggctttggcatactaccattcaggtactcacgctgtttcggtgagtcaggg

SEQ ID NO: 5741 - DNA, 122 bp, Homo sapiens
  misc_feature (61)..(62): /note="This region represents a CpG dinucleotide"
  misc_feature (61)..(61): /note="Nucleotide may be methylated to form 5-methylcytosine"
ccaccgcaaggaaggagccggcggtagcttggttcctgagcggatgctggggctgtaaggcgcgcgcggtcagctgttggcggtgcagggaggaggacgccggggctcgccttccctcctct

SEQ ID NO: 5742 - DNA, 122 bp, Homo sapiens
  misc_feature (61)..(62): /note="This region represents a CpG dinucleotide"
  misc_feature (61)..(61): /note="Nucleotide may be methylated to form 5-methylcytosine"
ctgggaagtgctgctcagatctgggaagtcatttagcttggctgtgtgttctcaccactgcggaacagtatttaagcacaagatttctggcccaggtcattgaatgattgtggtgcactctg

SEQ ID NO: 5743 - DNA, 122 bp, Homo sapiens
  misc_feature (61)..(62): /note="This region represents a CpG dinucleotide"
  misc_feature (61)..(61): /note="Nucleotide may be methylated to form 5-methylcytosine"
tctgctggacgatgtgcgctgcgcgggctgggagcggaacctgctggagtgccagcacaacggcgtgggcacccacaactgcgagcacgacgaggatgcgggcgtcgtgtgcagccaccaga

SEQ ID NO: 5744 - DNA, 122 bp, Homo sapiens
  misc_feature (61)..(62): /note="This region represents a CpG dinucleotide"
  misc_feature (61)..(61): /note="Nucleotide may be methylated to form 5-methylcytosine"
tgcagcgtggcaagaaccgggcagcacctggtgtcagcggctaattgtgttttaaggtggcgtgttagaccagcgcgcgaagggcaacccgagccaccgcacttgccttgcaggcgccgcgt

SEQ ID NO: 5745 - DNA, 122 bp, Homo sapiens
  misc_feature (61)..(62): /note="This region represents a CpG dinucleotide"
  misc_feature (61)..(61): /note="Nucleotide may be methylated to form 5-methylcytosine"
gctagaagaatgtgcatgaaacaattaacaatggtcacctccagtgagagaaagaggcagcggggaaagagagaagagagaacttttacatattctctacatacttttggattgctttaatt

SEQ ID NO: 5746 - DNA, 122 bp, Homo sapiens
  misc_feature (61)..(62): /note="This region represents a CpG dinucleotide"
  misc_feature (61)..(61): /note="Nucleotide may be methylated to form 5-methylcytosine"
ctgaggtgcttaacattggtggccacaaatggacatggcgtaccagcggtggcctggactcgtgcctccttcctgcagacaccatacttttactaatgcaccctaatattacgtttttggca

SEQ ID NO: 5747 - DNA, 122 bp, Homo sapiens
  misc_feature (61)..(62): /note="This region represents a CpG dinucleotide"
  misc_feature (61)..(61): /note="Nucleotide may be methylated to form 5-methylcytosine"
ccaactcccgggctcatgtaatcctcccacctcagcctcccgagtagctgggactggaggcgggagccaccatgtcgggctaattggtttttctgtagagatcgggcctccctaggttgccc

SEQ ID NO: 5748 - DNA, 122 bp, Homo sapiens
  misc_feature (61)..(62): /note="This region represents a CpG dinucleotide"
  misc_feature (61)..(61): /note="Nucleotide may be methylated to form 5-methylcytosine"
tcgccccgaccctaaaccctcacctgaaccctaaccccgctgggctcccggctcccccgtcggtcaccatacatcgtgtgtcccgattcaccataaccaccagaaagtcgcttatgaagatg

SEQ ID NO: 5749 - DNA, 122 bp, Homo sapiens
  misc_feature (61)..(62): /note="This region represents a CpG dinucleotide"
  misc_feature (61)..(61): /note="Nucleotide may be methylated to form 5-methylcytosine"
tagctgtgcctctttccacgtggcctttcatcctcaaagaggcaagcccaggcttgttcacgaggcagtagtgtctcaagagagtagaagcaaagctacaagaccttataaggtataacctc

SEQ ID NO: 5750 - DNA, 122 bp, Homo sapiens
  misc_feature (61)..(62): /note="This region represents a CpG dinucleotide"
  misc_feature (61)..(61): /note="Nucleotide may be methylated to form 5-methylcytosine"
cgtaagtgtcttcctgatgactggaatggtttgccttattaccatcaggcaccagggtgccgtgtgcaggtggaactaacaccacacttgtgcttccagcagggctattagcaaatccggga

SEQ ID NO: 5751 - DNA, 122 bp, Homo sapiens
  misc_feature (61)..(62): /note="This region represents a CpG dinucleotide"
  misc_feature (61)..(61): /note="Nucleotide may be methylated to form 5-methylcytosine"
caaagccatccagtccgggcctgcagctgggagacagggaagaagaggatgtgtggggcccgtggcacttgacctgggtgacatgagggtcacttcaaacacggccagtgtgcagcctccca

SEQ ID NO: 5752 - DNA, 122 bp, Homo sapiens
  misc_feature (61)..(62): /note="This region represents a CpG dinucleotide"
  misc_feature (61)..(61): /note="Nucleotide may be methylated to form 5-methylcytosine"
gtcttggcagatctaaaaacagagtggcagcgaggacttcaacaccgcactttctgtacccgaagtaaaccgatatgtcccgattaatagcaacagggcacaaagggagtgggcctctgagg

SEQ ID NO: 5753 - DNA, 122 bp, Homo sapiens
  misc_feature (61)..(62): /note="This region represents a CpG dinucleotide"
  misc_feature (61)..(61): /note="Nucleotide may be methylated to form 5-methylcytosine"
tagatacacatgcagttatgcattctgtaagtatttaagatctactatctgccagacccacgccagatagggagatagagcaggaagtaaaataaagtccttgtctctggcagtaaaatgag

SEQ ID NO: 5754 - DNA, 122 bp, Homo sapiens
  misc_feature (61)..(62): /note="This region represents a CpG dinucleotide"
  misc_feature (61)..(61): /note="Nucleotide may be methylated to form 5-methylcytosine"
tcatttgaggctattaggataaccaagactgtatcccaaatattatctactggtccacatcgcggggaggggtaagactcactgcacccggatgtttgggtatcttaagccttttaaattat

SEQ ID NO: 5755 - DNA, 122 bp, Homo sapiens
  misc_feature (61)..(62): /note="This region represents a CpG dinucleotide"
  misc_feature (61)..(61): /note="Nucleotide may be methylated to form 5-methylcytosine"
cctcagattctgtccttgggtgatcaaatcctgctttctgtctcctaaaattgtctctagcgctttctctgggaccactctagtgcctctgagcaggcatcacaggctggcccatcggatca

SEQ ID NO: 5756 - DNA, 122 bp, Homo sapiens
  misc_feature (61)..(62): /note="This region represents a CpG dinucleotide"
  misc_feature (61)..(61): /note="Nucleotide may be methylated to form 5-methylcytosine"
cccagcccccgccccgccttcaagtttgtgccttattttccaaagccgccacacttgagacgtccttgctgcgggttcgtctgtaacctgtgtcccttcactgccatgcactgctcttagct

SEQ ID NO: 5757 - DNA, 122 bp, Homo sapiens
  misc_feature (61)..(62): /note="This region represents a CpG dinucleotide"
  misc_feature (61)..(61): /note="Nucleotide may be methylated to form 5-methylcytosine"
actccactcacatatttccctgcaaataaaggggctctgtatgtaattaactgacaaaaacgcgggtggaattgcaggtttggaaataaagtataaggctctataactcagcctggctccgc

SEQ ID NO: 5758 - DNA, 122 bp, Homo sapiens
  misc_feature (61)..(62): /note="This region represents a CpG dinucleotide"
  misc_feature (61)..(61): /note="Nucleotide may be methylated to form 5-methylcytosine"
acctgaggatcaggccgtcaccttttgcaacttttcttctaaagggaaataagatgatatcgttcctatcctggggagcttgctctccaagttagtagtagttccagcagagagattgggga

SEQ ID NO: 5759 - DNA, 122 bp, Homo sapiens
  misc_feature (61)..(62): /note="This region represents a CpG dinucleotide"
  misc_feature (61)..(61): /note="Nucleotide may be methylated to form 5-methylcytosine"
ccttgagaaaaacacaggagggattgggaggatgtagaaattcctatttgtaagggtttgcgatctgggtatatgtccactgagccgtgaacttactgtctcgagttctgtattctagttgg

SEQ ID NO: 5760 - DNA, 122 bp, Homo sapiens
  misc_feature (61)..(62): /note="This region represents a CpG dinucleotide"
  misc_feature (61)..(61): /note="Nucleotide may be methylated to form 5-methylcytosine"
ctccccactacctgcaggaccagcagggctgtctgcagccgtgcgccccgccccaccacccgggtctggagcagctgccaccctccctgaacggcctctgcccgttccccgggatccggctg

SEQ ID NO: 5761 - DNA, 122 bp, Homo sapiens
  misc_feature (61)..(62): /note="This region represents a CpG dinucleotide"
  misc_feature (61)..(61): /note="Nucleotide may be methylated to form 5-methylcytosine"
aattttagattttatgtcagacatggtttttaacttcaaatttttattaacctcagataacgttatatataatacaaactttgcctgtccccttcaaaagaattagactcactactttgtag

SEQ ID NO: 5762 - DNA, 122 bp, Homo sapiens
  misc_feature (61)..(62): /note="This region represents a CpG dinucleotide"
  misc_feature (61)..(61): /note="Nucleotide may be methylated to form 5-methylcytosine"
tacaaatcacattcccacaataggaaacaaatttcctgtttgaatttctctgtaaaggaccgacttctgaaatctttatgtaagttacagtcaagacagttgatgaggctatagttcttgaa

SEQ ID NO: 5763 - DNA, 122 bp, Homo sapiens
  misc_feature (61)..(62): /note="This region represents a CpG dinucleotide"
  misc_feature (61)..(61): /note="Nucleotide may be methylated to form 5-methylcytosine"
aagtctgttgtctgcatgtctccccactaatgtgagtcatatagatggagtctcagggcacgactgggttttgtgtctctcgttgttgcttcacagcccttttggcatcacccatttattta

SEQ ID NO: 5764 - DNA, 122 bp, Homo sapiens
  misc_feature (61)..(62): /note="This region represents a CpG dinucleotide"
  misc_feature (61)..(61): /note="Nucleotide may be methylated to form 5-methylcytosine"
gatttaatctattcaggcagctggaagcagaatggattatacagaaaaagaagggaggcccggtaggaggccaacaaagaaaaattgcctttgatgactgggatagcagtgtctgtggggtt

SEQ ID NO: 5765 - DNA, 122 bp, Homo sapiens
  misc_feature (61)..(62): /note="This region represents a CpG dinucleotide"
  misc_feature (61)..(61): /note="Nucleotide may be methylated to form 5-methylcytosine"
cacctattttcatcagtaggcagggcagtgctatcagaagagtaggctgcccttctatgacgacagaagctgttcctgatacttagttctgccttgcacatagtagactcaggtatcagtaa

SEQ ID NO: 5766 - DNA, 122 bp, Homo sapiens
  misc_feature (61)..(62): /note="This region represents a CpG dinucleotide"
  misc_feature (61)..(61): /note="Nucleotide may be methylated to form 5-methylcytosine"
ggtgcggaacggtccgtggaagcgtgcgtgcaggcccctgcaccctgcaagaagccctttcgagccaggaatcctgcctgacttcataccccctacagtacccagcgcgccctcaacacaga

SEQ ID NO: 5767 - DNA, 122 bp, Homo sapiens
  misc_feature (61)..(62): /note="This region represents a CpG dinucleotide"
  misc_feature (61)..(61): /note="Nucleotide may be methylated to form 5-methylcytosine"
gaggctctgcctgaatgctcagcttctgcaagctggggtggagagtgtgttcctgcctaccggctcagccagcacaggagcacgtagcctgcaggtgtgggttgtacacaggcttccccctg

SEQ ID NO: 5768 - DNA, 122 bp, Homo sapiens
  misc_feature (61)..(62): /note="This region represents a CpG dinucleotide"
  misc_feature (61)..(61): /note="Nucleotide may be methylated to form 5-methylcytosine"
tcatctcatttatgtaaacattgtgaggaaatagagcactggagagttaaggaactcactcgggtactcactgctggtaagtgatgcagccaggattcaacccagcccatcagatggcagca

SEQ ID NO: 5769 - DNA, 122 bp, Homo sapiens
  misc_feature (61)..(62): /note="This region represents a CpG dinucleotide"
  misc_feature (61)..(61): /note="Nucleotide may be methylated to form 5-methylcytosine"
cctgaatgaaaaatggattccaggtagaagaactgtggctcctgaccatttcctggatctcgctcaagagaatgtacacaagtatttatttatagctgctcaactccttttcagacacactc

SEQ ID NO: 5770 - DNA, 122 bp, Homo sapiens
  misc_feature (61)..(62): /note="This region represents a CpG dinucleotide"
  misc_feature (61)..(61): /note="Nucleotide may be methylated to form 5-methylcytosine"
tcattggcctttataaactgacttagtgctcttaatttgatccctggtcatcagtgttcccggtaaccaccatctgtaagtagtcctcaaaacaaaggattaaactgaatagagtcaaatga

SEQ ID NO: 5771 - DNA, 122 bp, Homo sapiens
  misc_feature (61)..(62): /note="This region represents a CpG dinucleotide"
  misc_feature (61)..(61): /note="Nucleotide may be methylated to form 5-methylcytosine"
atccttttttttaatccacaggagaatcagaagatgattttgccatgactaacaccctgccgatgacagaaacaaataactcttaaattcttatatcctgtctttaaacaattgaaatgcct

SEQ ID NO: 5772 - DNA, 122 bp, Homo sapiens
  misc_feature (61)..(62): /note="This region represents a CpG dinucleotide"
  misc_feature (61)..(61): /note="Nucleotide may be methylated to form 5-methylcytosine"
cacatacacactcaaacataaataagcaatcaagtcattgcatttctacaaaactgtatacgtgattatgtgtatgattagtttattacagtggtatgatcaagggagaagtcattagttgc

SEQ ID NO: 5773 - DNA, 122 bp, Homo sapiens
  misc_feature (61)..(62): /note="This region represents a CpG dinucleotide"
  misc_feature (61)..(61): /note="Nucleotide may be methylated to form 5-methylcytosine"
gaccggttataccaacacatttttggaggacaagagcaataacttattcagtccttacagcgtgacagacattgttctaagtgttttacacattgttcactcctttaaacaacctaaaaggt

SEQ ID NO: 5774 - DNA, 122 bp, Homo sapiens
  misc_feature (61)..(62): /note="This region represents a CpG dinucleotide"
  misc_feature (61)..(61): /note="Nucleotide may be methylated to form 5-methylcytosine"
ctccctgctgctgcttcaccttgccttagcttgtgtaagcgtcagggaaacaggcaaatgcgtctcatttgtcttcagaaccctgtcttattagatcgccatcaactacatttggagcaatc

SEQ ID NO: 5775 - DNA, 122 bp, Homo sapiens
  misc_feature (61)..(62): /note="This region represents a CpG dinucleotide"
  misc_feature (61)..(61): /note="Nucleotide may be methylated to form 5-methylcytosine"
gagatcttacatgtcagcaataattttacttttatattttcccgtttcacagaatgagaacgacatgttagaaaggttatttcaaatattagagattacagggcatcttcaggccttgggaa

SEQ ID NO: 5776 - DNA, 122 bp, Homo sapiens
  misc_feature (61)..(62): /note="This region represents a CpG dinucleotide"
  misc_feature (61)..(61): /note="Nucleotide may be methylated to form 5-methylcytosine"
agatgctgagcactttacatgcaccatttctcttcatctccacctgacagacgatgaaaacgaggtttgccatgatcacacagctatcaggagtggtgccaagatatgaacccacatctcat

SEQ ID NO: 5777 - DNA, 122 bp, Homo sapiens
  misc_feature (61)..(62): /note="This region represents a CpG dinucleotide"
  misc_feature (61)..(61): /note="Nucleotide may be methylated to form 5-methylcytosine"
gtcatgaggggccagcctggagtctgtgcagagcttgggacccgcttaggcaggactgcccggggagcacatcgagggggccaggccgatgcctgggggtggagattacttgctgcagctgg

SEQ ID NO: 5778 - DNA, 122 bp, Homo sapiens
  misc_feature (61)..(62): /note="This region represents a CpG dinucleotide"
  misc_feature (61)..(61): /note="Nucleotide may be methylated to form 5-methylcytosine"
actctgacagacggtccttgtgtccttggctctgctggtcctgaaataaactgcttgggacgggggctgggagtggcaggattaggggagaggaaattaaagagagaaggaagaggatggtg

SEQ ID NO: 5779 - DNA, 122 bp, Homo sapiens
  misc_feature (61)..(62): /note="This region represents a CpG dinucleotide"
  misc_feature (61)..(61): /note="Nucleotide may be methylated to form 5-methylcytosine"
ccaggtgctggcaggccacacactgcgcatgctcccctcccaggtgctggcaggccactgcgcaagtgtggacagcctacaccaagggaagagtcaggggagaaggaacacaagactccgga

SEQ ID NO: 5780 - DNA, 122 bp, Homo sapiens
  misc_feature (61)..(62): /note="This region represents a CpG dinucleotide"
  misc_feature (61)..(61): /note="Nucleotide may be methylated to form 5-methylcytosine"
tttatccttctccattagatttatttattttaaatgtattaaaataaaatcaacttagtacggattccgttgtttgttaaatctaaagattattagcatcacattaaggcaactgtgaaaat

SEQ ID NO: 5781 - DNA, 122 bp, Homo sapiens
  misc_feature (61)..(62): /note="This region represents a CpG dinucleotide"
  misc_feature (61)..(61): /note="Nucleotide may be methylated to form 5-methylcytosine"
tcagtgagtaaaagattcaaactccaaagcccagctttgcagagtctgaagcaaacactacgctgtacagagtctagtcacctatagtcactgctgatcttgccatgtctcgggcaccactg

SEQ ID NO: 5782 - DNA, 122 bp, Homo sapiens
  misc_feature (61)..(62): /note="This region represents a CpG dinucleotide"
  misc_feature (61)..(61): /note="Nucleotide may be methylated to form 5-methylcytosine"
atgtttatccttagaatcatgggaaactggctgtctcttctattctgaaggctgaggacacgtcaacaggttttttagccaagcacatccgtcatggggcttatgcgcaggcatttccagat

SEQ ID NO: 5783 - DNA, 122 bp, Homo sapiens
  misc_feature (61)..(62): /note="This region represents a CpG dinucleotide"
  misc_feature (61)..(61): /note="Nucleotide may be methylated to form 5-methylcytosine"
gccctgcccttaggcatcagggattttccaagtttgattctcctgtcatcagaagcatcccgggaaggatgctcgttacactgcagattccagccaggcgcggaggctcacgcctgtaatcc

SEQ ID NO: 5784 - DNA, 122 bp, Homo sapiens
  misc_feature (61)..(62): /note="This region represents a CpG dinucleotide"
  misc_feature (61)..(61): /note="Nucleotide may be methylated to form 5-methylcytosine"
aaggcccgaggcctgccagcagccgtatcaggtgggaggcactccgttctgactcccacacgctggctgcaagtgctcctctgcttctcgggttcagcctctgagccacctgggtggtaggt

SEQ ID NO: 5785 - DNA, 122 bp, Homo sapiens
  misc_feature (61)..(62): /note="This region represents a CpG dinucleotide"
  misc_feature (61)..(61): /note="Nucleotide may be methylated to form 5-methylcytosine"
taagtggatagcaagtagagttctgcttctcaaagcgtgtagtgattcccctcccacccacgtagaataaccacatctcaagcactttcttaaagatccctgactgtctgactagaatatcc

SEQ ID NO: 5786 - DNA, 122 bp, Homo sapiens
  misc_feature (61)..(62): /note="This region represents a CpG dinucleotide"
  misc_feature (61)..(61): /note="Nucleotide may be methylated to form 5-methylcytosine"
cacattcctgttggttactggggacagccagctgcgggcaggcggggcccagctctgctccgtgcggaggctgtgttctgccctctccctgcccacagcatgactcagagccacctcactgc

SEQ ID NO: 5787 - DNA, 122 bp, Homo sapiens
  misc_feature (61)..(62): /note="This region represents a CpG dinucleotide"
  misc_feature (61)..(61): /note="Nucleotide may be methylated to form 5-methylcytosine"
caaatggcaccttgcaaagacactttctgtgatcacccagtttaaagagcaccccttacccgtagtcattccctgttacattatcctgctttattttttagaaaaaaatttatcatttgata

SEQ ID NO: 5788 - DNA, 122 bp, Homo sapiens
  misc_feature (61)..(62): /note="This region represents a CpG dinucleotide"
  misc_feature (61)..(61): /note="Nucleotide may be methylated to form 5-methylcytosine"
aggaagggcgtggggccgttttgttccctttcttctgggtgggtgagatccacacagcatcgccactcttgttgtgcaagcagctgtgcccatcaaaccatctgcgtcacagaatgccaagg

SEQ ID NO: 5789 - DNA, 122 bp, Homo sapiens
  misc_feature (61)..(62): /note="This region represents a CpG dinucleotide"
  misc_feature (61)..(61): /note="Nucleotide may be methylated to form 5-methylcytosine"
ccctggccctccatcgggcgtgcgcctaaccctccaacgcccctaatcctccatcgggcacgcctctgacccattgggcgcgtgcctaaccctctggcaccccgtatcctccagcaggcggg

SEQ ID NO: 5790 - DNA, 122 bp, Homo sapiens
  misc_feature (61)..(62): /note="This region represents a CpG dinucleotide"
  misc_feature (61)..(61): /note="Nucleotide may be methylated to form 5-methylcytosine"
atttctcaatccctggttgatgtcccaggattactcagcctctccggctttagtcactctcgctacccgctcccagggtccagggtggaggcagagggaggctgggagagaagctctactgc

SEQ ID NO: 5791 - DNA, 122 bp, Homo sapiens
  misc_feature (61)..(62): /note="This region represents a CpG dinucleotide"
  misc_feature (61)..(61): /note="Nucleotide may be methylated to form 5-methylcytosine"
cacccccagttaagcttggagatgactgcaggcccagccatcaccttgactacagcctcacggccaacccagaagcagagagcccggctaagtgatggccaggttcctgactcacagaaact

SEQ ID NO: 5792 - DNA, 122 bp, Homo sapiens
  misc_feature (61)..(62): /note="This region represents a CpG dinucleotide"
  misc_feature (61)..(61): /note="Nucleotide may be methylated to form 5-methylcytosine"
tgccaccgaaaacaacgtgagaaggtaatgctttagaccactgccgtggaattctgccatcgactggtctgccacaagcatggtttccacatagcggtgactggacacaaatcgcttctttc

SEQ ID NO: 5793 - DNA, 122 bp, Homo sapiens
  misc_feature (61)..(62): /note="This region represents a CpG dinucleotide"
  misc_feature (61)..(61): /note="Nucleotide may be methylated to form 5-methylcytosine"
tgtagtttttttatggctatgactcacatgacattactgtataaaactagtacattctctcgtaaaaccacacaaacttactagagtgctgctctcatttttctacattagaaatgaaaaag

SEQ ID NO: 5794 - DNA, 122 bp, Homo sapiens
  misc_feature (61)..(62): /note="This region represents a CpG dinucleotide"
  misc_feature (61)..(61): /note="Nucleotide may be methylated to form 5-methylcytosine"
aggtaagcgaacacccaggagccactttgtctgtggtttcagattttggtcaggtgggggcgctgcactctccaagcctgtgctgagcagtgtgagctttcagtggtgctgcttctgctgtg

SEQ ID NO: 5795 - DNA, 122 bp, Homo sapiens
  misc_feature (61)..(62): /note="This region represents a CpG dinucleotide"
  misc_feature (61)..(61): /note="Nucleotide may be methylated to form 5-methylcytosine"
gcctgctattataagctcttggctgattaccaagagctgtggcttttcgtgccgggctggcgctgtgggtttggagtttccgctggatctgcaggtcagctggtattaggcagtgggcactc

SEQ ID NO: 5796 - DNA, 122 bp, Homo sapiens
  misc_feature (61)..(62): /note="This region represents a CpG dinucleotide"
  misc_feature (61)..(61): /note="Nucleotide may be methylated to form 5-methylcytosine"
tgcacctgttgaaaccttacccttcctgcaggtcctggctccagctcaccccattcattccgcaaacatttgctgaatgaaaatcatgcatcaggcacctccccacaaagcctgccccagtc

SEQ ID NO: 5797 - DNA, 122 bp, Homo sapiens
  misc_feature (61)..(62): /note="This region represents a CpG dinucleotide"
  misc_feature (61)..(61): /note="Nucleotide may be methylated to form 5-methylcytosine"
acaaaatgtatctcatgaaaagcatactttaaaaattcacaacctaatcctctagaatcccgtcagggcagaaatataaattatactcacacttcagagagaaactttcagaccaaattaga

SEQ ID NO: 5798 - DNA, 122 bp, Homo sapiens
  misc_feature (61)..(62): /note="This region represents a CpG dinucleotide"
  misc_feature (61)..(61): /note="Nucleotide may be methylated to form 5-methylcytosine"
cttaaagaccctaactccaagtacagtcatattcagagacactgggggttagggttccaacgtataaattttggggggacaaaattcaactcataagagttcccaggcctatgctctctagt

SEQ ID NO: 5799 - DNA, 122 bp, Homo sapiens
  misc_feature (61)..(62): /note="This region represents a CpG dinucleotide"
  misc_feature (61)..(61): /note="Nucleotide may be methylated to form 5-methylcytosine"
tgagcttctgactgggtgaaagagaacagatgggaaagaatggcagatgatggagtgccacgcgtgttaagaaacaaaggggccagagggaaagacttctaatttacatacctaatctgtca

SEQ ID NO: 5800 - DNA, 122 bp, Homo sapiens
  misc_feature (61)..(62): /note="This region represents a CpG dinucleotide"
  misc_feature (61)..(61): /note="Nucleotide may be methylated to form 5-methylcytosine"
tctcctgcaatgattcttttgtcttttttgataaaatgcaggcttctctgccaacactctcgtatcctctccacacacatcatcctaaatggggatgtacccttgctgctcccagtacctgg

SEQ ID NO: 5801 - DNA, 122 bp, Homo sapiens
  misc_feature (61)..(62): /note="This region represents a CpG dinucleotide"
  misc_feature (61)..(61): /note="Nucleotide may be methylated to form 5-methylcytosine"
actgcctttggttgactaatcatgaaaaatctccccttgatgtggcaattctaattctgacgccatctccatggggaaaagaaaacttccaatttttctttaagaggaagtcagtgcctcag

SEQ ID NO: 5802 - DNA, 122 bp, Homo sapiens
  misc_feature (61)..(62): /note="This region represents a CpG dinucleotide"
  misc_feature (61)..(61): /note="Nucleotide may be methylated to form 5-methylcytosine"
aacacagagtgaagcctgcttgcatctccctggggtgtagagactgacttcctcccacagcgtgagtataagctgctctctgttttcccgatgacctctctctgatgctaatcttgatcctg

SEQ ID NO: 5803 - DNA, 122 bp, Homo sapiens
  misc_feature (61)..(62): /note="This region represents a CpG dinucleotide"
  misc_feature (61)..(61): /note="Nucleotide may be methylated to form 5-methylcytosine"
cagcatactactgcttccggatgcagaagtggacctccagtgtatgccttacccacgtggcgaacgttgtctctgacgggcgatttattcattcctcgtccccctcttaccctcctcctccc

SEQ ID NO: 5804 - DNA, 122 bp, Homo sapiens
  misc_feature (61)..(62): /note="This region represents a CpG dinucleotide"
  misc_feature (61)..(61): /note="Nucleotide may be methylated to form 5-methylcytosine"
gtcatggtttcctctgcctcctaaaaccctcatttatgagtcagttctgcctcttactagcgtgtgaccctcggcaagctgcttaatcactttgagcctgttcccttgctttgtaaaaataa

SEQ ID NO: 5805 - DNA, 122 bp, Homo sapiens
  misc_feature (61)..(62): /note="This region represents a CpG dinucleotide"
  misc_feature (61)..(61): /note="Nucleotide may be methylated to form 5-methylcytosine"
tagggaagagcagggtttaggaaaggactttctttcgtctctctgatctggcctggaatccggggtgttgactaatgatcaagggtatccctgggtgtggggatgagctggccttggccaca

SEQ ID NO: 5806 - DNA, 122 bp, Homo sapiens
  misc_feature (61)..(62): /note="This region represents a CpG dinucleotide"
  misc_feature (61)..(61): /note="Nucleotide may be methylated to form 5-methylcytosine"
ttttttttcttccatttccaaacactaattgacagcacttgaaaacagtgattcagcttccgcatgtcatatgattcctagggactgtagctatattcctcaggccagtagactgacaaatc

SEQ ID NO: 5807 - DNA, 122 bp, Homo sapiens
  misc_feature (61)..(62): /note="This region represents a CpG dinucleotide"
  misc_feature (61)..(61): /note="Nucleotide may be methylated to form 5-methylcytosine"
gatttcagatgagacaccaattattgcggtgatggtggccctgtcctctctgctagtgatcgtgtttattatcatagttttgtacatgttaaggtgagcctactaacacttcacattctctt

SEQ ID NO: 5808 - DNA, 122 bp, Homo sapiens
  misc_feature (61)..(62): /note="This region represents a CpG dinucleotide"
  misc_feature (61)..(61): /note="Nucleotide may be methylated to form 5-methylcytosine"
tagaaaatttccatcagttcattcatgaaagaacaaagaacctggcaaaacttaaaaaaacgtttccaagaatcagataaaagaggacaaaccttagggagaagaaggcagctgctcatttc

SEQ ID NO: 5809 - DNA, 122 bp, Homo sapiens
  misc_feature (61)..(62): /note="This region represents a CpG dinucleotide"
  misc_feature (61)..(61): /note="Nucleotide may be methylated to form 5-methylcytosine"
cgccggcgggccgcgcgccccgagacggaggaggccggagactcccgccacgccaccccgcgcccatctcacctgccgcctcacctgcccggtcctggcctccaaccggcgggcgggggcgc

SEQ ID NO: 5810 - DNA, 122 bp, Homo sapiens
  misc_feature (61)..(62): /note="This region represents a CpG dinucleotide"
  misc_feature (61)..(61): /note="Nucleotide may be methylated to form 5-methylcytosine"
ctacagtgtctaccggttattatgaacacttttctgtctgtttttagccctatgatgtgacgtctgtaaaatctgtacttcctccctttctccttacacccttaatgaaaagatgctacaga

SEQ ID NO: 5811 - DNA, 122 bp, Homo sapiens
  misc_feature (61)..(62): /note="This region represents a CpG dinucleotide"
  misc_feature (61)..(61): /note="Nucleotide may be methylated to form 5-methylcytosine"
tagtttgacagactctactcatttccaaagttacataggtctgcaacttccccctcactacgcctttcagtgaggttgtttcatacatgagtaataaagttagattgttttgtcacattctg

SEQ ID NO: 5812 - DNA, 122 bp, Homo sapiens
  misc_feature (61)..(62): /note="This region represents a CpG dinucleotide"
  misc_feature (61)..(61): /note="Nucleotide may be methylated to form 5-methylcytosine"
caacattctcattaagtcctcgttcttcctgttaactgtttacatgactgtccttcagcacgtacacggttcagcctcagctacagaccatcactgctacagagcgacaacttcccattcgg

SEQ ID NO: 5813 - DNA, 122 bp, Homo sapiens
  misc_feature (61)..(62): /note="This region represents a CpG dinucleotide"
  misc_feature (61)..(61): /note="Nucleotide may be methylated to form 5-methylcytosine"
acataatcaccataaccagtaccatcaagtttaaagtcagtgaagcgtaaaatgactttacggtgatcaccagtgtctattaaccaggtgcaattgcttccaggaggataaaagtctggata

SEQ ID NO: 5814 - DNA, 122 bp, Homo sapiens
  misc_feature (61)..(62): /note="This region represents a CpG dinucleotide"
  misc_feature (61)..(61): /note="Nucleotide may be methylated to form 5-methylcytosine"
cattatcaggcttctcatctctgccaacctggtaagtacaaagggcatctcttgtagtttcggttgcatttttctcattatgagattgagcagcagacaatgtctttaaaagacttattttg

SEQ ID NO: 5815 - DNA, 122 bp, Homo sapiens
  misc_feature (61)..(62): /note="This region represents a CpG dinucleotide"
  misc_feature (61)..(61): /note="Nucleotide may be methylated to form 5-methylcytosine"
catgtaatgtacagagtagctgtaccttacaacttgatcataaagttgttctctgcaaaacgaaactagttgggaaagacagaatcaatatgatgaaagaagtggtcataccaggagacaca

SEQ ID NO: 5816 - DNA, 122 bp, Homo sapiens
  misc_feature (61)..(62): /note="This region represents a CpG dinucleotide"
  misc_feature (61)..(61): /note="Nucleotide may be methylated to form 5-methylcytosine"
gccatcccgtggatctcagggaggtcctggagatattgaccttgtgttaacctggaagggcgctctccaaggtcctgaagcagtgtctcattttgtaaccagaagggcactttgagacactt

SEQ ID NO: 5817 - DNA, 122 bp, Homo sapiens
  misc_feature (61)..(62): /note="This region represents a CpG dinucleotide"
  misc_feature (61)..(61): /note="Nucleotide may be methylated to form 5-methylcytosine"
cagatggaagcagaagtttccccgtgggcactcaggatgctactgggtgcagacatgccacgtagactaagactcatttctctggacaccctctaactgccacgggcaactgtgactcatga

SEQ ID NO: 5818 - DNA, 122 bp, Homo sapiens
  misc_feature (61)..(62): /note="This region represents a CpG dinucleotide"
  misc_feature (61)..(61): /note="Nucleotide may be methylated to form 5-methylcytosine"
actcattaatacgtttccagggctgtgaacaatgggagcttttattacccagcaaagaagcgctcactcacttgactgcagcagccgcttagcagtggaaggacagcccctccgttggggct

SEQ ID NO: 5819 - DNA, 122 bp, Homo sapiens
  misc_feature (61)..(62): /note="This region represents a CpG dinucleotide"
  misc_feature (61)..(61): /note="Nucleotide may be methylated to form 5-methylcytosine"
gtctgccttcatgggcctgtgagtgggtagggccttctccctgggtagcgctttcctcttcggtctgggcaaatttcccactagcccttggaagaaagctcagaagtccctgctacgtgagc

SEQ ID NO: 5820 - DNA, 122 bp, Homo sapiens
  misc_feature (61)..(62): /note="This region represents a CpG dinucleotide"
  misc_feature (61)..(61): /note="Nucleotide may be methylated to form 5-methylcytosine"
gcaggcttctgatatctcaaagacaattttgggaaacatcttgcacagaatctatcatcacggatttttattttaggagaagatgttacctatcaccacgagggtaagttttgacaaccgaa

SEQ ID NO: 5821 - DNA, 122 bp, Homo sapiens
  misc_feature (61)..(62): /note="This region represents a CpG dinucleotide"
  misc_feature (61)..(61): /note="Nucleotide may be methylated to form 5-methylcytosine"
gtgagaaaagaatcatgatgagtatgacacaaaacatattctaaagagaaatatatattccgattacagaatgcacatatgagacacgggtgataagacattgatcatgccattcaatagtg

SEQ ID NO: 5822 - DNA, 122 bp, Homo sapiens
  misc_feature (61)..(62): /note="This region represents a CpG dinucleotide"
  misc_feature (61)..(61): /note="Nucleotide may be methylated to form 5-methylcytosine"
aggacctgtccccatgacccaaacacctcccaccacaccctacttctcaacacagacacacgggggaatcaaatttcaacatgagatttggtgaagacaaacaaaccatatcctaaccatag

SEQ ID NO: 5823 - DNA, 122 bp, Homo sapiens
  misc_feature (61)..(62): /note="This region represents a CpG dinucleotide"
  misc_feature (61)..(61): /note="Nucleotide may be methylated to form 5-methylcytosine"
cggtgccattgtcagcagcagaggacgcagacctgggcagggtctcctccctgagaagcccgccctccgcgcccgcacctcccctctgtctgccgcgccccttccccgccgagcccatctgc

SEQ ID NO: 5824 - DNA, 122 bp, Homo sapiens
  misc_feature (61)..(62): /note="This region represents a CpG dinucleotide"
  misc_feature (61)..(61): /note="Nucleotide may be methylated to form 5-methylcytosine"
tttttcatgttgacatcatcttatttcactttggggaaagtttttttctaaggatgatagcgaaaagtccttttgtcttgtgacaatagcaatttttatgtcagcttgggtttttttcctcc

SEQ ID NO: 5825 - DNA, 122 bp, Homo sapiens
  misc_feature (61)..(62): /note="This region represents a CpG dinucleotide"
  misc_feature (61)..(61): /note="Nucleotide may be methylated to form 5-methylcytosine"
atgccagggtattatgcagtgctgccctggacaggatgtcggtttctgtgattccatctacgttcctggattcctactatgctgaagtgagcaaagagaaccttagaacctgtattggggct

SEQ ID NO: 5826 - DNA, 122 bp, Homo sapiens
  misc_feature (61)..(62): /note="This region represents a CpG dinucleotide"
  misc_feature (61)..(61): /note="Nucleotide may be methylated to form 5-methylcytosine"
tcctgcttccttgtcagtggatccagacgcatggagcttattgataagcacctgtggagacgtgtttgactcgcacccctgctgctgctgcgtgcttgcctgtttagctagaagccattctc

SEQ ID NO: 5827 - DNA, 122 bp, Homo sapiens
  misc_feature (61)..(62): /note="This region represents a CpG dinucleotide"
  misc_feature (61)..(61): /note="Nucleotide may be methylated to form 5-methylcytosine"
ctccatggtcgggagagacaccaggcgaggcgaggcggcgggagagcgcgggagttcggccggcctcggacgccaccactgcgcaggcgcggcagcctgaggggctcgccgggaaatgtggt

SEQ ID NO: 5828 - DNA, 122 bp, Homo sapiens
  misc_feature (61)..(62): /note="This region represents a CpG dinucleotide"
  misc_feature (61)..(61): /note="Nucleotide may be methylated to form 5-methylcytosine"
tatttttgtgtttgtgagtgttactatgctatggcaaaaagggcctagactttgaattagcggatcttacttaatattcacagaagcctggaagtgtaaacactgctatccctattttatag

SEQ ID NO: 5829 - DNA, 122 bp, Homo sapiens
  misc_feature (61)..(62): /note="This region represents a CpG dinucleotide"
  misc_feature (61)..(61): /note="Nucleotide may be methylated to form 5-methylcytosine"
gaaagtagctttaatttgcatattccgataagaatttagtgactcattcattcgttggtacgcctaagtgacaaatggcattattgccggctgtgttgactggctgcctatcagggtgtgat

SEQ ID NO: 5830 - DNA, 122 bp, Homo sapiens
  misc_feature (61)..(62): /note="This region represents a CpG dinucleotide"
  misc_feature (61)..(61): /note="Nucleotide may be methylated to form 5-methylcytosine"
gggagtcttgggggagtgcaggatgtccagatagcaccagccctttgttaactggagagacgacagacaataaccccggcgtggtgaaacccggcccacacgtcccgcccgccccagagcca

SEQ ID NO: 5831 - DNA, 122 bp, Homo sapiens
  misc_feature (61)..(62): /note="This region represents a CpG dinucleotide"
  misc_feature (61)..(61): /note="Nucleotide may be methylated to form 5-methylcytosine"
ttcatgacatttgcaacagagaggagcctggcccctcctcttcctgtggaacctgggattcgaacggccaggcaggaagcactctagtagggactgtggcttagcaagagtccctgtttcct

SEQ ID NO: 5832 - DNA, 122 bp, Homo sapiens
  misc_feature (61)..(62): /note="This region represents a CpG dinucleotide"
  misc_feature (61)..(61): /note="Nucleotide may be methylated to form 5-methylcytosine"
tccccatgtcatgaggccagaggaaggggaagcgagaatccctacactgggccatccacacgcaggagcagaacagacactgtgctcagagttgcagggtcaaaataacaaacactgtccca

SEQ ID NO: 5833 - DNA, 122 bp, Homo sapiens
  misc_feature (61)..(62): /note="This region represents a CpG dinucleotide"
  misc_feature (61)..(61): /note="Nucleotide may be methylated to form 5-methylcytosine"
gcatatgggtagagcagtgtcacctcttaacttttcttgcctgtttcatttagctgtgggcgaggaaaattagctgtttgcttttcattactggaagatttatcaagttaaggtgcatcaat

SEQ ID NO: 5834 - DNA, 122 bp, Homo sapiens
  misc_feature (61)..(62): /note="This region represents a CpG dinucleotide"
  misc_feature (61)..(61): /note="Nucleotide may be methylated to form 5-methylcytosine"
gcttgggcttcggaagactctgcaggatccttgtgcttctttcttggtctctggatggaccgcagagtgtgcagatgtagcttaaacttgttgctgttcgcccacagcttcagtggctccag

SEQ ID NO: 5835 - DNA, 122 bp, Homo sapiens
  misc_feature (61)..(62): /note="This region represents a CpG dinucleotide"
  misc_feature (61)..(61): /note="Nucleotide may be methylated to form 5-methylcytosine"
aattatatctccttacttccatatggcactgttgtacactcatttactcagagccagaaacgtcagcgtcatcttggatttttcttatgctctttctctctctagtcatatgccagacttta

SEQ ID NO: 5836 - DNA, 122 bp, Homo sapiens
  misc_feature (61)..(62): /note="This region represents a CpG dinucleotide"
  misc_feature (61)..(61): /note="Nucleotide may be methylated to form 5-methylcytosine"
ctcagctgtgctgggatgctgttgccctatttcccgcgtagaaacaactgctggtggcgccgccggctgaagagtgcagaactgtggccctgagccaagctggggcaaatatgggagacgcg

SEQ ID NO: 5837 - DNA, 122 bp, Homo sapiens
  misc_feature (61)..(62): /note="This region represents a CpG dinucleotide"
  misc_feature (61)..(61): /note="Nucleotide may be methylated to form 5-methylcytosine"
agtcacactgaatacagagactggaggctctactcaggaaggcaatttgcaaatcttcagcgagggaagctgcgaggctgagattcaggaacaacacttgcaggaatatgccctggagggac

SEQ ID NO: 5838 - DNA, 122 bp, Homo sapiens
  misc_feature (61)..(62): /note="This region represents a CpG dinucleotide"
  misc_feature (61)..(61): /note="Nucleotide may be methylated to form 5-methylcytosine"
tgagggagtaatattatgcaaacttaggttctgggccctcagagccttgcatacttctgccggcactattggacatctgtccaactgccatgtgagcaaactagggctggcctaccagagga

SEQ ID NO: 5839 - DNA, 122 bp, Homo sapiens
  misc_feature (61)..(62): /note="This region represents a CpG dinucleotide"
  misc_feature (61)..(61): /note="Nucleotide may be methylated to form 5-methylcytosine"
caggcactcctttgcttgtttacagtcctctatgataaagtgaacactcataaccctggacgcactcttcctgtgtctaattaaattcaagtacccttttcttcaggtttgacttctgggtt

SEQ ID NO: 5840 - DNA, 122 bp, Homo sapiens
  misc_feature (61)..(62): /note="This region represents a CpG dinucleotide"
  misc_feature (61)..(61): /note="Nucleotide may be methylated to form 5-methylcytosine"
gggatatatgtcattagctttgctgtgggagtggtgagaggagctcttcaaggtttggagcggtaaattgttgtcatgaatgtaaactaaaatcaattgtcaattcatggtattaagagttt

SEQ ID NO: 5841 - DNA, 122 bp, Homo sapiens
  misc_feature (61)..(62): /note="This region represents a CpG dinucleotide"
  misc_feature (61)..(61): /note="Nucleotide may be methylated to form 5-methylcytosine"
aggctctgctggtgcaggccccgcattggagggctcgattggctgcccggctggcactgacgtccccttggagctgggtggcagaggagataaacagccatgtgcaactctccacactatat

SEQ ID NO: 5842 - DNA, 122 bp, Homo sapiens
  misc_feature (61)..(62): /note="This region represents a CpG dinucleotide"
  misc_feature (61)..(61): /note="Nucleotide may be methylated to form 5-methylcytosine"
actgttcatgagtctggtactccctgctgaatgagaggatgcaggccaggccaatgcctgcgtcttcaatctcagatgaacaggcatctctttaggaaacagtgatggctcatgctaaagca

SEQ ID NO: 5843 - DNA, 122 bp, Homo sapiens
  misc_feature (61)..(62): /note="This region represents a CpG dinucleotide"
  misc_feature (61)..(61): /note="Nucleotide may be methylated to form 5-methylcytosine"
gttaccttgacactgtttttttttttttaagtaacttttttctccatgctaaactttccacgtcttctatctaaaaggtccccaaaggcaccactatttggtgtgaagattttgagcagcac

SEQ ID NO: 5844 - DNA, 122 bp, Homo sapiens
  misc_feature (61)..(62): /note="This region represents a CpG dinucleotide"
  misc_feature (61)..(61): /note="Nucleotide may be methylated to form 5-methylcytosine"
caccaggttcccccagaccccgaggcccccgccagccccagccatgcctccagacactgccggggacccaggagtcccaggcctagtccttccacctgctggactttacactcaagaatttc

SEQ ID NO: 5845 - DNA, 122 bp, Homo sapiens
  misc_feature (61)..(62): /note="This region represents a CpG dinucleotide"
  misc_feature (61)..(61): /note="Nucleotide may be methylated to form 5-methylcytosine"
atcctctggtcctccctgaaccccggtcggagcccaaagatgatccccaacctgtagaaccgaaaccagggctatgaactctggggcagacacctgccctcagcccctttcaagcctcagat

SEQ ID NO: 5846 - DNA, 122 bp, Homo sapiens
  misc_feature (61)..(62): /note="This region represents a CpG dinucleotide"
  misc_feature (61)..(61): /note="Nucleotide may be methylated to form 5-methylcytosine"
agaacgctgaggcatgagaatcacttgaacctgggaggcggaggctgcagtgaactgagacggcccactgcacgccagcctgggccacagagctagactgtccaaaaacaaaaacaaaaaat

SEQ ID NO: 5847 - DNA, 122 bp, Homo sapiens
  misc_feature (61)..(62): /note="This region represents a CpG dinucleotide"
  misc_feature (61)..(61): /note="Nucleotide may be methylated to form 5-methylcytosine"
tcttcaaagggcggagcctgtgcagtgagcgtttggccacctggtcgcacaccgagtgctcgtcagcgcgcatggcctgagcgttctgccctgacactcgctggcctctgggcgcttctgtc

SEQ ID NO: 5848 - DNA, 122 bp, Homo sapiens
  misc_feature (61)..(62): /note="This region represents a CpG dinucleotide"
  misc_feature (61)..(61): /note="Nucleotide may be methylated to form 5-methylcytosine"
gacacttcgaaggcgttgtctcaaactgctagtcaatgaggctttgggaggcttcacccccgggtgatttaatgagtcacagtggatcaattagctgattctttggctctacttgaaaaagc

SEQ ID NO: 5849 - DNA, 122 bp, Homo sapiens
  misc_feature (61)..(62): /note="This region represents a CpG dinucleotide"
  misc_feature (61)..(61): /note="Nucleotide may be methylated to form 5-methylcytosine"
aactcaactcttactcctccagatctgctccagccctgatggctgcttgtgttgtcaaaacgaaacattgctgtctggtgaaggagaacacccacatccttgctgagtcagcaggctcaggg

SEQ ID NO: 5850 - DNA, 122 bp, Homo sapiens
  misc_feature (61)..(62): /note="This region represents a CpG dinucleotide"
  misc_feature (61)..(61): /note="Nucleotide may be methylated to form 5-methylcytosine"
ctgccccatgatttaattacctcccaccgggtccctcccacaacacgtgcgaattcaagacgaaatttggttgggacacagccaaaccatatcagccactcacagtggtgcacacctgtaat

SEQ ID NO: 5851 - DNA, 122 bp, Homo sapiens
  misc_feature (61)..(62): /note="This region represents a CpG dinucleotide"
  misc_feature (61)..(61): /note="Nucleotide may be methylated to form 5-methylcytosine"
ctgtaacagctgcactttccagcagctactgacccctggcctccatcgggggtaatgatacggaacttgcacagacagtgatccaagggagagaccctggataagcattcccaccgcccccc

SEQ ID NO: 5852 - DNA, 122 bp, Homo sapiens
  misc_feature (61)..(62): /note="This region represents a CpG dinucleotide"
  misc_feature (61)..(61): /note="Nucleotide may be methylated to form 5-methylcytosine"
agctttagaaagcctcctgggtatttaccctatacaaccctgcctaagaacgaactttgacgtatgctgaatgttgactgctacatcccaaggttgtaaaaaaacaagacttagctatgtaa

SEQ ID NO: 5853 - DNA, 122 bp, Homo sapiens
  misc_feature (61)..(62): /note="This region represents a CpG dinucleotide"
  misc_feature (61)..(61): /note="Nucleotide may be methylated to form 5-methylcytosine"
ccaagtacataatggtcaataaagtttgcctaagatggaacatctactggaggaggaatgcgtctcaaaccaggagcactgtgggctgggattatacaaagccacaagatgaacaaggtgca

SEQ ID NO: 5854 - DNA, 122 bp, Homo sapiens
  misc_feature (61)..(62): /note="This region represents a CpG dinucleotide"
  misc_feature (61)..(61): /note="Nucleotide may be methylated to form 5-methylcytosine"
ttacaggcatgagccacctcgctggcctaagtctcttttagtacaggcagggtttcatcacgttggccaggctggttttgaactcctgacctcaagcgatccacctgcctcggcctcccaaa

SEQ ID NO: 5855 - DNA, 122 bp, Homo sapiens
  misc_feature (61)..(62): /note="This region represents a CpG dinucleotide"
  misc_feature (61)..(61): /note="Nucleotide may be methylated to form 5-methylcytosine"
gtaacatggaaaagctaaaggttctctgagctgcagtggctcctcctttccatgagggggcgccatccagagtcagcgcttcctctgaacacatcccacttgaatgggacaggcagccatgg

SEQ ID NO: 5856 - DNA, 122 bp, Homo sapiens
  misc_feature (61)..(62): /note="This region represents a CpG dinucleotide"
  misc_feature (61)..(61): /note="Nucleotide may be methylated to form 5-methylcytosine"
agtgaataccctttcaagagatttcattttatgtttaagaagatacaattaccttgtgaacgctgtgtgctgacaacggtactacctgatgacaaagattagatttgttcttaaatttatta

SEQ ID NO: 5857 - DNA, 122 bp, Homo sapiens
  misc_feature (61)..(62): /note="This region represents a CpG dinucleotide"
  misc_feature (61)..(61): /note="Nucleotide may be methylated to form 5-methylcytosine"
caatggcactggtacttgtagtgaaatgagccacagaggcatcattactcatcaccatcacgactcaaggatcagcaaatgagagtcctgaaggtaaagaatgtttattttcaggtagagaa

SEQ ID NO: 5858 - DNA, 122 bp, Homo sapiens
  misc_feature (61)..(62): /note="This region represents a CpG dinucleotide"
  misc_feature (61)..(61): /note="Nucleotide may be methylated to form 5-methylcytosine"
cagcattgcattaggtaccttggcaagagccaagcgaggtaaacagttccattacacatacgccacatgaggagtgagagatgtcagagctgggccagtatggaggcagctgaggtacactg

SEQ ID NO: 5859 - DNA, 122 bp, Homo sapiens
  misc_feature (61)..(62): /note="This region represents a CpG dinucleotide"
  misc_feature (61)..(61): /note="Nucleotide may be methylated to form 5-methylcytosine"
gttcctaccccagatttcctgagggcagccatggagcatagagtgggctctgtgccagcccgtgttctcctattgaggtagagttcacaggctgcaaaggggaagccttttcagagacagct

SEQ ID NO: 5860 - DNA, 122 bp, Homo sapiens
  misc_feature (61)..(62): /note="This region represents a CpG dinucleotide"
  misc_feature (61)..(61): /note="Nucleotide may be methylated to form 5-methylcytosine"
agaggcaaaatcaacaagacctggtgacaggatggacatggagtgtgagtaagagagccacgtgactcccgggtttctggagatgaccaaatcctccccacaacaaaattattgctccctag

SEQ ID NO: 5861 - DNA, 122 bp, Homo sapiens
  misc_feature (61)..(62): /note="This region represents a CpG dinucleotide"
  misc_feature (61)..(61): /note="Nucleotide may be methylated to form 5-methylcytosine"
acagaggagtctttaacccacatcagccttgatctaagtgtaccactttacttaaaagttcgtgggatctggagctcctggtctagcaagccatgaaaatgccaataaatgtttgtaataaa

SEQ ID NO: 5862 - DNA, 122 bp, Homo sapiens
  misc_feature (61)..(62): /note="This region represents a CpG dinucleotide"
  misc_feature (61)..(61): /note="Nucleotide may be methylated to form 5-methylcytosine"
cacccactttttctaatattccattgacaattaaaacaatgctctaccctagagagatgacgtcactctctaggtaatttaaaccaaaaacaaaataaacataaataagcacactgactatt

SEQ ID NO: 5863 - DNA, 122 bp, Homo sapiens
  misc_feature (61)..(62): /note="This region represents a CpG dinucleotide"
  misc_feature (61)..(61): /note="Nucleotide may be methylated to form 5-methylcytosine"
ccacccaagtctcatgttgaattgtaatccccaacactgaaggtggggcctggtgggagacgtttggatcatggcagcagatcactcatggcttggttccatctttgtgatagggacttctc

SEQ ID NO: 5864 - DNA, 122 bp, Homo sapiens
  misc_feature (61)..(62): /note="This region represents a CpG dinucleotide"
  misc_feature (61)..(61): /note="Nucleotide may be methylated to form 5-methylcytosine"
gaggctgaggcagaagaatcgcttgaacgcaggaggcgaggtttcagtgagctgagatcccgccaccacactccagcctgggtgacaaagcaagagtccatctcaaaaacaaacaaacaaac

SEQ ID NO: 5865 - DNA, 122 bp, Homo sapiens
  misc_feature (61)..(62): /note="This region represents a CpG dinucleotide"
  misc_feature (61)..(61): /note="Nucleotide may be methylated to form 5-methylcytosine"
agccccaactgcaggatagcagctgctcccttaaagaccagaacaccaagaaactcaacacggtccaggctaccagcatattctgttctagaaagttgtttgtgtttgtgtttgtgtctgtc

SEQ ID NO: 5866 - DNA, 122 bp, Homo sapiens
  misc_feature (61)..(62): /note="This region represents a CpG dinucleotide"
  misc_feature (61)..(61): /note="Nucleotide may be methylated to form 5-methylcytosine"
tagcactgaatagagggtttaccagattgttggcactggataagtggtactgggcacaatcgtcctctttcataagcaggagggaagtttcctttcctaggattgagagagctggctgactt

SEQ ID NO: 5867 - DNA, 122 bp, Homo sapiens
  misc_feature (61)..(62): /note="This region represents a CpG dinucleotide"
  misc_feature (61)..(61): /note="Nucleotide may be methylated to form 5-methylcytosine"
attactgcccacgagggtcactggaattgactcaagtcagtgaaaggctttgaagattaacgggcccatataaatgttaatttgttatgaggtttctgctaggacgttaaacagagcaggga

SEQ ID NO: 5868 - DNA, 122 bp, Homo sapiens
  misc_feature (61)..(62): /note="This region represents a CpG dinucleotide"
  misc_feature (61)..(61): /note="Nucleotide may be methylated to form 5-methylcytosine"
ggtgtaggatataatctcctggtgtgccggtttttaaccctgtcagaaaagcacagtattcgggtgggagtgacctgattttctaggtgccgtctgtctcccctttctttgactaggaaagg

SEQ ID NO: 5869 - DNA, 122 bp, Homo sapiens
  misc_feature (61)..(62): /note="This region represents a CpG dinucleotide"
  misc_feature (61)..(61): /note="Nucleotide may be methylated to form 5-methylcytosine"
atttctccagtttttacctaacgtcctttttctgttctgggattccaaccaagattccaccgtctccttgggttcctctgggctgtgacagtttctcagactttgtttttgatgaccttgac

SEQ ID NO: 5870 - DNA, 122 bp, Homo sapiens
  misc_feature (61)..(62): /note="This region represents a CpG dinucleotide"
  misc_feature (61)..(61): /note="Nucleotide may be methylated to form 5-methylcytosine"
aagccgctgaagggtgagggttgtcagcactgcataatctagcctgtcctaactaatatacgtcccttgcttggaaaatgcagagtccaggtcatgagttttaacaaagatacagaaacgaa

SEQ ID NO: 5871 - DNA, 122 bp, Homo sapiens
  misc_feature (61)..(62): /note="This region represents a CpG dinucleotide"
  misc_feature (61)..(61): /note="Nucleotide may be methylated to form 5-methylcytosine"
ccggggtcgccccctgggctcacctgggctcagtctcctgggctcagggttcagcagctccgggctctcctccgccacctgggaggagccttgagtaagtcccgcccggaagtggaggagga

SEQ ID NO: 5872 - DNA, 122 bp, Homo sapiens
  misc_feature (61)..(62): /note="This region represents a CpG dinucleotide"
  misc_feature (61)..(61): /note="Nucleotide may be methylated to form 5-methylcytosine"
aagtttccaattgcaatagtataaaaataaggaacttaatcaaaataaatgtaaagtgaccgagcatagtgactcacacctgtaatgccagcacattgggatgccaaggtggggagatcact

SEQ ID NO: 5873 - DNA, 122 bp, Homo sapiens
  misc_feature (61)..(62): /note="This region represents a CpG dinucleotide"
  misc_feature (61)..(61): /note="Nucleotide may be methylated to form 5-methylcytosine"
tcattgttaaagtatcacatggtttgtacagcaggatgatttgcattatatgaaggacaccgaaacacagaaaatgaaaggtctacggtgtatgacaaacaggacaaatgctctagcaaaaa

SEQ ID NO: 5874 - DNA, 122 bp, Homo sapiens
  misc_feature (61)..(62): /note="This region represents a CpG dinucleotide"
  misc_feature (61)..(61): /note="Nucleotide may be methylated to form 5-methylcytosine"
acagcaccctcaatgtggtgtcaatgcctccttcagttctgaagttttgaaataaatactcgaaacatccagttatacaccctctttccaagagtgtttgcacatatttggtgctcctcaag

SEQ ID NO: 5875 - DNA, 122 bp, Homo sapiens
  misc_feature (61)..(62): /note="This region represents a CpG dinucleotide"
  misc_feature (61)..(61): /note="Nucleotide may be methylated to form 5-methylcytosine"
atttcaataatgttaatttccttgcttccctcttgaggtccttaagattcataggttctccggactccttgaaagttttgtgtagatgcatgaggtgtatttttcttggaaataaagtccac

SEQ ID NO: 5876 - DNA, 122 bp, Homo sapiens
  misc_feature (61)..(62): /note="This region represents a CpG dinucleotide"
  misc_feature (61)..(61): /note="Nucleotide may be methylated to form 5-methylcytosine"
tcagagcaccacagggctgatgtctggatatggattagtgaccaggattattatgtatcacgggtgctagtcaaggatgctggtcagagatgtaaggaaggggctttcctaaacaggctaga

SEQ ID NO: 5877 - DNA, 122 bp, Homo sapiens
  misc_feature (61)..(62): /note="This region represents a CpG dinucleotide"
  misc_feature (61)..(61): /note="Nucleotide may be methylated to form 5-methylcytosine"
tggtggaggaagggaagggctggcttcttcccgttggcaaatggcagactgtgggcaggacggggcagtccaggaaacaagatgaaacacagcccacttgtctgtcatgcagacatgtttgt

SEQ ID NO: 5878 - DNA, 122 bp, Homo sapiens
  misc_feature (61)..(62): /note="This region represents a CpG dinucleotide"
  misc_feature (61)..(61): /note="Nucleotide may be methylated to form 5-methylcytosine"
ctacttaatgtatttggtatgtgggagaaactcgtaactctgggactgcccagtgtacggcgtctgtcacgtctgaagtgtgagcattccaaaggctcacagccacccagctcagaactcag

SEQ ID NO: 5879 - DNA, 122 bp, Homo sapiens
  misc_feature (61)..(62): /note="This region represents a CpG dinucleotide"
  misc_feature (61)..(61): /note="Nucleotide may be methylated to form 5-methylcytosine"
agagaacatgataggtttggagaactaggagagtttgctaaagattcagcttaggatccacgaaggaacaaaatgaaaaggatgtcagcaggcagattagaaaggatcttaaagtcatgtta

SEQ ID NO: 5880 - DNA, 122 bp, Homo sapiens
  misc_feature (61)..(62): /note="This region represents a CpG dinucleotide"
  misc_feature (61)..(61): /note="Nucleotide may be methylated to form 5-methylcytosine"
cagcaaaaagcaaacattcaaagcagtccctgcgggctcagcgtggcgaccatgagcgcacgtttgtgtgccggctgactctcctcctcgcataggaggaccagggcgcattggtggcggtg

SEQ ID NO: 5881 - DNA, 122 bp, Homo sapiens
  misc_feature (61)..(62): /note="This region represents a CpG dinucleotide"
  misc_feature (61)..(61): /note="Nucleotide may be methylated to form 5-methylcytosine"
ttcctcataacttggatttacacactgcaaatcctctgatctgattacctccagtgatcacgtaaaatactggctttaaactctttgccttagtgataaaacagccactttgattcacaacg

SEQ ID NO: 5882 - DNA, 122 bp, Homo sapiens
  misc_feature (61)..(62): /note="This region represents a CpG dinucleotide"
  misc_feature (61)..(61): /note="Nucleotide may be methylated to form 5-methylcytosine"
cgtgcctgatcttgtctgatctcggaagctaagcaggttcaggccttgttagtacttggacgggagaaaggagaaaaagaaggacatggatgggaaggtaggacccagcttcaaccccacca

SEQ ID NO: 5883 - DNA, 122 bp, Homo sapiens
  misc_feature (61)..(62): /note="This region represents a CpG dinucleotide"
  misc_feature (61)..(61): /note="Nucleotide may be methylated to form 5-methylcytosine"
ttacagaataattctcttccaagagcaataaatatgcagctggacacatgcggcaagatccgtccttctaaatcactcttcctggagttaaagaaaacattgtctggacattcttgtgataa

SEQ ID NO: 5884 - DNA, 122 bp, Homo sapiens
  misc_feature (61)..(62): /note="This region represents a CpG dinucleotide"
  misc_feature (61)..(61): /note="Nucleotide may be methylated to form 5-methylcytosine"
aattatttgagtaattagctgtcaattcacaaattttctattaagctcaacacaaaatttcgatattatgtatactacaacatgcagaaacaaataagcatgctaggttttcaggaaacttt

SEQ ID NO: 5885 - DNA, 122 bp, Homo sapiens
  misc_feature (61)..(62): /note="This region represents a CpG dinucleotide"
  misc_feature (61)..(61): /note="Nucleotide may be methylated to form 5-methylcytosine"
ttatccatttcttttagggatgagaaaactaaggctcacaacaatcaagggaccaacccacggtcccctagctctgaagtggggatccaacccaggtgtggctgaatagagaccaccgagat

SEQ ID NO: 5886 - DNA, 122 bp, Homo sapiens
  misc_feature (61)..(62): /note="This region represents a CpG dinucleotide"
  misc_feature (61)..(61): /note="Nucleotide may be methylated to form 5-methylcytosine"
taggaacagtgagtaactcagtgagtgccctaaaccaaatgaaacccaggtcttccttggcgtacagtcatctgatctctatctctctggctaagtgataatgtgaaggaggaggcctgagc

SEQ ID NO: 5887 - DNA, 122 bp, Homo sapiens
  misc_feature (61)..(62): /note="This region represents a CpG dinucleotide"
  misc_feature (61)..(61): /note="Nucleotide may be methylated to form 5-methylcytosine"
gttgaaactttatttcctccttatgaatcaactatcttattaggagtgattgaaattatacgaagtttgttcttcactggtgtgcaggcttatactgtaattgccttttaagtatttaaagt

SEQ ID NO: 5888 - DNA, 122 bp, Homo sapiens
  misc_feature (61)..(62): /note="This region represents a CpG dinucleotide"
  misc_feature (61)..(61): /note="Nucleotide may be methylated to form 5-methylcytosine"
tatgcgggaaatgagcaagcaggcatcatagacaaggaacccagaagcctcagctatgcacgggataaggaagtgactaattgcaaattcagtgctcagaaaaaaaggaaataatttaaatc

SEQ ID NO: 5889 - DNA, 122 bp, Homo sapiens
  misc_feature (61)..(62): /note="This region represents a CpG dinucleotide"
  misc_feature (61)..(61): /note="Nucleotide may be methylated to form 5-methylcytosine"
tccacccacaggcctggtattacaaaatagagcttcctaatgggacctgcctgacactctcgttttatgtagaaaattgactcaagcaaacctcagaggacagagccagcagctgacctggg

SEQ ID NO: 5890 - DNA, 122 bp, Homo sapiens
  misc_feature (61)..(62): /note="This region represents a CpG dinucleotide"
  misc_feature (61)..(61): /note="Nucleotide may be methylated to form 5-methylcytosine"
atggagatctaggaggaaaagaacatgactagcaagcatggcacagcagggcatcgcggccgcactgccatcagccacagagaactgtcgaagccacggccaacccacttccggggcctgag

SEQ ID NO: 5891 - DNA, 122 bp, Homo sapiens
  misc_feature (61)..(62): /note="This region represents a CpG dinucleotide"
  misc_feature (61)..(61): /note="Nucleotide may be methylated to form 5-methylcytosine"
ctcagaactgtagatttcgcttttaaaaccatggcaagagtatcatcaccacagcaagggcgagcccagagaaagtgcatttggtgagattttataaatgtacccaaggcacgtgttttgtt

SEQ ID NO: 5892 - DNA, 122 bp, Homo sapiens
  misc_feature (61)..(62): /note="This region represents a CpG dinucleotide"
  misc_feature (61)..(61): /note="Nucleotide may be methylated to form 5-methylcytosine"
tcggctctcggcagcagaagagggcccagcccctgcagagctgctgggggtcccaggcttcggccatgggtgggggtctggcggctcagggccactcagggcggcttggctggccctgggac

SEQ ID NO: 5893 - DNA, 122 bp, Homo sapiens
  misc_feature (61)..(62): /note="This region represents a CpG dinucleotide"
  misc_feature (61)..(61): /note="Nucleotide may be methylated to form 5-methylcytosine"
ttcaggaggaggctgggcgttagagggaggctgtggcttatctcctgcagctgggcaggacggctgagtttactgttgtaaagaggaagccgccgctttagtttcctcttgtgagggctgtg

SEQ ID NO: 5894 - DNA, 122 bp, Homo sapiens
  misc_feature (61)..(62): /note="This region represents a CpG dinucleotide"
  misc_feature (61)..(61): /note="Nucleotide may be methylated to form 5-methylcytosine"
tctccccaccgccaacccccaccgcaaccattctcttctctctgtccctagagaaaagcccgctacatccatttggatttatgtaaggtggattagggacacaaaggaaacaataagaccca

SEQ ID NO: 5895 - DNA, 122 bp, Homo sapiens
  misc_feature (61)..(62): /note="This region represents a CpG dinucleotide"
  misc_feature (61)..(61): /note="Nucleotide may be methylated to form 5-methylcytosine"
tctgaaaacctctagtattttggatacttagcatctgctaggccttatactcagggaaggcgatctcctcgcagagctagaggatgagtcattatgtatgagccagttgttgtggtctcatt

SEQ ID NO: 5896 - DNA, 122 bp, Homo sapiens
  misc_feature (61)..(62): /note="This region represents a CpG dinucleotide"
  misc_feature (61)..(61): /note="Nucleotide may be methylated to form 5-methylcytosine"
cgctccctctccatgaacagtcttggcctttgttccacatcagcctaaaatgagctgcctcgttcttttttagaggcagccaagtagtccaccatatggaggtagtacaatttgcttaacta

SEQ ID NO: 5897 - DNA, 122 bp, Homo sapiens
  misc_feature (61)..(62): /note="This region represents a CpG dinucleotide"
  misc_feature (61)..(61): /note="Nucleotide may be methylated to form 5-methylcytosine"
tctggctaaagccttaaagactggtccttaagagctgaactatatgcaactaaatcaacacgttatttctaaaagagacacaaccaaaaggctttagcaaaatctgatcttctttttgttga

SEQ ID NO: 5898 - DNA, 122 bp, Homo sapiens
  misc_feature (61)..(62): /note="This region represents a CpG dinucleotide"
  misc_feature (61)..(61): /note="Nucleotide may be methylated to form 5-methylcytosine"
cggcccggacctcagctgcggggagactaccggaagctaaggagaacagcccgcagcctacgccgcggggccctggtgaccggtttggttagtctcgggctctcgagtctgccaggagtcta

SEQ ID NO: 5899 - DNA, 122 bp, Homo sapiens
  misc_feature (61)..(62): /note="This region represents a CpG dinucleotide"
  misc_feature (61)..(61): /note="Nucleotide may be methylated to form 5-methylcytosine"
ttcaccatgttggccaggctggtttcgaactcctgacctcaggtgatccatcctcctcagcgtccctaaatgctaaggttgcaagcgtgagccaccgcacccagcctgatcctttaatttca

SEQ ID NO: 5900 - DNA, 122 bp, Homo sapiens
  misc_feature (61)..(62): /note="This region represents a CpG dinucleotide"
  misc_feature (61)..(61): /note="Nucleotide may be methylated to form 5-methylcytosine"
tctggcctcccatactctctctctagtgccccctattggcagatcctagcagggagtagccgataaagcccaaatgcagtcccagtcctggcattgcagagatgagtattaaagggtggatt

SEQ ID NO: 5901 - DNA, 122 bp, Homo sapiens
  misc_feature (61)..(62): /note="This region represents a CpG dinucleotide"
  misc_feature (61)..(61): /note="Nucleotide may be methylated to form 5-methylcytosine"
acaaagggctctttcctttctcaatcaataattctgacaaatctgttctctacaactttacgtgtaagtgataaatgatttgaggaatgtgttgatattaatatgaactgtcttctttttcc

SEQ ID NO: 5902 - DNA, 122 bp, Homo sapiens
  misc_feature (61)..(62): /note="This region represents a CpG dinucleotide"
  misc_feature (61)..(61): /note="Nucleotide may be methylated to form 5-methylcytosine"
tgcgcctggccatgttaagcatttcttaatgtgctgaaataatcactgcctgcttcaaaacgtagctcaaaaaaaatccacatttttcttcagatcctcaaaaaaaagctttaaccctttct

SEQ ID NO: 5903 - DNA, 122 bp, Homo sapiens
  misc_feature (61)..(62): /note="This region represents a CpG dinucleotide"
  misc_feature (61)..(61): /note="Nucleotide may be methylated to form 5-methylcytosine"
cgtaattggttccatgtgtgcagtaggagagtcagtgagagggtgagagagacggggagacggaaacctcttaaccacggctcacacggcgtctttggtgaggtggtttaggtttacatctc

SEQ ID NO: 5904 - DNA, 122 bp, Homo sapiens
  misc_feature (61)..(62): /note="This region represents a CpG dinucleotide"
  misc_feature (61)..(61): /note="Nucleotide may be methylated to form 5-methylcytosine"
ttggaaatgcacagaatttctctagacggatacagaggaggcaggaaatggtggctgcctcgagagaagcacactaggtagctagggcacaagggtcagagaaagctctttactttttacta

SEQ ID NO: 5905 - DNA, 122 bp, Homo sapiens
  misc_feature (61)..(62): /note="This region represents a CpG dinucleotide"
  misc_feature (61)..(61): /note="Nucleotide may be methylated to form 5-methylcytosine"
gttgtgaatatcttacctgcaaagaaatgaagatggttttagaagctgttagttgagactcggattccatttgacaaaggaattgtatactatgtacaaacggttgcatcaacatgcttatt

SEQ ID NO: 5906 - DNA, 122 bp, Homo sapiens
  misc_feature (61)..(62): /note="This region represents a CpG dinucleotide"
  misc_feature (61)..(61): /note="Nucleotide may be methylated to form 5-methylcytosine"
caggcagggccgtgagccgggcgagggagagtcctgggctgcccctgagccccggggccacgggaagaacttgcagcgacgtcatccctgccccggacacagtcccgggcccagggaggacc

SEQ ID NO: 5907 - DNA, 122 bp, Homo sapiens
  misc_feature (61)..(62): /note="This region represents a CpG dinucleotide"
  misc_feature (61)..(61): /note="Nucleotide may be methylated to form 5-methylcytosine"
gacagagacagaggtgactcaggaagagtcagcgtggggtttgcttagaaaaatctcccacgcaatttgagcttaggttgggccaaaacggacatcctgggaagctcacattgtggacaata

SEQ ID NO: 5908 - DNA, 122 bp, Homo sapiens
  misc_feature (61)..(62): /note="This region represents a CpG dinucleotide"
  misc_feature (61)..(61): /note="Nucleotide may be methylated to form 5-methylcytosine"
tgtggtctttctgtcttcctgggctttgctgggggcccattggagtggccagtggggcctcgttgtcacagctgacacagagcagggcccaggccacccggcttctctctccctgtggttgt

SEQ ID NO: 5909 - DNA, 122 bp, Homo sapiens
  misc_feature (61)..(62): /note="This region represents a CpG dinucleotide"
  misc_feature (61)..(61): /note="Nucleotide may be methylated to form 5-methylcytosine"
ttaacttacttcctttctttctcccttctttcaactttgcagattgcctaacagttatttcgtaactctttggacaatgaaacttttgttttttaaaacaatgcttgcttcccttctcaaaa

SEQ ID NO: 5910 - DNA, 122 bp, Homo sapiens
  misc_feature (61)..(62): /note="This region represents a CpG dinucleotide"
  misc_feature (61)..(61): /note="Nucleotide may be methylated to form 5-methylcytosine"
cctgggtgattctaatgtgcagcctgggctgaatatcacagctgtaaacttccgtctcctcgtctgtgaaatagagatttagaaaacagccactatgtcatggggtattttgcaaaattcag

SEQ ID NO: 5911 - DNA, 122 bp, Homo sapiens
  misc_feature (61)..(62): /note="This region represents a CpG dinucleotide"
  misc_feature (61)..(61): /note="Nucleotide may be methylated to form 5-methylcytosine"
aagtgatccagtgatgtcttaaggtgcagctctttgtcctccccagctgtgctccctgcccgctgaccccgtgcgctcgagccagtgggggtggggagcccgaaacctataacataaacggg

SEQ ID NO: 5912 - DNA, 122 bp, Homo sapiens
  misc_feature (61)..(62): /note="This region represents a CpG dinucleotide"
  misc_feature (61)..(61): /note="Nucleotide may be methylated to form 5-methylcytosine"
tccctgcagtcattccatggggctgcgatccaggaattcaatgactgctcgcactgggggcgcctggtacaactgagctctgtgggaagtacaggatggacttgaaggctgtgctctccatt

SEQ ID NO: 5913 - DNA, 122 bp, Homo sapiens
  misc_feature (61)..(62): /note="This region represents a CpG dinucleotide"
  misc_feature (61)..(61): /note="Nucleotide may be methylated to form 5-methylcytosine"
gtgcccattttcaagcaggtgctcttttagatacggtccccctttcacaaaagttatatccgcggccaggtgcggtggctcacgcctgtaatcccagcactttgggaggctgaggtgggagg

SEQ ID NO: 5914 - DNA, 122 bp, Homo sapiens
  misc_feature (61)..(62): /note="This region represents a CpG dinucleotide"
  misc_feature (61)..(61): /note="Nucleotide may be methylated to form 5-methylcytosine"
taagtcagagctgtgggagtccagcagcttttacacgttagatttttctatttcctcattcgtcagcatttgacatcattttctgatgttataaaggataacagaaaaaaaaaccctgtgca

SEQ ID NO: 5915 - DNA, 122 bp, Homo sapiens
  misc_feature (61)..(62): /note="This region represents a CpG dinucleotide"
  misc_feature (61)..(61): /note="Nucleotide may be methylated to form 5-methylcytosine"
ctcccaagtagttgggattacaggtgcctgccatgacacacagctaatttttgtatgtttcgtagagaaagggtttcatcatgttctccaggctggtctcaaactcctggccgaagttatca

SEQ ID NO: 5916 - DNA, 122 bp, Homo sapiens
  misc_feature (61)..(62): /note="This region represents a CpG dinucleotide"
  misc_feature (61)..(61): /note="Nucleotide may be methylated to form 5-methylcytosine"
ctccggttcgcggacccccacctccaccgggatccctgctttgacgcggcttcgcccccgcggctggtgaggaccctccacagcccgggacccgcctgagtccttacctctgcgtgagggtc

SEQ ID NO: 5917 - DNA, 122 bp, Homo sapiens
  misc_feature (61)..(62): /note="This region represents a CpG dinucleotide"
  misc_feature (61)..(61): /note="Nucleotide may be methylated to form 5-methylcytosine"
tctttttcccaataactgctgaacagccaacacacctgccaaaataatttgaaagaagcccggcattagagcaaggtctgagcaaagtgcaaactaacaatggggccctaatatgcaagact

SEQ ID NO: 5918 - DNA, 122 bp, Homo sapiens
  misc_feature (61)..(62): /note="This region represents a CpG dinucleotide"
  misc_feature (61)..(61): /note="Nucleotide may be methylated to form 5-methylcytosine"
tcgagtatctctgactccattcatgtataaaaggtagccatagtcttccagaggtgaggccgtccttttgttttgagttctctggaagcaactccagtttctagatcagaagaaagaatagg

SEQ ID NO: 5919 - DNA, 122 bp, Homo sapiens
  misc_feature (61)..(62): /note="This region represents a CpG dinucleotide"
  misc_feature (61)..(61): /note="Nucleotide may be methylated to form 5-methylcytosine"
ttatatcaggctaattctagtagaacttcgattttgcatacattttccagggctattatgcgtttttagcttttctatatcctcaaatgacatgaaattgccttaatgaggctaattaaaca

SEQ ID NO: 5920 - DNA, 122 bp, Homo sapiens
  misc_feature (61)..(62): /note="This region represents a CpG dinucleotide"
  misc_feature (61)..(61): /note="Nucleotide may be methylated to form 5-methylcytosine"
tacggcgcggctaaacgtgtgccactaactgcgtggatagacgagatgcaccacggtagacgtgagggtttgactttctccatccataactgggaagttaaagttgacagtttggtaagaag

SEQ ID NO: 5921 - DNA, 122 bp, Homo sapiens
  misc_feature (61)..(62): /note="This region represents a CpG dinucleotide"
  misc_feature (61)..(61): /note="Nucleotide may be methylated to form 5-methylcytosine"
accccgtggacctccacgtggtaggtggtgccgggcctgaggtcgggcaggctgacggtgcgcgtggtgcccggcacagtcagctcaccgccggggccctctgcaggcggctgaggccgcca

SEQ ID NO: 5922 - DNA, 122 bp, Homo sapiens
  misc_feature (61)..(62): /note="This region represents a CpG dinucleotide"
  misc_feature (61)..(61): /note="Nucleotide may be methylated to form 5-methylcytosine"
tagctctgaattatgactatctcctcctaggaatgatacaccccatttccacattgggtgcgtcatggaatctatgtaatacatgattccttaccggcaaagccaagtggcctgcacacatt

SEQ ID NO: 5923 - DNA, 122 bp, Homo sapiens
  misc_feature (61)..(62): /note="This region represents a CpG dinucleotide"
  misc_feature (61)..(61): /note="Nucleotide may be methylated to form 5-methylcytosine"
gctccgcttctgctcacactggcagcgttggtgcacgtgggagtgcagtcacggggctcacgttcgcgtttcctcggctgcctggagcccatagagcgctcctttctgggggtgcttcctcg

SEQ ID NO: 5924 - DNA, 122 bp, Homo sapiens
  misc_feature (61)..(62): /note="This region represents a CpG dinucleotide"
  misc_feature (61)..(61): /note="Nucleotide may be methylated to form 5-methylcytosine"
catgtgcataatactgtggaaattagtaaacagtcacaaacaagtgattcatattcagggcgcagcctttttgacaggaaaacagtaatcaagagtttgggatttgaagatttttaaaagga

SEQ ID NO: 5925 - DNA, 122 bp, Homo sapiens
  misc_feature (61)..(62): /note="This region represents a CpG dinucleotide"
  misc_feature (61)..(61): /note="Nucleotide may be methylated to form 5-methylcytosine"
aagatagcctggacttgggcttcccttctcctccctcctctccagcccagaaaccaagggcggtggccaaaaggctattgttcttactcatgtggctgagaaaatattactcctaagcaaga

SEQ ID NO: 5926 - DNA, 122 bp, Homo sapiens
  misc_feature (61)..(62): /note="This region represents a CpG dinucleotide"
  misc_feature (61)..(61): /note="Nucleotide may be methylated to form 5-methylcytosine"
cagtgcgaactggctacttcccaactgttctaaaagaggcacaaagggcagggacattttcgtaaacagagatcatttctaagtcacatcttcataaacagggaaaggcatatagtaaaacc

SEQ ID NO: 5927 - DNA, 122 bp, Homo sapiens
  misc_feature (61)..(62): /note="This region represents a CpG dinucleotide"
  misc_feature (61)..(61): /note="Nucleotide may be methylated to form 5-methylcytosine"
cacacgtatacacaaaaccccacaagagtatagtactatctatgaaggaaagagataccacgttaaatttaaccaagtatttaggaatgacagggagctaggaaggcgaaaacacatgtaat

SEQ ID NO: 5928 - DNA, 122 bp, Homo sapiens
  misc_feature (61)..(62): /note="This region represents a CpG dinucleotide"
  misc_feature (61)..(61): /note="Nucleotide may be methylated to form 5-methylcytosine"
acagctgtgcggtccggagccgccccccacccccgacgcgccgctcccagccccagcgggcgagactaatgccgggccacccctcaggacccccgcacctcccccagaccccacacggtcct

SEQ ID NO: 5929 - DNA, 122 bp, Homo sapiens
  misc_feature (61)..(62): /note="This region represents a CpG dinucleotide"
  misc_feature (61)..(61): /note="Nucleotide may be methylated to form 5-methylcytosine"
actctggaaatgaaagcggtttctaagaatgaaggtaacaggaactctgcacctaagcaccgtatcctacttgataaagttgtttcccacagagttactggttaacaattctgatacttcta

SEQ ID NO: 5930 - DNA, 122 bp, Homo sapiens
  misc_feature (61)..(62): /note="This region represents a CpG dinucleotide"
  misc_feature (61)..(61): /note="Nucleotide may be methylated to form 5-methylcytosine"
cataaatcagatgtacagatgtaatcaaacactgaatgtgcctataaagcaatacacttacgttaaattttaaaagtcttcactgggagtacagagggaatagggggttgctggtcaaaggg

SEQ ID NO: 5931 - DNA, 122 bp, Homo sapiens
  misc_feature (61)..(62): /note="This region represents a CpG dinucleotide"
  misc_feature (61)..(61): /note="Nucleotide may be methylated to form 5-methylcytosine"
taatgtttgcctagaactgagcacgagttttccactcttgcagcgcgagaagagaaaagacgcagataaactagcagagcaaagggcagaagaaaagagactaaaaaggagaaactagaatt

SEQ ID NO: 5932 - DNA, 122 bp, Homo sapiens
  misc_feature (61)..(62): /note="This region represents a CpG dinucleotide"
  misc_feature (61)..(61): /note="Nucleotide may be methylated to form 5-methylcytosine"
cgggtgagagggaagcatggagacccgtctcaggagcactgagtcagcagcacagtggggcgcagttgatccacataaagcctcacattgttcctgcagcagtcaggacagtggtgaccttt

SEQ ID NO: 5933 - DNA, 122 bp, Homo sapiens
  misc_feature (61)..(62): /note="This region represents a CpG dinucleotide"
  misc_feature (61)..(61): /note="Nucleotide may be methylated to form 5-methylcytosine"
aagagcaagacacagagagggagcgagagaaaaaacgctctctcttaagtggaagtagcacggatcccaggggccaggaggccagaaatggaagtttaaactgcatctgtcttttaaaggga

SEQ ID NO: 5934 - DNA, 122 bp, Homo sapiens
  misc_feature (61)..(62): /note="This region represents a CpG dinucleotide"
  misc_feature (61)..(61): /note="Nucleotide may be methylated to form 5-methylcytosine"
gtaaagcgaaaacaacataaacaggaagtaagcacacaggcagcagtgtgccgatcaaaccgcacccacagccacaggcagtgggccagaggtgacccactagccacagccggccgaccctg

SEQ ID NO: 5935 - DNA, 122 bp, Homo sapiens
  misc_feature (61)..(62): /note="This region represents a CpG dinucleotide"
  misc_feature (61)..(61): /note="Nucleotide may be methylated to form 5-methylcytosine"
aagagtatctggcatttagcaaatccttatcaatgctgatcaaatgaatgaatgaacaaacgtggcgacatttaagcaaactagtaatgcagtcagtctaagctaagagttgagacatttca

SEQ ID NO: 5936 - DNA, 122 bp, Homo sapiens
  misc_feature (61)..(62): /note="This region represents a CpG dinucleotide"
  misc_feature (61)..(61): /note="Nucleotide may be methylated to form 5-methylcytosine"
agtgcaggatgcataactgtgcacttccctcttggacgttgccaaaggactgatctctcccggactctgtccatcagagcagagtcctcgccctgttgtcaggccagccagctcggctctgc

SEQ ID NO: 5937 - DNA, 122 bp, Homo sapiens
  misc_feature (61)..(62): /note="This region represents a CpG dinucleotide"
  misc_feature (61)..(61): /note="Nucleotide may be methylated to form 5-methylcytosine"
atttatggctagaagaactcgtatgtacactttagtttccagaactgtttggtaacctttcgtaccttattaaagattcttaaatctccgtgattgtggtaggaatttcttcttcacccacc

SEQ ID NO: 5938 - DNA, 122 bp, Homo sapiens
  misc_feature (61)..(62): /note="This region represents a CpG dinucleotide"
  misc_feature (61)..(61): /note="Nucleotide may be methylated to form 5-methylcytosine"
tcacaggcccatgactgtataaagagtcataatctttacaaacacaacaatgactcacagcgacatgttgcaaagctgtaatcgaaaacactgatgttgatttcagaggccattaatggtgt

SEQ ID NO: 5939 - DNA, 122 bp, Homo sapiens
  misc_feature (61)..(62): /note="This region represents a CpG dinucleotide"
  misc_feature (61)..(61): /note="Nucleotide may be methylated to form 5-methylcytosine"
cgctgtcccagcccacccgtcaatcacccatcaatcaccggccaatcacccgtcaatcaccgtctcttgccagctttgcatcctaaatattttttggaagagtcccgtgtccgccacacccc

SEQ ID NO: 5940 - DNA, 122 bp, Homo sapiens
  misc_feature (61)..(62): /note="This region represents a CpG dinucleotide"
  misc_feature (61)..(61): /note="Nucleotide may be methylated to form 5-methylcytosine"
atgtgctatttattacattggtttctgtgacacatgaagcttacctaagctagaccctgtcgtcttgcttacaactgagccatcacttgggagatggaaaaatggcttctggctgtctgaat

SEQ ID NO: 5941 - DNA, 122 bp, Homo sapiens
  misc_feature (61)..(62): /note="This region represents a CpG dinucleotide"
  misc_feature (61)..(61): /note="Nucleotide may be methylated to form 5-methylcytosine"
gtaaggactgcctgtttagagccctgagtgcccgctttggcttttttctgacaaatgtgtcgttgaagcacaccgattttccttcctgggcctcagttgattcttccgtaaaagcagaagtt

SEQ ID NO: 5942 - DNA, 122 bp, Homo sapiens
  misc_feature (61)..(62): /note="This region represents a CpG dinucleotide"
  misc_feature (61)..(61): /note="Nucleotide may be methylated to form 5-methylcytosine"
cagcatctccttcccggctttcgctttgctgtccctccttctgaaatacacacgctcatgcgcgtgttaatttagcagtagcaaaaagactgagagcgagggaaggaataggagaaaatggc

SEQ ID NO: 5943 - DNA, 122 bp, Homo sapiens
  misc_feature (61)..(62): /note="This region represents a CpG dinucleotide"
  misc_feature (61)..(61): /note="Nucleotide may be methylated to form 5-methylcytosine"
tattagagacagtccaagaaatcatcaaaacttctccactttgtgcttcactttttgtggcggaggtgtggcagggacagggaggggaagataaagtctgtggggttaagggaaggtgactc

SEQ ID NO: 5944 - DNA, 122 bp, Homo sapiens
  misc_feature (61)..(62): /note="This region represents a CpG dinucleotide"
  misc_feature (61)..(61): /note="Nucleotide may be methylated to form 5-methylcytosine"
gtgggactgtttggtggttagcagaacaatgcaaactggctcccctgtccaaagtcaaaccgtgtgcattccccacaagtggacacagtgtcttctgtgtctgaattaccacagtcatgtag

SEQ ID NO: 5945 - DNA, 122 bp, Homo sapiens
  misc_feature (61)..(62): /note="This region represents a CpG dinucleotide"
  misc_feature (61)..(61): /note="Nucleotide may be methylated to form 5-methylcytosine"
cataacttattgccagtctctttatccattttaggaaaaatcgatatacttgaaaagccacggtggcaggaattggtcatcacccaccaggattctacactgccctacaggtgatcccaact

SEQ ID NO: 5946 - DNA, 122 bp, Homo sapiens
  misc_feature (61)..(62): /note="This region represents a CpG dinucleotide"
  misc_feature (61)..(61): /note="Nucleotide may be methylated to form 5-methylcytosine"
atcactaagatgcaaagtcttaacaatgtcctacaatgccctaagtaatctacctggcaacgtgtgcctctctacactggttggttctagcacttcctgtctctggatctttggactggctt

SEQ ID NO: 5947 - DNA, 122 bp, Homo sapiens
  misc_feature (61)..(62): /note="This region represents a CpG dinucleotide"
  misc_feature (61)..(61): /note="Nucleotide may be methylated to form 5-methylcytosine"
aagagggagtcatccagttttgcctggtgcagttaggacagtgcttcgtcatacaggacacgctgagggtaacatgggtaaatggctagagtttcctgctttttgtttgtttattttagaga

SEQ ID NO: 5948 - DNA, 122 bp, Homo sapiens
  misc_feature (61)..(62): /note="This region represents a CpG dinucleotide"
  misc_feature (61)..(61): /note="Nucleotide may be methylated to form 5-methylcytosine"
aacctgtttcctttttgtttctttctctttttttttctcttctctctagtttatttccctcgatttcaatctacgatgcttctactggatggtaactttcaactctcataattttaatttcc

SEQ ID NO: 5949 - DNA, 122 bp, Homo sapiens
  misc_feature (61)..(62): /note="This region represents a CpG dinucleotide"
  misc_feature (61)..(61): /note="Nucleotide may be methylated to form 5-methylcytosine"
ccacagtaaagcacagtaaaggctgaggctggaggggctgggatgccctagatctttccacgcactagaacaaattaggaatggaggaaaatgtgtaaagtccatgtgcacacccacattgg

SEQ ID NO: 5950 - DNA, 122 bp, Homo sapiens
  misc_feature (61)..(62): /note="This region represents a CpG dinucleotide"
  misc_feature (61)..(61): /note="Nucleotide may be methylated to form 5-methylcytosine"
gggctgcagagcctgagcaccccggaccgcgcccggcgagggcggcctccctgcgctgagcgcgacctgcgtgtcctgctctcggctttcgtgccggttcagaagaacaaggccggaaggtt

SEQ ID NO: 5951 - DNA, 122 bp, Homo sapiens
  misc_feature (61)..(62): /note="This region represents a CpG dinucleotide"
  misc_feature (61)..(61): /note="Nucleotide may be methylated to form 5-methylcytosine"
tcctgctctccatctttacctactcatggtagaaacaagccaccaaccttccagtaactccgcaaaatgcactgggaatttaagcatgtggcccacagatgtctatcaaatgcccactaagc

SEQ ID NO: 5952 - DNA, 122 bp, Homo sapiens
  misc_feature (61)..(62): /note="This region represents a CpG dinucleotide"
  misc_feature (61)..(61): /note="Nucleotide may be methylated to form 5-methylcytosine"
aggcgtttcctgggcgatcctggtgcaaagcgaaggcgcgcgggaagcgcagtctggctgcggcccagcccgggggcacccgcggtgccctgaccttggacaagtcctgggtctcggggggc

SEQ ID NO: 5953 - DNA, 122 bp, Homo sapiens
  misc_feature (61)..(62): /note="This region represents a CpG dinucleotide"
  misc_feature (61)..(61): /note="Nucleotide may be methylated to form 5-methylcytosine"
agtgaagtgtcatcaaattacttaaccattgtcagtaggccgcctgtgctatttcacctgcgttaacaatcgtctagaacttgcctaatgttcctcattcttgtgctttctttactcttgag

SEQ ID NO: 5954 - DNA, 122 bp, Homo sapiens
  misc_feature (61)..(62): /note="This region represents a CpG dinucleotide"
  misc_feature (61)..(61): /note="Nucleotide may be methylated to form 5-methylcytosine"
caccgctatgctgctctgccaccttgtggagggcctccaggaaggtttctgaagctgctgcgtgtgtggcaattggttacgtagcagcagaaaacaaatgcagctttctactcctccctctc

SEQ ID NO: 5955 - DNA, 122 bp, Homo sapiens
  misc_feature (61)..(62): /note="This region represents a CpG dinucleotide"
  misc_feature (61)..(61): /note="Nucleotide may be methylated to form 5-methylcytosine"
ctggaacattcgtcagtcaaggatgtgcaaaagatctgctccagcctcagttctgggctgcgtggttgggccagctgattgcactgtagtgaccacatagtgggtcatttggaggttggcac

SEQ ID NO: 5956 - DNA, 122 bp, Homo sapiens
  misc_feature (61)..(62): /note="This region represents a CpG dinucleotide"
  misc_feature (61)..(61): /note="Nucleotide may be methylated to form 5-methylcytosine"
gcagatttaaaaagaatggcatatacgcctacaggtgcacagagctacatgtgtgactcacgctgcggtatgtggtttcatgagaagttacttatgaaatcattgctgatttctgatcctca

SEQ ID NO: 5957 - DNA, 122 bp, Homo sapiens
  misc_feature (61)..(62): /note="This region represents a CpG dinucleotide"
  misc_feature (61)..(61): /note="Nucleotide may be methylated to form 5-methylcytosine"
acctctgtggtaacttagtaatgcaggatctcagcaaaggagatcatcaatcatggaggtcgaggtttttcatcttcccctatgacctcacctatagacctacctgctattattataggcaa

SEQ ID NO: 5958 - DNA, 122 bp, Homo sapiens
  misc_feature (61)..(62): /note="This region represents a CpG dinucleotide"
  misc_feature (61)..(61): /note="Nucleotide may be methylated to form 5-methylcytosine"
tgcttcaaacagctgctcactagagaccaatgactgacattttgagtcccactataaaaacgcctgtcttcattcctctttagagcaatcacataagaagtcagggctccagcaaccccttg

SEQ ID NO: 5959 - DNA, 122 bp, Homo sapiens
  misc_feature (61)..(62): /note="This region represents a CpG dinucleotide"
  misc_feature (61)..(61): /note="Nucleotide may be methylated to form 5-methylcytosine"
ctgcaaagccaggttttccttcacggcccctcctaatgatgtttcttttcctatcattgtcgagcccttagaaccccaggatcgagggagggaaaacaagcgctcaagcactccctcgttgg

SEQ ID NO: 5960 - DNA, 122 bp, Homo sapiens
  misc_feature (61)..(62): /note="This region represents a CpG dinucleotide"
  misc_feature (61)..(61): /note="Nucleotide may be methylated to form 5-methylcytosine"
ataatcttccccgggggaagaaattcaatttggcctgaatatcactgtatcctcactaggcggatggagttggcagccttgtacgaggttctgctagggaataatgcaaatacttccccttg

SEQ ID NO: 5961 - DNA, 122 bp, Homo sapiens
  misc_feature (61)..(62): /note="This region represents a CpG dinucleotide"
  misc_feature (61)..(61): /note="Nucleotide may be methylated to form 5-methylcytosine"
gacagagcgagattccgtctcaaaaaaataaaaataaaatatatgaacgcataatggtgacggtggctaacattgaacgcttactttgtgccagttgatatgccaagtacaagtgcgaatac

SEQ ID NO: 5962 - DNA, 122 bp, Homo sapiens
  misc_feature (61)..(62): /note="This region represents a CpG dinucleotide"
  misc_feature (61)..(61): /note="Nucleotide may be methylated to form 5-methylcytosine"
ttttagctgggctccctttgcctgtccccattaagattctggatggtttaccatgattggcgtcatacccagcagttaacctccactacgtgctagctctggttttctcagcaatgccttag

SEQ ID NO: 5963 - DNA, 122 bp, Homo sapiens
  misc_feature (61)..(62): /note="This region represents a CpG dinucleotide"
  misc_feature (61)..(61): /note="Nucleotide may be methylated to form 5-methylcytosine"
tttatttaatttttgccttgcagtgtgcatgggagtgtgtcaggggaaagggaccggatacggcagtgtaccgagccctacgatgacattttcagccaagaagaagaagaatgcttcatcaa

SEQ ID NO: 5964 - DNA, 122 bp, Homo sapiens
  misc_feature (61)..(62): /note="This region represents a CpG dinucleotide"
  misc_feature (61)..(61): /note="Nucleotide may be methylated to form 5-methylcytosine"
gtagttttccggcctggctcagggctggctagatgtgccgtcatttcaaatgtaaggaagcgccgggcagatctgttgtcggcggggggcctcgcacgcacgcgcccgcaggcggaggacag

SEQ ID NO: 5965 - DNA, 122 bp, Homo sapiens
  misc_feature (61)..(62): /note="This region represents a CpG dinucleotide"
  misc_feature (61)..(61): /note="Nucleotide may be methylated to form 5-methylcytosine"
ttgtttaaccacacccttgactttctgttcagaacacactttcctaagaatgaatcttctcgttttagcttcttttgcaaaatgaataggcagagaatttcccaaatcatgaaatcctggtt

SEQ ID NO: 5966 - DNA, 122 bp, Homo sapiens
  misc_feature (61)..(62): /note="This region represents a CpG dinucleotide"
  misc_feature (61)..(61): /note="Nucleotide may be methylated to form 5-methylcytosine"
gatcatcagagatagttggcctggttcttcagcaaaatgttgacacctgtgctgaagatccgtgtggaatgattgcagaacgttatgctgttgcttgtggatttaatccgtaagtgtttaca

SEQ ID NO: 5967 - DNA, 122 bp, Homo sapiens
  misc_feature (61)..(62): /note="This region represents a CpG dinucleotide"
  misc_feature (61)..(61): /note="Nucleotide may be methylated to form 5-methylcytosine"
taaataaaatcaaggtaggaattttttgttcataattgccaaggcacaattgtttttccacgatgaaaacactattcacattcagaacagtcactggctgtttcaattttacactgtgaaaa

SEQ ID NO: 5968 - DNA, 122 bp, Homo sapiens
  misc_feature (61)..(62): /note="This region represents a CpG dinucleotide"
  misc_feature (61)..(61): /note="Nucleotide may be methylated to form 5-methylcytosine"
gggtcattgttgctgtccagagtggaagccatcagaggtgtcctgtttatctgtgtgactcggccctctttgggtcacaaaggccagatgatccagcagctacctggagggtggtttatgac

SEQ ID NO: 5969 - DNA, 122 bp, Homo sapiens
  misc_feature (61)..(62): /note="This region represents a CpG dinucleotide"
  misc_feature (61)..(61): /note="Nucleotide may be methylated to form 5-methylcytosine"
tgaattgcatatcagcaaggctctccagtgtgagtgagacttgaccagtttgtaacttcccgtgtacggaaatccttctaacatgcaaatctgaccctttcattctcctgcttaaacctctt

SEQ ID NO: 5970 - DNA, 122 bp, Homo sapiens
  misc_feature (61)..(62): /note="This region represents a CpG dinucleotide"
  misc_feature (61)..(61): /note="Nucleotide may be methylated to form 5-methylcytosine"
aggcggcgtggagagacgggacgcgcgggagcaaaaggcggcgtggagagacgggacgcgcgggaggaaaaggctcccaaggaagatctctggaagaaaagggactccgtgcaatacacgat

SEQ ID NO: 5971 - DNA, 122 bp, Homo sapiens
  misc_feature (61)..(62): /note="This region represents a CpG dinucleotide"
  misc_feature (61)..(61): /note="Nucleotide may be methylated to form 5-methylcytosine"
gacactttcccagtctccgtcccttccaccttccctggttcattggcttggagccatgagcgcggccagtggctccgcggctcccggagggacgctgggggtttgccctgggagtagggtgc

SEQ ID NO: 5972 - DNA, 122 bp, Homo sapiens
  misc_feature (61)..(62): /note="This region represents a CpG dinucleotide"
  misc_feature (61)..(61): /note="Nucleotide may be methylated to form 5-methylcytosine"
gcaggcccagcattcaccccagagaagcccagggagcttggaggagaagtgcctgagtcacgtgctcctttcaagagagttctccagagataacattgcttttcattttacctcctcaggat

SEQ ID NO: 5973 - DNA, 122 bp, Homo sapiens
  misc_feature (61)..(62): /note="This region represents a CpG dinucleotide"
  misc_feature (61)..(61): /note="Nucleotide may be methylated to form 5-methylcytosine"
gattcagaaaataatcagtgctaagcattccctttatgtttatatgatcatcataggtaacgatccagaaaataatcagtgctaagcattccctttacctgtatatgatcattgcaggtaac

SEQ ID NO: 5974 - DNA, 122 bp, Homo sapiens
  misc_feature (61)..(62): /note="This region represents a CpG dinucleotide"
  misc_feature (61)..(61): /note="Nucleotide may be methylated to form 5-methylcytosine"
gcacacccacccagagtatcgtctgaaccaacagaaggaaccataagtcactccagtcatcgacttcagacagtagagcccaggaagcaagaagatctgcaacccaagtgctttttttctat

SEQ ID NO: 5975 - DNA, 122 bp, Homo sapiens
  misc_feature (61)..(62): /note="This region represents a CpG dinucleotide"
  misc_feature (61)..(61): /note="Nucleotide may be methylated to form 5-methylcytosine"
gtggcccctgcactctccaggcaaggcgggtgtgctgcgtgccaccgctgttggtaaatccggcccctcttacgtccctccagctgtccccgcgtttataaatcttgcacagcctgttcttc

SEQ ID NO: 5976 - DNA, 122 bp, Homo sapiens
  misc_feature (61)..(62): /note="This region represents a CpG dinucleotide"
  misc_feature (61)..(61): /note="Nucleotide may be methylated to form 5-methylcytosine"
agtgtttggatcgtaatctgagggcagtagggagttacactgccttgaagtctgcaagtacgttatgaaccataagagaaagggctgagctgtcttcaaagctctcagtccatatcctgagt

SEQ ID NO: 5977 - DNA, 122 bp, Homo sapiens
  misc_feature (61)..(62): /note="This region represents a CpG dinucleotide"
  misc_feature (61)..(61): /note="Nucleotide may be methylated to form 5-methylcytosine"
aattcttatcaggcttggttcctcattgtgttatctccatgttcctagcctgagcatttacgtcacatcttcgtgtacttaacactttttttttttttgaggaaggcggcgggggagacagg

SEQ ID NO: 5978 - DNA, 122 bp, Homo sapiens
  misc_feature (61)..(62): /note="This region represents a CpG dinucleotide"
  misc_feature (61)..(61): /note="Nucleotide may be methylated to form 5-methylcytosine"
gtgaccactactggggccagctctgcttctcttccatagagtgaggatcatcattttactcgaatcacttcagcctaacaaggtatgtcatgcaggaagcagtcagacacagtggttaaaat

SEQ ID NO: 5979 - DNA, 122 bp, Homo sapiens
  misc_feature (61)..(62): /note="This region represents a CpG dinucleotide"
  misc_feature (61)..(61): /note="Nucleotide may be methylated to form 5-methylcytosine"
gctaggatgaaaggcactttgataacataggtgccttctcctcctgctttagagggtgctcgtgaactccagccaggggcatggatccgagattaacaatttatcagtggcttcctcctgga

SEQ ID NO: 5980 - DNA, 122 bp, Homo sapiens
  misc_feature (61)..(62): /note="This region represents a CpG dinucleotide"
  misc_feature (61)..(61): /note="Nucleotide may be methylated to form 5-methylcytosine"
ttccaacaaaggcaggcgaaatgtggaaccaattatatctgggtgcctacacgtgacgtacgccagttctttgtagaaagaacgaggcttgtctcagcgatactaatgtacagttcacatga

SEQ ID NO: 5981 - DNA, 122 bp, Homo sapiens
  misc_feature (61)..(62): /note="This region represents a CpG dinucleotide"
  misc_feature (61)..(61): /note="Nucleotide may be methylated to form 5-methylcytosine"
caggttttcactggctgttggctggagatgccagttatttgccacatgagcctctgtctacggcagttgacaacatgcagctggcctacctcagagcaagcaaccaagcaagagagcaagat

SEQ ID NO: 5982 - DNA, 122 bp, Homo sapiens
  misc_feature (61)..(62): /note="This region represents a CpG dinucleotide"
  misc_feature (61)..(61): /note="Nucleotide may be methylated to form 5-methylcytosine"
caaaattaagccagcaaaatgttgctgtcatccatctgaacctgttagaaatctcaagctcgtcatagaatctttgacctcaccattcaatgttttacaaattgagtaactatgtccctgtc

SEQ ID NO: 5983 - DNA, 122 bp, Homo sapiens
  misc_feature (61)..(62): /note="This region represents a CpG dinucleotide"
  misc_feature (61)..(61): /note="Nucleotide may be methylated to form 5-methylcytosine"
actcattaggattttcttttcaagagagcaaagaacctaaataaagatccttgaatttagcgtacaatacccaggagtcatcggagcagcagcaatttgggggaacttcaagtgtggtattt

SEQ ID NO: 5984 - DNA, 122 bp, Homo sapiens
  misc_feature (61)..(62): /note="This region represents a CpG dinucleotide"
  misc_feature (61)..(61): /note="Nucleotide may be methylated to form 5-methylcytosine"
gccaaagacttccttccacaggatcttgtcgcaccagcaactgacaggagcttgggagctcgggagcttgggagagggcttatgtttttaataatgtagctgtcagttcgaagcctggaaat

SEQ ID NO: 5985 - DNA, 122 bp, Homo sapiens
  misc_feature (61)..(62): /note="This region represents a CpG dinucleotide"
  misc_feature (61)..(61): /note="Nucleotide may be methylated to form 5-methylcytosine"
ccctccttgagcaccgagcggcgcttcctgcaggcggagcagcggccgaggcgccctccacgccctcaaagagccagaggtaaaggcagacatgcaaacggatgattttaatgaggggtgag

SEQ ID NO: 5986 - DNA, 122 bp, Homo sapiens
  misc_feature (61)..(62): /note="This region represents a CpG dinucleotide"
  misc_feature (61)..(61): /note="Nucleotide may be methylated to form 5-methylcytosine"
gcatttaatgatttatgagggttataaacctcaattcaaaaaagcccaagttctgacagacgtcacttaaccactaccactcctcaattctaatatgcctcagcagtccacataggtggtta

SEQ ID NO: 5987 - DNA, 122 bp, Homo sapiens
  misc_feature (61)..(62): /note="This region represents a CpG dinucleotide"
  misc_feature (61)..(61): /note="Nucleotide may be methylated to form 5-methylcytosine"
actctgctcaccgagcccaggcccagcacaaagacacaccataaacacctgcggagggagcgtggcccagcccagggactctggggctcccagaagacagggccctcccccagccatgccgg

SEQ ID NO: 5988 - DNA, 122 bp, Homo sapiens
  misc_feature (61)..(62): /note="This region represents a CpG dinucleotide"
  misc_feature (61)..(61): /note="Nucleotide may be methylated to form 5-methylcytosine"
aaaacctgataccaatatatctattggtatatatccactagacagctatgccagatgtcccgccagaatctcaaactcattttctctccacctgaattaatctctcaatattagttttattc

SEQ ID NO: 5989 - DNA, 122 bp, Homo sapiens
  misc_feature (61)..(62): /note="This region represents a CpG dinucleotide"
  misc_feature (61)..(61): /note="Nucleotide may be methylated to form 5-methylcytosine"
ccactgacggatacagccaaggaggggcccccaagggaggcactgggaactgaggggaagcgtctgtctctgactcagctttcattgggggccaaagaacggagtaagagggacaaggagtg

SEQ ID NO: 5990 - DNA, 122 bp, Homo sapiens
  misc_feature (61)..(62): /note="This region represents a CpG dinucleotide"
  misc_feature (61)..(61): /note="Nucleotide may be methylated to form 5-methylcytosine"
gggatttttttagagcagtggttcccaaggtgtgtttcctggatgtaccagaaacatcagcgtcacctgaaaagttgtcagaaattcggattctcaggtcccacctcaaacttaatgaatca

SEQ ID NO: 5991 - DNA, 122 bp, Homo sapiens
  misc_feature (61)..(62): /note="This region represents a CpG dinucleotide"
  misc_feature (61)..(61): /note="Nucleotide may be methylated to form 5-methylcytosine"
cccttttaagccctgaaagaccagataaatctcaggtgaacctagagaaacagggagcttcgtatactcaaaagtctatacattacgtattattgaacggcgacctgcggccgcccctgctg

SEQ ID NO: 5992 - DNA, 122 bp, Homo sapiens
  misc_feature (61)..(62): /note="This region represents a CpG dinucleotide"
  misc_feature (61)..(61): /note="Nucleotide may be methylated to form 5-methylcytosine"
tttggagactcagttgcctaatgcagggtcctgtcatctttccagacagtgtgcctgagacgcttactcaaacactctagacacccagtgcttgtggctgctcccagaattccccactgctg

SEQ ID NO: 5993 - DNA, 122 bp, Homo sapiens
  misc_feature (61)..(62): /note="This region represents a CpG dinucleotide"
  misc_feature (61)..(61): /note="Nucleotide may be methylated to form 5-methylcytosine"
agattcaccatctgctgactaaagaactcttaagcattgaataaccatcagcagtagctacgtaatagttgttacaggccttgggcaagaaccagtactgtgctggcattgggtgtgaccag

SEQ ID NO: 5994 - DNA, 122 bp, Homo sapiens
  misc_feature (61)..(62): /note="This region represents a CpG dinucleotide"
  misc_feature (61)..(61): /note="Nucleotide may be methylated to form 5-methylcytosine"
gattaacttccatcataaagatgtgatttaaattcctgttggtatgaggccctccacttgcggtctcttattaaaacaatataccacagtaagtagtggatgttcttttcttctaattactg

SEQ ID NO: 5995 - DNA, 122 bp, Homo sapiens
  misc_feature (61)..(62): /note="This region represents a CpG dinucleotide"
  misc_feature (61)..(61): /note="Nucleotide may be methylated to form 5-methylcytosine"
gaacggattctgggcttcagactctctgtccagtgcattgccaatggtccttttgtgaggcgtgtcctgcaagatgaccttggggcctgagccacatctatgtgccatccagcctggctctc

SEQ ID NO: 5996 - DNA, 122 bp, Homo sapiens
  misc_feature (61)..(62): /note="This region represents a CpG dinucleotide"
  misc_feature (61)..(61): /note="Nucleotide may be methylated to form 5-methylcytosine"
ccacttgctctgtccttctgctatttcctaatctagtaatactcaactgggcataggtggcgtaacagcatcatttgtggggctcttgacatacctctattctactgtcctcattcctaggt

SEQ ID NO: 5997 - DNA, 122 bp, Homo sapiens
  misc_feature (61)..(62): /note="This region represents a CpG dinucleotide"
  misc_feature (61)..(61): /note="Nucleotide may be methylated to form 5-methylcytosine"
agaaacaacctaaatattcatcaacagatggataaataaaatgtggtacatacatacaatcgtgattcagccttaaaaaggaataaaattcagacacatgctacaacatgaatgaacttaag

SEQ ID NO: 5998 - DNA, 122 bp, Homo sapiens
  misc_feature (61)..(62): /note="This region represents a CpG dinucleotide"
  misc_feature (61)..(61): /note="Nucleotide may be methylated to form 5-methylcytosine"
gtgcccagccccggcgcccctgcagaacgagccattggtggcggtcccgatgccgttgtacgccgcagcgccctcctcgctgctcagaaccagggcgtcctcgctcaagttcaccagaactt

SEQ ID NO: 5999 - DNA, 122 bp, Homo sapiens
  misc_feature (61)..(62): /note="This region represents a CpG dinucleotide"
  misc_feature (61)..(61): /note="Nucleotide may be methylated to form 5-methylcytosine"
atccccagccctcagcctctacagaccgtccccatattcagagcccccagttcttacccacgcaccagggcctgcgtaacattcacgtcctcacccctgcagcacctgccctgctatgatgc

SEQ ID NO: 6000 - DNA, 122 bp, Homo sapiens
  misc_feature (61)..(62): /note="This region represents a CpG dinucleotide"
  misc_feature (61)..(61): /note="Nucleotide may be methylated to form 5-methylcytosine"
tccaaactatagccctgctcttgcctcccctccagccctgctgcccccagttcagcccggcgacacacagcagccagaaaggtcttaagaggaaattactgcctgccactcccctgcttaaa

SEQ ID NO: 6001 - DNA, 122 bp, Homo sapiens
  misc_feature (61)..(62): /note="This region represents a CpG dinucleotide"
  misc_feature (61)..(61): /note="Nucleotide may be methylated to form 5-methylcytosine"
ctccgccgctcccactcacgcatggtgtaaacttttgaccctccaactttgcgacccctccggcaataacactggcctcaccacccagggtctcattctgctacgcgccggccgcagaaacc

SEQ ID NO: 6002 - DNA, 122 bp, Homo sapiens
  misc_feature (61)..(62): /note="This region represents a CpG dinucleotide"
  misc_feature (61)..(61): /note="Nucleotide may be methylated to form 5-methylcytosine"
gtgcagtggctcactcctgtaatgctagcactgtgagaggccaaggggggtgcggtggatcgcctgaggtcaggagttcgagaccagcctggccaacatagtgaaaccccatctctactaaa

SEQ ID NO: 6003 - DNA, 122 bp, Homo sapiens
  misc_feature (61)..(62): /note="This region represents a CpG dinucleotide"
  misc_feature (61)..(61): /note="Nucleotide may be methylated to form 5-methylcytosine"
agctgttacttattcaactctattgcagcaagtatgaggcaatgtgttctcatgacaagacggctgggaatctagagaaatgcaaaaccaaggaatatcatttagtgtaaaaccaccataac

SEQ ID NO: 6004 - DNA, 122 bp, Homo sapiens
  misc_feature (61)..(62): /note="This region represents a CpG dinucleotide"
  misc_feature (61)..(61): /note="Nucleotide may be methylated to form 5-methylcytosine"
aaatgcttttacttagatttctgaatggatgttgtcactttaccaagtagtaatttgagacgcagagagatgtatatttagtgttgtgtacacaataatgaatagaatgtctatgtaattac

SEQ ID NO: 6005 - DNA, 122 bp, Homo sapiens
  misc_feature (61)..(62): /note="This region represents a CpG dinucleotide"
  misc_feature (61)..(61): /note="Nucleotide may be methylated to form 5-methylcytosine"
gaggcggcacggggtgcgtctgggcccgtctgggggacgcaaagatcccggtgcctcggccgtggctccaggccccaggacagaccagggaagaaacctccaaactgcggatagttcccaaa

SEQ ID NO: 6006 - DNA, 122 bp, Homo sapiens
  misc_feature (61)..(62): /note="This region represents a CpG dinucleotide"
  misc_feature (61)..(61): /note="Nucleotide may be methylated to form 5-methylcytosine"
ctgaagtctttcataaaagcactgctccacaagttctccttgcttctactacatgattaacgttttctttcctctctactggatagtcccatcagcagacaaacattctctgttcttaaaga

SEQ ID NO: 6007 - DNA, 122 bp, Homo sapiens
  misc_feature (61)..(62): /note="This region represents a CpG dinucleotide"
  misc_feature (61)..(61): /note="Nucleotide may be methylated to form 5-methylcytosine"
acaaaggagccatctagaattctgtgctcctaacccacttctgggaggcacgcaggcatccgatcttctcttaaagactgtaatttattatgcctcttttaagttaaagaggctctctgagt

SEQ ID NO: 6008 - DNA, 122 bp, Homo sapiens
  misc_feature (61)..(62): /note="This region represents a CpG dinucleotide"
  misc_feature (61)..(61): /note="Nucleotide may be methylated to form 5-methylcytosine"
tggttctggggcagagctcatgctaagcagaaaagctgacataattcctgttctgttgttcggctgccaaagtcttaggctaaaaagaggtggttactgttgaatgaattaagtcttccatg

SEQ ID NO: 6009 - DNA, 122 bp, Homo sapiens
  misc_feature (61)..(62): /note="This region represents a CpG dinucleotide"
  misc_feature (61)..(61): /note="Nucleotide may be methylated to form 5-methylcytosine"
ggttacggccccctgactcagagccggggatttttgatctctttttgcagacggagaacacggatgcagggaagaaaagagttcagccaggggtggcagccactgggccccgagcagactct

SEQ ID NO: 6010 - DNA, 122 bp, Homo sapiens
  misc_feature (61)..(62): /note="This region represents a CpG dinucleotide"
  misc_feature (61)..(61): /note="Nucleotide may be methylated to form 5-methylcytosine"
aataaggaattactgtctttcttggattccatgctcagtcaaccatactgacctgtcttgcgctttgagggcattcctttttacaaccagtttttcaccttccaaatcccactaatctgccc

SEQ ID NO: 6011 - DNA, 122 bp, Homo sapiens
  misc_feature (61)..(62): /note="This region represents a CpG dinucleotide"
  misc_feature (61)..(61): /note="Nucleotide may be methylated to form 5-methylcytosine"
taggttgcttgtagcctgctggttgcactgtttatgaaacagctgtgaggacaggtgggccgtaatctctgggtagctaaagcccagcagcagcccgaggatcatgtgtcaaccctgtaata

SEQ ID NO: 6012 - DNA, 122 bp, Homo sapiens
  misc_feature (61)..(62): /note="This region represents a CpG dinucleotide"
  misc_feature (61)..(61): /note="Nucleotide may be methylated to form 5-methylcytosine"
ggctggatgaaattctgccctgtacttgcaaacatttgcagaactgctcagtcagccttccgggaaaaccatgcccacatcctactggattcctctagctttggtgttgtcaacacagagat

SEQ ID NO: 6013 - DNA, 122 bp, Homo sapiens
  misc_feature (61)..(62): /note="This region represents a CpG dinucleotide"
  misc_feature (61)..(61): /note="Nucleotide may be methylated to form 5-methylcytosine"
gtcctttgtctaaaaacaggcataaaaaggaaatggggcagagtaggcaacagttcttaacgtcttacgagaataaaaaccaaaagcacacatttgaagaacttctgattggcagctccaaa

SEQ ID NO: 6014 - DNA, 122 bp, Homo sapiens
  misc_feature (61)..(62): /note="This region represents a CpG dinucleotide"
  misc_feature (61)..(61): /note="Nucleotide may be methylated to form 5-methylcytosine"
ggcagcgtgcgtccagggcggagaggtcgtgctactcaggtgtgcactgaggaccagccgcgtcaacatcactgcggcttcttagcaaaaccgcggactctggaaaccccagacctacagaa

SEQ ID NO: 6015 - DNA, 122 bp, Homo sapiens
  misc_feature (61)..(62): /note="This region represents a CpG dinucleotide"
  misc_feature (61)..(61): /note="Nucleotide may be methylated to form 5-methylcytosine"
cgccaaatccaccgccgattccaccgccgcctccccggccaaagccactgcctgagccgccgcccgcactgaagccacctcctaaaccaccgcccatgcctccgccgtaacctcctccatag

SEQ ID NO: 6016 - DNA, 122 bp, Homo sapiens
  misc_feature (61)..(62): /note="This region represents a CpG dinucleotide"
  misc_feature (61)..(61): /note="Nucleotide may be methylated to form 5-methylcytosine"
atattgttttccaccaactcaactaagattatggattgccaaactgaccatattactgcccgtttcttggattcttttcttttgattatcatatgtgagtcagtcttagccctgtatgattc

SEQ ID NO: 6017 - DNA, 122 bp, Homo sapiens
  misc_feature (61)..(62): /note="This region represents a CpG dinucleotide"
  misc_feature (61)..(61): /note="Nucleotide may be methylated to form 5-methylcytosine"
tcttactacaccacggaagaatggggtggtgggaggcggaacacaacaaaactagcttcgcggctgggcccaaggctggtcccatctagagtcatctttgagaccacaagagccaacatcat

SEQ ID NO: 6018 - DNA, 122 bp, Homo sapiens
  misc_feature (61)..(62): /note="This region represents a CpG dinucleotide"
  misc_feature (61)..(61): /note="Nucleotide may be methylated to form 5-methylcytosine"
aaattagatgagccccagggttttccacctgctccgacactagtgtccgtggctgaggagcggccagagggttgagaaggaaatggggtctgaactggatgaggggcgcttgcttgctccgt

SEQ ID NO: 6019 - DNA, 122 bp, Homo sapiens
  misc_feature (61)..(62): /note="This region represents a CpG dinucleotide"
  misc_feature (61)..(61): /note="Nucleotide may be methylated to form 5-methylcytosine"
taatcagtcggagcaggcaatgatcagagactgggcagggccttacctccaactctagaacgccagggaagcagcagccacccctcagggctcagaaaagggagtttctaagtactaaaagg

SEQ ID NO: 6020 - DNA, 122 bp, Homo sapiens
  misc_feature (61)..(62): /note="This region represents a CpG dinucleotide"
  misc_feature (61)..(61): /note="Nucleotide may be methylated to form 5-methylcytosine"
cgctcgggaatgtctcctggccaggcctggagattgcaggaggccgggcgaggagccccgcgtctcccccgtttccgggccgttgttttcttggctggattttgaggagggttaagtgtccc

SEQ ID NO: 6021 - DNA, 122 bp, Homo sapiens
  misc_feature (61)..(62): /note="This region represents a CpG dinucleotide"
  misc_feature (61)..(61): /note="Nucleotide may be methylated to form 5-methylcytosine"
gctgagcgtggccccaagcagaacaattaagcaggcagaatttattttcattgtgggttacgtctccattgtgcaatctagaatggcttggactggacgtcagaactggattctgtttccag

SEQ ID NO: 6022 - DNA, 122 bp, Homo sapiens
  misc_feature (61)..(62): /note="This region represents a CpG dinucleotide"
  misc_feature (61)..(61): /note="Nucleotide may be methylated to form 5-methylcytosine"
cttatcggggagacactcaaatatgacaccctgataaacaaacctacacaaacaaacacacgtacattcatcttggaacaaccctcccggctcagtgctcataaaacacacagatacccaag

SEQ ID NO: 6023 - DNA, 122 bp, Homo sapiens
  misc_feature (61)..(62): /note="This region represents a CpG dinucleotide"
  misc_feature (61)..(61): /note="Nucleotide may be methylated to form 5-methylcytosine"
tcacattgccacgcctgcttgtttgttttatctgtggctgctttctcactgcaagggcagcgttgagtagttgcaacagagtggcccacaaagcctgcagtatttactatttggtcatttat

SEQ ID NO: 6024 - DNA, 122 bp, Homo sapiens
  misc_feature (61)..(62): /note="This region represents a CpG dinucleotide"
  misc_feature (61)..(61): /note="Nucleotide may be methylated to form 5-methylcytosine"
caacttcacagtcccctcagctccaagagtcccgactgaggagactggtggcttgtgaggcggagaaggacaagcacaagtgtgcagaaggcagcaagcaagttgcgttgccgaaggaaggg

SEQ ID NO: 6025 - DNA, 122 bp, Homo sapiens
  misc_feature (61)..(62): /note="This region represents a CpG dinucleotide"
  misc_feature (61)..(61): /note="Nucleotide may be methylated to form 5-methylcytosine"
gcacaaatctttaataatcctgaagtggcattggtcttttccccaaaacccaaatagaaacgtcagactccctccacctgctgctccacaccgcaactcaggtgacctaggacaggtcccac

SEQ ID NO: 6026 - DNA, 122 bp, Homo sapiens
  misc_feature (61)..(62): /note="This region represents a CpG dinucleotide"
  misc_feature (61)..(61): /note="Nucleotide may be methylated to form 5-methylcytosine"
gaggaattgttagttttcttgtaagtcttgccccaatcctccccatatttcaaggagggccgcagagtccaaaataaaaaacctccagtttcctttttttcctcagttggctggatttcccc

SEQ ID NO: 6027 - DNA, 122 bp, Homo sapiens
  misc_feature (61)..(62): /note="This region represents a CpG dinucleotide"
  misc_feature (61)..(61): /note="Nucleotide may be methylated to form 5-methylcytosine"
tattacttatttcctctcacaaccactatgtagtttccaagtaataaatttcactatggacgtcacagcactcagataaagaatttctgaaggatttccttctttctttttttttttttttg

SEQ ID NO: 6028 - DNA, 122 bp, Homo sapiens
  misc_feature (61)..(62): /note="This region represents a CpG dinucleotide"
  misc_feature (61)..(61): /note="Nucleotide may be methylated to form 5-methylcytosine"
acaagttggtaaccagtacacagtgaacctgattcacaacttgtagtattactgattcaacgtttttcttatatcaacttgcttattaaatttttgctaagctgtatctgtgaaataaaatg

SEQ ID NO: 6029 - DNA, 122 bp, Homo sapiens
  misc_feature (61)..(62): /note="This region represents a CpG dinucleotide"
  misc_feature (61)..(61): /note="Nucleotide may be methylated to form 5-methylcytosine"
cagcattatattctaaccaaaaaatgatcacaccaggccatgcaaaactgtacaatattacgagaaaaaccctaaaaaatttataaaatgaatgatattacactatcaaataaaaagacaag

SEQ ID NO: 6030 - DNA, 122 bp, Homo sapiens
  misc_feature (61)..(62): /note="This region represents a CpG dinucleotide"
  misc_feature (61)..(61): /note="Nucleotide may be methylated to form 5-methylcytosine"
acgttccacaaaatctgtctattctgtttaataaagttaatcctcaaattgctgtatagccgggagactcaagttcattgtaactacgcagcaatactgggctctatgatgctgatatacca

SEQ ID NO: 6031 - DNA, 122 bp, Homo sapiens
  misc_feature (61)..(62): /note="This region represents a CpG dinucleotide"
  misc_feature (61)..(61): /note="Nucleotide may be methylated to form 5-methylcytosine"
ttggccagaacctgctgccagtctgaaagagttgggggaatgtacaagtcaaagatccctcgggcccagaaccaggtcagtgtcaaggtcactcctaagaacactgagatgaaaatagcaga

SEQ ID NO: 6032 - DNA, 122 bp, Homo sapiens
  misc_feature (61)..(62): /note="This region represents a CpG dinucleotide"
  misc_feature (61)..(61): /note="Nucleotide may be methylated to form 5-methylcytosine"
gataatatcaggttacactaataatcttaagtcatctgaagcttatgtgggaaaattttacgtccttagttgattttccattgccatccatgggatgtgatgtggcatctccccttgtcact

SEQ ID NO: 6033 - DNA, 122 bp, Homo sapiens
  misc_feature (61)..(62): /note="This region represents a CpG dinucleotide"
  misc_feature (61)..(61): /note="Nucleotide may be methylated to form 5-methylcytosine"
caggcgcaaggcgcgcccccttccctcacccgcaggcgccgggtccgcggacgcccaccccggcccgccccgcccgccgcctggtgcccgctcaaggtcactgctgacaaggcgcctgcctc

SEQ ID NO: 6034 - DNA, 122 bp, Homo sapiens
  misc_feature (61)..(62): /note="This region represents a CpG dinucleotide"
  misc_feature (61)..(61): /note="Nucleotide may be methylated to form 5-methylcytosine"
ttagcaacagacacctgctaaatgaaaatctgtaaaaccggccaggcttggcagcagaagcgcatacactgcttctcaggcatttctgggaattgtaaattatgttggctcaaatggcaggg

SEQ ID NO: 6035 - DNA, 122 bp, Homo sapiens
  misc_feature (61)..(62): /note="This region represents a CpG dinucleotide"
  misc_feature (61)..(61): /note="Nucleotide may be methylated to form 5-methylcytosine"
taggctttgtcaaccagagaagcttgttagagactccatgcctagggcttttactggtcacgtaggcagatctacctgggacattccaaaattccagattcccagaaggaaagcaggtattc

SEQ ID NO: 6036 - DNA, 122 bp, Homo sapiens
  misc_feature (61)..(62): /note="This region represents a CpG dinucleotide"
  misc_feature (61)..(61): /note="Nucleotide may be methylated to form 5-methylcytosine"
gtctagcggtgatgccagcatctgggaagatgcccgttgccaggcggacccgtggtctagcggtagcggaaagtgtcaaggaacaacacccactacttagcagacagggaaagggagtctcc

SEQ ID NO: 6037 - DNA, 122 bp, Homo sapiens
  misc_feature (61)..(62): /note="This region represents a CpG dinucleotide"
  misc_feature (61)..(61): /note="Nucleotide may be methylated to form 5-methylcytosine"
agctcagcaggtgacttattcccagtgctgctcttctcacagacacaaaaccaacagttccggtctcttccgatagttctggcagagacggctgcggggagacacgggcggaggcgggtccg

SEQ ID NO: 6038 - DNA, 122 bp, Homo sapiens
  misc_feature (61)..(62): /note="This region represents a CpG dinucleotide"
  misc_feature (61)..(61): /note="Nucleotide may be methylated to form 5-methylcytosine"
ggtggtttactccacagaggcaggaaaacttcagtcacgaggcgaataccccactcagtgcgcatgctgcacagacctgttggtgcccatgtctgttgctatgcgtgtctgttgttgcgcag

SEQ ID NO: 6039 - DNA, 122 bp, Homo sapiens
  misc_feature (61)..(62): /note="This region represents a CpG dinucleotide"
  misc_feature (61)..(61): /note="Nucleotide may be methylated to form 5-methylcytosine"
ggcgcgttcggtgatctctcttcccagagagaaagtggcagtggacttccatcagatgatcgcttgctgcgtgaacccattgataaaccaatacgccggaatccgacttcaaatgacaaaac

SEQ ID NO: 6040 - DNA, 122 bp, Homo sapiens
  misc_feature (61)..(62): /note="This region represents a CpG dinucleotide"
  misc_feature (61)..(61): /note="Nucleotide may be methylated to form 5-methylcytosine"
actgtgttaagtcactgtgattttggtttgtttgtttcagataaaccacctaagctaagacggcaccccagacagtcaccctcacttccctatcatggggttcctggggactcctcccctca

SEQ ID NO: 6041 - DNA, 122 bp, Homo sapiens
  misc_feature (61)..(62): /note="This region represents a CpG dinucleotide"
  misc_feature (61)..(61): /note="Nucleotide may be methylated to form 5-methylcytosine"
cggccctgcatcttctgctgtgggccagcctctccaaattagtcactgcttcagagcttgcgtcccatccagggcagtatggcaacttctgggtgtgtctcccagctgcctctgtaacttca

SEQ ID NO: 6042 - DNA, 122 bp, Homo sapiens
  misc_feature (61)..(62): /note="This region represents a CpG dinucleotide"
  misc_feature (61)..(61): /note="Nucleotide may be methylated to form 5-methylcytosine"
tcactgtccttgcacaagcttgggactagctctgtccttttttaagagtcagtcttgggccgggcatagtggctcactcctgtaatcccagcactttgggaggctaaggcaggaggatccct

SEQ ID NO: 6043 - DNA, 122 bp, Homo sapiens
  misc_feature (61)..(62): /note="This region represents a CpG dinucleotide"
  misc_feature (61)..(61): /note="Nucleotide may be methylated to form 5-methylcytosine"
cagaaaaaactgtcttttttaaagctcattcagccgggtgcaaaccgccttgctggcgggcggcacctgaaggtgacctggccttgtccccccctccatccccccagtttcctctctgtggt

SEQ ID NO: 6044 - DNA, 122 bp, Homo sapiens
  misc_feature (61)..(62): /note="This region represents a CpG dinucleotide"
  misc_feature (61)..(61): /note="Nucleotide may be methylated to form 5-methylcytosine"
tgttttggcgagtagccagtctttctttaacatcaatcaaccgtagcaatgtggtcatcacgaagtcttcattgactcactggcttggattttagggttagaaaatctgaatgttcttatgt

SEQ ID NO: 6045 - DNA, 122 bp, Homo sapiens
  misc_feature (61)..(62): /note="This region represents a CpG dinucleotide"
  misc_feature (61)..(61): /note="Nucleotide may be methylated to form 5-methylcytosine"
cttattctccccagttcactctttctccccgggtgattgagtgtggatcaaggactggaacgtagcccctgtgtgcccccactggaaagtaccccagaccgtcatcctgaccactcccaccg

SEQ ID NO: 6046 - DNA, 122 bp, Homo sapiens
  misc_feature (61)..(62): /note="This region represents a CpG dinucleotide"
  misc_feature (61)..(61): /note="Nucleotide may be methylated to form 5-methylcytosine"
cggcagccgctgcagcagcggcagtggcagcagcagcagccacagctacagccacagccacggccactgtggcagccctgcaggagacacagaacaaggatataaaccagtatggaccggta

SEQ ID NO: 6047 - DNA, 122 bp, Homo sapiens
  misc_feature (61)..(62): /note="This region represents a CpG dinucleotide"
  misc_feature (61)..(61): /note="Nucleotide may be methylated to form 5-methylcytosine"
gaagatgagccagcggagctcaaagtccagccagcccatggtcaccaagcaggaagaagacggcactgagaggtgacaatgggctaatgctaacctcaaagaatgagttaggaagtgttgcc

SEQ ID NO: 6048 - DNA, 122 bp, Homo sapiens
  misc_feature (61)..(62): /note="This region represents a CpG dinucleotide"
  misc_feature (61)..(61): /note="Nucleotide may be methylated to form 5-methylcytosine"
accgtttaaaaataagtctcacctaactcttaggagaggcccaggccccctgaactatcccgatctgctcagaagctgagctgtaaaaccataaaacagaacctctcctttctctactgggt

SEQ ID NO: 6049 - DNA, 122 bp, Homo sapiens
  misc_feature (61)..(62): /note="This region represents a CpG dinucleotide"
  misc_feature (61)..(61): /note="Nucleotide may be methylated to form 5-methylcytosine"
ttccccaaaacatgcctcatgtgtgttggtgcttctgatgaactgttgggaccttccccacgctcttctctgccattcaggcccagtactagttgccactatttaaaagcttcctgcaagta

SEQ ID NO: 6050 - DNA, 122 bp, Homo sapiens
  misc_feature (61)..(62): /note="This region represents a CpG dinucleotide"
  misc_feature (61)..(61): /note="Nucleotide may be methylated to form 5-methylcytosine"
ttatgacacatactacatgtctgatacagatggcttacagaccattcttgtataaacagtcgttttacattgtggaaaacagtgtggcgattcctcagggatctaggactagaaataccatt

SEQ ID NO: 6051 - DNA, 122 bp, Homo sapiens
  misc_feature (61)..(62): /note="This region represents a CpG dinucleotide"
  misc_feature (61)..(61): /note="Nucleotide may be methylated to form 5-methylcytosine"
tggcaaagctgaagagccaggctagtacttgcagaagcaccacagaacactagatggcagcgccaagaacctgttttcggctcgctagatcccccagcagggccgctaggaggcttatgctt

SEQ ID NO: 6052 - DNA, 122 bp, Homo sapiens
  misc_feature (61)..(62): /note="This region represents a CpG dinucleotide"
  misc_feature (61)..(61): /note="Nucleotide may be methylated to form 5-methylcytosine"
cccggcgctggttgccactcaggcactgccgcggacagcctgggggtggggcttgaggcgcgcggggcgggactcgccactccagcctgcagcgtcaggttttgtctctgggaacatcagac

SEQ ID NO: 6053 - DNA, 122 bp, Homo sapiens
  misc_feature (61)..(62): /note="This region represents a CpG dinucleotide"
  misc_feature (61)..(61): /note="Nucleotide may be methylated to form 5-methylcytosine"
ccagcgcccagccgaatgcctgactcgctccagttctcagaaagtgtttactaagtgaaccgcactgccaggtttcggtttcttcagtcacatccacagtgaggatgttaccactgagatga

SEQ ID NO: 6054 - DNA, 122 bp, Homo sapiens
  misc_feature (61)..(62): /note="This region represents a CpG dinucleotide"
  misc_feature (61)..(61): /note="Nucleotide may be methylated to form 5-methylcytosine"
gagggcacctagtctagcaagctgaaagatggcactaaccatctagacaactagaggagacgtgtgtctagattgcagaaggcattcagtgaatatgtgttgattcaccgaactaacaggaa

SEQ ID NO: 6055 - DNA, 122 bp, Homo sapiens
  misc_feature (61)..(62): /note="This region represents a CpG dinucleotide"
  misc_feature (61)..(61): /note="Nucleotide may be methylated to form 5-methylcytosine"
atgcctgtaatcccagctactcaggaggctgagccaggagaatcacttgaacccaggaggcggaggttacaatgagccgcaatcttgccacttcactccagcctgggcgatagagtgagact

SEQ ID NO: 6056 - DNA, 122 bp, Homo sapiens
  misc_feature (61)..(62): /note="This region represents a CpG dinucleotide"
  misc_feature (61)..(61): /note="Nucleotide may be methylated to form 5-methylcytosine"
aaattaatatgtgtatgggtaccatattcttgttagcactctttagtaatgcagtctcttcgcttcttgctttgttagtgatagtatttgcctttcaacctgtgagtgaggtatgttagcac

SEQ ID NO: 6057 - DNA, 122 bp, Homo sapiens
  misc_feature (61)..(62): /note="This region represents a CpG dinucleotide"
  misc_feature (61)..(61): /note="Nucleotide may be methylated to form 5-methylcytosine"
atccattatttccctcctgggtagaaggaggatctgaggacagcttatctttttggggtacgtggagtagaggtggggactcttatataatacgaaataaaaataagttctttgggctggaa

SEQ ID NO: 6058 - DNA, 122 bp, Homo sapiens
  misc_feature (61)..(62): /note="This region represents a CpG dinucleotide"
  misc_feature (61)..(61): /note="Nucleotide may be methylated to form 5-methylcytosine"
gggtggctttgtgaaacacctaaggcgttgaacttgactgagggcttctgcaatagcacccgtggcctgggaagtgcttagcacatgctctgatgcagcatgagtgctattatgatccccct

SEQ ID NO: 6059 - DNA, 122 bp, Homo sapiens
  misc_feature (61)..(62): /note="This region represents a CpG dinucleotide"
  misc_feature (61)..(61): /note="Nucleotide may be methylated to form 5-methylcytosine"
agaaggggaggatgtaggctccactgggtcttcactccatcctggcccaaactgagtcaccgtccccatgcaggaagagaagtgttagtcacatctttcagaggctgtgatctaaaacagcg

SEQ ID NO: 6060 - DNA, 122 bp, Homo sapiens
  misc_feature (61)..(62): /note="This region represents a CpG dinucleotide"
  misc_feature (61)..(61): /note="Nucleotide may be methylated to form 5-methylcytosine"
atgctgttggaccacactttaagaaccgctgctctagagggtaactcggacctatcccagcgtcccagggaaacgaaatctgcagtgagaaatggaacgtccaaggcaatcttcagccggcc

SEQ ID NO: 6061 - DNA, 122 bp, Homo sapiens
  misc_feature (61)..(62): /note="This region represents a CpG dinucleotide"
  misc_feature (61)..(61): /note="Nucleotide may be methylated to form 5-methylcytosine"
accacagctagctgcctctgggaccgcccccgtgagtgcactgcgtcggcgcgaggcaggcgtccaactccaccccgccgcctcccacaccttggcgccggtgcttcgttcccggagtcggc

SEQ ID NO: 6062 - DNA, 122 bp, Homo sapiens
  misc_feature (61)..(62): /note="This region represents a CpG dinucleotide"
  misc_feature (61)..(61): /note="Nucleotide may be methylated to form 5-methylcytosine"
tctgccaaccctggcacttctccgtcctcatcattggcagtcttctccatggagagatggcggatgtgctcgtgtttgctcaccagctgccagaagccagctgtgacacttaactatacccc

SEQ ID NO: 6063 - DNA, 122 bp, Homo sapiens
  misc_feature (61)..(62): /note="This region represents a CpG dinucleotide"
  misc_feature (61)..(61): /note="Nucleotide may be methylated to form 5-methylcytosine"
catatgcagtcattggccaacttctccatcaatgaaatgaccgaaaataccctgacaggtcgtgcagttcaacttttacgctcctacatgtccagcctcacccattacacaagtaatgaaaa

SEQ ID NO: 6064 - DNA, 122 bp, Homo sapiens
  misc_feature (61)..(62): /note="This region represents a CpG dinucleotide"
  misc_feature (61)..(61): /note="Nucleotide may be methylated to form 5-methylcytosine"
agtgctaggaatacaatagtgaataaaatatggtttctcctctcaaagagcttatagactcgagttgaccaaacaggtaataataatatttagtgccagaatcagaatctcagatattctgg

SEQ ID NO: 6065 - DNA, 122 bp, Homo sapiens
  misc_feature (61)..(62): /note="This region represents a CpG dinucleotide"
  misc_feature (61)..(61): /note="Nucleotide may be methylated to form 5-methylcytosine"
atgaactgatacagtttacagacatttacctttatagcagagacctgcctggagacatctcgctggcactacaaattgtctcatctcactgggggatcccttagaagccggcccctggggtc

SEQ ID NO: 6066 - DNA, 122 bp, Homo sapiens
  misc_feature (61)..(62): /note="This region represents a CpG dinucleotide"
  misc_feature (61)..(61): /note="Nucleotide may be methylated to form 5-methylcytosine"
tatagtagtttcctatttaatgggcattaagtggctttggctgaacctctccagcagtgacgcttccatggagcctgctgccgtcttcacagctcctctctggcaggatttggcagtaagct

SEQ ID NO: 6067 - DNA, 122 bp, Homo sapiens
  misc_feature (61)..(62): /note="This region represents a CpG dinucleotide"
  misc_feature (61)..(61): /note="Nucleotide may be methylated to form 5-methylcytosine"
cctaagcctctctggagttcagagattttccccgccctcacaatatgagtaactagaaaacgattcatctgtgtccatttgccagtggttcttcaacttcctttcagcgtctcaatgcatca

SEQ ID NO: 6068 - DNA, 122 bp, Homo sapiens
  misc_feature (61)..(62): /note="This region represents a CpG dinucleotide"
  misc_feature (61)..(61): /note="Nucleotide may be methylated to form 5-methylcytosine"
ggatgaacgaggaagaggaatagctttgtgtacttatttttagttacatgaaaggaccaacgctggtaaatacttagagataaatcagatgtattgagcaatggggaacatgtgagcaaata

SEQ ID NO: 6069 - DNA, 122 bp, Homo sapiens
  misc_feature (61)..(62): /note="This region represents a CpG dinucleotide"
  misc_feature (61)..(61): /note="Nucleotide may be methylated to form 5-methylcytosine"
tctcttgcatcacttgaccctgggtggacaaggctgactcattcagtcatctgtgttgctcgtaagcacttgggagtacagcttgctgatatggcctaagaggaaacatttcacagactcca

SEQ ID NO: 6070 - DNA, 122 bp, Homo sapiens
  misc_feature (61)..(62): /note="This region represents a CpG dinucleotide"
  misc_feature (61)..(61): /note="Nucleotide may be methylated to form 5-methylcytosine"
agttacaggaattttaactaaattagaaagtttgccactttgttccgtgtaaaataaaagcgtataaagccagagctcctgaaacacaggttcagctcagtttgaaaaaacaagaaaacgtc

SEQ ID NO: 6071 - DNA, 122 bp, Homo sapiens
  misc_feature (61)..(62): /note="This region represents a CpG dinucleotide"
  misc_feature (61)..(61): /note="Nucleotide may be methylated to form 5-methylcytosine"
aatccaggaacctgggcagccctcggcacagtttggcacaggccatgtcaaataaacctacgataaaaccaaagagaaaataaaatgacttctggcttctgatacattttattcttgagtta

SEQ ID NO: 6072 - DNA, 122 bp, Homo sapiens
  misc_feature (61)..(62): /note="This region represents a CpG dinucleotide"
  misc_feature (61)..(61): /note="Nucleotide may be methylated to form 5-methylcytosine"
gtgccgcgcatgcacatttcaaatacaatcttccagcttgctgcctgttctcacacctcccggttacttctcctcttcccagggacccagacggggagagggtgctgggcgccggcaagcca

SEQ ID NO: 6073 - DNA, 122 bp, Homo sapiens
  misc_feature (61)..(62): /note="This region represents a CpG dinucleotide"
  misc_feature (61)..(61): /note="Nucleotide may be methylated to form 5-methylcytosine"
gcaggaaatacccagctgctgaaacaggatgtgcatatgaaatacagcagcttagaccggcgcgtggtggctcacacctgtagttccagcactttggtaggccaaggtgggcggatcatgag

SEQ ID NO: 6074 - DNA, 122 bp, Homo sapiens
  misc_feature (61)..(62): /note="This region represents a CpG dinucleotide"
  misc_feature (61)..(61): /note="Nucleotide may be methylated to form 5-methylcytosine"
ggtgaagccggcactaaaagacggacagccctacagagaccgccaatccccagaagcagccgaggcaaccgcgtccaccccctgccgggggcccttcctgcacagctcggggatcccagccc

SEQ ID NO: 6075 - DNA, 122 bp, Homo sapiens
  misc_feature (61)..(62): /note="This region represents a CpG dinucleotide"
  misc_feature (61)..(61): /note="Nucleotide may be methylated to form 5-methylcytosine"
cgctgaaaatgaaggtatgaaaaggcatcatcatccgtggttcccacctggcataatgaccgtatcagaacagacatctggtagtatacaccacatagttgccagactccgataccaagggc

SEQ ID NO: 6076 - DNA, 122 bp, Homo sapiens
  misc_feature (61)..(62): /note="This region represents a CpG dinucleotide"
  misc_feature (61)..(61): /note="Nucleotide may be methylated to form 5-methylcytosine"
ccttgcacacaggcttctggaacttctagttcctgttgtaggaatcctggagttgggtgacgggaagaatgcaactagagaggtttggggagatttttttttgtttttgagacaggatgtca

SEQ ID NO: 6077 - DNA, 122 bp, Homo sapiens
  misc_feature (61)..(62): /note="This region represents a CpG dinucleotide"
  misc_feature (61)..(61): /note="Nucleotide may be methylated to form 5-methylcytosine"
gagtaagtttccaaacctctctgaggctcagtttcttcttctgaaaagtgaggtgatgtccgtgaggtgcttgatgcacaccttgcatgtaataaatgtcactgattgttctcatgtgtagt

SEQ ID NO: 6078 - DNA, 122 bp, Homo sapiens
  misc_feature (61)..(62): /note="This region represents a CpG dinucleotide"
  misc_feature (61)..(61): /note="Nucleotide may be methylated to form 5-methylcytosine"
ttaaagccatgggcacgttgtcatgagaggctggggcatagctgtccacaggcccatctgcggacattggaggcttccctacaccacaggagcccaagagataaagcagcacaggagcacaa

SEQ ID NO: 6079 - DNA, 122 bp, Homo sapiens
  misc_feature (61)..(62): /note="This region represents a CpG dinucleotide"
  misc_feature (61)..(61): /note="Nucleotide may be methylated to form 5-methylcytosine"
tattatgtgaacacttaatgctggagttgtcaccatactaatttttaagtcctacttacacgtaggcagaaatgatgacatgcttagcatttttcatcactttgaccaagaggcagaatctg

SEQ ID NO: 6080 - DNA, 122 bp, Homo sapiens
  misc_feature (61)..(62): /note="This region represents a CpG dinucleotide"
  misc_feature (61)..(61): /note="Nucleotide may be methylated to form 5-methylcytosine"
ggcagagggttttgctaggtgtctgacccagcttccaaagccagggtctaataacaacagcgccaccaacaacaggaaacatttgtgacgcacatgctgccaaagcactgttctaagcactc

SEQ ID NO: 6081 - DNA, 122 bp, Homo sapiens
  misc_feature (61)..(62): /note="This region represents a CpG dinucleotide"
  misc_feature (61)..(61): /note="Nucleotide may be methylated to form 5-methylcytosine"
aaggttgaatgggctggaaaatgtggcctttagaaaaggcaaaaaggccacatccagcaccgtcacctgccaggccagcgggacaggtgggcagagccagctccttggcccattctgcgtca

SEQ ID NO: 6082 - DNA, 122 bp, Homo sapiens
  misc_feature (61)..(62): /note="This region represents a CpG dinucleotide"
  misc_feature (61)..(61): /note="Nucleotide may be methylated to form 5-methylcytosine"
gcctgagctgctggtgggccagaggaagtggacccagccagggggcaggaggtgttggcccgtgcttgcaaggcaaccagaccctgtgtcacgatgccaaagccagggaacctcagggagga

SEQ ID NO: 6083 - DNA, 122 bp, Homo sapiens
  misc_feature (61)..(62): /note="This region represents a CpG dinucleotide"
  misc_feature (61)..(61): /note="Nucleotide may be methylated to form 5-methylcytosine"
tactcccaggaaattagagtcacataacactgcagaaagaacaattcagaatcttagacccgggctttagccctggatgtgtccactcctaggaccccaaacatctctgtgacctccttgct

SEQ ID NO: 6084 - DNA, 122 bp, Homo sapiens
  misc_feature (61)..(62): /note="This region represents a CpG dinucleotide"
  misc_feature (61)..(61): /note="Nucleotide may be methylated to form 5-methylcytosine"
gttgaatacaggaaaacactaaacacaaaacttctctagttgggagagagaagggagggacggcaccacagaaaatcagaccagagaaagtagagtctatacaacccccttaatttacaaat

SEQ ID NO: 6085 - DNA, 122 bp, Homo sapiens
  misc_feature (61)..(62): /note="This region represents a CpG dinucleotide"
  misc_feature (61)..(61): /note="Nucleotide may be methylated to form 5-methylcytosine"
agagtggcagtggagtggcatcttgattgatttaacctcttctcaggggacctgggtctgcgagggaggatatggctgcggggttggaataggatctgtctgagctgccagggtcagggtgg

SEQ ID NO: 6086 - DNA, 122 bp, Homo sapiens
  misc_feature (61)..(62): /note="This region represents a CpG dinucleotide"
  misc_feature (61)..(61): /note="Nucleotide may be methylated to form 5-methylcytosine"
ggcttctgccctgtcaccacttgatctggattctctctccaaaaatttaaaaaaacaaggcgtgcctgtcttttataatgctctgttttaagagagagaaatctccagggagagaacaggac

SEQ ID NO: 6087 - DNA, 122 bp, Homo sapiens
  misc_feature (61)..(62): /note="This region represents a CpG dinucleotide"
  misc_feature (61)..(61): /note="Nucleotide may be methylated to form 5-methylcytosine"
attaaggctacctcacattgggcccagctgaggaatttataaaattttcagaagatataacgtatctataatataatcaattgcagactgctgcatagaacagagagggaatgtgtctgcta

SEQ ID NO: 6088 - DNA, 122 bp, Homo sapiens
  misc_feature (61)..(62): /note="This region represents a CpG dinucleotide"
  misc_feature (61)..(61): /note="Nucleotide may be methylated to form 5-methylcytosine"
ggagcagcaggtgctaatgaaatcctctctctggggttccagcctttggattatgagactcgcccagcgcaaagcctcatcattgtcgtggagaatgaggagaggctcgtcttctgtgagag

SEQ ID NO: 6089 - DNA, 122 bp, Homo sapiens
  misc_feature (61)..(62): /note="This region represents a CpG dinucleotide"
  misc_feature (61)..(61): /note="Nucleotide may be methylated to form 5-methylcytosine"
ctcaggcacctgtagctggtggctgggggtgttgtccacaggcgaggagtagctgtgctgcgaggggggcgtcaggaactgggctgcggtcacgggtgggaccagcgaggatggcagcgacg

SEQ ID NO: 6090 - DNA, 122 bp, Homo sapiens
  misc_feature (61)..(62): /note="This region represents a CpG dinucleotide"
  misc_feature (61)..(61): /note="Nucleotide may be methylated to form 5-methylcytosine"
attagacaaaggatttggaacagaaattctccaaaggtataaacttggccaataagcatacgaaacaatgctcaatatcattagtcattagggaaatacaaatcaaaaccacatgagatatt

SEQ ID NO: 6091 - DNA, 122 bp, Homo sapiens
  misc_feature (61)..(62): /note="This region represents a CpG dinucleotide"
  misc_feature (61)..(61): /note="Nucleotide may be methylated to form 5-methylcytosine"
cagtgacaatccagggaccattccctgggaaggcaaattctggggcctgtgtaactgccacgtggcaaaggcacctaacttgcaggaagggcatctgagaaggcttcctggaggaagtgaca

SEQ ID NO: 6092 - DNA, 122 bp, Homo sapiens
  misc_feature (61)..(62): /note="This region represents a CpG dinucleotide"
  misc_feature (61)..(61): /note="Nucleotide may be methylated to form 5-methylcytosine"
ggaagaaaatcgcccatttcagaataatttgggtttctgataaagaatgtaaactaaatccgcgtctgtgaatacgtttctgattaggaacttattgcgaggttcccttaagggagtgtctt

SEQ ID NO: 6093 - DNA, 122 bp, Homo sapiens
  misc_feature (61)..(62): /note="This region represents a CpG dinucleotide"
  misc_feature (61)..(61): /note="Nucleotide may be methylated to form 5-methylcytosine"
actctcaggcttccgggtagaaaaaaacctctcccttgttccctcgccccacaaacaccccggcagatggacacctcctggcccgccggcctctgtacccctccgaaatgggagtaccgcag

SEQ ID NO: 6094 - DNA, 122 bp, Homo sapiens
  misc_feature (61)..(62): /note="This region represents a CpG dinucleotide"
  misc_feature (61)..(61): /note="Nucleotide may be methylated to form 5-methylcytosine"
aaagttctgtacttggagcactttatggtctctaagttttcactccaaatgaaagaaattcgttttggaaaatgtaatgtactatgagggtagcttgtataagaagggcaactgggactcct

SEQ ID NO: 6095 - DNA, 122 bp, Homo sapiens
  misc_feature (61)..(62): /note="This region represents a CpG dinucleotide"
  misc_feature (61)..(61): /note="Nucleotide may be methylated to form 5-methylcytosine"
cccgtggacctccacgtggtaggtggtgccgggcctgaggtcgggcaggctgacggtgcgcgtggtgcccggcacagtcagctcaccgccggggccctctgcaggcggctgaggccgccagc

SEQ ID NO: 6096 - DNA, 122 bp, Homo sapiens
  misc_feature (61)..(62): /note="This region represents a CpG dinucleotide"
  misc_feature (61)..(61): /note="Nucleotide may be methylated to form 5-methylcytosine"
cattgctaaatggattgcaaaataaatccacagagcttttctttctccttccttcctggacggacgctataaagtctgcagctttgctgtgctctacgtcctttctgtcaaggtggcctaga

SEQ ID NO: 6097 - DNA, 122 bp, Homo sapiens
  misc_feature (61)..(62): /note="This region represents a CpG dinucleotide"
  misc_feature (61)..(61): /note="Nucleotide may be methylated to form 5-methylcytosine"
aaatcgttggttcttttataaaaatgccattaggaagaagaaggtcaggaagacagaaaacgcctgcatcctgggagtgtgataacaaaagaatgatgatcaagccttacatctgtctagca

SEQ ID NO: 6098 - DNA, 122 bp, Homo sapiens
  misc_feature (61)..(62): /note="This region represents a CpG dinucleotide"
  misc_feature (61)..(61): /note="Nucleotide may be methylated to form 5-methylcytosine"
tccaactgtgggataacagattatctatgggatatcagataacaaaggggatgtgtcacacgaagacttatagcaaaaagtacaaatggcaatcaggatcaggctgtgagaatgtatccaca

SEQ ID NO: 6099 - DNA, 122 bp, Homo sapiens
  misc_feature (61)..(62): /note="This region represents a CpG dinucleotide"
  misc_feature (61)..(61): /note="Nucleotide may be methylated to form 5-methylcytosine"
gcacgttgcagggagacgcagcccctggaagatgcgagtgtgaacgtgtgagtgtgagtgcgtgtgtatgtgtgtgtgtgcgcgcgcaccgcagctctccgggttccgcgaggcgcgcgggt

SEQ ID NO: 6100 - DNA, 122 bp, Homo sapiens
  misc_feature (61)..(62): /note="This region represents a CpG dinucleotide"
  misc_feature (61)..(61): /note="Nucleotide may be methylated to form 5-methylcytosine"
gtgatagaccctgagtagcaaaagacgaagactaattacctgacagagctcccctccactcgcctgggtcattgaaattaatttctgctttcaagcttggcagaaagcagctgcagaatttc

SEQ ID NO: 6101 - DNA, 122 bp, Homo sapiens
  misc_feature (61)..(62): /note="This region represents a CpG dinucleotide"
  misc_feature (61)..(61): /note="Nucleotide may be methylated to form 5-methylcytosine"
atgcatatcctctcagtcccatagtccctaataaatagtagctctcattacataagttatcgttcctcttgtgttctgatcttttagtgactctttttggaacaggatttgtagagactcct

SEQ ID NO: 6102 - DNA, 122 bp, Homo sapiens
  misc_feature (61)..(62): /note="This region represents a CpG dinucleotide"
  misc_feature (61)..(61): /note="Nucleotide may be methylated to form 5-methylcytosine"
aatgacacagtactccagtgtatcctaatctcttccaggacagtgtttctcaaactaatgcgcatacaaatcaccctgggatcttattaaaacccagattctgattgaacaggtctggcctg

SEQ ID NO: 6103 - DNA, 122 bp, Homo sapiens
  misc_feature (61)..(62): /note="This region represents a CpG dinucleotide"
  misc_feature (61)..(61): /note="Nucleotide may be methylated to form 5-methylcytosine"
gccccagtccagtccctatcatgagcaactgttggctcactgatgaggtctgaggccttacgagagggatgtaatcagactttaatgagtcagcagggaagagctacggaggtaaattgctc

SEQ ID NO: 6104 - DNA, 122 bp, Homo sapiens
  misc_feature (61)..(62): /note="This region represents a CpG dinucleotide"
  misc_feature (61)..(61): /note="Nucleotide may be methylated to form 5-methylcytosine"
ggaggagggcagcagtagtagtagtggtctccttccttaagatgatcctgcccccacttccgcccccggctcacctatacctctctcctcccctcctcacaatctggatctaagaatctaca

SEQ ID NO: 6105 - DNA, 122 bp, Homo sapiens
  misc_feature (61)..(62): /note="This region represents a CpG dinucleotide"
  misc_feature (61)..(61): /note="Nucleotide may be methylated to form 5-methylcytosine"
cttcttctttcccaccagcccacctgaggagctgaggggcgtggacccaatggcagggcacgtgggtttctggtctcagtgtaccaggggcccacaccctccctggccactgccttggctgc

SEQ ID NO: 6106 - DNA, 122 bp, Homo sapiens
  misc_feature (61)..(62): /note="This region represents a CpG dinucleotide"
  misc_feature (61)..(61): /note="Nucleotide may be methylated to form 5-methylcytosine"
aaattggtacgctgtatgtctactcattgtggggtaatagaaccaccatagaattactcacgtaacttgtcactgaggcagaaaatctttcagtcttagtttcatcacttcaatctactagc

SEQ ID NO: 6107 - DNA, 122 bp, Homo sapiens
  misc_feature (61)..(62): /note="This region represents a CpG dinucleotide"
  misc_feature (61)..(61): /note="Nucleotide may be methylated to form 5-methylcytosine"
gaggcgacgcacccagtactctgcgaggcccaccaaggccacgagtcccgagtcctggagcgagttgcagcgtccaggctgcacctgaccactgacctagaaatgtgcctttgcgaagcggc

SEQ ID NO: 6108 - DNA, 122 bp, Homo sapiens
  misc_feature (61)..(62): /note="This region represents a CpG dinucleotide"
  misc_feature (61)..(61): /note="Nucleotide may be methylated to form 5-methylcytosine"
ataactgatctgggtctattctacactcaaaacgaacacagtgcaccttctacacataggcgcacaccacacacaagcacttcctcattccttaccatctctagctctacctagcctgtcag

SEQ ID NO: 6109 - DNA, 122 bp, Homo sapiens
  misc_feature (61)..(62): /note="This region represents a CpG dinucleotide"
  misc_feature (61)..(61): /note="Nucleotide may be methylated to form 5-methylcytosine"
ggagcagcctgagatcaggttaaccctcacagcgctagatggcgggagtccacccaggtccggcacggccctggtacggattgaagttgtggacatcaatgacaacgtcccagagtttgcaa

SEQ ID NO: 6110 - DNA, 122 bp, Homo sapiens
  misc_feature (61)..(62): /note="This region represents a CpG dinucleotide"
  misc_feature (61)..(61): /note="Nucleotide may be methylated to form 5-methylcytosine"
tggggatagtgtgacctgtccaccaggtcctgctacaaattgacagcagatcccaggcctcgtgttagcccaagctgcttctactgtcacattgcagccttctgcaaggatggggtggtact

SEQ ID NO: 6111 - DNA, 122 bp, Homo sapiens
  misc_feature (61)..(62): /note="This region represents a CpG dinucleotide"
  misc_feature (61)..(61): /note="Nucleotide may be methylated to form 5-methylcytosine"
agaaggtttttttccattctcttaaatgcagccataattagagtaatttttcatgtagcccgctgattacagcgtttttaccgtcaaagataattacctgtaattttcttccacttttaata

SEQ ID NO: 6112 - DNA, 122 bp, Homo sapiens
  misc_feature (61)..(62): /note="This region represents a CpG dinucleotide"
  misc_feature (61)..(61): /note="Nucleotide may be methylated to form 5-methylcytosine"
agacatttctaaggacgactttaaaagaccaggcaaaggagagcagagcccagccgttgccgcttgagagagataagcagaagtgtgggtgtgcttcatgtcacatggcaggaggcttcccc

SEQ ID NO: 6113 - DNA, 122 bp, Homo sapiens
  misc_feature (61)..(62): /note="This region represents a CpG dinucleotide"
  misc_feature (61)..(61): /note="Nucleotide may be methylated to form 5-methylcytosine"
gataagttgataagagcagccagacatgtgtagtgggctgctccgccctcctggcttagccgttatcttcctgtagggggtcactagccaggcaacaggaaaaatcagagcagaatgcctgc

SEQ ID NO: 6114 - DNA, 122 bp, Homo sapiens
  misc_feature (61)..(62): /note="This region represents a CpG dinucleotide"
  misc_feature (61)..(61): /note="Nucleotide may be methylated to form 5-methylcytosine"
ttggcagatgtgaggtgtcacacattaaaactgttttacaccatgagcattgacttcattcggtcagtgagggaggatgcaaccacctttgccaaaataggaaggaagagaagacccagagt

SEQ ID NO: 6115 - DNA, 122 bp, Homo sapiens
  misc_feature (61)..(62): /note="This region represents a CpG dinucleotide"
  misc_feature (61)..(61): /note="Nucleotide may be methylated to form 5-methylcytosine"
acttggctggaaataggttaccttagattcccatccacccactgtctttgtgggggatagcgtgaagaattctatatgtgcctatatactagataccaagcagccttataaaaatggcttgg

SEQ ID NO: 6116 - DNA, 122 bp, Homo sapiens
  misc_feature (61)..(62): /note="This region represents a CpG dinucleotide"
  misc_feature (61)..(61): /note="Nucleotide may be methylated to form 5-methylcytosine"
tgggtgtctgcttgtccagaacattcttgctaaataattggcttagaaagtcgtgaaaggcgtcagtggctctgaaccacggggaaacccaaacagtttatgaagaacaagatcagcccgcc

SEQ ID NO: 6117 - DNA, 122 bp, Homo sapiens
  misc_feature (61)..(62): /note="This region represents a CpG dinucleotide"
  misc_feature (61)..(61): /note="Nucleotide may be methylated to form 5-methylcytosine"
tctggtgtaacttcagttctgccagtaagccactaggctgactgtgttgcctcctggaagcgtctctgtttccaagcaggcaatgactaatgacgcttgtcacctgttatcttccatgaagt

SEQ ID NO: 6118 - DNA, 122 bp, Homo sapiens
  misc_feature (61)..(62): /note="This region represents a CpG dinucleotide"
  misc_feature (61)..(61): /note="Nucleotide may be methylated to form 5-methylcytosine"
atagagatgagggcctcggcggagacagtctcacgcagaggtatgccaccttggcatctgcgccttccgtgggccagtgggtcttccgggagggattctgtgtccctggtattgtgtgtcaa

SEQ ID NO: 6119 - DNA, 122 bp, Homo sapiens
  misc_feature (61)..(62): /note="This region represents a CpG dinucleotide"
  misc_feature (61)..(61): /note="Nucleotide may be methylated to form 5-methylcytosine"
acaaagattaaacttagataataatagggaggaagttgtggtagccattcttgttccaagcgggaacttgatgtgttgctcatcacagttttgctggtggcatcctgtccatggatagagct

SEQ ID NO: 6120 - DNA, 122 bp, Homo sapiens
  misc_feature (61)..(62): /note="This region represents a CpG dinucleotide"
  misc_feature (61)..(61): /note="Nucleotide may be methylated to form 5-methylcytosine"
gagtgccaaatgccacataagtggcacaggatatgcttccgtggcctgctcagacctcaacggccagatctctacggcttgcttttagaaatccacttgcctatggatgcctcactcccagt

SEQ ID NO: 6121 - DNA, 122 bp, Homo sapiens
  misc_feature (61)..(62): /note="This region represents a CpG dinucleotide"
  misc_feature (61)..(61): /note="Nucleotide may be methylated to form 5-methylcytosine"
gttttctccctttgtttgcgagattctgaacagctcggagcgattagggaatttgcggaccgagtccggtggcagagctggggcgaaagcagagagcgcaatttaatttttgtcatctcttc

SEQ ID NO: 6122 - DNA, 122 bp, Homo sapiens
  misc_feature (61)..(62): /note="This region represents a CpG dinucleotide"
  misc_feature (61)..(61): /note="Nucleotide may be methylated to form 5-methylcytosine"
cgtaaatatctcccactaacttgatgattaagataaggtccaggaactttttcccgtttacggtttaaaaacaaccttctgtggagatttttgatggaatgtagggatatttatgactcagg

SEQ ID NO: 6123 - DNA, 122 bp, Homo sapiens
  misc_feature (61)..(62): /note="This region represents a CpG dinucleotide"
  misc_feature (61)..(61): /note="Nucleotide may be methylated to form 5-methylcytosine"
tggaacattcctgcaaatggtttcaatatatgcagatgtctcaatataggaatgaaattacgtctttggaacaacttaaataagtcaaatatacttggagctttaaaaattaaaaggagaga

SEQ ID NO: 6124 - DNA, 122 bp, Homo sapiens
  misc_feature (61)..(62): /note="This region represents a CpG dinucleotide"
  misc_feature (61)..(61): /note="Nucleotide may be methylated to form 5-methylcytosine"
aataaggtttagttgaacataagcactgtgatactgccacaatcaatctgataactgagacgactactaagtgactaatgaatgggtagctcatatggcatagatgtgctggacaaaaggac

SEQ ID NO: 6125 - DNA, 122 bp, Homo sapiens
  misc_feature (61)..(62): /note="This region represents a CpG dinucleotide"
  misc_feature (61)..(61): /note="Nucleotide may be methylated to form 5-methylcytosine"
atatttttacattgccaaatctgtgtcacatacccttgcataagacattgcgaaatgtgtcgctaggcctgttgcatgggctctgctataaagaaagatgatccaaccaaccagtaattggt

SEQ ID NO: 6126 - DNA, 122 bp, Homo sapiens
  misc_feature (61)..(62): /note="This region represents a CpG dinucleotide"
  misc_feature (61)..(61): /note="Nucleotide may be methylated to form 5-methylcytosine"
ttccctcttggtctcaaattagttttactgaaaccctatctttatgtgggtcagggcttccgtcttccttaaaaactttttttttcctttaaaaacaaaaacacaccctcccatttccagaa

SEQ ID NO: 6127 - DNA, 122 bp, Homo sapiens
  misc_feature (61)..(62): /note="This region represents a CpG dinucleotide"
  misc_feature (61)..(61): /note="Nucleotide may be methylated to form 5-methylcytosine"
cgtgtaggtggactctgccccaactagagagccactggtaacttcctcccaacttagcaacgtatcttggttgacaagccccaccaaagtcacatggcggggtgagaatagggaagttcccc

SEQ ID NO: 6128 - DNA, 122 bp, Homo sapiens
  misc_feature (61)..(62): /note="This region represents a CpG dinucleotide"
  misc_feature (61)..(61): /note="Nucleotide may be methylated to form 5-methylcytosine"
gtagccccagggcagtgtctctctccaagattcagccttcctgctgcaaaaatctgctcacgtgcaaaaggcaggggtttggcagatgcttacaaaatgttacaagtgttccaaagataaaa

SEQ ID NO: 6129 - DNA, 122 bp, Homo sapiens
  misc_feature (61)..(62): /note="This region represents a CpG dinucleotide"
  misc_feature (61)..(61): /note="Nucleotide may be methylated to form 5-methylcytosine"
ggacacagtcccgggcccagggaggacctggaacattcccttcctccccccccccccccccgcccccgcccatcagcccagcctgcaaggaggcgccaccggacctgcacactcaggagcag

SEQ ID NO: 6130 - DNA, 122 bp, Homo sapiens
  misc_feature (61)..(62): /note="This region represents a CpG dinucleotide"
  misc_feature (61)..(61): /note="Nucleotide may be methylated to form 5-methylcytosine"
caggtctggccttcatatacccgtactgcgagggctgtttccaatgtaaataaataactgcgcaacagttccttcctcctttcctttgttcctccctccccccggcctttttttttggcaga

SEQ ID NO: 6131 - DNA, 122 bp, Homo sapiens
  misc_feature (61)..(62): /note="This region represents a CpG dinucleotide"
  misc_feature (61)..(61): /note="Nucleotide may be methylated to form 5-methylcytosine"
aatgaactacagatgaggaagtgaagctcggagtggtcacatgacctgtccaaggttccacgtgtagaatgtgctatagctaaagttttgaggtttgaccttagatcatctaactacagagc

SEQ ID NO: 6132 - DNA, 122 bp, Homo sapiens
  misc_feature (61)..(62): /note="This region represents a CpG dinucleotide"
  misc_feature (61)..(61): /note="Nucleotide may be methylated to form 5-methylcytosine"
ttaagctttaatttaaaacgaaggtggggactttgttctgaccttattttccagcccattcgagtcaatcccttcacccttaatcagtggacaaatatttgctgagcacctactatgtgcca

SEQ ID NO: 6133 - DNA, 122 bp, Homo sapiens
  misc_feature (61)..(62): /note="This region represents a CpG dinucleotide"
  misc_feature (61)..(61): /note="Nucleotide may be methylated to form 5-methylcytosine"
gccagcattgaacccaaacaatatcggatagattttttttcttcctctctctctctttgacgggaaaagttattgattgggtaaacacagatgtatttaatgttttaagtcagttcacagtg

SEQ ID NO: 6134 - DNA, 122 bp, Homo sapiens
  misc_feature (61)..(62): /note="This region represents a CpG dinucleotide"
  misc_feature (61)..(61): /note="Nucleotide may be methylated to form 5-methylcytosine"
agacatttggctgtctcattaatattaagtaaacacctgaaaacacctttctggtagcctcgaaaatcagtgaacacatacacatcatattctaaaaccaatttgttgatgataaaacatat

SEQ ID NO: 6135 - DNA, 122 bp, Homo sapiens
  misc_feature (61)..(62): /note="This region represents a CpG dinucleotide"
  misc_feature (61)..(61): /note="Nucleotide may be methylated to form 5-methylcytosine"
cccagcacagggcagaatcataaaccgcccacttgctctccttcccgtctgtgaagcgctcgttcagagccgcaggactccgcaaacaataaaaccggctgcgtggctattgcctggattac

SEQ ID NO: 6136 - DNA, 122 bp, Homo sapiens
  misc_feature (61)..(62): /note="This region represents a CpG dinucleotide"
  misc_feature (61)..(61): /note="Nucleotide may be methylated to form 5-methylcytosine"
ggaattcacaggaaatgatttcttcccttgtgggagctaaggcattcaagtaaatctgagcgcctgtcagagaagcagccgtcactaggcttgctgattacatttgcagttaaaacccaaaa

SEQ ID NO: 6137 - DNA, 122 bp, Homo sapiens
  misc_feature (61)..(62): /note="This region represents a CpG dinucleotide"
  misc_feature (61)..(61): /note="Nucleotide may be methylated to form 5-methylcytosine"
tttttgagagagagaactgcaaacctcaagtgtgactgaattcaaatcaggcttacaaggcgtgcttggtttcttatttgctgattacgtcgtgttctgttttttcctcccttggtattttc

SEQ ID NO: 6138 - DNA, 122 bp, Homo sapiens
  misc_feature (61)..(62): /note="This region represents a CpG dinucleotide"
  misc_feature (61)..(61): /note="Nucleotide may be methylated to form 5-methylcytosine"
gccaaaggtcacatggctcaggaccaagtgcagaaccaggacagcaagcctctgtcctggcggttctcacccagtctggacccaaaggcaggaaagtgttaagaaacacttgctggcaatga

SEQ ID NO: 6139 - DNA, 122 bp, Homo sapiens
  misc_feature (61)..(62): /note="This region represents a CpG dinucleotide"
  misc_feature (61)..(61): /note="Nucleotide may be methylated to form 5-methylcytosine"
tcgggttagctaaatctgagattttaaaatcaactcttactcaaaacgccatgacggtgccgtttacacaatactcgccttgagagcccagcaagtgtaacatactatttcatattataagt

SEQ ID NO: 6140 - DNA, 122 bp, Homo sapiens
  misc_feature (61)..(62): /note="This region represents a CpG dinucleotide"
  misc_feature (61)..(61): /note="Nucleotide may be methylated to form 5-methylcytosine"
ttgtgtgtctgaagagagctcagtaaaataggtttcctccaagctggtttgaaaggcaggcgaggtggggaatggaaaagcacactgcatggagaaagaaccatttagccccaagcactgtc

SEQ ID NO: 6141 - DNA, 122 bp, Homo sapiens
  misc_feature (61)..(62): /note="This region represents a CpG dinucleotide"
  misc_feature (61)..(61): /note="Nucleotide may be methylated to form 5-methylcytosine"
aatctaaatttttttctatgaatccaaggagaggtggtataggggaaaaaaaaaaatcctcgactggaaggaccaagatctgcctggacaatggcattgcttgtttacacaggtgcaaatca

SEQ ID NO: 6142 - DNA, 122 bp, Homo sapiens
  misc_feature (61)..(62): /note="This region represents a CpG dinucleotide"
  misc_feature (61)..(61): /note="Nucleotide may be methylated to form 5-methylcytosine"
ctcagaccagtaaatgcaaacattagatagggtgcttactgtggactcatcactgctatccgtgactcacacacttcagtcttcacaacaaccttaggatgtaggtagttttattacactta

SEQ ID NO: 6143 - DNA, 122 bp, Homo sapiens
  misc_feature (61)..(62): /note="This region represents a CpG dinucleotide"
  misc_feature (61)..(61): /note="Nucleotide may be methylated to form 5-methylcytosine"
tgtctatttagaagcaaacctctcgtcacccgctgcggagcatctcgatgttagaaaccacgccactatttttagtgtgtgtccttgtgcttctgcacgatgagtcagggttctcttttaaa

SEQ ID NO: 6144 - DNA, 122 bp, Homo sapiens
  misc_feature (61)..(62): /note="This region represents a CpG dinucleotide"
  misc_feature (61)..(61): /note="Nucleotide may be methylated to form 5-methylcytosine"
cagtgcctggcacacagtagatagataaatgggagctattaatgttgtcatcatcattcccgatgtcaattatgtgatgtcagtctgaatgaggacattgtgtgccctcagtgtgcagccat

SEQ ID NO: 6145 - DNA, 122 bp, Homo sapiens
  misc_feature (61)..(62): /note="This region represents a CpG dinucleotide"
  misc_feature (61)..(61): /note="Nucleotide may be methylated to form 5-methylcytosine"
agcatgtgcatgacgaatccccatatgtagcacagcatccccagtactttgtaaaatgttcgttgactgagtcatagctcaacagtgtgactactgaatcattgaaactgaagctaaaatgg

SEQ ID NO: 6146 - DNA, 122 bp, Homo sapiens
  misc_feature (61)..(62): /note="This region represents a CpG dinucleotide"
  misc_feature (61)..(61): /note="Nucleotide may be methylated to form 5-methylcytosine"
gtagacaactttctaataattgaactgtctgtcctgcctgctagttgcctttgttattatcgtaatcattagtggttgctggaagtggggcagggtgtgtttaggtgagcaggggggagtgt

SEQ ID NO: 6147 - DNA, 122 bp, Homo sapiens
  misc_feature (61)..(62): /note="This region represents a CpG dinucleotide"
  misc_feature (61)..(61): /note="Nucleotide may be methylated to form 5-methylcytosine"
ggaacagtaggagaactctccacatttatcttgaggcttcaggcttttcaacatcatcttcgaaagtacagcattaggaaactgtgctgactcaacaacccccagattctagtttatgctgc

SEQ ID NO: 6148 - DNA, 122 bp, Homo sapiens
  misc_feature (61)..(62): /note="This region represents a CpG dinucleotide"
  misc_feature (61)..(61): /note="Nucleotide may be methylated to form 5-methylcytosine"
acatgttccccctgcagtccccatcaccctcacactggaatgattgtcctttgtggcacacgttgttgcaagtattttcgtaatgtgtatcatttcatgtaaatgatgtgagctcaagatta

SEQ ID NO: 6149 - DNA, 122 bp, Homo sapiens
  misc_feature (61)..(62): /note="This region represents a CpG dinucleotide"
  misc_feature (61)..(61): /note="Nucleotide may be methylated to form 5-methylcytosine"
atctttgaggtcctgaaattgtaaaatatctcacagtgtctcgctccgttgtctgtgcttcgtctgtgtttacttgtttgtttctcattgtcgctgcacaatcttctcatcgtgtatagggt

SEQ ID NO: 6150 - DNA, 122 bp, Homo sapiens
  misc_feature (61)..(62): /note="This region represents a CpG dinucleotide"
  misc_feature (61)..(61): /note="Nucleotide may be methylated to form 5-methylcytosine"
tgcttaggtttgaggtttctactacatcatttcccttttctcttaacaataccagcttctcggccgggcatggtggctcacgcctgttaatcccagcactttgggaggccaaggcgggcgga

SEQ ID NO: 6151 - DNA, 122 bp, Homo sapiens
  misc_feature (61)..(62): /note="This region represents a CpG dinucleotide"
  misc_feature (61)..(61): /note="Nucleotide may be methylated to form 5-methylcytosine"
gcataagtctgaggattatgagttctgggggctcaagccaattccgtcattaataaatcacgttactgtgagcaatcatataagccgcgaggctcagtatccacatctgtataaacaggcta

SEQ ID NO: 6152 - DNA, 122 bp, Homo sapiens
  misc_feature (61)..(62): /note="This region represents a CpG dinucleotide"
  misc_feature (61)..(61): /note="Nucleotide may be methylated to form 5-methylcytosine"
tgtggcatttattgccctctactaaaatgagctattatctgacactctgctctgtacagacgtgtttctgtttccattttcagttccttctccacatggtctaagtaccagtagtttagtca

SEQ ID NO: 6153 - DNA, 122 bp, Homo sapiens
  misc_feature (61)..(62): /note="This region represents a CpG dinucleotide"
  misc_feature (61)..(61): /note="Nucleotide may be methylated to form 5-methylcytosine"
atggccaagcttccctctacccaagaccgacgaagttggggaccagactcctagagggggcgcggggattctcagggtgtggggaacaggtcctccagagacaaatctgccttgcaggtggg

SEQ ID NO: 6154 - DNA, 122 bp, Homo sapiens
  misc_feature (61)..(62): /note="This region represents a CpG dinucleotide"
  misc_feature (61)..(61): /note="Nucleotide may be methylated to form 5-methylcytosine"
gctgcgcctgaatccagaccgcgcttttccccacactcagaggaccagcctgatggcccccgtccctgagcctgcggcccctgcatagaggctctacgtcccaggcacagggaccctcctcc

SEQ ID NO: 6155 - DNA, 122 bp, Homo sapiens
  misc_feature (61)..(62): /note="This region represents a CpG dinucleotide"
  misc_feature (61)..(61): /note="Nucleotide may be methylated to form 5-methylcytosine"
ctacggggtctcgtccctctgcacgtgcccagggctgggaccccagacacagacctgccccggacgagggaacgcacggagcttcccaagatggtttgaatcagtaactgacggcaaaagca

SEQ ID NO: 6156 - DNA, 122 bp, Homo sapiens
  misc_feature (61)..(62): /note="This region represents a CpG dinucleotide"
  misc_feature (61)..(61): /note="Nucleotide may be methylated to form 5-methylcytosine"
gggcccgtctgcgtttggtttatgctggggtgtctggggacctgctggcctttccccacccgggcctgacctgaaccgaccctggacctcagcagcctttgatgggcaggaggcatttgggg

SEQ ID NO: 6157 - DNA, 122 bp, Homo sapiens
  misc_feature (61)..(62): /note="This region represents a CpG dinucleotide"
  misc_feature (61)..(61): /note="Nucleotide may be methylated to form 5-methylcytosine"
gtctctcagcaagtggcatcactgaatctctagatacctaagccaaggcctgggaatcttcgtctactcattctcagtcatcccttacactcaattagtcatcaggttatcttaagtctccc

SEQ ID NO: 6158 - DNA, 122 bp, Homo sapiens
  misc_feature (61)..(62): /note="This region represents a CpG dinucleotide"
  misc_feature (61)..(61): /note="Nucleotide may be methylated to form 5-methylcytosine"
aggccaaccgcatgcagggggacccggggtgagtggtgtgggagctgggacatgcctacgcgtggtgggaagcctccccgccggccagccagaggacacttctctcctgagctgggggctga

SEQ ID NO: 6159 - DNA, 122 bp, Homo sapiens
  misc_feature (61)..(62): /note="This region represents a CpG dinucleotide"
  misc_feature (61)..(61): /note="Nucleotide may be methylated to form 5-methylcytosine"
caaagccttccacgctgtttgtgcagccctgaactatgtcagtgggaagctacatgaaaccgtgtcatatgacctcatgccccatgagtcacaaaatcattaattcattctcactatctccc

SEQ ID NO: 6160 - DNA, 122 bp, Homo sapiens
  misc_feature (61)..(62): /note="This region represents a CpG dinucleotide"
  misc_feature (61)..(61): /note="Nucleotide may be methylated to form 5-methylcytosine"
gggtctctctgggacagatgtggctttagaggaagcctttgcaaagtggcagctttggggcgggtttgggattctggaagcttctgagcatagtgtgagtgtgtgcgaggggatgggggaag

SEQ ID NO: 6161 - DNA, 122 bp, Homo sapiens
  misc_feature (61)..(62): /note="This region represents a CpG dinucleotide"
  misc_feature (61)..(61): /note="Nucleotide may be methylated to form 5-methylcytosine"
tagcctgagctagattcagagggcactatctgatggggtgtgtctgcacacacacatgcacgcgtattgtactcttagtccctatcagaatacgcttccttcagtcttagcggtgggtgtga

SEQ ID NO: 6162 - DNA, 122 bp, Homo sapiens
  misc_feature (61)..(62): /note="This region represents a CpG dinucleotide"
  misc_feature (61)..(61): /note="Nucleotide may be methylated to form 5-methylcytosine"
gaagcaggaagaggccgctggacctggacgggaggacgacacctggattactgggtgtggcgccttccaccaacagtgctggccacatgtgaacagcacctggtagccttggaggctgtgag

SEQ ID NO: 6163 - DNA, 122 bp, Homo sapiens
  misc_feature (61)..(62): /note="This region represents a CpG dinucleotide"
  misc_feature (61)..(61): /note="Nucleotide may be methylated to form 5-methylcytosine"
agctttctctacccagcctcatccttcctgaatgtggtgatgatactaaataaactcatgcgatgtttttcttccagctcgataatgatcctcattccatgccagttacaacatctgatgaa

SEQ ID NO: 6164 - DNA, 122 bp, Homo sapiens
  misc_feature (61)..(62): /note="This region represents a CpG dinucleotide"
  misc_feature (61)..(61): /note="Nucleotide may be methylated to form 5-methylcytosine"
ccatctgaagtggaattctcagcctcttaggatggcaggatatgactgtagtagaattgccgtatgagatagcttttgcttaaatgtccaaagattaggaaactgaatatgtaatatgatta

SEQ ID NO: 6165 - DNA, 122 bp, Homo sapiens
  misc_feature (61)..(62): /note="This region represents a CpG dinucleotide"
  misc_feature (61)..(61): /note="Nucleotide may be methylated to form 5-methylcytosine"
gtgggagtatcgcttgagcccaggaagtcgaggttgcagtgagccgagatctaatgcaggcgtcaagtacgttaccacgatctgatcctcagaccccatgcaggttccccacgtttcgcagt

SEQ ID NO: 6166 - DNA, 122 bp, Homo sapiens
  misc_feature (61)..(62): /note="This region represents a CpG dinucleotide"
  misc_feature (61)..(61): /note="Nucleotide may be methylated to form 5-methylcytosine"
ccccgctcgcccagtggcctccggccccgaggttacaccatctccgactcggccccatcacgcaggggcaagagagtagagagggacgccttaaagagcagagccacagcctccaatgcaga

SEQ ID NO: 6167 - DNA, 122 bp, Homo sapiens
  misc_feature (61)..(62): /note="This region represents a CpG dinucleotide"
  misc_feature (61)..(61): /note="Nucleotide may be methylated to form 5-methylcytosine"
gtttcccaggctgggatgccttttgctttccacaataggaatggccagtagctgccagcccgtggtggaaagaagcaactggagattgcaaactctcctctgctctctcaacaggcaatagg

SEQ ID NO: 6168 - DNA, 122 bp, Homo sapiens
  misc_feature (61)..(62): /note="This region represents a CpG dinucleotide"
  misc_feature (61)..(61): /note="Nucleotide may be methylated to form 5-methylcytosine"
taagagggtgtgagagtgccaagcatgcgacaggctctccatgcctgcctggggctggggcgggagaccccagggaacatggggtgtcagaggcctatctgcccccttgccaccacgacaag

SEQ ID NO: 6169 - DNA, 122 bp, Homo sapiens
  misc_feature (61)..(62): /note="This region represents a CpG dinucleotide"
  misc_feature (61)..(61): /note="Nucleotide may be methylated to form 5-methylcytosine"
gtaggtttgttaccaccagcatcaccacaaacacgtgagtaatgtgttgtgacattgcaacggctgtgtcaccagacgataggaatttttcaattccattataatcttacggaaccactgtc

SEQ ID NO: 6170 - DNA, 122 bp, Homo sapiens
  misc_feature (61)..(62): /note="This region represents a CpG dinucleotide"
  misc_feature (61)..(61): /note="Nucleotide may be methylated to form 5-methylcytosine"
agttcgcaaatttcttgaatatttaacaatcagcttttgcaagtgcatacatgctcacaacgtttgcttttttgtactttgttttgagggaggcaggaaatggaaacttgcaatggtattga

SEQ ID NO: 6171 - DNA, 122 bp, Homo sapiens
  misc_feature (61)..(62): /note="This region represents a CpG dinucleotide"
  misc_feature (61)..(61): /note="Nucleotide may be methylated to form 5-methylcytosine"
aattggtaagattctaccacaattagattggcccaaaaaagggcaatgtgttattccatacgaggggagacagaaaataaagaaataaatgcataaataagatacttttaagtagtggtaca

SEQ ID NO: 6172 - DNA, 122 bp, Homo sapiens
  misc_feature (61)..(62): /note="This region represents a CpG dinucleotide"
  misc_feature (61)..(61): /note="Nucleotide may be methylated to form 5-methylcytosine"
gtgagagtagaaactgtatttttcattgctgtatccctagtacttaaattgcacataacacgcactaaataaatgttgaaagaaaaatagtttttcatacagggggaggaaatgtttataaa

SEQ ID NO: 6173 - DNA, 122 bp, Homo sapiens
  misc_feature (61)..(62): /note="This region represents a CpG dinucleotide"
  misc_feature (61)..(61): /note="Nucleotide may be methylated to form 5-methylcytosine"
cttgggtaaataggagtgcggttgctgagtcataagggtatgcatttggttagtagttgacggaagttttctaaagtagttctactggtttacactctgctggcagagtgtaagagttctag

SEQ ID NO: 6174 - DNA, 122 bp, Homo sapiens
  misc_feature (61)..(62): /note="This region represents a CpG dinucleotide"
  misc_feature (61)..(61): /note="Nucleotide may be methylated to form 5-methylcytosine"
aagcatgagaccatccacgtgcccttcctggtgggcctggagccagcccagctggggcagcggccaagctggttggtgcccagatttggtccaaggcaagaactcaaatgctgcattcttct

SEQ ID NO: 6175 - DNA, 122 bp, Homo sapiens
  misc_feature (61)..(62): /note="This region represents a CpG dinucleotide"
  misc_feature (61)..(61): /note="Nucleotide may be methylated to form 5-methylcytosine"
ctctgttagtgacagaatttaaaatatttgttatttttttttgcctgggtaatgaagtaccgtgacccagatatgtactgtggctccttgtttattttctgacagagatggggtttgaggtg

SEQ ID NO: 6176 - DNA, 122 bp, Homo sapiens
  misc_feature (61)..(62): /note="This region represents a CpG dinucleotide"
  misc_feature (61)..(61): /note="Nucleotide may be methylated to form 5-methylcytosine"
ttgctcttagcattttttttcttttcatgtaaccctttgttctttcaggaatttactttgcggtaagaaatgggctggcttccagttttatgtttcccaaatggtgattcagctgttccatt

SEQ ID NO: 6177 - DNA, 122 bp, Homo sapiens
  misc_feature (61)..(62): /note="This region represents a CpG dinucleotide"
  misc_feature (61)..(61): /note="Nucleotide may be methylated to form 5-methylcytosine"
actgtctgcctttggagggaatccacaagcgggtgggaatcatcctgacgtgattcacagcgtctggtggccagagttggtggaggctatttgtttaacacccgttcccctgggcacctaag

SEQ ID NO: 6178 - DNA, 122 bp, Homo sapiens
  misc_feature (61)..(62): /note="This region represents a CpG dinucleotide"
  misc_feature (61)..(61): /note="Nucleotide may be methylated to form 5-methylcytosine"
ctttgtgacttgaagaaccctgactttgtttctgcaaaggcacctgcatgtgtctgtgttcgtgtaggcataatgtgaggaggtggggagaccaccccacccccatgtccaccatgaccctc

SEQ ID NO: 6179 - DNA, 122 bp, Homo sapiens
  misc_feature (61)..(62): /note="This region represents a CpG dinucleotide"
  misc_feature (61)..(61): /note="Nucleotide may be methylated to form 5-methylcytosine"
tcaagaataaaatcaaagtctttggcttgacagccttccacaatctgacctctgttttctcgccagcctcatctcctgtcattcacaacatttccagcattccaaccagtctgaacttttgc

SEQ ID NO: 6180 - DNA, 122 bp, Homo sapiens
  misc_feature (61)..(62): /note="This region represents a CpG dinucleotide"
  misc_feature (61)..(61): /note="Nucleotide may be methylated to form 5-methylcytosine"
atctttgttgttcctgcagcacctaatgtaaagtgccttgcacagggtaggtgctcatgacgtgtagaatgagtgagtaacttcctgcctcatcaggatgaaatgtggttcacttcccctgt

SEQ ID NO: 6181 - DNA, 122 bp, Homo sapiens
  misc_feature (61)..(62): /note="This region represents a CpG dinucleotide"
  misc_feature (61)..(61): /note="Nucleotide may be methylated to form 5-methylcytosine"
atctggcaggggcatctgagggatgccagcttttttgctggtgccactaagctctactcacgctgctgcttctgccgggccttgtcacagatggcaggtctcaggtagatcttgcgcccctc

SEQ ID NO: 6182 - DNA, 122 bp, Homo sapiens
  misc_feature (61)..(62): /note="This region represents a CpG dinucleotide"
  misc_feature (61)..(61): /note="Nucleotide may be methylated to form 5-methylcytosine"
ttcctgttcctcttcttgctcttcctgtttctgcccctcttcctgcttgtgttcttgtgtcggctcctgcctgtgctccactccttgctcctgcttgtgctctggcgcttgctcctggcctc

SEQ ID NO: 6183 - DNA, 122 bp, Homo sapiens
  misc_feature (61)..(62): /note="This region represents a CpG dinucleotide"
  misc_feature (61)..(61): /note="Nucleotide may be methylated to form 5-methylcytosine"
tattccattgcatatgtgtgtcacagttggtttatccactcatctgcttatacacactagcgttgcttccaccttttggctattgtgaataatgctgctatgaacacgggtgtccaattagc

SEQ ID NO: 6184 - DNA, 122 bp, Homo sapiens
  misc_feature (61)..(62): /note="This region represents a CpG dinucleotide"
  misc_feature (61)..(61): /note="Nucleotide may be methylated to form 5-methylcytosine"
atggcttctccatgctaatcgccctatagaacaaggagaaaaggaaaggtgggcccttcacggtatatattttgctctttgattggaacgaaatgaactcagtgtaacgtccaggctgttgt

SEQ ID NO: 6185 - DNA, 122 bp, Homo sapiens
  misc_feature (61)..(62): /note="This region represents a CpG dinucleotide"
  misc_feature (61)..(61): /note="Nucleotide may be methylated to form 5-methylcytosine"
aagggcaagagcttaaatgtcagccagagcctactgaaatcccagatttcacactcttatcggctgtgtgattgcctgcaagtggctttccctctctgaacctcatttctcatttggaaagt

SEQ ID NO: 6186 - DNA, 122 bp, Homo sapiens
  misc_feature (61)..(62): /note="This region represents a CpG dinucleotide"
  misc_feature (61)..(61): /note="Nucleotide may be methylated to form 5-methylcytosine"
ccagaccacaagtcatgatctttcctgagaagcaggaaccacactgcagcctcacaaagccgtaggagacaattacaatcccaccaaggggccaatcacaggtgaatacccaggcttttttg

SEQ ID NO: 6187 - DNA, 122 bp, Homo sapiens
  misc_feature (61)..(62): /note="This region represents a CpG dinucleotide"
  misc_feature (61)..(61): /note="Nucleotide may be methylated to form 5-methylcytosine"
cgcttcacttcattaggcccccgccccgattcttgccccgcccgctcaatgtcccgcctacgaccccgcccactactagtgaccggcccgcccgttcgaggccccgcctcctccccgcccaa

SEQ ID NO: 6188 - DNA, 122 bp, Homo sapiens
  misc_feature (61)..(62): /note="This region represents a CpG dinucleotide"
  misc_feature (61)..(61): /note="Nucleotide may be methylated to form 5-methylcytosine"
tggggtttccgtcccgggactcccctacgagggcggtccccggtagccagaagatccggccggactccgagcctggccccttgggcgccgtgtaattctatagctgtagggtttcctctcca

SEQ ID NO: 6189 - DNA, 122 bp, Homo sapiens
  misc_feature (61)..(62): /note="This region represents a CpG dinucleotide"
  misc_feature (61)..(61): /note="Nucleotide may be methylated to form 5-methylcytosine"
cttttaaaaattctatccagatattgttttcagctgaaaactcagcctgaggcctgttgtcgttattgaaaaggaggagaaacaaacacgggaaagtgtaaaagaattcaccttcttgctct

SEQ ID NO: 6190 - DNA, 122 bp, Homo sapiens
  misc_feature (61)..(62): /note="This region represents a CpG dinucleotide"
  misc_feature (61)..(61): /note="Nucleotide may be methylated to form 5-methylcytosine"
ccttgagggaaagaacacacagtgccggcctttggaattggcagccagtgtgctgttctccgtctgataagaggtactgtaaataaaactgtacaccatggcctgttgtaaaatgccctgcg

SEQ ID NO: 6191 - DNA, 122 bp, Homo sapiens
  misc_feature (61)..(62): /note="This region represents a CpG dinucleotide"
  misc_feature (61)..(61): /note="Nucleotide may be methylated to form 5-methylcytosine"
cagtggctggctaacaatcaaaaataggttttggtaatgttgggtaacgttgctcaaatacggctatattatgcagagcacatggcaatcgttgaagagtaaaacacagataattccacttc

SEQ ID NO: 6192 - DNA, 122 bp, Homo sapiens
  misc_feature (61)..(62): /note="This region represents a CpG dinucleotide"
  misc_feature (61)..(61): /note="Nucleotide may be methylated to form 5-methylcytosine"
ccatctgcctcccacccatcactggaccagctgtgctcagagagcacacgaggcagccaacgtggctctggccctatttagacagatggcgccagagcccagaaataggcttcaacctggcc

SEQ ID NO: 6193 - DNA, 122 bp, Homo sapiens
  misc_feature (61)..(62): /note="This region represents a CpG dinucleotide"
  misc_feature (61)..(61): /note="Nucleotide may be methylated to form 5-methylcytosine"
ggtgactaaagttagcatttaacaatcaactggtgttaatttctgcttacacttagagtgcgcagaaatatttgtgtgatcattgttagtttagcagcattttgtcttagctgaaatatggt

SEQ ID NO: 6194 - DNA, 122 bp, Homo sapiens
  misc_feature (61)..(62): /note="This region represents a CpG dinucleotide"
  misc_feature (61)..(61): /note="Nucleotide may be methylated to form 5-methylcytosine"
acataataagcccaagtaaataaaataagcatacccagcttatttctagtttctttaaaacgcctgaggaaatacatcatggaggcataaagctgtgcattttcaccttgggtaggcaggaa

SEQ ID NO: 6195 - DNA, 122 bp, Homo sapiens
  misc_feature (61)..(62): /note="This region represents a CpG dinucleotide"
  misc_feature (61)..(61): /note="Nucleotide may be methylated to form 5-methylcytosine"
tcagcgtggggtttgcttagaaaaatctcccacgcaatttgagcttaggttgggccaaaacggacatcctgggaagctcacattgtggacaataatttgtctggtggatttggagagttcat

SEQ ID NO: 6196 - DNA, 122 bp, Homo sapiens
  misc_feature (61)..(62): /note="This region represents a CpG dinucleotide"
  misc_feature (61)..(61): /note="Nucleotide may be methylated to form 5-methylcytosine"
tgctgatgaagtaaaagttgacagtgagaagccttccagcaggagctaccagtgcccactcgcagttcgtgttgtttggataggtgcctggatagccagggctggtgaatgagcctctgtct

SEQ ID NO: 6197 - DNA, 122 bp, Homo sapiens
  misc_feature (61)..(62): /note="This region represents a CpG dinucleotide"
  misc_feature (61)..(61): /note="Nucleotide may be methylated to form 5-methylcytosine"
ttccttgttatgcaagcgcttgctttcagtttcaagttgtacaatcctagggctcacaatcggtgacccaatacatgacagcctttcatagtctttaatgcagtctttacaggaaccttcca

SEQ ID NO: 6198 - DNA, 122 bp, Homo sapiens
  misc_feature (61)..(62): /note="This region represents a CpG dinucleotide"
  misc_feature (61)..(61): /note="Nucleotide may be methylated to form 5-methylcytosine"
caaagtgctgggattacaggcgtgagccaccgcacccggccatcattagtcatttttctacgagttattaggcataaattgtgaaacattcacaggagggattgtgtgtttgagatcatctc

SEQ ID NO: 6199 - DNA, 122 bp, Homo sapiens
  misc_feature (61)..(62): /note="This region represents a CpG dinucleotide"
  misc_feature (61)..(61): /note="Nucleotide may be methylated to form 5-methylcytosine"
ccagtctagattcctgtccaatcaatggtgtgattcttgggcgacaacaacctgaagtcacgccagggggttccctggacaaagggcagaggccccccgactccctctcctggagaggatgc

SEQ ID NO: 6200 - DNA, 122 bp, Homo sapiens
  misc_feature (61)..(62): /note="This region represents a CpG dinucleotide"
  misc_feature (61)..(61): /note="Nucleotide may be methylated to form 5-methylcytosine"
ccagagtcattcgcccaaagttgcgtgagtcgatagttggtcaaattcttacttgtagcccggtactctttccactgccccacactgtctgcagacactggccagatgtcccctgttatgcc

SEQ ID NO: 6201 - DNA, 122 bp, Homo sapiens
  misc_feature (61)..(62): /note="This region represents a CpG dinucleotide"
  misc_feature (61)..(61): /note="Nucleotide may be methylated to form 5-methylcytosine"
gatgtgtgcattcatgagctcaggtgagttttacctgttgagtcaggtggcatatggggccgagacccaggctgatgctgaggaactgtgggatctaccacagtccaccttcatccactgca

SEQ ID NO: 6202 - DNA, 122 bp, Homo sapiens
  misc_feature (61)..(62): /note="This region represents a CpG dinucleotide"
  misc_feature (61)..(61): /note="Nucleotide may be methylated to form 5-methylcytosine"
attggaggtcaccccgttaagtcaggaagcctgtctcttacttcaggtacaaagaatgaacgaatgcaggggactaaggcataaacaagggctcatgaatactgtatattgcttggggcctc

SEQ ID NO: 6203 - DNA, 122 bp, Homo sapiens
  misc_feature (61)..(62): /note="This region represents a CpG dinucleotide"
  misc_feature (61)..(61): /note="Nucleotide may be methylated to form 5-methylcytosine"
ctgcagcctgattgcccggttttcggccccgtgccccttattggataaagcttcaggccccgtccccagtccgtgagtgacagaagatgtgaccaaacactggactcaatgaggacggagtg

SEQ ID NO: 6204 - DNA, 122 bp, Homo sapiens
  misc_feature (61)..(62): /note="This region represents a CpG dinucleotide"
  misc_feature (61)..(61): /note="Nucleotide may be methylated to form 5-methylcytosine"
ttggaaattcatgcatgtctttgtagtccataggattctcagaataaccttgtgactagacgagagaaatattgactgtgcgattactgaaggcaaagactgtttgtgatgcttgattactt

SEQ ID NO: 6205 - DNA, 122 bp, Homo sapiens
  misc_feature (61)..(62): /note="This region represents a CpG dinucleotide"
  misc_feature (61)..(61): /note="Nucleotide may be methylated to form 5-methylcytosine"
cggctcttccaaaaaacctggcgttccctgttacccgctagctctttctaggcgggtgggcggggtggagggggccctctgccagcgtccctcaattcgcacattttcagaaaggccccaga

SEQ ID NO: 6206 - DNA, 122 bp, Homo sapiens
  misc_feature (61)..(62): /note="This region represents a CpG dinucleotide"
  misc_feature (61)..(61): /note="Nucleotide may be methylated to form 5-methylcytosine"
cactaacatgtggtgttcttcctgtgtcttcatctctgtgtctctttgtctttacatggccgtttttacaaaggcactggtcatcctagtcccatacgacctaatcttaactaagtacaact

SEQ ID NO: 6207 - DNA, 122 bp, Homo sapiens
  misc_feature (61)..(62): /note="This region represents a CpG dinucleotide"
  misc_feature (61)..(61): /note="Nucleotide may be methylated to form 5-methylcytosine"
ggtgcctagtccctgcctcacagctaatctgctgaatcttggataagtgctgtgctatcacgcccactcctctaatctccctctccttccccagtcctgagtttcttcacaaaagcatcact

SEQ ID NO: 6208 - DNA, 122 bp, Homo sapiens
  misc_feature (61)..(62): /note="This region represents a CpG dinucleotide"
  misc_feature (61)..(61): /note="Nucleotide may be methylated to form 5-methylcytosine"
acaatactaatgaagggtcactgtggcctgggaaaatagcattatattgggatagttacccgagcctttagttatttccaagcctgggaaagggaaggttacttgcagaaactggagattgt

SEQ ID NO: 6209 - DNA, 122 bp, Homo sapiens
  misc_feature (61)..(62): /note="This region represents a CpG dinucleotide"
  misc_feature (61)..(61): /note="Nucleotide may be methylated to form 5-methylcytosine"
aaatcctttcaagaagaatgctaccctctacccgctgctgaagagctggggatatgctgacgatagaaacattgctagacatataaggaaatgagccgccgtgaatgagagtcagcttaaag

SEQ ID NO: 6210 - DNA, 122 bp, Homo sapiens
  misc_feature (61)..(62): /note="This region represents a CpG dinucleotide"
  misc_feature (61)..(61): /note="Nucleotide may be methylated to form 5-methylcytosine"
gagaaaaaaatgcatggacagtgttggcaacagtgcaagtttcagaacaaactttggtcacgtaaatctttgggaagtaagtccagtacctcattccatcattctgtggtcaggaaactact

SEQ ID NO: 6211 - DNA, 122 bp, Homo sapiens
  misc_feature (61)..(62): /note="This region represents a CpG dinucleotide"
  misc_feature (61)..(61): /note="Nucleotide may be methylated to form 5-methylcytosine"
ttttttttttgagacaggatctggctctgtggtccaggttggagtgcagtgctgcaatcacggcttactgcagcctcgccctcccaggctcaagcagtcctcctgccttggcctcctgagta

SEQ ID NO: 6212 - DNA, 122 bp, Homo sapiens
  misc_feature (61)..(62): /note="This region represents a CpG dinucleotide"
  misc_feature (61)..(61): /note="Nucleotide may be methylated to form 5-methylcytosine"
tagatgttgattcaactactgattctcaagggcgatgggaggggaggccccccatacacacgttataaggtctggagacattttgggttgccataactggtggtgggggttgggggagcact

SEQ ID NO: 6213 - DNA, 122 bp, Homo sapiens
  misc_feature (61)..(62): /note="This region represents a CpG dinucleotide"
  misc_feature (61)..(61): /note="Nucleotide may be methylated to form 5-methylcytosine"
actaacgtcgctgctgcgttttgcaatcgcgccccgcgcatgcttcttggccccgtgtcccgctcctttaccctgcgggttcgagctccttgggctgagctttttggtttccttgggcttcc

SEQ ID NO: 6214 - DNA, 122 bp, Homo sapiens
  misc_feature (61)..(62): /note="This region represents a CpG dinucleotide"
  misc_feature (61)..(61): /note="Nucleotide may be methylated to form 5-methylcytosine"
ccaggccctgaatccagatcatgtccattgtacagataggccactcggtgccttgctgggcgctgcgggctgtgggctgttgtgtgtgcaatggggaggccaagaccagcccagcccaccag

SEQ ID NO: 6215 - DNA, 122 bp, Homo sapiens
  misc_feature (61)..(62): /note="This region represents a CpG dinucleotide"
  misc_feature (61)..(61): /note="Nucleotide may be methylated to form 5-methylcytosine"
ccctctgagattgctgaaatctaaaggaataaaaatttcgtttcctctataaactattctcggggcctcttgtccacttcccagatgcagttacaagggaatcacttttctggatagccaat

SEQ ID NO: 6216 - DNA, 122 bp, Homo sapiens
  misc_feature (61)..(62): /note="This region represents a CpG dinucleotide"
  misc_feature (61)..(61): /note="Nucleotide may be methylated to form 5-methylcytosine"
gatgactatttttctctctggaaactcataggatcttctcattatccttggtgttctaaacgttttaatgcaatctaagtgtggacctttgaaaattcattttcttgtttatgtggtggctc

SEQ ID NO: 6217 - DNA, 122 bp, Homo sapiens
  misc_feature (61)..(62): /note="This region represents a CpG dinucleotide"
  misc_feature (61)..(61): /note="Nucleotide may be methylated to form 5-methylcytosine"
tttacaaccctccctttcacccttggtttactagttaatgttgaataagctacttgtagacgaaggaagacaaaattattgattgctcagctttagttttgtagagagatatatattataaa

SEQ ID NO: 6218 - DNA, 122 bp, Homo sapiens
  misc_feature (61)..(62): /note="This region represents a CpG dinucleotide"
  misc_feature (61)..(61): /note="Nucleotide may be methylated to form 5-methylcytosine"
aacttcaaggcaatcacgtcggagtcaccacttgatcatgtccgagtcaccacttgatcacgtccgagtcaccacttgcagcttgttctgcagtgaatgccgagaaataaatattcagacaa

SEQ ID NO: 6219 - DNA, 122 bp, Homo sapiens
  misc_feature (61)..(62): /note="This region represents a CpG dinucleotide"
  misc_feature (61)..(61): /note="Nucleotide may be methylated to form 5-methylcytosine"
tgtcagctgaaaatgagatcagcgtaacaacatctctttttgagtaaacattacgtgccccgtgctttacaggcatcatctgatttaacaattataacttccagaggcaggtgccattatta

SEQ ID NO: 6220 - DNA, 122 bp, Homo sapiens
  misc_feature (61)..(62): /note="This region represents a CpG dinucleotide"
  misc_feature (61)..(61): /note="Nucleotide may be methylated to form 5-methylcytosine"
acagaggtgtgggggacagaaagacatgaagagagagtgtcagtgccaccgaagaggagacgagaatgcaaagacaaggtgcccactggtgtggaaagggcattaggtgtctgcgagagggc

SEQ ID NO: 6221 - DNA, 122 bp, Homo sapiens
  misc_feature (61)..(62): /note="This region represents a CpG dinucleotide"
  misc_feature (61)..(61): /note="Nucleotide may be methylated to form 5-methylcytosine"
cctaggcacatagcaaccctgcaggctgtcagacacctgccgcagagagtgctttccacacgctctctgggacatgaggcacagttcccaggagtgcctgagaaatctcagttgcctggcat

SEQ ID NO: 6222 - DNA, 122 bp, Homo sapiens
  misc_feature (61)..(62): /note="This region represents a CpG dinucleotide"
  misc_feature (61)..(61): /note="Nucleotide may be methylated to form 5-methylcytosine"
agggctgtaggacgcccccacacacaggcgagcagagggcgttgcaaacatgggcagaggcggcccagcagcagtttaacattgccctgtgtccaggagaaaggccactgcccaagtatgct

SEQ ID NO: 6223 - DNA, 122 bp, Homo sapiens
  misc_feature (61)..(62): /note="This region represents a CpG dinucleotide"
  misc_feature (61)..(61): /note="Nucleotide may be methylated to form 5-methylcytosine"
tgtctcatttaaccctgattcataccttttaggacaggtcatgatattcccatttaactgcgctttaaagaagttgaatgtccactgggtcacacttggagggtttaagatctggatttggg

SEQ ID NO: 6224 - DNA, 122 bp, Homo sapiens
  misc_feature (61)..(62): /note="This region represents a CpG dinucleotide"
  misc_feature (61)..(61): /note="Nucleotide may be methylated to form 5-methylcytosine"
tgaaatcagtgtattgtgtgcatcaatgtggtgcagtaacttagtaaggactcacagcgccgctgttcaccaaccagggaaaaatggtgcgagagatcccacagaaaccaccgagttttaca

SEQ ID NO: 6225 - DNA, 122 bp, Homo sapiens
  misc_feature (61)..(62): /note="This region represents a CpG dinucleotide"
  misc_feature (61)..(61): /note="Nucleotide may be methylated to form 5-methylcytosine"
tccttcacccccatcttcttctgtcctcataccaaccctgtatggagaggccacttttgtcgatatttacaaatgagaaaactaaagctggtagggggtctgctcaaggtctcacacctgga

SEQ ID NO: 6226 - DNA, 122 bp, Homo sapiens
  misc_feature (61)..(62): /note="This region represents a CpG dinucleotide"
  misc_feature (61)..(61): /note="Nucleotide may be methylated to form 5-methylcytosine"
gctgtggctgtggacttcagcacaaccatcaacattgctgttcaaagaaattacagtttacgtccattccaagttgtaaatgctagtctttttttttttttttccaataaaaagaccattaa

SEQ ID NO: 6227 - DNA, 122 bp, Homo sapiens
  misc_feature (61)..(62): /note="This region represents a CpG dinucleotide"
  misc_feature (61)..(61): /note="Nucleotide may be methylated to form 5-methylcytosine"
tagttgtttactaaaaacattttcaagatttcctaatatgtaccttttacactcactgtacgggaatggaagaacaacaaacacaaactgtttatttttcatggatttttttttttttgagt

SEQ ID NO: 6228 - DNA, 122 bp, Homo sapiens
  misc_feature (61)..(62): /note="This region represents a CpG dinucleotide"
  misc_feature (61)..(61): /note="Nucleotide may be methylated to form 5-methylcytosine"
gttctaacaagctctgtggggatgttgatactgctggtcctcagatgacagtttgaagggcgaggccctatactataaggaagcagggtgcactgtgactgcttactcactttttgcatttt

SEQ ID NO: 6229 - DNA, 122 bp, Homo sapiens
  misc_feature (61)..(62): /note="This region represents a CpG dinucleotide"
  misc_feature (61)..(61): /note="Nucleotide may be methylated to form 5-methylcytosine"
tgtgggatgcaaggacctgagaatttcggactgtgatttctcagctagtgtgctatttcccgccaatttgtccactaattagggagaaacgaaaatactgtcagacgtgtggcacctccagc

SEQ ID NO: 6230 - DNA, 122 bp, Homo sapiens
  misc_feature (61)..(62): /note="This region represents a CpG dinucleotide"
  misc_feature (61)..(61): /note="Nucleotide may be methylated to form 5-methylcytosine"
tctgtgaagaggatcactgggtctgagtgcaaagctggggcctgttcagtggagtggacccgctactggccaacctcttcctcgctttattacaggggtgtgtaagtaaaaccctcaggccc

SEQ ID NO: 6231 - DNA, 122 bp, Homo sapiens
  misc_feature (61)..(62): /note="This region represents a CpG dinucleotide"
  misc_feature (61)..(61): /note="Nucleotide may be methylated to form 5-methylcytosine"
caataaagccaataaggaatgctgaaatcaacttacatacagaaataaaactggtctatccgcagggtaaagatagactgcattccattggacataatcatttgtactcccatgggcaagaa

SEQ ID NO: 6232 - DNA, 122 bp, Homo sapiens
  misc_feature (61)..(62): /note="This region represents a CpG dinucleotide"
  misc_feature (61)..(61): /note="Nucleotide may be methylated to form 5-methylcytosine"
aggggaggttatcgcagataatctgagtgggcctgactcaattaggcaaagttctttaaacgctggcttgaagcttccctgagaaaagaagacattctgtctgtggatggtggattcagttc

SEQ ID NO: 6233 - DNA, 122 bp, Homo sapiens
  misc_feature (61)..(62): /note="This region represents a CpG dinucleotide"
  misc_feature (61)..(61): /note="Nucleotide may be methylated to form 5-methylcytosine"
gcatctcctgaactccttcacatgtaaagtacttagcatagtcacttggcaggatgtgagcgctcagagaaggttaggtattattatgatacaaagttattcatttaacattgagtctctcc

SEQ ID NO: 6234 - DNA, 122 bp, Homo sapiens
  misc_feature (61)..(62): /note="This region represents a CpG dinucleotide"
  misc_feature (61)..(61): /note="Nucleotide may be methylated to form 5-methylcytosine"
caagaacaagtctgtcttcccatctagggcagggttgctctgtgcgaggctgatggtgcacgctgctgggatattggcacttctcaggcattttattagctcctgtttacagagacactgcc

SEQ ID NO: 6235 - DNA, 122 bp, Homo sapiens
  misc_feature (61)..(62): /note="This region represents a CpG dinucleotide"
  misc_feature (61)..(61): /note="Nucleotide may be methylated to form 5-methylcytosine"
ctaattacgcacacctcagctccccgggggggccaggaggaaatgcccggcagagccctccgtcctaccccgtgcagcctgggtctccctccacgggcccagcctcttccactgctgctttc

SEQ ID NO: 6236 - DNA, 122 bp, Homo sapiens
  misc_feature (61)..(62): /note="This region represents a CpG dinucleotide"
  misc_feature (61)..(61): /note="Nucleotide may be methylated to form 5-methylcytosine"
cagttccttagagagagataatgtaagcatcgggtaagtaggggctggagccaaggggagcgaggaacaaaggagaaaacctctaggtcaagagagtagactgggttactgttctggggtat

SEQ ID NO: 6237 - DNA, 122 bp, Homo sapiens
  misc_feature (61)..(62): /note="This region represents a CpG dinucleotide"
  misc_feature (61)..(61): /note="Nucleotide may be methylated to form 5-methylcytosine"
cccccaggactacattttttctgggtgcacatctgcttgtgtgtgtggcagtggttggggcgggaggtggggtgactacatgaaaggttgaggcaggtcagaggtcagtttccaaaccactc

SEQ ID NO: 6238 - DNA, 122 bp, Homo sapiens
  misc_feature (61)..(62): /note="This region represents a CpG dinucleotide"
  misc_feature (61)..(61): /note="Nucleotide may be methylated to form 5-methylcytosine"
tctcaatccggtggactggaacttcgcacagccagaagccaagagcaggccagaaggcaacgggcagctgctgcggaagaagaggccatagctgctccagccggggctccggggcggcagca

SEQ ID NO: 6239 - DNA, 122 bp, Homo sapiens
  misc_feature (61)..(62): /note="This region represents a CpG dinucleotide"
  misc_feature (61)..(61): /note="Nucleotide may be methylated to form 5-methylcytosine"
ggttcatacacttaccaatataaagaactcctaccataaactgtaataataaacacacaacgccactaagaaataaaaaaaggatctgaacagacacttctctaaagaagatagacaaatgg

SEQ ID NO: 6240 - DNA, 122 bp, Homo sapiens
  misc_feature (61)..(62): /note="This region represents a CpG dinucleotide"
  misc_feature (61)..(61): /note="Nucleotide may be methylated to form 5-methylcytosine"
gccggtcacaggggagggtggccagaggcaagtgatgctgatcagcatgggcttggaagccgcctaagaaccaaccacagcgacttttccagtgggatgaggaggacggggaggagaaaaaa

SEQ ID NO: 6241 - DNA, 122 bp, Homo sapiens
  misc_feature (61)..(62): /note="This region represents a CpG dinucleotide"
  misc_feature (61)..(61): /note="Nucleotide may be methylated to form 5-methylcytosine"
actggatttgcaaatgatgtgcttcattaactgttaaaaagaaaatgatttaaaaaaatacgtatcaaagaaggttgttatgaggattatatgagaatagcttagctcagtgactaatacac

SEQ ID NO: 6242 - DNA, 122 bp, Homo sapiens
  misc_feature (61)..(62): /note="This region represents a CpG dinucleotide"
  misc_feature (61)..(61): /note="Nucleotide may be methylated to form 5-methylcytosine"
cgctaaaatctgttagaatacgtcagcttccaggtttgtctgaggatgcagtggaaaccacgttctgtggccagcatgtcagtagcttttgatgatcagagccttccattttgatactttaa

SEQ ID NO: 6243 - DNA, 122 bp, Homo sapiens
  misc_feature (61)..(62): /note="This region represents a CpG dinucleotide"
  misc_feature (61)..(61): /note="Nucleotide may be methylated to form 5-methylcytosine"
ctttagttagacaaggaaagtgcataacccaagaaaaattcttttgaattattttaatttcgggagttacgatctgggctttgtaagtcaaaagtaatttatcaatataaacattgtacatg

SEQ ID NO: 6244 - DNA, 122 bp, Homo sapiens
  misc_feature (61)..(62): /note="This region represents a CpG dinucleotide"
  misc_feature (61)..(61): /note="Nucleotide may be methylated to form 5-methylcytosine"
ccgaggctgggctttggtctgtcttgttctctctgggaggggtctggtgcgggtggaatacgtggagggagcctccgtggggggagcaactgctcccggtgttgcaaggaggacagagccaa

SEQ ID NO: 6245 - DNA, 122 bp, Homo sapiens
  misc_feature (61)..(62): /note="This region represents a CpG dinucleotide"
  misc_feature (61)..(61): /note="Nucleotide may be methylated to form 5-methylcytosine"
agtgaggggaggggaggtcggggcacaagtaaatctcagcctgtggatgcaggctttccccgcattatagtttttttggtggttgtatttaaagtccccactggggttttacactttattgt

SEQ ID NO: 6246 - DNA, 122 bp, Homo sapiens
  misc_feature (61)..(62): /note="This region represents a CpG dinucleotide"
  misc_feature (61)..(61): /note="Nucleotide may be methylated to form 5-methylcytosine"
cttgatcgttatctattggtcttgactcacttggttcatgtaactttctggctcaagtctcgggtgtgcataatccttagtgtgagttaatgggcactagctagaccattccccagagatgt

SEQ ID NO: 6247 - DNA, 122 bp, Homo sapiens
  misc_feature (61)..(62): /note="This region represents a CpG dinucleotide"
  misc_feature (61)..(61): /note="Nucleotide may be methylated to form 5-methylcytosine"
catgcatacgacatacttcctgcagtataatgatggttatcagtgtgctacacgttataacgaaagtcaattgtttcttacctggaaatatctcctgtgattcagtttcaccaatccaggct

SEQ ID NO: 6248 - DNA, 122 bp, Homo sapiens
  misc_feature (61)..(62): /note="This region represents a CpG dinucleotide"
  misc_feature (61)..(61): /note="Nucleotide may be methylated to form 5-methylcytosine"
cttgaagccacacaagagcccaaggtttggagcagattgagcgtatttctctgagtaacacgaagaacaagtttcactgcctggactgagagttgcaaacttgcattcggaatttttttttt

SEQ ID NO: 6249 - DNA, 122 bp, Homo sapiens
  misc_feature (61)..(62): /note="This region represents a CpG dinucleotide"
  misc_feature (61)..(61): /note="Nucleotide may be methylated to form 5-methylcytosine"
gcgacaggcttggaagttggagcccgggccctgggttctctcagcttccagctcaggaggcggagtgggaggagcgggcctggcggccgtgggggcggggctgctccactaacggttactgg

SEQ ID NO: 6250 - DNA, 122 bp, Homo sapiens
  misc_feature (61)..(62): /note="This region represents a CpG dinucleotide"
  misc_feature (61)..(61): /note="Nucleotide may be methylated to form 5-methylcytosine"
ttgtttacttaagagaacctgttgctaaaatagtaatgaggaagagtgtaatataagtctcgtcatacaccccttgctctgcaagtaaccagagtgctatgtctgcatgctgttcagtctcc

SEQ ID NO: 6251 - DNA, 122 bp, Homo sapiens
  misc_feature (61)..(62): /note="This region represents a CpG dinucleotide"
  misc_feature (61)..(61): /note="Nucleotide may be methylated to form 5-methylcytosine"
acttctctttccttctgaagaggaaatgacttcctatagttagctgaccaggagttagcacgcatcccgcctggagctaggacctggagcaaatacccggagcccacccaaatgagaccaaa

SEQ ID NO: 6252 - DNA, 122 bp, Homo sapiens
  misc_feature (61)..(62): /note="This region represents a CpG dinucleotide"
  misc_feature (61)..(61): /note="Nucleotide may be methylated to form 5-methylcytosine"
gccccacttccagcactggggattacaattcaacatgagatttggatggggacaaatatccgaactataacaagagggaatgaggaaaggcccgcccaacaaagcaggaaaccccaggaacc

SEQ ID NO: 6253 - DNA, 122 bp, Homo sapiens
  misc_feature (61)..(62): /note="This region represents a CpG dinucleotide"
  misc_feature (61)..(61): /note="Nucleotide may be methylated to form 5-methylcytosine"
gaagtatatacgtaattcatgacaaattcactttcatgaccatgaaatctgccttaatcccgttgacttaggagctaaaataacggtgagagccaagcttgtgatttgggggggaatatcaa

SEQ ID NO: 6254 - DNA, 122 bp, Homo sapiens
  misc_feature (61)..(62): /note="This region represents a CpG dinucleotide"
  misc_feature (61)..(61): /note="Nucleotide may be methylated to form 5-methylcytosine"
ggagtctagatttggttcatagtcatgaaaaatattttattcatgtgatagctttttggacgattgtattctgcactgtattacaatggcacaataaattgctgaatatactgtctgctgaa

SEQ ID NO: 6255 - DNA, 122 bp, Homo sapiens
  misc_feature (61)..(62): /note="This region represents a CpG dinucleotide"
  misc_feature (61)..(61): /note="Nucleotide may be methylated to form 5-methylcytosine"
gactttcttcctctaacagggccttgaccttggtctggattagtgggaaattaacacactcgtcttgaaattttaaatacttgagcctgaatctaccaaatcaggacattcagatttttaaa

SEQ ID NO: 6256 - DNA, 122 bp, Homo sapiens
  misc_feature (61)..(62): /note="This region represents a CpG dinucleotide"
  misc_feature (61)..(61): /note="Nucleotide may be methylated to form 5-methylcytosine"
gccgctcgcacaactggccgcctaacagccagacccacccacgccgatgcccgccggagacgccccgccgcagacacagcgcaaccagcttcacacacctggggacgccccacagaagtcac

SEQ ID NO: 6257 - DNA, 122 bp, Homo sapiens
  misc_feature (61)..(62): /note="This region represents a CpG dinucleotide"
  misc_feature (61)..(61): /note="Nucleotide may be methylated to form 5-methylcytosine"
ccccccattgcctccaggaacatgctaagctctgcctggctcaaagccaagtttggatggcgtccacgaggccactgagcaagcggctttgaaagatcatgctgtcgcactggcagtcagga

SEQ ID NO: 6258 - DNA, 122 bp, Homo sapiens
  misc_feature (61)..(62): /note="This region represents a CpG dinucleotide"
  misc_feature (61)..(61): /note="Nucleotide may be methylated to form 5-methylcytosine"
gactggagctaagaacaggggagcaatagacagatgaagtgttcccggattgctgccccacgctctttgtaataaaggaaaacttggccaaaggtcaatgcttagggtagtagaagatatgt

SEQ ID NO: 6259 - DNA, 122 bp, Homo sapiens
  misc_feature (61)..(62): /note="This region represents a CpG dinucleotide"
  misc_feature (61)..(61): /note="Nucleotide may be methylated to form 5-methylcytosine"
cgttattccagcgggaggtggtggggactggggagggcccaggggtcagcctgagaatctcgcccttggattaaaagccaccaatgctctgggtcaagtctcaatgggaggctggggatgta

SEQ ID NO: 6260 - DNA, 122 bp, Homo sapiens
  misc_feature (61)..(62): /note="This region represents a CpG dinucleotide"
  misc_feature (61)..(61): /note="Nucleotide may be methylated to form 5-methylcytosine"
ctgaagcagagacatccaaggagggccctagacgtggatgtttcctattgtactttcttccgcgttgtcttctcagtagttcttttcctggcatcacaacttctgtttttatagtatatctg

SEQ ID NO: 6261 - DNA, 122 bp, Homo sapiens
  misc_feature (61)..(62): /note="This region represents a CpG dinucleotide"
  misc_feature (61)..(61): /note="Nucleotide may be methylated to form 5-methylcytosine"
ttctgtggttttaggatatcgtgtggggacacttctgaggctgaactgtagacgcagctgcgggcgcctcttaagggccaaaagactcttttgtgcttctgcatggattgagattttggcaa

SEQ ID NO: 6262 - DNA, 122 bp, Homo sapiens
  misc_feature (61)..(62): /note="This region represents a CpG dinucleotide"
  misc_feature (61)..(61): /note="Nucleotide may be methylated to form 5-methylcytosine"
cctccgaggaccccttagaccgcagaggctgctgttgttgctttagttgtgccacaaccacgtggtcctggaaactgcctcgctcactttgtctgcctttgtatctgctggcgtggatcttg

SEQ ID NO: 6263 - DNA, 122 bp, Homo sapiens
  misc_feature (61)..(62): /note="This region represents a CpG dinucleotide"
  misc_feature (61)..(61): /note="Nucleotide may be methylated to form 5-methylcytosine"
cacttccccactaactgcaaagtccacaaaggcaaggaccatgtctaccatgtcatattccgtgaagcaactcccactcaagcaatttcctctctgcagcaaattcaggagagcattttcct

SEQ ID NO: 6264 - DNA, 122 bp, Homo sapiens
  misc_feature (61)..(62): /note="This region represents a CpG dinucleotide"
  misc_feature (61)..(61): /note="Nucleotide may be methylated to form 5-methylcytosine"
caaaggctcgcgtcacagcttctctgtgtcttggcagaagacctcgggatcctcccagaacgcagaggcagggagacctctatgaagctgctatgaggccatcccccactcacctccctatg

SEQ ID NO: 6265 - DNA, 122 bp, Homo sapiens
  misc_feature (61)..(62): /note="This region represents a CpG dinucleotide"
  misc_feature (61)..(61): /note="Nucleotide may be methylated to form 5-methylcytosine"
tcccagggaagatgccatcagagatgcagacactgagtgtgcggatgtggtcagccaccacgcggtacgctgtgtctgtgcgcccctcgtctgccacccctactcggcccaagtaagggggt

SEQ ID NO: 6266 - DNA, 122 bp, Homo sapiens
  misc_feature (61)..(62): /note="This region represents a CpG dinucleotide"
  misc_feature (61)..(61): /note="Nucleotide may be methylated to form 5-methylcytosine"
ttaatcctggcaataacctctgaatcatgcatcattatccacacttcacatatgaggaaacgaaagctcaaggagattgtgtgacttgcttagtctcatccagtttgtaagtggtggaggcc

SEQ ID NO: 6267 - DNA, 122 bp, Homo sapiens
  misc_feature (61)..(62): /note="This region represents a CpG dinucleotide"
  misc_feature (61)..(61): /note="Nucleotide may be methylated to form 5-methylcytosine"
ttgcttggctgtgaggacagactgtgcctgcagccctgccgctggggagaggttctctgccgagtcaaaccagagcccagaccccaggaaagggaccaagggctgcctgctccacctctgtt

SEQ ID NO: 6268 - DNA, 122 bp, Homo sapiens
  misc_feature (61)..(62): /note="This region represents a CpG dinucleotide"
  misc_feature (61)..(61): /note="Nucleotide may be methylated to form 5-methylcytosine"
tctcctctgcgggcttcagataaagttgagtcatggttcgcccatttcctgtcttctccccgccgtttcttactgtcccatcttgttgattgtttaatactaggagggtgtgatggttaata

SEQ ID NO: 6269 - DNA, 122 bp, Homo sapiens
  misc_feature (61)..(62): /note="This region represents a CpG dinucleotide"
  misc_feature (61)..(61): /note="Nucleotide may be methylated to form 5-methylcytosine"
aaacataccacggccttcccagcacatgacagggagtcccaaaatcgggggcctctctcacgtcacacagatgacatgagttgctctctgctatgggagtggacaattcccatgtccaaact

SEQ ID NO: 6270 - DNA, 122 bp, Homo sapiens
  misc_feature (61)..(62): /note="This region represents a CpG dinucleotide"
  misc_feature (61)..(61): /note="Nucleotide may be methylated to form 5-methylcytosine"
tcacatttgagaatttttactgctgtggttttcattagatagcatcttgctgcctggatgcgtaaagaattctttccataatcttaaaagtttatcagcttaactagaacatctctcagatt

SEQ ID NO: 6271 - DNA, 122 bp, Homo sapiens
  misc_feature (61)..(62): /note="This region represents a CpG dinucleotide"
  misc_feature (61)..(61): /note="Nucleotide may be methylated to form 5-methylcytosine"
ggcctagcacagcctgatctctaacatcataagtcagaaatgacgtcacggttacagccacgatactgatgacagccattcacaacacgctgggccagtgcgaaatcctgtcttgctgactg

SEQ ID NO: 6272 - DNA, 122 bp, Homo sapiens
  misc_feature (61)..(62): /note="This region represents a CpG dinucleotide"
  misc_feature (61)..(61): /note="Nucleotide may be methylated to form 5-methylcytosine"
ttgaaagaagatgccagtgagaatctggtttgcatttttctaaggaattggcctctaatgcggcataagtagcatgagtaagtggaagtgacataagaataagaagacatgtctccatgtcc

SEQ ID NO: 6273 - DNA, 122 bp, Homo sapiens
  misc_feature (61)..(62): /note="This region represents a CpG dinucleotide"
  misc_feature (61)..(61): /note="Nucleotide may be methylated to form 5-methylcytosine"
caagcacaaagcgccacttctcttttctgtataactgtgggtttgttttaggtaagcccccgtcttccctgtgcaagtttctgtggagcccaccatgtatatgcctcaaaaggggaggaaac

SEQ ID NO: 6274 - DNA, 122 bp, Homo sapiens
  misc_feature (61)..(62): /note="This region represents a CpG dinucleotide"
  misc_feature (61)..(61): /note="Nucleotide may be methylated to form 5-methylcytosine"
gccgttgtctcattttctcttctcatatctgccagatgtgttcttgaagcaatagctgcacgttaatcagctacttccacagccctggtgcgggcattgccttctttctgcttatttcttat

SEQ ID NO: 6275 - DNA, 122 bp, Homo sapiens
  misc_feature (61)..(62): /note="This region represents a CpG dinucleotide"
  misc_feature (61)..(61): /note="Nucleotide may be methylated to form 5-methylcytosine"
gctggcctctctttcaccccgagacctctgcacctgcattctgtctggaaaacccccaaccgtcggcacgcatccctggtcaccaccttctaagtcttcagatcttagctgagacgcctcat

SEQ ID NO: 6276 - DNA, 122 bp, Homo sapiens
  misc_feature (61)..(62): /note="This region represents a CpG dinucleotide"
  misc_feature (61)..(61): /note="Nucleotide may be methylated to form 5-methylcytosine"
tgaactcctgctttccccacccatggccgctgagcctgcaaaactgcagaactccctgcccgactggtgcctggaatctccagccctgaggacccctgcagtccccctggtccccgcactct

SEQ ID NO: 6277 - DNA, 122 bp, Homo sapiens
  misc_feature (61)..(62): /note="This region represents a CpG dinucleotide"
  misc_feature (61)..(61): /note="Nucleotide may be methylated to form 5-methylcytosine"
ggagcctccaggcaacactaagcagcacagagagaacagaacagacatggggcctgccaccgtggataacatactgtgtgccatatgaaaagtcattacagaggaagcactgaaaacctgga

SEQ ID NO: 6278 - DNA, 122 bp, Homo sapiens
  misc_feature (61)..(62): /note="This region represents a CpG dinucleotide"
  misc_feature (61)..(61): /note="Nucleotide may be methylated to form 5-methylcytosine"
aagtcggctcaaggaggtcctgaagacaggactcctgagggtttggccctaggtcaccggcggacccctctcctacgctgccgctactggatcccggatccagccgcggccgaggttacagc

SEQ ID NO: 6279 - DNA, 122 bp, Homo sapiens
  misc_feature (61)..(62): /note="This region represents a CpG dinucleotide"
  misc_feature (61)..(61): /note="Nucleotide may be methylated to form 5-methylcytosine"
taactcaggcttgaaagcacttagcacatggcaggcatctccacagagacagtggctgagcgattggagtgagtaagagagaatgtagtttcaagagtaaaggagaacaaagtagggtgacc

SEQ ID NO: 6280 - DNA, 122 bp, Homo sapiens
  misc_feature (61)..(62): /note="This region represents a CpG dinucleotide"
  misc_feature (61)..(61): /note="Nucleotide may be methylated to form 5-methylcytosine"
tcatctgtccaatgggaatagtcatcctcccatcacaggtcatgaatgagacaacactggcgtagcacttcatacaggctgcgctttgtggtaaatgctcaacaagtgggcgttgttctcat

SEQ ID NO: 6281 - DNA, 122 bp, Homo sapiens
  misc_feature (61)..(62): /note="This region represents a CpG dinucleotide"
  misc_feature (61)..(61): /note="Nucleotide may be methylated to form 5-methylcytosine"
aatacagctttagtttctgtccactttgaggtctgatcatatgtcatgttttatttactacggtccttcatgaaacttcgaaaccacatagccacaagagaggaaatgaacccttcaagacc

SEQ ID NO: 6282 - DNA, 122 bp, Homo sapiens
  misc_feature (61)..(62): /note="This region represents a CpG dinucleotide"
  misc_feature (61)..(61): /note="Nucleotide may be methylated to form 5-methylcytosine"
acctcatgatccgccagccttggcttcccaaagtgctgggattacaggcgtgagccaccacgcccggccaagaagtttttttttaatgctgtttttgtttattgtcaaattcacaagtaatg

SEQ ID NO: 6283 - DNA, 122 bp, Homo sapiens
  misc_feature (61)..(62): /note="This region represents a CpG dinucleotide"
  misc_feature (61)..(61): /note="Nucleotide may be methylated to form 5-methylcytosine"
tttattatttattctgtgctggaatccattaagtgcaaaggagaacatcataagcatatccgaatttcagaaggacacttgccacatgtattttgtcatctttgcttcagtcttctttactg

SEQ ID NO: 6284 - DNA, 122 bp, Homo sapiens
  misc_feature (61)..(62): /note="This region represents a CpG dinucleotide"
  misc_feature (61)..(61): /note="Nucleotide may be methylated to form 5-methylcytosine"
ctgccaaccttcttgtgatgatctgagggaatacaatttaaaccatgattcataattgtgcgaggtacatgagtcaccaagaaaggcagggtaagtaattacaaagtagttatctctctttc

SEQ ID NO: 6285 - DNA, 122 bp, Homo sapiens
  misc_feature (61)..(62): /note="This region represents a CpG dinucleotide"
  misc_feature (61)..(61): /note="Nucleotide may be methylated to form 5-methylcytosine"
tttctgtgtcgcagaagcatggtcagcattgatgctatttagcattttatcagctgagcacgagaggagacaggagctctttgagcgccgggcgaaggccctgtggctgatgctgacccccg

SEQ ID NO: 6286 - DNA, 122 bp, Homo sapiens
  misc_feature (61)..(62): /note="This region represents a CpG dinucleotide"
  misc_feature (61)..(61): /note="Nucleotide may be methylated to form 5-methylcytosine"
ctttcatgtgtctggggcccacctcttgtgttcagtaaacatacacgtgtctcagactcacgctgcatagtcaaggaacgaaggatcaagtcaaataatgcaaatttatgagttcaaaaata

SEQ ID NO: 6287 - DNA, 122 bp, Homo sapiens
  misc_feature (61)..(62): /note="This region represents a CpG dinucleotide"
  misc_feature (61)..(61): /note="Nucleotide may be methylated to form 5-methylcytosine"
gaattttaacattggttccatgttaatctgtaaacctcattcagattttgcaagttgtcccgataatatccttaatagcagcttgtttttattaagtattcactccaaaatcatgtgttgtg

SEQ ID NO: 6288 - DNA, 122 bp, Homo sapiens
  misc_feature (61)..(62): /note="This region represents a CpG dinucleotide"
  misc_feature (61)..(61): /note="Nucleotide may be methylated to form 5-methylcytosine"
ggggaaaaagctcacctttctaggctgtgaatgggccctggcaagtctgtggccaggactcgtcttctcttccacatggggcccctagcttggcacctagcacgtggcaggcagcgacagat

SEQ ID NO: 6289 - DNA, 122 bp, Homo sapiens
  misc_feature (61)..(62): /note="This region represents a CpG dinucleotide"
  misc_feature (61)..(61): /note="Nucleotide may be methylated to form 5-methylcytosine"
attttcactgttttattacttttctgggaattcaaatcagtgtaaccacgcttgatgcgccggtgaaaaatgctatctccctcccccttctccttcaacctaatgaattgccttttttcata

SEQ ID NO: 6290 - DNA, 122 bp, Homo sapiens
  misc_feature (61)..(62): /note="This region represents a CpG dinucleotide"
  misc_feature (61)..(61): /note="Nucleotide may be methylated to form 5-methylcytosine"
tctgtgaaggaggagatggctgacccaggaagagaaacccgcactaaccacacattcacccgataaatgttattgggcattctctatgctccagacactccctttaggcagtgcttgtatgg

SEQ ID NO: 6291 - DNA, 122 bp, Homo sapiens
  misc_feature (61)..(62): /note="This region represents a CpG dinucleotide"
  misc_feature (61)..(61): /note="Nucleotide may be methylated to form 5-methylcytosine"
aactgtggcttcccctattttaataatgcattgtaacaattgttaacagtgattaagtttcgcaaaagcacgtgctgaatcagttaagaaaaacttaggatgcaagctgaacaagagactcc

SEQ ID NO: 6292 - DNA, 122 bp, Homo sapiens
  misc_feature (61)..(62): /note="This region represents a CpG dinucleotide"
  misc_feature (61)..(61): /note="Nucleotide may be methylated to form 5-methylcytosine"
atcaacactttccttggcgtgtccacactgctggctctctggaccctgggcatcatttcccgtcaagccaggctacacctgggtgagcagaacatgggagccaaatttgctctgttccaggt

SEQ ID NO: 6293 - DNA, 122 bp, Homo sapiens
  misc_feature (61)..(62): /note="This region represents a CpG dinucleotide"
  misc_feature (61)..(61): /note="Nucleotide may be methylated to form 5-methylcytosine"
ctgggaagttatgaactagttgcctcacctctgaatgcactttcaatatatctctttaagcgtttctccttcaaagtgtgcacgatgttatgctttctcagtagagaacaatgtagagacat

SEQ ID NO: 6294 - DNA, 122 bp, Homo sapiens
  misc_feature (61)..(62): /note="This region represents a CpG dinucleotide"
  misc_feature (61)..(61): /note="Nucleotide may be methylated to form 5-methylcytosine"
aaaaccatgctcaataggattacacttaggccgaacctaggtgagaatgttggaagaggacgttgggatcctattatccctggcagagccactgtattttgggctggagacctggaggccct

SEQ ID NO: 6295 - DNA, 122 bp, Homo sapiens
  misc_feature (61)..(62): /note="This region represents a CpG dinucleotide"
  misc_feature (61)..(61): /note="Nucleotide may be methylated to form 5-methylcytosine"
gattgaaaagatatgaatgagtatcctaaaaaaagaaaaaggaagactctacacccttctcgttattcaggtcagtgtataattattttaaagttgggtatggattaattcccacaaaatta

SEQ ID NO: 6296 - DNA, 122 bp, Homo sapiens
  misc_feature (61)..(62): /note="This region represents a CpG dinucleotide"
  misc_feature (61)..(61): /note="Nucleotide may be methylated to form 5-methylcytosine"
cagcccccgatctgtgctctctctcaaagctcaccctgtctttcaatgattgcaatgaaacggtaacttttacttacacattttgaggaagtggtcaccacaaatctgccctttgagagaga

SEQ ID NO: 6297 - DNA, 122 bp, Homo sapiens
  misc_feature (61)..(62): /note="This region represents a CpG dinucleotide"
  misc_feature (61)..(61): /note="Nucleotide may be methylated to form 5-methylcytosine"
ctcgacctcctgacctcgtgatccacctgcctcggcctcccaaagtgctaggattacaggcgtgagccactatgcccagccataatttgcactaatttcatgtgttggagagccacatgtgg

SEQ ID NO: 6298 - DNA, 122 bp, Homo sapiens
  misc_feature (61)..(62): /note="This region represents a CpG dinucleotide"
  misc_feature (61)..(61): /note="Nucleotide may be methylated to form 5-methylcytosine"
agacggcaagaactctcaggtctttagaaacccctacgtgtgggactgagtcagcggtggcgaggagaggcgggcggatttggggagggccctgaggacctggccccgggcaagggactctc

SEQ ID NO: 6299 - DNA, 122 bp, Homo sapiens
  misc_feature (61)..(62): /note="This region represents a CpG dinucleotide"
  misc_feature (61)..(61): /note="Nucleotide may be methylated to form 5-methylcytosine"
atctggtttagatatttatgttattaatatctcacactattaattaatatgagaatatcacgctaatctatagctcaaatgagaggaagatctaggtcattctccaggagtaattctattaa

SEQ ID NO: 6300 - DNA, 122 bp, Homo sapiens
  misc_feature (61)..(62): /note="This region represents a CpG dinucleotide"
  misc_feature (61)..(61): /note="Nucleotide may be methylated to form 5-methylcytosine"
gagagaaacagggaagatggagaaagactggctcctctgacagctggaagcagctggtaacgctgaagaataaaggcagatcatcacaagacaggaaggagtcagaaacctggaaatcaatg

SEQ ID NO: 6301 - DNA, 122 bp, Homo sapiens
  misc_feature (61)..(62): /note="This region represents a CpG dinucleotide"
  misc_feature (61)..(61): /note="Nucleotide may be methylated to form 5-methylcytosine"
ccatcttggcctcccaaagtgctgggattacaggcttgagccaccacacccagcctcaggcgtggctctaagccctttacatatatgaacttgctagtttattccatgtgtcagccctgtga

SEQ ID NO: 6302 - DNA, 122 bp, Homo sapiens
  misc_feature (61)..(62): /note="This region represents a CpG dinucleotide"
  misc_feature (61)..(61): /note="Nucleotide may be methylated to form 5-methylcytosine"
tctctctgtgctgacatttccccatctgtaagctgggaataaggatgataacaatagtaacgctttaagagggttatgatgaggtttaaataagttgatttttctgaagcattgagcctggt

SEQ ID NO: 6303 - DNA, 122 bp, Homo sapiens
  misc_feature (61)..(62): /note="This region represents a CpG dinucleotide"
  misc_feature (61)..(61): /note="Nucleotide may be methylated to form 5-methylcytosine"
ggagcagagagctgaggactgccagatggagtccagcttaggggaccctgcccccaaccccgctcccgtatccctcccatttttaagcacccctacgcctgggacctctgttccacgagaag

SEQ ID NO: 6304 - DNA, 122 bp, Homo sapiens
  misc_feature (61)..(62): /note="This region represents a CpG dinucleotide"
  misc_feature (61)..(61): /note="Nucleotide may be methylated to form 5-methylcytosine"
tctgtcattaccttgttagtttatgtgtcttttttcttcctaatgaaaataaaaactcagcgagtataaggatatttgttcctaggaggatgtctagtataaagggggaactcaataaatat

SEQ ID NO: 6305 - DNA, 122 bp, Homo sapiens
  misc_feature (61)..(62): /note="This region represents a CpG dinucleotide"
  misc_feature (61)..(61): /note="Nucleotide may be methylated to form 5-methylcytosine"
ggtttctgtggcgtgggggtgagtgacagtccaggatgtggagtggactggattagtcgccgttttcagtcgagaggctgcctgagtcagaggctgtgtgagtacttgaataacagggaaac

SEQ ID NO: 6306 - DNA, 122 bp, Homo sapiens
  misc_feature (61)..(62): /note="This region represents a CpG dinucleotide"
  misc_feature (61)..(61): /note="Nucleotide may be methylated to form 5-methylcytosine"
tgaagaagtggacagaggtataaaaacaagaagaaggacaggtgcggaggatgataagagcggcaggcagctgatatggtaaaataggagtaaacagaaagacactgtcagaggccaagagt

SEQ ID NO: 6307 - DNA, 122 bp, Homo sapiens
  misc_feature (61)..(62): /note="This region represents a CpG dinucleotide"
  misc_feature (61)..(61): /note="Nucleotide may be methylated to form 5-methylcytosine"
aattttactgcctgcatggggtgaagataaagggctcatgcttcctttactaatgctagacgttcagaaacagtttgaggtatacgtttatatttttggccaaagtattgacaattctttgt

SEQ ID NO: 6308 - DNA, 122 bp, Homo sapiens
  misc_feature (61)..(62): /note="This region represents a CpG dinucleotide"
  misc_feature (61)..(61): /note="Nucleotide may be methylated to form 5-methylcytosine"
gcaggctcaaaccagacccaagaggccccgaggacagtttgtttggtggctctgggcccccgctcagtgacagtgtggacgtttgtctctcgtaaggagtgagaataaacagaggacagaaa

SEQ ID NO: 6309 - DNA, 122 bp, Homo sapiens
  misc_feature (61)..(62): /note="This region represents a CpG dinucleotide"
  misc_feature (61)..(61): /note="Nucleotide may be methylated to form 5-methylcytosine"
aagtgacttaacctcccagtttcctcagccatcaaatggggattgggggtggggggggcgcggggaaagcagcctctccagacaccttaccaggttcctgaacacagcgtcatcccccacgt

SEQ ID NO: 6310 - DNA, 122 bp, Homo sapiens
  misc_feature (61)..(62): /note="This region represents a CpG dinucleotide"
  misc_feature (61)..(61): /note="Nucleotide may be methylated to form 5-methylcytosine"
cctaactttttttcataattgactatttcagttaatagccctaggcttcaagaaaggctgcgcatcttggaagtattagggcatgagtcatgagtcttgattcttccaaataaaatatggta

SEQ ID NO: 6311 - DNA, 122 bp, Homo sapiens
  misc_feature (61)..(62): /note="This region represents a CpG dinucleotide"
  misc_feature (61)..(61): /note="Nucleotide may be methylated to form 5-methylcytosine"
ctgggagaacatcatcatgcaaggacaaactgggcagaagaaagaacgaggaaagttcaacgtgcagtgatccctactgtctagattggacatggaaagaaagctcagaactctagtggagg

SEQ ID NO: 6312 - DNA, 122 bp, Homo sapiens
  misc_feature (61)..(62): /note="This region represents a CpG dinucleotide"
  misc_feature (61)..(61): /note="Nucleotide may be methylated to form 5-methylcytosine"
tgcaatttgccagattgtacacagctgatactctaggattttcccacactatatgaaactcgttttgttgccttcattctaaacagccggtaaagtatttggctttctaatagttcacaatg

SEQ ID NO: 6313 - DNA, 122 bp, Homo sapiens
  misc_feature (61)..(62): /note="This region represents a CpG dinucleotide"
  misc_feature (61)..(61): /note="Nucleotide may be methylated to form 5-methylcytosine"
gggctgccagtgccagtgcccggtcccctgtcaccccccatagtcataggaacgcttctgcgccagtcactacatttataaggggaagctggtggagctgctcagcttccaacaggaagccc

SEQ ID NO: 6314 - DNA, 122 bp, Homo sapiens
  misc_feature (61)..(62): /note="This region represents a CpG dinucleotide"
  misc_feature (61)..(61): /note="Nucleotide may be methylated to form 5-methylcytosine"
taaaatatcaagagaattactcagtaattctctgcttcaagactgagctcttgggcctggcgtggtggctgatgcctgtaatgccagcactttgggagaccgaggcgggcggatcatgaggt

SEQ ID NO: 6315 - DNA, 122 bp, Homo sapiens
  misc_feature (61)..(62): /note="This region represents a CpG dinucleotide"
  misc_feature (61)..(61): /note="Nucleotide may be methylated to form 5-methylcytosine"
gcagccgaaagagccgcctccccgcagacagggccgtggccctccacccgaggcttcagccggaaggagagccttctgcagatagcggagaacccagagctgcagctgcagccagatggctt

SEQ ID NO: 6316 - DNA, 122 bp, Homo sapiens
  misc_feature (61)..(62): /note="This region represents a CpG dinucleotide"
  misc_feature (61)..(61): /note="Nucleotide may be methylated to form 5-methylcytosine"
ccaggagctttggcagagatgtttctgcttccagagatcgtgggatggagtttttcttaccgtgaagacatcgaccctgtgtacaccttgtgccttcacttgtactgtctccttctcctttt

SEQ ID NO: 6317 - DNA, 122 bp, Homo sapiens
  misc_feature (61)..(62): /note="This region represents a CpG dinucleotide"
  misc_feature (61)..(61): /note="Nucleotide may be methylated to form 5-methylcytosine"
tgaataatcatgttaaacacattgactaattcttgaacttaactatttgatgaaaagaggcgagcattgaatcaactgatgaggcatatgaataataagactattacatgagttatggggaa

SEQ ID NO: 6318 - DNA, 122 bp, Homo sapiens
  misc_feature (61)..(62): /note="This region represents a CpG dinucleotide"
  misc_feature (61)..(61): /note="Nucleotide may be methylated to form 5-methylcytosine"
tagtgtgctgatggcattgaccatctacactgggttgaatagggccacccccaaaattcacgtctaccaggaacctcagaatgtgaacttatttggaaatagtttctttgcaggtgtaatta

SEQ ID NO: 6319 - DNA, 122 bp, Homo sapiens
  misc_feature (61)..(62): /note="This region represents a CpG dinucleotide"
  misc_feature (61)..(61): /note="Nucleotide may be methylated to form 5-methylcytosine"
aaacttcctgtatttcccctgagagcaatggttcagaattcactaatacagtgtttgtggcgactttacagaacagagcctcctcgagtgacaggaacagctgccttagactcccaagatga

SEQ ID NO: 6320 - DNA, 122 bp, Homo sapiens
  misc_feature (61)..(62): /note="This region represents a CpG dinucleotide"
  misc_feature (61)..(61): /note="Nucleotide may be methylated to form 5-methylcytosine"
agccgacgaaagggaaaaggccagtgcctgtccgggaagagctcagcctagtggggcgggcgacaagttacagttgctgccttacgatggccgtggcccgtggaggcactagaccctcacca

SEQ ID NO: 6321 - DNA, 122 bp, Homo sapiens
  misc_feature (61)..(62): /note="This region represents a CpG dinucleotide"
  misc_feature (61)..(61): /note="Nucleotide may be methylated to form 5-methylcytosine"
gaaacaaaagatttttgtttgaaccttacatttttaagatatagaaatggcaccttgaagcgacgacagggcatgcaattgctgttcaaagtcaacaggaaactttaaaagcatatgttaga

SEQ ID NO: 6322 - DNA, 122 bp, Homo sapiens
  misc_feature (61)..(62): /note="This region represents a CpG dinucleotide"
  misc_feature (61)..(61): /note="Nucleotide may be methylated to form 5-methylcytosine"
ggagagtgctgattggttaggtcagagatgaagtcatagggagtggaagctgtccttttgcgctgagtcagttactgggtaggggccactagaccagatgagccagtctatcgatctgggtg

SEQ ID NO: 6323 - DNA, 122 bp, Homo sapiens
  misc_feature (61)..(62): /note="This region represents a CpG dinucleotide"
  misc_feature (61)..(61): /note="Nucleotide may be methylated to form 5-methylcytosine"
caagagaaagagggaacccgctggtgtctgagaagaaacccgctggtgtctgagaagaaacggtgaagggtgcactacgaagggaatataaactaatcaaacattcttgaatggcaatgaca

SEQ ID NO: 6324 - DNA, 122 bp, Homo sapiens
  misc_feature (61)..(62): /note="This region represents a CpG dinucleotide"
  misc_feature (61)..(61): /note="Nucleotide may be methylated to form 5-methylcytosine"
actcctcagttcccagtggattctgggaaaagggaggaagacagaaagtcctggatgctgcgtctcccctatttgtgacctttgaccttagagcagaggtatgttggtgggttaagtggagt

SEQ ID NO: 6325 - DNA, 122 bp, Homo sapiens
  misc_feature (61)..(62): /note="This region represents a CpG dinucleotide"
  misc_feature (61)..(61): /note="Nucleotide may be methylated to form 5-methylcytosine"
acctggccctggaggaaggttctgggtcagctgcaatgagagactggtgattaagggcaccgtgggcaggacacagtcctcgccttacccaccccatccttcctgttacccacagtctgctg

SEQ ID NO: 6326 - DNA, 122 bp, Homo sapiens
  misc_feature (61)..(62): /note="This region represents a CpG dinucleotide"
  misc_feature (61)..(61): /note="Nucleotide may be methylated to form 5-methylcytosine"
aggcgtgagccactgcgcccagccccagccaaggctttcttgtgatttctgctcagacagcgttggctaaaatggccacacctagctacaagggaagccgagaaatttcgagttgtgaaacc

SEQ ID NO: 6327 - DNA, 122 bp, Homo sapiens
  misc_feature (61)..(62): /note="This region represents a CpG dinucleotide"
  misc_feature (61)..(61): /note="Nucleotide may be methylated to form 5-methylcytosine"
gacaccagaggctttctctctggacgcctgcgcttcccgcccatcctccagctgaggtaccggtcctcacgctgctgtgttcaggaactgttttatcatagaaatatctgaattttcaaaag

SEQ ID NO: 6328 - DNA, 122 bp, Homo sapiens
  misc_feature (61)..(62): /note="This region represents a CpG dinucleotide"
  misc_feature (61)..(61): /note="Nucleotide may be methylated to form 5-methylcytosine"
agatttagacgttggcaaatttagaacaaaagagatgcaattttccacctcgtatgctcgcgctgttttacctaatattattataatgcattggctccagcagcggacctgcgcggccgggg

SEQ ID NO: 6329 - DNA, 122 bp, Homo sapiens
  misc_feature (61)..(62): /note="This region represents a CpG dinucleotide"
  misc_feature (61)..(61): /note="Nucleotide may be methylated to form 5-methylcytosine"
tctgtgaatgaagggaaatggtctcaggttttgtcactttggggttaacaatttaaaaaacgtgtttaaagaattattaagataatagttcattccattttgtagtagacattggctaaggg

SEQ ID NO: 6330 - DNA, 122 bp, Homo sapiens
  misc_feature (61)..(62): /note="This region represents a CpG dinucleotide"
  misc_feature (61)..(61): /note="Nucleotide may be methylated to form 5-methylcytosine"
gaatgtattacagttttgcccaagaaaccacaaacgttggaaacactcaagtttctttctcgtatacatcagctggtgtcatgcaatgggacatacatctgacgcttccctgttcttccctg

SEQ ID NO: 6331 - DNA, 122 bp, Homo sapiens
  misc_feature (61)..(62): /note="This region represents a CpG dinucleotide"
  misc_feature (61)..(61): /note="Nucleotide may be methylated to form 5-methylcytosine"
taaaggtcgtcatctgggcaaatgaaccactctgacttggagattaggggctcagacagccgtggatgagagtccagctctactacttattagccttgattaggtgagtattaccctgtatt

SEQ ID NO: 6332 - DNA, 122 bp, Homo sapiens
  misc_feature (61)..(62): /note="This region represents a CpG dinucleotide"
  misc_feature (61)..(61): /note="Nucleotide may be methylated to form 5-methylcytosine"
ttgtagtcatgagactgtgggcaagttaacctctctgagcttgatccttcacctgtgagacgtaaaatttctactttgcagaatcccatgtgggagacataatgcaggtgcttagtgagggg

SEQ ID NO: 6333 - DNA, 122 bp, Homo sapiens
  misc_feature (61)..(62): /note="This region represents a CpG dinucleotide"
  misc_feature (61)..(61): /note="Nucleotide may be methylated to form 5-methylcytosine"
tgaaagagctatggaaccaaagtccaaagataatggatctttaaaaacaaacaaacaagacgaccatccagcaagcagtaggattatagtcagaaaagtgcttgtaaaacaagagtgtaaat

SEQ ID NO: 6334 - DNA, 122 bp, Homo sapiens
  misc_feature (61)..(62): /note="This region represents a CpG dinucleotide"
  misc_feature (61)..(61): /note="Nucleotide may be methylated to form 5-methylcytosine"
cgacagattgacaaggcacgtaaacttctctaggcagaggaaatagaatgtgcaaaggcacgtcgttacgaaacagcatagtacagaggaaaactgcaagggtctgaactgaaatgaagaca

SEQ ID NO: 6335 - DNA, 122 bp, Homo sapiens
  misc_feature (61)..(62): /note="This region represents a CpG dinucleotide"
  misc_feature (61)..(61): /note="Nucleotide may be methylated to form 5-methylcytosine"
tacctcattggccagagattagtcacagaaccacacctggctctgcaagggaggagggaacgtcctgattccaaaaggccatgtatccagctaaaacccagggggagccttttaaaattatt

SEQ ID NO: 6336 - DNA, 122 bp, Homo sapiens
  misc_feature (61)..(62): /note="This region represents a CpG dinucleotide"
  misc_feature (61)..(61): /note="Nucleotide may be methylated to form 5-methylcytosine"
tgtaacactagaaacagggcctctgtggagtcttgtggctctctgccagccacggagaagcgtcagcatgcatgcccacacggcaacacagaggattaactgaccagggaaacaactgctaa

SEQ ID NO: 6337 - DNA, 122 bp, Homo sapiens
  misc_feature (61)..(62): /note="This region represents a CpG dinucleotide"
  misc_feature (61)..(61): /note="Nucleotide may be methylated to form 5-methylcytosine"
ttcgacgcggccgcttcagagcggcggggacaggctgcagcaggtggcgcagttagcagccgccgccgcagccacagagacctcctcgtcgggaacccatgaagactgcgcaacacagccgc

SEQ ID NO: 6338 - DNA, 122 bp, Homo sapiens
  misc_feature (61)..(62): /note="This region represents a CpG dinucleotide"
  misc_feature (61)..(61): /note="Nucleotide may be methylated to form 5-methylcytosine"
caccaagaagcaagaaacagataaatctgggaacctggccagctcaggctgtcaggcaagcgtagaccttacggaagccacgagcccccaaacccacggaaagacagttgccttaactcagg

SEQ ID NO: 6339 - DNA, 122 bp, Homo sapiens
  misc_feature (61)..(62): /note="This region represents a CpG dinucleotide"
  misc_feature (61)..(61): /note="Nucleotide may be methylated to form 5-methylcytosine"
ctcaccccagtctgtctggcgcccatgctccccttctgctcatactctgtacattcacctcgcgggaaagcccagactcccaaggctcctctgagaagatttgagaggatccagcagctata

SEQ ID NO: 6340 - DNA, 122 bp, Homo sapiens
  misc_feature (61)..(62): /note="This region represents a CpG dinucleotide"
  misc_feature (61)..(61): /note="Nucleotide may be methylated to form 5-methylcytosine"
aaaatgctgtctcaaaaaaaaaagaaaaaggaaagtgagtcagatgccaagctggtattgcggcatcagcttgtgtagtaagatttgacctggtcagaaaggtctcaaatggctaccctgag

SEQ ID NO: 6341 - DNA, 122 bp, Homo sapiens
  misc_feature (61)..(62): /note="This region represents a CpG dinucleotide"
  misc_feature (61)..(61): /note="Nucleotide may be methylated to form 5-methylcytosine"
gacttctctctctcaaaaaaaaggaaaaataaaaacagaaagatgcaactctttagtgtccgttagagagggaagagaaagacttagggacatgggctacattggttcagcatctgtcatcc

SEQ ID NO: 6342 - DNA, 122 bp, Homo sapiens
  misc_feature (61)..(62): /note="This region represents a CpG dinucleotide"
  misc_feature (61)..(61): /note="Nucleotide may be methylated to form 5-methylcytosine"
atgagctctgatggttttataagtgtttgacagttcttctttcactctggtctctcctgccgccttgtgaagaaagtgcttgcttccccttcgccttccggcatgattgtaagtttcctgag

SEQ ID NO: 6343 - DNA, 122 bp, Homo sapiens
  misc_feature (61)..(62): /note="This region represents a CpG dinucleotide"
  misc_feature (61)..(61): /note="Nucleotide may be methylated to form 5-methylcytosine"
tgggtacagaattcatctcaactacttcctccttcggcttctcgttcttgctgaaattctcgtctggctggtacctgaattagagagagtagggcaagattaacccaggtccctgttcatcc

SEQ ID NO: 6344 - DNA, 122 bp, Homo sapiens
  misc_feature (61)..(62): /note="This region represents a CpG dinucleotide"
  misc_feature (61)..(61): /note="Nucleotide may be methylated to form 5-methylcytosine"
tccatttttaaagaggagaagcttttgaaacgcagtggcactcacaggcaaaatttgaaacgctaccctcagggaccaccatgttcgcaatgccaaggcaggggccttttgcacctggaata

SEQ ID NO: 6345 - DNA, 122 bp, Homo sapiens
  misc_feature (61)..(62): /note="This region represents a CpG dinucleotide"
  misc_feature (61)..(61): /note="Nucleotide may be methylated to form 5-methylcytosine"
tcttaatgaatgggaaacttcatggttagcaggatgtgagtaacactcatgcacataaaccgcaggaccactggactcatgataagtagaacactgagaacctcaatgtcatctgtttacag

SEQ ID NO: 6346 - DNA, 122 bp, Homo sapiens
  misc_feature (61)..(62): /note="This region represents a CpG dinucleotide"
  misc_feature (61)..(61): /note="Nucleotide may be methylated to form 5-methylcytosine"
gagggcctcattgctgcagtggggaagggagatgcttcatcagtaggcatgactcatagccgagcctgtgctcctggatttgttctgaagtgagattctattgtgtttattgcaaacagaca

SEQ ID NO: 6347 - DNA, 122 bp, Homo sapiens
  misc_feature (61)..(62): /note="This region represents a CpG dinucleotide"
  misc_feature (61)..(61): /note="Nucleotide may be methylated to form 5-methylcytosine"
gctgggagataacagtgggaactgctggtccatctggttttcattctgctaacactcacacggaactgttagagaaggcagtccagatacacagatttgaagcacgtggttgcacagacaga

SEQ ID NO: 6348 - DNA, 122 bp, Homo sapiens
  misc_feature (61)..(62): /note="This region represents a CpG dinucleotide"
  misc_feature (61)..(61): /note="Nucleotide may be methylated to form 5-methylcytosine"
gccgaagcggccttctgacacagcatgactcagcaggtttggagtgcaggcgcaaaaccccgcacgttatgtaaccatgccatgtgaggtgcattaggtgatcacccacgtaagctcatgct

SEQ ID NO: 6349 - DNA, 122 bp, Homo sapiens
  misc_feature (61)..(62): /note="This region represents a CpG dinucleotide"
  misc_feature (61)..(61): /note="Nucleotide may be methylated to form 5-methylcytosine"
aatcctgcatacagtccagtttcacacccggtgctcccgtgttgccctgtcctcgggttacgtagcttacttggcattgccatggtggtggacctgctcagcctcactcatgtttgctcttt

SEQ ID NO: 6350 - DNA, 122 bp, Homo sapiens
  misc_feature (61)..(62): /note="This region represents a CpG dinucleotide"
  misc_feature (61)..(61): /note="Nucleotide may be methylated to form 5-methylcytosine"
tgaaggaaggtccttggttataatagacacaatatggcagcagggtgcttaagatgccaccgtgtgctgtggacaaatgtatatcaccctttttgttgtagatggaaagttattgaacagaa

SEQ ID NO: 6351 - DNA, 122 bp, Homo sapiens
  misc_feature (61)..(62): /note="This region represents a CpG dinucleotide"
  misc_feature (61)..(61): /note="Nucleotide may be methylated to form 5-methylcytosine"
tagaggagaggggaagaaaaaaaggaagtgttacttcagtgaccaggtgacattgcaccacgtaaggagaattccttatgtggtctggaagtcctaactagtcctgtctggctgagaccaaa

SEQ ID NO: 6352 - DNA, 122 bp, Homo sapiens
  misc_feature (61)..(62): /note="This region represents a CpG dinucleotide"
  misc_feature (61)..(61): /note="Nucleotide may be methylated to form 5-methylcytosine"
ttggatatgcaggggcatctatggccacaccaccatgatgcatccagtctcgtctggacacgcatgggcatattgaagcagaagtgaaatgatgactaatgtaaaagtaaaaaagtctgcaa

SEQ ID NO: 6353 - DNA, 122 bp, Homo sapiens
  misc_feature (61)..(62): /note="This region represents a CpG dinucleotide"
  misc_feature (61)..(61): /note="Nucleotide may be methylated to form 5-methylcytosine"
ggccgaatccctaaggtccaacgagctagcagtcagttgacagggtttctaacaaaaacgcggcatgcgtttaccaaacctagggtggttttatttcagaagtaggaactctttccacgaga

SEQ ID NO: 6354 - DNA, 122 bp, Homo sapiens
  misc_feature (61)..(62): /note="This region represents a CpG dinucleotide"
  misc_feature (61)..(61): /note="Nucleotide may be methylated to form 5-methylcytosine"
tccgtcacgtgtaccttttctttccaactagactgtagttgatctcaaggtcggagaccacgttgcacaacctctttcagatacgtgttcaccagtatttatttatttattggcattcccta

SEQ ID NO: 6355 - DNA, 122 bp, Homo sapiens
  misc_feature (61)..(62): /note="This region represents a CpG dinucleotide"
  misc_feature (61)..(61): /note="Nucleotide may be methylated to form 5-methylcytosine"
ttggtcggacggtgattctcactcttcctattgacttctactttgtgtcagcaagttcagcgtgggccccgtatgctgccgtggatctgatcagctgaggcctgagacacaggaccaggtac

SEQ ID NO: 6356 - DNA, 122 bp, Homo sapiens
  misc_feature (61)..(62): /note="This region represents a CpG dinucleotide"
  misc_feature (61)..(61): /note="Nucleotide may be methylated to form 5-methylcytosine"
tcccagtacaagatattcagtacacaaaagatatccttttctctcctgagtttcattttacgtgtgtatgaacacacaaacatgctaacacacatgctcacacaatcttttagctcttgtat

SEQ ID NO: 6357 - DNA, 122 bp, Homo sapiens
  misc_feature (61)..(62): /note="This region represents a CpG dinucleotide"
  misc_feature (61)..(61): /note="Nucleotide may be methylated to form 5-methylcytosine"
attccacttctcagcctcacctgggggcattgtcagctaataatatgtgaaagtccctggcgcttagtaggtgctcaataaatgttaattgaatctgcaacgtcacttcgcttgctccttta

SEQ ID NO: 6358 - DNA, 122 bp, Homo sapiens
  misc_feature (61)..(62): /note="This region represents a CpG dinucleotide"
  misc_feature (61)..(61): /note="Nucleotide may be methylated to form 5-methylcytosine"
gcacctgtcctgtggatcgatgatgactactggtggcgtatgagtcatctacagtgaatacgtctctggaactctgaggtctgtcacaaaagaaatctagcccattttctatgtttgataca

SEQ ID NO: 6359 - DNA, 122 bp, Homo sapiens
  misc_feature (61)..(62): /note="This region represents a CpG dinucleotide"
  misc_feature (61)..(61): /note="Nucleotide may be methylated to form 5-methylcytosine"
atatggttgaggcttaatataataacaaaagacttactcctatcactcaagaagtttcaacggttttacagtctctctgccaggaacctgggacctagatcaaacatatattttttatttta

SEQ ID NO: 6360 - DNA, 122 bp, Homo sapiens
  misc_feature (61)..(62): /note="This region represents a CpG dinucleotide"
  misc_feature (61)..(61): /note="Nucleotide may be methylated to form 5-methylcytosine"
tgggggtccgcatcactgcatctggccccggggccccacagcccctgcctctccacatcccgggccggacagcatcctcctgagtccactcaaccctgaacctatgaaactgctagaagtaa

SEQ ID NO: 6361 - DNA, 122 bp, Homo sapiens
  misc_feature (61)..(62): /note="This region represents a CpG dinucleotide"
  misc_feature (61)..(61): /note="Nucleotide may be methylated to form 5-methylcytosine"
gttcatcttctctctttcttcacgtcttgttggttactgctacctggcttccaactgttgcgctgggcagtctgacaacacgaagggaccctccaaagtccctctcatcatattctcttggg

SEQ ID NO: 6362 - DNA, 122 bp, Homo sapiens
  misc_feature (61)..(62): /note="This region represents a CpG dinucleotide"
  misc_feature (61)..(61): /note="Nucleotide may be methylated to form 5-methylcytosine"
ctgcaccttaatctcacccagaagtggcaacaccaggaggaaggaggcagtgagtggcgtcggctggggatggcacacatctgcccataatgacaatggagacaacccagtgctccagagtc

SEQ ID NO: 6363 - DNA, 122 bp, Homo sapiens
  misc_feature (61)..(62): /note="This region represents a CpG dinucleotide"
  misc_feature (61)..(61): /note="Nucleotide may be methylated to form 5-methylcytosine"
gaccagcctgctcggtgtcactgctttactgtctatttctatatactctgtgtgtaaatacgtgtgtttacacagacactgagatcgtctgtatacacacagtcacacacagccagctaacc

SEQ ID NO: 6364 - DNA, 122 bp, Homo sapiens
  misc_feature (61)..(62): /note="This region represents a CpG dinucleotide"
  misc_feature (61)..(61): /note="Nucleotide may be methylated to form 5-methylcytosine"
tagacttggttatacattttcctaataagtctcaggcattttccattgcactagtgtttccgtttctcttaagtcaacactttgatataaacttttctgaagttagtactttacatttgaaa

SEQ ID NO: 6365 - DNA, 122 bp, Homo sapiens
  misc_feature (61)..(62): /note="This region represents a CpG dinucleotide"
  misc_feature (61)..(61): /note="Nucleotide may be methylated to form 5-methylcytosine"
gagtcaaaggtcaattcatgggcttactgctctggctttatgtttcctcttgtttgcctccgggggatttctgttcattccttttcagctcagctatgcatgcaaagaatataatttatagt

SEQ ID NO: 6366 - DNA, 122 bp, Homo sapiens
  misc_feature (61)..(62): /note="This region represents a CpG dinucleotide"
  misc_feature (61)..(61): /note="Nucleotide may be methylated to form 5-methylcytosine"
ggtctgcagagtcccttagtacctggtgttcaggcttctgaggccagaatgcagataggacgtctgagattgttgactttctcaactgaggaattgggggaaggaagtgccttaataaagtg

SEQ ID NO: 6367 - DNA, 122 bp, Homo sapiens
  misc_feature (61)..(62): /note="This region represents a CpG dinucleotide"
  misc_feature (61)..(61): /note="Nucleotide may be methylated to form 5-methylcytosine"
tgtatgagactccttaggaaccaggcatcaggccagcttcttagatgaggattgattcctcgctgggatgtgctcatggcattggttagtgtgtgcataggtcctggctgctgctgtcatgt

SEQ ID NO: 6368 - DNA, 122 bp, Homo sapiens
  misc_feature (61)..(62): /note="This region represents a CpG dinucleotide"
  misc_feature (61)..(61): /note="Nucleotide may be methylated to form 5-methylcytosine"
tgcaggctggcttttctttcaggggtgccgattgccggaaggcatgctgtggtggttgggcgcagtaaaatagttggggccccgatgcatgacttgcttctgtggaacaatgccacagtgac

SEQ ID NO: 6369 - DNA, 122 bp, Homo sapiens
  misc_feature (61)..(62): /note="This region represents a CpG dinucleotide"
  misc_feature (61)..(61): /note="Nucleotide may be methylated to form 5-methylcytosine"
aatggacttttgcgatgtatatactgtgaggctattttgagcttctctctttaaggcacccgcacatctgaatatgcttacttggctttactctttaacatataagaacacatgaaactttg

SEQ ID NO: 6370 - DNA, 122 bp, Homo sapiens
  misc_feature (61)..(62): /note="This region represents a CpG dinucleotide"
  misc_feature (61)..(61): /note="Nucleotide may be methylated to form 5-methylcytosine"
actgaggtttgtgctgtgtgaggctttctaagtatcaaagcaggacagatccttgacctccgggagcttataatctgaatgcaacaaggaatataaaggtttttttacttagacaattttgt

SEQ ID NO: 6371 - DNA, 122 bp, Homo sapiens
  misc_feature (61)..(62): /note="This region represents a CpG dinucleotide"
  misc_feature (61)..(61): /note="Nucleotide may be methylated to form 5-methylcytosine"
gtctgcaggcctgtgaaacccaatcagtataccccctagagagagttgcaaaggaatgtacgggtgtgcaggatgaaatcagcccaagaacctttatagaaacatgaatgtgatctgtgagg

SEQ ID NO: 6372 - DNA, 122 bp, Homo sapiens
  misc_feature (61)..(62): /note="This region represents a CpG dinucleotide"
  misc_feature (61)..(61): /note="Nucleotide may be methylated to form 5-methylcytosine"
tgtcttacccttcatcacacttattgtaagattttatcattttgaaagcagctgttaggccgggtgcagtggctgacgcctgtaatccgagcacttggaaggctgaggtgggcattgcttga

SEQ ID NO: 6373 - DNA, 122 bp, Homo sapiens
  misc_feature (61)..(62): /note="This region represents a CpG dinucleotide"
  misc_feature (61)..(61): /note="Nucleotide may be methylated to form 5-methylcytosine"
tgaggctgggtctcacttgtcggctcctcgtccactccgcccacggcatcccccttgatgcgggcagccagctcactgcaaacgaagtaggtctgcttttctaaagtaggagaaatcaaaag

SEQ ID NO: 6374 - DNA, 122 bp, Homo sapiens
  misc_feature (61)..(62): /note="This region represents a CpG dinucleotide"
  misc_feature (61)..(61): /note="Nucleotide may be methylated to form 5-methylcytosine"
gtattttgccctgcatttcccttgtgtttactatccagtcttcctgtttatcatttttgtcgacaacatgaaattctattgagagactgtctgaacatattgtaatgtagatgttcaggttt

SEQ ID NO: 6375 - DNA, 122 bp, Homo sapiens
  misc_feature (61)..(62): /note="This region represents a CpG dinucleotide"
  misc_feature (61)..(61): /note="Nucleotide may be methylated to form 5-methylcytosine"
gcaatcctctgtccttcagcagcaccagaaacagtggaggatccgtgtgggtgttcacagcgttgtgaatagatctagtgggaggcaagagtccaaggctcaggcttcctgcacgtaccacc

SEQ ID NO: 6376 - DNA, 122 bp, Homo sapiens
  misc_feature (61)..(62): /note="This region represents a CpG dinucleotide"
  misc_feature (61)..(61): /note="Nucleotide may be methylated to form 5-methylcytosine"
tctaaagtcagttaagatttactaatttcttgctcagcatttccttttgggacgctgttgcgcattagaatgagatatactgaaagtagcataaagacgcctggttccttttaacagaacaa

SEQ ID NO: 6377 - DNA, 122 bp, Homo sapiens
  misc_feature (61)..(62): /note="This region represents a CpG dinucleotide"
  misc_feature (61)..(61): /note="Nucleotide may be methylated to form 5-methylcytosine"
tctgtggcattttctgccaataaattacctgcctgacaggaaggcgtcactgctcatcaacgctggtagtgtgtaagctggtacttgttcagttaaggagaagagaaatagtgcctcagaga

SEQ ID NO: 6378 - DNA, 122 bp, Homo sapiens
  misc_feature (61)..(62): /note="This region represents a CpG dinucleotide"
  misc_feature (61)..(61): /note="Nucleotide may be methylated to form 5-methylcytosine"
ggttactcaccagctcttcagaacaattgtggctgaaacgtggcagctggcagacttctacgtatatgaagttaatccatggggcataagagcacagtggtgaagagagaacattctgtagc

SEQ ID NO: 6379 - DNA, 122 bp, Homo sapiens
  misc_feature (61)..(62): /note="This region represents a CpG dinucleotide"
  misc_feature (61)..(61): /note="Nucleotide may be methylated to form 5-methylcytosine"
cagattaaactctgagtgtccctgtgcttaaaatattatcactcacccaccatgacttcccgcagtccccaactcagaccagctcactggctcttgtctctctttcctccttagccccactc

SEQ ID NO: 6380 - DNA, 122 bp, Homo sapiens
  misc_feature (61)..(62): /note="This region represents a CpG dinucleotide"
  misc_feature (61)..(61): /note="Nucleotide may be methylated to form 5-methylcytosine"
caacatccggcatgtttacactagggaggaagtttctcaaacagtaacgtctagggctaacgtggataagccggaaaggaagcacatcagcatctatccctgtgaaacactggattgagtgg

SEQ ID NO: 6381 - DNA, 122 bp, Homo sapiens
  misc_feature (61)..(62): /note="This region represents a CpG dinucleotide"
  misc_feature (61)..(61): /note="Nucleotide may be methylated to form 5-methylcytosine"
attatggtatttgcattacagtttttttcaagtattttaagccactcttcatgacagaatcgttagaattccctccgtgaatccctgtctgtggccgcgcggtggcgctcgtgggctctggg

SEQ ID NO: 6382 - DNA, 122 bp, Homo sapiens
  misc_feature (61)..(62): /note="This region represents a CpG dinucleotide"
  misc_feature (61)..(61): /note="Nucleotide may be methylated to form 5-methylcytosine"
cgatcagagcttgccctgaacggactcctttcccactgcagacaagtagggggttttgcccgtaaagaaggagctagtctacgtgcggctgcagtaggccctgcgccatccgtcatttctcg

SEQ ID NO: 6383 - DNA, 122 bp, Homo sapiens
  misc_feature (61)..(62): /note="This region represents a CpG dinucleotide"
  misc_feature (61)..(61): /note="Nucleotide may be methylated to form 5-methylcytosine"
ttgtcagtttaattaactttggccgccagaggaggccattcttatctacaggacaagcaccgcggctgtaccagcctctgagttccgactcgggtcctgcaggtgtggcttcctggcgcacg

SEQ ID NO: 6384 - DNA, 122 bp, Homo sapiens
  misc_feature (61)..(62): /note="This region represents a CpG dinucleotide"
  misc_feature (61)..(61): /note="Nucleotide may be methylated to form 5-methylcytosine"
aagccatgattcagacacttaagcctgtgtcagtccctatccttaggtcctggcaggctccgtgttccattccagctgagcctttgctggagtaattacccacatggagtcttcaagccaaa

SEQ ID NO: 6385 - DNA, 122 bp, Homo sapiens
  misc_feature (61)..(62): /note="This region represents a CpG dinucleotide"
  misc_feature (61)..(61): /note="Nucleotide may be methylated to form 5-methylcytosine"
cgggcctctccttagtgccagagctcccagctgggattagccccacccttccctacttagcgggctcttcccaatgccccagagctgtcacacagctgggctccaccatgcactgggcttga

SEQ ID NO: 6386 - DNA, 122 bp, Homo sapiens
  misc_feature (61)..(62): /note="This region represents a CpG dinucleotide"
  misc_feature (61)..(61): /note="Nucleotide may be methylated to form 5-methylcytosine"
aggtgatttcatcactgtgtgaacatcagagtgcacttacacaaacctggatgggtagcccgcaacacagctaggctagatggtacagctgattgctcccacaccacaagcctgtatggcag

SEQ ID NO: 6387 - DNA, 122 bp, Homo sapiens
  misc_feature (61)..(62): /note="This region represents a CpG dinucleotide"
  misc_feature (61)..(61): /note="Nucleotide may be methylated to form 5-methylcytosine"
tttttcatgcctctgtgggaagtccctggtcagttttaaaagggaagggcatgactatgacgctggattctccctgctagtgatgcatgagcacctgtggtgaacgagatggaaatgatgaa

SEQ ID NO: 6388 - DNA, 122 bp, Homo sapiens
  misc_feature (61)..(62): /note="This region represents a CpG dinucleotide"
  misc_feature (61)..(61): /note="Nucleotide may be methylated to form 5-methylcytosine"
catgagaggaattgggaggaaatagctgtctcaatggggaattcaaaattatttatctcacgtcccactaaggggaatgcacccagcccttcaggacgcactggcatgcatgatgtaccagg

SEQ ID NO: 6389 - DNA, 122 bp, Homo sapiens
  misc_feature (61)..(62): /note="This region represents a CpG dinucleotide"
  misc_feature (61)..(61): /note="Nucleotide may be methylated to form 5-methylcytosine"
atggcagccttttcaccttagttttggactcagcattaaagactgccatacatggttgtgcgggctgagcactatgtaactctagggggcaccactcacctaggtttcttagactgccatat

SEQ ID NO: 6390 - DNA, 122 bp, Homo sapiens
  misc_feature (61)..(62): /note="This region represents a CpG dinucleotide"
  misc_feature (61)..(61): /note="Nucleotide may be methylated to form 5-methylcytosine"
cagtagaggaagagcaagaacctcgttcatgccaactctacaaacatgcattggtatcggcgggtgcccatcagggtgtccagcagtgaatcagactccagccctgcccttggacctcgcag

SEQ ID NO: 6391 - DNA, 122 bp, Homo sapiens
  misc_feature (61)..(62): /note="This region represents a CpG dinucleotide"
  misc_feature (61)..(61): /note="Nucleotide may be methylated to form 5-methylcytosine"
tccagaatgccccgacccacggcccccaaccaccaaggaagtactttgtcgcccctgtgacgtttcctaccttgatctgtgcacagagtttacctggtcaccgcggtattgcaagcctctcc

SEQ ID NO: 6392 - DNA, 122 bp, Homo sapiens
  misc_feature (61)..(62): /note="This region represents a CpG dinucleotide"
  misc_feature (61)..(61): /note="Nucleotide may be methylated to form 5-methylcytosine"
attaattggatgtattaacaactatgtacataagagccaccttgtaggctaagagtttaacgttgtttaaacacagcgtttgaggcaaacagtagcaacagcagcagcaaatgcaccaaact

SEQ ID NO: 6393 - DNA, 122 bp, Homo sapiens
  misc_feature (61)..(62): /note="This region represents a CpG dinucleotide"
  misc_feature (61)..(61): /note="Nucleotide may be methylated to form 5-methylcytosine"
gggcctaatacactgttaatcctctctaggaaattgctctggctaggaattcaagtactgcgtttaatagaggtggccaggtgagcatccttgccttggtgaaaaagctttcagtttttcac

SEQ ID NO: 6394 - DNA, 122 bp, Homo sapiens
  misc_feature (61)..(62): /note="This region represents a CpG dinucleotide"
  misc_feature (61)..(61): /note="Nucleotide may be methylated to form 5-methylcytosine"
caggtgtagtaagattgccagttttctaagctggttgtacctgttctgcattcctataagcgctatatgagagttatggtagttttgcatctttgctagtctttttcattttaggtattttg

SEQ ID NO: 6395 - DNA, 122 bp, Homo sapiens
  misc_feature (61)..(62): /note="This region represents a CpG dinucleotide"
  misc_feature (61)..(61): /note="Nucleotide may be methylated to form 5-methylcytosine"
aatttttttttgaagattgctaaagagtggttgcaggcagcagtaagacagcaattgctgcgagacacttgtctctgctaaggaggcagcagctgcgactgtcactcagcctcggcactcac

SEQ ID NO: 6396 - DNA, 122 bp, Homo sapiens
  misc_feature (61)..(62): /note="This region represents a CpG dinucleotide"
  misc_feature (61)..(61): /note="Nucleotide may be methylated to form 5-methylcytosine"
gtctgggtgtgtctgcttctcttcatgattggattcaggtcatgcattcttgggcatcagcgccattgacttggtgtgttgttccccatgcatcagatcagatgtcctgtgccatctgtcct

SEQ ID NO: 6397 - DNA, 122 bp, Homo sapiens
  misc_feature (61)..(62): /note="This region represents a CpG dinucleotide"
  misc_feature (61)..(61): /note="Nucleotide may be methylated to form 5-methylcytosine"
gtgattaggaaatggctggatgacactgtggatacctggaaattgctgctgctcttccggcgcagtgatttgaacctgggagagttgaaaaaggggttcttcccacattcttttagtgcaga

SEQ ID NO: 6398 - DNA, 122 bp, Homo sapiens
  misc_feature (61)..(62): /note="This region represents a CpG dinucleotide"
  misc_feature (61)..(61): /note="Nucleotide may be methylated to form 5-methylcytosine"
agcctaatagaaaacagttacgtaagtaactaaataggaacatcaactcacctcattaagcgcattttgtgagacttaagagagcatcaccacctggtggtagattcagggtaatgattagc

SEQ ID NO: 6399 - DNA, 122 bp, Homo sapiens
  misc_feature (61)..(62): /note="This region represents a CpG dinucleotide"
  misc_feature (61)..(61): /note="Nucleotide may be methylated to form 5-methylcytosine"
ttgaaaaaactggatccagatctctcttctgaaggaactagtaatacatgattagcagcacgggtgactttttaactatgcccttcaaaatccaatcattgaaaacttattgaattaaaagg

SEQ ID NO: 6400 - DNA, 122 bp, Homo sapiens
  misc_feature (61)..(62): /note="This region represents a CpG dinucleotide"
  misc_feature (61)..(61): /note="Nucleotide may be methylated to form 5-methylcytosine"
cgcctctgagcagcaatgtgacgctgccaggtattagtgctggaacgacaactttgtctgcgctgctggcgccttgggtgggctggcggcgctgtgagtgagctggtgcggtattcagtgga

SEQ ID NO: 6401 - DNA, 122 bp, Homo sapiens
  misc_feature (61)..(62): /note="This region represents a CpG dinucleotide"
  misc_feature (61)..(61): /note="Nucleotide may be methylated to form 5-methylcytosine"
tatttttctgcggagtacaactgttagtgcctgccggttgcttagcaaggtggtcccttacgattcacagcctttgagatgattttctaggggacccctcaaagacattaggagaataccag

SEQ ID NO: 6402 - DNA, 122 bp, Homo sapiens
  misc_feature (61)..(62): /note="This region represents a CpG dinucleotide"
  misc_feature (61)..(61): /note="Nucleotide may be methylated to form 5-methylcytosine"
agaagggccttctctaatcacttagctcaaccacccatacgggtgtatttcccacatgaacgagaaagttcgctgtgagcaggaaccctgaatcccagtgcttgcaacataacgaacataaa

SEQ ID NO: 6403 - DNA, 122 bp, Homo sapiens
  misc_feature (61)..(62): /note="This region represents a CpG dinucleotide"
  misc_feature (61)..(61): /note="Nucleotide may be methylated to form 5-methylcytosine"
taagacacctcatgtacctttgacaaagccattctagcacaagcaaaacggtcctgagaacgagtatcttagccacctggtatggcagaggacacattcatcatggaaaaagtctgaggaaa

SEQ ID NO: 6404 - DNA, 122 bp, Homo sapiens
  misc_feature (61)..(62): /note="This region represents a CpG dinucleotide"
  misc_feature (61)..(61): /note="Nucleotide may be methylated to form 5-methylcytosine"
ggagggtggctgaaagatcaaacaaggtcatggatgtaaagcccctggcacagtgcctggcgtgatgcaggcagcagaaaatgctgagtcccctggaggtgaggagctaggaagggagagtg

SEQ ID NO: 6405 - DNA, 122 bp, Homo sapiens
  misc_feature (61)..(62): /note="This region represents a CpG dinucleotide"
  misc_feature (61)..(61): /note="Nucleotide may be methylated to form 5-methylcytosine"
tctatcaacaaatacttggctctgaaacctcactcatctttgagaaaactctaatatttacggcctttttaaacgtgactgaaaagggaggaacttgtctttctaatgtttatatccctagt

SEQ ID NO: 6406 - DNA, 122 bp, Homo sapiens
  misc_feature (61)..(62): /note="This region represents a CpG dinucleotide"
  misc_feature (61)..(61): /note="Nucleotide may be methylated to form 5-methylcytosine"
ggattctttgaaggtggattttccacctttaattctcctttcaagctgtgaaactcaacacggcctcgcctaggattcctaacttgtctagccagtaggcagagagcttttctctgatgaaa

SEQ ID NO: 6407 - DNA, 122 bp, Homo sapiens
  misc_feature (61)..(62): /note="This region represents a CpG dinucleotide"
  misc_feature (61)..(61): /note="Nucleotide may be methylated to form 5-methylcytosine"
aagcaacacacacatacaaaactctggttatgtgagtgtcaaagaaaaaccagagatggacggtaaagtggtaaaaacagattttattcaggaatattgcaatagtgggaaagagacctcag

SEQ ID NO: 6408 - DNA, 122 bp, Homo sapiens
  misc_feature (61)..(62): /note="This region represents a CpG dinucleotide"
  misc_feature (61)..(61): /note="Nucleotide may be methylated to form 5-methylcytosine"
ggattttgcatcatttgaggctttaaagtcattcttcttgtcaggagcaaattcccccaccgtcctcagtaatttttcctaagatcaatgagctgagtgtcggtttgtttttttccacagcg

SEQ ID NO: 6409 - DNA, 122 bp, Homo sapiens
  misc_feature (61)..(62): /note="This region represents a CpG dinucleotide"
  misc_feature (61)..(61): /note="Nucleotide may be methylated to form 5-methylcytosine"
ttatgttgaataaatgtcagactattttttacataacgttgcttctgtttaattttgtcacgttcagaggtggggggtaggagatgtaagcccttgacagcaaaataattccttttgcttga

SEQ ID NO: 6410 - DNA, 122 bp, Homo sapiens
  misc_feature (61)..(62): /note="This region represents a CpG dinucleotide"
  misc_feature (61)..(61): /note="Nucleotide may be methylated to form 5-methylcytosine"
caagcaacagcaattgcagctcctgctggttctactaaggaggtaaaaataaaggcgactcgctttcaggtgggcaatgatctgttactgcataacaaaaaaaaaggcagtgttctaatcta

SEQ ID NO: 6411 - DNA, 122 bp, Homo sapiens
  misc_feature (61)..(62): /note="This region represents a CpG dinucleotide"
  misc_feature (61)..(61): /note="Nucleotide may be methylated to form 5-methylcytosine"
tcttcccctgcgaggccgagagggtgcagagctggtggcttcaggaggtggctgtgagcgcgggtctggggccaagagcagaggacaggagaagactgccaagccaccaccggtcctgcgac

SEQ ID NO: 6412 - DNA, 122 bp, Homo sapiens
  misc_feature (61)..(62): /note="This region represents a CpG dinucleotide"
  misc_feature (61)..(61): /note="Nucleotide may be methylated to form 5-methylcytosine"
aagttctgggattacagacatgagccaacatgcctggtctagtcttaccttttactaatgcggaaactgaagcccagagatgcagagatgtgcctaaattacagttaattaggaacaaatgt

SEQ ID NO: 6413 - DNA, 122 bp, Homo sapiens
  misc_feature (61)..(62): /note="This region represents a CpG dinucleotide"
  misc_feature (61)..(61): /note="Nucleotide may be methylated to form 5-methylcytosine"
gctcagcaggggctgccaggttgggacccgcaggggacctgcttcatgagtgggcaggaccgccgtgatttggactgcacaagtttctgcccacatgtttggaaagtcatttcagtgttttc

SEQ ID NO: 6414 - DNA, 122 bp, Homo sapiens
  misc_feature (61)..(62): /note="This region represents a CpG dinucleotide"
  misc_feature (61)..(61): /note="Nucleotide may be methylated to form 5-methylcytosine"
aagtccagatgtcagagtgagggtggggttaagcacagcaaggtcagcagccatcacagacggtcatcagtgtattgatgccactcagccagtgtgccatcagcacggctccttagttcacc

SEQ ID NO: 6415 - DNA, 122 bp, Homo sapiens
  misc_feature (61)..(62): /note="This region represents a CpG dinucleotide"
  misc_feature (61)..(61): /note="Nucleotide may be methylated to form 5-methylcytosine"
cttcgtaaccaagaagattacctatggttacgctgaatgcactctcccagggtgcataggcgctgctgaactgcggttataactcttgtttgcccctgggtggttgccagcagggagtaagg

SEQ ID NO: 6416 - DNA, 122 bp, Homo sapiens
  misc_feature (61)..(62): /note="This region represents a CpG dinucleotide"
  misc_feature (61)..(61): /note="Nucleotide may be methylated to form 5-methylcytosine"
aggccagactgccatgtgtcttgcatcgcctggtgcaactgggatgttctggggttgtcccgctttatatactgctgagagcgcgcgccctcacagttgggcacgcacgcggagatgctgcg

SEQ ID NO: 6417 - DNA, 122 bp, Homo sapiens
  misc_feature (61)..(62): /note="This region represents a CpG dinucleotide"
  misc_feature (61)..(61): /note="Nucleotide may be methylated to form 5-methylcytosine"
ccataattactctttctatagagttgatcagcctgagaacatacctggggtcaaaccattcgtgctggctcaattttctacctcctttcataattccactgagggtggcgggggaacaaaag

SEQ ID NO: 6418 - DNA, 122 bp, Homo sapiens
  misc_feature (61)..(62): /note="This region represents a CpG dinucleotide"
  misc_feature (61)..(61): /note="Nucleotide may be methylated to form 5-methylcytosine"
gtatataagtgacagagccaggatccaaacacatacataagtgtgtcttgaccatgtgaacgtgaccacaccattggtggttgtactctcagtacagcataatcatcatacttctgaatgtt

SEQ ID NO: 6419 - DNA, 122 bp, Homo sapiens
  misc_feature (61)..(62): /note="This region represents a CpG dinucleotide"
  misc_feature (61)..(61): /note="Nucleotide may be methylated to form 5-methylcytosine"
agcctttggtgcaggggtcccgggtgcaggagcttttggtgcaggggccgtgggtgcaggcgtcccgggtgcaggggcccctggtgcaggagctgcgggtgcaggagtctcgggttcagggg

SEQ ID NO: 6420 - DNA, 122 bp, Homo sapiens
  misc_feature (61)..(62): /note="This region represents a CpG dinucleotide"
  misc_feature (61)..(61): /note="Nucleotide may be methylated to form 5-methylcytosine"
cccattctcacttccttacatagtcatagcatttgataatagcattaactggtcatagagcggctcaactgatgactgcattttacagcctcctgtacagctagatgtggtcatgtgactaa

SEQ ID NO: 6421 - DNA, 122 bp, Homo sapiens
  misc_feature (61)..(62): /note="This region represents a CpG dinucleotide"
  misc_feature (61)..(61): /note="Nucleotide may be methylated to form 5-methylcytosine"
tgaagacaagtcctgacaccaccgctgggtggcagaactagaacagaccaggaacggggacgaccccaggagaaatgtctgaggaaaaaagaatgaatctaatagaatgtccaatgtgctca

SEQ ID NO: 6422 - DNA, 122 bp, Homo sapiens
  misc_feature (61)..(62): /note="This region represents a CpG dinucleotide"
  misc_feature (61)..(61): /note="Nucleotide may be methylated to form 5-methylcytosine"
caccactggactccagccttggtggcagtgagaccctgtccccaaagaactgggtgatctcgaccctccacatcgctggctctccacgggcgctgcacagtggagacccaggatctgattgc

SEQ ID NO: 6423 - DNA, 122 bp, Homo sapiens
  misc_feature (61)..(62): /note="This region represents a CpG dinucleotide"
  misc_feature (61)..(61): /note="Nucleotide may be methylated to form 5-methylcytosine"
tcatcttcccttctctttgtcagccacgtgtacagtaaggagcagataacatggcaccagcgaggcaaagatcccatttgcataagattagggcgagccatccagcttccccatgtgctatg

SEQ ID NO: 6424 - DNA, 122 bp, Homo sapiens
  misc_feature (61)..(62): /note="This region represents a CpG dinucleotide"
  misc_feature (61)..(61): /note="Nucleotide may be methylated to form 5-methylcytosine"
attaggtcatagtagtcacatgaactgaaatgtcaccagttgttacaacaccaaacccaacgccacatgtagactgatgttagagaacacagaacatgagtaagcaggggttctgagataga

SEQ ID NO: 6425 - DNA, 122 bp, Homo sapiens
  misc_feature (61)..(62): /note="This region represents a CpG dinucleotide"
  misc_feature (61)..(61): /note="Nucleotide may be methylated to form 5-methylcytosine"
ctgtcttgcaaaatcacattagtgaccacagggagatataaggaactcggtggctcaagacgaacagcccaccagtccaaagggtgtggactgtgaatatagcaaaagacaaacaaacaaaa

SEQ ID NO: 6426 - DNA, 122 bp, Homo sapiens
  misc_feature (61)..(62): /note="This region represents a CpG dinucleotide"
  misc_feature (61)..(61): /note="Nucleotide may be methylated to form 5-methylcytosine"
tcgggaaaacctctctgaccctgtgtttcctcatcagtgaaatgggaatgatgatcctcacgggaatggccttaaggcatttggcagaatgcctgctacactgtggccactcaaccaaaaga

SEQ ID NO: 6427 - DNA, 122 bp, Homo sapiens
  misc_feature (61)..(62): /note="This region represents a CpG dinucleotide"
  misc_feature (61)..(61): /note="Nucleotide may be methylated to form 5-methylcytosine"
agccattcatttgcttttgaaggtgatcttgtaatagagtgatcctgctcactagtaatgcggcccagtgagcatccaggaatctggttgagcaattcagtgtgccctccttttgggaaaaa

SEQ ID NO: 6428 - DNA, 122 bp, Homo sapiens
  misc_feature (61)..(62): /note="This region represents a CpG dinucleotide"
  misc_feature (61)..(61): /note="Nucleotide may be methylated to form 5-methylcytosine"
ctaatacaaaatcacagtagactagggtgggcctctaatccaatatgactggtgtccttgcgaaagagagaatttgtacacaaagagagacactcagatagggagaaagcccagtggggatt

SEQ ID NO: 6429 - DNA, 122 bp, Homo sapiens
  misc_feature (61)..(62): /note="This region represents a CpG dinucleotide"
  misc_feature (61)..(61): /note="Nucleotide may be methylated to form 5-methylcytosine"
aaaagtcagaagaatttaactctccagccgagatgttcaagctttctggcatttgactaacgttttatgctctcttgtctattgatcattgagccactgttgagatgaccagatgaccaggt

SEQ ID NO: 6430 - DNA, 122 bp, Homo sapiens
  misc_feature (61)..(62): /note="This region represents a CpG dinucleotide"
  misc_feature (61)..(61): /note="Nucleotide may be methylated to form 5-methylcytosine"
gcagactaactaggaaccccagtgacctgaactcgaggtgatgagttccctgggttttctcgttgtatcaaatattccagatcaggtactggagaagccagcagcctggaaatgccaatggg

SEQ ID NO: 6431 - DNA, 122 bp, Homo sapiens
  misc_feature (61)..(62): /note="This region represents a CpG dinucleotide"
  misc_feature (61)..(61): /note="Nucleotide may be methylated to form 5-methylcytosine"
cctctagtgctgatctaattaacaatctagacactgaaggattcttgtttccgtggaaaacgggtttgtctataacttgtccttggctatggcaggatacattgtttctgaaaacattacca

SEQ ID NO: 6432 - DNA, 122 bp, Homo sapiens
  misc_feature (61)..(62): /note="This region represents a CpG dinucleotide"
  misc_feature (61)..(61): /note="Nucleotide may be methylated to form 5-methylcytosine"
aggaaacaaatgaatcaacacttgaacacctgttaatcgctaataaagtgagtgtacacacgacttaactaattctcaaaataattactgtgtaataggtacattatatttattttgaaata

SEQ ID NO: 6433 - DNA, 122 bp, Homo sapiens
  misc_feature (61)..(62): /note="This region represents a CpG dinucleotide"
  misc_feature (61)..(61): /note="Nucleotide may be methylated to form 5-methylcytosine"
agggctggatggactcgtggagcctcagggctgggtagggaagctggcgaggccgagccccgccttgggcttctgggcgccctgacttcgctcccggaaccctcgggcctgggaggcgggag

SEQ ID NO: 6434 - DNA, 122 bp, Homo sapiens
  misc_feature (61)..(62): /note="This region represents a CpG dinucleotide"
  misc_feature (61)..(61): /note="Nucleotide may be methylated to form 5-methylcytosine"
gacccggaggggtgatggtggctcttttgccataaccgagagcagaagcggtagcggtagcgagagcaggaaaaaaatagggcgagggagggggcgccggagaacccgagggtcgctcaggc

SEQ ID NO: 6435 - DNA, 122 bp, Homo sapiens
  misc_feature (61)..(62): /note="This region represents a CpG dinucleotide"
  misc_feature (61)..(61): /note="Nucleotide may be methylated to form 5-methylcytosine"
ataaaaatcttttctgaatgcttccttccatgtacagacaaagaaagctgccatctggaacggccacatcagctggtccacatgtttccagggtagagaagtctgcatgccaggcatggtac

SEQ ID NO: 6436 - DNA, 122 bp, Homo sapiens
  misc_feature (61)..(62): /note="This region represents a CpG dinucleotide"
  misc_feature (61)..(61): /note="Nucleotide may be methylated to form 5-methylcytosine"
agaatgcacgttaagcctgggctccctgcgggtccctgcgcccctctccaacctcgtcaccgccctcctccggcaccgctgcaggccagcggctcctcgggcactcctgccctccttgcaag

SEQ ID NO: 6437 - DNA, 122 bp, Homo sapiens
  misc_feature (61)..(62): /note="This region represents a CpG dinucleotide"
  misc_feature (61)..(61): /note="Nucleotide may be methylated to form 5-methylcytosine"
ttctcgggaaagataaagttgctatatcacctgtctgcttatctttcagtcaactgttagcggtggataaaaagtccttgctattggttttatgtcattaccctgagggctgtatgtttcgt

SEQ ID NO: 6438 - DNA, 122 bp, Homo sapiens
  misc_feature (61)..(62): /note="This region represents a CpG dinucleotide"
  misc_feature (61)..(61): /note="Nucleotide may be methylated to form 5-methylcytosine"
cagttccttcttcctccagctagagcctcaggtgcccatagatagacagctctgagtacacgagagtaaaagggaagcaccatgtcctattcactttaccattccatagcatccttctttct

SEQ ID NO: 6439 - DNA, 122 bp, Homo sapiens
  misc_feature (61)..(62): /note="This region represents a CpG dinucleotide"
  misc_feature (61)..(61): /note="Nucleotide may be methylated to form 5-methylcytosine"
ggtgatgttcaagaagatcaagtcttttgaggtggtctttaacgaccctgaaaaggtgtacggcagtggcgagaaggtggctggccgggtgatagtggaggtgtgtgaagttactcgtgtca

SEQ ID NO: 6440 - DNA, 122 bp, Homo sapiens
  misc_feature (61)..(62): /note="This region represents a CpG dinucleotide"
  misc_feature (61)..(61): /note="Nucleotide may be methylated to form 5-methylcytosine"
ccaaggccatgcaataggaagtgggggatctggcttttgaatgtagggtctgtccaatgtcgagtacacatggacaccaagaaaggaaaaatagtgtctccctctgtacctcccctaagagg

SEQ ID NO: 6441 - DNA, 122 bp, Homo sapiens
  misc_feature (61)..(62): /note="This region represents a CpG dinucleotide"
  misc_feature (61)..(61): /note="Nucleotide may be methylated to form 5-methylcytosine"
tgccccttcttttcaacacattgtagtccatgtcaatagtcttgtttgacttcaaacacacgaatatgcatgttttcaaaggaaaagaggtgcccactaggcacatttatcatgggcaggtc

SEQ ID NO: 6442 - DNA, 122 bp, Homo sapiens
  misc_feature (61)..(62): /note="This region represents a CpG dinucleotide"
  misc_feature (61)..(61): /note="Nucleotide may be methylated to form 5-methylcytosine"
cctgctcctcaagctgagatctagttcttaattcttggttcatgccagccctgggatcatcgcctttgtcacatcattgctgaactctttctacttcagactgttcgagttcatgccttttc

SEQ ID NO: 6443 - DNA, 122 bp, Homo sapiens
  misc_feature (61)..(62): /note="This region represents a CpG dinucleotide"
  misc_feature (61)..(61): /note="Nucleotide may be methylated to form 5-methylcytosine"
cttattgactatagtgaagttattgaaattattttgatttttgtttttctttggctataacgaagatgtgttaaagtgtaaaaaggaagctgtgaaagagatatcaaaaataggaggaagag

SEQ ID NO: 6444 - DNA, 122 bp, Homo sapiens
  misc_feature (61)..(62): /note="This region represents a CpG dinucleotide"
  misc_feature (61)..(61): /note="Nucleotide may be methylated to form 5-methylcytosine"
ctgttggatatgatctcagtcattctagcaataacatggtcatttaaagttgtttttctacgtctagccaaaactggcctcctgtaactgccagctattggtgttagttctaattttgagaa

SEQ ID NO: 6445 - DNA, 122 bp, Homo sapiens
  misc_feature (61)..(62): /note="This region represents a CpG dinucleotide"
  misc_feature (61)..(61): /note="Nucleotide may be methylated to form 5-methylcytosine"
gttctgggccaaatgtatccaaattaaactgagggggatggaaataactctcccttgatacgccctggttgctgaaggtgggtttgtttttaagtagaataaaatgtacagctgaatataaa

SEQ ID NO: 6446 - DNA, 122 bp, Homo sapiens
  misc_feature (61)..(62): /note="This region represents a CpG dinucleotide"
  misc_feature (61)..(61): /note="Nucleotide may be methylated to form 5-methylcytosine"
gcagaccctgctggaggcacagcaggaagtgaccaggcacaggctgggcagtccttcttccgcccctgagtcactgccacatgcatgagaagggaactcagtgcaggctagacagaaaaggt

SEQ ID NO: 6447 - DNA, 122 bp, Homo sapiens
  misc_feature (61)..(62): /note="This region represents a CpG dinucleotide"
  misc_feature (61)..(61): /note="Nucleotide may be methylated to form 5-methylcytosine"
gttatctttgaattcccaggaggtggcccagtgcctggtgcataggaggagctgaagaaacggaagacttcttaaagggatactcgccattcactttgaagcacttctttgtacaacaaatt

SEQ ID NO: 6448 - DNA, 122 bp, Homo sapiens
  misc_feature (61)..(62): /note="This region represents a CpG dinucleotide"
  misc_feature (61)..(61): /note="Nucleotide may be methylated to form 5-methylcytosine"
gtaggatgcaaggtctcatggggaagagggtggagagcagaaaaaagaaacagattttaacgtcaggctgacaagagtttattgtacacatcagtggttagaataattacttaaaatttttc

SEQ ID NO: 6449 - DNA, 122 bp, Homo sapiens
  misc_feature (61)..(62): /note="This region represents a CpG dinucleotide"
  misc_feature (61)..(61): /note="Nucleotide may be methylated to form 5-methylcytosine"
tcccatccgaacctgcattaggactcaaatcctcggctgatcctggcagggctgggcctccgggcacagattagcacagaaaccccaggaactcaaagcacctgcaggcaaggatcactatg

SEQ ID NO: 6450 - DNA, 122 bp, Homo sapiens
  misc_feature (61)..(62): /note="This region represents a CpG dinucleotide"
  misc_feature (61)..(61): /note="Nucleotide may be methylated to form 5-methylcytosine"
cacattttaaatcacttccttaggctatagactctcagaagcaggactgactactgaaagcgtcttggtaaataccgacagattgctttcctgaaagagtgtgtggcacccacagtgaatgt

SEQ ID NO: 6451 - DNA, 122 bp, Homo sapiens
  misc_feature (61)..(62): /note="This region represents a CpG dinucleotide"
  misc_feature (61)..(61): /note="Nucleotide may be methylated to form 5-methylcytosine"
aaaaaagaaaggagtctttcagaagccacacaggcccaattttccatagtataatgaagtcgcaatgtcactgccatttctccacttctgcaggggaagccaagactgctttttgctcactg

SEQ ID NO: 6452 - DNA, 122 bp, Homo sapiens
  misc_feature (61)..(62): /note="This region represents a CpG dinucleotide"
  misc_feature (61)..(61): /note="Nucleotide may be methylated to form 5-methylcytosine"
tatcaataacacctgccatccagagcccagcacaaatggctggaacaaatatttatgaaacgggattattgaaaaataggcagaagtgtggtacaagacagaaaacccaaggtcctggagtc

SEQ ID NO: 6453 - DNA, 122 bp, Homo sapiens
  misc_feature (61)..(62): /note="This region represents a CpG dinucleotide"
  misc_feature (61)..(61): /note="Nucleotide may be methylated to form 5-methylcytosine"
aaatatattaagctaatcatgtggaagttaaccagaggccccttcacatttgtcatgtggcgtctgcagtcatttgctctgaatttttgccactttgccgcagttggggcccttgctaatga

SEQ ID NO: 6454 - DNA, 122 bp, Homo sapiens
  misc_feature (61)..(62): /note="This region represents a CpG dinucleotide"
  misc_feature (61)..(61): /note="Nucleotide may be methylated to form 5-methylcytosine"
atgctgaattccagggacaacctcggtgatgattagtgactcacgtctaaaaacagaatacgcagagctgaagggatgtgacttctgatgtgaggtcacaaaataccccactcctctctagg

SEQ ID NO: 6455 - DNA, 122 bp, Homo sapiens
  misc_feature (61)..(62): /note="This region represents a CpG dinucleotide"
  misc_feature (61)..(61): /note="Nucleotide may be methylated to form 5-methylcytosine"
tatgagaccctacattatatcctcatttttcctcttgacctgcaaagcctaagatattttcgtatctggcattttaagaaaaagtttgctgaactcttctctaaaggaaaaactgtgttctc

SEQ ID NO: 6456 - DNA, 122 bp, Homo sapiens
  misc_feature (61)..(62): /note="This region represents a CpG dinucleotide"
  misc_feature (61)..(61): /note="Nucleotide may be methylated to form 5-methylcytosine"
atatatttagtgtttcctaagaaggaaactgttgaatggaatctgctttggaaagatgtacgtatgtcatatgccaggaaaagtggattttgattaagaaatttggcatttgcaataaatcc

SEQ ID NO: 6457 - DNA, 122 bp, Homo sapiens
  misc_feature (61)..(62): /note="This region represents a CpG dinucleotide"
  misc_feature (61)..(61): /note="Nucleotide may be methylated to form 5-methylcytosine"
gacgctgcgacggggcgtcccgggggtgacactggcatgtgacgctgcgacggggcgtcccggggcagggccctgccaagggacccccaacaaacacgactgaaactcagcctggatacaaa

SEQ ID NO: 6458 - DNA, 122 bp, Homo sapiens
  misc_feature (61)..(62): /note="This region represents a CpG dinucleotide"
  misc_feature (61)..(61): /note="Nucleotide may be methylated to form 5-methylcytosine"
atggggagagagagtattacggcaaatacttaatgcatgcagggcttaaaacctagatgacggattgataggtgcagcaaatgaccatgacacatgtatacgtatgtaataaacctgcatgt

SEQ ID NO: 6459 - DNA, 122 bp, Homo sapiens
  misc_feature (61)..(62): /note="This region represents a CpG dinucleotide"
  misc_feature (61)..(61): /note="Nucleotide may be methylated to form 5-methylcytosine"
agtaaaaccaaagtaaaagagtgttactgatattaagagcaataacttcttagggcataacgagaggtttcctggatgtaaggtgataacgtggatttgggttgctagtttattttctgttt

SEQ ID NO: 6460 - DNA, 122 bp, Homo sapiens
  misc_feature (61)..(62): /note="This region represents a CpG dinucleotide"
  misc_feature (61)..(61): /note="Nucleotide may be methylated to form 5-methylcytosine"
ttgagcctgggagtttgagcagtcagcccaagcttgtactgcaaggtggctgcaaggccacgacccaaatctagagcctgaccttgacctcatgggttccatggagccgccctgctgatgcc

SEQ ID NO: 6461 - DNA, 122 bp, Homo sapiens
  misc_feature (61)..(62): /note="This region represents a CpG dinucleotide"
  misc_feature (61)..(61): /note="Nucleotide may be methylated to form 5-methylcytosine"
aagggtatcaaactgagatctagatgttccatttaagttgttgttcattttcattagccacgccaggggtgaaatgcttataacttaaccattctctgtagtaagaacatttgttttcaatg

SEQ ID NO: 6462 - DNA, 122 bp, Homo sapiens
  misc_feature (61)..(62): /note="This region represents a CpG dinucleotide"
  misc_feature (61)..(61): /note="Nucleotide may be methylated to form 5-methylcytosine"
tacaacgtttacactgatgtaacacttcaaaaataatttcccatgtattgtcatgtttgacgaacacagtgaatggattattacactaatgattccatataaatgaagcctctaccctcagc

SEQ ID NO: 6463 - DNA, 122 bp, Homo sapiens
  misc_feature (61)..(62): /note="This region represents a CpG dinucleotide"
  misc_feature (61)..(61): /note="Nucleotide may be methylated to form 5-methylcytosine"
tacataggaaataatctctgtcttcaagaaaggaattcttctgtatcacctaaaaaacaacgagtatgaagatgacaaagaaaaagaagatgcaaaacttgtagtagcatgaaactacttgc

SEQ ID NO: 6464 - DNA, 122 bp, Homo sapiens
  misc_feature (61)..(62): /note="This region represents a CpG dinucleotide"
  misc_feature (61)..(61): /note="Nucleotide may be methylated to form 5-methylcytosine"
gccccagcgcccacccagagcgaggggcctccgacttggccccggcctggcacaccgtcccggaggcccatcccggccgctcctccaggtggggcttcaccgccccccgccccgcccccgag

SEQ ID NO: 6465 - DNA, 122 bp, Homo sapiens
  misc_feature (61)..(62): /note="This region represents a CpG dinucleotide"
  misc_feature (61)..(61): /note="Nucleotide may be methylated to form 5-methylcytosine"
tgctcacagaccagcatcgctccccacctctccccgcccctgccgtggttgaggccgcctcgcctcggcaggaagcgcccagcctgatttcctacaagtgtttgtcagaaggagggggtttg

SEQ ID NO: 6466 - DNA, 122 bp, Homo sapiens
  misc_feature (61)..(62): /note="This region represents a CpG dinucleotide"
  misc_feature (61)..(61): /note="Nucleotide may be methylated to form 5-methylcytosine"
cttgttgcctaattttaagttacttaacttctctgtatctccattgcttcatctgtaaaacgggcgtaattacagaaccagcctcacaagggttgtgaaaatgtaatgagtaactacataaa

SEQ ID NO: 6467 - DNA, 122 bp, Homo sapiens
  misc_feature (61)..(62): /note="This region represents a CpG dinucleotide"
  misc_feature (61)..(61): /note="Nucleotide may be methylated to form 5-methylcytosine"
acctattaaagtgtgccttgtttcaagaatgcatgtaggtcacgaacaactgctaaagatcgatccttgccacttctttttgagggaattggagttaatacagaatatccaaagataacagg

SEQ ID NO: 6468 - DNA, 122 bp, Homo sapiens
  misc_feature (61)..(62): /note="This region represents a CpG dinucleotide"
  misc_feature (61)..(61): /note="Nucleotide may be methylated to form 5-methylcytosine"
ggatggcggggtccccacatccttacggagtgcttagtgtcttttcataggtgtggaagacgaggttgcctctgaagcttactgatctcagttgaatctggaatgatgtttagaatctccag

SEQ ID NO: 6469 - DNA, 122 bp, Homo sapiens
  misc_feature (61)..(62): /note="This region represents a CpG dinucleotide"
  misc_feature (61)..(61): /note="Nucleotide may be methylated to form 5-methylcytosine"
acagaggagctcttcttgctggaggactgcgacgagtgggaggaatgggacaggctggcccgggactggccggcattgtggtcaaactgcattaagcagaagatcaggtccgtcggcacgag

SEQ ID NO: 6470 - DNA, 122 bp, Homo sapiens
  misc_feature (61)..(62): /note="This region represents a CpG dinucleotide"
  misc_feature (61)..(61): /note="Nucleotide may be methylated to form 5-methylcytosine"
ctacatcgctgaactcctctaacagaaccacaagactgacaagcgaaaagctttgggacccgagggaaagaaatctatactatatttatcacataatttcctaaattctaatagattcccaa

SEQ ID NO: 6471 - DNA, 122 bp, Homo sapiens
  misc_feature (61)..(62): /note="This region represents a CpG dinucleotide"
  misc_feature (61)..(61): /note="Nucleotide may be methylated to form 5-methylcytosine"
gcaggtctggctcccaggtttgaagattaaattctaaacacgtcatttaaaatttagaaacgaggaaaggagattttaagtaatctggaagcactggctcctattgtctgccccaagtaata

SEQ ID NO: 6472 - DNA, 122 bp, Homo sapiens
  misc_feature (61)..(62): /note="This region represents a CpG dinucleotide"
  misc_feature (61)..(61): /note="Nucleotide may be methylated to form 5-methylcytosine"
caactgaactatggtggttaggttagtaattagatgcacagacaaaatcacaggaatctgcgtgagccttgtcctactggtaaaggagtcttgtgaggattaattgaaataactcgcaaaaa

SEQ ID NO: 6473 - DNA, 122 bp, Homo sapiens
  misc_feature (61)..(62): /note="This region represents a CpG dinucleotide"
  misc_feature (61)..(61): /note="Nucleotide may be methylated to form 5-methylcytosine"
acttcctcaaggtcagagctgtggcttgagggcagttttcttcctcattggaggaacttacggacaggaagtgagtgtccacgacatcacattcagtagggcagtcacccagctgttgatat

SEQ ID NO: 6474 - DNA, 122 bp, Homo sapiens
  misc_feature (61)..(62): /note="This region represents a CpG dinucleotide"
  misc_feature (61)..(61): /note="Nucleotide may be methylated to form 5-methylcytosine"
agatcaataagtgcaagtcagtaactaaaatgaccatattcttaccaaccaaggtcatagcgtcgtgtgtttacggtgtttttaaagatttcaaaatgccgggctaatgtgattatatgtga

SEQ ID NO: 6475 - DNA, 122 bp, Homo sapiens
  misc_feature (61)..(62): /note="This region represents a CpG dinucleotide"
  misc_feature (61)..(61): /note="Nucleotide may be methylated to form 5-methylcytosine"
accaagtcttctttctgcaagtagtcctgattgtaacaggcagatctaggcctgctgggccgcaggtgtggagagtcccatctattccggaaaggcagcttcccccaggcaggctgggcact

SEQ ID NO: 6476 - DNA, 122 bp, Homo sapiens
  misc_feature (61)..(62): /note="This region represents a CpG dinucleotide"
  misc_feature (61)..(61): /note="Nucleotide may be methylated to form 5-methylcytosine"
cccttcacttccctctctcttctttcgtatgtaaagatcagttacatttatcctttaagtcgtttgattttgcaacagtaaataacttctttcattactttgggacttctccaactctgttc

SEQ ID NO: 6477 - DNA, 122 bp, Homo sapiens
  misc_feature (61)..(62): /note="This region represents a CpG dinucleotide"
  misc_feature (61)..(61): /note="Nucleotide may be methylated to form 5-methylcytosine"
ttcctcctattctatttgttcagatagctgcttctagctgtctttcctgatacctcatcccgtgttcatttctctgcccccagttcggtctgtgatgctcttttattacactgcatgcactt

SEQ ID NO: 6478 - DNA, 122 bp, Homo sapiens
  misc_feature (61)..(62): /note="This region represents a CpG dinucleotide"
  misc_feature (61)..(61): /note="Nucleotide may be methylated to form 5-methylcytosine"
agcaaatcagtctcctggagcgactgagagccttgccatgttgctcccactggagacattcggcagggggaaggggttggtcgtaatccgggtttaatttctccagggcctccattatgaat

SEQ ID NO: 6479 - DNA, 122 bp, Homo sapiens
  misc_feature (61)..(62): /note="This region represents a CpG dinucleotide"
  misc_feature (61)..(61): /note="Nucleotide may be methylated to form 5-methylcytosine"
ctacataagggaaaaagaaacaaaccacaagtgaatcaacgacaaccctcaagaaccagacgctactactgacaaccattagggtttcttggctgcttgaatcaattcattcccagctctgc

SEQ ID NO: 6480 - DNA, 122 bp, Homo sapiens
  misc_feature (61)..(62): /note="This region represents a CpG dinucleotide"
  misc_feature (61)..(61): /note="Nucleotide may be methylated to form 5-methylcytosine"
agcaacttcctgggcatgcacattaagacataaaaatggcaaagtacgatgttccaggtacgtgccatcagaaaaaggaagaaagcctcagatgggcaagcgtctaactccctaaacgtgct

SEQ ID NO: 6481 - DNA, 122 bp, Homo sapiens
  misc_feature (61)..(62): /note="This region represents a CpG dinucleotide"
  misc_feature (61)..(61): /note="Nucleotide may be methylated to form 5-methylcytosine"
ccctgcatcctggtgggtccaggcactggcattgcccccttccggggattctggcaggagcggctgcatgacattgagagcaaaggtgaggctggggactaaaggactgcctgaagggagtc

SEQ ID NO: 6482 - DNA, 122 bp, Homo sapiens
  misc_feature (61)..(62): /note="This region represents a CpG dinucleotide"
  misc_feature (61)..(61): /note="Nucleotide may be methylated to form 5-methylcytosine"
agagaattccagggtgggtgtatcctgtgcattgtggaaatgctcagagcccctgggccccggggggaagatccacaggggagaggtgagccctgttgtcacctttgttggatgtccagcac

SEQ ID NO: 6483 - DNA, 122 bp, Homo sapiens
  misc_feature (61)..(62): /note="This region represents a CpG dinucleotide"
  misc_feature (61)..(61): /note="Nucleotide may be methylated to form 5-methylcytosine"
atatgtccaaagtcataggctcaattcgtagaagtattagctctaggcctccccactgcccgacttaatatttcattgccaatataacttttgacaaaaaatataagagaattttaactgaa

SEQ ID NO: 6484 - DNA, 122 bp, Homo sapiens
  misc_feature (61)..(62): /note="This region represents a CpG dinucleotide"
  misc_feature (61)..(61): /note="Nucleotide may be methylated to form 5-methylcytosine"
tacactgaacaccagtgaatcgtctttaaaagcacccatccttgcctgtcaggttgagaacgtgtgctcccagctgaatcatgagggtttatggtatactctctctattccctggccaagat

SEQ ID NO: 6485 - DNA, 122 bp, Homo sapiens
  misc_feature (61)..(62): /note="This region represents a CpG dinucleotide"
  misc_feature (61)..(61): /note="Nucleotide may be methylated to form 5-methylcytosine"
cagacgggcggggtggggaagacgcgcggggcccgcacgagggtgggtgtagccgaggggcggggccagtgggtgggtgggtgggcgtagccggggggggggggccctggtgggtgcggtcg

SEQ ID NO: 6486 - DNA, 122 bp, Homo sapiens
  misc_feature (61)..(62): /note="This region represents a CpG dinucleotide"
  misc_feature (61)..(61): /note="Nucleotide may be methylated to form 5-methylcytosine"
gtattgactgcccagcagtgtggatgggggccgggagtctgactaggcacctgtctggggcgaccgcctgagcagttggatacggcactagtccacctgggagccccggcctgcttggggtt

SEQ ID NO: 6487 - DNA, 122 bp, Homo sapiens
  misc_feature (61)..(62): /note="This region represents a CpG dinucleotide"
  misc_feature (61)..(61): /note="Nucleotide may be methylated to form 5-methylcytosine"
gaaggggcttgaggtgaggctgcaggtgctgagtacttggtcaagaagcttggcctcagccgccccgtccgggagggaggtgggggggtcggccccccgcccggccagccgccccgtccggg

SEQ ID NO: 6488 - DNA, 122 bp, Homo sapiens
  misc_feature (61)..(62): /note="This region represents a CpG dinucleotide"
  misc_feature (61)..(61): /note="Nucleotide may be methylated to form 5-methylcytosine"
cccaggaaccctggatggaggcatccactttggcttctctgatgacaagcacacttcctccggacacttcttctgagtgatggcccagaagcaagtgttcctcttgctggagggcagctgga

SEQ ID NO: 6489 - DNA, 122 bp, Homo sapiens
  misc_feature (61)..(62): /note="This region represents a CpG dinucleotide"
  misc_feature (61)..(61): /note="Nucleotide may be methylated to form 5-methylcytosine"
aaaatgaggaaatgacatgcctcagccaaaccacagctctggcttgtgctcgtggatttgcggaggaggcattgcagaggggatcgaagaataactagacttagtagaaatactaccagaat

SEQ ID NO: 6490 - DNA, 122 bp, Homo sapiens
  misc_feature (61)..(62): /note="This region represents a CpG dinucleotide"
  misc_feature (61)..(61): /note="Nucleotide may be methylated to form 5-methylcytosine"
tcacaacaaacatttctttctatcataatcagataaggaaaggagttccagaaaattaagcgacttgcccaagatcacacacctagaaagcccagggtggcaggcaaattgcagattggagt

SEQ ID NO: 6491 - DNA, 122 bp, Homo sapiens
  misc_feature (61)..(62): /note="This region represents a CpG dinucleotide"
  misc_feature (61)..(61): /note="Nucleotide may be methylated to form 5-methylcytosine"
ggttttgccatttatagaacccagccttctaaagagctgacaggctgatcagataaaagccgctgttgccaccaggacagcacatttaaatttttattgcaaacaccaggctccattaccct

SEQ ID NO: 6492 - DNA, 122 bp, Homo sapiens
  misc_feature (61)..(62): /note="This region represents a CpG dinucleotide"
  misc_feature (61)..(61): /note="Nucleotide may be methylated to form 5-methylcytosine"
aaaagaatgcccaacggaccagcacctgccccgtgcagtgcaccatgcctggacttcacacgctctagcttgccaagctctctaagcccatctgaggacaacactgtttacgatgtttattc

SEQ ID NO: 6493 - DNA, 122 bp, Homo sapiens
  misc_feature (61)..(62): /note="This region represents a CpG dinucleotide"
  misc_feature (61)..(61): /note="Nucleotide may be methylated to form 5-methylcytosine"
ccagcttcacgtctgattggatgaagtgtcacgcagggagcctctcagcaaacctacctgcgttgaaggtgactggatggtcccgttgcgtggcatctcgtcaaccaatcacagtgggcgtc

SEQ ID NO: 6494 - DNA, 122 bp, Homo sapiens
  misc_feature (61)..(62): /note="This region represents a CpG dinucleotide"
  misc_feature (61)..(61): /note="Nucleotide may be methylated to form 5-methylcytosine"
ttaagtagaagctcagttagttctctacacttcaatcactccgttccagttgcctggaaacgtgagttgcttctccaacagtgaactataaagcaccgaagattcctgcatatgtccctgca

SEQ ID NO: 6495 - DNA, 122 bp, Homo sapiens
  misc_feature (61)..(62): /note="This region represents a CpG dinucleotide"
  misc_feature (61)..(61): /note="Nucleotide may be methylated to form 5-methylcytosine"
tttttttttgagatatctttcagactaaccccacccagactcctgactcaccccatcctgcggcctcacccagaggtggactcagaactaaggaccattttccaaaaccttatgacttcttc

SEQ ID NO: 6496 - DNA, 122 bp, Homo sapiens
  misc_feature (61)..(62): /note="This region represents a CpG dinucleotide"
  misc_feature (61)..(61): /note="Nucleotide may be methylated to form 5-methylcytosine"
ggtgtggcatcgcagggagctggctgaggcttgagcatatttacctactgggaggaacctcgctggcagcagcaaggaggggtagagaatgctttcggcaggcagtgagggcattaaaggag

SEQ ID NO: 6497 - DNA, 122 bp, Homo sapiens
  misc_feature (61)..(62): /note="This region represents a CpG dinucleotide"
  misc_feature (61)..(61): /note="Nucleotide may be methylated to form 5-methylcytosine"
caatggacgttttgtccattactgagatatttcaaaagctctttctagtagcttgaaaaccgtatcttttctttgtagttttatctaacatcatatcttttcactgacaatgaagaatatag

SEQ ID NO: 6498 - DNA, 122 bp, Homo sapiens
  misc_feature (61)..(62): /note="This region represents a CpG dinucleotide"
  misc_feature (61)..(61): /note="Nucleotide may be methylated to form 5-methylcytosine"
attatattctcttgtaagtgctagttagtcacttcctccttctatgctccaaatactcatcgaatatggccatgttacaactctttctcattgttttgtgattcagttttctacctctgtat

SEQ ID NO: 6499 - DNA, 122 bp, Homo sapiens
  misc_feature (61)..(62): /note="This region represents a CpG dinucleotide"
  misc_feature (61)..(61): /note="Nucleotide may be methylated to form 5-methylcytosine"
cacagagagagggcaggggccagtgctgaggacagagtggtcaggagatcccaccccagacgcagggctgcagggaaggccaggctggctgggagttcagccagctccttctccagccactt

SEQ ID NO: 6500 - DNA, 122 bp, Homo sapiens
  misc_feature (61)..(62): /note="This region represents a CpG dinucleotide"
  misc_feature (61)..(61): /note="Nucleotide may be methylated to form 5-methylcytosine"
cagctaagccatatctcacaagccagagagagaccacaggctctgaggacactcaccttgcgtgctgggccacacccacagagccagcaggaccagcctccagaccatcctgcctcctgcag

SEQ ID NO: 6501 - DNA, 122 bp, Homo sapiens
  misc_feature (61)..(62): /note="This region represents a CpG dinucleotide"
  misc_feature (61)..(61): /note="Nucleotide may be methylated to form 5-methylcytosine"
cttaaggttaactccctgtagcaagcatgatatttctccttttgagttaatgtttggaagcgctatgtgtttagcagtgaagcctagcctgttactttatacgaaggaaatcacagagtttt

SEQ ID NO: 6502 - DNA, 122 bp, Homo sapiens
  misc_feature (61)..(62): /note="This region represents a CpG dinucleotide"
  misc_feature (61)..(61): /note="Nucleotide may be methylated to form 5-methylcytosine"
gccccctcaggcgtccagatttggggaggtcaagagaagctggtctgcccctctcctctccgcctgctgtcttctcaaactggatgggccagttccgatgccaagatccgccccccatcagt

SEQ ID NO: 6503 - DNA, 122 bp, Homo sapiens
  misc_feature (61)..(62): /note="This region represents a CpG dinucleotide"
  misc_feature (61)..(61): /note="Nucleotide may be methylated to form 5-methylcytosine"
attgcacccctccagacctctgccatggccagtttctcttattttcctcattgccctcctcgtcctatccccttgctccgaaggaaagtgggtgctctttctgtccccacggagtggggcag

SEQ ID NO: 6504 - DNA, 122 bp, Homo sapiens
  misc_feature (61)..(62): /note="This region represents a CpG dinucleotide"
  misc_feature (61)..(61): /note="Nucleotide may be methylated to form 5-methylcytosine"
gagatcagcaggggtcattttagaaacagctcaagatggctatctggggtgaggggaaggcgacctctgtgaaaagaggaaaaaggcatatctggacctgagttaccaacaacaggatattt

SEQ ID NO: 6505 - DNA, 122 bp, Homo sapiens
  misc_feature (61)..(62): /note="This region represents a CpG dinucleotide"
  misc_feature (61)..(61): /note="Nucleotide may be methylated to form 5-methylcytosine"
tgttttgtaattgtctatttacttgtctttgggcttcttaagctcaaagatatgctcaatcgtatctgaatcctcaacacctagtacaatgtctggtacacagtagctgtttcagtaaatgt

SEQ ID NO: 6506 - DNA, 122 bp, Homo sapiens
  misc_feature (61)..(62): /note="This region represents a CpG dinucleotide"
  misc_feature (61)..(61): /note="Nucleotide may be methylated to form 5-methylcytosine"
aatgttattagaataatactttttctatgaataatgtacaaacatacttccgagatattgcggggtcggttccagaccaataaagcctgtcacacgatttttttggtttcccagtgcatata

SEQ ID NO: 6507 - DNA, 122 bp, Homo sapiens
  misc_feature (61)..(62): /note="This region represents a CpG dinucleotide"
  misc_feature (61)..(61): /note="Nucleotide may be methylated to form 5-methylcytosine"
gtccagcggatccctttggtcacttagctgtctcggttgtcagatcaactgtcctgttgtcgcattgcttgtgtttgtcacccttatttcacttaataatgatcccaaagcacaaatagtgt

SEQ ID NO: 6508 - DNA, 122 bp, Homo sapiens
  misc_feature (61)..(62): /note="This region represents a CpG dinucleotide"
  misc_feature (61)..(61): /note="Nucleotide may be methylated to form 5-methylcytosine"
ccattttacatgtatacatgtttgtgtgattctttgatccatttcccctttacagattcacgcctggttacattccccatacttttaatcaatttttccctttcctggggaaaaagatgaaa

SEQ ID NO: 6509 - DNA, 122 bp, Homo sapiens
  misc_feature (61)..(62): /note="This region represents a CpG dinucleotide"
  misc_feature (61)..(61): /note="Nucleotide may be methylated to form 5-methylcytosine"
accatcctgcctcttgccagtttgagcaatccttgccaatgttatgtaaccaagcacaggcgttcaagaacaggcgagagggctgctcacataggttcttctacactgggaggcggggaatt

SEQ ID NO: 6510 - DNA, 122 bp, Homo sapiens
  misc_feature (61)..(62): /note="This region represents a CpG dinucleotide"
  misc_feature (61)..(61): /note="Nucleotide may be methylated to form 5-methylcytosine"
tctgatggcagtagtcaccccctgtcttagtgatgttgctgctttgttgcagcactcacacgttgtatattttttattttattgataatgtggcttttattccagctataatttatctaact

SEQ ID NO: 6511 - DNA, 122 bp, Homo sapiens
  misc_feature (61)..(62): /note="This region represents a CpG dinucleotide"
  misc_feature (61)..(61): /note="Nucleotide may be methylated to form 5-methylcytosine"
tcccagacagcccaatctttaggcagtgagaatttaaggtcattctgggtcaatcctgcacgttgcatcacagcatggttccagaacctggagctttagtcctattaccatggttcctagtt

SEQ ID NO: 6512 - DNA, 122 bp, Homo sapiens
  misc_feature (61)..(62): /note="This region represents a CpG dinucleotide"
  misc_feature (61)..(61): /note="Nucleotide may be methylated to form 5-methylcytosine"
atcatggtacccaggaggagcttgatggagtcctcttgccttggcttgtgcccacattggcgcggaacacctcgtgtgcagaaagcgtcggtgactctggatggagaaggcaggggcaaaca

SEQ ID NO: 6513 - DNA, 122 bp, Homo sapiens
  misc_feature (61)..(62): /note="This region represents a CpG dinucleotide"
  misc_feature (61)..(61): /note="Nucleotide may be methylated to form 5-methylcytosine"
tggcacgtaccagtccactttctgtctctctgaatctgacggctctaggtgccttgtttacggaatcccgcagggtgtgccctgttgtgactggcttatttcactcagcataatgacctcgg

SEQ ID NO: 6514 - DNA, 122 bp, Homo sapiens
  misc_feature (61)..(62): /note="This region represents a CpG dinucleotide"
  misc_feature (61)..(61): /note="Nucleotide may be methylated to form 5-methylcytosine"
gcgtatcaaacaaacggactgaagaaggtctccccaggactcgggtaaaagggcagccctcggtcctctcctccccgctgcccataaccgacccacagccgggaggcggcgtattcccaggc

SEQ ID NO: 6515 - DNA, 122 bp, Homo sapiens
  misc_feature (61)..(62): /note="This region represents a CpG dinucleotide"
  misc_feature (61)..(61): /note="Nucleotide may be methylated to form 5-methylcytosine"
tggtctccataaaagttctgcttcatcgtttggcatcttgagaatttaccctgatggctgcgtgagagaagctgtccaaccctattaatcacttctcgacccagtttgcaatgattacattt

SEQ ID NO: 6516 - DNA, 122 bp, Homo sapiens
  misc_feature (61)..(62): /note="This region represents a CpG dinucleotide"
  misc_feature (61)..(61): /note="Nucleotide may be methylated to form 5-methylcytosine"
ctttaataagaagatgccaacgtattttctatttcatatcacatgatatatgaacaagcacgagactaggcaatcacagccccttagagctcagcactggatcttgtttaggcagctttacg

SEQ ID NO: 6517 - DNA, 122 bp, Homo sapiens
  misc_feature (61)..(62): /note="This region represents a CpG dinucleotide"
  misc_feature (61)..(61): /note="Nucleotide may be methylated to form 5-methylcytosine"
gtggtttagtgtaattctattgtgaggcacagcatgctcacctagcaaaaccagagcacacgtttttaaagacaacgttaaaattccgaaatagttcagtccctttcttccatgttttagca

SEQ ID NO: 6518 - DNA, 122 bp, Homo sapiens
  misc_feature (61)..(62): /note="This region represents a CpG dinucleotide"
  misc_feature (61)..(61): /note="Nucleotide may be methylated to form 5-methylcytosine"
ctggttcttcttgtgccaaaaatgactgcatggtgtcatatgcacggcactccatttgatcgtttattcaccaagcctgtgttgagaagcttccctgtgttggatgctgctctctgatgccc

SEQ ID NO: 6519 - DNA, 122 bp, Homo sapiens
  misc_feature (61)..(62): /note="This region represents a CpG dinucleotide"
  misc_feature (61)..(61): /note="Nucleotide may be methylated to form 5-methylcytosine"
agtagggggaagtaggacggtgtgcctggagggcaggtgataggaggggagaaggaatctcggaaccccctgggcagtcccagccctgctgtttgttgatctggtctctcctttctagggat

SEQ ID NO: 6520 - DNA, 122 bp, Homo sapiens
  misc_feature (61)..(62): /note="This region represents a CpG dinucleotide"
  misc_feature (61)..(61): /note="Nucleotide may be methylated to form 5-methylcytosine"
gctacgaattggtttttggaagtgtgtcattcgcttcttccctggtgactagatgtatcacgtagtaagaagtaagaatgcaggaaacagaaagcttgtggtctggaacttccttgctatgc

SEQ ID NO: 6521 - DNA, 122 bp, Homo sapiens
  misc_feature (61)..(62): /note="This region represents a CpG dinucleotide"
  misc_feature (61)..(61): /note="Nucleotide may be methylated to form 5-methylcytosine"
gacaaaaggaaggggaggagtgaaaccaaacccagcttgcagcgcacttcgtgttcaccgcgggtcggcctgcgctcccacctgcttcctcgtgttgtttgctgcctattgacctagaatcc

SEQ ID NO: 6522 - DNA, 122 bp, Homo sapiens
  misc_feature (61)..(62): /note="This region represents a CpG dinucleotide"
  misc_feature (61)..(61): /note="Nucleotide may be methylated to form 5-methylcytosine"
ccgccggggaacctggggactgaggctggtcattaactgtggagtgtctcctttcctccccgcagcggtgcagaggggcaggatgccgccgacccagccgacccacgggcagttcgcgctga

SEQ ID NO: 6523 - DNA, 122 bp, Homo sapiens
  misc_feature (61)..(62): /note="This region represents a CpG dinucleotide"
  misc_feature (61)..(61): /note="Nucleotide may be methylated to form 5-methylcytosine"
tgagcaggtgcacagggtggatctgcggttggaccagcaagagtggtggtggaggcgtgacgtgaaggaatgcccgtgatgcccctgaccctgaccttggtcccgagaaggtcatctgagaa

SEQ ID NO: 6524 - DNA, 122 bp, Homo sapiens
  misc_feature (61)..(62): /note="This region represents a CpG dinucleotide"
  misc_feature (61)..(61): /note="Nucleotide may be methylated to form 5-methylcytosine"
atgagttcactgcattgtctacttatctgtttttgtaatttcaacttttatttttgatttcggggtgcacatgtgggtttgttccataggtatattgcatgatgctcatgtttggggtatga

SEQ ID NO: 6525 - DNA, 122 bp, Homo sapiens
  misc_feature (61)..(62): /note="This region represents a CpG dinucleotide"
  misc_feature (61)..(61): /note="Nucleotide may be methylated to form 5-methylcytosine"
cccacaggcagggttgtggggaagctacccacccagccacacctcccaaggatccctcagcggaaggctgcagcctgaggttccagcacccacacctagagaacaggagattcccacccatc

SEQ ID NO: 6526 - DNA, 122 bp, Homo sapiens
  misc_feature (61)..(62): /note="This region represents a CpG dinucleotide"
  misc_feature (61)..(61): /note="Nucleotide may be methylated to form 5-methylcytosine"
gaactggggacagctgtcctcctgggagagtaaggctggtcaggtgctgcctgggcacagcggagcagccatgccctgaacagtcccctgaggccccgaggcccctcaccatgtgggcacgg

SEQ ID NO: 6527 - DNA, 122 bp, Homo sapiens
  misc_feature (61)..(62): /note="This region represents a CpG dinucleotide"
  misc_feature (61)..(61): /note="Nucleotide may be methylated to form 5-methylcytosine"
tggactgtttctgaaggcctgcataaatgactgagtaattcactgcagttgccaggaagtcggagccacttgtgagctaacaatagtgaactttatctcccgccccatgctggaagttccag

SEQ ID NO: 6528 - DNA, 122 bp, Homo sapiens
  misc_feature (61)..(62): /note="This region represents a CpG dinucleotide"
  misc_feature (61)..(61): /note="Nucleotide may be methylated to form 5-methylcytosine"
tttgcagcgtgcccatgaactgtagatgactctgcttttgtcgtccaatcccaatgtgcacgccctgctttcccggggaggaggcagcgtgctgcaggcgaaacccattgggcacacagcat

SEQ ID NO: 6529 - DNA, 122 bp, Homo sapiens
  misc_feature (61)..(62): /note="This region represents a CpG dinucleotide"
  misc_feature (61)..(61): /note="Nucleotide may be methylated to form 5-methylcytosine"
aaaaggaaaagtcacacagctggtgagaaactaatgatgtcagcatgtaaaattatagtgcgtaaaatgtttggataggatgcagtatgagaaattgaaggctttgctctcaaacagagtaa

SEQ ID NO: 6530 - DNA, 122 bp, Homo sapiens
  misc_feature (61)..(62): /note="This region represents a CpG dinucleotide"
  misc_feature (61)..(61): /note="Nucleotide may be methylated to form 5-methylcytosine"
agtaatcatgcttcctatttgtatagctctttacaaatgatttggaggtatgttaactcacggttcagtggagaggataagatactcattctctgcaaataaggaattgaggctcagccagg

SEQ ID NO: 6531 - DNA, 122 bp, Homo sapiens
  misc_feature (61)..(62): /note="This region represents a CpG dinucleotide"
  misc_feature (61)..(61): /note="Nucleotide may be methylated to form 5-methylcytosine"
actatttttgatacttcacataagtggaatcatgcaatatttttctttttgtggctggttcgtttcacttaacacagtgtcctcagagttcatctgtgttgtagcatatgataggatttcct

SEQ ID NO: 6532 - DNA, 122 bp, Homo sapiens
  misc_feature (61)..(62): /note="This region represents a CpG dinucleotide"
  misc_feature (61)..(61): /note="Nucleotide may be methylated to form 5-methylcytosine"
taagtacattctatgatattcctacaatgacaaaatcacctaaccacacattcttcagaacgtatccccattcttacgcaacacattttttgttactgttgtcaaaaattaaaattaaataa

SEQ ID NO: 6533 - DNA, 122 bp, Homo sapiens
  misc_feature (61)..(62): /note="This region represents a CpG dinucleotide"
  misc_feature (61)..(61): /note="Nucleotide may be methylated to form 5-methylcytosine"
gtcaacagtgcctggaggtgttcttgactttggcagagccttcttctctacctccatactcgtccccatcttaaacctaacaagttgagaaggacacttagactgatttgaaagtttgcagt

SEQ ID NO: 6534 - DNA, 122 bp, Homo sapiens
  misc_feature (61)..(62): /note="This region represents a CpG dinucleotide"
  misc_feature (61)..(61): /note="Nucleotide may be methylated to form 5-methylcytosine"
ttaagaacaactgagttacagcaataaaactaattacatgtgcacgcctcagccaggaagcggatgatgtagccataattacacattcagacagggaagtaaaggcagtcccatttaggact

SEQ ID NO: 6535 - DNA, 122 bp, Homo sapiens
  misc_feature (61)..(62): /note="This region represents a CpG dinucleotide"
  misc_feature (61)..(61): /note="Nucleotide may be methylated to form 5-methylcytosine"
agtggtgggtcagtgtcaatttactattattattatttgtcatgccttgaccaggattctcgatctaattattgttccagctaacaagagaatttgatttctcagctaagaaccagaaaaca

SEQ ID NO: 6536 - DNA, 122 bp, Homo sapiens
  misc_feature (61)..(62): /note="This region represents a CpG dinucleotide"
  misc_feature (61)..(61): /note="Nucleotide may be methylated to form 5-methylcytosine"
aatccctctccctcagcaagctttccatcacggcccccccgtcagcatcttccctgatagcgttcttctctgtgtttattctggggcttcaggctcgcccaggaggaactgataaccgctgg

SEQ ID NO: 6537 - DNA, 122 bp, Homo sapiens
  misc_feature (61)..(62): /note="This region represents a CpG dinucleotide"
  misc_feature (61)..(61): /note="Nucleotide may be methylated to form 5-methylcytosine"
aaatgccttaactattcacataaagtatcttgcttcaaaaggaagtcagagctacagtcacgagtggtttacagaatattttctgatagtctttgcttcatttcagtatcgtgccatgattg

SEQ ID NO: 6538 - DNA, 122 bp, Homo sapiens
  misc_feature (61)..(62): /note="This region represents a CpG dinucleotide"
  misc_feature (61)..(61): /note="Nucleotide may be methylated to form 5-methylcytosine"
gcagtttcacttccagatctcaacaatcatcttgtgtagtgtgtttcagccctaactgcacgcaatctgcttgcaagaggcaatgaatatttgctgactgagaagtgcctgatatttctctt

SEQ ID NO: 6539 - DNA, 122 bp, Homo sapiens
  misc_feature (61)..(62): /note="This region represents a CpG dinucleotide"
  misc_feature (61)..(61): /note="Nucleotide may be methylated to form 5-methylcytosine"
gtgtaatatgattcagtcatgattgagtactagtgattcatgtggtgctgttaactagtgcgatgatcgacaggaactgcagtactttccttacaccctgggtcaactactctccaatgcat

SEQ ID NO: 6540 - DNA, 122 bp, Homo sapiens
  misc_feature (61)..(62): /note="This region represents a CpG dinucleotide"
  misc_feature (61)..(61): /note="Nucleotide may be methylated to form 5-methylcytosine"
gtgtggaagtcggggaccggggacgaggcatggatgggagcgctgtttgggcagcctcgccgcggccagggcttaaaaatggaagtcaggaaaatttagccaagggtcgggtcacaccttaa

SEQ ID NO: 6541 - DNA, 122 bp, Homo sapiens
  misc_feature (61)..(62): /note="This region represents a CpG dinucleotide"
  misc_feature (61)..(61): /note="Nucleotide may be methylated to form 5-methylcytosine"
tgtaaagttggttttcatacagcttccagaaagctctctgtcgacgttggtggagctaaacgtcttcaagctttatctcatcttgtttctgtgcttctcttgtgcccatgggtcattgttct

SEQ ID NO: 6542 - DNA, 122 bp, Homo sapiens
  misc_feature (61)..(62): /note="This region represents a CpG dinucleotide"
  misc_feature (61)..(61): /note="Nucleotide may be methylated to form 5-methylcytosine"
gagtagctggattacagctgtgagcctctgcgcccggccaagacagcacctcttaaactccggcctggagaggcagtggccctgggcacctccccgctgcacacaagccccatccactcatg

SEQ ID NO: 6543 - DNA, 122 bp, Homo sapiens
  misc_feature (61)..(62): /note="This region represents a CpG dinucleotide"
  misc_feature (61)..(61): /note="Nucleotide may be methylated to form 5-methylcytosine"
tttgagaacacacacgcatgttcagtagtctggtaccagaattaatttccactctgggttcgattctgcacacacatcaccctctggttgctttcctaacttggttctgattactggcctaa

SEQ ID NO: 6544 - DNA, 122 bp, Homo sapiens
  misc_feature (61)..(62): /note="This region represents a CpG dinucleotide"
  misc_feature (61)..(61): /note="Nucleotide may be methylated to form 5-methylcytosine"
aagttcaatctatgtggttaaatagggaagcagaccataagatgtatgcccagtggtgcacgttgctgactcgcaagctatgtgcaggctttagcatttagtgtggtgatgtgtgccctcta

SEQ ID NO: 6545 - DNA, 122 bp, Homo sapiens
  misc_feature (61)..(62): /note="This region represents a CpG dinucleotide"
  misc_feature (61)..(61): /note="Nucleotide may be methylated to form 5-methylcytosine"
acacacagggtagagaaaattcaaaccgataaggcatcaggcaaagcaaaactgctttaacgaaggtgagtcataatgccactcagggagatgaatcaggtgcccacatgtccaatcacttt

SEQ ID NO: 6546 - DNA, 122 bp, Homo sapiens
  misc_feature (61)..(62): /note="This region represents a CpG dinucleotide"
  misc_feature (61)..(61): /note="Nucleotide may be methylated to form 5-methylcytosine"
gctcaagttgtttcagccttggctattaggagctctttcaggctggttcttgtatcccctcgatatgctctcttccttttgttttttgagcacttcttacttcctggtactgtaaaatgctc

SEQ ID NO: 6547 - DNA, 122 bp, Homo sapiens
  misc_feature (61)..(62): /note="This region represents a CpG dinucleotide"
  misc_feature (61)..(61): /note="Nucleotide may be methylated to form 5-methylcytosine"
cttactctttctgctcgggaggctgaggttcctacatttccagctcatgctggactgtaccgtaagcaacaagtgaaatgagttcagtgatctcattctagtccttcgactcctgtccacat

SEQ ID NO: 6548 - DNA, 122 bp, Homo sapiens
  misc_feature (61)..(62): /note="This region represents a CpG dinucleotide"
  misc_feature (61)..(61): /note="Nucleotide may be methylated to form 5-methylcytosine"
ggagcggtgaccagctgtggtcaggagagcctcagcagggccagccccaggagtctttcccgattcttgctcactgctcacccacctgctgctgccatgaggcaccttggggccttcctctt

SEQ ID NO: 6549 - DNA, 122 bp, Homo sapiens
  misc_feature (61)..(62): /note="This region represents a CpG dinucleotide"
  misc_feature (61)..(61): /note="Nucleotide may be methylated to form 5-methylcytosine"
taagcgctcagcgggcagcagctctctcccgcctcttccttatggccactcgcactgactcgattcctggccgccccgtccctctgaccaccttgggctgtccctggcggcagctcctctcc

SEQ ID NO: 6550 - DNA, 122 bp, Homo sapiens
  misc_feature (61)..(62): /note="This region represents a CpG dinucleotide"
  misc_feature (61)..(61): /note="Nucleotide may be methylated to form 5-methylcytosine"
ccacatagaccctccctggagcagccgtggggtcccaggtcccagtgccaggttctgtgtcgctttgactcgggtgctgcgtgggtgtgcacacagtggcgtcacgggccacatgccgaggc

SEQ ID NO: 6551 - DNA, 122 bp, Homo sapiens
  misc_feature (61)..(62): /note="This region represents a CpG dinucleotide"
  misc_feature (61)..(61): /note="Nucleotide may be methylated to form 5-methylcytosine"
cagaagtaagtgcctgagtcatacctaggagtttggattgcaccacagagatgctgggagcgtacatcaaaagccttctcctcctccacagagattaggagagaaagagcacaggccgatgc

SEQ ID NO: 6552 - DNA, 122 bp, Homo sapiens
  misc_feature (61)..(62): /note="This region represents a CpG dinucleotide"
  misc_feature (61)..(61): /note="Nucleotide may be methylated to form 5-methylcytosine"
gcgtgcctggggtgcagcaagtgagaggagcatggctcaaggtgaggctgagcaaagacacggcagacagctcatgcagagcttttgtcaccttgctaattatttggcataatggaatctga

SEQ ID NO: 6553 - DNA, 122 bp, Homo sapiens
  misc_feature (61)..(62): /note="This region represents a CpG dinucleotide"
  misc_feature (61)..(61): /note="Nucleotide may be methylated to form 5-methylcytosine"
cttgatcaactttctaaacaatgcagtaacattttcccaaatgttttccattcattttaccgtgatattattctcttgtgtatgtttcataccttttttcctgttttaactcatacgtaaag

SEQ ID NO: 6554 - DNA, 122 bp, Homo sapiens
  misc_feature (61)..(62): /note="This region represents a CpG dinucleotide"
  misc_feature (61)..(61): /note="Nucleotide may be methylated to form 5-methylcytosine"
atcaaattcagtagaggtgtattgaatacacattttgctgaatgctgaaaatgttaaagtcgacagttggtcaacatggatgtcatgttatagaaacaacatgtaaaaacaaaaatctgaac

SEQ ID NO: 6555 - DNA, 122 bp, Homo sapiens
  misc_feature (61)..(62): /note="This region represents a CpG dinucleotide"
  misc_feature (61)..(61): /note="Nucleotide may be methylated to form 5-methylcytosine"
gcatcattgcaggcaggattctaatggccccacatctgctatttgtgagctgccactgatcgtgagctatgggtctgggctgccaagccagtctgcacctcagctcttctctctgccggcac

SEQ ID NO: 6556 - DNA, 122 bp, Homo sapiens
  misc_feature (61)..(62): /note="This region represents a CpG dinucleotide"
  misc_feature (61)..(61): /note="Nucleotide may be methylated to form 5-methylcytosine"
tgcctctgcagtgaaagccacagtcagccacagacacaggctcagaggccctctgactcacgagcaggcacaagaacatcactgcatagcccagaaaaggctgacaaaagccaaaaacccac

SEQ ID NO: 6557 - DNA, 122 bp, Homo sapiens
  misc_feature (61)..(62): /note="This region represents a CpG dinucleotide"
  misc_feature (61)..(61): /note="Nucleotide may be methylated to form 5-methylcytosine"
taagtcctgcctgagtaaaccctctgtattagtcagttgtcatactgctataaagaactacgtgaaactgggtaatttataaagaaaagaggtttttttgttttgttttgttttgttttctc

SEQ ID NO: 6558 - DNA, 122 bp, Homo sapiens
  misc_feature (61)..(62): /note="This region represents a CpG dinucleotide"
  misc_feature (61)..(61): /note="Nucleotide may be methylated to form 5-methylcytosine"
ccctgacacagagcattcagagcagaatttcaataagtcttttggagcagacattaaaaacggtttttggcatatggagctatattattcatggcagtcaaatacatccttggagccacttt

SEQ ID NO: 6559 - DNA, 122 bp, Homo sapiens
  misc_feature (61)..(62): /note="This region represents a CpG dinucleotide"
  misc_feature (61)..(61): /note="Nucleotide may be methylated to form 5-methylcytosine"
ttcaaattactaagaaatctttgttagaacttgtctcctggccttcacttggtacaaatgcgaccaagacaattaaagctataaataggtaaatgcaaatgcaggtactcacaagcagggcc

SEQ ID NO: 6560 - DNA, 122 bp, Homo sapiens
  misc_feature (61)..(62): /note="This region represents a CpG dinucleotide"
  misc_feature (61)..(61): /note="Nucleotide may be methylated to form 5-methylcytosine"
ctgtctggctccacccccagagactcaggtttcacggggctacagtggggctcgggcattcgcatgcttttaaaatatcatgatttttttaaattgaagtgaaattcacatagcataaaatt

SEQ ID NO: 6561 - DNA, 122 bp, Homo sapiens
  misc_feature (61)..(62): /note="This region represents a CpG dinucleotide"
  misc_feature (61)..(61): /note="Nucleotide may be methylated to form 5-methylcytosine"
ggatgttattttgggcttggcttatcgagtagtcaatggaaggattcccgtcccctctctcggcagcttagtaactgctgtagccagctcggctcccttccctgtgtatctgtgtcctgcta

SEQ ID NO: 6562 - DNA, 122 bp, Homo sapiens
  misc_feature (61)..(62): /note="This region represents a CpG dinucleotide"
  misc_feature (61)..(61): /note="Nucleotide may be methylated to form 5-methylcytosine"
tctttgaaatgcctgagtgggatttaaactgaaattcgagtgtcctttgtatttaaaacccggatatttttctttcacggttgacatttttcatgtaccgcaaaaatccgagactcctattt

SEQ ID NO: 6563 - DNA, 122 bp, Homo sapiens
  misc_feature (61)..(62): /note="This region represents a CpG dinucleotide"
  misc_feature (61)..(61): /note="Nucleotide may be methylated to form 5-methylcytosine"
ccttcccaggcctctgttcactcctgagcatgactggtacctaacaggtgctcagacagtcgctggatgcagatgagggaacggctgtggacattcagtccttcagaccacaaaaggacttt

SEQ ID NO: 6564 - DNA, 122 bp, Homo sapiens
  misc_feature (61)..(62): /note="This region represents a CpG dinucleotide"
  misc_feature (61)..(61): /note="Nucleotide may be methylated to form 5-methylcytosine"
ttcttggtgacctggatgtgagtacagtgtggcaggaagactgtggttagttgctgggggcggtagaggccagtcactggacacgatgtgccattacatagtcctaacaaccttgtgggctt

SEQ ID NO: 6565 - DNA, 122 bp, Homo sapiens
  misc_feature (61)..(62): /note="This region represents a CpG dinucleotide"
  misc_feature (61)..(61): /note="Nucleotide may be methylated to form 5-methylcytosine"
gcagtggaggaagacataaggccggggtgactcagggcagatcaaagctgtggggctcagcgagatgagatgaggaatgttttcctggggctgtggggccagggtggctctggaggcaagag

SEQ ID NO: 6566 - DNA, 122 bp, Homo sapiens
  misc_feature (61)..(62): /note="This region represents a CpG dinucleotide"
  misc_feature (61)..(61): /note="Nucleotide may be methylated to form 5-methylcytosine"
aagagtagtttatgtacctagctcacaacatagcttctttcaacaggtttcacggagacacgtgaaccacgttcttgtaagacaagagctattctacagggtatctagagtgcaaacccaaa

SEQ ID NO: 6567 - DNA, 122 bp, Homo sapiens
  misc_feature (61)..(62): /note="This region represents a CpG dinucleotide"
  misc_feature (61)..(61): /note="Nucleotide may be methylated to form 5-methylcytosine"
ttaaacccaatggagggcagcttccaggcacaggtcacggggaaattttggagggtagtacgtattgtattgcttgaaagttgttccatgaccaagaggttaaatgccttcttttgccaaga

SEQ ID NO: 6568 - DNA, 122 bp, Homo sapiens
  misc_feature (61)..(62): /note="This region represents a CpG dinucleotide"
  misc_feature (61)..(61): /note="Nucleotide may be methylated to form 5-methylcytosine"
tggcatgatcttggttcattgcgactaccacttcctgggttcataggattctcagcctcccgagtagttgggattacgggtgtctgccaccatgcccactgaattgctttgtgtttttttag

SEQ ID NO: 6569 - DNA, 122 bp, Homo sapiens
  misc_feature (61)..(62): /note="This region represents a CpG dinucleotide"
  misc_feature (61)..(61): /note="Nucleotide may be methylated to form 5-methylcytosine"
ccacaaggtgccaggactagcatggtgctaggttacctgtggggccctgtggtgtctccacggcattgcagtgacatgctcagtgaaggggacctgttaggcatttcatgagtggctcagag

SEQ ID NO: 6570 - DNA, 122 bp, Homo sapiens
  misc_feature (61)..(62): /note="This region represents a CpG dinucleotide"
  misc_feature (61)..(61): /note="Nucleotide may be methylated to form 5-methylcytosine"
tcaacgattacttcatgcacttctgcatctcttagcagcacagcaccctcaccttgtgaccgcccgaggggctcttcctacccactgcataaacttcatggcatcgtagcagagaaatagct

SEQ ID NO: 6571 - DNA, 122 bp, Homo sapiens
  misc_feature (61)..(62): /note="This region represents a CpG dinucleotide"
  misc_feature (61)..(61): /note="Nucleotide may be methylated to form 5-methylcytosine"
tgcaggcagtaagtgccaggacccgtgttggcgcccgaggatccctggcatgttcggggacggtgaggtcagtccagcagcggtgaggtcagtctagtagcagtgaggtcagtctagtagcg

SEQ ID NO: 6572 - DNA, 122 bp, Homo sapiens
  misc_feature (61)..(62): /note="This region represents a CpG dinucleotide"
  misc_feature (61)..(61): /note="Nucleotide may be methylated to form 5-methylcytosine"
aggcagcagaagcaggtgcttcctgatattaaccagagacggtcctggcacagatggggccgtgtgaatcacatgcagacatacgtatgcactcacgtgcgtgccattattttcatgtggag

SEQ ID NO: 6573 - DNA, 122 bp, Homo sapiens
  misc_feature (61)..(62): /note="This region represents a CpG dinucleotide"
  misc_feature (61)..(61): /note="Nucleotide may be methylated to form 5-methylcytosine"
cacaacacgtaggtgaaagcacaggcaccatgcggaggccccgagcaccccttagtggggcggggtggggggaggaagtcagtccataatgttgtagttacggatcttggggggcctctggc

SEQ ID NO: 6574 - DNA, 122 bp, Homo sapiens
  misc_feature (61)..(62): /note="This region represents a CpG dinucleotide"
  misc_feature (61)..(61): /note="Nucleotide may be methylated to form 5-methylcytosine"
ttcgcttttgtcgtgggggcggggtgggatagtggactcgtaccctaacaaagacccactcgaggctgcgtgtcggcccgggggcagcagggggcaggagaagctggctctagaccacgcgt

SEQ ID NO: 6575 - DNA, 122 bp, Homo sapiens
  misc_feature (61)..(62): /note="This region represents a CpG dinucleotide"
  misc_feature (61)..(61): /note="Nucleotide may be methylated to form 5-methylcytosine"
aggggtgttctgaggtccaaacgtactagcttagtaaggcattagacttgagtgtggaaccgggcatcctttgtgattggagccttctcagctacctggaagcttttacggtggggagcggc

SEQ ID NO: 6576 - DNA, 122 bp, Homo sapiens
  misc_feature (61)..(62): /note="This region represents a CpG dinucleotide"
  misc_feature (61)..(61): /note="Nucleotide may be methylated to form 5-methylcytosine"
tttagtggtttgacttcaaatacatttacaggtaatgtagagtggctgccttcgcaaagacgggagggaaaggctgtcagagagaggtacaaggagaacaataaccacagagatggtttatt

SEQ ID NO: 6577 - DNA, 122 bp, Homo sapiens
  misc_feature (61)..(62): /note="This region represents a CpG dinucleotide"
  misc_feature (61)..(61): /note="Nucleotide may be methylated to form 5-methylcytosine"
ccctgcccttcctgagaccccggaggaggtcgccagtggattcgggagcatgaaatgctccggtgatgccgcgtgggtctccctgagcacgagcttaccagggggccgcgctcaaagcagcc

SEQ ID NO: 6578 - DNA, 122 bp, Homo sapiens
  misc_feature (61)..(62): /note="This region represents a CpG dinucleotide"
  misc_feature (61)..(61): /note="Nucleotide may be methylated to form 5-methylcytosine"
ggcgccgtcacctgcagcgcgactgagcgcgggaggacgctctagccaccctagagacatcgaaactcttcccaggccttgcagcacccgtagcggattcggaagggctggggcctgagaag

SEQ ID NO: 6579 - DNA, 122 bp, Homo sapiens
  misc_feature (61)..(62): /note="This region represents a CpG dinucleotide"
  misc_feature (61)..(61): /note="Nucleotide may be methylated to form 5-methylcytosine"
aaagcttgcttcagattacagattgcagacttcttataatatgtccatttcaccaggccccgctctcagccccgggaaaggccactggaaaccacctcacatggtagggccttgcgggagcc

SEQ ID NO: 6580 - DNA, 122 bp, Homo sapiens
  misc_feature (61)..(62): /note="This region represents a CpG dinucleotide"
  misc_feature (61)..(61): /note="Nucleotide may be methylated to form 5-methylcytosine"
catgaccctctgttcttcctcaaagactcttacagactacactgcagtataactatattacgtaatgttattatctgattacctctttaagaccataaaacaaacacctcaaaggccaggcc

SEQ ID NO: 6581 - DNA, 122 bp, Homo sapiens
  misc_feature (61)..(62): /note="This region represents a CpG dinucleotide"
  misc_feature (61)..(61): /note="Nucleotide may be methylated to form 5-methylcytosine"
tgatcttgttcagatttccttccccagttttgcttatgttcatttctctctgtgtgtgcacgtgtgtgtgttatctatttctatacagctttatcatgtgtaggtttgtgtatctgccactg

SEQ ID NO: 6582 - DNA, 122 bp, Homo sapiens
  misc_feature (61)..(62): /note="This region represents a CpG dinucleotide"
  misc_feature (61)..(61): /note="Nucleotide may be methylated to form 5-methylcytosine"
aaaaatcacccccactcctgtttttttttctgaacacaaaggcagaatcatttgttcccacgcagtgcaagataacgaaccatacagaaaatcccgaagggcccaggcttagagtttgagtt

SEQ ID NO: 6583 - DNA, 122 bp, Homo sapiens
  misc_feature (61)..(62): /note="This region represents a CpG dinucleotide"
  misc_feature (61)..(61): /note="Nucleotide may be methylated to form 5-methylcytosine"
tgtcttaacctcctctgcccccagagtatcccagcacttcctacactgcccggcatctggcggctcaaagcacgcctactaattggtaaaaggaaatacaaagaaggtacatctgttatatc

SEQ ID NO: 6584 - DNA, 122 bp, Homo sapiens
  misc_feature (61)..(62): /note="This region represents a CpG dinucleotide"
  misc_feature (61)..(61): /note="Nucleotide may be methylated to form 5-methylcytosine"
cttgcatcctccgcatgctaatgaagctgtgatgtcagcaagtcagtcacggcatctggacgtcccatcctgctgcccagtgctgagatttatttacatgtaaattagccttgccttccaaa

SEQ ID NO: 6585 - DNA, 122 bp, Homo sapiens
  misc_feature (61)..(62): /note="This region represents a CpG dinucleotide"
  misc_feature (61)..(61): /note="Nucleotide may be methylated to form 5-methylcytosine"
ttattcttatcatttcctagtcatcattttatgtgaaatgcggcaataatggagaacttacgggaggcaaattcaatgttatgattgacattctgaaaggaccctatgtgggggaggagggg

SEQ ID NO: 6586 - DNA, 122 bp, Homo sapiens
  misc_feature (61)..(62): /note="This region represents a CpG dinucleotide"
  misc_feature (61)..(61): /note="Nucleotide may be methylated to form 5-methylcytosine"
aatatagtcaataaagtcaaagtttagctggctctacgtaactacaaagaaaaaaatcatcgcaatttaaaaaaatgtaactttcattaacgagcgcgccggaaatctcaggtatcaaagac

SEQ ID NO: 6587 - DNA, 122 bp, Homo sapiens
  misc_feature (61)..(62): /note="This region represents a CpG dinucleotide"
  misc_feature (61)..(61): /note="Nucleotide may be methylated to form 5-methylcytosine"
tttaatagaatctcttgtgcataacaaggcgagacatggagaacactttaaggaataacacgctgtgtgtttgctcattttcccaagtccctggagtgtaccacactgctttactcatgtcc

SEQ ID NO: 6588 - DNA, 122 bp, Homo sapiens
  misc_feature (61)..(62): /note="This region represents a CpG dinucleotide"
  misc_feature (61)..(61): /note="Nucleotide may be methylated to form 5-methylcytosine"
agacacaacataggtaggtaggtaggtaggtaggtagatactgctatccgtactattactcgatcattctatttttagtgcctgaaatctacctgatggtgtccagattttattgcttcttt

SEQ ID NO: 6589 - DNA, 122 bp, Homo sapiens
  misc_feature (61)..(62): /note="This region represents a CpG dinucleotide"
  misc_feature (61)..(61): /note="Nucleotide may be methylated to form 5-methylcytosine"
tttaatgtgtgtaaatatttggccaaaggtcacaaagtgtgtaagtgacatatttggtatcgatttctgggcctaagtgcagcaccattttttgctatagcatatttcaagggttttttgtt

SEQ ID NO: 6590 - DNA, 122 bp, Homo sapiens
  misc_feature (61)..(62): /note="This region represents a CpG dinucleotide"
  misc_feature (61)..(61): /note="Nucleotide may be methylated to form 5-methylcytosine"
tgcagacccagggaccaccaaacactccatcactgcagacccagggaccaccgaggactccgtcactgcagacccagggaccacagaagatgaaaccactaaacatggtgacactcaccttc

SEQ ID NO: 6591 - DNA, 122 bp, Homo sapiens
  misc_feature (61)..(62): /note="This region represents a CpG dinucleotide"
  misc_feature (61)..(61): /note="Nucleotide may be methylated to form 5-methylcytosine"
gcatgtgaagtgcttagcttggtatctggtgaaacagtcaataaaatcatccaggccaggcgtggtggctcacacctgtaattccagcactttgggaggccgagccgggtggatcacaaggt

SEQ ID NO: 6592 - DNA, 122 bp, Homo sapiens
  misc_feature (61)..(62): /note="This region represents a CpG dinucleotide"
  misc_feature (61)..(61): /note="Nucleotide may be methylated to form 5-methylcytosine"
tcatgtttttttaaacaatgtaatgaagttatgccttaggcaatagagaatataaaagatcgggtgaacaaaaccaccagcactaggattcttctagtacataagcaggttttaagtgtggt

SEQ ID NO: 6593 - DNA, 122 bp, Homo sapiens
  misc_feature (61)..(62): /note="This region represents a CpG dinucleotide"
  misc_feature (61)..(61): /note="Nucleotide may be methylated to form 5-methylcytosine"
tggacactgtataaaacggttgcgtgtctggaatgccgtcgttttgccccgcggccccatcgtacatgcgcatccccgcagccgccaccgtctccactttccgcagcagcgtccctgacgct

SEQ ID NO: 6594 - DNA, 122 bp, Homo sapiens
  misc_feature (61)..(62): /note="This region represents a CpG dinucleotide"
  misc_feature (61)..(61): /note="Nucleotide may be methylated to form 5-methylcytosine"
actcagttgatgtatgaagggcagttgccttggaaagtcaatccacctgcattggacttacgagagcaggaaacaaacgcctgttattttaagccattgagatattgggattgtcttttctg

SEQ ID NO: 6595 - DNA, 122 bp, Homo sapiens
  misc_feature (61)..(62): /note="This region represents a CpG dinucleotide"
  misc_feature (61)..(61): /note="Nucleotide may be methylated to form 5-methylcytosine"
tgcccccaacaccacttcagcttctgccagacagatggaactctccagcatgaaaatctgcgcagccattccaacaagcagggtaggtgaaacttgaattaaaattctcccctctttatttt

SEQ ID NO: 6596 - DNA, 122 bp, Homo sapiens
  misc_feature (61)..(62): /note="This region represents a CpG dinucleotide"
  misc_feature (61)..(61): /note="Nucleotide may be methylated to form 5-methylcytosine"
aagataatgtttgcttactccaaagtttaccttgggtcctgttcaacatactgatgaatccgatcctccaacccactcttttatgtaaatatggaaagcaaattctttcaagattatgaagt

SEQ ID NO: 6597 - DNA, 122 bp, Homo sapiens
  misc_feature (61)..(62): /note="This region represents a CpG dinucleotide"
  misc_feature (61)..(61): /note="Nucleotide may be methylated to form 5-methylcytosine"
aaggaagcagttcactggttctattgaccacagtttgccattcttgaacagggttgccaacgtctagtgtttgtattttgttgtctgactctacaagttccagaacttcttttataaatgat

SEQ ID NO: 6598 - DNA, 122 bp, Homo sapiens
  misc_feature (61)..(62): /note="This region represents a CpG dinucleotide"
  misc_feature (61)..(61): /note="Nucleotide may be methylated to form 5-methylcytosine"
tgagtttgcattagcagtggatgtctggtgtgtggcattgagaaggattccaagtacaaccgcaggctaaacaggaaagatcaatgagtaatatttgccttgggtgtagaatgggggaatga

SEQ ID NO: 6599 - DNA, 122 bp, Homo sapiens
  misc_feature (61)..(62): /note="This region represents a CpG dinucleotide"
  misc_feature (61)..(61): /note="Nucleotide may be methylated to form 5-methylcytosine"
ctttcagtcccatctcgtcttctgctcagtgaacagtttttgcactggcaggagccaggtcgaacagttccataaactgcttttttatggttctcagtagagcagaggtttgaaattagaga

SEQ ID NO: 6600 - DNA, 122 bp, Homo sapiens
  misc_feature (61)..(62): /note="This region represents a CpG dinucleotide"
  misc_feature (61)..(61): /note="Nucleotide may be methylated to form 5-methylcytosine"
accacaagcatccaggggaacacttgtttctgccttagggtgtagtggggcatgagcaagcggttggtaagtattttctgatgcccacaggtttctagtttcaactgaggcttttttttttt

SEQ ID NO: 6601 - DNA, 122 bp, Homo sapiens
  misc_feature (61)..(62): /note="This region represents a CpG dinucleotide"
  misc_feature (61)..(61): /note="Nucleotide may be methylated to form 5-methylcytosine"
aggcaacatggtgaaaccctgtctctactaaaaatacaaaaattagccgggcatggtggccgcctgcctgtgatcccagatattcaggtggctgaggcatgagaatcgcttgaacctgggag

SEQ ID NO: 6602 - DNA, 122 bp, Homo sapiens
  misc_feature (61)..(62): /note="This region represents a CpG dinucleotide"
  misc_feature (61)..(61): /note="Nucleotide may be methylated to form 5-methylcytosine"
gggcttaaaaataatcgatccagctctgagaaattgatgacacatgtgtctctggtgtgacgtgctcatgcagttgttactgggaggccaagggggaaggattagctatgaagtgataacat

SEQ ID NO: 6603 - DNA, 122 bp, Homo sapiens
  misc_feature (61)..(62): /note="This region represents a CpG dinucleotide"
  misc_feature (61)..(61): /note="Nucleotide may be methylated to form 5-methylcytosine"
aggttataaccacaggtttctttatatcgctcttcttggacttcctgatgtcaccctgtgcgtgtccacaatagctgctccaccctgcacaatcttgagaagtgcaaaagggaagcgttacc

SEQ ID NO: 6604 - DNA, 122 bp, Homo sapiens
  misc_feature (61)..(62): /note="This region represents a CpG dinucleotide"
  misc_feature (61)..(61): /note="Nucleotide may be methylated to form 5-methylcytosine"
cattattatgaaccttttggacctgatgaatgtacaatgtacctctcccatgagcgaggacgcaagggcagtcatcaccgctttatcacagagaaacgagtctttaagaactgggcacggac

SEQ ID NO: 6605 - DNA, 122 bp, Homo sapiens
  misc_feature (61)..(62): /note="This region represents a CpG dinucleotide"
  misc_feature (61)..(61): /note="Nucleotide may be methylated to form 5-methylcytosine"
gttcattggctgtaatctagaaccttctggttagctaccaccactcagatgtcgatgaagcgagctatgttgtgtaaataactcagttatcttctctatcgttactagtccttttcctctta

SEQ ID NO: 6606 - DNA, 122 bp, Homo sapiens
  misc_feature (61)..(62): /note="This region represents a CpG dinucleotide"
  misc_feature (61)..(61): /note="Nucleotide may be methylated to form 5-methylcytosine"
ccccctttcctctacttttgcagtgtggatgctcctttccctggttatacaattaaacctcgttgctcctatcctaaatatcataaaatctgaattagagaagtctggtcaatgaagtttta

SEQ ID NO: 6607 - DNA, 122 bp, Homo sapiens
  misc_feature (61)..(62): /note="This region represents a CpG dinucleotide"
  misc_feature (61)..(61): /note="Nucleotide may be methylated to form 5-methylcytosine"
atcaataaacagtcagttgctattctctctcaaggtatttctgtatctcaaattattaagcgttttattatttcattgttttaaagatttctataatggctgctatttgatagctgtatttg

SEQ ID NO: 6608 - DNA, 122 bp, Homo sapiens
  misc_feature (61)..(62): /note="This region represents a CpG dinucleotide"
  misc_feature (61)..(61): /note="Nucleotide may be methylated to form 5-methylcytosine"
tttttttttttttttagaatattaccctaactagcattcccttctctaccgcattatctgcgtggggatgttatctttggcctggtgcctggttgttaacatttccccatctctcccagtca

SEQ ID NO: 6609 - DNA, 122 bp, Homo sapiens
  misc_feature (61)..(62): /note="This region represents a CpG dinucleotide"
  misc_feature (61)..(61): /note="Nucleotide may be methylated to form 5-methylcytosine"
ctttttctaacaaagggataatactgctattcaccttgtaggcttattgtgacaatttaacgtaacctgctgagctcagttcctggtactcagcaagcactcaagtgttagctatgttctag

SEQ ID NO: 6610 - DNA, 122 bp, Homo sapiens
  misc_feature (61)..(62): /note="This region represents a CpG dinucleotide"
  misc_feature (61)..(61): /note="Nucleotide may be methylated to form 5-methylcytosine"
atttacaaacatactagactataaattctttgaggtgagggcctgtgtttatcctatccacgatggttataccctcagcatttggttcagctgacaatcttagtgggaatgtgctcaacatt

SEQ ID NO: 6611 - DNA, 122 bp, Homo sapiens
  misc_feature (61)..(62): /note="This region represents a CpG dinucleotide"
  misc_feature (61)..(61): /note="Nucleotide may be methylated to form 5-methylcytosine"
agttctgtggccagccatgacacaagtccctgtcataggtccctgggggcagctccggtgcgctctaagagctataaagattaatatattttaaacatgacacgtaggccttattactactc

SEQ ID NO: 6612 - DNA, 122 bp, Homo sapiens
  misc_feature (61)..(62): /note="This region represents a CpG dinucleotide"
  misc_feature (61)..(61): /note="Nucleotide may be methylated to form 5-methylcytosine"
ttgcccggttttcggccccgtgccccttattggataaagcttcaggccccgtccccagtccgtgagtgacagaagatgtgaccaaacactggactcaatgaggacggagtgacaacctaggc

SEQ ID NO: 6613 - DNA, 122 bp, Homo sapiens
  misc_feature (61)..(62): /note="This region represents a CpG dinucleotide"
  misc_feature (61)..(61): /note="Nucleotide may be methylated to form 5-methylcytosine"
caaaaataaacatataattgcaagtcacattcatttctctttctctgctattcctgctctcgccttccctcttctgcttctcctctctccgtcacagacacccacaacgtccctctgcagtc

SEQ ID NO: 6614 - DNA, 122 bp, Homo sapiens
  misc_feature (61)..(62): /note="This region represents a CpG dinucleotide"
  misc_feature (61)..(61): /note="Nucleotide may be methylated to form 5-methylcytosine"
cagacaactggacatgtagatccaggaaaagagccctcctctgagtcacgccaccctgtgcgtcatgggagataaagacttgtattaaacaagctggtggaaagaaacacatttatcgagga

SEQ ID NO: 6615 - DNA, 122 bp, Homo sapiens
  misc_feature (61)..(62): /note="This region represents a CpG dinucleotide"
  misc_feature (61)..(61): /note="Nucleotide may be methylated to form 5-methylcytosine"
gctcaggttagagacaagacatgtgagtttgagtcccaactgtggatatgtaaactgaggcgagccatttgactttgctcagcatcagtttcctgatctttaattgtttgattttgcagctc

SEQ ID NO: 6616 - DNA, 122 bp, Homo sapiens
  misc_feature (61)..(62): /note="This region represents a CpG dinucleotide"
  misc_feature (61)..(61): /note="Nucleotide may be methylated to form 5-methylcytosine"
caggtgccagccagctgaaggatggccacccctgtggtcaccaagacagcctggaagttgcgtgagtggttttcatttttctttatcaccccatttattctgttagcggcttgttgctggga

SEQ ID NO: 6617 - DNA, 122 bp, Homo sapiens
  misc_feature (61)..(62): /note="This region represents a CpG dinucleotide"
  misc_feature (61)..(61): /note="Nucleotide may be methylated to form 5-methylcytosine"
agcggtctgttacatgctaaatgcactgggtggttggtgcattatcgtagaagagtattgcgctgtgataggttcatgttacaagatttgcagatgaatcttgcttttgctgtataagttac

SEQ ID NO: 6618 - DNA, 122 bp, Homo sapiens
  misc_feature (61)..(62): /note="This region represents a CpG dinucleotide"
  misc_feature (61)..(61): /note="Nucleotide may be methylated to form 5-methylcytosine"
gaaacggagatgaaaccgaggagcccccaccctcttcacagggctaaagccagaaaccaccgtcccaggccacagcctgcctcatgtggccatgcctgctccctggcagtgcgcgtcctgca

SEQ ID NO: 6619 - DNA, 122 bp, Homo sapiens
  misc_feature (61)..(62): /note="This region represents a CpG dinucleotide"
  misc_feature (61)..(61): /note="Nucleotide may be methylated to form 5-methylcytosine"
taatcctcagaggcccttggggtcttttaagggcatctccctgtgagtaatatcttccctcgtggttgtttaaaagacaaagaaaatgtaacacgagaaaggaccttaatgcctcaacatgg

SEQ ID NO: 6620 - DNA, 122 bp, Homo sapiens
  misc_feature (61)..(62): /note="This region represents a CpG dinucleotide"
  misc_feature (61)..(61): /note="Nucleotide may be methylated to form 5-methylcytosine"
cccatattccctgaaagcaagaaacgaataatcattgcagaatctagacctccggaaactcgatttccactagatggcgcatccgatgcagatattggagtaaactcggcattgacctaccg

SEQ ID NO: 6621 - DNA, 122 bp, Homo sapiens
  misc_feature (61)..(62): /note="This region represents a CpG dinucleotide"
  misc_feature (61)..(61): /note="Nucleotide may be methylated to form 5-methylcytosine"
gcatgttttctctgaagggttaactaaaaaaaaaaaaaaaaaaagcctttgtgtctgtttcgagttctccagttgaaatactgtactcattgaactgcaagaaataaaacctgcaagtaggc

SEQ ID NO: 6622 - DNA, 122 bp, Homo sapiens
  misc_feature (61)..(62): /note="This region represents a CpG dinucleotide"
  misc_feature (61)..(61): /note="Nucleotide may be methylated to form 5-methylcytosine"
ctccctgttctgtctacacagccagagattgcacctccgagcctgtttccgtatctgtaacgtgagggctaaggcaggatctttctcagagatttgttgagacattaaatgaccttgttttt

SEQ ID NO: 6623 - DNA, 122 bp, Homo sapiens
  misc_feature (61)..(62): /note="This region represents a CpG dinucleotide"
  misc_feature (61)..(61): /note="Nucleotide may be methylated to form 5-methylcytosine"
ggaatcagaaaattctggagaggctgcttaggcaacagttttcaagtgtgacttgaaaggcgctgcatttcaaaaccccagggttatgagtgaagaggtgttgaatgaaaggctcttaattg

SEQ ID NO: 6624 - DNA, 122 bp, Homo sapiens
  misc_feature (61)..(62): /note="This region represents a CpG dinucleotide"
  misc_feature (61)..(61): /note="Nucleotide may be methylated to form 5-methylcytosine"
acattgagaggtacagaacaactggctttcttctctttgagatgctcagatggatcactgcgttcaggcaggcagatggatcactgcgttcaggcaggcagatggatcactgcattcaggca

SEQ ID NO: 6625 - DNA, 122 bp, Homo sapiens
  misc_feature (61)..(62): /note="This region represents a CpG dinucleotide"
  misc_feature (61)..(61): /note="Nucleotide may be methylated to form 5-methylcytosine"
agattcatcacttctcccttctgcccctctggactgcaccgtgtttattcatgtgtctgacgcctgagcaaagtggagttccttaaagtcccggagctgtgacactcatctccatagcagca

SEQ ID NO: 6626 - DNA, 122 bp, Homo sapiens
  misc_feature (61)..(62): /note="This region represents a CpG dinucleotide"
  misc_feature (61)..(61): /note="Nucleotide may be methylated to form 5-methylcytosine"
catctcggctcactgcaacctccctgcctgattctcctgcctcagcctgcccagtgcccgcgattgcacgcgccgccacacctgactggttttcgtatttttttggtggagacggggtttcg

SEQ ID NO: 6627 - DNA, 122 bp, Homo sapiens
  misc_feature (61)..(62): /note="This region represents a CpG dinucleotide"
  misc_feature (61)..(61): /note="Nucleotide may be methylated to form 5-methylcytosine"
attgggatttgacaaggactgtgaaaggctgactctccctgttctctttcatgctggcaccgggcagagtgtgggaactactgcctcaatagtaagtacagtaagtcctgtgagaaactgcg

SEQ ID NO: 6628 - DNA, 122 bp, Homo sapiens
  misc_feature (61)..(62): /note="This region represents a CpG dinucleotide"
  misc_feature (61)..(61): /note="Nucleotide may be methylated to form 5-methylcytosine"
tctgtccccttttttgtctgtgggactcctaaagcttcctggagtctctttaatcctcctcggttctttgcattttcctctgatctcagaacagtcatgcagcacctcttccttcttgacag

SEQ ID NO: 6629 - DNA, 122 bp, Homo sapiens
  misc_feature (61)..(62): /note="This region represents a CpG dinucleotide"
  misc_feature (61)..(61): /note="Nucleotide may be methylated to form 5-methylcytosine"
gggaggagctgcaggactgaggtacagaagccgcggaaggggcccaacgaggggcagagccggcacttgactccgtgggatcccacgagacagacaccctttcctcaccgcccgagtgagcg

SEQ ID NO: 6630 - DNA, 122 bp, Homo sapiens
  misc_feature (61)..(62): /note="This region represents a CpG dinucleotide"
  misc_feature (61)..(61): /note="Nucleotide may be methylated to form 5-methylcytosine"
attttcactgtaagtttattttgtttccttcaacattgactgtgttctttttcaaataaacggaccagaggcataataaatttctggttgctaggtgtggtttcctacaaacatgccacatc

SEQ ID NO: 6631 - DNA, 122 bp, Homo sapiens
  misc_feature (61)..(62): /note="This region represents a CpG dinucleotide"
  misc_feature (61)..(61): /note="Nucleotide may be methylated to form 5-methylcytosine"
cccggcggctcggcgcggtcttggtctgggtcggtggggttgggccgggagacccgcggccggcggggtccaggctgggggaggccgccgctgccaccaggtccccgaggtagggtaggaag

SEQ ID NO: 6632 - DNA, 122 bp, Homo sapiens
  misc_feature (61)..(62): /note="This region represents a CpG dinucleotide"
  misc_feature (61)..(61): /note="Nucleotide may be methylated to form 5-methylcytosine"
gaaggagggcctcacattcccatgaaaagcgtgcatggagaaaggtggatacaatagatacgtgagtgtagggcagaatgagaaatcctatatactgagttggaaaatatgaatgtccatgc

SEQ ID NO: 6633 - DNA, 122 bp, Homo sapiens
  misc_feature (61)..(62): /note="This region represents a CpG dinucleotide"
  misc_feature (61)..(61): /note="Nucleotide may be methylated to form 5-methylcytosine"
agtaaacatggccttgcccatgaaggggaagctggtcaaaagcattttgtcccggaaccccgcagccctccccatgctctgggcgcggagcacaaggattggtcactcctctttgcactgcg

SEQ ID NO: 6634 - DNA, 122 bp, Homo sapiens
  misc_feature (61)..(62): /note="This region represents a CpG dinucleotide"
  misc_feature (61)..(61): /note="Nucleotide may be methylated to form 5-methylcytosine"
tcttgtctctgcagtagctatgacctgcacataaacctgtttcctacactgtaaaattggcgtaaccaccattccctcccagtctttctctggagtcctaatgggaacagtgacggaatgaa

SEQ ID NO: 6635 - DNA, 122 bp, Homo sapiens
  misc_feature (61)..(62): /note="This region represents a CpG dinucleotide"
  misc_feature (61)..(61): /note="Nucleotide may be methylated to form 5-methylcytosine"
cctgctcgcagggatggggaacactcctggagcctgtggctgtggctgctccagagtccccgaccgtcaaaaacgcggcagcccagggtggaatgaccgggcttccacctcatccttgaaga

SEQ ID NO: 6636 - DNA, 122 bp, Homo sapiens
  misc_feature (61)..(62): /note="This region represents a CpG dinucleotide"
  misc_feature (61)..(61): /note="Nucleotide may be methylated to form 5-methylcytosine"
taattacatatacagtacaggttcatttacataaaacgctctcatactttgacaaggcaccgtagtcaaataacatacatatgtatatttatatacatgagatcaactgaataaacaaggtt

SEQ ID NO: 6637 - DNA, 122 bp, Homo sapiens
  misc_feature (61)..(62): /note="This region represents a CpG dinucleotide"
  misc_feature (61)..(61): /note="Nucleotide may be methylated to form 5-methylcytosine"
atggctctaatcccagcctaatcacttttctaaatgacatgttttaaactacatcagaggcgagacaatagaggtggatattttaaaagcttgttcttaaaccttgagggtgtacttgatcc

SEQ ID NO: 6638 - DNA, 122 bp, Homo sapiens
  misc_feature (61)..(62): /note="This region represents a CpG dinucleotide"
  misc_feature (61)..(61): /note="Nucleotide may be methylated to form 5-methylcytosine"
tgagtgttagcataatgactaatagtggggaacccaggcaggaagctctgctgtaccattcgtgccctgaggatatcccagccccatgttccgccaacagtggagacaacttatacacagca

SEQ ID NO: 6639 - DNA, 122 bp, Homo sapiens
  misc_feature (61)..(62): /note="This region represents a CpG dinucleotide"
  misc_feature (61)..(61): /note="Nucleotide may be methylated to form 5-methylcytosine"
tagtttgctgatccctgatcaatgttctttctcatttccaggtctcacattgcctttagtcgtcagttcctcggcctttctttgtctttcatgaccttgatatctgtgaacagtcctggtca

SEQ ID NO: 6640 - DNA, 122 bp, Homo sapiens
  misc_feature (61)..(62): /note="This region represents a CpG dinucleotide"
  misc_feature (61)..(61): /note="Nucleotide may be methylated to form 5-methylcytosine"
tgcagctccctaagtttgccaaaagttgcagcccaagttctgaagtttctaattttaattcgtcagcactaggatactgagtaagaccctgagctaatgtaatagctccctctgatagataa

SEQ ID NO: 6641 - DNA, 122 bp, Homo sapiens
  misc_feature (61)..(62): /note="This region represents a CpG dinucleotide"
  misc_feature (61)..(61): /note="Nucleotide may be methylated to form 5-methylcytosine"
ataaagtgcttttaggtccttagagatacatgatataaataagcggcttatgatcaagaacgataaatacataggtaaaaatagctctagcaaagatgaccttatggctctgagatgggcag

SEQ ID NO: 6642 - DNA, 122 bp, Homo sapiens
  misc_feature (61)..(62): /note="This region represents a CpG dinucleotide"
  misc_feature (61)..(61): /note="Nucleotide may be methylated to form 5-methylcytosine"
tttaaaaagatagtatgaggagttacctcatcccctttgcctaggttccctaaatgctaacgtcttaccttcccttagttcaatgatcaaaactgggaaattaactttgatgcagtattacg

SEQ ID NO: 6643 - DNA, 122 bp, Homo sapiens
  misc_feature (61)..(62): /note="This region represents a CpG dinucleotide"
  misc_feature (61)..(61): /note="Nucleotide may be methylated to form 5-methylcytosine"
gggttcttggcagagttcttcttgtctgtcaagatgctctcctgaaaaccagccaggctccgggggctgcaggaatcagatagatacttcccagctgtggacaaaatcctgtaatgaaagga

SEQ ID NO: 6644 - DNA, 122 bp, Homo sapiens
  misc_feature (61)..(62): /note="This region represents a CpG dinucleotide"
  misc_feature (61)..(61): /note="Nucleotide may be methylated to form 5-methylcytosine"
tttaatgaaattcagttttgggtcgtcactgagatctgcctttgttctcagctcagcaagcgtgttcagctattaaaaaaatttattaagatagcagcccagtaagtatatttagcttggaa

SEQ ID NO: 6645 - DNA, 122 bp, Homo sapiens
  misc_feature (61)..(62): /note="This region represents a CpG dinucleotide"
  misc_feature (61)..(61): /note="Nucleotide may be methylated to form 5-methylcytosine"
gagacaattgaaatccagaactgcaccacatgccattagttcataagagaacaatgctaacgatgactgtgaagatgtcagtgatgatgaagacaatgacaacaatcgtgtgatggctgtgg

SEQ ID NO: 6646 - DNA, 122 bp, Homo sapiens
  misc_feature (61)..(62): /note="This region represents a CpG dinucleotide"
  misc_feature (61)..(61): /note="Nucleotide may be methylated to form 5-methylcytosine"
ctgcctccagcctgttctggagacctccaagcaggagctggaggaggatccaccgagcgccgcagcccgtgcagcctcctcctgggagcctccaccctaaagacactctctgctccttctct

SEQ ID NO: 6647 - DNA, 122 bp, Homo sapiens
  misc_feature (61)..(62): /note="This region represents a CpG dinucleotide"
  misc_feature (61)..(61): /note="Nucleotide may be methylated to form 5-methylcytosine"
aagagaagactccaaggatgcatgcacacagaggaacagccatgtgagcatgcagcgagacgacagccatctgcatgcaaggagagaggcctcagagaaactagccctgcctgatgaagttg

SEQ ID NO: 6648 - DNA, 122 bp, Homo sapiens
  misc_feature (61)..(62): /note="This region represents a CpG dinucleotide"
  misc_feature (61)..(61): /note="Nucleotide may be methylated to form 5-methylcytosine"
gtgcgaaggggagctgatgggaacaagtacccagaactggtgctggagcgctctctggaccgcgaggaagaggctgttcaccacctcgttctcgtggcttctgatgggggtgacccagtgct

SEQ ID NO: 6649 - DNA, 122 bp, Homo sapiens
  misc_feature (61)..(62): /note="This region represents a CpG dinucleotide"
  misc_feature (61)..(61): /note="Nucleotide may be methylated to form 5-methylcytosine"
atcaggcaaaacacctcagtcatcttcagcctgcagagtgcgagttccgagttagattatcgtaattaatgggaagtgaattttatgaaagggcccagctgtgagggagaaaaaccctcaag

SEQ ID NO: 6650 - DNA, 122 bp, Homo sapiens
  misc_feature (61)..(62): /note="This region represents a CpG dinucleotide"
  misc_feature (61)..(61): /note="Nucleotide may be methylated to form 5-methylcytosine"
tgaacctaaaaatctatacactgtttccattgatctcaaggttatttagagatctgctcacgtcctcctacccctaaagactttttagtttttcatattctctttctcttcttctacctaga

SEQ ID NO: 6651 - DNA, 122 bp, Homo sapiens
  misc_feature (61)..(62): /note="This region represents a CpG dinucleotide"
  misc_feature (61)..(61): /note="Nucleotide may be methylated to form 5-methylcytosine"
ccacttaaacaccattctaatttacacctaaatcacacaagcatcctccttctaagaagacgtcataatcgttttgaaaatcattgcaaaattcccaaacttgaaaaaaaagaaaaaaaaaa

SEQ ID NO: 6652 - DNA, 122 bp, Homo sapiens
  misc_feature (61)..(62): /note="This region represents a CpG dinucleotide"
  misc_feature (61)..(61): /note="Nucleotide may be methylated to form 5-methylcytosine"
ttgtacagagccctatattttgatgtttgatttatgtattcatacttacatgataaaacacgtacatctgagaaatcatttgggaagaagaaggaggtgaagaagcatttaaattattttat

SEQ ID NO: 6653 - DNA, 122 bp, Homo sapiens
  misc_feature (61)..(62): /note="This region represents a CpG dinucleotide"
  misc_feature (61)..(61): /note="Nucleotide may be methylated to form 5-methylcytosine"
gtgtaacacactatcagtccatgattcatagtgtccatataaaaaagcaaaatggtcgggcgtggtagctcatgcctgtaatcccagcactttaggaggctgaggtgggtggactgcctgag

SEQ ID NO: 6654 - DNA, 122 bp, Homo sapiens
  misc_feature (61)..(62): /note="This region represents a CpG dinucleotide"
  misc_feature (61)..(61): /note="Nucleotide may be methylated to form 5-methylcytosine"
catgctaaaactggattagttatataaaataacagcttggtgttaataagagcatacttacgacatgcaggtaaacttctgagctgtttaagaggtgaatacagatacaatagcaatagtat

SEQ ID NO: 6655 - DNA, 122 bp, Homo sapiens
  misc_feature (61)..(62): /note="This region represents a CpG dinucleotide"
  misc_feature (61)..(61): /note="Nucleotide may be methylated to form 5-methylcytosine"
gtgggtccggccagccagggctgactttagtgacaacgagagtgcccggctggccacggacgccctcttggatgggggttctgaagcctactggcgggtgctcagccaggaaggcgaggtgg

SEQ ID NO: 6656 - DNA, 122 bp, Homo sapiens
  misc_feature (61)..(62): /note="This region represents a CpG dinucleotide"
  misc_feature (61)..(61): /note="Nucleotide may be methylated to form 5-methylcytosine"
gcacccggggaccggacacctgtaggcaggcagaggtgacacactttattgtctggccaccgtcgcctggtggcttctgtaacaaagtcagaataacccggcatgaagaagaaaaaaacaac

SEQ ID NO: 6657 - DNA, 122 bp, Homo sapiens
  misc_feature (61)..(62): /note="This region represents a CpG dinucleotide"
  misc_feature (61)..(61): /note="Nucleotide may be methylated to form 5-methylcytosine"
tctgctgaaattgacttcctctattgaaccctgagcaaaataaacttccctagcaggtttcgtgtaattgctgtacattttcgaggcaacgtcctatatgaccgacatttaccaaaatggat

SEQ ID NO: 6658 - DNA, 122 bp, Homo sapiens
  misc_feature (61)..(62): /note="This region represents a CpG dinucleotide"
  misc_feature (61)..(61): /note="Nucleotide may be methylated to form 5-methylcytosine"
acacaatcaggttgagcaaagcccccgagtgacagagaaaggatgagaagagatcagatacgctggaaataactttatgtaacacagaagacatgggcaatagtctggctagtgagtactac

SEQ ID NO: 6659 - DNA, 122 bp, Homo sapiens
  misc_feature (61)..(62): /note="This region represents a CpG dinucleotide"
  misc_feature (61)..(61): /note="Nucleotide may be methylated to form 5-methylcytosine"
tcatctcaggattttccatttctctgccttaatggaggctaagtactcacactatccctacgtttgtccaggaaagccaggacgccactcacctgcctgtcatctgggcttactgcctgcac

SEQ ID NO: 6660 - DNA, 122 bp, Homo sapiens
  misc_feature (61)..(62): /note="This region represents a CpG dinucleotide"
  misc_feature (61)..(61): /note="Nucleotide may be methylated to form 5-methylcytosine"
tctatgtagtttgtcctctgaataaaattgcaagatccagtgtttctcaaacccatgtgccgactctaacctgtttctatttcactttttcctgtcttgacaaatggcatcctcaaccacct

SEQ ID NO: 6661 - DNA, 122 bp, Homo sapiens
  misc_feature (61)..(62): /note="This region represents a CpG dinucleotide"
  misc_feature (61)..(61): /note="Nucleotide may be methylated to form 5-methylcytosine"
cctctatgaaatctagaacacagatcagggaaacagattctttctacagctcaggtgcagcgtgaagattatgtgattgggacaagtatgtgtttcatgttctcagggttcccactgggtag

SEQ ID NO: 6662 - DNA, 122 bp, Homo sapiens
  misc_feature (61)..(62): /note="This region represents a CpG dinucleotide"
  misc_feature (61)..(61): /note="Nucleotide may be methylated to form 5-methylcytosine"
aggctggagggcagaggcacattcacggctcactgcagccttgaccttctgggctcaagacgaagaaattggggattggcttaagtaattgcccaagtaattgcttaagtaattgcccaagt

SEQ ID NO: 6663 - DNA, 122 bp, Homo sapiens
  misc_feature (61)..(62): /note="This region represents a CpG dinucleotide"
  misc_feature (61)..(61): /note="Nucleotide may be methylated to form 5-methylcytosine"
tctcagaacacaagtgcccataggctcactacctcctggggaagcctggttctagtcaagcgttttgttcatggagcagatttttatttaaggaattcataactactggcctgggcacgtga

SEQ ID NO: 6664 - DNA, 122 bp, Homo sapiens
  misc_feature (61)..(62): /note="This region represents a CpG dinucleotide"
  misc_feature (61)..(61): /note="Nucleotide may be methylated to form 5-methylcytosine"
acggggacaccctccggagtataaacagccaggggcttgcacaggcacactcacattggacgtttgtgttcacagactccaggaggccagcttatactcagctgaggactgaagaaatctct

SEQ ID NO: 6665 - DNA, 122 bp, Homo sapiens
  misc_feature (61)..(62): /note="This region represents a CpG dinucleotide"
  misc_feature (61)..(61): /note="Nucleotide may be methylated to form 5-methylcytosine"
ttaccatgggtagtagggcataaatgtcctctaactgtcccagtttgcatggaactgtcacggtttcagcactggcagccccacgtcccaggaaactgctcagttcaaggcaaaccagaaca

SEQ ID NO: 6666 - DNA, 122 bp, Homo sapiens
  misc_feature (61)..(62): /note="This region represents a CpG dinucleotide"
  misc_feature (61)..(61): /note="Nucleotide may be methylated to form 5-methylcytosine"
agaaatgaattagagttccactgattctgatttcccaaatcaactggttaattgggggaacgtgagtagttagatcatctggcgagcatactgcaaacatgctgctcaacatcactaatgtt

SEQ ID NO: 6667 - DNA, 122 bp, Homo sapiens
  misc_feature (61)..(62): /note="This region represents a CpG dinucleotide"
  misc_feature (61)..(61): /note="Nucleotide may be methylated to form 5-methylcytosine"
ccacagcccctggcattatccctggggcaccacctcctgaccagtctctggacatgaagacggaggccctgttggaagtgggaaggctcccttcctcctccagcccttactgtctgctcagg

SEQ ID NO: 6668 - DNA, 122 bp, Homo sapiens
  misc_feature (61)..(62): /note="This region represents a CpG dinucleotide"
  misc_feature (61)..(61): /note="Nucleotide may be methylated to form 5-methylcytosine"
agaaactgctcctggggtcctccttgactgggtttgaggcagtgccctggcctgggagagcgggcactgggtcatcgggatccctttgtttatttgggtgttttctcttccctatatgaagc

SEQ ID NO: 6669 - DNA, 122 bp, Homo sapiens
  misc_feature (61)..(62): /note="This region represents a CpG dinucleotide"
  misc_feature (61)..(61): /note="Nucleotide may be methylated to form 5-methylcytosine"
ccaggaagcttcctttatttatttccaagcatctatataaagaaaggctgcacttgattgcgtaagcatgagccttttgttaggcagcgtggatgttgcaagtttaaaccccaactaggaaa

SEQ ID NO: 6670 - DNA, 122 bp, Homo sapiens
  misc_feature (61)..(62): /note="This region represents a CpG dinucleotide"
  misc_feature (61)..(61): /note="Nucleotide may be methylated to form 5-methylcytosine"
acccacactacaggaccctgctgttccagccgctttcctctgccactagctcaggaagagcgagggctgcctctcagacacagggagttcctgcaggctgacttcaggcactccagaatgag

SEQ ID NO: 6671 - DNA, 122 bp, Homo sapiens
  misc_feature (61)..(62): /note="This region represents a CpG dinucleotide"
  misc_feature (61)..(61): /note="Nucleotide may be methylated to form 5-methylcytosine"
attcaggtttgctcttggtgagcctcggaagctccaggcggccgctagagtctcagacgtcgccacccacagacctcttgggttttgccatcttggcataaacagcctcggtcccgacccct

SEQ ID NO: 6672 - DNA, 122 bp, Homo sapiens
  misc_feature (61)..(62): /note="This region represents a CpG dinucleotide"
  misc_feature (61)..(61): /note="Nucleotide may be methylated to form 5-methylcytosine"
tctgaaagtcacagatgcgggttttcctccaaatgatccacaagccagctttaataaacacgttggtgcaggtgagaaaatgacccctcagtctccctcccctcaaagaccagggcagccag

SEQ ID NO: 6673 - DNA, 122 bp, Homo sapiens
  misc_feature (61)..(62): /note="This region represents a CpG dinucleotide"
  misc_feature (61)..(61): /note="Nucleotide may be methylated to form 5-methylcytosine"
aatgagtgttcctttagtcgaaaaggaactatcatcaccattgactgagaggtggggtatcgtttaagggaatagagtgagtgctatagaacagagtaagcataaaagtataacaaaggaca

SEQ ID NO: 6674 - DNA, 122 bp, Homo sapiens
  misc_feature (61)..(62): /note="This region represents a CpG dinucleotide"
  misc_feature (61)..(61): /note="Nucleotide may be methylated to form 5-methylcytosine"
tgaaagaagcctcttaaataaatcctacacgctgtaatatttctgccacgaaacagaacacgtgtgccaggataactcccggcaaagaaagttacagaaaccaaaagagtaaacagaattct

SEQ ID NO: 6675 - DNA, 122 bp, Homo sapiens
  misc_feature (61)..(62): /note="This region represents a CpG dinucleotide"
  misc_feature (61)..(61): /note="Nucleotide may be methylated to form 5-methylcytosine"
cagcctctgggcctgggctcactagtggtagccagctgacctgagcatcagagtaagatgcgtgcctgaaaaattcccctggtggggccggtcatgaaaagtgccgttctcctcattcatgt

SEQ ID NO: 6676 - DNA, 122 bp, Homo sapiens
  misc_feature (61)..(62): /note="This region represents a CpG dinucleotide"
  misc_feature (61)..(61): /note="Nucleotide may be methylated to form 5-methylcytosine"
agctttggagctagatacagctatggagtcaggtagactgaactcacgtgtcagctcagccgtttttctagctttgtgaccttaggcaagttactcaacctctctgtttcctcatctattca

SEQ ID NO: 6677 - DNA, 122 bp, Homo sapiens
  misc_feature (61)..(62): /note="This region represents a CpG dinucleotide"
  misc_feature (61)..(61): /note="Nucleotide may be methylated to form 5-methylcytosine"
aataatttttaggaatatataaggtctcctgaggttggaggattgctcaagcccaagtgacggaggttgcagtgagccaagattgcaccattgtactccaaactgggtaacagtgagagcct

SEQ ID NO: 6678 - DNA, 122 bp, Homo sapiens
  misc_feature (61)..(62): /note="This region represents a CpG dinucleotide"
  misc_feature (61)..(61): /note="Nucleotide may be methylated to form 5-methylcytosine"
ggcaatcgtcagtaaaatcttcagtctctttagtgctcaagtaaatgtaaatttaaactgcgtaataacaccttttccacctattggattggtaaggattttcaaaattacccagagcaagg

SEQ ID NO: 6679 - DNA, 122 bp, Homo sapiens
  misc_feature (61)..(62): /note="This region represents a CpG dinucleotide"
  misc_feature (61)..(61): /note="Nucleotide may be methylated to form 5-methylcytosine"
cacacctgtaatcccagctatttgggtggctgagtcacagagttgcttgaacccaggattcggagtttgcagtgagctgagattgcaccactgcactccagcctgggcaacagagcaagact

SEQ ID NO: 6680 - DNA, 122 bp, Homo sapiens
  misc_feature (61)..(62): /note="This region represents a CpG dinucleotide"
  misc_feature (61)..(61): /note="Nucleotide may be methylated to form 5-methylcytosine"
tggagccatggatacccacccatgacccctatgggatggggaagttcacaaaaggcacaacgaaaaaaagtctttcaggtggggctggggaaggcagtgaaatgttagcatatgcttgcttc

SEQ ID NO: 6681 - DNA, 122 bp, Homo sapiens
  misc_feature (61)..(62): /note="This region represents a CpG dinucleotide"
  misc_feature (61)..(61): /note="Nucleotide may be methylated to form 5-methylcytosine"
cttaaaaaaaaatctcctccaggtaacagacatctactgctcttccccgatgtttacatacgtaaagtaggcactactggcaatgtatgcaagcaagagagggaataacacttcctcactct

SEQ ID NO: 6682 - DNA, 122 bp, Homo sapiens
  misc_feature (61)..(62): /note="This region represents a CpG dinucleotide"
  misc_feature (61)..(61): /note="Nucleotide may be methylated to form 5-methylcytosine"
ttcatagcacccctttgatttaggtgtaatttcttccacagatgaccaaactgaggctgacgagggttatgtaacacccccaagatcatccagctagtaagagtaatcagcttataatgcaa

SEQ ID NO: 6683 - DNA, 122 bp, Homo sapiens
  misc_feature (61)..(62): /note="This region represents a CpG dinucleotide"
  misc_feature (61)..(61): /note="Nucleotide may be methylated to form 5-methylcytosine"
gcaaactaacaatttacccttacagtatctggttacagccagcaatttttcacaaaaatacgcttatctcctcccttcccatcatttaaaagggcaagcagttaaggtcacagtttaaaagt

SEQ ID NO: 6684 - DNA, 122 bp, Homo sapiens
  misc_feature (61)..(62): /note="This region represents a CpG dinucleotide"
  misc_feature (61)..(61): /note="Nucleotide may be methylated to form 5-methylcytosine"
taggcaatgttggggaggtatttttgaactgagggaactttaaggctcagtagcactgggcgagtccctgcatgtcacaggaaccagaggcttcaaagtctccaaatggcttcaggatccag

SEQ ID NO: 6685 - DNA, 122 bp, Homo sapiens
  misc_feature (61)..(62): /note="This region represents a CpG dinucleotide"
  misc_feature (61)..(61): /note="Nucleotide may be methylated to form 5-methylcytosine"
ttcatttctaatgacacgccatgaatcatccaaccacagttacagcaacctgccccatgtcggtcacagagctgaagttagaacctgagccttctttgagcccggcatgtaaggaggaaaga

SEQ ID NO: 6686 - DNA, 122 bp, Homo sapiens
  misc_feature (61)..(62): /note="This region represents a CpG dinucleotide"
  misc_feature (61)..(61): /note="Nucleotide may be methylated to form 5-methylcytosine"
taagctttcacttctatagtaaaacttaatccgcacactttagagctcttaatagctccccgactttctccatcgccaacccaccattccaggatgcagggagcagccttactgggaggtgc

SEQ ID NO: 6687 - DNA, 122 bp, Homo sapiens
  misc_feature (61)..(62): /note="This region represents a CpG dinucleotide"
  misc_feature (61)..(61): /note="Nucleotide may be methylated to form 5-methylcytosine"
gtcccagctacttgggaggctgagttgggaagactgcttgaacccaggagttcaaagctgcgatgagctaagatcccaccccagtattctggcctgggtgacagagcaagatcctatctcaa

SEQ ID NO: 6688 - DNA, 122 bp, Homo sapiens
  misc_feature (61)..(62): /note="This region represents a CpG dinucleotide"
  misc_feature (61)..(61): /note="Nucleotide may be methylated to form 5-methylcytosine"
gtaagaggagatgacagtgtaaggacacagatgtgcagttgtctgtgggctgcaaagctgcgagctgaccaccaggctccagatagtcaggaaccctgaaggcctggaaatgcctgtctgca

SEQ ID NO: 6689 - DNA, 122 bp, Homo sapiens
  misc_feature (61)..(62): /note="This region represents a CpG dinucleotide"
  misc_feature (61)..(61): /note="Nucleotide may be methylated to form 5-methylcytosine"
taaccctaatattcccttgagattttaagtttcgtaatcataatttgtcctaagtgcccacggtgtgggagaagctgtgtatttatgtttctgcagatgatctatcctcctacttcacagca

SEQ ID NO: 6690 - DNA, 122 bp, Homo sapiens
  misc_feature (61)..(62): /note="This region represents a CpG dinucleotide"
  misc_feature (61)..(61): /note="Nucleotide may be methylated to form 5-methylcytosine"
gtgactgtagcattttacaaccccaccaataatgtatggaagtttctgtttctccacacccgttctagagggtttgtagtggtgtcttatttgtggctttaatttggtgtttttctaatgac

SEQ ID NO: 6691 - DNA, 122 bp, Homo sapiens
  misc_feature (61)..(62): /note="This region represents a CpG dinucleotide"
  misc_feature (61)..(61): /note="Nucleotide may be methylated to form 5-methylcytosine"
tagaatgtcttgtttttaaagaggatttgctggatgtgtaatactcttaagaaatgctgccgatgcttaccgttttgtggaatatcattctctgggtttttctagatactgctttatttctc

SEQ ID NO: 6692 - DNA, 122 bp, Homo sapiens
  misc_feature (61)..(62): /note="This region represents a CpG dinucleotide"
  misc_feature (61)..(61): /note="Nucleotide may be methylated to form 5-methylcytosine"
ctccagtgtctgtgatccctgaccttggattgaccaggaaagtgacctccaaaaatcctccggcattttcagtttctagatcaaaagggctgcgggttccaacctaccaagggcagcaaagg

SEQ ID NO: 6693 - DNA, 122 bp, Homo sapiens
  misc_feature (61)..(62): /note="This region represents a CpG dinucleotide"
  misc_feature (61)..(61): /note="Nucleotide may be methylated to form 5-methylcytosine"
catttgtatcatatgaaaccacttttttcttcttttttttcaaacagaatcttgctctctcgcccagggtggagtgcagtgatgtgatcttggctcagtgcaacctctgcctcccaggttta

SEQ ID NO: 6694 - DNA, 122 bp, Homo sapiens
  misc_feature (61)..(62): /note="This region represents a CpG dinucleotide"
  misc_feature (61)..(61): /note="Nucleotide may be methylated to form 5-methylcytosine"
ttgttacaagagatactggctgcttaaggcaggaggcttcttctgagccagggcagctcccgtacctccctgatgtggagcttaggctttgtacctggaactacgtcgtgtggggagacaac

SEQ ID NO: 6695 - DNA, 122 bp, Homo sapiens
  misc_feature (61)..(62): /note="This region represents a CpG dinucleotide"
  misc_feature (61)..(61): /note="Nucleotide may be methylated to form 5-methylcytosine"
gccaatgccttactgtctattccatgggcttcactaggctgtcccttcttaggcctagaacgaaatgggcttcacaaatagaaattattctaatccaaataatatttccccaagtctcacag

SEQ ID NO: 6696 - DNA, 122 bp, Homo sapiens
  misc_feature (61)..(62): /note="This region represents a CpG dinucleotide"
  misc_feature (61)..(61): /note="Nucleotide may be methylated to form 5-methylcytosine"
agggagtggacaggttgcgtgcgtgctctgacggtgggatccagaccccctcctctcctgcgttgaaggtgccaccgggcctcatccccagccacatcacatcctgagcctcttacaggcag

SEQ ID NO: 6697 - DNA, 122 bp, Homo sapiens
  misc_feature (61)..(62): /note="This region represents a CpG dinucleotide"
  misc_feature (61)..(61): /note="Nucleotide may be methylated to form 5-methylcytosine"
gtgaaacagagcacaagttaagaacatgagcttccaagtcagacagtgctgtgctcaactcgcagctctgccctctctaagagagggatgtcagcaggtaacttaacctccaacagccatgg

SEQ ID NO: 6698 - DNA, 122 bp, Homo sapiens
  misc_feature (61)..(62): /note="This region represents a CpG dinucleotide"
  misc_feature (61)..(61): /note="Nucleotide may be methylated to form 5-methylcytosine"
taactggacaagcccagggttgacaccatttccgaggagagttgcaaaaaaaacacaacacgaccttggctgtttttcatgaccaaactccagagggccacaagatggagccacttctccct

SEQ ID NO: 6699 - DNA, 122 bp, Homo sapiens
  misc_feature (61)..(62): /note="This region represents a CpG dinucleotide"
  misc_feature (61)..(61): /note="Nucleotide may be methylated to form 5-methylcytosine"
ccagtacgcagggttccacatagagagcctggctgcatgatcttgaggtcacctaactcccgggcctcccttgtgtgtctggacagggagagaggggaggattggcttcaggagaggcgaga

SEQ ID NO: 6700 - DNA, 122 bp, Homo sapiens
  misc_feature (61)..(62): /note="This region represents a CpG dinucleotide"
  misc_feature (61)..(61): /note="Nucleotide may be methylated to form 5-methylcytosine"
gagatgagccgggaagtacacggacagggagtgtggggcgcggccagggaggttccgcgacgccctcccctgactctcactccagctaccagggtgagggtgaatcaccccgattttagctt

SEQ ID NO: 6701 - DNA, 122 bp, Homo sapiens
  misc_feature (61)..(62): /note="This region represents a CpG dinucleotide"
  misc_feature (61)..(61): /note="Nucleotide may be methylated to form 5-methylcytosine"
ctgtttaaccagagcagacccaactctgcggggcaaagttgacataccagcataattacacgtaggttgaccatatttactgcaactctgttgttctagaatttcaaacaaaggctgaaccc

SEQ ID NO: 6702 - DNA, 122 bp, Homo sapiens
  misc_feature (61)..(62): /note="This region represents a CpG dinucleotide"
  misc_feature (61)..(61): /note="Nucleotide may be methylated to form 5-methylcytosine"
tgggtttcacctgacaaccctcgtacacagaattagtcattctgatgcataatgcaatgccgcatagccgcctctcacggaataccattaggctctttctcccggcctgacgtccttattcc

SEQ ID NO: 6703 - DNA, 122 bp, Homo sapiens
  misc_feature (61)..(62): /note="This region represents a CpG dinucleotide"
  misc_feature (61)..(61): /note="Nucleotide may be methylated to form 5-methylcytosine"
atgaaccttcctgcctttgcccacaaggctgagaactcttcaaagtgagactgtgtcttacgcattttcacttcctccatcatttgacacaggacctggcacgtaacagatgtttaataaat

SEQ ID NO: 6704 - DNA, 122 bp, Homo sapiens
  misc_feature (61)..(62): /note="This region represents a CpG dinucleotide"
  misc_feature (61)..(61): /note="Nucleotide may be methylated to form 5-methylcytosine"
gatgaaaattaatttgaccagttccttttaaatttttagaatgtggctcctggaatgttacgtgtgactcacaccgtgtctccactgaatggcgctattctaagagaagctgctcaaaatag

SEQ ID NO: 6705 - DNA, 122 bp, Homo sapiens
  misc_feature (61)..(62): /note="This region represents a CpG dinucleotide"
  misc_feature (61)..(61): /note="Nucleotide may be methylated to form 5-methylcytosine"
cacatcctcacacacattcatacgtgtgctctcacgctcacatgcacacattcacacacacgttcacacacccatgcgctcacatgcccatgcacgcacacgtttgcacatgtacgcgcaca

SEQ ID NO: 6706 - DNA, 122 bp, Homo sapiens
  misc_feature (61)..(62): /note="This region represents a CpG dinucleotide"
  misc_feature (61)..(61): /note="Nucleotide may be methylated to form 5-methylcytosine"
tacaattcccatccagccccaggagtctggggcaagtagtcttgtaaggtcagtggcctgcggggacgcagtgagcgccgaatttgcctggggcaggggaaatgcgctctggcccatgtctg

SEQ ID NO: 6707 - DNA, 122 bp, Homo sapiens
  misc_feature (61)..(62): /note="This region represents a CpG dinucleotide"
  misc_feature (61)..(61): /note="Nucleotide may be methylated to form 5-methylcytosine"
taacaagcaaccccttccgcagagagtggcaggagaggcctttcctgcatccggcacaggcgcggcggtctccccccatccggcacaggcgcggcggtctcccccttctccggcacaggcgc

SEQ ID NO: 6708 - DNA, 122 bp, Homo sapiens
  misc_feature (61)..(62): /note="This region represents a CpG dinucleotide"
  misc_feature (61)..(61): /note="Nucleotide may be methylated to form 5-methylcytosine"
gattcatcatagaagcctatggttttatttattgacactgctgtacaattttccctgtagcgagtcatagttggctgaagagagagtcgaagattaagtacaaaactttctaaacatcctgt

SEQ ID NO: 6709 - DNA, 122 bp, Homo sapiens
  misc_feature (61)..(62): /note="This region represents a CpG dinucleotide"
  misc_feature (61)..(61): /note="Nucleotide may be methylated to form 5-methylcytosine"
cggcccggcaggacccaggcgtggacttttaagggcatttttctaccttgtggtggctgccgggtttatcagcgtgcagttgaaccggacgtgatattcctgagccctcccgggacgcctgc

SEQ ID NO: 6710 - DNA, 122 bp, Homo sapiens
  misc_feature (61)..(62): /note="This region represents a CpG dinucleotide"
  misc_feature (61)..(61): /note="Nucleotide may be methylated to form 5-methylcytosine"
ttcccctttctcctgtgttccttttgttttccagacacaccacaaaccaaaaggagcacacggcctgtgttatacaaaatgtgcaggaacagggtttcttgagtggctacccaattaagtaa

SEQ ID NO: 6711 - DNA, 122 bp, Homo sapiens
  misc_feature (61)..(62): /note="This region represents a CpG dinucleotide"
  misc_feature (61)..(61): /note="Nucleotide may be methylated to form 5-methylcytosine"
cgcagcggggcggggcgggcctggagctgcacccgcttctgggtggacgcacttggcgagcggcgcgggatgcagacggctgcgaggcgctgggcacaggtcagacgtcagtacccgcaggg

SEQ ID NO: 6712 - DNA, 122 bp, Homo sapiens
  misc_feature (61)..(62): /note="This region represents a CpG dinucleotide"
  misc_feature (61)..(61): /note="Nucleotide may be methylated to form 5-methylcytosine"
aatcgaaaatctgatgatcccaactgggtacttttcaggaaaggagtgggaggctgcccacgtatattgagtgcctacagtgtgccagggcacctgctgatttatttgattcatacagtagc

SEQ ID NO: 6713 - DNA, 122 bp, Homo sapiens
  misc_feature (61)..(62): /note="This region represents a CpG dinucleotide"
  misc_feature (61)..(61): /note="Nucleotide may be methylated to form 5-methylcytosine"
cttcagatagtgctttgaaagtcctgttgactcattcatcttggagatccgatcaccctgcggttgatctcccacacttactaggctgagaagaaagacgtctcttctctccttacaaaccc

SEQ ID NO: 6714 - DNA, 122 bp, Homo sapiens
  misc_feature (61)..(62): /note="This region represents a CpG dinucleotide"
  misc_feature (61)..(61): /note="Nucleotide may be methylated to form 5-methylcytosine"
agaggttacaaaactggcacagttccgaaaaatggaggttctatgatgcaaacacaggctcgactaacttcaacatgtgtaatataatcattatgctgtattataattcataattacattta

SEQ ID NO: 6715 - DNA, 122 bp, Homo sapiens
  misc_feature (61)..(62): /note="This region represents a CpG dinucleotide"
  misc_feature (61)..(61): /note="Nucleotide may be methylated to form 5-methylcytosine"
attgtcatattgtttaagggttgttaaggaaaaaaaaaaaaaaaaaaagaaaatctctaacgcagctcctgcaaaagtatctgcttcaggaagttgaaggatacactgagccagtgcacaga

SEQ ID NO: 6716 - DNA, 122 bp, Homo sapiens
  misc_feature (61)..(62): /note="This region represents a CpG dinucleotide"
  misc_feature (61)..(61): /note="Nucleotide may be methylated to form 5-methylcytosine"
aaagcaaccattaaattaataaaccagaggtaagcagagtcacttggtgagatctccatacggagtcactgagtgaagcaggaaagtgtatgatgtaatccagtctttgcacaacaatgatt

SEQ ID NO: 6717 - DNA, 122 bp, Homo sapiens
  misc_feature (61)..(62): /note="This region represents a CpG dinucleotide"
  misc_feature (61)..(61): /note="Nucleotide may be methylated to form 5-methylcytosine"
gagacaccctgcccagccctcactattgtttttatttgcattcctttctttttatttttgcgaggcagaagttgcttctctttctgtggttaaaaaccaacaacctgcatttcctcctctgt

SEQ ID NO: 6718 - DNA, 122 bp, Homo sapiens
  misc_feature (61)..(62): /note="This region represents a CpG dinucleotide"
  misc_feature (61)..(61): /note="Nucleotide may be methylated to form 5-methylcytosine"
atggagtaaagcctggaaacgtagattttgccaacactgccactcctactcagatgaagacgatgtctcagtcaaccaggatttggatgagaaacaacaaaggagaagagcacagaacaatt

SEQ ID NO: 6719 - DNA, 122 bp, Homo sapiens
  misc_feature (61)..(62): /note="This region represents a CpG dinucleotide"
  misc_feature (61)..(61): /note="Nucleotide may be methylated to form 5-methylcytosine"
actatgcttcacatcaaaatattcccaaataatagtatagcatcactacactttttacctcgtgtgtattgttcaactctataatctagcttgcttcctcatccctccactgacactatgct

SEQ ID NO: 6720 - DNA, 122 bp, Homo sapiens
  misc_feature (61)..(62): /note="This region represents a CpG dinucleotide"
  misc_feature (61)..(61): /note="Nucleotide may be methylated to form 5-methylcytosine"
caattaatcaacagagttgtctttgaccctctacctatcaaaaactactgacagcacaaacgattcagaactttcaacagagaaaagagaaggtgtccagaaaggaatgctgagtctctctt

SEQ ID NO: 6721 - DNA, 122 bp, Homo sapiens
  misc_feature (61)..(62): /note="This region represents a CpG dinucleotide"
  misc_feature (61)..(61): /note="Nucleotide may be methylated to form 5-methylcytosine"
catcagaaagctggtgctgccccaggtctgtgtctgcctggccagaggacatgggcatcccggagctcatgtgcccagcagcctagacaatgcctctagctcctgtggtcatacggcactga

SEQ ID NO: 6722 - DNA, 122 bp, Homo sapiens
  misc_feature (61)..(62): /note="This region represents a CpG dinucleotide"
  misc_feature (61)..(61): /note="Nucleotide may be methylated to form 5-methylcytosine"
ttgcccaactggtctcaagtgatcctcctgtgtcatcctcccagagtgttaggattaaggcgtgagccatggctgctagcctgccattcttttcttagcacttgaaaaatcttgtgctgctt

SEQ ID NO: 6723 - DNA, 122 bp, Homo sapiens
  misc_feature (61)..(62): /note="This region represents a CpG dinucleotide"
  misc_feature (61)..(61): /note="Nucleotide may be methylated to form 5-methylcytosine"
tcccgtgttgtaatctccaaattgctgagtgtgggagaaccaaaaggctcccatctaacacggtgacaaggctaagacagcaagagtcagtgtttatttgtttggcatttagcaattatttt

SEQ ID NO: 6724 - DNA, 122 bp, Homo sapiens
  misc_feature (61)..(62): /note="This region represents a CpG dinucleotide"
  misc_feature (61)..(61): /note="Nucleotide may be methylated to form 5-methylcytosine"
gccccttctcactctgagcagctggtgcctgggattttaggctgtcacgacgattccacccggccagggcaggcccgaaccagccggaggccacaggagaaccaatgagcctggctggactc

SEQ ID NO: 6725 - DNA, 122 bp, Homo sapiens
  misc_feature (61)..(62): /note="This region represents a CpG dinucleotide"
  misc_feature (61)..(61): /note="Nucleotide may be methylated to form 5-methylcytosine"
cccaaaacaaaagacaaaacaaaacaaaacaaaacaaaaaaagacatgggcagagggagacgggcaaagacacacacacaggagaaagcaatgtgaagacagaggcagagactggaatgatg

SEQ ID NO: 6726 - DNA, 122 bp, Homo sapiens
  misc_feature (61)..(62): /note="This region represents a CpG dinucleotide"
  misc_feature (61)..(61): /note="Nucleotide may be methylated to form 5-methylcytosine"
tgagccgtgtagatgtacagctgaaaaaacgctttctaaaatcattaccagtccaggcaccggtggcttatgcctgtaatcccagtgcaggaggatcagttgaggccaggagcctgaggcca

SEQ ID NO: 6727 - DNA, 122 bp, Homo sapiens
  misc_feature (61)..(62): /note="This region represents a CpG dinucleotide"
  misc_feature (61)..(61): /note="Nucleotide may be methylated to form 5-methylcytosine"
atgactagacacattatcttgagcaaattgcttcacttccttgtgttactgagaataaaacgaaataatgcttgctaagtttttagtccagtgcatggcaggagatggctgttctatgaaat

SEQ ID NO: 6728 - DNA, 122 bp, Homo sapiens
  misc_feature (61)..(62): /note="This region represents a CpG dinucleotide"
  misc_feature (61)..(61): /note="Nucleotide may be methylated to form 5-methylcytosine"
ggtctggaagtgccaggaagctgcctttaacatcctaccgcagggaacaatgaaggttgccggccagggagaagacaggatagagacgtctctgggtttgcagccagcctgcctcagatggg

SEQ ID NO: 6729 - DNA, 122 bp, Homo sapiens
  misc_feature (61)..(62): /note="This region represents a CpG dinucleotide"
  misc_feature (61)..(61): /note="Nucleotide may be methylated to form 5-methylcytosine"
ccacagaggggaatcaacaaaccagaaacaaacctccctctttacttagcacctagcatgcgtccaacaccgggttacaaaaatacttttgatctgtttacgcttccaacaaccctatgagg

SEQ ID NO: 6730 - DNA, 122 bp, Homo sapiens
  misc_feature (61)..(62): /note="This region represents a CpG dinucleotide"
  misc_feature (61)..(61): /note="Nucleotide may be methylated to form 5-methylcytosine"
aactgccgacctctttccactccaattgcggtgaaagtgatatctctctgcctgagctgacgttggcctttaggcttctctaattatttccttaggttagatttctagaaacacagggtcaa

SEQ ID NO: 6731 - DNA, 122 bp, Homo sapiens
  misc_feature (61)..(62): /note="This region represents a CpG dinucleotide"
  misc_feature (61)..(61): /note="Nucleotide may be methylated to form 5-methylcytosine"
gttgagtggcaagatagagctaattttagtgtaagtcctcaattcctttaactcttactgcggtggagaccatcatttcaaactgtagcgagatgatcgcaaccaaccctgctgtgtgtttt

SEQ ID NO: 6732 - DNA, 122 bp, Homo sapiens
  misc_feature (61)..(62): /note="This region represents a CpG dinucleotide"
  misc_feature (61)..(61): /note="Nucleotide may be methylated to form 5-methylcytosine"
ctgctctaataactagtacattgactctaggcttagattattcaccactgaataaataaacgtatttattcagcagtggggaacttacagcaatgatggggacagatacagtccctgatgtc

SEQ ID NO: 6733 - DNA, 122 bp, Homo sapiens
  misc_feature (61)..(62): /note="This region represents a CpG dinucleotide"
  misc_feature (61)..(61): /note="Nucleotide may be methylated to form 5-methylcytosine"
tctctaagggagaagtcactcagagaaaaaaaaagacattgggctccatctgacccaattcgatttagaagagaattgaagaccatctcccctgtgtctgccacccaccctcccccttttga

SEQ ID NO: 6734 - DNA, 122 bp, Homo sapiens
  misc_feature (61)..(62): /note="This region represents a CpG dinucleotide"
  misc_feature (61)..(61): /note="Nucleotide may be methylated to form 5-methylcytosine"
ggctgattatctttcagggaacagataataggcaaataggtcagtcagagaggggtgaggcgaatgtcaattaagctcttggtgggggctggggtgaggctgaatccaagtctttagagcca

SEQ ID NO: 6735 - DNA, 122 bp, Homo sapiens
  misc_feature (61)..(62): /note="This region represents a CpG dinucleotide"
  misc_feature (61)..(61): /note="Nucleotide may be methylated to form 5-methylcytosine"
atcttttttcatttaaatatctctctcccatttcctagtctgtatatctttatttcccttcgttccttattcatgttaggttagttttagtgtttagctgttcttagtattgatacagctga

SEQ ID NO: 6736 - DNA, 122 bp, Homo sapiens
  misc_feature (61)..(62): /note="This region represents a CpG dinucleotide"
  misc_feature (61)..(61): /note="Nucleotide may be methylated to form 5-methylcytosine"
ataaattttagtgtctattaaaattcacacaatgaatatacatgtgctattctaaacatgcggaatacagcagtgaacagaatggacaaacatcctggcttgtggtgcctgtgttctagtga

SEQ ID NO: 6737 - DNA, 122 bp, Homo sapiens
  misc_feature (61)..(62): /note="This region represents a CpG dinucleotide"
  misc_feature (61)..(61): /note="Nucleotide may be methylated to form 5-methylcytosine"
gcagtctgatggcttctgtgcatttggccaattacacagtgaattaccccagtgagtattcgtcaaatgcaccatccgctctcactcctcaactcccttgttagaattcttgttaatttgac

SEQ ID NO: 6738 - DNA, 122 bp, Homo sapiens
  misc_feature (61)..(62): /note="This region represents a CpG dinucleotide"
  misc_feature (61)..(61): /note="Nucleotide may be methylated to form 5-methylcytosine"
ctttctcatatatagtcatgccccctacctaggtcaccaatctttagcacatttaagcaacgtgatagtgccctggtagacttattgcagcctagtaaattaggacccaactcttctagatt

SEQ ID NO: 6739 - DNA, 122 bp, Homo sapiens
  misc_feature (61)..(62): /note="This region represents a CpG dinucleotide"
  misc_feature (61)..(61): /note="Nucleotide may be methylated to form 5-methylcytosine"
acacatactttagagcaagggagctttcgttagtgcttgagtcatagtcacaaagttacgcggcttgccctaatattgcgtcatgaaggcagacctaccaggcaaacgttagtacagataat

SEQ ID NO: 6740 - DNA, 122 bp, Homo sapiens
  misc_feature (61)..(62): /note="This region represents a CpG dinucleotide"
  misc_feature (61)..(61): /note="Nucleotide may be methylated to form 5-methylcytosine"
taaggactatgctgggtaagtgattgcaaggaggaagtgctttaatgcccctcaggtactcgactaaggccagggaggagagaagaattctgatgtgttacatattcttttcctgcaaagtc

SEQ ID NO: 6741 - DNA, 122 bp, Homo sapiens
  misc_feature (61)..(62): /note="This region represents a CpG dinucleotide"
  misc_feature (61)..(61): /note="Nucleotide may be methylated to form 5-methylcytosine"
aatttaattttaggtccctgaagtctcttacttggttccactgcctgtacaacaggtgttcgtatttttgtgcattgctttctttttacattaagaaagataaacaacaccaaagtgtaata

SEQ ID NO: 6742 - DNA, 122 bp, Homo sapiens
  misc_feature (61)..(62): /note="This region represents a CpG dinucleotide"
  misc_feature (61)..(61): /note="Nucleotide may be methylated to form 5-methylcytosine"
tatggttgtgtaggagagctggttacctcttccaagggaattcctagctcagctttcagccgtctctgtgctgctcgcctcactccaagggcgtcactttcctcaagctcggctggattgct

SEQ ID NO: 6743 - DNA, 122 bp, Homo sapiens
  misc_feature (61)..(62): /note="This region represents a CpG dinucleotide"
  misc_feature (61)..(61): /note="Nucleotide may be methylated to form 5-methylcytosine"
tttagctgccatttcatcatttaaagatgtttacatagatctaattaaagtatcaatgcacgattgttttagaaaaatatagaaactatagataagcaataataagctgcccaaaacgctat

SEQ ID NO: 6744 - DNA, 122 bp, Homo sapiens
  misc_feature (61)..(62): /note="This region represents a CpG dinucleotide"
  misc_feature (61)..(61): /note="Nucleotide may be methylated to form 5-methylcytosine"
acgcacaaacgccaggacttggcttggcctctctcttagttatttgcagctctgcccaatcggcgcctccgggacggcggagacggtgggcttcttgggtgcagctccacgaaggctggcat

SEQ ID NO: 6745 - DNA, 122 bp, Homo sapiens
  misc_feature (61)..(62): /note="This region represents a CpG dinucleotide"
  misc_feature (61)..(61): /note="Nucleotide may be methylated to form 5-methylcytosine"
taccccaccgtggctgacctgatagctaacctggtgccaggaatcaagcagaagtagtctcgccccaccccatagctaccacagctgagaatgtgcagagtctcgtaaagggtaatttgcat

SEQ ID NO: 6746 - DNA, 122 bp, Homo sapiens
  misc_feature (61)..(62): /note="This region represents a CpG dinucleotide"
  misc_feature (61)..(61): /note="Nucleotide may be methylated to form 5-methylcytosine"
ctaagattcatccattttattgcatgtaagtctaattcattcactttcattgctatgtgacgttcagctttgtgaatatattacagcttatcatggatactggtgctgctttcagtattttt

SEQ ID NO: 6747 - DNA, 122 bp, Homo sapiens
  misc_feature (61)..(62): /note="This region represents a CpG dinucleotide"
  misc_feature (61)..(61): /note="Nucleotide may be methylated to form 5-methylcytosine"
tgtgcacaaacacctgcacaaccaggtaaatacataaccacacacagatgcgtgtgcgcacgcccaggcacacatgcaaatgcctgcgcacgtgggcaggcacccacacataatcacagggc

SEQ ID NO: 6748 - DNA, 122 bp, Homo sapiens
  misc_feature (61)..(62): /note="This region represents a CpG dinucleotide"
  misc_feature (61)..(61): /note="Nucleotide may be methylated to form 5-methylcytosine"
atagctcctctctggccttgaagccttgctaccctaatccatcaatgaccatttcacaaccggggaatgacatctgtccatgtactcactttttatggtccggtcctttacagcctacacac

SEQ ID NO: 6749 - DNA, 122 bp, Homo sapiens
  misc_feature (61)..(62): /note="This region represents a CpG dinucleotide"
  misc_feature (61)..(61): /note="Nucleotide may be methylated to form 5-methylcytosine"
agaaggaggctgtggacagacccagctgacatgtaagtgacaggccaagcaccaggagcccgagagagagcagtcagatggatagaagtaaacttgcagcaaagcaaaaggaaaatgagctt

SEQ ID NO: 6750 - DNA, 122 bp, Homo sapiens
  misc_feature (61)..(62): /note="This region represents a CpG dinucleotide"
  misc_feature (61)..(61): /note="Nucleotide may be methylated to form 5-methylcytosine"
cctgctgccctgaggcctctgcaagcaagggctcttgcctccggggagcacgcccaggaccgtggcaggggctcccaaaggccggggacaggcctgagcaagcggagagcccccccgcctgc

SEQ ID NO: 6751 - DNA, 122 bp, Homo sapiens
  misc_feature (61)..(62): /note="This region represents a CpG dinucleotide"
  misc_feature (61)..(61): /note="Nucleotide may be methylated to form 5-methylcytosine"
ctcaggtgatccgcctgcctcggcctcccaaagtgctgggattacagatgtgagccaccacgcttggccaaaagtcattgtttgttttagtgatgaactaactggctttgggtttgttctgt

SEQ ID NO: 6752 - DNA, 122 bp, Homo sapiens
  misc_feature (61)..(62): /note="This region represents a CpG dinucleotide"
  misc_feature (61)..(61): /note="Nucleotide may be methylated to form 5-methylcytosine"
aattgcaacctccggcataaatggcttaaggccctaagcacagtcacttataccagggctcgtgtatatatccagtgtgggtcatgagtaatgccagggatttttaggcctccggatatcac

SEQ ID NO: 6753 - DNA, 122 bp, Homo sapiens
  misc_feature (61)..(62): /note="This region represents a CpG dinucleotide"
  misc_feature (61)..(61): /note="Nucleotide may be methylated to form 5-methylcytosine"
cctatccaagcaccatgggagaacagagaccggggtcgttaattcttcaaaatcagagtacgcttcctgttggcatttgagtaggagatgagaatagagaacagaaatttggaacaaatgat

SEQ ID NO: 6754 - DNA, 122 bp, Homo sapiens
  misc_feature (61)..(62): /note="This region represents a CpG dinucleotide"
  misc_feature (61)..(61): /note="Nucleotide may be methylated to form 5-methylcytosine"
tggtttctcgtgcccctcagggtcaggagcagtctgatcaaaaggagggcatccactgtccggggccattcccacagctcccggatgctgggtctggaggctgcgcccttcccctgcaggag

SEQ ID NO: 6755 - DNA, 122 bp, Homo sapiens
  misc_feature (61)..(62): /note="This region represents a CpG dinucleotide"
  misc_feature (61)..(61): /note="Nucleotide may be methylated to form 5-methylcytosine"
gagtccccatgcttgggtacacaccagccgtgcccctactttcactgttcttccttaggacgttatttaatccccgcagaaaggacatcgtctcacctgtagcaaggagctaacatcataat

SEQ ID NO: 6756 - DNA, 122 bp, Homo sapiens
  misc_feature (61)..(62): /note="This region represents a CpG dinucleotide"
  misc_feature (61)..(61): /note="Nucleotide may be methylated to form 5-methylcytosine"
tcccttgctcttatgatacgtacaaactcaacaaactagcttacatcacctctttagattcgaccttcaaaatttcccttgccctcctcccatctacaatgcacatgtgccgttccctctgc

SEQ ID NO: 6757 - DNA, 122 bp, Homo sapiens
  misc_feature (61)..(62): /note="This region represents a CpG dinucleotide"
  misc_feature (61)..(61): /note="Nucleotide may be methylated to form 5-methylcytosine"
agtattgtaaatctatcccacacacaaaaaaacatacactagagtttcttcatagctcaacgtcaatgatactttctggaaaataatcacccatcagggctccctcccccaagcatgctgta

SEQ ID NO: 6758 - DNA, 122 bp, Homo sapiens
  misc_feature (61)..(62): /note="This region represents a CpG dinucleotide"
  misc_feature (61)..(61): /note="Nucleotide may be methylated to form 5-methylcytosine"
ggagtctgggctttttttctgcctctttgtgtgcttagtaatctttggttagatgcccaacgttatgagttttaccatgttagttgctggatgtctttacattattgaacctggttttggta

SEQ ID NO: 6759 - DNA, 122 bp, Homo sapiens
  misc_feature (61)..(62): /note="This region represents a CpG dinucleotide"
  misc_feature (61)..(61): /note="Nucleotide may be methylated to form 5-methylcytosine"
agcactaagaaagcactcaaaatatagtggcagctattattatttatccttcttcctctccgttttctcctccagatttatgagtgatagggacagaaaatttcttatcagagtgcccttta

SEQ ID NO: 6760 - DNA, 122 bp, Homo sapiens
  misc_feature (61)..(62): /note="This region represents a CpG dinucleotide"
  misc_feature (61)..(61): /note="Nucleotide may be methylated to form 5-methylcytosine"
cagatccagcaaacctcacgttcctgtgttaaaccttgatgtttcctgttaggtgcatgccgtgataggggtgctgatggatgacacggatcccctggtcacagtgatgaaggtagaaaagg

SEQ ID NO: 6761 - DNA, 122 bp, Homo sapiens
  misc_feature (61)..(62): /note="This region represents a CpG dinucleotide"
  misc_feature (61)..(61): /note="Nucleotide may be methylated to form 5-methylcytosine"
acagttgacttgatcattgagatgactcctaagtgactcacaggtggggagcgtccacagcgtgggtcccctggataaagaaaggattcaattcctcagccaggaaatagcagaatggtgtg

SEQ ID NO: 6762 - DNA, 122 bp, Homo sapiens
  misc_feature (61)..(62): /note="This region represents a CpG dinucleotide"
  misc_feature (61)..(61): /note="Nucleotide may be methylated to form 5-methylcytosine"
gattcttggagggagggaccagagcagaggtggtgagtggcaggaggaggcaaatgtccccgcaaccaggaagttcatcgggttgaagtttcctctgccgtcgcctcctgctcgccagcaga

SEQ ID NO: 6763 - DNA, 122 bp, Homo sapiens
  misc_feature (61)..(62): /note="This region represents a CpG dinucleotide"
  misc_feature (61)..(61): /note="Nucleotide may be methylated to form 5-methylcytosine"
ttgttcgcgggacaattatatcttgctagccagcttttgcaagaccacgagctttgtagccgcaatcacagtttaagaggattaccgtggatataatatgagcaaacagggtttgatagtga

SEQ ID NO: 6764 - DNA, 122 bp, Homo sapiens
  misc_feature (61)..(62): /note="This region represents a CpG dinucleotide"
  misc_feature (61)..(61): /note="Nucleotide may be methylated to form 5-methylcytosine"
tggccggccgggcaggcgaggtcaccgtgctgggcaagcagagtggtgtggcctcacagacgttggactcatttgccaaggagttgccctccaggacaaaagcagagggcagaacggggtga

SEQ ID NO: 6765 - DNA, 122 bp, Homo sapiens
  misc_feature (61)..(62): /note="This region represents a CpG dinucleotide"
  misc_feature (61)..(61): /note="Nucleotide may be methylated to form 5-methylcytosine"
agctcacacaagcatctgatacaaagcagtgtagcatctgaggacaaaagacaatgagagcgtgacatcatgaagatcaaggaaagagacaatttcacgaaagcatgtgcaggcaacagtat

SEQ ID NO: 6766 - DNA, 122 bp, Homo sapiens
  misc_feature (61)..(62): /note="This region represents a CpG dinucleotide"
  misc_feature (61)..(61): /note="Nucleotide may be methylated to form 5-methylcytosine"
tccgtctctcccatcaggataccgagcacacttgttggtcttctgcattagaggccactccgtgaggacttccttgctctcctctgagcagtggaaggtttttaatcactccttgtgtagca

SEQ ID NO: 6767 - DNA, 122 bp, Homo sapiens
  misc_feature (61)..(62): /note="This region represents a CpG dinucleotide"
  misc_feature (61)..(61): /note="Nucleotide may be methylated to form 5-methylcytosine"
cctagaaacaaaagactatcatcacttagccaaattgctttggggcatggaccaagggggcgtggaaaccagcagggaaatatagatcagattgggatcaagtgaaacatttgagttttcca

SEQ ID NO: 6768 - DNA, 122 bp, Homo sapiens
  misc_feature (61)..(62): /note="This region represents a CpG dinucleotide"
  misc_feature (61)..(61): /note="Nucleotide may be methylated to form 5-methylcytosine"
acatgaagatgtctagttattgggtgttttcccccgctctctggtcctggctgaggcaagcggatcacttgaagtcaggaatttgagggtaaaaccctgtcactactcaaaatataaaaatt

SEQ ID NO: 6769 - DNA, 122 bp, Homo sapiens
  misc_feature (61)..(62): /note="This region represents a CpG dinucleotide"
  misc_feature (61)..(61): /note="Nucleotide may be methylated to form 5-methylcytosine"
gagtataattttagccttggaactcactgaggatatttgggcacttgtgccttctgcttacgacagattgttgatcacagttatgatttatctccggctgcgtctttgggcaggaacgcaac

SEQ ID NO: 6770 - DNA, 122 bp, Homo sapiens
  misc_feature (61)..(62): /note="This region represents a CpG dinucleotide"
  misc_feature (61)..(61): /note="Nucleotide may be methylated to form 5-methylcytosine"
tgtgggtggaattgaccacatggtgataagcaaaatagtcatgatcttttccccataattcgtacagtttagtaggctgattgaaatgagtaaataggcaattactctaacataatacttgc

SEQ ID NO: 6771 - DNA, 122 bp, Homo sapiens
  misc_feature (61)..(62): /note="This region represents a CpG dinucleotide"
  misc_feature (61)..(61): /note="Nucleotide may be methylated to form 5-methylcytosine"
ctgtacatacatggcatattaactgttttccataacaataggcaattcattagctaaagacgtcatagtctgcaaaaacaaaaggcacatctgaatgagatacatgccctttttccctccat

SEQ ID NO: 6772 - DNA, 122 bp, Homo sapiens
  misc_feature (61)..(62): /note="This region represents a CpG dinucleotide"
  misc_feature (61)..(61): /note="Nucleotide may be methylated to form 5-methylcytosine"
acgttctatcccagctagggctaccagttcatgaggtacttcctgttctggggcagcctgcgtttaaacgtgggctacactgaactttggatcatagcagccagtgagcagaagcagagcct

SEQ ID NO: 6773 - DNA, 122 bp, Homo sapiens
  misc_feature (61)..(62): /note="This region represents a CpG dinucleotide"
  misc_feature (61)..(61): /note="Nucleotide may be methylated to form 5-methylcytosine"
attttgatttgataacttcttagatgtgtaccatgggcagctgacttaatctttctagcccgtctccttatctgcagaatgtaaacaatgcatgtagagggcctgcccccacacattagtca

SEQ ID NO: 6774 - DNA, 122 bp, Homo sapiens
  misc_feature (61)..(62): /note="This region represents a CpG dinucleotide"
  misc_feature (61)..(61): /note="Nucleotide may be methylated to form 5-methylcytosine"
ctttcacggagctggccaggatagtgctgctgcggcacaggttgaactggctcgggaggccgagcaaggtactgagcttgcaagacctctgctgccgcaccatcgtgtcctgcacacctgtg

SEQ ID NO: 6775 - DNA, 122 bp, Homo sapiens
  misc_feature (61)..(62): /note="This region represents a CpG dinucleotide"
  misc_feature (61)..(61): /note="Nucleotide may be methylated to form 5-methylcytosine"
cccagatcagtgactgaatgtctaacaggctcccaatacattttccatgttttcctcactcgagcctttttaaaatccagtgatctggaaggaaccattggttactccaggctgtactgagg

SEQ ID NO: 6776 - DNA, 122 bp, Homo sapiens
  misc_feature (61)..(62): /note="This region represents a CpG dinucleotide"
  misc_feature (61)..(61): /note="Nucleotide may be methylated to form 5-methylcytosine"
acgtgtcagaaataagagacttctcacacacacttgaagtatctctccatgagtgtttaccgcttcctttgtgcagggctttgagtcctgtgtggcatcagacaggcctgtcttaagttcct

SEQ ID NO: 6777 - DNA, 122 bp, Homo sapiens
  misc_feature (61)..(62): /note="This region represents a CpG dinucleotide"
  misc_feature (61)..(61): /note="Nucleotide may be methylated to form 5-methylcytosine"
gaattcagagaattattcgggcacacgatttatttcctatcttgattagactcctgagcccgtgccccagcctctcgctaatctccctggaccagacaactccattagaatctggcacccac

SEQ ID NO: 6778 - DNA, 122 bp, Homo sapiens
  misc_feature (61)..(62): /note="This region represents a CpG dinucleotide"
  misc_feature (61)..(61): /note="Nucleotide may be methylated to form 5-methylcytosine"
aggtcgcccactctcgtcccaagggccgggtgccacaggggcctacgatgccggcgaggccggggctgacagctcccgagataacagtcctgccgctgacctggggcccacccggcccccgg

SEQ ID NO: 6779 - DNA, 122 bp, Homo sapiens
  misc_feature (61)..(62): /note="This region represents a CpG dinucleotide"
  misc_feature (61)..(61): /note="Nucleotide may be methylated to form 5-methylcytosine"
gcaaactttctcaaacttacagatgcctcttgagccttggatttccatttctatttgctgcgtttctgagtctctgttatcactatttggtgtgaaaacatacacgtcattttggcttatga

SEQ ID NO: 6780 - DNA, 122 bp, Homo sapiens
  misc_feature (61)..(62): /note="This region represents a CpG dinucleotide"
  misc_feature (61)..(61): /note="Nucleotide may be methylated to form 5-methylcytosine"
ccatgatctttagagtagtaaaaggtagaaacaactccctttgttccatctctgctcacacgacacctccttagagagggtcttgacctggacaaataaagtggcccctgtcttcttaccat

SEQ ID NO: 6781 - DNA, 122 bp, Homo sapiens
  misc_feature (61)..(62): /note="This region represents a CpG dinucleotide"
  misc_feature (61)..(61): /note="Nucleotide may be methylated to form 5-methylcytosine"
tacctctgtgaactccctaactgtggttcttggcttcaagttttaggccaagctggggagcgtgatggataatacttgtcaaaagttgcctatttactaccatagtttctgcactaagacct

SEQ ID NO: 6782 - DNA, 122 bp, Homo sapiens
  misc_feature (61)..(62): /note="This region represents a CpG dinucleotide"
  misc_feature (61)..(61): /note="Nucleotide may be methylated to form 5-methylcytosine"
gaggagtttgtgttatagctgaaaaaaggtgctttttatttacaatattttaaactcatacggcattaatgtaactatgcttacactgaactcaggaaaataataagctgcattctgttttt

SEQ ID NO: 6783 - DNA, 122 bp, Homo sapiens
  misc_feature (61)..(62): /note="This region represents a CpG dinucleotide"
  misc_feature (61)..(61): /note="Nucleotide may be methylated to form 5-methylcytosine"
gtttgttctattccttgtatacataaccaggacatgagagattccttatcttattaccaccgtgagccattcaggctgcaagctgtatttcgatggtattgttgggtacgtttgtactcatc

SEQ ID NO: 6784 - DNA, 122 bp, Homo sapiens
  misc_feature (61)..(62): /note="This region represents a CpG dinucleotide"
  misc_feature (61)..(61): /note="Nucleotide may be methylated to form 5-methylcytosine"
ggcagatgagaagtttccttagtgttccttttcagtgtttctctgaggtgcatctaggaccgcaagaattcattttcatccacacttgagtgtctttggtaaaaccccaggtgagcttatcg

SEQ ID NO: 6785 - DNA, 122 bp, Homo sapiens
  misc_feature (61)..(62): /note="This region represents a CpG dinucleotide"
  misc_feature (61)..(61): /note="Nucleotide may be methylated to form 5-methylcytosine"
ctggattacttttccaggagacacccagatgtggcaatagctcttggggttttgggctgacgtacaggagctgaagctgtgatgtcgcgtgtccgtgtccttaggacagtgttaagtgggga

SEQ ID NO: 6786 - DNA, 122 bp, Homo sapiens
  misc_feature (61)..(62): /note="This region represents a CpG dinucleotide"
  misc_feature (61)..(61): /note="Nucleotide may be methylated to form 5-methylcytosine"
caggctttgttcatccagagggcaccgagcagcttctgagacccaccctgtgtcactggccgggctgcatatcccagtctgatgcacagacccacgattttttgtttgtttattttctgaga

SEQ ID NO: 6787 - DNA, 122 bp, Homo sapiens
  misc_feature (61)..(62): /note="This region represents a CpG dinucleotide"
  misc_feature (61)..(61): /note="Nucleotide may be methylated to form 5-methylcytosine"
cgttgcggctgttttccccccgtcagcgaggctttttgttgccgcggctttttgcccaggcgtttgctgcctccttatttaatcagagccttaatttgaacgtcaggtcatcaaatctggaa

SEQ ID NO: 6788 - DNA, 122 bp, Homo sapiens
  misc_feature (61)..(62): /note="This region represents a CpG dinucleotide"
  misc_feature (61)..(61): /note="Nucleotide may be methylated to form 5-methylcytosine"
ggacagcagcgcttccccttggcccaggaatcccggccagggctgcggggaggtcagcggcgcccctaaatcctgcacgcacggcgggccccgcacgggcgccgggtgcagcccacacacca

SEQ ID NO: 6789 - DNA, 122 bp, Homo sapiens
  misc_feature (61)..(62): /note="This region represents a CpG dinucleotide"
  misc_feature (61)..(61): /note="Nucleotide may be methylated to form 5-methylcytosine"
gctgccccgcaggcctcccttcaatctgtgcttgcacaattctagatgggcgttctccagcggggtctggtggtgtgcactctgctgctccatttgctgtccagttgtttgctaggtgtgtt

SEQ ID NO: 6790 - DNA, 122 bp, Homo sapiens
  misc_feature (61)..(62): /note="This region represents a CpG dinucleotide"
  misc_feature (61)..(61): /note="Nucleotide may be methylated to form 5-methylcytosine"
aggaattcctccctgcaaaatagctttaaggggcatctggaaacatccagctaggctttacgttgtcctggtgaaggtcaaagttgcacactaggtacagcagagaccttcccactgacagg

SEQ ID NO: 6791 - DNA, 122 bp, Homo sapiens
  misc_feature (61)..(62): /note="This region represents a CpG dinucleotide"
  misc_feature (61)..(61): /note="Nucleotide may be methylated to form 5-methylcytosine"
gggccagaacccacctggtgccttgggtgcagtatgcacacacctgcacaggcctacacacgccagccaacactcgtgcctgttctgtgtgtgatgcccggtatgtatacaccactgatcac

SEQ ID NO: 6792 - DNA, 122 bp, Homo sapiens
  misc_feature (61)..(62): /note="This region represents a CpG dinucleotide"
  misc_feature (61)..(61): /note="Nucleotide may be methylated to form 5-methylcytosine"
tactcttttataaggccctaataaatgacttactagtgttttcttgttcccctccctccccggcttcacattccccataagcctttgctctgtctttttaacgcttttaacgtctttttttc

SEQ ID NO: 6793 - DNA, 122 bp, Homo sapiens
  misc_feature (61)..(62): /note="This region represents a CpG dinucleotide"
  misc_feature (61)..(61): /note="Nucleotide may be methylated to form 5-methylcytosine"
tggcctctaccggttctgcgagaaagtaaactttgggcacgacaagtcatgaagtcggcacgttggggagacaccgtgtcacaatgacaaggtgagatcagctgccccggccaagctgtctc

SEQ ID NO: 6794 - DNA, 122 bp, Homo sapiens
  misc_feature (61)..(62): /note="This region represents a CpG dinucleotide"
  misc_feature (61)..(61): /note="Nucleotide may be methylated to form 5-methylcytosine"
ctccgcgctcagcgggaggaggcgctcggtcccgcttcttacaaccagcggcgctcacggcgggcccggggatcagcatcccgggagcttctcaggaatgcagattcccaggccctcactgc

SEQ ID NO: 6795 - DNA, 122 bp, Homo sapiens
  misc_feature (61)..(62): /note="This region represents a CpG dinucleotide"
  misc_feature (61)..(61): /note="Nucleotide may be methylated to form 5-methylcytosine"
tgtcagtgggattaaattaaaagaggtcctagtggtaagtgcttcctgcaggggctgacacgtggccgacatcagtggacaacagtcatgtcaatctgattgcaatgagcagagacagagcc

SEQ ID NO: 6796 - DNA, 122 bp, Homo sapiens
  misc_feature (61)..(62): /note="This region represents a CpG dinucleotide"
  misc_feature (61)..(61): /note="Nucleotide may be methylated to form 5-methylcytosine"
ccgaacgtaaaattcaccatttcaaccactttacagtgtacagttgaatggcattaagcacgttcacaatatcatgcaaccgtcaccactacccagttccaaaacacctccatcaacccgga

SEQ ID NO: 6797 - DNA, 122 bp, Homo sapiens
  misc_feature (61)..(62): /note="This region represents a CpG dinucleotide"
  misc_feature (61)..(61): /note="Nucleotide may be methylated to form 5-methylcytosine"
aattctgaaatttatcttctaaagtaattcagtctctcttttcattctcacatctatttacgttagaatgaaacctaaagggtgatttctcttgggtgaaataccaggaggctgagggaaac

SEQ ID NO: 6798 - DNA, 122 bp, Homo sapiens
  misc_feature (61)..(62): /note="This region represents a CpG dinucleotide"
  misc_feature (61)..(61): /note="Nucleotide may be methylated to form 5-methylcytosine"
aacttctcacatgtcccttgccagccacaccccagctacacacaaacttcgttcaatctgcggaacactcagaatttattcccaactaagactctttgcatgggctgttccctctgctattg

SEQ ID NO: 6799 - DNA, 122 bp, Homo sapiens
  misc_feature (61)..(62): /note="This region represents a CpG dinucleotide"
  misc_feature (61)..(61): /note="Nucleotide may be methylated to form 5-methylcytosine"
gggtgcggagggacacagtgtgtggagacaggcagttgagctgttctagccaggacctgccgcctttgaaaaacaagacctaaggaaacgaccacaggctcagaatcccaggctaagctaaa

SEQ ID NO: 6800 - DNA, 122 bp, Homo sapiens
  misc_feature (61)..(62): /note="This region represents a CpG dinucleotide"
  misc_feature (61)..(61): /note="Nucleotide may be methylated to form 5-methylcytosine"
aagatttgcatgttcaactcggatagtcctcaccactgagttaatatttccaggtcagagcgcctccgagagaaaaaggcggtggccttggagctctggtctccttaactgcaccctgggaa

SEQ ID NO: 6801 - DNA, 122 bp, Homo sapiens
  misc_feature (61)..(62): /note="This region represents a CpG dinucleotide"
  misc_feature (61)..(61): /note="Nucleotide may be methylated to form 5-methylcytosine"
atgcttccctggtccctgctctgctgctaccttcctgagcacacgtcagccactgggacccgccctgccactgaatttaacatgatctcatgcccctgtgacttgttcttcactttgcctcc

SEQ ID NO: 6802 - DNA, 122 bp, Homo sapiens
  misc_feature (61)..(62): /note="This region represents a CpG dinucleotide"
  misc_feature (61)..(61): /note="Nucleotide may be methylated to form 5-methylcytosine"
gggctggcgggcgagccggcgggcgggtcggcgggccagcgggcggggcagcgcgggaagcgctaggcgctcatgcactcggtaaccttcaggcgccccggccgcccgcctgcaacctgcgg

SEQ ID NO: 6803 - DNA, 122 bp, Homo sapiens
  misc_feature (61)..(62): /note="This region represents a CpG dinucleotide"
  misc_feature (61)..(61): /note="Nucleotide may be methylated to form 5-methylcytosine"
tgggacaaggaggccccagtgaggaaaccggaaggctggattgctgacagcacagcttcccggctccgctgagctggcattcttgtagctgaaaccctgaggaggccagccccctttcccac

SEQ ID NO: 6804 - DNA, 122 bp, Homo sapiens
  misc_feature (61)..(62): /note="This region represents a CpG dinucleotide"
  misc_feature (61)..(61): /note="Nucleotide may be methylated to form 5-methylcytosine"
cttagtatttttgataacataagatagcattgtctcatatgtcttttctctctttccttccgtcaccacttcccccaccccaaatattggttctgttatgattctgcaatgcaatttacaat

SEQ ID NO: 6805 - DNA, 122 bp, Homo sapiens
  misc_feature (61)..(62): /note="This region represents a CpG dinucleotide"
  misc_feature (61)..(61): /note="Nucleotide may be methylated to form 5-methylcytosine"
ctcctcgtgggttcctgtcttgaaggatttcttctccgcctcaactttatgttcaagtagcgctttgggggttgggttggttttcatagcccccacccccggccctctccttttaaagggtg

SEQ ID NO: 6806 - DNA, 122 bp, Homo sapiens
  misc_feature (61)..(62): /note="This region represents a CpG dinucleotide"
  misc_feature (61)..(61): /note="Nucleotide may be methylated to form 5-methylcytosine"
ggggatagcccagggagggggcagtggtggcagccatgtggtgggtgcctggtcagagggcgggctcagtttggcagctctttaccagccagtaaggacagagatctcaacattttaatgtc

SEQ ID NO: 6807 - DNA, 122 bp, Homo sapiens
  misc_feature (61)..(62): /note="This region represents a CpG dinucleotide"
  misc_feature (61)..(61): /note="Nucleotide may be methylated to form 5-methylcytosine"
tcattttaatacaaacatgccatttaatgtaaaacagaaatattgattttattatttggacggtgcatattctttcggtatgttttcttggattaacttttgcttagaactaaaaaccaaag

SEQ ID NO: 6808 - DNA, 122 bp, Homo sapiens
  misc_feature (61)..(62): /note="This region represents a CpG dinucleotide"
  misc_feature (61)..(61): /note="Nucleotide may be methylated to form 5-methylcytosine"
acacttgatatatcctctgtcattttcattttagcccttctggtagtcataatggtatcacgttgtggctttaatttgcatttctctaatggctaatatagttgagtaccttttttcatatg

SEQ ID NO: 6809 - DNA, 122 bp, Homo sapiens
  misc_feature (61)..(62): /note="This region represents a CpG dinucleotide"
  misc_feature (61)..(61): /note="Nucleotide may be methylated to form 5-methylcytosine"
gaaagagtccctccaggggcaatccaactaccacaggccaggggccaagctttggtgagccgagcctgggccctgcccctcccttctctatgggcctagggttgctgtgctgtgtgtggcat

SEQ ID NO: 6810 - DNA, 122 bp, Homo sapiens
  misc_feature (61)..(62): /note="This region represents a CpG dinucleotide"
  misc_feature (61)..(61): /note="Nucleotide may be methylated to form 5-methylcytosine"
tattgtttctctcttccaagaactcagctttctacaaagactgccttgctcagttgtcatcgtgtggctggtcggggtgtcagtattctagtgttcctactcaacagatgcaggaatagaga

SEQ ID NO: 6811 - DNA, 122 bp, Homo sapiens
  misc_feature (61)..(62): /note="This region represents a CpG dinucleotide"
  misc_feature (61)..(61): /note="Nucleotide may be methylated to form 5-methylcytosine"
agcagatacttattgctcttctagttattatactgttatgtgctggagatacaaatgtcacgttatgacaccagccttccaggagattttagtctagtgtgttagtcatacaactatgcaca

SEQ ID NO: 6812 - DNA, 122 bp, Homo sapiens
  misc_feature (61)..(62): /note="This region represents a CpG dinucleotide"
  misc_feature (61)..(61): /note="Nucleotide may be methylated to form 5-methylcytosine"
tgtgtctgagtctcttcactgagaggtgagctttgctacccccagaatggcctccatctgcgttgctttgcattcgggcatgtggtgggagggggcagctcctcctattcacccacagcaag

SEQ ID NO: 6813 - DNA, 122 bp, Homo sapiens
  misc_feature (61)..(62): /note="This region represents a CpG dinucleotide"
  misc_feature (61)..(61): /note="Nucleotide may be methylated to form 5-methylcytosine"
tcacatttccataggatgaaacattatttgttccctttaagatactatgtgatgaattaccgcagaagagatggaaggagaaaaaaatgggaatacaatagttaacacttctgttatattta

SEQ ID NO: 6814 - DNA, 122 bp, Homo sapiens
  misc_feature (61)..(62): /note="This region represents a CpG dinucleotide"
  misc_feature (61)..(61): /note="Nucleotide may be methylated to form 5-methylcytosine"
ttgctgccagagtgaactacataaagtacacatctgatatatagcttctctacttaattccgtctgttgcttccttattgcttacagggtagaggccacgatccttagcatggatggcataa

SEQ ID NO: 6815 - DNA, 122 bp, Homo sapiens
  misc_feature (61)..(62): /note="This region represents a CpG dinucleotide"
  misc_feature (61)..(61): /note="Nucleotide may be methylated to form 5-methylcytosine"
caagtctgggacttcagcgccagcctcgccaccctgcttcccacaaccagatgtctcctgcgaagtagccccctctaatgccaaaccaaaagcagaggtcataaggactatatcccttacac

SEQ ID NO: 6816 - DNA, 122 bp, Homo sapiens
  misc_feature (61)..(62): /note="This region represents a CpG dinucleotide"
  misc_feature (61)..(61): /note="Nucleotide may be methylated to form 5-methylcytosine"
gtgggggaagagcacacaccggggagcagaggccagactggggagctgcacataaggtcccggaagcctctgaagggcctgaaggctaaggcatgagaatggcactgtgcagtggctgctcc

SEQ ID NO: 6817 - DNA, 122 bp, Homo sapiens
  misc_feature (61)..(62): /note="This region represents a CpG dinucleotide"
  misc_feature (61)..(61): /note="Nucleotide may be methylated to form 5-methylcytosine"
atctcggtgctgccgggggaggcgggaggaggagacaccaggggtggccctgagcgccggcgacacctttcctggactataaattgagcacctgggatgggtagggggccaacgcagtcacc

SEQ ID NO: 6818 - DNA, 122 bp, Homo sapiens
  misc_feature (61)..(62): /note="This region represents a CpG dinucleotide"
  misc_feature (61)..(61): /note="Nucleotide may be methylated to form 5-methylcytosine"
aagtcctctcaagtttggtaacacaaagtccagcttcagagcacaggttacttcaattatcgtctccaactgtcactaggtaacactcaaaagttctctaaatgccaaacaggaaagggcct

SEQ ID NO: 6819 - DNA, 122 bp, Homo sapiens
  misc_feature (61)..(62): /note="This region represents a CpG dinucleotide"
  misc_feature (61)..(61): /note="Nucleotide may be methylated to form 5-methylcytosine"
caaggtctgtggctcctcccgaaacccaagttatgcatccccatccccatgccctcatcccgacctcttagaaaataaatacaagtttgaacaggcttcgctgcctctcgtgttggctacca

SEQ ID NO: 6820 - DNA, 122 bp, Homo sapiens
  misc_feature (61)..(62): /note="This region represents a CpG dinucleotide"
  misc_feature (61)..(61): /note="Nucleotide may be methylated to form 5-methylcytosine"
tactcaggaggctgaggcatgagaacagcttgaatccaggaggcggaggttgcagtgagccgagattgcaccattgcactacaggttgggagacagagcaagactcagtcttaaaaaataat

SEQ ID NO: 6821 - DNA, 122 bp, Homo sapiens
  misc_feature (61)..(62): /note="This region represents a CpG dinucleotide"
  misc_feature (61)..(61): /note="Nucleotide may be methylated to form 5-methylcytosine"
aggggcgggactcaccacccatgtgacctgcactggcctggaggagctgcctgactgcagcggactctgccaagaatttcaagaggtgcagtggtccagtcataaagcaacatgaaaacgct

SEQ ID NO: 6822 - DNA, 122 bp, Homo sapiens
  misc_feature (61)..(62): /note="This region represents a CpG dinucleotide"
  misc_feature (61)..(61): /note="Nucleotide may be methylated to form 5-methylcytosine"
tgttagagatacggttctctcctgaagattgtgactctttaggtgtgttttaatatattacgcaaggttgagaaacactagagtaggaaatgtgagctaactgaaacaaggcagacacagta

SEQ ID NO: 6823 - DNA, 122 bp, Homo sapiens
  misc_feature (61)..(62): /note="This region represents a CpG dinucleotide"
  misc_feature (61)..(61): /note="Nucleotide may be methylated to form 5-methylcytosine"
ttcccaatgtgggctggaatttccaggctaaagggcgagcattgcactggctgatgtcaccgtccagtagatgcctagtttaggcgaggagccagctctggtgtctgctgttagcacccaga

SEQ ID NO: 6824 - DNA, 122 bp, Homo sapiens
  misc_feature (61)..(62): /note="This region represents a CpG dinucleotide"
  misc_feature (61)..(61): /note="Nucleotide may be methylated to form 5-methylcytosine"
gcaacagggcgagactccatctcgaaaacaaaacaaaacaaaacaaatgacttgaggagacggcttcagaaaatactgttgtgtttggtgactgagtggttattcatgttcttggacaatgc

SEQ ID NO: 6825 - DNA, 122 bp, Homo sapiens
  misc_feature (61)..(62): /note="This region represents a CpG dinucleotide"
  misc_feature (61)..(61): /note="Nucleotide may be methylated to form 5-methylcytosine"
aaatatattcttagaatccttactatgcattacttactaaatgccagccatggagataggcgcaaaatgtgaacaatgagcaaaacagaatagtctttgctcactgtgctggtagggcagga

SEQ ID NO: 6826 - DNA, 122 bp, Homo sapiens
  misc_feature (61)..(62): /note="This region represents a CpG dinucleotide"
  misc_feature (61)..(61): /note="Nucleotide may be methylated to form 5-methylcytosine"
aaagcaagtttgggataaatgcattgttcagaatgcatggaatactactcagcaacaacacggatgaatccaaaatgggtaatgctaaatgaaagatgccaggcccgaaaggctacatacta

SEQ ID NO: 6827 - DNA, 122 bp, Homo sapiens
  misc_feature (61)..(62): /note="This region represents a CpG dinucleotide"
  misc_feature (61)..(61): /note="Nucleotide may be methylated to form 5-methylcytosine"
ggaaatgacacaaaaagggaaagttgctattctgtttttccaggttgtaattacagcaaacgattgattggaaaacatttaaatagcaaaacgtgtctgtgtaagagacacatgtttttgta

SEQ ID NO: 6828 - DNA, 122 bp, Homo sapiens
  misc_feature (61)..(62): /note="This region represents a CpG dinucleotide"
  misc_feature (61)..(61): /note="Nucleotide may be methylated to form 5-methylcytosine"
ttcctcaacagtactttgcactatttttctcaacttctccttccttacctgaagtcataccgttaagttgatgaatacaagcacttaaagaaaacaaatctagttcacatgaagagctcaat

SEQ ID NO: 6829 - DNA, 122 bp, Homo sapiens
  misc_feature (61)..(62): /note="This region represents a CpG dinucleotide"
  misc_feature (61)..(61): /note="Nucleotide may be methylated to form 5-methylcytosine"
cctttcactgctgggatgaatctgtaggtgtttactgactccagggaggagtctctgacacgcctcaggctacaaggcccctgaggtttttgaattttgcagagattgtgacacctgggaga

SEQ ID NO: 6830 - DNA, 122 bp, Homo sapiens
  misc_feature (61)..(62): /note="This region represents a CpG dinucleotide"
  misc_feature (61)..(61): /note="Nucleotide may be methylated to form 5-methylcytosine"
ctcgtcttctcacactcactcggtgtgtgacagcgacaggtcacagagggcggtaaagtgcggcgcccttggggcggtttcgtctggcgcggagtagaggtggccggcagttgtggttgctc

SEQ ID NO: 6831 - DNA, 122 bp, Homo sapiens
  misc_feature (61)..(62): /note="This region represents a CpG dinucleotide"
  misc_feature (61)..(61): /note="Nucleotide may be methylated to form 5-methylcytosine"
cgcgactaaagaggggactggttttgatgacagtgatttatcgcctcagcacagcacgcacgggacgctgtctctccaagcgatttgaccagagcatcccgtcctcgcctcctgtccaaacc

SEQ ID NO: 6832 - DNA, 122 bp, Homo sapiens
  misc_feature (61)..(62): /note="This region represents a CpG dinucleotide"
  misc_feature (61)..(61): /note="Nucleotide may be methylated to form 5-methylcytosine"
tgtgtaactcagccaaaggagatgccaaatcagagtggctgttcagcagcaccaagctgccggaggtttattcacaggatccctgggcaggaacccctagccaagtttccagcagtgcaaga

SEQ ID NO: 6833 - DNA, 122 bp, Homo sapiens
  misc_feature (61)..(62): /note="This region represents a CpG dinucleotide"
  misc_feature (61)..(61): /note="Nucleotide may be methylated to form 5-methylcytosine"
aattgcactttcaaaggaatgcttgtatagaaactttctcggcttcaaggaaaaataatacgctttgaatggctgttcaacagcatagaaattagctgagtagaaggcactcatatagccat

SEQ ID NO: 6834 - DNA, 122 bp, Homo sapiens
  misc_feature (61)..(62): /note="This region represents a CpG dinucleotide"
  misc_feature (61)..(61): /note="Nucleotide may be methylated to form 5-methylcytosine"
tccctgtggaagtagcgctcatatttggaccggctcccatctgcagtctacagccagattcgtctttctgaagcttagctccagggatcagccctttcctactcatagatgagctctggctt

SEQ ID NO: 6835 - DNA, 122 bp, Homo sapiens
  misc_feature (61)..(62): /note="This region represents a CpG dinucleotide"
  misc_feature (61)..(61): /note="Nucleotide may be methylated to form 5-methylcytosine"
atttgttacacagcagtctccattcgcttttctccatactccattattcactattttctccgtatgccattgtccatacaccatttctatcatacatttttcattctctatattccacctct

SEQ ID NO: 6836 - DNA, 122 bp, Homo sapiens
  misc_feature (61)..(62): /note="This region represents a CpG dinucleotide"
  misc_feature (61)..(61): /note="Nucleotide may be methylated to form 5-methylcytosine"
aggaaatgaccatagcagcctgaggagcacttaggacttgtcactcataagaaccacaggcgtggtcattacaaccttacagctgtcccagatggcaggaaattaatttatgctcataaatt

SEQ ID NO: 6837 - DNA, 122 bp, Homo sapiens
  misc_feature (61)..(62): /note="This region represents a CpG dinucleotide"
  misc_feature (61)..(61): /note="Nucleotide may be methylated to form 5-methylcytosine"
cgtctgcctactcagcccgctacgaccgcctggccagcgtggtctacgctgtcatcacgccgaccttgaaccctttcatcaacagccttcgcaacaaagaggtcaagggcgccctgaaaagg

SEQ ID NO: 6838 - DNA, 122 bp, Homo sapiens
  misc_feature (61)..(62): /note="This region represents a CpG dinucleotide"
  misc_feature (61)..(61): /note="Nucleotide may be methylated to form 5-methylcytosine"
tttgtgtaagcactttgctgggtgctagggattcagcagtggacaaggtaaacaagattccgccctcctgaattctgtcacctggccaaaataaacatttaacaagtacgctgctagaattt

SEQ ID NO: 6839 - DNA, 122 bp, Homo sapiens
  misc_feature (61)..(62): /note="This region represents a CpG dinucleotide"
  misc_feature (61)..(61): /note="Nucleotide may be methylated to form 5-methylcytosine"
caaactccaactatattcttggcttccctccctcctctggtggaaggaatgcaaaactgtcgacagttctggctattgctacctgtttgcactgtctgtcccaaaggtctcctcgacttgca

SEQ ID NO: 6840 - DNA, 122 bp, Homo sapiens
  misc_feature (61)..(62): /note="This region represents a CpG dinucleotide"
  misc_feature (61)..(61): /note="Nucleotide may be methylated to form 5-methylcytosine"
aagcaatgagggccagtccccaggccaggctgctgctgggtacccatggctgcgtgtgagcgaggcaggaccccacctcctccccgtctgcagtccatcctgaccctacagtccccagtctc

SEQ ID NO: 6841 - DNA, 122 bp, Homo sapiens
  misc_feature (61)..(62): /note="This region represents a CpG dinucleotide"
  misc_feature (61)..(61): /note="Nucleotide may be methylated to form 5-methylcytosine"
tgaaggcttcggatgggaagtttgcgttggagtccaacacccgacaggaaccccagttaacgcctccgcatggccaggggcagagttcttgacacctgtagcttaatcaacgcaggtggaga

SEQ ID NO: 6842 - DNA, 122 bp, Homo sapiens
  misc_feature (61)..(62): /note="This region represents a CpG dinucleotide"
  misc_feature (61)..(61): /note="Nucleotide may be methylated to form 5-methylcytosine"
tctttttggtgcctggtgcaatgcataatggaggcctgggtgagcagagcagccgcctctcgttgagctaaaattttcattgggtgtttaatgtctttatttcctaatgtcaggaggcctct

SEQ ID NO: 6843 - DNA, 122 bp, Homo sapiens
  misc_feature (61)..(62): /note="This region represents a CpG dinucleotide"
  misc_feature (61)..(61): /note="Nucleotide may be methylated to form 5-methylcytosine"
aaaatgtaagtgtatgtgacttaccacaaagacctagaatttcacatttcttatattttacgtgcaggtgctgaggtcattatttctcagatttgtcctgttatgagaatattacctaagat

SEQ ID NO: 6844 - DNA, 122 bp, Homo sapiens
  misc_feature (61)..(62): /note="This region represents a CpG dinucleotide"
  misc_feature (61)..(61): /note="Nucleotide may be methylated to form 5-methylcytosine"
aaaatgattataaggtcttaatgtgaaacagcttggtgaaatgtgtggtttttttccattcgctgccatattcagatagattttcttaaatagtgtttagcctgtaggtcaccagttttaaa

SEQ ID NO: 6845 - DNA, 122 bp, Homo sapiens
  misc_feature (61)..(62): /note="This region represents a CpG dinucleotide"
  misc_feature (61)..(61): /note="Nucleotide may be methylated to form 5-methylcytosine"
gactctgtatgagaccttcttcaaaaaggacagttaagtaactgcaacctgaatctgaaacgtaagaaaaagtccaaacagatggcaccattcaaataaagaagaattctcactgctctccc

SEQ ID NO: 6846 - DNA, 122 bp, Homo sapiens
  misc_feature (61)..(62): /note="This region represents a CpG dinucleotide"
  misc_feature (61)..(61): /note="Nucleotide may be methylated to form 5-methylcytosine"
tattttcatccacagctccctaaacacaaagctgtggatttcataaatgtaaatatactgcgtaatctgcccactgggagttcatagtttagtaaggactcagagaagacaatttcactgtg

SEQ ID NO: 6847 - DNA, 122 bp, Homo sapiens
  misc_feature (61)..(62): /note="This region represents a CpG dinucleotide"
  misc_feature (61)..(61): /note="Nucleotide may be methylated to form 5-methylcytosine"
agaaggtaggccctgctgctgcaccctggcttccccgttgctgggaggcctgtctccacacgccaccctcaggccctcctgcacagtggctcatggtggctgacacactgtatttgagggtg

SEQ ID NO: 6848 - DNA, 122 bp, Homo sapiens
  misc_feature (61)..(62): /note="This region represents a CpG dinucleotide"
  misc_feature (61)..(61): /note="Nucleotide may be methylated to form 5-methylcytosine"
aggggctcatttgcaagctcagacctaaaacagcaagctgcaggtgttggctactaaatccgtgtaaacaggcatcaccaacttattttaagcctcagtgaaaaggttagtcacagtatcag

SEQ ID NO: 6849 - DNA, 122 bp, Homo sapiens
  misc_feature (61)..(62): /note="This region represents a CpG dinucleotide"
  misc_feature (61)..(61): /note="Nucleotide may be methylated to form 5-methylcytosine"
ctagtgccttgccagtccatgcaatggatagactaaatctgcaagaccatgaaggcagggcgggatgctctatgggctgagctcatggctcctgaaccagcctgtctggctccaatcttgtt

SEQ ID NO: 6850 - DNA, 122 bp, Homo sapiens
  misc_feature (61)..(62): /note="This region represents a CpG dinucleotide"
  misc_feature (61)..(61): /note="Nucleotide may be methylated to form 5-methylcytosine"
agcaaccccacttatgtgctctcacatgtaggtttcattagcatgctcttttcttccgctcgcaacttgtcaatcaagatggaatctgacagcattggtaattttagtagttatttctttcc

SEQ ID NO: 6851 - DNA, 122 bp, Homo sapiens
  misc_feature (61)..(62): /note="This region represents a CpG dinucleotide"
  misc_feature (61)..(61): /note="Nucleotide may be methylated to form 5-methylcytosine"
ctgcccactagaaactgagggattgccacagctcccgtgaggttcagcaattccctgggacgacacagaactcagggagacactttactgttagaagattattgtaaagaacacaactcggt

SEQ ID NO: 6852 - DNA, 122 bp, Homo sapiens
  misc_feature (61)..(62): /note="This region represents a CpG dinucleotide"
  misc_feature (61)..(61): /note="Nucleotide may be methylated to form 5-methylcytosine"
aatgaagcagtgcaggttaggggcaagagcatcagcttgggcatcacacaggactgggaacgtgtgggccatgctgctagcacatagttgaatagctgtgggccaattgctggatctctctg

SEQ ID NO: 6853 - DNA, 122 bp, Homo sapiens
  misc_feature (61)..(62): /note="This region represents a CpG dinucleotide"
  misc_feature (61)..(61): /note="Nucleotide may be methylated to form 5-methylcytosine"
aaccatttgcgagattgaggtaatgtatttcccagacttaagcaatttactccttcccaccgtgctgaatcaggctgttaaatcctcttgctgtgtgcgtagagctattggcaccagggaaa

SEQ ID NO: 6854 - DNA, 122 bp, Homo sapiens
  misc_feature (61)..(62): /note="This region represents a CpG dinucleotide"
  misc_feature (61)..(61): /note="Nucleotide may be methylated to form 5-methylcytosine"
ccctaccctccgacctccagccccctctgctatgaaacaaggaggtcacgagagttattgcgcttttggaattgagctcatctaatgaggaggctttcatgaattgtattagctcacatttg

SEQ ID NO: 6855 - DNA, 122 bp, Homo sapiens
  misc_feature (61)..(62): /note="This region represents a CpG dinucleotide"
  misc_feature (61)..(61): /note="Nucleotide may be methylated to form 5-methylcytosine"
acattatagtaacagtgagcatttattgatcgcctactataggccaggcactgggcgaggcgtttcattgatattatctcattagttaccaccttgccttgcttgttctgtatcctgcttga

SEQ ID NO: 6856 - DNA, 122 bp, Homo sapiens
  misc_feature (61)..(62): /note="This region represents a CpG dinucleotide"
  misc_feature (61)..(61): /note="Nucleotide may be methylated to form 5-methylcytosine"
ccatgcctactctccatcttgtgtgtgtcttaaaggtgcttagagaaacttccccctccccgcacaccaccaatagatataggtagatatttctggcaggggaaagtgtgctctggagtgcc

SEQ ID NO: 6857 - DNA, 122 bp, Homo sapiens
  misc_feature (61)..(62): /note="This region represents a CpG dinucleotide"
  misc_feature (61)..(61): /note="Nucleotide may be methylated to form 5-methylcytosine"
aaatggagttgtcccatgttcagtcaaaatggccaggcctttaaagcccactcagtttcacgtggtccatacccaaaaggaagtgaagttgggtagggcagccctcttggcaggcaatccct

SEQ ID NO: 6858 - DNA, 122 bp, Homo sapiens
  misc_feature (61)..(62): /note="This region represents a CpG dinucleotide"
  misc_feature (61)..(61): /note="Nucleotide may be methylated to form 5-methylcytosine"
ctaatgttttgagtcaaagtgtgcatcctaaattggcatttaatctgctgctgatgacagcgttgcaacaccattctaagcaatgctcaggggaaaaggttttaagatcaaagtcaattctt

SEQ ID NO: 6859 - DNA, 122 bp, Homo sapiens
  misc_feature (61)..(62): /note="This region represents a CpG dinucleotide"
  misc_feature (61)..(61): /note="Nucleotide may be methylated to form 5-methylcytosine"
tctggacgtgcttcccagaggagacgtaggtgccatagaagaactcccaagtatgagggtcgacaggcattaaacaagtaatactgagggtgaatcggggtgggcgtcctggaggaagggct

SEQ ID NO: 6860 - DNA, 122 bp, Homo sapiens
  misc_feature (61)..(62): /note="This region represents a CpG dinucleotide"
  misc_feature (61)..(61): /note="Nucleotide may be methylated to form 5-methylcytosine"
ttgtgctaaactgccaaagatggggaggagacagctacaaacataggcaagtatcccctacgctaggacaacattgccatggcaaccagggtaagggcaaccagctttgagtgtgaacctgc

SEQ ID NO: 6861 - DNA, 122 bp, Homo sapiens
  misc_feature (61)..(62): /note="This region represents a CpG dinucleotide"
  misc_feature (61)..(61): /note="Nucleotide may be methylated to form 5-methylcytosine"
tctctgcaattaaccctgtgctgtattactatccttttgtgacctggttgtcagggtacccgctctggggaggattatccgtgagtacaaggccatatggtctccttcctgggtcaccagac

SEQ ID NO: 6862 - DNA, 122 bp, Homo sapiens
  misc_feature (61)..(62): /note="This region represents a CpG dinucleotide"
  misc_feature (61)..(61): /note="Nucleotide may be methylated to form 5-methylcytosine"
ctagggctgttttacatatgcttctagttaccacctattctcacctgtacttgcacagttcgtttgtaagtttgttttgctgttgttcttgttatggtgggtttttttttcttttttttgga

SEQ ID NO: 6863 - DNA, 122 bp, Homo sapiens
  misc_feature (61)..(62): /note="This region represents a CpG dinucleotide"
  misc_feature (61)..(61): /note="Nucleotide may be methylated to form 5-methylcytosine"
tgagtgtgagtcctagtactgattctgcttcctggacaagtcacattattaaacactagacgtcaggagaaaatatttgcgttttgtttatcaatgactttcagtttccaccagacactggt

SEQ ID NO: 6864 - DNA, 122 bp, Homo sapiens
  misc_feature (61)..(62): /note="This region represents a CpG dinucleotide"
  misc_feature (61)..(61): /note="Nucleotide may be methylated to form 5-methylcytosine"
ctcctccctgggagccgccatcttgtgtgaagaagtaacaactaaacatggcggcagcggcgccggcggtcgggcgaggaggcggagccgggtgacgtcaccgcttccccccactcgccctc

SEQ ID NO: 6865 - DNA, 122 bp, Homo sapiens
  misc_feature (61)..(62): /note="This region represents a CpG dinucleotide"
  misc_feature (61)..(61): /note="Nucleotide may be methylated to form 5-methylcytosine"
caccagtgaagacccaagacagcacaaaaggccagctagcagagaaacatgattgttcaccgtccatctctgggacaacctaggtccttcttgcctttctgtcctcctcagttgacagagtc

SEQ ID NO: 6866 - DNA, 122 bp, Homo sapiens
  misc_feature (61)..(62): /note="This region represents a CpG dinucleotide"
  misc_feature (61)..(61): /note="Nucleotide may be methylated to form 5-methylcytosine"
ccctctctgtcttgcggccctctgcctccccgcccagctctggaggcagccccggggagccggcatggtcagggtcatgctgttttcagttgtggacgagtgcttagctttgcagacctgat

SEQ ID NO: 6867 - DNA, 122 bp, Homo sapiens
  misc_feature (61)..(62): /note="This region represents a CpG dinucleotide"
  misc_feature (61)..(61): /note="Nucleotide may be methylated to form 5-methylcytosine"
ctggctatgagtcataaattcagaatcggggcaaacaattcttctatctacttactttcacgtaaaagtgtttaataaaaacacttcttgattactgttgttctatttatcctggatcatca

SEQ ID NO: 6868 - DNA, 122 bp, Homo sapiens
  misc_feature (61)..(62): /note="This region represents a CpG dinucleotide"
  misc_feature (61)..(61): /note="Nucleotide may be methylated to form 5-methylcytosine"
aaaaaggttttcagcagataaacagccgggacctcgggggattgtgcctcagcctaggcccggtagtcgaagacatatggacaggaaatgggcaagacacgggcctttcagagaagagagac

SEQ ID NO: 6869 - DNA, 122 bp, Homo sapiens
  misc_feature (61)..(62): /note="This region represents a CpG dinucleotide"
  misc_feature (61)..(61): /note="Nucleotide may be methylated to form 5-methylcytosine"
ggaacataccctagaggtcacctccaaagggcacccctctccttgtgggcccctggcatgcgcccttgctgtctatcctgtgaagccttggtgtggaatctggcaggcctgactttaattct

SEQ ID NO: 6870 - DNA, 122 bp, Homo sapiens
  misc_feature (61)..(62): /note="This region represents a CpG dinucleotide"
  misc_feature (61)..(61): /note="Nucleotide may be methylated to form 5-methylcytosine"
tctatccttacacatacaaagcacccaatatgtatttgttgaaccagtgctgctgatttacgtatgatatttctgtttttaaattacgaagacctcacataaatcaaatacacatgatgaat

SEQ ID NO: 6871 - DNA, 122 bp, Homo sapiens
  misc_feature (61)..(62): /note="This region represents a CpG dinucleotide"
  misc_feature (61)..(61): /note="Nucleotide may be methylated to form 5-methylcytosine"
gctgagctggcagctgccactgctgagggcccagcccaccaaaagcagctgtttttttgacggagaaataaaacaggcagtggtaattaagaataaaataacattatgatagataaatatgc

SEQ ID NO: 6872 - DNA, 122 bp, Homo sapiens
  misc_feature (61)..(62): /note="This region represents a CpG dinucleotide"
  misc_feature (61)..(61): /note="Nucleotide may be methylated to form 5-methylcytosine"
gcggctcctcgggcactcctgccctccttgcaagtccccagttcgcttctccctcctcagcgcgccccaggagcagctcgcactcctggttcaggttgcagctgcccttctccaccacacgg

SEQ ID NO: 6873 - DNA, 122 bp, Homo sapiens
  misc_feature (61)..(62): /note="This region represents a CpG dinucleotide"
  misc_feature (61)..(61): /note="Nucleotide may be methylated to form 5-methylcytosine"
acctaggaccttggcccaccacggaccctgcccatcccggacccagcccactgtaagctccgcctatctcggaccccagcccatcccaattgccgcccacttcatggtctccagccaccgcg

SEQ ID NO: 6874 - DNA, 122 bp, Homo sapiens
  misc_feature (61)..(62): /note="This region represents a CpG dinucleotide"
  misc_feature (61)..(61): /note="Nucleotide may be methylated to form 5-methylcytosine"
cctctaattccccgacagtcttcgtgtggttatccagcgccctgccactcccatctcaagcgactggagagccacagcccttgtctcagtactggatcacactggtagctgtgttctccgcg

SEQ ID NO: 6875 - DNA, 122 bp, Homo sapiens
  misc_feature (61)..(62): /note="This region represents a CpG dinucleotide"
  misc_feature (61)..(61): /note="Nucleotide may be methylated to form 5-methylcytosine"
ttcatttaaaatttccctgacaccgatttttcttaactcttactgtagcaaaatgcctgtcgcaatctaaataaggaaccacatgtgtttgcatcttttgtcctttgtgttttcactttctt

SEQ ID NO: 6876 - DNA, 122 bp, Homo sapiens
  misc_feature (61)..(62): /note="This region represents a CpG dinucleotide"
  misc_feature (61)..(61): /note="Nucleotide may be methylated to form 5-methylcytosine"
ggttgtgtgtgtgttttaaacaaaactgagtcgtaggtaaagaaagacatcctacagacacgactgagaagggctcaaagaaaagaacagccaaggagtagtgtccccaaatactaagcaaa

SEQ ID NO: 6877 - DNA, 122 bp, Homo sapiens
  misc_feature (61)..(62): /note="This region represents a CpG dinucleotide"
  misc_feature (61)..(61): /note="Nucleotide may be methylated to form 5-methylcytosine"
aagtaacacctgactcatggagttttcctgctgatgatataatgagatgaggtatgtgaacgaagcacatggtttattaaatgtgtcatggcagtttcactgtcttgggtggtatgggaagg

SEQ ID NO: 6878 - DNA, 122 bp, Homo sapiens
  misc_feature (61)..(62): /note="This region represents a CpG dinucleotide"
  misc_feature (61)..(61): /note="Nucleotide may be methylated to form 5-methylcytosine"
cccgccccaaaaaaaggcagggttgttcttggggcaaactgtggaatctccttttgcagacgaaatctttctgcaatggctgagtcaagttcagcggaatgggaggagagtgggccgtgggg

SEQ ID NO: 6879 - DNA, 122 bp, Homo sapiens
  misc_feature (61)..(62): /note="This region represents a CpG dinucleotide"
  misc_feature (61)..(61): /note="Nucleotide may be methylated to form 5-methylcytosine"
tggggtgcagcagtcaaaacaccagtgtgaacaggacattgagaatggccggacaggaagcgagcctgggcactgacagcctcaagcagggatagacctgcaaagaaatccccaagcccgct

SEQ ID NO: 6880 - DNA, 122 bp, Homo sapiens
  misc_feature (61)..(62): /note="This region represents a CpG dinucleotide"
  misc_feature (61)..(61): /note="Nucleotide may be methylated to form 5-methylcytosine"
cttactctggcaaatcagaaccaatgttattctcccagatttggggcatcacatctattacgggtcatggctcctcctgaagtcaaaggcccttcatttccatcttctacatggattcctgc

SEQ ID NO: 6881 - DNA, 122 bp, Homo sapiens
  misc_feature (61)..(62): /note="This region represents a CpG dinucleotide"
  misc_feature (61)..(61): /note="Nucleotide may be methylated to form 5-methylcytosine"
ttccagcatggtcagcaccccctctgctacacacattcccctcgtgaggggccaggggtgcggccctgtgaccaggacagccattcattgggtgactttgagccaccactggcccctgacct

SEQ ID NO: 6882 - DNA, 122 bp, Homo sapiens
  misc_feature (61)..(62): /note="This region represents a CpG dinucleotide"
  misc_feature (61)..(61): /note="Nucleotide may be methylated to form 5-methylcytosine"
caggaagtgctaacaatctggaaacagcctgtgcctgaagaagagctcaattcagcatgacggtagaccaggctggtactgtaactcttggttctgctcagaagctggtcttaacgggctct

SEQ ID NO: 6883 - DNA, 122 bp, Homo sapiens
  misc_feature (61)..(62): /note="This region represents a CpG dinucleotide"
  misc_feature (61)..(61): /note="Nucleotide may be methylated to form 5-methylcytosine"
ggaggtttgtttacggctgccacagttgggagccatggtcgacttcggaacagggcctaacgttgtgaaagcggtgatcacccaagatcaaccagcaggatattttagacggcccaggcgag

SEQ ID NO: 6884 - DNA, 122 bp, Homo sapiens
  misc_feature (61)..(62): /note="This region represents a CpG dinucleotide"
  misc_feature (61)..(61): /note="Nucleotide may be methylated to form 5-methylcytosine"
tgaacatcggattatgtacgattctgcagtgccctcggaggcccattagagtctggagctcgagaagcataacaaactctggtctgatatttgtaaggagcttgacagccaaggagccactc

SEQ ID NO: 6885 - DNA, 122 bp, Homo sapiens
  misc_feature (61)..(62): /note="This region represents a CpG dinucleotide"
  misc_feature (61)..(61): /note="Nucleotide may be methylated to form 5-methylcytosine"
cattcatttccccgaagctgccggattcagatcccaccagccacgttggtacttgctctccgcttcctgtgtgtagacaggaggcaccatctctgtattgactctgtagcaatctggagggt

SEQ ID NO: 6886 - DNA, 122 bp, Homo sapiens
  misc_feature (61)..(62): /note="This region represents a CpG dinucleotide"
  misc_feature (61)..(61): /note="Nucleotide may be methylated to form 5-methylcytosine"
acatgctaggattacaggcatgagccaccacccagcccaacccttaaaacttttaactgacgcttagcatggcaccaaaataatatttattgaatgtattctggtgccaacctctggatgca

SEQ ID NO: 6887 - DNA, 122 bp, Homo sapiens
  misc_feature (61)..(62): /note="This region represents a CpG dinucleotide"
  misc_feature (61)..(61): /note="Nucleotide may be methylated to form 5-methylcytosine"
tgagtcagaaatcagatctgttgccatacagctgccgttatgtgatcatttgcaagtcaacgtttctcaattgtttagtcatttgtaagacaaaaagactggttggatttcagagaattttg

SEQ ID NO: 6888 - DNA, 122 bp, Homo sapiens
  misc_feature (61)..(62): /note="This region represents a CpG dinucleotide"
  misc_feature (61)..(61): /note="Nucleotide may be methylated to form 5-methylcytosine"
tcattgttaaggttttataaatgtgcattattgcgcaaggagtggttctggaaggataaacgagaaaatgattaacccattggcttcagggacggaaactgaatggctgctgggtaatgggg

SEQ ID NO: 6889 - DNA, 122 bp, Homo sapiens
  misc_feature (61)..(62): /note="This region represents a CpG dinucleotide"
  misc_feature (61)..(61): /note="Nucleotide may be methylated to form 5-methylcytosine"
acaaattcatcccaaatgcccgcacgaggtttaattaccaccacaacttggaggtgggggcggagggtgggtggggaggtgttggtagagaagtaatggttaaggcaaaaacaatcctgtat

SEQ ID NO: 6890 - DNA, 122 bp, Homo sapiens
  misc_feature (61)..(62): /note="This region represents a CpG dinucleotide"
  misc_feature (61)..(61): /note="Nucleotide may be methylated to form 5-methylcytosine"
ttgaaagacaagtgtgtggtttgatcttttggcttggccttttatatgttggcatacttccggagtcttgcattacttctccctggattcttcccttagggtgggctgtcacctgggagggg

SEQ ID NO: 6891 - DNA, 122 bp, Homo sapiens
  misc_feature (61)..(62): /note="This region represents a CpG dinucleotide"
  misc_feature (61)..(61): /note="Nucleotide may be methylated to form 5-methylcytosine"
tcaccgttggttggatcaacatggctccagccccagcctgtggttatcagtgacataagacgcttattctggcctgggcctggtggggggtgagggggaggcacatttgtttgggtggttgg

SEQ ID NO: 6892 - DNA, 122 bp, Homo sapiens
  misc_feature (61)..(62): /note="This region represents a CpG dinucleotide"
  misc_feature (61)..(61): /note="Nucleotide may be methylated to form 5-methylcytosine"
aagcatcttatgtgcttctacattgtctttatagccagctgtctgaagttctacatcatccgtcagtgatgggtcctgagtaaactcagcagtctcctctaagtaacttgtatatatccctt

SEQ ID NO: 6893 - DNA, 122 bp, Homo sapiens
  misc_feature (61)..(62): /note="This region represents a CpG dinucleotide"
  misc_feature (61)..(61): /note="Nucleotide may be methylated to form 5-methylcytosine"
ataattatagtaatttggctattacgctatatggagtcagcagttagttgctagaaaacacggtgataggggtgattcaagggattttcatcccaactgggtgtttgatcctgctgactttt

SEQ ID NO: 6894 - DNA, 122 bp, Homo sapiens
  misc_feature (61)..(62): /note="This region represents a CpG dinucleotide"
  misc_feature (61)..(61): /note="Nucleotide may be methylated to form 5-methylcytosine"
cttgctcctgacaatatactactgttacagcaattctgtagccagtaagctggctggcaacgtgtaaagtggattatatctacaccatggcccagccttccttccccatgaggaagaggctt

SEQ ID NO: 6895 - DNA, 122 bp, Homo sapiens
  misc_feature (61)..(62): /note="This region represents a CpG dinucleotide"
  misc_feature (61)..(61): /note="Nucleotide may be methylated to form 5-methylcytosine"
gaggctgactttgggagagcgacctgttgaggctcacacattgaggcaaggcactaccaccgcccggtgctcttgcagctctgtcacggagcaccctgccagcacctctcatggacagtctc

SEQ ID NO: 6896 - DNA, 122 bp, Homo sapiens
  misc_feature (61)..(62): /note="This region represents a CpG dinucleotide"
  misc_feature (61)..(61): /note="Nucleotide may be methylated to form 5-methylcytosine"
cactatcaattctggtttgcaccctggtcacttaatcactgtgcttccacaaccatgaaacgtcagtatggcaaatcctgccccaagctggtcatatcatacatccaaaatatcaaggcttc

SEQ ID NO: 6897 - DNA, 122 bp, Homo sapiens
  misc_feature (61)..(62): /note="This region represents a CpG dinucleotide"
  misc_feature (61)..(61): /note="Nucleotide may be methylated to form 5-methylcytosine"
gacaagtaggccaagcaggctctgactcatagaggttgctgcctgcttgtgccctgtgtgcgccttttgagtaaagagcacagtccaccaagtccagctctgcatgctcaagtgctattgaa

SEQ ID NO: 6898 - DNA, 122 bp, Homo sapiens
  misc_feature (61)..(62): /note="This region represents a CpG dinucleotide"
  misc_feature (61)..(61): /note="Nucleotide may be methylated to form 5-methylcytosine"
gctcaaaaacaaaagcaaaaactgagcacctgctatatacaggccaggcactgtactaagcgtttaacacagattgatagatgacggtcccagcaaccccactggaatgaccaggtctggga

SEQ ID NO: 6899 - DNA, 122 bp, Homo sapiens
  misc_feature (61)..(62): /note="This region represents a CpG dinucleotide"
  misc_feature (61)..(61): /note="Nucleotide may be methylated to form 5-methylcytosine"
aactgccagtgcgaaggcctcaaggtgggagaatgctttgtgtgttccagcaagggcggccgggccagcgggctcagggaggagtgagggcaaccctggctgttaccactggtcagttctgg

SEQ ID NO: 6900 - DNA, 122 bp, Homo sapiens
  misc_feature (61)..(62): /note="This region represents a CpG dinucleotide"
  misc_feature (61)..(61): /note="Nucleotide may be methylated to form 5-methylcytosine"
tagcctcaggcatcccagtatgagagcaacttcactaaacagtactgttctcactgacttcggtgacttcaaaggctttccttgaggggatagcaggaattaagttgagtgagcgtggggga

SEQ ID NO: 6901 - DNA, 122 bp, Homo sapiens
  misc_feature (61)..(62): /note="This region represents a CpG dinucleotide"
  misc_feature (61)..(61): /note="Nucleotide may be methylated to form 5-methylcytosine"
ccgctctgagtttgagtagagggcaaaatgggagaatggaaggagatggtgaagaaggcacgctgctgctgaaacgtgctttgggcttagtgagaatgaacactcccacttctgggaattga

SEQ ID NO: 6902 - DNA, 122 bp, Homo sapiens
  misc_feature (61)..(62): /note="This region represents a CpG dinucleotide"
  misc_feature (61)..(61): /note="Nucleotide may be methylated to form 5-methylcytosine"
ccgccgccgcgggcccgggagagcgccgagctgccgctgcccgccggctgggaggaggcgcgagactacgacggtcgcgtcttttacattgaccacaacacgcgccagacgtcgtggatcga

SEQ ID NO: 6903 - DNA, 122 bp, Homo sapiens
  misc_feature (61)..(62): /note="This region represents a CpG dinucleotide"
  misc_feature (61)..(61): /note="Nucleotide may be methylated to form 5-methylcytosine"
tggcacaaaaggcaccaacattccctttccaaaccatccatcaccatgggtggaaggcagcgccacctgctgcccatcatattatggctcacatacccataatttccttgcggtgctgaatt

SEQ ID NO: 6904 - DNA, 122 bp, Homo sapiens
  misc_feature (61)..(62): /note="This region represents a CpG dinucleotide"
  misc_feature (61)..(61): /note="Nucleotide may be methylated to form 5-methylcytosine"
cagtgaaaacaggatatctaatgccttttcctctttctgttttgttttgacacggagtctcggtctgtcactcaggctggagtgcagtggcatgatctctgctcactgcaggcttcacctcc

SEQ ID NO: 6905 - DNA, 122 bp, Homo sapiens
  misc_feature (61)..(62): /note="This region represents a CpG dinucleotide"
  misc_feature (61)..(61): /note="Nucleotide may be methylated to form 5-methylcytosine"
ttgtgcgtttgtgtatgtgtgtgtgcgtgtgtgtgcaaggttatagaaagaatacaaactcgggtaactatggggttattatggagtaaactatagaaactacaagtaaaatcatttttaaa

SEQ ID NO: 6906 - DNA, 122 bp, Homo sapiens
  misc_feature (61)..(62): /note="This region represents a CpG dinucleotide"
  misc_feature (61)..(61): /note="Nucleotide may be methylated to form 5-methylcytosine"
tatataggagttggcacagggccagtctggggtaagaactcaaacatcagccattgttggcgttgtgcaaaagtacttggaacaccgctggcctaaaggaaggttttcctggccaggtgtgg

SEQ ID NO: 6907 - DNA, 122 bp, Homo sapiens
  misc_feature (61)..(62): /note="This region represents a CpG dinucleotide"
  misc_feature (61)..(61): /note="Nucleotide may be methylated to form 5-methylcytosine"
taattataattaagcaataattttacatgaaccataaccagtaaaatatttcatgagaagcgatgttgcaaacagcatgtactgtgctgacattagccaactcactaggtacagctatgtta

SEQ ID NO: 6908 - DNA, 122 bp, Homo sapiens
  misc_feature (61)..(62): /note="This region represents a CpG dinucleotide"
  misc_feature (61)..(61): /note="Nucleotide may be methylated to form 5-methylcytosine"
cagtactctgcgttcctgaccttcaagggccttctgttacttcagataacgggaagctgccgtttctgtgaaaactccttatcacttaagagagcatttttctgttttcctagaagagtctt

SEQ ID NO: 6909 - DNA, 122 bp, Homo sapiens
  misc_feature (61)..(62): /note="This region represents a CpG dinucleotide"
  misc_feature (61)..(61): /note="Nucleotide may be methylated to form 5-methylcytosine"
ggagccccgcccagagcctgctccgctctcaggccgcccaggctagccagccgccagccgcgctcgcccatggagatcctagacgagttcgacagggggaagctccaagaatccttcccaaa

SEQ ID NO: 6910 - DNA, 122 bp, Homo sapiens
  misc_feature (61)..(62): /note="This region represents a CpG dinucleotide"
  misc_feature (61)..(61): /note="Nucleotide may be methylated to form 5-methylcytosine"
tcactggattaataccacatactatcacaggaaatagggtatgttgtgtaatttggatgccgaaaacctgagatcaaatttcagcttgatcatttattagctgcagacaagatgagctacat

SEQ ID NO: 6911 - DNA, 122 bp, Homo sapiens
  misc_feature (61)..(62): /note="This region represents a CpG dinucleotide"
  misc_feature (61)..(61): /note="Nucleotide may be methylated to form 5-methylcytosine"
cttacaatgtgtatctaaaagcttcctcctgagtgtctgcctcaggccagggctctctgccgggcaccgaaacctactcatatcaaatgctaactatgaagcaaaacactggccaacaatga

SEQ ID NO: 6912 - DNA, 122 bp, Homo sapiens
  misc_feature (61)..(62): /note="This region represents a CpG dinucleotide"
  misc_feature (61)..(61): /note="Nucleotide may be methylated to form 5-methylcytosine"
gctatctctagaacagttcaggggaagtataatcttgtgacagagtttgtgtgattccagcgcagtaggttgtaaacaactatgaggaaacaggtcagagaacaagctggcctaatgattaa

SEQ ID NO: 6913 - DNA, 122 bp, Homo sapiens
  misc_feature (61)..(62): /note="This region represents a CpG dinucleotide"
  misc_feature (61)..(61): /note="Nucleotide may be methylated to form 5-methylcytosine"
taccgaggtccttgcccctcgccctccccctaccccagctaccccaggctgcggggagctcgccccgcctgcaggacgggcgtctttacctgctcacaaaaggcactttgcatttaaaccat

SEQ ID NO: 6914 - DNA, 122 bp, Homo sapiens
  misc_feature (61)..(62): /note="This region represents a CpG dinucleotide"
  misc_feature (61)..(61): /note="Nucleotide may be methylated to form 5-methylcytosine"
actggggtaactggttttccttttggtaaaaaccaagttacactcctgtttcataagccacgttgttaatattaatcgtgtgcttatgtggcaggtatgagtacacacccctcaaatctcca

SEQ ID NO: 6915 - DNA, 122 bp, Homo sapiens
  misc_feature (61)..(62): /note="This region represents a CpG dinucleotide"
  misc_feature (61)..(61): /note="Nucleotide may be methylated to form 5-methylcytosine"
ggggggtagagaggctatgggacaaatgataatctggtggcactaaacataaaggacacacgctggctcagcccctgattcaccagtgagtcactgtctgtgagcagaaagtatggccctga

SEQ ID NO: 6916 - DNA, 122 bp, Homo sapiens
  misc_feature (61)..(62): /note="This region represents a CpG dinucleotide"
  misc_feature (61)..(61): /note="Nucleotide may be methylated to form 5-methylcytosine"
tcactctggccgggcccgtggattaccagagtcaggacacctacgagctgcacgtgcgggcgcaggaccgcgctgccgcctgcaaggtcatcctgcgcatccgcgacgtcaatgacaacgcg

SEQ ID NO: 6917 - DNA, 122 bp, Homo sapiens
  misc_feature (61)..(62): /note="This region represents a CpG dinucleotide"
  misc_feature (61)..(61): /note="Nucleotide may be methylated to form 5-methylcytosine"
tgacactctggagaatccacgatgccctgagtcaccctttgcttctaggacagtgttaggcggaaacacccttcactgagagcctgagttcccggagacctggttccatgacagcagctggt

SEQ ID NO: 6918 - DNA, 122 bp, Homo sapiens
  misc_feature (61)..(62): /note="This region represents a CpG dinucleotide"
  misc_feature (61)..(61): /note="Nucleotide may be methylated to form 5-methylcytosine"
cttcagcccagtctgttaatcaccttggcattactcacttaacgtcctgtaactgtctgacgtaaaaaaaaaaaaaaaaaaaaaaaaaaaaaaaaaaaaagtctacaaaaccactcagcctc

SEQ ID NO: 6919 - DNA, 122 bp, Homo sapiens
  misc_feature (61)..(62): /note="This region represents a CpG dinucleotide"
  misc_feature (61)..(61): /note="Nucleotide may be methylated to form 5-methylcytosine"
cgtgactgggaagaaagggtaggaccatgctgtgaagagctttaggctttagatgctaagcgaaggatcctgaacttaaaagtgccagattgtgaaataaaagggaaaggagttttcctgta

SEQ ID NO: 6920 - DNA, 122 bp, Homo sapiens
  misc_feature (61)..(62): /note="This region represents a CpG dinucleotide"
  misc_feature (61)..(61): /note="Nucleotide may be methylated to form 5-methylcytosine"
tattcaagctagccaataccctttcaggtacatgtataagagtcaagccctgtctttgttcggggctcagcctttggaagttaatccactgggcaggtagccacctaaataaaatcctctta

SEQ ID NO: 6921 - DNA, 122 bp, Homo sapiens
  misc_feature (61)..(62): /note="This region represents a CpG dinucleotide"
  misc_feature (61)..(61): /note="Nucleotide may be methylated to form 5-methylcytosine"
tcccctagagctggacttacagaaaggccacgaagggacgcaggcctgttgcctgtcacgcgtctgaggtgcttccggtgaacaatttatacgaagcgataaagaccacaccctggaacctc

SEQ ID NO: 6922 - DNA, 122 bp, Homo sapiens
  misc_feature (61)..(62): /note="This region represents a CpG dinucleotide"
  misc_feature (61)..(61): /note="Nucleotide may be methylated to form 5-methylcytosine"
agctgggttgaggggctggatggttatggaggcccttgtgggagtgcttcccaactccctcgtcatcctgcatgggataagagaggactcggacacctccgggctaagaccttagtacagct

SEQ ID NO: 6923 - DNA, 122 bp, Homo sapiens
  misc_feature (61)..(62): /note="This region represents a CpG dinucleotide"
  misc_feature (61)..(61): /note="Nucleotide may be methylated to form 5-methylcytosine"
ggttgtgaaagcactttgaaggtaaaagtgtctgttgttactctgaaaactccttttaaacggctataatagcatatgccacatgagcaaagcacagaaccttataactatgcttgcttgtg

SEQ ID NO: 6924 - DNA, 122 bp, Homo sapiens
  misc_feature (61)..(62): /note="This region represents a CpG dinucleotide"
  misc_feature (61)..(61): /note="Nucleotide may be methylated to form 5-methylcytosine"
agggagagatgagatcttaagcctctgctcattcattgggtgctgagtagcaatgcctcccgcgggccacaggaacttatctccgccgattgttacagctggaaggatggggagatagcacc

SEQ ID NO: 6925 - DNA, 122 bp, Homo sapiens
  misc_feature (61)..(62): /note="This region represents a CpG dinucleotide"
  misc_feature (61)..(61): /note="Nucleotide may be methylated to form 5-methylcytosine"
atcttggttctttgcatttccttatcaattttggaatcagcttgttgagtttcccaagatcgtgctgaggtttttagtttccacgtagatattttacatatctcttgttacattaattcctc

SEQ ID NO: 6926 - DNA, 122 bp, Homo sapiens
  misc_feature (61)..(62): /note="This region represents a CpG dinucleotide"
  misc_feature (61)..(61): /note="Nucleotide may be methylated to form 5-methylcytosine"
gaaagcttgatagctctttcagtttgaaagctgttgtctgatcatcacccctttcactttcgtagctctggacccagttgaagcccaaggacttagctctacttcctccacccctggcacct

SEQ ID NO: 6927 - DNA, 122 bp, Homo sapiens
  misc_feature (61)..(62): /note="This region represents a CpG dinucleotide"
  misc_feature (61)..(61): /note="Nucleotide may be methylated to form 5-methylcytosine"
acaagttgaattacattcatggattagtcatttacatggattagtcattctgatttcacgcgtactagtctgcactccccaatgaatttagagattaaaggcaatgtgggcatatagaaaac

SEQ ID NO: 6928 - DNA, 122 bp, Homo sapiens
  misc_feature (61)..(62): /note="This region represents a CpG dinucleotide"
  misc_feature (61)..(61): /note="Nucleotide may be methylated to form 5-methylcytosine"
gtctgatcttttcatctggaaggcacacatacatgtttgttgacaaatgaatgagaaacgcggctattggattaacatggtatttatatgctttactgaaactgccctaatggaatcaaata

SEQ ID NO: 6929 - DNA, 122 bp, Homo sapiens
  misc_feature (61)..(62): /note="This region represents a CpG dinucleotide"
  misc_feature (61)..(61): /note="Nucleotide may be methylated to form 5-methylcytosine"
attgatcttgtcttccccaacaaaagcagaggccatgctgtattcaatgttttagcaccacgtctgccatatggtggacgcccagcaagtaattacagtatgaatggaaaaacaaatatttg

SEQ ID NO: 6930 - DNA, 122 bp, Homo sapiens
  misc_feature (61)..(62): /note="This region represents a CpG dinucleotide"
  misc_feature (61)..(61): /note="Nucleotide may be methylated to form 5-methylcytosine"
aacgcagagcgctcaccacttggtactgaccgccttagatggtggggaccctccccgaagcggtactgctcagataagaatcctggtaatagatgccaatgacaaccccccagtgttcagcc

SEQ ID NO: 6931 - DNA, 122 bp, Homo sapiens
  misc_feature (61)..(62): /note="This region represents a CpG dinucleotide"
  misc_feature (61)..(61): /note="Nucleotide may be methylated to form 5-methylcytosine"
ctaattttttatttttagtaagagacggggtttcaccatgatggtcaggctggtctcgaacgagactcaagcagtcctcccaacttggcctgccaaagtgtggggattataggaatgagcca

SEQ ID NO: 6932 - DNA, 122 bp, Homo sapiens
  misc_feature (61)..(62): /note="This region represents a CpG dinucleotide"
  misc_feature (61)..(61): /note="Nucleotide may be methylated to form 5-methylcytosine"
tgttaggctgcagtgccggtctaaggaaaatctgatgaaactgtctgtcagatgactcaacgtctcccaggaatgagcctgctttagtgtccctgttgtgctcagccactgactgggtcaga

SEQ ID NO: 6933 - DNA, 122 bp, Homo sapiens
  misc_feature (61)..(62): /note="This region represents a CpG dinucleotide"
  misc_feature (61)..(61): /note="Nucleotide may be methylated to form 5-methylcytosine"
cctgttgtcagccctaggtttatctttgaaagcagttaaatgtgcaccttggtcttcctccgtgtgttcagattccttctggttaaagttcttattcagagtcatctaaaagaaatttctaa

SEQ ID NO: 6934 - DNA, 122 bp, Homo sapiens
  misc_feature (61)..(62): /note="This region represents a CpG dinucleotide"
  misc_feature (61)..(61): /note="Nucleotide may be methylated to form 5-methylcytosine"
caactctgccattcttactgcaggagggtttgtaatgcttccccacttcctcaggtccagcgactgcacctccaccactggagtgggggacacttccattgctgatggaagctgcctactgc

SEQ ID NO: 6935 - DNA, 122 bp, Homo sapiens
  misc_feature (61)..(62): /note="This region represents a CpG dinucleotide"
  misc_feature (61)..(61): /note="Nucleotide may be methylated to form 5-methylcytosine"
tgctccgagtctcgcctcctgaacccaatcattgtttatccccaccctaacgcccgcctccgggaatcttatcctgcccccatgcaaggccccgcctccaggacgcctccaacctggacgct

SEQ ID NO: 6936 - DNA, 122 bp, Homo sapiens
  misc_feature (61)..(62): /note="This region represents a CpG dinucleotide"
  misc_feature (61)..(61): /note="Nucleotide may be methylated to form 5-methylcytosine"
ctccatccagtattgggggtcatcctcctccatccaggacctgaggggtgtccttttctgcgcttccttggatggcaggctttcctatgcagtcattcagaaagtcaggctgacacatgttg

SEQ ID NO: 6937 - DNA, 122 bp, Homo sapiens
  misc_feature (61)..(62): /note="This region represents a CpG dinucleotide"
  misc_feature (61)..(61): /note="Nucleotide may be methylated to form 5-methylcytosine"
ctcagcccagtgagcatctcaatttcagcctcaggagaccctaagcagaaagcccagtcacgttgtaaccagccttctacccacagaattgtgaggtgataactgggaattgtttgaagcca

SEQ ID NO: 6938 - DNA, 122 bp, Homo sapiens
  misc_feature (61)..(62): /note="This region represents a CpG dinucleotide"
  misc_feature (61)..(61): /note="Nucleotide may be methylated to form 5-methylcytosine"
tgattagccagctggaagggagggccgttgattaaaggtagaatcttccactgcagtcagcgacctcttcagcttggtccacacaggcaaagcagagtggaaaatgctgagtcaaagtggcc

SEQ ID NO: 6939 - DNA, 122 bp, Homo sapiens
  misc_feature (61)..(62): /note="This region represents a CpG dinucleotide"
  misc_feature (61)..(61): /note="Nucleotide may be methylated to form 5-methylcytosine"
ctccggtcatggagctgagccgatttcactgtgctctgattctctaaatactgctactcacgtagggcaattctgttcaacacggtgagctgggccggctgtgactcacagcaccgagcccc

SEQ ID NO: 6940 - DNA, 122 bp, Homo sapiens
  misc_feature (61)..(62): /note="This region represents a CpG dinucleotide"
  misc_feature (61)..(61): /note="Nucleotide may be methylated to form 5-methylcytosine"
tttcaataactttgtaatcttcatatccaaccaatttttgctgtatgagtatttctgagtcgaacatcctggaattaaagatagattccaaagtatttctaaacaatgtgtaaaactggcat

SEQ ID NO: 6941 - DNA, 122 bp, Homo sapiens
  misc_feature (61)..(62): /note="This region represents a CpG dinucleotide"
  misc_feature (61)..(61): /note="Nucleotide may be methylated to form 5-methylcytosine"
tcacttttctttactacctcctgtactttgtttgcatacacttttctcagttcctcttttcggtttatgccttgtttgcttatactttcctatctactttatttcattaaacactcagtagc

SEQ ID NO: 6942 - DNA, 122 bp, Homo sapiens
  misc_feature (61)..(62): /note="This region represents a CpG dinucleotide"
  misc_feature (61)..(61): /note="Nucleotide may be methylated to form 5-methylcytosine"
gatccaaggagccgcagcccgtggctcagtttaacccccttgactttccctctttgcctccggagaggcagaatttgcagcctgattattcgtagaaataatttttcaaatcttgcctttcc

SEQ ID NO: 6943 - DNA, 122 bp, Homo sapiens
  misc_feature (61)..(62): /note="This region represents a CpG dinucleotide"
  misc_feature (61)..(61): /note="Nucleotide may be methylated to form 5-methylcytosine"
ttttctcatgagagactctcaagacttgactgacaaaattgaaatgttcttctaaacacccgggaacattttcagggctgccagcatccggccttcccgagtcccacaggtttccttaaaat

SEQ ID NO: 6944 - DNA, 122 bp, Homo sapiens
  misc_feature (61)..(62): /note="This region represents a CpG dinucleotide"
  misc_feature (61)..(61): /note="Nucleotide may be methylated to form 5-methylcytosine"
ccatcacaatgctacggaagccatacaaatgtatatctggtaactgtcagtgaactgcaacggagttctggtgccctacaagtctactactcaagagagttaactgcctgtgttgtttgagt

SEQ ID NO: 6945 - DNA, 122 bp, Homo sapiens
  misc_feature (61)..(62): /note="This region represents a CpG dinucleotide"
  misc_feature (61)..(61): /note="Nucleotide may be methylated to form 5-methylcytosine"
ccatatgtgttgaaatctgtgtaacaaaagcagtgagggctcttgccacacgtaggctcccgcccagccctctccgggaggtaggtatgtatgcagagaagagagtgggctgagaaatggaa

SEQ ID NO: 6946 - DNA, 122 bp, Homo sapiens
  misc_feature (61)..(62): /note="This region represents a CpG dinucleotide"
  misc_feature (61)..(61): /note="Nucleotide may be methylated to form 5-methylcytosine"
aaggggattgcttagggagatggcccaaataaggccccaagcccccattccagctaggcccgtctgcctgtccctgcctcctcagggggctcaggtcagggcctcataccccaagccacagc

SEQ ID NO: 6947 - DNA, 122 bp, Homo sapiens
  misc_feature (61)..(62): /note="This region represents a CpG dinucleotide"
  misc_feature (61)..(61): /note="Nucleotide may be methylated to form 5-methylcytosine"
ctccgccttcagcttgtccagcacccaggcatacttgaaggatcccttccccatctggagcgggtgagggtcacggctgagggcgggacccgggacccaggagtccctggtggtgcgagctg

SEQ ID NO: 6948 - DNA, 122 bp, Homo sapiens
  misc_feature (61)..(62): /note="This region represents a CpG dinucleotide"
  misc_feature (61)..(61): /note="Nucleotide may be methylated to form 5-methylcytosine"
ggagccaatggcaaactgaagtggaccagcacttacttacttctttaagacagaactttgcggtgtattcttggttgttccttctctctaatcccttttcccgttagctggtctcttctctc

SEQ ID NO: 6949 - DNA, 122 bp, Homo sapiens
  misc_feature (61)..(62): /note="This region represents a CpG dinucleotide"
  misc_feature (61)..(61): /note="Nucleotide may be methylated to form 5-methylcytosine"
ggccactgaagttcctgaaattcaacaattagtaagtatctctctcccaatagaaagccacgtcatttgtaaaccataacaatagcttttgtttttttgagacacagtctcgctctgtgttg

SEQ ID NO: 6950 - DNA, 122 bp, Homo sapiens
  misc_feature (61)..(62): /note="This region represents a CpG dinucleotide"
  misc_feature (61)..(61): /note="Nucleotide may be methylated to form 5-methylcytosine"
tgcaaggacacatgctcacagtcactatgtaaatggtgtctatagccaggtttttgtaatcgaactgcagaaacctggagttttatacctgtatggcagaggaaaaaaaaaaacaacaacct

SEQ ID NO: 6951 - DNA, 122 bp, Homo sapiens
  misc_feature (61)..(62): /note="This region represents a CpG dinucleotide"
  misc_feature (61)..(61): /note="Nucleotide may be methylated to form 5-methylcytosine"
ggtgataaggctagcccacagcggatttaggcgacgtggggagatgccaaagtgaatacacggtgacttctaaatctagacgtctggaaggggccatgagagccagacaactgggcccgaac

SEQ ID NO: 6952 - DNA, 122 bp, Homo sapiens
  misc_feature (61)..(62): /note="This region represents a CpG dinucleotide"
  misc_feature (61)..(61): /note="Nucleotide may be methylated to form 5-methylcytosine"
gccccggcggctgctggggatccctccgagcgccccctcaggcgtcttcctgcgaccgggcgggggaactctttacggggaaacagttttgggacccaccacccttggcgccgccgttagga

SEQ ID NO: 6953 - DNA, 122 bp, Homo sapiens
  misc_feature (61)..(62): /note="This region represents a CpG dinucleotide"
  misc_feature (61)..(61): /note="Nucleotide may be methylated to form 5-methylcytosine"
agagcataaatacccaggctgatggtagtgctaaaggttctgcttcatctcgtcaatcagcgcaaacgcttatgtcctcctgctctgaggcttaattaagcgatggagcaacattttcttgg

SEQ ID NO: 6954 - DNA, 122 bp, Homo sapiens
  misc_feature (61)..(62): /note="This region represents a CpG dinucleotide"
  misc_feature (61)..(61): /note="Nucleotide may be methylated to form 5-methylcytosine"
tatttgcatacgagcctttgtgtgtgcacatgcttttcatttcccttgggtacacacctacgagtagaattgctgggtcatatccacaggaactgccagactgttgtccaaagtggctgccc

SEQ ID NO: 6955 - DNA, 122 bp, Homo sapiens
  misc_feature (61)..(62): /note="This region represents a CpG dinucleotide"
  misc_feature (61)..(61): /note="Nucleotide may be methylated to form 5-methylcytosine"
tcggcacccacactagctcggtctcctcaaaactccgtgtccttgtccaccactgagcggcgtgcacacacagggtggggcagcagtggccccagggctgcctccgtctccagggatgagtc

SEQ ID NO: 6956 - DNA, 122 bp, Homo sapiens
  misc_feature (61)..(62): /note="This region represents a CpG dinucleotide"
  misc_feature (61)..(61): /note="Nucleotide may be methylated to form 5-methylcytosine"
tctgacaacagtttcctgtgagagacctgggctctggggaggccacttcctgctgtgtcacggtgatgtgaccacgagggtgggaactgagcccaggaaaacttccttctggacaaggtcga

SEQ ID NO: 6957 - DNA, 122 bp, Homo sapiens
  misc_feature (61)..(62): /note="This region represents a CpG dinucleotide"
  misc_feature (61)..(61): /note="Nucleotide may be methylated to form 5-methylcytosine"
gtttgatgttcaggctgggacttctgagagtctcatggaactttctcgtcactatcttctcgtccctgacctctctcctagccaagcaagcttcttcaccaagataggataagagagatgtg

SEQ ID NO: 6958 - DNA, 122 bp, Homo sapiens
  misc_feature (61)..(62): /note="This region represents a CpG dinucleotide"
  misc_feature (61)..(61): /note="Nucleotide may be methylated to form 5-methylcytosine"
tctcttcttacctgactcactgtcccaattttggatctcagccacactgggtttagctgacggatgtcatggccatcaagactaatagttccttgttgagaggaaaggaaaggaaagagtca

SEQ ID NO: 6959 - DNA, 122 bp, Homo sapiens
  misc_feature (61)..(62): /note="This region represents a CpG dinucleotide"
  misc_feature (61)..(61): /note="Nucleotide may be methylated to form 5-methylcytosine"
tatatcttgataagggttttagttacgtatgttcatttatcaaaactcaggaagtatatacgtacatttcattgtatgtaaattttacatgaaaaggaaaaaacatcatgaattctaggtag

SEQ ID NO: 6960 - DNA, 122 bp, Homo sapiens
  misc_feature (61)..(62): /note="This region represents a CpG dinucleotide"
  misc_feature (61)..(61): /note="Nucleotide may be methylated to form 5-methylcytosine"
aaatgaagaataaatttacagtgttaaaaaaattaagaagtttctcttacatatcagctacggaagagcttcaggctgcaaaagtggaaataactagggaaatacatcaattttccccatga

SEQ ID NO: 6961 - DNA, 122 bp, Homo sapiens
  misc_feature (61)..(62): /note="This region represents a CpG dinucleotide"
  misc_feature (61)..(61): /note="Nucleotide may be methylated to form 5-methylcytosine"
cagaaggagtatgaatagagctaaaagtttgactcctcctgaggccatgtgggacaatcacgaatggctgaaatgctgagactgtgaagataaagacaatagatgctcttacaaaggacccg

SEQ ID NO: 6962 - DNA, 122 bp, Homo sapiens
  misc_feature (61)..(62): /note="This region represents a CpG dinucleotide"
  misc_feature (61)..(61): /note="Nucleotide may be methylated to form 5-methylcytosine"
acatttatgtacagattcttttattttctctattaacttaaggatttcacacatagttttcgcccccaggcagagccatgaatcagtgagttaaagtatgacaaaatggcatccaggacaca

SEQ ID NO: 6963 - DNA, 122 bp, Homo sapiens
  misc_feature (61)..(62): /note="This region represents a CpG dinucleotide"
  misc_feature (61)..(61): /note="Nucleotide may be methylated to form 5-methylcytosine"
aagttaaatatgttgaaatctttcttccctgcaatactggcatcagcgtgctggacaaaacgtagcaaactagaagtaacttgtgaatttttaataaagttgtcttccctagcagagctaaa

SEQ ID NO: 6964 - DNA, 122 bp, Homo sapiens
  misc_feature (61)..(62): /note="This region represents a CpG dinucleotide"
  misc_feature (61)..(61): /note="Nucleotide may be methylated to form 5-methylcytosine"
ggaaagacccttgctggcttccttccacatctctaaagtgagaaaattgacctggatagtcgctaagctttcccccatttctcagattgtgtaaatccgtgcatcagtagacttaggaatct

SEQ ID NO: 6965 - DNA, 122 bp, Homo sapiens
  misc_feature (61)..(62): /note="This region represents a CpG dinucleotide"
  misc_feature (61)..(61): /note="Nucleotide may be methylated to form 5-methylcytosine"
tgccttccttccttccttctttcttttcctctagttaactctcatgtatcaagaagtaaccgagtgccgggcactcttctaagtattgtgaaatagtgttgagcaatgaacctatttttctc

SEQ ID NO: 6966 - DNA, 122 bp, Homo sapiens
  misc_feature (61)..(62): /note="This region represents a CpG dinucleotide"
  misc_feature (61)..(61): /note="Nucleotide may be methylated to form 5-methylcytosine"
cagctcttgacgtgggacaccgggggttctgggcccactgtgcctgaagcaatcacagggcgtcaccgcccggcctggctactctcaggcctcctctcacacgatactcctgtcaggcaggg

SEQ ID NO: 6967 - DNA, 122 bp, Homo sapiens
  misc_feature (61)..(62): /note="This region represents a CpG dinucleotide"
  misc_feature (61)..(61): /note="Nucleotide may be methylated to form 5-methylcytosine"
aaacacttggatttatttaacagtttcatttatgactttacagttgtttaataaatattacggcattccagctaggaagatagtatcacccctttaaacatgagaaaatcaaatgaatggct

SEQ ID NO: 6968 - DNA, 122 bp, Homo sapiens
  misc_feature (61)..(62): /note="This region represents a CpG dinucleotide"
  misc_feature (61)..(61): /note="Nucleotide may be methylated to form 5-methylcytosine"
agaaaaccacagcagctgataagccatggcttttccaggacgtggccagagatggcttctcgctttacatatctgcagaccataaagtaggtcaagaatccggggtgagggcttggccagcc

SEQ ID NO: 6969 - DNA, 122 bp, Homo sapiens
  misc_feature (61)..(62): /note="This region represents a CpG dinucleotide"
  misc_feature (61)..(61): /note="Nucleotide may be methylated to form 5-methylcytosine"
ctcctcgaggtgggaggggaagtcggggggaagccaaactgctccccgctcctgcagcaccggcctcggtcgcgctgactctggcctggtgtccgtgtctcttgctatctctctttctctca

SEQ ID NO: 6970 - DNA, 122 bp, Homo sapiens
  misc_feature (61)..(62): /note="This region represents a CpG dinucleotide"
  misc_feature (61)..(61): /note="Nucleotide may be methylated to form 5-methylcytosine"
tgaaaagggaaatttttagacttctcatctgtgctgaaagccccgggctgtttcagaacccggtcagggtaaccgtcaggcctgcggtcaccgcgctgcaatcccaggaggccttgcgtcag

SEQ ID NO: 6971 - DNA, 122 bp, Homo sapiens
  misc_feature (61)..(62): /note="This region represents a CpG dinucleotide"
  misc_feature (61)..(61): /note="Nucleotide may be methylated to form 5-methylcytosine"
tgctcacttcccatttctaattgactacagcaattgcaattcttgctgaaccattctcagcgtgtttgagttacttgaggcatctgactgtaggctctacctataccctgatgccaactcta

SEQ ID NO: 6972 - DNA, 122 bp, Homo sapiens
  misc_feature (61)..(62): /note="This region represents a CpG dinucleotide"
  misc_feature (61)..(61): /note="Nucleotide may be methylated to form 5-methylcytosine"
cccaaagtctcagcagcagcaagatttactgcaaagagcaaaagaacaaagtttccacaacgtgaagggatacccaatcagattgctgctgctgctagctcaagcagcctgcttttattctc

SEQ ID NO: 6973 - DNA, 122 bp, Homo sapiens
  misc_feature (61)..(62): /note="This region represents a CpG dinucleotide"
  misc_feature (61)..(61): /note="Nucleotide may be methylated to form 5-methylcytosine"
atactcaaaccagaaacaaaactgcctgaatgtgaaactgtttactaaaaacagaaacagcgttctaacggctagaagggtttctactggcagttcattatgcaaaaggagaggttccttca

SEQ ID NO: 6974 - DNA, 122 bp, Homo sapiens
  misc_feature (61)..(62): /note="This region represents a CpG dinucleotide"
  misc_feature (61)..(61): /note="Nucleotide may be methylated to form 5-methylcytosine"
ggtgatccgcccgcctcggcctcccaaaatgctgagtttacaggcgtgagccaccgcgcccgtcccagtttattttttccacaggaaaaaggagggactgaggaccccacggaccacagctc

SEQ ID NO: 6975 - DNA, 122 bp, Homo sapiens
  misc_feature (61)..(62): /note="This region represents a CpG dinucleotide"
  misc_feature (61)..(61): /note="Nucleotide may be methylated to form 5-methylcytosine"
caggccccatttttccatctctgctgctgttattaggggagcccttagactctcttgcagcgccggaataggcgctcaagacgtgtgttaatattgcaacagcaaatataatgaatctgcag

SEQ ID NO: 6976 - DNA, 122 bp, Homo sapiens
  misc_feature (61)..(62): /note="This region represents a CpG dinucleotide"
  misc_feature (61)..(61): /note="Nucleotide may be methylated to form 5-methylcytosine"
tcaccttcctgtacttgcctcggccgccagccgatcccgcccgatacccccgctacctggcgctactggagactctaacccgagacctgggccccacgctgctggttcatggggtcactcca

SEQ ID NO: 6977 - DNA, 122 bp, Homo sapiens
  misc_feature (61)..(62): /note="This region represents a CpG dinucleotide"
  misc_feature (61)..(61): /note="Nucleotide may be methylated to form 5-methylcytosine"
ctggaagttcattgaagagtctgaaattagggacttatttcaaatttggacatggctagtcgaggcgcaacaagacccaacgggccaaatacgggaaataaaatatgccagttcaaactagt

SEQ ID NO: 6978 - DNA, 122 bp, Homo sapiens
  misc_feature (61)..(62): /note="This region represents a CpG dinucleotide"
  misc_feature (61)..(61): /note="Nucleotide may be methylated to form 5-methylcytosine"
tatagcttagaagggttagggacttgctagagctcactaatacgtggtgaaatcaggcttcggcactacccaatactgcctcaacaggggactttgtataagtgacccaatggcagttgggc

SEQ ID NO: 6979 - DNA, 122 bp, Homo sapiens
  misc_feature (61)..(62): /note="This region represents a CpG dinucleotide"
  misc_feature (61)..(61): /note="Nucleotide may be methylated to form 5-methylcytosine"
tttgccctgggagtagggtgcaggaggttccacggacgcctcgacgaccggtagtagcttcgggtggggcctagagaggacggcgagcaactctgtggttccggagtccagaaaaatgaaag

SEQ ID NO: 6980 - DNA, 122 bp, Homo sapiens
  misc_feature (61)..(62): /note="This region represents a CpG dinucleotide"
  misc_feature (61)..(61): /note="Nucleotide may be methylated to form 5-methylcytosine"
tcgtaaggaagtagactacattacgggaggccttaagtagccttaaattcaggcaagcatcgttctttgagttggttgcacccaaactcaatctcactctctcaaagctttctggccaggtt

SEQ ID NO: 6981 - DNA, 122 bp, Homo sapiens
  misc_feature (61)..(62): /note="This region represents a CpG dinucleotide"
  misc_feature (61)..(61): /note="Nucleotide may be methylated to form 5-methylcytosine"
actttagctctagaattactctgagaccttgaaaaagttttaccttaaatttttaaatttcgaggaaaactctgggacaatcttagcaaaaagtagtaaacaacttagttaagagtaaatgt

SEQ ID NO: 6982 - DNA, 122 bp, Homo sapiens
  misc_feature (61)..(62): /note="This region represents a CpG dinucleotide"
  misc_feature (61)..(61): /note="Nucleotide may be methylated to form 5-methylcytosine"
tgcccccttccaggcatccctgaccagcacagcctcaccccaggggagcccgacaccctccgccatctgctgcctggcacacgacgtgagccacgggcactgaggttaccacagggtccaca

SEQ ID NO: 6983 - DNA, 122 bp, Homo sapiens
  misc_feature (61)..(62): /note="This region represents a CpG dinucleotide"
  misc_feature (61)..(61): /note="Nucleotide may be methylated to form 5-methylcytosine"
tttacataaaatgttatcctgaaccttctaatcaaggattccagtactgtgaggccaggtcgttgagcagtgtttcctccatgggagcttcctgcagagaagtgatgtgtgcctgtgtgtgt

SEQ ID NO: 6984 - DNA, 122 bp, Homo sapiens
  misc_feature (61)..(62): /note="This region represents a CpG dinucleotide"
  misc_feature (61)..(61): /note="Nucleotide may be methylated to form 5-methylcytosine"
cgcgtttgtgggtgctggtcaacaccttgctccacaaggaaatacttctgtgagttgtgacgaaaatatactttttgcaatgcgaaaggatgctggtctaggcttgggaggaagatggtgag

SEQ ID NO: 6985 - DNA, 122 bp, Homo sapiens
  misc_feature (61)..(62): /note="This region represents a CpG dinucleotide"
  misc_feature (61)..(61): /note="Nucleotide may be methylated to form 5-methylcytosine"
gccggtgctgcgtgtactgcggcaatgcgccgacaatggcagtccctggggagggactcacgaagggacgagagaaaagatcttgtccactgcatccctccaggaaggcctcctagttcctg

SEQ ID NO: 6986 - DNA, 122 bp, Homo sapiens
  misc_feature (61)..(62): /note="This region represents a CpG dinucleotide"
  misc_feature (61)..(61): /note="Nucleotide may be methylated to form 5-methylcytosine"
aaatgatgggaatttggcctataggtgaatcaccaggcttgtggctcagctcaaagcatacgccctgctgaacggaggagtggcattatgtgcacacagagaaggcagcaccgttccctgtc

SEQ ID NO: 6987 - DNA, 122 bp, Homo sapiens
  misc_feature (61)..(62): /note="This region represents a CpG dinucleotide"
  misc_feature (61)..(61): /note="Nucleotide may be methylated to form 5-methylcytosine"
agagaaatgtttgccagccaggttttctgctaagaatcatttattgaagacataaatcaacgagtttgatccaaccattagtaattaaaggggatatatttgaagaggcaaccattgtgttt

SEQ ID NO: 6988 - DNA, 122 bp, Homo sapiens
  misc_feature (61)..(62): /note="This region represents a CpG dinucleotide"
  misc_feature (61)..(61): /note="Nucleotide may be methylated to form 5-methylcytosine"
aaagcttccctagtcacaagtggccatcaagtactcaagatatacttgttcaagccctggcgctaaatttttgatgttatcttaattgatttaaacttacataaataaccacatgtggctag

SEQ ID NO: 6989 - DNA, 122 bp, Homo sapiens
  misc_feature (61)..(62): /note="This region represents a CpG dinucleotide"
  misc_feature (61)..(61): /note="Nucleotide may be methylated to form 5-methylcytosine"
tccagatggggatggaggtggccaggctgccccgttgattgtgtgccgaggagccctccccgggaaggctgtgatttatacgcgcaggcttgtcacggggtgaaaggaagggccactttttc

SEQ ID NO: 6990 - DNA, 122 bp, Homo sapiens
  misc_feature (61)..(62): /note="This region represents a CpG dinucleotide"
  misc_feature (61)..(61): /note="Nucleotide may be methylated to form 5-methylcytosine"
gcgcccctgagcggcctccaggagtgaagagccggccaaggccctgccaaggctgcagggcggggacacccagtgggggacgcccgggaggggaaacccttcgggcgggcggaccctcgggc

SEQ ID NO: 6991 - DNA, 122 bp, Homo sapiens
  misc_feature (61)..(62): /note="This region represents a CpG dinucleotide"
  misc_feature (61)..(61): /note="Nucleotide may be methylated to form 5-methylcytosine"
tagagctccaggttgatctggcggtttatggcggcctctgagtcctggtgggagttctggcgcacctgcgaggcggacgcggtcgtcatggcggcgactaagcagaggcggcggtggcggcg

SEQ ID NO: 6992 - DNA, 122 bp, Homo sapiens
  misc_feature (61)..(62): /note="This region represents a CpG dinucleotide"
  misc_feature (61)..(61): /note="Nucleotide may be methylated to form 5-methylcytosine"
gattaacagggccatgcaagaaatgtttgccattggtttgatcttagtcaaagaccagctcgttctatgataccagctgcttccttcacttagaaaggtgttgttttattgccatacaacca

SEQ ID NO: 6993 - DNA, 122 bp, Homo sapiens
  misc_feature (61)..(62): /note="This region represents a CpG dinucleotide"
  misc_feature (61)..(61): /note="Nucleotide may be methylated to form 5-methylcytosine"
tagagttctgtccccacgctccaatccttcagatttggatctccccttcacacacaccctcgccttgccccaaagtcagcatcccccagcgctgagatatgaagaccaccccgtcaaagggg

SEQ ID NO: 6994 - DNA, 122 bp, Homo sapiens
  misc_feature (61)..(62): /note="This region represents a CpG dinucleotide"
  misc_feature (61)..(61): /note="Nucleotide may be methylated to form 5-methylcytosine"
aactaaaagaaaccaaggatcttggtggtggaatttgcttgacttcttgtcctccaatcacgtccacttcctgttttcttttaaagttcactgacaagatcttattttatgtgacaaatatg

SEQ ID NO: 6995 - DNA, 122 bp, Homo sapiens
  misc_feature (61)..(62): /note="This region represents a CpG dinucleotide"
  misc_feature (61)..(61): /note="Nucleotide may be methylated to form 5-methylcytosine"
ccaagatcaggcgcgttcagggtggtatggccgtagacttcaatgtgtatttcttaagaacgaggatactcttgcccacaactatagcacagatagcaactttaataaatttaacatggata

SEQ ID NO: 6996 - DNA, 122 bp, Homo sapiens
  misc_feature (61)..(62): /note="This region represents a CpG dinucleotide"
  misc_feature (61)..(61): /note="Nucleotide may be methylated to form 5-methylcytosine"
tagcaacgtctatgagtaagtcaccctttggccatactctcaaaggctcacaaagatagacgtgcaaggacactcattacaacattgtttaacagaatgtcaatgggacatttcatgttgtc

SEQ ID NO: 6997 - DNA, 122 bp, Homo sapiens
  misc_feature (61)..(62): /note="This region represents a CpG dinucleotide"
  misc_feature (61)..(61): /note="Nucleotide may be methylated to form 5-methylcytosine"
cagtggccaggtttgtgtatcttgccctgcctgtccagttgcacacactcaagcatgactcgttaacttaatttcctgccatatatctcggttcttctagaactggaatcttgtccttaatt

SEQ ID NO: 6998 - DNA, 122 bp, Homo sapiens
  misc_feature (61)..(62): /note="This region represents a CpG dinucleotide"
  misc_feature (61)..(61): /note="Nucleotide may be methylated to form 5-methylcytosine"
ggtgcacacggcaggtgtgcactgaagtggggacaggaaggggcagtgctttcaactgtgcggcctcagctgctgccacatggcctgacccagaacagctgctcagaccaggatgcagtggg

SEQ ID NO: 6999 - DNA, 122 bp, Homo sapiens
  misc_feature (61)..(62): /note="This region represents a CpG dinucleotide"
  misc_feature (61)..(61): /note="Nucleotide may be methylated to form 5-methylcytosine"
atcaccctgcgattgagcatcccaggacctgaaaacttaatgttttgaggtttatgaacacgttcaagttccagtgcaactatgttaaaataaaattgggctggtgccaggcacggtggctc

SEQ ID NO: 7000 - DNA, 122 bp, Homo sapiens
  misc_feature (61)..(62): /note="This region represents a CpG dinucleotide"
  misc_feature (61)..(61): /note="Nucleotide may be methylated to form 5-methylcytosine"
cacttgggaagctccggggcatgtgaaggagctgcaaacatgagaactaatgaaccaaggcggctgccaccaggaaggaacagaacgcaggcattcaaccatgacgtctgcacagtgttagt

SEQ ID NO: 7001 - DNA, 122 bp, Homo sapiens
  misc_feature (61)..(62): /note="This region represents a CpG dinucleotide"
  misc_feature (61)..(61): /note="Nucleotide may be methylated to form 5-methylcytosine"
actgcgccgtgcatagtgctgaggaaagctgcccactctgttctcgcccttgtagctgctcgctcctctagcctgacttcaactgttccttaaacttgatctcttaagagtctgtcagtttc

SEQ ID NO: 7002 - DNA, 122 bp, Homo sapiens
  misc_feature (61)..(62): /note="This region represents a CpG dinucleotide"
  misc_feature (61)..(61): /note="Nucleotide may be methylated to form 5-methylcytosine"
tgggttacagaaagaatataatgcaggcagtgaggtgaccagggcatgagtcaaatcctgcgcccaaccctggcttgggtatcagagtaggattcagctgcctccagtgaaaaagagactcc

SEQ ID NO: 7003 - DNA, 122 bp, Homo sapiens
  misc_feature (61)..(62): /note="This region represents a CpG dinucleotide"
  misc_feature (61)..(61): /note="Nucleotide may be methylated to form 5-methylcytosine"
tggctaaaactagacactttctctttaagaccaggaaaaaggcagaggtatttccttttacggctcttattcaacatcataggggaagtcctagctaatgcaatgagacaagaaaaggaaat

SEQ ID NO: 7004 - DNA, 122 bp, Homo sapiens
  misc_feature (61)..(62): /note="This region represents a CpG dinucleotide"
  misc_feature (61)..(61): /note="Nucleotide may be methylated to form 5-methylcytosine"
aaagggttgaaattaagccagaggataaggaaaagagctgtgtcagttgagaaaaagatgcggtcagtcaggcttgtaatgtgctaaaaccacaagaatgttacaggttcagcacccattct

SEQ ID NO: 7005 - DNA, 122 bp, Homo sapiens
  misc_feature (61)..(62): /note="This region represents a CpG dinucleotide"
  misc_feature (61)..(61): /note="Nucleotide may be methylated to form 5-methylcytosine"
gcaaagggaacaatcatctgtctttgtccttcattccttccacaactatttatccagcaccgtttctgggcacagggctccagcgatggtcccaacaggtacaatgacctctggggaccaag

SEQ ID NO: 7006 - DNA, 122 bp, Homo sapiens
  misc_feature (61)..(62): /note="This region represents a CpG dinucleotide"
  misc_feature (61)..(61): /note="Nucleotide may be methylated to form 5-methylcytosine"
aactatttatctgactccttccatctccacagcactgtgtgagggatcagtgataagagacggtgaaagacatgcgcaaatggataaataataagcaggatatgtagaatgacacaacaatt

SEQ ID NO: 7007 - DNA, 122 bp, Homo sapiens
  misc_feature (61)..(62): /note="This region represents a CpG dinucleotide"
  misc_feature (61)..(61): /note="Nucleotide may be methylated to form 5-methylcytosine"
agaaaggaaccagaggcagagagacgaggatacccagcgaaagggacgggaggaagcatccgaaacctaggattcgtcctacgattctgaacctgtgccaataataccattatgtgccatgt

SEQ ID NO: 7008 - DNA, 122 bp, Homo sapiens
  misc_feature (61)..(62): /note="This region represents a CpG dinucleotide"
  misc_feature (61)..(61): /note="Nucleotide may be methylated to form 5-methylcytosine"
ggcgcccactcaccaggtctgcgcgggagccctcgtgggggggcttgggctgccggagctcgctgggtgccagctgcagggacacaccgtggctgtggcccccgtggctatggctgctgtgg

SEQ ID NO: 7009 - DNA, 122 bp, Homo sapiens
  misc_feature (61)..(62): /note="This region represents a CpG dinucleotide"
  misc_feature (61)..(61): /note="Nucleotide may be methylated to form 5-methylcytosine"
tctactctcagaaacagcgtcctccctgccacagccatcaatgtgcatgtggtcgacacacgcattcacacacactcacggctcattaaaatgcgttgtgaacttggcgtaatccccaggat

SEQ ID NO: 7010 - DNA, 122 bp, Homo sapiens
  misc_feature (61)..(62): /note="This region represents a CpG dinucleotide"
  misc_feature (61)..(61): /note="Nucleotide may be methylated to form 5-methylcytosine"
ggacgttaggagtctgctgcaaaacctgagggtcttagctgagcagtcacaggctgggcccgttgccctgggctcctgtgagtaaaacccagtcaattttgagtacccagtaaggcatccat

SEQ ID NO: 7011 - DNA, 122 bp, Homo sapiens
  misc_feature (61)..(62): /note="This region represents a CpG dinucleotide"
  misc_feature (61)..(61): /note="Nucleotide may be methylated to form 5-methylcytosine"
gtctccatgtgacaaagcagttttgaaggttacagggcttcattggatagccagttgtcacgtattttacaaagtggccttggagaatgtgaatcacctgttgcaatgaacccataatttaa

SEQ ID NO: 7012 - DNA, 122 bp, Homo sapiens
  misc_feature (61)..(62): /note="This region represents a CpG dinucleotide"
  misc_feature (61)..(61): /note="Nucleotide may be methylated to form 5-methylcytosine"
ggatgaagaacagtgtcatatgatgttagagcttagagaatttctagttcaggccggacgcggtggctcacggctgtaatcccagcactttgggaggccgaggcaggtggatcatgatgtca

SEQ ID NO: 7013 - DNA, 122 bp, Homo sapiens
  misc_feature (61)..(62): /note="This region represents a CpG dinucleotide"
  misc_feature (61)..(61): /note="Nucleotide may be methylated to form 5-methylcytosine"
acataaaagaacaatataaaaagcaaatagagccactttccatagctactgtgtctttctcgatataatcacactattagctgcatgagatcattgattgactcattgcttactaagagggg

SEQ ID NO: 7014 - DNA, 122 bp, Homo sapiens
  misc_feature (61)..(62): /note="This region represents a CpG dinucleotide"
  misc_feature (61)..(61): /note="Nucleotide may be methylated to form 5-methylcytosine"
gagcggtgtcttgctaggccggttggggtacttgcggggccggatgggcttgagggtgagcggcggctggggcaggctgccaaagcccgggtggatctgcttgtctttgaatgccttgatgg

SEQ ID NO: 7015 - DNA, 122 bp, Homo sapiens
  misc_feature (61)..(62): /note="This region represents a CpG dinucleotide"
  misc_feature (61)..(61): /note="Nucleotide may be methylated to form 5-methylcytosine"
gggtggggatgctcctagtgccccgcctgcgtggcgccccccaggggccacccgccacggcgctcgtggtgtctgacccgcaagggcgcccctagtgacagccctcccttatacctcccggg

SEQ ID NO: 7016 - DNA, 122 bp, Homo sapiens
  misc_feature (61)..(62): /note="This region represents a CpG dinucleotide"
  misc_feature (61)..(61): /note="Nucleotide may be methylated to form 5-methylcytosine"
caagccttaggtcactgctctcttcaaactgctgaactggttgagaaagactgagcttaacggatagaacctgctagccctgcagccattggggttttgtgactactgagtcccagagcctc

SEQ ID NO: 7017 - DNA, 122 bp, Homo sapiens
  misc_feature (61)..(62): /note="This region represents a CpG dinucleotide"
  misc_feature (61)..(61): /note="Nucleotide may be methylated to form 5-methylcytosine"
ccagggggcatttgttgctaagcaaccaagacttctgttaaatcccttcttaaagagtgtcggcaatatgcactatcaaataaacccagctttgcaagatgataccttcctaattgactaag

SEQ ID NO: 7018 - DNA, 122 bp, Homo sapiens
  misc_feature (61)..(62): /note="This region represents a CpG dinucleotide"
  misc_feature (61)..(61): /note="Nucleotide may be methylated to form 5-methylcytosine"
ggtaaaaatctaacagaaataaggcaaacctttatcagaaatcaggcaaaaacaaactctcgcatgtgattcagtctaacaaatatgacaaatatttctcacaagcatagaaagatgcaaat

SEQ ID NO: 7019 - DNA, 122 bp, Homo sapiens
  misc_feature (61)..(62): /note="This region represents a CpG dinucleotide"
  misc_feature (61)..(61): /note="Nucleotide may be methylated to form 5-methylcytosine"
tttttccaagtgatgataacattattgtgtgttgaattattccttgaaatcatggccgggcgtggtggctcacgcctgtaatcccagcactttgggagaccgaggcgggaggatcacctgag

SEQ ID NO: 7020 - DNA, 122 bp, Homo sapiens
  misc_feature (61)..(62): /note="This region represents a CpG dinucleotide"
  misc_feature (61)..(61): /note="Nucleotide may be methylated to form 5-methylcytosine"
caaatatcataagcttgtccttctctcctactgggatataaattctcctaagtatctcatcgaaaaggctcctgggacgaaagtcgatgggggcaaatcttggagggaaatttcgtgactgt

SEQ ID NO: 7021 - DNA, 122 bp, Homo sapiens
  misc_feature (61)..(62): /note="This region represents a CpG dinucleotide"
  misc_feature (61)..(61): /note="Nucleotide may be methylated to form 5-methylcytosine"
tacagacttgctgccaacaagactgagctgctcagtgagtggatgaggcctgggaccccacggcacaatgaccagcccccacattgcagaggagctctggtggccctcgtagcacgccccat

SEQ ID NO: 7022 - DNA, 122 bp, Homo sapiens
  misc_feature (61)..(62): /note="This region represents a CpG dinucleotide"
  misc_feature (61)..(61): /note="Nucleotide may be methylated to form 5-methylcytosine"
gcctacaactgcaattaataataatttaggcccatcgctcccagggcagagctgcatctccgtgttagagacaaagacccatcttttccttgttttgtgttcaggcaacatgacgttatttc

SEQ ID NO: 7023 - DNA, 122 bp, Homo sapiens
  misc_feature (61)..(62): /note="This region represents a CpG dinucleotide"
  misc_feature (61)..(61): /note="Nucleotide may be methylated to form 5-methylcytosine"
tgcccttataaatggggttttacctgccctcagttctgcactcatggccctttaaaaaggcgagtgtagaaggagaatttattggtgtcagccctggagatttttaatctaaccaagtccac

SEQ ID NO: 7024 - DNA, 122 bp, Homo sapiens
  misc_feature (61)..(62): /note="This region represents a CpG dinucleotide"
  misc_feature (61)..(61): /note="Nucleotide may be methylated to form 5-methylcytosine"
acggctcaggggagtgcatgggcgaggacgcgtggcggatatactgggtgcactggaacacgcggaaggccaggctggccaggaagtcccgggcggacagcaggccggccacaggccgcagc

SEQ ID NO: 7025 - DNA, 122 bp, Homo sapiens
  misc_feature (61)..(62): /note="This region represents a CpG dinucleotide"
  misc_feature (61)..(61): /note="Nucleotide may be methylated to form 5-methylcytosine"
atttacactcagtatcacactaagggctctttgtcactcagtctttgagacagaagggggcgagataacaaatctagactgcttgtgttgactttgtggataaagtaaagggctggagtcaa

SEQ ID NO: 7026 - DNA, 122 bp, Homo sapiens
  misc_feature (61)..(62): /note="This region represents a CpG dinucleotide"
  misc_feature (61)..(61): /note="Nucleotide may be methylated to form 5-methylcytosine"
agccctgactctcccctctccttcagactttttgcccctggaggttacccaggatccttccgtgggcgaaaatctcagagcggcgccagccccaagttcagcctcagcccaagtcttaactt

SEQ ID NO: 7027 - DNA, 122 bp, Homo sapiens
  misc_feature (61)..(62): /note="This region represents a CpG dinucleotide"
  misc_feature (61)..(61): /note="Nucleotide may be methylated to form 5-methylcytosine"
aagggaaaaatcttaaggagcctctagcccaagaatccacagtgtaagtagtgggaccagcgtttaaccccccttatccccatggcttccattgcacaacaaaatgtatcagcccacagtgt

SEQ ID NO: 7028 - DNA, 122 bp, Homo sapiens
  misc_feature (61)..(62): /note="This region represents a CpG dinucleotide"
  misc_feature (61)..(61): /note="Nucleotide may be methylated to form 5-methylcytosine"
ccatgccccagtgactctacaacttctggatatgtcatttccttgtaaaagtatagcccccgtcatagatataaattggtgctgactccgcttgagtgaactttattagtgaaaacctcagt

SEQ ID NO: 7029 - DNA, 122 bp, Homo sapiens
  misc_feature (61)..(62): /note="This region represents a CpG dinucleotide"
  misc_feature (61)..(61): /note="Nucleotide may be methylated to form 5-methylcytosine"
tcagcaaaattagaccccctggtttcccaagagatgtcatttttaactcttttctacaggcgcctggagcacagggcttcccagaagtctgattcaatgctattttgagctgggttagattg

SEQ ID NO: 7030 - DNA, 122 bp, Homo sapiens
  misc_feature (61)..(62): /note="This region represents a CpG dinucleotide"
  misc_feature (61)..(61): /note="Nucleotide may be methylated to form 5-methylcytosine"
ttagtttaatgaatttttacacatgtatacaggcacataaccaccaccttgatcaaaacacggaacattttgagcaccttaaaaggcccccttttatttccttctaacaatggggacttttt

SEQ ID NO: 7031 - DNA, 122 bp, Homo sapiens
  misc_feature (61)..(62): /note="This region represents a CpG dinucleotide"
  misc_feature (61)..(61): /note="Nucleotide may be methylated to form 5-methylcytosine"
gggaggagagcctcactttctgtgcttctcctctttgtcactgcttttggcgttgttgtccgtgtggctgttggggttgttgctgaggtacattttgtccatggccttgagggcctcggtga

SEQ ID NO: 7032 - DNA, 122 bp, Homo sapiens
  misc_feature (61)..(62): /note="This region represents a CpG dinucleotide"
  misc_feature (61)..(61): /note="Nucleotide may be methylated to form 5-methylcytosine"
tctaagcttcagtttccctcatgcatgaagtggacacaatacacacacaaaaactgcttacgtgttcttagagttttgagatttgtagggaggtttcctgtttcttattgcttaatattggt

SEQ ID NO: 7033 - DNA, 122 bp, Homo sapiens
  misc_feature (61)..(62): /note="This region represents a CpG dinucleotide"
  misc_feature (61)..(61): /note="Nucleotide may be methylated to form 5-methylcytosine"
actttatccaagagagaattctgagattggtttctattcttgagtattccatgaactagccgtatgatgtatgattcaaccacttactgtaagtctcaaatttattcatttgcaaatgagac

SEQ ID NO: 7034 - DNA, 122 bp, Homo sapiens
  misc_feature (61)..(62): /note="This region represents a CpG dinucleotide"
  misc_feature (61)..(61): /note="Nucleotide may be methylated to form 5-methylcytosine"
aaaaaaaaaaaaaaactgtcataattattatttcactgggtacatgtgtatcaaaacacacgctgtacaccctaaatatataaaacaaacacatactgtattgtcaggtagtgataaatcct

SEQ ID NO: 7035 - DNA, 122 bp, Homo sapiens
  misc_feature (61)..(62): /note="This region represents a CpG dinucleotide"
  misc_feature (61)..(61): /note="Nucleotide may be methylated to form 5-methylcytosine"
cttgttgcaggcaaatgtcaactgccagagaaatgaagatagattgaatggcctaggaggcgagccagcactgtgccagccaagggccaagccagccaccacacaattcgatcctggcccgg

SEQ ID NO: 7036 - DNA, 122 bp, Homo sapiens
  misc_feature (61)..(62): /note="This region represents a CpG dinucleotide"
  misc_feature (61)..(61): /note="Nucleotide may be methylated to form 5-methylcytosine"
ctccttgtgccagctttggggaacagctgagcttctgctcccggctgcatgaggaagtggcgggaccaaggctttgcaccaaggcctttgactcagagcctgttctaagcgctgtgtcaaat

SEQ ID NO: 7037 - DNA, 122 bp, Homo sapiens
  misc_feature (61)..(62): /note="This region represents a CpG dinucleotide"
  misc_feature (61)..(61): /note="Nucleotide may be methylated to form 5-methylcytosine"
ggttagtccagcaagaatgcacctacccttaatgtctcctcttagtaattttccatctatcgacccccttactctgtaccttggctataaatccccacttccccttgttgagcccagtctct

SEQ ID NO: 7038 - DNA, 122 bp, Homo sapiens
  misc_feature (61)..(62): /note="This region represents a CpG dinucleotide"
  misc_feature (61)..(61): /note="Nucleotide may be methylated to form 5-methylcytosine"
ctgggttccatgaccttcctacagttacatttatgacactttaaggctataaaccatgggcgaggaggtggactgaaaccctcacatgctgctgtggcagatgaaaaggctgaagccacttt

SEQ ID NO: 7039 - DNA, 122 bp, Homo sapiens
  misc_feature (61)..(62): /note="This region represents a CpG dinucleotide"
  misc_feature (61)..(61): /note="Nucleotide may be methylated to form 5-methylcytosine"
aaatctttgtggcttcagtgtcaaatctgtaatctttcaaactggccaggttctgaggctcggttcaatggtctaaaactgagtgttcctcctgaaggcaagatccacatgaaaacataggc

SEQ ID NO: 7040 - DNA, 122 bp, Homo sapiens
  misc_feature (61)..(62): /note="This region represents a CpG dinucleotide"
  misc_feature (61)..(61): /note="Nucleotide may be methylated to form 5-methylcytosine"
caaagtgctgggattataggtgtgagccaccgtgcccggcctggatctgttttcttagcacgcagtgaggaatctttgtacttaaggccagggcaacaaagtcaagaggtcaaggtgtaggg

SEQ ID NO: 7041 - DNA, 122 bp, Homo sapiens
  misc_feature (61)..(62): /note="This region represents a CpG dinucleotide"
  misc_feature (61)..(61): /note="Nucleotide may be methylated to form 5-methylcytosine"
ggcattggacttggtctttgtgggactgggatctgtgggtagaaagaatagggctgaacacgaaacatacctttctgccagagctgctgctgtgatggcgcctgggccccctgaagcctcct

SEQ ID NO: 7042 - DNA, 122 bp, Homo sapiens
  misc_feature (61)..(62): /note="This region represents a CpG dinucleotide"
  misc_feature (61)..(61): /note="Nucleotide may be methylated to form 5-methylcytosine"
ggcatttctttctttatagcagtgcaagaatggactaacacactctccatattgacacctcgcttgtaaagctggccgatgcagcattgcaatcaagtggtagattttgaatgtctgagtgt

SEQ ID NO: 7043 - DNA, 122 bp, Homo sapiens
  misc_feature (61)..(62): /note="This region represents a CpG dinucleotide"
  misc_feature (61)..(61): /note="Nucleotide may be methylated to form 5-methylcytosine"
tggctccagcctcctcggctgtgcctccggtggcggtggcagcggtggcggcggtggctgcggcctcgtgttgtctacccatccggcctttgcgtccacgccgcttccggggccgccgccgg

SEQ ID NO: 7044 - DNA, 122 bp, Homo sapiens
  misc_feature (61)..(62): /note="This region represents a CpG dinucleotide"
  misc_feature (61)..(61): /note="Nucleotide may be methylated to form 5-methylcytosine"
caacatggtgaaaccccgtctctactaaaaatacaaaaattagccaggtgtgatggcacacgccaggaatcccagctacatgggaagcttaggcagaagaattgcttgaacccgggaggcag

SEQ ID NO: 7045 - DNA, 122 bp, Homo sapiens
  misc_feature (61)..(62): /note="This region represents a CpG dinucleotide"
  misc_feature (61)..(61): /note="Nucleotide may be methylated to form 5-methylcytosine"
acaaaccagacccgaagccactcatgtctttccgcccagggcaccagcggctgtcggtgacgagcctgctcgtctgccacggattgctgatggtcggcaccagcctgggagtcctcgtggcc

SEQ ID NO: 7046 - DNA, 122 bp, Homo sapiens
  misc_feature (61)..(62): /note="This region represents a CpG dinucleotide"
  misc_feature (61)..(61): /note="Nucleotide may be methylated to form 5-methylcytosine"
cccactctcacttaagagtgagcagaagcctcctttatacaggaaattccagtcaataaacgtagaggcggagctggggacacgcaaatgggattcagagacaaggagatgaactcaaaagt

SEQ ID NO: 7047 - DNA, 122 bp, Homo sapiens
  misc_feature (61)..(62): /note="This region represents a CpG dinucleotide"
  misc_feature (61)..(61): /note="Nucleotide may be methylated to form 5-methylcytosine"
ttaccagcatcgcgacgaccttctgcaaatatttttatagggtaaataactgaatgaagtcgctgggcgcatctaaaatttgaataaatgtaatgagatcaacaaacaactaaaaagtaaac

SEQ ID NO: 7048 - DNA, 122 bp, Homo sapiens
  misc_feature (61)..(62): /note="This region represents a CpG dinucleotide"
  misc_feature (61)..(61): /note="Nucleotide may be methylated to form 5-methylcytosine"
tgagttatggggctttgaagggagacgggatcctcatcgtcgtcaacacagtgggtgctgcgcttcagaccctgtatatcttggcatatctgcattactgccctcggaaggtagaggccctc

SEQ ID NO: 7049 - DNA, 122 bp, Homo sapiens
  misc_feature (61)..(62): /note="This region represents a CpG dinucleotide"
  misc_feature (61)..(61): /note="Nucleotide may be methylated to form 5-methylcytosine"
taaaaaccagaaggaaaagaatttcaggatggcaaagggatgggcatggtagtggtaagacgatgaggtgtgaggggcagaggaataagaaatttaatggtttttattcagactttattatt

SEQ ID NO: 7050 - DNA, 122 bp, Homo sapiens
  misc_feature (61)..(62): /note="This region represents a CpG dinucleotide"
  misc_feature (61)..(61): /note="Nucleotide may be methylated to form 5-methylcytosine"
tttcgtggcaaggagtgattctctccagtaggcaatcctaagaacgagcgcagtgcttggcgcacagtaaatgctccatggaccatttatgaaattaagtctaagtggacttcaggaaaatg

SEQ ID NO: 7051 - DNA, 122 bp, Homo sapiens
  misc_feature (61)..(62): /note="This region represents a CpG dinucleotide"
  misc_feature (61)..(61): /note="Nucleotide may be methylated to form 5-methylcytosine"
gcgtccccggatgccgctggcatttgtggcaggccctccgcccgcattgtgttgcagccgcggaccaggtgcccttgatggaggacctggagcagatcttcctgcgctcttggcgcgagtcg

SEQ ID NO: 7052 - DNA, 122 bp, Homo sapiens
  misc_feature (61)..(62): /note="This region represents a CpG dinucleotide"
  misc_feature (61)..(61): /note="Nucleotide may be methylated to form 5-methylcytosine"
ttctgtgaagagctgctgatctcccaccagaagcagagtcaagtgttgtgaagcacatgtcgcagcatttttgctctcagatgatggaactgcctgtctcctaacagagctggcagggcctc

SEQ ID NO: 7053 - DNA, 122 bp, Homo sapiens
  misc_feature (61)..(62): /note="This region represents a CpG dinucleotide"
  misc_feature (61)..(61): /note="Nucleotide may be methylated to form 5-methylcytosine"
atgtatctgggcggttaaggatccggttagaaatcatgtttcagtgtgagggcaaataaccgatttgaacatgaggtatttccgaggaaacgctttttttgcccgatagtagtttgtcaaaa

SEQ ID NO: 7054 - DNA, 122 bp, Homo sapiens
  misc_feature (61)..(62): /note="This region represents a CpG dinucleotide"
  misc_feature (61)..(61): /note="Nucleotide may be methylated to form 5-methylcytosine"
aaaaagttggaagatgtatacattaccttattaatatcccacagaaccaatatgctctgtcgttttgcaaattcataagtagtctgcctgcctattccatgcccagctccagtaatgagaac

SEQ ID NO: 7055 - DNA, 122 bp, Homo sapiens
  misc_feature (61)..(62): /note="This region represents a CpG dinucleotide"
  misc_feature (61)..(61): /note="Nucleotide may be methylated to form 5-methylcytosine"
ctggacttggccccaaccacctgacctcgcctgaattgaggatagcgaagataaaggagacgagcctgggtctaggatatttagagtcaggacgaccatcctgcttactgactcattgggta

SEQ ID NO: 7056 - DNA, 122 bp, Homo sapiens
  misc_feature (61)..(62): /note="This region represents a CpG dinucleotide"
  misc_feature (61)..(61): /note="Nucleotide may be methylated to form 5-methylcytosine"
ttctggtctcttcctcctgagcacggttctcctggttgagctccaggccatgccattcaacgccctccaggacaggccgaagggcttgtctgtttggtggttgctaaggtttgaaaaaagcc

SEQ ID NO: 7057 - DNA, 122 bp, Homo sapiens
  misc_feature (61)..(62): /note="This region represents a CpG dinucleotide"
  misc_feature (61)..(61): /note="Nucleotide may be methylated to form 5-methylcytosine"
gtccaaatttcccctctttattttattaaggagaggagggcaagggaacttctgggggaacgagggatcaaagaagaagcttaagtgtctaggttatatcactgagcagcagagactctgaa

SEQ ID NO: 7058 - DNA, 122 bp, Homo sapiens
  misc_feature (61)..(62): /note="This region represents a CpG dinucleotide"
  misc_feature (61)..(61): /note="Nucleotide may be methylated to form 5-methylcytosine"
ctcccgcggcccggctcccgcagcccccggaaaagccagctttcctcccgccgagctccccgctttttaataaaatccaggtagcgccggtttaaagaatcccaaatctccatatacagccc

SEQ ID NO: 7059 - DNA, 122 bp, Homo sapiens
  misc_feature (61)..(62): /note="This region represents a CpG dinucleotide"
  misc_feature (61)..(61): /note="Nucleotide may be methylated to form 5-methylcytosine"
gcagtcactaggatccccaattgccagcagggcaaactgaggcttggagaggtgaaaacacgacctcaaagtcagccaataaggccgtgagcagcagatcagggataagaacacaggccttc

SEQ ID NO: 7060 - DNA, 122 bp, Homo sapiens
  misc_feature (61)..(62): /note="This region represents a CpG dinucleotide"
  misc_feature (61)..(61): /note="Nucleotide may be methylated to form 5-methylcytosine"
tatgccagagacaggccctttgcctcagactgtggcctcggtcaggaaaggaggcgcgagcgtgtggctggagaactctacaccaaacaccctggtttcctgagtggaaatcacactggctc

SEQ ID NO: 7061 - DNA, 122 bp, Homo sapiens
  misc_feature (61)..(62): /note="This region represents a CpG dinucleotide"
  misc_feature (61)..(61): /note="Nucleotide may be methylated to form 5-methylcytosine"
gggtggcggagggtgagtgcgcacctgggaggggacgatctgggggtcagtgcgcattggcggaaggggtagtccgggcgtctgtgcccacctgcggagggggtggcagggggtcagtgcgc

SEQ ID NO: 7062 - DNA, 122 bp, Homo sapiens
  misc_feature (61)..(62): /note="This region represents a CpG dinucleotide"
  misc_feature (61)..(61): /note="Nucleotide may be methylated to form 5-methylcytosine"
ccaaaaggaaacactttttcactactggggataggtttcagagaggcagccatcccatgtcggtcaatgttaaaaagaactaactcaagatatttaaatcaagatagctgagttggctgtaa

SEQ ID NO: 7063 - DNA, 122 bp, Homo sapiens
  misc_feature (61)..(62): /note="This region represents a CpG dinucleotide"
  misc_feature (61)..(61): /note="Nucleotide may be methylated to form 5-methylcytosine"
gcaggggacagagggttaacccagaattcagccaatgtgcttgttccatattcatgcccacgctgggaagtcacaagatggccaaggcacagctgcctgcaagccacgccacctcccacctc

SEQ ID NO: 7064 - DNA, 122 bp, Homo sapiens
  misc_feature (61)..(62): /note="This region represents a CpG dinucleotide"
  misc_feature (61)..(61): /note="Nucleotide may be methylated to form 5-methylcytosine"
gtgggttgatgtgggcagagttggtgggggtcccagggagtccccccagccccttcccagcgtcatagcgacatggtctggggcttacattacccccatgttgtttttgtacagcaggaagc

SEQ ID NO: 7065 - DNA, 122 bp, Homo sapiens
  misc_feature (61)..(62): /note="This region represents a CpG dinucleotide"
  misc_feature (61)..(61): /note="Nucleotide may be methylated to form 5-methylcytosine"
gaaactttgtttagtacatagtgttccggtaacatttaactgcactttatcaagctcactcgtctcatctccagctcccagggactctttgctttccctctgatgtagattctgctggggtg

SEQ ID NO: 7066 - DNA, 122 bp, Homo sapiens
  misc_feature (61)..(62): /note="This region represents a CpG dinucleotide"
  misc_feature (61)..(61): /note="Nucleotide may be methylated to form 5-methylcytosine"
aaactatgttatcctttagaacagttgtatgaatttccatagcactggtagtttgggttacgtatctgaaaacataattatacaggtctttcattactcttgaattggatcatgtgagttta

SEQ ID NO: 7067 - DNA, 122 bp, Homo sapiens
  misc_feature (61)..(62): /note="This region represents a CpG dinucleotide"
  misc_feature (61)..(61): /note="Nucleotide may be methylated to form 5-methylcytosine"
gaatgtccatatacaaaaaaaagtggaacctggattccagccaggaggggtctgcaaccacgtagaacaattggagacttaacaatctgtaatattcgtgttatattctataatattcactg

SEQ ID NO: 7068 - DNA, 122 bp, Homo sapiens
  misc_feature (61)..(62): /note="This region represents a CpG dinucleotide"
  misc_feature (61)..(61): /note="Nucleotide may be methylated to form 5-methylcytosine"
catatcctttgactcggcaattgcactggcaggaattctgctgttatcctcacacacatacggctccaggcatatgtctaaggatcctcatagcagcaatgtctgcaagacttagtcactgg

SEQ ID NO: 7069 - DNA, 122 bp, Homo sapiens
  misc_feature (61)..(62): /note="This region represents a CpG dinucleotide"
  misc_feature (61)..(61): /note="Nucleotide may be methylated to form 5-methylcytosine"
gctacacagactagtcttatatcaagtcctctgtatcaacaaaagagggaacccttgagccgagaaatttggaaagctatctggatacttctctaaccagaaaccttctgctactactcaag

SEQ ID NO: 7070 - DNA, 122 bp, Homo sapiens
  misc_feature (61)..(62): /note="This region represents a CpG dinucleotide"
  misc_feature (61)..(61): /note="Nucleotide may be methylated to form 5-methylcytosine"
tggggctgtggggcagtgagctcagtctctgtgttgcgtaaccaattgccatccatgtggcgccttccaacacacatccacttagtacgtcacggtttgtggggtcaggagtccgggaacag

SEQ ID NO: 7071 - DNA, 122 bp, Homo sapiens
  misc_feature (61)..(62): /note="This region represents a CpG dinucleotide"
  misc_feature (61)..(61): /note="Nucleotide may be methylated to form 5-methylcytosine"
ctcagcatggaacaggttcccaggctcacagaggaaggtggtggcaacacggagacttctcggtcacctggaacacaccccgctgtggacaccccctctgggactttttttctgcctctccc

SEQ ID NO: 7072 - DNA, 122 bp, Homo sapiens
  misc_feature (61)..(62): /note="This region represents a CpG dinucleotide"
  misc_feature (61)..(61): /note="Nucleotide may be methylated to form 5-methylcytosine"
aggttgtcctgacagtgtggttagttgactgaaacttgggctaaatgatggcctacattccgaggctgagatgtcacaacttctgtggcataatgtagagtatgagtcaacaaattatggtc

SEQ ID NO: 7073 - DNA, 122 bp, Homo sapiens
  misc_feature (61)..(62): /note="This region represents a CpG dinucleotide"
  misc_feature (61)..(61): /note="Nucleotide may be methylated to form 5-methylcytosine"
ggctgggtgctgcctgatcctgggtgcctgcccccagcccgttcttgcccagggttggcccgtcagtttggggaggagccactgaaaactggaagcaaacaggggagtccgcagcccagggc

SEQ ID NO: 7074 - DNA, 122 bp, Homo sapiens
  misc_feature (61)..(62): /note="This region represents a CpG dinucleotide"
  misc_feature (61)..(61): /note="Nucleotide may be methylated to form 5-methylcytosine"
tgtttaagaaagataatggcagcagaattttggaggtaaatgacagagaagtaaattgaacgacagggagacctgctgtgaggttattataaagatgccaataagacatgatggaagccgga

SEQ ID NO: 7075 - DNA, 122 bp, Homo sapiens
  misc_feature (61)..(62): /note="This region represents a CpG dinucleotide"
  misc_feature (61)..(61): /note="Nucleotide may be methylated to form 5-methylcytosine"
tttgttttcttcctttttctaagctgctgagctgtccctggaattgtgcaagaggtcacacggagggactgtcaacagctccctaacgtaggttcctaccccagaaagggggtccaggtttt

SEQ ID NO: 7076 - DNA, 122 bp, Homo sapiens
  misc_feature (61)..(62): /note="This region represents a CpG dinucleotide"
  misc_feature (61)..(61): /note="Nucleotide may be methylated to form 5-methylcytosine"
ggaaagcttcctatatgaagtgaaatatgaattgagcatttcagagtgaaggacatgccacgcagagggattagcataaattgggtgtatctgtacagcacctggtaagttctgttaattat

SEQ ID NO: 7077 - DNA, 122 bp, Homo sapiens
  misc_feature (61)..(62): /note="This region represents a CpG dinucleotide"
  misc_feature (61)..(61): /note="Nucleotide may be methylated to form 5-methylcytosine"
ccttgtaaaaactgttacttccctttaaaatgatcctttgtggtttctgtggggagcctccggctctgaagacagagttggagggtggtgagagtattaggcaaacaacaaaacacacacac

SEQ ID NO: 7078 - DNA, 122 bp, Homo sapiens
  misc_feature (61)..(62): /note="This region represents a CpG dinucleotide"
  misc_feature (61)..(61): /note="Nucleotide may be methylated to form 5-methylcytosine"
tggtttgcaagaatgtgtatgagtttcatcttagctttcaagcattcaactgagttcatacgtggaggttcaaatcactaggcacacaatgtttgccactcattgtgtcctgaaaggtttgg

SEQ ID NO: 7079 - DNA, 122 bp, Homo sapiens
  misc_feature (61)..(62): /note="This region represents a CpG dinucleotide"
  misc_feature (61)..(61): /note="Nucleotide may be methylated to form 5-methylcytosine"
agaactactgtactaaatacaaatactccttgcatgcctggactcaaaatcactgggaaccgtacacaggactagggcaataaaagtattgctcacctttggaaggagctggattgcctgta

SEQ ID NO: 7080 - DNA, 122 bp, Homo sapiens
  misc_feature (61)..(62): /note="This region represents a CpG dinucleotide"
  misc_feature (61)..(61): /note="Nucleotide may be methylated to form 5-methylcytosine"
aactgataagtaggattagcaggtagtcagggaagagcagcagagggaaccacaagtccacggggcaaacctgaggagaagcacagcacatcttgaggaattgaaagtatggctggttcagt

SEQ ID NO: 7081 - DNA, 122 bp, Homo sapiens
  misc_feature (61)..(62): /note="This region represents a CpG dinucleotide"
  misc_feature (61)..(61): /note="Nucleotide may be methylated to form 5-methylcytosine"
aatgccttccatttacttttagttggaagaggaaaggctgaatctttcttacaataggggcgggaaatcaacgtgactctaccagttattataccttcgggagggaaagcagaactctttca

SEQ ID NO: 7082 - DNA, 122 bp, Homo sapiens
  misc_feature (61)..(62): /note="This region represents a CpG dinucleotide"
  misc_feature (61)..(61): /note="Nucleotide may be methylated to form 5-methylcytosine"
gcatctctggagcagaaggctgagatttgcagtgtgttccccacttccctgtctgctgaacgtgaagtagatcagctcttgctgaaagaaaatgtattcatgccagggtttatttatagcaa

SEQ ID NO: 7083 - DNA, 122 bp, Homo sapiens
  misc_feature (61)..(62): /note="This region represents a CpG dinucleotide"
  misc_feature (61)..(61): /note="Nucleotide may be methylated to form 5-methylcytosine"
ggtaagggaagaattgaatgtgtaaacaagcatgaaatgcaaactggagcagtaactccacgtatgaggcagaaaagaaacttaaaaagcaaacaaaaaggtggtttgtttacaggaagaat

SEQ ID NO: 7084 - DNA, 122 bp, Homo sapiens
  misc_feature (61)..(62): /note="This region represents a CpG dinucleotide"
  misc_feature (61)..(61): /note="Nucleotide may be methylated to form 5-methylcytosine"
ggaaggttgcgtgggagaagtctccgacagctgtgcagtcaatggaagtttcagtgaagacgattgtgggtccccaagccaaagttgcccgtcagaggagtcccatatcttccaggaacagg

SEQ ID NO: 7085 - DNA, 122 bp, Homo sapiens
  misc_feature (61)..(62): /note="This region represents a CpG dinucleotide"
  misc_feature (61)..(61): /note="Nucleotide may be methylated to form 5-methylcytosine"
cagactcttagtgactcttttcagtttagtaggtttcctatcttcccctctcattgctctcgcatcagtcctaagaacagattgtaatttcctgctctttcctcatccccatttttcctcac

SEQ ID NO: 7086 - DNA, 122 bp, Homo sapiens
  misc_feature (61)..(62): /note="This region represents a CpG dinucleotide"
  misc_feature (61)..(61): /note="Nucleotide may be methylated to form 5-methylcytosine"
ttgggagctattctgatactttccatttggaagcacagatagggcctcctaaccacaaggcgtggagatgtggtcacaaggctgggctgggtgctccaccctgaatgccagagcatcctgct

SEQ ID NO: 7087 - DNA, 122 bp, Homo sapiens
  misc_feature (61)..(62): /note="This region represents a CpG dinucleotide"
  misc_feature (61)..(61): /note="Nucleotide may be methylated to form 5-methylcytosine"
atcccctgccaaggtattatagggcaaaggacacaataaccagttctgcaggaaggtgagcgaagccttccactaagtaacatttgggctgggtattgaaagatgtgtaggagttcaccaag

SEQ ID NO: 7088 - DNA, 122 bp, Homo sapiens
  misc_feature (61)..(62): /note="This region represents a CpG dinucleotide"
  misc_feature (61)..(61): /note="Nucleotide may be methylated to form 5-methylcytosine"
tccatcagcaaactgcagttggtatctcctttaaaatgcaccaagaatcaggtcacttctcgacacacacattgcactcccattactcacagggattgctgcatagcctcctccctagtttc

SEQ ID NO: 7089 - DNA, 122 bp, Homo sapiens
  misc_feature (61)..(62): /note="This region represents a CpG dinucleotide"
  misc_feature (61)..(61): /note="Nucleotide may be methylated to form 5-methylcytosine"
aatggctgtgttttctttggcagaagctagaccaagtttcacatcacagttgagaggagacgtgcataggaactgcgtcatctggttccacactcgctccagtgatgtttgagccccagcat

SEQ ID NO: 7090 - DNA, 122 bp, Homo sapiens
  misc_feature (61)..(62): /note="This region represents a CpG dinucleotide"
  misc_feature (61)..(61): /note="Nucleotide may be methylated to form 5-methylcytosine"
cagagtcttctcatttttcaggaaacacagaatcaacttcaattcacaattatgaggaaacgttttgttttgtagactaatatctgacagatagatatgtgtcttaaccaatgcagccactg

SEQ ID NO: 7091 - DNA, 122 bp, Homo sapiens
  misc_feature (61)..(62): /note="This region represents a CpG dinucleotide"
  misc_feature (61)..(61): /note="Nucleotide may be methylated to form 5-methylcytosine"
caaattgccgcaattaacacgtgccactgccacgatctatgggctgaaacgtggctggaacgacgcagaagcagaaaccacagagagcgtgcgctccaataaaacggcactaaatggcacgg

SEQ ID NO: 7092 - DNA, 122 bp, Homo sapiens
  misc_feature (61)..(62): /note="This region represents a CpG dinucleotide"
  misc_feature (61)..(61): /note="Nucleotide may be methylated to form 5-methylcytosine"
gagcagctgcaggcacacgcctggcttccagcagagccttgcaggtggtggcgagggtggcggttcttactgttcgagtagctcagccctgctgccctctgtggtgatgaggcaagagagcg

SEQ ID NO: 7093 - DNA, 122 bp, Homo sapiens
  misc_feature (61)..(62): /note="This region represents a CpG dinucleotide"
  misc_feature (61)..(61): /note="Nucleotide may be methylated to form 5-methylcytosine"
gtcagaggggtggatccctcataaatggcttgatgctgttctctgtagtgaatgcattctcgctctggacagactagattatttttgtgggaatcgattagttccgtagagagtggcttgtt

SEQ ID NO: 7094 - DNA, 122 bp, Homo sapiens
  misc_feature (61)..(62): /note="This region represents a CpG dinucleotide"
  misc_feature (61)..(61): /note="Nucleotide may be methylated to form 5-methylcytosine"
tcacaccttgaaacggcagccgtgtttttgtccccctaacagggtaatgtgaagttacttcgtgaactgaaagggcttgcttgaaacacagtgtccacagggcaatcccagcttcttgtcaa

SEQ ID NO: 7095 - DNA, 122 bp, Homo sapiens
  misc_feature (61)..(62): /note="This region represents a CpG dinucleotide"
  misc_feature (61)..(61): /note="Nucleotide may be methylated to form 5-methylcytosine"
ggcggcatttttataagtaattccttatttctgcctgaagaccacaaagcctcctggaggcgtaactgctcagaccggtcttcagggaatatttaaggacttagtggaatttatgaacaata

SEQ ID NO: 7096 - DNA, 122 bp, Homo sapiens
  misc_feature (61)..(62): /note="This region represents a CpG dinucleotide"
  misc_feature (61)..(61): /note="Nucleotide may be methylated to form 5-methylcytosine"
gcagagttttgcatgtgtgagaatcagactgagctataaacagatacacacacacatagacgcacaggttcaagggagatggtctatgactcaataactcatctggtttgtcaatttcggta

SEQ ID NO: 7097 - DNA, 122 bp, Homo sapiens
  misc_feature (61)..(62): /note="This region represents a CpG dinucleotide"
  misc_feature (61)..(61): /note="Nucleotide may be methylated to form 5-methylcytosine"
atgccgttcccttgagtctttacatacctacttacccttcaagtctcagaacaaatgagacgtttcttgacctttctagtgattctcaactagccctgtataattggttctcaaacttggct

SEQ ID NO: 7098 - DNA, 122 bp, Homo sapiens
  misc_feature (61)..(62): /note="This region represents a CpG dinucleotide"
  misc_feature (61)..(61): /note="Nucleotide may be methylated to form 5-methylcytosine"
tacacacacatgcaataatttatttattaggttacctctccctagaggctgccatttctgcgaaatgaaccctggcaggggcctatccgtctgctaaatgcctactgattcaagaaaaaagt

SEQ ID NO: 7099 - DNA, 122 bp, Homo sapiens
  misc_feature (61)..(62): /note="This region represents a CpG dinucleotide"
  misc_feature (61)..(61): /note="Nucleotide may be methylated to form 5-methylcytosine"
taaccaagttctcattctttatctacggggtactggtttcccaaactctttcaaaggactcgtgttatggatcacactgaccatggaattaaacctcacatcatcttttggaaatagtagaa

SEQ ID NO: 7100 - DNA, 122 bp, Homo sapiens
  misc_feature (61)..(62): /note="This region represents a CpG dinucleotide"
  misc_feature (61)..(61): /note="Nucleotide may be methylated to form 5-methylcytosine"
cagctactgctgctgtcagcccattggctaggccaggggtggggcctgcttaaggtggcacgggctttaaggtggcccttgcagatcttgcagacattttcgtgggctccagggacgacact

SEQ ID NO: 7101 - DNA, 122 bp, Homo sapiens
  misc_feature (61)..(62): /note="This region represents a CpG dinucleotide"
  misc_feature (61)..(61): /note="Nucleotide may be methylated to form 5-methylcytosine"
gagcccgccgctgccgccatcgcctgagggaagcgagaagaggccgcgaccgggagaaaacgcagagtcgtcaccggagagaagtcgactccctagcagcagtcgacgccagagggccgccc

SEQ ID NO: 7102 - DNA, 122 bp, Homo sapiens
  misc_feature (61)..(62): /note="This region represents a CpG dinucleotide"
  misc_feature (61)..(61): /note="Nucleotide may be methylated to form 5-methylcytosine"
gtgagcatttctgacctgcttaaatttcagagactctccagcctggatttcctcagctgacgcaaccagttgggctgtaccctgagctttaggaattgacaaacagactggtgccaggaagg

SEQ ID NO: 7103 - DNA, 122 bp, Homo sapiens
  misc_feature (61)..(62): /note="This region represents a CpG dinucleotide"
  misc_feature (61)..(61): /note="Nucleotide may be methylated to form 5-methylcytosine"
cggctctctgaaagcgggtggagctgagaagcaacccagagaggctcctgcagccagggtcgggaggatttcaccttcctggatgggaattgattctccagacctagctttattaagtgtca

SEQ ID NO: 7104 - DNA, 122 bp, Homo sapiens
  misc_feature (61)..(62): /note="This region represents a CpG dinucleotide"
  misc_feature (61)..(61): /note="Nucleotide may be methylated to form 5-methylcytosine"
gacgttcttctcttgggcaggaagaccttgccagcatccatgctatgtgtgtttcaggagcggagggcaggttcaattagctgcggcaagtcaggtctcggagaggtcgtgggaggcccctc

SEQ ID NO: 7105 - DNA, 122 bp, Homo sapiens
  misc_feature (61)..(62): /note="This region represents a CpG dinucleotide"
  misc_feature (61)..(61): /note="Nucleotide may be methylated to form 5-methylcytosine"
gcttacataggggtcatcatttgttcttttaatccatttcaagagcatgtccccttttgccgtattcagggatgattgccccctacctgaaccccatcttgctccaacaaacaagtcatata

SEQ ID NO: 7106 - DNA, 122 bp, Homo sapiens
  misc_feature (61)..(62): /note="This region represents a CpG dinucleotide"
  misc_feature (61)..(61): /note="Nucleotide may be methylated to form 5-methylcytosine"
atctgcccgcctcagcctcccaaagtgctgggattacaggcatgagccaccgcacctcgccgggtaatgattcttgagacaagaggtggttaagtagcattattatgtaatgtttatatacc

SEQ ID NO: 7107 - DNA, 122 bp, Homo sapiens
  misc_feature (61)..(62): /note="This region represents a CpG dinucleotide"
  misc_feature (61)..(61): /note="Nucleotide may be methylated to form 5-methylcytosine"
atggagaagagtggactgggcagactggggagcaaactcagcaactcagcagacactggccgggaatgcagacactagctggcaatactggtccagaatactggcaaaggctgggccagaat

SEQ ID NO: 7108 - DNA, 122 bp, Homo sapiens
  misc_feature (61)..(62): /note="This region represents a CpG dinucleotide"
  misc_feature (61)..(61): /note="Nucleotide may be methylated to form 5-methylcytosine"
ttctggggcataatagagcagcagcacagaacgtaacgtgattgtttgcttttcccgctgcgctgtgtagcccacatccttctacaactccaacaactggttcagtaccaggcgcagagtga

SEQ ID NO: 7109 - DNA, 122 bp, Homo sapiens
  misc_feature (61)..(62): /note="This region represents a CpG dinucleotide"
  misc_feature (61)..(61): /note="Nucleotide may be methylated to form 5-methylcytosine"
ccctaattctctgaagttttacacaatagagtttgtcttccatttcatgaagtctcagcccgtgactgtgacctttacctttttacttttgctagaaatattttttcatgagggtattttaa

SEQ ID NO: 7110 - DNA, 122 bp, Homo sapiens
  misc_feature (61)..(62): /note="This region represents a CpG dinucleotide"
  misc_feature (61)..(61): /note="Nucleotide may be methylated to form 5-methylcytosine"
gccacatagtgggtgttcaataagtggtgacttacaatgttataatagggcaaattataacgggctggggaagggcatgatgcatagggcaagctcacctagattgtgcttctaaaaggggc

SEQ ID NO: 7111 - DNA, 122 bp, Homo sapiens
  misc_feature (61)..(62): /note="This region represents a CpG dinucleotide"
  misc_feature (61)..(61): /note="Nucleotide may be methylated to form 5-methylcytosine"
tataacaggcctcagagagatcccctgcttcttctagcatgtgaggttacagtgagaaaacgactggctatgaggaagcaggccctcaccagacactaaatctgtcaataccttaattttgg

SEQ ID NO: 7112 - DNA, 122 bp, Homo sapiens
  misc_feature (61)..(62): /note="This region represents a CpG dinucleotide"
  misc_feature (61)..(61): /note="Nucleotide may be methylated to form 5-methylcytosine"
acttccctaattctgccagacagtttccaattctgttctattgcagataaatcagcaggacgggaacagcctctcacaagactgatccatgtgatgatatgatgttgcctcattctggcctc

SEQ ID NO: 7113 - DNA, 122 bp, Homo sapiens
  misc_feature (61)..(62): /note="This region represents a CpG dinucleotide"
  misc_feature (61)..(61): /note="Nucleotide may be methylated to form 5-methylcytosine"
cttacatagtgtctgagttttaaacacctgtcattatagactttgtcctgccacatgatacgaaacaaggcaaactataatttggtcagaggtcacagccctaaaagcaggtttagttcctg

SEQ ID NO: 7114 - DNA, 122 bp, Homo sapiens
  misc_feature (61)..(62): /note="This region represents a CpG dinucleotide"
  misc_feature (61)..(61): /note="Nucleotide may be methylated to form 5-methylcytosine"
acatcagaaggaacagactctggacgcgcggccgttaagaactgtaacactcaccggacccgccccctttaagaactgtaacacaccgcgagggtctggggcttcattcttgaagtcagtga

SEQ ID NO: 7115 - DNA, 122 bp, Homo sapiens
  misc_feature (61)..(62): /note="This region represents a CpG dinucleotide"
  misc_feature (61)..(61): /note="Nucleotide may be methylated to form 5-methylcytosine"
gggacaaaggtgttgaatggtacaggaaacaggagtcttaccagggtcatgctgagtgtacggcccatgacagcatggaacaggtcgtgtgcagctgggccagacacaacaaaaaattcaca

SEQ ID NO: 7116 - DNA, 122 bp, Homo sapiens
  misc_feature (61)..(62): /note="This region represents a CpG dinucleotide"
  misc_feature (61)..(61): /note="Nucleotide may be methylated to form 5-methylcytosine"
ggggagttgttattgcgagtcacccttggcaagaaactcaatagaaaaccctggtatggccgggagtggtggctcacgcctgtaatcctagcactttgggaggctgagcggggggggtggat

SEQ ID NO: 7117 - DNA, 122 bp, Homo sapiens
  misc_feature (61)..(62): /note="This region represents a CpG dinucleotide"
  misc_feature (61)..(61): /note="Nucleotide may be methylated to form 5-methylcytosine"
attttgacagctgttgccaaatgctttccattgaggctgtgccgtatctacctagagcagcgtagagtgagaggtcctatttacctcctggcttttccaacagaacgtcctatcaaatcttg

SEQ ID NO: 7118 - DNA, 122 bp, Homo sapiens
  misc_feature (61)..(62): /note="This region represents a CpG dinucleotide"
  misc_feature (61)..(61): /note="Nucleotide may be methylated to form 5-methylcytosine"
tctgaaacgttgcctaaggagtaagcaatcagagcacctgggttcttctggcaatatctgcgctcacctttcctggttgtgggtttgtccgataccctagtgcaaatagattgaaagccaga

SEQ ID NO: 7119 - DNA, 122 bp, Homo sapiens
  misc_feature (61)..(62): /note="This region represents a CpG dinucleotide"
  misc_feature (61)..(61): /note="Nucleotide may be methylated to form 5-methylcytosine"
cctggatgggggctgggcttgtgggcggcatctccttcgggggctctggaggctggggctcgctttagttgtggggtgagcactgggagccccagttagcggaacacccacagagaccgggg

SEQ ID NO: 7120 - DNA, 122 bp, Homo sapiens
  misc_feature (61)..(62): /note="This region represents a CpG dinucleotide"
  misc_feature (61)..(61): /note="Nucleotide may be methylated to form 5-methylcytosine"
cacttaactaaactcttgcggtgtcttatgaccagggacgaagtgcggggccccttcagacgtcgcagctggagtaactgttttctttccatttcacagctcttgaaggaggtgtgactgag

SEQ ID NO: 7121 - DNA, 122 bp, Homo sapiens
  misc_feature (61)..(62): /note="This region represents a CpG dinucleotide"
  misc_feature (61)..(61): /note="Nucleotide may be methylated to form 5-methylcytosine"
gtttttaaccgtaaatgatcacaataattgtctcaagtcaccaaaacctaagctgtttcacggaatatttaagtgaaaaagaaggtttcagaagtttttcttccttaagtgcctcagatcag

SEQ ID NO: 7122 - DNA, 122 bp, Homo sapiens
  misc_feature (61)..(62): /note="This region represents a CpG dinucleotide"
  misc_feature (61)..(61): /note="Nucleotide may be methylated to form 5-methylcytosine"
caggcatgagccactgcacctgtggaatttgtatgcttattcactacatcaaaaacacctcgtgtggtgtttcttatattaaagtttacctcaaactttaacatgggaagcatgggaagtat

SEQ ID NO: 7123 - DNA, 122 bp, Homo sapiens
  misc_feature (61)..(62): /note="This region represents a CpG dinucleotide"
  misc_feature (61)..(61): /note="Nucleotide may be methylated to form 5-methylcytosine"
gaaggagttcagcctagtgggtacagtggcccaaaagaggtttggacctagtgctcacagcgcagaggaggaaagttgcaatttcaggtgagaaaacagcaaagacttcttgggagaggtgg

SEQ ID NO: 7124 - DNA, 122 bp, Homo sapiens
  misc_feature (61)..(62): /note="This region represents a CpG dinucleotide"
  misc_feature (61)..(61): /note="Nucleotide may be methylated to form 5-methylcytosine"
tgtgtacatagagccaggattgctggattaagatagcattacaggtaatacaggataagacgacattgcacctcgggtccaggtagtgagaaggttccctgccaccctgttacctggagcgg

SEQ ID NO: 7125 - DNA, 122 bp, Homo sapiens
  misc_feature (61)..(62): /note="This region represents a CpG dinucleotide"
  misc_feature (61)..(61): /note="Nucleotide may be methylated to form 5-methylcytosine"
ccaagaactccagctacacaggcctcctttcatggtttcatatgagccagcctcttcctccgcccatgtaacactcttcccccaagcctgcctggctagttcctactcatctttcacttcct

SEQ ID NO: 7126 - DNA, 122 bp, Homo sapiens
  misc_feature (61)..(62): /note="This region represents a CpG dinucleotide"
  misc_feature (61)..(61): /note="Nucleotide may be methylated to form 5-methylcytosine"
ccagcaactccctcgctgggtccgatatcccccttcacctcccttttagctggcactgcacgaatgcctccacagagaggctgacagtacagcagtcacctcccagctgtcttcggtgcatc

SEQ ID NO: 7127 - DNA, 122 bp, Homo sapiens
  misc_feature (61)..(62): /note="This region represents a CpG dinucleotide"
  misc_feature (61)..(61): /note="Nucleotide may be methylated to form 5-methylcytosine"
tcatattcaaagccttaatgactcagacaatactttaaatgtggtttccatgagcatcttcgggattactatggaagattatgccaaaactatttttttttggcatgtgattacatactaga

SEQ ID NO: 7128 - DNA, 122 bp, Homo sapiens
  misc_feature (61)..(62): /note="This region represents a CpG dinucleotide"
  misc_feature (61)..(61): /note="Nucleotide may be methylated to form 5-methylcytosine"
gtgaatctggggatgcaatccagtttgaacctcttagtgtactgcactcttactgaagatcgaatatgaacccctaagtcagcccaatagctgacctatagggtctttactatttatcaatt

SEQ ID NO: 7129 - DNA, 122 bp, Homo sapiens
  misc_feature (61)..(62): /note="This region represents a CpG dinucleotide"
  misc_feature (61)..(61): /note="Nucleotide may be methylated to form 5-methylcytosine"
gaagggagcgaagtgtgtggcagcccagtttttttctgaacatgaatagaggaaagagaacgcctccagccagcagagcacagccaggctgcaccgtgttttgataaggttgtggctagccg

SEQ ID NO: 7130 - DNA, 122 bp, Homo sapiens
  misc_feature (61)..(62): /note="This region represents a CpG dinucleotide"
  misc_feature (61)..(61): /note="Nucleotide may be methylated to form 5-methylcytosine"
aattcaaaccagaacccttatgtgtaacctctaagcaatcctcagctggaagtcaagagacgtgtgttccatttcggattcggtcacaactacatgaccttgggcaaattgctcaacctccc

SEQ ID NO: 7131 - DNA, 122 bp, Homo sapiens
  misc_feature (61)..(62): /note="This region represents a CpG dinucleotide"
  misc_feature (61)..(61): /note="Nucleotide may be methylated to form 5-methylcytosine"
tttccctgggctgttcccattcttatgatttttcaagagtctaagagattatttgtgccacgcttgggttctttataagctggcttttgtccaggaagcttatgtttgtctctctgagaaga

SEQ ID NO: 7132 - DNA, 122 bp, Homo sapiens
  misc_feature (61)..(62): /note="This region represents a CpG dinucleotide"
  misc_feature (61)..(61): /note="Nucleotide may be methylated to form 5-methylcytosine"
ggtgtccacgtgaactcaacattcaacctgtcgagagcaaaagtcagcagaaactgacttcgtttccctgttattgatatgaggctgtgggggctcactgtaattaatcagtagggtcagcc

SEQ ID NO: 7133 - DNA, 122 bp, Homo sapiens
  misc_feature (61)..(62): /note="This region represents a CpG dinucleotide"
  misc_feature (61)..(61): /note="Nucleotide may be methylated to form 5-methylcytosine"
gtaaatttctcttaaaatttagtgtctctttcaacaggtcaccagaaagatgcaactcatcgtttccctttttatcttggttgccaggagactccaagctagccccgtgtcactccctgctg

SEQ ID NO: 7134 - DNA, 122 bp, Homo sapiens
  misc_feature (61)..(62): /note="This region represents a CpG dinucleotide"
  misc_feature (61)..(61): /note="Nucleotide may be methylated to form 5-methylcytosine"
ccagcgctttccggatgaagcgcgcatattccgccagttccgagtccgggagtgcctgctcggtcctgggttaggaggaacccagggatcaatactccaagggctttcttctccccctccct

SEQ ID NO: 7135 - DNA, 122 bp, Homo sapiens
  misc_feature (61)..(62): /note="This region represents a CpG dinucleotide"
  misc_feature (61)..(61): /note="Nucleotide may be methylated to form 5-methylcytosine"
gaatccacccaagaacaagcttcaggagccacactgacaaaggcccagtgacacacattacgccagagtttcctggagaaacaggcgggtccaggtctggggcagaaggcccatggggtgag

SEQ ID NO: 7136 - DNA, 122 bp, Homo sapiens
  misc_feature (61)..(62): /note="This region represents a CpG dinucleotide"
  misc_feature (61)..(61): /note="Nucleotide may be methylated to form 5-methylcytosine"
taagttgtattctgtgcataaattatttccatgtcttctctcccttttaaaggtgtgccacgtcatcaccgaggtgaaatctggaaatttctagctgagcaattccaccttaaacaccagtt

SEQ ID NO: 7137 - DNA, 122 bp, Homo sapiens
  misc_feature (61)..(62): /note="This region represents a CpG dinucleotide"
  misc_feature (61)..(61): /note="Nucleotide may be methylated to form 5-methylcytosine"
cagtaagcctgagaaaggggctgcttcggtctccagccacaactctgtgaagccaagccacgcgctgtcttccagagagggaatagaagtttccatcctgtgcacccagtggttgagcaaga

SEQ ID NO: 7138 - DNA, 122 bp, Homo sapiens
  misc_feature (61)..(62): /note="This region represents a CpG dinucleotide"
  misc_feature (61)..(61): /note="Nucleotide may be methylated to form 5-methylcytosine"
cctggcttcagtctgcaacattacggggtctttgctagcagggactgtgcaatccagcaccgtcttcgtggacagtcagggcacaagctcccactggaatattcaagaggacagccacacga

SEQ ID NO: 7139 - DNA, 122 bp, Homo sapiens
  misc_feature (61)..(62): /note="This region represents a CpG dinucleotide"
  misc_feature (61)..(61): /note="Nucleotide may be methylated to form 5-methylcytosine"
aggctacatgtggtcaaactttagtctgcagtttctcagtcagagactcagtgagggaaccggcccccactgtcctcatatgtgcaaatttgaagttgacctcatagcttctcatgaacaat

SEQ ID NO: 7140 - DNA, 122 bp, Homo sapiens
  misc_feature (61)..(62): /note="This region represents a CpG dinucleotide"
  misc_feature (61)..(61): /note="Nucleotide may be methylated to form 5-methylcytosine"
acatagcaggcaagaaggcaaattgttggaagcaatggtgtaatccacaccctctgtgcacgggttacaggctccagtatattctgatctatgagatcctgggaagggagagaaaagttaat

SEQ ID NO: 7141 - DNA, 122 bp, Homo sapiens
  misc_feature (61)..(62): /note="This region represents a CpG dinucleotide"
  misc_feature (61)..(61): /note="Nucleotide may be methylated to form 5-methylcytosine"
ggaggggctgcgatctcttttaaagctagaccaattttacactggcaggggccgtgtgtgcggctctacattacagcgccctacaggatgcatctaaactagtttggtcagcttatccattc

SEQ ID NO: 7142 - DNA, 122 bp, Homo sapiens
  misc_feature (61)..(62): /note="This region represents a CpG dinucleotide"
  misc_feature (61)..(61): /note="Nucleotide may be methylated to form 5-methylcytosine"
tattgcataagccaaaactatggatgtcatcctggagaagagacttccctctctcctccccgagaaatattatcgccttgtcccagtgactatacctcataggtgtttaatccatccacctc

SEQ ID NO: 7143 - DNA, 122 bp, Homo sapiens
  misc_feature (61)..(62): /note="This region represents a CpG dinucleotide"
  misc_feature (61)..(61): /note="Nucleotide may be methylated to form 5-methylcytosine"
ggatcatttccatgatccctttttcccttatcctggggccctgagccctggcctgccacacgtccactgtgaggcctggacagcctagagcctgctaatgatttttcgtccatttctaagcc

SEQ ID NO: 7144 - DNA, 122 bp, Homo sapiens
  misc_feature (61)..(62): /note="This region represents a CpG dinucleotide"
  misc_feature (61)..(61): /note="Nucleotide may be methylated to form 5-methylcytosine"
tcagcaatccttttctgttttctgggaaagtaaaaacatttaattatgtatgggttaggacggcctataaattaggtaatagagcaggaagttgaatgggattcatatctgttggctctcct

SEQ ID NO: 7145 - DNA, 122 bp, Homo sapiens
  misc_feature (61)..(62): /note="This region represents a CpG dinucleotide"
  misc_feature (61)..(61): /note="Nucleotide may be methylated to form 5-methylcytosine"
ggcctttgagcatagcgtgcaccgctacggccagtccactggagagttcctgcaggtgggcggtaagtcacccatcctgtagggctggcccatccaaagtgacatggcatttcctgctggtt

SEQ ID NO: 7146 - DNA, 122 bp, Homo sapiens
  misc_feature (61)..(62): /note="This region represents a CpG dinucleotide"
  misc_feature (61)..(61): /note="Nucleotide may be methylated to form 5-methylcytosine"
agtgccagagactgtgctgagtacttaattacgcattgccttgttatatccccactacaacgctatgaggtaggcactttttacatctccattttacagatgaggaaattgagatttggcga

SEQ ID NO: 7147 - DNA, 122 bp, Homo sapiens
  misc_feature (61)..(62): /note="This region represents a CpG dinucleotide"
  misc_feature (61)..(61): /note="Nucleotide may be methylated to form 5-methylcytosine"
gaagtgcagaaggcgcctcctctgataagcctgtgatacagcaggtgttgatcctaggcccggctggtcagcttctccacaaggctgccctctgacaagctctgcgcttccaccactgcctc

SEQ ID NO: 7148 - DNA, 122 bp, Homo sapiens
  misc_feature (61)..(62): /note="This region represents a CpG dinucleotide"
  misc_feature (61)..(61): /note="Nucleotide may be methylated to form 5-methylcytosine"
ttcacagggctgggagttggtgcttgtgtgccttgcagactctgtccctcagggtgacaccgccaacttaatgcttgcagagcatttgtggtttatcaagcactgcactttctctttctcat

SEQ ID NO: 7149 - DNA, 122 bp, Homo sapiens
  misc_feature (61)..(62): /note="This region represents a CpG dinucleotide"
  misc_feature (61)..(61): /note="Nucleotide may be methylated to form 5-methylcytosine"
ctcaaagcagacactgaaaaatgtgaggctgctgccaagccacagggctcagggagtatccgctgtctccacacaaaggctgaaataatgagaatcctctggtcggtatcatgtagcagtct

SEQ ID NO: 7150 - DNA, 122 bp, Homo sapiens
  misc_feature (61)..(62): /note="This region represents a CpG dinucleotide"
  misc_feature (61)..(61): /note="Nucleotide may be methylated to form 5-methylcytosine"
ttatgtaaccagtttatgcaagggcagccggcccgcttacataaggggaggccgggccagcgcccagctggggagggggaggctcttaaagggaccggcgtcccccgcggctccctccacgg

SEQ ID NO: 7151 - DNA, 122 bp, Homo sapiens
  misc_feature (61)..(62): /note="This region represents a CpG dinucleotide"
  misc_feature (61)..(61): /note="Nucleotide may be methylated to form 5-methylcytosine"
catcccccacacctacttgcagggaatgcagttgaaaattgagctgctcaaacagagaaacgacagctgaaacaagaatgctattaacatatgtcagctcacttatttccacctcaccacat

SEQ ID NO: 7152 - DNA, 122 bp, Homo sapiens
  misc_feature (61)..(62): /note="This region represents a CpG dinucleotide"
  misc_feature (61)..(61): /note="Nucleotide may be methylated to form 5-methylcytosine"
tacttgcccccttcgccaccactccccaccaagaaggagaattgctggaaacccaccccccggccagagcccaggttccgccacccagccctcccacagccactcccagtagctaatccttt

SEQ ID NO: 7153 - DNA, 122 bp, Homo sapiens
  misc_feature (61)..(62): /note="This region represents a CpG dinucleotide"
  misc_feature (61)..(61): /note="Nucleotide may be methylated to form 5-methylcytosine"
ctgctggagaaggacgaccgtatcgtgcgcaccccgcccgggccacccctgcgcctggcgcgcaacggttcgcaccaggtcacgcttcgcggcttctccaagccctcggacctcgtgggcgt

SEQ ID NO: 7154 - DNA, 122 bp, Homo sapiens
  misc_feature (61)..(62): /note="This region represents a CpG dinucleotide"
  misc_feature (61)..(61): /note="Nucleotide may be methylated to form 5-methylcytosine"
cattgccaagtgtcaaacaaaattgtccacaattacaggcaatatttgatacagtgtacacgtagtatagattgggggagggggtccctgagatctagaagaactcctggtgtgaaaaaaca

SEQ ID NO: 7155 - DNA, 122 bp, Homo sapiens
  misc_feature (61)..(62): /note="This region represents a CpG dinucleotide"
  misc_feature (61)..(61): /note="Nucleotide may be methylated to form 5-methylcytosine"
cagttctctgccctgcaggtctcacctgtggttctctagcttctgaacctggagttaaaccgcaggagggcaggtctcagccacagggttcctgcttggctgtcagtgccttgtcctgtaca

SEQ ID NO: 7156 - DNA, 122 bp, Homo sapiens
  misc_feature (61)..(62): /note="This region represents a CpG dinucleotide"
  misc_feature (61)..(61): /note="Nucleotide may be methylated to form 5-methylcytosine"
ttcaaccctattccagacggccaagatggagaacccacaaaaatgcctgtcagtgtttaacgatccacctgagtaaaggatggttgcaaaaatgaactggttctctctctgcaaactctggg

SEQ ID NO: 7157 - DNA, 122 bp, Homo sapiens
  misc_feature (61)..(62): /note="This region represents a CpG dinucleotide"
  misc_feature (61)..(61): /note="Nucleotide may be methylated to form 5-methylcytosine"
atttgtccatctaattctaggcaataataaacaaagcagggttctgttttacagactgcacgactaagtcatccttttggctgatggaaagacccagggtttaaaatgactcagcaaaaagc

SEQ ID NO: 7158 - DNA, 122 bp, Homo sapiens
  misc_feature (61)..(62): /note="This region represents a CpG dinucleotide"
  misc_feature (61)..(61): /note="Nucleotide may be methylated to form 5-methylcytosine"
aataaataagaatatctgggagctactttagataaaaatgaattggagtctctgggactgcgttgttccatacaggagccactagcccaggaccactgctgagcaggtgaaggtgagaagcc

SEQ ID NO: 7159 - DNA, 122 bp, Homo sapiens
  misc_feature (61)..(62): /note="This region represents a CpG dinucleotide"
  misc_feature (61)..(61): /note="Nucleotide may be methylated to form 5-methylcytosine"
caccatttaatgatgaccagatcccacgtggaaggggatcctaaggggatggaggtcaggcgtttactgtaaagtgaaagctgtctgactgggtccaaccccaagagtagatgtcaatattt

SEQ ID NO: 7160 - DNA, 122 bp, Homo sapiens
  misc_feature (61)..(62): /note="This region represents a CpG dinucleotide"
  misc_feature (61)..(61): /note="Nucleotide may be methylated to form 5-methylcytosine"
gggtttttaggtaaactatcctctcatcagcaaacaacaactgtttgactttttctttaccgattaggatgccctttgtttctttctcttgtctgatttttctggctaggacttctagtact

SEQ ID NO: 7161 - DNA, 122 bp, Homo sapiens
  misc_feature (61)..(62): /note="This region represents a CpG dinucleotide"
  misc_feature (61)..(61): /note="Nucleotide may be methylated to form 5-methylcytosine"
agaaaaccctaaaaagttaccaaagaactaaacaaagttatcaattaatttataattaaccgagataatccttgtaaaaataactttcagcggagggtggatggccttaaatttccccacaa

SEQ ID NO: 7162 - DNA, 122 bp, Homo sapiens
  misc_feature (61)..(62): /note="This region represents a CpG dinucleotide"
  misc_feature (61)..(61): /note="Nucleotide may be methylated to form 5-methylcytosine"
gttagggccaatttacttcaagcagagacagtatttaatccaaattttctggggccagcccgtgaagacaggagttctgttcttcctatggccttgtcaattttactctttcagccttgtct

SEQ ID NO: 7163 - DNA, 122 bp, Homo sapiens
  misc_feature (61)..(62): /note="This region represents a CpG dinucleotide"
  misc_feature (61)..(61): /note="Nucleotide may be methylated to form 5-methylcytosine"
tacttattagccacaggttcaatgtgcacttcacattctgcaagacattgtccctgagcacgattggagcattttctaggtctgtctcttcaacctcatattcattatttatcaagtgtgat

SEQ ID NO: 7164 - DNA, 122 bp, Homo sapiens
  misc_feature (61)..(62): /note="This region represents a CpG dinucleotide"
  misc_feature (61)..(61): /note="Nucleotide may be methylated to form 5-methylcytosine"
ccactgctggcatgattgggtggcctgtgagaaaccaagggtacaagacactctacaatgcgtgggtcatctcacaataggggactgtcttgcattccacgtgactttcgaatgtctctcag

SEQ ID NO: 7165 - DNA, 122 bp, Homo sapiens
  misc_feature (61)..(62): /note="This region represents a CpG dinucleotide"
  misc_feature (61)..(61): /note="Nucleotide may be methylated to form 5-methylcytosine"
tgctccgctaagacaccagaggtgaggagactccggacccagctggctattcgacctcttcgcatttctagaatgcccccgcccccggttcccagacggctactaattctgccttcctttga

SEQ ID NO: 7166 - DNA, 122 bp, Homo sapiens
  misc_feature (61)..(62): /note="This region represents a CpG dinucleotide"
  misc_feature (61)..(61): /note="Nucleotide may be methylated to form 5-methylcytosine"
caatgcataagaaatgcttcagccagggccttattgtcatctagtatgtcatcagcatttcgtagctcttatcactatgtcacaggtaccattaatcagttttggtatctgtgaaatgcttc

SEQ ID NO: 7167 - DNA, 122 bp, Homo sapiens
  misc_feature (61)..(62): /note="This region represents a CpG dinucleotide"
  misc_feature (61)..(61): /note="Nucleotide may be methylated to form 5-methylcytosine"
gacctcacagcaaaatgagctgagttgtctcatgtggcatcatacaaccttattccctcacgcagctccaaaaaatgtgagtgggtttccgagaacaatagctccctgggggagctattatc

SEQ ID NO: 7168 - DNA, 122 bp, Homo sapiens
  misc_feature (61)..(62): /note="This region represents a CpG dinucleotide"
  misc_feature (61)..(61): /note="Nucleotide may be methylated to form 5-methylcytosine"
tggacaggaagagaatatgaatgcctgtggctggtggcagggtgactcatctcgggccttcggtcacagcctcaaattcctgtgccagagcctggccctcctgtcattagtcctaagactgg

SEQ ID NO: 7169 - DNA, 122 bp, Homo sapiens
  misc_feature (61)..(62): /note="This region represents a CpG dinucleotide"
  misc_feature (61)..(61): /note="Nucleotide may be methylated to form 5-methylcytosine"
ttctcctgccaggaacctccttcctccctctccccaggaacaccaagccacacaggattccgggaggcacaagatacctgttgagaccagtaagcaaaagattaatctaaaacagcagcttg

SEQ ID NO: 7170 - DNA, 122 bp, Homo sapiens
  misc_feature (61)..(62): /note="This region represents a CpG dinucleotide"
  misc_feature (61)..(61): /note="Nucleotide may be methylated to form 5-methylcytosine"
gaactttaatggtaagccgatttttcatgtttgccagtaagctcctgtgaggggttgagacggcggaagcttaagagtgcagtgttcctcccctccttgcctctagaggcatgctgacttcc

SEQ ID NO: 7171 - DNA, 122 bp, Homo sapiens
  misc_feature (61)..(62): /note="This region represents a CpG dinucleotide"
  misc_feature (61)..(61): /note="Nucleotide may be methylated to form 5-methylcytosine"
tctagagttaatgagaaaaaacatttctgttttgggagaaaatatgatcagtctaggggccgggtacaatggaaggatagagatctcttgcttctgaaataaatttgcagagatgaaaaaat

SEQ ID NO: 7172 - DNA, 122 bp, Homo sapiens
  misc_feature (61)..(62): /note="This region represents a CpG dinucleotide"
  misc_feature (61)..(61): /note="Nucleotide may be methylated to form 5-methylcytosine"
atattccaccacaccactgttatcgtctactcacttcacttgacaataatgtaggctgggcgtggtggctcatgcctgtaatcccagcactctggaaggccaaggcaggcagatcacctgag

SEQ ID NO: 7173 - DNA, 122 bp, Homo sapiens
  misc_feature (61)..(62): /note="This region represents a CpG dinucleotide"
  misc_feature (61)..(61): /note="Nucleotide may be methylated to form 5-methylcytosine"
taagatgaaaatcaacactactcttttccaaataaactcagttaaactactgtttgtgcccgtatcagtgtaagtaacataaattgctgcaatattgttgttcttcttaccccaatgttgac

SEQ ID NO: 7174 - DNA, 122 bp, Homo sapiens
  misc_feature (61)..(62): /note="This region represents a CpG dinucleotide"
  misc_feature (61)..(61): /note="Nucleotide may be methylated to form 5-methylcytosine"
cacgtggagacggacactgagggcgcggcgggcgcggggcctggggggcgcctgacacgccggccgtccttcagctcgcaccacctcatgccctgcgacactctggcgcgccgccgcctggc

SEQ ID NO: 7175 - DNA, 122 bp, Homo sapiens
  misc_feature (61)..(62): /note="This region represents a CpG dinucleotide"
  misc_feature (61)..(61): /note="Nucleotide may be methylated to form 5-methylcytosine"
tactaaaatgaaaaagagctccaagacacggatgctaaaaaaaaagaaaaaaaaggaagtcgaaggatgatactatactgtactgtactatttaagacttgtcaatctcaggttctcccacc

SEQ ID NO: 7176 - DNA, 122 bp, Homo sapiens
  misc_feature (61)..(62): /note="This region represents a CpG dinucleotide"
  misc_feature (61)..(61): /note="Nucleotide may be methylated to form 5-methylcytosine"
gtcttaccaccaggggcatgagagctgcttggaaagaaattagaacacttccctgcttcccgatgggcatcaggggcaaggatcccagcttttgcataggacctcaacattcttttctccca

SEQ ID NO: 7177 - DNA, 122 bp, Homo sapiens
  misc_feature (61)..(62): /note="This region represents a CpG dinucleotide"
  misc_feature (61)..(61): /note="Nucleotide may be methylated to form 5-methylcytosine"
cctgagcgggggaccgagtggggacagagagggtcctgggaggacgagaggcctgaagaacgaggagttagctcaatgtggagaaagcgccagggacagggaaatgcaatcagtgccgggga

SEQ ID NO: 7178 - DNA, 122 bp, Homo sapiens
  misc_feature (61)..(62): /note="This region represents a CpG dinucleotide"
  misc_feature (61)..(61): /note="Nucleotide may be methylated to form 5-methylcytosine"
gctttgctaacacataacagtgattaacatgtttgtaatcattattaagatattcctcttcgtaatgtctaaaaaaatatgattggtactagataatattggtaatgtattggtcagtttgt

SEQ ID NO: 7179 - DNA, 122 bp, Homo sapiens
  misc_feature (61)..(62): /note="This region represents a CpG dinucleotide"
  misc_feature (61)..(61): /note="Nucleotide may be methylated to form 5-methylcytosine"
aaagacagacaagtgcagggtgttccacatctgagttcacccagcagtgctgtgttgttgcgttgcactgagcaggcacagaaggctctgagatatgagagacttggtctctaccccagagg

SEQ ID NO: 7180 - DNA, 122 bp, Homo sapiens
  misc_feature (61)..(62): /note="This region represents a CpG dinucleotide"
  misc_feature (61)..(61): /note="Nucleotide may be methylated to form 5-methylcytosine"
tgaataatccttacaatgagtaattggtatgcaggcagacagaggttaattaagaggcaacgtggtcaggcaacgtgcacagaccaagtgcacaatcttggatatgtagttttacttccctt

SEQ ID NO: 7181 - DNA, 122 bp, Homo sapiens
  misc_feature (61)..(62): /note="This region represents a CpG dinucleotide"
  misc_feature (61)..(61): /note="Nucleotide may be methylated to form 5-methylcytosine"
agggacaaataaccagcaatgagaggtgctaggtaaacagtaagtaacattaataacaaccggcttcggaatataaataaagcagcaaggttaaccctcacagcccaggacaaaggccctgg

SEQ ID NO: 7182 - DNA, 122 bp, Homo sapiens
  misc_feature (61)..(62): /note="This region represents a CpG dinucleotide"
  misc_feature (61)..(61): /note="Nucleotide may be methylated to form 5-methylcytosine"
gacagcatgttttctatgatttgccacccacaaaagcaatgacttcctaaatatcctacacgatacaaggatctaaatgtggtgcctggaaaagtgagatcttatgaggaagtgtacatgcc

SEQ ID NO: 7183 - DNA, 122 bp, Homo sapiens
  misc_feature (61)..(62): /note="This region represents a CpG dinucleotide"
  misc_feature (61)..(61): /note="Nucleotide may be methylated to form 5-methylcytosine"
aggaagggcccgagcccgtgccagctgcctgggggtgagggctgcctgcccctgggccttcggctgagtaggtttggaaagcactccctttgtctaattacgcctgatccggtatccaggga

SEQ ID NO: 7184 - DNA, 122 bp, Homo sapiens
  misc_feature (61)..(62): /note="This region represents a CpG dinucleotide"
  misc_feature (61)..(61): /note="Nucleotide may be methylated to form 5-methylcytosine"
acctgagctggactgaagcgggaagggggctggcccctggtcaacacacactgaacccagcggccagtacacatcctgttcagctgacatgggctctgcagagaattccagctccctctatt

SEQ ID NO: 7185 - DNA, 122 bp, Homo sapiens
  misc_feature (61)..(62): /note="This region represents a CpG dinucleotide"
  misc_feature (61)..(61): /note="Nucleotide may be methylated to form 5-methylcytosine"
caacaagtactgtgtgttccttacggtttggaaatcacttgaaacactgtgtcccctccccgccaaccatcccacgctgtaccccaaccttcggagtcctcctatcagagtcccctgaaggc

SEQ ID NO: 7186 - DNA, 122 bp, Homo sapiens
  misc_feature (61)..(62): /note="This region represents a CpG dinucleotide"
  misc_feature (61)..(61): /note="Nucleotide may be methylated to form 5-methylcytosine"
aaaaggctggctcagtgtggcagacagcactagaggaggaagagcgggaaggatgtaagccgactgtttaaacaaaaatgatcaaaacacaattggccactgagaagggagtggaggctcct

SEQ ID NO: 7187 - DNA, 122 bp, Homo sapiens
  misc_feature (61)..(62): /note="This region represents a CpG dinucleotide"
  misc_feature (61)..(61): /note="Nucleotide may be methylated to form 5-methylcytosine"
ggtgctttggggactgctgcttcccatattgccaactgccttatgtcctttacagtcctgcggtcagcatggccccgagccagctcaccagggtaataaactgccacaagccccttctctgt

SEQ ID NO: 7188 - DNA, 122 bp, Homo sapiens
  misc_feature (61)..(62): /note="This region represents a CpG dinucleotide"
  misc_feature (61)..(61): /note="Nucleotide may be methylated to form 5-methylcytosine"
aaagaatcagaagaatagcaaaatgtacgtagtgcttaccatatgccaagcactgttctccgtgctcacatgtgttaattcattgctttcttgtaacaatcccgtgaggtgctaatgctaat

SEQ ID NO: 7189 - DNA, 122 bp, Homo sapiens
  misc_feature (61)..(62): /note="This region represents a CpG dinucleotide"
  misc_feature (61)..(61): /note="Nucleotide may be methylated to form 5-methylcytosine"
gcactgccgctgggcgttctatctcaggtggtgtcccgtctacgctctcaagggtggccgcgcctgaacctttactcgtgaagagtgacacacaaaccaaggccaaactaaaaaacaaaata

SEQ ID NO: 7190 - DNA, 122 bp, Homo sapiens
  misc_feature (61)..(62): /note="This region represents a CpG dinucleotide"
  misc_feature (61)..(61): /note="Nucleotide may be methylated to form 5-methylcytosine"
ggtgggcgtggcgctgcgcgggagggacccgcagacggcagagggtccgcggggagcgggcggggcgttgagagcgcgcacacagacacccaaaaaacacacaaacaagcggcccctgtgcc

SEQ ID NO: 7191 - DNA, 122 bp, Homo sapiens
  misc_feature (61)..(62): /note="This region represents a CpG dinucleotide"
  misc_feature (61)..(61): /note="Nucleotide may be methylated to form 5-methylcytosine"
tggcagtatctgaaacttcaatttagagttaatttccttcctgccatcaccagcactgtccgttgtagccatcggttttttatggaatctttattacttacagttatgtccattttgtctga

SEQ ID NO: 7192 - DNA, 122 bp, Homo sapiens
  misc_feature (61)..(62): /note="This region represents a CpG dinucleotide"
  misc_feature (61)..(61): /note="Nucleotide may be methylated to form 5-methylcytosine"
cattatatgatcactccttgctttggtaaaaccaaaccaaagttagcacctacctaaacacgtccttgaaaaagacctatagattccaacagtaaataaaatgaaaatagcttaagaaaact

SEQ ID NO: 7193 - DNA, 122 bp, Homo sapiens
  misc_feature (61)..(62): /note="This region represents a CpG dinucleotide"
  misc_feature (61)..(61): /note="Nucleotide may be methylated to form 5-methylcytosine"
tttttccctcttgccttggctgtgtagcaaggccttggtgaatcgcagtgcactgcctggcgtggagcagcagatggcagcaaaaccaaggctcttggagcagaagcagcacagttcacggc

SEQ ID NO: 7194 - DNA, 122 bp, Homo sapiens
  misc_feature (61)..(62): /note="This region represents a CpG dinucleotide"
  misc_feature (61)..(61): /note="Nucleotide may be methylated to form 5-methylcytosine"
tctcgggtgacagcggattcgagaggttacagtggattccagaggttacagtgcgaagagcgcgagtattgcaaccgtgcaagtgtggtattgctggttacaaccgtggatttcatcgtcga

SEQ ID NO: 7195 - DNA, 122 bp, Homo sapiens
  misc_feature (61)..(62): /note="This region represents a CpG dinucleotide"
  misc_feature (61)..(61): /note="Nucleotide may be methylated to form 5-methylcytosine"
actggcagccccccgagcgagggaaggaggtgagggtgaggatggaaggaacagacagaccggccaatagacccaccccaacaacccaaaccaaaaccctgagcccgggggaaagacgcgag

SEQ ID NO: 7196 - DNA, 122 bp, Homo sapiens
  misc_feature (61)..(62): /note="This region represents a CpG dinucleotide"
  misc_feature (61)..(61): /note="Nucleotide may be methylated to form 5-methylcytosine"
gccacatattgtatacatgattgattgtacaaaaagaagttactaaacagctggagggggcgattcagtagtaaaggaaaatagaaagtagtcagtctctaggttagccattgcattttatt

SEQ ID NO: 7197 - DNA, 122 bp, Homo sapiens
  misc_feature (61)..(62): /note="This region represents a CpG dinucleotide"
  misc_feature (61)..(61): /note="Nucleotide may be methylated to form 5-methylcytosine"
aaatatttgactagcaacaggctgatctcagaacagctctagtgcctgcactgtggcacccgtctcagtcctgtgactcacatggctgcaatgagattggaagtgcacttccattggaagag

SEQ ID NO: 7198 - DNA, 122 bp, Homo sapiens
  misc_feature (61)..(62): /note="This region represents a CpG dinucleotide"
  misc_feature (61)..(61): /note="Nucleotide may be methylated to form 5-methylcytosine"
tgtgtaagtgaagattaagacatccgtaaagtgtcttgcatgggataagcacaccataaacggtagctattatttgtaagctctgggcatgagcagtggcaaaaccaaactgcacccccttc

SEQ ID NO: 7199 - DNA, 122 bp, Homo sapiens
  misc_feature (61)..(62): /note="This region represents a CpG dinucleotide"
  misc_feature (61)..(61): /note="Nucleotide may be methylated to form 5-methylcytosine"
agctttcaaatttttttgacctcataaagaagtacattcattctccacggtgcatatgtacgtatatataggccaaagacaaaattacaacaaatgtagttgagtgatcttattggctttta

SEQ ID NO: 7200 - DNA, 122 bp, Homo sapiens
  misc_feature (61)..(62): /note="This region represents a CpG dinucleotide"
  misc_feature (61)..(61): /note="Nucleotide may be methylated to form 5-methylcytosine"
aaatgatgattatagttaggacatgccccatgacgatatccaggtcatgtacagcctttgcgtgggacagcagggctaaattttggcggtacatatttaagagggcaagtttccattcaaaa

SEQ ID NO: 7201 - DNA, 122 bp, Homo sapiens
  misc_feature (61)..(62): /note="This region represents a CpG dinucleotide"
  misc_feature (61)..(61): /note="Nucleotide may be methylated to form 5-methylcytosine"
tcccaaccactgaacaaataaaatatccctgagctgccgacagtgcctacacaggaaagccgacaactttacagccatcctccccacagggcatctcagggtgccctcagctcaactgagga

SEQ ID NO: 7202 - DNA, 122 bp, Homo sapiens
  misc_feature (61)..(62): /note="This region represents a CpG dinucleotide"
  misc_feature (61)..(61): /note="Nucleotide may be methylated to form 5-methylcytosine"
ataaagagtttcatcatggatgattcaagaggttgagatgcaagctgtggtgatagctaacgatgcctctagcccagctgacctcactttctagctgttgacaggttcagtcaggctggcca

SEQ ID NO: 7203 - DNA, 122 bp, Homo sapiens
  misc_feature (61)..(62): /note="This region represents a CpG dinucleotide"
  misc_feature (61)..(61): /note="Nucleotide may be methylated to form 5-methylcytosine"
ccatctgaccttagtgatgtttgctgtcagctacgcagaggccttctgacacaaactgaccgtgaatacaacagggatattaaacactgggtcaggctggagagagaaaacaacagggtgca

SEQ ID NO: 7204 - DNA, 122 bp, Homo sapiens
  misc_feature (61)..(62): /note="This region represents a CpG dinucleotide"
  misc_feature (61)..(61): /note="Nucleotide may be methylated to form 5-methylcytosine"
ggaacttcagcagttccttccaccaaagctcaactattgctgcaagcgctttggtaatcacgagcattatctatgaagctactgctgtggtcagggccccagtcgtcctgctgagtagcaga

SEQ ID NO: 7205 - DNA, 122 bp, Homo sapiens
  misc_feature (61)..(62): /note="This region represents a CpG dinucleotide"
  misc_feature (61)..(61): /note="Nucleotide may be methylated to form 5-methylcytosine"
tgtcagttagatgagtcagcttggtaggtcagagttttgtttgtttgtttcttagcacaacgtattgctgaagctttcaagaaaaccacgattgtaggctttatatcatactgtctgtggtt

SEQ ID NO: 7206 - DNA, 122 bp, Homo sapiens
  misc_feature (61)..(62): /note="This region represents a CpG dinucleotide"
  misc_feature (61)..(61): /note="Nucleotide may be methylated to form 5-methylcytosine"
cctgcaagtccagtgtcaatatttgctttgctttcaagttccacacaaaatcaaagacagcgttctgtataattatactgtagtattaacgggatagttgtgtcttaggtgccttggttagc

SEQ ID NO: 7207 - DNA, 122 bp, Homo sapiens
  misc_feature (61)..(62): /note="This region represents a CpG dinucleotide"
  misc_feature (61)..(61): /note="Nucleotide may be methylated to form 5-methylcytosine"
gtcattaagctgctcagccaaccaatccagcaatctgtcttgcttctgcatttcaagttacgtgagtagtactgttcttattgtttaagccagtttgaattgggatttttgtgccttgcagc

SEQ ID NO: 7208 - DNA, 122 bp, Homo sapiens
  misc_feature (61)..(62): /note="This region represents a CpG dinucleotide"
  misc_feature (61)..(61): /note="Nucleotide may be methylated to form 5-methylcytosine"
gttcatgttccaccccattatctgtgtgtcagctgatggatgcttagggtgattccatgtcgtgtttgtttctgtgaacgatctcattgatgcctcatgcatgccacctgagtcccgcatgt

SEQ ID NO: 7209 - DNA, 122 bp, Homo sapiens
  misc_feature (61)..(62): /note="This region represents a CpG dinucleotide"
  misc_feature (61)..(61): /note="Nucleotide may be methylated to form 5-methylcytosine"
aaggaggttaaatataatcacctaaaaggaacttgggaaaagatccttgaatctgaatggcgtctataaagaagtattatacactgtcattcttgctgtggcacaaccctgggaaaacattt

SEQ ID NO: 7210 - DNA, 122 bp, Homo sapiens
  misc_feature (61)..(62): /note="This region represents a CpG dinucleotide"
  misc_feature (61)..(61): /note="Nucleotide may be methylated to form 5-methylcytosine"
agcattcaatctggtggcttcagcacccaccacacctcctagaacccagtaagctcttgacgcatgtctgtgggatgcatggaagaatgagtcaccctacctcaagaaatgttgatgactct

SEQ ID NO: 7211 - DNA, 122 bp, Homo sapiens
  misc_feature (61)..(62): /note="This region represents a CpG dinucleotide"
  misc_feature (61)..(61): /note="Nucleotide may be methylated to form 5-methylcytosine"
ggtcagaagcaaggctttccatagttgtgcacacattcctgatggtctctgcgtggtactcgtaagttcagacaagccatattaattccagacttaatcatcaacatttccaccaatcagga

SEQ ID NO: 7212 - DNA, 122 bp, Homo sapiens
  misc_feature (61)..(62): /note="This region represents a CpG dinucleotide"
  misc_feature (61)..(61): /note="Nucleotide may be methylated to form 5-methylcytosine"
ctgtgtcgtgtcagagggtgcttagcataccagaggacagctctttgtctatatgtgtgacgctcctagcagactagatttgagatcagcgtctctgctgtttgagatcagagtccccgcct

SEQ ID NO: 7213 - DNA, 122 bp, Homo sapiens
  misc_feature (61)..(62): /note="This region represents a CpG dinucleotide"
  misc_feature (61)..(61): /note="Nucleotide may be methylated to form 5-methylcytosine"
aaatattaatttgaagggcaaactactggccttctctggagtgatctgcccttgacctcacgggtgaagcctgtgcatatgcagttttaagaagtgctacagataattgagatcctggttaa

SEQ ID NO: 7214 - DNA, 122 bp, Homo sapiens
  misc_feature (61)..(62): /note="This region represents a CpG dinucleotide"
  misc_feature (61)..(61): /note="Nucleotide may be methylated to form 5-methylcytosine"
ccttgcccatgccttgttcctctggcccttgagaccagcctacctttgtgataatagttacgttcctggaggtgaaggcgaggggtgtagagaggaattctgtgtccttacttttctgcaag

SEQ ID NO: 7215 - DNA, 122 bp, Homo sapiens
  misc_feature (61)..(62): /note="This region represents a CpG dinucleotide"
  misc_feature (61)..(61): /note="Nucleotide may be methylated to form 5-methylcytosine"
ctagtcttcattggctaagaagccttaaaaaccatgtaactgtcacatagtggcagaccacgagcaaaaagaaaaaaaatgaaccctgcttcttcttggctgttttatggagatggtgcatt

SEQ ID NO: 7216 - DNA, 122 bp, Homo sapiens
  misc_feature (61)..(62): /note="This region represents a CpG dinucleotide"
  misc_feature (61)..(61): /note="Nucleotide may be methylated to form 5-methylcytosine"
gaaagaataaatggagagaaaacactcccatcatggcactgcagggagagcaccagccaccgctgagttagttctccttcctgcagtgtgggttggcctggtgattcacttctagtacatag

SEQ ID NO: 7217 - DNA, 122 bp, Homo sapiens
  misc_feature (61)..(62): /note="This region represents a CpG dinucleotide"
  misc_feature (61)..(61): /note="Nucleotide may be methylated to form 5-methylcytosine"
ctttatgtgacatggaaatgctctttaatatctgcactggccactaaggtagccactagccgtaagtgagtattgagcatttgaaatgtggtgagtgcaactgaggaactgaatttttaatt

SEQ ID NO: 7218 - DNA, 122 bp, Homo sapiens
  misc_feature (61)..(62): /note="This region represents a CpG dinucleotide"
  misc_feature (61)..(61): /note="Nucleotide may be methylated to form 5-methylcytosine"
gctgacatggcaaaatcctgtctctaccaaaaacacaacaattagccaggcgtgctggtgcgtacctgtagtcccagctgctctggaggctgaggcatgcgaatcacttgaactcgggaggc

SEQ ID NO: 7219 - DNA, 122 bp, Homo sapiens
  misc_feature (61)..(62): /note="This region represents a CpG dinucleotide"
  misc_feature (61)..(61): /note="Nucleotide may be methylated to form 5-methylcytosine"
tatatcttgctttgaatcaaagcccagacagtgactgggatggcgttctggcaggtcctgcgttcattcattcatgcactgttcacagagcccctgcttagggccaggagttgtgtcaggcc

SEQ ID NO: 7220 - DNA, 122 bp, Homo sapiens
  misc_feature (61)..(62): /note="This region represents a CpG dinucleotide"
  misc_feature (61)..(61): /note="Nucleotide may be methylated to form 5-methylcytosine"
agagatttgatttaaacgttctcttcacattcactgttgtatgctcagccatcaaataggcgttctttcttgggtttctttttccacctctaggatatggtaccggaagtggatctgaaatc

SEQ ID NO: 7221 - DNA, 122 bp, Homo sapiens
  misc_feature (61)..(62): /note="This region represents a CpG dinucleotide"
  misc_feature (61)..(61): /note="Nucleotide may be methylated to form 5-methylcytosine"
cctagagctgagagtgtggtcaaacctacacaaatcacatgcctaagaatgtgagaagggcgttcccctatgggaaacctaggtgcttttggcaggagaaggaaaaacaatggtagagaagc

SEQ ID NO: 7222 - DNA, 122 bp, Homo sapiens
  misc_feature (61)..(62): /note="This region represents a CpG dinucleotide"
  misc_feature (61)..(61): /note="Nucleotide may be methylated to form 5-methylcytosine"
cctgtacctcggaagcagcattcccttcagccatgggaggttctttttttctgcatttagcggtggaacttttaagatttatgttaataaggaagaggaaattaatttaaacctatttaata

SEQ ID NO: 7223 - DNA, 122 bp, Homo sapiens
  misc_feature (61)..(62): /note="This region represents a CpG dinucleotide"
  misc_feature (61)..(61): /note="Nucleotide may be methylated to form 5-methylcytosine"
tccggccctggcggggagagggtaccggctgccaccacctgctgccggtcccctcgcaggcgaccagcccaacttgggctgctcacgctactgccgctgctgccgctgccactgccgctgct

SEQ ID NO: 7224 - DNA, 122 bp, Homo sapiens
  misc_feature (61)..(62): /note="This region represents a CpG dinucleotide"
  misc_feature (61)..(61): /note="Nucleotide may be methylated to form 5-methylcytosine"
taccccttcctgttcacaggtatttagtattcttaccatcatctttccctgctgtgctcccggcagacaattctaatctgtcatgacactctgatgatcccagacccagctgcattatcatt

SEQ ID NO: 7225 - DNA, 122 bp, Homo sapiens
  misc_feature (61)..(62): /note="This region represents a CpG dinucleotide"
  misc_feature (61)..(61): /note="Nucleotide may be methylated to form 5-methylcytosine"
ttcttcccagagaagaagatggactgaaagctgccagttggggactttttgtgatcacggcgttgcagcgttttaaaggaggtgatggggcttgcgctggcttgtcttcccacccaagtgaa

SEQ ID NO: 7226 - DNA, 122 bp, Homo sapiens
  misc_feature (61)..(62): /note="This region represents a CpG dinucleotide"
  misc_feature (61)..(61): /note="Nucleotide may be methylated to form 5-methylcytosine"
cattgaggggctaccagggctaccgctattacgaatgacagtgaccgtgaccataactgacgctcattgggcctaccacatgccaggccctgtgctgagccctcgttctaggcccgagggca

SEQ ID NO: 7227 - DNA, 122 bp, Homo sapiens
  misc_feature (61)..(62): /note="This region represents a CpG dinucleotide"
  misc_feature (61)..(61): /note="Nucleotide may be methylated to form 5-methylcytosine"
tatcacaaggtttttcttccacctattgaaattggttttaatttttcagtaatacattcacgtgactcagtaatcaaacgatatacaaagatattcagtcaaaagtcttgttcccatttttc

SEQ ID NO: 7228 - DNA, 122 bp, Homo sapiens
  misc_feature (61)..(62): /note="This region represents a CpG dinucleotide"
  misc_feature (61)..(61): /note="Nucleotide may be methylated to form 5-methylcytosine"
tgtaggaaattagcatagtttgttaaaagattttaattcgacagaccacagatgagtacacgtaaatacttagtaatgaactgctgcatcagcaggcatttgaggtttaatcatgcagtcaa

SEQ ID NO: 7229 - DNA, 122 bp, Homo sapiens
  misc_feature (61)..(62): /note="This region represents a CpG dinucleotide"
  misc_feature (61)..(61): /note="Nucleotide may be methylated to form 5-methylcytosine"
ggcgcctttctcaaccccagccgtaaagctggggctgcgtggggctccttaggatagaatcgggaaatagcatcctaaggacgcagaggtgcatgctgagaggttctctgcatagatatata

SEQ ID NO: 7230 - DNA, 122 bp, Homo sapiens
  misc_feature (61)..(62): /note="This region represents a CpG dinucleotide"
  misc_feature (61)..(61): /note="Nucleotide may be methylated to form 5-methylcytosine"
agaggccccagtcagatttcgatattgagaagtacaaccattttgtgctgtttaaaaatacggatgtgtaaaaccagagcgtagtcattctttgacatgctgtgtgattttcctacacaaat

SEQ ID NO: 7231 - DNA, 122 bp, Homo sapiens
  misc_feature (61)..(62): /note="This region represents a CpG dinucleotide"
  misc_feature (61)..(61): /note="Nucleotide may be methylated to form 5-methylcytosine"
acaatttctaagttcatggggtttcctctttttaaattgctctttaccttcgttgtccttcgtggtgctctccgtggaaacctgctttctgatctagtaagtgcttattctttgtgcatgtc

SEQ ID NO: 7232 - DNA, 122 bp, Homo sapiens
  misc_feature (61)..(62): /note="This region represents a CpG dinucleotide"
  misc_feature (61)..(61): /note="Nucleotide may be methylated to form 5-methylcytosine"
cagttctctggtcctaagaagatcaacctgaaccacttgttgaatttcacttttgaaccccgtggccagacgggtcactttgaaggcagtggacatggtagctggggaaagaggaacaagtg

SEQ ID NO: 7233 - DNA, 122 bp, Homo sapiens
  misc_feature (61)..(62): /note="This region represents a CpG dinucleotide"
  misc_feature (61)..(61): /note="Nucleotide may be methylated to form 5-methylcytosine"
gcattactctgatagaccatcagtccttggtaagtgtcctgtgcatctgggataagcatccgtttgttttcagctgcgctttctgtgacttgctctgcgtgagtcctcggtccacgtgggcc

SEQ ID NO: 7234 - DNA, 122 bp, Homo sapiens
  misc_feature (61)..(62): /note="This region represents a CpG dinucleotide"
  misc_feature (61)..(61): /note="Nucleotide may be methylated to form 5-methylcytosine"
aatgacgtttcagtcaatgacagaccacatatatcactgtggtcccataagataataaaacgtagctgaaaaattcctatcctctagtgacgctgtagccatcataatgttgtaatgcaatg

SEQ ID NO: 7235 - DNA, 122 bp, Homo sapiens
  misc_feature (61)..(62): /note="This region represents a CpG dinucleotide"
  misc_feature (61)..(61): /note="Nucleotide may be methylated to form 5-methylcytosine"
tgagtgtgttcaacacaacatgtcagttgttgtggatactaaaggtcttcaggcagtactcgtgatgcatcatcatgcagtaagtgtcagcttttacacttaattctcacataatcatggga

SEQ ID NO: 7236 - DNA, 122 bp, Homo sapiens
  misc_feature (61)..(62): /note="This region represents a CpG dinucleotide"
  misc_feature (61)..(61): /note="Nucleotide may be methylated to form 5-methylcytosine"
ccaaaaataaaaataaaacctgtacaaattagagcatttatttttcttccatgtagaaaacgagtctggtcagtccacgccttgtgtggcattccatgatgtcatcaggaacccagcctctt

SEQ ID NO: 7237 - DNA, 122 bp, Homo sapiens
  misc_feature (61)..(62): /note="This region represents a CpG dinucleotide"
  misc_feature (61)..(61): /note="Nucleotide may be methylated to form 5-methylcytosine"
aagatgaagaagggagcgacaagccaaggaatacaggtgattgactgcctgtcattagcgcggtggctcacgcctgccattgcctgttgtccccgtcctctgtggccctcttggcttctgta

SEQ ID NO: 7238 - DNA, 122 bp, Homo sapiens
  misc_feature (61)..(62): /note="This region represents a CpG dinucleotide"
  misc_feature (61)..(61): /note="Nucleotide may be methylated to form 5-methylcytosine"
tatttttccccaggaccacatctagcaaaaatacagttcaaggaaatgatctgcagataacgtcaatataatgcacttacaaaaaggaaaaattctagggggctgctgggtatgcaggtttg

SEQ ID NO: 7239 - DNA, 122 bp, Homo sapiens
  misc_feature (61)..(62): /note="This region represents a CpG dinucleotide"
  misc_feature (61)..(61): /note="Nucleotide may be methylated to form 5-methylcytosine"
tggctaaaccattacaatgcagtcaatttcgaaataagtgaatcccagcttaggcttcctcgtccaaacagtaactaaatttaatttttttgcaatcagtggcatatgtttgcatctgtcta

SEQ ID NO: 7240 - DNA, 122 bp, Homo sapiens
  misc_feature (61)..(62): /note="This region represents a CpG dinucleotide"
  misc_feature (61)..(61): /note="Nucleotide may be methylated to form 5-methylcytosine"
aagttttaccacataacatgggtgacccatggctcattagcctctgtgctttggtttcctcgtgtacagaacaggaataacagtaaacccacttcacgggattgctgtgaggattaagtgag

SEQ ID NO: 7241 - DNA, 122 bp, Homo sapiens
  misc_feature (61)..(62): /note="This region represents a CpG dinucleotide"
  misc_feature (61)..(61): /note="Nucleotide may be methylated to form 5-methylcytosine"
cttggtgcttggcactctaagctgtcttcactgtccctggggaaagaatgggtggtgggacgggggcctttgatccctatcaagccagagctacagaaggcacaacagcatctctaggcaac

SEQ ID NO: 7242 - DNA, 122 bp, Homo sapiens
  misc_feature (61)..(62): /note="This region represents a CpG dinucleotide"
  misc_feature (61)..(61): /note="Nucleotide may be methylated to form 5-methylcytosine"
ataaacagtacctgctttattgtgagctgtatacataagaatgtttacaaacattgtctacgtgggagcatattatcatattgtaaactgagtacgtaagtactgaagagacctcagggaaa

SEQ ID NO: 7243 - DNA, 122 bp, Homo sapiens
  misc_feature (61)..(62): /note="This region represents a CpG dinucleotide"
  misc_feature (61)..(61): /note="Nucleotide may be methylated to form 5-methylcytosine"
tgaactcctggactcaaatgattctcccaccctgacctcccaaattgctgggattacaggcgtgaatcatggcgcctggcctcatagagtatttttaaaaggaattgcgtgtgtgtgtgtgt

SEQ ID NO: 7244 - DNA, 122 bp, Homo sapiens
  misc_feature (61)..(62): /note="This region represents a CpG dinucleotide"
  misc_feature (61)..(61): /note="Nucleotide may be methylated to form 5-methylcytosine"
taaggcataaagcatcatgctaagtattgtatgcatgtgtgcatgctgatggcaggggggcggggtgactttaagtctttataaggcaagagatgtttacaagaggaggtaggtgtccctaa

SEQ ID NO: 7245 - DNA, 122 bp, Homo sapiens
  misc_feature (61)..(62): /note="This region represents a CpG dinucleotide"
  misc_feature (61)..(61): /note="Nucleotide may be methylated to form 5-methylcytosine"
aagcaggaagtttgcaccagagccaagaagagagcttgcagctgccagggaatggcctggcggaggaagcgcagcctcgcccagctcagcagacctgcttcatgacagaggcagctcttctg

SEQ ID NO: 7246 - DNA, 122 bp, Homo sapiens
  misc_feature (61)..(62): /note="This region represents a CpG dinucleotide"
  misc_feature (61)..(61): /note="Nucleotide may be methylated to form 5-methylcytosine"
tcccacgacttttcgcgggaggcgagtgcccggggcagcagcacgagtgggatgtgaggtcgcccagagtcctgcgctagtcctgaatagccggcacgcgcagctactaggtttgcaatccc

SEQ ID NO: 7247 - DNA, 122 bp, Homo sapiens
  misc_feature (61)..(62): /note="This region represents a CpG dinucleotide"
  misc_feature (61)..(61): /note="Nucleotide may be methylated to form 5-methylcytosine"
gcactgactcttggaaagaagaggggggcctgggagatccaggttggaaggatcttgtttcgctctcccattggcccccaacactggcctcatggcccccttactggctccaggcatccccc

SEQ ID NO: 7248 - DNA, 122 bp, Homo sapiens
  misc_feature (61)..(62): /note="This region represents a CpG dinucleotide"
  misc_feature (61)..(61): /note="Nucleotide may be methylated to form 5-methylcytosine"
tgtgagagtactgacaaacctcacaaacataatatgcagcaaaagaaaccagacgcaaaacggcacccactgtatggctccatctacacacagttcagaagcaggccagagcgcctgcgggc

SEQ ID NO: 7249 - DNA, 122 bp, Homo sapiens
  misc_feature (61)..(62): /note="This region represents a CpG dinucleotide"
  misc_feature (61)..(61): /note="Nucleotide may be methylated to form 5-methylcytosine"
ttaaggaagcatcttgccaggagacacaaagctaacaagagtggagcctgcagctggagccgcagagcctaatcactacacccgcccatctctgctagggtttcatgacttcgtatcgggga

SEQ ID NO: 7250 - DNA, 122 bp, Homo sapiens
  misc_feature (61)..(62): /note="This region represents a CpG dinucleotide"
  misc_feature (61)..(61): /note="Nucleotide may be methylated to form 5-methylcytosine"
gatagttagcagtcttatagaaagctgataatccttaactgtagcactacaaacaactgccgtaatagtgtataatttttctgatgtgtttatgtgcttaagttgggcggaggagtgaaaat

SEQ ID NO: 7251 - DNA, 122 bp, Homo sapiens
  misc_feature (61)..(62): /note="This region represents a CpG dinucleotide"
  misc_feature (61)..(61): /note="Nucleotide may be methylated to form 5-methylcytosine"
agttgcagagcctgccctccgcctgccaccgttgctgtggggagcgcactctctgtcgagcgctgctgtagcagacccaccaaatcccatgtaagtggtcagagcacaaatgaggttgtcgg

SEQ ID NO: 7252 - DNA, 122 bp, Homo sapiens
  misc_feature (61)..(62): /note="This region represents a CpG dinucleotide"
  misc_feature (61)..(61): /note="Nucleotide may be methylated to form 5-methylcytosine"
ctgtccagaatctatctgttcaaccacctgaaatttccttccaccaaatgtgggctacatcgacaagaggggaaaggagatggcaaatgttgtgactggaacccattttggaagtctgagtc

SEQ ID NO: 7253 - DNA, 122 bp, Homo sapiens
  misc_feature (61)..(62): /note="This region represents a CpG dinucleotide"
  misc_feature (61)..(61): /note="Nucleotide may be methylated to form 5-methylcytosine"
aaggaacgcagtcttctgattggtgtgcgtccgctcgccgtgtccatggtaaccagctagcgccctgacccggcccggacctcagctgcggggagactaccggaagctaaggagaacagccc

SEQ ID NO: 7254 - DNA, 122 bp, Homo sapiens
  misc_feature (61)..(62): /note="This region represents a CpG dinucleotide"
  misc_feature (61)..(61): /note="Nucleotide may be methylated to form 5-methylcytosine"
tcactgcaatactgcactaaccagtgagtgtaagcctgcagcacagccagggactgagcacgtacatcaatgaggtcaggtttcaatactgatggcacatcagtttcaatgttgcacaattt

SEQ ID NO: 7255 - DNA, 122 bp, Homo sapiens
  misc_feature (61)..(62): /note="This region represents a CpG dinucleotide"
  misc_feature (61)..(61): /note="Nucleotide may be methylated to form 5-methylcytosine"
cagataatgaacactatgcctaagtgctcctgagctagtgacagaactgtgagtatcctgcgccttctctacccttgcctcccagactgcctcctgaaacacatctgcacatagctgatgaa

SEQ ID NO: 7256 - DNA, 122 bp, Homo sapiens
  misc_feature (61)..(62): /note="This region represents a CpG dinucleotide"
  misc_feature (61)..(61): /note="Nucleotide may be methylated to form 5-methylcytosine"
gcagagcactccctcccactaacttgttctgcatgtgtagagtctccccattttttttaacgcaaccctttcccctttttcctaccccacagctctgttccatgtaagttgccaacagtttc

SEQ ID NO: 7257 - DNA, 122 bp, Homo sapiens
  misc_feature (61)..(62): /note="This region represents a CpG dinucleotide"
  misc_feature (61)..(61): /note="Nucleotide may be methylated to form 5-methylcytosine"
ccctgccgcgaaagcgatgccaggggcaggtgagggtcggacgcgctcaggcccagccctcgccccttcaggtctgggggacacagtggagtcccagcctcaagaagtttccccaacctctc

SEQ ID NO: 7258 - DNA, 122 bp, Homo sapiens
  misc_feature (61)..(62): /note="This region represents a CpG dinucleotide"
  misc_feature (61)..(61): /note="Nucleotide may be methylated to form 5-methylcytosine"
gagctaatttgaaactatataaatatcctggaaccgtccaacccactctattgttagcatcgtttgaccactcacacctgagttggttgttatgatgatggctgccacatgaaagagttatt

SEQ ID NO: 7259 - DNA, 122 bp, Homo sapiens
  misc_feature (61)..(62): /note="This region represents a CpG dinucleotide"
  misc_feature (61)..(61): /note="Nucleotide may be methylated to form 5-methylcytosine"
aggcaacactatcccagcatctcccagaacaggaactcggtatgagctaactgttagccacgttcttagcaaaagaacatgtgaactacacagtggaggctgcatgcacacttgggtgcaaa

SEQ ID NO: 7260 - DNA, 122 bp, Homo sapiens
  misc_feature (61)..(62): /note="This region represents a CpG dinucleotide"
  misc_feature (61)..(61): /note="Nucleotide may be methylated to form 5-methylcytosine"
actccctccccagtgcctctgtgcattaggtcgcgtgcctgtacgtaccctacctgagaccgcccctccgccaagtgcgcccctcgacaggtgcccgtcgcccacaggctcctttcattgta

SEQ ID NO: 7261 - DNA, 122 bp, Homo sapiens
  misc_feature (61)..(62): /note="This region represents a CpG dinucleotide"
  misc_feature (61)..(61): /note="Nucleotide may be methylated to form 5-methylcytosine"
atagttaagttttgaaatcaggaagtagatgtctacaattccaaccttttgcctcttattcgagattatttaggctgctgtgggtctattgcattgcatatgaactttaaaataaccttgtt

SEQ ID NO: 7262 - DNA, 122 bp, Homo sapiens
  misc_feature (61)..(62): /note="This region represents a CpG dinucleotide"
  misc_feature (61)..(61): /note="Nucleotide may be methylated to form 5-methylcytosine"
tcatcctgtgctgcctctataagtttgtgattcacatgaggaaataatgtgactcaagttcgtattagtcagcatttattgatctgttgatacttaaagtacttcttgtaagaagtagaaaa

SEQ ID NO: 7263 - DNA, 122 bp, Homo sapiens
  misc_feature (61)..(62): /note="This region represents a CpG dinucleotide"
  misc_feature (61)..(61): /note="Nucleotide may be methylated to form 5-methylcytosine"
gcccggtgccctcagggatggcctcgatcgccggtggggcccgcatttccggggggctggcgcctcgacccggaggggtgatggtggctcttttgccataaccgagagcagaagcggtagcg

SEQ ID NO: 7264 - DNA, 122 bp, Homo sapiens
  misc_feature (61)..(62): /note="This region represents a CpG dinucleotide"
  misc_feature (61)..(61): /note="Nucleotide may be methylated to form 5-methylcytosine"
tcccatgggacccattatcaggttaatgggaaaatctgagtcggcagggctaacccattacgctagtttacgaaggtaacaatttcccaaacggttaatatgtgcgaagaactatattagga

SEQ ID NO: 7265 - DNA, 122 bp, Homo sapiens
  misc_feature (61)..(62): /note="This region represents a CpG dinucleotide"
  misc_feature (61)..(61): /note="Nucleotide may be methylated to form 5-methylcytosine"
cacaggtacattttatagactagaagtgcctgtatttcttctgtttaggtctaacagatacgtagagatatggagataaactaaacagccactctggctgggtttgttttaccaaacaaaca

SEQ ID NO: 7266 - DNA, 122 bp, Homo sapiens
  misc_feature (61)..(62): /note="This region represents a CpG dinucleotide"
  misc_feature (61)..(61): /note="Nucleotide may be methylated to form 5-methylcytosine"
tccttgcttcctctcgcgccgagcctggaaaagcgaggtgcagggtagaatctcccgggccgcctccgtgtcccggacgttggcccagctctgagtcgcggcgctcggccctggggtgcggc

SEQ ID NO: 7267 - DNA, 122 bp, Homo sapiens
  misc_feature (61)..(62): /note="This region represents a CpG dinucleotide"
  misc_feature (61)..(61): /note="Nucleotide may be methylated to form 5-methylcytosine"
tcgaagggtggtgactgtggctcctgcatctgcatcaacatattccagcacagggattagcgtaccagagatgtcaaacaaatatttgctaaacaaatgacaaagagttcaagactgccaat

SEQ ID NO: 7268 - DNA, 122 bp, Homo sapiens
  misc_feature (61)..(62): /note="This region represents a CpG dinucleotide"
  misc_feature (61)..(61): /note="Nucleotide may be methylated to form 5-methylcytosine"
cattgtgaatacagggaccaaaagaaaggaggtcactgtggttgaagctgaatgagcatgcggcagagccgggcagccactgctgccaaaaaccacaaggcttgcaaaaatagtaaaagaga

SEQ ID NO: 7269 - DNA, 122 bp, Homo sapiens
  misc_feature (61)..(62): /note="This region represents a CpG dinucleotide"
  misc_feature (61)..(61): /note="Nucleotide may be methylated to form 5-methylcytosine"
aagtcctagagtatcaagaaatcacccaaatgatcagagtggtaacttcacagagcttgacgtatgatgtcaaagctaaacttcaaaaccacagatgtttcctggtacttacagaaaattaa

SEQ ID NO: 7270 - DNA, 122 bp, Homo sapiens
  misc_feature (61)..(62): /note="This region represents a CpG dinucleotide"
  misc_feature (61)..(61): /note="Nucleotide may be methylated to form 5-methylcytosine"
gtcacaagacaatgccccattgtgcttgcttatccagaagatcaatcaggaagagaagcacgccatgggctgaactgcagtttctgttacctgacttagtttagatgtatttctcctctccc

SEQ ID NO: 7271 - DNA, 122 bp, Homo sapiens
  misc_feature (61)..(62): /note="This region represents a CpG dinucleotide"
  misc_feature (61)..(61): /note="Nucleotide may be methylated to form 5-methylcytosine"
cacacgcagcaacactggtaatactgcttcccatattcattctttggtcttcactgacagcgtgaagaagcaactattgctgattcatcagttactcattttcacaatggtcagtactccaa

SEQ ID NO: 7272 - DNA, 122 bp, Homo sapiens
  misc_feature (61)..(62): /note="This region represents a CpG dinucleotide"
  misc_feature (61)..(61): /note="Nucleotide may be methylated to form 5-methylcytosine"
gcactcctcacttcccagatggcagggggcgctgagcagaggtgctcctaacttcccacacgcggtggcagctgcgcagaggcgcttctcacctcccagatgggcggcggccgggcaaaggt

SEQ ID NO: 7273 - DNA, 122 bp, Homo sapiens
  misc_feature (61)..(62): /note="This region represents a CpG dinucleotide"
  misc_feature (61)..(61): /note="Nucleotide may be methylated to form 5-methylcytosine"
ttggctggggacacagagccagaccatatcagtagctcttttagttgcaacattaataaacgtggatatgtgactaaattatttgcagggatagtagtctagatttattttatttatttagt

SEQ ID NO: 7274 - DNA, 122 bp, Homo sapiens
  misc_feature (61)..(62): /note="This region represents a CpG dinucleotide"
  misc_feature (61)..(61): /note="Nucleotide may be methylated to form 5-methylcytosine"
atcgaagtagaggcttcagtggcctgacttttcccacttcctgctcccctgtgagctgaacgtcagtccaaggatgcggtcttgggctgcccatggtgggagacagggcagtttgggggaag

SEQ ID NO: 7275 - DNA, 122 bp, Homo sapiens
  misc_feature (61)..(62): /note="This region represents a CpG dinucleotide"
  misc_feature (61)..(61): /note="Nucleotide may be methylated to form 5-methylcytosine"
gggctaatgtgataatgggaaataatgaaatttgttgtttttatcagtgtgtatatggggcggggtttacatttgcattttcacagggcccttggcaagttcacagggttgaacagttggga

SEQ ID NO: 7276 - DNA, 122 bp, Homo sapiens
  misc_feature (61)..(62): /note="This region represents a CpG dinucleotide"
  misc_feature (61)..(61): /note="Nucleotide may be methylated to form 5-methylcytosine"
caccgcttgcaatgataggaaccctagcgatcctgctccagagatgaatataagctatagcgccagctgtacagaagtgcagtttcttagatgaacagacagataagcacttactggctttg

SEQ ID NO: 7277 - DNA, 122 bp, Homo sapiens
  misc_feature (61)..(62): /note="This region represents a CpG dinucleotide"
  misc_feature (61)..(61): /note="Nucleotide may be methylated to form 5-methylcytosine"
aggtgaggctaacgttcacatgccttgagagtggccgggatgactcttgcaggccagtctcgctggttgcttttatctctgatgaatccaccctatttggctttgggggtgcctgactcact

SEQ ID NO: 7278 - DNA, 122 bp, Homo sapiens
  misc_feature (61)..(62): /note="This region represents a CpG dinucleotide"
  misc_feature (61)..(61): /note="Nucleotide may be methylated to form 5-methylcytosine"
cctcaggtgatccgcctgcctcggcctcccaaagtgctgggattacagtgtgagccaccacgcctggcccaagctgtctttttattagcagaaaacaagagaagcctttcctaaccgtgatt

SEQ ID NO: 7279 - DNA, 122 bp, Homo sapiens
  misc_feature (61)..(62): /note="This region represents a CpG dinucleotide"
  misc_feature (61)..(61): /note="Nucleotide may be methylated to form 5-methylcytosine"
gtgttgcaaataaagcacattcgtcgttttgccacagttaggacgtgaagttctctgaatcgaagtacggtgtcagtggatgggacagaatagtacggtagtgagtttgcagaaccctgttt

SEQ ID NO: 7280 - DNA, 122 bp, Homo sapiens
  misc_feature (61)..(62): /note="This region represents a CpG dinucleotide"
  misc_feature (61)..(61): /note="Nucleotide may be methylated to form 5-methylcytosine"
tgtttccacgtgtgggagcgcctctcattcccccaccacacacgcccagtttccgcttctcgcccccaagggcacagctttgcctgctgggtgctgtgccctgctgggtacacgcgggcctc

SEQ ID NO: 7281 - DNA, 122 bp, Homo sapiens
  misc_feature (61)..(62): /note="This region represents a CpG dinucleotide"
  misc_feature (61)..(61): /note="Nucleotide may be methylated to form 5-methylcytosine"
agatgtttttcttggcatccatgcaaactaacgatatgaactgtatcaaacccagagtggcgtgggccttccttgtactgccttctgacttcttcagctgctatgtctgtacttgccctcct

SEQ ID NO: 7282 - DNA, 122 bp, Homo sapiens
  misc_feature (61)..(62): /note="This region represents a CpG dinucleotide"
  misc_feature (61)..(61): /note="Nucleotide may be methylated to form 5-methylcytosine"
attaggaagttatattttctattttagaaggagttgtctgagaaggcctttctaaatacacgtttgagtggagagatctgaatggaatgaagatactggataaccttccagacagagaggtc

SEQ ID NO: 7283 - DNA, 122 bp, Homo sapiens
  misc_feature (61)..(62): /note="This region represents a CpG dinucleotide"
  misc_feature (61)..(61): /note="Nucleotide may be methylated to form 5-methylcytosine"
aatgccctgtgtaaatccccctttctatggggagatgtgagtgagtgagtggtgaatgagcgaatattctgcttcctgattgctgcctctctgagcaaggtgtctgccccctcctaaccacc

SEQ ID NO: 7284 - DNA, 122 bp, Homo sapiens
  misc_feature (61)..(62): /note="This region represents a CpG dinucleotide"
  misc_feature (61)..(61): /note="Nucleotide may be methylated to form 5-methylcytosine"
gctaaatgtacgcttaccttgtgaccccagaaatttcacttcaagaggaatgagtgcatacgtccaccaaaggcatgtgcaagaatgtccatagcacgtttattcgtagtagtaaaaaactg

SEQ ID NO: 7285 - DNA, 122 bp, Homo sapiens
  misc_feature (61)..(62): /note="This region represents a CpG dinucleotide"
  misc_feature (61)..(61): /note="Nucleotide may be methylated to form 5-methylcytosine"
agcggcgggttgaagggctcctcaaggtggccagaatggaagcccaggaagcactgagagcgagcacgggtcaccagcacgttgtcacctctcagtctcatactaaatttgttttcactgag

SEQ ID NO: 7286 - DNA, 122 bp, Homo sapiens
  misc_feature (61)..(62): /note="This region represents a CpG dinucleotide"
  misc_feature (61)..(61): /note="Nucleotide may be methylated to form 5-methylcytosine"
ggccagtcgagttttaccccacgccatgactcgtggaagacttaaatttgtaaattcctacggcatcacgatagacaaaggtccaggagaatgtttcaagcaaatattcgcttgaaagagca

SEQ ID NO: 7287 - DNA, 122 bp, Homo sapiens
  misc_feature (61)..(62): /note="This region represents a CpG dinucleotide"
  misc_feature (61)..(61): /note="Nucleotide may be methylated to form 5-methylcytosine"
gagggtgtaactctcatgaatggattaatgcctttcttgcaagagtccattggccagaaccgtgagctgaataaacatctgttgtttacaatttacccagtctgtggtattctgttacagca

SEQ ID NO: 7288 - DNA, 122 bp, Homo sapiens
  misc_feature (61)..(62): /note="This region represents a CpG dinucleotide"
  misc_feature (61)..(61): /note="Nucleotide may be methylated to form 5-methylcytosine"
atttctacatgaagcagaggccattatgtgttgcagctgacattgtctggccgagcaaagcgagaagcatctggctagcagcaaggaaagacagcaagttgataaattattgatttacataa

SEQ ID NO: 7289 - DNA, 122 bp, Homo sapiens
  misc_feature (61)..(62): /note="This region represents a CpG dinucleotide"
  misc_feature (61)..(61): /note="Nucleotide may be methylated to form 5-methylcytosine"
caactattttccagaaatggaaagaatggacttgccccagggccttcgagggaagcaccacgttattttcggcaacttggagaagctccacgacttccaccagcagcacttcctccgggagc

SEQ ID NO: 7290 - DNA, 122 bp, Homo sapiens
  misc_feature (61)..(62): /note="This region represents a CpG dinucleotide"
  misc_feature (61)..(61): /note="Nucleotide may be methylated to form 5-methylcytosine"
tcccacggagccactaagaataacccccatcagtctccataactggcaaggtccctgccacgaggggaatagtccaggctaccaccagcccctgccactgctctgcacacctccctcttcaa

SEQ ID NO: 7291 - DNA, 122 bp, Homo sapiens
  misc_feature (61)..(62): /note="This region represents a CpG dinucleotide"
  misc_feature (61)..(61): /note="Nucleotide may be methylated to form 5-methylcytosine"
cccttttccacaccagaatgcagaaaacaagtccaccttgccatgcagccttctctgacccgtggctcccaacccttcctcctggggctgcactagcctctgggttctctttgtggcacaag

SEQ ID NO: 7292 - DNA, 122 bp, Homo sapiens
  misc_feature (61)..(62): /note="This region represents a CpG dinucleotide"
  misc_feature (61)..(61): /note="Nucleotide may be methylated to form 5-methylcytosine"
atctaggctcactgcaacctccacctcctgagttcaagcgattctcctgtctcagcctcccgagtggctgggattatgagggcaccaccacgcccagctaatttttgtatttttagtagaga

SEQ ID NO: 7293 - DNA, 122 bp, Homo sapiens
  misc_feature (61)..(62): /note="This region represents a CpG dinucleotide"
  misc_feature (61)..(61): /note="Nucleotide may be methylated to form 5-methylcytosine"
cgaactcccgacctcaggtgatccgcccgccttggcctcccaaagtgctgggattacaggcgtaagccaccacacccagccaatcagggctctttgaattccttcactgatttatccccagt

SEQ ID NO: 7294 - DNA, 122 bp, Homo sapiens
  misc_feature (61)..(62): /note="This region represents a CpG dinucleotide"
  misc_feature (61)..(61): /note="Nucleotide may be methylated to form 5-methylcytosine"
gtgggaggggccggtgtgaggcaaggggctcatgccgaccttcctcagcgtgggaggggtcggtgtgaggcagggactcacgcctctgggcagggtgccagaggcatgagttgggcatcaac

SEQ ID NO: 7295 - DNA, 122 bp, Homo sapiens
  misc_feature (61)..(62): /note="This region represents a CpG dinucleotide"
  misc_feature (61)..(61): /note="Nucleotide may be methylated to form 5-methylcytosine"
agggccagggccctgcagaagcaatgtcaggggactgacagatacaggagaaacccaggacgtagacctgacagggcgtggcagctgatgggacagaagcagggagccccccaggagtggga

SEQ ID NO: 7296 - DNA, 122 bp, Homo sapiens
  misc_feature (61)..(62): /note="This region represents a CpG dinucleotide"
  misc_feature (61)..(61): /note="Nucleotide may be methylated to form 5-methylcytosine"
taggtcctgcaaggatttttggaggttctcttcagaagagaaggattactgtcttcatttcgaaagatttatttgcaaatctgagacaaagaaacggttcaattcaacatcctgttacatcc

SEQ ID NO: 7297 - DNA, 122 bp, Homo sapiens
  misc_feature (61)..(62): /note="This region represents a CpG dinucleotide"
  misc_feature (61)..(61): /note="Nucleotide may be methylated to form 5-methylcytosine"
gtaggtgctagctatgtgaaaatgagtgggcagagatcagggcaggaggaagagcacaggcgaagactgaggcaggaaacaccatggctgtttgggagagatccagttactgctggtattac

SEQ ID NO: 7298 - DNA, 122 bp, Homo sapiens
  misc_feature (61)..(62): /note="This region represents a CpG dinucleotide"
  misc_feature (61)..(61): /note="Nucleotide may be methylated to form 5-methylcytosine"
ggacctcagctaagcactccatggccagcccactggaggcacaggcttcaaaacaggaaacgaaaagggcctgcttctgcagttgacagctttgatgccttcctcactgagaaggccttagg

SEQ ID NO: 7299 - DNA, 122 bp, Homo sapiens
  misc_feature (61)..(62): /note="This region represents a CpG dinucleotide"
  misc_feature (61)..(61): /note="Nucleotide may be methylated to form 5-methylcytosine"
aatgtcttatgtaatccaccgtgaagagcttggtgaacagctgtgctaggaaggatcaggcgccatgggaagtgtggtgcggccgtttcccctacttctctccgcctcgtgcttacgactga

SEQ ID NO: 7300 - DNA, 122 bp, Homo sapiens
  misc_feature (61)..(62): /note="This region represents a CpG dinucleotide"
  misc_feature (61)..(61): /note="Nucleotide may be methylated to form 5-methylcytosine"
acactgaaataggcccatgtgcaccactgctcccgcaggagtttatgtctaggccaagtacgtgctgtttattgacagagaaacaaataccgctcagcacctgtccggtttcagagtgatga

SEQ ID NO: 7301 - DNA, 122 bp, Homo sapiens
  misc_feature (61)..(62): /note="This region represents a CpG dinucleotide"
  misc_feature (61)..(61): /note="Nucleotide may be methylated to form 5-methylcytosine"
atgcatcccctggcgttcccggatacctgcctgcatcacacagtccctgcctgtccatctcgcagctttacagcccaggaaggcccaggcccggctcctcccgacctctcccgaagtccctt

SEQ ID NO: 7302 - DNA, 122 bp, Homo sapiens
  misc_feature (61)..(62): /note="This region represents a CpG dinucleotide"
  misc_feature (61)..(61): /note="Nucleotide may be methylated to form 5-methylcytosine"
agccgctacgggtcagagcttttattggaagaccaggtttgccttgatgcagccaaagtgcgttccagttcaccccactcttgcttgtgtttcttctttatgtaaattgtgtgatgtttcaa

SEQ ID NO: 7303 - DNA, 122 bp, Homo sapiens
  misc_feature (61)..(62): /note="This region represents a CpG dinucleotide"
  misc_feature (61)..(61): /note="Nucleotide may be methylated to form 5-methylcytosine"
acattcccttctgcctgaaattcttagatgcttttagatcttgcagcttcgcacctgccccgagttgtagtcaaagcagtccttcccttctatgaaaccttcctccatctgtagaaacatat

SEQ ID NO: 7304 - DNA, 122 bp, Homo sapiens
  misc_feature (61)..(62): /note="This region represents a CpG dinucleotide"
  misc_feature (61)..(61): /note="Nucleotide may be methylated to form 5-methylcytosine"
actgtgctacagttttatttcctgctggcttctcagttctctaagccttgaggatccacgcgccttagaccattattacctcctcccccatatgcagtaagttcctgactcttctgatcttt

SEQ ID NO: 7305 - DNA, 122 bp, Homo sapiens
  misc_feature (61)..(62): /note="This region represents a CpG dinucleotide"
  misc_feature (61)..(61): /note="Nucleotide may be methylated to form 5-methylcytosine"
cgggaggaagacgcgccacagggactgggacagcggccaccgcggtgacacctacagccacgcaagcacctgcgtaaacacgtgctacagtcacatgttacgtatttcacacatttacacac

SEQ ID NO: 7306 - DNA, 122 bp, Homo sapiens
  misc_feature (61)..(62): /note="This region represents a CpG dinucleotide"
  misc_feature (61)..(61): /note="Nucleotide may be methylated to form 5-methylcytosine"
gctgcttttttttttgaggcggagttttgctcttgttgcccaggctggagtgcaatggcacgatctaggctcaccacaagggaggcgctgctttcatttggagcagccataagcaaaaggct

SEQ ID NO: 7307 - DNA, 122 bp, Homo sapiens
  misc_feature (61)..(62): /note="This region represents a CpG dinucleotide"
  misc_feature (61)..(61): /note="Nucleotide may be methylated to form 5-methylcytosine"
ctacagcttactggcaggcaggatagctggttgcccaatctgctctttatctccatagcacggcagccaggctggttacataagtgactgcagtcatgcgttgcttaaccatagggttaggt

SEQ ID NO: 7308 - DNA, 122 bp, Homo sapiens
  misc_feature (61)..(62): /note="This region represents a CpG dinucleotide"
  misc_feature (61)..(61): /note="Nucleotide may be methylated to form 5-methylcytosine"
tgacagtgtcagaagcatgatgcctgacgattgcgcatgagggtcggccccttgcggcagcggtggggtgcactgcctccatagtacaccgctgcccgctgcttggattctggtgggcccac

SEQ ID NO: 7309 - DNA, 122 bp, Homo sapiens
  misc_feature (61)..(62): /note="This region represents a CpG dinucleotide"
  misc_feature (61)..(61): /note="Nucleotide may be methylated to form 5-methylcytosine"
ccatgactctgtagcctttgctgttgtgctgtctcctggcccctcctctgaactctgaagcgctgtgcttatgcaactgtttgctgtcacttgatcactgtcagcattggattattctgtcc

SEQ ID NO: 7310 - DNA, 122 bp, Homo sapiens
  misc_feature (61)..(62): /note="This region represents a CpG dinucleotide"
  misc_feature (61)..(61): /note="Nucleotide may be methylated to form 5-methylcytosine"
aagttattcatgaaatgagtttaatgagcttttattttctaatgaacgtgacaataaatacgttagcatgatgtcttgtttgtgtactacctaaaatgcagatgtatatgcatcatcatagg

SEQ ID NO: 7311 - DNA, 122 bp, Homo sapiens
  misc_feature (61)..(62): /note="This region represents a CpG dinucleotide"
  misc_feature (61)..(61): /note="Nucleotide may be methylated to form 5-methylcytosine"
atcctttgtttcattgctttgacacagctcacaatgcaaggtttcttaatcctcttttagcgtaggtttgtcaatatcactttctctctgaatggataacgatgatgatgatttgccatgac

SEQ ID NO: 7312 - DNA, 122 bp, Homo sapiens
  misc_feature (61)..(62): /note="This region represents a CpG dinucleotide"
  misc_feature (61)..(61): /note="Nucleotide may be methylated to form 5-methylcytosine"
aggtatcacatgcagtggaaacaggtagagtaaatgcatgacgtgggaaaaagtgtgatacgtcgaatcaacacaagttgattagatgatctagataattgtgacatagtaggtgacagaga

SEQ ID NO: 7313 - DNA, 122 bp, Homo sapiens
  misc_feature (61)..(62): /note="This region represents a CpG dinucleotide"
  misc_feature (61)..(61): /note="Nucleotide may be methylated to form 5-methylcytosine"
aaaggactttgaatctctatagatggcaattcaggggaaaggcaaataaatggtgaaggccggttagtaaaggtgttatctccaggctgaaagtctaaagatatttccagtgggtaaacttt

SEQ ID NO: 7314 - DNA, 122 bp, Homo sapiens
  misc_feature (61)..(62): /note="This region represents a CpG dinucleotide"
  misc_feature (61)..(61): /note="Nucleotide may be methylated to form 5-methylcytosine"
tctatgcagatttcctggatttcctcttctgtagtaccaaaaagaagaaaccaatggggacgagttggcaacggaatctaaaccataagaacagaatgttttaaattaaatttttgctaaat

SEQ ID NO: 7315 - DNA, 122 bp, Homo sapiens
  misc_feature (61)..(62): /note="This region represents a CpG dinucleotide"
  misc_feature (61)..(61): /note="Nucleotide may be methylated to form 5-methylcytosine"
atatttgtagtttctaaaatgttgataacagaccattttgttgttacacatgtctgccaacgaaaacaaaaggcaaagagaatcactcccatccctataaaaggaatggctccttttctaac

SEQ ID NO: 7316 - DNA, 122 bp, Homo sapiens
  misc_feature (61)..(62): /note="This region represents a CpG dinucleotide"
  misc_feature (61)..(61): /note="Nucleotide may be methylated to form 5-methylcytosine"
ggcagcaaaacagggcaggttttaaaaactgcacccacacgaactctgaacagaggaagacggtttgcttcaggcaccatctctaagctgtgtgtgctcttggcacagctcgtggacctggg

SEQ ID NO: 7317 - DNA, 122 bp, Homo sapiens
  misc_feature (61)..(62): /note="This region represents a CpG dinucleotide"
  misc_feature (61)..(61): /note="Nucleotide may be methylated to form 5-methylcytosine"
ctcccggcttgggcctctccacgccttccagagggagcggagccgtgagattcaaggcttcgccgagactgccagggaggtgggctttcaaagaagcggcaaataaatgaccgcggaagttg

SEQ ID NO: 7318 - DNA, 122 bp, Homo sapiens
  misc_feature (61)..(62): /note="This region represents a CpG dinucleotide"
  misc_feature (61)..(61): /note="Nucleotide may be methylated to form 5-methylcytosine"
gacaccttccccactgcctgcctacagcccaggagccccattgccacccttgcccaagaacgttggcacatctcctacctggtccccttgaagctgagctcagctgactctgtcacccttcc

SEQ ID NO: 7319 - DNA, 122 bp, Homo sapiens
  misc_feature (61)..(62): /note="This region represents a CpG dinucleotide"
  misc_feature (61)..(61): /note="Nucleotide may be methylated to form 5-methylcytosine"
cagagcccccaggctgtgcacacgtgggctccaggcgaaccatttcaggttcagggaagacggctcagcctaacctgggtggggctgacttctgtgcacaacatctacacctggccctctgt

SEQ ID NO: 7320 - DNA, 122 bp, Homo sapiens
  misc_feature (61)..(62): /note="This region represents a CpG dinucleotide"
  misc_feature (61)..(61): /note="Nucleotide may be methylated to form 5-methylcytosine"
ggcggccaggggggcggcgcgcccgggcccggaaagcggcggaggggacgcccgggacagcgcccctcaccgcccgctgctcgcaggaggagcagcatcgatcccacgagaactgcctggac

SEQ ID NO: 7321 - DNA, 122 bp, Homo sapiens
  misc_feature (61)..(62): /note="This region represents a CpG dinucleotide"
  misc_feature (61)..(61): /note="Nucleotide may be methylated to form 5-methylcytosine"
agggcctgagccacctcagccctcagcagcacgtggtttacagtaggcgctcagccatgacgtcttcagtccctacagtgtgggacacagcagctccagatgccaggctcaggaatctggaa

SEQ ID NO: 7322 - DNA, 122 bp, Homo sapiens
  misc_feature (61)..(62): /note="This region represents a CpG dinucleotide"
  misc_feature (61)..(61): /note="Nucleotide may be methylated to form 5-methylcytosine"
taaccaatctgtttctgcatgtcaattctgttttctgtaccttgctttcccttttctgtccgtaaatcctctccgaccacacagcactgcctgagtcactctgaacctactctggttgagga

SEQ ID NO: 7323 - DNA, 122 bp, Homo sapiens
  misc_feature (61)..(62): /note="This region represents a CpG dinucleotide"
  misc_feature (61)..(61): /note="Nucleotide may be methylated to form 5-methylcytosine"
accttccaaggtagatactactgatattccctggtcacaaaggaaatctctgaggtcccacgacattaattagtttgtccaggatcaatgtttataaatatcatagctggtatgtgaactca

SEQ ID NO: 7324 - DNA, 122 bp, Homo sapiens
  misc_feature (61)..(62): /note="This region represents a CpG dinucleotide"
  misc_feature (61)..(61): /note="Nucleotide may be methylated to form 5-methylcytosine"
ttctcttttagattaaattctccatgaatcacattaatttggtgcctcaccccatgctgtcgctacctccaagtggctctaattcttatttaggcttgaaattcttaagagttggatgctac

SEQ ID NO: 7325 - DNA, 122 bp, Homo sapiens
  misc_feature (61)..(62): /note="This region represents a CpG dinucleotide"
  misc_feature (61)..(61): /note="Nucleotide may be methylated to form 5-methylcytosine"
taaccatttggagcaaaggcaagctctcagggacgcgggggttgatagggggcaggtctgcgaaaaagagaaacacttcaaacagcgctgcggagagtgggggatggagctgtggggagcga

SEQ ID NO: 7326 - DNA, 122 bp, Homo sapiens
  misc_feature (61)..(62): /note="This region represents a CpG dinucleotide"
  misc_feature (61)..(61): /note="Nucleotide may be methylated to form 5-methylcytosine"
gtcattctgaactccaaattcccatccaaatccttgtttgtctcctggaacccataatgtcgaggtccaggcacgggaagtgatcaggtggtttactgactagggatgcctcttccaaggaa

SEQ ID NO: 7327 - DNA, 122 bp, Homo sapiens
  misc_feature (61)..(62): /note="This region represents a CpG dinucleotide"
  misc_feature (61)..(61): /note="Nucleotide may be methylated to form 5-methylcytosine"
aagcctcgctgactgacctcttaccaccagtgtggtccctcctcctgtctgtttagctctcgcttccggcacactggggaatgctattccacagatgtaaattgcactgtcatttgaagtca

SEQ ID NO: 7328 - DNA, 122 bp, Homo sapiens
  misc_feature (61)..(62): /note="This region represents a CpG dinucleotide"
  misc_feature (61)..(61): /note="Nucleotide may be methylated to form 5-methylcytosine"
cgcacagccaggccaggcgccccgtcgcgccccacatacgcggggtgcactcggcggggccgggcgggaacatggcgcctgccctccactcgggaccgccacagaaaaatcgggggtgcgtg

SEQ ID NO: 7329 - DNA, 122 bp, Homo sapiens
  misc_feature (61)..(62): /note="This region represents a CpG dinucleotide"
  misc_feature (61)..(61): /note="Nucleotide may be methylated to form 5-methylcytosine"
ccatggacccacatgccagatttcccttccttcaggaacaaaacatccgcagtagacctgcggcaaacctcagcttaggctgccatctagtgctgaacatggggcaacacaacacctgcaga

SEQ ID NO: 7330 - DNA, 122 bp, Homo sapiens
  misc_feature (61)..(62): /note="This region represents a CpG dinucleotide"
  misc_feature (61)..(61): /note="Nucleotide may be methylated to form 5-methylcytosine"
tccccagtgtgtgtgacttcagcctgcactagaccatttgaccgacctaatcattttgttcgtaagagcttcaagaacatctaattgagcattcccagcctttgactgtttaaccctgagtc

SEQ ID NO: 7331 - DNA, 122 bp, Homo sapiens
  misc_feature (61)..(62): /note="This region represents a CpG dinucleotide"
  misc_feature (61)..(61): /note="Nucleotide may be methylated to form 5-methylcytosine"
attggccaggccaacaaagtgatgatttaccggtttgtgactcgcgcgtcagtggaagagcgaatcacacaagtggccaagagaaagatgatgctgacacacctggttgtgcggcctgggct

SEQ ID NO: 7332 - DNA, 122 bp, Homo sapiens
  misc_feature (61)..(62): /note="This region represents a CpG dinucleotide"
  misc_feature (61)..(61): /note="Nucleotide may be methylated to form 5-methylcytosine"
aagaagttttatgggagactttcattttggccacccagtatttacttcctgtggcaataacgccatgttaaacaaattatgaatgggaaagatgatcattctgaaatgggaatgtagaagct

SEQ ID NO: 7333 - DNA, 122 bp, Homo sapiens
  misc_feature (61)..(62): /note="This region represents a CpG dinucleotide"
  misc_feature (61)..(61): /note="Nucleotide may be methylated to form 5-methylcytosine"
aggaaggatcagggacgcagccatccactcaggcaatcacaggcagtgggttgggacccccgaaaggaaaaaaaaagtttgttttcttcttatttagttttgtttttatttctaaatgttgt

SEQ ID NO: 7334 - DNA, 122 bp, Homo sapiens
  misc_feature (61)..(62): /note="This region represents a CpG dinucleotide"
  misc_feature (61)..(61): /note="Nucleotide may be methylated to form 5-methylcytosine"
aaggaagggacaaagggatttattgaaagtgaaagtacactccacagtgtgggagggggccgagcataggaactcaaagacaccgttacagaatttttgggagtttaaataccccctagagg

SEQ ID NO: 7335 - DNA, 122 bp, Homo sapiens
  misc_feature (61)..(62): /note="This region represents a CpG dinucleotide"
  misc_feature (61)..(61): /note="Nucleotide may be methylated to form 5-methylcytosine"
gtctgtggagtaatcccttaccaaaagccagagtctgactggccatcaggagaggagccacggcttccagggagctggagctgcagagtcaagaagtttcataatttctggggttggaacat

SEQ ID NO: 7336 - DNA, 122 bp, Homo sapiens
  misc_feature (61)..(62): /note="This region represents a CpG dinucleotide"
  misc_feature (61)..(61): /note="Nucleotide may be methylated to form 5-methylcytosine"
gaaaacctgagcatttgcaggcatctggttaaagcagggtctgtgtgtacaattttaaaacgggtaatatgtcatgctcttagttcatcttcacaacaaaactatgagtaagcggtattagc

SEQ ID NO: 7337 - DNA, 122 bp, Homo sapiens
  misc_feature (61)..(62): /note="This region represents a CpG dinucleotide"
  misc_feature (61)..(61): /note="Nucleotide may be methylated to form 5-methylcytosine"
cagaaggcccatgaggggaaggtgaggcacctggggcagagaaaaaaaaaaaatgcgccgcgaagcgctgtctgggtcatccacgaaggaaactgtcttcccatcagcccttgcgctgggcc

SEQ ID NO: 7338 - DNA, 122 bp, Homo sapiens
  misc_feature (61)..(62): /note="This region represents a CpG dinucleotide"
  misc_feature (61)..(61): /note="Nucleotide may be methylated to form 5-methylcytosine"
ataaggtcctttatctctttagtctcttttgatgcacagtttcatcttctccctgccctgcgatttatttgtggaagacaccaggttgtttgtctagagtctcccacagtccacaatttact

SEQ ID NO: 7339 - DNA, 122 bp, Homo sapiens
  misc_feature (61)..(62): /note="This region represents a CpG dinucleotide"
  misc_feature (61)..(61): /note="Nucleotide may be methylated to form 5-methylcytosine"
gtgcatctatgcctaggaacagctccatgagaacatgttctctctgtttaagtgattacacgtaaacagggacaaaaatttaaattcaaaccataagtcaccagatttaagaataacctctc

SEQ ID NO: 7340 - DNA, 122 bp, Homo sapiens
  misc_feature (61)..(62): /note="This region represents a CpG dinucleotide"
  misc_feature (61)..(61): /note="Nucleotide may be methylated to form 5-methylcytosine"
tctctcctctcaccctaaaaggcagttaaaccagcaaaaatcagagaagcatgtagttcacgacttgagcccatcctgctaaaggggtttgtttgacgtttctgctaatccgtgtttaatgt

SEQ ID NO: 7341 - DNA, 122 bp, Homo sapiens
  misc_feature (61)..(62): /note="This region represents a CpG dinucleotide"
  misc_feature (61)..(61): /note="Nucleotide may be methylated to form 5-methylcytosine"
cagcagtaccaagaacaccttgtactctttttcagactgaattttacggggctctaactacgcagtaggctctgtagtatgcaaggtcagagcctagcttctttattcctgtcctcctcaaa

SEQ ID NO: 7342 - DNA, 122 bp, Homo sapiens
  misc_feature (61)..(62): /note="This region represents a CpG dinucleotide"
  misc_feature (61)..(61): /note="Nucleotide may be methylated to form 5-methylcytosine"
aacttgctcaaatcttcttcctccaaaatccttttaacttctgctatactacaaggaaaccgattattttcaccaaatgtaaattattaaacatgcttttttggtcaggcacggtgcttacc

SEQ ID NO: 7343 - DNA, 122 bp, Homo sapiens
  misc_feature (61)..(62): /note="This region represents a CpG dinucleotide"
  misc_feature (61)..(61): /note="Nucleotide may be methylated to form 5-methylcytosine"
tgattttactgtttcctaggaaatgagaacagaagccattgccagacctctggaaataaacgagactgaaaaagtgatgagaattgcaataaaagagattttggtaagatgactttgctttt

SEQ ID NO: 7344 - DNA, 122 bp, Homo sapiens
  misc_feature (61)..(62): /note="This region represents a CpG dinucleotide"
  misc_feature (61)..(61): /note="Nucleotide may be methylated to form 5-methylcytosine"
gttggtcaggggtccctgggggagaggcaggcaggatgctaggcctcccaaacagggaggcggccccacagggagccctggtggagcttgaggcttcctgcatttagtgttggtctgtccag

SEQ ID NO: 7345 - DNA, 122 bp, Homo sapiens
  misc_feature (61)..(62): /note="This region represents a CpG dinucleotide"
  misc_feature (61)..(61): /note="Nucleotide may be methylated to form 5-methylcytosine"
cttcccactccacctcaccacctcatagaggaaaattgtgacgttaatgggaaatgtcagcggtaatgtcttcaggctgggcctgtggagtgactcccttgccacaggatatttaagcaatg

SEQ ID NO: 7346 - DNA, 122 bp, Homo sapiens
  misc_feature (61)..(62): /note="This region represents a CpG dinucleotide"
  misc_feature (61)..(61): /note="Nucleotide may be methylated to form 5-methylcytosine"
aagaaatttacttttcaatcattgttagcgtggtgatggagcaggagctgctgagcaggccgccccggctctcttcctcagcgtctaggcttttagaattgttctatgtcctttcagccaac

SEQ ID NO: 7347 - DNA, 122 bp, Homo sapiens
  misc_feature (61)..(62): /note="This region represents a CpG dinucleotide"
  misc_feature (61)..(61): /note="Nucleotide may be methylated to form 5-methylcytosine"
tgcgtggtccagtacacaatgaatgctcattttgtgaagtcacagggtcaaatctttctccgtgcctcatcccacttaatccttgcaacattctcaagaggcgggtagacggggtgtggcca

SEQ ID NO: 7348 - DNA, 122 bp, Homo sapiens
  misc_feature (61)..(62): /note="This region represents a CpG dinucleotide"
  misc_feature (61)..(61): /note="Nucleotide may be methylated to form 5-methylcytosine"
ttggtctgcgagaaatcaaacttcgaacaggacaagcccgaagcccgcttctccgggagacggggtgccacaattgcaaggtaaaactagcagacatagttgcactgtctccccaggcggga

SEQ ID NO: 7349 - DNA, 122 bp, Homo sapiens
  misc_feature (61)..(62): /note="This region represents a CpG dinucleotide"
  misc_feature (61)..(61): /note="Nucleotide may be methylated to form 5-methylcytosine"
tatccataactggtatgacagggaatctcaaaaaaggaaatatcctgttctgaggtctcccgctggattaagtgctcatgactcacagaggccctgccttagctctcagtttcagtgactta

SEQ ID NO: 7350 - DNA, 122 bp, Homo sapiens
  misc_feature (61)..(62): /note="This region represents a CpG dinucleotide"
  misc_feature (61)..(61): /note="Nucleotide may be methylated to form 5-methylcytosine"
atcttccatgtatctgatataaaaaccacagtcaagtacaccctcaataccacagcaccacgctgactaagcatgactagctctttcaaacagttatttcttaaatgctcacttgcagctta

SEQ ID NO: 7351 - DNA, 122 bp, Homo sapiens
  misc_feature (61)..(62): /note="This region represents a CpG dinucleotide"
  misc_feature (61)..(61): /note="Nucleotide may be methylated to form 5-methylcytosine"
tcagctcttgctgtgcactgcctgacacgcgttgatgctgtgctttgtggagcctgtttacgtttggtagaaatggcaccatctagtacttaaaaaggatcatcaccacaataactgtttgg

SEQ ID NO: 7352 - DNA, 122 bp, Homo sapiens
  misc_feature (61)..(62): /note="This region represents a CpG dinucleotide"
  misc_feature (61)..(61): /note="Nucleotide may be methylated to form 5-methylcytosine"
cttttctcaagcttcaaagtatggctactttgccttcttttttacattgtttgggaaagtcgagaagtagtcacaaaataaaagaaatgagagggaggaaaaagaagaaaaggtcatgattc

SEQ ID NO: 7353 - DNA, 122 bp, Homo sapiens
  misc_feature (61)..(62): /note="This region represents a CpG dinucleotide"
  misc_feature (61)..(61): /note="Nucleotide may be methylated to form 5-methylcytosine"
tccttttactgtgtgtagtcactgtcctaagtgctctacttacaccttcaaaacgacctacgagacaggaactactattatacattttacatggaaggaaagtgaggcacagagagggtcag

SEQ ID NO: 7354 - DNA, 122 bp, Homo sapiens
  misc_feature (61)..(62): /note="This region represents a CpG dinucleotide"
  misc_feature (61)..(61): /note="Nucleotide may be methylated to form 5-methylcytosine"
tatcattcctaaattttaaaatattctttataaagtaggcctagatggatatatcttggacgtcacatttatgcttaatgtatattctggaatttgtcagttgtacatgattacaaacacag

SEQ ID NO: 7355 - DNA, 122 bp, Homo sapiens
  misc_feature (61)..(62): /note="This region represents a CpG dinucleotide"
  misc_feature (61)..(61): /note="Nucleotide may be methylated to form 5-methylcytosine"
tggccaggctggtcttgaactcctgacctcaagtgatctgcccgcctcggcctcccaaagcgctgaaattacaggaagaagccaccgcgcccgacctaaagccagttttattccatagcttc

SEQ ID NO: 7356 - DNA, 122 bp, Homo sapiens
  misc_feature (61)..(62): /note="This region represents a CpG dinucleotide"
  misc_feature (61)..(61): /note="Nucleotide may be methylated to form 5-methylcytosine"
ctaattacagtttagagttccctgagtgctttcacagacactctcatttgatgctcaatgcgctgatatatagagaactacctactggtctaggtctcaagtccagtaaccttgttgtagct

SEQ ID NO: 7357 - DNA, 122 bp, Homo sapiens
  misc_feature (61)..(62): /note="This region represents a CpG dinucleotide"
  misc_feature (61)..(61): /note="Nucleotide may be methylated to form 5-methylcytosine"
aagtcactgtgcctggctcaacaacacaatcttattacattattaaaagatcactctagccgctgtgctaagaatggattgtgtaggaggtaaggggagaagtggagagaatgttgcaatag

SEQ ID NO: 7358 - DNA, 122 bp, Homo sapiens
  misc_feature (61)..(62): /note="This region represents a CpG dinucleotide"
  misc_feature (61)..(61): /note="Nucleotide may be methylated to form 5-methylcytosine"
agagatgaataaattgatgatacattgaatattgttcactgacctgcactttaatgtttacgacaaaattttataatgaaggaggtattttggttagtgggatagaaggattcgtatttgta

SEQ ID NO: 7359 - DNA, 122 bp, Homo sapiens
  misc_feature (61)..(62): /note="This region represents a CpG dinucleotide"
  misc_feature (61)..(61): /note="Nucleotide may be methylated to form 5-methylcytosine"
ttttcccttttctctaagctctgatgtaaggtagtgtctcaggtaattgactcatctgcccgtatttgttcattacagctgttgctaggaagttattatgtaaatggccctgctcctcaatc

SEQ ID NO: 7360 - DNA, 122 bp, Homo sapiens
  misc_feature (61)..(62): /note="This region represents a CpG dinucleotide"
  misc_feature (61)..(61): /note="Nucleotide may be methylated to form 5-methylcytosine"
attattcttattcattcattgttcatctacgcagagtgctttgaacttgcctggcatgtacggtaagctattattcattcaacagtataaactggccaggtgaggtgactcaagcctgtaat

SEQ ID NO: 7361 - DNA, 122 bp, Homo sapiens
  misc_feature (61)..(62): /note="This region represents a CpG dinucleotide"
  misc_feature (61)..(61): /note="Nucleotide may be methylated to form 5-methylcytosine"
aaataaataaataaataaataaataaataaaaataaaaaataataataataaaaaaagcccgcacgaactaggaaagaaaatacacaaccggccctccgtgcgatcacccatctccctcacc

SEQ ID NO: 7362 - DNA, 122 bp, Homo sapiens
  misc_feature (61)..(62): /note="This region represents a CpG dinucleotide"
  misc_feature (61)..(61): /note="Nucleotide may be methylated to form 5-methylcytosine"
tggagcttttgcagcactgagaccttcctggggatttaaaaaaaaaaaaaaaaaggcatgcgccatctcctggtggaaataagcattgtcctgttgggcatgagatggccagtagccattgt

SEQ ID NO: 7363 - DNA, 122 bp, Homo sapiens
  misc_feature (61)..(62): /note="This region represents a CpG dinucleotide"
  misc_feature (61)..(61): /note="Nucleotide may be methylated to form 5-methylcytosine"
aggaggaatcatagttatctggggctgaagctttggcacttgatttttattcattaggaacgactgagcaggcctcaggctaatctggaattgaaaacaaaatatatctaaattaacaacat

SEQ ID NO: 7364 - DNA, 122 bp, Homo sapiens
  misc_feature (61)..(62): /note="This region represents a CpG dinucleotide"
  misc_feature (61)..(61): /note="Nucleotide may be methylated to form 5-methylcytosine"
gatgagctaatcagtggaattgtgcctgggtgcttggacagggcagagtctttggaacctcggagtcgtaggagaactgaaaaatctctctggcttcccttcccttagaagggatccactgc

SEQ ID NO: 7365 - DNA, 122 bp, Homo sapiens
  misc_feature (61)..(62): /note="This region represents a CpG dinucleotide"
  misc_feature (61)..(61): /note="Nucleotide may be methylated to form 5-methylcytosine"
acctccaccagcagctattaggtggtagattccggatctggacccacatcctcctagtttcgtaatatttttcccctatacacgatggttagcattttctaagtgaagcatatctgagccta

SEQ ID NO: 7366 - DNA, 122 bp, Homo sapiens
  misc_feature (61)..(62): /note="This region represents a CpG dinucleotide"
  misc_feature (61)..(61): /note="Nucleotide may be methylated to form 5-methylcytosine"
taccttgaactctttctcaatattggccagaactgccagttcattgctaagttctaaagccgtcatgactggatcttcactagacaatgacaggtaagccggacttgccaggcctttatagg

SEQ ID NO: 7367 - DNA, 122 bp, Homo sapiens
  misc_feature (61)..(62): /note="This region represents a CpG dinucleotide"
  misc_feature (61)..(61): /note="Nucleotide may be methylated to form 5-methylcytosine"
cttcagggctgggtcttccaagcactagatattgctcatctcagtggatggagacattcacgtggactgggctgggtcaggtaggtcaggggaaggcaggaataccttaagtaaggcttgtt

SEQ ID NO: 7368 - DNA, 122 bp, Homo sapiens
  misc_feature (61)..(62): /note="This region represents a CpG dinucleotide"
  misc_feature (61)..(61): /note="Nucleotide may be methylated to form 5-methylcytosine"
aacacatcaatcaaaactggaccagccaggagaaacagctataagagccggatggtgaggcggagcaagaaatccaagaagaaagaaagtctcgaaaggttagtaaaatcagtattcttttt

SEQ ID NO: 7369 - DNA, 122 bp, Homo sapiens
  misc_feature (61)..(62): /note="This region represents a CpG dinucleotide"
  misc_feature (61)..(61): /note="Nucleotide may be methylated to form 5-methylcytosine"
tgacgcaaggcgggcttcattaatgaaattgctgtcaattagcgaagggcggaaaccaggcgaagagggcggtcctttagaaccacactcgcgcgactggctcctctctttacaggcttagc

SEQ ID NO: 7370 - DNA, 122 bp, Homo sapiens
  misc_feature (61)..(62): /note="This region represents a CpG dinucleotide"
  misc_feature (61)..(61): /note="Nucleotide may be methylated to form 5-methylcytosine"
gcgccaggcccgggtccgctactaccaccaactgagccaacatgtgaccgtggacgtgttcggccggggcgggccggggcagccggtgcccgaaattgggctcctgcacacagtggcccgct

SEQ ID NO: 7371 - DNA, 122 bp, Homo sapiens
  misc_feature (61)..(62): /note="This region represents a CpG dinucleotide"
  misc_feature (61)..(61): /note="Nucleotide may be methylated to form 5-methylcytosine"
gctccacgtccgtatttgcatgtggccctttcctgctgtgaaaatgtctttttgcttttgcgtttactttgtggtgatccaggagcctttggaatttgagggtagatatacccgaagataga

SEQ ID NO: 7372 - DNA, 122 bp, Homo sapiens
  misc_feature (61)..(62): /note="This region represents a CpG dinucleotide"
  misc_feature (61)..(61): /note="Nucleotide may be methylated to form 5-methylcytosine"
ctgaggcacaactaaatttataggactcagcaggcctgctagagcttgtctgggatggtgcggtgccagaatttcaaaccctggccacatgtttctggcccattggccattcctaaaccaaa

SEQ ID NO: 7373 - DNA, 122 bp, Homo sapiens
  misc_feature (61)..(62): /note="This region represents a CpG dinucleotide"
  misc_feature (61)..(61): /note="Nucleotide may be methylated to form 5-methylcytosine"
tgcaagccaagtatgaactacacaaacaggttatataacaagtggaggtatgcacctgcacgccaaactcgctgagtcacgcaggcctgggtatccatctcagcctagtccttgaccaaagc

SEQ ID NO: 7374 - DNA, 122 bp, Homo sapiens
  misc_feature (61)..(62): /note="This region represents a CpG dinucleotide"
  misc_feature (61)..(61): /note="Nucleotide may be methylated to form 5-methylcytosine"
gctggctcccgccctctggaggacagtgcctggttcctcagcctggttccagcccctaaacgctcgtgcatgggaactcactggcaataaggaaacacacacagagtattaacaagatgcca

SEQ ID NO: 7375 - DNA, 122 bp, Homo sapiens
  misc_feature (61)..(62): /note="This region represents a CpG dinucleotide"
  misc_feature (61)..(61): /note="Nucleotide may be methylated to form 5-methylcytosine"
tccccatttacatttttttaggagattacacatagaagaataaagcttgacacattaaagcggggaaagactggtaagattccatgagcagagacacaatcaaattattcatgctccagtga

SEQ ID NO: 7376 - DNA, 122 bp, Homo sapiens
  misc_feature (61)..(62): /note="This region represents a CpG dinucleotide"
  misc_feature (61)..(61): /note="Nucleotide may be methylated to form 5-methylcytosine"
tatctgtttcatgtcgtttctatcccaaacgctttcactttttttaatggtaaatttcaacgtaatctacagggggcaaaaatcagggcttggctgttgtccaaaacaaaattatgcatgct

SEQ ID NO: 7377 - DNA, 122 bp, Homo sapiens
  misc_feature (61)..(62): /note="This region represents a CpG dinucleotide"
  misc_feature (61)..(61): /note="Nucleotide may be methylated to form 5-methylcytosine"
ttcatgaggggtgcatagctgcatagctccctcagcaacttgcctgcatcttgataatagcgatctcttcattctttcttgtgaatcccatgcaggatcctctcttagtcctctctgtctcc

SEQ ID NO: 7378 - DNA, 122 bp, Homo sapiens
  misc_feature (61)..(62): /note="This region represents a CpG dinucleotide"
  misc_feature (61)..(61): /note="Nucleotide may be methylated to form 5-methylcytosine"
agaggaagctgtgcaatgtggagtcatgcagcccatccctcccctctctcaatcctatagcggctagacggtgtggagaaacatggttattgtttaatcacatcacactggctgtaaatcaa

SEQ ID NO: 7379 - DNA, 122 bp, Homo sapiens
  misc_feature (61)..(62): /note="This region represents a CpG dinucleotide"
  misc_feature (61)..(61): /note="Nucleotide may be methylated to form 5-methylcytosine"
tgttagtgtaatgtctcatcaacactgagaacacgttatgtggtgttttactgtcatgaacgaaacctatttccccagaaaaactggcagatattagcattaatctgatttttcaaagaagt

SEQ ID NO: 7380 - DNA, 122 bp, Homo sapiens
  misc_feature (61)..(62): /note="This region represents a CpG dinucleotide"
  misc_feature (61)..(61): /note="Nucleotide may be methylated to form 5-methylcytosine"
acagtagagctcagccatgaagggcccctgtagcctttccaagccaggataagaccaagacggtggtatgaaagcaactgtgactttggcacaaatacagactgagaaaatggtacctgact

SEQ ID NO: 7381 - DNA, 122 bp, Homo sapiens
  misc_feature (61)..(62): /note="This region represents a CpG dinucleotide"
  misc_feature (61)..(61): /note="Nucleotide may be methylated to form 5-methylcytosine"
tatctaccctcatgcaaattaactcatacaaacagataccgaggaggcccactactaacccgtaagtgcctttgcctttgtgctatttggaactgtttgatctatacagaaaaatttgtccc

SEQ ID NO: 7382 - DNA, 122 bp, Homo sapiens
  misc_feature (61)..(62): /note="This region represents a CpG dinucleotide"
  misc_feature (61)..(61): /note="Nucleotide may be methylated to form 5-methylcytosine"
aactcctggactgaagggattctcccatctcagcctttcgagtagttggtaccataggcacgtgccactatgctggttgatgttttatttattaatttttttatgtagagatggggtcttgc

SEQ ID NO: 7383 - DNA, 122 bp, Homo sapiens
  misc_feature (61)..(62): /note="This region represents a CpG dinucleotide"
  misc_feature (61)..(61): /note="Nucleotide may be methylated to form 5-methylcytosine"
tggtgtgctgactgtggataggtctccgccaagccgtggctcctgtcgtcctgacatagacgccgccattttaacgctgacctccaggggctggtggctggacctgcgcggccatcactgcc

SEQ ID NO: 7384 - DNA, 122 bp, Homo sapiens
  misc_feature (61)..(62): /note="This region represents a CpG dinucleotide"
  misc_feature (61)..(61): /note="Nucleotide may be methylated to form 5-methylcytosine"
tcaactgagtaaagagtctccatcataagaaagagttgtataacctgtcttctacctgcacggctgagccctggccaagcaggtcattttagccatctcaatgagcgaggcacttcatggtg

SEQ ID NO: 7385 - DNA, 122 bp, Homo sapiens
  misc_feature (61)..(62): /note="This region represents a CpG dinucleotide"
  misc_feature (61)..(61): /note="Nucleotide may be methylated to form 5-methylcytosine"
tgcactgtgtagggaggcatttcttcacctctttgcagagatgttcagcccatgatcttacgtaacattgcacccacgccctccacccacataaggattatgcaattgcgtgtaggattcct

SEQ ID NO: 7386 - DNA, 122 bp, Homo sapiens
  misc_feature (61)..(62): /note="This region represents a CpG dinucleotide"
  misc_feature (61)..(61): /note="Nucleotide may be methylated to form 5-methylcytosine"
aataggtataacacagacacacacacacacacacacacgcatcgtgcacgcacgcacgcacgctgctcgtgcttgtgcgcatacattccaggtgattagcattaaaactggttagtttgaat

SEQ ID NO: 7387 - DNA, 122 bp, Homo sapiens
  misc_feature (61)..(62): /note="This region represents a CpG dinucleotide"
  misc_feature (61)..(61): /note="Nucleotide may be methylated to form 5-methylcytosine"
cttagcttcctaagcctctcatagtaactcatattccttgtcctgtgctccaggcaaatacgactactcagatttcccaacacctgaaactttcccaacccactaacagaaatgtactctca

SEQ ID NO: 7388 - DNA, 122 bp, Homo sapiens
  misc_feature (61)..(62): /note="This region represents a CpG dinucleotide"
  misc_feature (61)..(61): /note="Nucleotide may be methylated to form 5-methylcytosine"
cagctgcttctttcccagaatcttcagccaagactgtcaggcaggatgtgatctttcaggcgaaggagagttaagagtccatgctcagttcttgccataaatctccaggaactctgctttga

SEQ ID NO: 7389 - DNA, 122 bp, Homo sapiens
  misc_feature (61)..(62): /note="This region represents a CpG dinucleotide"
  misc_feature (61)..(61): /note="Nucleotide may be methylated to form 5-methylcytosine"
acaatcagcatttgcagataaagtttctctgttaccctaaggtacaaaatgaagatttcacgtagttgagccatagctaactcttgtttgacatgtagcgtgagcagaaaataaactttttt

SEQ ID NO: 7390 - DNA, 122 bp, Homo sapiens
  misc_feature (61)..(62): /note="This region represents a CpG dinucleotide"
  misc_feature (61)..(61): /note="Nucleotide may be methylated to form 5-methylcytosine"
accagccctgctcattcctccctctggctgtgaagatggaagcccatgggttggatgcctcgggccagggctgtcacgcaaggaagcctggggaggactgtggcactgaccccatgggccat

SEQ ID NO: 7391 - DNA, 122 bp, Homo sapiens
  misc_feature (61)..(62): /note="This region represents a CpG dinucleotide"
  misc_feature (61)..(61): /note="Nucleotide may be methylated to form 5-methylcytosine"
tgtctgcgtgcagagcaagagctggaggagcttaaccccttgcaagccctccgcagtcagcgctgcccaggaaaggactcagggaacaaactcctgacgtcctgggcttgggatcatctcag

SEQ ID NO: 7392 - DNA, 122 bp, Homo sapiens
  misc_feature (61)..(62): /note="This region represents a CpG dinucleotide"
  misc_feature (61)..(61): /note="Nucleotide may be methylated to form 5-methylcytosine"
aaaaaggtaaagaccaacacaaaaacctcagacttcctatacaagttaagcagaggaacccggaaaatgtctgaagaaaacgattaccaattttttttgttttttttgttttttggtgaccg

SEQ ID NO: 7393 - DNA, 122 bp, Homo sapiens
  misc_feature (61)..(62): /note="This region represents a CpG dinucleotide"
  misc_feature (61)..(61): /note="Nucleotide may be methylated to form 5-methylcytosine"
agatcagagaaaggcaatctaatgccaagtggcatgactgccagtaaccttgtgagtcagcgccacttcggatgttctattggtctcattagtagcactagaaacatataaaaaatgaccag

SEQ ID NO: 7394 - DNA, 122 bp, Homo sapiens
  misc_feature (61)..(62): /note="This region represents a CpG dinucleotide"
  misc_feature (61)..(61): /note="Nucleotide may be methylated to form 5-methylcytosine"
cagaaacagaaagcaaagactgacagttcattcgttctttaaacaaattacatagctgtacgtttatttactgatgcatgaagggttgcagtgaagagcaaaatgtttaccctaactacttt

SEQ ID NO: 7395 - DNA, 122 bp, Homo sapiens
  misc_feature (61)..(62): /note="This region represents a CpG dinucleotide"
  misc_feature (61)..(61): /note="Nucleotide may be methylated to form 5-methylcytosine"
atagactcctctctgagacgcccgtgtttcagttggcagccggcctgtttcttttaagcccgccctaatttatttttggtcccatgcataggagccagtgcttattttgataaccgcgttta

SEQ ID NO: 7396 - DNA, 122 bp, Homo sapiens
  misc_feature (61)..(62): /note="This region represents a CpG dinucleotide"
  misc_feature (61)..(61): /note="Nucleotide may be methylated to form 5-methylcytosine"
ggaaacatgctagaaaaaagtcaacttgagacaaatgtgacaacagcaaacccaagagcgcgggtacccttgggtgagccacctaccacacagcttcagcgagtttcaaaccaaatcaacag

SEQ ID NO: 7397 - DNA, 122 bp, Homo sapiens
  misc_feature (61)..(62): /note="This region represents a CpG dinucleotide"
  misc_feature (61)..(61): /note="Nucleotide may be methylated to form 5-methylcytosine"
taaacatcctggctctaatttggatagttatgaatactgttcctttcatcctctctcatacgtctcctccacccgcaagccatttcctctgtacggtcttctgtcagtctaatgaaagtttc

SEQ ID NO: 7398 - DNA, 122 bp, Homo sapiens
  misc_feature (61)..(62): /note="This region represents a CpG dinucleotide"
  misc_feature (61)..(61): /note="Nucleotide may be methylated to form 5-methylcytosine"
tcaggatgaggcctggtaatctgtttcattttgatttgtaatccattcacgtcagcttgccgttcgctatttaagaaccattgctctcaagcatgtttcagggcaatacagatttggtttag

SEQ ID NO: 7399 - DNA, 122 bp, Homo sapiens
  misc_feature (61)..(62): /note="This region represents a CpG dinucleotide"
  misc_feature (61)..(61): /note="Nucleotide may be methylated to form 5-methylcytosine"
cagccctaccagacaggtattttcatccagacaggtgtttcccctgtgcgtatgacaaaacgcactcaaggtgattaggtaacttgctcaaaaacacagagggactgaggcaggcagtattt

SEQ ID NO: 7400 - DNA, 122 bp, Homo sapiens
  misc_feature (61)..(62): /note="This region represents a CpG dinucleotide"
  misc_feature (61)..(61): /note="Nucleotide may be methylated to form 5-methylcytosine"
ttgctctcttccaatttgctcgtgaccccttggcctctccacccaaactgtcgaaacctgcgaggctgccacttggctatgtccacacagtgaaaggtcaggtgtcatccacggcgtgggca

SEQ ID NO: 7401 - DNA, 122 bp, Homo sapiens
  misc_feature (61)..(62): /note="This region represents a CpG dinucleotide"
  misc_feature (61)..(61): /note="Nucleotide may be methylated to form 5-methylcytosine"
acttaccctagtaactatttggtttattccttttcgtggtgacatatctaagtagttcaacgtccttagcttccttgtgtttttataaacattcttgtgcttcatgtgccttcaggaaatgt

SEQ ID NO: 7402 - DNA, 122 bp, Homo sapiens
  misc_feature (61)..(62): /note="This region represents a CpG dinucleotide"
  misc_feature (61)..(61): /note="Nucleotide may be methylated to form 5-methylcytosine"
tcttttttccacatcctcaataacacttgctttcatttatctttttggtaatagccatgccgacaggtatgaggtgatatctcattgtggctttcgtttgtatttctctgatgattagtggt

SEQ ID NO: 7403 - DNA, 122 bp, Homo sapiens
  misc_feature (61)..(62): /note="This region represents a CpG dinucleotide"
  misc_feature (61)..(61): /note="Nucleotide may be methylated to form 5-methylcytosine"
gaggatgaaggcagactgtaaacaaatcattattgtaaagtgatcagtgggtaatagaggcgtgtatagagtgcatagagaagggactcactcattttaagcaatgtttttcaaatggggtc

SEQ ID NO: 7404 - DNA, 122 bp, Homo sapiens
  misc_feature (61)..(62): /note="This region represents a CpG dinucleotide"
  misc_feature (61)..(61): /note="Nucleotide may be methylated to form 5-methylcytosine"
aactgcagggttcacatgcgtctctgtgtcacattatggtaattctcttaatctttcaaacgttttcattgttattatatgttatggtgatctgtgatctttgatgttactattgtaattgt

SEQ ID NO: 7405 - DNA, 122 bp, Homo sapiens
  misc_feature (61)..(62): /note="This region represents a CpG dinucleotide"
  misc_feature (61)..(61): /note="Nucleotide may be methylated to form 5-methylcytosine"
ctggagtttattactgctagggcacacagagcaatccttaaaaatgcgtaagtcagatcacgttcctcctctgcccacaccctcccctggctagtatctcactccaagtaaaagctaagctc

SEQ ID NO: 7406 - DNA, 122 bp, Homo sapiens
  misc_feature (61)..(62): /note="This region represents a CpG dinucleotide"
  misc_feature (61)..(61): /note="Nucleotide may be methylated to form 5-methylcytosine"
tctaggtcaatggatggtcctttttcgatcctggacttggcactgggccaagacaaacttcgcagacaggaaaaccttcaatgatgctccctatgagacaggaaatgtgcctacggtgggga

SEQ ID NO: 7407 - DNA, 122 bp, Homo sapiens
  misc_feature (61)..(62): /note="This region represents a CpG dinucleotide"
  misc_feature (61)..(61): /note="Nucleotide may be methylated to form 5-methylcytosine"
ctactttctcatgttcataaatcactcagattagcagagttgaattgcatatgttgatctcggtggaaattaagggtacatgtgtcaaaatactcccttaggaatacagaaagcaatttgtt

SEQ ID NO: 7408 - DNA, 122 bp, Homo sapiens
  misc_feature (61)..(62): /note="This region represents a CpG dinucleotide"
  misc_feature (61)..(61): /note="Nucleotide may be methylated to form 5-methylcytosine"
tttatataatcacacctacagaacacaaggtgaagtggatatttaacaatttcccagttacgtaagtattcacaggtaaactggctaatgcgagacagaagagctttagtttgtactgaatt

SEQ ID NO: 7409 - DNA, 122 bp, Homo sapiens
  misc_feature (61)..(62): /note="This region represents a CpG dinucleotide"
  misc_feature (61)..(61): /note="Nucleotide may be methylated to form 5-methylcytosine"
aatctaattgttctcttgcatcaaatgattttttttttaaaagataacgctgtgctcttgcgggcacataaacccacataaacccttcaatggtttcctagagcatatggaataaataaaaa

SEQ ID NO: 7410 - DNA, 122 bp, Homo sapiens
  misc_feature (61)..(62): /note="This region represents a CpG dinucleotide"
  misc_feature (61)..(61): /note="Nucleotide may be methylated to form 5-methylcytosine"
ctgatgggattgcaaatgagctgagcagtctttgcagagatggagctttgctgtgtgctgcgtgcctgtcaaccctacctgcacagagaaggtgattgctccgtggcagaacagaatgggag

SEQ ID NO: 7411 - DNA, 122 bp, Homo sapiens
  misc_feature (61)..(62): /note="This region represents a CpG dinucleotide"
  misc_feature (61)..(61): /note="Nucleotide may be methylated to form 5-methylcytosine"
aggagggaacagccaggaatgtcatggttcagagacactaagctggtacctttgggcttccgttgacacccgctcctccagttgtggttaccctgagctatcctcactccaggagctactca

SEQ ID NO: 7412 - DNA, 122 bp, Homo sapiens
  misc_feature (61)..(62): /note="This region represents a CpG dinucleotide"
  misc_feature (61)..(61): /note="Nucleotide may be methylated to form 5-methylcytosine"
ctcttttatgtctctacctcctacatcttatctccaggttggatgattgatgagaacattcgcccaacctttaaagaactagccaatgagttcaccaggatggcccgagacccaccacggta

SEQ ID NO: 7413 - DNA, 122 bp, Homo sapiens
  misc_feature (61)..(62): /note="This region represents a CpG dinucleotide"
  misc_feature (61)..(61): /note="Nucleotide may be methylated to form 5-methylcytosine"
cttacccgattcccaacatgacgcctgcgagtagacatgggagaatggctgtggctgtgccgtctacgataatctcgactgtaagacctgctacgtgatcgtctatgggagcgggagcgaga

SEQ ID NO: 7414 - DNA, 122 bp, Homo sapiens
  misc_feature (61)..(62): /note="This region represents a CpG dinucleotide"
  misc_feature (61)..(61): /note="Nucleotide may be methylated to form 5-methylcytosine"
taagaggaagccaggggtgtctgtctggttctgggccttcccagacaaaagccagagacccggagcctctttctgagaaggaaccgggcgtccccaagatttcctctagccgagtcccctgg

SEQ ID NO: 7415 - DNA, 122 bp, Homo sapiens
  misc_feature (61)..(62): /note="This region represents a CpG dinucleotide"
  misc_feature (61)..(61): /note="Nucleotide may be methylated to form 5-methylcytosine"
gtcatgggcagcgcccattctcatataacgttctaacaggacggagggctgaaggaagggcggccggcaagcctggcttcatgggttgtctctcagaagaaaataaactcgtgattggtgcg

SEQ ID NO: 7416 - DNA, 122 bp, Homo sapiens
  misc_feature (61)..(62): /note="This region represents a CpG dinucleotide"
  misc_feature (61)..(61): /note="Nucleotide may be methylated to form 5-methylcytosine"
cctccctctggctgtgaagatggaagcccatgggttggatgcctcgggccagggctgtcacgcaaggaagcctggggaggactgtggcactgaccccatgggccatggtatcgcctcagggc

SEQ ID NO: 7417 - DNA, 122 bp, Homo sapiens
  misc_feature (61)..(62): /note="This region represents a CpG dinucleotide"
  misc_feature (61)..(61): /note="Nucleotide may be methylated to form 5-methylcytosine"
cagaactaatcacaggcttctgagtacattgagcttttctctcagtgccaggtttcaacacgctactcaccctgcccagaaaaccccttcccactctctgcctggcactctcctatgtgtcc

SEQ ID NO: 7418 - DNA, 122 bp, Homo sapiens
  misc_feature (61)..(62): /note="This region represents a CpG dinucleotide"
  misc_feature (61)..(61): /note="Nucleotide may be methylated to form 5-methylcytosine"
gtttgaacaccagcctacactagtgaagcactgaatgccacatataatcttagttacctacgctttacagacatcaaacctgtggcaggaggaggaaaaggagcaggaggagaaaagtaaag

SEQ ID NO: 7419 - DNA, 122 bp, Homo sapiens
  misc_feature (61)..(62): /note="This region represents a CpG dinucleotide"
  misc_feature (61)..(61): /note="Nucleotide may be methylated to form 5-methylcytosine"
aaagaaaaattaaatacataaataaaatgtgtcttcctccactaaaagagtaggacacatcgcagaagccgataaatatttgttcaatgtttacatgaacaaacacggtcactcagccgtct

SEQ ID NO: 7420 - DNA, 122 bp, Homo sapiens
  misc_feature (61)..(62): /note="This region represents a CpG dinucleotide"
  misc_feature (61)..(61): /note="Nucleotide may be methylated to form 5-methylcytosine"
aaattaacatacagaaggaagagagggagagaaaaaacaagataaagctcccaaataaaacgaagatggaaggactggaaaactaaggataataaaaagctgaagagaataaaatatgatca

SEQ ID NO: 7421 - DNA, 122 bp, Homo sapiens
  misc_feature (61)..(62): /note="This region represents a CpG dinucleotide"
  misc_feature (61)..(61): /note="Nucleotide may be methylated to form 5-methylcytosine"
tgatccagtctgcagccctggctgtctcctgctgagctccaggggccctgtgtttagactcgttctgtctttttatacagggcttacaatatcccttctttcctaacttgcctacactgtat

SEQ ID NO: 7422 - DNA, 122 bp, Homo sapiens
  misc_feature (61)..(62): /note="This region represents a CpG dinucleotide"
  misc_feature (61)..(61): /note="Nucleotide may be methylated to form 5-methylcytosine"
agtttgcatttctaacaagttccagatgatgcgaatgctgttggaccacactttaagaaccgctgctctagagggtaactcggacctatcccagcgtcccagggaaacgaaatctgcagtga

SEQ ID NO: 7423 - DNA, 122 bp, Homo sapiens
  misc_feature (61)..(62): /note="This region represents a CpG dinucleotide"
  misc_feature (61)..(61): /note="Nucleotide may be methylated to form 5-methylcytosine"
tgcggctgagtcactaattagcagtgagagcctgggctgtatctcctaccaaataaccagcggagtggagtgacaggtccttacttaaacatggtttaagtaagcattcacagttccttact

SEQ ID NO: 7424 - DNA, 122 bp, Homo sapiens
  misc_feature (61)..(62): /note="This region represents a CpG dinucleotide"
  misc_feature (61)..(61): /note="Nucleotide may be methylated to form 5-methylcytosine"
tttccaggtgtggatgaagcaaccatcattgacattctaactaagcgaaacaatgcacagcgtcaacagatcaaagcagcatatctccaggaaacaggaaaggtaagttagagtggtaaatt

SEQ ID NO: 7425 - DNA, 122 bp, Homo sapiens
  misc_feature (61)..(62): /note="This region represents a CpG dinucleotide"
  misc_feature (61)..(61): /note="Nucleotide may be methylated to form 5-methylcytosine"
actgcaagctggggtgaatcagcttgtttacaacttctaaattttttaaaccaaaagaaacgacagaacaaaagtttcgtgaacttctggggttgggtttgtcagtctggctgtatgctgag

SEQ ID NO: 7426 - DNA, 122 bp, Homo sapiens
  misc_feature (61)..(62): /note="This region represents a CpG dinucleotide"
  misc_feature (61)..(61): /note="Nucleotide may be methylated to form 5-methylcytosine"
gaatgcctgggccagggttggtgctcagttatttcccaattgccatgattaatatttgttcggtaagaacagctccaggttcaggccggggggctccaggttcaagcgcctcttgtttactc

SEQ ID NO: 7427 - DNA, 122 bp, Homo sapiens
  misc_feature (61)..(62): /note="This region represents a CpG dinucleotide"
  misc_feature (61)..(61): /note="Nucleotide may be methylated to form 5-methylcytosine"
tctgtgtgaaggtcacccttggtaagatctggtggctttgggattcattcctgggagcagcgttgggtatacacccatctgtgcacatcctctccgccaaccagcagatgcttgtcagatag

SEQ ID NO: 7428 - DNA, 122 bp, Homo sapiens
  misc_feature (61)..(62): /note="This region represents a CpG dinucleotide"
  misc_feature (61)..(61): /note="Nucleotide may be methylated to form 5-methylcytosine"
acagttcaacagcaacttgattctattcataattatatatgttagatttaatgtaggatacgtgtatatttcaacacataagacccaggtggtgctttgaaaagtaagagtgcctagggctt

SEQ ID NO: 7429 - DNA, 122 bp, Homo sapiens
  misc_feature (61)..(62): /note="This region represents a CpG dinucleotide"
  misc_feature (61)..(61): /note="Nucleotide may be methylated to form 5-methylcytosine"
taagaaaatttaacagttgtgtcatgttgtttctgtctgattttaattgctgtctaatgacggggaaagcacgatgaaaagatgtacaatcctgcatccttgcttatttcacaactaaagct

SEQ ID NO: 7430 - DNA, 122 bp, Homo sapiens
  misc_feature (61)..(62): /note="This region represents a CpG dinucleotide"
  misc_feature (61)..(61): /note="Nucleotide may be methylated to form 5-methylcytosine"
tcagcagtaaaccccaggacacaggcagtgaccctagacgagcagggcaggtccaggtgacgggaggcgtgccacgtttctccatcccgaagttcttcttggtttttatcctaagtactgat

SEQ ID NO: 7431 - DNA, 122 bp, Homo sapiens
  misc_feature (61)..(62): /note="This region represents a CpG dinucleotide"
  misc_feature (61)..(61): /note="Nucleotide may be methylated to form 5-methylcytosine"
gagaaatcttcagtgtcaccaaagattgcttctcaccaaccctgtgctttcagctgcagacgtgcatgcctgacagcctgtacctctggagtgcaactggagccattgccattggttccccc

SEQ ID NO: 7432 - DNA, 122 bp, Homo sapiens
  misc_feature (61)..(62): /note="This region represents a CpG dinucleotide"
  misc_feature (61)..(61): /note="Nucleotide may be methylated to form 5-methylcytosine"
gagaacacttccatatataaagaagccttatgacctgcctgcaactgcagattttgcaaacgtgatcttactttttctctcttttgggatatgctcccctttaaactgaagctcaacctcct

SEQ ID NO: 7433 - DNA, 122 bp, Homo sapiens
  misc_feature (61)..(62): /note="This region represents a CpG dinucleotide"
  misc_feature (61)..(61): /note="Nucleotide may be methylated to form 5-methylcytosine"
tggggcgatggggcagggtggggccaggcgcagtggagctgatggttggaggccccaggacgaagccgagcatcagtgctgggaagggtctggtccactcaatgcccggccggtgggacctg

SEQ ID NO: 7434 - DNA, 122 bp, Homo sapiens
  misc_feature (61)..(62): /note="This region represents a CpG dinucleotide"
  misc_feature (61)..(61): /note="Nucleotide may be methylated to form 5-methylcytosine"
ttttggctttgcttcaatagccctatggcacttgtgttggtaggtttttacattgagttgcgcagttcaattcacaggccagtagagggtacttatgagtaagagccagctgtgccaaagca

SEQ ID NO: 7435 - DNA, 122 bp, Homo sapiens
  misc_feature (61)..(62): /note="This region represents a CpG dinucleotide"
  misc_feature (61)..(61): /note="Nucleotide may be methylated to form 5-methylcytosine"
tggcaattccccctcccctgatccaggcaggggctttctgttcttcatacagccagggggcggaccctcctctgagcctctaggaaaggactgtgcctggccagtcttgggggaggagctgc

SEQ ID NO: 7436 - DNA, 122 bp, Homo sapiens
  misc_feature (61)..(62): /note="This region represents a CpG dinucleotide"
  misc_feature (61)..(61): /note="Nucleotide may be methylated to form 5-methylcytosine"
cttcaaaaagagcccacaaaatgaataaagattaaacaaatgaaacaataaagttcaaaacgtgtactagaggaatggttgagcatgatgagaaggaattaggaattacatctctatcaggg

SEQ ID NO: 7437 - DNA, 122 bp, Homo sapiens
  misc_feature (61)..(62): /note="This region represents a CpG dinucleotide"
  misc_feature (61)..(61): /note="Nucleotide may be methylated to form 5-methylcytosine"
catttgttttgcttacctaccatgggaaagattccacgtggtcctagaagcatacgtattcgtcggttacagtattttaaatattcactggccgctgaaatttaaaatggatgaaaaagaaa

SEQ ID NO: 7438 - DNA, 122 bp, Homo sapiens
  misc_feature (61)..(62): /note="This region represents a CpG dinucleotide"
  misc_feature (61)..(61): /note="Nucleotide may be methylated to form 5-methylcytosine"
acagctagcaaaatgctgaaaaatgggagcttacaactaactggattaacccagtgtaaccggatagcaaaaagcagtaagtaatagctcatttggcacttctaaatccaataatcctcatc

SEQ ID NO: 7439 - DNA, 122 bp, Homo sapiens
  misc_feature (61)..(62): /note="This region represents a CpG dinucleotide"
  misc_feature (61)..(61): /note="Nucleotide may be methylated to form 5-methylcytosine"
aaagaattatagcagcccagttgttagggatacaatgaagctcggcttcccttactgaggcgttttgagtggaatgaaatgcttcatttagcatttaatgagattatagtggcagagataaa

SEQ ID NO: 7440 - DNA, 122 bp, Homo sapiens
  misc_feature (61)..(62): /note="This region represents a CpG dinucleotide"
  misc_feature (61)..(61): /note="Nucleotide may be methylated to form 5-methylcytosine"
gtaaaaagaaaaataagaaaggtacagaagtgctactatttgtgcagaggggaaaaagcgcggacaatctataacggtgtaatatatctacggaaggatatacaagtcacgaaaaatattgt

SEQ ID NO: 7441 - DNA, 122 bp, Homo sapiens
  misc_feature (61)..(62): /note="This region represents a CpG dinucleotide"
  misc_feature (61)..(61): /note="Nucleotide may be methylated to form 5-methylcytosine"
gtggaaagtaccaaacttgctctaatcaagatctctgcatgtggggagaaccaaagtatacgagaaacaactggtttcagtttagatcgaacagtttctcatgagaagggcagtaccatgtc

SEQ ID NO: 7442 - DNA, 122 bp, Homo sapiens
  misc_feature (61)..(62): /note="This region represents a CpG dinucleotide"
  misc_feature (61)..(61): /note="Nucleotide may be methylated to form 5-methylcytosine"
actggaaacaagactgttcctacttgtttatgtgaatgtttgttgttctgaattggatgacgatactcattgttatttcagaggagtggttgaagaatacatttttaaactaattagtgatg

SEQ ID NO: 7443 - DNA, 122 bp, Homo sapiens
  misc_feature (61)..(62): /note="This region represents a CpG dinucleotide"
  misc_feature (61)..(61): /note="Nucleotide may be methylated to form 5-methylcytosine"
ggctggtgccccgcgctcctgcgctgcagctgcactaacgctccgcggggagcgtgtgtgcgcactaacccgccgctctgtgtgttctcccgcggctgccgacttctcccagctgggacggc

SEQ ID NO: 7444 - DNA, 122 bp, Homo sapiens
  misc_feature (61)..(62): /note="This region represents a CpG dinucleotide"
  misc_feature (61)..(61): /note="Nucleotide may be methylated to form 5-methylcytosine"
ggttggtcaagtggacagaggagtcacatctgactggtggtcaaactggcacatgtttatcgcattctaatcttttatctaacaatggtttcttaatttctgcttctttgtattttgcattt

SEQ ID NO: 7445 - DNA, 122 bp, Homo sapiens
  misc_feature (61)..(62): /note="This region represents a CpG dinucleotide"
  misc_feature (61)..(61): /note="Nucleotide may be methylated to form 5-methylcytosine"
aaataatagagatagatatgcagaaccacttggcatcactaaaactgcagcctttaacttcgtctgtgatcagaagcctcaaaagctattcactttgggattttttttaaggttgaatttac

SEQ ID NO: 7446 - DNA, 122 bp, Homo sapiens
  misc_feature (61)..(62): /note="This region represents a CpG dinucleotide"
  misc_feature (61)..(61): /note="Nucleotide may be methylated to form 5-methylcytosine"
gccaggtgcgggttctgggccatcccctcactccctgttcactgccatatgctagctgggcggggttccctcccactcagggtgttctcaatggggcacctacccagcatgcactctccaag

SEQ ID NO: 7447 - DNA, 122 bp, Homo sapiens
  misc_feature (61)..(62): /note="This region represents a CpG dinucleotide"
  misc_feature (61)..(61): /note="Nucleotide may be methylated to form 5-methylcytosine"
aaaaaaaaaagaatcaagtgattttgctcttatctggagttgagacaagccagatgttctcgtgttgttttcataagcaaaagaggctaaactgatggccagaaagtactcctgctcatagg

SEQ ID NO: 7448 - DNA, 122 bp, Homo sapiens
  misc_feature (61)..(62): /note="This region represents a CpG dinucleotide"
  misc_feature (61)..(61): /note="Nucleotide may be methylated to form 5-methylcytosine"
caacaagcttgtaggtcagaagcttcaggttccctttgatggattagctccctgcttggtcggctgtgtaaggtctcaagtctgtgcatagtatttacttaagtcagtgatgtagccacctc

SEQ ID NO: 7449 - DNA, 122 bp, Homo sapiens
  misc_feature (61)..(62): /note="This region represents a CpG dinucleotide"
  misc_feature (61)..(61): /note="Nucleotide may be methylated to form 5-methylcytosine"
gtaaggcatagcattaccatatttcctcatctctaaggcaccatctattgtgacgtacaccgtcattttatgtaccactaaggaaaatgctgtcaatttcagcatgctgtgtcattgatgat

SEQ ID NO: 7450 - DNA, 122 bp, Homo sapiens
  misc_feature (61)..(62): /note="This region represents a CpG dinucleotide"
  misc_feature (61)..(61): /note="Nucleotide may be methylated to form 5-methylcytosine"
ggggtaagagacagtggcaggccttgctctgatcctgaaagcttctgctcagaagtgacacgtcactccctcaaaacacatggtcaggcctgaagataatgagccggaaagtataatcctct

SEQ ID NO: 7451 - DNA, 122 bp, Homo sapiens
  misc_feature (61)..(62): /note="This region represents a CpG dinucleotide"
  misc_feature (61)..(61): /note="Nucleotide may be methylated to form 5-methylcytosine"
gaacccctcaaggacagggaatgggtctcattcatccaggagcttctaacacccgacacacgcagacactcagtaaacagtaagtgaattagtagaaccaaggaaataagaaccgaccctat

SEQ ID NO: 7452 - DNA, 122 bp, Homo sapiens
  misc_feature (61)..(62): /note="This region represents a CpG dinucleotide"
  misc_feature (61)..(61): /note="Nucleotide may be methylated to form 5-methylcytosine"
aggaagtggccatggggcctggaggttgggagtgccgacaccagtggctgctgacacctgcgtcactcactgccacacttcagcggtgtgccttggggttcacaagggggaggcctgggagg

SEQ ID NO: 7453 - DNA, 122 bp, Homo sapiens
  misc_feature (61)..(62): /note="This region represents a CpG dinucleotide"
  misc_feature (61)..(61): /note="Nucleotide may be methylated to form 5-methylcytosine"
tcccagcatgctatgggagctcagatggtgaagaagtgcagtcctaggctaccttaggagcgctgaaaggccacacccaagaagagatgctcgtctgtcacatggaagtcagaccacacagg

SEQ ID NO: 7454 - DNA, 122 bp, Homo sapiens
  misc_feature (61)..(62): /note="This region represents a CpG dinucleotide"
  misc_feature (61)..(61): /note="Nucleotide may be methylated to form 5-methylcytosine"
actcccacatgtctgggcacctgccctgggctgaggccaggctgctccaggggcctcctgcgccctcacctgccacagagcaacccaggttaaatacagcccatgcacaaagccacaggcca

SEQ ID NO: 7455 - DNA, 122 bp, Homo sapiens
  misc_feature (61)..(62): /note="This region represents a CpG dinucleotide"
  misc_feature (61)..(61): /note="Nucleotide may be methylated to form 5-methylcytosine"
aatccttcaccagcaacaaaggcatacaggttctctcatcagaactgactaggaggctggcgtgacccacaggatgaagcaacaacagtgtggtacagtggccaacctgagagctacatggg

SEQ ID NO: 7456 - DNA, 122 bp, Homo sapiens
  misc_feature (61)..(62): /note="This region represents a CpG dinucleotide"
  misc_feature (61)..(61): /note="Nucleotide may be methylated to form 5-methylcytosine"
cgtcttggaggatttatctctagtgatacaggccagcagtatgtggccttttcttgaacccgtcagaactgtgacttttctttgaactcttggctgcttggtgctactgaccttgttgctca

SEQ ID NO: 7457 - DNA, 122 bp, Homo sapiens
  misc_feature (61)..(62): /note="This region represents a CpG dinucleotide"
  misc_feature (61)..(61): /note="Nucleotide may be methylated to form 5-methylcytosine"
atgtggcagactctccttccttttgaaggctgagtaatactccattgtgtggctacacaacgtttatccactcacccgtcggtggacacctgggctgctttcaccttttggctgttgtgaat

SEQ ID NO: 7458 - DNA, 122 bp, Homo sapiens
  misc_feature (61)..(62): /note="This region represents a CpG dinucleotide"
  misc_feature (61)..(61): /note="Nucleotide may be methylated to form 5-methylcytosine"
tcttcccagctctctctgctcaatgtgctgagtgagatagtgcttctcagcctctttgaacgctttcttgtccctctgcctgcactttggttcccatcacgtcagccttgaaggtggagtgg

SEQ ID NO: 7459 - DNA, 122 bp, Homo sapiens
  misc_feature (61)..(62): /note="This region represents a CpG dinucleotide"
  misc_feature (61)..(61): /note="Nucleotide may be methylated to form 5-methylcytosine"
gctcctgggcgggcactgtgggcagggcccagccgttcaggagggggacagctgtgctggcgaggaagccctctgggcagatgtaccaccagttggaccctctgtcctaggacatcccccag

SEQ ID NO: 7460 - DNA, 122 bp, Homo sapiens
  misc_feature (61)..(62): /note="This region represents a CpG dinucleotide"
  misc_feature (61)..(61): /note="Nucleotide may be methylated to form 5-methylcytosine"
tgttttgtggcaaggaagctggggttcagatgaagagtcctctaatgtcgcacacctgtacgaacgctaccactaggatttgcatactggtgtttctgatgccagagcactcctttcaccac

SEQ ID NO: 7461 - DNA, 122 bp, Homo sapiens
  misc_feature (61)..(62): /note="This region represents a CpG dinucleotide"
  misc_feature (61)..(61): /note="Nucleotide may be methylated to form 5-methylcytosine"
gtgtgtgtgtgtacaggaatcacagagactcatcttgtaatgtttgtaatgtccatgtatcgtgtatgcacacatttttttctgacctattagaagcaaattacagagctaataccccttta

SEQ ID NO: 7462 - DNA, 122 bp, Homo sapiens
  misc_feature (61)..(62): /note="This region represents a CpG dinucleotide"
  misc_feature (61)..(61): /note="Nucleotide may be methylated to form 5-methylcytosine"
ggcatgacttcaggccattatgcagctttatgtaataatctacacaacccctaatatgtacgtatcaggatctttcatgtgatgtgaaaatgaaagccacttccttaacaaccaggaaacac

SEQ ID NO: 7463 - DNA, 122 bp, Homo sapiens
  misc_feature (61)..(62): /note="This region represents a CpG dinucleotide"
  misc_feature (61)..(61): /note="Nucleotide may be methylated to form 5-methylcytosine"
ctggccgagcaggtcggaggtggcagtggctggtccaaggctcaggggcctccttgactccggcttgggaggaggtgccaaagaggcagctgtgaacaccaccaaagccccttcaaatggca

SEQ ID NO: 7464 - DNA, 122 bp, Homo sapiens
  misc_feature (61)..(62): /note="This region represents a CpG dinucleotide"
  misc_feature (61)..(61): /note="Nucleotide may be methylated to form 5-methylcytosine"
gaagttaactaatttgcctgaggtcacacggacaacaagtagcagtcacagaattcagaccgttcctgtctgcctcatgcaaatgaaatattctcatgaaaaatatattcagagagcaccgt

SEQ ID NO: 7465 - DNA, 122 bp, Homo sapiens
  misc_feature (61)..(62): /note="This region represents a CpG dinucleotide"
  misc_feature (61)..(61): /note="Nucleotide may be methylated to form 5-methylcytosine"
accatcccctgtgccctgataaatcaaccaacagttgttttggtagccccagataagcagcgggaagagctgacttcctcttagaaaatgactcctttgtatttctggcaaaacagcttggg

SEQ ID NO: 7466 - DNA, 122 bp, Homo sapiens
  misc_feature (61)..(62): /note="This region represents a CpG dinucleotide"
  misc_feature (61)..(61): /note="Nucleotide may be methylated to form 5-methylcytosine"
cagtttggtgacttcaggaaactgctttcttagcttggtcatttccttctcaggcaactgcgtgcattgaattcgtttttatgcctggaagaacctgtttacagaattatgtaaagccctgt

SEQ ID NO: 7467 - DNA, 122 bp, Homo sapiens
  misc_feature (61)..(62): /note="This region represents a CpG dinucleotide"
  misc_feature (61)..(61): /note="Nucleotide may be methylated to form 5-methylcytosine"
ctgtttgcgtggaggtgccatgagggagcagagtgtgcatctgagctccgcctgcctctccgcctcctggctcaggctgtccaaatctgaatcacctgcccaagctctggatgatggtgaca

SEQ ID NO: 7468 - DNA, 122 bp, Homo sapiens
  misc_feature (61)..(62): /note="This region represents a CpG dinucleotide"
  misc_feature (61)..(61): /note="Nucleotide may be methylated to form 5-methylcytosine"
gcaagaagggaccaagtcccctgtgggaccggcagccttgggagggttccagcgaggccccggcctgcgccccagccagtcacagaggccccttcctgcccactggccagacacccagggtg

SEQ ID NO: 7469 - DNA, 122 bp, Homo sapiens
  misc_feature (61)..(62): /note="This region represents a CpG dinucleotide"
  misc_feature (61)..(61): /note="Nucleotide may be methylated to form 5-methylcytosine"
ggtgcaccgcggcggaggaggcagcatcccgcggcgctgacggtcctggggagagcatggcgccgaggtgaggccggggctgcgggcaggggttgggggacgccaagatgcggctgcggggg

SEQ ID NO: 7470 - DNA, 122 bp, Homo sapiens
  misc_feature (61)..(62): /note="This region represents a CpG dinucleotide"
  misc_feature (61)..(61): /note="Nucleotide may be methylated to form 5-methylcytosine"
aaatggcacaataaataactgcaagggtccatccctccacaaaaaacatgcacactcatgcgaacacacacagagtgagcaaacattgtcagaatcaactttgtcagaactgtagaaactag

SEQ ID NO: 7471 - DNA, 122 bp, Homo sapiens
  misc_feature (61)..(62): /note="This region represents a CpG dinucleotide"
  misc_feature (61)..(61): /note="Nucleotide may be methylated to form 5-methylcytosine"
agggactaacaccaagaaggccctccaggcagtgtacagcatgatgagctggccagatgacgtccctcctgaaggctggaaccgcacccgccatgtcatcatcctcatgactgatggtcaga

SEQ ID NO: 7472 - DNA, 122 bp, Homo sapiens
  misc_feature (61)..(62): /note="This region represents a CpG dinucleotide"
  misc_feature (61)..(61): /note="Nucleotide may be methylated to form 5-methylcytosine"
tacccaaccagtgactaatactatgatcaggtctgtcagcctgagcctctaacccaagctcgctgagatggtggtatctgttctttagctgcttaactaatgaggaagcaaagttgctgaag

SEQ ID NO: 7473 - DNA, 122 bp, Homo sapiens
  misc_feature (61)..(62): /note="This region represents a CpG dinucleotide"
  misc_feature (61)..(61): /note="Nucleotide may be methylated to form 5-methylcytosine"
caggcagagatccaatcttgaggttgagttgttcccaggttaatacaggcctgaccttgtcgcaaccatgtagaccaggacctctggggagaggcaggaagtcagccagccagaatggacat

SEQ ID NO: 7474 - DNA, 122 bp, Homo sapiens
  misc_feature (61)..(62): /note="This region represents a CpG dinucleotide"
  misc_feature (61)..(61): /note="Nucleotide may be methylated to form 5-methylcytosine"
tttataataataataattattttacagacagggtcttgctctgtcacccaggctggagtacggtggcgcaatcaagactcactacagactcactacagcctcaacctcctggacttaagcaa

SEQ ID NO: 7475 - DNA, 122 bp, Homo sapiens
  misc_feature (61)..(62): /note="This region represents a CpG dinucleotide"
  misc_feature (61)..(61): /note="Nucleotide may be methylated to form 5-methylcytosine"
tccttccatatcatttcactttcctttcccctccactccctcacatgtctgagacagccacgagtccctcatagaaaccttgcaaaacttaagggactcattgtttgtgctgtgcttcagag

SEQ ID NO: 7476 - DNA, 122 bp, Homo sapiens
  misc_feature (61)..(62): /note="This region represents a CpG dinucleotide"
  misc_feature (61)..(61): /note="Nucleotide may be methylated to form 5-methylcytosine"
gaaatagaatcacaaccactaggggcaaaaacccatggcttttatgtcatcattgtgttccgttctgttgcatactttgtgtgtgggtgtgtgttttatacttttttccctttaaccgttta

SEQ ID NO: 7477 - DNA, 122 bp, Homo sapiens
  misc_feature (61)..(62): /note="This region represents a CpG dinucleotide"
  misc_feature (61)..(61): /note="Nucleotide may be methylated to form 5-methylcytosine"
accccactgcttcaaaagttgccattccctccatcctccacagctctggccacatccagacgaaaccattaaggctggtgtataccctacagggcaggaagtgaatcatgcttcactcaact

SEQ ID NO: 7478 - DNA, 122 bp, Homo sapiens
  misc_feature (61)..(62): /note="This region represents a CpG dinucleotide"
  misc_feature (61)..(61): /note="Nucleotide may be methylated to form 5-methylcytosine"
gtttctaagattatgtatcttgcacgtttggcacttgagggggtgctcatcttttgattccgctattgaggtagaggcgggacgggggaagcagctttcagtaagacccgcccgctcttgcc

SEQ ID NO: 7479 - DNA, 122 bp, Homo sapiens
  misc_feature (61)..(62): /note="This region represents a CpG dinucleotide"
  misc_feature (61)..(61): /note="Nucleotide may be methylated to form 5-methylcytosine"
ggcggccaacgcacctgacaggaaaaggtctgtccactccccaccgtctccgactacaatcgctgctctgtatttcaacatttccctggaattgggtccgtttctccaggtgaaagagtctg

SEQ ID NO: 7480 - DNA, 122 bp, Homo sapiens
  misc_feature (61)..(62): /note="This region represents a CpG dinucleotide"
  misc_feature (61)..(61): /note="Nucleotide may be methylated to form 5-methylcytosine"
cgataatcacactcaacaggggccggcagaactgtgctgaccgttctgggtgactcgtcacgagatgcacccagcccagcctcttgcaggcggtagaaagtcaataaatattcacgagaggg

SEQ ID NO: 7481 - DNA, 122 bp, Homo sapiens
  misc_feature (61)..(62): /note="This region represents a CpG dinucleotide"
  misc_feature (61)..(61): /note="Nucleotide may be methylated to form 5-methylcytosine"
tacaggactgacaggtaactttcagaaacaattccagggttcagagtatgcacacctgtacgtatcagcagaatgaataatgagagagcaatgaacaatattagataaaagctaggagaact

SEQ ID NO: 7482 - DNA, 122 bp, Homo sapiens
  misc_feature (61)..(62): /note="This region represents a CpG dinucleotide"
  misc_feature (61)..(61): /note="Nucleotide may be methylated to form 5-methylcytosine"
tcctctaatattgtgaagcatattatatgaaacaggaacacaaatttctcaaaattcctgcgatgtccaataaagattttcataatttcagctctgcaatcttaataggatttcctaatact

SEQ ID NO: 7483 - DNA, 122 bp, Homo sapiens
  misc_feature (61)..(62): /note="This region represents a CpG dinucleotide"
  misc_feature (61)..(61): /note="Nucleotide may be methylated to form 5-methylcytosine"
gtacagtcatctcatagaaatgaagaaactttataggattcctgaggagtgctgagtgcccgcttgaggtttctgaattctgaatcagtcatcttggctttgtaactttcctcaacaaagtt

SEQ ID NO: 7484 - DNA, 122 bp, Homo sapiens
  misc_feature (61)..(62): /note="This region represents a CpG dinucleotide"
  misc_feature (61)..(61): /note="Nucleotide may be methylated to form 5-methylcytosine"
acttagcacagtgccaggaactgagcaggtactcaacagatgttttctaggtttctcaaacgattaatcagaagactgacaaagtacctgcagagacagtgttctctcacttttgtcccttc

SEQ ID NO: 7485 - DNA, 122 bp, Homo sapiens
  misc_feature (61)..(62): /note="This region represents a CpG dinucleotide"
  misc_feature (61)..(61): /note="Nucleotide may be methylated to form 5-methylcytosine"
ctggaatctgtaatgtctccacattctgtcatcagcagaagactctgaacatttttctaccgtttaaatgagtctcaattatccaatttataataatgcaaattttacttacagataaatat

SEQ ID NO: 7486 - DNA, 122 bp, Homo sapiens
  misc_feature (61)..(62): /note="This region represents a CpG dinucleotide"
  misc_feature (61)..(61): /note="Nucleotide may be methylated to form 5-methylcytosine"
ccacaaacatttcaatttatctgcctttttacaacctgatttacacaagcaaattgcaaacgaaaaccaggcattctttaatcatccaaaatgcatgtataaaatatagaacaaaccctagt

SEQ ID NO: 7487 - DNA, 122 bp, Homo sapiens
  misc_feature (61)..(62): /note="This region represents a CpG dinucleotide"
  misc_feature (61)..(61): /note="Nucleotide may be methylated to form 5-methylcytosine"
ccccatcctatgcagcattaaagcatatgctgaggccaattgccctggatgggttggtggcggttcaagtgcaaggcaagacagcagttctcaaactgtttggtctcaggacctttttacac

SEQ ID NO: 7488 - DNA, 122 bp, Homo sapiens
  misc_feature (61)..(62): /note="This region represents a CpG dinucleotide"
  misc_feature (61)..(61): /note="Nucleotide may be methylated to form 5-methylcytosine"
acggctgggctattacaaccccttctacttcctgagccccagggccgcgggggcttgacccgggggcagctgctggcatcagcacccctgctacagtcacgggcctgggaccctgggttcct

SEQ ID NO: 7489 - DNA, 122 bp, Homo sapiens
  misc_feature (61)..(62): /note="This region represents a CpG dinucleotide"
  misc_feature (61)..(61): /note="Nucleotide may be methylated to form 5-methylcytosine"
cctgaattttatatagttaatgccatctgttataattaaattttctctcacctgacatctcgggctgccgtgcaaccacacactacatgtttcaccagacttacggagaaattcccattgag

SEQ ID NO: 7490 - DNA, 122 bp, Homo sapiens
  misc_feature (61)..(62): /note="This region represents a CpG dinucleotide"
  misc_feature (61)..(61): /note="Nucleotide may be methylated to form 5-methylcytosine"
gaccctccatcctgccactgaaaaatgtcaaaggcttagaagattcagctgcacacagcacgtttatttttccaatttcaaatgctctgaggagaaatgattttctcctttattgccaaaaa

SEQ ID NO: 7491 - DNA, 122 bp, Homo sapiens
  misc_feature (61)..(62): /note="This region represents a CpG dinucleotide"
  misc_feature (61)..(61): /note="Nucleotide may be methylated to form 5-methylcytosine"
tagggcacattcaaatgcatcttacagaataattttctctgctgtgtcagccaggcaagccgtttaaccatgactcataccatctatttgtgtaatacttaatcagataataagccttgtat

SEQ ID NO: 7492 - DNA, 122 bp, Homo sapiens
  misc_feature (61)..(62): /note="This region represents a CpG dinucleotide"
  misc_feature (61)..(61): /note="Nucleotide may be methylated to form 5-methylcytosine"
tatcttcattgtattacccacatcaaatccttagctttcagtgctactttgtgctaagtccgtcacacctgacacttactcatcccaagtccttgaactttgaaatttagacttctgtctaa

SEQ ID NO: 7493 - DNA, 122 bp, Homo sapiens
  misc_feature (61)..(62): /note="This region represents a CpG dinucleotide"
  misc_feature (61)..(61): /note="Nucleotide may be methylated to form 5-methylcytosine"
catcagttttcttcaaccctattcttgatctttgtcatatctcagcttttcccatggactcgtaattggtttcctggatttcagtattgttctttttcaaatcaccctacaaaactctataa

SEQ ID NO: 7494 - DNA, 122 bp, Homo sapiens
  misc_feature (61)..(62): /note="This region represents a CpG dinucleotide"
  misc_feature (61)..(61): /note="Nucleotide may be methylated to form 5-methylcytosine"
tcaatcttcctcctctcctctctctgtcccttcacctctgatcagtcccagcctgattcccgttccctgatgcctcaccttcttgctgccagatgcctctaggaactagggtccttcagact

SEQ ID NO: 7495 - DNA, 122 bp, Homo sapiens
  misc_feature (61)..(62): /note="This region represents a CpG dinucleotide"
  misc_feature (61)..(61): /note="Nucleotide may be methylated to form 5-methylcytosine"
tttgattgttgttcttgctattctaggtctcgctaaaatcatcatggattcacttggcgccgtcagcactcgacttgggtttgatcttttcaaagagctgaagaaaacaaatgatggcaaca

SEQ ID NO: 7496 - DNA, 122 bp, Homo sapiens
  misc_feature (61)..(62): /note="This region represents a CpG dinucleotide"
  misc_feature (61)..(61): /note="Nucleotide may be methylated to form 5-methylcytosine"
agccattcatgaggggtccgccccgtgattgaaacacctcccacttggccccacctccaacgctgggggtacctttcaacatgagatatggagaggaaaacatcaaacaatatcagaatgat

SEQ ID NO: 7497 - DNA, 122 bp, Homo sapiens
  misc_feature (61)..(62): /note="This region represents a CpG dinucleotide"
  misc_feature (61)..(61): /note="Nucleotide may be methylated to form 5-methylcytosine"
gttttaaaagagataaaattgccatccttggtttttcacagctaaagggtttgactatttcgaatttcaggttgaaaaagtcgcactgagatgtcctgccagcaaaaccagcagcagtgcca

SEQ ID NO: 7498 - DNA, 122 bp, Homo sapiens
  misc_feature (61)..(62): /note="This region represents a CpG dinucleotide"
  misc_feature (61)..(61): /note="Nucleotide may be methylated to form 5-methylcytosine"
gacgtgacaggaccgggcctggggaagcgtgtgctggcgtcagggagaagacggcagccgcgacatctggcacctggggctgcagagcctgagcaccccggaccgcgcccggcgagggcggc

SEQ ID NO: 7499 - DNA, 122 bp, Homo sapiens
  misc_feature (61)..(62): /note="This region represents a CpG dinucleotide"
  misc_feature (61)..(61): /note="Nucleotide may be methylated to form 5-methylcytosine"
cagtacacatgcttgtgcctgccctcttaccgatgctgagtgtgttgaatgtgaacgaggcgtgtgggaccatggtgagtcattagacacaagtaatgagctttgttataggtgaatgttga

SEQ ID NO: 7500 - DNA, 122 bp, Homo sapiens
  misc_feature (61)..(62): /note="This region represents a CpG dinucleotide"
  misc_feature (61)..(61): /note="Nucleotide may be methylated to form 5-methylcytosine"
gttggtgagaaagttggcaggagctggtcaggcaagaattgatttcctgagtgtccactgcgtgctcctctctgtgggaggcacaggtagatgcacggtcacagctccactgggcatgtgca

SEQ ID NO: 7501 - DNA, 122 bp, Homo sapiens
  misc_feature (61)..(62): /note="This region represents a CpG dinucleotide"
  misc_feature (61)..(61): /note="Nucleotide may be methylated to form 5-methylcytosine"
gaacactctagtactgaaagccatgctgattctttatggccatttgttattgccccacagcgtgattttagtccctctgtgtgaggatggaatgctaatcaaagcttcaatagaacagaagt

SEQ ID NO: 7502 - DNA, 122 bp, Homo sapiens
  misc_feature (61)..(62): /note="This region represents a CpG dinucleotide"
  misc_feature (61)..(61): /note="Nucleotide may be methylated to form 5-methylcytosine"
ctgagcttagaaaagcatgcccattctaaacatgttttttggagttatgaagtgtttatgcggggacatcaagagatacatcttagccatgaagctcaaaaattagcaagaatcctgacaag

SEQ ID NO: 7503 - DNA, 122 bp, Homo sapiens
  misc_feature (61)..(62): /note="This region represents a CpG dinucleotide"
  misc_feature (61)..(61): /note="Nucleotide may be methylated to form 5-methylcytosine"
caccaagccattcatgagggatctattcccatgatccagacacctcccattaggcctcaccgccaatcttggggatcagatttcaacatgaggcttgaggggaatacatatccaaactatag

SEQ ID NO: 7504 - DNA, 122 bp, Homo sapiens
  misc_feature (61)..(62): /note="This region represents a CpG dinucleotide"
  misc_feature (61)..(61): /note="Nucleotide may be methylated to form 5-methylcytosine"
agtgaggtgggttctatggtgggcgaaggcttcatcgaagtcctgaccaagaagcagcgccgcctgctggaggaagagagaagaaagaaggagcaggccgtgcaggtgaggggcggagggtg

SEQ ID NO: 7505 - DNA, 122 bp, Homo sapiens
  misc_feature (61)..(62): /note="This region represents a CpG dinucleotide"
  misc_feature (61)..(61): /note="Nucleotide may be methylated to form 5-methylcytosine"
gcaaggcaagagcgatcaaaaggagaatttggtagactgaaatcctggaggtgaactaggcgagtaatgttaggtctaaggcatggctgcatttttgcatggtctaaagtggaaacaagata

SEQ ID NO: 7506 - DNA, 122 bp, Homo sapiens
  misc_feature (61)..(62): /note="This region represents a CpG dinucleotide"
  misc_feature (61)..(61): /note="Nucleotide may be methylated to form 5-methylcytosine"
ccaatcgccccatgcacgctgccaggtgatgactgtaaatggtcctctgaatcagtgactcgctgagggaatcaggaagaacaatcttacctttctgctcaagctcaggctcacagtttaat

SEQ ID NO: 7507 - DNA, 122 bp, Homo sapiens
  misc_feature (61)..(62): /note="This region represents a CpG dinucleotide"
  misc_feature (61)..(61): /note="Nucleotide may be methylated to form 5-methylcytosine"
ccgcccgcctcggcctcccaaagtgctgggattataggcgtgagccaccgcgcccagccgcgcccggtttttgttgttgtttttgtttctaaaaacagcgtctcgctctgtggcccaggcag

SEQ ID NO: 7508 - DNA, 122 bp, Homo sapiens
  misc_feature (61)..(62): /note="This region represents a CpG dinucleotide"
  misc_feature (61)..(61): /note="Nucleotide may be methylated to form 5-methylcytosine"
ggcccgcggggccctagccgaggccgtagtaggtggaatacggggcagccacggaggaatcgggggcgaggcgcggagaggccccggatgcagcggtcccgccccgagaacggagcgcgcgg

SEQ ID NO: 7509 - DNA, 122 bp, Homo sapiens
  misc_feature (61)..(62): /note="This region represents a CpG dinucleotide"
  misc_feature (61)..(61): /note="Nucleotide may be methylated to form 5-methylcytosine"
tgtctcaacaaagaaaagaaaacaaaacaaaatcttcgaaatagcactagtggatttgggcgttacatggtgtcttaggatacctttagctgactcagctggcttaaacaatagggaactat

SEQ ID NO: 7510 - DNA, 122 bp, Homo sapiens
  misc_feature (61)..(62): /note="This region represents a CpG dinucleotide"
  misc_feature (61)..(61): /note="Nucleotide may be methylated to form 5-methylcytosine"
gagaaagctgagtcaggctgaatcagcccaagtaagtctaagaaatccactgaaagacatcgaaacctaatgttcaactttgtctataaattgtatgacttttcacacacttacataataat

SEQ ID NO: 7511 - DNA, 122 bp, Homo sapiens
  misc_feature (61)..(62): /note="This region represents a CpG dinucleotide"
  misc_feature (61)..(61): /note="Nucleotide may be methylated to form 5-methylcytosine"
gtgtggcctgtgagccatagtttgctgaccctgaactagatattaatccgatgcttgccacgtattgcaggtattttttcccagaatgccacttgtcttttttgtgtggttatttttctttt

SEQ ID NO: 7512 - DNA, 122 bp, Homo sapiens
  misc_feature (61)..(62): /note="This region represents a CpG dinucleotide"
  misc_feature (61)..(61): /note="Nucleotide may be methylated to form 5-methylcytosine"
ggatatggattggatatggctttctgcgtccaactgcactctactcctaagtaccaggaacgtgttaactctcagttgcacaaggaaaaatatctcttgataagtcatccccaaagaattct

SEQ ID NO: 7513 - DNA, 122 bp, Homo sapiens
  misc_feature (61)..(62): /note="This region represents a CpG dinucleotide"
  misc_feature (61)..(61): /note="Nucleotide may be methylated to form 5-methylcytosine"
tttgcagagtgcttcaccttctaaatgaagcctggagcgccatttcagactgaatcaaaccgtagatgccatgtgtacctacgcaacaaatctgcgcattctgcacgtgtatcccggaacgt

SEQ ID NO: 7514 - DNA, 122 bp, Homo sapiens
  misc_feature (61)..(62): /note="This region represents a CpG dinucleotide"
  misc_feature (61)..(61): /note="Nucleotide may be methylated to form 5-methylcytosine"
tttatgagaaggtagcacctgcgtcctccatcagcacccttttaacgggcaagcacatcacgcaaataacaaatgtcgcatgccttttatgtgtcaggcggcctgtaatgatcagatgatga

SEQ ID NO: 7515 - DNA, 122 bp, Homo sapiens
  misc_feature (61)..(62): /note="This region represents a CpG dinucleotide"
  misc_feature (61)..(61): /note="Nucleotide may be methylated to form 5-methylcytosine"
ggaatgagctgtcctggatccagcttcctgtgatccataggtggcaggacacttgcagggcgtgacgctggattctgggggttcccgggtaccctcccttctcaagaggaagaaaggccagg

SEQ ID NO: 7516 - DNA, 122 bp, Homo sapiens
  misc_feature (61)..(62): /note="This region represents a CpG dinucleotide"
  misc_feature (61)..(61): /note="Nucleotide may be methylated to form 5-methylcytosine"
ttttttttggaatgcctcactgtcccacccataacagtactgtcgtgtgcattcatttatcgaatacattagctaggggtgcgggtccagaggggagtgtcagtggagaagggaaacacact

SEQ ID NO: 7517 - DNA, 122 bp, Homo sapiens
  misc_feature (61)..(62): /note="This region represents a CpG dinucleotide"
  misc_feature (61)..(61): /note="Nucleotide may be methylated to form 5-methylcytosine"
tttgaggtggggctgagtgggccctccctgctcctcagcagctccagcgaccaccctagacgtgctagggagatgacaccctgagccctgctcagaagggggcaccacttgcgagtaggccc

SEQ ID NO: 7518 - DNA, 122 bp, Homo sapiens
  misc_feature (61)..(62): /note="This region represents a CpG dinucleotide"
  misc_feature (61)..(61): /note="Nucleotide may be methylated to form 5-methylcytosine"
aagcttccaatcaggagaaggtgaagggggagcatgcatgtcacatggtaaaagagggagcgaaagagaagagaggacttccctaaagttagtgtcagaggtgaaagtagatcccatgtctc

SEQ ID NO: 7519 - DNA, 122 bp, Homo sapiens
  misc_feature (61)..(62): /note="This region represents a CpG dinucleotide"
  misc_feature (61)..(61): /note="Nucleotide may be methylated to form 5-methylcytosine"
ttggctattaagtcatcgccactgtagtgactcaggcaggcatcatctctactaagccagcgacagccttacttttgggcctcagcagactgatatatgtatgatcattccaaagcaaggga

SEQ ID NO: 7520 - DNA, 122 bp, Homo sapiens
  misc_feature (61)..(62): /note="This region represents a CpG dinucleotide"
  misc_feature (61)..(61): /note="Nucleotide may be methylated to form 5-methylcytosine"
ctcctcagttttgtggagcctgatctcttttccaaggaagaggtgggagattttattcaacgctaccaggatattgagaaagaatctgagtcaggcaagttcctttcctgcaaatcatcccc

SEQ ID NO: 7521 - DNA, 122 bp, Homo sapiens
  misc_feature (61)..(62): /note="This region represents a CpG dinucleotide"
  misc_feature (61)..(61): /note="Nucleotide may be methylated to form 5-methylcytosine"
taaatctgtctaaccgcagttgatgcatgagttacatttctacactaacctgcaagacaccgaaaagctaaacagagacttcttttaggtaaaataaacacaagctttacttagggtaagta

SEQ ID NO: 7522 - DNA, 122 bp, Homo sapiens
  misc_feature (61)..(62): /note="This region represents a CpG dinucleotide"
  misc_feature (61)..(61): /note="Nucleotide may be methylated to form 5-methylcytosine"
ttgagcaatgttctgtttgttaaagctgcatttcagaagcttgtatcctcctaaaacaaccgtgatcttactgggggagagagaggtgctacaacagatattgattttagtttttctaagta

SEQ ID NO: 7523 - DNA, 122 bp, Homo sapiens
  misc_feature (61)..(62): /note="This region represents a CpG dinucleotide"
  misc_feature (61)..(61): /note="Nucleotide may be methylated to form 5-methylcytosine"
tggtgtttgcttgtttctccatcttctttgtgtttcccgtaaatggtagttaaccctgcacgttttattagatttaggttcaattatttttttttgcaggaatccttcatcagtagtgctgt

SEQ ID NO: 7524 - DNA, 122 bp, Homo sapiens
  misc_feature (61)..(62): /note="This region represents a CpG dinucleotide"
  misc_feature (61)..(61): /note="Nucleotide may be methylated to form 5-methylcytosine"
caccctgctcctgctgctgtctgactctgagacaacacggccgcgccaactcgctaagaccggcccagcccacggagtaatcctcaatacgctgtcacatacacgaaaagaaaatcaatcag

SEQ ID NO: 7525 - DNA, 122 bp, Homo sapiens
  misc_feature (61)..(62): /note="This region represents a CpG dinucleotide"
  misc_feature (61)..(61): /note="Nucleotide may be methylated to form 5-methylcytosine"
gaaccagttccctcccaccttttgtttggagccagtgattcagctgagcacttctgggtccggaaatgcctcagcaccagaatcaagttcacaagaaagctgaatcaggagcgtttgtctcg

SEQ ID NO: 7526 - DNA, 122 bp, Homo sapiens
  misc_feature (61)..(62): /note="This region represents a CpG dinucleotide"
  misc_feature (61)..(61): /note="Nucleotide may be methylated to form 5-methylcytosine"
atggggttgggctggtctttccagagtcagcagtaggaaggagttccgctgcactcaaaacgaaagccctcgattagcactgtacattttctgctgacaagtaaacatgaaaaagaggacga

SEQ ID NO: 7527 - DNA, 122 bp, Homo sapiens
  misc_feature (61)..(62): /note="This region represents a CpG dinucleotide"
  misc_feature (61)..(61): /note="Nucleotide may be methylated to form 5-methylcytosine"
tctactaccagaaggttgctaccagtaacgcaagtgataacttatgttgattattcacaccgttttcttcatccataaaataaggagactgggactaaatggcctattaaggttcttctgaa

SEQ ID NO: 7528 - DNA, 122 bp, Homo sapiens
  misc_feature (61)..(62): /note="This region represents a CpG dinucleotide"
  misc_feature (61)..(61): /note="Nucleotide may be methylated to form 5-methylcytosine"
aaaaaaaaaacctctagaaaaccagactcaaaagaagaggaaattgtggtaaaccacagtcgcataagagcagggtaatgtaagtgccctctgtctaacttaaagtagtgttatgactatac

SEQ ID NO: 7529 - DNA, 122 bp, Homo sapiens
  misc_feature (61)..(62): /note="This region represents a CpG dinucleotide"
  misc_feature (61)..(61): /note="Nucleotide may be methylated to form 5-methylcytosine"
tttgtaatttcagggcttaagcactattatcctaatccaagttcacagtcctgttgttgtcgaggagggttcaaaatcatttggagataatcaagctcagacagcttaggataggtgagaag

SEQ ID NO: 7530 - DNA, 122 bp, Homo sapiens
  misc_feature (61)..(62): /note="This region represents a CpG dinucleotide"
  misc_feature (61)..(61): /note="Nucleotide may be methylated to form 5-methylcytosine"
acttgccagcttaaaacagcacatttttctcacaatttatgtggattaggaatctggacacggcttagctagatcttctgctgagtgtctcataagactgtaatgaggatgttggtcaggac

SEQ ID NO: 7531 - DNA, 122 bp, Homo sapiens
  misc_feature (61)..(62): /note="This region represents a CpG dinucleotide"
  misc_feature (61)..(61): /note="Nucleotide may be methylated to form 5-methylcytosine"
atacatttttggtttttttttcccctcttgcttcagtgcaataaatcacagcagttcaggcgtaaaattacctgcaatttgtgagcaggtcttagacgcatgctgttgagagcagtgcccag

SEQ ID NO: 7532 - DNA, 122 bp, Homo sapiens
  misc_feature (61)..(62): /note="This region represents a CpG dinucleotide"
  misc_feature (61)..(61): /note="Nucleotide may be methylated to form 5-methylcytosine"
cttttgcagctggcttatctcacttacacagcatcttcagggctcatgcatgtggtagcccgtgccagaatttccttccttctgaagacggaagagtatttcattatgtgcctatagcacac

SEQ ID NO: 7533 - DNA, 122 bp, Homo sapiens
  misc_feature (61)..(62): /note="This region represents a CpG dinucleotide"
  misc_feature (61)..(61): /note="Nucleotide may be methylated to form 5-methylcytosine"
gaaactatatatggtaaaatctatttcttaaacacagccttactgcacacaatgaaagaacgaagtcaccaagtcttaaaatgattgacatgggggaggaatttcaaggattaagatgatac

SEQ ID NO: 7534 - DNA, 122 bp, Homo sapiens
  misc_feature (61)..(62): /note="This region represents a CpG dinucleotide"
  misc_feature (61)..(61): /note="Nucleotide may be methylated to form 5-methylcytosine"
ggaactccataggtagaattcctgagctggaggaacgtccctcattcaagtaaaggaagacgagtgaggttacagagcaaaagagggagacattcttagagatgaagatggagaagtacata

SEQ ID NO: 7535 - DNA, 122 bp, Homo sapiens
  misc_feature (61)..(62): /note="This region represents a CpG dinucleotide"
  misc_feature (61)..(61): /note="Nucleotide may be methylated to form 5-methylcytosine"
cccgcacttccccacgttcctctctcctggattggatttctggaaggttctgctgggccacgtcccgtcaggtcctcaggaacacggcatgcacaaccacacaccccgtctgcaggggctgc

SEQ ID NO: 7536 - DNA, 122 bp, Homo sapiens
  misc_feature (61)..(62): /note="This region represents a CpG dinucleotide"
  misc_feature (61)..(61): /note="Nucleotide may be methylated to form 5-methylcytosine"
cctcttcccctgcgaggccgagagggtgcagagctggtggcttcaggaggtggctgtgagcgcgggtctggggccaagagcagaggacaggagaagactgccaagccaccaccggtcctgcg

SEQ ID NO: 7537 - DNA, 122 bp, Homo sapiens
  misc_feature (61)..(62): /note="This region represents a CpG dinucleotide"
  misc_feature (61)..(61): /note="Nucleotide may be methylated to form 5-methylcytosine"
agaattcggtcttacctgaatgatctcagcatccgataggactttcctaaatcagatactcgtctacagaatggacccacagccaactccatctgaaatattaaaatatactccattgttgt

SEQ ID NO: 7538 - DNA, 122 bp, Homo sapiens
  misc_feature (61)..(62): /note="This region represents a CpG dinucleotide"
  misc_feature (61)..(61): /note="Nucleotide may be methylated to form 5-methylcytosine"
ggtttagaattgccactggcaaaaaaggaatttggaccacaagctagggtactgttattacgaatacggtgacaaagaggttgggagcttcacccaaaccctgaagatttcaccatcccaca

SEQ ID NO: 7539 - DNA, 122 bp, Homo sapiens
  misc_feature (61)..(62): /note="This region represents a CpG dinucleotide"
  misc_feature (61)..(61): /note="Nucleotide may be methylated to form 5-methylcytosine"
ctgaagtatgcatactgtacaggcaaggttaaacgaaactccacgaagaaaaatgcaaaacgctcaacgctccagaagcccccagcggcccccggcagccaccttcctccctgcagaggcac

SEQ ID NO: 7540 - DNA, 122 bp, Homo sapiens
  misc_feature (61)..(62): /note="This region represents a CpG dinucleotide"
  misc_feature (61)..(61): /note="Nucleotide may be methylated to form 5-methylcytosine"
ttgccagtgtttcctgcttcgtgtctcccaggaaaggggatgctccacttaagctgagtacgacagacagggaatcaaataactaagggaaagtaggtggaaatggggattacggactcggg

SEQ ID NO: 7541 - DNA, 122 bp, Homo sapiens
  misc_feature (61)..(62): /note="This region represents a CpG dinucleotide"
  misc_feature (61)..(61): /note="Nucleotide may be methylated to form 5-methylcytosine"
gctcattgtatttcaatgtgaatgattcattcattcaccagaaactttgagtgtccccaccgtgcccatacactgctctcagctccagactgctcttagctccatgattctgccctcagcgt

SEQ ID NO: 7542 - DNA, 122 bp, Homo sapiens
  misc_feature (61)..(62): /note="This region represents a CpG dinucleotide"
  misc_feature (61)..(61): /note="Nucleotide may be methylated to form 5-methylcytosine"
tccctagatgaaaggggccacagagatgagctgttattatgcttgttacttccctctcaccgcttctgcctccctcaaggtggctcttctcagcctcctggggcttgatggtgccctagaag

SEQ ID NO: 7543 - DNA, 122 bp, Homo sapiens
  misc_feature (61)..(62): /note="This region represents a CpG dinucleotide"
  misc_feature (61)..(61): /note="Nucleotide may be methylated to form 5-methylcytosine"
cagacaaaatgtgcagctcatccaaaatagctgagtagttggcaagaaccaagcctgaagcgcagctgtcctttctaactgaaacctaaaattgttgggctcttaattaatgttggaaggct

SEQ ID NO: 7544 - DNA, 122 bp, Homo sapiens
  misc_feature (61)..(62): /note="This region represents a CpG dinucleotide"
  misc_feature (61)..(61): /note="Nucleotide may be methylated to form 5-methylcytosine"
accaggccaggcttggctttctgacccttgtcagacagtttaccctccaaatgacctatccgtttagtctttttcaatgtagttgtatcgatgtggccttatagtccatcacctagaaaaac

SEQ ID NO: 7545 - DNA, 122 bp, Homo sapiens
  misc_feature (61)..(62): /note="This region represents a CpG dinucleotide"
  misc_feature (61)..(61): /note="Nucleotide may be methylated to form 5-methylcytosine"
ccaagccttccttttattcccttagtcctccatactgctgctctgtgttggcattaatcacgttgtcgtctgcgtgttggatttaccctattgtctctctctgagcctcttgagggcaggaa

SEQ ID NO: 7546 - DNA, 122 bp, Homo sapiens
  misc_feature (61)..(62): /note="This region represents a CpG dinucleotide"
  misc_feature (61)..(61): /note="Nucleotide may be methylated to form 5-methylcytosine"
ctcccacgacgtttgttttgtacttgtgttacagcaacacggtcacattgtgccacatcacgagtttacaacccatgtgtgtctccggtctggatggtgaaatcctcactgatagtacctgc

SEQ ID NO: 7547 - DNA, 122 bp, Homo sapiens
  misc_feature (61)..(62): /note="This region represents a CpG dinucleotide"
  misc_feature (61)..(61): /note="Nucleotide may be methylated to form 5-methylcytosine"
tgacttcggcgccccgcgagttgggtgtgtgcggttgggggcggcccagagtgtgccccacgcctgccagtcgggtaggccagcctccctggagagaggggggcctccccaaggtgggacgg

SEQ ID NO: 7548 - DNA, 122 bp, Homo sapiens
  misc_feature (61)..(62): /note="This region represents a CpG dinucleotide"
  misc_feature (61)..(61): /note="Nucleotide may be methylated to form 5-methylcytosine"
ctcagcttaaatcagggagtccctgaatggggaaaacattttcatcttgtttcttctaaccgcctactgatacttggcatttcctccaattatgagcataggctgtcagccacagtggtatt

SEQ ID NO: 7549 - DNA, 122 bp, Homo sapiens
  misc_feature (61)..(62): /note="This region represents a CpG dinucleotide"
  misc_feature (61)..(61): /note="Nucleotide may be methylated to form 5-methylcytosine"
gaggaaaccaggagtgtgcactcagcagccagcattaaagagaagcatgcaaatcaccctcggcttcctttgcttttaaatatgagttattattgtgaaagcagtaattaaatcttagaact

SEQ ID NO: 7550 - DNA, 122 bp, Homo sapiens
  misc_feature (61)..(62): /note="This region represents a CpG dinucleotide"
  misc_feature (61)..(61): /note="Nucleotide may be methylated to form 5-methylcytosine"
tgttgaagattttagtgaaatcgagtgaaagctgtactaataaggacagaaattatcacacgtgaaaggagagatgggatgtatacaaattttaaatatggtaggcaaaggaaaagaagtca

SEQ ID NO: 7551 - DNA, 122 bp, Homo sapiens
  misc_feature (61)..(62): /note="This region represents a CpG dinucleotide"
  misc_feature (61)..(61): /note="Nucleotide may be methylated to form 5-methylcytosine"
ttgtaaattgaggacaagaatacccatctcatgaggctactgaaaggattaaatgtaaagcgttttgcaagtgcctcatctgtggcaagccttcatgtttgttatacagtaggtatgagata

SEQ ID NO: 7552 - DNA, 122 bp, Homo sapiens
  misc_feature (61)..(62): /note="This region represents a CpG dinucleotide"
  misc_feature (61)..(61): /note="Nucleotide may be methylated to form 5-methylcytosine"
ttgagcagaaggttaaaagtattgctttctgagaagtcccattcggtcactcctctctctcgcaagagagacagctgttctcccttttcttttgcctataaacttccgctcctaaactaaaa

SEQ ID NO: 7553 - DNA, 122 bp, Homo sapiens
  misc_feature (61)..(62): /note="This region represents a CpG dinucleotide"
  misc_feature (61)..(61): /note="Nucleotide may be methylated to form 5-methylcytosine"
acttactctttctaaaggtcagtttcctcatctgaaatgtgaataaatagggttgttgaacggattaagtaaatcaatgcatttaaagaacctatgacatagtaaacattcaaataaactag

SEQ ID NO: 7554 - DNA, 122 bp, Homo sapiens
  misc_feature (61)..(62): /note="This region represents a CpG dinucleotide"
  misc_feature (61)..(61): /note="Nucleotide may be methylated to form 5-methylcytosine"
cccccaaagtaatgcccggatcctggcagtgacggcttcttctagcaaagtgaagagaggcggaggcccagaaagccagaagccaggtggggcatgcctctgtgtcaccctccctcaagccc

SEQ ID NO: 7555 - DNA, 122 bp, Homo sapiens
  misc_feature (61)..(62): /note="This region represents a CpG dinucleotide"
  misc_feature (61)..(61): /note="Nucleotide may be methylated to form 5-methylcytosine"
tcctcgggagtgagcagaaccctcataacactgggcggagtgtgacggtggagaagtcggcgtgaggctagaaagagctggttgtgaagggttgggaagacccggcaaagcagtccggactt

SEQ ID NO: 7556 - DNA, 122 bp, Homo sapiens
  misc_feature (61)..(62): /note="This region represents a CpG dinucleotide"
  misc_feature (61)..(61): /note="Nucleotide may be methylated to form 5-methylcytosine"
ggagttatttaagccatctacagagctgaggaaacagtgtaatgtgtctctgccccattgcgcagctccacccattgtgccccaggccagcccgcgtcacctacacttccttctgtgccctg

SEQ ID NO: 7557 - DNA, 122 bp, Homo sapiens
  misc_feature (61)..(62): /note="This region represents a CpG dinucleotide"
  misc_feature (61)..(61): /note="Nucleotide may be methylated to form 5-methylcytosine"
gaacttgttttcattcataactttttccttttccttcttccgtcaactatttattcagtgcggattgcagagggcgcagctccaccgtggtaacttgcaatgtggccgcccctgcgctggct

SEQ ID NO: 7558 - DNA, 122 bp, Homo sapiens
  misc_feature (61)..(62): /note="This region represents a CpG dinucleotide"
  misc_feature (61)..(61): /note="Nucleotide may be methylated to form 5-methylcytosine"
tacagattgctcaaccctcacaaaatgttttgtaagtcattgttggaccacggacttgagcgctcgaggccatcctatccaggttgatcccattgctgtggaatgttacagcacaggggtcc

SEQ ID NO: 7559 - DNA, 122 bp, Homo sapiens
  misc_feature (61)..(62): /note="This region represents a CpG dinucleotide"
  misc_feature (61)..(61): /note="Nucleotide may be methylated to form 5-methylcytosine"
ctgcatctgtgggggctgcctcagccctaaccatgtcaacatagtgttgaaattcagttccgagaaacacttgtgggtttgtagactctatggcatctggaagtgaaagagggacacatctc

SEQ ID NO: 7560 - DNA, 122 bp, Homo sapiens
  misc_feature (61)..(62): /note="This region represents a CpG dinucleotide"
  misc_feature (61)..(61): /note="Nucleotide may be methylated to form 5-methylcytosine"
acagtactgggcagcttgaggtctcaccctgtggtcacagtctcagagctctgcaaaccccgaaaacctgtgagaaaaatcaacccaagaggtgttaaaaggactcacccatccgggcagca

SEQ ID NO: 7561 - DNA, 122 bp, Homo sapiens
  misc_feature (61)..(62): /note="This region represents a CpG dinucleotide"
  misc_feature (61)..(61): /note="Nucleotide may be methylated to form 5-methylcytosine"
tgtgtgagaagggagtgctggcctggaccatgactgtatgcactggtctgaccagacaatcgcttctcagtcttgcttagagtcagggattagcgttgtgtgccttttcccttgcttggtat

SEQ ID NO: 7562 - DNA, 122 bp, Homo sapiens
  misc_feature (61)..(62): /note="This region represents a CpG dinucleotide"
  misc_feature (61)..(61): /note="Nucleotide may be methylated to form 5-methylcytosine"
atattaaagttgctgcagttaaaaagcccgtagttggatctcgggagcaggcgtgaggtccgctgcgaggcgagccaccgcccgtccccacccgttaactctcggcgccccctcgatgctct

SEQ ID NO: 7563 - DNA, 122 bp, Homo sapiens
  misc_feature (61)..(62): /note="This region represents a CpG dinucleotide"
  misc_feature (61)..(61): /note="Nucleotide may be methylated to form 5-methylcytosine"
aaatcacgatcagaaacccaaacagaagcatccctcttgaattcgtgctgctgaaaaacacggaataaattcagcctgcagacacagaatctaatcagcagctgttttctgaatccagagcc

SEQ ID NO: 7564 - DNA, 122 bp, Homo sapiens
  misc_feature (61)..(62): /note="This region represents a CpG dinucleotide"
  misc_feature (61)..(61): /note="Nucleotide may be methylated to form 5-methylcytosine"
tggaacagaggtgaatgtatgctggccactcttgcccctccaggagtcactgtctataaccgcataacacccaagaataccagaagtaagtgagtaataggagtaattctggcaggaattgg

SEQ ID NO: 7565 - DNA, 122 bp, Homo sapiens
  misc_feature (61)..(62): /note="This region represents a CpG dinucleotide"
  misc_feature (61)..(61): /note="Nucleotide may be methylated to form 5-methylcytosine"
ttcccaaaggggttgctgggggaaccgcgtgttccgccccggtcaaggccacaaagctggcgtcagcggggctcacaaaacacctggcagcgccactcccctcaggctgcccgtaacctaga

SEQ ID NO: 7566 - DNA, 122 bp, Homo sapiens
  misc_feature (61)..(62): /note="This region represents a CpG dinucleotide"
  misc_feature (61)..(61): /note="Nucleotide may be methylated to form 5-methylcytosine"
gttgtagggattttagctttcactctgataaaaaaagaaaactgcagaataattttgaatcgaagagttacatgattcataacaggatcccttttgttgccaggggcaaagaggcaggagca

SEQ ID NO: 7567 - DNA, 122 bp, Homo sapiens
  misc_feature (61)..(62): /note="This region represents a CpG dinucleotide"
  misc_feature (61)..(61): /note="Nucleotide may be methylated to form 5-methylcytosine"
ccctcagctcttccctctcactgactttgaagctctgtgcaaacaggaagtgaaggcttacgtcagaattgtcaactgcctggctgagtggtgaacgcatgcccccaacacagagcttcttg

SEQ ID NO: 7568 - DNA, 122 bp, Homo sapiens
  misc_feature (61)..(62): /note="This region represents a CpG dinucleotide"
  misc_feature (61)..(61): /note="Nucleotide may be methylated to form 5-methylcytosine"
gaatggactatggcagaaatgacagtcataaaatacaccatggcttcttcttgctttcaccgtgttgggttgttggttctggaaaaagccagctgctatataggggggttctcaagaaacgc

SEQ ID NO: 7569 - DNA, 122 bp, Homo sapiens
  misc_feature (61)..(62): /note="This region represents a CpG dinucleotide"
  misc_feature (61)..(61): /note="Nucleotide may be methylated to form 5-methylcytosine"
actgcacagccagcctccctgtgccaacccacaaagtggatcagtgccttgcacagcacccgcgccgccaccaatagacgcattcagttgctgatttagatagaaataaatgtttatgaatg

SEQ ID NO: 7570 - DNA, 122 bp, Homo sapiens
  misc_feature (61)..(62): /note="This region represents a CpG dinucleotide"
  misc_feature (61)..(61): /note="Nucleotide may be methylated to form 5-methylcytosine"
taacaagggtgataatgagcatagtggatttactaactagacaccagtgatcaagtaggtcggaaattaagcctttgtagttgacaaggaaactaaagtggttagctaaggttaaaagacac

SEQ ID NO: 7571 - DNA, 122 bp, Homo sapiens
  misc_feature (61)..(62): /note="This region represents a CpG dinucleotide"
  misc_feature (61)..(61): /note="Nucleotide may be methylated to form 5-methylcytosine"
gtataaactttaaattatcagtctagggcactgggcactcgcatgcacacacacccccctcgcagataaagatatggaaaggtcagcaatacatgaattcattatggtgttttgttacatct

SEQ ID NO: 7572 - DNA, 122 bp, Homo sapiens
  misc_feature (61)..(62): /note="This region represents a CpG dinucleotide"
  misc_feature (61)..(61): /note="Nucleotide may be methylated to form 5-methylcytosine"
gtaccggctgatggattaaaaaataaaaacaagcccatgaatgtagttctgatacagcagcgatctaaagatgaggtgtttattagttctaagctctgtgttatttcattacttaaagagag

SEQ ID NO: 7573 - DNA, 122 bp, Homo sapiens
  misc_feature (61)..(62): /note="This region represents a CpG dinucleotide"
  misc_feature (61)..(61): /note="Nucleotide may be methylated to form 5-methylcytosine"
acaggggcagggtgtgtgagtgagttctcagaggtgtcttcctgctactctctgcatcctcgacaacttccagcattttgccctgctgatcttggggatttcactcttcctctgaaccggct

SEQ ID NO: 7574 - DNA, 122 bp, Homo sapiens
  misc_feature (61)..(62): /note="This region represents a CpG dinucleotide"
  misc_feature (61)..(61): /note="Nucleotide may be methylated to form 5-methylcytosine"
tttctaaacatggaaccagttctgccactggcttctgtgcgacactggtgaacttgctcacgtgtttttgggtttcaattcccctgccacattactttgtttaaaagaaccatgatcctaca

SEQ ID NO: 7575 - DNA, 122 bp, Homo sapiens
  misc_feature (61)..(62): /note="This region represents a CpG dinucleotide"
  misc_feature (61)..(61): /note="Nucleotide may be methylated to form 5-methylcytosine"
gcggtggaacgccgcccgagtaagtgtgtctatgaggcgcgaggctggagtgggtggtgccggctgttcccaggagggatacggcttggcttggttgagggtaaggagtcaagttcgggtgt

SEQ ID NO: 7576 - DNA, 122 bp, Homo sapiens
  misc_feature (61)..(62): /note="This region represents a CpG dinucleotide"
  misc_feature (61)..(61): /note="Nucleotide may be methylated to form 5-methylcytosine"
agtgtttactgaggttaatctcaaaagataacaatcctgagcaatcaaatcactgtcaggcgattgctacaaacttagcagtggaaaggaaaaggaacacaaaatctgaagtttaacttaca

SEQ ID NO: 7577 - DNA, 122 bp, Homo sapiens
  misc_feature (61)..(62): /note="This region represents a CpG dinucleotide"
  misc_feature (61)..(61): /note="Nucleotide may be methylated to form 5-methylcytosine"
tcaaccctccttctctgcgggatccttttgcagcctccaaggcatagacagggcggtgcacggctccctgtgaccagcacaccagggtcttgcccacaatgccgtgtgttcctgactcacac

SEQ ID NO: 7578 - DNA, 122 bp, Homo sapiens
  misc_feature (61)..(62): /note="This region represents a CpG dinucleotide"
  misc_feature (61)..(61): /note="Nucleotide may be methylated to form 5-methylcytosine"
ccagtcagtgagaaagaatgaagaggacaggaggaccacctctcagggcagagctctgagcgcagacagcagacagcagacagcagacagcaaggcacatgcgcaataatggacatgcccag

SEQ ID NO: 7579 - DNA, 122 bp, Homo sapiens
  misc_feature (61)..(62): /note="This region represents a CpG dinucleotide"
  misc_feature (61)..(61): /note="Nucleotide may be methylated to form 5-methylcytosine"
gggacccaaggcggggtgtctgggaagccgcaaggagccccgggtggctgaaatggagggcggacagctgggggagggtacctgaccctgaaggggcttaactccgactgacacggagtcac

SEQ ID NO: 7580 - DNA, 122 bp, Homo sapiens
  misc_feature (61)..(62): /note="This region represents a CpG dinucleotide"
  misc_feature (61)..(61): /note="Nucleotide may be methylated to form 5-methylcytosine"
agctctatctattgtgactgcttggcattgtcaacctccgaagttgcctaaatcacccctcggagaagggaagagagtaacaacgctagcaaaaccatttttgttacagacatggttatata

SEQ ID NO: 7581 - DNA, 122 bp, Homo sapiens
  misc_feature (61)..(62): /note="This region represents a CpG dinucleotide"
  misc_feature (61)..(61): /note="Nucleotide may be methylated to form 5-methylcytosine"
attcacatggttcatagaacaaacaatctagccactgaaaaaatgcattctcacatctgtcgttcttcctttctaagctgacagtatttcctaaagcttttttcatatcatgagcttccttg

SEQ ID NO: 7582 - DNA, 122 bp, Homo sapiens
  misc_feature (61)..(62): /note="This region represents a CpG dinucleotide"
  misc_feature (61)..(61): /note="Nucleotide may be methylated to form 5-methylcytosine"
gaagccagggatgcattggttttaatacagcaaaaagtatcccccagggttgcaaaatgacgtgggtttcacagggacaaacagtgatcacattagaaaataatgttatttccaaacacaag

SEQ ID NO: 7583 - DNA, 122 bp, Homo sapiens
  misc_feature (61)..(62): /note="This region represents a CpG dinucleotide"
  misc_feature (61)..(61): /note="Nucleotide may be methylated to form 5-methylcytosine"
tcctcttttcagttcttaaaaatacagtaacgacggattcctctaagccagcagtgaaaacgaaccttgaactgtgagctgactgtaggccgccgatgtttgcttccacatttcaaggtatc

SEQ ID NO: 7584 - DNA, 122 bp, Homo sapiens
  misc_feature (61)..(62): /note="This region represents a CpG dinucleotide"
  misc_feature (61)..(61): /note="Nucleotide may be methylated to form 5-methylcytosine"
ttatatagcctaaccacagaagtggcatcccatcccattctattggttagaagcaagtcacgaggccagttcactctcagagggaagggattacacaagggggtgaattctgggagacagag

SEQ ID NO: 7585 - DNA, 122 bp, Homo sapiens
  misc_feature (61)..(62): /note="This region represents a CpG dinucleotide"
  misc_feature (61)..(61): /note="Nucleotide may be methylated to form 5-methylcytosine"
tcagaaggaacttcagaatttgggcaatgcctcttagccatcattacaaacaattcttcccgtattagagccatttcagtaataacagacaagtcctgacatacaagaatcaggttgccttc

SEQ ID NO: 7586 - DNA, 122 bp, Homo sapiens
  misc_feature (61)..(62): /note="This region represents a CpG dinucleotide"
  misc_feature (61)..(61): /note="Nucleotide may be methylated to form 5-methylcytosine"
tgggacaaaataagattaaaacaggagtcttcgcgtgagcaagttcagaggcgtggagggcggtgtgttcccgggaaggttgatgggtagaggttaggggcaagggcagggggttggaattg

SEQ ID NO: 7587 - DNA, 122 bp, Homo sapiens
  misc_feature (61)..(62): /note="This region represents a CpG dinucleotide"
  misc_feature (61)..(61): /note="Nucleotide may be methylated to form 5-methylcytosine"
ttgatgggattctggccaaggtccccgagtcctgtgatggcaaactgccggacagccagccgccggggccctccacgtcccagaccgaggcgtccctgtcgccgcccgctaagtccacccct

SEQ ID NO: 7588 - DNA, 122 bp, Homo sapiens
  misc_feature (61)..(62): /note="This region represents a CpG dinucleotide"
  misc_feature (61)..(61): /note="Nucleotide may be methylated to form 5-methylcytosine"
tgcacctgtcactgccattgcaccccaccctgccccgctctgcccatctttcctgcttaacgtcatccagtctgtggcactgcacagctccacctgccccaggcacccagttcaccatcttt

SEQ ID NO: 7589 - DNA, 122 bp, Homo sapiens
  misc_feature (61)..(62): /note="This region represents a CpG dinucleotide"
  misc_feature (61)..(61): /note="Nucleotide may be methylated to form 5-methylcytosine"
catctggtggtatttccagggggaggctgatggactcctgaaggaccgcaaccacttcctcggatccacaccatctccagagtctcctttggctgcctatgcaggaagaaaagagaagcaaa

SEQ ID NO: 7590 - DNA, 122 bp, Homo sapiens
  misc_feature (61)..(62): /note="This region represents a CpG dinucleotide"
  misc_feature (61)..(61): /note="Nucleotide may be methylated to form 5-methylcytosine"
agcgtccataaagtttgacagtaacacagccacgcctctcctttgtgtgtggccaggggacgctcttgagctgtcatagaggcggaagtggtgcacaggacgcgcttcatggatgtgcacac

SEQ ID NO: 7591 - DNA, 122 bp, Homo sapiens
  misc_feature (61)..(62): /note="This region represents a CpG dinucleotide"
  misc_feature (61)..(61): /note="Nucleotide may be methylated to form 5-methylcytosine"
ggggacctctcctggcgtctttgatcttctgtttcttggacttcatggcgctctgtactgcgttcccagtatttcttttctcttctcgtttcctgtagattccggctaatggtttcccctgg

SEQ ID NO: 7592 - DNA, 122 bp, Homo sapiens
  misc_feature (61)..(62): /note="This region represents a CpG dinucleotide"
  misc_feature (61)..(61): /note="Nucleotide may be methylated to form 5-methylcytosine"
cgtaccagctgtgcctgttctctttcaaagagcttcctggaagctcagttcagtgacttccgcttacatgtcattaaccaaaactgtgtcacattgccacccgtagctggagacaaggctgg

SEQ ID NO: 7593 - DNA, 122 bp, Homo sapiens
  misc_feature (61)..(62): /note="This region represents a CpG dinucleotide"
  misc_feature (61)..(61): /note="Nucleotide may be methylated to form 5-methylcytosine"
aaatagttaagatcaactggtaaacccagtggagaaaccaatctggttagtcaggtataccgtacaattaacagtttcatcccaataaataaaacaaattttgggatatatatttgcttgcc

SEQ ID NO: 7594 - DNA, 122 bp, Homo sapiens
  misc_feature (61)..(62): /note="This region represents a CpG dinucleotide"
  misc_feature (61)..(61): /note="Nucleotide may be methylated to form 5-methylcytosine"
gcttggataaaaataaccatggaaatcaccattcagcaaaatacaggcatagtggccaggcgtggtggctcacgcctgcaatcccagcactctgggaggcccaggcaggaagatcacctgag

SEQ ID NO: 7595 - DNA, 122 bp, Homo sapiens
  misc_feature (61)..(62): /note="This region represents a CpG dinucleotide"
  misc_feature (61)..(61): /note="Nucleotide may be methylated to form 5-methylcytosine"
aaccaaggtctcagggccctggaaaaggtgtgttctaatcacaagtgctatttccccacccgctcccatgacgggtcagctgcaggcatcagcttcagagaagtgggcttctagggctcctg

SEQ ID NO: 7596 - DNA, 122 bp, Homo sapiens
  misc_feature (61)..(62): /note="This region represents a CpG dinucleotide"
  misc_feature (61)..(61): /note="Nucleotide may be methylated to form 5-methylcytosine"
cgggaggaagcggtccccctcccccaccgtgactctgcgcttcctgccccagccccggggcgggaggagacatttcccgttcacaccaaagttttcctggcagcgcctagacctgggcttag

SEQ ID NO: 7597 - DNA, 122 bp, Homo sapiens
  misc_feature (61)..(62): /note="This region represents a CpG dinucleotide"
  misc_feature (61)..(61): /note="Nucleotide may be methylated to form 5-methylcytosine"
gtatggtttgttacacttaaaacatgaagaaatggagtcaccaatttaagagaaaatttacgtgctaaagttaggttaagtggtatggtagtgaaataaattttgttttctgatttctggat

SEQ ID NO: 7598 - DNA, 122 bp, Homo sapiens
  misc_feature (61)..(62): /note="This region represents a CpG dinucleotide"
  misc_feature (61)..(61): /note="Nucleotide may be methylated to form 5-methylcytosine"
tgggtatgtgacaccctggattccatgcaggtttggcagtaaccagggagaattagaacccgaagctagatttcgaaatagagctctggactgaagcattcttgcacaaccatcccacagat

SEQ ID NO: 7599 - DNA, 122 bp, Homo sapiens
  misc_feature (61)..(62): /note="This region represents a CpG dinucleotide"
  misc_feature (61)..(61): /note="Nucleotide may be methylated to form 5-methylcytosine"
agatttaaaattcttccttctcaattgtattttctaggtctttaatgattttagctgtttcgaatcttcttcacgttctcttttttttaaaataatggagagtgaagtgtgatgtttcaccc

SEQ ID NO: 7600 - DNA, 122 bp, Homo sapiens
  misc_feature (61)..(62): /note="This region represents a CpG dinucleotide"
  misc_feature (61)..(61): /note="Nucleotide may be methylated to form 5-methylcytosine"
tgagctccgcgggtccggaaacaaacacccagccaggtggtggaaggccgccccttcctccgaggctggcacctgattggacagttccacacaagcgcctctgattggctagggatcctgac

SEQ ID NO: 7601 - DNA, 122 bp, Homo sapiens
  misc_feature (61)..(62): /note="This region represents a CpG dinucleotide"
  misc_feature (61)..(61): /note="Nucleotide may be methylated to form 5-methylcytosine"
ataatcttttatctttaaaaatctttataattaaaaaatggtttataatgttgactttcacgttaggtctttgattccacctggaagatattcatgactgtgtgagggaggggtccttctgg

SEQ ID NO: 7602 - DNA, 122 bp, Homo sapiens
  misc_feature (61)..(62): /note="This region represents a CpG dinucleotide"
  misc_feature (61)..(61): /note="Nucleotide may be methylated to form 5-methylcytosine"
agggggtatccggcctcaggcggatactgacgccctgagggcgcggaatagggcggcctgcgcagggcccgccgtctcggccttgcaaaaacagcggcctcttcaaagcccctaccggaacc

SEQ ID NO: 7603 - DNA, 122 bp, Homo sapiens
  misc_feature (61)..(62): /note="This region represents a CpG dinucleotide"
  misc_feature (61)..(61): /note="Nucleotide may be methylated to form 5-methylcytosine"
taggcaatgctaatcacatgaccaaacccaaaggcatcatgggaggggtttcccaggctgcgaatgctgggagatgcacttctttgggggttgccaaagcacagcctcccatagcaggtaaa

SEQ ID NO: 7604 - DNA, 122 bp, Homo sapiens
  misc_feature (61)..(62): /note="This region represents a CpG dinucleotide"
  misc_feature (61)..(61): /note="Nucleotide may be methylated to form 5-methylcytosine"
tggttaaacacagacatgaaaaagagacctatagggaccaattaaggtgtgaaaagacaccggatgccattactcatcaaggaaatgcaaactgtaaccatagtgacctagattgatagcca

SEQ ID NO: 7605 - DNA, 122 bp, Homo sapiens
  misc_feature (61)..(62): /note="This region represents a CpG dinucleotide"
  misc_feature (61)..(61): /note="Nucleotide may be methylated to form 5-methylcytosine"
tgatgacagacgtttgcatcatttccagtttgggactgttctgaatagggctgttctgaacgttcttgtacttgccttggggtgagcataagtattcatttctgttgggtgttttctttgga

SEQ ID NO: 7606 - DNA, 122 bp, Homo sapiens
  misc_feature (61)..(62): /note="This region represents a CpG dinucleotide"
  misc_feature (61)..(61): /note="Nucleotide may be methylated to form 5-methylcytosine"
tttgtacccttaggtgatttcttattgttcattaccatccttttctttcagattgaagaacgtcccttagcatttcttgtagggtagggctagtgatgatgaaatccctcagctgctgctgc

SEQ ID NO: 7607 - DNA, 122 bp, Homo sapiens
  misc_feature (61)..(62): /note="This region represents a CpG dinucleotide"
  misc_feature (61)..(61): /note="Nucleotide may be methylated to form 5-methylcytosine"
ccaggaaggaagcattgtaactttgtggctgaccaggcaggatggtcacacggctcctgacgcaggcccagacgtattcacgaatcactccatagtgattctgatgtgctgccagagttgag

SEQ ID NO: 7608 - DNA, 122 bp, Homo sapiens
  misc_feature (61)..(62): /note="This region represents a CpG dinucleotide"
  misc_feature (61)..(61): /note="Nucleotide may be methylated to form 5-methylcytosine"
ttgacttttgttaatcactaagcttttcccccagcatgtggtgtggagccacagtgaacacgccatagcttagcagctctcagaggctggtctatggatcctagagtctctgggaccctttc

SEQ ID NO: 7609 - DNA, 122 bp, Homo sapiens
  misc_feature (61)..(62): /note="This region represents a CpG dinucleotide"
  misc_feature (61)..(61): /note="Nucleotide may be methylated to form 5-methylcytosine"
ctaggtcccccaggttccatgatccttttcccagaatacccctccccaatctgcatggctcggtccctcccttctctgaagtattgttcaaatgtcatcttctcactgatatcatttctcaa

SEQ ID NO: 7610 - DNA, 122 bp, Homo sapiens
  misc_feature (61)..(62): /note="This region represents a CpG dinucleotide"
  misc_feature (61)..(61): /note="Nucleotide may be methylated to form 5-methylcytosine"
gaatggtgtcacctttctagagggccatctggcaccatgtaatcacgccacagatctttacgaagctcctgctatgtaggaaacactatgcctggcactgggtatccattaaaatgtaaaat

SEQ ID NO: 7611 - DNA, 122 bp, Homo sapiens
  misc_feature (61)..(62): /note="This region represents a CpG dinucleotide"
  misc_feature (61)..(61): /note="Nucleotide may be methylated to form 5-methylcytosine"
gggagccgaattacaagtcggcccaggaagctatctatgtacaaccttgaggcgcaaaatcgagcaaattcgcctagacccattctccctccggctcttcacacctggatggggcgcaagca

SEQ ID NO: 7612 - DNA, 122 bp, Homo sapiens
  misc_feature (61)..(62): /note="This region represents a CpG dinucleotide"
  misc_feature (61)..(61): /note="Nucleotide may be methylated to form 5-methylcytosine"
ttatcccctggactcctgggtgacaaaggtcagttgcctgccctgcagcttgctgtggttcgtagctccgaagctcccaataagctctcggcctgaggaaacaccctcccttggtggttgca

SEQ ID NO: 7613 - DNA, 122 bp, Homo sapiens
  misc_feature (61)..(62): /note="This region represents a CpG dinucleotide"
  misc_feature (61)..(61): /note="Nucleotide may be methylated to form 5-methylcytosine"
agcatcctctatgagtcagctgatttactcattctgtctcactctccttataactaaccccgccaagtagaaactattatgtttccattgtagatcactatactcctaaagaaataagatga

SEQ ID NO: 7614 - DNA, 122 bp, Homo sapiens
  misc_feature (61)..(62): /note="This region represents a CpG dinucleotide"
  misc_feature (61)..(61): /note="Nucleotide may be methylated to form 5-methylcytosine"
cagctgggaagtgagagaccgggatttaagctgatgtttgcgcagccaatgcgcgtcatacgcctctgaattaccttccccttgccccgtgtgtgtgtgatatttgtacttgagctgcctgg

SEQ ID NO: 7615 - DNA, 122 bp, Homo sapiens
  misc_feature (61)..(62): /note="This region represents a CpG dinucleotide"
  misc_feature (61)..(61): /note="Nucleotide may be methylated to form 5-methylcytosine"
ttattgttcaacagaatgatctggttgagcggctttttgtacctcacaatacaaccaaaacgcttactctgtacttagatcaagttgctgtattaatgtagtgtgcaaggctgtgcacaaca

SEQ ID NO: 7616 - DNA, 122 bp, Homo sapiens
  misc_feature (61)..(62): /note="This region represents a CpG dinucleotide"
  misc_feature (61)..(61): /note="Nucleotide may be methylated to form 5-methylcytosine"
ctgtgtccctgtcaaatctcatgtaaaattgtaatccccagtgttggaagtggggcctggcgggaagtatttggatcacgagggcagatcattcatgaatggcttaaagccatccccttggt

SEQ ID NO: 7617 - DNA, 122 bp, Homo sapiens
  misc_feature (61)..(62): /note="This region represents a CpG dinucleotide"
  misc_feature (61)..(61): /note="Nucleotide may be methylated to form 5-methylcytosine"
cctcccaacgggagccgggcgcgggttcgtggccgacagatggcgcctgcgcgttccattcgcctccaagtcgccgaagagcgaacaccccaaacaatcccgaagcgccaccaaaaaaaaaa

SEQ ID NO: 7618 - DNA, 122 bp, Homo sapiens
  misc_feature (61)..(62): /note="This region represents a CpG dinucleotide"
  misc_feature (61)..(61): /note="Nucleotide may be methylated to form 5-methylcytosine"
tgagagaggacagaacctctaaccaggaagaggctgtccccgccaagctccggagaggcgcggaagcatgaccctcaggtatgggaccaggtctataggaaacccatgtggtgtgccctaat

SEQ ID NO: 7619 - DNA, 122 bp, Homo sapiens
  misc_feature (61)..(62): /note="This region represents a CpG dinucleotide"
  misc_feature (61)..(61): /note="Nucleotide may be methylated to form 5-methylcytosine"
ttttcagcgttttgctgcccacacagcacagatctctaagggaaataaacctcgttttctcgatcatctgcctccccattataaagtaaattccacgggctgagcgcggtggctcacgcctg

SEQ ID NO: 7620 - DNA, 122 bp, Homo sapiens
  misc_feature (61)..(62): /note="This region represents a CpG dinucleotide"
  misc_feature (61)..(61): /note="Nucleotide may be methylated to form 5-methylcytosine"
gcagggctctaagcccacacacaaaaggacaaaaaagagctaatccattactgccaagtacgagaacccatcaagcttatgttactttccagaaactctgtgggtgaaggagtgaaaaggaa

SEQ ID NO: 7621 - DNA, 122 bp, Homo sapiens
  misc_feature (61)..(62): /note="This region represents a CpG dinucleotide"
  misc_feature (61)..(61): /note="Nucleotide may be methylated to form 5-methylcytosine"
aagcagttaacgtagcagaggaatggacctgctggctgccacacgggaagttctcagaggcgtccgtggcgaagcctctgtgtcctggagctatcatggttacttccttgctgcttacttct

SEQ ID NO: 7622 - DNA, 122 bp, Homo sapiens
  misc_feature (61)..(62): /note="This region represents a CpG dinucleotide"
  misc_feature (61)..(61): /note="Nucleotide may be methylated to form 5-methylcytosine"
ttataatctcaaaatcaccatcgtcataatgcactcctaagatttattctttgacactagcgttttgatgtggaagacaaggcatacgcctggaccccaggccagtgtgggttcaaatcacg

SEQ ID NO: 7623 - DNA, 122 bp, Homo sapiens
  misc_feature (61)..(62): /note="This region represents a CpG dinucleotide"
  misc_feature (61)..(61): /note="Nucleotide may be methylated to form 5-methylcytosine"
gtctctgccagacatttgcagactgggtttccttcactggggtgccaccagcccctcccacgtttgcagcccaattttgtctcatgtacatgtcttaacactgggttcccctggaaacaggc

SEQ ID NO: 7624 - DNA, 122 bp, Homo sapiens
  misc_feature (61)..(62): /note="This region represents a CpG dinucleotide"
  misc_feature (61)..(61): /note="Nucleotide may be methylated to form 5-methylcytosine"
gctgtaagacgcacggtgtgttttcatgccccgccctgtgcttctgccctcaccatgagacgaacatggtcctcgggagcttcgaatgagacgtggaacatctgtcccaggcacagtcctgc

SEQ ID NO: 7625 - DNA, 122 bp, Homo sapiens
  misc_feature (61)..(62): /note="This region represents a CpG dinucleotide"
  misc_feature (61)..(61): /note="Nucleotide may be methylated to form 5-methylcytosine"
tgcagaatggaggcataagccaagggctttgggtccttagtgttgggagtgagtggaccacgtaagggaaaggaaaaaaatctcgggacctccccaaattcttatgcaaaaggaaaggtgaa

SEQ ID NO: 7626 - DNA, 122 bp, Homo sapiens
  misc_feature (61)..(62): /note="This region represents a CpG dinucleotide"
  misc_feature (61)..(61): /note="Nucleotide may be methylated to form 5-methylcytosine"
gtacccgcccatcttccggccaggatgtgtggtcctggtgagcgattgtcctgtggcgtccgggaccgagtttgtggcccagggttatgtgtgcacttcacacctctgacttttttcagggt

SEQ ID NO: 7627 - DNA, 122 bp, Homo sapiens
  misc_feature (61)..(62): /note="This region represents a CpG dinucleotide"
  misc_feature (61)..(61): /note="Nucleotide may be methylated to form 5-methylcytosine"
gatgagtaacactatattatgaaaaagaggatattgttagtatgaagaagtatgagtaatcgaaggattgtatgagtagctgttccaaactgccaattactggcttgtcaacaatgattcca

SEQ ID NO: 7628 - DNA, 122 bp, Homo sapiens
  misc_feature (61)..(62): /note="This region represents a CpG dinucleotide"
  misc_feature (61)..(61): /note="Nucleotide may be methylated to form 5-methylcytosine"
cacttacctgaggaggaggcaacaggagctcctgacctcagaggctctcctacattcctgcgttctgtaacttagaaagccattgggagtatacattgatagctatatggtattttagggaa

SEQ ID NO: 7629 - DNA, 122 bp, Homo sapiens
  misc_feature (61)..(62): /note="This region represents a CpG dinucleotide"
  misc_feature (61)..(61): /note="Nucleotide may be methylated to form 5-methylcytosine"
tgcaagtacaataacaagtttcacagggccattctttacaatacactttaatatctatgacgcaatgccaaaactcacatcagtgaaattaattctacaaggcacaaaacacaagtgtacaa

SEQ ID NO: 7630 - DNA, 122 bp, Homo sapiens
  misc_feature (61)..(62): /note="This region represents a CpG dinucleotide"
  misc_feature (61)..(61): /note="Nucleotide may be methylated to form 5-methylcytosine"
tagataagttttggaacagtgcctggtatgtggtaggtgctccataaatatacctattgccgttacagtgcaatgtaaattgttacagtgcaatagactttctagtagttctgtttggaaat

SEQ ID NO: 7631 - DNA, 122 bp, Homo sapiens
  misc_feature (61)..(62): /note="This region represents a CpG dinucleotide"
  misc_feature (61)..(61): /note="Nucleotide may be methylated to form 5-methylcytosine"
acaataatgaaatcacctaaggacacattactcagaacatatcctcatcattaagtggcccgtgacggtacaatcaattcttgttatttgtggttatgttctatacagtcactgtggacaat

SEQ ID NO: 7632 - DNA, 122 bp, Homo sapiens
  misc_feature (61)..(62): /note="This region represents a CpG dinucleotide"
  misc_feature (61)..(61): /note="Nucleotide may be methylated to form 5-methylcytosine"
cctgttccctccagaacagtgaggagatctgttactttgaaaagatggcaaattaacactcggtctgccctgccttacaactgaaatgtttgcaacgcccgctgtgagcagatgtgctgggt

SEQ ID NO: 7633 - DNA, 122 bp, Homo sapiens
  misc_feature (61)..(62): /note="This region represents a CpG dinucleotide"
  misc_feature (61)..(61): /note="Nucleotide may be methylated to form 5-methylcytosine"
tgacatgcatgtatgtcacccccatcggaacacagcaagaccacacttgttctatgactacggatacaccccctttagaaagagcttgacacttgggcagaggatgacaggggctcacacag

SEQ ID NO: 7634 - DNA, 122 bp, Homo sapiens
  misc_feature (61)..(62): /note="This region represents a CpG dinucleotide"
  misc_feature (61)..(61): /note="Nucleotide may be methylated to form 5-methylcytosine"
tgagcttcaccctggagcggctgtccagccgattgcagcgcagtggcagcagcgaggactcggggggcgcgtcgggccgcagcacgccgctgttcggacggcttcgcagggccacgtccgag

SEQ ID NO: 7635 - DNA, 122 bp, Homo sapiens
  misc_feature (61)..(62): /note="This region represents a CpG dinucleotide"
  misc_feature (61)..(61): /note="Nucleotide may be methylated to form 5-methylcytosine"
ttctttcttcttttcttttctttcttttttgtccctgtgtacctagttgtcccaacacaacgtgttgaaaggccgacttttcctcactcctctgcaaccctctgctgtcacaagtcaggtgt

SEQ ID NO: 7636 - DNA, 122 bp, Homo sapiens
  misc_feature (61)..(62): /note="This region represents a CpG dinucleotide"
  misc_feature (61)..(61): /note="Nucleotide may be methylated to form 5-methylcytosine"
tctgtaaacgccaaactgtctctttgttctcttcattttacacttagggctatgtttcctcgtctgtaaactgttcattgtaataaagtctgtttcctctaaattccttttcagagaacttt

SEQ ID NO: 7637 - DNA, 122 bp, Homo sapiens
  misc_feature (61)..(62): /note="This region represents a CpG dinucleotide"
  misc_feature (61)..(61): /note="Nucleotide may be methylated to form 5-methylcytosine"
ttttctgattttctgagggctcttcctgtagagcattttctttcagcaggctcctttgttcgtttttatgagttaaatccaagtcgcaaataaatggatctgtcatcatttctcagaatgtg

SEQ ID NO: 7638 - DNA, 122 bp, Homo sapiens
  misc_feature (61)..(62): /note="This region represents a CpG dinucleotide"
  misc_feature (61)..(61): /note="Nucleotide may be methylated to form 5-methylcytosine"
tacggtctttggaaaagcagaagttatttccaatgacacatactatttgctgaaaatttacggtagattgactcatgcatctttgcattgtacttagattaaaattctatagctttggttga

SEQ ID NO: 7639 - DNA, 122 bp, Homo sapiens
  misc_feature (61)..(62): /note="This region represents a CpG dinucleotide"
  misc_feature (61)..(61): /note="Nucleotide may be methylated to form 5-methylcytosine"
gcatctctgaagttcactatcactctaggggaacttgagctgctgcttagcttctctctgcgcttctcttctatgaacttgaaatatgctctactgagtctgtttgaagctgaatcttttga

SEQ ID NO: 7640 - DNA, 122 bp, Homo sapiens
  misc_feature (61)..(62): /note="This region represents a CpG dinucleotide"
  misc_feature (61)..(61): /note="Nucleotide may be methylated to form 5-methylcytosine"
ttcctctgaataaatataaatcacgatcagaaacccaaacagaagcatccctcttgaattcgtgctgctgaaaaacacggaataaattcagcctgcagacacagaatctaatcagcagctgt

SEQ ID NO: 7641 - DNA, 122 bp, Homo sapiens
  misc_feature (61)..(62): /note="This region represents a CpG dinucleotide"
  misc_feature (61)..(61): /note="Nucleotide may be methylated to form 5-methylcytosine"
tctgaaagcagttcataaaagcttagcctcatggggctaaatgaacactaagtcatcttgcggaattgcgacagagaagcatttatcctgaacaggtaccatggaagaaaaacaaaacatgt

SEQ ID NO: 7642 - DNA, 122 bp, Homo sapiens
  misc_feature (61)..(62): /note="This region represents a CpG dinucleotide"
  misc_feature (61)..(61): /note="Nucleotide may be methylated to form 5-methylcytosine"
tcactcctgtgtcagtcacaggcaattagggctaatggctcaacatgtctttatgtagggcgtgtgtgagggttactgttctcggggattgggcacttcctgtttccaggcagctggaaaac

SEQ ID NO: 7643 - DNA, 122 bp, Homo sapiens
  misc_feature (61)..(62): /note="This region represents a CpG dinucleotide"
  misc_feature (61)..(61): /note="Nucleotide may be methylated to form 5-methylcytosine"
cctagggctgtctagtaaatcctgaagcctttgccagtagccaggaagctgagatcacctcggagcacagatggggaaggaggttatgggggagacagagactgtgcccagctgggttggag

SEQ ID NO: 7644 - DNA, 122 bp, Homo sapiens
  misc_feature (61)..(62): /note="This region represents a CpG dinucleotide"
  misc_feature (61)..(61): /note="Nucleotide may be methylated to form 5-methylcytosine"
agatacagaccccttaagcaaacaagccagattatctaattccttgatcacagcagaacacgcagttcctactgttttaaactactaattctttatctctcctacaattaaaaagaggtaaa

SEQ ID NO: 7645 - DNA, 122 bp, Homo sapiens
  misc_feature (61)..(62): /note="This region represents a CpG dinucleotide"
  misc_feature (61)..(61): /note="Nucleotide may be methylated to form 5-methylcytosine"
tgaactcctgaccttaggtgatccatctgcttcggcctcccaaagtgctgggattataggcgtgcagcctaattttgtatttgttgtagagatggggttttaccgtgttgcccaggctggtc

SEQ ID NO: 7646 - DNA, 122 bp, Homo sapiens
  misc_feature (61)..(62): /note="This region represents a CpG dinucleotide"
  misc_feature (61)..(61): /note="Nucleotide may be methylated to form 5-methylcytosine"
gggtctcagattttctgaactctaatgtgatattggtagagatcctaaacattaaccatccgtagttatttttgagacatggattaaaactattgttttcttcttgttattaacctactgta

SEQ ID NO: 7647 - DNA, 122 bp, Homo sapiens
  misc_feature (61)..(62): /note="This region represents a CpG dinucleotide"
  misc_feature (61)..(61): /note="Nucleotide may be methylated to form 5-methylcytosine"
tgactctgagaactagactcgttaggcccctttttcctatctgtgaaacaaatagcaagacgtcacatgaacaaacactgattgccgagtggttcactcattcacagcttgcagagctgctg

SEQ ID NO: 7648 - DNA, 122 bp, Homo sapiens
  misc_feature (61)..(62): /note="This region represents a CpG dinucleotide"
  misc_feature (61)..(61): /note="Nucleotide may be methylated to form 5-methylcytosine"
atctccactggctataatcactgaggaattccttctgcccctaaagggttggcactcttgcgtaggatgggtgctcttgcaagatctaatcctggaaatgctctccattctccattcttttt

SEQ ID NO: 7649 - DNA, 122 bp, Homo sapiens
  misc_feature (61)..(62): /note="This region represents a CpG dinucleotide"
  misc_feature (61)..(61): /note="Nucleotide may be methylated to form 5-methylcytosine"
ctcctcctcccttccagctcctattcctccactttacctctctcctcctgctacaccacacgttcacatgaccctgtgtgagtccagggcagaaaagtaaagctaaaaggcggacaaatgaa

SEQ ID NO: 7650 - DNA, 122 bp, Homo sapiens
  misc_feature (61)..(62): /note="This region represents a CpG dinucleotide"
  misc_feature (61)..(61): /note="Nucleotide may be methylated to form 5-methylcytosine"
tctttccagataccctagaaagcgaagccttcttttgtcacatcatttttctaaattaaccgttaaataattcctacttaaggcattacccaaaacgagcattttgtaatcaagatatccta

SEQ ID NO: 7651 - DNA, 122 bp, Homo sapiens
  misc_feature (61)..(62): /note="This region represents a CpG dinucleotide"
  misc_feature (61)..(61): /note="Nucleotide may be methylated to form 5-methylcytosine"
agttttttaaccagcatttgtcgtatcacgaagcgttcacaaacaccttaccttcacgggcggctgcaatagttttcattaagcactggtaaacacacccagcgggatgcgagcagcccagg

SEQ ID NO: 7652 - DNA, 122 bp, Homo sapiens
  misc_feature (61)..(62): /note="This region represents a CpG dinucleotide"
  misc_feature (61)..(61): /note="Nucleotide may be methylated to form 5-methylcytosine"
gatggttaaaacacaaactgcctaatcacagtaatgccaacgtttgttttgggtagaagacggaatgtacaaagtacacacatttgaaatgtttgccagctggaagctggaaccctacagat

SEQ ID NO: 7653 - DNA, 122 bp, Homo sapiens
  misc_feature (61)..(62): /note="This region represents a CpG dinucleotide"
  misc_feature (61)..(61): /note="Nucleotide may be methylated to form 5-methylcytosine"
ggacactgactgaatgttcgcccctaacttacccggaaaacacgagaactagttcgatgtcgtttcaaccttaccaaactctgcggaaacttaggaaattatctttagtgtctagatagggg

SEQ ID NO: 7654 - DNA, 122 bp, Homo sapiens
  misc_feature (61)..(62): /note="This region represents a CpG dinucleotide"
  misc_feature (61)..(61): /note="Nucleotide may be methylated to form 5-methylcytosine"
ctacacttggtgggggggactccaggcatccctgagagaggtcggaatgggtgtgcctgccggcccaggtctggggtttggccttcgtttcgctgtgggtgtgtgatgagatattgtggcct

SEQ ID NO: 7655 - DNA, 122 bp, Homo sapiens
  misc_feature (61)..(62): /note="This region represents a CpG dinucleotide"
  misc_feature (61)..(61): /note="Nucleotide may be methylated to form 5-methylcytosine"
tccatttcttttccccaagaccacagggataaataaacccaactaatagccctcatgtgtcgcaggagcaggcctcagggattcccccaaactgagaggcctgggggagcctcctgagcaaa

SEQ ID NO: 7656 - DNA, 122 bp, Homo sapiens
  misc_feature (61)..(62): /note="This region represents a CpG dinucleotide"
  misc_feature (61)..(61): /note="Nucleotide may be methylated to form 5-methylcytosine"
ctgaacgagacagatgagacaagaaaaaggcctccaccttagtcatggccctcagacagacgaacttcaaacttcggtggttctgaaagaaagaaaggctgggcaggcaacccgcctaacag

SEQ ID NO: 7657 - DNA, 122 bp, Homo sapiens
  misc_feature (61)..(62): /note="This region represents a CpG dinucleotide"
  misc_feature (61)..(61): /note="Nucleotide may be methylated to form 5-methylcytosine"
tgattaagagtaaagacacttacccttaatcatttcatgaaactcttgtaaatgtattatcgcatgttctctgttctttcatctgggtcctgcacatctgttccttggtgattcctatcagt

SEQ ID NO: 7658 - DNA, 122 bp, Homo sapiens
  misc_feature (61)..(62): /note="This region represents a CpG dinucleotide"
  misc_feature (61)..(61): /note="Nucleotide may be methylated to form 5-methylcytosine"
caagtcagcaagtgggtatccaatcccggatgtgtaaggtgccggctgtggacgctgtgacgtgcctgcagtggattggagaggccagcagagggggagccccgctcccctcctctcaagga

SEQ ID NO: 7659 - DNA, 122 bp, Homo sapiens
  misc_feature (61)..(62): /note="This region represents a CpG dinucleotide"
  misc_feature (61)..(61): /note="Nucleotide may be methylated to form 5-methylcytosine"
aaaagaaacacctaggagttctgatgcagacagactacaggccaaacttactagctgcaacgagattttctccaagacttgcaaatgaagaaaataagattgctcttgaagttaaagtatga

SEQ ID NO: 7660 - DNA, 122 bp, Homo sapiens
  misc_feature (61)..(62): /note="This region represents a CpG dinucleotide"
  misc_feature (61)..(61): /note="Nucleotide may be methylated to form 5-methylcytosine"
ataacagaaggtagcatgtcagaagaccatgggcagcccccaggctgtatttgcagtccccgttctgcataatgtgtccagttggtatgtaatgatgcacgcacagaagagaaccaaacact

SEQ ID NO: 7661 - DNA, 122 bp, Homo sapiens
  misc_feature (61)..(62): /note="This region represents a CpG dinucleotide"
  misc_feature (61)..(61): /note="Nucleotide may be methylated to form 5-methylcytosine"
tctatgaggcgctttcgtggcaaggagtgattctctccagtaggcaatcctaagaacgagcgcagtgcttggcgcacagtaaatgctccatggaccatttatgaaattaagtctaagtggac

SEQ ID NO: 7662 - DNA, 122 bp, Homo sapiens
  misc_feature (61)..(62): /note="This region represents a CpG dinucleotide"
  misc_feature (61)..(61): /note="Nucleotide may be methylated to form 5-methylcytosine"
ccggcaaccactcatctgctttctgtttgagaccttagctcttgaacctacaggttgcaccggaaccagcccagcctcgacctctaggggagtaaagggagagcaggtttgtcagggaatct

SEQ ID NO: 7663 - DNA, 122 bp, Homo sapiens
  misc_feature (61)..(62): /note="This region represents a CpG dinucleotide"
  misc_feature (61)..(61): /note="Nucleotide may be methylated to form 5-methylcytosine"
acttgcttttcaaccaaagataatttatttatatattaacagtatctcagctccttttaacgtccacatcagcaagctctagagaacgtttgcaatggacaggaatgatggacagcaatgag

SEQ ID NO: 7664 - DNA, 122 bp, Homo sapiens
  misc_feature (61)..(62): /note="This region represents a CpG dinucleotide"
  misc_feature (61)..(61): /note="Nucleotide may be methylated to form 5-methylcytosine"
attagagttgccctcgataaattagctgagaaggaggcttgaaggaggcctgactattaacgggtaaaaaacctacaggttttaaagccatctgggcttatatattagattgtgctgtttgc

SEQ ID NO: 7665 - DNA, 122 bp, Homo sapiens
  misc_feature (61)..(62): /note="This region represents a CpG dinucleotide"
  misc_feature (61)..(61): /note="Nucleotide may be methylated to form 5-methylcytosine"
cttgatctgcagaagctgcagagtggcccactcttcctggacatgtcaggaaaactttgacgtggctgctctagcttcagggaaggtctaatttggtgaaaatttgaaagcaggtttgtggg

SEQ ID NO: 7666 - DNA, 122 bp, Homo sapiens
  misc_feature (61)..(62): /note="This region represents a CpG dinucleotide"
  misc_feature (61)..(61): /note="Nucleotide may be methylated to form 5-methylcytosine"
aggagctattgctagagaattattgttttcctttgagggtgtcatattacattgctttttcgtgcttcctgtattgttacattgatttctgcacatctgaagcaatagtcacttcctcttat

SEQ ID NO: 7667 - DNA, 122 bp, Homo sapiens
  misc_feature (61)..(62): /note="This region represents a CpG dinucleotide"
  misc_feature (61)..(61): /note="Nucleotide may be methylated to form 5-methylcytosine"
ttacaatgaaataacactacatattactcaactagaatggttaaaatgaaaaagataatacgaagtgttgacaagaatgtggagctcttagaaaatagagaatattggttggaatctaaatt

SEQ ID NO: 7668 - DNA, 122 bp, Homo sapiens
  misc_feature (61)..(62): /note="This region represents a CpG dinucleotide"
  misc_feature (61)..(61): /note="Nucleotide may be methylated to form 5-methylcytosine"
atggttggaaatgcatgtggcagtggttcccaaacactggtgtgcagatggaacacagcccgtgaagttttcagcggtccttgttaaaaagagataaaggaaagagataaaggataaagtgc

SEQ ID NO: 7669 - DNA, 122 bp, Homo sapiens
  misc_feature (61)..(62): /note="This region represents a CpG dinucleotide"
  misc_feature (61)..(61): /note="Nucleotide may be methylated to form 5-methylcytosine"
tttttctattccttgcctccaactttcatcctttttaattctcatataattaaaaattgtcgttggactatatatttgtgcttattgttttttgcatacttgagtatatgtggcatttagat

SEQ ID NO: 7670 - DNA, 122 bp, Homo sapiens
  misc_feature (61)..(62): /note="This region represents a CpG dinucleotide"
  misc_feature (61)..(61): /note="Nucleotide may be methylated to form 5-methylcytosine"
cctccgacagcgccgcattcctgggccttgggaggaggctctgagtagggccgcctggggcgcgtcttcagggtcctcccggcactggggtgaccgccgagctagacgcgcctgagggctga

SEQ ID NO: 7671 - DNA, 122 bp, Homo sapiens
  misc_feature (61)..(62): /note="This region represents a CpG dinucleotide"
  misc_feature (61)..(61): /note="Nucleotide may be methylated to form 5-methylcytosine"
gatagggagcggggaaaggtactttaggtacaatgtcagaaatgcctcccccaggccaggcgagggggtgcaagcctggaatcctagcactttgggaggccgaggtgggtggatcacttgag

SEQ ID NO: 7672 - DNA, 122 bp, Homo sapiens
  misc_feature (61)..(62): /note="This region represents a CpG dinucleotide"
  misc_feature (61)..(61): /note="Nucleotide may be methylated to form 5-methylcytosine"
aaaaataaataaataaataataaaaaaataaaattggccaggcgttgggggccagcaatccgggtgattcgatacatgccaaagtttgataaccactggcttaggctgtgtgtgtgtgtgtg

SEQ ID NO: 7673 - DNA, 122 bp, Homo sapiens
  misc_feature (61)..(62): /note="This region represents a CpG dinucleotide"
  misc_feature (61)..(61): /note="Nucleotide may be methylated to form 5-methylcytosine"
aaaagccaaatgcagaaaattaattgttaagtattctatcaccacagctctatcctcctccgcccacccacccttgaggaagacaagcccaaagttagttgatgctatggaatcacaaggat

SEQ ID NO: 7674 - DNA, 122 bp, Homo sapiens
  misc_feature (61)..(62): /note="This region represents a CpG dinucleotide"
  misc_feature (61)..(61): /note="Nucleotide may be methylated to form 5-methylcytosine"
cagtgtaagcctaggcctggggacaggctagaatgtaagcctaggtctcccacaagcccgcgctcttagtgcctggggacacagcccctgacctcaaagatctgcagaacgtgaaggactag

SEQ ID NO: 7675 - DNA, 122 bp, Homo sapiens
  misc_feature (61)..(62): /note="This region represents a CpG dinucleotide"
  misc_feature (61)..(61): /note="Nucleotide may be methylated to form 5-methylcytosine"
agcaagttaattatagcgagcaaaaaagtgcagtggttatataaataagctattgttatgcgcatgcaagttgggccttgtcaagggacttgcaaggtttagaggtcagaggatccatgtaa

SEQ ID NO: 7676 - DNA, 122 bp, Homo sapiens
  misc_feature (61)..(62): /note="This region represents a CpG dinucleotide"
  misc_feature (61)..(61): /note="Nucleotide may be methylated to form 5-methylcytosine"
ttggacggctgctgctacgcagtgaagcgcatccccatcaacccggccagccggcagttccgcaggatcaagggcgaagtgacactgctgtcacggctgcaccatgagaacattgtgcgcta

SEQ ID NO: 7677 - DNA, 122 bp, Homo sapiens
  misc_feature (61)..(62): /note="This region represents a CpG dinucleotide"
  misc_feature (61)..(61): /note="Nucleotide may be methylated to form 5-methylcytosine"
tgcaacgagtaagacatgagtttgagaagaagcagtgatcaccttcttcttcactcttcacgctgatgaatttctacatcactgtgcatgtcctgtgctttgcagtcattccctaggagctc

SEQ ID NO: 7678 - DNA, 122 bp, Homo sapiens
  misc_feature (61)..(62): /note="This region represents a CpG dinucleotide"
  misc_feature (61)..(61): /note="Nucleotide may be methylated to form 5-methylcytosine"
ctaacactagagccttttaaagccaagcttaacactccctttgtgctttgcagcaagtaacgtgaaacaaatctcttttctcagaaagcaatctccttttgaatcctctgtcagagtaaaaa

SEQ ID NO: 7679 - DNA, 122 bp, Homo sapiens
  misc_feature (61)..(62): /note="This region represents a CpG dinucleotide"
  misc_feature (61)..(61): /note="Nucleotide may be methylated to form 5-methylcytosine"
taaaagaaaaagggggtagcagaaaaaaatcaagtgctgagacaagtggaagatgggccccggtgagcagctgatcagtgtcagctcccatgatgacgttcccccagcccccaccacccggg

SEQ ID NO: 7680 - DNA, 122 bp, Homo sapiens
  misc_feature (61)..(62): /note="This region represents a CpG dinucleotide"
  misc_feature (61)..(61): /note="Nucleotide may be methylated to form 5-methylcytosine"
tgctacaagctaggcctactgggaaggccaggatccaaagacactcccaaagttgtgcaacgctcagcctgtgcaactgtacctgggagccctaagcagaggacagaagatggtaagtgggc

SEQ ID NO: 7681 - DNA, 122 bp, Homo sapiens
  misc_feature (61)..(62): /note="This region represents a CpG dinucleotide"
  misc_feature (61)..(61): /note="Nucleotide may be methylated to form 5-methylcytosine"
tttttagttttgagttacaggtttctggcaagctccctgaccactactgttacctggtggcgcctatatttcatcaaatttagacatgcagactacctggatccaggcccagatgaactgtt

SEQ ID NO: 7682 - DNA, 122 bp, Homo sapiens
  misc_feature (61)..(62): /note="This region represents a CpG dinucleotide"
  misc_feature (61)..(61): /note="Nucleotide may be methylated to form 5-methylcytosine"
cagggggcctggttgaggctggaggtcagccacagccaagaagctccgagaccaacggatcgcccagcccagaccctcccccaggcctaagaggagagggaaccagggagaaaagtctagac

SEQ ID NO: 7683 - DNA, 122 bp, Homo sapiens
  misc_feature (61)..(62): /note="This region represents a CpG dinucleotide"
  misc_feature (61)..(61): /note="Nucleotide may be methylated to form 5-methylcytosine"
aaccagcttatagcagacccaggctagttgagaacttcaagaaaagacagatcgtgggggcggggttggggagtgtccatgtgaagccattggaaagctaccaaaacagccaggactggaga

SEQ ID NO: 7684 - DNA, 122 bp, Homo sapiens
  misc_feature (61)..(62): /note="This region represents a CpG dinucleotide"
  misc_feature (61)..(61): /note="Nucleotide may be methylated to form 5-methylcytosine"
ctcaaagggaaaatggggtttgcacatggactttcggctccattcatgaaagcatagatacgtgtgattataacaaggatatgagcttggatgcagcaggctgttaaacaccatgccaggag

SEQ ID NO: 7685 - DNA, 122 bp, Homo sapiens
  misc_feature (61)..(62): /note="This region represents a CpG dinucleotide"
  misc_feature (61)..(61): /note="Nucleotide may be methylated to form 5-methylcytosine"
tatctcggtctggggtggggcctgaggctgtcttgttcgtaaactcccagttgatgctaacgctgcccatccagggccacccagagcagcaagccggttctatgacagctctctttattttt

SEQ ID NO: 7686 - DNA, 122 bp, Homo sapiens
  misc_feature (61)..(62): /note="This region represents a CpG dinucleotide"
  misc_feature (61)..(61): /note="Nucleotide may be methylated to form 5-methylcytosine"
aaacactaacattgccttgcttgtggatagaaacattccccagagctcacacccagagtgcgtttctgaaaacagcatgtgtcacagaaggtagcaaatgtggtgtcactgtttcagcaaaa

SEQ ID NO: 7687 - DNA, 122 bp, Homo sapiens
  misc_feature (61)..(62): /note="This region represents a CpG dinucleotide"
  misc_feature (61)..(61): /note="Nucleotide may be methylated to form 5-methylcytosine"
catggctttttgcccgccgcggctttgtgcccccccagcgccagggcttttagcccgccgcggcgttttgacccctcgccgctgcgaattttgccaccgcggctttttgccccccgccgctt

SEQ ID NO: 7688 - DNA, 122 bp, Homo sapiens
  misc_feature (61)..(62): /note="This region represents a CpG dinucleotide"
  misc_feature (61)..(61): /note="Nucleotide may be methylated to form 5-methylcytosine"
caggcccagccgccccgtccactgccaccaccaacgccgccgccatcttacactggccagcggccgccaccaccaccgcctccgctctctgcgcttgcgcctgcgctgccacgctttccggc

SEQ ID NO: 7689 - DNA, 122 bp, Homo sapiens
  misc_feature (61)..(62): /note="This region represents a CpG dinucleotide"
  misc_feature (61)..(61): /note="Nucleotide may be methylated to form 5-methylcytosine"
aatccaaaatgagaacttatttcctgtgcaggatactatctagaacatagaagccaccaacgttctcctcatgccagcaaatgtcctgcccctctggctgctgcctctgcagtcttgcagag

SEQ ID NO: 7690 - DNA, 122 bp, Homo sapiens
  misc_feature (61)..(62): /note="This region represents a CpG dinucleotide"
  misc_feature (61)..(61): /note="Nucleotide may be methylated to form 5-methylcytosine"
tcaattacaccaagtaggcagttacatgttcttacataaagctacaaactgtttttgtcacgttaatgaaagcaaaggaaacaaggagtcttttattgattctggagaccatgtgatacaaa

SEQ ID NO: 7691 - DNA, 122 bp, Homo sapiens
  misc_feature (61)..(62): /note="This region represents a CpG dinucleotide"
  misc_feature (61)..(61): /note="Nucleotide may be methylated to form 5-methylcytosine"
ctgagtcagaaggcagagcagcgctccgttgaacaccatcaacagtttttgtcgagagggcggctcatagttgtcaacagccttctgtgtgcctggcacctgatggacttgttctcctttca

SEQ ID NO: 7692 - DNA, 122 bp, Homo sapiens
  misc_feature (61)..(62): /note="This region represents a CpG dinucleotide"
  misc_feature (61)..(61): /note="Nucleotide may be methylated to form 5-methylcytosine"
ttaaagcatttgttatcacttccatcctttactgtttaatctttctcataagcacaaatacgcgtgcacacacatacacacactcacatgagttccccgtgccggctgcaagtctgggtgct

SEQ ID NO: 7693 - DNA, 122 bp, Homo sapiens
  misc_feature (61)..(62): /note="This region represents a CpG dinucleotide"
  misc_feature (61)..(61): /note="Nucleotide may be methylated to form 5-methylcytosine"
gatattttgcatatggagaaactgaggctgagagcctttagtctccaccttgtttttaaacgaagggggcagggagcaaatagaaacctgttcatgcagcattagtttcaattcttaaaata

SEQ ID NO: 7694 - DNA, 122 bp, Homo sapiens
  misc_feature (61)..(62): /note="This region represents a CpG dinucleotide"
  misc_feature (61)..(61): /note="Nucleotide may be methylated to form 5-methylcytosine"
aagtcttagataccattctcccagtttcccattattttattgcttttgttcttttcctgtcgtgactcatggctgctaatcaaattcagaaaatgctgtgctggaaagtaagaggaatgggt

SEQ ID NO: 7695 - DNA, 122 bp, Homo sapiens
  misc_feature (61)..(62): /note="This region represents a CpG dinucleotide"
  misc_feature (61)..(61): /note="Nucleotide may be methylated to form 5-methylcytosine"
tgggctgcgggtcaagacgtctgcgtttaattcgggactgaaggttagcagggaagggaacgatgccagatcttgagtttaagaacttgaatcttgtaaagtaccaaatctaataaaatact

SEQ ID NO: 7696 - DNA, 122 bp, Homo sapiens
  misc_feature (61)..(62): /note="This region represents a CpG dinucleotide"
  misc_feature (61)..(61): /note="Nucleotide may be methylated to form 5-methylcytosine"
caaactatctttgcaatgcttaaaagaaacactgagatcaggggtcagtaaagtttccatcgagtcccataaagtaaatatttgaggctttatgggccatacagtctgtttagtataagacg

SEQ ID NO: 7697 - DNA, 122 bp, Homo sapiens
  misc_feature (61)..(62): /note="This region represents a CpG dinucleotide"
  misc_feature (61)..(61): /note="Nucleotide may be methylated to form 5-methylcytosine"
gcccctgaacccagaatgtagtcagctggcagttagtaattgagaacctgtttggtgacacggatgactgaatggggcccttaagtgttccatcctattgacaggggttgacaccttgactt

SEQ ID NO: 7698 - DNA, 122 bp, Homo sapiens
  misc_feature (61)..(62): /note="This region represents a CpG dinucleotide"
  misc_feature (61)..(61): /note="Nucleotide may be methylated to form 5-methylcytosine"
ttgttaaaagcccatcgcaggactaactgtgccttgtcctgtggatgatagtcagttactcgttcaaatgaattagaagtcaacgttttcaccatcttgaggttcattgtattaactattca

SEQ ID NO: 7699 - DNA, 122 bp, Homo sapiens
  misc_feature (61)..(62): /note="This region represents a CpG dinucleotide"
  misc_feature (61)..(61): /note="Nucleotide may be methylated to form 5-methylcytosine"
cttggctcggagccactattgtctgtaaaaggtataactaccctgctgatgctgtacatacggatggcttgcttgctcccagagagagaacaaagccatgttgaaacttcttacaattcctc

SEQ ID NO: 7700 - DNA, 122 bp, Homo sapiens
  misc_feature (61)..(62): /note="This region represents a CpG dinucleotide"
  misc_feature (61)..(61): /note="Nucleotide may be methylated to form 5-methylcytosine"
caacaattggttgcagtcatcggatgcaaggatagtctctcactaagtatatacagcagtcggattacacatatttttcttttataaaactataaccacaccgaggatcatttcctttcatt

SEQ ID NO: 7701 - DNA, 122 bp, Homo sapiens
  misc_feature (61)..(62): /note="This region represents a CpG dinucleotide"
  misc_feature (61)..(61): /note="Nucleotide may be methylated to form 5-methylcytosine"
ctagtatagttgctgctttggcatccattttgggcctgcggtaagttattgaaacccagtcgtaccctatcacctttggtctagttaaaatgttccctccctgtgtggttgtttgtgaaaca

SEQ ID NO: 7702 - DNA, 122 bp, Homo sapiens
  misc_feature (61)..(62): /note="This region represents a CpG dinucleotide"
  misc_feature (61)..(61): /note="Nucleotide may be methylated to form 5-methylcytosine"
tgaaaacaaattacagagtgatttctcattagtcccattatggggaacatgcctcatccacgttcttaatgaggctccagtaagtctgtagactgtttggggctgagggtggggcattggtg

SEQ ID NO: 7703 - DNA, 122 bp, Homo sapiens
  misc_feature (61)..(62): /note="This region represents a CpG dinucleotide"
  misc_feature (61)..(61): /note="Nucleotide may be methylated to form 5-methylcytosine"
aattacaaaccctctgctctttgtatttctctgttgtgaagaataaactgtacctgcacccgggtggcggtggtgtttggcgtgctctgtgcgagggcagggctggggggcacctttccatt

SEQ ID NO: 7704 - DNA, 122 bp, Homo sapiens
  misc_feature (61)..(62): /note="This region represents a CpG dinucleotide"
  misc_feature (61)..(61): /note="Nucleotide may be methylated to form 5-methylcytosine"
aacagtctgaaaaatacattaaactttaaaaccactcttccaaccacgcatgcagaagttcgccaaagcatacagtatgtctttcaattacgtaatgcttcaaatagcgaacagagcaaaag

SEQ ID NO: 7705 - DNA, 122 bp, Homo sapiens
  misc_feature (61)..(62): /note="This region represents a CpG dinucleotide"
  misc_feature (61)..(61): /note="Nucleotide may be methylated to form 5-methylcytosine"
gcagtacatgagggcctggcaagttagcattgtagcaatgcctggaaaagaaaggcactacgttctattgagtacatatgaagtggtactttttgttacttgtgtcatttgatctgcttttg

SEQ ID NO: 7706 - DNA, 122 bp, Homo sapiens
  misc_feature (61)..(62): /note="This region represents a CpG dinucleotide"
  misc_feature (61)..(61): /note="Nucleotide may be methylated to form 5-methylcytosine"
cccaagagcttgaagcctcgtgagcagagccaactattgctaaacactataaccaggggacgctcagggatccagctgcctctcacatctgggaagatttcctggaaccaagacaccctggc

SEQ ID NO: 7707 - DNA, 122 bp, Homo sapiens
  misc_feature (61)..(62): /note="This region represents a CpG dinucleotide"
  misc_feature (61)..(61): /note="Nucleotide may be methylated to form 5-methylcytosine"
tttgagtacatctcttggtatagttctcatagtggtcacatgagtattacaatagacacacgtgacttaccacagtctgttggtggtgatgtttcactactttgagtgaggtgtggaaatct

SEQ ID NO: 7708 - DNA, 122 bp, Homo sapiens
  misc_feature (61)..(62): /note="This region represents a CpG dinucleotide"
  misc_feature (61)..(61): /note="Nucleotide may be methylated to form 5-methylcytosine"
gcctccaagctgctctgggtcatgggtctgtggtgtctccagtcttgcatgtcaccagctcgagccacatccaagtggggagggagccagggagctgttgttggcaggggaagtgggggtgg

SEQ ID NO: 7709 - DNA, 122 bp, Homo sapiens
  misc_feature (61)..(62): /note="This region represents a CpG dinucleotide"
  misc_feature (61)..(61): /note="Nucleotide may be methylated to form 5-methylcytosine"
agccaccgggggagatctggggggaggggtctcctggcgcgtggggtccgaaggaggcagcggcacaccgggaagagggtctccctgggagtccaaatttccacctggagaggatgagtggg

SEQ ID NO: 7710 - DNA, 122 bp, Homo sapiens
  misc_feature (61)..(62): /note="This region represents a CpG dinucleotide"
  misc_feature (61)..(61): /note="Nucleotide may be methylated to form 5-methylcytosine"
gttcttcagaattccaaaattaaaagctcttctggccccacgccattagtgccctctgtgcgtacccaggactgagtacgttgaagaagaaagaagagaaaggtatagctaactcatgtaaa

SEQ ID NO: 7711 - DNA, 122 bp, Homo sapiens
  misc_feature (61)..(62): /note="This region represents a CpG dinucleotide"
  misc_feature (61)..(61): /note="Nucleotide may be methylated to form 5-methylcytosine"
catagcaatgattgtctttatgctggctgccctgtgccaggcattttacaggcattagctcgcatactccttctaaccaccctatgaggaaagaggatcccagggtcagagtggtgaagcaa

SEQ ID NO: 7712 - DNA, 122 bp, Homo sapiens
  misc_feature (61)..(62): /note="This region represents a CpG dinucleotide"
  misc_feature (61)..(61): /note="Nucleotide may be methylated to form 5-methylcytosine"
gcggggcccggcgcctgttcgccgtgttagtggccaatcggcagccaggcagggtgggcgcgcgtagggggcggggccgggcgcgcggcagggcgcgagagcgcacccgcggcggcggtggc

SEQ ID NO: 7713 - DNA, 122 bp, Homo sapiens
  misc_feature (61)..(62): /note="This region represents a CpG dinucleotide"
  misc_feature (61)..(61): /note="Nucleotide may be methylated to form 5-methylcytosine"
gtagccacaagccacatggggctgttgagcacttgaaaatgtggccagttggaagtaagacgtactgcaagtgtaacatacatacaggaatttgaagacggtaaaaaaaaaaaggatataaa

SEQ ID NO: 7714 - DNA, 122 bp, Homo sapiens
  misc_feature (61)..(62): /note="This region represents a CpG dinucleotide"
  misc_feature (61)..(61): /note="Nucleotide may be methylated to form 5-methylcytosine"
aacctttggggccaggctcaaactgagaatttgtggacacctcagagtcccttgcctgatcgccggcctctgaccacagcctgtgcccagcacttcctgtcttctctcttgcagtctcagct

SEQ ID NO: 7715 - DNA, 122 bp, Homo sapiens
  misc_feature (61)..(62): /note="This region represents a CpG dinucleotide"
  misc_feature (61)..(61): /note="Nucleotide may be methylated to form 5-methylcytosine"
tgtccgcatgcgcgactgagccgcgggggtggtactgctgcatccgggtgtctgaagatccgatgaaataacatatgcaaaatgattgggtccgtgattggcattccagaaatggtagctgt

SEQ ID NO: 7716 - DNA, 122 bp, Homo sapiens
  misc_feature (61)..(62): /note="This region represents a CpG dinucleotide"
  misc_feature (61)..(61): /note="Nucleotide may be methylated to form 5-methylcytosine"
cggcctctcccagcctgtgctccctcctgtgagcagctggtaggagtggccactgggtggcgtgtgggcaccagggtttccttgctcccagttgtccagagctccttaattcatccatcctt

SEQ ID NO: 7717 - DNA, 122 bp, Homo sapiens
  misc_feature (61)..(62): /note="This region represents a CpG dinucleotide"
  misc_feature (61)..(61): /note="Nucleotide may be methylated to form 5-methylcytosine"
gctgcccagcaagatgcggacctgggtgcagtcacagggcccccgaagctgcagggaggccgccagcctggtggaggacctcacacagatgtgccagcaggaaggtgagaggcgcaggcttc

SEQ ID NO: 7718 - DNA, 122 bp, Homo sapiens
  misc_feature (61)..(62): /note="This region represents a CpG dinucleotide"
  misc_feature (61)..(61): /note="Nucleotide may be methylated to form 5-methylcytosine"
ccaggtgagactttagatcctagagggcagtgtgagggaatagctggcctggtgctttagcgaatatagaaagcaattctgacattgtggagcagttacttacggggttctctctccctcac

SEQ ID NO: 7719 - DNA, 122 bp, Homo sapiens
  misc_feature (61)..(62): /note="This region represents a CpG dinucleotide"
  misc_feature (61)..(61): /note="Nucleotide may be methylated to form 5-methylcytosine"
tctcctcatctagatgggggtgtgactcgggggagctcagaattccctgagaagaggtcacgggcacgtagaatcaattttaacgtggttccccaagcacgccaaagaagatgctgttctag

SEQ ID NO: 7720 - DNA, 122 bp, Homo sapiens
  misc_feature (61)..(62): /note="This region represents a CpG dinucleotide"
  misc_feature (61)..(61): /note="Nucleotide may be methylated to form 5-methylcytosine"
cacgcaaggtcaggaagtgccaaagccaccaagagtacatgtgacttcgggggttgggggcgggtgcgcctgcccacccaccacaaatcttagccatctgggctgtggagaaaaaaagggag

SEQ ID NO: 7721 - DNA, 122 bp, Homo sapiens
  misc_feature (61)..(62): /note="This region represents a CpG dinucleotide"
  misc_feature (61)..(61): /note="Nucleotide may be methylated to form 5-methylcytosine"
atcactcctgaaacctgtgaaacaacgaaccccccggggagaaacgaacaactccagactcgccgcctgaagagctgtaactctcacttcgaaggtctgcagcttcgctcctgagtcagtga

SEQ ID NO: 7722 - DNA, 122 bp, Homo sapiens
  misc_feature (61)..(62): /note="This region represents a CpG dinucleotide"
  misc_feature (61)..(61): /note="Nucleotide may be methylated to form 5-methylcytosine"
acggtgggttgcatggtaagtgtatgcatccacacatctactcctggcaatgggtagaagcgcaattagctggggaagttcagagcccaggcctgtaactaaagctggagacaagcccaaat

SEQ ID NO: 7723 - DNA, 122 bp, Homo sapiens
  misc_feature (61)..(62): /note="This region represents a CpG dinucleotide"
  misc_feature (61)..(61): /note="Nucleotide may be methylated to form 5-methylcytosine"
gagagttttactcaaatcagatgctggcccagagaaggaagtagacatgaattcaaaaaccggtaaaaggccctggtagaacactacatgacccctctgataaatcatgccctctctgatgt

SEQ ID NO: 7724 - DNA, 122 bp, Homo sapiens
  misc_feature (61)..(62): /note="This region represents a CpG dinucleotide"
  misc_feature (61)..(61): /note="Nucleotide may be methylated to form 5-methylcytosine"
tttttttttttttttgagacaagagtctcattctgtcgctggagtaaagcagcacaatctcggctcacttcaacctccacctcccatgttcaagtgattctcatgcctcagcttctcaagga

SEQ ID NO: 7725 - DNA, 122 bp, Homo sapiens
  misc_feature (61)..(62): /note="This region represents a CpG dinucleotide"
  misc_feature (61)..(61): /note="Nucleotide may be methylated to form 5-methylcytosine"
tggcctgcctgttgcctgggaagctgttctcctgacatcacagggctgtgcccatatccccgcttggcttaggggcccctaagttaggaacaaagaagcagaaaaggttggataaaagataa

SEQ ID NO: 7726 - DNA, 122 bp, Homo sapiens
  misc_feature (61)..(62): /note="This region represents a CpG dinucleotide"
  misc_feature (61)..(61): /note="Nucleotide may be methylated to form 5-methylcytosine"
acctcaagtgatccgcccacctcggcctcccagagtgctgggattacaggcatgagccaccgcaccaggctaatttttaaaatttttgtagagatgaggtctcactatattgcccaggcttg

SEQ ID NO: 7727 - DNA, 122 bp, Homo sapiens
  misc_feature (61)..(62): /note="This region represents a CpG dinucleotide"
  misc_feature (61)..(61): /note="Nucleotide may be methylated to form 5-methylcytosine"
aggctaccaagtggaagacaagctacagttctctcattttgaaaaattaatgcttactaacgtcaagagcatacaaggcacagtgcaaactacaatgatagtctggagacttgcccattagc

SEQ ID NO: 7728 - DNA, 122 bp, Homo sapiens
  misc_feature (61)..(62): /note="This region represents a CpG dinucleotide"
  misc_feature (61)..(61): /note="Nucleotide may be methylated to form 5-methylcytosine"
agcctgggcattgaggccagataaacctagttcaaatctctactctgccaactgacctctcgaactttgttttccttatctgtgaaattgcaattgtagtgagatttaaatggattattgtg

SEQ ID NO: 7729 - DNA, 122 bp, Homo sapiens
  misc_feature (61)..(62): /note="This region represents a CpG dinucleotide"
  misc_feature (61)..(61): /note="Nucleotide may be methylated to form 5-methylcytosine"
gtttttatatatttttgtagtgtgttgagaagagcaaaagctttataaatatacctgatgcgctgtagaatgaaaatgtaaaagataacctgtatgtgttccgagctttaattttttgttta

SEQ ID NO: 7730 - DNA, 122 bp, Homo sapiens
  misc_feature (61)..(62): /note="This region represents a CpG dinucleotide"
  misc_feature (61)..(61): /note="Nucleotide may be methylated to form 5-methylcytosine"
atcaaataaagtgaggattgaacaattgaagggtcactgataatcactgtaaggatttagcgccagggcttggcagtactcaggtgagtaaacgttagttattgctaatattattcatttat

SEQ ID NO: 7731 - DNA, 122 bp, Homo sapiens
  misc_feature (61)..(62): /note="This region represents a CpG dinucleotide"
  misc_feature (61)..(61): /note="Nucleotide may be methylated to form 5-methylcytosine"
agccttattgcagatccctggtttctgtgggattatgtaaaacctgtatttctgaaaccccgcctcccgtcttccttccatcttaaagcagggttgaaccttttattaaactgacagccagg

SEQ ID NO: 7732 - DNA, 122 bp, Homo sapiens
  misc_feature (61)..(62): /note="This region represents a CpG dinucleotide"
  misc_feature (61)..(61): /note="Nucleotide may be methylated to form 5-methylcytosine"
ctcacctcaacaacaaagcgcggtttcctccctcgccatccttcctcgtggtcgcgcacccggttggatttcacagtcatggaagttctgctttaaaatccgtttctgaagaagtgttaatg

SEQ ID NO: 7733 - DNA, 122 bp, Homo sapiens
  misc_feature (61)..(62): /note="This region represents a CpG dinucleotide"
  misc_feature (61)..(61): /note="Nucleotide may be methylated to form 5-methylcytosine"
cgaggaggcaaacacataaggcacgaggcgagaaacgtgcagagcggaggacgaggccgacggacggggaggctgggggggacactaggcagcctggccaactctgcttgtccccctgctct

SEQ ID NO: 7734 - DNA, 122 bp, Homo sapiens
  misc_feature (61)..(62): /note="This region represents a CpG dinucleotide"
  misc_feature (61)..(61): /note="Nucleotide may be methylated to form 5-methylcytosine"
caaagtgcaaatgcaccactggtttttccccaaagaacttcctggctgcaggagctgggacgtactgtttgataggaactcaagagacagtggcatttccctctctctggaccttccttagc

SEQ ID NO: 7735 - DNA, 122 bp, Homo sapiens
  misc_feature (61)..(62): /note="This region represents a CpG dinucleotide"
  misc_feature (61)..(61): /note="Nucleotide may be methylated to form 5-methylcytosine"
aggccctgctgaactcagagcccccatgaggatagaggctataacgtaacagacatgaaacgtcctgaaagctccacgtgcaaagtgagttgcttatgcctgcgtaaacttcttgttcttca

SEQ ID NO: 7736 - DNA, 122 bp, Homo sapiens
  misc_feature (61)..(62): /note="This region represents a CpG dinucleotide"
  misc_feature (61)..(61): /note="Nucleotide may be methylated to form 5-methylcytosine"
actgagattctcactctgcagcctgtgatttaactgtaattatgggtcttattttgggggcgtgagttggggaacaggaaataagtcagcctcaaggtagatacataaattataggagagga

SEQ ID NO: 7737 - DNA, 122 bp, Homo sapiens
  misc_feature (61)..(62): /note="This region represents a CpG dinucleotide"
  misc_feature (61)..(61): /note="Nucleotide may be methylated to form 5-methylcytosine"
gctaggtgattaaagagacaggcaggacaaaattcaaagtaaccagttaaagtaaaaacacggttaggcatttcaggattacaagcgtgagccaccacgcccagccaacatttcttttttac

SEQ ID NO: 7738 - DNA, 122 bp, Homo sapiens
  misc_feature (61)..(62): /note="This region represents a CpG dinucleotide"
  misc_feature (61)..(61): /note="Nucleotide may be methylated to form 5-methylcytosine"
ttgaagtgggatcccatgtttagacaattttcacaagctgtcaataataagccacaaagtcgtctttaaccgaacacgttatcatccttcctaatagatgtttaaaatttgcagaccaaatt

SEQ ID NO: 7739 - DNA, 122 bp, Homo sapiens
  misc_feature (61)..(62): /note="This region represents a CpG dinucleotide"
  misc_feature (61)..(61): /note="Nucleotide may be methylated to form 5-methylcytosine"
aattaaagtggttccaatgtgaagagatgggctatttttgttccccctctggtcttgtttcgtcctgttttctcttgaaattgtctcttttactagttcttcactcttttgtacatgttttc

SEQ ID NO: 7740 - DNA, 122 bp, Homo sapiens
  misc_feature (61)..(62): /note="This region represents a CpG dinucleotide"
  misc_feature (61)..(61): /note="Nucleotide may be methylated to form 5-methylcytosine"
aatccttcctttatagcccacagagaggtaaggcagggcaggagcgcagcccatagcatgcgagctgttctagtgccagttcaagaaatagctcgtgtgcttaccagagccagacacagggc

SEQ ID NO: 7741 - DNA, 122 bp, Homo sapiens
  misc_feature (61)..(62): /note="This region represents a CpG dinucleotide"
  misc_feature (61)..(61): /note="Nucleotide may be methylated to form 5-methylcytosine"
agctgctctccacaaatcagggtgggcccgaaagcattatttcatcttaaatgatgaaatcgtcaaggatacagaaaaggacagcgaaaaatgtcacaaacacccagctttaactaatgtta

SEQ ID NO: 7742 - DNA, 122 bp, Homo sapiens
  misc_feature (61)..(62): /note="This region represents a CpG dinucleotide"
  misc_feature (61)..(61): /note="Nucleotide may be methylated to form 5-methylcytosine"
gcctcgacctcccctatcacgccttcctgctcccttagtccggcccctgtgggcccgagacgctctgttcacttgaactagagatgcccagggtctcttgggcaccatgcatacgcgttggg

SEQ ID NO: 7743 - DNA, 122 bp, Homo sapiens
  misc_feature (61)..(62): /note="This region represents a CpG dinucleotide"
  misc_feature (61)..(61): /note="Nucleotide may be methylated to form 5-methylcytosine"
accaaaaaagcagtttcacttctgggtaatttggggcagccagtctaaccacagaacatccgcagtgctatttaaagaactagagagatgtcacactcattatgacacctgcaatcattaaa

SEQ ID NO: 7744 - DNA, 122 bp, Homo sapiens
  misc_feature (61)..(62): /note="This region represents a CpG dinucleotide"
  misc_feature (61)..(61): /note="Nucleotide may be methylated to form 5-methylcytosine"
atacccaggagaatacattccaggtgcagaaagccaattacctagttattcccttacccacgtaattatagaccttaatccaaattcaaaggactcctgggagatgctggaatctgtaattg

SEQ ID NO: 7745 - DNA, 122 bp, Homo sapiens
  misc_feature (61)..(62): /note="This region represents a CpG dinucleotide"
  misc_feature (61)..(61): /note="Nucleotide may be methylated to form 5-methylcytosine"
ctttaacataggtacactcttatctattctaatgactcccccatggttgtggtgaggatacgcagaggtgaatctgaaagctgtttatggactctaggattaaaaaaaactactattgtcat

SEQ ID NO: 7746 - DNA, 122 bp, Homo sapiens
  misc_feature (61)..(62): /note="This region represents a CpG dinucleotide"
  misc_feature (61)..(61): /note="Nucleotide may be methylated to form 5-methylcytosine"
cactttggcggatcacttgaggtcaaggagttcgagaaaagagagcacctagaagttcagcgcgggataatacttaagtaaattatgacaccatcgtctgtcatcttgggcccattcactaa

SEQ ID NO: 7747 - DNA, 122 bp, Homo sapiens
  misc_feature (61)..(62): /note="This region represents a CpG dinucleotide"
  misc_feature (61)..(61): /note="Nucleotide may be methylated to form 5-methylcytosine"
cacagaccactgctttgtcataggtgttcgggcaggataggcctcaccctcaaagcaggacgctcaaagctctaaggaagccactctgcccagggctgcttcaaacacttagagatcaggtt

SEQ ID NO: 7748 - DNA, 122 bp, Homo sapiens
  misc_feature (61)..(62): /note="This region represents a CpG dinucleotide"
  misc_feature (61)..(61): /note="Nucleotide may be methylated to form 5-methylcytosine"
ccctccctctcatctgggcaatgaggaaagttgtctgagttagttccttctagagatgaacgacaatcaggctgtcttaacagagctgttctgggtacacagagaaaaaatcgctgtgtcca

SEQ ID NO: 7749 - DNA, 122 bp, Homo sapiens
  misc_feature (61)..(62): /note="This region represents a CpG dinucleotide"
  misc_feature (61)..(61): /note="Nucleotide may be methylated to form 5-methylcytosine"
ccaaattcaacattaagggccaaccctgaccacagctgagccgtgtgaagaggctgacagcggcgtggccaccacccaggatggagagaaaggcactgtgaggtgttaatggaaaaatccaa

SEQ ID NO: 7750 - DNA, 122 bp, Homo sapiens
  misc_feature (61)..(62): /note="This region represents a CpG dinucleotide"
  misc_feature (61)..(61): /note="Nucleotide may be methylated to form 5-methylcytosine"
agcctcctaagaagctaaccacactctgccaacctcctcaaactattgactcaaatacaacgcaagaaggaattggagacaggtgtccaataggacacatagaggaaattaaggacaagaaa

SEQ ID NO: 7751 - DNA, 122 bp, Homo sapiens
  misc_feature (61)..(62): /note="This region represents a CpG dinucleotide"
  misc_feature (61)..(61): /note="Nucleotide may be methylated to form 5-methylcytosine"
ttttagtcatacttcctcttatttttttttttttcttttttgacagggtcttcactctgtcgtccaggctcgagtacagaggtatgatatcagcttactgcaacctccacctcccaggctca

SEQ ID NO: 7752 - DNA, 122 bp, Homo sapiens
  misc_feature (61)..(62): /note="This region represents a CpG dinucleotide"
  misc_feature (61)..(61): /note="Nucleotide may be methylated to form 5-methylcytosine"
gcacttgcccagggttatgtagttagtgacagagcccacactaaaactgggacctcccaacgtttttttttaaaccacaatttgttgtaaggtggggaggagggcaaacatgcagacacaat

SEQ ID NO: 7753 - DNA, 122 bp, Homo sapiens
  misc_feature (61)..(62): /note="This region represents a CpG dinucleotide"
  misc_feature (61)..(61): /note="Nucleotide may be methylated to form 5-methylcytosine"
tcacgcaattctagctacaacacccaaaccgcaaagtccctgttgcaggggtaaataagccggcgaaacccattcacaggaaggctcccgcgtctcgtcccaagctcttttctcccgagttc

SEQ ID NO: 7754 - DNA, 122 bp, Homo sapiens
  misc_feature (61)..(62): /note="This region represents a CpG dinucleotide"
  misc_feature (61)..(61): /note="Nucleotide may be methylated to form 5-methylcytosine"
ttacagcagctcatttcctaaaaggaagtcctatttacgatgcaccatatgttttgccagcggccgtacccctgagggctggagtcttgtcagatctccttagataagcagggttgggctgc

SEQ ID NO: 7755 - DNA, 122 bp, Homo sapiens
  misc_feature (61)..(62): /note="This region represents a CpG dinucleotide"
  misc_feature (61)..(61): /note="Nucleotide may be methylated to form 5-methylcytosine"
cccccagaccagacatggctctggctatttgctcagtaagcaggcgatttcgggggctgccgagggccaggtgctgcggcaggcactggagaaacggccgagacactgagtgtggggccccg

SEQ ID NO: 7756 - DNA, 122 bp, Homo sapiens
  misc_feature (61)..(62): /note="This region represents a CpG dinucleotide"
  misc_feature (61)..(61): /note="Nucleotide may be methylated to form 5-methylcytosine"
acaccccaaaaccccgcacaaattaagggattacatatctgagtgacaagtacatacaaacgcattacttctagagatacttagatgtagataaaagaccacatttcaatagaaggatcaca

SEQ ID NO: 7757 - DNA, 122 bp, Homo sapiens
  misc_feature (61)..(62): /note="This region represents a CpG dinucleotide"
  misc_feature (61)..(61): /note="Nucleotide may be methylated to form 5-methylcytosine"
cagggccaatgagaaatgcagccctgccacattcacaaagtgcacactcacgctgacacacgctcacgctcacacgctcacgctcacactcacgctcacactcacacgctcacactcacact

SEQ ID NO: 7758 - DNA, 122 bp, Homo sapiens
  misc_feature (61)..(62): /note="This region represents a CpG dinucleotide"
  misc_feature (61)..(61): /note="Nucleotide may be methylated to form 5-methylcytosine"
acccagtcacacagctggcaggtgaggagctgacccagagtccacccatcccttataccacgctgggatacctcatgaccaagtggaccctgccacacggccctgaggggctgttcctcccc

SEQ ID NO: 7759 - DNA, 122 bp, Homo sapiens
  misc_feature (61)..(62): /note="This region represents a CpG dinucleotide"
  misc_feature (61)..(61): /note="Nucleotide may be methylated to form 5-methylcytosine"
ccctcttagggccccacagcctgacatgctgtagggcctgagaagcggcgtcgtggaggacgagatgtgtgagggcagcaaagagtgctatgtgtccagcagagggccctgcccggcctgtg

SEQ ID NO: 7760 - DNA, 122 bp, Homo sapiens
  misc_feature (61)..(62): /note="This region represents a CpG dinucleotide"
  misc_feature (61)..(61): /note="Nucleotide may be methylated to form 5-methylcytosine"
cacagctttgtgcattgacacacatccagcatcagcaagctttttctaaatgagaacaagcgtcattcctttgtccatttgtcagacttgtcacatatgtctctatgggattatagtttttt

SEQ ID NO: 7761 - DNA, 122 bp, Homo sapiens
  misc_feature (61)..(62): /note="This region represents a CpG dinucleotide"
  misc_feature (61)..(61): /note="Nucleotide may be methylated to form 5-methylcytosine"
aaagtaagtaagagttggtcagaaaattcatgtttttcttacagactaacaaggcacagacgtatcactcggggagttagaaacaattacacatgactcacgccaagcattttaaagccaca

SEQ ID NO: 7762 - DNA, 122 bp, Homo sapiens
  misc_feature (61)..(62): /note="This region represents a CpG dinucleotide"
  misc_feature (61)..(61): /note="Nucleotide may be methylated to form 5-methylcytosine"
gcaaagaaagagtggcagaaggaaaaggagagggggaggggttgaaaattctaaatagcacggtggttataagtgggtcatcgtggtattccacatgcattccactgctgtgttatgtccca

SEQ ID NO: 7763 - DNA, 122 bp, Homo sapiens
  misc_feature (61)..(62): /note="This region represents a CpG dinucleotide"
  misc_feature (61)..(61): /note="Nucleotide may be methylated to form 5-methylcytosine"
tccaggcaccacttgttaaatgccatttgtacaatgcaaaactgagtcctccctggctcccgttgcctacaggattccccgcatgccggccgcactttttgctacccttcttctcattttca

SEQ ID NO: 7764 - DNA, 122 bp, Homo sapiens
  misc_feature (61)..(62): /note="This region represents a CpG dinucleotide"
  misc_feature (61)..(61): /note="Nucleotide may be methylated to form 5-methylcytosine"
ttgcccctctctacctgctcttatgtactttctcactgcactgtcttgttacgaggaggacgggctaagggcagaaactcagcatgaagcccatgatgcacttgcaattttagctagatata

SEQ ID NO: 7765 - DNA, 122 bp, Homo sapiens
  misc_feature (61)..(62): /note="This region represents a CpG dinucleotide"
  misc_feature (61)..(61): /note="Nucleotide may be methylated to form 5-methylcytosine"
tctccatccaaaaagggtcacagatacagcgtttggtgaacgagtcacagtggccatggtcggaacagttcagctgacatgctgagagtggcagcaaagggaagaaagtcaacaagactcag

SEQ ID NO: 7766 - DNA, 122 bp, Homo sapiens
  misc_feature (61)..(62): /note="This region represents a CpG dinucleotide"
  misc_feature (61)..(61): /note="Nucleotide may be methylated to form 5-methylcytosine"
ctaaatagaccatgaaaaggacacttgtttacactatgtaagctgaaactagaatgtgcacgtcagtagactcacatttttcaccattgtgcacatgtctgcaatgacagtggaagtgctat

SEQ ID NO: 7767 - DNA, 122 bp, Homo sapiens
  misc_feature (61)..(62): /note="This region represents a CpG dinucleotide"
  misc_feature (61)..(61): /note="Nucleotide may be methylated to form 5-methylcytosine"
tggagaaatcgaggccagacaggctaaacagcttgctcttgaggtttgtggcagccggggcgtcggctagaccaagccacctcccatgcattcactttaagagagtttgcacaaggtcttat

SEQ ID NO: 7768 - DNA, 122 bp, Homo sapiens
  misc_feature (61)..(62): /note="This region represents a CpG dinucleotide"
  misc_feature (61)..(61): /note="Nucleotide may be methylated to form 5-methylcytosine"
gtcttcaaagaaaacaagttgtccatctagatgatatattcaagttcccttgaatatttgcgatttgtttattcaagtttgttctatattagcccggcaaacagactagtaggaagtagaag

SEQ ID NO: 7769 - DNA, 122 bp, Homo sapiens
  misc_feature (61)..(62): /note="This region represents a CpG dinucleotide"
  misc_feature (61)..(61): /note="Nucleotide may be methylated to form 5-methylcytosine"
ggccctgtgctaggtattgggggcctgtaggtgaaccctacggacagacccattctttcacggagctaacattctcgtggggaaaagaggtaataaacaattctaatgatgaatcagcgata

SEQ ID NO: 7770 - DNA, 122 bp, Homo sapiens
  misc_feature (61)..(62): /note="This region represents a CpG dinucleotide"
  misc_feature (61)..(61): /note="Nucleotide may be methylated to form 5-methylcytosine"
acagttttggacatagcttttctcacagtggtagtagctcccactatacccaccgtgactcggggctgttcagaatccacccaggcgccctgagctctggggcctcctgggtaggggctggg

SEQ ID NO: 7771 - DNA, 122 bp, Homo sapiens
  misc_feature (61)..(62): /note="This region represents a CpG dinucleotide"
  misc_feature (61)..(61): /note="Nucleotide may be methylated to form 5-methylcytosine"
aatttcaatgtagtacaattaattgatatttatcttttatagatcttacctttagtgtcacgtccaaggaatgttcaccaagcctgaggtgctgaagatgatcttctatgttttcttctaga

SEQ ID NO: 7772 - DNA, 122 bp, Homo sapiens
  misc_feature (61)..(62): /note="This region represents a CpG dinucleotide"
  misc_feature (61)..(61): /note="Nucleotide may be methylated to form 5-methylcytosine"
ctaggttcatctaggccagcagggaaggtgccacttggaagattgctgggtttcctgcttcgaagtcttcaggagcgggctgagctgcgctggtgtgccgcttaggactgcaatgaggaggg

SEQ ID NO: 7773 - DNA, 122 bp, Homo sapiens
  misc_feature (61)..(62): /note="This region represents a CpG dinucleotide"
  misc_feature (61)..(61): /note="Nucleotide may be methylated to form 5-methylcytosine"
cgctcctgggtcgggtggctcggggggagcccgcggccgagggaccccttcctcctcggccgcccccccacctgggaaggctccctctggggaaaaaggggtctcggtctcgtagccgctgt

SEQ ID NO: 7774 - DNA, 122 bp, Homo sapiens
  misc_feature (61)..(62): /note="This region represents a CpG dinucleotide"
  misc_feature (61)..(61): /note="Nucleotide may be methylated to form 5-methylcytosine"
ccaggaagatctcacttccccacagaagctcttggcctggcctcctgcagtgccacgctccgtgtatttgacaagctgagttggacactccatgtggtagagtgtcagtttgtcaaataccc

SEQ ID NO: 7775 - DNA, 122 bp, Homo sapiens
  misc_feature (61)..(62): /note="This region represents a CpG dinucleotide"
  misc_feature (61)..(61): /note="Nucleotide may be methylated to form 5-methylcytosine"
aagtaactcatactgagctctgattagtcagaacagtgaattccaatgacttagcaaccacgtatggggaagaggactggaagccatttcaggacaggggacggagaggacagcgagacaaa

SEQ ID NO: 7776 - DNA, 122 bp, Homo sapiens
  misc_feature (61)..(62): /note="This region represents a CpG dinucleotide"
  misc_feature (61)..(61): /note="Nucleotide may be methylated to form 5-methylcytosine"
cgggacgcctcacagcaggagaaccccagctgccatcatgcgctgtggcctgaggtggggcggggccagggaccgccaggacagcccgacccgccccccacagtgggggtaggagccctgcc

SEQ ID NO: 7777 - DNA, 122 bp, Homo sapiens
  misc_feature (61)..(62): /note="This region represents a CpG dinucleotide"
  misc_feature (61)..(61): /note="Nucleotide may be methylated to form 5-methylcytosine"
gggattctgcaggatctgaggatctaaggggacccctagtcctgaactcggaaccaactgcgtctctcacggtcccgagcccaggaccaggaaggaccctgtgagtctccgcacataggata

SEQ ID NO: 7778 - DNA, 122 bp, Homo sapiens
  misc_feature (61)..(62): /note="This region represents a CpG dinucleotide"
  misc_feature (61)..(61): /note="Nucleotide may be methylated to form 5-methylcytosine"
gtctgtagagtgtggcttagattccaggacttagaacctctgaatccttatctttcacatcgtcttctccgggaggggtaattaacgtttgtttgggggtgccaagaagagacattctcctc

SEQ ID NO: 7779 - DNA, 122 bp, Homo sapiens
  misc_feature (61)..(62): /note="This region represents a CpG dinucleotide"
  misc_feature (61)..(61): /note="Nucleotide may be methylated to form 5-methylcytosine"
gcttctgactgctttctgtctcaacccagagtgactctgtgggcaaatcaatacaagtatcgtctaaataagctatgactaaataataaaatatgataaacttttattatttattttgagac

SEQ ID NO: 7780 - DNA, 122 bp, Homo sapiens
  misc_feature (61)..(62): /note="This region represents a CpG dinucleotide"
  misc_feature (61)..(61): /note="Nucleotide may be methylated to form 5-methylcytosine"
gctcaggcagagttcatgttctctagccatacttcttctttccacaagctttgtaaaggacgtcagaattatttccctcacaggttacattgttcagattactgacctttcctgatctctgt

SEQ ID NO: 7781 - DNA, 122 bp, Homo sapiens
  misc_feature (61)..(62): /note="This region represents a CpG dinucleotide"
  misc_feature (61)..(61): /note="Nucleotide may be methylated to form 5-methylcytosine"
tttaagggagactgggacatcggaagaaaaaaggggtgatgcagagctcaaatctgtacacgcttgtttgaggtgatagcagacatccagatgaagaaaaccagcagacaggtgaaaatctt

SEQ ID NO: 7782 - DNA, 122 bp, Homo sapiens
  misc_feature (61)..(62): /note="This region represents a CpG dinucleotide"
  misc_feature (61)..(61): /note="Nucleotide may be methylated to form 5-methylcytosine"
tagccctgagctaccatacctggcctgttgaaactttcaaagttgcgatagatttatcagcgcagtgtttgttagaatgcttcgcaaatatttatttgttaaaatacaatgccaacctattt

SEQ ID NO: 7783 - DNA, 122 bp, Homo sapiens
  misc_feature (61)..(62): /note="This region represents a CpG dinucleotide"
  misc_feature (61)..(61): /note="Nucleotide may be methylated to form 5-methylcytosine"
cctgttctgataaccatctgacagttaataaagatatgattttctcaaggaaaaagaaatcgagagggagaggaaggggaagcaaaagggatggaaaaaaccccaaacaccttcaaacaaaa

SEQ ID NO: 7784 - DNA, 122 bp, Homo sapiens
  misc_feature (61)..(62): /note="This region represents a CpG dinucleotide"
  misc_feature (61)..(61): /note="Nucleotide may be methylated to form 5-methylcytosine"
gatgaggaaattgtaggctccacccctgaggacaatagcggactgagatagcttaggaggcggtgaattcatgagcagcacaggtctttagcagaaacaagttgactgctggttgtgatgtt

SEQ ID NO: 7785 - DNA, 122 bp, Homo sapiens
  misc_feature (61)..(62): /note="This region represents a CpG dinucleotide"
  misc_feature (61)..(61): /note="Nucleotide may be methylated to form 5-methylcytosine"
agagtgagaaggggactgaggcctaagcctagaggaacacccacatggaagcaccaaacacgggagactgagaaggagccaagagcctgggaaaaaaaccaggaaagtgtggttttaccagc

SEQ ID NO: 7786 - DNA, 122 bp, Homo sapiens
  misc_feature (61)..(62): /note="This region represents a CpG dinucleotide"
  misc_feature (61)..(61): /note="Nucleotide may be methylated to form 5-methylcytosine"
taaaatgtctccactaggtatggtgtttactgtattatttagtttactgagtgtcttagtcggttgggctgctatagctgggtgactttaaacagcagacatttatttgttacagttctgga

SEQ ID NO: 7787 - DNA, 122 bp, Homo sapiens
  misc_feature (61)..(62): /note="This region represents a CpG dinucleotide"
  misc_feature (61)..(61): /note="Nucleotide may be methylated to form 5-methylcytosine"
aaatagttcaaagagtttctgcatatcctttaaccagtgctctccaatgttaacacctgacgtagctatggtacaattacccaaactattaactaagccacagattgattcccacttcccga

SEQ ID NO: 7788 - DNA, 122 bp, Homo sapiens
  misc_feature (61)..(62): /note="This region represents a CpG dinucleotide"
  misc_feature (61)..(61): /note="Nucleotide may be methylated to form 5-methylcytosine"
gaagtgcttcagagctgcggagatgggagtgatttagcagctgcctcccccttgattgaccgcatcaggctttaaaaatatcaatggattcatcagcatcaaccctttgcagaactctcttg

SEQ ID NO: 7789 - DNA, 122 bp, Homo sapiens
  misc_feature (61)..(62): /note="This region represents a CpG dinucleotide"
  misc_feature (61)..(61): /note="Nucleotide may be methylated to form 5-methylcytosine"
ataatagcataacatgatagcacatctgcatttaattatgattccgtcttcctggctccacgttcacaaatttctaagcctttggagagaaggaatatttgctacaaacattggctgcagtg

SEQ ID NO: 7790 - DNA, 122 bp, Homo sapiens
  misc_feature (61)..(62): /note="This region represents a CpG dinucleotide"
  misc_feature (61)..(61): /note="Nucleotide may be methylated to form 5-methylcytosine"
aaaataaactgtcaagaaacagttcaaagagacccaggttatgcaatggcagacaagatacgctgagagaacataggcacagtgcacacttcactcttctaacaaaacagccaccatcaccc

SEQ ID NO: 7791 - DNA, 122 bp, Homo sapiens
  misc_feature (61)..(62): /note="This region represents a CpG dinucleotide"
  misc_feature (61)..(61): /note="Nucleotide may be methylated to form 5-methylcytosine"
caggacatcctcggcggctcctggggtttgaagagcaaacgtttttccctgggctcagtgcgttttgtcccaacttcatctgtttctgaaatgttctcacttggcagtgtctagtcaaggag

SEQ ID NO: 7792 - DNA, 122 bp, Homo sapiens
  misc_feature (61)..(62): /note="This region represents a CpG dinucleotide"
  misc_feature (61)..(61): /note="Nucleotide may be methylated to form 5-methylcytosine"
ttaaagattagccacctgctgttttcttcaccttagccaaaaacacataaatatataatgcgtcaaagttttagccattgaatagatgtaaataagatcctgggtaaaataaaattcctata

SEQ ID NO: 7793 - DNA, 122 bp, Homo sapiens
  misc_feature (61)..(62): /note="This region represents a CpG dinucleotide"
  misc_feature (61)..(61): /note="Nucleotide may be methylated to form 5-methylcytosine"
tcacacgtaattcccagttttgacatgcattggttgtgtgacctaggagatgtcacttcacgtctctgagttccagttttctgaactattgaaataggactaggagtgccctccttgcaatt

SEQ ID NO: 7794 - DNA, 122 bp, Homo sapiens
  misc_feature (61)..(62): /note="This region represents a CpG dinucleotide"
  misc_feature (61)..(61): /note="Nucleotide may be methylated to form 5-methylcytosine"
ctagtggcatgaagtacaattacagtgttgtgcaaccatcaccagcatccatcttccaaacgtttcatcttccaaaactgaaacaatatccccattaaacagtaatgtccaaatctcccctc

SEQ ID NO: 7795 - DNA, 122 bp, Homo sapiens
  misc_feature (61)..(62): /note="This region represents a CpG dinucleotide"
  misc_feature (61)..(61): /note="Nucleotide may be methylated to form 5-methylcytosine"
gaaggttgcactggattcacccagatcaacaccaagattagtattgagatcttggccaagcgctgtggctcaagcctgtaatcccagcactttgggaggccgaggcaggcagatcacctgag

SEQ ID NO: 7796 - DNA, 122 bp, Homo sapiens
  misc_feature (61)..(62): /note="This region represents a CpG dinucleotide"
  misc_feature (61)..(61): /note="Nucleotide may be methylated to form 5-methylcytosine"
tcagccaggcgggcaggcagcatgaacaaggcaaccactgggggatggcgcagtgccacacggcctgtggtagggacagacgtgcagaagatgctgagaatgtgatccctgttcttggggga

SEQ ID NO: 7797 - DNA, 122 bp, Homo sapiens
  misc_feature (61)..(62): /note="This region represents a CpG dinucleotide"
  misc_feature (61)..(61): /note="Nucleotide may be methylated to form 5-methylcytosine"
tctggagcctttgttctagaggaagctgcatggagtgtgcagtctggcaggggatgcccacgtgcagtcgtggtgttcattgccagcgcatgcagttcagaggaacgtgggcggtcggagga

SEQ ID NO: 7798 - DNA, 122 bp, Homo sapiens
  misc_feature (61)..(62): /note="This region represents a CpG dinucleotide"
  misc_feature (61)..(61): /note="Nucleotide may be methylated to form 5-methylcytosine"
agtagtcaccatgctaaaattaaactagcagtgtctcaatacaaagcacaacaattaatccgcaggcaaagtggatggtcacgttcaagattatagcgcgcttaagttacatcacaaggagt

SEQ ID NO: 7799 - DNA, 122 bp, Homo sapiens
  misc_feature (61)..(62): /note="This region represents a CpG dinucleotide"
  misc_feature (61)..(61): /note="Nucleotide may be methylated to form 5-methylcytosine"
gtagacgtgatgtcaagaactctgaattagaatgccttgcctttgtccttgtcacatctccgtgacctcatctgcctagtttagtgcctacattgcaggttcatttgaaactcacctcttct

SEQ ID NO: 7800 - DNA, 122 bp, Homo sapiens
  misc_feature (61)..(62): /note="This region represents a CpG dinucleotide"
  misc_feature (61)..(61): /note="Nucleotide may be methylated to form 5-methylcytosine"
tcaatgagtgcttgtgttctgggaatgggggcggggtgacatccagcctctttccctctccgcccccgacaggatgtcccaggctggacgcggcagaggaggtcccccacaagtgaaggtcc

SEQ ID NO: 7801 - DNA, 122 bp, Homo sapiens
  misc_feature (61)..(62): /note="This region represents a CpG dinucleotide"
  misc_feature (61)..(61): /note="Nucleotide may be methylated to form 5-methylcytosine"
gcccaggctggtctccaattcgtggcctcaagtgactctctcacctctgccttatatttccgtttgagctgttattatcaactggagtaacatttctagttggggaaaaaagaactgatcct

SEQ ID NO: 7802 - DNA, 122 bp, Homo sapiens
  misc_feature (61)..(62): /note="This region represents a CpG dinucleotide"
  misc_feature (61)..(61): /note="Nucleotide may be methylated to form 5-methylcytosine"
aatgaaatgaattgtattataaccatcttggaaaaatagctgctgatctcataaattcatcgagcttcctggttccaaagccctctcttacaataatagtaagtgttgctgtgctcagtaaa

SEQ ID NO: 7803 - DNA, 122 bp, Homo sapiens
  misc_feature (61)..(62): /note="This region represents a CpG dinucleotide"
  misc_feature (61)..(61): /note="Nucleotide may be methylated to form 5-methylcytosine"
acctcgtcagctcctctagccctcggccagactctggcaacaccttggtttgcctggcaccgcaggcaatttcctggaaccccacccccacccaggaacggggaccacagcacctttaaagg

SEQ ID NO: 7804 - DNA, 122 bp, Homo sapiens
  misc_feature (61)..(62): /note="This region represents a CpG dinucleotide"
  misc_feature (61)..(61): /note="Nucleotide may be methylated to form 5-methylcytosine"
ccagtgtcctttattggacatcactggccatctccacctgcccagaatccacagtatcaccgctcctactctgcaccacgcccagtcctgcccaagcagaggggcttcctctagtgctcaat

SEQ ID NO: 7805 - DNA, 122 bp, Homo sapiens
  misc_feature (61)..(62): /note="This region represents a CpG dinucleotide"
  misc_feature (61)..(61): /note="Nucleotide may be methylated to form 5-methylcytosine"
tgcaatttaacaaatggcttcctcacacaaactataaggttgatacagaatgattgacaacgatgccaacatttgaaaagcagctaagagcttcaaagcctacagtagctgaggccaggagt

SEQ ID NO: 7806 - DNA, 122 bp, Homo sapiens
  misc_feature (61)..(62): /note="This region represents a CpG dinucleotide"
  misc_feature (61)..(61): /note="Nucleotide may be methylated to form 5-methylcytosine"
ccggtaggtgcaggggccgaaggccaggcccagtggacccagccgcctgaaggggagccacggcctcagaaaacctctgcccgcccccgcggaaaaccgctgtggggaagtctgaaggcctt

SEQ ID NO: 7807 - DNA, 122 bp, Homo sapiens
  misc_feature (61)..(62): /note="This region represents a CpG dinucleotide"
  misc_feature (61)..(61): /note="Nucleotide may be methylated to form 5-methylcytosine"
cttgttacaggaatactagcaatatatacaaacaaggtacacaaacacagcgacaggacacgttccaccaattccacacagccacaatcctaagtcattactcttagcaaagcctcatataa

SEQ ID NO: 7808 - DNA, 122 bp, Homo sapiens
  misc_feature (61)..(62): /note="This region represents a CpG dinucleotide"
  misc_feature (61)..(61): /note="Nucleotide may be methylated to form 5-methylcytosine"
atgtgttcactgtggctggccatgggcagagagtaatgtgaggtagcaaagaagtggttgcgtggggccagatgatgcattagatgctggctttgacattcatttaataggcagtagatgtt

SEQ ID NO: 7809 - DNA, 122 bp, Homo sapiens
  misc_feature (61)..(62): /note="This region represents a CpG dinucleotide"
  misc_feature (61)..(61): /note="Nucleotide may be methylated to form 5-methylcytosine"
ccgcagggacggtgtcccctgagcacacaggatgcagggaacccgtggtgtccacagggacggtgtctcctgagcgcacaggatgcagggaacccggggtgtccgcagggacggtgtcccct

SEQ ID NO: 7810 - DNA, 122 bp, Homo sapiens
  misc_feature (61)..(62): /note="This region represents a CpG dinucleotide"
  misc_feature (61)..(61): /note="Nucleotide may be methylated to form 5-methylcytosine"
agttgttatctatagagcaggggtccccaaccccccatgccacaaactggtaattgtccacggcctgttaggaaccaggccgcacagcaggaggtgaacagtgggcaagcaagaattaccac

SEQ ID NO: 7811 - DNA, 122 bp, Homo sapiens
  misc_feature (61)..(62): /note="This region represents a CpG dinucleotide"
  misc_feature (61)..(61): /note="Nucleotide may be methylated to form 5-methylcytosine"
agaggtcagggagcagaagagaagtgtcaggagatttgagtccctcaattagtttttctacgttgggcagagagacaaaaagaaagcaaaaatgtagtaagatattaaagccagcggatcat

SEQ ID NO: 7812 - DNA, 122 bp, Homo sapiens
  misc_feature (61)..(62): /note="This region represents a CpG dinucleotide"
  misc_feature (61)..(61): /note="Nucleotide may be methylated to form 5-methylcytosine"
agaactgaccctcgggctgaagcttgaggtcatccttcatgttcagagttcctcacatgccgtcccctgctctctgccagactgtttggtgacaaagagtccagagggagggagagtaagaa

SEQ ID NO: 7813 - DNA, 122 bp, Homo sapiens
  misc_feature (61)..(62): /note="This region represents a CpG dinucleotide"
  misc_feature (61)..(61): /note="Nucleotide may be methylated to form 5-methylcytosine"
gaacaatgtgtctgactcacagtaagtccctgttctataccagtgcttctcaaaccttagcgtgcatcaaaatcccctggagagcttggtaacatacagattgctgggacccatcatggagt

SEQ ID NO: 7814 - DNA, 122 bp, Homo sapiens
  misc_feature (61)..(62): /note="This region represents a CpG dinucleotide"
  misc_feature (61)..(61): /note="Nucleotide may be methylated to form 5-methylcytosine"
cgccgccttatcttccacgcaacaggctttctcccgcaacctagtcccgggaatcagctccgagggggcggggctcctttcgaatctctcaggccccacctactcaagccacacgcgcaccg

SEQ ID NO: 7815 - DNA, 122 bp, Homo sapiens
  misc_feature (61)..(62): /note="This region represents a CpG dinucleotide"
  misc_feature (61)..(61): /note="Nucleotide may be methylated to form 5-methylcytosine"
tggaagcaggcatggtgcgtttcagccaacctctgaatccaaggatctactcatcaataccgctgtgcatttctgaaagaaaaaaaaaatgtatataaaatgagaacaaagagaaaaagggt

SEQ ID NO: 7816 - DNA, 122 bp, Homo sapiens
  misc_feature (61)..(62): /note="This region represents a CpG dinucleotide"
  misc_feature (61)..(61): /note="Nucleotide may be methylated to form 5-methylcytosine"
acagggacaccaaggcaggtgcagtgtgggcggggctgggtcctgggctttatctttgagcgtttgcggaactggggcaggggctgccaagtgcacggccccagagtccttgcccagagcag

SEQ ID NO: 7817 - DNA, 122 bp, Homo sapiens
  misc_feature (61)..(62): /note="This region represents a CpG dinucleotide"
  misc_feature (61)..(61): /note="Nucleotide may be methylated to form 5-methylcytosine"
catcaaaataccagcaaactgatttcagcagcatatagaaaggattatacatcatgaccacgtgggatttatcacagtatgtgagcttggcttaccatatgaaaatcaatcaatgtaacatg

SEQ ID NO: 7818 - DNA, 122 bp, Homo sapiens
  misc_feature (61)..(62): /note="This region represents a CpG dinucleotide"
  misc_feature (61)..(61): /note="Nucleotide may be methylated to form 5-methylcytosine"
ccttagatataagagtaaatattttgttctgccctcaattcaaatatgccctcaggagagcgacatcaacagtcatgcggttactgtatggcaggctttgtctggaaccaagcactgaaact

SEQ ID NO: 7819 - DNA, 122 bp, Homo sapiens
  misc_feature (61)..(62): /note="This region represents a CpG dinucleotide"
  misc_feature (61)..(61): /note="Nucleotide may be methylated to form 5-methylcytosine"
tctgtctcaaaaaaaaaaaaaaaagggggggcctgcctacgtcctcgtcgttaatgtgaacgcttctggcaaactattaccataaaattgggagatagtaaggattaaggaatggagactta

SEQ ID NO: 7820 - DNA, 122 bp, Homo sapiens
  misc_feature (61)..(62): /note="This region represents a CpG dinucleotide"
  misc_feature (61)..(61): /note="Nucleotide may be methylated to form 5-methylcytosine"
tgcctctaaagctcttggttttatcagctcacccaaactgaagatgaaacactggctcctcgtgatgctgttgcaacacagatgtgtcaccaggtccccaagatgatatgttaagatggctc

SEQ ID NO: 7821 - DNA, 122 bp, Homo sapiens
  misc_feature (61)..(62): /note="This region represents a CpG dinucleotide"
  misc_feature (61)..(61): /note="Nucleotide may be methylated to form 5-methylcytosine"
cgggtattataagacttgacactggctgagtgcttcacttctgtaaaaccgtagatcctacgtggaaaagatgactgaattgctgcatttaaaaccacaagtccaagagtatttaagaactt

SEQ ID NO: 7822 - DNA, 122 bp, Homo sapiens
  misc_feature (61)..(62): /note="This region represents a CpG dinucleotide"
  misc_feature (61)..(61): /note="Nucleotide may be methylated to form 5-methylcytosine"
tgacgttgccccagctgaggggccttggtttcagaggcctactcaatgcattatttcatccgagcctgcccagtgctcacactctcatagaggcggggaataaactgacaacaaatcgcaac

SEQ ID NO: 7823 - DNA, 122 bp, Homo sapiens
  misc_feature (61)..(62): /note="This region represents a CpG dinucleotide"
  misc_feature (61)..(61): /note="Nucleotide may be methylated to form 5-methylcytosine"
agaaaggctggttgcaggcagaaccagatggttgcagtccacacggggaagcaaattggccgtgacatttcagccatgtgaggtttatttaggattagctaagaattctcagccttgactcc

SEQ ID NO: 7824 - DNA, 122 bp, Homo sapiens
  misc_feature (61)..(62): /note="This region represents a CpG dinucleotide"
  misc_feature (61)..(61): /note="Nucleotide may be methylated to form 5-methylcytosine"
gtagggaatgaaaactaaacagctctttacatgaagttccatgtcctattgcatttatctcgtgggttaaaatcattcattgatcgctaatcacctgtggttgtttacacacaacaggttcc

SEQ ID NO: 7825 - DNA, 122 bp, Homo sapiens
  misc_feature (61)..(62): /note="This region represents a CpG dinucleotide"
  misc_feature (61)..(61): /note="Nucleotide may be methylated to form 5-methylcytosine"
agtctgtgtcccttcttagagcctaactctgttcctcagccctcccgcccagtgacacttcgtaggactcattgcccaggaatcctgctcagtcattgcattgcccggctctgacctgggat

SEQ ID NO: 7826 - DNA, 122 bp, Homo sapiens
  misc_feature (61)..(62): /note="This region represents a CpG dinucleotide"
  misc_feature (61)..(61): /note="Nucleotide may be methylated to form 5-methylcytosine"
ctggattgcccaccactgccatctacagcccttcccaaaaactaaactgttgctgtgaaacgaatgaaaggccactaagttagaagggtgagaacggctttaattctaaataataccagcca

SEQ ID NO: 7827 - DNA, 122 bp, Homo sapiens
  misc_feature (61)..(62): /note="This region represents a CpG dinucleotide"
  misc_feature (61)..(61): /note="Nucleotide may be methylated to form 5-methylcytosine"
gatgttacctagaacagtcaaagctcacgtgaagctgctaagccccagactttttcaacacgtgctactttcccaagacaaacatgctacttcccctcagccaggggcaaaccccagcaggt

SEQ ID NO: 7828 - DNA, 122 bp, Homo sapiens
  misc_feature (61)..(62): /note="This region represents a CpG dinucleotide"
  misc_feature (61)..(61): /note="Nucleotide may be methylated to form 5-methylcytosine"
gacaagtcaggattgtgcctccagtcagaaggaccatgaagagagagaagagggcagagccgtgcatggggctgctccccaggacctgagcaggaacctggagttttcaggtgagaggctca

SEQ ID NO: 7829 - DNA, 122 bp, Homo sapiens
  misc_feature (61)..(62): /note="This region represents a CpG dinucleotide"
  misc_feature (61)..(61): /note="Nucleotide may be methylated to form 5-methylcytosine"
tgtgtatagaaacaggtataccctattggtatacacactggtgtagacacagatatagcccgtctttgtgcactcctataagctgtatcacaaataaagaaaagtagttagtaaacattcct

SEQ ID NO: 7830 - DNA, 122 bp, Homo sapiens
  misc_feature (61)..(62): /note="This region represents a CpG dinucleotide"
  misc_feature (61)..(61): /note="Nucleotide may be methylated to form 5-methylcytosine"
tcgcctaacctggctgtgtggcctcgggtgggtcactcaccctccaggagcagcgtaaagcgacgaagttgttaggtgacttctagagtctctgagtttgaaaactccaagactccaagcat

SEQ ID NO: 7831 - DNA, 122 bp, Homo sapiens
  misc_feature (61)..(62): /note="This region represents a CpG dinucleotide"
  misc_feature (61)..(61): /note="Nucleotide may be methylated to form 5-methylcytosine"
cctactgacctcactccctgatgagaagggtccagcagtgcatgtccacccctcagaccacgagcgcccgtgtctaagacaccaattgttcctgactgcactgctcctgcctgcacgtaact

SEQ ID NO: 7832 - DNA, 122 bp, Homo sapiens
  misc_feature (61)..(62): /note="This region represents a CpG dinucleotide"
  misc_feature (61)..(61): /note="Nucleotide may be methylated to form 5-methylcytosine"
tctctagaacttattcatcttgaataactgaaactttatacctgttcaacaataacttcccgtttctcccttcccccagcccctggcaactaccattctactttccgtttctgagtctattt

SEQ ID NO: 7833 - DNA, 122 bp, Homo sapiens
  misc_feature (61)..(62): /note="This region represents a CpG dinucleotide"
  misc_feature (61)..(61): /note="Nucleotide may be methylated to form 5-methylcytosine"
atcactgaattttcactactgtggagcagggtcatgaattaaacccttggcaggagccagcgtttactttaggtccagccctgctctgcaaatcacaaaggctgcagcaatcctgagccatt

SEQ ID NO: 7834 - DNA, 122 bp, Homo sapiens
  misc_feature (61)..(62): /note="This region represents a CpG dinucleotide"
  misc_feature (61)..(61): /note="Nucleotide may be methylated to form 5-methylcytosine"
agtccactatttgtaagacattattccttattaccataaagctgacaaagtctctcatgccgaaacaaatccaggttacccagacttagggtgcactttgatatgctaaaggcaatgagggt

SEQ ID NO: 7835 - DNA, 122 bp, Homo sapiens
  misc_feature (61)..(62): /note="This region represents a CpG dinucleotide"
  misc_feature (61)..(61): /note="Nucleotide may be methylated to form 5-methylcytosine"
ttcaatttggcccttgtacagcctggaatttagaggaagagaaactcactaacttctaagcgcagttaaagttacaagaacctggaaagggggaaaatgtatcgcaaactaagatgctttaa

SEQ ID NO: 7836 - DNA, 122 bp, Homo sapiens
  misc_feature (61)..(62): /note="This region represents a CpG dinucleotide"
  misc_feature (61)..(61): /note="Nucleotide may be methylated to form 5-methylcytosine"
ccaggcctcttgccctttcttcattcaactgtggctctttcaaggtgccacttaaggcatcgctgccttcaggaagccctccttgatgcccaaatttgggtttggttcctcctttgaactac

SEQ ID NO: 7837 - DNA, 122 bp, Homo sapiens
  misc_feature (61)..(62): /note="This region represents a CpG dinucleotide"
  misc_feature (61)..(61): /note="Nucleotide may be methylated to form 5-methylcytosine"
tacctttagcatggattcacaaccttctgcttgtttcagctaagacagaagtgtcagccacgtcagctccaccttaaggaggggcctggatcacaaactgtagttattagctcaagcagagg

SEQ ID NO: 7838 - DNA, 122 bp, Homo sapiens
  misc_feature (61)..(62): /note="This region represents a CpG dinucleotide"
  misc_feature (61)..(61): /note="Nucleotide may be methylated to form 5-methylcytosine"
cctagaaacactagtgggaaatccccatcagaagtcaacacagacaagctgcacctgtttcgtataaacagtgatgagggcattgtaaaaatgggtttcctggcctactgggatgttaagga

SEQ ID NO: 7839 - DNA, 122 bp, Homo sapiens
  misc_feature (61)..(62): /note="This region represents a CpG dinucleotide"
  misc_feature (61)..(61): /note="Nucleotide may be methylated to form 5-methylcytosine"
ggcataatgaccgtatcagaacagacatctggtagtatacaccacatagttgccagactccgataccaagggcacatctaagttctcccaccctgatttgcatgcctcaaattcagaattag

SEQ ID NO: 7840 - DNA, 122 bp, Homo sapiens
  misc_feature (61)..(62): /note="This region represents a CpG dinucleotide"
  misc_feature (61)..(61): /note="Nucleotide may be methylated to form 5-methylcytosine"
cttgggatataacaggtgaatgcagaccctttaaatagtggatgtacactcagatatttccgaattacataaataacactcatagtagacacacattttggatacccaaaagaatatacaca

SEQ ID NO: 7841 - DNA, 122 bp, Homo sapiens
  misc_feature (61)..(62): /note="This region represents a CpG dinucleotide"
  misc_feature (61)..(61): /note="Nucleotide may be methylated to form 5-methylcytosine"
caacgtggagctcgagcaactcagctgcagagtaagagctcgcagccgtgcgtgtttccacgtgtgggagcgcctctcattcccccaccacacacgcccagtttccgcttctcgcccccaag

SEQ ID NO: 7842 - DNA, 122 bp, Homo sapiens
  misc_feature (61)..(62): /note="This region represents a CpG dinucleotide"
  misc_feature (61)..(61): /note="Nucleotide may be methylated to form 5-methylcytosine"
agagtcagctgactgagggccaacagaaacagcaggcagccgctgtcagccacaaagaaacgcagatcctgaaactgtcatcatacaggtgagaggatagttatgtgtgaggtgttcaaaga

SEQ ID NO: 7843 - DNA, 122 bp, Homo sapiens
  misc_feature (61)..(62): /note="This region represents a CpG dinucleotide"
  misc_feature (61)..(61): /note="Nucleotide may be methylated to form 5-methylcytosine"
tggcaacagtctcttggaacaggttgtcatcagcatcccgatttgaggaggaggacgttacggcttagagagagaggtttgtaacttgcccaagtcccacagctagtaagttcagggctagg

SEQ ID NO: 7844 - DNA, 122 bp, Homo sapiens
  misc_feature (61)..(62): /note="This region represents a CpG dinucleotide"
  misc_feature (61)..(61): /note="Nucleotide may be methylated to form 5-methylcytosine"
attagcccagggctagttctgaaagtcaaactctgcctggcagaagtaggtgaatgacagcgatcagaggacattgatttttgccagctcttacatgagtcataaatgtgatgatatttgtg

SEQ ID NO: 7845 - DNA, 122 bp, Homo sapiens
  misc_feature (61)..(62): /note="This region represents a CpG dinucleotide"
  misc_feature (61)..(61): /note="Nucleotide may be methylated to form 5-methylcytosine"
tcccaactcagtagtggtgatgagagagtgggaccgtaatgtcttcgtagggtggcaccccggacatggtatttactatcccagcacgcagacgcctaaacacaaagtcaacttcagggatc

SEQ ID NO: 7846 - DNA, 122 bp, Homo sapiens
  misc_feature (61)..(62): /note="This region represents a CpG dinucleotide"
  misc_feature (61)..(61): /note="Nucleotide may be methylated to form 5-methylcytosine"
ccttgggaataatgtgtagcataaactgaggcagctgttaagcagttcgaaagctgaaagcgatttaagtctgcccccgcccccccccgccctccgccccgcccccgccctccgccccgcgt

SEQ ID NO: 7847 - DNA, 122 bp, Homo sapiens
  misc_feature (61)..(62): /note="This region represents a CpG dinucleotide"
  misc_feature (61)..(61): /note="Nucleotide may be methylated to form 5-methylcytosine"
gactcatcatgaaaagacgtttcttcactgcttccttccagcccatttcgcaaagcagcacgcatgtttaatgcaacaatggtatcatccacactgttgctgttgctgtgtttatttccagc

SEQ ID NO: 7848 - DNA, 122 bp, Homo sapiens
  misc_feature (61)..(62): /note="This region represents a CpG dinucleotide"
  misc_feature (61)..(61): /note="Nucleotide may be methylated to form 5-methylcytosine"
caggggaggaggggagaaggaaaaaaaaatgagattgcccaaggattgtgaataatgtttcgtatactgacatctttaagtgactcaactgtggatactgtatgactcactggctccctgaa

SEQ ID NO: 7849 - DNA, 122 bp, Homo sapiens
  misc_feature (61)..(62): /note="This region represents a CpG dinucleotide"
  misc_feature (61)..(61): /note="Nucleotide may be methylated to form 5-methylcytosine"
tgggtctcacagaaggctgctaagtcatggctcattctggccatggggtcattcagtttccgcagctccctggccagctctgatgccatatccatagcactgaactcatcccaccaggctac

SEQ ID NO: 7850 - DNA, 122 bp, Homo sapiens
  misc_feature (61)..(62): /note="This region represents a CpG dinucleotide"
  misc_feature (61)..(61): /note="Nucleotide may be methylated to form 5-methylcytosine"
ccttcagctggagctctccaggcaaggcctggctgctgttctgggcaaggacacaggtcacgctgcgcacgctggtgccgttccctgccttctcatgctggtcccgcaggaggaagcccagc

SEQ ID NO: 7851 - DNA, 122 bp, Homo sapiens
  misc_feature (61)..(62): /note="This region represents a CpG dinucleotide"
  misc_feature (61)..(61): /note="Nucleotide may be methylated to form 5-methylcytosine"
gaaaaggctaaaattcaagactgaccataccagctttccgcaaggatgtcaacctttatgcgctgctggtgagacacaatgcaaaacaggacagccactttggagttccttcagaaattaat

SEQ ID NO: 7852 - DNA, 122 bp, Homo sapiens
  misc_feature (61)..(62): /note="This region represents a CpG dinucleotide"
  misc_feature (61)..(61): /note="Nucleotide may be methylated to form 5-methylcytosine"
ggctagagaggctaatctcaaagggctagaaatgagtcagtttccacgctcaacatcaggcgtgtggcttcctgaagcacagacgaggaagcgttgaatttcaaagagcaaatttttttttt

SEQ ID NO: 7853 - DNA, 122 bp, Homo sapiens
  misc_feature (61)..(62): /note="This region represents a CpG dinucleotide"
  misc_feature (61)..(61): /note="Nucleotide may be methylated to form 5-methylcytosine"
gactctgtaaagagctttacccttcggtgatacgatcttgaacctgttggagcatttggacgcatttcttttaaggaagttcacctccagatgtactcagagggcctggtcttagctgccac

SEQ ID NO: 7854 - DNA, 122 bp, Homo sapiens
  misc_feature (61)..(62): /note="This region represents a CpG dinucleotide"
  misc_feature (61)..(61): /note="Nucleotide may be methylated to form 5-methylcytosine"
tcttccggctcaattacacttcaaggtcaatgatgctataaaataagctaaaaatagcttcgtaggcataggagatcatccaaaaggtgtgtggatttcaaaccaacccaaagagaaggtaa

SEQ ID NO: 7855 - DNA, 122 bp, Homo sapiens
  misc_feature (61)..(62): /note="This region represents a CpG dinucleotide"
  misc_feature (61)..(61): /note="Nucleotide may be methylated to form 5-methylcytosine"
caggcagaattaaccccaggtgatttgtgtgcagagtacaatttgagacgtgctgccttgcgtgaccaggtgatctgagtttacttctagcgctaagacccaactttctctaagattatctt

SEQ ID NO: 7856 - DNA, 122 bp, Homo sapiens
  misc_feature (61)..(62): /note="This region represents a CpG dinucleotide"
  misc_feature (61)..(61): /note="Nucleotide may be methylated to form 5-methylcytosine"
ccaccgtgaaatcaaacccgcggggttctgtatgcgccccatccccgctcctaccaccatcgctttgatttcaagaacactcacaagccccaagccctgccagcaggaggactgtcaggaac

SEQ ID NO: 7857 - DNA, 122 bp, Homo sapiens
  misc_feature (61)..(62): /note="This region represents a CpG dinucleotide"
  misc_feature (61)..(61): /note="Nucleotide may be methylated to form 5-methylcytosine"
cttctgtgaatcctgctgctgtggacatttgcgtagtcctcgtgtggatgctgctgtggacgtctgcgtcgtcctcgtgtggatgctgctgtggacgtctgcgtcgtcctcgtgtggatgct

SEQ ID NO: 7858 - DNA, 122 bp, Homo sapiens
  misc_feature (61)..(62): /note="This region represents a CpG dinucleotide"
  misc_feature (61)..(61): /note="Nucleotide may be methylated to form 5-methylcytosine"
ttttacaaaagtgagtcataggatttaaggtttctaaactatgctgtccagcactgcagccgctagccacatgtggtcatagagcactgagaatgtgactagtccaagttgagatgtgcttt

SEQ ID NO: 7859 - DNA, 122 bp, Homo sapiens
  misc_feature (61)..(62): /note="This region represents a CpG dinucleotide"
  misc_feature (61)..(61): /note="Nucleotide may be methylated to form 5-methylcytosine"
ccttcctctccagccaccctgagtcatacaacagctgtgagaacattagttacaagggagcgagctgcagacactttaggtgctgggctgtatcccattatatctggatgctgacaccagga

SEQ ID NO: 7860 - DNA, 122 bp, Homo sapiens
  misc_feature (61)..(62): /note="This region represents a CpG dinucleotide"
  misc_feature (61)..(61): /note="Nucleotide may be methylated to form 5-methylcytosine"
tttaccacccatttttttggaggcatagagatcttcattctcacagggatggcctatgaccgctatgtggccatttgcaagcccctgcactacaccattattatgagcaggcaaaagtgtaa

SEQ ID NO: 7861 - DNA, 122 bp, Homo sapiens
  misc_feature (61)..(62): /note="This region represents a CpG dinucleotide"
  misc_feature (61)..(61): /note="Nucleotide may be methylated to form 5-methylcytosine"
tttgtaaaaggtccatccctctgggctcgtgtgagtttcctcattccacagaggtgatgtcgtgttctcagctcacacatcaggggatgcgtcatctcagtgtgtcccttcactggtgacaa

SEQ ID NO: 7862 - DNA, 122 bp, Homo sapiens
  misc_feature (61)..(62): /note="This region represents a CpG dinucleotide"
  misc_feature (61)..(61): /note="Nucleotide may be methylated to form 5-methylcytosine"
cataagtcagaaatgacgtcacggttacagccacgatactgatgacagccattcacaacacgctgggccagtgcgaaatcctgtcttgctgactgcccatgccagtctaggagggggtgtta

SEQ ID NO: 7863 - DNA, 122 bp, Homo sapiens
  misc_feature (61)..(62): /note="This region represents a CpG dinucleotide"
  misc_feature (61)..(61): /note="Nucleotide may be methylated to form 5-methylcytosine"
attgtatggtacagtagtgccttatatatagtactcactcaataaatgaggaatttaattcgttctcatctagttccccattggaaaaaaagtgcattgtaatcttaagggacttttgcaat

SEQ ID NO: 7864 - DNA, 122 bp, Homo sapiens
  misc_feature (61)..(62): /note="This region represents a CpG dinucleotide"
  misc_feature (61)..(61): /note="Nucleotide may be methylated to form 5-methylcytosine"
caacatggcctgctgtatgtcacagagaggactgtattatatttgtaagagtattagtgacgtgtgagaggctatacataatgcctgtgaacaaacaaaagtcaccttggttattgactcat

SEQ ID NO: 7865 - DNA, 122 bp, Homo sapiens
  misc_feature (61)..(62): /note="This region represents a CpG dinucleotide"
  misc_feature (61)..(61): /note="Nucleotide may be methylated to form 5-methylcytosine"
tggaccctgacgactgcggtggtcccatctcaggagtgggctgcagcgggcagatgaggccgtcaaggcccacggtggttccccttcatctttgagcaccgaaagcaaatgcactgccgagt

SEQ ID NO: 7866 - DNA, 122 bp, Homo sapiens
  misc_feature (61)..(62): /note="This region represents a CpG dinucleotide"
  misc_feature (61)..(61): /note="Nucleotide may be methylated to form 5-methylcytosine"
acagtacactattacctcacctttaatattcattgtgtccacagctgggataaatacttgcgttgggtgaccatggggcagagcagcctgtgctttgtgtatatgaagagttttctagaagg

SEQ ID NO: 7867 - DNA, 122 bp, Homo sapiens
  misc_feature (61)..(62): /note="This region represents a CpG dinucleotide"
  misc_feature (61)..(61): /note="Nucleotide may be methylated to form 5-methylcytosine"
ttcgattactcatcctatccctttgcacaatggagaaatttacatgtattcagccctagccgtccttctagtcattctctcagtttagtacttacttgttttcttatttgggttttggcctg

SEQ ID NO: 7868 - DNA, 122 bp, Homo sapiens
  misc_feature (61)..(62): /note="This region represents a CpG dinucleotide"
  misc_feature (61)..(61): /note="Nucleotide may be methylated to form 5-methylcytosine"
gattctgatgaaacgggaaatgtcatgcatgactgttgctgcactttgagtattaagaggcgagccttaagattacagttgagaacacatctggtttaaagtgagtcctgcaaaaaacaaaa

SEQ ID NO: 7869 - DNA, 122 bp, Homo sapiens
  misc_feature (61)..(62): /note="This region represents a CpG dinucleotide"
  misc_feature (61)..(61): /note="Nucleotide may be methylated to form 5-methylcytosine"
aggtgggctgatggacatattaattggttataagtgttatttaacaagagtaggcttcttcgtatatgaatacctgtccaaggaaccaggatacttatgacagctgggcaggaaccctgatc

SEQ ID NO: 7870 - DNA, 122 bp, Homo sapiens
  misc_feature (61)..(62): /note="This region represents a CpG dinucleotide"
  misc_feature (61)..(61): /note="Nucleotide may be methylated to form 5-methylcytosine"
agttgctaatacatcagaaagctgtgttcttcacaatgtcctcatgttttttgtggttcacggcagcaagtaaagatgaactgtggaggttgcagttaatcaagttactttaaaatgaaaag

SEQ ID NO: 7871 - DNA, 122 bp, Homo sapiens
  misc_feature (61)..(62): /note="This region represents a CpG dinucleotide"
  misc_feature (61)..(61): /note="Nucleotide may be methylated to form 5-methylcytosine"
ccgcccccaggaccttcgccccgctctgggaggtcttccgcgtctcctcggacaagctggcgctgtgccacctggaactgacacggaagttacaggatctcatcaaggacgttctccgctac

SEQ ID NO: 7872 - DNA, 122 bp, Homo sapiens
  misc_feature (61)..(62): /note="This region represents a CpG dinucleotide"
  misc_feature (61)..(61): /note="Nucleotide may be methylated to form 5-methylcytosine"
gatgagggccttgacctcaatggcagatcagttcaccctacattgtaaatggctcatatgcgtagagcaaacggtgatgggtggagggcagtggaaggggcgtggtgggaagtccagagaga

SEQ ID NO: 7873 - DNA, 122 bp, Homo sapiens
  misc_feature (61)..(62): /note="This region represents a CpG dinucleotide"
  misc_feature (61)..(61): /note="Nucleotide may be methylated to form 5-methylcytosine"
ccagaagaaggaccgctagatgtagaggtctgggaacaagtggggagaaatattaaacaacgttatgcacaagggcaatgtgtcccagtaacagcttttaatgctatgggctttaattagag

SEQ ID NO: 7874 - DNA, 122 bp, Homo sapiens
  misc_feature (61)..(62): /note="This region represents a CpG dinucleotide"
  misc_feature (61)..(61): /note="Nucleotide may be methylated to form 5-methylcytosine"
atttgctttactgcagtggtctcaaccaaacctacaacatttctgaggtgtgcctgtaatcgtaatctcagtttccctcactttaagaaatctttctgactatgcccaaacagaagtgtttt

SEQ ID NO: 7875 - DNA, 122 bp, Homo sapiens
  misc_feature (61)..(62): /note="This region represents a CpG dinucleotide"
  misc_feature (61)..(61): /note="Nucleotide may be methylated to form 5-methylcytosine"
ccaggattcagtgacccacgtctgtttgaggctgttctatgttgttccatccaagctgagcgcattcttggcttcaggtcagcacacacctcctggaatagtgccttagcttgcacttttga

SEQ ID NO: 7876 - DNA, 122 bp, Homo sapiens
  misc_feature (61)..(62): /note="This region represents a CpG dinucleotide"
  misc_feature (61)..(61): /note="Nucleotide may be methylated to form 5-methylcytosine"
ttttgtcaggttgggttctttctcagctttctctccttggcttgcaaatgtctgccttctcgctatgtcctcacatggtctcccctttgtgggcatgcaccccctggtgtttctccatgtcc

SEQ ID NO: 7877 - DNA, 122 bp, Homo sapiens
  misc_feature (61)..(62): /note="This region represents a CpG dinucleotide"
  misc_feature (61)..(61): /note="Nucleotide may be methylated to form 5-methylcytosine"
tactttaaccttgctccagacactctgacatctctgtttagtctctggtgtaaaaaggttcgtctctcatatttcttgaggttggggaaaggaaatggtcacagagtttaggtgagggtggg

SEQ ID NO: 7878 - DNA, 122 bp, Homo sapiens
  misc_feature (61)..(62): /note="This region represents a CpG dinucleotide"
  misc_feature (61)..(61): /note="Nucleotide may be methylated to form 5-methylcytosine"
ggcaaaacaggttacaggagggaaaaagaggagacatggctagcaaagatggttttgttacgtaggtggaaacccacaggtagcaaccctcaaaagatgtagtaaatgtttctttgagatct

SEQ ID NO: 7879 - DNA, 122 bp, Homo sapiens
  misc_feature (61)..(62): /note="This region represents a CpG dinucleotide"
  misc_feature (61)..(61): /note="Nucleotide may be methylated to form 5-methylcytosine"
agagccaagggagaaaaaaggtagaacatgattttaataaaaggtctttacctatagaaacgggtgactcacagagacactcaggatagatcaccatggatactgtctctggccgaaggaga

SEQ ID NO: 7880 - DNA, 122 bp, Homo sapiens
  misc_feature (61)..(62): /note="This region represents a CpG dinucleotide"
  misc_feature (61)..(61): /note="Nucleotide may be methylated to form 5-methylcytosine"
gagggtttccagaatggctgttgtggcagttgtcacactgtgctcagttccccatgtggtcgtaggtctgatgcaacctttttcttgtctgtcctttagctgacccttttcagccttgccat

SEQ ID NO: 7881 - DNA, 122 bp, Homo sapiens
  misc_feature (61)..(62): /note="This region represents a CpG dinucleotide"
  misc_feature (61)..(61): /note="Nucleotide may be methylated to form 5-methylcytosine"
aagttacagagctgagatacaaacccggcctctgatctggagcccaggctcccagtcccacggcataacaggtggagtggatactcaccagcaccctctgcagtccctgatttgataaattc

SEQ ID NO: 7882 - DNA, 122 bp, Homo sapiens
  misc_feature (61)..(62): /note="This region represents a CpG dinucleotide"
  misc_feature (61)..(61): /note="Nucleotide may be methylated to form 5-methylcytosine"
gtgatacagatttttctgagatggacagtgcctctcactgaccccgcccccagtatcctacgaccaaggaaaagaatctcatgtgtcatttctgtgggccacggtagttaaggaaactccat

SEQ ID NO: 7883 - DNA, 122 bp, Homo sapiens
  misc_feature (61)..(62): /note="This region represents a CpG dinucleotide"
  misc_feature (61)..(61): /note="Nucleotide may be methylated to form 5-methylcytosine"
gttattcgattggtcagttcagggcctgccttcctatggctcttttgttgcaaagtgggacgtcacatgtaaggacagtataatgtcaacttctaaacttctccaggtacatgtaaaagttt

SEQ ID NO: 7884 - DNA, 122 bp, Homo sapiens
  misc_feature (61)..(62): /note="This region represents a CpG dinucleotide"
  misc_feature (61)..(61): /note="Nucleotide may be methylated to form 5-methylcytosine"
gccctgcccgcccagcacagcttgtcagcattagaatcctgactcacacctccttttctccggggcccgcgaggcactctgagcttggctgttccgcgtgccctccttcctgcctttttgct

SEQ ID NO: 7885 - DNA, 122 bp, Homo sapiens
  misc_feature (61)..(62): /note="This region represents a CpG dinucleotide"
  misc_feature (61)..(61): /note="Nucleotide may be methylated to form 5-methylcytosine"
ccttgtcatgagaacaaaagaagctttctagcttttaactaaaaggatgtcagttaacaacggaaatatatgtcaaacagaaacagggtctcagctttgtggtcttgggaaccctctcttcc

SEQ ID NO: 7886 - DNA, 122 bp, Homo sapiens
  misc_feature (61)..(62): /note="This region represents a CpG dinucleotide"
  misc_feature (61)..(61): /note="Nucleotide may be methylated to form 5-methylcytosine"
attttcttcttagtatatatcctacaagtgtgcaggatagtttgctagatgctaaaacaacgacataaaaaatgacaggagggaaatgcaaataaataaaggacaagccccgaaaagcatta

SEQ ID NO: 7887 - DNA, 122 bp, Homo sapiens
  misc_feature (61)..(62): /note="This region represents a CpG dinucleotide"
  misc_feature (61)..(61): /note="Nucleotide may be methylated to form 5-methylcytosine"
attttggcacataatgccaaccaagcacttacttgtttactaataggcgtgtgactgtttcgttttaaaattttaagagagtttataggctatgttgccatgactctaatcttcaaggcttg

SEQ ID NO: 7888 - DNA, 122 bp, Homo sapiens
  misc_feature (61)..(62): /note="This region represents a CpG dinucleotide"
  misc_feature (61)..(61): /note="Nucleotide may be methylated to form 5-methylcytosine"
ataatgtccttggtatctaactgacccgttcaaggtcatctggttagtcagctgaggccacgtctgcccaggatgagtgctctaggccagggcccacgggctcctcccaactcccacacaca

SEQ ID NO: 7889 - DNA, 122 bp, Homo sapiens
  misc_feature (61)..(62): /note="This region represents a CpG dinucleotide"
  misc_feature (61)..(61): /note="Nucleotide may be methylated to form 5-methylcytosine"
atgaatagaatttcctgggagtccaggaagcctgaagacacctgcgacctcaggaacgcgcgcctgcgccctcggggtcggtcccgtcccgcccgggttgtagccaggctcctggtgggctg

SEQ ID NO: 7890 - DNA, 122 bp, Homo sapiens
  misc_feature (61)..(62): /note="This region represents a CpG dinucleotide"
  misc_feature (61)..(61): /note="Nucleotide may be methylated to form 5-methylcytosine"
aaatcaaaatggttttaaaaggtgtcattttcattggaacggggtggggctcctagtgcccgccacagtcctccactcaggccggcggggcgggccctggcctcggcctcggtgcgtgggtg

SEQ ID NO: 7891 - DNA, 122 bp, Homo sapiens
  misc_feature (61)..(62): /note="This region represents a CpG dinucleotide"
  misc_feature (61)..(61): /note="Nucleotide may be methylated to form 5-methylcytosine"
acttttgtaagacaagcagtgaagtctgtcctcacaccccaccccatgactacagaatgacgtaactgaaagctgaaaggttctgctcctaagtgacacacagtagaaaattaaaatatcta

SEQ ID NO: 7892 - DNA, 122 bp, Homo sapiens
  misc_feature (61)..(62): /note="This region represents a CpG dinucleotide"
  misc_feature (61)..(61): /note="Nucleotide may be methylated to form 5-methylcytosine"
agctgtaggagggaggagggtaaagaaaggaggaagtgagggctgtgaaatggatgggcccgctttcccaacacaaccatctatgggggtctgcttaggcaaggggcagacagatggagagg

SEQ ID NO: 7893 - DNA, 122 bp, Homo sapiens
  misc_feature (61)..(62): /note="This region represents a CpG dinucleotide"
  misc_feature (61)..(61): /note="Nucleotide may be methylated to form 5-methylcytosine"
aaaggcagcttacaaagctgttaattatgacaagcttgaagagactacccaaggtagagacgaaaacccagcccagttcatggccggcttagcagcaacctttggacgctataccgccctag

SEQ ID NO: 7894 - DNA, 122 bp, Homo sapiens
  misc_feature (61)..(62): /note="This region represents a CpG dinucleotide"
  misc_feature (61)..(61): /note="Nucleotide may be methylated to form 5-methylcytosine"
gcacacccccgctgctggctggtgtaatccaagcaccaaacacgtgcagctggggcagtgcgtgttgctaggagaacaatgactctcttgcttccagagctggtaggtgactgcggtattac

SEQ ID NO: 7895 - DNA, 122 bp, Homo sapiens
  misc_feature (61)..(62): /note="This region represents a CpG dinucleotide"
  misc_feature (61)..(61): /note="Nucleotide may be methylated to form 5-methylcytosine"
gaaggagaatggtctggcctggtgtagtctgtggaggagtgcccccaaggcctctagatccgcactcacccactaccggctgtgtatgtgtacttagggagcaggaatgtttacttttaaaa

SEQ ID NO: 7896 - DNA, 122 bp, Homo sapiens
  misc_feature (61)..(62): /note="This region represents a CpG dinucleotide"
  misc_feature (61)..(61): /note="Nucleotide may be methylated to form 5-methylcytosine"
ttcccacatgcatagtcacatggtaatgccactcccaccaaccacagaaacaggtgctaacgttggggaacttaaggatgctggaagagaccaagagtccctgattgtgtaagtctggtctt

SEQ ID NO: 7897 - DNA, 122 bp, Homo sapiens
  misc_feature (61)..(62): /note="This region represents a CpG dinucleotide"
  misc_feature (61)..(61): /note="Nucleotide may be methylated to form 5-methylcytosine"
cccgcagtccccccaccctgcagataagatgactgacacaaagatgggggatctgctcctcgtccttccacttttactcatcaatgccttcatcaccattatacttgtttactgagcacttc

SEQ ID NO: 7898 - DNA, 122 bp, Homo sapiens
  misc_feature (61)..(62): /note="This region represents a CpG dinucleotide"
  misc_feature (61)..(61): /note="Nucleotide may be methylated to form 5-methylcytosine"
ctcacaggaacccagggccagcaggaggtgaagttctgccagcccccagcctgggcccagcgcccatgtttatgactgtttatttcagagcaagtagaaaggagaaattagagccatgaaag

SEQ ID NO: 7899 - DNA, 122 bp, Homo sapiens
  misc_feature (61)..(62): /note="This region represents a CpG dinucleotide"
  misc_feature (61)..(61): /note="Nucleotide may be methylated to form 5-methylcytosine"
tttgagctagtctggtggcagaacacctctctcctgatattcaaggacctgtctccaggtcgcttcagttccttgtcttgcctctcgcaatgggctttctgctgaccaagcccattgactca

SEQ ID NO: 7900 - DNA, 122 bp, Homo sapiens
  misc_feature (61)..(62): /note="This region represents a CpG dinucleotide"
  misc_feature (61)..(61): /note="Nucleotide may be methylated to form 5-methylcytosine"
tgtctgcttaggaaatctttgcccacttcccactggagtgtgactcacttcttactccaccgctgtgaggtccttgcaggcagggactaactcttactctgctctgtatattctgagcctca

SEQ ID NO: 7901 - DNA, 122 bp, Homo sapiens
  misc_feature (61)..(62): /note="This region represents a CpG dinucleotide"
  misc_feature (61)..(61): /note="Nucleotide may be methylated to form 5-methylcytosine"
gatccctcctgcttggctggaggcttgcagacccggcaggcaggctcgggaggcagcgggcgacttgaaaatgcactccctaccacaggctcaagagtgacggcgcctgtcagggaccggga

SEQ ID NO: 7902 - DNA, 122 bp, Homo sapiens
  misc_feature (61)..(62): /note="This region represents a CpG dinucleotide"
  misc_feature (61)..(61): /note="Nucleotide may be methylated to form 5-methylcytosine"
tcccttggactcggtttctggtaattgtgttttcaccaagttgtcaagctgtgaactgcacgtattgaagaagaggaacaaggagtgaagcttttgcaagttgctcatccttaagtagactt

SEQ ID NO: 7903 - DNA, 122 bp, Homo sapiens
  misc_feature (61)..(62): /note="This region represents a CpG dinucleotide"
  misc_feature (61)..(61): /note="Nucleotide may be methylated to form 5-methylcytosine"
ccagagggcattgctgcagctctggaggtcatactttgaggactattgcctaacgtataacgtaaatttatttaaatgatgctgaatatgttcttcaagaggaaaacgttagttactgtaca

SEQ ID NO: 7904 - DNA, 122 bp, Homo sapiens
  misc_feature (61)..(62): /note="This region represents a CpG dinucleotide"
  misc_feature (61)..(61): /note="Nucleotide may be methylated to form 5-methylcytosine"
gcagcaggtaggtaggtggtgggggccctctttttcacttttctttctctctttccttgtcgtgagctcaggggccataagccacccgttcaacagccaaaggatgaagcagatcttggcaa

SEQ ID NO: 7905 - DNA, 122 bp, Homo sapiens
  misc_feature (61)..(62): /note="This region represents a CpG dinucleotide"
  misc_feature (61)..(61): /note="Nucleotide may be methylated to form 5-methylcytosine"
tgtgccgccccctcccactgccaaggcgcggctgtccccggctgggtggactcgcgcgcgcgcctcctgccccaccccagcaggctaacactggcgcactgggcctggctccccgctgctac

SEQ ID NO: 7906 - DNA, 122 bp, Homo sapiens
  misc_feature (61)..(62): /note="This region represents a CpG dinucleotide"
  misc_feature (61)..(61): /note="Nucleotide may be methylated to form 5-methylcytosine"
ctaccaataactaagtgcaggttaatttactgtagcaggagatggaaagcagagctcaggcgtatgatactgcctaagtaaatgttgacagaaagaaactgaagaggaagggaaaagcatga

SEQ ID NO: 7907 - DNA, 122 bp, Homo sapiens
  misc_feature (61)..(62): /note="This region represents a CpG dinucleotide"
  misc_feature (61)..(61): /note="Nucleotide may be methylated to form 5-methylcytosine"
ccaggacgcatggctgtgacacacttgggcacccctccgtgtgaggtcctgatggaggtgcgccgaggctgggctggcctcctgtgcaggaatagaggccgttgggccttgtcccagccggt

SEQ ID NO: 7908 - DNA, 122 bp, Homo sapiens
  misc_feature (61)..(62): /note="This region represents a CpG dinucleotide"
  misc_feature (61)..(61): /note="Nucleotide may be methylated to form 5-methylcytosine"
tttctttatttttggacactgataagaacctgtatgagattgtttccttttttccccccgcgttgtaggtatcttgttttgccagtttattaggttggtgcaaaagtaattgtggtttttgc

SEQ ID NO: 7909 - DNA, 122 bp, Homo sapiens
  misc_feature (61)..(62): /note="This region represents a CpG dinucleotide"
  misc_feature (61)..(61): /note="Nucleotide may be methylated to form 5-methylcytosine"
aggaaatgtcacaggcctttcccacccctcctgtccacgcccccaacgcacacatgcacccgccccagcacagagcctcgcacatagcaggcacttgggaaacactgacttctttcataccc

SEQ ID NO: 7910 - DNA, 122 bp, Homo sapiens
  misc_feature (61)..(62): /note="This region represents a CpG dinucleotide"
  misc_feature (61)..(61): /note="Nucleotide may be methylated to form 5-methylcytosine"
agtgaaataattttctcaatctccccctctgctaagtggcagagtcaggactagaatgtgcgtctctctgacgccatatcctgaactcagatactgtgactggattattcacaacttaatcc

SEQ ID NO: 7911 - DNA, 122 bp, Homo sapiens
  misc_feature (61)..(62): /note="This region represents a CpG dinucleotide"
  misc_feature (61)..(61): /note="Nucleotide may be methylated to form 5-methylcytosine"
cttcaattttgttttttctatacagtgtttaagtacttgcatagtcctgggcaaggagaacgcacaagatgtttgctgaataaatgtcccaaatggacaacttgttccagtcagccgaggga

SEQ ID NO: 7912 - DNA, 122 bp, Homo sapiens
  misc_feature (61)..(62): /note="This region represents a CpG dinucleotide"
  misc_feature (61)..(61): /note="Nucleotide may be methylated to form 5-methylcytosine"
tgcggggcagcaacttggggcgacccaaatctttaaaataacaaccccccgacccccgcgcgcaaacaaaaattgtgctcaggaaaggcacgactcaatatttaaagtaaaaagcctttgtc

SEQ ID NO: 7913 - DNA, 122 bp, Homo sapiens
  misc_feature (61)..(62): /note="This region represents a CpG dinucleotide"
  misc_feature (61)..(61): /note="Nucleotide may be methylated to form 5-methylcytosine"
gagagagatgggagagaaaaagggagggcaaaggagatgagatagaggaagagaaaggcacgtgcagaaaggttttaagacaagcctacaaaagagagaggtaagttaaaggcagaggacta

SEQ ID NO: 7914 - DNA, 122 bp, Homo sapiens
  misc_feature (61)..(62): /note="This region represents a CpG dinucleotide"
  misc_feature (61)..(61): /note="Nucleotide may be methylated to form 5-methylcytosine"
gaaaacccttataaaagtacctcttggtcacattcacctgcttattctggcaacactagccggtattatgatataacaattacttcactagattgttactatgagatgatagcataagctgc

SEQ ID NO: 7915 - DNA, 122 bp, Homo sapiens
  misc_feature (61)..(62): /note="This region represents a CpG dinucleotide"
  misc_feature (61)..(61): /note="Nucleotide may be methylated to form 5-methylcytosine"
gaggaaatgaagccttatatttactcatagatgagtcaatggggaagcccggattcttcccgacatctgtgtggtagccatcttccaagatgacccccatgattcttgcccattggtactca

SEQ ID NO: 7916 - DNA, 122 bp, Homo sapiens
  misc_feature (61)..(62): /note="This region represents a CpG dinucleotide"
  misc_feature (61)..(61): /note="Nucleotide may be methylated to form 5-methylcytosine"
cgcctattcaaggccagtgagccagggctcttctcggtggggctgcacacaggtgaagtgcgcacagctcgggccctgctagatagagatgcgctcaaacagagccttgtggtggctgtaca

SEQ ID NO: 7917 - DNA, 122 bp, Homo sapiens
  misc_feature (61)..(62): /note="This region represents a CpG dinucleotide"
  misc_feature (61)..(61): /note="Nucleotide may be methylated to form 5-methylcytosine"
tcccaaaaggccccatctcttaatactttcacaatggtgactacatttcaacatatacaacgtaacatgtaatagtaatgattagaccatagcagcagcttttacaaaccttttattctcct

SEQ ID NO: 7918 - DNA, 122 bp, Homo sapiens
  misc_feature (61)..(62): /note="This region represents a CpG dinucleotide"
  misc_feature (61)..(61): /note="Nucleotide may be methylated to form 5-methylcytosine"
taaaggtcacctcttcaaaaagctatacctgactcaccctagagaatttggttcctctggcgtgtgctcgtgatacttcatttgctggatggaacatgagtgaatggagtggtggcattcct

SEQ ID NO: 7919 - DNA, 122 bp, Homo sapiens
  misc_feature (61)..(62): /note="This region represents a CpG dinucleotide"
  misc_feature (61)..(61): /note="Nucleotide may be methylated to form 5-methylcytosine"
ctgaatctgctctgctggaacatggataatgtggggcggcctgtcgccatggtgatgcaccgcgttgctctcctgttcataaatggcatcacgttctggctgaggaagactgaggaaccttc

SEQ ID NO: 7920 - DNA, 122 bp, Homo sapiens
  misc_feature (61)..(62): /note="This region represents a CpG dinucleotide"
  misc_feature (61)..(61): /note="Nucleotide may be methylated to form 5-methylcytosine"
ttgagacgggctctccctatgtttccttggctgattttgaattccagcgctcaagcgatccgcccatcttggcctcccaaagagctgggattacaggcatgagccatgagccactcactcat

SEQ ID NO: 7921 - DNA, 122 bp, Homo sapiens
  misc_feature (61)..(62): /note="This region represents a CpG dinucleotide"
  misc_feature (61)..(61): /note="Nucleotide may be methylated to form 5-methylcytosine"
ggcctcctacatggaaatgttggggctgtctctggtggctcctaattccctgaaacccttcgtaaatggtttgttgacatctgcagttcctgaggtctcttagattaaacagtgatgtcctg

SEQ ID NO: 7922 - DNA, 122 bp, Homo sapiens
  misc_feature (61)..(62): /note="This region represents a CpG dinucleotide"
  misc_feature (61)..(61): /note="Nucleotide may be methylated to form 5-methylcytosine"
aaggagagcttttaaaaaaaatatgtggtggtgatggtggagtgcgtgtgcgtgtatgcgcgcaggctgaggactgccacacttcccaaggtgctagctctatagatcatctattatataaa

SEQ ID NO: 7923 - DNA, 122 bp, Homo sapiens
  misc_feature (61)..(62): /note="This region represents a CpG dinucleotide"
  misc_feature (61)..(61): /note="Nucleotide may be methylated to form 5-methylcytosine"
tccccaagtgcaggtagaggctaaagctcagacagcggcacggatggcgggtccgtttgacggcttcaggttgctgagtgtgccccctgctcggccccagagtcccttcctcgttcacccgc

SEQ ID NO: 7924 - DNA, 122 bp, Homo sapiens
  misc_feature (61)..(62): /note="This region represents a CpG dinucleotide"
  misc_feature (61)..(61): /note="Nucleotide may be methylated to form 5-methylcytosine"
aaggaaagtcccacagagatgagagataacaggcttaggcagctgatggcaagattcttccgcattactcttcagacacacaccagcccagccagaagcaagtcccagcccccagccctccc

SEQ ID NO: 7925 - DNA, 122 bp, Homo sapiens
  misc_feature (61)..(62): /note="This region represents a CpG dinucleotide"
  misc_feature (61)..(61): /note="Nucleotide may be methylated to form 5-methylcytosine"
caagagcaagagagaggactcaccagagacagtaatagcaaaacagaaggcacagtctttcgtaatccaatcacagatgtgacatcccatcactgttgccacatcctgtgagttagaagtaa

SEQ ID NO: 7926 - DNA, 122 bp, Homo sapiens
  misc_feature (61)..(62): /note="This region represents a CpG dinucleotide"
  misc_feature (61)..(61): /note="Nucleotide may be methylated to form 5-methylcytosine"
aaagcttaaagtggttaacatcatgagtccccaaaagagcaaacttaagtgatcctaaagcgtgtcactatattcatttataattatgaaaacaaaatactgtggccaaaaatgctttgcga

SEQ ID NO: 7927 - DNA, 122 bp, Homo sapiens
  misc_feature (61)..(62): /note="This region represents a CpG dinucleotide"
  misc_feature (61)..(61): /note="Nucleotide may be methylated to form 5-methylcytosine"
tggacttcctgcagcaggccttgttctaagcactctacatatgctaaggtacacagtcctcgtgacaactcttctacatgggccatcatttgtccccatgacatggatgaggaaccagctct

SEQ ID NO: 7928 - DNA, 122 bp, Homo sapiens
  misc_feature (61)..(62): /note="This region represents a CpG dinucleotide"
  misc_feature (61)..(61): /note="Nucleotide may be methylated to form 5-methylcytosine"
cggcagccagtggtggaggctgtgtgttgatatctgcaggcctggcctgccatctgaccccggtgttgccactccacatggattgcctctcagccagcctcttctcagagaacaaggacatt

SEQ ID NO: 7929 - DNA, 122 bp, Homo sapiens
  misc_feature (61)..(62): /note="This region represents a CpG dinucleotide"
  misc_feature (61)..(61): /note="Nucleotide may be methylated to form 5-methylcytosine"
gaaataggccgtgcagtgtggccccaggcaaaagctttgtcttttctcccaagaacctagcggaatgactgccagagtgatcactataaagcattttaccaggttattttgaagggacgcag

SEQ ID NO: 7930 - DNA, 122 bp, Homo sapiens
  misc_feature (61)..(62): /note="This region represents a CpG dinucleotide"
  misc_feature (61)..(61): /note="Nucleotide may be methylated to form 5-methylcytosine"
gggcgtggcgcggcggggcgggtaacggggcgggacctgggcgacggaagtgcgtagccgcgcggcattctggggccggaagtggggcgccagctgcgggctggtgtcatggcaggtgggcg

SEQ ID NO: 7931 - DNA, 122 bp, Homo sapiens
  misc_feature (61)..(62): /note="This region represents a CpG dinucleotide"
  misc_feature (61)..(61): /note="Nucleotide may be methylated to form 5-methylcytosine"
tgcttcgagtgggaggagccttggggttattctagcatattccttgagggttattgcagtcggcgagggctagattagatgagagtgcggaactggacccccgttctggcggcggtcctttt

SEQ ID NO: 7932 - DNA, 122 bp, Homo sapiens
  misc_feature (61)..(62): /note="This region represents a CpG dinucleotide"
  misc_feature (61)..(61): /note="Nucleotide may be methylated to form 5-methylcytosine"
ctgataccacaaagaagctttttaatgaagttagcctttgcctttctcaatgccactatgcgcctggcttgttttgcccactttctgttttcaaagctaggtatgatcaggaaacacgtggt

SEQ ID NO: 7933 - DNA, 122 bp, Homo sapiens
  misc_feature (61)..(62): /note="This region represents a CpG dinucleotide"
  misc_feature (61)..(61): /note="Nucleotide may be methylated to form 5-methylcytosine"
gaactaaaattcagggagcacctgtgatgtaccaggctcattgttatttcatttacacctcgtaacaaccctaggaggtggctgattttatcttcatttttaccagtgtggaaactggggct

SEQ ID NO: 7934 - DNA, 122 bp, Homo sapiens
  misc_feature (61)..(62): /note="This region represents a CpG dinucleotide"
  misc_feature (61)..(61): /note="Nucleotide may be methylated to form 5-methylcytosine"
ctttaatgacttcggcagttgtttcattctgcaaaaacaggaagatcccacacaataaggcgcctgtctcacagctgggctcctgcgtagacggccacccacaagagtaactaactgctggg

SEQ ID NO: 7935 - DNA, 122 bp, Homo sapiens
  misc_feature (61)..(62): /note="This region represents a CpG dinucleotide"
  misc_feature (61)..(61): /note="Nucleotide may be methylated to form 5-methylcytosine"
taatgccattttcaaacctaaagtaatagtgatacggagacggggaaatgaatgatacctcgctctgacctttgaccataagccctaactctggatagctggccccaccacacacataatcg

SEQ ID NO: 7936 - DNA, 122 bp, Homo sapiens
  misc_feature (61)..(62): /note="This region represents a CpG dinucleotide"
  misc_feature (61)..(61): /note="Nucleotide may be methylated to form 5-methylcytosine"
attggaggggatgacatggttgtcataagatgcacttttaagtggctgagttttcaatatcgaaggtgaaagcaatagaagatttttgcaacttttaaagaaaaggtttttttttttaatgg

SEQ ID NO: 7937 - DNA, 122 bp, Homo sapiens
  misc_feature (61)..(62): /note="This region represents a CpG dinucleotide"
  misc_feature (61)..(61): /note="Nucleotide may be methylated to form 5-methylcytosine"
ggttttgcttttcttctggggcttgtcctctgaatgagagtcgtgggcttgtccacacagcgtccgcatgctctgcttgtgattattggccacgctgggaagtattttccatatttaaagta

SEQ ID NO: 7938 - DNA, 122 bp, Homo sapiens
  misc_feature (61)..(62): /note="This region represents a CpG dinucleotide"
  misc_feature (61)..(61): /note="Nucleotide may be methylated to form 5-methylcytosine"
ggctcccttggcaggaggcaatgggaagattctcccgagggtgtccctctggctggcctgcgtgccccagggcggggcgataaaactaacttccctttccacggacttcactgctcccagga

SEQ ID NO: 7939 - DNA, 122 bp, Homo sapiens
  misc_feature (61)..(62): /note="This region represents a CpG dinucleotide"
  misc_feature (61)..(61): /note="Nucleotide may be methylated to form 5-methylcytosine"
cctgccccattctcactgacctcatgcatcatctcctgtgcccggcagggtgagctggagcggcagctgcttcaggccaaccccatcctagaggcctttggcaatgccaagacagtgaagaa

SEQ ID NO: 7940 - DNA, 122 bp, Homo sapiens
  misc_feature (61)..(62): /note="This region represents a CpG dinucleotide"
  misc_feature (61)..(61): /note="Nucleotide may be methylated to form 5-methylcytosine"
gacccagacggggagagggtgctgggcgccggcaagccacagcgtctgctctcatgatctcgcccccacccgccttgggcccccagaggtctgtgctccgctcctcttcctcctcagaactt

SEQ ID NO: 7941 - DNA, 122 bp, Homo sapiens
  misc_feature (61)..(62): /note="This region represents a CpG dinucleotide"
  misc_feature (61)..(61): /note="Nucleotide may be methylated to form 5-methylcytosine"
gttgctccaattccgtttacttaaagtagaaagaagacaatccctgccccgatgggtctgcgctggcttgtaggaaggagagattttgctgagtatccaacactaaccgcaggagagagcag

SEQ ID NO: 7942 - DNA, 122 bp, Homo sapiens
  misc_feature (61)..(62): /note="This region represents a CpG dinucleotide"
  misc_feature (61)..(61): /note="Nucleotide may be methylated to form 5-methylcytosine"
atgcctttctgatttatccaagttgttgcaggtatcaatacttccctttctggctgggcacggtggctcatgcctgtaattccagcacttttggaggtgagtcaggggggatcacttgaggt

SEQ ID NO: 7943 - DNA, 122 bp, Homo sapiens
  misc_feature (61)..(62): /note="This region represents a CpG dinucleotide"
  misc_feature (61)..(61): /note="Nucleotide may be methylated to form 5-methylcytosine"
cagtccttacattgttggtgttggcccatattttcaatacagctaaagaaatttaatgaccgttatactgaaacatctggtttactacattaacttcatattcttcttctgaaattggaatg

SEQ ID NO: 7944 - DNA, 122 bp, Homo sapiens
  misc_feature (61)..(62): /note="This region represents a CpG dinucleotide"
  misc_feature (61)..(61): /note="Nucleotide may be methylated to form 5-methylcytosine"
ctatttatggctaaccagctctataaatacatgaataacaaaatctccattgattatactcgacaaaataacagttgaaagctaacctgaaaatatgagcgccctggaatgaatccccaaac

SEQ ID NO: 7945 - DNA, 122 bp, Homo sapiens
  misc_feature (61)..(62): /note="This region represents a CpG dinucleotide"
  misc_feature (61)..(61): /note="Nucleotide may be methylated to form 5-methylcytosine"
cgcccatcttccagctgagcgtaccgggaggctcccattggactggagctgctacggaggcgggactttccctttttcttgaaccccattgggttaagtccagtccgagacaagcgtctctc

SEQ ID NO: 7946 - DNA, 122 bp, Homo sapiens
  misc_feature (61)..(62): /note="This region represents a CpG dinucleotide"
  misc_feature (61)..(61): /note="Nucleotide may be methylated to form 5-methylcytosine"
ttttttctccagcttactctattgtaagaaaacagtatgtaatatataacatataaaatacgtgttgattgactgcttatgttattgtggtaaggcttctggtcaacagtaggctattagta

SEQ ID NO: 7947 - DNA, 122 bp, Homo sapiens
  misc_feature (61)..(62): /note="This region represents a CpG dinucleotide"
  misc_feature (61)..(61): /note="Nucleotide may be methylated to form 5-methylcytosine"
tgggtcattctcttgcttaaccccagagttgctctcattttgaattgagacacattcctccgcttaacctagcttagacacaaacttcaacaaacttctctgaacccttacttgccaagaaa

SEQ ID NO: 7948 - DNA, 122 bp, Homo sapiens
  misc_feature (61)..(62): /note="This region represents a CpG dinucleotide"
  misc_feature (61)..(61): /note="Nucleotide may be methylated to form 5-methylcytosine"
tgcatgccagacttcttatctgatttcctacactgcatgaaaacaccgtcagccaggggacgtgccttatctgtctgttgcagagaaggctccatctgtcctttgcagaagaaactgaaggc

SEQ ID NO: 7949 - DNA, 122 bp, Homo sapiens
  misc_feature (61)..(62): /note="This region represents a CpG dinucleotide"
  misc_feature (61)..(61): /note="Nucleotide may be methylated to form 5-methylcytosine"
cctggtgtctggtcttttcctggagctggaacagcactggtctagtgcccagctgcatgtcgcagtattagccaccaggccagcgtgctgggggttcagaggacagacaccaagtacgggaa

SEQ ID NO: 7950 - DNA, 122 bp, Homo sapiens
  misc_feature (61)..(62): /note="This region represents a CpG dinucleotide"
  misc_feature (61)..(61): /note="Nucleotide may be methylated to form 5-methylcytosine"
tttgcataagaaggagaattgatgccttcaggtcacttgtctctgttttcttcctgcacacgccatagtctccctgttagctaaatgatggtatctctagtattgaccttggtaccccagag

SEQ ID NO: 7951 - DNA, 122 bp, Homo sapiens
  misc_feature (61)..(62): /note="This region represents a CpG dinucleotide"
  misc_feature (61)..(61): /note="Nucleotide may be methylated to form 5-methylcytosine"
ctgctggtgaaatacctacaggaaggaatctagcattactcagctcctgaaaacctcttccgcccttgcagaagtgaaaggtctgctacagcggaagcctggtaattcaagattatactctc

SEQ ID NO: 7952 - DNA, 122 bp, Homo sapiens
  misc_feature (61)..(62): /note="This region represents a CpG dinucleotide"
  misc_feature (61)..(61): /note="Nucleotide may be methylated to form 5-methylcytosine"
ctgttggccttcatttaatgtgaacgtaatgtttgagtcaccccctgagatttcatgactcggaatttcatgaaagtcagtcccagtttacgaaacctctccaacagagaaaactctgttcc

SEQ ID NO: 7953 - DNA, 122 bp, Homo sapiens
  misc_feature (61)..(62): /note="This region represents a CpG dinucleotide"
  misc_feature (61)..(61): /note="Nucleotide may be methylated to form 5-methylcytosine"
attcctctctaacatcatctccactttgcatctgtctctcttagtctgctttttttccaccgatgtaacagacctggagccagcaggactcagaggaaaggacttaatcaggtttatgtgtc

SEQ ID NO: 7954 - DNA, 122 bp, Homo sapiens
  misc_feature (61)..(62): /note="This region represents a CpG dinucleotide"
  misc_feature (61)..(61): /note="Nucleotide may be methylated to form 5-methylcytosine"
tgatttcagaagagggatttgaccttatggaagtccaaaaaataaaatattgatagatagcgaccacatagtgtggtttggtaagctgcatagtaaggtttataccctctaagaaaatagca

SEQ ID NO: 7955 - DNA, 122 bp, Homo sapiens
  misc_feature (61)..(62): /note="This region represents a CpG dinucleotide"
  misc_feature (61)..(61): /note="Nucleotide may be methylated to form 5-methylcytosine"
aatgtatccaaaacataaattgaattgatgaaaggataaagggatagatgggtgacaagacgtatgttcaagcaataaagcaaactattgattgtagaatctaggtggtggcttatgggtgt

SEQ ID NO: 7956 - DNA, 122 bp, Homo sapiens
  misc_feature (61)..(62): /note="This region represents a CpG dinucleotide"
  misc_feature (61)..(61): /note="Nucleotide may be methylated to form 5-methylcytosine"
aacctacctttcaggcatataaacttcaaatccactctacaactgtgcctgagctgtaggcgtggcaggaaaaagcagaatgctgcaaggctcctcgagtcaaatcctttgggatttgagca

SEQ ID NO: 7957 - DNA, 122 bp, Homo sapiens
  misc_feature (61)..(62): /note="This region represents a CpG dinucleotide"
  misc_feature (61)..(61): /note="Nucleotide may be methylated to form 5-methylcytosine"
tcaaggaagataagctttatgattcagggagaggaggaagtactccagggttggaaggtacgcttaggaaatgatacaatgtacttatttaatattgtcctttgagttttatggagtgcagc

SEQ ID NO: 7958 - DNA, 122 bp, Homo sapiens
  misc_feature (61)..(62): /note="This region represents a CpG dinucleotide"
  misc_feature (61)..(61): /note="Nucleotide may be methylated to form 5-methylcytosine"
acaaagctggaggcccaggacctgtaaagcaagatcacgtccagtgacattcagttttgtcgagtaagacctacttcatccttgtgatcactcactctataactgtctaataaacactttcc

SEQ ID NO: 7959 - DNA, 122 bp, Homo sapiens
  misc_feature (61)..(62): /note="This region represents a CpG dinucleotide"
  misc_feature (61)..(61): /note="Nucleotide may be methylated to form 5-methylcytosine"
tccatctgctcttaggggatgccagtgccacatgtggtcagatttgctccatgtcaggctcgcccttgtccctgtttgcatgtgtcccagaaagcagtgtcaggatgcaggagcccctgagc

SEQ ID NO: 7960 - DNA, 122 bp, Homo sapiens
  misc_feature (61)..(62): /note="This region represents a CpG dinucleotide"
  misc_feature (61)..(61): /note="Nucleotide may be methylated to form 5-methylcytosine"
ggatacttgtgatgggagaggtggtgcgggctccgaattctttccaatagtctgcaaacccgcagagccatgaagcattgtctgtaggccagcactcatcctccacccctctgcctgcttct

SEQ ID NO: 7961 - DNA, 122 bp, Homo sapiens
  misc_feature (61)..(62): /note="This region represents a CpG dinucleotide"
  misc_feature (61)..(61): /note="Nucleotide may be methylated to form 5-methylcytosine"
aagtttctgtcggaaaacagggcccttggtgaggcaggccttgggagcccccttgcccagcgagaatgtcctgtgtcatgcagtgactcatgcttcagagaacagcagctgaccagaatgtt

SEQ ID NO: 7962 - DNA, 122 bp, Homo sapiens
  misc_feature (61)..(62): /note="This region represents a CpG dinucleotide"
  misc_feature (61)..(61): /note="Nucleotide may be methylated to form 5-methylcytosine"
aattattactcatctctgaatgtgatgagttcttcctgaaccatctatttatacaagattcgtgcaccagagtgtccaaaagagtaatctagttcttagaaaacaggcttgtgagtgagagt

SEQ ID NO: 7963 - DNA, 122 bp, Homo sapiens
  misc_feature (61)..(62): /note="This region represents a CpG dinucleotide"
  misc_feature (61)..(61): /note="Nucleotide may be methylated to form 5-methylcytosine"
aaagtatatgaaagataattttgaatgttctgtatttagaatgtgcttcaacatttaatgcgatctaatttacatatcctttctggtgctattgcaaggtttgtcagggttttacggcaaca

SEQ ID NO: 7964 - DNA, 122 bp, Homo sapiens
  misc_feature (61)..(62): /note="This region represents a CpG dinucleotide"
  misc_feature (61)..(61): /note="Nucleotide may be methylated to form 5-methylcytosine"
ttaagtccttttcatgcactattgaatttcctatctcctttatcttaagagatagatccccgtttttcaggagaagaaactcagactcactaacttgtccaacattacacagcttaagtagt

SEQ ID NO: 7965 - DNA, 122 bp, Homo sapiens
  misc_feature (61)..(62): /note="This region represents a CpG dinucleotide"
  misc_feature (61)..(61): /note="Nucleotide may be methylated to form 5-methylcytosine"
ctttgtaattcagcattgactgaccagagctttggtcctatgaacgtacctatcctcaaacgcatttactctcaaaggcaaggacaatagtctggtagatgctgagtcagccctgttgctct

SEQ ID NO: 7966 - DNA, 122 bp, Homo sapiens
  misc_feature (61)..(62): /note="This region represents a CpG dinucleotide"
  misc_feature (61)..(61): /note="Nucleotide may be methylated to form 5-methylcytosine"
tcagttggaatgtttggacatcccagctcagcggctgtggtaccaggagctgtcaggaggcgggaatgcagagaatgtggctcactgtgctcccgcccgcccaggctgaatccgcagagagg

SEQ ID NO: 7967 - DNA, 122 bp, Homo sapiens
  misc_feature (61)..(62): /note="This region represents a CpG dinucleotide"
  misc_feature (61)..(61): /note="Nucleotide may be methylated to form 5-methylcytosine"
gtccaactaacatagttagctagctagctgtgccatgtaggctaacctacacaaacatgacgtaagatacatactttaatttcagctgcctgagaaatgaaacttttcttctcagtgcctag

SEQ ID NO: 7968 - DNA, 122 bp, Homo sapiens
  misc_feature (61)..(62): /note="This region represents a CpG dinucleotide"
  misc_feature (61)..(61): /note="Nucleotide may be methylated to form 5-methylcytosine"
tgcaggtcctcgttcagggacatgaaatctccttgtcgtaggcggacttaaagtgtccttcgaggaagctcctgtccggagccaccacccagccagacagcagcatctgcaggtgcggtgcc

SEQ ID NO: 7969 - DNA, 122 bp, Homo sapiens
  misc_feature (61)..(62): /note="This region represents a CpG dinucleotide"
  misc_feature (61)..(61): /note="Nucleotide may be methylated to form 5-methylcytosine"
ccgtgatttgtcctgccttgtgggtatagggactaataatgttcccaaacaatgcttttccgttccagagggattatactatttaaacaaaaagcagaaacacagggttgatggtgtgaagg

SEQ ID NO: 7970 - DNA, 122 bp, Homo sapiens
  misc_feature (61)..(62): /note="This region represents a CpG dinucleotide"
  misc_feature (61)..(61): /note="Nucleotide may be methylated to form 5-methylcytosine"
tttacctcaccctccccacgtgtggcagcgccacaaatctggggacacctgtggagccctcgaagctagggaagaagggctgtgttctcaaactgtgttcctcagcccctggagctaacaca

SEQ ID NO: 7971 - DNA, 122 bp, Homo sapiens
  misc_feature (61)..(62): /note="This region represents a CpG dinucleotide"
  misc_feature (61)..(61): /note="Nucleotide may be methylated to form 5-methylcytosine"
acagggccaggtttccacttaagtaaaacatggtggggtgtgttttgtaaagttcgagtacgtgggcacaattgtttacagtggattaaggtttcaacagaatttagtaatgactacatcca

SEQ ID NO: 7972 - DNA, 122 bp, Homo sapiens
  misc_feature (61)..(62): /note="This region represents a CpG dinucleotide"
  misc_feature (61)..(61): /note="Nucleotide may be methylated to form 5-methylcytosine"
gatgaagaatgctctcctcccttcctccaccagccccggcctttcctaattgagactcatcgagccgtagccggctcctcagtacagtgacttgcacacaagctccaaggagccgcgcttat

SEQ ID NO: 7973 - DNA, 122 bp, Homo sapiens
  misc_feature (61)..(62): /note="This region represents a CpG dinucleotide"
  misc_feature (61)..(61): /note="Nucleotide may be methylated to form 5-methylcytosine"
ctctactggaccgacctggacaccaacatgatcgagtcgtccaacatgctgggtgagggccgggctggggccttctggtcatggagggcggggcagccgggcgttggccacctcccagcctc

SEQ ID NO: 7974 - DNA, 122 bp, Homo sapiens
  misc_feature (61)..(62): /note="This region represents a CpG dinucleotide"
  misc_feature (61)..(61): /note="Nucleotide may be methylated to form 5-methylcytosine"
tttggatattggataaatggaaaccttatatcaagaaaggttttcatttcccaaagagggcgctgtggttcaaattagtgcatttgctagcactgagttcctatttgggctttcttcctttt

SEQ ID NO: 7975 - DNA, 122 bp, Homo sapiens
  misc_feature (61)..(62): /note="This region represents a CpG dinucleotide"
  misc_feature (61)..(61): /note="Nucleotide may be methylated to form 5-methylcytosine"
aatctggtgcacaaatatttatgctgtacatgaacttatattgtatacatatgtggtatgcgtgtttcataatattataaggaatgccttattcagttgacttgtaaccatttgcttttaat

SEQ ID NO: 7976 - DNA, 122 bp, Homo sapiens
  misc_feature (61)..(62): /note="This region represents a CpG dinucleotide"
  misc_feature (61)..(61): /note="Nucleotide may be methylated to form 5-methylcytosine"
tttctcagcgagcataacaagccccctcccaagtcttttcatgaagaaatgctggaaaggcgggctcaggaggagcagcagaggctgttggaggccaagcggaaagaagagcaggaggtgag

SEQ ID NO: 7977 - DNA, 122 bp, Homo sapiens
  misc_feature (61)..(62): /note="This region represents a CpG dinucleotide"
  misc_feature (61)..(61): /note="Nucleotide may be methylated to form 5-methylcytosine"
catgtgttctctgtcaggagcctgtagtggcctgctgtagaactgtgatatgcttggctccgtcccgttcaatgtttttgatgaatggcttagctgaggacattaatatgttatttacattt

SEQ ID NO: 7978 - DNA, 122 bp, Homo sapiens
  misc_feature (61)..(62): /note="This region represents a CpG dinucleotide"
  misc_feature (61)..(61): /note="Nucleotide may be methylated to form 5-methylcytosine"
caagaagaccacgagcgctgtttctcttcttgctcaaagggtggaggtggtggaagaggacgggccttctgagaagagccaggacccacctgctctggcaagatccactcctggctcaaaca

SEQ ID NO: 7979 - DNA, 122 bp, Homo sapiens
  misc_feature (61)..(62): /note="This region represents a CpG dinucleotide"
  misc_feature (61)..(61): /note="Nucleotide may be methylated to form 5-methylcytosine"
gtagatatgaccactcagggcatgtagatcaggaaatagaaaccctaagaaaggacttggcggggactaccaaggccatgttggtgaggccaattctatttacactggtaaatcttattttt

SEQ ID NO: 7980 - DNA, 122 bp, Homo sapiens
  misc_feature (61)..(62): /note="This region represents a CpG dinucleotide"
  misc_feature (61)..(61): /note="Nucleotide may be methylated to form 5-methylcytosine"
tggcattagcagaaacctaatccatccacatggtctcagttatcatctaggctcatgattcgtaaagcaaatctgcatccaaccatttgttccacgcaccccacactccagttttacctcag

SEQ ID NO: 7981 - DNA, 122 bp, Homo sapiens
  misc_feature (61)..(62): /note="This region represents a CpG dinucleotide"
  misc_feature (61)..(61): /note="Nucleotide may be methylated to form 5-methylcytosine"
aacctattacttcttgacaccctttccatattgcctgagttgtagaacaagtatttatgtcgttcttaatactgtgtgttttttaagcacagggtggatagtcatgaaaaagtccggtatca

SEQ ID NO: 7982 - DNA, 122 bp, Homo sapiens
  misc_feature (61)..(62): /note="This region represents a CpG dinucleotide"
  misc_feature (61)..(61): /note="Nucleotide may be methylated to form 5-methylcytosine"
tcagatctattctctgtgggttcttcctgtaatgctgcatgatgtcagttcctggcatagcgcctggcacactgcaaagctcacatgtgttgagagaatgaaagaagaaaggagccagtgaa

SEQ ID NO: 7983 - DNA, 122 bp, Homo sapiens
  misc_feature (61)..(62): /note="This region represents a CpG dinucleotide"
  misc_feature (61)..(61): /note="Nucleotide may be methylated to form 5-methylcytosine"
tgtatatatgtttatatattaggttgggccatgtgaaattgctgatgtgacgggttttgacgagagaaatggcaactgtgtggttcaacctaatatttagatagtattgtcttagctcaggc

SEQ ID NO: 7984 - DNA, 122 bp, Homo sapiens
  misc_feature (61)..(62): /note="This region represents a CpG dinucleotide"
  misc_feature (61)..(61): /note="Nucleotide may be methylated to form 5-methylcytosine"
aaactgtcactagtcagctggctctttttcctatgaaatctatcagtacctttctccatccgttgttctcaatatgaccacagagcctgagtataccaagaaaaccaatattcgcattacag

SEQ ID NO: 7985 - DNA, 122 bp, Homo sapiens
  misc_feature (61)..(62): /note="This region represents a CpG dinucleotide"
  misc_feature (61)..(61): /note="Nucleotide may be methylated to form 5-methylcytosine"
aaaagaacatagctaagagagtcatcagaactgaattctgactctggttagttatgtggccgtggcccagtatgtgattgcatattgatgttgaatgagacacaaatttaaccctcaaggag

SEQ ID NO: 7986 - DNA, 122 bp, Homo sapiens
  misc_feature (61)..(62): /note="This region represents a CpG dinucleotide"
  misc_feature (61)..(61): /note="Nucleotide may be methylated to form 5-methylcytosine"
gtggattgacctgttctgcacattttgtgtaaatggaatcatatcatatgtgctaccttgcgtctggcctctttcactcagccccatgtttgtaaggcttattcctgttgtagcccctgtta

SEQ ID NO: 7987 - DNA, 122 bp, Homo sapiens
  misc_feature (61)..(62): /note="This region represents a CpG dinucleotide"
  misc_feature (61)..(61): /note="Nucleotide may be methylated to form 5-methylcytosine"
actgtgctcaccagcaggtgccaaacaccaaacacagtggtcgctgtatgtccaaagagacgcagtcaatgaaagtcagaggaaggctccatgatgagcctcaaagacagcttggcctgggg

SEQ ID NO: 7988 - DNA, 122 bp, Homo sapiens
  misc_feature (61)..(62): /note="This region represents a CpG dinucleotide"
  misc_feature (61)..(61): /note="Nucleotide may be methylated to form 5-methylcytosine"
tgtaacatgaccccaaagtctcatttacatcacagcaattaaaatatattccacattacacgtttactaccacatactgtagaaataatccaatgaaatgtggctattttccaaaaataata

SEQ ID NO: 7989 - DNA, 122 bp, Homo sapiens
  misc_feature (61)..(62): /note="This region represents a CpG dinucleotide"
  misc_feature (61)..(61): /note="Nucleotide may be methylated to form 5-methylcytosine"
tttgcctgctgaaatgacactatagcatgagaggtcagcctcttaggacagcctttctcacgttcctctcatttttattcttgctgagcgggaccatatgaatgacaggcttgtttgcgagg

SEQ ID NO: 7990 - DNA, 122 bp, Homo sapiens
  misc_feature (61)..(62): /note="This region represents a CpG dinucleotide"
  misc_feature (61)..(61): /note="Nucleotide may be methylated to form 5-methylcytosine"
ctttttacacggaaggcaagggtttctgaagttccttctttagaagttaataagactggccgggcgtggtggttcacgcctgtaatcccagcactttgggaggccgagatgggtggatcacg

SEQ ID NO: 7991 - DNA, 122 bp, Homo sapiens
  misc_feature (61)..(62): /note="This region represents a CpG dinucleotide"
  misc_feature (61)..(61): /note="Nucleotide may be methylated to form 5-methylcytosine"
gcccttacatgtgaccggcctgtggtcagagcaccctacccaggctggggttgggctgcacgagcatcctggccagccctgccccaaatgagacaggaagtgctctgaagtgcctctgtagc

SEQ ID NO: 7992 - DNA, 122 bp, Homo sapiens
  misc_feature (61)..(62): /note="This region represents a CpG dinucleotide"
  misc_feature (61)..(61): /note="Nucleotide may be methylated to form 5-methylcytosine"
aattccaggctcggtgattctgcaatacatgctggtaagaacatttgactcatcctggaacgggataaagaaacacagaagaccaaataatgaagaaggactagaaaacatttttgtacgta

SEQ ID NO: 7993 - DNA, 122 bp, Homo sapiens
  misc_feature (61)..(62): /note="This region represents a CpG dinucleotide"
  misc_feature (61)..(61): /note="Nucleotide may be methylated to form 5-methylcytosine"
gcaagggctgaagagctatctattggatactatgccgactactgggatgatgggttcatccgtactccaaacctcagcatcatgcaaaatagagacaagggaatggagcaattaggctggta

SEQ ID NO: 7994 - DNA, 122 bp, Homo sapiens
  misc_feature (61)..(62): /note="This region represents a CpG dinucleotide"
  misc_feature (61)..(61): /note="Nucleotide may be methylated to form 5-methylcytosine"
ctgtgctgtgatggggcatggatgctttctcagaggtactttccccctaagctttaggcacgtctgaccatttcttctgctttggtccagtgctttcctcatgatttagactctggatgaag

SEQ ID NO: 7995 - DNA, 122 bp, Homo sapiens
  misc_feature (61)..(62): /note="This region represents a CpG dinucleotide"
  misc_feature (61)..(61): /note="Nucleotide may be methylated to form 5-methylcytosine"
ctggcccacaggaggttgctaacacctctagttaacatggtggccaacacggtggccgggcgcggtggctctcgccttcaatcctagcactttgggaggccatggtgggtgggtcacttgag

SEQ ID NO: 7996 - DNA, 122 bp, Homo sapiens
  misc_feature (61)..(62): /note="This region represents a CpG dinucleotide"
  misc_feature (61)..(61): /note="Nucleotide may be methylated to form 5-methylcytosine"
atgaccaatcaccaatagacttttaaagtagtgatgtgatttgccactgctcatgatgcacgttggttatttatgtagtgacttgtgggtggaatagctagcagcaaaataccttatgcaat

SEQ ID NO: 7997 - DNA, 122 bp, Homo sapiens
  misc_feature (61)..(62): /note="This region represents a CpG dinucleotide"
  misc_feature (61)..(61): /note="Nucleotide may be methylated to form 5-methylcytosine"
acccatgagaaaagggggctggaccctgggccttgtgagcagctgcagggggttggggggcggggtggcctgggtcgggtgtatcaggagggtttgtgtgcagggttatatcacagtgtaat

SEQ ID NO: 7998 - DNA, 122 bp, Homo sapiens
  misc_feature (61)..(62): /note="This region represents a CpG dinucleotide"
  misc_feature (61)..(61): /note="Nucleotide may be methylated to form 5-methylcytosine"
acaacttgcctgatgtcacacagcttcatacagtggttaagcaacttgtctgaggccacacgtggcacacagaggttgaacttacctgaggccacacagctgcacagagagcttaagtaact

SEQ ID NO: 7999 - DNA, 122 bp, Homo sapiens
  misc_feature (61)..(62): /note="This region represents a CpG dinucleotide"
  misc_feature (61)..(61): /note="Nucleotide may be methylated to form 5-methylcytosine"
ttaaggatccttggctgcactattcacacggcggggatcaggttgcagtgctttctggggcgtcactgcccgcggcgggggggttggttgggggtccaatccgtggctgcatggcccacggc

SEQ ID NO: 8000 - DNA, 122 bp, Homo sapiens
  misc_feature (61)..(62): /note="This region represents a CpG dinucleotide"
  misc_feature (61)..(61): /note="Nucleotide may be methylated to form 5-methylcytosine"
agaatggatttggcacatttgaggaaaagaatgaaaaaggtccatgttgcagaatcaaaacggcaagaagtaaccctggagaactattgagtgggcaaaccatgtaggaccttataggtcat

SEQ ID NO: 8001 - DNA, 122 bp, Homo sapiens
  misc_feature (61)..(62): /note="This region represents a CpG dinucleotide"
  misc_feature (61)..(61): /note="Nucleotide may be methylated to form 5-methylcytosine"
cctactgccccagtccttccagctcttgttaggggctcattgattgctattgggaacattcgctaagggtcggtggcttgcgtattgagcagaaacttctccaaggagttttgtttctcttt

SEQ ID NO: 8002 - DNA, 122 bp, Homo sapiens
  misc_feature (61)..(62): /note="This region represents a CpG dinucleotide"
  misc_feature (61)..(61): /note="Nucleotide may be methylated to form 5-methylcytosine"
ctgatctgacacactttcttcagctgatgtcaaaccaaattataaggcaaataggacaaacgaaaagtcacatgaacagaatccatttacagtggggtcattcacactggtccttccaggtg

SEQ ID NO: 8003 - DNA, 122 bp, Homo sapiens
  misc_feature (61)..(62): /note="This region represents a CpG dinucleotide"
  misc_feature (61)..(61): /note="Nucleotide may be methylated to form 5-methylcytosine"
ctctgcagcctcatggttagtggtaggcccagaggaggccaagggcagtaggcaagacaacggatagagaagagtagtgaattccagctatgtggagtttccagcttggcgaattccagcca

SEQ ID NO: 8004 - DNA, 122 bp, Homo sapiens
  misc_feature (61)..(62): /note="This region represents a CpG dinucleotide"
  misc_feature (61)..(61): /note="Nucleotide may be methylated to form 5-methylcytosine"
tttcctgtttgcatccaagtatctgcttcaactaaagtcagcatatcaagtaaccgctgacgctgaccaagccctgcgagcacacacagcccaccctccacccggagaaccgccaccgcccc

SEQ ID NO: 8005 - DNA, 122 bp, Homo sapiens
  misc_feature (61)..(62): /note="This region represents a CpG dinucleotide"
  misc_feature (61)..(61): /note="Nucleotide may be methylated to form 5-methylcytosine"
cagagctcatgggacttccaaggagtgagatgctcagggccaggcaaacccctgcatccacgttcccactctcgctttaacaccagggcagcagcctagtcttgcagtgactcctgatgggc

SEQ ID NO: 8006 - DNA, 122 bp, Homo sapiens
  misc_feature (61)..(62): /note="This region represents a CpG dinucleotide"
  misc_feature (61)..(61): /note="Nucleotide may be methylated to form 5-methylcytosine"
taggcttagtttggcttatcaccacatttgaattacaagactgacctctggagtttactgcggctgtgctgctaatgttgaagtctccaggccaaattaatcatcactacaggccagcatgt

SEQ ID NO: 8007 - DNA, 122 bp, Homo sapiens
  misc_feature (61)..(62): /note="This region represents a CpG dinucleotide"
  misc_feature (61)..(61): /note="Nucleotide may be methylated to form 5-methylcytosine"
gcctccacacccgtgtgctgcagagagcacaggccaaagtacttttatccaggaatcttccgtggcatcatcaggaagaacacagagcccagccaattttgaacaaagaccattcagcttcc

SEQ ID NO: 8008 - DNA, 122 bp, Homo sapiens
  misc_feature (61)..(62): /note="This region represents a CpG dinucleotide"
  misc_feature (61)..(61): /note="Nucleotide may be methylated to form 5-methylcytosine"
ttctaaacaaggcataatatgaacattaactcagcgtgctctctctgggttgggactgcccgtcccactcactgatgattaaacctatgagaagtcttgctaaacattaaatcatcttggat

SEQ ID NO: 8009 - DNA, 122 bp, Homo sapiens
  misc_feature (61)..(62): /note="This region represents a CpG dinucleotide"
  misc_feature (61)..(61): /note="Nucleotide may be methylated to form 5-methylcytosine"
acagagtagagatttcagaagttgtctataacggcaaagaacagaacagtgacgtgggggcgtttcacactcagatgggtccgggggtaaatgtggggggtgcagggggaggactctgagtg

SEQ ID NO: 8010 - DNA, 122 bp, Homo sapiens
  misc_feature (61)..(62): /note="This region represents a CpG dinucleotide"
  misc_feature (61)..(61): /note="Nucleotide may be methylated to form 5-methylcytosine"
tgtttaagggccctacgccacctaactgtagaaatttagaatgcaatcctatattaattacgataaacaacccagctactcttgaccgggaaccttggaggtaggtattaggaacagatatc

SEQ ID NO: 8011 - DNA, 122 bp, Homo sapiens
  misc_feature (61)..(62): /note="This region represents a CpG dinucleotide"
  misc_feature (61)..(61): /note="Nucleotide may be methylated to form 5-methylcytosine"
tggtttggggagttcacctctccctaccttctgccatacaggaaaagggagaaggaggtgcgtcacctagtgcttctgagtgtccccgagatgcacttctagtttgacagtgctgccaaagg

SEQ ID NO: 8012 - DNA, 122 bp, Homo sapiens
  misc_feature (61)..(62): /note="This region represents a CpG dinucleotide"
  misc_feature (61)..(61): /note="Nucleotide may be methylated to form 5-methylcytosine"
gaaataaatcactctaatttggattcctttatatgagaacttccatatgcttaaaactcccgtagcatttttatagtgtacaggtcataaacatgttgtctgaagatgggcaaagtaggtcg

SEQ ID NO: 8013 - DNA, 122 bp, Homo sapiens
  misc_feature (61)..(62): /note="This region represents a CpG dinucleotide"
  misc_feature (61)..(61): /note="Nucleotide may be methylated to form 5-methylcytosine"
ggcttcgaggttgtggggtatgagtcagaggctgtgtcatggaggggcccccagattatgcgccccccccttctctctctttctctctgagtgtatctgctcataccaagaggagaggcatc

SEQ ID NO: 8014 - DNA, 122 bp, Homo sapiens
  misc_feature (61)..(62): /note="This region represents a CpG dinucleotide"
  misc_feature (61)..(61): /note="Nucleotide may be methylated to form 5-methylcytosine"
aagtttgtcagtgtcctccgtgttgtgaaacctagcgaaccattcagtactgatcttaaccgcccaccccaccccccttttttttttttgagacaaggtctctgtcgtccaggctggagtgc

SEQ ID NO: 8015 - DNA, 122 bp, Homo sapiens
  misc_feature (61)..(62): /note="This region represents a CpG dinucleotide"
  misc_feature (61)..(61): /note="Nucleotide may be methylated to form 5-methylcytosine"
tgtattggtcatcttcccattgccagtgcctacgaagggcttgacccattcattgttagacgctcagtaagtgtgtattgaggcagccctctgtgccactccagggctctttccactaaatc

SEQ ID NO: 8016 - DNA, 122 bp, Homo sapiens
  misc_feature (61)..(62): /note="This region represents a CpG dinucleotide"
  misc_feature (61)..(61): /note="Nucleotide may be methylated to form 5-methylcytosine"
attgctctgcaaactgtcaacgttatgtaaacattgctattcagagtgtgctcccaggtgcgggaggtacagctgttatctgttggagatcactcctgaagtaacattcctagtgccatggg

SEQ ID NO: 8017 - DNA, 122 bp, Homo sapiens
  misc_feature (61)..(62): /note="This region represents a CpG dinucleotide"
  misc_feature (61)..(61): /note="Nucleotide may be methylated to form 5-methylcytosine"
aattgcactgtttaggttgctggacaaatccatagtgtaaagctggcctgtatcaagtgacggtcaattcaaacagcaaggcaagttaaaagagggaactccattccacagaaccctagtgt

SEQ ID NO: 8018 - DNA, 122 bp, Homo sapiens
  misc_feature (61)..(62): /note="This region represents a CpG dinucleotide"
  misc_feature (61)..(61): /note="Nucleotide may be methylated to form 5-methylcytosine"
ggcgctgagtgcacggctgggctccacgctgatttctcctaatgaattaataatggcgctcgggcgggcgggggtggccggctgcggaccgcggagagagccgaggggaaggccgtggaggg

SEQ ID NO: 8019 - DNA, 122 bp, Homo sapiens
  misc_feature (61)..(62): /note="This region represents a CpG dinucleotide"
  misc_feature (61)..(61): /note="Nucleotide may be methylated to form 5-methylcytosine"
cgtttaaaacaaatcaagaaacttttgggtaacattgcaattacatgaaattgataaccgcgaaaataattggaactcctgcttgcaagtgtcaacctaaaaaaagtgcttccttttgttat

SEQ ID NO: 8020 - DNA, 122 bp, Homo sapiens
  misc_feature (61)..(62): /note="This region represents a CpG dinucleotide"
  misc_feature (61)..(61): /note="Nucleotide may be methylated to form 5-methylcytosine"
tatacatatgataaaagtgacacagacctacacacacatgcacatatcttctaatgtcaacgtcctggttttgatgttgtactgtgttcacacaagatgcaaccacttggggaaactggatg

SEQ ID NO: 8021 - DNA, 122 bp, Homo sapiens
  misc_feature (61)..(62): /note="This region represents a CpG dinucleotide"
  misc_feature (61)..(61): /note="Nucleotide may be methylated to form 5-methylcytosine"
acctaggctcagctagaaagagtgctatgatccattagcaatgtctgccctaggactggtcgtaggcagtggaagtacataattgccatccctgtcctaagtgttttaggatttgctaaacc

SEQ ID NO: 8022 - DNA, 122 bp, Homo sapiens
  misc_feature (61)..(62): /note="This region represents a CpG dinucleotide"
  misc_feature (61)..(61): /note="Nucleotide may be methylated to form 5-methylcytosine"
tttaaaatttcgcttgctgccttggttgctgtgatgtcacttgcccatccctagactgttcgccatggatttccctatcaaccctcagccctggcctttgatcctgtacagaagatcctggc

SEQ ID NO: 8023 - DNA, 122 bp, Homo sapiens
  misc_feature (61)..(62): /note="This region represents a CpG dinucleotide"
  misc_feature (61)..(61): /note="Nucleotide may be methylated to form 5-methylcytosine"
cattaccacatttgtgctttttagttaagctctagatgggcttggctttttacaaatgaccgtctttgggctgatgtgtggcaccagctattattcagtccacatgattctgctggaacgct

SEQ ID NO: 8024 - DNA, 122 bp, Homo sapiens
  misc_feature (61)..(62): /note="This region represents a CpG dinucleotide"
  misc_feature (61)..(61): /note="Nucleotide may be methylated to form 5-methylcytosine"
ggctgcaccatatagcctaggtgtgcagtagactattctgtcatagtttgtgtaagtgcacgctgtgatggtcacacaatgatgaaatcacataatgatgcatttctcagaatgtgttcctg

SEQ ID NO: 8025 - DNA, 122 bp, Homo sapiens
  misc_feature (61)..(62): /note="This region represents a CpG dinucleotide"
  misc_feature (61)..(61): /note="Nucleotide may be methylated to form 5-methylcytosine"
gtggctacggggctggacctggttcaacaggcttgtgcagtgaaagagcctgaccctttccgttcatacaggaaatcttgagttctcgataggagtaaatctggtttcagaagctgttaagt

SEQ ID NO: 8026 - DNA, 122 bp, Homo sapiens
  misc_feature (61)..(62): /note="This region represents a CpG dinucleotide"
  misc_feature (61)..(61): /note="Nucleotide may be methylated to form 5-methylcytosine"
atgaaggaggccctgccttctccatggacaaatccccagctttcaggacagtgtctgggacgtggtaagtactcaagaaatatttattaaataaacaaatgaaggaaagaggtacttctccc

SEQ ID NO: 8027 - DNA, 122 bp, Homo sapiens
  misc_feature (61)..(62): /note="This region represents a CpG dinucleotide"
  misc_feature (61)..(61): /note="Nucleotide may be methylated to form 5-methylcytosine"
tggaacagcctactatacatacacctaggctacaaacctgtactgcatgttactgaataccgtaggcaattgtaacacaatggcatttgtgcatcttaacgtaggaaaggtacagtaaaaac

SEQ ID NO: 8028 - DNA, 122 bp, Homo sapiens
  misc_feature (61)..(62): /note="This region represents a CpG dinucleotide"
  misc_feature (61)..(61): /note="Nucleotide may be methylated to form 5-methylcytosine"
acatgccagaaaccaggccgtgtggcctctcaccaccccatcactctgttcgctgttccacgccacaccctgcagccaccacccagtcaaaggcgccactgcctgggaagcccctgcgctag

SEQ ID NO: 8029 - DNA, 122 bp, Homo sapiens
  misc_feature (61)..(62): /note="This region represents a CpG dinucleotide"
  misc_feature (61)..(61): /note="Nucleotide may be methylated to form 5-methylcytosine"
acctgcaatcaaagggagcagcagatctttgccagtttctttgtgtggtcacacagtctccgccccttcccatgggtgggggcccggcgggaggggtcgatttccctcctgtgcgcagcagt

SEQ ID NO: 8030 - DNA, 122 bp, Homo sapiens
  misc_feature (61)..(62): /note="This region represents a CpG dinucleotide"
  misc_feature (61)..(61): /note="Nucleotide may be methylated to form 5-methylcytosine"
cccctgcccgacctcgcagaccacctcagtgcgcaggcgactgccctcgccaggccgcgccgccctgcctcgctcaccccgccccgcgctgaccccagccccagcaaggagtccgaccagac

SEQ ID NO: 8031 - DNA, 122 bp, Homo sapiens
  misc_feature (61)..(62): /note="This region represents a CpG dinucleotide"
  misc_feature (61)..(61): /note="Nucleotide may be methylated to form 5-methylcytosine"
aagcataacatccaattctcaaaaaatatttgtggaattaactgctgaataatgtgaccacgttaaacattagaacaataaggagaaatttttacgttgctatcacaaagttggcaacacta

SEQ ID NO: 8032 - DNA, 122 bp, Homo sapiens
  misc_feature (61)..(62): /note="This region represents a CpG dinucleotide"
  misc_feature (61)..(61): /note="Nucleotide may be methylated to form 5-methylcytosine"
gtgctataatttaataggtgggtgtgtttgttagggactctgaggctttgaggtttgagacgtggctacaggaagcctgtatgcaagcaaggtcaccaaagccacagctgtgactactgggc

SEQ ID NO: 8033 - DNA, 122 bp, Homo sapiens
  misc_feature (61)..(62): /note="This region represents a CpG dinucleotide"
  misc_feature (61)..(61): /note="Nucleotide may be methylated to form 5-methylcytosine"
tggttcctgagccatagtaaactatgtgcttatctctggcaatgcggctgtgattgggggcggggagggtgaaagccaagcgagagagggtaaagcagaaggcaaggaatggtgtagagtca

SEQ ID NO: 8034 - DNA, 122 bp, Homo sapiens
  misc_feature (61)..(62): /note="This region represents a CpG dinucleotide"
  misc_feature (61)..(61): /note="Nucleotide may be methylated to form 5-methylcytosine"
ctcacccttccctcttggcggtgttgcgggaagggaggagcaactcttcctcaacatcctcgaagctcagtgtctggcattgtaaggccagtggttttcaaacctctgggctcagaaccttt

SEQ ID NO: 8035 - DNA, 122 bp, Homo sapiens
  misc_feature (61)..(62): /note="This region represents a CpG dinucleotide"
  misc_feature (61)..(61): /note="Nucleotide may be methylated to form 5-methylcytosine"
cctctgccaggtcagctccaggcttgggtggcagtcctgacacggctggggcgcaggggccgggacgtgggcgggaatgagagggaacctgcctgggaaggctggggaggagcgtccaggcc

SEQ ID NO: 8036 - DNA, 122 bp, Homo sapiens
  misc_feature (61)..(62): /note="This region represents a CpG dinucleotide"
  misc_feature (61)..(61): /note="Nucleotide may be methylated to form 5-methylcytosine"
atgatttttaaaaaatagattcaaatgtgttatcctctctctgaaacgcttcctataactcgagtttataggggaagaaaaagctattgtttacaattatatcaccattaaggcaactgcta

SEQ ID NO: 8037 - DNA, 122 bp, Homo sapiens
  misc_feature (61)..(62): /note="This region represents a CpG dinucleotide"
  misc_feature (61)..(61): /note="Nucleotide may be methylated to form 5-methylcytosine"
aagcaggctgcccttcactggatgagtaacctagccagcatttcacctctgtgcatgccacgcatagctcttccctccccagcccaggcacgggcatgccacaatcctagctccacacacag

SEQ ID NO: 8038 - DNA, 122 bp, Homo sapiens
  misc_feature (61)..(62): /note="This region represents a CpG dinucleotide"
  misc_feature (61)..(61): /note="Nucleotide may be methylated to form 5-methylcytosine"
tgggatccgtggaaacttgcatggtaaggaggcttgcctgagacatgcctgcagctgcaccggtaagggcaattacacagacagctacacagataggggaagtggttttttttttttttttt

SEQ ID NO: 8039 - DNA, 122 bp, Homo sapiens
  misc_feature (61)..(62): /note="This region represents a CpG dinucleotide"
  misc_feature (61)..(61): /note="Nucleotide may be methylated to form 5-methylcytosine"
tatttattctcccctagatcaatcaagtgtcactatggcatgcctgggtccatcaagtgtcgttatttgtcccagaaaaagttacttcctccttcctgagacctagctgagttgtcaccttc

SEQ ID NO: 8040 - DNA, 122 bp, Homo sapiens
  misc_feature (61)..(62): /note="This region represents a CpG dinucleotide"
  misc_feature (61)..(61): /note="Nucleotide may be methylated to form 5-methylcytosine"
gcctctccagcatggcaaacttaacattgttggacattttgcctcagggctccaaaaacacgtgttcccaaagaccaaggaagaaactgcagaatttttttttaattactaagtctgagaaa

SEQ ID NO: 8041 - DNA, 122 bp, Homo sapiens
  misc_feature (61)..(62): /note="This region represents a CpG dinucleotide"
  misc_feature (61)..(61): /note="Nucleotide may be methylated to form 5-methylcytosine"
agtatcacttggaatccaatttacagtatttgggttttgctttataaacaccctggctgacgtgtctcccttcacaaatgaatttcatctctgtccttcaaggcccagctcttatggtgcat

SEQ ID NO: 8042 - DNA, 122 bp, Homo sapiens
  misc_feature (61)..(62): /note="This region represents a CpG dinucleotide"
  misc_feature (61)..(61): /note="Nucleotide may be methylated to form 5-methylcytosine"
ggctgcgggatatctgacctgccatgcttcattatactatattattaaaaccgcaggtggcgttgttggcttcttttacacacattctctgtcaatactgtgggatggcagtagtcatcctg

SEQ ID NO: 8043 - DNA, 122 bp, Homo sapiens
  misc_feature (61)..(62): /note="This region represents a CpG dinucleotide"
  misc_feature (61)..(61): /note="Nucleotide may be methylated to form 5-methylcytosine"
tctagggatttatttactgactttcagaaaagtaccgtaaagactgaagagttaatcactcgactcttaggatgtaaatgccatagaaacacccggcttcaggtcttcataaacatatctgt

SEQ ID NO: 8044 - DNA, 122 bp, Homo sapiens
  misc_feature (61)..(62): /note="This region represents a CpG dinucleotide"
  misc_feature (61)..(61): /note="Nucleotide may be methylated to form 5-methylcytosine"
cctaaatatttgtcacagcaatgggctaaagcctctggaagaggtgaagttgggaaactgcggattgccaagtaagttatttacatattcttgacattttaaaaagctatttttgaaatttt

SEQ ID NO: 8045 - DNA, 122 bp, Homo sapiens
  misc_feature (61)..(62): /note="This region represents a CpG dinucleotide"
  misc_feature (61)..(61): /note="Nucleotide may be methylated to form 5-methylcytosine"
agagaaaatcaacaagctagtgtttaaataatgtgcagggtgtgataccaaccgaacctccgccctccttcctggggaaatgcaaagtttgctgtggccttttcacaaacctcggagagaat

SEQ ID NO: 8046 - DNA, 122 bp, Homo sapiens
  misc_feature (61)..(62): /note="This region represents a CpG dinucleotide"
  misc_feature (61)..(61): /note="Nucleotide may be methylated to form 5-methylcytosine"
gcaataatgaattggccagcacttgtgtagtgcttcttgctgggtctcaggcaccgtggacgtgtgccaacgtttccacgtgctcttcacagcacctcgacgggtcgatcactaattatcac

SEQ ID NO: 8047 - DNA, 122 bp, Homo sapiens
  misc_feature (61)..(62): /note="This region represents a CpG dinucleotide"
  misc_feature (61)..(61): /note="Nucleotide may be methylated to form 5-methylcytosine"
tgatgatacacaagtggaagcctgagcaaagagggtgaggggaatgagcagttgaaaccacggatctgtgtgggattgccaaagaagagaacaaactctaaaaaggaaaagaactaaaccta

SEQ ID NO: 8048 - DNA, 122 bp, Homo sapiens
  misc_feature (61)..(62): /note="This region represents a CpG dinucleotide"
  misc_feature (61)..(61): /note="Nucleotide may be methylated to form 5-methylcytosine"
ggtgacttctcaggttctcggggtggcagctgcagtgatgacaccgcttcctggtggtcacgccgcgggcaggacgcgggaggccaggtccgtgcatcccgcgtgtcctgagcttcggccca

SEQ ID NO: 8049 - DNA, 122 bp, Homo sapiens
  misc_feature (61)..(62): /note="This region represents a CpG dinucleotide"
  misc_feature (61)..(61): /note="Nucleotide may be methylated to form 5-methylcytosine"
ccgactcgacacgtgagactgagtcatcggtccaggaggaggtggcccgctcaggccatgcggtcactcactggccacagccagccagagctgagtggttcactgtgccctgtgatttctgg

SEQ ID NO: 8050 - DNA, 122 bp, Homo sapiens
  misc_feature (61)..(62): /note="This region represents a CpG dinucleotide"
  misc_feature (61)..(61): /note="Nucleotide may be methylated to form 5-methylcytosine"
actcctcccaggagccgctttccacccacagtctcccttctgggagcatggggcaggtggcgaggtgctgggttcctttctcacccatgctggtcccagcaggctgaactgagcagctctgt

SEQ ID NO: 8051 - DNA, 122 bp, Homo sapiens
  misc_feature (61)..(62): /note="This region represents a CpG dinucleotide"
  misc_feature (61)..(61): /note="Nucleotide may be methylated to form 5-methylcytosine"
cacagacagagtctgggttcttactcacctgggcaggctatgggtggggtggggtgagaacgcactcagcagcctcagagggacataggaagaaaggagtgaggaaaactcccaggaattta

SEQ ID NO: 8052 - DNA, 122 bp, Homo sapiens
  misc_feature (61)..(62): /note="This region represents a CpG dinucleotide"
  misc_feature (61)..(61): /note="Nucleotide may be methylated to form 5-methylcytosine"
cacctgtagtcccagttacttaggaggctgaggtgggaggatcacttgagcccaggagttcgaggctgcagggagttatatcatgctactacactccagcctgggcactacagcaaggccct

SEQ ID NO: 8053 - DNA, 122 bp, Homo sapiens
  misc_feature (61)..(62): /note="This region represents a CpG dinucleotide"
  misc_feature (61)..(61): /note="Nucleotide may be methylated to form 5-methylcytosine"
ctggcggagagcctcagaaccacctgtttcctctgctgcaccatgcttgagtgtggaagccgtgcccctgttctccacagcgtgtatggccattcggcacatgtgtagatttgctgaatgag

SEQ ID NO: 8054 - DNA, 122 bp, Homo sapiens
  misc_feature (61)..(62): /note="This region represents a CpG dinucleotide"
  misc_feature (61)..(61): /note="Nucleotide may be methylated to form 5-methylcytosine"
atttatccaagctaagtgatcaaacacattattagaccagagtcctcttcaggtgcagggcgccttgttttcacaccggtctcaaatgtctaatgctgtgttaacaaagactgaacatttga

SEQ ID NO: 8055 - DNA, 122 bp, Homo sapiens
  misc_feature (61)..(62): /note="This region represents a CpG dinucleotide"
  misc_feature (61)..(61): /note="Nucleotide may be methylated to form 5-methylcytosine"
ggaggagttgttgagtcaatacttaagggctggcactgctcagattctccctgtactctgcgtctgtctctgatgttggcgatgtcacaatccccaatctttcacaacatttggacacagta

SEQ ID NO: 8056 - DNA, 122 bp, Homo sapiens
  misc_feature (61)..(62): /note="This region represents a CpG dinucleotide"
  misc_feature (61)..(61): /note="Nucleotide may be methylated to form 5-methylcytosine"
ctttttcaaaaaaatcttcattgacttctctactcaccagatcaagttcaaactctttagcgtacaagacaaaacactaaagagactatgaccaaatgccaaactcatgtttcccttttctc

SEQ ID NO: 8057 - DNA, 122 bp, Homo sapiens
  misc_feature (61)..(62): /note="This region represents a CpG dinucleotide"
  misc_feature (61)..(61): /note="Nucleotide may be methylated to form 5-methylcytosine"
tacttcaagtttggccttgtgttaaactggctgtgtgactccaggcaggctatacaacctcgctgagctatttcctcatctggacaacttatttcatgcacttcacaggcttgttgctggga

SEQ ID NO: 8058 - DNA, 122 bp, Homo sapiens
  misc_feature (61)..(62): /note="This region represents a CpG dinucleotide"
  misc_feature (61)..(61): /note="Nucleotide may be methylated to form 5-methylcytosine"
gcagagggcccggtggaccacttggatcccaccttcagagaagaggcttcacctagcagccggtacttggcaaatccatctgtttcaggacttaacttgtgttcccaaagcctagaaagcac

SEQ ID NO: 8059 - DNA, 122 bp, Homo sapiens
  misc_feature (61)..(62): /note="This region represents a CpG dinucleotide"
  misc_feature (61)..(61): /note="Nucleotide may be methylated to form 5-methylcytosine"
taaagagaatgcttttaaggaagacgcagtgatggttacaggctagaggaaactctccatcgttaagcattcatagaaaagagtgaaggaggcacccatacaccagcaggaaaacgacagga

SEQ ID NO: 8060 - DNA, 122 bp, Homo sapiens
  misc_feature (61)..(62): /note="This region represents a CpG dinucleotide"
  misc_feature (61)..(61): /note="Nucleotide may be methylated to form 5-methylcytosine"
gcaagaaaaggttaaatgacttgtgcactgggaagaaaaaaaaaaaaaacagttgtcatccgtggtgccaaaaatagaagttctgatttccagtcctgtgatctcaacagaagacagaatgt

SEQ ID NO: 8061 - DNA, 122 bp, Homo sapiens
  misc_feature (61)..(62): /note="This region represents a CpG dinucleotide"
  misc_feature (61)..(61): /note="Nucleotide may be methylated to form 5-methylcytosine"
ggagaaacctcgtggcctggtctccattatttgagatgagttacatcttggaggtgaggacgtgcctcgtggtctaaagcttcggcacaagggcccaactggaattccacttacgggtatga

SEQ ID NO: 8062 - DNA, 122 bp, Homo sapiens
  misc_feature (61)..(62): /note="This region represents a CpG dinucleotide"
  misc_feature (61)..(61): /note="Nucleotide may be methylated to form 5-methylcytosine"
cccctcataaccctcatccaacctaccagcaatttttttagcatgaatcttcaaaatacacgctgaatcctaccacttctcaattctatacctttgtccaaactttcctgactcttgacact

SEQ ID NO: 8063 - DNA, 122 bp, Homo sapiens
  misc_feature (61)..(62): /note="This region represents a CpG dinucleotide"
  misc_feature (61)..(61): /note="Nucleotide may be methylated to form 5-methylcytosine"
gcgtcccagtctgtgttgcagcagcattctcatcgggggtgcgcacaccatcgttactgtcgggcagtaactgccgcttgccttgccgcagtaggagggaaatctcaccttccttccacata

SEQ ID NO: 8064 - DNA, 122 bp, Homo sapiens
  misc_feature (61)..(62): /note="This region represents a CpG dinucleotide"
  misc_feature (61)..(61): /note="Nucleotide may be methylated to form 5-methylcytosine"
taattgccacggtagtgatttaatagtaaatcaccacagcagtggtgaccggatttacaacgtactaagcaaacaagaagagtcgaaggaaggattgaagaaattatctgggaatctaaatt

SEQ ID NO: 8065 - DNA, 122 bp, Homo sapiens
  misc_feature (61)..(62): /note="This region represents a CpG dinucleotide"
  misc_feature (61)..(61): /note="Nucleotide may be methylated to form 5-methylcytosine"
aatatgctgaccatagggccacagctctgacaagttgctcatgaaattactacagaatagcgtaatccgtattgaagacagcatagaagagggatagtaaaatataatgataggaatgaggt

SEQ ID NO: 8066 - DNA, 122 bp, Homo sapiens
  misc_feature (61)..(62): /note="This region represents a CpG dinucleotide"
  misc_feature (61)..(61): /note="Nucleotide may be methylated to form 5-methylcytosine"
ccacacttttttttcaaggcattgtatattatcgtaaaagaaaatttccaagggaaaactcgagacttttccatagtaacagtgattgtgttattgggtttaaggattacagatatattaga

SEQ ID NO: 8067 - DNA, 122 bp, Homo sapiens
  misc_feature (61)..(62): /note="This region represents a CpG dinucleotide"
  misc_feature (61)..(61): /note="Nucleotide may be methylated to form 5-methylcytosine"
ccactgcctcggagctgtcagaacccaactaggaaaggaaggggccctgcctgtgccactcgccacagagctcgggtctctcagaagaaagaagcgtccctaagaatagaatcccaccaagt

SEQ ID NO: 8068 - DNA, 122 bp, Homo sapiens
  misc_feature (61)..(62): /note="This region represents a CpG dinucleotide"
  misc_feature (61)..(61): /note="Nucleotide may be methylated to form 5-methylcytosine"
aaccaaggaccttgtctgttgttcattgccatgttgctgtgtctacaatagtgcccagcacgtagtaggcattcagtaaatgtctagaatgaatgtattatggaaggaactgtgtcttattc

SEQ ID NO: 8069 - DNA, 122 bp, Homo sapiens
  misc_feature (61)..(62): /note="This region represents a CpG dinucleotide"
  misc_feature (61)..(61): /note="Nucleotide may be methylated to form 5-methylcytosine"
tctatttcttaggtacctgaactcaatgtttataaaaatccatttaaagcccaaacctaacgtgcttattggctggtgcctggcacagcttttatgccagataaaggcagactttagataat

SEQ ID NO: 8070 - DNA, 122 bp, Homo sapiens
  misc_feature (61)..(62): /note="This region represents a CpG dinucleotide"
  misc_feature (61)..(61): /note="Nucleotide may be methylated to form 5-methylcytosine"
ggcacagctgcaaccccaggaatcctttgggacctaattccttgacccacacgttgatgacgcaactagctacagaagggcggcctcccttttgttcccagagaagatgttggatcttggca

SEQ ID NO: 8071 - DNA, 122 bp, Homo sapiens
  misc_feature (61)..(62): /note="This region represents a CpG dinucleotide"
  misc_feature (61)..(61): /note="Nucleotide may be methylated to form 5-methylcytosine"
ctgcatttatgtaatagaagctaatttatataactgtctatatggatgctcaaactcatccgtttaaaattaaaactgttcccttcctcaaaactaaatataccttcaccaaccagctccat

SEQ ID NO: 8072 - DNA, 122 bp, Homo sapiens
  misc_feature (61)..(62): /note="This region represents a CpG dinucleotide"
  misc_feature (61)..(61): /note="Nucleotide may be methylated to form 5-methylcytosine"
tatgatactataggtgagaccagtgagtttgggcatcttttttaccccattaggattcctcgtcataggaaaaataacaaagagtggagagttagagtctactcaaaccatttgggcaaggc

SEQ ID NO: 8073 - DNA, 122 bp, Homo sapiens
  misc_feature (61)..(62): /note="This region represents a CpG dinucleotide"
  misc_feature (61)..(61): /note="Nucleotide may be methylated to form 5-methylcytosine"
ctctaagacacatctggtgaaacaggatggcacagaataccttctcacaagtaacacctacgcttgctaaacacacagggagcttctgagaaggacacacttgaaactgctagcaggaatca

SEQ ID NO: 8074 - DNA, 122 bp, Homo sapiens
  misc_feature (61)..(62): /note="This region represents a CpG dinucleotide"
  misc_feature (61)..(61): /note="Nucleotide may be methylated to form 5-methylcytosine"
gagaggtgagagaagtccacttgccaagcgagcccccaagtgtctcggcaaatcctcacacggtagaacaattcgtaatcacctggaagacaggcatgggcctaaataaatcattttcatct

SEQ ID NO: 8075 - DNA, 122 bp, Homo sapiens
  misc_feature (61)..(62): /note="This region represents a CpG dinucleotide"
  misc_feature (61)..(61): /note="Nucleotide may be methylated to form 5-methylcytosine"
aatgacagccttgttgtcatcactgactgcctgctgattagatatgacagcaacccacaccgtcgtagtcacggtcatgctgaaaaggcagaagcgaacctgagctgcccaaagacaaaggc

SEQ ID NO: 8076 - DNA, 122 bp, Homo sapiens
  misc_feature (61)..(62): /note="This region represents a CpG dinucleotide"
  misc_feature (61)..(61): /note="Nucleotide may be methylated to form 5-methylcytosine"
gaagataacagcatccggaagccctgtgcccaggcccagtggtgcctgagcactgccttccgggaggtgcaggtggctgctgtcccacagtgacagcccccatgttgaaaacccaaggcctc

SEQ ID NO: 8077 - DNA, 122 bp, Homo sapiens
  misc_feature (61)..(62): /note="This region represents a CpG dinucleotide"
  misc_feature (61)..(61): /note="Nucleotide may be methylated to form 5-methylcytosine"
agtaagatgaaaggaagaagcatccttttttgaccaaggcattggagaccttgaatgccccggagagggatttggataggcagagggaagctggtgcaggttttcactgaagccattgaaag

SEQ ID NO: 8078 - DNA, 122 bp, Homo sapiens
  misc_feature (61)..(62): /note="This region represents a CpG dinucleotide"
  misc_feature (61)..(61): /note="Nucleotide may be methylated to form 5-methylcytosine"
acaccagaggcaggcaaagccacacctgtgggtgcaggccacacgcaggctgcacagacccgggacaggtctgagctctgaggcgtgcggcccatctccgcggcaggagcttctgtctgagc

SEQ ID NO: 8079 - DNA, 122 bp, Homo sapiens
  misc_feature (61)..(62): /note="This region represents a CpG dinucleotide"
  misc_feature (61)..(61): /note="Nucleotide may be methylated to form 5-methylcytosine"
gggagagtggtaaggctgtagtggtcataagaagccgtgggaaaggtcttcagcggtaatcggggcccatggaagggtcacagaggtgatgagcctgccgagagggtctacaggattgatgg

SEQ ID NO: 8080 - DNA, 122 bp, Homo sapiens
  misc_feature (61)..(62): /note="This region represents a CpG dinucleotide"
  misc_feature (61)..(61): /note="Nucleotide may be methylated to form 5-methylcytosine"
ctctcaggctgggcacatgccaaaacagatccagggctaaattctaaagtattgttgctgcgctgcagtggtttcctgaagggttatccccctcctagctcccagcactttggggtagagat

SEQ ID NO: 8081 - DNA, 122 bp, Homo sapiens
  misc_feature (61)..(62): /note="This region represents a CpG dinucleotide"
  misc_feature (61)..(61): /note="Nucleotide may be methylated to form 5-methylcytosine"
agtagaacaaaatgttaaaactgtattcagcctatatcaacaaaattttgcactctctatcgtgaacctgaaatttctctttgaaatcagtgaaacgtgaaaccagggtgtgctcaggaaaa

SEQ ID NO: 8082 - DNA, 122 bp, Homo sapiens
  misc_feature (61)..(62): /note="This region represents a CpG dinucleotide"
  misc_feature (61)..(61): /note="Nucleotide may be methylated to form 5-methylcytosine"
ttttcctgcagctttagaagctttagaaggcactctgctcactcaggggcaagtggtaagcgctctttcccctctagtgtttgtgactcaggagtttcgaaacaggaagtagagctggctgg

SEQ ID NO: 8083 - DNA, 122 bp, Homo sapiens
  misc_feature (61)..(62): /note="This region represents a CpG dinucleotide"
  misc_feature (61)..(61): /note="Nucleotide may be methylated to form 5-methylcytosine"
gaagaagagaaagttaatattcacagagttccttctaggagccaggccctgtactgacagcgtaaaaacacggtctttcatttaatcctacaacaaacctgacaaagcagtaccactgcata

SEQ ID NO: 8084 - DNA, 122 bp, Homo sapiens
  misc_feature (61)..(62): /note="This region represents a CpG dinucleotide"
  misc_feature (61)..(61): /note="Nucleotide may be methylated to form 5-methylcytosine"
agtgtgtgcccacatcccggccacgccacccgcatacggggggcacgtggacactgcccccgccccgccatcatcttgcatgaaaacgtcaggaacaatgacaaacaacttaggtgtccagc

SEQ ID NO: 8085 - DNA, 122 bp, Homo sapiens
  misc_feature (61)..(62): /note="This region represents a CpG dinucleotide"
  misc_feature (61)..(61): /note="Nucleotide may be methylated to form 5-methylcytosine"
cccagtgtctcagctcagtcctgcaggtcacacactgcttaactccagggtgccaagtcacgccatattctatgtgctcaagagcagtgctacttgagttgagcagtgcacagcttgtgcac

SEQ ID NO: 8086 - DNA, 122 bp, Homo sapiens
  misc_feature (61)..(62): /note="This region represents a CpG dinucleotide"
  misc_feature (61)..(61): /note="Nucleotide may be methylated to form 5-methylcytosine"
gctggggcctggtctgtgttcccgtgctcccataaactccctgatgtcactaggaaaatacgcatcaaaaccacagtgagatatgacttcacaccttctggaatggctgtattttttttttt

SEQ ID NO: 8087 - DNA, 122 bp, Homo sapiens
  misc_feature (61)..(62): /note="This region represents a CpG dinucleotide"
  misc_feature (61)..(61): /note="Nucleotide may be methylated to form 5-methylcytosine"
gggagtggccagagaggagttggagaaggatgttgtcaagggctttggcttgccaaacttcgtactttgtgtttggaccttgctctgtaagtgtccaggagattttaaagcaggggagtggc

SEQ ID NO: 8088 - DNA, 122 bp, Homo sapiens
  misc_feature (61)..(62): /note="This region represents a CpG dinucleotide"
  misc_feature (61)..(61): /note="Nucleotide may be methylated to form 5-methylcytosine"
gccaaggttcccctccactccccacccacctcatcctactcctgctgggcctctgccccacgacagggctctggactctccctggcaccacccccagaaatccccctttgacactattgcag

SEQ ID NO: 8089 - DNA, 122 bp, Homo sapiens
  misc_feature (61)..(62): /note="This region represents a CpG dinucleotide"
  misc_feature (61)..(61): /note="Nucleotide may be methylated to form 5-methylcytosine"
caattcccagaagaataaatgcagtcagtgttgctgactcaccgcatgacagaacagacacgacagcctaagtaagagccttggagttatttttcctgcttgggattcagattcaaaacaaa

SEQ ID NO: 8090 - DNA, 122 bp, Homo sapiens
  misc_feature (61)..(62): /note="This region represents a CpG dinucleotide"
  misc_feature (61)..(61): /note="Nucleotide may be methylated to form 5-methylcytosine"
gctacttcaggtcagggaccatgtcatttttttttttccctctgtatctccagggcttatcgctgaaacttagcaggcactcagtaaatattttgctaagcagttaaaactaagagaagaaa

SEQ ID NO: 8091 - DNA, 122 bp, Homo sapiens
  misc_feature (61)..(62): /note="This region represents a CpG dinucleotide"
  misc_feature (61)..(61): /note="Nucleotide may be methylated to form 5-methylcytosine"
gtggctccggcagggtctccatggttggccggtccagcgcctccaggaagtcgaagctgccgcagtggcgcttgttgaaaggcgcgggctcagcaggccgagccagggatcgctcacatggc

SEQ ID NO: 8092 - DNA, 122 bp, Homo sapiens
  misc_feature (61)..(62): /note="This region represents a CpG dinucleotide"
  misc_feature (61)..(61): /note="Nucleotide may be methylated to form 5-methylcytosine"
ggtaggacctttcagatcatctattttaaccccttcactttctctgaacttctcttctagcgctgtgcactcaattctcattcatgatgtgatgccttgacctcgctgaaggacaagtagaa

SEQ ID NO: 8093 - DNA, 122 bp, Homo sapiens
  misc_feature (61)..(62): /note="This region represents a CpG dinucleotide"
  misc_feature (61)..(61): /note="Nucleotide may be methylated to form 5-methylcytosine"
aggatgatgtctgcattgtctggggtgagtcactggctttttcaggcctcttcctgaccccgccacctgtggagcctaccctaacaaggtgtaggggccagaatccaggtcaaggtcatacc

SEQ ID NO: 8094 - DNA, 122 bp, Homo sapiens
  misc_feature (61)..(62): /note="This region represents a CpG dinucleotide"
  misc_feature (61)..(61): /note="Nucleotide may be methylated to form 5-methylcytosine"
tgtatatcttacatatgttgatttatggttttggcctgtaacatctgtctctgtaaaatccgtaaaaccaggccgggcatggtgactgttgcctataatcccagcatactcggaggccaagg

SEQ ID NO: 8095 - DNA, 122 bp, Homo sapiens
  misc_feature (61)..(62): /note="This region represents a CpG dinucleotide"
  misc_feature (61)..(61): /note="Nucleotide may be methylated to form 5-methylcytosine"
tccattaattggtggctgtcaacaggaacccagctggtgaactgctaatgcactatgagacgaggctttgaacatttcataaacattgtaaatagcctctgtataactgatcattgttcata

SEQ ID NO: 8096 - DNA, 122 bp, Homo sapiens
  misc_feature (61)..(62): /note="This region represents a CpG dinucleotide"
  misc_feature (61)..(61): /note="Nucleotide may be methylated to form 5-methylcytosine"
aaaagaaactcaacttagcaacagaattccaaaatgaaagtacaaacctttcaaggcatacgatcaggaggcaaaatgttcaagctgaggtaggaaatgaaagccctcaaccctctcactta

SEQ ID NO: 8097 - DNA, 122 bp, Homo sapiens
  misc_feature (61)..(62): /note="This region represents a CpG dinucleotide"
  misc_feature (61)..(61): /note="Nucleotide may be methylated to form 5-methylcytosine"
gtatctaacatacagccagaatcacagtcatagcacacttaatattttatcagaaacttgcgtgaacaagttaagaggactctcaacttaaaaatgacaccaattgcaatgatcttgttaac

SEQ ID NO: 8098 - DNA, 122 bp, Homo sapiens
  misc_feature (61)..(62): /note="This region represents a CpG dinucleotide"
  misc_feature (61)..(61): /note="Nucleotide may be methylated to form 5-methylcytosine"
ggagagaatggggaagtattgttcaaggagtaaagagtctcagttttgcaggatgaaaagcgttctgtggatagatgctggtgatgttgtgcaacaatgtaaatattcttaatgtcactgaa

SEQ ID NO: 8099 - DNA, 122 bp, Homo sapiens
  misc_feature (61)..(62): /note="This region represents a CpG dinucleotide"
  misc_feature (61)..(61): /note="Nucleotide may be methylated to form 5-methylcytosine"
attgcccgaggacacatagcggtgccggcgtctctgcatcccaggtgtctgctggggcctcggtttccccatcgcacagagacctcatcacggggcccatccggggaggaaggcggcacagg

SEQ ID NO: 8100 - DNA, 122 bp, Homo sapiens
  misc_feature (61)..(62): /note="This region represents a CpG dinucleotide"
  misc_feature (61)..(61): /note="Nucleotide may be methylated to form 5-methylcytosine"
aatctctagtattcagcctgaggcatgacatgcggggctgagccacacaagagctagagacgctccccgcaagcagaggacagtgcttttgtggcaaaacatggtttttaaaaaaatcactt

SEQ ID NO: 8101 - DNA, 122 bp, Homo sapiens
  misc_feature (61)..(62): /note="This region represents a CpG dinucleotide"
  misc_feature (61)..(61): /note="Nucleotide may be methylated to form 5-methylcytosine"
aggaattaagctgtgattcagcaggaggaggcacacacaggaggagctggttctcacactcgctgagccgcgagcgctgggaggctgggcactgagccgcagattctcatttctcaaggcca

SEQ ID NO: 8102 - DNA, 122 bp, Homo sapiens
  misc_feature (61)..(62): /note="This region represents a CpG dinucleotide"
  misc_feature (61)..(61): /note="Nucleotide may be methylated to form 5-methylcytosine"
acatataccttgccccatgcagctattccatctggtgttcatggtaccatttgtaataaccgttatagtaagccagtaaatccaagtcaatgtttccctgagttctgtgagccatcctagca

SEQ ID NO: 8103 - DNA, 122 bp, Homo sapiens
  misc_feature (61)..(62): /note="This region represents a CpG dinucleotide"
  misc_feature (61)..(61): /note="Nucleotide may be methylated to form 5-methylcytosine"
aaactcacaggtcaaggaaaaactctgtgatgtgcggtggggcgatttgccggcagccggcggcatcctcgcctcgggcctgtttagaacccagagctggccttcttcatttgacacctgtc

SEQ ID NO: 8104 - DNA, 122 bp, Homo sapiens
  misc_feature (61)..(62): /note="This region represents a CpG dinucleotide"
  misc_feature (61)..(61): /note="Nucleotide may be methylated to form 5-methylcytosine"
ggagatgggcatttcaaactgtagtacttgcctgtaatgcttacacaccaaggcttaaaacgccaagcaagagtaacattgtcaggttccttggcagtgagaatgaccaaccgtggtagaga

SEQ ID NO: 8105 - DNA, 122 bp, Homo sapiens
  misc_feature (61)..(62): /note="This region represents a CpG dinucleotide"
  misc_feature (61)..(61): /note="Nucleotide may be methylated to form 5-methylcytosine"
tatctactttatgctcgaggtggctccacctccaccatgagccagagccaatgatgctcacggccccaaccatgattaaaaagagattgccctgcaaggtaaatcagttaaaaccaacctct

SEQ ID NO: 8106 - DNA, 122 bp, Homo sapiens
  misc_feature (61)..(62): /note="This region represents a CpG dinucleotide"
  misc_feature (61)..(61): /note="Nucleotide may be methylated to form 5-methylcytosine"
aaaatgcattgacaaccactcctttaggattccttccccaggagctcccagtcccaggagcgaccaggaatacagttagccctcccttataggacagtggagagacggttcagaaggccacg

SEQ ID NO: 8107 - DNA, 122 bp, Homo sapiens
  misc_feature (61)..(62): /note="This region represents a CpG dinucleotide"
  misc_feature (61)..(61): /note="Nucleotide may be methylated to form 5-methylcytosine"
atgtttaaagatctcagtgtgccctccacatgaaccctacagccacccatttaattcttacgcatatatgtatttattattgcacggaggcttcgttattgcacagaggcttcattatagct

SEQ ID NO: 8108 - DNA, 122 bp, Homo sapiens
  misc_feature (61)..(62): /note="This region represents a CpG dinucleotide"
  misc_feature (61)..(61): /note="Nucleotide may be methylated to form 5-methylcytosine"
gttttaatatccacgttggttgttgaagcagtatattctaggggtgcctgggaagacagtcgtttaaaatgtctctgctttttataggtcagtttttcttcttctttctcactcccttgcca

SEQ ID NO: 8109 - DNA, 122 bp, Homo sapiens
  misc_feature (61)..(62): /note="This region represents a CpG dinucleotide"
  misc_feature (61)..(61): /note="Nucleotide may be methylated to form 5-methylcytosine"
cagttcccttatctcagaaggccagaagacggctgtcaaaggtcacagggaaatcaaaggcggggtacagggccagagggaggaggaaacaacttcccggttgctttcagacgcttcagaga

SEQ ID NO: 8110 - DNA, 122 bp, Homo sapiens
  misc_feature (61)..(62): /note="This region represents a CpG dinucleotide"
  misc_feature (61)..(61): /note="Nucleotide may be methylated to form 5-methylcytosine"
tgtctccggcaggctcgagggaaagtgagtgagatcatcaacaatgccattgtgcactaccgagatgacttggatctgcagaacctcattgattttggccagaaaaaggtatgggtcagcca

SEQ ID NO: 8111 - DNA, 122 bp, Homo sapiens
  misc_feature (61)..(62): /note="This region represents a CpG dinucleotide"
  misc_feature (61)..(61): /note="Nucleotide may be methylated to form 5-methylcytosine"
tactacctgacattctcaaacccttctttcctttgtactttttctgtgaacagatggtttcgtccagcttggagtgggtttaggggagactgagaaaacaagacggctgcctgcagttttag

SEQ ID NO: 8112 - DNA, 122 bp, Homo sapiens
  misc_feature (61)..(62): /note="This region represents a CpG dinucleotide"
  misc_feature (61)..(61): /note="Nucleotide may be methylated to form 5-methylcytosine"
taatcctcgcgtgttgcaacagcccaagatcaccctgcaaaggctattatttgcccagagcgttgcaggctggggaaatcttcatgtaccccttttccttttaaacaccagatcctatatcc

SEQ ID NO: 8113 - DNA, 122 bp, Homo sapiens
  misc_feature (61)..(62): /note="This region represents a CpG dinucleotide"
  misc_feature (61)..(61): /note="Nucleotide may be methylated to form 5-methylcytosine"
ataactgttctgagctggccactgtcccagggattcatccagctttatgtgacttttcatcgccttggctgttgagcagaatgaaattcagtgtagcttgtgatgcagatgccaggaaaaag

SEQ ID NO: 8114 - DNA, 122 bp, Homo sapiens
  misc_feature (61)..(62): /note="This region represents a CpG dinucleotide"
  misc_feature (61)..(61): /note="Nucleotide may be methylated to form 5-methylcytosine"
ccctggcctgggcggcttccccttcctcccaaggccggagcttccctctctctgtctacacgggggagtttccctcagaaagagtcctaacgtcctgaagtatcacagcctcctatgctgcc

SEQ ID NO: 8115 - DNA, 122 bp, Homo sapiens
  misc_feature (61)..(62): /note="This region represents a CpG dinucleotide"
  misc_feature (61)..(61): /note="Nucleotide may be methylated to form 5-methylcytosine"
tttctatctctatccacagtctggaatcgttaggattattttaagccttcataacatttgcggacagcttggagtgttttgtacatgtagtggggcagtgcctggcctcctgtgagagattg

SEQ ID NO: 8116 - DNA, 122 bp, Homo sapiens
  misc_feature (61)..(62): /note="This region represents a CpG dinucleotide"
  misc_feature (61)..(61): /note="Nucleotide may be methylated to form 5-methylcytosine"
tggagttgcgcccggcttccctggagttgccaccaccttggttatttctagatgatagaccgtccctagctgtggagtcacaagtagttgaattaattagtcattgaaggtcgcagccaggt

SEQ ID NO: 8117 - DNA, 122 bp, Homo sapiens
  misc_feature (61)..(62): /note="This region represents a CpG dinucleotide"
  misc_feature (61)..(61): /note="Nucleotide may be methylated to form 5-methylcytosine"
cacaacacagagagaggggcagattccccgctttgagagctcctgtcccctggggagagacgacacactctgacacagcagagaacgatacagagctggctgcaggctgaagagacacacag

SEQ ID NO: 8118 - DNA, 122 bp, Homo sapiens
  misc_feature (61)..(62): /note="This region represents a CpG dinucleotide"
  misc_feature (61)..(61): /note="Nucleotide may be methylated to form 5-methylcytosine"
tgtggctaagcactgtagccactccctgggctgcattccatgagggtcagtgcccttgaccgagtcatgtctccagtgctctgtccagaggaggagcttcacaacactgcctgggagctcaa

SEQ ID NO: 8119 - DNA, 122 bp, Homo sapiens
  misc_feature (61)..(62): /note="This region represents a CpG dinucleotide"
  misc_feature (61)..(61): /note="Nucleotide may be methylated to form 5-methylcytosine"
caccatggaagagatctaggtgggggacctaagtagtcagcctgtttgatcttgaggacacgggaaccccccccccaccccaagagatctgtgaagtgtctagggcagagcctgggtggtgg

SEQ ID NO: 8120 - DNA, 122 bp, Homo sapiens
  misc_feature (61)..(62): /note="This region represents a CpG dinucleotide"
  misc_feature (61)..(61): /note="Nucleotide may be methylated to form 5-methylcytosine"
gacccacagaggccaagcagttattctcaattgttctccacctactacgggaaatgtttccgttcttctacacccaagtccttgttttttggtgagtgttcaattaccagccgaaactcact

SEQ ID NO: 8121 - DNA, 122 bp, Homo sapiens
  misc_feature (61)..(62): /note="This region represents a CpG dinucleotide"
  misc_feature (61)..(61): /note="Nucleotide may be methylated to form 5-methylcytosine"
gtaccctgacaaatcaactgtctacatttttcccgttcccctccgggccacacgcttgtgcggacatgactttgaagccacagtcaaagagcaattgtgtttgtgcattcatttgttcagca

SEQ ID NO: 8122 - DNA, 122 bp, Homo sapiens
  misc_feature (61)..(62): /note="This region represents a CpG dinucleotide"
  misc_feature (61)..(61): /note="Nucleotide may be methylated to form 5-methylcytosine"
atctctctgaaccagtttcctcattttaagaattgaaatgctggctgggccagtggctcacgcctgtaatcccagcactttgggaggccaaggcgagatgactgcttgagtccaggagttcg

SEQ ID NO: 8123 - DNA, 122 bp, Homo sapiens
  misc_feature (61)..(62): /note="This region represents a CpG dinucleotide"
  misc_feature (61)..(61): /note="Nucleotide may be methylated to form 5-methylcytosine"
tgtaactttcctgaggtctcctagtcatgcttcctgtgaaactgtgagtcaattacgtatcgtctctttataaattacccagtctcagggaaaactaccctaaggcaaacattatatgaaag

SEQ ID NO: 8124 - DNA, 122 bp, Homo sapiens
  misc_feature (61)..(62): /note="This region represents a CpG dinucleotide"
  misc_feature (61)..(61): /note="Nucleotide may be methylated to form 5-methylcytosine"
tgttttatctctttcttttaaattcttatttttcctttaaatgtttgcatttgttaataacgattcagtgatggcacattctctaggctaagaacacttgcagcatgttgcctggaaagaaa

SEQ ID NO: 8125 - DNA, 122 bp, Homo sapiens
  misc_feature (61)..(62): /note="This region represents a CpG dinucleotide"
  misc_feature (61)..(61): /note="Nucleotide may be methylated to form 5-methylcytosine"
tgatcagcacatccagattctagtcctggctcattgtggctgttttgttctcaaatattacgtaagggaatttggaaccctagatattatcatcatctgagtctacttcaaacactgatatg

SEQ ID NO: 8126 - DNA, 122 bp, Homo sapiens
  misc_feature (61)..(62): /note="This region represents a CpG dinucleotide"
  misc_feature (61)..(61): /note="Nucleotide may be methylated to form 5-methylcytosine"
tccctctttttcttccctcttgcctttccctcccattgcccactttctttttttggctgccgaagatttattgcctttcagtacttatagatgatgttttcataagttctaatgaggtccca

SEQ ID NO: 8127 - DNA, 122 bp, Homo sapiens
  misc_feature (61)..(62): /note="This region represents a CpG dinucleotide"
  misc_feature (61)..(61): /note="Nucleotide may be methylated to form 5-methylcytosine"
gcgtctggaagatgtcaagagccagtgggtccggccagccagggctgactttagtgacaacgagagtgcccggctggccacggacgccctcttggatgggggttctgaagcctactggcggg

SEQ ID NO: 8128 - DNA, 122 bp, Homo sapiens
  misc_feature (61)..(62): /note="This region represents a CpG dinucleotide"
  misc_feature (61)..(61): /note="Nucleotide may be methylated to form 5-methylcytosine"
tcaactctagtctggtacttgttcacatgaacttaaatctagggtaaaaagattgtttttcgttgctgaagtcaatttggcaaatttgtagttttgatataagtcagatttgcagttcactc

SEQ ID NO: 8129 - DNA, 122 bp, Homo sapiens
  misc_feature (61)..(62): /note="This region represents a CpG dinucleotide"
  misc_feature (61)..(61): /note="Nucleotide may be methylated to form 5-methylcytosine"
agccactgattagggacttcattacatcgggacttcactttgtatatcccataatctaatcgtgggagtgacagccaacactgtcctgcccacacccaaaggggaagagattatgcaggacg

SEQ ID NO: 8130 - DNA, 122 bp, Homo sapiens
  misc_feature (61)..(62): /note="This region represents a CpG dinucleotide"
  misc_feature (61)..(61): /note="Nucleotide may be methylated to form 5-methylcytosine"
ctccccaacagctgccctgcctgcttggctctcagcccgggacagcagtgttcaggtccccgcgtcctcgcgcgcaaacccgcgtccctaggaatggggaaccgcgcggggaggcctggacg

SEQ ID NO: 8131 - DNA, 122 bp, Homo sapiens
  misc_feature (61)..(62): /note="This region represents a CpG dinucleotide"
  misc_feature (61)..(61): /note="Nucleotide may be methylated to form 5-methylcytosine"
tctgtggttattaatggtgtcagagcacagatgccggtgaagcaacagacccagcaaggacgatgggaaactgatcagataagtcctgaggtccccatcagcaccgtcactgccaccttgac

SEQ ID NO: 8132 - DNA, 122 bp, Homo sapiens
  misc_feature (61)..(62): /note="This region represents a CpG dinucleotide"
  misc_feature (61)..(61): /note="Nucleotide may be methylated to form 5-methylcytosine"
cccttcacccagcttttcccaatggcaacatcttacataaccataatatatcagctaaaccgggaaatttactttgatgcaacactatttactaaagctacagaccctactcagatggattc

SEQ ID NO: 8133 - DNA, 122 bp, Homo sapiens
  misc_feature (61)..(62): /note="This region represents a CpG dinucleotide"
  misc_feature (61)..(61): /note="Nucleotide may be methylated to form 5-methylcytosine"
gttttccttccagacccctcctgcagaatgccaaagcctgcccacttcccacactcacagcgccgcatgtatctaggagtagagactgtcacaggcttacattgctaccgtcagaaaagagt

SEQ ID NO: 8134 - DNA, 122 bp, Homo sapiens
  misc_feature (61)..(62): /note="This region represents a CpG dinucleotide"
  misc_feature (61)..(61): /note="Nucleotide may be methylated to form 5-methylcytosine"
cccaggattcagggccgctctctacctgtaaagcagtgtagctaaggggaagctgagccccgcaaggcgttttcaggcaggacaccccttgtcattcgaacggttctggtgtgagccagggt

SEQ ID NO: 8135 - DNA, 122 bp, Homo sapiens
  misc_feature (61)..(62): /note="This region represents a CpG dinucleotide"
  misc_feature (61)..(61): /note="Nucleotide may be methylated to form 5-methylcytosine"
ctctctgagcagtgggattggagagagggaggcagactgttctggtttcctccaaatacccgcaagtgctgcattgcatagccccatatatgatgcgctggcaggcagatgggcagcagtgg

SEQ ID NO: 8136 - DNA, 122 bp, Homo sapiens
  misc_feature (61)..(62): /note="This region represents a CpG dinucleotide"
  misc_feature (61)..(61): /note="Nucleotide may be methylated to form 5-methylcytosine"
gactgaagccagaatttaacggcagctgcctcgcttccatttttatgtctaatatgtagacgtacatttgtaagacaaaataaacatttaaaatagagtttaagaaacagaaaactcaaaat

SEQ ID NO: 8137 - DNA, 122 bp, Homo sapiens
  misc_feature (61)..(62): /note="This region represents a CpG dinucleotide"
  misc_feature (61)..(61): /note="Nucleotide may be methylated to form 5-methylcytosine"
attctgtgtgttggtacagagtgctctgtaccagtgctcatcatcccttcttcataccaacggtccctagttataggaatttaatatttttaaaagttttacattgctgtatattcaaagat

SEQ ID NO: 8138 - DNA, 122 bp, Homo sapiens
  misc_feature (61)..(62): /note="This region represents a CpG dinucleotide"
  misc_feature (61)..(61): /note="Nucleotide may be methylated to form 5-methylcytosine"
taacttcttccacattgcctaactgcctgtatggctggcctttgaagacaatcaacgtatcgtgacattcatgatacattctctggtcaaaatgctcctctcaaggagcataactttagact

SEQ ID NO: 8139 - DNA, 122 bp, Homo sapiens
  misc_feature (61)..(62): /note="This region represents a CpG dinucleotide"
  misc_feature (61)..(61): /note="Nucleotide may be methylated to form 5-methylcytosine"
tggctattttcaagctgctggctagctggctgggttgaagggacttcctgttcacctcctcggtcaaggtagcatgagtgaatggttcagtttcattcaccccagcagggggatagctggca

SEQ ID NO: 8140 - DNA, 122 bp, Homo sapiens
  misc_feature (61)..(62): /note="This region represents a CpG dinucleotide"
  misc_feature (61)..(61): /note="Nucleotide may be methylated to form 5-methylcytosine"
cccatgctacacagaagaactgcagttgctaaactggccgcatacttcctctgctaggaacgaggaaggcacagggcttgcagaagggcaggttcctgttttcagtaaccactctgagcaag

SEQ ID NO: 8141 - DNA, 122 bp, Homo sapiens
  misc_feature (61)..(62): /note="This region represents a CpG dinucleotide"
  misc_feature (61)..(61): /note="Nucleotide may be methylated to form 5-methylcytosine"
cagcatcgcctgggtcatagcctgagtttgagaaccatcgccctgcatggcctgaccagccgaggctagtggcagctctgtgcaacgtgtctacttcctcttccctaaacagctccttcccc

SEQ ID NO: 8142 - DNA, 122 bp, Homo sapiens
  misc_feature (61)..(62): /note="This region represents a CpG dinucleotide"
  misc_feature (61)..(61): /note="Nucleotide may be methylated to form 5-methylcytosine"
ctccgtctgggtcctaactgcagtgcatctagagaccctcctctgactcaggcataaggacggcccgcatattcatgcaggttactctgaacaagaacagtctatgggttacttccctagga

SEQ ID NO: 8143 - DNA, 122 bp, Homo sapiens
  misc_feature (61)..(62): /note="This region represents a CpG dinucleotide"
  misc_feature (61)..(61): /note="Nucleotide may be methylated to form 5-methylcytosine"
agacggcagcatctacggttctttctgctcaggaatgggaacccagagtgggcagtagagcggaggcaagccatgcagaggcaggagcagatgagaccctagatgccacgagaagctaaaca

SEQ ID NO: 8144 - DNA, 122 bp, Homo sapiens
  misc_feature (61)..(62): /note="This region represents a CpG dinucleotide"
  misc_feature (61)..(61): /note="Nucleotide may be methylated to form 5-methylcytosine"
actccaggaggttaacaaggattcctggtggaatgagtcacttcacctgatggagactggcggatcaggctgaagagcagccccacttggtgtgccccagcactgtgacctgcttgaaagtt

SEQ ID NO: 8145 - DNA, 122 bp, Homo sapiens
  misc_feature (61)..(62): /note="This region represents a CpG dinucleotide"
  misc_feature (61)..(61): /note="Nucleotide may be methylated to form 5-methylcytosine"
ctgtgaccaatttttccaagatccaaatgctttacttttatattaacttaagcaatcagacggcattccaatcttagcaatgaaatttagtcgtattagtctccggttagatttaactggtt

SEQ ID NO: 8146 - DNA, 122 bp, Homo sapiens
  misc_feature (61)..(62): /note="This region represents a CpG dinucleotide"
  misc_feature (61)..(61): /note="Nucleotide may be methylated to form 5-methylcytosine"
ttgctattgctgtgttctacatgagaaagctgagggtctgaggattgagtcactaagtgacggctacttaagtggcaagcctggatggaaactcatgcctgtctgaattgtggctcagacat

SEQ ID NO: 8147 - DNA, 122 bp, Homo sapiens
  misc_feature (61)..(62): /note="This region represents a CpG dinucleotide"
  misc_feature (61)..(61): /note="Nucleotide may be methylated to form 5-methylcytosine"
agagtctattgtaacaagtttctttgtcttcatacagcacctgttactgtgcaacaagaccgtgtttttgaacacctggcataacatgaaactgttaggttatattgtggctaatcctgaag

SEQ ID NO: 8148 - DNA, 122 bp, Homo sapiens
  misc_feature (61)..(62): /note="This region represents a CpG dinucleotide"
  misc_feature (61)..(61): /note="Nucleotide may be methylated to form 5-methylcytosine"
aaataaccataaaaggactctggaactacataaagatacaagacaaattggtttggagaacggaaataaaatctacctataaaatccaggtaaatatctgatactggcacacaggttggagc

SEQ ID NO: 8149 - DNA, 122 bp, Homo sapiens
  misc_feature (61)..(62): /note="This region represents a CpG dinucleotide"
  misc_feature (61)..(61): /note="Nucleotide may be methylated to form 5-methylcytosine"
aaccctgggtgtgaccttgcccgcccccaggaccttcgccccgctctgggaggtcttccgcgtctcctcggacaagctggcgctgtgccacctggaactgacacggaagttacaggatctca

SEQ ID NO: 8150 - DNA, 122 bp, Homo sapiens
  misc_feature (61)..(62): /note="This region represents a CpG dinucleotide"
  misc_feature (61)..(61): /note="Nucleotide may be methylated to form 5-methylcytosine"
gttccaatttgggagcatttcatattttcagataacagatgctccacctgtatacacacacgcaggaataaatatgtattattaggagtgcgaacaggaaaatgcaaatcatctcaagtatt

SEQ ID NO: 8151 - DNA, 122 bp, Homo sapiens
  misc_feature (61)..(62): /note="This region represents a CpG dinucleotide"
  misc_feature (61)..(61): /note="Nucleotide may be methylated to form 5-methylcytosine"
tgaactaatttacattcccagtaccagtgtgtaagcattctcttttgtctgcatatttgccgacatctgttattttgtgactttttagaaatggtctttctgagtggtataagctggtattt

SEQ ID NO: 8152 - DNA, 122 bp, Homo sapiens
  misc_feature (61)..(62): /note="This region represents a CpG dinucleotide"
  misc_feature (61)..(61): /note="Nucleotide may be methylated to form 5-methylcytosine"
cattcctccagtgacttggtgtcctcttgaccagacatgagctcccaaaccagaacttcacgctctacctttgggattcagcccctaggataagggagactaaagcctaccatgtgccacgc

SEQ ID NO: 8153 - DNA, 122 bp, Homo sapiens
  misc_feature (61)..(62): /note="This region represents a CpG dinucleotide"
  misc_feature (61)..(61): /note="Nucleotide may be methylated to form 5-methylcytosine"
cctagtgcccatgttttcactggacggcactgaactgcaactggacctggaatcctgttacgcacaggtctgcctcccagagatggtgtgcggaacccccatccgggagatgtggcaggatt

SEQ ID NO: 8154 - DNA, 122 bp, Homo sapiens
  misc_feature (61)..(62): /note="This region represents a CpG dinucleotide"
  misc_feature (61)..(61): /note="Nucleotide may be methylated to form 5-methylcytosine"
gaaacatatagcttgggaaataaacagttctcaggtcaagttcataggcttgcctcaaagcgtgtgagtgtagttcaagttcaaggaattgcctggaagccaaagagcacatgtactgcaac

SEQ ID NO: 8155 - DNA, 122 bp, Homo sapiens
  misc_feature (61)..(62): /note="This region represents a CpG dinucleotide"
  misc_feature (61)..(61): /note="Nucleotide may be methylated to form 5-methylcytosine"
cttctcttgaaaaggaggagaatcaacactgggctcacaactcatcagagctgagtcatacgtacatcagcaggacctacgtgggaaccaaatagcaaactcaaattgggaaatttgaggaa

SEQ ID NO: 8156 - DNA, 122 bp, Homo sapiens
  misc_feature (61)..(62): /note="This region represents a CpG dinucleotide"
  misc_feature (61)..(61): /note="Nucleotide may be methylated to form 5-methylcytosine"
tcgctctgtgtctcagttcactcacctgtaaaatgagataatgattgtgtctattcatatcgtggcaggtaccatgagtcagtatagggaaagcatttagaatagttcctcgtatctattaa

SEQ ID NO: 8157 - DNA, 122 bp, Homo sapiens
  misc_feature (61)..(62): /note="This region represents a CpG dinucleotide"
  misc_feature (61)..(61): /note="Nucleotide may be methylated to form 5-methylcytosine"
tcattcacccatctattcactcatcattgcattgactcacccaatccagtcactctttaacgtcttgattcattcactcagtcattctggcatgcactcattcattcaatggcccatccatt

SEQ ID NO: 8158 - DNA, 122 bp, Homo sapiens
  misc_feature (61)..(62): /note="This region represents a CpG dinucleotide"
  misc_feature (61)..(61): /note="Nucleotide may be methylated to form 5-methylcytosine"
agggagggaggaccacggggagtctccgtatctctgaatctacaaggattcctggaggctcgggggtgagggtaatgaggggtgtgtgtgctgcagagagttgagcgacagccacacacagg

SEQ ID NO: 8159 - DNA, 122 bp, Homo sapiens
  misc_feature (61)..(62): /note="This region represents a CpG dinucleotide"
  misc_feature (61)..(61): /note="Nucleotide may be methylated to form 5-methylcytosine"
tgcctgataattgctccctggatccatcaaggtttaaggggcggaggggggcgacaagggcggggcacagaggaagcatccagcttaataatttaaaggaaaaagatttaggtgagagggcc

SEQ ID NO: 8160 - DNA, 122 bp, Homo sapiens
  misc_feature (61)..(62): /note="This region represents a CpG dinucleotide"
  misc_feature (61)..(61): /note="Nucleotide may be methylated to form 5-methylcytosine"
tgctgtgagccacactctgttgccaattgaagcaaatgtggtcccagagcctgaagtccccgtgtgcaatgggcgccctctagcttcttaccaagtgaaatatatgctcatttctggacaat

SEQ ID NO: 8161 - DNA, 122 bp, Homo sapiens
  misc_feature (61)..(62): /note="This region represents a CpG dinucleotide"
  misc_feature (61)..(61): /note="Nucleotide may be methylated to form 5-methylcytosine"
atggggatgactgaatgagacagtacacagtaatttgcagagtgcctgttgcctagcaagcgctggagtaagtaaatagcttaagcttatactgtgctgtaagcttgtattgccacatacaa

SEQ ID NO: 8162 - DNA, 122 bp, Homo sapiens
  misc_feature (61)..(62): /note="This region represents a CpG dinucleotide"
  misc_feature (61)..(61): /note="Nucleotide may be methylated to form 5-methylcytosine"
ttttctcaagtttggaaactttctgttctgcaaccagccagcgaaaattttgcttttaaacggctcagctgattgagtcaggcccactggataatctctgtattataggatcaactgacatg

SEQ ID NO: 8163 - DNA, 122 bp, Homo sapiens
  misc_feature (61)..(62): /note="This region represents a CpG dinucleotide"
  misc_feature (61)..(61): /note="Nucleotide may be methylated to form 5-methylcytosine"
aataatgctgcaaagaacatctgtgcacaagtttttgtgtagacatttgtttttatatcacgtgggtatccaccaacagtgcatgagggttccaatttctctgcatcctcaccaacacttga

SEQ ID NO: 8164 - DNA, 122 bp, Homo sapiens
  misc_feature (61)..(62): /note="This region represents a CpG dinucleotide"
  misc_feature (61)..(61): /note="Nucleotide may be methylated to form 5-methylcytosine"
aattgcattagagtgattcatatatcgctttcgaaatgccaacggacacacagtgactcacgttccctgctttcatcctcatatttccttatggaaatactgaggtcctgcatgtgccattt

SEQ ID NO: 8165 - DNA, 122 bp, Homo sapiens
  misc_feature (61)..(62): /note="This region represents a CpG dinucleotide"
  misc_feature (61)..(61): /note="Nucleotide may be methylated to form 5-methylcytosine"
gaccgagggggactgtgggtaataaaccatggaaggcaaacccacggatggaggcactaccgtgttctgccaaaatatgctggctgaagccagggtttactgaaggcagaatgcttcctgtt

SEQ ID NO: 8166 - DNA, 122 bp, Homo sapiens
  misc_feature (61)..(62): /note="This region represents a CpG dinucleotide"
  misc_feature (61)..(61): /note="Nucleotide may be methylated to form 5-methylcytosine"
tggcttcattttctgtttttttctagggaggagagagaagagagcagggagctgctgcatcgtgcccctgtcacagctttccctggggactgaaagcccctgtacttttcctgcctgccacc

SEQ ID NO: 8167 - DNA, 122 bp, Homo sapiens
  misc_feature (61)..(62): /note="This region represents a CpG dinucleotide"
  misc_feature (61)..(61): /note="Nucleotide may be methylated to form 5-methylcytosine"
ttcagtaagtctggggtggggcctaagatgttgcattactgataagctttcaggtgatgccggtgctgctggtctaaaattttgctccaacctagagcatatggagagatgcctagattcct

SEQ ID NO: 8168 - DNA, 122 bp, Homo sapiens
  misc_feature (61)..(62): /note="This region represents a CpG dinucleotide"
  misc_feature (61)..(61): /note="Nucleotide may be methylated to form 5-methylcytosine"
cctgccatgtaatggtaaatctaagtcaaccctagtaatttcattcctctggccaatgatcgcttggggtgtggccatgagctgcctcttcgcctgagcctgagccacagctaccctctgca

SEQ ID NO: 8169 - DNA, 122 bp, Homo sapiens
  misc_feature (61)..(62): /note="This region represents a CpG dinucleotide"
  misc_feature (61)..(61): /note="Nucleotide may be methylated to form 5-methylcytosine"
cgggatctttctggtgcttctgggactgctgatggctctggtcagctggagcatggactacgtcagtgccaaaagccttcagggtaggtttaacctggacctttgcccacagccgtttctgg

SEQ ID NO: 8170 - DNA, 122 bp, Homo sapiens
  misc_feature (61)..(62): /note="This region represents a CpG dinucleotide"
  misc_feature (61)..(61): /note="Nucleotide may be methylated to form 5-methylcytosine"
aaaaaaaaaaataaaataaaaaaagaccctttgtgatatgatgtcacacattcacaggctcggagggttaggaaatgtattcatacatggttgtgggccattattctatcggtcacagaaag

SEQ ID NO: 8171 - DNA, 122 bp, Homo sapiens
  misc_feature (61)..(62): /note="This region represents a CpG dinucleotide"
  misc_feature (61)..(61): /note="Nucleotide may be methylated to form 5-methylcytosine"
ccgtatggctccctcagcaggtggctgtaatccactgcaaaggacatcaaaaagaaaacacggccattgcccgtggtaaccagagagctgattcagcagctcaggacacagcatgactttca

SEQ ID NO: 8172 - DNA, 122 bp, Homo sapiens
  misc_feature (61)..(62): /note="This region represents a CpG dinucleotide"
  misc_feature (61)..(61): /note="Nucleotide may be methylated to form 5-methylcytosine"
aggcagaatttgcatcaataaaaggagaaatttccaaatacttaaagaaacaacctcacacgtggtaaaatggccgttataaaaaagaagaaagataacaagtgttgatgaggatgtgcaga

SEQ ID NO: 8173 - DNA, 122 bp, Homo sapiens
  misc_feature (61)..(62): /note="This region represents a CpG dinucleotide"
  misc_feature (61)..(61): /note="Nucleotide may be methylated to form 5-methylcytosine"
attggcggggactttcttcctttgtaatgtgctcactggggttgtcacgtcacatagccacgtggagacagccactgaagttcaaagacaagatgggtgtaaatgtgattcatttcattaaa

SEQ ID NO: 8174 - DNA, 122 bp, Homo sapiens
  misc_feature (61)..(62): /note="This region represents a CpG dinucleotide"
  misc_feature (61)..(61): /note="Nucleotide may be methylated to form 5-methylcytosine"
taaatagagattaaaaaaaaaaaaaaggctagatggctttttgtgttgtattttccaagtcgttaactgcaaacgctagttttaaagagaactggacactcaatcaaaatactcctgtctca

SEQ ID NO: 8175 - DNA, 122 bp, Homo sapiens
  misc_feature (61)..(62): /note="This region represents a CpG dinucleotide"
  misc_feature (61)..(61): /note="Nucleotide may be methylated to form 5-methylcytosine"
cttcctccttctgcccaattcatcttttggtgcatgctaacaagcagtggaatggacagacgcagcacaagggaggagcagccagagttccagataagcaaggtgccaagagttgcaacaag

SEQ ID NO: 8176 - DNA, 122 bp, Homo sapiens
  misc_feature (61)..(62): /note="This region represents a CpG dinucleotide"
  misc_feature (61)..(61): /note="Nucleotide may be methylated to form 5-methylcytosine"
atcacctcccaaatatcccacttgcacccaaaaccttgtcttgggtcagcttctgggagccgacctaagccagcagctataatgctcagggcttaagagctttggaatcagatggacctgag

SEQ ID NO: 8177 - DNA, 122 bp, Homo sapiens
  misc_feature (61)..(62): /note="This region represents a CpG dinucleotide"
  misc_feature (61)..(61): /note="Nucleotide may be methylated to form 5-methylcytosine"
tcacccactcaaccaaccacatatatcctcgtccctacccacgtactcaagtgtaacgtccgtatgcatatctatttgcggccacctcccaacctgtcatttactggtagtgcctctgacag

SEQ ID NO: 8178 - DNA, 122 bp, Homo sapiens
  misc_feature (61)..(62): /note="This region represents a CpG dinucleotide"
  misc_feature (61)..(61): /note="Nucleotide may be methylated to form 5-methylcytosine"
cggctagagcttcagcacaggctgggtctgctgtgccgggtctgtatggggacagctgcacgcctcttccgcttgtgtgagaacaaaggccggaacctggattctgatccaaaccccctggc

SEQ ID NO: 8179 - DNA, 122 bp, Homo sapiens
  misc_feature (61)..(62): /note="This region represents a CpG dinucleotide"
  misc_feature (61)..(61): /note="Nucleotide may be methylated to form 5-methylcytosine"
aggtggtgggtggggagaaggggagaggtgaggtaatacagggaagacagacaaaaatgacggtcactggccgggcgctgtggctcatgcctataatctcagcacttatgggatgccaaggc

SEQ ID NO: 8180 - DNA, 122 bp, Homo sapiens
  misc_feature (61)..(62): /note="This region represents a CpG dinucleotide"
  misc_feature (61)..(61): /note="Nucleotide may be methylated to form 5-methylcytosine"
tgcaggctattcattgtcatgcaaattgtgctgcccttgtggcctgagtggtagagccaccgtattgacctctgaattactttcagtgtctgcagttatcagatcttagaaatgaacagcag

SEQ ID NO: 8181 - DNA, 122 bp, Homo sapiens
  misc_feature (61)..(62): /note="This region represents a CpG dinucleotide"
  misc_feature (61)..(61): /note="Nucleotide may be methylated to form 5-methylcytosine"
gagagtataatttatgtatgctggtgatcaattcaaacgaacacatcaattcctacaatacgccctatattggactatattggacactatattggacactaggaatataaagatgaataaat

SEQ ID NO: 8182 - DNA, 122 bp, Homo sapiens
  misc_feature (61)..(62): /note="This region represents a CpG dinucleotide"
  misc_feature (61)..(61): /note="Nucleotide may be methylated to form 5-methylcytosine"
agggtgtggggagggggctgccccgcctcacgattaaggttcagactaggggtacttaaccgctggagcaggcccgactgaggtggggtgagctgaggaccccgaggaggagggcacaaggc

SEQ ID NO: 8183 - DNA, 122 bp, Homo sapiens
  misc_feature (61)..(62): /note="This region represents a CpG dinucleotide"
  misc_feature (61)..(61): /note="Nucleotide may be methylated to form 5-methylcytosine"
cttaccaagcctgttccttgagcactaacactgaagtaacaccttacaaaatttctgggccgggcatggtggctcatgcctataatcccagcactttaggaagccaagatgggtagatcgct

SEQ ID NO: 8184 - DNA, 122 bp, Homo sapiens
  misc_feature (61)..(62): /note="This region represents a CpG dinucleotide"
  misc_feature (61)..(61): /note="Nucleotide may be methylated to form 5-methylcytosine"
ccttgtagtaaggcatagcattaccatatttcctcatctctaaggcaccatctattgtgacgtacaccgtcattttatgtaccactaaggaaaatgctgtcaatttcagcatgctgtgtcat

SEQ ID NO: 8185 - DNA, 122 bp, Homo sapiens
  misc_feature (61)..(62): /note="This region represents a CpG dinucleotide"
  misc_feature (61)..(61): /note="Nucleotide may be methylated to form 5-methylcytosine"
agggaggccgagcagggctgcccgggccgccggcgtgggggtccgagctccggctggctccgcggagcctcagaggcaggtccgagccgccctcacccaggagcccctccgtgcggttctgg

SEQ ID NO: 8186 - DNA, 122 bp, Homo sapiens
  misc_feature (61)..(62): /note="This region represents a CpG dinucleotide"
  misc_feature (61)..(61): /note="Nucleotide may be methylated to form 5-methylcytosine"
cagatgctgaggtcgtcatgattttattgaatcacacttcagttattttctctccactctcgttcttgcagctgtgttagtaatcattaagtcattttatgatcttgctggggttccacaca

SEQ ID NO: 8187 - DNA, 122 bp, Homo sapiens
  misc_feature (61)..(62): /note="This region represents a CpG dinucleotide"
  misc_feature (61)..(61): /note="Nucleotide may be methylated to form 5-methylcytosine"
tttgagacagagtctcactttgtaccccagaaagtaaatctagttagatgtggtttgtctcggctcactgcaacctccaccccgtgcgttctagcaattctcctgcctcagccaccacacct

SEQ ID NO: 8188 - DNA, 122 bp, Homo sapiens
  misc_feature (61)..(62): /note="This region represents a CpG dinucleotide"
  misc_feature (61)..(61): /note="Nucleotide may be methylated to form 5-methylcytosine"
gaggcaatttttagctgttctcactcacagactttcttatccattgtatcaattttagtgcgtcaaagtgacttgcagaacctgttaactatgcagctgcgtgattctttccccagtcccca

SEQ ID NO: 8189 - DNA, 122 bp, Homo sapiens
  misc_feature (61)..(62): /note="This region represents a CpG dinucleotide"
  misc_feature (61)..(61): /note="Nucleotide may be methylated to form 5-methylcytosine"
gtgcgttagtgttggctctgtcgttctgtcaaagtgtggacagcaaatagctgtcctggccgttcctgggtggagttggggatgttgagccatctgctgaagggcagctcttcccgtgagtc

SEQ ID NO: 8190 - DNA, 122 bp, Homo sapiens
  misc_feature (61)..(62): /note="This region represents a CpG dinucleotide"
  misc_feature (61)..(61): /note="Nucleotide may be methylated to form 5-methylcytosine"
agacccatacttaggaatccctcactgttatctctggggcaagcagtttaatattcccagcggcagtctcaaagccaggagatgcatgcctaagacctgccctcccaacccccaccaagtca

SEQ ID NO: 8191 - DNA, 122 bp, Homo sapiens
  misc_feature (61)..(62): /note="This region represents a CpG dinucleotide"
  misc_feature (61)..(61): /note="Nucleotide may be methylated to form 5-methylcytosine"
cctctgagcctcagcagtgggatctagtggtcaccatttcttggatgtgtcataaggatacggtgtggctcagggaagcactggattataatgtgttttaagctcattctgaagaaaagcac

SEQ ID NO: 8192 - DNA, 122 bp, Homo sapiens
  misc_feature (61)..(62): /note="This region represents a CpG dinucleotide"
  misc_feature (61)..(61): /note="Nucleotide may be methylated to form 5-methylcytosine"
tgggaagaacagtcctgctcacttgggagggctgtgtcagcttttacagagcagctttcacggtcctttgttcctctctccccagatcctacagtgtcagtatccgaatcaatcactttcct

SEQ ID NO: 8193 - DNA, 122 bp, Homo sapiens
  misc_feature (61)..(62): /note="This region represents a CpG dinucleotide"
  misc_feature (61)..(61): /note="Nucleotide may be methylated to form 5-methylcytosine"
tccccccggcttccccgcccctctcttcctccttctttccctcctccctctcccggcgcccgaaaggatcattgttagccgcccccgccccgcccaccccggctgtttatttatgcacacgt

SEQ ID NO: 8194 - DNA, 122 bp, Homo sapiens
  misc_feature (61)..(62): /note="This region represents a CpG dinucleotide"
  misc_feature (61)..(61): /note="Nucleotide may be methylated to form 5-methylcytosine"
gggatggaactgagcttagaaccttggtctgtctgactttagaagctagcgcttaacctccgtgctattctgcagaggttcaaactggtggccaataagccagctgtggcccacagacatgc

SEQ ID NO: 8195 - DNA, 122 bp, Homo sapiens
  misc_feature (61)..(62): /note="This region represents a CpG dinucleotide"
  misc_feature (61)..(61): /note="Nucleotide may be methylated to form 5-methylcytosine"
ccagggtgggagattggggtgatattactccccgcaaggaggggggcgtcggcccccctgcgatgtggttcgtcatatccggtggggagtgggggttgatattactccccttatgtgggcgg

SEQ ID NO: 8196 - DNA, 122 bp, Homo sapiens
  misc_feature (61)..(62): /note="This region represents a CpG dinucleotide"
  misc_feature (61)..(61): /note="Nucleotide may be methylated to form 5-methylcytosine"
aattcccagtccctctcccttgctttccccacctactcctctatgtgactggcacagtgccgggcagtgctaaacacagtgattactgactggtgttagaagaatgatgtccccaacacttc

SEQ ID NO: 8197 - DNA, 122 bp, Homo sapiens
  misc_feature (61)..(62): /note="This region represents a CpG dinucleotide"
  misc_feature (61)..(61): /note="Nucleotide may be methylated to form 5-methylcytosine"
ggttttagagacttacccaacaccttcctgccctcaggagttcaccagagggaagagcaacgcaatccagacttcacccgggaatagttgtgtggctttggccgagatgtttctcctccctg

SEQ ID NO: 8198 - DNA, 122 bp, Homo sapiens
  misc_feature (61)..(62): /note="This region represents a CpG dinucleotide"
  misc_feature (61)..(61): /note="Nucleotide may be methylated to form 5-methylcytosine"
accgccagcttccgcacctccaagtacctgctggaggagtggttccagaactgctatgctcgctaccaccaggccttcgccgaccgcgaccagtcggagcggcagcggcacgagagccagca

SEQ ID NO: 8199 - DNA, 122 bp, Homo sapiens
  misc_feature (61)..(62): /note="This region represents a CpG dinucleotide"
  misc_feature (61)..(61): /note="Nucleotide may be methylated to form 5-methylcytosine"
gattacaggtgtgagccactgtggccagctaatcacttttttaaatcacaatttgtgttacgttcatgagtaatgggtgccagaaataatgttgtgtgttaaacataaatgtagatgggtaa

SEQ ID NO: 8200 - DNA, 122 bp, Homo sapiens
  misc_feature (61)..(62): /note="This region represents a CpG dinucleotide"
  misc_feature (61)..(61): /note="Nucleotide may be methylated to form 5-methylcytosine"
cacaatcggcaacagaatgacgccacacaagatcattaaacatttcagcaggaataaaaacgaaaccaagagaatgcacctgccaatctatatcaggcaactatggggtttgtgagccgtcc

SEQ ID NO: 8201 - DNA, 122 bp, Homo sapiens
  misc_feature (61)..(62): /note="This region represents a CpG dinucleotide"
  misc_feature (61)..(61): /note="Nucleotide may be methylated to form 5-methylcytosine"
ttacaagcctccctgttgagaaagcaagcagggcttttaggccctgcccttccctgactgcggtggattctgtggtcatatctgcacatcctgttccctgccaccaccaccccccaaaaaaa

SEQ ID NO: 8202 - DNA, 122 bp, Homo sapiens
  misc_feature (61)..(62): /note="This region represents a CpG dinucleotide"
  misc_feature (61)..(61): /note="Nucleotide may be methylated to form 5-methylcytosine"
ggcaccactgagctccggatccaggtaaccgacgccaatgataatcccccggtattcaaccgagacgtgtacagagtcagccttcgggaaaacgtgccaccaggcaccactgtgttgcaagt

SEQ ID NO: 8203 - DNA, 122 bp, Homo sapiens
  misc_feature (61)..(62): /note="This region represents a CpG dinucleotide"
  misc_feature (61)..(61): /note="Nucleotide may be methylated to form 5-methylcytosine"
tgacctaagacaagttactcagcctctctgtgcctcatctttttcacctgtggaatggagcgaatcatcgcagctggtgtgaagattaacaatttgtatataggagttggcacagggccagt

SEQ ID NO: 8204 - DNA, 122 bp, Homo sapiens
  misc_feature (61)..(62): /note="This region represents a CpG dinucleotide"
  misc_feature (61)..(61): /note="Nucleotide may be methylated to form 5-methylcytosine"
cttttatttgcacagtcctattaattttaatgcctaaagcagtgttaatcgcatgacccacgtgaaaagattttaaaaattgctttgttagaaaatgtaatagacttgtcgttaaagttttc

SEQ ID NO: 8205 - DNA, 122 bp, Homo sapiens
  misc_feature (61)..(62): /note="This region represents a CpG dinucleotide"
  misc_feature (61)..(61): /note="Nucleotide may be methylated to form 5-methylcytosine"
ttccattttaatatctgaaatcaggatgcatcttataactggtagcattttttctttctccgtagtacattaaataaaattttactgcattttgttgaactgattccatcagttgtatcaga

SEQ ID NO: 8206 - DNA, 122 bp, Homo sapiens
  misc_feature (61)..(62): /note="This region represents a CpG dinucleotide"
  misc_feature (61)..(61): /note="Nucleotide may be methylated to form 5-methylcytosine"
ttcctcacccagagcacgctggggccaaattgacttaaagcttaaggctacccagtgagtcgatgctggcaccaggactgcagccctcagtgctcaatgcagggggagtgtggtggagggcg

SEQ ID NO: 8207 - DNA, 122 bp, Homo sapiens
  misc_feature (61)..(62): /note="This region represents a CpG dinucleotide"
  misc_feature (61)..(61): /note="Nucleotide may be methylated to form 5-methylcytosine"
cattcattcatcactaatttattcattcaacactgatttacagaacacctgactctatgacgtcatacttggccctaggaatggaataatgaacacagcagataaatggaactgataaatgg

SEQ ID NO: 8208 - DNA, 122 bp, Homo sapiens
  misc_feature (61)..(62): /note="This region represents a CpG dinucleotide"
  misc_feature (61)..(61): /note="Nucleotide may be methylated to form 5-methylcytosine"
tgaatttgagagttactgattgagctgtatctgaaccatattacgccacatgatgaaactcgacacactggaattcactcctccattgttcactctgtctgaccccagtgaagaagtctacc

SEQ ID NO: 8209 - DNA, 122 bp, Homo sapiens
  misc_feature (61)..(62): /note="This region represents a CpG dinucleotide"
  misc_feature (61)..(61): /note="Nucleotide may be methylated to form 5-methylcytosine"
ataggatttaattgtttttgaaaaagatgccttctaccttcctcctcctccagctgcacacgtagtttactggttactgtggtaactgcactctaataatcctgtcaggaaatctgatgcaa

SEQ ID NO: 8210 - DNA, 122 bp, Homo sapiens
  misc_feature (61)..(62): /note="This region represents a CpG dinucleotide"
  misc_feature (61)..(61): /note="Nucleotide may be methylated to form 5-methylcytosine"
gggattggagggtgggcctttgatgctcctcaagcaataagccacatggagaacttgcatcgtaagtgttagcaagggctcacctcactgccttggaaacctaccatcctgtgactcgccct

SEQ ID NO: 8211 - DNA, 122 bp, Homo sapiens
  misc_feature (61)..(62): /note="This region represents a CpG dinucleotide"
  misc_feature (61)..(61): /note="Nucleotide may be methylated to form 5-methylcytosine"
ggcctccacccaacatccagtatgcaactgaggcctcttgccaacagctgtgtgagtgaacgtggaaactgatgctccggtcccagacaggccttcggaagacggcagctgccacctcatgg

SEQ ID NO: 8212 - DNA, 122 bp, Homo sapiens
  misc_feature (61)..(62): /note="This region represents a CpG dinucleotide"
  misc_feature (61)..(61): /note="Nucleotide may be methylated to form 5-methylcytosine"
tcattgcactgatgaaaatgtgtttcataaaaatatcatttacatcaaagataggccaatcgtacaaggatagtatgaggatctactcttaatcaataaatacaaatatgaacgaactttca

SEQ ID NO: 8213 - DNA, 122 bp, Homo sapiens
  misc_feature (61)..(62): /note="This region represents a CpG dinucleotide"
  misc_feature (61)..(61): /note="Nucleotide may be methylated to form 5-methylcytosine"
atccagagtttcagggcaaaacccaatcttacaaaagcagggaaaggtctgcctggcaaacgcagggttaagatgacagaacagacagacacccggcccttgtggcttcctctcggcctcag

SEQ ID NO: 8214 - DNA, 122 bp, Homo sapiens
  misc_feature (61)..(62): /note="This region represents a CpG dinucleotide"
  misc_feature (61)..(61): /note="Nucleotide may be methylated to form 5-methylcytosine"
gagctcatcagccccacgcagcccggggaccgcagccagcgccatgtggcggggcaggtgcgcgtccagctccccgagatgacacacgcctcacatctgggttttcttcccaaaaacccaca

SEQ ID NO: 8215 - DNA, 122 bp, Homo sapiens
  misc_feature (61)..(62): /note="This region represents a CpG dinucleotide"
  misc_feature (61)..(61): /note="Nucleotide may be methylated to form 5-methylcytosine"
cacccagtggtaagtgtattaaaatagatctgtatcatacagcacagtttctcccggagtcgtgagaatgacaggagggaccgtggcagctgcgggatttgccggcctcctcgctctgcacc

SEQ ID NO: 8216 - DNA, 122 bp, Homo sapiens
  misc_feature (61)..(62): /note="This region represents a CpG dinucleotide"
  misc_feature (61)..(61): /note="Nucleotide may be methylated to form 5-methylcytosine"
catcagaagagacattaacgttcacattcgagtgtcaagtctggatgtctcagcataaaccgtaaatcagtatacaactagaagtaaataaaatgggaaggctagtgtggattgggtatgat

SEQ ID NO: 8217 - DNA, 122 bp, Homo sapiens
  misc_feature (61)..(62): /note="This region represents a CpG dinucleotide"
  misc_feature (61)..(61): /note="Nucleotide may be methylated to form 5-methylcytosine"
gtggagcaggttccagcttctccctttataaaagttcgatcttggctgcatttgtgtttacgtatttagtaaatatttattggtttcttaatatggggaccataataattgatggagagaca

SEQ ID NO: 8218 - DNA, 122 bp, Homo sapiens
  misc_feature (61)..(62): /note="This region represents a CpG dinucleotide"
  misc_feature (61)..(61): /note="Nucleotide may be methylated to form 5-methylcytosine"
atatctgtcctacatctgacatttagacacaagctctcactgcagggagtctcatgagagcgtgcctaggatggcaggaaggatggcatttcttaagatgggtctgactacatgatgtatgt

SEQ ID NO: 8219 - DNA, 122 bp, Homo sapiens
  misc_feature (61)..(62): /note="This region represents a CpG dinucleotide"
  misc_feature (61)..(61): /note="Nucleotide may be methylated to form 5-methylcytosine"
gctcaggaggcaggtggtgcagacgcagaggtccctcatcaccctgctcaggtagaaaagcgtcttacacttgaagtcaaaatgaagggactcaaaaaggtctggagacaccaagaacacaa

SEQ ID NO: 8220 - DNA, 122 bp, Homo sapiens
  misc_feature (61)..(62): /note="This region represents a CpG dinucleotide"
  misc_feature (61)..(61): /note="Nucleotide may be methylated to form 5-methylcytosine"
caggaggggtggtgcaaacacaagatgacacacctcggatgcaccaaacctttaaagtatcgtttttctagctgattgcttcactcttaataccaaagaacaaataagcaggagatttacat

SEQ ID NO: 8221 - DNA, 122 bp, Homo sapiens
  misc_feature (61)..(62): /note="This region represents a CpG dinucleotide"
  misc_feature (61)..(61): /note="Nucleotide may be methylated to form 5-methylcytosine"
acaagtccttaggaaggcaccatggcagagccgcggaggagtgcaccgcggggatgctggcgccgcccttttcacctcgaggggtctctgttcctctgttcaccgctttctgtgacagcgca

SEQ ID NO: 8222 - DNA, 122 bp, Homo sapiens
  misc_feature (61)..(62): /note="This region represents a CpG dinucleotide"
  misc_feature (61)..(61): /note="Nucleotide may be methylated to form 5-methylcytosine"
acacgctcactattgtatctacaacttgtttctcctgcttttgtcttatctggtcttctacgggtttatcagaatatagcacataaatattaacaatggaagcagagttgaagatcattctg

SEQ ID NO: 8223 - DNA, 122 bp, Homo sapiens
  misc_feature (61)..(62): /note="This region represents a CpG dinucleotide"
  misc_feature (61)..(61): /note="Nucleotide may be methylated to form 5-methylcytosine"
tctcagcctctggagaagaggacagttcttactacacactgacaggtctgatttgaagaacgtgctacaagctctgaagaagaaataccaggtaggaacttggagagctcccaagcctacaa

SEQ ID NO: 8224 - DNA, 122 bp, Homo sapiens
  misc_feature (61)..(62): /note="This region represents a CpG dinucleotide"
  misc_feature (61)..(61): /note="Nucleotide may be methylated to form 5-methylcytosine"
tgtgcaggcagcctgagaaacagaagatggtgggcgagaggaggactgactaggaaagggcgaacatcttcctgcctggccactcctttcagaaacagatctgatgctgtcacttgtttact

SEQ ID NO: 8225 - DNA, 122 bp, Homo sapiens
  misc_feature (61)..(62): /note="This region represents a CpG dinucleotide"
  misc_feature (61)..(61): /note="Nucleotide may be methylated to form 5-methylcytosine"
tctaatgaatgactgaatgaatgcatctttgcctttgccttacccccgggcctgaaacatcgtcttggtccccttctcaataccttggatccttggagatcaaggtcctggttgttctggca

SEQ ID NO: 8226 - DNA, 122 bp, Homo sapiens
  misc_feature (61)..(62): /note="This region represents a CpG dinucleotide"
  misc_feature (61)..(61): /note="Nucleotide may be methylated to form 5-methylcytosine"
ctcctcggagggatgtaaataaccaacccagattagctggcctttccctaaagccttgggcgtcatcaaaagaatgaacaatggtagaatgcgaagcatcccgagggcccagggtgggaacc

SEQ ID NO: 8227 - DNA, 122 bp, Homo sapiens
  misc_feature (61)..(62): /note="This region represents a CpG dinucleotide"
  misc_feature (61)..(61): /note="Nucleotide may be methylated to form 5-methylcytosine"
gagccttgctgagggcactgaagctccggggagtttatagctggaggctcgggcccgccccgaggggagagggagggggagagaattcctttgctcaaacacaagcctgggagttcagagac

SEQ ID NO: 8228 - DNA, 122 bp, Homo sapiens
  misc_feature (61)..(62): /note="This region represents a CpG dinucleotide"
  misc_feature (61)..(61): /note="Nucleotide may be methylated to form 5-methylcytosine"
tacctacaaatgctgttcagctgacaaatgcccactatatttaccaataatttgagggtacggatggggaaaggtctgggctatcgtggaggtgtactctccaggcagaaatgtacaatggg

SEQ ID NO: 8229 - DNA, 122 bp, Homo sapiens
  misc_feature (61)..(62): /note="This region represents a CpG dinucleotide"
  misc_feature (61)..(61): /note="Nucleotide may be methylated to form 5-methylcytosine"
cagattgtgtctgactatcctccaagcacagcctgcaagctatactttcgagaataggttcgcctaacaattaaggcagacagggctatctggaaagctaattttggtgcagtatctgatta

SEQ ID NO: 8230 - DNA, 122 bp, Homo sapiens
  misc_feature (61)..(62): /note="This region represents a CpG dinucleotide"
  misc_feature (61)..(61): /note="Nucleotide may be methylated to form 5-methylcytosine"
gctacccaaagcaacgacttcaatcaccacaactgaaatgattgtcattcccctgaaacacgacaggaaccgcccaataaatgaagacattggacttttttatggatgtaatagtcacagct

SEQ ID NO: 8231 - DNA, 122 bp, Homo sapiens
  misc_feature (61)..(62): /note="This region represents a CpG dinucleotide"
  misc_feature (61)..(61): /note="Nucleotide may be methylated to form 5-methylcytosine"
ctgatccagaaggggtagaagagtctgcacaagcttctgtgcacctgggaatgtttcgtgcgttgagaggagaggtggggtctcagcaggaggaggtcctgcaggtggtgctgcaaggggtc

SEQ ID NO: 8232 - DNA, 122 bp, Homo sapiens
  misc_feature (61)..(62): /note="This region represents a CpG dinucleotide"
  misc_feature (61)..(61): /note="Nucleotide may be methylated to form 5-methylcytosine"
ctctgtccctccatggctcatggacaatgattgacctgaagccgctccaggaagtctactcgggagtcctcactgcctgctcccctatggccctaagggactcaagcctctcctcgagaagg

SEQ ID NO: 8233 - DNA, 122 bp, Homo sapiens
  misc_feature (61)..(62): /note="This region represents a CpG dinucleotide"
  misc_feature (61)..(61): /note="Nucleotide may be methylated to form 5-methylcytosine"
aagatgtgaggctgcctgctcttgcctaaagcatggcttgaactttcaattgatagtaaccgcttatgtaaaatattacattacataatctcctgtgtattgaaattgcacaagtcagagca

SEQ ID NO: 8234 - DNA, 122 bp, Homo sapiens
  misc_feature (61)..(62): /note="This region represents a CpG dinucleotide"
  misc_feature (61)..(61): /note="Nucleotide may be methylated to form 5-methylcytosine"
taagtttggaatgcctgctgatgccaaataccacttcctttttcactagtatgaattcagcgtgatctttgatacaagccacctgtctggggaagaggaagttctcagcttcattgttactg

SEQ ID NO: 8235 - DNA, 122 bp, Homo sapiens
  misc_feature (61)..(62): /note="This region represents a CpG dinucleotide"
  misc_feature (61)..(61): /note="Nucleotide may be methylated to form 5-methylcytosine"
aataaatgaataatttataaacctttttctttccttttttttttcatatcaccaggtgaccgatattccagagtggtatttacttcatctggaggggagacattatggaatttacctgcaat

SEQ ID NO: 8236 - DNA, 122 bp, Homo sapiens
  misc_feature (61)..(62): /note="This region represents a CpG dinucleotide"
  misc_feature (61)..(61): /note="Nucleotide may be methylated to form 5-methylcytosine"
ttaacttccttgacctcagctttcctctgtgctccaattcagccatccactgccgtagtccgcgtcagcgaaaagaactgcttcatcactgaaatcaaactcccactaggactacatcatcc

SEQ ID NO: 8237 - DNA, 122 bp, Homo sapiens
  misc_feature (61)..(62): /note="This region represents a CpG dinucleotide"
  misc_feature (61)..(61): /note="Nucleotide may be methylated to form 5-methylcytosine"
ccagacaggaaagtgactgattttgaggagttattaacatatcccagggcagtgcggagccgggacagtcgcggcgctgacgcccgcgggccccagctgcagatatgaagcggagccgctgc

SEQ ID NO: 8238 - DNA, 122 bp, Homo sapiens
  misc_feature (61)..(62): /note="This region represents a CpG dinucleotide"
  misc_feature (61)..(61): /note="Nucleotide may be methylated to form 5-methylcytosine"
accacttcaccacctgtctcacattaaaagatggaggtggggaggaagagtgggaatcagcgatgatggcaagatagatttctgaaaaacatgttattccaccctctgcaggattcaagtac

SEQ ID NO: 8239 - DNA, 122 bp, Homo sapiens
  misc_feature (61)..(62): /note="This region represents a CpG dinucleotide"
  misc_feature (61)..(61): /note="Nucleotide may be methylated to form 5-methylcytosine"
aacaagtgtgagcgctaacagactccttgccggaaaccaggtagccagagaagctagtgacgcacctgaggaggaaaccagggatcaggacacttcaaagacccagtgctggcaaggtgccc

SEQ ID NO: 8240 - DNA, 122 bp, Homo sapiens
  misc_feature (61)..(62): /note="This region represents a CpG dinucleotide"
  misc_feature (61)..(61): /note="Nucleotide may be methylated to form 5-methylcytosine"
agtttatccatgtattctctctctcctcctattgaagtgccctagccctcaagtcctcctcggacagagcttttggactcctaatttgcacacaagtctaacaagccacatcatcttgcttt

SEQ ID NO: 8241 - DNA, 122 bp, Homo sapiens
  misc_feature (61)..(62): /note="This region represents a CpG dinucleotide"
  misc_feature (61)..(61): /note="Nucleotide may be methylated to form 5-methylcytosine"
gcaactgcacaaagctgttggaagcagatgatgctgtctagactcctggatatgataaaacgtttcagcagcagcagccctcagttgtggcttaaccttcattttgcccttgaccaagagcc

SEQ ID NO: 8242 - DNA, 122 bp, Homo sapiens
  misc_feature (61)..(62): /note="This region represents a CpG dinucleotide"
  misc_feature (61)..(61): /note="Nucleotide may be methylated to form 5-methylcytosine"
tgccagtatgggggtagaccactcaatctatcacatggcctattgacatgtgattcaaagcgggttctgttgttgttgttgttgttgttgttgctgttttttggaggacgaggagaatggac

SEQ ID NO: 8243 - DNA, 122 bp, Homo sapiens
  misc_feature (61)..(62): /note="This region represents a CpG dinucleotide"
  misc_feature (61)..(61): /note="Nucleotide may be methylated to form 5-methylcytosine"
tgatttgccttggatgactcagctgcatattcaactattatttatctaacacccagacatcgcagggggaaaaaaaaatctaaaactcttagtcaatgaccattctccctctgcatttgttt

SEQ ID NO: 8244 - DNA, 122 bp, Homo sapiens
  misc_feature (61)..(62): /note="This region represents a CpG dinucleotide"
  misc_feature (61)..(61): /note="Nucleotide may be methylated to form 5-methylcytosine"
ttgcttgcatggtttcctttgccacccttgggcttgttgtgaactagactacttgctgagcgcacaggtggcttcctggggagccctcgttattctgggattccctgcagctttctcatgtg

SEQ ID NO: 8245 - DNA, 122 bp, Homo sapiens
  misc_feature (61)..(62): /note="This region represents a CpG dinucleotide"
  misc_feature (61)..(61): /note="Nucleotide may be methylated to form 5-methylcytosine"
agggcagctggggccctgaggcagctatttttagctcttgacacctgggtattttgcagccgcaggatgtccggtttggagtctctttctgggaatcccacatgcggctgttgtaaacagcc

SEQ ID NO: 8246 - DNA, 122 bp, Homo sapiens
  misc_feature (61)..(62): /note="This region represents a CpG dinucleotide"
  misc_feature (61)..(61): /note="Nucleotide may be methylated to form 5-methylcytosine"
acacgtgcatggggctccctggaggctgagggagtgtggttggtatgctgtgccaacacacgacagagcagttacaaccattcggaaatcatgctgtgtagagcagagcaaggaggaagcac

SEQ ID NO: 8247 - DNA, 122 bp, Homo sapiens
  misc_feature (61)..(62): /note="This region represents a CpG dinucleotide"
  misc_feature (61)..(61): /note="Nucleotide may be methylated to form 5-methylcytosine"
cagccacagctttgagataagatttcatttcctagccagcggcctgtgtcacacatatctcgctagaatctcttggggaggggccaaaagccactggacaagggacaggatggggtcagggc

SEQ ID NO: 8248 - DNA, 122 bp, Homo sapiens
  misc_feature (61)..(62): /note="This region represents a CpG dinucleotide"
  misc_feature (61)..(61): /note="Nucleotide may be methylated to form 5-methylcytosine"
taaacaatcttcctagcatttgtagctgctgtagtatacgtggtacgatagttcccccaccgtaatccacagttttgctttctgtggtttcagttacctgcaggacagtattataagatatt

SEQ ID NO: 8249 - DNA, 122 bp, Homo sapiens
  misc_feature (61)..(62): /note="This region represents a CpG dinucleotide"
  misc_feature (61)..(61): /note="Nucleotide may be methylated to form 5-methylcytosine"
gaggcccctttgcataaacacaaacactcagcaaatgaataactggctcaatcagacgcccgctgtgccttctacctgtcctcactctgacaggagacactgcctattccaggggacaccac

SEQ ID NO: 8250 - DNA, 122 bp, Homo sapiens
  misc_feature (61)..(62): /note="This region represents a CpG dinucleotide"
  misc_feature (61)..(61): /note="Nucleotide may be methylated to form 5-methylcytosine"
ctttaaatctctattgattggcagcttcctgaaatacagagtcagagagcgtgtccaccacgtcctgagtttggtaccaacccaggtgctgatggaaattccaagtagggagaaaacgtcct

SEQ ID NO: 8251 - DNA, 122 bp, Homo sapiens
  misc_feature (61)..(62): /note="This region represents a CpG dinucleotide"
  misc_feature (61)..(61): /note="Nucleotide may be methylated to form 5-methylcytosine"
gaagccatattgtcagccagcacgcaggcaagggtaccagttcccagacaagctgagctacgtatcagtgagagtaggcatagtttgcaatctgtcccagtaccttagccagatacaagatg

SEQ ID NO: 8252 - DNA, 122 bp, Homo sapiens
  misc_feature (61)..(62): /note="This region represents a CpG dinucleotide"
  misc_feature (61)..(61): /note="Nucleotide may be methylated to form 5-methylcytosine"
cagagtgagcctccaaaaacacagacctgatcatgtcactcccaggcctaagatccctaacggcaccccactgtgcatcaaatctggattcctcagcaaggccagcaaggcttaaagcagcc

SEQ ID NO: 8253 - DNA, 122 bp, Homo sapiens
  misc_feature (61)..(62): /note="This region represents a CpG dinucleotide"
  misc_feature (61)..(61): /note="Nucleotide may be methylated to form 5-methylcytosine"
gagtaggagttagccaagcgaagagagtggagacatgttctggacaaagggaacagaatacgtctggaagcctgagagagcttatgttagagaaacatactaaggtacagctggggtaaggc

SEQ ID NO: 8254 - DNA, 122 bp, Homo sapiens
  misc_feature (61)..(62): /note="This region represents a CpG dinucleotide"
  misc_feature (61)..(61): /note="Nucleotide may be methylated to form 5-methylcytosine"
atgagaaggtgtctcgttgtggttttgatttgcatttccctaaagattagtgactttgaacgtctttttatatgtatgttagccatttgtgtatcttcttgggagaagtatctattcaagtc

SEQ ID NO: 8255 - DNA, 122 bp, Homo sapiens
  misc_feature (61)..(62): /note="This region represents a CpG dinucleotide"
  misc_feature (61)..(61): /note="Nucleotide may be methylated to form 5-methylcytosine"
tccagccctggatccgccccgggcctcggcccagccccagttccggcccctcccccgccccgccccaccaggactacagtcggactccaatcctggctcctccccgggccccggccccgccc

SEQ ID NO: 8256 - DNA, 122 bp, Homo sapiens
  misc_feature (61)..(62): /note="This region represents a CpG dinucleotide"
  misc_feature (61)..(61): /note="Nucleotide may be methylated to form 5-methylcytosine"
cgatgtaggctaaaatagatacacatatgtacacccatattcacacaaaccaacccatcacgaatccaaagaatgacataggctaatgaaaagcctgaactgcattgtctgcagacaaaaga

SEQ ID NO: 8257 - DNA, 122 bp, Homo sapiens
  misc_feature (61)..(62): /note="This region represents a CpG dinucleotide"
  misc_feature (61)..(61): /note="Nucleotide may be methylated to form 5-methylcytosine"
actctggtctctgggcaaagctgatgcgtcaatggtgggggatgctgacagtgtggggggcggtgtggagggtagcaggtagacaggaattctctgtaccttactctcaaatttgctatgaa

SEQ ID NO: 8258 - DNA, 122 bp, Homo sapiens
  misc_feature (61)..(62): /note="This region represents a CpG dinucleotide"
  misc_feature (61)..(61): /note="Nucleotide may be methylated to form 5-methylcytosine"
ctgaccgtggcgcaagagctccagcatgcattgtgcaagagcagaggggaggggcagagccgatggggcaagcagcacatcaggactcagcttcggcagagaaggaagtcagtcgggctgtc

SEQ ID NO: 8259 - DNA, 122 bp, Homo sapiens
  misc_feature (61)..(62): /note="This region represents a CpG dinucleotide"
  misc_feature (61)..(61): /note="Nucleotide may be methylated to form 5-methylcytosine"
tctagtacagtgagaactcccagatgtgccccttctggtgagaggcaagcttcctgacaacgccatgctgagtgtttgattggccggccagacctgttcataaagcatttcacaaaccgtcc

SEQ ID NO: 8260 - DNA, 122 bp, Homo sapiens
  misc_feature (61)..(62): /note="This region represents a CpG dinucleotide"
  misc_feature (61)..(61): /note="Nucleotide may be methylated to form 5-methylcytosine"
ctgcgaacccggccaagtcccgagcggaagcgccttgagcggaagcggaagtgaacgaggcggctgtggcggtggctgaggcggctgggcctagggtgcagcgggcgcgtctgcggctggtg

SEQ ID NO: 8261 - DNA, 122 bp, Homo sapiens
  misc_feature (61)..(62): /note="This region represents a CpG dinucleotide"
  misc_feature (61)..(61): /note="Nucleotide may be methylated to form 5-methylcytosine"
ggtttgagctatgtttggtggctttctgttactgtctatcaaactgccttaatttagacacgatcattcttacaaacgtttgtgttggggctgcttatattttaacaaggcattcctctatg

SEQ ID NO: 8262 - DNA, 122 bp, Homo sapiens
  misc_feature (61)..(62): /note="This region represents a CpG dinucleotide"
  misc_feature (61)..(61): /note="Nucleotide may be methylated to form 5-methylcytosine"
gaagctcacccaatcattgtgttcagagtttgtagtggggcttcatcacacaggcataatcggttgattaaccacatggttaatctctatctccaagttgatggataccacgtgacccaaag

SEQ ID NO: 8263 - DNA, 122 bp, Homo sapiens
  misc_feature (61)..(62): /note="This region represents a CpG dinucleotide"
  misc_feature (61)..(61): /note="Nucleotide may be methylated to form 5-methylcytosine"
tcacactccacatctactttgtctcagtgacttaaataattgaacaggcttggagcttaacggatcttctgttcttagccacaccttttcctctcatgagcctctggccataacaacatgct

SEQ ID NO: 8264 - DNA, 122 bp, Homo sapiens
  misc_feature (61)..(62): /note="This region represents a CpG dinucleotide"
  misc_feature (61)..(61): /note="Nucleotide may be methylated to form 5-methylcytosine"
gagtggaccaggtgattttcaaaagatgcttttacactcagagcagccaggctcccaaggcgaatgaaggatccacgaaggattcaaaatgtggggctggatggagagagaggatactgggc

SEQ ID NO: 8265 - DNA, 122 bp, Homo sapiens
  misc_feature (61)..(62): /note="This region represents a CpG dinucleotide"
  misc_feature (61)..(61): /note="Nucleotide may be methylated to form 5-methylcytosine"
ctctttgaagagctcttttgtctttcaatgactctttcctgtttgagccacatcacccttcgttgtatgaaggcttaagtggcttccgtggtgagaatcttactctgtgtcataccctaatt

SEQ ID NO: 8266 - DNA, 122 bp, Homo sapiens
  misc_feature (61)..(62): /note="This region represents a CpG dinucleotide"
  misc_feature (61)..(61): /note="Nucleotide may be methylated to form 5-methylcytosine"
ttagttcacacacctctgcaactgagaaaccacacccaacccaccttatctacacccccacgtgatttaatgaatgcaattctggtatctgagtcggagcctgatgctataatgagctgaga

SEQ ID NO: 8267 - DNA, 122 bp, Homo sapiens
  misc_feature (61)..(62): /note="This region represents a CpG dinucleotide"
  misc_feature (61)..(61): /note="Nucleotide may be methylated to form 5-methylcytosine"
aatgcccacatccagttctctgtccctgaggcacggaggtggttgtgctgggctcagagccgccgtctgactggttggaagccctgctctgattttgtgaatcaccctagttaagtggaagc

SEQ ID NO: 8268 - DNA, 122 bp, Homo sapiens
  misc_feature (61)..(62): /note="This region represents a CpG dinucleotide"
  misc_feature (61)..(61): /note="Nucleotide may be methylated to form 5-methylcytosine"
gctgagtctagaaagttgtggagtctcctgttaaaatgcaaccatgcctggattataggacgatgtgatgatgtaacactaagtggaagtaggttccctgtgaaggaggagaggagcagtgc

SEQ ID NO: 8269 - DNA, 122 bp, Homo sapiens
  misc_feature (61)..(62): /note="This region represents a CpG dinucleotide"
  misc_feature (61)..(61): /note="Nucleotide may be methylated to form 5-methylcytosine"
ttaaaagtccttttgggttcttccccctgtaaaactatcttgacacctagccatgtatcacggcacatgaagcagctacaacactgcagttggaaaaacattatgctgtgaaggaagaaact

SEQ ID NO: 8270 - DNA, 122 bp, Homo sapiens
  misc_feature (61)..(62): /note="This region represents a CpG dinucleotide"
  misc_feature (61)..(61): /note="Nucleotide may be methylated to form 5-methylcytosine"
gaaactggcacattacacacacgaaatacaaatgtccttcttgctcctagcagtagtacacgcccacagagtttgcaaaagtttccaagtttccctgtagtgaaaaaggaagtggtcaatat

SEQ ID NO: 8271 - DNA, 122 bp, Homo sapiens
  misc_feature (61)..(62): /note="This region represents a CpG dinucleotide"
  misc_feature (61)..(61): /note="Nucleotide may be methylated to form 5-methylcytosine"
ggagagtcgcctccagggaaagcaaagtcatagtagatttgaccatgtggaaaatcttatcgagagactttttacagagctgttggtgggtatgaaaaagcttaggtactggtttaaagaaa

SEQ ID NO: 8272 - DNA, 122 bp, Homo sapiens
  misc_feature (61)..(62): /note="This region represents a CpG dinucleotide"
  misc_feature (61)..(61): /note="Nucleotide may be methylated to form 5-methylcytosine"
aacaatgagtgagcagaaatgaagacagacaggccagcaaaaggaagaggaagaaattcacgggcaaagtgcactctgagagaagaatttaatctacagaatgatctgtacccccacggctc

SEQ ID NO: 8273 - DNA, 122 bp, Homo sapiens
  misc_feature (61)..(62): /note="This region represents a CpG dinucleotide"
  misc_feature (61)..(61): /note="Nucleotide may be methylated to form 5-methylcytosine"
ttgtactgtctccttctccttttgctgcaagacttggatctgctcttgaatctgcccctgcggaaagagggccgtttggacaggctgtgcctggagatttctggcctcataaaatcctcctg

SEQ ID NO: 8274 - DNA, 122 bp, Homo sapiens
  misc_feature (61)..(62): /note="This region represents a CpG dinucleotide"
  misc_feature (61)..(61): /note="Nucleotide may be methylated to form 5-methylcytosine"
aagcgtccagaccagcttgcgatgctgatgaataagctgattttgatggggtgtgtgaaacggagatgccagcccaggggctcagcttgctcgtgctctcatttaaaagcagaaaatagcga

SEQ ID NO: 8275 - DNA, 122 bp, Homo sapiens
  misc_feature (61)..(62): /note="This region represents a CpG dinucleotide"
  misc_feature (61)..(61): /note="Nucleotide may be methylated to form 5-methylcytosine"
ctaagaaaacaggagaacatgcctcaggtagccactggaccttcatcttacaccccagaacgagacacataaacagactgaattgactagcagactactggagttgccctggtgacctgtat

SEQ ID NO: 8276 - DNA, 122 bp, Homo sapiens
  misc_feature (61)..(62): /note="This region represents a CpG dinucleotide"
  misc_feature (61)..(61): /note="Nucleotide may be methylated to form 5-methylcytosine"
aggactcctctctgtccttgcagtcagctggacagggcacctggacaggtcagaggctgccgccatccccagggaacaagttaaacaggaacaggatgagttaaccagtaactgccggccac

SEQ ID NO: 8277 - DNA, 122 bp, Homo sapiens
  misc_feature (61)..(62): /note="This region represents a CpG dinucleotide"
  misc_feature (61)..(61): /note="Nucleotide may be methylated to form 5-methylcytosine"
gatgggatgttttcaacttgatctcttatctttccaataaactacaccaagcatcttctacgttttacctcctccccacgaagcttccttgaccgaccagaagaaagcagatggcttcttta

SEQ ID NO: 8278 - DNA, 122 bp, Homo sapiens
  misc_feature (61)..(62): /note="This region represents a CpG dinucleotide"
  misc_feature (61)..(61): /note="Nucleotide may be methylated to form 5-methylcytosine"
tctgcctttcttctcagcctctgcctctattgcatttattaaactgcattgtgtgcacctcgcctctggctttactctttgcagatcaccacagggggaaactcagctctgtgagctcacta

SEQ ID NO: 8279 - DNA, 122 bp, Homo sapiens
  misc_feature (61)..(62): /note="This region represents a CpG dinucleotide"
  misc_feature (61)..(61): /note="Nucleotide may be methylated to form 5-methylcytosine"
ggctgccacataatgaacatatgcccagtaagaccttaaggacctggagggcaggacccacgtctgttgtgttcactgttaaatctccagtgcctggaggataaatggtcctcagcacgcct

SEQ ID NO: 8280 - DNA, 122 bp, Homo sapiens
  misc_feature (61)..(62): /note="This region represents a CpG dinucleotide"
  misc_feature (61)..(61): /note="Nucleotide may be methylated to form 5-methylcytosine"
atgtgtctgacaccaactgtgtccctctataaagaaacccattcttgaattacagtggagcgtgatttctaatacagtcttccttccaaaaactgtgtgcagctttaattacctggtcacca

SEQ ID NO: 8281 - DNA, 122 bp, Homo sapiens
  misc_feature (61)..(62): /note="This region represents a CpG dinucleotide"
  misc_feature (61)..(61): /note="Nucleotide may be methylated to form 5-methylcytosine"
caggcctgggattggccaggcttgggcaaatggttaaacttctctgagcctcactttcctcgtctgtaaaatgggatggtcaccacattaaagggtgctagtgaggatcacaggccaagagc

SEQ ID NO: 8282 - DNA, 122 bp, Homo sapiens
  misc_feature (61)..(62): /note="This region represents a CpG dinucleotide"
  misc_feature (61)..(61): /note="Nucleotide may be methylated to form 5-methylcytosine"
aggaactgtaggtcagtccctgatacttcaagctgctttgttacttctgttgcttgagaccgtgaatgctgcttcagcagttatttgtctctaatagcaattatgggctttatttttgtaac

SEQ ID NO: 8283 - DNA, 122 bp, Homo sapiens
  misc_feature (61)..(62): /note="This region represents a CpG dinucleotide"
  misc_feature (61)..(61): /note="Nucleotide may be methylated to form 5-methylcytosine"
ccatgaaggaagtttgcttttgtgtctgacttcctcattccaaccccagagaaggaacttcgaaagacagatgaagatgaagcccacatgtcagtcctctgcatattctcaattcttctatc

SEQ ID NO: 8284 - DNA, 122 bp, Homo sapiens
  misc_feature (61)..(62): /note="This region represents a CpG dinucleotide"
  misc_feature (61)..(61): /note="Nucleotide may be methylated to form 5-methylcytosine"
taaagcccttcccagggtgcctggcacagagcaagctctgcaggtggtatgactgaacagcgcccaggggatggacactgccctcatgccctctgctgctgccacctaggctccttctgttc

SEQ ID NO: 8285 - DNA, 122 bp, Homo sapiens
  misc_feature (61)..(62): /note="This region represents a CpG dinucleotide"
  misc_feature (61)..(61): /note="Nucleotide may be methylated to form 5-methylcytosine"
gagtattttgaaccatcctttacattgtaagctggaattgcccaatcatgtgtgtgtactcgtagttatcaaatgtgtttgtcttagcaagttctattctctaatatcagatattctcaaga

SEQ ID NO: 8286 - DNA, 122 bp, Homo sapiens
  misc_feature (61)..(62): /note="This region represents a CpG dinucleotide"
  misc_feature (61)..(61): /note="Nucleotide may be methylated to form 5-methylcytosine"
aagtgttttaaaccatgcattgtaaaactacatcctgccttagaaagaattattatttgccggcacatagatgggaacagattccaatagtattaataataagccaggagttagagtttgtt

SEQ ID NO: 8287 - DNA, 122 bp, Homo sapiens
  misc_feature (61)..(62): /note="This region represents a CpG dinucleotide"
  misc_feature (61)..(61): /note="Nucleotide may be methylated to form 5-methylcytosine"
agatggcagccagcttggccacttggacgtgcaggttatgcaatgtgagcatcctaataccgtcttcccctcccacagccgccacccggctgcctcaccctggagctgggattgtccagggc

SEQ ID NO: 8288 - DNA, 122 bp, Homo sapiens
  misc_feature (61)..(62): /note="This region represents a CpG dinucleotide"
  misc_feature (61)..(61): /note="Nucleotide may be methylated to form 5-methylcytosine"
atgtacacttaaggtttctccatgtcattttgttacttgctagctcatttatttttatcacggaataatattccattatatgaaaataccagtttctttagttacctactgaaggacatctt

SEQ ID NO: 8289 - DNA, 122 bp, Homo sapiens
  misc_feature (61)..(62): /note="This region represents a CpG dinucleotide"
  misc_feature (61)..(61): /note="Nucleotide may be methylated to form 5-methylcytosine"
tgggcatgtttgtctgtgtgctgtaacctgaagtcaaaccttaagataatggataatcttcggccaatttatgcagagtcagccattcctgttctctttgccttgatgttgtgttgttatca

SEQ ID NO: 8290 - DNA, 122 bp, Homo sapiens
  misc_feature (61)..(62): /note="This region represents a CpG dinucleotide"
  misc_feature (61)..(61): /note="Nucleotide may be methylated to form 5-methylcytosine"
gtagaaaggctcataggtaataagatctggacgttcaatgtcataaattgccttgaccttcggaatggctgctaaatccttgtaatccaggatctcattgtctacttttgcctggcaaagtt

SEQ ID NO: 8291 - DNA, 122 bp, Homo sapiens
  misc_feature (61)..(62): /note="This region represents a CpG dinucleotide"
  misc_feature (61)..(61): /note="Nucleotide may be methylated to form 5-methylcytosine"
ctcctcaagttcctcccagaaagttatacacatcactctcacgcacattcaattggccaccgcttctagcctccagagggcaggaaactgccaccctaccatgtgccaggaagtagaagtca

SEQ ID NO: 8292 - DNA, 122 bp, Homo sapiens
  misc_feature (61)..(62): /note="This region represents a CpG dinucleotide"
  misc_feature (61)..(61): /note="Nucleotide may be methylated to form 5-methylcytosine"
cattggtcagtgccatgaatcttgaagttaaatgtttcaccctaatgcactgctagtgggcgtgcacacttgtggagccactctggagagtacgcatgcatgacttcattgaattaagtctg

SEQ ID NO: 8293 - DNA, 122 bp, Homo sapiens
  misc_feature (61)..(62): /note="This region represents a CpG dinucleotide"
  misc_feature (61)..(61): /note="Nucleotide may be methylated to form 5-methylcytosine"
tgttgatccacgcttagcttgactggctcattcagagtgcattctttgtgtgcacacaggcgtgtccttttgttctcccctctcacctgcctccctgctctgctcacctgtccttgtttgta

SEQ ID NO: 8294 - DNA, 122 bp, Homo sapiens
  misc_feature (61)..(62): /note="This region represents a CpG dinucleotide"
  misc_feature (61)..(61): /note="Nucleotide may be methylated to form 5-methylcytosine"
actggttgcatgatcttggctcgttaccaagataaagtgacacaaggtgtgtaaagctcccgagctgcaagccaggatcttcatacacatacattttagaggataatagtcctttcaaaaga

SEQ ID NO: 8295 - DNA, 122 bp, Homo sapiens
  misc_feature (61)..(62): /note="This region represents a CpG dinucleotide"
  misc_feature (61)..(61): /note="Nucleotide may be methylated to form 5-methylcytosine"
atgaagtatgacagctttcatcagtgttatgacaacatggctgggagaaaagatgatctacgactatgagtttgaattgagggttacagagcctagcttgtagcaccacatagtttttagtt

SEQ ID NO: 8296 - DNA, 122 bp, Homo sapiens
  misc_feature (61)..(62): /note="This region represents a CpG dinucleotide"
  misc_feature (61)..(61): /note="Nucleotide may be methylated to form 5-methylcytosine"
aagtagggagcctacatttcaccatctgtaggctctaaggatgtaagtcagtcccctgggcgaggtggtgtcagaggagactaagtagggaccaggactttcatcccctccaaacactggcc

SEQ ID NO: 8297 - DNA, 122 bp, Homo sapiens
  misc_feature (61)..(62): /note="This region represents a CpG dinucleotide"
  misc_feature (61)..(61): /note="Nucleotide may be methylated to form 5-methylcytosine"
tatttggctaacaatccatcattgcattcatctggcagtgtttcaaaacatatcccaagccgcagaagactactgagccagaggagcattgagtcataattagctcaagattaaagttcacc

SEQ ID NO: 8298 - DNA, 122 bp, Homo sapiens
  misc_feature (61)..(62): /note="This region represents a CpG dinucleotide"
  misc_feature (61)..(61): /note="Nucleotide may be methylated to form 5-methylcytosine"
agaagacagtaacaatggtggtaaggacagagcacactcctaactcgtctgtcattatcacgtgggtggctcctacgaatatgaatacaaattatagaactcaggatgaagtgtcagatgcc

SEQ ID NO: 8299 - DNA, 122 bp, Homo sapiens
  misc_feature (61)..(62): /note="This region represents a CpG dinucleotide"
  misc_feature (61)..(61): /note="Nucleotide may be methylated to form 5-methylcytosine"
ctgcctgagaggaaacattttccagtgtcctccttcctttttctttgaaaatgagctcaacggccgtgttcccaggcactataacaaatgagttgcttcaggcacagagaggcattaataaa

SEQ ID NO: 8300 - DNA, 122 bp, Homo sapiens
  misc_feature (61)..(62): /note="This region represents a CpG dinucleotide"
  misc_feature (61)..(61): /note="Nucleotide may be methylated to form 5-methylcytosine"
ctagaaatttgctcttcaatactaacacatgccaaaaacttatgtatcactagcctggaacgaatgtatctgctctgatccctgaggctctgccttttacctgcatctcttaacctcattac

SEQ ID NO: 8301 - DNA, 122 bp, Homo sapiens
  misc_feature (61)..(62): /note="This region represents a CpG dinucleotide"
  misc_feature (61)..(61): /note="Nucleotide may be methylated to form 5-methylcytosine"
ttgcctgaggtcacacagctaataagccatgaattaagccaaatctttctgagcctaagtcgtgtcttcaagttaatagtaccagactgtctgtactttcaattctttccactccaaaaagg

SEQ ID NO: 8302 - DNA, 122 bp, Homo sapiens
  misc_feature (61)..(62): /note="This region represents a CpG dinucleotide"
  misc_feature (61)..(61): /note="Nucleotide may be methylated to form 5-methylcytosine"
gaatgttatttagaaagccagggatagagatcctggtctgggtgtatgtgtgagtcaggacgtccccatgcctctggatccggttgatgtgccttactgcccagcatccattcactcttctc

SEQ ID NO: 8303 - DNA, 122 bp, Homo sapiens
  misc_feature (61)..(62): /note="This region represents a CpG dinucleotide"
  misc_feature (61)..(61): /note="Nucleotide may be methylated to form 5-methylcytosine"
aaaggtgctgtcccattgtcttctgggttccattgtttctgggacaaatctgctgtcattcgtgttgttgtatgtcatttgttcacccctctggttgcttttaagatgttctctttatcttt

SEQ ID NO: 8304 - DNA, 122 bp, Homo sapiens
  misc_feature (61)..(62): /note="This region represents a CpG dinucleotide"
  misc_feature (61)..(61): /note="Nucleotide may be methylated to form 5-methylcytosine"
gtgtcccccacccgtctagtttcattttcctgtacttgtttacaggaagtagcctctaatcggctcttaaatccaaacctactcattacaaggaagagtaaacatctgtctgtttcaaacag

SEQ ID NO: 8305 - DNA, 122 bp, Homo sapiens
  misc_feature (61)..(62): /note="This region represents a CpG dinucleotide"
  misc_feature (61)..(61): /note="Nucleotide may be methylated to form 5-methylcytosine"
tgttctggatattacttccctgtcagatgaatagtttacaaatatatctgccattcaactcgttgtctcttcactctgttgattatttcttttgctgtgcaaaagcttgttagtttaaatcc

SEQ ID NO: 8306 - DNA, 122 bp, Homo sapiens
  misc_feature (61)..(62): /note="This region represents a CpG dinucleotide"
  misc_feature (61)..(61): /note="Nucleotide may be methylated to form 5-methylcytosine"
aaaggaaaaggttcactttcctgagcccgcaaaatcagatggcccaggacacagaagctccgccctccactgccctgggtcgagatcttcctctgtgtacagtgaattcaccattttaccac

SEQ ID NO: 8307 - DNA, 122 bp, Homo sapiens
  misc_feature (61)..(62): /note="This region represents a CpG dinucleotide"
  misc_feature (61)..(61): /note="Nucleotide may be methylated to form 5-methylcytosine"
tactttaacatgcctcatggtagtgactcagaaccttttcatgaggacttgctggatgttcgcaatgaaacctgtgccaaggaaagaatagcaaatcatcatacagaggagaagggtagtca

SEQ ID NO: 8308 - DNA, 122 bp, Homo sapiens
  misc_feature (61)..(62): /note="This region represents a CpG dinucleotide"
  misc_feature (61)..(61): /note="Nucleotide may be methylated to form 5-methylcytosine"
ggattaaataaaacagcgtatttaaaattcctgaagttacttagttcctagcacaccccacgtccttatcctgtgtgtatcttttatatttaattatttgggttctgctacctgtgtttttt

SEQ ID NO: 8309 - DNA, 122 bp, Homo sapiens
  misc_feature (61)..(62): /note="This region represents a CpG dinucleotide"
  misc_feature (61)..(61): /note="Nucleotide may be methylated to form 5-methylcytosine"
gacatttagatgattgtttctcggaataacttggttgactaacatctttctgcttcctgtcgtcatgatcacttctgcaaaggacgaagcctagtacattttctggtagaatcttatatacc

SEQ ID NO: 8310 - DNA, 122 bp, Homo sapiens
  misc_feature (61)..(62): /note="This region represents a CpG dinucleotide"
  misc_feature (61)..(61): /note="Nucleotide may be methylated to form 5-methylcytosine"
tgcgtagggcaggggtgagctctttgtcctctgatctgtgcacaccaggcctggcggggccgcttgtgtcgtgttctgatgtggatgggttgctgcagaggccttttacttcagctggagat

SEQ ID NO: 8311 - DNA, 122 bp, Homo sapiens
  misc_feature (61)..(62): /note="This region represents a CpG dinucleotide"
  misc_feature (61)..(61): /note="Nucleotide may be methylated to form 5-methylcytosine"
tttcctttctatatggtacatctcagggcctgtggtgaagccattctgccccctggggggcgctggggaaatttatgggagactgattattacagggattggacagttgggagccaagatta

SEQ ID NO: 8312 - DNA, 122 bp, Homo sapiens
  misc_feature (61)..(62): /note="This region represents a CpG dinucleotide"
  misc_feature (61)..(61): /note="Nucleotide may be methylated to form 5-methylcytosine"
ctctttgaaagttgacagggtagaaatcatttttgtagacaagaaaattgaagcacaaggcgataacgcaacttgcccagcagcacatggttattaataggtggagcgggaattagaagcca

SEQ ID NO: 8313 - DNA, 122 bp, Homo sapiens
  misc_feature (61)..(62): /note="This region represents a CpG dinucleotide"
  misc_feature (61)..(61): /note="Nucleotide may be methylated to form 5-methylcytosine"
ccctttctcttccaggcatctgtcccttgcatcccaacgggagcgcggtcccctgggaggcgtccctcagcagccccgggaagttctgtccctgctcccgagtgtgcccagagtcctgccgt

SEQ ID NO: 8314 - DNA, 122 bp, Homo sapiens
  misc_feature (61)..(62): /note="This region represents a CpG dinucleotide"
  misc_feature (61)..(61): /note="Nucleotide may be methylated to form 5-methylcytosine"
tctgtgaccaccaggtctgccctttagtatttactgaagagaaagaaaaacatgtatccacgcaaagatttgtctatgaatattcatagctagtttgcttataattcaggttggaaacaacc

SEQ ID NO: 8315 - DNA, 122 bp, Homo sapiens
  misc_feature (61)..(62): /note="This region represents a CpG dinucleotide"
  misc_feature (61)..(61): /note="Nucleotide may be methylated to form 5-methylcytosine"
aagaacatagcaaatactatctagatccagaaacactggaaaaaactgcccataccaagacggagattaagagggattaggatagagataaatctgtgtttaaacttctgatcagaagagat

SEQ ID NO: 8316 - DNA, 122 bp, Homo sapiens
  misc_feature (61)..(62): /note="This region represents a CpG dinucleotide"
  misc_feature (61)..(61): /note="Nucleotide may be methylated to form 5-methylcytosine"
gtggagtcaggtggaagagcctgatacttccaagtaaaggatctaccttaaggcttctttcggatatcctttatcttctcattttttaaggtctaccaaaaataatctgaacctaaaaagac

SEQ ID NO: 8317 - DNA, 122 bp, Homo sapiens
  misc_feature (61)..(62): /note="This region represents a CpG dinucleotide"
  misc_feature (61)..(61): /note="Nucleotide may be methylated to form 5-methylcytosine"
cacacacacacacacacacacacacacacatacacacactctctctctcttttgctagaacgggctggaactgttcttgcaaagactgggctgagatgcatgagtaaatctgacgtgtccac

SEQ ID NO: 8318 - DNA, 122 bp, Homo sapiens
  misc_feature (61)..(62): /note="This region represents a CpG dinucleotide"
  misc_feature (61)..(61): /note="Nucleotide may be methylated to form 5-methylcytosine"
attatgtggcaataccgaatggagcatctccagaggacatttctcaatagcaccattgttcgtggtaagtgaatacttcactttttctcctgcttctgtcaagtaattgatcacgaattagc

SEQ ID NO: 8319 - DNA, 122 bp, Homo sapiens
  misc_feature (61)..(62): /note="This region represents a CpG dinucleotide"
  misc_feature (61)..(61): /note="Nucleotide may be methylated to form 5-methylcytosine"
cacgcatcacacgcacatacaccagcgcggttatccataactctaccatttcaagtgagccgcaagagactgtaaatcgcagtgaagtgggccgtcaggcaatgattactaaataagcatgg

SEQ ID NO: 8320 - DNA, 122 bp, Homo sapiens
  misc_feature (61)..(62): /note="This region represents a CpG dinucleotide"
  misc_feature (61)..(61): /note="Nucleotide may be methylated to form 5-methylcytosine"
tgccccagcccccacctcagccccaaccccaaccccagccgcatcccctgccccagctgacgggtcaaagcctcaggagagtgtggctctccccaggcgctaccaggaggggcaggtctcag

SEQ ID NO: 8321 - DNA, 122 bp, Homo sapiens
  misc_feature (61)..(62): /note="This region represents a CpG dinucleotide"
  misc_feature (61)..(61): /note="Nucleotide may be methylated to form 5-methylcytosine"
gatccatctgcatagaactccctgcctgctctctttagttaactacattttcccaaattacgtaatgccttttactatgctatgagaaataagaaaaagtatgagttatatactgttgtgta

SEQ ID NO: 8322 - DNA, 122 bp, Homo sapiens
  misc_feature (61)..(62): /note="This region represents a CpG dinucleotide"
  misc_feature (61)..(61): /note="Nucleotide may be methylated to form 5-methylcytosine"
taggtacttgcagggtaggaaaaagttactctgagtgaatcttctaattcactgactcttcgccatagcttttgcagagtatgcccaagagatgagtcagaaccagaagacgtctggctttc

SEQ ID NO: 8323 - DNA, 122 bp, Homo sapiens
  misc_feature (61)..(62): /note="This region represents a CpG dinucleotide"
  misc_feature (61)..(61): /note="Nucleotide may be methylated to form 5-methylcytosine"
tgtgggtctgggtgggtggatctgcagctcttggctggactcttctcatgtgtcttgggccgctggtttaggaggccttcactgagagcacaggggtggctcagctcagttccaggtgtttc

SEQ ID NO: 8324 - DNA, 122 bp, Homo sapiens
  misc_feature (61)..(62): /note="This region represents a CpG dinucleotide"
  misc_feature (61)..(61): /note="Nucleotide may be methylated to form 5-methylcytosine"
acagagtttgctttacaaaaatgaggtcatggaaagccttccaagtcaaatagtagagctcgagtttgttctatttagtggctgcaaaataatattccactgtgcatatgtaccacaattta

SEQ ID NO: 8325 - DNA, 122 bp, Homo sapiens
  misc_feature (61)..(62): /note="This region represents a CpG dinucleotide"
  misc_feature (61)..(61): /note="Nucleotide may be methylated to form 5-methylcytosine"
ctttccctctctggagtcctgtgactcaccgtgtccttacgagacccccgatgcgtcgtgcgcctctagcagtggggaggattctggcaggcattctgggcttcccccgtgagccagtggcc

SEQ ID NO: 8326 - DNA, 122 bp, Homo sapiens
  misc_feature (61)..(62): /note="This region represents a CpG dinucleotide"
  misc_feature (61)..(61): /note="Nucleotide may be methylated to form 5-methylcytosine"
tctttaaagcaaacatgagtgtgtgaaagttagttaaagcacacctacagtaagaaattacgtgattcttacagtgagttattgctctttttaaaagtgattcattgactatggcttgggta

SEQ ID NO: 8327 - DNA, 122 bp, Homo sapiens
  misc_feature (61)..(62): /note="This region represents a CpG dinucleotide"
  misc_feature (61)..(61): /note="Nucleotide may be methylated to form 5-methylcytosine"
aagattctgtggctctgagccatttttgggctgctgaaggaagtatctgggccttatgctcgctgcattgcccctctttccaagtgaatcacttcattaaaatgaaaggtttactaaaacag

SEQ ID NO: 8328 - DNA, 122 bp, Homo sapiens
  misc_feature (61)..(62): /note="This region represents a CpG dinucleotide"
  misc_feature (61)..(61): /note="Nucleotide may be methylated to form 5-methylcytosine"
actgttctggaaacagacttctcccttctcacgcagcttatgccactggcaaaagaggggcgggaaatgtgatccaggattaataatgcacagatgtttctcaggaagtagtatatcactgt

SEQ ID NO: 8329 - DNA, 122 bp, Homo sapiens
  misc_feature (61)..(62): /note="This region represents a CpG dinucleotide"
  misc_feature (61)..(61): /note="Nucleotide may be methylated to form 5-methylcytosine"
ggaactggccgcgagaggcgcccggattctttccaaagggaacaaacagtatttgcagctcgaacggaagagtgggaatttgctcctaaaagaaaaattggaccgggaagagttgtgcggtg

SEQ ID NO: 8330 - DNA, 122 bp, Homo sapiens
  misc_feature (61)..(62): /note="This region represents a CpG dinucleotide"
  misc_feature (61)..(61): /note="Nucleotide may be methylated to form 5-methylcytosine"
tcatggagctcctcctaagcacccgacagagagaaattgtgtcttcaacggactcaaaagcggaggggagagaaacacagagacatgtctctttgtgatccccagcaagacaagcagaatat

SEQ ID NO: 8331 - DNA, 122 bp, Homo sapiens
  misc_feature (61)..(62): /note="This region represents a CpG dinucleotide"
  misc_feature (61)..(61): /note="Nucleotide may be methylated to form 5-methylcytosine"
ctagggatttcatcagaaacgggtgtggttctctctgctgggatgagcccatctttgttgcgctgtatcatccaagaacaactatggagtctgggaagggtgattggtcattccagtccagc

SEQ ID NO: 8332 - DNA, 122 bp, Homo sapiens
  misc_feature (61)..(62): /note="This region represents a CpG dinucleotide"
  misc_feature (61)..(61): /note="Nucleotide may be methylated to form 5-methylcytosine"
aaaatccatgacaaacaaagtataaaacatggattaaagatgggctgctgtttgtgttttcggacctgcatgattgtgcaatggcaacagttgtttccagtcagcccggggctcctcagtct

SEQ ID NO: 8333 - DNA, 122 bp, Homo sapiens
  misc_feature (61)..(62): /note="This region represents a CpG dinucleotide"
  misc_feature (61)..(61): /note="Nucleotide may be methylated to form 5-methylcytosine"
tcacgatcattgacctcctctctgaactgataacatgagttagcatgttatctgctctttcgtagttccagaggtgtgatgattatgttccaaatatgtgaaaatctagttgaatgcacaat

SEQ ID NO: 8334 - DNA, 122 bp, Homo sapiens
  misc_feature (61)..(62): /note="This region represents a CpG dinucleotide"
  misc_feature (61)..(61): /note="Nucleotide may be methylated to form 5-methylcytosine"
tattaggtcaaatgctttgtaaagttccttccagttctgaagctctatggttgtaagcctcgccttggcttgactgcacggctttaaagtacgaatctgttcacaggttgtccatgattaaa

SEQ ID NO: 8335 - DNA, 122 bp, Homo sapiens
  misc_feature (61)..(62): /note="This region represents a CpG dinucleotide"
  misc_feature (61)..(61): /note="Nucleotide may be methylated to form 5-methylcytosine"
tcatgcatacccacctcctcatgtcatccacatgatgtggcaaggtccctcagggattcacgtctcagagcaaacctcacaggaaagaggttacatcttcaagcccctgacagtcattcgct

SEQ ID NO: 8336 - DNA, 122 bp, Homo sapiens
  misc_feature (61)..(62): /note="This region represents a CpG dinucleotide"
  misc_feature (61)..(61): /note="Nucleotide may be methylated to form 5-methylcytosine"
aggagggaaactgccaagaaaattaaaattacctcgtatgtcaaattgtaagtactgtggcgatttaaggcaggtacacatgttagttaaattgctaaacctcagtggtggcagcatgtaaa

SEQ ID NO: 8337 - DNA, 122 bp, Homo sapiens
  misc_feature (61)..(62): /note="This region represents a CpG dinucleotide"
  misc_feature (61)..(61): /note="Nucleotide may be methylated to form 5-methylcytosine"
gaggaaggaaggaaggaaggaaggaaggaaattctccttgtctccgatacttcactcaggcgcagtgaagaaagaagccatcaccacatgggggcaactcatccccattaactttaatggga

SEQ ID NO: 8338 - DNA, 122 bp, Homo sapiens
  misc_feature (61)..(62): /note="This region represents a CpG dinucleotide"
  misc_feature (61)..(61): /note="Nucleotide may be methylated to form 5-methylcytosine"
cacattccattgcaatcagaatcagactaaattgcattcagcaaaaaagttttttgaagccgggggcggtggctcatgcctgtaatcccagcactttggaaggctgaggaaggcagatcacc

SEQ ID NO: 8339 - DNA, 122 bp, Homo sapiens
  misc_feature (61)..(62): /note="This region represents a CpG dinucleotide"
  misc_feature (61)..(61): /note="Nucleotide may be methylated to form 5-methylcytosine"
gatgactatgattaagctttttaaagtaatgaaccagattaacaaatcactataccatcacgaactaatcatcatatacagaataatttcataatctgcccactcctttttgcttttacata

SEQ ID NO: 8340 - DNA, 122 bp, Homo sapiens
  misc_feature (61)..(62): /note="This region represents a CpG dinucleotide"
  misc_feature (61)..(61): /note="Nucleotide may be methylated to form 5-methylcytosine"
ccatataagtcttttttaaaaaatgctttctaatctgatagttgtgtatccgagagttaacgctgggagtcattgtttgagtcaagtgttacctcaccagagcatttccttattaaaaaaaa

SEQ ID NO: 8341 - DNA, 122 bp, Homo sapiens
  misc_feature (61)..(62): /note="This region represents a CpG dinucleotide"
  misc_feature (61)..(61): /note="Nucleotide may be methylated to form 5-methylcytosine"
tcccccaccctccagaggggtaaccagtgttaccagtttgctgtgtttcctgctacacctcgccttattcacttccatttgtatctgaaaaacgtgttgcatggtttcttttctatagaagt

SEQ ID NO: 8342 - DNA, 122 bp, Homo sapiens
  misc_feature (61)..(62): /note="This region represents a CpG dinucleotide"
  misc_feature (61)..(61): /note="Nucleotide may be methylated to form 5-methylcytosine"
tggctacccttatttaacaattctatcagcaactcagttttggttcttggtagtgatatacgttaagattttagcaggaaaatttagtcattgagcaatttgttcttttggtcacttgctcc

SEQ ID NO: 8343 - DNA, 122 bp, Homo sapiens
  misc_feature (61)..(62): /note="This region represents a CpG dinucleotide"
  misc_feature (61)..(61): /note="Nucleotide may be methylated to form 5-methylcytosine"
gagagcggcggctgctcctggaagttgtggtgtcgggagcccagccggtgccgccgcagccgccgcctagggcggtggggaggaggagggagccgcggggcttggcggggtcgggagggagg

SEQ ID NO: 8344 - DNA, 122 bp, Homo sapiens
  misc_feature (61)..(62): /note="This region represents a CpG dinucleotide"
  misc_feature (61)..(61): /note="Nucleotide may be methylated to form 5-methylcytosine"
ggttcaatgatgaagcagcgagagcaagttcctggtacccggcctgggaatcagaacacacgagtgcaacttccagttctgctgctgattgaccctgtgacccagggaaagttattttactt

SEQ ID NO: 8345 - DNA, 122 bp, Homo sapiens
  misc_feature (61)..(62): /note="This region represents a CpG dinucleotide"
  misc_feature (61)..(61): /note="Nucleotide may be methylated to form 5-methylcytosine"
agtcttttatctttagtgagaactattctttaggtactgcagagattttatagcttgtcacggtttctactatattaagaatcaagtctaacaaaatcagaatagatgctaagcctggaaac

SEQ ID NO: 8346 - DNA, 122 bp, Homo sapiens
  misc_feature (61)..(62): /note="This region represents a CpG dinucleotide"
  misc_feature (61)..(61): /note="Nucleotide may be methylated to form 5-methylcytosine"
cgtatcctgttgcaggcgctgcctacccagtgctgggagaaaaagaaacagtcgcagacacgcacactcacactcgcaggcacctggggctccaagagagagttaaatctccttcgtggagt

SEQ ID NO: 8347 - DNA, 122 bp, Homo sapiens
  misc_feature (61)..(62): /note="This region represents a CpG dinucleotide"
  misc_feature (61)..(61): /note="Nucleotide may be methylated to form 5-methylcytosine"
caagctgcccagagcagtcagccagtccctctggtccagaccctaccaagctcacttaaacgaccacatccgtgcttgtccagagctgctgttcagcaagcagcaggaacctaccaggggaa

SEQ ID NO: 8348 - DNA, 122 bp, Homo sapiens
  misc_feature (61)..(62): /note="This region represents a CpG dinucleotide"
  misc_feature (61)..(61): /note="Nucleotide may be methylated to form 5-methylcytosine"
cccatcaattaactaactaattaacaagcagctagtactgagaaccactgcaggaactcacgtaaaaattttctcatgaaactatttttggcctaatatttttcacctggaacaggttaggt

SEQ ID NO: 8349 - DNA, 122 bp, Homo sapiens
  misc_feature (61)..(62): /note="This region represents a CpG dinucleotide"
  misc_feature (61)..(61): /note="Nucleotide may be methylated to form 5-methylcytosine"
ctaatagaagatactgccagatgatccagactgatcttatcctcagataatttccttcaacgggacatcaggaaggaatttgttgtacagaattgaagatttggcaagaagatctagacgca

SEQ ID NO: 8350 - DNA, 122 bp, Homo sapiens
  misc_feature (61)..(62): /note="This region represents a CpG dinucleotide"
  misc_feature (61)..(61): /note="Nucleotide may be methylated to form 5-methylcytosine"
accaggggggccaggaagggtccccatgcacagttacggccaactgaccttcagcaaaggcgccaaggacacacgacggggaaaggggcatcctcaataggtggtgctgggaaaagtggagg

SEQ ID NO: 8351 - DNA, 122 bp, Homo sapiens
  misc_feature (61)..(62): /note="This region represents a CpG dinucleotide"
  misc_feature (61)..(61): /note="Nucleotide may be methylated to form 5-methylcytosine"
tcaaaacaattggacttcttaaaaattggattgtatgagtgaaaggtgtttatgagaagtcgatgactccggatcttatcatccaagaggacagcacagaatagttaatatgttccttgagg

SEQ ID NO: 8352 - DNA, 122 bp, Homo sapiens
  misc_feature (61)..(62): /note="This region represents a CpG dinucleotide"
  misc_feature (61)..(61): /note="Nucleotide may be methylated to form 5-methylcytosine"
caagatcacgccactgcactccagcctgggtgacagagtgagtgactgatggtgaggacacgggctctgaagccacactgcttgggcagagatgccactcattctgtttgttttctcatctg

SEQ ID NO: 8353 - DNA, 122 bp, Homo sapiens
  misc_feature (61)..(62): /note="This region represents a CpG dinucleotide"
  misc_feature (61)..(61): /note="Nucleotide may be methylated to form 5-methylcytosine"
catccttttgtactctcaatttttcacctttgaattttactctcagcctaaaaatatggccgtggcttcttatttcctgcctaaacagacgttttttaaccttacagttccatcagattacc

SEQ ID NO: 8354 - DNA, 122 bp, Homo sapiens
  misc_feature (61)..(62): /note="This region represents a CpG dinucleotide"
  misc_feature (61)..(61): /note="Nucleotide may be methylated to form 5-methylcytosine"
cacagatcaccccatctgtgtgctgcttatgacttcatgtgttctaatcgcctgtacacacgtcaactatattcaggtatcctttaaatgcctttactttcaaatccctagagcatttcata

SEQ ID NO: 8355 - DNA, 122 bp, Homo sapiens
  misc_feature (61)..(62): /note="This region represents a CpG dinucleotide"
  misc_feature (61)..(61): /note="Nucleotide may be methylated to form 5-methylcytosine"
actgacagagtcctgataatatattgcaggaaaacccacgggccagccgataacactcagcgttaatttgtttacccaaaaattagaggaaggagaagttggtgatttgcaaaaaaagaagt

SEQ ID NO: 8356 - DNA, 122 bp, Homo sapiens
  misc_feature (61)..(62): /note="This region represents a CpG dinucleotide"
  misc_feature (61)..(61): /note="Nucleotide may be methylated to form 5-methylcytosine"
ttaagagctcgccagatgatttctgatgcatcaccatgactgagactcactgtcaagacacgtgtttgacagaacaactagccttagacttattgaaatagcaaggttttgtctggttacaa

SEQ ID NO: 8357 - DNA, 122 bp, Homo sapiens
  misc_feature (61)..(62): /note="This region represents a CpG dinucleotide"
  misc_feature (61)..(61): /note="Nucleotide may be methylated to form 5-methylcytosine"
cctttttctggtgatcatgagtgactgatctgagcaataagtatatgactgagaggccctcgccaggcatttgtggagcggattgccgaagcttggttagttaagcaatatgccagaaattt

SEQ ID NO: 8358 - DNA, 122 bp, Homo sapiens
  misc_feature (61)..(62): /note="This region represents a CpG dinucleotide"
  misc_feature (61)..(61): /note="Nucleotide may be methylated to form 5-methylcytosine"
atgctctgtgtgattggtgttttgcaatcatgtcaagggcatatacttttaagaacccaacgcttcgaggggatatttgctcaagatcacacaattagtcaacagatgaggtaagagtaaac

SEQ ID NO: 8359 - DNA, 122 bp, Homo sapiens
  misc_feature (61)..(62): /note="This region represents a CpG dinucleotide"
  misc_feature (61)..(61): /note="Nucleotide may be methylated to form 5-methylcytosine"
ttatatctgaactcaaaaataagtattcctggtcagtgccccatacaacctcaaaatgtacgtattgtctttatcattttaatcgactcttccaatgctatttttctgcctttagaaataga

SEQ ID NO: 8360 - DNA, 122 bp, Homo sapiens
  misc_feature (61)..(62): /note="This region represents a CpG dinucleotide"
  misc_feature (61)..(61): /note="Nucleotide may be methylated to form 5-methylcytosine"
gtgctctgagtgtgagagtccagctgtgcgttggtggagtgactcatttttccatggagacgtgtattcctatgaatcccaggggcctctgattggtatgaaagagcaatcagcacagatgt

SEQ ID NO: 8361 - DNA, 122 bp, Homo sapiens
  misc_feature (61)..(62): /note="This region represents a CpG dinucleotide"
  misc_feature (61)..(61): /note="Nucleotide may be methylated to form 5-methylcytosine"
gggaagtagagaagaggcagatagagacaaggggaaaaaaatccaacacggatggacagacgtatctggtttaaatcccagggcagcctgggccagttctactcaaatagagtgtgtcctgg

SEQ ID NO: 8362 - DNA, 122 bp, Homo sapiens
  misc_feature (61)..(62): /note="This region represents a CpG dinucleotide"
  misc_feature (61)..(61): /note="Nucleotide may be methylated to form 5-methylcytosine"
gtattttcccacttagagaagcttttgtacactgagcatgtggctgtttaaatgccccagcgggacatccagaggctgcaaaaacgggaaaaattatttggaacaatttgctttcgttcaag

SEQ ID NO: 8363 - DNA, 122 bp, Homo sapiens
  misc_feature (61)..(62): /note="This region represents a CpG dinucleotide"
  misc_feature (61)..(61): /note="Nucleotide may be methylated to form 5-methylcytosine"
tgcaggaactcaaaagcataacctgggtggggctgggtccggaagcacagtgggggcccccggcctgttcccaagatcctgaagtcaccaccacctgggctcagtcctgaggcactattgaa

SEQ ID NO: 8364 - DNA, 122 bp, Homo sapiens
  misc_feature (61)..(62): /note="This region represents a CpG dinucleotide"
  misc_feature (61)..(61): /note="Nucleotide may be methylated to form 5-methylcytosine"
tcccctcccctggaggaacagacgtccatttacaaaccagaatccttatttacagtgtcccgttgccaattgctgacacagaagggggaaaaaataccagttatacattaagctttaaggtt

SEQ ID NO: 8365 - DNA, 122 bp, Homo sapiens
  misc_feature (61)..(62): /note="This region represents a CpG dinucleotide"
  misc_feature (61)..(61): /note="Nucleotide may be methylated to form 5-methylcytosine"
ccgtaagtgatgctgtgatgaatctcctgttccgatacactgaaatgattcaccacttaacggtgagtgattttacacactacacgctcacacctaagggccctgagatgaaccctgctatc

SEQ ID NO: 8366 - DNA, 122 bp, Homo sapiens
  misc_feature (61)..(62): /note="This region represents a CpG dinucleotide"
  misc_feature (61)..(61): /note="Nucleotide may be methylated to form 5-methylcytosine"
gaatctttgagtatcagttatttagatgacagaagtactttcagtccgtaaatcttggcccgttatgatagacactgattactgcaataagaattcattccctgacatatcctacttgcaca

SEQ ID NO: 8367 - DNA, 122 bp, Homo sapiens
  misc_feature (61)..(62): /note="This region represents a CpG dinucleotide"
  misc_feature (61)..(61): /note="Nucleotide may be methylated to form 5-methylcytosine"
actcttggtcctgtccctgggctgtgccacagatcctgagcagtcaccctggaagacaggcggcctgcttgctcaactcaccgggagcccgcctttggaaggccacccacacgcctttcctc

SEQ ID NO: 8368 - DNA, 122 bp, Homo sapiens
  misc_feature (61)..(62): /note="This region represents a CpG dinucleotide"
  misc_feature (61)..(61): /note="Nucleotide may be methylated to form 5-methylcytosine"
atcttattatgttacccacactggagtccattggtgcaatcatgactcactgtaccattacgtaacaaactcctaggctcaagcagtcctcctgagtagctgggactacggatgtgcactac

SEQ ID NO: 8369 - DNA, 122 bp, Homo sapiens
  misc_feature (61)..(62): /note="This region represents a CpG dinucleotide"
  misc_feature (61)..(61): /note="Nucleotide may be methylated to form 5-methylcytosine"
tttggtgtcaacggtgggtactccccactccagatgtccccacacagctgctcctcaacacgtgagagccaaggctgatttgataccaccaccaaataataaatgctcctccaccccaccct

SEQ ID NO: 8370 - DNA, 122 bp, Homo sapiens
  misc_feature (61)..(62): /note="This region represents a CpG dinucleotide"
  misc_feature (61)..(61): /note="Nucleotide may be methylated to form 5-methylcytosine"
tatgagaaaactgattgagatggctttcagggaagcacataatgctcagaagcttggatacgacttagactgctgggggctaaggaaagagtgagcatcaggaaatgtttatgtttcctgaa

SEQ ID NO: 8371 - DNA, 122 bp, Homo sapiens
  misc_feature (61)..(62): /note="This region represents a CpG dinucleotide"
  misc_feature (61)..(61): /note="Nucleotide may be methylated to form 5-methylcytosine"
aaaacgcagttttgaatagtattgagtacttacatgtcagttgctgcactgagcacctgccgtgtgagctcatttgaagaatgtgggtatgtggaatgaagagaaagggcgttctagacaga

SEQ ID NO: 8372 - DNA, 122 bp, Homo sapiens
  misc_feature (61)..(62): /note="This region represents a CpG dinucleotide"
  misc_feature (61)..(61): /note="Nucleotide may be methylated to form 5-methylcytosine"
ccagaccagtctgggcgacaaagtgagatcccacctctacacaaaatgtaaagttagctccgtgctgtggtatgcacctgtagttccagctactcggagagctaaggtagaaggactgcttg

SEQ ID NO: 8373 - DNA, 122 bp, Homo sapiens
  misc_feature (61)..(62): /note="This region represents a CpG dinucleotide"
  misc_feature (61)..(61): /note="Nucleotide may be methylated to form 5-methylcytosine"
caaaaggcccctgaataatttaaaaaaaaaaagaggtggtgtcaggcaagggctttaggacgtagaaggtcacttttggttgttgtcctgttgatccaactgctttactaactggagctatt

SEQ ID NO: 8374 - DNA, 122 bp, Homo sapiens
  misc_feature (61)..(62): /note="This region represents a CpG dinucleotide"
  misc_feature (61)..(61): /note="Nucleotide may be methylated to form 5-methylcytosine"
attgggtttggtttagccttgagaataaccttacttaatctgatctcatcaggatggagccgcctcattgtgggaagggcggtgaagaaccttatcttgaatcttaagatgcagaaaatgct

SEQ ID NO: 8375 - DNA, 122 bp, Homo sapiens
  misc_feature (61)..(62): /note="This region represents a CpG dinucleotide"
  misc_feature (61)..(61): /note="Nucleotide may be methylated to form 5-methylcytosine"
tcacgtgggaggtctgcccaggatcccggcagtgaggctgccctggaggcaggcttgctccgccacaggcgcgcaggcaacagcagcggagccgagaatggcgaggccagcgggcgaccagg

SEQ ID NO: 8376 - DNA, 122 bp, Homo sapiens
  misc_feature (61)..(62): /note="This region represents a CpG dinucleotide"
  misc_feature (61)..(61): /note="Nucleotide may be methylated to form 5-methylcytosine"
taactgacttggcattgattgggacagacctggtcttctgtgggtgtggctgaccctaggcgtggacatgggagtctctgagaggctttggatgagcctcctccaccctcacaccgaccagc

SEQ ID NO: 8377 - DNA, 122 bp, Homo sapiens
  misc_feature (61)..(62): /note="This region represents a CpG dinucleotide"
  misc_feature (61)..(61): /note="Nucleotide may be methylated to form 5-methylcytosine"
tcaaggaggctaaagttcttccctgtgttcctatgaggataatttcacaaatacacagcacgtcccttcaaccacagattttgggcagagagaaggaaacaagaagaaggagaagaagagag

SEQ ID NO: 8378 - DNA, 122 bp, Homo sapiens
  misc_feature (61)..(62): /note="This region represents a CpG dinucleotide"
  misc_feature (61)..(61): /note="Nucleotide may be methylated to form 5-methylcytosine"
ttggccctggcagctcctgaggactgctgggatgatgacacagcatttttgcatcagcatcgtactcacagggactcggagctcagccaggagaggtccaagaatgacggaactctagaacc

SEQ ID NO: 8379 - DNA, 122 bp, Homo sapiens
  misc_feature (61)..(62): /note="This region represents a CpG dinucleotide"
  misc_feature (61)..(61): /note="Nucleotide may be methylated to form 5-methylcytosine"
gggccttgagcactcagctgctgagttgatacctaatcttgtgcaatctggagttggccacgcaggagccacagcaggacagaaaggtcttctaagctcattctttacttcctgacactctc

SEQ ID NO: 8380 - DNA, 122 bp, Homo sapiens
  misc_feature (61)..(62): /note="This region represents a CpG dinucleotide"
  misc_feature (61)..(61): /note="Nucleotide may be methylated to form 5-methylcytosine"
tccatctactccttactccacttgagggtaatcacctactcttctagttccacaagagtgcgcctgcgcgagtataatctgcacatgtgccatgtcccgaggcctggggcatcatccactca

SEQ ID NO: 8381 - DNA, 122 bp, Homo sapiens
  misc_feature (61)..(62): /note="This region represents a CpG dinucleotide"
  misc_feature (61)..(61): /note="Nucleotide may be methylated to form 5-methylcytosine"
agatattttcatctccgtgcacttggtgccaactcaaggccaagttaggaaaacagtccacgatgtactgtaaagtaatactgaatggaacaggtgagttaagaatggagtaagaatggaaa

SEQ ID NO: 8382 - DNA, 122 bp, Homo sapiens
  misc_feature (61)..(62): /note="This region represents a CpG dinucleotide"
  misc_feature (61)..(61): /note="Nucleotide may be methylated to form 5-methylcytosine"
cacttgacccagatcctaatttttgcttgatgcactatttacctgtatcaaattacagtccgttcctttgaatttttttttttttttttttttttttttttttttttttgagacactgtctc

SEQ ID NO: 8383 - DNA, 122 bp, Homo sapiens
  misc_feature (61)..(62): /note="This region represents a CpG dinucleotide"
  misc_feature (61)..(61): /note="Nucleotide may be methylated to form 5-methylcytosine"
gccatggatggggacttgctattcttggacagtgacccccggtctccctgtaccctctaccgtgtctgtccctgtaactgcagcatcttcatgggcagagtccacatccccagcagggagga

SEQ ID NO: 8384 - DNA, 122 bp, Homo sapiens
  misc_feature (61)..(62): /note="This region represents a CpG dinucleotide"
  misc_feature (61)..(61): /note="Nucleotide may be methylated to form 5-methylcytosine"
accacatggtaggcatcttaagtggatgcagaccattgccccatggacatgtatgaaaaccgttttggtgaaagcatgtggcacgaggcctgacaaacaccatggaactctcctaatgaact

SEQ ID NO: 8385 - DNA, 122 bp, Homo sapiens
  misc_feature (61)..(62): /note="This region represents a CpG dinucleotide"
  misc_feature (61)..(61): /note="Nucleotide may be methylated to form 5-methylcytosine"
ctttagctttcttagtcctgtcaacgagccaagcaatctatacattgactcttagacctgcgtttcccagcacccttgcaggaactggccctagatgaccctgcctgaataactgataaact

SEQ ID NO: 8386 - DNA, 122 bp, Homo sapiens
  misc_feature (61)..(62): /note="This region represents a CpG dinucleotide"
  misc_feature (61)..(61): /note="Nucleotide may be methylated to form 5-methylcytosine"
tattctttaagaaaaaaaaaggtcagggatatcttttcatgtcaataaataggaaaactacgtaatcatttttagggctgcagactgtcccgtcacagaagctccataatttatttaagcaa

SEQ ID NO: 8387 - DNA, 122 bp, Homo sapiens
  misc_feature (61)..(62): /note="This region represents a CpG dinucleotide"
  misc_feature (61)..(61): /note="Nucleotide may be methylated to form 5-methylcytosine"
aaactcccaaagaattcaggaaggaagataacttaaaactacactgaagaacgttacctgcggtgcacgtcacagctgaagagccagagttaagctctaaattaagatcagttgcaccgctc

SEQ ID NO: 8388 - DNA, 122 bp, Homo sapiens
  misc_feature (61)..(62): /note="This region represents a CpG dinucleotide"
  misc_feature (61)..(61): /note="Nucleotide may be methylated to form 5-methylcytosine"
tgggggaccttaagtgattattcatggaatctttcatgctaaagatgcattgcagcgaaacgtcattggtttggaccaaatccggttatggtctgaagaacctcaggtatgggacatcccca

SEQ ID NO: 8389 - DNA, 122 bp, Homo sapiens
  misc_feature (61)..(62): /note="This region represents a CpG dinucleotide"
  misc_feature (61)..(61): /note="Nucleotide may be methylated to form 5-methylcytosine"
cccttattgatgtttgtaattgcattatctcataaaggaggatgatcaatgaaaccgagccgtgcattctggggtcagaggaagccaaagtactgtttgtcccctttaatacaacaagtact

SEQ ID NO: 8390 - DNA, 122 bp, Homo sapiens
  misc_feature (61)..(62): /note="This region represents a CpG dinucleotide"
  misc_feature (61)..(61): /note="Nucleotide may be methylated to form 5-methylcytosine"
ttggagatatagtgggtaaagtctggcacagccctggtcacaaaaaacactttttccctgcgtttctaggatgaggaggtgaatgattagtttacacgagtttccatccattggagtcatga

SEQ ID NO: 8391 - DNA, 122 bp, Homo sapiens
  misc_feature (61)..(62): /note="This region represents a CpG dinucleotide"
  misc_feature (61)..(61): /note="Nucleotide may be methylated to form 5-methylcytosine"
tagtaaaatgcagctacagatgacttttttcttcctctttgtgaagccaatttatcactccgttgatttacctttataacatcagcaccataatagctatgatttaggacaaatcctagagt

SEQ ID NO: 8392 - DNA, 122 bp, Homo sapiens
  misc_feature (61)..(62): /note="This region represents a CpG dinucleotide"
  misc_feature (61)..(61): /note="Nucleotide may be methylated to form 5-methylcytosine"
agtttggaacaccacataacctgagggtagaggtaggtactctgtatcatacaactttagcgcaaaattatagatgccttctaacagtagcatgaaatagtgcgacagaattgaacctattt

SEQ ID NO: 8393 - DNA, 122 bp, Homo sapiens
  misc_feature (61)..(62): /note="This region represents a CpG dinucleotide"
  misc_feature (61)..(61): /note="Nucleotide may be methylated to form 5-methylcytosine"
ggaggaattcatgaatgcaggctccaacggcaggtgaggctggacaagggataggtgtcccgtggccccagcccacactacctgtggtggtgatgaaggcgtaggacttggaggtctgcccc

SEQ ID NO: 8394 - DNA, 122 bp, Homo sapiens
  misc_feature (61)..(62): /note="This region represents a CpG dinucleotide"
  misc_feature (61)..(61): /note="Nucleotide may be methylated to form 5-methylcytosine"
cttttactggtacttcgtgtctttggtcttaatcaaaatacaggaagtccctgctttgcacgacagcacagaccatagaaatgactgtgcaagatgaaaccatgtaaagtgatctgaataat

SEQ ID NO: 8395 - DNA, 122 bp, Homo sapiens
  misc_feature (61)..(62): /note="This region represents a CpG dinucleotide"
  misc_feature (61)..(61): /note="Nucleotide may be methylated to form 5-methylcytosine"
tcctccacggcggaaggtggcaggaaacgggacatggaacacggaggcctccctcatattcgcggcccggaatcagctgacggggaacctgatcaccgctgctcagtcaggtttcttgttgc

SEQ ID NO: 8396 - DNA, 122 bp, Homo sapiens
  misc_feature (61)..(62): /note="This region represents a CpG dinucleotide"
  misc_feature (61)..(61): /note="Nucleotide may be methylated to form 5-methylcytosine"
tctctgcatgtcagggctgagaggtgaccaaactccctccccactttctagaaggtaaaccgacacccaaagaggggaacagtgcatttctgtggcagagaacagactctgtcccccaacat

SEQ ID NO: 8397 - DNA, 122 bp, Homo sapiens
  misc_feature (61)..(62): /note="This region represents a CpG dinucleotide"
  misc_feature (61)..(61): /note="Nucleotide may be methylated to form 5-methylcytosine"
tgtttcacgtggcattggcggggactttcttcctttgtaatgtgctcactggggttgtcacgtcacatagccacgtggagacagccactgaagttcaaagacaagatgggtgtaaatgtgat

SEQ ID NO: 8398 - DNA, 122 bp, Homo sapiens
  misc_feature (61)..(62): /note="This region represents a CpG dinucleotide"
  misc_feature (61)..(61): /note="Nucleotide may be methylated to form 5-methylcytosine"
tggcagccagcaggaaacagggactttctagcactaaagcattagtgctgaggtcctggccgtgcccagaaattgccatgtgggtgctctggagttttgaggttgacaactgcaagttgtgt

SEQ ID NO: 8399 - DNA, 122 bp, Homo sapiens
  misc_feature (61)..(62): /note="This region represents a CpG dinucleotide"
  misc_feature (61)..(61): /note="Nucleotide may be methylated to form 5-methylcytosine"
gactggtgacacattttgagagtacagctgagataaaaggcttttcctatcatagtgtgacgttaaaggaggagaaaatggaaaggagagaaaagggacactttacctagaagtgtacaata

SEQ ID NO: 8400 - DNA, 122 bp, Homo sapiens
  misc_feature (61)..(62): /note="This region represents a CpG dinucleotide"
  misc_feature (61)..(61): /note="Nucleotide may be methylated to form 5-methylcytosine"
gccgagttgggcccctgcctcccacactagggagctgtgcagtgagtcagccctgcatgacgcaatgaagaatgtacataggagttccaggagtgagccaccatgtggatgcctaccgcatg

SEQ ID NO: 8401 - DNA, 122 bp, Homo sapiens
  misc_feature (61)..(62): /note="This region represents a CpG dinucleotide"
  misc_feature (61)..(61): /note="Nucleotide may be methylated to form 5-methylcytosine"
aacactgaactgagagagtaactgcaaagcagagcataatttaaagccaggttatgcctgcgaccacaggctagaaacaagatcctaaatgtaaaagaagaccaatcgttcacacatattct

SEQ ID NO: 8402 - DNA, 122 bp, Homo sapiens
  misc_feature (61)..(62): /note="This region represents a CpG dinucleotide"
  misc_feature (61)..(61): /note="Nucleotide may be methylated to form 5-methylcytosine"
aagggccttgggctaggttagtcagttgggtagagaagtggctgggaaaataaggatttgcgtaacagggtttgttttgtgccgagttccttggcttcaacttcccatccttgaccataaga

SEQ ID NO: 8403 - DNA, 122 bp, Homo sapiens
  misc_feature (61)..(62): /note="This region represents a CpG dinucleotide"
  misc_feature (61)..(61): /note="Nucleotide may be methylated to form 5-methylcytosine"
tttgaagcacatattatggcttatgctgttgaaaactctccagtgttttagcataatgtccgagtcaagttagaacacaggtctctgctaattgtcatatcttagatgattgcctgataaag

SEQ ID NO: 8404 - DNA, 122 bp, Homo sapiens
  misc_feature (61)..(62): /note="This region represents a CpG dinucleotide"
  misc_feature (61)..(61): /note="Nucleotide may be methylated to form 5-methylcytosine"
ggaatcaagtcgttcccagttagtcaacatctgtcacaatctgtgtaaaagggcagaacacgctataccccagcacattaagttagaacacagaggtcttgggtcactgccagagtaacttg

SEQ ID NO: 8405 - DNA, 122 bp, Homo sapiens
  misc_feature (61)..(62): /note="This region represents a CpG dinucleotide"
  misc_feature (61)..(61): /note="Nucleotide may be methylated to form 5-methylcytosine"
tctagggactgggggtgtaaggaggggttgacaacaaaaatccacgtgttggggaggtgacggaagagttctatatcttgattgtggtgatggttatgtgatacggtttggctgtgtcccac

SEQ ID NO: 8406 - DNA, 122 bp, Homo sapiens
  misc_feature (61)..(62): /note="This region represents a CpG dinucleotide"
  misc_feature (61)..(61): /note="Nucleotide may be methylated to form 5-methylcytosine"
tgtgaaaataaaatccagcttggtgactgttaatgtttaattgcatcataagcaggcattcgctgaaaagttatgcagtcagtgcctagtatgtgtgaaatgtcatcagcctgctatgggca

SEQ ID NO: 8407 - DNA, 122 bp, Homo sapiens
  misc_feature (61)..(62): /note="This region represents a CpG dinucleotide"
  misc_feature (61)..(61): /note="Nucleotide may be methylated to form 5-methylcytosine"
gtccttcagatatcttctctttggtgctttgtttgggaacagattagcctcatacttcctcgcttgtaaaactgctatcccatctcttgctcaatgcttttcttgtaccgaagggtgagggg

SEQ ID NO: 8408 - DNA, 122 bp, Homo sapiens
  misc_feature (61)..(62): /note="This region represents a CpG dinucleotide"
  misc_feature (61)..(61): /note="Nucleotide may be methylated to form 5-methylcytosine"
gagcaaaggctagcatgacctttaagtcctcctttaagagtactgaatttctgccaggagcgtggcttgttcctcaagtgtcgctaggtgaattgttattagcaaggagggatgaaattgcg

SEQ ID NO: 8409 - DNA, 122 bp, Homo sapiens
  misc_feature (61)..(62): /note="This region represents a CpG dinucleotide"
  misc_feature (61)..(61): /note="Nucleotide may be methylated to form 5-methylcytosine"
cagactgtccctctcctccccaattctctggtaattttgggcttgctgagactcaatgcccggggtgagagaagctccccaggcagcatgcctcctgctctctccacccaccttctcttccc

SEQ ID NO: 8410 - DNA, 122 bp, Homo sapiens
  misc_feature (61)..(62): /note="This region represents a CpG dinucleotide"
  misc_feature (61)..(61): /note="Nucleotide may be methylated to form 5-methylcytosine"
gctctgcgccgccctcgccctcggatcccctggagggtgcgcagccgggcgtcaccagatcgggtccctctcatgccccgtgaacgcaactattctccggggcaactggctccactgcccag

SEQ ID NO: 8411 - DNA, 122 bp, Homo sapiens
  misc_feature (61)..(62): /note="This region represents a CpG dinucleotide"
  misc_feature (61)..(61): /note="Nucleotide may be methylated to form 5-methylcytosine"
ctcaattagaatgggagaaatggagaatggttgacagtgtcaatcaaaacacaccagcgacgtgttcttaggagggttgacttctagagggcagatgaacacagcaattaagtgcatgggat

SEQ ID NO: 8412 - DNA, 122 bp, Homo sapiens
  misc_feature (61)..(62): /note="This region represents a CpG dinucleotide"
  misc_feature (61)..(61): /note="Nucleotide may be methylated to form 5-methylcytosine"
agaactagtaactgagttcctgaccttggaaagctgagctctaaagggatctagcctcggcgtctagcctgagtagctagctgatatgtctcattcattcatcattcttttccccttaatct

SEQ ID NO: 8413 - DNA, 122 bp, Homo sapiens
  misc_feature (61)..(62): /note="This region represents a CpG dinucleotide"
  misc_feature (61)..(61): /note="Nucleotide may be methylated to form 5-methylcytosine"
aaagaaacctactgatttgggttggcagttgtttccacagtgacacagaagaaacaaaaacggtgtcccagcaatgttgtaaagcatttttacattgatgtgttatgcattgtgtatcctca

SEQ ID NO: 8414 - DNA, 122 bp, Homo sapiens
  misc_feature (61)..(62): /note="This region represents a CpG dinucleotide"
  misc_feature (61)..(61): /note="Nucleotide may be methylated to form 5-methylcytosine"
agcacgtcccaggagccacaacctctagccccacccactagcgacgcacagcacaattcgcgacagacacttaccaaccagtaagactggatgagagacagaccagaatgcttgttccaaca

SEQ ID NO: 8415 - DNA, 122 bp, Homo sapiens
  misc_feature (61)..(62): /note="This region represents a CpG dinucleotide"
  misc_feature (61)..(61): /note="Nucleotide may be methylated to form 5-methylcytosine"
gtgccgctacctcttcacctgctgagcaaaccctgtcattgaagcaaccaggtgctcacacgtgttgtgaacacaagactccaataaggggacacctgtgtgtatccaattttctaccagca

SEQ ID NO: 8416 - DNA, 122 bp, Homo sapiens
  misc_feature (61)..(62): /note="This region represents a CpG dinucleotide"
  misc_feature (61)..(61): /note="Nucleotide may be methylated to form 5-methylcytosine"
cttcctgttttctcccttgtttgttcatatggctgtgctttacaagattaaaaggcttaccgggcaaaagcatagcagaaggaagtaaaaccttcgggcagatgaaataattcttccatttt

SEQ ID NO: 8417 - DNA, 122 bp, Homo sapiens
  misc_feature (61)..(62): /note="This region represents a CpG dinucleotide"
  misc_feature (61)..(61): /note="Nucleotide may be methylated to form 5-methylcytosine"
aagagttcaggctagagttactcaaagattgatgaagccagatcatggaatgcagtttagcgcagttactaggtgcagtttgacacgttattcacaatttccagtgcctccaaagtcctcag

SEQ ID NO: 8418 - DNA, 122 bp, Homo sapiens
  misc_feature (61)..(62): /note="This region represents a CpG dinucleotide"
  misc_feature (61)..(61): /note="Nucleotide may be methylated to form 5-methylcytosine"
atcaacctttctctctctctctctctcacacacacgcacacacacacaaaatctgaaacacggttaagaaacttcattgggctacccggaagataattcagtaaggaagtggttatgaaaat

SEQ ID NO: 8419 - DNA, 122 bp, Homo sapiens
  misc_feature (61)..(62): /note="This region represents a CpG dinucleotide"
  misc_feature (61)..(61): /note="Nucleotide may be methylated to form 5-methylcytosine"
cagagagaagctgtgtcacttggcagtacagtaggccaggagaagattgtggtggccccacgtggctctgtggtatttatataggatcctgcagctgctgagtctctggtgcggagcagccc

SEQ ID NO: 8420 - DNA, 122 bp, Homo sapiens
  misc_feature (61)..(62): /note="This region represents a CpG dinucleotide"
  misc_feature (61)..(61): /note="Nucleotide may be methylated to form 5-methylcytosine"
gcccaagacaccccaatctggatcttgcaaacccaacatttcaggctgggtgggtgtctgcgtgtgtgcaaacgtgcacacatgggccctacctccatttacactggaaggactcctcctta

SEQ ID NO: 8421 - DNA, 122 bp, Homo sapiens
  misc_feature (61)..(62): /note="This region represents a CpG dinucleotide"
  misc_feature (61)..(61): /note="Nucleotide may be methylated to form 5-methylcytosine"
agctcttttgctggtacttaaggagttcttgggtcactctgcaggaacactggagcccggcggccccactctctttattggcagctctggcgtccttccatcacccactgcggcgtcttggc

SEQ ID NO: 8422 - DNA, 122 bp, Homo sapiens
  misc_feature (61)..(62): /note="This region represents a CpG dinucleotide"
  misc_feature (61)..(61): /note="Nucleotide may be methylated to form 5-methylcytosine"
catgattacccctgttttgcaggtagggagactgatgctcaggttaggtagtttgcttcacggtgcacagctctcagggactagaactgtgaattaaactcggagtgcctgaccacaccccc

SEQ ID NO: 8423 - DNA, 122 bp, Homo sapiens
  misc_feature (61)..(62): /note="This region represents a CpG dinucleotide"
  misc_feature (61)..(61): /note="Nucleotide may be methylated to form 5-methylcytosine"
aagaagagggtggcttataaatgggctggctcagcatgtctcagcattgtttgtaacttacgcattcattcaacacccattgattgaggatatactatgttggtggtgccggaggatgtgaa

SEQ ID NO: 8424 - DNA, 122 bp, Homo sapiens
  misc_feature (61)..(62): /note="This region represents a CpG dinucleotide"
  misc_feature (61)..(61): /note="Nucleotide may be methylated to form 5-methylcytosine"
ggaaggattccagagataagatataagtttcaagcgctgggagccctccgtctctggaagcgggagagcctggccaagaatggctcaatcccgaggaaaacagccaacagatggaaggcgcc

SEQ ID NO: 8425 - DNA, 122 bp, Homo sapiens
  misc_feature (61)..(62): /note="This region represents a CpG dinucleotide"
  misc_feature (61)..(61): /note="Nucleotide may be methylated to form 5-methylcytosine"
caatttcctctggttcccacaagagaggaagccattcatacatgtaagttcatatttatgcggtgacaggcagcctaaggtgcagtcacacttactaattgggtctgactcagtcaagagca

SEQ ID NO: 8426 - DNA, 122 bp, Homo sapiens
  misc_feature (61)..(62): /note="This region represents a CpG dinucleotide"
  misc_feature (61)..(61): /note="Nucleotide may be methylated to form 5-methylcytosine"
aacacacccagcgggatgcgagcagcccaggggcttccggagaggccggcactgccccgacgggggcgggacctcagagcagcccactcagttctcggagtcagtttctcaccaaaacaagg

SEQ ID NO: 8427 - DNA, 122 bp, Homo sapiens
  misc_feature (61)..(62): /note="This region represents a CpG dinucleotide"
  misc_feature (61)..(61): /note="Nucleotide may be methylated to form 5-methylcytosine"
tcaggcaggacaccccttgtcattcgaacggttctggtgtgagccagggtacagctgggccgcctggggccccttgccgagtttccgttccacttcaggtgtcgcttcccgcggcccattgg

SEQ ID NO: 8428 - DNA, 122 bp, Homo sapiens
  misc_feature (61)..(62): /note="This region represents a CpG dinucleotide"
  misc_feature (61)..(61): /note="Nucleotide may be methylated to form 5-methylcytosine"
attgaggaagcttggtgctgtcctgctcatattataaatgctggccatagaatggaataccgtatatggagatgaaagacagtgagtgactcacctaaggtcacatgcttagttaaaaacag

SEQ ID NO: 8429 - DNA, 122 bp, Homo sapiens
  misc_feature (61)..(62): /note="This region represents a CpG dinucleotide"
  misc_feature (61)..(61): /note="Nucleotide may be methylated to form 5-methylcytosine"
ttctccactgaagatccccaggaggtcaccgcacaacctgaggaaatgcatggttgcgggcgtggagctgccccaggagggctagagccaagccgaagtcaccgagcaggcacgggtagaga

SEQ ID NO: 8430 - DNA, 122 bp, Homo sapiens
  misc_feature (61)..(62): /note="This region represents a CpG dinucleotide"
  misc_feature (61)..(61): /note="Nucleotide may be methylated to form 5-methylcytosine"
caaatttgagaggaattgcataaaacactggagaaatccaagaggggaagtccacaagggcggtggctccctccatgatctcagagcaagctggtgtcagaacctggacctagagcactgtt

SEQ ID NO: 8431 - DNA, 122 bp, Homo sapiens
  misc_feature (61)..(62): /note="This region represents a CpG dinucleotide"
  misc_feature (61)..(61): /note="Nucleotide may be methylated to form 5-methylcytosine"
agatatttgtagtagatatgtctctagataagaggcttgtctggctgtgaggtccttgcacgagacccttgcaggtttcccaaatctatttggactgggtgtcctgtattaacatgaaatcg

SEQ ID NO: 8432 - DNA, 122 bp, Homo sapiens
  misc_feature (61)..(62): /note="This region represents a CpG dinucleotide"
  misc_feature (61)..(61): /note="Nucleotide may be methylated to form 5-methylcytosine"
taatgtgtgagacaatgagtaggtgcttagtaaatgtcagtgctgtgcctattttccctccgcccacttgccacctcttttctaataataagaccaagtttatttaccctgataagcacgtc

SEQ ID NO: 8433 - DNA, 122 bp, Homo sapiens
  misc_feature (61)..(62): /note="This region represents a CpG dinucleotide"
  misc_feature (61)..(61): /note="Nucleotide may be methylated to form 5-methylcytosine"
ttacttcaccacactgtttatttttcttcaattgctccacaaacattaggttttatacagcgttcaaattctgtgatttctttgatttctcctttctttcttagaaaacaatcatgggtgga

SEQ ID NO: 8434 - DNA, 122 bp, Homo sapiens
  misc_feature (61)..(62): /note="This region represents a CpG dinucleotide"
  misc_feature (61)..(61): /note="Nucleotide may be methylated to form 5-methylcytosine"
gcgtgccagtcagtgcctgggtcaccgcgaattccatcccaacccgctccggcaccgcgacggtctctcctgtcactggagacgtttcttgtgtcagtgcaaatatatgtcgttccttgttt

SEQ ID NO: 8435 - DNA, 122 bp, Homo sapiens
  misc_feature (61)..(62): /note="This region represents a CpG dinucleotide"
  misc_feature (61)..(61): /note="Nucleotide may be methylated to form 5-methylcytosine"
gtgggtgtaatgggtagtgttctgtccctccaagtcgttaataaaacaaagcaggccgggcgtcttgttaaatagttgtatcaatgacttgatttagattaatgaggatatatttttcaaat

SEQ ID NO: 8436 - DNA, 122 bp, Homo sapiens
  misc_feature (61)..(62): /note="This region represents a CpG dinucleotide"
  misc_feature (61)..(61): /note="Nucleotide may be methylated to form 5-methylcytosine"
ctccagcctgggtgacagagcaagactctcagccaaaaaaaaaaaaaaaaagaagtgaagcggggaaaaaaacaacagaataaaccaaacaaataaggaaaaataggccacgtgtggtggct

SEQ ID NO: 8437 - DNA, 122 bp, Homo sapiens
  misc_feature (61)..(62): /note="This region represents a CpG dinucleotide"
  misc_feature (61)..(61): /note="Nucleotide may be methylated to form 5-methylcytosine"
ccagctactcaggaagcagcggcgggaggatcgctcagcctgggggtccaggacagcctgcgcgacaatgtaacattccctcccgcagtctctctcttttttaaatttttaaaataaaattt

SEQ ID NO: 8438 - DNA, 122 bp, Homo sapiens
  misc_feature (61)..(62): /note="This region represents a CpG dinucleotide"
  misc_feature (61)..(61): /note="Nucleotide may be methylated to form 5-methylcytosine"
tatctttttaggggtttcccattaatcaaaacacgtgatatatgtaatcagttgcaggtacgtagttaccatgtttataatatgtaggggattggaatgggaagggtggaagatcattctct

SEQ ID NO: 8439 - DNA, 122 bp, Homo sapiens
  misc_feature (61)..(62): /note="This region represents a CpG dinucleotide"
  misc_feature (61)..(61): /note="Nucleotide may be methylated to form 5-methylcytosine"
gtccgttcccacatggggagacttccatgttaacaataggttattgtagtgcggctggcccggaggactggggactgtgaaaataaattaagagtgggccggtcggagctgcaacagtcatc

SEQ ID NO: 8440 - DNA, 122 bp, Homo sapiens
  misc_feature (61)..(62): /note="This region represents a CpG dinucleotide"
  misc_feature (61)..(61): /note="Nucleotide may be methylated to form 5-methylcytosine"
agaggtgtcagcggctcacaacaccttgggctgggccagagggaggcccggtccccggggcgggatcgctaacctccagggctgcgtcggtgctggcctcaaagccgtcacagaccagcacg

SEQ ID NO: 8441 - DNA, 122 bp, Homo sapiens
  misc_feature (61)..(62): /note="This region represents a CpG dinucleotide"
  misc_feature (61)..(61): /note="Nucleotide may be methylated to form 5-methylcytosine"
gaaagttgacagggtagaaatcatttttgtagacaagaaaattgaagcacaaggcgataacgcaacttgcccagcagcacatggttattaataggtggagcgggaattagaagccaggtttt

SEQ ID NO: 8442 - DNA, 122 bp, Homo sapiens
  misc_feature (61)..(62): /note="This region represents a CpG dinucleotide"
  misc_feature (61)..(61): /note="Nucleotide may be methylated to form 5-methylcytosine"
tattaggggtatttggtattatttggagttatgacattgcctaatagaacttctgctatacgacaagcaaaatcactttctgccttgtgcaataggctgctctctaactagtatctctgctc

SEQ ID NO: 8443 - DNA, 122 bp, Homo sapiens
  misc_feature (61)..(62): /note="This region represents a CpG dinucleotide"
  misc_feature (61)..(61): /note="Nucleotide may be methylated to form 5-methylcytosine"
gtatctacaacaacctaaacatgagtttattctgatgcctccaactctaatccattactacgtgaatcatttgagcttcctcctcttgctcatctgtaacctcctgctccagcagtgggaac

SEQ ID NO: 8444 - DNA, 122 bp, Homo sapiens
  misc_feature (61)..(62): /note="This region represents a CpG dinucleotide"
  misc_feature (61)..(61): /note="Nucleotide may be methylated to form 5-methylcytosine"
tgctcatgtctaccttagaattgctgtccacagtagcagacaaaaattagaagcaactcacgtattcatcaataacagccaagtactcagcaacccaagcatttcatcaaccaagtaaaaca

SEQ ID NO: 8445 - DNA, 122 bp, Homo sapiens
  misc_feature (61)..(62): /note="This region represents a CpG dinucleotide"
  misc_feature (61)..(61): /note="Nucleotide may be methylated to form 5-methylcytosine"
attacaggcatgagccactgcgccctgtcaataaacagttttaaagagaaaagaggaaagcgaaattctggagggtacaggtacaaacaatactgaaaacaagggctaacatttacctagcg

SEQ ID NO: 8446 - DNA, 122 bp, Homo sapiens
  misc_feature (61)..(62): /note="This region represents a CpG dinucleotide"
  misc_feature (61)..(61): /note="Nucleotide may be methylated to form 5-methylcytosine"
gagtgcaccagggggagaagcgctgcctggggaagggccagactctggggccaccaagctcgtggtggcgatggtgcgcgcccaagtgggccctggctcccgccagagccagggcacagtag

SEQ ID NO: 8447 - DNA, 122 bp, Homo sapiens
  misc_feature (61)..(62): /note="This region represents a CpG dinucleotide"
  misc_feature (61)..(61): /note="Nucleotide may be methylated to form 5-methylcytosine"
agcacaagggctgaattctgctcaagtgagtaaggcagacttcctactgcaaacctacagcgccccaaaaattatttttgggtctgacaagggtcttctctttgatgttgaaggaaaaggat

SEQ ID NO: 8448 - DNA, 122 bp, Homo sapiens
  misc_feature (61)..(62): /note="This region represents a CpG dinucleotide"
  misc_feature (61)..(61): /note="Nucleotide may be methylated to form 5-methylcytosine"
cagagggtgggtgctgtggataaaggcagggagaggcaggggagacagcagtctcctctacgccacatggagacaccccgttagtaccgaaatccagggcgaagagaggaactttaaataga

SEQ ID NO: 8449 - DNA, 122 bp, Homo sapiens
  misc_feature (61)..(62): /note="This region represents a CpG dinucleotide"
  misc_feature (61)..(61): /note="Nucleotide may be methylated to form 5-methylcytosine"
tgcctgtggcatttgccgatcttccctaacaggagtgtttccctgaactgtaaaacttcccgcaaattgcacacacagagagagaggacaggagacatagtgaccacggatacaaaggaaag

SEQ ID NO: 8450 - DNA, 122 bp, Homo sapiens
  misc_feature (61)..(62): /note="This region represents a CpG dinucleotide"
  misc_feature (61)..(61): /note="Nucleotide may be methylated to form 5-methylcytosine"
ccaactaaataactatactaagaaaagctatgtatgttcactaaataagaagataaatttcggaaaatcatctggctttaagataattccaaacaatgatcactgacttggaaggcagttaa

SEQ ID NO: 8451 - DNA, 122 bp, Homo sapiens
  misc_feature (61)..(62): /note="This region represents a CpG dinucleotide"
  misc_feature (61)..(61): /note="Nucleotide may be methylated to form 5-methylcytosine"
tttagaccagattgtttgttatgtatataactgtttgcatttcacttacttatcctcaatcgtcacatacctgggagggaaggaggctgcacagagcccccggagccccagccccacgtggt

SEQ ID NO: 8452 - DNA, 122 bp, Homo sapiens
  misc_feature (61)..(62): /note="This region represents a CpG dinucleotide"
  misc_feature (61)..(61): /note="Nucleotide may be methylated to form 5-methylcytosine"
ttcaggggacctgcctgtgaattctttgttccaaacccagggagccccctgtctccattgcgccctggcccacctccaggccgttctgccagcccaagctgctgctcacagaccagcatcgc

SEQ ID NO: 8453 - DNA, 122 bp, Homo sapiens
  misc_feature (61)..(62): /note="This region represents a CpG dinucleotide"
  misc_feature (61)..(61): /note="Nucleotide may be methylated to form 5-methylcytosine"
gacgccgaggggaaaatggatttaattgattcgttacctctggtattgtaatgcctgctgcgatgtttaaccgaggggggaggaaaaaaaaaaaaaaaaacccttacatttaactcctgtca

SEQ ID NO: 8454 - DNA, 122 bp, Homo sapiens
  misc_feature (61)..(62): /note="This region represents a CpG dinucleotide"
  misc_feature (61)..(61): /note="Nucleotide may be methylated to form 5-methylcytosine"
tgtaaataagtaatgccttagattgataaaagtcaatgctgggttgggtagaacatgtcacgcaccccacaggaagatgggttctgggtccaccaattctgttgttccaggaattgattcca

SEQ ID NO: 8455 - DNA, 122 bp, Homo sapiens
  misc_feature (61)..(62): /note="This region represents a CpG dinucleotide"
  misc_feature (61)..(61): /note="Nucleotide may be methylated to form 5-methylcytosine"
agttttctgtaaaacatgcatattataagcaaaacaacagcttctggcttctctcaaacccgtgaattctgaaagaaattttctccatctatgaagtagattacgtgatttcgtgggacttt

SEQ ID NO: 8456 - DNA, 122 bp, Homo sapiens
  misc_feature (61)..(62): /note="This region represents a CpG dinucleotide"
  misc_feature (61)..(61): /note="Nucleotide may be methylated to form 5-methylcytosine"
ttgccgatgatgtttcattgttcctttctgaaaccacatccgaacaaaagctgaatcatccgtggtgtgactcatcagattagtccgacaaaagaattaccaaaatagggctggagagaaga

SEQ ID NO: 8457 - DNA, 122 bp, Homo sapiens
  misc_feature (61)..(62): /note="This region represents a CpG dinucleotide"
  misc_feature (61)..(61): /note="Nucleotide may be methylated to form 5-methylcytosine"
ttgggaggcatttacagctcgaggacattgctctgtttcattgaaagtactcagcgctagcgtcttgggacatggctggaaggggtgttgagcccgattgggtaataacagatgtttcagtg

SEQ ID NO: 8458 - DNA, 122 bp, Homo sapiens
  misc_feature (61)..(62): /note="This region represents a CpG dinucleotide"
  misc_feature (61)..(61): /note="Nucleotide may be methylated to form 5-methylcytosine"
ttccagggtagacttgggatcagagcatacaggctgccaggatccaggcctcacagtgggcgtgggctgctggggaggcccaacccctggggctctatggatctgcctccatttccccaaag

SEQ ID NO: 8459 - DNA, 122 bp, Homo sapiens
  misc_feature (61)..(62): /note="This region represents a CpG dinucleotide"
  misc_feature (61)..(61): /note="Nucleotide may be methylated to form 5-methylcytosine"
attttcaatactatcaatagattggacatcagacttccaagaagcaagccgcctgaatgacgcacaccaaaacagttgattcctttgggctagggcaaggatgtcaatctaaatcaattagc

SEQ ID NO: 8460 - DNA, 122 bp, Homo sapiens
  misc_feature (61)..(62): /note="This region represents a CpG dinucleotide"
  misc_feature (61)..(61): /note="Nucleotide may be methylated to form 5-methylcytosine"
tgtggaagaaaaagggatgttagctaataggtactactacttactctgtagttttgtaaacgtcagaatacagccctgctttctgatacttcttctttgggggacgtgggggcttcttttcc

SEQ ID NO: 8461 - DNA, 122 bp, Homo sapiens
  misc_feature (61)..(62): /note="This region represents a CpG dinucleotide"
  misc_feature (61)..(61): /note="Nucleotide may be methylated to form 5-methylcytosine"
atggtagcaacgggaggttgtatccctagctgatgagttgtatgagcctctactacctggcgcacctccgcctgaagattgccagaattgcttgcctcatgacgtgagtcacaatggaaact

SEQ ID NO: 8462 - DNA, 122 bp, Homo sapiens
  misc_feature (61)..(62): /note="This region represents a CpG dinucleotide"
  misc_feature (61)..(61): /note="Nucleotide may be methylated to form 5-methylcytosine"
cgtcacatccgcctgctgctgcttctcaaccaagctgcccccactctcggcctctgtccccgatggccctctcgggctgtgcaggtcccacggacccaccgctgccttcacttcatcctcgc

SEQ ID NO: 8463 - DNA, 122 bp, Homo sapiens
  misc_feature (61)..(62): /note="This region represents a CpG dinucleotide"
  misc_feature (61)..(61): /note="Nucleotide may be methylated to form 5-methylcytosine"
caccagtgaccggggtacctattcgttgcatgtgaattattaacattttatttcttaaaacgccatggcttgaagctccgctttattaagaaacagggaatgtcagattaggcagttctccc

SEQ ID NO: 8464 - DNA, 122 bp, Homo sapiens
  misc_feature (61)..(62): /note="This region represents a CpG dinucleotide"
  misc_feature (61)..(61): /note="Nucleotide may be methylated to form 5-methylcytosine"
cattgtcccttctagagtgcaaggtccatccaagagcccctagagagggggatggagacacgctgcttactcaggaacccttcacaatctggaactggaaagagatttctagcccccacgag

SEQ ID NO: 8465 - DNA, 122 bp, Homo sapiens
  misc_feature (61)..(62): /note="This region represents a CpG dinucleotide"
  misc_feature (61)..(61): /note="Nucleotide may be methylated to form 5-methylcytosine"
tcctgaaccagactgtaaaaacagaggatttgagtagcacatttcacttgcatacagcagcgtttgttcgttttgagtgtttttgtacaggaaactgatctacagggtaacattcacacaca

SEQ ID NO: 8466 - DNA, 122 bp, Homo sapiens
  misc_feature (61)..(62): /note="This region represents a CpG dinucleotide"
  misc_feature (61)..(61): /note="Nucleotide may be methylated to form 5-methylcytosine"
tacacaagtcacctcgagtgataagatcagtacaggttctgctaagcagaccagcagctgcgtttgaagctcacggacagtctagcaagccacagaaatcttttgcacatgcattccagaag

SEQ ID NO: 8467 - DNA, 122 bp, Homo sapiens
  misc_feature (61)..(62): /note="This region represents a CpG dinucleotide"
  misc_feature (61)..(61): /note="Nucleotide may be methylated to form 5-methylcytosine"
agtacagtgacttgcacacaagctccaaggagccgcgcttatctcctctggccagcctggcgttgcaccgtttgtccgcctgctggggcctggtctgtgttcccgtgctcccataaactccc

SEQ ID NO: 8468 - DNA, 122 bp, Homo sapiens
  misc_feature (61)..(62): /note="This region represents a CpG dinucleotide"
  misc_feature (61)..(61): /note="Nucleotide may be methylated to form 5-methylcytosine"
tgccctcagaaaagggcttgagggagggagtccacccatttttgcccttctgctttgtgccgtgtgagaacacgacaaatctccctttaggaagatgtagtcttcaatgcgccatcttggaa

SEQ ID NO: 8469 - DNA, 122 bp, Homo sapiens
  misc_feature (61)..(62): /note="This region represents a CpG dinucleotide"
  misc_feature (61)..(61): /note="Nucleotide may be methylated to form 5-methylcytosine"
agtgagtaggggctgatatgggcagtcatgtaggcccatctaagccgtggatctgctgtacgttctttattcagtagtaagtttttaagtttggcaaagattttaaagttatgaactagcaa

SEQ ID NO: 8470 - DNA, 122 bp, Homo sapiens
  misc_feature (61)..(62): /note="This region represents a CpG dinucleotide"
  misc_feature (61)..(61): /note="Nucleotide may be methylated to form 5-methylcytosine"
gtccagctaccctgaggctgccatgttatgaggaagcccaagccacacagagaggtcatacgtaggtactctcgtcagcagtcctggtcttcaagtcatagcagcctagaagcctcaggatg

SEQ ID NO: 8471 - DNA, 122 bp, Homo sapiens
  misc_feature (61)..(62): /note="This region represents a CpG dinucleotide"
  misc_feature (61)..(61): /note="Nucleotide may be methylated to form 5-methylcytosine"
gcggctgcactgcacgcgcaactacatccacatgcacctgttcctgtccttcatgctgcgcgccgtgagcatcttcgtcaaggacgctgtgctctactctggcgccacgcttgatgaggctg

SEQ ID NO: 8472 - DNA, 122 bp, Homo sapiens
  misc_feature (61)..(62): /note="This region represents a CpG dinucleotide"
  misc_feature (61)..(61): /note="Nucleotide may be methylated to form 5-methylcytosine"
catgggtttctagaggttttaaatacttggcatgagggggaaaaaactcaaacctatacccgaaggtataaaacattaattctgtttgtctcctgttccagggacctgggtgcagccggatg

SEQ ID NO: 8473 - DNA, 122 bp, Homo sapiens
  misc_feature (61)..(62): /note="This region represents a CpG dinucleotide"
  misc_feature (61)..(61): /note="Nucleotide may be methylated to form 5-methylcytosine"
agaaggctttgcactcgtcacacctacgcatcttgtctccaggaggtaacagggagggtgcgggggaggctgctgagtggttttgaaattatacagagctggatttgaacccctttcagcga

SEQ ID NO: 8474 - DNA, 122 bp, Homo sapiens
  misc_feature (61)..(62): /note="This region represents a CpG dinucleotide"
  misc_feature (61)..(61): /note="Nucleotide may be methylated to form 5-methylcytosine"
aatgactgcatgcttggtctggaagacactttctttgcttgctttttcccttctccttttcgcactccccaaatatctgtttcatactcagaattataatggattgtaaaattgaatgggat

SEQ ID NO: 8475 - DNA, 122 bp, Homo sapiens
  misc_feature (61)..(62): /note="This region represents a CpG dinucleotide"
  misc_feature (61)..(61): /note="Nucleotide may be methylated to form 5-methylcytosine"
tgagcactttagacagaatgctcattttaaaagtactgtacagccaggtgtagtgactcacgcctgtaatcctaatgctttgggaggccgaggcagatgagtcatttgagcccaggagtttg

SEQ ID NO: 8476 - DNA, 122 bp, Homo sapiens
  misc_feature (61)..(62): /note="This region represents a CpG dinucleotide"
  misc_feature (61)..(61): /note="Nucleotide may be methylated to form 5-methylcytosine"
ttcacaaacttgcacagaatgtgaaagcagctcctctaggtacatgtggctaagctgcagcgctacccaggactgtagagagaaggaatgacaaccttgcatcgtccacagttccttgccag

SEQ ID NO: 8477 - DNA, 122 bp, Homo sapiens
  misc_feature (61)..(62): /note="This region represents a CpG dinucleotide"
  misc_feature (61)..(61): /note="Nucleotide may be methylated to form 5-methylcytosine"
ttgttaatagagtcaatgtctcttgtcttttttctgccaactggaataatccctactccacgtatgtgagctatatcctgtatcagaaatgtagaggaggcgtggaattggcaaagatttgt

SEQ ID NO: 8478 - DNA, 122 bp, Homo sapiens
  misc_feature (61)..(62): /note="This region represents a CpG dinucleotide"
  misc_feature (61)..(61): /note="Nucleotide may be methylated to form 5-methylcytosine"
tcaaattcctttgtgactcagagtaactgacattgttagtttagataaggcactataaaacggaaattagagcaagtagaggtcactttcaactttgacgcataaaaactgagcaaaattaa

SEQ ID NO: 8479 - DNA, 122 bp, Homo sapiens
  misc_feature (61)..(62): /note="This region represents a CpG dinucleotide"
  misc_feature (61)..(61): /note="Nucleotide may be methylated to form 5-methylcytosine"
gaagtgaaaagggagtgtaatacttttgatagatgtagagccattaacaaagtagattgacgggatttgataacagattgtgtatgtgattgaagaagaaggagaagtcaagaacccctaga

SEQ ID NO: 8480 - DNA, 122 bp, Homo sapiens
  misc_feature (61)..(62): /note="This region represents a CpG dinucleotide"
  misc_feature (61)..(61): /note="Nucleotide may be methylated to form 5-methylcytosine"
tgcttgttgttcttacccaagacccagtatctgccaaaacaaatgtatgtgagtgataaacgctgagaggaatgtctgttggaccacaggaaatttcctgttcaggaagagatcttgggaac

SEQ ID NO: 8481 - DNA, 122 bp, Homo sapiens
  misc_feature (61)..(62): /note="This region represents a CpG dinucleotide"
  misc_feature (61)..(61): /note="Nucleotide may be methylated to form 5-methylcytosine"
ctgcgcacccagcacagctgggagctgatcgaagcgcttggggccgtcagggggcgcgggcgtccctggtggggccagttgtacgctgcggcggtcggcggagatgagcaggcggcggtgtg

SEQ ID NO: 8482 - DNA, 122 bp, Homo sapiens
  misc_feature (61)..(62): /note="This region represents a CpG dinucleotide"
  misc_feature (61)..(61): /note="Nucleotide may be methylated to form 5-methylcytosine"
cccctgccacggacaggcactgggctatgctatgtgttactgccagacatttcttaactccgcctaaaataagcaaaaccacccctactatgaattgtttggtctggaatgtagctgcttct

SEQ ID NO: 8483 - DNA, 122 bp, Homo sapiens
  misc_feature (61)..(62): /note="This region represents a CpG dinucleotide"
  misc_feature (61)..(61): /note="Nucleotide may be methylated to form 5-methylcytosine"
agcctggatgagtattcacccttacttctctgaaacacaaaaaggtgactatatcccttacgtgtcttctggatcatagggtgttcatgagcattaagtgagatcatagatgcttctcaatt

SEQ ID NO: 8484 - DNA, 122 bp, Homo sapiens
  misc_feature (61)..(62): /note="This region represents a CpG dinucleotide"
  misc_feature (61)..(61): /note="Nucleotide may be methylated to form 5-methylcytosine"
agattaactcattcttgcaaagtgtcaagcattccccttccttctcggctggtggagtcacggagcacagggctctgcagaagaagtggcctgtggataatgagaaaagcaatggctttcta

SEQ ID NO: 8485 - DNA, 122 bp, Homo sapiens
  misc_feature (61)..(62): /note="This region represents a CpG dinucleotide"
  misc_feature (61)..(61): /note="Nucleotide may be methylated to form 5-methylcytosine"
atcctacagaacttttcattcctgccatcattggcctccacccaaaatgcacactgccatcgtcatctggtctcttacatcctcatcctcatgctactcagtttcctctcctatgactcatc

SEQ ID NO: 8486 - DNA, 122 bp, Homo sapiens
  misc_feature (61)..(62): /note="This region represents a CpG dinucleotide"
  misc_feature (61)..(61): /note="Nucleotide may be methylated to form 5-methylcytosine"
tgttatagccctgtgtttccttctctgtccttccatattctctataatgactactcagcacgattattcaattgcttagaaaagaaaaacacaggaaggacagagaagtggatattttagtc

SEQ ID NO: 8487 - DNA, 122 bp, Homo sapiens
  misc_feature (61)..(62): /note="This region represents a CpG dinucleotide"
  misc_feature (61)..(61): /note="Nucleotide may be methylated to form 5-methylcytosine"
ttttcttccataacatcctggcaatagtggcaggcagggagatgttcatattactgagcacggttttgacttgatattagaatatatatttatttgctcagcttttttttttctcatcccta

SEQ ID NO: 8488 - DNA, 122 bp, Homo sapiens
  misc_feature (61)..(62): /note="This region represents a CpG dinucleotide"
  misc_feature (61)..(61): /note="Nucleotide may be methylated to form 5-methylcytosine"
aaaaaaaaaaaagtgcttgtaaaaactggcaaaacatctgtacttgagtttacagcagtacgccaatatcaatttcctggttttgataacataccatgcatgcctatgtagcatatagcact

SEQ ID NO: 8489 - DNA, 122 bp, Homo sapiens
  misc_feature (61)..(62): /note="This region represents a CpG dinucleotide"
  misc_feature (61)..(61): /note="Nucleotide may be methylated to form 5-methylcytosine"
agctagacctagagctctggtcctggcttggcgaagaatgggagaggtcaaaggtgggagcgaggccgctgactggtgagtagagccccaccagagcagatgagctggaagtgcagcagagt

SEQ ID NO: 8490 - DNA, 122 bp, Homo sapiens
  misc_feature (61)..(62): /note="This region represents a CpG dinucleotide"
  misc_feature (61)..(61): /note="Nucleotide may be methylated to form 5-methylcytosine"
aaccttctgagttctcagtatgaactgccaggccctgtgtgatctgaaatttgtaaatctcgtcaacctctccaccctcatcctccatcaccttgtgttctgctagttcctcttcagccacc

SEQ ID NO: 8491 - DNA, 122 bp, Homo sapiens
  misc_feature (61)..(62): /note="This region represents a CpG dinucleotide"
  misc_feature (61)..(61): /note="Nucleotide may be methylated to form 5-methylcytosine"
tctaaagttttgtggctttatgattctacgaaatctgtaccacagattcttccctaactgcgcaaattctacatcacaaatcctagacggttagaaaacctctctctggcaatttcattaaa

SEQ ID NO: 8492 - DNA, 122 bp, Homo sapiens
  misc_feature (61)..(62): /note="This region represents a CpG dinucleotide"
  misc_feature (61)..(61): /note="Nucleotide may be methylated to form 5-methylcytosine"
tgcaggatcgcgatggcagtgatggaggcagacgtgtggagacacgggcactgacttctccgtctcagcccagagccacttatatgggcggccacgcagccctgggcggggctctgacagag

SEQ ID NO: 8493 - DNA, 122 bp, Homo sapiens
  misc_feature (61)..(62): /note="This region represents a CpG dinucleotide"
  misc_feature (61)..(61): /note="Nucleotide may be methylated to form 5-methylcytosine"
gtctgctggggtcacctgccgggcctgggcgccgggaccggcgtgggcgtgtgatcctggcggttccccgcgcctcgcagagtttaaatggctcctgcccggagtccctttcccctccccct

SEQ ID NO: 8494 - DNA, 122 bp, Homo sapiens
  misc_feature (61)..(62): /note="This region represents a CpG dinucleotide"
  misc_feature (61)..(61): /note="Nucleotide may be methylated to form 5-methylcytosine"
gctggtggaatggatttaaaaacaagatccaaccacatgctgcatacaaaaaacccacctcgctgataaagacatttacaaagtaaaggactggaaaaaaatattccatgcaaacagaaacc

SEQ ID NO: 8495 - DNA, 122 bp, Homo sapiens
  misc_feature (61)..(62): /note="This region represents a CpG dinucleotide"
  misc_feature (61)..(61): /note="Nucleotide may be methylated to form 5-methylcytosine"
atgcatctttttttacatcaaacaatactgatgggcttctagtgctaaagcagcaggccccgccccacctcgctccccaactccagccctccagccagttaaccatttgcaaactgcttact

SEQ ID NO: 8496 - DNA, 122 bp, Homo sapiens
  misc_feature (61)..(62): /note="This region represents a CpG dinucleotide"
  misc_feature (61)..(61): /note="Nucleotide may be methylated to form 5-methylcytosine"
aaaggaaggcttgacttcctgggtcatgggagtgaaggagtctgggtgacaggaagcaagcggcctgtcatgcctattgcctagctgccagattaaccttgccttgaaaataacgattgccc

SEQ ID NO: 8497 - DNA, 122 bp, Homo sapiens
  misc_feature (61)..(62): /note="This region represents a CpG dinucleotide"
  misc_feature (61)..(61): /note="Nucleotide may be methylated to form 5-methylcytosine"
ttaccatttacatgatttaaggccaaaatctgctctccttcctatgtcataacaaaaccgcgcaagactataacgtaagcctcactacccatatcctagagctttgcagcaaccagcaaacg

SEQ ID NO: 8498 - DNA, 122 bp, Homo sapiens
  misc_feature (61)..(62): /note="This region represents a CpG dinucleotide"
  misc_feature (61)..(61): /note="Nucleotide may be methylated to form 5-methylcytosine"
gggaactacaaactacttggtcaagttagtggtgtggtgctttcccccagtcagcagttccgtgttaacacagatgtttgtgcatcaccaacttcactgtacaatggtttcactactgccat

SEQ ID NO: 8499 - DNA, 122 bp, Homo sapiens
  misc_feature (61)..(62): /note="This region represents a CpG dinucleotide"
  misc_feature (61)..(61): /note="Nucleotide may be methylated to form 5-methylcytosine"
tccccagcacaccctcattacatgtgtctgtctggcctgatctgtgcatctgctcggagacgctcctgacaagtcgggaatttctctatttctccactggtgcaaagagcggatttctccct

SEQ ID NO: 8500 - DNA, 122 bp, Homo sapiens
  misc_feature (61)..(62): /note="This region represents a CpG dinucleotide"
  misc_feature (61)..(61): /note="Nucleotide may be methylated to form 5-methylcytosine"
aaaaagaatgcattctacgtccatgctaagccttctgcggtgaccaccgaggacagagcacgcaagtaggccactacctgggacaaaggccgcaggtaccaaatcatatctgagtctcatga

SEQ ID NO: 8501 - DNA, 122 bp, Homo sapiens
  misc_feature (61)..(62): /note="This region represents a CpG dinucleotide"
  misc_feature (61)..(61): /note="Nucleotide may be methylated to form 5-methylcytosine"
acattgatctcaaactgcttattccgtgaagtgaaaccaggctttctgccaccaatgtggcgtccctttttgcaattttagaaaaatattttttaaatcaaagatttggcattagccattat

SEQ ID NO: 8502 - DNA, 122 bp, Homo sapiens
  misc_feature (61)..(62): /note="This region represents a CpG dinucleotide"
  misc_feature (61)..(61): /note="Nucleotide may be methylated to form 5-methylcytosine"
atagataaaccaacctgacttgtggcaaagcacttatttgcatgactgcaatgggttccccgtggtcagagttccccgctacagctctggaaagtatttaagtctctggctgggagaaaact

SEQ ID NO: 8503 - DNA, 122 bp, Homo sapiens
  misc_feature (61)..(62): /note="This region represents a CpG dinucleotide"
  misc_feature (61)..(61): /note="Nucleotide may be methylated to form 5-methylcytosine"
agccatcttgtcgcccaagccagaaacccaaacatcaatcaatcctgtcccagactccctcgtgcaactgcaatcattgtaagatctacctgtttactctcaaaggggcctctctgcacccc

SEQ ID NO: 8504 - DNA, 122 bp, Homo sapiens
  misc_feature (61)..(62): /note="This region represents a CpG dinucleotide"
  misc_feature (61)..(61): /note="Nucleotide may be methylated to form 5-methylcytosine"
tccccactgtccttcaatcagtagtgttgcctcttcctggagacgtggttcttcttgccacgtgtgcttttccttctttacctgttacttccgttattgaataagttcatgcttatagacct

SEQ ID NO: 8505 - DNA, 122 bp, Homo sapiens
  misc_feature (61)..(62): /note="This region represents a CpG dinucleotide"
  misc_feature (61)..(61): /note="Nucleotide may be methylated to form 5-methylcytosine"
tggcttcctgcagggtggcagctacctcgcccacccatgggagcgtcttctgtacaggttcgattggcttcagctgttcaaacatcttctcttctgtggtgtctctttctagctttatccac

SEQ ID NO: 8506 - DNA, 122 bp, Homo sapiens
  misc_feature (61)..(62): /note="This region represents a CpG dinucleotide"
  misc_feature (61)..(61): /note="Nucleotide may be methylated to form 5-methylcytosine"
gaatgctggcccagaggaatcaaagtctcagagtgaacctcctcttgtctccattttctccgccatctcacacccggcattagaaattacaattcatcaatcagcgtgatgaacattagcat

SEQ ID NO: 8507 - DNA, 122 bp, Homo sapiens
  misc_feature (61)..(62): /note="This region represents a CpG dinucleotide"
  misc_feature (61)..(61): /note="Nucleotide may be methylated to form 5-methylcytosine"
aggggaggagcagcaaggaaagcaccattagcaaaggttgctgtgtggggtcctgctacacggctgttattaaggctaatacctgttccccttacagtgagatctttgttttgccttcacga

SEQ ID NO: 8508 - DNA, 122 bp, Homo sapiens
  misc_feature (61)..(62): /note="This region represents a CpG dinucleotide"
  misc_feature (61)..(61): /note="Nucleotide may be methylated to form 5-methylcytosine"
gattctacttttgcctgggtgatctaagtcagcttgacacaaagaagcagctttgatttacgacccagatgcagagccgcagttatggggtttctggactcagtatatctatcttgcagctt

SEQ ID NO: 8509 - DNA, 122 bp, Homo sapiens
  misc_feature (61)..(62): /note="This region represents a CpG dinucleotide"
  misc_feature (61)..(61): /note="Nucleotide may be methylated to form 5-methylcytosine"
gatgacttagtgattaatcagcatagggacaatgagcacattttctcaccttactaaatccgcaagggaagctgaggataacctggcaatgccagtttgccctagggacccccaggctctgc

SEQ ID NO: 8510 - DNA, 122 bp, Homo sapiens
  misc_feature (61)..(62): /note="This region represents a CpG dinucleotide"
  misc_feature (61)..(61): /note="Nucleotide may be methylated to form 5-methylcytosine"
ggcctctctaggagcaaggtcgctgcgcctcggtggtggtcacgcccggccagctgtggccgcatccctgtcggctagctcgggtctggcccacggtgactgttacccctggggaatggggc

SEQ ID NO: 8511 - DNA, 122 bp, Homo sapiens
  misc_feature (61)..(62): /note="This region represents a CpG dinucleotide"
  misc_feature (61)..(61): /note="Nucleotide may be methylated to form 5-methylcytosine"
ggaatctcgactttgcagcttgaagtcattttgttggcggcgctggttaccggctacctccgcgcgggcacttgattgtaacagaaagtagttccggcccatgttgtttcggccgaggagcc

SEQ ID NO: 8512 - DNA, 122 bp, Homo sapiens
  misc_feature (61)..(62): /note="This region represents a CpG dinucleotide"
  misc_feature (61)..(61): /note="Nucleotide may be methylated to form 5-methylcytosine"
ccacaggtgggctctggctggtggtggctggagaggcgtccagggggcgtagcgacctggcgcggtggcctggggtgggctgtggagcccttcctagcctgagacctgttgggcaccccctg

SEQ ID NO: 8513 - DNA, 122 bp, Homo sapiens
  misc_feature (61)..(62): /note="This region represents a CpG dinucleotide"
  misc_feature (61)..(61): /note="Nucleotide may be methylated to form 5-methylcytosine"
caatgtgataaaaccctgtctctactaaaaatacaaaaattatctgggtgtggtggagcgcgctggtaatcccagctactcaagaggctgcagctggagaatcgcttgactccgggagacgg

SEQ ID NO: 8514 - DNA, 122 bp, Homo sapiens
  misc_feature (61)..(62): /note="This region represents a CpG dinucleotide"
  misc_feature (61)..(61): /note="Nucleotide may be methylated to form 5-methylcytosine"
gttgtcagctaaagctcaaatttggcttggcaaccacacttcagttttgacacagtctttcgaggaattcctgaaattagtttccaaaactgtaaatttgctgaggctatttggctgtttaa

SEQ ID NO: 8515 - DNA, 122 bp, Homo sapiens
  misc_feature (61)..(62): /note="This region represents a CpG dinucleotide"
  misc_feature (61)..(61): /note="Nucleotide may be methylated to form 5-methylcytosine"
gcctggcctttttatttggtcagctaccaggctgttgtgttggttgtcatgggaatggatcgtaagtcctctatattagtttcctgttttgaaaatgaattatgacgaatgtagtagcttaa

SEQ ID NO: 8516 - DNA, 122 bp, Homo sapiens
  misc_feature (61)..(62): /note="This region represents a CpG dinucleotide"
  misc_feature (61)..(61): /note="Nucleotide may be methylated to form 5-methylcytosine"
tatcatacagtggatttctacagagaaataggaagttacggataaacgcaacagcctgaacgaatagcagctactgttaacttaggcacaaagaagaggacgctgtatgattccattttgat

SEQ ID NO: 8517 - DNA, 122 bp, Homo sapiens
  misc_feature (61)..(62): /note="This region represents a CpG dinucleotide"
  misc_feature (61)..(61): /note="Nucleotide may be methylated to form 5-methylcytosine"
caagtgtaagcatctgcagtgaccaaggggcgccatgcaggagacacatacagaagtgcgcgaccctgtaaccaggggccctgacccaacaagagagattgaggaaggcttcctggaggagg

SEQ ID NO: 8518 - DNA, 122 bp, Homo sapiens
  misc_feature (61)..(62): /note="This region represents a CpG dinucleotide"
  misc_feature (61)..(61): /note="Nucleotide may be methylated to form 5-methylcytosine"
ggattttttttctagttattttaattcagaatcaattaaagccttttctttttctctccacgcagaagagggttctgtgaaagcctggtgaattaccaccataaagtctaattattccttcc

SEQ ID NO: 8519 - DNA, 122 bp, Homo sapiens
  misc_feature (61)..(62): /note="This region represents a CpG dinucleotide"
  misc_feature (61)..(61): /note="Nucleotide may be methylated to form 5-methylcytosine"
acatgggaaggacaaacagaactgcctgtcccttgttcattttgatcttaaattaccatccgtagggttgaataatgcaataacacatacacagaggactttgtgagccgctctggactgga

SEQ ID NO: 8520 - DNA, 122 bp, Homo sapiens
  misc_feature (61)..(62): /note="This region represents a CpG dinucleotide"
  misc_feature (61)..(61): /note="Nucleotide may be methylated to form 5-methylcytosine"
tgtcagctgattggatggtgcccacccactttgggtgacggaggatcttccttattgagtcgactgattcaaatgtcaaatctcttctggaaacactttcacagacatgtgcagaaataata

SEQ ID NO: 8521 - DNA, 122 bp, Homo sapiens
  misc_feature (61)..(62): /note="This region represents a CpG dinucleotide"
  misc_feature (61)..(61): /note="Nucleotide may be methylated to form 5-methylcytosine"
ctgctctagccaccagcaaggttcccaagtgaaagtgagtcctctcaggagaaatgaaagcgctgtctctttaggtgcccactccttacccaccagcggagcaatgttttccaggctggcca

SEQ ID NO: 8522 - DNA, 122 bp, Homo sapiens
  misc_feature (61)..(62): /note="This region represents a CpG dinucleotide"
  misc_feature (61)..(61): /note="Nucleotide may be methylated to form 5-methylcytosine"
ctgacatgcttggggaattgggagtagacaatggaaactgtttctcttgcattgttttaccgagttgccaaagaatggctgcgcctcaccgatctcagcctggtaattatccaaatggctct

SEQ ID NO: 8523 - DNA, 122 bp, Homo sapiens
  misc_feature (61)..(62): /note="This region represents a CpG dinucleotide"
  misc_feature (61)..(61): /note="Nucleotide may be methylated to form 5-methylcytosine"
aaggttaaaaatctgggaatgacagttgtcaatttctagagacgtcttcagatggccacacgatgtcagtgtaatacaaaagaaagagcaaatgactctattgcagtggacttccattgcaa

SEQ ID NO: 8524 - DNA, 122 bp, Homo sapiens
  misc_feature (61)..(62): /note="This region represents a CpG dinucleotide"
  misc_feature (61)..(61): /note="Nucleotide may be methylated to form 5-methylcytosine"
ctagtacaagcattcaacagtaagctcccacgcaaagaatcagactgcagcaaatttcagcgctgcctcaggaacactgtccttggctcccacattgcaaagattttccattccctccacag

SEQ ID NO: 8525 - DNA, 122 bp, Homo sapiens
  misc_feature (61)..(62): /note="This region represents a CpG dinucleotide"
  misc_feature (61)..(61): /note="Nucleotide may be methylated to form 5-methylcytosine"
ctaatcaacctgtgtccgtcaaacacacatggctgtgctatgcatggcacaggggaatgacgtgatcagtagtaagaggaagaagacagactggaaaaacccaaaatgtgtgatatcttaat

SEQ ID NO: 8526 - DNA, 122 bp, Homo sapiens
  misc_feature (61)..(62): /note="This region represents a CpG dinucleotide"
  misc_feature (61)..(61): /note="Nucleotide may be methylated to form 5-methylcytosine"
tcttttctgcattaccaacagctaagaattttagccatgggaagaacttttctcattctccgtaaggccaaaaaggaaaaggcatttgcctgtgtttataattgttaacaagcttttcaacg

SEQ ID NO: 8527 - DNA, 122 bp, Homo sapiens
  misc_feature (61)..(62): /note="This region represents a CpG dinucleotide"
  misc_feature (61)..(61): /note="Nucleotide may be methylated to form 5-methylcytosine"
aagtgggggggggtgggtatgtcactagtttccagaggcagcctagtgtaagttgttcatcgtgatgatcctgagtcacccccacaaaaggctgaattaatcatacattgattcaccatgct

SEQ ID NO: 8528 - DNA, 122 bp, Homo sapiens
  misc_feature (61)..(62): /note="This region represents a CpG dinucleotide"
  misc_feature (61)..(61): /note="Nucleotide may be methylated to form 5-methylcytosine"
acaacaatgaaaaccgggctactgctgttgctaaggctgtagtagcaacatggtgtctttcgcaggtggacttctttgccccttaggtaaacagtcctgcaagccaggaatagaggctgtgt

SEQ ID NO: 8529 - DNA, 122 bp, Homo sapiens
  misc_feature (61)..(62): /note="This region represents a CpG dinucleotide"
  misc_feature (61)..(61): /note="Nucleotide may be methylated to form 5-methylcytosine"
cagcccttcctcgcaggcctggccggggcaacccagtgggcctgatgctgcctggcacctcgaggccccagagccagtgagcagacgctcgctcgcccatctccctagagtcccgctgtgca

SEQ ID NO: 8530 - DNA, 122 bp, Homo sapiens
  misc_feature (61)..(62): /note="This region represents a CpG dinucleotide"
  misc_feature (61)..(61): /note="Nucleotide may be methylated to form 5-methylcytosine"
atccaaagcgtgccatgggaccacaattgcacacgatcaatgagtctcacaaactgaccacggcttatctgaggcagtttagggttgtgcaagagcccagcttttaagggactgtgggttgg

SEQ ID NO: 8531 - DNA, 122 bp, Homo sapiens
  misc_feature (61)..(62): /note="This region represents a CpG dinucleotide"
  misc_feature (61)..(61): /note="Nucleotide may be methylated to form 5-methylcytosine"
ttccatacacggtgctggtggttcaatggatttaatttgtaagagcaaagccagtcttcacgtgcaaaagctttttctcatgtctgtgcactaaaaacagtatagagaaaaatgatactttt

SEQ ID NO: 8532 - DNA, 122 bp, Homo sapiens
  misc_feature (61)..(62): /note="This region represents a CpG dinucleotide"
  misc_feature (61)..(61): /note="Nucleotide may be methylated to form 5-methylcytosine"
aggtttttctttctcttgttgccctgtcaggtctaatttggcggcattatgctgagagggcgggcctgctcctgacaggagggggttaaatgagattgcaagctttggaggctgtcagcagc

SEQ ID NO: 8533 - DNA, 122 bp, Homo sapiens
  misc_feature (61)..(62): /note="This region represents a CpG dinucleotide"
  misc_feature (61)..(61): /note="Nucleotide may be methylated to form 5-methylcytosine"
tgctaaaatttcttatttaaaaaacgttagttttagtgggaggggagatgtcagtatttacgagagcgtttacaatggtgggcccaactaccaggagcacaagatgtaattattaagatggc

SEQ ID NO: 8534 - DNA, 122 bp, Homo sapiens
  misc_feature (61)..(62): /note="This region represents a CpG dinucleotide"
  misc_feature (61)..(61): /note="Nucleotide may be methylated to form 5-methylcytosine"
aactcccaacctcaagcgatccacccgcctcggcctcccaaagtgctgggattacagacgcgaaccaccgcgcccgactgtcctgtgttttaatgcttgaaaataatctgaatatggaaaat

SEQ ID NO: 8535 - DNA, 122 bp, Homo sapiens
  misc_feature (61)..(62): /note="This region represents a CpG dinucleotide"
  misc_feature (61)..(61): /note="Nucleotide may be methylated to form 5-methylcytosine"
ctgattcattttcatttccattgctaataattagcaatttatatttctgtcccttttggtcgaactcttaaatgcaaaatgccagctactgtttgaagtaaatattttgtaaaatgaaaaaa

SEQ ID NO: 8536 - DNA, 122 bp, Homo sapiens
  misc_feature (61)..(62): /note="This region represents a CpG dinucleotide"
  misc_feature (61)..(61): /note="Nucleotide may be methylated to form 5-methylcytosine"
tcaggcttatccaaacaaatttacttgagtgagtttaaacttctttaaataaaagggatacgaaaaaggtaaagctggcttagtttagccattcgtcagagatataccagtattacagaatt

SEQ ID NO: 8537 - DNA, 122 bp, Homo sapiens
  misc_feature (61)..(62): /note="This region represents a CpG dinucleotide"
  misc_feature (61)..(61): /note="Nucleotide may be methylated to form 5-methylcytosine"
aaggcaacgtgtgtaggctctagttagagcactttggacacctagtggtgattattcagacgatggacacattccagagtctaaggttcctcgtctgcaaaatggggatactaggacctcct

SEQ ID NO: 8538 - DNA, 122 bp, Homo sapiens
  misc_feature (61)..(62): /note="This region represents a CpG dinucleotide"
  misc_feature (61)..(61): /note="Nucleotide may be methylated to form 5-methylcytosine"
gggtctttaatttgtgcaactccaaacaaaatctgttatgcttgagtgcacccatgggcacgtatgtgtttgagaacacagctgtgtttaagagaacagtatggtacaaaactagaattgta

SEQ ID NO: 8539 - DNA, 122 bp, Homo sapiens
  misc_feature (61)..(62): /note="This region represents a CpG dinucleotide"
  misc_feature (61)..(61): /note="Nucleotide may be methylated to form 5-methylcytosine"
aggcatggataaatctttgctaacagtcgtaagagtttacctcctgtgaggacctggctacgtgctgagcaccctgcttggtgctttgtacattgtgactcattcagttgctcaaacaacac

SEQ ID NO: 8540 - DNA, 122 bp, Homo sapiens
  misc_feature (61)..(62): /note="This region represents a CpG dinucleotide"
  misc_feature (61)..(61): /note="Nucleotide may be methylated to form 5-methylcytosine"
tgcccagtgcacaggagacgctcagaaaacgctagtttcccaacacccagtgaccgcccccgctgtttggaatcaaagtcagagaagccaaaagacccagagtcccgctgcttgcaaagccc

SEQ ID NO: 8541 - DNA, 122 bp, Homo sapiens
  misc_feature (61)..(62): /note="This region represents a CpG dinucleotide"
  misc_feature (61)..(61): /note="Nucleotide may be methylated to form 5-methylcytosine"
cattgcaagtaagaattgatcaacattaagaaacttcttttcaaatcatgcaaagttatacgacttaactgattgctctggttgaggaagtagaacagaattgttgtcttagacttattctt

SEQ ID NO: 8542 - DNA, 122 bp, Homo sapiens
  misc_feature (61)..(62): /note="This region represents a CpG dinucleotide"
  misc_feature (61)..(61): /note="Nucleotide may be methylated to form 5-methylcytosine"
tccacactgtgactgtaaaattgtgtgaatgttatatgcattttacacagctaaaatcagcgtgtatacgttcatcttccaccttcccttatttgtcacgactttacaacgccaccgagttg

SEQ ID NO: 8543 - DNA, 122 bp, Homo sapiens
  misc_feature (61)..(62): /note="This region represents a CpG dinucleotide"
  misc_feature (61)..(61): /note="Nucleotide may be methylated to form 5-methylcytosine"
aataggtaagtgagacttaaaaaaaacaaacacaaaaacaaaggaggagctgctgttccacgtagcagtgctttacctgtagctgctcacttgctccaggtttaattctgacatcaggggaa

SEQ ID NO: 8544 - DNA, 122 bp, Homo sapiens
  misc_feature (61)..(62): /note="This region represents a CpG dinucleotide"
  misc_feature (61)..(61): /note="Nucleotide may be methylated to form 5-methylcytosine"
aataccactttcttccttcttttcaagaacgacttcttgcataagtcatctgcccttaggcgctctttccttataaatcaattctccttcattactatcatgatctggcctctgttcacatc

SEQ ID NO: 8545 - DNA, 122 bp, Homo sapiens
  misc_feature (61)..(62): /note="This region represents a CpG dinucleotide"
  misc_feature (61)..(61): /note="Nucleotide may be methylated to form 5-methylcytosine"
aaggtataattgccctgctgatgctgtgcacagggcttggctcagttcagtgtggcttgacgtggcaggcacactggcacccagagaaagagagagaaccagagctgtctgtcttgcagatg

SEQ ID NO: 8546 - DNA, 122 bp, Homo sapiens
  misc_feature (61)..(62): /note="This region represents a CpG dinucleotide"
  misc_feature (61)..(61): /note="Nucleotide may be methylated to form 5-methylcytosine"
gcacagttatcttataatattcctgtataatggttgccaaggggatgtttaatgttgttacgcaggaagctgtgctgaacaagagtcttttgctttcagatcagactctgggcaggaagtga

SEQ ID NO: 8547 - DNA, 122 bp, Homo sapiens
  misc_feature (61)..(62): /note="This region represents a CpG dinucleotide"
  misc_feature (61)..(61): /note="Nucleotide may be methylated to form 5-methylcytosine"
aaggaaaggaaagaaactaagcacagggctttgcctggcaatgcagtgctggcataccatcgtgaaacccaacactggggaagactcagtggcccctgacccaggctggtccctgtggacag

SEQ ID NO: 8548 - DNA, 122 bp, Homo sapiens
  misc_feature (61)..(62): /note="This region represents a CpG dinucleotide"
  misc_feature (61)..(61): /note="Nucleotide may be methylated to form 5-methylcytosine"
gttaaaatctttctttctttctttttttcccctgtagagaggaggattcatgttcttgcccgggatagtctcgaactcctggactcaagaaatcctcccacctgagcctcctaaagcattgg

SEQ ID NO: 8549 - DNA, 122 bp, Homo sapiens
  misc_feature (61)..(62): /note="This region represents a CpG dinucleotide"
  misc_feature (61)..(61): /note="Nucleotide may be methylated to form 5-methylcytosine"
tggatcaccctaataaacacaggatctgctactggtatttgtttcctgtcctgactgcatcgaactcatgtccaaggtcagaggatatccggagaactgtgaaggacaactatgaacgtggt

SEQ ID NO: 8550 - DNA, 122 bp, Homo sapiens
  misc_feature (61)..(62): /note="This region represents a CpG dinucleotide"
  misc_feature (61)..(61): /note="Nucleotide may be methylated to form 5-methylcytosine"
agggataagggggaaagcaaatcttttaggaggctactgcagtaatcaggcactaggtggcgctatcggtgggggcgctgaggagtggttagattctgggtatacagtatttagaaagaggc

SEQ ID NO: 8551 - DNA, 122 bp, Homo sapiens
  misc_feature (61)..(62): /note="This region represents a CpG dinucleotide"
  misc_feature (61)..(61): /note="Nucleotide may be methylated to form 5-methylcytosine"
taggagatttgcttagagctgatgacttatgcctttcttgcgagttatgcagttagcaagcgactggggaatcagtcagcaagcagaaagaagctaattgaatccagtgtcttcccctttct

SEQ ID NO: 8552 - DNA, 122 bp, Homo sapiens
  misc_feature (61)..(62): /note="This region represents a CpG dinucleotide"
  misc_feature (61)..(61): /note="Nucleotide may be methylated to form 5-methylcytosine"
ttgagcaggattgaaagaaatatgaataactaggtgtaagtaggaattttcataaagggacgatttacagagctgtggcagggttaaaaggaccaacaaggaatgttgaagcactcagggac

SEQ ID NO: 8553 - DNA, 122 bp, Homo sapiens
  misc_feature (61)..(62): /note="This region represents a CpG dinucleotide"
  misc_feature (61)..(61): /note="Nucleotide may be methylated to form 5-methylcytosine"
ggtactggaccaatccctggatcgagaaaaggtgtctgagtttagtttaacgctaacagccgtggatggcgggtctccgcccaggtctgggactacactgattaacgttgtggtcctggaca

SEQ ID NO: 8554 - DNA, 122 bp, Homo sapiens
  misc_feature (61)..(62): /note="This region represents a CpG dinucleotide"
  misc_feature (61)..(61): /note="Nucleotide may be methylated to form 5-methylcytosine"
tgctcctaaaaaaaaccttcctgggctgcccactgtggagtctgggtctcggagacaggacgggggccaccccagcctctgcccaggccagctgggactctgtgcacaaagaacccaggagc

SEQ ID NO: 8555 - DNA, 122 bp, Homo sapiens
  misc_feature (61)..(62): /note="This region represents a CpG dinucleotide"
  misc_feature (61)..(61): /note="Nucleotide may be methylated to form 5-methylcytosine"
caactgcatgtttctgggccattcccttgttggtgaaatggtggcattggaccagattttcgtttttcaaactgtgctgtggaaggcatcagatacttccagatcttccaagggagtggaga

SEQ ID NO: 8556 - DNA, 122 bp, Homo sapiens
  misc_feature (61)..(62): /note="This region represents a CpG dinucleotide"
  misc_feature (61)..(61): /note="Nucleotide may be methylated to form 5-methylcytosine"
tctgaagaaatagttctggcacgattcctgacccctagatcataactaatttggtgtgttcgtgaaacaaacaggttccacagcaacttcctgctccccagatctcagtcaaggtgctatga

SEQ ID NO: 8557 - DNA, 122 bp, Homo sapiens
  misc_feature (61)..(62): /note="This region represents a CpG dinucleotide"
  misc_feature (61)..(61): /note="Nucleotide may be methylated to form 5-methylcytosine"
agctaataacacaaatgaagtgccccttcctgcagggttatagatcttcaaattaaagatcgttcctgtaccctgcaccacccttcagccactctaattaatcaattcacagctttccgtcg

SEQ ID NO: 8558 - DNA, 122 bp, Homo sapiens
  misc_feature (61)..(62): /note="This region represents a CpG dinucleotide"
  misc_feature (61)..(61): /note="Nucleotide may be methylated to form 5-methylcytosine"
tgccctagaggtggtgactcctaggattgacatggactgcttccagaaaagtgcttgaggcgctgcctattatgtgtatgttgttgatgtgaaaatagagaatgtgaaccatgagggaggag

SEQ ID NO: 8559 - DNA, 122 bp, Homo sapiens
  misc_feature (61)..(62): /note="This region represents a CpG dinucleotide"
  misc_feature (61)..(61): /note="Nucleotide may be methylated to form 5-methylcytosine"
agattctgtttcgtcttcttctattgagagattgacctcttgagtgatttgtgtgctttccggcaaatgatggagacgcgtaaaccggcggaacggctggccttgccatactcgctgcgcac

SEQ ID NO: 8560 - DNA, 122 bp, Homo sapiens
  misc_feature (61)..(62): /note="This region represents a CpG dinucleotide"
  misc_feature (61)..(61): /note="Nucleotide may be methylated to form 5-methylcytosine"
gctcgctgcgccgccgctggagaagctctgggtcggggttggggtccgcgcccggggcggcgctggagtctggatactagaagctgcggttgctcccaggctcgggaactgagacgcagaac

SEQ ID NO: 8561 - DNA, 122 bp, Homo sapiens
  misc_feature (61)..(62): /note="This region represents a CpG dinucleotide"
  misc_feature (61)..(61): /note="Nucleotide may be methylated to form 5-methylcytosine"
agtcacttaacttctctagatgccaatctccttctcaataaagaaatcattggccgggtacggtggctcatgcctgtaatcccagcactttgggagcctgaggcaggcagatcacttgaggc

SEQ ID NO: 8562 - DNA, 122 bp, Homo sapiens
  misc_feature (61)..(62): /note="This region represents a CpG dinucleotide"
  misc_feature (61)..(61): /note="Nucleotide may be methylated to form 5-methylcytosine"
tgtgtaaagatttaaatcataatgagctactcctaggcaagcagaataatgcaacataggcgtttccagtggaaatctgctaaccttatactattgaggaaaacccaacatctgcattgaaa

SEQ ID NO: 8563 - DNA, 122 bp, Homo sapiens
  misc_feature (61)..(62): /note="This region represents a CpG dinucleotide"
  misc_feature (61)..(61): /note="Nucleotide may be methylated to form 5-methylcytosine"
ttaagttagtgatgcaaagtggaataaaatctacttgtcatttattgactcccaagccagcgttcctttaacttcacaaggattgttgcaagaaagtactcagtcctggggctagggaggag

SEQ ID NO: 8564 - DNA, 122 bp, Homo sapiens
  misc_feature (61)..(62): /note="This region represents a CpG dinucleotide"
  misc_feature (61)..(61): /note="Nucleotide may be methylated to form 5-methylcytosine"
tttgtggttttcctgacctgatgcactgtgttcacggtctgtgcctttacatgcacacttcgctttgcctagaaggcatttctcaaggcaaactcctactcacacatcaacacctagctcag

SEQ ID NO: 8565 - DNA, 122 bp, Homo sapiens
  misc_feature (61)..(62): /note="This region represents a CpG dinucleotide"
  misc_feature (61)..(61): /note="Nucleotide may be methylated to form 5-methylcytosine"
ttctttgctgttaccacacactgaaacatacaatacctttattatttagtgaatgccacacgactgaaaagtcctggaaacaagacaaagttaaaatggtaaaatttcattcaaccaaaaat

SEQ ID NO: 8566 - DNA, 122 bp, Homo sapiens
  misc_feature (61)..(62): /note="This region represents a CpG dinucleotide"
  misc_feature (61)..(61): /note="Nucleotide may be methylated to form 5-methylcytosine"
catcgctcaggcagaagcagatctctcaaatcttttctccatgtttcctgtcttttcactcgtggtttccacttcctcatattttgattctctcatgcactagttcctcctttttattcaga

SEQ ID NO: 8567 - DNA, 122 bp, Homo sapiens
  misc_feature (61)..(62): /note="This region represents a CpG dinucleotide"
  misc_feature (61)..(61): /note="Nucleotide may be methylated to form 5-methylcytosine"
ccattctagtgactaacacagagcataggactttaatgattctctaacgttaggaggcatcggaatcacttggaggaactgttaaagcacagattgctaggccccatcctctgagtttcaga

SEQ ID NO: 8568 - DNA, 122 bp, Homo sapiens
  misc_feature (61)..(62): /note="This region represents a CpG dinucleotide"
  misc_feature (61)..(61): /note="Nucleotide may be methylated to form 5-methylcytosine"
tgtggctggcatgttgagccgccgtccagagatcagctggcggctgctgagcaaacagcacgagctaatcagcaaaaggtcacgccggctccccgagtccccgcatttgaagtcatgcctca

SEQ ID NO: 8569 - DNA, 122 bp, Homo sapiens
  misc_feature (61)..(62): /note="This region represents a CpG dinucleotide"
  misc_feature (61)..(61): /note="Nucleotide may be methylated to form 5-methylcytosine"
ttgtttgtgaatacttactgtttgccatagtctgcttctggtgatgaagaataagaatgacgagtccttaggtagggcaagttgatagttatcttctggaaaaggaggcttcctggggagtc

SEQ ID NO: 8570 - DNA, 122 bp, Homo sapiens
  misc_feature (61)..(62): /note="This region represents a CpG dinucleotide"
  misc_feature (61)..(61): /note="Nucleotide may be methylated to form 5-methylcytosine"
gtgagccagcggtggcctctcccttctttcatacacaaaaagtagcatactcttgtcaggcgcggtggctcacgcctgggcaacaagagtgaaactctgtctcaggaaaaaaaaaaaaagta

SEQ ID NO: 8571 - DNA, 122 bp, Homo sapiens
  misc_feature (61)..(62): /note="This region represents a CpG dinucleotide"
  misc_feature (61)..(61): /note="Nucleotide may be methylated to form 5-methylcytosine"
ttaacattccaagagtcaggagggcagattaaaataggattttgcttgcaataacatttgcggtctgttcagcattgttgagtgcttaatctagccaggaagtctgatttacagggagctac

SEQ ID NO: 8572 - DNA, 122 bp, Homo sapiens
  misc_feature (61)..(62): /note="This region represents a CpG dinucleotide"
  misc_feature (61)..(61): /note="Nucleotide may be methylated to form 5-methylcytosine"
ctgttagaatgcatggccatggacgacttggtgaccagtggcctgtaaaatgccacagaacgccctggcagctaatttttaattcccaggaagttgcttgcaactttgcaaagataaggcaa

SEQ ID NO: 8573 - DNA, 122 bp, Homo sapiens
  misc_feature (61)..(62): /note="This region represents a CpG dinucleotide"
  misc_feature (61)..(61): /note="Nucleotide may be methylated to form 5-methylcytosine"
atactctcatctttccaatggtcatcacaataattgcttaactaagtcagtgttatggcacgagtgtttgtatattgttctaaaatctttccattggctgtgactctagtgtattaaccatt

SEQ ID NO: 8574 - DNA, 122 bp, Homo sapiens
  misc_feature (61)..(62): /note="This region represents a CpG dinucleotide"
  misc_feature (61)..(61): /note="Nucleotide may be methylated to form 5-methylcytosine"
atctgcaggcttgcatctgtaaattaagtttgtatgctgaattcttcaaacaatcttgaccgtaatacaaagctgctgttaaatatggtgacatgaaccttggtctaagggtggaacactaa

SEQ ID NO: 8575 - DNA, 122 bp, Homo sapiens
  misc_feature (61)..(62): /note="This region represents a CpG dinucleotide"
  misc_feature (61)..(61): /note="Nucleotide may be methylated to form 5-methylcytosine"
aagccaccacattgctggtttagattactgcaacaggtttttctcctgtcactcccacatcgcaccaatccatactctgttccacagcaagaatcatctttctaagcgacaatctgattatg

SEQ ID NO: 8576 - DNA, 122 bp, Homo sapiens
  misc_feature (61)..(62): /note="This region represents a CpG dinucleotide"
  misc_feature (61)..(61): /note="Nucleotide may be methylated to form 5-methylcytosine"
ctagacagtcagcctggagttgttaattttttcaatgatagatcttcctgctagattatacgttctttgctgcagagactgccttaggcttgtttgtatcctttgtgcgcttagcaagcttt

SEQ ID NO: 8577 - DNA, 122 bp, Homo sapiens
  misc_feature (61)..(62): /note="This region represents a CpG dinucleotide"
  misc_feature (61)..(61): /note="Nucleotide may be methylated to form 5-methylcytosine"
ctttattttttttttttttattttaccagtgacaaggaccgtggacataatttgtaccttcggtgcagcctctcttttcattgagctgcagcagcattgagtgctaaatgagtcccttgtca

SEQ ID NO: 8578 - DNA, 122 bp, Homo sapiens
  misc_feature (61)..(62): /note="This region represents a CpG dinucleotide"
  misc_feature (61)..(61): /note="Nucleotide may be methylated to form 5-methylcytosine"
gctgactcctggggccaaggtggagacccctggtcttcagggggccctgccaggacgccccgcattcatgttgggcggggcctgccacctgctatcagatctcgggtggggctgccaggacg

SEQ ID NO: 8579 - DNA, 122 bp, Homo sapiens
  misc_feature (61)..(62): /note="This region represents a CpG dinucleotide"
  misc_feature (61)..(61): /note="Nucleotide may be methylated to form 5-methylcytosine"
tcagctgaccctagagtgtggtcaagtccatacttactaatggtgagtagaagccttacacgtagataaagacatggacatgatgtagactgtgggccatcaactccaagccccattttaaa

SEQ ID NO: 8580 - DNA, 122 bp, Homo sapiens
  misc_feature (61)..(62): /note="This region represents a CpG dinucleotide"
  misc_feature (61)..(61): /note="Nucleotide may be methylated to form 5-methylcytosine"
cccagcagctgactttttatcagcttggctggattagaatgagctgaaagaagagccatacgccggtgttccttggttacatggtgccctgtagttgatatttatagcaattaaaaagcatt

SEQ ID NO: 8581 - DNA, 122 bp, Homo sapiens
  misc_feature (61)..(62): /note="This region represents a CpG dinucleotide"
  misc_feature (61)..(61): /note="Nucleotide may be methylated to form 5-methylcytosine"
tgcaccttccacagagccgacactccccgtctctctcagctcacactcctcacccctcctcgggctgctaccctccaggaaggtgcttcccgcacctgtaggaagcttcctcccccagggag

SEQ ID NO: 8582 - DNA, 122 bp, Homo sapiens
  misc_feature (61)..(62): /note="This region represents a CpG dinucleotide"
  misc_feature (61)..(61): /note="Nucleotide may be methylated to form 5-methylcytosine"
atgcttcctagaggcagatttcaacatcccattgcacaattccattcctcctcctcatatcgctttctgccttctttccccacttccctttggagatgaacttggcatgaaaggagagaggc

SEQ ID NO: 8583 - DNA, 122 bp, Homo sapiens
  misc_feature (61)..(62): /note="This region represents a CpG dinucleotide"
  misc_feature (61)..(61): /note="Nucleotide may be methylated to form 5-methylcytosine"
aatgaaaaaaaaattccctaaaataacccaaggtaattataaccgtgctgttgacactaacgattaataattgatcaggagtcacacacaataaattgtcaatttatctccccacaaaaatg

SEQ ID NO: 8584 - DNA, 122 bp, Homo sapiens
  misc_feature (61)..(62): /note="This region represents a CpG dinucleotide"
  misc_feature (61)..(61): /note="Nucleotide may be methylated to form 5-methylcytosine"
gaagggtgtagctctgaggtgacccacgaaccacttttgatgggtggggcagtggaccttcgttgtctgaggcctctcccaagtcacccctttccccctccttctggctctgggcccggggc

SEQ ID NO: 8585 - DNA, 122 bp, Homo sapiens
  misc_feature (61)..(62): /note="This region represents a CpG dinucleotide"
  misc_feature (61)..(61): /note="Nucleotide may be methylated to form 5-methylcytosine"
ctgtctcaaaaaaaaaaaaaaaaaaaagtgagactgggagcagaaagcaagcagtactcacgccacactgctgggcagtggtgcttaaagaaagcgaaagaacaaacaaatgaaataccagc

SEQ ID NO: 8586 - DNA, 122 bp, Homo sapiens
  misc_feature (61)..(62): /note="This region represents a CpG dinucleotide"
  misc_feature (61)..(61): /note="Nucleotide may be methylated to form 5-methylcytosine"
tcactgtttctctacatacttcattttaatagatattagcactttatctccttcccgaatcgttgtaaaaaacctttacacagacccagcaagtttcagagtttacacacaaaacatcttac

SEQ ID NO: 8587 - DNA, 122 bp, Homo sapiens
  misc_feature (61)..(62): /note="This region represents a CpG dinucleotide"
  misc_feature (61)..(61): /note="Nucleotide may be methylated to form 5-methylcytosine"
ttgagtgtatgacggctctatgaactacttaactgtagctcagtttatcatcaacctgggcgtttagaagattagaccaagatcaagacattagaagtggttttcataatggatttataagg

SEQ ID NO: 8588 - DNA, 122 bp, Homo sapiens
  misc_feature (61)..(62): /note="This region represents a CpG dinucleotide"
  misc_feature (61)..(61): /note="Nucleotide may be methylated to form 5-methylcytosine"
gtcactcctttggagcctgggaaggtccccacatgcattgtctaaactttgggatgaatacgcacagctcttaaatgggagcatattattataggtacctgcctacacaaagggtcctccct

SEQ ID NO: 8589 - DNA, 122 bp, Homo sapiens
  misc_feature (61)..(62): /note="This region represents a CpG dinucleotide"
  misc_feature (61)..(61): /note="Nucleotide may be methylated to form 5-methylcytosine"
caaaaccttggtggggactggggtaccagggagtctgaggctctaatcagtatttcttgccgtcagtaggcaggatgtctaggagctgcctgaggtcagggtcaaggcctgatgttgtgagg

SEQ ID NO: 8590 - DNA, 122 bp, Homo sapiens
  misc_feature (61)..(62): /note="This region represents a CpG dinucleotide"
  misc_feature (61)..(61): /note="Nucleotide may be methylated to form 5-methylcytosine"
aaatgaagatttctgtttttcctgatcctgctttagtaactagcattgagagattaaaaacgtgcattcccaaactttcaagaatctcaaacttctggcagaagaacacagtacttggatat

SEQ ID NO: 8591 - DNA, 122 bp, Homo sapiens
  misc_feature (61)..(62): /note="This region represents a CpG dinucleotide"
  misc_feature (61)..(61): /note="Nucleotide may be methylated to form 5-methylcytosine"
attctgatgcctgctcaagtttagagctgctgggcggtaagcctgggacacggcagttctcgttagtgtgtaatgagagtgatgagggaatcaattagccaattactctaccttggaaaaga

SEQ ID NO: 8592 - DNA, 122 bp, Homo sapiens
  misc_feature (61)..(62): /note="This region represents a CpG dinucleotide"
  misc_feature (61)..(61): /note="Nucleotide may be methylated to form 5-methylcytosine"
tcttgctttgctaagttgtgcaataactgtgattgcacccttatttgatgatgtgtgtttcggtaaccatggagcgagtgctgctttgccaatcctaggtcaacactgacccctttccaagg

SEQ ID NO: 8593 - DNA, 122 bp, Homo sapiens
  misc_feature (61)..(62): /note="This region represents a CpG dinucleotide"
  misc_feature (61)..(61): /note="Nucleotide may be methylated to form 5-methylcytosine"
agctcttgaaaaaaacagttgaggtatttcacataaaaaactgaacaatcaggttagccacgcccaaaatgatgatgaaaacgtggaagattaatttaggccatgtcagacgctcttcttgg

SEQ ID NO: 8594 - DNA, 122 bp, Homo sapiens
  misc_feature (61)..(62): /note="This region represents a CpG dinucleotide"
  misc_feature (61)..(61): /note="Nucleotide may be methylated to form 5-methylcytosine"
gtgaacccagaaccacaagtaacagataatgtctctcctctttattctcccagtcattgtcgttgctctgtaacacacaatgcccactgtcatgctgacaataatgtcaacagtctttgttt

SEQ ID NO: 8595 - DNA, 122 bp, Homo sapiens
  misc_feature (61)..(62): /note="This region represents a CpG dinucleotide"
  misc_feature (61)..(61): /note="Nucleotide may be methylated to form 5-methylcytosine"
ggagtgtggagtttttcatcttccaattggagaagactgttttgcaattttgagtacctccgccagtgaagaactgtgcaaaaggccgattcctagttgtgccctagtaaatgttttcagaa

SEQ ID NO: 8596 - DNA, 122 bp, Homo sapiens
  misc_feature (61)..(62): /note="This region represents a CpG dinucleotide"
  misc_feature (61)..(61): /note="Nucleotide may be methylated to form 5-methylcytosine"
aaacctggtcaacaacatatgggatgtcaccagattcagactcagaagtttccataatgccgttgccaacagctagacacagtgagtcatgggggccccagtaaccaaactctcatcacaca

SEQ ID NO: 8597 - DNA, 122 bp, Homo sapiens
  misc_feature (61)..(62): /note="This region represents a CpG dinucleotide"
  misc_feature (61)..(61): /note="Nucleotide may be methylated to form 5-methylcytosine"
tgttctgctgcagtcaatagaagtttcctctgacacatacttggtaacgctgttacccttcgtttgcctttgtgcatacctaagacatcttccaggacttttgattctcttgataatgagtc

SEQ ID NO: 8598 - DNA, 122 bp, Homo sapiens
  misc_feature (61)..(62): /note="This region represents a CpG dinucleotide"
  misc_feature (61)..(61): /note="Nucleotide may be methylated to form 5-methylcytosine"
caatttactaccatgatggaagccggcttgtggataaaggtaacacaagcatgataaaaacgtcaacatgatttaagccaaatttgagtcagaatttctgtttaccgaattccaaatgatac

SEQ ID NO: 8599 - DNA, 122 bp, Homo sapiens
  misc_feature (61)..(62): /note="This region represents a CpG dinucleotide"
  misc_feature (61)..(61): /note="Nucleotide may be methylated to form 5-methylcytosine"
atgcttccctagaggtttgagcagcggggcactgaagatgcgagccccacccccatcacacgccctgagagggggattcccatttcagaataagaagttgactcacaccattgattaattcg

SEQ ID NO: 8600 - DNA, 122 bp, Homo sapiens
  misc_feature (61)..(62): /note="This region represents a CpG dinucleotide"
  misc_feature (61)..(61): /note="Nucleotide may be methylated to form 5-methylcytosine"
agccaatctggagttttgaaaattaaaccacaaaaatgcaaaaggataaagcctgacgtacgtatatgattgcaagaggtcatgtatccaggtcaagacaaagtcccctgggaataagatag

SEQ ID NO: 8601 - DNA, 122 bp, Homo sapiens
  misc_feature (61)..(62): /note="This region represents a CpG dinucleotide"
  misc_feature (61)..(61): /note="Nucleotide may be methylated to form 5-methylcytosine"
cctttgtgaagagaaaacccttatctaggacatccacagggtagaggttgggtgtgtgtacgggagtgtctgaggcccagtgtgttttttagggttaccccatgtaaagcacttaccgctgt

SEQ ID NO: 8602 - DNA, 122 bp, Homo sapiens
  misc_feature (61)..(62): /note="This region represents a CpG dinucleotide"
  misc_feature (61)..(61): /note="Nucleotide may be methylated to form 5-methylcytosine"
tactatatactatataccatacttactatagtacttactatagagcacagtacagaagaacgggctgtataaatcagcatttggcacttgtgtggtacatatatgagggagtggtgcctggc

SEQ ID NO: 8603 - DNA, 122 bp, Homo sapiens
  misc_feature (61)..(62): /note="This region represents a CpG dinucleotide"
  misc_feature (61)..(61): /note="Nucleotide may be methylated to form 5-methylcytosine"
tgtggaccttccattgagaccagtcatcagatggctcaatcacctccataggtgcttctacgtaagtaccagagagtcaagccagaccacagcgctctgggaagttagcccagttcttttgt

SEQ ID NO: 8604 - DNA, 122 bp, Homo sapiens
  misc_feature (61)..(62): /note="This region represents a CpG dinucleotide"
  misc_feature (61)..(61): /note="Nucleotide may be methylated to form 5-methylcytosine"
ctgttttgctcaaaaaaaaaaaaaagtctcctggtcaatgaaagctgagctctatggtaccgaaagggagatcaagattcttcaaagattaagtgaattatcccacaatagtatccactcat

SEQ ID NO: 8605 - DNA, 122 bp, Homo sapiens
  misc_feature (61)..(62): /note="This region represents a CpG dinucleotide"
  misc_feature (61)..(61): /note="Nucleotide may be methylated to form 5-methylcytosine"
gataccagcacgttcctccagaggccccgggtctggtctctcaactgtgcttctgtgccacgctggcccactgagcaaactcacaatgcagggcagcagacagccttaaaataaacaaacat

SEQ ID NO: 8606 - DNA, 122 bp, Homo sapiens
  misc_feature (61)..(62): /note="This region represents a CpG dinucleotide"
  misc_feature (61)..(61): /note="Nucleotide may be methylated to form 5-methylcytosine"
tgtggagagaggcgtgggcgggcgggaactggggttacgcgcggtgcttgccagccagtgcgagttccgggtgggcgtgggcttggcgggccctgcagtgggagcggccaactgggccaggc

SEQ ID NO: 8607 - DNA, 122 bp, Homo sapiens
  misc_feature (61)..(62): /note="This region represents a CpG dinucleotide"
  misc_feature (61)..(61): /note="Nucleotide may be methylated to form 5-methylcytosine"
ttcagataccttaggaatactgtaatcaccgtggcaaaccatagttctgatgactcaatccgtttcaggttgacttactgtggatttcctcgtttccttcaatgtaatatataaaccacacc

SEQ ID NO: 8608 - DNA, 122 bp, Homo sapiens
  misc_feature (61)..(62): /note="This region represents a CpG dinucleotide"
  misc_feature (61)..(61): /note="Nucleotide may be methylated to form 5-methylcytosine"
gcaaaccagtctgtcattgcatgagagaactgagtacattttccctgagtattttatatacgccacaaaaatatcacacccgagtattatgaaattgattgcagctgtgggcgtgacttacc

SEQ ID NO: 8609 - DNA, 122 bp, Homo sapiens
  misc_feature (61)..(62): /note="This region represents a CpG dinucleotide"
  misc_feature (61)..(61): /note="Nucleotide may be methylated to form 5-methylcytosine"
ctttgtggctgtgagactttcaagggaatttgaacatttgaggtggctagggtagtattgcggacctggctgctcaagggagctgttgaacatttgtatgtagtgatatcacctgaactttt

SEQ ID NO: 8610 - DNA, 122 bp, Homo sapiens
  misc_feature (61)..(62): /note="This region represents a CpG dinucleotide"
  misc_feature (61)..(61): /note="Nucleotide may be methylated to form 5-methylcytosine"
gcgcacctgctgcctgtggacatgaacactgggcatttggtgagtcacacagtggccacccgcttctccagtgggagcttcatggcacccccactgtgctgagttgtcacgggggacctcct

SEQ ID NO: 8611 - DNA, 122 bp, Homo sapiens
  misc_feature (61)..(62): /note="This region represents a CpG dinucleotide"
  misc_feature (61)..(61): /note="Nucleotide may be methylated to form 5-methylcytosine"
gacctcaatcgttgatttcggctgcacttcctatccctgggggagctttcaacgctccgccgtccaggccgccgggccccgcagcccgcgccccgctctctagggctgggcccccaggggct

SEQ ID NO: 8612 - DNA, 122 bp, Homo sapiens
  misc_feature (61)..(62): /note="This region represents a CpG dinucleotide"
  misc_feature (61)..(61): /note="Nucleotide may be methylated to form 5-methylcytosine"
gacccaccggcgactacagcttggcacacgctggggtttctgcccatctgttgacacagccgaggccgccctgcgcccactccgagctcccgggccctgcgtgtcttcccacgtggaggccg

SEQ ID NO: 8613 - DNA, 122 bp, Homo sapiens
  misc_feature (61)..(62): /note="This region represents a CpG dinucleotide"
  misc_feature (61)..(61): /note="Nucleotide may be methylated to form 5-methylcytosine"
actcacactgtaacagccaaataaaccttgtgctttaaaaacagatcaggtcacttgagtcgtctgctgcattccgctaagaaagcaaaacctaccatgcatggcaagtgttgacactcttc

SEQ ID NO: 8614 - DNA, 122 bp, Homo sapiens
  misc_feature (61)..(62): /note="This region represents a CpG dinucleotide"
  misc_feature (61)..(61): /note="Nucleotide may be methylated to form 5-methylcytosine"
gttagaaaaaaggttagagttccctgaacttatagtacttatttctccaaatcctctggacgtgtgtaaggtaagatttatttgttccatagccattcactcaacagagatttcttgaacac

SEQ ID NO: 8615 - DNA, 122 bp, Homo sapiens
  misc_feature (61)..(62): /note="This region represents a CpG dinucleotide"
  misc_feature (61)..(61): /note="Nucleotide may be methylated to form 5-methylcytosine"
aggaggggcacacagagcttgaaaccaccgcccccagtactccccctctcccccaaggtgcgtcctaggcaggtccagtgacaaacatacacaatttctagagttaccgcggctggcaagag

SEQ ID NO: 8616 - DNA, 122 bp, Homo sapiens
  misc_feature (61)..(62): /note="This region represents a CpG dinucleotide"
  misc_feature (61)..(61): /note="Nucleotide may be methylated to form 5-methylcytosine"
tttgaatgttgggaaataacctaaatgcccaacaacaggtaacatatgaaacagttgtggcgttaagaggtattacaagaggaaccagtacctggatttcaacaaatctcttgaatctgcta

SEQ ID NO: 8617 - DNA, 122 bp, Homo sapiens
  misc_feature (61)..(62): /note="This region represents a CpG dinucleotide"
  misc_feature (61)..(61): /note="Nucleotide may be methylated to form 5-methylcytosine"
tactgccctagacactcttacctcaggccgttatagtgagtccatacacttaaaaataagcgtctttccaagtactttaaagattcaaaatgatagtggatctgaaatgccgcctgagtccc

SEQ ID NO: 8618 - DNA, 122 bp, Homo sapiens
  misc_feature (61)..(62): /note="This region represents a CpG dinucleotide"
  misc_feature (61)..(61): /note="Nucleotide may be methylated to form 5-methylcytosine"
aaggggagaaaacagccaaacagcccaaacctggatactctaggggggaaatgcataatgcgaaggacagccacatgaaactagcaaacattgtctagagccggggaaatgaatcaagagca

SEQ ID NO: 8619 - DNA, 122 bp, Homo sapiens
  misc_feature (61)..(62): /note="This region represents a CpG dinucleotide"
  misc_feature (61)..(61): /note="Nucleotide may be methylated to form 5-methylcytosine"
aatcaaaggcggggtacagggccagagggaggaggaaacaacttcccggttgctttcagacgcttcagagatcctctggaggcctgggggagcttttgagtactttatttcagttggtccct

SEQ ID NO: 8620 - DNA, 122 bp, Homo sapiens
  misc_feature (61)..(62): /note="This region represents a CpG dinucleotide"
  misc_feature (61)..(61): /note="Nucleotide may be methylated to form 5-methylcytosine"
gctgttggcatgctgggtgcacggtaattagtgtttaccctgaaagctccaaatgcttcccgtggtatttcgccatcccattttgcagatgtggcccacagaggaagcttttgccccacaga

SEQ ID NO: 8621 - DNA, 122 bp, Homo sapiens
  misc_feature (61)..(62): /note="This region represents a CpG dinucleotide"
  misc_feature (61)..(61): /note="Nucleotide may be methylated to form 5-methylcytosine"
agcctgctcttcaagtcatggggaaatcctttctgaaggaagaacctaagtactgccgggcgggaggaaggggagagaggcgccatcggaacagaaacctgtcccatcttccggacacctgc

SEQ ID NO: 8622 - DNA, 122 bp, Homo sapiens
  misc_feature (61)..(62): /note="This region represents a CpG dinucleotide"
  misc_feature (61)..(61): /note="Nucleotide may be methylated to form 5-methylcytosine"
gactcacactgaacctgaagggatgaaattacatatgacgatggaatgtggccatattcacgcagtcacagcagtgtgttgcccaatgacagtactggagcagtttccacagaggcactcat

SEQ ID NO: 8623 - DNA, 122 bp, Homo sapiens
  misc_feature (61)..(62): /note="This region represents a CpG dinucleotide"
  misc_feature (61)..(61): /note="Nucleotide may be methylated to form 5-methylcytosine"
ccttctgttctttccctctgctctctttcccttcatagcatttgtctctacctggcattacgtatacacacacctgtgtggggagtatctgggcttatctgttgtttttctaatgtgaacta

SEQ ID NO: 8624 - DNA, 122 bp, Homo sapiens
  misc_feature (61)..(62): /note="This region represents a CpG dinucleotide"
  misc_feature (61)..(61): /note="Nucleotide may be methylated to form 5-methylcytosine"
ctggagatggacgagcagacccaggccccaggccgagcctctgagccctgacaccccttacgattcatccaaaaaagcaaagaaaaggcgcttacgtgagggcagcggtggctaggtccaaa

SEQ ID NO: 8625 - DNA, 122 bp, Homo sapiens
  misc_feature (61)..(62): /note="This region represents a CpG dinucleotide"
  misc_feature (61)..(61): /note="Nucleotide may be methylated to form 5-methylcytosine"
ctcagcagccacagcacagtgagaaaaacaacagccgcccgcagctgtctgtctctaacacgtatcagactttgaaaaacatatccggaggcaaaacaacctgcctcagagaagcccggcaa

SEQ ID NO: 8626 - DNA, 122 bp, Homo sapiens
  misc_feature (61)..(62): /note="This region represents a CpG dinucleotide"
  misc_feature (61)..(61): /note="Nucleotide may be methylated to form 5-methylcytosine"
tgtggtttgaacatcctgatcacttctgagacaatgccattagtgaatacattctaagcacgtcatctgaatattcacagacatctttttaaaagggctggatctggaagttaggccatgaa

SEQ ID NO: 8627 - DNA, 122 bp, Homo sapiens
  misc_feature (61)..(62): /note="This region represents a CpG dinucleotide"
  misc_feature (61)..(61): /note="Nucleotide may be methylated to form 5-methylcytosine"
ccgttaagaccgggtcaggtgaacaggaagttaaagactgaaaaggagacacaaaactgccgactttcccgacggcgaattggccctctggaaacagccgaccaatcacaggcagcaggggc

SEQ ID NO: 8628 - DNA, 122 bp, Homo sapiens
  misc_feature (61)..(62): /note="This region represents a CpG dinucleotide"
  misc_feature (61)..(61): /note="Nucleotide may be methylated to form 5-methylcytosine"
attatagaatggcatacaaacttgaaaatgcatgctattctaaaagcaatggattgctttcgaatatactacagtcactattcccttttactcattaaaaaaacaaaaaccaaaaacaaaca

SEQ ID NO: 8629 - DNA, 122 bp, Homo sapiens
  misc_feature (61)..(62): /note="This region represents a CpG dinucleotide"
  misc_feature (61)..(61): /note="Nucleotide may be methylated to form 5-methylcytosine"
tagtcatgacttagaacttataactcatgttcggaactgtccatgttcacgcacaggggccgtatcactccgccagagctgccctgggtgccggtgtgcagaggggtccgagagtgactgtc

SEQ ID NO: 8630 - DNA, 122 bp, Homo sapiens
  misc_feature (61)..(62): /note="This region represents a CpG dinucleotide"
  misc_feature (61)..(61): /note="Nucleotide may be methylated to form 5-methylcytosine"
tccggaaaacagtggtcataatagggcctaccttactgtgaacattaatgagaaaatgcacggtgtttggtccaaagtaagttaactactaatagctgcagaatcggggacattttctattc

SEQ ID NO: 8631 - DNA, 122 bp, Homo sapiens
  misc_feature (61)..(62): /note="This region represents a CpG dinucleotide"
  misc_feature (61)..(61): /note="Nucleotide may be methylated to form 5-methylcytosine"
ttgtggtaacacacaactcctgatcccagccatgcccagcccctgccacctgcccacaggcgtgctctgtattaacttaggggcctgaaatgcccaggtccacacaggccccacccccaccc

SEQ ID NO: 8632 - DNA, 122 bp, Homo sapiens
  misc_feature (61)..(62): /note="This region represents a CpG dinucleotide"
  misc_feature (61)..(61): /note="Nucleotide may be methylated to form 5-methylcytosine"
actgctcaattattgttatgctgatactatagatgaagctactgagactcagagaagtcacggcggcagcaagttgcagagctggaaacaaacacaaatctctttgactcccaagctccttc

SEQ ID NO: 8633 - DNA, 122 bp, Homo sapiens
  misc_feature (61)..(62): /note="This region represents a CpG dinucleotide"
  misc_feature (61)..(61): /note="Nucleotide may be methylated to form 5-methylcytosine"
ttattctcctaattgtttctctttgtaccagttcattgcttgttgggatcaccaccagttcgatttagctaaatgttgacacagtatttggtatctacgtgaaagatttggcagtgatcttt

SEQ ID NO: 8634 - DNA, 122 bp, Homo sapiens
  misc_feature (61)..(62): /note="This region represents a CpG dinucleotide"
  misc_feature (61)..(61): /note="Nucleotide may be methylated to form 5-methylcytosine"
gtgagtgagacacatctttcatgtgtctggggcccacctcttgtgttcagtaaacatacacgtgtctcagactcacgctgcatagtcaaggaacgaaggatcaagtcaaataatgcaaattt

SEQ ID NO: 8635 - DNA, 122 bp, Homo sapiens
  misc_feature (61)..(62): /note="This region represents a CpG dinucleotide"
  misc_feature (61)..(61): /note="Nucleotide may be methylated to form 5-methylcytosine"
catctttgttttgattagcattcctgatgactggccatgcagagcatttcttcatataaccgttagtcatttctaaacatatacattcaacaatacaaattacagctacacttatcttttga

SEQ ID NO: 8636 - DNA, 122 bp, Homo sapiens
  misc_feature (61)..(62): /note="This region represents a CpG dinucleotide"
  misc_feature (61)..(61): /note="Nucleotide may be methylated to form 5-methylcytosine"
gccgggcatgatggcatgcgcctgtaatcccagctactttgtaggccgaggcaggataatcgcttaaactgaagagatggaagttgcagtgagccaagattgaaccactgcactccagcctg

SEQ ID NO: 8637 - DNA, 122 bp, Homo sapiens
  misc_feature (61)..(62): /note="This region represents a CpG dinucleotide"
  misc_feature (61)..(61): /note="Nucleotide may be methylated to form 5-methylcytosine"
cgcagggcccatgctaatcttctctgtatcgttccaatgttaatacatgtgctgtcgaagcgagcactgccctgctatttagggacagacttttcctgttctcttcacacttctcaaaaaga

SEQ ID NO: 8638 - DNA, 122 bp, Homo sapiens
  misc_feature (61)..(62): /note="This region represents a CpG dinucleotide"
  misc_feature (61)..(61): /note="Nucleotide may be methylated to form 5-methylcytosine"
caagtttcctcttagtataataaatgcctttaaagttcatcactggctttttattaatatcgcaagcctctcacaacccacttagtcatggttacaatggaaagtgagataaaaggaataag

SEQ ID NO: 8639 - DNA, 122 bp, Homo sapiens
  misc_feature (61)..(62): /note="This region represents a CpG dinucleotide"
  misc_feature (61)..(61): /note="Nucleotide may be methylated to form 5-methylcytosine"
ctagcttctcccagtctctctgcctcaccttctgggtgtggagaacttggtcagccactgcggaagcctgagctccctgcaaccaccagttcctctcttccctaaaacacgagcactgatct

SEQ ID NO: 8640 - DNA, 122 bp, Homo sapiens
  misc_feature (61)..(62): /note="This region represents a CpG dinucleotide"
  misc_feature (61)..(61): /note="Nucleotide may be methylated to form 5-methylcytosine"
tctgaaaaggaagaaaaaaaatgtggctctgaattcttctcatattcctggacagtagctcgaaagtaggtggtcagtcagcgtctgagtgttacttccctgttttggatttcccattccat

SEQ ID NO: 8641 - DNA, 122 bp, Homo sapiens
  misc_feature (61)..(62): /note="This region represents a CpG dinucleotide"
  misc_feature (61)..(61): /note="Nucleotide may be methylated to form 5-methylcytosine"
aaatcaggtaaaagccattcctgcagcctgagccttttaggcacttttccagcagcagagcgggaactgcagcatcactctgggtgggggggttacggaataggattccatgtccaattcca

SEQ ID NO: 8642 - DNA, 122 bp, Homo sapiens
  misc_feature (61)..(62): /note="This region represents a CpG dinucleotide"
  misc_feature (61)..(61): /note="Nucleotide may be methylated to form 5-methylcytosine"
tggatcgtttggctcaagggctgatagtggtaggggcgtgtgtatggaggcgggggataccggatggtatgagatccagctgctcctggatgaagcaaaatattctgtggattaaaaaaatc

SEQ ID NO: 8643 - DNA, 122 bp, Homo sapiens
  misc_feature (61)..(62): /note="This region represents a CpG dinucleotide"
  misc_feature (61)..(61): /note="Nucleotide may be methylated to form 5-methylcytosine"
taggcggaaatgagctaaggttcccgcgagtggggaagcgcgaggtcaaatctggggccacgcccccagtcctgtggcgcaactccccgaacacggaaaaaaaaggcgcagtgggggttctg

SEQ ID NO: 8644 - DNA, 122 bp, Homo sapiens
  misc_feature (61)..(62): /note="This region represents a CpG dinucleotide"
  misc_feature (61)..(61): /note="Nucleotide may be methylated to form 5-methylcytosine"
cccgaccttcctgcgccatcaacttctcaggagtggctggagaaagatgcatgtgccaagcgagacaacaaccccaggtccatgtgtccaaatccccgtagccagggcggcggccagccaaa

SEQ ID NO: 8645 - DNA, 122 bp, Homo sapiens
  misc_feature (61)..(62): /note="This region represents a CpG dinucleotide"
  misc_feature (61)..(61): /note="Nucleotide may be methylated to form 5-methylcytosine"
aggaatctgacgactgctactgatcattccagtcgtacctggccacactgacagcgcacacgcacacatgcagacaccacaggttctgattactgggggacgtcttctaataagaactaacc

SEQ ID NO: 8646 - DNA, 122 bp, Homo sapiens
  misc_feature (61)..(62): /note="This region represents a CpG dinucleotide"
  misc_feature (61)..(61): /note="Nucleotide may be methylated to form 5-methylcytosine"
aaaggaattgtttaaatcaactataattaagctgatggttgcatttcaggctttgaattccgatcaagtttcaaattggttattattttggaggttgtgctttcatgttcctaggtatttct

SEQ ID NO: 8647 - DNA, 122 bp, Homo sapiens
  misc_feature (61)..(62): /note="This region represents a CpG dinucleotide"
  misc_feature (61)..(61): /note="Nucleotide may be methylated to form 5-methylcytosine"
taagtcaggtgaaggattatttcctgtgttctgttttttaaaatctttttacgggttagacgagggaacttgaaacaaacaaatcttatcaagaataggttgactttctcaaatttcaaaat

SEQ ID NO: 8648 - DNA, 122 bp, Homo sapiens
  misc_feature (61)..(62): /note="This region represents a CpG dinucleotide"
  misc_feature (61)..(61): /note="Nucleotide may be methylated to form 5-methylcytosine"
gaaccaggtaagtgtgaatacccagtagggacagggctctgatccagggctggaaggcagcgcctgggatcctcagggctgatttaacaaccttctgatccatgggtctctggggaaacatt

SEQ ID NO: 8649 - DNA, 122 bp, Homo sapiens
  misc_feature (61)..(62): /note="This region represents a CpG dinucleotide"
  misc_feature (61)..(61): /note="Nucleotide may be methylated to form 5-methylcytosine"
ccccacccgaaggccactgtttttggctcttgctgctatggaaggacaggagtgagctcccgctcttgacaggaaactctccaggagcagaagctgtaacttcctcatctttgcatcatcag

SEQ ID NO: 8650 - DNA, 122 bp, Homo sapiens
  misc_feature (61)..(62): /note="This region represents a CpG dinucleotide"
  misc_feature (61)..(61): /note="Nucleotide may be methylated to form 5-methylcytosine"
cctccaccctgctgaaagggtctcctggctgcatcgcagctaacatcccttccttcctgtcgggcagccagagcagctgagttccagataaaaactgtcagacccggcctgtaggctgctcc

SEQ ID NO: 8651 - DNA, 122 bp, Homo sapiens
  misc_feature (61)..(62): /note="This region represents a CpG dinucleotide"
  misc_feature (61)..(61): /note="Nucleotide may be methylated to form 5-methylcytosine"
aaagtggcggtgagttacatcctgagacaaagcctgcaaccaaagtcgagtctaagcatgcgcttcctgcatcaatctttgctgagatgaccttattgcccatttcccagacagaaaaactg

SEQ ID NO: 8652 - DNA, 122 bp, Homo sapiens
  misc_feature (61)..(62): /note="This region represents a CpG dinucleotide"
  misc_feature (61)..(61): /note="Nucleotide may be methylated to form 5-methylcytosine"
cagtgaagtggggagacaacaggcatctgaggccactgcagtgctgcttctgattatgaacgtttcaccatgttgtgaaggtgcagctgaatcaagccaggattaactggtcagcacctgga

SEQ ID NO: 8653 - DNA, 122 bp, Homo sapiens
  misc_feature (61)..(62): /note="This region represents a CpG dinucleotide"
  misc_feature (61)..(61): /note="Nucleotide may be methylated to form 5-methylcytosine"
agaggggtcttgatctaacttcttcctgactacctcctctgcagtggaaaccattattttcgctttttgtttctgtttctcctcttctcttctcacaaagatctttttgagcttccctcagt

SEQ ID NO: 8654 - DNA, 122 bp, Homo sapiens
  misc_feature (61)..(62): /note="This region represents a CpG dinucleotide"
  misc_feature (61)..(61): /note="Nucleotide may be methylated to form 5-methylcytosine"
acagagttccagggtgattgctagcatggaggagggaggctcctgtgctgggtaagaacccgtcctccagaaactaggactgtctgggcttgaacccaagtgccttgctgtgtcagttgggg

SEQ ID NO: 8655 - DNA, 122 bp, Homo sapiens
  misc_feature (61)..(62): /note="This region represents a CpG dinucleotide"
  misc_feature (61)..(61): /note="Nucleotide may be methylated to form 5-methylcytosine"
agtatgttggtttcttccttctagtggtcacattccattactgcctgtctaatgttcttacgttggctaaaatcctataaattttagaaatgattggctgtaaagtgcctatttgctgttag

SEQ ID NO: 8656 - DNA, 122 bp, Homo sapiens
  misc_feature (61)..(62): /note="This region represents a CpG dinucleotide"
  misc_feature (61)..(61): /note="Nucleotide may be methylated to form 5-methylcytosine"
agggattaaataacttggcagaggtctcacagtcagtaactgatttgccttccaggggttcgaatcctggctctgccatttggtagctgtctggacttgggtaagccattcaacctctctgt

SEQ ID NO: 8657 - DNA, 122 bp, Homo sapiens
  misc_feature (61)..(62): /note="This region represents a CpG dinucleotide"
  misc_feature (61)..(61): /note="Nucleotide may be methylated to form 5-methylcytosine"
cgcaacccagtcaggcttcgtgtccttcaggggttctaggctaacaggcgaaaggaagggcgttgggaccgaggggcatcctggtttttatgtacgccactgagaggccaccagacacattt

SEQ ID NO: 8658 - DNA, 122 bp, Homo sapiens
  misc_feature (61)..(62): /note="This region represents a CpG dinucleotide"
  misc_feature (61)..(61): /note="Nucleotide may be methylated to form 5-methylcytosine"
tctgcatttgttctccttactgtaatgactgttgaaaaagctttcctgagatattagcagcgattaatcccctgggtcaaactgcatttgcagagtagctgctcagtcatctgtctgggctc

SEQ ID NO: 8659 - DNA, 122 bp, Homo sapiens
  misc_feature (61)..(62): /note="This region represents a CpG dinucleotide"
  misc_feature (61)..(61): /note="Nucleotide may be methylated to form 5-methylcytosine"
cacagtgtgaaaatattctaatcaaaatatttgcaaagtgtgagagaagctgggaagagacgcaacccatgagctaagtcctgagttgaaaatcaaagacacgaggcatgagagaaacaatg

SEQ ID NO: 8660 - DNA, 122 bp, Homo sapiens
  misc_feature (61)..(62): /note="This region represents a CpG dinucleotide"
  misc_feature (61)..(61): /note="Nucleotide may be methylated to form 5-methylcytosine"
agaagtgtccgttcatggcctttgcctactttttaatggggttgtttgttctctcagcaccgtttattaagtagggtattctatttaataatagggaatacatcctagctttattcctaggt

SEQ ID NO: 8661 - DNA, 122 bp, Homo sapiens
  misc_feature (61)..(62): /note="This region represents a CpG dinucleotide"
  misc_feature (61)..(61): /note="Nucleotide may be methylated to form 5-methylcytosine"
ctcccatcttaaaggctctgttaaagttccatttcttccacaaagcatcctctttctaatcggctgtatttctgtcctgtcttctgttttagacaatacttactattgtcaagtgtggtatt

SEQ ID NO: 8662 - DNA, 122 bp, Homo sapiens
  misc_feature (61)..(62): /note="This region represents a CpG dinucleotide"
  misc_feature (61)..(61): /note="Nucleotide may be methylated to form 5-methylcytosine"
agtatcagaccaggaactgacagcctcactgcaacaggaagagaggcttcacacaataagcgtttcattcaaccaggctggacctgtgcttattgagttgaacatcactgagcacaaaatgc

SEQ ID NO: 8663 - DNA, 122 bp, Homo sapiens
  misc_feature (61)..(62): /note="This region represents a CpG dinucleotide"
  misc_feature (61)..(61): /note="Nucleotide may be methylated to form 5-methylcytosine"
gtaagcctttcatccttgcttaatcctaaaaccctacatttaagtacacggcaaagaaaacgtacaatgcaaaggcaagggcatgcttgaagaatgcaaagcagcaaaggattctcaagaaa

SEQ ID NO: 8664 - DNA, 122 bp, Homo sapiens
  misc_feature (61)..(62): /note="This region represents a CpG dinucleotide"
  misc_feature (61)..(61): /note="Nucleotide may be methylated to form 5-methylcytosine"
cctgctacatgcctctgataagctggaactctgagatgacatgagagcacgagccagagacggctatccctgttctgttatgaaccccactttatatcaaggcaatttaagtacaggaaggg

SEQ ID NO: 8665 - DNA, 122 bp, Homo sapiens
  misc_feature (61)..(62): /note="This region represents a CpG dinucleotide"
  misc_feature (61)..(61): /note="Nucleotide may be methylated to form 5-methylcytosine"
taagaggacacacacagttacaacccctgtcattcaagggttgactgcactgtaagtcatcgctggattactcataacaccaaagacaacacccacacaccccttcattcccgtggattcag

SEQ ID NO: 8666 - DNA, 122 bp, Homo sapiens
  misc_feature (61)..(62): /note="This region represents a CpG dinucleotide"
  misc_feature (61)..(61): /note="Nucleotide may be methylated to form 5-methylcytosine"
ccaggggaccagttccttggtgttgctttggcattgatgcctgaagtgggaggagaaagccgagcccacaaacacacagagcagagtggggctctgagtatataactgttaggtgcctccct

SEQ ID NO: 8667 - DNA, 122 bp, Homo sapiens
  misc_feature (61)..(62): /note="This region represents a CpG dinucleotide"
  misc_feature (61)..(61): /note="Nucleotide may be methylated to form 5-methylcytosine"
tggtataagcaaaaggctgaaccagaaaaagtgctgactcccctttgttctgttttctcccgtggaacggtgttccagtcgagggtcagcatagacattttggggcatcattttcacagctg

SEQ ID NO: 8668 - DNA, 122 bp, Homo sapiens
  misc_feature (61)..(62): /note="This region represents a CpG dinucleotide"
  misc_feature (61)..(61): /note="Nucleotide may be methylated to form 5-methylcytosine"
caaaaggtcaccagaacaagagctgaaaattcgtatgcatgaccgcctatctaccacgaccgacgccacgccgagtcgattggcaacacagacgagccggtcgaggtccggtcgagattggt

SEQ ID NO: 8669 - DNA, 122 bp, Homo sapiens
  misc_feature (61)..(62): /note="This region represents a CpG dinucleotide"
  misc_feature (61)..(61): /note="Nucleotide may be methylated to form 5-methylcytosine"
tagcactttctaggccacagcaggatttacagttttactctgagatggggaatcactggacgcttctgagcagaggagtaactaacatgaaatgattggcactttaaaggctcactctggct

SEQ ID NO: 8670 - DNA, 122 bp, Homo sapiens
  misc_feature (61)..(62): /note="This region represents a CpG dinucleotide"
  misc_feature (61)..(61): /note="Nucleotide may be methylated to form 5-methylcytosine"
tagcctacagccatactaccttgaatatgtctgatctcatctgatctcagaagctaagcacggtcaggcctagttagtacttgcatgggagaagctttagaaaacttacaaaaggaaagaag

SEQ ID NO: 8671 - DNA, 122 bp, Homo sapiens
  misc_feature (61)..(62): /note="This region represents a CpG dinucleotide"
  misc_feature (61)..(61): /note="Nucleotide may be methylated to form 5-methylcytosine"
agatagatttctgttttaagaccccaagtgtgtgattctttcttacactagccatggaaacgaatgcattgtatctccctgggaggggcaggccaccaagactcatcatcccctccaactct

SEQ ID NO: 8672 - DNA, 122 bp, Homo sapiens
  misc_feature (61)..(62): /note="This region represents a CpG dinucleotide"
  misc_feature (61)..(61): /note="Nucleotide may be methylated to form 5-methylcytosine"
tccaagacatgctcatcttcctcatcgcacttactctacagtccagtccttccacccttccgttaacaggactgaaaactctatcctaagccagcacatagcttcccaggtctctaaggcac

SEQ ID NO: 8673 - DNA, 122 bp, Homo sapiens
  misc_feature (61)..(62): /note="This region represents a CpG dinucleotide"
  misc_feature (61)..(61): /note="Nucleotide may be methylated to form 5-methylcytosine"
cggttctgcctgggctctaatctccatttacttctgttctgtttttgtttatacaagagacggtctggcctggtcatttctcgtcttggtatgttactgctgagtcacagttcagttaacca

SEQ ID NO: 8674 - DNA, 122 bp, Homo sapiens
  misc_feature (61)..(62): /note="This region represents a CpG dinucleotide"
  misc_feature (61)..(61): /note="Nucleotide may be methylated to form 5-methylcytosine"
tgctgtctctctgttgccagtgaggggtggtgcctactgggcaagagtgcgtcctcggagcgtggattcatagtgaaattgaccaagcaatgtgacagtgaattggccttactttactcagg

SEQ ID NO: 8675 - DNA, 122 bp, Homo sapiens
  misc_feature (61)..(62): /note="This region represents a CpG dinucleotide"
  misc_feature (61)..(61): /note="Nucleotide may be methylated to form 5-methylcytosine"
ggcatcatttccactcacaggcatccaacagcaccttgtcacatggcacacctagacgcacggaagatgcacctagagctactttgcagcaggctggctgggccccattcccggctgcctta

SEQ ID NO: 8676 - DNA, 122 bp, Homo sapiens
  misc_feature (61)..(62): /note="This region represents a CpG dinucleotide"
  misc_feature (61)..(61): /note="Nucleotide may be methylated to form 5-methylcytosine"
cacacacacacacacacccaaaatgtatcatcttaatcgtttctgagtgcagtgctcagtcgtgtgaagtacactcacactgttgtgtaacagctccagagctttctcatgctcccgaggcc

SEQ ID NO: 8677 - DNA, 122 bp, Homo sapiens
  misc_feature (61)..(62): /note="This region represents a CpG dinucleotide"
  misc_feature (61)..(61): /note="Nucleotide may be methylated to form 5-methylcytosine"
actctcttccaaaccaggctttgaaagcaaagggctactgatttcctgggcctgcccacccggtgctctctcctgggccgtctgccccagggccttcctggctcctgatgcagaggaaactt

SEQ ID NO: 8678 - DNA, 122 bp, Homo sapiens
  misc_feature (61)..(62): /note="This region represents a CpG dinucleotide"
  misc_feature (61)..(61): /note="Nucleotide may be methylated to form 5-methylcytosine"
gaaaagtattcttagttagaagaatttggctttgctacagagtttcaaaggttatgtgtgcgcatattgtcttcagtagatgacaagttgattttagttttattgttttatctggcattttc

SEQ ID NO: 8679 - DNA, 122 bp, Homo sapiens
  misc_feature (61)..(62): /note="This region represents a CpG dinucleotide"
  misc_feature (61)..(61): /note="Nucleotide may be methylated to form 5-methylcytosine"
agggggactaactctctttcttgcagttacaatcaggtatttacgttgatttaatttatacggattgggaaattgcactatagcatatgtacagaaattgaaatgtaaatcaagaaatagtt

SEQ ID NO: 8680 - DNA, 122 bp, Homo sapiens
  misc_feature (61)..(62): /note="This region represents a CpG dinucleotide"
  misc_feature (61)..(61): /note="Nucleotide may be methylated to form 5-methylcytosine"
gaggaaaccaagacccttacaggttaactggctaagatcatcagcttgcagtgacagaaccggaggtggatccagttctgtctgcctccaaagcttatgctgtttacattatgtgatgcaga

SEQ ID NO: 8681 - DNA, 122 bp, Homo sapiens
  misc_feature (61)..(62): /note="This region represents a CpG dinucleotide"
  misc_feature (61)..(61): /note="Nucleotide may be methylated to form 5-methylcytosine"
aagatgattaggagatggggtctcattctagggtttgagctgtctacttggagggaggaacgctgtggcttggatgatcccaaacagtggggaatccgaaagtcaattatatctggatttga

SEQ ID NO: 8682 - DNA, 122 bp, Homo sapiens
  misc_feature (61)..(62): /note="This region represents a CpG dinucleotide"
  misc_feature (61)..(61): /note="Nucleotide may be methylated to form 5-methylcytosine"
acactggacactcgggcatggtgctggagtttgtcatctcttccatggccttctgtagaccgtagcacttacctcatgttagcactttatattctgcaaagagagaaacaagtggtccaaat

SEQ ID NO: 8683 - DNA, 122 bp, Homo sapiens
  misc_feature (61)..(62): /note="This region represents a CpG dinucleotide"
  misc_feature (61)..(61): /note="Nucleotide may be methylated to form 5-methylcytosine"
caggtaggggcgctgctgctccccctaccacccacgcatcctcctccctgtctgcattcccgtcgtcgtagccagaggagttcagagcctctacagagagcacaacttctccagctggaaca

SEQ ID NO: 8684 - DNA, 122 bp, Homo sapiens
  misc_feature (61)..(62): /note="This region represents a CpG dinucleotide"
  misc_feature (61)..(61): /note="Nucleotide may be methylated to form 5-methylcytosine"
tgtggcttcccccctcacctacatcacttccccagctgaatagaggccactttggggctgcgtcaccaagggctcatctaggctgagaaaggagggccaagagtaatgttgtattaacaggc

SEQ ID NO: 8685 - DNA, 122 bp, Homo sapiens
  misc_feature (61)..(62): /note="This region represents a CpG dinucleotide"
  misc_feature (61)..(61): /note="Nucleotide may be methylated to form 5-methylcytosine"
ctgcgttggcccactccgctgttgctcttcctccaacttcgcttgcttggtggcggcatccggcccctgggcagctcgccgcttgttcacgtgtgtcccatcctcctgtggagtgggcacgc

SEQ ID NO: 8686 - DNA, 122 bp, Homo sapiens
  misc_feature (61)..(62): /note="This region represents a CpG dinucleotide"
  misc_feature (61)..(61): /note="Nucleotide may be methylated to form 5-methylcytosine"
ttacaggcatgagccatcgcacgcggccagtacttctgttttaaaacaaacatatatctacggtgatacatgtttgttttacaaactgtcccagtttgtttaggattaaggagatttctcag

SEQ ID NO: 8687 - DNA, 122 bp, Homo sapiens
  misc_feature (61)..(62): /note="This region represents a CpG dinucleotide"
  misc_feature (61)..(61): /note="Nucleotide may be methylated to form 5-methylcytosine"
cagggagggtttagactactggttagagtgccattcaattactcggagttggacctctcccgaggacacacacaaaggccagggagcgcgagtgcgcgttccctctcccagagtgtgtgtat

SEQ ID NO: 8688 - DNA, 122 bp, Homo sapiens
  misc_feature (61)..(62): /note="This region represents a CpG dinucleotide"
  misc_feature (61)..(61): /note="Nucleotide may be methylated to form 5-methylcytosine"
tcttctcgtctttgcagtgggcatgttcacacgcaacccgcaggctggcggtgacggtttcgtggggcgatgtgcatgagcaggtgctcatgaagccggccccgcccacacatgcagatggc

SEQ ID NO: 8689 - DNA, 122 bp, Homo sapiens
  misc_feature (61)..(62): /note="This region represents a CpG dinucleotide"
  misc_feature (61)..(61): /note="Nucleotide may be methylated to form 5-methylcytosine"
aaatggtgttctcctaaagtgaccaacaaaacaccaagctgtgtcatggtgccactttggcgatgtggtctcttaggagagggaattctaagtagttaattagcttgttcctttctacgttg

SEQ ID NO: 8690 - DNA, 122 bp, Homo sapiens
  misc_feature (61)..(62): /note="This region represents a CpG dinucleotide"
  misc_feature (61)..(61): /note="Nucleotide may be methylated to form 5-methylcytosine"
tagttcaaaaatcttgttagatgctgtggaaacctcacccggcagtagtgatagctgccacgtactgagggattttatagacatttacattttcacttgtcctcaccttccagatgaggcag

SEQ ID NO: 8691 - DNA, 122 bp, Homo sapiens
  misc_feature (61)..(62): /note="This region represents a CpG dinucleotide"
  misc_feature (61)..(61): /note="Nucleotide may be methylated to form 5-methylcytosine"
cttgatctcctgacctcgtgatcctcccactttggcctcccaaagtgctgggattacaggcgtgagccaccatgcctgacctgtttaatgtttaaaatatgccgtaaagaaaatccagctgg

SEQ ID NO: 8692 - DNA, 122 bp, Homo sapiens
  misc_feature (61)..(62): /note="This region represents a CpG dinucleotide"
  misc_feature (61)..(61): /note="Nucleotide may be methylated to form 5-methylcytosine"
taaatgtctgccaaaagttcaaactttgctccgcacttgcatacaatgatggctatccaacgagaaaaggatttccaggttttgcctgaaagttgacaagaattgacacaaaacagaattgt

SEQ ID NO: 8693 - DNA, 122 bp, Homo sapiens
  misc_feature (61)..(62): /note="This region represents a CpG dinucleotide"
  misc_feature (61)..(61): /note="Nucleotide may be methylated to form 5-methylcytosine"
tgtaatgctagacgtaataagtagcagtaggctggagagtaggccatgtaaaggaagtcccggttggatggcacttaaggcctaagtgttttgaagcctaggggatctgactaagctgattg

SEQ ID NO: 8694 - DNA, 122 bp, Homo sapiens
  misc_feature (61)..(62): /note="This region represents a CpG dinucleotide"
  misc_feature (61)..(61): /note="Nucleotide may be methylated to form 5-methylcytosine"
gatgacatattcacaaagtaaagcaaatttcatgacatgtagctggcagtccaggagctccgtgggacccagaagttgaaccagtcttgttctccagaaggctgccctcaagtggtggccaa

SEQ ID NO: 8695 - DNA, 122 bp, Homo sapiens
  misc_feature (61)..(62): /note="This region represents a CpG dinucleotide"
  misc_feature (61)..(61): /note="Nucleotide may be methylated to form 5-methylcytosine"
ggggtctctggggcggccccgtttgctttctgtcactgtatgcatgtgccctgtgtggtccgcagtgcacagagtcttttgtgggtagcgtgcctggtttatgcttgggtccccacaaccca

SEQ ID NO: 8696 - DNA, 122 bp, Homo sapiens
  misc_feature (61)..(62): /note="This region represents a CpG dinucleotide"
  misc_feature (61)..(61): /note="Nucleotide may be methylated to form 5-methylcytosine"
cccatgattatgaatagccccaagactaatcactcttctgtgatgtctgtccctggaaagcgtagaacaccccacacagtgcccacttttgttctgccagtttggagaccctgacacaccca

SEQ ID NO: 8697 - DNA, 122 bp, Homo sapiens
  misc_feature (61)..(62): /note="This region represents a CpG dinucleotide"
  misc_feature (61)..(61): /note="Nucleotide may be methylated to form 5-methylcytosine"
ggcaatggtgatggagtaatagcagagcctgacaatgaccacaggcagggaggatgctgacgtgcacaacagccaactcactcaccacctgcagagcctgtgaggtgtgcactggcccactg

SEQ ID NO: 8698 - DNA, 122 bp, Homo sapiens
  misc_feature (61)..(62): /note="This region represents a CpG dinucleotide"
  misc_feature (61)..(61): /note="Nucleotide may be methylated to form 5-methylcytosine"
acttacttgaaaaagagtcttggagagcctctgcacctcactttcctctcctcgagctgacgaggatgttattttgatgtttatctggtgccatggtaactttcatgacttgagatttactt

SEQ ID NO: 8699 - DNA, 122 bp, Homo sapiens
  misc_feature (61)..(62): /note="This region represents a CpG dinucleotide"
  misc_feature (61)..(61): /note="Nucleotide may be methylated to form 5-methylcytosine"
ggtgtccgggcccagctccaccacattgtcggcgccccgccacgcgctccatggggcgtacggcagctgactcacccagcaacctgtggatatggctgttgcttttacgatttggacattat

SEQ ID NO: 8700 - DNA, 122 bp, Homo sapiens
  misc_feature (61)..(62): /note="This region represents a CpG dinucleotide"
  misc_feature (61)..(61): /note="Nucleotide may be methylated to form 5-methylcytosine"
accttcataattctggctttgagccaactctgtccttaactacttaatgggccttctaggcgctttccttcttcaactatccctcctaaaatatgcattaaagtttatttttaacagtcctt

SEQ ID NO: 8701 - DNA, 122 bp, Homo sapiens
  misc_feature (61)..(62): /note="This region represents a CpG dinucleotide"
  misc_feature (61)..(61): /note="Nucleotide may be methylated to form 5-methylcytosine"
cagtacttagttaaaggaactgaatagtttgtgcaacattccctgtctttgtctgtgttacggccctggcctcccagaattgtgggtgattcaggggaaatgagagccacatgtttctgaat

SEQ ID NO: 8702 - DNA, 122 bp, Homo sapiens
  misc_feature (61)..(62): /note="This region represents a CpG dinucleotide"
  misc_feature (61)..(61): /note="Nucleotide may be methylated to form 5-methylcytosine"
gttctttttccggagttccaggacagcttccacaaactccttgccacctttcttctccagcgtgtttcctagacaaggacagggtggggtcaggttgccattctgtgtctccggcacacaca

SEQ ID NO: 8703 - DNA, 122 bp, Homo sapiens
  misc_feature (61)..(62): /note="This region represents a CpG dinucleotide"
  misc_feature (61)..(61): /note="Nucleotide may be methylated to form 5-methylcytosine"
caccatacgtcattttataaagccggaaactacatttcccaaaaggcctttatttttcctcgcgggaaaagggattgcaattactataggttttacaggtatcgcgagatttcgtcaaatct

SEQ ID NO: 8704 - DNA, 122 bp, Homo sapiens
  misc_feature (61)..(62): /note="This region represents a CpG dinucleotide"
  misc_feature (61)..(61): /note="Nucleotide may be methylated to form 5-methylcytosine"
cctgggctgggctgggctgagcagcagggaggctgagcagcctgtagagggcagcacacgcgcggcttcccagccagccgccctggaggacgtggaggggaggcagccacagtcctggagag

SEQ ID NO: 8705 - DNA, 122 bp, Homo sapiens
  misc_feature (61)..(62): /note="This region represents a CpG dinucleotide"
  misc_feature (61)..(61): /note="Nucleotide may be methylated to form 5-methylcytosine"
tgtcacgctcactgtgagagcatgctgcttcgctctgaaagccaggaaaaccctgaaccccgcaggaagaacaaacaattccagacgcgcgaccttagagacctgtaacacttagcgcgaag

SEQ ID NO: 8706 - DNA, 122 bp, Homo sapiens
  misc_feature (61)..(62): /note="This region represents a CpG dinucleotide"
  misc_feature (61)..(61): /note="Nucleotide may be methylated to form 5-methylcytosine"
ccttttgaaccttttactacccatgagctcaggaaccatacatgcaaaattttattcttgcgtcatgacttcagcttatgagggaaatgagctatgaatttaaatgactcttctactctata

SEQ ID NO: 8707 - DNA, 122 bp, Homo sapiens
  misc_feature (61)..(62): /note="This region represents a CpG dinucleotide"
  misc_feature (61)..(61): /note="Nucleotide may be methylated to form 5-methylcytosine"
attgactttatgccaacttcaagcatttggccaactccaacagcttctggtccttttccccgagagaggctgtggaagctctactcaccaaggaggccactttcttagttgtcctaggtgag

SEQ ID NO: 8708 - DNA, 122 bp, Homo sapiens
  misc_feature (61)..(62): /note="This region represents a CpG dinucleotide"
  misc_feature (61)..(61): /note="Nucleotide may be methylated to form 5-methylcytosine"
tccaagtaataagagtggctaatcccaggaatgtgtcaccagaggttattttgtaatagtcgtgtgttaaattccttatttgtctatataacttctcaaatccttctgcctctacagttata

SEQ ID NO: 8709 - DNA, 122 bp, Homo sapiens
  misc_feature (61)..(62): /note="This region represents a CpG dinucleotide"
  misc_feature (61)..(61): /note="Nucleotide may be methylated to form 5-methylcytosine"
gattctaacgacacctcagcacttgccagcacaggccctgcgtgtgagaacatctcctgccgctcccacttcctcatcgcgggtgtaacagcgctgcacgccggtgcccctcagaacaggaa

SEQ ID NO: 8710 - DNA, 122 bp, Homo sapiens
  misc_feature (61)..(62): /note="This region represents a CpG dinucleotide"
  misc_feature (61)..(61): /note="Nucleotide may be methylated to form 5-methylcytosine"
cttgtcctgagaagtggcatcttcatatggcattcaggcttcttcacattctggtgtgaacgcctgccttcccccttttccaccactcccctttacagacctcaagtatcaaaacaacacta

SEQ ID NO: 8711 - DNA, 122 bp, Homo sapiens
  misc_feature (61)..(62): /note="This region represents a CpG dinucleotide"
  misc_feature (61)..(61): /note="Nucleotide may be methylated to form 5-methylcytosine"
ctcaggtgattcacccaccttggcctctcaaagtgctgggattacaggcatgagccaccacgcctggacaagagtttttaaaaaatcaacatcccgtggccaggtgtggtaactcatgcctg

SEQ ID NO: 8712 - DNA, 122 bp, Homo sapiens
  misc_feature (61)..(62): /note="This region represents a CpG dinucleotide"
  misc_feature (61)..(61): /note="Nucleotide may be methylated to form 5-methylcytosine"
taggtaaccccaaagatctctcagccacattgtcatagagcaaaaataattcagaagccccgatttttgcctcaggtctctttctcctaacacagacaacttccagcacttcatttccttaa

SEQ ID NO: 8713 - DNA, 122 bp, Homo sapiens
  misc_feature (61)..(62): /note="This region represents a CpG dinucleotide"
  misc_feature (61)..(61): /note="Nucleotide may be methylated to form 5-methylcytosine"
gttatggactttcttggggcctcaactctccccaagagcgtgatcctcactacgggggagcggcgctttatccggcggggcgggtggacactcctacagacccactttgacccattttctca

SEQ ID NO: 8714 - DNA, 122 bp, Homo sapiens
  misc_feature (61)..(62): /note="This region represents a CpG dinucleotide"
  misc_feature (61)..(61): /note="Nucleotide may be methylated to form 5-methylcytosine"
tgcgggaccctctgttgggggttctaattcgttttggcctgggctccttacatttctgtccggccaggcgcttttggacagcttttcgcagcggtgtctaagcttgtgttcggtgtccttgg

SEQ ID NO: 8715 - DNA, 122 bp, Homo sapiens
  misc_feature (61)..(62): /note="This region represents a CpG dinucleotide"
  misc_feature (61)..(61): /note="Nucleotide may be methylated to form 5-methylcytosine"
aatgccctctttgtctctctccttcccaccagacaagaccagcctcctcccacagccatacgttgacaacacgtgccaaggcctggggcaacagggtacccagggtgaagggctcacccaag

SEQ ID NO: 8716 - DNA, 122 bp, Homo sapiens
  misc_feature (61)..(62): /note="This region represents a CpG dinucleotide"
  misc_feature (61)..(61): /note="Nucleotide may be methylated to form 5-methylcytosine"
aaaaatcccaccttcctctcatagcctttcagattctccctggagctgaggttcatctcacgcccccttcatctatgctggccctgctctacttctcacagaggcatgttcttgccaagata

SEQ ID NO: 8717 - DNA, 122 bp, Homo sapiens
  misc_feature (61)..(62): /note="This region represents a CpG dinucleotide"
  misc_feature (61)..(61): /note="Nucleotide may be methylated to form 5-methylcytosine"
cattttaggttttgccgagtctatcctgcttatctctgttcccatggggacatgtatagacgtgtttcatatttagagcagctgggctgaactacgtctcagcaggtgtttcctgtgaaagg

SEQ ID NO: 8718 - DNA, 122 bp, Homo sapiens
  misc_feature (61)..(62): /note="This region represents a CpG dinucleotide"
  misc_feature (61)..(61): /note="Nucleotide may be methylated to form 5-methylcytosine"
cgtggctgcgcgggagtctctgagtctactctgactcaggaggctgctggaatcgcaaatcgtttgtttctcaattaaattccattaaatttaattcagctgaagtttttttttttttttaa

SEQ ID NO: 8719 - DNA, 122 bp, Homo sapiens
  misc_feature (61)..(62): /note="This region represents a CpG dinucleotide"
  misc_feature (61)..(61): /note="Nucleotide may be methylated to form 5-methylcytosine"
tatcataggctgttcccagaatgaggcaaccacaggaagcattcctgtggagttcctgtccgtcacttctgaacaagaggttgctgccagggtaggtggaaggacaacaagagcaggggcct

SEQ ID NO: 8720 - DNA, 122 bp, Homo sapiens
  misc_feature (61)..(62): /note="This region represents a CpG dinucleotide"
  misc_feature (61)..(61): /note="Nucleotide may be methylated to form 5-methylcytosine"
tcttctgagactgtaagatgttcttttggggactgggattgctgcctgccttccccgagacgtgtgtgtgtgtgtgtgtgtgtgtgtgtgtgtgtgtgtgtccagcatgtgtgcagctgggg

SEQ ID NO: 8721 - DNA, 122 bp, Homo sapiens
  misc_feature (61)..(62): /note="This region represents a CpG dinucleotide"
  misc_feature (61)..(61): /note="Nucleotide may be methylated to form 5-methylcytosine"
aggttgagggctcaggccgagagcatgtagaagcagttagctcactctttctagatgtggcggctgacaaggacaaagagggctgggactagaactgctgtagacaaggaaagcagccagtg

SEQ ID NO: 8722 - DNA, 122 bp, Homo sapiens
  misc_feature (61)..(62): /note="This region represents a CpG dinucleotide"
  misc_feature (61)..(61): /note="Nucleotide may be methylated to form 5-methylcytosine"
gggcagggcggcgaactggaggaagagggtggacgttggtgagaaccgcagtttcagccacgccagtgcagcgaaggcccccgatcaaaaagacagatttgttactagatgattcatcggtg

SEQ ID NO: 8723 - DNA, 122 bp, Homo sapiens
  misc_feature (61)..(62): /note="This region represents a CpG dinucleotide"
  misc_feature (61)..(61): /note="Nucleotide may be methylated to form 5-methylcytosine"
ccacatagtcaaatcatctcgaaactttccgcagcttctggtagatgaggaatgtgactacgtagcgcctaccgccccaaatgctattataaattccaagtcggcagggtgagcttttccgt

SEQ ID NO: 8724 - DNA, 122 bp, Homo sapiens
  misc_feature (61)..(62): /note="This region represents a CpG dinucleotide"
  misc_feature (61)..(61): /note="Nucleotide may be methylated to form 5-methylcytosine"
gtccatgaaatgcctcatccgtaagctcagtgacttaaaacaagcaagtgtgtggacttgcgtctgaagcaggtgtggagacaggaaaaatgtgagtcagttacggtgagatattgtggcta

SEQ ID NO: 8725 - DNA, 122 bp, Homo sapiens
  misc_feature (61)..(62): /note="This region represents a CpG dinucleotide"
  misc_feature (61)..(61): /note="Nucleotide may be methylated to form 5-methylcytosine"
tgcctgtctgcacccatctcccaggtcccaggttactggccctgtttgggcagctctgggcgcagcctgttcaccacaggcctggtacctgccttctccctgggcctcagcactcactcaca

SEQ ID NO: 8726 - DNA, 122 bp, Homo sapiens
  misc_feature (61)..(62): /note="This region represents a CpG dinucleotide"
  misc_feature (61)..(61): /note="Nucleotide may be methylated to form 5-methylcytosine"
tcacagagctctcaagactctgaacaaaacagtggaccatcaccttccaaaggtgatgcgcgcgcgcgcacacacacacacacacacacacacacacacacagtttggcattttgttatagg

SEQ ID NO: 8727 - DNA, 122 bp, Homo sapiens
  misc_feature (61)..(62): /note="This region represents a CpG dinucleotide"
  misc_feature (61)..(61): /note="Nucleotide may be methylated to form 5-methylcytosine"
gctaaaagaattcagatatgcacattgtattgccataatggtaaactttatggggcttcacggttgacacgttctatcccagctagggctaccagttcatgaggtacttcctgttctggggc

SEQ ID NO: 8728 - DNA, 122 bp, Homo sapiens
  misc_feature (61)..(62): /note="This region represents a CpG dinucleotide"
  misc_feature (61)..(61): /note="Nucleotide may be methylated to form 5-methylcytosine"
atcatccttgatctaacatcagcatatctgagacaatgagaattctttctctttgggaaccgataagattattgtaacagcctacacacacacactgacacacacgatcagtctgatggcaa

SEQ ID NO: 8729 - DNA, 122 bp, Homo sapiens
  misc_feature (61)..(62): /note="This region represents a CpG dinucleotide"
  misc_feature (61)..(61): /note="Nucleotide may be methylated to form 5-methylcytosine"
ggattaaaaacgaaccaacagttataatgattaacattacaacattaacattattattaacggtatttggacaatatgggtatgatagattgcaaaaatggctgtgattgttcatgcccctg

SEQ ID NO: 8730 - DNA, 122 bp, Homo sapiens
  misc_feature (61)..(62): /note="This region represents a CpG dinucleotide"
  misc_feature (61)..(61): /note="Nucleotide may be methylated to form 5-methylcytosine"
gggtcctgggtctccagctgccccagttgaacagggggctgtcccctgcggctctcaaggcgttccggggctgtgagtcatcgggaatgtctgttctgactgcggcttccctctcctgacgt

SEQ ID NO: 8731 - DNA, 122 bp, Homo sapiens
  misc_feature (61)..(62): /note="This region represents a CpG dinucleotide"
  misc_feature (61)..(61): /note="Nucleotide may be methylated to form 5-methylcytosine"
tccctaacatattttcccaagcaaattcagtcaagtccaactttcaaaacatcccaactgcgcaactaaatgctataacaaagtaggaggagacaaacaactgtactcggtgtccacttcct

SEQ ID NO: 8732 - DNA, 122 bp, Homo sapiens
  misc_feature (61)..(62): /note="This region represents a CpG dinucleotide"
  misc_feature (61)..(61): /note="Nucleotide may be methylated to form 5-methylcytosine"
gctccaagttaaccagaacacaagaatcgaaaaagcctgtgagatactggtgctcgtgatcgtaagctccaggtcggggggttttcagatgaacacaaaaagggggctgctcccgtcccaag

SEQ ID NO: 8733 - DNA, 122 bp, Homo sapiens
  misc_feature (61)..(62): /note="This region represents a CpG dinucleotide"
  misc_feature (61)..(61): /note="Nucleotide may be methylated to form 5-methylcytosine"
caagctcaacatgtggcaaaggtcggtgagttcctcctgccccagggaccctgtgcccgtcgtgtcaaaactgtcaaacagctccttgagtcgggcctcatgctggtcctgctccacctcat

SEQ ID NO: 8734 - DNA, 122 bp, Homo sapiens
  misc_feature (61)..(62): /note="This region represents a CpG dinucleotide"
  misc_feature (61)..(61): /note="Nucleotide may be methylated to form 5-methylcytosine"
ctgccgccaggcgcggggcgggacaggactccgcctccggcccatacaaagggaagcccacgtcttaagccaatcaacacagcctcgcccgagccgggaagcggagagctgtgggcgtgcgc

SEQ ID NO: 8735 - DNA, 122 bp, Homo sapiens
  misc_feature (61)..(62): /note="This region represents a CpG dinucleotide"
  misc_feature (61)..(61): /note="Nucleotide may be methylated to form 5-methylcytosine"
cgagggcgagagtctgcggcgccttggccttccgcacaaccagttggccgcccaggccggcgccaccacgccttccgccgagtccctgggctccgaggccagcgccacgtcgggctcctcag

SEQ ID NO: 8736 - DNA, 122 bp, Homo sapiens
  misc_feature (61)..(62): /note="This region represents a CpG dinucleotide"
  misc_feature (61)..(61): /note="Nucleotide may be methylated to form 5-methylcytosine"
tgaaataaaagctgtccttttacatagcacgacagatgcacaaagaaatttgaacgttctcgtattaaaaaaaaaaaaaaaaaaaaaaaaaaaaaaaaaagcctgcggcacactccaaaatc

SEQ ID NO: 8737 - DNA, 122 bp, Homo sapiens
  misc_feature (61)..(62): /note="This region represents a CpG dinucleotide"
  misc_feature (61)..(61): /note="Nucleotide may be methylated to form 5-methylcytosine"
gcatcgtcacgtgctctgtctgcgccccgagtggcctcttctcctcctccacagacacctcggggaggggtcatccttcagacacgctgagcctaggctgcccgcccttccgcagccccgcc

SEQ ID NO: 8738 - DNA, 122 bp, Homo sapiens
  misc_feature (61)..(62): /note="This region represents a CpG dinucleotide"
  misc_feature (61)..(61): /note="Nucleotide may be methylated to form 5-methylcytosine"
caaatgcagtaaacagcctctgttggtggtgacctgctttgagtacaggtcagggggacacgccccactggaggtggtggggttgtcctatacaaacccgcccaccattcaggccattgtgt

SEQ ID NO: 8739 - DNA, 122 bp, Homo sapiens
  misc_feature (61)..(62): /note="This region represents a CpG dinucleotide"
  misc_feature (61)..(61): /note="Nucleotide may be methylated to form 5-methylcytosine"
attatagtaacaatgccctcctggggaaagtaccagctttttacttgtgactgaaaacggcgctttcaattttgatttgttttgacattttagttgctgttattaaaatttgtattttaatt

SEQ ID NO: 8740 - DNA, 122 bp, Homo sapiens
  misc_feature (61)..(62): /note="This region represents a CpG dinucleotide"
  misc_feature (61)..(61): /note="Nucleotide may be methylated to form 5-methylcytosine"
ctcaagcaatcctccctcctcggcttcccaaagtgtagggattacaggcgtgagccactgcgccctgccaaaagagggctttagggcaccccagaacgcgagatccccctcatctgtaatct

SEQ ID NO: 8741 - DNA, 122 bp, Homo sapiens
  misc_feature (61)..(62): /note="This region represents a CpG dinucleotide"
  misc_feature (61)..(61): /note="Nucleotide may be methylated to form 5-methylcytosine"
cattaaaaccttgaaggaagcaatggatgtcatcgccccaagtcttcgtttactaggtcccgatctccattctatttattcaagactaccacagctccttcaaaaaatcagaaacatcaacc

SEQ ID NO: 8742 - DNA, 122 bp, Homo sapiens
  misc_feature (61)..(62): /note="This region represents a CpG dinucleotide"
  misc_feature (61)..(61): /note="Nucleotide may be methylated to form 5-methylcytosine"
gcaactaaatgaagttcttttgtaggtgttcacatggtccagcaggtggtagaaatgtaccgtttgaaaccttaatggttttcacagaattatgaatctgataaatcagacttgggttatga

SEQ ID NO: 8743 - DNA, 122 bp, Homo sapiens
  misc_feature (61)..(62): /note="This region represents a CpG dinucleotide"
  misc_feature (61)..(61): /note="Nucleotide may be methylated to form 5-methylcytosine"
agcggtcgggaccctcgggcaatgagagcaaggtagagtccatccgagaggacacgtccgcggtttgctgcaaaaagccccctttggctgctgcgtggagggaggctccggagagcgtggaa

SEQ ID NO: 8744 - DNA, 122 bp, Homo sapiens
  misc_feature (61)..(62): /note="This region represents a CpG dinucleotide"
  misc_feature (61)..(61): /note="Nucleotide may be methylated to form 5-methylcytosine"
tgccggcggcgtcgacagcgacagcgtttggaatgacgcatgcctcggtgaagtcgggggcgtgaagcaacactgtctctctcctaagcacacgctgtgccgagggaccggatcctgggctg

SEQ ID NO: 8745 - DNA, 122 bp, Homo sapiens
  misc_feature (61)..(62): /note="This region represents a CpG dinucleotide"
  misc_feature (61)..(61): /note="Nucleotide may be methylated to form 5-methylcytosine"
attaaaatgtttgtagtcacccagttgtctctatcattacaatgcttgtgatcagccaggcgtgtctcctattagaatgtctggggtcacccaggtttctctattactacaatgcctgtggt

SEQ ID NO: 8746 - DNA, 122 bp, Homo sapiens
  misc_feature (61)..(62): /note="This region represents a CpG dinucleotide"
  misc_feature (61)..(61): /note="Nucleotide may be methylated to form 5-methylcytosine"
agtgtgggtacgagtggaggagtgagcttcccagagccgccgggctccccgaaagtggagcgccgccgccgccgccgcccaagctcacagctgaaagcactgcggaggagccggcgcgggcg

SEQ ID NO: 8747 - DNA, 122 bp, Homo sapiens
  misc_feature (61)..(62): /note="This region represents a CpG dinucleotide"
  misc_feature (61)..(61): /note="Nucleotide may be methylated to form 5-methylcytosine"
atgttggaactcagtgctgccctgtcaaatggaaagcaacgtgagagagaattcagccagcgcccccagaggtagaatttagactagccccagccagaagggagtcacctaaccccatggtc

SEQ ID NO: 8748 - DNA, 122 bp, Homo sapiens
  misc_feature (61)..(62): /note="This region represents a CpG dinucleotide"
  misc_feature (61)..(61): /note="Nucleotide may be methylated to form 5-methylcytosine"
acaagggaccaccctgatattgctagtgacctttctctacttggaatgtttcagtagtctcgccttcagagctgtgagttatggaattcagaaccccagaagcctctccatttcttttgcta

SEQ ID NO: 8749 - DNA, 122 bp, Homo sapiens
  misc_feature (61)..(62): /note="This region represents a CpG dinucleotide"
  misc_feature (61)..(61): /note="Nucleotide may be methylated to form 5-methylcytosine"
aatgcttccaccaggtccctgctgggtagtgtcactttagcctgcgagggacaggtgacacgagttacagacaggctgcaggaggtaacttggtccatgtgcatacactatacagaatttta

SEQ ID NO: 8750 - DNA, 122 bp, Homo sapiens
  misc_feature (61)..(62): /note="This region represents a CpG dinucleotide"
  misc_feature (61)..(61): /note="Nucleotide may be methylated to form 5-methylcytosine"
tctccacaatgggaccaggataaagtgttactaaaacacatagcagctaattttgctctgcgtggccacttctgtatccttggctaacctgggaaattatcctgcaagtgtgtgtgtgttct

SEQ ID NO: 8751 - DNA, 122 bp, Homo sapiens
  misc_feature (61)..(62): /note="This region represents a CpG dinucleotide"
  misc_feature (61)..(61): /note="Nucleotide may be methylated to form 5-methylcytosine"
cttgactcagttcctccttgctgccacttcagaaggcaggtattatgggttccacctttacgattgaagtcaaatctcagagaggttaagtatgctgttcaagggcatccagccatgcggaa

SEQ ID NO: 8752 - DNA, 122 bp, Homo sapiens
  misc_feature (61)..(62): /note="This region represents a CpG dinucleotide"
  misc_feature (61)..(61): /note="Nucleotide may be methylated to form 5-methylcytosine"
tggatgtgtctgactcaactacagagaagcgccctccccatctctgctccgtgtaaattccgtactgttggtgcctccctggagcctaaaaaacattagccagtttcctcagtctccttcac

SEQ ID NO: 8753 - DNA, 122 bp, Homo sapiens
  misc_feature (61)..(62): /note="This region represents a CpG dinucleotide"
  misc_feature (61)..(61): /note="Nucleotide may be methylated to form 5-methylcytosine"
acatttaaagttttctgttgcctgtcttcatttttcctttgtagttttcacctggaattacgtacctactttgaaatcacctagagcataattctaaaatcattacattactcttaaatcag

SEQ ID NO: 8754 - DNA, 122 bp, Homo sapiens
  misc_feature (61)..(62): /note="This region represents a CpG dinucleotide"
  misc_feature (61)..(61): /note="Nucleotide may be methylated to form 5-methylcytosine"
ggagcttgtcccggatcaagcccagcaggcgccggccggctgagcctagtgagggagccccgtgagcccgtgccagcccggaacccgcaccagcctgcaagcgccacgctcagccccggctg

SEQ ID NO: 8755 - DNA, 122 bp, Homo sapiens
  misc_feature (61)..(62): /note="This region represents a CpG dinucleotide"
  misc_feature (61)..(61): /note="Nucleotide may be methylated to form 5-methylcytosine"
accacttgcacggaaattgttgtctcagagtctgctcctgagggaactcaaatgaagaaacggggccaccctggtctctttcacttttgttctgtgctcttcttgttaccatttgacttatc

SEQ ID NO: 8756 - DNA, 122 bp, Homo sapiens
  misc_feature (61)..(62): /note="This region represents a CpG dinucleotide"
  misc_feature (61)..(61): /note="Nucleotide may be methylated to form 5-methylcytosine"
actctttaattttttgttttaagatatgtttttttgcacggcacctaaatttcagaggatcgcgttagtcacactgaaaagctaaagctttgactcactgatttgtcacttaattcatatca

SEQ ID NO: 8757 - DNA, 122 bp, Homo sapiens
  misc_feature (61)..(62): /note="This region represents a CpG dinucleotide"
  misc_feature (61)..(61): /note="Nucleotide may be methylated to form 5-methylcytosine"
acacccctcccttgggttttgacatgtgaaccctcctcagtcaccactaggtacacaaagcgtccttgccaaaaatgcaagacagctctacaaaccttttgtttcaataaggaagaaatgtg

SEQ ID NO: 8758 - DNA, 122 bp, Homo sapiens
  misc_feature (61)..(62): /note="This region represents a CpG dinucleotide"
  misc_feature (61)..(61): /note="Nucleotide may be methylated to form 5-methylcytosine"
cacaaaaagtggttggagcctcagatttgcctagcgttccccctaaacactcacatgggacggtactttgtgtgtgcatgttattgtataaatgcatgtgccctcaactatcagaaagcata

SEQ ID NO: 8759 - DNA, 122 bp, Homo sapiens
  misc_feature (61)..(62): /note="This region represents a CpG dinucleotide"
  misc_feature (61)..(61): /note="Nucleotide may be methylated to form 5-methylcytosine"
gacagcccggagattagtctccaaggccacaacgccagttgccataggcacgcaggcccgcgtcaggactgcgatttctcatcctggtcacgcaggcaggcggccgcccctgcccgcctgcc

SEQ ID NO: 8760 - DNA, 122 bp, Homo sapiens
  misc_feature (61)..(62): /note="This region represents a CpG dinucleotide"
  misc_feature (61)..(61): /note="Nucleotide may be methylated to form 5-methylcytosine"
tcttggggccctccctctcagacccaggcacccatgctgtgagaatcccagcctaggatacgtgtagcctctccagtcaacagccctggtggagtggccagcccagagtgagtcagcatcaa

SEQ ID NO: 8761 - DNA, 122 bp, Homo sapiens
  misc_feature (61)..(62): /note="This region represents a CpG dinucleotide"
  misc_feature (61)..(61): /note="Nucleotide may be methylated to form 5-methylcytosine"
aattatctttaacaatacttaaaaggaaatatctttgttcccattttataacctgagaaacgtagagataacagatgaagaatgtaaatctaatttcatgggctcccaaaacagcattctgt

SEQ ID NO: 8762 - DNA, 122 bp, Homo sapiens
  misc_feature (61)..(62): /note="This region represents a CpG dinucleotide"
  misc_feature (61)..(61): /note="Nucleotide may be methylated to form 5-methylcytosine"
gtcactggggtagagttttcaacataaacagttgtttcctaattttccagcgtttaaaaccgtatcatagtagtggtaaatgacaaaaattattttcttattatctagggtatatttgttca

SEQ ID NO: 8763 - DNA, 122 bp, Homo sapiens
  misc_feature (61)..(62): /note="This region represents a CpG dinucleotide"
  misc_feature (61)..(61): /note="Nucleotide may be methylated to form 5-methylcytosine"
gcttagaatgtacctgtgcatgggcatttttctctagaggcttatttgtgaatatcattacgttagactagcagcaatttgctcagaactcagtttgtgttaaagtaggattttcttttttg

SEQ ID NO: 8764 - DNA, 122 bp, Homo sapiens
  misc_feature (61)..(62): /note="This region represents a CpG dinucleotide"
  misc_feature (61)..(61): /note="Nucleotide may be methylated to form 5-methylcytosine"
cctctgacgccaaggagccagccagaaaccagcggtggtgagcacgggctcccccgggagcggtttcctttgtgagcaaggccaggatgggccgcccaggctagctgctcccagagccacaa

SEQ ID NO: 8765 - DNA, 122 bp, Homo sapiens
  misc_feature (61)..(62): /note="This region represents a CpG dinucleotide"
  misc_feature (61)..(61): /note="Nucleotide may be methylated to form 5-methylcytosine"
aagtggaacaactctaccttgttcctcttactacttaaggctagggttgcctttctcaggcgtgcgagaaaaaaaaatttttcatttccaaagcttgctctgtttcagttttaccaactctc

SEQ ID NO: 8766 - DNA, 122 bp, Homo sapiens
  misc_feature (61)..(62): /note="This region represents a CpG dinucleotide"
  misc_feature (61)..(61): /note="Nucleotide may be methylated to form 5-methylcytosine"
ttgcggttttcgggctttttctcagctgcggtgcatttgtggcttttatttctgcactgccgcttgttacttggagccattacttcctatctgtgttgtcaatcgtgtcttgaggttattct

SEQ ID NO: 8767 - DNA, 122 bp, Homo sapiens
  misc_feature (61)..(62): /note="This region represents a CpG dinucleotide"
  misc_feature (61)..(61): /note="Nucleotide may be methylated to form 5-methylcytosine"
tttaggttcagaaattctctctgtaggctaatcttttcaatcgaatgctttgccttcagacgtcaatggaatgagctaagaaatgttatagtcaatgatttttgcatcattaaaagtagcac

SEQ ID NO: 8768 - DNA, 122 bp, Homo sapiens
  misc_feature (61)..(62): /note="This region represents a CpG dinucleotide"
  misc_feature (61)..(61): /note="Nucleotide may be methylated to form 5-methylcytosine"
tccagttctccttgtactttaaatctcactgacttcccttctgcctccagttagtggaaacgccctgcttttaaagggctcacctgactgagtcaggtccacctgcactttctctccatatg

SEQ ID NO: 8769 - DNA, 122 bp, Homo sapiens
  misc_feature (61)..(62): /note="This region represents a CpG dinucleotide"
  misc_feature (61)..(61): /note="Nucleotide may be methylated to form 5-methylcytosine"
cagcctctgggcagggattttgttccatgcttctttgtgtctccaccaccaggaggtgtacgctcctgattctccgggtgttcctgtgcatcatccttgagagtgagacctaggttgttggt

SEQ ID NO: 8770 - DNA, 122 bp, Homo sapiens
  misc_feature (61)..(62): /note="This region represents a CpG dinucleotide"
  misc_feature (61)..(61): /note="Nucleotide may be methylated to form 5-methylcytosine"
ttgtaatcttcaaatcccagcttgcctgctctaatggccatttgttgtttttgtcttccccgcatgcttcccaccttcttctagtaacagcgactccccttccttaagggatctcctccttc

SEQ ID NO: 8771 - DNA, 122 bp, Homo sapiens
  misc_feature (61)..(62): /note="This region represents a CpG dinucleotide"
  misc_feature (61)..(61): /note="Nucleotide may be methylated to form 5-methylcytosine"
taatacaatggcagtggaaggtggaagtgtggccagatgcttttgagtccttctttcttccggtcaggagagtaatggactttctgtgagtcacaatgagcacaactgttgcattagggtga

SEQ ID NO: 8772 - DNA, 122 bp, Homo sapiens
  misc_feature (61)..(62): /note="This region represents a CpG dinucleotide"
  misc_feature (61)..(61): /note="Nucleotide may be methylated to form 5-methylcytosine"
tagctaaaaatggttactagctgattccaccgggaattcccattgaagctaagtgactcacggcttatttttagatcatcttgccaatattgccatgtatttaattactagatatattaaaa

SEQ ID NO: 8773 - DNA, 122 bp, Homo sapiens
  misc_feature (61)..(62): /note="This region represents a CpG dinucleotide"
  misc_feature (61)..(61): /note="Nucleotide may be methylated to form 5-methylcytosine"
taactgctccactccagccaaacccagaaaacagttttgccccaccaccacccacaccaacgaaagctaagtgaggagccttgacttccagctcataaaccatagtgaggagctccaatgcc

SEQ ID NO: 8774 - DNA, 122 bp, Homo sapiens
  misc_feature (61)..(62): /note="This region represents a CpG dinucleotide"
  misc_feature (61)..(61): /note="Nucleotide may be methylated to form 5-methylcytosine"
taaaaacaaattgatatgctctaattgcaaatgtctggattgtttgtctccgacagcaatcgtctgaaagcaaacagctgattggtccagctgggggaggttgtttcctgacaaacacgctc

SEQ ID NO: 8775 - DNA, 122 bp, Homo sapiens
  misc_feature (61)..(62): /note="This region represents a CpG dinucleotide"
  misc_feature (61)..(61): /note="Nucleotide may be methylated to form 5-methylcytosine"
cagggccacattgttggctccccaaccctgactgtttcaacttgattctgtctatttgcacgctgggctgatgtcatttgcatggtagcggctggatttcaaaatgctcagaaatccccttc

SEQ ID NO: 8776 - DNA, 122 bp, Homo sapiens
  misc_feature (61)..(62): /note="This region represents a CpG dinucleotide"
  misc_feature (61)..(61): /note="Nucleotide may be methylated to form 5-methylcytosine"
tagggtgtacaccaaggaaatcactttataacctcacttcacctcttcatttacatacaacggaagccatgtcaccaatgggaaacctctagagggtatttaaacgacaggaaattctgaac

SEQ ID NO: 8777 - DNA, 122 bp, Homo sapiens
  misc_feature (61)..(62): /note="This region represents a CpG dinucleotide"
  misc_feature (61)..(61): /note="Nucleotide may be methylated to form 5-methylcytosine"
accggcaggggagccatagctcagcccctacccctggctcatgacgccaggatgagctgccgggatccacagcctgaccccacacctgcccagcaaccacgtggccggcagcagtcccccgg

SEQ ID NO: 8778 - DNA, 122 bp, Homo sapiens
  misc_feature (61)..(62): /note="This region represents a CpG dinucleotide"
  misc_feature (61)..(61): /note="Nucleotide may be methylated to form 5-methylcytosine"
gaagagcaaatcactaagcaaacgaaattaaacgcccaaacactgcaagtacaaacaaaccgcacttccctctgtggagtgagatcagggctcatcactggacattgaaaataaaacaattc

SEQ ID NO: 8779 - DNA, 122 bp, Homo sapiens
  misc_feature (61)..(62): /note="This region represents a CpG dinucleotide"
  misc_feature (61)..(61): /note="Nucleotide may be methylated to form 5-methylcytosine"
agtttgttgcaaagtgacaaattatacttgtatatattttgcaggaacagtgttatattacgaaaaaggtattttcagattttttggatgttgtgagcctggcgtaatgctattctcattag

SEQ ID NO: 8780 - DNA, 122 bp, Homo sapiens
  misc_feature (61)..(62): /note="This region represents a CpG dinucleotide"
  misc_feature (61)..(61): /note="Nucleotide may be methylated to form 5-methylcytosine"
cctgccagacctgcagcctccagaactatgaggcaagggcttcctgttgctcaagcctggcggtttgtggtgctttgtaaagtgggtagtcctagcaaagccaggcaggatctgcagggtcg

SEQ ID NO: 8781 - DNA, 122 bp, Homo sapiens
  misc_feature (61)..(62): /note="This region represents a CpG dinucleotide"
  misc_feature (61)..(61): /note="Nucleotide may be methylated to form 5-methylcytosine"
tatttttaacttatagtcaaagaggctcaaggaagatgatcaacaacttaaatattgcagcgatattaaggaaaacaaggctaggaaaatgtctgaatatacagacattgggtcttttgaat

SEQ ID NO: 8782 - DNA, 122 bp, Homo sapiens
  misc_feature (61)..(62): /note="This region represents a CpG dinucleotide"
  misc_feature (61)..(61): /note="Nucleotide may be methylated to form 5-methylcytosine"
ggcgtcttttgttccacagggcatgggctgggctcactcatttaagctccatcctgcgggcggctgggctgagcagtccaagattttactcacatggtgcctccgtgctcctgcactgtggc

SEQ ID NO: 8783 - DNA, 122 bp, Homo sapiens
  misc_feature (61)..(62): /note="This region represents a CpG dinucleotide"
  misc_feature (61)..(61): /note="Nucleotide may be methylated to form 5-methylcytosine"
ttcctttctacccatacctttgccttaatacactcaagacatgtatggacaagctctaagcggtctaaggtgaacaaaagaaaagggaaggagaataaacaagaccaactgtttctgtttgc

SEQ ID NO: 8784 - DNA, 122 bp, Homo sapiens
  misc_feature (61)..(62): /note="This region represents a CpG dinucleotide"
  misc_feature (61)..(61): /note="Nucleotide may be methylated to form 5-methylcytosine"
cacctgccccttaacgaaaagtaaaccatcgccttgtttgacagtttaagtgcagtgatacggatggaggcaggtttacgttatgttaaaggcttgacaacccagaacccccctgttggttt

SEQ ID NO: 8785 - DNA, 122 bp, Homo sapiens
  misc_feature (61)..(62): /note="This region represents a CpG dinucleotide"
  misc_feature (61)..(61): /note="Nucleotide may be methylated to form 5-methylcytosine"
aattctactacaaagtccatggttgcacaacagacttctttaaattctcttacagccatgcgtagaatgtcaaatggaccctgtattagttcgttctcacactgctatgaaaaaatacatga

SEQ ID NO: 8786 - DNA, 122 bp, Homo sapiens
  misc_feature (61)..(62): /note="This region represents a CpG dinucleotide"
  misc_feature (61)..(61): /note="Nucleotide may be methylated to form 5-methylcytosine"
tgcagacaaacagaggtctggctctttgttcttaccagcaggttcatcagctgttttctccgcaaaagaaagttctgagaaagtgaaggcaaacattttctttccactgaaatgaacacaaa

SEQ ID NO: 8787 - DNA, 122 bp, Homo sapiens
  misc_feature (61)..(62): /note="This region represents a CpG dinucleotide"
  misc_feature (61)..(61): /note="Nucleotide may be methylated to form 5-methylcytosine"
ccttctctggacgtgaagctgggtgggagggtgggggacgagaagaggctgcagaggaggcgggggctctgaatccacccagccaggccagccctgtctctgtgactacaaagaatgttctg

SEQ ID NO: 8788 - DNA, 122 bp, Homo sapiens
  misc_feature (61)..(62): /note="This region represents a CpG dinucleotide"
  misc_feature (61)..(61): /note="Nucleotide may be methylated to form 5-methylcytosine"
gagtaactgaatggagtacagaaggaacagaaagcaggttttggtgagttcagtcacgtacgtaagctgaaaatgttacaacaaatgtagacagctcttcaggaagttgggctgtgatgggg

SEQ ID NO: 8789 - DNA, 122 bp, Homo sapiens
  misc_feature (61)..(62): /note="This region represents a CpG dinucleotide"
  misc_feature (61)..(61): /note="Nucleotide may be methylated to form 5-methylcytosine"
cagccactggagcacctctctggacccacaaagtatgctcaggcccaacactgccctctgcgggagcctgcttggcctctccattgctgtgcaagcgatttcagcctggcccaaagagctcc

SEQ ID NO: 8790 - DNA, 122 bp, Homo sapiens
  misc_feature (61)..(62): /note="This region represents a CpG dinucleotide"
  misc_feature (61)..(61): /note="Nucleotide may be methylated to form 5-methylcytosine"
aaaacaagactgtcatgaacatgcttgagtctactttactggcttacctcatgcatagtgcgctgagaatcagactgaaagaagcttttgataaaggaattgtaatttcttgtatgcatttt

SEQ ID NO: 8791 - DNA, 122 bp, Homo sapiens
  misc_feature (61)..(62): /note="This region represents a CpG dinucleotide"
  misc_feature (61)..(61): /note="Nucleotide may be methylated to form 5-methylcytosine"
agataagaatgccacccacctccttcatgcaatgatagggaaacgcaagtaacaggagggcgcttaacagtttgccagacatgtggcccacgctcgctcactcctggacaggatagggctgt

SEQ ID NO: 8792 - DNA, 122 bp, Homo sapiens
  misc_feature (61)..(62): /note="This region represents a CpG dinucleotide"
  misc_feature (61)..(61): /note="Nucleotide may be methylated to form 5-methylcytosine"
tatcctcctctactagaatgtaatctcaagaccagcaacattctactgaacctagaacagcgcctggcactttgtgaatattcatcgtatagttgaataaaagaataaatgagcagaataat

SEQ ID NO: 8793 - DNA, 122 bp, Homo sapiens
  misc_feature (61)..(62): /note="This region represents a CpG dinucleotide"
  misc_feature (61)..(61): /note="Nucleotide may be methylated to form 5-methylcytosine"
aaaggcctcacaatgctccatcaacggtgatctctgctgagcagaggcacaaagaggcaacgtgacatttggtgacagcaacagactaggacttggggttttgtccctaggtggcccctgca

SEQ ID NO: 8794 - DNA, 122 bp, Homo sapiens
  misc_feature (61)..(62): /note="This region represents a CpG dinucleotide"
  misc_feature (61)..(61): /note="Nucleotide may be methylated to form 5-methylcytosine"
cctagaaacctggtaaaaatgggaatggtaattgcccagctcatggtctgtgaccgcggccgggtgctgggaagcttaatctcaatgcttcctccaagaaaataaatgcttttatgatgctc

SEQ ID NO: 8795 - DNA, 122 bp, Homo sapiens
  misc_feature (61)..(62): /note="This region represents a CpG dinucleotide"
  misc_feature (61)..(61): /note="Nucleotide may be methylated to form 5-methylcytosine"
taaatgaaatagtctaagtaggtcgagtgcttaacacagtcctgactcatcgaaagtgctcgcttcatggcactgcttaatactgttgttattgttactgtatttcctccgatacccatgac

SEQ ID NO: 8796 - DNA, 122 bp, Homo sapiens
  misc_feature (61)..(62): /note="This region represents a CpG dinucleotide"
  misc_feature (61)..(61): /note="Nucleotide may be methylated to form 5-methylcytosine"
caaacacagaaatgcgaagtgattaaccatcctcaattgttttttcattttatatactaacgagctattctttttcatttttaggtcttgaatataatcatggccaaaccttatgaatttaa

SEQ ID NO: 8797 - DNA, 122 bp, Homo sapiens
  misc_feature (61)..(62): /note="This region represents a CpG dinucleotide"
  misc_feature (61)..(61): /note="Nucleotide may be methylated to form 5-methylcytosine"
ttgtttggttcctgcctttgtcttatgacttacaggttaaaaatggtgttttgggcattgcgccgatatggctggttaccctctccctcctgcacacataggaaccaccccttcctgccctg

SEQ ID NO: 8798 - DNA, 122 bp, Homo sapiens
  misc_feature (61)..(62): /note="This region represents a CpG dinucleotide"
  misc_feature (61)..(61): /note="Nucleotide may be methylated to form 5-methylcytosine"
ctatcagctctgtcttcccatagcctatggtactttttttatgtggatgtctttattaagcgtgtgttatcttgtagtgtaagtatttatcatctgacttcccttttaaaccataagtccct

SEQ ID NO: 8799 - DNA, 122 bp, Homo sapiens
  misc_feature (61)..(62): /note="This region represents a CpG dinucleotide"
  misc_feature (61)..(61): /note="Nucleotide may be methylated to form 5-methylcytosine"
aacccactgaattgtacactttaagtgggtgaattgcacagtaagtaagtggataaattgcgtagtgagtcataccttaaaaagctgtctttcaaaaagatatgtgcagttttacttgacaa

SEQ ID NO: 8800 - DNA, 122 bp, Homo sapiens
  misc_feature (61)..(62): /note="This region represents a CpG dinucleotide"
  misc_feature (61)..(61): /note="Nucleotide may be methylated to form 5-methylcytosine"
agatcgacccatcaaaaagatcccctccttcccttttccctgccatcttttctccactgacgcctgctaacagctcccgtcgcaccaggtatctgtttagggaatctcattctgccaaacca

SEQ ID NO: 8801 - DNA, 122 bp, Homo sapiens
  misc_feature (61)..(62): /note="This region represents a CpG dinucleotide"
  misc_feature (61)..(61): /note="Nucleotide may be methylated to form 5-methylcytosine"
atttactatagcatttatctagatcaagctttaataaatctgaccacattgatgatgactcgttactagcatatggtagtacacatgcacacacagctactaggcatttgaaagatcccaag

SEQ ID NO: 8802 - DNA, 122 bp, Homo sapiens
  misc_feature (61)..(62): /note="This region represents a CpG dinucleotide"
  misc_feature (61)..(61): /note="Nucleotide may be methylated to form 5-methylcytosine"
gcacatgctcacaagtcaactttggcaggaaactagcaaaggtctgttccctaccatttgcgttgcatctttatctctccggttcattgtttgccactgagtgcttaaacctcaacttccca

SEQ ID NO: 8803 - DNA, 122 bp, Homo sapiens
  misc_feature (61)..(62): /note="This region represents a CpG dinucleotide"
  misc_feature (61)..(61): /note="Nucleotide may be methylated to form 5-methylcytosine"
cccagatgtacacggggttgtcaccacttcttgctttgatccagtcaaaaacgtggagtgcgtcataggtcatgccccgctcagatggcgttcccactgagtcaccccaacctgggagggag

SEQ ID NO: 8804 - DNA, 122 bp, Homo sapiens
  misc_feature (61)..(62): /note="This region represents a CpG dinucleotide"
  misc_feature (61)..(61): /note="Nucleotide may be methylated to form 5-methylcytosine"
gcacagatcctggtatagaatagacctcttactaaggtttgttggatgatggatgaattacggtatgcctggggctataggtgcctgagaatggtaaacattcaccacaccccacttagcct

SEQ ID NO: 8805 - DNA, 122 bp, Homo sapiens
  misc_feature (61)..(62): /note="This region represents a CpG dinucleotide"
  misc_feature (61)..(61): /note="Nucleotide may be methylated to form 5-methylcytosine"
aggcctcggggagggcaccccctaagaccacagtggccaagatcacagtggccacggccacggccacagtcatggtggccacggccacagccactaatcaggaggccaggccaccctgcctc

SEQ ID NO: 8806 - DNA, 122 bp, Homo sapiens
  misc_feature (61)..(62): /note="This region represents a CpG dinucleotide"
  misc_feature (61)..(61): /note="Nucleotide may be methylated to form 5-methylcytosine"
agatataaaaagtggcttccaagctatgtaaccaatgaatcctagactgtgtagaacacacgtttgtatgtgtgtgtgtgtgtgtttcaatttgtgtgcttttgtgaagatttcatgttgcc

SEQ ID NO: 8807 - DNA, 122 bp, Homo sapiens
  misc_feature (61)..(62): /note="This region represents a CpG dinucleotide"
  misc_feature (61)..(61): /note="Nucleotide may be methylated to form 5-methylcytosine"
gccagttcaacctcaatacaatagaataccaggtagacttctgaggtttttgactcagtacgagtcccagacaccacttctggacccatttggggcctgagggacctcacagcccttaaggg

SEQ ID NO: 8808 - DNA, 122 bp, Homo sapiens
  misc_feature (61)..(62): /note="This region represents a CpG dinucleotide"
  misc_feature (61)..(61): /note="Nucleotide may be methylated to form 5-methylcytosine"
cttacgtgcctgagtcggagatttgtatctgtggggttctgagcttacctttcaaacatccgttttggcctcggggaccgtagattaaaggagcagtaacaggagaaatgtaacttgtagtt

SEQ ID NO: 8809 - DNA, 122 bp, Homo sapiens
  misc_feature (61)..(62): /note="This region represents a CpG dinucleotide"
  misc_feature (61)..(61): /note="Nucleotide may be methylated to form 5-methylcytosine"
gggaggcagtgaataggatgcagctgggtggatcacctcctcttcccctggaggcagtgacgtctgtcactcctaggagatgattaaaatgttgctgctattgttaaattttggcaagtaga

SEQ ID NO: 8810 - DNA, 122 bp, Homo sapiens
  misc_feature (61)..(62): /note="This region represents a CpG dinucleotide"
  misc_feature (61)..(61): /note="Nucleotide may be methylated to form 5-methylcytosine"
caagtgaaatgagttcagtgatctcattctagtccttcgactcctgtccacatcactaagcgactgcacagcttggcacaggccaggatgagtcagcagtctctggtcatgagaggccaggc

SEQ ID NO: 8811 - DNA, 122 bp, Homo sapiens
  misc_feature (61)..(62): /note="This region represents a CpG dinucleotide"
  misc_feature (61)..(61): /note="Nucleotide may be methylated to form 5-methylcytosine"
ctttgctttcttatctccagctcacacctttaagtcttatgtagttaaaggacatttatccgcctccttggagaacacagccctccagtgtctcctgcagcctggagcctgggacattctgg

SEQ ID NO: 8812 - DNA, 122 bp, Homo sapiens
  misc_feature (61)..(62): /note="This region represents a CpG dinucleotide"
  misc_feature (61)..(61): /note="Nucleotide may be methylated to form 5-methylcytosine"
taggagaccttgtcgagtgattcaggtcagctctctgccttaggcaaggatcatccatgccggggcttttaagatgggatattagcctgtcatatgtatagaaaatattgaatttttttgaa

SEQ ID NO: 8813 - DNA, 122 bp, Homo sapiens
  misc_feature (61)..(62): /note="This region represents a CpG dinucleotide"
  misc_feature (61)..(61): /note="Nucleotide may be methylated to form 5-methylcytosine"
agtctagctccagggcatccttgagagtccaaatgaactcagtcagggagctcagggccacgctttgtcatttgccttcaaagaaattgcactctatctgcttaagacagtcttagtgctag

SEQ ID NO: 8814 - DNA, 122 bp, Homo sapiens
  misc_feature (61)..(62): /note="This region represents a CpG dinucleotide"
  misc_feature (61)..(61): /note="Nucleotide may be methylated to form 5-methylcytosine"
atattcccaaaagctctatttttttttctttcttcttttaggttctctgtgttctatcgacgtctggtgcaatggagaagtcaggagatggtacttgaatcctgactctgtcacaagctggc

SEQ ID NO: 8815 - DNA, 122 bp, Homo sapiens
  misc_feature (61)..(62): /note="This region represents a CpG dinucleotide"
  misc_feature (61)..(61): /note="Nucleotide may be methylated to form 5-methylcytosine"
acaagtgtctgtccgcaacgtgtcagatttcgaaactgccttgcaatccagtccggaactcgcagctttagcccgggggaacagacgttcgtttaggctgtgtctcatcattcccccccgcc

SEQ ID NO: 8816 - DNA, 122 bp, Homo sapiens
  misc_feature (61)..(62): /note="This region represents a CpG dinucleotide"
  misc_feature (61)..(61): /note="Nucleotide may be methylated to form 5-methylcytosine"
tatttagtaaatttttgttgaatgaattaagtgaatgaaagaatgaataaatgaaaggaacggtcttctctgaggtatctggatgtgacgccaaaagggtcagaaccacattttcaattccg

SEQ ID NO: 8817 - DNA, 122 bp, Homo sapiens
  misc_feature (61)..(62): /note="This region represents a CpG dinucleotide"
  misc_feature (61)..(61): /note="Nucleotide may be methylated to form 5-methylcytosine"
atttttttgtactctctacactattgtttcccaagtgccaaaagcagtcaagagctagcacgctaacaacgatcaatcataaaatgatcatgaaaacatccaaattatattgactttgaaat

SEQ ID NO: 8818 - DNA, 122 bp, Homo sapiens
  misc_feature (61)..(62): /note="This region represents a CpG dinucleotide"
  misc_feature (61)..(61): /note="Nucleotide may be methylated to form 5-methylcytosine"
tcgcaatcattttcctgaatctgcaataaatgaatctacaaaggattgaaatttttttaacgaaaattgtctggtaaatatttttaagggtttgagagcagtgaaaaatgttaacaggccta

SEQ ID NO: 8819 - DNA, 122 bp, Homo sapiens
  misc_feature (61)..(62): /note="This region represents a CpG dinucleotide"
  misc_feature (61)..(61): /note="Nucleotide may be methylated to form 5-methylcytosine"
tgtggttccaattcagagacagaccaatggaacagctcagagcctcaaaggagatttacacgagaaggaaataaaatgtacaacagaagtcagtaagggaaggaaaatctatttaaaaatga

SEQ ID NO: 8820 - DNA, 122 bp, Homo sapiens
  misc_feature (61)..(62): /note="This region represents a CpG dinucleotide"
  misc_feature (61)..(61): /note="Nucleotide may be methylated to form 5-methylcytosine"
tcttccactgatgcatttctttcccacacccatgtttatacatttctcaagataaagtgtcgtattacaaggaagccaacatctttcaaaccctgagaacattactatagtgacgtacatgg

SEQ ID NO: 8821 - DNA, 122 bp, Homo sapiens
  misc_feature (61)..(62): /note="This region represents a CpG dinucleotide"
  misc_feature (61)..(61): /note="Nucleotide may be methylated to form 5-methylcytosine"
actagatgcaaagctcatggctgagattgagagccagagagacccaaagtctctacatcacgcccacactggtacttccagcctaggaggcgtggtgaatgcctcccacagtggttgctgag

SEQ ID NO: 8822 - DNA, 122 bp, Homo sapiens
  misc_feature (61)..(62): /note="This region represents a CpG dinucleotide"
  misc_feature (61)..(61): /note="Nucleotide may be methylated to form 5-methylcytosine"
ctagaggctagggagggattggtagagggaggaggaggagaggttggccaataagtaccacgttacaattaggtaggagaaataagttctggtgttctattgcacaatagggtgactatagt

SEQ ID NO: 8823 - DNA, 122 bp, Homo sapiens
  misc_feature (61)..(62): /note="This region represents a CpG dinucleotide"
  misc_feature (61)..(61): /note="Nucleotide may be methylated to form 5-methylcytosine"
ggccttggagaattaccattcttaccaattgaccacaaaagcagataggaacagtatctacgtattacaaaccagaatcaaaatgaccttcacacatgattagtgtggaattcttttcagtg

SEQ ID NO: 8824 - DNA, 122 bp, Homo sapiens
  misc_feature (61)..(62): /note="This region represents a CpG dinucleotide"
  misc_feature (61)..(61): /note="Nucleotide may be methylated to form 5-methylcytosine"
cactagtgcctgttttcctgactctgacttcctgggtctcggcaccacagatagcttctgcgtttctctacaggagggaagaagcaatttccaattctgagcttcatgagggaggagaataa

SEQ ID NO: 8825 - DNA, 122 bp, Homo sapiens
  misc_feature (61)..(62): /note="This region represents a CpG dinucleotide"
  misc_feature (61)..(61): /note="Nucleotide may be methylated to form 5-methylcytosine"
gcacctgcatgactggccctcctcccctaggcaaagccaaccggacccagagccacaccgcgtgtgtcaacagcaagcaagtacagagcatgaaaacagctgctattcgaccctctctgtgt

SEQ ID NO: 8826 - DNA, 122 bp, Homo sapiens
  misc_feature (61)..(62): /note="This region represents a CpG dinucleotide"
  misc_feature (61)..(61): /note="Nucleotide may be methylated to form 5-methylcytosine"
tttgaaattacttgtattgctcaagttctgtatgcttttgttggttgagtttgctcataacgtttagtaagaccgagtccctacttcctgcagccccattcagctgcaggtgtgatttccac

SEQ ID NO: 8827 - DNA, 122 bp, Homo sapiens
  misc_feature (61)..(62): /note="This region represents a CpG dinucleotide"
  misc_feature (61)..(61): /note="Nucleotide may be methylated to form 5-methylcytosine"
ggaaatgtctggggggctattggtgaaggagtagactgatgaaagtgtctgagctatgaccgtgttccacatgtgaatcagctttctctaggacctgtgttatttgagcaattacatgtcta

SEQ ID NO: 8828 - DNA, 122 bp, Homo sapiens
  misc_feature (61)..(62): /note="This region represents a CpG dinucleotide"
  misc_feature (61)..(61): /note="Nucleotide may be methylated to form 5-methylcytosine"
tgtggaatgttcctggggccttgacaggtctgaagccatgaacaggtatgcattgatcagcgtggccattgcagaagcagctgcccttgacaatgaaatcatagattgcatagtgtgtaaaa

SEQ ID NO: 8829 - DNA, 122 bp, Homo sapiens
  misc_feature (61)..(62): /note="This region represents a CpG dinucleotide"
  misc_feature (61)..(61): /note="Nucleotide may be methylated to form 5-methylcytosine"
gggcctggctcctaggagctggggctggggctgtggctgcggcgcccttgccccacctgccggcggaagtagcggatggcagagatggtgccgacgttggccagcaaggctgcaagagaagc

SEQ ID NO: 8830 - DNA, 122 bp, Homo sapiens
  misc_feature (61)..(62): /note="This region represents a CpG dinucleotide"
  misc_feature (61)..(61): /note="Nucleotide may be methylated to form 5-methylcytosine"
aattggtgtttatcaaatgctttcaggctctggtgagcaagcgtccaggaaaatgtcaagcgcatggagctccaggcctgtctgggggatctgggcacggggaggcatccatgggagaccat

SEQ ID NO: 8831 - DNA, 122 bp, Homo sapiens
  misc_feature (61)..(62): /note="This region represents a CpG dinucleotide"
  misc_feature (61)..(61): /note="Nucleotide may be methylated to form 5-methylcytosine"
aacatgacttgtttatttagtgtcctgctacacacacacacagacacagacacacacacacgcacacagaaacaatagggtagtgtttgttctgtgtatatctggcactaaatatgttggta

SEQ ID NO: 8832 - DNA, 122 bp, Homo sapiens
  misc_feature (61)..(62): /note="This region represents a CpG dinucleotide"
  misc_feature (61)..(61): /note="Nucleotide may be methylated to form 5-methylcytosine"
cctccctggtactccaggcctgccctacatgcaggttgagcaagatcccacagctggagacgcagatgtctgcatgagaagcctataggacacacagcaatgttgagtgccctggggctgca

SEQ ID NO: 8833 - DNA, 122 bp, Homo sapiens
  misc_feature (61)..(62): /note="This region represents a CpG dinucleotide"
  misc_feature (61)..(61): /note="Nucleotide may be methylated to form 5-methylcytosine"
cccatccccaagagggtgagcgcaatcagcttcgccatggtcggggatagacaaagggatcgatgggcgcagacaccgacgggctaggaggctctgcctgcctgcagccgcagccctgctgg

SEQ ID NO: 8834 - DNA, 122 bp, Homo sapiens
  misc_feature (61)..(62): /note="This region represents a CpG dinucleotide"
  misc_feature (61)..(61): /note="Nucleotide may be methylated to form 5-methylcytosine"
tttgttctacattcaataatccaaaaaggaagtcccacaaggaacaaatgccacttttgacggtaggagacagatatgtggcactcaacagataccaaatgtaaaagacaaataagcactca

SEQ ID NO: 8835 - DNA, 122 bp, Homo sapiens
  misc_feature (61)..(62): /note="This region represents a CpG dinucleotide"
  misc_feature (61)..(61): /note="Nucleotide may be methylated to form 5-methylcytosine"
ttatttattttagagacaagagctcactcactggagagcagtggcatgatcacaggtcaccgcatcctggaattcctgggctcatgagatcctcgcacctcagcttcccgagtagctgggac

SEQ ID NO: 8836 - DNA, 122 bp, Homo sapiens
  misc_feature (61)..(62): /note="This region represents a CpG dinucleotide"
  misc_feature (61)..(61): /note="Nucleotide may be methylated to form 5-methylcytosine"
attactgtgaggtgggatgaattgatctttcatggaatcctcctgcaatgctcgtgggttcgttccttccttccttcaacaagcgtttcttgcggcatctactacgggccaggtgctgtcct

SEQ ID NO: 8837 - DNA, 122 bp, Homo sapiens
  misc_feature (61)..(62): /note="This region represents a CpG dinucleotide"
  misc_feature (61)..(61): /note="Nucleotide may be methylated to form 5-methylcytosine"
tgagtgaggcctatctgggcactgatgccatgaagccaactgatgagtcaacttcctcatcgcaccctggagaagcagctcctgtggatcacaggctgagaagagacccaggacctggccac

SEQ ID NO: 8838 - DNA, 122 bp, Homo sapiens
  misc_feature (61)..(62): /note="This region represents a CpG dinucleotide"
  misc_feature (61)..(61): /note="Nucleotide may be methylated to form 5-methylcytosine"
tccacgctccaaaacacgcttcctgtagagaggggcgtaaactaatagatttgaaattgtcgagtcctttggtctctcaagaacgatgggaacttgacaagaaatttcgattattccctggt

SEQ ID NO: 8839 - DNA, 122 bp, Homo sapiens
  misc_feature (61)..(62): /note="This region represents a CpG dinucleotide"
  misc_feature (61)..(61): /note="Nucleotide may be methylated to form 5-methylcytosine"
gccaatacaaagcacatcaactttcagcaagtttattattgggtttaaattctctacacacgatgcactgcttttgcctacacctggacagtgttcccactcactctccttagtatgatgct

SEQ ID NO: 8840 - DNA, 122 bp, Homo sapiens
  misc_feature (61)..(62): /note="This region represents a CpG dinucleotide"
  misc_feature (61)..(61): /note="Nucleotide may be methylated to form 5-methylcytosine"
caagatcaggctctgccatttaccagctatgtggcctcaggcaggttgaactctttgagccgcagttatctcatctgtaaattggggataataacacttaatggtacttatctcatggggtt

SEQ ID NO: 8841 - DNA, 122 bp, Homo sapiens
  misc_feature (61)..(62): /note="This region represents a CpG dinucleotide"
  misc_feature (61)..(61): /note="Nucleotide may be methylated to form 5-methylcytosine"
atgcattcaatacacctagcctggcaaacatcatagtttatggccgggtgcagtggatcacgcctgtaatcccagcacttggaaaggctaagacaggaggatcacttgagcccaggactttg

SEQ ID NO: 8842 - DNA, 122 bp, Homo sapiens
  misc_feature (61)..(62): /note="This region represents a CpG dinucleotide"
  misc_feature (61)..(61): /note="Nucleotide may be methylated to form 5-methylcytosine"
tggataaggtctgggaacccaactctattggctttatttattgacatgacacctcccagccgcaggagggagagggcacactttccctgtccccagagattgagaccctggggaaaataact

SEQ ID NO: 8843 - DNA, 122 bp, Homo sapiens
  misc_feature (61)..(62): /note="This region represents a CpG dinucleotide"
  misc_feature (61)..(61): /note="Nucleotide may be methylated to form 5-methylcytosine"
ctcttatctgcctgccagagaagacagctactggtattgacagttctcctgcaccgagggcggccagccggctggggtgctgactctcagctctcttgtttttgtgcctgccaggcactcgc

SEQ ID NO: 8844 - DNA, 122 bp, Homo sapiens
  misc_feature (61)..(62): /note="This region represents a CpG dinucleotide"
  misc_feature (61)..(61): /note="Nucleotide may be methylated to form 5-methylcytosine"
gtccctagcccagggcctggcatacggtaggtgctcaataaatgcttatcctttctcctccgtctctgtcatcctgcacattccctgtgattcatggtttacatacagctttacacatatca

SEQ ID NO: 8845 - DNA, 122 bp, Homo sapiens
  misc_feature (61)..(62): /note="This region represents a CpG dinucleotide"
  misc_feature (61)..(61): /note="Nucleotide may be methylated to form 5-methylcytosine"
cccccatgtaccagaggctaacaatgaagtttatttctcactcaccctacaaattcattccgagttattgctattctcctccaaggaagctctacaccaagtaaaagaagctgtctctaact

SEQ ID NO: 8846 - DNA, 122 bp, Homo sapiens
  misc_feature (61)..(62): /note="This region represents a CpG dinucleotide"
  misc_feature (61)..(61): /note="Nucleotide may be methylated to form 5-methylcytosine"
gagagatgggtgaaggattctgtccccagcctgacccccaggtgtgccaggcaggtactccggggaccgccaggatgagagagtgggcctgagcccgggcttttgctgaaaaggaggccgat

SEQ ID NO: 8847 - DNA, 122 bp, Homo sapiens
  misc_feature (61)..(62): /note="This region represents a CpG dinucleotide"
  misc_feature (61)..(61): /note="Nucleotide may be methylated to form 5-methylcytosine"
tccttgagtactgagtcagactgccactgagtcacactgaatacaaatctagtcatttctcgaattaaaactctctatagtctcctaaaatgcggagggatgtatactccttgaacagtccc

SEQ ID NO: 8848 - DNA, 122 bp, Homo sapiens
  misc_feature (61)..(62): /note="This region represents a CpG dinucleotide"
  misc_feature (61)..(61): /note="Nucleotide may be methylated to form 5-methylcytosine"
gtagccagagctcttggagatgtgaatgccagcagtctcaggatgcattccacagcattccgttgcacagaaagttttggcccctttggtagagaataagctcaaaaggacaaaagtagaag

SEQ ID NO: 8849 - DNA, 122 bp, Homo sapiens
  misc_feature (61)..(62): /note="This region represents a CpG dinucleotide"
  misc_feature (61)..(61): /note="Nucleotide may be methylated to form 5-methylcytosine"
agtgcatattcccggggaggctcccctctgcgcctgtgggcctcgtctcctcgcagcttccggcaagactcacagtagcacaggcttcgctttggcggaggcatgaaataatcttctgcggg

SEQ ID NO: 8850 - DNA, 122 bp, Homo sapiens
  misc_feature (61)..(62): /note="This region represents a CpG dinucleotide"
  misc_feature (61)..(61): /note="Nucleotide may be methylated to form 5-methylcytosine"
ccatgctcttaactgctgattcaaacccatgcaatctacaccacagcccatgctcttaaccgccgatgctctgctgcctcgtgatggcttctcaggctgtgactcctttctctccagttccc

SEQ ID NO: 8851 - DNA, 122 bp, Homo sapiens
  misc_feature (61)..(62): /note="This region represents a CpG dinucleotide"
  misc_feature (61)..(61): /note="Nucleotide may be methylated to form 5-methylcytosine"
tcaccgagtctcctcttgctggctctggcctggctctcctgctgagactgtgcattccagcgggttgttgtctgaaactgagcctgtctcagagaggactctgagcccagtgctgtacaggg

SEQ ID NO: 8852 - DNA, 122 bp, Homo sapiens
  misc_feature (61)..(62): /note="This region represents a CpG dinucleotide"
  misc_feature (61)..(61): /note="Nucleotide may be methylated to form 5-methylcytosine"
gctacaggctggatttggcctgcaagctgtgattcattgacttcagcctagagtgtgatccgtcctagtgaatgttccacatacacttgaaaagaatgtatattcttcttctgttgcagttg

SEQ ID NO: 8853 - DNA, 122 bp, Homo sapiens
  misc_feature (61)..(62): /note="This region represents a CpG dinucleotide"
  misc_feature (61)..(61): /note="Nucleotide may be methylated to form 5-methylcytosine"
atccatccttgtttcctcagcagaagtggtgtttctgttaaagccagttattttcttccccgaaaggtcacctgaaaagtgtatttgaagggccagatcataagcctgacatgccaacacaa

SEQ ID NO: 8854 - DNA, 122 bp, Homo sapiens
  misc_feature (61)..(62): /note="This region represents a CpG dinucleotide"
  misc_feature (61)..(61): /note="Nucleotide may be methylated to form 5-methylcytosine"
ggaaactgtggatttccagaagaacacagaaacatttccgtgtaataaaaatagagtaatcgccaggtacctgacacatctgcacctgccacctaggtgatgatgtatggctgtgagtcaga

SEQ ID NO: 8855 - DNA, 122 bp, Homo sapiens
  misc_feature (61)..(62): /note="This region represents a CpG dinucleotide"
  misc_feature (61)..(61): /note="Nucleotide may be methylated to form 5-methylcytosine"
tgtgtatttttatagtgtcactgaggctgagttatggaataacaccttctctttggcccacgttatgtcatttgaactcctaccactctgtgaaatagcctcccctcataaattggacaaac

SEQ ID NO: 8856 - DNA, 122 bp, Homo sapiens
  misc_feature (61)..(62): /note="This region represents a CpG dinucleotide"
  misc_feature (61)..(61): /note="Nucleotide may be methylated to form 5-methylcytosine"
ggtgacctcagtagtgaggagaagcaggatgaacaaataggagagtgggaagaatgatgacggagtgagagattatataagatttgatcatgctaagagtttacttcagagtgaagaaggtt

SEQ ID NO: 8857 - DNA, 122 bp, Homo sapiens
  misc_feature (61)..(62): /note="This region represents a CpG dinucleotide"
  misc_feature (61)..(61): /note="Nucleotide may be methylated to form 5-methylcytosine"
aacgacacggagggggacgtgccaagtgcgaacccacaggggcagagctttttagggatccgctctacctatttacatcataaattaggtttgtgctagccacgtaggaattaatccaggga

SEQ ID NO: 8858 - DNA, 122 bp, Homo sapiens
  misc_feature (61)..(62): /note="This region represents a CpG dinucleotide"
  misc_feature (61)..(61): /note="Nucleotide may be methylated to form 5-methylcytosine"
gaaactccgtttgtaatataatacaactggctgaaatcagttgaaaccaatataaccaaacggagtccatgcagaatgagcttgctgatgtcgcagcctgaatttccactgcacttttcaca

SEQ ID NO: 8859 - DNA, 122 bp, Homo sapiens
  misc_feature (61)..(62): /note="This region represents a CpG dinucleotide"
  misc_feature (61)..(61): /note="Nucleotide may be methylated to form 5-methylcytosine"
agagagcagacactgtgctgtcctgtgtgtctcctatggggtctggtgccgggaagagctcgatgtgtagaaagtgccccagatgcgtgtgtcaggaatctgagtgaggagatgaactgtac

SEQ ID NO: 8860 - DNA, 122 bp, Homo sapiens
  misc_feature (61)..(62): /note="This region represents a CpG dinucleotide"
  misc_feature (61)..(61): /note="Nucleotide may be methylated to form 5-methylcytosine"
gcacattggcagctggattcagaaacagattcagactcaagctcagtcccttgggcaagacgataggagtcatgtgatatgtggtattctctcctttgaacgtcagtcttagcagcattgat

SEQ ID NO: 8861 - DNA, 122 bp, Homo sapiens
  misc_feature (61)..(62): /note="This region represents a CpG dinucleotide"
  misc_feature (61)..(61): /note="Nucleotide may be methylated to form 5-methylcytosine"
acctgacagcagggatagtgaggaggtcagagaagagggaagtgaaatgggtgacagcaacgagccccggcctatcctcatcatctgccttgagtgaacaaacataagtgattttggcaaaa

SEQ ID NO: 8862 - DNA, 122 bp, Homo sapiens
  misc_feature (61)..(62): /note="This region represents a CpG dinucleotide"
  misc_feature (61)..(61): /note="Nucleotide may be methylated to form 5-methylcytosine"
tttagtggcatccctggcctctacccattagatcccagtggcacccagacacaaagatgtcgccagacattgtcaaaggcactggggtgtgggtgctgggtaaaccagccctggttgagagc

SEQ ID NO: 8863 - DNA, 122 bp, Homo sapiens
  misc_feature (61)..(62): /note="This region represents a CpG dinucleotide"
  misc_feature (61)..(61): /note="Nucleotide may be methylated to form 5-methylcytosine"
ccacttcctcatctgaaacgatggcagtagaactttcccttcctgggttgtcaaagtccacggagaagcataaaccatgattcacatgtgaggaagtacgcaggtttcaaaggccctggtct

SEQ ID NO: 8864 - DNA, 122 bp, Homo sapiens
  misc_feature (61)..(62): /note="This region represents a CpG dinucleotide"
  misc_feature (61)..(61): /note="Nucleotide may be methylated to form 5-methylcytosine"
gtgcagagcttggtgaccattggaatcaggacgccagaaactgtgcaaagcatcgcgcgccgggcaccctctggccatagggtcccgcaagggctaggccggcgcgtcacggaatcagggac

SEQ ID NO: 8865 - DNA, 122 bp, Homo sapiens
  misc_feature (61)..(62): /note="This region represents a CpG dinucleotide"
  misc_feature (61)..(61): /note="Nucleotide may be methylated to form 5-methylcytosine"
gttttagttgttcttttcttgtaggcacacaattgttgtcttgatctttgtgataaaaagcgttctctgggtctttgtagtgaacccagttggcttggtaacatgcctgtagtcagaattcc

SEQ ID NO: 8866 - DNA, 122 bp, Homo sapiens
  misc_feature (61)..(62): /note="This region represents a CpG dinucleotide"
  misc_feature (61)..(61): /note="Nucleotide may be methylated to form 5-methylcytosine"
tacctttcttttttcctgtctaatcattcacttctttacctcccctttgtctttttctcccgcaaagttaccagaaaggagggtttggtttggtcctcaagtagtactttcttgtatgaagt

SEQ ID NO: 8867 - DNA, 122 bp, Homo sapiens
  misc_feature (61)..(62): /note="This region represents a CpG dinucleotide"
  misc_feature (61)..(61): /note="Nucleotide may be methylated to form 5-methylcytosine"
gcgctgacatcggcctctgaagtggttgccccgcactggcttctggcctggccgtggccccgacagttgggcgtcctgcagcagtcccaacctcaggactccctaccctccacctccaaaca

SEQ ID NO: 8868 - DNA, 122 bp, Homo sapiens
  misc_feature (61)..(62): /note="This region represents a CpG dinucleotide"
  misc_feature (61)..(61): /note="Nucleotide may be methylated to form 5-methylcytosine"
atgggatttcacactcatgactaggttagaaaaaatcgtgacttctaatctgctagcagacgctctagcttgctggcttggataaagcctgcagccataccggagaggccctgtggtgaggt

SEQ ID NO: 8869 - DNA, 122 bp, Homo sapiens
  misc_feature (61)..(62): /note="This region represents a CpG dinucleotide"
  misc_feature (61)..(61): /note="Nucleotide may be methylated to form 5-methylcytosine"
attgctagctcctgctaatgcctgcattgctgctgcaaaggatattcagaaaaagttgctcgtcagaaaaagaattcatgctagctctggccctgctgctgatgcattgtgtgaaacccttg

SEQ ID NO: 8870 - DNA, 122 bp, Homo sapiens
  misc_feature (61)..(62): /note="This region represents a CpG dinucleotide"
  misc_feature (61)..(61): /note="Nucleotide may be methylated to form 5-methylcytosine"
aagaactgagctccaaaacacacaccgtcaactccatctatccccagacctctggattaccggtcagtctgagtcagacccagacctctggattaccggtcagtctgagtcagcggagaggc

SEQ ID NO: 8871 - DNA, 122 bp, Homo sapiens
  misc_feature (61)..(62): /note="This region represents a CpG dinucleotide"
  misc_feature (61)..(61): /note="Nucleotide may be methylated to form 5-methylcytosine"
tagcaaatggaagcaatgggtcccaggagttcgtttctgtatgcggctctaactctgccacgaaggccaggacagatagtgtgcagtgctctgtcatgtctaccagagaaaatgatgcaaca

SEQ ID NO: 8872 - DNA, 122 bp, Homo sapiens
  misc_feature (61)..(62): /note="This region represents a CpG dinucleotide"
  misc_feature (61)..(61): /note="Nucleotide may be methylated to form 5-methylcytosine"
aagtgagaccaggaaaggaaggcagccattagggccgggctgttaatgtcacgcaatgggcgactggagcttaattccacactttggaaactctaggaaatggtgctcgctgtgtcatgggc

SEQ ID NO: 8873 - DNA, 122 bp, Homo sapiens
  misc_feature (61)..(62): /note="This region represents a CpG dinucleotide"
  misc_feature (61)..(61): /note="Nucleotide may be methylated to form 5-methylcytosine"
gaacgcagcggtcactgatccttaaatccttcaaggtctgattgtcagagtgctaaataccgtaacttcaggcgcattcagatttcaactcttttgaatctttttggtagacattgcatttg

SEQ ID NO: 8874 - DNA, 122 bp, Homo sapiens
  misc_feature (61)..(62): /note="This region represents a CpG dinucleotide"
  misc_feature (61)..(61): /note="Nucleotide may be methylated to form 5-methylcytosine"
aagcatgcaggaaatgaaacatcactctgaaagttgctgggcaccaacctgggcttgactcgcagagaggcatctgcagaggatccttgaggagcttgtggtttgaaagagggacagttggc

SEQ ID NO: 8875 - DNA, 122 bp, Homo sapiens
  misc_feature (61)..(62): /note="This region represents a CpG dinucleotide"
  misc_feature (61)..(61): /note="Nucleotide may be methylated to form 5-methylcytosine"
aaggattctgcccctaacctggaggaggagaaggaaaggcactgccaggagaagaaacagcgctgggcccaagaacctgaaacatcacctatagaacgagtggaaggcagagattgtccaag

SEQ ID NO: 8876 - DNA, 122 bp, Homo sapiens
  misc_feature (61)..(62): /note="This region represents a CpG dinucleotide"
  misc_feature (61)..(61): /note="Nucleotide may be methylated to form 5-methylcytosine"
tcctcaaatacatcctcaaagaaacttgattgtttattgtggtgtcacatttatgacccacgtaagtagcagtcaactaatatctttataaaactctgatttataggtactttgattgggct

SEQ ID NO: 8877 - DNA, 122 bp, Homo sapiens
  misc_feature (61)..(62): /note="This region represents a CpG dinucleotide"
  misc_feature (61)..(61): /note="Nucleotide may be methylated to form 5-methylcytosine"
tgagcaaggtgcctgcccatgtggcctgctgcctggtgctattctgtccccagtgttgagcgtagcctctggcacacagtagacacacacacagtgatgcatcctagaatgatgaaataatt

SEQ ID NO: 8878 - DNA, 122 bp, Homo sapiens
  misc_feature (61)..(62): /note="This region represents a CpG dinucleotide"
  misc_feature (61)..(61): /note="Nucleotide may be methylated to form 5-methylcytosine"
aataagcttctgtcaccaagtttcccaggatccaaacccaccactcaactgattgattaacgaaggttttgggtgtgacagatatctgggttttcatatcagtcataagtcagattatgttc

SEQ ID NO: 8879 - DNA, 122 bp, Homo sapiens
  misc_feature (61)..(62): /note="This region represents a CpG dinucleotide"
  misc_feature (61)..(61): /note="Nucleotide may be methylated to form 5-methylcytosine"
agaatgtgtttttctcctgtgatattcagctggataaacaaaatatgataggaaggaagtcgggtttaatcaggactgtagttatgccaagtgaattcaaaaagtgggatatgggagtcaag

SEQ ID NO: 8880 - DNA, 122 bp, Homo sapiens
  misc_feature (61)..(62): /note="This region represents a CpG dinucleotide"
  misc_feature (61)..(61): /note="Nucleotide may be methylated to form 5-methylcytosine"
gtgctaagcccctcattgccagggccggcagggctggccggctgctccgagtgcagtgcccgccaagcccacgcccacccggaactccagctggcccgcaagcgccgcgggcagccccagtt

SEQ ID NO: 8881 - DNA, 122 bp, Homo sapiens
  misc_feature (61)..(62): /note="This region represents a CpG dinucleotide"
  misc_feature (61)..(61): /note="Nucleotide may be methylated to form 5-methylcytosine"
accaggttatatgtttaattatcttgtttatggcctgcctccctactactctagactggccgctccccaaggggaaggaatctatcttgttcactgctgtgtcctcagtatttacaataggg

SEQ ID NO: 8882 - DNA, 122 bp, Homo sapiens
  misc_feature (61)..(62): /note="This region represents a CpG dinucleotide"
  misc_feature (61)..(61): /note="Nucleotide may be methylated to form 5-methylcytosine"
aaggatgaggatgctaaattctgtctgattctgatagagagccggattcactgtttggctcgatattataagaccaagtgagtcctctctcccaactggaaatatgaatcatatacagcctc

SEQ ID NO: 8883 - DNA, 122 bp, Homo sapiens
  misc_feature (61)..(62): /note="This region represents a CpG dinucleotide"
  misc_feature (61)..(61): /note="Nucleotide may be methylated to form 5-methylcytosine"
tcggcaataccaacattcagcatcccctagtgtgagcctcacgaacacagcatttcccaacgtttttgttatttgaaggaaatggaaaacagaacaaaatggtctcaaaaagtattctataa

SEQ ID NO: 8884 - DNA, 122 bp, Homo sapiens
  misc_feature (61)..(62): /note="This region represents a CpG dinucleotide"
  misc_feature (61)..(61): /note="Nucleotide may be methylated to form 5-methylcytosine"
tagagcaggtgtaaatgtttagcaggcaattactactagtagtggtagaagcccagattgcgacattactgagaagtgatgattgaaacctttgtggtagataagatcactaaggaagaata

SEQ ID NO: 8885 - DNA, 122 bp, Homo sapiens
  misc_feature (61)..(62): /note="This region represents a CpG dinucleotide"
  misc_feature (61)..(61): /note="Nucleotide may be methylated to form 5-methylcytosine"
agcagtatagaagggtcattcagaagtccaaagtgaaaccatcttaagcaaccatgtttacgcgagatgaaaagctagtggctttaacctgtgggaaaatgtaccacaccctgccaatgcaa

SEQ ID NO: 8886 - DNA, 122 bp, Homo sapiens
  misc_feature (61)..(62): /note="This region represents a CpG dinucleotide"
  misc_feature (61)..(61): /note="Nucleotide may be methylated to form 5-methylcytosine"
tatgcttccagtgcctttggaagaggaagggaagaagtttgttctggttatgttttgtaccgcaaatgtggaaaagaaatgttgcctgcaaccacacacacataacttggcttctttggtca

SEQ ID NO: 8887 - DNA, 122 bp, Homo sapiens
  misc_feature (61)..(62): /note="This region represents a CpG dinucleotide"
  misc_feature (61)..(61): /note="Nucleotide may be methylated to form 5-methylcytosine"
atatgtctaagttctcatgaatgggatgtgagtaaaggtgattcacacaactaccacatccgttcctgaaaagaagatccatgtccttcactgcctttctcattcattcatgggctggaaca

SEQ ID NO: 8888 - DNA, 122 bp, Homo sapiens
  misc_feature (61)..(62): /note="This region represents a CpG dinucleotide"
  misc_feature (61)..(61): /note="Nucleotide may be methylated to form 5-methylcytosine"
tcccttaatcttaaactcccaccgctttcagacactatcataccccgccccccttccccccgcgaacccccgtgcattctgggactcatggtttggtgagtgttgtccaggaatggctacaa

SEQ ID NO: 8889 - DNA, 122 bp, Homo sapiens
  misc_feature (61)..(62): /note="This region represents a CpG dinucleotide"
  misc_feature (61)..(61): /note="Nucleotide may be methylated to form 5-methylcytosine"
ggtgacccgcccacctcggcctcccaaagtgctgggattacaggtgtgagccacagcacccggtctacatgtttttgtttgaatgcctgttttcagtgatgttgggcctactctgaggagtg

SEQ ID NO: 8890 - DNA, 122 bp, Homo sapiens
  misc_feature (61)..(62): /note="This region represents a CpG dinucleotide"
  misc_feature (61)..(61): /note="Nucleotide may be methylated to form 5-methylcytosine"
ttcagctcttttgctggtacttaaggagttcttgggtcactctgcaggaacactggagcccggcggccccactctctttattggcagctctggcgtccttccatcacccactgcggcgtctt

SEQ ID NO: 8891 - DNA, 122 bp, Homo sapiens
  misc_feature (61)..(62): /note="This region represents a CpG dinucleotide"
  misc_feature (61)..(61): /note="Nucleotide may be methylated to form 5-methylcytosine"
cagtgcctcttctcagaggttggctcttcttagttttctctccctggtcactgcacctggcgatgcttagttcatgcttagtggggttcctggtgagccacaggatccccagctcttagtca

SEQ ID NO: 8892 - DNA, 122 bp, Homo sapiens
  misc_feature (61)..(62): /note="This region represents a CpG dinucleotide"
  misc_feature (61)..(61): /note="Nucleotide may be methylated to form 5-methylcytosine"
agccaagttaattgcctgtatttgcttcctgtggaaatatttcacaagacaccctgttatcgtgggcccagcatttgtacttgtgttttgctgatccgtttagcttttttgaaaattttggg

SEQ ID NO: 8893 - DNA, 122 bp, Homo sapiens
  misc_feature (61)..(62): /note="This region represents a CpG dinucleotide"
  misc_feature (61)..(61): /note="Nucleotide may be methylated to form 5-methylcytosine"
tagcatgtggccagaagtgatgaatctatgtgaagattttgatggcaggtgatctttgagcgggcatggcagttgcaccacaaaaggtcgaacacattttcacgggaaagttgcctatgtgc

SEQ ID NO: 8894 - DNA, 122 bp, Homo sapiens
  misc_feature (61)..(62): /note="This region represents a CpG dinucleotide"
  misc_feature (61)..(61): /note="Nucleotide may be methylated to form 5-methylcytosine"
caaaacagacaaattgagtagagcaagtgttttcccaaaggaaaactgagtcactattaccggaagaaagggacatgtatactgagcaagcaaaacctatggaggccctctctagtgcaggt

SEQ ID NO: 8895 - DNA, 122 bp, Homo sapiens
  misc_feature (61)..(62): /note="This region represents a CpG dinucleotide"
  misc_feature (61)..(61): /note="Nucleotide may be methylated to form 5-methylcytosine"
cctgacacaagttataaccaccaccttctaggaaaaccacttctcagggagcagggaggacgtggccacaaggtcaagaacgggttggatcctagcacactgagagatgggtaccctctggc

SEQ ID NO: 8896 - DNA, 122 bp, Homo sapiens
  misc_feature (61)..(62): /note="This region represents a CpG dinucleotide"
  misc_feature (61)..(61): /note="Nucleotide may be methylated to form 5-methylcytosine"
tcgatggatcatcatctcctctagctactcagagcagggagctgggactgaactatagtacgtgaagtcattgtgtatattctcttagtgtgtcatttccccgcggagtcaccttccagaag

SEQ ID NO: 8897 - DNA, 122 bp, Homo sapiens
  misc_feature (61)..(62): /note="This region represents a CpG dinucleotide"
  misc_feature (61)..(61): /note="Nucleotide may be methylated to form 5-methylcytosine"
gggattacccccaccacacagccccccccaccctcgcctgctcccgcccagcactcaccccgccctgcctgcctcagccaggatggcgacagacacaactgctcacacgcagacatgcgcac

SEQ ID NO: 8898 - DNA, 122 bp, Homo sapiens
  misc_feature (61)..(62): /note="This region represents a CpG dinucleotide"
  misc_feature (61)..(61): /note="Nucleotide may be methylated to form 5-methylcytosine"
ttagtgtggagtttggaactgaagaagcatttaataattaacattttaaagtgtagactacggtatatcagacctttctggaacactccctagacactgaaatgcggcaaagacactgcatt

SEQ ID NO: 8899 - DNA, 122 bp, Homo sapiens
  misc_feature (61)..(62): /note="This region represents a CpG dinucleotide"
  misc_feature (61)..(61): /note="Nucleotide may be methylated to form 5-methylcytosine"
aggttggccactgggggcctggccaccctcaaggggtggccctctgaggtctcagggctgcgtgcctgtagggagtcccctacccccagcccagggctgcctgctggcaccgtggcaaggcc

SEQ ID NO: 8900 - DNA, 122 bp, Homo sapiens
  misc_feature (61)..(62): /note="This region represents a CpG dinucleotide"
  misc_feature (61)..(61): /note="Nucleotide may be methylated to form 5-methylcytosine"
tcccccagagtgacagggaacccccagggaagaagggcccctgtggggcatgcagaaaaacgcctgccccctggtgtgaggtcacagactcagtggccaagctcaacaatgctctgggaact

SEQ ID NO: 8901 - DNA, 122 bp, Homo sapiens
  misc_feature (61)..(62): /note="This region represents a CpG dinucleotide"
  misc_feature (61)..(61): /note="Nucleotide may be methylated to form 5-methylcytosine"
tgcaagctccacggtgcaccctggcttctagaacagcacctggcatgcagcattttgttacgtaaatgagccccagctcccctactggctggaccagcaataggcagcccctggtccccatg

SEQ ID NO: 8902 - DNA, 122 bp, Homo sapiens
  misc_feature (61)..(62): /note="This region represents a CpG dinucleotide"
  misc_feature (61)..(61): /note="Nucleotide may be methylated to form 5-methylcytosine"
ttggagggggcctgagggctgcggggcgggaccgagcagggcggggcgcttaggtggcctcgggggaggcggggcttggaggctccgcccctcaggccccgcctcctccccggctagtcttt

SEQ ID NO: 8903 - DNA, 122 bp, Homo sapiens
  misc_feature (61)..(62): /note="This region represents a CpG dinucleotide"
  misc_feature (61)..(61): /note="Nucleotide may be methylated to form 5-methylcytosine"
ccctcctttcctcttgttaaatgatgattgacacacccgggctcaatttccagttcattacgtaacactctgagcaagtcatttaccctctctgagctgaagtctttttggctgtacaatgg

SEQ ID NO: 8904 - DNA, 122 bp, Homo sapiens
  misc_feature (61)..(62): /note="This region represents a CpG dinucleotide"
  misc_feature (61)..(61): /note="Nucleotide may be methylated to form 5-methylcytosine"
taaacaagattccgccctcctgaattctgtcacctggccaaaataaacatttaacaagtacgctgctagaattttacttgagaaaaaggaataattcatcttacctagtatttcttctgaat

SEQ ID NO: 8905 - DNA, 122 bp, Homo sapiens
  misc_feature (61)..(62): /note="This region represents a CpG dinucleotide"
  misc_feature (61)..(61): /note="Nucleotide may be methylated to form 5-methylcytosine"
aatgtttatgtgagtctccattattcatttctttgcctggaaatctttcaaaaaaacttacggagaataataaggaaagaacaataagaaacccccaccctacatacagagtatacacacac

SEQ ID NO: 8906 - DNA, 122 bp, Homo sapiens
  misc_feature (61)..(62): /note="This region represents a CpG dinucleotide"
  misc_feature (61)..(61): /note="Nucleotide may be methylated to form 5-methylcytosine"
ggaaactttaacctcctggttaaattctatttaaccaggacgccgattcgggctacaatgcgtggctttcgtatgaattgcagccggcggcggtaagttaaattctattaaatcaataggat

SEQ ID NO: 8907 - DNA, 122 bp, Homo sapiens
  misc_feature (61)..(62): /note="This region represents a CpG dinucleotide"
  misc_feature (61)..(61): /note="Nucleotide may be methylated to form 5-methylcytosine"
agaggttaagaacttgcctgaggccgtgtggctgggacagcctgcttagccacctaaatacgcaggaaacggcagctgttctcctccactagctctgagtggggccacaggaccactacgct

SEQ ID NO: 8908 - DNA, 122 bp, Homo sapiens
  misc_feature (61)..(62): /note="This region represents a CpG dinucleotide"
  misc_feature (61)..(61): /note="Nucleotide may be methylated to form 5-methylcytosine"
taaactcgagacaccaacacagcaccagggcctccttaagccagtgctgccacggggccacgaaagtaccaggcaaatgactgcaccaacctgaaaggggtgggactcaggggcaacagtcc

SEQ ID NO: 8909 - DNA, 122 bp, Homo sapiens
  misc_feature (61)..(62): /note="This region represents a CpG dinucleotide"
  misc_feature (61)..(61): /note="Nucleotide may be methylated to form 5-methylcytosine"
tgagcccaggagttggaggttgtagtgtgctaggatagcgccattgcactccggcttgggcgacagagcgaggctgtttctgaatgaatgaacgaatacataagtaaataagaaaataggta

SEQ ID NO: 8910 - DNA, 122 bp, Homo sapiens
  misc_feature (61)..(62): /note="This region represents a CpG dinucleotide"
  misc_feature (61)..(61): /note="Nucleotide may be methylated to form 5-methylcytosine"
aaccatttttatgggtacaatttagtggcattaacattcaaaatgttgagcaaccatcatcgctatccatttccagaatttgttcatcccaaacagaaactatgtactcgttaaacaataac

SEQ ID NO: 8911 - DNA, 122 bp, Homo sapiens
  misc_feature (61)..(62): /note="This region represents a CpG dinucleotide"
  misc_feature (61)..(61): /note="Nucleotide may be methylated to form 5-methylcytosine"
tgatggagtgaaccagaggggagtctttacaagtgatttgattgccaaatcctttgccctcggtgagtggtgttgacgacgttgccggatgtggtgctctaccattgagctatacagccgga

SEQ ID NO: 8912 - DNA, 122 bp, Homo sapiens
  misc_feature (61)..(62): /note="This region represents a CpG dinucleotide"
  misc_feature (61)..(61): /note="Nucleotide may be methylated to form 5-methylcytosine"
tcaagcttttaggagctgtcagaggtcacagcaggggctcagcccctggtcctgtggcagcgctgggggcccctgcgcacccagctcctcagccacagccatggcctcacacagtgccctct

SEQ ID NO: 8913 - DNA, 122 bp, Homo sapiens
  misc_feature (61)..(62): /note="This region represents a CpG dinucleotide"
  misc_feature (61)..(61): /note="Nucleotide may be methylated to form 5-methylcytosine"
tggagacggcagaggatggcgtgggcctggcaggactgaggcccggtgcccgtgtagggccgctgcttccttctctgcccacagctgacgtgagccacgtgggtctgctgcagatggagacg

SEQ ID NO: 8914 - DNA, 122 bp, Homo sapiens
  misc_feature (61)..(62): /note="This region represents a CpG dinucleotide"
  misc_feature (61)..(61): /note="Nucleotide may be methylated to form 5-methylcytosine"
aatgtactaaggagaaaactgccaaattcacattctgtacctgacaaaatctttccgaagcgatggtgacataaagacattttcatacacacagaaactaagagtttcatccccagcagacc

SEQ ID NO: 8915 - DNA, 122 bp, Homo sapiens
  misc_feature (61)..(62): /note="This region represents a CpG dinucleotide"
  misc_feature (61)..(61): /note="Nucleotide may be methylated to form 5-methylcytosine"
tgtacttcctctaatcttgttctatctgcctttttacagaaatcagatcagctgctttcccgtgccaatcttgctaaaagcagagcacaagaagcactgagtatgggcaatgccacttttta

SEQ ID NO: 8916 - DNA, 122 bp, Homo sapiens
  misc_feature (61)..(62): /note="This region represents a CpG dinucleotide"
  misc_feature (61)..(61): /note="Nucleotide may be methylated to form 5-methylcytosine"
ctgtccattcgggccctgttttccttgttaaatatgatcccatcgtatattatatgttatcgagttaaatgtgctacccacagcatgcagagctccagccagcagccctcagagctgcagga

SEQ ID NO: 8917 - DNA, 122 bp, Homo sapiens
  misc_feature (61)..(62): /note="This region represents a CpG dinucleotide"
  misc_feature (61)..(61): /note="Nucleotide may be methylated to form 5-methylcytosine"
ggtggagcgcgggaggaggggcgccgggtggggacgcccaggcccttcgtcgggggagggcgctccacccgggctggagttgcagagcccagcagatccctgcggcgttcgcgagggtggga

SEQ ID NO: 8918 - DNA, 122 bp, Homo sapiens
  misc_feature (61)..(62): /note="This region represents a CpG dinucleotide"
  misc_feature (61)..(61): /note="Nucleotide may be methylated to form 5-methylcytosine"
ctctatagctgtttgagtaacttctcttatccataaagctgtctgcataattcccccttgcgtatgtagttctgggtatgtctctaggcaggcacaatgtgcacttcttttgtttgtataaa

SEQ ID NO: 8919 - DNA, 122 bp, Homo sapiens
  misc_feature (61)..(62): /note="This region represents a CpG dinucleotide"
  misc_feature (61)..(61): /note="Nucleotide may be methylated to form 5-methylcytosine"
aaacagacacttaaaggctctcaaagctccctactaacactcatgtgccagccacacctacggtcatgcactgcatgttgacagtggtcccataagattttaaggccatatttttactgtac

SEQ ID NO: 8920 - DNA, 122 bp, Homo sapiens
  misc_feature (61)..(62): /note="This region represents a CpG dinucleotide"
  misc_feature (61)..(61): /note="Nucleotide may be methylated to form 5-methylcytosine"
gtgaatagccttctagctagaacttcttgtgcagctgaattatgattctcagttgccatacgccatacacttaaaggaagttaacatacttcctttctttaatattgctctttgttctttgg

SEQ ID NO: 8921 - DNA, 122 bp, Homo sapiens
  misc_feature (61)..(62): /note="This region represents a CpG dinucleotide"
  misc_feature (61)..(61): /note="Nucleotide may be methylated to form 5-methylcytosine"
cactgtgcagaaatcaatactcactccaacttgcctgcatataatgagttacatcaagcacggtttcaatgctaacgggcattatatgtcagaaatgcatgcagtaatgcttactccagaaa

SEQ ID NO: 8922 - DNA, 122 bp, Homo sapiens
  misc_feature (61)..(62): /note="This region represents a CpG dinucleotide"
  misc_feature (61)..(61): /note="Nucleotide may be methylated to form 5-methylcytosine"
gtgagccaccacacccagacttgttttgcttttgaggcagcttttgagcaaaacaacagccggtctgttgcccaggctggagtacagtggtgcaatcacagatcacttcagcctcgaactcc

SEQ ID NO: 8923 - DNA, 122 bp, Homo sapiens
  misc_feature (61)..(62): /note="This region represents a CpG dinucleotide"
  misc_feature (61)..(61): /note="Nucleotide may be methylated to form 5-methylcytosine"
ggcaaccctgtgaccagcaagtctatcagcaccattttcccaaccacaaagtgagtatgacgtgctcactttgtgtctctgtgtcacattttggtaatgctcacaatactcacactttgcca

SEQ ID NO: 8924 - DNA, 122 bp, Homo sapiens
  misc_feature (61)..(62): /note="This region represents a CpG dinucleotide"
  misc_feature (61)..(61): /note="Nucleotide may be methylated to form 5-methylcytosine"
tcttcaactttctcagcattctcagcagcagttttatatctcagaacctgtccctcaagccggctaatctgtaagtatgagaacataggcctctagtactgggcactagaagtcaccacttt

SEQ ID NO: 8925 - DNA, 122 bp, Homo sapiens
  misc_feature (61)..(62): /note="This region represents a CpG dinucleotide"
  misc_feature (61)..(61): /note="Nucleotide may be methylated to form 5-methylcytosine"
actgtgtaacattctacactgccctgagtgagaagcactgacgcttgtacccgtcaccaacgagcagcagctacatagggagccaacagccaacgcaggcaaccctgacagtcccaggtaga

SEQ ID NO: 8926 - DNA, 122 bp, Homo sapiens
  misc_feature (61)..(62): /note="This region represents a CpG dinucleotide"
  misc_feature (61)..(61): /note="Nucleotide may be methylated to form 5-methylcytosine"
aaagtcctcctcactgaaacttgcgagtattttatgattctccttcctgtgctgacttcacgtacactagaggctcattcgtaagtgtgaagcaatgtctttagccctctgttaggatatag

SEQ ID NO: 8927 - DNA, 122 bp, Homo sapiens
  misc_feature (61)..(62): /note="This region represents a CpG dinucleotide"
  misc_feature (61)..(61): /note="Nucleotide may be methylated to form 5-methylcytosine"
tcagtctatcaaatcaatgcttgcatccatttcctaaggctataagatttggagctacagcggtcgctctatttgaagagtaggtggctattttgacattaaatgtagatgccactagcagc

SEQ ID NO: 8928 - DNA, 122 bp, Homo sapiens
  misc_feature (61)..(62): /note="This region represents a CpG dinucleotide"
  misc_feature (61)..(61): /note="Nucleotide may be methylated to form 5-methylcytosine"
agagacagagagagagaaactgagagacagagatgaggagagagaaagagagagagagagcgattctgtaaagggctctgaatttattgactcacacaaccatacagaaccagggagaggag

SEQ ID NO: 8929 - DNA, 122 bp, Homo sapiens
  misc_feature (61)..(62): /note="This region represents a CpG dinucleotide"
  misc_feature (61)..(61): /note="Nucleotide may be methylated to form 5-methylcytosine"
tttgtgcttgaatagatctcctcttccaactctgctccattgtgtttagtcaacagttttcgattatctctatgttaatggggtgcatattcatttcaatgccaaaatatttctgggctttt

SEQ ID NO: 8930 - DNA, 122 bp, Homo sapiens
  misc_feature (61)..(62): /note="This region represents a CpG dinucleotide"
  misc_feature (61)..(61): /note="Nucleotide may be methylated to form 5-methylcytosine"
tcctccagccttcactctccctagccctagagggcactccctccctgggaatggagcactcgggctctagcttcccagagagaagagagcccaggatccctaacaaaagatggggagaaggg

SEQ ID NO: 8931 - DNA, 122 bp, Homo sapiens
  misc_feature (61)..(62): /note="This region represents a CpG dinucleotide"
  misc_feature (61)..(61): /note="Nucleotide may be methylated to form 5-methylcytosine"
caggctggagtgcagtggcatgatcacagctcactgctgactcaaccccctagggttaagcgatcctctcacctcagcctcccaagtagctgggaccacaggcatgtgccactataccaggt

SEQ ID NO: 8932 - DNA, 122 bp, Homo sapiens
  misc_feature (61)..(62): /note="This region represents a CpG dinucleotide"
  misc_feature (61)..(61): /note="Nucleotide may be methylated to form 5-methylcytosine"
tagccttctgcctgacttgatcttcctgtcctgaggccatccagttggcctagagtgtcacgtttagggatgggcagtgcaagggggggcctgatggggtcagttgcccatcattaagcatt

SEQ ID NO: 8933 - DNA, 122 bp, Homo sapiens
  misc_feature (61)..(62): /note="This region represents a CpG dinucleotide"
  misc_feature (61)..(61): /note="Nucleotide may be methylated to form 5-methylcytosine"
atgagtggtgcttcttccatgtacagttatagacaggaagtacaaccaacaattagaaaacgggggatatcacagcaccatcctagaacaggtagcatctgaggtaattcttagagaaaaag

SEQ ID NO: 8934 - DNA, 122 bp, Homo sapiens
  misc_feature (61)..(62): /note="This region represents a CpG dinucleotide"
  misc_feature (61)..(61): /note="Nucleotide may be methylated to form 5-methylcytosine"
caaatgacccgatgaatcacttccttcctttttggccagtctggtctgttcatgggtcaccgaagacaagagtcaaagaatcactgtgttttagaacagacgtgctgatctaaattttagat

SEQ ID NO: 8935 - DNA, 122 bp, Homo sapiens
  misc_feature (61)..(62): /note="This region represents a CpG dinucleotide"
  misc_feature (61)..(61): /note="Nucleotide may be methylated to form 5-methylcytosine"
gttcatgctctacactttgtgttaccttttcctaaaaggcagctttgcatggagagatcacggcagcctgtgagttggaatggtggaatttgtgatgatgcaatactttatttgaaaaagta

SEQ ID NO: 8936 - DNA, 122 bp, Homo sapiens
  misc_feature (61)..(62): /note="This region represents a CpG dinucleotide"
  misc_feature (61)..(61): /note="Nucleotide may be methylated to form 5-methylcytosine"
gtttcctgtccgggctggcggggccgccagtcggcgtggggtgcggcaaggggagcggggcgctgggtcagccgagggccgggcctcgggggcgcagccggactggacggcggctcctgtgg

SEQ ID NO: 8937 - DNA, 122 bp, Homo sapiens
  misc_feature (61)..(62): /note="This region represents a CpG dinucleotide"
  misc_feature (61)..(61): /note="Nucleotide may be methylated to form 5-methylcytosine"
ttcaatcagctatgatgtccttatcaagctgtcactaccaagttccttgataagatctgacgtgtgaggtacataaacctgttctgttgtagcactgtggcctgtatggaaaaggttagata

SEQ ID NO: 8938 - DNA, 122 bp, Homo sapiens
  misc_feature (61)..(62): /note="This region represents a CpG dinucleotide"
  misc_feature (61)..(61): /note="Nucleotide may be methylated to form 5-methylcytosine"
gctggcttcctggccttgtgaaatcttctagaggcaggaagaagcctgagcgctccctgacgccacttgagtttgacttcatgggtttgccgtgtgcccctgaacaaaccagttatcctctc

SEQ ID NO: 8939 - DNA, 122 bp, Homo sapiens
  misc_feature (61)..(62): /note="This region represents a CpG dinucleotide"
  misc_feature (61)..(61): /note="Nucleotide may be methylated to form 5-methylcytosine"
agtcagtagatgacagattgtggtctgcaaggctttgcatctgtccaggcctcagatctacgcaagtagcttgtacagaaggggattagagctttgtttgctctccagtttagatgccttaa

SEQ ID NO: 8940 - DNA, 122 bp, Homo sapiens
  misc_feature (61)..(62): /note="This region represents a CpG dinucleotide"
  misc_feature (61)..(61): /note="Nucleotide may be methylated to form 5-methylcytosine"
ctctccaactgctgctcctaaatctcagaatatatggtgttgcttgcttctcctccgaaccgccccctcccctcagggtggggatagggcatggaaatggcctttggaagttaatgggattc

SEQ ID NO: 8941 - DNA, 122 bp, Homo sapiens
  misc_feature (61)..(62): /note="This region represents a CpG dinucleotide"
  misc_feature (61)..(61): /note="Nucleotide may be methylated to form 5-methylcytosine"
gggtacccatgctgccccgcaggcctcccttcaatctgtgcttgcacaattctagatgggcgttctccagcggggtctggtggtgtgcactctgctgctccatttgctgtccagttgtttgc

SEQ ID NO: 8942 - DNA, 122 bp, Homo sapiens
  misc_feature (61)..(62): /note="This region represents a CpG dinucleotide"
  misc_feature (61)..(61): /note="Nucleotide may be methylated to form 5-methylcytosine"
ggtggggtaaatatcaagcactcctgacttagaatgtaagcctgcctcatgggcagagaccgtatctctttcacttacccacagaataagtcacagaaggtccctttctggaccgggtagaa

SEQ ID NO: 8943 - DNA, 122 bp, Homo sapiens
  misc_feature (61)..(62): /note="This region represents a CpG dinucleotide"
  misc_feature (61)..(61): /note="Nucleotide may be methylated to form 5-methylcytosine"
agtctggatgtcctcaaccttcagcacctcttagccctttagtctgagtggaagaggattcggttacttgatccacagtgcatgctgaacccactgtctggttcccgcccccgcctcctgca

SEQ ID NO: 8944 - DNA, 122 bp, Homo sapiens
  misc_feature (61)..(62): /note="This region represents a CpG dinucleotide"
  misc_feature (61)..(61): /note="Nucleotide may be methylated to form 5-methylcytosine"
caaaacagttcctgccttcaaggagctcacaggctggtggtgcagacacctcagcagattcggagaggcaggacaaactgaaaagcgctctggcagagggagaagcaagcatggggctgcag

SEQ ID NO: 8945 - DNA, 122 bp, Homo sapiens
  misc_feature (61)..(62): /note="This region represents a CpG dinucleotide"
  misc_feature (61)..(61): /note="Nucleotide may be methylated to form 5-methylcytosine"
tttctcaagcactgtggcccatagtaactctgttgatctctaagcactagccatcatttgcgcgtcttatagaaggctgggtttgccttctatacatacacacattagaagtgtcttacttc

SEQ ID NO: 8946 - DNA, 122 bp, Homo sapiens
  misc_feature (61)..(62): /note="This region represents a CpG dinucleotide"
  misc_feature (61)..(61): /note="Nucleotide may be methylated to form 5-methylcytosine"
gacttacttcagcattggacattgtccaccacttcctcacatgggaatctaaaacctgaccgtgtcctgaccttcttcctccccaaagcctttactggcttccccttctgcagctgcttcct

SEQ ID NO: 8947 - DNA, 122 bp, Homo sapiens
  misc_feature (61)..(62): /note="This region represents a CpG dinucleotide"
  misc_feature (61)..(61): /note="Nucleotide may be methylated to form 5-methylcytosine"
cagagcattaagctgagtcatcattagtaaaagtcagagccaggctaagcacggggctcacgcctataatcccagcactttaggagactgaggcgggcagatcacttgaggtcaggaattca

SEQ ID NO: 8948 - DNA, 122 bp, Homo sapiens
  misc_feature (61)..(62): /note="This region represents a CpG dinucleotide"
  misc_feature (61)..(61): /note="Nucleotide may be methylated to form 5-methylcytosine"
tttcttagggccctccaggatacaggctccccattgtgccttgagaatgaagtccatttgcgctgaagagggaagagggaattttacatttgcttacattagaaggcactgtagccaatgag

SEQ ID NO: 8949 - DNA, 122 bp, Homo sapiens
  misc_feature (61)..(62): /note="This region represents a CpG dinucleotide"
  misc_feature (61)..(61): /note="Nucleotide may be methylated to form 5-methylcytosine"
cctgtgttgccatgggacacatttccaggaaggctattaacagtgggtgatttaaatgagcgagagacagaggcacatggctttttaagctgacagggttaacatttcccctcttgactaca

SEQ ID NO: 8950 - DNA, 122 bp, Homo sapiens
  misc_feature (61)..(62): /note="This region represents a CpG dinucleotide"
  misc_feature (61)..(61): /note="Nucleotide may be methylated to form 5-methylcytosine"
aaatgtttatatgagtacacgtataatgcattccaggaacatattttttaatgtgattgtcggcaaacagttatgaagtggcattatttcttcatgggccttcagggtagactcttaaaaat

SEQ ID NO: 8951 - DNA, 122 bp, Homo sapiens
  misc_feature (61)..(62): /note="This region represents a CpG dinucleotide"
  misc_feature (61)..(61): /note="Nucleotide may be methylated to form 5-methylcytosine"
ccaggaggcaagcagcacggtggagcttacagtggttttcataaaacctcccatcagagccgcacacaggcacgtagctgggcctgcatgcctccaggcactggcattcgggctcccctgtc

SEQ ID NO: 8952 - DNA, 122 bp, Homo sapiens
  misc_feature (61)..(62): /note="This region represents a CpG dinucleotide"
  misc_feature (61)..(61): /note="Nucleotide may be methylated to form 5-methylcytosine"
ccccgcctccccgcttccccgccccgcccccgggtgctgttctgacttccctccctcctccgcagctgttcagcccctcggtgaccgtgcccgacatgagcctgcctgaccttgacagcagc

SEQ ID NO: 8953 - DNA, 122 bp, Homo sapiens
  misc_feature (61)..(62): /note="This region represents a CpG dinucleotide"
  misc_feature (61)..(61): /note="Nucleotide may be methylated to form 5-methylcytosine"
cacagaactcaccctaatcccccaaagcatcgtgaccagcttcctgtccatgaggccacacggtgttgctgctgcactgctgcattcgtgtgaagccaacatttaactttcagagaggcttg

SEQ ID NO: 8954 - DNA, 122 bp, Homo sapiens
  misc_feature (61)..(62): /note="This region represents a CpG dinucleotide"
  misc_feature (61)..(61): /note="Nucleotide may be methylated to form 5-methylcytosine"
atgtatgcatatctaaagtacagcatttaattctttaccttgtctatgaaccgttgttcacgtgtttatctgctgaccctctctccactattatcctatgaccctgacgcatccccctctcc

SEQ ID NO: 8955 - DNA, 122 bp, Homo sapiens
  misc_feature (61)..(62): /note="This region represents a CpG dinucleotide"
  misc_feature (61)..(61): /note="Nucleotide may be methylated to form 5-methylcytosine"
ttttttttttgggacagtgtctcactctgtcacccaggctggaatgcagtggcacaatcacggctctgcagggtgcagactccaccttctgggctcaagccatcctcccacctcggcctccc

SEQ ID NO: 8956 - DNA, 122 bp, Homo sapiens
  misc_feature (61)..(62): /note="This region represents a CpG dinucleotide"
  misc_feature (61)..(61): /note="Nucleotide may be methylated to form 5-methylcytosine"
ggagattttaaataatcctaactacctcctaaactagcttagagattaactgagataatacggaggcagccctaagagcagtgcctagaacatagtgagccctcaataaaggcagaagggat

SEQ ID NO: 8957 - DNA, 122 bp, Homo sapiens
  misc_feature (61)..(62): /note="This region represents a CpG dinucleotide"
  misc_feature (61)..(61): /note="Nucleotide may be methylated to form 5-methylcytosine"
ttccaggtccaggaggcggagcttgatttccatgctgagcagggtgtccaggtcattccgcgtcaggtcgctcatcatgtccttcccgagtagcgcattcagtccatccgtccagatacagt

SEQ ID NO: 8958 - DNA, 122 bp, Homo sapiens
  misc_feature (61)..(62): /note="This region represents a CpG dinucleotide"
  misc_feature (61)..(61): /note="Nucleotide may be methylated to form 5-methylcytosine"
gctatccaattttgcatctgggaagtgttcatcgattgctagaaaaataatcaggtcgaacgcaggccatttccggtaaagaggctctagggaagcaccttcaggccagatgactcaggact

SEQ ID NO: 8959 - DNA, 122 bp, Homo sapiens
  misc_feature (61)..(62): /note="This region represents a CpG dinucleotide"
  misc_feature (61)..(61): /note="Nucleotide may be methylated to form 5-methylcytosine"
cttgcattaaaatgacagcagtcaccaaggcactgggaggaaacacgggccaggggaaaacgggccggctgtattttagagaaatcacaagcacacacatgggctacaagagaaattatatt

SEQ ID NO: 8960 - DNA, 122 bp, Homo sapiens
  misc_feature (61)..(62): /note="This region represents a CpG dinucleotide"
  misc_feature (61)..(61): /note="Nucleotide may be methylated to form 5-methylcytosine"
ctctgccaggagggcgaggcaggcgatgatgttttcctgctttccgagtttgtcgttttccgggcagtatcaaacgctggcatctctccaccaccctgtctccgtcctctcttcttccctcc

SEQ ID NO: 8961 - DNA, 122 bp, Homo sapiens
  misc_feature (61)..(62): /note="This region represents a CpG dinucleotide"
  misc_feature (61)..(61): /note="Nucleotide may be methylated to form 5-methylcytosine"
ttcaggatagtaagtcaccgcagttccctggcagttctagaggtgccgtcagggagctagcgattagagtcgaaagacttagaaagccacctggtgttctattgtactgtggctgggctgaa

SEQ ID NO: 8962 - DNA, 122 bp, Homo sapiens
  misc_feature (61)..(62): /note="This region represents a CpG dinucleotide"
  misc_feature (61)..(61): /note="Nucleotide may be methylated to form 5-methylcytosine"
gaagcacagagagattattttccccaaggtttcactgaaccaagcctggattctgggttccgttttcactgttgtgcttcaaggatctacttaaaaagcaaagttgatttgctcttgttact

SEQ ID NO: 8963 - DNA, 122 bp, Homo sapiens
  misc_feature (61)..(62): /note="This region represents a CpG dinucleotide"
  misc_feature (61)..(61): /note="Nucleotide may be methylated to form 5-methylcytosine"
ccgattctgaagttttaaaatattgatgctcaatctgatcacagattaaaactgtatttacgcagataatgcttggggcttaaaaaagggttgttattatagtatcatcaatgtaaaatacc

SEQ ID NO: 8964 - DNA, 122 bp, Homo sapiens
  misc_feature (61)..(62): /note="This region represents a CpG dinucleotide"
  misc_feature (61)..(61): /note="Nucleotide may be methylated to form 5-methylcytosine"
aggaggaaaaaggcaagttgccatgtaatatgtacattgtgatccctcccccacaatcaacgtacatgtttgcatacacgtggtagaaattacacattaaattgcaacaatggttacctttc

SEQ ID NO: 8965 - DNA, 122 bp, Homo sapiens
  misc_feature (61)..(62): /note="This region represents a CpG dinucleotide"
  misc_feature (61)..(61): /note="Nucleotide may be methylated to form 5-methylcytosine"
cagagggacttaggccgggaaggggcagcacggcgccctccaggcagagaagcagccccgcggccaccctgatgcggcgcggactcctcctgtccagttctctgtcacacctgctgcctgcc

SEQ ID NO: 8966 - DNA, 122 bp, Homo sapiens
  misc_feature (61)..(62): /note="This region represents a CpG dinucleotide"
  misc_feature (61)..(61): /note="Nucleotide may be methylated to form 5-methylcytosine"
gagtcagtggacttcctgaatgcagggaacctggtcgtgcttgggtttgcacccctagatcgtccttttgtgacagtggaggagcaaaccctggctgtagcaggtgtgctctgtgtgtttga

SEQ ID NO: 8967 - DNA, 122 bp, Homo sapiens
  misc_feature (61)..(62): /note="This region represents a CpG dinucleotide"
  misc_feature (61)..(61): /note="Nucleotide may be methylated to form 5-methylcytosine"
cttctttggggccctagtaacaatttgacagtgttatatagataaacataattcctctcacgtaagttgtgaattccttgagagtaagaattgaactgtgccccaattcatctctatgatca

SEQ ID NO: 8968 - DNA, 122 bp, Homo sapiens
  misc_feature (61)..(62): /note="This region represents a CpG dinucleotide"
  misc_feature (61)..(61): /note="Nucleotide may be methylated to form 5-methylcytosine"
ggcctgatgcgaatagggcaggcctgtgaacagagcaaagacgagtcacttaggaggggacgagagaggccagcggtaaactaatattaccagctcagggtttatttgtcaaagcctccttt

SEQ ID NO: 8969 - DNA, 122 bp, Homo sapiens
  misc_feature (61)..(62): /note="This region represents a CpG dinucleotide"
  misc_feature (61)..(61): /note="Nucleotide may be methylated to form 5-methylcytosine"
tcagataaggctaaatattacaaaaagaaaatttccaactttcctttctccctaaccccacgcagtcattgtcccttattggagcagcccagaaagccctggatgaatcactggctgctatt

SEQ ID NO: 8970 - DNA, 122 bp, Homo sapiens
  misc_feature (61)..(62): /note="This region represents a CpG dinucleotide"
  misc_feature (61)..(61): /note="Nucleotide may be methylated to form 5-methylcytosine"
cacaggaaatttaccatacatctgtttaggtacagtttcctctttctgtaattacacattcgtgaaagccacacatacgcaaaataaataaaaatatttttgtgtgttgatgtcattctgct

SEQ ID NO: 8971 - DNA, 122 bp, Homo sapiens
  misc_feature (61)..(62): /note="This region represents a CpG dinucleotide"
  misc_feature (61)..(61): /note="Nucleotide may be methylated to form 5-methylcytosine"
accacatggtgccattagatgctcttgacgtgctgtggttttctggttcactctgctagacggtgcccagggctgttcccggagccgtctgtcattgtacttacaactcacatcacaccccg

SEQ ID NO: 8972 - DNA, 122 bp, Homo sapiens
  misc_feature (61)..(62): /note="This region represents a CpG dinucleotide"
  misc_feature (61)..(61): /note="Nucleotide may be methylated to form 5-methylcytosine"
agttctacgtaggatagatagtcagcacactccaccctgtttttcccagggccgcaactacgaacctcagaaagaatgcttggagcagctatacgaggactctgaaaagtaaacaggagcag

SEQ ID NO: 8973 - DNA, 122 bp, Homo sapiens
  misc_feature (61)..(62): /note="This region represents a CpG dinucleotide"
  misc_feature (61)..(61): /note="Nucleotide may be methylated to form 5-methylcytosine"
aagtctcagggacccatccccgggcaatggtggcggtcactgtgaccaaagcggcggctccggcctcgcgcatgcgcactggcgaggccgactcacccgcccccacccccccttactcggca

SEQ ID NO: 8974 - DNA, 122 bp, Homo sapiens
  misc_feature (61)..(62): /note="This region represents a CpG dinucleotide"
  misc_feature (61)..(61): /note="Nucleotide may be methylated to form 5-methylcytosine"
ataaaactacccaatgacataaacactgagaagcctattgataatcagaagggttaatcacgtgctcaaagtgctgccttatgttatcacctcaaagcgtgtgaatgagatgcagcactaca

SEQ ID NO: 8975 - DNA, 122 bp, Homo sapiens
  misc_feature (61)..(62): /note="This region represents a CpG dinucleotide"
  misc_feature (61)..(61): /note="Nucleotide may be methylated to form 5-methylcytosine"
ggcaactccattctattccatgtgtctccttcttcagcagcccagcccagcctattcttgcggtgactgcagacgggaaagagcaagccagcctattcaagtaaacactgttcaagttttcc

SEQ ID NO: 8976 - DNA, 122 bp, Homo sapiens
  misc_feature (61)..(62): /note="This region represents a CpG dinucleotide"
  misc_feature (61)..(61): /note="Nucleotide may be methylated to form 5-methylcytosine"
aatggactcatctcattcactcattaaatagctctgccaccaccattatccttaccacctcggctaggaatcttaaatcatctttgattccatcctttccggcttcagtcagttactaagtt

SEQ ID NO: 8977 - DNA, 122 bp, Homo sapiens
  misc_feature (61)..(62): /note="This region represents a CpG dinucleotide"
  misc_feature (61)..(61): /note="Nucleotide may be methylated to form 5-methylcytosine"
ggtgggccatgggctacccggccaggtttatggagtacctactatgcgctgctagtgcttcgaggcttttaatccctacctgaggcaatccgagaagttattttcaactatgagggcagaga

SEQ ID NO: 8978 - DNA, 122 bp, Homo sapiens
  misc_feature (61)..(62): /note="This region represents a CpG dinucleotide"
  misc_feature (61)..(61): /note="Nucleotide may be methylated to form 5-methylcytosine"
acccatgtgaccagtcacttttctctaggcttcagtttcttcatctgtaaatggggatgacgccctacctcagtgggtggttgtaagaattgaatagacaatttagtgtggtgcctggcaca

SEQ ID NO: 8979 - DNA, 122 bp, Homo sapiens
  misc_feature (61)..(62): /note="This region represents a CpG dinucleotide"
  misc_feature (61)..(61): /note="Nucleotide may be methylated to form 5-methylcytosine"
ttggagagcaccccttttaccactgcctggttgcagaagtgccgaaagagcactggactccggaaggtaacccctcgccctttccagaagccagagagaccaagtgttatgtaagaagtagt

SEQ ID NO: 8980 - DNA, 122 bp, Homo sapiens
  misc_feature (61)..(62): /note="This region represents a CpG dinucleotide"
  misc_feature (61)..(61): /note="Nucleotide may be methylated to form 5-methylcytosine"
acaaaaattttgatctgcccttagtcttttgccaagagtgatagaccacatttagtctaccgtgtaatttacagggagaaaaaaaaactgtattactgtgagttctctaagtggttcaaaaa

SEQ ID NO: 8981 - DNA, 122 bp, Homo sapiens
  misc_feature (61)..(62): /note="This region represents a CpG dinucleotide"
  misc_feature (61)..(61): /note="Nucleotide may be methylated to form 5-methylcytosine"
tccagttgcactctgtcttccttccacaggggctcttatgcagaagacggcatatgtgaacgctgtagctctccttgcagaacatgtgaaggaaacgccaccaactgccattcttgtgaagg

SEQ ID NO: 8982 - DNA, 122 bp, Homo sapiens
  misc_feature (61)..(62): /note="This region represents a CpG dinucleotide"
  misc_feature (61)..(61): /note="Nucleotide may be methylated to form 5-methylcytosine"
taatctctatgggtaggttagaaaagccatgcaagcttccatctcattcactggaacactcgctctgaaagtcctgagtaataaatctaactcctctgaggccactatgctgaaaggaagcc

SEQ ID NO: 8983 - DNA, 122 bp, Homo sapiens
  misc_feature (61)..(62): /note="This region represents a CpG dinucleotide"
  misc_feature (61)..(61): /note="Nucleotide may be methylated to form 5-methylcytosine"
acagctaggctgataaatgtgttttctggtgttgtgactgagaacaagcctgttaaacaacggctgtgggaatttgtggttttctgtaagactcaattactgaactgaagtaaagttacagt

SEQ ID NO: 8984 - DNA, 122 bp, Homo sapiens
  misc_feature (61)..(62): /note="This region represents a CpG dinucleotide"
  misc_feature (61)..(61): /note="Nucleotide may be methylated to form 5-methylcytosine"
caaagctttatcctctgagtattattaccaaccttaacaagtttctaaacttgacccaagcgtatgtttttatatacttcacttaatcggcattcttttattgaactcccacctgtgtgcca

SEQ ID NO: 8985 - DNA, 122 bp, Homo sapiens
  misc_feature (61)..(62): /note="This region represents a CpG dinucleotide"
  misc_feature (61)..(61): /note="Nucleotide may be methylated to form 5-methylcytosine"
gagcgctaagctaagagagtcccgagctccagcagcagccaggtgctgttggcttccttacgcagtgagctgtctcttaatactttgaaaacatgatgctgagagaaagcaagttataaggg

SEQ ID NO: 8986 - DNA, 122 bp, Homo sapiens
  misc_feature (61)..(62): /note="This region represents a CpG dinucleotide"
  misc_feature (61)..(61): /note="Nucleotide may be methylated to form 5-methylcytosine"
cccactaattaaacagtcacccagcaggtagtttgagagaggatatgaaaaagggaagtgcggccttactcttgcaggggtgcgtctctgtcttccatcagttgatagcacaatgcttaacc

SEQ ID NO: 8987 - DNA, 122 bp, Homo sapiens
  misc_feature (61)..(62): /note="This region represents a CpG dinucleotide"
  misc_feature (61)..(61): /note="Nucleotide may be methylated to form 5-methylcytosine"
catggaacccacatccacaaccatctgtatgagccacaggtccacagtcctgaccaattccgtttgacactaatgttactctacatgagtagagttcaatgagggttgatatgggatgtgac

SEQ ID NO: 8988 - DNA, 122 bp, Homo sapiens
  misc_feature (61)..(62): /note="This region represents a CpG dinucleotide"
  misc_feature (61)..(61): /note="Nucleotide may be methylated to form 5-methylcytosine"
tgagtagtatctgtagtgtagatatactggacaaagggatgattcacgtcccaggtgggacggagaggacagcgagaaatttcatcacactacttagaattgtgtgcaatttaaaacttatg

SEQ ID NO: 8989 - DNA, 122 bp, Homo sapiens
  misc_feature (61)..(62): /note="This region represents a CpG dinucleotide"
  misc_feature (61)..(61): /note="Nucleotide may be methylated to form 5-methylcytosine"
aacacactgctgtaagttatgaatcaggcttgcaaaatgtaagttctggcaacaggctcccgagaacctacatcctgtattatatcatctgagctttatttcatgccattattctgaggaca

SEQ ID NO: 8990 - DNA, 122 bp, Homo sapiens
  misc_feature (61)..(62): /note="This region represents a CpG dinucleotide"
  misc_feature (61)..(61): /note="Nucleotide may be methylated to form 5-methylcytosine"
cgctcacatagaaatttctgtcaaggataccaatgataaccccccggttttcagcagagacgaatatagaattagtcttagtgaaaatctgccccctgggtcccctgtgttgcaagtgacag

SEQ ID NO: 8991 - DNA, 122 bp, Homo sapiens
  misc_feature (61)..(62): /note="This region represents a CpG dinucleotide"
  misc_feature (61)..(61): /note="Nucleotide may be methylated to form 5-methylcytosine"
ggcagagctaagcaggccacagacatctttccccagaaaagctgagggtgagaggcagggcggttcaccctccggatggctgtttgtaaagtaaatattgattttgagccatcccccaacct

SEQ ID NO: 8992 - DNA, 122 bp, Homo sapiens
  misc_feature (61)..(62): /note="This region represents a CpG dinucleotide"
  misc_feature (61)..(61): /note="Nucleotide may be methylated to form 5-methylcytosine"
ctccttcttttcttttagcaatttcacatatgccaaaaagtgaaatcaactattcactaacgaaaaggcataaatcctgtgaattgactgcctctagtaaagggacctaaacacccactgtt

SEQ ID NO: 8993 - DNA, 122 bp, Homo sapiens
  misc_feature (61)..(62): /note="This region represents a CpG dinucleotide"
  misc_feature (61)..(61): /note="Nucleotide may be methylated to form 5-methylcytosine"
gtgccttttcaaattttctgttttatgtaaagctgtgtttggggcattaacaatgcataacgataaccacttaacaaacactgcgaagggaatctgaagtaggtggcctctagggtggggga

SEQ ID NO: 8994 - DNA, 122 bp, Homo sapiens
  misc_feature (61)..(62): /note="This region represents a CpG dinucleotide"
  misc_feature (61)..(61): /note="Nucleotide may be methylated to form 5-methylcytosine"
tgtgttttgtgtttccttcctcttagcagcctaagagaaatgtgcagtgtagctttttgtcgacatgagctgcaaggtaatgacacttctgcttctttggtagttacatccttgtaataacc

SEQ ID NO: 8995 - DNA, 122 bp, Homo sapiens
  misc_feature (61)..(62): /note="This region represents a CpG dinucleotide"
  misc_feature (61)..(61): /note="Nucleotide may be methylated to form 5-methylcytosine"
ctgaggaaaggaagtgctctttctctcctgataggacaaggatgacccagcagatgggcacgtgggcaggcagagctctcaactaccttttctcttagcatgggtgacagtgtgtatgacca

SEQ ID NO: 8996 - DNA, 122 bp, Homo sapiens
  misc_feature (61)..(62): /note="This region represents a CpG dinucleotide"
  misc_feature (61)..(61): /note="Nucleotide may be methylated to form 5-methylcytosine"
agtactaggaatccaaaccagaccaaagagggttactcaatattcattctctaaagctcacgtattattggaagtctttgagagatctttttttaaagtcactgttaccattatcaacaaca

SEQ ID NO: 8997 - DNA, 122 bp, Homo sapiens
  misc_feature (61)..(62): /note="This region represents a CpG dinucleotide"
  misc_feature (61)..(61): /note="Nucleotide may be methylated to form 5-methylcytosine"
actctgtacaagtggtaccacttcacagcctagagctacttcccaactgggactcacacacgtccacagatactactacagcaaccatgaagctactccatggtgatgggggaaaagaaagg

SEQ ID NO: 8998 - DNA, 122 bp, Homo sapiens
  misc_feature (61)..(62): /note="This region represents a CpG dinucleotide"
  misc_feature (61)..(61): /note="Nucleotide may be methylated to form 5-methylcytosine"
ggtcagttttcttcgggcaacaattttctaaattggctggggtctggcggtgttggcccccgcgcgcagaccttgccccgaagggggccctgcctgcctggcatgggcggaggggggaaggg

SEQ ID NO: 8999 - DNA, 122 bp, Homo sapiens
  misc_feature (61)..(62): /note="This region represents a CpG dinucleotide"
  misc_feature (61)..(61): /note="Nucleotide may be methylated to form 5-methylcytosine"
tgacaaacagagagaactaacatgtttatttagctgtatgtatatatgcttaactacacccgaggaagctgtagagttagaaaaacatgaaccattaacagatgtggcctccctgcagaact

SEQ ID NO: 9000 - DNA, 122 bp, Homo sapiens
  misc_feature (61)..(62): /note="This region represents a CpG dinucleotide"
  misc_feature (61)..(61): /note="Nucleotide may be methylated to form 5-methylcytosine"
agcggccgccatgctggagaaggcgccccccatggcaaactggctggggtgcaggaagagcgggtgcccgttgaagaactgttggcccgccaggcccggggcgaagccgaggccaggcaggg

SEQ ID NO: 9001 - DNA, 122 bp, Homo sapiens
  misc_feature (61)..(62): /note="This region represents a CpG dinucleotide"
  misc_feature (61)..(61): /note="Nucleotide may be methylated to form 5-methylcytosine"
tcacttggcccttcctcgtcagtattggctttcagctctcctggcccgacatcctgtggacgctgcagttcagacaaatagcaagatcatcaaagagaggcgcatgaatgaaaaactgcttt

SEQ ID NO: 9002 - DNA, 122 bp, Homo sapiens
  misc_feature (61)..(62): /note="This region represents a CpG dinucleotide"
  misc_feature (61)..(61): /note="Nucleotide may be methylated to form 5-methylcytosine"
agaggacagctggagttcagtcccatggagaaatcacacacaatagaggaatcccaggagcgagggacaggcggtatttatacaccaactcctatgagttattacttgggggttgttggagg

SEQ ID NO: 9003 - DNA, 122 bp, Homo sapiens
  misc_feature (61)..(62): /note="This region represents a CpG dinucleotide"
  misc_feature (61)..(61): /note="Nucleotide may be methylated to form 5-methylcytosine"
agagaccacttaggaagctgttgcagtaactctggcatgaaatgttggtgatcaaaaccacggtggtggcagtgggaaaggaggcaagtggaggagtccagaaatatacacaaagttgaggt

SEQ ID NO: 9004 - DNA, 122 bp, Homo sapiens
  misc_feature (61)..(62): /note="This region represents a CpG dinucleotide"
  misc_feature (61)..(61): /note="Nucleotide may be methylated to form 5-methylcytosine"
taagtattatcaggataagtatactaggaatctagactcttgctaaaatgtacttgcccacgtggtttaaagtcaagtattagacacttaagagtgatccacttttaatgtagcacatctac

SEQ ID NO: 9005 - DNA, 122 bp, Homo sapiens
  misc_feature (61)..(62): /note="This region represents a CpG dinucleotide"
  misc_feature (61)..(61): /note="Nucleotide may be methylated to form 5-methylcytosine"
tttactgtaaaacagtattctgtgtcataccggcagtagcctcattcatctcatttttttcgattgcatcattttctcttgtgcttgatttaatctcatgctgttttgttcctcacggtccc

SEQ ID NO: 9006 - DNA, 122 bp, Homo sapiens
  misc_feature (61)..(62): /note="This region represents a CpG dinucleotide"
  misc_feature (61)..(61): /note="Nucleotide may be methylated to form 5-methylcytosine"
acaatgctgtgaggtgggggtgggggttgggaggcagatgctattactccattctactggcgaaaagactgagcctctggagatgtcaggtgacctgtgctcagcacgaggctcctgggtgg

SEQ ID NO: 9007 - DNA, 122 bp, Homo sapiens
  misc_feature (61)..(62): /note="This region represents a CpG dinucleotide"
  misc_feature (61)..(61): /note="Nucleotide may be methylated to form 5-methylcytosine"
tctatagtgcacaactctcaagaactgaaaaacaaaggcctaacttctaaggaaaagcaacgaaaatggagatggcagagaaaggtatttttactgtcattaaagaaaacataaaagcagtc

SEQ ID NO: 9008 - DNA, 122 bp, Homo sapiens
  misc_feature (61)..(62): /note="This region represents a CpG dinucleotide"
  misc_feature (61)..(61): /note="Nucleotide may be methylated to form 5-methylcytosine"
accctgatatcagagaaataacaaacaaaaggcataattattgaactatccagaaaaaaacggatattaagaggataaaaagttcacatgtgctttgtagatcagatgtgaaggataaaaag

SEQ ID NO: 9009 - DNA, 122 bp, Homo sapiens
  misc_feature (61)..(62): /note="This region represents a CpG dinucleotide"
  misc_feature (61)..(61): /note="Nucleotide may be methylated to form 5-methylcytosine"
gacatgtagaaaacacacaaaacagaaactcacaaatgcaaaatagaagtgggtacaaaacgaggatttgtgaaacaagagttgactgagtacagaaaagaaaatgaaggaacacactaatc

SEQ ID NO: 9010 - DNA, 122 bp, Homo sapiens
  misc_feature (61)..(62): /note="This region represents a CpG dinucleotide"
  misc_feature (61)..(61): /note="Nucleotide may be methylated to form 5-methylcytosine"
agaggtgtggggagagcagttaggaggtgccagtggagcaagcacccacacacgctgtggcggaactctgtgatgagcacccagagcaactgggaccagtggtgcaactgttgccgaggcca

SEQ ID NO: 9011 - DNA, 122 bp, Homo sapiens
  misc_feature (61)..(62): /note="This region represents a CpG dinucleotide"
  misc_feature (61)..(61): /note="Nucleotide may be methylated to form 5-methylcytosine"
taattgttggctttttacctactgccctctgtctagtgtggtatcttatttctttgtgttcgtcctgctcttcaaagttctttcctggctgaggatttggatttggatttggagctgtcatt

SEQ ID NO: 9012 - DNA, 122 bp, Homo sapiens
  misc_feature (61)..(62): /note="This region represents a CpG dinucleotide"
  misc_feature (61)..(61): /note="Nucleotide may be methylated to form 5-methylcytosine"
aggtccctccttgtgttcccagaatgctgtcaagctcgactgggacctcctccctgaaggcgtctgcatttttcatgagtgaagaggaaagagatgatgcgtcagaaattgcggtaaatatt

SEQ ID NO: 9013 - DNA, 122 bp, Homo sapiens
  misc_feature (61)..(62): /note="This region represents a CpG dinucleotide"
  misc_feature (61)..(61): /note="Nucleotide may be methylated to form 5-methylcytosine"
ctccgcggagtgggggggcctatgctttcctcttctggctcccatggcatctctatttttcgggtttaggaggcaacatttaccagtgaggctgaagcaactcagcaggatctccctggggc

SEQ ID NO: 9014 - DNA, 122 bp, Homo sapiens
  misc_feature (61)..(62): /note="This region represents a CpG dinucleotide"
  misc_feature (61)..(61): /note="Nucleotide may be methylated to form 5-methylcytosine"
gccgcggcccagtcttgctcaccctcgcagagtctaagcgcaggtttctcagatacctgccgcaaggggtccctgtttttctcatctttttaggcacctgccagatttaaaagggcaggaaa

SEQ ID NO: 9015 - DNA, 122 bp, Homo sapiens
  misc_feature (61)..(62): /note="This region represents a CpG dinucleotide"
  misc_feature (61)..(61): /note="Nucleotide may be methylated to form 5-methylcytosine"
tggcggaggaagattaagagaaatcgcgagcagggctcggctgccattggtgtgtgcaaacgccgaggaggaagggagagggagagtgagagtgaggaaggggggagagaagggggaaaaac

SEQ ID NO: 9016 - DNA, 122 bp, Homo sapiens
  misc_feature (61)..(62): /note="This region represents a CpG dinucleotide"
  misc_feature (61)..(61): /note="Nucleotide may be methylated to form 5-methylcytosine"
gacgaggctgtgtgcagacatcctgacgcaggagccagtagacaatgcccagctgcccagcgctggccccgcatcacactggcatcgtgcccaggcagccccagctctgaggctcctcccac

SEQ ID NO: 9017 - DNA, 122 bp, Homo sapiens
  misc_feature (61)..(62): /note="This region represents a CpG dinucleotide"
  misc_feature (61)..(61): /note="Nucleotide may be methylated to form 5-methylcytosine"
gaaaagaaaaattttgtccctagctattcatcacagctaatgttctgaccctaaatctaacgtgtagagcgaatggtctttatagtaacacactgtaccaagtagaatggccttttcacttc

SEQ ID NO: 9018 - DNA, 122 bp, Homo sapiens
  misc_feature (61)..(62): /note="This region represents a CpG dinucleotide"
  misc_feature (61)..(61): /note="Nucleotide may be methylated to form 5-methylcytosine"
cttcccttggatgctctacagaggtttgaacaaggccatctcaggccccacattcagtagcgttagcggcaggtcctgttaggctttgccatctcaggccccacattcagtagcgttagcgg

SEQ ID NO: 9019 - DNA, 122 bp, Homo sapiens
  misc_feature (61)..(62): /note="This region represents a CpG dinucleotide"
  misc_feature (61)..(61): /note="Nucleotide may be methylated to form 5-methylcytosine"
cccaggccttctctctctggtccttgcagtagcagagttttattctggccttccccgccccgataaagcaaggtgcctcccttccctctgtcaagtttttccgtcagactccctgctcgcag

SEQ ID NO: 9020 - DNA, 122 bp, Homo sapiens
  misc_feature (61)..(62): /note="This region represents a CpG dinucleotide"
  misc_feature (61)..(61): /note="Nucleotide may be methylated to form 5-methylcytosine"
gcagcactttaggcagcccataagctatgcgagaatgtgaacgctcaccttgctccgtcacggttctgacctaccacataaacaggaagaagccagtgaccggaacagctctaggaataaca

SEQ ID NO: 9021 - DNA, 122 bp, Homo sapiens
  misc_feature (61)..(62): /note="This region represents a CpG dinucleotide"
  misc_feature (61)..(61): /note="Nucleotide may be methylated to form 5-methylcytosine"
ggatttctcaatcatcactgttttctggaagcaccaggctcaggtagatttcaccattgtcgctggaaacctgattcagaccaggggcaacagtggacagatagggagatgtgatgtgaccc

SEQ ID NO: 9022 - DNA, 122 bp, Homo sapiens
  misc_feature (61)..(62): /note="This region represents a CpG dinucleotide"
  misc_feature (61)..(61): /note="Nucleotide may be methylated to form 5-methylcytosine"
tgaataaatacaatacaactgtggcgaatgctatttgaggccaccactcttggtgcccaacgctgcatttcctctgcttgcctctgatttcagctgcagctgtggtggacagctcctgtgcc

SEQ ID NO: 9023 - DNA, 122 bp, Homo sapiens
  misc_feature (61)..(62): /note="This region represents a CpG dinucleotide"
  misc_feature (61)..(61): /note="Nucleotide may be methylated to form 5-methylcytosine"
tgatggaaaacacatgttcttagaatttggcctaagtacaagacttagccactgattccacgtgaccttcagcaactcattcaacatctgtttccttatctataaaagtatcatctaattta

SEQ ID NO: 9024 - DNA, 122 bp, Homo sapiens
  misc_feature (61)..(62): /note="This region represents a CpG dinucleotide"
  misc_feature (61)..(61): /note="Nucleotide may be methylated to form 5-methylcytosine"
caaacaaacacatcaacagacagtttacagttccatgtgataggcacggtgggctggggccggatcaggggagtctgtggaagcccatgcaggggcacctggggctgaaagcctgggaaggc

SEQ ID NO: 9025 - DNA, 122 bp, Homo sapiens
  misc_feature (61)..(62): /note="This region represents a CpG dinucleotide"
  misc_feature (61)..(61): /note="Nucleotide may be methylated to form 5-methylcytosine"
tgaactttgacttcttgcagcatagtttgcttttcctcttttcttctctgtgcctttgcacgtgccgtgttctttgctttgtcatcccccacccccaaatacttaactcctacttagccttc

SEQ ID NO: 9026 - DNA, 122 bp, Homo sapiens
  misc_feature (61)..(62): /note="This region represents a CpG dinucleotide"
  misc_feature (61)..(61): /note="Nucleotide may be methylated to form 5-methylcytosine"
tgcaaaatcccagaaattacttcaagacagctcttgttaaaataatgtcagccagaggtccggacggactgggacccagaagagccaccagaacaagacatgcggacacaggactcagcccg

SEQ ID NO: 9027 - DNA, 122 bp, Homo sapiens
  misc_feature (61)..(62): /note="This region represents a CpG dinucleotide"
  misc_feature (61)..(61): /note="Nucleotide may be methylated to form 5-methylcytosine"
aacaagttaaagcattaatcttgtgctgtccaagttatgctaattaaatatatacatctacgagactaagttcctaaaggaactaacaattctgtaatgaaaaaaattcactctaatgttct

SEQ ID NO: 9028 - DNA, 122 bp, Homo sapiens
  misc_feature (61)..(62): /note="This region represents a CpG dinucleotide"
  misc_feature (61)..(61): /note="Nucleotide may be methylated to form 5-methylcytosine"
aatacttactgcctggacctttacaggaaaagtttgctgatctcttatcaagtgtgttttcgtaggtgtcagcatctttgaatacaaccgtgctgtttctgagtaacaatggggagggtgag

SEQ ID NO: 9029 - DNA, 122 bp, Homo sapiens
  misc_feature (61)..(62): /note="This region represents a CpG dinucleotide"
  misc_feature (61)..(61): /note="Nucleotide may be methylated to form 5-methylcytosine"
tcatttaggcccttcatttccctgtctgaaacttctctatgatgtgtcacattccagaagcgaagttatttgattgttcccattaaaccagtctctctgccctgggaatatctcagtccagt

SEQ ID NO: 9030 - DNA, 122 bp, Homo sapiens
  misc_feature (61)..(62): /note="This region represents a CpG dinucleotide"
  misc_feature (61)..(61): /note="Nucleotide may be methylated to form 5-methylcytosine"
ctggccatggttttaatgcaaacggagaatacccaagacatctacagttaaaattcaaatcgtgttttatggcattcatattttgtgcaaatcaatcactgaataagctaagctacattttg

SEQ ID NO: 9031 - DNA, 122 bp, Homo sapiens
  misc_feature (61)..(62): /note="This region represents a CpG dinucleotide"
  misc_feature (61)..(61): /note="Nucleotide may be methylated to form 5-methylcytosine"
aggactagaaagccaactttctacttgtcactttcccagatatggacaaggttgtaaacacgtggaagtataatttttttagtggcaaattacaaatgcattcaacagagctgtttcagaaa

SEQ ID NO: 9032 - DNA, 122 bp, Homo sapiens
  misc_feature (61)..(62): /note="This region represents a CpG dinucleotide"
  misc_feature (61)..(61): /note="Nucleotide may be methylated to form 5-methylcytosine"
tataacatatacaggagtgaaattacataaggtaaagtgcttccacttccccctgcctgccggggagctcaaagctgaagtgaataaacatattaactgatagcttaaacacttgagccagg

SEQ ID NO: 9033 - DNA, 122 bp, Homo sapiens
  misc_feature (61)..(62): /note="This region represents a CpG dinucleotide"
  misc_feature (61)..(61): /note="Nucleotide may be methylated to form 5-methylcytosine"
tctgagccagcggggagaggcccgggcggaggaggctgcggactcctagaggttcagtgccggaagttgggcctggaaagggggcaccgccttcccggttctggtggcggggagtgagggga

SEQ ID NO: 9034 - DNA, 122 bp, Homo sapiens
  misc_feature (61)..(62): /note="This region represents a CpG dinucleotide"
  misc_feature (61)..(61): /note="Nucleotide may be methylated to form 5-methylcytosine"
ttgaggaaagtctgtatgatttgctcagtgaaaggcacacccatctgtactctaaggcctcgaaacagagtgaggaagaagctcagcatctcatcagtcacatctgaggaaaggggcagaga

SEQ ID NO: 9035 - DNA, 122 bp, Homo sapiens
  misc_feature (61)..(62): /note="This region represents a CpG dinucleotide"
  misc_feature (61)..(61): /note="Nucleotide may be methylated to form 5-methylcytosine"
ccctgggtttggaagctgtgtttgctgatgccagcctgcttaaatagctgggctggctgacgcaggctgctgatagcacgtttatttacgcctatgagcacacactcgagcaaggacctgaa

SEQ ID NO: 9036 - DNA, 122 bp, Homo sapiens
  misc_feature (61)..(62): /note="This region represents a CpG dinucleotide"
  misc_feature (61)..(61): /note="Nucleotide may be methylated to form 5-methylcytosine"
attagaagaagcaccaagcactatcaacattagcaaatcagtactaggaagtagcttggccgcttccttccatttccttccaaccctgggaactctttccattaaaaacatttctccaccac

SEQ ID NO: 9037 - DNA, 122 bp, Homo sapiens
  misc_feature (61)..(62): /note="This region represents a CpG dinucleotide"
  misc_feature (61)..(61): /note="Nucleotide may be methylated to form 5-methylcytosine"
ctatctatctatctatctatctatccatcttaaggaattggctcatcagtctgtggaggccgcaagtctgagatctgcagggcaggccaacaggctggagacccagggaacggttgatggtg

SEQ ID NO: 9038 - DNA, 122 bp, Homo sapiens
  misc_feature (61)..(62): /note="This region represents a CpG dinucleotide"
  misc_feature (61)..(61): /note="Nucleotide may be methylated to form 5-methylcytosine"
cggagggaatcagggaaggctgtgtaggagtcagcacttaagctggaccttgagagagtgcggcagttccagtgttgaaagggacttcagaaaccgtccctccagcaggacacaccatccgt

SEQ ID NO: 9039 - DNA, 122 bp, Homo sapiens
  misc_feature (61)..(62): /note="This region represents a CpG dinucleotide"
  misc_feature (61)..(61): /note="Nucleotide may be methylated to form 5-methylcytosine"
tccccggggctcccacagcaaagctgtttgtatccctggtgctagagttccttgcttgctcgtcactttatatgcattttctcattcacactcatgacattagttgttattgtgacctcagc

SEQ ID NO: 9040 - DNA, 122 bp, Homo sapiens
  misc_feature (61)..(62): /note="This region represents a CpG dinucleotide"
  misc_feature (61)..(61): /note="Nucleotide may be methylated to form 5-methylcytosine"
ggcggggccagctggctgggtcagcagatgggctcctctggcgtcttctcaccttctggccggtcattggccctcgtggccctaccacagtggggtgggcatctccccataggccctcccca

SEQ ID NO: 9041 - DNA, 122 bp, Homo sapiens
  misc_feature (61)..(62): /note="This region represents a CpG dinucleotide"
  misc_feature (61)..(61): /note="Nucleotide may be methylated to form 5-methylcytosine"
tgcacaggcgcccgggctgtggatcgccaggaggcccgggctttggatcaccaggaggcccgggctgtggatcgccaggaggctgcagcctgatcccagcgtcactgctgcgacaggcacct

SEQ ID NO: 9042 - DNA, 122 bp, Homo sapiens
  misc_feature (61)..(62): /note="This region represents a CpG dinucleotide"
  misc_feature (61)..(61): /note="Nucleotide may be methylated to form 5-methylcytosine"
aatgaagggctgaaaatccttctcctgagactgtgatgtgtagatagaacgtggtgcaggcgatcggaaaactgtaggcctaaggaaacgattttaaattttccagcgtctcccacccaact

SEQ ID NO: 9043 - DNA, 122 bp, Homo sapiens
  misc_feature (61)..(62): /note="This region represents a CpG dinucleotide"
  misc_feature (61)..(61): /note="Nucleotide may be methylated to form 5-methylcytosine"
aaagccagcaagactcctcataccagaggctggatggtttctgcaaatggtgacaccagccgtaacattttccagggggttgatctcagaggcagccaaacctcggggagcaccaaagcaga

SEQ ID NO: 9044 - DNA, 122 bp, Homo sapiens
  misc_feature (61)..(62): /note="This region represents a CpG dinucleotide"
  misc_feature (61)..(61): /note="Nucleotide may be methylated to form 5-methylcytosine"
gaagtcctgatctgcctacactgcatacagtgcggctggggttgagttggtctccgtccccgctcagtttgggagaatcttgaccagaccctgccacccgagggctttgattcctggtctat

SEQ ID NO: 9045 - DNA, 122 bp, Homo sapiens
  misc_feature (61)..(62): /note="This region represents a CpG dinucleotide"
  misc_feature (61)..(61): /note="Nucleotide may be methylated to form 5-methylcytosine"
ctgggacccctgctgttttaaaatcctagaaggccccagtcacacgttgtcaataatagccgtcggaggtgaggagtgaagaagggctgttcaggaaacagtttgagcccttcaagtggaca

SEQ ID NO: 9046 - DNA, 122 bp, Homo sapiens
  misc_feature (61)..(62): /note="This region represents a CpG dinucleotide"
  misc_feature (61)..(61): /note="Nucleotide may be methylated to form 5-methylcytosine"
acctcattctggggctccccagggcccctgggccccatccaggcagctgcgaggccaggccgggtgctgccacatcagcacacagctgcggccgcttccgtaatggaggctgagagcccgcc

SEQ ID NO: 9047 - DNA, 122 bp, Homo sapiens
  misc_feature (61)..(62): /note="This region represents a CpG dinucleotide"
  misc_feature (61)..(61): /note="Nucleotide may be methylated to form 5-methylcytosine"
ctcctgaggccgcatgaacaagcctgggggcggggggtggggtgaaaggctgcaccacagcgctcagggcccactgggtgtcgggctcctctctgatgtggcttgcactaatcagacgcagg

SEQ ID NO: 9048 - DNA, 122 bp, Homo sapiens
  misc_feature (61)..(62): /note="This region represents a CpG dinucleotide"
  misc_feature (61)..(61): /note="Nucleotide may be methylated to form 5-methylcytosine"
atgtccttctgttgactgcagaatttctgctggaaatgcagggaggctgcttgtggggttcgcgtgctgtgggaagtagggaaaatgagctggtttactttgtgtctttttgtgcatgcaga

SEQ ID NO: 9049 - DNA, 122 bp, Homo sapiens
  misc_feature (61)..(62): /note="This region represents a CpG dinucleotide"
  misc_feature (61)..(61): /note="Nucleotide may be methylated to form 5-methylcytosine"
gacactgagatgttaacaattacagacgatgcttatggagtcagtggtagacttggaaaacggtgagtctactgtggtaagaacaaacataggcagacagctataaattgcagtaaacaaac

SEQ ID NO: 9050 - DNA, 122 bp, Homo sapiens
  misc_feature (61)..(62): /note="This region represents a CpG dinucleotide"
  misc_feature (61)..(61): /note="Nucleotide may be methylated to form 5-methylcytosine"
gcagccacgtggaccccgcctctgctgctgccttttgtctggcagcaccagccgggctaacggtctaagcagatttcgtgcaaatccccgtcagaaagcacaaatccacccggtcagcacaa

SEQ ID NO: 9051 - DNA, 122 bp, Homo sapiens
  misc_feature (61)..(62): /note="This region represents a CpG dinucleotide"
  misc_feature (61)..(61): /note="Nucleotide may be methylated to form 5-methylcytosine"
agtgtccttccactcctgtggtattaagtactaaacagcctgaagtgcttcaaacacagacgtcagatgaacttggctcatcccaggcacaaagccacaagcaccatgaatgacgttaagta

SEQ ID NO: 9052 - DNA, 122 bp, Homo sapiens
  misc_feature (61)..(62): /note="This region represents a CpG dinucleotide"
  misc_feature (61)..(61): /note="Nucleotide may be methylated to form 5-methylcytosine"
gaatagcccccttctgggaagccctggcctcttctgtagaagttcttactcatattccaccgttcaagacgctgcctcccaatcgtgattggcccgactgaagagaaagcacttcatcaaaa

SEQ ID NO: 9053 - DNA, 122 bp, Homo sapiens
  misc_feature (61)..(62): /note="This region represents a CpG dinucleotide"
  misc_feature (61)..(61): /note="Nucleotide may be methylated to form 5-methylcytosine"
acctgttgatccagaggcatgaagagcttggcgccatcaggtggcagcctaaacttccagcgcaatggatcatccctgtgtctcttgggggcagcattcctccctctggaactaagatctct

SEQ ID NO: 9054 - DNA, 122 bp, Homo sapiens
  misc_feature (61)..(62): /note="This region represents a CpG dinucleotide"
  misc_feature (61)..(61): /note="Nucleotide may be methylated to form 5-methylcytosine"
gaaggagagaagaaaagaatgtcagaagaatgctggattctgcattttcagaagggggtgcgggcagggattaaaaaggtagtgaaatagtcagggggcatctaccaaagtaagctgagcaa

SEQ ID NO: 9055 - DNA, 122 bp, Homo sapiens
  misc_feature (61)..(62): /note="This region represents a CpG dinucleotide"
  misc_feature (61)..(61): /note="Nucleotide may be methylated to form 5-methylcytosine"
agccttaaaatagggctggtcatgcaccaagtatctttcacttacactgaggtcgaaaagcgtgtatttattttatctaaactagaatacgattccttaaaacattagccctatgtgtcttc

SEQ ID NO: 9056 - DNA, 122 bp, Homo sapiens
  misc_feature (61)..(62): /note="This region represents a CpG dinucleotide"
  misc_feature (61)..(61): /note="Nucleotide may be methylated to form 5-methylcytosine"
ccatctcaaaattaaaaaaaaaaaaaagtcaagtgatgagtacttattgctagaattattcgcaggtcaatgcaacaaatggaatagaggtttcacgaaaaaaaaatcttaattttccatca

SEQ ID NO: 9057 - DNA, 122 bp, Homo sapiens
  misc_feature (61)..(62): /note="This region represents a CpG dinucleotide"
  misc_feature (61)..(61): /note="Nucleotide may be methylated to form 5-methylcytosine"
gttaactgggtctctctgcagctactggttttcatttctcggttagccagttagctgttacgtgtacctttggctatgagtcaaaaccaaacctaataaccaaaccacaaaaaccccaccca

SEQ ID NO: 9058 - DNA, 122 bp, Homo sapiens
  misc_feature (61)..(62): /note="This region represents a CpG dinucleotide"
  misc_feature (61)..(61): /note="Nucleotide may be methylated to form 5-methylcytosine"
atgtgaaacatttttcagccagtggggaggagctggtcaaagtagggaggagtgcactaacgaaaagcaataatgttattcaggaaaacttaaaaggggaaaaagcaacactaggcatcata

SEQ ID NO: 9059 - DNA, 122 bp, Homo sapiens
  misc_feature (61)..(62): /note="This region represents a CpG dinucleotide"
  misc_feature (61)..(61): /note="Nucleotide may be methylated to form 5-methylcytosine"
tagctcattggattctgtgggatttgatatagatatctcctgctcttagaattcaaaagccgtcaaggagtggagacaccaggagtcattttctggccaggggaggtaggggagataaggga

SEQ ID NO: 9060 - DNA, 122 bp, Homo sapiens
  misc_feature (61)..(62): /note="This region represents a CpG dinucleotide"
  misc_feature (61)..(61): /note="Nucleotide may be methylated to form 5-methylcytosine"
gctgggggcacattacatgagtatcattactcatttattgattgaccaaattaatagaatcgcttctcaacatagttttcctccttgaagatcattttatcctagaaaccattctttatttc

SEQ ID NO: 9061 - DNA, 122 bp, Homo sapiens
  misc_feature (61)..(62): /note="This region represents a CpG dinucleotide"
  misc_feature (61)..(61): /note="Nucleotide may be methylated to form 5-methylcytosine"
agcatgctagacactcatattgtgatgtgtcccccaccaggttacttaagggtatatgcccgctgcttgagccctaaaagctaggccaggagctaaggccatggtacccagctgagggacag

SEQ ID NO: 9062 - DNA, 122 bp, Homo sapiens
  misc_feature (61)..(62): /note="This region represents a CpG dinucleotide"
  misc_feature (61)..(61): /note="Nucleotide may be methylated to form 5-methylcytosine"
ataaaaactgttgttaagactgaggctctaaaggtttctggtgatttgtcttcagtgacacgtgcatttttgagctgtggcatttaggtctcctgactcatattgagttgcccaatattaaa

SEQ ID NO: 9063 - DNA, 122 bp, Homo sapiens
  misc_feature (61)..(62): /note="This region represents a CpG dinucleotide"
  misc_feature (61)..(61): /note="Nucleotide may be methylated to form 5-methylcytosine"
ccacccacaacatttgcccaagttactgaagcaacagacttaattcttacaacatgctttcgttatgtgttgtgatttccatattttaaagttatttcaaattgatcgtatttaagaaaatc

SEQ ID NO: 9064 - DNA, 122 bp, Homo sapiens
  misc_feature (61)..(62): /note="This region represents a CpG dinucleotide"
  misc_feature (61)..(61): /note="Nucleotide may be methylated to form 5-methylcytosine"
ggcacccagcaggtgactgaacatggggaccatggcactccgagagtgctctgctccaaacgcagcactggggggtggggcacgggggggaggtcagggtgtgcccccgctcctcccaacag

SEQ ID NO: 9065 - DNA, 122 bp, Homo sapiens
  misc_feature (61)..(62): /note="This region represents a CpG dinucleotide"
  misc_feature (61)..(61): /note="Nucleotide may be methylated to form 5-methylcytosine"
cttatcatgggtcatctttacctccatgccctagccctgctaggggacagtgtctcacctcgactaacaggcgttcagttacgctgacatcaactagattaagagagttggctcttgcccca

SEQ ID NO: 9066 - DNA, 122 bp, Homo sapiens
  misc_feature (61)..(62): /note="This region represents a CpG dinucleotide"
  misc_feature (61)..(61): /note="Nucleotide may be methylated to form 5-methylcytosine"
cacccctcccccactaccttaaatatgtaactctatttacttgcttcattcctgacaaaacgtcttctgtcattcttacctatattcctttgtatgtagtatttcattttcttctggctgcc

SEQ ID NO: 9067 - DNA, 122 bp, Homo sapiens
  misc_feature (61)..(62): /note="This region represents a CpG dinucleotide"
  misc_feature (61)..(61): /note="Nucleotide may be methylated to form 5-methylcytosine"
tgaggacgcggcgcgggctgctggccgcgtcgccgagggagggcccggacagccctgcagcgcgtctcagcggagccctgggggccgcgccgctcctccaaacatgattcagaaccgcccgt

SEQ ID NO: 9068 - DNA, 122 bp, Homo sapiens
  misc_feature (61)..(62): /note="This region represents a CpG dinucleotide"
  misc_feature (61)..(61): /note="Nucleotide may be methylated to form 5-methylcytosine"
agggttggtgttgtggatttatgagtcatgcccatgcaaggcctggtggatgaggtcacccgaggagggagaatgtggtttctgagactaatagcttccctctgtatattgatatctatctg

SEQ ID NO: 9069 - DNA, 122 bp, Homo sapiens
  misc_feature (61)..(62): /note="This region represents a CpG dinucleotide"
  misc_feature (61)..(61): /note="Nucleotide may be methylated to form 5-methylcytosine"
tgtcagtggcggaccggcgctccctcctggagccctttgtctacttggccagcaagatgacgcaaccccagagcaagtctgccttccccctcagccggaagaacaagggcagcggctccttg

SEQ ID NO: 9070 - DNA, 122 bp, Homo sapiens
  misc_feature (61)..(62): /note="This region represents a CpG dinucleotide"
  misc_feature (61)..(61): /note="Nucleotide may be methylated to form 5-methylcytosine"
tgggtgggaaggtgctgagagcaacagagggctggactgtgcatcgtggtgggggttgagcgccagaagccactgcaacagcactttcctctgtggatcctgtacagggttcatgtggcctt

SEQ ID NO: 9071 - DNA, 122 bp, Homo sapiens
  misc_feature (61)..(62): /note="This region represents a CpG dinucleotide"
  misc_feature (61)..(61): /note="Nucleotide may be methylated to form 5-methylcytosine"
gatcctccaggataacaatgttctcatttccagaagatcattacgcaaggcactttctttcgtcctagtacagataagggtggttcaaaaagactcaaaagtttgcccatgggctgtgcatg

SEQ ID NO: 9072 - DNA, 122 bp, Homo sapiens
  misc_feature (61)..(62): /note="This region represents a CpG dinucleotide"
  misc_feature (61)..(61): /note="Nucleotide may be methylated to form 5-methylcytosine"
ccgctaaccaggatggctggcacctgacactctcatcaggaaagcagagcctggtgaagacgatgccccaggctgtgaccactcagcagaaaagtcagaaaccctggcctagcagctcctgg

SEQ ID NO: 9073 - DNA, 122 bp, Homo sapiens
  misc_feature (61)..(62): /note="This region represents a CpG dinucleotide"
  misc_feature (61)..(61): /note="Nucleotide may be methylated to form 5-methylcytosine"
tggtatgaaataaagcacaatttaaggagacaagctataaatatgttgtgaaaaaattaacgttaagtcaaataaataagctaagtacagagtgaaaataattacatttccaactaattaca

SEQ ID NO: 9074 - DNA, 122 bp, Homo sapiens
  misc_feature (61)..(62): /note="This region represents a CpG dinucleotide"
  misc_feature (61)..(61): /note="Nucleotide may be methylated to form 5-methylcytosine"
aaccagcagtgctccatcccttctcagctggggcctgagaacacgtgagtgagaaagtttcgccctgttgcctcagccgaaagctagggaatcctagctcacatatcaggttccttaagcaa

SEQ ID NO: 9075 - DNA, 122 bp, Homo sapiens
  misc_feature (61)..(62): /note="This region represents a CpG dinucleotide"
  misc_feature (61)..(61): /note="Nucleotide may be methylated to form 5-methylcytosine"
gaccccaggctgagacacggtggagctgggtggctccactttatctccaccgaggggtgacgcctgggttcgtggaaaccaccagaggaaatgtcacaggcctttcccacccctcctgtcca

SEQ ID NO: 9076 - DNA, 122 bp, Homo sapiens
  misc_feature (61)..(62): /note="This region represents a CpG dinucleotide"
  misc_feature (61)..(61): /note="Nucleotide may be methylated to form 5-methylcytosine"
cagagaaagctctgaccccaagagaaaccgacatcatacacacacacacacacacacacacgcagggcagaggaatatgtggtttctcaaacggattcctaaaacatacatatatatataat

SEQ ID NO: 9077 - DNA, 122 bp, Homo sapiens
  misc_feature (61)..(62): /note="This region represents a CpG dinucleotide"
  misc_feature (61)..(61): /note="Nucleotide may be methylated to form 5-methylcytosine"
taagcccatggaggcagagagctttcttattagattttgtcatgatcctctaaagtaccacggagttgaatgtcaagttatattaaggaagtgaaatcaatagaatttagtcatggagttga

SEQ ID NO: 9078 - DNA, 122 bp, Homo sapiens
  misc_feature (61)..(62): /note="This region represents a CpG dinucleotide"
  misc_feature (61)..(61): /note="Nucleotide may be methylated to form 5-methylcytosine"
agctgggtgatgagtacatggggtgggggcatatactactctatctctgtcaatgtttcacggtaaaaaggaaaaagagctgttaaaatggctatatgccactgagacctcactagtgacca

SEQ ID NO: 9079 - DNA, 122 bp, Homo sapiens
  misc_feature (61)..(62): /note="This region represents a CpG dinucleotide"
  misc_feature (61)..(61): /note="Nucleotide may be methylated to form 5-methylcytosine"
taatcataatattattgttacttagacctttggcttggggaggctggatttacaaacctacgattcaccaagagtcttagcagtctgagaggtcgccttctgttaaaaggtggctgctgtag

SEQ ID NO: 9080 - DNA, 122 bp, Homo sapiens
  misc_feature (61)..(62): /note="This region represents a CpG dinucleotide"
  misc_feature (61)..(61): /note="Nucleotide may be methylated to form 5-methylcytosine"
gatcctgggactgaatgggtgcttcagcattagctgcgcctgtagaagtcctgtgatagccgagcaccctccctcagatggcctgttgagattggcagtgctgttgtgaggaatcctcagtc

SEQ ID NO: 9081 - DNA, 122 bp, Homo sapiens
  misc_feature (61)..(62): /note="This region represents a CpG dinucleotide"
  misc_feature (61)..(61): /note="Nucleotide may be methylated to form 5-methylcytosine"
cgaaacttagatgcgtacaatccttcattccttgaggcaggattgtgtggtggttaaaagcggggactctggatcccgcctaacctgattgggttgacatcccagttctgccacttactagc

SEQ ID NO: 9082 - DNA, 122 bp, Homo sapiens
  misc_feature (61)..(62): /note="This region represents a CpG dinucleotide"
  misc_feature (61)..(61): /note="Nucleotide may be methylated to form 5-methylcytosine"
cggagtttttagcacgattcaaagttacgtccatctgtaggcttttctttgtttgagggccgtctccctcactacaatgcaagattgatgaggacaagccctatgcagctttgttcaccagt

SEQ ID NO: 9083 - DNA, 122 bp, Homo sapiens
  misc_feature (61)..(62): /note="This region represents a CpG dinucleotide"
  misc_feature (61)..(61): /note="Nucleotide may be methylated to form 5-methylcytosine"
ttaataccattaacagccatacatctcacaattacataaaaattcatcgttggggccgggcgcggtgactcacgcctgtaatcccagcactttggaaggccgaggcgggcgaatcacaaggt

SEQ ID NO: 9084 - DNA, 122 bp, Homo sapiens
  misc_feature (61)..(62): /note="This region represents a CpG dinucleotide"
  misc_feature (61)..(61): /note="Nucleotide may be methylated to form 5-methylcytosine"
gaccttgttgtgttaccaatgtgtcactgaatcctaattcaatgcttcaagcgtggtaaacgttaatgaatgaataaggtttttgaaaagcaggaacattgtgttgaccttactcatagtat

SEQ ID NO: 9085 - DNA, 122 bp, Homo sapiens
  misc_feature (61)..(62): /note="This region represents a CpG dinucleotide"
  misc_feature (61)..(61): /note="Nucleotide may be methylated to form 5-methylcytosine"
acaggcgaggaggccgagctgtataaattgtagtctagacaccaatctaaatatctcaaacgcaaggcagacatagcccagcctgaggttggaggcccggcatgctgtggaatcgagtagag

SEQ ID NO: 9086 - DNA, 122 bp, Homo sapiens
  misc_feature (61)..(62): /note="This region represents a CpG dinucleotide"
  misc_feature (61)..(61): /note="Nucleotide may be methylated to form 5-methylcytosine"
cctggaaactaatacttcttgtggtgggttggggtgggtggttgtgcatcaagcaacagtcgtcagcagccccatgagtcatgtggaaggagtggccagagaaagagtggatgctctacagc

SEQ ID NO: 9087 - DNA, 122 bp, Homo sapiens
  misc_feature (61)..(62): /note="This region represents a CpG dinucleotide"
  misc_feature (61)..(61): /note="Nucleotide may be methylated to form 5-methylcytosine"
cagtgggaagcatacaaagtatggacacactggacaaagggatgattcacataacaggcacgaccagagggacaataagagatttcatcaggatactcaaaagggcacacaatttaaaacat

SEQ ID NO: 9088 - DNA, 122 bp, Homo sapiens
  misc_feature (61)..(62): /note="This region represents a CpG dinucleotide"
  misc_feature (61)..(61): /note="Nucleotide may be methylated to form 5-methylcytosine"
tggcccactagagtctttcttacttgagcactaaaacatgcttctgacctctgatcaaaacggtgttgatgatacagagtcatgtgcctgactcaggccatgcaaatcaccccaccgccaac

SEQ ID NO: 9089 - DNA, 122 bp, Homo sapiens
  misc_feature (61)..(62): /note="This region represents a CpG dinucleotide"
  misc_feature (61)..(61): /note="Nucleotide may be methylated to form 5-methylcytosine"
tgacatagggaggcagaatgaattcatttgacatgcttagcacggaacactgacaatatacgtgttctgaacagaataatacagattatatggtaccatagaaagtcaatgactcatgattg

SEQ ID NO: 9090 - DNA, 122 bp, Homo sapiens
  misc_feature (61)..(62): /note="This region represents a CpG dinucleotide"
  misc_feature (61)..(61): /note="Nucleotide may be methylated to form 5-methylcytosine"
tttgcacatagtgtttacaatgcatttttgcattgttgtaaaactgtagtaagaacacaacgtggtatctgctctcttaacaaatttttaagtgcccagtatggtatcgttagctatatgca

SEQ ID NO: 9091 - DNA, 122 bp, Homo sapiens
  misc_feature (61)..(62): /note="This region represents a CpG dinucleotide"
  misc_feature (61)..(61): /note="Nucleotide may be methylated to form 5-methylcytosine"
tgatctggggaggggctcctgggccttgggtggtgggagagctgagaggagggcagtgagcgggactgagcacctcatgagaagcagggttgcccaatcacagacttcctacgagccccagg

SEQ ID NO: 9092 - DNA, 122 bp, Homo sapiens
  misc_feature (61)..(62): /note="This region represents a CpG dinucleotide"
  misc_feature (61)..(61): /note="Nucleotide may be methylated to form 5-methylcytosine"
tcagaactttgagacaatggctctctctctgtttcccttcccagaccacaaataacagcacgtcgaggcatctgaaaggctgtcacccgcttgactatgagctcacctacttcctggaagct

SEQ ID NO: 9093 - DNA, 122 bp, Homo sapiens
  misc_feature (61)..(62): /note="This region represents a CpG dinucleotide"
  misc_feature (61)..(61): /note="Nucleotide may be methylated to form 5-methylcytosine"
cgcatcagaatttcaggcatgtggggcattgagctgccatgaaataccagagccatcccccgtgcctgacaggtcccagacgccccagggtccctgctcctgggagggcaaagaggaggagt

SEQ ID NO: 9094 - DNA, 122 bp, Homo sapiens
  misc_feature (61)..(62): /note="This region represents a CpG dinucleotide"
  misc_feature (61)..(61): /note="Nucleotide may be methylated to form 5-methylcytosine"
atgataaattcttgccttaacaacagctattgattttaattattgagataccaatgatctcgtagggggatgccaattattacgaagtatctgtggaagacaatggtgctgtgtatgcatac

SEQ ID NO: 9095 - DNA, 122 bp, Homo sapiens
  misc_feature (61)..(62): /note="This region represents a CpG dinucleotide"
  misc_feature (61)..(61): /note="Nucleotide may be methylated to form 5-methylcytosine"
gtagcatgtttttagtcacactaaacctggttttaattcaatctgtttttaccccctccccgcacatttataaagtttttgatgtgaaggccgaacacggtggtttatgcctataatcccag

SEQ ID NO: 9096 - DNA, 122 bp, Homo sapiens
  misc_feature (61)..(62): /note="This region represents a CpG dinucleotide"
  misc_feature (61)..(61): /note="Nucleotide may be methylated to form 5-methylcytosine"
gtacaggttgggcaagggggctgggagtaggggtaggtgacatcgtggtccttaggaaaacgataaccggggtttggtgaggaaaagttaacttcaaagtgtcacccagtaacagttttttt

SEQ ID NO: 9097 - DNA, 122 bp, Homo sapiens
  misc_feature (61)..(62): /note="This region represents a CpG dinucleotide"
  misc_feature (61)..(61): /note="Nucleotide may be methylated to form 5-methylcytosine"
gctcgggtgccccccctccccacccaaggccggccctttcctgtggagtcatctcaccgccgtgcgcacccactcgtaactcgcacccgggtcctggctgcaccgcatcccctcctgcaccc

SEQ ID NO: 9098 - DNA, 122 bp, Homo sapiens
  misc_feature (61)..(62): /note="This region represents a CpG dinucleotide"
  misc_feature (61)..(61): /note="Nucleotide may be methylated to form 5-methylcytosine"
aataccacagacaacaccagcacagacttggggcggagggggaatcaaacatgcgggttacggttggggcaaagagaaccagaaaggcattttcctggccataaggaaaagatgtcaatgct

SEQ ID NO: 9099 - DNA, 122 bp, Homo sapiens
  misc_feature (61)..(62): /note="This region represents a CpG dinucleotide"
  misc_feature (61)..(61): /note="Nucleotide may be methylated to form 5-methylcytosine"
gcacaaaggacctgctgattcattttcacattctcatcactgacactgcctgctccaccacgggcgctcaatactatgacaaatcctcacttggtcaattttgtgaatgtgacatactgaaa

SEQ ID NO: 9100 - DNA, 122 bp, Homo sapiens
  misc_feature (61)..(62): /note="This region represents a CpG dinucleotide"
  misc_feature (61)..(61): /note="Nucleotide may be methylated to form 5-methylcytosine"
ataaacaaaattattaagttgatcgaacacccacacatgcacagtcacatctgtagagggcgcacattatctgtgctcctatagtatcaaggacacacttctttattaagcatttagttttc

SEQ ID NO: 9101 - DNA, 122 bp, Homo sapiens
  misc_feature (61)..(62): /note="This region represents a CpG dinucleotide"
  misc_feature (61)..(61): /note="Nucleotide may be methylated to form 5-methylcytosine"
tgctatattatgacagtaaaatatttcacagttaactacttcagcagcttgaagtggtttcgccatatgccaccctgccttacttctgtggtaagactgtatggtgcatactttattcattt

SEQ ID NO: 9102 - DNA, 122 bp, Homo sapiens
  misc_feature (61)..(62): /note="This region represents a CpG dinucleotide"
  misc_feature (61)..(61): /note="Nucleotide may be methylated to form 5-methylcytosine"
cagttagggagccctcctaccccgaagctaatgggtgtcacgctggctggggacacctcacgccatctgacatagacccggacaacagctgcaggaagtggtacaggaatcacccccgatca

SEQ ID NO: 9103 - DNA, 122 bp, Homo sapiens
  misc_feature (61)..(62): /note="This region represents a CpG dinucleotide"
  misc_feature (61)..(61): /note="Nucleotide may be methylated to form 5-methylcytosine"
ttgggtatgactactctgggtctgccacccccagaaagtttagcacaagtcacagagcagcgtcaggaagcccttgtttacatttcacacaccctttaggcccttctcccagccagcctgat

SEQ ID NO: 9104 - DNA, 122 bp, Homo sapiens
  misc_feature (61)..(62): /note="This region represents a CpG dinucleotide"
  misc_feature (61)..(61): /note="Nucleotide may be methylated to form 5-methylcytosine"
caaataacaatagcagcagcaactaccatttattgagtgcctattatgtgtcaaattttccggtaaaaggtttttgtttttgtttttaaatttgttgatttaaaagtaaagaaatttactca

SEQ ID NO: 9105 - DNA, 122 bp, Homo sapiens
  misc_feature (61)..(62): /note="This region represents a CpG dinucleotide"
  misc_feature (61)..(61): /note="Nucleotide may be methylated to form 5-methylcytosine"
caggaggttgccgtgcacacgcagtgagagcggtcgtgatgctgctgcgtgatgctatgacgcagatttggagcacaggagacaggttgagacacgcttgttacgtgtgccactcagcagtg

SEQ ID NO: 9106 - DNA, 122 bp, Homo sapiens
  misc_feature (61)..(62): /note="This region represents a CpG dinucleotide"
  misc_feature (61)..(61): /note="Nucleotide may be methylated to form 5-methylcytosine"
gatggaggcgctggctgcggagaccaacttgctcctggcccagaagcaacggctggagcgcgccctggacgccacagaggtgcccttctccatcaccactgacaacctgcagtgccgtgagc

SEQ ID NO: 9107 - DNA, 122 bp, Homo sapiens
  misc_feature (61)..(62): /note="This region represents a CpG dinucleotide"
  misc_feature (61)..(61): /note="Nucleotide may be methylated to form 5-methylcytosine"
atcatatataaattcagccatttccagtgtgaatcacccagaagggagaaaaagtacacacgtaagtggctataatacatggtagaatgtactgtgatgagtcatacaaatacatttttcta

SEQ ID NO: 9108 - DNA, 122 bp, Homo sapiens
  misc_feature (61)..(62): /note="This region represents a CpG dinucleotide"
  misc_feature (61)..(61): /note="Nucleotide may be methylated to form 5-methylcytosine"
gctgacatcaccatttcagcagctttgcacaggcatcactgggttggtgcttcatattttcgatgcttctgcagctagtattccagcaagaacttgctcaacaccttttcatgtacaacaca

SEQ ID NO: 9109 - DNA, 122 bp, Homo sapiens
  misc_feature (61)..(62): /note="This region represents a CpG dinucleotide"
  misc_feature (61)..(61): /note="Nucleotide may be methylated to form 5-methylcytosine"
tccagaggtgcagtcagactgcctgggttggctcatgcctgggtctgtcattgtgggcagcgtgaccagcctaaacctcagttttctcttttgtcacctatgtgctaaaaatacttatttct

SEQ ID NO: 9110 - DNA, 122 bp, Homo sapiens
  misc_feature (61)..(62): /note="This region represents a CpG dinucleotide"
  misc_feature (61)..(61): /note="Nucleotide may be methylated to form 5-methylcytosine"
ggcagcacgagaaataaatacacaggaaaatacaatatagcacaaaccaggagctgagggcgaatgaagatgctcagaaacacctgcactaaaagtttcctgaaaaaggtaaaaaatgtcaa

SEQ ID NO: 9111 - DNA, 122 bp, Homo sapiens
  misc_feature (61)..(62): /note="This region represents a CpG dinucleotide"
  misc_feature (61)..(61): /note="Nucleotide may be methylated to form 5-methylcytosine"
aagccttaagagagagacgtgtttctatagtggccaaggggtccagttgtcccctgagtccggaggggtgggcctaagaagggggcagctctcccccattaagcaccataagccgagtggta

SEQ ID NO: 9112 - DNA, 122 bp, Homo sapiens
  misc_feature (61)..(62): /note="This region represents a CpG dinucleotide"
  misc_feature (61)..(61): /note="Nucleotide may be methylated to form 5-methylcytosine"
tctgatacattacttaaatgtacatatcctctgatacattacttctaagaataacacctacgaaaatactcccatatgtgtgaaaaaaaggttttataagaatggtgcttgtgatacctttg

SEQ ID NO: 9113 - DNA, 122 bp, Homo sapiens
  misc_feature (61)..(62): /note="This region represents a CpG dinucleotide"
  misc_feature (61)..(61): /note="Nucleotide may be methylated to form 5-methylcytosine"
atgtttgcttttgttgtcattcgggtcctaaatctcccagtttgctcctgccctgcttttcgttcactctccctgccttactatctcattctgtagagagcccttctcaaatctctgtcaat

SEQ ID NO: 9114 - DNA, 122 bp, Homo sapiens
  misc_feature (61)..(62): /note="This region represents a CpG dinucleotide"
  misc_feature (61)..(61): /note="Nucleotide may be methylated to form 5-methylcytosine"
ccagagagtgtcttcattccctctgatttgggagagcattttggtctttattctttttatcgttgttttcttctttttgtttgctctgctctaaccgggggctttattttttctacccagag

SEQ ID NO: 9115 - DNA, 122 bp, Homo sapiens
  misc_feature (61)..(62): /note="This region represents a CpG dinucleotide"
  misc_feature (61)..(61): /note="Nucleotide may be methylated to form 5-methylcytosine"
gctatttcataacttcctgccttggcaaattttgttctctctgcctggaagttataaacgcgtctttctaaacttagttcaagagtctcccctggaaaatctcaaaaatagttaattaactt

SEQ ID NO: 9116 - DNA, 122 bp, Homo sapiens
  misc_feature (61)..(62): /note="This region represents a CpG dinucleotide"
  misc_feature (61)..(61): /note="Nucleotide may be methylated to form 5-methylcytosine"
cagcctgcggctcacgcttgcttcagtgcagctgtgtatccttctgacatgagcctggggcggttacgtcctggggtcctccactcccagggcaccctcacctacagtgatcccggcttctg

SEQ ID NO: 9117 - DNA, 122 bp, Homo sapiens
  misc_feature (61)..(62): /note="This region represents a CpG dinucleotide"
  misc_feature (61)..(61): /note="Nucleotide may be methylated to form 5-methylcytosine"
aacaggagtgggacccgcatcacaacctttcccttgagggacttttcttgtctcttcacccgggttgtaggctcctcaaaacaagaaccacctgctcaaagttccacaaatatgtttcctga

SEQ ID NO: 9118 - DNA, 122 bp, Homo sapiens
  misc_feature (61)..(62): /note="This region represents a CpG dinucleotide"
  misc_feature (61)..(61): /note="Nucleotide may be methylated to form 5-methylcytosine"
gaagcagacagaggcgcacttgttccttgcagttttgttttgatgtgctgattaaagtagcgcagagggcatgatcagcagggctccagtaagacgctcccacgggaggagcaagaacacag

SEQ ID NO: 9119 - DNA, 122 bp, Homo sapiens
  misc_feature (61)..(62): /note="This region represents a CpG dinucleotide"
  misc_feature (61)..(61): /note="Nucleotide may be methylated to form 5-methylcytosine"
tctcaggaagcaagcattttgctcttttcctaaaactgcatagctgacttgggaatgaggcggggagagctggtctctcttttctaactcttctggtaggatgtggtaaagactgagctcct

SEQ ID NO: 9120 - DNA, 122 bp, Homo sapiens
  misc_feature (61)..(62): /note="This region represents a CpG dinucleotide"
  misc_feature (61)..(61): /note="Nucleotide may be methylated to form 5-methylcytosine"
aaaatgacttttgtttttccaactgtataccagtatctatctacacatagcaactgagcacgctagtcctgtcgtctggcactcacacaaaaagagtgaatgtcaaaatctaggcaattcta

SEQ ID NO: 9121 - DNA, 122 bp, Homo sapiens
  misc_feature (61)..(62): /note="This region represents a CpG dinucleotide"
  misc_feature (61)..(61): /note="Nucleotide may be methylated to form 5-methylcytosine"
ctatcctgcccctgtctgcctagccactccttttctaggtagagtggaccttgctgttcacgtcatagatggccattccgtgtacctagactcctttttattcctttgccaacaagtaattg

SEQ ID NO: 9122 - DNA, 122 bp, Homo sapiens
  misc_feature (61)..(62): /note="This region represents a CpG dinucleotide"
  misc_feature (61)..(61): /note="Nucleotide may be methylated to form 5-methylcytosine"
aacataacaggtctgacagagctccataacacaatacaatgatttcacaatgcaaacacacgtattaacagcagaataaaccaagtagaggaaagaacatcactacttgaagactagttctc

SEQ ID NO: 9123 - DNA, 122 bp, Homo sapiens
  misc_feature (61)..(62): /note="This region represents a CpG dinucleotide"
  misc_feature (61)..(61): /note="Nucleotide may be methylated to form 5-methylcytosine"
aggacaccacagtccagctgaactcacagagcacgggcaccaggccaacatagtgagtgacgcagctgccctgactgggctgggcatccatgggaggggcagacactggtgcttagcaagga

SEQ ID NO: 9124 - DNA, 122 bp, Homo sapiens
  misc_feature (61)..(62): /note="This region represents a CpG dinucleotide"
  misc_feature (61)..(61): /note="Nucleotide may be methylated to form 5-methylcytosine"
gctatccagagcaactcatttctgcaagttccccacagttggaattttactatactgaaacggattttatgattgactgcattgactaatacagatctggagaacaatctggaaggaaatga

SEQ ID NO: 9125 - DNA, 122 bp, Homo sapiens
  misc_feature (61)..(62): /note="This region represents a CpG dinucleotide"
  misc_feature (61)..(61): /note="Nucleotide may be methylated to form 5-methylcytosine"
ctgtagcacgtctgggcagtccacgagggcaggcgggcgagtcccgtagtttgaatcccacgtcccgtaaggacctagttgccaagtggtgaaaggcaggggtgtggatggaccatgctgag

SEQ ID NO: 9126 - DNA, 122 bp, Homo sapiens
  misc_feature (61)..(62): /note="This region represents a CpG dinucleotide"
  misc_feature (61)..(61): /note="Nucleotide may be methylated to form 5-methylcytosine"
gaagaaaacaagaattccagtacagctgtagcaagatgcgcaggcatttggcagacatgacgttggcagcagcatccaagtgagttcctgtgaatcacccgctttgagaattcaagcaacta

SEQ ID NO: 9127 - DNA, 122 bp, Homo sapiens
  misc_feature (61)..(62): /note="This region represents a CpG dinucleotide"
  misc_feature (61)..(61): /note="Nucleotide may be methylated to form 5-methylcytosine"
ggcatgcagttctaactcagcaaaggacacagcttgccattcccagagccccacgtagagcgtcagcatcctggtaaccgtgtggctttctggtgagcggggtctgacctcaccagtgacaa

SEQ ID NO: 9128 - DNA, 122 bp, Homo sapiens
  misc_feature (61)..(62): /note="This region represents a CpG dinucleotide"
  misc_feature (61)..(61): /note="Nucleotide may be methylated to form 5-methylcytosine"
gttcactttttatcatttttaacaaagagagtaaaagagaaagctttaattgtaggttttcgtggaacttggtaaaaattgaggagcctttgtgtcatgacttgaagaaaatttcaatattt

SEQ ID NO: 9129 - DNA, 122 bp, Homo sapiens
  misc_feature (61)..(62): /note="This region represents a CpG dinucleotide"
  misc_feature (61)..(61): /note="Nucleotide may be methylated to form 5-methylcytosine"
gacgaccccctccccatagttgttttctgcccacgttggcagcagcccccccccgggggtcgatttggtggcacctcactttcctgctaggacttcttccgaagaggggaaaatgtgcaact

SEQ ID NO: 9130 - DNA, 122 bp, Homo sapiens
  misc_feature (61)..(62): /note="This region represents a CpG dinucleotide"
  misc_feature (61)..(61): /note="Nucleotide may be methylated to form 5-methylcytosine"
ctgcaacacagagtggtaaagagctagtctcaatcatgcacatgacaacaccagtaggaacgacaaaaattaaagacagaaggaaactagcatcctggatgacaacaaggaacagagttgct

SEQ ID NO: 9131 - DNA, 122 bp, Homo sapiens
  misc_feature (61)..(62): /note="This region represents a CpG dinucleotide"
  misc_feature (61)..(61): /note="Nucleotide may be methylated to form 5-methylcytosine"
gagatggatgcttactgtaattctgtgggctgagcattttccttgttagtttccacacatcgtttgatgtggttcttatagcatcctatgtgttagctgtttctacttaaagatgaaagacc

SEQ ID NO: 9132 - DNA, 122 bp, Homo sapiens
  misc_feature (61)..(62): /note="This region represents a CpG dinucleotide"
  misc_feature (61)..(61): /note="Nucleotide may be methylated to form 5-methylcytosine"
tgtcatcactccagatgtcttaggcctcctcttctgaaactactgtcaaaatctctggcacgtttttgaatatcctcaatgaagaaaaatcttaatcttttttgaggaagaattggatcttt

SEQ ID NO: 9133 - DNA, 122 bp, Homo sapiens
  misc_feature (61)..(62): /note="This region represents a CpG dinucleotide"
  misc_feature (61)..(61): /note="Nucleotide may be methylated to form 5-methylcytosine"
cctgcatatctaaattaacagcagtgcagaggaagcaatcagatgtgcatttgtctcaggcgaggctcagagaaatgactctgagttctgtctgtctttggttctcaaggaatttccttgtt

SEQ ID NO: 9134 - DNA, 122 bp, Homo sapiens
  misc_feature (61)..(62): /note="This region represents a CpG dinucleotide"
  misc_feature (61)..(61): /note="Nucleotide may be methylated to form 5-methylcytosine"
tgtggagatggggaggctgctttccaagtaaacaagctcagtgatgtgcattttaagggccggctgatgggcagagtgtcaactgagggccttcagtcattggaggtctcctgctgccatgg

SEQ ID NO: 9135 - DNA, 122 bp, Homo sapiens
  misc_feature (61)..(62): /note="This region represents a CpG dinucleotide"
  misc_feature (61)..(61): /note="Nucleotide may be methylated to form 5-methylcytosine"
tgattttgtgatgagatttggtttcattagacctcacctatcccatttctgcttttatcacgttaattgtataggggctctgatagtcctaaatattatttttaagcattttctggcttatc

SEQ ID NO: 9136 - DNA, 122 bp, Homo sapiens
  misc_feature (61)..(62): /note="This region represents a CpG dinucleotide"
  misc_feature (61)..(61): /note="Nucleotide may be methylated to form 5-methylcytosine"
aaattggagaggcttgcccaggttcatataccctgtaaatgcagaattgggatgcacacccgcacctgactccagagtcagggctctcaccactactccctgcactgggcacagagaataga

SEQ ID NO: 9137 - DNA, 122 bp, Homo sapiens
  misc_feature (61)..(62): /note="This region represents a CpG dinucleotide"
  misc_feature (61)..(61): /note="Nucleotide may be methylated to form 5-methylcytosine"
agagtcatgaaaaaactagggggaggaaagaggtccaaaataatcaaagtaggttattatcgggcctgacatgagcttcttggtgccaggtaataaagaaggaaagaattatagtgattaag

SEQ ID NO: 9138 - DNA, 122 bp, Homo sapiens
  misc_feature (61)..(62): /note="This region represents a CpG dinucleotide"
  misc_feature (61)..(61): /note="Nucleotide may be methylated to form 5-methylcytosine"
gctgaatggaagcccagagatccatttagatattttactgatgtctgaaacttactggagcgagaactaaattcactttgtctctcagactaatttttttcttgtttcccaaacagtgttaa

SEQ ID NO: 9139 - DNA, 122 bp, Homo sapiens
  misc_feature (61)..(62): /note="This region represents a CpG dinucleotide"
  misc_feature (61)..(61): /note="Nucleotide may be methylated to form 5-methylcytosine"
cagctttcgaggtggccttcctggtgggccagtacctgctgtacggcttcgaggtgcgaccgttctttccctgcagccgccagccctgcccgcacgtggtggactgcttcgtgtcgcgccct

SEQ ID NO: 9140 - DNA, 122 bp, Homo sapiens
  misc_feature (61)..(62): /note="This region represents a CpG dinucleotide"
  misc_feature (61)..(61): /note="Nucleotide may be methylated to form 5-methylcytosine"
tctgctcttgcagcatggggtcactggggagaatgtttgcctgagtcagtggcgcctctgcgttgcgccataggatttctggcccaactccccaactgtggagaggaaccacacttggtatt

SEQ ID NO: 9141 - DNA, 122 bp, Homo sapiens
  misc_feature (61)..(62): /note="This region represents a CpG dinucleotide"
  misc_feature (61)..(61): /note="Nucleotide may be methylated to form 5-methylcytosine"
ttattccaagttttctttttagagcaatcttccctgtctaagcaggacagatgggccttccgtccacactagtggctgtggaatgaatcataacagaggttttatgtgtctttcagctcctg

SEQ ID NO: 9142 - DNA, 122 bp, Homo sapiens
  misc_feature (61)..(62): /note="This region represents a CpG dinucleotide"
  misc_feature (61)..(61): /note="Nucleotide may be methylated to form 5-methylcytosine"
atctttattgtttttcagaggaagctgcagatataatctaataattttgttattattcaacgaatatattttataagtgcctgctgtgtttctgatcttatgcaaatgcaatatatttacca

SEQ ID NO: 9143 - DNA, 122 bp, Homo sapiens
  misc_feature (61)..(62): /note="This region represents a CpG dinucleotide"
  misc_feature (61)..(61): /note="Nucleotide may be methylated to form 5-methylcytosine"
ctttctcttaagtcacttccattttattagaacatcttttatgcctcaataatatgacagcgtcgagtagtacatgtcaacattggggtggggaaaatctctcattgatctccataagcggc

SEQ ID NO: 9144 - DNA, 122 bp, Homo sapiens
  misc_feature (61)..(62): /note="This region represents a CpG dinucleotide"
  misc_feature (61)..(61): /note="Nucleotide may be methylated to form 5-methylcytosine"
ggctgattcccattgcacaataatacagcgtcataaatcaagccaaggacagcagcctgtcgtctttacttaaaatgatgaaagtttgctcattatgggtattcttgcattcatcttaattt

SEQ ID NO: 9145 - DNA, 122 bp, Homo sapiens
  misc_feature (61)..(62): /note="This region represents a CpG dinucleotide"
  misc_feature (61)..(61): /note="Nucleotide may be methylated to form 5-methylcytosine"
actaagacaagagatctcttgggatgtcttcagatcatgagggctaaacatgactcagaccggaaggttagtgtttaccaagacccttcttacagctggggaaaatgaaggcaaattaagtt

SEQ ID NO: 9146 - DNA, 122 bp, Homo sapiens
  misc_feature (61)..(62): /note="This region represents a CpG dinucleotide"
  misc_feature (61)..(61): /note="Nucleotide may be methylated to form 5-methylcytosine"
gtgtggaccggcggctccatggtggcctccctgcactccttccagcgccgctggataactcgggccatgtaccaggagtgtggctccaggctgctgtacgatgtgttcaactgagtcaggct

SEQ ID NO: 9147 - DNA, 122 bp, Homo sapiens
  misc_feature (61)..(62): /note="This region represents a CpG dinucleotide"
  misc_feature (61)..(61): /note="Nucleotide may be methylated to form 5-methylcytosine"
tgtactggcacccacccccacttccttgttctccagagcaggaaacaagcttggagagtgcgataactagcccaagcttcacaatgggtgagtggcaggactgaggtttgattcgggtctct

SEQ ID NO: 9148 - DNA, 122 bp, Homo sapiens
  misc_feature (61)..(62): /note="This region represents a CpG dinucleotide"
  misc_feature (61)..(61): /note="Nucleotide may be methylated to form 5-methylcytosine"
ttatgtaacaaaaacttacattaaaaatgacatatctccctgaggcaacttatgaaataacgaatgaaaggtaggctcatgcttccgaagaaagcaatgtagttcagaaaaaactacagagc

SEQ ID NO: 9149 - DNA, 122 bp, Homo sapiens
  misc_feature (61)..(62): /note="This region represents a CpG dinucleotide"
  misc_feature (61)..(61): /note="Nucleotide may be methylated to form 5-methylcytosine"
catgcgcagggtcccaggactgtggggttctgggttcgctccaccagagcagctggacctcgtggggtgctgcccaaaaaggcagggaggcttgaaaggggagatggaggcaccggtggaag

SEQ ID NO: 9150 - DNA, 122 bp, Homo sapiens
  misc_feature (61)..(62): /note="This region represents a CpG dinucleotide"
  misc_feature (61)..(61): /note="Nucleotide may be methylated to form 5-methylcytosine"
ggctgtggtttttgtcaacccgcatggttgggcagaagcctggtcacagacgctgtgccacggcacctagagaggtcataggccagttaagtgagaacttatctccccactggcaaagaata

SEQ ID NO: 9151 - DNA, 122 bp, Homo sapiens
  misc_feature (61)..(62): /note="This region represents a CpG dinucleotide"
  misc_feature (61)..(61): /note="Nucleotide may be methylated to form 5-methylcytosine"
gactcccaccccacccgcaatacagggttgaggcctctgttgcaggtttttcttgattttcgttactggatagcctcagtccttcttaggtgagatcatgctgttcttcttccttcatatat

SEQ ID NO: 9152 - DNA, 122 bp, Homo sapiens
  misc_feature (61)..(62): /note="This region represents a CpG dinucleotide"
  misc_feature (61)..(61): /note="Nucleotide may be methylated to form 5-methylcytosine"
ggagaagaaatctaacctccatccacaagttatcatcatcagtttgtggtagggcgagaacgggaagtcatgtctgagagctatgcttatccagggctgctttgactctgttctcctgcctt

SEQ ID NO: 9153 - DNA, 122 bp, Homo sapiens
  misc_feature (61)..(62): /note="This region represents a CpG dinucleotide"
  misc_feature (61)..(61): /note="Nucleotide may be methylated to form 5-methylcytosine"
gcagggcgggtctgagcgaagccattggggagcggctgggggcggggccttttaaccagccgcaggaggagccgggtggggctggggcggggcggagctgagagaaaccgctgaggatgggc

SEQ ID NO: 9154 - DNA, 122 bp, Homo sapiens
  misc_feature (61)..(62): /note="This region represents a CpG dinucleotide"
  misc_feature (61)..(61): /note="Nucleotide may be methylated to form 5-methylcytosine"
aatctcctaccttgctgtgtcacctcctgctcttacactcagccttttgcaaagttctgtcgtcagtgaaattcttcatttccaatctcttctctgaaatacctgttgcttcttgtcaatcc

SEQ ID NO: 9155 - DNA, 122 bp, Homo sapiens
  misc_feature (61)..(62): /note="This region represents a CpG dinucleotide"
  misc_feature (61)..(61): /note="Nucleotide may be methylated to form 5-methylcytosine"
aggatgtgggttatacggggaagtggggaagtgcagcctggtaaatcttagaccattgtgcggattgtaagtgccctttgacatgttgtctattcatgggaaagatgactctatagtcagta

SEQ ID NO: 9156 - DNA, 122 bp, Homo sapiens
  misc_feature (61)..(62): /note="This region represents a CpG dinucleotide"
  misc_feature (61)..(61): /note="Nucleotide may be methylated to form 5-methylcytosine"
atccaaatgccattattgcacaattgtactattacgtgatcctgctgagcaacctttctacgccatagtcaccacccagtggactaactgggaataggagtttacaaccttattaataaaga

SEQ ID NO: 9157 - DNA, 122 bp, Homo sapiens
  misc_feature (61)..(62): /note="This region represents a CpG dinucleotide"
  misc_feature (61)..(61): /note="Nucleotide may be methylated to form 5-methylcytosine"
gtctgacttcatagtttctgcccttcaccattacacttcataaaaaatgtattgtgccagcgtcatggcctgtgcagtcaaatgacatttagcgacgttttgcttagataattttggttgtt

SEQ ID NO: 9158 - DNA, 122 bp, Homo sapiens
  misc_feature (61)..(62): /note="This region represents a CpG dinucleotide"
  misc_feature (61)..(61): /note="Nucleotide may be methylated to form 5-methylcytosine"
caaagctcagtgacctcaaacaacaaccatatgttgttgctcaaaggactacacatcagtcgggtggtttctctggccttggctgtgctgactcatgtatctctggtcaactggggctgggc

SEQ ID NO: 9159 - DNA, 122 bp, Homo sapiens
  misc_feature (61)..(62): /note="This region represents a CpG dinucleotide"
  misc_feature (61)..(61): /note="Nucleotide may be methylated to form 5-methylcytosine"
gtgtatttgttgtagttttgttttttaaaactatgcataaacaacatgagacattcatttcgtttggctagtgaatctctgctgttggtttaaaccaagtataatcaccagcacacccaatt

SEQ ID NO: 9160 - DNA, 122 bp, Homo sapiens
  misc_feature (61)..(62): /note="This region represents a CpG dinucleotide"
  misc_feature (61)..(61): /note="Nucleotide may be methylated to form 5-methylcytosine"
caggtgtttgctcagttgctgacccaaaagtgcttcatttttcgtgcccgccccgcgccccgggcaggccagtcatgtgttaagttgcgcttctttgctgtgatgtgggtgggggaggaaga

SEQ ID NO: 9161 - DNA, 122 bp, Homo sapiens
  misc_feature (61)..(62): /note="This region represents a CpG dinucleotide"
  misc_feature (61)..(61): /note="Nucleotide may be methylated to form 5-methylcytosine"
aaatccatactagatccatagataagtgcccctgggagatgaagtcacacaagccagtaacgtccaacagggacacaagttggcagacacggcaaatagcaggattcaaccctaagactgca

SEQ ID NO: 9162 - DNA, 122 bp, Homo sapiens
  misc_feature (61)..(62): /note="This region represents a CpG dinucleotide"
  misc_feature (61)..(61): /note="Nucleotide may be methylated to form 5-methylcytosine"
gggtctccgttccagaccttcctgtcacttcttatctgttcttaacatagccccagacagcgcctccctcccatctcctgagcagccatcggcctcttcctgaaccacacaggtgggagggc

SEQ ID NO: 9163 - DNA, 122 bp, Homo sapiens
  misc_feature (61)..(62): /note="This region represents a CpG dinucleotide"
  misc_feature (61)..(61): /note="Nucleotide may be methylated to form 5-methylcytosine"
agcgtgtccctcaaagtggaccttcctaagcatcggcgctttgctttgcgctgggtggtgcggctgagtcactaattagcagtgagagcctgggctgtatctcctaccaaataaccagcgga

SEQ ID NO: 9164 - DNA, 122 bp, Homo sapiens
  misc_feature (61)..(62): /note="This region represents a CpG dinucleotide"
  misc_feature (61)..(61): /note="Nucleotide may be methylated to form 5-methylcytosine"
gaggccttgcagggctttatgacaagattttatgggtggctgcccagcatcattgtgactcgtgagacagagagaaaccagttgtaaccatgtagacagtggaagtgatagggagaaaagag

SEQ ID NO: 9165 - DNA, 122 bp, Homo sapiens
  misc_feature (61)..(62): /note="This region represents a CpG dinucleotide"
  misc_feature (61)..(61): /note="Nucleotide may be methylated to form 5-methylcytosine"
gtcaaatagattagggttcagctctcacagctgccacttactggttatgaatttgagtcacgtttcttaatcctactgaagtaggctgataatgactccaacaatttgtccacatcctaatc

SEQ ID NO: 9166 - DNA, 122 bp, Homo sapiens
  misc_feature (61)..(62): /note="This region represents a CpG dinucleotide"
  misc_feature (61)..(61): /note="Nucleotide may be methylated to form 5-methylcytosine"
ttataaagtgctttaaaacatttttaaagtccacttcagacaaatatgtgaggtgggtagcgcagtatattacttggctttgcagcaggaacaactcgcaaatctcagtggcttacaatgac

SEQ ID NO: 9167 - DNA, 122 bp, Homo sapiens
  misc_feature (61)..(62): /note="This region represents a CpG dinucleotide"
  misc_feature (61)..(61): /note="Nucleotide may be methylated to form 5-methylcytosine"
taaactatttaacagaagtccagagtagcgctcctcttcaagaacacagataaactctttcgttagttactcttgttaataaagaggcctgataagtatcaaaagtaaatttcctcaatctg

SEQ ID NO: 9168 - DNA, 122 bp, Homo sapiens
  misc_feature (61)..(62): /note="This region represents a CpG dinucleotide"
  misc_feature (61)..(61): /note="Nucleotide may be methylated to form 5-methylcytosine"
actggcaggtcttttaatttgagcttcagtttactcatatttcaaaaggatgcaatgatacgggagtgttgcacaacgcaggtttacatagtgtgctttgtgaactctaaagcatttcacta

SEQ ID NO: 9169 - DNA, 122 bp, Homo sapiens
  misc_feature (61)..(62): /note="This region represents a CpG dinucleotide"
  misc_feature (61)..(61): /note="Nucleotide may be methylated to form 5-methylcytosine"
aaggtgaagcaatttacaaaaaaaaaaaaaattctacacttttcagaagcatatccattacggaaagggaattgtaactgcacatgaaattagggaacttaaaaatccacccaaaataaata

SEQ ID NO: 9170 - DNA, 122 bp, Homo sapiens
  misc_feature (61)..(62): /note="This region represents a CpG dinucleotide"
  misc_feature (61)..(61): /note="Nucleotide may be methylated to form 5-methylcytosine"
gaacaaagccgcgcccactcaggccacgcccgcaccttgtcgctcccctacccatccttacgtttcagatactgactttgcttcttttaccgagagaacagaatcagaagggaacttccaga

SEQ ID NO: 9171 - DNA, 122 bp, Homo sapiens
  misc_feature (61)..(62): /note="This region represents a CpG dinucleotide"
  misc_feature (61)..(61): /note="Nucleotide may be methylated to form 5-methylcytosine"
tggacctgatgtcacatgctgattcagaccctagctctcgggccctacctacttcctgaacgggaacatggcttagagaagcacatggcattgggcctcgcccatgcaaccagccacacaca

SEQ ID NO: 9172 - DNA, 122 bp, Homo sapiens
  misc_feature (61)..(62): /note="This region represents a CpG dinucleotide"
  misc_feature (61)..(61): /note="Nucleotide may be methylated to form 5-methylcytosine"
taaagttaccaccagttaagtgaacagtggccttgtgtcacagaatgagtcctcaaacctcggaaacataaaatcctgggagaatacattaagggcttaagatgggacacagaacatgacca

SEQ ID NO: 9173 - DNA, 122 bp, Homo sapiens
  misc_feature (61)..(62): /note="This region represents a CpG dinucleotide"
  misc_feature (61)..(61): /note="Nucleotide may be methylated to form 5-methylcytosine"
aatcaggtcctgaggtaggtagcccaggagagggaccgccctggaaggcaagcagacacacgctaggattggcatccaaacagatgaggagattgtcactaagaaccatcttattccctgga

SEQ ID NO: 9174 - DNA, 122 bp, Homo sapiens
  misc_feature (61)..(62): /note="This region represents a CpG dinucleotide"
  misc_feature (61)..(61): /note="Nucleotide may be methylated to form 5-methylcytosine"
agagatgggaggttcagtggttagtgctagcaggtcacttcctctgagtcaagtgctgtgcgtggctccttttaaggagtgtctcattcagcccttgagtcagggagccataccctcctgct

SEQ ID NO: 9175 - DNA, 122 bp, Homo sapiens
  misc_feature (61)..(62): /note="This region represents a CpG dinucleotide"
  misc_feature (61)..(61): /note="Nucleotide may be methylated to form 5-methylcytosine"
ttaacagctacttccccttactcaactcaacactcatgtacacatatcagagaagcattacgatctgcaagctgcaggactggctcctatttaatgtgtaaaaagtggcttttctctacttt

SEQ ID NO: 9176 - DNA, 122 bp, Homo sapiens
  misc_feature (61)..(62): /note="This region represents a CpG dinucleotide"
  misc_feature (61)..(61): /note="Nucleotide may be methylated to form 5-methylcytosine"
ggttggcctctgatactgtgacatgtcaccattgccatcaagggcccgtgggtgctggggcgtgaccacttcccaccctccacaatggtgcccctccccataggccgcacagcgcatggagt

SEQ ID NO: 9177 - DNA, 122 bp, Homo sapiens
  misc_feature (61)..(62): /note="This region represents a CpG dinucleotide"
  misc_feature (61)..(61): /note="Nucleotide may be methylated to form 5-methylcytosine"
atagacccataaagttgactcacaaacccaagataatgcagatgatagggaataggagcccggtttaaatctaggctgatttgaccatatagtctgtgctccatcatactgaattcacttca

SEQ ID NO: 9178 - DNA, 122 bp, Homo sapiens
  misc_feature (61)..(62): /note="This region represents a CpG dinucleotide"
  misc_feature (61)..(61): /note="Nucleotide may be methylated to form 5-methylcytosine"
agcagaactgggatcacctgcagttgcccagccagcaagcaagagacacattcgaactctcgcttcctactgtttgtttgtttgtatttgttgttactgtttgggtacaagtcacagcctcc

SEQ ID NO: 9179 - DNA, 122 bp, Homo sapiens
  misc_feature (61)..(62): /note="This region represents a CpG dinucleotide"
  misc_feature (61)..(61): /note="Nucleotide may be methylated to form 5-methylcytosine"
ctttttcagtgggtatttttctgtctcccaacctctactgtaaactttctggtccgagaacgagccgaacacagcgcgacgcagggactaggacggcccggtgaccgcgcggattcaggatt

SEQ ID NO: 9180 - DNA, 122 bp, Homo sapiens
  misc_feature (61)..(62): /note="This region represents a CpG dinucleotide"
  misc_feature (61)..(61): /note="Nucleotide may be methylated to form 5-methylcytosine"
tcattgttgcaggggctgtcctgtgcacagaaggttgtttagcagcatctctggactcaccgcactagatgctggtagcactccacccccagttgtgacaaacataaatgtctccaaacatt

SEQ ID NO: 9181 - DNA, 122 bp, Homo sapiens
  misc_feature (61)..(62): /note="This region represents a CpG dinucleotide"
  misc_feature (61)..(61): /note="Nucleotide may be methylated to form 5-methylcytosine"
cgatcttttgcattcactgacattcttggatttggcatttacaacctcagggctctattccgaggaggccttttgcatttgatgtaaatattatggtgatgagaggtgacactgagaatacc

SEQ ID NO: 9182 - DNA, 122 bp, Homo sapiens
  misc_feature (61)..(62): /note="This region represents a CpG dinucleotide"
  misc_feature (61)..(61): /note="Nucleotide may be methylated to form 5-methylcytosine"
ctgtgacaaaccaggccttcagcacttatgtgacttgcgacatgttggtaaatttccaaccgtctcccatgagtgcagacaggatgggggtgcagtatataataataataatcctacactgt

SEQ ID NO: 9183 - DNA, 122 bp, Homo sapiens
  misc_feature (61)..(62): /note="This region represents a CpG dinucleotide"
  misc_feature (61)..(61): /note="Nucleotide may be methylated to form 5-methylcytosine"
tgagccggcttccccttcccacgcagctctgggatgcagcagccgctcgcatggaagtgccgcccagaggcatgcaggctgctgggcaccaccccctcatccagggaacgagtgtgtctcaa

SEQ ID NO: 9184 - DNA, 122 bp, Homo sapiens
  misc_feature (61)..(62): /note="This region represents a CpG dinucleotide"
  misc_feature (61)..(61): /note="Nucleotide may be methylated to form 5-methylcytosine"
gatgtacagttctgattataaatcacttccctaaaagtactctgtgttctcaaaaggctccgtccgaaagtgaacacgtgcttcagtttgttatgactgagctactgattgtgcaacacact

SEQ ID NO: 9185 - DNA, 122 bp, Homo sapiens
  misc_feature (61)..(62): /note="This region represents a CpG dinucleotide"
  misc_feature (61)..(61): /note="Nucleotide may be methylated to form 5-methylcytosine"
gctctgcctcctccagggtgctgtggctcctcctcaagggagggcggctgggggaggagacgcctcagtacagaaaagctcgcagctgttgttgggtctgatcccacctctcctgctgtttc

SEQ ID NO: 9186 - DNA, 122 bp, Homo sapiens
  misc_feature (61)..(62): /note="This region represents a CpG dinucleotide"
  misc_feature (61)..(61): /note="Nucleotide may be methylated to form 5-methylcytosine"
atgcctcttccagagattgctgctcagaggatacttgttttacaaataaatgtttcctctcgctggttgtggaatttatatagaaactttgattcttccagggataaagttgggtgagcgga

SEQ ID NO: 9187 - DNA, 122 bp, Homo sapiens
  misc_feature (61)..(62): /note="This region represents a CpG dinucleotide"
  misc_feature (61)..(61): /note="Nucleotide may be methylated to form 5-methylcytosine"
tgggtactcacaggcctttgaagcttgcaagacctctgttcttatgtaacagccaacagccgccatctgttacacactcaccacatgcctggcactggggaggcctcctgtgtggattacgt

SEQ ID NO: 9188 - DNA, 122 bp, Homo sapiens
  misc_feature (61)..(62): /note="This region represents a CpG dinucleotide"
  misc_feature (61)..(61): /note="Nucleotide may be methylated to form 5-methylcytosine"
tagcttttgttgaaatgtaacagccaaaaacctaaggcctgttcctctctgcttttacttcgtttctttgttctattttcttcatgtgttcaactggcagctcctttgaaggctgacgtagg

SEQ ID NO: 9189 - DNA, 122 bp, Homo sapiens
  misc_feature (61)..(62): /note="This region represents a CpG dinucleotide"
  misc_feature (61)..(61): /note="Nucleotide may be methylated to form 5-methylcytosine"
gtcagctattgttcaaagcattgttagagctcattgttgatgtcttctgagcctgcagcacgttcttttgaaaatgatggtaaatcttcattgacagatttgtcttgtggaaagagccaaaa

SEQ ID NO: 9190 - DNA, 122 bp, Homo sapiens
  misc_feature (61)..(62): /note="This region represents a CpG dinucleotide"
  misc_feature (61)..(61): /note="Nucleotide may be methylated to form 5-methylcytosine"
tccgaatccccccagtgctgcacccgaacgcctccctcccacgcagcctcctgccgtctccgcaggttttaaatcagacgccgctcaggctgtgcccaggctgctgagccaaaagcgggatc

SEQ ID NO: 9191 - DNA, 122 bp, Homo sapiens
  misc_feature (61)..(62): /note="This region represents a CpG dinucleotide"
  misc_feature (61)..(61): /note="Nucleotide may be methylated to form 5-methylcytosine"
tatgcagctacgtgttgtaattgttgatttgattttctatctcctcctgtgagttcttcgcgagtataatccatgcctccatctttgcgtctccactttatcaaagaggctggctcatagtt

SEQ ID NO: 9192 - DNA, 122 bp, Homo sapiens
  misc_feature (61)..(62): /note="This region represents a CpG dinucleotide"
  misc_feature (61)..(61): /note="Nucleotide may be methylated to form 5-methylcytosine"
tgtggaatggatgtgtggcagctggggacattgggccgggctcccgggcttggcctggagcgactacccggcaccatcagagggagtgagaggaagtgggcgctggtttaatgtggtcagct

SEQ ID NO: 9193 - DNA, 122 bp, Homo sapiens
  misc_feature (61)..(62): /note="This region represents a CpG dinucleotide"
  misc_feature (61)..(61): /note="Nucleotide may be methylated to form 5-methylcytosine"
gagagttcttattgcttcacatccttgtcaacgtttgctattgttggtcttaagctcaaccgttgtggttggtgtatagtttgggctcattgtgattttaattcgcatttccctgaaactaa

SEQ ID NO: 9194 - DNA, 122 bp, Homo sapiens
  misc_feature (61)..(62): /note="This region represents a CpG dinucleotide"
  misc_feature (61)..(61): /note="Nucleotide may be methylated to form 5-methylcytosine"
ccccacccctcccccttgatactcctgggctcagttacacactcctgctttcagtagaagcggtatttccactgaaggcagcttcatccagccagtcatggagggaggagtgcttttctgtg

SEQ ID NO: 9195 - DNA, 122 bp, Homo sapiens
  misc_feature (61)..(62): /note="This region represents a CpG dinucleotide"
  misc_feature (61)..(61): /note="Nucleotide may be methylated to form 5-methylcytosine"
ggtgggtgggcagcacttcgttatgttcgtagattccggagtctgtctcgatttctccagcggagtcacttcctagctgtgtagccttaggcaaggccctgaaccacacagttcccttctgt

SEQ ID NO: 9196 - DNA, 122 bp, Homo sapiens
  misc_feature (61)..(62): /note="This region represents a CpG dinucleotide"
  misc_feature (61)..(61): /note="Nucleotide may be methylated to form 5-methylcytosine"
gtacaaagagctactccataaattacatcttgccaaggtgggagattgcatgggagactccggtgacaaacccttaaggcgcaataatagctatacttcctataccatggcaatatgtggca

SEQ ID NO: 9197 - DNA, 122 bp, Homo sapiens
  misc_feature (61)..(62): /note="This region represents a CpG dinucleotide"
  misc_feature (61)..(61): /note="Nucleotide may be methylated to form 5-methylcytosine"
gccctttcaaacttaatctaacaactattctgagtgctcaggatatgttaggcgctttgacggcactggggctacagtgagaagacacagtcccgatttcttgaagctcacagtctgttgtg

SEQ ID NO: 9198 - DNA, 122 bp, Homo sapiens
  misc_feature (61)..(62): /note="This region represents a CpG dinucleotide"
  misc_feature (61)..(61): /note="Nucleotide may be methylated to form 5-methylcytosine"
ctacagacctgcatatctactacttgctggacatgtgcataaataaaactgccctctcagcgcctcaaacaagcggcatgtactttccttatctaagttaattgcctcaccctatcatgtgg

SEQ ID NO: 9199 - DNA, 122 bp, Homo sapiens
  misc_feature (61)..(62): /note="This region represents a CpG dinucleotide"
  misc_feature (61)..(61): /note="Nucleotide may be methylated to form 5-methylcytosine"
tgcctccctttcctcacccttcatatagatgatgtataatttatcattcaaaccaggcgacgttggagactcgaagagggagctgtttctccaggacaacaggccaaaccagcactgtctta

SEQ ID NO: 9200 - DNA, 122 bp, Homo sapiens
  misc_feature (61)..(62): /note="This region represents a CpG dinucleotide"
  misc_feature (61)..(61): /note="Nucleotide may be methylated to form 5-methylcytosine"
ggtagctcatgattcacaaacccagcagaagcgcttggcactaacgtgtttttcctaccacgctttagttgcataagaaagtaacactgatggaaaagggattgaattaaatctacctccct

SEQ ID NO: 9201 - DNA, 122 bp, Homo sapiens
  misc_feature (61)..(62): /note="This region represents a CpG dinucleotide"
  misc_feature (61)..(61): /note="Nucleotide may be methylated to form 5-methylcytosine"
acgctcgcaagcaattatttatgcatgcggtccacgcactcagtttgagaaacactgactcgacttaaaagtctttataatgctcagatttctgaaatgctattgacctgaaaacatctcat

SEQ ID NO: 9202 - DNA, 122 bp, Homo sapiens
  misc_feature (61)..(62): /note="This region represents a CpG dinucleotide"
  misc_feature (61)..(61): /note="Nucleotide may be methylated to form 5-methylcytosine"
ccaactcacaaaaccatgccactgtgggagcagaagttgggagtccagagacctgtctttcgacttccctttgtaggggtgactccagcagcacctgagtcacctctacaaaccctggggct

SEQ ID NO: 9203 - DNA, 122 bp, Homo sapiens
  misc_feature (61)..(62): /note="This region represents a CpG dinucleotide"
  misc_feature (61)..(61): /note="Nucleotide may be methylated to form 5-methylcytosine"
ttgaggtggggcccagcactctgagttttaataagtccagtgagtcagcctgcaggatgacgtatagtttcctgtgtgagaaactgtaggaactgttggtccttagtttgtaactgccatct

SEQ ID NO: 9204 - DNA, 122 bp, Homo sapiens
  misc_feature (61)..(62): /note="This region represents a CpG dinucleotide"
  misc_feature (61)..(61): /note="Nucleotide may be methylated to form 5-methylcytosine"
catccactgacatttcttcccccggccccaccaccaccttgtctctattcctcttcgctgcggttcatttctcccagggccccatgcacttgtcctcggaccctcgggcggaaactgggcca

SEQ ID NO: 9205 - DNA, 122 bp, Homo sapiens
  misc_feature (61)..(62): /note="This region represents a CpG dinucleotide"
  misc_feature (61)..(61): /note="Nucleotide may be methylated to form 5-methylcytosine"
agggagtaagtctaagacctggcttcgagtacattcggtgaaagaaagctcattgggagccgcaattttggctagctagtgaaaaaaatcaccgaatgcccctgcaggggttgccaggactt

SEQ ID NO: 9206 - DNA, 122 bp, Homo sapiens
  misc_feature (61)..(62): /note="This region represents a CpG dinucleotide"
  misc_feature (61)..(61): /note="Nucleotide may be methylated to form 5-methylcytosine"
gagtcagtggaaatgggaaaggccttcctgttggtgggagaacaatgaatgaaaatcaaacgaacagggcaattacttatgagggaaataaacagggaaatatgatcatcaatcagaagatt

SEQ ID NO: 9207 - DNA, 122 bp, Homo sapiens
  misc_feature (61)..(62): /note="This region represents a CpG dinucleotide"
  misc_feature (61)..(61): /note="Nucleotide may be methylated to form 5-methylcytosine"
gggaggatcaagggtctggggtagacctgctttagaagcctcaggtgcgagccctgaattcgtgtgtcctgagctgaggacaagttttttggttcactagagagcattctctggtggtgact

SEQ ID NO: 9208 - DNA, 122 bp, Homo sapiens
  misc_feature (61)..(62): /note="This region represents a CpG dinucleotide"
  misc_feature (61)..(61): /note="Nucleotide may be methylated to form 5-methylcytosine"
ccagctgaaaccgattaaccattacttaagttgttacagcgaggcagagccaaaatctcccgggcgtgtgcaagagggaaagctttctaattgtgaacaccgcgcgccccgcagaaggctgc

SEQ ID NO: 9209 - DNA, 122 bp, Homo sapiens
  misc_feature (61)..(62): /note="This region represents a CpG dinucleotide"
  misc_feature (61)..(61): /note="Nucleotide may be methylated to form 5-methylcytosine"
agccctgctctttgtcgtggctgagtcatgttccgtgatgtggaggcaccgggttttgtgcgtctccttattcagtggacgttggtgctgtttccagtgtctgcctgttgtgagttgagctg

SEQ ID NO: 9210 - DNA, 122 bp, Homo sapiens
  misc_feature (61)..(62): /note="This region represents a CpG dinucleotide"
  misc_feature (61)..(61): /note="Nucleotide may be methylated to form 5-methylcytosine"
gaaaggccattctgtggtcagataaagctgttgagagagctttgggagggctgtattgagcgccctttgttctctggggtgtaagtagctaataaatgaggcaatgcaagcaatgaagggac

SEQ ID NO: 9211 - DNA, 122 bp, Homo sapiens
  misc_feature (61)..(62): /note="This region represents a CpG dinucleotide"
  misc_feature (61)..(61): /note="Nucleotide may be methylated to form 5-methylcytosine"
ttctgttgagattggacaggcgtggctcagttcccttcttttatttaccctgatggagagcgtgttctcaatgtttccatccctcctcagggatgtgctgtctaatgagtataattgggatt

SEQ ID NO: 9212 - DNA, 122 bp, Homo sapiens
  misc_feature (61)..(62): /note="This region represents a CpG dinucleotide"
  misc_feature (61)..(61): /note="Nucleotide may be methylated to form 5-methylcytosine"
actgggatcaactgtcaggcctccagccccagaacacattaatgactagaaactcagaagcgatactccagtgatgttccctgtagtccaagcagtttccttgagtgtggccagtttataac

SEQ ID NO: 9213 - DNA, 122 bp, Homo sapiens
  misc_feature (61)..(62): /note="This region represents a CpG dinucleotide"
  misc_feature (61)..(61): /note="Nucleotide may be methylated to form 5-methylcytosine"
gcctggacgaggaactggaagactgcttcttcactgctaagactacctttttcagaaatgcgcagagcaaacatctttcaaaggtaaacataataatggaatgcaggagcctttcgtggggg

SEQ ID NO: 9214 - DNA, 122 bp, Homo sapiens
  misc_feature (61)..(62): /note="This region represents a CpG dinucleotide"
  misc_feature (61)..(61): /note="Nucleotide may be methylated to form 5-methylcytosine"
gacccctggtgaagacgctaagaaatgatggtgctctaaaagaagtctctttggctgtttcgtttatcccatcagaaaagaacagagattcaaatcttgctatcaccatattgccttttcat

SEQ ID NO: 9215 - DNA, 122 bp, Homo sapiens
  misc_feature (61)..(62): /note="This region represents a CpG dinucleotide"
  misc_feature (61)..(61): /note="Nucleotide may be methylated to form 5-methylcytosine"
gagaaagttattacatacataagaacacatttactttcattttatttttctcctacagagcgtcctatatttctgtaaactggattacagggtacttagaagaacgagcttgcttgtcactg

SEQ ID NO: 9216 - DNA, 122 bp, Homo sapiens
  misc_feature (61)..(62): /note="This region represents a CpG dinucleotide"
  misc_feature (61)..(61): /note="Nucleotide may be methylated to form 5-methylcytosine"
gacagcatgccggcggcggggctgctggcgcttataccggctgggctgctgtaatgcgtgcgggaagtttcatcatgcctgcgaggatcaaccagcgcgtgcagaggcggggctcgcggggc

SEQ ID NO: 9217 - DNA, 122 bp, Homo sapiens
  misc_feature (61)..(62): /note="This region represents a CpG dinucleotide"
  misc_feature (61)..(61): /note="Nucleotide may be methylated to form 5-methylcytosine"
tgcaaacccacccggactcagggagtttgcccccacaagcctgcttaagggaaggaatgacgggacaacactgtccacgagaaaacaaaaggccctggaatgaagccacacagcaggcagag

SEQ ID NO: 9218 - DNA, 122 bp, Homo sapiens
  misc_feature (61)..(62): /note="This region represents a CpG dinucleotide"
  misc_feature (61)..(61): /note="Nucleotide may be methylated to form 5-methylcytosine"
ttgatttacaaaactaataaattctggctaggggtgagtcacagtgttattactcccttacggtcttaaggtggctccacagtctgcattaaggagtctggatctttaaagtggcattcagg

SEQ ID NO: 9219 - DNA, 122 bp, Homo sapiens
  misc_feature (61)..(62): /note="This region represents a CpG dinucleotide"
  misc_feature (61)..(61): /note="Nucleotide may be methylated to form 5-methylcytosine"
ctcaggcaggatagtgacgggccgtgtgactgtgacgccatcatcaggttggtgagatggcgtgaccgcgtgctgcctatcagtctcctgtatgttcctccaccatctatcttgatattcag

SEQ ID NO: 9220 - DNA, 122 bp, Homo sapiens
  misc_feature (61)..(62): /note="This region represents a CpG dinucleotide"
  misc_feature (61)..(61): /note="Nucleotide may be methylated to form 5-methylcytosine"
aaattcctctgcccctgagtttacagagctcagctgttaagtatttccctgttgaagtggcgtgcaagggggtgggttgctctttatttcctctgctgtctacttcccatacctaaaagggt

SEQ ID NO: 9221 - DNA, 122 bp, Homo sapiens
  misc_feature (61)..(62): /note="This region represents a CpG dinucleotide"
  misc_feature (61)..(61): /note="Nucleotide may be methylated to form 5-methylcytosine"
tgaaatggcttggtctggagctccagcagcggagctggacattgctggctggggcccaggcgcttggggagtttattccttctgtaggatttgacagcagggtgagcagaaggcagcctctt

SEQ ID NO: 9222 - DNA, 122 bp, Homo sapiens
  misc_feature (61)..(62): /note="This region represents a CpG dinucleotide"
  misc_feature (61)..(61): /note="Nucleotide may be methylated to form 5-methylcytosine"
gttttacaaccatctgcagtaggcatggttggtagctacaggtggactttgcttagaaatcggaagctacgacgatttcaccctcacagtcttttttgttggtttgcttgatgattaagaca

SEQ ID NO: 9223 - DNA, 122 bp, Homo sapiens
  misc_feature (61)..(62): /note="This region represents a CpG dinucleotide"
  misc_feature (61)..(61): /note="Nucleotide may be methylated to form 5-methylcytosine"
ttgtaaagcaccaaagcaacatgtaacatatgaccacaagtaaaccacatgctgttccttcgcgtggaagttggaaagtcaaatgcaaaagtaaaatggaggagatgggttacatcatttta

SEQ ID NO: 9224 - DNA, 122 bp, Homo sapiens
  misc_feature (61)..(62): /note="This region represents a CpG dinucleotide"
  misc_feature (61)..(61): /note="Nucleotide may be methylated to form 5-methylcytosine"
agtcgcaggaggaattgatgcagcatggtgggagtggacgtcactttcaaggtgatcagccgtgaagagcggcaaacacagcgtcttggctcgagttcccccaaacggtgccccctggaaca

SEQ ID NO: 9225 - DNA, 122 bp, Homo sapiens
  misc_feature (61)..(62): /note="This region represents a CpG dinucleotide"
  misc_feature (61)..(61): /note="Nucleotide may be methylated to form 5-methylcytosine"
atttatggactcacatgtgtaaactgattaagtagggcggctcaccgtaggatagagtggcgtgataaagtggccagacaccatcagtgacaaagcatttctttcccctgtgttaaagtatc

SEQ ID NO: 9226 - DNA, 122 bp, Homo sapiens
  misc_feature (61)..(62): /note="This region represents a CpG dinucleotide"
  misc_feature (61)..(61): /note="Nucleotide may be methylated to form 5-methylcytosine"
tgcaaaatgagttagccagaatgtatgtcctgtgccccatcatccagagaacttgcagagcgtgttctaaagcagttgtgccatcccatagtcagcccaacaggcctcttttgtgcacaggc

SEQ ID NO: 9227 - DNA, 122 bp, Homo sapiens
  misc_feature (61)..(62): /note="This region represents a CpG dinucleotide"
  misc_feature (61)..(61): /note="Nucleotide may be methylated to form 5-methylcytosine"
ataaatttatttatacaaaatctggggtaaagatctaccttttagatcacatatttgaaacgtctgggcatgcctaattctatgtgttcaggtgtttctgagggtcataggtaaaagcatgt

SEQ ID NO: 9228 - DNA, 122 bp, Homo sapiens
  misc_feature (61)..(62): /note="This region represents a CpG dinucleotide"
  misc_feature (61)..(61): /note="Nucleotide may be methylated to form 5-methylcytosine"
tgcaactttgaatgcacatggggtggcgaggaaggaagaagagtaagaaaacaggaaaaacgaagtaggatagagagagcagcctctttgtctttacagcagagaatcagacacccaattag

SEQ ID NO: 9229 - DNA, 122 bp, Homo sapiens
  misc_feature (61)..(62): /note="This region represents a CpG dinucleotide"
  misc_feature (61)..(61): /note="Nucleotide may be methylated to form 5-methylcytosine"
gaccgaattatgaacatgggagagatgtaaaaaggcacagaaagacagtgagagagaatccgccagagacagagggctttgctttcgcccgcagcgattctgatgttatctatttccagctg

SEQ ID NO: 9230 - DNA, 122 bp, Homo sapiens
  misc_feature (61)..(62): /note="This region represents a CpG dinucleotide"
  misc_feature (61)..(61): /note="Nucleotide may be methylated to form 5-methylcytosine"
acctgtaatcccagcactttgggaggcccgaggttggcagatcacttgaggttagcggctcgagaccagcctggccaacatggtgaaaccctgtctctactaaaaatacaaaaattacctgg

SEQ ID NO: 9231 - DNA, 122 bp, Homo sapiens
  misc_feature (61)..(62): /note="This region represents a CpG dinucleotide"
  misc_feature (61)..(61): /note="Nucleotide may be methylated to form 5-methylcytosine"
ggtagcaagagtccagtgtgggccgagcggaaagcggggcattgaggtgaaaggaggagccgtgcctaccgggggaactggatatgcacagggcatgatctgaactgtcagcgaaaatgagg

SEQ ID NO: 9232 - DNA, 122 bp, Homo sapiens
  misc_feature (61)..(62): /note="This region represents a CpG dinucleotide"
  misc_feature (61)..(61): /note="Nucleotide may be methylated to form 5-methylcytosine"
aaagtcattctggtcagttcagtctgggcctgacacatgcccaggtcacagagatgaaggcgcaggggcctagcataccacgttaccctgcccttcacttaacacctttgtcaatagaattt

SEQ ID NO: 9233 - DNA, 122 bp, Homo sapiens
  misc_feature (61)..(62): /note="This region represents a CpG dinucleotide"
  misc_feature (61)..(61): /note="Nucleotide may be methylated to form 5-methylcytosine"
aataaggaagtgaatggtgaataagccataaaactgccaccacccagaggtagccaggatcgaagcaaggggtcacggtcatcagaggaagcacagaatatcaatagctcaagacattgcag

SEQ ID NO: 9234 - DNA, 122 bp, Homo sapiens
  misc_feature (61)..(62): /note="This region represents a CpG dinucleotide"
  misc_feature (61)..(61): /note="Nucleotide may be methylated to form 5-methylcytosine"
tgctgggcttcctaatgacatcaggcttaaatctgccacttggtcctgatgaccagcagccgtgatctctgccctggaaaaagaagatgcaggcagcaatggtaccgtagagtgtctggtgt

SEQ ID NO: 9235 - DNA, 122 bp, Homo sapiens
  misc_feature (61)..(62): /note="This region represents a CpG dinucleotide"
  misc_feature (61)..(61): /note="Nucleotide may be methylated to form 5-methylcytosine"
gctcaggggcccttcacacacatacctttgggaccaacgctgtttcgtctgcagcaatggcgtgcctggctttcatgcttgtggtttgtaccatagttgtgatgttgtctagaattcccatg

SEQ ID NO: 9236 - DNA, 122 bp, Homo sapiens
  misc_feature (61)..(62): /note="This region represents a CpG dinucleotide"
  misc_feature (61)..(61): /note="Nucleotide may be methylated to form 5-methylcytosine"
ctgaagcctgtacccaaacctgcagttgaggttccagccaaaccccacagtgggagcttacgtaggcagagatgtagcctagttttcatctgcatatgcaagtgataaataaatgtataaac

SEQ ID NO: 9237 - DNA, 122 bp, Homo sapiens
  misc_feature (61)..(62): /note="This region represents a CpG dinucleotide"
  misc_feature (61)..(61): /note="Nucleotide may be methylated to form 5-methylcytosine"
ggagttccacaagggctgaaggtttgaaagcagcacacgataaggcgagaccttccaccgcgttatattccggaccaactcaaaccaaaccgtatcccaaaccaaagtcattatcccctgac

SEQ ID NO: 9238 - DNA, 122 bp, Homo sapiens
  misc_feature (61)..(62): /note="This region represents a CpG dinucleotide"
  misc_feature (61)..(61): /note="Nucleotide may be methylated to form 5-methylcytosine"
tgccctctagctgctgctcagagaagctggtggcggctttgtcatacaagcttttatcttcgtaggtcaggagactgctctagagaggagaatcaacatcctggcttgggaggtttcccacc

SEQ ID NO: 9239 - DNA, 122 bp, Homo sapiens
  misc_feature (61)..(62): /note="This region represents a CpG dinucleotide"
  misc_feature (61)..(61): /note="Nucleotide may be methylated to form 5-methylcytosine"
ctggaaagatgagcctccgcatacctgttacataagacaaagtgtgacaaatgttaggagcgggtaagaaacattatgctgtaaggcttaaggaaaagaaagcaagttactcaagtacaggg

SEQ ID NO: 9240 - DNA, 122 bp, Homo sapiens
  misc_feature (61)..(62): /note="This region represents a CpG dinucleotide"
  misc_feature (61)..(61): /note="Nucleotide may be methylated to form 5-methylcytosine"
cttatctcaaatctgtgaggccgacagatagggatgtggagatagagaaacaaatattgccgctttcccaaggacatgtggcttgtgagtggtagaaccagactagggcttcgcctctgaga

SEQ ID NO: 9241 - DNA, 122 bp, Homo sapiens
  misc_feature (61)..(62): /note="This region represents a CpG dinucleotide"
  misc_feature (61)..(61): /note="Nucleotide may be methylated to form 5-methylcytosine"
tgtgtttctctgtgattctcttgcccttttccttatggtctgcaactacagtcatcatgtcgcaatctagacaggaaggagaaaaggcctaaagggctaacctcctagctgagtcagccgct

SEQ ID NO: 9242 - DNA, 122 bp, Homo sapiens
  misc_feature (61)..(62): /note="This region represents a CpG dinucleotide"
  misc_feature (61)..(61): /note="Nucleotide may be methylated to form 5-methylcytosine"
tatgtaacggagtatctagtcatgaagaaaactggctctggagcctcctacctgacttcacgtactgcctctgcaacttacaaggtgcctggacaaattacttaacctctctgggcccctat

SEQ ID NO: 9243 - DNA, 122 bp, Homo sapiens
  misc_feature (61)..(62): /note="This region represents a CpG dinucleotide"
  misc_feature (61)..(61): /note="Nucleotide may be methylated to form 5-methylcytosine"
actacatgatttttgaggtctgtttaataattctatttttcagctgggcgcagtatctcacgtctgtaatcccagcactttgggaggccgaggcaggtggattacctgaggtcaggggttcg

SEQ ID NO: 9244 - DNA, 122 bp, Homo sapiens
  misc_feature (61)..(62): /note="This region represents a CpG dinucleotide"
  misc_feature (61)..(61): /note="Nucleotide may be methylated to form 5-methylcytosine"
ctactctagctgtgtctatcttggacaaattgcttaatctctctggagaataatatgtagcggcaaagttaagaagatgactcatgtaaagttattactatgcctgccactcaagaagtgtt

SEQ ID NO: 9245 - DNA, 122 bp, Homo sapiens
  misc_feature (61)..(62): /note="This region represents a CpG dinucleotide"
  misc_feature (61)..(61): /note="Nucleotide may be methylated to form 5-methylcytosine"
gtctctgctaaaaatacaaaatcacctgggcgtagttgtgcattcctgtaatcccagccacgccagaagctgaggcagaatcgttcgaatccaggaagtggaggctgcagtgagttgagatc

SEQ ID NO: 9246 - DNA, 122 bp, Homo sapiens
  misc_feature (61)..(62): /note="This region represents a CpG dinucleotide"
  misc_feature (61)..(61): /note="Nucleotide may be methylated to form 5-methylcytosine"
aagcaggaagtgcaacaaacccttagggtttcatgatacagtgaattttcccctccccaacgtttggaaaaaattgggacacttgctagttcttccctgtgggaagaatctttctaatatta

SEQ ID NO: 9247 - DNA, 122 bp, Homo sapiens
  misc_feature (61)..(62): /note="This region represents a CpG dinucleotide"
  misc_feature (61)..(61): /note="Nucleotide may be methylated to form 5-methylcytosine"
ctagaagatgcagtgatggtaaatatagaacttccccttaccctttcaggttttgtgccacgtgtcttatctcctggcttctgaactcagggacttttctgttaatgttactgtaggttctg

SEQ ID NO: 9248 - DNA, 122 bp, Homo sapiens
  misc_feature (61)..(62): /note="This region represents a CpG dinucleotide"
  misc_feature (61)..(61): /note="Nucleotide may be methylated to form 5-methylcytosine"
gtgattctcttgtcttagcctccggagttagctgggactatgggtgtgcgtcacaacgcccggctaatttttgtatttttagtaaagatgaggtttcaccatgttggccaggctggtctcaa

SEQ ID NO: 9249 - DNA, 122 bp, Homo sapiens
  misc_feature (61)..(62): /note="This region represents a CpG dinucleotide"
  misc_feature (61)..(61): /note="Nucleotide may be methylated to form 5-methylcytosine"
tggagggggcagggtttccggaagctgggtgtacacactctgcctctaggacgcctgagacggagactagatgctgtccctcaagcagaaggaattgagcaactactctccacctcatctgc

SEQ ID NO: 9250 - DNA, 122 bp, Homo sapiens
  misc_feature (61)..(62): /note="This region represents a CpG dinucleotide"
  misc_feature (61)..(61): /note="Nucleotide may be methylated to form 5-methylcytosine"
ttgcttttgttgtacagttcaatcctaacatttatgctgttgagaaccaaatgcactcaccgatgtcttttcacacttgctttttatcctgagatgggccagatacagctgctcttctctat

SEQ ID NO: 9251 - DNA, 122 bp, Homo sapiens
  misc_feature (61)..(62): /note="This region represents a CpG dinucleotide"
  misc_feature (61)..(61): /note="Nucleotide may be methylated to form 5-methylcytosine"
agagatccaccagtgcagttttgcttaatcctcatgataaccctatgtggagagttctcacgttgtcaacaggatagagatgagaagacagaggcttagagaagttaaataacttacccagc

SEQ ID NO: 9252 - DNA, 122 bp, Homo sapiens
  misc_feature (61)..(62): /note="This region represents a CpG dinucleotide"
  misc_feature (61)..(61): /note="Nucleotide may be methylated to form 5-methylcytosine"
aaggccaaaatctttggagaggccattaatgtgtgtggttttttttttttttcttttttgcggctcgttaaattcctctgaggaagcaaacagaaacagctaaaaggagaagcttaaatgtc

SEQ ID NO: 9253 - DNA, 122 bp, Homo sapiens
  misc_feature (61)..(62): /note="This region represents a CpG dinucleotide"
  misc_feature (61)..(61): /note="Nucleotide may be methylated to form 5-methylcytosine"
aataatttataggccatcttaaagaagaaatagaagctatcagctatgtatggacttcaccgttgtttttttgtgtttgtagacaagctatcttaggtcactgctttagcaaattaaattag

SEQ ID NO: 9254 - DNA, 122 bp, Homo sapiens
  misc_feature (61)..(62): /note="This region represents a CpG dinucleotide"
  misc_feature (61)..(61): /note="Nucleotide may be methylated to form 5-methylcytosine"
ctagcagagttgagtaattcagacacaaaccagatggcctgcaaagcctaaaatatttaccgtctgctcctttaaagaaaatgtttttccagcccctgacatagaagaaggtaaatggaaac

SEQ ID NO: 9255 - DNA, 122 bp, Homo sapiens
  misc_feature (61)..(62): /note="This region represents a CpG dinucleotide"
  misc_feature (61)..(61): /note="Nucleotide may be methylated to form 5-methylcytosine"
tgctctgcatcccagacttcagctggctctccttgccctccagcaacttcctgtaggtggcgatctcaatgtccagggccagcttgatggtcatcagctcctggtacttgagcagctgacgc

SEQ ID NO: 9256 - DNA, 122 bp, Homo sapiens
  misc_feature (61)..(62): /note="This region represents a CpG dinucleotide"
  misc_feature (61)..(61): /note="Nucleotide may be methylated to form 5-methylcytosine"
attgtagtattgttctcaccctcacttttcccattaattggaatcaccaatatcacataccgatgacagatacgagcagaaatgcgttcgccaaatatatcgactatattgttcggagtgtt

SEQ ID NO: 9257 - DNA, 122 bp, Homo sapiens
  misc_feature (61)..(62): /note="This region represents a CpG dinucleotide"
  misc_feature (61)..(61): /note="Nucleotide may be methylated to form 5-methylcytosine"
ccaccattatccttaccacctcggctaggaatcttaaatcatctttgattccatcctttccggcttcagtcagttactaagttaattctacctttgaaaagtctcttctgtatataacccct

SEQ ID NO: 9258 - DNA, 122 bp, Homo sapiens
  misc_feature (61)..(62): /note="This region represents a CpG dinucleotide"
  misc_feature (61)..(61): /note="Nucleotide may be methylated to form 5-methylcytosine"
attgtgtaaaaaagaaacatctagagaatgccacagacaggcctagtatggctacagtaccgtatataaaagacaattgctcacaatgatagcactgaagcactgagagatatcaaagtact

SEQ ID NO: 9259 - DNA, 122 bp, Homo sapiens
  misc_feature (61)..(62): /note="This region represents a CpG dinucleotide"
  misc_feature (61)..(61): /note="Nucleotide may be methylated to form 5-methylcytosine"
agcatggtctgtagaaggaaggacaggtgtctgacagagagggcagggttccccatccttcgggaggcgtagaccaattcatggagcaaacgcatctggaccgcagcccagcctctgtgcgt

SEQ ID NO: 9260 - DNA, 122 bp, Homo sapiens
  misc_feature (61)..(62): /note="This region represents a CpG dinucleotide"
  misc_feature (61)..(61): /note="Nucleotide may be methylated to form 5-methylcytosine"
ttggtgagggcctccttctgggactatctgtccacctgatcagtgatatagacactgtgccgcggagaggagccacatctcccagccagcctgccagcagagtaattggctcagggttacaa

SEQ ID NO: 9261 - DNA, 122 bp, Homo sapiens
  misc_feature (61)..(62): /note="This region represents a CpG dinucleotide"
  misc_feature (61)..(61): /note="Nucleotide may be methylated to form 5-methylcytosine"
ccagccggaggccacaggagaaccaatgagcctggctggactcctgcaaaccttgagggacgccgagattcacattcactgaattttcatgccacgtgacactcttcttcttttgttccctc

SEQ ID NO: 9262 - DNA, 122 bp, Homo sapiens
  misc_feature (61)..(62): /note="This region represents a CpG dinucleotide"
  misc_feature (61)..(61): /note="Nucleotide may be methylated to form 5-methylcytosine"
gctggtgaggaccctccacagcccgggacccgcctgagtccttacctctgcgtgagggtccgcagctcgcgccttccgctccaccagaaacaagttcaagcgcagcaggcgcaaagcgaatg

SEQ ID NO: 9263 - DNA, 122 bp, Homo sapiens
  misc_feature (61)..(62): /note="This region represents a CpG dinucleotide"
  misc_feature (61)..(61): /note="Nucleotide may be methylated to form 5-methylcytosine"
ctgcaaaaccccctcacctttttcacagtctattagctggaagtaagttgcaggtcctaccggcgctccaggggaggaggttacacagggtgtgaacaccagggagtgggaccacagggccc

SEQ ID NO: 9264 - DNA, 122 bp, Homo sapiens
  misc_feature (61)..(62): /note="This region represents a CpG dinucleotide"
  misc_feature (61)..(61): /note="Nucleotide may be methylated to form 5-methylcytosine"
agcttcactgcctctgtatagaccctatcccaatccaaataaggtcacagtctgaagtatcgggtgttagggtttcgacataggaatttgaggagataaaatttagcacacacacccatggg

SEQ ID NO: 9265 - DNA, 122 bp, Homo sapiens
  misc_feature (61)..(62): /note="This region represents a CpG dinucleotide"
  misc_feature (61)..(61): /note="Nucleotide may be methylated to form 5-methylcytosine"
ccataaatccaacctaagaggaaaatgtgcagtaaaaatgaattgcttgatcttgatgcacgtcagtcatggaagtaaaaaactgtgatacctgcctgatttgtcaagaaaaattaaataac

SEQ ID NO: 9266 - DNA, 122 bp, Homo sapiens
  misc_feature (61)..(62): /note="This region represents a CpG dinucleotide"
  misc_feature (61)..(61): /note="Nucleotide may be methylated to form 5-methylcytosine"
cctgtgtggtctcggcccccagacttcctcatcttcactggtgtaatggtgtacttggtacgactcttccaggacacaaagttggcattaagggccacagaagtaagaactgggcggcaggg

SEQ ID NO: 9267 - DNA, 122 bp, Homo sapiens
  misc_feature (61)..(62): /note="This region represents a CpG dinucleotide"
  misc_feature (61)..(61): /note="Nucleotide may be methylated to form 5-methylcytosine"
gcaggcaaatcgatgtatccctgaaatccaacatccaatctgaagttaaatgagctttaccgttcaagccacttagagttggacttttagttaacttgcaaccgaatataaccggcacatat

SEQ ID NO: 9268 - DNA, 122 bp, Homo sapiens
  misc_feature (61)..(62): /note="This region represents a CpG dinucleotide"
  misc_feature (61)..(61): /note="Nucleotide may be methylated to form 5-methylcytosine"
ccaaactcagctccgcagagaacaatgggattccagcagaacacagcacccgggcaatggcggaatgtgtgcatcgttgcctccttttccagagccttatcctatcacagccctgttagaga

SEQ ID NO: 9269 - DNA, 122 bp, Homo sapiens
  misc_feature (61)..(62): /note="This region represents a CpG dinucleotide"
  misc_feature (61)..(61): /note="Nucleotide may be methylated to form 5-methylcytosine"
tgttaataagtggttttgtctgagttgtgctgaagaaaaagatctggtgagggtggaatgcgtcatgggtaaatgaaagtgccaattgaagtgagaacacagaggtgaatggagagattgaa

SEQ ID NO: 9270 - DNA, 122 bp, Homo sapiens
  misc_feature (61)..(62): /note="This region represents a CpG dinucleotide"
  misc_feature (61)..(61): /note="Nucleotide may be methylated to form 5-methylcytosine"
tttactggaactactgctcggatgctaggacaccaaaccgaaatcctgataatgagctgtcgttatatcatggccacatctagaaatctaattgcacagtgagagtgcataggatgaaatgg

SEQ ID NO: 9271 - DNA, 122 bp, Homo sapiens
  misc_feature (61)..(62): /note="This region represents a CpG dinucleotide"
  misc_feature (61)..(61): /note="Nucleotide may be methylated to form 5-methylcytosine"
caactggcagaaatttcaaacaaggggttctgccttgcactccggtgcaagggttgggcacgtggactcacatgtgaccaatcacattgtctttcctgagatcctgcattttgaccagagga

SEQ ID NO: 9272 - DNA, 122 bp, Homo sapiens
  misc_feature (61)..(62): /note="This region represents a CpG dinucleotide"
  misc_feature (61)..(61): /note="Nucleotide may be methylated to form 5-methylcytosine"
actttggagtactaattaagttttatacaatgagcaggttaggtatgacttgacatcatccgtaacagccaaaatgatgtatcctccacctacatgttccagtatttcatttgttagtatta

SEQ ID NO: 9273 - DNA, 122 bp, Homo sapiens
  misc_feature (61)..(62): /note="This region represents a CpG dinucleotide"
  misc_feature (61)..(61): /note="Nucleotide may be methylated to form 5-methylcytosine"
gctgcccagttcctcttcctcttcccaagtggcccccgtcctgccactcccttctatgagcgcagaccttctggtttagagcttcagtctggaccattgtgctgtgtcctctccaggcgggg

SEQ ID NO: 9274 - DNA, 122 bp, Homo sapiens
  misc_feature (61)..(62): /note="This region represents a CpG dinucleotide"
  misc_feature (61)..(61): /note="Nucleotide may be methylated to form 5-methylcytosine"
tttaaacacatttttggactggattccttctgtgaacctccggtttacaacttctgcattcgtaggtggggactgtcagtggaaggtctcccccaccccacatcggaggggagaagggaaaa

SEQ ID NO: 9275 - DNA, 122 bp, Homo sapiens
  misc_feature (61)..(62): /note="This region represents a CpG dinucleotide"
  misc_feature (61)..(61): /note="Nucleotide may be methylated to form 5-methylcytosine"
tgtcttgtgccgggtgcagaggacattgaggtggggctgcctcatgcttcacagtcctagcgttattttccatgccatctgtgttctgactaaacccactttaggtatggggaaactgatgc

SEQ ID NO: 9276 - DNA, 122 bp, Homo sapiens
  misc_feature (61)..(62): /note="This region represents a CpG dinucleotide"
  misc_feature (61)..(61): /note="Nucleotide may be methylated to form 5-methylcytosine"
caggagaactcagggcggatgtctgaggggtctgcgttgggctttctggtcgcttctctgcgaagcgcgcttgttcctgaggcggtgcctgcctgtgtcgtcgtccctgtttgttcttcttc

SEQ ID NO: 9277 - DNA, 122 bp, Homo sapiens
  misc_feature (61)..(62): /note="This region represents a CpG dinucleotide"
  misc_feature (61)..(61): /note="Nucleotide may be methylated to form 5-methylcytosine"
ccaaaccaagactggaaaccattgagctcacctgtgcactttgcaaacttcgaagtgcagcgcacagggcaacagctgtgagtaatgtgaactgtaaccatcatgattcacgaccttgagaa

SEQ ID NO: 9278 - DNA, 122 bp, Homo sapiens
  misc_feature (61)..(62): /note="This region represents a CpG dinucleotide"
  misc_feature (61)..(61): /note="Nucleotide may be methylated to form 5-methylcytosine"
aactctgtacttcctctctctgaccacagtctcctgtctgtctacctctgctaccagaaccgtggccctgagtcacctctgccctcagccagaaccccagattctgcacctccgtgtctccc

SEQ ID NO: 9279 - DNA, 122 bp, Homo sapiens
  misc_feature (61)..(62): /note="This region represents a CpG dinucleotide"
  misc_feature (61)..(61): /note="Nucleotide may be methylated to form 5-methylcytosine"
atagttactaacaaagtattctattcttgaaattcactgagagtagatgttaattgtactcgccacaaaaaagataagtatgtgaagtaatgcatatgttaattagcttgatccagtcattc

SEQ ID NO: 9280 - DNA, 122 bp, Homo sapiens
  misc_feature (61)..(62): /note="This region represents a CpG dinucleotide"
  misc_feature (61)..(61): /note="Nucleotide may be methylated to form 5-methylcytosine"
acaggcccgagttccaactgtagctctgacataaccagctgtgtgacactgggcaattcacgtaacttctgtgggcatctccacccttgtttgcagatgagatctgcccccagctctaagat

SEQ ID NO: 9281 - DNA, 122 bp, Homo sapiens
  misc_feature (61)..(62): /note="This region represents a CpG dinucleotide"
  misc_feature (61)..(61): /note="Nucleotide may be methylated to form 5-methylcytosine"
tcccactcagggcctggtgtactcttggggaaccagctggcaaggccctgtgggtcttaacgtcagcgttggaaggtggaagcagggctgggagccggcagaaggcgcccgggccccaggag

SEQ ID NO: 9282 - DNA, 122 bp, Homo sapiens
  misc_feature (61)..(62): /note="This region represents a CpG dinucleotide"
  misc_feature (61)..(61): /note="Nucleotide may be methylated to form 5-methylcytosine"
gttccataagctggggttctaggatgtccattcttagttgagtctcatttcctgtcatatcgacgtcaaaggcccaagaccttcctcctccccttgagcaaacaagccacgccctgcaccaa

SEQ ID NO: 9283 - DNA, 122 bp, Homo sapiens
  misc_feature (61)..(62): /note="This region represents a CpG dinucleotide"
  misc_feature (61)..(61): /note="Nucleotide may be methylated to form 5-methylcytosine"
atctggctgaggtggggcctggacatcaggattgtaagagctccccaggtgattctgatacgcagccaaggttgagaaccttggctgtagaccaacatctaggcgtcatttcacaagtggcc

SEQ ID NO: 9284 - DNA, 122 bp, Homo sapiens
  misc_feature (61)..(62): /note="This region represents a CpG dinucleotide"
  misc_feature (61)..(61): /note="Nucleotide may be methylated to form 5-methylcytosine"
aatgtgaagtgcatacatcatgctgaaggattttgtctcagccacggaggtaatagtcagcgaggtcaggtcaaagagggttaaaccaagccaggatatagccaaagaaatacatcaaacgc

SEQ ID NO: 9285 - DNA, 122 bp, Homo sapiens
  misc_feature (61)..(62): /note="This region represents a CpG dinucleotide"
  misc_feature (61)..(61): /note="Nucleotide may be methylated to form 5-methylcytosine"
agatgacttaatctcttacttaaacaggaatctttctcaatggactttcaggagtgtcttcgttgacctctattatactttctcaattttagctttaactctgctgtaccatagatttccat

SEQ ID NO: 9286 - DNA, 122 bp, Homo sapiens
  misc_feature (61)..(62): /note="This region represents a CpG dinucleotide"
  misc_feature (61)..(61): /note="Nucleotide may be methylated to form 5-methylcytosine"
cttgcttcctctcactctgacatatgatagacacagcaagaagcaggttggggccaggtgcggtggctcatgcctttaatctcagcaactggggaggccacggtgagtgaatcatctgaggt

SEQ ID NO: 9287 - DNA, 122 bp, Homo sapiens
  misc_feature (61)..(62): /note="This region represents a CpG dinucleotide"
  misc_feature (61)..(61): /note="Nucleotide may be methylated to form 5-methylcytosine"
cttcctgttctccctccttacaggctgagttcttgggctccaagttgagcacagaaaatacgttcaaggccgggcgcggtggctcacgcctgtaatcccagcactttgggaggctgaggcag

SEQ ID NO: 9288 - DNA, 122 bp, Homo sapiens
  misc_feature (61)..(62): /note="This region represents a CpG dinucleotide"
  misc_feature (61)..(61): /note="Nucleotide may be methylated to form 5-methylcytosine"
tttactgatcaaggggcatttaaagcatgacagtgttaaagtatgccccggctggcaaagcggacttcctgtggctaactgaggtgctcattaaacagatcaggtggccgtggctgggtgag

SEQ ID NO: 9289 - DNA, 122 bp, Homo sapiens
  misc_feature (61)..(62): /note="This region represents a CpG dinucleotide"
  misc_feature (61)..(61): /note="Nucleotide may be methylated to form 5-methylcytosine"
aaaatcagttcatccatgacagccttgcaggtggcatctgagaatcatctgtcaaggtcacgagccacagctggcaacaactggtcaaggccagaacctggcctaaagtcccggcttctgag

SEQ ID NO: 9290 - DNA, 122 bp, Homo sapiens
  misc_feature (61)..(62): /note="This region represents a CpG dinucleotide"
  misc_feature (61)..(61): /note="Nucleotide may be methylated to form 5-methylcytosine"
acttgaatcttctgttcatctggcagctgggcagctggctgatgtaacagctgcagaacacggagtctcccagaagggagaaaaagagaaaagaaaaaagacacacatagcccaggatgata

SEQ ID NO: 9291 - DNA, 122 bp, Homo sapiens
  misc_feature (61)..(62): /note="This region represents a CpG dinucleotide"
  misc_feature (61)..(61): /note="Nucleotide may be methylated to form 5-methylcytosine"
ccatcgtgcctgacccgaatcactattctatgctaatatgactatgactgttcagctgaccgagaattcatcaagttgcataatgatatactgacacatccttatcctagtcacatagctag

SEQ ID NO: 9292 - DNA, 122 bp, Homo sapiens
  misc_feature (61)..(62): /note="This region represents a CpG dinucleotide"
  misc_feature (61)..(61): /note="Nucleotide may be methylated to form 5-methylcytosine"
tgagtcaatctgctaagtgagatgactgctaagtgactaatgagcaagtggtatatacagcgtggatcctctagacaaggggatcattcaagtcccaggtggaatggagcaggagggcaagc

SEQ ID NO: 9293 - DNA, 122 bp, Homo sapiens
  misc_feature (61)..(62): /note="This region represents a CpG dinucleotide"
  misc_feature (61)..(61): /note="Nucleotide may be methylated to form 5-methylcytosine"
ccacccagtttatggtattttattatgacaggccaaggtgactgagacagatgcacctttcgagaatgaattattgtgggtgtgaattcttgtaagtgcatgtaaaacttattagctgactt

SEQ ID NO: 9294 - DNA, 122 bp, Homo sapiens
  misc_feature (61)..(62): /note="This region represents a CpG dinucleotide"
  misc_feature (61)..(61): /note="Nucleotide may be methylated to form 5-methylcytosine"
atggggctttggagaagtgagctctgggtttaacagtaggactggggatggctcagactgcggaccttcagtgagcctctgccacctgccaggcactccgcagagcctttcacagacattcc

SEQ ID NO: 9295 - DNA, 122 bp, Homo sapiens
  misc_feature (61)..(62): /note="This region represents a CpG dinucleotide"
  misc_feature (61)..(61): /note="Nucleotide may be methylated to form 5-methylcytosine"
cattctcttcctgggtgatcatctgcagcctgttgagaaagaggctttaacttcatagcacgagagctgggacatcaccatatggcagacccggctacagaggaaacacccaaaaatgacag

SEQ ID NO: 9296 - DNA, 122 bp, Homo sapiens
  misc_feature (61)..(62): /note="This region represents a CpG dinucleotide"
  misc_feature (61)..(61): /note="Nucleotide may be methylated to form 5-methylcytosine"
agggtgtgtgtgtgtgttcgcgtgtttgtcgaggtgggtatctaacctgatcactcaggtcgtgtcccttcactcagtttggtagctgaaaccaaatgtcttcaaacaagttctctgtgacc

SEQ ID NO: 9297 - DNA, 122 bp, Homo sapiens
  misc_feature (61)..(62): /note="This region represents a CpG dinucleotide"
  misc_feature (61)..(61): /note="Nucleotide may be methylated to form 5-methylcytosine"
gctcaaagggatctgcccacctcagactcccaaagtgttgggattacaggcatgagccaccgcgcccagccctagtgctatgatttgatatacgcttgcaaacattattggctcacccacac

SEQ ID NO: 9298 - DNA, 122 bp, Homo sapiens
  misc_feature (61)..(62): /note="This region represents a CpG dinucleotide"
  misc_feature (61)..(61): /note="Nucleotide may be methylated to form 5-methylcytosine"
tcactgtgtgatgttcttagaaaaactctctataaatcctctcagaaaaccccatggaatcgctagacatcgatctgccacaaatgggaaaatcacattcccaggccgtaacactatggcag

SEQ ID NO: 9299 - DNA, 122 bp, Homo sapiens
  misc_feature (61)..(62): /note="This region represents a CpG dinucleotide"
  misc_feature (61)..(61): /note="Nucleotide may be methylated to form 5-methylcytosine"
tgtcgtcacttctcggctgctcacgctgcgacgttgttttgttgggtcggatctctgcatcggtctgggcatgggtaactactcaggattaatgtcagaagttgagtttttgttggtgacac

SEQ ID NO: 9300 - DNA, 122 bp, Homo sapiens
  misc_feature (61)..(62): /note="This region represents a CpG dinucleotide"
  misc_feature (61)..(61): /note="Nucleotide may be methylated to form 5-methylcytosine"
acttgccacagggcatataaactgagaaagttatgtagaaattcaagatcagaggatgagcgcaaggatgatctttgagaacaaaacagtgaacagagccctttgtggtggcaagcagtgac

SEQ ID NO: 9301 - DNA, 122 bp, Homo sapiens
  misc_feature (61)..(62): /note="This region represents a CpG dinucleotide"
  misc_feature (61)..(61): /note="Nucleotide may be methylated to form 5-methylcytosine"
aaaacttcatggattggactttcctgggctccttataacataatcgtgtgtccaggcaaacgcacactagtgtctgactggaaagctcaggaattttaatcttgcactgtttcccagggagc

SEQ ID NO: 9302 - DNA, 122 bp, Homo sapiens
  misc_feature (61)..(62): /note="This region represents a CpG dinucleotide"
  misc_feature (61)..(61): /note="Nucleotide may be methylated to form 5-methylcytosine"
ggccgagccgtgccgggaaggcgcgcggccccgcgcgggcacctggccgaggccgccccgcgctgccattgaaatgtgacactgatgaacgagctaggcccgcggctttctttgggagagtt

SEQ ID NO: 9303 - DNA, 122 bp, Homo sapiens
  misc_feature (61)..(62): /note="This region represents a CpG dinucleotide"
  misc_feature (61)..(61): /note="Nucleotide may be methylated to form 5-methylcytosine"
aattctctaaactcgaagataaaaaggtaagcagagcagaagatactgccttgtagtcatcgatggataaaaggaaatttgaaaataaaatgagtacttggaaatgatcatgtatttttaaa

SEQ ID NO: 9304 - DNA, 122 bp, Homo sapiens
  misc_feature (61)..(62): /note="This region represents a CpG dinucleotide"
  misc_feature (61)..(61): /note="Nucleotide may be methylated to form 5-methylcytosine"
gaggctattatcgcacattgtgcggtggatatagtcacgcgctgggtcgtagtagcgtgtcgtttatttcagtccagctcactcttggtagaatccctttattcgttttgttgtttttgata

SEQ ID NO: 9305 - DNA, 122 bp, Homo sapiens
  misc_feature (61)..(62): /note="This region represents a CpG dinucleotide"
  misc_feature (61)..(61): /note="Nucleotide may be methylated to form 5-methylcytosine"
tatattgaaggctactagtccaaaaaattgtccataaatgaaaaggttatactatttacacgacagaggaaaaatacagaagataagtgatactgggcaaaccgacatcatttactgattag

SEQ ID NO: 9306 - DNA, 122 bp, Homo sapiens
  misc_feature (61)..(62): /note="This region represents a CpG dinucleotide"
  misc_feature (61)..(61): /note="Nucleotide may be methylated to form 5-methylcytosine"
caaatagatatgtcactcaggatccttggttgcaagtggcagaagctcagctaggattcacgtatgtaacaaaggggtttcatggcagggtcttggtttggctcatgtagttcaaggaagac

SEQ ID NO: 9307 - DNA, 122 bp, Homo sapiens
  misc_feature (61)..(62): /note="This region represents a CpG dinucleotide"
  misc_feature (61)..(61): /note="Nucleotide may be methylated to form 5-methylcytosine"
ttgaggagtcactccggagaaagggcaaaagctgaaaccagcgctctctcctgtttgagacgaacccctccggtgctgcctcctattcatagtaaaagctgcttcacccttagtgcttcctc

SEQ ID NO: 9308 - DNA, 122 bp, Homo sapiens
  misc_feature (61)..(62): /note="This region represents a CpG dinucleotide"
  misc_feature (61)..(61): /note="Nucleotide may be methylated to form 5-methylcytosine"
cttcctttcagtcttcctttcagtccaggagttctcagcccatctggggaaggggggccacggaccacccaaggcatccatggccctgggtggagaaaaatctgcatctttcttttcaccag

SEQ ID NO: 9309 - DNA, 122 bp, Homo sapiens
  misc_feature (61)..(62): /note="This region represents a CpG dinucleotide"
  misc_feature (61)..(61): /note="Nucleotide may be methylated to form 5-methylcytosine"
tgtagagggtaaaggtggttctgagacccaagttcatgaagaatctcccctctattatgtcgcttgccaggtcattcaagaaagttttatccagccagtggatgggaagagagtttggaagg

SEQ ID NO: 9310 - DNA, 122 bp, Homo sapiens
  misc_feature (61)..(62): /note="This region represents a CpG dinucleotide"
  misc_feature (61)..(61): /note="Nucleotide may be methylated to form 5-methylcytosine"
tcccctgcctcagcctacgggtgtctcaatgcctggtgcagaaggtgtgtcgctgctgtccgtctgttgtgctgcttccacctctcatgtagtctcccgacactccatgtcacccatgctgc

SEQ ID NO: 9311 - DNA, 122 bp, Homo sapiens
  misc_feature (61)..(62): /note="This region represents a CpG dinucleotide"
  misc_feature (61)..(61): /note="Nucleotide may be methylated to form 5-methylcytosine"
ctactgtatgctgtgatctcttttgatttctatcctgggggatcaaaaaagcccacagggcgttggtgccagaaatcagctgtgcaagcacagaaagggagcagaggctgttgcctggctca

SEQ ID NO: 9312 - DNA, 122 bp, Homo sapiens
  misc_feature (61)..(62): /note="This region represents a CpG dinucleotide"
  misc_feature (61)..(61): /note="Nucleotide may be methylated to form 5-methylcytosine"
cagtgagaactgactcagaggtgacttccaaggccaacctggggtgatctggctgagtctcggaccagtctcaagtgctgtggaaggtcatgagagtggcaaggctgaacctcaagaccagt

SEQ ID NO: 9313 - DNA, 122 bp, Homo sapiens
  misc_feature (61)..(62): /note="This region represents a CpG dinucleotide"
  misc_feature (61)..(61): /note="Nucleotide may be methylated to form 5-methylcytosine"
gaaaatgccagtaattcagcagatgaacacaaggagtgacttaatagcataaaacatattcgtgaagcaggtttcaaatatgtctattattttttgcagttatctacatcaaaaggtttaat

SEQ ID NO: 9314 - DNA, 122 bp, Homo sapiens
  misc_feature (61)..(62): /note="This region represents a CpG dinucleotide"
  misc_feature (61)..(61): /note="Nucleotide may be methylated to form 5-methylcytosine"
cactccagccaggcaacagagcaaaactccatctcaaagaaactaaaataaaataaaacgcgggtcctagaggaagaggaaggagctccgatggaagtgctgctacagaaaagtcacatgga

SEQ ID NO: 9315 - DNA, 122 bp, Homo sapiens
  misc_feature (61)..(62): /note="This region represents a CpG dinucleotide"
  misc_feature (61)..(61): /note="Nucleotide may be methylated to form 5-methylcytosine"
atgtatttattgcccatttatgtaattgcatgtgtcactaaggacaaaggtccttaaagacgaaaagcagagtagaaacagttccttatattaagacagatgaatttgctacctcttccctc

SEQ ID NO: 9316 - DNA, 122 bp, Homo sapiens
  misc_feature (61)..(62): /note="This region represents a CpG dinucleotide"
  misc_feature (61)..(61): /note="Nucleotide may be methylated to form 5-methylcytosine"
aataaaaagagtcggaagcatcagcgcctagggcccaatcgccactctggaacaggtgtgcgcggcgggtccgcgggctggcgggagctcacacgaactcacgcgcgagctcgcaggccgcg

SEQ ID NO: 9317 - DNA, 122 bp, Homo sapiens
  misc_feature (61)..(62): /note="This region represents a CpG dinucleotide"
  misc_feature (61)..(61): /note="Nucleotide may be methylated to form 5-methylcytosine"
tgttttttcaaaaaaataagtaccaacccatctttctttgctaatgttaactctaatctgcgttagctgcttgcttttgcagttattggtatgcattcacattctgtatctataggatataa

SEQ ID NO: 9318 - DNA, 122 bp, Homo sapiens
  misc_feature (61)..(62): /note="This region represents a CpG dinucleotide"
  misc_feature (61)..(61): /note="Nucleotide may be methylated to form 5-methylcytosine"
taatctgtctgggaagcaaactctaaatacatcagagcaatatccctctgaagtaggcaccgttagagaatgaagcctctccccaaggagtctactcaaggtgcctgaattgacatcattgc

SEQ ID NO: 9319 - DNA, 122 bp, Homo sapiens
  misc_feature (61)..(62): /note="This region represents a CpG dinucleotide"
  misc_feature (61)..(61): /note="Nucleotide may be methylated to form 5-methylcytosine"
ggaaaagctgggggcagtgggggtggggagcggtgcaggtggtgatggcctgccctttgccgcaaaatggagggagtggcatgaggtctggccaagaacaataaggccactcaggggttggg

SEQ ID NO: 9320 - DNA, 122 bp, Homo sapiens
  misc_feature (61)..(62): /note="This region represents a CpG dinucleotide"
  misc_feature (61)..(61): /note="Nucleotide may be methylated to form 5-methylcytosine"
acccgtcagtgagtaaacaaagcacctagaatgttctgctatgtactaaacaccagagggcgaatttaaacacaaaagaacgcctctttttaaaggtagtatgcaatagaattatctaatat

SEQ ID NO: 9321 - DNA, 122 bp, Homo sapiens
  misc_feature (61)..(62): /note="This region represents a CpG dinucleotide"
  misc_feature (61)..(61): /note="Nucleotide may be methylated to form 5-methylcytosine"
actccagtgccagcaggaagctgtgggcattggagaggcagggctgaagcctcaggccctcgaattcgtttgcagtccctctcccctctccacccagcatggtcccctccctgcctggattt

SEQ ID NO: 9322 - DNA, 122 bp, Homo sapiens
  misc_feature (61)..(62): /note="This region represents a CpG dinucleotide"
  misc_feature (61)..(61): /note="Nucleotide may be methylated to form 5-methylcytosine"
gccattgcccttattgggccttgcctcaggagttcctctgtgtatctctggtccagattccggaggaaacctgtttgacttgagtagatgccattgcccttattgggccttgcctcaggagt

SEQ ID NO: 9323 - DNA, 122 bp, Homo sapiens
  misc_feature (61)..(62): /note="This region represents a CpG dinucleotide"
  misc_feature (61)..(61): /note="Nucleotide may be methylated to form 5-methylcytosine"
ttataggtaagggcagtctaggtcataaacccaactgcatttgcactgaacagtagaagtcgcctatctctaccttaaatcctggtgattccttctcttccttactaatgtcctttgtggca

SEQ ID NO: 9324 - DNA, 122 bp, Homo sapiens
  misc_feature (61)..(62): /note="This region represents a CpG dinucleotide"
  misc_feature (61)..(61): /note="Nucleotide may be methylated to form 5-methylcytosine"
tgccctcccttttcaagccgcccttttttccagtgaaccagaggatactccaaatgtgcccgacacagacctgtgaggggacttctccacctgggtctcacacgctccacttaaactacctc

SEQ ID NO: 9325 - DNA, 122 bp, Homo sapiens
  misc_feature (61)..(62): /note="This region represents a CpG dinucleotide"
  misc_feature (61)..(61): /note="Nucleotide may be methylated to form 5-methylcytosine"
atatcagtagccttcaataaatgggcttaggtccattcctatcagtgctgacaaaggaaacgtgtgagcagaatctggaggaccatggtcctccatgtgctagaatatacagtaagcaagga

SEQ ID NO: 9326 - DNA, 122 bp, Homo sapiens
  misc_feature (61)..(62): /note="This region represents a CpG dinucleotide"
  misc_feature (61)..(61): /note="Nucleotide may be methylated to form 5-methylcytosine"
catggagcaggatacacaaaaaggttttccgttctccccacaccacccgccccaaaaagacgatgctttcaacaggaacctgagctaaatttagctacttgggattcagagtcctatgacta

SEQ ID NO: 9327 - DNA, 122 bp, Homo sapiens
  misc_feature (61)..(62): /note="This region represents a CpG dinucleotide"
  misc_feature (61)..(61): /note="Nucleotide may be methylated to form 5-methylcytosine"
gaatgaggctttccagtctgtcttgtggaaacagccaatattcccagccgtctctgagcacgacacaattacagtcatgtgttgcttaatgacagagatatgttctgaggaatgcaccttta

SEQ ID NO: 9328 - DNA, 122 bp, Homo sapiens
  misc_feature (61)..(62): /note="This region represents a CpG dinucleotide"
  misc_feature (61)..(61): /note="Nucleotide may be methylated to form 5-methylcytosine"
gtgtggcactaacagtaccgatagtactactactaataattgcccgagaggtctgctatccgttaactgacactcggtagcggccgctgcggaatttcgaattgcgggaaacccgcagactt

SEQ ID NO: 9329 - DNA, 122 bp, Homo sapiens
  misc_feature (61)..(62): /note="This region represents a CpG dinucleotide"
  misc_feature (61)..(61): /note="Nucleotide may be methylated to form 5-methylcytosine"
gggaccttccctccccgagtacgtgctcagaatgctcccggaggcctgagaagcatgtctcgcccagcgcacttctgagcccccagagggccagcccggtgtgtcttcattgtttcccagca

SEQ ID NO: 9330 - DNA, 122 bp, Homo sapiens
  misc_feature (61)..(62): /note="This region represents a CpG dinucleotide"
  misc_feature (61)..(61): /note="Nucleotide may be methylated to form 5-methylcytosine"
ggagcccgggaaaaaggccccagaaggagtctggttttggacgtctgaccccacccctcccgcttagggcttctgatcccccagggtgatttcactggcccggggttgggagggcagggggc

SEQ ID NO: 9331 - DNA, 122 bp, Homo sapiens
  misc_feature (61)..(62): /note="This region represents a CpG dinucleotide"
  misc_feature (61)..(61): /note="Nucleotide may be methylated to form 5-methylcytosine"
agctacaaggcctcttgttaattgtgggtttttatttttatttcctattaccctctcacacgcctgatgagattattttaccggaactgacacagctggaagcagcaggcatacgtggagcc

SEQ ID NO: 9332 - DNA, 122 bp, Homo sapiens
  misc_feature (61)..(62): /note="This region represents a CpG dinucleotide"
  misc_feature (61)..(61): /note="Nucleotide may be methylated to form 5-methylcytosine"
aggaaaaggaacaaattaacctgggtgggacagtcattaaatgccaagcctagagttgggcgtgtcttatcattcctctcaatatcccttagaagatagacattatttttcctattttacag

SEQ ID NO: 9333 - DNA, 122 bp, Homo sapiens
  misc_feature (61)..(62): /note="This region represents a CpG dinucleotide"
  misc_feature (61)..(61): /note="Nucleotide may be methylated to form 5-methylcytosine"
cacttctgaaagggggttggctagtttgaaacaagcttacagtggtgcaaaacgcagtggcgtgaaagcaggtaacaaaggcagtttatcaaacagtggcaggcctgtaactcaggcttgtt

SEQ ID NO: 9334 - DNA, 122 bp, Homo sapiens
  misc_feature (61)..(62): /note="This region represents a CpG dinucleotide"
  misc_feature (61)..(61): /note="Nucleotide may be methylated to form 5-methylcytosine"
ggatgtgtaggagtttgggaggattttcagcatctagcttgtcttggttatctcttttgccggttgggcctctgagggcagtaggaggtccctggggaagaggccctggttattgcaggtca

SEQ ID NO: 9335 - DNA, 122 bp, Homo sapiens
  misc_feature (61)..(62): /note="This region represents a CpG dinucleotide"
  misc_feature (61)..(61): /note="Nucleotide may be methylated to form 5-methylcytosine"
atggggagggaagagccccagcaaaaagaaacctatccaaataatatcaaatccacctgacgtgaatctgcttgggacaaagtaggtatcacatcaggatgtttctggctgcaaatgacaaa

SEQ ID NO: 9336 - DNA, 122 bp, Homo sapiens
  misc_feature (61)..(62): /note="This region represents a CpG dinucleotide"
  misc_feature (61)..(61): /note="Nucleotide may be methylated to form 5-methylcytosine"
tatcagattgaaacaacatggtatagtatatttaagggtgggttccatacgagtttcagacgtctaccgggcaccttggaatgtatcccccagagatatgggagggctagtgaactacctgg

SEQ ID NO: 9337 - DNA, 122 bp, Homo sapiens
  misc_feature (61)..(62): /note="This region represents a CpG dinucleotide"
  misc_feature (61)..(61): /note="Nucleotide may be methylated to form 5-methylcytosine"
gaagccaggtgacacgtggaaatcctagctgcatgagagtctggaaatgtcctctctagccgtccagcctctaaagtacaagaagtcatgatggaaagaaggaggtttggagaggggctgag

SEQ ID NO: 9338 - DNA, 122 bp, Homo sapiens
  misc_feature (61)..(62): /note="This region represents a CpG dinucleotide"
  misc_feature (61)..(61): /note="Nucleotide may be methylated to form 5-methylcytosine"
ggtataaattccagatcgatggacatgatttgcacccagtgtccacatgaagtgttctctcgttttagtacttaagtaagtaagtgttttcaaagtaaacataacttcgggtactttgttac

SEQ ID NO: 9339 - DNA, 122 bp, Homo sapiens
  misc_feature (61)..(62): /note="This region represents a CpG dinucleotide"
  misc_feature (61)..(61): /note="Nucleotide may be methylated to form 5-methylcytosine"
aatcccatttcctgtttctgctcctggaccgagggggcggggccgggtgcctccgaggggcggggctggtgcaactccaaaatggctgccgcggggagcggcgattagaacgggttccagtc

SEQ ID NO: 9340 - DNA, 122 bp, Homo sapiens
  misc_feature (61)..(62): /note="This region represents a CpG dinucleotide"
  misc_feature (61)..(61): /note="Nucleotide may be methylated to form 5-methylcytosine"
atgaatcaaagcactcatccccacgcacagatagacataaatggtggtagctgtgggcatcgcggttgtggtcggctgtcatcttcacttcatcagagcgcccactggtgggtaatgagaga

SEQ ID NO: 9341 - DNA, 122 bp, Homo sapiens
  misc_feature (61)..(62): /note="This region represents a CpG dinucleotide"
  misc_feature (61)..(61): /note="Nucleotide may be methylated to form 5-methylcytosine"
tcctctgaaatccatggtgtgtcatcagtacatgtcttcacccggattgactaacatgttcgttcctaacttacctctgctataatcgggtaggctccgtgggcacagtaactattttgtta

SEQ ID NO: 9342 - DNA, 122 bp, Homo sapiens
  misc_feature (61)..(62): /note="This region represents a CpG dinucleotide"
  misc_feature (61)..(61): /note="Nucleotide may be methylated to form 5-methylcytosine"
acaaacattgctattattcagctcatttcaaaggattccgctgctgccatttgtgagagccgctggaggctgagtgaaagtcattttgaaagactgatccaaagaagaatggaggccagagt

SEQ ID NO: 9343 - DNA, 122 bp, Homo sapiens
  misc_feature (61)..(62): /note="This region represents a CpG dinucleotide"
  misc_feature (61)..(61): /note="Nucleotide may be methylated to form 5-methylcytosine"
cattccattaagccacttgttgttgggaattctctcaaactgatctgcaattcagaaccacggtgagcaacctgttgcctcaccagactgcctggaactgagcttgaatgttgcttgggcaa

SEQ ID NO: 9344 - DNA, 122 bp, Homo sapiens
  misc_feature (61)..(62): /note="This region represents a CpG dinucleotide"
  misc_feature (61)..(61): /note="Nucleotide may be methylated to form 5-methylcytosine"
atcggggcccagggaagtgtcatgtgggctgtagcctcccagtcttcaggcataggccttcgcgcaggtatctgaatggagccttgaggtctgagcaatcacttctcccagagggggcaggg

SEQ ID NO: 9345 - DNA, 122 bp, Homo sapiens
  misc_feature (61)..(62): /note="This region represents a CpG dinucleotide"
  misc_feature (61)..(61): /note="Nucleotide may be methylated to form 5-methylcytosine"
caggaagaggacggttgggctttgagggtccctttaaagcgaatgatttgggtggttcctcggatgagcggcttgagggggctctgctttatgtaccctcccctgtgcccatttgtggggtc

SEQ ID NO: 9346 - DNA, 122 bp, Homo sapiens
  misc_feature (61)..(62): /note="This region represents a CpG dinucleotide"
  misc_feature (61)..(61): /note="Nucleotide may be methylated to form 5-methylcytosine"
cccccaagcacagcacgccattgcagcaggccccttcctgaagctgcgcccccatgaatacgccctgtacccattctgagaatcaggtctgatattatgggaagaaaatgtgtgcctaggca

SEQ ID NO: 9347 - DNA, 122 bp, Homo sapiens
  misc_feature (61)..(62): /note="This region represents a CpG dinucleotide"
  misc_feature (61)..(61): /note="Nucleotide may be methylated to form 5-methylcytosine"
taagggaaggaagccaggcacagaaggccacatattgtatgattccatgaatatgaaatacgcagaataagcagaataagcaaatccagagaaacagaaaccagattggtggttaccaggaa

SEQ ID NO: 9348 - DNA, 122 bp, Homo sapiens
  misc_feature (61)..(62): /note="This region represents a CpG dinucleotide"
  misc_feature (61)..(61): /note="Nucleotide may be methylated to form 5-methylcytosine"
acaggattatgggtgactttgttcatcacacatttcctattttctatactgtgaaacacacgagctctatcactgctattcccatgcaaggcaattttggaaaaggagaactactggcccca

SEQ ID NO: 9349 - DNA, 122 bp, Homo sapiens
  misc_feature (61)..(62): /note="This region represents a CpG dinucleotide"
  misc_feature (61)..(61): /note="Nucleotide may be methylated to form 5-methylcytosine"
gttatcgtttatgtcattaagtaactttttcctatataatatttgtttgacttcctaccacgagattcacatgggtactgtgttattcctgaagagataaagtaattctgaatgctaagaat

SEQ ID NO: 9350 - DNA, 122 bp, Homo sapiens
  misc_feature (61)..(62): /note="This region represents a CpG dinucleotide"
  misc_feature (61)..(61): /note="Nucleotide may be methylated to form 5-methylcytosine"
tttaaggaaacttttggcagatgtggacgtcgtaacatctgggcagtgttaacagaatcccggaggccgggacagaccaggagccactcgttctaggaatgttaaagtagaaggttttttcc

SEQ ID NO: 9351 - DNA, 122 bp, Homo sapiens
  misc_feature (61)..(62): /note="This region represents a CpG dinucleotide"
  misc_feature (61)..(61): /note="Nucleotide may be methylated to form 5-methylcytosine"
agccaccatgcccagccaatcacctgtatcttgaatctgttttcttgatgacttgtttggcgtctggccatgtctttcctggaagtaaacattccctcaattttgtcctcctgtttctatac

SEQ ID NO: 9352 - DNA, 122 bp, Homo sapiens
  misc_feature (61)..(62): /note="This region represents a CpG dinucleotide"
  misc_feature (61)..(61): /note="Nucleotide may be methylated to form 5-methylcytosine"
gttccaagttctgagttggggacggtagcaattctccatgaccaaaacactctgcagctgcgtcctttggagcagggaacacgagctgctttgttgacccctcttcaccccagaggcgtgtc

SEQ ID NO: 9353 - DNA, 122 bp, Homo sapiens
  misc_feature (61)..(62): /note="This region represents a CpG dinucleotide"
  misc_feature (61)..(61): /note="Nucleotide may be methylated to form 5-methylcytosine"
gtctccgcctcacattatctgcccaagcacagtgctgttggccaagcctccagcagctgacgggacccagctgtagtgaggttgcagtgattgagtaggattggcctgcttcaaagcagagg

SEQ ID NO: 9354 - DNA, 122 bp, Homo sapiens
  misc_feature (61)..(62): /note="This region represents a CpG dinucleotide"
  misc_feature (61)..(61): /note="Nucleotide may be methylated to form 5-methylcytosine"
actcccccatccctgacgcaaacctctgagcaggcttaggctaaatttcctcaagtagggcgtggagccaaggctccgatttccaagctgctgactgtccattacaggtctcccatcgacga

SEQ ID NO: 9355 - DNA, 122 bp, Homo sapiens
  misc_feature (61)..(62): /note="This region represents a CpG dinucleotide"
  misc_feature (61)..(61): /note="Nucleotide may be methylated to form 5-methylcytosine"
ctgaaggtggcccggagggacctgtggttttcagaggcccggccattcccgagggtgtgacggtcagacctccaatccatcccaaacccaagcaaacacagctggcccaggcctgcagtgtg

SEQ ID NO: 9356 - DNA, 122 bp, Homo sapiens
  misc_feature (61)..(62): /note="This region represents a CpG dinucleotide"
  misc_feature (61)..(61): /note="Nucleotide may be methylated to form 5-methylcytosine"
tcctgcttctgaatgacacgtgtcccaggctgtgctacttaggcacatagttccaggacacgcaatcccagatcccagttgtctgctggatttgctgcagggcttgcttctgactccctccc

SEQ ID NO: 9357 - DNA, 122 bp, Homo sapiens
  misc_feature (61)..(62): /note="This region represents a CpG dinucleotide"
  misc_feature (61)..(61): /note="Nucleotide may be methylated to form 5-methylcytosine"
ttcaccccatagactgtacccttcccaagggcggtttgttggcaagtctgtctggtagggcggtgttttctgcatagtaatcaggcctctgcaattgtgatattcctccccttccccctaaa

SEQ ID NO: 9358 - DNA, 122 bp, Homo sapiens
  misc_feature (61)..(62): /note="This region represents a CpG dinucleotide"
  misc_feature (61)..(61): /note="Nucleotide may be methylated to form 5-methylcytosine"
caaattaaaataaggaaacatatttcttgggtacctgagagatcactgctttcaattcgccggagatctgaatcagcccaaaagagcttgcccagcctgctatcaagggctaaagcaattgg

SEQ ID NO: 9359 - DNA, 122 bp, Homo sapiens
  misc_feature (61)..(62): /note="This region represents a CpG dinucleotide"
  misc_feature (61)..(61): /note="Nucleotide may be methylated to form 5-methylcytosine"
gggagtgtactgtccttcactggtttcaaaatagtacaataatgatgtccacatcacagtcgcctgttttctagcaatgtagataatatttaagatttcacaaacataagccaaatgcctgg

SEQ ID NO: 9360 - DNA, 122 bp, Homo sapiens
  misc_feature (61)..(62): /note="This region represents a CpG dinucleotide"
  misc_feature (61)..(61): /note="Nucleotide may be methylated to form 5-methylcytosine"
aggggcgtgcttcagcccttgccaagtttcttcggtagagctgctcagttctgaggaatgcgtctgagctgactgcgagaggagcaaaccctgcattcacccagggaggcttctgaactgtc

SEQ ID NO: 9361 - DNA, 122 bp, Homo sapiens
  misc_feature (61)..(62): /note="This region represents a CpG dinucleotide"
  misc_feature (61)..(61): /note="Nucleotide may be methylated to form 5-methylcytosine"
ttcaacgccctgggctctcccctcgctttgttgcatgagagctgctttactcactgctctcgacgaacagtcacagccacgagcaccgtccgaaacagaatcacagcctccctgggaaggaa

SEQ ID NO: 9362 - DNA, 122 bp, Homo sapiens
  misc_feature (61)..(62): /note="This region represents a CpG dinucleotide"
  misc_feature (61)..(61): /note="Nucleotide may be methylated to form 5-methylcytosine"
tagcatccaaccctgggcagcctgtgagctgtgagttcctagcctgattttctgagacatcgaaagaatttggaacagtcatattattggtgatggctggtttctgtcatccctgttgaatt

SEQ ID NO: 9363 - DNA, 122 bp, Homo sapiens
  misc_feature (61)..(62): /note="This region represents a CpG dinucleotide"
  misc_feature (61)..(61): /note="Nucleotide may be methylated to form 5-methylcytosine"
tgaaccctgactgatataacttgttattaagaaacaggaagataaaaactaattgagcatcgaagtgcttttacttctaggaagagagaattaggggttggtaccggactatagcttttgtt

SEQ ID NO: 9364 - DNA, 122 bp, Homo sapiens
  misc_feature (61)..(62): /note="This region represents a CpG dinucleotide"
  misc_feature (61)..(61): /note="Nucleotide may be methylated to form 5-methylcytosine"
gggcagacattgcccgtaactgcaaagtgtaacaatgttgttgtcatcattatccaataacgccagagcaaagacattgtttttcacttttattattatacatcaaagatatggtattttcc

SEQ ID NO: 9365 - DNA, 122 bp, Homo sapiens
  misc_feature (61)..(62): /note="This region represents a CpG dinucleotide"
  misc_feature (61)..(61): /note="Nucleotide may be methylated to form 5-methylcytosine"
ctctgacttcctgaactgtccagaagtagtccccctccttgccaggtcttgagatgtccacgtggaacttttcggcccggcccatttgtatatgaatgtttcacgcaacactctactacatc

SEQ ID NO: 9366 - DNA, 122 bp, Homo sapiens
  misc_feature (61)..(62): /note="This region represents a CpG dinucleotide"
  misc_feature (61)..(61): /note="Nucleotide may be methylated to form 5-methylcytosine"
ctgggcgtggcgcggcggggcgggtaacggggcgggacctgggcgacggaagtgcgtagccgcgcggcattctggggccggaagtggggcgccagctgcgggctggtgtcatggcaggtggg

SEQ ID NO: 9367 - DNA, 122 bp, Homo sapiens
  misc_feature (61)..(62): /note="This region represents a CpG dinucleotide"
  misc_feature (61)..(61): /note="Nucleotide may be methylated to form 5-methylcytosine"
ccaaatgtgcctctcccctccaggatcagcggcccagagatagggacatgtcattgtttccgaggacgcgttgtttgaggtcaccttaaggccagatcggtgtttcattgacgattctgttg

SEQ ID NO: 9368 - DNA, 122 bp, Homo sapiens
  misc_feature (61)..(62): /note="This region represents a CpG dinucleotide"
  misc_feature (61)..(61): /note="Nucleotide may be methylated to form 5-methylcytosine"
tcctgctacagtccttggttccctgaccaggaagcgaggtgactgacaagccctgtggagcgtccctgcagaggactccggccagcctgactgacgcaatccaaagagcgctcccgggtagg

SEQ ID NO: 9369 - DNA, 122 bp, Homo sapiens
  misc_feature (61)..(62): /note="This region represents a CpG dinucleotide"
  misc_feature (61)..(61): /note="Nucleotide may be methylated to form 5-methylcytosine"
tctaccactttctagctgggtgacctagggcaatttactcacactcttcatgttttagttcgctcatctgtaagtgggacttgtcatcaactgtacattgtgagattttcctaggaataaat

SEQ ID NO: 9370 - DNA, 122 bp, Homo sapiens
  misc_feature (61)..(62): /note="This region represents a CpG dinucleotide"
  misc_feature (61)..(61): /note="Nucleotide may be methylated to form 5-methylcytosine"
tggcaattcattctaggaatgctcacaaacccgtaggccatatgaatcatcaaattagtacgcttggagaaattcaggatgaaaactaatttctgtgtattaaatttcattgaaccctgagc

SEQ ID NO: 9371 - DNA, 122 bp, Homo sapiens
  misc_feature (61)..(62): /note="This region represents a CpG dinucleotide"
  misc_feature (61)..(61): /note="Nucleotide may be methylated to form 5-methylcytosine"
ggcacttctaggcagctaccaggagatcccggttccaataatgaaatactacaatgttctcggcagcctgtcctctcagtgagctgtgtcctaggattcacccacaccaacatcatttcaag

SEQ ID NO: 9372 - DNA, 122 bp, Homo sapiens
  misc_feature (61)..(62): /note="This region represents a CpG dinucleotide"
  misc_feature (61)..(61): /note="Nucleotide may be methylated to form 5-methylcytosine"
tctcccttcaacttaaaactccctgcagctccggcctcagggaagctgagctgtcagccacgggtccctaggagagccctacttttgaatccccaggtaccgctgagggtctccttccaatg

SEQ ID NO: 9373 - DNA, 122 bp, Homo sapiens
  misc_feature (61)..(62): /note="This region represents a CpG dinucleotide"
  misc_feature (61)..(61): /note="Nucleotide may be methylated to form 5-methylcytosine"
ggagagatgcttcctgctcagatggcattaccgagcactccttccagcctcttgacatgtcgagccactgtttatctagctgtttggttgaggagtaatagagtcctgtgacctgatgtcac

SEQ ID NO: 9374 - DNA, 122 bp, Homo sapiens
  misc_feature (61)..(62): /note="This region represents a CpG dinucleotide"
  misc_feature (61)..(61): /note="Nucleotide may be methylated to form 5-methylcytosine"
gcctgtttttcctgctagtgtgagtaacaatgagcaagaaagctattctgtcttgatgtacgtggcaggaccgaaacctgcttcagcagtattcccctactatgtctgccacacatggttgt

SEQ ID NO: 9375 - DNA, 122 bp, Homo sapiens
  misc_feature (61)..(62): /note="This region represents a CpG dinucleotide"
  misc_feature (61)..(61): /note="Nucleotide may be methylated to form 5-methylcytosine"
aggctgaggcaggagaatcacatgaacccgggaggtggaggttgcagtgagctgagactgcgcaactgcactccagccagggcgacaaagcgtgactgtttcaaaaaaaaaaaaaaaagtta

SEQ ID NO: 9376 - DNA, 122 bp, Homo sapiens
  misc_feature (61)..(62): /note="This region represents a CpG dinucleotide"
  misc_feature (61)..(61): /note="Nucleotide may be methylated to form 5-methylcytosine"
taacatacacgactgtcctaatcttccaccaaataggagaggtgggcaaggcattgtttccgacatttggtagctgactggtcaaatggagacatagggatgaagggatatgtttacaatca

SEQ ID NO: 9377 - DNA, 122 bp, Homo sapiens
  misc_feature (61)..(62): /note="This region represents a CpG dinucleotide"
  misc_feature (61)..(61): /note="Nucleotide may be methylated to form 5-methylcytosine"
gccaggcgaaaaggctgggaatcaattctccaacagccacatatgatgcaagagtccactcgcaacaaagcctacgacacaccaaatatcagaaacgaaagtctctgagaacttgtgcaaat

SEQ ID NO: 9378 - DNA, 122 bp, Homo sapiens
  misc_feature (61)..(62): /note="This region represents a CpG dinucleotide"
  misc_feature (61)..(61): /note="Nucleotide may be methylated to form 5-methylcytosine"
agcaagctgacccagcttccatgatgcatgatgatgctggcaacatggcacagatttaaacgtgggccatgggggtgttgccttgcttaggtgagcagcttagtttgtcaaaatctcaatgg

SEQ ID NO: 9379 - DNA, 122 bp, Homo sapiens
  misc_feature (61)..(62): /note="This region represents a CpG dinucleotide"
  misc_feature (61)..(61): /note="Nucleotide may be methylated to form 5-methylcytosine"
ccatgcacaaagaaacagaaagcagaacctgttggcactttcgcacatctcctgtttgtccgccagactagctacagtattttgtactcaatgatgtgacttaagtatcagtaatgattact

SEQ ID NO: 9380 - DNA, 122 bp, Homo sapiens
  misc_feature (61)..(62): /note="This region represents a CpG dinucleotide"
  misc_feature (61)..(61): /note="Nucleotide may be methylated to form 5-methylcytosine"
ccaagtgggttctggctggagtagccttgcttctccagatttagcatcctgcagagccaccgagaaaataaaaaagctgggcttggaggctgcctagagggacaggtgggtgaagggtcacc

SEQ ID NO: 9381 - DNA, 122 bp, Homo sapiens
  misc_feature (61)..(62): /note="This region represents a CpG dinucleotide"
  misc_feature (61)..(61): /note="Nucleotide may be methylated to form 5-methylcytosine"
ctaggacaatgacacacacataataagtgctttataaatatttgtggagtgcatgaatgacggaattataggcaattaagacaaggttgcatatagctgtgtggcatcgctatacacaaggg

SEQ ID NO: 9382 - DNA, 122 bp, Homo sapiens
  misc_feature (61)..(62): /note="This region represents a CpG dinucleotide"
  misc_feature (61)..(61): /note="Nucleotide may be methylated to form 5-methylcytosine"
tttacagaggcaatagaacttaaccttataacaaataatctcaaatttgagtccccctcacgtgcacataaagtaggattgccagcaatggactgataattacaaacttccactgtgacaaa

SEQ ID NO: 9383 - DNA, 122 bp, Homo sapiens
  misc_feature (61)..(62): /note="This region represents a CpG dinucleotide"
  misc_feature (61)..(61): /note="Nucleotide may be methylated to form 5-methylcytosine"
tccgttctgacactgatttcagagatatggggcccataaacctaaccagattcacacatacgcatcgattaaacctgagaaattctgctccctcccacctccccttgcccacatgcccacaa

SEQ ID NO: 9384 - DNA, 122 bp, Homo sapiens
  misc_feature (61)..(62): /note="This region represents a CpG dinucleotide"
  misc_feature (61)..(61): /note="Nucleotide may be methylated to form 5-methylcytosine"
tggataataaactgtggtatattcagatagtgaaaattgacaggctagagctgtatgcaacgacatggatgattatcacaaacataatgcactgcttgaaacaccagttgtattgtgtgatt

SEQ ID NO: 9385 - DNA, 122 bp, Homo sapiens
  misc_feature (61)..(62): /note="This region represents a CpG dinucleotide"
  misc_feature (61)..(61): /note="Nucleotide may be methylated to form 5-methylcytosine"
tccatgccacgtcaatttacagccagccccctaccagagttctgtcgctcagggcaccagcggtgctttgtctattccagttggctggatgataaaaagaggtgtccaaaaacggaaataaa

SEQ ID NO: 9386 - DNA, 122 bp, Homo sapiens
  misc_feature (61)..(62): /note="This region represents a CpG dinucleotide"
  misc_feature (61)..(61): /note="Nucleotide may be methylated to form 5-methylcytosine"
ggagaacgagggggtggagggcatgccagccctaaggatgagcatgggtcaagccatgtccgcatcgaagtgcatcctgtggtttgagactagcaagatcatccacatgactaataccatca

SEQ ID NO: 9387 - DNA, 122 bp, Homo sapiens
  misc_feature (61)..(62): /note="This region represents a CpG dinucleotide"
  misc_feature (61)..(61): /note="Nucleotide may be methylated to form 5-methylcytosine"
agtctcatgacttgtgtctgattctgtggatctaagaaaatccagtttctccctaactaacgccagcatcctacagcctagcctctgcctggtgaacacagacagccttgccggggcctggc

SEQ ID NO: 9388 - DNA, 122 bp, Homo sapiens
  misc_feature (61)..(62): /note="This region represents a CpG dinucleotide"
  misc_feature (61)..(61): /note="Nucleotide may be methylated to form 5-methylcytosine"
cgccctgcacgcacctttacagatgcaggtggctgtttcctgtgttagactgcaagctcccgtgagctgggtccattgctcatcgttgacttggcctggcaaataatgacttggcctggtaa

SEQ ID NO: 9389 - DNA, 122 bp, Homo sapiens
  misc_feature (61)..(62): /note="This region represents a CpG dinucleotide"
  misc_feature (61)..(61): /note="Nucleotide may be methylated to form 5-methylcytosine"
tcttaagccatcaagtttgtggtaatttgtttcagcagccttggggaatgaatatatagccgaaaagggctttgtttgtgccaccccacagaaccagagaaccattaatgctagtctcatta

SEQ ID NO: 9390 - DNA, 122 bp, Homo sapiens
  misc_feature (61)..(62): /note="This region represents a CpG dinucleotide"
  misc_feature (61)..(61): /note="Nucleotide may be methylated to form 5-methylcytosine"
cacaaacagtactccgtggtattcgactatgaggtttactcaaaatgtcggtttgtgtcccgatattaaaagggagctctctccaagatccaagggtgggctccttactagatctttagact

SEQ ID NO: 9391 - DNA, 122 bp, Homo sapiens
  misc_feature (61)..(62): /note="This region represents a CpG dinucleotide"
  misc_feature (61)..(61): /note="Nucleotide may be methylated to form 5-methylcytosine"
ctggtgcgtgcgtgtgtgtgtgtgtgtgtgtgtgtgtgcgcgcgcgcgccctcgagcgcgcgttggggcctggcaagacacactcaaaccggactgcctgacaaatccccccttttcatcct

SEQ ID NO: 9392 - DNA, 122 bp, Homo sapiens
  misc_feature (61)..(62): /note="This region represents a CpG dinucleotide"
  misc_feature (61)..(61): /note="Nucleotide may be methylated to form 5-methylcytosine"
ttagctgtaaggaaagctgatcctatgacacatgctttaggtatgtccgcccctgggaaacgtgaccttcaaggtttgcgttatagaactttattcgcttcaaaagatggagaacacttttg

SEQ ID NO: 9393 - DNA, 122 bp, Homo sapiens
  misc_feature (61)..(62): /note="This region represents a CpG dinucleotide"
  misc_feature (61)..(61): /note="Nucleotide may be methylated to form 5-methylcytosine"
gtgtggtctgattgcagagtgacggggcatatgattagggcattgtcgcacgccgtgtgccgggctgagggctgatgagcacaccatcgcgttggagcacagccagaccgcgcacgtgacca

SEQ ID NO: 9394 - DNA, 122 bp, Homo sapiens
  misc_feature (61)..(62): /note="This region represents a CpG dinucleotide"
  misc_feature (61)..(61): /note="Nucleotide may be methylated to form 5-methylcytosine"
cagcgggggcggaataagcgagctggggaggcggccgcggggctgcctgttgcccagcaacgatgccagccgcggcctgtgctcccccaaaagcccgaaagcaccgcggcaggcagccagga

SEQ ID NO: 9395 - DNA, 122 bp, Homo sapiens
  misc_feature (61)..(62): /note="This region represents a CpG dinucleotide"
  misc_feature (61)..(61): /note="Nucleotide may be methylated to form 5-methylcytosine"
cccaatatatgttctcctcttgagagattcttaaagcacaattctctgacttcacagatacgtcgtctgatgcaatacagatactttttagtatcatatggggttagcgtctagaaaaagtg

SEQ ID NO: 9396 - DNA, 122 bp, Homo sapiens
  misc_feature (61)..(62): /note="This region represents a CpG dinucleotide"
  misc_feature (61)..(61): /note="Nucleotide may be methylated to form 5-methylcytosine"
catcaagacttaacatcccatccctcccactcccagctgtcattccccccccccaatcttcggcccactccctgtccaggggcccaggtccccagcgcgggcaacccctctgtccccattcc

SEQ ID NO: 9397 - DNA, 122 bp, Homo sapiens
  misc_feature (61)..(62): /note="This region represents a CpG dinucleotide"
  misc_feature (61)..(61): /note="Nucleotide may be methylated to form 5-methylcytosine"
tctggagacacatttaggacatcagaagtagcaccaccaggcacagcagcccctcctccccgcccacaccagatgtgaggcggcccccacaatgttctgtcaacagaggctgttctctctca

SEQ ID NO: 9398 - DNA, 122 bp, Homo sapiens
  misc_feature (61)..(62): /note="This region represents a CpG dinucleotide"
  misc_feature (61)..(61): /note="Nucleotide may be methylated to form 5-methylcytosine"
agtacctgagtcatatcatcagtctcttgaacaaaccggacaccagttcttgatctcattcgtttaataccctgtggatccccatagtccttgagaggtgaggtaggtggaaaatgatggag

SEQ ID NO: 9399 - DNA, 122 bp, Homo sapiens
  misc_feature (61)..(62): /note="This region represents a CpG dinucleotide"
  misc_feature (61)..(61): /note="Nucleotide may be methylated to form 5-methylcytosine"
ccatgtgggtgagtcatctcacaagcagatactcaagtatatcaagccttcagatgactgcggcccaagccaatatcttgagtgcatcttcttgagagaccctgagccaggaccatctagca

SEQ ID NO: 9400 - DNA, 122 bp, Homo sapiens
  misc_feature (61)..(62): /note="This region represents a CpG dinucleotide"
  misc_feature (61)..(61): /note="Nucleotide may be methylated to form 5-methylcytosine"
tggtgatgagactggtgatccacataattaatataagctcacacagaagtaaacatgaaacgattaaacaggaagcctttaaccaggcagcatgaagcagggaggtgggggaggaattaatg

SEQ ID NO: 9401 - DNA, 122 bp, Homo sapiens
  misc_feature (61)..(62): /note="This region represents a CpG dinucleotide"
  misc_feature (61)..(61): /note="Nucleotide may be methylated to form 5-methylcytosine"
caggccaccagggcatgggcaggactcagcccgccatgggcgcctgctcagcgggaaatgcgattcccaggggtcactggttctcaactgggaggaaacacctgtcatctcttcaagcctca

SEQ ID NO: 9402 - DNA, 122 bp, Homo sapiens
  misc_feature (61)..(62): /note="This region represents a CpG dinucleotide"
  misc_feature (61)..(61): /note="Nucleotide may be methylated to form 5-methylcytosine"
tcaccatggtcacccccagggacacgaccagcagcccctccggctccacccctatcccagcgtttccgaatccgacccaccctacaggttgggagccctcatggctgctgtcccggggccac

SEQ ID NO: 9403 - DNA, 122 bp, Homo sapiens
  misc_feature (61)..(62): /note="This region represents a CpG dinucleotide"
  misc_feature (61)..(61): /note="Nucleotide may be methylated to form 5-methylcytosine"
aaacttgagatcatccttcagctttggagataatagaactgagcggtcatttcctccccgcgctgagggagctgagtgatggagaggcggcataggtcctccgaggaggccccgtgagcccc

SEQ ID NO: 9404 - DNA, 122 bp, Homo sapiens
  misc_feature (61)..(62): /note="This region represents a CpG dinucleotide"
  misc_feature (61)..(61): /note="Nucleotide may be methylated to form 5-methylcytosine"
acctgagggtgtggccttacgagctcccctcaacacacacagtcctccccagagtaagcacgggtcttgaggatagagaggactattctctgaatgcttgacttatccagaaactgagagac

SEQ ID NO: 9405 - DNA, 122 bp, Homo sapiens
  misc_feature (61)..(62): /note="This region represents a CpG dinucleotide"
  misc_feature (61)..(61): /note="Nucleotide may be methylated to form 5-methylcytosine"
tcaggttccccagcaccgccactgccatctgttatgtctcctagcagggttgcagctagtcgactggctcagcaaggaagtgatttaattgttcctgcaggtattcactgcactgattggat

SEQ ID NO: 9406 - DNA, 122 bp, Homo sapiens
  misc_feature (61)..(62): /note="This region represents a CpG dinucleotide"
  misc_feature (61)..(61): /note="Nucleotide may be methylated to form 5-methylcytosine"
gtgcacatgaagtcaaagtggaagtaagctattaagatcttagtatgagtcaaaaagggccggctgacagtccttggctatatgactgggagcaagtgccttaacctttctcaacatcagtt

SEQ ID NO: 9407 - DNA, 122 bp, Homo sapiens
  misc_feature (61)..(62): /note="This region represents a CpG dinucleotide"
  misc_feature (61)..(61): /note="Nucleotide may be methylated to form 5-methylcytosine"
aagcctcagtacaagccttgctcatagcaaaagaaggcacaggccttacttgacattatacgcagaaaccctgatatcctacaggacctcctaatggctgaagcctagaataccattatgag

SEQ ID NO: 9408 - DNA, 122 bp, Homo sapiens
  misc_feature (61)..(62): /note="This region represents a CpG dinucleotide"
  misc_feature (61)..(61): /note="Nucleotide may be methylated to form 5-methylcytosine"
tccctctctgaggcttacgtctgcctggatctttttcttttcagtagagcaaggcagtttcggcctccacctgaaagtggaagtatagggtcaggcacatggacctcctagccctgaggatc

SEQ ID NO: 9409 - DNA, 122 bp, Homo sapiens
  misc_feature (61)..(62): /note="This region represents a CpG dinucleotide"
  misc_feature (61)..(61): /note="Nucleotide may be methylated to form 5-methylcytosine"
aactctcggtggcgctgctggtggtgcctgagaagtcgctgttgcagtgcttgcatcctccgcatgctaatgaagctgtgatgtcagcaagtcagtcacggcatctggacgtcccatcctgc

SEQ ID NO: 9410 - DNA, 122 bp, Homo sapiens
  misc_feature (61)..(62): /note="This region represents a CpG dinucleotide"
  misc_feature (61)..(61): /note="Nucleotide may be methylated to form 5-methylcytosine"
cagtggatggaattactgtggttgtactgaagccagctccttccttttgtatattcagttcgtggttggtcatggctggctgccctggctttctccaagactggccttactgggatgggata

SEQ ID NO: 9411 - DNA, 122 bp, Homo sapiens
  misc_feature (61)..(62): /note="This region represents a CpG dinucleotide"
  misc_feature (61)..(61): /note="Nucleotide may be methylated to form 5-methylcytosine"
gcgccactccgcggcctaccgcgcagatcctctacgtgtgtcctcgcgagacaagctcaccgaaatggccgcgtccagtcaaggaaacattgagggaaattttgagtcactggaccttacgg

SEQ ID NO: 9412 - DNA, 122 bp, Homo sapiens
  misc_feature (61)..(62): /note="This region represents a CpG dinucleotide"
  misc_feature (61)..(61): /note="Nucleotide may be methylated to form 5-methylcytosine"
ctccagtcctcttggaggtgaagagacctgaagggtaagggggtgtggaggttgtgaaggcgggaaggggggtagccccttcaccaatgtaaacaaggatgtgggttctgcggccacactct

SEQ ID NO: 9413 - DNA, 122 bp, Homo sapiens
  misc_feature (61)..(62): /note="This region represents a CpG dinucleotide"
  misc_feature (61)..(61): /note="Nucleotide may be methylated to form 5-methylcytosine"
gttctcattcctgtcatcttattccattcttaccacagtgctcagaagcagggagggtggcggtttggcaggatagatgtcatctccatgttactaataaggaaactgaggcccagggaagt

SEQ ID NO: 9414 - DNA, 122 bp, Homo sapiens
  misc_feature (61)..(62): /note="This region represents a CpG dinucleotide"
  misc_feature (61)..(61): /note="Nucleotide may be methylated to form 5-methylcytosine"
aaagtgttcatgtgtgtgtgtttgtgtgatttaattaaattactattctttttttccttccgggaacctttcccaaaatgttagcagagggacagagaaacattggcaacttttgtttcact

SEQ ID NO: 9415 - DNA, 122 bp, Homo sapiens
  misc_feature (61)..(62): /note="This region represents a CpG dinucleotide"
  misc_feature (61)..(61): /note="Nucleotide may be methylated to form 5-methylcytosine"
aaaatctccccaaatcactgcaaatgatgcatctcaggttaacaaccatcttgtactaaacgtaattaactgtctaatgatgttgtatttaaagttcatatgtgtactcacaactagccttc

SEQ ID NO: 9416 - DNA, 122 bp, Homo sapiens
  misc_feature (61)..(62): /note="This region represents a CpG dinucleotide"
  misc_feature (61)..(61): /note="Nucleotide may be methylated to form 5-methylcytosine"
ttttgtactttttctctaaaccacatcaaaaccaggaaaccagtcagcctgcctgtctcacgagcccctatttcctgttgtagatggtgaccagcttgtcctggtttgcttggaactgtcct

SEQ ID NO: 9417 - DNA, 122 bp, Homo sapiens
  misc_feature (61)..(62): /note="This region represents a CpG dinucleotide"
  misc_feature (61)..(61): /note="Nucleotide may be methylated to form 5-methylcytosine"
ttctgtgaatattccagtacaagtttttgcatggacatatgtttttacctctcttggttacgtacctaggattagaattgctgggttacatggtgactcttaagtttaacattttgaggaac

SEQ ID NO: 9418 - DNA, 122 bp, Homo sapiens
  misc_feature (61)..(62): /note="This region represents a CpG dinucleotide"
  misc_feature (61)..(61): /note="Nucleotide may be methylated to form 5-methylcytosine"
gaatgttgaggatgtctcctgacactgtgccaaaggctcctaaacatttaaaagcaggtacgtagaaaaaggagatagtaaatgtcctacttacggataccttgtgaaaaaatatcttgtta

SEQ ID NO: 9419 - DNA, 122 bp, Homo sapiens
  misc_feature (61)..(62): /note="This region represents a CpG dinucleotide"
  misc_feature (61)..(61): /note="Nucleotide may be methylated to form 5-methylcytosine"
tggggctccgagctcgtcctagagcctcacctggtctccccagacctgcttcccataggacggtactcgtgaaacaccagtttgtccaggaccccatcaggcatcctccttcccgcatccgc

SEQ ID NO: 9420 - DNA, 122 bp, Homo sapiens
  misc_feature (61)..(62): /note="This region represents a CpG dinucleotide"
  misc_feature (61)..(61): /note="Nucleotide may be methylated to form 5-methylcytosine"
ctggcacttattgtctagtactcaaacaaagatagcatagtttgaggggttacgctgctccgtcagatcattgtttttgtcatttgtattctctccttccttgttgccagagtctgctgtag

SEQ ID NO: 9421 - DNA, 122 bp, Homo sapiens
  misc_feature (61)..(62): /note="This region represents a CpG dinucleotide"
  misc_feature (61)..(61): /note="Nucleotide may be methylated to form 5-methylcytosine"
gtgtattttcaatggctaacatagttaaaaccaaagtgaaatttttattatgtacataatcgaatgcaaattgtgtcaggctagtttaaaaaatatgaatgtcagtcctggcttggcaattt

SEQ ID NO: 9422 - DNA, 122 bp, Homo sapiens
  misc_feature (61)..(62): /note="This region represents a CpG dinucleotide"
  misc_feature (61)..(61): /note="Nucleotide may be methylated to form 5-methylcytosine"
cctccccattcctgtgtggtttctgaggaggggcagtccttgcccacctacttgtggacgcgcttgtgtggacttggccctgctcgtcatctatcctggtgctttaggacaacaccagttcc

SEQ ID NO: 9423 - DNA, 122 bp, Homo sapiens
  misc_feature (61)..(62): /note="This region represents a CpG dinucleotide"
  misc_feature (61)..(61): /note="Nucleotide may be methylated to form 5-methylcytosine"
aagttttaaatacccaagaataacaaattacttccaagcactctacagcatttcagaatacgtttccatacaaatgaaatgttaattacaaaatgtagcctggtaaaagaataaacagtaaa

SEQ ID NO: 9424 - DNA, 122 bp, Homo sapiens
  misc_feature (61)..(62): /note="This region represents a CpG dinucleotide"
  misc_feature (61)..(61): /note="Nucleotide may be methylated to form 5-methylcytosine"
cagagactccgtctcaaaaaaaataaataaataaataataaaaaaataaaattggccaggcgttgggggccagcaatccgggtgattcgatacatgccaaagtttgataaccactggcttag

SEQ ID NO: 9425 - DNA, 122 bp, Homo sapiens
  misc_feature (61)..(62): /note="This region represents a CpG dinucleotide"
  misc_feature (61)..(61): /note="Nucleotide may be methylated to form 5-methylcytosine"
tactgcaatcacacctcaggagcaaagatggccaagatctatttcaattcttagatatctcgaggaaccgcagatgactgtaactatggaagatagccaatctgtagtaatgaagaagcgca

SEQ ID NO: 9426 - DNA, 122 bp, Homo sapiens
  misc_feature (61)..(62): /note="This region represents a CpG dinucleotide"
  misc_feature (61)..(61): /note="Nucleotide may be methylated to form 5-methylcytosine"
gtagtcctgttaggaatggtcagcaaatgccatagtaactgggaatatagcttaagagaacgctgtttttgtgattttctaggaagagaggatcttcccccatcccctacagtgagcatctc

SEQ ID NO: 9427 - DNA, 122 bp, Homo sapiens
  misc_feature (61)..(62): /note="This region represents a CpG dinucleotide"
  misc_feature (61)..(61): /note="Nucleotide may be methylated to form 5-methylcytosine"
tggactctaagactgcattcaattctagttctaccacttggacaaggcactttttttcttcgggctttttctctgtagaaaacgaggagtaatatctgcctcataaggctgcgggcttaact

SEQ ID NO: 9428 - DNA, 122 bp, Homo sapiens
  misc_feature (61)..(62): /note="This region represents a CpG dinucleotide"
  misc_feature (61)..(61): /note="Nucleotide may be methylated to form 5-methylcytosine"
tgttgaatacctgcatgggactctgagtcttggtgttcgaagagggaaaatggaaatactcggccctacattgcctaagcccctcactagggagagctgtaagctcttgggaagggcttgcc

SEQ ID NO: 9429 - DNA, 122 bp, Homo sapiens
  misc_feature (61)..(62): /note="This region represents a CpG dinucleotide"
  misc_feature (61)..(61): /note="Nucleotide may be methylated to form 5-methylcytosine"
ggttttcaggtcttaactttttgccaaagaaaacaaatgtcattttacttgtttttttaacggagacacaagtaatgtgtgaagatgctgctattgttgtaaaggagttctgacagtgaaaa

SEQ ID NO: 9430 - DNA, 122 bp, Homo sapiens
  misc_feature (61)..(62): /note="This region represents a CpG dinucleotide"
  misc_feature (61)..(61): /note="Nucleotide may be methylated to form 5-methylcytosine"
gtcctatgtttacttctatacaagctttgacatattaaccatctctaatgggaacatatacgcaaaccaaaattgtcaaatctgttggttggtgtgaacatatgcaatactttatttattca

SEQ ID NO: 9431 - DNA, 122 bp, Homo sapiens
  misc_feature (61)..(62): /note="This region represents a CpG dinucleotide"
  misc_feature (61)..(61): /note="Nucleotide may be methylated to form 5-methylcytosine"
atctccccatgggagcttcctcatagcatggtggtctcagagtcatcagactttctacatcgtggctggcttcgagagagaaagctaaaattctgaaattgatatgcaaatgcacaggacct

SEQ ID NO: 9432 - DNA, 122 bp, Homo sapiens
  misc_feature (61)..(62): /note="This region represents a CpG dinucleotide"
  misc_feature (61)..(61): /note="Nucleotide may be methylated to form 5-methylcytosine"
taattgtagatggatttccaaaccacagaacacttgaagatatactacaggtggcactcacgcttgacacaagttttacttcagatgttagagatttctgcatgtattatcatcatgttctc

SEQ ID NO: 9433 - DNA, 122 bp, Homo sapiens
  misc_feature (61)..(62): /note="This region represents a CpG dinucleotide"
  misc_feature (61)..(61): /note="Nucleotide may be methylated to form 5-methylcytosine"
tcgaactcctggcctccagcgatcacccaatttcagcctcccaaagtgctgggattaccgcgcccagcgtgaactgctttgaaccatattgtctacttgactttcagacagccagatggtgc

SEQ ID NO: 9434 - DNA, 122 bp, Homo sapiens
  misc_feature (61)..(62): /note="This region represents a CpG dinucleotide"
  misc_feature (61)..(61): /note="Nucleotide may be methylated to form 5-methylcytosine"
ttgtttgaggtggcatatttgtgtgcagcataatattcagcatctgctttcgctttctctcgggccaggaatgcagcatctagcaaataaacaaaggaaaggtgtcaatccattccctcagc

SEQ ID NO: 9435 - DNA, 122 bp, Homo sapiens
  misc_feature (61)..(62): /note="This region represents a CpG dinucleotide"
  misc_feature (61)..(61): /note="Nucleotide may be methylated to form 5-methylcytosine"
ttaattcattctatccaggacattcatggacgcttaataggatgcagacagcacgtcaggcgttgtgggaagcacggccgctactgacagaagggccccacaagtcactcggcctgtacttc

SEQ ID NO: 9436 - DNA, 122 bp, Homo sapiens
  misc_feature (61)..(62): /note="This region represents a CpG dinucleotide"
  misc_feature (61)..(61): /note="Nucleotide may be methylated to form 5-methylcytosine"
ttttggcacctccaggaatctgtgggctccgatatccttatcagcagtggcaacaagaaacgctccagccacaaaactccaagtgaaggcttgtgggctagggtgatcacagcttctacata

SEQ ID NO: 9437 - DNA, 122 bp, Homo sapiens
  misc_feature (61)..(62): /note="This region represents a CpG dinucleotide"
  misc_feature (61)..(61): /note="Nucleotide may be methylated to form 5-methylcytosine"
aatatgatgaaaccctgcctctactaaaaatacaaacaattagtcgggcatggtggcacacgtctgtaatcccagctactcgggaagctgaggcacaagaatcgcttgaactcaggaagtgg

SEQ ID NO: 9438 - DNA, 122 bp, Homo sapiens
  misc_feature (61)..(62): /note="This region represents a CpG dinucleotide"
  misc_feature (61)..(61): /note="Nucleotide may be methylated to form 5-methylcytosine"
cctgctaggaaacaaaaattgtcaaagacaaaatgctaatggagccatgtctctgagcaacgctgcattatatatgtatgagactgtaggagagattacaccaaagaggcatcctgtaacca

SEQ ID NO: 9439 - DNA, 122 bp, Homo sapiens
  misc_feature (61)..(62): /note="This region represents a CpG dinucleotide"
  misc_feature (61)..(61): /note="Nucleotide may be methylated to form 5-methylcytosine"
ctagatgcattcgagagaatagcaggtggtcattgtttactgtgctaaagtgagccactccgtttgagacagctcattttggactcaagctgaatgccatgcctgagtgatctgacttctaa

SEQ ID NO: 9440 - DNA, 122 bp, Homo sapiens
  misc_feature (61)..(62): /note="This region represents a CpG dinucleotide"
  misc_feature (61)..(61): /note="Nucleotide may be methylated to form 5-methylcytosine"
cttttcgggtcatctagatttctcaactcaccggaagcatgcacacgaatgttgagttcacgtgttcatctgggcaaaacgctttctccccaggacttccctgtccttaggggcagcctgac

SEQ ID NO: 9441 - DNA, 122 bp, Homo sapiens
  misc_feature (61)..(62): /note="This region represents a CpG dinucleotide"
  misc_feature (61)..(61): /note="Nucleotide may be methylated to form 5-methylcytosine"
gagcacctgggcaccacatgtgccctctgctcggggaccgctgttgacccgacaggcgcacgttccacacccacaccgtcgctgctttgctcagagggaccagggctggaggccgagctgag

SEQ ID NO: 9442 - DNA, 122 bp, Homo sapiens
  misc_feature (61)..(62): /note="This region represents a CpG dinucleotide"
  misc_feature (61)..(61): /note="Nucleotide may be methylated to form 5-methylcytosine"
gtcacttttctatagcaaagctctctgtgctttactggcttcatttgtagcaggacaagccgtggacaaaacccctcagacaccgggttaaagaaggaagtggctttatttggccaggagtg

SEQ ID NO: 9443 - DNA, 122 bp, Homo sapiens
  misc_feature (61)..(62): /note="This region represents a CpG dinucleotide"
  misc_feature (61)..(61): /note="Nucleotide may be methylated to form 5-methylcytosine"
aaagctctatgagatccgaatgagcagcatccggcctcagagctaatctgtcagattttgcgtctgagtcagaacttactggttattaatgctgtctgtctttgtggccaagagtctagcaa

SEQ ID NO: 9444 - DNA, 122 bp, Homo sapiens
  misc_feature (61)..(62): /note="This region represents a CpG dinucleotide"
  misc_feature (61)..(61): /note="Nucleotide may be methylated to form 5-methylcytosine"
taatcaaaggatatcaaagctaaaaagaatggcatttctcttgtctgaatcttttgtttacggacagagtagctgccaggaaagagaagtgactcaacaaaagatacttggcaagccaatgg

SEQ ID NO: 9445 - DNA, 122 bp, Homo sapiens
  misc_feature (61)..(62): /note="This region represents a CpG dinucleotide"
  misc_feature (61)..(61): /note="Nucleotide may be methylated to form 5-methylcytosine"
ctcactgcctggatgagttcatggacaaacatgcatggcgtgtctgtccatctgcattagcgctgagcagaaaagatacggacgcacagcagctcatggtagcagtccacgcacgtcgtcct

SEQ ID NO: 9446 - DNA, 122 bp, Homo sapiens
  misc_feature (61)..(62): /note="This region represents a CpG dinucleotide"
  misc_feature (61)..(61): /note="Nucleotide may be methylated to form 5-methylcytosine"
ttctaggaaggtgcccgtacttttccttagatgagcactctaccatttaaagggttttcacgttcattgtctcagttgataataaaccagtcccaggttatggggaatccctcctttctttc

SEQ ID NO: 9447 - DNA, 122 bp, Homo sapiens
  misc_feature (61)..(62): /note="This region represents a CpG dinucleotide"
  misc_feature (61)..(61): /note="Nucleotide may be methylated to form 5-methylcytosine"
agagagaaaagggacgtgctgcagggtttatcagagaagccaggcaggaaggatcagggacgcagccatccactcaggcaatcacaggcagtgggttgggacccccgaaaggaaaaaaaaag

SEQ ID NO: 9448 - DNA, 122 bp, Homo sapiens
  misc_feature (61)..(62): /note="This region represents a CpG dinucleotide"
  misc_feature (61)..(61): /note="Nucleotide may be methylated to form 5-methylcytosine"
tgggattcagagctggggtgtagaatgcaaccttgcactgtgtggatttaggaaagacaccgcccctctctgattgtcagttcttcatttacaaagtgggaagagaggtccatctctgaccc

SEQ ID NO: 9449 - DNA, 122 bp, Homo sapiens
  misc_feature (61)..(62): /note="This region represents a CpG dinucleotide"
  misc_feature (61)..(61): /note="Nucleotide may be methylated to form 5-methylcytosine"
ttttaaatagtatttacacataatgaaatggttataaaaaatctaagcttattttcaacacgtaaagagatgtttctgagtgatgtttgtgtgttgtaaatttaagcaacctttccttaact

SEQ ID NO: 9450 - DNA, 122 bp, Homo sapiens
  misc_feature (61)..(62): /note="This region represents a CpG dinucleotide"
  misc_feature (61)..(61): /note="Nucleotide may be methylated to form 5-methylcytosine"
ctccctgctctgtcttcaagtcatcttcttgtttgtcttgctccatttgggctgttatatcgaaataccataaactgggtggtttgtaagcaacagacattattttctcagggttctagagg

SEQ ID NO: 9451 - DNA, 122 bp, Homo sapiens
  misc_feature (61)..(62): /note="This region represents a CpG dinucleotide"
  misc_feature (61)..(61): /note="Nucleotide may be methylated to form 5-methylcytosine"
agtcgggcagcctgtgaaaggccagatatccggctatcatatgcaggccagtatccagagcgggtcatacaaatagagcctgacacgaccacatagactcaatgcttcctgcacgctggaat

SEQ ID NO: 9452 - DNA, 122 bp, Homo sapiens
  misc_feature (61)..(62): /note="This region represents a CpG dinucleotide"
  misc_feature (61)..(61): /note="Nucleotide may be methylated to form 5-methylcytosine"
gaatctctataaggagaaggaaggaagttgtttttagcaaccatcatttccctgtcttaacgtgacactacttctgaacctcaaacactgaaactaggttggagcatttgtatgtgatactg

SEQ ID NO: 9453 - DNA, 122 bp, Homo sapiens
  misc_feature (61)..(62): /note="This region represents a CpG dinucleotide"
  misc_feature (61)..(61): /note="Nucleotide may be methylated to form 5-methylcytosine"
atttaaatgctgtccatttccttgccgataataacttggaaggcaattttaatagccagacggatgctgaatggagagctctgtttaaactgtgtcttccataaatagaaacaaagtgcaga

SEQ ID NO: 9454 - DNA, 122 bp, Homo sapiens
  misc_feature (61)..(62): /note="This region represents a CpG dinucleotide"
  misc_feature (61)..(61): /note="Nucleotide may be methylated to form 5-methylcytosine"
gaatttttctgtaggaaaaattcagaagtgtggcatgtgctcacttttagaaaattctaacgaaagacatgaacagccagaaatggaaaggaacagacttgtgcaagaaaagaacctttctc

SEQ ID NO: 9455 - DNA, 122 bp, Homo sapiens
  misc_feature (61)..(62): /note="This region represents a CpG dinucleotide"
  misc_feature (61)..(61): /note="Nucleotide may be methylated to form 5-methylcytosine"
agccaggttttgaacccagttctgtttggttttaatgccagatacttaaccattgtagcacgttggcttcctcattgatctgcctagtaaacaggtatatgatatgtgtaaaatactttaca

SEQ ID NO: 9456 - DNA, 122 bp, Homo sapiens
  misc_feature (61)..(62): /note="This region represents a CpG dinucleotide"
  misc_feature (61)..(61): /note="Nucleotide may be methylated to form 5-methylcytosine"
catgtgggtgaggtaccttggaaacagatctcccagcactaagcaagccagaagacatctcgacagcaatcccgtgagaaactgtgggacagaaccacccagctaagcagctcgcagattcg

SEQ ID NO: 9457 - DNA, 122 bp, Homo sapiens
  misc_feature (61)..(62): /note="This region represents a CpG dinucleotide"
  misc_feature (61)..(61): /note="Nucleotide may be methylated to form 5-methylcytosine"
tgacgcatgactggtgaagttagtgactcctggtgactgactcagtccccaacctctgcacggaggtcacaggttccagcaagtcccagcctcgaatcctgccttggtctttctgccaccag

SEQ ID NO: 9458 - DNA, 122 bp, Homo sapiens
  misc_feature (61)..(62): /note="This region represents a CpG dinucleotide"
  misc_feature (61)..(61): /note="Nucleotide may be methylated to form 5-methylcytosine"
gctaatgctttctgtgatggacaactaggaacaagctcaagctacaaagcaaacagagatcgtaattcatttttgaaatcaataaagggatgatcaagtggcagaggaggagttgttagctg

SEQ ID NO: 9459 - DNA, 122 bp, Homo sapiens
  misc_feature (61)..(62): /note="This region represents a CpG dinucleotide"
  misc_feature (61)..(61): /note="Nucleotide may be methylated to form 5-methylcytosine"
catggaattttatcttctactaccaggagcacacatgtcttacaaggctttcagcatgcccgccacttcttgttcctcatgtgcaatcagcatgatgtcattgacataatggattgatgtaa

SEQ ID NO: 9460 - DNA, 122 bp, Homo sapiens
  misc_feature (61)..(62): /note="This region represents a CpG dinucleotide"
  misc_feature (61)..(61): /note="Nucleotide may be methylated to form 5-methylcytosine"
aagatgtctagtctctctgctgagccactttccttaatgtcttgaatgaattttcacagacgtggcatgtagcagtgaaactgttgttaccagtggttaagtttacatttgaggcaccccga

SEQ ID NO: 9461 - DNA, 122 bp, Homo sapiens
  misc_feature (61)..(62): /note="This region represents a CpG dinucleotide"
  misc_feature (61)..(61): /note="Nucleotide may be methylated to form 5-methylcytosine"
cactttaaagatctcagttcattgtcttctagcttccattgtttctgttgcaaaatcagccgtcagacttactgttgcttcttggaaggtagtatgactttcttgttcagctgcctttcttt

SEQ ID NO: 9462 - DNA, 122 bp, Homo sapiens
  misc_feature (61)..(62): /note="This region represents a CpG dinucleotide"
  misc_feature (61)..(61): /note="Nucleotide may be methylated to form 5-methylcytosine"
ttggagtatcccatgagcttatccaaatcccttatgaaaatctggtttataggccaagcacggtggctcatgtaatcctagcagtttgggaggccggagtgggtgggttgcctgagctcagg

SEQ ID NO: 9463 - DNA, 122 bp, Homo sapiens
  misc_feature (61)..(62): /note="This region represents a CpG dinucleotide"
  misc_feature (61)..(61): /note="Nucleotide may be methylated to form 5-methylcytosine"
gtacttcccgctagctcagattcacttcgtcagtggcgagcgactcatcactgacccggccggcgagatggggcgagtccaggacttcctgggcattaagagattcatcacggacaagcact

SEQ ID NO: 9464 - DNA, 122 bp, Homo sapiens
  misc_feature (61)..(62): /note="This region represents a CpG dinucleotide"
  misc_feature (61)..(61): /note="Nucleotide may be methylated to form 5-methylcytosine"
tcagctgcatcctgggatgagaaaacacatgggacagagccatagcagactcatagcctacgtgtatcatgagcaagaaatacattgatgacgtaacaactgagattttgggggattgtttg

SEQ ID NO: 9465 - DNA, 122 bp, Homo sapiens
  misc_feature (61)..(62): /note="This region represents a CpG dinucleotide"
  misc_feature (61)..(61): /note="Nucleotide may be methylated to form 5-methylcytosine"
tggaggctacaagattgaccatccctaaactactcctaagatcaatggcttggctgggcacgggtggctcaagcctgtaatcccagcactttgggaggcggaggcgggtggatcacctgagg

SEQ ID NO: 9466 - DNA, 122 bp, Homo sapiens
  misc_feature (61)..(62): /note="This region represents a CpG dinucleotide"
  misc_feature (61)..(61): /note="Nucleotide may be methylated to form 5-methylcytosine"
ggagagcagcaaccaggtgttcctgagcccgtcacagaaggagctgccatcagtgcctctcgtgacctgcagtatttgggcctgtggaggtggtgtttgcagagccaacgttggcctccatc

SEQ ID NO: 9467 - DNA, 122 bp, Homo sapiens
  misc_feature (61)..(62): /note="This region represents a CpG dinucleotide"
  misc_feature (61)..(61): /note="Nucleotide may be methylated to form 5-methylcytosine"
caagaattacaaaaatgtgacagacaaatacaaagtgagcacacgctgttggaaaaatggcgtgcaaagacttgcacaacacagggttgacataaatcttcaatatgttaaaaaaaaaaaac

SEQ ID NO: 9468 - DNA, 122 bp, Homo sapiens
  misc_feature (61)..(62): /note="This region represents a CpG dinucleotide"
  misc_feature (61)..(61): /note="Nucleotide may be methylated to form 5-methylcytosine"
gaaaccatgagaaatagtcattgtttgttaagtcattatattttgagatgatttgtgacacggcaataaataactaatagagggtaaacatctattggctcatgtgtcaggatttgaggaca

SEQ ID NO: 9469 - DNA, 122 bp, Homo sapiens
  misc_feature (61)..(62): /note="This region represents a CpG dinucleotide"
  misc_feature (61)..(61): /note="Nucleotide may be methylated to form 5-methylcytosine"
cactagacatttagcaacccagaagccaaacccacaagggaaaggtgtgaccagggaccacgcagtggacaagtttcagtgactgatggaaagctcgttataaccaaatgacatctcttcac

SEQ ID NO: 9470 - DNA, 122 bp, Homo sapiens
  misc_feature (61)..(62): /note="This region represents a CpG dinucleotide"
  misc_feature (61)..(61): /note="Nucleotide may be methylated to form 5-methylcytosine"
ggggagctgagggcccttctgtgtgtgaaggagtcgcagggcccagggcagagggtcccccgtcttttgggcagaccagagaaggctccggagaccaggcgacatttagggagaacctgagg

SEQ ID NO: 9471 - DNA, 122 bp, Homo sapiens
  misc_feature (61)..(62): /note="This region represents a CpG dinucleotide"
  misc_feature (61)..(61): /note="Nucleotide may be methylated to form 5-methylcytosine"
acacaaaacatattctaaagagaaatatatattccgattacagaatgcacatatgagacacgggtgataagacattgatcatgccattcaatagtgaatatcaaagttgtgttaggtttgtt

SEQ ID NO: 9472 - DNA, 122 bp, Homo sapiens
  misc_feature (61)..(62): /note="This region represents a CpG dinucleotide"
  misc_feature (61)..(61): /note="Nucleotide may be methylated to form 5-methylcytosine"
atttcctgggaacgtgaatggaatgagcagcagggtgacatttactcaaaggctgggtgacgagtgtcagtaagtgaactacaaatgggaaggttacagaaaaatacttcaaagaatgaagt

SEQ ID NO: 9473 - DNA, 122 bp, Homo sapiens
  misc_feature (61)..(62): /note="This region represents a CpG dinucleotide"
  misc_feature (61)..(61): /note="Nucleotide may be methylated to form 5-methylcytosine"
tcaactagagactgcaggattatttaattttctctttccaaccagtagtaaccgtgctaccgtgggagcactttatttctccatctgttagactataaaatcatggaacatttttcatgtct

SEQ ID NO: 9474 - DNA, 122 bp, Homo sapiens
  misc_feature (61)..(62): /note="This region represents a CpG dinucleotide"
  misc_feature (61)..(61): /note="Nucleotide may be methylated to form 5-methylcytosine"
gagtcatcatttccctataaataaaaaagatcaaactagtttatcagtctcataagatgacgggcaggagcaatgatttagtatttaccatatgcactactggctgtatgttattatcatta

SEQ ID NO: 9475 - DNA, 122 bp, Homo sapiens
  misc_feature (61)..(62): /note="This region represents a CpG dinucleotide"
  misc_feature (61)..(61): /note="Nucleotide may be methylated to form 5-methylcytosine"
gcataatgaacacacacccatggcctctccccatgtgccagggcatcctcccacacaggccgaaagtgctctgcagaacaaagtgcttttggtccacaaaacgcctcccagctcttgcctgc

SEQ ID NO: 9476 - DNA, 122 bp, Homo sapiens
  misc_feature (61)..(62): /note="This region represents a CpG dinucleotide"
  misc_feature (61)..(61): /note="Nucleotide may be methylated to form 5-methylcytosine"
tgacacaagtgactctattttgaatcatacaacttccaggacatgaacattaattgaacacgttcatcacaaggacaagattcgttttaagtccagttaacaatgcaactgactcctccaga

SEQ ID NO: 9477 - DNA, 122 bp, Homo sapiens
  misc_feature (61)..(62): /note="This region represents a CpG dinucleotide"
  misc_feature (61)..(61): /note="Nucleotide may be methylated to form 5-methylcytosine"
ggaacagtcaatgagtcaacagcctgtctgcatgggtaccttctgtattgttcaccttcacgcatggagtaaggcctgatctaaaaactaccaccagcccgaagccatccctggcagagaaa

SEQ ID NO: 9478 - DNA, 122 bp, Homo sapiens
  misc_feature (61)..(62): /note="This region represents a CpG dinucleotide"
  misc_feature (61)..(61): /note="Nucleotide may be methylated to form 5-methylcytosine"
ttcactcctgaagctagcgagaccctgaacccaccagaaggaagaaactccgaaaacatccgaaaataagaaggaacaaactccggacacgcctcctttaagaactgtaatactcactgcga

SEQ ID NO: 9479 - DNA, 122 bp, Homo sapiens
  misc_feature (61)..(62): /note="This region represents a CpG dinucleotide"
  misc_feature (61)..(61): /note="Nucleotide may be methylated to form 5-methylcytosine"
ttcactatttaaaagttttatttttcttatatcaggcctagaagcaacttccacatcagacgcactgtttacaaaaaaaaaaaaaaaaaaaaaaaaggtcccataaagccacaggtcctctg

SEQ ID NO: 9480 - DNA, 122 bp, Homo sapiens
  misc_feature (61)..(62): /note="This region represents a CpG dinucleotide"
  misc_feature (61)..(61): /note="Nucleotide may be methylated to form 5-methylcytosine"
ccacaagtgattaaacatggagtgaccacatgactcagcaattccactctgaggtatgtacgcaagagaaccgaaaacatcacgtcctcaatgtgtgcaaggctccccgattcacacctcca

SEQ ID NO: 9481 - DNA, 122 bp, Homo sapiens
  misc_feature (61)..(62): /note="This region represents a CpG dinucleotide"
  misc_feature (61)..(61): /note="Nucleotide may be methylated to form 5-methylcytosine"
acagctttgctgtttgctagctttgtgacctcaagcaagttactgaaattcctgtccctccgttactgcatccataaaagggcagttgcaaaactagtacctgcctcatcagggtgttgtgg

SEQ ID NO: 9482 - DNA, 122 bp, Homo sapiens
  misc_feature (61)..(62): /note="This region represents a CpG dinucleotide"
  misc_feature (61)..(61): /note="Nucleotide may be methylated to form 5-methylcytosine"
tcagcggcggtggcttccgtcttaaaggggccgcggcggccgggggaggaggaggtgggacgccccgcggcctacgctcctggcctccccgccttggcctggccgtttaaccgattctttcg

SEQ ID NO: 9483 - DNA, 122 bp, Homo sapiens
  misc_feature (61)..(62): /note="This region represents a CpG dinucleotide"
  misc_feature (61)..(61): /note="Nucleotide may be methylated to form 5-methylcytosine"
ttatttcttttcagttaatgattgaattcattgagcccttactaggtggtgagcactgtccgaggtgctgaaggaagagacaaagataggattactgtatctcagaagcttatattttagag

SEQ ID NO: 9484 - DNA, 122 bp, Homo sapiens
  misc_feature (61)..(62): /note="This region represents a CpG dinucleotide"
  misc_feature (61)..(61): /note="Nucleotide may be methylated to form 5-methylcytosine"
ggagggcgtcccgttagaatgacagggcttttgcaaaagtctgacacccgtggcacagagcgccccagatatggagggtttcacaggtaggtatacttcagaagaaatttcctgacttgaat

SEQ ID NO: 9485 - DNA, 122 bp, Homo sapiens
  misc_feature (61)..(62): /note="This region represents a CpG dinucleotide"
  misc_feature (61)..(61): /note="Nucleotide may be methylated to form 5-methylcytosine"
cagaaaaacagaactctatctactcttacaaaaacttcccaaatagaagttaaatataaacgtagagcttctagtcgtatactatttcatgaactgaggttaaagagggtagagttaactga

SEQ ID NO: 9486 - DNA, 122 bp, Homo sapiens
  misc_feature (61)..(62): /note="This region represents a CpG dinucleotide"
  misc_feature (61)..(61): /note="Nucleotide may be methylated to form 5-methylcytosine"
gctggactgaaggggtcccgagtgggacggggggctcggcgggaagtttacctggtgccgcgggcggcccacgatggacgggaagacagcgcggggcgcgtcatcgcccgcaaagccggcct

SEQ ID NO: 9487 - DNA, 122 bp, Homo sapiens
  misc_feature (61)..(62): /note="This region represents a CpG dinucleotide"
  misc_feature (61)..(61): /note="Nucleotide may be methylated to form 5-methylcytosine"
caaagcaggctaaggaaacaatggtcggcattgtttttccaagtctttctccaatccctccgctggcatggaaaccttccaggcctctctccaatcagggccacaccctcaccagtgctatg

SEQ ID NO: 9488 - DNA, 122 bp, Homo sapiens
  misc_feature (61)..(62): /note="This region represents a CpG dinucleotide"
  misc_feature (61)..(61): /note="Nucleotide may be methylated to form 5-methylcytosine"
ttcgagctgagtggcaaaaatactgctaaggtcaacgttctgaaggaggcaaaacccacacgcagaaccagccataggcctgtcaacaaggcgagatgttatcattgctcatgtgctgggtc

SEQ ID NO: 9489 - DNA, 122 bp, Homo sapiens
  misc_feature (61)..(62): /note="This region represents a CpG dinucleotide"
  misc_feature (61)..(61): /note="Nucleotide may be methylated to form 5-methylcytosine"
ttctgggccttcccagacaaaagccagagacccggagcctctttctgagaaggaaccgggcgtccccaagatttcctctagccgagtcccctgggtcccccgaggaccgggacagctctggt

SEQ ID NO: 9490 - DNA, 122 bp, Homo sapiens
  misc_feature (61)..(62): /note="This region represents a CpG dinucleotide"
  misc_feature (61)..(61): /note="Nucleotide may be methylated to form 5-methylcytosine"
cccccacccccagaatgaaactgatcacacaacatggcttctccccagaatgaaactgatcgtaacatggcttccctgagggcaaatatctacatgagacaaggagcaagtgtgatgaaatc

SEQ ID NO: 9491 - DNA, 122 bp, Homo sapiens
  misc_feature (61)..(62): /note="This region represents a CpG dinucleotide"
  misc_feature (61)..(61): /note="Nucleotide may be methylated to form 5-methylcytosine"
ctgcaatctagtaggtggtgattaagtgtcattgctgattggtgggctcttgctcagccacgtggttcctttttatttcctcatgtttgcagccctctccctttcagtgttctgagagcatg

SEQ ID NO: 9492 - DNA, 122 bp, Homo sapiens
  misc_feature (61)..(62): /note="This region represents a CpG dinucleotide"
  misc_feature (61)..(61): /note="Nucleotide may be methylated to form 5-methylcytosine"
cttgtccttgtccttgggataacctccttaatgtgcctgacaaagctctgtctctgttggcgtctgctaatttctccagccccatctgttggcactgctccctcagcccatgccaatattat

SEQ ID NO: 9493 - DNA, 122 bp, Homo sapiens
  misc_feature (61)..(62): /note="This region represents a CpG dinucleotide"
  misc_feature (61)..(61): /note="Nucleotide may be methylated to form 5-methylcytosine"
tctagccttctctaatgtagccaggaatgattaacaaagttgtcatggtaatttgttcatcggtgttatgacacttatttgtgtgtcttatgatatgactcatatttgtgtgtattcccttt

SEQ ID NO: 9494 - DNA, 122 bp, Homo sapiens
  misc_feature (61)..(62): /note="This region represents a CpG dinucleotide"
  misc_feature (61)..(61): /note="Nucleotide may be methylated to form 5-methylcytosine"
tgcttctggttccattcaatttaaaccacctactgggtgcttaatagtcttggccgggtgcgtggcacacgcctataatcccagcactttgggaggccgaggtgggtggatcacctgaggtc

SEQ ID NO: 9495 - DNA, 122 bp, Homo sapiens
  misc_feature (61)..(62): /note="This region represents a CpG dinucleotide"
  misc_feature (61)..(61): /note="Nucleotide may be methylated to form 5-methylcytosine"
aaggaatactagtatgagagagaagtgagacggagaaggtaaaccagccaataaagggtgcgtcatgataccctcccaatcatagtggaaggctagaatttaatcctacaggagaattcgag

SEQ ID NO: 9496 - DNA, 122 bp, Homo sapiens
  misc_feature (61)..(62): /note="This region represents a CpG dinucleotide"
  misc_feature (61)..(61): /note="Nucleotide may be methylated to form 5-methylcytosine"
aggctttgactaacatccatgtcacacagaacttaaggagctctgagttcacaaaagccacgtcagacaaatgagcatgttgggaaatgaggtacatacagcctcattaggaaaaaaaaaca

SEQ ID NO: 9497 - DNA, 122 bp, Homo sapiens
  misc_feature (61)..(62): /note="This region represents a CpG dinucleotide"
  misc_feature (61)..(61): /note="Nucleotide may be methylated to form 5-methylcytosine"
tttacctattcctgtgataacagtatctcagttttcctttgtggaaccacccacgtctcacgctccattcatgcagttccatgaggctgacctcacccatgggctccaggagtggaagtttt

SEQ ID NO: 9498 - DNA, 122 bp, Homo sapiens
  misc_feature (61)..(62): /note="This region represents a CpG dinucleotide"
  misc_feature (61)..(61): /note="Nucleotide may be methylated to form 5-methylcytosine"
cttttttccttcccaattttctaaaaagaacgtgctacttttgtaatcagaaaaatgacacgttaagaaaggagggaggagtttattttatgcagtttaaaacatatattacatatgtaaaa

SEQ ID NO: 9499 - DNA, 122 bp, Homo sapiens
  misc_feature (61)..(62): /note="This region represents a CpG dinucleotide"
  misc_feature (61)..(61): /note="Nucleotide may be methylated to form 5-methylcytosine"
taggtgaggacaggcaattcaggcatttcctgcatttcccaagaccgccctggcctgccacgcccctataatgtgcctttaaaagcccaagaccgtcgctaggcacagacggaagtgactgg

SEQ ID NO: 9500 - DNA, 122 bp, Homo sapiens
  misc_feature (61)..(62): /note="This region represents a CpG dinucleotide"
  misc_feature (61)..(61): /note="Nucleotide may be methylated to form 5-methylcytosine"
gatgctcctttcctccaggtaccagcagaaagcaggcgttttctcatgtgggaaagatgccggcccccgctgtttggggtggaaatcctctaacccgctgggcctgtgcgccagggctgagc

SEQ ID NO: 9501 - DNA, 122 bp, Homo sapiens
  misc_feature (61)..(62): /note="This region represents a CpG dinucleotide"
  misc_feature (61)..(61): /note="Nucleotide may be methylated to form 5-methylcytosine"
atcagcgtgtatacgttcatcttccaccttcccttatttgtcacgactttacaacgccaccgagttgatgtgtcaatctgcttctgaaatgctgctcgctgaggctttgtttgctgctgatc

SEQ ID NO: 9502 - DNA, 122 bp, Homo sapiens
  misc_feature (61)..(62): /note="This region represents a CpG dinucleotide"
  misc_feature (61)..(61): /note="Nucleotide may be methylated to form 5-methylcytosine"
cgtgtgcagagttgtgaggctcctctgctgcgaactgcccattccagccttgctgtggaacgactcgccttctgtgggctggtgacacatatcctcacaaaggctgtgttgtcactcgtgtg

SEQ ID NO: 9503 - DNA, 122 bp, Homo sapiens
  misc_feature (61)..(62): /note="This region represents a CpG dinucleotide"
  misc_feature (61)..(61): /note="Nucleotide may be methylated to form 5-methylcytosine"
ttcttattcttatttttatttatcattattagtattatttttttaacagtcttgccctgtcgcccaggctggagtgcaatggcaaaatcttggctcactgcaacctcagcctcctgggttca

SEQ ID NO: 9504 - DNA, 122 bp, Homo sapiens
  misc_feature (61)..(62): /note="This region represents a CpG dinucleotide"
  misc_feature (61)..(61): /note="Nucleotide may be methylated to form 5-methylcytosine"
aagtccacaaatttctcttttacactctggaaagtaaaaccgtactctgccaagtccaggcggatctgaaggggaatatgcacactgctattttgttgttagagagagatttgtactcagtt

SEQ ID NO: 9505 - DNA, 122 bp, Homo sapiens
  misc_feature (61)..(62): /note="This region represents a CpG dinucleotide"
  misc_feature (61)..(61): /note="Nucleotide may be methylated to form 5-methylcytosine"
cttcagtttgtcaaagtggacaaagcctacgacaactgccagtaccagctactaggcatccgcagtctttccagttggtggtactggaggtccctacccaggatttccgtggattccaaggg

SEQ ID NO: 9506 - DNA, 122 bp, Homo sapiens
  misc_feature (61)..(62): /note="This region represents a CpG dinucleotide"
  misc_feature (61)..(61): /note="Nucleotide may be methylated to form 5-methylcytosine"
gtgtgtgtttgctttcctttttctgtgaattacctgttggtgtgcaaagacagctgtttacgtggttctctagccagactttccagggcacttcctggctgtgtgaacttgaactaattcct

SEQ ID NO: 9507 - DNA, 122 bp, Homo sapiens
  misc_feature (61)..(62): /note="This region represents a CpG dinucleotide"
  misc_feature (61)..(61): /note="Nucleotide may be methylated to form 5-methylcytosine"
gccacactcatttgttcatccatgattgcttttgcactacagtggcagagttgaataccacgcagactatggtagcccacaaagcctaattactatctgatcctatacagaaaaagtttgct

SEQ ID NO: 9508 - DNA, 122 bp, Homo sapiens
  misc_feature (61)..(62): /note="This region represents a CpG dinucleotide"
  misc_feature (61)..(61): /note="Nucleotide may be methylated to form 5-methylcytosine"
agctcccaaacaagaattttaacttgaattttcaggtttggttgtctaccctgctcatgccgagttcagactgagggtctgtgataaattaaagtcactgaaattattaaattaggaacctg

SEQ ID NO: 9509 - DNA, 122 bp, Homo sapiens
  misc_feature (61)..(62): /note="This region represents a CpG dinucleotide"
  misc_feature (61)..(61): /note="Nucleotide may be methylated to form 5-methylcytosine"
gacttttcaaagggattatacctaaatccaataaagcctctggctccagctgccaatttgcggtaatacagccaatagagaaatgtgttaaactgtatcaagagcaaaatccagactgtgag

SEQ ID NO: 9510 - DNA, 122 bp, Homo sapiens
  misc_feature (61)..(62): /note="This region represents a CpG dinucleotide"
  misc_feature (61)..(61): /note="Nucleotide may be methylated to form 5-methylcytosine"
gacttccaccgccattcgttcattcattcattcatccactcaacaaataaggagcagctgcgttccaggcgctggttgtggctgtggcagggtgcagggagcagaagtacgcggtgagacgg

SEQ ID NO: 9511 - DNA, 122 bp, Homo sapiens
  misc_feature (61)..(62): /note="This region represents a CpG dinucleotide"
  misc_feature (61)..(61): /note="Nucleotide may be methylated to form 5-methylcytosine"
tttcacgtctcatgtatttatatttgtttacaaataaagagttacttatttgcaaaatgccgtatctttaatacttgcttacatgtgattttgggaattcttttggaaccagtttttgttct

SEQ ID NO: 9512 - DNA, 122 bp, Homo sapiens
  misc_feature (61)..(62): /note="This region represents a CpG dinucleotide"
  misc_feature (61)..(61): /note="Nucleotide may be methylated to form 5-methylcytosine"
gagggcggagcaggatctccctacctctgagctcttagaggcggatgatgggaaaatcgacgctgggaaaacggagcccagttggaagattaacccaatttggaaaattgacacagagaaaa

SEQ ID NO: 9513 - DNA, 122 bp, Homo sapiens
  misc_feature (61)..(62): /note="This region represents a CpG dinucleotide"
  misc_feature (61)..(61): /note="Nucleotide may be methylated to form 5-methylcytosine"
tatagtggttcatcatatcaatcttgccttatactatcacgtggaatgagttttctacaccgagtgctaacatttctcaaccccaacctcaaatctgtgaagctaaccaggttccctaatag

SEQ ID NO: 9514 - DNA, 122 bp, Homo sapiens
  misc_feature (61)..(62): /note="This region represents a CpG dinucleotide"
  misc_feature (61)..(61): /note="Nucleotide may be methylated to form 5-methylcytosine"
tggggtgtgccaattctatggtcctactggaggctggccaatgttgactgaagacaagaacgcccaaccttgcaatagaaaccctgctgtgctgttttcctggatggtctccacaagccccg

SEQ ID NO: 9515 - DNA, 122 bp, Homo sapiens
  misc_feature (61)..(62): /note="This region represents a CpG dinucleotide"
  misc_feature (61)..(61): /note="Nucleotide may be methylated to form 5-methylcytosine"
aaagagtcacacatgagctttgttccacagcaaagcatagtccagcaatgccatagtacccgtctctttgccactgtgcatgatgagtcaggcacacatcacctcgaggcccctcaggagaa

SEQ ID NO: 9516 - DNA, 122 bp, Homo sapiens
  misc_feature (61)..(62): /note="This region represents a CpG dinucleotide"
  misc_feature (61)..(61): /note="Nucleotide may be methylated to form 5-methylcytosine"
gaaaacaacccggccagagagtcaggggacggccaccagatggccctgtggaccgccgcccgacccccgagcaagccgtgtgccccgagggcccgacccaagatcacacagctctctgccac

SEQ ID NO: 9517 - DNA, 122 bp, Homo sapiens
  misc_feature (61)..(62): /note="This region represents a CpG dinucleotide"
  misc_feature (61)..(61): /note="Nucleotide may be methylated to form 5-methylcytosine"
aagccctactatgtttttaaatagcaagtgtaagctcagtgctagagtggatatacacaccgcatgttttcatatgtggcacttttatgtatcatgttgggttattgttctagactggactg

SEQ ID NO: 9518 - DNA, 122 bp, Homo sapiens
  misc_feature (61)..(62): /note="This region represents a CpG dinucleotide"
  misc_feature (61)..(61): /note="Nucleotide may be methylated to form 5-methylcytosine"
cccacggtcctctgactacaggtgtgagccatcatgcccggccccggggcgctggtgtgacgttgggatcccatggtcctctgactacaggtgtgagccatcatgcccggccccggggcgcg

SEQ ID NO: 9519 - DNA, 122 bp, Homo sapiens
  misc_feature (61)..(62): /note="This region represents a CpG dinucleotide"
  misc_feature (61)..(61): /note="Nucleotide may be methylated to form 5-methylcytosine"
ttcctcatttttagcttatctcagggttgtaaagatttttgtttttcctctccaatggtgcgactttatatgcttagtcataatggtggttgggcaaggagtcagttttgttgtctccatag

SEQ ID NO: 9520 - DNA, 122 bp, Homo sapiens
  misc_feature (61)..(62): /note="This region represents a CpG dinucleotide"
  misc_feature (61)..(61): /note="Nucleotide may be methylated to form 5-methylcytosine"
ttttcccctgagatgtgtctagttcaaatatgcccacggggtcaccctctagacatttagcgtgggaaaggaaccaccctgtacacaaatagcacaaattatagcacagaaactgcagatgg

SEQ ID NO: 9521 - DNA, 122 bp, Homo sapiens
  misc_feature (61)..(62): /note="This region represents a CpG dinucleotide"
  misc_feature (61)..(61): /note="Nucleotide may be methylated to form 5-methylcytosine"
aaaaggcagtgtgggtgttcccactgggtcctcctgtgtctgctcatttttcctgcccaacgagagtggccaggacatactcaagcctcctccagctttccccaatcatcaagtgcattcca

SEQ ID NO: 9522 - DNA, 122 bp, Homo sapiens
  misc_feature (61)..(62): /note="This region represents a CpG dinucleotide"
  misc_feature (61)..(61): /note="Nucleotide may be methylated to form 5-methylcytosine"
ttttttcctttttgtcttttattgagacagggtttcgcccttttacctaggctggagtgccgaggtgtgatctcagctcactgcaacctctgcctcctgggctcaagtgatcctctcacttc

SEQ ID NO: 9523 - DNA, 122 bp, Homo sapiens
  misc_feature (61)..(62): /note="This region represents a CpG dinucleotide"
  misc_feature (61)..(61): /note="Nucleotide may be methylated to form 5-methylcytosine"
taggtcaacaacagttttaccaaacattttgccacagcataattatgttctccagtttcccgactcacaatatttgtgaagtttccatatgcaactttacccatgttacacataatcactgt

SEQ ID NO: 9524 - DNA, 122 bp, Homo sapiens
  misc_feature (61)..(62): /note="This region represents a CpG dinucleotide"
  misc_feature (61)..(61): /note="Nucleotide may be methylated to form 5-methylcytosine"
gcgtcaaaatgtgcagcctcagatgctgtccctcccaccttcaaaagggcagttgatgaacgactcttcagggtaattgcaatttcatggatcaggaggtgtagccagttcacatttttttc

SEQ ID NO: 9525 - DNA, 122 bp, Homo sapiens
  misc_feature (61)..(62): /note="This region represents a CpG dinucleotide"
  misc_feature (61)..(61): /note="Nucleotide may be methylated to form 5-methylcytosine"
ggtttttgttttgtctaattttaagctctcggctgtgcatggcagaggcaaacttgaagacgcaagggtcagtgagcagggcctttatccaggtatctcaaatatctcccaaccctgattaa

SEQ ID NO: 9526 - DNA, 122 bp, Homo sapiens
  misc_feature (61)..(62): /note="This region represents a CpG dinucleotide"
  misc_feature (61)..(61): /note="Nucleotide may be methylated to form 5-methylcytosine"
gccttactattgtgtgttgcacattcaaccccagcttgtgtgctgacacaaacaaataaacgtgatcataacggttgaaatgtagttagaaacacaattgagaacatctgtattgtaagcag

SEQ ID NO: 9527 - DNA, 122 bp, Homo sapiens
  misc_feature (61)..(62): /note="This region represents a CpG dinucleotide"
  misc_feature (61)..(61): /note="Nucleotide may be methylated to form 5-methylcytosine"
tgttttatgtgggttaatcatgtctccccaagtaaattctaaaatcctagaggcaagagccgtatctcaggtgtgtgaaccccactcacctgtagagcctagttcattgcaattactcaata

SEQ ID NO: 9528 - DNA, 122 bp, Homo sapiens
  misc_feature (61)..(62): /note="This region represents a CpG dinucleotide"
  misc_feature (61)..(61): /note="Nucleotide may be methylated to form 5-methylcytosine"
ccaggtagccatctccatggaagtccagagtttccagagctgctgggtggtgacttcttccgttaagctctaaccttggggagggcaggagatgtcatcaaaatttgtttagttggttacag

SEQ ID NO: 9529 - DNA, 122 bp, Homo sapiens
  misc_feature (61)..(62): /note="This region represents a CpG dinucleotide"
  misc_feature (61)..(61): /note="Nucleotide may be methylated to form 5-methylcytosine"
gcacaactggcctctactcgcgcacctggcctctactggtgcccggcctctactcgtgcccggcctctatttgcacatctagcctctactcgtgtccggcctctacctgcacacccggcctc

SEQ ID NO: 9530 - DNA, 122 bp, Homo sapiens
  misc_feature (61)..(62): /note="This region represents a CpG dinucleotide"
  misc_feature (61)..(61): /note="Nucleotide may be methylated to form 5-methylcytosine"
ttacaggcctgacccactgtgcccagccttaaaattcttttaattatatacttagatgtacgttttatatttatatatgtattgaaattatatatttcataactacctgtattcagtgtaaa

SEQ ID NO: 9531 - DNA, 122 bp, Homo sapiens
  misc_feature (61)..(62): /note="This region represents a CpG dinucleotide"
  misc_feature (61)..(61): /note="Nucleotide may be methylated to form 5-methylcytosine"
tctgtctccctcacttacatagcttccaaaatgccaccatatgtgattactaagcaggagcgtgaaagaactgcaaggttctgagacaaacctcagacactgacatttggaaaacccctaat

SEQ ID NO: 9532 - DNA, 122 bp, Homo sapiens
  misc_feature (61)..(62): /note="This region represents a CpG dinucleotide"
  misc_feature (61)..(61): /note="Nucleotide may be methylated to form 5-methylcytosine"
aggctaattgaccaagactccaagaaacattttttctagtcaatcaaggtcaaaacttaacgtgcttgtttatattgggggaatgtgcatataattacatatgtgttatgtatgtttattta

SEQ ID NO: 9533 - DNA, 122 bp, Homo sapiens
  misc_feature (61)..(62): /note="This region represents a CpG dinucleotide"
  misc_feature (61)..(61): /note="Nucleotide may be methylated to form 5-methylcytosine"
acaaagtatatatattttggaaaaaaaattaaaactatgtattttacctttctaccacatcgcagttcagaccagccacattccatgcacccagtagccacaggtggccaatagctgccaca

SEQ ID NO: 9534 - DNA, 122 bp, Homo sapiens
  misc_feature (61)..(62): /note="This region represents a CpG dinucleotide"
  misc_feature (61)..(61): /note="Nucleotide may be methylated to form 5-methylcytosine"
ctcggggaaatatagaggcgccacgcggggaaggcctgcggcgctgtgaggcaggctgggcggggctgtgacgtcacacaaggcgccgtcccggagcgaccacccaggctggggcacgtggg

SEQ ID NO: 9535 - DNA, 122 bp, Homo sapiens
  misc_feature (61)..(62): /note="This region represents a CpG dinucleotide"
  misc_feature (61)..(61): /note="Nucleotide may be methylated to form 5-methylcytosine"
ctcttcatgttttcctaggaaacctttgcccgagcaaagacatgggtgaaggaactacagcgacaggccagtcctagcatcgttattgccctggcagggaacaaagctgacctggccaacaa

SEQ ID NO: 9536 - DNA, 122 bp, Homo sapiens
  misc_feature (61)..(62): /note="This region represents a CpG dinucleotide"
  misc_feature (61)..(61): /note="Nucleotide may be methylated to form 5-methylcytosine"
ctttctgaaaagttcacttacaacatacacagaatgaaaaacacacgatgccccaactctcgccttcctagtgagttggttcaggggcctggatgttgtcaaatattgagatctttagaaat

SEQ ID NO: 9537 - DNA, 122 bp, Homo sapiens
  misc_feature (61)..(62): /note="This region represents a CpG dinucleotide"
  misc_feature (61)..(61): /note="Nucleotide may be methylated to form 5-methylcytosine"
ggcagtttatctctctaagagcatcccactcccggtgatacgcccagctctgacacatcacgcacgattgttattcatcatctggtcactgggtttaaggcacagctcagccacttattaac

SEQ ID NO: 9538 - DNA, 122 bp, Homo sapiens
  misc_feature (61)..(62): /note="This region represents a CpG dinucleotide"
  misc_feature (61)..(61): /note="Nucleotide may be methylated to form 5-methylcytosine"
ttgtcccattttacaaatggcgagttctctgtttctagtcagtaaataatcaagaggagccgggatcaagaacccagtccacctagctccagaggcaatgttcttatggcttcagtgacatg

SEQ ID NO: 9539 - DNA, 122 bp, Homo sapiens
  misc_feature (61)..(62): /note="This region represents a CpG dinucleotide"
  misc_feature (61)..(61): /note="Nucleotide may be methylated to form 5-methylcytosine"
agaatagggagttatttttaatgggtacaaagtttcagttttgcatgatgaaaagagttacgaagatgaatgggactgatgtttgcacaacactatgaatgtacttaatacctctgaaatgt

SEQ ID NO: 9540 - DNA, 122 bp, Homo sapiens
  misc_feature (61)..(62): /note="This region represents a CpG dinucleotide"
  misc_feature (61)..(61): /note="Nucleotide may be methylated to form 5-methylcytosine"
aattttgcgtaatgaactggaaaacaatagcttccttattcaggttgatgagtcaacagacgttaccaataaatatcactgggtagcactgggaagatctgtaagtaatgatgaatctcaag

SEQ ID NO: 9541 - DNA, 122 bp, Homo sapiens
  misc_feature (61)..(62): /note="This region represents a CpG dinucleotide"
  misc_feature (61)..(61): /note="Nucleotide may be methylated to form 5-methylcytosine"
tagcaagtccagattggaaggcaggctcagccagctcactgtattgcccagagcccacagcggtggccaggacaccccctcccctcctggggccccttcccagggatggggcatggaaggga

SEQ ID NO: 9542 - DNA, 122 bp, Homo sapiens
  misc_feature (61)..(62): /note="This region represents a CpG dinucleotide"
  misc_feature (61)..(61): /note="Nucleotide may be methylated to form 5-methylcytosine"
ttagctgggagggaccagcaccttaattctctcacactactgcataaaaatagaagttatcggctgggagcagtgcctcacacctgtaatcccagcactttgggaggctgaggcgggcggat

SEQ ID NO: 9543 - DNA, 122 bp, Homo sapiens
  misc_feature (61)..(62): /note="This region represents a CpG dinucleotide"
  misc_feature (61)..(61): /note="Nucleotide may be methylated to form 5-methylcytosine"
gttctgttgcccaggctggagtacagtccccatctcggattctgggatcactgcaatctccgccgcccgggttcaagcgattctccatgttggctggtctcgaactcctgacctcaggttat

SEQ ID NO: 9544 - DNA, 122 bp, Homo sapiens
  misc_feature (61)..(62): /note="This region represents a CpG dinucleotide"
  misc_feature (61)..(61): /note="Nucleotide may be methylated to form 5-methylcytosine"
actttccaatctacagagcaccttcacatttaacatctcactggattattatgatggcaccgtgagctaaaacactgaggcactggcatcatggctaccaacagacatgaagaaactgaggc

SEQ ID NO: 9545 - DNA, 122 bp, Homo sapiens
  misc_feature (61)..(62): /note="This region represents a CpG dinucleotide"
  misc_feature (61)..(61): /note="Nucleotide may be methylated to form 5-methylcytosine"
cagctgtgattctcagtgtaaaatctttcagtttctaggtaaacaaagaatagtttctttcggggcatctaagggctgattgctgtttcctttgactgtgtattagacagagtgttttgggc

SEQ ID NO: 9546 - DNA, 122 bp, Homo sapiens
  misc_feature (61)..(62): /note="This region represents a CpG dinucleotide"
  misc_feature (61)..(61): /note="Nucleotide may be methylated to form 5-methylcytosine"
atatgttcaatgaccttgtttgtacatcttaaagctttaagtgcccaggaattccttctccggagttcacaaagggataatcttcaggttccttccttccttcctgcctttctcccttcttc

SEQ ID NO: 9547 - DNA, 122 bp, Homo sapiens
  misc_feature (61)..(62): /note="This region represents a CpG dinucleotide"
  misc_feature (61)..(61): /note="Nucleotide may be methylated to form 5-methylcytosine"
tgcccccaaccccagcacatcctgccctcccgtggcgccccctccacacactgttgcccacgcacacctgcctggtccccaggcagcagcttcccctgacacacattttccactgctgggcg

SEQ ID NO: 9548 - DNA, 122 bp, Homo sapiens
  misc_feature (61)..(62): /note="This region represents a CpG dinucleotide"
  misc_feature (61)..(61): /note="Nucleotide may be methylated to form 5-methylcytosine"
ctccaggagccccaaggacggcgaagggcagcctggagttggggggcgtcagcgagggcgcgggcaggggagagaggcgcccctggaagtggagccggcctggacagaggcagggttcggga

SEQ ID NO: 9549 - DNA, 122 bp, Homo sapiens
  misc_feature (61)..(62): /note="This region represents a CpG dinucleotide"
  misc_feature (61)..(61): /note="Nucleotide may be methylated to form 5-methylcytosine"
tgtcataagcagttttccacattgctacatggtcatcatcttattctaattgttgcacaacgttccaatgagtgaataatttaatcatcattaccctaatgtaagtcacttacatggttgct

SEQ ID NO: 9550 - DNA, 122 bp, Homo sapiens
  misc_feature (61)..(62): /note="This region represents a CpG dinucleotide"
  misc_feature (61)..(61): /note="Nucleotide may be methylated to form 5-methylcytosine"
aagagtgggcttagtgaatgggtggtcagaatgcatttacgtttttcattgaagccttgccgctatttccctgctgccttggatgatccaggaaactaagtgtttgaacagtgagctcactc

(The sequence listing continues in the following parts.)

1. An assay for predicting the presence or development of breast cancer in an individual, the assay comprising:
a. providing a sample which has been taken from the individual;
b. determining in DNA in the sample the methylation status of each CpG in a set of test CpGs selected from the panel of CpGs identified at nucleotide positions 61 to 62 in SEQ ID NOs 1 to 40,753;
c. deriving a breast cancer index value based on the methylation status of the test CpGs; and
d. predicting the presence or development of breast cancer in the individual based on the breast cancer index value;
wherein the assay is characterised as having an area under the curve (AUC) of 0.6 or more as determined by receiver operating characteristics (ROC).

2. An assay according to claim 1, wherein the sample from the individual is a sample from:
a. an anatomical site other than the breast, such as a cervical, vaginal, or preferably a cervicovaginal smear; or
b. the breast.

3. An assay according to claim 1 or 2, wherein the DNA from the sample is derived from an organ comprising epithelial cells.

4. An assay according to any one of claims 1 to 3, wherein the cancer is ductal carcinoma in situ; an invasive ductal carcinoma such as tubular type invasive ductal carcinoma (IDC), medullary type IDC, mucinous type IDC, papillary type IDC, cribriform type IDC; invasive lobular carcinoma, inflammatory breast cancer, lobular carcinoma in situ, male breast cancer, luminal A breast cancer, luminal B breast cancer, triple-negative/basal-like breast cancer, HER2-enriched breast cancer, normal-like breast cancer, Paget's Disease of the nipple, Phyllodes tumours of the breast, or metastatic breast cancer.

5. An assay according to any one of claims 1 to 4, wherein the step of determining the methylation status of each CpG in the set of test CpGs comprises determining methylation β-values for each one of the test CpGs.

6. An assay according to claim 5, wherein the step of deriving the breast cancer index value based on the methylation status of the test CpGs comprises:
a. providing a methylation β-value data set comprising the methylation β-values for each test CpG;
b. estimating an immune cell DNA fraction within the DNA provided from the sample; and
c. applying an algorithm to the methylation β-value data set that controls for the immune cell DNA fraction within the DNA provided from the sample to obtain the breast cancer index value.

7. An assay according to claim 6, wherein the breast cancer index value is termed Women's risk Identification for Breast Cancer Index (WID-BC-Index) and is calculated by an algorithm according to the following formula:
$$WID - BC - Index = {\sum }_{i = 1}^{n} \frac{μ - ( {a}_{i} + {b}_{i} ρ ) {β}_{i}}{σ}$$
wherein:
a. ρ∈[0,1] is the immune cell DNA fraction for the sample;
b. β₁, . . . , βₙ are methylation beta-values (between 0 and 1);
c. a₁, . . . , aₙ and b₁, bₙ are real valued coefficients;
d. μ and σ are real valued parameters used to scale the index; and
e. n refers to the number of CpGs in the set of test CpGs

8. An assay according to any one of claims 1 to 7, wherein the set of CpGs comprises at least 500 CpGs selected from the CpGs identified at nucleotide positions 61 to 62 in SEQ ID NOs 1 to 40,753, preferably wherein the assay is characterised as having an AUC of at least 0.73.

9. An assay according to claim 8, wherein the set of CpGs comprises at least the CpGs identified in SEQ ID NOs 1 to 500 and identified at nucleotide positions 61 to 62.

10. An assay according to any one of claims 1 to 7, wherein the set of CpGs comprises at least 1000 CpGs selected from the CpGs identified at nucleotide positions 61 to 62 in SEQ ID NOs 1 to 40,753, preferably wherein the assay is characterised as having an AUC of at least 0.77.

11. An assay according to claim 10, wherein the set of CpGs comprises at least the CpGs identified in SEQ ID NOs 1 to 1000 and identified at nucleotide positions 61 to 62.

12. An assay according to any one of claims 1 to 7, wherein the set of CpGs comprises at least 2000 CpGs selected from the CpGs identified at nucleotide positions 61 to 62 in SEQ ID NOs 1 to 40,753, preferably wherein the assay is characterised as having an AUC of at least 0.81.

13. An assay according to claim 12, wherein the set of CpGs comprises at least the CpGs identified in SEQ ID NOs 1 to 2000 and identified at nucleotide positions 61 to 62.

14. An assay according to any one of claims 1 to 7, wherein the set of CpGs comprises at least 10,000 CpGs selected from the CpGs identified at nucleotide positions 61 to 62 in SEQ ID NOs 1 to 40,753, preferably wherein the assay is characterised as having an AUC of at least 0.84.

15. An assay according to claim 14, wherein the set of CpGs comprises at least the CpGs identified in SEQ ID NOs 1 to 10,000 and identified at nucleotide positions 61 to 62.

16. An assay according to any one of claims 1 to 7, wherein the set of CpGs comprises at least the 40,753 CpGs identified in SEQ ID NOs 1 to 40,753 and identified at nucleotide positions 61 to 62, and further wherein the assay is characterised as having an AUC of at least 0.85.

17. An assay according to any one of claims 7 to 16, wherein the predicting of the presence or development of breast cancer in an individual is based on the WID-BC-Index.

18. An assay according to claim 17, wherein when the WID-BC-Index for the individual is about −0.235 or more, the individual is classified as having at least a low risk of harbouring breast cancer or a low risk of breast cancer development.

19. An assay according to claim 17, wherein when the WID-BC-Index for the individual is about −0.235 or more, the individual is classified as harbouring breast cancer, or wherein when the WID-BC-Index for the individual is less than about −0.235 the individual is classified as not harbouring breast cancer.

20. An assay according to claim 18 or 19, wherein the set of CpGs comprises at least 500 of the CpGs defined by SEQ ID NOs 1 to 40,753 and identified at nucleotide positions 61 to 62, and wherein the sensitivity is at least 58% and the specificity is at least 44%.

21. An assay according to claim 18 or 19, wherein the set of CpGs comprises at least the CpGs defined by SEQ ID NOs 1 to 500 and identified at nucleotide positions 61 to 62, and wherein the sensitivity is at least 85% and specificity is at least 52%.

22. An assay according to claim 18 or 19, wherein the set of CpGs comprises at least the CpGs defined by SEQ ID NOs 1 to 1000 and identified at nucleotide positions 61 to 62, and wherein the sensitivity is at least 88% and specificity is at least 49%.

23. An assay according to claim 18 or 19, wherein the set of CpGs comprises at least the CpGs defined by SEQ ID NOs 1 to 2000 and identified at nucleotide positions 61 to 62, and wherein the sensitivity is at least 94% and specificity is at least 51%.

24. An assay according to claim 17, wherein when the WID-BC-Index for the individual is about 0.090 or more, the individual is classified as having at least a moderate risk of harbouring breast cancer or a moderate risk of breast cancer development.

25. An assay according to claim 17, wherein when the WID-BC-Index for the individual is about 0.090 or more, the individual is classified as harbouring breast cancer, or wherein when the WID-BC-Index for the individual is less than about 0.090 the individual is classified as not harbouring breast cancer.

26. An assay according to claim 24 or 25, wherein the set of CpGs comprises at least 500 of the CpGs defined by SEQ ID NOs 1 to 40,753 and identified at nucleotide positions 61 to 62, and wherein the sensitivity is at least 35% and the specificity is at least 63%.

27. An assay according to claim 24 or 25, wherein the set of CpGs comprises at least the CpGs defined by SEQ ID NOs 1 to 500 and identified at nucleotide positions 61 to 62, and wherein the sensitivity is at least 63% and specificity is at least 69%.

28. An assay according to claim 24 or 25, wherein the set of CpGs comprises at least the CpGs defined by SEQ ID NOs 1 to 1000 and identified at nucleotide positions 61 to 62, and wherein the sensitivity is at least 68% and specificity is at least 73%.

29. An assay according to claim 24 or 25, wherein the set of CpGs comprises at least the CpGs defined by SEQ ID NOs 1 to 2000 and identified at nucleotide positions 61 to 62, and wherein the sensitivity is at least 69% and specificity is at least 78%.

30. An assay according to claim 17, wherein when the WID-BC-Index for the individual is about 0.587 or more, the individual is classified as having a high risk of harbouring breast cancer or a high risk of breast cancer development.

31. An assay according to claim 17, wherein when the WID-BC-Index for the individual is about 0.587 or more, the individual is classified as harbouring breast cancer, or wherein when the WID-BC-Index for the individual is less than about 0.587 the individual is classified as not harbouring breast cancer.

32. An assay according to claim 30 or 31, wherein the set of CpGs comprises at least 500 of the CpGs defined by SEQ ID NOs 1 to 40,753 and identified at nucleotide positions 61 to 62, and wherein the sensitivity is at least 24% and the specificity is at least 84%.

33. An assay according to claim 30 or 31, wherein the set of CpGs comprises at least the CpGs defined by SEQ ID NOs 1 to 500 and identified at nucleotide positions 61 to 62, and wherein the sensitivity is at least 26% and specificity is at least 93%.

34. An assay according to claim 30 or 31, wherein the set of CpGs comprises at least the CpGs defined by SEQ ID NOs 1 to 1000 and identified at nucleotide positions 61 to 62, and wherein the sensitivity is at least 29% and specificity is at least 95%.

35. An assay according to claim 30 or 31, wherein the set of CpGs comprises at least the CpGs defined by SEQ ID NOs 1 to 2000 and identified at nucleotide positions 61 to 62, and wherein the sensitivity is at least 33% and specificity is at least 94%.

36. An assay according to any one of claims 1 to 35, wherein the step of determining the methylation status of each CpG in the set of test CpGs comprises bisulphite converting the DNA.

37. An assay according to any one of claims 1 to 36, wherein the step of determining the methylation status of each CpG in the set of test CpGs comprises:
a. performing a sequencing step to determine the sequence of each CpG;
b. hybridising DNA to an array comprising probes capable of discriminating between methylated and non-methylated forms of the CpGs and applying a detection system to the array so as to determine the methylation status or β-value of each CpG; or
c. performing a PCR step using methylation-specific primers, wherein the methylation status of the CpG is determined by the presence or absence of a PCR product.

38. An assay according to any one of claims 1 to 37, wherein the assay further comprises:
a. determining in the sample from the individual the proportion of epithelial cells;
b. determining in the sample from the individual the proportion of fat cells; and/or
c. determining in the sample from the individual differentiation characteristics of non-fat cells.

39. An assay according to claim 38, wherein determining the proportion of epithelial and/or fat cells and/or determining differentiation characteristics of non-fat cells comprises performing a method comprising:
a. gene expression profiling;
b. non-coding RNA-profiling;
c. epigenome profiling;
d. DNA methylation profiling;
e. deriving a WID-BC-Index; and/or
f. immunohistochemistry; and
arriving at a determination based on the results of the method.

40. An array capable of discriminating between methylated and non-methylated forms of CpGs; the array comprising oligonucleotide probes specific for a methylated form of each CpG in a CpG panel and oligonucleotide probes specific for a non-methylated form of each CpG in the panel; wherein the panel consists of at least 500 CpGs selected from the CpGs identified in SEQ ID NOs 1 to 40,753.

41. An array according to claim 40, provided that the array is not an Infinium MethylationEPIC BeadChip array or an Infinium HumanMethylation450, and/or provided that the number of CpG-specific oligonucleotide probes of the array is 482,000 or less, 480,000 or less, 450,000 or less, 440,000 or less, 430,000 or less, 420,000 or less, 410,000 or less, or 400,000 or less.

42. An array according to claim 40 or 41, wherein the panel comprises any set of CpGs defined in the assays of any one of claims 8 to 16.

43. An array according to any one of claims 40 to 42, further comprising one or more oligonucleotides comprising any set of CpGs defined in the assays of any one of claims 8 to 16, wherein the one or more oligonucleotides are hybridized to corresponding oligonucleotide probes of the array.

44. A hybridized array, wherein the array is obtainable by hybridizing to an array according to any one of claims 40 to 43 a group of oligonucleotides comprising any set of CpGs defined in the assays of any one of claims 8 to 16.

45. A process for making the hybridized array according to claim 44, comprising contacting an array according to claims 40 to 43 with a group of oligonucleotides comprising any set of CpGs defined in the assays of any one of claims 8 to 16.

46. A method of treating breast cancer in an individual comprising:
a. predicting the presence or development of breast cancer in an individual by performing the assay of any one of claims 1 to 39;
b. stratifying the individual according to their risk of harbouring breast cancer or according to their risk of breast cancer development; and
c. administering one or more treatments to the individual based on their risk stratification or based on whether the individual is classified as harbouring breast cancer or not.

47. A method according to claim 46, wherein the individual is stratified as having a low risk of harbouring breast cancer or a low risk of breast cancer development and the individual is subjected to treatment according to their risk, e.g. intensified screening.

48. A method according to claim 47, wherein the intensified screening comprises one or more mammography scans and/or breast MRI scans.

49. A method according to claim 46, wherein the individual is stratified as having a moderate risk of harbouring breast cancer or a moderate risk of breast cancer development and the individual is subjected to treatment according to their risk, e.g. intensified screening and/or administration of one or more doses of one or more of Mifeprestone, Aromatase inhibitors, Denosumab, “selective estrogen modulators” (SERMs) and “selective progesterone receptor modulators” (SPRMs).

50. A method according to claim 49, wherein the intensified screening comprises one or more mammography scans and/or breast MRI scans.

51. A method according to claim 46, wherein the individual is stratified as having a high risk of harbouring breast cancer or a high risk of breast cancer development and the individual is subjected to treatment according to their risk, e.g.:
a. intensified screening, optionally comprising one or mammography scans and/or breast MRI scans;
b. administration of one or more of Mifeprestone, Aromatase inhibitors, Denosumab, SERMs and SPRMs; and/or
c. bilateral mastectomy.

52. A method according to claim 46, wherein when the individual is classified as harbouring breast cancer, the individual is subjected to any one or more of the treatments defined by claims 47 to 51.

53. A method of monitoring the risk of an individual harbouring breast cancer or monitoring the risk of breast cancer development, the method comprising: (a) predicting the presence of breast cancer in an individual or predicting breast cancer development in an individual by performing the assay according to any one of claims 1 to 36 at a first time point; (b) predicting the presence of breast cancer in the individual or predicting breast cancer development in the individual by performing the assay according to any one of claims 1 to 39 at one or more further time points; and (c) monitoring any change in the individual's risk between time points.

54. A method according to claim 53, wherein the further time points are three monthly, six monthly, yearly or two yearly basis following an initial prediction.

55. A method according to claim 53 or 54, wherein the individual does not harbour breast cancer and harbours one or more genetic mutations that predispose the individual to an increased risk of developing breast cancer.

56. A method according to claim 55, wherein the individual harbours one or more mutations in a BRCA gene.

57. A method according to claims 53 to 56, wherein depending on the risk of the presence of breast cancer in the individual or risk of breast cancer development in the individual, one or more treatments are administered to the individual according to any one of claims 46 to 52.

58. A method according to claim 57, wherein the individual has an increased risk of breast cancer development and wherein one or more treatments are administered to the individual according to any one of claims 43 to 48 as a method of prophylaxis.

59. A method according to claim 58, wherein the one or more treatments administered to the individual comprises one or more doses of SPRMs.

60. A method according to claim 59, wherein the one or more doses of SPRMs comprises one or more doses of Mifepristone.

61. A method according to any one of claims 53 to 60, wherein the method further comprises:
a. determining the proportion of epithelial cells in the sample from the individual between any two or more time points and assessing if the proportion changes between time points;
b. determining the proportion of fat cells in the sample from the individual between any two or more time points and assessing if the proportion changes between time points; and/or
c. determining differentiation characteristics of non-fat cells in the sample from the individual between any two or more time points and assessing if the proportion changes between time points.

62. A method according to any one of claims 53 to 61, wherein:
a. an increase in the breast cancer index value and an increase in the proportion of epithelial cells; and/or
b. an increase in the breast cancer index value and a decrease in the proportion of fat cells; and/or
c. an increase in the breast cancer index value and an increase in differentiation of non-fat cells towards fat cells,
indicates a negative response to the one or more treatments.

63. A method according to claim 59, wherein changes are made to the one or more treatments if a negative response is identified.

64. A method according to any one of claims 53 to 61, wherein:
a. a decrease in the breast cancer index value and a decrease in the proportion of epithelial cells;
b. a decrease in the breast cancer index value and an increase in the proportion of fat cells; and/or
c. a decrease in the breast cancer index value and a decrease in differentiation of non-fat cells towards fat cells,
indicates a positive response to the one or more treatments.

65. A method according to claim 64, wherein changes are made to the one or more treatments if a positive response is identified.
